(19) United States
(12) Patent Application Publication
(10) Pub. No.: US 2025/0313840 A1
(43) Pub. Date: Oct. 9, 2025

(54) MUCIN-5B (MUC5B) TARGETED SIRNA AND ANTISENSE OLIGONUCLEOTIDES AND METHODS OF USE THEREOF

(71) Applicant: Vertex Pharmaceuticals Incorporated, Boston, MA (US)

(72) Inventor: Diego D'Astolfo, Boston, MA (US)

(73) Assignee: Vertex Pharmaceuticals Incorporated, Boston, MA (US)

(21) Appl. No.: 19/084,446

(22) Filed: Mar. 19, 2025

Related U.S. Application Data
(60) Provisional application No. 63/567,742, filed on Mar. 20, 2024.

(51) Int. Cl. C12N 15/113; A61P 11/00

(52) U.S. Cl. CPC C12N 15/113; A61P 11/00; C12N 2310/11; C12N 2310/14; C12N 2310/315; C12N 2310/321; C12N 2310/322; C12N 2310/3515; C12N 2320/32

(57) ABSTRACT

Disclosed herein are double stranded ribonucleic acids (dsRNAs) and synthetic antisense oligonucleotides (ASOs) for use in inhibiting the expression of MUC5B and in the treatment of a subject having a disease or disorder characterized by overexpression of MUC5B, including in subjects having lung disease or in a subject at risk of developing lung disease, for example, in a subject having or at risk of developing idiopathic pulmonary fibrosis.

### CROSS REFERENCE TO RELATED APPLICATIONS

[0001] This application claims priority to U.S. Provisional Application No. 63/567,742, filed Mar. 20, 2024, the disclosure of which is hereby incorporated by reference in its entirety.

### SEQUENCE LISTING

[0002] The instant application contains a “lengthy” Sequence Listing which has been submitted via DVD-R in lieu of a printed paper copy, and is hereby incorporated by reference in its entirety. Said DVD-R, recorded on Mar. 7, 2025, is labeled “CRF”, and contains one file, named 01245-0060-00PCT_generic_SL.xml, which is 170,611,341 bytes in size.

### INTRODUCTION AND SUMMARY

[0003] Pulmonary fibrosis (PF) is a disease that affects older adults and causes a decline in lung function, which can lead to a decreased quality of life and even death. The disease can be caused by various factors, including idiopathic (the most common type), connective-tissue disease-related, autoimmune, and exposure-related factors. A significant portion of PF cases are driven by the rs35705950-T mutation in the Mucin-5B (MUC5B) promoter, which is present in over 50% of patients with idiopathic pulmonary fibrosis (IPF) (50 k of 100 k in the US), rheumatoid-arthritis associated-ILD (10 k of 20K in the US), nonspecific interstitial pneumonia (10 k of 20 k), and chronic hypersensitivity pneumonitis (5 k of 10K in the US).

[0004] MUC5B is a member of the mucin family of proteins, which are highly glycosylated macromolecular components of mucus secretions. This family member is expressed in club cells in normal lung epithelium. The MUC5B protein is the major gel-forming mucin in mucus, which is secreted by submucosal glands, salivary glands, nasal mucosa, gallbladder, submucosal glands in the trachea, and esophagus. It is a major contributor to the lubricating and viscoelastic properties of whole saliva, normal lung mucus, and cervical mucus, and, in the lung, the MUC5B protein plays a key role in mucociliary transport and mucociliary clearance (MCC) and host defense responsible for trapping and clearing inhaled particles.

[0005] Increased expression of MUC5B is associated with the development of lung diseases, e.g., pulmonary fibrosis, cystic fibrosis, and/or chronic obstructive pulmonary disease (COPD). For example, mice overexpressing Muc5b exhibit increased mucosal depth, reduced ciliary beat frequency, and reduced mucociliary transport rate, and bleomycin-treated mice overexpressing Muc5b in distal airways and alveoli have decreased survival and increased lung fibrosis. Furthermore, increased MUC5B expression has been observed in the distal airways of subjects having IPF.

[0006] The genetic variation rs35705950-T results in abnormal MUC5B expression in small airways and alveoli epithelial cells. MUC5B is an essential large mucus glycoprotein that lubricates and protects epithelial cells, playing a crucial role in mucociliary clearance. An increased amount of MUC5B in the upper airway may protect against infections, but the de novo expression of MUC5B in the distal lung causes ER stress and cell injury.

[0007] Current therapies (e.g., Pirfenidone, Nintedanib) are mainly supportive and may slow the progression of the disease but have little impact on overall survival. There remains a need for additional and alternative effective gene editing strategies for treating lung diseases, e.g., pulmonary fibrosis, e.g., IPF; cystic fibrosis, and/or chronic obstructive pulmonary disease (COPD).

[0008] Provided herein are compositions that can selectively and effectively inhibit the expression of a target MUC5B gene and methods for treating lung diseases.

[0009] Accordingly, the following non-limiting embodiments are provided.

[0010] Embodiment 1. A double stranded ribonucleic acid (dsRNA) targeting Mucin-5B (MUC5B), wherein the dsRNA comprises a sense strand and an antisense strand forming a double stranded region, wherein the antisense strand comprises a region of complementarity to an mRNA encoding MUC5B, and wherein the antisense strand comprises a nucleotide sequence selected from SEQ ID NOs: 178-354.

[0011] Embodiment 2. The dsRNA of embodiment 1, wherein the sense strand comprises a nucleotide sequence selected from SEQ ID NOs: 1-177.

[0012] Embodiment 3. The dsRNA of any one of embodiments 1-2, wherein the sense and antisense strands are selected from any one of the sense and antisense pairs in Table 2 or Table 3.

[0013] Embodiment 4. A double stranded ribonucleic acid (dsRNA) targeting Mucin-5B (MUC5B), wherein the dsRNA comprises a sense strand and an antisense strand forming a double stranded region, wherein the antisense strand comprises a region of complementarity to an mRNA encoding MUC5B, and wherein the antisense strand comprises a nucleotide sequence differing in sequence by no more than 1 nucleotide from any one of SEQ ID NOs: 179-192, 194-328, and 332-354.

[0014] Embodiment 5. A double stranded ribonucleic acid (dsRNA) targeting Mucin-5B (MUC5B), wherein the dsRNA comprises a sense strand and an antisense strand forming a double stranded region, wherein the antisense strand comprises a region of complementarity to an mRNA encoding MUC5B, and wherein the antisense strand comprises a nucleotide sequence comprising at least 22 contiguous nucleotides differing in sequence by no more than 1 nucleotide from any one of SEQ ID NOs: 179-187, 189, 190, 192, 194-200, 202, 204-311, 313, 315-328, 332-334, and 336-354.

[0015] Embodiment 6. The dsRNA of embodiment 5, wherein the antisense strand comprises a nucleotide sequence comprising at least 22 contiguous nucleotides from any one of SEQ ID NOs: 179-187, 189, 190, 192, 194-200, 202, 204-311, 313, 315-328, 332-334, and 336-354.

[0016] Embodiment 7. A double stranded ribonucleic acid (dsRNA) targeting Mucin-5B (MUC5B), wherein the dsRNA comprises a sense strand and an antisense strand forming a double stranded region, wherein the antisense strand comprises a region of complementarity to an mRNA encoding MUC5B, and wherein the antisense strand comprises a nucleotide sequence comprising at least 21 contiguous nucleotides differing in sequence by no more than 1 nucleotide from any one of SEQ ID NOs: 181-187, 189, 190, 192, 194-200, 202, 204-229, 231-243, 246-310, 313, 315-328, 333-334, and 336-354.

[0017] Embodiment 8. The dsRNA of embodiment 7, wherein the antisense strand comprises a nucleotide sequence comprising at least 21 contiguous nucleotides from any one of SEQ ID NOs: 181-187, 189, 190, 192, 194-200, 202, 204-229, 231-243, 246-310, 313, 315-328, 333-334, and 336-354.

[0018] Embodiment 9. A double stranded ribonucleic acid (dsRNA) targeting Mucin-5B (MUC5B), wherein the dsRNA comprises a sense strand and an antisense strand forming a double stranded region, wherein the antisense strand comprises a region of complementarity to an mRNA encoding MUC5B, and wherein the antisense strand comprises a nucleotide sequence comprising at least 20 contiguous nucleotides differing in sequence by no more than 1 nucleotide from any one of SEQ ID NOs: 181-187, 190, 192, 194-200, 205-210, 212-229, 231-242, 246-249, 253-258, 260-266, 268-285, 287, 289-294, 296, 298-310, 315-328, 333-334, 336-346, 348, and 350-354.

[0019] Embodiment 10. The dsRNA of embodiment 9, wherein the antisense strand comprises a nucleotide sequence comprising at least 20 contiguous nucleotides from any one of SEQ ID NOs: 181-187, 190, 192, 194-200, 205-210, 212-229, 231-242, 246-249, 253-258, 260-266, 268-285, 287, 289-294, 296, 298-310, 315-328, 333-334, 336-346, 348, and 350-354.

[0020] Embodiment 11. A double stranded ribonucleic acid (dsRNA) targeting Mucin-5B (MUC5B), wherein the dsRNA comprises a sense strand and an antisense strand forming a double stranded region, wherein the antisense strand comprises a region of complementarity to an mRNA encoding MUC5B, and wherein the antisense strand comprises a nucleotide sequence comprising at least 19 contiguous nucleotides differing in sequence by no more than 1 nucleotide from any one of SEQ ID NOs: 181-187, 190, 192, 194-200, 205-210, 213, 215-228, 231-237, 239-242, 246-248, 253-258, 261-266, 268-269, 271, 273-285, 287, 289-294, 296, 298-303, 305-310, 315-328, 334, 336-338, 340-346, 348, and 350-354.

[0021] Embodiment 12. The dsRNA of embodiment 11, wherein the antisense strand comprises a nucleotide sequence comprising at least 19 contiguous nucleotides from any one of SEQ ID NOs: 181-187, 190, 192, 194-200, 205-210, 213, 215-228, 231-237, 239-242, 246-248, 253-258, 261-266, 268-269, 271, 273-285, 289-294, 296, 298-303, 305-310, 315-328, 334, 336-338, 340-346, 348, and 350-354.

[0022] Embodiment 13. A double stranded ribonucleic acid (dsRNA) targeting Mucin-5B (MUC5B), wherein the dsRNA comprises a sense strand and an antisense strand forming a double stranded region, wherein the antisense strand comprises a region of complementarity to an mRNA encoding MUC5B, and wherein the antisense strand comprises a nucleotide sequence comprising at least 18 contiguous nucleotides differing in sequence by no more than 1 nucleotide from any one of SEQ ID NOs: 181-187, 190, 192, 194-197, 205-210, 213, 215-228, 231-237, 239-242, 253-254, 261-266, 268-269, 271, 273-281, 283-285, 290, 292-294, 298-303, 305-310, 315-322, 324, 326-328, 334, 336-338, 340-346, and 351-354.

[0023] Embodiment 14. The dsRNA of embodiment 13, wherein the antisense strand comprises a nucleotide sequence comprising at least 18 contiguous nucleotides from any one of SEQ ID NOs: 181-187, 190, 192, 194-197, 205-210, 213, 215-228, 231-237, 239-242, 253-254, 261-266, 268-269, 271, 273-281, 283-285, 290, 292-294, 298-303, 305-310, 315-322, 324, 326-328, 334, 336-338, 340-346, and 351-354.

[0024] Embodiment 15. A double stranded ribonucleic acid (dsRNA) targeting Mucin-5B (MUC5B), wherein the dsRNA comprises a sense strand and an antisense strand forming a double stranded region, wherein the antisense strand comprises a region of complementarity to an mRNA encoding MUC5B, and wherein the antisense strand comprises a nucleotide sequence comprising at least 17 contiguous nucleotides differing in sequence by no more than 1 nucleotide from any one of SEQ ID NOs: 181-187, 190, 192, 194-197, 205-210, 215-228, 232, 234-237, 239-242, 253-254, 261-266, 268-269, 274, 276-278, 284-285, 290, 292-294, 298-303, 305-310, 315-322, 324, 326-328, 334, 336-338, 341-346, and 351-354.

[0025] Embodiment 16. The dsRNA of embodiment 15, wherein the antisense strand comprises a nucleotide sequence comprising at least 17 contiguous nucleotides from any one of SEQ ID NOs: 181-187, 190, 192, 194-197, 205-210, 215-228, 232, 234-237, 239-242, 253-254, 261-266, 268-269, 274, 276-278, 284-285, 290, 292-294, 298-303, 305-310, 315-322, 324, 326-328, 334, 336-338, 341-346, and 351-354.

[0026] Embodiment 17. A double stranded ribonucleic acid (dsRNA) targeting Mucin-5B (MUC5B), wherein the dsRNA comprises a sense strand and an antisense strand forming a double stranded region, wherein the antisense strand comprises a region of complementarity to an mRNA encoding MUC5B, and wherein the antisense strand comprises a nucleotide sequence comprising at least 16 contiguous nucleotides differing in sequence by no more than 1 nucleotide from any one of SEQ ID NOs: 181, 183-187, 190, 192, 194-197, 207-210, 215-228, 232, 234-237, 239-242, 253-254, 261-266, 268-269, 274, 276-278, 284-285, 293, 299, 301-303, 305-307, 315-321, 327, 334, 336-338, 341-346, and 351-354.

[0027] Embodiment 18. The dsRNA of embodiment 17, wherein the antisense strand comprises a nucleotide sequence comprising at least 16 contiguous nucleotides from any one of SEQ ID NOs: 181, 183-187, 190, 192, 194-197, 207-210, 215-228, 232, 234-237, 239-242, 253-254, 261-266, 268-269, 274, 276-278, 284-285, 293, 299, 301-303, 305-307, 315-321, 327, 334, 336-338, 341-346, and 351-354.

[0028] Embodiment 19. A double stranded ribonucleic acid (dsRNA) targeting Mucin-5B (MUC5B), wherein the dsRNA comprises a sense strand and an antisense strand forming a double stranded region, wherein the antisense strand comprises a region of complementarity to an mRNA encoding MUC5B, and wherein the antisense strand comprises a nucleotide sequence comprising at least 15 contiguous nucleotides differing in sequence by no more than 1 nucleotide from any one of SEQ ID NOs: 181, 183-187, 190, 192, 194-197, 207-210, 215-222, 224, 226-228, 234-237, 240-242, 253-254, 261-266, 268-269, 276-278, 284-285, 293, 299, 301-303, 315-317, 319, 321, 327, 334, 336-338, 341-346, and 351-354.

[0029] Embodiment 20. The dsRNA of embodiment 19, wherein the antisense strand comprises a nucleotide sequence comprising at least 15 contiguous nucleotides from any one of SEQ ID NOs: 181, 183-187, 190, 192, 194-197, 207-210, 215-222, 224, 226-228, 234-237, 240-242, 253-254, 261-266, 268-269, 276-278, 284-285, 293, 299, 301-303, 315-317, 319, 321, 327, 334, 336-338, 341-346, and 351-354.

[0030] Embodiment 21. A double stranded ribonucleic acid (dsRNA) targeting Mucin-5B (MUC5B), wherein the dsRNA comprises a sense strand and an antisense strand forming a double stranded region, wherein the antisense strand comprises a region of complementarity to an mRNA encoding MUC5B, and wherein the antisense strand comprises a nucleotide sequence comprising at least 15 contiguous nucleotides differing in sequence by no more than 2 nucleotides from any one of SEQ ID NOs: 185-187, 192, 194, 207-210, 216-222, 224, 226-228, 235-237, 240-242, 253-254, 261-266, 268-269, 276-278, 284-285, 301-303, 315-317, 319, 321, 334, 336-338, 341-346, and 352-354.

[0031] Embodiment 22. The dsRNA of embodiment 21, wherein the antisense strand comprises a nucleotide sequence comprising at least 15 contiguous nucleotides differing in sequence by no more than 1 nucleotide from any one of 185-187, 192, 194, 207-210, 216-222, 224, 226-228, 235-237, 240-242, 253-254, 261-266, 268-269, 276-278, 284-285, 301-303, 315-317, 319, 321, 334, 336-338, 341-346, and 352-354.

[0032] Embodiment 23. The dsRNA of embodiment 21, wherein the antisense strand comprises a nucleotide sequence comprising at least 15 contiguous nucleotides from any one of 185-187, 192, 194, 207-210, 216-222, 224, 226-228, 235-237, 240-242, 253-254, 261-266, 268-269, 276-278, 284-285, 301-303, 315-317, 319, 321, 334, 336-338, 341-346, and 352-354.

[0033] Embodiment 24. A double stranded ribonucleic acid (dsRNA) targeting Mucin-5B (MUC5B), wherein the dsRNA comprises a sense strand and an antisense strand forming a double stranded region, wherein the antisense strand comprises a region of complementarity to an mRNA encoding MUC5B, and wherein the antisense strand comprises a nucleotide sequence comprising at least 15 contiguous nucleotides differing in sequence by no more than 3 nucleotides from any one of SEQ ID NOs: 186-187, 192, 194, 208, 216-222, 226-228, 236, 240-242, 253-254, 268-269, 276-278, 284-285, 301-303, 316, 334, 336-338, 341-346, and 352-354.

[0034] Embodiment 25. The dsRNA of embodiment 24, wherein the antisense strand comprises a nucleotide sequence comprising at least 15 contiguous nucleotides differing in sequence by no more than 2 nucleotides from any one of SEQ ID NOs: 186-187, 192, 194, 208, 216-222, 226-228, 236, 240-242, 253-254, 268-269, 276-278, 284-285, 301-303, 316, 334, 336-338, 341-346, and 352-354.

[0035] Embodiment 26. The dsRNA of embodiment 24, wherein the antisense strand comprises a nucleotide sequence comprising at least 15 contiguous nucleotides differing in sequence by no more than 1 nucleotide from any one of SEQ ID NOs: 186-187, 192, 194, 208, 216-222, 226-228, 236, 240-242, 253-254, 268-269, 276-278, 284-285, 301-303, 316, 334, 336-338, 341-346, and 352-354.

[0036] Embodiment 27. The dsRNA of embodiment 24, wherein the antisense strand comprises a nucleotide sequence comprising at least 15 contiguous nucleotides from any one of SEQ ID NOs: 186-187, 192, 194, 208, 216-222, 226-228, 236, 240-242, 253-254, 268-269, 276-278, 284-285, 301-303, 316, 334, 336-338, 341-346, and 352-354.

[0037] Embodiment 28. A double stranded ribonucleic acid (dsRNA) targeting Mucin-5B (MUC5B), wherein the dsRNA comprises a sense strand and an antisense strand forming a double stranded region, wherein the antisense strand comprises a region of complementarity to an mRNA encoding MUC5B, wherein
[0038] a. the sense strand comprises the nucleotide sequence of SEQ ID NO: 1, and the antisense strand comprises the nucleotide sequence of SEQ ID NO: 178;
[0039] b. the sense strand comprises a nucleotide sequence comprising at least 20 contiguous nucleotides differing in sequence by no more than 1 nucleotide from SEQ ID NO: 2, and the antisense strand comprises a nucleotide sequence comprising at least 22 contiguous nucleotides differing in sequence by no more than 1 nucleotide from SEQ ID NO: 179;
[0040] c. the sense strand comprises a nucleotide sequence comprising at least 20 contiguous nucleotides differing in sequence by no more than 1 nucleotide from any one of SEQ ID NO: 3, and the antisense strand comprises a nucleotide sequence comprising at least 22 contiguous nucleotides differing in sequence by no more than 1 nucleotide from SEQ ID NO: 180;
[0041] d. the sense strand comprises a nucleotide sequence comprising at least 15 contiguous nucleotides differing in sequence by no more than 1 nucleotide from SEQ ID NO: 5, and the antisense strand comprises a nucleotide sequence comprising at least 17 contiguous nucleotides differing in sequence by no more than 1 nucleotide from SEQ ID NO: 182;
[0042] e. the sense strand comprises a nucleotide sequence comprising at least 15 contiguous nucleotides differing in sequence by no more than 3 nucleotides from SEQ ID NO: 4, and the antisense strand comprises a nucleotide sequence comprising at least 15 contiguous nucleotides differing in sequence by no more than 1 nucleotide from SEQ ID NO: 181;
[0043] f. the sense strand comprises a nucleotide sequence comprising at least 15 contiguous nucleotides differing in sequence by no more than 3 nucleotides from SEQ ID NO: 6, and the antisense strand comprises a nucleotide sequence comprising at least 15 contiguous nucleotides differing in sequence by no more than 1 nucleotide from SEQ ID NO: 183;
[0044] g. the sense strand comprises a nucleotide sequence comprising at least 15 contiguous nucleotides differing in sequence by no more than 3 nucleotides from SEQ ID NO: 7, and the antisense strand comprises a nucleotide sequence comprising at least 15 contiguous nucleotides differing in sequence by no more than 1 nucleotide from SEQ ID NO: 184;
[0045] h. the sense strand comprises a nucleotide sequence comprising at least 15 contiguous nucleotides differing in sequence by no more than 3 nucleotides from SEQ ID NO: 8, and the antisense strand comprises a nucleotide sequence comprising at least 15 contiguous nucleotides differing in sequence by no more than 2 nucleotides from SEQ ID NOs: 185;
[0046] i. the sense strand comprises a nucleotide sequence comprising at least 15 contiguous nucleotides differing in sequence by no more than 3 nucleotides from SEQ ID NO: 9, and the antisense strand comprises a nucleotide sequence comprising at least 15 contiguous nucleotides differing in sequence by no more than 3 nucleotides from SEQ ID NO: 186;
[0047] j. the sense strand comprises a nucleotide sequence comprising at least 15 contiguous nucleotides differing in sequence by no more than 3 nucleotides from SEQ ID NO: 10, and the antisense strand comprises a nucleotide sequence comprising at least 15 contiguous nucleotides differing in sequence by no more than 3 nucleotides from SEQ ID NO: 187.
[0048] k. the antisense strand comprises a nucleotide sequence selected from any one of SEQ ID NOs: 18,793-36,683, and the sense strand comprises a nucleotide sequence selected from any one of SEQ ID NOs: 902-18,792;
[0049] l. the antisense strand comprises a nucleotide sequence selected from any one of SEQ ID NOs: 54,575-72,465, and the sense strand comprises a nucleotide sequence selected from any one of SEQ ID NOs: 36,684-54,574; or
[0050] m. the antisense strand comprises a nucleotide sequence selected from any one of SEQ ID NOs: 90,357-108,247, and the sense strand comprises a nucleotide sequence selected from any one of SEQ ID NOs: 72,466-90,356.

[0051] Embodiment 29. The dsRNA of any one of embodiments 1-28, wherein the sense strand or the antisense strand:
[0052] a. is conjugated to one or more lipophilic moieties;
[0053] b. is packaged in a lipid nanoparticle (LNP); and/or
[0054] c. comprises at least one modification.

[0055] Embodiment 30. The dsRNA of any one of embodiments 1-29, wherein each of the sense strand and the antisense strand:
[0056] a. is conjugated to one or more lipophilic moieties;
[0057] b. is packaged in a lipid nanoparticle (LNP); and/or
[0058] c. comprises at least one modification.

[0059] Embodiment 31. The dsRNA of any one of embodiments 29-30, comprising one or more lipophilic moieties that are each conjugated to one or more positions in the double stranded region of the dsRNA.

[0060] Embodiment 32. The dsRNA of any one of embodiments 1-31, wherein the dsRNA comprises at least one or two modified nucleotides.

[0061] Embodiment 33. The dsRNA of any one of embodiments 1-32, wherein
[0062] a. at least 1, 2, 3, 4, 5, 6, 7, 8, 9, 10, 11, 12, 13, 14, 15, 16, 17, 18, 19, or 20 nucleotides of the sense strand are modified; and/or
[0063] b. at least 1, 2, 3, 4, 5, 6, 7, 8, 9, 10, 11, 12, 13, 14, 15, 16, 17, 18, 19, or 20 nucleotides of the antisense strand are modified; or
[0064] c. each nucleotide in the sense strand is modified; and/or
[0065] d. each nucleotide in the antisense strand is modified.

[0066] Embodiment 34. The dsRNA of any one of embodiments 1-33, wherein the antisense strand comprises a nucleotide sequence selected from any one of SEQ ID NOs: 532-708.

[0067] Embodiment 35. The dsRNA of embodiment 34, wherein the sense strand comprises a nucleotide sequence selected from any one of SEQ ID NOs: 355-531.

[0068] Embodiment 36. The dsRNA of any one of embodiments 1-35, wherein the sense and antisense strands are selected from any one of the sense and antisense pairs in Table 2 or Table 3.

[0069] Embodiment 37. The dsRNA of any one of embodiments 1-36, wherein each of the nucleotides of the sense strand comprises a modification.

[0070] Embodiment 38. The dsRNA of any one of embodiments 1-37, wherein each of the nucleotides of the antisense strand comprises a modification.

[0071] Embodiment 39. The dsRNA of any one of embodiments 1-38, wherein the dsRNA comprises at least one modification, wherein the modification comprises a 2′O-methyl, a 2′fluoro, or a phosphorothioate linkage, or a combination of a 2′O-methyl or 2′fluoro and a phosphorothioate linkage.

[0072] Embodiment 40. The dsRNA of any one of embodiments 1-39, wherein each strand is no more than 30 nucleotides in length.

[0073] Embodiment 41. The dsRNA of any one of embodiments 1-40, wherein at least one strand comprises a 3′ overhang of at least 1 nucleotide.

[0074] Embodiment 42. The dsRNA of embodiment 41, wherein at least one strand comprises a 3′ overhang of at least 2 nucleotides.

[0075] Embodiment 43. The dsRNA of any one of embodiments 1-42, wherein the double stranded region is 19-21 nucleotide pairs in length.

[0076] Embodiment 44. The dsRNA of any one of embodiments 1-43, wherein the sense strand is 21 nucleotides in length and the antisense strand is 23 nucleotides in length.

[0077] Embodiment 45. The dsRNA of any one of embodiments 1-44, wherein the dsRNA is a small-interfering RNA (siRNA).

[0078] Embodiment 46. A double stranded ribonucleic acid (dsRNA) targeting Mucin-5B (MUC5B), wherein the dsRNA comprises a sense strand and an antisense strand forming a double stranded region, wherein the antisense strand comprises a region of complementarity to an mRNA encoding MUC5B, and wherein the antisense strand comprises a nucleotide sequence selected from SEQ ID NOs: 535, 538, 540, 541, 533, 536, or 186,538-186,624.

[0079] Embodiment 47. The dsRNA of embodiment 46, wherein the sense strand comprises a nucleotide sequence selected from SEQ ID NOs: 356, 358, 359, 361, 363, 364, or 186,502-186,537.

[0080] Embodiment 48. The dsRNA of embodiments 45-47, wherein the sense and antisense strands are selected from any one of the sense and antisense pairs in Table 9.

[0081] Embodiment 49. The dsRNA of embodiment 48, wherein:
[0082] a. the sense strand comprises the nucleotide sequence of SEQ ID NO: 358, and the antisense strand comprises the nucleotide sequence of SEQ ID NO: 186,538;
[0083] b. the sense strand comprises the nucleotide sequence of SEQ ID NO: 358, and the antisense strand comprises the nucleotide sequence of SEQ ID NO: 186,539;
[0084] c. the sense strand comprises the nucleotide sequence of SEQ ID NO: 358, and the antisense strand comprises the nucleotide sequence of SEQ ID NO: 186,540;
[0085] d. the sense strand comprises the nucleotide sequence of SEQ ID NO: 186,502, and the antisense strand comprises the nucleotide sequence of SEQ ID NO: 186,541;
[0086] e. the sense strand comprises the nucleotide sequence of SEQ ID NO: 186,503, and the antisense strand comprises the nucleotide sequence of SEQ ID NO: 535;
[0087] f. the sense strand comprises the nucleotide sequence of SEQ ID NO: 186,504, and the antisense strand comprises the nucleotide sequence of SEQ ID NO: 535;
[0088] g. the sense strand comprises the nucleotide sequence of SEQ ID NO: 186,505, and the antisense strand comprises the nucleotide sequence of SEQ ID NO: 535;
[0089] h. the sense strand comprises the nucleotide sequence of SEQ ID NO: 186,506, and the antisense strand comprises the nucleotide sequence of SEQ ID NO: 186,542;
[0090] i. the sense strand comprises the nucleotide sequence of SEQ ID NO: 186,507, and the antisense strand comprises the nucleotide sequence of SEQ ID NO: 186,543;
[0091] j. the sense strand comprises the nucleotide sequence of SEQ ID NO: 358, and the antisense strand comprises the nucleotide sequence of SEQ ID NO: 186,544;
[0092] k. the sense strand comprises the nucleotide sequence of SEQ ID NO: 358, and the antisense strand comprises the nucleotide sequence of SEQ ID NO: 186,545;
[0093] l. the sense strand comprises the nucleotide sequence of SEQ ID NO: 358, and the antisense strand comprises the nucleotide sequence of SEQ ID NO: 186,546;
[0094] m. the sense strand comprises the nucleotide sequence of SEQ ID NO: 358, and the antisense strand comprises the nucleotide sequence of SEQ ID NO: 186,547;
[0095] n. the sense strand comprises the nucleotide sequence of SEQ ID NO: 186,507, and the antisense strand comprises the nucleotide sequence of SEQ ID NO: 186,548;
[0096] o. the sense strand comprises the nucleotide sequence of SEQ ID NO: 186,507, and the antisense strand comprises the nucleotide sequence of SEQ ID NO: 186,549;
[0097] p. the sense strand comprises the nucleotide sequence of SEQ ID NO: 186,508, and the antisense strand comprises the nucleotide sequence of SEQ ID NO: 186,550;
[0098] q. the sense strand comprises the nucleotide sequence of SEQ ID NO: 186,508, and the antisense strand comprises the nucleotide sequence of SEQ ID NO: 186,551;
[0099] r. the sense strand comprises the nucleotide sequence of SEQ ID NO: 358, and the antisense strand comprises the nucleotide sequence of SEQ ID NO: 186,552;
[0100] s. the sense strand comprises the nucleotide sequence of SEQ ID NO: 358, and the antisense strand comprises the nucleotide sequence of SEQ ID NO: 186,553;
[0101] t. the sense strand comprises the nucleotide sequence of SEQ ID NO: 358, and the antisense strand comprises the nucleotide sequence of SEQ ID NO: 186,554;
[0102] u. the sense strand comprises the nucleotide sequence of SEQ ID NO: 358, and the antisense strand comprises the nucleotide sequence of SEQ ID NO: 186,555;
[0103] v. the sense strand comprises the nucleotide sequence of SEQ ID NO: 361, and the antisense strand comprises the nucleotide sequence of SEQ ID NO: 186,556;
[0104] w. the sense strand comprises the nucleotide sequence of SEQ ID NO: 361, and the antisense strand comprises the nucleotide sequence of SEQ ID NO: 186,557;
[0105] x. the sense strand comprises the nucleotide sequence of SEQ ID NO: 361, and the antisense strand comprises the nucleotide sequence of SEQ ID NO: 186,558;
[0106] y. the sense strand comprises the nucleotide sequence of SEQ ID NO: 186,509, and the antisense strand comprises the nucleotide sequence of SEQ ID NO: 186,559;
[0107] z. the sense strand comprises the nucleotide sequence of SEQ ID NO: 186,510, and the antisense strand comprises the nucleotide sequence of SEQ ID NO: 538;
[0108] aa. the sense strand comprises the nucleotide sequence of SEQ ID NO: 186,511, and the antisense strand comprises the nucleotide sequence of SEQ ID NO: 538;
[0109] bb. the sense strand comprises the nucleotide sequence of SEQ ID NO: 186,512, and the antisense strand comprises the nucleotide sequence of SEQ ID NO: 538;
[0110] cc. the sense strand comprises the nucleotide sequence of SEQ ID NO: 186,513, and the antisense strand comprises the nucleotide sequence of SEQ ID NO: 186,560;
[0111] dd. the sense strand comprises the nucleotide sequence of SEQ ID NO: 186,514, and the antisense strand comprises the nucleotide sequence of SEQ ID NO: 186,561;
[0112] ee. the sense strand comprises the nucleotide sequence of SEQ ID NO: 361, and the antisense strand comprises the nucleotide sequence of SEQ ID NO: 186,562;
[0113] ff. the sense strand comprises the nucleotide sequence of SEQ ID NO: 361, and the antisense strand comprises the nucleotide sequence of SEQ ID NO: 186,563;
[0114] gg. the sense strand comprises the nucleotide sequence of SEQ ID NO: 361, and the antisense strand comprises the nucleotide sequence of SEQ ID NO: 186,564;
[0115] hh. the sense strand comprises the nucleotide sequence of SEQ ID NO: 361, and the antisense strand comprises the nucleotide sequence of SEQ ID NO: 186,565;
[0116] ii. the sense strand comprises the nucleotide sequence of SEQ ID NO: 186,514, and the antisense strand comprises the nucleotide sequence of SEQ ID NO: 186,566;
[0117] jj. the sense strand comprises the nucleotide sequence of SEQ ID NO: 186,514, and the antisense strand comprises the nucleotide sequence of SEQ ID NO: 186,567;
[0118] kk. the sense strand comprises the nucleotide sequence of SEQ ID NO: 186,515, and the antisense strand comprises the nucleotide sequence of SEQ ID NO: 186,568;
[0119] ll. the sense strand comprises the nucleotide sequence of SEQ ID NO: 186,515, and the antisense strand comprises the nucleotide sequence of SEQ ID NO: 186,569;
[0120] mm. the sense strand comprises the nucleotide sequence of SEQ ID NO: 361, and the antisense strand comprises the nucleotide sequence of SEQ ID NO: 186,570;
[0121] nn. the sense strand comprises the nucleotide sequence of SEQ ID NO: 361, and the antisense strand comprises the nucleotide sequence of SEQ ID NO: 186,571;
[0122] oo. the sense strand comprises the nucleotide sequence of SEQ ID NO: 361, and the antisense strand comprises the nucleotide sequence of SEQ ID NO: 186,572;
[0123] pp. the sense strand comprises the nucleotide sequence of SEQ ID NO: 361, and the antisense strand comprises the nucleotide sequence of SEQ ID NO: 186,573;
[0124] qq. the sense strand comprises the nucleotide sequence of SEQ ID NO: 363, and the antisense strand comprises the nucleotide sequence of SEQ ID NO: 186,574;
[0125] rr. the sense strand comprises the nucleotide sequence of SEQ ID NO: 363, and the antisense strand comprises the nucleotide sequence of SEQ ID NO: 186,575;
[0126] ss. the sense strand comprises the nucleotide sequence of SEQ ID NO: 363, and the antisense strand comprises the nucleotide sequence of SEQ ID NO: 186,576;
[0127] tt. the sense strand comprises the nucleotide sequence of SEQ ID NO: 186,516, and the antisense strand comprises the nucleotide sequence of SEQ ID NO: 540;
[0128] uu. the sense strand comprises the nucleotide sequence of SEQ ID NO: 186,517, and the antisense strand comprises the nucleotide sequence of SEQ ID NO: 540;
[0129] vv. the sense strand comprises the nucleotide sequence of SEQ ID NO: 186,518, and the antisense strand comprises the nucleotide sequence of SEQ ID NO: 540;
[0130] ww. the sense strand comprises the nucleotide sequence of SEQ ID NO: 186,519, and the antisense strand comprises the nucleotide sequence of SEQ ID NO: 540;
[0131] xx. the sense strand comprises the nucleotide sequence of SEQ ID NO: 186,520, and the antisense strand comprises the nucleotide sequence of SEQ ID NO: 186,577;
[0132] yy. the sense strand comprises the nucleotide sequence of SEQ ID NO: 363, and the antisense strand comprises the nucleotide sequence of SEQ ID NO: 186,578;
[0133] zz. the sense strand comprises the nucleotide sequence of SEQ ID NO: 363, and the antisense strand comprises the nucleotide sequence of SEQ ID NO: 186,579;
[0134] aaa. the sense strand comprises the nucleotide sequence of SEQ ID NO: 363, and the antisense strand comprises the nucleotide sequence of SEQ ID NO: 186,580;
[0135] bbb. the sense strand comprises the nucleotide sequence of SEQ ID NO: 363, and the antisense strand comprises the nucleotide sequence of SEQ ID NO: 186,581;
[0136] ccc. the sense strand comprises the nucleotide sequence of SEQ ID NO: 363, and the antisense strand comprises the nucleotide sequence of SEQ ID NO: 186,582 (usAfscga(C3)auccaugGfaCfuuguasgsu);
[0137] ddd. the sense strand comprises the nucleotide sequence of SEQ ID NO: 363, and the antisense strand comprises the nucleotide sequence of SEQ ID NO: 186,583;
[0138] eee. the sense strand comprises the nucleotide sequence of SEQ ID NO: 363, and the antisense strand comprises the nucleotide sequence of SEQ ID NO: 186,584;
[0139] fff. the sense strand comprises the nucleotide sequence of SEQ ID NO: 364, and the antisense strand comprises the nucleotide sequence of SEQ ID NO: 186,585;
[0140] ggg. the sense strand comprises the nucleotide sequence of SEQ ID NO: 364, and the antisense strand comprises the nucleotide sequence of SEQ ID NO: 186,586;
[0141] hhh. the sense strand comprises the nucleotide sequence of SEQ ID NO: 364, and the antisense strand comprises the nucleotide sequence of SEQ ID NO: 186,587;
[0142] iii. the sense strand comprises the nucleotide sequence of SEQ ID NO: 186,521, and the antisense strand comprises the nucleotide sequence of SEQ ID NO: 186,588;
[0143] jjj. the sense strand comprises the nucleotide sequence of SEQ ID NO: 186,522, and the antisense strand comprises the nucleotide sequence of SEQ ID NO: 541;
[0144] kkk. the sense strand comprises the nucleotide sequence of SEQ ID NO: 186,523, and the antisense strand comprises the nucleotide sequence of SEQ ID NO: 541;
[0145] lll. the sense strand comprises the nucleotide sequence of SEQ ID NO: 186,524, and the antisense strand comprises the nucleotide sequence of SEQ ID NO: 541;
[0146] mmm. the sense strand comprises the nucleotide sequence of SEQ ID NO: 186,525, and the antisense strand comprises the nucleotide sequence of SEQ ID NO: 186,589;
[0147] nnn. the sense strand comprises the nucleotide sequence of SEQ ID NO: 186,526, and the antisense strand comprises the nucleotide sequence of SEQ ID NO: 186,590;
[0148] ooo. the sense strand comprises the nucleotide sequence of SEQ ID NO: 364, and the antisense strand comprises the nucleotide sequence of SEQ ID NO: 186,591;
[0149] ppp. the sense strand comprises the nucleotide sequence of SEQ ID NO: 364, and the antisense strand comprises the nucleotide sequence of SEQ ID NO: 186,592;
[0150] qqq. the sense strand comprises the nucleotide sequence of SEQ ID NO: 364, and the antisense strand comprises the nucleotide sequence of SEQ ID NO: 186,593;
[0151] rrr. the sense strand comprises the nucleotide sequence of SEQ ID NO: 364, and the antisense strand comprises the nucleotide sequence of SEQ ID NO: 186,594;
[0152] sss. the sense strand comprises the nucleotide sequence of SEQ ID NO: 186,526, and the antisense strand comprises the nucleotide sequence of SEQ ID NO: 186,595;
[0153] ttt. the sense strand comprises the nucleotide sequence of SEQ ID NO: 186,526, and the antisense strand comprises the nucleotide sequence of SEQ ID NO: 186,596;
[0154] uuu. the sense strand comprises the nucleotide sequence of SEQ ID NO: 186,527, and the antisense strand comprises the nucleotide sequence of SEQ ID NO: 186,597;
[0155] vvv. the sense strand comprises the nucleotide sequence of SEQ ID NO: 186,527, and the antisense strand comprises the nucleotide sequence of SEQ ID NO: 186,598;
[0156] www. the sense strand comprises the nucleotide sequence of SEQ ID NO: 364, and the antisense strand comprises the nucleotide sequence of SEQ ID NO: 186,599;
[0157] xxx. the sense strand comprises the nucleotide sequence of SEQ ID NO: 364, and the antisense strand comprises the nucleotide sequence of SEQ ID NO: 186,600;
[0158] yyy. the sense strand comprises the nucleotide sequence of SEQ ID NO: 364, and the antisense strand comprises the nucleotide sequence of SEQ ID NO: 186,601;
[0159] zzz. the sense strand comprises the nucleotide sequence of SEQ ID NO: 364, and the antisense strand comprises the nucleotide sequence of SEQ ID NO: 186,602;
[0160] aaaa. the sense strand comprises the nucleotide sequence of SEQ ID NO: 356, and the antisense strand comprises the nucleotide sequence of SEQ ID NO: 186,603;
[0161] bbbb. the sense strand comprises the nucleotide sequence of SEQ ID NO: 356, and the antisense strand comprises the nucleotide sequence of SEQ ID NO: 186,604;
[0162] cccc. the sense strand comprises the nucleotide sequence of SEQ ID NO: 356, and the antisense strand comprises the nucleotide sequence of SEQ ID NO: 186,605;
[0163] dddd. the sense strand comprises the nucleotide sequence of SEQ ID NO: 186,528, and the antisense strand comprises the nucleotide sequence of SEQ ID NO: 533;
[0164] eeee. the sense strand comprises the nucleotide sequence of SEQ ID NO: 186,529, and the antisense strand comprises the nucleotide sequence of SEQ ID NO: 533;
[0165] ffff. the sense strand comprises the nucleotide sequence of SEQ ID NO: 186,530, and the antisense strand comprises the nucleotide sequence of SEQ ID NO: 533;
[0166] gggg. the sense strand comprises the nucleotide sequence of SEQ ID NO: 186,531, and the antisense strand comprises the nucleotide sequence of SEQ ID NO: 533;
[0167] hhhh. the sense strand comprises the nucleotide sequence of SEQ ID NO: 186,532, and the antisense strand comprises the nucleotide sequence of SEQ ID NO: 186,606;
[0168] iiii. the sense strand comprises the nucleotide sequence of SEQ ID NO: 356, and the antisense strand comprises the nucleotide sequence of SEQ ID NO: 186,607;
[0169] jjjj. the sense strand comprises the nucleotide sequence of SEQ ID NO: 356, and the antisense strand comprises the nucleotide sequence of SEQ ID NO: 186,608;
[0170] kkkk. the sense strand comprises the nucleotide sequence of SEQ ID NO: 356, and the antisense strand comprises the nucleotide sequence of SEQ ID NO: 186,609;
[0171] llll. the sense strand comprises the nucleotide sequence of SEQ ID NO: 356, and the antisense strand comprises the nucleotide sequence of SEQ ID NO: 186,610;
[0172] mmmm. the sense strand comprises the nucleotide sequence of SEQ ID NO: 356, and the antisense strand comprises the nucleotide sequence of SEQ ID NO: 186,611 (usAfsccg(C3)aauuuggUfcAfaacagsgsa);
[0173] nnnn. the sense strand comprises the nucleotide sequence of SEQ ID NO: 356, and the antisense strand comprises the nucleotide sequence of SEQ ID NO: 186,612;
[0174] oooo. the sense strand comprises the nucleotide sequence of SEQ ID NO: 356, and the antisense strand comprises the nucleotide sequence of SEQ ID NO: 186,613;
[0175] pppp. the sense strand comprises the nucleotide sequence of SEQ ID NO: 359, and the antisense strand comprises the nucleotide sequence of SEQ ID NO: 186,614;
[0176] qqqq. the sense strand comprises the nucleotide sequence of SEQ ID NO: 359, and the antisense strand comprises the nucleotide sequence of SEQ ID NO: 186,615;
[0177] rrrr. the sense strand comprises the nucleotide sequence of SEQ ID NO: 359, and the antisense strand comprises the nucleotide sequence of SEQ ID NO: 186,616;
[0178] ssss. the sense strand comprises the nucleotide sequence of SEQ ID NO: 186,533, and the antisense strand comprises the nucleotide sequence of SEQ ID NO: 536;
[0179] tttt. the sense strand comprises the nucleotide sequence of SEQ ID NO: 186,534, and the antisense strand comprises the nucleotide sequence of SEQ ID NO: 536;
[0180] uuuu. the sense strand comprises the nucleotide sequence of SEQ ID NO: 186,535, and the antisense strand comprises the nucleotide sequence of SEQ ID NO: 536;
[0181] vvvv. the sense strand comprises the nucleotide sequence of SEQ ID NO: 186,536, and the antisense strand comprises the nucleotide sequence of SEQ ID NO: 536;
[0182] wwww. the sense strand comprises the nucleotide sequence of SEQ ID NO: 186,537, and the antisense strand comprises the nucleotide sequence of SEQ ID NO: 186,617;
[0183] xxxx. the sense strand comprises the nucleotide sequence of SEQ ID NO: 359, and the antisense strand comprises the nucleotide sequence of SEQ ID NO: 186,618;
[0184] yyyy. the sense strand comprises the nucleotide sequence of SEQ ID NO: 359, and the antisense strand comprises the nucleotide sequence of SEQ ID NO: 186,619;
[0185] zzzz. the sense strand comprises the nucleotide sequence of SEQ ID NO: 359, and the antisense strand comprises the nucleotide sequence of SEQ ID NO: 186,620;
[0186] aaaaa. the sense strand comprises the nucleotide sequence of SEQ ID NO: 359, and the antisense strand comprises the nucleotide sequence of SEQ ID NO: 186,621;
[0187] bbbbb. the sense strand comprises the nucleotide sequence of SEQ ID NO: 359, and the antisense strand comprises the nucleotide sequence of SEQ ID NO: 186,622 (usAfsgug(C3)cggguggAfaCfaaagcsusc);
[0188] ccccc. the sense strand comprises the nucleotide sequence of SEQ ID NO: 359, and the antisense strand comprises the nucleotide sequence of SEQ ID NO: 186,623; or
[0189] ddddd. the sense strand comprises the nucleotide sequence of SEQ ID NO: 359, and the antisense strand comprises the nucleotide sequence of SEQ ID NO: 186,624.

[0190] Embodiment 50. The dsRNA of embodiment 48 or 49, wherein:
[0191] a. the sense strand comprises the nucleotide sequence of SEQ ID NO: 186,507, and the antisense strand comprises the nucleotide sequence of SEQ ID NO: 186,543;
[0192] b. the sense strand comprises the nucleotide sequence of SEQ ID NO: 186,512, and the antisense strand comprises the nucleotide sequence of SEQ ID NO: 538;
[0193] c. the sense strand comprises the nucleotide sequence of SEQ ID NO: 186,514, and the antisense strand comprises the nucleotide sequence of SEQ ID NO: 186,561;
[0194] d. the sense strand comprises the nucleotide sequence of SEQ ID NO: 361, and the antisense strand comprises the nucleotide sequence of SEQ ID NO: 186,562;
[0195] e. the sense strand comprises the nucleotide sequence of SEQ ID NO: 361, and the antisense strand comprises the nucleotide sequence of SEQ ID NO: 186,563;
[0196] f. the sense strand comprises the nucleotide sequence of SEQ ID NO: 364, and the antisense strand comprises the nucleotide sequence of SEQ ID NO: 186,593;
[0197] g. the sense strand comprises the nucleotide sequence of SEQ ID NO: 364, and the antisense strand comprises the nucleotide sequence of SEQ ID NO: 186,600;
[0198] h. the sense strand comprises the nucleotide sequence of SEQ ID NO: 356, and the antisense strand comprises the nucleotide sequence of SEQ ID NO: 186,603;
[0199] i. the sense strand comprises the nucleotide sequence of SEQ ID NO: 356, and the antisense strand comprises the nucleotide sequence of SEQ ID NO: 186,605;
[0200] j. the sense strand comprises the nucleotide sequence of SEQ ID NO: 186,532, and the antisense strand comprises the nucleotide sequence of SEQ ID NO: 186,606;
[0201] k. the sense strand comprises the nucleotide sequence of SEQ ID NO: 356, and the antisense strand comprises the nucleotide sequence of SEQ ID NO: 186,607;
[0202] l. the sense strand comprises the nucleotide sequence of SEQ ID NO: 359, and the antisense strand comprises the nucleotide sequence of SEQ ID NO: 186,614;
[0203] m. the sense strand comprises the nucleotide sequence of SEQ ID NO: 186,536, and the antisense strand comprises the nucleotide sequence of SEQ ID NO: 536; or
[0204] n. the sense strand comprises the nucleotide sequence of SEQ ID NO: 186,537, and the antisense strand comprises the nucleotide sequence of SEQ ID NO: 186,617.

[0205] Embodiment 51. The modified dsRNA of any one of embodiments 46-50, wherein the dsRNA has any one or more of the following characteristics compared to the corresponding unmodified dsRNA or to the dsRNA sequence used as the starting dsRNA:
[0206] a. Improved efficacy;
[0207] b. Improved potency;
[0208] c. Improved stability; and/or
[0209] d. Reduced off-target effects.

[0210] Embodiment 52. The dsRNA of any one of embodiments 45-51, wherein the sense strand or the antisense strand:
[0211] a. is conjugated to one or more lipophilic moieties;
[0212] b. is packaged in a lipid nanoparticle (LNP); and/or
[0213] c. comprises at least one modification.

[0214] Embodiment 53. The dsRNA of any one of embodiments 45-52, wherein each of the sense strand and the antisense strand:
[0215] a. is conjugated to one or more lipophilic moieties;
[0216] b. is packaged in a lipid nanoparticle (LNP); and/or
[0217] c. comprises at least one modification.

[0218] Embodiment 54. The dsRNA of any one of embodiments 52-53, comprising one or more lipophilic moieties that are each conjugated to one or more positions in the double stranded region of the dsRNA.

[0219] Embodiment 55. A synthetic antisense oligonucleotide (ASO) targeting MUC5B, wherein the oligonucleotide comprises a nucleotide sequence:
[0220] a. having at least 90% nucleotide sequence identity to any one of SEQ ID NOs: 709-802;
[0221] b. comprising at least 15, 16, or 17 contiguous nucleotides differing in sequence by no more than 3 nucleotides from any one of SEQ ID NO: 709-802;
[0222] c. comprising at least 15, 16, or 17 contiguous nucleotides differing in sequence by no more than 3 nucleotides from any one of SEQ ID NO: 803-896; or
[0223] d. comprising at least 15, 16, or 17 contiguous nucleotides differing in sequence by no more than 3 nucleotides from any one of SEQ ID NO: 147,339-186,429.

[0224] Embodiment 56. The synthetic antisense oligonucleotide of embodiment 55 comprising a nucleotide sequence selected from any one of SEQ ID NOs: 709-802.

[0225] Embodiment 57. The synthetic antisense oligonucleotide of any one of embodiments 55-56, wherein the oligonucleotide:
[0226] a. is conjugated to one or more lipophilic moieties;
[0227] b. is packaged in a lipid nanoparticle (LNP); and/or
[0228] c. comprises at least one modified nucleotide.

[0229] Embodiment 58. The synthetic antisense oligonucleotide of any one of embodiments 55-57, comprising a nucleotide sequence selected from any one of SEQ ID NOs: 803-896.

[0230] Embodiment 59. The synthetic antisense oligonucleotide of any one of embodiments 55-58, wherein each of the nucleotides of the oligonucleotide comprises a modification.

[0231] Embodiment 60. The dsRNA of embodiment 29, or the synthetic antisense oligonucleotide of embodiment 57, wherein at least one of the nucleotides is modified, wherein the modification is selected from a deoxy-nucleotide, a 3′-terminal deoxy-thymine (dT) nucleotide, a 2′-O-methyl modified nucleotide (2′-OMe), a 2′-fluoro modified nucleotide (2′-F), a 2′-deoxy-modified nucleotide, a locked nucleotide, an unlocked nucleotide, a conformationally restricted nucleotide, a constrained ethyl nucleotide, an abasic nucleotide, a 2′-amino-modified nucleotide, a 2′-O-allyl-modified nucleotide, 2′-C-alkyl-modified nucleotide, a 2′-methoxyethyl modified nucleotide, a 2′-O-alkyl-modified nucleotide, a morpholino nucleotide, a phosphoramidate, a non-natural base comprising nucleotide, a tetrahydropyran modified nucleotide, a 1,5-anhydrohexitol modified nucleotide, a cyclohexenyl modified nucleotide, a nucleotide comprising a 5′-phosphorothioate group, a phosphorothioate linkage, a nucleotide comprising a 5′-methylphosphonate group, a nucleotide comprising a 5′ phosphate or 5′ phosphate mimic, a nucleotide comprising vinyl phosphonate, a nucleotide comprising adenosine-glycol nucleic acid (GNA), a nucleotide comprising thymidine-glycol nucleic acid (GNA) S-Isomer, a nucleotide comprising 2-hydroxymethyl-tetrahydrofurane-5-phosphate, a nucleotide comprising 2′-deoxythymidine-3′ phosphate, a nucleotide comprising 2′-deoxyguanosine-3′-phosphate, a 2′-O hexadecyl nucleotide, a nucleotide comprising a 2′-phosphate, a cytidine-2′-phosphate nucleotide, a guanosine-2′-phosphate nucleotide, a 2′-O-hexadecyl-cytidine-3′-phosphate nucleotide, a 2′-O-hexadecyl-adenosine-3′-phosphate nucleotide, a 2′-O-hexadecyl-guanosine-3′-phosphate nucleotide, a 2′-O-hexadecyl-uridine-3′-phosphate nucleotide, a 5′-vinyl phosphonate (VP/(e.g., (vin-u)), a 2′-deoxyadenosine-3′-phosphate nucleotide, a 2′-deoxycytidine-3′-phosphate nucleotide, a 2′-deoxyguanosine-3′-phosphate nucleotide, a 2′-deoxythymidine-3′-phosphate nucleotide, a 2′-deoxyuridine nucleotide, a terminal nucleotide linked to a cholesteryl derivative, a dodecanoic acid bisdecylamide group and a C3 spacer; and combinations thereof.

[0232] Embodiment 61. The synthetic antisense oligonucleotide of any one of embodiments 55-60, wherein the synthetic antisense oligonucleotide comprises 14-25 or 17-22 nucleotides.

[0233] Embodiment 62. The synthetic antisense oligonucleotide of any one of embodiments 55-61, wherein the synthetic antisense oligonucleotide comprises at least one locked nucleotide at both the 5′ and 3′ end.

[0234] Embodiment 63. The synthetic antisense oligonucleotide of any one of embodiments 55-62, wherein the synthetic antisense oligonucleotide comprises 17 nucleotides and three locked nucleotides at both the 5′ and 3′ end.

[0235] Embodiment 64. The synthetic antisense oligonucleotide of any one of embodiments 55-63, wherein the synthetic antisense oligonucleotide comprises at least one phosphorothioate linkage between nucleotides.

[0236] Embodiment 65. The synthetic antisense oligonucleotide of any one of embodiments 55-64, wherein the synthetic antisense oligonucleotide comprises a phosphorothioate linkage between each nucleotide.

[0237] Embodiment 66. The synthetic antisense oligonucleotide of any one of embodiments 55-65, wherein the synthetic antisense oligonucleotide is:
[0238] a. conjugated to one or more lipophilic moieties
[0239] b. is packaged in a lipid nanoparticle (LNP); and/or
[0240] c. comprises at least one modified nucleotide.

[0241] Embodiment 67. The dsRNA of any one of embodiments 29-31, or 62-64, or the synthetic antisense oligonucleotide of embodiment 60, wherein the dsRNA or oligonucleotide is conjugated to one or more lipophilic moieties, wherein one or more lipophilic moieties is an aliphatic, alicyclic, or polyalicyclic compound.

[0242] Embodiment 68. The dsRNA of any one of embodiments 1-54 or the synthetic antisense oligonucleotide of any one of embodiments 55-67, further comprising a targeting ligand that targets a lung tissue.

[0243] Embodiment 69. The dsRNA or the synthetic antisense oligonucleotide of embodiment 68, wherein the targeting ligand is a 2′-O-hexadecyl (C16) conjugate.

[0244] Embodiment 70. A pharmaceutical composition comprising the dsRNA of any one of embodiments 1-54 or the synthetic antisense oligonucleotide of any one of embodiments 55-69, further comprising a lipid delivery vehicle.

[0245] Embodiment 71. The pharmaceutical composition of embodiment 70, wherein the lipid delivery vehicle is a lipid nanoparticle (LNP).

[0246] Embodiment 72. The pharmaceutical composition of embodiment 71, wherein the lipid nanoparticle comprises one or more of a cationic lipid, a non-cationic lipid, a cholesterol-based lipid, a PEG-modified lipid, an amphiphilic block copolymer and/or a polymer, or a combination thereof.

[0247] Embodiment 73. A vector comprising one or more of the dsRNA of any one of embodiments 1-54 or the synthetic antisense oligonucleotide of any one of embodiments 55-69.

[0248] Embodiment 74. A cell containing the dsRNA of any one of embodiments 1-54 or the synthetic antisense oligonucleotide of any one of embodiments 55-69.

[0249] Embodiment 75. A pharmaceutical composition comprising the dsRNA of any one of embodiments 1-54 or the synthetic antisense oligonucleotide of any one of embodiments 55-69 and a diluent or excipient.

[0250] Embodiment 76. The pharmaceutical composition of embodiment 75, wherein the composition is formulated for intrapulmonary administration, inhalation or intranasal administration.

[0251] Embodiment 77. A device for inhalation administration comprising the dsRNA of any one of embodiments 1-54 or the synthetic antisense oligonucleotide of any one of embodiments 55-69.

[0252] Embodiment 78. The device of embodiment 77, wherein the device is selected from the group consisting of a nebulizer, a metered-dose inhaler, and a dry powder inhaler.

[0253] Embodiment 79. A method of inhibiting expression of a MUC5B gene in a cell, the method comprising: contacting the cell with the dsRNA of any one of embodiments 1-54 or the synthetic antisense oligonucleotide of any one of embodiments 55-69, or the pharmaceutical composition of any one of embodiments 75-76.

[0254] Embodiment 80. The method of embodiment 79, wherein the cell is within a subject.

[0255] Embodiment 81. The method of embodiment 80, wherein the subject is a human.

[0256] Embodiment 82. The method of any one of embodiments 79-81, wherein expression of the MUC5B gene is inhibited by at least 50%.

[0257] Embodiment 83. A method for treating a subject having a lung disease or a subject at risk of developing a lung disease, comprising administering to the subject in need thereof a therapeutically effective amount of the dsRNA of any one of embodiments 1-54 or the synthetic antisense oligonucleotide of any one of embodiments 55-69, or the pharmaceutical composition of embodiment 75 or embodiment 76.

[0258] Embodiment 84. The method of embodiment 83, wherein the subject is a human.

[0259] Embodiment 85. The method of any one of embodiments 83-84, wherein the lung disease is associated with overexpression of MUC5B, optionally wherein overexpression of MUC5B is associated with one or more of reduced mucociliary function, reduced alveolar repair, and increased lung fibrosis.

[0260] Embodiment 86. The method of any one of embodiments 83-85, wherein the lung disease is one or more of pulmonary fibrosis, cystic fibrosis, chronic obstructive pulmonary disease (COPD), asthma, Primary Ciliary Dyskinesia, or bronchiectasis.

[0261] Embodiment 87. The method of embodiment 86, wherein the pulmonary fibrosis is idiopathic pulmonary fibrosis (IPF).

[0262] Embodiment 88. The method of any one of embodiments 79-87, wherein treating comprises amelioration of at least symptom of the disease.

[0263] Embodiment 89. The method of any one of embodiments 79-88, wherein the dsRNA, the synthetic antisense oligonucleotide, or the pharmaceutical composition is administered to the subject subcutaneously, orotracheally, via oral inhalation, or via intranasal administration.

[0264] Embodiment 90. The method of any one of embodiments 79-89, further comprising administering to the subject an additional agent or a therapy suitable for treatment or prevention of a lung disease.

[0265] Embodiment 91. The method of embodiment 90, wherein the additional therapeutic agent is selected from the group consisting of an anti-inflammatory agent, an immune modulator, a phosphodiesterase-5 inhibitor, a tyrosine kinase inhibitor, an antifibrotic agent and a combination of any of the foregoing.

### BRIEF DESCRIPTION OF THE DRAWINGS

[0266] FIGS. 1A and 1B present a schematic of the reporter systems for measuring on-target (FIG. 1A) and off-target (FIG. 1B) performance of dsRNAs in A549 cells as described in example 4.

[0267] FIG. 2 shows exemplary modifications to a dsRNA duplex of the EEL backbone. Nucleotides are numbered from 5′ to 3′ for the sense and antisense strands. An exemplary EEL 21/23mer is depicted. For EEL 19/21mer duplexes, position 12 of the sense strand is an unmodified RNA nucleotide (not shown in Figure).

[0268] FIG. 3 shows exemplary modifications to a dsRNA duplex of the DV22 backbone. Nucleotides are numbered from 5′ to 3′ for the sense and antisense strands.

### DETAILED DESCRIPTION

[0269] Reference will now be made in detail to certain embodiments of the invention. While the invention is described in conjunction with the illustrated embodiments, it will be understood that they are not intended to limit the invention to those embodiments. On the contrary, the invention is intended to cover all alternatives, modifications, and equivalents, which may be included within the invention as defined by the appended claims and included embodiments.

[0270] Unless otherwise noted, technical terms are used according to conventional usage. Definitions of common terms in molecular biology may be found in Benjamin Lewin, Genes V, published by Oxford University Press, 1994 (ISBN 0-19-854287-9); Kendrew et al. (eds.), The Encyclopedia of Molecular Biolog, published by Blackwell Science Ltd., 1994 (ISBN 0-632-02182-9); and Robert A. Meyers (ed.), Molecular Biolog and Biotechnology: a Comprehensive Desk Reference, published by VCH Publishers, Inc., 1995 (ISBN 1-56081-569-8). Unless otherwise explained, all technical and scientific terms used herein have the same meaning as commonly understood by one of ordinary skill in the art to which this disclosure belongs.

[0271] Before describing the present teachings in detail, it is to be understood that the disclosure is not limited to specific compositions or process steps, as such may vary. It should be noted that, as used in this specification and the appended claims, the singular form “a,” “an,” and “the” include plural references unless the context clearly dictates otherwise. Thus, for example, reference to “a guide” includes a plurality of guides, and reference to “a cell” includes a plurality of cells and the like. Also, the use of “comprise,” “comprises,” “comprising,” “contain,” “contains,” “containing,” “include,” “includes,” and “including” are not intended to be limiting. It is to be understood that both the foregoing general description and detailed description are exemplary and explanatory only and are not restrictive of the teachings.

[0272] Unless specifically noted in the specification, embodiments in the specification that recite “comprising” various components are also contemplated as “consisting of” or “consisting essentially of” the recited components; embodiments in the specification that recite “consisting of” various components are also contemplated as “comprising” or “consisting essentially of” the recited components; and embodiments in the specification that recite “consisting essentially of” various components are also contemplated as “consisting of” or “comprising” the recited components (this interchangeability does not apply to the use of these terms in the claims). The term “or” is used in an inclusive sense, i.e., equivalent to “and/or,” unless the context clearly indicates otherwise.

[0273] Further, ranges provided herein are understood to be shorthand for all of the values within the range. For example, a range of 1 to 50 is understood to include any number, combination of numbers, or sub-range from the group consisting 1, 2, 3, 4, 5, 6, 7, 8, 9, 10, 11, 12, 13, 14, 15, 16, 17, 18, 19, 20, 21, 22, 23, 24, 25, 26, 27, 28, 29, 30, 31, 32, 33, 34, 35, 36, 37, 38, 39, 40, 41, 42, 43, 44, 45, 46, 47, 48, 49, or 50 (as well as fractions thereof unless the context clearly dictates otherwise). Any concentration range, percentage range, ratio range, or integer range is to be understood to include the value of any integer within the recited range and, when appropriate, fractions thereof (such as one-tenth and one-hundredth of an integer), unless otherwise indicated. Also, any number range recited herein relating to any physical feature, such as polymer subunits, size, or thickness, is to be understood to include any integer within the recited range unless otherwise indicated. As used herein, unless otherwise indicated, “about” or “consisting essentially of” mean ±20% of the indicated range, value, or structure. As used herein, the terms “include” and “comprise” are open-ended and used synonymously.

[0274] The section headings used herein are for organizational purposes only and are not to be construed as limiting the desired subject matter in any way. In the event that any material incorporated by reference contradicts any term defined in this specification or any other express content of this specification, this specification controls. While the present teachings are described in conjunction with various embodiments, it is not intended that the present teachings be limited to such embodiments. On the contrary, the present teachings encompass various alternatives, modifications, and equivalents, as will be appreciated by those of skill in the art.

[0275] Although methods and materials similar or equivalent to those described herein can be used in the practice or testing of the present disclosure, suitable methods and materials are described below. All publications, patent applications, patents, and other references mentioned herein are incorporated by reference in their entirety. In case of conflict, the present specification, including explanations of terms, will control. In addition, the materials, methods, and examples are illustrative only and not intended to be limiting.

### I. Definitions

[0276] Unless stated otherwise, the following terms and phrases as used herein are intended to have the following meanings:

[0277] “Nucleotide,” “nucleic acid,” and “nucleic acid molecule” are used herein to refer to a multimeric compound comprising nucleosides or nucleoside analogs that have nitrogenous heterocyclic bases or base analogs linked together along a backbone, including conventional RNA, DNA, mixed RNA-DNA, and polymers that are analogs thereof. A nucleic acid “backbone” can be made up of a variety of linkages, including one or more of sugar-phosphodiester linkages, peptide-nucleic acid bonds (“peptide nucleic acids” or PNA; PCT No. WO 95/32305), phosphorothioate linkages, methylphosphonate linkages, or combinations thereof. Sugar moieties of a nucleic acid can be ribose, deoxyribose, or similar compounds with substitutions, e.g., 2′ methoxy or 2′ halide substitutions. Nitrogenous bases can be conventional bases (A, G, C, T, U), analogs thereof (e.g., modified uridines such as 5-methoxyuridine, pseudouridine, or N1-methylpseudouridine, or others); inosine; derivatives of purines or pyrimidines (e.g., N⁴-methyl deoxyguanosine, deaza- or aza-purines, deaza- or aza-pyrimidines, pyrimidine bases with substituent groups at the 5 or 6 position (e.g., 5-methylcytosine), purine bases with a substituent at the 2, 6, or 8 positions, 2-amino-6-methylaminopurine, O′-methylguanine, 4-thio-pyrimidines, 4-amino-pyrimidines, 4-dimethylhydrazine-pyrimidines, and O⁴-alkyl-pyrimidines; U.S. Pat. No. 5,378,825 and PCT No. WO 93/13121). For general discussion, see The Biochemistry of the Nucleic Acids 5-36, Adams et al., ed., 11^{th} ed., 1992). Nucleic acids can include one or more “abasic” residues where the backbone includes no nitrogenous base for position(s) of the polymer (U.S. Pat. No. 5,585,481). A nucleic acid can comprise only conventional RNA or DNA sugars, bases, and linkages or can include both conventional components and substitutions (e.g., conventional bases with 2′ methoxy linkages or polymers containing both conventional bases and one or more base analogs). Nucleic acid includes “locked nucleic acid” (LNA), an analog containing one or more LNA nucleotide monomers with a bicyclic furanose unit locked in an RNA-mimicking sugar conformation, which enhances hybridization affinity toward complementary RNA and DNA sequences (Vester and Wengel, 2004, Biochemistry 43(42):13233-41). RNA and DNA have different sugar moieties and can differ by the presence of uracil or analogs thereof in RNA and thymine or analogs thereof in DNA.

[0278] “Mucin 5B” (“MUC5B”) refers to the well-known gene and polypeptide, also known in the art as also referred to as “Mucin 5B, Oligomeric Mucus/Gel-Forming,” “High Molecular Weight Salivary Mucin MG1,” “Mucin 5, Subtype B, Tracheobronchial,” “Sublingual Gland Mucin,” “Mucin-5B,” “MUC-5B,” “MUC5,” “MG1,” “Mucin-5 Subtype B, Tracheobronchial,” “Cervical Mucin MUC5B,” “Cervical Mucin,” or “MUC9.” The term “MUC5B” includes human MUC5B, the amino acid and nucleotide sequences of which may be found in, for example, GenBank Accession No. NM_002458.3 (GI: 1519244536; SEQ ID NO: 897); mouse MUC5B, the amino acid and nucleotide sequences of which may be found in, for example, GenBank Accession No. NM_028801.2 (GL: 147905739; SEQ ID NO: 898); and rat MUC5B, the amino acid and nucleotide sequences of which may be found in, for example, GenBank Accession No.: XM_006230608.2 (GI: 672039062; SEQ ID NO: 899).

[0279] “MUC5B” also includes Macaca mulatta MUC5B, the amino acid and nucleotide sequences of which may be found in, for example, GenBank Accession No. XM_028833012.1 (GL: 1622861542; SEQ ID NO: 900) and Macaca fascicularis MUC5B, the amino acid and nucleotide sequences of which may be found in, for example, GenBank Accession No. XM_015435240.1 (GL: 982295518; SEQ ID NO: 901). Further information on MUC5B is provided, for example, in the NCBI Gene database at ncbi.nlm.nih.gov/gene/727897. The entire contents of each of the foregoing GenBank Accession numbers and the Gene database numbers are incorporated herein by reference as of the date of filing this application.

[0280] The terms “Mucin-5B” and “MUC5B,” as used herein, also refer to naturally occurring DNA sequence variations of the MUC5B gene. Numerous sequence variations within the MUC5B gene have been identified and may be found at, for example, NCBI dbSNP and UniProt (see, e.g., ncbi.nlm.nih.gov/snp/?term=muc5b), the entire contents of which is incorporated herein by reference as of the date of filing this application.

[0281] As used herein, the term “strand comprising a sequence” refers to an oligonucleotide comprising a chain of nucleotides that is described by the sequence referred to using the standard nucleotide nomenclature.

[0282] “G,” “C,” “A,” “T,” and “U” each generally stand for a nucleotide that contains guanine, cytosine, adenine, thymidine, and uracil as a base, respectively. However, it will be understood that the term “ribonucleotide” or “nucleotide” can also refer to a modified nucleotide, as further detailed below, or a surrogate replacement moiety. The skilled person is well aware that guanine, cytosine, adenine, and uracil can be replaced by other moieties without substantially altering the base pairing properties of an oligonucleotide comprising a nucleotide bearing such replacement moiety. It is understood that when a cDNA sequence is provided, the corresponding mRNA, RNAi agent, or ASO would include a U in place of a T. For example, without limitation, a nucleotide comprising inosine as its base can base pair with nucleotides containing adenine, cytosine, or uracil. Hence, nucleotides containing uracil, guanine, or adenine can be replaced in the nucleotide sequences of dsRNA featured in the invention by a nucleotide containing, for example, inosine. In another example, adenine and cytosine anywhere in the oligonucleotide can be replaced with guanine and uracil, respectively, to form a G-U Wobble base pairing with the target mRNA. Sequences containing such replacement moieties are suitable for the compositions and methods featured in the invention.

[0283] The terms “antisense oligonucleotide” and “ASO,” as used herein, refer to a single-stranded oligonucleotide having a nucleobase sequence that permits hybridization to a corresponding segment of a target nucleic acid. ASOs are used for gene silencing by RNA cleavage and RNA editing. ASOs may also be used to modulate the splicing of a target gene by enhancing the retention or skipping of a specific exon.

[0284] The terms “iRNA”, “RNAi agent,” “iRNA agent,” and “RNA interference agent,” as used interchangeably herein, refer to an agent that contains RNA as that term is defined herein and which mediates the targeted cleavage of an RNA transcript via an RNA-induced silencing complex (RISC) pathway. RNA interference (RNAi) is a process that directs the sequence-specific degradation of mRNA. RNAi modulates, e.g., inhibits, the expression of a MUC5B gene in a cell, e.g., a cell within a subject, such as a mammalian subject.

[0285] In one embodiment, an RNAi agent of the disclosure includes a single-stranded RNAi that interacts with a target RNA sequence, e.g., a MUC5B mRNA sequence, to direct the cleavage of the target RNA. Without wishing to be bound by theory, it is believed that long double-stranded RNA introduced into cells is broken down into double-stranded short interfering RNAs (siRNAs) comprising a sense strand and an antisense strand by a Type HI endonuclease known as Dicer (Sharp et al. (2001) Genes Dev. 15:485). Dicer, a ribonuclease-III-like enzyme, processes these dsRNA into 19-23 base pair short interfering RNAs with characteristic two-base 3′ overhangs (Bernstein, et al., (2001) Nature 409:363). These siRNAs are then incorporated into an RNA-induced silencing complex (RISC) where one or more helicases unwind the siRNA duplex, enabling the complementary antisense strand to guide target recognition (Nykanen, et al., (2001) Cell 107:309). Upon binding to the appropriate target mRNA, one or more endonucleases within the RISC cleave the target to induce silencing (Elbashir, et al., (2001) Genes Dev. 15:188). Thus, in one aspect, the disclosure relates to a single stranded RNA (ssRNA) (the antisense strand of an siRNA duplex) generated within a cell and which promotes the formation of a RISC complex to effect silencing of the target gene. Accordingly, the term “siRNA” is also used herein to refer to an RNAi as described above.

[0286] In another embodiment, the RNAi agent may be a single-stranded RNA that is introduced into a cell or organism to inhibit a target mRNA. Single-stranded RNAi agents bind to the RISC endonuclease, Argonaute 2, which then cleaves the target mRNA. The single-stranded siRNAs are generally 15-30 nucleotides and are chemically modified. The design and testing of single-stranded RNAs are described in U.S. Pat. No. 8,101,348 and in Lima et al., (2012) Cell 150:883-894, the entire contents of each of which are hereby incorporated herein by reference. Any of the antisense nucleotide sequences described herein may be used as a single-stranded siRNA as described herein or as chemically modified by the methods described in Lima et al., (2012) Cell 150:883-894.

[0287] In another embodiment, an “RNAi agent” for use in the compositions and methods of the disclosure is a double-stranded RNA and is referred to herein as a “double-stranded RNAi agent,” “double-stranded RNA (dsRNA) molecule,” “dsRNA agent,” or “dsRNA”. The term “dsRNA” refers to a complex of ribonucleic acid molecules, having a duplex structure comprising two anti-parallel and substantially complementary nucleic acid strands, referred to as having “sense” and “antisense” orientations with respect to a target RNA, i.e., a MUC5B mRNA sequence. In some embodiments of the disclosure, a double-stranded RNA (dsRNA) triggers the degradation of a target RNA, e.g., an mRNA, through a post-transcriptional gene-silencing mechanism referred to herein as RNA interference or RNAi.

[0288] In general, a dsRNA molecule can include ribonucleotides, but as described in detail herein, each or both strands can also include one or more non-ribonucleotides, e.g., a deoxyribonucleotide, or a modified nucleotide. In addition, as used in this specification, an “RNAi agent” may include ribonucleotides with chemical modifications; an RNAi agent may include substantial modifications at multiple nucleotides.

[0289] As used herein, the term “modified nucleotide” refers to a nucleotide having, independently, a modified sugar moiety, a modified internucleotide linkage, or a modified nucleobase. Thus, the term modified nucleotide encompasses substitutions, additions, or removal of, e.g., a functional group or atom to internucleotide linkages, sugar moieties, or nucleobases. The modifications suitable for use in the agents of the disclosure include all types of modifications disclosed herein or known in the art. Any such modifications, as used in an siRNA type molecule or ASO, are encompassed by “RNAi agent” or “ASO” for the purposes of this specification and claims.

[0290] As used herein, the term “nucleotide overhang” refers to at least one unpaired nucleotide that protrudes from the duplex structure of an RNAi agent, e.g., a dsRNA. For example, when a 3′-end of one strand of a dsRNA extends beyond the 5′-end of the other strand, or vice versa, there is a nucleotide overhang. A dsRNA can comprise an overhang of at least one nucleotide; alternatively, the overhang can comprise at least two nucleotides, at least three nucleotides, at least four nucleotides, at least five nucleotides, or more. A nucleotide overhang can comprise or consist of a nucleotide/nucleoside analog, including a deoxynucleotide/nucleoside. The overhang(s) can be on the sense strand, the antisense strand, or any combination thereof. Furthermore, the nucleotide(s) of an overhang can be present on the 5′-end, 3′-end, or both ends of either an antisense or sense strand of a dsRNA.

[0291] In one embodiment of the dsRNA, at least one strand comprises a 3′ overhang of at least 1 nucleotide. In another embodiment, at least one strand comprises a 3′ overhang of at least 2 nucleotides, e.g., 2, 3, 4, 5, 6, 7, 9, 10, 11, 12, 13, 14, or 15 nucleotides. In other embodiments, at least one strand of the RNAi agent comprises a 5′ overhang of at least 1 nucleotide. In certain embodiments, at least one strand comprises a 5′ overhang of at least 2 nucleotides, e.g., 2, 3, 4, 5, 6, 7, 9, 10, 11, 12, 13, 14, or 15 nucleotides. In still other embodiments, both the 3′ and the 5′ end of one strand of the RNAi agent comprise an overhang of at least 1 nucleotide.

[0292] In one embodiment, the antisense strand of a dsRNA has a 1-10 nucleotide, e.g., 0-3, 1-3, 2-4, 2-5, 4-10, 5-10, e.g., a 1, 2, 3, 4, 5, 6, 7, 8, 9, or 10 nucleotide, overhang at the 3′-end or the 5-end. In one embodiment, the sense strand of a dsRNA has a 1-10 nucleotide, e.g., a 1, 2, 3, 4, 5, 6, 7, 8, 9, or 10 nucleotide, overhang at the 3′-end or the 5′-end. In another embodiment, one or more of the nucleotides in the overhang is replaced with a nucleoside thiophosphate.

[0293] In certain embodiments, the overhang on the sense strand or the antisense strand, or both, can include extended lengths longer than 10 nucleotides, e.g., 1-30 nucleotides, 2-30 nucleotides, 10-30 nucleotides, or 10-15 nucleotides in length. In certain embodiments, an extended overhang is on the sense strand of the duplex. In certain embodiments, an extended overhang is present on the 3′end of the sense strand of the duplex. In certain embodiments, an extended overhang is present on the 5′end of the sense strand of the duplex. In certain embodiments, an extended overhang is on the antisense strand of the duplex. In certain embodiments, an extended overhang is present on the 3′end of the antisense strand of the duplex. In certain embodiments, an extended overhang is present on the 5′end of the antisense strand of the duplex. In certain embodiments, one or more of the nucleotides in the overhang is replaced with a nucleoside thiophosphate. In certain embodiments, the overhang includes a self-complementary portion such that the overhang is capable of forming a hairpin structure that is stable under physiological conditions.

[0294] The terms “blunt” or “blunt ended,” as used herein in reference to a dsRNA, mean that there are no unpaired nucleotides or nucleotide analogs at a given terminal end of a dsRNA, i.e., no nucleotide overhang. One or both ends of a dsRNA can be blunt. Where both ends of a dsRNA are blunt, the dsRNA is said to be blunt ended. To be clear, a “blunt ended” dsRNA is a dsRNA that is blunt at both ends, i.e., no nucleotide overhang at either end of the molecule. Most often, such a molecule will be double stranded over its entire length.

[0295] The term “antisense strand” or “guide strand” refers to the strand of an iRNA, e.g., a dsRNA, which includes a region complementary to a target sequence, e.g., a MUC5B mRNA sequence. In some embodiments, the complementarity is full or partial. In some instances, “full” or “perfectly complementary” or “fully complementary” means that in a hybridized pair of nucleobase or nucleotide sequence molecules, all (100%) of the bases in a contiguous sequence of a first oligonucleotide will hybridize with the same number of bases in a contiguous sequence of a second oligonucleotide. The contiguous sequence may comprise all or a part of a first or second nucleotide sequence. In some instances, “partial” or “partially complementary” means that in a hybridized pair of nucleobase or nucleotide sequence molecules, at least 70%, but not all, of the bases in a contiguous sequence of a first oligonucleotide will hybridize with the same number of bases in a contiguous sequence of a second oligonucleotide. The contiguous sequence may comprise all or a part of a first or second nucleotide sequence.

[0296] The term “sense strand” or “passenger strand” as used herein, refers to the strand of a RNAi agent that includes a region that is substantially complementary to a region of the antisense strand as that term is defined herein.

[0297] As used herein in reference to a nucleic acid, “substantially all of the nucleotides are modified” means that the majority but not all of the nucleotides in the nucleic acid are modified, wherein the nucleic acid can include not more than 5, 4, 3, 2, or 1 unmodified nucleotides.

[0298] The term “lipophile” or “lipophilic moiety” broadly refers to any compound or chemical moiety having an affinity for lipids. One way to characterize the lipophilicity of the lipophilic moiety is by the octanol-water partition coefficient, log K_{ow}, where K_{ow} is the ratio of a chemical's concentration in the octanol-phase to its concentration in the aqueous phase of a two-phase system at equilibrium. The octanol-water partition coefficient is a laboratory-measured property of a substance. However, it may also be predicted by using coefficients attributed to the structural components of a chemical, which are calculated using first-principle or empirical methods (see, for example, Tetko et al., J. Chem. Inf. Comput. Sci. 41:1407-21 (2001), which is incorporated herein by reference in its entirety). It provides a thermodynamic measure of the tendency of the substance to prefer a non-aqueous or oily milieu rather than water (i.e., its hydrophilic/lipophilic balance). In principle, a chemical substance is lipophilic when its log K_{ow} exceeds 0. Typically, the lipophilic moiety possesses a log K_{ow} exceeding 1, exceeding 1.5, exceeding 2, exceeding 3, exceeding 4, exceeding 5, or exceeding 10. For instance, the log K_{ow} of 6-amino hexanol is predicted to be approximately 0.7. Using the same method, the log K_{ow} of cholesteryl N-(hexan-6-ol) carbamate is expected to be 10.7.

[0299] The lipophilicity of a molecule can change with respect to the functional group it carries. For instance, adding a hydroxyl group or amine group to the end of a lipophilic moiety can increase or decrease the partition coefficient (e.g., log K_{ow}) value of the lipophilic moiety.

[0300] Accordingly, conjugating the lipophilic moieties to the internal position(s) of the double-stranded RNAi agent or ASO may provide optimal hydrophobicity for the enhanced in vivo siRNA or ASO delivery.

[0301] The term “lipid nanoparticle” or “LNP” is a vesicle comprising a lipid layer encapsulating a pharmaceutically active molecule, such as a nucleic acid molecule, e.g., an RNAi agent or ASO, or a plasmid from which an RNAi agent or ASO is transcribed. LNPs are described in, for example, U.S. Pat. Nos. 6,858,225, 6,815,432, 8,158,601, and 8,058,069, the entire contents of which are hereby incorporated herein by reference.

[0302] As used herein, a “subject” is an animal, such as a mammal, including a primate (such as a human, a non-human primate, e.g., a monkey, and a chimpanzee), or a non-primate (such as a cow, a pig, a horse, a goat, a rabbit, a sheep, a hamster, a guinea pig, a cat, a dog, a rat, or a mouse), or a bird that expresses the target gene, either endogenously or heterologously. In a preferred embodiment, the subject is a human, such as a human being treated or assessed for a disease, disorder, or condition that would benefit from reduction in MUC5B expression; a human at risk for a disease, disorder, or condition that would benefit from reduction in MUC5B expression; a human having a disease, disorder, or condition that would benefit from reduction in MUC5B expression; or human being treated for a disease, disorder, or condition that would benefit from reduction in MUC5B expression as described herein. In some embodiments, the subject is a female human. In other embodiments, the subject is a male human. In one embodiment, the subject is an adult subject. In another embodiment, the subject is a pediatric subject.

[0303] As used herein, the terms “treating” or “treatment” refer to a beneficial or desired result including, but not limited to, alleviation or amelioration of one or more signs or symptoms associated with abnormal or unwanted MUC5B expression or MUC5B protein production, e.g., a MUC5B-associated disease, e.g., a lung disease, e.g., cystic fibrosis, chronic obstructive pulmonary disease (COPD), and/or pulmonary fibrosis, e.g., idiopathic pulmonary fibrosis (IPF) or symptoms associated with unwanted MUC5B expression; diminishing the extent of unwanted MUC5B activation or stabilization; amelioration or palliation of unwanted MUC5B activation or stabilization. “Treatment” can also mean prolonging survival as compared to expected survival in the absence of treatment.

[0304] The term “lower” in the context of the level of MUC5B in a subject or a disease marker or symptom refers to a statistically significant decrease in such level. The decrease can be, for example, at least 10%, 15%, 20%, 25%, 30%, %, 40%, 45%, 50%, 55%, 60%, 65%, 70%, 75%, 80%, 85%, 90%, 95%, or more. In certain embodiments, a decrease is at least 20%. In certain embodiments, the decrease is at least 50% in a disease marker, e.g., protein or gene expression level. “Lower” in the context of the level of MUC5B in a subject is preferably down to a level accepted as within the range of normal for an individual without such disorder. In certain embodiments, the expression of the target is normalized, i.e., decreased towards or to a level accepted as within the range of normal for an individual without such disorder, e.g., blood oxygen level, white blood cell count, kidney function, liver function. As used here, “lower” in a subject can refer to lowering of gene expression or protein production in a cell in a subject but does not require lowering of expression in all cells or tissues of a subject. For example, as used herein, lowering in a subject can include lowering of gene expression or protein production in a subject.

[0305] The term “lower” can also be used in association with normalizing a symptom of a disease or condition, i.e., decreasing the difference between a level in a subject suffering from a MUC5B-associated disease towards or to a level in a normal subject not suffering from a MUC5B-associated disease. As used herein, if a disease is associated with an elevated value for a symptom, “normal” is considered to be the upper limit of normal. If a disease is associated with a decreased value for a symptom, “normal” is considered to be the lower limit of normal.

[0306] As used herein, “prevention” or “preventing,” when used in reference to a disease, disorder, or condition thereof, that would benefit from a reduction in expression of a MUC5B gene or production of a MUC5B protein, refers to a reduction in the likelihood that a subject will develop a symptom associated with such a disease, disorder, or condition, e.g., a symptom of a MUC5B-associated disease, e.g., cystic fibrosis, chronic obstructive pulmonary disease (COPD), and/or pulmonary fibrosis, e.g., IPF. The failure to develop a disease, disorder, or condition, or the reduction in the development of a symptom associated with such a disease, disorder, or condition (e.g., by at least about 10% on a clinically accepted scale for that disease or disorder), or the exhibition of delayed symptoms delayed (e.g., by days, weeks, months or years) is considered effective prevention.

[0307] As used herein, the term “MUC5B-associated disease” is a disease or disorder that would benefit from reduction in the expression or activity of MUC5B. Such MUC5B-associated diseases include a MUC5B-associated disease.

[0308] The term “MUC5B-associated disease” is a disease or disorder caused by or associated with MUC5B expression or MUC5B protein production. The term “MUC5B-associated disease” includes a disease, disorder, or condition that would benefit from a decrease in MUC5B expression or MUC5B protein activity. Non-limiting examples of MUC5B-associated diseases include, for example, lung diseases, e.g., cystic fibrosis, chronic obstructive pulmonary disease (COPD), and/or pulmonary fibrosis, e.g., idiopathic pulmonary fibrosis (IPF).

[0309] As used herein, the term “pulmonary fibrosis” refers to a condition of the lungs in which the tissue thickens and becomes scarred. This thickened, stiff tissue makes it more difficult for the lungs to work properly. As pulmonary fibrosis worsens, people become progressively more short of breath. In some embodiments, the cause of pulmonary fibrosis is unknown. In those instances, the pulmonary fibrosis is referred to as “idiopathic pulmonary fibrosis (IPF).”

[0310] As used herein, the term “chronic obstructive pulmonary disease (COPD)” refers to a lung disease characterized by chronic obstruction of airflow. In COPD, the lung damage over time leads to a loss in elasticity of the lung tissue responsible for proper exhalation. When this elasticity is lost, some waste carbon dioxide is left in the lungs at the end of exhalation, leading to carbon dioxide buildup in the body. COPD leads to emphysema, which is the destruction of the alveoli, and chronic bronchitis, which is inflammation of the airway tubes in the lungs.

[0311] As used herein, the term “cystic fibrosis” refers to a genetic disorder resulting in thickening tissue and mucus buildup in the lungs, pancreas, liver, kidneys, and intestines. Individuals with cystic fibrosis develop a thick mucus that can block the airways in the lungs. This mucus buildup results in troubled breathing and an increased susceptibility to respiratory infections, as mucus traps the bacteria and cannot be removed efficiently. This condition also has severely debilitating effects on the digestive system, resulting in stunted growth and weight.

[0312] The symptoms of a MUC5B-associated disease include, for example, exertional dyspnea, a nonproductive cough, weight loss, low-grade fevers, fatigue, arthralgias, fine bibasilar inspiratory crackles (Velcro crackles), digital clubbing, pulmonary hypertension at rest, loud P2 component of the second heart sound, a fixed split S2, a holosystolic tricuspid regurgitation murmur, pedal edema, histopathologic and/or radiologic pattern of usual interstitial pneumonia (UIP), mucus buildup in the airways, troubled breathing, increased susceptibility to respiratory infections, stunted growth and weight, a loss in elasticity of the lung tissue, carbon dioxide buildup in the body, emphysema, chronic bronchitis, shortness of breath, chronic cough and excessive mucus, wheezing, a tight feeling in the chest, blue lips and nail beds, and uncontrollable weight loss. Further details regarding signs and symptoms of the various diseases or conditions are provided herein and are well-known in the art.

[0313] “Therapeutically effective amount,” as used herein, is intended to include the amount of an RNAi agent or ASO that, when administered to a subject having a MUC5B-associated disease, is sufficient to effect treatment of the disease (e.g., by diminishing, ameliorating, or maintaining the existing disease or one or more symptoms of disease). The “therapeutically effective amount” may vary depending on the RNAi agent or ASO, how the agent is administered, the disease and its severity and the history, age, weight, family history, genetic makeup, the types of preceding or concomitant treatments, if any, and other individual characteristics of the subject to be treated.

[0314] The phrase “pharmaceutically acceptable” is employed herein to refer to those compounds, materials, compositions, or dosage forms that are, within the scope of sound medical judgment, suitable for use in contact with the tissues of human subjects and animal subjects without excessive toxicity, irritation, allergic response, or other problem or complication, commensurate with a reasonable benefit/risk ratio.

[0315] The phrase “pharmaceutically-acceptable carrier” as used herein means a pharmaceutically-acceptable material, composition, or vehicle, such as a liquid or solid filler, diluent, excipient, manufacturing aid (e.g., lubricant, talc magnesium, calcium or zinc stearate, or steric acid), or solvent encapsulating material, involved in carrying or transporting the subject compound from one organ, or portion of the body, to another organ, or portion of the body. Each carrier must be “acceptable” in the sense of being compatible with the other ingredients of the formulation and not injurious to the subject being treated. Some examples of materials which can serve as pharmaceutically-acceptable carriers include: (1) sugars, such as lactose, glucose and sucrose; (2) starches, such as corn starch and potato starch; (3) cellulose, and its derivatives, such as sodium carboxymethyl cellulose, ethyl cellulose and cellulose acetate; (4) powdered tragacanth; (5) malt, (6) gelatin; (7) lubricating agents, such as magnesium state, sodium lauryl sulfate and talc; (8) excipients, such as cocoa butter and suppository waxes; (9) oils, such as peanut oil, cottonseed oil, safflower oil, sesame oil, olive oil, corn oil and soybean oil; (10) glycols, such as propylene glycol; (11) polyols, such as glycerin, sorbitol, mannitol and polyethylene glycol; (12) esters, such as ethyl oleate and ethyl laurate; (13) agar; (14) buffering agents, such as magnesium hydroxide and aluminum hydroxide; (15) alginic acid; (16) pyrogen-free water; (17) isotonic saline: (18) Ringer's solution; (19) ethyl alcohol; (20) pH buffered solutions; (21) polyesters, polycarbonates or polyanhydrides; (22) bulking agents, such as polypeptides and amino acids (23) serum component, such as serum albumin, HDL and LDL; and (22) other non-toxic compatible substances employed in pharmaceutical formulations. Pharmaceutically acceptable carriers for pulmonary delivery are known in the art and will vary depending on the desired location for deposition of the agent, e.g., upper or lower respiratory system, and the type of device to be used for delivery, e.g., sprayer, nebulizer, dry powder inhaler.

[0316] As used herein, “respiratory system” is understood as the structures through which air moves from outside the body into the lungs and back out, e.g., the mouth, nose and nasal cavity, sinus, trachea, pharynyx, larynx, bronchial tubes/bronchi, bronchioles, alveoli, and vasculature, e.g., capillaries, hematopoietic cells, lymphatics, and lungs, and the cells, tissues, and fluids present therein.

[0317] As used herein, “delivery by inhalation” and the like include delivery by inhalation through the nose or mouth, including intratracheal administration. Delivery by inhalation typically is performed using a device, e.g., inhaler, sprayer, nebulizer, that is selected, in part, based on the location that the agent is to be delivered, e.g., nose, mouth, lungs, and the type of material to be delivered, e. g., drops, mist, dry powder.

[0318] The term “sample,” as used herein, includes a collection of similar fluids, cells, or tissues isolated from a subject and fluids, cells, or tissues present within a subject. Examples of biological fluids include blood, serum and serosal fluids, plasma, bronchial fluids, sputum, cerebrospinal fluid, ocular fluids, lymph, urine, saliva, sputum, and the like. Tissue samples may include samples from tissues, organs or localized regions. For example, samples may be derived from particular organs, parts of organs, or fluids or cells within those organs. In certain embodiments, samples may be derived from a nasal swab. In certain embodiments, samples may be derived from a throat swab. In certain embodiments, samples may be derived from the lung, or certain types of cells in the lung. In some embodiments, the samples may be derived from the bronchioles. In some embodiments, the samples may be derived from the bronchus. In some embodiments, the samples may be derived from the alveoli. In other embodiments, a “sample derived from a subject” refers to liver tissue (or subcomponents thereof) derived from the subject. In some embodiments, a “sample derived from a subject” refers to blood drawn from the subject or plasma or serum derived therefrom. In further embodiments, a “sample derived from a subject” refers to pulmonary tissue (or subcomponents thereof) derived from the subject.

### II. RNAi Agents of the Disclosure

[0319] Described herein are RNAi agents that inhibit the expression of a MUC5B gene. In one embodiment, the RNAi agent includes double-stranded ribonucleic acid (dsRNA) molecules for inhibiting the expression of a MUC5B gene in a subject, e.g., a mammal, such as a human, e.g., a subject having a MUC5B-associated disorder, e.g., a lung disease, e.g., cystic fibrosis, chronic obstructive pulmonary disease (COPD), and/or pulmonary fibrosis, e.g., IPF, or a subject at risk of a MUC5B-associated disease, such as LPF, e.g., a subject carrying an rs35705950 variant.

[0320] The dsRNA includes two RNA strands (a sense strand and an antisense strand) that are complementary and hybridized to form a duplex structure under conditions in which the dsRNA will be used. The antisense strand includes a region of complementarity that is substantially complementary, and in some embodiments, fully complementary, to a target sequence, for example, the sequence derived from the sequence of an mRNA formed during the expression of a MUC5B gene. The sense strand includes a region complementary to the antisense strand, such that the two strands hybridize and form a double-stranded region when combined under suitable conditions. As described elsewhere herein and as known in the art, the complementary sequences of a dsRNA can also be contained as self-complementary regions of a single nucleic acid molecule, as opposed to being on separate oligonucleotides.

[0321] In some embodiments, the antisense strand comprises a nucleotide sequence selected from SEQ ID NOs: 178-354. In some embodiments, the sense strand comprises a nucleotide sequence selected from SEQ ID NOs: 1-177. In some embodiments, the sense strand comprises a nucleotide sequence selected from SEQ ID NOs: 1-177 and the antisense strand comprises a nucleotide sequence selected from SEQ ID NOs: 178-354.

[0322] In some embodiments, the antisense strand comprises a nucleotide sequence comprising at least 22 contiguous nucleotides differing by no more than 1 nucleotide from any one of SEQ ID NOs: 179 and 180. In some of these embodiments, the sense strand comprises a nucleotide sequence comprising at least 20 contiguous nucleotides differing by no more than 1 nucleotide from any one of SEQ ID NOs: 2 and 3.

[0323] In some embodiments, the antisense strand comprises a nucleotide sequence comprising at least 19 contiguous nucleotides differing by no more than 5 nucleotides from any one of SEQ ID NOs: 178 and 181-187. In some embodiments, the antisense strand comprises a nucleotide sequence having at least 66% nucleotide sequence identity to any one of SEQ ID NOs: 178 and 181-187. In some of these embodiments, the sense strand comprises a nucleotide sequence comprising at least 17 contiguous nucleotides differing by no more than 3 nucleotides from any one of SEQ ID NOs: 1 and 4-10, or the sense strand comprises a nucleotide sequence having at least 62% nucleotide sequence identity to any one of SEQ ID NOs: 1 and 4-10.

[0324] In some embodiments, the sense strand comprises a nucleotide sequence comprising at least 17 contiguous nucleotides differing by no more than 4 nucleotides from SEQ ID NO. 8, and the antisense strand comprises a nucleotide sequence comprising at least 19 contiguous nucleotides differing by no more than 6 nucleotides from SEQ ID NO: 185. In some embodiments, wherein the sense strand comprises a nucleotide sequence comprising at least 17 contiguous nucleotides differing by no more than 5 nucleotides from SEQ ID NO: 9, and the antisense strand comprises a nucleotide sequence comprising at least 19 contiguous nucleotides differing by no more than 7 nucleotides from SEQ ID NO: 186. In some embodiments, the sense strand comprises a nucleotide sequence comprising at least 17 contiguous nucleotides differing by no more than 7 nucleotides from SEQ ID NO: 10, and the antisense strand comprises a nucleotide sequence comprising at least 19 contiguous nucleotides differing by no more than 9 nucleotides from SEQ ID NO: 187.

[0325] Generally, the duplex structure is 15 to 30 base pairs in length, e.g., 15-29, 15-28, 15-27, 15-26, 15-25, 15-24, 15-23, 15-22, 15-21, 15-20, 15-19, 15-18, 15-17, 18-30, 18-29, 18-28, 18-27, 18-26, 18-25, 18-24, 18-23, 18-22, 18-21, 18-20, 19-30, 19-29, 19-28, 19-27, 19-26, 19-25, 19-24, 19-23, 19-22, 19-21, 19-20, 20-30, 20-29, 20-28, 20-27, 20-26, 20-25, 20-24,20-23, 20-22, 20-21, 21-30, 21-29, 21-28, 21-27, 21-26, 21-25, 21-24, 21-23, or 21-22 base pairs in length.

[0326] In certain preferred embodiments, the duplex structure is 18 to 25 base pairs in length, e.g., 18-25, 18-24, 18-23, 18-22, 18-21, 18-20, 19-25, 19-24, 19-23, 19-22, 19-21, 19-20, 20-25, 20-24,20-23, 20-22, 20-21, 21-25, 21-24, 21-23, 21-22, 22-25, 22-24, 22-23, 23-25, 23-24 or 24-25 base pairs in length, for example, 19-21 base pairs in length. Ranges and lengths intermediate to the above-recited ranges and lengths are also considered part of the disclosure. Similarly, the region of complementarity to the target sequence is 15 to 30 nucleotides in length, e.g., 15-29, 15-28, 15-27, 15-26, 15-25, 15-24, 15-23, 15-22, 15-21, 15-20, 15-19, 15-18, 15-17, 18-30, 18-29, 18-28, 18-27, 18-26, 18-25, 18-24, 18-23, 18-22, 18-21, 18-20, 19-30, 19-29, 19-28, 19-27, 19-26, 19-25, 19-24, 19-23, 19-22, 19-21, 19-20, 20-30, 20-29, 20-28, 20-27, 20-26, 20-25, 20-24,20-23, 20-22, 20-21, 21-30, 21-29, 21-28, 21-27, 21-26, 21-25, 21-24, 21-23, or 21-22 nucleotides in length, for example 19-23 nucleotides in length or 21-23 nucleotides in length. Ranges and lengths intermediate to the above-recited ranges and lengths are also considered part of the disclosure.

[0327] In some embodiments, the dsRNA is 15 to 23 nucleotides in length or 25 to 30 nucleotides in length. In general, the dsRNA is long enough to serve as a substrate for the Dicer enzyme. For example, it is well known in the art that dsRNAs longer than about 21-23 nucleotides can serve as substrates for Dicer. As the ordinarily skilled person will also recognize, the region of an RNA targeted for cleavage will most often be part of a larger RNA molecule, often an mRNA molecule. Where relevant, a “part” of an mRNA target is a contiguous sequence of an mRNA target of sufficient length to allow it to be a substrate for RNAi-directed cleavage (i.e., cleavage through a RISC pathway).

[0328] One of skill in the art will also recognize that the duplex region is a primary functional portion of a dsRNA, e.g., a duplex region of about 15 to 36 base pairs, e.g., 15-36, 15-35, 15-34, 15-33, 15-32, 15-31, 15-30, 15-29, 15-28, 15-27, 15-26, 15-25, 15-24, 15-23, 15-22, 15-21, 15-20, 15-19, 15-18, 15-17, 18-30, 18-29, 18-28, 18-27, 18-26, 18-25, 18-24, 18-23, 18-22, 18-21, 18-20, 19-30, 19-29, 19-28, 19-27, 19-26, 19-25, 19-24, 19-23, 19-22, 19-21, 19-20, 20-30, 20-29, 20-28, 20-27, 20-26, 20-25, 20-24,20-23, 20-22, 20-21, 21-30, 21-29, 21-28, 21-27, 21-26, 21-25, 21-24, 21-23, or 21-22 base pairs, for example, 19-21 base pairs. Thus, in one embodiment, to the extent that it becomes processed to a functional duplex, of, e.g., 15-30 base pairs, that targets a desired RNA for cleavage, an RNA molecule or complex of RNA molecules having a duplex region greater than 30 base pairs is a dsRNA. Thus, an ordinarily skilled artisan will recognize that in one embodiment, an miRNA is a dsRNA. In another embodiment, a dsRNA is not a naturally occurring miRNA. In another embodiment, an RNAi agent useful to target MUC5B expression is not generated in the target cell by cleavage of a larger dsRNA.

[0329] A dsRNA, as described herein, can further include one or more single-stranded nucleotide overhangs, e.g., 1, 2, 3, or 4 nucleotides. A nucleotide overhang can comprise or consist of a nucleotide/nucleoside analog, including a deoxynucleotide/nucleoside. The overhang(s) can be on the sense strand, the antisense strand, or any combination thereof. Furthermore, an overhang's nucleotide(s) can be present on the 5′-end, 3′-end, or both ends of either an antisense or sense strand of a dsRNA. In certain embodiments, longer, extended overhangs are possible.

[0330] A dsRNA can be synthesized by standard methods known in the art as further discussed below, e.g., by use of an automated DNA synthesizer, such as are commercially available from, for example, Biosearch, Applied Biosystems, Inc. iRNA compounds of the invention may be prepared using a two-step procedure. First, the individual strands of the double-stranded RNA molecule are prepared separately. Then, the component strands are annealed. The individual strands of the siRNA compound can be prepared using solution-phase or solid-phase organic synthesis or both. Organic synthesis offers the advantage that the oligonucleotide strands comprising unnatural or modified nucleotides can be easily prepared. Single-stranded oligonucleotides of the invention can be prepared using solution-phase or solid-phase organic synthesis or both.

[0331] An siRNA can be produced, e.g., in bulk, by a variety of methods. Exemplary methods include organic synthesis and RNA cleavage, e.g., in vitro cleavage.

[0332] In one embodiment, the RNA of the RNAi agent of the disclosure, e.g., a dsRNA, is un-modified and does not comprise, e.g., chemical modifications or conjugations known in the art and described herein. In some embodiments, the RNA of an RNAi agent of the disclosure, e.g., a dsRNA, is chemically modified to enhance stability or other beneficial characteristics. In some embodiments, the dsRNA comprises at least one modified nucleotide. In some embodiments, at least 1, 2, 3, 4, 5, 6, 7, 8, 9, 10, 11, 12, 13, 14, 15, 16, 17, 18, 19, or 20 nucleotides of the sense strand are modified. In some embodiments, at least 1, 2, 3, 4, 5, 6, 7, 8, 9, 10, 11, 12, 13, 14, 15, 16, 17, 18, 19, or 20 nucleotides of the antisense strand are modified. In some embodiments, at least 99, 98, 97, 96, 95, 94, 93, 92, 91, 90, 89, 88, 87, 86, 85, 84, 83, 82, 81, or 80% of the nucleotides of the sense strand are modified. In some embodiments, at least 99, 98, 97, 96, 95, 94, 93, 92, 91, 90, 89, 88, 87, 86, 85, 84, 83, 82, 81, or 80% of the nucleotides of the antisense strand are modified.

[0333] In certain embodiments of the disclosure, substantially all of the nucleotides of an RNAi agent of the disclosure are modified. In other embodiments of the disclosure, all of the nucleotides of an RNAi agent of the disclosure are modified. RNAi agents of the disclosure in which “substantially all of the nucleotides are modified” are largely but not wholly modified and can include not more than 5, 4, 3, 2, or 1 unmodified nucleotides. In still other embodiments of the disclosure, RNAi agents of the disclosure can include not more than 5, 4, 3, 2, or 1 modified nucleotides.

[0334] In one aspect, a dsRNA of the disclosure includes at least two nucleotide sequences, a sense sequence and an antisense sequence. The sense strand sequence for MUC5B may be selected from the group of sequences provided in any one of Tables 2-3, and the corresponding nucleotide sequence of the antisense strand of the sense strand may be selected from the group of sequences of any one of Tables 2-3. In this aspect, one of the two sequences is complementary to the other of the two sequences, with one of the sequences being substantially complementary to a sequence of an mRNA generated in the expression of a MUC5B gene. As such, in this aspect, a dsRNA will include two oligonucleotides, where one oligonucleotide is described as the sense strand (passenger strand) in any one of Tables 2-3, and the second oligonucleotide is described as the corresponding antisense strand (guide strand) of the sense strand in any one of Tables 2-3 for MUC5B.

[0335] In some embodiments, the sense strand comprises a nucleotide sequence selected from SEQ ID NOs: 355-531 and the antisense strand comprises a nucleotide sequence selected from SEQ ID NOs: 532-708. It will be understood that, although the sequences provided in Table 3 are described as modified or conjugated sequences, the RNA of the RNAi agent of the disclosure e.g., a dsRNA of the disclosure, may comprise any one of the sequences set forth in any one of Table 3 that is un-modified (for example, the sequences provided in Table 2), un-conjugated, or modified or conjugated differently than described therein. One or more lipophilic ligands can be included in any of the positions of the RNAi agents provided in the instant application.

[0336] The skilled person is well aware that dsRNAs having a duplex structure of about 20 to 23 base pairs, e.g., 21 base pairs, have been hailed as particularly effective in inducing RNA interference (Elbashir et al., (2001) EMBO J., 20:6877-6888). However, others have found that shorter or longer RNA duplex structures can also be effective (Chu and Rana (2007) RNA 14: 1714-1719; Kim et al. (2005) Nat Biotech 23:222-226). In the embodiments described above, by virtue of the nature of the oligonucleotide sequences provided herein, dsRNAs described herein can include at least one strand of a length of minimally 19 nucleotides. It can be reasonably expected that shorter duplexes minus only a few nucleotides on one or both ends can be similarly effective compared to the dsRNAs described above. Hence, dsRNAs having a sequence of at least 15, 16, 17, 18, 19, 20, or more contiguous nucleotides derived from one of the sequences provided herein are contemplated to be within the scope of the present disclosure.

[0337] In some embodiments, a double stranded ribonucleic acid (dsRNA) targeting Mucin-5B (MUC5B) is provided, wherein the dsRNA comprises a sense strand and an antisense strand forming a double stranded region, wherein the antisense strand comprises a region of complementarity to an mRNA encoding MUC5B, and wherein the antisense strand comprises a nucleotide sequence selected from any one of SEQ ID NOs: 18,793-36,683. In some embodiments, a double stranded ribonucleic acid (dsRNA) targeting Mucin-5B (MUC5B) is provided, wherein the dsRNA comprises a sense strand and an antisense strand forming a double stranded region, wherein the antisense strand comprises a region of complementarity to an mRNA encoding MUC5B, and wherein the antisense strand comprises a nucleotide sequence selected from any one of SEQ ID NOs: 18,793-36,683 and at least one modification. In some embodiments, the sense strand comprises a nucleotide sequence selected from any one of SEQ ID NOs: 902-18,792. In some embodiments, the sense and antisense strand are complementary, wherein the sense strand comprises a nucleotide sequence selected from any one of SEQ ID NOs: 902-18,792, and the antisense strand comprises a nucleotide sequence selected from any one of SEQ ID NOs: 18,793-36,683. In some embodiments, a double stranded ribonucleic acid (dsRNA) targeting Mucin-5B (MUC5B) is provided, wherein the dsRNA comprises a sense strand and an antisense strand forming a double stranded region, wherein the antisense strand comprises a region of complementarity to an mRNA encoding MUC5B, and wherein the antisense strand comprises a nucleotide sequence selected from any one of SEQ ID NOs: 54,575-72,465. In some embodiments, a double stranded ribonucleic acid (dsRNA) targeting Mucin-5B (MUC5B) is provided, wherein the dsRNA comprises a sense strand and an antisense strand forming a double stranded region, wherein the antisense strand comprises a region of complementarity to an mRNA encoding MUC5B, and wherein the antisense strand comprises a nucleotide sequence selected from any one of SEQ ID NOs: 54,575-72,465 and at least one modification. In some embodiments, the sense strand comprises a nucleotide sequence selected from any one of SEQ ID NOs: 36,684-54,574. In some embodiments, the sense and antisense strand are complementary, wherein the sense strand comprises a nucleotide sequence selected from any one of SEQ ID NOs: 36,684-54,574, and the antisense strand comprises a nucleotide sequence selected from any one of SEQ ID NOs: 54,575-72,465.

[0338] In some embodiments, a double stranded ribonucleic acid (dsRNA) targeting Mucin-5B (MUC5B) is provided, wherein the dsRNA comprises a sense strand and an antisense strand forming a double stranded region, wherein the antisense strand comprises a region of complementarity to an mRNA encoding MUC5B, and wherein the antisense strand comprises a nucleotide sequence selected from any one of SEQ ID NOs: 90,357-108,247. In some embodiments, a double stranded ribonucleic acid (dsRNA) targeting Mucin-5B (MUC5B) is provided, wherein the dsRNA comprises a sense strand and an antisense strand forming a double stranded region, wherein the antisense strand comprises a region of complementarity to an mRNA encoding MUC5B, and wherein the antisense strand comprises a nucleotide sequence selected from any one of SEQ ID NOs: 90,357-108,247 and at least one modification. In some embodiments, the sense strand comprises a nucleotide sequence selected from any one of SEQ ID NOs: 72,466-90,356. In some embodiments, the sense and antisense strand are complementary, wherein the sense strand comprises a nucleotide sequence selected from any one of SEQ ID NOs: 72,466-90,356, and the antisense strand comprises a nucleotide sequence selected from any one of SEQ ID NOs: 90,357-108,247.

[0339] In some embodiments, a double stranded ribonucleic acid (dsRNA) targeting Mucin-5B (MUC5B) is provided, wherein the dsRNA comprises a sense strand and an antisense strand forming a double stranded region, wherein the antisense strand comprises a region of complementarity to an mRNA encoding MUC5B, and wherein the antisense strand comprises a nucleotide sequence selected from SEQ ID NOs: 178-354. In some embodiments, a double stranded ribonucleic acid (dsRNA) targeting Mucin-5B (MUC5B) is provided, wherein the dsRNA comprises a sense strand and an antisense strand forming a double stranded region, wherein the antisense strand comprises a region of complementarity to an mRNA encoding MUC5B, and wherein the antisense strand comprises a nucleotide sequence selected from SEQ ID NOs: 178-354 and at least one modification.

[0340] In some embodiments, the sense strand comprises a nucleotide sequence selected from SEQ ID NOs: 1-177.

[0341] In some embodiments, the sense and antisense strands are selected from any one of the sense and antisense pairs in Table 2.

[0342] In some embodiments, the sense and antisense strands are selected from any one of the sense and antisense pairs in Table 3.

[0343] In some embodiments, a double stranded ribonucleic acid (dsRNA) targeting Mucin-5B (MUC5B) is provided, wherein the dsRNA comprises a sense strand and an antisense strand forming a double stranded region, wherein the antisense strand comprises a region of complementarity to an mRNA encoding MUC5B, and wherein
[0344] 1) the sense strand comprises a nucleotide sequence comprising at least 15 contiguous nucleotides differing in sequence by no more than 3 nucleotides from SEQ ID NO: 1, and the antisense strand comprises a nucleotide sequence comprising at least 15 contiguous nucleotides differing in sequence by no more than 3 nucleotides from SEQ ID NO: 178;
[0345] 2) the sense strand comprises a nucleotide sequence comprising at least 15 contiguous nucleotides differing in sequence by no more than 3 nucleotides from SEQ ID NO: 2, and the antisense strand comprises a nucleotide sequence comprising at least 15 contiguous nucleotides differing in sequence by no more than 3 nucleotides from SEQ ID NO: 179;
[0346] 3) the sense strand comprises a nucleotide sequence comprising at least 15 contiguous nucleotides differing in sequence by no more than 3 nucleotides from SEQ ID NO: 3, and the antisense strand comprises a nucleotide sequence comprising at least 15 contiguous nucleotides differing in sequence by no more than 3 nucleotides from SEQ ID NO: 180;
[0347] 4) the sense strand comprises a nucleotide sequence comprising at least 15 contiguous nucleotides differing in sequence by no more than 3 nucleotides from SEQ ID NO: 4, and the antisense strand comprises a nucleotide sequence comprising at least 15 contiguous nucleotides differing in sequence by no more than 3 nucleotides from SEQ ID NO: 181;
[0348] 5) the sense strand comprises a nucleotide sequence comprising at least 15 contiguous nucleotides differing in sequence by no more than 3 nucleotides from SEQ ID NO: 5, and the antisense strand comprises a nucleotide sequence comprising at least 15 contiguous nucleotides differing in sequence by no more than 3 nucleotides from SEQ ID NO: 182;
[0349] 6) the sense strand comprises a nucleotide sequence comprising at least 15 contiguous nucleotides differing in sequence by no more than 3 nucleotides from SEQ ID NO: 6, and the antisense strand comprises a nucleotide sequence comprising at least 15 contiguous nucleotides differing in sequence by no more than 3 nucleotides from SEQ ID NO: 183;
[0350] 7) the sense strand comprises a nucleotide sequence comprising at least 15 contiguous nucleotides differing in sequence by no more than 3 nucleotides from SEQ ID NO: 7, and the antisense strand comprises a nucleotide sequence comprising at least 15 contiguous nucleotides differing in sequence by no more than 3 nucleotides from SEQ ID NO: 184;
[0351] 8) the sense strand comprises a nucleotide sequence comprising at least 15 contiguous nucleotides differing in sequence by no more than 3 nucleotides from SEQ ID NO: 8, and the antisense strand comprises a nucleotide sequence comprising at least 15 contiguous nucleotides differing in sequence by no more than 3 nucleotides from SEQ ID NO: 185;
[0352] 9) the sense strand comprises a nucleotide sequence comprising at least 15 contiguous nucleotides differing in sequence by no more than 3 nucleotides from SEQ ID NO: 9, and the antisense strand comprises a nucleotide sequence comprising at least 15 contiguous nucleotides differing in sequence by no more than 3 nucleotides from SEQ ID NO: 186; or
[0353] 10) the sense strand comprises a nucleotide sequence comprising at least 15 contiguous nucleotides differing in sequence by no more than 3 nucleotides from SEQ ID NO: 10, and the antisense strand comprises a nucleotide sequence comprising at least 15 contiguous nucleotides differing in sequence by no more than 3 nucleotides from SEQ ID NO: 187.

[0354] In some embodiments, a double stranded ribonucleic acid (dsRNA) targeting Mucin-5B (MUC5B) is provided, wherein the dsRNA comprises a sense strand and an antisense strand forming a double stranded region, wherein the antisense strand comprises a region of complementarity to an mRNA encoding MUC5B, and wherein
[0355] 1) the sense strand comprises a nucleotide sequence comprising at least 15 contiguous nucleotides differing in sequence by no more than 3 nucleotides from SEQ ID NO: 1 and at least one modification, and the antisense strand comprises a nucleotide sequence comprising at least 15 contiguous nucleotides differing in sequence by no more than 3 nucleotides from SEQ ID NO: 178;
[0356] 2) the sense strand comprises a nucleotide sequence comprising at least 15 contiguous nucleotides differing in sequence by no more than 3 nucleotides from SEQ ID NO: 2 and at least one modification, and the antisense strand comprises a nucleotide sequence comprising at least 15 contiguous nucleotides differing in sequence by no more than 3 nucleotides from SEQ ID NO: 179;
[0357] 3) the sense strand comprises a nucleotide sequence comprising at least 15 contiguous nucleotides differing in sequence by no more than 3 nucleotides from SEQ ID NO: 3 and at least one modification, and the antisense strand comprises a nucleotide sequence comprising at least 15 contiguous nucleotides differing in sequence by no more than 3 nucleotides from SEQ ID NO: 180;
[0358] 4) the sense strand comprises a nucleotide sequence comprising at least 15 contiguous nucleotides differing in sequence by no more than 3 nucleotides from SEQ ID NO: 4 and at least one modification, and the antisense strand comprises a nucleotide sequence comprising at least 15 contiguous nucleotides differing in sequence by no more than 3 nucleotides from SEQ ID NO: 181;
[0359] 5) the sense strand comprises a nucleotide sequence comprising at least 15 contiguous nucleotides differing in sequence by no more than 3 nucleotides from SEQ ID NO: 5 and at least one modification, and the antisense strand comprises a nucleotide sequence comprising at least 15 contiguous nucleotides differing in sequence by no more than 3 nucleotides from SEQ ID NO: 182,
[0360] 6) the sense strand comprises a nucleotide sequence comprising at least 15 contiguous nucleotides differing in sequence by no more than 3 nucleotides from SEQ ID NO: 6 and at least one modification, and the antisense strand comprises a nucleotide sequence comprising at least 15 contiguous nucleotides differing in sequence by no more than 3 nucleotides from SEQ ID NO: 183;
[0361] 7) the sense strand comprises a nucleotide sequence comprising at least 15 contiguous nucleotides differing in sequence by no more than 3 nucleotides from SEQ ID NO: 7 and at least one modification, and the antisense strand comprises a nucleotide sequence comprising at least 15 contiguous nucleotides differing in sequence by no more than 3 nucleotides from SEQ ID NO: 184;
[0362] 8) the sense strand comprises a nucleotide sequence comprising at least 15 contiguous nucleotides differing in sequence by no more than 3 nucleotides from SEQ ID NO: 8 and at least one modification, and the antisense strand comprises a nucleotide sequence comprising at least 15 contiguous nucleotides differing in sequence by no more than 3 nucleotides from SEQ ID NO: 185;
[0363] 9) the sense strand comprises a nucleotide sequence comprising at least 15 contiguous nucleotides differing in sequence by no more than 3 nucleotides from SEQ ID NO: 9 and at least one modification, and the antisense strand comprises a nucleotide sequence comprising at least 15 contiguous nucleotides differing in sequence by no more than 3 nucleotides from SEQ ID NO: 186; or
[0364] 10) the sense strand comprises a nucleotide sequence comprising at least 15 contiguous nucleotides differing in sequence by no more than 3 nucleotides from SEQ ID NO. 10 and at least one modification, and the antisense strand comprises a nucleotide sequence comprising at least 15 contiguous nucleotides differing in sequence by no more than 3 nucleotides from SEQ ID NO: 187.

[0365] In some embodiments, the antisense strand differs in sequence from an antisense strand sequence recited in the immediately preceding numbered paragraphs (1)-(10) by no more than 2 nucleotides. In some embodiments, the antisense strand differs in sequence by no more than 1 nucleotide. In some embodiments, the sense strand differs in sequence from a sense strand sequence recited in the immediately preceding numbered paragraphs (1)-(10) by no more than 2 nucleotides. In some embodiments, the antisense strand comprises at least 16, at least 17, at least 18, at least 19, at least 20, at least 21, at least 22, or 23 contiguous nucleotides of an antisense strand sequence recited in the immediately preceding numbered paragraphs (1)-(10). In some embodiments, the sense strand comprises at least 16, at least 17, at least 18, at least 19, at least 20, at least 21, at least 22, or 23 contiguous nucleotides of a sense strand sequence recited in the immediately preceding numbered paragraphs (1)-(10). In some embodiments, the antisense strand comprises 23 contiguous nucleotides and the sense strand comprises 21 contiguous nucleotides of an antisense and sense strand sequence recited in the immediately preceding paragraphs (1)-(10), respectively.

[0366] In some embodiments, a double stranded ribonucleic acid (dsRNA) targeting Mucin-5B (MUC5B) is provided, wherein the dsRNA comprises a sense strand and an antisense strand forming a double stranded region, wherein the antisense strand comprises a region of complementarity to an mRNA encoding MUC5B, and wherein
[0367] 1) the sense strand comprises a nucleotide sequence comprising at least 15 contiguous nucleotides differing in sequence by no more than 3 nucleotides from SEQ ID NO: 362, and the antisense strand comprises a nucleotide sequence comprising at least 15 contiguous nucleotides differing in sequence by no more than 3 nucleotides from SEQ ID NO: 539;
[0368] 2) the sense strand comprises a nucleotide sequence comprising at least 15 contiguous nucleotides differing in sequence by no more than 3 nucleotides from SEQ ID NO: 363, and the antisense strand comprises a nucleotide sequence comprising at least 15 contiguous nucleotides differing in sequence by no more than 3 nucleotides from SEQ ID NO: 540;
[0369] 3) the sense strand comprises a nucleotide sequence comprising at least 15 contiguous nucleotides differing in sequence by no more than 3 nucleotides from SEQ ID NO: 356, and the antisense strand comprises a nucleotide sequence comprising at least 15 contiguous nucleotides differing in sequence by no more than 3 nucleotides from SEQ ID NO: 533;
[0370] 4) the sense strand comprises a nucleotide sequence comprising at least 15 contiguous nucleotides differing in sequence by no more than 3 nucleotides from SEQ ID NO: 357, and the antisense strand comprises a nucleotide sequence comprising at least 15 contiguous nucleotides differing in sequence by no more than 3 nucleotides from SEQ ID NO: 534;
[0371] 5) the sense strand comprises a nucleotide sequence comprising at least 15 contiguous nucleotides differing in sequence by no more than 3 nucleotides from SEQ ID NO: 359, and the antisense strand comprises a nucleotide sequence comprising at least 15 contiguous nucleotides differing in sequence by no more than 3 nucleotides from SEQ ID NO: 536;
[0372] 6) the sense strand comprises a nucleotide sequence comprising at least 15 contiguous nucleotides differing in sequence by no more than 3 nucleotides from SEQ ID NO: 355, and the antisense strand comprises a nucleotide sequence comprising at least 15 contiguous nucleotides differing in sequence by no more than 3 nucleotides from SEQ ID NO: 532;
[0373] 7) the sense strand comprises a nucleotide sequence comprising at least 15 contiguous nucleotides differing in sequence by no more than 3 nucleotides from SEQ ID NO: 361, and the antisense strand comprises a nucleotide sequence comprising at least 15 contiguous nucleotides differing in sequence by no more than 3 nucleotides from SEQ ID NO: 538;
[0374] 8) the sense strand comprises a nucleotide sequence comprising at least 15 contiguous nucleotides differing in sequence by no more than 3 nucleotides from SEQ ID NO: 364, and the antisense strand comprises a nucleotide sequence comprising at least 15 contiguous nucleotides differing in sequence by no more than 3 nucleotides from SEQ ID NO: 541;
[0375] 9) the sense strand comprises a nucleotide sequence comprising at least 15 contiguous nucleotides differing in sequence by no more than 3 nucleotides from SEQ ID NO: 358, and the antisense strand comprises a nucleotide sequence comprising at least 15 contiguous nucleotides differing in sequence by no more than 3 nucleotides from SEQ ID NO: 535; or
[0376] 10) the sense strand comprises a nucleotide sequence comprising at least 15 contiguous nucleotides differing in sequence by no more than 3 nucleotides from SEQ ID NO: 360, and the antisense strand comprises a nucleotide sequence comprising at least 15 contiguous nucleotides differing in sequence by no more than 3 nucleotides from SEQ ID NO: 537.

[0377] In some embodiments, the antisense strand differs in sequence from an antisense strand sequence recited in the immediately preceding numbered paragraphs (1)-(10) by no more than 2 nucleotides. In some embodiments, the antisense strand differs in sequence by no more than 1 nucleotide. In some embodiments, the sense strand differs in sequence from a sense strand sequence recited in the immediately preceding numbered paragraphs (1)-(10) by no more than 2 nucleotides. In some embodiments, the antisense strand comprises at least 16, at least 17, at least 18, at least 19, at least 20, at least 21, at least 22, or 23 contiguous nucleotides of an antisense strand sequence recited in the immediately preceding numbered paragraphs (1)-(10). In some embodiments, the sense strand comprises at least 16, at least 17, at least 18, at least 19, at least 20, at least 21, at least 22, or 23 contiguous nucleotides of a sense strand sequence recited in the immediately preceding numbered paragraphs (1)-(10). In some embodiments, the antisense strand comprises 23 contiguous nucleotides and the sense strand comprises 21 contiguous nucleotides of an antisense and sense strand sequence recited in the immediately preceding paragraphs (1)-(10), respectively.

[0378] In some embodiments, the sense and antisense strands are selected from any one of the sense and antisense pairs in Table 9. In some embodiments, in the antisense strand comprises a nucleotide sequence selected from SEQ ID NOs: 535, 538, 540, 541, 533, 536, or 186,538-186,624. In some embodiments, the sense strand comprises a nucleotide sequence selected from SEQ ID NOs: 356, 358, 359, 361, 363, 364, or 186,502-186,537.

[0379] In some embodiments, a double stranded ribonucleic acid (dsRNA) targeting Mucin-5B (MUC5B) is provided, wherein the dsRNA comprises a sense strand and an antisense strand forming a double stranded region, wherein the antisense strand comprises a region of complementarity to an mRNA encoding MUC5B, and wherein;
[0380] 1) the sense strand comprises the nucleotide sequence of SEQ ID NO: 358, and the antisense strand comprises the nucleotide sequence of SEQ ID NO: 186,538;
[0381] 2) the sense strand comprises the nucleotide sequence of SEQ ID NO: 358, and the antisense strand comprises the nucleotide sequence of SEQ ID NO: 186,539;
[0382] 3) the sense strand comprises the nucleotide sequence of SEQ ID NO: 358, and the antisense strand comprises the nucleotide sequence of SEQ ID NO: 186,540;
[0383] 4) the sense strand comprises the nucleotide sequence of SEQ ID NO: 186,502, and the antisense strand comprises the nucleotide sequence of SEQ ID NO: 186,541;
[0384] 5) the sense strand comprises the nucleotide sequence of SEQ ID NO: 186,503, and the antisense strand comprises the nucleotide sequence of SEQ ID NO: 535;
[0385] 6) the sense strand comprises the nucleotide sequence of SEQ ID NO: 186,504, and the antisense strand comprises the nucleotide sequence of SEQ ID NO: 535;
[0386] 7) the sense strand comprises the nucleotide sequence of SEQ ID NO: 186,505, and the antisense strand comprises the nucleotide sequence of SEQ ID NO: 535;
[0387] 8) the sense strand comprises the nucleotide sequence of SEQ ID NO: 186,506, and the antisense strand comprises the nucleotide sequence of SEQ ID NO: 186,542;
[0388] 9) the sense strand comprises the nucleotide sequence of SEQ ID NO: 186,507, and the antisense strand comprises the nucleotide sequence of SEQ ID NO: 186,543;
[0389] 10) the sense strand comprises the nucleotide sequence of SEQ ID NO: 358, and the antisense strand comprises the nucleotide sequence of SEQ ID NO: 186,544;
[0390] 11) the sense strand comprises the nucleotide sequence of SEQ ID NO: 358, and the antisense strand comprises the nucleotide sequence of SEQ ID NO: 186,545;
[0391] 12) the sense strand comprises the nucleotide sequence of SEQ ID NO: 358, and the antisense strand comprises the nucleotide sequence of SEQ ID NO: 186,546;
[0392] 13) the sense strand comprises the nucleotide sequence of SEQ ID NO: 358, and the antisense strand comprises the nucleotide sequence of SEQ ID NO: 186,547;
[0393] 14) the sense strand comprises the nucleotide sequence of SEQ ID NO: 186,507, and the antisense strand comprises the nucleotide sequence of SEQ ID NO: 186,548;
[0394] 15) the sense strand comprises the nucleotide sequence of SEQ ID NO: 186,507, and the antisense strand comprises the nucleotide sequence of SEQ ID NO: 186,549;
[0395] 16) the sense strand comprises the nucleotide sequence of SEQ ID NO: 186,508, and the antisense strand comprises the nucleotide sequence of SEQ ID NO: 186,550;
[0396] 17) the sense strand comprises the nucleotide sequence of SEQ ID NO: 186,508, and the antisense strand comprises the nucleotide sequence of SEQ ID NO: 186,551;
[0397] 18) the sense strand comprises the nucleotide sequence of SEQ ID NO: 358, and the antisense strand comprises the nucleotide sequence of SEQ ID NO: 186,552;
[0398] 19) the sense strand comprises the nucleotide sequence of SEQ ID NO: 358, and the antisense strand comprises the nucleotide sequence of SEQ ID NO: 186,553;
[0399] 20) the sense strand comprises the nucleotide sequence of SEQ ID NO: 358, and the antisense strand comprises the nucleotide sequence of SEQ ID NO: 186,554; or
[0400] 21) the sense strand comprises the nucleotide sequence of SEQ ID NO: 358, and the antisense strand comprises the nucleotide sequence of SEQ ID NO: 186,555.

[0401] In some embodiments, a double stranded ribonucleic acid (dsRNA) targeting Mucin-5B (MUC5B) is provided, wherein the dsRNA comprises a sense strand and an antisense strand forming a double stranded region, wherein the antisense strand comprises a region of complementarity to an mRNA encoding MUC5B, and wherein;
[0402] 1) the sense strand comprises the nucleotide sequence of SEQ ID NO: 361, and the antisense strand comprises the nucleotide sequence of SEQ ID NO: 186,556;
[0403] 2) the sense strand comprises the nucleotide sequence of SEQ ID NO: 361, and the antisense strand comprises the nucleotide sequence of SEQ ID NO: 186,557;
[0404] 3) the sense strand comprises the nucleotide sequence of SEQ ID NO: 361, and the antisense strand comprises the nucleotide sequence of SEQ ID NO: 186,558;
[0405] 4) the sense strand comprises the nucleotide sequence of SEQ ID NO: 186,509, and the antisense strand comprises the nucleotide sequence of SEQ ID NO: 186,559;
[0406] 5) the sense strand comprises the nucleotide sequence of SEQ ID NO: 186,510, and the antisense strand comprises the nucleotide sequence of SEQ ID NO: 538;
[0407] 6) the sense strand comprises the nucleotide sequence of SEQ ID NO: 186,511, and the antisense strand comprises the nucleotide sequence of SEQ ID NO: 538;
[0408] 7) the sense strand comprises the nucleotide sequence of SEQ ID NO: 186,512, and the antisense strand comprises the nucleotide sequence of SEQ ID NO: 538;
[0409] 8) the sense strand comprises the nucleotide sequence of SEQ ID NO: 186,513, and the antisense strand comprises the nucleotide sequence of SEQ ID NO: 186,560;
[0410] 9) the sense strand comprises the nucleotide sequence of SEQ ID NO: 186,514, and the antisense strand comprises the nucleotide sequence of SEQ ID NO: 186,561;
[0411] 10) the sense strand comprises the nucleotide sequence of SEQ ID NO: 361, and the antisense strand comprises the nucleotide sequence of SEQ ID NO: 186,562;
[0412] 11) the sense strand comprises the nucleotide sequence of SEQ ID NO: 361, and the antisense strand comprises the nucleotide sequence of SEQ ID NO: 186,563;
[0413] 12) the sense strand comprises the nucleotide sequence of SEQ ID NO: 361, and the antisense strand comprises the nucleotide sequence of SEQ ID NO: 186,564;
[0414] 13) the sense strand comprises the nucleotide sequence of SEQ ID NO: 361, and the antisense strand comprises the nucleotide sequence of SEQ ID NO: 186,565;
[0415] 14) the sense strand comprises the nucleotide sequence of SEQ ID NO: 186,514, and the antisense strand comprises the nucleotide sequence of SEQ ID NO: 186,566;
[0416] 15) the sense strand comprises the nucleotide sequence of SEQ ID NO: 186,514, and the antisense strand comprises the nucleotide sequence of SEQ ID NO: 186,567;
[0417] 16) the sense strand comprises the nucleotide sequence of SEQ ID NO: 186,515, and the antisense strand comprises the nucleotide sequence of SEQ ID NO: 186,568;
[0418] 17) the sense strand comprises the nucleotide sequence of SEQ ID NO: 186,515, and the antisense strand comprises the nucleotide sequence of SEQ ID NO: 186,569;
[0419] 18) the sense strand comprises the nucleotide sequence of SEQ ID NO: 361, and the antisense strand comprises the nucleotide sequence of SEQ ID NO: 186,570;
[0420] 19) the sense strand comprises the nucleotide sequence of SEQ ID NO: 361, and the antisense strand comprises the nucleotide sequence of SEQ ID NO: 186,571;
[0421] 20) the sense strand comprises the nucleotide sequence of SEQ ID NO: 361, and the antisense strand comprises the nucleotide sequence of SEQ ID NO: 186,572; or
[0422] 21) the sense strand comprises the nucleotide sequence of SEQ ID NO: 361, and the antisense strand comprises the nucleotide sequence of SEQ ID NO: 186,573.

[0423] In some embodiments, a double stranded ribonucleic acid (dsRNA) targeting Mucin-5B (MUC5B) is provided, wherein the dsRNA comprises a sense strand and an antisense strand forming a double stranded region, wherein the antisense strand comprises a region of complementarity to an mRNA encoding MUC5B, and wherein;
[0424] 1) the sense strand comprises the nucleotide sequence of SEQ ID NO: 363, and the antisense strand comprises the nucleotide sequence of SEQ ID NO: 186,574;
[0425] 2) the sense strand comprises the nucleotide sequence of SEQ ID NO: 363, and the antisense strand comprises the nucleotide sequence of SEQ ID NO: 186,575;
[0426] 3) the sense strand comprises the nucleotide sequence of SEQ ID NO: 363, and the antisense strand comprises the nucleotide sequence of SEQ ID NO: 186,576;
[0427] 4) the sense strand comprises the nucleotide sequence of SEQ ID NO: 186,516, and the antisense strand comprises the nucleotide sequence of SEQ ID NO: 540;
[0428] 5) the sense strand comprises the nucleotide sequence of SEQ ID NO: 186,517, and the antisense strand comprises the nucleotide sequence of SEQ ID NO: 540;
[0429] 6) the sense strand comprises the nucleotide sequence of SEQ ID NO: 186,518, and the antisense strand comprises the nucleotide sequence of SEQ ID NO: 540;
[0430] 7) the sense strand comprises the nucleotide sequence of SEQ ID NO: 186,519, and the antisense strand comprises the nucleotide sequence of SEQ ID NO: 540;
[0431] 8) the sense strand comprises the nucleotide sequence of SEQ ID NO: 186,520, and the antisense strand comprises the nucleotide sequence of SEQ ID NO: 186,577;
[0432] 9) the sense strand comprises the nucleotide sequence of SEQ ID NO: 363, and the antisense strand comprises the nucleotide sequence of SEQ ID NO: 186,578;
[0433] 10) the sense strand comprises the nucleotide sequence of SEQ ID NO: 363, and the antisense strand comprises the nucleotide sequence of SEQ ID NO: 186,579;
[0434] 11) the sense strand comprises the nucleotide sequence of SEQ ID NO: 363, and the antisense strand comprises the nucleotide sequence of SEQ ID NO: 186,580;
[0435] 12) the sense strand comprises the nucleotide sequence of SEQ ID NO: 363, and the antisense strand comprises the nucleotide sequence of SEQ ID NO: 186,581;
[0436] 13) the sense strand comprises the nucleotide sequence of SEQ ID NO: 363, and the antisense strand comprises the nucleotide sequence of SEQ ID NO: 186,582 (usAfscga(C3)auccaugGfaCfuuguasgsu);
[0437] 14) the sense strand comprises the nucleotide sequence of SEQ ID NO: 363, and the antisense strand comprises the nucleotide sequence of SEQ ID NO: 186,583; or
[0438] 15) the sense strand comprises the nucleotide sequence of SEQ ID NO: 363, and the antisense strand comprises the nucleotide sequence of SEQ ID NO: 186,584.

[0439] In some embodiments, a double stranded ribonucleic acid (dsRNA) targeting Mucin-5B (MUC5B) is provided, wherein the dsRNA comprises a sense strand and an antisense strand forming a double stranded region, wherein the antisense strand comprises a region of complementarity to an mRNA encoding MUC5B, and wherein;
[0440] 1) the sense strand comprises the nucleotide sequence of SEQ ID NO: 364, and the antisense strand comprises the nucleotide sequence of SEQ ID NO: 186,585;
[0441] 2) the sense strand comprises the nucleotide sequence of SEQ ID NO: 364, and the antisense strand comprises the nucleotide sequence of SEQ ID NO: 186,586;
[0442] 3) the sense strand comprises the nucleotide sequence of SEQ ID NO: 364, and the antisense strand comprises the nucleotide sequence of SEQ ID NO: 186,587;
[0443] 4) the sense strand comprises the nucleotide sequence of SEQ ID NO: 186,521, and the antisense strand comprises the nucleotide sequence of SEQ ID NO: 186,588;
[0444] 5) the sense strand comprises the nucleotide sequence of SEQ ID NO: 186,522, and the antisense strand comprises the nucleotide sequence of SEQ ID NO: 541;
[0445] 6) the sense strand comprises the nucleotide sequence of SEQ ID NO: 186,523, and the antisense strand comprises the nucleotide sequence of SEQ ID NO: 541;
[0446] 7) the sense strand comprises the nucleotide sequence of SEQ ID NO: 186,524, and the antisense strand comprises the nucleotide sequence of SEQ ID NO: 541;
[0447] 8) the sense strand comprises the nucleotide sequence of SEQ ID NO: 186,525, and the antisense strand comprises the nucleotide sequence of SEQ ID NO: 186,589;
[0448] 9) the sense strand comprises the nucleotide sequence of SEQ ID NO: 186,526, and the antisense strand comprises the nucleotide sequence of SEQ ID NO: 186,590;
[0449] 10) the sense strand comprises the nucleotide sequence of SEQ ID NO: 364, and the antisense strand comprises the nucleotide sequence of SEQ ID NO: 186,591;
[0450] 11) the sense strand comprises the nucleotide sequence of SEQ ID NO: 364, and the antisense strand comprises the nucleotide sequence of SEQ ID NO: 186,592;
[0451] 12) the sense strand comprises the nucleotide sequence of SEQ ID NO: 364, and the antisense strand comprises the nucleotide sequence of SEQ ID NO: 186,593;
[0452] 13) the sense strand comprises the nucleotide sequence of SEQ ID NO: 364, and the antisense strand comprises the nucleotide sequence of SEQ ID NO: 186,594;
[0453] 14) the sense strand comprises the nucleotide sequence of SEQ ID NO: 186,526, and the antisense strand comprises the nucleotide sequence of SEQ ID NO: 186,595;
[0454] 15) the sense strand comprises the nucleotide sequence of SEQ ID NO: 186,526, and the antisense strand comprises the nucleotide sequence of SEQ ID NO: 186,596;
[0455] 16) the sense strand comprises the nucleotide sequence of SEQ ID NO: 186,527, and the antisense strand comprises the nucleotide sequence of SEQ ID NO: 186,597;
[0456] 17) the sense strand comprises the nucleotide sequence of SEQ ID NO: 186,527, and the antisense strand comprises the nucleotide sequence of SEQ ID NO: 186,598;
[0457] 18) the sense strand comprises the nucleotide sequence of SEQ ID NO: 364, and the antisense strand comprises the nucleotide sequence of SEQ ID NO: 186,599;
[0458] 19) the sense strand comprises the nucleotide sequence of SEQ ID NO: 364, and the antisense strand comprises the nucleotide sequence of SEQ ID NO: 186,600;
[0459] 20) the sense strand comprises the nucleotide sequence of SEQ ID NO: 364, and the antisense strand comprises the nucleotide sequence of SEQ ID NO: 186,601; or
[0460] 21) the sense strand comprises the nucleotide sequence of SEQ ID NO: 364, and the antisense strand comprises the nucleotide sequence of SEQ ID NO: 186,602.

[0461] In some embodiments, a double stranded ribonucleic acid (dsRNA) targeting Mucin-5B (MUC5B) is provided, wherein the dsRNA comprises a sense strand and an antisense strand forming a double stranded region, wherein the antisense strand comprises a region of complementarity to an mRNA encoding MUC5B, and wherein;
[0462] 1) the sense strand comprises the nucleotide sequence of SEQ ID NO: 356, and the antisense strand comprises the nucleotide sequence of SEQ ID NO: 186,603;
[0463] 2) the sense strand comprises the nucleotide sequence of SEQ ID NO: 356, and the antisense strand comprises the nucleotide sequence of SEQ ID NO: 186,604;
[0464] 3) the sense strand comprises the nucleotide sequence of SEQ ID NO: 356, and the antisense strand comprises the nucleotide sequence of SEQ ID NO: 186,605;
[0465] 4) the sense strand comprises the nucleotide sequence of SEQ ID NO: 186,528, and the antisense strand comprises the nucleotide sequence of SEQ ID NO: 533;
[0466] 5) the sense strand comprises the nucleotide sequence of SEQ ID NO: 186,529, and the antisense strand comprises the nucleotide sequence of SEQ ID NO: 533;
[0467] 6) the sense strand comprises the nucleotide sequence of SEQ ID NO: 186,530, and the antisense strand comprises the nucleotide sequence of SEQ ID NO: 533;
[0468] 7) the sense strand comprises the nucleotide sequence of SEQ ID NO: 186,531, and the antisense strand comprises the nucleotide sequence of SEQ ID NO: 533;
[0469] 8) the sense strand comprises the nucleotide sequence of SEQ ID NO: 186,532, and the antisense strand comprises the nucleotide sequence of SEQ ID NO: 186,606;
[0470] 9) the sense strand comprises the nucleotide sequence of SEQ ID NO: 356, and the antisense strand comprises the nucleotide sequence of SEQ ID NO: 186,607;
[0471] 10) the sense strand comprises the nucleotide sequence of SEQ ID NO: 356, and the antisense strand comprises the nucleotide sequence of SEQ ID NO: 186,608;
[0472] 11) the sense strand comprises the nucleotide sequence of SEQ ID NO: 356, and the antisense strand comprises the nucleotide sequence of SEQ ID NO: 186,609;
[0473] 12) the sense strand comprises the nucleotide sequence of SEQ ID NO: 356, and the antisense strand comprises the nucleotide sequence of SEQ ID NO: 186,610;
[0474] 13) the sense strand comprises the nucleotide sequence of SEQ ID NO: 356, and the antisense strand comprises the nucleotide sequence of SEQ ID NO: 186,611 (usAfsccg(C3)aauuuggUfcAfaacagsgsa);
[0475] 14) the sense strand comprises the nucleotide sequence of SEQ ID NO: 356, and the antisense strand comprises the nucleotide sequence of SEQ ID NO: 186,612; or
[0476] 15) the sense strand comprises the nucleotide sequence of SEQ ID NO: 356, and the antisense strand comprises the nucleotide sequence of SEQ ID NO: 186,613.

[0477] In some embodiments, a double stranded ribonucleic acid (dsRNA) targeting Mucin-5B (MUC5B) is provided, wherein the dsRNA comprises a sense strand and an antisense strand forming a double stranded region, wherein the antisense strand comprises a region of complementarity to an mRNA encoding MUC5B, and wherein;
[0478] 1) the sense strand comprises the nucleotide sequence of SEQ ID NO: 359, and the antisense strand comprises the nucleotide sequence of SEQ ID NO: 186,614;
[0479] 2) the sense strand comprises the nucleotide sequence of SEQ ID NO: 359, and the antisense strand comprises the nucleotide sequence of SEQ ID NO: 186,615;
[0480] 3) the sense strand comprises the nucleotide sequence of SEQ ID NO: 359, and the antisense strand comprises the nucleotide sequence of SEQ ID NO: 186,616;
[0481] 4) the sense strand comprises the nucleotide sequence of SEQ ID NO: 186,533, and the antisense strand comprises the nucleotide sequence of SEQ ID NO: 536;
[0482] 5) the sense strand comprises the nucleotide sequence of SEQ ID NO: 186,534, and the antisense strand comprises the nucleotide sequence of SEQ ID NO: 536;
[0483] 6) the sense strand comprises the nucleotide sequence of SEQ ID NO: 186,535, and the antisense strand comprises the nucleotide sequence of SEQ ID NO: 536;
[0484] 7) the sense strand comprises the nucleotide sequence of SEQ ID NO: 186,536, and the antisense strand comprises the nucleotide sequence of SEQ ID NO: 536;
[0485] 8) the sense strand comprises the nucleotide sequence of SEQ ID NO: 186,537, and the antisense strand comprises the nucleotide sequence of SEQ ID NO: 186,617;
[0486] 9) the sense strand comprises the nucleotide sequence of SEQ ID NO: 359, and the antisense strand comprises the nucleotide sequence of SEQ ID NO: 186,618;
[0487] 10) the sense strand comprises the nucleotide sequence of SEQ ID NO: 359, and the antisense strand comprises the nucleotide sequence of SEQ ID NO: 186,619;
[0488] 11) the sense strand comprises the nucleotide sequence of SEQ ID NO: 359, and the antisense strand comprises the nucleotide sequence of SEQ ID NO: 186,620;
[0489] 12) the sense strand comprises the nucleotide sequence of SEQ ID NO: 359, and the antisense strand comprises the nucleotide sequence of SEQ ID NO: 186,621;
[0490] 13) the sense strand comprises the nucleotide sequence of SEQ ID NO: 359, and the antisense strand comprises the nucleotide sequence of SEQ ID NO: 186,622 (usAfsgug(C3)cggguggAfaCfaaagcsusc);
[0491] 14) the sense strand comprises the nucleotide sequence of SEQ ID NO: 359, and the antisense strand comprises the nucleotide sequence of SEQ ID NO: 186,623; or
[0492] 15) the sense strand comprises the nucleotide sequence of SEQ ID NO: 359, and the antisense strand comprises the nucleotide sequence of SEQ ID NO: 186,624.

[0493] In some embodiments, a double stranded ribonucleic acid (dsRNA) targeting Mucin-5B (MUC5B) is provided, wherein the dsRNA comprises a sense strand and an antisense strand forming a double stranded region, wherein the antisense strand comprises a region of complementarity to an mRNA encoding MUC5B, and wherein
[0494] 1) the sense strand comprises the nucleotide sequence of SEQ ID NO: 186,507, and the antisense strand comprises the nucleotide sequence of SEQ ID NO: 186,543;
[0495] 2) the sense strand comprises the nucleotide sequence of SEQ ID NO: 186,512, and the antisense strand comprises the nucleotide sequence of SEQ ID NO: 538;
[0496] 3) the sense strand comprises the nucleotide sequence of SEQ ID NO: 186,514, and the antisense strand comprises the nucleotide sequence of SEQ ID NO: 186,561;
[0497] 4) the sense strand comprises the nucleotide sequence of SEQ ID NO: 361, and the antisense strand comprises the nucleotide sequence of SEQ ID NO: 186,562;
[0498] 5) the sense strand comprises the nucleotide sequence of SEQ ID NO: 361, and the antisense strand comprises the nucleotide sequence of SEQ ID NO: 186,563;
[0499] 6) the sense strand comprises the nucleotide sequence of SEQ ID NO: 364, and the antisense strand comprises the nucleotide sequence of SEQ ID NO: 186,593;
[0500] 7) the sense strand comprises the nucleotide sequence of SEQ ID NO: 364, and the antisense strand comprises the nucleotide sequence of SEQ ID NO: 186,600;
[0501] 8) the sense strand comprises the nucleotide sequence of SEQ ID NO: 356, and the antisense strand comprises the nucleotide sequence of SEQ ID NO: 186,603;
[0502] 9) the sense strand comprises the nucleotide sequence of SEQ ID NO: 356, and the antisense strand comprises the nucleotide sequence of SEQ ID NO: 186,605;
[0503] 10) the sense strand comprises the nucleotide sequence of SEQ ID NO: 186,532, and the antisense strand comprises the nucleotide sequence of SEQ ID NO: 186,606;
[0504] 11) the sense strand comprises the nucleotide sequence of SEQ ID NO: 356, and the antisense strand comprises the nucleotide sequence of SEQ ID NO: 186,607;
[0505] 12) the sense strand comprises the nucleotide sequence of SEQ ID NO: 359, and the antisense strand comprises the nucleotide sequence of SEQ ID NO: 186,614;
[0506] 13) the sense strand comprises the nucleotide sequence of SEQ ID NO: 186,536, and the antisense strand comprises the nucleotide sequence of SEQ ID NO: 536; or
[0507] 14) the sense strand comprises the nucleotide sequence of SEQ ID NO: 186,537, and the antisense strand comprises the nucleotide sequence of SEQ ID NO: 186,617.

### III. Antisense Oligonucleotides (ASOs) of the Disclosure

[0508] In some embodiments, the present disclosure provides a synthetic antisense oligonucleotide that inhibits expression of MUC5B by targeting MUC5B RNA. In some embodiments, the ASO inhibits expression of a mucin that is secreted, which, in one embodiment, comprises MUC5B. In some embodiments, the ASO inhibits expression of a cell surface-associated mucin that comprises MUC5B.

[0509] In some embodiments, the present disclosure provides an oligonucleotide having 8 to 30 linked nucleosides having a nucleobase sequence comprising a complementary region, wherein the complementary region comprises at least 8 contiguous nucleobases complementary to an equal-length portion of a target region of a MUC5B mRNA or a MUC5B transcript. In other embodiments, the antisense oligonucleotide has a nucleobase sequence comprising at least 12, at least 13, at least 14, at least 15, at least 16, at least 17, at least 18, or at least 19 contiguous nucleobases. In some embodiments, the synthetic antisense oligonucleotide comprises 14-25 or 17-22 nucleotides.

[0510] In some embodiments, targeting includes the determination of at least one target segment to which an oligonucleotide hybridizes such that a desired effect occurs. A target region may contain one or more target segments. Multiple target segments within a target region may be overlapping. Alternatively, they may be non-overlapping. In some embodiments, target segments within a target region are separated by no more than about 300 nucleotides. In some embodiments, target segments within a target region are separated by a number of nucleotides that is no more than 250, 200, 150, 100, 90, 80, 70, 60, 50, 40, 30, 20, or 10 nucleotides on the target nucleic acid or is a range defined by any two of the preceding values. In some embodiments, target segments within a target region are separated by no more than five nucleotides on the target nucleic acid. In some embodiments, target segments are contiguous.

[0511] In some embodiments, a target region is a structurally defined region of the target nucleic acid. In some embodiments, a suitable target segment may be found within a 5′ UTR, a coding region, a 3′ UTR, an intron, an exon, or an exon/intron junction. The target segment is in an exon/intron junction in one embodiment. In some embodiments, the target segment is within an exon of MUC5B. In some embodiments, the target segment is an exonic splicing silencer. In other embodiments, the target segment is an exonic splicing enhancer. In other embodiments, the target region comprises a translation initiation region, translation termination region, or other defined nucleic acid region. The structurally defined regions for MUC5B can be obtained by accession number from sequence databases such as NCBI, and such information is incorporated herein by reference.

[0512] In some embodiments, the antisense oligonucleotide is complementary to and/or targeted to MUC5B RNA (for example, GenBank Accession No. NM_002458.3). In some embodiments, the antisense oligonucleotide is complementary to and/or targeted to a portion of MUC5B mRNA. In other embodiments, the antisense oligonucleotide is complementary to and/or targeted to MUC5B pre-mRNA.

[0513] In some embodiments, the antisense oligonucleotide as described herein comprises a nucleotide sequence having at least 80%, 85%, 90%, 91%, 92%, 93%, 94%, 95%, 96%, 97%, 98%, or 99% nucleotide sequence identity to any one of SEQ ID NOs: 709-802 of Table 4. In some embodiments, the antisense oligonucleotide comprises any one of SEQ ID NOs: 709-802.

[0514] In one embodiment, the antisense oligonucleotide as described herein, for example, in Table 4, is unmodified and does not comprise, e.g., chemical modifications or conjugations known in the art and described herein. In some embodiments, the antisense oligonucleotide, as described herein, is chemically modified to enhance stability or other beneficial characteristics. In some embodiments, the antisense oligonucleotide, as described herein, comprises a nucleotide sequence selected from any one of SEQ ID NOs: 803-896 of Table 5. It will be understood that, although the sequences provided in Table 5 are described as modified or conjugated sequences, the antisense oligonucleotide of the disclosure may comprise any one of the sequences set forth in any one of Table 5 that is unmodified (for example, the sequences provided in Table 4), unconjugated, or modified or conjugated differently than described therein. One or more lipophilic ligands can be included in any of the positions of the antisense oligonucleotide provided in the instant application.

[0515] In some embodiments, at least 1, 2, 3, 4, 5, 6, 7, 8, 9, 10, 11, 12, 13, 14, 15, 16, or 17 nucleotides of the antisense oligonucleotide are modified. In some embodiments, at least 99, 98, 97, 96, 95, 94, 93, 92, 91, 90, 89, 88, 87, 86, 85, 84, 83, 82, 81, or 80% of the nucleotides of antisense oligonucleotide are modified.

[0516] In some embodiments, the present disclosure provides a synthetic antisense oligonucleotide that inhibits expression of MUC5B by targeting MUC5B RNA, wherein the antisense oligonucleotide comprises a nucleotide sequence selected from any one of SEQ ID NO: 147,339-186,429. In some embodiments, the present disclosure provides a synthetic antisense oligonucleotide that inhibits expression of MUC5B by targeting MUC5B RNA, wherein the sense sequence corresponding to the antisense oligonucleotide sequence comprises a nucleotide sequence selected from any one of SEQ ID NO: 108,248-147,338.

[0517] In some embodiments, the present disclosure provides a synthetic antisense oligonucleotide that inhibits expression of MUC5B by targeting MUC5B RNA, wherein the antisense oligonucleotide comprises at least 15, 16, or 17 contiguous nucleotides differing by no more than 3, 2, or 1 nucleotide from a nucleotide sequence selected from any one of SEQ ID NO: 147,339-186,429. In some embodiments, the present disclosure provides a synthetic antisense oligonucleotide that inhibits expression of MUC5B by targeting MUC5B RNA, wherein the sense sequence corresponding to the sequence of the antisense oligonucleotide comprises at least 15, 16, or 17 contiguous nucleotides differing by no more than 3, 2, or 1 nucleotide from a nucleotide sequence selected from any one of SEQ ID NO: 108,248-147,338.

[0518] In certain embodiments of the disclosure, substantially all of the nucleotides of the antisense oligonucleotide of the disclosure are modified. In other embodiments of the disclosure, all of the nucleotides of the antisense oligonucleotide of the disclosure are modified. The antisense oligonucleotides of the disclosure in which “substantially all of the nucleotides are modified” are largely but not wholly modified and can include not more than 5, 4, 3, 2, or 1 unmodified nucleotides. In still other embodiments of the disclosure, the antisense oligonucleotide of the disclosure can include not more than 5, 4, 3, 2, or 1 modified nucleotides.

### IV. Modified RNAi Agents and ASOs of the Disclosure

[0519] The nucleic acids featured in the disclosure can be synthesized or modified by methods well established in the art, such as those described in “Current protocols in nucleic acid chemistry,” Beaucage, S. L. et al. (Edrs.), John Wiley & Sons, Inc., New York, NY, USA, which is hereby incorporated herein by reference. Modifications include, for example, end modifications, e.g., 5′-end modifications (phosphorylation, conjugation, inverted linkages) or 3′-end modifications (conjugation, DNA nucleotides, inverted linkages, etc.); base modifications, e.g., replacement with stabilizing bases, destabilizing bases, or bases that base pair with an expanded repertoire of partners, removal of bases (abasic nucleotides), or conjugated bases; sugar modifications (e.g., at the 2′-position or 4′-position) or replacement of the sugar; or backbone modifications, including modification or replacement of the phosphodiester linkages. Modification or replacement of the phosphodiester linkages can include stereodefined phosphorothioates and neutral linkages. Stereodefined phosphorothioates can include, for example, right-handed (Rp) diastereomers at the 5′ end and left-handed (Sp) diastereomers at the 3′ end of the antisense strand of an RNAi agent or an ASO of the disclosure. A neutral phosphorothioate linkage may be, for example, an alkylphosphonate linkage, such as a methyl phosphonate (MP) or methoxypropylphosphonate (MOP) linkage. Specific examples of RNAi agents and ASOs useful in the embodiments described herein include but are not limited to, RNAs and ASOs containing modified backbones or no natural internucleoside linkages. RNAs and ASOs having modified backbones include, among others, those that do not have a phosphorus atom in the backbone. For the purposes of this specification, and as sometimes referenced in the art, modified RNAs and ASOs that do not have a phosphorus atom in their internucleoside backbone can also be considered to be oligonucleotides. In some embodiments, a modified RNAi agent or ASO will have a phosphorus atom in its internucleoside backbone.

[0520] Modified RNA and ASO backbones include, for example, phosphorothioates, chiral phosphorothioates, phosphorodithioates, phosphotriesters, aminoalkylphosphotriesters, methyl and other alkyl phosphonates including 3′-alkylene phosphonates and chiral phosphonates, phosphinates, phosphoramidates including 3′-amino phosphoramidate and aminoalkylphosphoramidates, thionophosphoramidates, thionoalkylphosphonates, thionoalkylphosphotriesters, and boranophosphates having normal 3′-5′ linkages, 2′-5′-linked analogs of these, and those having inverted polarity wherein the adjacent pairs of nucleoside units are linked 3′-5′ to 5′-3′ or 2′-5′ to 5′-2′. Various salts, e.g., sodium salts, mixed salts and free acid forms are also included. In some embodiments, an ASO comprises at least one phosphorothioate linkage between nucleotides. In some embodiments, an ASO comprises a phosphorothioate linkage between each nucleotide. In some embodiments, the sense strand of a dsRNA molecule comprises 1-10 blocks of two to ten phosphorothioate or methylphosphonate internucleotide linkages separated by 1, 2, 3, 4, 5, 6, 7, 8, 9, 10, 11, 12, 13, 14, 15, or 16 phosphate internucleotide linkages, wherein one of the phosphorothioate or methylphosphonate internucleotide linkages is placed at any position in the oligonucleotide sequence and the said sense strand is paired with an antisense strand comprising any combination of phosphorothioate, methylphosphonate and phosphate internucleotide linkages or an antisense strand comprising either phosphorothioate or methylphosphonate or phosphate linkage. In some embodiments, the antisense strand of the dsRNA molecule comprises two blocks of two phosphorothioate or methylphosphonate internucleotide linkages separated by 1, 2, 3, 4, 5, 6, 7, 8, 9, 10, 11, 12, 13, 14, 15, 16, 17, or 18 phosphate internucleotide linkages, wherein one of the phosphorothioate or methylphosphonate internucleotide linkages is placed at any position in the oligonucleotide sequence and the said antisense strand is paired with a sense strand comprising any combination of phosphorothioate, methylphosphonate and phosphate internucleotide linkages or an antisense strand comprising either phosphorothioate or methylphosphonate or phosphate linkage.

[0521] Representative U.S. patents that teach the preparation of the above phosphorus-containing linkages include, but are not limited to, U.S. Pat. Nos. 3,687,808; 4,469,863; 4,476,301; 5,023,243; 5,177,195; 5,188,897; 5,264,423; 5,276,019; 5,278,302; 5,286,717; 5,321,131; 5,399,676; 5,405,939; 5,453,496; 5,455,233; 5,466,677; 5,476,925; 5,519,126; 5,536,821; 5,541,316; 5,550,111; 5,563,253; 5,571,799; 5,587,361; 5,625,050; 6,028,188; 6,124,445; 6,160,109; 6,169,170; 6,172,209; 6,239,265; 6,277,603; 6,326,199; 6,346,614; 6,444,423; 6,531,590; 6,534,639; 6,608,035; 6,683,167; 6,858,715; 6,867,294; 6,878,805; 7,015,315; 7,041,816; 7,273,933; 7,321,029; and U.S. Pat. RE39464, the entire contents of each of which are hereby incorporated herein by reference.

[0522] Modified RNA and ASO backbones that do not include a phosphorus atom therein have backbones that are formed by short chain alkyl or cycloalkyl internucleotide linkages, mixed heteroatoms and alkyl or cycloalkyl internucleotide linkages, or one or more short chain heteroatomic or heterocyclic internucleotide linkages. These include those having morpholino linkages (formed in part from the sugar portion of a nucleoside); siloxane backbones; sulfide, sulfoxide and sulfone backbones; formacetyl and thioformacetyl backbones; methylene formacetyl and thioformacetyl backbones; alkene containing backbones; sulfamate backbones; methyleneimino and methylenehydrazino backbones; sulfonate and sulfonamide backbones; amide backbones; and others having mixed N, O, S and CH₂ component parts.

[0523] Representative U.S. patents that teach the preparation of the above oligonucleosides include, but are not limited to, U.S. Pat. Nos. 5,034,506; 5,166,315; 5,185,444; 5,214,134; 5,216,141; 5,235,033; 5,664,562; 5,264,564; 5,405,938; 5,434,257; 5,466,677; 5,470,967; 5,489,677; 5,541,307; 5,561,225; 5,596,086; 5,602,240; 5,608,046; 5,610,289; 5,618,704; 5,623,070; 5,663,312; 5,633,360; 5,677,437; and, 5,677,439, the entire contents of each of which are hereby incorporated herein by reference.

[0524] In other embodiments, suitable RNA and ASO mimetics are contemplated for use in RNAi agents and ASOs in which both the sugar and the internucleotide linkage, i.e., the backbone, of the nucleotide units are replaced with novel groups. The base units are maintained for hybridization with an appropriate nucleic acid target compound. One such oligomeric compound, an RNA and ASO mimetic that has been shown to have excellent hybridization properties, is referred to as a peptide nucleic acid (PNA). In PNA compounds, the sugar backbone of an RNA is replaced with an amide containing backbone, in particular an aminoethylglycine backbone. The nucleobases are retained and are bound directly or indirectly to aza nitrogen atoms of the amide portion of the backbone. Representative U.S. patents that teach the preparation of PNA compounds include, but are not limited to, U.S. Pat. Nos. 5,539,082; 5,714,331; and 5,719,262, the entire contents of each of which are hereby incorporated herein by reference. Additional PNA compounds suitable for use in the RNAi agents or ASOs of the disclosure are described in, for example, in Nielsen et al., Science, 1991, 254, 1497-1500.

[0525] Some embodiments featured in the disclosure include RNAs and ASOs with phosphorothioate backbones and oligonucleosides with heteroatom backbones, and in particular —CH₂—NH—CH₂—, —CH₂—N(CH₃)—O—CH₂—[known as a methylene (methylimino) or MMI backbone], —CH₂—O—N(CH₃)—CH₂—, —CH₂—N(CH₃)—N(CH₃)—CH₂— and —N(CH)—CH₂—CH₂— [wherein the native phosphodiester backbone is represented as —O—P—O—CH₂—] of the above-referenced U.S. Pat. No. 5,489,677, and the amide backbones of the above-referenced U.S. Pat. No. 5,602,240. In some embodiments, the RNAs featured herein have morpholino backbone structures of the above-referenced U.S. Pat. No. 5,034,506.

[0526] Modified RNAs and ASOs can also contain one or more substituted sugar moieties. The RNAi agents, e.g., dsRNAs, and ASOs featured herein can include one of the following at the 2′-position: OH; F; O—, S—, or N-alkyl; O—, S—, or N-alkenyl; O-, S- or N-alkynyl; or O-alkyl-O-alkyl, wherein the alkyl, alkenyl and alkynyl can be substituted or unsubstituted C₁ to C₁₀ alkyl or C₂ to C₁₀ alkenyl and alkynyl. Exemplary suitable modifications include O[(CH₂)ₙO]ₘCH₃, O(CH₂).ₙOCH₃, O(CH₂)nNH2, O(CH₂)ₙCH₃, O(CH₂)nONH2, and O(CH₂)nON[(CH₂)nCH₃)]₂, where n and m are from 1 to about 10. In other embodiments, dsRNAs and ASOs include one of the following at the 2′ position: C₁ to C₁₀ lower alkyl, substituted lower alkyl, alkaryl, aralkyl, O-alkaryl or O-aralkyl, SH, SCH₃, OCN, Cl, Br, CN, CF₃, OCF₃, SOCH₃, SO₂CH₃, ONO₂, NO₂, N₃, NH₂, heterocycloalkyl, heterocycloalkaryl, aminoalkylamino, polyalkylamino, substituted silyl, an RNA cleaving group, a reporter group, an intercalator, a group for improving the pharmacokinetic properties of an RNAi agent or ASO, or a group for improving the pharmacodynamic properties of an RNAi agent or ASO, and other substituents having similar properties. In some embodiments, the modification includes a 2′-methoxyethoxy (2′-O—CH₂CH₂OCH₃, also known as 2′-O-(2-methoxyethyl) or 2′-MOE) (Martin et al., Helv. Chim. Acta, 1995, 78:486-504) i.e., an alkoxy-alkoxy group. Another exemplary modification is 2′-dimethylaminooxyethoxy, i.e., a O(CH₂)₂ON(CH₃)₂ group, also known as 2′-DMAOE, as described in examples herein below, and 2′-dimethylaminoethoxyethoxy (also known in the art as 2′-O-dimethylaminoethoxyethyl or 2′-DMAEOE), i.e., 2′-O—CH₂—O—CH₂—N(CH₂)₂. Further exemplary modifications include: 5′-Me-2′-F nucleotides, 5′-Me-2′-OMe nucleotides, 5′-Me-2′-deoxynucleotides, (both R and S isomers in these three families); 2′-alkoxyalkyl; and 2′-NMA (N-methylacetamide).

[0527] Other modifications include 2′-methoxy (2′-OCH₃), 2′-aminopropoxy (2′-OCH₂CH₂CH₂NH₂), 2′-O-hexadecyl, and 2′-fluoro (2′-F). Similar modifications can also be made at other positions on an RNAi agent or ASO, particularly the 3′ position of the sugar on the 3′ terminal nucleotide or in 2′-5′ linked dsRNAs or ASO, and the 5′ position of 5′ terminal nucleotide. RNAi agents and ASOs can also have sugar mimetics such as cyclobutyl moieties in place of the pentofuranosyl sugar. Representative U.S. patents that teach the preparation of such modified sugar structures include, but are not limited to, U.S. Pat. Nos. 4,981,957; 5,118,800; 5,319,080; 5,359,044; 5,393,878; 5,446,137; 5,466,786; 5,514,785; 5,519,134; 5,567,811; 5,576,427; 5,591,722; 5,597,909; 5,610,300; 5,627,053; 5,639,873; 5,646,265; 5,658,873; 5,670,633; and 5,700,920, certain of which are commonly owned with the instant application. The entire contents of each of the foregoing are hereby incorporated herein by reference.

[0528] An RNAi agent or ASO of the disclosure can also include nucleobase (often referred to in the art simply as “base”) modifications or substitutions. As used herein, “unmodified” or “natural” nucleobases include the purine bases adenine (A) and guanine (G), and the pyrimidine bases thymine (T), cytosine (C) and uracil (U). Modified nucleobases include other synthetic and natural nucleobases such as 5-methylcytosine (5-me-C), 5-hydroxymethyl cytosine, xanthine, hypoxanthine, 2-aminoadenine, 6-methyl and other alkyl derivatives of adenine and guanine, 2-propyl and other alkyl derivatives of adenine and guanine, 2-thiouracil, 2-thiothymine and 2-thiocytosine, 5-halouracil and cytosine, 5-propynyl uracil and cytosine, 6-azo uracil, cytosine and thymine, 5-uracil (pseudouracil), 4-thiouracil, 8-halo, 8-amino, 8-thiol, 8-thioalkyl, 8-hydroxyl anal other 8-substituted adenines and guanines, 5-halo, particularly 5-bromo, 5-trifluoromethyl and other 5-substituted uracils and cytosines, 7-methylguanine and 7-methyladenine, 8-azaguanine and 8-azaadenine, 7-deazaguanine and 7-daazaadenine and 3-deazaguanine and 3-deazaadenine. Further nucleobases include those disclosed in U.S. Pat. No. 3,687,808, those disclosed in Modified Nucleosides in Biochemistry, Biotechnology and Medicine, Herdewijn, P. ed. Wiley-VCH, 2008, those disclosed in The Concise Encyclopedia Of Polymer Science And Engineering, pages 858-859, Kroschwitz, J. L, ed. John Wiley & Sons, 1990, these disclosed by Englisch et al., (1991) Angewandte Chemie, International Edition, 30:613, and those disclosed by Sanghvi, Y S., Chapter 15, dsRNA Research and Applications, pages 289-302, Crooke, S. T. and Lebleu, B., Ed., CRC Press, 1993. Certain of these nucleobases are particularly useful for increasing the binding affinity of the oligomeric compounds featured in the disclosure. These include 5-substituted pyrimidines, 6-azapyrimidines and N-2, N-6 and 0-6 substituted purines, including 2-aminopropyladenine, 5-propynyluracil and 5-propynylcytosine. 5-methylcytosine substitutions have been shown to increase nucleic acid duplex stability by 0.6-1.2° C. (Sanghvi, Y. S., Crooke, S. T. and Lebleu, B., Eds., dsRNA Research and Applications, CRC Press, Boca Raton, 1993, pp. 276-278) and are exemplary base substitutions, even more particularly when combined with 2′-O-methoxyethyl sugar modifications.

[0529] Representative U.S. patents that teach the preparation of certain of the above noted modified nucleobases as well as other modified nucleobases include, but are not limited to, the above noted U.S. Pat. Nos. 3,687,808, 4,845,205; 5,130,30; 5,134,066; 5,175,273; 5,367,066; 5,432,272; 5,457,187; 5,459,255; 5,484,908; 5,502,177; 5,525,711; 5,552,540; 5,587,469; 5,594,121, 5,596,091; 5,614,617; 5,681,941; 5,750,692; 6,015,886; 6,147,200; 6,166,197; 6,222,025; 6,235,887; 6,380,368; 6,528,640; 6,639,062; 6,617,438; 7,045,610; 7,427,672; and 7,495,088, the entire contents of each of which are hereby incorporated herein by reference.

[0530] In some embodiments, at least one of the modified nucleotides is selected from a deoxy-nucleotide, a 3′-terminal deoxy-thymine (dT) nucleotide, a 2′-O-methyl modified nucleotide, a 2′-fluoro modified nucleotide, a 2′-deoxy-modified nucleotide, a locked nucleotide, an unlocked nucleotide, a conformationally restricted nucleotide, a constrained ethyl nucleotide, an abasic nucleotide, a 2-amino-modified nucleotide, a 2′-O-allyl-modified nucleotide, 2′-C-alkyl-modified nucleotide, a 2′-methoxyethyl modified nucleotide, a 2′-O-alkyl-modified nucleotide, a morpholino nucleotide, a phosphoramidate, a non-natural base comprising nucleotide, a tetrahydropyran modified nucleotide, a 1,5-anhydrohexitol modified nucleotide, a cyclohexenyl modified nucleotide, a nucleotide comprising a 5′-phosphorothioate group, a phosphorothioate linkage, a nucleotide comprising a 5′-methylphosphonate group, a nucleotide comprising a 5′ phosphate or 5′ phosphate mimic, a nucleotide comprising vinyl phosphonate, a nucleotide comprising adenosine-glycol nucleic acid (GNA), a nucleotide comprising thymidine-glycol nucleic acid (GNA) S-Isomer, a nucleotide comprising 2-hydroxymethyl-tetrahydrofurane-5-phosphate, a nucleotide comprising 2′-deoxythymidine-3′ phosphate, a nucleotide comprising 2′-deoxyguanosine-3′-phosphate, a 2′-0 hexadecyl nucleotide, a nucleotide comprising a 2′-phosphate, a cytidine-2′-phosphate nucleotide, a guanosine-2′-phosphate nucleotide, a 2′-O-hexadecyl-cytidine-3′-phosphate nucleotide, a 2′-O-hexadecyl-adenosine-3′-phosphate nucleotide, a 2′-O-hexadecyl-guanosine-3′-phosphate nucleotide, a 2′-O-hexadecyl-uridine-3′-phosphate nucleotide, a 5′-vinyl phosphonate (VP or vin- (e.g., vin-u)), a 2′-deoxyadenosine-3′-phosphate nucleotide, a 2′-deoxycytidine-3′-phosphate nucleotide, a 2′-deoxyguanosine-3′-phosphate nucleotide, a 2′-deoxythymidine-3′-phosphate nucleotide, a 2′-deoxyuridine nucleotide, and a terminal nucleotide linked to a cholesteryl derivative and a dodecanoic acid bisdecylamide group; and combinations thereof.

[0531] An RNAi agent or ASO of the disclosure can also be modified to include one or more bicyclic sugar moieties. A “bicyclic sugar” is a furanosyl ring modified by the bridging of two atoms. A “bicyclic nucleoside” (“BNA”) is a nucleoside having a sugar moiety comprising a bridge connecting two carbon atoms of the sugar ring, thereby forming a bicyclic ring system. In certain embodiments, the bridge connects the 4′-carbon and the 2′-carbon of the sugar ring. Thus, in some embodiments, an RNAi agent or ASO of the disclosure may include one or more locked nucleic acids (LNA). A locked nucleic acid is a nucleotide having a modified ribose moiety in which the ribose moiety comprises an extra bridge connecting the 2′ and 4′ carbons. In other words, an LNA is a nucleotide comprising a bicyclic sugar moiety comprising a 4′-CH2-O-2′ bridge. This structure effectively “locks” the ribose in the 3′-endo structural conformation. The addition of locked nucleic acids has been shown to increase stability in serum, and to reduce off-target effects (Elmen, J. et al., (2005) Nucleic Acids Research 33(1):439-447; Mook, OR. et al., (2007) Mol Cane Ther 6(3):833-843; Grunweller, A. et al., (2003) Nucleic Acids Research 31(12):3185-3193). The entire contents of each of the foregoing are hereby incorporated herein by reference. In some embodiments, ASOs of the disclosure can comprise at least one locked nucleotide at both the 5′ and 3′ end. In some embodiments, ASOs of the disclosure can comprise 17 nucleotides and two locked nucleotides at both the 5′ and 3′ end. In some embodiments, ASOs of the disclosure can comprise 17 nucleotides and three locked nucleotides at both the 5′ and 3′ end.

[0532] Examples of bicyclic nucleosides for use in the polynucleotides of the disclosure include, without limitation, nucleosides comprising a bridge between the 4′ and the 2′ ribosyl ring atoms. In certain embodiments, the antisense polynucleotide agents of the disclosure include one or more bicyclic nucleosides comprising a 4′ to 2′ bridge. Examples of such 4′ to 2′ bridged bicyclic nucleosides, include but are not limited to 4′-(CH2)-O-2′ (LNA); 4′-(CH2)-S-2′; 4′-(CH2)2-O-2′ (ENA); 4′-CH(CH3)-O-2′ (also referred to as “constrained ethyl” or “cEt”) and 4′-CH(CH2OCH3)-O-2′ (and analogs thereof; see, e.g., U.S. Pat. No. 7,399,845); 4′-C(CH3)(CH3)-O-2′ (and analogs thereof; see e.g., U.S. Pat. No. 8,278,283); 4′-CH2-N(OCH3)-2′ (and analogs thereof; see e.g., U.S. Pat. No. 8,278,425); 4′-CH2-O—N—(CH3)-2′ (see, e.g., U.S. Patent Publication No. 2004/0171570); 4′-CH2-N(R)—O-2′, wherein R is H, C1-C12 alkyl, or a protecting group (see, e.g., U.S. Pat. No. 7,427,672); 4′-CH2-C(H)(CH3)-2′ (see, e.g., Chattopadhyaya et al., J. Org. Chem., 2009, 74, 118-134); and 4′-CH2-C(═CH2)-2′ (and analogs thereof; see, e.g., U.S. Pat. No. 8,278,426).

[0533] Additional representative U.S. Patents and U.S. Patent Publications that teach the preparation of locked nucleic acid nucleotides include, but are not limited to, the following: U.S. Pat. Nos. 6,268,490; 6,525,191; 6,670,461; 6,770,748; 6,794,499; 6,998,484; 7,053,207; 7,034, 133;7, 084, 125; 7,399,845; 7,427,672; 7,569,686; 7,741,457; 8,022,193; 8,030,467; 8,278,425; 8,278,426; 8,278,283; US 2008/0039618; and US 2009/0012281, the entire contents of each of which are hereby incorporated herein by reference.

[0534] A RNAi agent or ASO of the disclosure can also be modified to include one or more constrained ethyl nucleotides. As used herein, a “constrained ethyl nucleotide” or “cEt” is a locked nucleic acid comprising a bicyclic sugar moiety comprising a 4′-CH(CH3)-O-2′ bridge. In one embodiment, a constrained ethyl nucleotide is in the S conformation referred to herein as “S-cEt.”

[0535] In some embodiments, an RNAi agent or ASO of the disclosure comprises one or more monomers that are UNA (unlocked nucleic acid) nucleotides. A UNA is an unlocked acyclic nucleic acid, wherein any of the bonds of the sugar have been removed, forming an unlocked “sugar” residue. In one example, a UNA also encompasses monomer in which bonds between C1′-C4′ have been removed (i.e. the covalent carbon-oxygen-carbon bond between the C1′ and C4′ carbons). In another example, the C2′-C3′ bond (i.e. the covalent carbon-carbon bond between the C2′ and C3′ carbons) of the sugar has been removed (see Nuc. Acids Symp. Series, 52, 133-134 (2008) and Fluiter et al., Mol. Biosyst., 2009, 10, 1039 hereby incorporated by reference).

[0536] In some embodiments, an RNAi agent or ASO of the disclosure comprises one or more nucleotides with a C3 spacer modification. The C3 spacer is a 3-carbon chain attached to the 3′ end of the nucleotide and replaces a nucleotide base in the sense or antisense strand. SEQ ID NOs: 186,582, 186,611, and 186,622 provided herein in Table 9 have C3 spacers at position 6. The full sequence of each of these antisense strands is shown in Table 9 herein.

[0537] Representative U.S. publications that teach the preparation of UNAs include, but are not limited to, U.S. Pat. No. 8,314,227; and U.S. Patent Publication Nos. 2013/0096289; 2013/0011922; and 2011/0313020, the entire contents of each of which are hereby incorporated herein by reference.

[0538] Potentially stabilizing modifications to the ends of RNA molecules or ASOs can include N-(acetylaminocaproyl)-4-hydroxyprolinol (Hyp-C6-NHAc), N-(caproyl-4-hydroxyprolinol (Hyp-C6), N-(acetyl-4-hydroxyprolinol (Hyp-NHAc), thymidine-2′-O-deoxythymidine (ether), N-(aminocaproyl)-4-hydroxyprolinol (Hyp-C6-amino), 2-docosanoyl-uridine-3″-phosphate, inverted base dT(idT) and others.

[0539] Other modifications of an RNAi agent or ASO of the disclosure include a 5′ phosphate or 5′ phosphate mimic, e.g., a 5′-terminal phosphate or phosphate mimic on the ASO or the antisense strand of an RNAi agent. Suitable phosphate mimics are disclosed in, for example US 2012/0157511, the entire contents of which are incorporated herein by reference.

[0540] Modifications of an RNAi agent or ASO of the disclosure include modifications described in International Patent Publication No. WO2021/142245, the contents of which are incorporated herein by reference.

[0541] In some embodiments, a double stranded ribonucleic acid (dsRNA) targeting Mucin-5B (MUC5B) is provided, wherein the dsRNA comprises a sense strand and an antisense strand forming a double stranded region, wherein the antisense strand comprises a region of complementarity to an mRNA encoding MUC5B. In some embodiments, the sense and antisense strands are selected from any one of the sense and antisense pairs in Table 2 or Table 3. In some embodiments, the sense strand comprises the nucleic acid sequence of any one of SEQ ID NOs: 1, 7, 10, 20, 23, 26, 29, 32, 37, 41, 44, 48, 53, 56, 60, 65, 71, 75, 81, 86, 89, 95, 98, 101, 104, 111, 114, 117, 120, 123, 126, 130, 133, 137, 140, 143, 148, 151, 153, 161, 166, 169, 172, and 177; and the antisense strand comprises the nucleic acid sequence of any one of SEQ ID NOs: 178, 184, 187, 197, 200, 203, 206, 209, 214, 218, 221, 225, 230, 233, 237, 242, 248, 252, 258, 263, 266, 272, 275, 278, 281, 288, 291, 294, 297, 300, 303, 307, 310, 314, 317, 320, 325, 328, 330, 338, 343, 346, 349, and 354.

[0542] In some embodiments, the sense strand is 21 nucleotides in length and the antisense strand is 23 nucleotides in length. In some embodiments, the sense strand further comprises the following modifications: 2′-OMe modified nucleotides at positions 1-4, 6-8, 12-18, and 20-21, and a phosphorothioate (PTO) modified nucleotide at position 20; and the antisense strand further comprises the following modifications: a 2′-deoxiuridine-3′-phosphate at position 1, 2′-OMe modified nucleotides at positions 13 and 22-23, and a phosphorothioate (PTO) modified nucleotide at position 22, wherein the numbering of nucleotides is in 5′ to 3′ order. In some embodiments, the sense and antisense strands further comprise any one or more of the following modifications (wherein the numbering of nucleotides is in 5′ to 3′ order);
[0543] 1) 2′-OMe modified nucleotides at positions 2-4 of the antisense strand;
[0544] 2) 2′-OMe modified nucleotides at positions 2-5 of the antisense strand;
[0545] 3) 2′-OMe modified nucleotides at positions 3-5 of the antisense strand;
[0546] 4) Replacement of adenine or cytosine at positions 17 or 18 of the sense strand and positions 5 or 4 of the antisense strand with guanine or uracil to form a G-U Wobble base pairing at either of the corresponding duplex positions;
[0547] 5) A duplex internal mismatch at position 12 in the sense strand, wherein position 12 of the sense strand comprises the same nucleotide as the corresponding duplex position, position 10, of the antisense strand;
[0548] 6) A duplex internal mismatch at position 11 in the sense strand, wherein position 11 of the sense strand comprises the same nucleotide as the corresponding duplex position, position 11, of the antisense strand;
[0549] 7) A duplex internal mismatch at position 10 in the sense strand, wherein position 10 of the sense strand comprises the same nucleotide as the corresponding duplex position, position 12, of the antisense strand;
[0550] 8) Replacement of any one of positions 1 or 2 of the sense strand and/or positions 21 or 20 of the antisense strand with a guanine or a cytosine to form a C-G stabilizing duplex corresponding to: position 1 of the sense strand duplexed with position 21 of the antisense strand, or position 2 of the sense strand duplexed with position 20 of the antisense strand;
[0551] 9) Phosphorothioate (PTO) modified nucleotides at positions 1-2 and 19-20 of the sense strand and positions 1-2 and 21-22 of the antisense strand;
[0552] 10) A 5′-vinyl phosphonate modified nucleotide at position 1 of the antisense strand;
[0553] 11) A GNA modified nucleotide at position 6 of the antisense strand;
[0554] 12) A GNA modified nucleotide at position 7 of the antisense strand;
[0555] 13) 2′-methoxyethoxy (2′-O—CH2CH2OCH3) modified nucleotides (MOE) at positions 9 and 10 of the antisense strand;
[0556] 14) Phosphorothioate (PTO) modified nucleotides at positions 1-2 and 19-20 of the sense strand, 2′-OMe modified nucleotides at positions 3-5, 7-13, 15, and 17-23 of the antisense strand, phosphorothioate (PTO) modified nucleotides at positions 1-2 and 21-22 of the antisense strand, and a 5′-vinyl phosphonate modified nucleotide at position 1 of the antisense strand;
[0557] 15) Replacement of RNA nucleotides with DNA nucleotides at positions 5, and 9-11, and 19 of the sense strand, phosphorothioate (PTO) modified nucleotides at positions 1-2 and 19-20 of the sense strand, 2′-OMe modified nucleotides at positions 3-5, 8-13, 15, and 17-23 of the antisense strand, phosphorothioate (PTO) modified nucleotides at positions 1-2 and 21-22 of the antisense strand, replacement of RNA nucleotides with DNA nucleotides at positions 6, 14, and 16 of the antisense strand, and a GNA modified nucleotide at position 7 of the antisense strand;
[0558] 16) A 2′OMe modified nucleotide at position 2 of the antisense strand and a 5′-vinyl phosphonate modified nucleotide at position 1 of the antisense strand;
[0559] 17) Phosphorothioate (PTO) modified nucleotides at positions 1-2 and 19-20 of the sense strand and positions 1-2 and 21-22 of the antisense strand, and a 5′-vinyl phosphonate modified nucleotide at position 1 of the antisense strand;
[0560] 18) Phosphorothioate (PTO) modified nucleotides at positions 1-2 and 19-20 of the sense strand, replacement of RNA nucleotides with DNA nucleotides at positions 5, 9-11, and 19 of the sense strand, phosphorothioate (PTO) modified nucleotides at positions 1-2 and 21-22 of the antisense strand, replacement of RNA nucleotides with DNA nucleotides at positions 2, 6, 14, and 16 of the antisense strand, and a 5′-vinyl phosphonate modified nucleotide at position 1 of the antisense strand;
[0561] 19) A 5′-vinyl phosphonate modified nucleotide at position 1 of the antisense strand and a GNA modified nucleotide at position 7 of the antisense strand;
[0562] 20) A 5′-vinyl phosphonate modified nucleotide at position 1 of the antisense strand, a GNA modified nucleotide at position 7 of the antisense strand, and 2′-OMe modified nucleotides at positions 3-5 of the antisense strand; or
[0563] 21) A 5′-vinyl phosphonate modified nucleotide at position 1 of the antisense strand, a GNA modified nucleotide at position 7 of the antisense strand, 2′-OMe modified nucleotides at positions 3-5 of the antisense strand, and MOE modified nucleotides at positions 9 and 10 of the antisense strand.

[0564] The modifications described in the previous paragraph are demonstrated, for example, in FIG. 2.

[0565] In some embodiments, the sense strand comprises the nucleic acid sequence of any one of SEQ ID NOs: 4, 6, 19, 22, 25, 31, 36, 40, 43, 47, 50, 52, 55, 59, 64, 70, 74, 80, 85, 88,94, 97, 100, 103, 110, 113, 116, 119, 122, 125, 129, 132, 136, 139, 142, 147, 150, 160, 165, 168, 171, and 176, and the antisense strand comprises the nucleic acid sequence of any one of SEQ ID NOs: 181, 183, 196, 199, 202, 208, 213, 217, 220, 224, 227, 229, 232, 236, 241, 247, 251, 257, 262, 265, 271, 274, 277, 280, 287, 290, 293, 296, 299, 302, 306, 309, 313, 316, 319, 324, 327, 337, 342, 345, 348, and 353. In some embodiments, the sense strand is 19 nucleotides in length and the antisense strand is 21 nucleotides in length. In some embodiments, the sense strand further comprises the following modifications: 2′-OMe modified nucleotides at positions 1-2, 4-6, 10-11, 13-16, and 18-19, and a phosphorothioate (PTO) modified nucleotide at position 18; and the antisense strand further comprises the following modifications: a 2′-deoxiuridine-3′-phosphate at position 1, 2′-OMe modified nucleotides at positions 13 and 20-21, and a phosphorothioate (PTO) modified nucleotide position 20, wherein the numbering of nucleotides is in 5′ to 3′ order. In some embodiments, the sense and antisense strands further comprise any one or more of the following modifications (wherein the numbering of nucleotides is in 5′ to 3′ order);
[0566] 1) 2′-OMe modified nucleotides at positions 2-4 of the antisense strand;
[0567] 2) 2′-OMe modified nucleotides at positions 2-5 of the antisense strand;
[0568] 3) 2′-OMe modified nucleotides at positions 3-5 of the antisense strand;
[0569] 4) Replacement of adenine or cytosine at positions 15 or 16 of the sense strand and positions 5 or 4 of the antisense strand with guanine or uracil to form a G-U Wobble base pairing at either of the corresponding duplex positions;
[0570] 5) A duplex internal mismatch at position 10 in the sense strand, wherein position 10 of the sense strand comprises the same nucleotide as the corresponding duplex position, position 10, of the antisense strand;
[0571] 6) A duplex internal mismatch at position 9 in the sense strand, wherein position 9 of the sense strand comprises the same nucleotide as the corresponding duplex position, position 11, of the antisense strand;
[0572] 7) A duplex internal mismatch at position 8 in the sense strand, wherein position 8 of the sense strand comprises the same nucleotide as the corresponding duplex position, position 12, of the antisense strand;
[0573] 8) Replacement of any one of positions 1 or 2 of the sense strand and/or positions 19 or 18 of the antisense strand with a guanine or a cytosine to form a C-G stabilizing duplex corresponding to: position 1 of the sense strand duplexed with position 19 of the antisense strand, or position 2 of the sense strand duplexed with position 18 of the antisense strand;
[0574] 9) Phosphorothioate (PTO) modified nucleotides at positions 1-2 and 17-19 of the sense strand and positions 1-2 and 20-21 of the antisense strand;
[0575] 10) A 5′-vinyl phosphonate modified nucleotide at position 1 of the antisense strand;
[0576] 11) A GNA modified nucleotide at position 6 of the antisense strand;
[0577] 12) A GNA modified nucleotide at position 7 of the antisense strand;
[0578] 13) 2′-methoxyethoxy (2′-O—CH2CH2OCH3) modified nucleotides (MOE) at positions 7 and 9 of the antisense strand;
[0579] 14) Phosphorothioate (PTO) modified nucleotides at positions 1-2 and 17-18 of the sense strand, 2′-OMe modified nucleotides at positions 3-5, 7-13, 15, and 17-21 of the antisense strand, phosphorothioate (PTO) modified nucleotides at positions 1-2 and 20-21 of the antisense strand, and a 5′-vinyl phosphonate modified nucleotide at position 1 of the antisense strand;
[0580] 15) Replacement of RNA nucleotides with DNA nucleotides at positions 3, and 7-9, and 17 of the sense strand, phosphorothioate (PTO) modified nucleotides at positions 1-2 and 17-18 of the sense strand, 2′-OMe modified nucleotides at positions 3-5, 8-13, 15, and 17-21 of the antisense strand, phosphorothioate (PTO) modified nucleotides at positions 1-2 and 20-21 of the antisense strand, replacement of RNA nucleotides with DNA nucleotides at positions 6, 14, and 16 of the antisense strand, and a GNA modified nucleotide at position 7 of the antisense strand;
[0581] 16) A 2′OMe modified nucleotide at position 2 of the antisense strand and a 5′-vinyl phosphonate modified nucleotide at position 1 of the antisense strand;
[0582] 17) Phosphorothioate (PTO) modified nucleotides at positions 1-2 and 17-18 of the sense strand and positions 1-2 and 19-20 of the antisense strand, and a 5′-vinyl phosphonate modified nucleotide at position 1 of the antisense strand;
[0583] 18) Phosphorothioate (PTO) modified nucleotides at positions 1-2 and 17-18 of the sense strand, replacement of RNA nucleotides with DNA nucleotides at positions 3, 7-9, and 17 of the sense strand, phosphorothioate (PTO) modified nucleotides at positions 1-2 and 19-20 of the antisense strand, replacement of RNA nucleotides with DNA nucleotides at positions 2, 6, 14, and 16 of the antisense strand, and a 5′-vinyl phosphonate modified nucleotide at position 1 of the antisense strand;
[0584] 19) A 5′-vinyl phosphonate modified nucleotide at position 1 of the antisense strand and a GNA modified nucleotide at position 7 of the antisense strand;
[0585] 20) A 5′-vinyl phosphonate modified nucleotide at position 1 of the antisense strand, a GNA modified nucleotide at position 7 of the antisense strand, and 2′-OMe modified nucleotides at positions 3-5 of the antisense strand; or
[0586] 21) A 5′-vinyl phosphonate modified nucleotide at position 1 of the antisense strand, a GNA modified nucleotide at position 7 of the antisense strand, 2′-OMe modified nucleotides at positions 3-5 of the antisense strand, and MOE modified nucleotides at positions 9 and 10 of the antisense strand.

[0587] The modifications described in the previous paragraph are demonstrated, for example, in FIG. 2.

[0588] In some embodiments, the sense strand comprises the nucleic acid sequence of any one of SEQ ID NOs: 2, 3, 5, 8, 9, 11, 12, 13, 14, 15, 16, 17, 18, 21, 24, 27, 28, 30, 33, 34, 35, 38, 39, 42, 45, 46, 49, 51, 54, 57, 58, 61, 62, 63, 66, 67, 68, 69, 72, 73, 76, 77, 78, 79, 82, 83, 84, 87, 90, 91, 92, 93, 96, 99, 102, 105, 106, 107, 108, 109, 112, 115, 118, 121, 124, 127, 128, 131, 134, 135, 138, 141, 144, 145, 146, 149, 152, 154, 155, 156, 157, 158, 159, 162, 163, 164, 167, 170, 173, 174, and 175, and the antisense strand comprises the nucleic acid sequence of any one of SEQ ID NOs: 179, 180, 182, 185, 186, 188, 189, 190, 191, 192, 193, 194, 195, 198, 201, 204, 205, 207, 210, 211, 212, 215, 216, 219, 222, 223, 226, 228, 231, 234, 235, 238, 239, 240, 243, 244, 245, 246, 249, 250, 253, 254, 255, 256, 259, 260, 261, 264, 267, 268, 269, 270, 273, 276, 279, 282, 283, 284, 285, 286, 289, 292, 295, 298, 301, 304, 305, 308, 311, 312, 315, 318, 321, 322, 323, 326, 329, 331, 332, 333, 334, 335, 336, 339, 340, 341, 344, 347, 350, 351, and 352. In some embodiments, the sense strand is 21 nucleotides in length and the antisense strand is 23 nucleotides in length. In some embodiments, the sense strand further comprises the following modifications: 2′-OMe modified nucleotides at positions 1-6, 8, and 12-21, phosphorothioate (PTO) modified nucleotides at positions 1-2, and 2′-Fluoro modified nucleotides at positions 7, and 9-11; and the antisense strand further comprises the following modifications: 2′-OMe modified nucleotides at positions 1, 3-5, 7-13, 15, and 17-23, phosphorothioate (PTO) modified nucleotides at positions 1-2, and 21-22, and 2′-Fluoro modified nucleotides at positions 2, 14, and 16, wherein the numbering of nucleotides is in 5′ to 3′ order. In some embodiments, the sense and antisense strands further comprise any one or more of the following modifications (wherein the numbering of nucleotides is in 5′ to 3′ order);
[0589] 1) A 5′-vinyl phosphonate modified nucleotide at position 1 of the antisense strand;
[0590] 2) A GNA modified nucleotide at position 6 of the antisense strand;
[0591] 3) A GNA modified nucleotide at position 7 of the antisense strand;
[0592] 4) Replacement of the RNA nucleotide at position 11 of the sense strand with a DNA nucleotide;
[0593] 5) A duplex internal mismatch at position 12 in the sense strand, wherein position 12 of the sense strand comprises the same nucleotide as the corresponding duplex position, position 10, of the antisense strand;
[0594] 6) A duplex internal mismatch at position 11 in the sense strand, wherein position 11 of the sense strand comprises the same nucleotide as the corresponding duplex position, position 11, of the antisense strand;
[0595] 7) A duplex internal mismatch at position 10 in the sense strand, wherein position 10 of the sense strand comprises the same nucleotide as the corresponding duplex position, position 12, of the antisense strand;
[0596] 8) Replacement of adenine or cytosine at any one of positions 15-19 of the sense strand and the corresponding positions 3-7 of the antisense strand with guanine or uracil to form a G-U Wobble base pairing at the corresponding duplex positions;
[0597] 9) MOE modified nucleotides at positions 22 and 23 of the antisense strand;
[0598] 10) A 2′-OMe modified nucleotide at position 2 of the antisense strand and a 5′-vinyl phosphonate modified nucleotide at position 1 of the antisense strand.
[0599] 11) An abasic RNA nucleotide at position 6 of the antisense strand;
[0600] 12) An abasic DNA nucleotide at position 6 of the antisense strand;
[0601] 13) A C3 spacer at position 6 of the antisense strand;
[0602] 14) A 2′-OMe modified abasic RNA nucleotide at position 6 of the antisense strand; or
[0603] 15) A 2′-Fluoro modified abasic RNA nucleotide at position 6 of the antisense strand.

[0604] The modifications described in the previous paragraph are demonstrated, for example, in FIG. 3.

[0605] In some embodiments, the double stranded ribonucleic acid (dsRNA) targeting Mucin-5B (MUC5B), comprises any one or more modified nucleotides which confer any one or more of the following characteristics compared to the unmodified dsRNA sequence;
[0606] 1) Improved efficacy;
[0607] 2) Improved potency;
[0608] 3) Improved stability; and/or
[0609] 4) Reduced off-target effects.

[0610] In some embodiments, the double stranded ribonucleic acid (dsRNA) targeting Mucin-5B (MUC5B), comprises any one or more modified nucleotides which confer any one or more of the above characteristics 1-4 as compared to the unmodified dsRNA or to the starting V0 dsRNA described in Example 4, Table 9. For example, for the 12706_EEL_19/21mer, the starting V0 dsRNA sense strand comprises the nucleotide sequence of SEQ ID NO: 358, and the antisense strand comprises the nucleotide sequence of SEQ ID NO: 535. This starting V0 dsRNA was further modified as described in Example 4 to generate 21 new modified dsRNA variants, listed as V01-V23 in Table 9.

[0611] Efficacy, in the context of the characteristics above, is defined herein as the extent of MUC5B silencing by the dsRNA. Efficacy can be measured by various assays, including the on-target reporter assay described in Example 4 herein. In some embodiments, efficacy is defined as the on-target mean maximum score at 24 hours post transfection, as described in Example 4. Exemplary results for modified dsRNA efficacy are shown in Table 10. In some embodiments, modified dsRNA of the present disclosure generate a lower mean maximum on-target score at 24 hours post transfection than the corresponding starting V0 dsRNA, indicating improved efficacy of the modified dsRNA compared to the starting V0 dsRNA.

[0612] Potency, in the context of the characteristics above, is defined herein as the dose of dsRNA required for MUC5B silencing. In some embodiments, potency is assayed using a dose-response experiment, described in Example 4 herein. In some embodiments, potency is defined as the IC50, or concentration of dsRNA required to reach 50% of the maximum silencing effect. Exemplary results for modified dsRNA potency are shown in Table 10. In some embodiments, modified dsRNA of the present disclosure generate a lower IC50 than the corresponding starting V0 dsRNA, indicating improved potency of the modified dsRNA, as a lower dose of dsRNA is required to generate the same degree of silencing.

[0613] Stability, in the context of the characteristics above, is defined herein as reduced MUC5B expression more than 24 hours after transfection with dsRNA. In some embodiments, dsRNA stability is assayed using real time quantitative PCR (RT-PCR) 5 days after dsRNA transfection, as described in Example 4. Exemplary results for modified dsRNA stability are shown in Table 10. In some embodiments, modified dsRNA of the present disclosure generate a lower mean maximum on-target score at day 5 than the corresponding starting V0 dsRNA, indicating increased stability of the modified dsRNA.

[0614] Off-target effects, or off-target activity, in the context of the characteristics above, are defined herein as dsRNA binding to non-target sequences. Off-target effects can be assayed in various ways, including the off-target reporter assay described in Example 4 herein. In some embodiments, reduced off-target effects of modified dsRNA are defined as any mean maximum off-target score greater than that of the corresponding V0 starting variant. In some embodiments, a reduced off-target score is defined as an off-target mean maximum score greater than, for example, 90% as assayed by the off-target reporter assay described in Example 4. Exemplary results for modified dsRNA off-target effects are shown in Table 10.

[0615] In some embodiments, the double stranded ribonucleic acid (dsRNA) targeting Mucin-5B (MUC5B), comprises any one or more modified nucleotides which confer any one or more of the following characteristics compared to the corresponding starting dsRNA, V0 as described in Example 4 and Table 9:
[0616] 1) Improved efficacy, wherein efficacy is defined as an on-target mean maximum score at 24 hours within the range of the on-target mean maximum score of the starting V0 dsRNA 2, 3, or 4 standard deviations. In some embodiments, efficacy is assayed using an on-target reporter system described in Example 4. In some embodiments, efficacy is defined as an on-target mean maximum score at 24 hours that is no greater than the mean maximum on-target score of starting V0 variant+10%;
[0617] 2) Improved potency, wherein potency is defined as a reduced on-target IC50 compared to that of the starting V0 dsRNA. In some embodiments, potency is assayed using an on-target reporter system described in Example 4. In some embodiments, the IC50 is more than 2-fold, 5-fold, or 10-fold lower than that of the starting V0 dsRNA;
[0618] 3) An off-target score greater than 80%, 85%, 90%, or 95%, as defined in Table 10. In some embodiments, the off-target activity is assayed using an off-target reporter system described in Example 4.
[0619] 4) Improved stability, defined as an on-target mean maximum score at day 5 within the range of the mean on-target score at day 5 of the starting V0 dsRNA ±2, 3, or 4 standard deviations. In some embodiments, the on-target score at day 5 is assayed using real-time quantitative PCR for MUC5B mRNA expression as described in Example 4.

[0620] In a specific embodiment, for example, the modified dsRNA of the present disclosure displays improved off-target activity while retaining the efficacy, potency, and stability of the starting V0 dsRNA and/or the unmodified dsRNA.

[0621] Experimental results for exemplary dsRNA pairs shown in Table 9 are presented in Table 10.

[0622] In one embodiment, the modified dsRNA of the present disclosure display any one or more of the following characteristics as compared to the starting V0 dsRNA: improved efficacy, improved potency, improved stability, and/or reduced off-target effects. Exemplary dsRNA exhibiting one or more of these characteristics include those that are set forth below;
[0623] 1) 12706_EEL_19/21mer_V09, wherein the sense strand comprises the nucleotide sequence of SEQ ID NO: 186,507, and the antisense strand comprises the nucleotide sequence of SEQ ID NO: 186,543;
[0624] 2) 12706_EEL_21/23mer_V07, wherein the sense strand comprises the nucleotide sequence of SEQ ID NO: 186,512, and the antisense strand comprises the nucleotide sequence of SEQ ID NO: 538;
[0625] 3) 12706_EEL_21/23mer_V09, wherein the sense strand comprises the nucleotide sequence of SEQ ID NO: 186,514, and the antisense strand comprises the nucleotide sequence of SEQ ID NO: 186,561;
[0626] 4) 12706_EEL_21/23mer_V10, wherein the sense strand comprises the nucleotide sequence of SEQ ID NO: 361, and the antisense strand comprises the nucleotide sequence of SEQ ID NO: 186,562;
[0627] 5) 12706_EEL_21/23mer_V11, wherein the sense strand comprises the nucleotide sequence of SEQ ID NO: 361, and the antisense strand comprises the nucleotide sequence of SEQ ID NO: 186,563;
[0628] 6) 15478_EEL_21/23mer_V12, wherein the sense strand comprises the nucleotide sequence of SEQ ID NO: 364, and the antisense strand comprises the nucleotide sequence of SEQ ID NO: 186,593;
[0629] 7) 15478_EEL_21/23mer_V21, wherein the sense strand comprises the nucleotide sequence of SEQ ID NO: 364, and the antisense strand comprises the nucleotide sequence of SEQ ID NO: 186,600;
[0630] 8) 15539_DV22_21/23mer_V01, wherein the sense strand comprises the nucleotide sequence of SEQ ID NO: 356, and the antisense strand comprises the nucleotide sequence of SEQ ID NO: 186,603;
[0631] 9) 15539_DV22_21/23mer_V03, wherein the sense strand comprises the nucleotide sequence of SEQ ID NO: 356, and the antisense strand comprises the nucleotide sequence of SEQ ID NO: 186,605;
[0632] 10) 15539_DV22_21/23mer_V08, wherein the sense strand comprises the nucleotide sequence of SEQ ID NO: 186,532, and the antisense strand comprises the nucleotide sequence of SEQ ID NO: 186,606;
[0633] 11) 15539_DV22_21/23mer_V09, wherein the sense strand comprises the nucleotide sequence of SEQ ID NO: 356, and the antisense strand comprises the nucleotide sequence of SEQ ID NO: 186,607;
[0634] 12) 219_DV22_21/23mer_V01, wherein the sense strand comprises the nucleotide sequence of SEQ ID NO: 359, and the antisense strand comprises the nucleotide sequence of SEQ ID NO: 186,614;
[0635] 13) 219_DV22_21/23mer_V07, wherein the sense strand comprises the nucleotide sequence of SEQ ID NO: 186,536, and the antisense strand comprises the nucleotide sequence of SEQ ID NO: 536; and
[0636] 14) 219_DV22_21/23mer_V08, wherein the sense strand comprises the nucleotide sequence of SEQ ID NO: 186,537, and the antisense strand comprises the nucleotide sequence of SEQ ID NO: 186,617.

[0637] In another embodiment, the modified dsRNA of the present disclosure display improved efficacy, defined as a mean maximum on-target score at 24 hours within 3 standard deviations from the mean of the starting V0 dsRNA. The following modified dsRNA of the present disclosure, described further in Example 4 herein, for example, display improved efficacy, defined as a mean maximum on-target score at 24 hours within 3 standard deviations from the mean of the starting V0 dsRNA;
[0638] 1) 12706_EEL_19/21mer_V09, wherein the sense strand comprises the nucleotide sequence of SEQ ID NO: 186,507, and the antisense strand comprises the nucleotide sequence of SEQ ID NO: 186,543;
[0639] 2) 15478_EEL_21/23mer_V12, wherein the sense strand comprises the nucleotide sequence of SEQ ID NO: 364, and the antisense strand comprises the nucleotide sequence of SEQ ID NO: 186,593;
[0640] 3) 15478_EEL_21/23mer_V21, wherein the sense strand comprises the nucleotide sequence of SEQ ID NO: 364, and the antisense strand comprises the nucleotide sequence of SEQ ID NO: 186,600;
[0641] 4) 15539_DV22_21/23mer_V01, wherein the sense strand comprises the nucleotide sequence of SEQ ID NO: 356, and the antisense strand comprises the nucleotide sequence of SEQ ID NO: 186,603;
[0642] 5) 15539_DV22_21/23mer_V03, wherein the sense strand comprises the nucleotide sequence of SEQ ID NO: 356, and the antisense strand comprises the nucleotide sequence of SEQ ID NO: 186,605;
[0643] 6) 15539_DV22_21/23mer_V08, wherein the sense strand comprises the nucleotide sequence of SEQ ID NO: 186,532, and the antisense strand comprises the nucleotide sequence of SEQ ID NO: 186,606;
[0644] 7) 15539_DV22_21/23mer_V09, wherein the sense strand comprises the nucleotide sequence of SEQ ID NO: 356, and the antisense strand comprises the nucleotide sequence of SEQ ID NO: 186,607;
[0645] 8) 219_DV22_21/23mer_V01, wherein the sense strand comprises the nucleotide sequence of SEQ ID NO: 359, and the antisense strand comprises the nucleotide sequence of SEQ ID NO: 186,614; and
[0646] 9) 219_DV22_21/23mer_V08, wherein the sense strand comprises the nucleotide sequence of SEQ ID NO: 186,537, and the antisense strand comprises the nucleotide sequence of SEQ ID NO: 186,617.

[0647] In a further embodiment, modified dsRNA of the present disclosure, described further in Example 4 herein, display improved efficacy, defined as a mean maximum on-target score at 24 hours that is no greater than the mean maximum on-target score of starting V0 variant+10%. For example, the following modified dsRNA of the present disclosure, described further in Example 4 herein, display improved efficacy, defined as a mean maximum on-target score at 24 hours that is no greater than the mean maximum on-target score of starting V0 variant+10%;
[0648] 1) 12706_EEL_21/23mer_V07, wherein the sense strand comprises the nucleotide sequence of SEQ ID NO: 186,512, and the antisense strand comprises the nucleotide sequence of SEQ ID NO: 538;
[0649] 2) 12706_EEL_21/23mer_V09, wherein the sense strand comprises the nucleotide sequence of SEQ ID NO: 186,514, and the antisense strand comprises the nucleotide sequence of SEQ ID NO: 186,561;
[0650] 3) 12706_EEL_21/23mer_V10, wherein the sense strand comprises the nucleotide sequence of SEQ ID NO: 361, and the antisense strand comprises the nucleotide sequence of SEQ ID NO: 186,562; and
[0651] 4) 12706_EEL_21/23mer_V11, wherein the sense strand comprises the nucleotide sequence of SEQ ID NO: 361, and the antisense strand comprises the nucleotide sequence of SEQ ID NO: 186,563.

[0652] In another embodiment, the modified dsRNA of the present disclosure, described further in Example 4 herein, display a potency as determined by an IC50 equivalent to or less than the IC50 of the staring V0 dsRNA For example, the following modified dsRNA of the present disclosure, described further in Example 4 herein, have IC50 of equal to or less than the IC50 of the staring V0 dsRNA;
[0653] 1) 219_DV22_21/23mer_V01, wherein the sense strand comprises the nucleotide sequence of SEQ ID NO: 359, and the antisense strand comprises the nucleotide sequence of SEQ ID NO: 186,614
[0654] 2) 219_DV22_21/23mer_V07, wherein the sense strand comprises the nucleotide sequence of SEQ ID NO: 186,536, and the antisense strand comprises the nucleotide sequence of SEQ ID NO: 536; and
[0655] 3) 219_DV22_21/23mer_V08, wherein the sense strand comprises the nucleotide sequence of SEQ ID NO: 186,537, and the antisense strand comprises the nucleotide sequence of SEQ ID NO: 186,617.

[0656] In another embodiment, the modified dsRNA of the present disclosure, described further in Example 4 herein, display improved stability, defined as a mean maximum on-target score at day 5 within 3 standard deviations from the mean of the starting V0 dsRNA. For example, the following modified dsRNA of the present disclosure, described further in Example 4 herein, display improved stability, defined as a mean maximum on-target score at day 5 within 3 standard deviations from the mean of the starting V0 dsRNA;
[0657] 1) 12706_EEL_19/21mer_V09, wherein the sense strand comprises the nucleotide sequence of SEQ ID NO: 186,507, and the antisense strand comprises the nucleotide sequence of SEQ ID NO: 186,543;
[0658] 2) 12706_EEL_21/23mer_V07, wherein the sense strand comprises the nucleotide sequence of SEQ ID NO: 186,512, and the antisense strand comprises the nucleotide sequence of SEQ ID NO: 538;
[0659] 3) 12706_EEL_21/23mer_V09, wherein the sense strand comprises the nucleotide sequence of SEQ ID NO: 186,514, and the antisense strand comprises the nucleotide sequence of SEQ ID NO: 186,561;
[0660] 4) 12706_EEL_21/23mer_V10, wherein the sense strand comprises the nucleotide sequence of SEQ ID NO: 361, and the antisense strand comprises the nucleotide sequence of SEQ ID NO: 186,562;
[0661] 5) 15478_EEL_21/23mer_V12, wherein the sense strand comprises the nucleotide sequence of SEQ ID NO: 364, and the antisense strand comprises the nucleotide sequence of SEQ ID NO: 186,593;
[0662] 6) 15478_EEL_21/23mer_V21, wherein the sense strand comprises the nucleotide sequence of SEQ ID NO: 364, and the antisense strand comprises the nucleotide sequence of SEQ ID NO: 186,600;
[0663] 7) 15539_DV22_21/23mer_V01, wherein the sense strand comprises the nucleotide sequence of SEQ ID NO: 356, and the antisense strand comprises the nucleotide sequence of SEQ ID NO: 186,603;
[0664] 8) 219_DV22_21/23mer_V01, wherein the sense strand comprises the nucleotide sequence of SEQ ID NO: 359, and the antisense strand comprises the nucleotide sequence of SEQ ID NO: 186,614;
[0665] 9) 219_DV22_21/23mer_V07, wherein the sense strand comprises the nucleotide sequence of SEQ ID NO: 186,536, and the antisense strand comprises the nucleotide sequence of SEQ ID NO: 536; or
[0666] 10) 219_DV22_21/23mer_V08, wherein the sense strand comprises the nucleotide sequence of SEQ ID NO: 186,537, and the antisense strand comprises the nucleotide sequence of SEQ ID NO: 186,617.

[0667] In a further embodiment, modified dsRNA of the present disclosure, described further in Example 4 herein, display reduced off-target effects, defined as an off-target score greater than 95%. For example, the following modified dsRNA of the present disclosure, described further in Example 4 herein, display reduced off-target effects, defined as an off-target score greater than 95% as described in Example 4, Table 10;
[0668] 1) 12706_EEL_19/21mer_V09
[0669] 2) 12706_EEL_21/23mer_V07
[0670] 3) 12706 EEL_21/23mer_V09
[0671] 4) 12706_EEL_21/23mer_V10
[0672] 5) 12706_EEL_21/23mer_V11
[0673] 6) 15478_EEL_21/23mer_V12
[0674] 7) 15478 EEL_21/23mer_V21
[0675] 8) 15539_DV22_21/23mer_V03
[0676] 9) 15539_DV22_21/23mer_V08
[0677] 10) 219_DV22_21/23mer_V01
[0678] 11) 219_DV22_21/23mer_V07
[0679] 12) 219_DV22_21/23mer_V08

### V. RNAis and ASOs Conjugated to Ligands

[0680] The RNAi and ASO agents of the disclosure can contain conjugations that optimize one or more properties of the RNAi agent or ASO. In many cases, a carbohydrate moiety will be attached to a modified subunit of the RNAi agent or ASO. For example, the ribose sugar of one or more ribonucleotide subunits of a dsRNA agent or ASO can be replaced with another moiety, e.g., a non-carbohydrate (preferably cyclic) carrier to which is attached a carbohydrate ligand. A ribonucleotide subunit in which the ribose sugar of the subunit has been replaced is referred to herein as a ribose replacement modification subunit (RRMS). A cyclic carrier may be a carbocyclic ring system, i.e., all ring atoms are carbon atoms, or a heterocyclic ring system, i.e., one or more ring atoms may be a heteroatom, e.g., nitrogen, oxygen, sulfur. The cyclic carrier may be a monocyclic ring system or may contain two or more rings, e.g., fused rings. The cyclic carrier may be a fully saturated ring system, or it may contain one or more double bonds.

[0681] The ligand may be attached to the polynucleotide via a carrier. The carriers include (i) at least one “backbone attachment point,” preferably two “backbone attachment points” and (ii) at least one “tethering attachment point.” A “backbone attachment point” as used herein refers to a functional group, e.g. a hydroxyl group, or generally, a bond available for, and that is suitable for incorporation of the carrier into the backbone, e.g., the phosphate, or modified phosphate, e.g., sulfur containing, backbone, of a ribonucleic acid. A “tethering attachment point” (TAP) in some embodiments refers to a constituent ring atom of the cyclic carrier, e.g., a carbon atom or a heteroatom (distinct from an atom which provides a backbone attachment point), that connects a selected moiety. The moiety can be, e.g., a carbohydrate, e.g. monosaccharide, disaccharide, trisaccharide, tetrasaccharide, oligosaccharide and polysaccharide. Optionally, the selected moiety is connected by an intervening tether to the cyclic carrier. Thus, the cyclic carrier will often include a functional group, e.g., an amino group, or generally, provide a bond, that is suitable for incorporation or tethering of another chemical entity, e.g., a ligand to the constituent ring. The cyclic group carrier can be selected from pyrrolidinyl, pyrazolinyl, pyrazolidinyl, imidazolinyl, imidazolidinyl, piperidinyl, piperazinyl, [1,3]dioxolane, oxazolidinyl, isoxazolidinyl, morpholinyl, thiazolidinyl, isothiazolidinyl, quinoxalinyl, pyridazinonyl, tetrahydrofuryl and decalin. In some cases, the cyclic carrier is an acyclic moiety, for example an acyclic moiety, such as a moiety based on a serinol backbone or a diethanolamine backbone.

[0682] An RNAi agent or ASO of the disclosure can be chemically linked to one or more ligands, moieties, or conjugates that enhance the activity, cellular distribution, or cellular uptake of the iRNA or ASO, e.g., into a cell. Such moieties include but are not limited to lipid moieties such as a cholesterol moiety (Letsinger et al., Proc. Natl. Acid. Sci. USA, 1989, 86: 6553-6556), cholic acid (Manoharan et al., Biorg. Med. Chem. Let., 1994, 4:1053-1060), a thioether, e.g., beryl-S-tritylthiol (Manoharan et al., Ann. N.Y. Acad. Sci., 1992, 660:306-309; Manoharan et al., Biorg. Med. Chem. Let., 1993, 3:2765-2770), a thiocholesterol (Oberhauser et al., Nucl. Acids Res., 1992, 20:533-538), an aliphatic chain, e.g., dodecandiol or undecyl residues (Saison-Behmoaras et al., EMBO J, 1991, 10: 1111-1118; Kabanov et al., FEBS Lett., 1990, 259:327-330: Svinarchuk et al., Biochimie, 1993, 75:49-54), a phospholipid, e.g., di-hexadecyl-rac-glycerol or triethyl-ammonium 1,2-di-O-hexadecyl-rac-glycero-3-phosphonate (Manoharan et al., Tetrahedron Lett., 1995, 36:3651-3654; Shea et al., Nucl. Acids Res., 1990, 18:3777-3783), a polyamine or a polyethylene glycol chain (Manoharan et al., Nucleosides & Nucleotides, 1995, 14:969-973), or adamantane acetic acid (Manoharan et al., Tetrahedron Lett., 1995, 36:3651-3654), a palmityl moiety (Mishra et al., Biochim. Biophys. Acta, 1995, 1264:229-237), or an octadecylamine or hexylamino-carbonyloxycholesterol moiety (Crooke et al., J. Pharmacol. Exp. Ther., 1996, 277:923-937).

[0683] In certain embodiments, a ligand alters the distribution, targeting or lifetime of an iRNA agent or ASO into which it is incorporated. In some embodiments, a ligand provides an enhanced affinity for a selected target, e.g., molecule, cell or cell type, compartment, e.g., a cellular or organ compartment, tissue, organ or region of the body, as, e.g., compared to a species absent such a ligand. Typical ligands will not take part in duplex pairing in a duplexed nucleic acid.

[0684] Ligands can include a naturally occurring substance, such as a protein (e.g., human serum albumin (HSA), low-density lipoprotein (LDL), or globulin); carbohydrate (e.g., a dextran, pullulan, chitin, chitosan, inulin, cyclodextrin or hyaluronic acid); or a lipid. The ligand may also be a recombinant or synthetic molecule, such as a synthetic polymer, e.g., a synthetic polyamino acid. Examples of polyamino acids include polyamino acid is a polylysine (PLL), poly L-aspartic acid, poly L-glutamic acid, styrene-maleic acid anhydride copolymer, poly(L-lactide-co-glycolied) copolymer, divinyl ether-maleic anhydride copolymer, N-(2-hydroxypropyl)methacrylamide copolymer (HMPA), polyethylene glycol (PEG), polyvinyl alcohol (PVA), polyurethane, poly(2-ethylacryllic acid), N-isopropylacrylamide polymers, or polyphosphazine. Example of polyamines include: polyethylenimine, polylysine (PLL), spermine, spermidine, polyamine, pseudopeptide-polyamine, peptidomimetic polyamine, dendrimer polyamine, arginine, amidine, protamine, cationic lipid, cationic porphyrin, quaternary salt of a polyamine, or a helical peptide.

[0685] Ligands can also include targeting groups, e.g., a cell or tissue targeting agent, such as a targeting ligand that targets a lung tissue, e.g., a lectin, glycoprotein, lipid, or protein, e.g., an antibody, that binds to a specified cell type. A targeting group can be a thyrotropin, melanotropin, lectin, glycoprotein, surfactant protein A, mucin carbohydrate, multivalent lactose, multivalent galactose, N-acetyl-galactosamine, N-acetyl-glucosamine multivalent mannose, multivalent fucose, glycosylated polyaminoacids, multivalent galactose, transferrin, bisphosphonate, polyglutamate, polyaspartate, a lipid, cholesterol, a steroid, bile acid, folate, vitamin B12, biotin, or an RGD peptide or RGD peptide mimetic. In some embodiments, the targeting ligand is a lipophilic moiety, e.g., a C16, and/or a carbohydrate moiety, e.g., a GalNAc ligand, or any other ligand that directs the RNAi agent or ASO to a site of interest. In some embodiments, the lipophilic moiety contains a saturated or unsaturated C4-C30 hydrocarbon chain and an optional functional group selected from the group consisting of hydroxyl, amine, carboxylic acid, sulfonate, phosphate, thiol, azide, and alkyne. In some embodiments, the lipophilic moiety contains a saturated or unsaturated C6-C18 hydrocarbon chain. In certain embodiments, the lipophilic moiety targeting ligand is a 2′-O-hexadecyl (C16) conjugate. In some embodiments, the lipophilic moiety contains a saturated or unsaturated C16 hydrocarbon chain. In one embodiment, the saturated or unsaturated C16 hydrocarbon chain is conjugated to position 6, counting from the 5′-end of the strand.

[0686] Ligands that may be conjugated to an RNAi agent or ASO of the disclosure for the purpose of targeting include moieties disclosed in International Patent Publication No. WO2021/142245, the contents of which are incorporated herein by reference.

### VI. Lipid Particles

[0687] RNAi agents, e.g., dsRNAs, or ASOs of the present disclosure may be fully encapsulated in a lipid formulation, e.g., a lipid nanoparticle (LNP), or other nucleic acid-lipid particles. As used herein, the term “LNP” refers to a stable nucleic acid-lipid particle.

[0688] LNP formulations may include ionizable lipids, PEG-lipids, helper lipids, cholesterol and cholesterol-based lipids, amphiphilic block copolymers and/or polymers, and combinations thereof. Ionizable lipids mediate encapsulation of nucleic acids and self-assembly of LNPs during formulation and promote endosomal release of the nucleic acids once the LNP is taken up by a cell. The ionizable lipid may be a cationic lipid, which LNPs typically contain together with a non-cationic lipid and a lipid that prevents aggregation of the particle (e.g., a PEG-lipid conjugate). Cationic lipids have a head group with permanent positive charges. Ionizable lipids are protonated and thus positively charged at low pH, but they are generally neutral at physiological pH. This pH sensitivity can aid RNAi agent or ASO delivery, because neutral lipids may have fewer interactions with the anionic membranes of blood cells and, thus, improve the biocompatibility of lipid nanoparticles. Ionizable lipids are protonated in endosomes, where the pH is lower than outside the cell. Thus, in the endosomes, ionizable lipids will be positively charged, facilitating membrane destabilization and endosomal escape of the LNPs.

[0689] Cationic or ionizable lipids for LNPs may include, for example, 3,6-bis(4-(bis(2-hydroxydodecyl)amino)butyl)piperazine-2,5-dione (cKK-E12); 1,1′-((2-(4-(2-((2-(bis(2-hydroxydodecyl)amino)ethyl) (2-hydroxydodecyl)amino)ethyl) piperazin-1-yl)ethyl)azanediyl) bis(dodecan-2-ol) (C12-200); ((4-hydroxybutyl)azanediyl)bis(hexane-6,1-diyl)bis(2-hexyldecanoate) (ALC-0315); Dimethyldioctadecylammonium bromide (DDAB); heptadecan-9-yl 8-((2-hydroxyethylx6-oxo-6-(undecyloxy)hexyl)amino) octanoate (Lipid H/SM-102); (6Z,9Z,28Z,31Z)-heptatriaconta-6,9,28,31-tetraen-19-yl 4-(dimethylamino) butanoate (DLin-MC3-DMA); DLin-KC2-DMA; 1,2-dilinoleyloxy-N,N-dimethyl-3-aminopropane (DLin-DMA); hexa(octan-3-yl) 9,9′,9″,9″,9″″,9′″″-((((benzene-1,3,5-tricarbonyl)yris(azanediyl)) tris (propane-3,1-diyl)) tris(azanetriyl))hexanonanoate (FTT5); LP01; (((3,6-dioxopiperazine-2,5-diyl)bis(butane-4, 1-diyl))bis(azanetriyl))tetrakis(ethane-2,1-diyl) (9Z,9′Z,9″Z,9″Z,12Z,12′Z,12″Z,12′″Z)-tetrakis (octadeca-9,12-dienoate) (OF-Deg-Lin); ethyl 5,5-di((Z)-heptadec-8-en-1-yl)-1-(3-(pyrrolidin-1-yl)propyl)-2,5-dihydro-1H-imidazole-2-carboxylate (A2-Iso5-2DC18); tetrakis(8-methylnonyl) 3,3′,3″,3′-(((methylazanediyl) bis(propane-3,1 diyl))bis (azanetriyl))tetrapropionate (306Oᵢ₁ₒ); bis(2-(dodecyldisulfanyl)ethyl) 3,3′-((3-methyl-9-oxo-10-oxa-13,14-dithia-3,6-diazahexacosyl)azanediyl)dipropionate (BAME-O16B); N¹,N³,N⁵-tris(3-(didodecylamino)propyl)benzene-1,3,5-tricarboxamide (TT3); or decyl (2-(dioctylammonio)ethyl) phosphate (9A1p9). Additional cationic lipids can include 1,2-di-O-octadecenyl-3-trimethylammonium-propane (DOTMA); 2,3-dioleyloxy-N-[2-(sperminecarboxamido)ethyl]-N,N-dimethyl-1-propanaminium trifluoroacetate (DOSPA); 1,2-dioleoyl-3-trimethylammonium-propane (DOTAP); or ethylphosphatidylcholine (ePC).

[0690] Cholesterol-based compounds can include cholesterol or a modified version or analogue thereof, such as oxidized cholesterols, esterified cholesterols, or phytosterols. Exemplary modified cholesterols include (3S,8S,9S,10R,13R,14S,17R)-17-((2R,5R)-5-ethyl-6-methylheptan-2-yl)-10,13-dimethyl-2,3,4,7,8,9,10,11,12,13,14,15,16,17-tetradecahydro-1H-cyclopenta[a]phenanthren-3-ol (p-sitosterol); 2-(((((3S,8S,9S,10R,13R,14S,17R)-10,13-dimethyl-17-((R)-6-methylheptan-2-yl)-2,3,4,7,8,9,10,11,12,13,14,15,16,17-tetradecahydro-1H-cyclopenta[a]phenanthren-3-yl)oxy)carbonyl)amino)-N,N-bis(2-hydroxyethyl)-N-methylethan-1-aminium bromide (BHEM-Cholesterol); and 3β-[N—(N′,N′-dimethylaminoethane)-carbamoyl]cholesterol (DC-Cholesterol).

[0691] PEG-lipids can include compounds such as polyethylene glycol-2000-C-DMG (PEG-2000-C-DMG); 1,2-dimyristoyl-rac-glycero-3-methoxypolyethylene glycol-2000 (PEG-2000-DMG, a.k.a. DMG-PEG₂₀₀₀); and 2-[(polyethylene glycol)-2000]—N,N-ditetradecylacetamide (ALC-0159).

[0692] “Helper lipids” can include compounds such as 1,2-distearoyl-sn-glycero-3-phosphocholine (DSPC); and 1,2-dioleoyl-sn-glycero-3-phosphoethanolamine (DOPE); or other phospholipids.

[0693] In some embodiments, an LNP includes one of each of a cationic lipid, a cholesterol or cholesterol derivative, a PEG-lipid, and a helper lipid. Certain structures or types of LNP components or LNP charge ratio (lipid to RNA ratio) may be selected for specific delivery profiles. A delivery profile may be determined by the size and charge of the LNP, which is acquired through changes in the molar compositions of the four types of lipids typically used in an LNP formulation. Examples include the use of increasing amounts of DMG-PEG2000 from 0.004 μmol to 0.12 μmol to reduce the LNP size from 200 nm to 30 nm and the use of CHEMS at ˜20 mol % to obtain negatively charged LNP. (Nakamura T., et al., The Effect of Size and Charge of Lipid Nanoparticles Prepared by Microfluidic Mixing on Their Lymph Node Transitivity and Distribution. Mol. Pharm. 17:944-953 (2020)); replacing traditional linear PEG-lipids with 3% Tween 20, which contains three PEG chains and a single lipid chain (Zukancic D., et al., The Importance of Poly(ethylene glycol) and Lipid Structure in Targeted Gene Delivery to Lymph Nodes by Lipid Nanoparticles. Pharmaceutics. 12:1068 (2020), the disclosures of which are incorporated herein by reference. An additional lipid may be introduced to achieve passive targeting, where such lipids have been termed selective organ targeting (SORT) lipids (Dilliard S. A., Cheng Q., Siegwart D. J. On the mechanism of tissue-specific mRNA delivery by selective organ targeting nanoparticles. Proc. Natl. Acad. Sci. USA. 118:e2109256118 (2021); and Cheng Q., et al., Selective organ targeting (SORT) nanoparticles for tissue-specific mRNA delivery and CRISPR-Cas gene editing. Nat. Nanotechnol. 15:313-320 (2020), the disclosures of which are incorporated herein by reference. These SORT lipids may be introduced to the LNP formulation by dissolution in THF or ethanol at different molar ratios before mixing with the RNA to obtain targeting to specific tissues including the lung. (Cheng Q., et al., Nat. Nanotechnol. 15:313-320 (2020 (Id); Liu S., et al., Membrane-destabilizing ionizable phospholipids for organ-selective mRNA delivery and CRISPR-Cas gene editing. Nat. Mater. 20:701-710 (2021); Alvarez-Benedicto E., et al., Optimization of phospholipid chemistry for improved lipid nanoparticle (LNP) delivery of messenger RNA (mRNA) Biomater. Sci. 10:549-559 (2022); Lee S. M., et al., A Systematic Stud of Unsaturation in Lipid Nanoparticles Leads to Improved mRNA Transfection In Vivo. Angew. Chem. Int. Ed. Engl. 60:5848-5853 (2021), the disclosures of which are incorporated herein by reference.

[0694] Further examples of LNP formulation designs that facilitate targeting to specific tissues include those described in Dahlman et al. In vivo endothelial siRNA delivery using polymeric nanoparticles with low molecular weight. Nature Nanotechnology 9(8), 648-655 (2014); Khan, O. F. et al. Endothelial siRNA delivery in nonhuman primates using ionizable low-molecular weight polymeric nanoparticles. Sci. Adv. 4, eaar8409 (2018); Sago, C. D. et al. Nanoparticles that deliver RNA to bone marrow identified by in vivo directed evolution. J. Am. Chem. Soc. 140, 17095-17105 (2018); Paunovska, K. et al. Analyzing 2000 in vivo drug delivery data points reveals cholesterol structure impacts nanoparticle delivery. ACS Nano 12, 8341-8349 (2018); Lokugamage, M. P. et al. Optimization of lipid nanoparticles for the delivery of nebulized therapeutic mRNA to the lungs. Nat. Biomed. Eng. 5, 1059-1068 (2021); Mui, B. L. et al. Influence of polyethylene glycol lipid desorption rates on pharmacokinetics and pharmacodynamics of siRNA lipid nanoparticles. Mol. Ther. Nucleic acids 2, e139 (2013); and Ryals, R. C. et al. The effects of PEGylation on LNP based mRNA delivery to the eye. PLoS ONE 15, e0241006 (2020) (changing the cholesterol, PEG-lipid or ‘helper’ lipid can alter delivery profile), the disclosures of which are each incorporated herein by reference. In some embodiments, LNPs with increased zeta potential or increased positive charge, for example, may increase delivery to the lungs, as described in Kranz, L. M. et al. Systemic RNA delivery to dendritic cells exploits antiviral defence for cancer immunotherapy. Nature 534, 396-401 (2016); and Kauffman, K. J. et al. Rapid, single-cell analysis and discovery of vectored mRNA transfection in vivo with a loxP-flanked tdtomato reporter mouse. Mol. Ther. Nucleic Acids 10, 55-63 (2018), the disclosures of which are incorporated herein by reference. Additional exemplary LNP components may be one or more of those described in Kulkarni, J. A., Cullis, P. R. & van der Meel, R. Lipid nanoparticles enabling gene therapies: from concepts to clinical utility. Nucleic Acid. Ther. 28, 146-157 (2018); and Cheng, X. & Lee, R. J. The role of helper lipids in lipid nanoparticles (LNPs) designed for oligonucleotide delivery. Adv. Drug Deliv. Rev. 99, 129-137 (2016), the disclosures of which are incorporated herein by reference. In some embodiments, an RNAi agent or ASO may be formulated in an LNP that comprises each of a cationic lipid, a cholesterol or a modified version or analogue thereof, a PEG-lipid, and a helper lipid.

[0695] In some embodiments, an LNP may incorporate biodegradable lipids containing ester linkages in the lipid tails and/or linker group which may be eliminated more rapidly and may exhibit improved safety profiles compared with non-biodegradable lipids. For example, introducing ester bonds in the linker and lipidic tails of MC3, yielding the lipid di((Z)-non-2-en-1-yl) 9-((4-(dimethylamino)butanoyl)oxy)heptadecanedioate (L319), has been observed to improve delivery efficacy and faster elimination from the liver and plasma in vivo relative to MC3. Improved in vivo delivery efficacy and pharmacokinetics have also been observed using biodegradable lipids heptadecan-9-yl 8-((2-hydroxyethylx8-(nonyloxy)-8-oxooctyl)amino)octanoate (Lipid 5), heptadecan-9-yl 8-((2-hydroxyethyl)(6-oxo-6-(undecyloxy)hexyl)amino) octanoate (Lipid H (SM-102)) and ((4-hydroxybutyl)azanediyl)bis(hexane-6,1-diyl)bis(2-hexyldecanoate) (ALC-0315) compared to MC3. Two of these biodegradable lipids, SM-102 and ALC-0315, are the ionizable lipids in the mRNA-1273 and BNT162b COVID-19 vaccines, respectively. Biodegradable lipids can also include ester and/or disulfide linkages. Cleavage of the disulfide bonds can promote intraparticle nucleophilic attack on an ester linkage, thereby facilitating degradation of the lipids.

[0696] Zwitterionic ionizable lipids can also be employed in an LNP for delivery of an RNAi agent or ASO of the disclosure. For example, lipids composed of a pH-switchable zwitterion and three hydrophobic tails can assemble into a cone in the pH environment of the endosome, whereby membrane hexagonal transformation can occur and allow endosomal escape, allowing delivery of the RNA cargo to the cytoplasm.

[0697] Libraries of chemically distinct lipid molecules that have been synthesized using chemistries such as Michael addition-based, epoxide-based and alcohol-based reactions (See, e.g., Altinoglu, S., Wang, M. & Xu, Q. Combinatorial library strategies for synthesis of cationic lipid-like nanoparticles and their potential medical applications. Nanomedicine 10, 643-657 (2015); and Zhang, Y., Sun, C., Wang, C., Jankovic, K. E. & Dong, Y. Lipids and lipid derivatives for RNA delivery. Chem. Rev. 121, 12181-12277 (2021), incorporated herein by reference) may be screened to identify lipids, lipid derivatives and lipid-derived molecules that may be used for delivery of RNAi agents or ASOs of the disclosure.

[0698] LNPs useful for formulation of the RNAi agents or ASOs of the disclosure also include tissue-targeted LNPs obtained by introducing targeting ligands e.g., directly to the formulation in ethanol, chemically conjugating to the LNP surface, or by modifying the composition of the lipids in the formulation. Such “active targeting” of LNPs may be via attachment of antibodies, whereby, for example, a functionalized DSPE-PEG may be introduced during LNP formulation (e.g. at 12.5-25% of total PEG) followed by chemical grafting of an antibody specific for target tissue or cells, as described in Li Q., et al. Engineering Caveolae-Targeted Lipid Nanoparticles To Deliver mRNA to the Lungs. ACS Chem. Biol. 15:830-836 (2020); Kedmi R., et al. A modular platform for targeted RNAi therapeutics. Nat. Nanotechnol. 13:214-219 (2018); and Ramishetti S., et al., Systemic Gene Silencing in Primary T Lymphocytes Using Targeted Lipid Nanoparticles. ACS Nano. 9:6706-6716 (2015), the disclosures of which are each incorporated herein by reference. In some embodiments, the targeting ligand is specific for the lungs. For example, an Fab-C4 may be conjugated to DSPE-PEG-maleimide via a Diels-Alder reaction, where the Fab-C4 contains a cyclopentadiene lysine derivative to allow the Diels-Alder transformation, as described in Li Q, et al, ACS Chem. Biol. 15:830-836 (2020).

[0699] Exemplary LNPs also include pre-condensed stable plasmid lipid particles (pSPLPs), which include an encapsulated condensing agent-nucleic acid complex as set forth in WO 00/03683. The particles of the present disclosure typically have a mean diameter of about 50 nm to about 150 nm, more typically about 60 nm to about 130 nm, more typically about 70 nm to about 110 nm, most typically about 70 nm to about 90 nm, and are substantially nontoxic. In addition, the nucleic acids when present in the nucleic acid-lipid particles of the present disclosure are resistant in aqueous solution to degradation with a nuclease. Further nucleic acid-lipid particles and their method of preparation are disclosed in, e.g., U.S. Pat. Nos. 5,976,567; 5,981,501; 6,534,484; 6,586,410; 6,815,432; United States Patent publication No. 2010/0324120 and WO 96/40964.

[0700] In one embodiment, the lipid to drug ratio (mass/mass ratio) (e.g., lipid to dsRNA or ASO ratio) will be in the range of from about 1:1 to about 50:1, from about 1:1 to about 25:1, from about 3:1 to about 15:1, from about 4:1 to about 10:1, from about 5:1 to about 9:1, or about 6:1 to about 9:1. Ranges intermediate to the above recited ranges are also contemplated to be part of the disclosure. Certain specific LNP formulations have been described in the art, including, e.g., “LNP01” formulations as described in, e.g., WO 2008/042973, which is hereby incorporated by reference. Lipids and LNP formulations that may be employed with an RNAi agent or ASO of the disclosure include those described in International Patent Publication No. WO2021/142245, the contents of which are incorporated herein by reference.

### VII. Vectors, Cells, Pharmaceutical Compositions, Devices

[0701] In some embodiments, the present invention provides vectors, cells, pharmaceutical compositions, devices, and methods as described herein, which comprise an RNAi agent or ASO of the present disclosure.

### Vectors, Cells

[0702] RNAi agents or ASOs targeting the MUC5B gene can be expressed from transcription units inserted into DNA or RNA vectors (see, e.g., Couture, A, et al., TIG. (1996), 12:5-10; WO 00/22113, WO 00/22114, and U.S. Pat. No. 6,054,299). Expression is preferably sustained (months or longer), depending upon the specific construct used and the target tissue or cell type. These transgenes can be introduced as a linear construct, a circular plasmid, or a viral vector, which can be an integrating or non-integrating vector. The transgene can also be constructed to permit it to be inherited as an extrachromosomal plasmid (Gassmann, et al., (1995) Proc. Natl. Acad. Sci. USA 92:1292).

[0703] RNAi agent and ASO expression vectors are generally DNA plasmids or viral vectors. Expression vectors compatible with eukaryotic cells, preferably those compatible with vertebrate cells, can be used to produce recombinant constructs for the expression of an RNAi agent or ASO as described herein.

[0704] Viral vector systems which can be utilized with the methods and compositions described herein include, but are not limited to, (a) adenovirus vectors; (b) retrovirus vectors, including but not limited to lentiviral vectors, moloney murine leukemia virus, etc., (c) adeno-associated virus vectors; (d) herpes simplex virus vectors; (e) SV40 vectors; (f) polyoma virus vectors; (g) papilloma virus vectors; (h) picomavirus vectors; (i) pox virus vectors such as an orthopox, e.g., vaccinia virus vectors or avipox, e.g. canary pox or fowl pox; and (j) a helper-dependent or gutless adenovirus. Other aspects to consider for vectors and constructs are known in the art.

### Pharmaceutical Compositions

[0705] The present disclosure also includes pharmaceutical compositions and formulations which include an RNAi agent or ASO of the disclosure. In one embodiment, provided herein are pharmaceutical compositions containing an RNAi agent or ASO, as described herein, and a pharmaceutically acceptable carrier. The pharmaceutical compositions containing the RNAi agent or ASO are useful for treating a subject who would benefit from inhibiting or reducing the expression of a MUC5B gene, e.g., a subject having a MUC5B-associated disorder, e.g., a subject having or at risk of having or at risk of developing a lung disease, e.g., cystic fibrosis, chronic obstructive pulmonary disease (COPD), and/or pulmonary fibrosis, e.g., idiopathic pulmonary fibrosis (IPF). Such pharmaceutical compositions are formulated based on the mode of delivery. One example is compositions that are formulated for direct delivery into the pulmonary system by intrapulmonary administration, intranasal administration, or oral inhalation administration, e.g., by inhalation or insufflation of powders or aerosols, including by nebulizer or intratracheal instillation.

[0706] The pharmaceutical compositions of the disclosure may be administered in dosages sufficient to inhibit the expression of a MUC5B gene. In general, a suitable dose of an RNAi agent or ASO of the disclosure will be a flat dose in the range of about 0.001 to about 200.0 mg about once per month to about once per year, typically about once per quarter (i.e., about once every three months) to about once per year, generally a flat dose in the range of about 1 to 50 mg about once per month to about once per year, typically about once per quarter to about once per year. In certain embodiments, the dose will be a fixed dose, e.g., a fixed dose of about 25 μg to about 5 mg.

[0707] A repeat-dose regimen may include administration of a therapeutic amount of an RNAi agent or ASO on a regular basis, such as monthly to once every six months. In certain embodiments, the RNAi agent or ASO is administered about once per quarter (i.e., about once every three months) to about twice per year, particularly for the treatment of a chronic disease.

[0708] After an initial treatment regimen (e.g., loading dose) of once per day, twice per week, or once per week, the treatments can be administered less frequently.

[0709] In other embodiments, a single dose of a pharmaceutical composition disclosed herein can be long-lasting, such that subsequent doses are administered at intervals of not more than 1, 2, 3, or 4 months or more. In some embodiments of the disclosure, a single dose of a pharmaceutical composition of the disclosure is administered once per month. In other embodiments of the disclosure, a single dose of a pharmaceutical composition of the disclosure is administered once per quarter to twice per year.

[0710] The skilled artisan will appreciate that certain factors can influence the dosage and timing required to effectively treat a subject, including but not limited to the severity of the disease or disorder, previous treatments, the general health or age of the subject, and other diseases present. Moreover, the treatment of a subject with a therapeutically effective amount of a composition can include a single treatment or a series of treatments.

[0711] The RNAi agents or ASOs can be delivered in a manner that targets a particular tissue, such as the lung (e.g., bronchioles, alveoli, or bronchus of the lung). Pharmaceutical compositions that may include and may be used to provide an RNAi agent or ASO of the disclosure include compositions described in International Patent Publication No. WO2021/142245, the contents of which are incorporated herein by reference.

### Devices

[0712] The present disclosure also includes devices for inhalation administration that include an RNAi agent or ASO of the disclosure. Nasal delivery devices include, but are not limited to, vapor inhalers, nasal droppers, spray bottles, metered dose spray pumps, gas driven spray atomizers, nebulizers, mechanical powder sprayers, breath actuated inhalers, and insufflators. Devices for delivery deeper into the respiratory system, e.g., into the lung, include nebulizers, pressured metered-dose inhalers, dry powder inhalers, and thermal vaporization aerosol devices. Devices for delivery by inhalation are available from commercial suppliers. Devices can be fixed- or variable-dose, single or multidose, disposable or reusable depending on, for example, the disease or disorder to be prevented or treated, the volume of the agent to be delivered, the frequency of delivery of the agent, and other considerations in the art.

[0713] Oral inhalative administration may include use of device, e.g., a passive breath driven or active power driven single/-multiple dose dry powder inhaler (DPI), to deliver a double stranded RNAi agent or ASO of the disclosure to the pulmonary system. Suitable dosage forms for oral inhalative administration include powders and solutions. Suitable devices for oral inhalative administration include nebulizers, metered-dose inhalers, and dry powder inhalers. The amount of RNAi agent or ASO for pulmonary system administration may vary from one target gene to another target gene, and the appropriate amount that has to be applied may have to be determined individually for each target gene. Typically, this amount ranges from 10 μg to 2 mg, preferably 50 μg to 1500 μg, more preferably 100 μg to 1000 μg.

[0714] Appropriate devices that may be used to administer an RNAi agent or ASO of the disclosure include devices described in International Patent Publication No. WO2021/142245, the contents of which are incorporated herein by reference.

### Viii. Methods of Treating or Preventing MUC5B-Associated Diseases

[0715] The present disclosure also provides methods of inhibiting the expression of a MUC5B gene in a cell, specifically by inhibiting the levels of MUC5B RNA in a cell. The methods include contacting a cell with an RNAi agent, e.g., a double stranded RNAi agent or an ASO, in an amount effective to inhibit expression of a MUC5B gene in the cell, thereby inhibiting expression of MUC5B in the cell. In certain embodiments of the disclosure, expression of a MUC5B gene is inhibited preferentially in the pulmonary system (e.g., lung, bronchial, alveoli) cells. In certain embodiments of the disclosure, expression of a MUC5B gene is inhibited in the pulmonary system (e.g., lung, bronchial, alveoli) cells and in liver cells (e.g., hepatocytes).

[0716] Contacting a cell with an RNAi agent, e.g., a double stranded RNAi agent or ASO, may be done in vitro or in vivo. Contacting a cell in vivo with an RNAi agent or ASO includes contacting a cell or group of cells within a subject, e.g., a human subject, with the RNAi agent or ASO. Combinations of in vitro and in vivo methods of contacting a cell are also possible.

[0717] In some embodiments of the methods of the disclosure, expression of a MUC5B gene is inhibited by at least 20%, 30%, 40%, preferably at least 50%, 60%, 70%, 80%, 85%, 90%, or 95%, or to below the level of detection of the assay.

[0718] The present disclosure also provides methods for treating a subject having a lung disease or a subject at risk of developing a lung disease, comprising administering to the subject in need thereof a therapeutically effective amount of the RNAi agent, ASO, or the pharmaceutical composition thereof. In some embodiments, the subject is a human. The lung disease is associated with overexpression of MUC5B, optionally wherein overexpression of MUC5B is associated with one or more of reduced mucociliary function, reduced alveolar repair, and increased lung fibrosis, for example, one or more of pulmonary fibrosis, cystic fibrosis, chronic obstructive pulmonary disease (COPD), asthma, Primary Ciliary Dyskinesia, or bronchiectasis. In some embodiments, pulmonary fibrosis is idiopathic pulmonary fibrosis (IPF). In some embodiments, treating comprises amelioration of at least symptom of the disease.

[0719] The dsRNA agent, ASO, or the pharmaceutical composition thereof can be administered to the subject subcutaneously, intravenously, orotracheally, via oral inhalation, or via intranasal administration. In some embodiments, an additional agent or a therapy suitable for treatment or prevention of a lung disease can be administered to the subject. Exemplary additional therapeutics and treatments include, for example, an anti-inflammatory agent (e.g., a systemic corticosteroid (e.g., prednisone), an immune modulator (e.g., an immunosuppressant agent (e.g., azathioprine, cyclophosphamide), a phosphodiesterase-5 inhibitor, a tyrosine kinase inhibitor (e.g., nintedanib), an antifibrotic agent (e.g., pirfenidone), and a combination of any of the foregoing.

[0720] An RNAi agent or ASO of the disclosure may be used to treat a lung disease or at risk of having a lung disease, such as a condition that may benefit from inhibition of MUC5B expression, according to methods described for such diseases or conditions in International Patent Publication No. WO2021/142245, the contents of which are incorporated herein by reference in their entirety.

### IX. EXAMPLES

[0721] The following examples are presented in order to more fully illustrate some embodiments of the invention. They should in no way be construed, however, as limiting the broad scope of the invention. Those of ordinary skill in the art can readily adopt the underlying principles of this discovery to design various compounds without departing from the spirit of the current invention.

### Example 1. RNAi Agent and ASO Synthesis

### Source of Reagents

[0722] Where the source of a reagent is not specifically given herein, such reagent can be obtained from any supplier of reagents for molecular biology at a quality/purity standard for application in molecular biology.

[0723] The selection of RNAi agent and ASO designs targeting human MUC5B gene (human NCBI refseqID: NM_002458.3; NCBI GeneID: 727897) was performed using an integrated bioinformatics approach.

[0724] siRNAs: In silico, all possible siRNAs targeting human MUC5B mRNA (NM_002458.3), having a length of 17,911 bases, were generated. The siRNAs' MUC5B mRNA knockdown activity and off-target binding were predicted for humans, rhesus monkeys, cynomolgus monkeys, mice, rats, and ferrets. A specificity score was assigned to each RNAi agent strand. Also, RNAi agent strands were analyzed for the presence of human, rhesus monkey, dog, pig, mouse, rat, and rabbit miRNA seed regions. Specificity categories were assigned to RNAi agents (combined specificity score+miRNA seed analysis). Human SNPs were mapped to RNAi agent target sites in MUC5B transcript NM_002458.3. Based on in-silico overall predictive performance, top RNAi agents were synthesized according to three possible RNA designs using particular chemical compositions, each of which has a specific chemical siRNA pattern with sense and antisense strand lengths, respectively, of 19 and 21 nucleotides, or of 21 and 23 nucleotides, and comprising 2′-O-Me and 2′Fluoro RNA. RNAi agents were synthesized and annealed using standard methods.

[0725] A set of unmodified RNAi agent sense and antisense strand sequences targeting MUC5B is shown in Table 2.

[0726] Chemical modifications to siRNAs may, in some embodiments, improve their efficacy, potency, duration, and off-target profiles. (See e.g., references 1-17). A set of modified RNAi agent sense and antisense strand sequences targeting MUC5B is shown in Table 3. A list of abbreviations of chemical modifications is shown in Table 1.

[0727] ASOs: All possible single-stranded ASO sequences were designed by targeting the human MUC5B gene, Gene ID: 727897; genomic locus NC_000011.10(1223066 . . . 1262172). ASOs were designed to mediate RNaseH-dependent cleavage of the human MUC5B mRNA. ASO sequences were designed to be 17 nucleotides long and have 3 LNA (Locked Nucleic Acids) modifications at the 5′ and 3′ ends and an LNA-free central gap with 11 DNA nucleotides. The LNA-containing flanking regions confer nuclease resistance while increasing target binding affinity, regardless of the GC content. The central DNA “gap” activates RNase H cleavage of the target RNA upon binding. ASOs have fully modified phosphorothioate (PS) backbones, which ensure exceptional resistance to enzymatic degradation. ASOs were scored based on predicted on- and off-target activity, runs of A, C, G, and T, continuous runs of CG, GC content, hepatotoxic and non-toxic motifs, acute neurotoxic potential, potential immune-stimulatory CpG motifs, SNPs, G tetraplexes and motifs effecting activity.

[0728] A detailed list of unmodified ASO sequences targeting MUC5B is shown in Table 4. A detailed list of modified ASO sequences targeting MUC5B is shown in Table 5.

[0729] siRNAs and ASOs were purchased from Axolabs. RNAi agents and ASOs were synthesized on a 0.2 μmol scale followed by HPLC purification using a Mermade 192 synthesizer (BioAutomation) with phosphoramidite chemistry on solid supports. The solid support was controlled pore glass (500-1000 A) loaded with a custom GalNAc ligand (3′-GalNAc conjugates), universal solid support (AM Chemicals), or the first nucleotide of interest. siRNA quality control criteria were as follows. single strand identity: (+/−0.05% of calculated masse (by ESI/MS analysis); single strand purity: >85.0% intact oligonucleotide by HPLC analysis (UV260 nm); and duplex purity: >90% duplex (by non-denaturing HPLC analysis). ASO quality control criteria were as follows: Identity: +/−0.05% of calculated mass by ESI/MS analysis and purity; >85% intact oligonucleotide by HPLC analysis (UV260).

TABLE 1
Abbreviations of nucleotide monomers used in nucleic
acid sequence representation. It will be understood
that these monomers, when present in an oligonucleotide,
are mutually linked by 5′-3′-phosphodiester bonds.

| Abbreviation | Nucleotide(s) |
|---|---|
| A | Adenosine-3′-phosphate |
| Ab | beta-L-adenosine-3′-phosphate |
| Abs | beta-L-adenosine-3′-phosphorothioate |
| Af | 2′-fluoroadenosine-3′-phosphate |
| Afs | 2′-fluoroadenosine-3′-phosphorothioate |
| As | adenosine-3′-phosphorothioate |
| C | cytidine-3′-phosphate |
| Cb | beta-L-cytidine-3′-phosphate |
| Cbs | beta-L-cytidine-3′-phosphorothioate |
| Cf | 2′-fluorocytidine-3′-phosphate |
| Cfs | 2′-fluorocytidine-3′-phosphorothioate |
| Cs | cytidine-3′-phosphorothioate |
| G | guanosine-3′-phosphate |
| Gb | beta-L-guanosine-3′-phosphate |
| Gbs | beta-L-guanosine-3′-phosphorothioate |
| Gf | 2′-fluoroguanosine-3′-phosphate |
| Gfs | 2′-fluoroguanosine-3′-phosphorothioate |
| Gs | guanosine-3′-phosphorothioate |
| T | 5′-methyluridine-3′-phosphate |
| Tf | 2′-fluoro-5-methyluridine-3′-phosphate |
| Tfs | 2′-fluoro-5-methyluridine-3′-phosphorothioate |
| Ts | 5-methyluridine-3′-phosphorothioate |
| U | Uridine-3′-phosphate |
| Uf | 2′-fluorouridine-3′-phosphate |
| Ufs | 2′-fluorouridine-3′-phosphorothioate |
| Us | uridine-3′-phosphorothioate |
| N | any nucleotide, modified or unmodified |
| a | 2′-O-methyladenosine-3′-phosphate |
| as | 2′-O-methyladenosine-3′-phosphorothioate |
| c | 2′-O-methylcytidine-3′-phosphate |
| cs | 2′-O-methylcytidine-3′-phosphorothioate |
| g | 2′-O-methylguanosine-3′-phosphate |
| gs | 2′-O-methyguanosine-3′-phosphorothioate |
| t | 2′-O-methyl-5-methyluridine-3′-phosphate |
| ts | 2′-O-methyl-5-methyluridine-3′-phosphorothioate |
| u | 2′-O-methyluridine-3′-phosphate |
| us | 2′-O-methyluridine-3′-phosphorothioate |
| S | phosphorothioate linkage (PTO) |
| L1O | N-(cholesterylcarboxamidocaproyl)-4- |
| | hydroxyprolinol (Hvo-C6-Chol) |
| Y34 | 2-hydroxymethyl-tetrahydrofurane-4-methoxy-3- |
| | phosphate(abasic 2′-OMe furanose) |
| Y44 | inverted abasic DNA (2-hydroxymethyl- |
| | tetrahydrofurane-5-phosphate) |
| (Aim) or GNA-A | Adenosine-glycol nucleic acid (GNA) |
| (Cim) or GNA-C | Cytidine-glycol nucleic acid (GNA) |
| (Gim) or GNA-G | Guanosine-glycol nucleic acid (GNA) |
| (Tim) or GNA-T | Thymidine-glycol nucleic acid (GNA) S-Isomer |
| p | Phosphate |
| VP or (vin-) | 5′Vinyl-phosphonate |
| (e.g., vin-u) | |
| dA | 2′-deoxyadenosine-3′-phosphate |
| dAs | 2′-deoxyadenosine-3′-phosphorothioate |
| dC | 2′-deoxycytidine-3′-phosphate |
| dCs | 2′-deoxycytidine-3′-phosphorothioate |
| dG | 2′-deoxyguanosine-3′-phosphate |
| dGs | 2′-deoxyguanosine-3′-phosphorothioate |
| dT | 2′-deoxiuridine-3′-phosphate |
| dTs | 2′-deoxythymidine-3′-phosphorothioate |
| dU | 2′-deoxyuridine |
| dUs | 2′-deoxyuridine-3′-phosphorothioate |
| (C2p) | cytidine-2′-phosphate |
| (G2p) | guanosine-2′-phosphate |
| (U2p) | uridine-2′-phosphate |
| (A2p) | adenosine-2′-phosphate |
| (vin-u) | 5′vinyl-phosphonate modified 2′-O- |
| | methyluridine-3′-phosphate |
| Nm | MOE RNA |
| abasic-N | rSpacer - unmodified RNA abasic |
| abasic | dSpacer, 6pi - DNA-abasic |
| C3 | C3-spacer |
| abasic-n | 2′-OMe-abasic |
| abasic-F | 2′-F-abasic |

TABLE 2
Unmodified Sense and Antisense MUCSB siRNA Sequences

| | | | SEQ | | SEQ |
|---|---|---|---|---|---|
| | | Sense Sequence | ID | Antisense Sequence | ID |
| SIRNA | SIRNA_ID | 5′ to 3′ | NO: | 5′ to 3′ | NO: |
| XD-60355 | 1399_EEL_21/23mer | cagcuacguucuguccaagaa | 1 | tucuuggacagaacguagcugca | 178 |
| XD-60339 | 15539_DV22_21/23mer | cuguuugaccaaauuccggua | 2 | uaccggaauuuggucaaacagga | 179 |
| XD-61278 | 214_DV22_21/23mer | cgugagcuuuguuccacccga | 3 | ucggguggaacaaagcucacgcg | 180 |
| XD-60426 | 12706_EEL_19/21mer | aaauccguguguucugcua | 4 | tagcagaacacacggauuuca | 181 |
| XD-61279 | 219_DV22_21/23mer | gcuuuguuccacccgucacua | 5 | uagugacggguggaacaaagcuc | 182 |
| XD-60430 | 15258_EEL_19/21mer | cacuaugagugcgagugca | 6 | tgcacucgcacucauagugga | 183 |
| XD-60380 | 12706_EEL_21/23mer | ugaaauccguguguucugcua | 7 | tagcagaacacacggauuucaua | 184 |
| XD-60331 | 15311_DV22_21/23mer | accuuugacggcaccucuuaa | 8 | uuaagaggugccgucaaaggugg | 185 |
| XD-60336 | 15476_DV22_21/23mer | uacaaguccauggauaucgua | 9 | uacgauauccauggacuuguagu | 186 |
| XD-60390 | 15478_EEL_21/23mer | caaguccauggauaucgucca | 10 | tggacgauauccauggacuugua | 187 |
| XD-60316 | 12616_DV22_21/23mer | guugggccaggucguggaaua | 11 | uauuccacgaccuggcccaacuc | 188 |
| XD-60317 | 12621_DV22_21/23mer | gccaggucguggaaugcagca | 12 | ugcugcauuccacgaccuggccc | 189 |
| XD-60318 | 12706_DV22_21/23mer | ugaaauccguguguucugcua | 13 | uagcagaacacacggauuucaua | 190 |
| XD-60320 | 12717_DV22_21/23mer | uguucugcugcaacuacggca | 14 | ugccguaguugcagcagaacaca | 191 |
| XD-60319 | 13206_DV22_21/23mer | ccuccacuccggggacgacca | 15 | uggucguccccggaguggaggag | 192 |
| XD-60273 | 1399_DV22_21/23mer | cagcuacguucuguccaagaa | 16 | uucuuggacagaacguagcugca | 193 |
| XD-60321 | 15132_DV22_21/23mer | gcacgguggccaggugcguga | 17 | ucacgcaccuggccaccgugcag | 194 |
| XD-60322 | 15140_DV22_21/23mer | gccaggugcgugggugacaaa | 18 | uuugucacccacgcaccuggcca | 195 |
| XD-60427 | 15140_EEL_19/21mer | caggugcgugggugacaaa | 19 | tuugucacccacgcaccuggc | 196 |
| XD-60381 | 15140_EEL_21/23mer | gccaggugcgugggugacaaa | 20 | tuugucacccacgcaccuggcca | 197 |
| XD-60323 | 15197_DV22_21/23mer | gucaccugcgugaacaagcaa | 21 | uugcuuguucacgcaggugacgu | 198 |
| XD-60428 | 15197_EEL_19/21mer | caccugcgugaacaagcaa | 22 | tugcuuguucacgcaggugac | 199 |
| XD-60382 | 15197_EEL_21/23mer | gucaccugcgugaacaagcaa | 23 | tugcuuguucacgcaggugacgu | 200 |
| XD-60324 | 15252_DV22_21/23mer | gugacuuccacuaugagugca | 24 | ugcacucauaguggaagucacag | 201 |
| XD-60429 | 15252_EEL_19/21mer | gacuuccacuaugagugca | 25 | tgcacucauaguggaagucac | 202 |
| XD-60383 | 15252_EEL_21/23mer | gugacuuccacuaugagugca | 26 | tgcacucauaguggaagucacag | 203 |
| XD-60325 | 15254_DV22_21/23mer | gacuuccacuaugagugcgaa | 27 | uucgcacucauaguggaagucac | 204 |
| XD-60326 | 15258_DV22_21/23mer | uccacuaugagugcgagugca | 28 | ugcacucgcacucauaguggaag | 205 |
| XD-60384 | 15258_EEL_21/23mer | uccacuaugagugcgagugca | 29 | tgcacucgcacucauaguggaag | 206 |
| XD-60327 | 15261_DV22_21/23mer | acuaugagugcgagugcauca | 30 | ugaugcacucgcacucauagugg | 207 |
| XD-60431 | 15261_EEL_19/21mer | uaugagugcgagugcauca | 31 | tgaugcacucgcacucauagu | 208 |
| XD-60385 | 15261_EEL_21/23mer | acuaugagugcgagugcauca | 32 | tgaugcacucgcacucauagugg | 209 |
| XD-61286 | 15262_DV22_21/23mer | cuaugagugcgagugcaucua | 33 | uagaugcacucgcacucauagug | 210 |
| XD-60328 | 15304_DV22_21/23mer | cuauuccaccuuugacggcaa | 34 | uugccgucaaagguggaauagug | 211 |
| XD-60329 | 15305_DV22_21/23mer | uauuccaccuuugacggcaca | 35 | ugugccgucaaagguggaauagu | 212 |
| XD-60432 | 15305_EEL_19/21mer | uuccaccuuugacggcaca | 36 | tgugccgucaaagguggaaua | 213 |
| XD-60386 | 15305_EEL_21/23mer | uauuccaccuuugacggcaca | 37 | tgugccgucaaagguggaauagu | 214 |
| XD-60330 | 15310_DV22_21/23mer | caccuuugacggcaccucuua | 38 | uaagaggugccgucaaaggugga | 215 |
| XD-60332 | 15312_DV22_21/23mer | ccuuugacggcaccucuuaca | 39 | uguaagaggugccgucaaaggug | 216 |
| XD-60433 | 15312_EEL_19/21mer | uuugacggcaccucuuaca | 40 | tguaagaggugccgucaaagg | 217 |
| XD-60387 | 15312_EEL_21/23mer | ccuuugacggcaccucuuaca | 41 | tguaagaggugccgucaaaggug | 218 |
| XD-60333 | 15314_DV22_21/23mer | uuugacggcaccucuuacaca | 42 | uguguaagaggugccgucaaagg | 219 |
| XD-60434 | 15314_EEL_19/21mer | ugacggcaccucuuacaca | 43 | tguguaagaggugccgucaaa | 220 |
| XD-60388 | 15314_EEL_21/23mer | uuugacggcaccucuuacaca | 44 | tguguaagaggugccgucaaagg | 221 |
| XD-60334 | 15315_DV22_21/23mer | uugacggcaccucuuacacca | 45 | ugguguaagaggugccgucaaag | 222 |
| XD-60335 | 15473_DV22_21/23mer | cacuacaaguccauggauaua | 46 | uauauccauggacuuguagugga | 223 |
| XD-60435 | 15473_EEL_19/21mer | cuacaaguccauggauaua | 47 | tauauccauggacuuguagug | 224 |
| XD-60389 | 15473_EEL_21/23mer | cacuacaaguccauggauaua | 48 | tauauccauggacuuguagugga | 225 |
| XD-60337 | 15478_DV22_21/23mer | caaguccauggauaucgucca | 49 | uggacgauauccauggacuugua | 226 |
| XD-60436 | 15478_EEL_19/21mer | aguccauggauaucgucca | 50 | tggacgauauccauggacuug | 227 |
| XD-60338 | 15479_DV22_21/23mer | aaguccauggauaucguccua | 51 | uaggacgauauccauggacuugu | 228 |
| XD-60437 | 15539_EEL_19/21mer | guuugaccaaauuccggua | 52 | taccggaauuuggucaaacag | 229 |
| XD-60391 | 15539_EEL_21/23mer | cuguuugaccaaauuccggua | 53 | taccggaauuuggucaaacagga | 230 |
| XD-60340 | 15543_DV22_21/23mer | uugaccaaauuccggugagca | 54 | ugcucaccggaauuuggucaaac | 231 |
| XD-60438 | 15543_EEL_19/21mer | gaccaaauuccggugagca | 55 | tgcucaccggaauuuggucaa | 232 |
| XD-60392 | 15543_EEL_21/23mer | uugaccaaauuccggugagca | 56 | tgcucaccggaauuuggucaaac | 233 |
| XD-61288 | 15546_DV22_21/23mer | accaaauuccggugagcagca | 57 | ugcugcucaccggaauuugguca | 234 |
| XD-60341 | 15547_DV22_21/23mer | ccaaauuccggugagcagcga | 58 | ucgcugcucaccggaauuugguc | 235 |
| XD-60439 | 15547_EEL_19/21mer | aaauuccggugagcagcga | 59 | tcgcugcucaccggaauuugg | 236 |
| XD-60393 | 15547_EEL_21/23mer | ccaaauuccggugagcagcga | 60 | tcgcugcucaccggaauuugguc | 237 |
| XD-60344 | 15568_DV22_21/23mer | uuucagcaagaacggcgugca | 61 | ugcacgccguucuugcugaaacc | 238 |
| XD-60345 | 15572_DV22_21/23mer | agcaagaacggcgugcuugua | 62 | uacaagcacgccguucuugcuga | 239 |
| XD-60346 | 15576_DV22_21/23mer | agaacggcgugcuugugucua | 63 | uagacacaagcacgccguucuug | 240 |
| XD-60442 | 15576_EEL_19/21mer | aacggcgugcuugugucua | 64 | tagacacaagcacgccguucu | 241 |
| XD-60396 | 15576_EEL_21/23mer | agaacggcgugcuugugucua | 65 | tagacacaagcacgccguucuug | 242 |
| XD-61281 | 1564_DV22_21/23mer | caacuccaucuacacgcagca | 66 | ugcugcguguagauggaguugag | 243 |
| XD-60347 | 15692_DV22_21/23mer | cucuuccacaacaacaccgaa | 67 | uucgguguuguuguggaagaggc | 244 |
| XD-60348 | 15731_DV22_21/23mer | accaacaaccagagggacgaa | 68 | uucgucccucugguuguuggugc | 245 |
| XD-60275 | 1617_DV22_21/23mer | cacccucgagcuucuucauca | 69 | ugaugaagaagcucgagggugug | 246 |
| XD-61291 | 1617_EEL_19/21mer | cccucgagcuucuucauca | 70 | tgaugaagaagcucgagggug | 247 |
| XD-61289 | 1617_EEL_21/23mer | cacccucgagcuucuucauca | 71 | tgaugaagaagcucgagggugug | 248 |
| XD-60276 | 1618_DV22_21/23mer | acccucgagcuucuucaucga | 72 | ucgaugaagaagcucgagggugu | 249 |
| XD-60277 | 1619_DV22_21/23mer | cccucgagcuucuucaucgua | 73 | uacgaugaagaagcucgagggug | 250 |
| XD-60403 | 1619_EEL_19/21mer | cucgagcuucuucaucgua | 74 | tacgaugaagaagcucgaggg | 251 |
| XD-60357 | 1619_EEL_21/23mer | cccucgagcuucuucaucgua | 75 | tacgaugaagaagcucgagggug | 252 |
| XD-60349 | 16985_DV22_21/23mer | agccucaggaaaaccggcuga | 76 | ucagccgguuuuccugaggcucc | 253 |
| XD-60350 | 17255_DV22_21/23mer | gaugaguguggcugcacgcca | 77 | uggcgugcagccacacucaucca | 254 |
| XD-60278 | 1756_DV22_21/23mer | ccagaaccaggcugacgacua | 78 | uagucgucagccugguucugguu | 255 |
| XD-60279 | 1808_DV22_21/23mer | ggcgcagccuucgccaacaca | 79 | uguguuggcgaaggcugcgcccg | 256 |
| XD-60404 | 1808_EEL_19/21mer | cgcagccuucgccaacaca | 80 | tguguuggcgaaggcugcgcc | 257 |
| XD-60358 | 1808_EEL_21/23mer | ggcgcagccuucgccaacaca | 81 | tguguuggcgaaggcugcgcccg | 258 |
| XD-60280 | 1896_DV22_21/23mer | agaaugagaacuacgcccgga | 82 | uccgggcguaguucucauucucc | 259 |
| XD-60281 | 1897_DV22_21/23mer | gaaugagaacuacgcccggca | 83 | ugccgggguaguucucauucuc | 260 |
| XD-60282 | 2112_DV22_21/23mer | acggcgucugcaccaaguaca | 84 | uguacuuggugcagacgccgucc | 261 |
| XD-60405 | 2112_EEL_19/21mer | ggcgucugcaccaaguaca | 85 | tguacuuggugcagacgccgu | 262 |
| XD-60359 | 2112_EEL_21/23mer | acggcgucugcaccaaguaca | 86 | tguacuuggugcagacgccgucc | 263 |
| XD-60283 | 2113_DV22_21/23mer | cggcgucugcaccaaguacaa | 87 | uuguacuuggugcagacgccguc | 264 |
| XD-60406 | 2113_EEL_19/21mer | gcgucugcaccaaguacaa | 88 | tuguacuuggugcagacgccg | 265 |
| XD-60360 | 2113_EEL_21/23mer | cggcgucugcaccaaguacaa | 89 | tuguacuuggugcagacgccguc | 266 |
| XD-60266 | 215_DV22_21/23mer | gugagcuuuguuccacccgua | 90 | uacggguggaacaaagcucacgc | 267 |
| XD-61282 | 2198_DV22_21/23mer | ggccugagugaggccgacgua | 91 | uacgucggccucacucaggccgc | 268 |
| XD-60284 | 2199_DV22_21/23mer | gccugagugaggccgacguca | 92 | ugacgucggccucacucaggccg | 269 |
| XD-60285 | 2273_DV22_21/23mer | uuccucaaugacgcgggcgca | 93 | ugcgcccgcgucauugaggaagg | 270 |
| XD-60407 | 2273_EEL_19/21mer | ccucaaugacgcggggca | 94 | tgcgcccgcgucauugaggaa | 271 |
| XD-60361 | 2273_EEL_21/23mer | uuccucaaugacgcgggcgca | 95 | tgcgcccgcgucauugaggaagg | 272 |
| XD-60286 | 2275_DV22_21/23mer | ccucaaugacgcggggccua | 96 | uaggcgcccgcgucauugaggaa | 273 |
| XD-60408 | 2275_EEL_19/21mer | ucaaugacgcgggcgccua | 97 | taggcgcccgcgucauugagg | 274 |
| XD-60362 | 2275_EEL_21/23mer | ccucaaugacgcgggcgccua | 98 | taggcgcccgcgucauugaggaa | 275 |
| XD-60287 | 2326_DV22_21/23mer | ucacggcaccgugcuggcuca | 99 | ugagccagcacggugccgugagc | 276 |
| XD-60409 | 2326_EEL_19/21mer | acggcaccgugcuggcuca | 100 | tgagccagcacggugccguga | 277 |
| XD-60363 | 2326_EEL_21/23mer | ucacggcaccgugcuggcuca | 101 | tgagccagcacggugccgugagc | 278 |
| XD-60288 | 2525_DV22_21/23mer | gacgugggcuguuucagcaca | 102 | ugugcugaaacagcccacgucca | 279 |
| XD-60410 | 2525_EEL_19/21mer | cgugggcuguuucagcaca | 103 | tgugcugaaacagcccacguc | 280 |
| XD-60364 | 2525_EEL_21/23mer | gacgugggcuguuucagcaca | 104 | tgugcugaaacagcccacgucca | 281 |
| XD-60289 | 2752_DV22_21/23mer | cggggauggccacuucaucaa | 105 | uugaugaaguggccauccccgua | 282 |
| XD-60290 | 2854_DV22_21/23mer | cgggaccuuccgcaucgucaa | 106 | uugacgaugcggaaggucccgug | 283 |
| XD-60291 | 2874_DV22_21/23mer | ccgagaacauccccuguggga | 107 | ucccacaggggauguucucggug | 284 |
| XD-61283 | 3058_DV22_21/23mer | ggccguguccugggaccggaa | 108 | uuccggucccaggacacggccau | 285 |
| XD-60292 | 3086_DV22_21/23mer | guguucauccgacugcaccaa | 109 | uuggugcagucggaugaacacgc | 286 |
| XD-60411 | 3086_EEL_19/21mer | guucauccgacugcaccaa | 110 | tuggugcagucggaugaacac | 287 |
| XD-60365 | 3086_EEL_21/23mer | guguucauccgacugcaccaa | 111 | tuggugcagucggaugaacacgc | 288 |
| XD-60293 | 3088_DV22_21/23mer | guucauccgacugcaccagga | 112 | uccuggugcagucggaugaacac | 289 |
| XD-60412 | 3088_EEL_19/21mer | ucauccgacugcaccagga | 113 | tccuggugcagucggaugaac | 290 |
| XD-60366 | 3088_EEL_21/23mer | guucauccgacugcaccagga | 114 | tccuggugcagucggaugaacac | 291 |
| XD-60294 | 3090_DV22_21/23mer | ucauccgacugcaccaggaca | 115 | uguccuggugcagucggaugaac | 292 |
| XD-60413 | 3090_EEL_19/21mer | auccgacugcaccaggaca | 116 | tguccuggugcagucggauga | 293 |
| XD-60367 | 3090_EEL_21/23mer | ucauccgacugcaccaggaca | 117 | tguccuggugcagucggaugaac | 294 |
| XD-60295 | 3356_DV22_21/23mer | guugacuccaccaaguacuaa | 118 | uuaguacuugguggagucaaccu | 295 |
| XD-60414 | 3356_EEL_19/21mer | ugacuccaccaaguacuaa | 119 | tuaguacuugguggagucaac | 296 |
| XD-60368 | 3356_EEL_21/23mer | guugacuccaccaaguacuaa | 120 | tuaguacuugguggagucaaccu | 297 |
| XD-60296 | 3360_DV22_21/23mer | acuccaccaaguacuacgaga | 121 | ucucguaguacuugguggaguca | 298 |
| XD-60415 | 3360_EEL_19/21mer | uccaccaaguacuacgaga | 122 | tcucguaguacuugguggagu | 299 |
| XD-60369 | 3360_EEL_21/23mer | acuccaccaaguacuacgaga | 123 | tcucguaguacuugguggaguca | 300 |
| XD-60297 | 3594_DV22_21/23mer | gccggaaccccagugggcaca | 124 | ugugcccacugggguuccggcag | 301 |
| XD-60416 | 3594_EEL_19/21mer | cggaaccccagugggcaca | 125 | tgugcccacugggguuccggc | 302 |
| XD-60370 | 3594_EEL_21/23mer | gccggaaccccagugggcaca | 126 | tgugcccacugggguuccggcag | 303 |
| XD-60298 | 3691_DV22_21/23mer | gaugaagugcguggcccagua | 127 | uacugggccacgcacuucaucug | 304 |
| XD-60299 | 3770_DV22_21/23mer | gagaacugccagagcuguaaa | 128 | uuuacagcucuggcaguucuccg | 305 |
| XD-61292 | 3770_EEL_19/21mer | gaacugccagagcuguaaa | 129 | tuuacagcucuggcaguucuc | 306 |
| XD-61290 | 3770_EEL_21/23mer | gagaacugccagagcuguaaa | 130 | tuuacagcucuggcaguucuccg | 307 |
| XD-60300 | 3771_DV22_21/23mer | agaacugccagagcuguaaca | 131 | uguuacagcucuggcaguucucc | 308 |
| XD-60417 | 3771_EEL_19/21mer | aacugccagagcuguaaca | 132 | tguuacagcucuggcaguucu | 309 |
| XD-60371 | 3771_EEL_21/23mer | agaacugccagagcuguaaca | 133 | tguuacagcucuggcaguucucc | 310 |
| XD-60301 | 3842_DV22_21/23mer | accuaugaggacaggaccuaa | 134 | uuagguccuguccucauaggugc | 311 |
| XD-60302 | 3871_DV22_21/23mer | ggacgucaucuacaacaccaa | 135 | uugguguuguagaugacguccug | 312 |
| XD-60418 | 3871_EEL_19/21mer | acgucaucuacaacaccaa | 136 | tugguguuguagaugacgucc | 313 |
| XD-60372 | 3871_EEL_21/23mer | ggacgucaucuacaacaccaa | 137 | tugguguuguagaugacguccug | 314 |
| XD-60303 | 4057_DV22_21/23mer | uguccgcgaggucugccgcua | 138 | uagcggcagaccucgcggacaca | 315 |
| XD-60419 | 4057_EEL_19/21mer | uccgcgaggucugccgcua | 139 | tagcggcagaccucgcggaca | 316 |
| XD-60373 | 4057_EEL_21/23mer | uguccgcgaggucugccgcua | 140 | tagcggcagaccucgcggacaca | 317 |
| XD-60304 | 4339_DV22_21/23mer | cgaauacgugcccuguggcca | 141 | uggccacagggcacguauucgca | 318 |
| XD-60420 | 4339_EEL_19/21mer | aauacgugcccuguggcca | 142 | tggccacagggcacguauucg | 319 |
| XD-60374 | 4339_EEL_21/23mer | cgaauacgugcccuguggcca | 143 | tggccacagggcacguauucgca | 320 |
| XD-60305 | 4601_DV22_21/23mer | gaggacuaccccaagucugaa | 144 | uucagacuugggguaguccucau | 321 |
| XD-60306 | 4604_DV22_21/23mer | gacuaccccaagucugaacaa | 145 | uuguucagacuugggguaguccu | 322 |
| XD-60307 | 4618_DV22_21/23mer | ugaacaacuuggaggggacga | 146 | ucguccccuccaaguuguucaga | 323 |
| XD-60421 | 4618_EEL_19/21mer | aacaacuuggaggggacga | 147 | tcguccccuccaaguuguuca | 324 |
| XD-60375 | 4618_EEL_21/23mer | ugaacaacuuggaggggacga | 148 | tcguccccuccaaguuguucaga | 325 |
| XD-60308 | 4620_DV22_21/23mer | aacaacuuggaggggacguua | 149 | uaacguccccuccaaguuguuca | 326 |
| XD-60422 | 4620_EEL_19/21mer | caacuuggaggggacguua | 150 | taacguccccuccaaguuguu | 327 |
| XD-60376 | 4620_EEL_21/23mer | aacaacuuggaggggacguua | 151 | taacguccccuccaaguuguuca | 328 |
| XD-60309 | 4633_DV22_21/23mer | ggacguugaguccuacgauaa | 152 | uuaucguaggacucaacgucccc | 329 |
| XD-60377 | 4633_EEL_21/23mer | ggacguugaguccuacgauaa | 153 | tuaucguaggacucaacgucccc | 330 |
| XD-60311 | 4635_DV22_21/23mer | acguugaguccuacgauaaga | 154 | ucuuaucguaggacucaacgucc | 331 |
| XD-60312 | 4641_DV22_21/23mer | aguccuacgauaagaucagga | 155 | uccugaucuuaucguaggacuca | 332 |
| XD-61284 | 4818_DV22_21/23mer | ugugcuacaacuacaggauca | 156 | ugauccuguaguuguagcacauc | 333 |
| XD-60313 | 4826_DV22_21/23mer | aacuacaggauccggguccua | 157 | uaggacccggauccuguaguugu | 334 |
| XD-60267 | 525_DV22_21/23mer | agcugccuuacagccgcacua | 158 | uagugcggcuguaaggcagcucc | 335 |
| XD-60314 | 5277_DV22_21/23mer | cgcugaccacgagccuggcga | 159 | ucgccaggcucguggucagcggc | 336 |
| XD-60425 | 5277_EEL_19/21mer | cugaccacgagccuggcga | 160 | tcgccaggcucguggucagcg | 337 |
| XD-60379 | 5277_EEL_21/23mer | cgcugaccacgagccuggcga | 161 | tcgccaggcucguggucagcggc | 338 |
| XD-60315 | 5425_DV22_21/23mer | guggacagagugguuugacga | 162 | ucgucaaaccacucuguccacuc | 339 |
| XD-61285 | 7169_DV22_21/23mer | cgggaguugggccaggucgua | 163 | uacgaccuggcccaacucccgca | 340 |
| XD-60268 | 734_DV22_21/23mer | cugaccccgcuccaguuugga | 164 | uccaaacuggagggggucagcc | 341 |
| XD-60397 | 734_EEL_19/21mer | gaccccgcuccaguuugga | 165 | tccaaacuggagcggggucag | 342 |
| XD-60351 | 734_EEL_21/23mer | cugaccccgcuccaguuugga | 166 | tccaaacuggagcggggucagcc | 343 |
| XD-60269 | 737_DV22_21/23mer | accccgcuccaguuugggaaa | 167 | uuucccaaacuggagcgggguca | 344 |
| XD-60398 | 737_EEL_19/21mer | cccgcuccaguuugggaaa | 168 | tuucccaaacuggagcggggu | 345 |
| XD-60352 | 737_EEL_21/23mer | accccgcuccaguuugggaaa | 169 | tuucccaaacuggagcgggguca | 346 |
| XD-60270 | 960_DV22_21/23mer | ccuuuguggaauacucacgca | 170 | ugcgugaguauuccacaaaggug | 347 |
| XD-60399 | 960_EEL_19/21mer | uuuguggaauacucacgca | 171 | tgcgugaguauuccacaaagg | 348 |
| XD-60353 | 960_EEL_21/23mer | ccuuuguggaauacucacgca | 172 | tgcgugaguauuccacaaaggug | 349 |
| XD-60271 | 962_DV22_21/23mer | uuuguggaauacucacgccaa | 173 | uuggcgugaguauuccacaaagg | 350 |
| XD-61280 | 966_DV22_21/23mer | uggaauacucacgccagugca | 174 | ugcacuggcgugaguauuccaca | 351 |
| XD-60272 | 972_DV22_21/23mer | acucacgccagugcgcccaca | 175 | ugugggcgcacuggcgugaguau | 352 |
| XD-60400 | 972_EEL_19/21mer | ucacgccagugcgcccaca | 176 | tgugggcgcacuggcgugagu | 353 |
| XD-60354 | 972_EEL_21/23mer | acucacgccagugcgcccaca | 177 | tgugggcgcacuggcgugaguau | 354 |

TABLE 3
Modified Sense and Antisense MUCSB siRNA Sequences

| | | | SEQ | | SEQ |
|---|---|---|---|---|---|
| | | Sense Sequence | ID | Antisense Sequence | ID |
| SIRNA | SIRNA_ID | 5′ to 3′ | NO: | 5′ to 3′ | NO: |
| XD-60355 | 1399_EEL_21/23mer | cagcUacgUUCuguccaaGasa | 355 | dTUCUUGGACAGAaCGUAGCUGcsa | 532 |
| XD-60339 | 15539_DV22_21/23mer | csusguuuGfaCfCfAfaauuccggua | 356 | usAfsccgGfaauuuggUfcAfaacagsgsa | 533 |
| XD-61278 | 214_DV22_21/23mer | csgsugagCfuUfUfGfuuccacccga | 357 | usCfsgggUfggaacaaAfgCfucacgscsg | 534 |
| XD-60426 | 12706_EEL_19/21mer | aaAuccGUGugUucugCusa | 358 | dTAGCAGAACACAcGGAUUUcsa | 535 |
| XD-61279 | 219_DV22_21/23mer | gscsuuugUfuCfCfAfcccgucacua | 359 | usAfsgugAfcggguggAfaCfaaagcsusc | 536 |
| XD-60430 | 15258_EEL_19/21mer | caCuauGAGugCgaguGcsa | 360 | dTGCACUCGCACUCAUAGUGgsa | 537 |
| XD-60380 | 12706_EEL_21/23mer | ugaaAuccGUGuguucugCusa | 361 | dTAGCAGAACACACGGAUUUCAusa | 538 |
| XD-60331 | 15311_DV22_21/23mer | ascscuuuGfaCfGfGfcaccucuuaa | 362 | usUfsaagAfggugccgUfcAfaaggusgsg | 539 |
| XD-60336 | 15476_DV22_21/23mer | usascaagUfcCfAfUfggauaucgua | 363 | usAfscgaUfauccaugGfaCfuuguasgsu | 540 |
| XD-60390 | 15478_EEL_21/23mer | caagUccaUGGauaucguCcsa | 364 | dTGGACGAUAUCCaUGGACUUGusa | 541 |
| XD-60316 | 12616_DV22_21/23mer | gsusugggCfcAfGfGfucguggaaua | 365 | usAfsuucCfacgaccuGfgCfccaacsusc | 542 |
| XD-60317 | 12621_DV22_21/23mer | gscscaggUfcGfUfGfgaaugcagca | 366 | usGfscugCfauuccacGfaCfcuggcscsc | 543 |
| XD-60318 | 12706_DV22_21/23mer | usgsaaauCfcGfUfGfuguucugcua | 367 | usAfsgcaGfaacacacGfgAfuuucasusa | 544 |
| XD-60320 | 12717_DV22_21/23mer | usgsuucuGfcUfGfCfaacuacggca | 368 | usGfsccgUfaguugcaGfcAfgaacascsa | 545 |
| XD-60319 | 13206_DV22_21/23mer | cscsuccaCfuCfCfGfgggacgacca | 369 | usGfsgucGfuccccggAfgUfggaggsasg | 546 |
| XD-60273 | 1399_DV22_21/23mer | csasgcuaCfgUfUfCfuguccaagaa | 370 | usUfscuuGfgacagaaCfgUfagcugscsa | 547 |
| XD-60321 | 15132_DV22_21/23mer | gscsacggUfgGfCfCfaggugcguga | 371 | usCfsacgCfaccuggcCfaCfcgugcsasg | 548 |
| XD-60322 | 15140_DV22_21/23mer | gscscaggUfgCfGfUfgggugacaaa | 372 | usUfsuguCfacccacgCfaCfcuggcscsa | 549 |
| XD-60427 | 15140_EEL_19/21mer | caGgugCGUggGugacAasa | 373 | dTUUGUCACCCACgCACCUGgsc | 550 |
| XD-60381 | 15140_EEL_21/23mer | gccaGgugCGUgggugacAasa | 374 | dTUUGUCACCCACgCACCUGGCcsa | 551 |
| XD-60323 | 15197_DV22_21/23mer | gsuscaccUfgCfGfUfgaacaagcaa | 375 | usUfsgcuUfguucacgCfaGfgugacsgsu | 552 |
| XD-60428 | 15197_EEL_19/21mer | caCcugCGUgaAcaagCasa | 376 | dTUGCUUGUUCACgCAGGUGasc | 553 |
| XD-60382 | 15197_EEL_21/23mer | gucaCcugCGUgaacaagCasa | 377 | dTUGCUUGUUCACgCAGGUGACgsu | 554 |
| XD-60324 | 15252_DV22_21/23mer | gsusgacuUfcCfAfCfuaugagugca | 378 | usGfscacUfcauagugGfaAfgucacsasg | 555 |
| XD-60429 | 15252_EEL_19/21mer | gaCuucCACuaUgaguGcsa | 379 | dTGCACUCAUAGUgGAAGUCasc | 556 |
| XD-60383 | 15252_EEL_21/23mer | gugaCuucCACuaugaguGcsa | 380 | dTGCACUCAUAGUgGAAGUCACasg | 557 |
| XD-60325 | 15254_DV22_21/23mer | gsascuucCfaCfUfAfugagugcgaa | 381 | usUfscgcAfcucauagUfgGfaagucsasc | 558 |
| XD-60326 | 15258_DV22_21/23mer | uscscacuAfuGfAfGfugcgagugca | 382 | usGfscacUfcgcacucAfuAfguggasasg | 559 |
| XD-60384 | 15258_EEL_21/23mer | uccaCuauGAGugcgaguGcsa | 383 | dTGCACUCGCACUCAUAGUGGAasg | 560 |
| XD-60327 | 15261_DV22_21/23mer | ascsuaugAfgUfGfCfgagugcauca | 384 | usGfsaugCfacucgcaCfuCfauagusgsg | 561 |
| XD-60431 | 15261_EEL_19/21mer | uaUgagUGCgaGugcaUcsa | 385 | dTGAUGCACUCGCaCUCAUAgsu | 562 |
| XD-60385 | 15261_EEL_21/23mer | acuaUgagUGCgagugcaUcsa | 386 | dTGAUGCACUCGCaCUCAUAGUgsg | 563 |
| XD-61286 | 15262_DV22_21/23mer | csusaugaGfuGfCfGfagugcaucua | 387 | usAfsgauGfcacucgcAfcUfcauagsusg | 564 |
| XD-60328 | 15304_DV22_21/23mer | csusauucCfaCfCfUfuugacggcaa | 388 | usUfsgccGfucaaaggUfgGfaauagsusg | 565 |
| XD-60329 | 15305_DV22_21/23mer | usasuuccAfcCfUfUfugacggcaca | 389 | usGfsugcCfgucaaagGfuGfgaauasgsu | 566 |
| XD-60432 | 15305_EEL_19/21mer | uuCcacCUUugAcggcAcsa | 390 | dTGUGCCGUCAAAgGUGGAAusa | 567 |
| XD-60386 | 15305_EEL_21/23mer | uauuCcacCUUugacggcAcsa | 391 | dTGUGCCGUCAAAgGUGGAAUAgsu | 568 |
| XD-60330 | 15310_DV22_21/23mer | csasccuuUfgAfCfGfgcaccucuua | 392 | usAfsagaGfgugccguCfaAfaggugsgsa | 569 |
| XD-60332 | 15312_DV22_21/23mer | cscsuuugAfcGfGfCfaccucuuaca | 393 | usGfsuaaGfaggugccGfuCfaaaggsusg | 570 |
| XD-60433 | 15312_EEL_19/21mer | uuUgacGGCacCucuuAcsa | 394 | dTGUAAGAGGUGCcGUCAAAgsg | 571 |
| XD-60387 | 15312_EEL_21/23mer | ccuuUgacGGCaccucuuAcsa | 395 | dTGUAAGAGGUGCCGUCAAAGGusg | 572 |
| XD-60333 | 15314_DV22_21/23mer | ususugacGfgCfAfCfcucuuacaca | 396 | usGfsuguAfagaggugCfcGfucaaasgsg | 573 |
| XD-60434 | 15314_EEL_19/21mer | ugAcggCACcuCuuacAcsa | 397 | dTGUGUAAGAGGUgCCGUCAasa | 574 |
| XD-60388 | 15314_EEL_21/23mer | uuugAcggCACcucuuacAcsa | 398 | dTGUGUAAGAGGUgCCGUCAAAgsg | 575 |
| XD-60334 | 15315_DV22_21/23mer | ususgacgGfcAfCfCfucuuacacca | 399 | usGfsgugUfaagagguGfcCfgucaasasg | 576 |
| XD-60335 | 15473_DV22_21/23mer | csascuacAfaGfUfCfcauggauaua | 400 | usAfsuauCfcauggacUfuGfuagugsgsa | 577 |
| XD-60435 | 15473_EEL_19/21mer | cuAcaaGUCcaUggauAusa | 401 | dTAUAUCCAUGGACUUGUAGusg | 578 |
| XD-60389 | 15473_EEL_21/23mer | cacuAcaaGUCcauggauAusa | 402 | dTAUAUCCAUGGACUUGUAGUGgsa | 579 |
| XD-60337 | 15478_DV22_21/23mer | csasagucCfaUfGfGfauaucgucca | 403 | usGfsgacGfauauccaUfgGfacuugsusa | 580 |
| XD-60436 | 15478_EEL_19/21mer | agUccaUGGauAucguCcsa | 404 | dTGGACGAUAUCCaUGGACUusg | 581 |
| XD-60338 | 15479_DV22_21/23mer | asasguccAfuGfGfAfuaucguccua | 405 | usAfsggaCfgauauccAfuGfgacuusgsu | 582 |
| XD-60437 | 15539_EEL_19/21mer | guUugaCCAaaUuccgGusa | 406 | dTACCGGAAUUUGgUCAAACasg | 583 |
| XD-60391 | 15539_EEL_21/23mer | cuguUugaCCAaauuccgGusa | 407 | dTACCGGAAUUUGgUCAAACAGgsa | 584 |
| XD-60340 | 15543_DV22_21/23mer | ususgaccAfaAfUfUfccggugagca | 408 | usGfscucAfccggaauUfuGfgucaasasc | 585 |
| XD-60438 | 15543_EEL_19/21mer | gaCcaaAUUccGgugaGcsa | 409 | dTGCUCACCGGAAuUUGGUCasa | 586 |
| XD-60392 | 15543_EEL_21/23mer | uugaCcaaAUUccggugaGcsa | 410 | dTGCUCACCGGAAuUUGGUCAAasc | 587 |
| XD-61288 | 15546_DV22_21/23mer | ascscaaaUfuCfCfGfgugagcagca | 411 | usGfscugCfucaccggAfaUfuugguscsa | 588 |
| XD-60341 | 15547_DV22_21/23mer | cscsaaauUfcCfGfGfugagcagcga | 412 | usCfsgcuGfcucaccgGfaAfuuuggsusc | 589 |
| XD-60439 | 15547_EEL_19/21mer | aaAuucCGGugAgcagCgsa | 413 | dTCGCUGCUCACCgGAAUUUgsg | 590 |
| XD-60393 | 15547_EEL_21/23mer | ccaaAuucCGGugagcagCgsa | 414 | dTCGCUGCUCACCgGAAUUUGGusc | 591 |
| XD-60344 | 15568_DV22_21/23mer | ususucagCfaAfGfAfacggcgugca | 415 | usGfscacGfccguucuUfgCfugaaascsc | 592 |
| XD-60345 | 15572_DV22_21/23mer | asgscaagAfaCfGfGfcgugcuugua | 416 | usAfscaaGfcacgccgUfuCfuugcusgsa | 593 |
| XD-60346 | 15576_DV22_21/23mer | asgsaacgGfcGfUfGfcuugugucua | 417 | usAfsgacAfcaagcacGfcCfguucususg | 594 |
| XD-60442 | 15576_EEL_19/21mer | aaCggcGUGcuUguguCusa | 418 | dTAGACACAAGCAcGCCGUUcsu | 595 |
| XD-60396 | 15576_EEL_21/23mer | agaaCggcGUGcuuguguCusa | 419 | dTAGACACAAGCAcGCCGUUCUusg | 59€ |
| XD-61281 | 1564_DV22_21/23mer | csasacucCfaUfCfUfacacgcagca | 420 | usGfscugCfguguagaUfgGfaguugsasg | 597 |
| XD-60347 | 15692_DV22_21/23mer | csuscuucCfaCfAfAfcaacaccgaa | 421 | usUfscggUfguuguugUfgGfaagagsgsc | 598 |
| XD-60348 | 15731_DV22_21/23mer | ascscaacAfaCfCfAfgagggacgaa | 422 | usUfscguCfccucuggUfuGfuuggusgsc | 599 |
| XD-60275 | 1617_DV22_21/23mer | csascccuCfgAfGfCfuucuucauca | 423 | usGfsaugAfagaagcuCfgAfgggugsusg | 600 |
| XD-61291 | 1617_EEL_19/21mer | ccCucgAGCuuCuucaUcsa | 424 | dTGAUGAAGAAGCuCGAGGGusg | 601 |
| XD-61289 | 1617_EEL_21/23mer | caccCucgAGCuucuucaUcsa | 425 | dTGAUGAAGAAGCuCGAGGGUGusg | 602 |
| XD-60276 | 1618_DV22_21/23mer | ascsccucGfaGfCfUfucuucaucga | 426 | usCfsgauGfaagaagcUfcGfagggusgsu | 603 |
| XD-60277 | 1619_DV22_21/23mer | cscscucgAfgCfUfUfcuucaucgua | 427 | usAfscgaUfgaagaagCfuCfgagggsusg | 604 |
| XD-60403 | 1619_EEL_19/21mer | cuCgagCUUcuUcaucGusa | 428 | dTACGAUGAAGAAgCUCGAGgsg | 605 |
| XD-60357 | 1619_EEL_21/23mer | cccuCgagCUUcuucaucGusa | 429 | dTACGAUGAAGAAgCUCGAGGGusg | 606 |
| XD-60349 | 16985_DV22_21/23mer | asgsccucAfgGfAfAfaaccggcuga | 430 | usCfsagcCfgguuuucCfuGfaggcuscsc | 607 |
| XD-60350 | 17255_DV22_21/23mer | gsasugagUfgUfGfGfcugcacgcca | 431 | usGfsgcgUfgcagccaCfaCfucaucscsa | 608 |
| XD-60278 | 1756_DV22_21/23mer | cscsagaaCfcAfGfGfcugacgacua | 432 | usAfsgucGfucagccuGfgUfucuggsusu | 609 |
| XD-60279 | 1808_DV22_21/23mer | gsgscgcaGfcCfUfUfcgccaacaca | 433 | usGfsuguUfggcgaagGfcUfgcgccscsg | 610 |
| XD-60404 | 1808_EEL_19/21mer | cgCagcCUUcgCcaacAcsa | 434 | dTGUGUUGGCGAAgGCUGCGcsc | 611 |
| XD-60358 | 1808_EEL_21/23mer | ggcgCagcCUUcgccaacAcsa | 435 | dTGUGUUGGCGAAgGCUGCGCCcsg | 612 |
| XD-60280 | 1896_DV22_21/23mer | asgsaaugAfgAfAfCfuacgcccgga | 436 | usCfscggGfcguaguuCfuCfauucuscsc | 613 |
| XD-60281 | 1897_DV22_21/23mer | gsasaugaGfaAfCfUfacgcccggca | 437 | usGfsccgGfgcguaguUfcUfcauucsusc | 614 |
| XD-60282 | 2112_DV22_21/23mer | ascsggcgUfcUfGfCfaccaaguaca | 438 | usGfsuacUfuggugcaGfaCfgccguscsc | 615 |
| XD-60405 | 2112_EEL_19/21mer | ggCgucUGCacCaaguAcsa | 439 | dTGUACUUGGUGCaGACGCCgsu | 616 |
| XD-60359 | 2112_EEL_21/23mer | acggCgucUGCaccaaguAcsa | 440 | dTGUACUUGGUGCaGACGCCGUcsc | 617 |
| XD-60283 | 2113_DV22_21/23mer | csgsgcguCfuGfCfAfccaaguacaa | 441 | usUfsguaCfuuggugcAfgAfcgccgsusc | 618 |
| XD-60406 | 2113_EEL_19/21mer | gcGucuGCAccAaguaCasa | 442 | dTUGUACUUGGUGcAGACGCcsg | 619 |
| XD-60360 | 2113_EEL_21/23mer | cggcGucuGCAccaaguaCasa | 443 | dTUGUACUUGGUGcAGACGCCGusc | 620 |
| XD-60266 | 215_DV22_21/23mer | gsusgagcUfuUfGfUfuccacccgua | 444 | usAfscggGfuggaacaAfaGfcucacsgsc | 621 |
| XD-61282 | 2198_DV22_21/23mer | gsgsccugAfgUfGfAfggccgacgua | 445 | usAfscguCfggccucaCfuCfaggccsgsc | 622 |
| XD-60284 | 2199_DV22_21/23mer | gscscugaGfuGfAfGfgccgacguca | 446 | usGfsacgUfcggccucAfcUfcaggcscsg | 623 |
| XD-60285 | 2273_DV22_21/23mer | ususccucAfaUfGfAfcgcgggcgca | 447 | usGfscgcCfcgcgucaUfuGfaggaasgsg | 624 |
| XD-60407 | 2273_EEL_19/21mer | ccUcaaUGAcgCgggcGcsa | 448 | dTGCGCCCGCGUCaUUGAGGasa | 625 |
| XD-60361 | 2273_EEL_21/23mer | uuccUcaaUGAcgcgggcGcsa | 449 | dTGCGCCCGCGUCaUUGAGGAAgsg | 626 |
| XD-60286 | 2275_DV22_21/23mer | cscsucaaUfgAfCfGfcgggcgccua | 450 | usAfsggcGfcccgcguCfaUfugaggsasa | 627 |
| XD-60408 | 2275_EEL_19/21mer | ucAaugACGcgGgcgcCusa | 451 | dTAGGCGCCCGCGuCAUUGAgsg | 628 |
| XD-60362 | 2275_EEL_21/23mer | ccucAaugACGcgggcgcCusa | 452 | dTAGGCGCCCGCGuCAUUGAGGasa | 629 |
| XD-60287 | 2326_DV22_21/23mer | uscsacggCfaCfCfGfugcuggcuca | 453 | usGfsagcCfagcacggUfgCfcgugasgsc | 630 |
| XD-60409 | 2326_EEL_19/21mer | acGgcaCCGugCuggcUcsa | 454 | dTGAGCCAGCACGgUGCCGUgsa | 631 |
| XD-60363 | 2326_EEL_21/23mer | ucacGgcaCCGugcuggcUcsa | 455 | dTGAGCCAGCACGgUGCCGUGAgsc | 632 |
| XD-60288 | 2525_DV22_21/23mer | gsascgugGfgCfUfGfuuucagcaca | 456 | usGfsugcUfgaaacagCfcCfacgucscsa | 633 |
| XD-60410 | 2525_EEL_19/21mer | cgUgggCUGuuUcagcAcsa | 457 | dTGUGCUGAAACAgCCCACGusc | 634 |
| XD-60364 | 2525_EEL_21/23mer | gacgUgggCUGuuucagcÅcsa | 458 | dTGUGCUGAAACAgCCCACGUCcsa | 635 |
| XD-60289 | 2752_DV22_21/23mer | csgsgggaUfgGfCfCfacuucaucaa | 459 | usUfsgauGfaaguggcCfaUfccccgsusa | 636 |
| XD-60290 | 2854_DV22_21/23mer | csgsggacCfuUfCfCfgcaucgucaa | 460 | usUfsgacGfaugcggaAfgGfucccgsusg | 637 |
| XD-60291 | 2874_DV22_21/23mer | cscsgagaAfcAfUfCfcccuguggga | 461 | usCfsccaCfaggggauGfuUfcucggsusg | 638 |
| XD-61283 | 3058_DV22_21/23mer | gsgsccguGfuCfCfUfgggaccggaa | 462 | usUfsccgGfucccaggAfcAfcggccsasu | 639 |
| XD-60292 | 3086_DV22_21/23mer | gsusguucAfuCfCfGfacugcaccaa | 463 | usUfsgguGfcagucggAfuGfaacacsgsc | 640 |
| XD-60411 | 3086_EEL_19/21mer | guUcauCCGacUgcacCasa | 464 | dTUGGUGCAGUCGgAUGAACasc | 641 |
| XD-60365 | 3086_EEL_21/23mer | guguUcauCCGacugcacCasa | 465 | dTUGGUGCAGUCGgAUGAACACgsc | 642 |
| XD-60293 | 3088_DV22_21/23mer | gsusucauCfcGfAfCfugcaccagga | 466 | usCfscugGfugcagucGfgAfugaacsasc | 643 |
| XD-60412 | 3088_EEL_19/21mer | ucAuccGACugCaccaGgsa | 467 | dTCCUGGUGCAGUcGGAUGAasc | 644 |
| XD-60366 | 3088_EEL_21/23mer | guucAuccGACugcaccaGgsa | 468 | dTCCUGGUGCAGUCGGAUGAACasc | 645 |
| XD-60294 | 3090_DV22_21/23mer | uscsauccGfaCfUfGfcaccaggaca | 469 | usGfsuccUfggugcagUfcGfgaugasasc | 646 |
| XD-60413 | 3090_EEL_19/21mer | auCcgaCUGcaCcaggAcsa | 470 | dTGUCCUGGUGCAgUCGGAUgsa | 647 |
| XD-60367 | 3090_EEL_21/23mer | ucauCcgaCUGcaccaggAcsa | 471 | dTGUCCUGGUGCAgUCGGAUGAasc | 648 |
| XD-60295 | 3356_DV22_21/23mer | gsusugacUfcCfAfCfcaaguacuaa | 472 | usUfsaguAfcuuggugGfaGfucaacscsu | 649 |
| XD-60414 | 3356_EEL_19/21mer | ugAcucCACcaAguacUasa | 473 | dTUAGUACUUGGUgGAGUCAasc | 650 |
| XD-60368 | 3356_EEL_21/23mer | guugAcucCACcaaguacUasa | 474 | dTUAGUACUUGGUgGAGUCAACcsu | 651 |
| XD-60296 | 3360_DV22_21/23mer | ascsuccaCfcAfAfGfuacuacgaga | 475 | usCfsucgUfaguacuuGfgUfggaguscsa | 652 |
| XD-60415 | 3360_EEL_19/21mer | ucCaccAAGuaCuacgAgsa | 476 | dTCUCGUAGUACUuGGUGGAgsu | 653 |
| XD-60369 | 3360_EEL_21/23mer | acucCaccAAGuacuacgAgsa | 477 | dTCUCGUAGUACUUGGUGGAGUcsa | 654 |
| XD-60297 | 3594_DV22_21/23mer | gscscggaAfcCfCfCfagugggcaca | 478 | usGfsugcCfcacugggGfuUfccggcsasg | 655 |
| XD-60416 | 3594_EEL_19/21mer | cgGaacCCCagUgggcAcsa | 479 | dTGUGCCCACUGGgGUUCCGgsc | 656 |
| XD-60370 | 3594_EEL_21/23mer | gccgGaacCCCagugggcAcsa | 480 | dTGUGCCCACUGGgGUUCCGGCasg | 657 |
| XD-60298 | 3691_DV22_21/23mer | gsasugaaGfuGfCfGfuggcccagua | 481 | usAfscugGfgccacgcAfcUfucaucsusg | 658 |
| XD-60299 | 3770_DV22_21/23mer | gsasgaacUfgCfCfAfgagcuguaaa | 482 | usUfsuacAfgcucuggCfaGfuucucscsg | 659 |
| XD-61292 | 3770_EEL_19/21mer | gaAcugCCAgaGcuguAasa | 483 | dTUUACAGCUCUGgCAGUUCusc | 660 |
| XD-61290 | 3770_EEL_21/23mer | gagaAcugCCAgagcuguAasa | 484 | dTUUACAGCUCUGgCAGUUCUCcsg | 661 |
| XD-60300 | 3771_DV22_21/23mer | asgsaacuGfcCfAfGfagcuguaaca | 485 | usGfsuuaCfagcucugGfcAfguucuscsc | 662 |
| XD-60417 | 3771_EEL_19/21mer | aaCugcCAGagCuguaAcsa | 486 | dTGUUACAGCUCUgGCAGUUcsu | 663 |
| XD-60371 | 3771_EEL_21/23mer | agaaCugcCAGagcuguaAcsa | 487 | dTGUUACAGCUCUgGCAGUUCUcsc | 664 |
| XD-60301 | 3842_DV22_21/23mer | ascscuauGfaGfGfAfcaggaccuaa | 488 | usUfsaggUfccuguccUfcAfuaggusgsc | 665 |
| XD-60302 | 3871_DV22_21/23mer | gsgsacguCfaUfCfUfacaacaccaa | 489 | usUfsgguGfuuguagaUfgAfcguccsusg | 666 |
| XD-60418 | 3871_EEL_19/21mer | acGucaUCUacAacacCasa | 490 | dTUGGUGUUGUAGaUGACGUcsc | 667 |
| XD-60372 | 3871_EEL_21/23mer | ggacGucaUCUacaacacCasa | 491 | dTUGGUGUUGUAGaUGACGUCCusg | 668 |
| XD-60303 | 4057_DV22_21/23mer | usgsuccgCfgAfGfGfucugccgcua | 492 | usAfsgcgGfcagaccuCfgCfggacascsa | 669 |
| XD-60419 | 4057_EEL_19/21mer | ucCgcgAGGucUgccgCusa | 493 | dTAGCGGCAGACCUCGCGGAcsa | 670 |
| XD-60373 | 4057_EEL_21/23mer | ugucCgcgAGGucugccgCusa | 494 | dTAGCGGCAGACCUCGCGGACAcsa | 671 |
| XD-60304 | 4339_DV22_21/23mer | csgsaauaCfgUfGfCfccuguggcca | 495 | usGfsgccAfcagggcaCfgUfauucgscsa | 672 |
| XD-60420 | 4339_EEL_19/21mer | aaUacgUGCccUguggCcsa | 496 | dTGGCCACAGGGCaCGUAUUcsg | 673 |
| XD-60374 | 4339_EEL_21/23mer | cgaaUacgUGCccuguggCcsa | 497 | dTGGCCACAGGGCaCGUAUUCGcsa | 674 |
| XD-60305 | 4601_DV22_21/23mer | gsasggacUfaCfCfCfcaagucugaa | 498 | usUfscagAfcuuggggUfaGfuccucsasu | 675 |
| XD-60306 | 4604_DV22_21/23mer | gsascuacCfcCfAfAfgucugaacaa | 499 | usUfsguuCfagacuugGfgGfuagucscsu | 676 |
| XD-60307 | 4618_DV22_21/23mer | usgsaacaAfcUfUfGfgaggggacga | 500 | usCfsgucCfccuccaaGfuUfguucasgsa | 677 |
| XD-60421 | 4618_EEL_19/21mer | aaCaacUUGgaGgggaCgsa | 501 | dTCGUCCCCUCCAaGUUGUUcsa | 678 |
| XD-60375 | 4618_EEL_21/23mer | ugaaCaacUUGgaggggaCgsa | 502 | dTCGUCCCCUCCAaGUUGUUCAgsa | 679 |
| XD-60308 | 4620_DV22_21/23mer | asascaacUfuGfGfAfggggacguua | 503 | usAfsacgUfccccuccAfaGfuuguuscsa | 680 |
| XD-60422 | 4620_EEL_19/21mer | caAcuuGGAggGgacgUusa | 504 | dTAACGUCCCCUCCAAGUUGusu | 681 |
| XD-60376 | 4620_EEL_21/23mer | aacaAcuuGGAggggacgUusa | 505 | dTAACGUCCCCUCCAAGUUGUUcsa | 682 |
| XD-60309 | 4633_DV22_21/23mer | gsgsacguUfgAfGfUfccuacgauaa | 506 | usUfsaucGfuaggacuCfaAfcguccscsc | 683 |
| XD-60377 | 4633_EEL_21/23mer | ggacGuugAGUccuacgaUasa | 507 | dTUAUCGUAGGACUCAACGUCCCSC | 684 |
| XD-60311 | 4635_DV22_21/23mer | ascsguugAfgUfCfCfuacgauaaga | 508 | usCfsuuaUfcguaggaCfuCfaacguscsc | 685 |
| XD-60312 | 4641_DV22_21/23mer | asgsuccuAfcGfAfUfaagaucagga | 509 | usCfscugAfucuuaucGfuAfggacuscsa | 686 |
| XD-61284 | 4818_DV22_21/23mer | usgsugcuAfcAfAfCfuacaggauca | 510 | usGfsaucCfuguaguuGfuAfgcacasusc | 687 |
| XD-60313 | 4826_DV22_21/23mer | asascuacAfgGfAfUfccggguccua | 511 | usAfsggaCfccggaucCfuGfuaguusgsu | 688 |
| XD-60267 | 525_DV22_21/23mer | asgscugcCfuUfAfCfagccgcacua | 512 | usAfsgugCfggcuguaAfgGfcagcuscsc | 689 |
| XD-60314 | 5277_DV22_21/23mer | csgscugaCfcAfCfGfagccuggcga | 513 | usCfsgccAfggcucguGfgUfcagcgsgsc | 690 |
| XD-60425 | 5277_EEL_19/21mer | cuGaccACGagCcuggCgsa | 514 | dTCGCCAGGCUCGuGGUCAGcsg | 691 |
| XD-60379 | 5277_EEL_21/23mer | cgcuGaccACGagccuggOgsa | 515 | dTCGCCAGGCUCGuGGUCAGCGgsc | 692 |
| XD-60315 | 5425_DV22_21/23mer | gsusggacAfgAfGfUfgguuugacga | 516 | usCfsgucAfaaccacuCfuGfuccacsusc | 693 |
| XD-61285 | 7169_DV22_21/23mer | csgsggagUfuGfGfGfccaggucgua | 517 | usAfscgaCfcuggcccAfaCfucccgscsa | 694 |
| XD-60268 | 734_DV22_21/23mer | csusgaccCfcGfCfUfccaguuugga | 518 | usCfscaaAfcuggagcGfgGfgucagscsc | 695 |
| XD-60397 | 734_EEL_19/21mer | gaCcccGCUccAguuuGgsa | 519 | dTCCAAACUGGAGcGGGGUCasg | 696 |
| XD-60351 | 734_EEL_21/23mer | cugaCcccGCUccaguuuGgsa | 520 | dTCCAAACUGGAGGGGGGUCAGcsc | 697 |
| XD-60269 | 737_DV22_21/23mer | ascscccgCfuCfCfAfguuugggaaa | 521 | usUfsuccCfaaacuggAfgCfgggguscsa | 698 |
| XD-60398 | 737_EEL_19/21mer | ccCgcuCCAguUugggAasa | 522 | dTUUCCCAAACUGgAGCGGGgsu | 699 |
| XD-60352 | 737_EEL_21/23mer | acccCgcuCCAguuugggAasa | 523 | dTUUCCCAAACUGgAGCGGGGUcsa | 700 |
| XD-60270 | 960_DV22_21/23mer | cscsuuugUfgGfAfAfuacucacgca | 524 | usGfscguGfaguauucCfaCfaaaggsusg | 701 |
| XD-60399 | 960_EEL_19/21mer | uuUgugGAAuaCucacGcsa | 525 | dTGCGUGAGUAUUcCACAAAgsg | 702 |
| XD-60353 | 960_EEL_21/23mer | ccuuUgugGAAuacucacGcsa | 526 | dTGCGUGAGUAUUcCACAAAGGusg | 703 |
| XD-60271 | 962_DV22_21/23mer | ususugugGfaAfUfAfcucacgccaa | 527 | usUfsggcGfugaguauUfcCfacaaasgsg | 704 |
| XD-61280 | 966_DV22_21/23mer | usgsgaauAfcUfCfAfcgccagugca | 528 | usGfscacUfggcgugaGfuAfuuccascsa | 705 |
| XD-60272 | 972_DV22_21/23mer | ascsucacGfcCfAfGfugcgcccaca | 529 | usGfsuggGfcgcacugGfcGfugagusasu | 706 |
| XD-60400 | 972_EEL_19/21mer | ucAcgcCAGugCgcccAcsa | 530 | dTGUGGGCGCACUgGCGUGAgsu | 707 |
| XD-60354 | 972_EEL_21/23mer | acucAcgcCAGugcgcccAcsa | 531 | dTGUGGGCGCACUgGCGUGAGUasu | 708 |

TABLE 4
Unmodified MUCSB ASO Sequences

| ASO ID | Sequence | SEQ ID NO: |
|---|---|---|
| X164897 | GTTGTAGATGACGTCCT | 709 |
| X164902 | TAGTCGTGACAGAGCGG | 710 |
| X164915 | CCGTAGTTGCAGCAGAA | 711 |
| X164916 | GCCGTAGTTGCAGCAGA | 712 |
| X164924 | GGTGTAAGAGGTGCCGT | 713 |
| X164926 | GGACGATATCCATGGAC | 714 |
| X164845 | AAAGCCCATGGTCGGCT | 715 |
| X164848 | GCGTGAGTATTCCACAA | 716 |
| X164849 | CGCACTGGCGTGAGTAT | 717 |
| X164850 | GCGCACTGGCGTGAGTA | 718 |
| X164851 | TTGGACAGAACGTAGCT | 719 |
| X164852 | CCTTGGACAGAACGTAG | 720 |
| X164853 | ACCTTGGACAGAACGTA | 721 |
| X164854 | GTTCTCGTTGTCCGTCA | 722 |
| X164855 | AGGCAGTTCTCGTTGTC | 723 |
| X164856 | AGCTCGAGGGTGTGAAC | 724 |
| X164857 | TGAAGAAGCTCGAGGGT | 725 |
| X164858 | CGATGAAGAAGCTCGAG | 726 |
| X164859 | ACGATGAAGAAGCTCGA | 727 |
| X164860 | TGGCGCTAGTCCAGGCC | 728 |
| X164861 | AGCCTGGCGCTAGTCCA | 729 |
| X164862 | GCAGCCTGGCGCTAGTC | 730 |
| X164863 | TGTAGGTGGCCTCGTTG | 731 |
| X164864 | GCAGTCGACCCTGATGG | 732 |
| X164865 | GTGTTGCAGTCGACCCT | 733 |
| X164866 | GGTGTTGCAGTCGACCC | 734 |
| X164867 | CAGGTGTTGCAGTCGAC | 735 |
| X164868 | CCGTAGGCCACGCAGGT | 736 |
| X164869 | CCCGTAGGCCACGCAGG | 737 |
| X164870 | CCCCGTAGGCCACGCAG | 738 |
| X164871 | TCCCCGTAGGCCACGCA | 739 |
| X164872 | ATCCCCGTAGGCCACGC | 740 |
| X164873 | CATCCCCGTAGGCCACG | 741 |
| X164874 | ATGCGGAAGGTCCCGTG | 742 |
| X164875 | GÅCGATGCGGAAGGTCC | 743 |
| X164876 | CTCGGTGACGATGCGGA | 744 |
| X164877 | GGATGTTCTCGGTGACG | 745 |
| X164878 | GGTGCGCACGGGCTCTT | 746 |
| X164879 | AAGATCCCCATGTAGCG | 747 |
| X164880 | TCCGGTCCCAGGACACG | 748 |
| X164881 | GGTGCAGTOGGATGAAC | 749 |
| X164882 | TGGTGCAGTCGGATGAA | 750 |
| X164883 | GTGTGCCGTGGGACATG | 751 |
| X164884 | CTCGTAGTACTTGGTGG | 752 |
| X164885 | GTCCGGAGTCCGCCAGG | 753 |
| X164886 | TGTCCGGAGTCCGCCAG | 754 |
| X164887 | GTGTCCGGAGTCCGCCA | 755 |
| X164888 | ACGGCAGGTGTCCGGAG | 756 |
| X164889 | CACGGCAGGTGTCCGGA | 757 |
| X164890 | CCCGACTCACGGCAGGT | 758 |
| X164891 | ACGGACAGAGCCCGACT | 759 |
| X164892 | ATGCGTGTTGGATGTCT | 760 |
| X164893 | ACATGCGTGTTGGATGT | 761 |
| X164894 | GGCACATGCGTGTTGGA | 762 |
| X164895 | TCGGGTAGCAGCCTAGG | 763 |
| X164896 | TTGTAGATGACGTCCTG | 764 |
| X164898 | GACCTCGCGGACACACA | 765 |
| X164899 | AGACCTCGCGGACACAC | 766 |
| X164900 | CGGCAGACCTCGCGGAC | 767 |
| X164901 | TTGGCGCACATCAGCCC | 768 |
| X164903 | GGCCACAGGGCACGTAT | 769 |
| X164904 | TATCGTAGGACTCAACG | 770 |
| X164905 | TTATCGTAGGACTCAAC | 771 |
| X164906 | CTGATCTTATCGTAGGA | 772 |
| X164907 | CCTGATCTTATCGTAGG | 773 |
| X164908 | GCCCTGATCTTATCGTA | 774 |
| X164909 | CGGATCCTGTAGTTGTA | 775 |
| X164910 | GACCCGGATCCTGTAGT | 776 |
| X164911 | GGACCCGGATCCTGTAG | 777 |
| X164912 | CGGGGTAGTTCTCCGCC | 778 |
| X164913 | TCGGGGTAGTTCTCCGC | 779 |
| X164914 | ACCTCGGGGTAGTTCTC | 780 |
| X164917 | TTGTTCACGCAGGTGAC | 781 |
| X164918 | CTTGTTCACGCAGGTGA | 782 |
| X164919 | GGTGCTTGTTCACGCAG | 783 |
| X164920 | CACTCGCACTCATAGTG | 784 |
| X164921 | GAAGCCGCTGTTAGGAC | 785 |
| X164922 | GTAAGAGGTGCCGTCAA | 786 |
| X164923 | GTGTAAGAGGTGCCGTC | 787 |
| X164925 | GACGATATCCATGGACT | 788 |
| X164927 | GTGAGGACGATATCCAT | 789 |
| X164928 | GCTCACCGGAATTTGGT | 790 |
| X164929 | CGCTGCTCACCGGAATT | 791 |
| X164930 | CCGCTGCTCACCGGAAT | 792 |
| X164931 | CACGCCGTTCTTGCTGA | 793 |
| X164932 | GCACGCCGTTCTTGCTG | 794 |
| X164933 | GTTGCACCTCGCCAGTC | 795 |
| X164934 | TTACCGCACACCGTCTC | 796 |
| X164935 | CTTACCGCACACCGTCT | 797 |
| X164936 | TCTTACCGCACACCGTC | 798 |
| X164937 | GTCTTACCGCACACCGT | 799 |
| X164938 | CCAATGGACGTGGAGAG | 800 |
| X165856 | CAACACCAGCGTCCGGC | 801 |
| X165857 | AGGGCGTCCCAGTGACA | 802 |

TABLE 5
Modified MUCSB ASO Sequences

| | | SEQ |
|---|---|---|
| | | ID |
| ASO ID | Sequence | NO: |
| X164897 | GbsTbsTbsdGsdTsdAsdGsdAsdTsdGsdAs(5MdC)sdGsdTsCbsCbsTb | 803 |
| X164902 | TbsAbsGbsdTs(5MdC)sdGsdTsdGsdAs(5MdC)sdAsdGsdAsdGsCbsGbsGb | 804 |
| X164915 | CbsCbsGbsdTsdAsdGsdTsdTsdGs(5MdC)sdAsdGs(5MdC)sdAsGbsAbsAb | 805 |
| X164916 | GbsCbsCbsdGsdTsdAsdGsdTsdTsdGs(5MdC)sdAsdGs(5MdC)sAbsGbsAb | 806 |
| X164924 | GbsGbsTbsdGsdTsdAsdAsdGsdAsdGsdGsdTsdGs(5MdC)sCbsGbsTb | 807 |
| X164926 | GbsGbsAbs(5MdC)sdGsdAsdTsdAsdTs(5MdC)s(5MdC)sdAsdTsdGsGbsAbsCb | 808 |
| X164845 | AbsAbsAbsdGs(5MdC)s(5MdC)s(5MdC)sdAsdTsdGsdGsdTs(5MdC)sdGsGbsCbsTb | 809 |
| X164848 | GbsCbsGbsdTsdGsdAsdGsdTsdAsdTsdTs(5MdC)s(5MdC)sdAsCbsAbsAb | 810 |
| X164849 | CbsGbsCbsdAs(5MdC)sdTsdGsdGs(5MdC)sdGsdTsdGsdAsdGsTbsAbsTb | 811 |
| X164850 | GbsCbsGbs(5MdC)sdAs(5MdC)sdTsdGsdGs(5MdC)sdGsdTsdGsdAsGbsTbsAb | 812 |
| X164851 | TbsTbsGbsdGsdAs(5MdC)sdAsdGsdAsdAs(5MdC)sdGsdTsdAsGbsCbsTb | 813 |
| X164852 | CbsCbsTbsdTsdGsdGsdAs(5MdC)sdAsdGsdAsdAs(5MdC)sdGsTbsAbsGb | 814 |
| X164853 | AbsCbsCbsdTsdTsdGsdGsdAs(5MdC)sdAsdGsdAsdAs(5MdC)sGbsTbsAb | 815 |
| X164854 | GbsTbsTbs(5MdC)sdTs(5MdC)sdGsdTsdTsdGsdTs(5MdC)s(5MdC)sdGsTbsCbsAb | 816 |
| X164855 | AbsGbsGbs(5MdC)sdAsdGsdTsdTs(5MdC)sdTs(5MdC)sdGsdTsdTsGbsTbsCb | 817 |
| X164856 | AbsGbsCbsdTs(5MdC)sdGsdAsdGsdGsdGsdTsdGsdTsdGsÅbsAbsCb | 818 |
| X164857 | TbsGbsAbsdAsdGsdAsdAsdGs(5MdC)sdTs(5MdC)sdGsdAsdGsGbsGbsTb | 819 |
| X164858 | CbsGbsAbsdTsdGsdAsdAsdGsdAsdAsdGs(5MdC)sdTs(5MdC)sGbsAbsGb | 820 |
| X164859 | AbsCbsGbsdAsdTsdGsdAsdAsdGsdAsdAsdGs(5MdC)sdTsCbsGbsAb | 821 |
| X164860 | TbsGbsGbs(5MdC)sdGs(5MdC)sdTsdAsdGsdTs(5MdC)s(5MdC)sdAsdGsGbsCbsCb | 822 |
| X164861 | AbsGbsCbs(5MdC)sdTsdGsdGs(5MdC)sdGs(5MdC)sdTsdAsdGsdTsCbsCbsAb | 823 |
| X164862 | GbsCbsAbsdGs(5MdC)s(5MdC)sdTsdGsdGs(5MdC)sdGs(5MdC)sdTsdAsGbsTbsCb | 824 |
| X164863 | TbsGbsTbsdAsdGsdGsdTsdGsdGs(5MdC)s(5MdC)sdTs(5MdC)sdGsTbsTbsGb | 825 |
| X164864 | GbsCbsAbsdGsdTs(5MdC)sdGsdAs(5MdC)s(5MdC)s(5MdC)sdTsdGsdAsTbsGbsGb | 826 |
| X164865 | GbsTbsGbsdTsdTsdGs(5MdC)sdAsdGsdTs(5MdC)sdGsdAs(5MdC)sCbsCbsTb | 827 |
| X164866 | GbsGbsTbsdGsdTsdTsdGs(5MdC)sdAsdGsdTs(5MdC)sdGsdAsCbsCbsCb | 828 |
| X164867 | CbsAbsGbsdGsdTsdGsdTsdTsdGs(5MdC)sdAsdGsdTs(5MdC)sGbsAbsCb | 829 |
| X164868 | CbsCbsGbsdTsdAsdGsdGs(5MdC)s(5MdC)sdAs(5MdC)sdGs(5MdC)sdAsGbsGbsTb | 830 |
| X164869 | CbsCbsCbsdGsdTsdAsdGsdGs(5MdC)s(5MdC)sdAs(5MdC)sdGs(5MdC)sAbsGbsGb | 831 |
| X164870 | CbsCbsCbs(5MdC)sdGsdTsdAsdGsdGs(5MdC)s(5MdC)sdAs(5MdC)sdGsCbsAbsGb | 832 |
| X164871 | TbsCbsCbs(5MdC)s(5MdC)sdGsdTsdAsdGsdGs(5MdC)s(5MdC)sdAs(5MdC)sGbsCbsAb | 833 |
| X164872 | AbsTbsCbs(5MdC)s(5MdC)s(5MdC)sdGsdTsdAsdGsdGs(5MdC)s(5MdC)sdAsCbsGbsCb | 834 |
| X164873 | CbsAbsTbs(5MdC)s(5MdC)s(5MdC)s(5MdC)sdGsdTsdAsdGsdGs(5MdC)s(5MdC)sÅbsCbsGb | 835 |
| X164874 | AbsTbsGbs(5MdC)sdGsdGsdAsdAsdGsdGsdTs(5MdC)s(5MdC)s(5MdC)sGbsTbsGb | 836 |
| X164875 | GbsAbsCbsdGsdAsdTsdGs(5MdC)sdGsdGsdAsdAsdGsdGsTbsCbsCb | 837 |
| X164876 | CbsTbsCbsdGsdGsdTsdGsdAs(5MdC)sdGsdAsdTsdGs(5MdC)sGbsGbsAb | 838 |
| X164877 | GbsGbsAbsdTsdGsdTsdTs(5MdC)sdTs(5MdC)sdGsdGsdTsdGsAbsCbsGb | 839 |
| X164878 | GbsGbsTbsdGs(5MdC)sdGs(5MdC)sdAs(5MdC)sdGsdGsdGs(5MdC)sdTsCbsTbsTb | 840 |
| X164879 | AbsAbsGbsdAsdTs(5MdC)s(5MdC)s(5MdC)s(5MdC)sdAsdTsdGsdTsdAsGbsCbsGb | 841 |
| X164880 | TbsCbsCbsdGsdGsdTs(5MdC)s(5MdC)s(5MdC)sdAsdGsdGsdAs(5MdC)sAbsCbsGb | 842 |
| X164881 | GbsGbsTbsdGs(5MdC)sdAsdGsdTs(5MdC)sdGsdGsdAsdTsdGsAbsAbsCb | 843 |
| X164882 | TbsGbsGbsdTsdGs(5MdC)sdAsdGsdTs(5MdC)sdGsdGsdAsdTsGbsAbsAb | 844 |
| X164883 | GbsTbsGbsdTsdGs(5MdC)s(5MdC)sdGsdTsdGsdGsdGsdAs(5MdC)sAbsTbsGb | 845 |
| X164884 | CbsTbsCbsdGsdTsdAsdGsdTsdAs(5MdC)sdTsdTsdGsdGsTbsGbsGb | 846 |
| X164885 | GbsTbsCbs(5MdC)sdGsdGsdAsdGsdTs(5MdC)s(5MdC)sdGs(5MdC)s(5MdC)sAbsGbsGb | 847 |
| X164886 | TbsGbsTbs(5MdC)s(5MdC)sdGsdGsdAsdGsdTs(5MdC)s(5MdC)sdGs(5MdC)sCbsAbsGb | 848 |
| X164887 | GbsTbsGbsdTs(5MdC)s(5MdC)sdGsdGsdAsdGsdTs(5MdC)s(5MdC)sdGsCbsCbsAb | 849 |
| X164888 | AbsCbsGbsdGs(5MdC)sdAsdGsdGsdTsdGsdTs(5MdC)s(5MdC)sdGsGbsAbsGb | 850 |
| X164889 | CbsAbsCbsdGsdGs(5MdC)sdAsdGsdGsdTsdGsdTs(5MdC)s(5MdC)sGbsGbsAb | 851 |
| X164890 | CbsCbsCbsdGsdAs(5MdC)sdTs(5MdC)sdAs(5MdC)sdGsdGs(5MdC)sdAsGbsGbsTb | 852 |
| X164891 | AbsCbsGbsdGsdAs(5MdC)sdAsdGsdAsdGs(5MdC)s(5MdC)s(5MdC)sdGsAbsCbsTb | 853 |
| X164892 | AbsTbsGbs(5MdC)sdGsdTsdGsdTsdTsdGsdGsdAsdTsdGsTbsCbsTb | 854 |
| X164893 | AbsCbsAbsdTsdGs(5MdC)sdGsdTsdGsdTsdTsdGsdGsdAsTbsGbsTb | 855 |
| X164894 | GbsGbsCbsdAs(5MdC)sdAsdTsdGs(5MdC)sdGsdTsdGsdTsdTsGbsGbsAb | 856 |
| X164895 | TbsCbsGbsdGsdGsdTsdAsdGs(5MdC)sdAsdGs(5MdC)s(5MdC)sdTsAbsGbsGb | 857 |
| X164896 | TbsTbsGbsdTsdAsdGsdAsdTsdGsdAs(5MdC)sdGsdTs(5MdC)sCbsTbsGb | 858 |
| X164898 | GbsAbsCbs(5MdC)sdTs(5MdC)sdGs(5MdC)sdGsdGsdAs(5MdC)sdAs(5MdC)sAbsCbsAb | 859 |
| X164899 | AbsGbsAbs(5MdC)s(5MdC)sdTs(5MdC)sdGs(5MdC)sdGsdGsdAs(5MdC)sdAsCbsAbsCb | 860 |
| X164900 | CbsGbsGbs(5MdC)sdAsdGsdAs(5MdC)s(5MdC)sdTs(5MdC)sdGs(5MdC)sdGsGbsAbsCb | 861 |
| X164901 | TbsTbsGbsdGs(5MdC)sdGs(5MdC)sdAs(5MdC)sdAsdTs(5MdC)sdAsdGsCbsCbsCb | 862 |
| X164903 | GbsGbsCbs(5MdC)sdAs(5MdC)sdAsdGsdGsdGs(5MdC)sdAs(5MdC)sdGsTbsAbsTb | 863 |
| X164904 | TbsAbsTbs(5MdC)sdGsdTsdAsdGsdGsdAs(5MdC)sdTs(5MdC)sdAsAbsCbsGb | 864 |
| X164905 | TbsTbsAbsdTs(5MdC)sdGsdTsdAsdGsdGsdAs(5MdC)sdTs(5MdC)sAbsAbsCb | 865 |
| X164906 | CbsTbsGbsdAsdTs(5MdC)sdTsdTsdAsdTs(5MdC)sdGsdTsdAsGbsGbsAb | 866 |
| X164907 | CbsCbsTbsdGsdAsdTs(5MdC)sdTsdTsdAsdTs(5MdC)sdGsdTsAbsGbsGb | 867 |
| X164908 | GbsCbsCbs(5MdC)sdTsdGsdAsdTs(5MdC)sdTsdTsdAsdTs(5MdC)sGbsTbsAb | 868 |
| X164909 | CbsGbsGbsdAsdTs(5MdC)s(5MdC)sdTsdGsdTsdÅsdGsdTsdTsGbsTbsAb | 869 |
| X164910 | GbsAbsCbs(5MdC)s(5MdC)sdGsdGsdAsdTs(5MdC)s(5MdC)sdTsdGsdTsAbsGbsTb | 870 |
| X164911 | GbsGbsAbs(5MdC)s(5MdC)s(5MdC)sdGsdGsdAsdTs(5MdC)s(5MdC)sdTsdGsTbsAbsGb | 871 |
| X164912 | CbsGbsGbsdGsdGsdTsdAsdGsdTsdTs(5MdC)sdTs(5MdC)s(5MdC)sGbsCbsCb | 872 |
| X164913 | TbsCbsGbsdGsdGsdGsdTsdAsdGsdTsdTs(5MdC)sdTs(5MdC)sCbsGbsCb | 873 |
| X164914 | AbsCbsCbsdTs(5MdC)sdGsdGsdGsdGsdTsdAsdGsdTsdTsCbsTbsCb | 874 |
| X164917 | TbsTbsGbsdTsdTs(5MdC)sdAs(5MdC)sdGs(5MdC)sdAsdGsdGsdTsGbsAbsCb | 875 |
| X164918 | CbsTbsTbsdGsdTsdTs(5MdC)sdAs(5MdC)sdGs(5MdC)sdAsdGsdGsTbsGbsAb | 876 |
| X164919 | GbsGbsTbsdGs(5MdC)sdTsdTsdGsdTsdTs(5MdC)sdAs(5MdC)sdGsCbsAbsGb | 877 |
| X164920 | CbsAbsCbsdTs(5MdC)sdGs(5MdC)sdAs(5MdC)sdTs(5MdC)sdAsdTsdAsGbsTbsGb | 878 |
| X164921 | GbsAbsAbsdGs(5MdC)s(5MdC)sdGs(5MdC)sdTsdGsdTsdTsdAsdGsGbsAbsCb | 879 |
| X164922 | GbsTbsAbsdAsdGsdAsdGsdGsdTsdGs(5MdC)s(5MdC)sdGsdTsCbsAbsAb | 880 |
| X164923 | GbsTbsGbsdTsdAsdAsdGsdAsdGsdGsdTsdGs(5MdC)s(5MdC)sGbsTbsCb | 881 |
| X164925 | GbsAbsCbsdGsdAsdTsdAsdTs(5MdC)s(5MdC)sdAsdTsdGsdGsAbsCbsTb | 882 |
| X164927 | GbsTbsGbsdAsdGsdGsdAs(5MdC)sdGsdAsdTsdAsdTs(5MdC)sCbsAbsTb | 883 |
| X164928 | GbsCbsTbs(5MdC)sdAs(5MdC)s(5MdC)sdGsdGsdAsdAsdTsdTsdTsGbsGbsTb | 884 |
| X164929 | CbsGbsCbsdTsdGs(5MdC)sdTs(5MdC)sdAs(5MdC)s(5MdC)sdGsdGsdAsAbsTbsTb | 885 |
| X164930 | CbsCbsGbs(5MdC)sdTsdGs(5MdC)sdTs(5MdC)sdAs(5MdC)s(5MdC)sdGsdGsAbsAbsTb | 886 |
| X164931 | CbsAbsCbsdGs(5MdC)s(5MdC)sdGsdTsdTs(5MdC)sdTsdTsdGs(5MdC)sTbsGbsAb | 887 |
| X164932 | GbsCbsAbs(5MdC)sdGs(5MdC)s(5MdC)sdGsdTsdTs(5MdC)sdTsdTsdGsCbsTbsGb | 888 |
| X164933 | GbsTbsTbsdGs(5MdC)sdAs(5MdC)s(5MdC)sdTs(5MdC)sdGs(5MdC)s(5MdC)sdAsGbsTbsCb | 889 |
| X164934 | TbsTbsAbs(5MdC)s(5MdC)sdGs(5MdC)sdAs(5MdC)sdAs(5MdC)s(5MdC)sdGsdTsCbsTbsCb | 890 |
| X164935 | CbsTbsTbsdAs(5MdC)s(5MdC)sdGs(5MdC)sdAs(5MdC)sdAs(5MdC)s(5MdC)sdGsTbsCbsTb | 891 |
| X164936 | TbsCbsTbsdTsdAs(5MdC)s(5MdC)sdGs(5MdC)sdAs(5MdC)sdAs(5MdC)s(5MdC)sGbsTbsCb | 892 |
| X164937 | GbsTbsCbsdTsdTsdAs(5MdC)s(5MdC)sdGs(5MdC)sdAs(5MdC)sdAs(5MdC)sCbsGbsTb | 893 |
| X164938 | CbsCbsAbsdAsdTsdGsdGsdAs(5MdC)sdGsdTsdGsdGsdAsGbsAbsGb | 894 |
| X165856 | CbsAbsAbs(5MdC)sdAs(5MdC)s(5MdC)sdAsdGs(5MdC)sdGsdTs(5MdC)s(5MdC)sGbsGbsCb | 895 |
| X165857 | AbsGbsGbsdGs(5MdC)sdGsdTs(5MdC)s(5MdC)s(5MdC)sdAsdGsdTsdGsAbsCbsAb | 896 |

### Example 2. In Vitro Gene Silencing Screening of RNAi Agents

### Cell Culture and Transfections

[0730] Pulmonary A549 cells (adenocarcinoma human alveolar basal epithelial cells) were grown at 37° C. in Dulbecco's modified Eagle's medium supplemented with 10% FBS, 100 units ml⁻¹ penicillin, and 100 ug ml⁻¹ streptomycin (ThermoFisher Scientific). Cells were regularly passaged to maintain exponential growth. Briefly, cells were transfected by adding 25 μL of Opti-MEM plus 0.5 μL of Lipofectamine 2000 (Thermo Scientific, 2599226) to 25 ul of Opti-MEM with siRNA or ASO to an individual well in a 96-well plate. Then, 100 μL of culture media containing ˜2.0×10⁵ A549 cells were added to the siRNA/ASO-Lipofectamine mixture. Cells were incubated for 24 hours prior to measuring hsMUC5B mRNA levels. hsMUC5B RNAi agents and ASOs were tested at 20 nM and 0.20 nM doses. GAPDH mRNA levels measured by a GAPDH bDNA assay were used as Normalization Control. Negative controls were cells treated with FVII RNAi agent, Luciferase (Luc), AHSA1 RNAi agent/ASO, and left untreated (mock). Positive controls cells were treated with AHSA1 RNAi agent/ASO, then measuring AHSA1 mRNA levels using a bDNA assay. All transfections were done with n=4.

mRNA Quantification

[0731] hsMUC5B, GAPDH, and AHSA mRNA levels were measured using QuantiGene Singleplex Assays (Thermo Scientific, Cat QS0013). Briefly, the cells were lysed using the lysis mixture in a 2:1 ratio (2 parts medium and cells:1 part lysis mixture). A lysate volume equivalent to 1,000 cells was transferred to a separate capture plate well for each gene tested. A diluted lysis mixture (2 parts distilled water and part lysis mixture) was added to bring the capture well volumes to 90 μL/well. Then 10 μL of the appropriate hsMUC5B, GAPDH, AHSA working probe set was added, and the plate was sealed and incubated at 53° C. overnight (18 hours). Following the overnight probe hybridization, the capture wells were washed and sequentially hybridized with bDNA amplifiers and label probes at 46° C. for 1 hour. After a final wash, dioxitane, a luminescent alkaline phosphatase substrate, was added, and the cells were incubated at 46° C. for 30 minutes. The luminescence signal was detected using an LMax™ Luminometer (Molecular Devices). MUC5B or ASHSA mRNA levels were normalized against GAPDH mRNA levels of the same treated cell sample using the following formula: MUC5B or ASHA mRNA level/GAPDH mRNA level. Then, the percent hsMUC5B mRNA expression rate was determined as follows: (Normalized MUC5B mRNA level in MUC5B RNAi agent/ASO treated cells/Average of normalized MUC5B mRNA level of control-treated cells)*100. Controls were cells treated with FVII, ASHA, and LUC RNAi agents/ASOs and left untreated (mock). Percent hsMUC5B mRNA expression rates after exposure to the siRNAs and ASOs are shown in Tables 6 and 7, respectively.

TABLE 6
Performance of MUC5B siRNAs in A549 cells

| | Normalized hsMUC5B/hsGAPDH (%) | | | |
|---|---|---|---|---|
| | Mean | SD | Mean | SD |
| siRNA ID | (20 nM) | (20 nM) | (0.2 nM) | (0.2 nM) |
| 12616_DV22_21/23mer | 82.2 | 7.1 | 90.4 | 0.6 |
| 12621_DV22_21/23mer | 34.1 | 3.7 | 68.1 | 9.0 |
| 12706_DV22_21/23mer | 78.5 | 6.6 | 81.2 | 5.0 |
| 12706_EEL_19/21mer | 23.7 | 2.5 | 28.8 | 1.5 |
| 12706_EEL_21/23mer | 24.7 | 2.0 | 28.2 | 4.4 |
| 12717_DV22_21/23mer | 67.5 | 4.1 | 77.4 | 2.6 |
| 13206_DV22_21/23mer | 37.5 | 4.6 | 72.1 | 4.7 |
| 1399_DV22_21/23mer | 33.5 | 5.9 | 78.8 | 9.7 |
| 1399_EEL_19/21mer | 19.9 | 2.8 | 35.4 | 7.1 |
| 1399_EEL_21/23mer | 22.5 | 2.5 | 41.1 | 5.3 |
| 1401_DV22_21/23mer | 37.9 | 6.1 | 60.1 | 1.0 |
| 1401_EEL_19/21mer | 35.9 | 3.0 | 47.4 | 6.9 |
| 1401_EEL_21/23mer | 35.2 | 1.9 | 47.5 | 6.9 |
| 15132_DV22_21/23mer | 59.9 | 5.4 | 73.4 | 4.8 |
| 15140_DV22_21/23mer | 46.6 | 3.3 | 68.4 | 4.5 |
| 15140_EEL_19/21mer | 27.4 | 2.8 | 44.0 | 2.6 |
| 15140_EEL_21/23mer | 38.7 | 4.3 | 55.9 | 3.7 |
| 15197_DV22_21/23mer | 55.4 | 7.7 | 75.4 | 6.6 |
| 15197_EEL_19/21mer | 27.5 | 3.1 | 42.2 | 2.1 |
| 15197_EEL_21/23mer | 23.9 | 4.7 | 44.0 | 7.7 |
| 15252_DV22_21/23mer | 38.3 | 5.2 | 60.2 | 6.2 |
| 15252_EEL_19/21mer | 34.3 | 3.0 | 60.3 | 5.0 |
| 15252_EEL_21/23mer | 31.6 | 2.0 | 51.1 | 7.5 |
| 15254_DV22_21/23mer | 37.1 | 2.5 | 63.4 | 6.4 |
| 15258_DV22_21/23mer | 69.1 | 9.4 | 77.0 | 3.5 |
| 15258_EEL_19/21mer | 25.6 | 2.3 | 40.4 | 8.3 |
| 15258_EEL_21/23mer | 31.6 | 3.9 | 42.5 | 6.1 |
| 15261_DV22_21/23mer | 47.3 | 8.5 | 62.5 | 4.8 |
| 15261_EEL_19/21mer | 26.6 | 1.4 | 37.1 | 4.9 |
| 15261_EEL_21/23mer | 26.9 | 1.6 | 35.9 | 3.3 |
| 15262_DV22_21/23mer | 41.1 | 1.4 | 64.4 | 7.0 |
| 15301_DV22_21/23mer | 203.8 | 6.3 | 90.6 | 8.3 |
| 15304_DV22_21/23mer | 121.5 | 2.7 | 68.9 | 4.0 |
| 15305_DV22_21/23mer | 77.6 | 6.5 | 77.4 | 6.9 |
| 15305_EEL_19/21mer | 55.0 | 1.2 | 56.1 | 4.2 |
| 15305_EEL_21/23mer | 33.6 | 2.3 | 46.6 | 2.8 |
| 15310_DV22_21/23mer | 63.2 | 6.1 | 75.5 | 4.7 |
| 15311_DV22_21/23mer | 40.8 | 5.9 | 41.7 | 1.2 |
| 15312_DV22_21/23mer | 61.9 | 6.8 | 75.0 | 4.6 |
| 15312_EEL_19/21mer | 44.0 | 1.4 | 41.5 | 1.9 |
| 15312_EEL_21/23mer | 19.6 | 1.1 | 27.9 | 4.6 |
| 15314_DV22_21/23mer | 32.4 | 4.6 | 55.4 | 2.2 |
| 15314_EEL_19/21mer | 20.2 | 1.0 | 32.3 | 2.1 |
| 15314_EEL_21/23mer | 60.6 | 7.7 | 46.2 | 4.2 |
| 15315_DV22_21/23mer | 44.2 | 5.3 | 79.7 | 1.9 |
| 15473_DV22_21/23mer | 35.1 | 3.5 | 58.0 | 3.1 |
| 15473_EEL_19/21mer | 37.8 | 7.3 | 48.4 | 8.9 |
| 15473_EEL_21/23mer | 31.4 | 1.4 | 38.7 | 1.8 |
| 15476_DV22_21/23mer | 34.6 | 3.9 | 63.9 | 6.1 |
| 15478_DV22_21/23mer | 52.3 | 4.1 | 51.2 | 4.8 |
| 15478_EEL_19/21mer | 32.0 | 6.4 | 35.7 | 5.5 |
| 15478_EEL_21/23mer | 29.1 | 4.4 | 24.7 | 2.2 |
| 15479_DV22_21/23mer | 32.8 | 2.5 | 59.2 | 4.4 |
| 15539_DV22_21/23mer | 30.2 | 3.4 | 62.1 | 5.2 |
| 15539_EEL_19/21mer | 25.4 | 3.4 | 43.5 | 9.8 |
| 15539_EEL_21/23mer | 40.8 | 1.6 | 35.6 | 4.7 |
| 15543_DV22_21/23mer | 57.6 | 3.1 | 88.2 | 6.5 |
| 15543_EEL_19/21mer | 42.5 | 6.4 | 54.5 | 5.7 |
| 15543_EEL_21/23mer | 36.4 | 1.7 | 43.4 | 3.5 |
| 15546_DV22_21/23mer | 55.3 | 7.3 | 82.2 | 8.7 |
| 15547_DV22_21/23mer | 47.6 | 3.2 | 85.4 | 3.5 |
| 15547_EEL_19/21mer | 29.5 | 4.6 | 51.2 | 10.2 |
| 15547_EEL_21/23mer | 28.8 | 1.8 | 46.1 | 2.2 |
| 15563_DV22_21/23mer | 45.4 | 0.6 | 83.6 | 6.0 |
| 15563_EEL_19/21mer | 35.0 | 5.4 | 42.1 | 5.0 |
| 15563_EEL_21/23mer | 33.7 | 1.3 | 42.9 | 0.8 |
| 15564_DV22_21/23mer | 43.7 | 4.9 | 85.0 | 8.7 |
| 15564_EEL_19/21mer | 31.1 | 4.9 | 49.4 | 4.3 |
| 15564_EEL_21/23mer | 29.0 | 2.4 | 39.4 | 4.1 |
| 15568_DV22_21/23mer | 63.7 | 1.6 | 88.2 | 9.8 |
| 15572_DV22_21/23mer | 38.2 | 1.1 | 70.0 | 3.2 |
| 15576_DV22_21/23mer | 65.9 | 3.6 | 76.8 | 2.6 |
| 15576_EEL_19/21mer | 55.1 | 7.5 | 73.9 | 8.0 |
| 15576_EEL_21/23mer | 60.9 | 9.8 | 65.5 | 3.9 |
| 1564_DV22_21/23mer | 58.7 | 8.0 | 85.6 | 9.3 |
| 15692_DV22_21/23mer | 42.0 | 5.8 | 57.1 | 1.4 |
| 15731_DV22_21/23mer | 58.9 | 9.4 | 69.2 | 4.0 |
| 1617_DV22_21/23mer | 37.6 | 3.7 | 70.7 | 6.4 |
| 1617_EEL_19/21mer | 32.7 | 2.7 | 35.4 | 1.4 |
| 1617_EEL_21/23mer | 31.8 | 3.4 | 37.8 | 4.8 |
| 1618_DV22_21/23mer | 41.3 | 2.4 | 68.0 | 5.6 |
| 1619_DV22_21/23mer | 54.1 | 6.1 | 82.9 | 5.1 |
| 1619_EEL_19/21mer | 53.4 | 5.4 | 55.2 | 9.5 |
| 1619_EEL_21/23mer | 44.7 | 4.3 | 59.1 | 9.4 |
| 16985_DV22_21/23mer | 64.3 | 5.2 | 69.3 | 3.0 |
| 17255_DV22_21/23mer | 39.1 | 4.8 | 73.1 | 3.5 |
| 1756_DV22_21/23mer | 49.3 | 2.8 | 73.8 | 8.1 |
| 1808_DV22_21/23mer | 68.5 | 3.2 | 77.8 | 6.3 |
| 1808_EEL_19/21mer | 70.9 | 7.3 | 84.8 | 8.9 |
| 1808_EEL_21/23mer | 46.4 | 4.8 | 75.9 | 10.5 |
| 1896_DV22_21/23mer | 47.1 | 4.3 | 84.1 | 8.4 |
| 1897_DV22_21/23mer | 60.0 | 4.4 | 86.2 | 5.8 |
| 2112_DV22_21/23mer | 51.8 | 5.4 | 80.9 | 6.2 |
| 2112_EEL_19/21mer | 36.2 | 2.1 | 50.9 | 1.9 |
| 2112_EEL_21/23mer | 40.3 | 2.5 | 55.8 | 8.7 |
| 2113_DV22_21/23mer | 48.1 | 3.1 | 84.1 | 2.9 |
| 2113_EEL_19/21mer | 35.7 | 0.4 | 52.7 | 3.4 |
| 2113_EEL_21/23mer | 44.6 | 3.5 | 60.2 | 1.2 |
| 214_DV22_21/23mer | 35.0 | 4.5 | 71.3 | 10.0 |
| 215_DV22_21/23mer | 36.2 | 4.9 | 70.6 | 10.5 |
| 219_DV22_21/23mer | 33.1 | 3.4 | 57.9 | 9.2 |
| 2198_DV22_21/23mer | 89.8 | 3.5 | 99.0 | 8.3 |
| 2199_DV22_21/23mer | 60.4 | 3.4 | 84.3 | 3.6 |
| 2273_DV22_21/23mer | 75.5 | 4.8 | 93.1 | 1.2 |
| 2273_EEL_19/21mer | 76.2 | 3.6 | 77.5 | 2.4 |
| 2273_EEL_21/23mer | 86.1 | 1.1 | 83.0 | 2.6 |
| 2275_DV22_21/23mer | 79.0 | 6.6 | 73.1 | 3.0 |
| 2275_EEL_19/21mer | 79.8 | 3.4 | 77.4 | 3.4 |
| 2275_EEL_21/23mer | 84.0 | 7.2 | 88.8 | 7.1 |
| 2326_DV22_21/23mer | 76.4 | 6.7 | 74.9 | 5.7 |
| 2326_EEL_19/21mer | 70.0 | 4.4 | 63.5 | 3.5 |
| 2326_EEL_21/23mer | 82.6 | 2.1 | 74.2 | 5.9 |
| 2525_DV22_21/23mer | 44.8 | 6.9 | 72.7 | 4.1 |
| 2525_EEL_19/21mer | 25.7 | 2.7 | 43.4 | 3.1 |
| 2525_EEL_21/23mer | 23.8 | 2.9 | 53.4 | 5.6 |
| 2752_DV22_21/23mer | 76.9 | 8.9 | 73.6 | 5.3 |
| 2854_DV22_21/23mer | 55.2 | 4.9 | 76.5 | 18.1 |
| 2874_DV22_21/23mer | 82.1 | 6.3 | 78.4 | 12.4 |
| 3058_DV22_21/23mer | 56.1 | 4.7 | 80.1 | 7.1 |
| 3086_DV22_21/23mer | 51.0 | 2.8 | 84.4 | 9.6 |
| 3086_EEL_19/21mer | 22.6 | 2.0 | 52.3 | 0.9 |
| 3086_EEL_21/23mer | 27.0 | 1.9 | 58.1 | 1.5 |
| 3088_DV22_21/23mer | 67.2 | 8.9 | 84.4 | 10.1 |
| 3088_EEL_19/21mer | 25.4 | 1.5 | 49.5 | 9.5 |
| 3088_EEL_21/23mer | 32.2 | 3.5 | 52.3 | 4.1 |
| 3090_DV22_21/23mer | 77.2 | 4.4 | 82.8 | 3.4 |
| 3090_EEL_19/21mer | 77.7 | 2.8 | 66.3 | 2.4 |
| 3090_EEL_21/23mer | 46.3 | 5.4 | 63.6 | 4.7 |
| 3356_DV22_21/23mer | 55.9 | 7.1 | 61.3 | 5.2 |
| 3356_EEL_19/21mer | 59.6 | 3.0 | 53.7 | 5.0 |
| 3356_EEL_21/23mer | 51.8 | 7.1 | 45.9 | 4.1 |
| 3360_DV22_21/23mer | 61.9 | 4.9 | 84.7 | 6.2 |
| 3360_EEL_19/21mer | 31.6 | 3.1 | 52.8 | 6.7 |
| 3360_EEL_21/23mer | 36.8 | 6.0 | 40.3 | 3.3 |
| 3594_DV22_21/23mer | 78.1 | 7.7 | 80.5 | 4.5 |
| 3594_EEL_19/21mer | 82.2 | 7.4 | 85.0 | 6.5 |
| 3594_EEL_21/23mer | 83.4 | 7.9 | 77.3 | 4.2 |
| 3691_DV22_21/23mer | 48.7 | 2.8 | 77.5 | 5.5 |
| 3770_DV22_21/23mer | 40.4 | 3.4 | 60.7 | 4.2 |
| 3770_EEL_19/21mer | 40.1 | 3.2 | 52.7 | 2.2 |
| 3770_EEL_21/23mer | 38.1 | 4.1 | 53.0 | 7.2 |
| 3771_DV22_21/23mer | 50.7 | 4.0 | 79.9 | 4.9 |
| 3771_EEL_19/21mer | 35.0 | 6.7 | 54.8 | 9.6 |
| 3771_EEL_21/23mer | 47.2 | 2.9 | 41.3 | 3.3 |
| 3842_DV22_21/23mer | 41.0 | 4.6 | 56.8 | 2.7 |
| 3871_DV22_21/23mer | 45.6 | 3.4 | 74.8 | 5.1 |
| 3871_EEL_19/21mer | 28.1 | 2.7 | 48.9 | 12.0 |
| 3871_EEL_21/23mer | 33.7 | 2.3 | 42.1 | 5.4 |
| 4057_DV22_21/23mer | 91.9 | 4.8 | 78.0 | 1.2 |
| 4057_EEL_19/21mer | 66.3 | 7.6 | 77.9 | 8.2 |
| 4057_EEL_21/23mer | 77.8 | 9.0 | 70.9 | 4.6 |
| 4339_DV22_21/23mer | 73.8 | 2.8 | 81.3 | 5.9 |
| 4339_EEL_19/21mer | 77.4 | 2.7 | 87.8 | 11.7 |
| 4339_EEL_21/23mer | 84.1 | 8.2 | 81.9 | 3.5 |
| 4601_DV22_21/23mer | 44.5 | 2.8 | 73.8 | 2.0 |
| 4604_DV22_21/23mer | 54.2 | 6.3 | 93.3 | 8.5 |
| 4618_DV22_21/23mer | 85.5 | 4.5 | 27.0 | 2.2 |
| 4618_EEL_19/21mer | 51.3 | 6.6 | 69.7 | 5.6 |
| 4618_EEL_21/23mer | 61.9 | 6.5 | 70.7 | 6.2 |
| 4620_DV22_21/23mer | 56.3 | 3.5 | 94.7 | 8.8 |
| 4620_EEL_19/21mer | 46.5 | 4.4 | 61.1 | 10.7 |
| 4620_EEL_21/23mer | 70.8 | 5.8 | 65.3 | 9.8 |
| 4633_DV22_21/23mer | 40.7 | 7.1 | 69.0 | 10.1 |
| 4633_EEL_19/21mer | 38.4 | 3.1 | 40.3 | 5.0 |
| 4633_EEL_21/23mer | 32.1 | 3.6 | 39.3 | 5.6 |
| 4634_DV22_21/23mer | 34.5 | 4.5 | 49.2 | 6.6 |
| 4634_EEL_19/21mer | 40.5 | 6.1 | 39.2 | 6.6 |
| 4634_EEL_21/23mer | 32.4 | 4.5 | 34.5 | 3.2 |
| 4635_DV22_21/23mer | 37.0 | 4.2 | 71.4 | 10.2 |
| 4641_DV22_21/23mer | 83.6 | 9.8 | 86.7 | 7.6 |
| 4818_DV22_21/23mer | 54.3 | 2.0 | 74.0 | 6.0 |
| 4826_DV22_21/23mer | 80.2 | 8.7 | 89.4 | 16.9 |
| 525_DV22_21/23mer | 68.1 | 8.6 | 81.4 | 5.5 |
| 5277_DV22_21/23mer | 94.2 | 9.4 | 83.8 | 10.8 |
| 5277_EEL_19/21mer | 65.1 | 2.6 | 75.7 | 6.9 |
| 5277_EEL_21/23mer | 66.8 | 3.0 | 74.0 | 5.1 |
| 5425_DV22_21/23mer | 48.4 | 6.8 | 87.1 | 8.3 |
| 7169_DV22_21/23mer | 38.7 | 3.4 | 68.3 | 5.1 |
| 734_DV22_21/23mer | 76.9 | 5.6 | 78.5 | 7.7 |
| 734_EEL_19/21mer | 56.9 | 5.4 | 71.5 | 3.4 |
| 734_EEL_21/23mer | 74.0 | 4.8 | 83.8 | 7.0 |
| 737_DV22_21/23mer | 54.0 | 6.8 | 80.6 | 4.1 |
| 737_EEL_19/21mer | 41.3 | 5.7 | 69.3 | 7.6 |
| 737_EEL_21/23mer | 46.5 | 2.4 | 69.7 | 5.5 |
| 960_DV22_21/23mer | 47.9 | 5.3 | 80.9 | 4.6 |
| 960_EEL_19/21mer | 41.0 | 1.4 | 55.2 | 10.1 |
| 960_EEL_21/23mer | 31.4 | 1.4 | 52.1 | 3.7 |
| 962_DV22_21/23mer | 36.0 | 4.3 | 69.0 | 7.4 |
| 966_DV22_21/23mer | 52.5 | 4.6 | 83.3 | 7.5 |
| 972_DV22_21/23mer | 69.5 | 5.3 | 82.3 | 2.8 |
| 972_EEL_19/21mer | 21.9 | 7.3 | 51.1 | 8.6 |
| 972_EEL_21/23mer | 26.4 | 1.8 | 57.3 | 3.6 |

TABLE 7
Performance of MUC5B ASOs in A549 cells

Norm. hsMUC5B/hsGAPDH (%)

| | Mean | SD | Mean | SD |
|---|---|---|---|---|
| ASO ID | (20 nM) | (20 nM) | (0.2 nM) | (0.2 nM) |
| X164902 | 16.8 | 2.6 | 73.8 | 9.8 |
| X164897 | 19.6 | 2.2 | 57.6 | 6.7 |
| X164894 | 20.2 | 3.9 | 67.4 | 5.3 |
| X164898 | 20.2 | 1.9 | 76.6 | 10.1 |
| X164916 | 21.0 | 2.3 | 54.8 | 7.0 |
| X164931 | 21.2 | 2.2 | 83.7 | 1.7 |
| X164915 | 21.6 | 4.6 | 54.5 | 4.4 |
| X165857 | 22.0 | 2.7 | 80.7 | 5.0 |
| X164911 | 22.7 | 1.4 | 65.8 | 2.7 |
| X164926 | 22.9 | 2.6 | 61.7 | 3.9 |
| X164899 | 22.9 | 1.6 | 81.3 | 5.8 |
| X164906 | 24.1 | 2.5 | 59.4 | 4.8 |
| X164924 | 24.6 | 3.8 | 68.3 | 1.7 |
| X164933 | 24.7 | 2.8 | 89.7 | 3.3 |
| X164886 | 24.9 | 4.8 | 84.2 | 5.6 |
| X164918 | 25.1 | 2.6 | 77.1 | 6.7 |
| X164884 | 25.3 | 2.4 | 72.2 | 4.7 |
| X164932 | 25.3 | 3.1 | 89.7 | 4.3 |
| X164896 | 25.6 | 2.3 | 74.0 | 5.3 |
| X164909 | 26.5 | 2.6 | 66.8 | 3.6 |
| X164887 | 26.9 | 2.3 | 78.9 | 2.8 |
| X164919 | 27.1 | 2.5 | 85.3 | 12.8 |
| X164925 | 27.1 | 6.0 | 69.5 | 1.4 |
| X164922 | 27.7 | 9.5 | 84.5 | 6.0 |
| X164912 | 27.7 | 1.7 | 84.1 | 3.4 |
| X164927 | 27.8 | 4.9 | 67.2 | 3.2 |
| X164917 | 27.9 | 2.2 | 84.9 | 8.3 |
| X164930 | 28.3 | 2.1 | 85.3 | 3.2 |
| X164914 | 28.4 | 5.1 | 68.4 | 5.5 |
| X164848 | 28.5 | 5.9 | 90.1 | 8.4 |
| X164910 | 28.9 | 3.5 | 82.9 | 5.0 |
| X164865 | 29.2 | 1.9 | 68.1 | 4.3 |
| X164877 | 29.2 | 5.5 | 64.9 | 6.3 |
| X164923 | 29.2 | 9.0 | 79.7 | 3.0 |
| X164908 | 29.4 | 3.8 | 85.2 | 4.8 |
| X164913 | 29.6 | 3.2 | 92.6 | 6.6 |
| X164885 | 30.2 | 5.4 | 81.4 | 4.0 |
| X164864 | 30.3 | 2.0 | 68.7 | 1.4 |
| X164857 | 30.3 | 5.0 | 77.2 | 1.9 |
| X164929 | 31.2 | 4.0 | 82.1 | 7.5 |
| X164895 | 31.8 | 3.8 | 75.6 | 8.0 |
| X164928 | 32.2 | 1.1 | 77.7 | 1.4 |
| X164904 | 32.8 | 8.1 | 82.0 | 6.7 |
| X164901 | 32.9 | 3.6 | 89.0 | 5.4 |
| X164905 | 33.3 | 2.6 | 85.2 | 9.2 |
| X164874 | 34.1 | 4.6 | 81.5 | 4.0 |
| X164849 | 34.9 | 8.1 | 95.7 | 7.6 |
| X164883 | 34.9 | 2.5 | 85.6 | 2.3 |
| X164854 | 35.3 | 2.5 | 90.1 | 4.3 |
| X164900 | 36.0 | 3.9 | 86.2 | 9.1 |
| X164880 | 36.1 | 2.7 | 78.9 | 5.4 |
| X164873 | 36.6 | 7.6 | 88.7 | 1.2 |
| X164851 | 36.7 | 5.3 | 93.5 | 7.0 |
| X164859 | 36.7 | 4.6 | 93.3 | 6.8 |
| X164863 | 36.8 | 3.6 | 88.1 | 2.9 |
| X165856 | 37.4 | 5.1 | 97.5 | 8.0 |
| X164870 | 37.5 | 5.3 | 83.0 | 2.9 |
| X164879 | 37.7 | 3.2 | 76.9 | 4.3 |
| X164876 | 37.9 | 3.5 | 69.8 | 4.2 |
| X164882 | 38.0 | 7.0 | 86.1 | 4.4 |
| X164867 | 38.0 | 2.8 | 67.6 | 5.8 |
| X164858 | 38.2 | 6.5 | 81.2 | 9.1 |
| X164892 | 38.3 | 6.3 | 86.5 | 5.7 |
| X164856 | 39.2 | 5.9 | 90.0 | 8.7 |
| X164888 | 39.3 | 3.8 | 86.6 | 6.6 |
| X164852 | 39.6 | 9.8 | 91.6 | 6.6 |
| X164855 | 40.5 | 4.8 | 89.8 | 3.9 |
| X164871 | 40.5 | 4.7 | 85.0 | 5.4 |
| X164872 | 41.0 | 7.6 | 88.3 | 0.5 |
| X164881 | 41.1 | 4.3 | 84.3 | 1.5 |
| X164878 | 41.8 | 5.4 | 76.3 | 4.5 |
| X164920 | 41.9 | 2.9 | 95.7 | 13.4 |
| X164934 | 42.3 | 1.9 | 93.3 | 6.6 |
| X164889 | 42.3 | 4.6 | 87.4 | 4.6 |
| X164869 | 43.3 | 3.2 | 79.8 | 5.7 |
| X164853 | 43.3 | 6.5 | 96.7 | 6.5 |
| X164850 | 43.6 | 9.3 | 96.3 | 6.4 |
| X164868 | 45.2 | 3.9 | 77.5 | 6.0 |
| X164935 | 46.1 | 5.6 | 97.0 | 10.7 |
| X164907 | 46.2 | 1.6 | 82.9 | 5.6 |
| X164846 | 46.3 | 6.1 | 104.4 | 9.9 |
| X164891 | 46.4 | 3.8 | 91.4 | 6.0 |
| X164847 | 46.4 | 9.5 | 98.1 | 9.5 |
| X164861 | 46.5 | 5.7 | 93.6 | 6.6 |
| X164937 | 47.3 | 2.0 | 90.9 | 10.6 |
| X164938 | 49.9 | 2.6 | 83.6 | 4.2 |
| X164862 | 50.2 | 4.0 | 104.7 | 7.0 |
| X164921 | 50.2 | 4.2 | 94.3 | 3.7 |
| X164866 | 50.2 | 3.9 | 80.0 | 6.4 |
| X164845 | 51.6 | 5.9 | 103.0 | 5.5 |
| X164936 | 53.1 | 5.3 | 94.6 | 7.3 |
| X164875 | 55.0 | 2.8 | 83.0 | 1.3 |
| X164893 | 57.2 | 5.9 | 95.0 | 2.7 |
| X164890 | 61.4 | 3.1 | 94.5 | 6.4 |
| X164903 | 66.6 | 5.7 | 100.1 | 4.6 |
| X164860 | 69.3 | 10.2 | 95.6 | 2.2 |

### Example 3: Dose Response of siRNA Transfection in A549 Cells to Measure Efficacy and Potency

[0732] Selected siRNAs with chemical modifications (from Table 3) were tested in a dose response following 24 h of siRNA transfection in A549 cells.

Cell Culture and Transfection for qPCR Measurement of Endogenous Silencing of MUC5B

[0733] Diluted siRNA was prepared in a range from 1.21E-07 nM to 520.81 nM nM through 16-fold serial dilutions, and 5 μL of each dilution was transferred to a 384-well plate (Greiner, 781091) using a Biomek Fx liquid handling system (Beckman Coulter). Lipofectamine 2000 (Thermo Fisher Scientific, 11668500) was diluted by adding 0.4 μL to 20 μL of Opti-MEM™ I Reduced-Serum Medium (Thermo Fisher Scientific, 11058021) and mixed gently, followed by a 20-minute incubation at room temperature. Subsequently, 5 μL of the diluted Lipofectamine 2000 was dispensed into each well using a WellJet dispenser (Integra Biosciences), followed by shaking for 5 seconds. The mixture was incubated for 20 minutes at room temperature to allow siRNA-Lipofectamine 2000 complex formation. A549 cells were cultured in Dulbecco's Modified Eagle Medium F12 (DMEM/F12) supplemented with GlutaMax (Thermo Fisher Scientific, 10565042) and 2.5% fetal bovine serum (Sigma; F4135), and 5000 cells in 20 μL per well were added to the lipoplex and gently shaken for 5 seconds by using the WellJet dispenser. After 24 hours post-transfection, the medium was replaced with fresh cell culture medium containing 1× penicillin-streptomycin (Thermo Fisher Scientific, 15140122) every two days until day 5 post-transfection.

qPCR and Data Collection

[0734] MUC5B mRNA levels were quantified using real-time quantitative PCR (RT-qPCR) according to standard protocols. Briefly, 5 μL of cDNA was mixed with TaqMan Fast Advanced Master Mix (Thermo Fisher Scientific, 4444558) and 0.5 μM of pre-designed human MUC5B specific primers and fluorescein probes (Integrated DNA Technologies, Hs.PT.58.18743480). Human Glyceraldehyde 3-phosphate dehydrogenase (GAPDH) as internal reference was included using probes labeled with Hexachlorofluorescein (Integrated DNA Technologies, Hs.PT.39a.22214836). The reactions were performed on a qPCR machine (CFX384, Bio-Rad) with the following thermal cycling conditions: initial denaturation at 90° C. for 2 minutes, followed by 39 cycles of 95° C. for 15 seconds and 60° C. for 45 seconds. Data were exported, and the relative quantity of mRNA was calculated using the 2^{-(ΔΔCT)} method. Normalized percent hsMUC5B mRNA expression rates at 24 hours after exposure to the modified siRNAs at a maximum dose of 520 nM are shown as the efficacy in Table 8. Potency is expressed in Table 8 as IC₅₀ (Inhibitory concentration 50) in Molar (M) concentration for the dose response.

TABLE 8
Efficacy and potency of selected modified siRNAs

| | | | | | | | Normalized | |
|---|---|---|---|---|---|---|---|---|
| | | | | | | | hsMUCSB/hsGAPDH | |
| | | | | | | | (%) | |
| | | Sense | SEQ | Anti- | Antisense | SEQ | Potency | Efficacy |
| SIRNA | Sense | sequence | ID | sense | sequence | ID | (IC 50, | (Max |
| duplex ID | ID | 5′->3′ | NO: | ID | 5′->3′ | NO: | M) | Dose) |
| 12706_EEL_21/ | X158354 | ugaaAuccGU | 361 | X158355 | dTAGCAGAAC | 538 | 7.1E−12 | 80.3 |
| 23mer | | GuguucugCu | | | ACACGGADUU | | | |
| | | sa | | | CAusa | | | |
| 214_DV22_21/ | X160350 | csgsugagCf | 357 | X160351 | usCfsgggUf | 534 | 1.2E−11 | 88.8 |
| 23mer | | uUfUfGfuuc | | | ggaacaaAfg | | | |
| | | cacccga | | | Cfucacgscs | | | |
| | | | | | g | | | |
| 12706_EEL_19/ | X158446 | asAuccGUGu | 358 | X158447 | dTAGCAGAAC | 535 | 1.46−11 | 80.4 |
| 21mer | | gUucugCusa | | | ACACGGAUUU | | | |
| | | | | | csa | | | |
| 15478_EEL_21/ | X158374 | caagUccaUG | 364 | X158375 | dTGGACGAUA | 541 | 1.7E−11 | 76.0 |
| 23mer | | GauaucguCc | | | UCCaUGGACU | | | |
| | | sa | | | UGusa | | | |
| 219_DV22_21/ | X160352 | gscsuuugUf | 359 | X160353 | usAfsgugAf | 536 | 2.2E−11 | 87.5 |
| 23mer | | uCfCfAfccc | | | cggguggAfa | | | |
| | | gucacua | | | Cfaaagcsus | | | |
| | | | | | c | | | |
| 15258_EEL_19/ | X158454 | caCusuGAGu | 360 | X158455 | dTGCACUCGC | 537 | 2.4E−11 | 76.9 |
| 21mer | | gCgaguGcsa | | | ACUCAUAGUG | | | |
| | | | | | gsa | | | |
| 1399_EEL_21/ | X158304 | cagcUacgUU | 355 | X158305 | dTUCUUGGAC | 532 | 4.1E−11 | 80.5 |
| 23mer | | CuguccaaGa | | | AGABCGUAGC | | | |
| | | sa | | | UGcsa | | | |
| 4634_DV22_21/ | X158214 | gsascguuGf | 186,500 | X158215 | usUfsuauCf | 186,501 | 1.6E−10 | 76.5 |
| 23mer | | aGfUfCfcua | | | guaggacUfc | | | |
| | | cgauaaa | | | Afacgucscs | | | |
| | | | | | c | | | |
| 15476_DV22_21/ | X158266 | usascaagUf | 363 | X158267 | usAfscgaUf | 540 | 2.0E−10 | 79.5 |
| 23mer | | cCfAfUfgga | | | auccaugGfa | | | |
| | | uaucgua | | | Cfuuguasgs | | | |
| | | | | | u | | | |
| 15539_DV22_21/ | X158272 | csusguuuGf | 356 | X158273 | usAfsccgGf | 533 | 3.1E−10 | 80.8 |
| 23mer | | aCfCfAfaau | | | aauuuggUfc | | | |
| | | uccggua | | | Afaacagsgs | | | |
| | | | | | a | | | |
| 15539_EEL_19/ | X158468 | guUugaCCAa | 406 | X158469 | dTACCGGAAU | 583 | 4.1E−11 | 73.4 |
| 21mer | | aUuccgGusa | | | UUGgUCAAAC | | | |
| | | | | | asg | | | |
| 2525_EEL_19/ | X158414 | cgUgggCUGu | 457 | X158415 | dTGUGCUGAA | 634 | 7.8E−11 | 76.5 |
| 21mer | | uUcagcAcsa | | | ACAgCCCACG | | | |
| | | | | | usc | | | |
| 15311_DV22_21/ | X158256 | ascscuuuGf | 362 | X158257 | usUfsaagAf | 539 | 8.9E−11 | 71.2 |
| 23mer | | aCfGfGfcac | | | ggugccgUfc | | | |
| | | cucuuaa | | | Afaaggusgs | | | |
| | | | | | g | | | |
| 2525_EEL_21/ | X158322 | gacgUgggCU | 458 | X158323 | dTGUGCUGAA | 635 | 9.9E−11 | 74.5 |
| 23mer | | GuuucagcAc | | | ACAgCCCACG | | | |
| | | sa | | | UCcsa | | | |
| 15197_EEL_21/ | X158358 | gucaCcugCG | 377 | X158359 | dTUGCUUGUU | 554 | 1.25−10 | 74.7 |
| 23mer | | UgaacaagCa | | | CACgCAGGUG | | | |
| | | sa | | | ACgsu | | | |
| 972_EEL_19/ | X158394 | ucAcgcCAGu | 530 | X158395 | dTGUGGGCGC | 707 | 1.3E−10 | 73.5 |
| 21mer | | gCgcccAcsa | | | ACUgGCGUGA | | | |
| | | | | | gsu | | | |
| 15473_DV22_21/ | X158264 | csascuacAf | 400 | X158265 | usAfsuauCf | 577 | 1.9E−10 | 68.1 |
| 23mer | | aGfUfCfcau | | | cauggacUfu | | | |
| | | ggauaua | | | Gfuagugsgs | | | |
| | | | | | a | | | |
| 3088_EEL_19/ | X158418 | ucAuccGACu | 467 | X158419 | dTCCUGGUGC | 644 | 3.7E−10 | 76.5 |
| 21mer | | gCaccaGgsa | | | AGUcGGAUGA | | | |
| | | | | | asc | | | |
| 15314_DV22_21/ | X158260 | ususugacGf | 396 | X158261 | usGfsuguAf | 573 | 4.05−10 | 76.9 |
| 23mer | | gCfAfCfcuc | | | agaggugCfc | | | |
| | | uuacaca | | | Gfucaaasgs | | | |
| | | | | | g | | | |
| 3086_EEL_19/ | X158416 | guUcauCCGa | 464 | X158417 | dTUGGUGCAG | 641 | 4.5E−10 | 69.1 |
| 21mer | | cUgcacCasa | | | UCGgAUGAAC | | | |
| | | | | | asc | | | |
| 15479_DV22_21/ | X158270 | asasguccAf | 405 | X158271 | usAfsggaCf | 582 | 8.3E−10 | 72.4 |
| 23mer | | uGfGfAfuau | | | gauauccAfu | | | |
| | | cguccua | | | Gfgacuusgs | | | |
| | | | | | u | | | |
| 962_DV22_21/ | X158136 | ususugugGf | 527 | X158137 | usUfsggcGf | 704 | 2.1E−09 | 75.2 |
| 23mer | | aAfUfAfcuc | | | ugaguauUfc | | | |
| | | acgccaa | | | Cfacaaasgs | | | |
| | | | | | g | | | |
| 1399_DV22_21/ | X158140 | csasgcuaCf | 370 | X158141 | usUfscuuGf | 547 | 4.3E−09 | 73.9 |
| 23mer | | gUfUfCfugu | | | gacagaaCfg | | | |
| | | ccaagaa | | | Ufagcugscs | | | |
| | | | | | a | | | |
| 12621_DV22_21/ | X158228 | gscscaggUf | 366 | X158229 | usGfscugCf | 543 | — | 38.4 |
| 23mer | | cGfUfGfgaa | | | auuccacGfa | | | |
| | | ugcagca | | | Cfcuggcscs | | | |
| | | | | | c | | | |

### Example 4. In Vitro on and Off-Target Screening of Chemically Modified siRNA

[0735] In this study, additional chemical modifications were made to 6 modified dsRNA (MUC5B siRNA) sequences from Example 3, Table 8, to enhance their on-target efficacy while significantly reducing off-target effects. The 6 modified siRNA selected for additional chemical modification were: 12706_EEL_19/21mer (SEQ ID NOs: 358 and 535), 12706_EEL_21/23mer (SEQ ID NOs: 361 and 538), 15476_DV22_21/23mer (SEQ ID NOs: 363 and 540), 15478_EEL_21/23mer (SEQ ID NOs: 364 and 541), 15539_DV22_21/23mer (SEQ ID NOs: 356 and 533); and 219_DV22_21/23mer (SEQ ID NOs: 359 and 536). These starting siRNA duplexes are labeled as “V0” in Table 9, and are herein referred to as starting V0 dsRNA. 108 novel chemically modified dsRNAs were designed and evaluated for their performance in lung epithelial cells A549 (Table 9). The modifications were designed to increase efficacy, potency, and stability, and decrease off-target effects compared to the starting V0 dsRNA. All dsRNA were modified according to the backbone of the unmodified parent dsRNA, described in Table 2 (e.g., EEL or DV22 backbone as indicated in Table 2). FIG. 2 shows a schematic of the modifications for dsRNAs with the EEL backbone. The exemplary dsRNA in FIG. 2 is an EEL21/23mer, however the modifications also apply to the EEL19/21mers. FIG. 3 shows a schematic of the modifications for dsRNAs with the DV22 backbone.

### On- and Off-Target Activity

[0736] One of the main off-target effects observed in clinically designed siRNAs is miRNA-like off-target activity. Luciferase-based reporter systems were used to assess both the on-target and off-target efficacy of the siRNAs (see, FIGS. 1A-1B). This method enabled effective measurement of the activity of the siRNAs. These effects were quantified using an off-target reporter system, which demonstrated a reduction in luciferase expression when siRNAs partially bind to the 3′ UTR region of the mRNA, mimicking the function of miRNAs. To separately confirm on-target effectiveness and confirm that the silencing is durable after 5 days, the reduction in endogenous MUC5B mRNA levels following 5 days of siRNA treatment was also measured using RT-QPCR. On-target and off-target rates are shown in Table 10.

### Construction of On-Target and Off-Target Luciferase Reporter

[0737] The on/off target reporter plasmids (FIGS. 1A and 1B) were generated by cloning target sequences into the psiCHECK2 vector (Promega, C8021) between the XhoI and NotI restriction sites. The on-target reporter plasmid contained five target sites. Each complementary site is separated by a 19-nucleotide spacer (5′-TAATATTACATAAATAAAA-3′) and merged in the 3′-UTR of Renilla luciferase, matching the guide strand sequence perfectly to measure the on-target activity. The off-target reporter plasmid incorporated four tandem seed-complementary sites separated by the same 19-nucleotide spacer within the 3′-UTR of Renilla luciferase, and was used to evaluate the seed-dependent miRNA-like off-target effects. Both reporter constructs co-expressed firefly luciferase as a transfection loading control. The specific sequences of the inserted target regions are as follows:

On-target:
5′-GAGCTTTGTTCCACCCGTCACTGTAATATTACATAAATAAAATA
TGAAATCCGTGTGTTCTGCTGTAATATTACATAAATAAAAACTACA
AGTCCATGGATATCGTCCTTAATATTACATAAATAAAATCCTGTT
TGACCAAATTCCGGTGTAATATTACATAAATAAAAGAAACAGTGT
TCTTGCTCTATAA-3′.
Off-target: XD-61279
(5′-CCGTCACTGTAATATTACATAAATAAAACCGTCACTGTAATAT
TACATAAATAAAACCGTCACTGTAATATTACATAAATAAAACCGTCA
CTG-3′),
XD-60380 and XD-60426
(5′-GTTCTGCTGTAATATTACATAAATAAAAGTTCTGCTGTAATAT
TACATAAATAAAAGTTCTGCTGTAATATTACATAAATAAAAGTTCTG
CTG-3′),
XD-60336
(5′-GATATCGTCTAATATTACATAAATAAAAGATATCGTCTAATAT
TACATAAATAAAAGATATCGTCTAATATTACATAAATAAAAGATATC
GTC-3′),
XD-60390
(5′-TTATCGTCCTTAATATTACATAAATAAAATATCGTCCTTAATA
TTACATAAATAAAATATCGTCCTTAATATTACATAAATAAAATATCG
TCCT-3′),
and
XD-60339
(5′-ATTCCGGTGTAATATTACATAAATAAAAATTCCGGTGTAATAT
TACATAAATAAAAATTCCGGTGTAATATTACATAAATAAAAATTCCG
GTG-3′).

[0738] For both on- and off-target assays the underlined italic sequences represent inserted target sequences.

### Cell Culture and Transfection for On- and Off-Target Reporter Assay

[0739] A549 cells were cultured at 37° C. in a 5% CO2 incubator, using Dulbecco's Modified Eagle Medium F12 (DMEM/F12) supplemented with GlutaMax (Thermo Fisher Scientific, 10565042) and 10% fetal bovine serum (Sigma; F4135). For co-transfection, 5000 cells (20 μL per well) were suspended in a 384-well white plate (Thermo Fisher Scientific, 164610) and transfected with 25 ng of on- or off-target luciferase reporter plasmid with siRNA ranging from 7.579E-09 nM to 32.55 nM through 16-fold serial dilutions. Briefly, 0.4 μL of Lipofectamine 2000 (Thermo Fisher Scientific, 11668500) was diluted in 20 μL of Opti-MEM™ I Reduced-Serum Medium (Thermo Fisher Scientific, 11058021), mixed gently, and incubated for 5 minutes at room temperature. After 5 minutes, 20 μL of diluted Lipofectamine 2000 was transferred to an equal volume of 100 ng reporter plasmid and diluted siRNA mixture then shaken for 5 seconds. The mixture was further incubated for 20 minutes at room temperature to allow siRNA-reporter and Lipofectamine 2000 complex (lipoplex) formation, then 10 μL of the lipoplex was transferred to A549 cells and gently shaken for 5 seconds.

### Sirna on and Off Target Activity Assay

[0740] Transfected cells were harvested 24 hours post-transfection for dual-Glo Luciferase assay (Promega, E2980). 20 μL of Dual-Glo® luciferase reagent was dispensed to each well by WellJet dispenser (Integra Biosciences) and gently mixed on the plate shaker at room temperature. After 10 minutes of incubation, the firefly luciferase activity was measured on an EnVision 2105 reader (PerkinElmer). The renilla luciferase activity was measured by adding 20 μL per well of Dual-Glo® Stop & Glo® reagent to the original culture plate and incubating for 10 minutes. On- and off-target siRNA efficacy was calculated as the normalized Renilla/Firefly luminescence ratio (%) relative to the no siRNA treatment control (100% indicates no change compared to no siRNA control). Table 10 shows the mean and standard deviation of the on- and off-target siRNA efficiency at day 1 for the maximum concentration tested of 33 nM for 3 independent experiments (columns under heading “Normalized Renilla/Firefly (%) at Day 1”). Table 10 also shows the on-target siRNA potency IC50 (Inhibitory concentration 50) at day 1 for each siRNA tested. Lower values for on-target score indicate greater efficacy, as indicated by increased MUC5B silencing activity. Higher values for off-target score indicate reduced off-target activity. For example, an off-target mean maximum score of 100% indicates very low off-target activity.

Cell Culture and Transfection for qPCR Measurement of Silencing of Endogenous MUC5B mRNA

[0741] To confirm on-target effectiveness for endogenous MUC5B mRNA silencing in A549 cells, diluted siRNA was prepared in a range from 1.21E-07 nM to 520.81 nM nM through 16-fold serial dilutions, and 5 μL of each dilution was transferred to a 384-well plate (Greiner, 781091) using a Biomek Fx liquid handling system (Beckman Coulter). Lipofectamine 2000 (Thermo Fisher Scientific, 11668500) was diluted by adding 0.4 μL to 20 μL of Opti-MEM™ I Reduced-Serum Medium (Thermo Fisher Scientific, 11058021) and mixed gently, followed by a 20-minute incubation at room temperature. Subsequently, 5 μL of the diluted Lipofectamine 2000 was dispensed into each well using a WellJet dispenser (Integra Biosciences), followed by shaking for 5 seconds. The mixture was incubated for 20 minutes at room temperature to allow siRNA-Lipofectamine 2000 complex formation. A549 cells were cultured in Dulbecco's Modified Eagle Medium F12 (DMEM/F12) supplemented with GlutaMax (Thermo Fisher Scientific, 10565042) and 2.5% fetal bovine serum (Sigma; F4135), and 5000 cells in 20 μL per well were added to the lipoplex and gently shaken for 5 seconds by using the WellJet dispenser. After 24 hours post-transfection, the medium was replaced with fresh cell culture medium containing 1× penicillin-streptomycin (Thermo Fisher Scientific, 15140122) every two days until day 5 post-transfection.

Cell Lysis and cDNA Synthesis

[0742] Cell lysis buffer and cDNA synthesis reagents were prepared using the TaqMan™ Fast Advanced Cells-to-CT™ Kit (Thermo Fisher Scientific, A35378). The remaining cell culture medium was gently removed. 20 μL of cell lysis buffer was added to each well by WellJet dispenser, followed by a 10-minute incubation at room temperature with shaking at 1000 rpm. Subsequently, 10 μL of stop reagent was added to each well and incubated at room temperature for 2 minutes. After inactivating, 5 μL of the lysate was transferred to 10 μL of cDNA reverse transcription (RT) reagent and incubated at 37° C. for 30 minutes for cDNA synthesis. The reaction was inactivated by heating at 95° C. for 5 minutes. Synthesized cDNA was stored at −20° C. until further use.

qPCR and Data Collection

[0743] MUC5B mRNA levels were quantified using real-time quantitative PCR (RT-qPCR) according to standard protocols. Briefly, 5 μL of cDNA was mixed with TaqMan Fast Advanced Master Mix (Thermo Fisher Scientific, 4444558) and 0.5 μM of pre-designed human MUC5B specific primers and fluorescein probes (Integrated DNA Technologies, Hs.PT.58.18743480). Human Glyceraldehyde 3-phosphate dehydrogenase (GAPDH) as internal reference was included using probes labeled with Hexachlorofluorescein (Integrated DNA Technologies, Hs.PT.39a.22214836). The reactions were performed on a qPCR machine (CFX384, Bio-Rad) with the following thermal cycling conditions: initial denaturation at 90° C. for 2 minutes, followed by 39 cycles of 95° C. for 15 seconds and 60° C. for 45 seconds. Data were exported, and the relative quantity of mRNA was calculated using the 2^{-(ΔΔCT)} method. Normalized percent hsMUC5B mRNA expression rates at day 5 after exposure to the modified siRNAs at a maximum dose of 520 nM are shown in Table 10 (columns under heading “Normalized hsMUC5B/hsGAPDH (%) at Day 5”). Lower values for mean maximum on-target score at day 5 indicate improved siRNA stability as the effect of MUC5B silencing is maintained until day 5.

TABLE 9
Modified Sense and Antisense MUCSB siRNA Sequences

| siRNA | Sense | SEQ | Antisense | SEQ |
|---|---|---|---|---|
| duplex | sequence | ID | sequence | ID |
| ID | (5′-3′) | NO: | (5′-3′) | NO: |
| 12706_EEL_19/ | aaAuccGUGugUucu | 358 | dTAGCAGAACACAcG | 535 |
| 21mer_V0 | gCusa | | GAUUUcsa | |
| 12706_EEL_19/ | aaAuccGUGugUucu | 358 | dTagcAGAACACAc | 186,538 |
| 2lmer_V01 | gCusa | | GGAUUUcsa | |
| 12706_EEL_19/ | aaAuccGUGugUucu | 358 | dTagcaGAACACAc | 186,539 |
| 2lmer_V02 | gCusa | | GGAUUUcsa | |
| 12706_EEL_19/ | aaAuccGUGugUucu | 358 | dTAgcaGAACACAcG | 186,540 |
| 21mer_V03 | gCusa | | GAUUUcsa | |
| 12706_EEL_19/ | aaAuccGUGugUucu | 186,502 | dTAGUAGAACACAcG | 186,541 |
| 21mer_V04 | aCusa | | GAUUUcsa | |
| 12706_EEL_19/ | aaAuccGUGagUucu | 186,503 | dTAGCAGAACACAcG | 535 |
| 21mer_V05 | gCusa | | GAUUUcsa | |
| 12706_EEL_19/ | aaAuccGUCugUucu | 186,504 | dTAGCAGAACACAcG | 535 |
| 21mer_V06 | gCusa | | GAUUUcsa | |
| 12706_EEL_19/ | aaAuccGAGugUucu | 186,505 | dTAGCAGAACACAcG | 535 |
| 21mer_V07 | gCusa | | GAUUUcsa | |
| 12706_EEL_19/ | caAuccGUGugUucu | 186,506 | dTAGCAGAACACAcG | 186,542 |
| 21mer_V08 | gCusa | | GAUUGcsa | |
| 12706_EEL_19/ | asasAuccGUGugUu | 186,507 | dTsAsGCAGAACACA | 186,543 |
| 21mer_V09 | cugCsusa | | cGGAUUUscsa | |
| 12706_EEL_19/ | aaAuccGUGugUucu | 358 | (vin-u)AGCAGAAC | 186,544 |
| 21mer_V10 | gCusa | | ACAcGGAUUUcsa | |
| 12706_EEL_19/ | aaAuccGUGugUucu | 358 | dTAGCA(GNA-G)AA | 186,545 |
| 21mer_VII | gCusa | | CACAcGGAUUUcsa | |
| 12706_EEL_19/ | aaAuccGUGugUucu | 358 | dTAGCAG(GNA-A)A | 186,546 |
| 21mer_V12 | gCusa | | CACAcGGAUUUcsa | |
| 12706_EEL_19/ | aaAuccGUGugUucu | 358 | dTAGCAGAACmAmCA | 186,547 |
| 21mer_V13 | gCusa | | cGGAUUUcsa | |
| 12706_EEL_19/ | asasAuccGUGugUu | 186,507 | (vin-u)sAsGCAGA | 186,548 |
| 21mer_V15 | cugCsusa | | ACACAGGAUUUscsa | |
| 12706_EEL_19/ | asasAuccGUGugUu | 186,507 | (vin-u)sAsgcaGa | 186,549 |
| 21mer_V16 | cugCsusa | | acacacGgAuuuscs | |
| | | | a | |
| 12706_EEL_19/ | asasdAuccdGdTdG | 186,508 | (vin-u)sdAsgcad | 186,550 |
| 21mer_V17 | ugdTucugdCsusa | | GaacacacdGgdAuu | |
| | | | uscsa | |
| 12706_EEL_19/ | asasdAuccdGdTdG | 186,508 | (vin-u)sdAsgcad | 186,551 |
| 21mer_V19 | ugdTucugdCsusa | | G(GNA-A)acacacd | |
| | | | GgdAuuuscsa | |
| 12706_EEL_19/ | aaAuccGUGugUucu | 358 | (vin-u)aGCAGAAC | 186,552 |
| 21mer_V20 | gCusa | | ACAcGGAUUUcsa | |
| 12706_EEL_19/ | aaAuccGUGugUucu | 358 | (vin-u)AGCAG(GN | 186,553 |
| 21mer_V21 | gCusa | | A-A)ACACAcGGAUU | |
| | | | Ucsa | |
| 12706_EEL_19/ | aaAuccGUGugUucu | 358 | (vin-u)AgcaG(GN | 186,554 |
| 21mer_V22 | gCusa | | A-A)ACACAcGGAUU | |
| | | | Ucsa | |
| 12706_EEL_19/ | aaAuccGUGugUucu | 358 | (vin-u)AgcaG(GN | 186,555 |
| 21mer_V23 | gCusa | | A-A)ACmAmCAcGGA | |
| | | | UUUcsa | |
| 12706_EEL_21/ | ugaaAuccGUGuguu | 361 | dTAGCAGAACACAcG | 538 |
| 23mer_VO | cugCusa | | GAUUUCAusa | |
| 12706_EEL_21/ | ugaaAuccGUGuguu | 361 | dTagcAGAACACAcG | 186,556 |
| 23mer_V01 | cugCusa | | GAUUUCAusa | |
| 12706_EEL_21/ | ugaaAuccGUGuguu | 361 | dTagcaGAACACAcG | 186,557 |
| 23mer_V02 | cugCusa | | GAUUUCAusa | |
| 12706_EEL_21/ | ugaaAuccGUGuguu | 361 | dTAgcaGAACACAcG | 186,558 |
| 23mer_V03 | cugCusa | | GAUUUCAusa | |
| 12706_EEL_21/ | ugaaAuccGUGuguu | 186,509 | dTAGUAGAACACAcG | 186,559 |
| 23mer_V04 | cuaCusa | | GAUUUCAusa | |
| 12706_EEL_21/ | ugaaAuccGUGaguu | 186,510 | dTAGCAGAACACAcG | 538 |
| 23mer_V05 | cugCusa | | GAUUUCAusa | |
| 12706_EEL_21/ | ugaaAuccGUCuguu | 186,511 | dTAGCAGAACACAcG | 538 |
| 23mer_V06 | cugCusa | | GAUUUCAusa | |
| 12706_EEL_21/ | ugaaAuccGAGuguu | 186,512 | dTAGCAGAACACAcG | 538 |
| 23mer_V07 | cugCusa | | GAUUUCAusa | |
| 12706_EEL_21/ | cgaaAuccGUGuguu | 186,513 | dTAGCAGAACACAcG | 186,560 |
| 23mer_V08 | cugCusa | | GAUUUCGusa | |
| 12706_EEL_21/ | usgsaaAuccGUGug | 186,514 | dTsAsGCAGAACACA | 186,561 |
| 23mer_V09 | uucugCsusa | | cGGAUUUCAsusa | |
| 12706_EEL_21/ | ugaaAuccGUGuguu | 361 | (vin-u)AGCAGAAC | 186,562 |
| 23mer_V10 | cugCusa | | ACAcGGAUUUCAusa | |
| 12706_EEL_21/ | ugaaAuccGUGuguu | 361 | dTAGCA(GNA-G)AA | 186,563 |
| 23mer_VII | cugCusa | | CACAcGGAUUUCAus | |
| | | | a | |
| 12706_EEL_21/ | ugaaAuccGUGuguu | 361 | dTAGCAG(GNA-A)A | 186,564 |
| 23mer_V12 | cugCusa | | CACAcGGAUUUCAus | |
| | | | a | |
| 12706_EEL_21/ | ugaaAuccGUGuguu | 361 | dTAGCAGAACmAmCA | 186,565 |
| 23mer_V13 | cugCusa | | cGGAUUUCAusa | |
| 12706_EEL_21/ | usgsaaAuccGUGug | 186,514 | (vin-u)sAsGCAGA | 186,566 |
| 23mer_V15 | uucugCsusa | | ACACAcGGAUUUCAs | |
| | | | usa | |
| 12706_EEL_21/ | usgsaaAuccGUGug | 186,514 | (vin-u)sAsgcaGa | 186,567 |
| 23mer_V16 | uucugCsusa | | acacacGgAuuucas | |
| | | | usa | |
| 12706_EEL_21/ | usgsaadAuccdGdT | 186,515 | (vin-u)sdAsgcad | 186,568 |
| 23mer_V17 | dGuguucugdCsusa | | GaacacacdGgdAuu | |
| | | | ucasusa | |
| 12706_EEL_21/ | usgsaadAuccdGdT | 186,515 | (vin-u)sdAsgcad | 186,569 |
| 23mer_V19 | dGuguucugdCsusa | | G(GNA-A)acacacd | |
| | | | GgdAuuucasusa | |
| 12706_EEL_21/ | ugaaAuccGUGuguu | 361 | (vin-u)aGCAGAAC | 186,570 |
| 23mer_V20 | cugCusa | | ACAcGGAUUUCAusa | |
| 12706_EEL_21/ | ugaaAuccGUGuguu | 361 | (vin-u)AGCAG(GN | 186,571 |
| 23mer_V21 | cugCusa | | A-A)ACACAcGGAUU | |
| | | | UCAusa | |
| 12706_EEL_21/ | ugaaAuccGUGuguu | 361 | (vin-u)AgcaG(GN | 186,572 |
| 23mer_V22 | cugCusa | | A-A)ACACAcGGAUU | |
| | | | UCAusa | |
| 12706_EEL_21/ | ugaaAuccGUGuguu | 361 | (vin-u)AgcaG(GN | 186,573 |
| 23mer_V23 | cugCusa | | A-A)ACmAmCAcGGA | |
| | | | UUUCAusa | |
| 15476_DV22_21/ | usascaagUfcCfAf | 363 | usAfscgaUfaucca | 540 |
| 23mer_VO | Ufggauaucgua | | ugGfaCfuuguasgs | |
| | | | u | |
| 15476_DV22_21/ | usascaagUfcCfAf | 363 | (vin-u)sAfscgaU | 186,574 |
| 23mer_V01 | Ufggauaucgua | | fauccaugGfaCfuu | |
| | | | guasgsu | |
| 15476_DV22_21/ | usascaagUfcCfAf | 363 | usAfscga(GNA-T) | 186,575 |
| 23mer_V02 | Ufggauaucgua | | auccaugGfaCfuug | |
| | | | uasgsu | |
| 15476_DV22_21/ | usascaagUfcCfAf | 363 | usAfscgaUf(GNA- | 186,576 |
| 23mer_V03 | Ufggauaucgua | | A)uccaugGfaCfuu | |
| | | | guasgsu | |
| 15476_DV22_21/ | usascaagUfcCfAf | 186,516 | usAfscgaUfaucca | 540 |
| 23mer_V04 | dTggauaucgua | | ugGfaCfuuguasgs | |
| | | | u | |
| 15476_DV22_21/ | usascaagUfcCfAf | 186,517 | usAfscgaUfaucca | 540 |
| 23mer_V05 | Ufcgauaucgua | | ugGfaCfuuguasgs | |
| | | | u | |
| 15476_DV22_21/ | usascaagUfcCfAf | 186,518 | usAfscgaUfaucca | 540 |
| 23mer_V06 | Afggauaucgua | | ugGfaCfuuguasgs | |
| | | | u | |
| 15476_DV22_21/ | usascaagUfcCfUf | 186,519 | usAfscgaUfaucca | 540 |
| 23mer_V07 | Ufggauaucgua | | ugGfaCfuuguasgs | |
| | | | u | |
| 15476_DV22_21/ | usascaagUfcCfAf | 186,520 | usAfsuga Ufaucc | 186,577 |
| 23mer_V08 | Ufggauaucaua | | augGfaCfuuguasg | |
| | | | su | |
| 15476_DV22_21/ | usascaagUfcCfAf | 363 | usAfscgaUfaucca | 186,578 |
| 23mer_V09 | Ufggauaucgua | | ugGfaCfuuguasGm | |
| | | | sTm | |
| 15476_DV22_21/ | usascaagUfcCfAf | 363 | (vin-u)sascga U | 186,579 |
| 23mer_V10 | Ufggauaucgua | | fauccaug GfaCfu | |
| | | | uguasgsu | |
| 15476_DV22_21/ | usascaagUfcCfAf | 363 | usAfscga(abasic | 186,580 |
| 23mer_V11 | Ufggauaucgua | | -N)auccaugGfaCf | |
| | | | uuguasgsu | |
| 15476_DV22_21/ | usascaagUfcCfAf | 363 | usAfscga(abasic | 186,581 |
| 23mer_V12 | Ufggauaucgua | | )auccaugGfaCfuu | |
| | | | guasgsu | |
| 15476_DV22_21/ | usascaagUfcCfAf | 363 | usAfscga(C3)auc | 186,582 |
| 23mer_V13 | Ufggauaucgua | | caugGfaCfuuguas | |
| | | | gsu | |
| 15476_DV22_21/ | usascaagUfcCfAf | 363 | usAfscga(abasic | 186,583 |
| 23mer_V14 | Ufggauaucgua | | -n)auccaugGfaCf | |
| | | | uuguasgsu | |
| 15476_DV22_21/ | usascaagUfcCfAf | 363 | usAfscga(abasic | 186,584 |
| 23mer_V15 | Ufggauaucgua | | -F)auccaugGfaCf | |
| | | | uuguasgsu | |
| 15478_EEL_21/ | caagUccaUGGauau | 364 | dTGGACGAUAUCCaU | 541 |
| 23mer_VO | cguCosa | | GGACUUGusa | |
| 15478_EEL_21/ | caagUccaUGGanau | 364 | d′TggaCGAUAUCCa | 186.585 |
| 23mer_V01 | cguCcsa | | UGGACUUGusa | |
| 15478_EEL_21/ | caagUccaUGGauau | 364 | dTggacGAUAUCCaU | 186,586 |
| 23mer_V02 | cguCosa | | GGACUUGusa | |
| 15478_EEL_21/ | caagUccaUGGauau | 364 | dTGgacGAUAUCCaU | 186,587 |
| 23mer_V03 | cguCcsa | | GGACUUGusa | |
| 15478_EEL_21/ | caagUccaUGGauau | 186,521 | dTGGAUGAUAUCCaU | 186,588 |
| 23mer_V04 | cauCcsa | | GGACUUGusa | |
| 15478_EEL_21/ | caagUccaUGGuuau | 186,522 | dTGGACGAUAUCCaU | 541 |
| 23mer_V05 | cguCcsa | | GGACUUGusa | |
| 15478_EEL_21/ | caagUccaUGCauau | 186,523 | dTGGACGAUAUCCaU | 541 |
| 23mer_V06 | cguCosa | | GGACUUGusa | |
| 15478_EEL_21/ | caagUccaUCGauau | 186,524 | dTGGACGAUAUCCaU | 541 |
| 23mer_V07 | cguCosa | | GGACUUGusa | |
| 15478_EEL_21/ | cgagUccaUGGauau | 186,525 | dTGGACGAUAUCCaU | 186,589 |
| 23mer_V08 | cguCcsa | | GGACUCGusa | |
| 15478_EEL_21/ | csasagUccaUGGau | 186,526 | dTsGsGACGAUAUCC | 186,590 |
| 23mer_V09 | aucguCscsa | | aUGGACUUGsusa | |
| 15478_EEL_21/ | caagUccaUGGauau | 364 | (vin-u)GGACGAUA | 186,591 |
| 23mer_V10 | cguCcsa | | UCCaUGGACUUGusa | |
| 15478_EEL_21/ | caagUccaUGGauau | 364 | dTGGAC(GNA-G)AU | 186,592 |
| 23mer_V11 | cguCcsa | | AUCCaUGGACUUGus | |
| | | | a | |
| 15478_EEL_21/ | caagUccaUGGauau | 364 | dTGGACG(GNA-A)U | 186,593 |
| 23mer_V12 | cguCcsa | | AUCCaUGGACUUGus | |
| | | | a | |
| 15478_EEL_21/ | caagUccaUGGanau | 364 | dTGGACGAUAmTmCC | 186,594 |
| 23mer_V13 | cguCcsa | | aUGGACUUGusa | |
| 15478_EEL_21/ | csasagUccaUGGau | 186,526 | (vin-u)sGsGACGA | 186.595 |
| 23mer_V15 | aucguCscsa | | UAUCCaUGGACUUGs | |
| | | | usa | |
| 15478_EEL_21/ | csasagUccaUGGau | 186,526 | (vin-u)sGsgacGa | 186,596 |
| 23mer_V16 | aucguCscsa | | uauccaUgGacuugs | |
| | | | usa | |
| 15478_EEL_21/ | csasagdTccadTdG | 186,527 | (vin-u)sdGsgacd | 186,597 |
| 23mer_V17 | dGauaucgudCscsa | | GauauccadTgdGac | |
| | | | uugsusa | |
| 15478_EEL_21/ | csasagdTccadTdG | 186,527 | (vin-u)sdGsgacd | 186,598 |
| 23mer_V19 | dGauaucgudCscsa | | G(GNA-A)uauccad | |
| | | | TgdGacuugsusa | |
| 15478_EEL_21/ | caagUccaUGGauau | 364 | (vin-u)gGACGAUA | 186,599 |
| 23mer_V20 | cguCcsa | | UCCaUGGACUUGusa | |
| 15478_EEL_21/ | caagUccaUGGauau | 364 | (vin-u)GGACG(GN | 186,600 |
| 23mer_V21 | cguCcsa | | A-A)UAUCCaUGGAC | |
| | | | UUGusa | |
| 15478_EEL_21/ | caagUccaUGGauau | 364 | (vin-u)GgacG(GN | 186,601 |
| 23mer_V22 | cguCcsa | | A-A)UAUCCaUGGAC | |
| | | | UUGusa | |
| 15478_EEL_21/ | caagUccaUGGauau | 364 | (vin-u)GgacG(GN | 186,602 |
| 23mer_V23 | cguCcsa | | A-A)UAmTmCCaUGG | |
| | | | ACUUGusa | |
| 15539_DV22_21/ | csusguuuGfaCfCf | 356 | usAfsccgGfaauuu | 533 |
| 23mer_VO | Afaauuccggua | | ggUfcAfaacagsgs | |
| | | | a | |
| 15539_DV22_21/ | csusguuuGfaCfCf | 356 | (vin-u)sAfsccgG | 186,603 |
| 23mer_V01 | Afaauuccggua | | faauuugg UfcAfa | |
| | | | acagsgsa | |
| 15539_DV22_21/ | csusguuuGfaCfCf | 356 | usAfsccg(GNA-G) | 186,604 |
| 23mer_V02 | Afaauuccggua | | aauuugg UfcAfaa | |
| | | | cagsgsa | |
| 15539_DV22_21/ | csusguuuGfaCfCf | 356 | usAfsccgGf(GNA- | 186,605 |
| 23mer_V03 | Afaauuccggua | | A)auuugg UfcAfa | |
| | | | acagsgsa | |
| 15539_DV22_21/ | csusguuuGfaCfCf | 186,528 | usAfscogGfaauuu | 533 |
| 23mer_V04 | dAaauuccggua | | gg UfcAfaacagsg | |
| | | | sa | |
| 15539_DV22_21/ | csusguuuGfaCfCf | 186,529 | usAfsccgGfaauuu | 533 |
| 23mer_V05 | Afuauuccggua | | gg UfcAfaacagsg | |
| | | | sa | |
| 15539_DV22_21/ | csusguuuGfaCfCf | 186,530 | usAfsccgGfaauuu | 533 |
| 23mer_V06 | Ufaauuccggua | | gg UfcAfaacagsg | |
| | | | sa | |
| 15539_DV22_21/ | csusguuuGfaCfGf | 186,531 | usAfsccgGfaauuu | 533 |
| 23mer_V07 | Afaauuccggua | | gg UfcAfaacagsg | |
| | | | sa | |
| 15539_DV22_21/ | csusguuuGfaCfCf | 186,532 | usAfsucgGfaauuu | 186,606 |
| 23mer_V08 | Afaauuccgaua | | gg UfcAfaacagsg | |
| | | | sa | |
| 15539_DV22_21/ | csusguuuGfaCfCf | 356 | usAfsccgGfaauuu | 186,607 |
| 23mer_V09 | Afaauuccggua | | gg UfcAfaacagsG | |
| | | | msAm | |
| 15539_DV22_21/ | csusguuuGfaCfCf | 356 | (vin-u)sasccgGf | 186,608 |
| 23mer_V10 | Afaauuccggua | | aauuugg UfcAfaa | |
| | | | cagsgsa | |
| 15539_DV22_21/ | csusguuuGfaCfCf | 356 | usAfsccg(abasic | 186,609 |
| 23mer_VII | Afaauuccggua | | -N)aauuugg UfcA | |
| | | | faacagsgsa | |
| 15539_DV22_21/ | csusguuuGfaCfCf | 356 | usAfsccg(abasic | 186,610 |
| 23mer_V12 | Afaauuccggua | | )aauuugg UfcAfa | |
| | | | acagsgsa | |
| 15539_DV22_21/ | csusguuuGfaCfCf | 356 | usAfsccg(C3)aau | 186,611 |
| 23mer_V13 | Afaauuccggua | | uugg UfcAfaacag | |
| | | | sgsa | |
| 15539_DV22_21/ | csusguuuGfaCfCf | 356 | usAfsccg(abasic | 186,612 |
| 23mer_V14 | Afaauuccggua | | -n)aauuugg UfcA | |
| | | | faacagsgsa | |
| 15539_DV22_21/ | csusguuuGfaCfCf | 356 | usAfsccg(abasic | 186,613 |
| 23mer_V15 | Afaauuccggua | | -F)aauuugg UfcA | |
| | | | faacagsgsa | |
| 219_DV22_21/ | gscsuuugUfuCfCf | 359 | usAfsgugAfcgggu | 536 |
| 23mer_VO | Afcccgucacua | | ggAfaCfaaagcsus | |
| | | | c | |
| 219_DV22_21/ | gscsuuugUfuCfCf | 359 | (vin-u)sAfsgugA | 186,614 |
| 23mer_V01 | Afccogucacua | | fcggguggAfaCfaa | |
| | | | agcsusc | |
| 219_DV22_21/ | gscsuuugUfuCfCf | 359 | usAfsgug(GNA-A) | 186,615 |
| 23mer_V02 | Afcccgucacua | | cggguggAfaCfaaa | |
| | | | gcsusc | |
| 219_DV22_21/ | gscsuuugUfuCfCf | 359 | usAfsgugAf(GNA- | 186,616 |
| 23mer_V03 | Afccogucacua | | C)ggguggAfaCfaa | |
| | | | agcsusc | |
| 219_DV22_21/ | gscsuuugUfuCfCf | 186,533 | usAfsgugAfcgggu | 536 |
| 23mer_V04 | dAcccgucacua | | ggAfaCfaaagcsus | |
| | | | c | |
| 219_DV22_21/ | gscsuuugUfuCfCf | 186,534 | usAfsgug Afcggg | 536 |
| 23mer_V05 | Afgccgucacua | | ugg AfaCfaaagcs | |
| | | | usc | |
| 219_DV22_21/ | gscsuuugUfuCfCf | 186,535 | usAfsgugAfcgggu | 536 |
| 23mer_V06 | Ufcccgucacua | | ggAfaCfaaagcsus | |
| | | | c | |
| 219_DV22_21/ | gscsuuugUfuCfGf | 186,536 | usAfsgugAfcgggu | 536 |
| 23mer_V07 | Afcccgucacua | | ggAfaCfaaagcsus | |
| | | | c | |
| 219_DV22_21/ | gscsuuugUfuCfCf | 186,537 | usAfsgugAfugggu | 186,617 |
| 23mer_V08 | Afcccaucacua | | ggAfaCfaaagcsus | |
| | | | c | |
| 219_DV22_21/ | gscsuuugUfuCfCf | 359 | usAfsgugAfcgggu | 186,618 |
| 23mer_V09 | Afcccgucacua | | ggAfaCfaaagcsTm | |
| | | | sCm | |
| 219_DV22_21/ | gscsuuugUfuCfCf | 359 | (vin-u)sasgugAf | 186,619 |
| 23mer_V10 | Afcccgucacua | | cgggugg AfaCfaa | |
| | | | agcsusc | |
| 219_DV22_21/ | gscsuuugUfuCfCf | 359 | usAfsgug(abasic | 186,620 |
| 23mer_VII | Afcccgucacua | | -N)cggguggAfaCf | |
| | | | aaagcsusc | |
| 219_DV22_21/ | gscsuuugUfuCfCf | 359 | usAfsgug(abasic | 186,621 |
| 23mer_V12 | Afcccgucacua | | )cggguggAfaCfaa | |
| | | | agcsusc | |
| 219_DV22_21/ | gscsuuugUfuCfCf | 359 | usAfsgug(C3)cgg | 186,622 |
| 23mer_V13 | Afcccgucacua | | guggAfaCfaaagcs | |
| | | | usc | |
| 219_DV22_21/ | gscsuuugUfuCfCf | 359 | usAfsgug(abasic | 186,623 |
| 23mer_V14 | Afcccgucacua | | -n)cggguggAfaCf | |
| | | | aaagcsusc | |
| 219_DV22_21/ | gscsuuugUfuCfCf | 359 | usAfsgug(abasic | 186,624 |
| 23mer_V15 | Afcccgucacua | | -F)cggguggAfaCf | |
| | | | aaagcsusc | |

SIRNA ID: Location at the human MUC5B chemistry_backbone type_Length sense/Antisense in mer_Variant number

TABLE 10
ON-Target and OFF-Target siRNA performance in A549 cells.

| | | | | | | Normalized hsMUC5B/ | |
|---|---|---|---|---|---|---|---|
| | Normalized Renilla/Firefly (%) at Day 1 | | | | | hsGAPDH (%) at Day 5 | |
| | ON-TARGET | | | OFF-TARGET | | ON-TARGET | |
| | Mean | | | Mean | | Mean | |
| | Max | SD Max | IC50 | Max | Max SD | Max | SD Max |
| siRNA ID | (33 nM) | (33 nM) | (M) | (33 nM) | (33 nM) | (520 nM) | (520 nM) |
| 12706_EEL_19/21mer_V0 | 22.2 | 3.4 | 4.0E−12 | 65.9 | 13.0 | 3.3 | 0.7 |
| 12706_EEL_19/21mer_V01 | 20.2 | 2.7 | 9.3E−12 | 84.0 | 16.7 | 6.4 | 0.8 |
| 12706_EEL_19/21mer_V02 | 18.8 | 3.0 | 1.3E−11 | 76.2 | 19.1 | 8.9 | 0.8 |
| 12706_EEL_19/21mer_V03 | 22.0 | 5.3 | 5.6E−12 | 90.1 | 10.8 | 6.8 | 1.4 |
| 12706_EEL_19/21mer_V04 | 31.1 | 11.0 | 1.4E−11 | 81.9 | 18.7 | 7.3 | 1.7 |
| 12706_EEL_19/21mer_V05 | 27.1 | 3.0 | 2.9E−12 | 83.6 | 27.5 | 2.0 | 1.2 |
| 12706_EEL_19/21mer_V06 | 27.6 | 4.5 | 3.5E−12 | 84.8 | 11.8 | 7.6 | 5.1 |
| 12706_EEL_19/21mer_V07 | 28.7 | 6.0 | 4.2E−12 | 80.6 | 16.7 | 8.5 | 6.2 |
| 12706_EEL_19/21mer_V08 | 20.2 | 1.8 | 6.8E−12 | 65.3 | 15.2 | 0.8 | 0.5 |
| 12706_EEL_19/21mer_V09 | 22.6 | 3.6 | 4.7E−12 | 103.2 | 10.2 | 2.5 | 0.7 |
| 12706_EEL_19/21mer_V10 | 25.8 | 3.7 | 9.2E−12 | 85.5 | 20.4 | 1.3 | 0.3 |
| 12706_EEL_19/21mer_V11 | 62.5 | 6.8 | 2.2E−11 | 95.2 | 9.0 | 17.8 | 6.2 |
| 12706_EEL_19/2lmer_V12 | 51.1 | 9.9 | 1.5E−11 | 97.8 | 12.2 | 3.5 | 1.8 |
| 12706_EEL_19/21mer_V13 | 27.3 | 12.5 | 4.7E−12 | 68.5 | 9.1 | 2.6 | 1.1 |
| 12706_EEL_19/21mer_V15 | 31.8 | 8.1 | 6.3E−12 | 139.8 | 26.5 | 9.4 | 4.1 |
| 12706_EEL_19/21mer_V16 | 55.3 | 6.7 | 8.1E−12 | 122.0 | 22.6 | 2.1 | 1.8 |
| 12706_EEL_19/21mer_V17 | 94.1 | 12.5 | | 101.4 | 21.6 | 4.9 | 3.4 |
| 12706_EEL_19/21mer_V19 | 120.6 | 8.6 | | 138.7 | 9.6 | 30.6 | 6.3 |
| 12706_EEL_19/2lmer_V20 | 21.8 | 5.6 | 2.6E−11 | 77.9 | 14.2 | 15.7 | 6.9 |
| 12706_EEL_19/21mer_V21 | 78.1 | 5.0 | | 112.4 | 9.3 | 3.4 | 1.2 |
| 12706_EEL_19/21mer_V22 | 84.2 | 12.4 | | 101.0 | 15.5 | 10.7 | 6.7 |
| 12706_EEL_19/21mer_V23 | 69.7 | 11.7 | | 119.9 | 27.2 | 8.1 | 4.2 |
| 12706_EEL_21/23mer_V0 | 22.4 | 0.0 | 3.1E−12 | 65.6 | 11.4 | 2.1 | 0.7 |
| 12706_EEL_21/23mer_V01 | 20.5 | 2.6 | 2.4E−11 | 88.3 | 17.2 | 11.3 | 1.5 |
| 12706_EEL_21/23mer_V02 | 36.9 | 8.4 | 4.8E−11 | 97.7 | 1.2 | 15.0 | 4.4 |
| 12706_EEL_21/23mer_V03 | 24.3 | 2.8 | 4.3E−12 | 91.0 | 9.2 | 5.9 | 1.7 |
| 12706_EEL_21/23mer_V04 | 20.3 | 3.0 | 1.5E−11 | 88.6 | 21.9 | 4.0 | 0.2 |
| 12706_EEL_21/23mer_V05 | 28.1 | 4.7 | 2.1E−12 | 86.1 | 13.2 | 2.0 | 1.4 |
| 12706_EEL_21/23mer_V06 | 29.6 | 1.4 | 1.8E−12 | 88.6 | 5.9 | 2.0 | 0.9 |
| 12706_EEL_21/23mer_V07 | 29.8 | 2.3 | 3.7E−12 | 99.4 | 1.2 | 1.3 | 0.8 |
| 12706_EEL_21/23mer_V08 | 25.8 | 3.6 | 3.8E−12 | 87.9 | 16.5 | 1.1 | 0.8 |
| 12706_EEL_21/23mer_V09 | 24.5 | 2.5 | 4.9E−12 | 119.5 | 21.9 | 1.0 | 0.3 |
| 12706_EEL_21/23mer_V10 | 25.1 | 5.2 | 1.5E−11 | 96.7 | 7.6 | 1.8 | 1.0 |
| 12706_EEL_21/23mer_V11 | 26.8 | 3.6 | 1.4E−11 | 110.5 | 10.4 | 6.1 | 0.6 |
| 12706_EEL_21/23mer_V12 | 21.2 | 4.0 | 6.8E−12 | 85.6 | 6.3 | 1.3 | 0.2 |
| 12706_EEL_21/23mer_V13 | 20.0 | 3.2 | 2.8E−12 | 79.1 | 2.9 | 1.2 | 0.6 |
| 12706_EEL_21/23mer_V15 | 35.1 | 5.3 | 2.2E−11 | 126.2 | 14.2 | 7.1 | 3.6 |
| 12706_EEL_21/23mer_V16 | 70.8 | 9.2 | | 118.8 | 23.1 | 25.3 | 4.4 |
| 12706_EEL_21/23mer_V17 | 54.8 | 13.8 | | 134.4 | 39.1 | 1.2 | 0.8 |
| 12706_EEL_21/23mer_V19 | 96.9 | 14.5 | | 139.5 | 25.5 | 15.1 | 2.1 |
| 12706_EEL_21/23mer_V20 | 33.6 | 5.5 | 6.3E−11 | 69.6 | 5.0 | 36.2 | 12.3 |
| 12706_EEL_21/23mer_V21 | 30.8 | 5.6 | 5.1E−11 | 103.6 | 7.3 | 5.9 | 1.3 |
| 12706_EEL_21/23mer_V22 | 40.8 | 6.7 | 6.6E−11 | 105.4 | 12.1 | 19.9 | 3.7 |
| 12706_EEL_21/23mer_V23 | 41.4 | 8.2 | 2.9E−11 | 101.4 | 28.9 | 10.0 | 4.5 |
| 15476_DV22_21/23mer_V0 | 38.7 | 0.6 | 1.6E−11 | 112.1 | 3.7 | 9.1 | 0.9 |
| 15476_DV22_21/23mer_V01 | 53.1 | 4.4 | 7.5E−12 | 119.3 | 34.9 | 4.0 | 0.7 |
| 15476_DV22_21/23mer_V02 | 44.2 | 4.0 | 2.7E−11 | 102.4 | 16.5 | 8.9 | 1.5 |
| 15476_DV22_21/23mer_V03 | 72.7 | 6.7 | 5.2E−11 | 123.9 | 15.3 | 5.1 | 3.0 |
| 15476_DV22_21/23mer_V04 | 56.9 | 7.4 | 6.9E−11 | 102.6 | 4.5 | 6.9 | 1.6 |
| 15476_DV22_21/23mer_V05 | 73.6 | 4.0 | 1.1E−11 | 156.6 | 13.1 | 12.8 | 7.8 |
| 15476_DV22_21/23mer_V06 | 58.1 | 7.7 | 1.3E−11 | 130.7 | 16.3 | 12.9 | 4.9 |
| 15476_DV22_21/23mer_V07 | 67.6 | 2.8 | | 141.5 | 14.9 | 8.9 | 6.5 |
| 15476_DV22_21/23mer_V08 | 88.2 | 16.2 | | 123.7 | 18.6 | 1.7 | 1.2 |
| 15476_DV22_21/23mer_V09 | 56.2 | 12.0 | 7.2E−12 | 123.5 | 15.7 | 3.2 | 1.7 |
| 15476_DV22_21/23mer_V10 | 113.2 | 10.4 | | 147.5 | 25.9 | 3.6 | 0.6 |
| 15476_DV22_21/23mer_V11 | 70.6 | 2.4 | 2.8E−11 | 131.2 | 18.2 | 6.4 | 3.2 |
| 15476_DV22_21/23mer_V12 | 63.5 | 12.8 | 1.2E−11 | 143.5 | 28.2 | 9.3 | 1.3 |
| 15476_DV22_21/23mer_V13 | 77.3 | 8.7 | 1.5E−11 | 141.9 | 34.4 | 13.7 | 4.9 |
| 15476_DV22_21/23mer_V14 | 51.5 | 5.8 | 1.1E−11 | 124.8 | 16.5 | 9.4 | 0.6 |
| 15476_DV22_21/23mer_V15 | 58.9 | 14.0 | 1.7E−11 | 137.5 | 26.6 | 23.9 | 8.3 |
| 15478_EEL_21/23mer_V0 | 39.0 | 7.1 | 4.3E−12 | 42.0 | 17.1 | 2.6 | 1.4 |
| 15478_EEL_21/23mer_V01 | 33.4 | 7.2 | 3.3E−11 | 64.0 | 22.7 | 32.7 | 6.3 |
| 15478_EEL_21/23mer_V02 | 56.5 | 6.5 | | 73.1 | 7.4 | 27.6 | 6.3 |
| 15478_EEL_21/23mer_V03 | 36.5 | 13.7 | 6.9E−12 | 52.3 | 20.3 | 7.6 | 1.1 |
| 15478_EEL_21/23mer_V04 | 38.4 | 8.4 | 8.2E−12 | 96.5 | 18.1 | 18.3 | 4.0 |
| 15478_EEL_21/23mer_V05 | 51.0 | 14.5 | 6.5E−12 | 77.8 | 5.2 | 7.6 | 2.0 |
| 15478_EEL_21/23mer_V06 | 52.4 | 21.6 | 4.7E−12 | 72.3 | 17.8 | 7.7 | 0.6 |
| 15478_EEL_21/23mer_V07 | 47.4 | 9.4 | 6.2E−12 | 61.4 | 7.3 | 6.1 | 1.2 |
| 15478_EEL_21/23mer_V08 | 34.7 | 2.7 | 4.8E−12 | 75.3 | 12.6 | 3.1 | 0.8 |
| 15478_EEL_21/23mer_V09 | 80.3 | 9.4 | 7.3E−12 | 131.0 | 25.8 | 4.8 | 0.4 |
| 15478_EEL_21/23mer_V10 | 34.5 | 8.7 | 1.3E−11 | 56.5 | 6.1 | 4.1 | 1.5 |
| 15478_EEL_21/23mer_V11 | 41.4 | 3.5 | 1.2E−11 | 111.3 | 5.3 | 1.2 | 1.2 |
| 15478_EEL_21/23mer_V12 | 37.9 | 10.9 | 7.0E−12 | 98.8 | 17.6 | 1.8 | 0.9 |
| 15478_EEL_21/23mer_V13 | 30.5 | 11.5 | 5.1E−12 | 49.6 | 18.0 | 3.0 | 1.7 |
| 15478_EEL_21/23mer_V15 | 117.6 | 20.4 | 1.1E−11 | 133.9 | 14.3 | 34.1 | 4.1 |
| 15478_EEL_21/23mer_V16 | 99.5 | 14.6 | | 131.3 | 35.4 | 80.7 | 20.3 |
| 15478_EEL_21/23mer_V17 | 119.5 | 0.2 | | 106.5 | 24.7 | 113.8 | 16.5 |
| 15478_EEL_21/23mer_V19 | 103.0 | 17.8 | | 136.0 | 11.4 | 110.0 | 10.9 |
| 15478_EEL_21/23mer_V20 | 36.8 | 5.7 | 7.9E−11 | 70.0 | 6.7 | 45.3 | 5.8 |
| 15478_EEL_21/23mer_V21 | 46.3 | 9.2 | 3.7E−11 | 100.9 | 15.5 | 2.4 | 0.4 |
| 15478_EEL_21/23mer_V22 | 87.6 | 9.9 | | 103.7 | 4.5 | 57.5 | 24.3 |
| 15478_EEL_21/23mer_V23 | 83.9 | 8.2 | | 113.7 | 6.0 | 66.8 | 33.0 |
| 15539_DV22_21/23mer_V0 | 59.4 | 6.8 | | 62.1 | 5.5 | 0.9 | 0.4 |
| 15539_DV22_21/23mer_V01 | 58.3 | 14.1 | 8.8E−12 | 94.3 | 7.8 | 2.0 | 1.6 |
| 15539_DV22_21/23mer_V02 | 64.0 | 3.8 | | 117.0 | 12.0 | 7.5 | 2.7 |
| 15539_DV22_21/23mer_V03 | 57.2 | 2.1 | | 100.8 | 12.4 | 4.0 | 0.4 |
| 15539_DV22_21/23mer_V04 | 63.3 | 6.9 | | 77.8 | 19.5 | 1.7 | 1.2 |
| 15539_DV22_21/23mer_V05 | 74.0 | 14.8 | | 108.0 | 15.5 | 1.0 | 0.1 |
| 15539_DV22_21/23mer_V06 | 85.4 | 11.3 | | 109.4 | 23.8 | 2.1 | 0.2 |
| 15539_DV22_21/23mer_V07 | 76.6 | 3.7 | | 98.6 | 25.9 | 1.2 | 0.3 |
| 15539_DV22_21/23mer_V08 | 54.4 | 8.0 | | 113.1 | 13.1 | 4.7 | 0.7 |
| 15539_DV22_21/23mer_V09 | 45.6 | 0.6 | 2.0E−11 | 85.5 | 13.6 | 2.2 | 1.2 |
| 15539_DV22_21/23mer_V10 | 76.3 | 2.5 | | 119.9 | 20.7 | 17.2 | 10.3 |
| 15539_DV22_21/23mer_V11 | 98.7 | 20.5 | | 156.9 | 17.7 | 11.7 | 2.3 |
| 15539_DV22_21/23mer_V12 | 71.4 | 0.6 | | 135.3 | 40.6 | 10.8 | 1.9 |
| 15539_DV22_21/23mer_V13 | 90.0 | 12.7 | | 125.0 | 26.5 | 14.9 | 1.9 |
| 15539_DV22_21/23mer_V14 | 79.4 | 11.8 | | 133.5 | 16.6 | 11.6 | 3.0 |
| 15539_DV22_21/23mer_V15 | 92.7 | 12.3 | | 139.5 | 21.0 | 19.7 | 2.5 |
| 219_DV22_21/23mer_V0 | 26.3 | 5.6 | 9.7E−11 | 85.7 | 17.2 | 3.8 | 2.3 |
| 219_DV22_21/23mer_V01 | 22.7 | 2.4 | 1.6E−11 | 116.1 | 11.8 | 2.1 | 0.9 |
| 219_DV22_21/23mer_V02 | 46.2 | 18.4 | 7.1E−11 | 103.8 | 12.2 | 10.0 | 9.9 |
| 219_DV22_21/23mer_V03 | 48.2 | 14.8 | 8.8E−11 | 103.8 | 16.7 | 13.5 | 3.0 |
| 219_DV22_21/23mer_V04 | 42.0 | 16.5 | 8.2E−11 | 83.7 | 5.3 | 3.9 | 2.0 |
| 219_DV22_21/23mer_V05 | 27.6 | 7.6 | 8.9E−11 | 71.0 | 3.2 | 2.8 | 2.0 |
| 219_DV22_21/23mer_V06 | 67.8 | 25.9 | 2.1E−11 | 80.3 | 13.9 | 2.8 | 1.3 |
| 219_DV22_21/23mer_V07 | 44.0 | 14.1 | 7.3E−11 | 98.3 | 12.7 | 1.6 | 0.4 |
| 219_DV22_21/23mer_V08 | 15.4 | 9.6 | 7.0E−11 | 100.5 | 7.2 | 3.5 | 3.9 |
| 219_DV22_21/23mer_V09 | 57.5 | 30.5 | 4.4E−10 | 94.5 | 14.7 | 7.2 | 2.8 |
| 219_DV22_21/23mer_V10 | 117.5 | 17.4 | | 121.0 | 11.2 | 42.1 | 7.8 |
| 219_DV22_21/23mer_V11 | 75.8 | 24.6 | 4.1E−10 | 142.4 | 46.8 | 26.8 | 2.3 |
| 219_DV22_21/23mer_V12 | 46.4 | 5.3 | 1.3E−10 | 156.3 | 40.7 | 31.7 | 1.0 |
| 219_DV22_21/23mer_V13 | 56.9 | 5.3 | 4.9E−11 | 158.7 | 16.9 | 31.1 | 2.1 |
| 219_DV22_21/23mer_V14 | 53.9 | 11.3 | 1.3E−10 | 156.3 | 14.8 | 41.2 | 5.6 |
| 219_DV22_21/23mer_V15 | 48.6 | 2.7 | 1.4E−10 | 170.8 | 33.7 | 29.0 | 5.5 |

On-Target siRNA efficacy is expressed as normalized Renilla/Firefly (%) and Normalized hsMUC5B/hsGAPDH (%) at max concentration of 33 nM and 520 nM, respectively. On-Target siRNA potency is expressed as IC50 (Inhibitory concentration 50) at Molar (M) concentration. Off-Target siRNA efficacy is expressed as normalized Renilla/Firefly (%) at maximum concentration of 33 nM. Normalized Renilla/Firefly (%) and Normalized hsMUC5B/hsGAPDH (%) values were measured following 1 and 5 days of siRNA treatment, respectively. Values represent the mean +/− SD of 3 independent experiment. Blank rows in the IC50 column indicate that an IC50 could not be calculated due to low inhibitory activity of the siRNA.

[0744] In some embodiments, the additional modifications shown in Table 9 increased siRNA efficacy at 24 hours, as defined by a reduced maximum on-target score in Table 10. In some cases, the additional modifications increased potency, as defined by reduced 1C50 in Table 10. In some embodiments, the additional modifications decreased off-target activity at 24 hours, as defined by a higher 24 hour off-target score in Table 10. In some embodiments, the additional modifications increased stability, as defined by a low score for maximum on-target activity at day 5. For example, for the 12706_EEL_19/21mer and 12706_EEL_21/23mer siRNA, the V09 modifications (12706_EEL_19/21mer_V09 sense strand SEQ ID NO:186,507; antisense strand SEQ ID NO. 186,543; 12706_EEL_21/23mer_V09 sense strand SEQ ID NO: 186,514; antisense SEQ ID NO: 186,561, Table 9) demonstrated improved off-target activity while maintaining efficacy, potency and stability compared to the starting V0 siRNAs (12706_EEL_19/21mer_V0 sense strand SEQ ID NO: 358; antisense strand SEQ ID NO: 535; 12706_EEL_21/23mer_V0 sense strand SEQ ID NO: 361; antisense strand SEQ ID NO: 538). The V09 modification also led to a stable reduction in MUC5B mRNA expression at day 5 for these two sequences (Table 10). The 12706_EEL_19/21mer and 12706_EEL_21/23mer share the same starting sequence with the exception that the 21/23mer is 2 nucleotides longer in both the sense and antisense strand. These results indicate that for the 12706 EEL siRNA sequences, the V09 modification may lead to better overall therapeutic profile.

[0745] For the 15478_EEL_21/23mer, which does not have the same sequence, the V09 modified siRNA (sense strand SEQ ID NO: 186,526; antisense strand SEQ ID NO: 186,590) did not have improved on-target activity compared to the starting V0 siRNA (sense strand SEQ ID NO: 364; antisense strand SEQ ID NO: 541) at 24 hours but did have significantly improved off-target activity at 24 hours. This suggests that some modifications may have sequence-specific functional effects.

[0746] In some embodiments, the modifications improved on- and/or off-target effects at 24 hours but were not as stable as the starting V0 siRNA after 5 days in culture. For example, the 12706_EEL_21/23mer_V01 (sense strand SEQ ID NO: 361; antisense strand SEQ ID NO: 186,556) and 12706_EEL_21/23mer_V02 (sense strand SEQ ID NO: 361; antisense strand SEQ ID NO: 186,557) displayed similar on- and off-target activity as the starting 12706_EEL_21/23mer_V0 siRNA (sense strand SEQ ID NO: 361; antisense strand SEQ ID NO: 538) at 24 hours, but the on-target performance at day 5 was reduced.

[0747] While preferred embodiments of the present disclosure have been shown and described herein, it will be obvious to those skilled in the art that such embodiments are provided by way of example only. Numerous variations, changes, and substitutions will now occur to those skilled in the art without departing from the disclosure. It should be understood that various alternatives to the embodiments of the disclosure described herein may be employed in practicing the disclosure. It is intended that the following claims define the scope of the disclosure and that methods and structures within the scope of these claims and their equivalents be covered thereby.

### REFERENCES

[0748] 1. Kobayashi, Y., et al. (2022) ACS Omega 7(2): 2398-2410.
[0749] 2. Wu, H et al., (2011) PLoS ONE 6(12)e 28580.
[0750] 3. Addepalli H et al., (2010) Nucleic Acids Res 38(20):7320-7331.
[0751] 4. Parmar, R., et al., (2016) ChemBioChem 17(11): 985-989.
[0752] 5. Elkayam, E., et al., (2017) Nucleic Acids Res 45(6): 3528-3536.
[0753] 6. Haraszti, R. A., et al., (2017) Nucleic Acids Res 45(13): 7581-7592.
[0754] 7. Prakash, T. P., et al., (2016) Bioorg Med Chem Lett 26(12): 2817-2820.
[0755] 8. Lima, W. F., et al., (2012) Cell 150(5): 883-894.
[0756] 9. Khvorova A et al., (2003) Cell 115(2):209-216.
[0757] 10. Schwarz, D S et al., (2003) Cell 115(2):199-208.
[0758] 11. Janas, M. M., et al., (2018) Nature Communications 9(1):723.
[0759] 12. Song, X., et al., (2017) Mol Ther Nucleic Acids 9:242-250.
[0760] 13. Jackson, A. L., et al., (2006) RNA 12(7): 1197-1205.
[0761] 14. Jackson, A. L. and P. S. Linsley (2010) Nat Rev Drug Discov 9(1): 57-67.
[0762] 15. Lima, W. F., et al., (2012) Cell 150(5):883-894.
[0763] 16. Lee, H. S., et al., (2015) Nat Commun 6: 10154.
[0764] 17. Hu B, Zhong L, Weng Y, Peng L, Huang Y, Zhao Y, Liang X J. Signal Transduct Target Ther (2020) June 19; 5(1):101.

1. A double stranded ribonucleic acid (dsRNA) targeting Mucin-5B (MUC5B), wherein the dsRNA comprises a sense strand and an antisense strand forming a double stranded region, wherein the antisense strand comprises a region of complementarity to an mRNA encoding MUC5B, and wherein the antisense strand comprises a nucleotide sequence selected from SEQ ID NOs: 178-354, wherein the sense and/or antisense strand comprises at least one modification.

2. The dsRNA of claim 1, wherein the sense strand comprises a nucleotide sequence selected from SEQ ID NOs: 1-177.

3. The dsRNA of claim 1, wherein the sense and antisense strands are selected from any one of the sense and antisense pairs in Table 2 or Table 3.

4. A double stranded ribonucleic acid (dsRNA) targeting Mucin-5B (MUC5B), wherein the dsRNA comprises a sense strand and an antisense strand forming a double stranded region, wherein the sense and/or antisense strand comprises at least one modification, and wherein:
a. the antisense strand comprises a region of complementarity to an mRNA encoding MUC5B, and wherein the antisense strand comprises a nucleotide sequence differing in sequence by no more than 1 nucleotide from any one of SEQ ID NOs: 179-192, 194-328, and 332-354;
b. the antisense strand comprises a nucleotide sequence comprising at least 22 contiguous nucleotides differing in sequence by no more than 1 nucleotide from any one of SEO ID NOs: 179-187, 189, 190, 192, 194-200, 202, 204-311, 313, 315-328, 332-334, and 336-35;
c. the antisense strand comprises a nucleotide sequence comprising at least 21 contiguous nucleotides differing in sequence by no more than 1 nucleotide from any one of SEO ID NOs: 181-187, 189, 190, 192, 194-200, 202, 204-229, 231-243, 246-310, 313, 315-328, 333-334, and 336-354;
d. the antisense strand comprises a nucleotide sequence comprising at least 20 contiguous nucleotides differing in sequence by no more than 1 nucleotide from any one of SEO ID NOs: 181-187, 190, 192, 194-200, 205-210, 212-229.231-242, 246-249, 253-258, 260-266, 268-285, 287, 289-294, 296, 298-310, 315-328, 333-334, 336-346, 348, and 350-354;
e. the antisense strand comprises a nucleotide sequence comprising at least 19 contiguous nucleotides differing in sequence by no more than 1 nucleotide from any one of SEO ID NOs: 181-187, 190, 192, 194-200, 205-210, 213, 215-228, 231-237, 239-242, 246-248, 253-258, 261-266, 268-269, 271, 273-285, 287, 289-294, 296, 298-303, 305-310, 315-328, 334, 336-338, 340-346, 348, and 350-354;
f. the antisense strand comprises a nucleotide sequence comprising at least 18 contiguous nucleotides differing in sequence by no more than 1 nucleotide from any one of SEO ID NOs: 181-187, 190, 192, 194-197, 205-210, 213, 215-228, 231-237, 239-242, 253-254, 261-266, 268-269, 271, 273-281, 283-285, 290, 292-294, 298-303, 305-310, 315-322, 324, 326-328, 334, 336-338, 340-346, and 351-354;
g. the antisense strand comprises a nucleotide sequence comprising at least 17 contiguous nucleotides differing in sequence by no more than 1 nucleotide from any one of SEO ID NOs: 181-187, 190, 192, 194-197, 205-210, 215-228, 232, 234-237, 239-242, 253-254, 261-266, 268-269, 274, 276-278, 284-285, 290, 292-294, 298-303, 305-310, 315-322, 324, 326-328, 334, 336-338, 341-346, and 351-354;
h. the antisense strand comprises a nucleotide sequence comprising at least 16 contiguous nucleotides differing in sequence by no more than 1 nucleotide from any one of SEO ID NOs: 181, 183-187, 190, 192, 194-197, 207-210, 215-228, 232, 234-237, 239-242, 253-254, 261-266, 268-269, 274, 276-278, 284-285, 293, 299, 301-303, 305-307, 315-321, 327, 334, 336-338, 341-346, and 351-354
i. the antisense strand comprises a nucleotide sequence comprising at least 15 contiguous nucleotides differing in sequence by no more than 1 nucleotide from any one of SEO ID NOs: 181, 183-187, 190, 192, 194-197, 207-210, 215-222, 224, 226-228, 234-237, 240-242, 253-254, 261-266, 268-269, 276-278, 284-285, 293, 299, 301-303, 315-317, 319, 321, 327, 334, 336-338, 341-346, and 351-354;
j. the antisense strand comprises a nucleotide sequence comprising at least 15 contiguous nucleotides differing in sequence by no more than 2 nucleotides from any one of SEO ID NOs: 185-187, 192, 194, 207-210, 216-222, 224, 226-228, 235-237, 240-242, 253-254, 261-266, 268-269, 276-278, 284-285, 301-303, 315-317, 319, 321, 334, 336-338, 341-346, and 352-354; or
k. the antisense strand comprises a nucleotide sequence comprising at least 15 contiguous nucleotides differing in sequence by no more than 3 nucleotides from any one of SEO ID NOs: 186-187, 192, 194, 208, 216-222, 226-228, 236, 240-242, 253-254, 268-269, 276-278, 284-285, 301-303, 316, 334, 336-338, 341-346, and 352-354.

5.-27. (canceled)

28. A double stranded ribonucleic acid (dsRNA) targeting Mucin-5B (MUC5B), wherein the dsRNA comprises a sense strand and an antisense strand forming a double stranded region, wherein the antisense strand comprises a region of complementarity to an mRNA encoding MUC5B, wherein
a. the sense strand comprises the nucleotide sequence of SEQ ID NO: 1, and the antisense strand comprises the nucleotide sequence of SEQ ID NO: 178;
b. the sense strand comprises a nucleotide sequence comprising at least 20 contiguous nucleotides differing in sequence by no more than 1 nucleotide from SEQ ID NO: 2, and the antisense strand comprises a nucleotide sequence comprising at least 22 contiguous nucleotides differing in sequence by no more than 1 nucleotide from SEQ ID NO: 179;
c. the sense strand comprises a nucleotide sequence comprising at least 20 contiguous nucleotides differing in sequence by no more than 1 nucleotide from any one of SEQ ID NO: 3, and the antisense strand comprises a nucleotide sequence comprising at least 22 contiguous nucleotides differing in sequence by no more than 1 nucleotide from SEQ ID NO: 180;
d. the sense strand comprises a nucleotide sequence comprising at least 15 contiguous nucleotides differing in sequence by no more than 1 nucleotide from SEQ ID NO: 5, and the antisense strand comprises a nucleotide sequence comprising at least 17 contiguous nucleotides differing in sequence by no more than 1 nucleotide from SEQ ID NO: 182;
e. the sense strand comprises a nucleotide sequence comprising at least 15 contiguous nucleotides differing in sequence by no more than 3 nucleotides from SEQ ID NO: 4, and the antisense strand comprises a nucleotide sequence comprising at least 15 contiguous nucleotides differing in sequence by no more than 1 nucleotide from SEQ ID NO: 181;
f. the sense strand comprises a nucleotide sequence comprising at least 15 contiguous nucleotides differing in sequence by no more than 3 nucleotides from SEQ ID NO: 6, and the antisense strand comprises a nucleotide sequence comprising at least 15 contiguous nucleotides differing in sequence by no more than 1 nucleotide from SEQ ID NO: 183;
g. the sense strand comprises a nucleotide sequence comprising at least 15 contiguous nucleotides differing in sequence by no more than 3 nucleotides from SEQ ID NO: 7, and the antisense strand comprises a nucleotide sequence comprising at least 15 contiguous nucleotides differing in sequence by no more than 1 nucleotide from SEQ ID NO: 184;
h. the sense strand comprises a nucleotide sequence comprising at least 15 contiguous nucleotides differing in sequence by no more than 3 nucleotides from SEQ ID NO: 8, and the antisense strand comprises a nucleotide sequence comprising at least 15 contiguous nucleotides differing in sequence by no more than 2 nucleotides from SEQ ID NOs: 185;
i. the sense strand comprises a nucleotide sequence comprising at least 15 contiguous nucleotides differing in sequence by no more than 3 nucleotides from SEQ ID NO: 9, and the antisense strand comprises a nucleotide sequence comprising at least 15 contiguous nucleotides differing in sequence by no more than 3 nucleotides from SEQ ID NO: 186;
j. the sense strand comprises a nucleotide sequence comprising at least 15 contiguous nucleotides differing in sequence by no more than 3 nucleotides from SEQ ID NO: 10, and the antisense strand comprises a nucleotide sequence comprising at least 15 contiguous nucleotides differing in sequence by no more than 3 nucleotides from SEQ ID NO: 187;
k. the antisense strand comprises a nucleotide sequence selected from any one of SEQ ID NOs: 18,793-36,683, and the sense strand comprises a nucleotide sequence selected from any one of SEQ ID NOs: 902-18,792;
l. the antisense strand comprises a nucleotide sequence selected from any one of SEQ ID NOs: 54,575-72,465, and the sense strand comprises a nucleotide sequence selected from any one of SEQ ID NOs: 36,684-54,574; or
m. the antisense strand comprises a nucleotide sequence selected from any one of SEQ ID NOs: 90,357-108,247, and the sense strand comprises a nucleotide sequence selected from any one of SEQ ID NOs: 72,466-90,356.

29. (canceled)

30. The dsRNA of claim 1, wherein each of the sense strand and/or the antisense strand:
a. is conjugated to one or more lipophilic moieties; and/or
b. is packaged in a lipid nanoparticle (LNP).

31.-32. (canceled)

33. The dsRNA of claim 1, wherein
a. at least 1, 2, 3, 4, 5, 6, 7, 8, 9, 10, 11, 12, 13, 14, 15, 16, 17, 18, 19, or 20 nucleotides of the sense strand are modified; and/or
b. at least 1, 2, 3, 4, 5, 6, 7, 8, 9, 10, 11, 12, 13, 14, 15, 16, 17, 18, 19, or 20 nucleotides of the antisense strand are modified; or
c. each nucleotide in the sense strand is modified; and/or
d. each nucleotide in the antisense strand is modified.

34.-38. (canceled)

39. The dsRNA of claim 1, wherein the dsRNA comprises at least one modification, wherein the modification comprises a 2′O-methyl, a 2′fluoro, or a phosphorothioate linkage, or a combination of a 2′O-methyl or 2′fluoro and a phosphorothioate linkage.

40.-44. (canceled)

45. The dsRNA of claim 1, wherein the dsRNA is a small-interfering RNA (siRNA).

46. A double stranded ribonucleic acid (dsRNA) targeting Mucin-5B (MUC5B), wherein the dsRNA comprises a sense strand and an antisense strand forming a double stranded region, wherein the antisense strand comprises a region of complementarity to an mRNA encoding MUC5B, and wherein
a. the antisense strand comprises a nucleotide sequence selected from SEQ ID NOs: 535, 538, 540, 541, 533, 536, or 186,538-186,624;
b. the sense strand comprises a nucleotide sequence selected from SEO ID NOs: 356, 358, 359, 361, 363, 364, or 186.502-186.537; and/or
c. the sense and antisense strands are selected from any one of the sense and antisense pairs in Table 9.

47.-48. (canceled)

49. The dsRNA of claim 46, wherein:
a. the sense strand comprises the nucleotide sequence of SEQ ID NO: 358, and the antisense strand comprises the nucleotide sequence of SEQ ID NO: 186,538;
b. the sense strand comprises the nucleotide sequence of SEQ ID NO: 358, and the antisense strand comprises the nucleotide sequence of SEQ ID NO: 186,539;
c. the sense strand comprises the nucleotide sequence of SEQ ID NO: 358, and the antisense strand comprises the nucleotide sequence of SEQ ID NO: 186,540;
d. the sense strand comprises the nucleotide sequence of SEQ ID NO: 186,502, and the antisense strand comprises the nucleotide sequence of SEQ ID NO: 186,541;
e. the sense strand comprises the nucleotide sequence of SEQ ID NO: 186,503, and the antisense strand comprises the nucleotide sequence of SEQ ID NO: 535;
f. the sense strand comprises the nucleotide sequence of SEQ ID NO: 186,504, and the antisense strand comprises the nucleotide sequence of SEQ ID NO: 535;
g. the sense strand comprises the nucleotide sequence of SEQ ID NO: 186,505, and the antisense strand comprises the nucleotide sequence of SEQ ID NO: 535;
h. the sense strand comprises the nucleotide sequence of SEQ ID NO: 186,506, and the antisense strand comprises the nucleotide sequence of SEQ ID NO: 186,542;
i. the sense strand comprises the nucleotide sequence of SEQ ID NO: 186,507, and the antisense strand comprises the nucleotide sequence of SEQ ID NO: 186,543;
j. the sense strand comprises the nucleotide sequence of SEQ ID NO: 358, and the antisense strand comprises the nucleotide sequence of SEQ ID NO: 186,544;
k. the sense strand comprises the nucleotide sequence of SEQ ID NO: 358, and the antisense strand comprises the nucleotide sequence of SEQ ID NO: 186,545;
l. the sense strand comprises the nucleotide sequence of SEQ ID NO: 358, and the antisense strand comprises the nucleotide sequence of SEQ ID NO: 186,546;
m. the sense strand comprises the nucleotide sequence of SEQ ID NO: 358, and the antisense strand comprises the nucleotide sequence of SEQ ID NO: 186,547;
n. the sense strand comprises the nucleotide sequence of SEQ ID NO: 186,507, and the antisense strand comprises the nucleotide sequence of SEQ ID NO: 186,548;
o. the sense strand comprises the nucleotide sequence of SEQ ID NO: 186,507, and the antisense strand comprises the nucleotide sequence of SEQ ID NO: 186,549;
p. the sense strand comprises the nucleotide sequence of SEQ ID NO: 186,508, and the antisense strand comprises the nucleotide sequence of SEQ ID NO: 186,550;
q. the sense strand comprises the nucleotide sequence of SEQ ID NO: 186,508, and the antisense strand comprises the nucleotide sequence of SEQ ID NO: 186,551;
r. the sense strand comprises the nucleotide sequence of SEQ ID NO: 358, and the antisense strand comprises the nucleotide sequence of SEQ ID NO: 186,552;
s. the sense strand comprises the nucleotide sequence of SEQ ID NO: 358, and the antisense strand comprises the nucleotide sequence of SEQ ID NO: 186,553;
t. the sense strand comprises the nucleotide sequence of SEQ ID NO: 358, and the antisense strand comprises the nucleotide sequence of SEQ ID NO: 186,554;
u. the sense strand comprises the nucleotide sequence of SEQ ID NO: 358, and the antisense strand comprises the nucleotide sequence of SEQ ID NO: 186,555;
v. the sense strand comprises the nucleotide sequence of SEQ ID NO: 361, and the antisense strand comprises the nucleotide sequence of SEQ ID NO: 186,556;
w. the sense strand comprises the nucleotide sequence of SEQ ID NO: 361, and the antisense strand comprises the nucleotide sequence of SEQ ID NO: 186,557;
x. the sense strand comprises the nucleotide sequence of SEQ ID NO: 361, and the antisense strand comprises the nucleotide sequence of SEQ ID NO: 186,558;
y. the sense strand comprises the nucleotide sequence of SEQ ID NO: 186,509, and the antisense strand comprises the nucleotide sequence of SEQ ID NO: 186,559;
z. the sense strand comprises the nucleotide sequence of SEQ ID NO: 186,510, and the antisense strand comprises the nucleotide sequence of SEQ ID NO: 538;
aa. the sense strand comprises the nucleotide sequence of SEQ ID NO: 186,511, and the antisense strand comprises the nucleotide sequence of SEQ ID NO: 538;
bb. the sense strand comprises the nucleotide sequence of SEQ ID NO: 186,512, and the antisense strand comprises the nucleotide sequence of SEQ ID NO: 538;
cc. the sense strand comprises the nucleotide sequence of SEQ ID NO: 186,513, and the antisense strand comprises the nucleotide sequence of SEQ ID NO: 186,560;
dd. the sense strand comprises the nucleotide sequence of SEQ ID NO: 186,514, and the antisense strand comprises the nucleotide sequence of SEQ ID NO: 186,561;
ee. the sense strand comprises the nucleotide sequence of SEQ ID NO: 361, and the antisense strand comprises the nucleotide sequence of SEQ ID NO: 186,562;
ff. the sense strand comprises the nucleotide sequence of SEQ ID NO: 361, and the antisense strand comprises the nucleotide sequence of SEQ ID NO: 186,563;
gg. the sense strand comprises the nucleotide sequence of SEQ ID NO: 361, and the antisense strand comprises the nucleotide sequence of SEQ ID NO: 186,564;
hh. the sense strand comprises the nucleotide sequence of SEQ ID NO: 361, and the antisense strand comprises the nucleotide sequence of SEQ ID NO: 186,565;
ii. the sense strand comprises the nucleotide sequence of SEQ ID NO: 186,514, and the antisense strand comprises the nucleotide sequence of SEQ ID NO: 186,566;
jj. the sense strand comprises the nucleotide sequence of SEQ ID NO: 186,514, and the antisense strand comprises the nucleotide sequence of SEQ ID NO: 186,567;
kk. the sense strand comprises the nucleotide sequence of SEQ ID NO: 186,515, and the antisense strand comprises the nucleotide sequence of SEQ ID NO: 186,568;
ll. the sense strand comprises the nucleotide sequence of SEQ ID NO: 186,515, and the antisense strand comprises the nucleotide sequence of SEQ ID NO: 186,569;
mm. the sense strand comprises the nucleotide sequence of SEQ ID NO: 361, and the antisense strand comprises the nucleotide sequence of SEQ ID NO: 186,570;
nn. the sense strand comprises the nucleotide sequence of SEQ ID NO: 361, and the antisense strand comprises the nucleotide sequence of SEQ ID NO: 186,571;
oo. the sense strand comprises the nucleotide sequence of SEQ ID NO: 361, and the antisense strand comprises the nucleotide sequence of SEQ ID NO: 186,572;
pp. the sense strand comprises the nucleotide sequence of SEQ ID NO: 361, and the antisense strand comprises the nucleotide sequence of SEQ ID NO: 186,573;
qq. the sense strand comprises the nucleotide sequence of SEQ ID NO: 363, and the antisense strand comprises the nucleotide sequence of SEQ ID NO: 186,574;
rr. the sense strand comprises the nucleotide sequence of SEQ ID NO: 363, and the antisense strand comprises the nucleotide sequence of SEQ ID NO: 186,575;
ss. the sense strand comprises the nucleotide sequence of SEQ ID NO: 363, and the antisense strand comprises the nucleotide sequence of SEQ ID NO: 186,576;
tt. the sense strand comprises the nucleotide sequence of SEQ ID NO: 186,516, and the antisense strand comprises the nucleotide sequence of SEQ ID NO: 540;
uu. the sense strand comprises the nucleotide sequence of SEQ ID NO: 186,517, and the antisense strand comprises the nucleotide sequence of SEQ ID NO: 540;
vv. the sense strand comprises the nucleotide sequence of SEQ ID NO: 186,518, and the antisense strand comprises the nucleotide sequence of SEQ ID NO: 540;
ww. the sense strand comprises the nucleotide sequence of SEQ ID NO: 186,519, and the antisense strand comprises the nucleotide sequence of SEQ ID NO: 540;
xx. the sense strand comprises the nucleotide sequence of SEQ ID NO: 186,520, and the antisense strand comprises the nucleotide sequence of SEQ ID NO: 186,577;
yy. the sense strand comprises the nucleotide sequence of SEQ ID NO: 363, and the antisense strand comprises the nucleotide sequence of SEQ ID NO: 186,578;
zz. the sense strand comprises the nucleotide sequence of SEQ ID NO: 363, and the antisense strand comprises the nucleotide sequence of SEQ ID NO: 186,579;
aaa. the sense strand comprises the nucleotide sequence of SEQ ID NO: 363, and the antisense strand comprises the nucleotide sequence of SEQ ID NO: 186,580;
bbb. the sense strand comprises the nucleotide sequence of SEQ ID NO: 363, and the antisense strand comprises the nucleotide sequence of SEQ ID NO: 186,581;
ccc. the sense strand comprises the nucleotide sequence of SEQ ID NO: 363, and the antisense strand comprises the nucleotide sequence of SEQ ID NO: 186,582 (usAfscga(C3)auccaugGfaCfuuguasgsu);
ddd. the sense strand comprises the nucleotide sequence of SEQ ID NO: 363, and the antisense strand comprises the nucleotide sequence of SEQ ID NO: 186,583;
eee. the sense strand comprises the nucleotide sequence of SEQ ID NO: 363, and the antisense strand comprises the nucleotide sequence of SEQ ID NO: 186,584;
fff. the sense strand comprises the nucleotide sequence of SEQ ID NO: 364, and the antisense strand comprises the nucleotide sequence of SEQ ID NO: 186,585;
ggg. the sense strand comprises the nucleotide sequence of SEQ ID NO: 364, and the antisense strand comprises the nucleotide sequence of SEQ ID NO: 186,586;
hhh. the sense strand comprises the nucleotide sequence of SEQ ID NO: 364, and the antisense strand comprises the nucleotide sequence of SEQ ID NO: 186,587;
iii. the sense strand comprises the nucleotide sequence of SEQ ID NO: 186,521, and the antisense strand comprises the nucleotide sequence of SEQ ID NO: 186,588;
jjj. the sense strand comprises the nucleotide sequence of SEQ ID NO: 186,522, and the antisense strand comprises the nucleotide sequence of SEQ ID NO: 541;
kkk. the sense strand comprises the nucleotide sequence of SEQ ID NO: 186,523, and the antisense strand comprises the nucleotide sequence of SEQ ID NO: 541;
lll. the sense strand comprises the nucleotide sequence of SEQ ID NO: 186,524, and the antisense strand comprises the nucleotide sequence of SEQ ID NO: 541;
mmm. the sense strand comprises the nucleotide sequence of SEQ ID NO: 186,525, and the antisense strand comprises the nucleotide sequence of SEQ ID NO: 186,589;
nnn. the sense strand comprises the nucleotide sequence of SEQ ID NO: 186,526, and the antisense strand comprises the nucleotide sequence of SEQ ID NO: 186,590;
ooo. the sense strand comprises the nucleotide sequence of SEQ ID NO: 364, and the antisense strand comprises the nucleotide sequence of SEQ ID NO: 186,591;
ppp. the sense strand comprises the nucleotide sequence of SEQ ID NO: 364, and the antisense strand comprises the nucleotide sequence of SEQ ID NO: 186,592;
qqq. the sense strand comprises the nucleotide sequence of SEQ ID NO: 364, and the antisense strand comprises the nucleotide sequence of SEQ ID NO: 186,593;
rrr. the sense strand comprises the nucleotide sequence of SEQ ID NO: 364, and the antisense strand comprises the nucleotide sequence of SEQ ID NO: 186,594;
sss. the sense strand comprises the nucleotide sequence of SEQ ID NO: 186,526, and the antisense strand comprises the nucleotide sequence of SEQ ID NO: 186,595;
ttt. the sense strand comprises the nucleotide sequence of SEQ ID NO: 186,526, and the antisense strand comprises the nucleotide sequence of SEQ ID NO: 186,596;
uuu. the sense strand comprises the nucleotide sequence of SEQ ID NO: 186,527, and the antisense strand comprises the nucleotide sequence of SEQ ID NO: 186,597;
vvv. the sense strand comprises the nucleotide sequence of SEQ ID NO: 186,527, and the antisense strand comprises the nucleotide sequence of SEQ ID NO: 186,598;
www. the sense strand comprises the nucleotide sequence of SEQ ID NO: 364, and the antisense strand comprises the nucleotide sequence of SEQ ID NO: 186,599;
xxx. the sense strand comprises the nucleotide sequence of SEQ ID NO: 364, and the antisense strand comprises the nucleotide sequence of SEQ ID NO: 186,600;
yyy. the sense strand comprises the nucleotide sequence of SEQ ID NO: 364, and the antisense strand comprises the nucleotide sequence of SEQ ID NO: 186,601;
zzz. the sense strand comprises the nucleotide sequence of SEQ ID NO: 364, and the antisense strand comprises the nucleotide sequence of SEQ ID NO: 186,602;
aaaa. the sense strand comprises the nucleotide sequence of SEQ ID NO: 356, and the antisense strand comprises the nucleotide sequence of SEQ ID NO: 186,603;
bbbb. the sense strand comprises the nucleotide sequence of SEQ ID NO: 356, and the antisense strand comprises the nucleotide sequence of SEQ ID NO: 186,604;
cccc. the sense strand comprises the nucleotide sequence of SEQ ID NO: 356, and the antisense strand comprises the nucleotide sequence of SEQ ID NO: 186,605;
dddd. the sense strand comprises the nucleotide sequence of SEQ ID NO: 186,528, and the antisense strand comprises the nucleotide sequence of SEQ ID NO: 533;
eeee. the sense strand comprises the nucleotide sequence of SEQ ID NO: 186,529, and the antisense strand comprises the nucleotide sequence of SEQ ID NO: 533;
ffff. the sense strand comprises the nucleotide sequence of SEQ ID NO: 186,530, and the antisense strand comprises the nucleotide sequence of SEQ ID NO: 533;
gggg. the sense strand comprises the nucleotide sequence of SEQ ID NO: 186,531, and the antisense strand comprises the nucleotide sequence of SEQ ID NO: 533;
hhhh. the sense strand comprises the nucleotide sequence of SEQ ID NO: 186,532, and the antisense strand comprises the nucleotide sequence of SEQ ID NO: 186,606;
iiii. the sense strand comprises the nucleotide sequence of SEQ ID NO: 356, and the antisense strand comprises the nucleotide sequence of SEQ ID NO: 186,607;
jjjj. the sense strand comprises the nucleotide sequence of SEQ ID NO: 356, and the antisense strand comprises the nucleotide sequence of SEQ ID NO: 186,608;
kkkk. the sense strand comprises the nucleotide sequence of SEQ ID NO: 356, and the antisense strand comprises the nucleotide sequence of SEQ ID NO: 186,609;
llll. the sense strand comprises the nucleotide sequence of SEQ ID NO: 356, and the antisense strand comprises the nucleotide sequence of SEQ ID NO: 186,610;
mmmm. the sense strand comprises the nucleotide sequence of SEQ ID NO: 356, and the antisense strand comprises the nucleotide sequence of SEQ ID NO: 186,611 (usAfsccg(C3)aauuuggUfcAfaacagsgsa);
nnnn. the sense strand comprises the nucleotide sequence of SEQ ID NO: 356, and the antisense strand comprises the nucleotide sequence of SEQ ID NO: 186,612;
oooo. the sense strand comprises the nucleotide sequence of SEQ ID NO: 356, and the antisense strand comprises the nucleotide sequence of SEQ ID NO: 186,613;
pppp. the sense strand comprises the nucleotide sequence of SEQ ID NO: 359, and the antisense strand comprises the nucleotide sequence of SEQ ID NO: 186,614;
qqqq. the sense strand comprises the nucleotide sequence of SEQ ID NO: 359, and the antisense strand comprises the nucleotide sequence of SEQ ID NO: 186,615;
rrrr. the sense strand comprises the nucleotide sequence of SEQ ID NO: 359, and the antisense strand comprises the nucleotide sequence of SEQ ID NO: 186,616;
ssss. the sense strand comprises the nucleotide sequence of SEQ ID NO: 186,533, and the antisense strand comprises the nucleotide sequence of SEQ ID NO: 536;
tttt. the sense strand comprises the nucleotide sequence of SEQ ID NO: 186,534, and the antisense strand comprises the nucleotide sequence of SEQ ID NO: 536;
uuuu. the sense strand comprises the nucleotide sequence of SEQ ID NO: 186,535, and the antisense strand comprises the nucleotide sequence of SEQ ID NO: 536;
vvvv. the sense strand comprises the nucleotide sequence of SEQ ID NO: 186,536, and the antisense strand comprises the nucleotide sequence of SEQ ID NO: 536;
wwww. the sense strand comprises the nucleotide sequence of SEQ ID NO: 186,537, and the antisense strand comprises the nucleotide sequence of SEQ ID NO: 186,617;
xxxx. the sense strand comprises the nucleotide sequence of SEQ ID NO: 359, and the antisense strand comprises the nucleotide sequence of SEQ ID NO: 186,618;
yyyy. the sense strand comprises the nucleotide sequence of SEQ ID NO: 359, and the antisense strand comprises the nucleotide sequence of SEQ ID NO: 186,619;
zzzz. the sense strand comprises the nucleotide sequence of SEQ ID NO: 359, and the antisense strand comprises the nucleotide sequence of SEQ ID NO: 186,620;
aaaaa. the sense strand comprises the nucleotide sequence of SEQ ID NO: 359, and the antisense strand comprises the nucleotide sequence of SEQ ID NO: 186,621;
bbbbb. the sense strand comprises the nucleotide sequence of SEQ ID NO: 359, and the antisense strand comprises the nucleotide sequence of SEQ ID NO: 186,622 (usAfsgug(C3)cggguggAfaCfaaagcsusc);
ccccc. the sense strand comprises the nucleotide sequence of SEQ ID NO: 359, and the antisense strand comprises the nucleotide sequence of SEQ ID NO: 186,623; or
ddddd. the sense strand comprises the nucleotide sequence of SEQ ID NO: 359, and the antisense strand comprises the nucleotide sequence of SEQ ID NO: 186,624.

50. The dsRNA of claim 49, wherein:
a. the sense strand comprises the nucleotide sequence of SEQ ID NO: 186,507, and the antisense strand comprises the nucleotide sequence of SEQ ID NO: 186,543;
b. the sense strand comprises the nucleotide sequence of SEQ ID NO: 186,512, and the antisense strand comprises the nucleotide sequence of SEQ ID NO: 538;
c. the sense strand comprises the nucleotide sequence of SEQ ID NO: 186,514, and the antisense strand comprises the nucleotide sequence of SEQ ID NO: 186,561;
d. the sense strand comprises the nucleotide sequence of SEQ ID NO: 361, and the antisense strand comprises the nucleotide sequence of SEQ ID NO: 186,562;
e. the sense strand comprises the nucleotide sequence of SEQ ID NO: 361, and the antisense strand comprises the nucleotide sequence of SEQ ID NO: 186,563;
f. the sense strand comprises the nucleotide sequence of SEQ ID NO: 364, and the antisense strand comprises the nucleotide sequence of SEQ ID NO: 186,593;
g. the sense strand comprises the nucleotide sequence of SEQ ID NO: 364, and the antisense strand comprises the nucleotide sequence of SEQ ID NO: 186,600;
h. the sense strand comprises the nucleotide sequence of SEQ ID NO: 356, and the antisense strand comprises the nucleotide sequence of SEQ ID NO: 186,603;
i. the sense strand comprises the nucleotide sequence of SEQ ID NO: 356, and the antisense strand comprises the nucleotide sequence of SEQ ID NO: 186,605;
j. the sense strand comprises the nucleotide sequence of SEQ ID NO: 186,532, and the antisense strand comprises the nucleotide sequence of SEQ ID NO: 186,606;
k. the sense strand comprises the nucleotide sequence of SEQ ID NO: 356, and the antisense strand comprises the nucleotide sequence of SEQ ID NO: 186,607;
l. the sense strand comprises the nucleotide sequence of SEQ ID NO: 359, and the antisense strand comprises the nucleotide sequence of SEQ ID NO: 186,614;
m. the sense strand comprises the nucleotide sequence of SEQ ID NO: 186,536, and the antisense strand comprises the nucleotide sequence of SEQ ID NO: 536; or
n. the sense strand comprises the nucleotide sequence of SEQ ID NO: 186,537, and the antisense strand comprises the nucleotide sequence of SEQ ID NO: 186,617.

51. The dsRNA of claim 46, wherein the dsRNA has any one or more of the following characteristics compared to the corresponding unmodified dsRNA or to the dsRNA sequence used as the starting dsRNA:
a. Improved efficacy;
b. Improved potency;
c. Improved stability; and/or
d. Reduced off-target effects.

52. (canceled)

53. The dsRNA of claim 46, wherein each of the sense strand and/or the antisense strand:
a. is conjugated to one or more lipophilic moieties; and/or
b. is packaged in a lipid nanoparticle (LNP).

54. (canceled)

55. A synthetic antisense oligonucleotide (ASO) targeting MUC5B, wherein the oligonucleotide comprises a nucleotide sequence:
a. having at least 90% nucleotide sequence identity to any one of SEQ ID NOs: 709-802;
b. comprising at least 15, 16, or 17 contiguous nucleotides differing in sequence by no more than 3 nucleotides from any one of SEQ ID NO: 709-802;
c. comprising at least 15, 16, or 17 contiguous nucleotides differing in sequence by no more than 3 nucleotides from any one of SEQ ID NO: 803-896; or
d. comprising at least 15, 16, or 17 contiguous nucleotides differing in sequence by no more than 3 nucleotides from any one of SEQ ID NO: 147,339-186,429.

56.-59. (canceled)

60. The dsRNA of claim 1, or the synthetic antisense oligonucleotide of claim 57, wherein at least one of the nucleotides is modified, wherein the modification is selected from a deoxy-nucleotide, a 3′-terminal deoxy-thymine (dT) nucleotide, a 2′-O-methyl modified nucleotide (2′-OMe), a 2′-fluoro modified nucleotide (2′-F), a 2′-deoxy-modified nucleotide, a locked nucleotide, an unlocked nucleotide, a conformationally restricted nucleotide, a constrained ethyl nucleotide, an abasic nucleotide, a 2′-amino-modified nucleotide, a 2′-O-allyl-modified nucleotide, 2′-C-alkyl-modified nucleotide, a 2′-methoxyethyl modified nucleotide, a 2′-O-alkyl-modified nucleotide, a morpholino nucleotide, a phosphoramidate, a non-natural base comprising nucleotide, a tetrahydropyran modified nucleotide, a 1,5-anhydrohexitol modified nucleotide, a cyclohexenyl modified nucleotide, a nucleotide comprising a 5′-phosphorothioate group, a phosphorothioate linkage, a nucleotide comprising a 5′-methylphosphonate group, a nucleotide comprising a 5′ phosphate or 5′ phosphate mimic, a nucleotide comprising vinyl phosphonate, a nucleotide comprising adenosine-glycol nucleic acid (GNA), a nucleotide comprising thymidine-glycol nucleic acid (GNA) S-Isomer, a nucleotide comprising 2-hydroxymethyl-tetrahydrofurane-5-phosphate, a nucleotide comprising 2′-deoxythymidine-3′ phosphate, a nucleotide comprising 2′-deoxyguanosine-3′-phosphate, a 2′-0 hexadecyl nucleotide, a nucleotide comprising a 2′-phosphate, a cytidine-2′-phosphate nucleotide, a guanosine-2′-phosphate nucleotide, a 2′-O-hexadecyl-cytidine-3′-phosphate nucleotide, a 2′-O-hexadecyl-adenosine-3′-phosphate nucleotide, a 2′-O-hexadecyl-guanosine-3′-phosphate nucleotide, a 2′-O-hexadecyl-uridine-3′-phosphate nucleotide, a 5′-vinyl phosphonate (VP/(e.g., (vin-u)), a 2′-deoxyadenosine-3′-phosphate nucleotide, a 2′-deoxycytidine-3′-phosphate nucleotide, a 2′-deoxyguanosine-3′-phosphate nucleotide, a 2′-deoxythymidine-3′-phosphate nucleotide, a 2′-deoxyuridine nucleotide, a terminal nucleotide linked to a cholesteryl derivative, a dodecanoic acid bisdecylamide group and a C3 spacer; and combinations thereof.

61.-69. (canceled)

70. A pharmaceutical composition comprising the dsRNA of claim 1, further comprising a lipid delivery vehicle, wherein the lipid delivery vehicle is a lipid nanoparticle (LNP) comprising one or more of a cationic lipid, a non-cationic lipid, a cholesterol-based lipid, a PEG-modified lipid, an amphiphilic block copolymer and/or a polymer, or a combination thereof.

71.-72. (canceled)

73. A vector comprising one or more of the dsRNA of claim 1.

74. A cell containing the dsRNA of claim 1.

75.-76. (canceled)

77. A device for inhalation administration comprising the dsRNA of claim 1.

78. (canceled)

79. A method of inhibiting expression of a MUC5B gene in a cell, the method comprising: contacting the cell with the dsRNA of claim 1.

80.-82. (canceled)

83. A method for treating a human subject having a lung disease or a subject at risk of developing a lung disease, comprising administering to the subject in need thereof a therapeutically effective amount of the dsRNA of claim 1.

84.-91. (canceled)

The application's sequence listing, which the Patent Office published only in electronic form, follows.

SEQUENCE LISTING (186624 sequences)

SEQ ID NO: 1 - RNA, 21 nt, synthetic construct
  source 1..21: mol_type = other RNA
cagctacgttctgtccaagaa

SEQ ID NO: 2 - RNA, 21 nt, synthetic construct
  source 1..21: mol_type = other RNA
ctgtttgaccaaattccggta

SEQ ID NO: 3 - RNA, 21 nt, synthetic construct
  source 1..21: mol_type = other RNA
cgtgagctttgttccacccga

SEQ ID NO: 4 - RNA, 19 nt, synthetic construct
  source 1..19: mol_type = other RNA
aaatccgtgtgttctgcta

SEQ ID NO: 5 - RNA, 21 nt, synthetic construct
  source 1..21: mol_type = other RNA
gctttgttccacccgtcacta

SEQ ID NO: 6 - RNA, 19 nt, synthetic construct
  source 1..19: mol_type = other RNA
cactatgagtgcgagtgca

SEQ ID NO: 7 - RNA, 21 nt, synthetic construct
  source 1..21: mol_type = other RNA
tgaaatccgtgtgttctgcta

SEQ ID NO: 8 - RNA, 21 nt, synthetic construct
  source 1..21: mol_type = other RNA
acctttgacggcacctcttaa

SEQ ID NO: 9 - RNA, 21 nt, synthetic construct
  source 1..21: mol_type = other RNA
tacaagtccatggatatcgta

SEQ ID NO: 10 - RNA, 21 nt, synthetic construct
  source 1..21: mol_type = other RNA
caagtccatggatatcgtcca

SEQ ID NO: 11 - RNA, 21 nt, synthetic construct
  source 1..21: mol_type = other RNA
gttgggccaggtcgtggaata

SEQ ID NO: 12 - RNA, 21 nt, synthetic construct
  source 1..21: mol_type = other RNA
gccaggtcgtggaatgcagca

SEQ ID NO: 13 - RNA, 21 nt, synthetic construct
  source 1..21: mol_type = other RNA
tgaaatccgtgtgttctgcta

SEQ ID NO: 14 - RNA, 21 nt, synthetic construct
  source 1..21: mol_type = other RNA
tgttctgctgcaactacggca

SEQ ID NO: 15 - RNA, 21 nt, synthetic construct
  source 1..21: mol_type = other RNA
cctccactccggggacgacca

SEQ ID NO: 16 - RNA, 21 nt, synthetic construct
  source 1..21: mol_type = other RNA
cagctacgttctgtccaagaa

SEQ ID NO: 17 - RNA, 21 nt, synthetic construct
  source 1..21: mol_type = other RNA
gcacggtggccaggtgcgtga

SEQ ID NO: 18 - RNA, 21 nt, synthetic construct
  source 1..21: mol_type = other RNA
gccaggtgcgtgggtgacaaa

SEQ ID NO: 19 - RNA, 19 nt, synthetic construct
  source 1..19: mol_type = other RNA
caggtgcgtgggtgacaaa

SEQ ID NO: 20 - RNA, 21 nt, synthetic construct
  source 1..21: mol_type = other RNA
gccaggtgcgtgggtgacaaa

SEQ ID NO: 21 - RNA, 21 nt, synthetic construct
  source 1..21: mol_type = other RNA
gtcacctgcgtgaacaagcaa

SEQ ID NO: 22 - RNA, 19 nt, synthetic construct
  source 1..19: mol_type = other RNA
cacctgcgtgaacaagcaa

SEQ ID NO: 23 - RNA, 21 nt, synthetic construct
  source 1..21: mol_type = other RNA
gtcacctgcgtgaacaagcaa

SEQ ID NO: 24 - RNA, 21 nt, synthetic construct
  source 1..21: mol_type = other RNA
gtgacttccactatgagtgca

SEQ ID NO: 25 - RNA, 19 nt, synthetic construct
  source 1..19: mol_type = other RNA
gacttccactatgagtgca

SEQ ID NO: 26 - RNA, 21 nt, synthetic construct
  source 1..21: mol_type = other RNA
gtgacttccactatgagtgca

SEQ ID NO: 27 - RNA, 21 nt, synthetic construct
  source 1..21: mol_type = other RNA
gacttccactatgagtgcgaa

SEQ ID NO: 28 - RNA, 21 nt, synthetic construct
  source 1..21: mol_type = other RNA
tccactatgagtgcgagtgca

SEQ ID NO: 29 - RNA, 21 nt, synthetic construct
  source 1..21: mol_type = other RNA
tccactatgagtgcgagtgca

SEQ ID NO: 30 - RNA, 21 nt, synthetic construct
  source 1..21: mol_type = other RNA
actatgagtgcgagtgcatca

SEQ ID NO: 31 - RNA, 19 nt, synthetic construct
  source 1..19: mol_type = other RNA
tatgagtgcgagtgcatca

SEQ ID NO: 32 - RNA, 21 nt, synthetic construct
  source 1..21: mol_type = other RNA
actatgagtgcgagtgcatca

SEQ ID NO: 33 - RNA, 21 nt, synthetic construct
  source 1..21: mol_type = other RNA
ctatgagtgcgagtgcatcta

SEQ ID NO: 34 - RNA, 21 nt, synthetic construct
  source 1..21: mol_type = other RNA
ctattccacctttgacggcaa

SEQ ID NO: 35 - RNA, 21 nt, synthetic construct
  source 1..21: mol_type = other RNA
tattccacctttgacggcaca

SEQ ID NO: 36 - RNA, 19 nt, synthetic construct
  source 1..19: mol_type = other RNA
ttccacctttgacggcaca

SEQ ID NO: 37 - RNA, 21 nt, synthetic construct
  source 1..21: mol_type = other RNA
tattccacctttgacggcaca

SEQ ID NO: 38 - RNA, 21 nt, synthetic construct
  source 1..21: mol_type = other RNA
cacctttgacggcacctctta

SEQ ID NO: 39 - RNA, 21 nt, synthetic construct
  source 1..21: mol_type = other RNA
cctttgacggcacctcttaca

SEQ ID NO: 40 - RNA, 19 nt, synthetic construct
  source 1..19: mol_type = other RNA
tttgacggcacctcttaca

SEQ ID NO: 41 - RNA, 21 nt, synthetic construct
  source 1..21: mol_type = other RNA
cctttgacggcacctcttaca

SEQ ID NO: 42 - RNA, 21 nt, synthetic construct
  source 1..21: mol_type = other RNA
tttgacggcacctcttacaca

SEQ ID NO: 43 - RNA, 19 nt, synthetic construct
  source 1..19: mol_type = other RNA
tgacggcacctcttacaca

SEQ ID NO: 44 - RNA, 21 nt, synthetic construct
  source 1..21: mol_type = other RNA
tttgacggcacctcttacaca

SEQ ID NO: 45 - RNA, 21 nt, synthetic construct
  source 1..21: mol_type = other RNA
ttgacggcacctcttacacca

SEQ ID NO: 46 - RNA, 21 nt, synthetic construct
  source 1..21: mol_type = other RNA
cactacaagtccatggatata

SEQ ID NO: 47 - RNA, 19 nt, synthetic construct
  source 1..19: mol_type = other RNA
ctacaagtccatggatata

SEQ ID NO: 48 - RNA, 21 nt, synthetic construct
  source 1..21: mol_type = other RNA
cactacaagtccatggatata

SEQ ID NO: 49 - RNA, 21 nt, synthetic construct
  source 1..21: mol_type = other RNA
caagtccatggatatcgtcca

SEQ ID NO: 50 - RNA, 19 nt, synthetic construct
  source 1..19: mol_type = other RNA
agtccatggatatcgtcca

SEQ ID NO: 51 - RNA, 21 nt, synthetic construct
  source 1..21: mol_type = other RNA
aagtccatggatatcgtccta

SEQ ID NO: 52 - RNA, 19 nt, synthetic construct
  source 1..19: mol_type = other RNA
gtttgaccaaattccggta

SEQ ID NO: 53 - RNA, 21 nt, synthetic construct
  source 1..21: mol_type = other RNA
ctgtttgaccaaattccggta

SEQ ID NO: 54 - RNA, 21 nt, synthetic construct
  source 1..21: mol_type = other RNA
ttgaccaaattccggtgagca

SEQ ID NO: 55 - RNA, 19 nt, synthetic construct
  source 1..19: mol_type = other RNA
gaccaaattccggtgagca

SEQ ID NO: 56 - RNA, 21 nt, synthetic construct
  source 1..21: mol_type = other RNA
ttgaccaaattccggtgagca

SEQ ID NO: 57 - RNA, 21 nt, synthetic construct
  source 1..21: mol_type = other RNA
accaaattccggtgagcagca

SEQ ID NO: 58 - RNA, 21 nt, synthetic construct
  source 1..21: mol_type = other RNA
ccaaattccggtgagcagcga

SEQ ID NO: 59 - RNA, 19 nt, synthetic construct
  source 1..19: mol_type = other RNA
aaattccggtgagcagcga

SEQ ID NO: 60 - RNA, 21 nt, synthetic construct
  source 1..21: mol_type = other RNA
ccaaattccggtgagcagcga

SEQ ID NO: 61 - RNA, 21 nt, synthetic construct
  source 1..21: mol_type = other RNA
tttcagcaagaacggcgtgca

SEQ ID NO: 62 - RNA, 21 nt, synthetic construct
  source 1..21: mol_type = other RNA
agcaagaacggcgtgcttgta

SEQ ID NO: 63 - RNA, 21 nt, synthetic construct
  source 1..21: mol_type = other RNA
agaacggcgtgcttgtgtcta

SEQ ID NO: 64 - RNA, 19 nt, synthetic construct
  source 1..19: mol_type = other RNA
aacggcgtgcttgtgtcta

SEQ ID NO: 65 - RNA, 21 nt, synthetic construct
  source 1..21: mol_type = other RNA
agaacggcgtgcttgtgtcta

SEQ ID NO: 66 - RNA, 21 nt, synthetic construct
  source 1..21: mol_type = other RNA
caactccatctacacgcagca

SEQ ID NO: 67 - RNA, 21 nt, synthetic construct
  source 1..21: mol_type = other RNA
ctcttccacaacaacaccgaa

SEQ ID NO: 68 - RNA, 21 nt, synthetic construct
  source 1..21: mol_type = other RNA
accaacaaccagagggacgaa

SEQ ID NO: 69 - RNA, 21 nt, synthetic construct
  source 1..21: mol_type = other RNA
caccctcgagcttcttcatca

SEQ ID NO: 70 - RNA, 19 nt, synthetic construct
  source 1..19: mol_type = other RNA
ccctcgagcttcttcatca

SEQ ID NO: 71 - RNA, 21 nt, synthetic construct
  source 1..21: mol_type = other RNA
caccctcgagcttcttcatca

SEQ ID NO: 72 - RNA, 21 nt, synthetic construct
  source 1..21: mol_type = other RNA
accctcgagcttcttcatcga

SEQ ID NO: 73 - RNA, 21 nt, synthetic construct
  source 1..21: mol_type = other RNA
ccctcgagcttcttcatcgta

SEQ ID NO: 74 - RNA, 19 nt, synthetic construct
  source 1..19: mol_type = other RNA
ctcgagcttcttcatcgta

SEQ ID NO: 75 - RNA, 21 nt, synthetic construct
  source 1..21: mol_type = other RNA
ccctcgagcttcttcatcgta

SEQ ID NO: 76 - RNA, 21 nt, synthetic construct
  source 1..21: mol_type = other RNA
agcctcaggaaaaccggctga

SEQ ID NO: 77 - RNA, 21 nt, synthetic construct
  source 1..21: mol_type = other RNA
gatgagtgtggctgcacgcca

SEQ ID NO: 78 - RNA, 21 nt, synthetic construct
  source 1..21: mol_type = other RNA
ccagaaccaggctgacgacta

SEQ ID NO: 79 - RNA, 21 nt, synthetic construct
  source 1..21: mol_type = other RNA
ggcgcagccttcgccaacaca

SEQ ID NO: 80 - RNA, 19 nt, synthetic construct
  source 1..19: mol_type = other RNA
cgcagccttcgccaacaca

SEQ ID NO: 81 - RNA, 21 nt, synthetic construct
  source 1..21: mol_type = other RNA
ggcgcagccttcgccaacaca

SEQ ID NO: 82 - RNA, 21 nt, synthetic construct
  source 1..21: mol_type = other RNA
agaatgagaactacgcccgga

SEQ ID NO: 83 - RNA, 21 nt, synthetic construct
  source 1..21: mol_type = other RNA
gaatgagaactacgcccggca

SEQ ID NO: 84 - RNA, 21 nt, synthetic construct
  source 1..21: mol_type = other RNA
acggcgtctgcaccaagtaca

SEQ ID NO: 85 - RNA, 19 nt, synthetic construct
  source 1..19: mol_type = other RNA
ggcgtctgcaccaagtaca

SEQ ID NO: 86 - RNA, 21 nt, synthetic construct
  source 1..21: mol_type = other RNA
acggcgtctgcaccaagtaca

SEQ ID NO: 87 - RNA, 21 nt, synthetic construct
  source 1..21: mol_type = other RNA
cggcgtctgcaccaagtacaa

SEQ ID NO: 88 - RNA, 19 nt, synthetic construct
  source 1..19: mol_type = other RNA
gcgtctgcaccaagtacaa

SEQ ID NO: 89 - RNA, 21 nt, synthetic construct
  source 1..21: mol_type = other RNA
cggcgtctgcaccaagtacaa

SEQ ID NO: 90 - RNA, 21 nt, synthetic construct
  source 1..21: mol_type = other RNA
gtgagctttgttccacccgta

SEQ ID NO: 91 - RNA, 21 nt, synthetic construct
  source 1..21: mol_type = other RNA
ggcctgagtgaggccgacgta

SEQ ID NO: 92 - RNA, 21 nt, synthetic construct
  source 1..21: mol_type = other RNA
gcctgagtgaggccgacgtca

SEQ ID NO: 93 - RNA, 21 nt, synthetic construct
  source 1..21: mol_type = other RNA
ttcctcaatgacgcgggcgca

SEQ ID NO: 94 - RNA, 19 nt, synthetic construct
  source 1..19: mol_type = other RNA
cctcaatgacgcgggcgca

SEQ ID NO: 95 - RNA, 21 nt, synthetic construct
  source 1..21: mol_type = other RNA
ttcctcaatgacgcgggcgca

SEQ ID NO: 96 - RNA, 21 nt, synthetic construct
  source 1..21: mol_type = other RNA
cctcaatgacgcgggcgccta

SEQ ID NO: 97 - RNA, 19 nt, synthetic construct
  source 1..19: mol_type = other RNA
tcaatgacgcgggcgccta

SEQ ID NO: 98 - RNA, 21 nt, synthetic construct
  source 1..21: mol_type = other RNA
cctcaatgacgcgggcgccta

SEQ ID NO: 99 - RNA, 21 nt, synthetic construct
  source 1..21: mol_type = other RNA
tcacggcaccgtgctggctca

SEQ ID NO: 100 - RNA, 19 nt, synthetic construct
  source 1..19: mol_type = other RNA
acggcaccgtgctggctca

SEQ ID NO: 101 - RNA, 21 nt, synthetic construct
  source 1..21: mol_type = other RNA
tcacggcaccgtgctggctca

SEQ ID NO: 102 - RNA, 21 nt, synthetic construct
  source 1..21: mol_type = other RNA
gacgtgggctgtttcagcaca

SEQ ID NO: 103 - RNA, 19 nt, synthetic construct
  source 1..19: mol_type = other RNA
cgtgggctgtttcagcaca

SEQ ID NO: 104 - RNA, 21 nt, synthetic construct
  source 1..21: mol_type = other RNA
gacgtgggctgtttcagcaca

SEQ ID NO: 105 - RNA, 21 nt, synthetic construct
  source 1..21: mol_type = other RNA
cggggatggccacttcatcaa

SEQ ID NO: 106 - RNA, 21 nt, synthetic construct
  source 1..21: mol_type = other RNA
cgggaccttccgcatcgtcaa

SEQ ID NO: 107 - RNA, 21 nt, synthetic construct
  source 1..21: mol_type = other RNA
ccgagaacatcccctgtggga

SEQ ID NO: 108 - RNA, 21 nt, synthetic construct
  source 1..21: mol_type = other RNA
ggccgtgtcctgggaccggaa

SEQ ID NO: 109 - RNA, 21 nt, synthetic construct
  source 1..21: mol_type = other RNA
gtgttcatccgactgcaccaa

SEQ ID NO: 110 - RNA, 19 nt, synthetic construct
  source 1..19: mol_type = other RNA
gttcatccgactgcaccaa

SEQ ID NO: 111 - RNA, 21 nt, synthetic construct
  source 1..21: mol_type = other RNA
gtgttcatccgactgcaccaa

SEQ ID NO: 112 - RNA, 21 nt, synthetic construct
  source 1..21: mol_type = other RNA
gttcatccgactgcaccagga

SEQ ID NO: 113 - RNA, 19 nt, synthetic construct
  source 1..19: mol_type = other RNA
tcatccgactgcaccagga

SEQ ID NO: 114 - RNA, 21 nt, synthetic construct
  source 1..21: mol_type = other RNA
gttcatccgactgcaccagga

SEQ ID NO: 115 - RNA, 21 nt, synthetic construct
  source 1..21: mol_type = other RNA
tcatccgactgcaccaggaca

SEQ ID NO: 116 - RNA, 19 nt, synthetic construct
  source 1..19: mol_type = other RNA
atccgactgcaccaggaca

SEQ ID NO: 117 - RNA, 21 nt, synthetic construct
  source 1..21: mol_type = other RNA
tcatccgactgcaccaggaca

SEQ ID NO: 118 - RNA, 21 nt, synthetic construct
  source 1..21: mol_type = other RNA
gttgactccaccaagtactaa

SEQ ID NO: 119 - RNA, 19 nt, synthetic construct
  source 1..19: mol_type = other RNA
tgactccaccaagtactaa

SEQ ID NO: 120 - RNA, 21 nt, synthetic construct
  source 1..21: mol_type = other RNA
gttgactccaccaagtactaa

SEQ ID NO: 121 - RNA, 21 nt, synthetic construct
  source 1..21: mol_type = other RNA
actccaccaagtactacgaga

SEQ ID NO: 122 - RNA, 19 nt, synthetic construct
  source 1..19: mol_type = other RNA
tccaccaagtactacgaga

SEQ ID NO: 123 - RNA, 21 nt, synthetic construct
  source 1..21: mol_type = other RNA
actccaccaagtactacgaga

SEQ ID NO: 124 - RNA, 21 nt, synthetic construct
  source 1..21: mol_type = other RNA
gccggaaccccagtgggcaca

SEQ ID NO: 125 - RNA, 19 nt, synthetic construct
  source 1..19: mol_type = other RNA
cggaaccccagtgggcaca

SEQ ID NO: 126 - RNA, 21 nt, synthetic construct
  source 1..21: mol_type = other RNA
gccggaaccccagtgggcaca

SEQ ID NO: 127 - RNA, 21 nt, synthetic construct
  source 1..21: mol_type = other RNA
gatgaagtgcgtggcccagta

SEQ ID NO: 128 - RNA, 21 nt, synthetic construct
  source 1..21: mol_type = other RNA
gagaactgccagagctgtaaa

SEQ ID NO: 129 - RNA, 19 nt, synthetic construct
  source 1..19: mol_type = other RNA
gaactgccagagctgtaaa

SEQ ID NO: 130 - RNA, 21 nt, synthetic construct
  source 1..21: mol_type = other RNA
gagaactgccagagctgtaaa

SEQ ID NO: 131 - RNA, 21 nt, synthetic construct
  source 1..21: mol_type = other RNA
agaactgccagagctgtaaca

SEQ ID NO: 132 - RNA, 19 nt, synthetic construct
  source 1..19: mol_type = other RNA
aactgccagagctgtaaca

SEQ ID NO: 133 - RNA, 21 nt, synthetic construct
  source 1..21: mol_type = other RNA
agaactgccagagctgtaaca

SEQ ID NO: 134 - RNA, 21 nt, synthetic construct
  source 1..21: mol_type = other RNA
acctatgaggacaggacctaa

SEQ ID NO: 135 - RNA, 21 nt, synthetic construct
  source 1..21: mol_type = other RNA
ggacgtcatctacaacaccaa

SEQ ID NO: 136 - RNA, 19 nt, synthetic construct
  source 1..19: mol_type = other RNA
acgtcatctacaacaccaa

SEQ ID NO: 137 - RNA, 21 nt, synthetic construct
  source 1..21: mol_type = other RNA
ggacgtcatctacaacaccaa

SEQ ID NO: 138 - RNA, 21 nt, synthetic construct
  source 1..21: mol_type = other RNA
tgtccgcgaggtctgccgcta

SEQ ID NO: 139 - RNA, 19 nt, synthetic construct
  source 1..19: mol_type = other RNA
tccgcgaggtctgccgcta

SEQ ID NO: 140 - RNA, 21 nt, synthetic construct
  source 1..21: mol_type = other RNA
tgtccgcgaggtctgccgcta

SEQ ID NO: 141 - RNA, 21 nt, synthetic construct
  source 1..21: mol_type = other RNA
cgaatacgtgccctgtggcca

SEQ ID NO: 142 - RNA, 19 nt, synthetic construct
  source 1..19: mol_type = other RNA
aatacgtgccctgtggcca

SEQ ID NO: 143 - RNA, 21 nt, synthetic construct
  source 1..21: mol_type = other RNA
cgaatacgtgccctgtggcca

SEQ ID NO: 144 - RNA, 21 nt, synthetic construct
  source 1..21: mol_type = other RNA
gaggactaccccaagtctgaa

SEQ ID NO: 145 - RNA, 21 nt, synthetic construct
  source 1..21: mol_type = other RNA
gactaccccaagtctgaacaa

SEQ ID NO: 146 - RNA, 21 nt, synthetic construct
  source 1..21: mol_type = other RNA
tgaacaacttggaggggacga

SEQ ID NO: 147 - RNA, 19 nt, synthetic construct
  source 1..19: mol_type = other RNA
aacaacttggaggggacga

SEQ ID NO: 148 - RNA, 21 nt, synthetic construct
  source 1..21: mol_type = other RNA
tgaacaacttggaggggacga

SEQ ID NO: 149 - RNA, 21 nt, synthetic construct
  source 1..21: mol_type = other RNA
aacaacttggaggggacgtta

SEQ ID NO: 150 - RNA, 19 nt, synthetic construct
  source 1..19: mol_type = other RNA
caacttggaggggacgtta

SEQ ID NO: 151 - RNA, 21 nt, synthetic construct
  source 1..21: mol_type = other RNA
aacaacttggaggggacgtta

SEQ ID NO: 152 - RNA, 21 nt, synthetic construct
  source 1..21: mol_type = other RNA
ggacgttgagtcctacgataa

SEQ ID NO: 153 - RNA, 21 nt, synthetic construct
  source 1..21: mol_type = other RNA
ggacgttgagtcctacgataa

SEQ ID NO: 154 - RNA, 21 nt, synthetic construct
  source 1..21: mol_type = other RNA
acgttgagtcctacgataaga

SEQ ID NO: 155 - RNA, 21 nt, synthetic construct
  source 1..21: mol_type = other RNA
agtcctacgataagatcagga

SEQ ID NO: 156 - RNA, 21 nt, synthetic construct
  source 1..21: mol_type = other RNA
tgtgctacaactacaggatca

SEQ ID NO: 157 - RNA, 21 nt, synthetic construct
  source 1..21: mol_type = other RNA
aactacaggatccgggtccta

SEQ ID NO: 158 - RNA, 21 nt, synthetic construct
  source 1..21: mol_type = other RNA
agctgccttacagccgcacta

SEQ ID NO: 159 - RNA, 21 nt, synthetic construct
  source 1..21: mol_type = other RNA
cgctgaccacgagcctggcga

SEQ ID NO: 160 - RNA, 19 nt, synthetic construct
  source 1..19: mol_type = other RNA
ctgaccacgagcctggcga

SEQ ID NO: 161 - RNA, 21 nt, synthetic construct
  source 1..21: mol_type = other RNA
cgctgaccacgagcctggcga

SEQ ID NO: 162 - RNA, 21 nt, synthetic construct
  source 1..21: mol_type = other RNA
gtggacagagtggtttgacga

SEQ ID NO: 163 - RNA, 21 nt, synthetic construct
  source 1..21: mol_type = other RNA
cgggagttgggccaggtcgta

SEQ ID NO: 164 - RNA, 21 nt, synthetic construct
  source 1..21: mol_type = other RNA
ctgaccccgctccagtttgga

SEQ ID NO: 165 - RNA, 19 nt, synthetic construct
  source 1..19: mol_type = other RNA
gaccccgctccagtttgga

SEQ ID NO: 166 - RNA, 21 nt, synthetic construct
  source 1..21: mol_type = other RNA
ctgaccccgctccagtttgga

SEQ ID NO: 167 - RNA, 21 nt, synthetic construct
  source 1..21: mol_type = other RNA
accccgctccagtttgggaaa

SEQ ID NO: 168 - RNA, 19 nt, synthetic construct
  source 1..19: mol_type = other RNA
cccgctccagtttgggaaa

SEQ ID NO: 169 - RNA, 21 nt, synthetic construct
  source 1..21: mol_type = other RNA
accccgctccagtttgggaaa

SEQ ID NO: 170 - RNA, 21 nt, synthetic construct
  source 1..21: mol_type = other RNA
cctttgtggaatactcacgca

SEQ ID NO: 171 - RNA, 19 nt, synthetic construct
  source 1..19: mol_type = other RNA
tttgtggaatactcacgca

SEQ ID NO: 172 - RNA, 21 nt, synthetic construct
  source 1..21: mol_type = other RNA
cctttgtggaatactcacgca

SEQ ID NO: 173 - RNA, 21 nt, synthetic construct
  source 1..21: mol_type = other RNA
tttgtggaatactcacgccaa

SEQ ID NO: 174 - RNA, 21 nt, synthetic construct
  source 1..21: mol_type = other RNA
tggaatactcacgccagtgca

SEQ ID NO: 175 - RNA, 21 nt, synthetic construct
  source 1..21: mol_type = other RNA
actcacgccagtgcgcccaca

SEQ ID NO: 176 - RNA, 19 nt, synthetic construct
  source 1..19: mol_type = other RNA
tcacgccagtgcgcccaca

SEQ ID NO: 177 - RNA, 21 nt, synthetic construct
  source 1..21: mol_type = other RNA
actcacgccagtgcgcccaca

SEQ ID NO: 178 - RNA, 23 nt, synthetic construct
  source 1..23: mol_type = other RNA
  modified_base 1: mod_base = OTHER; note = Thymine
ttcttggacagaacgtagctgca

SEQ ID NO: 179 - RNA, 23 nt, synthetic construct
  source 1..23: mol_type = other RNA
taccggaatttggtcaaacagga

SEQ ID NO: 180 - RNA, 23 nt, synthetic construct
  source 1..23: mol_type = other RNA
tcgggtggaacaaagctcacgcg

SEQ ID NO: 181 - RNA, 21 nt, synthetic construct
  source 1..21: mol_type = other RNA
  modified_base 1: mod_base = OTHER; note = Thymine
tagcagaacacacggatttca

SEQ ID NO: 182 - RNA, 23 nt, synthetic construct
  source 1..23: mol_type = other RNA
tagtgacgggtggaacaaagctc

SEQ ID NO: 183 - RNA, 21 nt, synthetic construct
  source 1..21: mol_type = other RNA
  modified_base 1: mod_base = OTHER; note = Thymine
tgcactcgcactcatagtgga

SEQ ID NO: 184 - RNA, 23 nt, synthetic construct
  source 1..23: mol_type = other RNA
  modified_base 1: mod_base = OTHER; note = Thymine
tagcagaacacacggatttcata

SEQ ID NO: 185 - RNA, 23 nt, synthetic construct
  source 1..23: mol_type = other RNA
ttaagaggtgccgtcaaaggtgg

SEQ ID NO: 186 - RNA, 23 nt, synthetic construct
  source 1..23: mol_type = other RNA
tacgatatccatggacttgtagt

SEQ ID NO: 187 - RNA, 23 nt, synthetic construct
  source 1..23: mol_type = other RNA
  modified_base 1: mod_base = OTHER; note = Thymine
tggacgatatccatggacttgta

SEQ ID NO: 188 - RNA, 23 nt, synthetic construct
  source 1..23: mol_type = other RNA
tattccacgacctggcccaactc

SEQ ID NO: 189 - RNA, 23 nt, synthetic construct
  source 1..23: mol_type = other RNA
tgctgcattccacgacctggccc

SEQ ID NO: 190 - RNA, 23 nt, synthetic construct
  source 1..23: mol_type = other RNA
tagcagaacacacggatttcata

SEQ ID NO: 191 - RNA, 23 nt, synthetic construct
  source 1..23: mol_type = other RNA
tgccgtagttgcagcagaacaca

SEQ ID NO: 192 - RNA, 23 nt, synthetic construct
  source 1..23: mol_type = other RNA
tggtcgtccccggagtggaggag

SEQ ID NO: 193 - RNA, 23 nt, synthetic construct
  source 1..23: mol_type = other RNA
ttcttggacagaacgtagctgca

SEQ ID NO: 194 - RNA, 23 nt, synthetic construct
  source 1..23: mol_type = other RNA
tcacgcacctggccaccgtgcag

SEQ ID NO: 195 - RNA, 23 nt, synthetic construct
  source 1..23: mol_type = other RNA
tttgtcacccacgcacctggcca

SEQ ID NO: 196 - RNA, 21 nt, synthetic construct
  source 1..21: mol_type = other RNA
  modified_base 1: mod_base = OTHER; note = Thymine
tttgtcacccacgcacctggc

SEQ ID NO: 197 - RNA, 23 nt, synthetic construct
  source 1..23: mol_type = other RNA
  modified_base 1: mod_base = OTHER; note = Thymine
tttgtcacccacgcacctggcca

SEQ ID NO: 198 - RNA, 23 nt, synthetic construct
  source 1..23: mol_type = other RNA
ttgcttgttcacgcaggtgacgt

SEQ ID NO: 199 - RNA, 21 nt, synthetic construct
  source 1..21: mol_type = other RNA
  modified_base 1: mod_base = OTHER; note = Thymine
ttgcttgttcacgcaggtgac

SEQ ID NO: 200 - RNA, 23 nt, synthetic construct
  source 1..23: mol_type = other RNA
  modified_base 1: mod_base = OTHER; note = Thymine
ttgcttgttcacgcaggtgacgt

SEQ ID NO: 201 - RNA, 23 nt, synthetic construct
  source 1..23: mol_type = other RNA
tgcactcatagtggaagtcacag

SEQ ID NO: 202 - RNA, 21 nt, synthetic construct
  source 1..21: mol_type = other RNA
  modified_base 1: mod_base = OTHER; note = Thymine
tgcactcatagtggaagtcac

SEQ ID NO: 203 - RNA, 23 nt, synthetic construct
  source 1..23: mol_type = other RNA
  modified_base 1: mod_base = OTHER; note = Thymine
tgcactcatagtggaagtcacag

SEQ ID NO: 204 - RNA, 23 nt, synthetic construct
  source 1..23: mol_type = other RNA
ttcgcactcatagtggaagtcac

SEQ ID NO: 205 - RNA, 23 nt, synthetic construct
  source 1..23: mol_type = other RNA
tgcactcgcactcatagtggaag

SEQ ID NO: 206 - RNA, 23 nt, synthetic construct
  source 1..23: mol_type = other RNA
  modified_base 1: mod_base = OTHER; note = Thymine
tgcactcgcactcatagtggaag

SEQ ID NO: 207 - RNA, 23 nt, synthetic construct
  source 1..23: mol_type = other RNA
tgatgcactcgcactcatagtgg

SEQ ID NO: 208 - RNA, 21 nt, synthetic construct
  source 1..21: mol_type = other RNA
  modified_base 1: mod_base = OTHER; note = Thymine
tgatgcactcgcactcatagt

SEQ ID NO: 209 - RNA, 23 nt, synthetic construct
  source 1..23: mol_type = other RNA
  modified_base 1: mod_base = OTHER; note = Thymine
tgatgcactcgcactcatagtgg

SEQ ID NO: 210 - RNA, 23 nt, synthetic construct
  source 1..23: mol_type = other RNA
tagatgcactcgcactcatagtg

SEQ ID NO: 211 - RNA, 23 nt, synthetic construct
  source 1..23: mol_type = other RNA
ttgccgtcaaaggtggaatagtg

SEQ ID NO: 212 - RNA, 23 nt, synthetic construct
  source 1..23: mol_type = other RNA
tgtgccgtcaaaggtggaatagt

SEQ ID NO: 213 - RNA, 21 nt, synthetic construct
  source 1..21: mol_type = other RNA
  modified_base 1: mod_base = OTHER; note = Thymine
tgtgccgtcaaaggtggaata

SEQ ID NO: 214 - RNA, 23 nt, synthetic construct
  source 1..23: mol_type = other RNA
  modified_base 1: mod_base = OTHER; note = Thymine
tgtgccgtcaaaggtggaatagt

SEQ ID NO: 215 - RNA, 23 nt, synthetic construct
  source 1..23: mol_type = other RNA
taagaggtgccgtcaaaggtgga

SEQ ID NO: 216 - RNA, 23 nt, synthetic construct
  source 1..23: mol_type = other RNA
tgtaagaggtgccgtcaaaggtg

SEQ ID NO: 217 - RNA, 21 nt, synthetic construct
  source 1..21: mol_type = other RNA
  modified_base 1: mod_base = OTHER; note = Thymine
tgtaagaggtgccgtcaaagg

SEQ ID NO: 218 - RNA, 23 nt, synthetic construct
  source 1..23: mol_type = other RNA
  modified_base 1: mod_base = OTHER; note = Thymine
tgtaagaggtgccgtcaaaggtg

SEQ ID NO: 219 - RNA, 23 nt, synthetic construct
  source 1..23: mol_type = other RNA
tgtgtaagaggtgccgtcaaagg

SEQ ID NO: 220 - RNA, 21 nt, synthetic construct
  source 1..21: mol_type = other RNA
  modified_base 1: mod_base = OTHER; note = Thymine
tgtgtaagaggtgccgtcaaa

SEQ ID NO: 221 - RNA, 23 nt, synthetic construct
  source 1..23: mol_type = other RNA
  modified_base 1: mod_base = OTHER; note = Thymine
tgtgtaagaggtgccgtcaaagg

SEQ ID NO: 222 - RNA, 23 nt, synthetic construct
  source 1..23: mol_type = other RNA
tggtgtaagaggtgccgtcaaag

SEQ ID NO: 223 - RNA, 23 nt, synthetic construct
  source 1..23: mol_type = other RNA
tatatccatggacttgtagtgga

SEQ ID NO: 224 - RNA, 21 nt, synthetic construct
  source 1..21: mol_type = other RNA
  modified_base 1: mod_base = OTHER; note = Thymine
tatatccatggacttgtagtg

SEQ ID NO: 225 - RNA, 23 nt, synthetic construct
  source 1..23: mol_type = other RNA
  modified_base 1: mod_base = OTHER; note = Thymine
tatatccatggacttgtagtgga

SEQ ID NO: 226 - RNA, 23 nt, synthetic construct
  source 1..23: mol_type = other RNA
tggacgatatccatggacttgta

SEQ ID NO: 227 - RNA, 21 nt, synthetic construct
  source 1..21: mol_type = other RNA
  modified_base 1: mod_base = OTHER; note = Thymine
tggacgatatccatggacttg

SEQ ID NO: 228 - RNA, 23 nt, synthetic construct
  source 1..23: mol_type = other RNA
taggacgatatccatggacttgt

SEQ ID NO: 229 - RNA, 21 nt, synthetic construct
  source 1..21: mol_type = other RNA
  modified_base 1: mod_base = OTHER; note = Thymine
taccggaatttggtcaaacag

SEQ ID NO: 230 - RNA, 23 nt, synthetic construct
  source 1..23: mol_type = other RNA
  modified_base 1: mod_base = OTHER; note = Thymine
taccggaatttggtcaaacagga

SEQ ID NO: 231 - RNA, 23 nt, synthetic construct
  source 1..23: mol_type = other RNA
tgctcaccggaatttggtcaaac

SEQ ID NO: 232 - RNA, 21 nt, synthetic construct
  source 1..21: mol_type = other RNA
  modified_base 1: mod_base = OTHER; note = Thymine
tgctcaccggaatttggtcaa

SEQ ID NO: 233 - RNA, 23 nt, synthetic construct
  source 1..23: mol_type = other RNA
  modified_base 1: mod_base = OTHER; note = Thymine
tgctcaccggaatttggtcaaac

SEQ ID NO: 234 - RNA, 23 nt, synthetic construct
  source 1..23: mol_type = other RNA
tgctgctcaccggaatttggtca

SEQ ID NO: 235 - RNA, 23 nt, synthetic construct
  source 1..23: mol_type = other RNA
tcgctgctcaccggaatttggtc

SEQ ID NO: 236 - RNA, 21 nt, synthetic construct
  source 1..21: mol_type = other RNA
  modified_base 1: mod_base = OTHER; note = Thymine
tcgctgctcaccggaatttgg

SEQ ID NO: 237 - RNA, 23 nt, synthetic construct
  source 1..23: mol_type = other RNA
  modified_base 1: mod_base = OTHER; note = Thymine
tcgctgctcaccggaatttggtc

SEQ ID NO: 238 - RNA, 23 nt, synthetic construct
  source 1..23: mol_type = other RNA
tgcacgccgttcttgctgaaacc

SEQ ID NO: 239 - RNA, 23 nt, synthetic construct
  source 1..23: mol_type = other RNA
tacaagcacgccgttcttgctga

SEQ ID NO: 240 - RNA, 23 nt, synthetic construct
  source 1..23: mol_type = other RNA
tagacacaagcacgccgttcttg

SEQ ID NO: 241 - RNA, 21 nt, synthetic construct
  source 1..21: mol_type = other RNA
  modified_base 1: mod_base = OTHER; note = Thymine
tagacacaagcacgccgttct

SEQ ID NO: 242 - RNA, 23 nt, synthetic construct
  source 1..23: mol_type = other RNA
  modified_base 1: mod_base = OTHER; note = Thymine
tagacacaagcacgccgttcttg

SEQ ID NO: 243 - RNA, 23 nt, synthetic construct
  source 1..23: mol_type = other RNA
tgctgcgtgtagatggagttgag

SEQ ID NO: 244 - RNA, 23 nt, synthetic construct
  source 1..23: mol_type = other RNA
ttcggtgttgttgtggaagaggc

SEQ ID NO: 245 - RNA, 23 nt, synthetic construct
  source 1..23: mol_type = other RNA
ttcgtccctctggttgttggtgc

SEQ ID NO: 246 - RNA, 23 nt, synthetic construct
  source 1..23: mol_type = other RNA
tgatgaagaagctcgagggtgtg

SEQ ID NO: 247 - RNA, 21 nt, synthetic construct
  source 1..21: mol_type = other RNA
  modified_base 1: mod_base = OTHER; note = Thymine
tgatgaagaagctcgagggtg

SEQ ID NO: 248 - RNA, 23 nt, synthetic construct
  source 1..23: mol_type = other RNA
  modified_base 1: mod_base = OTHER; note = Thymine
tgatgaagaagctcgagggtgtg

SEQ ID NO: 249 - RNA, 23 nt, synthetic construct
  source 1..23: mol_type = other RNA
tcgatgaagaagctcgagggtgt

SEQ ID NO: 250 - RNA, 23 nt, synthetic construct
  source 1..23: mol_type = other RNA
tacgatgaagaagctcgagggtg

SEQ ID NO: 251 - RNA, 21 nt, synthetic construct
  source 1..21: mol_type = other RNA
  modified_base 1: mod_base = OTHER; note = Thymine
tacgatgaagaagctcgaggg

SEQ ID NO: 252 - RNA, 23 nt, synthetic construct
  source 1..23: mol_type = other RNA
  modified_base 1: mod_base = OTHER; note = Thymine
tacgatgaagaagctcgagggtg

SEQ ID NO: 253 - RNA, 23 nt, synthetic construct
  source 1..23: mol_type = other RNA
tcagccggttttcctgaggctcc

SEQ ID NO: 254 - RNA, 23 nt, synthetic construct
  source 1..23: mol_type = other RNA
tggcgtgcagccacactcatcca

SEQ ID NO: 255 - RNA, 23 nt, synthetic construct
  source 1..23: mol_type = other RNA
tagtcgtcagcctggttctggtt

SEQ ID NO: 256 - RNA, 23 nt, synthetic construct
  source 1..23: mol_type = other RNA
tgtgttggcgaaggctgcgcccg

SEQ ID NO: 257 - RNA, 21 nt, synthetic construct
  source 1..21: mol_type = other RNA
  modified_base 1: mod_base = OTHER; note = Thymine
tgtgttggcgaaggctgcgcc

SEQ ID NO: 258 - RNA, 23 nt, synthetic construct
  source 1..23: mol_type = other RNA
  modified_base 1: mod_base = OTHER; note = Thymine
tgtgttggcgaaggctgcgcccg

SEQ ID NO: 259 - RNA, 23 nt, synthetic construct
  source 1..23: mol_type = other RNA
tccgggcgtagttctcattctcc

SEQ ID NO: 260 - RNA, 23 nt, synthetic construct
  source 1..23: mol_type = other RNA
tgccgggcgtagttctcattctc

SEQ ID NO: 261 - RNA, 23 nt, synthetic construct
  source 1..23: mol_type = other RNA
tgtacttggtgcagacgccgtcc

SEQ ID NO: 262 - RNA, 21 nt, synthetic construct
  source 1..21: mol_type = other RNA
  modified_base 1: mod_base = OTHER; note = Thymine
tgtacttggtgcagacgccgt

SEQ ID NO: 263 - RNA, 23 nt, synthetic construct
  source 1..23: mol_type = other RNA
  modified_base 1: mod_base = OTHER; note = Thymine
tgtacttggtgcagacgccgtcc

SEQ ID NO: 264 - RNA, 23 nt, synthetic construct
  source 1..23: mol_type = other RNA
ttgtacttggtgcagacgccgtc

SEQ ID NO: 265 - RNA, 21 nt, synthetic construct
  source 1..21: mol_type = other RNA
  modified_base 1: mod_base = OTHER; note = Thymine
ttgtacttggtgcagacgccg

SEQ ID NO: 266 - RNA, 23 nt, synthetic construct
  source 1..23: mol_type = other RNA
  modified_base 1: mod_base = OTHER; note = Thymine
ttgtacttggtgcagacgccgtc

SEQ ID NO: 267 - RNA, 23 nt, synthetic construct
  source 1..23: mol_type = other RNA
tacgggtggaacaaagctcacgc

SEQ ID NO: 268 - RNA, 23 nt, synthetic construct
  source 1..23: mol_type = other RNA
tacgtcggcctcactcaggccgc

SEQ ID NO: 269 - RNA, 23 nt, synthetic construct
  source 1..23: mol_type = other RNA
tgacgtcggcctcactcaggccg

SEQ ID NO: 270 - RNA, 23 nt, synthetic construct
  source 1..23: mol_type = other RNA
tgcgcccgcgtcattgaggaagg

SEQ ID NO: 271 - RNA, 21 nt, synthetic construct
  source 1..21: mol_type = other RNA
  modified_base 1: mod_base = OTHER; note = Thymine
tgcgcccgcgtcattgaggaa

SEQ ID NO: 272 - RNA, 23 nt, synthetic construct
  source 1..23: mol_type = other RNA
  modified_base 1: mod_base = OTHER; note = Thymine
tgcgcccgcgtcattgaggaagg

SEQ ID NO: 273 - RNA, 23 nt, synthetic construct
  source 1..23: mol_type = other RNA
taggcgcccgcgtcattgaggaa

SEQ ID NO: 274 - RNA, 21 nt, synthetic construct
  source 1..21: mol_type = other RNA
  modified_base 1: mod_base = OTHER; note = Thymine
taggcgcccgcgtcattgagg

SEQ ID NO: 275 - RNA, 23 nt, synthetic construct
  source 1..23: mol_type = other RNA
  modified_base 1: mod_base = OTHER; note = Thymine
taggcgcccgcgtcattgaggaa

SEQ ID NO: 276 - RNA, 23 nt, synthetic construct
  source 1..23: mol_type = other RNA
tgagccagcacggtgccgtgagc

SEQ ID NO: 277 - RNA, 21 nt, synthetic construct
  source 1..21: mol_type = other RNA
  modified_base 1: mod_base = OTHER; note = Thymine
tgagccagcacggtgccgtga

SEQ ID NO: 278 - RNA, 23 nt, synthetic construct
  source 1..23: mol_type = other RNA
  modified_base 1: mod_base = OTHER; note = Thymine
tgagccagcacggtgccgtgagc

SEQ ID NO: 279 - RNA, 23 nt, synthetic construct
  source 1..23: mol_type = other RNA
tgtgctgaaacagcccacgtcca

SEQ ID NO: 280 - RNA, 21 nt, synthetic construct
  source 1..21: mol_type = other RNA
  modified_base 1: mod_base = OTHER; note = Thymine
tgtgctgaaacagcccacgtc

SEQ ID NO: 281 - RNA, 23 nt, synthetic construct
  source 1..23: mol_type = other RNA
  modified_base 1: mod_base = OTHER; note = Thymine
tgtgctgaaacagcccacgtcca

SEQ ID NO: 282 - RNA, 23 nt, synthetic construct
  source 1..23: mol_type = other RNA
ttgatgaagtggccatccccgta

SEQ ID NO: 283 - RNA, 23 nt, synthetic construct
  source 1..23: mol_type = other RNA
ttgacgatgcggaaggtcccgtg

SEQ ID NO: 284 - RNA, 23 nt, synthetic construct
  source 1..23: mol_type = other RNA
tcccacaggggatgttctcggtg

SEQ ID NO: 285 - RNA, 23 nt, synthetic construct
  source 1..23: mol_type = other RNA
ttccggtcccaggacacggccat

SEQ ID NO: 286 - RNA, 23 nt, synthetic construct
  source 1..23: mol_type = other RNA
ttggtgcagtcggatgaacacgc

SEQ ID NO: 287 - RNA, 21 nt, synthetic construct
  source 1..21: mol_type = other RNA
  modified_base 1: mod_base = OTHER; note = Thymine
ttggtgcagtcggatgaacac

SEQ ID NO: 288 - RNA, 23 nt, synthetic construct
  source 1..23: mol_type = other RNA
  modified_base 1: mod_base = OTHER; note = Thymine
ttggtgcagtcggatgaacacgc

SEQ ID NO: 289 - RNA, 23 nt, synthetic construct
  source 1..23: mol_type = other RNA
tcctggtgcagtcggatgaacac

SEQ ID NO: 290 - RNA, 21 nt, synthetic construct
  source 1..21: mol_type = other RNA
  modified_base 1: mod_base = OTHER; note = Thymine
tcctggtgcagtcggatgaac

SEQ ID NO: 291 - RNA, 23 nt, synthetic construct
  source 1..23: mol_type = other RNA
  modified_base 1: mod_base = OTHER; note = Thymine
tcctggtgcagtcggatgaacac

SEQ ID NO: 292 - RNA, 23 nt, synthetic construct
  source 1..23: mol_type = other RNA
tgtcctggtgcagtcggatgaac

SEQ ID NO: 293 - RNA, 21 nt, synthetic construct
  source 1..21: mol_type = other RNA
  modified_base 1: mod_base = OTHER; note = Thymine
tgtcctggtgcagtcggatga

SEQ ID NO: 294 - RNA, 23 nt, synthetic construct
  source 1..23: mol_type = other RNA
  modified_base 1: mod_base = OTHER; note = Thymine
tgtcctggtgcagtcggatgaac

SEQ ID NO: 295 - RNA, 23 nt, synthetic construct
  source 1..23: mol_type = other RNA
ttagtacttggtggagtcaacct

SEQ ID NO: 296 - RNA, 21 nt, synthetic construct
  source 1..21: mol_type = other RNA
  modified_base 1: mod_base = OTHER; note = Thymine
ttagtacttggtggagtcaac

SEQ ID NO: 297 - RNA, 23 nt, synthetic construct
  source 1..23: mol_type = other RNA
  modified_base 1: mod_base = OTHER; note = Thymine
ttagtacttggtggagtcaacct

SEQ ID NO: 298 - RNA, 23 nt, synthetic construct
  source 1..23: mol_type = other RNA
tctcgtagtacttggtggagtca

SEQ ID NO: 299 - RNA, 21 nt, synthetic construct
  source 1..21: mol_type = other RNA
  modified_base 1: mod_base = OTHER; note = Thymine
tctcgtagtacttggtggagt

SEQ ID NO: 300 - RNA, 23 nt, synthetic construct
  source 1..23: mol_type = other RNA
  modified_base 1: mod_base = OTHER; note = Thymine
tctcgtagtacttggtggagtca

SEQ ID NO: 301 - RNA, 23 nt, synthetic construct
  source 1..23: mol_type = other RNA
tgtgcccactggggttccggcag

SEQ ID NO: 302 - RNA, 21 nt, synthetic construct
  source 1..21: mol_type = other RNA
  modified_base 1: mod_base = OTHER; note = Thymine
tgtgcccactggggttccggc

SEQ ID NO: 303 - RNA, 23 nt, synthetic construct
  source 1..23: mol_type = other RNA
  modified_base 1: mod_base = OTHER; note = Thymine
tgtgcccactggggttccggcag

SEQ ID NO: 304 - RNA, 23 nt, synthetic construct
  source 1..23: mol_type = other RNA
tactgggccacgcacttcatctg

SEQ ID NO: 305 - RNA, 23 nt, synthetic construct
  source 1..23: mol_type = other RNA
tttacagctctggcagttctccg

SEQ ID NO: 306 - RNA, 21 nt, synthetic construct
  source 1..21: mol_type = other RNA
  modified_base 1: mod_base = OTHER; note = Thymine
tttacagctctggcagttctc

SEQ ID NO: 307 - RNA, 23 nt, synthetic construct
  source 1..23: mol_type = other RNA
  modified_base 1: mod_base = OTHER; note = Thymine
tttacagctctggcagttctccg

SEQ ID NO: 308 - RNA, 23 nt, synthetic construct
  source 1..23: mol_type = other RNA
tgttacagctctggcagttctcc

SEQ ID NO: 309 - RNA, 21 nt, synthetic construct
  source 1..21: mol_type = other RNA
  modified_base 1: mod_base = OTHER; note = Thymine
tgttacagctctggcagttct

SEQ ID NO: 310 - RNA, 23 nt, synthetic construct
  source 1..23: mol_type = other RNA
  modified_base 1: mod_base = OTHER; note = Thymine
tgttacagctctggcagttctcc

SEQ ID NO: 311 - RNA, 23 nt, synthetic construct
  source 1..23: mol_type = other RNA
ttaggtcctgtcctcataggtgc

SEQ ID NO: 312 - RNA, 23 nt, synthetic construct
  source 1..23: mol_type = other RNA
ttggtgttgtagatgacgtcctg

SEQ ID NO: 313 - RNA, 21 nt, synthetic construct
  source 1..21: mol_type = other RNA
  modified_base 1: mod_base = OTHER; note = Thymine
ttggtgttgtagatgacgtcc

SEQ ID NO: 314 - RNA, 23 nt, synthetic construct
  source 1..23: mol_type = other RNA
  modified_base 1: mod_base = OTHER; note = Thymine
ttggtgttgtagatgacgtcctg

SEQ ID NO: 315 - RNA, 23 nt, synthetic construct
  source 1..23: mol_type = other RNA
tagcggcagacctcgcggacaca

SEQ ID NO: 316 - RNA, 21 nt, synthetic construct
  source 1..21: mol_type = other RNA
  modified_base 1: mod_base = OTHER; note = Thymine
tagcggcagacctcgcggaca

SEQ ID NO: 317 - RNA, 23 nt, synthetic construct
  source 1..23: mol_type = other RNA
  modified_base 1: mod_base = OTHER; note = Thymine
tagcggcagacctcgcggacaca

SEQ ID NO: 318 - RNA, 23 nt, synthetic construct
  source 1..23: mol_type = other RNA
tggccacagggcacgtattcgca

SEQ ID NO: 319 - RNA, 21 nt, synthetic construct
  source 1..21: mol_type = other RNA
  modified_base 1: mod_base = OTHER; note = Thymine
tggccacagggcacgtattcg

SEQ ID NO: 320 - RNA, 23 nt, synthetic construct
  source 1..23: mol_type = other RNA
  modified_base 1: mod_base = OTHER; note = Thymine
tggccacagggcacgtattcgca

SEQ ID NO: 321 - RNA, 23 nt, synthetic construct
  source 1..23: mol_type = other RNA
ttcagacttggggtagtcctcat

SEQ ID NO: 322 - RNA, 23 nt, synthetic construct
  source 1..23: mol_type = other RNA
ttgttcagacttggggtagtcct

SEQ ID NO: 323 - RNA, 23 nt, synthetic construct
  source 1..23: mol_type = other RNA
tcgtcccctccaagttgttcaga

SEQ ID NO: 324 - RNA, 21 nt, synthetic construct
  source 1..21: mol_type = other RNA
  modified_base 1: mod_base = OTHER; note = Thymine
tcgtcccctccaagttgttca

SEQ ID NO: 325 - RNA, 23 nt, synthetic construct
  source 1..23: mol_type = other RNA
  modified_base 1: mod_base = OTHER; note = Thymine
tcgtcccctccaagttgttcaga

SEQ ID NO: 326 - RNA, 23 nt, synthetic construct
  source 1..23: mol_type = other RNA
taacgtcccctccaagttgttca

SEQ ID NO: 327 - RNA, 21 nt, synthetic construct
  source 1..21: mol_type = other RNA
  modified_base 1: mod_base = OTHER; note = Thymine
taacgtcccctccaagttgtt

SEQ ID NO: 328 - RNA, 23 nt, synthetic construct
  source 1..23: mol_type = other RNA
  modified_base 1: mod_base = OTHER; note = Thymine
taacgtcccctccaagttgttca

SEQ ID NO: 329 - RNA, 23 nt, synthetic construct
  source 1..23: mol_type = other RNA
ttatcgtaggactcaacgtcccc

SEQ ID NO: 330 - RNA, 23 nt, synthetic construct
  source 1..23: mol_type = other RNA
  modified_base 1: mod_base = OTHER; note = Thymine
ttatcgtaggactcaacgtcccc

SEQ ID NO: 331 - RNA, 23 nt, synthetic construct
  source 1..23: mol_type = other RNA
tcttatcgtaggactcaacgtcc

SEQ ID NO: 332 - RNA, 23 nt, synthetic construct
  source 1..23: mol_type = other RNA
tcctgatcttatcgtaggactca

SEQ ID NO: 333 - RNA, 23 nt, synthetic construct
  source 1..23: mol_type = other RNA
tgatcctgtagttgtagcacatc

SEQ ID NO: 334 - RNA, 23 nt, synthetic construct
  source 1..23: mol_type = other RNA
taggacccggatcctgtagttgt

SEQ ID NO: 335 - RNA, 23 nt, synthetic construct
  source 1..23: mol_type = other RNA
tagtgcggctgtaaggcagctcc

SEQ ID NO: 336 - RNA, 23 nt, synthetic construct
  source 1..23: mol_type = other RNA
tcgccaggctcgtggtcagcggc

SEQ ID NO: 337 - RNA, 21 nt, synthetic construct
  source 1..21: mol_type = other RNA
  modified_base 1: mod_base = OTHER; note = Thymine
tcgccaggctcgtggtcagcg

SEQ ID NO: 338 - RNA, 23 nt, synthetic construct
  source 1..23: mol_type = other RNA
  modified_base 1: mod_base = OTHER; note = Thymine
tcgccaggctcgtggtcagcggc

SEQ ID NO: 339 - RNA, 23 nt, synthetic construct
  source 1..23: mol_type = other RNA
tcgtcaaaccactctgtccactc

SEQ ID NO: 340 - RNA, 23 nt, synthetic construct
  source 1..23: mol_type = other RNA
tacgacctggcccaactcccgca

SEQ ID NO: 341 - RNA, 23 nt, synthetic construct
  source 1..23: mol_type = other RNA
tccaaactggagcggggtcagcc

SEQ ID NO: 342 - RNA, 21 nt, synthetic construct
  source 1..21: mol_type = other RNA
  modified_base 1: mod_base = OTHER; note = Thymine
tccaaactggagcggggtcag

SEQ ID NO: 343 - RNA, 23 nt, synthetic construct
  source 1..23: mol_type = other RNA
  modified_base 1: mod_base = OTHER; note = Thymine
tccaaactggagcggggtcagcc

SEQ ID NO: 344 - RNA, 23 nt, synthetic construct
  source 1..23: mol_type = other RNA
tttcccaaactggagcggggtca

SEQ ID NO: 345 - RNA, 21 nt, synthetic construct
  source 1..21: mol_type = other RNA
  modified_base 1: mod_base = OTHER; note = Thymine
tttcccaaactggagcggggt

SEQ ID NO: 346 - RNA, 23 nt, synthetic construct
  source 1..23: mol_type = other RNA
  modified_base 1: mod_base = OTHER; note = Thymine
tttcccaaactggagcggggtca

SEQ ID NO: 347 - RNA, 23 nt, synthetic construct
  source 1..23: mol_type = other RNA
tgcgtgagtattccacaaaggtg

SEQ ID NO: 348 - RNA, 21 nt, synthetic construct
  source 1..21: mol_type = other RNA
  modified_base 1: mod_base = OTHER; note = Thymine
tgcgtgagtattccacaaagg

SEQ ID NO: 349 - RNA, 23 nt, synthetic construct
  source 1..23: mol_type = other RNA
  modified_base 1: mod_base = OTHER; note = Thymine
tgcgtgagtattccacaaaggtg

SEQ ID NO: 350 - RNA, 23 nt, synthetic construct
  source 1..23: mol_type = other RNA
ttggcgtgagtattccacaaagg

SEQ ID NO: 351 - RNA, 23 nt, synthetic construct
  source 1..23: mol_type = other RNA
tgcactggcgtgagtattccaca

SEQ ID NO: 352 - RNA, 23 nt, synthetic construct
  source 1..23: mol_type = other RNA
tgtgggcgcactggcgtgagtat

SEQ ID NO: 353 - RNA, 21 nt, synthetic construct
  source 1..21: mol_type = other RNA
  modified_base 1: mod_base = OTHER; note = Thymine
tgtgggcgcactggcgtgagt

SEQ ID NO: 354 - RNA, 23 nt, synthetic construct
  source 1..23: mol_type = other RNA
  modified_base 1: mod_base = OTHER; note = Thymine
tgtgggcgcactggcgtgagtat

SEQ ID NO: 355 - RNA, 21 nt, synthetic construct
  source 1..21: mol_type = other RNA
  modified_base 1: mod_base = OTHER; note = 2'-O-methylcytidine-3'-phosphate
  modified_base 2: mod_base = OTHER; note = 2'-O-methyladenosine-3'-phosphate
  modified_base 3: mod_base = OTHER; note = 2'-O-methylguanosine-3'-phosphate
  modified_base 4: mod_base = OTHER; note = 2'-O-methylcytidine-3'-phosphate
  modified_base 6: mod_base = OTHER; note = 2'-O-methyladenosine-3'-phosphate
  modified_base 7: mod_base = OTHER; note = 2'-O-methylcytidine-3'-phosphate
  modified_base 8: mod_base = OTHER; note = 2'-O-methylguanosine-3'-phosphate
  modified_base 12: mod_base = OTHER; note = 2'-O-methyluridine-3'-phosphate
  modified_base 13: mod_base = OTHER; note = 2'-O-methylguanosine-3'-phosphate
  modified_base 14: mod_base = OTHER; note = 2'-O-methyluridine-3'-phosphate
  modified_base 15: mod_base = OTHER; note = 2'-O-methylcytidine-3'-phosphate
  modified_base 16: mod_base = OTHER; note = 2'-O-methylcytidine-3'-phosphate
  modified_base 17: mod_base = OTHER; note = 2'-O-methyladenosine-3'-phosphate
  modified_base 18: mod_base = OTHER; note = 2'-O-methyladenosine-3'-phosphate
  modified_base 20: mod_base = OTHER; note = 2'-O-methyladenosine-3'-phosphorothioate
  modified_base 21: mod_base = OTHER; note = 2'-O-methyladenosine-3'-phosphate
cagctacgttctgtccaagaa

SEQ ID NO: 356 - RNA, 21 nt, synthetic construct
  source 1..21: mol_type = other RNA
  modified_base 1: mod_base = OTHER; note = 2'-O-methylcytidine-3'-phosphorothioate
  modified_base 2: mod_base = OTHER; note = 2'-O-methyluridine-3'-phosphorothioate
  modified_base 3: mod_base = OTHER; note = 2'-O-methylguanosine-3'-phosphate
  modified_base 4: mod_base = OTHER; note = 2'-O-methyluridine-3'-phosphate
  modified_base 5: mod_base = OTHER; note = 2'-O-methyluridine-3'-phosphate
  modified_base 6: mod_base = OTHER; note = 2'-O-methyluridine-3'-phosphate
  modified_base 7: mod_base = OTHER; note = 2'-fluoroguanosine-3'-phosphate
  modified_base 8: mod_base = OTHER; note = 2'-O-methyladenosine-3'-phosphate
  modified_base 9: mod_base = OTHER; note = 2'-fluorocytidine-3'-phosphate
  modified_base 10: mod_base = OTHER; note = 2'-fluorocytidine-3'-phosphate
  modified_base 11: mod_base = OTHER; note = 2'-fluoroadenosine-3'-phosphate
  modified_base 12: mod_base = OTHER; note = 2'-O-methyladenosine-3'-phosphate
  modified_base 13: mod_base = OTHER; note = 2'-O-methyladenosine-3'-phosphate
  modified_base 14: mod_base = OTHER; note = 2'-O-methyluridine-3'-phosphate
  modified_base 15: mod_base = OTHER; note = 2'-O-methyluridine-3'-phosphate
  modified_base 16: mod_base = OTHER; note = 2'-O-methylcytidine-3'-phosphate
  modified_base 17: mod_base = OTHER; note = 2'-O-methylcytidine-3'-phosphate
  modified_base 18: mod_base = OTHER; note = 2'-O-methylguanosine-3'-phosphate
  modified_base 19: mod_base = OTHER; note = 2'-O-methylguanosine-3'-phosphate
  modified_base 20: mod_base = OTHER; note = 2'-O-methyluridine-3'-phosphate
  modified_base 21: mod_base = OTHER; note = 2'-O-methyladenosine-3'-phosphate
ctgtttgaccaaattccggta

SEQ ID NO: 357 - RNA, 21 nt, synthetic construct
  source 1..21: mol_type = other RNA
  modified_base 1: mod_base = OTHER; note = 2'-O-methylcytidine-3'-phosphorothioate
  modified_base 2: mod_base = OTHER; note = 2'-O-methylguanosine-3'-phosphorothioate
  modified_base 3: mod_base = OTHER; note = 2'-O-methyluridine-3'-phosphate
  modified_base 4: mod_base = OTHER; note = 2'-O-methylguanosine-3'-phosphate
  modified_base 5: mod_base = OTHER; note = 2'-O-methyladenosine-3'-phosphate
  modified_base 6: mod_base = OTHER; note = 2'-O-methylguanosine-3'-phosphate
  modified_base 7: mod_base = OTHER; note = 2'-fluorocytidine-3'-phosphate
  modified_base 8: mod_base = OTHER; note = 2'-O-methyluridine-3'-phosphate
  modified_base 9: mod_base = OTHER; note = 2'-fluorouridine-3'-phosphate
  modified_base 10: mod_base = OTHER; note = 2'-fluorouridine-3'-phosphate
  modified_base 11: mod_base = OTHER; note = 2'-fluoroguanosine-3'-phosphate
  modified_base 12: mod_base = OTHER; note = 2'-O-methyluridine-3'-phosphate
  modified_base 13: mod_base = OTHER; note = 2'-O-methyluridine-3'-phosphate
  modified_base 14: mod_base = OTHER; note = 2'-O-methylcytidine-3'-phosphate
  modified_base 15: mod_base = OTHER; note = 2'-O-methylcytidine-3'-phosphate
  modified_base 16: mod_base = OTHER; note = 2'-O-methyladenosine-3'-phosphate
  modified_base 17: mod_base = OTHER; note = 2'-O-methylcytidine-3'-phosphate
  modified_base 18: mod_base = OTHER; note = 2'-O-methylcytidine-3'-phosphate
  modified_base 19: mod_base = OTHER; note = 2'-O-methylcytidine-3'-phosphate
  modified_base 20: mod_base = OTHER; note = 2'-O-methylguanosine-3'-phosphate
  modified_base 21: mod_base = OTHER; note = 2'-O-methyladenosine-3'-phosphate
cgtgagctttgttccacccga

SEQ ID NO: 358 - RNA, 19 nt, synthetic construct
  source 1..19: mol_type = other RNA
  modified_base 1: mod_base = OTHER; note = 2'-O-methyladenosine-3'-phosphate
  modified_base 2: mod_base = OTHER; note = 2'-O-methyladenosine-3'-phosphate
  modified_base 4: mod_base = OTHER; note = 2'-O-methyluridine-3'-phosphate
  modified_base 5: mod_base = OTHER; note = 2'-O-methylcytidine-3'-phosphate
  modified_base 6: mod_base = OTHER; note = 2'-O-methylcytidine-3'-phosphate
  modified_base 10: mod_base = OTHER; note = 2'-O-methyluridine-3'-phosphate
  modified_base 11: mod_base = OTHER; note = 2'-O-methylguanosine-3'-phosphate
  modified_base 13: mod_base = OTHER; note = 2'-O-methyluridine-3'-phosphate
  modified_base 14: mod_base = OTHER; note = 2'-O-methylcytidine-3'-phosphate
  modified_base 15: mod_base = OTHER; note = 2'-O-methyluridine-3'-phosphate
  modified_base 16: mod_base = OTHER; note = 2'-O-methylguanosine-3'-phosphate
  modified_base 18: mod_base = OTHER; note = 2'-O-methyluridine-3'-phosphorothioate
  modified_base 19: mod_base = OTHER; note = 2'-O-methyladenosine-3'-phosphate
aaatccgtgtgttctgcta

SEQ ID NO: 359 - RNA, 21 nt, synthetic construct
  source 1..21: mol_type = other RNA
  modified_base 1: mod_base = OTHER; note = 2'-O-methylguanosine-3'-phosphorothioate
  modified_base 2: mod_base = OTHER; note = 2'-O-methylcytidine-3'-phosphorothioate
  modified_base 3: mod_base = OTHER; note = 2'-O-methyluridine-3'-phosphate
  modified_base 4: mod_base = OTHER; note = 2'-O-methyluridine-3'-phosphate
  modified_base 5: mod_base = OTHER; note = 2'-O-methyluridine-3'-phosphate
  modified_base 6: mod_base = OTHER; note = 2'-O-methylguanosine-3'-phosphate
  modified_base 7: mod_base = OTHER; note = 2'-fluorouridine-3'-phosphate
  modified_base 8: mod_base = OTHER; note = 2'-O-methyluridine-3'-phosphate
  modified_base 9: mod_base = OTHER; note = 2'-fluorocytidine-3'-phosphate
  modified_base 10: mod_base = OTHER; note = 2'-fluorocytidine-3'-phosphate
  modified_base 11: mod_base = OTHER; note = 2'-fluoroadenosine-3'-phosphate
  modified_base 12: mod_base = OTHER; note = 2'-O-methylcytidine-3'-phosphate
  modified_base 13: mod_base = OTHER; note = 2'-O-methylcytidine-3'-phosphate
  modified_base 14: mod_base = OTHER; note = 2'-O-methylcytidine-3'-phosphate
  modified_base 15: mod_base = OTHER; note = 2'-O-methylguanosine-3'-phosphate
  modified_base 16: mod_base = OTHER; note = 2'-O-methyluridine-3'-phosphate
  modified_base 17: mod_base = OTHER; note = 2'-O-methylcytidine-3'-phosphate
  modified_base 18: mod_base = OTHER; note = 2'-O-methyladenosine-3'-phosphate
  modified_base 19: mod_base = OTHER; note = 2'-O-methylcytidine-3'-phosphate
  modified_base 20: mod_base = OTHER; note = 2'-O-methyluridine-3'-phosphate
  modified_base 21: mod_base = OTHER; note = 2'-O-methyladenosine-3'-phosphate
gctttgttccacccgtcacta

SEQ ID NO: 360 - RNA, 19 nt, synthetic construct
  source 1..19: mol_type = other RNA
  modified_base 1: mod_base = OTHER; note = 2'-O-methylcytidine-3'-phosphate
  modified_base 2: mod_base = OTHER; note = 2'-O-methyladenosine-3'-phosphate
  modified_base 4: mod_base = OTHER; note = 2'-O-methyluridine-3'-phosphate
  modified_base 5: mod_base = OTHER; note = 2'-O-methyladenosine-3'-phosphate
  modified_base 6: mod_base = OTHER; note = 2'-O-methyluridine-3'-phosphate
  modified_base 10: mod_base = OTHER; note = 2'-O-methyluridine-3'-phosphate
  modified_base 11: mod_base = OTHER; note = 2'-O-methylguanosine-3'-phosphate
  modified_base 13: mod_base = OTHER; note = 2'-O-methylguanosine-3'-phosphate
  modified_base 14: mod_base = OTHER; note = 2'-O-methyladenosine-3'-phosphate
  modified_base 15: mod_base = OTHER; note = 2'-O-methylguanosine-3'-phosphate
  modified_base 16: mod_base = OTHER; note = 2'-O-methyluridine-3'-phosphate
  modified_base 18: mod_base = OTHER; note = 2'-O-methylcytidine-3'-phosphorothioate
  modified_base 19: mod_base = OTHER; note = 2'-O-methyladenosine-3'-phosphate
cactatgagtgcgagtgca

SEQ ID NO: 361 - RNA, 21 nt, synthetic construct
  source 1..21: mol_type = other RNA
  modified_base 1: mod_base = OTHER; note = 2'-O-methyluridine-3'-phosphate
  modified_base 2: mod_base = OTHER; note = 2'-O-methylguanosine-3'-phosphate
  modified_base 3: mod_base = OTHER; note = 2'-O-methyladenosine-3'-phosphate
  modified_base 4: mod_base = OTHER; note = 2'-O-methyladenosine-3'-phosphate
  modified_base 6: mod_base = OTHER; note = 2'-O-methyluridine-3'-phosphate
  modified_base 7: mod_base = OTHER; note = 2'-O-methylcytidine-3'-phosphate
  modified_base 8: mod_base = OTHER; note = 2'-O-methylcytidine-3'-phosphate
  modified_base 12: mod_base = OTHER; note = 2'-O-methyluridine-3'-phosphate
  modified_base 13: mod_base = OTHER; note = 2'-O-methylguanosine-3'-phosphate
  modified_base 14: mod_base = OTHER; note = 2'-O-methyluridine-3'-phosphate
  modified_base 15: mod_base = OTHER; note = 2'-O-methyluridine-3'-phosphate
  modified_base 16: mod_base = OTHER; note = 2'-O-methylcytidine-3'-phosphate
  modified_base 17: mod_base = OTHER; note = 2'-O-methyluridine-3'-phosphate
  modified_base 18: mod_base = OTHER; note = 2'-O-methylguanosine-3'-phosphate
  modified_base 20: mod_base = OTHER; note = 2'-O-methyluridine-3'-phosphorothioate
  modified_base 21: mod_base = OTHER; note = 2'-O-methyladenosine-3'-phosphate
tgaaatccgtgtgttctgcta

SEQ ID NO: 362 - RNA, 21 nt, synthetic construct
  source 1..21: mol_type = other RNA
  modified_base 1: mod_base = OTHER; note = 2'-O-methyladenosine-3'-phosphorothioate
  modified_base 2: mod_base = OTHER; note = 2'-O-methylcytidine-3'-phosphorothioate
  modified_base 3: mod_base = OTHER; note = 2'-O-methylcytidine-3'-phosphate
  modified_base 4: mod_base = OTHER; note = 2'-O-methyluridine-3'-phosphate
  modified_base 5: mod_base = OTHER; note = 2'-O-methyluridine-3'-phosphate
  modified_base 6: mod_base = OTHER; note = 2'-O-methyluridine-3'-phosphate
  modified_base 7: mod_base = OTHER; note = 2'-fluoroguanosine-3'-phosphate
  modified_base 8: mod_base = OTHER; note = 2'-O-methyladenosine-3'-phosphate
  modified_base 9: mod_base = OTHER; note = 2'-fluorocytidine-3'-phosphate
  modified_base 10: mod_base = OTHER; note = 2'-fluoroguanosine-3'-phosphate
  modified_base 11: mod_base = OTHER; note = 2'-fluoroguanosine-3'-phosphate
  modified_base 12: mod_base = OTHER; note = 2'-O-methylcytidine-3'-phosphate
  modified_base 13: mod_base = OTHER; note = 2'-O-methyladenosine-3'-phosphate
  modified_base 14: mod_base = OTHER; note = 2'-O-methylcytidine-3'-phosphate
  modified_base 15: mod_base = OTHER; note = 2'-O-methylcytidine-3'-phosphate
  modified_base 16: mod_base = OTHER; note = 2'-O-methyluridine-3'-phosphate
  modified_base 17: mod_base = OTHER; note = 2'-O-methylcytidine-3'-phosphate
  modified_base 18: mod_base = OTHER; note = 2'-O-methyluridine-3'-phosphate
  modified_base 19: mod_base = OTHER; note = 2'-O-methyluridine-3'-phosphate
  modified_base 20: mod_base = OTHER; note = 2'-O-methyladenosine-3'-phosphate
  modified_base 21: mod_base = OTHER; note = 2'-O-methyladenosine-3'-phosphate
acctttgacggcacctcttaa

SEQ ID NO: 363 - RNA, 21 nt, synthetic construct
  source 1..21: mol_type = other RNA
  modified_base 1: mod_base = OTHER; note = 2'-O-methyluridine-3'-phosphorothioate
  modified_base 2: mod_base = OTHER; note = 2'-O-methyladenosine-3'-phosphorothioate
  modified_base 3: mod_base = OTHER; note = 2'-O-methylcytidine-3'-phosphate
  modified_base 4: mod_base = OTHER; note = 2'-O-methyladenosine-3'-phosphate
  modified_base 5: mod_base = OTHER; note = 2'-O-methyladenosine-3'-phosphate
  modified_base 6: mod_base = OTHER; note = 2'-O-methylguanosine-3'-phosphate
  modified_base 7: mod_base = OTHER; note = 2'-fluorouridine-3'-phosphate
  modified_base 8: mod_base = OTHER; note = 2'-O-methylcytidine-3'-phosphate
  modified_base 9: mod_base = OTHER; note = 2'-fluorocytidine-3'-phosphate
  modified_base 10: mod_base = OTHER; note = 2'-fluoroadenosine-3'-phosphate
  modified_base 11: mod_base = OTHER; note = 2'-fluorouridine-3'-phosphate
  modified_base 12: mod_base = OTHER; note = 2'-O-methylguanosine-3'-phosphate
  modified_base 13: mod_base = OTHER; note = 2'-O-methylguanosine-3'-phosphate
  modified_base 14: mod_base = OTHER; note = 2'-O-methyladenosine-3'-phosphate
  modified_base 15: mod_base = OTHER; note = 2'-O-methyluridine-3'-phosphate
  modified_base 16: mod_base = OTHER; note = 2'-O-methyladenosine-3'-phosphate
  modified_base 17: mod_base = OTHER; note = 2'-O-methyluridine-3'-phosphate
  modified_base 18: mod_base = OTHER; note = 2'-O-methylcytidine-3'-phosphate
  modified_base 19: mod_base = OTHER; note = 2'-O-methylguanosine-3'-phosphate
  modified_base 20: mod_base = OTHER; note = 2'-O-methyluridine-3'-phosphate
  modified_base 21: mod_base = OTHER; note = 2'-O-methyladenosine-3'-phosphate
tacaagtccatggatatcgta

SEQ ID NO: 364 - RNA, 21 nt, synthetic construct
  source 1..21: mol_type = other RNA
  modified_base 1: mod_base = OTHER; note = 2'-O-methylcytidine-3'-phosphate
  modified_base 2: mod_base = OTHER; note = 2'-O-methyladenosine-3'-phosphate
  modified_base 3: mod_base = OTHER; note = 2'-O-methyladenosine-3'-phosphate
  modified_base 4: mod_base = OTHER; note = 2'-O-methylguanosine-3'-phosphate
  modified_base 6: mod_base = OTHER; note = 2'-O-methylcytidine-3'-phosphate
  modified_base 7: mod_base = OTHER; note = 2'-O-methylcytidine-3'-phosphate
  modified_base 8: mod_base = OTHER; note = 2'-O-methyladenosine-3'-phosphate
  modified_base 12: mod_base = OTHER; note = 2'-O-methyladenosine-3'-phosphate
  modified_base 13: mod_base = OTHER; note = 2'-O-methyluridine-3'-phosphate
  modified_base 14: mod_base = OTHER; note = 2'-O-methyladenosine-3'-phosphate
  modified_base 15: mod_base = OTHER; note = 2'-O-methyluridine-3'-phosphate
  modified_base 16: mod_base = OTHER; note = 2'-O-methylcytidine-3'-phosphate
  modified_base 17: mod_base = OTHER; note = 2'-O-methylguanosine-3'-phosphate
  modified_base 18: mod_base = OTHER; note = 2'-O-methyluridine-3'-phosphate
  modified_base 20: mod_base = OTHER; note = 2'-O-methylcytidine-3'-phosphorothioate
  modified_base 21: mod_base = OTHER; note = 2'-O-methyladenosine-3'-phosphate
caagtccatggatatcgtcca

SEQ ID NO: 365 - RNA, 21 nt, synthetic construct
  source 1..21: mol_type = other RNA
  modified_base 1: mod_base = OTHER; note = 2'-O-methylguanosine-3'-phosphorothioate
  modified_base 2: mod_base = OTHER; note = 2'-O-methyluridine-3'-phosphorothioate
  modified_base 3: mod_base = OTHER; note = 2'-O-methyluridine-3'-phosphate
  modified_base 4: mod_base = OTHER; note = 2'-O-methylguanosine-3'-phosphate
  modified_base 5: mod_base = OTHER; note = 2'-O-methylguanosine-3'-phosphate
  modified_base 6: mod_base = OTHER; note = 2'-O-methylguanosine-3'-phosphate
  modified_base 7: mod_base = OTHER; note = 2'-fluorocytidine-3'-phosphate
  modified_base 8: mod_base = OTHER; note = 2'-O-methylcytidine-3'-phosphate
  modified_base 9: mod_base = OTHER; note = 2'-fluoroadenosine-3'-phosphate
  modified_base 10: mod_base = OTHER; note = 2'-fluoroguanosine-3'-phosphate
  modified_base 11: mod_base = OTHER; note = 2'-fluoroguanosine-3'-phosphate
  modified_base 12: mod_base = OTHER; note = 2'-O-methyluridine-3'-phosphate
  modified_base 13: mod_base = OTHER; note = 2'-O-methylcytidine-3'-phosphate
  modified_base 14: mod_base = OTHER; note = 2'-O-methylguanosine-3'-phosphate
  modified_base 15: mod_base = OTHER; note = 2'-O-methyluridine-3'-phosphate
  modified_base 16: mod_base = OTHER; note = 2'-O-methylguanosine-3'-phosphate
  modified_base 17: mod_base = OTHER; note = 2'-O-methylguanosine-3'-phosphate
  modified_base 18: mod_base = OTHER; note = 2'-O-methyladenosine-3'-phosphate
  modified_base 19: mod_base = OTHER; note = 2'-O-methyladenosine-3'-phosphate
  modified_base 20: mod_base = OTHER; note = 2'-O-methyluridine-3'-phosphate
  modified_base 21: mod_base = OTHER; note = 2'-O-methyladenosine-3'-phosphate
gttgggccaggtcgtggaata

SEQ ID NO: 366 - RNA, 21 nt, synthetic construct
  source 1..21: mol_type = other RNA
  modified_base 1: mod_base = OTHER; note = 2'-O-methylguanosine-3'-phosphorothioate
  modified_base 2: mod_base = OTHER; note = 2'-O-methylcytidine-3'-phosphorothioate
  modified_base 3: mod_base = OTHER; note = 2'-O-methylcytidine-3'-phosphate
  modified_base 4: mod_base = OTHER; note = 2'-O-methyladenosine-3'-phosphate
  modified_base 5: mod_base = OTHER; note = 2'-O-methylguanosine-3'-phosphate
  modified_base 6: mod_base = OTHER; note = 2'-O-methylguanosine-3'-phosphate
  modified_base 7: mod_base = OTHER; note = 2'-fluorouridine-3'-phosphate
  modified_base 8: mod_base = OTHER; note = 2'-O-methylcytidine-3'-phosphate
  modified_base 9: mod_base = OTHER; note = 2'-fluoroguanosine-3'-phosphate
  modified_base 10: mod_base = OTHER; note = 2'-fluorouridine-3'-phosphate
  modified_base 11: mod_base = OTHER; note = 2'-fluoroguanosine-3'-phosphate
  modified_base 12: mod_base = OTHER; note = 2'-O-methylguanosine-3'-phosphate
  modified_base 13: mod_base = OTHER; note = 2'-O-methyladenosine-3'-phosphate
  modified_base 14: mod_base = OTHER; note = 2'-O-methyladenosine-3'-phosphate
  modified_base 15: mod_base = OTHER; note = 2'-O-methyluridine-3'-phosphate
  modified_base 16: mod_base = OTHER; note = 2'-O-methylguanosine-3'-phosphate
  modified_base 17: mod_base = OTHER; note = 2'-O-methylcytidine-3'-phosphate
  modified_base 18: mod_base = OTHER; note = 2'-O-methyladenosine-3'-phosphate
  modified_base 19: mod_base = OTHER; note = 2'-O-methylguanosine-3'-phosphate
  modified_base 20: mod_base = OTHER; note = 2'-O-methylcytidine-3'-phosphate
  modified_base 21: mod_base = OTHER; note = 2'-O-methyladenosine-3'-phosphate
gccaggtcgtggaatgcagca

SEQ ID NO: 367 - RNA, 21 nt, synthetic construct
  source 1..21: mol_type = other RNA
  modified_base 1: mod_base = OTHER; note = 2'-O-methyluridine-3'-phosphorothioate
  modified_base 2: mod_base = OTHER; note = 2'-O-methylguanosine-3'-phosphorothioate
  modified_base 3: mod_base = OTHER; note = 2'-O-methyladenosine-3'-phosphate
  modified_base 4: mod_base = OTHER; note = 2'-O-methyladenosine-3'-phosphate
  modified_base 5: mod_base = OTHER; note = 2'-O-methyladenosine-3'-phosphate
  modified_base 6: mod_base = OTHER; note = 2'-O-methyluridine-3'-phosphate
  modified_base 7: mod_base = OTHER; note = 2'-fluorocytidine-3'-phosphate
  modified_base 8: mod_base = OTHER; note = 2'-O-methylcytidine-3'-phosphate
  modified_base 9: mod_base = OTHER; note = 2'-fluoroguanosine-3'-phosphate
  modified_base 10: mod_base = OTHER; note = 2'-fluorouridine-3'-phosphate
  modified_base 11: mod_base = OTHER; note = 2'-fluoroguanosine-3'-phosphate
  modified_base 12: mod_base = OTHER; note = 2'-O-methyluridine-3'-phosphate
  modified_base 13: mod_base = OTHER; note = 2'-O-methylguanosine-3'-phosphate
  modified_base 14: mod_base = OTHER; note = 2'-O-methyluridine-3'-phosphate
  modified_base 15: mod_base = OTHER; note = 2'-O-methyluridine-3'-phosphate
  modified_base 16: mod_base = OTHER; note = 2'-O-methylcytidine-3'-phosphate
  modified_base 17: mod_base = OTHER; note = 2'-O-methyluridine-3'-phosphate
  modified_base 18: mod_base = OTHER; note = 2'-O-methylguanosine-3'-phosphate
  modified_base 19: mod_base = OTHER; note = 2'-O-methylcytidine-3'-phosphate
  modified_base 20: mod_base = OTHER; note = 2'-O-methyluridine-3'-phosphate
  modified_base 21: mod_base = OTHER; note = 2'-O-methyladenosine-3'-phosphate
tgaaatccgtgtgttctgcta

SEQ ID NO: 368 - RNA, 21 nt, synthetic construct
  source 1..21: mol_type = other RNA
  modified_base 1: mod_base = OTHER; note = 2'-O-methyluridine-3'-phosphorothioate
  modified_base 2: mod_base = OTHER; note = 2'-O-methylguanosine-3'-phosphorothioate
  modified_base 3: mod_base = OTHER; note = 2'-O-methyluridine-3'-phosphate
  modified_base 4: mod_base = OTHER; note = 2'-O-methyluridine-3'-phosphate
  modified_base 5: mod_base = OTHER; note = 2'-O-methylcytidine-3'-phosphate
  modified_base 6: mod_base = OTHER; note = 2'-O-methyluridine-3'-phosphate
  modified_base 7: mod_base = OTHER; note = 2'-fluoroguanosine-3'-phosphate
  modified_base 8: mod_base = OTHER; note = 2'-O-methylcytidine-3'-phosphate
  modified_base 9: mod_base = OTHER; note = 2'-fluorouridine-3'-phosphate
  modified_base 10: mod_base = OTHER; note = 2'-fluoroguanosine-3'-phosphate
  modified_base 11: mod_base = OTHER; note = 2'-fluorocytidine-3'-phosphate
  modified_base 12: mod_base = OTHER; note = 2'-O-methyladenosine-3'-phosphate
  modified_base 13: mod_base = OTHER; note = 2'-O-methyladenosine-3'-phosphate
  modified_base 14: mod_base = OTHER; note = 2'-O-methylcytidine-3'-phosphate
  modified_base 15: mod_base = OTHER; note = 2'-O-methyluridine-3'-phosphate
  modified_base 16: mod_base = OTHER; note = 2'-O-methyladenosine-3'-phosphate
  modified_base 17: mod_base = OTHER; note = 2'-O-methylcytidine-3'-phosphate
  modified_base 18: mod_base = OTHER; note = 2'-O-methylguanosine-3'-phosphate
  modified_base 19: mod_base = OTHER; note = 2'-O-methylguanosine-3'-phosphate
  modified_base 20: mod_base = OTHER; note = 2'-O-methylcytidine-3'-phosphate
  modified_base 21: mod_base = OTHER; note = 2'-O-methyladenosine-3'-phosphate
tgttctgctgcaactacggca

SEQ ID NO: 369 - RNA, 21 nt, synthetic construct
  source 1..21: mol_type = other RNA
  modified_base 1: mod_base = OTHER; note = 2'-O-methylcytidine-3'-phosphorothioate
  modified_base 2: mod_base = OTHER; note = 2'-O-methylcytidine-3'-phosphorothioate
  modified_base 3: mod_base = OTHER; note = 2'-O-methyluridine-3'-phosphate
  modified_base 4: mod_base = OTHER; note = 2'-O-methylcytidine-3'-phosphate
  modified_base 5: mod_base = OTHER; note = 2'-O-methylcytidine-3'-phosphate
  modified_base 6: mod_base = OTHER; note = 2'-O-methyladenosine-3'-phosphate
  modified_base 7: mod_base = OTHER; note = 2'-fluorocytidine-3'-phosphate
  modified_base 8: mod_base = OTHER; note = 2'-O-methyluridine-3'-phosphate
  modified_base 9: mod_base = OTHER; note = 2'-fluorocytidine-3'-phosphate
  modified_base 10: mod_base = OTHER; note = 2'-fluorocytidine-3'-phosphate
  modified_base 11: mod_base = OTHER; note = 2'-fluoroguanosine-3'-phosphate
  modified_base 12: mod_base = OTHER; note = 2'-O-methylguanosine-3'-phosphate
  modified_base 13: mod_base = OTHER; note = 2'-O-methylguanosine-3'-phosphate
  modified_base 14: mod_base = OTHER; note = 2'-O-methylguanosine-3'-phosphate
  modified_base 15: mod_base = OTHER; note = 2'-O-methyladenosine-3'-phosphate
  modified_base 16: mod_base = OTHER; note = 2'-O-methylcytidine-3'-phosphate
  modified_base 17: mod_base = OTHER; note = 2'-O-methylguanosine-3'-phosphate
  modified_base 18: mod_base = OTHER; note = 2'-O-methyladenosine-3'-phosphate
  modified_base 19: mod_base = OTHER; note = 2'-O-methylcytidine-3'-phosphate
  modified_base 20: mod_base = OTHER; note = 2'-O-methylcytidine-3'-phosphate
  modified_base 21: mod_base = OTHER; note = 2'-O-methyladenosine-3'-phosphate
cctccactccggggacgacca

SEQ ID NO: 370 - RNA, 21 nt, synthetic construct
  source 1..21: mol_type = other RNA
  modified_base 1: mod_base = OTHER; note = 2'-O-methylcytidine-3'-phosphorothioate
  modified_base 2: mod_base = OTHER; note = 2'-O-methyladenosine-3'-phosphorothioate
  modified_base 3: mod_base = OTHER; note = 2'-O-methylguanosine-3'-phosphate
  modified_base 4: mod_base = OTHER; note = 2'-O-methylcytidine-3'-phosphate
  modified_base 5: mod_base = OTHER; note = 2'-O-methyluridine-3'-phosphate
  modified_base 6: mod_base = OTHER; note = 2'-O-methyladenosine-3'-phosphate
  modified_base 7: mod_base = OTHER; note = 2'-fluorocytidine-3'-phosphate
  modified_base 8: mod_base = OTHER; note = 2'-O-methylguanosine-3'-phosphate
  modified_base 9: mod_base = OTHER; note = 2'-fluorouridine-3'-phosphate
  modified_base 10: mod_base = OTHER; note = 2'-fluorouridine-3'-phosphate
  modified_base 11: mod_base = OTHER; note = 2'-fluorocytidine-3'-phosphate
  modified_base 12: mod_base = OTHER; note = 2'-O-methyluridine-3'-phosphate
  modified_base 13: mod_base = OTHER; note = 2'-O-methylguanosine-3'-phosphate
  modified_base 14: mod_base = OTHER; note = 2'-O-methyluridine-3'-phosphate
  modified_base 15: mod_base = OTHER; note = 2'-O-methylcytidine-3'-phosphate
  modified_base 16: mod_base = OTHER; note = 2'-O-methylcytidine-3'-phosphate
  modified_base 17: mod_base = OTHER; note = 2'-O-methyladenosine-3'-phosphate
  modified_base 18: mod_base = OTHER; note = 2'-O-methyladenosine-3'-phosphate
  modified_base 19: mod_base = OTHER; note = 2'-O-methylguanosine-3'-phosphate
  modified_base 20: mod_base = OTHER; note = 2'-O-methyladenosine-3'-phosphate
  modified_base 21: mod_base = OTHER; note = 2'-O-methyladenosine-3'-phosphate
cagctacgttctgtccaagaa

SEQ ID NO: 371 - RNA, 21 nt, synthetic construct
  source 1..21: mol_type = other RNA
  modified_base 1: mod_base = OTHER; note = 2'-O-methylguanosine-3'-phosphorothioate
  modified_base 2: mod_base = OTHER; note = 2'-O-methylcytidine-3'-phosphorothioate
  modified_base 3: mod_base = OTHER; note = 2'-O-methyladenosine-3'-phosphate
  modified_base 4: mod_base = OTHER; note = 2'-O-methylcytidine-3'-phosphate
  modified_base 5: mod_base = OTHER; note = 2'-O-methylguanosine-3'-phosphate
  modified_base 6: mod_base = OTHER; note = 2'-O-methylguanosine-3'-phosphate
  modified_base 7: mod_base = OTHER; note = 2'-fluorouridine-3'-phosphate
  modified_base 8: mod_base = OTHER; note = 2'-O-methylguanosine-3'-phosphate
  modified_base 9: mod_base = OTHER; note = 2'-fluoroguanosine-3'-phosphate
  modified_base 10: mod_base = OTHER; note = 2'-fluorocytidine-3'-phosphate
  modified_base 11: mod_base = OTHER; note = 2'-fluorocytidine-3'-phosphate
  modified_base 12: mod_base = OTHER; note = 2'-O-methyladenosine-3'-phosphate
  modified_base 13: mod_base = OTHER; note = 2'-O-methylguanosine-3'-phosphate
  modified_base 14: mod_base = OTHER; note = 2'-O-methylguanosine-3'-phosphate
  modified_base 15: mod_base = OTHER; note = 2'-O-methyluridine-3'-phosphate
  modified_base 16: mod_base = OTHER; note = 2'-O-methylguanosine-3'-phosphate
  modified_base 17: mod_base = OTHER; note = 2'-O-methylcytidine-3'-phosphate
  modified_base 18: mod_base = OTHER; note = 2'-O-methylguanosine-3'-phosphate
  modified_base 19: mod_base = OTHER; note = 2'-O-methyluridine-3'-phosphate
  modified_base 20: mod_base = OTHER; note = 2'-O-methylguanosine-3'-phosphate
  modified_base 21: mod_base = OTHER; note = 2'-O-methyladenosine-3'-phosphate
gcacggtggccaggtgcgtga

SEQ ID NO: 372 - RNA, 21 nt, synthetic construct
  source 1..21: mol_type = other RNA
  modified_base 1: mod_base = OTHER; note = 2'-O-methylguanosine-3'-phosphorothioate
  modified_base 2: mod_base = OTHER; note = 2'-O-methylcytidine-3'-phosphorothioate
  modified_base 3: mod_base = OTHER; note = 2'-O-methylcytidine-3'-phosphate
  modified_base 4: mod_base = OTHER; note = 2'-O-methyladenosine-3'-phosphate
  modified_base 5: mod_base = OTHER; note = 2'-O-methylguanosine-3'-phosphate
  modified_base 6: mod_base = OTHER; note = 2'-O-methylguanosine-3'-phosphate
  modified_base 7: mod_base = OTHER; note = 2'-fluorouridine-3'-phosphate
  modified_base 8: mod_base = OTHER; note = 2'-O-methylguanosine-3'-phosphate
  modified_base 9: mod_base = OTHER; note = 2'-fluorocytidine-3'-phosphate
  modified_base 10: mod_base = OTHER; note = 2'-fluoroguanosine-3'-phosphate
  modified_base 11: mod_base = OTHER; note = 2'-fluorouridine-3'-phosphate
  modified_base 12: mod_base = OTHER; note = 2'-O-methylguanosine-3'-phosphate
  modified_base 13: mod_base = OTHER; note = 2'-O-methylguanosine-3'-phosphate
  modified_base 14: mod_base = OTHER; note = 2'-O-methylguanosine-3'-phosphate
  modified_base 15: mod_base = OTHER; note = 2'-O-methyluridine-3'-phosphate
  modified_base 16: mod_base = OTHER; note = 2'-O-methylguanosine-3'-phosphate
  modified_base 17: mod_base = OTHER; note = 2'-O-methyladenosine-3'-phosphate
  modified_base 18: mod_base = OTHER; note = 2'-O-methylcytidine-3'-phosphate
  modified_base 19: mod_base = OTHER; note = 2'-O-methyladenosine-3'-phosphate
  modified_base 20: mod_base = OTHER; note = 2'-O-methyladenosine-3'-phosphate
  modified_base 21: mod_base = OTHER; note = 2'-O-methyladenosine-3'-phosphate
gccaggtgcgtgggtgacaaa

SEQ ID NO: 373 - RNA, 19 nt, synthetic construct
  source 1..19: mol_type = other RNA
  modified_base 1: mod_base = OTHER; note = 2'-O-methylcytidine-3'-phosphate
  modified_base 2: mod_base = OTHER; note = 2'-O-methyladenosine-3'-phosphate
  modified_base 4: mod_base = OTHER; note = 2'-O-methylguanosine-3'-phosphate
  modified_base 5: mod_base = OTHER; note = 2'-O-methyluridine-3'-phosphate
  modified_base 6: mod_base = OTHER; note = 2'-O-methylguanosine-3'-phosphate
  modified_base 10: mod_base = OTHER; note = 2'-O-methylguanosine-3'-phosphate
  modified_base 11: mod_base = OTHER; note = 2'-O-methylguanosine-3'-phosphate
  modified_base 13: mod_base = OTHER; note = 2'-O-methyluridine-3'-phosphate
  modified_base 14: mod_base = OTHER; note = 2'-O-methylguanosine-3'-phosphate
  modified_base 15: mod_base = OTHER; note = 2'-O-methyladenosine-3'-phosphate
  modified_base 16: mod_base = OTHER; note = 2'-O-methylcytidine-3'-phosphate
  modified_base 18: mod_base = OTHER; note = 2'-O-methyladenosine-3'-phosphorothioate
  modified_base 19: mod_base = OTHER; note = 2'-O-methyladenosine-3'-phosphate
caggtgcgtgggtgacaaa

SEQ ID NO: 374 - RNA, 21 nt, synthetic construct
  source 1..21: mol_type = other RNA
  modified_base 1: mod_base = OTHER; note = 2'-O-methylguanosine-3'-phosphate
  modified_base 2: mod_base = OTHER; note = 2'-O-methylcytidine-3'-phosphate
  modified_base 3: mod_base = OTHER; note = 2'-O-methylcytidine-3'-phosphate
  modified_base 4: mod_base = OTHER; note = 2'-O-methyladenosine-3'-phosphate
  modified_base 6: mod_base = OTHER; note = 2'-O-methylguanosine-3'-phosphate
  modified_base 7: mod_base = OTHER; note = 2'-O-methyluridine-3'-phosphate
  modified_base 8: mod_base = OTHER; note = 2'-O-methylguanosine-3'-phosphate
  modified_base 12: mod_base = OTHER; note = 2'-O-methylguanosine-3'-phosphate
  modified_base 13: mod_base = OTHER; note = 2'-O-methylguanosine-3'-phosphate
  modified_base 14: mod_base = OTHER; note = 2'-O-methylguanosine-3'-phosphate
  modified_base 15: mod_base = OTHER; note = 2'-O-methyluridine-3'-phosphate
  modified_base 16: mod_base = OTHER; note = 2'-O-methylguanosine-3'-phosphate
  modified_base 17: mod_base = OTHER; note = 2'-O-methyladenosine-3'-phosphate
  modified_base 18: mod_base = OTHER; note = 2'-O-methylcytidine-3'-phosphate
  modified_base 20: mod_base = OTHER; note = 2'-O-methyladenosine-3'-phosphorothioate
  modified_base 21: mod_base = OTHER; note = 2'-O-methyladenosine-3'-phosphate
gccaggtgcgtgggtgacaaa

SEQ ID NO: 375 - RNA, 21 nt, synthetic construct
  source 1..21: mol_type = other RNA
  modified_base 1: mod_base = OTHER; note = 2'-O-methylguanosine-3'-phosphorothioate
  modified_base 2: mod_base = OTHER; note = 2'-O-methyluridine-3'-phosphorothioate
  modified_base 3: mod_base = OTHER; note = 2'-O-methylcytidine-3'-phosphate
  modified_base 4: mod_base = OTHER; note = 2'-O-methyladenosine-3'-phosphate
  modified_base 5: mod_base = OTHER; note = 2'-O-methylcytidine-3'-phosphate
  modified_base 6: mod_base = OTHER; note = 2'-O-methylcytidine-3'-phosphate
  modified_base 7: mod_base = OTHER; note = 2'-fluorouridine-3'-phosphate
  modified_base 8: mod_base = OTHER; note = 2'-O-methylguanosine-3'-phosphate
  modified_base 9: mod_base = OTHER; note = 2'-fluorocytidine-3'-phosphate
  modified_base 10: mod_base = OTHER; note = 2'-fluoroguanosine-3'-phosphate
  modified_base 11: mod_base = OTHER; note = 2'-fluorouridine-3'-phosphate
  modified_base 12: mod_base = OTHER; note = 2'-O-methylguanosine-3'-phosphate
  modified_base 13: mod_base = OTHER; note = 2'-O-methyladenosine-3'-phosphate
  modified_base 14: mod_base = OTHER; note = 2'-O-methyladenosine-3'-phosphate
  modified_base 15: mod_base = OTHER; note = 2'-O-methylcytidine-3'-phosphate
  modified_base 16: mod_base = OTHER; note = 2'-O-methyladenosine-3'-phosphate
  modified_base 17: mod_base = OTHER; note = 2'-O-methyladenosine-3'-phosphate
  modified_base 18: mod_base = OTHER; note = 2'-O-methylguanosine-3'-phosphate
  modified_base 19: mod_base = OTHER; note = 2'-O-methylcytidine-3'-phosphate
  modified_base 20: mod_base = OTHER; note = 2'-O-methyladenosine-3'-phosphate
  modified_base 21: mod_base = OTHER; note = 2'-O-methyladenosine-3'-phosphate
gtcacctgcgtgaacaagcaa

SEQ ID NO: 376 - RNA, 19 nt, synthetic construct
  source 1..19: mol_type = other RNA
  modified_base 1: mod_base = OTHER; note = 2'-O-methylcytidine-3'-phosphate
  modified_base 2: mod_base = OTHER; note = 2'-O-methyladenosine-3'-phosphate
  modified_base 4: mod_base = OTHER; note = 2'-O-methylcytidine-3'-phosphate
  modified_base 5: mod_base = OTHER; note = 2'-O-methyluridine-3'-phosphate
  modified_base 6: mod_base = OTHER; note = 2'-O-methylguanosine-3'-phosphate
  modified_base 10: mod_base = OTHER; note = 2'-O-methylguanosine-3'-phosphate
  modified_base 11: mod_base = OTHER; note = 2'-O-methyladenosine-3'-phosphate
  modified_base 13: mod_base = OTHER; note = 2'-O-methylcytidine-3'-phosphate
  modified_base 14: mod_base = OTHER; note = 2'-O-methyladenosine-3'-phosphate
  modified_base 15: mod_base = OTHER; note = 2'-O-methyladenosine-3'-phosphate
  modified_base 16: mod_base = OTHER; note = 2'-O-methylguanosine-3'-phosphate
  modified_base 18: mod_base = OTHER; note = 2'-O-methyladenosine-3'-phosphorothioate
  modified_base 19: mod_base = OTHER; note = 2'-O-methyladenosine-3'-phosphate
cacctgcgtgaacaagcaa

SEQ ID NO: 377 - RNA, 21 nt, synthetic construct
  source 1..21: mol_type = other RNA
  modified_base 1: mod_base = OTHER; note = 2'-O-methylguanosine-3'-phosphate
  modified_base 2: mod_base = OTHER; note = 2'-O-methyluridine-3'-phosphate
  modified_base 3: mod_base = OTHER; note = 2'-O-methylcytidine-3'-phosphate
  modified_base 4: mod_base = OTHER; note = 2'-O-methyladenosine-3'-phosphate
  modified_base 6: mod_base = OTHER; note = 2'-O-methylcytidine-3'-phosphate
  modified_base 7: mod_base = OTHER; note = 2'-O-methyluridine-3'-phosphate
  modified_base 8: mod_base = OTHER; note = 2'-O-methylguanosine-3'-phosphate
  modified_base 12: mod_base = OTHER; note = 2'-O-methylguanosine-3'-phosphate
  modified_base 13: mod_base = OTHER; note = 2'-O-methyladenosine-3'-phosphate
  modified_base 14: mod_base = OTHER; note = 2'-O-methyladenosine-3'-phosphate
  modified_base 15: mod_base = OTHER; note = 2'-O-methylcytidine-3'-phosphate
  modified_base 16: mod_base = OTHER; note = 2'-O-methyladenosine-3'-phosphate
  modified_base 17: mod_base = OTHER; note = 2'-O-methyladenosine-3'-phosphate
  modified_base 18: mod_base = OTHER; note = 2'-O-methylguanosine-3'-phosphate
  modified_base 20: mod_base = OTHER; note = 2'-O-methyladenosine-3'-phosphorothioate
  modified_base 21: mod_base = OTHER; note = 2'-O-methyladenosine-3'-phosphate
gtcacctgcgtgaacaagcaa

SEQ ID NO: 378 - RNA, 21 nt, synthetic construct
  source 1..21: mol_type = other RNA
  modified_base 1: mod_base = OTHER; note = 2'-O-methylguanosine-3'-phosphorothioate
  modified_base 2: mod_base = OTHER; note = 2'-O-methyluridine-3'-phosphorothioate
  modified_base 3: mod_base = OTHER; note = 2'-O-methylguanosine-3'-phosphate
  modified_base 4: mod_base = OTHER; note = 2'-O-methyladenosine-3'-phosphate
  modified_base 5: mod_base = OTHER; note = 2'-O-methylcytidine-3'-phosphate
  modified_base 6: mod_base = OTHER; note = 2'-O-methyluridine-3'-phosphate
  modified_base 7: mod_base = OTHER; note = 2'-fluorouridine-3'-phosphate
  modified_base 8: mod_base = OTHER; note = 2'-O-methylcytidine-3'-phosphate
  modified_base 9: mod_base = OTHER; note = 2'-fluorocytidine-3'-phosphate
  modified_base 10: mod_base = OTHER; note = 2'-fluoroadenosine-3'-phosphate
  modified_base 11: mod_base = OTHER; note = 2'-fluorocytidine-3'-phosphate
  modified_base 12: mod_base = OTHER; note = 2'-O-methyluridine-3'-phosphate
  modified_base 13: mod_base = OTHER; note = 2'-O-methyladenosine-3'-phosphate
  modified_base 14: mod_base = OTHER; note = 2'-O-methyluridine-3'-phosphate
  modified_base 15: mod_base = OTHER; note = 2'-O-methylguanosine-3'-phosphate
  modified_base 16: mod_base = OTHER; note = 2'-O-methyladenosine-3'-phosphate
  modified_base 17: mod_base = OTHER; note = 2'-O-methylguanosine-3'-phosphate
  modified_base 18: mod_base = OTHER; note = 2'-O-methyluridine-3'-phosphate
  modified_base 19: mod_base = OTHER; note = 2'-O-methylguanosine-3'-phosphate
  modified_base 20: mod_base = OTHER; note = 2'-O-methylcytidine-3'-phosphate
  modified_base 21: mod_base = OTHER; note = 2'-O-methyladenosine-3'-phosphate
gtgacttccactatgagtgca

SEQ ID NO: 379 - RNA, 19 nt, synthetic construct
  source 1..19: mol_type = other RNA
  modified_base 1: mod_base = OTHER; note = 2'-O-methylguanosine-3'-phosphate
  modified_base 2: mod_base = OTHER; note = 2'-O-methyladenosine-3'-phosphate
  modified_base 4: mod_base = OTHER; note = 2'-O-methyluridine-3'-phosphate
  modified_base 5: mod_base = OTHER; note = 2'-O-methyluridine-3'-phosphate
  modified_base 6: mod_base = OTHER; note = 2'-O-methylcytidine-3'-phosphate
  modified_base 10: mod_base = OTHER; note = 2'-O-methyluridine-3'-phosphate
  modified_base 11: mod_base = OTHER; note = 2'-O-methyladenosine-3'-phosphate
  modified_base 13: mod_base = OTHER; note = 2'-O-methylguanosine-3'-phosphate
  modified_base 14: mod_base = OTHER; note = 2'-O-methyladenosine-3'-phosphate
  modified_base 15: mod_base = OTHER; note = 2'-O-methylguanosine-3'-phosphate
  modified_base 16: mod_base = OTHER; note = 2'-O-methyluridine-3'-phosphate
  modified_base 18: mod_base = OTHER; note = 2'-O-methylcytidine-3'-phosphorothioate
  modified_base 19: mod_base = OTHER; note = 2'-O-methyladenosine-3'-phosphate
gacttccactatgagtgca

SEQ ID NO: 380 - RNA, 21 nt, synthetic construct
  source 1..21: mol_type = other RNA
  modified_base 1: mod_base = OTHER; note = 2'-O-methylguanosine-3'-phosphate
  modified_base 2: mod_base = OTHER; note = 2'-O-methyluridine-3'-phosphate
  modified_base 3: mod_base = OTHER; note = 2'-O-methylguanosine-3'-phosphate
  modified_base 4: mod_base = OTHER; note = 2'-O-methyladenosine-3'-phosphate
  modified_base 6: mod_base = OTHER; note = 2'-O-methyluridine-3'-phosphate
  modified_base 7: mod_base = OTHER; note = 2'-O-methyluridine-3'-phosphate
  modified_base 8: mod_base = OTHER; note = 2'-O-methylcytidine-3'-phosphate
  modified_base 12: mod_base = OTHER; note = 2'-O-methyluridine-3'-phosphate
  modified_base 13: mod_base = OTHER; note = 2'-O-methyladenosine-3'-phosphate
  modified_base 14: mod_base = OTHER; note = 2'-O-methyluridine-3'-phosphate
  modified_base 15: mod_base = OTHER; note = 2'-O-methylguanosine-3'-phosphate
  modified_base 16: mod_base = OTHER; note = 2'-O-methyladenosine-3'-phosphate
  modified_base 17: mod_base = OTHER; note = 2'-O-methylguanosine-3'-phosphate
  modified_base 18: mod_base = OTHER; note = 2'-O-methyluridine-3'-phosphate
  modified_base 20: mod_base = OTHER; note = 2'-O-methylcytidine-3'-phosphorothioate
  modified_base 21: mod_base = OTHER; note = 2'-O-methyladenosine-3'-phosphate
gtgacttccactatgagtgca

SEQ ID NO: 381 - RNA, 21 nt, synthetic construct
  source 1..21: mol_type = other RNA
  modified_base 1: mod_base = OTHER; note = 2'-O-methylguanosine-3'-phosphorothioate
  modified_base 2: mod_base = OTHER; note = 2'-O-methyladenosine-3'-phosphorothioate
  modified_base 3: mod_base = OTHER; note = 2'-O-methylcytidine-3'-phosphate
  modified_base 4: mod_base = OTHER; note = 2'-O-methyluridine-3'-phosphate
  modified_base 5: mod_base = OTHER; note = 2'-O-methyluridine-3'-phosphate
  modified_base 6: mod_base = OTHER; note = 2'-O-methylcytidine-3'-phosphate
  modified_base 7: mod_base = OTHER; note = 2'-fluorocytidine-3'-phosphate
  modified_base 8: mod_base = OTHER; note = 2'-O-methyladenosine-3'-phosphate
  modified_base 9: mod_base = OTHER; note = 2'-fluorocytidine-3'-phosphate
  modified_base 10: mod_base = OTHER; note = 2'-fluorouridine-3'-phosphate
  modified_base 11: mod_base = OTHER; note = 2'-fluoroadenosine-3'-phosphate
  modified_base 12: mod_base = OTHER; note = 2'-O-methyluridine-3'-phosphate
  modified_base 13: mod_base = OTHER; note = 2'-O-methylguanosine-3'-phosphate
  modified_base 14: mod_base = OTHER; note = 2'-O-methyladenosine-3'-phosphate
  modified_base 15: mod_base = OTHER; note = 2'-O-methylguanosine-3'-phosphate
  modified_base 16: mod_base = OTHER; note = 2'-O-methyluridine-3'-phosphate
  modified_base 17: mod_base = OTHER; note = 2'-O-methylguanosine-3'-phosphate
  modified_base 18: mod_base = OTHER; note = 2'-O-methylcytidine-3'-phosphate
  modified_base 19: mod_base = OTHER; note = 2'-O-methylguanosine-3'-phosphate
  modified_base 20: mod_base = OTHER; note = 2'-O-methyladenosine-3'-phosphate
  modified_base 21: mod_base = OTHER; note = 2'-O-methyladenosine-3'-phosphate
gacttccactatgagtgcgaa

SEQ ID NO: 382 - RNA, 21 nt, synthetic construct
  source 1..21: mol_type = other RNA
  modified_base 1: mod_base = OTHER; note = 2'-O-methyluridine-3'-phosphorothioate
  modified_base 2: mod_base = OTHER; note = 2'-O-methylcytidine-3'-phosphorothioate
  modified_base 3: mod_base = OTHER; note = 2'-O-methylcytidine-3'-phosphate
  modified_base 4: mod_base = OTHER; note = 2'-O-methyladenosine-3'-phosphate
  modified_base 5: mod_base = OTHER; note = 2'-O-methylcytidine-3'-phosphate
  modified_base 6: mod_base = OTHER; note = 2'-O-methyluridine-3'-phosphate
  modified_base 7: mod_base = OTHER; note = 2'-fluoroadenosine-3'-phosphate
  modified_base 8: mod_base = OTHER; note = 2'-O-methyluridine-3'-phosphate
  modified_base 9: mod_base = OTHER; note = 2'-fluoroguanosine-3'-phosphate
  modified_base 10: mod_base = OTHER; note = 2'-fluoroadenosine-3'-phosphate
  modified_base 11: mod_base = OTHER; note = 2'-fluoroguanosine-3'-phosphate
  modified_base 12: mod_base = OTHER; note = 2'-O-methyluridine-3'-phosphate
  modified_base 13: mod_base = OTHER; note = 2'-O-methylguanosine-3'-phosphate
  modified_base 14: mod_base = OTHER; note = 2'-O-methylcytidine-3'-phosphate
  modified_base 15: mod_base = OTHER; note = 2'-O-methylguanosine-3'-phosphate
  modified_base 16: mod_base = OTHER; note = 2'-O-methyladenosine-3'-phosphate
  modified_base 17: mod_base = OTHER; note = 2'-O-methylguanosine-3'-phosphate
  modified_base 18: mod_base = OTHER; note = 2'-O-methyluridine-3'-phosphate
  modified_base 19: mod_base = OTHER; note = 2'-O-methylguanosine-3'-phosphate
  modified_base 20: mod_base = OTHER; note = 2'-O-methylcytidine-3'-phosphate
  modified_base 21: mod_base = OTHER; note = 2'-O-methyladenosine-3'-phosphate
tccactatgagtgcgagtgca

SEQ ID NO: 383 - RNA, 21 nt, synthetic construct
  source 1..21: mol_type = other RNA
  modified_base 1: mod_base = OTHER; note = 2'-O-methyluridine-3'-phosphate
  modified_base 2: mod_base = OTHER; note = 2'-O-methylcytidine-3'-phosphate
  modified_base 3: mod_base = OTHER; note = 2'-O-methylcytidine-3'-phosphate
  modified_base 4: mod_base = OTHER; note = 2'-O-methyladenosine-3'-phosphate
  modified_base 6: mod_base = OTHER; note = 2'-O-methyluridine-3'-phosphate
  modified_base 7: mod_base = OTHER; note = 2'-O-methyladenosine-3'-phosphate
  modified_base 8: mod_base = OTHER; note = 2'-O-methyluridine-3'-phosphate
  modified_base 12: mod_base = OTHER; note = 2'-O-methyluridine-3'-phosphate
  modified_base 13: mod_base = OTHER; note = 2'-O-methylguanosine-3'-phosphate
  modified_base 14: mod_base = OTHER; note = 2'-O-methylcytidine-3'-phosphate
  modified_base 15: mod_base = OTHER; note = 2'-O-methylguanosine-3'-phosphate
  modified_base 16: mod_base = OTHER; note = 2'-O-methyladenosine-3'-phosphate
  modified_base 17: mod_base = OTHER; note = 2'-O-methylguanosine-3'-phosphate
  modified_base 18: mod_base = OTHER; note = 2'-O-methyluridine-3'-phosphate
  modified_base 20: mod_base = OTHER; note = 2'-O-methylcytidine-3'-phosphorothioate
  modified_base 21: mod_base = OTHER; note = 2'-O-methyladenosine-3'-phosphate
tccactatgagtgcgagtgca

SEQ ID NO: 384 - RNA, 21 nt, synthetic construct
  source 1..21: mol_type = other RNA
  modified_base 1: mod_base = OTHER; note = 2'-O-methyladenosine-3'-phosphorothioate
  modified_base 2: mod_base = OTHER; note = 2'-O-methylcytidine-3'-phosphorothioate
  modified_base 3: mod_base = OTHER; note = 2'-O-methyluridine-3'-phosphate
  modified_base 4: mod_base = OTHER; note = 2'-O-methyladenosine-3'-phosphate
  modified_base 5: mod_base = OTHER; note = 2'-O-methyluridine-3'-phosphate
  modified_base 6: mod_base = OTHER; note = 2'-O-methylguanosine-3'-phosphate
  modified_base 7: mod_base = OTHER; note = 2'-fluoroadenosine-3'-phosphate
  modified_base 8: mod_base = OTHER; note = 2'-O-methylguanosine-3'-phosphate
  modified_base 9: mod_base = OTHER; note = 2'-fluorouridine-3'-phosphate
  modified_base 10: mod_base = OTHER; note = 2'-fluoroguanosine-3'-phosphate
  modified_base 11: mod_base = OTHER; note = 2'-fluorocytidine-3'-phosphate
  modified_base 12: mod_base = OTHER; note = 2'-O-methylguanosine-3'-phosphate
  modified_base 13: mod_base = OTHER; note = 2'-O-methyladenosine-3'-phosphate
  modified_base 14: mod_base = OTHER; note = 2'-O-methylguanosine-3'-phosphate
  modified_base 15: mod_base = OTHER; note = 2'-O-methyluridine-3'-phosphate
  modified_base 16: mod_base = OTHER; note = 2'-O-methylguanosine-3'-phosphate
  modified_base 17: mod_base = OTHER; note = 2'-O-methylcytidine-3'-phosphate
  modified_base 18: mod_base = OTHER; note = 2'-O-methyladenosine-3'-phosphate
  modified_base 19: mod_base = OTHER; note = 2'-O-methyluridine-3'-phosphate
  modified_base 20: mod_base = OTHER; note = 2'-O-methylcytidine-3'-phosphate
  modified_base 21: mod_base = OTHER; note = 2'-O-methyladenosine-3'-phosphate
actatgagtgcgagtgcatca

SEQ ID NO: 385 - RNA, 19 nt, synthetic construct
  source 1..19: mol_type = other RNA
  modified_base 1: mod_base = OTHER; note = 2'-O-methyluridine-3'-phosphate
  modified_base 2: mod_base = OTHER; note = 2'-O-methyladenosine-3'-phosphate
  modified_base 4: mod_base = OTHER; note = 2'-O-methylguanosine-3'-phosphate
  modified_base 5: mod_base = OTHER; note = 2'-O-methyladenosine-3'-phosphate
  modified_base 6: mod_base = OTHER; note = 2'-O-methylguanosine-3'-phosphate
  modified_base 10: mod_base = OTHER; note = 2'-O-methylguanosine-3'-phosphate
  modified_base 11: mod_base = OTHER; note = 2'-O-methyladenosine-3'-phosphate
  modified_base 13: mod_base = OTHER; note = 2'-O-methyluridine-3'-phosphate
  modified_base 14: mod_base = OTHER; note = 2'-O-methylguanosine-3'-phosphate
  modified_base 15: mod_base = OTHER; note = 2'-O-methylcytidine-3'-phosphate
  modified_base 16: mod_base = OTHER; note = 2'-O-methyladenosine-3'-phosphate
  modified_base 18: mod_base = OTHER; note = 2'-O-methylcytidine-3'-phosphorothioate
  modified_base 19: mod_base = OTHER; note = 2'-O-methyladenosine-3'-phosphate
tatgagtgcgagtgcatca

SEQ ID NO: 386 - RNA, 21 nt, synthetic construct
  source 1..21: mol_type = other RNA
  modified_base 1: mod_base = OTHER; note = 2'-O-methyladenosine-3'-phosphate
  modified_base 2: mod_base = OTHER; note = 2'-O-methylcytidine-3'-phosphate
  modified_base 3: mod_base = OTHER; note = 2'-O-methyluridine-3'-phosphate
  modified_base 4: mod_base = OTHER; note = 2'-O-methyladenosine-3'-phosphate
  modified_base 6: mod_base = OTHER; note = 2'-O-methylguanosine-3'-phosphate
  modified_base 7: mod_base = OTHER; note = 2'-O-methyladenosine-3'-phosphate
  modified_base 8: mod_base = OTHER; note = 2'-O-methylguanosine-3'-phosphate
  modified_base 12: mod_base = OTHER; note = 2'-O-methylguanosine-3'-phosphate
  modified_base 13: mod_base = OTHER; note = 2'-O-methyladenosine-3'-phosphate
  modified_base 14: mod_base = OTHER; note = 2'-O-methylguanosine-3'-phosphate
  modified_base 15: mod_base = OTHER; note = 2'-O-methyluridine-3'-phosphate
  modified_base 16: mod_base = OTHER; note = 2'-O-methylguanosine-3'-phosphate
  modified_base 17: mod_base = OTHER; note = 2'-O-methylcytidine-3'-phosphate
  modified_base 18: mod_base = OTHER; note = 2'-O-methyladenosine-3'-phosphate
  modified_base 20: mod_base = OTHER; note = 2'-O-methylcytidine-3'-phosphorothioate
  modified_base 21: mod_base = OTHER; note = 2'-O-methyladenosine-3'-phosphate
actatgagtgcgagtgcatca

SEQ ID NO: 387 - RNA, 21 nt, synthetic construct
  source 1..21: mol_type = other RNA
  modified_base 1: mod_base = OTHER; note = 2'-O-methylcytidine-3'-phosphorothioate
  modified_base 2: mod_base = OTHER; note = 2'-O-methyluridine-3'-phosphorothioate
  modified_base 3: mod_base = OTHER; note = 2'-O-methyladenosine-3'-phosphate
  modified_base 4: mod_base = OTHER; note = 2'-O-methyluridine-3'-phosphate
  modified_base 5: mod_base = OTHER; note = 2'-O-methylguanosine-3'-phosphate
  modified_base 6: mod_base = OTHER; note = 2'-O-methyladenosine-3'-phosphate
  modified_base 7: mod_base = OTHER; note = 2'-fluoroguanosine-3'-phosphate
  modified_base 8: mod_base = OTHER; note = 2'-O-methyluridine-3'-phosphate
  modified_base 9: mod_base = OTHER; note = 2'-fluoroguanosine-3'-phosphate
  modified_base 10: mod_base = OTHER; note = 2'-fluorocytidine-3'-phosphate
  modified_base 11: mod_base = OTHER; note = 2'-fluoroguanosine-3'-phosphate
  modified_base 12: mod_base = OTHER; note = 2'-O-methyladenosine-3'-phosphate
  modified_base 13: mod_base = OTHER; note = 2'-O-methylguanosine-3'-phosphate
  modified_base 14: mod_base = OTHER; note = 2'-O-methyluridine-3'-phosphate
  modified_base 15: mod_base = OTHER; note = 2'-O-methylguanosine-3'-phosphate
  modified_base 16: mod_base = OTHER; note = 2'-O-methylcytidine-3'-phosphate
  modified_base 17: mod_base = OTHER; note = 2'-O-methyladenosine-3'-phosphate
  modified_base 18: mod_base = OTHER; note = 2'-O-methyluridine-3'-phosphate
  modified_base 19: mod_base = OTHER; note = 2'-O-methylcytidine-3'-phosphate
  modified_base 20: mod_base = OTHER; note = 2'-O-methyluridine-3'-phosphate
  modified_base 21: mod_base = OTHER; note = 2'-O-methyladenosine-3'-phosphate
ctatgagtgcgagtgcatcta

SEQ ID NO: 388 - RNA, 21 nt, synthetic construct
  source 1..21: mol_type = other RNA
  modified_base 1: mod_base = OTHER; note = 2'-O-methylcytidine-3'-phosphorothioate
  modified_base 2: mod_base = OTHER; note = 2'-O-methyluridine-3'-phosphorothioate
  modified_base 3: mod_base = OTHER; note = 2'-O-methyladenosine-3'-phosphate
  modified_base 4: mod_base = OTHER; note = 2'-O-methyluridine-3'-phosphate
  modified_base 5: mod_base = OTHER; note = 2'-O-methyluridine-3'-phosphate
  modified_base 6: mod_base = OTHER; note = 2'-O-methylcytidine-3'-phosphate
  modified_base 7: mod_base = OTHER; note = 2'-fluorocytidine-3'-phosphate
  modified_base 8: mod_base = OTHER; note = 2'-O-methyladenosine-3'-phosphate
  modified_base 9: mod_base = OTHER; note = 2'-fluorocytidine-3'-phosphate
  modified_base 10: mod_base = OTHER; note = 2'-fluorocytidine-3'-phosphate
  modified_base 11: mod_base = OTHER; note = 2'-fluorouridine-3'-phosphate
  modified_base 12: mod_base = OTHER; note = 2'-O-methyluridine-3'-phosphate
  modified_base 13: mod_base = OTHER; note = 2'-O-methyluridine-3'-phosphate
  modified_base 14: mod_base = OTHER; note = 2'-O-methylguanosine-3'-phosphate
  modified_base 15: mod_base = OTHER; note = 2'-O-methyladenosine-3'-phosphate
  modified_base 16: mod_base = OTHER; note = 2'-O-methylcytidine-3'-phosphate
  modified_base 17: mod_base = OTHER; note = 2'-O-methylguanosine-3'-phosphate
  modified_base 18: mod_base = OTHER; note = 2'-O-methylguanosine-3'-phosphate
  modified_base 19: mod_base = OTHER; note = 2'-O-methylcytidine-3'-phosphate
  modified_base 20: mod_base = OTHER; note = 2'-O-methyladenosine-3'-phosphate
  modified_base 21: mod_base = OTHER; note = 2'-O-methyladenosine-3'-phosphate
ctattccacctttgacggcaa

SEQ ID NO: 389 - RNA, 21 nt, synthetic construct
  source 1..21: mol_type = other RNA
  modified_base 1: mod_base = OTHER; note = 2'-O-methyluridine-3'-phosphorothioate
  modified_base 2: mod_base = OTHER; note = 2'-O-methyladenosine-3'-phosphorothioate
  modified_base 3: mod_base = OTHER; note = 2'-O-methyluridine-3'-phosphate
  modified_base 4: mod_base = OTHER; note = 2'-O-methyluridine-3'-phosphate
  modified_base 5: mod_base = OTHER; note = 2'-O-methylcytidine-3'-phosphate
  modified_base 6: mod_base = OTHER; note = 2'-O-methylcytidine-3'-phosphate
  modified_base 7: mod_base = OTHER; note = 2'-fluoroadenosine-3'-phosphate
  modified_base 8: mod_base = OTHER; note = 2'-O-methylcytidine-3'-phosphate
  modified_base 9: mod_base = OTHER; note = 2'-fluorocytidine-3'-phosphate
  modified_base 10: mod_base = OTHER; note = 2'-fluorouridine-3'-phosphate
  modified_base 11: mod_base = OTHER; note = 2'-fluorouridine-3'-phosphate
  modified_base 12: mod_base = OTHER; note = 2'-O-methyluridine-3'-phosphate
  modified_base 13: mod_base = OTHER; note = 2'-O-methylguanosine-3'-phosphate
  modified_base 14: mod_base = OTHER; note = 2'-O-methyladenosine-3'-phosphate
  modified_base 15: mod_base = OTHER; note = 2'-O-methylcytidine-3'-phosphate
  modified_base 16: mod_base = OTHER; note = 2'-O-methylguanosine-3'-phosphate
  modified_base 17: mod_base = OTHER; note = 2'-O-methylguanosine-3'-phosphate
  modified_base 18: mod_base = OTHER; note = 2'-O-methylcytidine-3'-phosphate
  modified_base 19: mod_base = OTHER; note = 2'-O-methyladenosine-3'-phosphate
  modified_base 20: mod_base = OTHER; note = 2'-O-methylcytidine-3'-phosphate
  modified_base 21: mod_base = OTHER; note = 2'-O-methyladenosine-3'-phosphate
tattccacctttgacggcaca

SEQ ID NO: 390 - RNA, 19 nt, synthetic construct
  source 1..19: mol_type = other RNA
  modified_base 1: mod_base = OTHER; note = 2'-O-methyluridine-3'-phosphate
  modified_base 2: mod_base = OTHER; note = 2'-O-methyluridine-3'-phosphate
  modified_base 4: mod_base = OTHER; note = 2'-O-methylcytidine-3'-phosphate
  modified_base 5: mod_base = OTHER; note = 2'-O-methyladenosine-3'-phosphate
  modified_base 6: mod_base = OTHER; note = 2'-O-methylcytidine-3'-phosphate
  modified_base 10: mod_base = OTHER; note = 2'-O-methyluridine-3'-phosphate
  modified_base 11: mod_base = OTHER; note = 2'-O-methylguanosine-3'-phosphate
  modified_base 13: mod_base = OTHER; note = 2'-O-methylcytidine-3'-phosphate
  modified_base 14: mod_base = OTHER; note = 2'-O-methylguanosine-3'-phosphate
  modified_base 15: mod_base = OTHER; note = 2'-O-methylguanosine-3'-phosphate
  modified_base 16: mod_base = OTHER; note = 2'-O-methylcytidine-3'-phosphate
  modified_base 18: mod_base = OTHER; note = 2'-O-methylcytidine-3'-phosphorothioate
  modified_base 19: mod_base = OTHER; note = 2'-O-methyladenosine-3'-phosphate
ttccacctttgacggcaca

SEQ ID NO: 391 - RNA, 21 nt, synthetic construct
  source 1..21: mol_type = other RNA
  modified_base 1: mod_base = OTHER; note = 2'-O-methyluridine-3'-phosphate
  modified_base 2: mod_base = OTHER; note = 2'-O-methyladenosine-3'-phosphate
  modified_base 3: mod_base = OTHER; note = 2'-O-methyluridine-3'-phosphate
  modified_base 4: mod_base = OTHER; note = 2'-O-methyluridine-3'-phosphate
  modified_base 6: mod_base = OTHER; note = 2'-O-methylcytidine-3'-phosphate
  modified_base 7: mod_base = OTHER; note = 2'-O-methyladenosine-3'-phosphate
  modified_base 8: mod_base = OTHER; note = 2'-O-methylcytidine-3'-phosphate
  modified_base 12: mod_base = OTHER; note = 2'-O-methyluridine-3'-phosphate
  modified_base 13: mod_base = OTHER; note = 2'-O-methylguanosine-3'-phosphate
  modified_base 14: mod_base = OTHER; note = 2'-O-methyladenosine-3'-phosphate
  modified_base 15: mod_base = OTHER; note = 2'-O-methylcytidine-3'-phosphate
  modified_base 16: mod_base = OTHER; note = 2'-O-methylguanosine-3'-phosphate
  modified_base 17: mod_base = OTHER; note = 2'-O-methylguanosine-3'-phosphate
  modified_base 18: mod_base = OTHER; note = 2'-O-methylcytidine-3'-phosphate
  modified_base 20: mod_base = OTHER; note = 2'-O-methylcytidine-3'-phosphorothioate
  modified_base 21: mod_base = OTHER; note = 2'-O-methyladenosine-3'-phosphate
tattccacctttgacggcaca

SEQ ID NO: 392 - RNA, 21 nt, synthetic construct
  source 1..21: mol_type = other RNA
  modified_base 1: mod_base = OTHER; note = 2'-O-methylcytidine-3'-phosphorothioate
  modified_base 2: mod_base = OTHER; note = 2'-O-methyladenosine-3'-phosphorothioate
  modified_base 3: mod_base = OTHER; note = 2'-O-methylcytidine-3'-phosphate
  modified_base 4: mod_base = OTHER; note = 2'-O-methylcytidine-3'-phosphate
  modified_base 5: mod_base = OTHER; note = 2'-O-methyluridine-3'-phosphate
  modified_base 6: mod_base = OTHER; note = 2'-O-methyluridine-3'-phosphate
  modified_base 7: mod_base = OTHER; note = 2'-fluorouridine-3'-phosphate
  modified_base 8: mod_base = OTHER; note = 2'-O-methylguanosine-3'-phosphate
  modified_base 9: mod_base = OTHER; note = 2'-fluoroadenosine-3'-phosphate
  modified_base 10: mod_base = OTHER; note = 2'-fluorocytidine-3'-phosphate
  modified_base 11: mod_base = OTHER; note = 2'-fluoroguanosine-3'-phosphate
  modified_base 12: mod_base = OTHER; note = 2'-O-methylguanosine-3'-phosphate
  modified_base 13: mod_base = OTHER; note = 2'-O-methylcytidine-3'-phosphate
  modified_base 14: mod_base = OTHER; note = 2'-O-methyladenosine-3'-phosphate
  modified_base 15: mod_base = OTHER; note = 2'-O-methylcytidine-3'-phosphate
  modified_base 16: mod_base = OTHER; note = 2'-O-methylcytidine-3'-phosphate
  modified_base 17: mod_base = OTHER; note = 2'-O-methyluridine-3'-phosphate
  modified_base 18: mod_base = OTHER; note = 2'-O-methylcytidine-3'-phosphate
  modified_base 19: mod_base = OTHER; note = 2'-O-methyluridine-3'-phosphate
  modified_base 20: mod_base = OTHER; note = 2'-O-methyluridine-3'-phosphate
  modified_base 21: mod_base = OTHER; note = 2'-O-methyladenosine-3'-phosphate
cacctttgacggcacctctta

SEQ ID NO: 393 - RNA, 21 nt, synthetic construct
  source 1..21: mol_type = other RNA
  modified_base 1: mod_base = OTHER; note = 2'-O-methylcytidine-3'-phosphorothioate
  modified_base 2: mod_base = OTHER; note = 2'-O-methylcytidine-3'-phosphorothioate
  modified_base 3: mod_base = OTHER; note = 2'-O-methyluridine-3'-phosphate
  modified_base 4: mod_base = OTHER; note = 2'-O-methyluridine-3'-phosphate
  modified_base 5: mod_base = OTHER; note = 2'-O-methyluridine-3'-phosphate
  modified_base 6: mod_base = OTHER; note = 2'-O-methylguanosine-3'-phosphate
  modified_base 7: mod_base = OTHER; note = 2'-fluoroadenosine-3'-phosphate
  modified_base 8: mod_base = OTHER; note = 2'-O-methylcytidine-3'-phosphate
  modified_base 9: mod_base = OTHER; note = 2'-fluoroguanosine-3'-phosphate
  modified_base 10: mod_base = OTHER; note = 2'-fluoroguanosine-3'-phosphate
  modified_base 11: mod_base = OTHER; note = 2'-fluorocytidine-3'-phosphate
  modified_base 12: mod_base = OTHER; note = 2'-O-methyladenosine-3'-phosphate
  modified_base 13: mod_base = OTHER; note = 2'-O-methylcytidine-3'-phosphate
  modified_base 14: mod_base = OTHER; note = 2'-O-methylcytidine-3'-phosphate
  modified_base 15: mod_base = OTHER; note = 2'-O-methyluridine-3'-phosphate
  modified_base 16: mod_base = OTHER; note = 2'-O-methylcytidine-3'-phosphate
  modified_base 17: mod_base = OTHER; note = 2'-O-methyluridine-3'-phosphate
  modified_base 18: mod_base = OTHER; note = 2'-O-methyluridine-3'-phosphate
  modified_base 19: mod_base = OTHER; note = 2'-O-methyladenosine-3'-phosphate
  modified_base 20: mod_base = OTHER; note = 2'-O-methylcytidine-3'-phosphate
  modified_base 21: mod_base = OTHER; note = 2'-O-methyladenosine-3'-phosphate
cctttgacggcacctcttaca

SEQ ID NO: 394 - RNA, 19 nt, synthetic construct
  source 1..19: mol_type = other RNA
  modified_base 1: mod_base = OTHER; note = 2'-O-methyluridine-3'-phosphate
  modified_base 2: mod_base = OTHER; note = 2'-O-methyluridine-3'-phosphate
  modified_base 4: mod_base = OTHER; note = 2'-O-methylguanosine-3'-phosphate
  modified_base 5: mod_base = OTHER; note = 2'-O-methyladenosine-3'-phosphate
  modified_base 6: mod_base = OTHER; note = 2'-O-methylcytidine-3'-phosphate
  modified_base 10: mod_base = OTHER; note = 2'-O-methyladenosine-3'-phosphate
  modified_base 11: mod_base = OTHER; note = 2'-O-methylcytidine-3'-phosphate
  modified_base 13: mod_base = OTHER; note = 2'-O-methyluridine-3'-phosphate
  modified_base 14: mod_base = OTHER; note = 2'-O-methylcytidine-3'-phosphate
  modified_base 15: mod_base = OTHER; note = 2'-O-methyluridine-3'-phosphate
  modified_base 16: mod_base = OTHER; note = 2'-O-methyluridine-3'-phosphate
  modified_base 18: mod_base = OTHER; note = 2'-O-methylcytidine-3'-phosphorothioate
  modified_base 19: mod_base = OTHER; note = 2'-O-methyladenosine-3'-phosphate
tttgacggcacctcttaca

SEQ ID NO: 395 - RNA, 21 nt, synthetic construct
  source 1..21: mol_type = other RNA
  modified_base 1: mod_base = OTHER; note = 2'-O-methylcytidine-3'-phosphate
  modified_base 2: mod_base = OTHER; note = 2'-O-methylcytidine-3'-phosphate
  modified_base 3: mod_base = OTHER; note = 2'-O-methyluridine-3'-phosphate
  modified_base 4: mod_base = OTHER; note = 2'-O-methyluridine-3'-phosphate
  modified_base 6: mod_base = OTHER; note = 2'-O-methylguanosine-3'-phosphate
  modified_base 7: mod_base = OTHER; note = 2'-O-methyladenosine-3'-phosphate
  modified_base 8: mod_base = OTHER; note = 2'-O-methylcytidine-3'-phosphate
  modified_base 12: mod_base = OTHER; note = 2'-O-methyladenosine-3'-phosphate
  modified_base 13: mod_base = OTHER; note = 2'-O-methylcytidine-3'-phosphate
  modified_base 14: mod_base = OTHER; note = 2'-O-methylcytidine-3'-phosphate
  modified_base 15: mod_base = OTHER; note = 2'-O-methyluridine-3'-phosphate
  modified_base 16: mod_base = OTHER; note = 2'-O-methylcytidine-3'-phosphate
  modified_base 17: mod_base = OTHER; note = 2'-O-methyluridine-3'-phosphate
  modified_base 18: mod_base = OTHER; note = 2'-O-methyluridine-3'-phosphate
  modified_base 20: mod_base = OTHER; note = 2'-O-methylcytidine-3'-phosphorothioate
  modified_base 21: mod_base = OTHER; note = 2'-O-methyladenosine-3'-phosphate
cctttgacggcacctcttaca

SEQ ID NO: 396 - RNA, 21 nt, synthetic construct
  source 1..21: mol_type = other RNA
  modified_base 1: mod_base = OTHER; note = 2'-O-methyluridine-3'-phosphorothioate
  modified_base 2: mod_base = OTHER; note = 2'-O-methyluridine-3'-phosphorothioate
  modified_base 3: mod_base = OTHER; note = 2'-O-methyluridine-3'-phosphate
  modified_base 4: mod_base = OTHER; note = 2'-O-methylguanosine-3'-phosphate
  modified_base 5: mod_base = OTHER; note = 2'-O-methyladenosine-3'-phosphate
  modified_base 6: mod_base = OTHER; note = 2'-O-methylcytidine-3'-phosphate
  modified_base 7: mod_base = OTHER; note = 2'-fluoroguanosine-3'-phosphate
  modified_base 8: mod_base = OTHER; note = 2'-O-methylguanosine-3'-phosphate
  modified_base 9: mod_base = OTHER; note = 2'-fluorocytidine-3'-phosphate
  modified_base 10: mod_base = OTHER; note = 2'-fluoroadenosine-3'-phosphate
  modified_base 11: mod_base = OTHER; note = 2'-fluorocytidine-3'-phosphate
  modified_base 12: mod_base = OTHER; note = 2'-O-methylcytidine-3'-phosphate
  modified_base 13: mod_base = OTHER; note = 2'-O-methyluridine-3'-phosphate
  modified_base 14: mod_base = OTHER; note = 2'-O-methylcytidine-3'-phosphate
  modified_base 15: mod_base = OTHER; note = 2'-O-methyluridine-3'-phosphate
  modified_base 16: mod_base = OTHER; note = 2'-O-methyluridine-3'-phosphate
  modified_base 17: mod_base = OTHER; note = 2'-O-methyladenosine-3'-phosphate
  modified_base 18: mod_base = OTHER; note = 2'-O-methylcytidine-3'-phosphate
  modified_base 19: mod_base = OTHER; note = 2'-O-methyladenosine-3'-phosphate
  modified_base 20: mod_base = OTHER; note = 2'-O-methylcytidine-3'-phosphate
  modified_base 21: mod_base = OTHER; note = 2'-O-methyladenosine-3'-phosphate
tttgacggcacctcttacaca

SEQ ID NO: 397 - RNA, 19 nt, synthetic construct
  source 1..19: mol_type = other RNA
  modified_base 1: mod_base = OTHER; note = 2'-O-methyluridine-3'-phosphate
  modified_base 2: mod_base = OTHER; note = 2'-O-methylguanosine-3'-phosphate
  modified_base 4: mod_base = OTHER; note = 2'-O-methylcytidine-3'-phosphate
  modified_base 5: mod_base = OTHER; note = 2'-O-methylguanosine-3'-phosphate
  modified_base 6: mod_base = OTHER; note = 2'-O-methylguanosine-3'-phosphate
  modified_base 10: mod_base = OTHER; note = 2'-O-methylcytidine-3'-phosphate
  modified_base 11: mod_base = OTHER; note = 2'-O-methyluridine-3'-phosphate
  modified_base 13: mod_base = OTHER; note = 2'-O-methyluridine-3'-phosphate
  modified_base 14: mod_base = OTHER; note = 2'-O-methyluridine-3'-phosphate
  modified_base 15: mod_base = OTHER; note = 2'-O-methyladenosine-3'-phosphate
  modified_base 16: mod_base = OTHER; note = 2'-O-methylcytidine-3'-phosphate
  modified_base 18: mod_base = OTHER; note = 2'-O-methylcytidine-3'-phosphorothioate
  modified_base 19: mod_base = OTHER; note = 2'-O-methyladenosine-3'-phosphate
tgacggcacctcttacaca

SEQ ID NO: 398 - RNA, 21 nt, synthetic construct
  source 1..21: mol_type = other RNA
  modified_base 1: mod_base = OTHER; note = 2'-O-methyluridine-3'-phosphate
  modified_base 2: mod_base = OTHER; note = 2'-O-methyluridine-3'-phosphate
  modified_base 3: mod_base = OTHER; note = 2'-O-methyluridine-3'-phosphate
  modified_base 4: mod_base = OTHER; note = 2'-O-methylguanosine-3'-phosphate
  modified_base 6: mod_base = OTHER; note = 2'-O-methylcytidine-3'-phosphate
  modified_base 7: mod_base = OTHER; note = 2'-O-methylguanosine-3'-phosphate
  modified_base 8: mod_base = OTHER; note = 2'-O-methylguanosine-3'-phosphate
  modified_base 12: mod_base = OTHER; note = 2'-O-methylcytidine-3'-phosphate
  modified_base 13: mod_base = OTHER; note = 2'-O-methyluridine-3'-phosphate
  modified_base 14: mod_base = OTHER; note = 2'-O-methylcytidine-3'-phosphate
  modified_base 15: mod_base = OTHER; note = 2'-O-methyluridine-3'-phosphate
  modified_base 16: mod_base = OTHER; note = 2'-O-methyluridine-3'-phosphate
  modified_base 17: mod_base = OTHER; note = 2'-O-methyladenosine-3'-phosphate
  modified_base 18: mod_base = OTHER; note = 2'-O-methylcytidine-3'-phosphate
  modified_base 20: mod_base = OTHER; note = 2'-O-methylcytidine-3'-phosphorothioate
  modified_base 21: mod_base = OTHER; note = 2'-O-methyladenosine-3'-phosphate
tttgacggcacctcttacaca

SEQ ID NO: 399 - RNA, 21 nt, synthetic construct
  source 1..21: mol_type = other RNA
  modified_base 1: mod_base = OTHER; note = 2'-O-methyluridine-3'-phosphorothioate
  modified_base 2: mod_base = OTHER; note = 2'-O-methyluridine-3'-phosphorothioate
  modified_base 3: mod_base = OTHER; note = 2'-O-methylguanosine-3'-phosphate
  modified_base 4: mod_base = OTHER; note = 2'-O-methyladenosine-3'-phosphate
  modified_base 5: mod_base = OTHER; note = 2'-O-methylcytidine-3'-phosphate
  modified_base 6: mod_base = OTHER; note = 2'-O-methylguanosine-3'-phosphate
  modified_base 7: mod_base = OTHER; note = 2'-fluoroguanosine-3'-phosphate
  modified_base 8: mod_base = OTHER; note = 2'-O-methylcytidine-3'-phosphate
  modified_base 9: mod_base = OTHER; note = 2'-fluoroadenosine-3'-phosphate
  modified_base 10: mod_base = OTHER; note = 2'-fluorocytidine-3'-phosphate
  modified_base 11: mod_base = OTHER; note = 2'-fluorocytidine-3'-phosphate
  modified_base 12: mod_base = OTHER; note = 2'-O-methyluridine-3'-phosphate
  modified_base 13: mod_base = OTHER; note = 2'-O-methylcytidine-3'-phosphate
  modified_base 14: mod_base = OTHER; note = 2'-O-methyluridine-3'-phosphate
  modified_base 15: mod_base = OTHER; note = 2'-O-methyluridine-3'-phosphate
  modified_base 16: mod_base = OTHER; note = 2'-O-methyladenosine-3'-phosphate
  modified_base 17: mod_base = OTHER; note = 2'-O-methylcytidine-3'-phosphate
  modified_base 18: mod_base = OTHER; note = 2'-O-methyladenosine-3'-phosphate
  modified_base 19: mod_base = OTHER; note = 2'-O-methylcytidine-3'-phosphate
  modified_base 20: mod_base = OTHER; note = 2'-O-methylcytidine-3'-phosphate
  modified_base 21: mod_base = OTHER; note = 2'-O-methyladenosine-3'-phosphate
ttgacggcacctcttacacca

SEQ ID NO: 400 - RNA, 21 nt, synthetic construct
  source 1..21: mol_type = other RNA
  modified_base 1: mod_base = OTHER; note = 2'-O-methylcytidine-3'-phosphorothioate
  modified_base 2: mod_base = OTHER; note = 2'-O-methyladenosine-3'-phosphorothioate
  modified_base 3: mod_base = OTHER; note = 2'-O-methylcytidine-3'-phosphate
  modified_base 4: mod_base = OTHER; note = 2'-O-methyluridine-3'-phosphate
  modified_base 5: mod_base = OTHER; note = 2'-O-methyladenosine-3'-phosphate
  modified_base 6: mod_base = OTHER; note = 2'-O-methylcytidine-3'-phosphate
  modified_base 7: mod_base = OTHER; note = 2'-fluoroadenosine-3'-phosphate
  modified_base 8: mod_base = OTHER; note = 2'-O-methyladenosine-3'-phosphate
  modified_base 9: mod_base = OTHER; note = 2'-fluoroguanosine-3'-phosphate
  modified_base 10: mod_base = OTHER; note = 2'-fluorouridine-3'-phosphate
  modified_base 11: mod_base = OTHER; note = 2'-fluorocytidine-3'-phosphate
  modified_base 12: mod_base = OTHER; note = 2'-O-methylcytidine-3'-phosphate
  modified_base 13: mod_base = OTHER; note = 2'-O-methyladenosine-3'-phosphate
  modified_base 14: mod_base = OTHER; note = 2'-O-methyluridine-3'-phosphate
  modified_base 15: mod_base = OTHER; note = 2'-O-methylguanosine-3'-phosphate
  modified_base 16: mod_base = OTHER; note = 2'-O-methylguanosine-3'-phosphate
  modified_base 17: mod_base = OTHER; note = 2'-O-methyladenosine-3'-phosphate
  modified_base 18: mod_base = OTHER; note = 2'-O-methyluridine-3'-phosphate
  modified_base 19: mod_base = OTHER; note = 2'-O-methyladenosine-3'-phosphate
  modified_base 20: mod_base = OTHER; note = 2'-O-methyluridine-3'-phosphate
  modified_base 21: mod_base = OTHER; note = 2'-O-methyladenosine-3'-phosphate
cactacaagtccatggatata

SEQ ID NO: 401 - RNA, 19 nt, synthetic construct
  source 1..19: mol_type = other RNA
  modified_base 1: mod_base = OTHER; note = 2'-O-methylcytidine-3'-phosphate
  modified_base 2: mod_base = OTHER; note = 2'-O-methyluridine-3'-phosphate
  modified_base 4: mod_base = OTHER; note = 2'-O-methylcytidine-3'-phosphate
  modified_base 5: mod_base = OTHER; note = 2'-O-methyladenosine-3'-phosphate
  modified_base 6: mod_base = OTHER; note = 2'-O-methyladenosine-3'-phosphate
  modified_base 10: mod_base = OTHER; note = 2'-O-methylcytidine-3'-phosphate
  modified_base 11: mod_base = OTHER; note = 2'-O-methyladenosine-3'-phosphate
  modified_base 13: mod_base = OTHER; note = 2'-O-methylguanosine-3'-phosphate
  modified_base 14: mod_base = OTHER; note = 2'-O-methylguanosine-3'-phosphate
  modified_base 15: mod_base = OTHER; note = 2'-O-methyladenosine-3'-phosphate
  modified_base 16: mod_base = OTHER; note = 2'-O-methyluridine-3'-phosphate
  modified_base 18: mod_base = OTHER; note = 2'-O-methyluridine-3'-phosphorothioate
  modified_base 19: mod_base = OTHER; note = 2'-O-methyladenosine-3'-phosphate
ctacaagtccatggatata

SEQ ID NO: 402 - RNA, 21 nt, synthetic construct
  source 1..21: mol_type = other RNA
  modified_base 1: mod_base = OTHER; note = 2'-O-methylcytidine-3'-phosphate
  modified_base 2: mod_base = OTHER; note = 2'-O-methyladenosine-3'-phosphate
  modified_base 3: mod_base = OTHER; note = 2'-O-methylcytidine-3'-phosphate
  modified_base 4: mod_base = OTHER; note = 2'-O-methyluridine-3'-phosphate
  modified_base 6: mod_base = OTHER; note = 2'-O-methylcytidine-3'-phosphate
  modified_base 7: mod_base = OTHER; note = 2'-O-methyladenosine-3'-phosphate
  modified_base 8: mod_base = OTHER; note = 2'-O-methyladenosine-3'-phosphate
  modified_base 12: mod_base = OTHER; note = 2'-O-methylcytidine-3'-phosphate
  modified_base 13: mod_base = OTHER; note = 2'-O-methyladenosine-3'-phosphate
  modified_base 14: mod_base = OTHER; note = 2'-O-methyluridine-3'-phosphate
  modified_base 15: mod_base = OTHER; note = 2'-O-methylguanosine-3'-phosphate
  modified_base 16: mod_base = OTHER; note = 2'-O-methylguanosine-3'-phosphate
  modified_base 17: mod_base = OTHER; note = 2'-O-methyladenosine-3'-phosphate
  modified_base 18: mod_base = OTHER; note = 2'-O-methyluridine-3'-phosphate
  modified_base 20: mod_base = OTHER; note = 2'-O-methyluridine-3'-phosphorothioate
  modified_base 21: mod_base = OTHER; note = 2'-O-methyladenosine-3'-phosphate
cactacaagtccatggatata

SEQ ID NO: 403 - RNA, 21 nt, synthetic construct
  source 1..21: mol_type = other RNA
  modified_base 1: mod_base = OTHER; note = 2'-O-methylcytidine-3'-phosphorothioate
  modified_base 2: mod_base = OTHER; note = 2'-O-methyladenosine-3'-phosphorothioate
  modified_base 3: mod_base = OTHER; note = 2'-O-methyladenosine-3'-phosphate
  modified_base 4: mod_base = OTHER; note = 2'-O-methylguanosine-3'-phosphate
  modified_base 5: mod_base = OTHER; note = 2'-O-methyluridine-3'-phosphate
  modified_base 6: mod_base = OTHER; note = 2'-O-methylcytidine-3'-phosphate
  modified_base 7: mod_base = OTHER; note = 2'-fluorocytidine-3'-phosphate
  modified_base 8: mod_base = OTHER; note = 2'-O-methyladenosine-3'-phosphate
  modified_base 9: mod_base = OTHER; note = 2'-fluorouridine-3'-phosphate
  modified_base 10: mod_base = OTHER; note = 2'-fluoroguanosine-3'-phosphate
  modified_base 11: mod_base = OTHER; note = 2'-fluoroguanosine-3'-phosphate
  modified_base 12: mod_base = OTHER; note = 2'-O-methyladenosine-3'-phosphate
  modified_base 13: mod_base = OTHER; note = 2'-O-methyluridine-3'-phosphate
  modified_base 14: mod_base = OTHER; note = 2'-O-methyladenosine-3'-phosphate
  modified_base 15: mod_base = OTHER; note = 2'-O-methyluridine-3'-phosphate
  modified_base 16: mod_base = OTHER; note = 2'-O-methylcytidine-3'-phosphate
  modified_base 17: mod_base = OTHER; note = 2'-O-methylguanosine-3'-phosphate
  modified_base 18: mod_base = OTHER; note = 2'-O-methyluridine-3'-phosphate
  modified_base 19: mod_base = OTHER; note = 2'-O-methylcytidine-3'-phosphate
  modified_base 20: mod_base = OTHER; note = 2'-O-methylcytidine-3'-phosphate
  modified_base 21: mod_base = OTHER; note = 2'-O-methyladenosine-3'-phosphate
caagtccatggatatcgtcca

SEQ ID NO: 404 - RNA, 19 nt, synthetic construct
  source 1..19: mol_type = other RNA
  modified_base 1: mod_base = OTHER; note = 2'-O-methyladenosine-3'-phosphate
  modified_base 2: mod_base = OTHER; note = 2'-O-methylguanosine-3'-phosphate
  modified_base 4: mod_base = OTHER; note = 2'-O-methylcytidine-3'-phosphate
  modified_base 5: mod_base = OTHER; note = 2'-O-methylcytidine-3'-phosphate
  modified_base 6: mod_base = OTHER; note = 2'-O-methyladenosine-3'-phosphate
  modified_base 10: mod_base = OTHER; note = 2'-O-methyladenosine-3'-phosphate
  modified_base 11: mod_base = OTHER; note = 2'-O-methyluridine-3'-phosphate
  modified_base 13: mod_base = OTHER; note = 2'-O-methyluridine-3'-phosphate
  modified_base 14: mod_base = OTHER; note = 2'-O-methylcytidine-3'-phosphate
  modified_base 15: mod_base = OTHER; note = 2'-O-methylguanosine-3'-phosphate
  modified_base 16: mod_base = OTHER; note = 2'-O-methyluridine-3'-phosphate
  modified_base 18: mod_base = OTHER; note = 2'-O-methylcytidine-3'-phosphorothioate
  modified_base 19: mod_base = OTHER; note = 2'-O-methyladenosine-3'-phosphate
agtccatggatatcgtcca

SEQ ID NO: 405 - RNA, 21 nt, synthetic construct
  source 1..21: mol_type = other RNA
  modified_base 1: mod_base = OTHER; note = 2'-O-methyladenosine-3'-phosphorothioate
  modified_base 2: mod_base = OTHER; note = 2'-O-methyladenosine-3'-phosphorothioate
  modified_base 3: mod_base = OTHER; note = 2'-O-methylguanosine-3'-phosphate
  modified_base 4: mod_base = OTHER; note = 2'-O-methyluridine-3'-phosphate
  modified_base 5: mod_base = OTHER; note = 2'-O-methylcytidine-3'-phosphate
  modified_base 6: mod_base = OTHER; note = 2'-O-methylcytidine-3'-phosphate
  modified_base 7: mod_base = OTHER; note = 2'-fluoroadenosine-3'-phosphate
  modified_base 8: mod_base = OTHER; note = 2'-O-methyluridine-3'-phosphate
  modified_base 9: mod_base = OTHER; note = 2'-fluoroguanosine-3'-phosphate
  modified_base 10: mod_base = OTHER; note = 2'-fluoroguanosine-3'-phosphate
  modified_base 11: mod_base = OTHER; note = 2'-fluoroadenosine-3'-phosphate
  modified_base 12: mod_base = OTHER; note = 2'-O-methyluridine-3'-phosphate
  modified_base 13: mod_base = OTHER; note = 2'-O-methyladenosine-3'-phosphate
  modified_base 14: mod_base = OTHER; note = 2'-O-methyluridine-3'-phosphate
  modified_base 15: mod_base = OTHER; note = 2'-O-methylcytidine-3'-phosphate
  modified_base 16: mod_base = OTHER; note = 2'-O-methylguanosine-3'-phosphate
  modified_base 17: mod_base = OTHER; note = 2'-O-methyluridine-3'-phosphate
  modified_base 18: mod_base = OTHER; note = 2'-O-methylcytidine-3'-phosphate
  modified_base 19: mod_base = OTHER; note = 2'-O-methylcytidine-3'-phosphate
  modified_base 20: mod_base = OTHER; note = 2'-O-methyluridine-3'-phosphate
  modified_base 21: mod_base = OTHER; note = 2'-O-methyladenosine-3'-phosphate
aagtccatggatatcgtccta

SEQ ID NO: 406 - RNA, 19 nt, synthetic construct
  source 1..19: mol_type = other RNA
  modified_base 1: mod_base = OTHER; note = 2'-O-methylguanosine-3'-phosphate
  modified_base 2: mod_base = OTHER; note = 2'-O-methyluridine-3'-phosphate
  modified_base 4: mod_base = OTHER; note = 2'-O-methyluridine-3'-phosphate
  modified_base 5: mod_base = OTHER; note = 2'-O-methylguanosine-3'-phosphate
  modified_base 6: mod_base = OTHER; note = 2'-O-methyladenosine-3'-phosphate
  modified_base 10: mod_base = OTHER; note = 2'-O-methyladenosine-3'-phosphate
  modified_base 11: mod_base = OTHER; note = 2'-O-methyladenosine-3'-phosphate
  modified_base 13: mod_base = OTHER; note = 2'-O-methyluridine-3'-phosphate
  modified_base 14: mod_base = OTHER; note = 2'-O-methylcytidine-3'-phosphate
  modified_base 15: mod_base = OTHER; note = 2'-O-methylcytidine-3'-phosphate
  modified_base 16: mod_base = OTHER; note = 2'-O-methylguanosine-3'-phosphate
  modified_base 18: mod_base = OTHER; note = 2'-O-methyluridine-3'-phosphorothioate
  modified_base 19: mod_base = OTHER; note = 2'-O-methyladenosine-3'-phosphate
gtttgaccaaattccggta

SEQ ID NO: 407 - RNA, 21 nt, synthetic construct
  source 1..21: mol_type = other RNA
  modified_base 1: mod_base = OTHER; note = 2'-O-methylcytidine-3'-phosphate
  modified_base 2: mod_base = OTHER; note = 2'-O-methyluridine-3'-phosphate
  modified_base 3: mod_base = OTHER; note = 2'-O-methylguanosine-3'-phosphate
  modified_base 4: mod_base = OTHER; note = 2'-O-methyluridine-3'-phosphate
  modified_base 6: mod_base = OTHER; note = 2'-O-methyluridine-3'-phosphate
  modified_base 7: mod_base = OTHER; note = 2'-O-methylguanosine-3'-phosphate
  modified_base 8: mod_base = OTHER; note = 2'-O-methyladenosine-3'-phosphate
  modified_base 12: mod_base = OTHER; note = 2'-O-methyladenosine-3'-phosphate
  modified_base 13: mod_base = OTHER; note = 2'-O-methyladenosine-3'-phosphate
  modified_base 14: mod_base = OTHER; note = 2'-O-methyluridine-3'-phosphate
  modified_base 15: mod_base = OTHER; note = 2'-O-methyluridine-3'-phosphate
  modified_base 16: mod_base = OTHER; note = 2'-O-methylcytidine-3'-phosphate
  modified_base 17: mod_base = OTHER; note = 2'-O-methylcytidine-3'-phosphate
  modified_base 18: mod_base = OTHER; note = 2'-O-methylguanosine-3'-phosphate
  modified_base 20: mod_base = OTHER; note = 2'-O-methyluridine-3'-phosphorothioate
  modified_base 21: mod_base = OTHER; note = 2'-O-methyladenosine-3'-phosphate
ctgtttgaccaaattccggta

SEQ ID NO: 408 - RNA, 21 nt, synthetic construct
  source 1..21: mol_type = other RNA
  modified_base 1: mod_base = OTHER; note = 2'-O-methyluridine-3'-phosphorothioate
  modified_base 2: mod_base = OTHER; note = 2'-O-methyluridine-3'-phosphorothioate
  modified_base 3: mod_base = OTHER; note = 2'-O-methylguanosine-3'-phosphate
  modified_base 4: mod_base = OTHER; note = 2'-O-methyladenosine-3'-phosphate
  modified_base 5: mod_base = OTHER; note = 2'-O-methylcytidine-3'-phosphate
  modified_base 6: mod_base = OTHER; note = 2'-O-methylcytidine-3'-phosphate
  modified_base 7: mod_base = OTHER; note = 2'-fluoroadenosine-3'-phosphate
  modified_base 8: mod_base = OTHER; note = 2'-O-methyladenosine-3'-phosphate
  modified_base 9: mod_base = OTHER; note = 2'-fluoroadenosine-3'-phosphate
  modified_base 10: mod_base = OTHER; note = 2'-fluorouridine-3'-phosphate
  modified_base 11: mod_base = OTHER; note = 2'-fluorouridine-3'-phosphate
  modified_base 12: mod_base = OTHER; note = 2'-O-methylcytidine-3'-phosphate
  modified_base 13: mod_base = OTHER; note = 2'-O-methylcytidine-3'-phosphate
  modified_base 14: mod_base = OTHER; note = 2'-O-methylguanosine-3'-phosphate
  modified_base 15: mod_base = OTHER; note = 2'-O-methylguanosine-3'-phosphate
  modified_base 16: mod_base = OTHER; note = 2'-O-methyluridine-3'-phosphate
  modified_base 17: mod_base = OTHER; note = 2'-O-methylguanosine-3'-phosphate
  modified_base 18: mod_base = OTHER; note = 2'-O-methyladenosine-3'-phosphate
  modified_base 19: mod_base = OTHER; note = 2'-O-methylguanosine-3'-phosphate
  modified_base 20: mod_base = OTHER; note = 2'-O-methylcytidine-3'-phosphate
  modified_base 21: mod_base = OTHER; note = 2'-O-methyladenosine-3'-phosphate
ttgaccaaattccggtgagca

SEQ ID NO: 409 - RNA, 19 nt, synthetic construct
  source 1..19: mol_type = other RNA
  modified_base 1: mod_base = OTHER; note = 2'-O-methylguanosine-3'-phosphate
  modified_base 2: mod_base = OTHER; note = 2'-O-methyladenosine-3'-phosphate
  modified_base 4: mod_base = OTHER; note = 2'-O-methylcytidine-3'-phosphate
  modified_base 5: mod_base = OTHER; note = 2'-O-methyladenosine-3'-phosphate
  modified_base 6: mod_base = OTHER; note = 2'-O-methyladenosine-3'-phosphate
  modified_base 10: mod_base = OTHER; note = 2'-O-methylcytidine-3'-phosphate
  modified_base 11: mod_base = OTHER; note = 2'-O-methylcytidine-3'-phosphate
  modified_base 13: mod_base = OTHER; note = 2'-O-methylguanosine-3'-phosphate
  modified_base 14: mod_base = OTHER; note = 2'-O-methyluridine-3'-phosphate
  modified_base 15: mod_base = OTHER; note = 2'-O-methylguanosine-3'-phosphate
  modified_base 16: mod_base = OTHER; note = 2'-O-methyladenosine-3'-phosphate
  modified_base 18: mod_base = OTHER; note = 2'-O-methylcytidine-3'-phosphorothioate
  modified_base 19: mod_base = OTHER; note = 2'-O-methyladenosine-3'-phosphate
gaccaaattccggtgagca

SEQ ID NO: 410 - RNA, 21 nt, synthetic construct
  source 1..21: mol_type = other RNA
  modified_base 1: mod_base = OTHER; note = 2'-O-methyluridine-3'-phosphate
  modified_base 2: mod_base = OTHER; note = 2'-O-methyluridine-3'-phosphate
  modified_base 3: mod_base = OTHER; note = 2'-O-methylguanosine-3'-phosphate
  modified_base 4: mod_base = OTHER; note = 2'-O-methyladenosine-3'-phosphate
  modified_base 6: mod_base = OTHER; note = 2'-O-methylcytidine-3'-phosphate
  modified_base 7: mod_base = OTHER; note = 2'-O-methyladenosine-3'-phosphate
  modified_base 8: mod_base = OTHER; note = 2'-O-methyladenosine-3'-phosphate
  modified_base 12: mod_base = OTHER; note = 2'-O-methylcytidine-3'-phosphate
  modified_base 13: mod_base = OTHER; note = 2'-O-methylcytidine-3'-phosphate
  modified_base 14: mod_base = OTHER; note = 2'-O-methylguanosine-3'-phosphate
  modified_base 15: mod_base = OTHER; note = 2'-O-methylguanosine-3'-phosphate
  modified_base 16: mod_base = OTHER; note = 2'-O-methyluridine-3'-phosphate
  modified_base 17: mod_base = OTHER; note = 2'-O-methylguanosine-3'-phosphate
  modified_base 18: mod_base = OTHER; note = 2'-O-methyladenosine-3'-phosphate
  modified_base 20: mod_base = OTHER; note = 2'-O-methylcytidine-3'-phosphorothioate
  modified_base 21: mod_base = OTHER; note = 2'-O-methyladenosine-3'-phosphate
ttgaccaaattccggtgagca

SEQ ID NO: 411 - RNA, 21 nt, synthetic construct
  source 1..21: mol_type = other RNA
  modified_base 1: mod_base = OTHER; note = 2'-O-methyladenosine-3'-phosphorothioate
  modified_base 2: mod_base = OTHER; note = 2'-O-methylcytidine-3'-phosphorothioate
  modified_base 3: mod_base = OTHER; note = 2'-O-methylcytidine-3'-phosphate
  modified_base 4: mod_base = OTHER; note = 2'-O-methyladenosine-3'-phosphate
  modified_base 5: mod_base = OTHER; note = 2'-O-methyladenosine-3'-phosphate
  modified_base 6: mod_base = OTHER; note = 2'-O-methyladenosine-3'-phosphate
  modified_base 7: mod_base = OTHER; note = 2'-fluorouridine-3'-phosphate
  modified_base 8: mod_base = OTHER; note = 2'-O-methyluridine-3'-phosphate
  modified_base 9: mod_base = OTHER; note = 2'-fluorocytidine-3'-phosphate
  modified_base 10: mod_base = OTHER; note = 2'-fluorocytidine-3'-phosphate
  modified_base 11: mod_base = OTHER; note = 2'-fluoroguanosine-3'-phosphate
  modified_base 12: mod_base = OTHER; note = 2'-O-methylguanosine-3'-phosphate
  modified_base 13: mod_base = OTHER; note = 2'-O-methyluridine-3'-phosphate
  modified_base 14: mod_base = OTHER; note = 2'-O-methylguanosine-3'-phosphate
  modified_base 15: mod_base = OTHER; note = 2'-O-methyladenosine-3'-phosphate
  modified_base 16: mod_base = OTHER; note = 2'-O-methylguanosine-3'-phosphate
  modified_base 17: mod_base = OTHER; note = 2'-O-methylcytidine-3'-phosphate
  modified_base 18: mod_base = OTHER; note = 2'-O-methyladenosine-3'-phosphate
  modified_base 19: mod_base = OTHER; note = 2'-O-methylguanosine-3'-phosphate
  modified_base 20: mod_base = OTHER; note = 2'-O-methylcytidine-3'-phosphate
  modified_base 21: mod_base = OTHER; note = 2'-O-methyladenosine-3'-phosphate
accaaattccggtgagcagca

SEQ ID NO: 412 - RNA, 21 nt, synthetic construct
  source 1..21: mol_type = other RNA
  modified_base 1: mod_base = OTHER; note = 2'-O-methylcytidine-3'-phosphorothioate
  modified_base 2: mod_base = OTHER; note = 2'-O-methylcytidine-3'-phosphorothioate
  modified_base 3: mod_base = OTHER; note = 2'-O-methyladenosine-3'-phosphate
  modified_base 4: mod_base = OTHER; note = 2'-O-methyladenosine-3'-phosphate
  modified_base 5: mod_base = OTHER; note = 2'-O-methyladenosine-3'-phosphate
  modified_base 6: mod_base = OTHER; note = 2'-O-methyluridine-3'-phosphate
  modified_base 7: mod_base = OTHER; note = 2'-fluorouridine-3'-phosphate
  modified_base 8: mod_base = OTHER; note = 2'-O-methylcytidine-3'-phosphate
  modified_base 9: mod_base = OTHER; note = 2'-fluorocytidine-3'-phosphate
  modified_base 10: mod_base = OTHER; note = 2'-fluoroguanosine-3'-phosphate
  modified_base 11: mod_base = OTHER; note = 2'-fluoroguanosine-3'-phosphate
  modified_base 12: mod_base = OTHER; note = 2'-O-methyluridine-3'-phosphate
  modified_base 13: mod_base = OTHER; note = 2'-O-methylguanosine-3'-phosphate
  modified_base 14: mod_base = OTHER; note = 2'-O-methyladenosine-3'-phosphate
  modified_base 15: mod_base = OTHER; note = 2'-O-methylguanosine-3'-phosphate
  modified_base 16: mod_base = OTHER; note = 2'-O-methylcytidine-3'-phosphate
  modified_base 17: mod_base = OTHER; note = 2'-O-methyladenosine-3'-phosphate
  modified_base 18: mod_base = OTHER; note = 2'-O-methylguanosine-3'-phosphate
  modified_base 19: mod_base = OTHER; note = 2'-O-methylcytidine-3'-phosphate
  modified_base 20: mod_base = OTHER; note = 2'-O-methylguanosine-3'-phosphate
  modified_base 21: mod_base = OTHER; note = 2'-O-methyladenosine-3'-phosphate
ccaaattccggtgagcagcga

SEQ ID NO: 413 - RNA, 19 nt, synthetic construct
  source 1..19: mol_type = other RNA
  modified_base 1: mod_base = OTHER; note = 2'-O-methyladenosine-3'-phosphate
  modified_base 2: mod_base = OTHER; note = 2'-O-methyladenosine-3'-phosphate
  modified_base 4: mod_base = OTHER; note = 2'-O-methyluridine-3'-phosphate
  modified_base 5: mod_base = OTHER; note = 2'-O-methyluridine-3'-phosphate
  modified_base 6: mod_base = OTHER; note = 2'-O-methylcytidine-3'-phosphate
  modified_base 10: mod_base = OTHER; note = 2'-O-methyluridine-3'-phosphate
  modified_base 11: mod_base = OTHER; note = 2'-O-methylguanosine-3'-phosphate
  modified_base 13: mod_base = OTHER; note = 2'-O-methylguanosine-3'-phosphate
  modified_base 14: mod_base = OTHER; note = 2'-O-methylcytidine-3'-phosphate
  modified_base 15: mod_base = OTHER; note = 2'-O-methyladenosine-3'-phosphate
  modified_base 16: mod_base = OTHER; note = 2'-O-methylguanosine-3'-phosphate
  modified_base 18: mod_base = OTHER; note = 2'-O-methylguanosine-3'-phosphorothioate
  modified_base 19: mod_base = OTHER; note = 2'-O-methyladenosine-3'-phosphate
aaattccggtgagcagcga

SEQ ID NO: 414 - RNA, 21 nt, synthetic construct
  source 1..21: mol_type = other RNA
  modified_base 1: mod_base = OTHER; note = 2'-O-methylcytidine-3'-phosphate
  modified_base 2: mod_base = OTHER; note = 2'-O-methylcytidine-3'-phosphate
  modified_base 3: mod_base = OTHER; note = 2'-O-methyladenosine-3'-phosphate
  modified_base 4: mod_base = OTHER; note = 2'-O-methyladenosine-3'-phosphate
  modified_base 6: mod_base = OTHER; note = 2'-O-methyluridine-3'-phosphate
  modified_base 7: mod_base = OTHER; note = 2'-O-methyluridine-3'-phosphate
  modified_base 8: mod_base = OTHER; note = 2'-O-methylcytidine-3'-phosphate
  modified_base 12: mod_base = OTHER; note = 2'-O-methyluridine-3'-phosphate
  modified_base 13: mod_base = OTHER; note = 2'-O-methylguanosine-3'-phosphate
  modified_base 14: mod_base = OTHER; note = 2'-O-methyladenosine-3'-phosphate
  modified_base 15: mod_base = OTHER; note = 2'-O-methylguanosine-3'-phosphate
  modified_base 16: mod_base = OTHER; note = 2'-O-methylcytidine-3'-phosphate
  modified_base 17: mod_base = OTHER; note = 2'-O-methyladenosine-3'-phosphate
  modified_base 18: mod_base = OTHER; note = 2'-O-methylguanosine-3'-phosphate
  modified_base 20: mod_base = OTHER; note = 2'-O-methylguanosine-3'-phosphorothioate
  modified_base 21: mod_base = OTHER; note = 2'-O-methyladenosine-3'-phosphate
ccaaattccggtgagcagcga

SEQ ID NO: 415 - RNA, 21 nt, synthetic construct
  source 1..21: mol_type = other RNA
  modified_base 1: mod_base = OTHER; note = 2'-O-methyluridine-3'-phosphorothioate
  modified_base 2: mod_base = OTHER; note = 2'-O-methyluridine-3'-phosphorothioate
  modified_base 3: mod_base = OTHER; note = 2'-O-methyluridine-3'-phosphate
  modified_base 4: mod_base = OTHER; note = 2'-O-methylcytidine-3'-phosphate
  modified_base 5: mod_base = OTHER; note = 2'-O-methyladenosine-3'-phosphate
  modified_base 6: mod_base = OTHER; note = 2'-O-methylguanosine-3'-phosphate
  modified_base 7: mod_base = OTHER; note = 2'-fluorocytidine-3'-phosphate
  modified_base 8: mod_base = OTHER; note = 2'-O-methyladenosine-3'-phosphate
  modified_base 9: mod_base = OTHER; note = 2'-fluoroadenosine-3'-phosphate
  modified_base 10: mod_base = OTHER; note = 2'-fluoroguanosine-3'-phosphate
  modified_base 11: mod_base = OTHER; note = 2'-fluoroadenosine-3'-phosphate
  modified_base 12: mod_base = OTHER; note = 2'-O-methyladenosine-3'-phosphate
  modified_base 13: mod_base = OTHER; note = 2'-O-methylcytidine-3'-phosphate
  modified_base 14: mod_base = OTHER; note = 2'-O-methylguanosine-3'-phosphate
  modified_base 15: mod_base = OTHER; note = 2'-O-methylguanosine-3'-phosphate
  modified_base 16: mod_base = OTHER; note = 2'-O-methylcytidine-3'-phosphate
  modified_base 17: mod_base = OTHER; note = 2'-O-methylguanosine-3'-phosphate
  modified_base 18: mod_base = OTHER; note = 2'-O-methyluridine-3'-phosphate
  modified_base 19: mod_base = OTHER; note = 2'-O-methylguanosine-3'-phosphate
  modified_base 20: mod_base = OTHER; note = 2'-O-methylcytidine-3'-phosphate
  modified_base 21: mod_base = OTHER; note = 2'-O-methyladenosine-3'-phosphate
tttcagcaagaacggcgtgca

SEQ ID NO: 416 - RNA, 21 nt, synthetic construct
  source 1..21: mol_type = other RNA
  modified_base 1: mod_base = OTHER; note = 2'-O-methyladenosine-3'-phosphorothioate
  modified_base 2: mod_base = OTHER; note = 2'-O-methylguanosine-3'-phosphorothioate
  modified_base 3: mod_base = OTHER; note = 2'-O-methylcytidine-3'-phosphate
  modified_base 4: mod_base = OTHER; note = 2'-O-methyladenosine-3'-phosphate
  modified_base 5: mod_base = OTHER; note = 2'-O-methyladenosine-3'-phosphate
  modified_base 6: mod_base = OTHER; note = 2'-O-methylguanosine-3'-phosphate
  modified_base 7: mod_base = OTHER; note = 2'-fluoroadenosine-3'-phosphate
  modified_base 8: mod_base = OTHER; note = 2'-O-methyladenosine-3'-phosphate
  modified_base 9: mod_base = OTHER; note = 2'-fluorocytidine-3'-phosphate
  modified_base 10: mod_base = OTHER; note = 2'-fluoroguanosine-3'-phosphate
  modified_base 11: mod_base = OTHER; note = 2'-fluoroguanosine-3'-phosphate
  modified_base 12: mod_base = OTHER; note = 2'-O-methylcytidine-3'-phosphate
  modified_base 13: mod_base = OTHER; note = 2'-O-methylguanosine-3'-phosphate
  modified_base 14: mod_base = OTHER; note = 2'-O-methyluridine-3'-phosphate
  modified_base 15: mod_base = OTHER; note = 2'-O-methylguanosine-3'-phosphate
  modified_base 16: mod_base = OTHER; note = 2'-O-methylcytidine-3'-phosphate
  modified_base 17: mod_base = OTHER; note = 2'-O-methyluridine-3'-phosphate
  modified_base 18: mod_base = OTHER; note = 2'-O-methyluridine-3'-phosphate
  modified_base 19: mod_base = OTHER; note = 2'-O-methylguanosine-3'-phosphate
  modified_base 20: mod_base = OTHER; note = 2'-O-methyluridine-3'-phosphate
  modified_base 21: mod_base = OTHER; note = 2'-O-methyladenosine-3'-phosphate
agcaagaacggcgtgcttgta

SEQ ID NO: 417 - RNA, 21 nt, synthetic construct
  source 1..21: mol_type = other RNA
  modified_base 1: mod_base = OTHER; note = 2'-O-methyladenosine-3'-phosphorothioate
  modified_base 2: mod_base = OTHER; note = 2'-O-methylguanosine-3'-phosphorothioate
  modified_base 3: mod_base = OTHER; note = 2'-O-methyladenosine-3'-phosphate
  modified_base 4: mod_base = OTHER; note = 2'-O-methyladenosine-3'-phosphate
  modified_base 5: mod_base = OTHER; note = 2'-O-methylcytidine-3'-phosphate
  modified_base 6: mod_base = OTHER; note = 2'-O-methylguanosine-3'-phosphate
  modified_base 7: mod_base = OTHER; note = 2'-fluoroguanosine-3'-phosphate
  modified_base 8: mod_base = OTHER; note = 2'-O-methylcytidine-3'-phosphate
  modified_base 9: mod_base = OTHER; note = 2'-fluoroguanosine-3'-phosphate
  modified_base 10: mod_base = OTHER; note = 2'-fluorouridine-3'-phosphate
  modified_base 11: mod_base = OTHER; note = 2'-fluoroguanosine-3'-phosphate
  modified_base 12: mod_base = OTHER; note = 2'-O-methylcytidine-3'-phosphate
  modified_base 13: mod_base = OTHER; note = 2'-O-methyluridine-3'-phosphate
  modified_base 14: mod_base = OTHER; note = 2'-O-methyluridine-3'-phosphate
  modified_base 15: mod_base = OTHER; note = 2'-O-methylguanosine-3'-phosphate
  modified_base 16: mod_base = OTHER; note = 2'-O-methyluridine-3'-phosphate
  modified_base 17: mod_base = OTHER; note = 2'-O-methylguanosine-3'-phosphate
  modified_base 18: mod_base = OTHER; note = 2'-O-methyluridine-3'-phosphate
  modified_base 19: mod_base = OTHER; note = 2'-O-methylcytidine-3'-phosphate
  modified_base 20: mod_base = OTHER; note = 2'-O-methyluridine-3'-phosphate
  modified_base 21: mod_base = OTHER; note = 2'-O-methyladenosine-3'-phosphate
agaacggcgtgcttgtgtcta

SEQ ID NO: 418 - RNA, 19 nt, synthetic construct
  source 1..19: mol_type = other RNA
  modified_base 1: mod_base = OTHER; note = 2'-O-methyladenosine-3'-phosphate
  modified_base 2: mod_base = OTHER; note = 2'-O-methyladenosine-3'-phosphate
  modified_base 4: mod_base = OTHER; note = 2'-O-methylguanosine-3'-phosphate
  modified_base 5: mod_base = OTHER; note = 2'-O-methylguanosine-3'-phosphate
  modified_base 6: mod_base = OTHER; note = 2'-O-methylcytidine-3'-phosphate
  modified_base 10: mod_base = OTHER; note = 2'-O-methylcytidine-3'-phosphate
  modified_base 11: mod_base = OTHER; note = 2'-O-methyluridine-3'-phosphate
  modified_base 13: mod_base = OTHER; note = 2'-O-methylguanosine-3'-phosphate
  modified_base 14: mod_base = OTHER; note = 2'-O-methyluridine-3'-phosphate
  modified_base 15: mod_base = OTHER; note = 2'-O-methylguanosine-3'-phosphate
  modified_base 16: mod_base = OTHER; note = 2'-O-methyluridine-3'-phosphate
  modified_base 18: mod_base = OTHER; note = 2'-O-methyluridine-3'-phosphorothioate
  modified_base 19: mod_base = OTHER; note = 2'-O-methyladenosine-3'-phosphate
aacggcgtgcttgtgtcta

SEQ ID NO: 419 - RNA, 21 nt, synthetic construct
  source 1..21: mol_type = other RNA
  modified_base 1: mod_base = OTHER; note = 2'-O-methyladenosine-3'-phosphate
  modified_base 2: mod_base = OTHER; note = 2'-O-methylguanosine-3'-phosphate
  modified_base 3: mod_base = OTHER; note = 2'-O-methyladenosine-3'-phosphate
  modified_base 4: mod_base = OTHER; note = 2'-O-methyladenosine-3'-phosphate
  modified_base 6: mod_base = OTHER; note = 2'-O-methylguanosine-3'-phosphate
  modified_base 7: mod_base = OTHER; note = 2'-O-methylguanosine-3'-phosphate
  modified_base 8: mod_base = OTHER; note = 2'-O-methylcytidine-3'-phosphate
  modified_base 12: mod_base = OTHER; note = 2'-O-methylcytidine-3'-phosphate
  modified_base 13: mod_base = OTHER; note = 2'-O-methyluridine-3'-phosphate
  modified_base 14: mod_base = OTHER; note = 2'-O-methyluridine-3'-phosphate
  modified_base 15: mod_base = OTHER; note = 2'-O-methylguanosine-3'-phosphate
  modified_base 16: mod_base = OTHER; note = 2'-O-methyluridine-3'-phosphate
  modified_base 17: mod_base = OTHER; note = 2'-O-methylguanosine-3'-phosphate
  modified_base 18: mod_base = OTHER; note = 2'-O-methyluridine-3'-phosphate
  modified_base 20: mod_base = OTHER; note = 2'-O-methyluridine-3'-phosphorothioate
  modified_base 21: mod_base = OTHER; note = 2'-O-methyladenosine-3'-phosphate
agaacggcgtgcttgtgtcta

SEQ ID NO: 420 - RNA, 21 nt, synthetic construct
  source 1..21: mol_type = other RNA
  modified_base 1: mod_base = OTHER; note = 2'-O-methylcytidine-3'-phosphorothioate
  modified_base 2: mod_base = OTHER; note = 2'-O-methyladenosine-3'-phosphorothioate
  modified_base 3: mod_base = OTHER; note = 2'-O-methyladenosine-3'-phosphate
  modified_base 4: mod_base = OTHER; note = 2'-O-methylcytidine-3'-phosphate
  modified_base 5: mod_base = OTHER; note = 2'-O-methyluridine-3'-phosphate
  modified_base 6: mod_base = OTHER; note = 2'-O-methylcytidine-3'-phosphate
  modified_base 7: mod_base = OTHER; note = 2'-fluorocytidine-3'-phosphate
  modified_base 8: mod_base = OTHER; note = 2'-O-methyladenosine-3'-phosphate
  modified_base 9: mod_base = OTHER; note = 2'-fluorouridine-3'-phosphate
  modified_base 10: mod_base = OTHER; note = 2'-fluorocytidine-3'-phosphate
  modified_base 11: mod_base = OTHER; note = 2'-fluorouridine-3'-phosphate
  modified_base 12: mod_base = OTHER; note = 2'-O-methyladenosine-3'-phosphate
  modified_base 13: mod_base = OTHER; note = 2'-O-methylcytidine-3'-phosphate
  modified_base 14: mod_base = OTHER; note = 2'-O-methyladenosine-3'-phosphate
  modified_base 15: mod_base = OTHER; note = 2'-O-methylcytidine-3'-phosphate
  modified_base 16: mod_base = OTHER; note = 2'-O-methylguanosine-3'-phosphate
  modified_base 17: mod_base = OTHER; note = 2'-O-methylcytidine-3'-phosphate
  modified_base 18: mod_base = OTHER; note = 2'-O-methyladenosine-3'-phosphate
  modified_base 19: mod_base = OTHER; note = 2'-O-methylguanosine-3'-phosphate
  modified_base 20: mod_base = OTHER; note = 2'-O-methylcytidine-3'-phosphate
  modified_base 21: mod_base = OTHER; note = 2'-O-methyladenosine-3'-phosphate
caactccatctacacgcagca

SEQ ID NO: 421 - RNA, 21 nt, synthetic construct
  source 1..21: mol_type = other RNA
  modified_base 1: mod_base = OTHER; note = 2'-O-methylcytidine-3'-phosphorothioate
  modified_base 2: mod_base = OTHER; note = 2'-O-methyluridine-3'-phosphorothioate
  modified_base 3: mod_base = OTHER; note = 2'-O-methylcytidine-3'-phosphate
  modified_base 4: mod_base = OTHER; note = 2'-O-methyluridine-3'-phosphate
  modified_base 5: mod_base = OTHER; note = 2'-O-methyluridine-3'-phosphate
  modified_base 6: mod_base = OTHER; note = 2'-O-methylcytidine-3'-phosphate
  modified_base 7: mod_base = OTHER; note = 2'-fluorocytidine-3'-phosphate
  modified_base 8: mod_base = OTHER; note = 2'-O-methyladenosine-3'-phosphate
  modified_base 9: mod_base = OTHER; note = 2'-fluorocytidine-3'-phosphate
  modified_base 10: mod_base = OTHER; note = 2'-fluoroadenosine-3'-phosphate
  modified_base 11: mod_base = OTHER; note = 2'-fluoroadenosine-3'-phosphate
  modified_base 12: mod_base = OTHER; note = 2'-O-methylcytidine-3'-phosphate
  modified_base 13: mod_base = OTHER; note = 2'-O-methyladenosine-3'-phosphate
  modified_base 14: mod_base = OTHER; note = 2'-O-methyladenosine-3'-phosphate
  modified_base 15: mod_base = OTHER; note = 2'-O-methylcytidine-3'-phosphate
  modified_base 16: mod_base = OTHER; note = 2'-O-methyladenosine-3'-phosphate
  modified_base 17: mod_base = OTHER; note = 2'-O-methylcytidine-3'-phosphate
  modified_base 18: mod_base = OTHER; note = 2'-O-methylcytidine-3'-phosphate
  modified_base 19: mod_base = OTHER; note = 2'-O-methylguanosine-3'-phosphate
  modified_base 20: mod_base = OTHER; note = 2'-O-methyladenosine-3'-phosphate
  modified_base 21: mod_base = OTHER; note = 2'-O-methyladenosine-3'-phosphate
ctcttccacaacaacaccgaa

SEQ ID NO: 422 - RNA, 21 nt, synthetic construct
  source 1..21: mol_type = other RNA
  modified_base 1: mod_base = OTHER; note = 2'-O-methyladenosine-3'-phosphorothioate
  modified_base 2: mod_base = OTHER; note = 2'-O-methylcytidine-3'-phosphorothioate
  modified_base 3: mod_base = OTHER; note = 2'-O-methylcytidine-3'-phosphate
  modified_base 4: mod_base = OTHER; note = 2'-O-methyladenosine-3'-phosphate
  modified_base 5: mod_base = OTHER; note = 2'-O-methyladenosine-3'-phosphate
  modified_base 6: mod_base = OTHER; note = 2'-O-methylcytidine-3'-phosphate
  modified_base 7: mod_base = OTHER; note = 2'-fluoroadenosine-3'-phosphate
  modified_base 8: mod_base = OTHER; note = 2'-O-methyladenosine-3'-phosphate
  modified_base 9: mod_base = OTHER; note = 2'-fluorocytidine-3'-phosphate
  modified_base 10: mod_base = OTHER; note = 2'-fluorocytidine-3'-phosphate
  modified_base 11: mod_base = OTHER; note = 2'-fluoroadenosine-3'-phosphate
  modified_base 12: mod_base = OTHER; note = 2'-O-methylguanosine-3'-phosphate
  modified_base 13: mod_base = OTHER; note = 2'-O-methyladenosine-3'-phosphate
  modified_base 14: mod_base = OTHER; note = 2'-O-methylguanosine-3'-phosphate
  modified_base 15: mod_base = OTHER; note = 2'-O-methylguanosine-3'-phosphate
  modified_base 16: mod_base = OTHER; note = 2'-O-methylguanosine-3'-phosphate
  modified_base 17: mod_base = OTHER; note = 2'-O-methyladenosine-3'-phosphate
  modified_base 18: mod_base = OTHER; note = 2'-O-methylcytidine-3'-phosphate
  modified_base 19: mod_base = OTHER; note = 2'-O-methylguanosine-3'-phosphate
  modified_base 20: mod_base = OTHER; note = 2'-O-methyladenosine-3'-phosphate
  modified_base 21: mod_base = OTHER; note = 2'-O-methyladenosine-3'-phosphate
accaacaaccagagggacgaa

SEQ ID NO: 423 - RNA, 21 nt, synthetic construct
  source 1..21: mol_type = other RNA
  modified_base 1: mod_base = OTHER; note = 2'-O-methylcytidine-3'-phosphorothioate
  modified_base 2: mod_base = OTHER; note = 2'-O-methyladenosine-3'-phosphorothioate
  modified_base 3: mod_base = OTHER; note = 2'-O-methylcytidine-3'-phosphate
  modified_base 4: mod_base = OTHER; note = 2'-O-methylcytidine-3'-phosphate
  modified_base 5: mod_base = OTHER; note = 2'-O-methylcytidine-3'-phosphate
  modified_base 6: mod_base = OTHER; note = 2'-O-methyluridine-3'-phosphate
  modified_base 7: mod_base = OTHER; note = 2'-fluorocytidine-3'-phosphate
  modified_base 8: mod_base = OTHER; note = 2'-O-methylguanosine-3'-phosphate
  modified_base 9: mod_base = OTHER; note = 2'-fluoroadenosine-3'-phosphate
  modified_base 10: mod_base = OTHER; note = 2'-fluoroguanosine-3'-phosphate
  modified_base 11: mod_base = OTHER; note = 2'-fluorocytidine-3'-phosphate
  modified_base 12: mod_base = OTHER; note = 2'-O-methyluridine-3'-phosphate
  modified_base 13: mod_base = OTHER; note = 2'-O-methyluridine-3'-phosphate
  modified_base 14: mod_base = OTHER; note = 2'-O-methylcytidine-3'-phosphate
  modified_base 15: mod_base = OTHER; note = 2'-O-methyluridine-3'-phosphate
  modified_base 16: mod_base = OTHER; note = 2'-O-methyluridine-3'-phosphate
  modified_base 17: mod_base = OTHER; note = 2'-O-methylcytidine-3'-phosphate
  modified_base 18: mod_base = OTHER; note = 2'-O-methyladenosine-3'-phosphate
  modified_base 19: mod_base = OTHER; note = 2'-O-methyluridine-3'-phosphate
  modified_base 20: mod_base = OTHER; note = 2'-O-methylcytidine-3'-phosphate
  modified_base 21: mod_base = OTHER; note = 2'-O-methyladenosine-3'-phosphate
caccctcgagcttcttcatca

SEQ ID NO: 424 - RNA, 19 nt, synthetic construct
  source 1..19: mol_type = other RNA
  modified_base 1: mod_base = OTHER; note = 2'-O-methylcytidine-3'-phosphate
  modified_base 2: mod_base = OTHER; note = 2'-O-methylcytidine-3'-phosphate
  modified_base 4: mod_base = OTHER; note = 2'-O-methyluridine-3'-phosphate
  modified_base 5: mod_base = OTHER; note = 2'-O-methylcytidine-3'-phosphate
  modified_base 6: mod_base = OTHER; note = 2'-O-methylguanosine-3'-phosphate
  modified_base 10: mod_base = OTHER; note = 2'-O-methyluridine-3'-phosphate
  modified_base 11: mod_base = OTHER; note = 2'-O-methyluridine-3'-phosphate
  modified_base 13: mod_base = OTHER; note = 2'-O-methyluridine-3'-phosphate
  modified_base 14: mod_base = OTHER; note = 2'-O-methyluridine-3'-phosphate
  modified_base 15: mod_base = OTHER; note = 2'-O-methylcytidine-3'-phosphate
  modified_base 16: mod_base = OTHER; note = 2'-O-methyladenosine-3'-phosphate
  modified_base 18: mod_base = OTHER; note = 2'-O-methylcytidine-3'-phosphorothioate
  modified_base 19: mod_base = OTHER; note = 2'-O-methyladenosine-3'-phosphate
ccctcgagcttcttcatca

SEQ ID NO: 425 - RNA, 21 nt, synthetic construct
  source 1..21: mol_type = other RNA
  modified_base 1: mod_base = OTHER; note = 2'-O-methylcytidine-3'-phosphate
  modified_base 2: mod_base = OTHER; note = 2'-O-methyladenosine-3'-phosphate
  modified_base 3: mod_base = OTHER; note = 2'-O-methylcytidine-3'-phosphate
  modified_base 4: mod_base = OTHER; note = 2'-O-methylcytidine-3'-phosphate
  modified_base 6: mod_base = OTHER; note = 2'-O-methyluridine-3'-phosphate
  modified_base 7: mod_base = OTHER; note = 2'-O-methylcytidine-3'-phosphate
  modified_base 8: mod_base = OTHER; note = 2'-O-methylguanosine-3'-phosphate
  modified_base 12: mod_base = OTHER; note = 2'-O-methyluridine-3'-phosphate
  modified_base 13: mod_base = OTHER; note = 2'-O-methyluridine-3'-phosphate
  modified_base 14: mod_base = OTHER; note = 2'-O-methylcytidine-3'-phosphate
  modified_base 15: mod_base = OTHER; note = 2'-O-methyluridine-3'-phosphate
  modified_base 16: mod_base = OTHER; note = 2'-O-methyluridine-3'-phosphate
  modified_base 17: mod_base = OTHER; note = 2'-O-methylcytidine-3'-phosphate
  modified_base 18: mod_base = OTHER; note = 2'-O-methyladenosine-3'-phosphate
  modified_base 20: mod_base = OTHER; note = 2'-O-methylcytidine-3'-phosphorothioate
  modified_base 21: mod_base = OTHER; note = 2'-O-methyladenosine-3'-phosphate
caccctcgagcttcttcatca

SEQ ID NO: 426 - RNA, 21 nt, synthetic construct
  source 1..21: mol_type = other RNA
  modified_base 1: mod_base = OTHER; note = 2'-O-methyladenosine-3'-phosphorothioate
  modified_base 2: mod_base = OTHER; note = 2'-O-methylcytidine-3'-phosphorothioate
  modified_base 3: mod_base = OTHER; note = 2'-O-methylcytidine-3'-phosphate
  modified_base 4: mod_base = OTHER; note = 2'-O-methylcytidine-3'-phosphate
  modified_base 5: mod_base = OTHER; note = 2'-O-methyluridine-3'-phosphate
  modified_base 6: mod_base = OTHER; note = 2'-O-methylcytidine-3'-phosphate
  modified_base 7: mod_base = OTHER; note = 2'-fluoroguanosine-3'-phosphate
  modified_base 8: mod_base = OTHER; note = 2'-O-methyladenosine-3'-phosphate
  modified_base 9: mod_base = OTHER; note = 2'-fluoroguanosine-3'-phosphate
  modified_base 10: mod_base = OTHER; note = 2'-fluorocytidine-3'-phosphate
  modified_base 11: mod_base = OTHER; note = 2'-fluorouridine-3'-phosphate
  modified_base 12: mod_base = OTHER; note = 2'-O-methyluridine-3'-phosphate
  modified_base 13: mod_base = OTHER; note = 2'-O-methylcytidine-3'-phosphate
  modified_base 14: mod_base = OTHER; note = 2'-O-methyluridine-3'-phosphate
  modified_base 15: mod_base = OTHER; note = 2'-O-methyluridine-3'-phosphate
  modified_base 16: mod_base = OTHER; note = 2'-O-methylcytidine-3'-phosphate
  modified_base 17: mod_base = OTHER; note = 2'-O-methyladenosine-3'-phosphate
  modified_base 18: mod_base = OTHER; note = 2'-O-methyluridine-3'-phosphate
  modified_base 19: mod_base = OTHER; note = 2'-O-methylcytidine-3'-phosphate
  modified_base 20: mod_base = OTHER; note = 2'-O-methylguanosine-3'-phosphate
  modified_base 21: mod_base = OTHER; note = 2'-O-methyladenosine-3'-phosphate
accctcgagcttcttcatcga

SEQ ID NO: 427 - RNA, 21 nt, synthetic construct
  source 1..21: mol_type = other RNA
  modified_base 1: mod_base = OTHER; note = 2'-O-methylcytidine-3'-phosphorothioate
  modified_base 2: mod_base = OTHER; note = 2'-O-methylcytidine-3'-phosphorothioate
  modified_base 3: mod_base = OTHER; note = 2'-O-methylcytidine-3'-phosphate
  modified_base 4: mod_base = OTHER; note = 2'-O-methyluridine-3'-phosphate
  modified_base 5: mod_base = OTHER; note = 2'-O-methylcytidine-3'-phosphate
  modified_base 6: mod_base = OTHER; note = 2'-O-methylguanosine-3'-phosphate
  modified_base 7: mod_base = OTHER; note = 2'-fluoroadenosine-3'-phosphate
  modified_base 8: mod_base = OTHER; note = 2'-O-methylguanosine-3'-phosphate
  modified_base 9: mod_base = OTHER; note = 2'-fluorocytidine-3'-phosphate
  modified_base 10: mod_base = OTHER; note = 2'-fluorouridine-3'-phosphate
  modified_base 11: mod_base = OTHER; note = 2'-fluorouridine-3'-phosphate
  modified_base 12: mod_base = OTHER; note = 2'-O-methylcytidine-3'-phosphate
  modified_base 13: mod_base = OTHER; note = 2'-O-methyluridine-3'-phosphate
  modified_base 14: mod_base = OTHER; note = 2'-O-methyluridine-3'-phosphate
  modified_base 15: mod_base = OTHER; note = 2'-O-methylcytidine-3'-phosphate
  modified_base 16: mod_base = OTHER; note = 2'-O-methyladenosine-3'-phosphate
  modified_base 17: mod_base = OTHER; note = 2'-O-methyluridine-3'-phosphate
  modified_base 18: mod_base = OTHER; note = 2'-O-methylcytidine-3'-phosphate
  modified_base 19: mod_base = OTHER; note = 2'-O-methylguanosine-3'-phosphate
  modified_base 20: mod_base = OTHER; note = 2'-O-methyluridine-3'-phosphate
  modified_base 21: mod_base = OTHER; note = 2'-O-methyladenosine-3'-phosphate
ccctcgagcttcttcatcgta

SEQ ID NO: 428 - RNA, 19 nt, synthetic construct
  source 1..19: mol_type = other RNA
  modified_base 1: mod_base = OTHER; note = 2'-O-methylcytidine-3'-phosphate
  modified_base 2: mod_base = OTHER; note = 2'-O-methyluridine-3'-phosphate
  modified_base 4: mod_base = OTHER; note = 2'-O-methylguanosine-3'-phosphate
  modified_base 5: mod_base = OTHER; note = 2'-O-methyladenosine-3'-phosphate
  modified_base 6: mod_base = OTHER; note = 2'-O-methylguanosine-3'-phosphate
  modified_base 10: mod_base = OTHER; note = 2'-O-methylcytidine-3'-phosphate
  modified_base 11: mod_base = OTHER; note = 2'-O-methyluridine-3'-phosphate
  modified_base 13: mod_base = OTHER; note = 2'-O-methylcytidine-3'-phosphate
  modified_base 14: mod_base = OTHER; note = 2'-O-methyladenosine-3'-phosphate
  modified_base 15: mod_base = OTHER; note = 2'-O-methyluridine-3'-phosphate
  modified_base 16: mod_base = OTHER; note = 2'-O-methylcytidine-3'-phosphate
  modified_base 18: mod_base = OTHER; note = 2'-O-methyluridine-3'-phosphorothioate
  modified_base 19: mod_base = OTHER; note = 2'-O-methyladenosine-3'-phosphate
ctcgagcttcttcatcgta

SEQ ID NO: 429 - RNA, 21 nt, synthetic construct
  source 1..21: mol_type = other RNA
  modified_base 1: mod_base = OTHER; note = 2'-O-methylcytidine-3'-phosphate
  modified_base 2: mod_base = OTHER; note = 2'-O-methylcytidine-3'-phosphate
  modified_base 3: mod_base = OTHER; note = 2'-O-methylcytidine-3'-phosphate
  modified_base 4: mod_base = OTHER; note = 2'-O-methyluridine-3'-phosphate
  modified_base 6: mod_base = OTHER; note = 2'-O-methylguanosine-3'-phosphate
  modified_base 7: mod_base = OTHER; note = 2'-O-methyladenosine-3'-phosphate
  modified_base 8: mod_base = OTHER; note = 2'-O-methylguanosine-3'-phosphate
  modified_base 12: mod_base = OTHER; note = 2'-O-methylcytidine-3'-phosphate
  modified_base 13: mod_base = OTHER; note = 2'-O-methyluridine-3'-phosphate
  modified_base 14: mod_base = OTHER; note = 2'-O-methyluridine-3'-phosphate
  modified_base 15: mod_base = OTHER; note = 2'-O-methylcytidine-3'-phosphate
  modified_base 16: mod_base = OTHER; note = 2'-O-methyladenosine-3'-phosphate
  modified_base 17: mod_base = OTHER; note = 2'-O-methyluridine-3'-phosphate
  modified_base 18: mod_base = OTHER; note = 2'-O-methylcytidine-3'-phosphate
  modified_base 20: mod_base = OTHER; note = 2'-O-methyluridine-3'-phosphorothioate
  modified_base 21: mod_base = OTHER; note = 2'-O-methyladenosine-3'-phosphate
ccctcgagcttcttcatcgta

SEQ ID NO: 430 - RNA, 21 nt, synthetic construct
  source 1..21: mol_type = other RNA
  modified_base 1: mod_base = OTHER; note = 2'-O-methyladenosine-3'-phosphorothioate
  modified_base 2: mod_base = OTHER; note = 2'-O-methylguanosine-3'-phosphorothioate
  modified_base 3: mod_base = OTHER; note = 2'-O-methylcytidine-3'-phosphate
  modified_base 4: mod_base = OTHER; note = 2'-O-methylcytidine-3'-phosphate
  modified_base 5: mod_base = OTHER; note = 2'-O-methyluridine-3'-phosphate
  modified_base 6: mod_base = OTHER; note = 2'-O-methylcytidine-3'-phosphate
  modified_base 7: mod_base = OTHER; note = 2'-fluoroadenosine-3'-phosphate
  modified_base 8: mod_base = OTHER; note = 2'-O-methylguanosine-3'-phosphate
  modified_base 9: mod_base = OTHER; note = 2'-fluoroguanosine-3'-phosphate
  modified_base 10: mod_base = OTHER; note = 2'-fluoroadenosine-3'-phosphate
  modified_base 11: mod_base = OTHER; note = 2'-fluoroadenosine-3'-phosphate
  modified_base 12: mod_base = OTHER; note = 2'-O-methyladenosine-3'-phosphate
  modified_base 13: mod_base = OTHER; note = 2'-O-methyladenosine-3'-phosphate
  modified_base 14: mod_base = OTHER; note = 2'-O-methylcytidine-3'-phosphate
  modified_base 15: mod_base = OTHER; note = 2'-O-methylcytidine-3'-phosphate
  modified_base 16: mod_base = OTHER; note = 2'-O-methylguanosine-3'-phosphate
  modified_base 17: mod_base = OTHER; note = 2'-O-methylguanosine-3'-phosphate
  modified_base 18: mod_base = OTHER; note = 2'-O-methylcytidine-3'-phosphate
  modified_base 19: mod_base = OTHER; note = 2'-O-methyluridine-3'-phosphate
  modified_base 20: mod_base = OTHER; note = 2'-O-methylguanosine-3'-phosphate
  modified_base 21: mod_base = OTHER; note = 2'-O-methyladenosine-3'-phosphate
agcctcaggaaaaccggctga

SEQ ID NO: 431 - RNA, 21 nt, synthetic construct
  source 1..21: mol_type = other RNA
  modified_base 1: mod_base = OTHER; note = 2'-O-methylguanosine-3'-phosphorothioate
  modified_base 2: mod_base = OTHER; note = 2'-O-methyladenosine-3'-phosphorothioate
  modified_base 3: mod_base = OTHER; note = 2'-O-methyluridine-3'-phosphate
  modified_base 4: mod_base = OTHER; note = 2'-O-methylguanosine-3'-phosphate
  modified_base 5: mod_base = OTHER; note = 2'-O-methyladenosine-3'-phosphate
  modified_base 6: mod_base = OTHER; note = 2'-O-methylguanosine-3'-phosphate
  modified_base 7: mod_base = OTHER; note = 2'-fluorouridine-3'-phosphate
  modified_base 8: mod_base = OTHER; note = 2'-O-methylguanosine-3'-phosphate
  modified_base 9: mod_base = OTHER; note = 2'-fluorouridine-3'-phosphate
  modified_base 10: mod_base = OTHER; note = 2'-fluoroguanosine-3'-phosphate
  modified_base 11: mod_base = OTHER; note = 2'-fluoroguanosine-3'-phosphate
  modified_base 12: mod_base = OTHER; note = 2'-O-methylcytidine-3'-phosphate
  modified_base 13: mod_base = OTHER; note = 2'-O-methyluridine-3'-phosphate
  modified_base 14: mod_base = OTHER; note = 2'-O-methylguanosine-3'-phosphate
  modified_base 15: mod_base = OTHER; note = 2'-O-methylcytidine-3'-phosphate
  modified_base 16: mod_base = OTHER; note = 2'-O-methyladenosine-3'-phosphate
  modified_base 17: mod_base = OTHER; note = 2'-O-methylcytidine-3'-phosphate
  modified_base 18: mod_base = OTHER; note = 2'-O-methylguanosine-3'-phosphate
  modified_base 19: mod_base = OTHER; note = 2'-O-methylcytidine-3'-phosphate
  modified_base 20: mod_base = OTHER; note = 2'-O-methylcytidine-3'-phosphate
  modified_base 21: mod_base = OTHER; note = 2'-O-methyladenosine-3'-phosphate
gatgagtgtggctgcacgcca

SEQ ID NO: 432 - RNA, 21 nt, synthetic construct
  source 1..21: mol_type = other RNA
  modified_base 1: mod_base = OTHER; note = 2'-O-methylcytidine-3'-phosphorothioate
  modified_base 2: mod_base = OTHER; note = 2'-O-methylcytidine-3'-phosphorothioate
  modified_base 3: mod_base = OTHER; note = 2'-O-methyladenosine-3'-phosphate
  modified_base 4: mod_base = OTHER; note = 2'-O-methylguanosine-3'-phosphate
  modified_base 5: mod_base = OTHER; note = 2'-O-methyladenosine-3'-phosphate
  modified_base 6: mod_base = OTHER; note = 2'-O-methyladenosine-3'-phosphate
  modified_base 7: mod_base = OTHER; note = 2'-fluorocytidine-3'-phosphate
  modified_base 8: mod_base = OTHER; note = 2'-O-methylcytidine-3'-phosphate
  modified_base 9: mod_base = OTHER; note = 2'-fluoroadenosine-3'-phosphate
  modified_base 10: mod_base = OTHER; note = 2'-fluoroguanosine-3'-phosphate
  modified_base 11: mod_base = OTHER; note = 2'-fluoroguanosine-3'-phosphate
  modified_base 12: mod_base = OTHER; note = 2'-O-methylcytidine-3'-phosphate
  modified_base 13: mod_base = OTHER; note = 2'-O-methyluridine-3'-phosphate
  modified_base 14: mod_base = OTHER; note = 2'-O-methylguanosine-3'-phosphate
  modified_base 15: mod_base = OTHER; note = 2'-O-methyladenosine-3'-phosphate
  modified_base 16: mod_base = OTHER; note = 2'-O-methylcytidine-3'-phosphate
  modified_base 17: mod_base = OTHER; note = 2'-O-methylguanosine-3'-phosphate
  modified_base 18: mod_base = OTHER; note = 2'-O-methyladenosine-3'-phosphate
  modified_base 19: mod_base = OTHER; note = 2'-O-methylcytidine-3'-phosphate
  modified_base 20: mod_base = OTHER; note = 2'-O-methyluridine-3'-phosphate
  modified_base 21: mod_base = OTHER; note = 2'-O-methyladenosine-3'-phosphate
ccagaaccaggctgacgacta

SEQ ID NO: 433 - RNA, 21 nt, synthetic construct
  source 1..21: mol_type = other RNA
  modified_base 1: mod_base = OTHER; note = 2'-O-methylguanosine-3'-phosphorothioate
  modified_base 2: mod_base = OTHER; note = 2'-O-methylguanosine-3'-phosphorothioate
  modified_base 3: mod_base = OTHER; note = 2'-O-methylcytidine-3'-phosphate
  modified_base 4: mod_base = OTHER; note = 2'-O-methylguanosine-3'-phosphate
  modified_base 5: mod_base = OTHER; note = 2'-O-methylcytidine-3'-phosphate
  modified_base 6: mod_base = OTHER; note = 2'-O-methyladenosine-3'-phosphate
  modified_base 7: mod_base = OTHER; note = 2'-fluoroguanosine-3'-phosphate
  modified_base 8: mod_base = OTHER; note = 2'-O-methylcytidine-3'-phosphate
  modified_base 9: mod_base = OTHER; note = 2'-fluorocytidine-3'-phosphate
  modified_base 10: mod_base = OTHER; note = 2'-fluorouridine-3'-phosphate
  modified_base 11: mod_base = OTHER; note = 2'-fluorouridine-3'-phosphate
  modified_base 12: mod_base = OTHER; note = 2'-O-methylcytidine-3'-phosphate
  modified_base 13: mod_base = OTHER; note = 2'-O-methylguanosine-3'-phosphate
  modified_base 14: mod_base = OTHER; note = 2'-O-methylcytidine-3'-phosphate
  modified_base 15: mod_base = OTHER; note = 2'-O-methylcytidine-3'-phosphate
  modified_base 16: mod_base = OTHER; note = 2'-O-methyladenosine-3'-phosphate
  modified_base 17: mod_base = OTHER; note = 2'-O-methyladenosine-3'-phosphate
  modified_base 18: mod_base = OTHER; note = 2'-O-methylcytidine-3'-phosphate
  modified_base 19: mod_base = OTHER; note = 2'-O-methyladenosine-3'-phosphate
  modified_base 20: mod_base = OTHER; note = 2'-O-methylcytidine-3'-phosphate
  modified_base 21: mod_base = OTHER; note = 2'-O-methyladenosine-3'-phosphate
ggcgcagccttcgccaacaca

SEQ ID NO: 434 - RNA, 19 nt, synthetic construct
  source 1..19: mol_type = other RNA
  modified_base 1: mod_base = OTHER; note = 2'-O-methylcytidine-3'-phosphate
  modified_base 2: mod_base = OTHER; note = 2'-O-methylguanosine-3'-phosphate
  modified_base 4: mod_base = OTHER; note = 2'-O-methyladenosine-3'-phosphate
  modified_base 5: mod_base = OTHER; note = 2'-O-methylguanosine-3'-phosphate
  modified_base 6: mod_base = OTHER; note = 2'-O-methylcytidine-3'-phosphate
  modified_base 10: mod_base = OTHER; note = 2'-O-methylcytidine-3'-phosphate
  modified_base 11: mod_base = OTHER; note = 2'-O-methylguanosine-3'-phosphate
  modified_base 13: mod_base = OTHER; note = 2'-O-methylcytidine-3'-phosphate
  modified_base 14: mod_base = OTHER; note = 2'-O-methyladenosine-3'-phosphate
  modified_base 15: mod_base = OTHER; note = 2'-O-methyladenosine-3'-phosphate
  modified_base 16: mod_base = OTHER; note = 2'-O-methylcytidine-3'-phosphate
  modified_base 18: mod_base = OTHER; note = 2'-O-methylcytidine-3'-phosphorothioate
  modified_base 19: mod_base = OTHER; note = 2'-O-methyladenosine-3'-phosphate
cgcagccttcgccaacaca

SEQ ID NO: 435 - RNA, 21 nt, synthetic construct
  source 1..21: mol_type = other RNA
  modified_base 1: mod_base = OTHER; note = 2'-O-methylguanosine-3'-phosphate
  modified_base 2: mod_base = OTHER; note = 2'-O-methylguanosine-3'-phosphate
  modified_base 3: mod_base = OTHER; note = 2'-O-methylcytidine-3'-phosphate
  modified_base 4: mod_base = OTHER; note = 2'-O-methylguanosine-3'-phosphate
  modified_base 6: mod_base = OTHER; note = 2'-O-methyladenosine-3'-phosphate
  modified_base 7: mod_base = OTHER; note = 2'-O-methylguanosine-3'-phosphate
  modified_base 8: mod_base = OTHER; note = 2'-O-methylcytidine-3'-phosphate
  modified_base 12: mod_base = OTHER; note = 2'-O-methylcytidine-3'-phosphate
  modified_base 13: mod_base = OTHER; note = 2'-O-methylguanosine-3'-phosphate
  modified_base 14: mod_base = OTHER; note = 2'-O-methylcytidine-3'-phosphate
  modified_base 15: mod_base = OTHER; note = 2'-O-methylcytidine-3'-phosphate
  modified_base 16: mod_base = OTHER; note = 2'-O-methyladenosine-3'-phosphate
  modified_base 17: mod_base = OTHER; note = 2'-O-methyladenosine-3'-phosphate
  modified_base 18: mod_base = OTHER; note = 2'-O-methylcytidine-3'-phosphate
  modified_base 20: mod_base = OTHER; note = 2'-O-methylcytidine-3'-phosphorothioate
  modified_base 21: mod_base = OTHER; note = 2'-O-methyladenosine-3'-phosphate
ggcgcagccttcgccaacaca

SEQ ID NO: 436 - RNA, 21 nt, synthetic construct
  source 1..21: mol_type = other RNA
  modified_base 1: mod_base = OTHER; note = 2'-O-methyladenosine-3'-phosphorothioate
  modified_base 2: mod_base = OTHER; note = 2'-O-methylguanosine-3'-phosphorothioate
  modified_base 3: mod_base = OTHER; note = 2'-O-methyladenosine-3'-phosphate
  modified_base 4: mod_base = OTHER; note = 2'-O-methyladenosine-3'-phosphate
  modified_base 5: mod_base = OTHER; note = 2'-O-methyluridine-3'-phosphate
  modified_base 6: mod_base = OTHER; note = 2'-O-methylguanosine-3'-phosphate
  modified_base 7: mod_base = OTHER; note = 2'-fluoroadenosine-3'-phosphate
  modified_base 8: mod_base = OTHER; note = 2'-O-methylguanosine-3'-phosphate
  modified_base 9: mod_base = OTHER; note = 2'-fluoroadenosine-3'-phosphate
  modified_base 10: mod_base = OTHER; note = 2'-fluoroadenosine-3'-phosphate
  modified_base 11: mod_base = OTHER; note = 2'-fluorocytidine-3'-phosphate
  modified_base 12: mod_base = OTHER; note = 2'-O-methyluridine-3'-phosphate
  modified_base 13: mod_base = OTHER; note = 2'-O-methyladenosine-3'-phosphate
  modified_base 14: mod_base = OTHER; note = 2'-O-methylcytidine-3'-phosphate
  modified_base 15: mod_base = OTHER; note = 2'-O-methylguanosine-3'-phosphate
  modified_base 16: mod_base = OTHER; note = 2'-O-methylcytidine-3'-phosphate
  modified_base 17: mod_base = OTHER; note = 2'-O-methylcytidine-3'-phosphate
  modified_base 18: mod_base = OTHER; note = 2'-O-methylcytidine-3'-phosphate
  modified_base 19: mod_base = OTHER; note = 2'-O-methylguanosine-3'-phosphate
  modified_base 20: mod_base = OTHER; note = 2'-O-methylguanosine-3'-phosphate
  modified_base 21: mod_base = OTHER; note = 2'-O-methyladenosine-3'-phosphate
agaatgagaactacgcccgga

SEQ ID NO: 437 - RNA, 21 nt, synthetic construct
  source 1..21: mol_type = other RNA
  modified_base 1: mod_base = OTHER; note = 2'-O-methylguanosine-3'-phosphorothioate
  modified_base 2: mod_base = OTHER; note = 2'-O-methyladenosine-3'-phosphorothioate
  modified_base 3: mod_base = OTHER; note = 2'-O-methyladenosine-3'-phosphate
  modified_base 4: mod_base = OTHER; note = 2'-O-methyluridine-3'-phosphate
  modified_base 5: mod_base = OTHER; note = 2'-O-methylguanosine-3'-phosphate
  modified_base 6: mod_base = OTHER; note = 2'-O-methyladenosine-3'-phosphate
  modified_base 7: mod_base = OTHER; note = 2'-fluoroguanosine-3'-phosphate
  modified_base 8: mod_base = OTHER; note = 2'-O-methyladenosine-3'-phosphate
  modified_base 9: mod_base = OTHER; note = 2'-fluoroadenosine-3'-phosphate
  modified_base 10: mod_base = OTHER; note = 2'-fluorocytidine-3'-phosphate
  modified_base 11: mod_base = OTHER; note = 2'-fluorouridine-3'-phosphate
  modified_base 12: mod_base = OTHER; note = 2'-O-methyladenosine-3'-phosphate
  modified_base 13: mod_base = OTHER; note = 2'-O-methylcytidine-3'-phosphate
  modified_base 14: mod_base = OTHER; note = 2'-O-methylguanosine-3'-phosphate
  modified_base 15: mod_base = OTHER; note = 2'-O-methylcytidine-3'-phosphate
  modified_base 16: mod_base = OTHER; note = 2'-O-methylcytidine-3'-phosphate
  modified_base 17: mod_base = OTHER; note = 2'-O-methylcytidine-3'-phosphate
  modified_base 18: mod_base = OTHER; note = 2'-O-methylguanosine-3'-phosphate
  modified_base 19: mod_base = OTHER; note = 2'-O-methylguanosine-3'-phosphate
  modified_base 20: mod_base = OTHER; note = 2'-O-methylcytidine-3'-phosphate
  modified_base 21: mod_base = OTHER; note = 2'-O-methyladenosine-3'-phosphate
gaatgagaactacgcccggca

SEQ ID NO: 438 - RNA, 21 nt, synthetic construct
  source 1..21: mol_type = other RNA
  modified_base 1: mod_base = OTHER; note = 2'-O-methyladenosine-3'-phosphorothioate
  modified_base 2: mod_base = OTHER; note = 2'-O-methylcytidine-3'-phosphorothioate
  modified_base 3: mod_base = OTHER; note = 2'-O-methylguanosine-3'-phosphate
  modified_base 4: mod_base = OTHER; note = 2'-O-methylguanosine-3'-phosphate
  modified_base 5: mod_base = OTHER; note = 2'-O-methylcytidine-3'-phosphate
  modified_base 6: mod_base = OTHER; note = 2'-O-methylguanosine-3'-phosphate
  modified_base 7: mod_base = OTHER; note = 2'-fluorouridine-3'-phosphate
  modified_base 8: mod_base = OTHER; note = 2'-O-methylcytidine-3'-phosphate
  modified_base 9: mod_base = OTHER; note = 2'-fluorouridine-3'-phosphate
  modified_base 10: mod_base = OTHER; note = 2'-fluoroguanosine-3'-phosphate
  modified_base 11: mod_base = OTHER; note = 2'-fluorocytidine-3'-phosphate
  modified_base 12: mod_base = OTHER; note = 2'-O-methyladenosine-3'-phosphate
  modified_base 13: mod_base = OTHER; note = 2'-O-methylcytidine-3'-phosphate
  modified_base 14: mod_base = OTHER; note = 2'-O-methylcytidine-3'-phosphate
  modified_base 15: mod_base = OTHER; note = 2'-O-methyladenosine-3'-phosphate
  modified_base 16: mod_base = OTHER; note = 2'-O-methyladenosine-3'-phosphate
  modified_base 17: mod_base = OTHER; note = 2'-O-methylguanosine-3'-phosphate
  modified_base 18: mod_base = OTHER; note = 2'-O-methyluridine-3'-phosphate
  modified_base 19: mod_base = OTHER; note = 2'-O-methyladenosine-3'-phosphate
  modified_base 20: mod_base = OTHER; note = 2'-O-methylcytidine-3'-phosphate
  modified_base 21: mod_base = OTHER; note = 2'-O-methyladenosine-3'-phosphate
acggcgtctgcaccaagtaca

SEQ ID NO: 439 - RNA, 19 nt, synthetic construct
  source 1..19: mol_type = other RNA
  modified_base 1: mod_base = OTHER; note = 2'-O-methylguanosine-3'-phosphate
  modified_base 2: mod_base = OTHER; note = 2'-O-methylguanosine-3'-phosphate
  modified_base 4: mod_base = OTHER; note = 2'-O-methylguanosine-3'-phosphate
  modified_base 5: mod_base = OTHER; note = 2'-O-methyluridine-3'-phosphate
  modified_base 6: mod_base = OTHER; note = 2'-O-methylcytidine-3'-phosphate
  modified_base 10: mod_base = OTHER; note = 2'-O-methyladenosine-3'-phosphate
  modified_base 11: mod_base = OTHER; note = 2'-O-methylcytidine-3'-phosphate
  modified_base 13: mod_base = OTHER; note = 2'-O-methyladenosine-3'-phosphate
  modified_base 14: mod_base = OTHER; note = 2'-O-methyladenosine-3'-phosphate
  modified_base 15: mod_base = OTHER; note = 2'-O-methylguanosine-3'-phosphate
  modified_base 16: mod_base = OTHER; note = 2'-O-methyluridine-3'-phosphate
  modified_base 18: mod_base = OTHER; note = 2'-O-methylcytidine-3'-phosphorothioate
  modified_base 19: mod_base = OTHER; note = 2'-O-methyladenosine-3'-phosphate
ggcgtctgcaccaagtaca

SEQ ID NO: 440 - RNA, 21 nt, synthetic construct
  source 1..21: mol_type = other RNA
  modified_base 1: mod_base = OTHER; note = 2'-O-methyladenosine-3'-phosphate
  modified_base 2: mod_base = OTHER; note = 2'-O-methylcytidine-3'-phosphate
  modified_base 3: mod_base = OTHER; note = 2'-O-methylguanosine-3'-phosphate
  modified_base 4: mod_base = OTHER; note = 2'-O-methylguanosine-3'-phosphate
  modified_base 6: mod_base = OTHER; note = 2'-O-methylguanosine-3'-phosphate
  modified_base 7: mod_base = OTHER; note = 2'-O-methyluridine-3'-phosphate
  modified_base 8: mod_base = OTHER; note = 2'-O-methylcytidine-3'-phosphate
  modified_base 12: mod_base = OTHER; note = 2'-O-methyladenosine-3'-phosphate
  modified_base 13: mod_base = OTHER; note = 2'-O-methylcytidine-3'-phosphate
  modified_base 14: mod_base = OTHER; note = 2'-O-methylcytidine-3'-phosphate
  modified_base 15: mod_base = OTHER; note = 2'-O-methyladenosine-3'-phosphate
  modified_base 16: mod_base = OTHER; note = 2'-O-methyladenosine-3'-phosphate
  modified_base 17: mod_base = OTHER; note = 2'-O-methylguanosine-3'-phosphate
  modified_base 18: mod_base = OTHER; note = 2'-O-methyluridine-3'-phosphate
  modified_base 20: mod_base = OTHER; note = 2'-O-methylcytidine-3'-phosphorothioate
  modified_base 21: mod_base = OTHER; note = 2'-O-methyladenosine-3'-phosphate
acggcgtctgcaccaagtaca

SEQ ID NO: 441 - RNA, 21 nt, synthetic construct
  source 1..21: mol_type = other RNA
  modified_base 1: mod_base = OTHER; note = 2'-O-methylcytidine-3'-phosphorothioate
  modified_base 2: mod_base = OTHER; note = 2'-O-methylguanosine-3'-phosphorothioate
  modified_base 3: mod_base = OTHER; note = 2'-O-methylguanosine-3'-phosphate
  modified_base 4: mod_base = OTHER; note = 2'-O-methylcytidine-3'-phosphate
  modified_base 5: mod_base = OTHER; note = 2'-O-methylguanosine-3'-phosphate
  modified_base 6: mod_base = OTHER; note = 2'-O-methyluridine-3'-phosphate
  modified_base 7: mod_base = OTHER; note = 2'-fluorocytidine-3'-phosphate
  modified_base 8: mod_base = OTHER; note = 2'-O-methyluridine-3'-phosphate
  modified_base 9: mod_base = OTHER; note = 2'-fluoroguanosine-3'-phosphate
  modified_base 10: mod_base = OTHER; note = 2'-fluorocytidine-3'-phosphate
  modified_base 11: mod_base = OTHER; note = 2'-fluoroadenosine-3'-phosphate
  modified_base 12: mod_base = OTHER; note = 2'-O-methylcytidine-3'-phosphate
  modified_base 13: mod_base = OTHER; note = 2'-O-methylcytidine-3'-phosphate
  modified_base 14: mod_base = OTHER; note = 2'-O-methyladenosine-3'-phosphate
  modified_base 15: mod_base = OTHER; note = 2'-O-methyladenosine-3'-phosphate
  modified_base 16: mod_base = OTHER; note = 2'-O-methylguanosine-3'-phosphate
  modified_base 17: mod_base = OTHER; note = 2'-O-methyluridine-3'-phosphate
  modified_base 18: mod_base = OTHER; note = 2'-O-methyladenosine-3'-phosphate
  modified_base 19: mod_base = OTHER; note = 2'-O-methylcytidine-3'-phosphate
  modified_base 20: mod_base = OTHER; note = 2'-O-methyladenosine-3'-phosphate
  modified_base 21: mod_base = OTHER; note = 2'-O-methyladenosine-3'-phosphate
cggcgtctgcaccaagtacaa

SEQ ID NO: 442 - RNA, 19 nt, synthetic construct
  source 1..19: mol_type = other RNA
  modified_base 1: mod_base = OTHER; note = 2'-O-methylguanosine-3'-phosphate
  modified_base 2: mod_base = OTHER; note = 2'-O-methylcytidine-3'-phosphate
  modified_base 4: mod_base = OTHER; note = 2'-O-methyluridine-3'-phosphate
  modified_base 5: mod_base = OTHER; note = 2'-O-methylcytidine-3'-phosphate
  modified_base 6: mod_base = OTHER; note = 2'-O-methyluridine-3'-phosphate
  modified_base 10: mod_base = OTHER; note = 2'-O-methylcytidine-3'-phosphate
  modified_base 11: mod_base = OTHER; note = 2'-O-methylcytidine-3'-phosphate
  modified_base 13: mod_base = OTHER; note = 2'-O-methyladenosine-3'-phosphate
  modified_base 14: mod_base = OTHER; note = 2'-O-methylguanosine-3'-phosphate
  modified_base 15: mod_base = OTHER; note = 2'-O-methyluridine-3'-phosphate
  modified_base 16: mod_base = OTHER; note = 2'-O-methyladenosine-3'-phosphate
  modified_base 18: mod_base = OTHER; note = 2'-O-methyladenosine-3'-phosphorothioate
  modified_base 19: mod_base = OTHER; note = 2'-O-methyladenosine-3'-phosphate
gcgtctgcaccaagtacaa

SEQ ID NO: 443 - RNA, 21 nt, synthetic construct
  source 1..21: mol_type = other RNA
  modified_base 1: mod_base = OTHER; note = 2'-O-methylcytidine-3'-phosphate
  modified_base 2: mod_base = OTHER; note = 2'-O-methylguanosine-3'-phosphate
  modified_base 3: mod_base = OTHER; note = 2'-O-methylguanosine-3'-phosphate
  modified_base 4: mod_base = OTHER; note = 2'-O-methylcytidine-3'-phosphate
  modified_base 6: mod_base = OTHER; note = 2'-O-methyluridine-3'-phosphate
  modified_base 7: mod_base = OTHER; note = 2'-O-methylcytidine-3'-phosphate
  modified_base 8: mod_base = OTHER; note = 2'-O-methyluridine-3'-phosphate
  modified_base 12: mod_base = OTHER; note = 2'-O-methylcytidine-3'-phosphate
  modified_base 13: mod_base = OTHER; note = 2'-O-methylcytidine-3'-phosphate
  modified_base 14: mod_base = OTHER; note = 2'-O-methyladenosine-3'-phosphate
  modified_base 15: mod_base = OTHER; note = 2'-O-methyladenosine-3'-phosphate
  modified_base 16: mod_base = OTHER; note = 2'-O-methylguanosine-3'-phosphate
  modified_base 17: mod_base = OTHER; note = 2'-O-methyluridine-3'-phosphate
  modified_base 18: mod_base = OTHER; note = 2'-O-methyladenosine-3'-phosphate
  modified_base 20: mod_base = OTHER; note = 2'-O-methyladenosine-3'-phosphorothioate
  modified_base 21: mod_base = OTHER; note = 2'-O-methyladenosine-3'-phosphate
cggcgtctgcaccaagtacaa

SEQ ID NO: 444 - RNA, 21 nt, synthetic construct
  source 1..21: mol_type = other RNA
  modified_base 1: mod_base = OTHER; note = 2'-O-methylguanosine-3'-phosphorothioate
  modified_base 2: mod_base = OTHER; note = 2'-O-methyluridine-3'-phosphorothioate
  modified_base 3: mod_base = OTHER; note = 2'-O-methylguanosine-3'-phosphate
  modified_base 4: mod_base = OTHER; note = 2'-O-methyladenosine-3'-phosphate
  modified_base 5: mod_base = OTHER; note = 2'-O-methylguanosine-3'-phosphate
  modified_base 6: mod_base = OTHER; note = 2'-O-methylcytidine-3'-phosphate
  modified_base 7: mod_base = OTHER; note = 2'-fluorouridine-3'-phosphate
  modified_base 8: mod_base = OTHER; note = 2'-O-methyluridine-3'-phosphate
  modified_base 9: mod_base = OTHER; note = 2'-fluorouridine-3'-phosphate
  modified_base 10: mod_base = OTHER; note = 2'-fluoroguanosine-3'-phosphate
  modified_base 11: mod_base = OTHER; note = 2'-fluorouridine-3'-phosphate
  modified_base 12: mod_base = OTHER; note = 2'-O-methyluridine-3'-phosphate
  modified_base 13: mod_base = OTHER; note = 2'-O-methylcytidine-3'-phosphate
  modified_base 14: mod_base = OTHER; note = 2'-O-methylcytidine-3'-phosphate
  modified_base 15: mod_base = OTHER; note = 2'-O-methyladenosine-3'-phosphate
  modified_base 16: mod_base = OTHER; note = 2'-O-methylcytidine-3'-phosphate
  modified_base 17: mod_base = OTHER; note = 2'-O-methylcytidine-3'-phosphate
  modified_base 18: mod_base = OTHER; note = 2'-O-methylcytidine-3'-phosphate
  modified_base 19: mod_base = OTHER; note = 2'-O-methylguanosine-3'-phosphate
  modified_base 20: mod_base = OTHER; note = 2'-O-methyluridine-3'-phosphate
  modified_base 21: mod_base = OTHER; note = 2'-O-methyladenosine-3'-phosphate
gtgagctttgttccacccgta

SEQ ID NO: 445 - RNA, 21 nt, synthetic construct
  source 1..21: mol_type = other RNA
  modified_base 1: mod_base = OTHER; note = 2'-O-methylguanosine-3'-phosphorothioate
  modified_base 2: mod_base = OTHER; note = 2'-O-methylguanosine-3'-phosphorothioate
  modified_base 3: mod_base = OTHER; note = 2'-O-methylcytidine-3'-phosphate
  modified_base 4: mod_base = OTHER; note = 2'-O-methylcytidine-3'-phosphate
  modified_base 5: mod_base = OTHER; note = 2'-O-methyluridine-3'-phosphate
  modified_base 6: mod_base = OTHER; note = 2'-O-methylguanosine-3'-phosphate
  modified_base 7: mod_base = OTHER; note = 2'-fluoroadenosine-3'-phosphate
  modified_base 8: mod_base = OTHER; note = 2'-O-methylguanosine-3'-phosphate
  modified_base 9: mod_base = OTHER; note = 2'-fluorouridine-3'-phosphate
  modified_base 10: mod_base = OTHER; note = 2'-fluoroguanosine-3'-phosphate
  modified_base 11: mod_base = OTHER; note = 2'-fluoroadenosine-3'-phosphate
  modified_base 12: mod_base = OTHER; note = 2'-O-methylguanosine-3'-phosphate
  modified_base 13: mod_base = OTHER; note = 2'-O-methylguanosine-3'-phosphate
  modified_base 14: mod_base = OTHER; note = 2'-O-methylcytidine-3'-phosphate
  modified_base 15: mod_base = OTHER; note = 2'-O-methylcytidine-3'-phosphate
  modified_base 16: mod_base = OTHER; note = 2'-O-methylguanosine-3'-phosphate
  modified_base 17: mod_base = OTHER; note = 2'-O-methyladenosine-3'-phosphate
  modified_base 18: mod_base = OTHER; note = 2'-O-methylcytidine-3'-phosphate
  modified_base 19: mod_base = OTHER; note = 2'-O-methylguanosine-3'-phosphate
  modified_base 20: mod_base = OTHER; note = 2'-O-methyluridine-3'-phosphate
  modified_base 21: mod_base = OTHER; note = 2'-O-methyladenosine-3'-phosphate
ggcctgagtgaggccgacgta

SEQ ID NO: 446 - RNA, 21 nt, synthetic construct
  source 1..21: mol_type = other RNA
  modified_base 1: mod_base = OTHER; note = 2'-O-methylguanosine-3'-phosphorothioate
  modified_base 2: mod_base = OTHER; note = 2'-O-methylcytidine-3'-phosphorothioate
  modified_base 3: mod_base = OTHER; note = 2'-O-methylcytidine-3'-phosphate
  modified_base 4: mod_base = OTHER; note = 2'-O-methyluridine-3'-phosphate
  modified_base 5: mod_base = OTHER; note = 2'-O-methylguanosine-3'-phosphate
  modified_base 6: mod_base = OTHER; note = 2'-O-methyladenosine-3'-phosphate
  modified_base 7: mod_base = OTHER; note = 2'-fluoroguanosine-3'-phosphate
  modified_base 8: mod_base = OTHER; note = 2'-O-methyluridine-3'-phosphate
  modified_base 9: mod_base = OTHER; note = 2'-fluoroguanosine-3'-phosphate
  modified_base 10: mod_base = OTHER; note = 2'-fluoroadenosine-3'-phosphate
  modified_base 11: mod_base = OTHER; note = 2'-fluoroguanosine-3'-phosphate
  modified_base 12: mod_base = OTHER; note = 2'-O-methylguanosine-3'-phosphate
  modified_base 13: mod_base = OTHER; note = 2'-O-methylcytidine-3'-phosphate
  modified_base 14: mod_base = OTHER; note = 2'-O-methylcytidine-3'-phosphate
  modified_base 15: mod_base = OTHER; note = 2'-O-methylguanosine-3'-phosphate
  modified_base 16: mod_base = OTHER; note = 2'-O-methyladenosine-3'-phosphate
  modified_base 17: mod_base = OTHER; note = 2'-O-methylcytidine-3'-phosphate
  modified_base 18: mod_base = OTHER; note = 2'-O-methylguanosine-3'-phosphate
  modified_base 19: mod_base = OTHER; note = 2'-O-methyluridine-3'-phosphate
  modified_base 20: mod_base = OTHER; note = 2'-O-methylcytidine-3'-phosphate
  modified_base 21: mod_base = OTHER; note = 2'-O-methyladenosine-3'-phosphate
gcctgagtgaggccgacgtca

SEQ ID NO: 447 - RNA, 21 nt, synthetic construct
  source 1..21: mol_type = other RNA
  modified_base 1: mod_base = OTHER; note = 2'-O-methyluridine-3'-phosphorothioate
  modified_base 2: mod_base = OTHER; note = 2'-O-methyluridine-3'-phosphorothioate
  modified_base 3: mod_base = OTHER; note = 2'-O-methylcytidine-3'-phosphate
  modified_base 4: mod_base = OTHER; note = 2'-O-methylcytidine-3'-phosphate
  modified_base 5: mod_base = OTHER; note = 2'-O-methyluridine-3'-phosphate
  modified_base 6: mod_base = OTHER; note = 2'-O-methylcytidine-3'-phosphate
  modified_base 7: mod_base = OTHER; note = 2'-fluoroadenosine-3'-phosphate
  modified_base 8: mod_base = OTHER; note = 2'-O-methyladenosine-3'-phosphate
  modified_base 9: mod_base = OTHER; note = 2'-fluorouridine-3'-phosphate
  modified_base 10: mod_base = OTHER; note = 2'-fluoroguanosine-3'-phosphate
  modified_base 11: mod_base = OTHER; note = 2'-fluoroadenosine-3'-phosphate
  modified_base 12: mod_base = OTHER; note = 2'-O-methylcytidine-3'-phosphate
  modified_base 13: mod_base = OTHER; note = 2'-O-methylguanosine-3'-phosphate
  modified_base 14: mod_base = OTHER; note = 2'-O-methylcytidine-3'-phosphate
  modified_base 15: mod_base = OTHER; note = 2'-O-methylguanosine-3'-phosphate
  modified_base 16: mod_base = OTHER; note = 2'-O-methylguanosine-3'-phosphate
  modified_base 17: mod_base = OTHER; note = 2'-O-methylguanosine-3'-phosphate
  modified_base 18: mod_base = OTHER; note = 2'-O-methylcytidine-3'-phosphate
  modified_base 19: mod_base = OTHER; note = 2'-O-methylguanosine-3'-phosphate
  modified_base 20: mod_base = OTHER; note = 2'-O-methylcytidine-3'-phosphate
  modified_base 21: mod_base = OTHER; note = 2'-O-methyladenosine-3'-phosphate
ttcctcaatgacgcgggcgca

SEQ ID NO: 448 - RNA, 19 nt, synthetic construct
  source 1..19: mol_type = other RNA
  modified_base 1: mod_base = OTHER; note = 2'-O-methylcytidine-3'-phosphate
  modified_base 2: mod_base = OTHER; note = 2'-O-methylcytidine-3'-phosphate
  modified_base 4: mod_base = OTHER; note = 2'-O-methylcytidine-3'-phosphate
  modified_base 5: mod_base = OTHER; note = 2'-O-methyladenosine-3'-phosphate
  modified_base 6: mod_base = OTHER; note = 2'-O-methyladenosine-3'-phosphate
  modified_base 10: mod_base = OTHER; note = 2'-O-methylcytidine-3'-phosphate
  modified_base 11: mod_base = OTHER; note = 2'-O-methylguanosine-3'-phosphate
  modified_base 13: mod_base = OTHER; note = 2'-O-methylguanosine-3'-phosphate
  modified_base 14: mod_base = OTHER; note = 2'-O-methylguanosine-3'-phosphate
  modified_base 15: mod_base = OTHER; note = 2'-O-methylguanosine-3'-phosphate
  modified_base 16: mod_base = OTHER; note = 2'-O-methylcytidine-3'-phosphate
  modified_base 18: mod_base = OTHER; note = 2'-O-methylcytidine-3'-phosphorothioate
  modified_base 19: mod_base = OTHER; note = 2'-O-methyladenosine-3'-phosphate
cctcaatgacgcgggcgca

SEQ ID NO: 449 - RNA, 21 nt, synthetic construct
  source 1..21: mol_type = other RNA
  modified_base 1: mod_base = OTHER; note = 2'-O-methyluridine-3'-phosphate
  modified_base 2: mod_base = OTHER; note = 2'-O-methyluridine-3'-phosphate
  modified_base 3: mod_base = OTHER; note = 2'-O-methylcytidine-3'-phosphate
  modified_base 4: mod_base = OTHER; note = 2'-O-methylcytidine-3'-phosphate
  modified_base 6: mod_base = OTHER; note = 2'-O-methylcytidine-3'-phosphate
  modified_base 7: mod_base = OTHER; note = 2'-O-methyladenosine-3'-phosphate
  modified_base 8: mod_base = OTHER; note = 2'-O-methyladenosine-3'-phosphate
  modified_base 12: mod_base = OTHER; note = 2'-O-methylcytidine-3'-phosphate
  modified_base 13: mod_base = OTHER; note = 2'-O-methylguanosine-3'-phosphate
  modified_base 14: mod_base = OTHER; note = 2'-O-methylcytidine-3'-phosphate
  modified_base 15: mod_base = OTHER; note = 2'-O-methylguanosine-3'-phosphate
  modified_base 16: mod_base = OTHER; note = 2'-O-methylguanosine-3'-phosphate
  modified_base 17: mod_base = OTHER; note = 2'-O-methylguanosine-3'-phosphate
  modified_base 18: mod_base = OTHER; note = 2'-O-methylcytidine-3'-phosphate
  modified_base 20: mod_base = OTHER; note = 2'-O-methylcytidine-3'-phosphorothioate
  modified_base 21: mod_base = OTHER; note = 2'-O-methyladenosine-3'-phosphate
ttcctcaatgacgcgggcgca

SEQ ID NO: 450 - RNA, 21 nt, synthetic construct
  source 1..21: mol_type = other RNA
  modified_base 1: mod_base = OTHER; note = 2'-O-methylcytidine-3'-phosphorothioate
  modified_base 2: mod_base = OTHER; note = 2'-O-methylcytidine-3'-phosphorothioate
  modified_base 3: mod_base = OTHER; note = 2'-O-methyluridine-3'-phosphate
  modified_base 4: mod_base = OTHER; note = 2'-O-methylcytidine-3'-phosphate
  modified_base 5: mod_base = OTHER; note = 2'-O-methyladenosine-3'-phosphate
  modified_base 6: mod_base = OTHER; note = 2'-O-methyladenosine-3'-phosphate
  modified_base 7: mod_base = OTHER; note = 2'-fluorouridine-3'-phosphate
  modified_base 8: mod_base = OTHER; note = 2'-O-methylguanosine-3'-phosphate
  modified_base 9: mod_base = OTHER; note = 2'-fluoroadenosine-3'-phosphate
  modified_base 10: mod_base = OTHER; note = 2'-fluorocytidine-3'-phosphate
  modified_base 11: mod_base = OTHER; note = 2'-fluoroguanosine-3'-phosphate
  modified_base 12: mod_base = OTHER; note = 2'-O-methylcytidine-3'-phosphate
  modified_base 13: mod_base = OTHER; note = 2'-O-methylguanosine-3'-phosphate
  modified_base 14: mod_base = OTHER; note = 2'-O-methylguanosine-3'-phosphate
  modified_base 15: mod_base = OTHER; note = 2'-O-methylguanosine-3'-phosphate
  modified_base 16: mod_base = OTHER; note = 2'-O-methylcytidine-3'-phosphate
  modified_base 17: mod_base = OTHER; note = 2'-O-methylguanosine-3'-phosphate
  modified_base 18: mod_base = OTHER; note = 2'-O-methylcytidine-3'-phosphate
  modified_base 19: mod_base = OTHER; note = 2'-O-methylcytidine-3'-phosphate
  modified_base 20: mod_base = OTHER; note = 2'-O-methyluridine-3'-phosphate
  modified_base 21: mod_base = OTHER; note = 2'-O-methyladenosine-3'-phosphate
cctcaatgacgcgggcgccta

SEQ ID NO: 451 - RNA, 19 nt, synthetic construct
  source 1..19: mol_type = other RNA
  modified_base 1: mod_base = OTHER; note = 2'-O-methyluridine-3'-phosphate
  modified_base 2: mod_base = OTHER; note = 2'-O-methylcytidine-3'-phosphate
  modified_base 4: mod_base = OTHER; note = 2'-O-methyladenosine-3'-phosphate
  modified_base 5: mod_base = OTHER; note = 2'-O-methyluridine-3'-phosphate
  modified_base 6: mod_base = OTHER; note = 2'-O-methylguanosine-3'-phosphate
  modified_base 10: mod_base = OTHER; note = 2'-O-methylcytidine-3'-phosphate
  modified_base 11: mod_base = OTHER; note = 2'-O-methylguanosine-3'-phosphate
  modified_base 13: mod_base = OTHER; note = 2'-O-methylguanosine-3'-phosphate
  modified_base 14: mod_base = OTHER; note = 2'-O-methylcytidine-3'-phosphate
  modified_base 15: mod_base = OTHER; note = 2'-O-methylguanosine-3'-phosphate
  modified_base 16: mod_base = OTHER; note = 2'-O-methylcytidine-3'-phosphate
  modified_base 18: mod_base = OTHER; note = 2'-O-methyluridine-3'-phosphorothioate
  modified_base 19: mod_base = OTHER; note = 2'-O-methyladenosine-3'-phosphate
tcaatgacgcgggcgccta

SEQ ID NO: 452 - RNA, 21 nt, synthetic construct
  source 1..21: mol_type = other RNA
  modified_base 1: mod_base = OTHER; note = 2'-O-methylcytidine-3'-phosphate
  modified_base 2: mod_base = OTHER; note = 2'-O-methylcytidine-3'-phosphate
  modified_base 3: mod_base = OTHER; note = 2'-O-methyluridine-3'-phosphate
  modified_base 4: mod_base = OTHER; note = 2'-O-methylcytidine-3'-phosphate
  modified_base 6: mod_base = OTHER; note = 2'-O-methyladenosine-3'-phosphate
  modified_base 7: mod_base = OTHER; note = 2'-O-methyluridine-3'-phosphate
  modified_base 8: mod_base = OTHER; note = 2'-O-methylguanosine-3'-phosphate
  modified_base 12: mod_base = OTHER; note = 2'-O-methylcytidine-3'-phosphate
  modified_base 13: mod_base = OTHER; note = 2'-O-methylguanosine-3'-phosphate
  modified_base 14: mod_base = OTHER; note = 2'-O-methylguanosine-3'-phosphate
  modified_base 15: mod_base = OTHER; note = 2'-O-methylguanosine-3'-phosphate
  modified_base 16: mod_base = OTHER; note = 2'-O-methylcytidine-3'-phosphate
  modified_base 17: mod_base = OTHER; note = 2'-O-methylguanosine-3'-phosphate
  modified_base 18: mod_base = OTHER; note = 2'-O-methylcytidine-3'-phosphate
  modified_base 20: mod_base = OTHER; note = 2'-O-methyluridine-3'-phosphorothioate
  modified_base 21: mod_base = OTHER; note = 2'-O-methyladenosine-3'-phosphate
cctcaatgacgcgggcgccta

SEQ ID NO: 453 - RNA, 21 nt, synthetic construct
  source 1..21: mol_type = other RNA
  modified_base 1: mod_base = OTHER; note = 2'-O-methyluridine-3'-phosphorothioate
  modified_base 2: mod_base = OTHER; note = 2'-O-methylcytidine-3'-phosphorothioate
  modified_base 3: mod_base = OTHER; note = 2'-O-methyladenosine-3'-phosphate
  modified_base 4: mod_base = OTHER; note = 2'-O-methylcytidine-3'-phosphate
  modified_base 5: mod_base = OTHER; note = 2'-O-methylguanosine-3'-phosphate
  modified_base 6: mod_base = OTHER; note = 2'-O-methylguanosine-3'-phosphate
  modified_base 7: mod_base = OTHER; note = 2'-fluorocytidine-3'-phosphate
  modified_base 8: mod_base = OTHER; note = 2'-O-methyladenosine-3'-phosphate
  modified_base 9: mod_base = OTHER; note = 2'-fluorocytidine-3'-phosphate
  modified_base 10: mod_base = OTHER; note = 2'-fluorocytidine-3'-phosphate
  modified_base 11: mod_base = OTHER; note = 2'-fluoroguanosine-3'-phosphate
  modified_base 12: mod_base = OTHER; note = 2'-O-methyluridine-3'-phosphate
  modified_base 13: mod_base = OTHER; note = 2'-O-methylguanosine-3'-phosphate
  modified_base 14: mod_base = OTHER; note = 2'-O-methylcytidine-3'-phosphate
  modified_base 15: mod_base = OTHER; note = 2'-O-methyluridine-3'-phosphate
  modified_base 16: mod_base = OTHER; note = 2'-O-methylguanosine-3'-phosphate
  modified_base 17: mod_base = OTHER; note = 2'-O-methylguanosine-3'-phosphate
  modified_base 18: mod_base = OTHER; note = 2'-O-methylcytidine-3'-phosphate
  modified_base 19: mod_base = OTHER; note = 2'-O-methyluridine-3'-phosphate
  modified_base 20: mod_base = OTHER; note = 2'-O-methylcytidine-3'-phosphate
  modified_base 21: mod_base = OTHER; note = 2'-O-methyladenosine-3'-phosphate
tcacggcaccgtgctggctca

SEQ ID NO: 454 - RNA, 19 nt, synthetic construct
  source 1..19: mol_type = other RNA
  modified_base 1: mod_base = OTHER; note = 2'-O-methyladenosine-3'-phosphate
  modified_base 2: mod_base = OTHER; note = 2'-O-methylcytidine-3'-phosphate
  modified_base 4: mod_base = OTHER; note = 2'-O-methylguanosine-3'-phosphate
  modified_base 5: mod_base = OTHER; note = 2'-O-methylcytidine-3'-phosphate
  modified_base 6: mod_base = OTHER; note = 2'-O-methyladenosine-3'-phosphate
  modified_base 10: mod_base = OTHER; note = 2'-O-methyluridine-3'-phosphate
  modified_base 11: mod_base = OTHER; note = 2'-O-methylguanosine-3'-phosphate
  modified_base 13: mod_base = OTHER; note = 2'-O-methyluridine-3'-phosphate
  modified_base 14: mod_base = OTHER; note = 2'-O-methylguanosine-3'-phosphate
  modified_base 15: mod_base = OTHER; note = 2'-O-methylguanosine-3'-phosphate
  modified_base 16: mod_base = OTHER; note = 2'-O-methylcytidine-3'-phosphate
  modified_base 18: mod_base = OTHER; note = 2'-O-methylcytidine-3'-phosphorothioate
  modified_base 19: mod_base = OTHER; note = 2'-O-methyladenosine-3'-phosphate
acggcaccgtgctggctca

SEQ ID NO: 455 - RNA, 21 nt, synthetic construct
  source 1..21: mol_type = other RNA
  modified_base 1: mod_base = OTHER; note = 2'-O-methyluridine-3'-phosphate
  modified_base 2: mod_base = OTHER; note = 2'-O-methylcytidine-3'-phosphate
  modified_base 3: mod_base = OTHER; note = 2'-O-methyladenosine-3'-phosphate
  modified_base 4: mod_base = OTHER; note = 2'-O-methylcytidine-3'-phosphate
  modified_base 6: mod_base = OTHER; note = 2'-O-methylguanosine-3'-phosphate
  modified_base 7: mod_base = OTHER; note = 2'-O-methylcytidine-3'-phosphate
  modified_base 8: mod_base = OTHER; note = 2'-O-methyladenosine-3'-phosphate
  modified_base 12: mod_base = OTHER; note = 2'-O-methyluridine-3'-phosphate
  modified_base 13: mod_base = OTHER; note = 2'-O-methylguanosine-3'-phosphate
  modified_base 14: mod_base = OTHER; note = 2'-O-methylcytidine-3'-phosphate
  modified_base 15: mod_base = OTHER; note = 2'-O-methyluridine-3'-phosphate
  modified_base 16: mod_base = OTHER; note = 2'-O-methylguanosine-3'-phosphate
  modified_base 17: mod_base = OTHER; note = 2'-O-methylguanosine-3'-phosphate
  modified_base 18: mod_base = OTHER; note = 2'-O-methylcytidine-3'-phosphate
  modified_base 20: mod_base = OTHER; note = 2'-O-methylcytidine-3'-phosphorothioate
  modified_base 21: mod_base = OTHER; note = 2'-O-methyladenosine-3'-phosphate
tcacggcaccgtgctggctca

SEQ ID NO: 456 - RNA, 21 nt, synthetic construct
  source 1..21: mol_type = other RNA
  modified_base 1: mod_base = OTHER; note = 2'-O-methylguanosine-3'-phosphorothioate
  modified_base 2: mod_base = OTHER; note = 2'-O-methyladenosine-3'-phosphorothioate
  modified_base 3: mod_base = OTHER; note = 2'-O-methylcytidine-3'-phosphate
  modified_base 4: mod_base = OTHER; note = 2'-O-methylguanosine-3'-phosphate
  modified_base 5: mod_base = OTHER; note = 2'-O-methyluridine-3'-phosphate
  modified_base 6: mod_base = OTHER; note = 2'-O-methylguanosine-3'-phosphate
  modified_base 7: mod_base = OTHER; note = 2'-fluoroguanosine-3'-phosphate
  modified_base 8: mod_base = OTHER; note = 2'-O-methylguanosine-3'-phosphate
  modified_base 9: mod_base = OTHER; note = 2'-fluorocytidine-3'-phosphate
  modified_base 10: mod_base = OTHER; note = 2'-fluorouridine-3'-phosphate
  modified_base 11: mod_base = OTHER; note = 2'-fluoroguanosine-3'-phosphate
  modified_base 12: mod_base = OTHER; note = 2'-O-methyluridine-3'-phosphate
  modified_base 13: mod_base = OTHER; note = 2'-O-methyluridine-3'-phosphate
  modified_base 14: mod_base = OTHER; note = 2'-O-methyluridine-3'-phosphate
  modified_base 15: mod_base = OTHER; note = 2'-O-methylcytidine-3'-phosphate
  modified_base 16: mod_base = OTHER; note = 2'-O-methyladenosine-3'-phosphate
  modified_base 17: mod_base = OTHER; note = 2'-O-methylguanosine-3'-phosphate
  modified_base 18: mod_base = OTHER; note = 2'-O-methylcytidine-3'-phosphate
  modified_base 19: mod_base = OTHER; note = 2'-O-methyladenosine-3'-phosphate
  modified_base 20: mod_base = OTHER; note = 2'-O-methylcytidine-3'-phosphate
  modified_base 21: mod_base = OTHER; note = 2'-O-methyladenosine-3'-phosphate
gacgtgggctgtttcagcaca

SEQ ID NO: 457 - RNA, 19 nt, synthetic construct
  source 1..19: mol_type = other RNA
  modified_base 1: mod_base = OTHER; note = 2'-O-methylcytidine-3'-phosphate
  modified_base 2: mod_base = OTHER; note = 2'-O-methylguanosine-3'-phosphate
  modified_base 4: mod_base = OTHER; note = 2'-O-methylguanosine-3'-phosphate
  modified_base 5: mod_base = OTHER; note = 2'-O-methylguanosine-3'-phosphate
  modified_base 6: mod_base = OTHER; note = 2'-O-methylguanosine-3'-phosphate
  modified_base 10: mod_base = OTHER; note = 2'-O-methyluridine-3'-phosphate
  modified_base 11: mod_base = OTHER; note = 2'-O-methyluridine-3'-phosphate
  modified_base 13: mod_base = OTHER; note = 2'-O-methylcytidine-3'-phosphate
  modified_base 14: mod_base = OTHER; note = 2'-O-methyladenosine-3'-phosphate
  modified_base 15: mod_base = OTHER; note = 2'-O-methylguanosine-3'-phosphate
  modified_base 16: mod_base = OTHER; note = 2'-O-methylcytidine-3'-phosphate
  modified_base 18: mod_base = OTHER; note = 2'-O-methylcytidine-3'-phosphorothioate
  modified_base 19: mod_base = OTHER; note = 2'-O-methyladenosine-3'-phosphate
cgtgggctgtttcagcaca

SEQ ID NO: 458 - RNA, 21 nt, synthetic construct
  source 1..21: mol_type = other RNA
  modified_base 1: mod_base = OTHER; note = 2'-O-methylguanosine-3'-phosphate
  modified_base 2: mod_base = OTHER; note = 2'-O-methyladenosine-3'-phosphate
  modified_base 3: mod_base = OTHER; note = 2'-O-methylcytidine-3'-phosphate
  modified_base 4: mod_base = OTHER; note = 2'-O-methylguanosine-3'-phosphate
  modified_base 6: mod_base = OTHER; note = 2'-O-methylguanosine-3'-phosphate
  modified_base 7: mod_base = OTHER; note = 2'-O-methylguanosine-3'-phosphate
  modified_base 8: mod_base = OTHER; note = 2'-O-methylguanosine-3'-phosphate
  modified_base 12: mod_base = OTHER; note = 2'-O-methyluridine-3'-phosphate
  modified_base 13: mod_base = OTHER; note = 2'-O-methyluridine-3'-phosphate
  modified_base 14: mod_base = OTHER; note = 2'-O-methyluridine-3'-phosphate
  modified_base 15: mod_base = OTHER; note = 2'-O-methylcytidine-3'-phosphate
  modified_base 16: mod_base = OTHER; note = 2'-O-methyladenosine-3'-phosphate
  modified_base 17: mod_base = OTHER; note = 2'-O-methylguanosine-3'-phosphate
  modified_base 18: mod_base = OTHER; note = 2'-O-methylcytidine-3'-phosphate
  modified_base 20: mod_base = OTHER; note = 2'-O-methylcytidine-3'-phosphorothioate
  modified_base 21: mod_base = OTHER; note = 2'-O-methyladenosine-3'-phosphate
gacgtgggctgtttcagcaca

SEQ ID NO: 459 - RNA, 21 nt, synthetic construct
  source 1..21: mol_type = other RNA
  modified_base 1: mod_base = OTHER; note = 2'-O-methylcytidine-3'-phosphorothioate
  modified_base 2: mod_base = OTHER; note = 2'-O-methylguanosine-3'-phosphorothioate
  modified_base 3: mod_base = OTHER; note = 2'-O-methylguanosine-3'-phosphate
  modified_base 4: mod_base = OTHER; note = 2'-O-methylguanosine-3'-phosphate
  modified_base 5: mod_base = OTHER; note = 2'-O-methylguanosine-3'-phosphate
  modified_base 6: mod_base = OTHER; note = 2'-O-methyladenosine-3'-phosphate
  modified_base 7: mod_base = OTHER; note = 2'-fluorouridine-3'-phosphate
  modified_base 8: mod_base = OTHER; note = 2'-O-methylguanosine-3'-phosphate
  modified_base 9: mod_base = OTHER; note = 2'-fluoroguanosine-3'-phosphate
  modified_base 10: mod_base = OTHER; note = 2'-fluorocytidine-3'-phosphate
  modified_base 11: mod_base = OTHER; note = 2'-fluorocytidine-3'-phosphate
  modified_base 12: mod_base = OTHER; note = 2'-O-methyladenosine-3'-phosphate
  modified_base 13: mod_base = OTHER; note = 2'-O-methylcytidine-3'-phosphate
  modified_base 14: mod_base = OTHER; note = 2'-O-methyluridine-3'-phosphate
  modified_base 15: mod_base = OTHER; note = 2'-O-methyluridine-3'-phosphate
  modified_base 16: mod_base = OTHER; note = 2'-O-methylcytidine-3'-phosphate
  modified_base 17: mod_base = OTHER; note = 2'-O-methyladenosine-3'-phosphate
  modified_base 18: mod_base = OTHER; note = 2'-O-methyluridine-3'-phosphate
  modified_base 19: mod_base = OTHER; note = 2'-O-methylcytidine-3'-phosphate
  modified_base 20: mod_base = OTHER; note = 2'-O-methyladenosine-3'-phosphate
  modified_base 21: mod_base = OTHER; note = 2'-O-methyladenosine-3'-phosphate
cggggatggccacttcatcaa

SEQ ID NO: 460 - RNA, 21 nt, synthetic construct
  source 1..21: mol_type = other RNA
  modified_base 1: mod_base = OTHER; note = 2'-O-methylcytidine-3'-phosphorothioate
  modified_base 2: mod_base = OTHER; note = 2'-O-methylguanosine-3'-phosphorothioate
  modified_base 3: mod_base = OTHER; note = 2'-O-methylguanosine-3'-phosphate
  modified_base 4: mod_base = OTHER; note = 2'-O-methylguanosine-3'-phosphate
  modified_base 5: mod_base = OTHER; note = 2'-O-methyladenosine-3'-phosphate
  modified_base 6: mod_base = OTHER; note = 2'-O-methylcytidine-3'-phosphate
  modified_base 7: mod_base = OTHER; note = 2'-fluorocytidine-3'-phosphate
  modified_base 8: mod_base = OTHER; note = 2'-O-methyluridine-3'-phosphate
  modified_base 9: mod_base = OTHER; note = 2'-fluorouridine-3'-phosphate
  modified_base 10: mod_base = OTHER; note = 2'-fluorocytidine-3'-phosphate
  modified_base 11: mod_base = OTHER; note = 2'-fluorocytidine-3'-phosphate
  modified_base 12: mod_base = OTHER; note = 2'-O-methylguanosine-3'-phosphate
  modified_base 13: mod_base = OTHER; note = 2'-O-methylcytidine-3'-phosphate
  modified_base 14: mod_base = OTHER; note = 2'-O-methyladenosine-3'-phosphate
  modified_base 15: mod_base = OTHER; note = 2'-O-methyluridine-3'-phosphate
  modified_base 16: mod_base = OTHER; note = 2'-O-methylcytidine-3'-phosphate
  modified_base 17: mod_base = OTHER; note = 2'-O-methylguanosine-3'-phosphate
  modified_base 18: mod_base = OTHER; note = 2'-O-methyluridine-3'-phosphate
  modified_base 19: mod_base = OTHER; note = 2'-O-methylcytidine-3'-phosphate
  modified_base 20: mod_base = OTHER; note = 2'-O-methyladenosine-3'-phosphate
  modified_base 21: mod_base = OTHER; note = 2'-O-methyladenosine-3'-phosphate
cgggaccttccgcatcgtcaa

SEQ ID NO: 461 - RNA, 21 nt, synthetic construct
  source 1..21: mol_type = other RNA
  modified_base 1: mod_base = OTHER; note = 2'-O-methylcytidine-3'-phosphorothioate
  modified_base 2: mod_base = OTHER; note = 2'-O-methylcytidine-3'-phosphorothioate
  modified_base 3: mod_base = OTHER; note = 2'-O-methylguanosine-3'-phosphate
  modified_base 4: mod_base = OTHER; note = 2'-O-methyladenosine-3'-phosphate
  modified_base 5: mod_base = OTHER; note = 2'-O-methylguanosine-3'-phosphate
  modified_base 6: mod_base = OTHER; note = 2'-O-methyladenosine-3'-phosphate
  modified_base 7: mod_base = OTHER; note = 2'-fluoroadenosine-3'-phosphate
  modified_base 8: mod_base = OTHER; note = 2'-O-methylcytidine-3'-phosphate
  modified_base 9: mod_base = OTHER; note = 2'-fluoroadenosine-3'-phosphate
  modified_base 10: mod_base = OTHER; note = 2'-fluorouridine-3'-phosphate
  modified_base 11: mod_base = OTHER; note = 2'-fluorocytidine-3'-phosphate
  modified_base 12: mod_base = OTHER; note = 2'-O-methylcytidine-3'-phosphate
  modified_base 13: mod_base = OTHER; note = 2'-O-methylcytidine-3'-phosphate
  modified_base 14: mod_base = OTHER; note = 2'-O-methylcytidine-3'-phosphate
  modified_base 15: mod_base = OTHER; note = 2'-O-methyluridine-3'-phosphate
  modified_base 16: mod_base = OTHER; note = 2'-O-methylguanosine-3'-phosphate
  modified_base 17: mod_base = OTHER; note = 2'-O-methyluridine-3'-phosphate
  modified_base 18: mod_base = OTHER; note = 2'-O-methylguanosine-3'-phosphate
  modified_base 19: mod_base = OTHER; note = 2'-O-methylguanosine-3'-phosphate
  modified_base 20: mod_base = OTHER; note = 2'-O-methylguanosine-3'-phosphate
  modified_base 21: mod_base = OTHER; note = 2'-O-methyladenosine-3'-phosphate
ccgagaacatcccctgtggga

SEQ ID NO: 462 - RNA, 21 nt, synthetic construct
  source 1..21: mol_type = other RNA
  modified_base 1: mod_base = OTHER; note = 2'-O-methylguanosine-3'-phosphorothioate
  modified_base 2: mod_base = OTHER; note = 2'-O-methylguanosine-3'-phosphorothioate
  modified_base 3: mod_base = OTHER; note = 2'-O-methylcytidine-3'-phosphate
  modified_base 4: mod_base = OTHER; note = 2'-O-methylcytidine-3'-phosphate
  modified_base 5: mod_base = OTHER; note = 2'-O-methylguanosine-3'-phosphate
  modified_base 6: mod_base = OTHER; note = 2'-O-methyluridine-3'-phosphate
  modified_base 7: mod_base = OTHER; note = 2'-fluoroguanosine-3'-phosphate
  modified_base 8: mod_base = OTHER; note = 2'-O-methyluridine-3'-phosphate
  modified_base 9: mod_base = OTHER; note = 2'-fluorocytidine-3'-phosphate
  modified_base 10: mod_base = OTHER; note = 2'-fluorocytidine-3'-phosphate
  modified_base 11: mod_base = OTHER; note = 2'-fluorouridine-3'-phosphate
  modified_base 12: mod_base = OTHER; note = 2'-O-methylguanosine-3'-phosphate
  modified_base 13: mod_base = OTHER; note = 2'-O-methylguanosine-3'-phosphate
  modified_base 14: mod_base = OTHER; note = 2'-O-methylguanosine-3'-phosphate
  modified_base 15: mod_base = OTHER; note = 2'-O-methyladenosine-3'-phosphate
  modified_base 16: mod_base = OTHER; note = 2'-O-methylcytidine-3'-phosphate
  modified_base 17: mod_base = OTHER; note = 2'-O-methylcytidine-3'-phosphate
  modified_base 18: mod_base = OTHER; note = 2'-O-methylguanosine-3'-phosphate
  modified_base 19: mod_base = OTHER; note = 2'-O-methylguanosine-3'-phosphate
  modified_base 20: mod_base = OTHER; note = 2'-O-methyladenosine-3'-phosphate
  modified_base 21: mod_base = OTHER; note = 2'-O-methyladenosine-3'-phosphate
ggccgtgtcctgggaccggaa

SEQ ID NO: 463 - RNA, 21 nt, synthetic construct
  source 1..21: mol_type = other RNA
  modified_base 1: mod_base = OTHER; note = 2'-O-methylguanosine-3'-phosphorothioate
  modified_base 2: mod_base = OTHER; note = 2'-O-methyluridine-3'-phosphorothioate
  modified_base 3: mod_base = OTHER; note = 2'-O-methylguanosine-3'-phosphate
  modified_base 4: mod_base = OTHER; note = 2'-O-methyluridine-3'-phosphate
  modified_base 5: mod_base = OTHER; note = 2'-O-methyluridine-3'-phosphate
  modified_base 6: mod_base = OTHER; note = 2'-O-methylcytidine-3'-phosphate
  modified_base 7: mod_base = OTHER; note = 2'-fluoroadenosine-3'-phosphate
  modified_base 8: mod_base = OTHER; note = 2'-O-methyluridine-3'-phosphate
  modified_base 9: mod_base = OTHER; note = 2'-fluorocytidine-3'-phosphate
  modified_base 10: mod_base = OTHER; note = 2'-fluorocytidine-3'-phosphate
  modified_base 11: mod_base = OTHER; note = 2'-fluoroguanosine-3'-phosphate
  modified_base 12: mod_base = OTHER; note = 2'-O-methyladenosine-3'-phosphate
  modified_base 13: mod_base = OTHER; note = 2'-O-methylcytidine-3'-phosphate
  modified_base 14: mod_base = OTHER; note = 2'-O-methyluridine-3'-phosphate
  modified_base 15: mod_base = OTHER; note = 2'-O-methylguanosine-3'-phosphate
  modified_base 16: mod_base = OTHER; note = 2'-O-methylcytidine-3'-phosphate
  modified_base 17: mod_base = OTHER; note = 2'-O-methyladenosine-3'-phosphate
  modified_base 18: mod_base = OTHER; note = 2'-O-methylcytidine-3'-phosphate
  modified_base 19: mod_base = OTHER; note = 2'-O-methylcytidine-3'-phosphate
  modified_base 20: mod_base = OTHER; note = 2'-O-methyladenosine-3'-phosphate
  modified_base 21: mod_base = OTHER; note = 2'-O-methyladenosine-3'-phosphate
gtgttcatccgactgcaccaa

SEQ ID NO: 464 - RNA, 19 nt, synthetic construct
  source 1..19: mol_type = other RNA
  modified_base 1: mod_base = OTHER; note = 2'-O-methylguanosine-3'-phosphate
  modified_base 2: mod_base = OTHER; note = 2'-O-methyluridine-3'-phosphate
  modified_base 4: mod_base = OTHER; note = 2'-O-methylcytidine-3'-phosphate
  modified_base 5: mod_base = OTHER; note = 2'-O-methyladenosine-3'-phosphate
  modified_base 6: mod_base = OTHER; note = 2'-O-methyluridine-3'-phosphate
  modified_base 10: mod_base = OTHER; note = 2'-O-methyladenosine-3'-phosphate
  modified_base 11: mod_base = OTHER; note = 2'-O-methylcytidine-3'-phosphate
  modified_base 13: mod_base = OTHER; note = 2'-O-methylguanosine-3'-phosphate
  modified_base 14: mod_base = OTHER; note = 2'-O-methylcytidine-3'-phosphate
  modified_base 15: mod_base = OTHER; note = 2'-O-methyladenosine-3'-phosphate
  modified_base 16: mod_base = OTHER; note = 2'-O-methylcytidine-3'-phosphate
  modified_base 18: mod_base = OTHER; note = 2'-O-methyladenosine-3'-phosphorothioate
  modified_base 19: mod_base = OTHER; note = 2'-O-methyladenosine-3'-phosphate
gttcatccgactgcaccaa

SEQ ID NO: 465 - RNA, 21 nt, synthetic construct
  source 1..21: mol_type = other RNA
  modified_base 1: mod_base = OTHER; note = 2'-O-methylguanosine-3'-phosphate
  modified_base 2: mod_base = OTHER; note = 2'-O-methyluridine-3'-phosphate
  modified_base 3: mod_base = OTHER; note = 2'-O-methylguanosine-3'-phosphate
  modified_base 4: mod_base = OTHER; note = 2'-O-methyluridine-3'-phosphate
  modified_base 6: mod_base = OTHER; note = 2'-O-methylcytidine-3'-phosphate
  modified_base 7: mod_base = OTHER; note = 2'-O-methyladenosine-3'-phosphate
  modified_base 8: mod_base = OTHER; note = 2'-O-methyluridine-3'-phosphate
  modified_base 12: mod_base = OTHER; note = 2'-O-methyladenosine-3'-phosphate
  modified_base 13: mod_base = OTHER; note = 2'-O-methylcytidine-3'-phosphate
  modified_base 14: mod_base = OTHER; note = 2'-O-methyluridine-3'-phosphate
  modified_base 15: mod_base = OTHER; note = 2'-O-methylguanosine-3'-phosphate
  modified_base 16: mod_base = OTHER; note = 2'-O-methylcytidine-3'-phosphate
  modified_base 17: mod_base = OTHER; note = 2'-O-methyladenosine-3'-phosphate
  modified_base 18: mod_base = OTHER; note = 2'-O-methylcytidine-3'-phosphate
  modified_base 20: mod_base = OTHER; note = 2'-O-methyladenosine-3'-phosphorothioate
  modified_base 21: mod_base = OTHER; note = 2'-O-methyladenosine-3'-phosphate
gtgttcatccgactgcaccaa

SEQ ID NO: 466 - RNA, 21 nt, synthetic construct
  source 1..21: mol_type = other RNA
  modified_base 1: mod_base = OTHER; note = 2'-O-methylguanosine-3'-phosphorothioate
  modified_base 2: mod_base = OTHER; note = 2'-O-methyluridine-3'-phosphorothioate
  modified_base 3: mod_base = OTHER; note = 2'-O-methyluridine-3'-phosphate
  modified_base 4: mod_base = OTHER; note = 2'-O-methylcytidine-3'-phosphate
  modified_base 5: mod_base = OTHER; note = 2'-O-methyladenosine-3'-phosphate
  modified_base 6: mod_base = OTHER; note = 2'-O-methyluridine-3'-phosphate
  modified_base 7: mod_base = OTHER; note = 2'-fluorocytidine-3'-phosphate
  modified_base 8: mod_base = OTHER; note = 2'-O-methylcytidine-3'-phosphate
  modified_base 9: mod_base = OTHER; note = 2'-fluoroguanosine-3'-phosphate
  modified_base 10: mod_base = OTHER; note = 2'-fluoroadenosine-3'-phosphate
  modified_base 11: mod_base = OTHER; note = 2'-fluorocytidine-3'-phosphate
  modified_base 12: mod_base = OTHER; note = 2'-O-methyluridine-3'-phosphate
  modified_base 13: mod_base = OTHER; note = 2'-O-methylguanosine-3'-phosphate
  modified_base 14: mod_base = OTHER; note = 2'-O-methylcytidine-3'-phosphate
  modified_base 15: mod_base = OTHER; note = 2'-O-methyladenosine-3'-phosphate
  modified_base 16: mod_base = OTHER; note = 2'-O-methylcytidine-3'-phosphate
  modified_base 17: mod_base = OTHER; note = 2'-O-methylcytidine-3'-phosphate
  modified_base 18: mod_base = OTHER; note = 2'-O-methyladenosine-3'-phosphate
  modified_base 19: mod_base = OTHER; note = 2'-O-methylguanosine-3'-phosphate
  modified_base 20: mod_base = OTHER; note = 2'-O-methylguanosine-3'-phosphate
  modified_base 21: mod_base = OTHER; note = 2'-O-methyladenosine-3'-phosphate
gttcatccgactgcaccagga

SEQ ID NO: 467 - RNA, 19 nt, synthetic construct
  source 1..19: mol_type = other RNA
  modified_base 1: mod_base = OTHER; note = 2'-O-methyluridine-3'-phosphate
  modified_base 2: mod_base = OTHER; note = 2'-O-methylcytidine-3'-phosphate
  modified_base 4: mod_base = OTHER; note = 2'-O-methyluridine-3'-phosphate
  modified_base 5: mod_base = OTHER; note = 2'-O-methylcytidine-3'-phosphate
  modified_base 6: mod_base = OTHER; note = 2'-O-methylcytidine-3'-phosphate
  modified_base 10: mod_base = OTHER; note = 2'-O-methyluridine-3'-phosphate
  modified_base 11: mod_base = OTHER; note = 2'-O-methylguanosine-3'-phosphate
  modified_base 13: mod_base = OTHER; note = 2'-O-methyladenosine-3'-phosphate
  modified_base 14: mod_base = OTHER; note = 2'-O-methylcytidine-3'-phosphate
  modified_base 15: mod_base = OTHER; note = 2'-O-methylcytidine-3'-phosphate
  modified_base 16: mod_base = OTHER; note = 2'-O-methyladenosine-3'-phosphate
  modified_base 18: mod_base = OTHER; note = 2'-O-methylguanosine-3'-phosphorothioate
  modified_base 19: mod_base = OTHER; note = 2'-O-methyladenosine-3'-phosphate
tcatccgactgcaccagga

SEQ ID NO: 468 - RNA, 21 nt, synthetic construct
  source 1..21: mol_type = other RNA
  modified_base 1: mod_base = OTHER; note = 2'-O-methylguanosine-3'-phosphate
  modified_base 2: mod_base = OTHER; note = 2'-O-methyluridine-3'-phosphate
  modified_base 3: mod_base = OTHER; note = 2'-O-methyluridine-3'-phosphate
  modified_base 4: mod_base = OTHER; note = 2'-O-methylcytidine-3'-phosphate
  modified_base 6: mod_base = OTHER; note = 2'-O-methyluridine-3'-phosphate
  modified_base 7: mod_base = OTHER; note = 2'-O-methylcytidine-3'-phosphate
  modified_base 8: mod_base = OTHER; note = 2'-O-methylcytidine-3'-phosphate
  modified_base 12: mod_base = OTHER; note = 2'-O-methyluridine-3'-phosphate
  modified_base 13: mod_base = OTHER; note = 2'-O-methylguanosine-3'-phosphate
  modified_base 14: mod_base = OTHER; note = 2'-O-methylcytidine-3'-phosphate
  modified_base 15: mod_base = OTHER; note = 2'-O-methyladenosine-3'-phosphate
  modified_base 16: mod_base = OTHER; note = 2'-O-methylcytidine-3'-phosphate
  modified_base 17: mod_base = OTHER; note = 2'-O-methylcytidine-3'-phosphate
  modified_base 18: mod_base = OTHER; note = 2'-O-methyladenosine-3'-phosphate
  modified_base 20: mod_base = OTHER; note = 2'-O-methylguanosine-3'-phosphorothioate
  modified_base 21: mod_base = OTHER; note = 2'-O-methyladenosine-3'-phosphate
gttcatccgactgcaccagga

SEQ ID NO: 469 - RNA, 21 nt, synthetic construct
  source 1..21: mol_type = other RNA
  modified_base 1: mod_base = OTHER; note = 2'-O-methyluridine-3'-phosphorothioate
  modified_base 2: mod_base = OTHER; note = 2'-O-methylcytidine-3'-phosphorothioate
  modified_base 3: mod_base = OTHER; note = 2'-O-methyladenosine-3'-phosphate
  modified_base 4: mod_base = OTHER; note = 2'-O-methyluridine-3'-phosphate
  modified_base 5: mod_base = OTHER; note = 2'-O-methylcytidine-3'-phosphate
  modified_base 6: mod_base = OTHER; note = 2'-O-methylcytidine-3'-phosphate
  modified_base 7: mod_base = OTHER; note = 2'-fluoroguanosine-3'-phosphate
  modified_base 8: mod_base = OTHER; note = 2'-O-methyladenosine-3'-phosphate
  modified_base 9: mod_base = OTHER; note = 2'-fluorocytidine-3'-phosphate
  modified_base 10: mod_base = OTHER; note = 2'-fluorouridine-3'-phosphate
  modified_base 11: mod_base = OTHER; note = 2'-fluoroguanosine-3'-phosphate
  modified_base 12: mod_base = OTHER; note = 2'-O-methylcytidine-3'-phosphate
  modified_base 13: mod_base = OTHER; note = 2'-O-methyladenosine-3'-phosphate
  modified_base 14: mod_base = OTHER; note = 2'-O-methylcytidine-3'-phosphate
  modified_base 15: mod_base = OTHER; note = 2'-O-methylcytidine-3'-phosphate
  modified_base 16: mod_base = OTHER; note = 2'-O-methyladenosine-3'-phosphate
  modified_base 17: mod_base = OTHER; note = 2'-O-methylguanosine-3'-phosphate
  modified_base 18: mod_base = OTHER; note = 2'-O-methylguanosine-3'-phosphate
  modified_base 19: mod_base = OTHER; note = 2'-O-methyladenosine-3'-phosphate
  modified_base 20: mod_base = OTHER; note = 2'-O-methylcytidine-3'-phosphate
  modified_base 21: mod_base = OTHER; note = 2'-O-methyladenosine-3'-phosphate
tcatccgactgcaccaggaca

SEQ ID NO: 470 - RNA, 19 nt, synthetic construct
  source 1..19: mol_type = other RNA
  modified_base 1: mod_base = OTHER; note = 2'-O-methyladenosine-3'-phosphate
  modified_base 2: mod_base = OTHER; note = 2'-O-methyluridine-3'-phosphate
  modified_base 4: mod_base = OTHER; note = 2'-O-methylcytidine-3'-phosphate
  modified_base 5: mod_base = OTHER; note = 2'-O-methylguanosine-3'-phosphate
  modified_base 6: mod_base = OTHER; note = 2'-O-methyladenosine-3'-phosphate
  modified_base 10: mod_base = OTHER; note = 2'-O-methylcytidine-3'-phosphate
  modified_base 11: mod_base = OTHER; note = 2'-O-methyladenosine-3'-phosphate
  modified_base 13: mod_base = OTHER; note = 2'-O-methylcytidine-3'-phosphate
  modified_base 14: mod_base = OTHER; note = 2'-O-methyladenosine-3'-phosphate
  modified_base 15: mod_base = OTHER; note = 2'-O-methylguanosine-3'-phosphate
  modified_base 16: mod_base = OTHER; note = 2'-O-methylguanosine-3'-phosphate
  modified_base 18: mod_base = OTHER; note = 2'-O-methylcytidine-3'-phosphorothioate
  modified_base 19: mod_base = OTHER; note = 2'-O-methyladenosine-3'-phosphate
atccgactgcaccaggaca

SEQ ID NO: 471 - RNA, 21 nt, synthetic construct
  source 1..21: mol_type = other RNA
  modified_base 1: mod_base = OTHER; note = 2'-O-methyluridine-3'-phosphate
  modified_base 2: mod_base = OTHER; note = 2'-O-methylcytidine-3'-phosphate
  modified_base 3: mod_base = OTHER; note = 2'-O-methyladenosine-3'-phosphate
  modified_base 4: mod_base = OTHER; note = 2'-O-methyluridine-3'-phosphate
  modified_base 6: mod_base = OTHER; note = 2'-O-methylcytidine-3'-phosphate
  modified_base 7: mod_base = OTHER; note = 2'-O-methylguanosine-3'-phosphate
  modified_base 8: mod_base = OTHER; note = 2'-O-methyladenosine-3'-phosphate
  modified_base 12: mod_base = OTHER; note = 2'-O-methylcytidine-3'-phosphate
  modified_base 13: mod_base = OTHER; note = 2'-O-methyladenosine-3'-phosphate
  modified_base 14: mod_base = OTHER; note = 2'-O-methylcytidine-3'-phosphate
  modified_base 15: mod_base = OTHER; note = 2'-O-methylcytidine-3'-phosphate
  modified_base 16: mod_base = OTHER; note = 2'-O-methyladenosine-3'-phosphate
  modified_base 17: mod_base = OTHER; note = 2'-O-methylguanosine-3'-phosphate
  modified_base 18: mod_base = OTHER; note = 2'-O-methylguanosine-3'-phosphate
  modified_base 20: mod_base = OTHER; note = 2'-O-methylcytidine-3'-phosphorothioate
  modified_base 21: mod_base = OTHER; note = 2'-O-methyladenosine-3'-phosphate
tcatccgactgcaccaggaca

SEQ ID NO: 472 - RNA, 21 nt, synthetic construct
  source 1..21: mol_type = other RNA
  modified_base 1: mod_base = OTHER; note = 2'-O-methylguanosine-3'-phosphorothioate
  modified_base 2: mod_base = OTHER; note = 2'-O-methyluridine-3'-phosphorothioate
  modified_base 3: mod_base = OTHER; note = 2'-O-methyluridine-3'-phosphate
  modified_base 4: mod_base = OTHER; note = 2'-O-methylguanosine-3'-phosphate
  modified_base 5: mod_base = OTHER; note = 2'-O-methyladenosine-3'-phosphate
  modified_base 6: mod_base = OTHER; note = 2'-O-methylcytidine-3'-phosphate
  modified_base 7: mod_base = OTHER; note = 2'-fluorouridine-3'-phosphate
  modified_base 8: mod_base = OTHER; note = 2'-O-methylcytidine-3'-phosphate
  modified_base 9: mod_base = OTHER; note = 2'-fluorocytidine-3'-phosphate
  modified_base 10: mod_base = OTHER; note = 2'-fluoroadenosine-3'-phosphate
  modified_base 11: mod_base = OTHER; note = 2'-fluorocytidine-3'-phosphate
  modified_base 12: mod_base = OTHER; note = 2'-O-methylcytidine-3'-phosphate
  modified_base 13: mod_base = OTHER; note = 2'-O-methyladenosine-3'-phosphate
  modified_base 14: mod_base = OTHER; note = 2'-O-methyladenosine-3'-phosphate
  modified_base 15: mod_base = OTHER; note = 2'-O-methylguanosine-3'-phosphate
  modified_base 16: mod_base = OTHER; note = 2'-O-methyluridine-3'-phosphate
  modified_base 17: mod_base = OTHER; note = 2'-O-methyladenosine-3'-phosphate
  modified_base 18: mod_base = OTHER; note = 2'-O-methylcytidine-3'-phosphate
  modified_base 19: mod_base = OTHER; note = 2'-O-methyluridine-3'-phosphate
  modified_base 20: mod_base = OTHER; note = 2'-O-methyladenosine-3'-phosphate
  modified_base 21: mod_base = OTHER; note = 2'-O-methyladenosine-3'-phosphate
gttgactccaccaagtactaa

SEQ ID NO: 473 - RNA, 19 nt, synthetic construct
  source 1..19: mol_type = other RNA
  modified_base 1: mod_base = OTHER; note = 2'-O-methyluridine-3'-phosphate
  modified_base 2: mod_base = OTHER; note = 2'-O-methylguanosine-3'-phosphate
  modified_base 4: mod_base = OTHER; note = 2'-O-methylcytidine-3'-phosphate
  modified_base 5: mod_base = OTHER; note = 2'-O-methyluridine-3'-phosphate
  modified_base 6: mod_base = OTHER; note = 2'-O-methylcytidine-3'-phosphate
  modified_base 10: mod_base = OTHER; note = 2'-O-methylcytidine-3'-phosphate
  modified_base 11: mod_base = OTHER; note = 2'-O-methyladenosine-3'-phosphate
  modified_base 13: mod_base = OTHER; note = 2'-O-methylguanosine-3'-phosphate
  modified_base 14: mod_base = OTHER; note = 2'-O-methyluridine-3'-phosphate
  modified_base 15: mod_base = OTHER; note = 2'-O-methyladenosine-3'-phosphate
  modified_base 16: mod_base = OTHER; note = 2'-O-methylcytidine-3'-phosphate
  modified_base 18: mod_base = OTHER; note = 2'-O-methyladenosine-3'-phosphorothioate
  modified_base 19: mod_base = OTHER; note = 2'-O-methyladenosine-3'-phosphate
tgactccaccaagtactaa

SEQ ID NO: 474 - RNA, 21 nt, synthetic construct
  source 1..21: mol_type = other RNA
  modified_base 1: mod_base = OTHER; note = 2'-O-methylguanosine-3'-phosphate
  modified_base 2: mod_base = OTHER; note = 2'-O-methyluridine-3'-phosphate
  modified_base 3: mod_base = OTHER; note = 2'-O-methyluridine-3'-phosphate
  modified_base 4: mod_base = OTHER; note = 2'-O-methylguanosine-3'-phosphate
  modified_base 6: mod_base = OTHER; note = 2'-O-methylcytidine-3'-phosphate
  modified_base 7: mod_base = OTHER; note = 2'-O-methyluridine-3'-phosphate
  modified_base 8: mod_base = OTHER; note = 2'-O-methylcytidine-3'-phosphate
  modified_base 12: mod_base = OTHER; note = 2'-O-methylcytidine-3'-phosphate
  modified_base 13: mod_base = OTHER; note = 2'-O-methyladenosine-3'-phosphate
  modified_base 14: mod_base = OTHER; note = 2'-O-methyladenosine-3'-phosphate
  modified_base 15: mod_base = OTHER; note = 2'-O-methylguanosine-3'-phosphate
  modified_base 16: mod_base = OTHER; note = 2'-O-methyluridine-3'-phosphate
  modified_base 17: mod_base = OTHER; note = 2'-O-methyladenosine-3'-phosphate
  modified_base 18: mod_base = OTHER; note = 2'-O-methylcytidine-3'-phosphate
  modified_base 20: mod_base = OTHER; note = 2'-O-methyladenosine-3'-phosphorothioate
  modified_base 21: mod_base = OTHER; note = 2'-O-methyladenosine-3'-phosphate
gttgactccaccaagtactaa

SEQ ID NO: 475 - RNA, 21 nt, synthetic construct
  source 1..21: mol_type = other RNA
  modified_base 1: mod_base = OTHER; note = 2'-O-methyladenosine-3'-phosphorothioate
  modified_base 2: mod_base = OTHER; note = 2'-O-methylcytidine-3'-phosphorothioate
  modified_base 3: mod_base = OTHER; note = 2'-O-methyluridine-3'-phosphate
  modified_base 4: mod_base = OTHER; note = 2'-O-methylcytidine-3'-phosphate
  modified_base 5: mod_base = OTHER; note = 2'-O-methylcytidine-3'-phosphate
  modified_base 6: mod_base = OTHER; note = 2'-O-methyladenosine-3'-phosphate
  modified_base 7: mod_base = OTHER; note = 2'-fluorocytidine-3'-phosphate
  modified_base 8: mod_base = OTHER; note = 2'-O-methylcytidine-3'-phosphate
  modified_base 9: mod_base = OTHER; note = 2'-fluoroadenosine-3'-phosphate
  modified_base 10: mod_base = OTHER; note = 2'-fluoroadenosine-3'-phosphate
  modified_base 11: mod_base = OTHER; note = 2'-fluoroguanosine-3'-phosphate
  modified_base 12: mod_base = OTHER; note = 2'-O-methyluridine-3'-phosphate
  modified_base 13: mod_base = OTHER; note = 2'-O-methyladenosine-3'-phosphate
  modified_base 14: mod_base = OTHER; note = 2'-O-methylcytidine-3'-phosphate
  modified_base 15: mod_base = OTHER; note = 2'-O-methyluridine-3'-phosphate
  modified_base 16: mod_base = OTHER; note = 2'-O-methyladenosine-3'-phosphate
  modified_base 17: mod_base = OTHER; note = 2'-O-methylcytidine-3'-phosphate
  modified_base 18: mod_base = OTHER; note = 2'-O-methylguanosine-3'-phosphate
  modified_base 19: mod_base = OTHER; note = 2'-O-methyladenosine-3'-phosphate
  modified_base 20: mod_base = OTHER; note = 2'-O-methylguanosine-3'-phosphate
  modified_base 21: mod_base = OTHER; note = 2'-O-methyladenosine-3'-phosphate
actccaccaagtactacgaga

SEQ ID NO: 476 - RNA, 19 nt, synthetic construct
  source 1..19: mol_type = other RNA
  modified_base 1: mod_base = OTHER; note = 2'-O-methyluridine-3'-phosphate
  modified_base 2: mod_base = OTHER; note = 2'-O-methylcytidine-3'-phosphate
  modified_base 4: mod_base = OTHER; note = 2'-O-methyladenosine-3'-phosphate
  modified_base 5: mod_base = OTHER; note = 2'-O-methylcytidine-3'-phosphate
  modified_base 6: mod_base = OTHER; note = 2'-O-methylcytidine-3'-phosphate
  modified_base 10: mod_base = OTHER; note = 2'-O-methyluridine-3'-phosphate
  modified_base 11: mod_base = OTHER; note = 2'-O-methyladenosine-3'-phosphate
  modified_base 13: mod_base = OTHER; note = 2'-O-methyluridine-3'-phosphate
  modified_base 14: mod_base = OTHER; note = 2'-O-methyladenosine-3'-phosphate
  modified_base 15: mod_base = OTHER; note = 2'-O-methylcytidine-3'-phosphate
  modified_base 16: mod_base = OTHER; note = 2'-O-methylguanosine-3'-phosphate
  modified_base 18: mod_base = OTHER; note = 2'-O-methylguanosine-3'-phosphorothioate
  modified_base 19: mod_base = OTHER; note = 2'-O-methyladenosine-3'-phosphate
tccaccaagtactacgaga

SEQ ID NO: 477 - RNA, 21 nt, synthetic construct
  source 1..21: mol_type = other RNA
  modified_base 1: mod_base = OTHER; note = 2'-O-methyladenosine-3'-phosphate
  modified_base 2: mod_base = OTHER; note = 2'-O-methylcytidine-3'-phosphate
  modified_base 3: mod_base = OTHER; note = 2'-O-methyluridine-3'-phosphate
  modified_base 4: mod_base = OTHER; note = 2'-O-methylcytidine-3'-phosphate
  modified_base 6: mod_base = OTHER; note = 2'-O-methyladenosine-3'-phosphate
  modified_base 7: mod_base = OTHER; note = 2'-O-methylcytidine-3'-phosphate
  modified_base 8: mod_base = OTHER; note = 2'-O-methylcytidine-3'-phosphate
  modified_base 12: mod_base = OTHER; note = 2'-O-methyluridine-3'-phosphate
  modified_base 13: mod_base = OTHER; note = 2'-O-methyladenosine-3'-phosphate
  modified_base 14: mod_base = OTHER; note = 2'-O-methylcytidine-3'-phosphate
  modified_base 15: mod_base = OTHER; note = 2'-O-methyluridine-3'-phosphate
  modified_base 16: mod_base = OTHER; note = 2'-O-methyladenosine-3'-phosphate
  modified_base 17: mod_base = OTHER; note = 2'-O-methylcytidine-3'-phosphate
  modified_base 18: mod_base = OTHER; note = 2'-O-methylguanosine-3'-phosphate
  modified_base 20: mod_base = OTHER; note = 2'-O-methylguanosine-3'-phosphorothioate
  modified_base 21: mod_base = OTHER; note = 2'-O-methyladenosine-3'-phosphate
actccaccaagtactacgaga

SEQ ID NO: 478 - RNA, 21 nt, synthetic construct
  source 1..21: mol_type = other RNA
  modified_base 1: mod_base = OTHER; note = 2'-O-methylguanosine-3'-phosphorothioate
  modified_base 2: mod_base = OTHER; note = 2'-O-methylcytidine-3'-phosphorothioate
  modified_base 3: mod_base = OTHER; note = 2'-O-methylcytidine-3'-phosphate
  modified_base 4: mod_base = OTHER; note = 2'-O-methylguanosine-3'-phosphate
  modified_base 5: mod_base = OTHER; note = 2'-O-methylguanosine-3'-phosphate
  modified_base 6: mod_base = OTHER; note = 2'-O-methyladenosine-3'-phosphate
  modified_base 7: mod_base = OTHER; note = 2'-fluoroadenosine-3'-phosphate
  modified_base 8: mod_base = OTHER; note = 2'-O-methylcytidine-3'-phosphate
  modified_base 9: mod_base = OTHER; note = 2'-fluorocytidine-3'-phosphate
  modified_base 10: mod_base = OTHER; note = 2'-fluorocytidine-3'-phosphate
  modified_base 11: mod_base = OTHER; note = 2'-fluorocytidine-3'-phosphate
  modified_base 12: mod_base = OTHER; note = 2'-O-methyladenosine-3'-phosphate
  modified_base 13: mod_base = OTHER; note = 2'-O-methylguanosine-3'-phosphate
  modified_base 14: mod_base = OTHER; note = 2'-O-methyluridine-3'-phosphate
  modified_base 15: mod_base = OTHER; note = 2'-O-methylguanosine-3'-phosphate
  modified_base 16: mod_base = OTHER; note = 2'-O-methylguanosine-3'-phosphate
  modified_base 17: mod_base = OTHER; note = 2'-O-methylguanosine-3'-phosphate
  modified_base 18: mod_base = OTHER; note = 2'-O-methylcytidine-3'-phosphate
  modified_base 19: mod_base = OTHER; note = 2'-O-methyladenosine-3'-phosphate
  modified_base 20: mod_base = OTHER; note = 2'-O-methylcytidine-3'-phosphate
  modified_base 21: mod_base = OTHER; note = 2'-O-methyladenosine-3'-phosphate
gccggaaccccagtgggcaca

SEQ ID NO: 479 - RNA, 19 nt, synthetic construct
  source 1..19: mol_type = other RNA
  modified_base 1: mod_base = OTHER; note = 2'-O-methylcytidine-3'-phosphate
  modified_base 2: mod_base = OTHER; note = 2'-O-methylguanosine-3'-phosphate
  modified_base 4: mod_base = OTHER; note = 2'-O-methyladenosine-3'-phosphate
  modified_base 5: mod_base = OTHER; note = 2'-O-methyladenosine-3'-phosphate
  modified_base 6: mod_base = OTHER; note = 2'-O-methylcytidine-3'-phosphate
  modified_base 10: mod_base = OTHER; note = 2'-O-methyladenosine-3'-phosphate
  modified_base 11: mod_base = OTHER; note = 2'-O-methylguanosine-3'-phosphate
  modified_base 13: mod_base = OTHER; note = 2'-O-methylguanosine-3'-phosphate
  modified_base 14: mod_base = OTHER; note = 2'-O-methylguanosine-3'-phosphate
  modified_base 15: mod_base = OTHER; note = 2'-O-methylguanosine-3'-phosphate
  modified_base 16: mod_base = OTHER; note = 2'-O-methylcytidine-3'-phosphate
  modified_base 18: mod_base = OTHER; note = 2'-O-methylcytidine-3'-phosphorothioate
  modified_base 19: mod_base = OTHER; note = 2'-O-methyladenosine-3'-phosphate
cggaaccccagtgggcaca

SEQ ID NO: 480 - RNA, 21 nt, synthetic construct
  source 1..21: mol_type = other RNA
  modified_base 1: mod_base = OTHER; note = 2'-O-methylguanosine-3'-phosphate
  modified_base 2: mod_base = OTHER; note = 2'-O-methylcytidine-3'-phosphate
  modified_base 3: mod_base = OTHER; note = 2'-O-methylcytidine-3'-phosphate
  modified_base 4: mod_base = OTHER; note = 2'-O-methylguanosine-3'-phosphate
  modified_base 6: mod_base = OTHER; note = 2'-O-methyladenosine-3'-phosphate
  modified_base 7: mod_base = OTHER; note = 2'-O-methyladenosine-3'-phosphate
  modified_base 8: mod_base = OTHER; note = 2'-O-methylcytidine-3'-phosphate
  modified_base 12: mod_base = OTHER; note = 2'-O-methyladenosine-3'-phosphate
  modified_base 13: mod_base = OTHER; note = 2'-O-methylguanosine-3'-phosphate
  modified_base 14: mod_base = OTHER; note = 2'-O-methyluridine-3'-phosphate
  modified_base 15: mod_base = OTHER; note = 2'-O-methylguanosine-3'-phosphate
  modified_base 16: mod_base = OTHER; note = 2'-O-methylguanosine-3'-phosphate
  modified_base 17: mod_base = OTHER; note = 2'-O-methylguanosine-3'-phosphate
  modified_base 18: mod_base = OTHER; note = 2'-O-methylcytidine-3'-phosphate
  modified_base 20: mod_base = OTHER; note = 2'-O-methylcytidine-3'-phosphorothioate
  modified_base 21: mod_base = OTHER; note = 2'-O-methyladenosine-3'-phosphate
gccggaaccccagtgggcaca

SEQ ID NO: 481 - RNA, 21 nt, synthetic construct
  source 1..21: mol_type = other RNA
  modified_base 1: mod_base = OTHER; note = 2'-O-methylguanosine-3'-phosphorothioate
  modified_base 2: mod_base = OTHER; note = 2'-O-methyladenosine-3'-phosphorothioate
  modified_base 3: mod_base = OTHER; note = 2'-O-methyluridine-3'-phosphate
  modified_base 4: mod_base = OTHER; note = 2'-O-methylguanosine-3'-phosphate
  modified_base 5: mod_base = OTHER; note = 2'-O-methyladenosine-3'-phosphate
  modified_base 6: mod_base = OTHER; note = 2'-O-methyladenosine-3'-phosphate
  modified_base 7: mod_base = OTHER; note = 2'-fluoroguanosine-3'-phosphate
  modified_base 8: mod_base = OTHER; note = 2'-O-methyluridine-3'-phosphate
  modified_base 9: mod_base = OTHER; note = 2'-fluoroguanosine-3'-phosphate
  modified_base 10: mod_base = OTHER; note = 2'-fluorocytidine-3'-phosphate
  modified_base 11: mod_base = OTHER; note = 2'-fluoroguanosine-3'-phosphate
  modified_base 12: mod_base = OTHER; note = 2'-O-methyluridine-3'-phosphate
  modified_base 13: mod_base = OTHER; note = 2'-O-methylguanosine-3'-phosphate
  modified_base 14: mod_base = OTHER; note = 2'-O-methylguanosine-3'-phosphate
  modified_base 15: mod_base = OTHER; note = 2'-O-methylcytidine-3'-phosphate
  modified_base 16: mod_base = OTHER; note = 2'-O-methylcytidine-3'-phosphate
  modified_base 17: mod_base = OTHER; note = 2'-O-methylcytidine-3'-phosphate
  modified_base 18: mod_base = OTHER; note = 2'-O-methyladenosine-3'-phosphate
  modified_base 19: mod_base = OTHER; note = 2'-O-methylguanosine-3'-phosphate
  modified_base 20: mod_base = OTHER; note = 2'-O-methyluridine-3'-phosphate
  modified_base 21: mod_base = OTHER; note = 2'-O-methyladenosine-3'-phosphate
gatgaagtgcgtggcccagta

SEQ ID NO: 482 - RNA, 21 nt, synthetic construct
  source 1..21: mol_type = other RNA
  modified_base 1: mod_base = OTHER; note = 2'-O-methylguanosine-3'-phosphorothioate
  modified_base 2: mod_base = OTHER; note = 2'-O-methyladenosine-3'-phosphorothioate
  modified_base 3: mod_base = OTHER; note = 2'-O-methylguanosine-3'-phosphate
  modified_base 4: mod_base = OTHER; note = 2'-O-methyladenosine-3'-phosphate
  modified_base 5: mod_base = OTHER; note = 2'-O-methyladenosine-3'-phosphate
  modified_base 6: mod_base = OTHER; note = 2'-O-methylcytidine-3'-phosphate
  modified_base 7: mod_base = OTHER; note = 2'-fluorouridine-3'-phosphate
  modified_base 8: mod_base = OTHER; note = 2'-O-methylguanosine-3'-phosphate
  modified_base 9: mod_base = OTHER; note = 2'-fluorocytidine-3'-phosphate
  modified_base 10: mod_base = OTHER; note = 2'-fluorocytidine-3'-phosphate
  modified_base 11: mod_base = OTHER; note = 2'-fluoroadenosine-3'-phosphate
  modified_base 12: mod_base = OTHER; note = 2'-O-methylguanosine-3'-phosphate
  modified_base 13: mod_base = OTHER; note = 2'-O-methyladenosine-3'-phosphate
  modified_base 14: mod_base = OTHER; note = 2'-O-methylguanosine-3'-phosphate
  modified_base 15: mod_base = OTHER; note = 2'-O-methylcytidine-3'-phosphate
  modified_base 16: mod_base = OTHER; note = 2'-O-methyluridine-3'-phosphate
  modified_base 17: mod_base = OTHER; note = 2'-O-methylguanosine-3'-phosphate
  modified_base 18: mod_base = OTHER; note = 2'-O-methyluridine-3'-phosphate
  modified_base 19: mod_base = OTHER; note = 2'-O-methyladenosine-3'-phosphate
  modified_base 20: mod_base = OTHER; note = 2'-O-methyladenosine-3'-phosphate
  modified_base 21: mod_base = OTHER; note = 2'-O-methyladenosine-3'-phosphate
gagaactgccagagctgtaaa

SEQ ID NO: 483 - RNA, 19 nt, synthetic construct
  source 1..19: mol_type = other RNA
  modified_base 1: mod_base = OTHER; note = 2'-O-methylguanosine-3'-phosphate
  modified_base 2: mod_base = OTHER; note = 2'-O-methyladenosine-3'-phosphate
  modified_base 4: mod_base = OTHER; note = 2'-O-methylcytidine-3'-phosphate
  modified_base 5: mod_base = OTHER; note = 2'-O-methyluridine-3'-phosphate
  modified_base 6: mod_base = OTHER; note = 2'-O-methylguanosine-3'-phosphate
  modified_base 10: mod_base = OTHER; note = 2'-O-methylguanosine-3'-phosphate
  modified_base 11: mod_base = OTHER; note = 2'-O-methyladenosine-3'-phosphate
  modified_base 13: mod_base = OTHER; note = 2'-O-methylcytidine-3'-phosphate
  modified_base 14: mod_base = OTHER; note = 2'-O-methyluridine-3'-phosphate
  modified_base 15: mod_base = OTHER; note = 2'-O-methylguanosine-3'-phosphate
  modified_base 16: mod_base = OTHER; note = 2'-O-methyluridine-3'-phosphate
  modified_base 18: mod_base = OTHER; note = 2'-O-methyladenosine-3'-phosphorothioate
  modified_base 19: mod_base = OTHER; note = 2'-O-methyladenosine-3'-phosphate
gaactgccagagctgtaaa

SEQ ID NO: 484 - RNA, 21 nt, synthetic construct
  source 1..21: mol_type = other RNA
  modified_base 1: mod_base = OTHER; note = 2'-O-methylguanosine-3'-phosphate
  modified_base 2: mod_base = OTHER; note = 2'-O-methyladenosine-3'-phosphate
  modified_base 3: mod_base = OTHER; note = 2'-O-methylguanosine-3'-phosphate
  modified_base 4: mod_base = OTHER; note = 2'-O-methyladenosine-3'-phosphate
  modified_base 6: mod_base = OTHER; note = 2'-O-methylcytidine-3'-phosphate
  modified_base 7: mod_base = OTHER; note = 2'-O-methyluridine-3'-phosphate
  modified_base 8: mod_base = OTHER; note = 2'-O-methylguanosine-3'-phosphate
  modified_base 12: mod_base = OTHER; note = 2'-O-methylguanosine-3'-phosphate
  modified_base 13: mod_base = OTHER; note = 2'-O-methyladenosine-3'-phosphate
  modified_base 14: mod_base = OTHER; note = 2'-O-methylguanosine-3'-phosphate
  modified_base 15: mod_base = OTHER; note = 2'-O-methylcytidine-3'-phosphate
  modified_base 16: mod_base = OTHER; note = 2'-O-methyluridine-3'-phosphate
  modified_base 17: mod_base = OTHER; note = 2'-O-methylguanosine-3'-phosphate
  modified_base 18: mod_base = OTHER; note = 2'-O-methyluridine-3'-phosphate
  modified_base 20: mod_base = OTHER; note = 2'-O-methyladenosine-3'-phosphorothioate
  modified_base 21: mod_base = OTHER; note = 2'-O-methyladenosine-3'-phosphate
gagaactgccagagctgtaaa

SEQ ID NO: 485 - RNA, 21 nt, synthetic construct
  source 1..21: mol_type = other RNA
  modified_base 1: mod_base = OTHER; note = 2'-O-methyladenosine-3'-phosphorothioate
  modified_base 2: mod_base = OTHER; note = 2'-O-methylguanosine-3'-phosphorothioate
  modified_base 3: mod_base = OTHER; note = 2'-O-methyladenosine-3'-phosphate
  modified_base 4: mod_base = OTHER; note = 2'-O-methyladenosine-3'-phosphate
  modified_base 5: mod_base = OTHER; note = 2'-O-methylcytidine-3'-phosphate
  modified_base 6: mod_base = OTHER; note = 2'-O-methyluridine-3'-phosphate
  modified_base 7: mod_base = OTHER; note = 2'-fluoroguanosine-3'-phosphate
  modified_base 8: mod_base = OTHER; note = 2'-O-methylcytidine-3'-phosphate
  modified_base 9: mod_base = OTHER; note = 2'-fluorocytidine-3'-phosphate
  modified_base 10: mod_base = OTHER; note = 2'-fluoroadenosine-3'-phosphate
  modified_base 11: mod_base = OTHER; note = 2'-fluoroguanosine-3'-phosphate
  modified_base 12: mod_base = OTHER; note = 2'-O-methyladenosine-3'-phosphate
  modified_base 13: mod_base = OTHER; note = 2'-O-methylguanosine-3'-phosphate
  modified_base 14: mod_base = OTHER; note = 2'-O-methylcytidine-3'-phosphate
  modified_base 15: mod_base = OTHER; note = 2'-O-methyluridine-3'-phosphate
  modified_base 16: mod_base = OTHER; note = 2'-O-methylguanosine-3'-phosphate
  modified_base 17: mod_base = OTHER; note = 2'-O-methyluridine-3'-phosphate
  modified_base 18: mod_base = OTHER; note = 2'-O-methyladenosine-3'-phosphate
  modified_base 19: mod_base = OTHER; note = 2'-O-methyladenosine-3'-phosphate
  modified_base 20: mod_base = OTHER; note = 2'-O-methylcytidine-3'-phosphate
  modified_base 21: mod_base = OTHER; note = 2'-O-methyladenosine-3'-phosphate
agaactgccagagctgtaaca

SEQ ID NO: 486 - RNA, 19 nt, synthetic construct
  source 1..19: mol_type = other RNA
  modified_base 1: mod_base = OTHER; note = 2'-O-methyladenosine-3'-phosphate
  modified_base 2: mod_base = OTHER; note = 2'-O-methyladenosine-3'-phosphate
  modified_base 4: mod_base = OTHER; note = 2'-O-methyluridine-3'-phosphate
  modified_base 5: mod_base = OTHER; note = 2'-O-methylguanosine-3'-phosphate
  modified_base 6: mod_base = OTHER; note = 2'-O-methylcytidine-3'-phosphate
  modified_base 10: mod_base = OTHER; note = 2'-O-methyladenosine-3'-phosphate
  modified_base 11: mod_base = OTHER; note = 2'-O-methylguanosine-3'-phosphate
  modified_base 13: mod_base = OTHER; note = 2'-O-methyluridine-3'-phosphate
  modified_base 14: mod_base = OTHER; note = 2'-O-methylguanosine-3'-phosphate
  modified_base 15: mod_base = OTHER; note = 2'-O-methyluridine-3'-phosphate
  modified_base 16: mod_base = OTHER; note = 2'-O-methyladenosine-3'-phosphate
  modified_base 18: mod_base = OTHER; note = 2'-O-methylcytidine-3'-phosphorothioate
  modified_base 19: mod_base = OTHER; note = 2'-O-methyladenosine-3'-phosphate
aactgccagagctgtaaca

SEQ ID NO: 487 - RNA, 21 nt, synthetic construct
  source 1..21: mol_type = other RNA
  modified_base 1: mod_base = OTHER; note = 2'-O-methyladenosine-3'-phosphate
  modified_base 2: mod_base = OTHER; note = 2'-O-methylguanosine-3'-phosphate
  modified_base 3: mod_base = OTHER; note = 2'-O-methyladenosine-3'-phosphate
  modified_base 4: mod_base = OTHER; note = 2'-O-methyladenosine-3'-phosphate
  modified_base 6: mod_base = OTHER; note = 2'-O-methyluridine-3'-phosphate
  modified_base 7: mod_base = OTHER; note = 2'-O-methylguanosine-3'-phosphate
  modified_base 8: mod_base = OTHER; note = 2'-O-methylcytidine-3'-phosphate
  modified_base 12: mod_base = OTHER; note = 2'-O-methyladenosine-3'-phosphate
  modified_base 13: mod_base = OTHER; note = 2'-O-methylguanosine-3'-phosphate
  modified_base 14: mod_base = OTHER; note = 2'-O-methylcytidine-3'-phosphate
  modified_base 15: mod_base = OTHER; note = 2'-O-methyluridine-3'-phosphate
  modified_base 16: mod_base = OTHER; note = 2'-O-methylguanosine-3'-phosphate
  modified_base 17: mod_base = OTHER; note = 2'-O-methyluridine-3'-phosphate
  modified_base 18: mod_base = OTHER; note = 2'-O-methyladenosine-3'-phosphate
  modified_base 20: mod_base = OTHER; note = 2'-O-methylcytidine-3'-phosphorothioate
  modified_base 21: mod_base = OTHER; note = 2'-O-methyladenosine-3'-phosphate
agaactgccagagctgtaaca

SEQ ID NO: 488 - RNA, 21 nt, synthetic construct
  source 1..21: mol_type = other RNA
  modified_base 1: mod_base = OTHER; note = 2'-O-methyladenosine-3'-phosphorothioate
  modified_base 2: mod_base = OTHER; note = 2'-O-methylcytidine-3'-phosphorothioate
  modified_base 3: mod_base = OTHER; note = 2'-O-methylcytidine-3'-phosphate
  modified_base 4: mod_base = OTHER; note = 2'-O-methyluridine-3'-phosphate
  modified_base 5: mod_base = OTHER; note = 2'-O-methyladenosine-3'-phosphate
  modified_base 6: mod_base = OTHER; note = 2'-O-methyluridine-3'-phosphate
  modified_base 7: mod_base = OTHER; note = 2'-fluoroguanosine-3'-phosphate
  modified_base 8: mod_base = OTHER; note = 2'-O-methyladenosine-3'-phosphate
  modified_base 9: mod_base = OTHER; note = 2'-fluoroguanosine-3'-phosphate
  modified_base 10: mod_base = OTHER; note = 2'-fluoroguanosine-3'-phosphate
  modified_base 11: mod_base = OTHER; note = 2'-fluoroadenosine-3'-phosphate
  modified_base 12: mod_base = OTHER; note = 2'-O-methylcytidine-3'-phosphate
  modified_base 13: mod_base = OTHER; note = 2'-O-methyladenosine-3'-phosphate
  modified_base 14: mod_base = OTHER; note = 2'-O-methylguanosine-3'-phosphate
  modified_base 15: mod_base = OTHER; note = 2'-O-methylguanosine-3'-phosphate
  modified_base 16: mod_base = OTHER; note = 2'-O-methyladenosine-3'-phosphate
  modified_base 17: mod_base = OTHER; note = 2'-O-methylcytidine-3'-phosphate
  modified_base 18: mod_base = OTHER; note = 2'-O-methylcytidine-3'-phosphate
  modified_base 19: mod_base = OTHER; note = 2'-O-methyluridine-3'-phosphate
  modified_base 20: mod_base = OTHER; note = 2'-O-methyladenosine-3'-phosphate
  modified_base 21: mod_base = OTHER; note = 2'-O-methyladenosine-3'-phosphate
acctatgaggacaggacctaa

SEQ ID NO: 489 - RNA, 21 nt, synthetic construct
  source 1..21: mol_type = other RNA
  modified_base 1: mod_base = OTHER; note = 2'-O-methylguanosine-3'-phosphorothioate
  modified_base 2: mod_base = OTHER; note = 2'-O-methylguanosine-3'-phosphorothioate
  modified_base 3: mod_base = OTHER; note = 2'-O-methyladenosine-3'-phosphate
  modified_base 4: mod_base = OTHER; note = 2'-O-methylcytidine-3'-phosphate
  modified_base 5: mod_base = OTHER; note = 2'-O-methylguanosine-3'-phosphate
  modified_base 6: mod_base = OTHER; note = 2'-O-methyluridine-3'-phosphate
  modified_base 7: mod_base = OTHER; note = 2'-fluorocytidine-3'-phosphate
  modified_base 8: mod_base = OTHER; note = 2'-O-methyladenosine-3'-phosphate
  modified_base 9: mod_base = OTHER; note = 2'-fluorouridine-3'-phosphate
  modified_base 10: mod_base = OTHER; note = 2'-fluorocytidine-3'-phosphate
  modified_base 11: mod_base = OTHER; note = 2'-fluorouridine-3'-phosphate
  modified_base 12: mod_base = OTHER; note = 2'-O-methyladenosine-3'-phosphate
  modified_base 13: mod_base = OTHER; note = 2'-O-methylcytidine-3'-phosphate
  modified_base 14: mod_base = OTHER; note = 2'-O-methyladenosine-3'-phosphate
  modified_base 15: mod_base = OTHER; note = 2'-O-methyladenosine-3'-phosphate
  modified_base 16: mod_base = OTHER; note = 2'-O-methylcytidine-3'-phosphate
  modified_base 17: mod_base = OTHER; note = 2'-O-methyladenosine-3'-phosphate
  modified_base 18: mod_base = OTHER; note = 2'-O-methylcytidine-3'-phosphate
  modified_base 19: mod_base = OTHER; note = 2'-O-methylcytidine-3'-phosphate
  modified_base 20: mod_base = OTHER; note = 2'-O-methyladenosine-3'-phosphate
  modified_base 21: mod_base = OTHER; note = 2'-O-methyladenosine-3'-phosphate
ggacgtcatctacaacaccaa

SEQ ID NO: 490 - RNA, 19 nt, synthetic construct
  source 1..19: mol_type = other RNA
  modified_base 1: mod_base = OTHER; note = 2'-O-methyladenosine-3'-phosphate
  modified_base 2: mod_base = OTHER; note = 2'-O-methylcytidine-3'-phosphate
  modified_base 4: mod_base = OTHER; note = 2'-O-methyluridine-3'-phosphate
  modified_base 5: mod_base = OTHER; note = 2'-O-methylcytidine-3'-phosphate
  modified_base 6: mod_base = OTHER; note = 2'-O-methyladenosine-3'-phosphate
  modified_base 10: mod_base = OTHER; note = 2'-O-methyladenosine-3'-phosphate
  modified_base 11: mod_base = OTHER; note = 2'-O-methylcytidine-3'-phosphate
  modified_base 13: mod_base = OTHER; note = 2'-O-methyladenosine-3'-phosphate
  modified_base 14: mod_base = OTHER; note = 2'-O-methylcytidine-3'-phosphate
  modified_base 15: mod_base = OTHER; note = 2'-O-methyladenosine-3'-phosphate
  modified_base 16: mod_base = OTHER; note = 2'-O-methylcytidine-3'-phosphate
  modified_base 18: mod_base = OTHER; note = 2'-O-methyladenosine-3'-phosphorothioate
  modified_base 19: mod_base = OTHER; note = 2'-O-methyladenosine-3'-phosphate
acgtcatctacaacaccaa

SEQ ID NO: 491 - RNA, 21 nt, synthetic construct
  source 1..21: mol_type = other RNA
  modified_base 1: mod_base = OTHER; note = 2'-O-methylguanosine-3'-phosphate
  modified_base 2: mod_base = OTHER; note = 2'-O-methylguanosine-3'-phosphate
  modified_base 3: mod_base = OTHER; note = 2'-O-methyladenosine-3'-phosphate
  modified_base 4: mod_base = OTHER; note = 2'-O-methylcytidine-3'-phosphate
  modified_base 6: mod_base = OTHER; note = 2'-O-methyluridine-3'-phosphate
  modified_base 7: mod_base = OTHER; note = 2'-O-methylcytidine-3'-phosphate
  modified_base 8: mod_base = OTHER; note = 2'-O-methyladenosine-3'-phosphate
  modified_base 12: mod_base = OTHER; note = 2'-O-methyladenosine-3'-phosphate
  modified_base 13: mod_base = OTHER; note = 2'-O-methylcytidine-3'-phosphate
  modified_base 14: mod_base = OTHER; note = 2'-O-methyladenosine-3'-phosphate
  modified_base 15: mod_base = OTHER; note = 2'-O-methyladenosine-3'-phosphate
  modified_base 16: mod_base = OTHER; note = 2'-O-methylcytidine-3'-phosphate
  modified_base 17: mod_base = OTHER; note = 2'-O-methyladenosine-3'-phosphate
  modified_base 18: mod_base = OTHER; note = 2'-O-methylcytidine-3'-phosphate
  modified_base 20: mod_base = OTHER; note = 2'-O-methyladenosine-3'-phosphorothioate
  modified_base 21: mod_base = OTHER; note = 2'-O-methyladenosine-3'-phosphate
ggacgtcatctacaacaccaa

SEQ ID NO: 492 - RNA, 21 nt, synthetic construct
  source 1..21: mol_type = other RNA
  modified_base 1: mod_base = OTHER; note = 2'-O-methyluridine-3'-phosphorothioate
  modified_base 2: mod_base = OTHER; note = 2'-O-methylguanosine-3'-phosphorothioate
  modified_base 3: mod_base = OTHER; note = 2'-O-methyluridine-3'-phosphate
  modified_base 4: mod_base = OTHER; note = 2'-O-methylcytidine-3'-phosphate
  modified_base 5: mod_base = OTHER; note = 2'-O-methylcytidine-3'-phosphate
  modified_base 6: mod_base = OTHER; note = 2'-O-methylguanosine-3'-phosphate
  modified_base 7: mod_base = OTHER; note = 2'-fluorocytidine-3'-phosphate
  modified_base 8: mod_base = OTHER; note = 2'-O-methylguanosine-3'-phosphate
  modified_base 9: mod_base = OTHER; note = 2'-fluoroadenosine-3'-phosphate
  modified_base 10: mod_base = OTHER; note = 2'-fluoroguanosine-3'-phosphate
  modified_base 11: mod_base = OTHER; note = 2'-fluoroguanosine-3'-phosphate
  modified_base 12: mod_base = OTHER; note = 2'-O-methyluridine-3'-phosphate
  modified_base 13: mod_base = OTHER; note = 2'-O-methylcytidine-3'-phosphate
  modified_base 14: mod_base = OTHER; note = 2'-O-methyluridine-3'-phosphate
  modified_base 15: mod_base = OTHER; note = 2'-O-methylguanosine-3'-phosphate
  modified_base 16: mod_base = OTHER; note = 2'-O-methylcytidine-3'-phosphate
  modified_base 17: mod_base = OTHER; note = 2'-O-methylcytidine-3'-phosphate
  modified_base 18: mod_base = OTHER; note = 2'-O-methylguanosine-3'-phosphate
  modified_base 19: mod_base = OTHER; note = 2'-O-methylcytidine-3'-phosphate
  modified_base 20: mod_base = OTHER; note = 2'-O-methyluridine-3'-phosphate
  modified_base 21: mod_base = OTHER; note = 2'-O-methyladenosine-3'-phosphate
tgtccgcgaggtctgccgcta

SEQ ID NO: 493 - RNA, 19 nt, synthetic construct
  source 1..19: mol_type = other RNA
  modified_base 1: mod_base = OTHER; note = 2'-O-methyluridine-3'-phosphate
  modified_base 2: mod_base = OTHER; note = 2'-O-methylcytidine-3'-phosphate
  modified_base 4: mod_base = OTHER; note = 2'-O-methylguanosine-3'-phosphate
  modified_base 5: mod_base = OTHER; note = 2'-O-methylcytidine-3'-phosphate
  modified_base 6: mod_base = OTHER; note = 2'-O-methylguanosine-3'-phosphate
  modified_base 10: mod_base = OTHER; note = 2'-O-methyluridine-3'-phosphate
  modified_base 11: mod_base = OTHER; note = 2'-O-methylcytidine-3'-phosphate
  modified_base 13: mod_base = OTHER; note = 2'-O-methylguanosine-3'-phosphate
  modified_base 14: mod_base = OTHER; note = 2'-O-methylcytidine-3'-phosphate
  modified_base 15: mod_base = OTHER; note = 2'-O-methylcytidine-3'-phosphate
  modified_base 16: mod_base = OTHER; note = 2'-O-methylguanosine-3'-phosphate
  modified_base 18: mod_base = OTHER; note = 2'-O-methyluridine-3'-phosphorothioate
  modified_base 19: mod_base = OTHER; note = 2'-O-methyladenosine-3'-phosphate
tccgcgaggtctgccgcta

SEQ ID NO: 494 - RNA, 21 nt, synthetic construct
  source 1..21: mol_type = other RNA
  modified_base 1: mod_base = OTHER; note = 2'-O-methyluridine-3'-phosphate
  modified_base 2: mod_base = OTHER; note = 2'-O-methylguanosine-3'-phosphate
  modified_base 3: mod_base = OTHER; note = 2'-O-methyluridine-3'-phosphate
  modified_base 4: mod_base = OTHER; note = 2'-O-methylcytidine-3'-phosphate
  modified_base 6: mod_base = OTHER; note = 2'-O-methylguanosine-3'-phosphate
  modified_base 7: mod_base = OTHER; note = 2'-O-methylcytidine-3'-phosphate
  modified_base 8: mod_base = OTHER; note = 2'-O-methylguanosine-3'-phosphate
  modified_base 12: mod_base = OTHER; note = 2'-O-methyluridine-3'-phosphate
  modified_base 13: mod_base = OTHER; note = 2'-O-methylcytidine-3'-phosphate
  modified_base 14: mod_base = OTHER; note = 2'-O-methyluridine-3'-phosphate
  modified_base 15: mod_base = OTHER; note = 2'-O-methylguanosine-3'-phosphate
  modified_base 16: mod_base = OTHER; note = 2'-O-methylcytidine-3'-phosphate
  modified_base 17: mod_base = OTHER; note = 2'-O-methylcytidine-3'-phosphate
  modified_base 18: mod_base = OTHER; note = 2'-O-methylguanosine-3'-phosphate
  modified_base 20: mod_base = OTHER; note = 2'-O-methyluridine-3'-phosphorothioate
  modified_base 21: mod_base = OTHER; note = 2'-O-methyladenosine-3'-phosphate
tgtccgcgaggtctgccgcta

SEQ ID NO: 495 - RNA, 21 nt, synthetic construct
  source 1..21: mol_type = other RNA
  modified_base 1: mod_base = OTHER; note = 2'-O-methylcytidine-3'-phosphorothioate
  modified_base 2: mod_base = OTHER; note = 2'-O-methylguanosine-3'-phosphorothioate
  modified_base 3: mod_base = OTHER; note = 2'-O-methyladenosine-3'-phosphate
  modified_base 4: mod_base = OTHER; note = 2'-O-methyladenosine-3'-phosphate
  modified_base 5: mod_base = OTHER; note = 2'-O-methyluridine-3'-phosphate
  modified_base 6: mod_base = OTHER; note = 2'-O-methyladenosine-3'-phosphate
  modified_base 7: mod_base = OTHER; note = 2'-fluorocytidine-3'-phosphate
  modified_base 8: mod_base = OTHER; note = 2'-O-methylguanosine-3'-phosphate
  modified_base 9: mod_base = OTHER; note = 2'-fluorouridine-3'-phosphate
  modified_base 10: mod_base = OTHER; note = 2'-fluoroguanosine-3'-phosphate
  modified_base 11: mod_base = OTHER; note = 2'-fluorocytidine-3'-phosphate
  modified_base 12: mod_base = OTHER; note = 2'-O-methylcytidine-3'-phosphate
  modified_base 13: mod_base = OTHER; note = 2'-O-methylcytidine-3'-phosphate
  modified_base 14: mod_base = OTHER; note = 2'-O-methyluridine-3'-phosphate
  modified_base 15: mod_base = OTHER; note = 2'-O-methylguanosine-3'-phosphate
  modified_base 16: mod_base = OTHER; note = 2'-O-methyluridine-3'-phosphate
  modified_base 17: mod_base = OTHER; note = 2'-O-methylguanosine-3'-phosphate
  modified_base 18: mod_base = OTHER; note = 2'-O-methylguanosine-3'-phosphate
  modified_base 19: mod_base = OTHER; note = 2'-O-methylcytidine-3'-phosphate
  modified_base 20: mod_base = OTHER; note = 2'-O-methylcytidine-3'-phosphate
  modified_base 21: mod_base = OTHER; note = 2'-O-methyladenosine-3'-phosphate
cgaatacgtgccctgtggcca

SEQ ID NO: 496 - RNA, 19 nt, synthetic construct
  source 1..19: mol_type = other RNA
  modified_base 1: mod_base = OTHER; note = 2'-O-methyladenosine-3'-phosphate
  modified_base 2: mod_base = OTHER; note = 2'-O-methyladenosine-3'-phosphate
  modified_base 4: mod_base = OTHER; note = 2'-O-methyladenosine-3'-phosphate
  modified_base 5: mod_base = OTHER; note = 2'-O-methylcytidine-3'-phosphate
  modified_base 6: mod_base = OTHER; note = 2'-O-methylguanosine-3'-phosphate
  modified_base 10: mod_base = OTHER; note = 2'-O-methylcytidine-3'-phosphate
  modified_base 11: mod_base = OTHER; note = 2'-O-methylcytidine-3'-phosphate
  modified_base 13: mod_base = OTHER; note = 2'-O-methylguanosine-3'-phosphate
  modified_base 14: mod_base = OTHER; note = 2'-O-methyluridine-3'-phosphate
  modified_base 15: mod_base = OTHER; note = 2'-O-methylguanosine-3'-phosphate
  modified_base 16: mod_base = OTHER; note = 2'-O-methylguanosine-3'-phosphate
  modified_base 18: mod_base = OTHER; note = 2'-O-methylcytidine-3'-phosphorothioate
  modified_base 19: mod_base = OTHER; note = 2'-O-methyladenosine-3'-phosphate
aatacgtgccctgtggcca

SEQ ID NO: 497 - RNA, 21 nt, synthetic construct
  source 1..21: mol_type = other RNA
  modified_base 1: mod_base = OTHER; note = 2'-O-methylcytidine-3'-phosphate
  modified_base 2: mod_base = OTHER; note = 2'-O-methylguanosine-3'-phosphate
  modified_base 3: mod_base = OTHER; note = 2'-O-methyladenosine-3'-phosphate
  modified_base 4: mod_base = OTHER; note = 2'-O-methyladenosine-3'-phosphate
  modified_base 6: mod_base = OTHER; note = 2'-O-methyladenosine-3'-phosphate
  modified_base 7: mod_base = OTHER; note = 2'-O-methylcytidine-3'-phosphate
  modified_base 8: mod_base = OTHER; note = 2'-O-methylguanosine-3'-phosphate
  modified_base 12: mod_base = OTHER; note = 2'-O-methylcytidine-3'-phosphate
  modified_base 13: mod_base = OTHER; note = 2'-O-methylcytidine-3'-phosphate
  modified_base 14: mod_base = OTHER; note = 2'-O-methyluridine-3'-phosphate
  modified_base 15: mod_base = OTHER; note = 2'-O-methylguanosine-3'-phosphate
  modified_base 16: mod_base = OTHER; note = 2'-O-methyluridine-3'-phosphate
  modified_base 17: mod_base = OTHER; note = 2'-O-methylguanosine-3'-phosphate
  modified_base 18: mod_base = OTHER; note = 2'-O-methylguanosine-3'-phosphate
  modified_base 20: mod_base = OTHER; note = 2'-O-methylcytidine-3'-phosphorothioate
  modified_base 21: mod_base = OTHER; note = 2'-O-methyladenosine-3'-phosphate
cgaatacgtgccctgtggcca

SEQ ID NO: 498 - RNA, 21 nt, synthetic construct
  source 1..21: mol_type = other RNA
  modified_base 1: mod_base = OTHER; note = 2'-O-methylguanosine-3'-phosphorothioate
  modified_base 2: mod_base = OTHER; note = 2'-O-methyladenosine-3'-phosphorothioate
  modified_base 3: mod_base = OTHER; note = 2'-O-methylguanosine-3'-phosphate
  modified_base 4: mod_base = OTHER; note = 2'-O-methylguanosine-3'-phosphate
  modified_base 5: mod_base = OTHER; note = 2'-O-methyladenosine-3'-phosphate
  modified_base 6: mod_base = OTHER; note = 2'-O-methylcytidine-3'-phosphate
  modified_base 7: mod_base = OTHER; note = 2'-fluorouridine-3'-phosphate
  modified_base 8: mod_base = OTHER; note = 2'-O-methyladenosine-3'-phosphate
  modified_base 9: mod_base = OTHER; note = 2'-fluorocytidine-3'-phosphate
  modified_base 10: mod_base = OTHER; note = 2'-fluorocytidine-3'-phosphate
  modified_base 11: mod_base = OTHER; note = 2'-fluorocytidine-3'-phosphate
  modified_base 12: mod_base = OTHER; note = 2'-O-methylcytidine-3'-phosphate
  modified_base 13: mod_base = OTHER; note = 2'-O-methyladenosine-3'-phosphate
  modified_base 14: mod_base = OTHER; note = 2'-O-methyladenosine-3'-phosphate
  modified_base 15: mod_base = OTHER; note = 2'-O-methylguanosine-3'-phosphate
  modified_base 16: mod_base = OTHER; note = 2'-O-methyluridine-3'-phosphate
  modified_base 17: mod_base = OTHER; note = 2'-O-methylcytidine-3'-phosphate
  modified_base 18: mod_base = OTHER; note = 2'-O-methyluridine-3'-phosphate
  modified_base 19: mod_base = OTHER; note = 2'-O-methylguanosine-3'-phosphate
  modified_base 20: mod_base = OTHER; note = 2'-O-methyladenosine-3'-phosphate
  modified_base 21: mod_base = OTHER; note = 2'-O-methyladenosine-3'-phosphate
gaggactaccccaagtctgaa

SEQ ID NO: 499 - RNA, 21 nt, synthetic construct
  source 1..21: mol_type = other RNA
  modified_base 1: mod_base = OTHER; note = 2'-O-methylguanosine-3'-phosphorothioate
  modified_base 2: mod_base = OTHER; note = 2'-O-methyladenosine-3'-phosphorothioate
  modified_base 3: mod_base = OTHER; note = 2'-O-methylcytidine-3'-phosphate
  modified_base 4: mod_base = OTHER; note = 2'-O-methyluridine-3'-phosphate
  modified_base 5: mod_base = OTHER; note = 2'-O-methyladenosine-3'-phosphate
  modified_base 6: mod_base = OTHER; note = 2'-O-methylcytidine-3'-phosphate
  modified_base 7: mod_base = OTHER; note = 2'-fluorocytidine-3'-phosphate
  modified_base 8: mod_base = OTHER; note = 2'-O-methylcytidine-3'-phosphate
  modified_base 9: mod_base = OTHER; note = 2'-fluorocytidine-3'-phosphate
  modified_base 10: mod_base = OTHER; note = 2'-fluoroadenosine-3'-phosphate
  modified_base 11: mod_base = OTHER; note = 2'-fluoroadenosine-3'-phosphate
  modified_base 12: mod_base = OTHER; note = 2'-O-methylguanosine-3'-phosphate
  modified_base 13: mod_base = OTHER; note = 2'-O-methyluridine-3'-phosphate
  modified_base 14: mod_base = OTHER; note = 2'-O-methylcytidine-3'-phosphate
  modified_base 15: mod_base = OTHER; note = 2'-O-methyluridine-3'-phosphate
  modified_base 16: mod_base = OTHER; note = 2'-O-methylguanosine-3'-phosphate
  modified_base 17: mod_base = OTHER; note = 2'-O-methyladenosine-3'-phosphate
  modified_base 18: mod_base = OTHER; note = 2'-O-methyladenosine-3'-phosphate
  modified_base 19: mod_base = OTHER; note = 2'-O-methylcytidine-3'-phosphate
  modified_base 20: mod_base = OTHER; note = 2'-O-methyladenosine-3'-phosphate
  modified_base 21: mod_base = OTHER; note = 2'-O-methyladenosine-3'-phosphate
gactaccccaagtctgaacaa

SEQ ID NO: 500 - RNA, 21 nt, synthetic construct
  source 1..21: mol_type = other RNA
  modified_base 1: mod_base = OTHER; note = 2'-O-methyluridine-3'-phosphorothioate
  modified_base 2: mod_base = OTHER; note = 2'-O-methylguanosine-3'-phosphorothioate
  modified_base 3: mod_base = OTHER; note = 2'-O-methyladenosine-3'-phosphate
  modified_base 4: mod_base = OTHER; note = 2'-O-methyladenosine-3'-phosphate
  modified_base 5: mod_base = OTHER; note = 2'-O-methylcytidine-3'-phosphate
  modified_base 6: mod_base = OTHER; note = 2'-O-methyladenosine-3'-phosphate
  modified_base 7: mod_base = OTHER; note = 2'-fluoroadenosine-3'-phosphate
  modified_base 8: mod_base = OTHER; note = 2'-O-methylcytidine-3'-phosphate
  modified_base 9: mod_base = OTHER; note = 2'-fluorouridine-3'-phosphate
  modified_base 10: mod_base = OTHER; note = 2'-fluorouridine-3'-phosphate
  modified_base 11: mod_base = OTHER; note = 2'-fluoroguanosine-3'-phosphate
  modified_base 12: mod_base = OTHER; note = 2'-O-methylguanosine-3'-phosphate
  modified_base 13: mod_base = OTHER; note = 2'-O-methyladenosine-3'-phosphate
  modified_base 14: mod_base = OTHER; note = 2'-O-methylguanosine-3'-phosphate
  modified_base 15: mod_base = OTHER; note = 2'-O-methylguanosine-3'-phosphate
  modified_base 16: mod_base = OTHER; note = 2'-O-methylguanosine-3'-phosphate
  modified_base 17: mod_base = OTHER; note = 2'-O-methylguanosine-3'-phosphate
  modified_base 18: mod_base = OTHER; note = 2'-O-methyladenosine-3'-phosphate
  modified_base 19: mod_base = OTHER; note = 2'-O-methylcytidine-3'-phosphate
  modified_base 20: mod_base = OTHER; note = 2'-O-methylguanosine-3'-phosphate
  modified_base 21: mod_base = OTHER; note = 2'-O-methyladenosine-3'-phosphate
tgaacaacttggaggggacga

SEQ ID NO: 501 - RNA, 19 nt, synthetic construct
  source 1..19: mol_type = other RNA
  modified_base 1: mod_base = OTHER; note = 2'-O-methyladenosine-3'-phosphate
  modified_base 2: mod_base = OTHER; note = 2'-O-methyladenosine-3'-phosphate
  modified_base 4: mod_base = OTHER; note = 2'-O-methyladenosine-3'-phosphate
  modified_base 5: mod_base = OTHER; note = 2'-O-methyladenosine-3'-phosphate
  modified_base 6: mod_base = OTHER; note = 2'-O-methylcytidine-3'-phosphate
  modified_base 10: mod_base = OTHER; note = 2'-O-methylguanosine-3'-phosphate
  modified_base 11: mod_base = OTHER; note = 2'-O-methyladenosine-3'-phosphate
  modified_base 13: mod_base = OTHER; note = 2'-O-methylguanosine-3'-phosphate
  modified_base 14: mod_base = OTHER; note = 2'-O-methylguanosine-3'-phosphate
  modified_base 15: mod_base = OTHER; note = 2'-O-methylguanosine-3'-phosphate
  modified_base 16: mod_base = OTHER; note = 2'-O-methyladenosine-3'-phosphate
  modified_base 18: mod_base = OTHER; note = 2'-O-methylguanosine-3'-phosphorothioate
  modified_base 19: mod_base = OTHER; note = 2'-O-methyladenosine-3'-phosphate
aacaacttggaggggacga

SEQ ID NO: 502 - RNA, 21 nt, synthetic construct
  source 1..21: mol_type = other RNA
  modified_base 1: mod_base = OTHER; note = 2'-O-methyluridine-3'-phosphate
  modified_base 2: mod_base = OTHER; note = 2'-O-methylguanosine-3'-phosphate
  modified_base 3: mod_base = OTHER; note = 2'-O-methyladenosine-3'-phosphate
  modified_base 4: mod_base = OTHER; note = 2'-O-methyladenosine-3'-phosphate
  modified_base 6: mod_base = OTHER; note = 2'-O-methyladenosine-3'-phosphate
  modified_base 7: mod_base = OTHER; note = 2'-O-methyladenosine-3'-phosphate
  modified_base 8: mod_base = OTHER; note = 2'-O-methylcytidine-3'-phosphate
  modified_base 12: mod_base = OTHER; note = 2'-O-methylguanosine-3'-phosphate
  modified_base 13: mod_base = OTHER; note = 2'-O-methyladenosine-3'-phosphate
  modified_base 14: mod_base = OTHER; note = 2'-O-methylguanosine-3'-phosphate
  modified_base 15: mod_base = OTHER; note = 2'-O-methylguanosine-3'-phosphate
  modified_base 16: mod_base = OTHER; note = 2'-O-methylguanosine-3'-phosphate
  modified_base 17: mod_base = OTHER; note = 2'-O-methylguanosine-3'-phosphate
  modified_base 18: mod_base = OTHER; note = 2'-O-methyladenosine-3'-phosphate
  modified_base 20: mod_base = OTHER; note = 2'-O-methylguanosine-3'-phosphorothioate
  modified_base 21: mod_base = OTHER; note = 2'-O-methyladenosine-3'-phosphate
tgaacaacttggaggggacga

SEQ ID NO: 503 - RNA, 21 nt, synthetic construct
  source 1..21: mol_type = other RNA
  modified_base 1: mod_base = OTHER; note = 2'-O-methyladenosine-3'-phosphorothioate
  modified_base 2: mod_base = OTHER; note = 2'-O-methyladenosine-3'-phosphorothioate
  modified_base 3: mod_base = OTHER; note = 2'-O-methylcytidine-3'-phosphate
  modified_base 4: mod_base = OTHER; note = 2'-O-methyladenosine-3'-phosphate
  modified_base 5: mod_base = OTHER; note = 2'-O-methyladenosine-3'-phosphate
  modified_base 6: mod_base = OTHER; note = 2'-O-methylcytidine-3'-phosphate
  modified_base 7: mod_base = OTHER; note = 2'-fluorouridine-3'-phosphate
  modified_base 8: mod_base = OTHER; note = 2'-O-methyluridine-3'-phosphate
  modified_base 9: mod_base = OTHER; note = 2'-fluoroguanosine-3'-phosphate
  modified_base 10: mod_base = OTHER; note = 2'-fluoroguanosine-3'-phosphate
  modified_base 11: mod_base = OTHER; note = 2'-fluoroadenosine-3'-phosphate
  modified_base 12: mod_base = OTHER; note = 2'-O-methylguanosine-3'-phosphate
  modified_base 13: mod_base = OTHER; note = 2'-O-methylguanosine-3'-phosphate
  modified_base 14: mod_base = OTHER; note = 2'-O-methylguanosine-3'-phosphate
  modified_base 15: mod_base = OTHER; note = 2'-O-methylguanosine-3'-phosphate
  modified_base 16: mod_base = OTHER; note = 2'-O-methyladenosine-3'-phosphate
  modified_base 17: mod_base = OTHER; note = 2'-O-methylcytidine-3'-phosphate
  modified_base 18: mod_base = OTHER; note = 2'-O-methylguanosine-3'-phosphate
  modified_base 19: mod_base = OTHER; note = 2'-O-methyluridine-3'-phosphate
  modified_base 20: mod_base = OTHER; note = 2'-O-methyluridine-3'-phosphate
  modified_base 21: mod_base = OTHER; note = 2'-O-methyladenosine-3'-phosphate
aacaacttggaggggacgtta

SEQ ID NO: 504 - RNA, 19 nt, synthetic construct
  source 1..19: mol_type = other RNA
  modified_base 1: mod_base = OTHER; note = 2'-O-methylcytidine-3'-phosphate
  modified_base 2: mod_base = OTHER; note = 2'-O-methyladenosine-3'-phosphate
  modified_base 4: mod_base = OTHER; note = 2'-O-methylcytidine-3'-phosphate
  modified_base 5: mod_base = OTHER; note = 2'-O-methyluridine-3'-phosphate
  modified_base 6: mod_base = OTHER; note = 2'-O-methyluridine-3'-phosphate
  modified_base 10: mod_base = OTHER; note = 2'-O-methylguanosine-3'-phosphate
  modified_base 11: mod_base = OTHER; note = 2'-O-methylguanosine-3'-phosphate
  modified_base 13: mod_base = OTHER; note = 2'-O-methylguanosine-3'-phosphate
  modified_base 14: mod_base = OTHER; note = 2'-O-methyladenosine-3'-phosphate
  modified_base 15: mod_base = OTHER; note = 2'-O-methylcytidine-3'-phosphate
  modified_base 16: mod_base = OTHER; note = 2'-O-methylguanosine-3'-phosphate
  modified_base 18: mod_base = OTHER; note = 2'-O-methyluridine-3'-phosphorothioate
  modified_base 19: mod_base = OTHER; note = 2'-O-methyladenosine-3'-phosphate
caacttggaggggacgtta

SEQ ID NO: 505 - RNA, 21 nt, synthetic construct
  source 1..21: mol_type = other RNA
  modified_base 1: mod_base = OTHER; note = 2'-O-methyladenosine-3'-phosphate
  modified_base 2: mod_base = OTHER; note = 2'-O-methyladenosine-3'-phosphate
  modified_base 3: mod_base = OTHER; note = 2'-O-methylcytidine-3'-phosphate
  modified_base 4: mod_base = OTHER; note = 2'-O-methyladenosine-3'-phosphate
  modified_base 6: mod_base = OTHER; note = 2'-O-methylcytidine-3'-phosphate
  modified_base 7: mod_base = OTHER; note = 2'-O-methyluridine-3'-phosphate
  modified_base 8: mod_base = OTHER; note = 2'-O-methyluridine-3'-phosphate
  modified_base 12: mod_base = OTHER; note = 2'-O-methylguanosine-3'-phosphate
  modified_base 13: mod_base = OTHER; note = 2'-O-methylguanosine-3'-phosphate
  modified_base 14: mod_base = OTHER; note = 2'-O-methylguanosine-3'-phosphate
  modified_base 15: mod_base = OTHER; note = 2'-O-methylguanosine-3'-phosphate
  modified_base 16: mod_base = OTHER; note = 2'-O-methyladenosine-3'-phosphate
  modified_base 17: mod_base = OTHER; note = 2'-O-methylcytidine-3'-phosphate
  modified_base 18: mod_base = OTHER; note = 2'-O-methylguanosine-3'-phosphate
  modified_base 20: mod_base = OTHER; note = 2'-O-methyluridine-3'-phosphorothioate
  modified_base 21: mod_base = OTHER; note = 2'-O-methyladenosine-3'-phosphate
aacaacttggaggggacgtta

SEQ ID NO: 506 - RNA, 21 nt, synthetic construct
  source 1..21: mol_type = other RNA
  modified_base 1: mod_base = OTHER; note = 2'-O-methylguanosine-3'-phosphorothioate
  modified_base 2: mod_base = OTHER; note = 2'-O-methylguanosine-3'-phosphorothioate
  modified_base 3: mod_base = OTHER; note = 2'-O-methyladenosine-3'-phosphate
  modified_base 4: mod_base = OTHER; note = 2'-O-methylcytidine-3'-phosphate
  modified_base 5: mod_base = OTHER; note = 2'-O-methylguanosine-3'-phosphate
  modified_base 6: mod_base = OTHER; note = 2'-O-methyluridine-3'-phosphate
  modified_base 7: mod_base = OTHER; note = 2'-fluorouridine-3'-phosphate
  modified_base 8: mod_base = OTHER; note = 2'-O-methylguanosine-3'-phosphate
  modified_base 9: mod_base = OTHER; note = 2'-fluoroadenosine-3'-phosphate
  modified_base 10: mod_base = OTHER; note = 2'-fluoroguanosine-3'-phosphate
  modified_base 11: mod_base = OTHER; note = 2'-fluorouridine-3'-phosphate
  modified_base 12: mod_base = OTHER; note = 2'-O-methylcytidine-3'-phosphate
  modified_base 13: mod_base = OTHER; note = 2'-O-methylcytidine-3'-phosphate
  modified_base 14: mod_base = OTHER; note = 2'-O-methyluridine-3'-phosphate
  modified_base 15: mod_base = OTHER; note = 2'-O-methyladenosine-3'-phosphate
  modified_base 16: mod_base = OTHER; note = 2'-O-methylcytidine-3'-phosphate
  modified_base 17: mod_base = OTHER; note = 2'-O-methylguanosine-3'-phosphate
  modified_base 18: mod_base = OTHER; note = 2'-O-methyladenosine-3'-phosphate
  modified_base 19: mod_base = OTHER; note = 2'-O-methyluridine-3'-phosphate
  modified_base 20: mod_base = OTHER; note = 2'-O-methyladenosine-3'-phosphate
  modified_base 21: mod_base = OTHER; note = 2'-O-methyladenosine-3'-phosphate
ggacgttgagtcctacgataa

SEQ ID NO: 507 - RNA, 21 nt, synthetic construct
  source 1..21: mol_type = other RNA
  modified_base 1: mod_base = OTHER; note = 2'-O-methylguanosine-3'-phosphate
  modified_base 2: mod_base = OTHER; note = 2'-O-methylguanosine-3'-phosphate
  modified_base 3: mod_base = OTHER; note = 2'-O-methyladenosine-3'-phosphate
  modified_base 4: mod_base = OTHER; note = 2'-O-methylcytidine-3'-phosphate
  modified_base 6: mod_base = OTHER; note = 2'-O-methyluridine-3'-phosphate
  modified_base 7: mod_base = OTHER; note = 2'-O-methyluridine-3'-phosphate
  modified_base 8: mod_base = OTHER; note = 2'-O-methylguanosine-3'-phosphate
  modified_base 12: mod_base = OTHER; note = 2'-O-methylcytidine-3'-phosphate
  modified_base 13: mod_base = OTHER; note = 2'-O-methylcytidine-3'-phosphate
  modified_base 14: mod_base = OTHER; note = 2'-O-methyluridine-3'-phosphate
  modified_base 15: mod_base = OTHER; note = 2'-O-methyladenosine-3'-phosphate
  modified_base 16: mod_base = OTHER; note = 2'-O-methylcytidine-3'-phosphate
  modified_base 17: mod_base = OTHER; note = 2'-O-methylguanosine-3'-phosphate
  modified_base 18: mod_base = OTHER; note = 2'-O-methyladenosine-3'-phosphate
  modified_base 20: mod_base = OTHER; note = 2'-O-methyladenosine-3'-phosphorothioate
  modified_base 21: mod_base = OTHER; note = 2'-O-methyladenosine-3'-phosphate
ggacgttgagtcctacgataa

SEQ ID NO: 508 - RNA, 21 nt, synthetic construct
  source 1..21: mol_type = other RNA
  modified_base 1: mod_base = OTHER; note = 2'-O-methyladenosine-3'-phosphorothioate
  modified_base 2: mod_base = OTHER; note = 2'-O-methylcytidine-3'-phosphorothioate
  modified_base 3: mod_base = OTHER; note = 2'-O-methylguanosine-3'-phosphate
  modified_base 4: mod_base = OTHER; note = 2'-O-methyluridine-3'-phosphate
  modified_base 5: mod_base = OTHER; note = 2'-O-methyluridine-3'-phosphate
  modified_base 6: mod_base = OTHER; note = 2'-O-methylguanosine-3'-phosphate
  modified_base 7: mod_base = OTHER; note = 2'-fluoroadenosine-3'-phosphate
  modified_base 8: mod_base = OTHER; note = 2'-O-methylguanosine-3'-phosphate
  modified_base 9: mod_base = OTHER; note = 2'-fluorouridine-3'-phosphate
  modified_base 10: mod_base = OTHER; note = 2'-fluorocytidine-3'-phosphate
  modified_base 11: mod_base = OTHER; note = 2'-fluorocytidine-3'-phosphate
  modified_base 12: mod_base = OTHER; note = 2'-O-methyluridine-3'-phosphate
  modified_base 13: mod_base = OTHER; note = 2'-O-methyladenosine-3'-phosphate
  modified_base 14: mod_base = OTHER; note = 2'-O-methylcytidine-3'-phosphate
  modified_base 15: mod_base = OTHER; note = 2'-O-methylguanosine-3'-phosphate
  modified_base 16: mod_base = OTHER; note = 2'-O-methyladenosine-3'-phosphate
  modified_base 17: mod_base = OTHER; note = 2'-O-methyluridine-3'-phosphate
  modified_base 18: mod_base = OTHER; note = 2'-O-methyladenosine-3'-phosphate
  modified_base 19: mod_base = OTHER; note = 2'-O-methyladenosine-3'-phosphate
  modified_base 20: mod_base = OTHER; note = 2'-O-methylguanosine-3'-phosphate
  modified_base 21: mod_base = OTHER; note = 2'-O-methyladenosine-3'-phosphate
acgttgagtcctacgataaga

SEQ ID NO: 509 - RNA, 21 nt, synthetic construct
  source 1..21: mol_type = other RNA
  modified_base 1: mod_base = OTHER; note = 2'-O-methyladenosine-3'-phosphorothioate
  modified_base 2: mod_base = OTHER; note = 2'-O-methylguanosine-3'-phosphorothioate
  modified_base 3: mod_base = OTHER; note = 2'-O-methyluridine-3'-phosphate
  modified_base 4: mod_base = OTHER; note = 2'-O-methylcytidine-3'-phosphate
  modified_base 5: mod_base = OTHER; note = 2'-O-methylcytidine-3'-phosphate
  modified_base 6: mod_base = OTHER; note = 2'-O-methyluridine-3'-phosphate
  modified_base 7: mod_base = OTHER; note = 2'-fluoroadenosine-3'-phosphate
  modified_base 8: mod_base = OTHER; note = 2'-O-methylcytidine-3'-phosphate
  modified_base 9: mod_base = OTHER; note = 2'-fluoroguanosine-3'-phosphate
  modified_base 10: mod_base = OTHER; note = 2'-fluoroadenosine-3'-phosphate
  modified_base 11: mod_base = OTHER; note = 2'-fluorouridine-3'-phosphate
  modified_base 12: mod_base = OTHER; note = 2'-O-methyladenosine-3'-phosphate
  modified_base 13: mod_base = OTHER; note = 2'-O-methyladenosine-3'-phosphate
  modified_base 14: mod_base = OTHER; note = 2'-O-methylguanosine-3'-phosphate
  modified_base 15: mod_base = OTHER; note = 2'-O-methyladenosine-3'-phosphate
  modified_base 16: mod_base = OTHER; note = 2'-O-methyluridine-3'-phosphate
  modified_base 17: mod_base = OTHER; note = 2'-O-methylcytidine-3'-phosphate
  modified_base 18: mod_base = OTHER; note = 2'-O-methyladenosine-3'-phosphate
  modified_base 19: mod_base = OTHER; note = 2'-O-methylguanosine-3'-phosphate
  modified_base 20: mod_base = OTHER; note = 2'-O-methylguanosine-3'-phosphate
  modified_base 21: mod_base = OTHER; note = 2'-O-methyladenosine-3'-phosphate
agtcctacgataagatcagga

SEQ ID NO: 510 - RNA, 21 nt, synthetic construct
  source 1..21: mol_type = other RNA
  modified_base 1: mod_base = OTHER; note = 2'-O-methyluridine-3'-phosphorothioate
  modified_base 2: mod_base = OTHER; note = 2'-O-methylguanosine-3'-phosphorothioate
  modified_base 3: mod_base = OTHER; note = 2'-O-methyluridine-3'-phosphate
  modified_base 4: mod_base = OTHER; note = 2'-O-methylguanosine-3'-phosphate
  modified_base 5: mod_base = OTHER; note = 2'-O-methylcytidine-3'-phosphate
  modified_base 6: mod_base = OTHER; note = 2'-O-methyluridine-3'-phosphate
  modified_base 7: mod_base = OTHER; note = 2'-fluoroadenosine-3'-phosphate
  modified_base 8: mod_base = OTHER; note = 2'-O-methylcytidine-3'-phosphate
  modified_base 9: mod_base = OTHER; note = 2'-fluoroadenosine-3'-phosphate
  modified_base 10: mod_base = OTHER; note = 2'-fluoroadenosine-3'-phosphate
  modified_base 11: mod_base = OTHER; note = 2'-fluorocytidine-3'-phosphate
  modified_base 12: mod_base = OTHER; note = 2'-O-methyluridine-3'-phosphate
  modified_base 13: mod_base = OTHER; note = 2'-O-methyladenosine-3'-phosphate
  modified_base 14: mod_base = OTHER; note = 2'-O-methylcytidine-3'-phosphate
  modified_base 15: mod_base = OTHER; note = 2'-O-methyladenosine-3'-phosphate
  modified_base 16: mod_base = OTHER; note = 2'-O-methylguanosine-3'-phosphate
  modified_base 17: mod_base = OTHER; note = 2'-O-methylguanosine-3'-phosphate
  modified_base 18: mod_base = OTHER; note = 2'-O-methyladenosine-3'-phosphate
  modified_base 19: mod_base = OTHER; note = 2'-O-methyluridine-3'-phosphate
  modified_base 20: mod_base = OTHER; note = 2'-O-methylcytidine-3'-phosphate
  modified_base 21: mod_base = OTHER; note = 2'-O-methyladenosine-3'-phosphate
tgtgctacaactacaggatca

SEQ ID NO: 511 - RNA, 21 nt, synthetic construct
  source 1..21: mol_type = other RNA
  modified_base 1: mod_base = OTHER; note = 2'-O-methyladenosine-3'-phosphorothioate
  modified_base 2: mod_base = OTHER; note = 2'-O-methyladenosine-3'-phosphorothioate
  modified_base 3: mod_base = OTHER; note = 2'-O-methylcytidine-3'-phosphate
  modified_base 4: mod_base = OTHER; note = 2'-O-methyluridine-3'-phosphate
  modified_base 5: mod_base = OTHER; note = 2'-O-methyladenosine-3'-phosphate
  modified_base 6: mod_base = OTHER; note = 2'-O-methylcytidine-3'-phosphate
  modified_base 7: mod_base = OTHER; note = 2'-fluoroadenosine-3'-phosphate
  modified_base 8: mod_base = OTHER; note = 2'-O-methylguanosine-3'-phosphate
  modified_base 9: mod_base = OTHER; note = 2'-fluoroguanosine-3'-phosphate
  modified_base 10: mod_base = OTHER; note = 2'-fluoroadenosine-3'-phosphate
  modified_base 11: mod_base = OTHER; note = 2'-fluorouridine-3'-phosphate
  modified_base 12: mod_base = OTHER; note = 2'-O-methylcytidine-3'-phosphate
  modified_base 13: mod_base = OTHER; note = 2'-O-methylcytidine-3'-phosphate
  modified_base 14: mod_base = OTHER; note = 2'-O-methylguanosine-3'-phosphate
  modified_base 15: mod_base = OTHER; note = 2'-O-methylguanosine-3'-phosphate
  modified_base 16: mod_base = OTHER; note = 2'-O-methylguanosine-3'-phosphate
  modified_base 17: mod_base = OTHER; note = 2'-O-methyluridine-3'-phosphate
  modified_base 18: mod_base = OTHER; note = 2'-O-methylcytidine-3'-phosphate
  modified_base 19: mod_base = OTHER; note = 2'-O-methylcytidine-3'-phosphate
  modified_base 20: mod_base = OTHER; note = 2'-O-methyluridine-3'-phosphate
  modified_base 21: mod_base = OTHER; note = 2'-O-methyladenosine-3'-phosphate
aactacaggatccgggtccta

SEQ ID NO: 512 - RNA, 21 nt, synthetic construct
  source 1..21: mol_type = other RNA
  modified_base 1: mod_base = OTHER; note = 2'-O-methyladenosine-3'-phosphorothioate
  modified_base 2: mod_base = OTHER; note = 2'-O-methylguanosine-3'-phosphorothioate
  modified_base 3: mod_base = OTHER; note = 2'-O-methylcytidine-3'-phosphate
  modified_base 4: mod_base = OTHER; note = 2'-O-methyluridine-3'-phosphate
  modified_base 5: mod_base = OTHER; note = 2'-O-methylguanosine-3'-phosphate
  modified_base 6: mod_base = OTHER; note = 2'-O-methylcytidine-3'-phosphate
  modified_base 7: mod_base = OTHER; note = 2'-fluorocytidine-3'-phosphate
  modified_base 8: mod_base = OTHER; note = 2'-O-methyluridine-3'-phosphate
  modified_base 9: mod_base = OTHER; note = 2'-fluorouridine-3'-phosphate
  modified_base 10: mod_base = OTHER; note = 2'-fluoroadenosine-3'-phosphate
  modified_base 11: mod_base = OTHER; note = 2'-fluorocytidine-3'-phosphate
  modified_base 12: mod_base = OTHER; note = 2'-O-methyladenosine-3'-phosphate
  modified_base 13: mod_base = OTHER; note = 2'-O-methylguanosine-3'-phosphate
  modified_base 14: mod_base = OTHER; note = 2'-O-methylcytidine-3'-phosphate
  modified_base 15: mod_base = OTHER; note = 2'-O-methylcytidine-3'-phosphate
  modified_base 16: mod_base = OTHER; note = 2'-O-methylguanosine-3'-phosphate
  modified_base 17: mod_base = OTHER; note = 2'-O-methylcytidine-3'-phosphate
  modified_base 18: mod_base = OTHER; note = 2'-O-methyladenosine-3'-phosphate
  modified_base 19: mod_base = OTHER; note = 2'-O-methylcytidine-3'-phosphate
  modified_base 20: mod_base = OTHER; note = 2'-O-methyluridine-3'-phosphate
  modified_base 21: mod_base = OTHER; note = 2'-O-methyladenosine-3'-phosphate
agctgccttacagccgcacta

SEQ ID NO: 513 - RNA, 21 nt, synthetic construct
  source 1..21: mol_type = other RNA
  modified_base 1: mod_base = OTHER; note = 2'-O-methylcytidine-3'-phosphorothioate
  modified_base 2: mod_base = OTHER; note = 2'-O-methylguanosine-3'-phosphorothioate
  modified_base 3: mod_base = OTHER; note = 2'-O-methylcytidine-3'-phosphate
  modified_base 4: mod_base = OTHER; note = 2'-O-methyluridine-3'-phosphate
  modified_base 5: mod_base = OTHER; note = 2'-O-methylguanosine-3'-phosphate
  modified_base 6: mod_base = OTHER; note = 2'-O-methyladenosine-3'-phosphate
  modified_base 7: mod_base = OTHER; note = 2'-fluorocytidine-3'-phosphate
  modified_base 8: mod_base = OTHER; note = 2'-O-methylcytidine-3'-phosphate
  modified_base 9: mod_base = OTHER; note = 2'-fluoroadenosine-3'-phosphate
  modified_base 10: mod_base = OTHER; note = 2'-fluorocytidine-3'-phosphate
  modified_base 11: mod_base = OTHER; note = 2'-fluoroguanosine-3'-phosphate
  modified_base 12: mod_base = OTHER; note = 2'-O-methyladenosine-3'-phosphate
  modified_base 13: mod_base = OTHER; note = 2'-O-methylguanosine-3'-phosphate
  modified_base 14: mod_base = OTHER; note = 2'-O-methylcytidine-3'-phosphate
  modified_base 15: mod_base = OTHER; note = 2'-O-methylcytidine-3'-phosphate
  modified_base 16: mod_base = OTHER; note = 2'-O-methyluridine-3'-phosphate
  modified_base 17: mod_base = OTHER; note = 2'-O-methylguanosine-3'-phosphate
  modified_base 18: mod_base = OTHER; note = 2'-O-methylguanosine-3'-phosphate
  modified_base 19: mod_base = OTHER; note = 2'-O-methylcytidine-3'-phosphate
  modified_base 20: mod_base = OTHER; note = 2'-O-methylguanosine-3'-phosphate
  modified_base 21: mod_base = OTHER; note = 2'-O-methyladenosine-3'-phosphate
cgctgaccacgagcctggcga

SEQ ID NO: 514 - RNA, 19 nt, synthetic construct
  source 1..19: mol_type = other RNA
  modified_base 1: mod_base = OTHER; note = 2'-O-methylcytidine-3'-phosphate
  modified_base 2: mod_base = OTHER; note = 2'-O-methyluridine-3'-phosphate
  modified_base 4: mod_base = OTHER; note = 2'-O-methyladenosine-3'-phosphate
  modified_base 5: mod_base = OTHER; note = 2'-O-methylcytidine-3'-phosphate
  modified_base 6: mod_base = OTHER; note = 2'-O-methylcytidine-3'-phosphate
  modified_base 10: mod_base = OTHER; note = 2'-O-methyladenosine-3'-phosphate
  modified_base 11: mod_base = OTHER; note = 2'-O-methylguanosine-3'-phosphate
  modified_base 13: mod_base = OTHER; note = 2'-O-methylcytidine-3'-phosphate
  modified_base 14: mod_base = OTHER; note = 2'-O-methyluridine-3'-phosphate
  modified_base 15: mod_base = OTHER; note = 2'-O-methylguanosine-3'-phosphate
  modified_base 16: mod_base = OTHER; note = 2'-O-methylguanosine-3'-phosphate
  modified_base 18: mod_base = OTHER; note = 2'-O-methylguanosine-3'-phosphorothioate
  modified_base 19: mod_base = OTHER; note = 2'-O-methyladenosine-3'-phosphate
ctgaccacgagcctggcga

SEQ ID NO: 515 - RNA, 21 nt, synthetic construct
  source 1..21: mol_type = other RNA
  modified_base 1: mod_base = OTHER; note = 2'-O-methylcytidine-3'-phosphate
  modified_base 2: mod_base = OTHER; note = 2'-O-methylguanosine-3'-phosphate
  modified_base 3: mod_base = OTHER; note = 2'-O-methylcytidine-3'-phosphate
  modified_base 4: mod_base = OTHER; note = 2'-O-methyluridine-3'-phosphate
  modified_base 6: mod_base = OTHER; note = 2'-O-methyladenosine-3'-phosphate
  modified_base 7: mod_base = OTHER; note = 2'-O-methylcytidine-3'-phosphate
  modified_base 8: mod_base = OTHER; note = 2'-O-methylcytidine-3'-phosphate
  modified_base 12: mod_base = OTHER; note = 2'-O-methyladenosine-3'-phosphate
  modified_base 13: mod_base = OTHER; note = 2'-O-methylguanosine-3'-phosphate
  modified_base 14: mod_base = OTHER; note = 2'-O-methylcytidine-3'-phosphate
  modified_base 15: mod_base = OTHER; note = 2'-O-methylcytidine-3'-phosphate
  modified_base 16: mod_base = OTHER; note = 2'-O-methyluridine-3'-phosphate
  modified_base 17: mod_base = OTHER; note = 2'-O-methylguanosine-3'-phosphate
  modified_base 18: mod_base = OTHER; note = 2'-O-methylguanosine-3'-phosphate
  modified_base 20: mod_base = OTHER; note = 2'-O-methylguanosine-3'-phosphorothioate
  modified_base 21: mod_base = OTHER; note = 2'-O-methyladenosine-3'-phosphate
cgctgaccacgagcctggcga

SEQ ID NO: 516 - RNA, 21 nt, synthetic construct
  source 1..21: mol_type = other RNA
  modified_base 1: mod_base = OTHER; note = 2'-O-methylguanosine-3'-phosphorothioate
  modified_base 2: mod_base = OTHER; note = 2'-O-methyluridine-3'-phosphorothioate
  modified_base 3: mod_base = OTHER; note = 2'-O-methylguanosine-3'-phosphate
  modified_base 4: mod_base = OTHER; note = 2'-O-methylguanosine-3'-phosphate
  modified_base 5: mod_base = OTHER; note = 2'-O-methyladenosine-3'-phosphate
  modified_base 6: mod_base = OTHER; note = 2'-O-methylcytidine-3'-phosphate
  modified_base 7: mod_base = OTHER; note = 2'-fluoroadenosine-3'-phosphate
  modified_base 8: mod_base = OTHER; note = 2'-O-methylguanosine-3'-phosphate
  modified_base 9: mod_base = OTHER; note = 2'-fluoroadenosine-3'-phosphate
  modified_base 10: mod_base = OTHER; note = 2'-fluoroguanosine-3'-phosphate
  modified_base 11: mod_base = OTHER; note = 2'-fluorouridine-3'-phosphate
  modified_base 12: mod_base = OTHER; note = 2'-O-methylguanosine-3'-phosphate
  modified_base 13: mod_base = OTHER; note = 2'-O-methylguanosine-3'-phosphate
  modified_base 14: mod_base = OTHER; note = 2'-O-methyluridine-3'-phosphate
  modified_base 15: mod_base = OTHER; note = 2'-O-methyluridine-3'-phosphate
  modified_base 16: mod_base = OTHER; note = 2'-O-methyluridine-3'-phosphate
  modified_base 17: mod_base = OTHER; note = 2'-O-methylguanosine-3'-phosphate
  modified_base 18: mod_base = OTHER; note = 2'-O-methyladenosine-3'-phosphate
  modified_base 19: mod_base = OTHER; note = 2'-O-methylcytidine-3'-phosphate
  modified_base 20: mod_base = OTHER; note = 2'-O-methylguanosine-3'-phosphate
  modified_base 21: mod_base = OTHER; note = 2'-O-methyladenosine-3'-phosphate
gtggacagagtggtttgacga

SEQ ID NO: 517 - RNA, 21 nt, synthetic construct
  source 1..21: mol_type = other RNA
  modified_base 1: mod_base = OTHER; note = 2'-O-methylcytidine-3'-phosphorothioate
  modified_base 2: mod_base = OTHER; note = 2'-O-methylguanosine-3'-phosphorothioate
  modified_base 3: mod_base = OTHER; note = 2'-O-methylguanosine-3'-phosphate
  modified_base 4: mod_base = OTHER; note = 2'-O-methylguanosine-3'-phosphate
  modified_base 5: mod_base = OTHER; note = 2'-O-methyladenosine-3'-phosphate
  modified_base 6: mod_base = OTHER; note = 2'-O-methylguanosine-3'-phosphate
  modified_base 7: mod_base = OTHER; note = 2'-fluorouridine-3'-phosphate
  modified_base 8: mod_base = OTHER; note = 2'-O-methyluridine-3'-phosphate
  modified_base 9: mod_base = OTHER; note = 2'-fluoroguanosine-3'-phosphate
  modified_base 10: mod_base = OTHER; note = 2'-fluoroguanosine-3'-phosphate
  modified_base 11: mod_base = OTHER; note = 2'-fluoroguanosine-3'-phosphate
  modified_base 12: mod_base = OTHER; note = 2'-O-methylcytidine-3'-phosphate
  modified_base 13: mod_base = OTHER; note = 2'-O-methylcytidine-3'-phosphate
  modified_base 14: mod_base = OTHER; note = 2'-O-methyladenosine-3'-phosphate
  modified_base 15: mod_base = OTHER; note = 2'-O-methylguanosine-3'-phosphate
  modified_base 16: mod_base = OTHER; note = 2'-O-methylguanosine-3'-phosphate
  modified_base 17: mod_base = OTHER; note = 2'-O-methyluridine-3'-phosphate
  modified_base 18: mod_base = OTHER; note = 2'-O-methylcytidine-3'-phosphate
  modified_base 19: mod_base = OTHER; note = 2'-O-methylguanosine-3'-phosphate
  modified_base 20: mod_base = OTHER; note = 2'-O-methyluridine-3'-phosphate
  modified_base 21: mod_base = OTHER; note = 2'-O-methyladenosine-3'-phosphate
cgggagttgggccaggtcgta

SEQ ID NO: 518 - RNA, 21 nt, synthetic construct
  source 1..21: mol_type = other RNA
  modified_base 1: mod_base = OTHER; note = 2'-O-methylcytidine-3'-phosphorothioate
  modified_base 2: mod_base = OTHER; note = 2'-O-methyluridine-3'-phosphorothioate
  modified_base 3: mod_base = OTHER; note = 2'-O-methylguanosine-3'-phosphate
  modified_base 4: mod_base = OTHER; note = 2'-O-methyladenosine-3'-phosphate
  modified_base 5: mod_base = OTHER; note = 2'-O-methylcytidine-3'-phosphate
  modified_base 6: mod_base = OTHER; note = 2'-O-methylcytidine-3'-phosphate
  modified_base 7: mod_base = OTHER; note = 2'-fluorocytidine-3'-phosphate
  modified_base 8: mod_base = OTHER; note = 2'-O-methylcytidine-3'-phosphate
  modified_base 9: mod_base = OTHER; note = 2'-fluoroguanosine-3'-phosphate
  modified_base 10: mod_base = OTHER; note = 2'-fluorocytidine-3'-phosphate
  modified_base 11: mod_base = OTHER; note = 2'-fluorouridine-3'-phosphate
  modified_base 12: mod_base = OTHER; note = 2'-O-methylcytidine-3'-phosphate
  modified_base 13: mod_base = OTHER; note = 2'-O-methylcytidine-3'-phosphate
  modified_base 14: mod_base = OTHER; note = 2'-O-methyladenosine-3'-phosphate
  modified_base 15: mod_base = OTHER; note = 2'-O-methylguanosine-3'-phosphate
  modified_base 16: mod_base = OTHER; note = 2'-O-methyluridine-3'-phosphate
  modified_base 17: mod_base = OTHER; note = 2'-O-methyluridine-3'-phosphate
  modified_base 18: mod_base = OTHER; note = 2'-O-methyluridine-3'-phosphate
  modified_base 19: mod_base = OTHER; note = 2'-O-methylguanosine-3'-phosphate
  modified_base 20: mod_base = OTHER; note = 2'-O-methylguanosine-3'-phosphate
  modified_base 21: mod_base = OTHER; note = 2'-O-methyladenosine-3'-phosphate
ctgaccccgctccagtttgga

SEQ ID NO: 519 - RNA, 19 nt, synthetic construct
  source 1..19: mol_type = other RNA
  modified_base 1: mod_base = OTHER; note = 2'-O-methylguanosine-3'-phosphate
  modified_base 2: mod_base = OTHER; note = 2'-O-methyladenosine-3'-phosphate
  modified_base 4: mod_base = OTHER; note = 2'-O-methylcytidine-3'-phosphate
  modified_base 5: mod_base = OTHER; note = 2'-O-methylcytidine-3'-phosphate
  modified_base 6: mod_base = OTHER; note = 2'-O-methylcytidine-3'-phosphate
  modified_base 10: mod_base = OTHER; note = 2'-O-methylcytidine-3'-phosphate
  modified_base 11: mod_base = OTHER; note = 2'-O-methylcytidine-3'-phosphate
  modified_base 13: mod_base = OTHER; note = 2'-O-methylguanosine-3'-phosphate
  modified_base 14: mod_base = OTHER; note = 2'-O-methyluridine-3'-phosphate
  modified_base 15: mod_base = OTHER; note = 2'-O-methyluridine-3'-phosphate
  modified_base 16: mod_base = OTHER; note = 2'-O-methyluridine-3'-phosphate
  modified_base 18: mod_base = OTHER; note = 2'-O-methylguanosine-3'-phosphorothioate
  modified_base 19: mod_base = OTHER; note = 2'-O-methyladenosine-3'-phosphate
gaccccgctccagtttgga

SEQ ID NO: 520 - RNA, 21 nt, synthetic construct
  source 1..21: mol_type = other RNA
  modified_base 1: mod_base = OTHER; note = 2'-O-methylcytidine-3'-phosphate
  modified_base 2: mod_base = OTHER; note = 2'-O-methyluridine-3'-phosphate
  modified_base 3: mod_base = OTHER; note = 2'-O-methylguanosine-3'-phosphate
  modified_base 4: mod_base = OTHER; note = 2'-O-methyladenosine-3'-phosphate
  modified_base 6: mod_base = OTHER; note = 2'-O-methylcytidine-3'-phosphate
  modified_base 7: mod_base = OTHER; note = 2'-O-methylcytidine-3'-phosphate
  modified_base 8: mod_base = OTHER; note = 2'-O-methylcytidine-3'-phosphate
  modified_base 12: mod_base = OTHER; note = 2'-O-methylcytidine-3'-phosphate
  modified_base 13: mod_base = OTHER; note = 2'-O-methylcytidine-3'-phosphate
  modified_base 14: mod_base = OTHER; note = 2'-O-methyladenosine-3'-phosphate
  modified_base 15: mod_base = OTHER; note = 2'-O-methylguanosine-3'-phosphate
  modified_base 16: mod_base = OTHER; note = 2'-O-methyluridine-3'-phosphate
  modified_base 17: mod_base = OTHER; note = 2'-O-methyluridine-3'-phosphate
  modified_base 18: mod_base = OTHER; note = 2'-O-methyluridine-3'-phosphate
  modified_base 20: mod_base = OTHER; note = 2'-O-methylguanosine-3'-phosphorothioate
  modified_base 21: mod_base = OTHER; note = 2'-O-methyladenosine-3'-phosphate
ctgaccccgctccagtttgga

SEQ ID NO: 521 - RNA, 21 nt, synthetic construct
  source 1..21: mol_type = other RNA
  modified_base 1: mod_base = OTHER; note = 2'-O-methyladenosine-3'-phosphorothioate
  modified_base 2: mod_base = OTHER; note = 2'-O-methylcytidine-3'-phosphorothioate
  modified_base 3: mod_base = OTHER; note = 2'-O-methylcytidine-3'-phosphate
  modified_base 4: mod_base = OTHER; note = 2'-O-methylcytidine-3'-phosphate
  modified_base 5: mod_base = OTHER; note = 2'-O-methylcytidine-3'-phosphate
  modified_base 6: mod_base = OTHER; note = 2'-O-methylguanosine-3'-phosphate
  modified_base 7: mod_base = OTHER; note = 2'-fluorocytidine-3'-phosphate
  modified_base 8: mod_base = OTHER; note = 2'-O-methyluridine-3'-phosphate
  modified_base 9: mod_base = OTHER; note = 2'-fluorocytidine-3'-phosphate
  modified_base 10: mod_base = OTHER; note = 2'-fluorocytidine-3'-phosphate
  modified_base 11: mod_base = OTHER; note = 2'-fluoroadenosine-3'-phosphate
  modified_base 12: mod_base = OTHER; note = 2'-O-methylguanosine-3'-phosphate
  modified_base 13: mod_base = OTHER; note = 2'-O-methyluridine-3'-phosphate
  modified_base 14: mod_base = OTHER; note = 2'-O-methyluridine-3'-phosphate
  modified_base 15: mod_base = OTHER; note = 2'-O-methyluridine-3'-phosphate
  modified_base 16: mod_base = OTHER; note = 2'-O-methylguanosine-3'-phosphate
  modified_base 17: mod_base = OTHER; note = 2'-O-methylguanosine-3'-phosphate
  modified_base 18: mod_base = OTHER; note = 2'-O-methylguanosine-3'-phosphate
  modified_base 19: mod_base = OTHER; note = 2'-O-methyladenosine-3'-phosphate
  modified_base 20: mod_base = OTHER; note = 2'-O-methyladenosine-3'-phosphate
  modified_base 21: mod_base = OTHER; note = 2'-O-methyladenosine-3'-phosphate
accccgctccagtttgggaaa

SEQ ID NO: 522 - RNA, 19 nt, synthetic construct
  source 1..19: mol_type = other RNA
  modified_base 1: mod_base = OTHER; note = 2'-O-methylcytidine-3'-phosphate
  modified_base 2: mod_base = OTHER; note = 2'-O-methylcytidine-3'-phosphate
  modified_base 4: mod_base = OTHER; note = 2'-O-methylguanosine-3'-phosphate
  modified_base 5: mod_base = OTHER; note = 2'-O-methylcytidine-3'-phosphate
  modified_base 6: mod_base = OTHER; note = 2'-O-methyluridine-3'-phosphate
  modified_base 10: mod_base = OTHER; note = 2'-O-methylguanosine-3'-phosphate
  modified_base 11: mod_base = OTHER; note = 2'-O-methyluridine-3'-phosphate
  modified_base 13: mod_base = OTHER; note = 2'-O-methyluridine-3'-phosphate
  modified_base 14: mod_base = OTHER; note = 2'-O-methylguanosine-3'-phosphate
  modified_base 15: mod_base = OTHER; note = 2'-O-methylguanosine-3'-phosphate
  modified_base 16: mod_base = OTHER; note = 2'-O-methylguanosine-3'-phosphate
  modified_base 18: mod_base = OTHER; note = 2'-O-methyladenosine-3'-phosphorothioate
  modified_base 19: mod_base = OTHER; note = 2'-O-methyladenosine-3'-phosphate
cccgctccagtttgggaaa

SEQ ID NO: 523 - RNA, 21 nt, synthetic construct
  source 1..21: mol_type = other RNA
  modified_base 1: mod_base = OTHER; note = 2'-O-methyladenosine-3'-phosphate
  modified_base 2: mod_base = OTHER; note = 2'-O-methylcytidine-3'-phosphate
  modified_base 3: mod_base = OTHER; note = 2'-O-methylcytidine-3'-phosphate
  modified_base 4: mod_base = OTHER; note = 2'-O-methylcytidine-3'-phosphate
  modified_base 6: mod_base = OTHER; note = 2'-O-methylguanosine-3'-phosphate
  modified_base 7: mod_base = OTHER; note = 2'-O-methylcytidine-3'-phosphate
  modified_base 8: mod_base = OTHER; note = 2'-O-methyluridine-3'-phosphate
  modified_base 12: mod_base = OTHER; note = 2'-O-methylguanosine-3'-phosphate
  modified_base 13: mod_base = OTHER; note = 2'-O-methyluridine-3'-phosphate
  modified_base 14: mod_base = OTHER; note = 2'-O-methyluridine-3'-phosphate
  modified_base 15: mod_base = OTHER; note = 2'-O-methyluridine-3'-phosphate
  modified_base 16: mod_base = OTHER; note = 2'-O-methylguanosine-3'-phosphate
  modified_base 17: mod_base = OTHER; note = 2'-O-methylguanosine-3'-phosphate
  modified_base 18: mod_base = OTHER; note = 2'-O-methylguanosine-3'-phosphate
  modified_base 20: mod_base = OTHER; note = 2'-O-methyladenosine-3'-phosphorothioate
  modified_base 21: mod_base = OTHER; note = 2'-O-methyladenosine-3'-phosphate
accccgctccagtttgggaaa

SEQ ID NO: 524 - RNA, 21 nt, synthetic construct
  source 1..21: mol_type = other RNA
  modified_base 1: mod_base = OTHER; note = 2'-O-methylcytidine-3'-phosphorothioate
  modified_base 2: mod_base = OTHER; note = 2'-O-methylcytidine-3'-phosphorothioate
  modified_base 3: mod_base = OTHER; note = 2'-O-methyluridine-3'-phosphate
  modified_base 4: mod_base = OTHER; note = 2'-O-methyluridine-3'-phosphate
  modified_base 5: mod_base = OTHER; note = 2'-O-methyluridine-3'-phosphate
  modified_base 6: mod_base = OTHER; note = 2'-O-methylguanosine-3'-phosphate
  modified_base 7: mod_base = OTHER; note = 2'-fluorouridine-3'-phosphate
  modified_base 8: mod_base = OTHER; note = 2'-O-methylguanosine-3'-phosphate
  modified_base 9: mod_base = OTHER; note = 2'-fluoroguanosine-3'-phosphate
  modified_base 10: mod_base = OTHER; note = 2'-fluoroadenosine-3'-phosphate
  modified_base 11: mod_base = OTHER; note = 2'-fluoroadenosine-3'-phosphate
  modified_base 12: mod_base = OTHER; note = 2'-O-methyluridine-3'-phosphate
  modified_base 13: mod_base = OTHER; note = 2'-O-methyladenosine-3'-phosphate
  modified_base 14: mod_base = OTHER; note = 2'-O-methylcytidine-3'-phosphate
  modified_base 15: mod_base = OTHER; note = 2'-O-methyluridine-3'-phosphate
  modified_base 16: mod_base = OTHER; note = 2'-O-methylcytidine-3'-phosphate
  modified_base 17: mod_base = OTHER; note = 2'-O-methyladenosine-3'-phosphate
  modified_base 18: mod_base = OTHER; note = 2'-O-methylcytidine-3'-phosphate
  modified_base 19: mod_base = OTHER; note = 2'-O-methylguanosine-3'-phosphate
  modified_base 20: mod_base = OTHER; note = 2'-O-methylcytidine-3'-phosphate
  modified_base 21: mod_base = OTHER; note = 2'-O-methyladenosine-3'-phosphate
cctttgtggaatactcacgca

SEQ ID NO: 525 - RNA, 19 nt, synthetic construct
  source 1..19: mol_type = other RNA
  modified_base 1: mod_base = OTHER; note = 2'-O-methyluridine-3'-phosphate
  modified_base 2: mod_base = OTHER; note = 2'-O-methyluridine-3'-phosphate
  modified_base 4: mod_base = OTHER; note = 2'-O-methylguanosine-3'-phosphate
  modified_base 5: mod_base = OTHER; note = 2'-O-methyluridine-3'-phosphate
  modified_base 6: mod_base = OTHER; note = 2'-O-methylguanosine-3'-phosphate
  modified_base 10: mod_base = OTHER; note = 2'-O-methyluridine-3'-phosphate
  modified_base 11: mod_base = OTHER; note = 2'-O-methyladenosine-3'-phosphate
  modified_base 13: mod_base = OTHER; note = 2'-O-methyluridine-3'-phosphate
  modified_base 14: mod_base = OTHER; note = 2'-O-methylcytidine-3'-phosphate
  modified_base 15: mod_base = OTHER; note = 2'-O-methyladenosine-3'-phosphate
  modified_base 16: mod_base = OTHER; note = 2'-O-methylcytidine-3'-phosphate
  modified_base 18: mod_base = OTHER; note = 2'-O-methylcytidine-3'-phosphorothioate
  modified_base 19: mod_base = OTHER; note = 2'-O-methyladenosine-3'-phosphate
tttgtggaatactcacgca

SEQ ID NO: 526 - RNA, 21 nt, synthetic construct
  source 1..21: mol_type = other RNA
  modified_base 1: mod_base = OTHER; note = 2'-O-methylcytidine-3'-phosphate
  modified_base 2: mod_base = OTHER; note = 2'-O-methylcytidine-3'-phosphate
  modified_base 3: mod_base = OTHER; note = 2'-O-methyluridine-3'-phosphate
  modified_base 4: mod_base = OTHER; note = 2'-O-methyluridine-3'-phosphate
  modified_base 6: mod_base = OTHER; note = 2'-O-methylguanosine-3'-phosphate
  modified_base 7: mod_base = OTHER; note = 2'-O-methyluridine-3'-phosphate
  modified_base 8: mod_base = OTHER; note = 2'-O-methylguanosine-3'-phosphate
  modified_base 12: mod_base = OTHER; note = 2'-O-methyluridine-3'-phosphate
  modified_base 13: mod_base = OTHER; note = 2'-O-methyladenosine-3'-phosphate
  modified_base 14: mod_base = OTHER; note = 2'-O-methylcytidine-3'-phosphate
  modified_base 15: mod_base = OTHER; note = 2'-O-methyluridine-3'-phosphate
  modified_base 16: mod_base = OTHER; note = 2'-O-methylcytidine-3'-phosphate
  modified_base 17: mod_base = OTHER; note = 2'-O-methyladenosine-3'-phosphate
  modified_base 18: mod_base = OTHER; note = 2'-O-methylcytidine-3'-phosphate
  modified_base 20: mod_base = OTHER; note = 2'-O-methylcytidine-3'-phosphorothioate
  modified_base 21: mod_base = OTHER; note = 2'-O-methyladenosine-3'-phosphate
cctttgtggaatactcacgca

SEQ ID NO: 527 - RNA, 21 nt, synthetic construct
  source 1..21: mol_type = other RNA
  modified_base 1: mod_base = OTHER; note = 2'-O-methyluridine-3'-phosphorothioate
  modified_base 2: mod_base = OTHER; note = 2'-O-methyluridine-3'-phosphorothioate
  modified_base 3: mod_base = OTHER; note = 2'-O-methyluridine-3'-phosphate
  modified_base 4: mod_base = OTHER; note = 2'-O-methylguanosine-3'-phosphate
  modified_base 5: mod_base = OTHER; note = 2'-O-methyluridine-3'-phosphate
  modified_base 6: mod_base = OTHER; note = 2'-O-methylguanosine-3'-phosphate
  modified_base 7: mod_base = OTHER; note = 2'-fluoroguanosine-3'-phosphate
  modified_base 8: mod_base = OTHER; note = 2'-O-methyladenosine-3'-phosphate
  modified_base 9: mod_base = OTHER; note = 2'-fluoroadenosine-3'-phosphate
  modified_base 10: mod_base = OTHER; note = 2'-fluorouridine-3'-phosphate
  modified_base 11: mod_base = OTHER; note = 2'-fluoroadenosine-3'-phosphate
  modified_base 12: mod_base = OTHER; note = 2'-O-methylcytidine-3'-phosphate
  modified_base 13: mod_base = OTHER; note = 2'-O-methyluridine-3'-phosphate
  modified_base 14: mod_base = OTHER; note = 2'-O-methylcytidine-3'-phosphate
  modified_base 15: mod_base = OTHER; note = 2'-O-methyladenosine-3'-phosphate
  modified_base 16: mod_base = OTHER; note = 2'-O-methylcytidine-3'-phosphate
  modified_base 17: mod_base = OTHER; note = 2'-O-methylguanosine-3'-phosphate
  modified_base 18: mod_base = OTHER; note = 2'-O-methylcytidine-3'-phosphate
  modified_base 19: mod_base = OTHER; note = 2'-O-methylcytidine-3'-phosphate
  modified_base 20: mod_base = OTHER; note = 2'-O-methyladenosine-3'-phosphate
  modified_base 21: mod_base = OTHER; note = 2'-O-methyladenosine-3'-phosphate
tttgtggaatactcacgccaa

SEQ ID NO: 528 - RNA, 21 nt, synthetic construct
  source 1..21: mol_type = other RNA
  modified_base 1: mod_base = OTHER; note = 2'-O-methyluridine-3'-phosphorothioate
  modified_base 2: mod_base = OTHER; note = 2'-O-methylguanosine-3'-phosphorothioate
  modified_base 3: mod_base = OTHER; note = 2'-O-methylguanosine-3'-phosphate
  modified_base 4: mod_base = OTHER; note = 2'-O-methyladenosine-3'-phosphate
  modified_base 5: mod_base = OTHER; note = 2'-O-methyladenosine-3'-phosphate
  modified_base 6: mod_base = OTHER; note = 2'-O-methyluridine-3'-phosphate
  modified_base 7: mod_base = OTHER; note = 2'-fluoroadenosine-3'-phosphate
  modified_base 8: mod_base = OTHER; note = 2'-O-methylcytidine-3'-phosphate
  modified_base 9: mod_base = OTHER; note = 2'-fluorouridine-3'-phosphate
  modified_base 10: mod_base = OTHER; note = 2'-fluorocytidine-3'-phosphate
  modified_base 11: mod_base = OTHER; note = 2'-fluoroadenosine-3'-phosphate
  modified_base 12: mod_base = OTHER; note = 2'-O-methylcytidine-3'-phosphate
  modified_base 13: mod_base = OTHER; note = 2'-O-methylguanosine-3'-phosphate
  modified_base 14: mod_base = OTHER; note = 2'-O-methylcytidine-3'-phosphate
  modified_base 15: mod_base = OTHER; note = 2'-O-methylcytidine-3'-phosphate
  modified_base 16: mod_base = OTHER; note = 2'-O-methyladenosine-3'-phosphate
  modified_base 17: mod_base = OTHER; note = 2'-O-methylguanosine-3'-phosphate
  modified_base 18: mod_base = OTHER; note = 2'-O-methyluridine-3'-phosphate
  modified_base 19: mod_base = OTHER; note = 2'-O-methylguanosine-3'-phosphate
  modified_base 20: mod_base = OTHER; note = 2'-O-methylcytidine-3'-phosphate
  modified_base 21: mod_base = OTHER; note = 2'-O-methyladenosine-3'-phosphate
tggaatactcacgccagtgca

SEQ ID NO: 529 - RNA, 21 nt, synthetic construct
  source 1..21: mol_type = other RNA
  modified_base 1: mod_base = OTHER; note = 2'-O-methyladenosine-3'-phosphorothioate
  modified_base 2: mod_base = OTHER; note = 2'-O-methylcytidine-3'-phosphorothioate
  modified_base 3: mod_base = OTHER; note = 2'-O-methyluridine-3'-phosphate
  modified_base 4: mod_base = OTHER; note = 2'-O-methylcytidine-3'-phosphate
  modified_base 5: mod_base = OTHER; note = 2'-O-methyladenosine-3'-phosphate
  modified_base 6: mod_base = OTHER; note = 2'-O-methylcytidine-3'-phosphate
  modified_base 7: mod_base = OTHER; note = 2'-fluoroguanosine-3'-phosphate
  modified_base 8: mod_base = OTHER; note = 2'-O-methylcytidine-3'-phosphate
  modified_base 9: mod_base = OTHER; note = 2'-fluorocytidine-3'-phosphate
  modified_base 10: mod_base = OTHER; note = 2'-fluoroadenosine-3'-phosphate
  modified_base 11: mod_base = OTHER; note = 2'-fluoroguanosine-3'-phosphate
  modified_base 12: mod_base = OTHER; note = 2'-O-methyluridine-3'-phosphate
  modified_base 13: mod_base = OTHER; note = 2'-O-methylguanosine-3'-phosphate
  modified_base 14: mod_base = OTHER; note = 2'-O-methylcytidine-3'-phosphate
  modified_base 15: mod_base = OTHER; note = 2'-O-methylguanosine-3'-phosphate
  modified_base 16: mod_base = OTHER; note = 2'-O-methylcytidine-3'-phosphate
  modified_base 17: mod_base = OTHER; note = 2'-O-methylcytidine-3'-phosphate
  modified_base 18: mod_base = OTHER; note = 2'-O-methylcytidine-3'-phosphate
  modified_base 19: mod_base = OTHER; note = 2'-O-methyladenosine-3'-phosphate
  modified_base 20: mod_base = OTHER; note = 2'-O-methylcytidine-3'-phosphate
  modified_base 21: mod_base = OTHER; note = 2'-O-methyladenosine-3'-phosphate
actcacgccagtgcgcccaca

SEQ ID NO: 530 - RNA, 19 nt, synthetic construct
  source 1..19: mol_type = other RNA
  modified_base 1: mod_base = OTHER; note = 2'-O-methyluridine-3'-phosphate
  modified_base 2: mod_base = OTHER; note = 2'-O-methylcytidine-3'-phosphate
  modified_base 4: mod_base = OTHER; note = 2'-O-methylcytidine-3'-phosphate
  modified_base 5: mod_base = OTHER; note = 2'-O-methylguanosine-3'-phosphate
  modified_base 6: mod_base = OTHER; note = 2'-O-methylcytidine-3'-phosphate
  modified_base 10: mod_base = OTHER; note = 2'-O-methyluridine-3'-phosphate
  modified_base 11: mod_base = OTHER; note = 2'-O-methylguanosine-3'-phosphate
  modified_base 13: mod_base = OTHER; note = 2'-O-methylguanosine-3'-phosphate
  modified_base 14: mod_base = OTHER; note = 2'-O-methylcytidine-3'-phosphate
  modified_base 15: mod_base = OTHER; note = 2'-O-methylcytidine-3'-phosphate
  modified_base 16: mod_base = OTHER; note = 2'-O-methylcytidine-3'-phosphate
  modified_base 18: mod_base = OTHER; note = 2'-O-methylcytidine-3'-phosphorothioate
  modified_base 19: mod_base = OTHER; note = 2'-O-methyladenosine-3'-phosphate
tcacgccagtgcgcccaca

SEQ ID NO: 531 - RNA, 21 nt, synthetic construct
  source 1..21: mol_type = other RNA
  modified_base 1: mod_base = OTHER; note = 2'-O-methyladenosine-3'-phosphate
  modified_base 2: mod_base = OTHER; note = 2'-O-methylcytidine-3'-phosphate
  modified_base 3: mod_base = OTHER; note = 2'-O-methyluridine-3'-phosphate
  modified_base 4: mod_base = OTHER; note = 2'-O-methylcytidine-3'-phosphate
  modified_base 6: mod_base = OTHER; note = 2'-O-methylcytidine-3'-phosphate
  modified_base 7: mod_base = OTHER; note = 2'-O-methylguanosine-3'-phosphate
  modified_base 8: mod_base = OTHER; note = 2'-O-methylcytidine-3'-phosphate
  modified_base 12: mod_base = OTHER; note = 2'-O-methyluridine-3'-phosphate
  modified_base 13: mod_base = OTHER; note = 2'-O-methylguanosine-3'-phosphate
  modified_base 14: mod_base = OTHER; note = 2'-O-methylcytidine-3'-phosphate
  modified_base 15: mod_base = OTHER; note = 2'-O-methylguanosine-3'-phosphate
  modified_base 16: mod_base = OTHER; note = 2'-O-methylcytidine-3'-phosphate
  modified_base 17: mod_base = OTHER; note = 2'-O-methylcytidine-3'-phosphate
  modified_base 18: mod_base = OTHER; note = 2'-O-methylcytidine-3'-phosphate
  modified_base 20: mod_base = OTHER; note = 2'-O-methylcytidine-3'-phosphorothioate
  modified_base 21: mod_base = OTHER; note = 2'-O-methyladenosine-3'-phosphate
actcacgccagtgcgcccaca

SEQ ID NO: 532 - DNA, 23 bp, synthetic construct
  source 1..23: mol_type = other DNA
  modified_base 13: mod_base = OTHER; note = 2'-O-methyladenosine-3'-phosphate
  modified_base 22: mod_base = OTHER; note = 2'-O-methylcytidine-3'-phosphorothioate
  modified_base 23: mod_base = OTHER; note = 2'-O-methyladenosine-3'-phosphate
  misc_feature 1: note = DNA
  misc_feature 2..23: note = RNA
ttcttggacagaacgtagctgca

SEQ ID NO: 533 - RNA, 23 nt, synthetic construct
  source 1..23: mol_type = other RNA
  modified_base 1: mod_base = OTHER; note = 2'-O-methyluridine-3'-phosphorothioate
  modified_base 2: mod_base = OTHER; note = 2'-fluoroadenosine-3'-phosphorothioate
  modified_base 3: mod_base = OTHER; note = 2'-O-methylcytidine-3'-phosphate
  modified_base 4: mod_base = OTHER; note = 2'-O-methylcytidine-3'-phosphate
  modified_base 5: mod_base = OTHER; note = 2'-O-methylguanosine-3'-phosphate
  modified_base 6: mod_base = OTHER; note = 2'-fluoroguanosine-3'-phosphate
  modified_base 7: mod_base = OTHER; note = 2'-O-methyladenosine-3'-phosphate
  modified_base 8: mod_base = OTHER; note = 2'-O-methyladenosine-3'-phosphate
  modified_base 9: mod_base = OTHER; note = 2'-O-methyluridine-3'-phosphate
  modified_base 10: mod_base = OTHER; note = 2'-O-methyluridine-3'-phosphate
  modified_base 11: mod_base = OTHER; note = 2'-O-methyluridine-3'-phosphate
  modified_base 12: mod_base = OTHER; note = 2'-O-methylguanosine-3'-phosphate
  modified_base 13: mod_base = OTHER; note = 2'-O-methylguanosine-3'-phosphate
  modified_base 14: mod_base = OTHER; note = 2'-fluorouridine-3'-phosphate
  modified_base 15: mod_base = OTHER; note = 2'-O-methylcytidine-3'-phosphate
  modified_base 16: mod_base = OTHER; note = 2'-fluoroadenosine-3'-phosphate
  modified_base 17: mod_base = OTHER; note = 2'-O-methyladenosine-3'-phosphate
  modified_base 18: mod_base = OTHER; note = 2'-O-methyladenosine-3'-phosphate
  modified_base 19: mod_base = OTHER; note = 2'-O-methylcytidine-3'-phosphate
  modified_base 20: mod_base = OTHER; note = 2'-O-methyladenosine-3'-phosphate
  modified_base 21: mod_base = OTHER; note = 2'-O-methylguanosine-3'-phosphorothioate
  modified_base 22: mod_base = OTHER; note = 2'-O-methylguanosine-3'-phosphorothioate
  modified_base 23: mod_base = OTHER; note = 2'-O-methyladenosine-3'-phosphate
taccggaatttggtcaaacagga

SEQ ID NO: 534 - RNA, 23 nt, synthetic construct
  source 1..23: mol_type = other RNA
  modified_base 1: mod_base = OTHER; note = 2'-O-methyluridine-3'-phosphorothioate
  modified_base 2: mod_base = OTHER; note = 2'-fluorocytidine-3'-phosphorothioate
  modified_base 3: mod_base = OTHER; note = 2'-O-methylguanosine-3'-phosphate
  modified_base 4: mod_base = OTHER; note = 2'-O-methylguanosine-3'-phosphate
  modified_base 5: mod_base = OTHER; note = 2'-O-methylguanosine-3'-phosphate
  modified_base 6: mod_base = OTHER; note = 2'-fluorouridine-3'-phosphate
  modified_base 7: mod_base = OTHER; note = 2'-O-methylguanosine-3'-phosphate
  modified_base 8: mod_base = OTHER; note = 2'-O-methylguanosine-3'-phosphate
  modified_base 9: mod_base = OTHER; note = 2'-O-methyladenosine-3'-phosphate
  modified_base 10: mod_base = OTHER; note = 2'-O-methyladenosine-3'-phosphate
  modified_base 11: mod_base = OTHER; note = 2'-O-methylcytidine-3'-phosphate
  modified_base 12: mod_base = OTHER; note = 2'-O-methyladenosine-3'-phosphate
  modified_base 13: mod_base = OTHER; note = 2'-O-methyladenosine-3'-phosphate
  modified_base 14: mod_base = OTHER; note = 2'-fluoroadenosine-3'-phosphate
  modified_base 15: mod_base = OTHER; note = 2'-O-methylguanosine-3'-phosphate
  modified_base 16: mod_base = OTHER; note = 2'-fluorocytidine-3'-phosphate
  modified_base 17: mod_base = OTHER; note = 2'-O-methyluridine-3'-phosphate
  modified_base 18: mod_base = OTHER; note = 2'-O-methylcytidine-3'-phosphate
  modified_base 19: mod_base = OTHER; note = 2'-O-methyladenosine-3'-phosphate
  modified_base 20: mod_base = OTHER; note = 2'-O-methylcytidine-3'-phosphate
  modified_base 21: mod_base = OTHER; note = 2'-O-methylguanosine-3'-phosphorothioate
  modified_base 22: mod_base = OTHER; note = 2'-O-methylcytidine-3'-phosphorothioate
  modified_base 23: mod_base = OTHER; note = 2'-O-methylguanosine-3'-phosphate
tcgggtggaacaaagctcacgcg

SEQ ID NO: 535 - DNA, 21 bp, synthetic construct
  source 1..21: mol_type = other DNA
  modified_base 13: mod_base = OTHER; note = 2'-O-methylcytidine-3'-phosphate
  modified_base 20: mod_base = OTHER; note = 2'-O-methylcytidine-3'-phosphorothioate
  modified_base 21: mod_base = OTHER; note = 2'-O-methyladenosine-3'-phosphate
  misc_feature 1: note = DNA
  misc_feature 2..21: note = RNA
tagcagaacacacggatttca

SEQ ID NO: 536 - RNA, 23 nt, synthetic construct
  source 1..23: mol_type = other RNA
  modified_base 1: mod_base = OTHER; note = 2'-O-methyluridine-3'-phosphorothioate
  modified_base 2: mod_base = OTHER; note = 2'-fluoroadenosine-3'-phosphorothioate
  modified_base 3: mod_base = OTHER; note = 2'-O-methylguanosine-3'-phosphate
  modified_base 4: mod_base = OTHER; note = 2'-O-methyluridine-3'-phosphate
  modified_base 5: mod_base = OTHER; note = 2'-O-methylguanosine-3'-phosphate
  modified_base 6: mod_base = OTHER; note = 2'-fluoroadenosine-3'-phosphate
  modified_base 7: mod_base = OTHER; note = 2'-O-methylcytidine-3'-phosphate
  modified_base 8: mod_base = OTHER; note = 2'-O-methylguanosine-3'-phosphate
  modified_base 9: mod_base = OTHER; note = 2'-O-methylguanosine-3'-phosphate
  modified_base 10: mod_base = OTHER; note = 2'-O-methylguanosine-3'-phosphate
  modified_base 11: mod_base = OTHER; note = 2'-O-methyluridine-3'-phosphate
  modified_base 12: mod_base = OTHER; note = 2'-O-methylguanosine-3'-phosphate
  modified_base 13: mod_base = OTHER; note = 2'-O-methylguanosine-3'-phosphate
  modified_base 14: mod_base = OTHER; note = 2'-fluoroadenosine-3'-phosphate
  modified_base 15: mod_base = OTHER; note = 2'-O-methyladenosine-3'-phosphate
  modified_base 16: mod_base = OTHER; note = 2'-fluorocytidine-3'-phosphate
  modified_base 17: mod_base = OTHER; note = 2'-O-methyladenosine-3'-phosphate
  modified_base 18: mod_base = OTHER; note = 2'-O-methyladenosine-3'-phosphate
  modified_base 19: mod_base = OTHER; note = 2'-O-methyladenosine-3'-phosphate
  modified_base 20: mod_base = OTHER; note = 2'-O-methylguanosine-3'-phosphate
  modified_base 21: mod_base = OTHER; note = 2'-O-methylcytidine-3'-phosphorothioate
  modified_base 22: mod_base = OTHER; note = 2'-O-methyluridine-3'-phosphorothioate
  modified_base 23: mod_base = OTHER; note = 2'-O-methylcytidine-3'-phosphate
tagtgacgggtggaacaaagctc

SEQ ID NO: 537 - DNA, 21 bp, synthetic construct
  source 1..21: mol_type = other DNA
  modified_base 13: mod_base = OTHER; note = 2'-O-methylcytidine-3'-phosphate
  modified_base 20: mod_base = OTHER; note = 2'-O-methylguanosine-3'-phosphorothioate
  modified_base 21: mod_base = OTHER; note = 2'-O-methyladenosine-3'-phosphate
  misc_feature 1: note = DNA
  misc_feature 2..21: note = RNA
tgcactcgcactcatagtgga

SEQ ID NO: 538 - DNA, 23 bp, synthetic construct
  source 1..23: mol_type = other DNA
  modified_base 13: mod_base = OTHER; note = 2'-O-methylcytidine-3'-phosphate
  modified_base 22: mod_base = OTHER; note = 2'-O-methyluridine-3'-phosphorothioate
  modified_base 23: mod_base = OTHER; note = 2'-O-methyladenosine-3'-phosphate
  misc_feature 1: note = DNA
  misc_feature 2..23: note = RNA
tagcagaacacacggatttcata

SEQ ID NO: 539 - RNA, 23 nt, synthetic construct
  source 1..23: mol_type = other RNA
  modified_base 1: mod_base = OTHER; note = 2'-O-methyluridine-3'-phosphorothioate
  modified_base 2: mod_base = OTHER; note = 2'-fluorouridine-3'-phosphorothioate
  modified_base 3: mod_base = OTHER; note = 2'-O-methyladenosine-3'-phosphate
  modified_base 4: mod_base = OTHER; note = 2'-O-methyladenosine-3'-phosphate
  modified_base 5: mod_base = OTHER; note = 2'-O-methylguanosine-3'-phosphate
  modified_base 6: mod_base = OTHER; note = 2'-fluoroadenosine-3'-phosphate
  modified_base 7: mod_base = OTHER; note = 2'-O-methylguanosine-3'-phosphate
  modified_base 8: mod_base = OTHER; note = 2'-O-methylguanosine-3'-phosphate
  modified_base 9: mod_base = OTHER; note = 2'-O-methyluridine-3'-phosphate
  modified_base 10: mod_base = OTHER; note = 2'-O-methylguanosine-3'-phosphate
  modified_base 11: mod_base = OTHER; note = 2'-O-methylcytidine-3'-phosphate
  modified_base 12: mod_base = OTHER; note = 2'-O-methylcytidine-3'-phosphate
  modified_base 13: mod_base = OTHER; note = 2'-O-methylguanosine-3'-phosphate
  modified_base 14: mod_base = OTHER; note = 2'-fluorouridine-3'-phosphate
  modified_base 15: mod_base = OTHER; note = 2'-O-methylcytidine-3'-phosphate
  modified_base 16: mod_base = OTHER; note = 2'-fluoroadenosine-3'-phosphate
  modified_base 17: mod_base = OTHER; note = 2'-O-methyladenosine-3'-phosphate
  modified_base 18: mod_base = OTHER; note = 2'-O-methyladenosine-3'-phosphate
  modified_base 19: mod_base = OTHER; note = 2'-O-methylguanosine-3'-phosphate
  modified_base 20: mod_base = OTHER; note = 2'-O-methylguanosine-3'-phosphate
  modified_base 21: mod_base = OTHER; note = 2'-O-methyluridine-3'-phosphorothioate
  modified_base 22: mod_base = OTHER; note = 2'-O-methylguanosine-3'-phosphorothioate
  modified_base 23: mod_base = OTHER; note = 2'-O-methylguanosine-3'-phosphate
ttaagaggtgccgtcaaaggtgg

SEQ ID NO: 540 - RNA, 23 nt, synthetic construct
  source 1..23: mol_type = other RNA
  modified_base 1: mod_base = OTHER; note = 2'-O-methyluridine-3'-phosphorothioate
  modified_base 2: mod_base = OTHER; note = 2'-fluoroadenosine-3'-phosphorothioate
  modified_base 3: mod_base = OTHER; note = 2'-O-methylcytidine-3'-phosphate
  modified_base 4: mod_base = OTHER; note = 2'-O-methylguanosine-3'-phosphate
  modified_base 5: mod_base = OTHER; note = 2'-O-methyladenosine-3'-phosphate
  modified_base 6: mod_base = OTHER; note = 2'-fluorouridine-3'-phosphate
  modified_base 7: mod_base = OTHER; note = 2'-O-methyladenosine-3'-phosphate
  modified_base 8: mod_base = OTHER; note = 2'-O-methyluridine-3'-phosphate
  modified_base 9: mod_base = OTHER; note = 2'-O-methylcytidine-3'-phosphate
  modified_base 10: mod_base = OTHER; note = 2'-O-methylcytidine-3'-phosphate
  modified_base 11: mod_base = OTHER; note = 2'-O-methyladenosine-3'-phosphate
  modified_base 12: mod_base = OTHER; note = 2'-O-methyluridine-3'-phosphate
  modified_base 13: mod_base = OTHER; note = 2'-O-methylguanosine-3'-phosphate
  modified_base 14: mod_base = OTHER; note = 2'-fluoroguanosine-3'-phosphate
  modified_base 15: mod_base = OTHER; note = 2'-O-methyladenosine-3'-phosphate
  modified_base 16: mod_base = OTHER; note = 2'-fluorocytidine-3'-phosphate
  modified_base 17: mod_base = OTHER; note = 2'-O-methyluridine-3'-phosphate
  modified_base 18: mod_base = OTHER; note = 2'-O-methyluridine-3'-phosphate
  modified_base 19: mod_base = OTHER; note = 2'-O-methylguanosine-3'-phosphate
  modified_base 20: mod_base = OTHER; note = 2'-O-methyluridine-3'-phosphate
  modified_base 21: mod_base = OTHER; note = 2'-O-methyladenosine-3'-phosphorothioate
  modified_base 22: mod_base = OTHER; note = 2'-O-methylguanosine-3'-phosphorothioate
  modified_base 23: mod_base = OTHER; note = 2'-O-methyluridine-3'-phosphate
tacgatatccatggacttgtagt

SEQ ID NO: 541 - DNA, 23 bp, synthetic construct
  source 1..23: mol_type = other DNA
  modified_base 13: mod_base = OTHER; note = 2'-O-methyladenosine-3'-phosphate
  modified_base 22: mod_base = OTHER; note = 2'-O-methyluridine-3'-phosphorothioate
  modified_base 23: mod_base = OTHER; note = 2'-O-methyladenosine-3'-phosphate
  misc_feature 1: note = DNA
  misc_feature 2..23: note = RNA
tggacgatatccatggacttgta

SEQ ID NO: 542 - RNA, 23 nt, synthetic construct
  source 1..23: mol_type = other RNA
  modified_base 1: mod_base = OTHER; note = 2'-O-methyluridine-3'-phosphorothioate
  modified_base 2: mod_base = OTHER; note = 2'-fluoroadenosine-3'-phosphorothioate
  modified_base 3: mod_base = OTHER; note = 2'-O-methyluridine-3'-phosphate
  modified_base 4: mod_base = OTHER; note = 2'-O-methyluridine-3'-phosphate
  modified_base 5: mod_base = OTHER; note = 2'-O-methylcytidine-3'-phosphate
  modified_base 6: mod_base = OTHER; note = 2'-fluorocytidine-3'-phosphate
  modified_base 7: mod_base = OTHER; note = 2'-O-methyladenosine-3'-phosphate
  modified_base 8: mod_base = OTHER; note = 2'-O-methylcytidine-3'-phosphate
  modified_base 9: mod_base = OTHER; note = 2'-O-methylguanosine-3'-phosphate
  modified_base 10: mod_base = OTHER; note = 2'-O-methyladenosine-3'-phosphate
  modified_base 11: mod_base = OTHER; note = 2'-O-methylcytidine-3'-phosphate
  modified_base 12: mod_base = OTHER; note = 2'-O-methylcytidine-3'-phosphate
  modified_base 13: mod_base = OTHER; note = 2'-O-methyluridine-3'-phosphate
  modified_base 14: mod_base = OTHER; note = 2'-fluoroguanosine-3'-phosphate
  modified_base 15: mod_base = OTHER; note = 2'-O-methylguanosine-3'-phosphate
  modified_base 16: mod_base = OTHER; note = 2'-fluorocytidine-3'-phosphate
  modified_base 17: mod_base = OTHER; note = 2'-O-methylcytidine-3'-phosphate
  modified_base 18: mod_base = OTHER; note = 2'-O-methylcytidine-3'-phosphate
  modified_base 19: mod_base = OTHER; note = 2'-O-methyladenosine-3'-phosphate
  modified_base 20: mod_base = OTHER; note = 2'-O-methyladenosine-3'-phosphate
  modified_base 21: mod_base = OTHER; note = 2'-O-methylcytidine-3'-phosphorothioate
  modified_base 22: mod_base = OTHER; note = 2'-O-methyluridine-3'-phosphorothioate
  modified_base 23: mod_base = OTHER; note = 2'-O-methylcytidine-3'-phosphate
tattccacgacctggcccaactc

SEQ ID NO: 543 - RNA, 23 nt, synthetic construct
  source 1..23: mol_type = other RNA
  modified_base 1: mod_base = OTHER; note = 2'-O-methyluridine-3'-phosphorothioate
  modified_base 2: mod_base = OTHER; note = 2'-fluoroguanosine-3'-phosphorothioate
  modified_base 3: mod_base = OTHER; note = 2'-O-methylcytidine-3'-phosphate
  modified_base 4: mod_base = OTHER; note = 2'-O-methyluridine-3'-phosphate
  modified_base 5: mod_base = OTHER; note = 2'-O-methylguanosine-3'-phosphate
  modified_base 6: mod_base = OTHER; note = 2'-fluorocytidine-3'-phosphate
  modified_base 7: mod_base = OTHER; note = 2'-O-methyladenosine-3'-phosphate
  modified_base 8: mod_base = OTHER; note = 2'-O-methyluridine-3'-phosphate
  modified_base 9: mod_base = OTHER; note = 2'-O-methyluridine-3'-phosphate
  modified_base 10: mod_base = OTHER; note = 2'-O-methylcytidine-3'-phosphate
  modified_base 11: mod_base = OTHER; note = 2'-O-methylcytidine-3'-phosphate
  modified_base 12: mod_base = OTHER; note = 2'-O-methyladenosine-3'-phosphate
  modified_base 13: mod_base = OTHER; note = 2'-O-methylcytidine-3'-phosphate
  modified_base 14: mod_base = OTHER; note = 2'-fluoroguanosine-3'-phosphate
  modified_base 15: mod_base = OTHER; note = 2'-O-methyladenosine-3'-phosphate
  modified_base 16: mod_base = OTHER; note = 2'-fluorocytidine-3'-phosphate
  modified_base 17: mod_base = OTHER; note = 2'-O-methylcytidine-3'-phosphate
  modified_base 18: mod_base = OTHER; note = 2'-O-methyluridine-3'-phosphate
  modified_base 19: mod_base = OTHER; note = 2'-O-methylguanosine-3'-phosphate
  modified_base 20: mod_base = OTHER; note = 2'-O-methylguanosine-3'-phosphate
  modified_base 21: mod_base = OTHER; note = 2'-O-methylcytidine-3'-phosphorothioate
  modified_base 22: mod_base = OTHER; note = 2'-O-methylcytidine-3'-phosphorothioate
  modified_base 23: mod_base = OTHER; note = 2'-O-methylcytidine-3'-phosphate
tgctgcattccacgacctggccc

SEQ ID NO: 544 - RNA, 23 nt, synthetic construct
  source 1..23: mol_type = other RNA
  modified_base 1: mod_base = OTHER; note = 2'-O-methyluridine-3'-phosphorothioate
  modified_base 2: mod_base = OTHER; note = 2'-fluoroadenosine-3'-phosphorothioate
  modified_base 3: mod_base = OTHER; note = 2'-O-methylguanosine-3'-phosphate
  modified_base 4: mod_base = OTHER; note = 2'-O-methylcytidine-3'-phosphate
  modified_base 5: mod_base = OTHER; note = 2'-O-methyladenosine-3'-phosphate
  modified_base 6: mod_base = OTHER; note = 2'-fluoroguanosine-3'-phosphate
  modified_base 7: mod_base = OTHER; note = 2'-O-methyladenosine-3'-phosphate
  modified_base 8: mod_base = OTHER; note = 2'-O-methyladenosine-3'-phosphate
  modified_base 9: mod_base = OTHER; note = 2'-O-methylcytidine-3'-phosphate
  modified_base 10: mod_base = OTHER; note = 2'-O-methyladenosine-3'-phosphate
  modified_base 11: mod_base = OTHER; note = 2'-O-methylcytidine-3'-phosphate
  modified_base 12: mod_base = OTHER; note = 2'-O-methyladenosine-3'-phosphate
  modified_base 13: mod_base = OTHER; note = 2'-O-methylcytidine-3'-phosphate
  modified_base 14: mod_base = OTHER; note = 2'-fluoroguanosine-3'-phosphate
  modified_base 15: mod_base = OTHER; note = 2'-O-methylguanosine-3'-phosphate
  modified_base 16: mod_base = OTHER; note = 2'-fluoroadenosine-3'-phosphate
  modified_base 17: mod_base = OTHER; note = 2'-O-methyluridine-3'-phosphate
  modified_base 18: mod_base = OTHER; note = 2'-O-methyluridine-3'-phosphate
  modified_base 19: mod_base = OTHER; note = 2'-O-methyluridine-3'-phosphate
  modified_base 20: mod_base = OTHER; note = 2'-O-methylcytidine-3'-phosphate
  modified_base 21: mod_base = OTHER; note = 2'-O-methyladenosine-3'-phosphorothioate
  modified_base 22: mod_base = OTHER; note = 2'-O-methyluridine-3'-phosphorothioate
  modified_base 23: mod_base = OTHER; note = 2'-O-methyladenosine-3'-phosphate
tagcagaacacacggatttcata

SEQ ID NO: 545 - RNA, 23 nt, synthetic construct
  source 1..23: mol_type = other RNA
  modified_base 1: mod_base = OTHER; note = 2'-O-methyluridine-3'-phosphorothioate
  modified_base 2: mod_base = OTHER; note = 2'-fluoroguanosine-3'-phosphorothioate
  modified_base 3: mod_base = OTHER; note = 2'-O-methylcytidine-3'-phosphate
  modified_base 4: mod_base = OTHER; note = 2'-O-methylcytidine-3'-phosphate
  modified_base 5: mod_base = OTHER; note = 2'-O-methylguanosine-3'-phosphate
  modified_base 6: mod_base = OTHER; note = 2'-fluorouridine-3'-phosphate
  modified_base 7: mod_base = OTHER; note = 2'-O-methyladenosine-3'-phosphate
  modified_base 8: mod_base = OTHER; note = 2'-O-methylguanosine-3'-phosphate
  modified_base 9: mod_base = OTHER; note = 2'-O-methyluridine-3'-phosphate
  modified_base 10: mod_base = OTHER; note = 2'-O-methyluridine-3'-phosphate
  modified_base 11: mod_base = OTHER; note = 2'-O-methylguanosine-3'-phosphate
  modified_base 12: mod_base = OTHER; note = 2'-O-methylcytidine-3'-phosphate
  modified_base 13: mod_base = OTHER; note = 2'-O-methyladenosine-3'-phosphate
  modified_base 14: mod_base = OTHER; note = 2'-fluoroguanosine-3'-phosphate
  modified_base 15: mod_base = OTHER; note = 2'-O-methylcytidine-3'-phosphate
  modified_base 16: mod_base = OTHER; note = 2'-fluoroadenosine-3'-phosphate
  modified_base 17: mod_base = OTHER; note = 2'-O-methylguanosine-3'-phosphate
  modified_base 18: mod_base = OTHER; note = 2'-O-methyladenosine-3'-phosphate
  modified_base 19: mod_base = OTHER; note = 2'-O-methyladenosine-3'-phosphate
  modified_base 20: mod_base = OTHER; note = 2'-O-methylcytidine-3'-phosphate
  modified_base 21: mod_base = OTHER; note = 2'-O-methyladenosine-3'-phosphorothioate
  modified_base 22: mod_base = OTHER; note = 2'-O-methylcytidine-3'-phosphorothioate
  modified_base 23: mod_base = OTHER; note = 2'-O-methyladenosine-3'-phosphate
tgccgtagttgcagcagaacaca

SEQ ID NO: 546 - RNA, 23 nt, synthetic construct
  source 1..23: mol_type = other RNA
  modified_base 1: mod_base = OTHER; note = 2'-O-methyluridine-3'-phosphorothioate
  modified_base 2: mod_base = OTHER; note = 2'-fluoroguanosine-3'-phosphorothioate
  modified_base 3: mod_base = OTHER; note = 2'-O-methylguanosine-3'-phosphate
  modified_base 4: mod_base = OTHER; note = 2'-O-methyluridine-3'-phosphate
  modified_base 5: mod_base = OTHER; note = 2'-O-methylcytidine-3'-phosphate
  modified_base 6: mod_base = OTHER; note = 2'-fluoroguanosine-3'-phosphate
  modified_base 7: mod_base = OTHER; note = 2'-O-methyluridine-3'-phosphate
  modified_base 8: mod_base = OTHER; note = 2'-O-methylcytidine-3'-phosphate
  modified_base 9: mod_base = OTHER; note = 2'-O-methylcytidine-3'-phosphate
  modified_base 10: mod_base = OTHER; note = 2'-O-methylcytidine-3'-phosphate
  modified_base 11: mod_base = OTHER; note = 2'-O-methylcytidine-3'-phosphate
  modified_base 12: mod_base = OTHER; note = 2'-O-methylguanosine-3'-phosphate
  modified_base 13: mod_base = OTHER; note = 2'-O-methylguanosine-3'-phosphate
  modified_base 14: mod_base = OTHER; note = 2'-fluoroadenosine-3'-phosphate
  modified_base 15: mod_base = OTHER; note = 2'-O-methylguanosine-3'-phosphate
  modified_base 16: mod_base = OTHER; note = 2'-fluorouridine-3'-phosphate
  modified_base 17: mod_base = OTHER; note = 2'-O-methylguanosine-3'-phosphate
  modified_base 18: mod_base = OTHER; note = 2'-O-methylguanosine-3'-phosphate
  modified_base 19: mod_base = OTHER; note = 2'-O-methyladenosine-3'-phosphate
  modified_base 20: mod_base = OTHER; note = 2'-O-methylguanosine-3'-phosphate
  modified_base 21: mod_base = OTHER; note = 2'-O-methylguanosine-3'-phosphorothioate
  modified_base 22: mod_base = OTHER; note = 2'-O-methyladenosine-3'-phosphorothioate
  modified_base 23: mod_base = OTHER; note = 2'-O-methylguanosine-3'-phosphate
tggtcgtccccggagtggaggag

SEQ ID NO: 547 - RNA, 23 nt, synthetic construct
  source 1..23: mol_type = other RNA
  modified_base 1: mod_base = OTHER; note = 2'-O-methyluridine-3'-phosphorothioate
  modified_base 2: mod_base = OTHER; note = 2'-fluorouridine-3'-phosphorothioate
  modified_base 3: mod_base = OTHER; note = 2'-O-methylcytidine-3'-phosphate
  modified_base 4: mod_base = OTHER; note = 2'-O-methyluridine-3'-phosphate
  modified_base 5: mod_base = OTHER; note = 2'-O-methyluridine-3'-phosphate
  modified_base 6: mod_base = OTHER; note = 2'-fluoroguanosine-3'-phosphate
  modified_base 7: mod_base = OTHER; note = 2'-O-methylguanosine-3'-phosphate
  modified_base 8: mod_base = OTHER; note = 2'-O-methyladenosine-3'-phosphate
  modified_base 9: mod_base = OTHER; note = 2'-O-methylcytidine-3'-phosphate
  modified_base 10: mod_base = OTHER; note = 2'-O-methyladenosine-3'-phosphate
  modified_base 11: mod_base = OTHER; note = 2'-O-methylguanosine-3'-phosphate
  modified_base 12: mod_base = OTHER; note = 2'-O-methyladenosine-3'-phosphate
  modified_base 13: mod_base = OTHER; note = 2'-O-methyladenosine-3'-phosphate
  modified_base 14: mod_base = OTHER; note = 2'-fluorocytidine-3'-phosphate
  modified_base 15: mod_base = OTHER; note = 2'-O-methylguanosine-3'-phosphate
  modified_base 16: mod_base = OTHER; note = 2'-fluorouridine-3'-phosphate
  modified_base 17: mod_base = OTHER; note = 2'-O-methyladenosine-3'-phosphate
  modified_base 18: mod_base = OTHER; note = 2'-O-methylguanosine-3'-phosphate
  modified_base 19: mod_base = OTHER; note = 2'-O-methylcytidine-3'-phosphate
  modified_base 20: mod_base = OTHER; note = 2'-O-methyluridine-3'-phosphate
  modified_base 21: mod_base = OTHER; note = 2'-O-methylguanosine-3'-phosphorothioate
  modified_base 22: mod_base = OTHER; note = 2'-O-methylcytidine-3'-phosphorothioate
  modified_base 23: mod_base = OTHER; note = 2'-O-methyladenosine-3'-phosphate
ttcttggacagaacgtagctgca

SEQ ID NO: 548 - RNA, 23 nt, synthetic construct
  source 1..23: mol_type = other RNA
  modified_base 1: mod_base = OTHER; note = 2'-O-methyluridine-3'-phosphorothioate
  modified_base 2: mod_base = OTHER; note = 2'-fluorocytidine-3'-phosphorothioate
  modified_base 3: mod_base = OTHER; note = 2'-O-methyladenosine-3'-phosphate
  modified_base 4: mod_base = OTHER; note = 2'-O-methylcytidine-3'-phosphate
  modified_base 5: mod_base = OTHER; note = 2'-O-methylguanosine-3'-phosphate
  modified_base 6: mod_base = OTHER; note = 2'-fluorocytidine-3'-phosphate
  modified_base 7: mod_base = OTHER; note = 2'-O-methyladenosine-3'-phosphate
  modified_base 8: mod_base = OTHER; note = 2'-O-methylcytidine-3'-phosphate
  modified_base 9: mod_base = OTHER; note = 2'-O-methylcytidine-3'-phosphate
  modified_base 10: mod_base = OTHER; note = 2'-O-methyluridine-3'-phosphate
  modified_base 11: mod_base = OTHER; note = 2'-O-methylguanosine-3'-phosphate
  modified_base 12: mod_base = OTHER; note = 2'-O-methylguanosine-3'-phosphate
  modified_base 13: mod_base = OTHER; note = 2'-O-methylcytidine-3'-phosphate
  modified_base 14: mod_base = OTHER; note = 2'-fluorocytidine-3'-phosphate
  modified_base 15: mod_base = OTHER; note = 2'-O-methyladenosine-3'-phosphate
  modified_base 16: mod_base = OTHER; note = 2'-fluorocytidine-3'-phosphate
  modified_base 17: mod_base = OTHER; note = 2'-O-methylcytidine-3'-phosphate
  modified_base 18: mod_base = OTHER; note = 2'-O-methylguanosine-3'-phosphate
  modified_base 19: mod_base = OTHER; note = 2'-O-methyluridine-3'-phosphate
  modified_base 20: mod_base = OTHER; note = 2'-O-methylguanosine-3'-phosphate
  modified_base 21: mod_base = OTHER; note = 2'-O-methylcytidine-3'-phosphorothioate
  modified_base 22: mod_base = OTHER; note = 2'-O-methyladenosine-3'-phosphorothioate
  modified_base 23: mod_base = OTHER; note = 2'-O-methylguanosine-3'-phosphate
tcacgcacctggccaccgtgcag

SEQ ID NO: 549 - RNA, 23 nt, synthetic construct
  source 1..23: mol_type = other RNA
  modified_base 1: mod_base = OTHER; note = 2'-O-methyluridine-3'-phosphorothioate
  modified_base 2: mod_base = OTHER; note = 2'-fluorouridine-3'-phosphorothioate
  modified_base 3: mod_base = OTHER; note = 2'-O-methyluridine-3'-phosphate
  modified_base 4: mod_base = OTHER; note = 2'-O-methylguanosine-3'-phosphate
  modified_base 5: mod_base = OTHER; note = 2'-O-methyluridine-3'-phosphate
  modified_base 6: mod_base = OTHER; note = 2'-fluorocytidine-3'-phosphate
  modified_base 7: mod_base = OTHER; note = 2'-O-methyladenosine-3'-phosphate
  modified_base 8: mod_base = OTHER; note = 2'-O-methylcytidine-3'-phosphate
  modified_base 9: mod_base = OTHER; note = 2'-O-methylcytidine-3'-phosphate
  modified_base 10: mod_base = OTHER; note = 2'-O-methylcytidine-3'-phosphate
  modified_base 11: mod_base = OTHER; note = 2'-O-methyladenosine-3'-phosphate
  modified_base 12: mod_base = OTHER; note = 2'-O-methylcytidine-3'-phosphate
  modified_base 13: mod_base = OTHER; note = 2'-O-methylguanosine-3'-phosphate
  modified_base 14: mod_base = OTHER; note = 2'-fluorocytidine-3'-phosphate
  modified_base 15: mod_base = OTHER; note = 2'-O-methyladenosine-3'-phosphate
  modified_base 16: mod_base = OTHER; note = 2'-fluorocytidine-3'-phosphate
  modified_base 17: mod_base = OTHER; note = 2'-O-methylcytidine-3'-phosphate
  modified_base 18: mod_base = OTHER; note = 2'-O-methyluridine-3'-phosphate
  modified_base 19: mod_base = OTHER; note = 2'-O-methylguanosine-3'-phosphate
  modified_base 20: mod_base = OTHER; note = 2'-O-methylguanosine-3'-phosphate
  modified_base 21: mod_base = OTHER; note = 2'-O-methylcytidine-3'-phosphorothioate
  modified_base 22: mod_base = OTHER; note = 2'-O-methylcytidine-3'-phosphorothioate
  modified_base 23: mod_base = OTHER; note = 2'-O-methyladenosine-3'-phosphate
tttgtcacccacgcacctggcca

SEQ ID NO: 550 - DNA, 21 bp, synthetic construct
  source 1..21: mol_type = other DNA
  modified_base 13: mod_base = OTHER; note = 2'-O-methylguanosine-3'-phosphate
  modified_base 20: mod_base = OTHER; note = 2'-O-methylguanosine-3'-phosphorothioate
  modified_base 21: mod_base = OTHER; note = 2'-O-methylcytidine-3'-phosphate
  misc_feature 1: note = DNA
  misc_feature 2..21: note = RNA
tttgtcacccacgcacctggc

SEQ ID NO: 551 - DNA, 23 bp, synthetic construct
  source 1..23: mol_type = other DNA
  modified_base 13: mod_base = OTHER; note = 2'-O-methylguanosine-3'-phosphate
  modified_base 22: mod_base = OTHER; note = 2'-O-methylcytidine-3'-phosphorothioate
  modified_base 23: mod_base = OTHER; note = 2'-O-methyladenosine-3'-phosphate
  misc_feature 1: note = DNA
  misc_feature 2..23: note = RNA
tttgtcacccacgcacctggcca

SEQ ID NO: 552 - RNA, 23 nt, synthetic construct
  source 1..23: mol_type = other RNA
  modified_base 1: mod_base = OTHER; note = 2'-O-methyluridine-3'-phosphorothioate
  modified_base 2: mod_base = OTHER; note = 2'-fluorouridine-3'-phosphorothioate
  modified_base 3: mod_base = OTHER; note = 2'-O-methylguanosine-3'-phosphate
  modified_base 4: mod_base = OTHER; note = 2'-O-methylcytidine-3'-phosphate
  modified_base 5: mod_base = OTHER; note = 2'-O-methyluridine-3'-phosphate
  modified_base 6: mod_base = OTHER; note = 2'-fluorouridine-3'-phosphate
  modified_base 7: mod_base = OTHER; note = 2'-O-methylguanosine-3'-phosphate
  modified_base 8: mod_base = OTHER; note = 2'-O-methyluridine-3'-phosphate
  modified_base 9: mod_base = OTHER; note = 2'-O-methyluridine-3'-phosphate
  modified_base 10: mod_base = OTHER; note = 2'-O-methylcytidine-3'-phosphate
  modified_base 11: mod_base = OTHER; note = 2'-O-methyladenosine-3'-phosphate
  modified_base 12: mod_base = OTHER; note = 2'-O-methylcytidine-3'-phosphate
  modified_base 13: mod_base = OTHER; note = 2'-O-methylguanosine-3'-phosphate
  modified_base 14: mod_base = OTHER; note = 2'-fluorocytidine-3'-phosphate
  modified_base 15: mod_base = OTHER; note = 2'-O-methyladenosine-3'-phosphate
  modified_base 16: mod_base = OTHER; note = 2'-fluoroguanosine-3'-phosphate
  modified_base 17: mod_base = OTHER; note = 2'-O-methylguanosine-3'-phosphate
  modified_base 18: mod_base = OTHER; note = 2'-O-methyluridine-3'-phosphate
  modified_base 19: mod_base = OTHER; note = 2'-O-methylguanosine-3'-phosphate
  modified_base 20: mod_base = OTHER; note = 2'-O-methyladenosine-3'-phosphate
  modified_base 21: mod_base = OTHER; note = 2'-O-methylcytidine-3'-phosphorothioate
  modified_base 22: mod_base = OTHER; note = 2'-O-methylguanosine-3'-phosphorothioate
  modified_base 23: mod_base = OTHER; note = 2'-O-methyluridine-3'-phosphate
ttgcttgttcacgcaggtgacgt

SEQ ID NO: 553 - DNA, 21 bp, synthetic construct
  source 1..21: mol_type = other DNA
  modified_base 13: mod_base = OTHER; note = 2'-O-methylguanosine-3'-phosphate
  modified_base 20: mod_base = OTHER; note = 2'-O-methyladenosine-3'-phosphorothioate
  modified_base 21: mod_base = OTHER; note = 2'-O-methylcytidine-3'-phosphate
  misc_feature 1: note = DNA
  misc_feature 2..21: note = RNA
ttgcttgttcacgcaggtgac

SEQ ID NO: 554 - DNA, 23 bp, synthetic construct
  source 1..23: mol_type = other DNA
  modified_base 13: mod_base = OTHER; note = 2'-O-methylguanosine-3'-phosphate
  modified_base 22: mod_base = OTHER; note = 2'-O-methylguanosine-3'-phosphorothioate
  modified_base 23: mod_base = OTHER; note = 2'-O-methyluridine-3'-phosphate
  misc_feature 1: note = DNA
  misc_feature 2..23: note = RNA
ttgcttgttcacgcaggtgacgt

SEQ ID NO: 555 - RNA, 23 nt, synthetic construct
  source 1..23: mol_type = other RNA
  modified_base 1: mod_base = OTHER; note = 2'-O-methyluridine-3'-phosphorothioate
  modified_base 2: mod_base = OTHER; note = 2'-fluoroguanosine-3'-phosphorothioate
  modified_base 3: mod_base = OTHER; note = 2'-O-methylcytidine-3'-phosphate
  modified_base 4: mod_base = OTHER; note = 2'-O-methyladenosine-3'-phosphate
  modified_base 5: mod_base = OTHER; note = 2'-O-methylcytidine-3'-phosphate
  modified_base 6: mod_base = OTHER; note = 2'-fluorouridine-3'-phosphate
  modified_base 7: mod_base = OTHER; note = 2'-O-methylcytidine-3'-phosphate
  modified_base 8: mod_base = OTHER; note = 2'-O-methyladenosine-3'-phosphate
  modified_base 9: mod_base = OTHER; note = 2'-O-methyluridine-3'-phosphate
  modified_base 10: mod_base = OTHER; note = 2'-O-methyladenosine-3'-phosphate
  modified_base 11: mod_base = OTHER; note = 2'-O-methylguanosine-3'-phosphate
  modified_base 12: mod_base = OTHER; note = 2'-O-methyluridine-3'-phosphate
  modified_base 13: mod_base = OTHER; note = 2'-O-methylguanosine-3'-phosphate
  modified_base 14: mod_base = OTHER; note = 2'-fluoroguanosine-3'-phosphate
  modified_base 15: mod_base = OTHER; note = 2'-O-methyladenosine-3'-phosphate
  modified_base 16: mod_base = OTHER; note = 2'-fluoroadenosine-3'-phosphate
  modified_base 17: mod_base = OTHER; note = 2'-O-methylguanosine-3'-phosphate
  modified_base 18: mod_base = OTHER; note = 2'-O-methyluridine-3'-phosphate
  modified_base 19: mod_base = OTHER; note = 2'-O-methylcytidine-3'-phosphate
  modified_base 20: mod_base = OTHER; note = 2'-O-methyladenosine-3'-phosphate
  modified_base 21: mod_base = OTHER; note = 2'-O-methylcytidine-3'-phosphorothioate
  modified_base 22: mod_base = OTHER; note = 2'-O-methyladenosine-3'-phosphorothioate
  modified_base 23: mod_base = OTHER; note = 2'-O-methylguanosine-3'-phosphate
tgcactcatagtggaagtcacag

SEQ ID NO: 556 - DNA, 21 bp, synthetic construct
  source 1..21: mol_type = other DNA
  modified_base 13: mod_base = OTHER; note = 2'-O-methylguanosine-3'-phosphate
  modified_base 20: mod_base = OTHER; note = 2'-O-methyladenosine-3'-phosphorothioate
  modified_base 21: mod_base = OTHER; note = 2'-O-methylcytidine-3'-phosphate
  misc_feature 1: note = DNA
  misc_feature 2..21: note = RNA
tgcactcatagtggaagtcac

SEQ ID NO: 557 - DNA, 23 bp, synthetic construct
  source 1..23: mol_type = other DNA
  modified_base 13: mod_base = OTHER; note = 2'-O-methylguanosine-3'-phosphate
  modified_base 22: mod_base = OTHER; note = 2'-O-methyladenosine-3'-phosphorothioate
  modified_base 23: mod_base = OTHER; note = 2'-O-methylguanosine-3'-phosphate
  misc_feature 1: note = DNA
  misc_feature 2..23: note = RNA
tgcactcatagtggaagtcacag

SEQ ID NO: 558 - RNA, 23 nt, synthetic construct
  source 1..23: mol_type = other RNA
  modified_base 1: mod_base = OTHER; note = 2'-O-methyluridine-3'-phosphorothioate
  modified_base 2: mod_base = OTHER; note = 2'-fluorouridine-3'-phosphorothioate
  modified_base 3: mod_base = OTHER; note = 2'-O-methylcytidine-3'-phosphate
  modified_base 4: mod_base = OTHER; note = 2'-O-methylguanosine-3'-phosphate
  modified_base 5: mod_base = OTHER; note = 2'-O-methylcytidine-3'-phosphate
  modified_base 6: mod_base = OTHER; note = 2'-fluoroadenosine-3'-phosphate
  modified_base 7: mod_base = OTHER; note = 2'-O-methylcytidine-3'-phosphate
  modified_base 8: mod_base = OTHER; note = 2'-O-methyluridine-3'-phosphate
  modified_base 9: mod_base = OTHER; note = 2'-O-methylcytidine-3'-phosphate
  modified_base 10: mod_base = OTHER; note = 2'-O-methyladenosine-3'-phosphate
  modified_base 11: mod_base = OTHER; note = 2'-O-methyluridine-3'-phosphate
  modified_base 12: mod_base = OTHER; note = 2'-O-methyladenosine-3'-phosphate
  modified_base 13: mod_base = OTHER; note = 2'-O-methylguanosine-3'-phosphate
  modified_base 14: mod_base = OTHER; note = 2'-fluorouridine-3'-phosphate
  modified_base 15: mod_base = OTHER; note = 2'-O-methylguanosine-3'-phosphate
  modified_base 16: mod_base = OTHER; note = 2'-fluoroguanosine-3'-phosphate
  modified_base 17: mod_base = OTHER; note = 2'-O-methyladenosine-3'-phosphate
  modified_base 18: mod_base = OTHER; note = 2'-O-methyladenosine-3'-phosphate
  modified_base 19: mod_base = OTHER; note = 2'-O-methylguanosine-3'-phosphate
  modified_base 20: mod_base = OTHER; note = 2'-O-methyluridine-3'-phosphate
  modified_base 21: mod_base = OTHER; note = 2'-O-methylcytidine-3'-phosphorothioate
  modified_base 22: mod_base = OTHER; note = 2'-O-methyladenosine-3'-phosphorothioate
  modified_base 23: mod_base = OTHER; note = 2'-O-methylcytidine-3'-phosphate
ttcgcactcatagtggaagtcac

SEQ ID NO: 559 - RNA, 23 nt, synthetic construct
  source 1..23: mol_type = other RNA
  modified_base 1: mod_base = OTHER; note = 2'-O-methyluridine-3'-phosphorothioate
  modified_base 2: mod_base = OTHER; note = 2'-fluoroguanosine-3'-phosphorothioate
  modified_base 3: mod_base = OTHER; note = 2'-O-methylcytidine-3'-phosphate
  modified_base 4: mod_base = OTHER; note = 2'-O-methyladenosine-3'-phosphate
  modified_base 5: mod_base = OTHER; note = 2'-O-methylcytidine-3'-phosphate
  modified_base 6: mod_base = OTHER; note = 2'-fluorouridine-3'-phosphate
  modified_base 7: mod_base = OTHER; note = 2'-O-methylcytidine-3'-phosphate
  modified_base 8: mod_base = OTHER; note = 2'-O-methylguanosine-3'-phosphate
  modified_base 9: mod_base = OTHER; note = 2'-O-methylcytidine-3'-phosphate
  modified_base 10: mod_base = OTHER; note = 2'-O-methyladenosine-3'-phosphate
  modified_base 11: mod_base = OTHER; note = 2'-O-methylcytidine-3'-phosphate
  modified_base 12: mod_base = OTHER; note = 2'-O-methyluridine-3'-phosphate
  modified_base 13: mod_base = OTHER; note = 2'-O-methylcytidine-3'-phosphate
  modified_base 14: mod_base = OTHER; note = 2'-fluoroadenosine-3'-phosphate
  modified_base 15: mod_base = OTHER; note = 2'-O-methyluridine-3'-phosphate
  modified_base 16: mod_base = OTHER; note = 2'-fluoroadenosine-3'-phosphate
  modified_base 17: mod_base = OTHER; note = 2'-O-methylguanosine-3'-phosphate
  modified_base 18: mod_base = OTHER; note = 2'-O-methyluridine-3'-phosphate
  modified_base 19: mod_base = OTHER; note = 2'-O-methylguanosine-3'-phosphate
  modified_base 20: mod_base = OTHER; note = 2'-O-methylguanosine-3'-phosphate
  modified_base 21: mod_base = OTHER; note = 2'-O-methyladenosine-3'-phosphorothioate
  modified_base 22: mod_base = OTHER; note = 2'-O-methyladenosine-3'-phosphorothioate
  modified_base 23: mod_base = OTHER; note = 2'-O-methylguanosine-3'-phosphate
tgcactcgcactcatagtggaag

SEQ ID NO: 560 - DNA, 23 bp, synthetic construct
  source 1..23: mol_type = other DNA
  modified_base 13: mod_base = OTHER; note = 2'-O-methylcytidine-3'-phosphate
  modified_base 22: mod_base = OTHER; note = 2'-O-methyladenosine-3'-phosphorothioate
  modified_base 23: mod_base = OTHER; note = 2'-O-methylguanosine-3'-phosphate
  misc_feature 1: note = DNA
  misc_feature 2..23: note = RNA
tgcactcgcactcatagtggaag

SEQ ID NO: 561 - RNA, 23 nt, synthetic construct
  source 1..23: mol_type = other RNA
  modified_base 1: mod_base = OTHER; note = 2'-O-methyluridine-3'-phosphorothioate
  modified_base 2: mod_base = OTHER; note = 2'-fluoroguanosine-3'-phosphorothioate
  modified_base 3: mod_base = OTHER; note = 2'-O-methyladenosine-3'-phosphate
  modified_base 4: mod_base = OTHER; note = 2'-O-methyluridine-3'-phosphate
  modified_base 5: mod_base = OTHER; note = 2'-O-methylguanosine-3'-phosphate
  modified_base 6: mod_base = OTHER; note = 2'-fluorocytidine-3'-phosphate
  modified_base 7: mod_base = OTHER; note = 2'-O-methyladenosine-3'-phosphate
  modified_base 8: mod_base = OTHER; note = 2'-O-methylcytidine-3'-phosphate
  modified_base 9: mod_base = OTHER; note = 2'-O-methyluridine-3'-phosphate
  modified_base 10: mod_base = OTHER; note = 2'-O-methylcytidine-3'-phosphate
  modified_base 11: mod_base = OTHER; note = 2'-O-methylguanosine-3'-phosphate
  modified_base 12: mod_base = OTHER; note = 2'-O-methylcytidine-3'-phosphate
  modified_base 13: mod_base = OTHER; note = 2'-O-methyladenosine-3'-phosphate
  modified_base 14: mod_base = OTHER; note = 2'-fluorocytidine-3'-phosphate
  modified_base 15: mod_base = OTHER; note = 2'-O-methyluridine-3'-phosphate
  modified_base 16: mod_base = OTHER; note = 2'-fluorocytidine-3'-phosphate
  modified_base 17: mod_base = OTHER; note = 2'-O-methyladenosine-3'-phosphate
  modified_base 18: mod_base = OTHER; note = 2'-O-methyluridine-3'-phosphate
  modified_base 19: mod_base = OTHER; note = 2'-O-methyladenosine-3'-phosphate
  modified_base 20: mod_base = OTHER; note = 2'-O-methylguanosine-3'-phosphate
  modified_base 21: mod_base = OTHER; note = 2'-O-methyluridine-3'-phosphorothioate
  modified_base 22: mod_base = OTHER; note = 2'-O-methylguanosine-3'-phosphorothioate
  modified_base 23: mod_base = OTHER; note = 2'-O-methylguanosine-3'-phosphate
tgatgcactcgcactcatagtgg

SEQ ID NO: 562 - DNA, 21 bp, synthetic construct
  source 1..21: mol_type = other DNA
  modified_base 13: mod_base = OTHER; note = 2'-O-methyladenosine-3'-phosphate
  modified_base 20: mod_base = OTHER; note = 2'-O-methylguanosine-3'-phosphorothioate
  modified_base 21: mod_base = OTHER; note = 2'-O-methyluridine-3'-phosphate
  misc_feature 1: note = DNA
  misc_feature 2..21: note = RNA
tgatgcactcgcactcatagt

SEQ ID NO: 563 - DNA, 23 bp, synthetic construct
  source 1..23: mol_type = other DNA
  modified_base 13: mod_base = OTHER; note = 2'-O-methyladenosine-3'-phosphate
  modified_base 22: mod_base = OTHER; note = 2'-O-methylguanosine-3'-phosphorothioate
  modified_base 23: mod_base = OTHER; note = 2'-O-methylguanosine-3'-phosphate
  misc_feature 1: note = DNA
  misc_feature 2..23: note = RNA
tgatgcactcgcactcatagtgg

SEQ ID NO: 564 - RNA, 23 nt, synthetic construct
  source 1..23: mol_type = other RNA
  modified_base 1: mod_base = OTHER; note = 2'-O-methyluridine-3'-phosphorothioate
  modified_base 2: mod_base = OTHER; note = 2'-fluoroadenosine-3'-phosphorothioate
  modified_base 3: mod_base = OTHER; note = 2'-O-methylguanosine-3'-phosphate
  modified_base 4: mod_base = OTHER; note = 2'-O-methyladenosine-3'-phosphate
  modified_base 5: mod_base = OTHER; note = 2'-O-methyluridine-3'-phosphate
  modified_base 6: mod_base = OTHER; note = 2'-fluoroguanosine-3'-phosphate
  modified_base 7: mod_base = OTHER; note = 2'-O-methylcytidine-3'-phosphate
  modified_base 8: mod_base = OTHER; note = 2'-O-methyladenosine-3'-phosphate
  modified_base 9: mod_base = OTHER; note = 2'-O-methylcytidine-3'-phosphate
  modified_base 10: mod_base = OTHER; note = 2'-O-methyluridine-3'-phosphate
  modified_base 11: mod_base = OTHER; note = 2'-O-methylcytidine-3'-phosphate
  modified_base 12: mod_base = OTHER; note = 2'-O-methylguanosine-3'-phosphate
  modified_base 13: mod_base = OTHER; note = 2'-O-methylcytidine-3'-phosphate
  modified_base 14: mod_base = OTHER; note = 2'-fluoroadenosine-3'-phosphate
  modified_base 15: mod_base = OTHER; note = 2'-O-methylcytidine-3'-phosphate
  modified_base 16: mod_base = OTHER; note = 2'-fluorouridine-3'-phosphate
  modified_base 17: mod_base = OTHER; note = 2'-O-methylcytidine-3'-phosphate
  modified_base 18: mod_base = OTHER; note = 2'-O-methyladenosine-3'-phosphate
  modified_base 19: mod_base = OTHER; note = 2'-O-methyluridine-3'-phosphate
  modified_base 20: mod_base = OTHER; note = 2'-O-methyladenosine-3'-phosphate
  modified_base 21: mod_base = OTHER; note = 2'-O-methylguanosine-3'-phosphorothioate
  modified_base 22: mod_base = OTHER; note = 2'-O-methyluridine-3'-phosphorothioate
  modified_base 23: mod_base = OTHER; note = 2'-O-methylguanosine-3'-phosphate
tagatgcactcgcactcatagtg

SEQ ID NO: 565 - RNA, 23 nt, synthetic construct
  source 1..23: mol_type = other RNA
  modified_base 1: mod_base = OTHER; note = 2'-O-methyluridine-3'-phosphorothioate
  modified_base 2: mod_base = OTHER; note = 2'-fluorouridine-3'-phosphorothioate
  modified_base 3: mod_base = OTHER; note = 2'-O-methylguanosine-3'-phosphate
  modified_base 4: mod_base = OTHER; note = 2'-O-methylcytidine-3'-phosphate
  modified_base 5: mod_base = OTHER; note = 2'-O-methylcytidine-3'-phosphate
  modified_base 6: mod_base = OTHER; note = 2'-fluoroguanosine-3'-phosphate
  modified_base 7: mod_base = OTHER; note = 2'-O-methyluridine-3'-phosphate
  modified_base 8: mod_base = OTHER; note = 2'-O-methylcytidine-3'-phosphate
  modified_base 9: mod_base = OTHER; note = 2'-O-methyladenosine-3'-phosphate
  modified_base 10: mod_base = OTHER; note = 2'-O-methyladenosine-3'-phosphate
  modified_base 11: mod_base = OTHER; note = 2'-O-methyladenosine-3'-phosphate
  modified_base 12: mod_base = OTHER; note = 2'-O-methylguanosine-3'-phosphate
  modified_base 13: mod_base = OTHER; note = 2'-O-methylguanosine-3'-phosphate
  modified_base 14: mod_base = OTHER; note = 2'-fluorouridine-3'-phosphate
  modified_base 15: mod_base = OTHER; note = 2'-O-methylguanosine-3'-phosphate
  modified_base 16: mod_base = OTHER; note = 2'-fluoroguanosine-3'-phosphate
  modified_base 17: mod_base = OTHER; note = 2'-O-methyladenosine-3'-phosphate
  modified_base 18: mod_base = OTHER; note = 2'-O-methyladenosine-3'-phosphate
  modified_base 19: mod_base = OTHER; note = 2'-O-methyluridine-3'-phosphate
  modified_base 20: mod_base = OTHER; note = 2'-O-methyladenosine-3'-phosphate
  modified_base 21: mod_base = OTHER; note = 2'-O-methylguanosine-3'-phosphorothioate
  modified_base 22: mod_base = OTHER; note = 2'-O-methyluridine-3'-phosphorothioate
  modified_base 23: mod_base = OTHER; note = 2'-O-methylguanosine-3'-phosphate
ttgccgtcaaaggtggaatagtg

SEQ ID NO: 566 - RNA, 23 nt, synthetic construct
  source 1..23: mol_type = other RNA
  modified_base 1: mod_base = OTHER; note = 2'-O-methyluridine-3'-phosphorothioate
  modified_base 2: mod_base = OTHER; note = 2'-fluoroguanosine-3'-phosphorothioate
  modified_base 3: mod_base = OTHER; note = 2'-O-methyluridine-3'-phosphate
  modified_base 4: mod_base = OTHER; note = 2'-O-methylguanosine-3'-phosphate
  modified_base 5: mod_base = OTHER; note = 2'-O-methylcytidine-3'-phosphate
  modified_base 6: mod_base = OTHER; note = 2'-fluorocytidine-3'-phosphate
  modified_base 7: mod_base = OTHER; note = 2'-O-methylguanosine-3'-phosphate
  modified_base 8: mod_base = OTHER; note = 2'-O-methyluridine-3'-phosphate
  modified_base 9: mod_base = OTHER; note = 2'-O-methylcytidine-3'-phosphate
  modified_base 10: mod_base = OTHER; note = 2'-O-methyladenosine-3'-phosphate
  modified_base 11: mod_base = OTHER; note = 2'-O-methyladenosine-3'-phosphate
  modified_base 12: mod_base = OTHER; note = 2'-O-methyladenosine-3'-phosphate
  modified_base 13: mod_base = OTHER; note = 2'-O-methylguanosine-3'-phosphate
  modified_base 14: mod_base = OTHER; note = 2'-fluoroguanosine-3'-phosphate
  modified_base 15: mod_base = OTHER; note = 2'-O-methyluridine-3'-phosphate
  modified_base 16: mod_base = OTHER; note = 2'-fluoroguanosine-3'-phosphate
  modified_base 17: mod_base = OTHER; note = 2'-O-methylguanosine-3'-phosphate
  modified_base 18: mod_base = OTHER; note = 2'-O-methyladenosine-3'-phosphate
  modified_base 19: mod_base = OTHER; note = 2'-O-methyladenosine-3'-phosphate
  modified_base 20: mod_base = OTHER; note = 2'-O-methyluridine-3'-phosphate
  modified_base 21: mod_base = OTHER; note = 2'-O-methyladenosine-3'-phosphorothioate
  modified_base 22: mod_base = OTHER; note = 2'-O-methylguanosine-3'-phosphorothioate
  modified_base 23: mod_base = OTHER; note = 2'-O-methyluridine-3'-phosphate
tgtgccgtcaaaggtggaatagt

SEQ ID NO: 567 - DNA, 21 bp, synthetic construct
  source 1..21: mol_type = other DNA
  modified_base 13: mod_base = OTHER; note = 2'-O-methylguanosine-3'-phosphate
  modified_base 20: mod_base = OTHER; note = 2'-O-methyluridine-3'-phosphorothioate
  modified_base 21: mod_base = OTHER; note = 2'-O-methyladenosine-3'-phosphate
  misc_feature 1: note = DNA
  misc_feature 2..21: note = RNA
tgtgccgtcaaaggtggaata

SEQ ID NO: 568 - DNA, 23 bp, synthetic construct
  source 1..23: mol_type = other DNA
  modified_base 13: mod_base = OTHER; note = 2'-O-methylguanosine-3'-phosphate
  modified_base 22: mod_base = OTHER; note = 2'-O-methylguanosine-3'-phosphorothioate
  modified_base 23: mod_base = OTHER; note = 2'-O-methyluridine-3'-phosphate
  misc_feature 1: note = DNA
  misc_feature 2..23: note = RNA
tgtgccgtcaaaggtggaatagt

SEQ ID NO: 569 - RNA, 23 nt, synthetic construct
  source 1..23: mol_type = other RNA
  modified_base 1: mod_base = OTHER; note = 2'-O-methyluridine-3'-phosphorothioate
  modified_base 2: mod_base = OTHER; note = 2'-fluoroadenosine-3'-phosphorothioate
  modified_base 3: mod_base = OTHER; note = 2'-O-methyladenosine-3'-phosphate
  modified_base 4: mod_base = OTHER; note = 2'-O-methylguanosine-3'-phosphate
  modified_base 5: mod_base = OTHER; note = 2'-O-methyladenosine-3'-phosphate
  modified_base 6: mod_base = OTHER; note = 2'-fluoroguanosine-3'-phosphate
  modified_base 7: mod_base = OTHER; note = 2'-O-methylguanosine-3'-phosphate
  modified_base 8: mod_base = OTHER; note = 2'-O-methyluridine-3'-phosphate
  modified_base 9: mod_base = OTHER; note = 2'-O-methylguanosine-3'-phosphate
  modified_base 10: mod_base = OTHER; note = 2'-O-methylcytidine-3'-phosphate
  modified_base 11: mod_base = OTHER; note = 2'-O-methylcytidine-3'-phosphate
  modified_base 12: mod_base = OTHER; note = 2'-O-methylguanosine-3'-phosphate
  modified_base 13: mod_base = OTHER; note = 2'-O-methyluridine-3'-phosphate
  modified_base 14: mod_base = OTHER; note = 2'-fluorocytidine-3'-phosphate
  modified_base 15: mod_base = OTHER; note = 2'-O-methyladenosine-3'-phosphate
  modified_base 16: mod_base = OTHER; note = 2'-fluoroadenosine-3'-phosphate
  modified_base 17: mod_base = OTHER; note = 2'-O-methyladenosine-3'-phosphate
  modified_base 18: mod_base = OTHER; note = 2'-O-methylguanosine-3'-phosphate
  modified_base 19: mod_base = OTHER; note = 2'-O-methylguanosine-3'-phosphate
  modified_base 20: mod_base = OTHER; note = 2'-O-methyluridine-3'-phosphate
  modified_base 21: mod_base = OTHER; note = 2'-O-methylguanosine-3'-phosphorothioate
  modified_base 22: mod_base = OTHER; note = 2'-O-methylguanosine-3'-phosphorothioate
  modified_base 23: mod_base = OTHER; note = 2'-O-methyladenosine-3'-phosphate
taagaggtgccgtcaaaggtgga

SEQ ID NO: 570 - RNA, 23 nt, synthetic construct
  source 1..23: mol_type = other RNA
  modified_base 1: mod_base = OTHER; note = 2'-O-methyluridine-3'-phosphorothioate
  modified_base 2: mod_base = OTHER; note = 2'-fluoroguanosine-3'-phosphorothioate
  modified_base 3: mod_base = OTHER; note = 2'-O-methyluridine-3'-phosphate
  modified_base 4: mod_base = OTHER; note = 2'-O-methyladenosine-3'-phosphate
  modified_base 5: mod_base = OTHER; note = 2'-O-methyladenosine-3'-phosphate
  modified_base 6: mod_base = OTHER; note = 2'-fluoroguanosine-3'-phosphate
  modified_base 7: mod_base = OTHER; note = 2'-O-methyladenosine-3'-phosphate
  modified_base 8: mod_base = OTHER; note = 2'-O-methylguanosine-3'-phosphate
  modified_base 9: mod_base = OTHER; note = 2'-O-methylguanosine-3'-phosphate
  modified_base 10: mod_base = OTHER; note = 2'-O-methyluridine-3'-phosphate
  modified_base 11: mod_base = OTHER; note = 2'-O-methylguanosine-3'-phosphate
  modified_base 12: mod_base = OTHER; note = 2'-O-methylcytidine-3'-phosphate
  modified_base 13: mod_base = OTHER; note = 2'-O-methylcytidine-3'-phosphate
  modified_base 14: mod_base = OTHER; note = 2'-fluoroguanosine-3'-phosphate
  modified_base 15: mod_base = OTHER; note = 2'-O-methyluridine-3'-phosphate
  modified_base 16: mod_base = OTHER; note = 2'-fluorocytidine-3'-phosphate
  modified_base 17: mod_base = OTHER; note = 2'-O-methyladenosine-3'-phosphate
  modified_base 18: mod_base = OTHER; note = 2'-O-methyladenosine-3'-phosphate
  modified_base 19: mod_base = OTHER; note = 2'-O-methyladenosine-3'-phosphate
  modified_base 20: mod_base = OTHER; note = 2'-O-methylguanosine-3'-phosphate
  modified_base 21: mod_base = OTHER; note = 2'-O-methylguanosine-3'-phosphorothioate
  modified_base 22: mod_base = OTHER; note = 2'-O-methyluridine-3'-phosphorothioate
  modified_base 23: mod_base = OTHER; note = 2'-O-methylguanosine-3'-phosphate
tgtaagaggtgccgtcaaaggtg

SEQ ID NO: 571 - DNA, 21 bp, synthetic construct
  source 1..21: mol_type = other DNA
  modified_base 13: mod_base = OTHER; note = 2'-O-methylcytidine-3'-phosphate
  modified_base 20: mod_base = OTHER; note = 2'-O-methylguanosine-3'-phosphorothioate
  modified_base 21: mod_base = OTHER; note = 2'-O-methylguanosine-3'-phosphate
  misc_feature 1: note = DNA
  misc_feature 2..21: note = RNA
tgtaagaggtgccgtcaaagg

SEQ ID NO: 572 - DNA, 23 bp, synthetic construct
  source 1..23: mol_type = other DNA
  modified_base 13: mod_base = OTHER; note = 2'-O-methylcytidine-3'-phosphate
  modified_base 22: mod_base = OTHER; note = 2'-O-methyluridine-3'-phosphorothioate
  modified_base 23: mod_base = OTHER; note = 2'-O-methylguanosine-3'-phosphate
  misc_feature 1: note = DNA
  misc_feature 2..23: note = RNA
tgtaagaggtgccgtcaaaggtg

SEQ ID NO: 573 - RNA, 23 nt, synthetic construct
  source 1..23: mol_type = other RNA
  modified_base 1: mod_base = OTHER; note = 2'-O-methyluridine-3'-phosphorothioate
  modified_base 2: mod_base = OTHER; note = 2'-fluoroguanosine-3'-phosphorothioate
  modified_base 3: mod_base = OTHER; note = 2'-O-methyluridine-3'-phosphate
  modified_base 4: mod_base = OTHER; note = 2'-O-methylguanosine-3'-phosphate
  modified_base 5: mod_base = OTHER; note = 2'-O-methyluridine-3'-phosphate
  modified_base 6: mod_base = OTHER; note = 2'-fluoroadenosine-3'-phosphate
  modified_base 7: mod_base = OTHER; note = 2'-O-methyladenosine-3'-phosphate
  modified_base 8: mod_base = OTHER; note = 2'-O-methylguanosine-3'-phosphate
  modified_base 9: mod_base = OTHER; note = 2'-O-methyladenosine-3'-phosphate
  modified_base 10: mod_base = OTHER; note = 2'-O-methylguanosine-3'-phosphate
  modified_base 11: mod_base = OTHER; note = 2'-O-methylguanosine-3'-phosphate
  modified_base 12: mod_base = OTHER; note = 2'-O-methyluridine-3'-phosphate
  modified_base 13: mod_base = OTHER; note = 2'-O-methylguanosine-3'-phosphate
  modified_base 14: mod_base = OTHER; note = 2'-fluorocytidine-3'-phosphate
  modified_base 15: mod_base = OTHER; note = 2'-O-methylcytidine-3'-phosphate
  modified_base 16: mod_base = OTHER; note = 2'-fluoroguanosine-3'-phosphate
  modified_base 17: mod_base = OTHER; note = 2'-O-methyluridine-3'-phosphate
  modified_base 18: mod_base = OTHER; note = 2'-O-methylcytidine-3'-phosphate
  modified_base 19: mod_base = OTHER; note = 2'-O-methyladenosine-3'-phosphate
  modified_base 20: mod_base = OTHER; note = 2'-O-methyladenosine-3'-phosphate
  modified_base 21: mod_base = OTHER; note = 2'-O-methyladenosine-3'-phosphorothioate
  modified_base 22: mod_base = OTHER; note = 2'-O-methylguanosine-3'-phosphorothioate
  modified_base 23: mod_base = OTHER; note = 2'-O-methylguanosine-3'-phosphate
tgtgtaagaggtgccgtcaaagg

SEQ ID NO: 574 - DNA, 21 bp, synthetic construct
  source 1..21: mol_type = other DNA
  modified_base 13: mod_base = OTHER; note = 2'-O-methylguanosine-3'-phosphate
  modified_base 20: mod_base = OTHER; note = 2'-O-methyladenosine-3'-phosphorothioate
  modified_base 21: mod_base = OTHER; note = 2'-O-methyladenosine-3'-phosphate
  misc_feature 1: note = DNA
  misc_feature 2..21: note = RNA
tgtgtaagaggtgccgtcaaa

SEQ ID NO: 575 - DNA, 23 bp, synthetic construct
  source 1..23: mol_type = other DNA
  modified_base 13: mod_base = OTHER; note = 2'-O-methylguanosine-3'-phosphate
  modified_base 22: mod_base = OTHER; note = 2'-O-methylguanosine-3'-phosphorothioate
  modified_base 23: mod_base = OTHER; note = 2'-O-methylguanosine-3'-phosphate
  misc_feature 1: note = DNA
  misc_feature 2..23: note = RNA
tgtgtaagaggtgccgtcaaagg

SEQ ID NO: 576 - RNA, 23 nt, synthetic construct
  source 1..23: mol_type = other RNA
  modified_base 1: mod_base = OTHER; note = 2'-O-methyluridine-3'-phosphorothioate
  modified_base 2: mod_base = OTHER; note = 2'-fluoroguanosine-3'-phosphorothioate
  modified_base 3: mod_base = OTHER; note = 2'-O-methylguanosine-3'-phosphate
  modified_base 4: mod_base = OTHER; note = 2'-O-methyluridine-3'-phosphate
  modified_base 5: mod_base = OTHER; note = 2'-O-methylguanosine-3'-phosphate
  modified_base 6: mod_base = OTHER; note = 2'-fluorouridine-3'-phosphate
  modified_base 7: mod_base = OTHER; note = 2'-O-methyladenosine-3'-phosphate
  modified_base 8: mod_base = OTHER; note = 2'-O-methyladenosine-3'-phosphate
  modified_base 9: mod_base = OTHER; note = 2'-O-methylguanosine-3'-phosphate
  modified_base 10: mod_base = OTHER; note = 2'-O-methyladenosine-3'-phosphate
  modified_base 11: mod_base = OTHER; note = 2'-O-methylguanosine-3'-phosphate
  modified_base 12: mod_base = OTHER; note = 2'-O-methylguanosine-3'-phosphate
  modified_base 13: mod_base = OTHER; note = 2'-O-methyluridine-3'-phosphate
  modified_base 14: mod_base = OTHER; note = 2'-fluoroguanosine-3'-phosphate
  modified_base 15: mod_base = OTHER; note = 2'-O-methylcytidine-3'-phosphate
  modified_base 16: mod_base = OTHER; note = 2'-fluorocytidine-3'-phosphate
  modified_base 17: mod_base = OTHER; note = 2'-O-methylguanosine-3'-phosphate
  modified_base 18: mod_base = OTHER; note = 2'-O-methyluridine-3'-phosphate
  modified_base 19: mod_base = OTHER; note = 2'-O-methylcytidine-3'-phosphate
  modified_base 20: mod_base = OTHER; note = 2'-O-methyladenosine-3'-phosphate
  modified_base 21: mod_base = OTHER; note = 2'-O-methyladenosine-3'-phosphorothioate
  modified_base 22: mod_base = OTHER; note = 2'-O-methyladenosine-3'-phosphorothioate
  modified_base 23: mod_base = OTHER; note = 2'-O-methylguanosine-3'-phosphate
tggtgtaagaggtgccgtcaaag

SEQ ID NO: 577 - RNA, 23 nt, synthetic construct
  source 1..23: mol_type = other RNA
  modified_base 1: mod_base = OTHER; note = 2'-O-methyluridine-3'-phosphorothioate
  modified_base 2: mod_base = OTHER; note = 2'-fluoroadenosine-3'-phosphorothioate
  modified_base 3: mod_base = OTHER; note = 2'-O-methyluridine-3'-phosphate
  modified_base 4: mod_base = OTHER; note = 2'-O-methyladenosine-3'-phosphate
  modified_base 5: mod_base = OTHER; note = 2'-O-methyluridine-3'-phosphate
  modified_base 6: mod_base = OTHER; note = 2'-fluorocytidine-3'-phosphate
  modified_base 7: mod_base = OTHER; note = 2'-O-methylcytidine-3'-phosphate
  modified_base 8: mod_base = OTHER; note = 2'-O-methyladenosine-3'-phosphate
  modified_base 9: mod_base = OTHER; note = 2'-O-methyluridine-3'-phosphate
  modified_base 10: mod_base = OTHER; note = 2'-O-methylguanosine-3'-phosphate
  modified_base 11: mod_base = OTHER; note = 2'-O-methylguanosine-3'-phosphate
  modified_base 12: mod_base = OTHER; note = 2'-O-methyladenosine-3'-phosphate
  modified_base 13: mod_base = OTHER; note = 2'-O-methylcytidine-3'-phosphate
  modified_base 14: mod_base = OTHER; note = 2'-fluorouridine-3'-phosphate
  modified_base 15: mod_base = OTHER; note = 2'-O-methyluridine-3'-phosphate
  modified_base 16: mod_base = OTHER; note = 2'-fluoroguanosine-3'-phosphate
  modified_base 17: mod_base = OTHER; note = 2'-O-methyluridine-3'-phosphate
  modified_base 18: mod_base = OTHER; note = 2'-O-methyladenosine-3'-phosphate
  modified_base 19: mod_base = OTHER; note = 2'-O-methylguanosine-3'-phosphate
  modified_base 20: mod_base = OTHER; note = 2'-O-methyluridine-3'-phosphate
  modified_base 21: mod_base = OTHER; note = 2'-O-methylguanosine-3'-phosphorothioate
  modified_base 22: mod_base = OTHER; note = 2'-O-methylguanosine-3'-phosphorothioate
  modified_base 23: mod_base = OTHER; note = 2'-O-methyladenosine-3'-phosphate
tatatccatggacttgtagtgga

SEQ ID NO: 578 - DNA, 21 bp, synthetic construct
  source 1..21: mol_type = other DNA
  modified_base 13: mod_base = OTHER; note = 2'-O-methylcytidine-3'-phosphate
  modified_base 20: mod_base = OTHER; note = 2'-O-methyluridine-3'-phosphorothioate
  modified_base 21: mod_base = OTHER; note = 2'-O-methylguanosine-3'-phosphate
  misc_feature 1: note = DNA
  misc_feature 2..21: note = RNA
tatatccatggacttgtagtg

SEQ ID NO: 579 - DNA, 23 bp, synthetic construct
  source 1..23: mol_type = other DNA
  modified_base 13: mod_base = OTHER; note = 2'-O-methylcytidine-3'-phosphate
  modified_base 22: mod_base = OTHER; note = 2'-O-methylguanosine-3'-phosphorothioate
  modified_base 23: mod_base = OTHER; note = 2'-O-methyladenosine-3'-phosphate
  misc_feature 1: note = DNA
  misc_feature 2..23: note = RNA
tatatccatggacttgtagtgga

SEQ ID NO: 580 - RNA, 23 nt, synthetic construct
  source 1..23: mol_type = other RNA
  modified_base 1: mod_base = OTHER; note = 2'-O-methyluridine-3'-phosphorothioate
  modified_base 2: mod_base = OTHER; note = 2'-fluoroguanosine-3'-phosphorothioate
  modified_base 3: mod_base = OTHER; note = 2'-O-methylguanosine-3'-phosphate
  modified_base 4: mod_base = OTHER; note = 2'-O-methyladenosine-3'-phosphate
  modified_base 5: mod_base = OTHER; note = 2'-O-methylcytidine-3'-phosphate
  modified_base 6: mod_base = OTHER; note = 2'-fluoroguanosine-3'-phosphate
  modified_base 7: mod_base = OTHER; note = 2'-O-methyladenosine-3'-phosphate
  modified_base 8: mod_base = OTHER; note = 2'-O-methyluridine-3'-phosphate
  modified_base 9: mod_base = OTHER; note = 2'-O-methyladenosine-3'-phosphate
  modified_base 10: mod_base = OTHER; note = 2'-O-methyluridine-3'-phosphate
  modified_base 11: mod_base = OTHER; note = 2'-O-methylcytidine-3'-phosphate
  modified_base 12: mod_base = OTHER; note = 2'-O-methylcytidine-3'-phosphate
  modified_base 13: mod_base = OTHER; note = 2'-O-methyladenosine-3'-phosphate
  modified_base 14: mod_base = OTHER; note = 2'-fluorouridine-3'-phosphate
  modified_base 15: mod_base = OTHER; note = 2'-O-methylguanosine-3'-phosphate
  modified_base 16: mod_base = OTHER; note = 2'-fluoroguanosine-3'-phosphate
  modified_base 17: mod_base = OTHER; note = 2'-O-methyladenosine-3'-phosphate
  modified_base 18: mod_base = OTHER; note = 2'-O-methylcytidine-3'-phosphate
  modified_base 19: mod_base = OTHER; note = 2'-O-methyluridine-3'-phosphate
  modified_base 20: mod_base = OTHER; note = 2'-O-methyluridine-3'-phosphate
  modified_base 21: mod_base = OTHER; note = 2'-O-methylguanosine-3'-phosphorothioate
  modified_base 22: mod_base = OTHER; note = 2'-O-methyluridine-3'-phosphorothioate
  modified_base 23: mod_base = OTHER; note = 2'-O-methyladenosine-3'-phosphate
tggacgatatccatggacttgta

SEQ ID NO: 581 - DNA, 21 bp, synthetic construct
  source 1..21: mol_type = other DNA
  modified_base 13: mod_base = OTHER; note = 2'-O-methyladenosine-3'-phosphate
  modified_base 20: mod_base = OTHER; note = 2'-O-methyluridine-3'-phosphorothioate
  modified_base 21: mod_base = OTHER; note = 2'-O-methylguanosine-3'-phosphate
  misc_feature 1: note = DNA
  misc_feature 2..21: note = RNA
tggacgatatccatggacttg

SEQ ID NO: 582 - RNA, 23 nt, synthetic construct
  source 1..23: mol_type = other RNA
  modified_base 1: mod_base = OTHER; note = 2'-O-methyluridine-3'-phosphorothioate
  modified_base 2: mod_base = OTHER; note = 2'-fluoroadenosine-3'-phosphorothioate
  modified_base 3: mod_base = OTHER; note = 2'-O-methylguanosine-3'-phosphate
  modified_base 4: mod_base = OTHER; note = 2'-O-methylguanosine-3'-phosphate
  modified_base 5: mod_base = OTHER; note = 2'-O-methyladenosine-3'-phosphate
  modified_base 6: mod_base = OTHER; note = 2'-fluorocytidine-3'-phosphate
  modified_base 7: mod_base = OTHER; note = 2'-O-methylguanosine-3'-phosphate
  modified_base 8: mod_base = OTHER; note = 2'-O-methyladenosine-3'-phosphate
  modified_base 9: mod_base = OTHER; note = 2'-O-methyluridine-3'-phosphate
  modified_base 10: mod_base = OTHER; note = 2'-O-methyladenosine-3'-phosphate
  modified_base 11: mod_base = OTHER; note = 2'-O-methyluridine-3'-phosphate
  modified_base 12: mod_base = OTHER; note = 2'-O-methylcytidine-3'-phosphate
  modified_base 13: mod_base = OTHER; note = 2'-O-methylcytidine-3'-phosphate
  modified_base 14: mod_base = OTHER; note = 2'-fluoroadenosine-3'-phosphate
  modified_base 15: mod_base = OTHER; note = 2'-O-methyluridine-3'-phosphate
  modified_base 16: mod_base = OTHER; note = 2'-fluoroguanosine-3'-phosphate
  modified_base 17: mod_base = OTHER; note = 2'-O-methylguanosine-3'-phosphate
  modified_base 18: mod_base = OTHER; note = 2'-O-methyladenosine-3'-phosphate
  modified_base 19: mod_base = OTHER; note = 2'-O-methylcytidine-3'-phosphate
  modified_base 20: mod_base = OTHER; note = 2'-O-methyluridine-3'-phosphate
  modified_base 21: mod_base = OTHER; note = 2'-O-methyluridine-3'-phosphorothioate
  modified_base 22: mod_base = OTHER; note = 2'-O-methylguanosine-3'-phosphorothioate
  modified_base 23: mod_base = OTHER; note = 2'-O-methyluridine-3'-phosphate
taggacgatatccatggacttgt

SEQ ID NO: 583 - DNA, 21 bp, synthetic construct
  source 1..21: mol_type = other DNA
  modified_base 13: mod_base = OTHER; note = 2'-O-methylguanosine-3'-phosphate
  modified_base 20: mod_base = OTHER; note = 2'-O-methyladenosine-3'-phosphorothioate
  modified_base 21: mod_base = OTHER; note = 2'-O-methylguanosine-3'-phosphate
  misc_feature 1: note = DNA
  misc_feature 2..21: note = RNA
taccggaatttggtcaaacag

SEQ ID NO: 584 - DNA, 23 bp, synthetic construct
  source 1..23: mol_type = other DNA
  modified_base 13: mod_base = OTHER; note = 2'-O-methylguanosine-3'-phosphate
  modified_base 22: mod_base = OTHER; note = 2'-O-methylguanosine-3'-phosphorothioate
  modified_base 23: mod_base = OTHER; note = 2'-O-methyladenosine-3'-phosphate
  misc_feature 1: note = DNA
  misc_feature 2..23: note = RNA
taccggaatttggtcaaacagga

SEQ ID NO: 585 - RNA, 23 nt, synthetic construct
  source 1..23: mol_type = other RNA
  modified_base 1: mod_base = OTHER; note = 2'-O-methyluridine-3'-phosphorothioate
  modified_base 2: mod_base = OTHER; note = 2'-fluoroguanosine-3'-phosphorothioate
  modified_base 3: mod_base = OTHER; note = 2'-O-methylcytidine-3'-phosphate
  modified_base 4: mod_base = OTHER; note = 2'-O-methyluridine-3'-phosphate
  modified_base 5: mod_base = OTHER; note = 2'-O-methylcytidine-3'-phosphate
  modified_base 6: mod_base = OTHER; note = 2'-fluoroadenosine-3'-phosphate
  modified_base 7: mod_base = OTHER; note = 2'-O-methylcytidine-3'-phosphate
  modified_base 8: mod_base = OTHER; note = 2'-O-methylcytidine-3'-phosphate
  modified_base 9: mod_base = OTHER; note = 2'-O-methylguanosine-3'-phosphate
  modified_base 10: mod_base = OTHER; note = 2'-O-methylguanosine-3'-phosphate
  modified_base 11: mod_base = OTHER; note = 2'-O-methyladenosine-3'-phosphate
  modified_base 12: mod_base = OTHER; note = 2'-O-methyladenosine-3'-phosphate
  modified_base 13: mod_base = OTHER; note = 2'-O-methyluridine-3'-phosphate
  modified_base 14: mod_base = OTHER; note = 2'-fluorouridine-3'-phosphate
  modified_base 15: mod_base = OTHER; note = 2'-O-methyluridine-3'-phosphate
  modified_base 16: mod_base = OTHER; note = 2'-fluoroguanosine-3'-phosphate
  modified_base 17: mod_base = OTHER; note = 2'-O-methylguanosine-3'-phosphate
  modified_base 18: mod_base = OTHER; note = 2'-O-methyluridine-3'-phosphate
  modified_base 19: mod_base = OTHER; note = 2'-O-methylcytidine-3'-phosphate
  modified_base 20: mod_base = OTHER; note = 2'-O-methyladenosine-3'-phosphate
  modified_base 21: mod_base = OTHER; note = 2'-O-methyladenosine-3'-phosphorothioate
  modified_base 22: mod_base = OTHER; note = 2'-O-methyladenosine-3'-phosphorothioate
  modified_base 23: mod_base = OTHER; note = 2'-O-methylcytidine-3'-phosphate
tgctcaccggaatttggtcaaac

SEQ ID NO: 586 - DNA, 21 bp, synthetic construct
  source 1..21: mol_type = other DNA
  modified_base 13: mod_base = OTHER; note = 2'-O-methyluridine-3'-phosphate
  modified_base 20: mod_base = OTHER; note = 2'-O-methyladenosine-3'-phosphorothioate
  modified_base 21: mod_base = OTHER; note = 2'-O-methyladenosine-3'-phosphate
  misc_feature 1: note = DNA
  misc_feature 2..21: note = RNA
tgctcaccggaatttggtcaa

SEQ ID NO: 587 - DNA, 23 bp, synthetic construct
  source 1..23: mol_type = other DNA
  modified_base 13: mod_base = OTHER; note = 2'-O-methyluridine-3'-phosphate
  modified_base 22: mod_base = OTHER; note = 2'-O-methyladenosine-3'-phosphorothioate
  modified_base 23: mod_base = OTHER; note = 2'-O-methylcytidine-3'-phosphate
  misc_feature 1: note = DNA
  misc_feature 2..23: note = RNA
tgctcaccggaatttggtcaaac

SEQ ID NO: 588 - RNA, 23 nt, synthetic construct
  source 1..23: mol_type = other RNA
  modified_base 1: mod_base = OTHER; note = 2'-O-methyluridine-3'-phosphorothioate
  modified_base 2: mod_base = OTHER; note = 2'-fluoroguanosine-3'-phosphorothioate
  modified_base 3: mod_base = OTHER; note = 2'-O-methylcytidine-3'-phosphate
  modified_base 4: mod_base = OTHER; note = 2'-O-methyluridine-3'-phosphate
  modified_base 5: mod_base = OTHER; note = 2'-O-methylguanosine-3'-phosphate
  modified_base 6: mod_base = OTHER; note = 2'-fluorocytidine-3'-phosphate
  modified_base 7: mod_base = OTHER; note = 2'-O-methyluridine-3'-phosphate
  modified_base 8: mod_base = OTHER; note = 2'-O-methylcytidine-3'-phosphate
  modified_base 9: mod_base = OTHER; note = 2'-O-methyladenosine-3'-phosphate
  modified_base 10: mod_base = OTHER; note = 2'-O-methylcytidine-3'-phosphate
  modified_base 11: mod_base = OTHER; note = 2'-O-methylcytidine-3'-phosphate
  modified_base 12: mod_base = OTHER; note = 2'-O-methylguanosine-3'-phosphate
  modified_base 13: mod_base = OTHER; note = 2'-O-methylguanosine-3'-phosphate
  modified_base 14: mod_base = OTHER; note = 2'-fluoroadenosine-3'-phosphate
  modified_base 15: mod_base = OTHER; note = 2'-O-methyladenosine-3'-phosphate
  modified_base 16: mod_base = OTHER; note = 2'-fluorouridine-3'-phosphate
  modified_base 17: mod_base = OTHER; note = 2'-O-methyluridine-3'-phosphate
  modified_base 18: mod_base = OTHER; note = 2'-O-methyluridine-3'-phosphate
  modified_base 19: mod_base = OTHER; note = 2'-O-methylguanosine-3'-phosphate
  modified_base 20: mod_base = OTHER; note = 2'-O-methylguanosine-3'-phosphate
  modified_base 21: mod_base = OTHER; note = 2'-O-methyluridine-3'-phosphorothioate
  modified_base 22: mod_base = OTHER; note = 2'-O-methylcytidine-3'-phosphorothioate
  modified_base 23: mod_base = OTHER; note = 2'-O-methyladenosine-3'-phosphate
tgctgctcaccggaatttggtca

SEQ ID NO: 589 - RNA, 23 nt, synthetic construct
  source 1..23: mol_type = other RNA
  modified_base 1: mod_base = OTHER; note = 2'-O-methyluridine-3'-phosphorothioate
  modified_base 2: mod_base = OTHER; note = 2'-fluorocytidine-3'-phosphorothioate
  modified_base 3: mod_base = OTHER; note = 2'-O-methylguanosine-3'-phosphate
  modified_base 4: mod_base = OTHER; note = 2'-O-methylcytidine-3'-phosphate
  modified_base 5: mod_base = OTHER; note = 2'-O-methyluridine-3'-phosphate
  modified_base 6: mod_base = OTHER; note = 2'-fluoroguanosine-3'-phosphate
  modified_base 7: mod_base = OTHER; note = 2'-O-methylcytidine-3'-phosphate
  modified_base 8: mod_base = OTHER; note = 2'-O-methyluridine-3'-phosphate
  modified_base 9: mod_base = OTHER; note = 2'-O-methylcytidine-3'-phosphate
  modified_base 10: mod_base = OTHER; note = 2'-O-methyladenosine-3'-phosphate
  modified_base 11: mod_base = OTHER; note = 2'-O-methylcytidine-3'-phosphate
  modified_base 12: mod_base = OTHER; note = 2'-O-methylcytidine-3'-phosphate
  modified_base 13: mod_base = OTHER; note = 2'-O-methylguanosine-3'-phosphate
  modified_base 14: mod_base = OTHER; note = 2'-fluoroguanosine-3'-phosphate
  modified_base 15: mod_base = OTHER; note = 2'-O-methyladenosine-3'-phosphate
  modified_base 16: mod_base = OTHER; note = 2'-fluoroadenosine-3'-phosphate
  modified_base 17: mod_base = OTHER; note = 2'-O-methyluridine-3'-phosphate
  modified_base 18: mod_base = OTHER; note = 2'-O-methyluridine-3'-phosphate
  modified_base 19: mod_base = OTHER; note = 2'-O-methyluridine-3'-phosphate
  modified_base 20: mod_base = OTHER; note = 2'-O-methylguanosine-3'-phosphate
  modified_base 21: mod_base = OTHER; note = 2'-O-methylguanosine-3'-phosphorothioate
  modified_base 22: mod_base = OTHER; note = 2'-O-methyluridine-3'-phosphorothioate
  modified_base 23: mod_base = OTHER; note = 2'-O-methylcytidine-3'-phosphate
tcgctgctcaccggaatttggtc

SEQ ID NO: 590 - DNA, 21 bp, synthetic construct
  source 1..21: mol_type = other DNA
  modified_base 13: mod_base = OTHER; note = 2'-O-methylguanosine-3'-phosphate
  modified_base 20: mod_base = OTHER; note = 2'-O-methylguanosine-3'-phosphorothioate
  modified_base 21: mod_base = OTHER; note = 2'-O-methylguanosine-3'-phosphate
  misc_feature 1: note = DNA
  misc_feature 2..21: note = RNA
tcgctgctcaccggaatttgg

SEQ ID NO: 591 - DNA, 23 bp, synthetic construct
  source 1..23: mol_type = other DNA
  modified_base 13: mod_base = OTHER; note = 2'-O-methylguanosine-3'-phosphate
  modified_base 22: mod_base = OTHER; note = 2'-O-methyluridine-3'-phosphorothioate
  modified_base 23: mod_base = OTHER; note = 2'-O-methylcytidine-3'-phosphate
  misc_feature 1: note = DNA
  misc_feature 2..23: note = RNA
tcgctgctcaccggaatttggtc

SEQ ID NO: 592 - RNA, 23 nt, synthetic construct
  source 1..23: mol_type = other RNA
  modified_base 1: mod_base = OTHER; note = 2'-O-methyluridine-3'-phosphorothioate
  modified_base 2: mod_base = OTHER; note = 2'-fluoroguanosine-3'-phosphorothioate
  modified_base 3: mod_base = OTHER; note = 2'-O-methylcytidine-3'-phosphate
  modified_base 4: mod_base = OTHER; note = 2'-O-methyladenosine-3'-phosphate
  modified_base 5: mod_base = OTHER; note = 2'-O-methylcytidine-3'-phosphate
  modified_base 6: mod_base = OTHER; note = 2'-fluoroguanosine-3'-phosphate
  modified_base 7: mod_base = OTHER; note = 2'-O-methylcytidine-3'-phosphate
  modified_base 8: mod_base = OTHER; note = 2'-O-methylcytidine-3'-phosphate
  modified_base 9: mod_base = OTHER; note = 2'-O-methylguanosine-3'-phosphate
  modified_base 10: mod_base = OTHER; note = 2'-O-methyluridine-3'-phosphate
  modified_base 11: mod_base = OTHER; note = 2'-O-methyluridine-3'-phosphate
  modified_base 12: mod_base = OTHER; note = 2'-O-methylcytidine-3'-phosphate
  modified_base 13: mod_base = OTHER; note = 2'-O-methyluridine-3'-phosphate
  modified_base 14: mod_base = OTHER; note = 2'-fluorouridine-3'-phosphate
  modified_base 15: mod_base = OTHER; note = 2'-O-methylguanosine-3'-phosphate
  modified_base 16: mod_base = OTHER; note = 2'-fluorocytidine-3'-phosphate
  modified_base 17: mod_base = OTHER; note = 2'-O-methyluridine-3'-phosphate
  modified_base 18: mod_base = OTHER; note = 2'-O-methylguanosine-3'-phosphate
  modified_base 19: mod_base = OTHER; note = 2'-O-methyladenosine-3'-phosphate
  modified_base 20: mod_base = OTHER; note = 2'-O-methyladenosine-3'-phosphate
  modified_base 21: mod_base = OTHER; note = 2'-O-methyladenosine-3'-phosphorothioate
  modified_base 22: mod_base = OTHER; note = 2'-O-methylcytidine-3'-phosphorothioate
  modified_base 23: mod_base = OTHER; note = 2'-O-methylcytidine-3'-phosphate
tgcacgccgttcttgctgaaacc

SEQ ID NO: 593 - RNA, 23 nt, synthetic construct
  source 1..23: mol_type = other RNA
  modified_base 1: mod_base = OTHER; note = 2'-O-methyluridine-3'-phosphorothioate
  modified_base 2: mod_base = OTHER; note = 2'-fluoroadenosine-3'-phosphorothioate
  modified_base 3: mod_base = OTHER; note = 2'-O-methylcytidine-3'-phosphate
  modified_base 4: mod_base = OTHER; note = 2'-O-methyladenosine-3'-phosphate
  modified_base 5: mod_base = OTHER; note = 2'-O-methyladenosine-3'-phosphate
  modified_base 6: mod_base = OTHER; note = 2'-fluoroguanosine-3'-phosphate
  modified_base 7: mod_base = OTHER; note = 2'-O-methylcytidine-3'-phosphate
  modified_base 8: mod_base = OTHER; note = 2'-O-methyladenosine-3'-phosphate
  modified_base 9: mod_base = OTHER; note = 2'-O-methylcytidine-3'-phosphate
  modified_base 10: mod_base = OTHER; note = 2'-O-methylguanosine-3'-phosphate
  modified_base 11: mod_base = OTHER; note = 2'-O-methylcytidine-3'-phosphate
  modified_base 12: mod_base = OTHER; note = 2'-O-methylcytidine-3'-phosphate
  modified_base 13: mod_base = OTHER; note = 2'-O-methylguanosine-3'-phosphate
  modified_base 14: mod_base = OTHER; note = 2'-fluorouridine-3'-phosphate
  modified_base 15: mod_base = OTHER; note = 2'-O-methyluridine-3'-phosphate
  modified_base 16: mod_base = OTHER; note = 2'-fluorocytidine-3'-phosphate
  modified_base 17: mod_base = OTHER; note = 2'-O-methyluridine-3'-phosphate
  modified_base 18: mod_base = OTHER; note = 2'-O-methyluridine-3'-phosphate
  modified_base 19: mod_base = OTHER; note = 2'-O-methylguanosine-3'-phosphate
  modified_base 20: mod_base = OTHER; note = 2'-O-methylcytidine-3'-phosphate
  modified_base 21: mod_base = OTHER; note = 2'-O-methyluridine-3'-phosphorothioate
  modified_base 22: mod_base = OTHER; note = 2'-O-methylguanosine-3'-phosphorothioate
  modified_base 23: mod_base = OTHER; note = 2'-O-methyladenosine-3'-phosphate
tacaagcacgccgttcttgctga

SEQ ID NO: 594 - RNA, 23 nt, synthetic construct
  source 1..23: mol_type = other RNA
  modified_base 1: mod_base = OTHER; note = 2'-O-methyluridine-3'-phosphorothioate
  modified_base 2: mod_base = OTHER; note = 2'-fluoroadenosine-3'-phosphorothioate
  modified_base 3: mod_base = OTHER; note = 2'-O-methylguanosine-3'-phosphate
  modified_base 4: mod_base = OTHER; note = 2'-O-methyladenosine-3'-phosphate
  modified_base 5: mod_base = OTHER; note = 2'-O-methylcytidine-3'-phosphate
  modified_base 6: mod_base = OTHER; note = 2'-fluoroadenosine-3'-phosphate
  modified_base 7: mod_base = OTHER; note = 2'-O-methylcytidine-3'-phosphate
  modified_base 8: mod_base = OTHER; note = 2'-O-methyladenosine-3'-phosphate
  modified_base 9: mod_base = OTHER; note = 2'-O-methyladenosine-3'-phosphate
  modified_base 10: mod_base = OTHER; note = 2'-O-methylguanosine-3'-phosphate
  modified_base 11: mod_base = OTHER; note = 2'-O-methylcytidine-3'-phosphate
  modified_base 12: mod_base = OTHER; note = 2'-O-methyladenosine-3'-phosphate
  modified_base 13: mod_base = OTHER; note = 2'-O-methylcytidine-3'-phosphate
  modified_base 14: mod_base = OTHER; note = 2'-fluoroguanosine-3'-phosphate
  modified_base 15: mod_base = OTHER; note = 2'-O-methylcytidine-3'-phosphate
  modified_base 16: mod_base = OTHER; note = 2'-fluorocytidine-3'-phosphate
  modified_base 17: mod_base = OTHER; note = 2'-O-methylguanosine-3'-phosphate
  modified_base 18: mod_base = OTHER; note = 2'-O-methyluridine-3'-phosphate
  modified_base 19: mod_base = OTHER; note = 2'-O-methyluridine-3'-phosphate
  modified_base 20: mod_base = OTHER; note = 2'-O-methylcytidine-3'-phosphate
  modified_base 21: mod_base = OTHER; note = 2'-O-methyluridine-3'-phosphorothioate
  modified_base 22: mod_base = OTHER; note = 2'-O-methyluridine-3'-phosphorothioate
  modified_base 23: mod_base = OTHER; note = 2'-O-methylguanosine-3'-phosphate
tagacacaagcacgccgttcttg

SEQ ID NO: 595 - DNA, 21 bp, synthetic construct
  source 1..21: mol_type = other DNA
  modified_base 13: mod_base = OTHER; note = 2'-O-methylcytidine-3'-phosphate
  modified_base 20: mod_base = OTHER; note = 2'-O-methylcytidine-3'-phosphorothioate
  modified_base 21: mod_base = OTHER; note = 2'-O-methyluridine-3'-phosphate
  misc_feature 1: note = DNA
  misc_feature 2..21: note = RNA
tagacacaagcacgccgttct

SEQ ID NO: 596 - DNA, 23 bp, synthetic construct
  source 1..23: mol_type = other DNA
  modified_base 13: mod_base = OTHER; note = 2'-O-methylcytidine-3'-phosphate
  modified_base 22: mod_base = OTHER; note = 2'-O-methyluridine-3'-phosphorothioate
  modified_base 23: mod_base = OTHER; note = 2'-O-methylguanosine-3'-phosphate
  misc_feature 1: note = DNA
  misc_feature 2..23: note = RNA
tagacacaagcacgccgttcttg

SEQ ID NO: 597 - RNA, 23 nt, synthetic construct
  source 1..23: mol_type = other RNA
  modified_base 1: mod_base = OTHER; note = 2'-O-methyluridine-3'-phosphorothioate
  modified_base 2: mod_base = OTHER; note = 2'-fluoroguanosine-3'-phosphorothioate
  modified_base 3: mod_base = OTHER; note = 2'-O-methylcytidine-3'-phosphate
  modified_base 4: mod_base = OTHER; note = 2'-O-methyluridine-3'-phosphate
  modified_base 5: mod_base = OTHER; note = 2'-O-methylguanosine-3'-phosphate
  modified_base 6: mod_base = OTHER; note = 2'-fluorocytidine-3'-phosphate
  modified_base 7: mod_base = OTHER; note = 2'-O-methylguanosine-3'-phosphate
  modified_base 8: mod_base = OTHER; note = 2'-O-methyluridine-3'-phosphate
  modified_base 9: mod_base = OTHER; note = 2'-O-methylguanosine-3'-phosphate
  modified_base 10: mod_base = OTHER; note = 2'-O-methyluridine-3'-phosphate
  modified_base 11: mod_base = OTHER; note = 2'-O-methyladenosine-3'-phosphate
  modified_base 12: mod_base = OTHER; note = 2'-O-methylguanosine-3'-phosphate
  modified_base 13: mod_base = OTHER; note = 2'-O-methyladenosine-3'-phosphate
  modified_base 14: mod_base = OTHER; note = 2'-fluorouridine-3'-phosphate
  modified_base 15: mod_base = OTHER; note = 2'-O-methylguanosine-3'-phosphate
  modified_base 16: mod_base = OTHER; note = 2'-fluoroguanosine-3'-phosphate
  modified_base 17: mod_base = OTHER; note = 2'-O-methyladenosine-3'-phosphate
  modified_base 18: mod_base = OTHER; note = 2'-O-methylguanosine-3'-phosphate
  modified_base 19: mod_base = OTHER; note = 2'-O-methyluridine-3'-phosphate
  modified_base 20: mod_base = OTHER; note = 2'-O-methyluridine-3'-phosphate
  modified_base 21: mod_base = OTHER; note = 2'-O-methylguanosine-3'-phosphorothioate
  modified_base 22: mod_base = OTHER; note = 2'-O-methyladenosine-3'-phosphorothioate
  modified_base 23: mod_base = OTHER; note = 2'-O-methylguanosine-3'-phosphate
tgctgcgtgtagatggagttgag

SEQ ID NO: 598 - RNA, 23 nt, synthetic construct
  source 1..23: mol_type = other RNA
  modified_base 1: mod_base = OTHER; note = 2'-O-methyluridine-3'-phosphorothioate
  modified_base 2: mod_base = OTHER; note = 2'-fluorouridine-3'-phosphorothioate
  modified_base 3: mod_base = OTHER; note = 2'-O-methylcytidine-3'-phosphate
  modified_base 4: mod_base = OTHER; note = 2'-O-methylguanosine-3'-phosphate
  modified_base 5: mod_base = OTHER; note = 2'-O-methylguanosine-3'-phosphate
  modified_base 6: mod_base = OTHER; note = 2'-fluorouridine-3'-phosphate
  modified_base 7: mod_base = OTHER; note = 2'-O-methylguanosine-3'-phosphate
  modified_base 8: mod_base = OTHER; note = 2'-O-methyluridine-3'-phosphate
  modified_base 9: mod_base = OTHER; note = 2'-O-methyluridine-3'-phosphate
  modified_base 10: mod_base = OTHER; note = 2'-O-methylguanosine-3'-phosphate
  modified_base 11: mod_base = OTHER; note = 2'-O-methyluridine-3'-phosphate
  modified_base 12: mod_base = OTHER; note = 2'-O-methyluridine-3'-phosphate
  modified_base 13: mod_base = OTHER; note = 2'-O-methylguanosine-3'-phosphate
  modified_base 14: mod_base = OTHER; note = 2'-fluorouridine-3'-phosphate
  modified_base 15: mod_base = OTHER; note = 2'-O-methylguanosine-3'-phosphate
  modified_base 16: mod_base = OTHER; note = 2'-fluoroguanosine-3'-phosphate
  modified_base 17: mod_base = OTHER; note = 2'-O-methyladenosine-3'-phosphate
  modified_base 18: mod_base = OTHER; note = 2'-O-methyladenosine-3'-phosphate
  modified_base 19: mod_base = OTHER; note = 2'-O-methylguanosine-3'-phosphate
  modified_base 20: mod_base = OTHER; note = 2'-O-methyladenosine-3'-phosphate
  modified_base 21: mod_base = OTHER; note = 2'-O-methylguanosine-3'-phosphorothioate
  modified_base 22: mod_base = OTHER; note = 2'-O-methylguanosine-3'-phosphorothioate
  modified_base 23: mod_base = OTHER; note = 2'-O-methylcytidine-3'-phosphate
ttcggtgttgttgtggaagaggc

SEQ ID NO: 599 - RNA, 23 nt, synthetic construct
  source 1..23: mol_type = other RNA
  modified_base 1: mod_base = OTHER; note = 2'-O-methyluridine-3'-phosphorothioate
  modified_base 2: mod_base = OTHER; note = 2'-fluorouridine-3'-phosphorothioate
  modified_base 3: mod_base = OTHER; note = 2'-O-methylcytidine-3'-phosphate
  modified_base 4: mod_base = OTHER; note = 2'-O-methylguanosine-3'-phosphate
  modified_base 5: mod_base = OTHER; note = 2'-O-methyluridine-3'-phosphate
  modified_base 6: mod_base = OTHER; note = 2'-fluorocytidine-3'-phosphate
  modified_base 7: mod_base = OTHER; note = 2'-O-methylcytidine-3'-phosphate
  modified_base 8: mod_base = OTHER; note = 2'-O-methylcytidine-3'-phosphate
  modified_base 9: mod_base = OTHER; note = 2'-O-methyluridine-3'-phosphate
  modified_base 10: mod_base = OTHER; note = 2'-O-methylcytidine-3'-phosphate
  modified_base 11: mod_base = OTHER; note = 2'-O-methyluridine-3'-phosphate
  modified_base 12: mod_base = OTHER; note = 2'-O-methylguanosine-3'-phosphate
  modified_base 13: mod_base = OTHER; note = 2'-O-methylguanosine-3'-phosphate
  modified_base 14: mod_base = OTHER; note = 2'-fluorouridine-3'-phosphate
  modified_base 15: mod_base = OTHER; note = 2'-O-methyluridine-3'-phosphate
  modified_base 16: mod_base = OTHER; note = 2'-fluoroguanosine-3'-phosphate
  modified_base 17: mod_base = OTHER; note = 2'-O-methyluridine-3'-phosphate
  modified_base 18: mod_base = OTHER; note = 2'-O-methyluridine-3'-phosphate
  modified_base 19: mod_base = OTHER; note = 2'-O-methylguanosine-3'-phosphate
  modified_base 20: mod_base = OTHER; note = 2'-O-methylguanosine-3'-phosphate
  modified_base 21: mod_base = OTHER; note = 2'-O-methyluridine-3'-phosphorothioate
  modified_base 22: mod_base = OTHER; note = 2'-O-methylguanosine-3'-phosphorothioate
  modified_base 23: mod_base = OTHER; note = 2'-O-methylcytidine-3'-phosphate
ttcgtccctctggttgttggtgc

SEQ ID NO: 600 - RNA, 23 nt, synthetic construct
  source 1..23: mol_type = other RNA
  modified_base 1: mod_base = OTHER; note = 2'-O-methyluridine-3'-phosphorothioate
  modified_base 2: mod_base = OTHER; note = 2'-fluoroguanosine-3'-phosphorothioate
  modified_base 3: mod_base = OTHER; note = 2'-O-methyladenosine-3'-phosphate
  modified_base 4: mod_base = OTHER; note = 2'-O-methyluridine-3'-phosphate
  modified_base 5: mod_base = OTHER; note = 2'-O-methylguanosine-3'-phosphate
  modified_base 6: mod_base = OTHER; note = 2'-fluoroadenosine-3'-phosphate
  modified_base 7: mod_base = OTHER; note = 2'-O-methyladenosine-3'-phosphate
  modified_base 8: mod_base = OTHER; note = 2'-O-methylguanosine-3'-phosphate
  modified_base 9: mod_base = OTHER; note = 2'-O-methyladenosine-3'-phosphate
  modified_base 10: mod_base = OTHER; note = 2'-O-methyladenosine-3'-phosphate
  modified_base 11: mod_base = OTHER; note = 2'-O-methylguanosine-3'-phosphate
  modified_base 12: mod_base = OTHER; note = 2'-O-methylcytidine-3'-phosphate
  modified_base 13: mod_base = OTHER; note = 2'-O-methyluridine-3'-phosphate
  modified_base 14: mod_base = OTHER; note = 2'-fluorocytidine-3'-phosphate
  modified_base 15: mod_base = OTHER; note = 2'-O-methylguanosine-3'-phosphate
  modified_base 16: mod_base = OTHER; note = 2'-fluoroadenosine-3'-phosphate
  modified_base 17: mod_base = OTHER; note = 2'-O-methylguanosine-3'-phosphate
  modified_base 18: mod_base = OTHER; note = 2'-O-methylguanosine-3'-phosphate
  modified_base 19: mod_base = OTHER; note = 2'-O-methylguanosine-3'-phosphate
  modified_base 20: mod_base = OTHER; note = 2'-O-methyluridine-3'-phosphate
  modified_base 21: mod_base = OTHER; note = 2'-O-methylguanosine-3'-phosphorothioate
  modified_base 22: mod_base = OTHER; note = 2'-O-methyluridine-3'-phosphorothioate
  modified_base 23: mod_base = OTHER; note = 2'-O-methylguanosine-3'-phosphate
tgatgaagaagctcgagggtgtg

SEQ ID NO: 601 - DNA, 21 bp, synthetic construct
  source 1..21: mol_type = other DNA
  modified_base 13: mod_base = OTHER; note = 2'-O-methyluridine-3'-phosphate
  modified_base 20: mod_base = OTHER; note = 2'-O-methyluridine-3'-phosphorothioate
  modified_base 21: mod_base = OTHER; note = 2'-O-methylguanosine-3'-phosphate
  misc_feature 1: note = DNA
  misc_feature 2..21: note = RNA
tgatgaagaagctcgagggtg

SEQ ID NO: 602 - DNA, 23 bp, synthetic construct
  source 1..23: mol_type = other DNA
  modified_base 13: mod_base = OTHER; note = 2'-O-methyluridine-3'-phosphate
  modified_base 22: mod_base = OTHER; note = 2'-O-methyluridine-3'-phosphorothioate
  modified_base 23: mod_base = OTHER; note = 2'-O-methylguanosine-3'-phosphate
  misc_feature 1: note = DNA
  misc_feature 2..23: note = RNA
tgatgaagaagctcgagggtgtg

SEQ ID NO: 603 - RNA, 23 nt, synthetic construct
  source 1..23: mol_type = other RNA
  modified_base 1: mod_base = OTHER; note = 2'-O-methyluridine-3'-phosphorothioate
  modified_base 2: mod_base = OTHER; note = 2'-fluorocytidine-3'-phosphorothioate
  modified_base 3: mod_base = OTHER; note = 2'-O-methylguanosine-3'-phosphate
  modified_base 4: mod_base = OTHER; note = 2'-O-methyladenosine-3'-phosphate
  modified_base 5: mod_base = OTHER; note = 2'-O-methyluridine-3'-phosphate
  modified_base 6: mod_base = OTHER; note = 2'-fluoroguanosine-3'-phosphate
  modified_base 7: mod_base = OTHER; note = 2'-O-methyladenosine-3'-phosphate
  modified_base 8: mod_base = OTHER; note = 2'-O-methyladenosine-3'-phosphate
  modified_base 9: mod_base = OTHER; note = 2'-O-methylguanosine-3'-phosphate
  modified_base 10: mod_base = OTHER; note = 2'-O-methyladenosine-3'-phosphate
  modified_base 11: mod_base = OTHER; note = 2'-O-methyladenosine-3'-phosphate
  modified_base 12: mod_base = OTHER; note = 2'-O-methylguanosine-3'-phosphate
  modified_base 13: mod_base = OTHER; note = 2'-O-methylcytidine-3'-phosphate
  modified_base 14: mod_base = OTHER; note = 2'-fluorouridine-3'-phosphate
  modified_base 15: mod_base = OTHER; note = 2'-O-methylcytidine-3'-phosphate
  modified_base 16: mod_base = OTHER; note = 2'-fluoroguanosine-3'-phosphate
  modified_base 17: mod_base = OTHER; note = 2'-O-methyladenosine-3'-phosphate
  modified_base 18: mod_base = OTHER; note = 2'-O-methylguanosine-3'-phosphate
  modified_base 19: mod_base = OTHER; note = 2'-O-methylguanosine-3'-phosphate
  modified_base 20: mod_base = OTHER; note = 2'-O-methylguanosine-3'-phosphate
  modified_base 21: mod_base = OTHER; note = 2'-O-methyluridine-3'-phosphorothioate
  modified_base 22: mod_base = OTHER; note = 2'-O-methylguanosine-3'-phosphorothioate
  modified_base 23: mod_base = OTHER; note = 2'-O-methyluridine-3'-phosphate
tcgatgaagaagctcgagggtgt

SEQ ID NO: 604 - RNA, 23 nt, synthetic construct
  source 1..23: mol_type = other RNA
  modified_base 1: mod_base = OTHER; note = 2'-O-methyluridine-3'-phosphorothioate
  modified_base 2: mod_base = OTHER; note = 2'-fluoroadenosine-3'-phosphorothioate
  modified_base 3: mod_base = OTHER; note = 2'-O-methylcytidine-3'-phosphate
  modified_base 4: mod_base = OTHER; note = 2'-O-methylguanosine-3'-phosphate
  modified_base 5: mod_base = OTHER; note = 2'-O-methyladenosine-3'-phosphate
  modified_base 6: mod_base = OTHER; note = 2'-fluorouridine-3'-phosphate
  modified_base 7: mod_base = OTHER; note = 2'-O-methylguanosine-3'-phosphate
  modified_base 8: mod_base = OTHER; note = 2'-O-methyladenosine-3'-phosphate
  modified_base 9: mod_base = OTHER; note = 2'-O-methyladenosine-3'-phosphate
  modified_base 10: mod_base = OTHER; note = 2'-O-methylguanosine-3'-phosphate
  modified_base 11: mod_base = OTHER; note = 2'-O-methyladenosine-3'-phosphate
  modified_base 12: mod_base = OTHER; note = 2'-O-methyladenosine-3'-phosphate
  modified_base 13: mod_base = OTHER; note = 2'-O-methylguanosine-3'-phosphate
  modified_base 14: mod_base = OTHER; note = 2'-fluorocytidine-3'-phosphate
  modified_base 15: mod_base = OTHER; note = 2'-O-methyluridine-3'-phosphate
  modified_base 16: mod_base = OTHER; note = 2'-fluorocytidine-3'-phosphate
  modified_base 17: mod_base = OTHER; note = 2'-O-methylguanosine-3'-phosphate
  modified_base 18: mod_base = OTHER; note = 2'-O-methyladenosine-3'-phosphate
  modified_base 19: mod_base = OTHER; note = 2'-O-methylguanosine-3'-phosphate
  modified_base 20: mod_base = OTHER; note = 2'-O-methylguanosine-3'-phosphate
  modified_base 21: mod_base = OTHER; note = 2'-O-methylguanosine-3'-phosphorothioate
  modified_base 22: mod_base = OTHER; note = 2'-O-methyluridine-3'-phosphorothioate
  modified_base 23: mod_base = OTHER; note = 2'-O-methylguanosine-3'-phosphate
tacgatgaagaagctcgagggtg

SEQ ID NO: 605 - DNA, 21 bp, synthetic construct
  source 1..21: mol_type = other DNA
  modified_base 13: mod_base = OTHER; note = 2'-O-methylguanosine-3'-phosphate
  modified_base 20: mod_base = OTHER; note = 2'-O-methylguanosine-3'-phosphorothioate
  modified_base 21: mod_base = OTHER; note = 2'-O-methylguanosine-3'-phosphate
  misc_feature 1: note = DNA
  misc_feature 2..21: note = RNA
tacgatgaagaagctcgaggg

SEQ ID NO: 606 - DNA, 23 bp, synthetic construct
  source 1..23: mol_type = other DNA
  modified_base 13: mod_base = OTHER; note = 2'-O-methylguanosine-3'-phosphate
  modified_base 22: mod_base = OTHER; note = 2'-O-methyluridine-3'-phosphorothioate
  modified_base 23: mod_base = OTHER; note = 2'-O-methylguanosine-3'-phosphate
  misc_feature 1: note = DNA
  misc_feature 2..23: note = RNA
tacgatgaagaagctcgagggtg

SEQ ID NO: 607 - RNA, 23 nt, synthetic construct
  source 1..23: mol_type = other RNA
  modified_base 1: mod_base = OTHER; note = 2'-O-methyluridine-3'-phosphorothioate
  modified_base 2: mod_base = OTHER; note = 2'-fluorocytidine-3'-phosphorothioate
  modified_base 3: mod_base = OTHER; note = 2'-O-methyladenosine-3'-phosphate
  modified_base 4: mod_base = OTHER; note = 2'-O-methylguanosine-3'-phosphate
  modified_base 5: mod_base = OTHER; note = 2'-O-methylcytidine-3'-phosphate
  modified_base 6: mod_base = OTHER; note = 2'-fluorocytidine-3'-phosphate
  modified_base 7: mod_base = OTHER; note = 2'-O-methylguanosine-3'-phosphate
  modified_base 8: mod_base = OTHER; note = 2'-O-methylguanosine-3'-phosphate
  modified_base 9: mod_base = OTHER; note = 2'-O-methyluridine-3'-phosphate
  modified_base 10: mod_base = OTHER; note = 2'-O-methyluridine-3'-phosphate
  modified_base 11: mod_base = OTHER; note = 2'-O-methyluridine-3'-phosphate
  modified_base 12: mod_base = OTHER; note = 2'-O-methyluridine-3'-phosphate
  modified_base 13: mod_base = OTHER; note = 2'-O-methylcytidine-3'-phosphate
  modified_base 14: mod_base = OTHER; note = 2'-fluorocytidine-3'-phosphate
  modified_base 15: mod_base = OTHER; note = 2'-O-methyluridine-3'-phosphate
  modified_base 16: mod_base = OTHER; note = 2'-fluoroguanosine-3'-phosphate
  modified_base 17: mod_base = OTHER; note = 2'-O-methyladenosine-3'-phosphate
  modified_base 18: mod_base = OTHER; note = 2'-O-methylguanosine-3'-phosphate
  modified_base 19: mod_base = OTHER; note = 2'-O-methylguanosine-3'-phosphate
  modified_base 20: mod_base = OTHER; note = 2'-O-methylcytidine-3'-phosphate
  modified_base 21: mod_base = OTHER; note = 2'-O-methyluridine-3'-phosphorothioate
  modified_base 22: mod_base = OTHER; note = 2'-O-methylcytidine-3'-phosphorothioate
  modified_base 23: mod_base = OTHER; note = 2'-O-methylcytidine-3'-phosphate
tcagccggttttcctgaggctcc

SEQ ID NO: 608 - RNA, 23 nt, synthetic construct
  source 1..23: mol_type = other RNA
  modified_base 1: mod_base = OTHER; note = 2'-O-methyluridine-3'-phosphorothioate
  modified_base 2: mod_base = OTHER; note = 2'-fluoroguanosine-3'-phosphorothioate
  modified_base 3: mod_base = OTHER; note = 2'-O-methylguanosine-3'-phosphate
  modified_base 4: mod_base = OTHER; note = 2'-O-methylcytidine-3'-phosphate
  modified_base 5: mod_base = OTHER; note = 2'-O-methylguanosine-3'-phosphate
  modified_base 6: mod_base = OTHER; note = 2'-fluorouridine-3'-phosphate
  modified_base 7: mod_base = OTHER; note = 2'-O-methylguanosine-3'-phosphate
  modified_base 8: mod_base = OTHER; note = 2'-O-methylcytidine-3'-phosphate
  modified_base 9: mod_base = OTHER; note = 2'-O-methyladenosine-3'-phosphate
  modified_base 10: mod_base = OTHER; note = 2'-O-methylguanosine-3'-phosphate
  modified_base 11: mod_base = OTHER; note = 2'-O-methylcytidine-3'-phosphate
  modified_base 12: mod_base = OTHER; note = 2'-O-methylcytidine-3'-phosphate
  modified_base 13: mod_base = OTHER; note = 2'-O-methyladenosine-3'-phosphate
  modified_base 14: mod_base = OTHER; note = 2'-fluorocytidine-3'-phosphate
  modified_base 15: mod_base = OTHER; note = 2'-O-methyladenosine-3'-phosphate
  modified_base 16: mod_base = OTHER; note = 2'-fluorocytidine-3'-phosphate
  modified_base 17: mod_base = OTHER; note = 2'-O-methyluridine-3'-phosphate
  modified_base 18: mod_base = OTHER; note = 2'-O-methylcytidine-3'-phosphate
  modified_base 19: mod_base = OTHER; note = 2'-O-methyladenosine-3'-phosphate
  modified_base 20: mod_base = OTHER; note = 2'-O-methyluridine-3'-phosphate
  modified_base 21: mod_base = OTHER; note = 2'-O-methylcytidine-3'-phosphorothioate
  modified_base 22: mod_base = OTHER; note = 2'-O-methylcytidine-3'-phosphorothioate
  modified_base 23: mod_base = OTHER; note = 2'-O-methyladenosine-3'-phosphate
tggcgtgcagccacactcatcca

SEQ ID NO: 609 - RNA, 23 nt, synthetic construct
  source 1..23: mol_type = other RNA
  modified_base 1: mod_base = OTHER; note = 2'-O-methyluridine-3'-phosphorothioate
  modified_base 2: mod_base = OTHER; note = 2'-fluoroadenosine-3'-phosphorothioate
  modified_base 3: mod_base = OTHER; note = 2'-O-methylguanosine-3'-phosphate
  modified_base 4: mod_base = OTHER; note = 2'-O-methyluridine-3'-phosphate
  modified_base 5: mod_base = OTHER; note = 2'-O-methylcytidine-3'-phosphate
  modified_base 6: mod_base = OTHER; note = 2'-fluoroguanosine-3'-phosphate
  modified_base 7: mod_base = OTHER; note = 2'-O-methyluridine-3'-phosphate
  modified_base 8: mod_base = OTHER; note = 2'-O-methylcytidine-3'-phosphate
  modified_base 9: mod_base = OTHER; note = 2'-O-methyladenosine-3'-phosphate
  modified_base 10: mod_base = OTHER; note = 2'-O-methylguanosine-3'-phosphate
  modified_base 11: mod_base = OTHER; note = 2'-O-methylcytidine-3'-phosphate
  modified_base 12: mod_base = OTHER; note = 2'-O-methylcytidine-3'-phosphate
  modified_base 13: mod_base = OTHER; note = 2'-O-methyluridine-3'-phosphate
  modified_base 14: mod_base = OTHER; note = 2'-fluoroguanosine-3'-phosphate
  modified_base 15: mod_base = OTHER; note = 2'-O-methylguanosine-3'-phosphate
  modified_base 16: mod_base = OTHER; note = 2'-fluorouridine-3'-phosphate
  modified_base 17: mod_base = OTHER; note = 2'-O-methyluridine-3'-phosphate
  modified_base 18: mod_base = OTHER; note = 2'-O-methylcytidine-3'-phosphate
  modified_base 19: mod_base = OTHER; note = 2'-O-methyluridine-3'-phosphate
  modified_base 20: mod_base = OTHER; note = 2'-O-methylguanosine-3'-phosphate
  modified_base 21: mod_base = OTHER; note = 2'-O-methylguanosine-3'-phosphorothioate
  modified_base 22: mod_base = OTHER; note = 2'-O-methyluridine-3'-phosphorothioate
  modified_base 23: mod_base = OTHER; note = 2'-O-methyluridine-3'-phosphate
tagtcgtcagcctggttctggtt

SEQ ID NO: 610 - RNA, 23 nt, synthetic construct
  source 1..23: mol_type = other RNA
  modified_base 1: mod_base = OTHER; note = 2'-O-methyluridine-3'-phosphorothioate
  modified_base 2: mod_base = OTHER; note = 2'-fluoroguanosine-3'-phosphorothioate
  modified_base 3: mod_base = OTHER; note = 2'-O-methyluridine-3'-phosphate
  modified_base 4: mod_base = OTHER; note = 2'-O-methylguanosine-3'-phosphate
  modified_base 5: mod_base = OTHER; note = 2'-O-methyluridine-3'-phosphate
  modified_base 6: mod_base = OTHER; note = 2'-fluorouridine-3'-phosphate
  modified_base 7: mod_base = OTHER; note = 2'-O-methylguanosine-3'-phosphate
  modified_base 8: mod_base = OTHER; note = 2'-O-methylguanosine-3'-phosphate
  modified_base 9: mod_base = OTHER; note = 2'-O-methylcytidine-3'-phosphate
  modified_base 10: mod_base = OTHER; note = 2'-O-methylguanosine-3'-phosphate
  modified_base 11: mod_base = OTHER; note = 2'-O-methyladenosine-3'-phosphate
  modified_base 12: mod_base = OTHER; note = 2'-O-methyladenosine-3'-phosphate
  modified_base 13: mod_base = OTHER; note = 2'-O-methylguanosine-3'-phosphate
  modified_base 14: mod_base = OTHER; note = 2'-fluoroguanosine-3'-phosphate
  modified_base 15: mod_base = OTHER; note = 2'-O-methylcytidine-3'-phosphate
  modified_base 16: mod_base = OTHER; note = 2'-fluorouridine-3'-phosphate
  modified_base 17: mod_base = OTHER; note = 2'-O-methylguanosine-3'-phosphate
  modified_base 18: mod_base = OTHER; note = 2'-O-methylcytidine-3'-phosphate
  modified_base 19: mod_base = OTHER; note = 2'-O-methylguanosine-3'-phosphate
  modified_base 20: mod_base = OTHER; note = 2'-O-methylcytidine-3'-phosphate
  modified_base 21: mod_base = OTHER; note = 2'-O-methylcytidine-3'-phosphorothioate
  modified_base 22: mod_base = OTHER; note = 2'-O-methylcytidine-3'-phosphorothioate
  modified_base 23: mod_base = OTHER; note = 2'-O-methylguanosine-3'-phosphate
tgtgttggcgaaggctgcgcccg

SEQ ID NO: 611 - DNA, 21 bp, synthetic construct
  source 1..21: mol_type = other DNA
  modified_base 13: mod_base = OTHER; note = 2'-O-methylguanosine-3'-phosphate
  modified_base 20: mod_base = OTHER; note = 2'-O-methylcytidine-3'-phosphorothioate
  modified_base 21: mod_base = OTHER; note = 2'-O-methylcytidine-3'-phosphate
  misc_feature 1: note = DNA
  misc_feature 2..21: note = RNA
tgtgttggcgaaggctgcgcc

SEQ ID NO: 612 - DNA, 23 bp, synthetic construct
  source 1..23: mol_type = other DNA
  modified_base 13: mod_base = OTHER; note = 2'-O-methylguanosine-3'-phosphate
  modified_base 22: mod_base = OTHER; note = 2'-O-methylcytidine-3'-phosphorothioate
  modified_base 23: mod_base = OTHER; note = 2'-O-methylguanosine-3'-phosphate
  misc_feature 1: note = DNA
  misc_feature 2..23: note = RNA
tgtgttggcgaaggctgcgcccg

SEQ ID NO: 613 - RNA, 23 nt, synthetic construct
  source 1..23: mol_type = other RNA
  modified_base 1: mod_base = OTHER; note = 2'-O-methyluridine-3'-phosphorothioate
  modified_base 2: mod_base = OTHER; note = 2'-fluorocytidine-3'-phosphorothioate
  modified_base 3: mod_base = OTHER; note = 2'-O-methylcytidine-3'-phosphate
  modified_base 4: mod_base = OTHER; note = 2'-O-methylguanosine-3'-phosphate
  modified_base 5: mod_base = OTHER; note = 2'-O-methylguanosine-3'-phosphate
  modified_base 6: mod_base = OTHER; note = 2'-fluoroguanosine-3'-phosphate
  modified_base 7: mod_base = OTHER; note = 2'-O-methylcytidine-3'-phosphate
  modified_base 8: mod_base = OTHER; note = 2'-O-methylguanosine-3'-phosphate
  modified_base 9: mod_base = OTHER; note = 2'-O-methyluridine-3'-phosphate
  modified_base 10: mod_base = OTHER; note = 2'-O-methyladenosine-3'-phosphate
  modified_base 11: mod_base = OTHER; note = 2'-O-methylguanosine-3'-phosphate
  modified_base 12: mod_base = OTHER; note = 2'-O-methyluridine-3'-phosphate
  modified_base 13: mod_base = OTHER; note = 2'-O-methyluridine-3'-phosphate
  modified_base 14: mod_base = OTHER; note = 2'-fluorocytidine-3'-phosphate
  modified_base 15: mod_base = OTHER; note = 2'-O-methyluridine-3'-phosphate
  modified_base 16: mod_base = OTHER; note = 2'-fluorocytidine-3'-phosphate
  modified_base 17: mod_base = OTHER; note = 2'-O-methyladenosine-3'-phosphate
  modified_base 18: mod_base = OTHER; note = 2'-O-methyluridine-3'-phosphate
  modified_base 19: mod_base = OTHER; note = 2'-O-methyluridine-3'-phosphate
  modified_base 20: mod_base = OTHER; note = 2'-O-methylcytidine-3'-phosphate
  modified_base 21: mod_base = OTHER; note = 2'-O-methyluridine-3'-phosphorothioate
  modified_base 22: mod_base = OTHER; note = 2'-O-methylcytidine-3'-phosphorothioate
  modified_base 23: mod_base = OTHER; note = 2'-O-methylcytidine-3'-phosphate
tccgggcgtagttctcattctcc

SEQ ID NO: 614 - RNA, 23 nt, synthetic construct
  source 1..23: mol_type = other RNA
  modified_base 1: mod_base = OTHER; note = 2'-O-methyluridine-3'-phosphorothioate
  modified_base 2: mod_base = OTHER; note = 2'-fluoroguanosine-3'-phosphorothioate
  modified_base 3: mod_base = OTHER; note = 2'-O-methylcytidine-3'-phosphate
  modified_base 4: mod_base = OTHER; note = 2'-O-methylcytidine-3'-phosphate
  modified_base 5: mod_base = OTHER; note = 2'-O-methylguanosine-3'-phosphate
  modified_base 6: mod_base = OTHER; note = 2'-fluoroguanosine-3'-phosphate
  modified_base 7: mod_base = OTHER; note = 2'-O-methylguanosine-3'-phosphate
  modified_base 8: mod_base = OTHER; note = 2'-O-methylcytidine-3'-phosphate
  modified_base 9: mod_base = OTHER; note = 2'-O-methylguanosine-3'-phosphate
  modified_base 10: mod_base = OTHER; note = 2'-O-methyluridine-3'-phosphate
  modified_base 11: mod_base = OTHER; note = 2'-O-methyladenosine-3'-phosphate
  modified_base 12: mod_base = OTHER; note = 2'-O-methylguanosine-3'-phosphate
  modified_base 13: mod_base = OTHER; note = 2'-O-methyluridine-3'-phosphate
  modified_base 14: mod_base = OTHER; note = 2'-fluorouridine-3'-phosphate
  modified_base 15: mod_base = OTHER; note = 2'-O-methylcytidine-3'-phosphate
  modified_base 16: mod_base = OTHER; note = 2'-fluorouridine-3'-phosphate
  modified_base 17: mod_base = OTHER; note = 2'-O-methylcytidine-3'-phosphate
  modified_base 18: mod_base = OTHER; note = 2'-O-methyladenosine-3'-phosphate
  modified_base 19: mod_base = OTHER; note = 2'-O-methyluridine-3'-phosphate
  modified_base 20: mod_base = OTHER; note = 2'-O-methyluridine-3'-phosphate
  modified_base 21: mod_base = OTHER; note = 2'-O-methylcytidine-3'-phosphorothioate
  modified_base 22: mod_base = OTHER; note = 2'-O-methyluridine-3'-phosphorothioate
  modified_base 23: mod_base = OTHER; note = 2'-O-methylcytidine-3'-phosphate
tgccgggcgtagttctcattctc

SEQ ID NO: 615 - RNA, 23 nt, synthetic construct
  source 1..23: mol_type = other RNA
  modified_base 1: mod_base = OTHER; note = 2'-O-methyluridine-3'-phosphorothioate
  modified_base 2: mod_base = OTHER; note = 2'-fluoroguanosine-3'-phosphorothioate
  modified_base 3: mod_base = OTHER; note = 2'-O-methyluridine-3'-phosphate
  modified_base 4: mod_base = OTHER; note = 2'-O-methyladenosine-3'-phosphate
  modified_base 5: mod_base = OTHER; note = 2'-O-methylcytidine-3'-phosphate
  modified_base 6: mod_base = OTHER; note = 2'-fluorouridine-3'-phosphate
  modified_base 7: mod_base = OTHER; note = 2'-O-methyluridine-3'-phosphate
  modified_base 8: mod_base = OTHER; note = 2'-O-methylguanosine-3'-phosphate
  modified_base 9: mod_base = OTHER; note = 2'-O-methylguanosine-3'-phosphate
  modified_base 10: mod_base = OTHER; note = 2'-O-methyluridine-3'-phosphate
  modified_base 11: mod_base = OTHER; note = 2'-O-methylguanosine-3'-phosphate
  modified_base 12: mod_base = OTHER; note = 2'-O-methylcytidine-3'-phosphate
  modified_base 13: mod_base = OTHER; note = 2'-O-methyladenosine-3'-phosphate
  modified_base 14: mod_base = OTHER; note = 2'-fluoroguanosine-3'-phosphate
  modified_base 15: mod_base = OTHER; note = 2'-O-methyladenosine-3'-phosphate
  modified_base 16: mod_base = OTHER; note = 2'-fluorocytidine-3'-phosphate
  modified_base 17: mod_base = OTHER; note = 2'-O-methylguanosine-3'-phosphate
  modified_base 18: mod_base = OTHER; note = 2'-O-methylcytidine-3'-phosphate
  modified_base 19: mod_base = OTHER; note = 2'-O-methylcytidine-3'-phosphate
  modified_base 20: mod_base = OTHER; note = 2'-O-methylguanosine-3'-phosphate
  modified_base 21: mod_base = OTHER; note = 2'-O-methyluridine-3'-phosphorothioate
  modified_base 22: mod_base = OTHER; note = 2'-O-methylcytidine-3'-phosphorothioate
  modified_base 23: mod_base = OTHER; note = 2'-O-methylcytidine-3'-phosphate
tgtacttggtgcagacgccgtcc

SEQ ID NO: 616 - DNA, 21 bp, synthetic construct
  source 1..21: mol_type = other DNA
  modified_base 13: mod_base = OTHER; note = 2'-O-methyladenosine-3'-phosphate
  modified_base 20: mod_base = OTHER; note = 2'-O-methylguanosine-3'-phosphorothioate
  modified_base 21: mod_base = OTHER; note = 2'-O-methyluridine-3'-phosphate
  misc_feature 1: note = DNA
  misc_feature 2..21: note = RNA
tgtacttggtgcagacgccgt

SEQ ID NO: 617 - DNA, 23 bp, synthetic construct
  source 1..23: mol_type = other DNA
  modified_base 13: mod_base = OTHER; note = 2'-O-methyladenosine-3'-phosphate
  modified_base 22: mod_base = OTHER; note = 2'-O-methylcytidine-3'-phosphorothioate
  modified_base 23: mod_base = OTHER; note = 2'-O-methylcytidine-3'-phosphate
  misc_feature 1: note = DNA
  misc_feature 2..23: note = RNA
tgtacttggtgcagacgccgtcc

SEQ ID NO: 618 - RNA, 23 nt, synthetic construct
  source 1..23: mol_type = other RNA
  modified_base 1: mod_base = OTHER; note = 2'-O-methyluridine-3'-phosphorothioate
  modified_base 2: mod_base = OTHER; note = 2'-fluorouridine-3'-phosphorothioate
  modified_base 3: mod_base = OTHER; note = 2'-O-methylguanosine-3'-phosphate
  modified_base 4: mod_base = OTHER; note = 2'-O-methyluridine-3'-phosphate
  modified_base 5: mod_base = OTHER; note = 2'-O-methyladenosine-3'-phosphate
  modified_base 6: mod_base = OTHER; note = 2'-fluorocytidine-3'-phosphate
  modified_base 7: mod_base = OTHER; note = 2'-O-methyluridine-3'-phosphate
  modified_base 8: mod_base = OTHER; note = 2'-O-methyluridine-3'-phosphate
  modified_base 9: mod_base = OTHER; note = 2'-O-methylguanosine-3'-phosphate
  modified_base 10: mod_base = OTHER; note = 2'-O-methylguanosine-3'-phosphate
  modified_base 11: mod_base = OTHER; note = 2'-O-methyluridine-3'-phosphate
  modified_base 12: mod_base = OTHER; note = 2'-O-methylguanosine-3'-phosphate
  modified_base 13: mod_base = OTHER; note = 2'-O-methylcytidine-3'-phosphate
  modified_base 14: mod_base = OTHER; note = 2'-fluoroadenosine-3'-phosphate
  modified_base 15: mod_base = OTHER; note = 2'-O-methylguanosine-3'-phosphate
  modified_base 16: mod_base = OTHER; note = 2'-fluoroadenosine-3'-phosphate
  modified_base 17: mod_base = OTHER; note = 2'-O-methylcytidine-3'-phosphate
  modified_base 18: mod_base = OTHER; note = 2'-O-methylguanosine-3'-phosphate
  modified_base 19: mod_base = OTHER; note = 2'-O-methylcytidine-3'-phosphate
  modified_base 20: mod_base = OTHER; note = 2'-O-methylcytidine-3'-phosphate
  modified_base 21: mod_base = OTHER; note = 2'-O-methylguanosine-3'-phosphorothioate
  modified_base 22: mod_base = OTHER; note = 2'-O-methyluridine-3'-phosphorothioate
  modified_base 23: mod_base = OTHER; note = 2'-O-methylcytidine-3'-phosphate
ttgtacttggtgcagacgccgtc

SEQ ID NO: 619 - DNA, 21 bp, synthetic construct
  source 1..21: mol_type = other DNA
  modified_base 13: mod_base = OTHER; note = 2'-O-methylcytidine-3'-phosphate
  modified_base 20: mod_base = OTHER; note = 2'-O-methylcytidine-3'-phosphorothioate
  modified_base 21: mod_base = OTHER; note = 2'-O-methylguanosine-3'-phosphate
  misc_feature 1: note = DNA
  misc_feature 2..21: note = RNA
ttgtacttggtgcagacgccg

SEQ ID NO: 620 - DNA, 23 bp, synthetic construct
  source 1..23: mol_type = other DNA
  modified_base 13: mod_base = OTHER; note = 2'-O-methylcytidine-3'-phosphate
  modified_base 22: mod_base = OTHER; note = 2'-O-methyluridine-3'-phosphorothioate
  modified_base 23: mod_base = OTHER; note = 2'-O-methylcytidine-3'-phosphate
  misc_feature 1: note = DNA
  misc_feature 2..23: note = RNA
ttgtacttggtgcagacgccgtc

SEQ ID NO: 621 - RNA, 23 nt, synthetic construct
  source 1..23: mol_type = other RNA
  modified_base 1: mod_base = OTHER; note = 2'-O-methyluridine-3'-phosphorothioate
  modified_base 2: mod_base = OTHER; note = 2'-fluoroadenosine-3'-phosphorothioate
  modified_base 3: mod_base = OTHER; note = 2'-O-methylcytidine-3'-phosphate
  modified_base 4: mod_base = OTHER; note = 2'-O-methylguanosine-3'-phosphate
  modified_base 5: mod_base = OTHER; note = 2'-O-methylguanosine-3'-phosphate
  modified_base 6: mod_base = OTHER; note = 2'-fluoroguanosine-3'-phosphate
  modified_base 7: mod_base = OTHER; note = 2'-O-methyluridine-3'-phosphate
  modified_base 8: mod_base = OTHER; note = 2'-O-methylguanosine-3'-phosphate
  modified_base 9: mod_base = OTHER; note = 2'-O-methylguanosine-3'-phosphate
  modified_base 10: mod_base = OTHER; note = 2'-O-methyladenosine-3'-phosphate
  modified_base 11: mod_base = OTHER; note = 2'-O-methyladenosine-3'-phosphate
  modified_base 12: mod_base = OTHER; note = 2'-O-methylcytidine-3'-phosphate
  modified_base 13: mod_base = OTHER; note = 2'-O-methyladenosine-3'-phosphate
  modified_base 14: mod_base = OTHER; note = 2'-fluoroadenosine-3'-phosphate
  modified_base 15: mod_base = OTHER; note = 2'-O-methyladenosine-3'-phosphate
  modified_base 16: mod_base = OTHER; note = 2'-fluoroguanosine-3'-phosphate
  modified_base 17: mod_base = OTHER; note = 2'-O-methylcytidine-3'-phosphate
  modified_base 18: mod_base = OTHER; note = 2'-O-methyluridine-3'-phosphate
  modified_base 19: mod_base = OTHER; note = 2'-O-methylcytidine-3'-phosphate
  modified_base 20: mod_base = OTHER; note = 2'-O-methyladenosine-3'-phosphate
  modified_base 21: mod_base = OTHER; note = 2'-O-methylcytidine-3'-phosphorothioate
  modified_base 22: mod_base = OTHER; note = 2'-O-methylguanosine-3'-phosphorothioate
  modified_base 23: mod_base = OTHER; note = 2'-O-methylcytidine-3'-phosphate
tacgggtggaacaaagctcacgc

SEQ ID NO: 622 - RNA, 23 nt, synthetic construct
  source 1..23: mol_type = other RNA
  modified_base 1: mod_base = OTHER; note = 2'-O-methyluridine-3'-phosphorothioate
  modified_base 2: mod_base = OTHER; note = 2'-fluoroadenosine-3'-phosphorothioate
  modified_base 3: mod_base = OTHER; note = 2'-O-methylcytidine-3'-phosphate
  modified_base 4: mod_base = OTHER; note = 2'-O-methylguanosine-3'-phosphate
  modified_base 5: mod_base = OTHER; note = 2'-O-methyluridine-3'-phosphate
  modified_base 6: mod_base = OTHER; note = 2'-fluorocytidine-3'-phosphate
  modified_base 7: mod_base = OTHER; note = 2'-O-methylguanosine-3'-phosphate
  modified_base 8: mod_base = OTHER; note = 2'-O-methylguanosine-3'-phosphate
  modified_base 9: mod_base = OTHER; note = 2'-O-methylcytidine-3'-phosphate
  modified_base 10: mod_base = OTHER; note = 2'-O-methylcytidine-3'-phosphate
  modified_base 11: mod_base = OTHER; note = 2'-O-methyluridine-3'-phosphate
  modified_base 12: mod_base = OTHER; note = 2'-O-methylcytidine-3'-phosphate
  modified_base 13: mod_base = OTHER; note = 2'-O-methyladenosine-3'-phosphate
  modified_base 14: mod_base = OTHER; note = 2'-fluorocytidine-3'-phosphate
  modified_base 15: mod_base = OTHER; note = 2'-O-methyluridine-3'-phosphate
  modified_base 16: mod_base = OTHER; note = 2'-fluorocytidine-3'-phosphate
  modified_base 17: mod_base = OTHER; note = 2'-O-methyladenosine-3'-phosphate
  modified_base 18: mod_base = OTHER; note = 2'-O-methylguanosine-3'-phosphate
  modified_base 19: mod_base = OTHER; note = 2'-O-methylguanosine-3'-phosphate
  modified_base 20: mod_base = OTHER; note = 2'-O-methylcytidine-3'-phosphate
  modified_base 21: mod_base = OTHER; note = 2'-O-methylcytidine-3'-phosphorothioate
  modified_base 22: mod_base = OTHER; note = 2'-O-methylguanosine-3'-phosphorothioate
  modified_base 23: mod_base = OTHER; note = 2'-O-methylcytidine-3'-phosphate
tacgtcggcctcactcaggccgc

SEQ ID NO: 623 - RNA, 23 nt, synthetic construct
  source 1..23: mol_type = other RNA
  modified_base 1: mod_base = OTHER; note = 2'-O-methyluridine-3'-phosphorothioate
  modified_base 2: mod_base = OTHER; note = 2'-fluoroguanosine-3'-phosphorothioate
  modified_base 3: mod_base = OTHER; note = 2'-O-methyladenosine-3'-phosphate
  modified_base 4: mod_base = OTHER; note = 2'-O-methylcytidine-3'-phosphate
  modified_base 5: mod_base = OTHER; note = 2'-O-methylguanosine-3'-phosphate
  modified_base 6: mod_base = OTHER; note = 2'-fluorouridine-3'-phosphate
  modified_base 7: mod_base = OTHER; note = 2'-O-methylcytidine-3'-phosphate
  modified_base 8: mod_base = OTHER; note = 2'-O-methylguanosine-3'-phosphate
  modified_base 9: mod_base = OTHER; note = 2'-O-methylguanosine-3'-phosphate
  modified_base 10: mod_base = OTHER; note = 2'-O-methylcytidine-3'-phosphate
  modified_base 11: mod_base = OTHER; note = 2'-O-methylcytidine-3'-phosphate
  modified_base 12: mod_base = OTHER; note = 2'-O-methyluridine-3'-phosphate
  modified_base 13: mod_base = OTHER; note = 2'-O-methylcytidine-3'-phosphate
  modified_base 14: mod_base = OTHER; note = 2'-fluoroadenosine-3'-phosphate
  modified_base 15: mod_base = OTHER; note = 2'-O-methylcytidine-3'-phosphate
  modified_base 16: mod_base = OTHER; note = 2'-fluorouridine-3'-phosphate
  modified_base 17: mod_base = OTHER; note = 2'-O-methylcytidine-3'-phosphate
  modified_base 18: mod_base = OTHER; note = 2'-O-methyladenosine-3'-phosphate
  modified_base 19: mod_base = OTHER; note = 2'-O-methylguanosine-3'-phosphate
  modified_base 20: mod_base = OTHER; note = 2'-O-methylguanosine-3'-phosphate
  modified_base 21: mod_base = OTHER; note = 2'-O-methylcytidine-3'-phosphorothioate
  modified_base 22: mod_base = OTHER; note = 2'-O-methylcytidine-3'-phosphorothioate
  modified_base 23: mod_base = OTHER; note = 2'-O-methylguanosine-3'-phosphate
tgacgtcggcctcactcaggccg

SEQ ID NO: 624 - RNA, 23 nt, synthetic construct
  source 1..23: mol_type = other RNA
  modified_base 1: mod_base = OTHER; note = 2'-O-methyluridine-3'-phosphorothioate
  modified_base 2: mod_base = OTHER; note = 2'-fluoroguanosine-3'-phosphorothioate
  modified_base 3: mod_base = OTHER; note = 2'-O-methylcytidine-3'-phosphate
  modified_base 4: mod_base = OTHER; note = 2'-O-methylguanosine-3'-phosphate
  modified_base 5: mod_base = OTHER; note = 2'-O-methylcytidine-3'-phosphate
  modified_base 6: mod_base = OTHER; note = 2'-fluorocytidine-3'-phosphate
  modified_base 7: mod_base = OTHER; note = 2'-O-methylcytidine-3'-phosphate
  modified_base 8: mod_base = OTHER; note = 2'-O-methylguanosine-3'-phosphate
  modified_base 9: mod_base = OTHER; note = 2'-O-methylcytidine-3'-phosphate
  modified_base 10: mod_base = OTHER; note = 2'-O-methylguanosine-3'-phosphate
  modified_base 11: mod_base = OTHER; note = 2'-O-methyluridine-3'-phosphate
  modified_base 12: mod_base = OTHER; note = 2'-O-methylcytidine-3'-phosphate
  modified_base 13: mod_base = OTHER; note = 2'-O-methyladenosine-3'-phosphate
  modified_base 14: mod_base = OTHER; note = 2'-fluorouridine-3'-phosphate
  modified_base 15: mod_base = OTHER; note = 2'-O-methyluridine-3'-phosphate
  modified_base 16: mod_base = OTHER; note = 2'-fluoroguanosine-3'-phosphate
  modified_base 17: mod_base = OTHER; note = 2'-O-methyladenosine-3'-phosphate
  modified_base 18: mod_base = OTHER; note = 2'-O-methylguanosine-3'-phosphate
  modified_base 19: mod_base = OTHER; note = 2'-O-methylguanosine-3'-phosphate
  modified_base 20: mod_base = OTHER; note = 2'-O-methyladenosine-3'-phosphate
  modified_base 21: mod_base = OTHER; note = 2'-O-methyladenosine-3'-phosphorothioate
  modified_base 22: mod_base = OTHER; note = 2'-O-methylguanosine-3'-phosphorothioate
  modified_base 23: mod_base = OTHER; note = 2'-O-methylguanosine-3'-phosphate
tgcgcccgcgtcattgaggaagg

SEQ ID NO: 625 - DNA, 21 bp, synthetic construct
  source 1..21: mol_type = other DNA
  modified_base 13: mod_base = OTHER; note = 2'-O-methyladenosine-3'-phosphate
  modified_base 20: mod_base = OTHER; note = 2'-O-methyladenosine-3'-phosphorothioate
  modified_base 21: mod_base = OTHER; note = 2'-O-methyladenosine-3'-phosphate
  misc_feature 1: note = DNA
  misc_feature 2..21: note = RNA
tgcgcccgcgtcattgaggaa

SEQ ID NO: 626 - DNA, 23 bp, synthetic construct
  source 1..23: mol_type = other DNA
  modified_base 13: mod_base = OTHER; note = 2'-O-methyladenosine-3'-phosphate
  modified_base 22: mod_base = OTHER; note = 2'-O-methylguanosine-3'-phosphorothioate
  modified_base 23: mod_base = OTHER; note = 2'-O-methylguanosine-3'-phosphate
  misc_feature 1: note = DNA
  misc_feature 2..23: note = RNA
tgcgcccgcgtcattgaggaagg

SEQ ID NO: 627 - RNA, 23 nt, synthetic construct
  source 1..23: mol_type = other RNA
  modified_base 1: mod_base = OTHER; note = 2'-O-methyluridine-3'-phosphorothioate
  modified_base 2: mod_base = OTHER; note = 2'-fluoroadenosine-3'-phosphorothioate
  modified_base 3: mod_base = OTHER; note = 2'-O-methylguanosine-3'-phosphate
  modified_base 4: mod_base = OTHER; note = 2'-O-methylguanosine-3'-phosphate
  modified_base 5: mod_base = OTHER; note = 2'-O-methylcytidine-3'-phosphate
  modified_base 6: mod_base = OTHER; note = 2'-fluoroguanosine-3'-phosphate
  modified_base 7: mod_base = OTHER; note = 2'-O-methylcytidine-3'-phosphate
  modified_base 8: mod_base = OTHER; note = 2'-O-methylcytidine-3'-phosphate
  modified_base 9: mod_base = OTHER; note = 2'-O-methylcytidine-3'-phosphate
  modified_base 10: mod_base = OTHER; note = 2'-O-methylguanosine-3'-phosphate
  modified_base 11: mod_base = OTHER; note = 2'-O-methylcytidine-3'-phosphate
  modified_base 12: mod_base = OTHER; note = 2'-O-methylguanosine-3'-phosphate
  modified_base 13: mod_base = OTHER; note = 2'-O-methyluridine-3'-phosphate
  modified_base 14: mod_base = OTHER; note = 2'-fluorocytidine-3'-phosphate
  modified_base 15: mod_base = OTHER; note = 2'-O-methyladenosine-3'-phosphate
  modified_base 16: mod_base = OTHER; note = 2'-fluorouridine-3'-phosphate
  modified_base 17: mod_base = OTHER; note = 2'-O-methyluridine-3'-phosphate
  modified_base 18: mod_base = OTHER; note = 2'-O-methylguanosine-3'-phosphate
  modified_base 19: mod_base = OTHER; note = 2'-O-methyladenosine-3'-phosphate
  modified_base 20: mod_base = OTHER; note = 2'-O-methylguanosine-3'-phosphate
  modified_base 21: mod_base = OTHER; note = 2'-O-methylguanosine-3'-phosphorothioate
  modified_base 22: mod_base = OTHER; note = 2'-O-methyladenosine-3'-phosphorothioate
  modified_base 23: mod_base = OTHER; note = 2'-O-methyladenosine-3'-phosphate
taggcgcccgcgtcattgaggaa

SEQ ID NO: 628 - DNA, 21 bp, synthetic construct
  source 1..21: mol_type = other DNA
  modified_base 13: mod_base = OTHER; note = 2'-O-methyluridine-3'-phosphate
  modified_base 20: mod_base = OTHER; note = 2'-O-methylguanosine-3'-phosphorothioate
  modified_base 21: mod_base = OTHER; note = 2'-O-methylguanosine-3'-phosphate
  misc_feature 1: note = DNA
  misc_feature 2..21: note = RNA
taggcgcccgcgtcattgagg

SEQ ID NO: 629 - DNA, 23 bp, synthetic construct
  source 1..23: mol_type = other DNA
  modified_base 13: mod_base = OTHER; note = 2'-O-methyluridine-3'-phosphate
  modified_base 22: mod_base = OTHER; note = 2'-O-methyladenosine-3'-phosphorothioate
  modified_base 23: mod_base = OTHER; note = 2'-O-methyladenosine-3'-phosphate
  misc_feature 1: note = DNA
  misc_feature 2..23: note = RNA
taggcgcccgcgtcattgaggaa

SEQ ID NO: 630 - RNA, 23 nt, synthetic construct
  source 1..23: mol_type = other RNA
  modified_base 1: mod_base = OTHER; note = 2'-O-methyluridine-3'-phosphorothioate
  modified_base 2: mod_base = OTHER; note = 2'-fluoroguanosine-3'-phosphorothioate
  modified_base 3: mod_base = OTHER; note = 2'-O-methyladenosine-3'-phosphate
  modified_base 4: mod_base = OTHER; note = 2'-O-methylguanosine-3'-phosphate
  modified_base 5: mod_base = OTHER; note = 2'-O-methylcytidine-3'-phosphate
  modified_base 6: mod_base = OTHER; note = 2'-fluorocytidine-3'-phosphate
  modified_base 7: mod_base = OTHER; note = 2'-O-methyladenosine-3'-phosphate
  modified_base 8: mod_base = OTHER; note = 2'-O-methylguanosine-3'-phosphate
  modified_base 9: mod_base = OTHER; note = 2'-O-methylcytidine-3'-phosphate
  modified_base 10: mod_base = OTHER; note = 2'-O-methyladenosine-3'-phosphate
  modified_base 11: mod_base = OTHER; note = 2'-O-methylcytidine-3'-phosphate
  modified_base 12: mod_base = OTHER; note = 2'-O-methylguanosine-3'-phosphate
  modified_base 13: mod_base = OTHER; note = 2'-O-methylguanosine-3'-phosphate
  modified_base 14: mod_base = OTHER; note = 2'-fluorouridine-3'-phosphate
  modified_base 15: mod_base = OTHER; note = 2'-O-methylguanosine-3'-phosphate
  modified_base 16: mod_base = OTHER; note = 2'-fluorocytidine-3'-phosphate
  modified_base 17: mod_base = OTHER; note = 2'-O-methylcytidine-3'-phosphate
  modified_base 18: mod_base = OTHER; note = 2'-O-methylguanosine-3'-phosphate
  modified_base 19: mod_base = OTHER; note = 2'-O-methyluridine-3'-phosphate
  modified_base 20: mod_base = OTHER; note = 2'-O-methylguanosine-3'-phosphate
  modified_base 21: mod_base = OTHER; note = 2'-O-methyladenosine-3'-phosphorothioate
  modified_base 22: mod_base = OTHER; note = 2'-O-methylguanosine-3'-phosphorothioate
  modified_base 23: mod_base = OTHER; note = 2'-O-methylcytidine-3'-phosphate
tgagccagcacggtgccgtgagc

SEQ ID NO: 631 - DNA, 21 bp, synthetic construct
  source 1..21: mol_type = other DNA
  modified_base 13: mod_base = OTHER; note = 2'-O-methylguanosine-3'-phosphate
  modified_base 20: mod_base = OTHER; note = 2'-O-methylguanosine-3'-phosphorothioate
  modified_base 21: mod_base = OTHER; note = 2'-O-methyladenosine-3'-phosphate
  misc_feature 1: note = DNA
  misc_feature 2..21: note = RNA
tgagccagcacggtgccgtga

SEQ ID NO: 632 - DNA, 23 bp, synthetic construct
  source 1..23: mol_type = other DNA
  modified_base 13: mod_base = OTHER; note = 2'-O-methylguanosine-3'-phosphate
  modified_base 22: mod_base = OTHER; note = 2'-O-methylguanosine-3'-phosphorothioate
  modified_base 23: mod_base = OTHER; note = 2'-O-methylcytidine-3'-phosphate
  misc_feature 1: note = DNA
  misc_feature 2..23: note = RNA
tgagccagcacggtgccgtgagc

SEQ ID NO: 633 - RNA, 23 nt, synthetic construct
  source 1..23: mol_type = other RNA
  modified_base 1: mod_base = OTHER; note = 2'-O-methyluridine-3'-phosphorothioate
  modified_base 2: mod_base = OTHER; note = 2'-fluoroguanosine-3'-phosphorothioate
  modified_base 3: mod_base = OTHER; note = 2'-O-methyluridine-3'-phosphate
  modified_base 4: mod_base = OTHER; note = 2'-O-methylguanosine-3'-phosphate
  modified_base 5: mod_base = OTHER; note = 2'-O-methylcytidine-3'-phosphate
  modified_base 6: mod_base = OTHER; note = 2'-fluorouridine-3'-phosphate
  modified_base 7: mod_base = OTHER; note = 2'-O-methylguanosine-3'-phosphate
  modified_base 8: mod_base = OTHER; note = 2'-O-methyladenosine-3'-phosphate
  modified_base 9: mod_base = OTHER; note = 2'-O-methyladenosine-3'-phosphate
  modified_base 10: mod_base = OTHER; note = 2'-O-methyladenosine-3'-phosphate
  modified_base 11: mod_base = OTHER; note = 2'-O-methylcytidine-3'-phosphate
  modified_base 12: mod_base = OTHER; note = 2'-O-methyladenosine-3'-phosphate
  modified_base 13: mod_base = OTHER; note = 2'-O-methylguanosine-3'-phosphate
  modified_base 14: mod_base = OTHER; note = 2'-fluorocytidine-3'-phosphate
  modified_base 15: mod_base = OTHER; note = 2'-O-methylcytidine-3'-phosphate
  modified_base 16: mod_base = OTHER; note = 2'-fluorocytidine-3'-phosphate
  modified_base 17: mod_base = OTHER; note = 2'-O-methyladenosine-3'-phosphate
  modified_base 18: mod_base = OTHER; note = 2'-O-methylcytidine-3'-phosphate
  modified_base 19: mod_base = OTHER; note = 2'-O-methylguanosine-3'-phosphate
  modified_base 20: mod_base = OTHER; note = 2'-O-methyluridine-3'-phosphate
  modified_base 21: mod_base = OTHER; note = 2'-O-methylcytidine-3'-phosphorothioate
  modified_base 22: mod_base = OTHER; note = 2'-O-methylcytidine-3'-phosphorothioate
  modified_base 23: mod_base = OTHER; note = 2'-O-methyladenosine-3'-phosphate
tgtgctgaaacagcccacgtcca

SEQ ID NO: 634 - DNA, 21 bp, synthetic construct
  source 1..21: mol_type = other DNA
  modified_base 13: mod_base = OTHER; note = 2'-O-methylguanosine-3'-phosphate
  modified_base 20: mod_base = OTHER; note = 2'-O-methyluridine-3'-phosphorothioate
  modified_base 21: mod_base = OTHER; note = 2'-O-methylcytidine-3'-phosphate
  misc_feature 1: note = DNA
  misc_feature 2..21: note = RNA
tgtgctgaaacagcccacgtc

SEQ ID NO: 635 - DNA, 23 bp, synthetic construct
  source 1..23: mol_type = other DNA
  modified_base 13: mod_base = OTHER; note = 2'-O-methylguanosine-3'-phosphate
  modified_base 22: mod_base = OTHER; note = 2'-O-methylcytidine-3'-phosphorothioate
  modified_base 23: mod_base = OTHER; note = 2'-O-methyladenosine-3'-phosphate
  misc_feature 1: note = DNA
  misc_feature 2..23: note = RNA
tgtgctgaaacagcccacgtcca

SEQ ID NO: 636 - RNA, 23 nt, synthetic construct
  source 1..23: mol_type = other RNA
  modified_base 1: mod_base = OTHER; note = 2'-O-methyluridine-3'-phosphorothioate
  modified_base 2: mod_base = OTHER; note = 2'-fluorouridine-3'-phosphorothioate
  modified_base 3: mod_base = OTHER; note = 2'-O-methylguanosine-3'-phosphate
  modified_base 4: mod_base = OTHER; note = 2'-O-methyladenosine-3'-phosphate
  modified_base 5: mod_base = OTHER; note = 2'-O-methyluridine-3'-phosphate
  modified_base 6: mod_base = OTHER; note = 2'-fluoroguanosine-3'-phosphate
  modified_base 7: mod_base = OTHER; note = 2'-O-methyladenosine-3'-phosphate
  modified_base 8: mod_base = OTHER; note = 2'-O-methyladenosine-3'-phosphate
  modified_base 9: mod_base = OTHER; note = 2'-O-methylguanosine-3'-phosphate
  modified_base 10: mod_base = OTHER; note = 2'-O-methyluridine-3'-phosphate
  modified_base 11: mod_base = OTHER; note = 2'-O-methylguanosine-3'-phosphate
  modified_base 12: mod_base = OTHER; note = 2'-O-methylguanosine-3'-phosphate
  modified_base 13: mod_base = OTHER; note = 2'-O-methylcytidine-3'-phosphate
  modified_base 14: mod_base = OTHER; note = 2'-fluorocytidine-3'-phosphate
  modified_base 15: mod_base = OTHER; note = 2'-O-methyladenosine-3'-phosphate
  modified_base 16: mod_base = OTHER; note = 2'-fluorouridine-3'-phosphate
  modified_base 17: mod_base = OTHER; note = 2'-O-methylcytidine-3'-phosphate
  modified_base 18: mod_base = OTHER; note = 2'-O-methylcytidine-3'-phosphate
  modified_base 19: mod_base = OTHER; note = 2'-O-methylcytidine-3'-phosphate
  modified_base 20: mod_base = OTHER; note = 2'-O-methylcytidine-3'-phosphate
  modified_base 21: mod_base = OTHER; note = 2'-O-methylguanosine-3'-phosphorothioate
  modified_base 22: mod_base = OTHER; note = 2'-O-methyluridine-3'-phosphorothioate
  modified_base 23: mod_base = OTHER; note = 2'-O-methyladenosine-3'-phosphate
ttgatgaagtggccatccccgta

SEQ ID NO: 637 - RNA, 23 nt, synthetic construct
  source 1..23: mol_type = other RNA
  modified_base 1: mod_base = OTHER; note = 2'-O-methyluridine-3'-phosphorothioate
  modified_base 2: mod_base = OTHER; note = 2'-fluorouridine-3'-phosphorothioate
  modified_base 3: mod_base = OTHER; note = 2'-O-methylguanosine-3'-phosphate
  modified_base 4: mod_base = OTHER; note = 2'-O-methyladenosine-3'-phosphate
  modified_base 5: mod_base = OTHER; note = 2'-O-methylcytidine-3'-phosphate
  modified_base 6: mod_base = OTHER; note = 2'-fluoroguanosine-3'-phosphate
  modified_base 7: mod_base = OTHER; note = 2'-O-methyladenosine-3'-phosphate
  modified_base 8: mod_base = OTHER; note = 2'-O-methyluridine-3'-phosphate
  modified_base 9: mod_base = OTHER; note = 2'-O-methylguanosine-3'-phosphate
  modified_base 10: mod_base = OTHER; note = 2'-O-methylcytidine-3'-phosphate
  modified_base 11: mod_base = OTHER; note = 2'-O-methylguanosine-3'-phosphate
  modified_base 12: mod_base = OTHER; note = 2'-O-methylguanosine-3'-phosphate
  modified_base 13: mod_base = OTHER; note = 2'-O-methyladenosine-3'-phosphate
  modified_base 14: mod_base = OTHER; note = 2'-fluoroadenosine-3'-phosphate
  modified_base 15: mod_base = OTHER; note = 2'-O-methylguanosine-3'-phosphate
  modified_base 16: mod_base = OTHER; note = 2'-fluoroguanosine-3'-phosphate
  modified_base 17: mod_base = OTHER; note = 2'-O-methyluridine-3'-phosphate
  modified_base 18: mod_base = OTHER; note = 2'-O-methylcytidine-3'-phosphate
  modified_base 19: mod_base = OTHER; note = 2'-O-methylcytidine-3'-phosphate
  modified_base 20: mod_base = OTHER; note = 2'-O-methylcytidine-3'-phosphate
  modified_base 21: mod_base = OTHER; note = 2'-O-methylguanosine-3'-phosphorothioate
  modified_base 22: mod_base = OTHER; note = 2'-O-methyluridine-3'-phosphorothioate
  modified_base 23: mod_base = OTHER; note = 2'-O-methylguanosine-3'-phosphate
ttgacgatgcggaaggtcccgtg

SEQ ID NO: 638 - RNA, 23 nt, synthetic construct
  source 1..23: mol_type = other RNA
  modified_base 1: mod_base = OTHER; note = 2'-O-methyluridine-3'-phosphorothioate
  modified_base 2: mod_base = OTHER; note = 2'-fluorocytidine-3'-phosphorothioate
  modified_base 3: mod_base = OTHER; note = 2'-O-methylcytidine-3'-phosphate
  modified_base 4: mod_base = OTHER; note = 2'-O-methylcytidine-3'-phosphate
  modified_base 5: mod_base = OTHER; note = 2'-O-methyladenosine-3'-phosphate
  modified_base 6: mod_base = OTHER; note = 2'-fluorocytidine-3'-phosphate
  modified_base 7: mod_base = OTHER; note = 2'-O-methyladenosine-3'-phosphate
  modified_base 8: mod_base = OTHER; note = 2'-O-methylguanosine-3'-phosphate
  modified_base 9: mod_base = OTHER; note = 2'-O-methylguanosine-3'-phosphate
  modified_base 10: mod_base = OTHER; note = 2'-O-methylguanosine-3'-phosphate
  modified_base 11: mod_base = OTHER; note = 2'-O-methylguanosine-3'-phosphate
  modified_base 12: mod_base = OTHER; note = 2'-O-methyladenosine-3'-phosphate
  modified_base 13: mod_base = OTHER; note = 2'-O-methyluridine-3'-phosphate
  modified_base 14: mod_base = OTHER; note = 2'-fluoroguanosine-3'-phosphate
  modified_base 15: mod_base = OTHER; note = 2'-O-methyluridine-3'-phosphate
  modified_base 16: mod_base = OTHER; note = 2'-fluorouridine-3'-phosphate
  modified_base 17: mod_base = OTHER; note = 2'-O-methylcytidine-3'-phosphate
  modified_base 18: mod_base = OTHER; note = 2'-O-methyluridine-3'-phosphate
  modified_base 19: mod_base = OTHER; note = 2'-O-methylcytidine-3'-phosphate
  modified_base 20: mod_base = OTHER; note = 2'-O-methylguanosine-3'-phosphate
  modified_base 21: mod_base = OTHER; note = 2'-O-methylguanosine-3'-phosphorothioate
  modified_base 22: mod_base = OTHER; note = 2'-O-methyluridine-3'-phosphorothioate
  modified_base 23: mod_base = OTHER; note = 2'-O-methylguanosine-3'-phosphate
tcccacaggggatgttctcggtg

SEQ ID NO: 639 - RNA, 23 nt, synthetic construct
  source 1..23: mol_type = other RNA
  modified_base 1: mod_base = OTHER; note = 2'-O-methyluridine-3'-phosphorothioate
  modified_base 2: mod_base = OTHER; note = 2'-fluorouridine-3'-phosphorothioate
  modified_base 3: mod_base = OTHER; note = 2'-O-methylcytidine-3'-phosphate
  modified_base 4: mod_base = OTHER; note = 2'-O-methylcytidine-3'-phosphate
  modified_base 5: mod_base = OTHER; note = 2'-O-methylguanosine-3'-phosphate
  modified_base 6: mod_base = OTHER; note = 2'-fluoroguanosine-3'-phosphate
  modified_base 7: mod_base = OTHER; note = 2'-O-methyluridine-3'-phosphate
  modified_base 8: mod_base = OTHER; note = 2'-O-methylcytidine-3'-phosphate
  modified_base 9: mod_base = OTHER; note = 2'-O-methylcytidine-3'-phosphate
  modified_base 10: mod_base = OTHER; note = 2'-O-methylcytidine-3'-phosphate
  modified_base 11: mod_base = OTHER; note = 2'-O-methyladenosine-3'-phosphate
  modified_base 12: mod_base = OTHER; note = 2'-O-methylguanosine-3'-phosphate
  modified_base 13: mod_base = OTHER; note = 2'-O-methylguanosine-3'-phosphate
  modified_base 14: mod_base = OTHER; note = 2'-fluoroadenosine-3'-phosphate
  modified_base 15: mod_base = OTHER; note = 2'-O-methylcytidine-3'-phosphate
  modified_base 16: mod_base = OTHER; note = 2'-fluoroadenosine-3'-phosphate
  modified_base 17: mod_base = OTHER; note = 2'-O-methylcytidine-3'-phosphate
  modified_base 18: mod_base = OTHER; note = 2'-O-methylguanosine-3'-phosphate
  modified_base 19: mod_base = OTHER; note = 2'-O-methylguanosine-3'-phosphate
  modified_base 20: mod_base = OTHER; note = 2'-O-methylcytidine-3'-phosphate
  modified_base 21: mod_base = OTHER; note = 2'-O-methylcytidine-3'-phosphorothioate
  modified_base 22: mod_base = OTHER; note = 2'-O-methyladenosine-3'-phosphorothioate
  modified_base 23: mod_base = OTHER; note = 2'-O-methyluridine-3'-phosphate
ttccggtcccaggacacggccat

SEQ ID NO: 640 - RNA, 23 nt, synthetic construct
  source 1..23: mol_type = other RNA
  modified_base 1: mod_base = OTHER; note = 2'-O-methyluridine-3'-phosphorothioate
  modified_base 2: mod_base = OTHER; note = 2'-fluorouridine-3'-phosphorothioate
  modified_base 3: mod_base = OTHER; note = 2'-O-methylguanosine-3'-phosphate
  modified_base 4: mod_base = OTHER; note = 2'-O-methylguanosine-3'-phosphate
  modified_base 5: mod_base = OTHER; note = 2'-O-methyluridine-3'-phosphate
  modified_base 6: mod_base = OTHER; note = 2'-fluoroguanosine-3'-phosphate
  modified_base 7: mod_base = OTHER; note = 2'-O-methylcytidine-3'-phosphate
  modified_base 8: mod_base = OTHER; note = 2'-O-methyladenosine-3'-phosphate
  modified_base 9: mod_base = OTHER; note = 2'-O-methylguanosine-3'-phosphate
  modified_base 10: mod_base = OTHER; note = 2'-O-methyluridine-3'-phosphate
  modified_base 11: mod_base = OTHER; note = 2'-O-methylcytidine-3'-phosphate
  modified_base 12: mod_base = OTHER; note = 2'-O-methylguanosine-3'-phosphate
  modified_base 13: mod_base = OTHER; note = 2'-O-methylguanosine-3'-phosphate
  modified_base 14: mod_base = OTHER; note = 2'-fluoroadenosine-3'-phosphate
  modified_base 15: mod_base = OTHER; note = 2'-O-methyluridine-3'-phosphate
  modified_base 16: mod_base = OTHER; note = 2'-fluoroguanosine-3'-phosphate
  modified_base 17: mod_base = OTHER; note = 2'-O-methyladenosine-3'-phosphate
  modified_base 18: mod_base = OTHER; note = 2'-O-methyladenosine-3'-phosphate
  modified_base 19: mod_base = OTHER; note = 2'-O-methylcytidine-3'-phosphate
  modified_base 20: mod_base = OTHER; note = 2'-O-methyladenosine-3'-phosphate
  modified_base 21: mod_base = OTHER; note = 2'-O-methylcytidine-3'-phosphorothioate
  modified_base 22: mod_base = OTHER; note = 2'-O-methylguanosine-3'-phosphorothioate
  modified_base 23: mod_base = OTHER; note = 2'-O-methylcytidine-3'-phosphate
ttggtgcagtcggatgaacacgc

SEQ ID NO: 641 - DNA, 21 bp, synthetic construct
  source 1..21: mol_type = other DNA
  modified_base 13: mod_base = OTHER; note = 2'-O-methylguanosine-3'-phosphate
  modified_base 20: mod_base = OTHER; note = 2'-O-methyladenosine-3'-phosphorothioate
  modified_base 21: mod_base = OTHER; note = 2'-O-methylcytidine-3'-phosphate
  misc_feature 1: note = DNA
  misc_feature 2..21: note = RNA
ttggtgcagtcggatgaacac

SEQ ID NO: 642 - DNA, 23 bp, synthetic construct
  source 1..23: mol_type = other DNA
  modified_base 13: mod_base = OTHER; note = 2'-O-methylguanosine-3'-phosphate
  modified_base 22: mod_base = OTHER; note = 2'-O-methylguanosine-3'-phosphorothioate
  modified_base 23: mod_base = OTHER; note = 2'-O-methylcytidine-3'-phosphate
  misc_feature 1: note = DNA
  misc_feature 2..23: note = RNA
ttggtgcagtcggatgaacacgc

SEQ ID NO: 643 - RNA, 23 nt, synthetic construct
  source 1..23: mol_type = other RNA
  modified_base 1: mod_base = OTHER; note = 2'-O-methyluridine-3'-phosphorothioate
  modified_base 2: mod_base = OTHER; note = 2'-fluorocytidine-3'-phosphorothioate
  modified_base 3: mod_base = OTHER; note = 2'-O-methylcytidine-3'-phosphate
  modified_base 4: mod_base = OTHER; note = 2'-O-methyluridine-3'-phosphate
  modified_base 5: mod_base = OTHER; note = 2'-O-methylguanosine-3'-phosphate
  modified_base 6: mod_base = OTHER; note = 2'-fluoroguanosine-3'-phosphate
  modified_base 7: mod_base = OTHER; note = 2'-O-methyluridine-3'-phosphate
  modified_base 8: mod_base = OTHER; note = 2'-O-methylguanosine-3'-phosphate
  modified_base 9: mod_base = OTHER; note = 2'-O-methylcytidine-3'-phosphate
  modified_base 10: mod_base = OTHER; note = 2'-O-methyladenosine-3'-phosphate
  modified_base 11: mod_base = OTHER; note = 2'-O-methylguanosine-3'-phosphate
  modified_base 12: mod_base = OTHER; note = 2'-O-methyluridine-3'-phosphate
  modified_base 13: mod_base = OTHER; note = 2'-O-methylcytidine-3'-phosphate
  modified_base 14: mod_base = OTHER; note = 2'-fluoroguanosine-3'-phosphate
  modified_base 15: mod_base = OTHER; note = 2'-O-methylguanosine-3'-phosphate
  modified_base 16: mod_base = OTHER; note = 2'-fluoroadenosine-3'-phosphate
  modified_base 17: mod_base = OTHER; note = 2'-O-methyluridine-3'-phosphate
  modified_base 18: mod_base = OTHER; note = 2'-O-methylguanosine-3'-phosphate
  modified_base 19: mod_base = OTHER; note = 2'-O-methyladenosine-3'-phosphate
  modified_base 20: mod_base = OTHER; note = 2'-O-methyladenosine-3'-phosphate
  modified_base 21: mod_base = OTHER; note = 2'-O-methylcytidine-3'-phosphorothioate
  modified_base 22: mod_base = OTHER; note = 2'-O-methyladenosine-3'-phosphorothioate
  modified_base 23: mod_base = OTHER; note = 2'-O-methylcytidine-3'-phosphate
tcctggtgcagtcggatgaacac

SEQ ID NO: 644 - DNA, 21 bp, synthetic construct
  source 1..21: mol_type = other DNA
  modified_base 13: mod_base = OTHER; note = 2'-O-methylcytidine-3'-phosphate
  modified_base 20: mod_base = OTHER; note = 2'-O-methyladenosine-3'-phosphorothioate
  modified_base 21: mod_base = OTHER; note = 2'-O-methylcytidine-3'-phosphate
  misc_feature 1: note = DNA
  misc_feature 2..21: note = RNA
tcctggtgcagtcggatgaac

SEQ ID NO: 645 - DNA, 23 bp, synthetic construct
  source 1..23: mol_type = other DNA
  modified_base 13: mod_base = OTHER; note = 2'-O-methylcytidine-3'-phosphate
  modified_base 22: mod_base = OTHER; note = 2'-O-methyladenosine-3'-phosphorothioate
  modified_base 23: mod_base = OTHER; note = 2'-O-methylcytidine-3'-phosphate
  misc_feature 1: note = DNA
  misc_feature 2..23: note = RNA
tcctggtgcagtcggatgaacac

SEQ ID NO: 646 - RNA, 23 nt, synthetic construct
  source 1..23: mol_type = other RNA
  modified_base 1: mod_base = OTHER; note = 2'-O-methyluridine-3'-phosphorothioate
  modified_base 2: mod_base = OTHER; note = 2'-fluoroguanosine-3'-phosphorothioate
  modified_base 3: mod_base = OTHER; note = 2'-O-methyluridine-3'-phosphate
  modified_base 4: mod_base = OTHER; note = 2'-O-methylcytidine-3'-phosphate
  modified_base 5: mod_base = OTHER; note = 2'-O-methylcytidine-3'-phosphate
  modified_base 6: mod_base = OTHER; note = 2'-fluorouridine-3'-phosphate
  modified_base 7: mod_base = OTHER; note = 2'-O-methylguanosine-3'-phosphate
  modified_base 8: mod_base = OTHER; note = 2'-O-methylguanosine-3'-phosphate
  modified_base 9: mod_base = OTHER; note = 2'-O-methyluridine-3'-phosphate
  modified_base 10: mod_base = OTHER; note = 2'-O-methylguanosine-3'-phosphate
  modified_base 11: mod_base = OTHER; note = 2'-O-methylcytidine-3'-phosphate
  modified_base 12: mod_base = OTHER; note = 2'-O-methyladenosine-3'-phosphate
  modified_base 13: mod_base = OTHER; note = 2'-O-methylguanosine-3'-phosphate
  modified_base 14: mod_base = OTHER; note = 2'-fluorouridine-3'-phosphate
  modified_base 15: mod_base = OTHER; note = 2'-O-methylcytidine-3'-phosphate
  modified_base 16: mod_base = OTHER; note = 2'-fluoroguanosine-3'-phosphate
  modified_base 17: mod_base = OTHER; note = 2'-O-methylguanosine-3'-phosphate
  modified_base 18: mod_base = OTHER; note = 2'-O-methyladenosine-3'-phosphate
  modified_base 19: mod_base = OTHER; note = 2'-O-methyluridine-3'-phosphate
  modified_base 20: mod_base = OTHER; note = 2'-O-methylguanosine-3'-phosphate
  modified_base 21: mod_base = OTHER; note = 2'-O-methyladenosine-3'-phosphorothioate
  modified_base 22: mod_base = OTHER; note = 2'-O-methyladenosine-3'-phosphorothioate
  modified_base 23: mod_base = OTHER; note = 2'-O-methylcytidine-3'-phosphate
tgtcctggtgcagtcggatgaac

SEQ ID NO: 647 - DNA, 21 bp, synthetic construct
  source 1..21: mol_type = other DNA
  modified_base 13: mod_base = OTHER; note = 2'-O-methylguanosine-3'-phosphate
  modified_base 20: mod_base = OTHER; note = 2'-O-methylguanosine-3'-phosphorothioate
  modified_base 21: mod_base = OTHER; note = 2'-O-methyladenosine-3'-phosphate
  misc_feature 1: note = DNA
  misc_feature 2..21: note = RNA
tgtcctggtgcagtcggatga

SEQ ID NO: 648 - DNA, 23 bp, synthetic construct
  source 1..23: mol_type = other DNA
  modified_base 13: mod_base = OTHER; note = 2'-O-methylguanosine-3'-phosphate
  modified_base 22: mod_base = OTHER; note = 2'-O-methyladenosine-3'-phosphorothioate
  modified_base 23: mod_base = OTHER; note = 2'-O-methylcytidine-3'-phosphate
  misc_feature 1: note = DNA
  misc_feature 2..23: note = RNA
tgtcctggtgcagtcggatgaac

SEQ ID NO: 649 - RNA, 23 nt, synthetic construct
  source 1..23: mol_type = other RNA
  modified_base 1: mod_base = OTHER; note = 2'-O-methyluridine-3'-phosphorothioate
  modified_base 2: mod_base = OTHER; note = 2'-fluorouridine-3'-phosphorothioate
  modified_base 3: mod_base = OTHER; note = 2'-O-methyladenosine-3'-phosphate
  modified_base 4: mod_base = OTHER; note = 2'-O-methylguanosine-3'-phosphate
  modified_base 5: mod_base = OTHER; note = 2'-O-methyluridine-3'-phosphate
  modified_base 6: mod_base = OTHER; note = 2'-fluoroadenosine-3'-phosphate
  modified_base 7: mod_base = OTHER; note = 2'-O-methylcytidine-3'-phosphate
  modified_base 8: mod_base = OTHER; note = 2'-O-methyluridine-3'-phosphate
  modified_base 9: mod_base = OTHER; note = 2'-O-methyluridine-3'-phosphate
  modified_base 10: mod_base = OTHER; note = 2'-O-methylguanosine-3'-phosphate
  modified_base 11: mod_base = OTHER; note = 2'-O-methylguanosine-3'-phosphate
  modified_base 12: mod_base = OTHER; note = 2'-O-methyluridine-3'-phosphate
  modified_base 13: mod_base = OTHER; note = 2'-O-methylguanosine-3'-phosphate
  modified_base 14: mod_base = OTHER; note = 2'-fluoroguanosine-3'-phosphate
  modified_base 15: mod_base = OTHER; note = 2'-O-methyladenosine-3'-phosphate
  modified_base 16: mod_base = OTHER; note = 2'-fluoroguanosine-3'-phosphate
  modified_base 17: mod_base = OTHER; note = 2'-O-methyluridine-3'-phosphate
  modified_base 18: mod_base = OTHER; note = 2'-O-methylcytidine-3'-phosphate
  modified_base 19: mod_base = OTHER; note = 2'-O-methyladenosine-3'-phosphate
  modified_base 20: mod_base = OTHER; note = 2'-O-methyladenosine-3'-phosphate
  modified_base 21: mod_base = OTHER; note = 2'-O-methylcytidine-3'-phosphorothioate
  modified_base 22: mod_base = OTHER; note = 2'-O-methylcytidine-3'-phosphorothioate
  modified_base 23: mod_base = OTHER; note = 2'-O-methyluridine-3'-phosphate
ttagtacttggtggagtcaacct

SEQ ID NO: 650 - DNA, 21 bp, synthetic construct
  source 1..21: mol_type = other DNA
  modified_base 13: mod_base = OTHER; note = 2'-O-methylguanosine-3'-phosphate
  modified_base 20: mod_base = OTHER; note = 2'-O-methyladenosine-3'-phosphorothioate
  modified_base 21: mod_base = OTHER; note = 2'-O-methylcytidine-3'-phosphate
  misc_feature 1: note = DNA
  misc_feature 2..21: note = RNA
ttagtacttggtggagtcaac

SEQ ID NO: 651 - DNA, 23 bp, synthetic construct
  source 1..23: mol_type = other DNA
  modified_base 13: mod_base = OTHER; note = 2'-O-methylguanosine-3'-phosphate
  modified_base 22: mod_base = OTHER; note = 2'-O-methylcytidine-3'-phosphorothioate
  modified_base 23: mod_base = OTHER; note = 2'-O-methyluridine-3'-phosphate
  misc_feature 1: note = DNA
  misc_feature 2..23: note = RNA
ttagtacttggtggagtcaacct

SEQ ID NO: 652 - RNA, 23 nt, synthetic construct
  source 1..23: mol_type = other RNA
  modified_base 1: mod_base = OTHER; note = 2'-O-methyluridine-3'-phosphorothioate
  modified_base 2: mod_base = OTHER; note = 2'-fluorocytidine-3'-phosphorothioate
  modified_base 3: mod_base = OTHER; note = 2'-O-methyluridine-3'-phosphate
  modified_base 4: mod_base = OTHER; note = 2'-O-methylcytidine-3'-phosphate
  modified_base 5: mod_base = OTHER; note = 2'-O-methylguanosine-3'-phosphate
  modified_base 6: mod_base = OTHER; note = 2'-fluorouridine-3'-phosphate
  modified_base 7: mod_base = OTHER; note = 2'-O-methyladenosine-3'-phosphate
  modified_base 8: mod_base = OTHER; note = 2'-O-methylguanosine-3'-phosphate
  modified_base 9: mod_base = OTHER; note = 2'-O-methyluridine-3'-phosphate
  modified_base 10: mod_base = OTHER; note = 2'-O-methyladenosine-3'-phosphate
  modified_base 11: mod_base = OTHER; note = 2'-O-methylcytidine-3'-phosphate
  modified_base 12: mod_base = OTHER; note = 2'-O-methyluridine-3'-phosphate
  modified_base 13: mod_base = OTHER; note = 2'-O-methyluridine-3'-phosphate
  modified_base 14: mod_base = OTHER; note = 2'-fluoroguanosine-3'-phosphate
  modified_base 15: mod_base = OTHER; note = 2'-O-methylguanosine-3'-phosphate
  modified_base 16: mod_base = OTHER; note = 2'-fluorouridine-3'-phosphate
  modified_base 17: mod_base = OTHER; note = 2'-O-methylguanosine-3'-phosphate
  modified_base 18: mod_base = OTHER; note = 2'-O-methylguanosine-3'-phosphate
  modified_base 19: mod_base = OTHER; note = 2'-O-methyladenosine-3'-phosphate
  modified_base 20: mod_base = OTHER; note = 2'-O-methylguanosine-3'-phosphate
  modified_base 21: mod_base = OTHER; note = 2'-O-methyluridine-3'-phosphorothioate
  modified_base 22: mod_base = OTHER; note = 2'-O-methylcytidine-3'-phosphorothioate
  modified_base 23: mod_base = OTHER; note = 2'-O-methyladenosine-3'-phosphate
tctcgtagtacttggtggagtca

SEQ ID NO: 653 - DNA, 21 bp, synthetic construct
  source 1..21: mol_type = other DNA
  modified_base 13: mod_base = OTHER; note = 2'-O-methyluridine-3'-phosphate
  modified_base 20: mod_base = OTHER; note = 2'-O-methylguanosine-3'-phosphorothioate
  modified_base 21: mod_base = OTHER; note = 2'-O-methyluridine-3'-phosphate
  misc_feature 1: note = DNA
  misc_feature 2..21: note = RNA
tctcgtagtacttggtggagt

SEQ ID NO: 654 - DNA, 23 bp, synthetic construct
  source 1..23: mol_type = other DNA
  modified_base 13: mod_base = OTHER; note = 2'-O-methyluridine-3'-phosphate
  modified_base 22: mod_base = OTHER; note = 2'-O-methylcytidine-3'-phosphorothioate
  modified_base 23: mod_base = OTHER; note = 2'-O-methyladenosine-3'-phosphate
  misc_feature 1: note = DNA
  misc_feature 2..23: note = RNA
tctcgtagtacttggtggagtca

SEQ ID NO: 655 - RNA, 23 nt, synthetic construct
  source 1..23: mol_type = other RNA
  modified_base 1: mod_base = OTHER; note = 2'-O-methyluridine-3'-phosphorothioate
  modified_base 2: mod_base = OTHER; note = 2'-fluoroguanosine-3'-phosphorothioate
  modified_base 3: mod_base = OTHER; note = 2'-O-methyluridine-3'-phosphate
  modified_base 4: mod_base = OTHER; note = 2'-O-methylguanosine-3'-phosphate
  modified_base 5: mod_base = OTHER; note = 2'-O-methylcytidine-3'-phosphate
  modified_base 6: mod_base = OTHER; note = 2'-fluorocytidine-3'-phosphate
  modified_base 7: mod_base = OTHER; note = 2'-O-methylcytidine-3'-phosphate
  modified_base 8: mod_base = OTHER; note = 2'-O-methyladenosine-3'-phosphate
  modified_base 9: mod_base = OTHER; note = 2'-O-methylcytidine-3'-phosphate
  modified_base 10: mod_base = OTHER; note = 2'-O-methyluridine-3'-phosphate
  modified_base 11: mod_base = OTHER; note = 2'-O-methylguanosine-3'-phosphate
  modified_base 12: mod_base = OTHER; note = 2'-O-methylguanosine-3'-phosphate
  modified_base 13: mod_base = OTHER; note = 2'-O-methylguanosine-3'-phosphate
  modified_base 14: mod_base = OTHER; note = 2'-fluoroguanosine-3'-phosphate
  modified_base 15: mod_base = OTHER; note = 2'-O-methyluridine-3'-phosphate
  modified_base 16: mod_base = OTHER; note = 2'-fluorouridine-3'-phosphate
  modified_base 17: mod_base = OTHER; note = 2'-O-methylcytidine-3'-phosphate
  modified_base 18: mod_base = OTHER; note = 2'-O-methylcytidine-3'-phosphate
  modified_base 19: mod_base = OTHER; note = 2'-O-methylguanosine-3'-phosphate
  modified_base 20: mod_base = OTHER; note = 2'-O-methylguanosine-3'-phosphate
  modified_base 21: mod_base = OTHER; note = 2'-O-methylcytidine-3'-phosphorothioate
  modified_base 22: mod_base = OTHER; note = 2'-O-methyladenosine-3'-phosphorothioate
  modified_base 23: mod_base = OTHER; note = 2'-O-methylguanosine-3'-phosphate
tgtgcccactggggttccggcag

SEQ ID NO: 656 - DNA, 21 bp, synthetic construct
  source 1..21: mol_type = other DNA
  modified_base 13: mod_base = OTHER; note = 2'-O-methylguanosine-3'-phosphate
  modified_base 20: mod_base = OTHER; note = 2'-O-methylguanosine-3'-phosphorothioate
  modified_base 21: mod_base = OTHER; note = 2'-O-methylcytidine-3'-phosphate
  misc_feature 1: note = DNA
  misc_feature 2..21: note = RNA
tgtgcccactggggttccggc

SEQ ID NO: 657 - DNA, 23 bp, synthetic construct
  source 1..23: mol_type = other DNA
  modified_base 13: mod_base = OTHER; note = 2'-O-methylguanosine-3'-phosphate
  modified_base 22: mod_base = OTHER; note = 2'-O-methyladenosine-3'-phosphorothioate
  modified_base 23: mod_base = OTHER; note = 2'-O-methylguanosine-3'-phosphate
  misc_feature 1: note = DNA
  misc_feature 2..23: note = RNA
tgtgcccactggggttccggcag

SEQ ID NO: 658 - RNA, 23 nt, synthetic construct
  source 1..23: mol_type = other RNA
  modified_base 1: mod_base = OTHER; note = 2'-O-methyluridine-3'-phosphorothioate
  modified_base 2: mod_base = OTHER; note = 2'-fluoroadenosine-3'-phosphorothioate
  modified_base 3: mod_base = OTHER; note = 2'-O-methylcytidine-3'-phosphate
  modified_base 4: mod_base = OTHER; note = 2'-O-methyluridine-3'-phosphate
  modified_base 5: mod_base = OTHER; note = 2'-O-methylguanosine-3'-phosphate
  modified_base 6: mod_base = OTHER; note = 2'-fluoroguanosine-3'-phosphate
  modified_base 7: mod_base = OTHER; note = 2'-O-methylguanosine-3'-phosphate
  modified_base 8: mod_base = OTHER; note = 2'-O-methylcytidine-3'-phosphate
  modified_base 9: mod_base = OTHER; note = 2'-O-methylcytidine-3'-phosphate
  modified_base 10: mod_base = OTHER; note = 2'-O-methyladenosine-3'-phosphate
  modified_base 11: mod_base = OTHER; note = 2'-O-methylcytidine-3'-phosphate
  modified_base 12: mod_base = OTHER; note = 2'-O-methylguanosine-3'-phosphate
  modified_base 13: mod_base = OTHER; note = 2'-O-methylcytidine-3'-phosphate
  modified_base 14: mod_base = OTHER; note = 2'-fluoroadenosine-3'-phosphate
  modified_base 15: mod_base = OTHER; note = 2'-O-methylcytidine-3'-phosphate
  modified_base 16: mod_base = OTHER; note = 2'-fluorouridine-3'-phosphate
  modified_base 17: mod_base = OTHER; note = 2'-O-methyluridine-3'-phosphate
  modified_base 18: mod_base = OTHER; note = 2'-O-methylcytidine-3'-phosphate
  modified_base 19: mod_base = OTHER; note = 2'-O-methyladenosine-3'-phosphate
  modified_base 20: mod_base = OTHER; note = 2'-O-methyluridine-3'-phosphate
  modified_base 21: mod_base = OTHER; note = 2'-O-methylcytidine-3'-phosphorothioate
  modified_base 22: mod_base = OTHER; note = 2'-O-methyluridine-3'-phosphorothioate
  modified_base 23: mod_base = OTHER; note = 2'-O-methylguanosine-3'-phosphate
tactgggccacgcacttcatctg

SEQ ID NO: 659 - RNA, 23 nt, synthetic construct
  source 1..23: mol_type = other RNA
  modified_base 1: mod_base = OTHER; note = 2'-O-methyluridine-3'-phosphorothioate
  modified_base 2: mod_base = OTHER; note = 2'-fluorouridine-3'-phosphorothioate
  modified_base 3: mod_base = OTHER; note = 2'-O-methyluridine-3'-phosphate
  modified_base 4: mod_base = OTHER; note = 2'-O-methyladenosine-3'-phosphate
  modified_base 5: mod_base = OTHER; note = 2'-O-methylcytidine-3'-phosphate
  modified_base 6: mod_base = OTHER; note = 2'-fluoroadenosine-3'-phosphate
  modified_base 7: mod_base = OTHER; note = 2'-O-methylguanosine-3'-phosphate
  modified_base 8: mod_base = OTHER; note = 2'-O-methylcytidine-3'-phosphate
  modified_base 9: mod_base = OTHER; note = 2'-O-methyluridine-3'-phosphate
  modified_base 10: mod_base = OTHER; note = 2'-O-methylcytidine-3'-phosphate
  modified_base 11: mod_base = OTHER; note = 2'-O-methyluridine-3'-phosphate
  modified_base 12: mod_base = OTHER; note = 2'-O-methylguanosine-3'-phosphate
  modified_base 13: mod_base = OTHER; note = 2'-O-methylguanosine-3'-phosphate
  modified_base 14: mod_base = OTHER; note = 2'-fluorocytidine-3'-phosphate
  modified_base 15: mod_base = OTHER; note = 2'-O-methyladenosine-3'-phosphate
  modified_base 16: mod_base = OTHER; note = 2'-fluoroguanosine-3'-phosphate
  modified_base 17: mod_base = OTHER; note = 2'-O-methyluridine-3'-phosphate
  modified_base 18: mod_base = OTHER; note = 2'-O-methyluridine-3'-phosphate
  modified_base 19: mod_base = OTHER; note = 2'-O-methylcytidine-3'-phosphate
  modified_base 20: mod_base = OTHER; note = 2'-O-methyluridine-3'-phosphate
  modified_base 21: mod_base = OTHER; note = 2'-O-methylcytidine-3'-phosphorothioate
  modified_base 22: mod_base = OTHER; note = 2'-O-methylcytidine-3'-phosphorothioate
  modified_base 23: mod_base = OTHER; note = 2'-O-methylguanosine-3'-phosphate
tttacagctctggcagttctccg

SEQ ID NO: 660 - DNA, 21 bp, synthetic construct
  source 1..21: mol_type = other DNA
  modified_base 13: mod_base = OTHER; note = 2'-O-methylguanosine-3'-phosphate
  modified_base 20: mod_base = OTHER; note = 2'-O-methyluridine-3'-phosphorothioate
  modified_base 21: mod_base = OTHER; note = 2'-O-methylcytidine-3'-phosphate
  misc_feature 1: note = DNA
  misc_feature 2..21: note = RNA
tttacagctctggcagttctc

SEQ ID NO: 661 - DNA, 23 bp, synthetic construct
  source 1..23: mol_type = other DNA
  modified_base 13: mod_base = OTHER; note = 2'-O-methylguanosine-3'-phosphate
  modified_base 22: mod_base = OTHER; note = 2'-O-methylcytidine-3'-phosphorothioate
  modified_base 23: mod_base = OTHER; note = 2'-O-methylguanosine-3'-phosphate
  misc_feature 1: note = DNA
  misc_feature 2..23: note = RNA
tttacagctctggcagttctccg

SEQ ID NO: 662 - RNA, 23 nt, synthetic construct
  source 1..23: mol_type = other RNA
  modified_base 1: mod_base = OTHER; note = 2'-O-methyluridine-3'-phosphorothioate
  modified_base 2: mod_base = OTHER; note = 2'-fluoroguanosine-3'-phosphorothioate
  modified_base 3: mod_base = OTHER; note = 2'-O-methyluridine-3'-phosphate
  modified_base 4: mod_base = OTHER; note = 2'-O-methyluridine-3'-phosphate
  modified_base 5: mod_base = OTHER; note = 2'-O-methyladenosine-3'-phosphate
  modified_base 6: mod_base = OTHER; note = 2'-fluorocytidine-3'-phosphate
  modified_base 7: mod_base = OTHER; note = 2'-O-methyladenosine-3'-phosphate
  modified_base 8: mod_base = OTHER; note = 2'-O-methylguanosine-3'-phosphate
  modified_base 9: mod_base = OTHER; note = 2'-O-methylcytidine-3'-phosphate
  modified_base 10: mod_base = OTHER; note = 2'-O-methyluridine-3'-phosphate
  modified_base 11: mod_base = OTHER; note = 2'-O-methylcytidine-3'-phosphate
  modified_base 12: mod_base = OTHER; note = 2'-O-methyluridine-3'-phosphate
  modified_base 13: mod_base = OTHER; note = 2'-O-methylguanosine-3'-phosphate
  modified_base 14: mod_base = OTHER; note = 2'-fluoroguanosine-3'-phosphate
  modified_base 15: mod_base = OTHER; note = 2'-O-methylcytidine-3'-phosphate
  modified_base 16: mod_base = OTHER; note = 2'-fluoroadenosine-3'-phosphate
  modified_base 17: mod_base = OTHER; note = 2'-O-methylguanosine-3'-phosphate
  modified_base 18: mod_base = OTHER; note = 2'-O-methyluridine-3'-phosphate
  modified_base 19: mod_base = OTHER; note = 2'-O-methyluridine-3'-phosphate
  modified_base 20: mod_base = OTHER; note = 2'-O-methylcytidine-3'-phosphate
  modified_base 21: mod_base = OTHER; note = 2'-O-methyluridine-3'-phosphorothioate
  modified_base 22: mod_base = OTHER; note = 2'-O-methylcytidine-3'-phosphorothioate
  modified_base 23: mod_base = OTHER; note = 2'-O-methylcytidine-3'-phosphate
tgttacagctctggcagttctcc

SEQ ID NO: 663 - DNA, 21 bp, synthetic construct
  source 1..21: mol_type = other DNA
  modified_base 13: mod_base = OTHER; note = 2'-O-methylguanosine-3'-phosphate
  modified_base 20: mod_base = OTHER; note = 2'-O-methylcytidine-3'-phosphorothioate
  modified_base 21: mod_base = OTHER; note = 2'-O-methyluridine-3'-phosphate
  misc_feature 1: note = DNA
  misc_feature 2..21: note = RNA
tgttacagctctggcagttct

SEQ ID NO: 664 - DNA, 23 bp, synthetic construct
  source 1..23: mol_type = other DNA
  modified_base 13: mod_base = OTHER; note = 2'-O-methylguanosine-3'-phosphate
  modified_base 22: mod_base = OTHER; note = 2'-O-methylcytidine-3'-phosphorothioate
  modified_base 23: mod_base = OTHER; note = 2'-O-methylcytidine-3'-phosphate
  misc_feature 1: note = DNA
  misc_feature 2..23: note = RNA
tgttacagctctggcagttctcc

SEQ ID NO: 665 - RNA, 23 nt, synthetic construct
  source 1..23: mol_type = other RNA
  modified_base 1: mod_base = OTHER; note = 2'-O-methyluridine-3'-phosphorothioate
  modified_base 2: mod_base = OTHER; note = 2'-fluorouridine-3'-phosphorothioate
  modified_base 3: mod_base = OTHER; note = 2'-O-methyladenosine-3'-phosphate
  modified_base 4: mod_base = OTHER; note = 2'-O-methylguanosine-3'-phosphate
  modified_base 5: mod_base = OTHER; note = 2'-O-methylguanosine-3'-phosphate
  modified_base 6: mod_base = OTHER; note = 2'-fluorouridine-3'-phosphate
  modified_base 7: mod_base = OTHER; note = 2'-O-methylcytidine-3'-phosphate
  modified_base 8: mod_base = OTHER; note = 2'-O-methylcytidine-3'-phosphate
  modified_base 9: mod_base = OTHER; note = 2'-O-methyluridine-3'-phosphate
  modified_base 10: mod_base = OTHER; note = 2'-O-methylguanosine-3'-phosphate
  modified_base 11: mod_base = OTHER; note = 2'-O-methyluridine-3'-phosphate
  modified_base 12: mod_base = OTHER; note = 2'-O-methylcytidine-3'-phosphate
  modified_base 13: mod_base = OTHER; note = 2'-O-methylcytidine-3'-phosphate
  modified_base 14: mod_base = OTHER; note = 2'-fluorouridine-3'-phosphate
  modified_base 15: mod_base = OTHER; note = 2'-O-methylcytidine-3'-phosphate
  modified_base 16: mod_base = OTHER; note = 2'-fluoroadenosine-3'-phosphate
  modified_base 17: mod_base = OTHER; note = 2'-O-methyluridine-3'-phosphate
  modified_base 18: mod_base = OTHER; note = 2'-O-methyladenosine-3'-phosphate
  modified_base 19: mod_base = OTHER; note = 2'-O-methylguanosine-3'-phosphate
  modified_base 20: mod_base = OTHER; note = 2'-O-methylguanosine-3'-phosphate
  modified_base 21: mod_base = OTHER; note = 2'-O-methyluridine-3'-phosphorothioate
  modified_base 22: mod_base = OTHER; note = 2'-O-methylguanosine-3'-phosphorothioate
  modified_base 23: mod_base = OTHER; note = 2'-O-methylcytidine-3'-phosphate
ttaggtcctgtcctcataggtgc

SEQ ID NO: 666 - RNA, 23 nt, synthetic construct
  source 1..23: mol_type = other RNA
  modified_base 1: mod_base = OTHER; note = 2'-O-methyluridine-3'-phosphorothioate
  modified_base 2: mod_base = OTHER; note = 2'-fluorouridine-3'-phosphorothioate
  modified_base 3: mod_base = OTHER; note = 2'-O-methylguanosine-3'-phosphate
  modified_base 4: mod_base = OTHER; note = 2'-O-methylguanosine-3'-phosphate
  modified_base 5: mod_base = OTHER; note = 2'-O-methyluridine-3'-phosphate
  modified_base 6: mod_base = OTHER; note = 2'-fluoroguanosine-3'-phosphate
  modified_base 7: mod_base = OTHER; note = 2'-O-methyluridine-3'-phosphate
  modified_base 8: mod_base = OTHER; note = 2'-O-methyluridine-3'-phosphate
  modified_base 9: mod_base = OTHER; note = 2'-O-methylguanosine-3'-phosphate
  modified_base 10: mod_base = OTHER; note = 2'-O-methyluridine-3'-phosphate
  modified_base 11: mod_base = OTHER; note = 2'-O-methyladenosine-3'-phosphate
  modified_base 12: mod_base = OTHER; note = 2'-O-methylguanosine-3'-phosphate
  modified_base 13: mod_base = OTHER; note = 2'-O-methyladenosine-3'-phosphate
  modified_base 14: mod_base = OTHER; note = 2'-fluorouridine-3'-phosphate
  modified_base 15: mod_base = OTHER; note = 2'-O-methylguanosine-3'-phosphate
  modified_base 16: mod_base = OTHER; note = 2'-fluoroadenosine-3'-phosphate
  modified_base 17: mod_base = OTHER; note = 2'-O-methylcytidine-3'-phosphate
  modified_base 18: mod_base = OTHER; note = 2'-O-methylguanosine-3'-phosphate
  modified_base 19: mod_base = OTHER; note = 2'-O-methyluridine-3'-phosphate
  modified_base 20: mod_base = OTHER; note = 2'-O-methylcytidine-3'-phosphate
  modified_base 21: mod_base = OTHER; note = 2'-O-methylcytidine-3'-phosphorothioate
  modified_base 22: mod_base = OTHER; note = 2'-O-methyluridine-3'-phosphorothioate
  modified_base 23: mod_base = OTHER; note = 2'-O-methylguanosine-3'-phosphate
ttggtgttgtagatgacgtcctg

SEQ ID NO: 667 - DNA, 21 bp, synthetic construct
  source 1..21: mol_type = other DNA
  modified_base 13: mod_base = OTHER; note = 2'-O-methyladenosine-3'-phosphate
  modified_base 20: mod_base = OTHER; note = 2'-O-methylcytidine-3'-phosphorothioate
  modified_base 21: mod_base = OTHER; note = 2'-O-methylcytidine-3'-phosphate
  misc_feature 1: note = DNA
  misc_feature 2..21: note = RNA
ttggtgttgtagatgacgtcc

SEQ ID NO: 668 - DNA, 23 bp, synthetic construct
  source 1..23: mol_type = other DNA
  modified_base 13: mod_base = OTHER; note = 2'-O-methyladenosine-3'-phosphate
  modified_base 22: mod_base = OTHER; note = 2'-O-methyluridine-3'-phosphorothioate
  modified_base 23: mod_base = OTHER; note = 2'-O-methylguanosine-3'-phosphate
  misc_feature 1: note = DNA
  misc_feature 2..23: note = RNA
ttggtgttgtagatgacgtcctg

SEQ ID NO: 669 - RNA, 23 nt, synthetic construct
  source 1..23: mol_type = other RNA
  modified_base 1: mod_base = OTHER; note = 2'-O-methyluridine-3'-phosphorothioate
  modified_base 2: mod_base = OTHER; note = 2'-fluoroadenosine-3'-phosphorothioate
  modified_base 3: mod_base = OTHER; note = 2'-O-methylguanosine-3'-phosphate
  modified_base 4: mod_base = OTHER; note = 2'-O-methylcytidine-3'-phosphate
  modified_base 5: mod_base = OTHER; note = 2'-O-methylguanosine-3'-phosphate
  modified_base 6: mod_base = OTHER; note = 2'-fluoroguanosine-3'-phosphate
  modified_base 7: mod_base = OTHER; note = 2'-O-methylcytidine-3'-phosphate
  modified_base 8: mod_base = OTHER; note = 2'-O-methyladenosine-3'-phosphate
  modified_base 9: mod_base = OTHER; note = 2'-O-methylguanosine-3'-phosphate
  modified_base 10: mod_base = OTHER; note = 2'-O-methyladenosine-3'-phosphate
  modified_base 11: mod_base = OTHER; note = 2'-O-methylcytidine-3'-phosphate
  modified_base 12: mod_base = OTHER; note = 2'-O-methylcytidine-3'-phosphate
  modified_base 13: mod_base = OTHER; note = 2'-O-methyluridine-3'-phosphate
  modified_base 14: mod_base = OTHER; note = 2'-fluorocytidine-3'-phosphate
  modified_base 15: mod_base = OTHER; note = 2'-O-methylguanosine-3'-phosphate
  modified_base 16: mod_base = OTHER; note = 2'-fluorocytidine-3'-phosphate
  modified_base 17: mod_base = OTHER; note = 2'-O-methylguanosine-3'-phosphate
  modified_base 18: mod_base = OTHER; note = 2'-O-methylguanosine-3'-phosphate
  modified_base 19: mod_base = OTHER; note = 2'-O-methyladenosine-3'-phosphate
  modified_base 20: mod_base = OTHER; note = 2'-O-methylcytidine-3'-phosphate
  modified_base 21: mod_base = OTHER; note = 2'-O-methyladenosine-3'-phosphorothioate
  modified_base 22: mod_base = OTHER; note = 2'-O-methylcytidine-3'-phosphorothioate
  modified_base 23: mod_base = OTHER; note = 2'-O-methyladenosine-3'-phosphate
tagcggcagacctcgcggacaca

SEQ ID NO: 670 - DNA, 21 bp, synthetic construct
  source 1..21: mol_type = other DNA
  modified_base 13: mod_base = OTHER; note = 2'-O-methyluridine-3'-phosphate
  modified_base 20: mod_base = OTHER; note = 2'-O-methylcytidine-3'-phosphorothioate
  modified_base 21: mod_base = OTHER; note = 2'-O-methyladenosine-3'-phosphate
  misc_feature 1: note = DNA
  misc_feature 2..21: note = RNA
tagcggcagacctcgcggaca

SEQ ID NO: 671 - DNA, 23 bp, synthetic construct
  source 1..23: mol_type = other DNA
  modified_base 13: mod_base = OTHER; note = 2'-O-methyluridine-3'-phosphate
  modified_base 22: mod_base = OTHER; note = 2'-O-methylcytidine-3'-phosphorothioate
  modified_base 23: mod_base = OTHER; note = 2'-O-methyladenosine-3'-phosphate
  misc_feature 1: note = DNA
  misc_feature 2..23: note = RNA
tagcggcagacctcgcggacaca

SEQ ID NO: 672 - RNA, 23 nt, synthetic construct
  source 1..23: mol_type = other RNA
  modified_base 1: mod_base = OTHER; note = 2'-O-methyluridine-3'-phosphorothioate
  modified_base 2: mod_base = OTHER; note = 2'-fluoroguanosine-3'-phosphorothioate
  modified_base 3: mod_base = OTHER; note = 2'-O-methylguanosine-3'-phosphate
  modified_base 4: mod_base = OTHER; note = 2'-O-methylcytidine-3'-phosphate
  modified_base 5: mod_base = OTHER; note = 2'-O-methylcytidine-3'-phosphate
  modified_base 6: mod_base = OTHER; note = 2'-fluoroadenosine-3'-phosphate
  modified_base 7: mod_base = OTHER; note = 2'-O-methylcytidine-3'-phosphate
  modified_base 8: mod_base = OTHER; note = 2'-O-methyladenosine-3'-phosphate
  modified_base 9: mod_base = OTHER; note = 2'-O-methylguanosine-3'-phosphate
  modified_base 10: mod_base = OTHER; note = 2'-O-methylguanosine-3'-phosphate
  modified_base 11: mod_base = OTHER; note = 2'-O-methylguanosine-3'-phosphate
  modified_base 12: mod_base = OTHER; note = 2'-O-methylcytidine-3'-phosphate
  modified_base 13: mod_base = OTHER; note = 2'-O-methyladenosine-3'-phosphate
  modified_base 14: mod_base = OTHER; note = 2'-fluorocytidine-3'-phosphate
  modified_base 15: mod_base = OTHER; note = 2'-O-methylguanosine-3'-phosphate
  modified_base 16: mod_base = OTHER; note = 2'-fluorouridine-3'-phosphate
  modified_base 17: mod_base = OTHER; note = 2'-O-methyladenosine-3'-phosphate
  modified_base 18: mod_base = OTHER; note = 2'-O-methyluridine-3'-phosphate
  modified_base 19: mod_base = OTHER; note = 2'-O-methyluridine-3'-phosphate
  modified_base 20: mod_base = OTHER; note = 2'-O-methylcytidine-3'-phosphate
  modified_base 21: mod_base = OTHER; note = 2'-O-methylguanosine-3'-phosphorothioate
  modified_base 22: mod_base = OTHER; note = 2'-O-methylcytidine-3'-phosphorothioate
  modified_base 23: mod_base = OTHER; note = 2'-O-methyladenosine-3'-phosphate
tggccacagggcacgtattcgca

SEQ ID NO: 673 - DNA, 21 bp, synthetic construct
  source 1..21: mol_type = other DNA
  modified_base 13: mod_base = OTHER; note = 2'-O-methyladenosine-3'-phosphate
  modified_base 20: mod_base = OTHER; note = 2'-O-methylcytidine-3'-phosphorothioate
  modified_base 21: mod_base = OTHER; note = 2'-O-methylguanosine-3'-phosphate
  misc_feature 1: note = DNA
  misc_feature 2..21: note = RNA
tggccacagggcacgtattcg

SEQ ID NO: 674 - DNA, 23 bp, synthetic construct
  source 1..23: mol_type = other DNA
  modified_base 13: mod_base = OTHER; note = 2'-O-methyladenosine-3'-phosphate
  modified_base 22: mod_base = OTHER; note = 2'-O-methylcytidine-3'-phosphorothioate
  modified_base 23: mod_base = OTHER; note = 2'-O-methyladenosine-3'-phosphate
  misc_feature 1: note = DNA
  misc_feature 2..23: note = RNA
tggccacagggcacgtattcgca

SEQ ID NO: 675 - RNA, 23 nt, synthetic construct
  source 1..23: mol_type = other RNA
  modified_base 1: mod_base = OTHER; note = 2'-O-methyluridine-3'-phosphorothioate
  modified_base 2: mod_base = OTHER; note = 2'-fluorouridine-3'-phosphorothioate
  modified_base 3: mod_base = OTHER; note = 2'-O-methylcytidine-3'-phosphate
  modified_base 4: mod_base = OTHER; note = 2'-O-methyladenosine-3'-phosphate
  modified_base 5: mod_base = OTHER; note = 2'-O-methylguanosine-3'-phosphate
  modified_base 6: mod_base = OTHER; note = 2'-fluoroadenosine-3'-phosphate
  modified_base 7: mod_base = OTHER; note = 2'-O-methylcytidine-3'-phosphate
  modified_base 8: mod_base = OTHER; note = 2'-O-methyluridine-3'-phosphate
  modified_base 9: mod_base = OTHER; note = 2'-O-methyluridine-3'-phosphate
  modified_base 10: mod_base = OTHER; note = 2'-O-methylguanosine-3'-phosphate
  modified_base 11: mod_base = OTHER; note = 2'-O-methylguanosine-3'-phosphate
  modified_base 12: mod_base = OTHER; note = 2'-O-methylguanosine-3'-phosphate
  modified_base 13: mod_base = OTHER; note = 2'-O-methylguanosine-3'-phosphate
  modified_base 14: mod_base = OTHER; note = 2'-fluorouridine-3'-phosphate
  modified_base 15: mod_base = OTHER; note = 2'-O-methyladenosine-3'-phosphate
  modified_base 16: mod_base = OTHER; note = 2'-fluoroguanosine-3'-phosphate
  modified_base 17: mod_base = OTHER; note = 2'-O-methyluridine-3'-phosphate
  modified_base 18: mod_base = OTHER; note = 2'-O-methylcytidine-3'-phosphate
  modified_base 19: mod_base = OTHER; note = 2'-O-methylcytidine-3'-phosphate
  modified_base 20: mod_base = OTHER; note = 2'-O-methyluridine-3'-phosphate
  modified_base 21: mod_base = OTHER; note = 2'-O-methylcytidine-3'-phosphorothioate
  modified_base 22: mod_base = OTHER; note = 2'-O-methyladenosine-3'-phosphorothioate
  modified_base 23: mod_base = OTHER; note = 2'-O-methyluridine-3'-phosphate
ttcagacttggggtagtcctcat

SEQ ID NO: 676 - RNA, 23 nt, synthetic construct
  source 1..23: mol_type = other RNA
  modified_base 1: mod_base = OTHER; note = 2'-O-methyluridine-3'-phosphorothioate
  modified_base 2: mod_base = OTHER; note = 2'-fluorouridine-3'-phosphorothioate
  modified_base 3: mod_base = OTHER; note = 2'-O-methylguanosine-3'-phosphate
  modified_base 4: mod_base = OTHER; note = 2'-O-methyluridine-3'-phosphate
  modified_base 5: mod_base = OTHER; note = 2'-O-methyluridine-3'-phosphate
  modified_base 6: mod_base = OTHER; note = 2'-fluorocytidine-3'-phosphate
  modified_base 7: mod_base = OTHER; note = 2'-O-methyladenosine-3'-phosphate
  modified_base 8: mod_base = OTHER; note = 2'-O-methylguanosine-3'-phosphate
  modified_base 9: mod_base = OTHER; note = 2'-O-methyladenosine-3'-phosphate
  modified_base 10: mod_base = OTHER; note = 2'-O-methylcytidine-3'-phosphate
  modified_base 11: mod_base = OTHER; note = 2'-O-methyluridine-3'-phosphate
  modified_base 12: mod_base = OTHER; note = 2'-O-methyluridine-3'-phosphate
  modified_base 13: mod_base = OTHER; note = 2'-O-methylguanosine-3'-phosphate
  modified_base 14: mod_base = OTHER; note = 2'-fluoroguanosine-3'-phosphate
  modified_base 15: mod_base = OTHER; note = 2'-O-methylguanosine-3'-phosphate
  modified_base 16: mod_base = OTHER; note = 2'-fluoroguanosine-3'-phosphate
  modified_base 17: mod_base = OTHER; note = 2'-O-methyluridine-3'-phosphate
  modified_base 18: mod_base = OTHER; note = 2'-O-methyladenosine-3'-phosphate
  modified_base 19: mod_base = OTHER; note = 2'-O-methylguanosine-3'-phosphate
  modified_base 20: mod_base = OTHER; note = 2'-O-methyluridine-3'-phosphate
  modified_base 21: mod_base = OTHER; note = 2'-O-methylcytidine-3'-phosphorothioate
  modified_base 22: mod_base = OTHER; note = 2'-O-methylcytidine-3'-phosphorothioate
  modified_base 23: mod_base = OTHER; note = 2'-O-methyluridine-3'-phosphate
ttgttcagacttggggtagtcct

SEQ ID NO: 677 - RNA, 23 nt, synthetic construct
  source 1..23: mol_type = other RNA
  modified_base 1: mod_base = OTHER; note = 2'-O-methyluridine-3'-phosphorothioate
  modified_base 2: mod_base = OTHER; note = 2'-fluorocytidine-3'-phosphorothioate
  modified_base 3: mod_base = OTHER; note = 2'-O-methylguanosine-3'-phosphate
  modified_base 4: mod_base = OTHER; note = 2'-O-methyluridine-3'-phosphate
  modified_base 5: mod_base = OTHER; note = 2'-O-methylcytidine-3'-phosphate
  modified_base 6: mod_base = OTHER; note = 2'-fluorocytidine-3'-phosphate
  modified_base 7: mod_base = OTHER; note = 2'-O-methylcytidine-3'-phosphate
  modified_base 8: mod_base = OTHER; note = 2'-O-methylcytidine-3'-phosphate
  modified_base 9: mod_base = OTHER; note = 2'-O-methyluridine-3'-phosphate
  modified_base 10: mod_base = OTHER; note = 2'-O-methylcytidine-3'-phosphate
  modified_base 11: mod_base = OTHER; note = 2'-O-methylcytidine-3'-phosphate
  modified_base 12: mod_base = OTHER; note = 2'-O-methyladenosine-3'-phosphate
  modified_base 13: mod_base = OTHER; note = 2'-O-methyladenosine-3'-phosphate
  modified_base 14: mod_base = OTHER; note = 2'-fluoroguanosine-3'-phosphate
  modified_base 15: mod_base = OTHER; note = 2'-O-methyluridine-3'-phosphate
  modified_base 16: mod_base = OTHER; note = 2'-fluorouridine-3'-phosphate
  modified_base 17: mod_base = OTHER; note = 2'-O-methylguanosine-3'-phosphate
  modified_base 18: mod_base = OTHER; note = 2'-O-methyluridine-3'-phosphate
  modified_base 19: mod_base = OTHER; note = 2'-O-methyluridine-3'-phosphate
  modified_base 20: mod_base = OTHER; note = 2'-O-methylcytidine-3'-phosphate
  modified_base 21: mod_base = OTHER; note = 2'-O-methyladenosine-3'-phosphorothioate
  modified_base 22: mod_base = OTHER; note = 2'-O-methylguanosine-3'-phosphorothioate
  modified_base 23: mod_base = OTHER; note = 2'-O-methyladenosine-3'-phosphate
tcgtcccctccaagttgttcaga

SEQ ID NO: 678 - DNA, 21 bp, synthetic construct
  source 1..21: mol_type = other DNA
  modified_base 13: mod_base = OTHER; note = 2'-O-methyladenosine-3'-phosphate
  modified_base 20: mod_base = OTHER; note = 2'-O-methylcytidine-3'-phosphorothioate
  modified_base 21: mod_base = OTHER; note = 2'-O-methyladenosine-3'-phosphate
  misc_feature 1: note = DNA
  misc_feature 2..21: note = RNA
tcgtcccctccaagttgttca

SEQ ID NO: 679 - DNA, 23 bp, synthetic construct
  source 1..23: mol_type = other DNA
  modified_base 13: mod_base = OTHER; note = 2'-O-methyladenosine-3'-phosphate
  modified_base 22: mod_base = OTHER; note = 2'-O-methylguanosine-3'-phosphorothioate
  modified_base 23: mod_base = OTHER; note = 2'-O-methyladenosine-3'-phosphate
  misc_feature 1: note = DNA
  misc_feature 2..23: note = RNA
tcgtcccctccaagttgttcaga

SEQ ID NO: 680 - RNA, 23 nt, synthetic construct
  source 1..23: mol_type = other RNA
  modified_base 1: mod_base = OTHER; note = 2'-O-methyluridine-3'-phosphorothioate
  modified_base 2: mod_base = OTHER; note = 2'-fluoroadenosine-3'-phosphorothioate
  modified_base 3: mod_base = OTHER; note = 2'-O-methyladenosine-3'-phosphate
  modified_base 4: mod_base = OTHER; note = 2'-O-methylcytidine-3'-phosphate
  modified_base 5: mod_base = OTHER; note = 2'-O-methylguanosine-3'-phosphate
  modified_base 6: mod_base = OTHER; note = 2'-fluorouridine-3'-phosphate
  modified_base 7: mod_base = OTHER; note = 2'-O-methylcytidine-3'-phosphate
  modified_base 8: mod_base = OTHER; note = 2'-O-methylcytidine-3'-phosphate
  modified_base 9: mod_base = OTHER; note = 2'-O-methylcytidine-3'-phosphate
  modified_base 10: mod_base = OTHER; note = 2'-O-methylcytidine-3'-phosphate
  modified_base 11: mod_base = OTHER; note = 2'-O-methyluridine-3'-phosphate
  modified_base 12: mod_base = OTHER; note = 2'-O-methylcytidine-3'-phosphate
  modified_base 13: mod_base = OTHER; note = 2'-O-methylcytidine-3'-phosphate
  modified_base 14: mod_base = OTHER; note = 2'-fluoroadenosine-3'-phosphate
  modified_base 15: mod_base = OTHER; note = 2'-O-methyladenosine-3'-phosphate
  modified_base 16: mod_base = OTHER; note = 2'-fluoroguanosine-3'-phosphate
  modified_base 17: mod_base = OTHER; note = 2'-O-methyluridine-3'-phosphate
  modified_base 18: mod_base = OTHER; note = 2'-O-methyluridine-3'-phosphate
  modified_base 19: mod_base = OTHER; note = 2'-O-methylguanosine-3'-phosphate
  modified_base 20: mod_base = OTHER; note = 2'-O-methyluridine-3'-phosphate
  modified_base 21: mod_base = OTHER; note = 2'-O-methyluridine-3'-phosphorothioate
  modified_base 22: mod_base = OTHER; note = 2'-O-methylcytidine-3'-phosphorothioate
  modified_base 23: mod_base = OTHER; note = 2'-O-methyladenosine-3'-phosphate
taacgtcccctccaagttgttca

SEQ ID NO: 681 - DNA, 21 bp, synthetic construct
  source 1..21: mol_type = other DNA
  modified_base 13: mod_base = OTHER; note = 2'-O-methylcytidine-3'-phosphate
  modified_base 20: mod_base = OTHER; note = 2'-O-methyluridine-3'-phosphorothioate
  modified_base 21: mod_base = OTHER; note = 2'-O-methyluridine-3'-phosphate
  misc_feature 1: note = DNA
  misc_feature 2..21: note = RNA
taacgtcccctccaagttgtt

SEQ ID NO: 682 - DNA, 23 bp, synthetic construct
  source 1..23: mol_type = other DNA
  modified_base 13: mod_base = OTHER; note = 2'-O-methylcytidine-3'-phosphate
  modified_base 22: mod_base = OTHER; note = 2'-O-methylcytidine-3'-phosphorothioate
  modified_base 23: mod_base = OTHER; note = 2'-O-methyladenosine-3'-phosphate
  misc_feature 1: note = DNA
  misc_feature 2..23: note = RNA
taacgtcccctccaagttgttca

SEQ ID NO: 683 - RNA, 23 nt, synthetic construct
  source 1..23: mol_type = other RNA
  modified_base 1: mod_base = OTHER; note = 2'-O-methyluridine-3'-phosphorothioate
  modified_base 2: mod_base = OTHER; note = 2'-fluorouridine-3'-phosphorothioate
  modified_base 3: mod_base = OTHER; note = 2'-O-methyladenosine-3'-phosphate
  modified_base 4: mod_base = OTHER; note = 2'-O-methyluridine-3'-phosphate
  modified_base 5: mod_base = OTHER; note = 2'-O-methylcytidine-3'-phosphate
  modified_base 6: mod_base = OTHER; note = 2'-fluoroguanosine-3'-phosphate
  modified_base 7: mod_base = OTHER; note = 2'-O-methyluridine-3'-phosphate
  modified_base 8: mod_base = OTHER; note = 2'-O-methyladenosine-3'-phosphate
  modified_base 9: mod_base = OTHER; note = 2'-O-methylguanosine-3'-phosphate
  modified_base 10: mod_base = OTHER; note = 2'-O-methylguanosine-3'-phosphate
  modified_base 11: mod_base = OTHER; note = 2'-O-methyladenosine-3'-phosphate
  modified_base 12: mod_base = OTHER; note = 2'-O-methylcytidine-3'-phosphate
  modified_base 13: mod_base = OTHER; note = 2'-O-methyluridine-3'-phosphate
  modified_base 14: mod_base = OTHER; note = 2'-fluorocytidine-3'-phosphate
  modified_base 15: mod_base = OTHER; note = 2'-O-methyladenosine-3'-phosphate
  modified_base 16: mod_base = OTHER; note = 2'-fluoroadenosine-3'-phosphate
  modified_base 17: mod_base = OTHER; note = 2'-O-methylcytidine-3'-phosphate
  modified_base 18: mod_base = OTHER; note = 2'-O-methylguanosine-3'-phosphate
  modified_base 19: mod_base = OTHER; note = 2'-O-methyluridine-3'-phosphate
  modified_base 20: mod_base = OTHER; note = 2'-O-methylcytidine-3'-phosphate
  modified_base 21: mod_base = OTHER; note = 2'-O-methylcytidine-3'-phosphorothioate
  modified_base 22: mod_base = OTHER; note = 2'-O-methylcytidine-3'-phosphorothioate
  modified_base 23: mod_base = OTHER; note = 2'-O-methylcytidine-3'-phosphate
ttatcgtaggactcaacgtcccc

SEQ ID NO: 684 - DNA, 23 bp, synthetic construct
  source 1..23: mol_type = other DNA
  modified_base 13: mod_base = OTHER; note = 2'-O-methyluridine-3'-phosphate
  modified_base 22: mod_base = OTHER; note = 2'-O-methylcytidine-3'-phosphorothioate
  modified_base 23: mod_base = OTHER; note = 2'-O-methylcytidine-3'-phosphate
  misc_feature 1: note = DNA
  misc_feature 2..23: note = RNA
ttatcgtaggactcaacgtcccc

SEQ ID NO: 685 - RNA, 23 nt, synthetic construct
  source 1..23: mol_type = other RNA
  modified_base 1: mod_base = OTHER; note = 2'-O-methyluridine-3'-phosphorothioate
  modified_base 2: mod_base = OTHER; note = 2'-fluorocytidine-3'-phosphorothioate
  modified_base 3: mod_base = OTHER; note = 2'-O-methyluridine-3'-phosphate
  modified_base 4: mod_base = OTHER; note = 2'-O-methyluridine-3'-phosphate
  modified_base 5: mod_base = OTHER; note = 2'-O-methyladenosine-3'-phosphate
  modified_base 6: mod_base = OTHER; note = 2'-fluorouridine-3'-phosphate
  modified_base 7: mod_base = OTHER; note = 2'-O-methylcytidine-3'-phosphate
  modified_base 8: mod_base = OTHER; note = 2'-O-methylguanosine-3'-phosphate
  modified_base 9: mod_base = OTHER; note = 2'-O-methyluridine-3'-phosphate
  modified_base 10: mod_base = OTHER; note = 2'-O-methyladenosine-3'-phosphate
  modified_base 11: mod_base = OTHER; note = 2'-O-methylguanosine-3'-phosphate
  modified_base 12: mod_base = OTHER; note = 2'-O-methylguanosine-3'-phosphate
  modified_base 13: mod_base = OTHER; note = 2'-O-methyladenosine-3'-phosphate
  modified_base 14: mod_base = OTHER; note = 2'-fluorocytidine-3'-phosphate
  modified_base 15: mod_base = OTHER; note = 2'-O-methyluridine-3'-phosphate
  modified_base 16: mod_base = OTHER; note = 2'-fluorocytidine-3'-phosphate
  modified_base 17: mod_base = OTHER; note = 2'-O-methyladenosine-3'-phosphate
  modified_base 18: mod_base = OTHER; note = 2'-O-methyladenosine-3'-phosphate
  modified_base 19: mod_base = OTHER; note = 2'-O-methylcytidine-3'-phosphate
  modified_base 20: mod_base = OTHER; note = 2'-O-methylguanosine-3'-phosphate
  modified_base 21: mod_base = OTHER; note = 2'-O-methyluridine-3'-phosphorothioate
  modified_base 22: mod_base = OTHER; note = 2'-O-methylcytidine-3'-phosphorothioate
  modified_base 23: mod_base = OTHER; note = 2'-O-methylcytidine-3'-phosphate
tcttatcgtaggactcaacgtcc

SEQ ID NO: 686 - RNA, 23 nt, synthetic construct
  source 1..23: mol_type = other RNA
  modified_base 1: mod_base = OTHER; note = 2'-O-methyluridine-3'-phosphorothioate
  modified_base 2: mod_base = OTHER; note = 2'-fluorocytidine-3'-phosphorothioate
  modified_base 3: mod_base = OTHER; note = 2'-O-methylcytidine-3'-phosphate
  modified_base 4: mod_base = OTHER; note = 2'-O-methyluridine-3'-phosphate
  modified_base 5: mod_base = OTHER; note = 2'-O-methylguanosine-3'-phosphate
  modified_base 6: mod_base = OTHER; note = 2'-fluoroadenosine-3'-phosphate
  modified_base 7: mod_base = OTHER; note = 2'-O-methyluridine-3'-phosphate
  modified_base 8: mod_base = OTHER; note = 2'-O-methylcytidine-3'-phosphate
  modified_base 9: mod_base = OTHER; note = 2'-O-methyluridine-3'-phosphate
  modified_base 10: mod_base = OTHER; note = 2'-O-methyluridine-3'-phosphate
  modified_base 11: mod_base = OTHER; note = 2'-O-methyladenosine-3'-phosphate
  modified_base 12: mod_base = OTHER; note = 2'-O-methyluridine-3'-phosphate
  modified_base 13: mod_base = OTHER; note = 2'-O-methylcytidine-3'-phosphate
  modified_base 14: mod_base = OTHER; note = 2'-fluoroguanosine-3'-phosphate
  modified_base 15: mod_base = OTHER; note = 2'-O-methyluridine-3'-phosphate
  modified_base 16: mod_base = OTHER; note = 2'-fluoroadenosine-3'-phosphate
  modified_base 17: mod_base = OTHER; note = 2'-O-methylguanosine-3'-phosphate
  modified_base 18: mod_base = OTHER; note = 2'-O-methylguanosine-3'-phosphate
  modified_base 19: mod_base = OTHER; note = 2'-O-methyladenosine-3'-phosphate
  modified_base 20: mod_base = OTHER; note = 2'-O-methylcytidine-3'-phosphate
  modified_base 21: mod_base = OTHER; note = 2'-O-methyluridine-3'-phosphorothioate
  modified_base 22: mod_base = OTHER; note = 2'-O-methylcytidine-3'-phosphorothioate
  modified_base 23: mod_base = OTHER; note = 2'-O-methyladenosine-3'-phosphate
tcctgatcttatcgtaggactca

SEQ ID NO: 687 - RNA, 23 nt, synthetic construct
  source 1..23: mol_type = other RNA
  modified_base 1: mod_base = OTHER; note = 2'-O-methyluridine-3'-phosphorothioate
  modified_base 2: mod_base = OTHER; note = 2'-fluoroguanosine-3'-phosphorothioate
  modified_base 3: mod_base = OTHER; note = 2'-O-methyladenosine-3'-phosphate
  modified_base 4: mod_base = OTHER; note = 2'-O-methyluridine-3'-phosphate
  modified_base 5: mod_base = OTHER; note = 2'-O-methylcytidine-3'-phosphate
  modified_base 6: mod_base = OTHER; note = 2'-fluorocytidine-3'-phosphate
  modified_base 7: mod_base = OTHER; note = 2'-O-methyluridine-3'-phosphate
  modified_base 8: mod_base = OTHER; note = 2'-O-methylguanosine-3'-phosphate
  modified_base 9: mod_base = OTHER; note = 2'-O-methyluridine-3'-phosphate
  modified_base 10: mod_base = OTHER; note = 2'-O-methyladenosine-3'-phosphate
  modified_base 11: mod_base = OTHER; note = 2'-O-methylguanosine-3'-phosphate
  modified_base 12: mod_base = OTHER; note = 2'-O-methyluridine-3'-phosphate
  modified_base 13: mod_base = OTHER; note = 2'-O-methyluridine-3'-phosphate
  modified_base 14: mod_base = OTHER; note = 2'-fluoroguanosine-3'-phosphate
  modified_base 15: mod_base = OTHER; note = 2'-O-methyluridine-3'-phosphate
  modified_base 16: mod_base = OTHER; note = 2'-fluoroadenosine-3'-phosphate
  modified_base 17: mod_base = OTHER; note = 2'-O-methylguanosine-3'-phosphate
  modified_base 18: mod_base = OTHER; note = 2'-O-methylcytidine-3'-phosphate
  modified_base 19: mod_base = OTHER; note = 2'-O-methyladenosine-3'-phosphate
  modified_base 20: mod_base = OTHER; note = 2'-O-methylcytidine-3'-phosphate
  modified_base 21: mod_base = OTHER; note = 2'-O-methyladenosine-3'-phosphorothioate
  modified_base 22: mod_base = OTHER; note = 2'-O-methyluridine-3'-phosphorothioate
  modified_base 23: mod_base = OTHER; note = 2'-O-methylcytidine-3'-phosphate
tgatcctgtagttgtagcacatc

SEQ ID NO: 688 - RNA, 23 nt, synthetic construct
  source 1..23: mol_type = other RNA
  modified_base 1: mod_base = OTHER; note = 2'-O-methyluridine-3'-phosphorothioate
  modified_base 2: mod_base = OTHER; note = 2'-fluoroadenosine-3'-phosphorothioate
  modified_base 3: mod_base = OTHER; note = 2'-O-methylguanosine-3'-phosphate
  modified_base 4: mod_base = OTHER; note = 2'-O-methylguanosine-3'-phosphate
  modified_base 5: mod_base = OTHER; note = 2'-O-methyladenosine-3'-phosphate
  modified_base 6: mod_base = OTHER; note = 2'-fluorocytidine-3'-phosphate
  modified_base 7: mod_base = OTHER; note = 2'-O-methylcytidine-3'-phosphate
  modified_base 8: mod_base = OTHER; note = 2'-O-methylcytidine-3'-phosphate
  modified_base 9: mod_base = OTHER; note = 2'-O-methylguanosine-3'-phosphate
  modified_base 10: mod_base = OTHER; note = 2'-O-methylguanosine-3'-phosphate
  modified_base 11: mod_base = OTHER; note = 2'-O-methyladenosine-3'-phosphate
  modified_base 12: mod_base = OTHER; note = 2'-O-methyluridine-3'-phosphate
  modified_base 13: mod_base = OTHER; note = 2'-O-methylcytidine-3'-phosphate
  modified_base 14: mod_base = OTHER; note = 2'-fluorocytidine-3'-phosphate
  modified_base 15: mod_base = OTHER; note = 2'-O-methyluridine-3'-phosphate
  modified_base 16: mod_base = OTHER; note = 2'-fluoroguanosine-3'-phosphate
  modified_base 17: mod_base = OTHER; note = 2'-O-methyluridine-3'-phosphate
  modified_base 18: mod_base = OTHER; note = 2'-O-methyladenosine-3'-phosphate
  modified_base 19: mod_base = OTHER; note = 2'-O-methylguanosine-3'-phosphate
  modified_base 20: mod_base = OTHER; note = 2'-O-methyluridine-3'-phosphate
  modified_base 21: mod_base = OTHER; note = 2'-O-methyluridine-3'-phosphorothioate
  modified_base 22: mod_base = OTHER; note = 2'-O-methylguanosine-3'-phosphorothioate
  modified_base 23: mod_base = OTHER; note = 2'-O-methyluridine-3'-phosphate
taggacccggatcctgtagttgt

SEQ ID NO: 689 - RNA, 23 nt, synthetic construct
  source 1..23: mol_type = other RNA
  modified_base 1: mod_base = OTHER; note = 2'-O-methyluridine-3'-phosphorothioate
  modified_base 2: mod_base = OTHER; note = 2'-fluoroadenosine-3'-phosphorothioate
  modified_base 3: mod_base = OTHER; note = 2'-O-methylguanosine-3'-phosphate
  modified_base 4: mod_base = OTHER; note = 2'-O-methyluridine-3'-phosphate
  modified_base 5: mod_base = OTHER; note = 2'-O-methylguanosine-3'-phosphate
  modified_base 6: mod_base = OTHER; note = 2'-fluorocytidine-3'-phosphate
  modified_base 7: mod_base = OTHER; note = 2'-O-methylguanosine-3'-phosphate
  modified_base 8: mod_base = OTHER; note = 2'-O-methylguanosine-3'-phosphate
  modified_base 9: mod_base = OTHER; note = 2'-O-methylcytidine-3'-phosphate
  modified_base 10: mod_base = OTHER; note = 2'-O-methyluridine-3'-phosphate
  modified_base 11: mod_base = OTHER; note = 2'-O-methylguanosine-3'-phosphate
  modified_base 12: mod_base = OTHER; note = 2'-O-methyluridine-3'-phosphate
  modified_base 13: mod_base = OTHER; note = 2'-O-methyladenosine-3'-phosphate
  modified_base 14: mod_base = OTHER; note = 2'-fluoroadenosine-3'-phosphate
  modified_base 15: mod_base = OTHER; note = 2'-O-methylguanosine-3'-phosphate
  modified_base 16: mod_base = OTHER; note = 2'-fluoroguanosine-3'-phosphate
  modified_base 17: mod_base = OTHER; note = 2'-O-methylcytidine-3'-phosphate
  modified_base 18: mod_base = OTHER; note = 2'-O-methyladenosine-3'-phosphate
  modified_base 19: mod_base = OTHER; note = 2'-O-methylguanosine-3'-phosphate
  modified_base 20: mod_base = OTHER; note = 2'-O-methylcytidine-3'-phosphate
  modified_base 21: mod_base = OTHER; note = 2'-O-methyluridine-3'-phosphorothioate
  modified_base 22: mod_base = OTHER; note = 2'-O-methylcytidine-3'-phosphorothioate
  modified_base 23: mod_base = OTHER; note = 2'-O-methylcytidine-3'-phosphate
tagtgcggctgtaaggcagctcc

SEQ ID NO: 690 - RNA, 23 nt, synthetic construct
  source 1..23: mol_type = other RNA
  modified_base 1: mod_base = OTHER; note = 2'-O-methyluridine-3'-phosphorothioate
  modified_base 2: mod_base = OTHER; note = 2'-fluorocytidine-3'-phosphorothioate
  modified_base 3: mod_base = OTHER; note = 2'-O-methylguanosine-3'-phosphate
  modified_base 4: mod_base = OTHER; note = 2'-O-methylcytidine-3'-phosphate
  modified_base 5: mod_base = OTHER; note = 2'-O-methylcytidine-3'-phosphate
  modified_base 6: mod_base = OTHER; note = 2'-fluoroadenosine-3'-phosphate
  modified_base 7: mod_base = OTHER; note = 2'-O-methylguanosine-3'-phosphate
  modified_base 8: mod_base = OTHER; note = 2'-O-methylguanosine-3'-phosphate
  modified_base 9: mod_base = OTHER; note = 2'-O-methylcytidine-3'-phosphate
  modified_base 10: mod_base = OTHER; note = 2'-O-methyluridine-3'-phosphate
  modified_base 11: mod_base = OTHER; note = 2'-O-methylcytidine-3'-phosphate
  modified_base 12: mod_base = OTHER; note = 2'-O-methylguanosine-3'-phosphate
  modified_base 13: mod_base = OTHER; note = 2'-O-methyluridine-3'-phosphate
  modified_base 14: mod_base = OTHER; note = 2'-fluoroguanosine-3'-phosphate
  modified_base 15: mod_base = OTHER; note = 2'-O-methylguanosine-3'-phosphate
  modified_base 16: mod_base = OTHER; note = 2'-fluorouridine-3'-phosphate
  modified_base 17: mod_base = OTHER; note = 2'-O-methylcytidine-3'-phosphate
  modified_base 18: mod_base = OTHER; note = 2'-O-methyladenosine-3'-phosphate
  modified_base 19: mod_base = OTHER; note = 2'-O-methylguanosine-3'-phosphate
  modified_base 20: mod_base = OTHER; note = 2'-O-methylcytidine-3'-phosphate
  modified_base 21: mod_base = OTHER; note = 2'-O-methylguanosine-3'-phosphorothioate
  modified_base 22: mod_base = OTHER; note = 2'-O-methylguanosine-3'-phosphorothioate
  modified_base 23: mod_base = OTHER; note = 2'-O-methylcytidine-3'-phosphate
tcgccaggctcgtggtcagcggc

SEQ ID NO: 691 - DNA, 21 bp, synthetic construct
  source 1..21: mol_type = other DNA
  modified_base 13: mod_base = OTHER; note = 2'-O-methyluridine-3'-phosphate
  modified_base 20: mod_base = OTHER; note = 2'-O-methylcytidine-3'-phosphorothioate
  modified_base 21: mod_base = OTHER; note = 2'-O-methylguanosine-3'-phosphate
  misc_feature 1: note = DNA
  misc_feature 2..21: note = RNA
tcgccaggctcgtggtcagcg

SEQ ID NO: 692 - DNA, 23 bp, synthetic construct
  source 1..23: mol_type = other DNA
  modified_base 13: mod_base = OTHER; note = 2'-O-methyluridine-3'-phosphate
  modified_base 22: mod_base = OTHER; note = 2'-O-methylguanosine-3'-phosphorothioate
  modified_base 23: mod_base = OTHER; note = 2'-O-methylcytidine-3'-phosphate
  misc_feature 1: note = DNA
  misc_feature 2..23: note = RNA
tcgccaggctcgtggtcagcggc

SEQ ID NO: 693 - RNA, 23 nt, synthetic construct
  source 1..23: mol_type = other RNA
  modified_base 1: mod_base = OTHER; note = 2'-O-methyluridine-3'-phosphorothioate
  modified_base 2: mod_base = OTHER; note = 2'-fluorocytidine-3'-phosphorothioate
  modified_base 3: mod_base = OTHER; note = 2'-O-methylguanosine-3'-phosphate
  modified_base 4: mod_base = OTHER; note = 2'-O-methyluridine-3'-phosphate
  modified_base 5: mod_base = OTHER; note = 2'-O-methylcytidine-3'-phosphate
  modified_base 6: mod_base = OTHER; note = 2'-fluoroadenosine-3'-phosphate
  modified_base 7: mod_base = OTHER; note = 2'-O-methyladenosine-3'-phosphate
  modified_base 8: mod_base = OTHER; note = 2'-O-methyladenosine-3'-phosphate
  modified_base 9: mod_base = OTHER; note = 2'-O-methylcytidine-3'-phosphate
  modified_base 10: mod_base = OTHER; note = 2'-O-methylcytidine-3'-phosphate
  modified_base 11: mod_base = OTHER; note = 2'-O-methyladenosine-3'-phosphate
  modified_base 12: mod_base = OTHER; note = 2'-O-methylcytidine-3'-phosphate
  modified_base 13: mod_base = OTHER; note = 2'-O-methyluridine-3'-phosphate
  modified_base 14: mod_base = OTHER; note = 2'-fluorocytidine-3'-phosphate
  modified_base 15: mod_base = OTHER; note = 2'-O-methyluridine-3'-phosphate
  modified_base 16: mod_base = OTHER; note = 2'-fluoroguanosine-3'-phosphate
  modified_base 17: mod_base = OTHER; note = 2'-O-methyluridine-3'-phosphate
  modified_base 18: mod_base = OTHER; note = 2'-O-methylcytidine-3'-phosphate
  modified_base 19: mod_base = OTHER; note = 2'-O-methylcytidine-3'-phosphate
  modified_base 20: mod_base = OTHER; note = 2'-O-methyladenosine-3'-phosphate
  modified_base 21: mod_base = OTHER; note = 2'-O-methylcytidine-3'-phosphorothioate
  modified_base 22: mod_base = OTHER; note = 2'-O-methyluridine-3'-phosphorothioate
  modified_base 23: mod_base = OTHER; note = 2'-O-methylcytidine-3'-phosphate
tcgtcaaaccactctgtccactc

SEQ ID NO: 694 - RNA, 23 nt, synthetic construct
  source 1..23: mol_type = other RNA
  modified_base 1: mod_base = OTHER; note = 2'-O-methyluridine-3'-phosphorothioate
  modified_base 2: mod_base = OTHER; note = 2'-fluoroadenosine-3'-phosphorothioate
  modified_base 3: mod_base = OTHER; note = 2'-O-methylcytidine-3'-phosphate
  modified_base 4: mod_base = OTHER; note = 2'-O-methylguanosine-3'-phosphate
  modified_base 5: mod_base = OTHER; note = 2'-O-methyladenosine-3'-phosphate
  modified_base 6: mod_base = OTHER; note = 2'-fluorocytidine-3'-phosphate
  modified_base 7: mod_base = OTHER; note = 2'-O-methylcytidine-3'-phosphate
  modified_base 8: mod_base = OTHER; note = 2'-O-methyluridine-3'-phosphate
  modified_base 9: mod_base = OTHER; note = 2'-O-methylguanosine-3'-phosphate
  modified_base 10: mod_base = OTHER; note = 2'-O-methylguanosine-3'-phosphate
  modified_base 11: mod_base = OTHER; note = 2'-O-methylcytidine-3'-phosphate
  modified_base 12: mod_base = OTHER; note = 2'-O-methylcytidine-3'-phosphate
  modified_base 13: mod_base = OTHER; note = 2'-O-methylcytidine-3'-phosphate
  modified_base 14: mod_base = OTHER; note = 2'-fluoroadenosine-3'-phosphate
  modified_base 15: mod_base = OTHER; note = 2'-O-methyladenosine-3'-phosphate
  modified_base 16: mod_base = OTHER; note = 2'-fluorocytidine-3'-phosphate
  modified_base 17: mod_base = OTHER; note = 2'-O-methyluridine-3'-phosphate
  modified_base 18: mod_base = OTHER; note = 2'-O-methylcytidine-3'-phosphate
  modified_base 19: mod_base = OTHER; note = 2'-O-methylcytidine-3'-phosphate
  modified_base 20: mod_base = OTHER; note = 2'-O-methylcytidine-3'-phosphate
  modified_base 21: mod_base = OTHER; note = 2'-O-methylguanosine-3'-phosphorothioate
  modified_base 22: mod_base = OTHER; note = 2'-O-methylcytidine-3'-phosphorothioate
  modified_base 23: mod_base = OTHER; note = 2'-O-methyladenosine-3'-phosphate
tacgacctggcccaactcccgca

SEQ ID NO: 695 - RNA, 23 nt, synthetic construct
  source 1..23: mol_type = other RNA
  modified_base 1: mod_base = OTHER; note = 2'-O-methyluridine-3'-phosphorothioate
  modified_base 2: mod_base = OTHER; note = 2'-fluorocytidine-3'-phosphorothioate
  modified_base 3: mod_base = OTHER; note = 2'-O-methylcytidine-3'-phosphate
  modified_base 4: mod_base = OTHER; note = 2'-O-methyladenosine-3'-phosphate
  modified_base 5: mod_base = OTHER; note = 2'-O-methyladenosine-3'-phosphate
  modified_base 6: mod_base = OTHER; note = 2'-fluoroadenosine-3'-phosphate
  modified_base 7: mod_base = OTHER; note = 2'-O-methylcytidine-3'-phosphate
  modified_base 8: mod_base = OTHER; note = 2'-O-methyluridine-3'-phosphate
  modified_base 9: mod_base = OTHER; note = 2'-O-methylguanosine-3'-phosphate
  modified_base 10: mod_base = OTHER; note = 2'-O-methylguanosine-3'-phosphate
  modified_base 11: mod_base = OTHER; note = 2'-O-methyladenosine-3'-phosphate
  modified_base 12: mod_base = OTHER; note = 2'-O-methylguanosine-3'-phosphate
  modified_base 13: mod_base = OTHER; note = 2'-O-methylcytidine-3'-phosphate
  modified_base 14: mod_base = OTHER; note = 2'-fluoroguanosine-3'-phosphate
  modified_base 15: mod_base = OTHER; note = 2'-O-methylguanosine-3'-phosphate
  modified_base 16: mod_base = OTHER; note = 2'-fluoroguanosine-3'-phosphate
  modified_base 17: mod_base = OTHER; note = 2'-O-methylguanosine-3'-phosphate
  modified_base 18: mod_base = OTHER; note = 2'-O-methyluridine-3'-phosphate
  modified_base 19: mod_base = OTHER; note = 2'-O-methylcytidine-3'-phosphate
  modified_base 20: mod_base = OTHER; note = 2'-O-methyladenosine-3'-phosphate
  modified_base 21: mod_base = OTHER; note = 2'-O-methylguanosine-3'-phosphorothioate
  modified_base 22: mod_base = OTHER; note = 2'-O-methylcytidine-3'-phosphorothioate
  modified_base 23: mod_base = OTHER; note = 2'-O-methylcytidine-3'-phosphate
tccaaactggagcggggtcagcc

SEQ ID NO: 696 - DNA, 21 bp, synthetic construct
  source 1..21: mol_type = other DNA
  modified_base 13: mod_base = OTHER; note = 2'-O-methylcytidine-3'-phosphate
  modified_base 20: mod_base = OTHER; note = 2'-O-methyladenosine-3'-phosphorothioate
  modified_base 21: mod_base = OTHER; note = 2'-O-methylguanosine-3'-phosphate
  misc_feature 1: note = DNA
  misc_feature 2..21: note = RNA
tccaaactggagcggggtcag

SEQ ID NO: 697 - DNA, 23 bp, synthetic construct
  source 1..23: mol_type = other DNA
  modified_base 13: mod_base = OTHER; note = 2'-O-methylcytidine-3'-phosphate
  modified_base 22: mod_base = OTHER; note = 2'-O-methylcytidine-3'-phosphorothioate
  modified_base 23: mod_base = OTHER; note = 2'-O-methylcytidine-3'-phosphate
  misc_feature 1: note = DNA
  misc_feature 2..23: note = RNA
tccaaactggagcggggtcagcc

SEQ ID NO: 698 - RNA, 23 nt, synthetic construct
  source 1..23: mol_type = other RNA
  modified_base 1: mod_base = OTHER; note = 2'-O-methyluridine-3'-phosphorothioate
  modified_base 2: mod_base = OTHER; note = 2'-fluorouridine-3'-phosphorothioate
  modified_base 3: mod_base = OTHER; note = 2'-O-methyluridine-3'-phosphate
  modified_base 4: mod_base = OTHER; note = 2'-O-methylcytidine-3'-phosphate
  modified_base 5: mod_base = OTHER; note = 2'-O-methylcytidine-3'-phosphate
  modified_base 6: mod_base = OTHER; note = 2'-fluorocytidine-3'-phosphate
  modified_base 7: mod_base = OTHER; note = 2'-O-methyladenosine-3'-phosphate
  modified_base 8: mod_base = OTHER; note = 2'-O-methyladenosine-3'-phosphate
  modified_base 9: mod_base = OTHER; note = 2'-O-methyladenosine-3'-phosphate
  modified_base 10: mod_base = OTHER; note = 2'-O-methylcytidine-3'-phosphate
  modified_base 11: mod_base = OTHER; note = 2'-O-methyluridine-3'-phosphate
  modified_base 12: mod_base = OTHER; note = 2'-O-methylguanosine-3'-phosphate
  modified_base 13: mod_base = OTHER; note = 2'-O-methylguanosine-3'-phosphate
  modified_base 14: mod_base = OTHER; note = 2'-fluoroadenosine-3'-phosphate
  modified_base 15: mod_base = OTHER; note = 2'-O-methylguanosine-3'-phosphate
  modified_base 16: mod_base = OTHER; note = 2'-fluorocytidine-3'-phosphate
  modified_base 17: mod_base = OTHER; note = 2'-O-methylguanosine-3'-phosphate
  modified_base 18: mod_base = OTHER; note = 2'-O-methylguanosine-3'-phosphate
  modified_base 19: mod_base = OTHER; note = 2'-O-methylguanosine-3'-phosphate
  modified_base 20: mod_base = OTHER; note = 2'-O-methylguanosine-3'-phosphate
  modified_base 21: mod_base = OTHER; note = 2'-O-methyluridine-3'-phosphorothioate
  modified_base 22: mod_base = OTHER; note = 2'-O-methylcytidine-3'-phosphorothioate
  modified_base 23: mod_base = OTHER; note = 2'-O-methyladenosine-3'-phosphate
tttcccaaactggagcggggtca

SEQ ID NO: 699 - DNA, 21 bp, synthetic construct
  source 1..21: mol_type = other DNA
  modified_base 13: mod_base = OTHER; note = 2'-O-methylguanosine-3'-phosphate
  modified_base 20: mod_base = OTHER; note = 2'-O-methylguanosine-3'-phosphorothioate
  modified_base 21: mod_base = OTHER; note = 2'-O-methyluridine-3'-phosphate
  misc_feature 1: note = DNA
  misc_feature 2..21: note = RNA
tttcccaaactggagcggggt

SEQ ID NO: 700 - DNA, 23 bp, synthetic construct
  source 1..23: mol_type = other DNA
  modified_base 13: mod_base = OTHER; note = 2'-O-methylguanosine-3'-phosphate
  modified_base 22: mod_base = OTHER; note = 2'-O-methylcytidine-3'-phosphorothioate
  modified_base 23: mod_base = OTHER; note = 2'-O-methyladenosine-3'-phosphate
  misc_feature 1: note = DNA
  misc_feature 2..23: note = RNA
tttcccaaactggagcggggtca

SEQ ID NO: 701 - RNA, 23 nt, synthetic construct
  source 1..23: mol_type = other RNA
  modified_base 1: mod_base = OTHER; note = 2'-O-methyluridine-3'-phosphorothioate
  modified_base 2: mod_base = OTHER; note = 2'-fluoroguanosine-3'-phosphorothioate
  modified_base 3: mod_base = OTHER; note = 2'-O-methylcytidine-3'-phosphate
  modified_base 4: mod_base = OTHER; note = 2'-O-methylguanosine-3'-phosphate
  modified_base 5: mod_base = OTHER; note = 2'-O-methyluridine-3'-phosphate
  modified_base 6: mod_base = OTHER; note = 2'-fluoroguanosine-3'-phosphate
  modified_base 7: mod_base = OTHER; note = 2'-O-methyladenosine-3'-phosphate
  modified_base 8: mod_base = OTHER; note = 2'-O-methylguanosine-3'-phosphate
  modified_base 9: mod_base = OTHER; note = 2'-O-methyluridine-3'-phosphate
  modified_base 10: mod_base = OTHER; note = 2'-O-methyladenosine-3'-phosphate
  modified_base 11: mod_base = OTHER; note = 2'-O-methyluridine-3'-phosphate
  modified_base 12: mod_base = OTHER; note = 2'-O-methyluridine-3'-phosphate
  modified_base 13: mod_base = OTHER; note = 2'-O-methylcytidine-3'-phosphate
  modified_base 14: mod_base = OTHER; note = 2'-fluorocytidine-3'-phosphate
  modified_base 15: mod_base = OTHER; note = 2'-O-methyladenosine-3'-phosphate
  modified_base 16: mod_base = OTHER; note = 2'-fluorocytidine-3'-phosphate
  modified_base 17: mod_base = OTHER; note = 2'-O-methyladenosine-3'-phosphate
  modified_base 18: mod_base = OTHER; note = 2'-O-methyladenosine-3'-phosphate
  modified_base 19: mod_base = OTHER; note = 2'-O-methyladenosine-3'-phosphate
  modified_base 20: mod_base = OTHER; note = 2'-O-methylguanosine-3'-phosphate
  modified_base 21: mod_base = OTHER; note = 2'-O-methylguanosine-3'-phosphorothioate
  modified_base 22: mod_base = OTHER; note = 2'-O-methyluridine-3'-phosphorothioate
  modified_base 23: mod_base = OTHER; note = 2'-O-methylguanosine-3'-phosphate
tgcgtgagtattccacaaaggtg

SEQ ID NO: 702 - DNA, 21 bp, synthetic construct
  source 1..21: mol_type = other DNA
  modified_base 13: mod_base = OTHER; note = 2'-O-methylcytidine-3'-phosphate
  modified_base 20: mod_base = OTHER; note = 2'-O-methylguanosine-3'-phosphorothioate
  modified_base 21: mod_base = OTHER; note = 2'-O-methylguanosine-3'-phosphate
  misc_feature 1: note = DNA
  misc_feature 2..21: note = RNA
tgcgtgagtattccacaaagg

SEQ ID NO: 703 - DNA, 23 bp, synthetic construct
  source 1..23: mol_type = other DNA
  modified_base 13: mod_base = OTHER; note = 2'-O-methylcytidine-3'-phosphate
  modified_base 22: mod_base = OTHER; note = 2'-O-methyluridine-3'-phosphorothioate
  modified_base 23: mod_base = OTHER; note = 2'-O-methylguanosine-3'-phosphate
  misc_feature 1: note = DNA
  misc_feature 2..23: note = RNA
tgcgtgagtattccacaaaggtg

SEQ ID NO: 704 - RNA, 23 nt, synthetic construct
  source 1..23: mol_type = other RNA
  modified_base 1: mod_base = OTHER; note = 2'-O-methyluridine-3'-phosphorothioate
  modified_base 2: mod_base = OTHER; note = 2'-fluorouridine-3'-phosphorothioate
  modified_base 3: mod_base = OTHER; note = 2'-O-methylguanosine-3'-phosphate
  modified_base 4: mod_base = OTHER; note = 2'-O-methylguanosine-3'-phosphate
  modified_base 5: mod_base = OTHER; note = 2'-O-methylcytidine-3'-phosphate
  modified_base 6: mod_base = OTHER; note = 2'-fluoroguanosine-3'-phosphate
  modified_base 7: mod_base = OTHER; note = 2'-O-methyluridine-3'-phosphate
  modified_base 8: mod_base = OTHER; note = 2'-O-methylguanosine-3'-phosphate
  modified_base 9: mod_base = OTHER; note = 2'-O-methyladenosine-3'-phosphate
  modified_base 10: mod_base = OTHER; note = 2'-O-methylguanosine-3'-phosphate
  modified_base 11: mod_base = OTHER; note = 2'-O-methyluridine-3'-phosphate
  modified_base 12: mod_base = OTHER; note = 2'-O-methyladenosine-3'-phosphate
  modified_base 13: mod_base = OTHER; note = 2'-O-methyluridine-3'-phosphate
  modified_base 14: mod_base = OTHER; note = 2'-fluorouridine-3'-phosphate
  modified_base 15: mod_base = OTHER; note = 2'-O-methylcytidine-3'-phosphate
  modified_base 16: mod_base = OTHER; note = 2'-fluorocytidine-3'-phosphate
  modified_base 17: mod_base = OTHER; note = 2'-O-methyladenosine-3'-phosphate
  modified_base 18: mod_base = OTHER; note = 2'-O-methylcytidine-3'-phosphate
  modified_base 19: mod_base = OTHER; note = 2'-O-methyladenosine-3'-phosphate
  modified_base 20: mod_base = OTHER; note = 2'-O-methyladenosine-3'-phosphate
  modified_base 21: mod_base = OTHER; note = 2'-O-methyladenosine-3'-phosphorothioate
  modified_base 22: mod_base = OTHER; note = 2'-O-methylguanosine-3'-phosphorothioate
  modified_base 23: mod_base = OTHER; note = 2'-O-methylguanosine-3'-phosphate
ttggcgtgagtattccacaaagg

SEQ ID NO: 705 - RNA, 23 nt, synthetic construct
  source 1..23: mol_type = other RNA
  modified_base 1: mod_base = OTHER; note = 2'-O-methyluridine-3'-phosphorothioate
  modified_base 2: mod_base = OTHER; note = 2'-fluoroguanosine-3'-phosphorothioate
  modified_base 3: mod_base = OTHER; note = 2'-O-methylcytidine-3'-phosphate
  modified_base 4: mod_base = OTHER; note = 2'-O-methyladenosine-3'-phosphate
  modified_base 5: mod_base = OTHER; note = 2'-O-methylcytidine-3'-phosphate
  modified_base 6: mod_base = OTHER; note = 2'-fluorouridine-3'-phosphate
  modified_base 7: mod_base = OTHER; note = 2'-O-methylguanosine-3'-phosphate
  modified_base 8: mod_base = OTHER; note = 2'-O-methylguanosine-3'-phosphate
  modified_base 9: mod_base = OTHER; note = 2'-O-methylcytidine-3'-phosphate
  modified_base 10: mod_base = OTHER; note = 2'-O-methylguanosine-3'-phosphate
  modified_base 11: mod_base = OTHER; note = 2'-O-methyluridine-3'-phosphate
  modified_base 12: mod_base = OTHER; note = 2'-O-methylguanosine-3'-phosphate
  modified_base 13: mod_base = OTHER; note = 2'-O-methyladenosine-3'-phosphate
  modified_base 14: mod_base = OTHER; note = 2'-fluoroguanosine-3'-phosphate
  modified_base 15: mod_base = OTHER; note = 2'-O-methyluridine-3'-phosphate
  modified_base 16: mod_base = OTHER; note = 2'-fluoroadenosine-3'-phosphate
  modified_base 17: mod_base = OTHER; note = 2'-O-methyluridine-3'-phosphate
  modified_base 18: mod_base = OTHER; note = 2'-O-methyluridine-3'-phosphate
  modified_base 19: mod_base = OTHER; note = 2'-O-methylcytidine-3'-phosphate
  modified_base 20: mod_base = OTHER; note = 2'-O-methylcytidine-3'-phosphate
  modified_base 21: mod_base = OTHER; note = 2'-O-methyladenosine-3'-phosphorothioate
  modified_base 22: mod_base = OTHER; note = 2'-O-methylcytidine-3'-phosphorothioate
  modified_base 23: mod_base = OTHER; note = 2'-O-methyladenosine-3'-phosphate
tgcactggcgtgagtattccaca

SEQ ID NO: 706 - RNA, 23 nt, synthetic construct
  source 1..23: mol_type = other RNA
  modified_base 1: mod_base = OTHER; note = 2'-O-methyluridine-3'-phosphorothioate
  modified_base 2: mod_base = OTHER; note = 2'-fluoroguanosine-3'-phosphorothioate
  modified_base 3: mod_base = OTHER; note = 2'-O-methyluridine-3'-phosphate
  modified_base 4: mod_base = OTHER; note = 2'-O-methylguanosine-3'-phosphate
  modified_base 5: mod_base = OTHER; note = 2'-O-methylguanosine-3'-phosphate
  modified_base 6: mod_base = OTHER; note = 2'-fluoroguanosine-3'-phosphate
  modified_base 7: mod_base = OTHER; note = 2'-O-methylcytidine-3'-phosphate
  modified_base 8: mod_base = OTHER; note = 2'-O-methylguanosine-3'-phosphate
  modified_base 9: mod_base = OTHER; note = 2'-O-methylcytidine-3'-phosphate
  modified_base 10: mod_base = OTHER; note = 2'-O-methyladenosine-3'-phosphate
  modified_base 11: mod_base = OTHER; note = 2'-O-methylcytidine-3'-phosphate
  modified_base 12: mod_base = OTHER; note = 2'-O-methyluridine-3'-phosphate
  modified_base 13: mod_base = OTHER; note = 2'-O-methylguanosine-3'-phosphate
  modified_base 14: mod_base = OTHER; note = 2'-fluoroguanosine-3'-phosphate
  modified_base 15: mod_base = OTHER; note = 2'-O-methylcytidine-3'-phosphate
  modified_base 16: mod_base = OTHER; note = 2'-fluoroguanosine-3'-phosphate
  modified_base 17: mod_base = OTHER; note = 2'-O-methyluridine-3'-phosphate
  modified_base 18: mod_base = OTHER; note = 2'-O-methylguanosine-3'-phosphate
  modified_base 19: mod_base = OTHER; note = 2'-O-methyladenosine-3'-phosphate
  modified_base 20: mod_base = OTHER; note = 2'-O-methylguanosine-3'-phosphate
  modified_base 21: mod_base = OTHER; note = 2'-O-methyluridine-3'-phosphorothioate
  modified_base 22: mod_base = OTHER; note = 2'-O-methyladenosine-3'-phosphorothioate
  modified_base 23: mod_base = OTHER; note = 2'-O-methyluridine-3'-phosphate
tgtgggcgcactggcgtgagtat

SEQ ID NO: 707 - DNA, 21 bp, synthetic construct
  source 1..21: mol_type = other DNA
  modified_base 13: mod_base = OTHER; note = 2'-O-methylguanosine-3'-phosphate
  modified_base 20: mod_base = OTHER; note = 2'-O-methylguanosine-3'-phosphorothioate
  modified_base 21: mod_base = OTHER; note = 2'-O-methyluridine-3'-phosphate
  misc_feature 1: note = DNA
  misc_feature 2..21: note = RNA
tgtgggcgcactggcgtgagt

SEQ ID NO: 708 - DNA, 23 bp, synthetic construct
  source 1..23: mol_type = other DNA
  modified_base 13: mod_base = OTHER; note = 2'-O-methylguanosine-3'-phosphate
  modified_base 22: mod_base = OTHER; note = 2'-O-methyladenosine-3'-phosphorothioate
  modified_base 23: mod_base = OTHER; note = 2'-O-methyluridine-3'-phosphate
  misc_feature 1: note = DNA
  misc_feature 2..23: note = RNA
tgtgggcgcactggcgtgagtat

SEQ ID NO: 709 - DNA, 17 bp, synthetic construct
  source 1..17: mol_type = other DNA
gttgtagatgacgtcct

SEQ ID NO: 710 - DNA, 17 bp, synthetic construct
  source 1..17: mol_type = other DNA
tagtcgtgacagagcgg

SEQ ID NO: 711 - DNA, 17 bp, synthetic construct
  source 1..17: mol_type = other DNA
ccgtagttgcagcagaa

SEQ ID NO: 712 - DNA, 17 bp, synthetic construct
  source 1..17: mol_type = other DNA
gccgtagttgcagcaga

SEQ ID NO: 713 - DNA, 17 bp, synthetic construct
  source 1..17: mol_type = other DNA
ggtgtaagaggtgccgt

SEQ ID NO: 714 - DNA, 17 bp, synthetic construct
  source 1..17: mol_type = other DNA
ggacgatatccatggac

SEQ ID NO: 715 - DNA, 17 bp, synthetic construct
  source 1..17: mol_type = other DNA
aaagcccatggtcggct

SEQ ID NO: 716 - DNA, 17 bp, synthetic construct
  source 1..17: mol_type = other DNA
gcgtgagtattccacaa

SEQ ID NO: 717 - DNA, 17 bp, synthetic construct
  source 1..17: mol_type = other DNA
cgcactggcgtgagtat

SEQ ID NO: 718 - DNA, 17 bp, synthetic construct
  source 1..17: mol_type = other DNA
gcgcactggcgtgagta

SEQ ID NO: 719 - DNA, 17 bp, synthetic construct
  source 1..17: mol_type = other DNA
ttggacagaacgtagct

SEQ ID NO: 720 - DNA, 17 bp, synthetic construct
  source 1..17: mol_type = other DNA
ccttggacagaacgtag

SEQ ID NO: 721 - DNA, 17 bp, synthetic construct
  source 1..17: mol_type = other DNA
accttggacagaacgta

SEQ ID NO: 722 - DNA, 17 bp, synthetic construct
  source 1..17: mol_type = other DNA
gttctcgttgtccgtca

SEQ ID NO: 723 - DNA, 17 bp, synthetic construct
  source 1..17: mol_type = other DNA
aggcagttctcgttgtc

SEQ ID NO: 724 - DNA, 17 bp, synthetic construct
  source 1..17: mol_type = other DNA
agctcgagggtgtgaac

SEQ ID NO: 725 - DNA, 17 bp, synthetic construct
  source 1..17: mol_type = other DNA
tgaagaagctcgagggt

SEQ ID NO: 726 - DNA, 17 bp, synthetic construct
  source 1..17: mol_type = other DNA
cgatgaagaagctcgag

SEQ ID NO: 727 - DNA, 17 bp, synthetic construct
  source 1..17: mol_type = other DNA
acgatgaagaagctcga

SEQ ID NO: 728 - DNA, 17 bp, synthetic construct
  source 1..17: mol_type = other DNA
tggcgctagtccaggcc

SEQ ID NO: 729 - DNA, 17 bp, synthetic construct
  source 1..17: mol_type = other DNA
agcctggcgctagtcca

SEQ ID NO: 730 - DNA, 17 bp, synthetic construct
  source 1..17: mol_type = other DNA
gcagcctggcgctagtc

SEQ ID NO: 731 - DNA, 17 bp, synthetic construct
  source 1..17: mol_type = other DNA
tgtaggtggcctcgttg

SEQ ID NO: 732 - DNA, 17 bp, synthetic construct
  source 1..17: mol_type = other DNA
gcagtcgaccctgatgg

SEQ ID NO: 733 - DNA, 17 bp, synthetic construct
  source 1..17: mol_type = other DNA
gtgttgcagtcgaccct

SEQ ID NO: 734 - DNA, 17 bp, synthetic construct
  source 1..17: mol_type = other DNA
ggtgttgcagtcgaccc

SEQ ID NO: 735 - DNA, 17 bp, synthetic construct
  source 1..17: mol_type = other DNA
caggtgttgcagtcgac

SEQ ID NO: 736 - DNA, 17 bp, synthetic construct
  source 1..17: mol_type = other DNA
ccgtaggccacgcaggt

SEQ ID NO: 737 - DNA, 17 bp, synthetic construct
  source 1..17: mol_type = other DNA
cccgtaggccacgcagg

SEQ ID NO: 738 - DNA, 17 bp, synthetic construct
  source 1..17: mol_type = other DNA
ccccgtaggccacgcag

SEQ ID NO: 739 - DNA, 17 bp, synthetic construct
  source 1..17: mol_type = other DNA
tccccgtaggccacgca

SEQ ID NO: 740 - DNA, 17 bp, synthetic construct
  source 1..17: mol_type = other DNA
atccccgtaggccacgc

SEQ ID NO: 741 - DNA, 17 bp, synthetic construct
  source 1..17: mol_type = other DNA
catccccgtaggccacg

SEQ ID NO: 742 - DNA, 17 bp, synthetic construct
  source 1..17: mol_type = other DNA
atgcggaaggtcccgtg

SEQ ID NO: 743 - DNA, 17 bp, synthetic construct
  source 1..17: mol_type = other DNA
gacgatgcggaaggtcc

SEQ ID NO: 744 - DNA, 17 bp, synthetic construct
  source 1..17: mol_type = other DNA
ctcggtgacgatgcgga

SEQ ID NO: 745 - DNA, 17 bp, synthetic construct
  source 1..17: mol_type = other DNA
ggatgttctcggtgacg

SEQ ID NO: 746 - DNA, 17 bp, synthetic construct
  source 1..17: mol_type = other DNA
ggtgcgcacgggctctt

SEQ ID NO: 747 - DNA, 17 bp, synthetic construct
  source 1..17: mol_type = other DNA
aagatccccatgtagcg

SEQ ID NO: 748 - DNA, 17 bp, synthetic construct
  source 1..17: mol_type = other DNA
tccggtcccaggacacg

SEQ ID NO: 749 - DNA, 17 bp, synthetic construct
  source 1..17: mol_type = other DNA
ggtgcagtcggatgaac

SEQ ID NO: 750 - DNA, 17 bp, synthetic construct
  source 1..17: mol_type = other DNA
tggtgcagtcggatgaa

SEQ ID NO: 751 - DNA, 17 bp, synthetic construct
  source 1..17: mol_type = other DNA
gtgtgccgtgggacatg

SEQ ID NO: 752 - DNA, 17 bp, synthetic construct
  source 1..17: mol_type = other DNA
ctcgtagtacttggtgg

SEQ ID NO: 753 - DNA, 17 bp, synthetic construct
  source 1..17: mol_type = other DNA
gtccggagtccgccagg

SEQ ID NO: 754 - DNA, 17 bp, synthetic construct
  source 1..17: mol_type = other DNA
tgtccggagtccgccag

SEQ ID NO: 755 - DNA, 17 bp, synthetic construct
  source 1..17: mol_type = other DNA
gtgtccggagtccgcca

SEQ ID NO: 756 - DNA, 17 bp, synthetic construct
  source 1..17: mol_type = other DNA
acggcaggtgtccggag

SEQ ID NO: 757 - DNA, 17 bp, synthetic construct
  source 1..17: mol_type = other DNA
cacggcaggtgtccgga

SEQ ID NO: 758 - DNA, 17 bp, synthetic construct
  source 1..17: mol_type = other DNA
cccgactcacggcaggt

SEQ ID NO: 759 - DNA, 17 bp, synthetic construct
  source 1..17: mol_type = other DNA
acggacagagcccgact

SEQ ID NO: 760 - DNA, 17 bp, synthetic construct
  source 1..17: mol_type = other DNA
atgcgtgttggatgtct

SEQ ID NO: 761 - DNA, 17 bp, synthetic construct
  source 1..17: mol_type = other DNA
acatgcgtgttggatgt

SEQ ID NO: 762 - DNA, 17 bp, synthetic construct
  source 1..17: mol_type = other DNA
ggcacatgcgtgttgga

SEQ ID NO: 763 - DNA, 17 bp, synthetic construct
  source 1..17: mol_type = other DNA
tcgggtagcagcctagg

SEQ ID NO: 764 - DNA, 17 bp, synthetic construct
  source 1..17: mol_type = other DNA
ttgtagatgacgtcctg

SEQ ID NO: 765 - DNA, 17 bp, synthetic construct
  source 1..17: mol_type = other DNA
gacctcgcggacacaca

SEQ ID NO: 766 - DNA, 17 bp, synthetic construct
  source 1..17: mol_type = other DNA
agacctcgcggacacac

SEQ ID NO: 767 - DNA, 17 bp, synthetic construct
  source 1..17: mol_type = other DNA
cggcagacctcgcggac

SEQ ID NO: 768 - DNA, 17 bp, synthetic construct
  source 1..17: mol_type = other DNA
ttggcgcacatcagccc

SEQ ID NO: 769 - DNA, 17 bp, synthetic construct
  source 1..17: mol_type = other DNA
ggccacagggcacgtat

SEQ ID NO: 770 - DNA, 17 bp, synthetic construct
  source 1..17: mol_type = other DNA
tatcgtaggactcaacg

SEQ ID NO: 771 - DNA, 17 bp, synthetic construct
  source 1..17: mol_type = other DNA
ttatcgtaggactcaac

SEQ ID NO: 772 - DNA, 17 bp, synthetic construct
  source 1..17: mol_type = other DNA
ctgatcttatcgtagga

SEQ ID NO: 773 - DNA, 17 bp, synthetic construct
  source 1..17: mol_type = other DNA
cctgatcttatcgtagg

SEQ ID NO: 774 - DNA, 17 bp, synthetic construct
  source 1..17: mol_type = other DNA
gccctgatcttatcgta

SEQ ID NO: 775 - DNA, 17 bp, synthetic construct
  source 1..17: mol_type = other DNA
cggatcctgtagttgta

SEQ ID NO: 776 - DNA, 17 bp, synthetic construct
  source 1..17: mol_type = other DNA
gacccggatcctgtagt

SEQ ID NO: 777 - DNA, 17 bp, synthetic construct
  source 1..17: mol_type = other DNA
ggacccggatcctgtag

SEQ ID NO: 778 - DNA, 17 bp, synthetic construct
  source 1..17: mol_type = other DNA
cggggtagttctccgcc

SEQ ID NO: 779 - DNA, 17 bp, synthetic construct
  source 1..17: mol_type = other DNA
tcggggtagttctccgc

SEQ ID NO: 780 - DNA, 17 bp, synthetic construct
  source 1..17: mol_type = other DNA
acctcggggtagttctc

SEQ ID NO: 781 - DNA, 17 bp, synthetic construct
  source 1..17: mol_type = other DNA
ttgttcacgcaggtgac

SEQ ID NO: 782 - DNA, 17 bp, synthetic construct
  source 1..17: mol_type = other DNA
cttgttcacgcaggtga

SEQ ID NO: 783 - DNA, 17 bp, synthetic construct
  source 1..17: mol_type = other DNA
ggtgcttgttcacgcag

SEQ ID NO: 784 - DNA, 17 bp, synthetic construct
  source 1..17: mol_type = other DNA
cactcgcactcatagtg

SEQ ID NO: 785 - DNA, 17 bp, synthetic construct
  source 1..17: mol_type = other DNA
gaagccgctgttaggac

SEQ ID NO: 786 - DNA, 17 bp, synthetic construct
  source 1..17: mol_type = other DNA
gtaagaggtgccgtcaa

SEQ ID NO: 787 - DNA, 17 bp, synthetic construct
  source 1..17: mol_type = other DNA
gtgtaagaggtgccgtc

SEQ ID NO: 788 - DNA, 17 bp, synthetic construct
  source 1..17: mol_type = other DNA
gacgatatccatggact

SEQ ID NO: 789 - DNA, 17 bp, synthetic construct
  source 1..17: mol_type = other DNA
gtgaggacgatatccat

SEQ ID NO: 790 - DNA, 17 bp, synthetic construct
  source 1..17: mol_type = other DNA
gctcaccggaatttggt

SEQ ID NO: 791 - DNA, 17 bp, synthetic construct
  source 1..17: mol_type = other DNA
cgctgctcaccggaatt

SEQ ID NO: 792 - DNA, 17 bp, synthetic construct
  source 1..17: mol_type = other DNA
ccgctgctcaccggaat

SEQ ID NO: 793 - DNA, 17 bp, synthetic construct
  source 1..17: mol_type = other DNA
cacgccgttcttgctga

SEQ ID NO: 794 - DNA, 17 bp, synthetic construct
  source 1..17: mol_type = other DNA
gcacgccgttcttgctg

SEQ ID NO: 795 - DNA, 17 bp, synthetic construct
  source 1..17: mol_type = other DNA
gttgcacctcgccagtc

SEQ ID NO: 796 - DNA, 17 bp, synthetic construct
  source 1..17: mol_type = other DNA
ttaccgcacaccgtctc

SEQ ID NO: 797 - DNA, 17 bp, synthetic construct
  source 1..17: mol_type = other DNA
cttaccgcacaccgtct

SEQ ID NO: 798 - DNA, 17 bp, synthetic construct
  source 1..17: mol_type = other DNA
tcttaccgcacaccgtc

SEQ ID NO: 799 - DNA, 17 bp, synthetic construct
  source 1..17: mol_type = other DNA
gtcttaccgcacaccgt

SEQ ID NO: 800 - DNA, 17 bp, synthetic construct
  source 1..17: mol_type = other DNA
ccaatggacgtggagag

SEQ ID NO: 801 - DNA, 17 bp, synthetic construct
  source 1..17: mol_type = other DNA
caacaccagcgtccggc

SEQ ID NO: 802 - DNA, 17 bp, synthetic construct
  source 1..17: mol_type = other DNA
agggcgtcccagtgaca

SEQ ID NO: 803 - DNA, 17 bp, synthetic construct
  source 1..17: mol_type = other DNA
  modified_base 1: mod_base = OTHER; note = Beta-L-guanosine-3'-phosphorothioate
  modified_base 2: mod_base = OTHER; note = Beta-L-thymidine-3'-phosphorothioate
  modified_base 3: mod_base = OTHER; note = Beta-L-thymidine-3'-phosphorothioate
  modified_base 4: mod_base = OTHER; note = 2'-deoxyguanosine-3'-phosphorothioate
  modified_base 5: mod_base = OTHER; note = 2'-deoxythymidine-3'-phosphorothioate
  modified_base 6: mod_base = OTHER; note = 2'-deoxyadenosine-3'-phosphorothioate
  modified_base 7: mod_base = OTHER; note = 2'-deoxyguanosine-3'-phosphorothioate
  modified_base 8: mod_base = OTHER; note = 2'-deoxyadenosine-3'-phosphorothioate
  modified_base 9: mod_base = OTHER; note = 2'-deoxythymidine-3'-phosphorothioate
  modified_base 10: mod_base = OTHER; note = 2'-deoxyguanosine-3'-phosphorothioate
  modified_base 11: mod_base = OTHER; note = 2'-deoxyadenosine-3'-phosphorothioate
  modified_base 12: mod_base = OTHER; note = 5-methyl-2'-deoxycytidine-3'-phosphorothioate
  modified_base 13: mod_base = OTHER; note = 2'-deoxyguanosine-3'-phosphorothioate
  modified_base 14: mod_base = OTHER; note = 2'-deoxythymidine-3'-phosphorothioate
  modified_base 15: mod_base = OTHER; note = Beta-L-cytidine-3'-phosphorothioate
  modified_base 16: mod_base = OTHER; note = Beta-L-cytidine-3'-phosphorothioate
  modified_base 17: mod_base = OTHER; note = Beta-L-thymidine-3'-phosphate
  misc_feature 1..3: note = RNA
  misc_feature 4..14: note = DNA
  misc_feature 15..17: note = RNA
gttgtagatgacgtcct

SEQ ID NO: 804 - DNA, 17 bp, synthetic construct
  source 1..17: mol_type = other DNA
  modified_base 1: mod_base = OTHER; note = Beta-L-thymidine-3'-phosphorothioate
  modified_base 2: mod_base = OTHER; note = Beta-L-adenosine-3'-phosphorothioate
  modified_base 3: mod_base = OTHER; note = Beta-L-guanosine-3'-phosphorothioate
  modified_base 4: mod_base = OTHER; note = 2'-deoxythymidine-3'-phosphorothioate
  modified_base 5: mod_base = OTHER; note = 5-methyl-2'-deoxycytidine-3'-phosphorothioate
  modified_base 6: mod_base = OTHER; note = 2'-deoxyguanosine-3'-phosphorothioate
  modified_base 7: mod_base = OTHER; note = 2'-deoxythymidine-3'-phosphorothioate
  modified_base 8: mod_base = OTHER; note = 2'-deoxyguanosine-3'-phosphorothioate
  modified_base 9: mod_base = OTHER; note = 2'-deoxyadenosine-3'-phosphorothioate
  modified_base 10: mod_base = OTHER; note = 5-methyl-2'-deoxycytidine-3'-phosphorothioate
  modified_base 11: mod_base = OTHER; note = 2'-deoxyadenosine-3'-phosphorothioate
  modified_base 12: mod_base = OTHER; note = 2'-deoxyguanosine-3'-phosphorothioate
  modified_base 13: mod_base = OTHER; note = 2'-deoxyadenosine-3'-phosphorothioate
  modified_base 14: mod_base = OTHER; note = 2'-deoxyguanosine-3'-phosphorothioate
  modified_base 15: mod_base = OTHER; note = Beta-L-cytidine-3'-phosphorothioate
  modified_base 16: mod_base = OTHER; note = Beta-L-guanosine-3'-phosphorothioate
  modified_base 17: mod_base = OTHER; note = Beta-L-guanosine-3'-phosphate
  misc_feature 1..3: note = RNA
  misc_feature 4..14: note = DNA
  misc_feature 15..17: note = RNA
tagtcgtgacagagcgg

SEQ ID NO: 805 - DNA, 17 bp, synthetic construct
  source 1..17: mol_type = other DNA
  modified_base 1: mod_base = OTHER; note = Beta-L-cytidine-3'-phosphorothioate
  modified_base 2: mod_base = OTHER; note = Beta-L-cytidine-3'-phosphorothioate
  modified_base 3: mod_base = OTHER; note = Beta-L-guanosine-3'-phosphorothioate
  modified_base 4: mod_base = OTHER; note = 2'-deoxythymidine-3'-phosphorothioate
  modified_base 5: mod_base = OTHER; note = 2'-deoxyadenosine-3'-phosphorothioate
  modified_base 6: mod_base = OTHER; note = 2'-deoxyguanosine-3'-phosphorothioate
  modified_base 7: mod_base = OTHER; note = 2'-deoxythymidine-3'-phosphorothioate
  modified_base 8: mod_base = OTHER; note = 2'-deoxythymidine-3'-phosphorothioate
  modified_base 9: mod_base = OTHER; note = 2'-deoxyguanosine-3'-phosphorothioate
  modified_base 10: mod_base = OTHER; note = 5-methyl-2'-deoxycytidine-3'-phosphorothioate
  modified_base 11: mod_base = OTHER; note = 2'-deoxyadenosine-3'-phosphorothioate
  modified_base 12: mod_base = OTHER; note = 2'-deoxyguanosine-3'-phosphorothioate
  modified_base 13: mod_base = OTHER; note = 5-methyl-2'-deoxycytidine-3'-phosphorothioate
  modified_base 14: mod_base = OTHER; note = 2'-deoxyadenosine-3'-phosphorothioate
  modified_base 15: mod_base = OTHER; note = Beta-L-guanosine-3'-phosphorothioate
  modified_base 16: mod_base = OTHER; note = Beta-L-adenosine-3'-phosphorothioate
  modified_base 17: mod_base = OTHER; note = Beta-L-adenosine-3'-phosphate
  misc_feature 1..3: note = RNA
  misc_feature 4..14: note = DNA
  misc_feature 15..17: note = RNA
ccgtagttgcagcagaa

SEQ ID NO: 806 - DNA, 17 bp, synthetic construct
  source 1..17: mol_type = other DNA
  modified_base 1: mod_base = OTHER; note = Beta-L-guanosine-3'-phosphorothioate
  modified_base 2: mod_base = OTHER; note = Beta-L-cytidine-3'-phosphorothioate
  modified_base 3: mod_base = OTHER; note = Beta-L-cytidine-3'-phosphorothioate
  modified_base 4: mod_base = OTHER; note = 2'-deoxyguanosine-3'-phosphorothioate
  modified_base 5: mod_base = OTHER; note = 2'-deoxythymidine-3'-phosphorothioate
  modified_base 6: mod_base = OTHER; note = 2'-deoxyadenosine-3'-phosphorothioate
  modified_base 7: mod_base = OTHER; note = 2'-deoxyguanosine-3'-phosphorothioate
  modified_base 8: mod_base = OTHER; note = 2'-deoxythymidine-3'-phosphorothioate
  modified_base 9: mod_base = OTHER; note = 2'-deoxythymidine-3'-phosphorothioate
  modified_base 10: mod_base = OTHER; note = 2'-deoxyguanosine-3'-phosphorothioate
  modified_base 11: mod_base = OTHER; note = 5-methyl-2'-deoxycytidine-3'-phosphorothioate
  modified_base 12: mod_base = OTHER; note = 2'-deoxyadenosine-3'-phosphorothioate
  modified_base 13: mod_base = OTHER; note = 2'-deoxyguanosine-3'-phosphorothioate
  modified_base 14: mod_base = OTHER; note = 5-methyl-2'-deoxycytidine-3'-phosphorothioate
  modified_base 15: mod_base = OTHER; note = Beta-L-adenosine-3'-phosphorothioate
  modified_base 16: mod_base = OTHER; note = Beta-L-guanosine-3'-phosphorothioate
  modified_base 17: mod_base = OTHER; note = Beta-L-adenosine-3'-phosphate
  misc_feature 1..3: note = RNA
  misc_feature 4..14: note = DNA
  misc_feature 15..17: note = RNA
gccgtagttgcagcaga

SEQ ID NO: 807 - DNA, 17 bp, synthetic construct
  source 1..17: mol_type = other DNA
  modified_base 1: mod_base = OTHER; note = Beta-L-guanosine-3'-phosphorothioate
  modified_base 2: mod_base = OTHER; note = Beta-L-guanosine-3'-phosphorothioate
  modified_base 3: mod_base = OTHER; note = Beta-L-thymidine-3'-phosphorothioate
  modified_base 4: mod_base = OTHER; note = 2'-deoxyguanosine-3'-phosphorothioate
  modified_base 5: mod_base = OTHER; note = 2'-deoxythymidine-3'-phosphorothioate
  modified_base 6: mod_base = OTHER; note = 2'-deoxyadenosine-3'-phosphorothioate
  modified_base 7: mod_base = OTHER; note = 2'-deoxyadenosine-3'-phosphorothioate
  modified_base 8: mod_base = OTHER; note = 2'-deoxyguanosine-3'-phosphorothioate
  modified_base 9: mod_base = OTHER; note = 2'-deoxyadenosine-3'-phosphorothioate
  modified_base 10: mod_base = OTHER; note = 2'-deoxyguanosine-3'-phosphorothioate
  modified_base 11: mod_base = OTHER; note = 2'-deoxyguanosine-3'-phosphorothioate
  modified_base 12: mod_base = OTHER; note = 2'-deoxythymidine-3'-phosphorothioate
  modified_base 13: mod_base = OTHER; note = 2'-deoxyguanosine-3'-phosphorothioate
  modified_base 14: mod_base = OTHER; note = 5-methyl-2'-deoxycytidine-3'-phosphorothioate
  modified_base 15: mod_base = OTHER; note = Beta-L-cytidine-3'-phosphorothioate
  modified_base 16: mod_base = OTHER; note = Beta-L-guanosine-3'-phosphorothioate
  modified_base 17: mod_base = OTHER; note = Beta-L-thymidine-3'-phosphate
  misc_feature 1..3: note = RNA
  misc_feature 4..14: note = DNA
  misc_feature 15..17: note = RNA
ggtgtaagaggtgccgt

SEQ ID NO: 808 - DNA, 17 bp, synthetic construct
  source 1..17: mol_type = other DNA
  modified_base 1: mod_base = OTHER; note = Beta-L-guanosine-3'-phosphorothioate
  modified_base 2: mod_base = OTHER; note = Beta-L-guanosine-3'-phosphorothioate
  modified_base 3: mod_base = OTHER; note = Beta-L-adenosine-3'-phosphorothioate
  modified_base 4: mod_base = OTHER; note = 5-methyl-2'-deoxycytidine-3'-phosphorothioate
  modified_base 5: mod_base = OTHER; note = 2'-deoxyguanosine-3'-phosphorothioate
  modified_base 6: mod_base = OTHER; note = 2'-deoxyadenosine-3'-phosphorothioate
  modified_base 7: mod_base = OTHER; note = 2'-deoxythymidine-3'-phosphorothioate
  modified_base 8: mod_base = OTHER; note = 2'-deoxyadenosine-3'-phosphorothioate
  modified_base 9: mod_base = OTHER; note = 2'-deoxythymidine-3'-phosphorothioate
  modified_base 10: mod_base = OTHER; note = 5-methyl-2'-deoxycytidine-3'-phosphorothioate
  modified_base 11: mod_base = OTHER; note = 5-methyl-2'-deoxycytidine-3'-phosphorothioate
  modified_base 12: mod_base = OTHER; note = 2'-deoxyadenosine-3'-phosphorothioate
  modified_base 13: mod_base = OTHER; note = 2'-deoxythymidine-3'-phosphorothioate
  modified_base 14: mod_base = OTHER; note = 2'-deoxyguanosine-3'-phosphorothioate
  modified_base 15: mod_base = OTHER; note = Beta-L-guanosine-3'-phosphorothioate
  modified_base 16: mod_base = OTHER; note = Beta-L-adenosine-3'-phosphorothioate
  modified_base 17: mod_base = OTHER; note = Beta-L-cytidine-3'-phosphate
  misc_feature 1..3: note = RNA
  misc_feature 4..14: note = DNA
  misc_feature 15..17: note = RNA
ggacgatatccatggac

SEQ ID NO: 809 - DNA, 17 bp, synthetic construct
  source 1..17: mol_type = other DNA
  modified_base 1: mod_base = OTHER; note = Beta-L-adenosine-3'-phosphorothioate
  modified_base 2: mod_base = OTHER; note = Beta-L-adenosine-3'-phosphorothioate
  modified_base 3: mod_base = OTHER; note = Beta-L-adenosine-3'-phosphorothioate
  modified_base 4: mod_base = OTHER; note = 2'-deoxyguanosine-3'-phosphorothioate
  modified_base 5: mod_base = OTHER; note = 5-methyl-2'-deoxycytidine-3'-phosphorothioate
  modified_base 6: mod_base = OTHER; note = 5-methyl-2'-deoxycytidine-3'-phosphorothioate
  modified_base 7: mod_base = OTHER; note = 5-methyl-2'-deoxycytidine-3'-phosphorothioate
  modified_base 8: mod_base = OTHER; note = 2'-deoxyadenosine-3'-phosphorothioate
  modified_base 9: mod_base = OTHER; note = 2'-deoxythymidine-3'-phosphorothioate
  modified_base 10: mod_base = OTHER; note = 2'-deoxyguanosine-3'-phosphorothioate
  modified_base 11: mod_base = OTHER; note = 2'-deoxyguanosine-3'-phosphorothioate
  modified_base 12: mod_base = OTHER; note = 2'-deoxythymidine-3'-phosphorothioate
  modified_base 13: mod_base = OTHER; note = 5-methyl-2'-deoxycytidine-3'-phosphorothioate
  modified_base 14: mod_base = OTHER; note = 2'-deoxyguanosine-3'-phosphorothioate
  modified_base 15: mod_base = OTHER; note = Beta-L-guanosine-3'-phosphorothioate
  modified_base 16: mod_base = OTHER; note = Beta-L-cytidine-3'-phosphorothioate
  modified_base 17: mod_base = OTHER; note = Beta-L-thymidine-3'-phosphate
  misc_feature 1..3: note = RNA
  misc_feature 4..14: note = DNA
  misc_feature 15..17: note = RNA
aaagcccatggtcggct

SEQ ID NO: 810 - DNA, 17 bp, synthetic construct
  source 1..17: mol_type = other DNA
  modified_base 1: mod_base = OTHER; note = Beta-L-guanosine-3'-phosphorothioate
  modified_base 2: mod_base = OTHER; note = Beta-L-cytidine-3'-phosphorothioate
  modified_base 3: mod_base = OTHER; note = Beta-L-guanosine-3'-phosphorothioate
  modified_base 4: mod_base = OTHER; note = 2'-deoxythymidine-3'-phosphorothioate
  modified_base 5: mod_base = OTHER; note = 2'-deoxyguanosine-3'-phosphorothioate
  modified_base 6: mod_base = OTHER; note = 2'-deoxyadenosine-3'-phosphorothioate
  modified_base 7: mod_base = OTHER; note = 2'-deoxyguanosine-3'-phosphorothioate
  modified_base 8: mod_base = OTHER; note = 2'-deoxythymidine-3'-phosphorothioate
  modified_base 9: mod_base = OTHER; note = 2'-deoxyadenosine-3'-phosphorothioate
  modified_base 10: mod_base = OTHER; note = 2'-deoxythymidine-3'-phosphorothioate
  modified_base 11: mod_base = OTHER; note = 2'-deoxythymidine-3'-phosphorothioate
  modified_base 12: mod_base = OTHER; note = 5-methyl-2'-deoxycytidine-3'-phosphorothioate
  modified_base 13: mod_base = OTHER; note = 5-methyl-2'-deoxycytidine-3'-phosphorothioate
  modified_base 14: mod_base = OTHER; note = 2'-deoxyadenosine-3'-phosphorothioate
  modified_base 15: mod_base = OTHER; note = Beta-L-cytidine-3'-phosphorothioate
  modified_base 16: mod_base = OTHER; note = Beta-L-adenosine-3'-phosphorothioate
  modified_base 17: mod_base = OTHER; note = Beta-L-adenosine-3'-phosphate
  misc_feature 1..3: note = RNA
  misc_feature 4..14: note = DNA
  misc_feature 15..17: note = RNA
gcgtgagtattccacaa

SEQ ID NO: 811 - DNA, 17 bp, synthetic construct
  source 1..17: mol_type = other DNA
  modified_base 1: mod_base = OTHER; note = Beta-L-cytidine-3'-phosphorothioate
  modified_base 2: mod_base = OTHER; note = Beta-L-guanosine-3'-phosphorothioate
  modified_base 3: mod_base = OTHER; note = Beta-L-cytidine-3'-phosphorothioate
  modified_base 4: mod_base = OTHER; note = 2'-deoxyadenosine-3'-phosphorothioate
  modified_base 5: mod_base = OTHER; note = 5-methyl-2'-deoxycytidine-3'-phosphorothioate
  modified_base 6: mod_base = OTHER; note = 2'-deoxythymidine-3'-phosphorothioate
  modified_base 7: mod_base = OTHER; note = 2'-deoxyguanosine-3'-phosphorothioate
  modified_base 8: mod_base = OTHER; note = 2'-deoxyguanosine-3'-phosphorothioate
  modified_base 9: mod_base = OTHER; note = 5-methyl-2'-deoxycytidine-3'-phosphorothioate
  modified_base 10: mod_base = OTHER; note = 2'-deoxyguanosine-3'-phosphorothioate
  modified_base 11: mod_base = OTHER; note = 2'-deoxythymidine-3'-phosphorothioate
  modified_base 12: mod_base = OTHER; note = 2'-deoxyguanosine-3'-phosphorothioate
  modified_base 13: mod_base = OTHER; note = 2'-deoxyadenosine-3'-phosphorothioate
  modified_base 14: mod_base = OTHER; note = 2'-deoxyguanosine-3'-phosphorothioate
  modified_base 15: mod_base = OTHER; note = Beta-L-thymidine-3'-phosphorothioate
  modified_base 16: mod_base = OTHER; note = Beta-L-adenosine-3'-phosphorothioate
  modified_base 17: mod_base = OTHER; note = Beta-L-thymidine-3'-phosphate
  misc_feature 1..3: note = RNA
  misc_feature 4..14: note = DNA
  misc_feature 15..17: note = RNA
cgcactggcgtgagtat

SEQ ID NO: 812 - DNA, 17 bp, synthetic construct
  source 1..17: mol_type = other DNA
  modified_base 1: mod_base = OTHER; note = Beta-L-guanosine-3'-phosphorothioate
  modified_base 2: mod_base = OTHER; note = Beta-L-cytidine-3'-phosphorothioate
  modified_base 3: mod_base = OTHER; note = Beta-L-guanosine-3'-phosphorothioate
  modified_base 4: mod_base = OTHER; note = 5-methyl-2'-deoxycytidine-3'-phosphorothioate
  modified_base 5: mod_base = OTHER; note = 2'-deoxyadenosine-3'-phosphorothioate
  modified_base 6: mod_base = OTHER; note = 5-methyl-2'-deoxycytidine-3'-phosphorothioate
  modified_base 7: mod_base = OTHER; note = 2'-deoxythymidine-3'-phosphorothioate
  modified_base 8: mod_base = OTHER; note = 2'-deoxyguanosine-3'-phosphorothioate
  modified_base 9: mod_base = OTHER; note = 2'-deoxyguanosine-3'-phosphorothioate
  modified_base 10: mod_base = OTHER; note = 5-methyl-2'-deoxycytidine-3'-phosphorothioate
  modified_base 11: mod_base = OTHER; note = 2'-deoxyguanosine-3'-phosphorothioate
  modified_base 12: mod_base = OTHER; note = 2'-deoxythymidine-3'-phosphorothioate
  modified_base 13: mod_base = OTHER; note = 2'-deoxyguanosine-3'-phosphorothioate
  modified_base 14: mod_base = OTHER; note = 2'-deoxyadenosine-3'-phosphorothioate
  modified_base 15: mod_base = OTHER; note = Beta-L-guanosine-3'-phosphorothioate
  modified_base 16: mod_base = OTHER; note = Beta-L-thymidine-3'-phosphorothioate
  modified_base 17: mod_base = OTHER; note = Beta-L-adenosine-3'-phosphate
  misc_feature 1..3: note = RNA
  misc_feature 4..14: note = DNA
  misc_feature 15..17: note = RNA
gcgcactggcgtgagta

SEQ ID NO: 813 - DNA, 17 bp, synthetic construct
  source 1..17: mol_type = other DNA
  modified_base 1: mod_base = OTHER; note = Beta-L-thymidine-3'-phosphorothioate
  modified_base 2: mod_base = OTHER; note = Beta-L-thymidine-3'-phosphorothioate
  modified_base 3: mod_base = OTHER; note = Beta-L-guanosine-3'-phosphorothioate
  modified_base 4: mod_base = OTHER; note = 2'-deoxyguanosine-3'-phosphorothioate
  modified_base 5: mod_base = OTHER; note = 2'-deoxyadenosine-3'-phosphorothioate
  modified_base 6: mod_base = OTHER; note = 5-methyl-2'-deoxycytidine-3'-phosphorothioate
  modified_base 7: mod_base = OTHER; note = 2'-deoxyadenosine-3'-phosphorothioate
  modified_base 8: mod_base = OTHER; note = 2'-deoxyguanosine-3'-phosphorothioate
  modified_base 9: mod_base = OTHER; note = 2'-deoxyadenosine-3'-phosphorothioate
  modified_base 10: mod_base = OTHER; note = 2'-deoxyadenosine-3'-phosphorothioate
  modified_base 11: mod_base = OTHER; note = 5-methyl-2'-deoxycytidine-3'-phosphorothioate
  modified_base 12: mod_base = OTHER; note = 2'-deoxyguanosine-3'-phosphorothioate
  modified_base 13: mod_base = OTHER; note = 2'-deoxythymidine-3'-phosphorothioate
  modified_base 14: mod_base = OTHER; note = 2'-deoxyadenosine-3'-phosphorothioate
  modified_base 15: mod_base = OTHER; note = Beta-L-guanosine-3'-phosphorothioate
  modified_base 16: mod_base = OTHER; note = Beta-L-cytidine-3'-phosphorothioate
  modified_base 17: mod_base = OTHER; note = Beta-L-thymidine-3'-phosphate
  misc_feature 1..3: note = RNA
  misc_feature 4..14: note = DNA
  misc_feature 15..17: note = RNA
ttggacagaacgtagct

SEQ ID NO: 814 - DNA, 17 bp, synthetic construct
  source 1..17: mol_type = other DNA
  modified_base 1: mod_base = OTHER; note = Beta-L-cytidine-3'-phosphorothioate
  modified_base 2: mod_base = OTHER; note = Beta-L-cytidine-3'-phosphorothioate
  modified_base 3: mod_base = OTHER; note = Beta-L-thymidine-3'-phosphorothioate
  modified_base 4: mod_base = OTHER; note = 2'-deoxythymidine-3'-phosphorothioate
  modified_base 5: mod_base = OTHER; note = 2'-deoxyguanosine-3'-phosphorothioate
  modified_base 6: mod_base = OTHER; note = 2'-deoxyguanosine-3'-phosphorothioate
  modified_base 7: mod_base = OTHER; note = 2'-deoxyadenosine-3'-phosphorothioate
  modified_base 8: mod_base = OTHER; note = 5-methyl-2'-deoxycytidine-3'-phosphorothioate
  modified_base 9: mod_base = OTHER; note = 2'-deoxyadenosine-3'-phosphorothioate
  modified_base 10: mod_base = OTHER; note = 2'-deoxyguanosine-3'-phosphorothioate
  modified_base 11: mod_base = OTHER; note = 2'-deoxyadenosine-3'-phosphorothioate
  modified_base 12: mod_base = OTHER; note = 2'-deoxyadenosine-3'-phosphorothioate
  modified_base 13: mod_base = OTHER; note = 5-methyl-2'-deoxycytidine-3'-phosphorothioate
  modified_base 14: mod_base = OTHER; note = 2'-deoxyguanosine-3'-phosphorothioate
  modified_base 15: mod_base = OTHER; note = Beta-L-thymidine-3'-phosphorothioate
  modified_base 16: mod_base = OTHER; note = Beta-L-adenosine-3'-phosphorothioate
  modified_base 17: mod_base = OTHER; note = Beta-L-guanosine-3'-phosphate
  misc_feature 1..3: note = RNA
  misc_feature 4..14: note = DNA
  misc_feature 15..17: note = RNA
ccttggacagaacgtag

SEQ ID NO: 815 - DNA, 17 bp, synthetic construct
  source 1..17: mol_type = other DNA
  modified_base 1: mod_base = OTHER; note = Beta-L-adenosine-3'-phosphorothioate
  modified_base 2: mod_base = OTHER; note = Beta-L-cytidine-3'-phosphorothioate
  modified_base 3: mod_base = OTHER; note = Beta-L-cytidine-3'-phosphorothioate
  modified_base 4: mod_base = OTHER; note = 2'-deoxythymidine-3'-phosphorothioate
  modified_base 5: mod_base = OTHER; note = 2'-deoxythymidine-3'-phosphorothioate
  modified_base 6: mod_base = OTHER; note = 2'-deoxyguanosine-3'-phosphorothioate
  modified_base 7: mod_base = OTHER; note = 2'-deoxyguanosine-3'-phosphorothioate
  modified_base 8: mod_base = OTHER; note = 2'-deoxyadenosine-3'-phosphorothioate
  modified_base 9: mod_base = OTHER; note = 5-methyl-2'-deoxycytidine-3'-phosphorothioate
  modified_base 10: mod_base = OTHER; note = 2'-deoxyadenosine-3'-phosphorothioate
  modified_base 11: mod_base = OTHER; note = 2'-deoxyguanosine-3'-phosphorothioate
  modified_base 12: mod_base = OTHER; note = 2'-deoxyadenosine-3'-phosphorothioate
  modified_base 13: mod_base = OTHER; note = 2'-deoxyadenosine-3'-phosphorothioate
  modified_base 14: mod_base = OTHER; note = 5-methyl-2'-deoxycytidine-3'-phosphorothioate
  modified_base 15: mod_base = OTHER; note = Beta-L-guanosine-3'-phosphorothioate
  modified_base 16: mod_base = OTHER; note = Beta-L-thymidine-3'-phosphorothioate
  modified_base 17: mod_base = OTHER; note = Beta-L-adenosine-3'-phosphate
  misc_feature 1..3: note = RNA
  misc_feature 4..14: note = DNA
  misc_feature 15..17: note = RNA
accttggacagaacgta

SEQ ID NO: 816 - DNA, 17 bp, synthetic construct
  source 1..17: mol_type = other DNA
  modified_base 1: mod_base = OTHER; note = Beta-L-guanosine-3'-phosphorothioate
  modified_base 2: mod_base = OTHER; note = Beta-L-thymidine-3'-phosphorothioate
  modified_base 3: mod_base = OTHER; note = Beta-L-thymidine-3'-phosphorothioate
  modified_base 4: mod_base = OTHER; note = 5-methyl-2'-deoxycytidine-3'-phosphorothioate
  modified_base 5: mod_base = OTHER; note = 2'-deoxythymidine-3'-phosphorothioate
  modified_base 6: mod_base = OTHER; note = 5-methyl-2'-deoxycytidine-3'-phosphorothioate
  modified_base 7: mod_base = OTHER; note = 2'-deoxyguanosine-3'-phosphorothioate
  modified_base 8: mod_base = OTHER; note = 2'-deoxythymidine-3'-phosphorothioate
  modified_base 9: mod_base = OTHER; note = 2'-deoxythymidine-3'-phosphorothioate
  modified_base 10: mod_base = OTHER; note = 2'-deoxyguanosine-3'-phosphorothioate
  modified_base 11: mod_base = OTHER; note = 2'-deoxythymidine-3'-phosphorothioate
  modified_base 12: mod_base = OTHER; note = 5-methyl-2'-deoxycytidine-3'-phosphorothioate
  modified_base 13: mod_base = OTHER; note = 5-methyl-2'-deoxycytidine-3'-phosphorothioate
  modified_base 14: mod_base = OTHER; note = 2'-deoxyguanosine-3'-phosphorothioate
  modified_base 15: mod_base = OTHER; note = Beta-L-thymidine-3'-phosphorothioate
  modified_base 16: mod_base = OTHER; note = Beta-L-cytidine-3'-phosphorothioate
  modified_base 17: mod_base = OTHER; note = Beta-L-adenosine-3'-phosphate
  misc_feature 1..3: note = RNA
  misc_feature 4..14: note = DNA
  misc_feature 15..17: note = RNA
gttctcgttgtccgtca

SEQ ID NO: 817 - DNA, 17 bp, synthetic construct
  source 1..17: mol_type = other DNA
  modified_base 1: mod_base = OTHER; note = Beta-L-adenosine-3'-phosphorothioate
  modified_base 2: mod_base = OTHER; note = Beta-L-guanosine-3'-phosphorothioate
  modified_base 3: mod_base = OTHER; note = Beta-L-guanosine-3'-phosphorothioate
  modified_base 4: mod_base = OTHER; note = 5-methyl-2'-deoxycytidine-3'-phosphorothioate
  modified_base 5: mod_base = OTHER; note = 2'-deoxyadenosine-3'-phosphorothioate
  modified_base 6: mod_base = OTHER; note = 2'-deoxyguanosine-3'-phosphorothioate
  modified_base 7: mod_base = OTHER; note = 2'-deoxythymidine-3'-phosphorothioate
  modified_base 8: mod_base = OTHER; note = 2'-deoxythymidine-3'-phosphorothioate
  modified_base 9: mod_base = OTHER; note = 5-methyl-2'-deoxycytidine-3'-phosphorothioate
  modified_base 10: mod_base = OTHER; note = 2'-deoxythymidine-3'-phosphorothioate
  modified_base 11: mod_base = OTHER; note = 5-methyl-2'-deoxycytidine-3'-phosphorothioate
  modified_base 12: mod_base = OTHER; note = 2'-deoxyguanosine-3'-phosphorothioate
  modified_base 13: mod_base = OTHER; note = 2'-deoxythymidine-3'-phosphorothioate
  modified_base 14: mod_base = OTHER; note = 2'-deoxythymidine-3'-phosphorothioate
  modified_base 15: mod_base = OTHER; note = Beta-L-guanosine-3'-phosphorothioate
  modified_base 16: mod_base = OTHER; note = Beta-L-thymidine-3'-phosphorothioate
  modified_base 17: mod_base = OTHER; note = Beta-L-cytidine-3'-phosphate
  misc_feature 1..3: note = RNA
  misc_feature 4..14: note = DNA
  misc_feature 15..17: note = RNA
aggcagttctcgttgtc

SEQ ID NO: 818 - DNA, 17 bp, synthetic construct
  source 1..17: mol_type = other DNA
  modified_base 1: mod_base = OTHER; note = Beta-L-adenosine-3'-phosphorothioate
  modified_base 2: mod_base = OTHER; note = Beta-L-guanosine-3'-phosphorothioate
  modified_base 3: mod_base = OTHER; note = Beta-L-cytidine-3'-phosphorothioate
  modified_base 4: mod_base = OTHER; note = 2'-deoxythymidine-3'-phosphorothioate
  modified_base 5: mod_base = OTHER; note = 5-methyl-2'-deoxycytidine-3'-phosphorothioate
  modified_base 6: mod_base = OTHER; note = 2'-deoxyguanosine-3'-phosphorothioate
  modified_base 7: mod_base = OTHER; note = 2'-deoxyadenosine-3'-phosphorothioate
  modified_base 8: mod_base = OTHER; note = 2'-deoxyguanosine-3'-phosphorothioate
  modified_base 9: mod_base = OTHER; note = 2'-deoxyguanosine-3'-phosphorothioate
  modified_base 10: mod_base = OTHER; note = 2'-deoxyguanosine-3'-phosphorothioate
  modified_base 11: mod_base = OTHER; note = 2'-deoxythymidine-3'-phosphorothioate
  modified_base 12: mod_base = OTHER; note = 2'-deoxyguanosine-3'-phosphorothioate
  modified_base 13: mod_base = OTHER; note = 2'-deoxythymidine-3'-phosphorothioate
  modified_base 14: mod_base = OTHER; note = 2'-deoxyguanosine-3'-phosphorothioate
  modified_base 15: mod_base = OTHER; note = Beta-L-adenosine-3'-phosphorothioate
  modified_base 16: mod_base = OTHER; note = Beta-L-adenosine-3'-phosphorothioate
  modified_base 17: mod_base = OTHER; note = Beta-L-cytidine-3'-phosphate
  misc_feature 1..3: note = RNA
  misc_feature 4..14: note = DNA
  misc_feature 15..17: note = RNA
agctcgagggtgtgaac

SEQ ID NO: 819 - DNA, 17 bp, synthetic construct
  source 1..17: mol_type = other DNA
  modified_base 1: mod_base = OTHER; note = Beta-L-thymidine-3'-phosphorothioate
  modified_base 2: mod_base = OTHER; note = Beta-L-guanosine-3'-phosphorothioate
  modified_base 3: mod_base = OTHER; note = Beta-L-adenosine-3'-phosphorothioate
  modified_base 4: mod_base = OTHER; note = 2'-deoxyadenosine-3'-phosphorothioate
  modified_base 5: mod_base = OTHER; note = 2'-deoxyguanosine-3'-phosphorothioate
  modified_base 6: mod_base = OTHER; note = 2'-deoxyadenosine-3'-phosphorothioate
  modified_base 7: mod_base = OTHER; note = 2'-deoxyadenosine-3'-phosphorothioate
  modified_base 8: mod_base = OTHER; note = 2'-deoxyguanosine-3'-phosphorothioate
  modified_base 9: mod_base = OTHER; note = 5-methyl-2'-deoxycytidine-3'-phosphorothioate
  modified_base 10: mod_base = OTHER; note = 2'-deoxythymidine-3'-phosphorothioate
  modified_base 11: mod_base = OTHER; note = 5-methyl-2'-deoxycytidine-3'-phosphorothioate
  modified_base 12: mod_base = OTHER; note = 2'-deoxyguanosine-3'-phosphorothioate
  modified_base 13: mod_base = OTHER; note = 2'-deoxyadenosine-3'-phosphorothioate
  modified_base 14: mod_base = OTHER; note = 2'-deoxyguanosine-3'-phosphorothioate
  modified_base 15: mod_base = OTHER; note = Beta-L-guanosine-3'-phosphorothioate
  modified_base 16: mod_base = OTHER; note = Beta-L-guanosine-3'-phosphorothioate
  modified_base 17: mod_base = OTHER; note = Beta-L-thymidine-3'-phosphate
  misc_feature 1..3: note = RNA
  misc_feature 4..14: note = DNA
  misc_feature 15..17: note = RNA
tgaagaagctcgagggt

SEQ ID NO: 820 - DNA, 17 bp, synthetic construct
  source 1..17: mol_type = other DNA
  modified_base 1: mod_base = OTHER; note = Beta-L-cytidine-3'-phosphorothioate
  modified_base 2: mod_base = OTHER; note = Beta-L-guanosine-3'-phosphorothioate
  modified_base 3: mod_base = OTHER; note = Beta-L-adenosine-3'-phosphorothioate
  modified_base 4: mod_base = OTHER; note = 2'-deoxythymidine-3'-phosphorothioate
  modified_base 5: mod_base = OTHER; note = 2'-deoxyguanosine-3'-phosphorothioate
  modified_base 6: mod_base = OTHER; note = 2'-deoxyadenosine-3'-phosphorothioate
  modified_base 7: mod_base = OTHER; note = 2'-deoxyadenosine-3'-phosphorothioate
  modified_base 8: mod_base = OTHER; note = 2'-deoxyguanosine-3'-phosphorothioate
  modified_base 9: mod_base = OTHER; note = 2'-deoxyadenosine-3'-phosphorothioate
  modified_base 10: mod_base = OTHER; note = 2'-deoxyadenosine-3'-phosphorothioate
  modified_base 11: mod_base = OTHER; note = 2'-deoxyguanosine-3'-phosphorothioate
  modified_base 12: mod_base = OTHER; note = 5-methyl-2'-deoxycytidine-3'-phosphorothioate
  modified_base 13: mod_base = OTHER; note = 2'-deoxythymidine-3'-phosphorothioate
  modified_base 14: mod_base = OTHER; note = 5-methyl-2'-deoxycytidine-3'-phosphorothioate
  modified_base 15: mod_base = OTHER; note = Beta-L-guanosine-3'-phosphorothioate
  modified_base 16: mod_base = OTHER; note = Beta-L-adenosine-3'-phosphorothioate
  modified_base 17: mod_base = OTHER; note = Beta-L-guanosine-3'-phosphate
  misc_feature 1..3: note = RNA
  misc_feature 4..14: note = DNA
  misc_feature 15..17: note = RNA
cgatgaagaagctcgag

SEQ ID NO: 821 - DNA, 17 bp, synthetic construct
  source 1..17: mol_type = other DNA
  modified_base 1: mod_base = OTHER; note = Beta-L-adenosine-3'-phosphorothioate
  modified_base 2: mod_base = OTHER; note = Beta-L-cytidine-3'-phosphorothioate
  modified_base 3: mod_base = OTHER; note = Beta-L-guanosine-3'-phosphorothioate
  modified_base 4: mod_base = OTHER; note = 2'-deoxyadenosine-3'-phosphorothioate
  modified_base 5: mod_base = OTHER; note = 2'-deoxythymidine-3'-phosphorothioate
  modified_base 6: mod_base = OTHER; note = 2'-deoxyguanosine-3'-phosphorothioate
  modified_base 7: mod_base = OTHER; note = 2'-deoxyadenosine-3'-phosphorothioate
  modified_base 8: mod_base = OTHER; note = 2'-deoxyadenosine-3'-phosphorothioate
  modified_base 9: mod_base = OTHER; note = 2'-deoxyguanosine-3'-phosphorothioate
  modified_base 10: mod_base = OTHER; note = 2'-deoxyadenosine-3'-phosphorothioate
  modified_base 11: mod_base = OTHER; note = 2'-deoxyadenosine-3'-phosphorothioate
  modified_base 12: mod_base = OTHER; note = 2'-deoxyguanosine-3'-phosphorothioate
  modified_base 13: mod_base = OTHER; note = 5-methyl-2'-deoxycytidine-3'-phosphorothioate
  modified_base 14: mod_base = OTHER; note = 2'-deoxythymidine-3'-phosphorothioate
  modified_base 15: mod_base = OTHER; note = Beta-L-cytidine-3'-phosphorothioate
  modified_base 16: mod_base = OTHER; note = Beta-L-guanosine-3'-phosphorothioate
  modified_base 17: mod_base = OTHER; note = Beta-L-adenosine-3'-phosphate
  misc_feature 1..3: note = RNA
  misc_feature 4..14: note = DNA
  misc_feature 15..17: note = RNA
acgatgaagaagctcga

SEQ ID NO: 822 - DNA, 17 bp, synthetic construct
  source 1..17: mol_type = other DNA
  modified_base 1: mod_base = OTHER; note = Beta-L-thymidine-3'-phosphorothioate
  modified_base 2: mod_base = OTHER; note = Beta-L-guanosine-3'-phosphorothioate
  modified_base 3: mod_base = OTHER; note = Beta-L-guanosine-3'-phosphorothioate
  modified_base 4: mod_base = OTHER; note = 5-methyl-2'-deoxycytidine-3'-phosphorothioate
  modified_base 5: mod_base = OTHER; note = 2'-deoxyguanosine-3'-phosphorothioate
  modified_base 6: mod_base = OTHER; note = 5-methyl-2'-deoxycytidine-3'-phosphorothioate
  modified_base 7: mod_base = OTHER; note = 2'-deoxythymidine-3'-phosphorothioate
  modified_base 8: mod_base = OTHER; note = 2'-deoxyadenosine-3'-phosphorothioate
  modified_base 9: mod_base = OTHER; note = 2'-deoxyguanosine-3'-phosphorothioate
  modified_base 10: mod_base = OTHER; note = 2'-deoxythymidine-3'-phosphorothioate
  modified_base 11: mod_base = OTHER; note = 5-methyl-2'-deoxycytidine-3'-phosphorothioate
  modified_base 12: mod_base = OTHER; note = 5-methyl-2'-deoxycytidine-3'-phosphorothioate
  modified_base 13: mod_base = OTHER; note = 2'-deoxyadenosine-3'-phosphorothioate
  modified_base 14: mod_base = OTHER; note = 2'-deoxyguanosine-3'-phosphorothioate
  modified_base 15: mod_base = OTHER; note = Beta-L-guanosine-3'-phosphorothioate
  modified_base 16: mod_base = OTHER; note = Beta-L-cytidine-3'-phosphorothioate
  modified_base 17: mod_base = OTHER; note = Beta-L-cytidine-3'-phosphate
  misc_feature 1..3: note = RNA
  misc_feature 4..14: note = DNA
  misc_feature 15..17: note = RNA
tggcgctagtccaggcc

SEQ ID NO: 823 - DNA, 17 bp, synthetic construct
  source 1..17: mol_type = other DNA
  modified_base 1: mod_base = OTHER; note = Beta-L-adenosine-3'-phosphorothioate
  modified_base 2: mod_base = OTHER; note = Beta-L-guanosine-3'-phosphorothioate
  modified_base 3: mod_base = OTHER; note = Beta-L-cytidine-3'-phosphorothioate
  modified_base 4: mod_base = OTHER; note = 5-methyl-2'-deoxycytidine-3'-phosphorothioate
  modified_base 5: mod_base = OTHER; note = 2'-deoxythymidine-3'-phosphorothioate
  modified_base 6: mod_base = OTHER; note = 2'-deoxyguanosine-3'-phosphorothioate
  modified_base 7: mod_base = OTHER; note = 2'-deoxyguanosine-3'-phosphorothioate
  modified_base 8: mod_base = OTHER; note = 5-methyl-2'-deoxycytidine-3'-phosphorothioate
  modified_base 9: mod_base = OTHER; note = 2'-deoxyguanosine-3'-phosphorothioate
  modified_base 10: mod_base = OTHER; note = 5-methyl-2'-deoxycytidine-3'-phosphorothioate
  modified_base 11: mod_base = OTHER; note = 2'-deoxythymidine-3'-phosphorothioate
  modified_base 12: mod_base = OTHER; note = 2'-deoxyadenosine-3'-phosphorothioate
  modified_base 13: mod_base = OTHER; note = 2'-deoxyguanosine-3'-phosphorothioate
  modified_base 14: mod_base = OTHER; note = 2'-deoxythymidine-3'-phosphorothioate
  modified_base 15: mod_base = OTHER; note = Beta-L-cytidine-3'-phosphorothioate
  modified_base 16: mod_base = OTHER; note = Beta-L-cytidine-3'-phosphorothioate
  modified_base 17: mod_base = OTHER; note = Beta-L-adenosine-3'-phosphate
  misc_feature 1..3: note = RNA
  misc_feature 4..14: note = DNA
  misc_feature 15..17: note = RNA
agcctggcgctagtcca

SEQ ID NO: 824 - DNA, 17 bp, synthetic construct
  source 1..17: mol_type = other DNA
  modified_base 1: mod_base = OTHER; note = Beta-L-guanosine-3'-phosphorothioate
  modified_base 2: mod_base = OTHER; note = Beta-L-cytidine-3'-phosphorothioate
  modified_base 3: mod_base = OTHER; note = Beta-L-adenosine-3'-phosphorothioate
  modified_base 4: mod_base = OTHER; note = 2'-deoxyguanosine-3'-phosphorothioate
  modified_base 5: mod_base = OTHER; note = 5-methyl-2'-deoxycytidine-3'-phosphorothioate
  modified_base 6: mod_base = OTHER; note = 5-methyl-2'-deoxycytidine-3'-phosphorothioate
  modified_base 7: mod_base = OTHER; note = 2'-deoxythymidine-3'-phosphorothioate
  modified_base 8: mod_base = OTHER; note = 2'-deoxyguanosine-3'-phosphorothioate
  modified_base 9: mod_base = OTHER; note = 2'-deoxyguanosine-3'-phosphorothioate
  modified_base 10: mod_base = OTHER; note = 5-methyl-2'-deoxycytidine-3'-phosphorothioate
  modified_base 11: mod_base = OTHER; note = 2'-deoxyguanosine-3'-phosphorothioate
  modified_base 12: mod_base = OTHER; note = 5-methyl-2'-deoxycytidine-3'-phosphorothioate
  modified_base 13: mod_base = OTHER; note = 2'-deoxythymidine-3'-phosphorothioate
  modified_base 14: mod_base = OTHER; note = 2'-deoxyadenosine-3'-phosphorothioate
  modified_base 15: mod_base = OTHER; note = Beta-L-guanosine-3'-phosphorothioate
  modified_base 16: mod_base = OTHER; note = Beta-L-thymidine-3'-phosphorothioate
  modified_base 17: mod_base = OTHER; note = Beta-L-cytidine-3'-phosphate
  misc_feature 1..3: note = RNA
  misc_feature 4..14: note = DNA
  misc_feature 15..17: note = RNA
gcagcctggcgctagtc

SEQ ID NO: 825 - DNA, 17 bp, synthetic construct
  source 1..17: mol_type = other DNA
  modified_base 1: mod_base = OTHER; note = Beta-L-thymidine-3'-phosphorothioate
  modified_base 2: mod_base = OTHER; note = Beta-L-guanosine-3'-phosphorothioate
  modified_base 3: mod_base = OTHER; note = Beta-L-thymidine-3'-phosphorothioate
  modified_base 4: mod_base = OTHER; note = 2'-deoxyadenosine-3'-phosphorothioate
  modified_base 5: mod_base = OTHER; note = 2'-deoxyguanosine-3'-phosphorothioate
  modified_base 6: mod_base = OTHER; note = 2'-deoxyguanosine-3'-phosphorothioate
  modified_base 7: mod_base = OTHER; note = 2'-deoxythymidine-3'-phosphorothioate
  modified_base 8: mod_base = OTHER; note = 2'-deoxyguanosine-3'-phosphorothioate
  modified_base 9: mod_base = OTHER; note = 2'-deoxyguanosine-3'-phosphorothioate
  modified_base 10: mod_base = OTHER; note = 5-methyl-2'-deoxycytidine-3'-phosphorothioate
  modified_base 11: mod_base = OTHER; note = 5-methyl-2'-deoxycytidine-3'-phosphorothioate
  modified_base 12: mod_base = OTHER; note = 2'-deoxythymidine-3'-phosphorothioate
  modified_base 13: mod_base = OTHER; note = 5-methyl-2'-deoxycytidine-3'-phosphorothioate
  modified_base 14: mod_base = OTHER; note = 2'-deoxyguanosine-3'-phosphorothioate
  modified_base 15: mod_base = OTHER; note = Beta-L-thymidine-3'-phosphorothioate
  modified_base 16: mod_base = OTHER; note = Beta-L-thymidine-3'-phosphorothioate
  modified_base 17: mod_base = OTHER; note = Beta-L-guanosine-3'-phosphate
  misc_feature 1..3: note = RNA
  misc_feature 4..14: note = DNA
  misc_feature 15..17: note = RNA
tgtaggtggcctcgttg

SEQ ID NO: 826 - DNA, 17 bp, synthetic construct
  source 1..17: mol_type = other DNA
  modified_base 1: mod_base = OTHER; note = Beta-L-guanosine-3'-phosphorothioate
  modified_base 2: mod_base = OTHER; note = Beta-L-cytidine-3'-phosphorothioate
  modified_base 3: mod_base = OTHER; note = Beta-L-adenosine-3'-phosphorothioate
  modified_base 4: mod_base = OTHER; note = 2'-deoxyguanosine-3'-phosphorothioate
  modified_base 5: mod_base = OTHER; note = 2'-deoxythymidine-3'-phosphorothioate
  modified_base 6: mod_base = OTHER; note = 5-methyl-2'-deoxycytidine-3'-phosphorothioate
  modified_base 7: mod_base = OTHER; note = 2'-deoxyguanosine-3'-phosphorothioate
  modified_base 8: mod_base = OTHER; note = 2'-deoxyadenosine-3'-phosphorothioate
  modified_base 9: mod_base = OTHER; note = 5-methyl-2'-deoxycytidine-3'-phosphorothioate
  modified_base 10: mod_base = OTHER; note = 5-methyl-2'-deoxycytidine-3'-phosphorothioate
  modified_base 11: mod_base = OTHER; note = 5-methyl-2'-deoxycytidine-3'-phosphorothioate
  modified_base 12: mod_base = OTHER; note = 2'-deoxythymidine-3'-phosphorothioate
  modified_base 13: mod_base = OTHER; note = 2'-deoxyguanosine-3'-phosphorothioate
  modified_base 14: mod_base = OTHER; note = 2'-deoxyadenosine-3'-phosphorothioate
  modified_base 15: mod_base = OTHER; note = Beta-L-thymidine-3'-phosphorothioate
  modified_base 16: mod_base = OTHER; note = Beta-L-guanosine-3'-phosphorothioate
  modified_base 17: mod_base = OTHER; note = Beta-L-guanosine-3'-phosphate
  misc_feature 1..3: note = RNA
  misc_feature 4..14: note = DNA
  misc_feature 15..17: note = RNA
gcagtcgaccctgatgg

SEQ ID NO: 827 - DNA, 17 bp, synthetic construct
  source 1..17: mol_type = other DNA
  modified_base 1: mod_base = OTHER; note = Beta-L-guanosine-3'-phosphorothioate
  modified_base 2: mod_base = OTHER; note = Beta-L-thymidine-3'-phosphorothioate
  modified_base 3: mod_base = OTHER; note = Beta-L-guanosine-3'-phosphorothioate
  modified_base 4: mod_base = OTHER; note = 2'-deoxythymidine-3'-phosphorothioate
  modified_base 5: mod_base = OTHER; note = 2'-deoxythymidine-3'-phosphorothioate
  modified_base 6: mod_base = OTHER; note = 2'-deoxyguanosine-3'-phosphorothioate
  modified_base 7: mod_base = OTHER; note = 5-methyl-2'-deoxycytidine-3'-phosphorothioate
  modified_base 8: mod_base = OTHER; note = 2'-deoxyadenosine-3'-phosphorothioate
  modified_base 9: mod_base = OTHER; note = 2'-deoxyguanosine-3'-phosphorothioate
  modified_base 10: mod_base = OTHER; note = 2'-deoxythymidine-3'-phosphorothioate
  modified_base 11: mod_base = OTHER; note = 5-methyl-2'-deoxycytidine-3'-phosphorothioate
  modified_base 12: mod_base = OTHER; note = 2'-deoxyguanosine-3'-phosphorothioate
  modified_base 13: mod_base = OTHER; note = 2'-deoxyadenosine-3'-phosphorothioate
  modified_base 14: mod_base = OTHER; note = 5-methyl-2'-deoxycytidine-3'-phosphorothioate
  modified_base 15: mod_base = OTHER; note = Beta-L-cytidine-3'-phosphorothioate
  modified_base 16: mod_base = OTHER; note = Beta-L-cytidine-3'-phosphorothioate
  modified_base 17: mod_base = OTHER; note = Beta-L-thymidine-3'-phosphate
  misc_feature 1..3: note = RNA
  misc_feature 4..14: note = DNA
  misc_feature 15..17: note = RNA
gtgttgcagtcgaccct

SEQ ID NO: 828 - DNA, 17 bp, synthetic construct
  source 1..17: mol_type = other DNA
  modified_base 1: mod_base = OTHER; note = Beta-L-guanosine-3'-phosphorothioate
  modified_base 2: mod_base = OTHER; note = Beta-L-guanosine-3'-phosphorothioate
  modified_base 3: mod_base = OTHER; note = Beta-L-thymidine-3'-phosphorothioate
  modified_base 4: mod_base = OTHER; note = 2'-deoxyguanosine-3'-phosphorothioate
  modified_base 5: mod_base = OTHER; note = 2'-deoxythymidine-3'-phosphorothioate
  modified_base 6: mod_base = OTHER; note = 2'-deoxythymidine-3'-phosphorothioate
  modified_base 7: mod_base = OTHER; note = 2'-deoxyguanosine-3'-phosphorothioate
  modified_base 8: mod_base = OTHER; note = 5-methyl-2'-deoxycytidine-3'-phosphorothioate
  modified_base 9: mod_base = OTHER; note = 2'-deoxyadenosine-3'-phosphorothioate
  modified_base 10: mod_base = OTHER; note = 2'-deoxyguanosine-3'-phosphorothioate
  modified_base 11: mod_base = OTHER; note = 2'-deoxythymidine-3'-phosphorothioate
  modified_base 12: mod_base = OTHER; note = 5-methyl-2'-deoxycytidine-3'-phosphorothioate
  modified_base 13: mod_base = OTHER; note = 2'-deoxyguanosine-3'-phosphorothioate
  modified_base 14: mod_base = OTHER; note = 2'-deoxyadenosine-3'-phosphorothioate
  modified_base 15: mod_base = OTHER; note = Beta-L-cytidine-3'-phosphorothioate
  modified_base 16: mod_base = OTHER; note = Beta-L-cytidine-3'-phosphorothioate
  modified_base 17: mod_base = OTHER; note = Beta-L-cytidine-3'-phosphate
  misc_feature 1..3: note = RNA
  misc_feature 4..14: note = DNA
  misc_feature 15..17: note = RNA
ggtgttgcagtcgaccc

SEQ ID NO: 829 - DNA, 17 bp, synthetic construct
  source 1..17: mol_type = other DNA
  modified_base 1: mod_base = OTHER; note = Beta-L-cytidine-3'-phosphorothioate
  modified_base 2: mod_base = OTHER; note = Beta-L-adenosine-3'-phosphorothioate
  modified_base 3: mod_base = OTHER; note = Beta-L-guanosine-3'-phosphorothioate
  modified_base 4: mod_base = OTHER; note = 2'-deoxyguanosine-3'-phosphorothioate
  modified_base 5: mod_base = OTHER; note = 2'-deoxythymidine-3'-phosphorothioate
  modified_base 6: mod_base = OTHER; note = 2'-deoxyguanosine-3'-phosphorothioate
  modified_base 7: mod_base = OTHER; note = 2'-deoxythymidine-3'-phosphorothioate
  modified_base 8: mod_base = OTHER; note = 2'-deoxythymidine-3'-phosphorothioate
  modified_base 9: mod_base = OTHER; note = 2'-deoxyguanosine-3'-phosphorothioate
  modified_base 10: mod_base = OTHER; note = 5-methyl-2'-deoxycytidine-3'-phosphorothioate
  modified_base 11: mod_base = OTHER; note = 2'-deoxyadenosine-3'-phosphorothioate
  modified_base 12: mod_base = OTHER; note = 2'-deoxyguanosine-3'-phosphorothioate
  modified_base 13: mod_base = OTHER; note = 2'-deoxythymidine-3'-phosphorothioate
  modified_base 14: mod_base = OTHER; note = 5-methyl-2'-deoxycytidine-3'-phosphorothioate
  modified_base 15: mod_base = OTHER; note = Beta-L-guanosine-3'-phosphorothioate
  modified_base 16: mod_base = OTHER; note = Beta-L-adenosine-3'-phosphorothioate
  modified_base 17: mod_base = OTHER; note = Beta-L-cytidine-3'-phosphate
  misc_feature 1..3: note = RNA
  misc_feature 4..14: note = DNA
  misc_feature 15..17: note = RNA
caggtgttgcagtcgac

SEQ ID NO: 830 - DNA, 17 bp, synthetic construct
  source 1..17: mol_type = other DNA
  modified_base 1: mod_base = OTHER; note = Beta-L-cytidine-3'-phosphorothioate
  modified_base 2: mod_base = OTHER; note = Beta-L-cytidine-3'-phosphorothioate
  modified_base 3: mod_base = OTHER; note = Beta-L-guanosine-3'-phosphorothioate
  modified_base 4: mod_base = OTHER; note = 2'-deoxythymidine-3'-phosphorothioate
  modified_base 5: mod_base = OTHER; note = 2'-deoxyadenosine-3'-phosphorothioate
  modified_base 6: mod_base = OTHER; note = 2'-deoxyguanosine-3'-phosphorothioate
  modified_base 7: mod_base = OTHER; note = 2'-deoxyguanosine-3'-phosphorothioate
  modified_base 8: mod_base = OTHER; note = 5-methyl-2'-deoxycytidine-3'-phosphorothioate
  modified_base 9: mod_base = OTHER; note = 5-methyl-2'-deoxycytidine-3'-phosphorothioate
  modified_base 10: mod_base = OTHER; note = 2'-deoxyadenosine-3'-phosphorothioate
  modified_base 11: mod_base = OTHER; note = 5-methyl-2'-deoxycytidine-3'-phosphorothioate
  modified_base 12: mod_base = OTHER; note = 2'-deoxyguanosine-3'-phosphorothioate
  modified_base 13: mod_base = OTHER; note = 5-methyl-2'-deoxycytidine-3'-phosphorothioate
  modified_base 14: mod_base = OTHER; note = 2'-deoxyadenosine-3'-phosphorothioate
  modified_base 15: mod_base = OTHER; note = Beta-L-guanosine-3'-phosphorothioate
  modified_base 16: mod_base = OTHER; note = Beta-L-guanosine-3'-phosphorothioate
  modified_base 17: mod_base = OTHER; note = Beta-L-thymidine-3'-phosphate
  misc_feature 1..3: note = RNA
  misc_feature 4..14: note = DNA
  misc_feature 15..17: note = RNA
ccgtaggccacgcaggt

SEQ ID NO: 831 - DNA, 17 bp, synthetic construct
  source 1..17: mol_type = other DNA
  modified_base 1: mod_base = OTHER; note = Beta-L-cytidine-3'-phosphorothioate
  modified_base 2: mod_base = OTHER; note = Beta-L-cytidine-3'-phosphorothioate
  modified_base 3: mod_base = OTHER; note = Beta-L-cytidine-3'-phosphorothioate
  modified_base 4: mod_base = OTHER; note = 2'-deoxyguanosine-3'-phosphorothioate
  modified_base 5: mod_base = OTHER; note = 2'-deoxythymidine-3'-phosphorothioate
  modified_base 6: mod_base = OTHER; note = 2'-deoxyadenosine-3'-phosphorothioate
  modified_base 7: mod_base = OTHER; note = 2'-deoxyguanosine-3'-phosphorothioate
  modified_base 8: mod_base = OTHER; note = 2'-deoxyguanosine-3'-phosphorothioate
  modified_base 9: mod_base = OTHER; note = 5-methyl-2'-deoxycytidine-3'-phosphorothioate
  modified_base 10: mod_base = OTHER; note = 5-methyl-2'-deoxycytidine-3'-phosphorothioate
  modified_base 11: mod_base = OTHER; note = 2'-deoxyadenosine-3'-phosphorothioate
  modified_base 12: mod_base = OTHER; note = 5-methyl-2'-deoxycytidine-3'-phosphorothioate
  modified_base 13: mod_base = OTHER; note = 2'-deoxyguanosine-3'-phosphorothioate
  modified_base 14: mod_base = OTHER; note = 5-methyl-2'-deoxycytidine-3'-phosphorothioate
  modified_base 15: mod_base = OTHER; note = Beta-L-adenosine-3'-phosphorothioate
  modified_base 16: mod_base = OTHER; note = Beta-L-guanosine-3'-phosphorothioate
  modified_base 17: mod_base = OTHER; note = Beta-L-guanosine-3'-phosphate
  misc_feature 1..3: note = RNA
  misc_feature 4..14: note = DNA
  misc_feature 15..17: note = RNA
cccgtaggccacgcagg

SEQ ID NO: 832 - DNA, 17 bp, synthetic construct
  source 1..17: mol_type = other DNA
  modified_base 1: mod_base = OTHER; note = Beta-L-cytidine-3'-phosphorothioate
  modified_base 2: mod_base = OTHER; note = Beta-L-cytidine-3'-phosphorothioate
  modified_base 3: mod_base = OTHER; note = Beta-L-cytidine-3'-phosphorothioate
  modified_base 4: mod_base = OTHER; note = 5-methyl-2'-deoxycytidine-3'-phosphorothioate
  modified_base 5: mod_base = OTHER; note = 2'-deoxyguanosine-3'-phosphorothioate
  modified_base 6: mod_base = OTHER; note = 2'-deoxythymidine-3'-phosphorothioate
  modified_base 7: mod_base = OTHER; note = 2'-deoxyadenosine-3'-phosphorothioate
  modified_base 8: mod_base = OTHER; note = 2'-deoxyguanosine-3'-phosphorothioate
  modified_base 9: mod_base = OTHER; note = 2'-deoxyguanosine-3'-phosphorothioate
  modified_base 10: mod_base = OTHER; note = 5-methyl-2'-deoxycytidine-3'-phosphorothioate
  modified_base 11: mod_base = OTHER; note = 5-methyl-2'-deoxycytidine-3'-phosphorothioate
  modified_base 12: mod_base = OTHER; note = 2'-deoxyadenosine-3'-phosphorothioate
  modified_base 13: mod_base = OTHER; note = 5-methyl-2'-deoxycytidine-3'-phosphorothioate
  modified_base 14: mod_base = OTHER; note = 2'-deoxyguanosine-3'-phosphorothioate
  modified_base 15: mod_base = OTHER; note = Beta-L-cytidine-3'-phosphorothioate
  modified_base 16: mod_base = OTHER; note = Beta-L-adenosine-3'-phosphorothioate
  modified_base 17: mod_base = OTHER; note = Beta-L-guanosine-3'-phosphate
  misc_feature 1..3: note = RNA
  misc_feature 4..14: note = DNA
  misc_feature 15..17: note = RNA
ccccgtaggccacgcag

SEQ ID NO: 833 - DNA, 17 bp, synthetic construct
  source 1..17: mol_type = other DNA
  modified_base 1: mod_base = OTHER; note = Beta-L-thymidine-3'-phosphorothioate
  modified_base 2: mod_base = OTHER; note = Beta-L-cytidine-3'-phosphorothioate
  modified_base 3: mod_base = OTHER; note = Beta-L-cytidine-3'-phosphorothioate
  modified_base 4: mod_base = OTHER; note = 5-methyl-2'-deoxycytidine-3'-phosphorothioate
  modified_base 5: mod_base = OTHER; note = 5-methyl-2'-deoxycytidine-3'-phosphorothioate
  modified_base 6: mod_base = OTHER; note = 2'-deoxyguanosine-3'-phosphorothioate
  modified_base 7: mod_base = OTHER; note = 2'-deoxythymidine-3'-phosphorothioate
  modified_base 8: mod_base = OTHER; note = 2'-deoxyadenosine-3'-phosphorothioate
  modified_base 9: mod_base = OTHER; note = 2'-deoxyguanosine-3'-phosphorothioate
  modified_base 10: mod_base = OTHER; note = 2'-deoxyguanosine-3'-phosphorothioate
  modified_base 11: mod_base = OTHER; note = 5-methyl-2'-deoxycytidine-3'-phosphorothioate
  modified_base 12: mod_base = OTHER; note = 5-methyl-2'-deoxycytidine-3'-phosphorothioate
  modified_base 13: mod_base = OTHER; note = 2'-deoxyadenosine-3'-phosphorothioate
  modified_base 14: mod_base = OTHER; note = 5-methyl-2'-deoxycytidine-3'-phosphorothioate
  modified_base 15: mod_base = OTHER; note = Beta-L-guanosine-3'-phosphorothioate
  modified_base 16: mod_base = OTHER; note = Beta-L-cytidine-3'-phosphorothioate
  modified_base 17: mod_base = OTHER; note = Beta-L-adenosine-3'-phosphate
  misc_feature 1..3: note = RNA
  misc_feature 4..14: note = DNA
  misc_feature 15..17: note = RNA
tccccgtaggccacgca

SEQ ID NO: 834 - DNA, 17 bp, synthetic construct
  source 1..17: mol_type = other DNA
  modified_base 1: mod_base = OTHER; note = Beta-L-adenosine-3'-phosphorothioate
  modified_base 2: mod_base = OTHER; note = Beta-L-thymidine-3'-phosphorothioate
  modified_base 3: mod_base = OTHER; note = Beta-L-cytidine-3'-phosphorothioate
  modified_base 4: mod_base = OTHER; note = 5-methyl-2'-deoxycytidine-3'-phosphorothioate
  modified_base 5: mod_base = OTHER; note = 5-methyl-2'-deoxycytidine-3'-phosphorothioate
  modified_base 6: mod_base = OTHER; note = 5-methyl-2'-deoxycytidine-3'-phosphorothioate
  modified_base 7: mod_base = OTHER; note = 2'-deoxyguanosine-3'-phosphorothioate
  modified_base 8: mod_base = OTHER; note = 2'-deoxythymidine-3'-phosphorothioate
  modified_base 9: mod_base = OTHER; note = 2'-deoxyadenosine-3'-phosphorothioate
  modified_base 10: mod_base = OTHER; note = 2'-deoxyguanosine-3'-phosphorothioate
  modified_base 11: mod_base = OTHER; note = 2'-deoxyguanosine-3'-phosphorothioate
  modified_base 12: mod_base = OTHER; note = 5-methyl-2'-deoxycytidine-3'-phosphorothioate
  modified_base 13: mod_base = OTHER; note = 5-methyl-2'-deoxycytidine-3'-phosphorothioate
  modified_base 14: mod_base = OTHER; note = 2'-deoxyadenosine-3'-phosphorothioate
  modified_base 15: mod_base = OTHER; note = Beta-L-cytidine-3'-phosphorothioate
  modified_base 16: mod_base = OTHER; note = Beta-L-guanosine-3'-phosphorothioate
  modified_base 17: mod_base = OTHER; note = Beta-L-cytidine-3'-phosphate
  misc_feature 1..3: note = RNA
  misc_feature 4..14: note = DNA
  misc_feature 15..17: note = RNA
atccccgtaggccacgc

SEQ ID NO: 835 - DNA, 17 bp, synthetic construct
  source 1..17: mol_type = other DNA
  modified_base 1: mod_base = OTHER; note = Beta-L-cytidine-3'-phosphorothioate
  modified_base 2: mod_base = OTHER; note = Beta-L-adenosine-3'-phosphorothioate
  modified_base 3: mod_base = OTHER; note = Beta-L-thymidine-3'-phosphorothioate
  modified_base 4: mod_base = OTHER; note = 5-methyl-2'-deoxycytidine-3'-phosphorothioate
  modified_base 5: mod_base = OTHER; note = 5-methyl-2'-deoxycytidine-3'-phosphorothioate
  modified_base 6: mod_base = OTHER; note = 5-methyl-2'-deoxycytidine-3'-phosphorothioate
  modified_base 7: mod_base = OTHER; note = 5-methyl-2'-deoxycytidine-3'-phosphorothioate
  modified_base 8: mod_base = OTHER; note = 2'-deoxyguanosine-3'-phosphorothioate
  modified_base 9: mod_base = OTHER; note = 2'-deoxythymidine-3'-phosphorothioate
  modified_base 10: mod_base = OTHER; note = 2'-deoxyadenosine-3'-phosphorothioate
  modified_base 11: mod_base = OTHER; note = 2'-deoxyguanosine-3'-phosphorothioate
  modified_base 12: mod_base = OTHER; note = 2'-deoxyguanosine-3'-phosphorothioate
  modified_base 13: mod_base = OTHER; note = 5-methyl-2'-deoxycytidine-3'-phosphorothioate
  modified_base 14: mod_base = OTHER; note = 5-methyl-2'-deoxycytidine-3'-phosphorothioate
  modified_base 15: mod_base = OTHER; note = Beta-L-adenosine-3'-phosphorothioate
  modified_base 16: mod_base = OTHER; note = Beta-L-cytidine-3'-phosphorothioate
  modified_base 17: mod_base = OTHER; note = Beta-L-guanosine-3'-phosphate
  misc_feature 1..3: note = RNA
  misc_feature 4..14: note = DNA
  misc_feature 15..17: note = RNA
catccccgtaggccacg

SEQ ID NO: 836 - DNA, 17 bp, synthetic construct
  source 1..17: mol_type = other DNA
  modified_base 1: mod_base = OTHER; note = Beta-L-adenosine-3'-phosphorothioate
  modified_base 2: mod_base = OTHER; note = Beta-L-thymidine-3'-phosphorothioate
  modified_base 3: mod_base = OTHER; note = Beta-L-guanosine-3'-phosphorothioate
  modified_base 4: mod_base = OTHER; note = 5-methyl-2'-deoxycytidine-3'-phosphorothioate
  modified_base 5: mod_base = OTHER; note = 2'-deoxyguanosine-3'-phosphorothioate
  modified_base 6: mod_base = OTHER; note = 2'-deoxyguanosine-3'-phosphorothioate
  modified_base 7: mod_base = OTHER; note = 2'-deoxyadenosine-3'-phosphorothioate
  modified_base 8: mod_base = OTHER; note = 2'-deoxyadenosine-3'-phosphorothioate
  modified_base 9: mod_base = OTHER; note = 2'-deoxyguanosine-3'-phosphorothioate
  modified_base 10: mod_base = OTHER; note = 2'-deoxyguanosine-3'-phosphorothioate
  modified_base 11: mod_base = OTHER; note = 2'-deoxythymidine-3'-phosphorothioate
  modified_base 12: mod_base = OTHER; note = 5-methyl-2'-deoxycytidine-3'-phosphorothioate
  modified_base 13: mod_base = OTHER; note = 5-methyl-2'-deoxycytidine-3'-phosphorothioate
  modified_base 14: mod_base = OTHER; note = 5-methyl-2'-deoxycytidine-3'-phosphorothioate
  modified_base 15: mod_base = OTHER; note = Beta-L-guanosine-3'-phosphorothioate
  modified_base 16: mod_base = OTHER; note = Beta-L-thymidine-3'-phosphorothioate
  modified_base 17: mod_base = OTHER; note = Beta-L-guanosine-3'-phosphate
  misc_feature 1..3: note = RNA
  misc_feature 4..14: note = DNA
  misc_feature 15..17: note = RNA
atgcggaaggtcccgtg

SEQ ID NO: 837 - DNA, 17 bp, synthetic construct
  source 1..17: mol_type = other DNA
  modified_base 1: mod_base = OTHER; note = Beta-L-guanosine-3'-phosphorothioate
  modified_base 2: mod_base = OTHER; note = Beta-L-adenosine-3'-phosphorothioate
  modified_base 3: mod_base = OTHER; note = Beta-L-cytidine-3'-phosphorothioate
  modified_base 4: mod_base = OTHER; note = 2'-deoxyguanosine-3'-phosphorothioate
  modified_base 5: mod_base = OTHER; note = 2'-deoxyadenosine-3'-phosphorothioate
  modified_base 6: mod_base = OTHER; note = 2'-deoxythymidine-3'-phosphorothioate
  modified_base 7: mod_base = OTHER; note = 2'-deoxyguanosine-3'-phosphorothioate
  modified_base 8: mod_base = OTHER; note = 5-methyl-2'-deoxycytidine-3'-phosphorothioate
  modified_base 9: mod_base = OTHER; note = 2'-deoxyguanosine-3'-phosphorothioate
  modified_base 10: mod_base = OTHER; note = 2'-deoxyguanosine-3'-phosphorothioate
  modified_base 11: mod_base = OTHER; note = 2'-deoxyadenosine-3'-phosphorothioate
  modified_base 12: mod_base = OTHER; note = 2'-deoxyadenosine-3'-phosphorothioate
  modified_base 13: mod_base = OTHER; note = 2'-deoxyguanosine-3'-phosphorothioate
  modified_base 14: mod_base = OTHER; note = 2'-deoxyguanosine-3'-phosphorothioate
  modified_base 15: mod_base = OTHER; note = Beta-L-thymidine-3'-phosphorothioate
  modified_base 16: mod_base = OTHER; note = Beta-L-cytidine-3'-phosphorothioate
  modified_base 17: mod_base = OTHER; note = Beta-L-cytidine-3'-phosphate
  misc_feature 1..3: note = RNA
  misc_feature 4..14: note = DNA
  misc_feature 15..17: note = RNA
gacgatgcggaaggtcc

SEQ ID NO: 838 - DNA, 17 bp, synthetic construct
  source 1..17: mol_type = other DNA
  modified_base 1: mod_base = OTHER; note = Beta-L-cytidine-3'-phosphorothioate
  modified_base 2: mod_base = OTHER; note = Beta-L-thymidine-3'-phosphorothioate
  modified_base 3: mod_base = OTHER; note = Beta-L-cytidine-3'-phosphorothioate
  modified_base 4: mod_base = OTHER; note = 2'-deoxyguanosine-3'-phosphorothioate
  modified_base 5: mod_base = OTHER; note = 2'-deoxyguanosine-3'-phosphorothioate
  modified_base 6: mod_base = OTHER; note = 2'-deoxythymidine-3'-phosphorothioate
  modified_base 7: mod_base = OTHER; note = 2'-deoxyguanosine-3'-phosphorothioate
  modified_base 8: mod_base = OTHER; note = 2'-deoxyadenosine-3'-phosphorothioate
  modified_base 9: mod_base = OTHER; note = 5-methyl-2'-deoxycytidine-3'-phosphorothioate
  modified_base 10: mod_base = OTHER; note = 2'-deoxyguanosine-3'-phosphorothioate
  modified_base 11: mod_base = OTHER; note = 2'-deoxyadenosine-3'-phosphorothioate
  modified_base 12: mod_base = OTHER; note = 2'-deoxythymidine-3'-phosphorothioate
  modified_base 13: mod_base = OTHER; note = 2'-deoxyguanosine-3'-phosphorothioate
  modified_base 14: mod_base = OTHER; note = 5-methyl-2'-deoxycytidine-3'-phosphorothioate
  modified_base 15: mod_base = OTHER; note = Beta-L-guanosine-3'-phosphorothioate
  modified_base 16: mod_base = OTHER; note = Beta-L-guanosine-3'-phosphorothioate
  modified_base 17: mod_base = OTHER; note = Beta-L-adenosine-3'-phosphate
  misc_feature 1..3: note = RNA
  misc_feature 4..14: note = DNA
  misc_feature 15..17: note = RNA
ctcggtgacgatgcgga

SEQ ID NO: 839 - DNA, 17 bp, synthetic construct
  source 1..17: mol_type = other DNA
  modified_base 1: mod_base = OTHER; note = Beta-L-guanosine-3'-phosphorothioate
  modified_base 2: mod_base = OTHER; note = Beta-L-guanosine-3'-phosphorothioate
  modified_base 3: mod_base = OTHER; note = Beta-L-adenosine-3'-phosphorothioate
  modified_base 4: mod_base = OTHER; note = 2'-deoxythymidine-3'-phosphorothioate
  modified_base 5: mod_base = OTHER; note = 2'-deoxyguanosine-3'-phosphorothioate
  modified_base 6: mod_base = OTHER; note = 2'-deoxythymidine-3'-phosphorothioate
  modified_base 7: mod_base = OTHER; note = 2'-deoxythymidine-3'-phosphorothioate
  modified_base 8: mod_base = OTHER; note = 5-methyl-2'-deoxycytidine-3'-phosphorothioate
  modified_base 9: mod_base = OTHER; note = 2'-deoxythymidine-3'-phosphorothioate
  modified_base 10: mod_base = OTHER; note = 5-methyl-2'-deoxycytidine-3'-phosphorothioate
  modified_base 11: mod_base = OTHER; note = 2'-deoxyguanosine-3'-phosphorothioate
  modified_base 12: mod_base = OTHER; note = 2'-deoxyguanosine-3'-phosphorothioate
  modified_base 13: mod_base = OTHER; note = 2'-deoxythymidine-3'-phosphorothioate
  modified_base 14: mod_base = OTHER; note = 2'-deoxyguanosine-3'-phosphorothioate
  modified_base 15: mod_base = OTHER; note = Beta-L-adenosine-3'-phosphorothioate
  modified_base 16: mod_base = OTHER; note = Beta-L-cytidine-3'-phosphorothioate
  modified_base 17: mod_base = OTHER; note = Beta-L-guanosine-3'-phosphate
  misc_feature 1..3: note = RNA
  misc_feature 4..14: note = DNA
  misc_feature 15..17: note = RNA
ggatgttctcggtgacg

SEQ ID NO: 840 - DNA, 17 bp, synthetic construct
  source 1..17: mol_type = other DNA
  modified_base 1: mod_base = OTHER; note = Beta-L-guanosine-3'-phosphorothioate
  modified_base 2: mod_base = OTHER; note = Beta-L-guanosine-3'-phosphorothioate
  modified_base 3: mod_base = OTHER; note = Beta-L-thymidine-3'-phosphorothioate
  modified_base 4: mod_base = OTHER; note = 2'-deoxyguanosine-3'-phosphorothioate
  modified_base 5: mod_base = OTHER; note = 5-methyl-2'-deoxycytidine-3'-phosphorothioate
  modified_base 6: mod_base = OTHER; note = 2'-deoxyguanosine-3'-phosphorothioate
  modified_base 7: mod_base = OTHER; note = 5-methyl-2'-deoxycytidine-3'-phosphorothioate
  modified_base 8: mod_base = OTHER; note = 2'-deoxyadenosine-3'-phosphorothioate
  modified_base 9: mod_base = OTHER; note = 5-methyl-2'-deoxycytidine-3'-phosphorothioate
  modified_base 10: mod_base = OTHER; note = 2'-deoxyguanosine-3'-phosphorothioate
  modified_base 11: mod_base = OTHER; note = 2'-deoxyguanosine-3'-phosphorothioate
  modified_base 12: mod_base = OTHER; note = 2'-deoxyguanosine-3'-phosphorothioate
  modified_base 13: mod_base = OTHER; note = 5-methyl-2'-deoxycytidine-3'-phosphorothioate
  modified_base 14: mod_base = OTHER; note = 2'-deoxythymidine-3'-phosphorothioate
  modified_base 15: mod_base = OTHER; note = Beta-L-cytidine-3'-phosphorothioate
  modified_base 16: mod_base = OTHER; note = Beta-L-thymidine-3'-phosphorothioate
  modified_base 17: mod_base = OTHER; note = Beta-L-thymidine-3'-phosphate
  misc_feature 1..3: note = RNA
  misc_feature 4..14: note = DNA
  misc_feature 15..17: note = RNA
ggtgcgcacgggctctt

SEQ ID NO: 841 - DNA, 17 bp, synthetic construct
  source 1..17: mol_type = other DNA
  modified_base 1: mod_base = OTHER; note = Beta-L-adenosine-3'-phosphorothioate
  modified_base 2: mod_base = OTHER; note = Beta-L-adenosine-3'-phosphorothioate
  modified_base 3: mod_base = OTHER; note = Beta-L-guanosine-3'-phosphorothioate
  modified_base 4: mod_base = OTHER; note = 2'-deoxyadenosine-3'-phosphorothioate
  modified_base 5: mod_base = OTHER; note = 2'-deoxythymidine-3'-phosphorothioate
  modified_base 6: mod_base = OTHER; note = 5-methyl-2'-deoxycytidine-3'-phosphorothioate
  modified_base 7: mod_base = OTHER; note = 5-methyl-2'-deoxycytidine-3'-phosphorothioate
  modified_base 8: mod_base = OTHER; note = 5-methyl-2'-deoxycytidine-3'-phosphorothioate
  modified_base 9: mod_base = OTHER; note = 5-methyl-2'-deoxycytidine-3'-phosphorothioate
  modified_base 10: mod_base = OTHER; note = 2'-deoxyadenosine-3'-phosphorothioate
  modified_base 11: mod_base = OTHER; note = 2'-deoxythymidine-3'-phosphorothioate
  modified_base 12: mod_base = OTHER; note = 2'-deoxyguanosine-3'-phosphorothioate
  modified_base 13: mod_base = OTHER; note = 2'-deoxythymidine-3'-phosphorothioate
  modified_base 14: mod_base = OTHER; note = 2'-deoxyadenosine-3'-phosphorothioate
  modified_base 15: mod_base = OTHER; note = Beta-L-guanosine-3'-phosphorothioate
  modified_base 16: mod_base = OTHER; note = Beta-L-cytidine-3'-phosphorothioate
  modified_base 17: mod_base = OTHER; note = Beta-L-guanosine-3'-phosphate
  misc_feature 1..3: note = RNA
  misc_feature 4..14: note = DNA
  misc_feature 15..17: note = RNA
aagatccccatgtagcg

SEQ ID NO: 842 - DNA, 17 bp, synthetic construct
  source 1..17: mol_type = other DNA
  modified_base 1: mod_base = OTHER; note = Beta-L-thymidine-3'-phosphorothioate
  modified_base 2: mod_base = OTHER; note = Beta-L-cytidine-3'-phosphorothioate
  modified_base 3: mod_base = OTHER; note = Beta-L-cytidine-3'-phosphorothioate
  modified_base 4: mod_base = OTHER; note = 2'-deoxyguanosine-3'-phosphorothioate
  modified_base 5: mod_base = OTHER; note = 2'-deoxyguanosine-3'-phosphorothioate
  modified_base 6: mod_base = OTHER; note = 2'-deoxythymidine-3'-phosphorothioate
  modified_base 7: mod_base = OTHER; note = 5-methyl-2'-deoxycytidine-3'-phosphorothioate
  modified_base 8: mod_base = OTHER; note = 5-methyl-2'-deoxycytidine-3'-phosphorothioate
  modified_base 9: mod_base = OTHER; note = 5-methyl-2'-deoxycytidine-3'-phosphorothioate
  modified_base 10: mod_base = OTHER; note = 2'-deoxyadenosine-3'-phosphorothioate
  modified_base 11: mod_base = OTHER; note = 2'-deoxyguanosine-3'-phosphorothioate
  modified_base 12: mod_base = OTHER; note = 2'-deoxyguanosine-3'-phosphorothioate
  modified_base 13: mod_base = OTHER; note = 2'-deoxyadenosine-3'-phosphorothioate
  modified_base 14: mod_base = OTHER; note = 5-methyl-2'-deoxycytidine-3'-phosphorothioate
  modified_base 15: mod_base = OTHER; note = Beta-L-adenosine-3'-phosphorothioate
  modified_base 16: mod_base = OTHER; note = Beta-L-cytidine-3'-phosphorothioate
  modified_base 17: mod_base = OTHER; note = Beta-L-guanosine-3'-phosphate
  misc_feature 1..3: note = RNA
  misc_feature 4..14: note = DNA
  misc_feature 15..17: note = RNA
tccggtcccaggacacg

SEQ ID NO: 843 - DNA, 17 bp, synthetic construct
  source 1..17: mol_type = other DNA
  modified_base 1: mod_base = OTHER; note = Beta-L-guanosine-3'-phosphorothioate
  modified_base 2: mod_base = OTHER; note = Beta-L-guanosine-3'-phosphorothioate
  modified_base 3: mod_base = OTHER; note = Beta-L-thymidine-3'-phosphorothioate
  modified_base 4: mod_base = OTHER; note = 2'-deoxyguanosine-3'-phosphorothioate
  modified_base 5: mod_base = OTHER; note = 5-methyl-2'-deoxycytidine-3'-phosphorothioate
  modified_base 6: mod_base = OTHER; note = 2'-deoxyadenosine-3'-phosphorothioate
  modified_base 7: mod_base = OTHER; note = 2'-deoxyguanosine-3'-phosphorothioate
  modified_base 8: mod_base = OTHER; note = 2'-deoxythymidine-3'-phosphorothioate
  modified_base 9: mod_base = OTHER; note = 5-methyl-2'-deoxycytidine-3'-phosphorothioate
  modified_base 10: mod_base = OTHER; note = 2'-deoxyguanosine-3'-phosphorothioate
  modified_base 11: mod_base = OTHER; note = 2'-deoxyguanosine-3'-phosphorothioate
  modified_base 12: mod_base = OTHER; note = 2'-deoxyadenosine-3'-phosphorothioate
  modified_base 13: mod_base = OTHER; note = 2'-deoxythymidine-3'-phosphorothioate
  modified_base 14: mod_base = OTHER; note = 2'-deoxyguanosine-3'-phosphorothioate
  modified_base 15: mod_base = OTHER; note = Beta-L-adenosine-3'-phosphorothioate
  modified_base 16: mod_base = OTHER; note = Beta-L-adenosine-3'-phosphorothioate
  modified_base 17: mod_base = OTHER; note = Beta-L-cytidine-3'-phosphate
  misc_feature 1..3: note = RNA
  misc_feature 4..14: note = DNA
  misc_feature 15..17: note = RNA
ggtgcagtcggatgaac

SEQ ID NO: 844 - DNA, 17 bp, synthetic construct
  source 1..17: mol_type = other DNA
  modified_base 1: mod_base = OTHER; note = Beta-L-thymidine-3'-phosphorothioate
  modified_base 2: mod_base = OTHER; note = Beta-L-guanosine-3'-phosphorothioate
  modified_base 3: mod_base = OTHER; note = Beta-L-guanosine-3'-phosphorothioate
  modified_base 4: mod_base = OTHER; note = 2'-deoxythymidine-3'-phosphorothioate
  modified_base 5: mod_base = OTHER; note = 2'-deoxyguanosine-3'-phosphorothioate
  modified_base 6: mod_base = OTHER; note = 5-methyl-2'-deoxycytidine-3'-phosphorothioate
  modified_base 7: mod_base = OTHER; note = 2'-deoxyadenosine-3'-phosphorothioate
  modified_base 8: mod_base = OTHER; note = 2'-deoxyguanosine-3'-phosphorothioate
  modified_base 9: mod_base = OTHER; note = 2'-deoxythymidine-3'-phosphorothioate
  modified_base 10: mod_base = OTHER; note = 5-methyl-2'-deoxycytidine-3'-phosphorothioate
  modified_base 11: mod_base = OTHER; note = 2'-deoxyguanosine-3'-phosphorothioate
  modified_base 12: mod_base = OTHER; note = 2'-deoxyguanosine-3'-phosphorothioate
  modified_base 13: mod_base = OTHER; note = 2'-deoxyadenosine-3'-phosphorothioate
  modified_base 14: mod_base = OTHER; note = 2'-deoxythymidine-3'-phosphorothioate
  modified_base 15: mod_base = OTHER; note = Beta-L-guanosine-3'-phosphorothioate
  modified_base 16: mod_base = OTHER; note = Beta-L-adenosine-3'-phosphorothioate
  modified_base 17: mod_base = OTHER; note = Beta-L-adenosine-3'-phosphate
  misc_feature 1..3: note = RNA
  misc_feature 4..14: note = DNA
  misc_feature 15..17: note = RNA
tggtgcagtcggatgaa

SEQ ID NO: 845 - DNA, 17 bp, synthetic construct
  source 1..17: mol_type = other DNA
  modified_base 1: mod_base = OTHER; note = Beta-L-guanosine-3'-phosphorothioate
  modified_base 2: mod_base = OTHER; note = Beta-L-thymidine-3'-phosphorothioate
  modified_base 3: mod_base = OTHER; note = Beta-L-guanosine-3'-phosphorothioate
  modified_base 4: mod_base = OTHER; note = 2'-deoxythymidine-3'-phosphorothioate
  modified_base 5: mod_base = OTHER; note = 2'-deoxyguanosine-3'-phosphorothioate
  modified_base 6: mod_base = OTHER; note = 5-methyl-2'-deoxycytidine-3'-phosphorothioate
  modified_base 7: mod_base = OTHER; note = 5-methyl-2'-deoxycytidine-3'-phosphorothioate
  modified_base 8: mod_base = OTHER; note = 2'-deoxyguanosine-3'-phosphorothioate
  modified_base 9: mod_base = OTHER; note = 2'-deoxythymidine-3'-phosphorothioate
  modified_base 10: mod_base = OTHER; note = 2'-deoxyguanosine-3'-phosphorothioate
  modified_base 11: mod_base = OTHER; note = 2'-deoxyguanosine-3'-phosphorothioate
  modified_base 12: mod_base = OTHER; note = 2'-deoxyguanosine-3'-phosphorothioate
  modified_base 13: mod_base = OTHER; note = 2'-deoxyadenosine-3'-phosphorothioate
  modified_base 14: mod_base = OTHER; note = 5-methyl-2'-deoxycytidine-3'-phosphorothioate
  modified_base 15: mod_base = OTHER; note = Beta-L-adenosine-3'-phosphorothioate
  modified_base 16: mod_base = OTHER; note = Beta-L-thymidine-3'-phosphorothioate
  modified_base 17: mod_base = OTHER; note = Beta-L-guanosine-3'-phosphate
  misc_feature 1..3: note = RNA
  misc_feature 4..14: note = DNA
  misc_feature 15..17: note = RNA
gtgtgccgtgggacatg

SEQ ID NO: 846 - DNA, 17 bp, synthetic construct
  source 1..17: mol_type = other DNA
  modified_base 1: mod_base = OTHER; note = Beta-L-cytidine-3'-phosphorothioate
  modified_base 2: mod_base = OTHER; note = Beta-L-thymidine-3'-phosphorothioate
  modified_base 3: mod_base = OTHER; note = Beta-L-cytidine-3'-phosphorothioate
  modified_base 4: mod_base = OTHER; note = 2'-deoxyguanosine-3'-phosphorothioate
  modified_base 5: mod_base = OTHER; note = 2'-deoxythymidine-3'-phosphorothioate
  modified_base 6: mod_base = OTHER; note = 2'-deoxyadenosine-3'-phosphorothioate
  modified_base 7: mod_base = OTHER; note = 2'-deoxyguanosine-3'-phosphorothioate
  modified_base 8: mod_base = OTHER; note = 2'-deoxythymidine-3'-phosphorothioate
  modified_base 9: mod_base = OTHER; note = 2'-deoxyadenosine-3'-phosphorothioate
  modified_base 10: mod_base = OTHER; note = 5-methyl-2'-deoxycytidine-3'-phosphorothioate
  modified_base 11: mod_base = OTHER; note = 2'-deoxythymidine-3'-phosphorothioate
  modified_base 12: mod_base = OTHER; note = 2'-deoxythymidine-3'-phosphorothioate
  modified_base 13: mod_base = OTHER; note = 2'-deoxyguanosine-3'-phosphorothioate
  modified_base 14: mod_base = OTHER; note = 2'-deoxyguanosine-3'-phosphorothioate
  modified_base 15: mod_base = OTHER; note = Beta-L-thymidine-3'-phosphorothioate
  modified_base 16: mod_base = OTHER; note = Beta-L-guanosine-3'-phosphorothioate
  modified_base 17: mod_base = OTHER; note = Beta-L-guanosine-3'-phosphate
  misc_feature 1..3: note = RNA
  misc_feature 4..14: note = DNA
  misc_feature 15..17: note = RNA
ctcgtagtacttggtgg

SEQ ID NO: 847 - DNA, 17 bp, synthetic construct
  source 1..17: mol_type = other DNA
  modified_base 1: mod_base = OTHER; note = Beta-L-guanosine-3'-phosphorothioate
  modified_base 2: mod_base = OTHER; note = Beta-L-thymidine-3'-phosphorothioate
  modified_base 3: mod_base = OTHER; note = Beta-L-cytidine-3'-phosphorothioate
  modified_base 4: mod_base = OTHER; note = 5-methyl-2'-deoxycytidine-3'-phosphorothioate
  modified_base 5: mod_base = OTHER; note = 2'-deoxyguanosine-3'-phosphorothioate
  modified_base 6: mod_base = OTHER; note = 2'-deoxyguanosine-3'-phosphorothioate
  modified_base 7: mod_base = OTHER; note = 2'-deoxyadenosine-3'-phosphorothioate
  modified_base 8: mod_base = OTHER; note = 2'-deoxyguanosine-3'-phosphorothioate
  modified_base 9: mod_base = OTHER; note = 2'-deoxythymidine-3'-phosphorothioate
  modified_base 10: mod_base = OTHER; note = 5-methyl-2'-deoxycytidine-3'-phosphorothioate
  modified_base 11: mod_base = OTHER; note = 5-methyl-2'-deoxycytidine-3'-phosphorothioate
  modified_base 12: mod_base = OTHER; note = 2'-deoxyguanosine-3'-phosphorothioate
  modified_base 13: mod_base = OTHER; note = 5-methyl-2'-deoxycytidine-3'-phosphorothioate
  modified_base 14: mod_base = OTHER; note = 5-methyl-2'-deoxycytidine-3'-phosphorothioate
  modified_base 15: mod_base = OTHER; note = Beta-L-adenosine-3'-phosphorothioate
  modified_base 16: mod_base = OTHER; note = Beta-L-guanosine-3'-phosphorothioate
  modified_base 17: mod_base = OTHER; note = Beta-L-guanosine-3'-phosphate
  misc_feature 1..3: note = RNA
  misc_feature 4..14: note = DNA
  misc_feature 15..17: note = RNA
gtccggagtccgccagg

SEQ ID NO: 848 - DNA, 17 bp, synthetic construct
  source 1..17: mol_type = other DNA
  modified_base 1: mod_base = OTHER; note = Beta-L-thymidine-3'-phosphorothioate
  modified_base 2: mod_base = OTHER; note = Beta-L-guanosine-3'-phosphorothioate
  modified_base 3: mod_base = OTHER; note = Beta-L-thymidine-3'-phosphorothioate
  modified_base 4: mod_base = OTHER; note = 5-methyl-2'-deoxycytidine-3'-phosphorothioate
  modified_base 5: mod_base = OTHER; note = 5-methyl-2'-deoxycytidine-3'-phosphorothioate
  modified_base 6: mod_base = OTHER; note = 2'-deoxyguanosine-3'-phosphorothioate
  modified_base 7: mod_base = OTHER; note = 2'-deoxyguanosine-3'-phosphorothioate
  modified_base 8: mod_base = OTHER; note = 2'-deoxyadenosine-3'-phosphorothioate
  modified_base 9: mod_base = OTHER; note = 2'-deoxyguanosine-3'-phosphorothioate
  modified_base 10: mod_base = OTHER; note = 2'-deoxythymidine-3'-phosphorothioate
  modified_base 11: mod_base = OTHER; note = 5-methyl-2'-deoxycytidine-3'-phosphorothioate
  modified_base 12: mod_base = OTHER; note = 5-methyl-2'-deoxycytidine-3'-phosphorothioate
  modified_base 13: mod_base = OTHER; note = 2'-deoxyguanosine-3'-phosphorothioate
  modified_base 14: mod_base = OTHER; note = 5-methyl-2'-deoxycytidine-3'-phosphorothioate
  modified_base 15: mod_base = OTHER; note = Beta-L-cytidine-3'-phosphorothioate
  modified_base 16: mod_base = OTHER; note = Beta-L-adenosine-3'-phosphorothioate
  modified_base 17: mod_base = OTHER; note = Beta-L-guanosine-3'-phosphate
  misc_feature 1..3: note = RNA
  misc_feature 4..14: note = DNA
  misc_feature 15..17: note = RNA
tgtccggagtccgccag

SEQ ID NO: 849 - DNA, 17 bp, synthetic construct
  source 1..17: mol_type = other DNA
  modified_base 1: mod_base = OTHER; note = Beta-L-guanosine-3'-phosphorothioate
  modified_base 2: mod_base = OTHER; note = Beta-L-thymidine-3'-phosphorothioate
  modified_base 3: mod_base = OTHER; note = Beta-L-guanosine-3'-phosphorothioate
  modified_base 4: mod_base = OTHER; note = 2'-deoxythymidine-3'-phosphorothioate
  modified_base 5: mod_base = OTHER; note = 5-methyl-2'-deoxycytidine-3'-phosphorothioate
  modified_base 6: mod_base = OTHER; note = 5-methyl-2'-deoxycytidine-3'-phosphorothioate
  modified_base 7: mod_base = OTHER; note = 2'-deoxyguanosine-3'-phosphorothioate
  modified_base 8: mod_base = OTHER; note = 2'-deoxyguanosine-3'-phosphorothioate
  modified_base 9: mod_base = OTHER; note = 2'-deoxyadenosine-3'-phosphorothioate
  modified_base 10: mod_base = OTHER; note = 2'-deoxyguanosine-3'-phosphorothioate
  modified_base 11: mod_base = OTHER; note = 2'-deoxythymidine-3'-phosphorothioate
  modified_base 12: mod_base = OTHER; note = 5-methyl-2'-deoxycytidine-3'-phosphorothioate
  modified_base 13: mod_base = OTHER; note = 5-methyl-2'-deoxycytidine-3'-phosphorothioate
  modified_base 14: mod_base = OTHER; note = 2'-deoxyguanosine-3'-phosphorothioate
  modified_base 15: mod_base = OTHER; note = Beta-L-cytidine-3'-phosphorothioate
  modified_base 16: mod_base = OTHER; note = Beta-L-cytidine-3'-phosphorothioate
  modified_base 17: mod_base = OTHER; note = Beta-L-adenosine-3'-phosphate
  misc_feature 1..3: note = RNA
  misc_feature 4..14: note = DNA
  misc_feature 15..17: note = RNA
gtgtccggagtccgcca

SEQ ID NO: 850 - DNA, 17 bp, synthetic construct
  source 1..17: mol_type = other DNA
  modified_base 1: mod_base = OTHER; note = Beta-L-adenosine-3'-phosphorothioate
  modified_base 2: mod_base = OTHER; note = Beta-L-cytidine-3'-phosphorothioate
  modified_base 3: mod_base = OTHER; note = Beta-L-guanosine-3'-phosphorothioate
  modified_base 4: mod_base = OTHER; note = 2'-deoxyguanosine-3'-phosphorothioate
  modified_base 5: mod_base = OTHER; note = 5-methyl-2'-deoxycytidine-3'-phosphorothioate
  modified_base 6: mod_base = OTHER; note = 2'-deoxyadenosine-3'-phosphorothioate
  modified_base 7: mod_base = OTHER; note = 2'-deoxyguanosine-3'-phosphorothioate
  modified_base 8: mod_base = OTHER; note = 2'-deoxyguanosine-3'-phosphorothioate
  modified_base 9: mod_base = OTHER; note = 2'-deoxythymidine-3'-phosphorothioate
  modified_base 10: mod_base = OTHER; note = 2'-deoxyguanosine-3'-phosphorothioate
  modified_base 11: mod_base = OTHER; note = 2'-deoxythymidine-3'-phosphorothioate
  modified_base 12: mod_base = OTHER; note = 5-methyl-2'-deoxycytidine-3'-phosphorothioate
  modified_base 13: mod_base = OTHER; note = 5-methyl-2'-deoxycytidine-3'-phosphorothioate
  modified_base 14: mod_base = OTHER; note = 2'-deoxyguanosine-3'-phosphorothioate
  modified_base 15: mod_base = OTHER; note = Beta-L-guanosine-3'-phosphorothioate
  modified_base 16: mod_base = OTHER; note = Beta-L-adenosine-3'-phosphorothioate
  modified_base 17: mod_base = OTHER; note = Beta-L-guanosine-3'-phosphate
  misc_feature 1..3: note = RNA
  misc_feature 4..14: note = DNA
  misc_feature 15..17: note = RNA
acggcaggtgtccggag

SEQ ID NO: 851 - DNA, 17 bp, synthetic construct
  source 1..17: mol_type = other DNA
  modified_base 1: mod_base = OTHER; note = Beta-L-cytidine-3'-phosphorothioate
  modified_base 2: mod_base = OTHER; note = Beta-L-adenosine-3'-phosphorothioate
  modified_base 3: mod_base = OTHER; note = Beta-L-cytidine-3'-phosphorothioate
  modified_base 4: mod_base = OTHER; note = 2'-deoxyguanosine-3'-phosphorothioate
  modified_base 5: mod_base = OTHER; note = 2'-deoxyguanosine-3'-phosphorothioate
  modified_base 6: mod_base = OTHER; note = 5-methyl-2'-deoxycytidine-3'-phosphorothioate
  modified_base 7: mod_base = OTHER; note = 2'-deoxyadenosine-3'-phosphorothioate
  modified_base 8: mod_base = OTHER; note = 2'-deoxyguanosine-3'-phosphorothioate
  modified_base 9: mod_base = OTHER; note = 2'-deoxyguanosine-3'-phosphorothioate
  modified_base 10: mod_base = OTHER; note = 2'-deoxythymidine-3'-phosphorothioate
  modified_base 11: mod_base = OTHER; note = 2'-deoxyguanosine-3'-phosphorothioate
  modified_base 12: mod_base = OTHER; note = 2'-deoxythymidine-3'-phosphorothioate
  modified_base 13: mod_base = OTHER; note = 5-methyl-2'-deoxycytidine-3'-phosphorothioate
  modified_base 14: mod_base = OTHER; note = 5-methyl-2'-deoxycytidine-3'-phosphorothioate
  modified_base 15: mod_base = OTHER; note = Beta-L-guanosine-3'-phosphorothioate
  modified_base 16: mod_base = OTHER; note = Beta-L-guanosine-3'-phosphorothioate
  modified_base 17: mod_base = OTHER; note = Beta-L-adenosine-3'-phosphate
  misc_feature 1..3: note = RNA
  misc_feature 4..14: note = DNA
  misc_feature 15..17: note = RNA
cacggcaggtgtccgga

SEQ ID NO: 852 - DNA, 17 bp, synthetic construct
  source 1..17: mol_type = other DNA
  modified_base 1: mod_base = OTHER; note = Beta-L-cytidine-3'-phosphorothioate
  modified_base 2: mod_base = OTHER; note = Beta-L-cytidine-3'-phosphorothioate
  modified_base 3: mod_base = OTHER; note = Beta-L-cytidine-3'-phosphorothioate
  modified_base 4: mod_base = OTHER; note = 2'-deoxyguanosine-3'-phosphorothioate
  modified_base 5: mod_base = OTHER; note = 2'-deoxyadenosine-3'-phosphorothioate
  modified_base 6: mod_base = OTHER; note = 5-methyl-2'-deoxycytidine-3'-phosphorothioate
  modified_base 7: mod_base = OTHER; note = 2'-deoxythymidine-3'-phosphorothioate
  modified_base 8: mod_base = OTHER; note = 5-methyl-2'-deoxycytidine-3'-phosphorothioate
  modified_base 9: mod_base = OTHER; note = 2'-deoxyadenosine-3'-phosphorothioate
  modified_base 10: mod_base = OTHER; note = 5-methyl-2'-deoxycytidine-3'-phosphorothioate
  modified_base 11: mod_base = OTHER; note = 2'-deoxyguanosine-3'-phosphorothioate
  modified_base 12: mod_base = OTHER; note = 2'-deoxyguanosine-3'-phosphorothioate
  modified_base 13: mod_base = OTHER; note = 5-methyl-2'-deoxycytidine-3'-phosphorothioate
  modified_base 14: mod_base = OTHER; note = 2'-deoxyadenosine-3'-phosphorothioate
  modified_base 15: mod_base = OTHER; note = Beta-L-guanosine-3'-phosphorothioate
  modified_base 16: mod_base = OTHER; note = Beta-L-guanosine-3'-phosphorothioate
  modified_base 17: mod_base = OTHER; note = Beta-L-thymidine-3'-phosphate
  misc_feature 1..3: note = RNA
  misc_feature 4..14: note = DNA
  misc_feature 15..17: note = RNA
cccgactcacggcaggt

SEQ ID NO: 853 - DNA, 17 bp, synthetic construct
  source 1..17: mol_type = other DNA
  modified_base 1: mod_base = OTHER; note = Beta-L-adenosine-3'-phosphorothioate
  modified_base 2: mod_base = OTHER; note = Beta-L-cytidine-3'-phosphorothioate
  modified_base 3: mod_base = OTHER; note = Beta-L-guanosine-3'-phosphorothioate
  modified_base 4: mod_base = OTHER; note = 2'-deoxyguanosine-3'-phosphorothioate
  modified_base 5: mod_base = OTHER; note = 2'-deoxyadenosine-3'-phosphorothioate
  modified_base 6: mod_base = OTHER; note = 5-methyl-2'-deoxycytidine-3'-phosphorothioate
  modified_base 7: mod_base = OTHER; note = 2'-deoxyadenosine-3'-phosphorothioate
  modified_base 8: mod_base = OTHER; note = 2'-deoxyguanosine-3'-phosphorothioate
  modified_base 9: mod_base = OTHER; note = 2'-deoxyadenosine-3'-phosphorothioate
  modified_base 10: mod_base = OTHER; note = 2'-deoxyguanosine-3'-phosphorothioate
  modified_base 11: mod_base = OTHER; note = 5-methyl-2'-deoxycytidine-3'-phosphorothioate
  modified_base 12: mod_base = OTHER; note = 5-methyl-2'-deoxycytidine-3'-phosphorothioate
  modified_base 13: mod_base = OTHER; note = 5-methyl-2'-deoxycytidine-3'-phosphorothioate
  modified_base 14: mod_base = OTHER; note = 2'-deoxyguanosine-3'-phosphorothioate
  modified_base 15: mod_base = OTHER; note = Beta-L-adenosine-3'-phosphorothioate
  modified_base 16: mod_base = OTHER; note = Beta-L-cytidine-3'-phosphorothioate
  modified_base 17: mod_base = OTHER; note = Beta-L-thymidine-3'-phosphate
  misc_feature 1..3: note = RNA
  misc_feature 4..14: note = DNA
  misc_feature 15..17: note = RNA
acggacagagcccgact

SEQ ID NO: 854 - DNA, 17 bp, synthetic construct
  source 1..17: mol_type = other DNA
  modified_base 1: mod_base = OTHER; note = Beta-L-adenosine-3'-phosphorothioate
  modified_base 2: mod_base = OTHER; note = Beta-L-thymidine-3'-phosphorothioate
  modified_base 3: mod_base = OTHER; note = Beta-L-guanosine-3'-phosphorothioate
  modified_base 4: mod_base = OTHER; note = 5-methyl-2'-deoxycytidine-3'-phosphorothioate
  modified_base 5: mod_base = OTHER; note = 2'-deoxyguanosine-3'-phosphorothioate
  modified_base 6: mod_base = OTHER; note = 2'-deoxythymidine-3'-phosphorothioate
  modified_base 7: mod_base = OTHER; note = 2'-deoxyguanosine-3'-phosphorothioate
  modified_base 8: mod_base = OTHER; note = 2'-deoxythymidine-3'-phosphorothioate
  modified_base 9: mod_base = OTHER; note = 2'-deoxythymidine-3'-phosphorothioate
  modified_base 10: mod_base = OTHER; note = 2'-deoxyguanosine-3'-phosphorothioate
  modified_base 11: mod_base = OTHER; note = 2'-deoxyguanosine-3'-phosphorothioate
  modified_base 12: mod_base = OTHER; note = 2'-deoxyadenosine-3'-phosphorothioate
  modified_base 13: mod_base = OTHER; note = 2'-deoxythymidine-3'-phosphorothioate
  modified_base 14: mod_base = OTHER; note = 2'-deoxyguanosine-3'-phosphorothioate
  modified_base 15: mod_base = OTHER; note = Beta-L-thymidine-3'-phosphorothioate
  modified_base 16: mod_base = OTHER; note = Beta-L-cytidine-3'-phosphorothioate
  modified_base 17: mod_base = OTHER; note = Beta-L-thymidine-3'-phosphate
  misc_feature 1..3: note = RNA
  misc_feature 4..14: note = DNA
  misc_feature 15..17: note = RNA
atgcgtgttggatgtct

SEQ ID NO: 855 - DNA, 17 bp, synthetic construct
  source 1..17: mol_type = other DNA
  modified_base 1: mod_base = OTHER; note = Beta-L-adenosine-3'-phosphorothioate
  modified_base 2: mod_base = OTHER; note = Beta-L-cytidine-3'-phosphorothioate
  modified_base 3: mod_base = OTHER; note = Beta-L-adenosine-3'-phosphorothioate
  modified_base 4: mod_base = OTHER; note = 2'-deoxythymidine-3'-phosphorothioate
  modified_base 5: mod_base = OTHER; note = 2'-deoxyguanosine-3'-phosphorothioate
  modified_base 6: mod_base = OTHER; note = 5-methyl-2'-deoxycytidine-3'-phosphorothioate
  modified_base 7: mod_base = OTHER; note = 2'-deoxyguanosine-3'-phosphorothioate
  modified_base 8: mod_base = OTHER; note = 2'-deoxythymidine-3'-phosphorothioate
  modified_base 9: mod_base = OTHER; note = 2'-deoxyguanosine-3'-phosphorothioate
  modified_base 10: mod_base = OTHER; note = 2'-deoxythymidine-3'-phosphorothioate
  modified_base 11: mod_base = OTHER; note = 2'-deoxythymidine-3'-phosphorothioate
  modified_base 12: mod_base = OTHER; note = 2'-deoxyguanosine-3'-phosphorothioate
  modified_base 13: mod_base = OTHER; note = 2'-deoxyguanosine-3'-phosphorothioate
  modified_base 14: mod_base = OTHER; note = 2'-deoxyadenosine-3'-phosphorothioate
  modified_base 15: mod_base = OTHER; note = Beta-L-thymidine-3'-phosphorothioate
  modified_base 16: mod_base = OTHER; note = Beta-L-guanosine-3'-phosphorothioate
  modified_base 17: mod_base = OTHER; note = Beta-L-thymidine-3'-phosphate
  misc_feature 1..3: note = RNA
  misc_feature 4..14: note = DNA
  misc_feature 15..17: note = RNA
acatgcgtgttggatgt

SEQ ID NO: 856 - DNA, 17 bp, synthetic construct
  source 1..17: mol_type = other DNA
  modified_base 1: mod_base = OTHER; note = Beta-L-guanosine-3'-phosphorothioate
  modified_base 2: mod_base = OTHER; note = Beta-L-guanosine-3'-phosphorothioate
  modified_base 3: mod_base = OTHER; note = Beta-L-cytidine-3'-phosphorothioate
  modified_base 4: mod_base = OTHER; note = 2'-deoxyadenosine-3'-phosphorothioate
  modified_base 5: mod_base = OTHER; note = 5-methyl-2'-deoxycytidine-3'-phosphorothioate
  modified_base 6: mod_base = OTHER; note = 2'-deoxyadenosine-3'-phosphorothioate
  modified_base 7: mod_base = OTHER; note = 2'-deoxythymidine-3'-phosphorothioate
  modified_base 8: mod_base = OTHER; note = 2'-deoxyguanosine-3'-phosphorothioate
  modified_base 9: mod_base = OTHER; note = 5-methyl-2'-deoxycytidine-3'-phosphorothioate
  modified_base 10: mod_base = OTHER; note = 2'-deoxyguanosine-3'-phosphorothioate
  modified_base 11: mod_base = OTHER; note = 2'-deoxythymidine-3'-phosphorothioate
  modified_base 12: mod_base = OTHER; note = 2'-deoxyguanosine-3'-phosphorothioate
  modified_base 13: mod_base = OTHER; note = 2'-deoxythymidine-3'-phosphorothioate
  modified_base 14: mod_base = OTHER; note = 2'-deoxythymidine-3'-phosphorothioate
  modified_base 15: mod_base = OTHER; note = Beta-L-guanosine-3'-phosphorothioate
  modified_base 16: mod_base = OTHER; note = Beta-L-guanosine-3'-phosphorothioate
  modified_base 17: mod_base = OTHER; note = Beta-L-adenosine-3'-phosphate
  misc_feature 1..3: note = RNA
  misc_feature 4..14: note = DNA
  misc_feature 15..17: note = RNA
ggcacatgcgtgttgga

SEQ ID NO: 857 - DNA, 17 bp, synthetic construct
  source 1..17: mol_type = other DNA
  modified_base 1: mod_base = OTHER; note = Beta-L-thymidine-3'-phosphorothioate
  modified_base 2: mod_base = OTHER; note = Beta-L-cytidine-3'-phosphorothioate
  modified_base 3: mod_base = OTHER; note = Beta-L-guanosine-3'-phosphorothioate
  modified_base 4: mod_base = OTHER; note = 2'-deoxyguanosine-3'-phosphorothioate
  modified_base 5: mod_base = OTHER; note = 2'-deoxyguanosine-3'-phosphorothioate
  modified_base 6: mod_base = OTHER; note = 2'-deoxythymidine-3'-phosphorothioate
  modified_base 7: mod_base = OTHER; note = 2'-deoxyadenosine-3'-phosphorothioate
  modified_base 8: mod_base = OTHER; note = 2'-deoxyguanosine-3'-phosphorothioate
  modified_base 9: mod_base = OTHER; note = 5-methyl-2'-deoxycytidine-3'-phosphorothioate
  modified_base 10: mod_base = OTHER; note = 2'-deoxyadenosine-3'-phosphorothioate
  modified_base 11: mod_base = OTHER; note = 2'-deoxyguanosine-3'-phosphorothioate
  modified_base 12: mod_base = OTHER; note = 5-methyl-2'-deoxycytidine-3'-phosphorothioate
  modified_base 13: mod_base = OTHER; note = 5-methyl-2'-deoxycytidine-3'-phosphorothioate
  modified_base 14: mod_base = OTHER; note = 2'-deoxythymidine-3'-phosphorothioate
  modified_base 15: mod_base = OTHER; note = Beta-L-adenosine-3'-phosphorothioate
  modified_base 16: mod_base = OTHER; note = Beta-L-guanosine-3'-phosphorothioate
  modified_base 17: mod_base = OTHER; note = Beta-L-guanosine-3'-phosphate
  misc_feature 1..3: note = RNA
  misc_feature 4..14: note = DNA
  misc_feature 15..17: note = RNA
tcgggtagcagcctagg

SEQ ID NO: 858 - DNA, 17 bp, synthetic construct
  source 1..17: mol_type = other DNA
  modified_base 1: mod_base = OTHER; note = Beta-L-thymidine-3'-phosphorothioate
  modified_base 2: mod_base = OTHER; note = Beta-L-thymidine-3'-phosphorothioate
  modified_base 3: mod_base = OTHER; note = Beta-L-guanosine-3'-phosphorothioate
  modified_base 4: mod_base = OTHER; note = 2'-deoxythymidine-3'-phosphorothioate
  modified_base 5: mod_base = OTHER; note = 2'-deoxyadenosine-3'-phosphorothioate
  modified_base 6: mod_base = OTHER; note = 2'-deoxyguanosine-3'-phosphorothioate
  modified_base 7: mod_base = OTHER; note = 2'-deoxyadenosine-3'-phosphorothioate
  modified_base 8: mod_base = OTHER; note = 2'-deoxythymidine-3'-phosphorothioate
  modified_base 9: mod_base = OTHER; note = 2'-deoxyguanosine-3'-phosphorothioate
  modified_base 10: mod_base = OTHER; note = 2'-deoxyadenosine-3'-phosphorothioate
  modified_base 11: mod_base = OTHER; note = 5-methyl-2'-deoxycytidine-3'-phosphorothioate
  modified_base 12: mod_base = OTHER; note = 2'-deoxyguanosine-3'-phosphorothioate
  modified_base 13: mod_base = OTHER; note = 2'-deoxythymidine-3'-phosphorothioate
  modified_base 14: mod_base = OTHER; note = 5-methyl-2'-deoxycytidine-3'-phosphorothioate
  modified_base 15: mod_base = OTHER; note = Beta-L-cytidine-3'-phosphorothioate
  modified_base 16: mod_base = OTHER; note = Beta-L-thymidine-3'-phosphorothioate
  modified_base 17: mod_base = OTHER; note = Beta-L-guanosine-3'-phosphate
  misc_feature 1..3: note = RNA
  misc_feature 4..14: note = DNA
  misc_feature 15..17: note = RNA
ttgtagatgacgtcctg

SEQ ID NO: 859 - DNA, 17 bp, synthetic construct
  source 1..17: mol_type = other DNA
  modified_base 1: mod_base = OTHER; note = Beta-L-guanosine-3'-phosphorothioate
  modified_base 2: mod_base = OTHER; note = Beta-L-adenosine-3'-phosphorothioate
  modified_base 3: mod_base = OTHER; note = Beta-L-cytidine-3'-phosphorothioate
  modified_base 4: mod_base = OTHER; note = 5-methyl-2'-deoxycytidine-3'-phosphorothioate
  modified_base 5: mod_base = OTHER; note = 2'-deoxythymidine-3'-phosphorothioate
  modified_base 6: mod_base = OTHER; note = 5-methyl-2'-deoxycytidine-3'-phosphorothioate
  modified_base 7: mod_base = OTHER; note = 2'-deoxyguanosine-3'-phosphorothioate
  modified_base 8: mod_base = OTHER; note = 5-methyl-2'-deoxycytidine-3'-phosphorothioate
  modified_base 9: mod_base = OTHER; note = 2'-deoxyguanosine-3'-phosphorothioate
  modified_base 10: mod_base = OTHER; note = 2'-deoxyguanosine-3'-phosphorothioate
  modified_base 11: mod_base = OTHER; note = 2'-deoxyadenosine-3'-phosphorothioate
  modified_base 12: mod_base = OTHER; note = 5-methyl-2'-deoxycytidine-3'-phosphorothioate
  modified_base 13: mod_base = OTHER; note = 2'-deoxyadenosine-3'-phosphorothioate
  modified_base 14: mod_base = OTHER; note = 5-methyl-2'-deoxycytidine-3'-phosphorothioate
  modified_base 15: mod_base = OTHER; note = Beta-L-adenosine-3'-phosphorothioate
  modified_base 16: mod_base = OTHER; note = Beta-L-cytidine-3'-phosphorothioate
  modified_base 17: mod_base = OTHER; note = Beta-L-adenosine-3'-phosphate
  misc_feature 1..3: note = RNA
  misc_feature 4..14: note = DNA
  misc_feature 15..17: note = RNA
gacctcgcggacacaca

SEQ ID NO: 860 - DNA, 17 bp, synthetic construct
  source 1..17: mol_type = other DNA
  modified_base 1: mod_base = OTHER; note = Beta-L-adenosine-3'-phosphorothioate
  modified_base 2: mod_base = OTHER; note = Beta-L-guanosine-3'-phosphorothioate
  modified_base 3: mod_base = OTHER; note = Beta-L-adenosine-3'-phosphorothioate
  modified_base 4: mod_base = OTHER; note = 5-methyl-2'-deoxycytidine-3'-phosphorothioate
  modified_base 5: mod_base = OTHER; note = 5-methyl-2'-deoxycytidine-3'-phosphorothioate
  modified_base 6: mod_base = OTHER; note = 2'-deoxythymidine-3'-phosphorothioate
  modified_base 7: mod_base = OTHER; note = 5-methyl-2'-deoxycytidine-3'-phosphorothioate
  modified_base 8: mod_base = OTHER; note = 2'-deoxyguanosine-3'-phosphorothioate
  modified_base 9: mod_base = OTHER; note = 5-methyl-2'-deoxycytidine-3'-phosphorothioate
  modified_base 10: mod_base = OTHER; note = 2'-deoxyguanosine-3'-phosphorothioate
  modified_base 11: mod_base = OTHER; note = 2'-deoxyguanosine-3'-phosphorothioate
  modified_base 12: mod_base = OTHER; note = 2'-deoxyadenosine-3'-phosphorothioate
  modified_base 13: mod_base = OTHER; note = 5-methyl-2'-deoxycytidine-3'-phosphorothioate
  modified_base 14: mod_base = OTHER; note = 2'-deoxyadenosine-3'-phosphorothioate
  modified_base 15: mod_base = OTHER; note = Beta-L-cytidine-3'-phosphorothioate
  modified_base 16: mod_base = OTHER; note = Beta-L-adenosine-3'-phosphorothioate
  modified_base 17: mod_base = OTHER; note = Beta-L-cytidine-3'-phosphate
  misc_feature 1..3: note = RNA
  misc_feature 4..14: note = DNA
  misc_feature 15..17: note = RNA
agacctcgcggacacac

SEQ ID NO: 861 - DNA, 17 bp, synthetic construct
  source 1..17: mol_type = other DNA
  modified_base 1: mod_base = OTHER; note = Beta-L-cytidine-3'-phosphorothioate
  modified_base 2: mod_base = OTHER; note = Beta-L-guanosine-3'-phosphorothioate
  modified_base 3: mod_base = OTHER; note = Beta-L-guanosine-3'-phosphorothioate
  modified_base 4: mod_base = OTHER; note = 5-methyl-2'-deoxycytidine-3'-phosphorothioate
  modified_base 5: mod_base = OTHER; note = 2'-deoxyadenosine-3'-phosphorothioate
  modified_base 6: mod_base = OTHER; note = 2'-deoxyguanosine-3'-phosphorothioate
  modified_base 7: mod_base = OTHER; note = 2'-deoxyadenosine-3'-phosphorothioate
  modified_base 8: mod_base = OTHER; note = 5-methyl-2'-deoxycytidine-3'-phosphorothioate
  modified_base 9: mod_base = OTHER; note = 5-methyl-2'-deoxycytidine-3'-phosphorothioate
  modified_base 10: mod_base = OTHER; note = 2'-deoxythymidine-3'-phosphorothioate
  modified_base 11: mod_base = OTHER; note = 5-methyl-2'-deoxycytidine-3'-phosphorothioate
  modified_base 12: mod_base = OTHER; note = 2'-deoxyguanosine-3'-phosphorothioate
  modified_base 13: mod_base = OTHER; note = 5-methyl-2'-deoxycytidine-3'-phosphorothioate
  modified_base 14: mod_base = OTHER; note = 2'-deoxyguanosine-3'-phosphorothioate
  modified_base 15: mod_base = OTHER; note = Beta-L-guanosine-3'-phosphorothioate
  modified_base 16: mod_base = OTHER; note = Beta-L-adenosine-3'-phosphorothioate
  modified_base 17: mod_base = OTHER; note = Beta-L-cytidine-3'-phosphate
  misc_feature 1..3: note = RNA
  misc_feature 4..14: note = DNA
  misc_feature 15..17: note = RNA
cggcagacctcgcggac

SEQ ID NO: 862 - DNA, 17 bp, synthetic construct
  source 1..17: mol_type = other DNA
  modified_base 1: mod_base = OTHER; note = Beta-L-thymidine-3'-phosphorothioate
  modified_base 2: mod_base = OTHER; note = Beta-L-thymidine-3'-phosphorothioate
  modified_base 3: mod_base = OTHER; note = Beta-L-guanosine-3'-phosphorothioate
  modified_base 4: mod_base = OTHER; note = 2'-deoxyguanosine-3'-phosphorothioate
  modified_base 5: mod_base = OTHER; note = 5-methyl-2'-deoxycytidine-3'-phosphorothioate
  modified_base 6: mod_base = OTHER; note = 2'-deoxyguanosine-3'-phosphorothioate
  modified_base 7: mod_base = OTHER; note = 5-methyl-2'-deoxycytidine-3'-phosphorothioate
  modified_base 8: mod_base = OTHER; note = 2'-deoxyadenosine-3'-phosphorothioate
  modified_base 9: mod_base = OTHER; note = 5-methyl-2'-deoxycytidine-3'-phosphorothioate
  modified_base 10: mod_base = OTHER; note = 2'-deoxyadenosine-3'-phosphorothioate
  modified_base 11: mod_base = OTHER; note = 2'-deoxythymidine-3'-phosphorothioate
  modified_base 12: mod_base = OTHER; note = 5-methyl-2'-deoxycytidine-3'-phosphorothioate
  modified_base 13: mod_base = OTHER; note = 2'-deoxyadenosine-3'-phosphorothioate
  modified_base 14: mod_base = OTHER; note = 2'-deoxyguanosine-3'-phosphorothioate
  modified_base 15: mod_base = OTHER; note = Beta-L-cytidine-3'-phosphorothioate
  modified_base 16: mod_base = OTHER; note = Beta-L-cytidine-3'-phosphorothioate
  modified_base 17: mod_base = OTHER; note = Beta-L-cytidine-3'-phosphate
  misc_feature 1..3: note = RNA
  misc_feature 4..14: note = DNA
  misc_feature 15..17: note = RNA
ttggcgcacatcagccc

SEQ ID NO: 863 - DNA, 17 bp, synthetic construct
  source 1..17: mol_type = other DNA
  modified_base 1: mod_base = OTHER; note = Beta-L-guanosine-3'-phosphorothioate
  modified_base 2: mod_base = OTHER; note = Beta-L-guanosine-3'-phosphorothioate
  modified_base 3: mod_base = OTHER; note = Beta-L-cytidine-3'-phosphorothioate
  modified_base 4: mod_base = OTHER; note = 5-methyl-2'-deoxycytidine-3'-phosphorothioate
  modified_base 5: mod_base = OTHER; note = 2'-deoxyadenosine-3'-phosphorothioate
  modified_base 6: mod_base = OTHER; note = 5-methyl-2'-deoxycytidine-3'-phosphorothioate
  modified_base 7: mod_base = OTHER; note = 2'-deoxyadenosine-3'-phosphorothioate
  modified_base 8: mod_base = OTHER; note = 2'-deoxyguanosine-3'-phosphorothioate
  modified_base 9: mod_base = OTHER; note = 2'-deoxyguanosine-3'-phosphorothioate
  modified_base 10: mod_base = OTHER; note = 2'-deoxyguanosine-3'-phosphorothioate
  modified_base 11: mod_base = OTHER; note = 5-methyl-2'-deoxycytidine-3'-phosphorothioate
  modified_base 12: mod_base = OTHER; note = 2'-deoxyadenosine-3'-phosphorothioate
  modified_base 13: mod_base = OTHER; note = 5-methyl-2'-deoxycytidine-3'-phosphorothioate
  modified_base 14: mod_base = OTHER; note = 2'-deoxyguanosine-3'-phosphorothioate
  modified_base 15: mod_base = OTHER; note = Beta-L-thymidine-3'-phosphorothioate
  modified_base 16: mod_base = OTHER; note = Beta-L-adenosine-3'-phosphorothioate
  modified_base 17: mod_base = OTHER; note = Beta-L-thymidine-3'-phosphate
  misc_feature 1..3: note = RNA
  misc_feature 4..14: note = DNA
  misc_feature 15..17: note = RNA
ggccacagggcacgtat

SEQ ID NO: 864 - DNA, 17 bp, synthetic construct
  source 1..17: mol_type = other DNA
  modified_base 1: mod_base = OTHER; note = Beta-L-thymidine-3'-phosphorothioate
  modified_base 2: mod_base = OTHER; note = Beta-L-adenosine-3'-phosphorothioate
  modified_base 3: mod_base = OTHER; note = Beta-L-thymidine-3'-phosphorothioate
  modified_base 4: mod_base = OTHER; note = 5-methyl-2'-deoxycytidine-3'-phosphorothioate
  modified_base 5: mod_base = OTHER; note = 2'-deoxyguanosine-3'-phosphorothioate
  modified_base 6: mod_base = OTHER; note = 2'-deoxythymidine-3'-phosphorothioate
  modified_base 7: mod_base = OTHER; note = 2'-deoxyadenosine-3'-phosphorothioate
  modified_base 8: mod_base = OTHER; note = 2'-deoxyguanosine-3'-phosphorothioate
  modified_base 9: mod_base = OTHER; note = 2'-deoxyguanosine-3'-phosphorothioate
  modified_base 10: mod_base = OTHER; note = 2'-deoxyadenosine-3'-phosphorothioate
  modified_base 11: mod_base = OTHER; note = 5-methyl-2'-deoxycytidine-3'-phosphorothioate
  modified_base 12: mod_base = OTHER; note = 2'-deoxythymidine-3'-phosphorothioate
  modified_base 13: mod_base = OTHER; note = 5-methyl-2'-deoxycytidine-3'-phosphorothioate
  modified_base 14: mod_base = OTHER; note = 2'-deoxyadenosine-3'-phosphorothioate
  modified_base 15: mod_base = OTHER; note = Beta-L-adenosine-3'-phosphorothioate
  modified_base 16: mod_base = OTHER; note = Beta-L-cytidine-3'-phosphorothioate
  modified_base 17: mod_base = OTHER; note = Beta-L-guanosine-3'-phosphate
  misc_feature 1..3: note = RNA
  misc_feature 4..14: note = DNA
  misc_feature 15..17: note = RNA
tatcgtaggactcaacg

SEQ ID NO: 865 - DNA, 17 bp, synthetic construct
  source 1..17: mol_type = other DNA
  modified_base 1: mod_base = OTHER; note = Beta-L-thymidine-3'-phosphorothioate
  modified_base 2: mod_base = OTHER; note = Beta-L-thymidine-3'-phosphorothioate
  modified_base 3: mod_base = OTHER; note = Beta-L-adenosine-3'-phosphorothioate
  modified_base 4: mod_base = OTHER; note = 2'-deoxythymidine-3'-phosphorothioate
  modified_base 5: mod_base = OTHER; note = 5-methyl-2'-deoxycytidine-3'-phosphorothioate
  modified_base 6: mod_base = OTHER; note = 2'-deoxyguanosine-3'-phosphorothioate
  modified_base 7: mod_base = OTHER; note = 2'-deoxythymidine-3'-phosphorothioate
  modified_base 8: mod_base = OTHER; note = 2'-deoxyadenosine-3'-phosphorothioate
  modified_base 9: mod_base = OTHER; note = 2'-deoxyguanosine-3'-phosphorothioate
  modified_base 10: mod_base = OTHER; note = 2'-deoxyguanosine-3'-phosphorothioate
  modified_base 11: mod_base = OTHER; note = 2'-deoxyadenosine-3'-phosphorothioate
  modified_base 12: mod_base = OTHER; note = 5-methyl-2'-deoxycytidine-3'-phosphorothioate
  modified_base 13: mod_base = OTHER; note = 2'-deoxythymidine-3'-phosphorothioate
  modified_base 14: mod_base = OTHER; note = 5-methyl-2'-deoxycytidine-3'-phosphorothioate
  modified_base 15: mod_base = OTHER; note = Beta-L-adenosine-3'-phosphorothioate
  modified_base 16: mod_base = OTHER; note = Beta-L-adenosine-3'-phosphorothioate
  modified_base 17: mod_base = OTHER; note = Beta-L-cytidine-3'-phosphate
  misc_feature 1..3: note = RNA
  misc_feature 4..14: note = DNA
  misc_feature 15..17: note = RNA
ttatcgtaggactcaac

SEQ ID NO: 866 - DNA, 17 bp, synthetic construct
  source 1..17: mol_type = other DNA
  modified_base 1: mod_base = OTHER; note = Beta-L-cytidine-3'-phosphorothioate
  modified_base 2: mod_base = OTHER; note = Beta-L-thymidine-3'-phosphorothioate
  modified_base 3: mod_base = OTHER; note = Beta-L-guanosine-3'-phosphorothioate
  modified_base 4: mod_base = OTHER; note = 2'-deoxyadenosine-3'-phosphorothioate
  modified_base 5: mod_base = OTHER; note = 2'-deoxythymidine-3'-phosphorothioate
  modified_base 6: mod_base = OTHER; note = 5-methyl-2'-deoxycytidine-3'-phosphorothioate
  modified_base 7: mod_base = OTHER; note = 2'-deoxythymidine-3'-phosphorothioate
  modified_base 8: mod_base = OTHER; note = 2'-deoxythymidine-3'-phosphorothioate
  modified_base 9: mod_base = OTHER; note = 2'-deoxyadenosine-3'-phosphorothioate
  modified_base 10: mod_base = OTHER; note = 2'-deoxythymidine-3'-phosphorothioate
  modified_base 11: mod_base = OTHER; note = 5-methyl-2'-deoxycytidine-3'-phosphorothioate
  modified_base 12: mod_base = OTHER; note = 2'-deoxyguanosine-3'-phosphorothioate
  modified_base 13: mod_base = OTHER; note = 2'-deoxythymidine-3'-phosphorothioate
  modified_base 14: mod_base = OTHER; note = 2'-deoxyadenosine-3'-phosphorothioate
  modified_base 15: mod_base = OTHER; note = Beta-L-guanosine-3'-phosphorothioate
  modified_base 16: mod_base = OTHER; note = Beta-L-guanosine-3'-phosphorothioate
  modified_base 17: mod_base = OTHER; note = Beta-L-adenosine-3'-phosphate
  misc_feature 1..3: note = RNA
  misc_feature 4..14: note = DNA
  misc_feature 15..17: note = RNA
ctgatcttatcgtagga

SEQ ID NO: 867 - DNA, 17 bp, synthetic construct
  source 1..17: mol_type = other DNA
  modified_base 1: mod_base = OTHER; note = Beta-L-cytidine-3'-phosphorothioate
  modified_base 2: mod_base = OTHER; note = Beta-L-cytidine-3'-phosphorothioate
  modified_base 3: mod_base = OTHER; note = Beta-L-thymidine-3'-phosphorothioate
  modified_base 4: mod_base = OTHER; note = 2'-deoxyguanosine-3'-phosphorothioate
  modified_base 5: mod_base = OTHER; note = 2'-deoxyadenosine-3'-phosphorothioate
  modified_base 6: mod_base = OTHER; note = 2'-deoxythymidine-3'-phosphorothioate
  modified_base 7: mod_base = OTHER; note = 5-methyl-2'-deoxycytidine-3'-phosphorothioate
  modified_base 8: mod_base = OTHER; note = 2'-deoxythymidine-3'-phosphorothioate
  modified_base 9: mod_base = OTHER; note = 2'-deoxythymidine-3'-phosphorothioate
  modified_base 10: mod_base = OTHER; note = 2'-deoxyadenosine-3'-phosphorothioate
  modified_base 11: mod_base = OTHER; note = 2'-deoxythymidine-3'-phosphorothioate
  modified_base 12: mod_base = OTHER; note = 5-methyl-2'-deoxycytidine-3'-phosphorothioate
  modified_base 13: mod_base = OTHER; note = 2'-deoxyguanosine-3'-phosphorothioate
  modified_base 14: mod_base = OTHER; note = 2'-deoxythymidine-3'-phosphorothioate
  modified_base 15: mod_base = OTHER; note = Beta-L-adenosine-3'-phosphorothioate
  modified_base 16: mod_base = OTHER; note = Beta-L-guanosine-3'-phosphorothioate
  modified_base 17: mod_base = OTHER; note = Beta-L-guanosine-3'-phosphate
  misc_feature 1..3: note = RNA
  misc_feature 4..14: note = DNA
  misc_feature 15..17: note = RNA
cctgatcttatcgtagg

SEQ ID NO: 868 - DNA, 17 bp, synthetic construct
  source 1..17: mol_type = other DNA
  modified_base 1: mod_base = OTHER; note = Beta-L-guanosine-3'-phosphorothioate
  modified_base 2: mod_base = OTHER; note = Beta-L-cytidine-3'-phosphorothioate
  modified_base 3: mod_base = OTHER; note = Beta-L-cytidine-3'-phosphorothioate
  modified_base 4: mod_base = OTHER; note = 5-methyl-2'-deoxycytidine-3'-phosphorothioate
  modified_base 5: mod_base = OTHER; note = 2'-deoxythymidine-3'-phosphorothioate
  modified_base 6: mod_base = OTHER; note = 2'-deoxyguanosine-3'-phosphorothioate
  modified_base 7: mod_base = OTHER; note = 2'-deoxyadenosine-3'-phosphorothioate
  modified_base 8: mod_base = OTHER; note = 2'-deoxythymidine-3'-phosphorothioate
  modified_base 9: mod_base = OTHER; note = 5-methyl-2'-deoxycytidine-3'-phosphorothioate
  modified_base 10: mod_base = OTHER; note = 2'-deoxythymidine-3'-phosphorothioate
  modified_base 11: mod_base = OTHER; note = 2'-deoxythymidine-3'-phosphorothioate
  modified_base 12: mod_base = OTHER; note = 2'-deoxyadenosine-3'-phosphorothioate
  modified_base 13: mod_base = OTHER; note = 2'-deoxythymidine-3'-phosphorothioate
  modified_base 14: mod_base = OTHER; note = 5-methyl-2'-deoxycytidine-3'-phosphorothioate
  modified_base 15: mod_base = OTHER; note = Beta-L-guanosine-3'-phosphorothioate
  modified_base 16: mod_base = OTHER; note = Beta-L-thymidine-3'-phosphorothioate
  modified_base 17: mod_base = OTHER; note = Beta-L-adenosine-3'-phosphate
  misc_feature 1..3: note = RNA
  misc_feature 4..14: note = DNA
  misc_feature 15..17: note = RNA
gccctgatcttatcgta

SEQ ID NO: 869 - DNA, 17 bp, synthetic construct
  source 1..17: mol_type = other DNA
  modified_base 1: mod_base = OTHER; note = Beta-L-cytidine-3'-phosphorothioate
  modified_base 2: mod_base = OTHER; note = Beta-L-guanosine-3'-phosphorothioate
  modified_base 3: mod_base = OTHER; note = Beta-L-guanosine-3'-phosphorothioate
  modified_base 4: mod_base = OTHER; note = 2'-deoxyadenosine-3'-phosphorothioate
  modified_base 5: mod_base = OTHER; note = 2'-deoxythymidine-3'-phosphorothioate
  modified_base 6: mod_base = OTHER; note = 5-methyl-2'-deoxycytidine-3'-phosphorothioate
  modified_base 7: mod_base = OTHER; note = 5-methyl-2'-deoxycytidine-3'-phosphorothioate
  modified_base 8: mod_base = OTHER; note = 2'-deoxythymidine-3'-phosphorothioate
  modified_base 9: mod_base = OTHER; note = 2'-deoxyguanosine-3'-phosphorothioate
  modified_base 10: mod_base = OTHER; note = 2'-deoxythymidine-3'-phosphorothioate
  modified_base 11: mod_base = OTHER; note = 2'-deoxyadenosine-3'-phosphorothioate
  modified_base 12: mod_base = OTHER; note = 2'-deoxyguanosine-3'-phosphorothioate
  modified_base 13: mod_base = OTHER; note = 2'-deoxythymidine-3'-phosphorothioate
  modified_base 14: mod_base = OTHER; note = 2'-deoxythymidine-3'-phosphorothioate
  modified_base 15: mod_base = OTHER; note = Beta-L-guanosine-3'-phosphorothioate
  modified_base 16: mod_base = OTHER; note = Beta-L-thymidine-3'-phosphorothioate
  modified_base 17: mod_base = OTHER; note = Beta-L-adenosine-3'-phosphate
  misc_feature 1..3: note = RNA
  misc_feature 4..14: note = DNA
  misc_feature 15..17: note = RNA
cggatcctgtagttgta

SEQ ID NO: 870 - DNA, 17 bp, synthetic construct
  source 1..17: mol_type = other DNA
  modified_base 1: mod_base = OTHER; note = Beta-L-guanosine-3'-phosphorothioate
  modified_base 2: mod_base = OTHER; note = Beta-L-adenosine-3'-phosphorothioate
  modified_base 3: mod_base = OTHER; note = Beta-L-cytidine-3'-phosphorothioate
  modified_base 4: mod_base = OTHER; note = 5-methyl-2'-deoxycytidine-3'-phosphorothioate
  modified_base 5: mod_base = OTHER; note = 5-methyl-2'-deoxycytidine-3'-phosphorothioate
  modified_base 6: mod_base = OTHER; note = 2'-deoxyguanosine-3'-phosphorothioate
  modified_base 7: mod_base = OTHER; note = 2'-deoxyguanosine-3'-phosphorothioate
  modified_base 8: mod_base = OTHER; note = 2'-deoxyadenosine-3'-phosphorothioate
  modified_base 9: mod_base = OTHER; note = 2'-deoxythymidine-3'-phosphorothioate
  modified_base 10: mod_base = OTHER; note = 5-methyl-2'-deoxycytidine-3'-phosphorothioate
  modified_base 11: mod_base = OTHER; note = 5-methyl-2'-deoxycytidine-3'-phosphorothioate
  modified_base 12: mod_base = OTHER; note = 2'-deoxythymidine-3'-phosphorothioate
  modified_base 13: mod_base = OTHER; note = 2'-deoxyguanosine-3'-phosphorothioate
  modified_base 14: mod_base = OTHER; note = 2'-deoxythymidine-3'-phosphorothioate
  modified_base 15: mod_base = OTHER; note = Beta-L-adenosine-3'-phosphorothioate
  modified_base 16: mod_base = OTHER; note = Beta-L-guanosine-3'-phosphorothioate
  modified_base 17: mod_base = OTHER; note = Beta-L-thymidine-3'-phosphate
  misc_feature 1..3: note = RNA
  misc_feature 4..14: note = DNA
  misc_feature 15..17: note = RNA
gacccggatcctgtagt

SEQ ID NO: 871 - DNA, 17 bp, synthetic construct
  source 1..17: mol_type = other DNA
  modified_base 1: mod_base = OTHER; note = Beta-L-guanosine-3'-phosphorothioate
  modified_base 2: mod_base = OTHER; note = Beta-L-guanosine-3'-phosphorothioate
  modified_base 3: mod_base = OTHER; note = Beta-L-adenosine-3'-phosphorothioate
  modified_base 4: mod_base = OTHER; note = 5-methyl-2'-deoxycytidine-3'-phosphorothioate
  modified_base 5: mod_base = OTHER; note = 5-methyl-2'-deoxycytidine-3'-phosphorothioate
  modified_base 6: mod_base = OTHER; note = 5-methyl-2'-deoxycytidine-3'-phosphorothioate
  modified_base 7: mod_base = OTHER; note = 2'-deoxyguanosine-3'-phosphorothioate
  modified_base 8: mod_base = OTHER; note = 2'-deoxyguanosine-3'-phosphorothioate
  modified_base 9: mod_base = OTHER; note = 2'-deoxyadenosine-3'-phosphorothioate
  modified_base 10: mod_base = OTHER; note = 2'-deoxythymidine-3'-phosphorothioate
  modified_base 11: mod_base = OTHER; note = 5-methyl-2'-deoxycytidine-3'-phosphorothioate
  modified_base 12: mod_base = OTHER; note = 5-methyl-2'-deoxycytidine-3'-phosphorothioate
  modified_base 13: mod_base = OTHER; note = 2'-deoxythymidine-3'-phosphorothioate
  modified_base 14: mod_base = OTHER; note = 2'-deoxyguanosine-3'-phosphorothioate
  modified_base 15: mod_base = OTHER; note = Beta-L-thymidine-3'-phosphorothioate
  modified_base 16: mod_base = OTHER; note = Beta-L-adenosine-3'-phosphorothioate
  modified_base 17: mod_base = OTHER; note = Beta-L-guanosine-3'-phosphate
  misc_feature 1..3: note = RNA
  misc_feature 4..14: note = DNA
  misc_feature 15..17: note = RNA
ggacccggatcctgtag

SEQ ID NO: 872 - DNA, 17 bp, synthetic construct
  source 1..17: mol_type = other DNA
  modified_base 1: mod_base = OTHER; note = Beta-L-cytidine-3'-phosphorothioate
  modified_base 2: mod_base = OTHER; note = Beta-L-guanosine-3'-phosphorothioate
  modified_base 3: mod_base = OTHER; note = Beta-L-guanosine-3'-phosphorothioate
  modified_base 4: mod_base = OTHER; note = 2'-deoxyguanosine-3'-phosphorothioate
  modified_base 5: mod_base = OTHER; note = 2'-deoxyguanosine-3'-phosphorothioate
  modified_base 6: mod_base = OTHER; note = 2'-deoxythymidine-3'-phosphorothioate
  modified_base 7: mod_base = OTHER; note = 2'-deoxyadenosine-3'-phosphorothioate
  modified_base 8: mod_base = OTHER; note = 2'-deoxyguanosine-3'-phosphorothioate
  modified_base 9: mod_base = OTHER; note = 2'-deoxythymidine-3'-phosphorothioate
  modified_base 10: mod_base = OTHER; note = 2'-deoxythymidine-3'-phosphorothioate
  modified_base 11: mod_base = OTHER; note = 5-methyl-2'-deoxycytidine-3'-phosphorothioate
  modified_base 12: mod_base = OTHER; note = 2'-deoxythymidine-3'-phosphorothioate
  modified_base 13: mod_base = OTHER; note = 5-methyl-2'-deoxycytidine-3'-phosphorothioate
  modified_base 14: mod_base = OTHER; note = 5-methyl-2'-deoxycytidine-3'-phosphorothioate
  modified_base 15: mod_base = OTHER; note = Beta-L-guanosine-3'-phosphorothioate
  modified_base 16: mod_base = OTHER; note = Beta-L-cytidine-3'-phosphorothioate
  modified_base 17: mod_base = OTHER; note = Beta-L-cytidine-3'-phosphate
  misc_feature 1..3: note = RNA
  misc_feature 4..14: note = DNA
  misc_feature 15..17: note = RNA
cggggtagttctccgcc

SEQ ID NO: 873 - DNA, 17 bp, synthetic construct
  source 1..17: mol_type = other DNA
  modified_base 1: mod_base = OTHER; note = Beta-L-thymidine-3'-phosphorothioate
  modified_base 2: mod_base = OTHER; note = Beta-L-cytidine-3'-phosphorothioate
  modified_base 3: mod_base = OTHER; note = Beta-L-guanosine-3'-phosphorothioate
  modified_base 4: mod_base = OTHER; note = 2'-deoxyguanosine-3'-phosphorothioate
  modified_base 5: mod_base = OTHER; note = 2'-deoxyguanosine-3'-phosphorothioate
  modified_base 6: mod_base = OTHER; note = 2'-deoxyguanosine-3'-phosphorothioate
  modified_base 7: mod_base = OTHER; note = 2'-deoxythymidine-3'-phosphorothioate
  modified_base 8: mod_base = OTHER; note = 2'-deoxyadenosine-3'-phosphorothioate
  modified_base 9: mod_base = OTHER; note = 2'-deoxyguanosine-3'-phosphorothioate
  modified_base 10: mod_base = OTHER; note = 2'-deoxythymidine-3'-phosphorothioate
  modified_base 11: mod_base = OTHER; note = 2'-deoxythymidine-3'-phosphorothioate
  modified_base 12: mod_base = OTHER; note = 5-methyl-2'-deoxycytidine-3'-phosphorothioate
  modified_base 13: mod_base = OTHER; note = 2'-deoxythymidine-3'-phosphorothioate
  modified_base 14: mod_base = OTHER; note = 5-methyl-2'-deoxycytidine-3'-phosphorothioate
  modified_base 15: mod_base = OTHER; note = Beta-L-cytidine-3'-phosphorothioate
  modified_base 16: mod_base = OTHER; note = Beta-L-guanosine-3'-phosphorothioate
  modified_base 17: mod_base = OTHER; note = Beta-L-cytidine-3'-phosphate
  misc_feature 1..3: note = RNA
  misc_feature 4..14: note = DNA
  misc_feature 15..17: note = RNA
tcggggtagttctccgc

SEQ ID NO: 874 - DNA, 17 bp, synthetic construct
  source 1..17: mol_type = other DNA
  modified_base 1: mod_base = OTHER; note = Beta-L-adenosine-3'-phosphorothioate
  modified_base 2: mod_base = OTHER; note = Beta-L-cytidine-3'-phosphorothioate
  modified_base 3: mod_base = OTHER; note = Beta-L-cytidine-3'-phosphorothioate
  modified_base 4: mod_base = OTHER; note = 2'-deoxythymidine-3'-phosphorothioate
  modified_base 5: mod_base = OTHER; note = 5-methyl-2'-deoxycytidine-3'-phosphorothioate
  modified_base 6: mod_base = OTHER; note = 2'-deoxyguanosine-3'-phosphorothioate
  modified_base 7: mod_base = OTHER; note = 2'-deoxyguanosine-3'-phosphorothioate
  modified_base 8: mod_base = OTHER; note = 2'-deoxyguanosine-3'-phosphorothioate
  modified_base 9: mod_base = OTHER; note = 2'-deoxyguanosine-3'-phosphorothioate
  modified_base 10: mod_base = OTHER; note = 2'-deoxythymidine-3'-phosphorothioate
  modified_base 11: mod_base = OTHER; note = 2'-deoxyadenosine-3'-phosphorothioate
  modified_base 12: mod_base = OTHER; note = 2'-deoxyguanosine-3'-phosphorothioate
  modified_base 13: mod_base = OTHER; note = 2'-deoxythymidine-3'-phosphorothioate
  modified_base 14: mod_base = OTHER; note = 2'-deoxythymidine-3'-phosphorothioate
  modified_base 15: mod_base = OTHER; note = Beta-L-cytidine-3'-phosphorothioate
  modified_base 16: mod_base = OTHER; note = Beta-L-thymidine-3'-phosphorothioate
  modified_base 17: mod_base = OTHER; note = Beta-L-cytidine-3'-phosphate
  misc_feature 1..3: note = RNA
  misc_feature 4..14: note = DNA
  misc_feature 15..17: note = RNA
acctcggggtagttctc

SEQ ID NO: 875 - DNA, 17 bp, synthetic construct
  source 1..17: mol_type = other DNA
  modified_base 1: mod_base = OTHER; note = Beta-L-thymidine-3'-phosphorothioate
  modified_base 2: mod_base = OTHER; note = Beta-L-thymidine-3'-phosphorothioate
  modified_base 3: mod_base = OTHER; note = Beta-L-guanosine-3'-phosphorothioate
  modified_base 4: mod_base = OTHER; note = 2'-deoxythymidine-3'-phosphorothioate
  modified_base 5: mod_base = OTHER; note = 2'-deoxythymidine-3'-phosphorothioate
  modified_base 6: mod_base = OTHER; note = 5-methyl-2'-deoxycytidine-3'-phosphorothioate
  modified_base 7: mod_base = OTHER; note = 2'-deoxyadenosine-3'-phosphorothioate
  modified_base 8: mod_base = OTHER; note = 5-methyl-2'-deoxycytidine-3'-phosphorothioate
  modified_base 9: mod_base = OTHER; note = 2'-deoxyguanosine-3'-phosphorothioate
  modified_base 10: mod_base = OTHER; note = 5-methyl-2'-deoxycytidine-3'-phosphorothioate
  modified_base 11: mod_base = OTHER; note = 2'-deoxyadenosine-3'-phosphorothioate
  modified_base 12: mod_base = OTHER; note = 2'-deoxyguanosine-3'-phosphorothioate
  modified_base 13: mod_base = OTHER; note = 2'-deoxyguanosine-3'-phosphorothioate
  modified_base 14: mod_base = OTHER; note = 2'-deoxythymidine-3'-phosphorothioate
  modified_base 15: mod_base = OTHER; note = Beta-L-guanosine-3'-phosphorothioate
  modified_base 16: mod_base = OTHER; note = Beta-L-adenosine-3'-phosphorothioate
  modified_base 17: mod_base = OTHER; note = Beta-L-cytidine-3'-phosphate
  misc_feature 1..3: note = RNA
  misc_feature 4..14: note = DNA
  misc_feature 15..17: note = RNA
ttgttcacgcaggtgac

SEQ ID NO: 876 - DNA, 17 bp, synthetic construct
  source 1..17: mol_type = other DNA
  modified_base 1: mod_base = OTHER; note = Beta-L-cytidine-3'-phosphorothioate
  modified_base 2: mod_base = OTHER; note = Beta-L-thymidine-3'-phosphorothioate
  modified_base 3: mod_base = OTHER; note = Beta-L-thymidine-3'-phosphorothioate
  modified_base 4: mod_base = OTHER; note = 2'-deoxyguanosine-3'-phosphorothioate
  modified_base 5: mod_base = OTHER; note = 2'-deoxythymidine-3'-phosphorothioate
  modified_base 6: mod_base = OTHER; note = 2'-deoxythymidine-3'-phosphorothioate
  modified_base 7: mod_base = OTHER; note = 5-methyl-2'-deoxycytidine-3'-phosphorothioate
  modified_base 8: mod_base = OTHER; note = 2'-deoxyadenosine-3'-phosphorothioate
  modified_base 9: mod_base = OTHER; note = 5-methyl-2'-deoxycytidine-3'-phosphorothioate
  modified_base 10: mod_base = OTHER; note = 2'-deoxyguanosine-3'-phosphorothioate
  modified_base 11: mod_base = OTHER; note = 5-methyl-2'-deoxycytidine-3'-phosphorothioate
  modified_base 12: mod_base = OTHER; note = 2'-deoxyadenosine-3'-phosphorothioate
  modified_base 13: mod_base = OTHER; note = 2'-deoxyguanosine-3'-phosphorothioate
  modified_base 14: mod_base = OTHER; note = 2'-deoxyguanosine-3'-phosphorothioate
  modified_base 15: mod_base = OTHER; note = Beta-L-thymidine-3'-phosphorothioate
  modified_base 16: mod_base = OTHER; note = Beta-L-guanosine-3'-phosphorothioate
  modified_base 17: mod_base = OTHER; note = Beta-L-adenosine-3'-phosphate
  misc_feature 1..3: note = RNA
  misc_feature 4..14: note = DNA
  misc_feature 15..17: note = RNA
cttgttcacgcaggtga

SEQ ID NO: 877 - DNA, 17 bp, synthetic construct
  source 1..17: mol_type = other DNA
  modified_base 1: mod_base = OTHER; note = Beta-L-guanosine-3'-phosphorothioate
  modified_base 2: mod_base = OTHER; note = Beta-L-guanosine-3'-phosphorothioate
  modified_base 3: mod_base = OTHER; note = Beta-L-thymidine-3'-phosphorothioate
  modified_base 4: mod_base = OTHER; note = 2'-deoxyguanosine-3'-phosphorothioate
  modified_base 5: mod_base = OTHER; note = 5-methyl-2'-deoxycytidine-3'-phosphorothioate
  modified_base 6: mod_base = OTHER; note = 2'-deoxythymidine-3'-phosphorothioate
  modified_base 7: mod_base = OTHER; note = 2'-deoxythymidine-3'-phosphorothioate
  modified_base 8: mod_base = OTHER; note = 2'-deoxyguanosine-3'-phosphorothioate
  modified_base 9: mod_base = OTHER; note = 2'-deoxythymidine-3'-phosphorothioate
  modified_base 10: mod_base = OTHER; note = 2'-deoxythymidine-3'-phosphorothioate
  modified_base 11: mod_base = OTHER; note = 5-methyl-2'-deoxycytidine-3'-phosphorothioate
  modified_base 12: mod_base = OTHER; note = 2'-deoxyadenosine-3'-phosphorothioate
  modified_base 13: mod_base = OTHER; note = 5-methyl-2'-deoxycytidine-3'-phosphorothioate
  modified_base 14: mod_base = OTHER; note = 2'-deoxyguanosine-3'-phosphorothioate
  modified_base 15: mod_base = OTHER; note = Beta-L-cytidine-3'-phosphorothioate
  modified_base 16: mod_base = OTHER; note = Beta-L-adenosine-3'-phosphorothioate
  modified_base 17: mod_base = OTHER; note = Beta-L-guanosine-3'-phosphate
  misc_feature 1..3: note = RNA
  misc_feature 4..14: note = DNA
  misc_feature 15..17: note = RNA
ggtgcttgttcacgcag

SEQ ID NO: 878 - DNA, 17 bp, synthetic construct
  source 1..17: mol_type = other DNA
  modified_base 1: mod_base = OTHER; note = Beta-L-cytidine-3'-phosphorothioate
  modified_base 2: mod_base = OTHER; note = Beta-L-adenosine-3'-phosphorothioate
  modified_base 3: mod_base = OTHER; note = Beta-L-cytidine-3'-phosphorothioate
  modified_base 4: mod_base = OTHER; note = 2'-deoxythymidine-3'-phosphorothioate
  modified_base 5: mod_base = OTHER; note = 5-methyl-2'-deoxycytidine-3'-phosphorothioate
  modified_base 6: mod_base = OTHER; note = 2'-deoxyguanosine-3'-phosphorothioate
  modified_base 7: mod_base = OTHER; note = 5-methyl-2'-deoxycytidine-3'-phosphorothioate
  modified_base 8: mod_base = OTHER; note = 2'-deoxyadenosine-3'-phosphorothioate
  modified_base 9: mod_base = OTHER; note = 5-methyl-2'-deoxycytidine-3'-phosphorothioate
  modified_base 10: mod_base = OTHER; note = 2'-deoxythymidine-3'-phosphorothioate
  modified_base 11: mod_base = OTHER; note = 5-methyl-2'-deoxycytidine-3'-phosphorothioate
  modified_base 12: mod_base = OTHER; note = 2'-deoxyadenosine-3'-phosphorothioate
  modified_base 13: mod_base = OTHER; note = 2'-deoxythymidine-3'-phosphorothioate
  modified_base 14: mod_base = OTHER; note = 2'-deoxyadenosine-3'-phosphorothioate
  modified_base 15: mod_base = OTHER; note = Beta-L-guanosine-3'-phosphorothioate
  modified_base 16: mod_base = OTHER; note = Beta-L-thymidine-3'-phosphorothioate
  modified_base 17: mod_base = OTHER; note = Beta-L-guanosine-3'-phosphate
  misc_feature 1..3: note = RNA
  misc_feature 4..14: note = DNA
  misc_feature 15..17: note = RNA
cactcgcactcatagtg

SEQ ID NO: 879 - DNA, 17 bp, synthetic construct
  source 1..17: mol_type = other DNA
  modified_base 1: mod_base = OTHER; note = Beta-L-guanosine-3'-phosphorothioate
  modified_base 2: mod_base = OTHER; note = Beta-L-adenosine-3'-phosphorothioate
  modified_base 3: mod_base = OTHER; note = Beta-L-adenosine-3'-phosphorothioate
  modified_base 4: mod_base = OTHER; note = 2'-deoxyguanosine-3'-phosphorothioate
  modified_base 5: mod_base = OTHER; note = 5-methyl-2'-deoxycytidine-3'-phosphorothioate
  modified_base 6: mod_base = OTHER; note = 5-methyl-2'-deoxycytidine-3'-phosphorothioate
  modified_base 7: mod_base = OTHER; note = 2'-deoxyguanosine-3'-phosphorothioate
  modified_base 8: mod_base = OTHER; note = 5-methyl-2'-deoxycytidine-3'-phosphorothioate
  modified_base 9: mod_base = OTHER; note = 2'-deoxythymidine-3'-phosphorothioate
  modified_base 10: mod_base = OTHER; note = 2'-deoxyguanosine-3'-phosphorothioate
  modified_base 11: mod_base = OTHER; note = 2'-deoxythymidine-3'-phosphorothioate
  modified_base 12: mod_base = OTHER; note = 2'-deoxythymidine-3'-phosphorothioate
  modified_base 13: mod_base = OTHER; note = 2'-deoxyadenosine-3'-phosphorothioate
  modified_base 14: mod_base = OTHER; note = 2'-deoxyguanosine-3'-phosphorothioate
  modified_base 15: mod_base = OTHER; note = Beta-L-guanosine-3'-phosphorothioate
  modified_base 16: mod_base = OTHER; note = Beta-L-adenosine-3'-phosphorothioate
  modified_base 17: mod_base = OTHER; note = Beta-L-cytidine-3'-phosphate
  misc_feature 1..3: note = RNA
  misc_feature 4..14: note = DNA
  misc_feature 15..17: note = RNA
gaagccgctgttaggac

SEQ ID NO: 880 - DNA, 17 bp, synthetic construct
  source 1..17: mol_type = other DNA
  modified_base 1: mod_base = OTHER; note = Beta-L-guanosine-3'-phosphorothioate
  modified_base 2: mod_base = OTHER; note = Beta-L-thymidine-3'-phosphorothioate
  modified_base 3: mod_base = OTHER; note = Beta-L-adenosine-3'-phosphorothioate
  modified_base 4: mod_base = OTHER; note = 2'-deoxyadenosine-3'-phosphorothioate
  modified_base 5: mod_base = OTHER; note = 2'-deoxyguanosine-3'-phosphorothioate
  modified_base 6: mod_base = OTHER; note = 2'-deoxyadenosine-3'-phosphorothioate
  modified_base 7: mod_base = OTHER; note = 2'-deoxyguanosine-3'-phosphorothioate
  modified_base 8: mod_base = OTHER; note = 2'-deoxyguanosine-3'-phosphorothioate
  modified_base 9: mod_base = OTHER; note = 2'-deoxythymidine-3'-phosphorothioate
  modified_base 10: mod_base = OTHER; note = 2'-deoxyguanosine-3'-phosphorothioate
  modified_base 11: mod_base = OTHER; note = 5-methyl-2'-deoxycytidine-3'-phosphorothioate
  modified_base 12: mod_base = OTHER; note = 5-methyl-2'-deoxycytidine-3'-phosphorothioate
  modified_base 13: mod_base = OTHER; note = 2'-deoxyguanosine-3'-phosphorothioate
  modified_base 14: mod_base = OTHER; note = 2'-deoxythymidine-3'-phosphorothioate
  modified_base 15: mod_base = OTHER; note = Beta-L-cytidine-3'-phosphorothioate
  modified_base 16: mod_base = OTHER; note = Beta-L-adenosine-3'-phosphorothioate
  modified_base 17: mod_base = OTHER; note = Beta-L-adenosine-3'-phosphate
  misc_feature 1..3: note = RNA
  misc_feature 4..14: note = DNA
  misc_feature 15..17: note = RNA
gtaagaggtgccgtcaa

SEQ ID NO: 881 - DNA, 17 bp, synthetic construct
  source 1..17: mol_type = other DNA
  modified_base 1: mod_base = OTHER; note = Beta-L-guanosine-3'-phosphorothioate
  modified_base 2: mod_base = OTHER; note = Beta-L-thymidine-3'-phosphorothioate
  modified_base 3: mod_base = OTHER; note = Beta-L-guanosine-3'-phosphorothioate
  modified_base 4: mod_base = OTHER; note = 2'-deoxythymidine-3'-phosphorothioate
  modified_base 5: mod_base = OTHER; note = 2'-deoxyadenosine-3'-phosphorothioate
  modified_base 6: mod_base = OTHER; note = 2'-deoxyadenosine-3'-phosphorothioate
  modified_base 7: mod_base = OTHER; note = 2'-deoxyguanosine-3'-phosphorothioate
  modified_base 8: mod_base = OTHER; note = 2'-deoxyadenosine-3'-phosphorothioate
  modified_base 9: mod_base = OTHER; note = 2'-deoxyguanosine-3'-phosphorothioate
  modified_base 10: mod_base = OTHER; note = 2'-deoxyguanosine-3'-phosphorothioate
  modified_base 11: mod_base = OTHER; note = 2'-deoxythymidine-3'-phosphorothioate
  modified_base 12: mod_base = OTHER; note = 2'-deoxyguanosine-3'-phosphorothioate
  modified_base 13: mod_base = OTHER; note = 5-methyl-2'-deoxycytidine-3'-phosphorothioate
  modified_base 14: mod_base = OTHER; note = 5-methyl-2'-deoxycytidine-3'-phosphorothioate
  modified_base 15: mod_base = OTHER; note = Beta-L-guanosine-3'-phosphorothioate
  modified_base 16: mod_base = OTHER; note = Beta-L-thymidine-3'-phosphorothioate
  modified_base 17: mod_base = OTHER; note = Beta-L-cytidine-3'-phosphate
  misc_feature 1..3: note = RNA
  misc_feature 4..14: note = DNA
  misc_feature 15..17: note = RNA
gtgtaagaggtgccgtc

SEQ ID NO: 882 - DNA, 17 bp, synthetic construct
  source 1..17: mol_type = other DNA
  modified_base 1: mod_base = OTHER; note = Beta-L-guanosine-3'-phosphorothioate
  modified_base 2: mod_base = OTHER; note = Beta-L-adenosine-3'-phosphorothioate
  modified_base 3: mod_base = OTHER; note = Beta-L-cytidine-3'-phosphorothioate
  modified_base 4: mod_base = OTHER; note = 2'-deoxyguanosine-3'-phosphorothioate
  modified_base 5: mod_base = OTHER; note = 2'-deoxyadenosine-3'-phosphorothioate
  modified_base 6: mod_base = OTHER; note = 2'-deoxythymidine-3'-phosphorothioate
  modified_base 7: mod_base = OTHER; note = 2'-deoxyadenosine-3'-phosphorothioate
  modified_base 8: mod_base = OTHER; note = 2'-deoxythymidine-3'-phosphorothioate
  modified_base 9: mod_base = OTHER; note = 5-methyl-2'-deoxycytidine-3'-phosphorothioate
  modified_base 10: mod_base = OTHER; note = 5-methyl-2'-deoxycytidine-3'-phosphorothioate
  modified_base 11: mod_base = OTHER; note = 2'-deoxyadenosine-3'-phosphorothioate
  modified_base 12: mod_base = OTHER; note = 2'-deoxythymidine-3'-phosphorothioate
  modified_base 13: mod_base = OTHER; note = 2'-deoxyguanosine-3'-phosphorothioate
  modified_base 14: mod_base = OTHER; note = 2'-deoxyguanosine-3'-phosphorothioate
  modified_base 15: mod_base = OTHER; note = Beta-L-adenosine-3'-phosphorothioate
  modified_base 16: mod_base = OTHER; note = Beta-L-cytidine-3'-phosphorothioate
  modified_base 17: mod_base = OTHER; note = Beta-L-thymidine-3'-phosphate
  misc_feature 1..3: note = RNA
  misc_feature 4..14: note = DNA
  misc_feature 15..17: note = RNA
gacgatatccatggact

SEQ ID NO: 883 - DNA, 17 bp, synthetic construct
  source 1..17: mol_type = other DNA
  modified_base 1: mod_base = OTHER; note = Beta-L-guanosine-3'-phosphorothioate
  modified_base 2: mod_base = OTHER; note = Beta-L-thymidine-3'-phosphorothioate
  modified_base 3: mod_base = OTHER; note = Beta-L-guanosine-3'-phosphorothioate
  modified_base 4: mod_base = OTHER; note = 2'-deoxyadenosine-3'-phosphorothioate
  modified_base 5: mod_base = OTHER; note = 2'-deoxyguanosine-3'-phosphorothioate
  modified_base 6: mod_base = OTHER; note = 2'-deoxyguanosine-3'-phosphorothioate
  modified_base 7: mod_base = OTHER; note = 2'-deoxyadenosine-3'-phosphorothioate
  modified_base 8: mod_base = OTHER; note = 5-methyl-2'-deoxycytidine-3'-phosphorothioate
  modified_base 9: mod_base = OTHER; note = 2'-deoxyguanosine-3'-phosphorothioate
  modified_base 10: mod_base = OTHER; note = 2'-deoxyadenosine-3'-phosphorothioate
  modified_base 11: mod_base = OTHER; note = 2'-deoxythymidine-3'-phosphorothioate
  modified_base 12: mod_base = OTHER; note = 2'-deoxyadenosine-3'-phosphorothioate
  modified_base 13: mod_base = OTHER; note = 2'-deoxythymidine-3'-phosphorothioate
  modified_base 14: mod_base = OTHER; note = 5-methyl-2'-deoxycytidine-3'-phosphorothioate
  modified_base 15: mod_base = OTHER; note = Beta-L-cytidine-3'-phosphorothioate
  modified_base 16: mod_base = OTHER; note = Beta-L-adenosine-3'-phosphorothioate
  modified_base 17: mod_base = OTHER; note = Beta-L-thymidine-3'-phosphate
  misc_feature 1..3: note = RNA
  misc_feature 4..14: note = DNA
  misc_feature 15..17: note = RNA
gtgaggacgatatccat

SEQ ID NO: 884 - DNA, 17 bp, synthetic construct
  source 1..17: mol_type = other DNA
  modified_base 1: mod_base = OTHER; note = Beta-L-guanosine-3'-phosphorothioate
  modified_base 2: mod_base = OTHER; note = Beta-L-cytidine-3'-phosphorothioate
  modified_base 3: mod_base = OTHER; note = Beta-L-thymidine-3'-phosphorothioate
  modified_base 4: mod_base = OTHER; note = 5-methyl-2'-deoxycytidine-3'-phosphorothioate
  modified_base 5: mod_base = OTHER; note = 2'-deoxyadenosine-3'-phosphorothioate
  modified_base 6: mod_base = OTHER; note = 5-methyl-2'-deoxycytidine-3'-phosphorothioate
  modified_base 7: mod_base = OTHER; note = 5-methyl-2'-deoxycytidine-3'-phosphorothioate
  modified_base 8: mod_base = OTHER; note = 2'-deoxyguanosine-3'-phosphorothioate
  modified_base 9: mod_base = OTHER; note = 2'-deoxyguanosine-3'-phosphorothioate
  modified_base 10: mod_base = OTHER; note = 2'-deoxyadenosine-3'-phosphorothioate
  modified_base 11: mod_base = OTHER; note = 2'-deoxyadenosine-3'-phosphorothioate
  modified_base 12: mod_base = OTHER; note = 2'-deoxythymidine-3'-phosphorothioate
  modified_base 13: mod_base = OTHER; note = 2'-deoxythymidine-3'-phosphorothioate
  modified_base 14: mod_base = OTHER; note = 2'-deoxythymidine-3'-phosphorothioate
  modified_base 15: mod_base = OTHER; note = Beta-L-guanosine-3'-phosphorothioate
  modified_base 16: mod_base = OTHER; note = Beta-L-guanosine-3'-phosphorothioate
  modified_base 17: mod_base = OTHER; note = Beta-L-thymidine-3'-phosphate
  misc_feature 1..3: note = RNA
  misc_feature 4..14: note = DNA
  misc_feature 15..17: note = RNA
gctcaccggaatttggt

SEQ ID NO: 885 - DNA, 17 bp, synthetic construct
  source 1..17: mol_type = other DNA
  modified_base 1: mod_base = OTHER; note = Beta-L-cytidine-3'-phosphorothioate
  modified_base 2: mod_base = OTHER; note = Beta-L-guanosine-3'-phosphorothioate
  modified_base 3: mod_base = OTHER; note = Beta-L-cytidine-3'-phosphorothioate
  modified_base 4: mod_base = OTHER; note = 2'-deoxythymidine-3'-phosphorothioate
  modified_base 5: mod_base = OTHER; note = 2'-deoxyguanosine-3'-phosphorothioate
  modified_base 6: mod_base = OTHER; note = 5-methyl-2'-deoxycytidine-3'-phosphorothioate
  modified_base 7: mod_base = OTHER; note = 2'-deoxythymidine-3'-phosphorothioate
  modified_base 8: mod_base = OTHER; note = 5-methyl-2'-deoxycytidine-3'-phosphorothioate
  modified_base 9: mod_base = OTHER; note = 2'-deoxyadenosine-3'-phosphorothioate
  modified_base 10: mod_base = OTHER; note = 5-methyl-2'-deoxycytidine-3'-phosphorothioate
  modified_base 11: mod_base = OTHER; note = 5-methyl-2'-deoxycytidine-3'-phosphorothioate
  modified_base 12: mod_base = OTHER; note = 2'-deoxyguanosine-3'-phosphorothioate
  modified_base 13: mod_base = OTHER; note = 2'-deoxyguanosine-3'-phosphorothioate
  modified_base 14: mod_base = OTHER; note = 2'-deoxyadenosine-3'-phosphorothioate
  modified_base 15: mod_base = OTHER; note = Beta-L-adenosine-3'-phosphorothioate
  modified_base 16: mod_base = OTHER; note = Beta-L-thymidine-3'-phosphorothioate
  modified_base 17: mod_base = OTHER; note = Beta-L-thymidine-3'-phosphate
  misc_feature 1..3: note = RNA
  misc_feature 4..14: note = DNA
  misc_feature 15..17: note = RNA
cgctgctcaccggaatt

SEQ ID NO: 886 - DNA, 17 bp, synthetic construct
  source 1..17: mol_type = other DNA
  modified_base 1: mod_base = OTHER; note = Beta-L-cytidine-3'-phosphorothioate
  modified_base 2: mod_base = OTHER; note = Beta-L-cytidine-3'-phosphorothioate
  modified_base 3: mod_base = OTHER; note = Beta-L-guanosine-3'-phosphorothioate
  modified_base 4: mod_base = OTHER; note = 5-methyl-2'-deoxycytidine-3'-phosphorothioate
  modified_base 5: mod_base = OTHER; note = 2'-deoxythymidine-3'-phosphorothioate
  modified_base 6: mod_base = OTHER; note = 2'-deoxyguanosine-3'-phosphorothioate
  modified_base 7: mod_base = OTHER; note = 5-methyl-2'-deoxycytidine-3'-phosphorothioate
  modified_base 8: mod_base = OTHER; note = 2'-deoxythymidine-3'-phosphorothioate
  modified_base 9: mod_base = OTHER; note = 5-methyl-2'-deoxycytidine-3'-phosphorothioate
  modified_base 10: mod_base = OTHER; note = 2'-deoxyadenosine-3'-phosphorothioate
  modified_base 11: mod_base = OTHER; note = 5-methyl-2'-deoxycytidine-3'-phosphorothioate
  modified_base 12: mod_base = OTHER; note = 5-methyl-2'-deoxycytidine-3'-phosphorothioate
  modified_base 13: mod_base = OTHER; note = 2'-deoxyguanosine-3'-phosphorothioate
  modified_base 14: mod_base = OTHER; note = 2'-deoxyguanosine-3'-phosphorothioate
  modified_base 15: mod_base = OTHER; note = Beta-L-adenosine-3'-phosphorothioate
  modified_base 16: mod_base = OTHER; note = Beta-L-adenosine-3'-phosphorothioate
  modified_base 17: mod_base = OTHER; note = Beta-L-thymidine-3'-phosphate
  misc_feature 1..3: note = RNA
  misc_feature 4..14: note = DNA
  misc_feature 15..17: note = RNA
ccgctgctcaccggaat

SEQ ID NO: 887 - DNA, 17 bp, synthetic construct
  source 1..17: mol_type = other DNA
  modified_base 1: mod_base = OTHER; note = Beta-L-cytidine-3'-phosphorothioate
  modified_base 2: mod_base = OTHER; note = Beta-L-adenosine-3'-phosphorothioate
  modified_base 3: mod_base = OTHER; note = Beta-L-cytidine-3'-phosphorothioate
  modified_base 4: mod_base = OTHER; note = 2'-deoxyguanosine-3'-phosphorothioate
  modified_base 5: mod_base = OTHER; note = 5-methyl-2'-deoxycytidine-3'-phosphorothioate
  modified_base 6: mod_base = OTHER; note = 5-methyl-2'-deoxycytidine-3'-phosphorothioate
  modified_base 7: mod_base = OTHER; note = 2'-deoxyguanosine-3'-phosphorothioate
  modified_base 8: mod_base = OTHER; note = 2'-deoxythymidine-3'-phosphorothioate
  modified_base 9: mod_base = OTHER; note = 2'-deoxythymidine-3'-phosphorothioate
  modified_base 10: mod_base = OTHER; note = 5-methyl-2'-deoxycytidine-3'-phosphorothioate
  modified_base 11: mod_base = OTHER; note = 2'-deoxythymidine-3'-phosphorothioate
  modified_base 12: mod_base = OTHER; note = 2'-deoxythymidine-3'-phosphorothioate
  modified_base 13: mod_base = OTHER; note = 2'-deoxyguanosine-3'-phosphorothioate
  modified_base 14: mod_base = OTHER; note = 5-methyl-2'-deoxycytidine-3'-phosphorothioate
  modified_base 15: mod_base = OTHER; note = Beta-L-thymidine-3'-phosphorothioate
  modified_base 16: mod_base = OTHER; note = Beta-L-guanosine-3'-phosphorothioate
  modified_base 17: mod_base = OTHER; note = Beta-L-adenosine-3'-phosphate
  misc_feature 1..3: note = RNA
  misc_feature 4..14: note = DNA
  misc_feature 15..17: note = RNA
cacgccgttcttgctga

SEQ ID NO: 888 - DNA, 17 bp, synthetic construct
  source 1..17: mol_type = other DNA
  modified_base 1: mod_base = OTHER; note = Beta-L-guanosine-3'-phosphorothioate
  modified_base 2: mod_base = OTHER; note = Beta-L-cytidine-3'-phosphorothioate
  modified_base 3: mod_base = OTHER; note = Beta-L-adenosine-3'-phosphorothioate
  modified_base 4: mod_base = OTHER; note = 5-methyl-2'-deoxycytidine-3'-phosphorothioate
  modified_base 5: mod_base = OTHER; note = 2'-deoxyguanosine-3'-phosphorothioate
  modified_base 6: mod_base = OTHER; note = 5-methyl-2'-deoxycytidine-3'-phosphorothioate
  modified_base 7: mod_base = OTHER; note = 5-methyl-2'-deoxycytidine-3'-phosphorothioate
  modified_base 8: mod_base = OTHER; note = 2'-deoxyguanosine-3'-phosphorothioate
  modified_base 9: mod_base = OTHER; note = 2'-deoxythymidine-3'-phosphorothioate
  modified_base 10: mod_base = OTHER; note = 2'-deoxythymidine-3'-phosphorothioate
  modified_base 11: mod_base = OTHER; note = 5-methyl-2'-deoxycytidine-3'-phosphorothioate
  modified_base 12: mod_base = OTHER; note = 2'-deoxythymidine-3'-phosphorothioate
  modified_base 13: mod_base = OTHER; note = 2'-deoxythymidine-3'-phosphorothioate
  modified_base 14: mod_base = OTHER; note = 2'-deoxyguanosine-3'-phosphorothioate
  modified_base 15: mod_base = OTHER; note = Beta-L-cytidine-3'-phosphorothioate
  modified_base 16: mod_base = OTHER; note = Beta-L-thymidine-3'-phosphorothioate
  modified_base 17: mod_base = OTHER; note = Beta-L-guanosine-3'-phosphate
  misc_feature 1..3: note = RNA
  misc_feature 4..14: note = DNA
  misc_feature 15..17: note = RNA
gcacgccgttcttgctg

SEQ ID NO: 889 - DNA, 17 bp, synthetic construct
  source 1..17: mol_type = other DNA
  modified_base 1: mod_base = OTHER; note = Beta-L-guanosine-3'-phosphorothioate
  modified_base 2: mod_base = OTHER; note = Beta-L-thymidine-3'-phosphorothioate
  modified_base 3: mod_base = OTHER; note = Beta-L-thymidine-3'-phosphorothioate
  modified_base 4: mod_base = OTHER; note = 2'-deoxyguanosine-3'-phosphorothioate
  modified_base 5: mod_base = OTHER; note = 5-methyl-2'-deoxycytidine-3'-phosphorothioate
  modified_base 6: mod_base = OTHER; note = 2'-deoxyadenosine-3'-phosphorothioate
  modified_base 7: mod_base = OTHER; note = 5-methyl-2'-deoxycytidine-3'-phosphorothioate
  modified_base 8: mod_base = OTHER; note = 5-methyl-2'-deoxycytidine-3'-phosphorothioate
  modified_base 9: mod_base = OTHER; note = 2'-deoxythymidine-3'-phosphorothioate
  modified_base 10: mod_base = OTHER; note = 5-methyl-2'-deoxycytidine-3'-phosphorothioate
  modified_base 11: mod_base = OTHER; note = 2'-deoxyguanosine-3'-phosphorothioate
  modified_base 12: mod_base = OTHER; note = 5-methyl-2'-deoxycytidine-3'-phosphorothioate
  modified_base 13: mod_base = OTHER; note = 5-methyl-2'-deoxycytidine-3'-phosphorothioate
  modified_base 14: mod_base = OTHER; note = 2'-deoxyadenosine-3'-phosphorothioate
  modified_base 15: mod_base = OTHER; note = Beta-L-guanosine-3'-phosphorothioate
  modified_base 16: mod_base = OTHER; note = Beta-L-thymidine-3'-phosphorothioate
  modified_base 17: mod_base = OTHER; note = Beta-L-cytidine-3'-phosphate
  misc_feature 1..3: note = RNA
  misc_feature 4..14: note = DNA
  misc_feature 15..17: note = RNA
gttgcacctcgccagtc

SEQ ID NO: 890 - DNA, 17 bp, synthetic construct
  source 1..17: mol_type = other DNA
  modified_base 1: mod_base = OTHER; note = Beta-L-thymidine-3'-phosphorothioate
  modified_base 2: mod_base = OTHER; note = Beta-L-thymidine-3'-phosphorothioate
  modified_base 3: mod_base = OTHER; note = Beta-L-adenosine-3'-phosphorothioate
  modified_base 4: mod_base = OTHER; note = 5-methyl-2'-deoxycytidine-3'-phosphorothioate
  modified_base 5: mod_base = OTHER; note = 5-methyl-2'-deoxycytidine-3'-phosphorothioate
  modified_base 6: mod_base = OTHER; note = 2'-deoxyguanosine-3'-phosphorothioate
  modified_base 7: mod_base = OTHER; note = 5-methyl-2'-deoxycytidine-3'-phosphorothioate
  modified_base 8: mod_base = OTHER; note = 2'-deoxyadenosine-3'-phosphorothioate
  modified_base 9: mod_base = OTHER; note = 5-methyl-2'-deoxycytidine-3'-phosphorothioate
  modified_base 10: mod_base = OTHER; note = 2'-deoxyadenosine-3'-phosphorothioate
  modified_base 11: mod_base = OTHER; note = 5-methyl-2'-deoxycytidine-3'-phosphorothioate
  modified_base 12: mod_base = OTHER; note = 5-methyl-2'-deoxycytidine-3'-phosphorothioate
  modified_base 13: mod_base = OTHER; note = 2'-deoxyguanosine-3'-phosphorothioate
  modified_base 14: mod_base = OTHER; note = 2'-deoxythymidine-3'-phosphorothioate
  modified_base 15: mod_base = OTHER; note = Beta-L-cytidine-3'-phosphorothioate
  modified_base 16: mod_base = OTHER; note = Beta-L-thymidine-3'-phosphorothioate
  modified_base 17: mod_base = OTHER; note = Beta-L-cytidine-3'-phosphate
  misc_feature 1..3: note = RNA
  misc_feature 4..14: note = DNA
  misc_feature 15..17: note = RNA
ttaccgcacaccgtctc

SEQ ID NO: 891 - DNA, 17 bp, synthetic construct
  source 1..17: mol_type = other DNA
  modified_base 1: mod_base = OTHER; note = Beta-L-cytidine-3'-phosphorothioate
  modified_base 2: mod_base = OTHER; note = Beta-L-thymidine-3'-phosphorothioate
  modified_base 3: mod_base = OTHER; note = Beta-L-thymidine-3'-phosphorothioate
  modified_base 4: mod_base = OTHER; note = 2'-deoxyadenosine-3'-phosphorothioate
  modified_base 5: mod_base = OTHER; note = 5-methyl-2'-deoxycytidine-3'-phosphorothioate
  modified_base 6: mod_base = OTHER; note = 5-methyl-2'-deoxycytidine-3'-phosphorothioate
  modified_base 7: mod_base = OTHER; note = 2'-deoxyguanosine-3'-phosphorothioate
  modified_base 8: mod_base = OTHER; note = 5-methyl-2'-deoxycytidine-3'-phosphorothioate
  modified_base 9: mod_base = OTHER; note = 2'-deoxyadenosine-3'-phosphorothioate
  modified_base 10: mod_base = OTHER; note = 5-methyl-2'-deoxycytidine-3'-phosphorothioate
  modified_base 11: mod_base = OTHER; note = 2'-deoxyadenosine-3'-phosphorothioate
  modified_base 12: mod_base = OTHER; note = 5-methyl-2'-deoxycytidine-3'-phosphorothioate
  modified_base 13: mod_base = OTHER; note = 5-methyl-2'-deoxycytidine-3'-phosphorothioate
  modified_base 14: mod_base = OTHER; note = 2'-deoxyguanosine-3'-phosphorothioate
  modified_base 15: mod_base = OTHER; note = Beta-L-thymidine-3'-phosphorothioate
  modified_base 16: mod_base = OTHER; note = Beta-L-cytidine-3'-phosphorothioate
  modified_base 17: mod_base = OTHER; note = Beta-L-thymidine-3'-phosphate
  misc_feature 1..3: note = RNA
  misc_feature 4..14: note = DNA
  misc_feature 15..17: note = RNA
cttaccgcacaccgtct

SEQ ID NO: 892 - DNA, 17 bp, synthetic construct
  source 1..17: mol_type = other DNA
  modified_base 1: mod_base = OTHER; note = Beta-L-thymidine-3'-phosphorothioate
  modified_base 2: mod_base = OTHER; note = Beta-L-cytidine-3'-phosphorothioate
  modified_base 3: mod_base = OTHER; note = Beta-L-thymidine-3'-phosphorothioate
  modified_base 4: mod_base = OTHER; note = 2'-deoxythymidine-3'-phosphorothioate
  modified_base 5: mod_base = OTHER; note = 2'-deoxyadenosine-3'-phosphorothioate
  modified_base 6: mod_base = OTHER; note = 5-methyl-2'-deoxycytidine-3'-phosphorothioate
  modified_base 7: mod_base = OTHER; note = 5-methyl-2'-deoxycytidine-3'-phosphorothioate
  modified_base 8: mod_base = OTHER; note = 2'-deoxyguanosine-3'-phosphorothioate
  modified_base 9: mod_base = OTHER; note = 5-methyl-2'-deoxycytidine-3'-phosphorothioate
  modified_base 10: mod_base = OTHER; note = 2'-deoxyadenosine-3'-phosphorothioate
  modified_base 11: mod_base = OTHER; note = 5-methyl-2'-deoxycytidine-3'-phosphorothioate
  modified_base 12: mod_base = OTHER; note = 2'-deoxyadenosine-3'-phosphorothioate
  modified_base 13: mod_base = OTHER; note = 5-methyl-2'-deoxycytidine-3'-phosphorothioate
  modified_base 14: mod_base = OTHER; note = 5-methyl-2'-deoxycytidine-3'-phosphorothioate
  modified_base 15: mod_base = OTHER; note = Beta-L-guanosine-3'-phosphorothioate
  modified_base 16: mod_base = OTHER; note = Beta-L-thymidine-3'-phosphorothioate
  modified_base 17: mod_base = OTHER; note = Beta-L-cytidine-3'-phosphate
  misc_feature 1..3: note = RNA
  misc_feature 4..14: note = DNA
  misc_feature 15..17: note = RNA
tcttaccgcacaccgtc

SEQ ID NO: 893 - DNA, 17 bp, synthetic construct
  source 1..17: mol_type = other DNA
  modified_base 1: mod_base = OTHER; note = Beta-L-guanosine-3'-phosphorothioate
  modified_base 2: mod_base = OTHER; note = Beta-L-thymidine-3'-phosphorothioate
  modified_base 3: mod_base = OTHER; note = Beta-L-cytidine-3'-phosphorothioate
  modified_base 4: mod_base = OTHER; note = 2'-deoxythymidine-3'-phosphorothioate
  modified_base 5: mod_base = OTHER; note = 2'-deoxythymidine-3'-phosphorothioate
  modified_base 6: mod_base = OTHER; note = 2'-deoxyadenosine-3'-phosphorothioate
  modified_base 7: mod_base = OTHER; note = 5-methyl-2'-deoxycytidine-3'-phosphorothioate
  modified_base 8: mod_base = OTHER; note = 5-methyl-2'-deoxycytidine-3'-phosphorothioate
  modified_base 9: mod_base = OTHER; note = 2'-deoxyguanosine-3'-phosphorothioate
  modified_base 10: mod_base = OTHER; note = 5-methyl-2'-deoxycytidine-3'-phosphorothioate
  modified_base 11: mod_base = OTHER; note = 2'-deoxyadenosine-3'-phosphorothioate
  modified_base 12: mod_base = OTHER; note = 5-methyl-2'-deoxycytidine-3'-phosphorothioate
  modified_base 13: mod_base = OTHER; note = 2'-deoxyadenosine-3'-phosphorothioate
  modified_base 14: mod_base = OTHER; note = 5-methyl-2'-deoxycytidine-3'-phosphorothioate
  modified_base 15: mod_base = OTHER; note = Beta-L-cytidine-3'-phosphorothioate
  modified_base 16: mod_base = OTHER; note = Beta-L-guanosine-3'-phosphorothioate
  modified_base 17: mod_base = OTHER; note = Beta-L-thymidine-3'-phosphate
  misc_feature 1..3: note = RNA
  misc_feature 4..14: note = DNA
  misc_feature 15..17: note = RNA
gtcttaccgcacaccgt

SEQ ID NO: 894 - DNA, 17 bp, synthetic construct
  source 1..17: mol_type = other DNA
  modified_base 1: mod_base = OTHER; note = Beta-L-cytidine-3'-phosphorothioate
  modified_base 2: mod_base = OTHER; note = Beta-L-cytidine-3'-phosphorothioate
  modified_base 3: mod_base = OTHER; note = Beta-L-adenosine-3'-phosphorothioate
  modified_base 4: mod_base = OTHER; note = 2'-deoxyadenosine-3'-phosphorothioate
  modified_base 5: mod_base = OTHER; note = 2'-deoxythymidine-3'-phosphorothioate
  modified_base 6: mod_base = OTHER; note = 2'-deoxyguanosine-3'-phosphorothioate
  modified_base 7: mod_base = OTHER; note = 2'-deoxyguanosine-3'-phosphorothioate
  modified_base 8: mod_base = OTHER; note = 2'-deoxyadenosine-3'-phosphorothioate
  modified_base 9: mod_base = OTHER; note = 5-methyl-2'-deoxycytidine-3'-phosphorothioate
  modified_base 10: mod_base = OTHER; note = 2'-deoxyguanosine-3'-phosphorothioate
  modified_base 11: mod_base = OTHER; note = 2'-deoxythymidine-3'-phosphorothioate
  modified_base 12: mod_base = OTHER; note = 2'-deoxyguanosine-3'-phosphorothioate
  modified_base 13: mod_base = OTHER; note = 2'-deoxyguanosine-3'-phosphorothioate
  modified_base 14: mod_base = OTHER; note = 2'-deoxyadenosine-3'-phosphorothioate
  modified_base 15: mod_base = OTHER; note = Beta-L-guanosine-3'-phosphorothioate
  modified_base 16: mod_base = OTHER; note = Beta-L-adenosine-3'-phosphorothioate
  modified_base 17: mod_base = OTHER; note = Beta-L-guanosine-3'-phosphate
  misc_feature 1..3: note = RNA
  misc_feature 4..14: note = DNA
  misc_feature 15..17: note = RNA
ccaatggacgtggagag

SEQ ID NO: 895 - DNA, 17 bp, synthetic construct
  source 1..17: mol_type = other DNA
  modified_base 1: mod_base = OTHER; note = Beta-L-cytidine-3'-phosphorothioate
  modified_base 2: mod_base = OTHER; note = Beta-L-adenosine-3'-phosphorothioate
  modified_base 3: mod_base = OTHER; note = Beta-L-adenosine-3'-phosphorothioate
  modified_base 4: mod_base = OTHER; note = 5-methyl-2'-deoxycytidine-3'-phosphorothioate
  modified_base 5: mod_base = OTHER; note = 2'-deoxyadenosine-3'-phosphorothioate
  modified_base 6: mod_base = OTHER; note = 5-methyl-2'-deoxycytidine-3'-phosphorothioate
  modified_base 7: mod_base = OTHER; note = 5-methyl-2'-deoxycytidine-3'-phosphorothioate
  modified_base 8: mod_base = OTHER; note = 2'-deoxyadenosine-3'-phosphorothioate
  modified_base 9: mod_base = OTHER; note = 2'-deoxyguanosine-3'-phosphorothioate
  modified_base 10: mod_base = OTHER; note = 5-methyl-2'-deoxycytidine-3'-phosphorothioate
  modified_base 11: mod_base = OTHER; note = 2'-deoxyguanosine-3'-phosphorothioate
  modified_base 12: mod_base = OTHER; note = 2'-deoxythymidine-3'-phosphorothioate
  modified_base 13: mod_base = OTHER; note = 5-methyl-2'-deoxycytidine-3'-phosphorothioate
  modified_base 14: mod_base = OTHER; note = 5-methyl-2'-deoxycytidine-3'-phosphorothioate
  modified_base 15: mod_base = OTHER; note = Beta-L-guanosine-3'-phosphorothioate
  modified_base 16: mod_base = OTHER; note = Beta-L-guanosine-3'-phosphorothioate
  modified_base 17: mod_base = OTHER; note = Beta-L-cytidine-3'-phosphate
  misc_feature 1..3: note = RNA
  misc_feature 4..14: note = DNA
  misc_feature 15..17: note = RNA
caacaccagcgtccggc

SEQ ID NO: 896 - DNA, 17 bp, synthetic construct
  source 1..17: mol_type = other DNA
  modified_base 1: mod_base = OTHER; note = Beta-L-adenosine-3'-phosphorothioate
  modified_base 2: mod_base = OTHER; note = Beta-L-guanosine-3'-phosphorothioate
  modified_base 3: mod_base = OTHER; note = Beta-L-guanosine-3'-phosphorothioate
  modified_base 4: mod_base = OTHER; note = 2'-deoxyguanosine-3'-phosphorothioate
  modified_base 5: mod_base = OTHER; note = 5-methyl-2'-deoxycytidine-3'-phosphorothioate
  modified_base 6: mod_base = OTHER; note = 2'-deoxyguanosine-3'-phosphorothioate
  modified_base 7: mod_base = OTHER; note = 2'-deoxythymidine-3'-phosphorothioate
  modified_base 8: mod_base = OTHER; note = 5-methyl-2'-deoxycytidine-3'-phosphorothioate
  modified_base 9: mod_base = OTHER; note = 5-methyl-2'-deoxycytidine-3'-phosphorothioate
  modified_base 10: mod_base = OTHER; note = 5-methyl-2'-deoxycytidine-3'-phosphorothioate
  modified_base 11: mod_base = OTHER; note = 2'-deoxyadenosine-3'-phosphorothioate
  modified_base 12: mod_base = OTHER; note = 2'-deoxyguanosine-3'-phosphorothioate
  modified_base 13: mod_base = OTHER; note = 2'-deoxythymidine-3'-phosphorothioate
  modified_base 14: mod_base = OTHER; note = 2'-deoxyguanosine-3'-phosphorothioate
  modified_base 15: mod_base = OTHER; note = Beta-L-adenosine-3'-phosphorothioate
  modified_base 16: mod_base = OTHER; note = Beta-L-cytidine-3'-phosphorothioate
  modified_base 17: mod_base = OTHER; note = Beta-L-adenosine-3'-phosphate
  misc_feature 1..3: note = RNA
  misc_feature 4..14: note = DNA
  misc_feature 15..17: note = RNA
agggcgtcccagtgaca

SEQ ID NO: 897 - DNA, 17911 bp, Homo sapiens
  source 1..17911: mol_type = genomic DNA
acccggcccggctccctccctgcccgtccccgtccccccacccgtgccagcccccaggatgggtgccccgagcgcgtgccggacgctggtgttggctctggcggccatgctcgtggtgccgcaggcagagacccagggccctgtggagccgagctgggagaatgcagggcacaccatggatggcggtgccccgacgtcctcgcccacccggcgcgtgagctttgttccacccgtcactgtcttccccagcctgagccccctgaacccggcgcacaatgggcgggtgtgcagcacctggggtgacttccactacaagaccttcgacggcgacgtcttccgcttccctggcctttgcaactacgtgttctctgagcactgccgcgccgcctacgaggacttcaacgtccagctacgccgaggcctagtgggctccaggcctgtggtcacccgtgttgtcatcaaggcccaggggctggtgctggaggcgtccaacggctccgtcctcatcaatgggcagcgggaggagctgccttacagccgcactggcctcctggtggagcagagcggggactacatcaaggtcagcatccggctggtgctgacattcctgtggaacggagaggacagtgccctgctggagctggatcccaaatacgccaaccagacctgtggcctgtgtggggacttcaacggcctcccggccttcaacgagttctatgcccacaacgccaggctgaccccgctccagtttgggaacctgcagaagttggatgggcccacggagcagtgcccggacccgctgcccttgccggccggcaactgcacggacgaggagggcatctgccaccgcaccctgctggggccggcctttgcggagtgccacgcactggtggacagcactgcgtacctggccgcctgcgcccaggacctgtgccgctgccccacctgcccgtgtgccacctttgtggaatactcacgccagtgcgcccacgcggggggccagccgcggaactggaggtgccctgagctctgcccccggacctgccccctcaacatgcagcaccaggagtgtggctcaccctgcacggacacctgctccaacccccagcgcgcgcagctctgcgaggaccactgtgtggacggctgcttctgccccccaggcacggtgctggatgacatcacgcactctggctgcctgcccctcgggcagtgcccctgcacccacggcggccgcacctacagcccgggcacctccttcaacaccacctgcagctcctgcacctgctccggggggctatggcagtgccaggacctgccgtgccctggcacctgctctgtgcagggcggggcccacatctccacctatgatgagaaactctacgacctgcatggtgactgcagctacgttctgtccaagaaatgtgccgacagcagcttcaccgtgctggctgagctgcggaagtgcggcctgacggacaacgagaactgcctgaaagcggtgacgctcagcctggacggcggggacacggccatccgggtccaagcggacggcggcgtgttcctcaactccatctacacgcagctgcccctgtcggcagccaacatcaccctgttcacaccctcgagcttcttcatcgtggtgcagacaggcctggggctgcagctgctggtgcagctggtgccactcatgcaggtgtttgtcaggctggaccccgcccaccagggccagatgtgcggcctgtgtgggaacttcaaccagaaccaggctgacgacttcacggccctcagcggggtggtggaggccacgggcgcagccttcgccaacacctggaaggcccaggctgcctgtgccaatgccaggaacagctttgaggacccctgctccctcagtgtggagaatgagaactacgcccggcactggtgctcgcgcctgaccgatcccaacagtgccttctcgcgctgccactccatcatcaaccccaagcccttccactcgaactgcatgtttgacacctgcaactgtgagcggagcgaggactgcctgtgcgccgcgctgtcctcctatgtgcacgcctgtgccgccaagggcgtacagctcagcgactggagggacggcgtctgcaccaagtacatgcagaactgccccaagtcccagcgctacgcctacgtggtggatgcctgccagcccacttgccgcggcctgagtgaggccgacgtcacctgcagcgtttccttcgtgcctgtggacggctgcacctgccccgcgggcaccttcctcaatgacgcgggcgcctgtgtgcccgcccaggagtgcccctgctacgctcacggcaccgtgctggctcctggagaggtggtgcacgacgagggcgccgtgtgttcatgtacgggtgggaagctaagctgcctgggagcctctctgcagaaaagcacagggtgtgcagcccccatggtgtacctggactgcagcaacagctcggcgggcacccctggggccgagtgcctccggagctgccacacgctggacgtgggctgtttcagcacacactgcgtgtccggctgtgtctgtcccccggggctggtgtcggatgggagtgggggctgcattgccgaggaggactgcccctgtgtgcacaacgaggccacctacaagcctggagagaccatcagggtcgactgcaacacctgcacctgcaggaaccggaggtgggagtgcagccaccggctctgcctgggcacctgcgtggcctacggggatggccacttcatcacctttgatggcgatcgctacagctttgaaggcagctgcgagtacatcttggcccaggactactgtggggacaacaccacccacgggaccttccgcatcgtcaccgagaacatcccctgtgggaccaccggcaccacctgctccaaggccatcaagctcttcgtggagagctacgagctgatcctccaagaggggacctttaaggcggtggcgagagggccgggtggggacccaccctacaagatacgctacatggggatcttcctggtcatcgagacccacgggatggccgtgtcctgggaccggaagaccagcgtgttcatccgactgcaccaggactacaagggcagggtctgcggcctgtgcgggaacttcgacgacaatgccatcaatgactttgccacgcgtagccggtccgtggtgggggacgcactggagtttgggaacagctggaagctctccccctcctgcccggacgccctggcacccaaggacccctgcacggccaaccccttccgcaagtcctgggcccagaagcagtgcagcatcctccacggccccaccttcgccgcctgccgctcccaggttgactccaccaagtactacgaggcctgcgtgaacgacgcgtgtgcctgcgactcgggtggcgactgcgagtgtttctgcacggctgtggctgcctacgcccaggcctgccacgacgcgggcctgtgtgtgtcctggcggactccggacacctgccccttgttctgtgacttctacaacccacatgggggctgtgagtggcactaccagccctgcggggcaccctgcctaaaaacctgccggaaccccagtgggcactgcctggtggacctgcctggcctggaaggctgctacccgaagtgcccacccagccagcccttcttcaatgaggaccagatgaagtgcgtggcccagtgtggctgctacgacaaggacggaaactactatgacgtcggtgcaagggtccccacagcggagaactgccagagctgtaactgcacacccagtggcatccagtgcgctcacagccttgaggcctgcacctgcacctatgaggacaggacctacagctaccaggacgtcatctacaacaccaccgatgggcttggcgcctgcttgatcgccatctgcggaagcaacggcaccatcatcaggaaggctgtggcatgtcctggaactccagccacaacgccattcaccttcaccaccgcctgggtcccccactccacgacaagcccggccctcccggtctccaccgtgtgtgtccgcgaggtctgccgctggtccagctggtacaatgggcaccgcccagagcccggcctgggaggcggagactttgagacgtttgaaaacctgaggcagagagggtaccaggtatgccctgtgctggctgacatcgagtgccgggcggcgcagcttcccgacatgccgctggaggagctgggccagcaggtggactgtgaccgcatgcgggggctgatgtgcgccaacagccaacagagtcccccgctctgtcacgactacgagctgcgggttctctgctgcgaatacgtgccctgtggcccctccccggccccaggcaccagccctcagccctccctcagtgccagcacggagcctgctgtgcctaccccaacccagaccacagcaaccgaaaagaccaccctatgggtgaccccgagcatccggtcgacggcggccctcacctcgcagactgggtccagctcaggccccgtgacggtcaccccctcggccccaggtaccaccacctgccagccccggtgtcagtggacagagtggtttgatgaggactaccccaagtctgaacaacttggaggggacgttgagtcctacgataagatcagggccgctggagggcacttatgccagcagcctaaggacatagagtgccaggccgagagcttccccaactggaccctggcacaggtggggcagaaggtgcactgtgacgtccacttcggcctggtgtgcaggaactgggagcaggagggcgtcttcaagatgtgctacaactacaggatccgggtcctctgctgcagtgacgaccactgcaggggacgtgccacaaccccgccaccgaccacagagctggagacggccaccaccaccaccacccaggccctgttctcaacgccgcagcctacgagtagcccggggctgaccagggctcccccggccagcaccacagcagtccccaccctctcagaaggactgacatcccccagatacacaagcacccttggtacagccaccacgggaggccccacgacgcctgcaggctccacagaacccactgtcccaggggtggccacatccacccttccaacacgctcagcccttccagggacgacggggagcttgggcacatggcgcccctcacagccacccacgctggccccaacaacaatggcaacctccagagctcgcccgacaggcacagccagcaccgcttccaaagagccgctgaccacgagcctggcgccaacactcacgagcgagctgtccacctctcaggccgagaccagcacgcccaggacagagacgacaatgagccccttgactaacaccaccaccagccagggcacgacccgctgtcaaccgaagtgtgagtggacagagtggtttgacgtggacttcccaacctcaggggttgcaggcggggacatggaaacttttgaaaacatcagggctgctgggggcaagatgtgctgggcaccaaagagcatagagtgccgggcggagaactaccccgaggtaagcatcgaccaggtcgggcaggtgctgacctgcagcctggagacggggctgacctgcaagaacgaagaccagacaggcaggttcaacatgtgcttcaactacaacgtgcgtgtgctttgctgtgacgactacagccactgccccagtaccccagccaccagctccacggccacgccctcctcaactccggggacgacctggatcctcacaaagccgaccacaacagccactacgactgcgtccactggatccacggccaccccgacctccaccctgagaacagctccccctcccaaagtgctgaccaccacggccaccacacccacagtcaccagctccaaagccactccctcctccagtccagggactgcaaccgcccttccagcactgagaagcacagccaccacacccacagctaccagcgttacacccatcccctcttcctccctgggcaccacctggacccgcctatcacagaccaccacacccacggccaccatgtccacagccacaccctcctccactccagagactgcccacacctccacagtgcttaccgccacggccaccacaactggggccaccggctctgtggccaccccctcctccaccccaggaacagctcacactaccaaagtgccaactaccacaaccacgggcttcacagccaccccctcctccagcccagggacggcactcacgcctccagtgtggatcagcacaaccaccacacccacaaccagaggctccacggtgaccccctcctccatcccggggaccacccacaccgccacagtgctgaccaccaccaccacaactgtggccactggttctatggcaacaccctcctctagcacacagaccagtggtactcccccatcactgaccaccacggccactacgatcacggccaccggctccaccaccaacccctcctcaactcctgggacaactcccatccccccagtgctgaccaccaccgccaccacacctgcagccaccagcaacacagtgactccctcctctgccctagggaccacccacacacccccagtgccgaacaccatggccaccacacacgggcgatccctgccccccagcagtccccacacggtgcgcacagcctggacttcggccacctcgggcatcttgggcaccacccacatcacagagccttccacggtgacttcccacaccctagcagcaaccaccggtaccacccagcactcgactccagccctttccagccctcaccctagcagcagaaccaccgagtcacccccttctccagggacgaccaccccgggccacaccacggccacctccaggaccacagccacggccacacccagcaagacccgcacctcgaccctgctgcccagcagccccacatcggcccccataaccacggtggtgaccatgggctgtgagccccagtgtgcctggtcagagtggctggactacagctaccccatgccggggccctctggcggggactttgacacctactccaacatccgtgcggccggaggggccgtctgtgagcagcccctgggcctcgagtgccgtgcccaggcccagcctggtgtccccctgcgggagttgggccaggtcgtggaatgcagcctggactttggcctggtctgcaggaaccgtgagcaggtggggaagttcaagatgtgcttcaactatgaaatccgtgtgttctgctgcaactacggccactgccccagcaccccggccaccagctctacggccatgccctcctccactccggggacgacctggatcctcacagagctgaccacaacagccactacgactgagtccactggatccacggccaccccgtcctccaccccagggaccacctggatcctcacagagccgagcactacagccaccgtgacggtgcccaccggatccacggccaccgcctcctccacccaggcaactgctggcaccccacatgtgagcaccacggccacgacacccacagtcaccagctccaaagccactcccttctccagtccagggactgcaaccgcccttccagcactgagaagcacagccaccacacccacagctaccagctttacagccatcccctcctcctccctgggcaccacctggacccgcctatcacagaccaccacacccacggccaccatgtccacagccacaccctcctccactccagagactgtccacacctccacagtgcttaccaccacggccaccacaaccggggccaccggctctgtggccaccccctcctccaccccaggaacagctcacactaccaaagtgctgactaccacaaccacgggcttcacagccaccccctcctccagcccagggacggcacgcacgcttccagtgtggatcagcacaaccaccacacccacaaccagaggttccacggtgaccccctcctccatcccggggaccacccacacccccacagtgctgaccaccaccaccacaactgtggccactggttctatggcaacaccctcctctagcacacagaccagtggtactcccccatcactgaccaccacggccactacgatcacggccaccggctccaccaccaacccctcctcaactccagggacaacacctatccccccagtgctgaccaccaccgccaccacacctgcagccaccagcagcacagtgactccctcctctgccctagggaccacccacacacccccagtgccgaacaccacggccaccacacacgggcgatccctgtcccccagcagtccccacacggtgcgcacagcctggacttcggccacctcaggcaccttgggcaccacccacatcacagagccttccacggggacttcccacaccccagcagcaaccaccggtaccacccagcactcgactccagccctgtccagccctcaccctagcagcaggaccaccgagtcacccccttctccagggacgaccaccccgggccacaccagggccacctccaggaccacggccacggccacacccagcaagacccgcacctcgaccctgctgcccagcagccccacatcggccccaataaccacggtggtgaccatgggctgtgagccccagtgtgcctggtcagagtggctggactacagctaccccatgccggggccctctggcggggactttgacacctactccaacatccgtgcggccggaggggccgtctgtgagcagcccctgggcctcgagtgccgtgcccaggcccagcctggtgtccccctgcgggagttgggccaggtcgtggaatgcagcctggactttggcctggtctgcaggaaccgtgagcaggtggggaagttcaagatgtgcttcaactatgaaatccgtgtgttctgctgcaactacggccactgccccagcaccccggccaccagctctacggccacgccctcctccactccagggacgacctggatcctcacagagcagaccacagcagccactacgaccgcaaccactggatccacggccatcccgtcctccaccccgggaacagctccccctcccaaagtgctgaccagcacggccaccacacccacagccaccagttccaaagccacttcctcctccagtccaaggactgcaaccacccttccagtgctgacaagcacagccaccaaatccacagctaccagctttacacccatcccctccttcacccttgggaccaccgggaccctcccagaacagaccaccacacccatggccaccatgtccacaatccacccctcctccactccggagaccacccacacctccacagtgctgaccacgaaggccaccacgacaagggccaccagttccatgtccaccccctcctccactccggggacgacctggatcctcacagagctgaccacagcagccactacaactgcagccactggccccacggccaccccgtcctccaccccagggaccacctggatcctcacagagcccagcactacagccaccgtgacggtgcccaccggatccacggccaccgcctcctccacccgggcaactgctggcaccctcaaagtgctgaccagcacggccaccacacccacagtcatcagctccagagccactccctcctccagtccagggactgcaaccgcccttccagcactgagaagcacagccaccacacccacagctaccagcgttacagccatcccctcttcctccctgggcaccgcctggacccgcctatcacagaccaccacacccacggccaccatgtccacagccacaccctcctctactccagagactgtccacacctccacagtgcttaccaccacgaccaccacaaccagggccaccggctctgtggccaccccctcctccaccccaggaacagctcacactaccaaagtgccgactaccacaaccacgggcttcacagccaccccctcctccagcccagggacggcactcacgcctccagtgtggatcagcacaaccaccacacccacaaccagaggctccacggtgaccccctcctccatcccggggaccacccacaccgccacagtgctgaccaccaccaccacaactgtggccactggttctatggcaacaccctcctctagcacacagaccagtggtactcccccatcactgaccaccacggccactacgatcacagccaccggctccaccaccaacccctcctcaactccagggacaactcccatccccccagtgctgaccaccaccgccaccacacctgcagccaccagcagcacagtgactccctcctctgccctagggaccacccacacacccccagtgccgaacaccacggccaccacacacgggcggtccctgccccccagcagtccccacacggtgcgcacagcctggacttcggccacctcgggcatcttgggcaccacccacatcacagagccttccacggtgacttcccacaccccagcagcaaccaccagtaccacccagcactcgactccagccctgtccagccctcaccctagcagcaggaccaccgagtcacccccttctccagggacgaccaccccgggccacaccaggggcacctccaggaccacagccacagccacacccagcaagacccgcacctcgaccctgctgcccagcagccccacatcggcccccataaccacggtggtgaccacgggctgtgagccccagtgtgcctggtcagagtggctggactacagctaccccatgccggggccctctggcggggactttgacacctactccaacatccgtgcggccggaggggcagtctgtgagcagcccctgggcctcgagtgccgtgcccaggcccagcctggtgtccccctgcgggagttgggccaggtcgtggaatgcagcctggactttggcctggtctgcaggaaccgtgagcaggtggggaagttcaagatgtgcttcaactatgaaatccgtgtgttctgctgcaactacggccactgccccagcaccccggccaccagctctacggccacgccctcctcaactccggggacgacctggatcctcacaaagctgaccacaacagccactacgactgagtccactggatccacggccaccccgtcctccaccccagggaccacctggatcctcacagagccgagcactacagccaccgtgacggtgcccaccggatccacggccaccgcctcctccacccaggcaactgctggcaccccacatgtgagcaccacggccacgacacccacagtcaccagctccaaagccactcccttctccagtccagggactgcaaccgcccttccagcactgagaagcacagccaccacacccacagctaccagctttacagccatcccctcctcctccctgggcaccacctggacccgcctatcacagaccaccacacccacggccaccatgtccacagccacaccctcctccactccagagactgcccacacctccacagtgcttaccaccacggccaccacaaccagggccaccggctctgtggccaccccctcttccaccccaggaacagctcacactaccaaagtgccgactaccacaaccacgggcttcacagtcaccccctcctccagcccagggacggcacgcacgcctccagtgtggatcagcacaaccaccacacccacaaccagtggctccacggtgaccccctcctccgtcccggggaccacccacacccccacagtgctgaccaccaccaccacaactgtggccactggttctatggcaacaccctcctctagcacacagaccagtggtactcccccatcactgatcaccacggccactacgatcacggccaccggctccaccaccaacccctcctcaactccagggacaacacctatccccccagtgctgaccaccaccgccaccacacctgcagccaccagcagcacagtgactccctcctctgccctagggaccacccacacacccccagtgccgaacaccacggccaccacacacgggcgatccctgtcccccagcagtccccacacggtgcgcacagcctggacttcggccacctcaggcaccttgggcaccacccacatcacagagccttccacggggacttcccacaccccagcagcaaccaccggtaccacccagcactcgactccagccctgtccagccctcaccctagcagcaggaccaccgagtcacccccttccccagggacgaccaccccgggccacaccacggccacctccaggaccacggccacggccacacccagcaagacccgcacctcgaccctgctgcccagcagccccacatcggcccccataaccacggtggtgaccacgggctgtgagccccagtgtgcctggtcagagtggctggactacagctaccccatgccggggccctctggcggggactttgacacctactccaacatccgtgcggccggaggggccgtctgtgagcagcccctgggcctcgagtgccgtgcccaggcccagcctggtgtccccctgggggagttgggccaggtcgtggaatgcagcctggactttggcctggtctgcaggaaccgtgagcaggtggggaagttcaagatgtgcttcaactatgaaatccgtgtgttctgctgcaactacggccactgccccagcaccccggccaccagctctacggccatgccctcctccactccggggacgacctggatcctcacagagctgaccacaacagccactacgactgcatccactggatccacggccaccccgtcctccaccccgggaacagctccccctcccaaagtgctgaccagcccggccaccacacccacagccaccagttccaaagccacttcctcctccagtccaaggactgcaaccacccttccagtgctgacaagcacagccaccaaatccacagctaccagcgttacacccatcccctcctccacccttgggaccaccgggaccctcccagaacagaccaccacacccgtggccaccatgtccacaatccacccctcctccactccggagaccacccacacctccacagtgctgaccacgaaggccaccacgacaagggccaccagttccacgtccaccccctcctccactccggggacgacctggatcctcacagagctgaccacagcagccactacaactgcagccactggccccacggccaccccgtcctccaccccagggaccacctggatcctcacagagctgaccacaacagccactacgactgcgtccactggatccacggccaccccgtcctccaccccagggaccacctggatcctcacagagccgagcactacagccaccgtgacggtgcccaccggatccacggccaccgcctcctccacccaggcaactgctggcaccccacatgtgagcaccacggccacgacacccacagtcaccagctccaaagccactccctcctccagtccagggactgcaactgcccttccagcactgagaagcacagccaccacacccacagctaccagctttacagccatcccctcctcctccctgggcaccacctggacccgcctatcacagaccaccacacccacggccaccatgtccacagccacaccctcctccactccagagactgtccacacctccacagtgcttaccgccacggccaccacaaccggggccaccggctctgtggccaccccctcctccaccccaggaacagctcacactaccaaagtgccgactaccacaaccacgggcttcacagccaccccctcctccagcccagggacggcactcacgcctccagtgtggatcagcacaaccaccacacccacaaccaccacacccacaaccagtggctccacggtgaccccctcctccatcccggggaccacccacaccgccagagtgctgaccaccaccaccacaactgtggccactggttctatggcaacaccctcctctagcacacagaccagtggtactcccccatcactgaccaccacggccactacgatcacggccaccggctccaccaccaacccctcctcaactccagggacaacacccatcaccccagtgctgaccagcacggccaccacacccgcagccaccagctccaaagccacttcctcctccagtccaaggactgcaaccacccttccagtgctgacaagcacagccacaaaatccacagctaccagctttacacccatcccctcctccaccctgtggaccacgtggaccgtcccagcacagaccaccacacccatgtccaccatgtccacaatccacacctcctctactccagagaccacccacacctccacagtgctgaccaccacagccaccatgacaagggccaccaattccacggccacaccctcctccactctggggacgacccggatcctcactgagctgaccacaacagccactacaactgcagccactggatccacggccaccctgtcctccaccccagggaccacctggatcctcacagagccgagcactatagccaccgtgatggtgcccaccggttccacggccaccgcctcctccactctgggaacagctcacacccccaaagtggtgaccaccatggccactatgcccacagccactgcctccacggttcccagctcgtccaccgtggggaccacccgcacccctgcagtgctccccagcagcctgccaaccttcagcgtgtccactgtgtcctcctcagtcctcaccaccctgagacccactggcttccccagctcccacttctctactccctgcttctgcagggcatttggacagtttttctcgcccggggaagtcatctacaataagaccgaccgagccggctgccatttctacgcagtgtgcaatcagcactgtgacattgaccgcttccagggcgcctgtcccacctccccaccgccagtgtcctccgccccgctgtcctcgccctcccctgcccctggctgtgacaatgccatccctctccggcaggtgaatgagacctggaccctggagaactgcacggtggccaggtgcgtgggtgacaaccgtgtcgtcctgctggacccaaagcctgtggccaacgtcacctgcgtgaacaagcacctgcccatcaaagtgtcggacccgagccagccctgtgacttccactatgagtgcgagtgcatctgcagcatgtggggcggctcccactattccacctttgacggcacctcttacaccttccggggcaactgcacctatgtcctcatgagagagatccatgcacgctttgggaatctcagcctctacctggacaaccactactgcacggcctctgccactgccgctgccgcccgctgcccccgcgccctcagcatccactacaagtccatggatatcgtcctcactgtcaccatggtgcatgggaaggaggagggcctgatcctgtttgaccaaattccggtgagcagcggtttcagcaagaacggcgtgcttgtgtctgtgctggggaccaccaccatgcgtgtggacattcctgccctgggcgtgagcgtcaccttcaatggccaagtcttccaggcccggctgccctacagcctcttccacaacaacaccgagggccagtgcggcacctgcaccaacaaccagagggacgactgtctccagcgggacggaaccactgccgccagttgcaaggacatggccaagacgtggctggtccccgacagcagaaaggatggctgctgggccccgactggcacaccccccactgccagccccgcagccccggtgtctagcacacccacccccaccccatgcccaccacagccgctctgtgatctgatgctgagccaggtctttgctgagtgccacaaccttgtgcccccgggcccattcttcaacgcctgcatcagcgaccactgcaggggccgccttgaggtgccctgccagagcctggaggcttacgcagagctctgccgcgcccggggagtgtgcagtgactggcgaggtgcaaccggtggcctgtgcgacctcacctgcccacccaccaaagtgtacaagccatgcggccccatacagcctgccacctgcaactctaggaaccagagcccacagctggaggggatggcggagggctgcttctgccctgaggaccagatcctcttcaacgcacacatgggcatctgcgtgcaggcctgcccctgcgtgggacccgatgggtttcctaaatttcccggggagcggtgggtcagcaactgccagtcctgcgtgtgtgacgagggttcagtgtcggtgcagtgcaagcccctgccctgtgacgcccagggtcagcccccgccgtgcaaccgtcccggcttcgtaaccgtgaccaggccccgggccgagaacccctgctgccccgagacggtgtgcgtgtgcaacacaaccacctgcccccagagcctgcctgtgtgcccgccagggcaggagtccatctgcacccaggaggagggcgactgctgtcccaccttccgctgcagacctcagctgtgttcgtacaatggcaccttctacggggttggtgcaaccttcccaggcgcccttccctgccacatgtgtacctgcctctctggggacacccaggacccaacggtgcaatgtcaggaggatgcctgcaacaatactacctgtccccagggctttgagtacaagagagtggccgggcagtgctgtggggagtgcgtccagaccgcctgcctcacgcccgatggccagccagtccagctgaatgaaacctgggtcaacagccatgtggacaactgcaccgtgtacctctgtgaggctgagggtggagtccatttgctgaccccacagcctgcatcctgcccagatgtgtccagctgcagggggagcctcaggaaaaccggctgctgctactcctgtgaggaggactcctgtcaagtccgcatcaacacgaccatcctgtggcaccagggctgcgagaccgaggtcaacatcaccttctgcgagggctcctgccccggagcgtccaagtactcagcagaggcccaggccatgcagcaccagtgcacctgctgccaggagaggcgggtccacgaggagacggtgcccttgcactgtcctaacggctcagccatcctgcacacctacacccacgtggatgagtgtggctgcacgcccttctgtgtccctgcgcccatggctcccccacacacccgtggcttcccggcccaggaggccactgctgtctgagaacgttctgcctccatccccatgctctgtccacctggagccaggatgtgcattgtctgatcatgaaaaccttgggcctcctctgcggagccccccggcctgtgtgtggcaccccgcgctccgtgctcctgctgcccaccccgtgggtgaaaccggccccagaagggtgaggggccagcaggacccctttcgggagggcgccactcaggagtcctaccctgggagagcctgtggcccaccttggccttgcccctccctgatgtcactgggacgccctggaacaaactaagcatgtgcgggcctatgtgtccctgccacggccggagcgcccgcgcagcacggattccagctggccacgtccggccgctggggcagacaggctggtccaggcaaggccagctgctgccaggaagctgcgacaggcaaggcggccgcctgtccatgcctgctgcagggtaactcagggctgaggtcgcaacggccaggtcagagaggggtcagcatcccaaagccccctctgctcaacccagcccagttttgcaaataaaccctgagcattgagta

SEQ ID NO: 898 - DNA, 14963 bp, Mus musculus
  source 1..14963: mol_type = genomic DNA
gccttgtctcagtccctcctgcctgccctctgtactgcccccaggatgggcagcagaaactggagctgggctctggtctgggcctccgtggccttgctcatggtgtggccagcagagagccagggtcaggcagagctgagctcagaacatctagaactcaccggagacagtcagagagtgtatagtgactccatatcctcatccacaaggcatgtcaccttcatcccacctatcactgtcttccctagcatgagcgccttacacctggcacacaatgggagagtgtgcagcacgtggggtgacttccattacaagacctttgatggtgacgtgttccgcttccctggcctctgtaactatgtcttctcttcacactgcggggccacctacgaggacttcaacatccaactgcgtcgtggtcttgagggttccaggcccacagtcacctatgtgctcctcagggcccaggggctggtgattgagctgtccaatggctctgtcctggtgaatggacatcgggagaagctgccctacagtcgtgcaggtctcctgatggagaagagcagtggctatgtgaaaatcagcatccgcctagtcctcaccttcctgtggaatgaagaagacagcgccctgctggagctggactccaaatacatcaaccagacgtgtgggctgtgcggtgacttcaacgggctcccagctgtcagtgagttctacacccacaacactaggctgacccctgtgcagtttggaaacttgcagaagctggatggtcctacagagcagtgccaggatgtcctaccctcagctgtcagcaactgcacagatacggaggacatctgccgtcgcaccctgcttggtcctgcctttgacaagtgcaccgctctggtagatgtcagcatgtacttggatgcctgtgtccaggacctgtgccgctgtcccacctgcccatgtgccacttttgccgaatattcccgccagtgtgcccacgcagggggctacccacagaactggaggcatcctgatctctgcaattggacatgccctttcaacatggaataccgagagtgcagttcaccctgtgtggatacctgctctaacccccagcgctctcaactctgcgaggaccactgcatggatggctgcttctgtcccccaggaactgtgctggacgatgtcagacacttgggatgcctgcccctggagcagtgccactgtacacacggtggccgaatttatgcccctggagagtccttcaacaccagctgtaggtcctgcacctgcttcggaggactgtggaagtgcaaagacctgccatgccctggcacctgctctgtgcaaggcgggtcccacatctttacctttgacgagaaactctacaatgtgcatggagactgcagctacatcctgaccaagaaatgtgcagatagtagcttcactgtgctggtcgatcttcggaagtgtggagtgacagatacggagaactgcctcaaagcagtgacactaaacctcaatagtggggacacggtcatccggatccaggtcaacggtgctgtgttcctgaactccatctttacgcagatgcccttgtcagcaggcaacattaccatcttcaagccatcatccttcttcatcatagtacagacgggcatggggctgcagcttcaagtgcagctggtgcccctcatgcaggtgtttgtccggctggaccgctcctaccaaggccagatgtgtggtctgtgtggaaacttcaaccagaaccaggctgatgacttcacagccctcagtggggtggtggagggcacaggagcagccttctccaacacctggaagactcaagcctcctgccccaactccaagaacacctatgaagacccctgctcatacagtgtggagaatgagaacttcgcccgggagtggtgctccatgctcacggaaagctcaggagttttctcagcctgccatgccactgttagcccggtgcccttctactcgaactgcttgtttgacacgtgcaactgtgagaacagtgaggactgcatgtgtgcagccctgtcctcctatgtgtttgcctgtgctgccaaaggcgtgctgctcagtggctggagggacaaagtttgctacaagtacacgaacaactgcccccaaaccaagggctacttctattcagtgagttcttgccagcctacctgccgctctctgagtgaggccgatgtcacctgcagcgtcccctttgtgacggtggatggctgcacctgccctgaaggcaccttcctgaatgacaaggaccactgtgtgccagtggaggagtgcccttgctacttccatggaactgtggtggctcccagagaggttgttacggacaacggtgtggtgtgctcgtgtacaaacgggaagttgacctgcctgggagccctgatgcagaagagcacagagtgtcaggcgcctatggtctacctggattgtaacaatgcctcagtgggtcaccacggggctgaatgcctcaaaagctgccacacactggatgtggaatgtttcagcacacagtgtgtctcgggctgcgtgtgtccctcagggctggtagcagatgggaatgggggctgtattgctgaggaagattgcccctgcatacacaatgaggtcacatatagacctggggagatcatccgggtagactgcaataactgcacctgtaagaaccgccggtgggaatgcaccaacaagccctgcatgggtgcctgtgtggcctacggggatggccactttgttacctttgatggtgaacgctacatctttgaaggtagctgcgagtataccttggctcaggactactgcagaggcaacaccagtactaatgggaccttccgaattgtcactgagaatgtcccctgtgggaccacaggaaccacctgctccaagaccatcaagatctttgtggagagctacgagctgatccttcatgaggggaactttaaggtggtagagcaagggccaagcggagaccctccatacaagatcagattcatgggcatcttcctggtcattgagatccgcagcgggatagtcgtgtcctgggacaggaagaccagtgtgtttgtccggctgcagcagcattataagggcagggtctgtggcctctgtgggaactttgacgacaatgccatcaatgacttcaccacacgcagccagtctgtggtgggcgatgtgctggagtttggaaatagctggaagttctccccatcctgcccagacgccccagttcccaaggacccctgcattgcaaacccttaccgcaagtcctgggcccagaagaagtgtagcatcatcaacagtgcaacgtttgccgcctgccactctcaggttgactctacaaaatactatgaagcctgtgtgcatgatgtgtgtgcctgtgactcagggggtgactgcgagtgtttctgcaccgctgtggccgcctatgcccaggcctgccgtgatgtgggtgtgtgcttgtcctggaggacaccggacatctgccctcttttctgtgactactacaaccctcatggggaatgtgagtggcactatcagccctgtggagccccctgtctgaagacctgtcggaacccaactggacactgcctcgttgacctgccaggtctagaaggctgctacccacagtgcccagccagccagcccttcttcaatgaggaccagatgaagtgtgtggcccagtgtggctgctacgatgacaatggaaactaccatgacattggcacacaggtccctacagctgagaattgccagagttgtctctgcacccctggtggcctccagtgtgtttacaaccttacagcctgcacatgcacctatgagggccgtacctacaactacaatgatgttgtctacaacaccacggatggccttggcgcctgcttagtagccatctgcaaagacaatgggactatagcacgcacaactgaagtgtgccatgaagtcccgtctaccacaccattcacattcaccaccaccctggcaccccttgccacaaacggctcagcttccactgtgtctaccgtgtgtgttcatgaggtctgccaatggtccatttggtatgatgagagccatccagaggctggcatgtcaggcggggactttgaaacatttgagaacctgaggaagaaggggcaccaggtgtgtcaaacccccgttggcatcgaatgccgtgcagtgaaattccctagcatggacttagagaagctgggtcagaaggtcaactgtgacccatcctctgggctgagttgcttcaacagtgaacagagccccccgctgtgccacgactatgagctgagggttctctgttgtgattatgtgccctgtggctcctctctgaccttgggcataagtaccactccctcccagcctgacaccagcagaagaccctcttcgcctacacttaccactcatacagcatcctcagaatcacagtcctggaccagagaagagaaaaagacatcagtggataaaagttacagctcaaggcaaacagtgccattcacttcaaacagcagactcacttcaacttctatgtcgtcagccagcagcctccccctgtccaaccctacctggactacaacattgaaagcgaccgacgagaacacaatgcttagctcccggacaacagcagtattcacttcacaaaccaggtccacttcaaggcccagcacagtcacacagccaatcagcagccctgagacctcctccaccacctgccaaccccaatgtcagtggacaaagtggatcgatgtagactacccttcatctagcattaatggaggagacatcgagacatatgagaatatcagggccaatggagaaaaaatctgtgagaagcctcaggacatcaggtgtatggcccagaaccacccaggagtgaatgtggacgagttgggacagaaagtgaagtgtgatgtcagctctggtctggtgtgctacaacaaggaccagggaggcactttccagatgtgctacaactacctgatcaaggtgctctgttgtagtgttagccactgccagggatctaccacccctgaaggatcggtctcaacgacagaaactgccacctccactccccagacactgtcctccaagcctctgcccaacactagttcatttgagacctggtctccctctggccctaccaccagtatggaagcctcagagatgcccaccttttggaccctgaggacaagcgtgtcgtccccacccaccactcctctcacagtcacctcagtgagcactcagcatcccaagagtctagaatcctctggcagcccatcagtggtgactgccaggtccacctctcaaggttactccctgcctcccagcagtccccacactaccaattcactctcagcaacaacctcaaaggcttccttgtccagcatgacaaccatctccacctccctgaccactcctgggccctccagtcctcctcatggaggcacgaccacacacccagtcaccactgcctccacgaccagagcagtcactgagaccctgtcctcaagacctcataccaagaccacctcagagctccctacagtttcctcagccagctccacagcaggacctggcacacagaccttctccaccacctgccaaccccaatgtcagtggacaaagtggatcgatgtagactacccttcatctagcattaatggaggagacatcgagacatatgagaatatcagggccaatggagaaaaaatctgtgagaagcctcaggacatcaggtgtatggcccagaactaccccggagtgaatgtggacaagttgggacagaaagtgaagtgtgatgtcagctctggtctggtgtgctacaacaaggaccagggaggcactttcccaatgtgctacaactacctgatcaaggtgctctgttgtagtgttagccactgccagggatctaccacccctgaaggatcggtctcaacgacagaaactaccaccgctactccccagaccctgtcctctaagcctttgcccaacactagttcaattgagacatggtctccctcaggccctaccaccagtatggaagcctcagagatgcccaccttttggaccctgaggacaagcgtgtcgtccccacccaccactcctctcacagtcacctcagtgagcactcagcatcccaagagtctagaatcctctggcagcccatcagtggtgactgccaggtccacctctccagggcactcccagcctcccagcagtccctatgctaccaattcactctcagcaacaacctcaaaggcttctctgtccagcatgacaaccatctccacctccctgaccactcctgggccctccagtcctcctcatggaggcacgaccacacacccagtcaccactgcctctacgaccagagcagtcactgagaccctgtcctcaagacctcataccaagaccacctcagagctccctacagtttcctcagtcagctccacagcaggaccaggcacacagactgggtccacttcaaggcccaacacagtcacacagccagccagcagccctgagacctcctctaccacctgccaaccccaatgtcagtggacaaagtggatcgatgtagactacccttcatctagcattaatggaggagacatcgagacatatgagaatatcagggccaatggagaaaaaatctgtgagaagcctcaggacatcaggtgtatggcccagaaccacccaggagtgaatgtggacgagttgggacagaaagtgaagtgtgatgtcagctctggtctggtgtgctacaacaaggaccagggaggcactttccagatgtgctacaactacctgatcaaggtgctctgttgtagtgttagccactgccagggatctaccacccctgaaggatcggtctcaacgacagaaactaccaccgctactccccagaccctgtcctctaagcctttgcccaacactagttcaattgagacatggtctccctcaggccctaccaccagtatggaagcctcagagatgcccaccttttggaccctgaggacaagcgtgtcgtccccacccaccactcctctcacagtcacctcagtgagcactcagcatcccaagagtctagaatcctctggcagcccatcagtggtgactgccaggtccacctctccagggcactcccagcctcccagcagtccctatgctaccaattcactctcagcaacaacctcaaaggcttctctgtccagcatgacaaccatctccacctccctgaccactcctgggccctccagtcctcctcatggaggcacgaccacacacccagtcaccactgcctctacgaccagagcagtcactgagaccctgtcctcaagacctcataccaagaccacctcagagctccctacagtttcctcagtcagctccacagcaggaccaggcacacagactgggtccacttcaaggcccaacacagtcacacagccagccagcagccctgagacctcctctaccacctgccaaccccaatgtcagtggacaaagtggatcgatgtagactacccttcatctagcattaatggaggagacatcgagacatatgagaatatcagggccaatggagaaaaaatctgtgagaagcctcaggacatcaggtgtatggcccagaaccacccaggagtgaatgtggacgagttgggacagaaagtgaagtgtgatgtcagctctggtctggtgtgctacaacaaggaccagggaggcactttccagatgtgctacaactacctgatcaaggtgctctgttgtagtgttagccactgccagcgatctaccacccctgcagggtcggcccccacaacaggaactgcccccactgccacttctgggactgctacacatacttcctggcctgcgtccagcatgcctaccagtaccacagagtcaccttcttcctctggaaaaaccacaatccttaccacagcttcttctctagccacaggcacacccagagagactcaaacctcatccttgctaaccactggtctctcctcagccctcacaaccacagggaccacctccacaggctgtaaatctcaatgcacctggacagactggctggacagtgacaaaccccaacctggccagtttgaaggagacatcgagacctactatcatattcagaacaagacaggtatcaagatatgcaagaaacccgtggacatcgagtgtgaagccgtcctctttcccaacatatccttccagaagctgggccaggaggtggtttgtaatgtggactttggactcatctgtagaaacagcaagcagagtgacaaccaaatctgtttcaactaccacatccgtgtcctctgctgtgaggaagataccagctgtatcagcacaactggactactgtctaccacctccacatcagcacctggatttcccagcacagtctccacgtctacaacaagcaagttgccatcagaggagccaataccctcaacttcattcacaactcaaagtagaccctctacccccaggacagaaaagattgtctccattgccacagctaggactactgggagtttccctgtctctagtctctctacctttccagcctctcccactagccttctcccaacttcagaagagccacattcaggtaaaccaagcacaagttcatggacagcctcctccaatgttccgagcactgccaagccaaccacctccactggcagacagttccctagaacaaaaaccacattgtggaatagtctcccttctagtaccccaaccatggccaccagatccatccatcccatttctaccacaatgacaaccaagaaccctcaaacactagtcaccagtgacatttccaaaagcaactctatgttgcctagtaggccccatatcacagcatcttcagtcacatcaacaagtggtagtcagataagcaagtcatactcctccacctccctgaccactgctgggccctccagtcctcctcatggaggcacgaccacacacccagtcaccactgcctctacgaccagagcagtcactgagaccctgtcctcaagacctcataccaagaccacctcagagctccctacagtttcctcagtcagctccacagcaggacctggcacacagactgggtccacttcaaggcccagcatagtcacacagccagtcagcagccctgagacctcctccaccacctgccaaccccaatgtcagtggacaaggtggatcaatgtagactacccttcatctagcattaatggaggagacatcgagacatatgagaatatcagggccaatggagaaaaaatctgtgagaagcctcaggacatcaggtgtatggcccagaactacccaggagtgaatgtggacgagttgggacagaaagtgaagtgtgatgtcaactctggtctggtgtgctacaacaaggaccagggaggcactttcaagatgtgctacaactacctgatcaaggtgctctgttgtagtgttagccactgccagggatctaccacccctgaaggatcggtctcaacgacagaaactgccagctccattccccagaccctgtcctccaagcctttgcccaacactagttcatttgagacctggtctccctctggccctaccaccagtatggaagcctcagagatgcccaccttttggaccctgaggacaagcgtgtcatccccacccaccactcctctcacagtcacctcagtgagcactcagcatcccaagagtctagaatcctctggcagcccatcagtggtgactgccaggtccacctctcaaggtcactccctgcctcccagcagtccccacactaccaattcactctcagcaacaacctcaaaggcttctctgtccagcatgacaaccatctccacctccctgaccacttctgagccctccagtcctcctcatggaggcacgaccacacacccagtcaccgctgcctctacgaccagagcagtcactgagaccctgtcctcaagacctcataccaagaccacctcagagctccctacagttccctcagccagctccacagcaggacctggcacacagacggggtccacttcaaggcccagcacagtcacacagccagccagcagccctgagacctcctctaccacctgccaaccccaatgtcagtggacaaagtggatcgatgtagactacccttcatctagcattaatggaggagatatagagacatatgagaatatcaggaccaatggagaaaaaatctgtgagaagcctcaggacatcaggtgtatggcccagaaccaccccggagtgaatgtggacgagttgggacagaaagtgaagtgtgatgtcaactctggtctggtgtgctacaacaaggaccagggaggcactttccagatgtgctacaactacctgatcaaggtgctctgttgtagtgttagccactgccagggatctaccaccactccagggtcggccccaatgacaggatcagcaactactgccactcagaccctgagttctatgcctcttcccaacactagtctgaccgtgaccagtcctcactcggcctccaccacagcagcaacaagcatcacggaaaccagcagcccaaggagcgtctcctcaattcatacaacacccaagatctttcctgagacattacagtcgacgactggcttgacaacacagcaaacgtcgtcaactggaatctggacaagtatgcttacgggtacagctggcactgtctcctcaacatctctgtccaccagcctagagtctactacaggcataacagaggtgtccaccagtatgcccatgacatctaccctaccagtaactgtgactaatgctactaccccccagggcacaacactctgccaacccaagtgtaagtggactgaatggtttgatgtggattcaccgacctcgggatcggtaaaaggggacatggaaacctatgagaacatcagggcctctggtaagaccttgtgccaggcaccagagaaaattgagtgtcgggcagagaactaccctgcagtgagcattgataaggttggccaagtagtaagctgcaacctagaaacggggctggtctgcaaaaatgaagaccagaaagatgatttcaaaatgtgctttaactacaatatacgtgtgctttgctgtgatgactatagccactgtcctactaccacttacaccaccatcaagtctcccctggcccctttcacaacctcagtgtcctcgagcatggagtccacctttcagactaaccgtcctgccagcccttcagggccaagcacccaagcatccacatggtctacacttcctgactcaggctgtacacctcgctgcaaatggacagagtggtttgacgcagactaccctaaccccggccccagaggcggggactttgaggtctatgcagtatttcgtgaggttggctacatcttctgcgatcagcccaaggacatcgagtgccgttcagagaaggagccagacaggcccctggaaactctagagcaggtggtccagtgtgatgtgcgatttgggctgatatgcaaaaatatcaaccaatcgggacctttgcagtattgtgacaactaccacgtgcgcctcctctgctgtgataactatagccactgtacctcgtcacccatggccaccatgtccactgctctttcttcctctcacctgccatctactcacacttccctggctttgaataccacgacttttttccccggactcagtagttccagtgagccccactcctcttccctgatgtctactcacacctccacaatgttgaccactgagacttcacctatagccactggccccactgtggccccatcctcaacctcagggaccccttacacccccaaagtttcccccagcagccaggtgaccttcagtgtgtctactgctttttcctccgtcttcagtacccccaggcctgtcttttccagccatgcatcttccccatcaccctgtttctgtcaggcatttgggcaactgttcttacctggggatatcatctacaataagactgatggagctggctgccaattctatgccatctgcaaccagtattgtgatgttgaccgcttccagggtacctgcccctcctcttcacctccaatgtcctctaccactgtacctttgcctcccctgcttcctggctgtgataatgctatccctccccggcaggtgaatgagtcttggaccctggagaactgcacagtggccaggtgccagggcaacaatcaaatcattctccttgagccggagcctgtggacaatgtcacctgtgccaaccgtcacttgcctatcaaagtgtgggaccaggagccttgccacttccactacgagtgtgaatgcttctgcagtggatgggggcactcacactacctgaccttcgatggcacctcctatactttcctggataactgtacctccgtgctcatgagagagatccaccctcgccatggtaacctgagcatccttgcccacagctactactgtggggctaccacaaatgtcacctcctgtccccgtgccctcagtgtgtactacaactccatggagattatccttaccatcagcaccactgagagcgggaaggatgagagcctgattatatgggaccaaatgtggatacgatcaggcttcagtaagaatggtgtgaccgtgtccttgagtggggccaccacaatgagtgtcaacatttccaccattggcaccatcatcacctttgatgggaacatcttccagatatggttgccctacagatatttcagcagcaatactgagggccagtgtggtacctgcacaaacagccagatagacgactgccgccggcctgatggcaccatagcttctgactgccaggacatggccaaagaatggctggtgcctgggaacagtagcagcagctgcttagctcagcctagccctctcccgagcaccactccccagaccccagtgtccagcacactgacctccaccccatgcccctctgcacctctctgtgagctgatgctgagccaggtcttcgcagagtgccacaggctcatccctccagatgccttcttcagaagctgtgtcagtgaccactgcaatgccaatattactgacatgctctgtcagagcctggaggcctatgcagcactctgccgggcccaaggtgtatgtaccaactggcgcaatgccactggaggcttgtgtgacctctcctgtccacccactaaggagtacaggccctgtggacccctgcatccagcatcctgcaactcgaggacccaggatagtacaactgggatgctggcagagggctgcttctgccctgagaaccagctcctcttcaactcacgcatggacatctgtgtgtcagagtgtccctgcgtgggaccagacgggctacccaagtttcctggagaacactggatcagcaactgtcaggcctgtgtatgtgagcccggctctgtgtcggtacagtgtgagccagtgaagtgtgagagccaggataaacccccacagtgcacagaagctggctttgtgactgtgacctggcccagtgctgacaatccatgctgccccgagacactgtgtgtttgcaattcaaccacctgccccaagagcctgcccacgtgtgagccaggatatgagctggtccagacccatgagaatagcagctgctgccccagctacagctgtcgacctaagctgtgtacatacaatgacaccatctatggggttggtacaaccttcccagggggtccctgccacacatgcacctgcctctctgatggtgaccaagagccaaaagtagagtgtaaggagacgaactgtaccacctcttgtccccagggcttcaagtacacgctggtgccagagcagtgctgcggggagtgcctgcaaaatgcctgcctcacaccagagggccacgcggtacagcccaatgaaacctgggtgaacagtcctgtggacaactgcactgcataccactgtatggctgagaatggagtctatgtgctgaccccaatccccacatcttgccctgatgtatccaactgtacgggaaccctaaggaaaacgggctgctgttactcctgtgaaaaagaggactcaagtacctgtcaagtgcacgtaaatgcgactgtcttgcggtataagggctgtgagacagaggtcaacatcaccttctgcgagggttcctgctctggaatatccaagtactccatggaggcccaggccatggaacgccagtgcacctgctgtcaggagagcaaggtccatgatgtagctgtaactatgcagtgtcctgatggtacagtcatccagcacacctatacccacatcgatgagtgcaactgtgccccggcctgcagctccctgcctgggacttccatgattgcttcctagagcccattgctagaaggcaattgcatccctaaccccttatgtccctccacctggggcagaacctgcacaactgaccatgagaaccttaggcaggcaagctccccgaggcccacaagaaccctctgtggccctcactgcctctgctccaccctccgcctgccactgttaagaccagcatcaaagagggtggtggggcaatcaagatccacttgaggagggttccaggtgaggatctggccctgaggagcctgttggctgttttggcctcattctctgtgagagcctgtggctgttaaggctccccacagcaagcctgtgtgtcctctgtcacataaaacaagccctgtgtcaggcatctcatgctcacaaaagcagatgggactgtccaagcaagatcagctaccagggatctgtatcaggcaaggtggctgcctgctggaggggctctgggatctggggttgaagaggggtctgtgctcactcatccctaagctgcaataaaccctggcactgtg

SEQ ID NO: 899 - DNA, 12845 bp, Rattus norvegicus
  source 1..12845: mol_type = genomic DNA
ttagtccctcctgcctgccctctgtactgcccccaggatgggcggcaggaattggagctgggctctggtctgggcttctgtggccttgctcatggtgtggccagcagagagccagggccaggaagagctgagcgcagaacatccagaactcaccggagacagtcagaaagtgtatagtgcccccacatcctcatccgcacggcatgtcaccttcatcccacctatctctgtcttcccaagcataagtgccttacacctggcacacaacgggagagtgtgcagcacgtggggtgacttccattataagaccttcgatggtgacgtgttccgcttccctggcctctgtaactatgtcttctcttcacactgcggggccacctacgaggacttcaacatccaattacgtcgtggtcttgagggttccaggcccacggtcacctatgtgttcctcagggcccagggactggtgattgagctgtctaatggctctgtcctggtaaacggacatcgggaggagctgccctacagccgtgcaggtcttctgatggagaagaccagtggctatgtgaagatcagcatcaggctagtcctcaacttcctgtggaatgaagaagacagtgtcctgctggaactggactccaaatacaccaaccagacgtgtgggctgtgcggtgacttcaacgggctcccagctgtcaatgagttctacgcccacaacactaggctgacccctgtccagtttggaaacctgcagaagctggatggtcccacagaacagtgccaggatgtcctactgtcacctgccaacaactgcacagatacggagggcatctgccgtcacatcctgcttggccctgcctttgccgagtgcatcgccctggtagacgtcaacgtgtacctggatgcctgtgtccaggacctgtgccgctgccccacctgcccatgtgccacttttgctgaatattcccgccagtgtgcccatgcagggggccacccacagaactggaggcgttccgatctctgcaactggacctgccctttcaacatggaataccaagagtgcagctcaccctgtgtggatacctgctccaacccccagcgctctcaactgtgcgaggaccactgcatggatggctgcttctgtcccccaggaactgtgctggatgatgtcagacatttgggctgcctgcccctggaacagtgccactgtacccacggtggccacatttatgcccctggagagtccttcaacaccacctgtagctcctgcacctgcttcgggggactgtggcagtgccaggacctgccgtgccccggcacctgctctgtgcaaggcgggtcccacatctccacctttgatgagaaactctacaatgtgcatggagactgcagctacatcctgaccaagaaatgtgcagatagcagcttcactgtgctggtggatcttcggaagtgtggaatgacggacaccgagaactgcctcaaagcagtgacgctgagcctcaatagcggggacatggtcgtcaggatccaggtcaacggtgctgtgttcctgaactccattttcactcaactgcccttgtcagcaggcaacgtcaccatcttcaggccatcatccttcttcgttatagtacaggtgggcacggggctgcagctgcaagtgcagctggtgcccttcatgcaggtgtttgtcaggctggaccgctcctaccaaggccagatgtgtggcctgtgtggaaacttcaaccagaaccaggccgatgacttcacggccctcagtggggtggtggagggcacaggggcagccttctccaacacctggaagactcaagcctcctgccccaactccaagaacacctatgaagacccctgctcatacagtgtggagaacgagaacttcgctcgggagtggtgctcgatgctcactgaaagctcaggagttttctcagcctgccatgccactgttagcccggtgcccttctactcgaactgcttgtttgacacgtgcaactgtgagaatagcgaggactgcatgtgtgccgccctgtcctcctacgtgcgtgcctgtgctgccaaaggcgtgctgctcagtggctggaggggcaaagcctgctacaagtacatgaacaactgcccccaaaccaaggagtactcctactcagtgagtacttgccagcctacgtgccgctctctaagtgaggttgacgtcacctgcagcatcccctttgtgcctgtggatggttgcacctgccctgaaggtaccttcctgaatgacaaggaccactgtgtcccagtggaggagtgcccctgctacttccatggaaccgtggtggcttccggagaggttgttatggacaacggtgtggtgtgctcgtgtacaaatgggaagttgacctgcctgggagccctgatgcagagaaacaaagagtgccaggcacctatggtatacttggactgtaacaatgcctcagtgggtgaccacggggctgaatgcctcagaagctgccacacgctggatgtggattgcttcagcacacaatgtgtctcgggctgcgtgtgtccctcagggctggtagcagatgggaatgggggctgcattgctgaggaggactgcccctgcgtacacaatgaggccacatacagacctggggagatcattcgggtagactgcaataactgcacctgccggaaccgccggtgggaatgcaccaaccagccctgcatgggtgcctgtgtagcctatggggacggccactttgttacctttgatggtgaacgttacatctttgaaggcaactgcgagtataccttggctcaagactactgcagaggcaacaccagtactgatgggaccttccgtattgtcactgagaatgtcccctgtgggaccacaggaaccacctgctccaaggccatcaagatctttgtggagagctatgagctgatccttcatgaggggaactttaaggtggtagcgcgagggccaagtggggaccctccgtacaagatcagatacatgggcatcttcctggtcattgagatccggagtgggatagtcgtgtcctgggacaggaagaccagtgtgtttgtccggctgcagcagcattataagggtagggtctgcggcctgtgtgggaactttgatgacaatgccatcaatgacttcaccacacgcagccagtctgtggtgggtgatgtgctggagtttggaaatagctggaagttctccccatcctgcccggatgccccagttcccaaggatccctgcatcgccaacccttaccgcaagtcctgggcccagaaaaaatgtagcatcatcaacagcgcaactttcgctgcctgccactctcaggttgactctacaaaatactacgaagcctgtgtgcatgatgtgtgtgcctgtgactcaggaggtgactgtgagtgcttctgcactgccgtggccgcctacgcccaggcctgccgtgatgtgggtgtgtgcttgtcctggaggactccagacatctgccctcttttctgtgactactacaaccctcatgggcaatgtgagtggcattatcagccctgtggagccccctgtctgaagacctgtcggaatccatctggacactgcctggttgacctgccaggcctagaaggctgctacccacagtgtccacccagccagcccttcttcaatgaagaccagatgaagtgtgtggcccagtgtggctgctatgatgatgacggaaactatcatgacattggcacacaggtccctacagctgagaactgccagagttgtctctgcacccctggtggcctccagtgtgcttacaaccttacagcctgcacatgcatctatgagggccgtacctacaactacaatgatgttgtctacaacaccactgatggcctcggtgcctgcttagtagccatctgcaaagacaacgggactataaaacgcacgactgaagagtgccctgaagtcccgtctaccacaccattcatattcaccaccactctgacaccccttaccacaaacggttcagcttccactgcgtctactgtgtgtgttcgtgaggtctgccactggtccagttggtatgatgagagccatccagaggctggcatgttaggcggggactttgaaacatttgagaacctgaggaggaaagggtaccaggtgtgtcaaacccccgttgccattgaatgccgagcagtgaagttccccagcctggacttagagaagctgggtcagaaggtaaactgtgacctatcctctgggttgagatgcttcaacaatgaacagagccccccactgtgccacaactatgagctgagggttctgtgttgtgattatgtgccctgtggctcctctctgacctcgggtgtgagtaccactccctctcagtctgacaccagtaaaaacccctctctgcccacacttaccactcatacagcatcctcaaaatcacagtcctggaccagagtgcttagctcccagacaacagcagaattcacttcacacaccaggtccacttcaagccccaacacagtcactccttccactgcgtctactgtgtgtgttcgtgaggtctgccactggtccagttggtatgatgagagccatccagaggctggcatgttaggcggggactttgaaacatttgagaacctgaggaggaaagggtaccaggtgtgtcaaacccccgttgccattgaatgccgagcagtgaagttccccagcctggacttagagaagctgggtcagaaggtaaactgtgacctatcctctgggttgagatgcttcaacaatgaacagagccccccactgtgccacaactatgagctgagggttctgtgttgtgattatgtgccctgtggctcctctctgacctcgggtgtgagtaccactccctctcagtctgacaccagtaaaaacccctctctgcccacacttaccactcatacagcatcctcaaaatcacagtcctggaccagaggtgggaaagagacatcactggataaaactcacagctcaaggcaaacagtgacgtttgcctcaaagagcagacctacttcatctcctacgtcatctagaaactcagccagcagcctccccttgtccaaccctacctggactacaacagtgaaagggaccaatgagaacacagtgcttagctcccagacaacagcagaattcacttcacacaccaggtccacttcaagccccaacacagtcacacagacagtcagcagccctgagacctcctccaccacctgccaacccaaatgtgagtggacaaagtggattgatgtagactatcctacttctagcattgatggaggagacatagagacatatgacaatatcagggccaatggagaaaaagtctgtgagaagcctaaggacatcaggtgtatggcccagaactaccccgaagaggccttagacaacttgcaacagaaagtgaagtgtgatgtcagccttggtctggtgtgctacaaccgggaccagggaggcattttcccgatgtgctacaactacatgatcaaggtgctctgttgtagtgtcatccactgccagggatcttccaccactgcagagtcggccctgacgacgggaactgccactttcactacccagaccctgtcctccaagcctcatcccaacactgattcagttgagacctggtctccctcagggtccaccacccatatagatgcttcagatttgcccacccctggaaccctgactacaagtgtgtcatccccactcaccacccctctcacagtcacttcagtgagcactcagcatcccaagagtctagaatcctctggcatcccatctgtggtgactatcaggtccacctctcaagggcagtccctgcttcccagcagtccccacactaccaacacgttctcagcaacaacctcaaggacttccctgtctagcctggccaccatctctacctccctgaccactcctggaccctccagaactcctcctgggagcactaccacaaacccagccacagctgcctccatgaccagagcggttactgagaccctgtcctcaaggccacataccgagaccacctcagagttccctggagtttcctcagccagctccacagtagggcccagcacacagactgggtccacttcaagccccagcacggtcatacagacagtcagcagccctgagacctcctccaccacctgccaacccaaatgtgagtggacaaagtggattgatgtagactatcctacctctagcattgatggaggagacatagagacatatgacaatatcagggccaatggagaaaaagtctgtgagaagcctaaggacatcaggtgtatggcccagaactaccctggacaggccttagacaacttgcaacagaaagtgaagtgtgatgtcagccttggtctggtgtgctacaaccgggaccagggaggcattttcccgatgtgctacaactacatgatcaaggtgctctgttgtagtgtcatccactgccagggatcttccaccactacagaatcagccccgacgatgggaactgccactactgccacttctgggacatccacacacacttcctggcctgtgtccagcatgcctaccagcgccagcactacagagtcattttcttcccgtgaaaaaaccacagtccttaccagagcttcctctacagctacagtgacatccagggagactcaaacctcatccttgctaaccactggtccatcctcagccctcacaaccacagagaccacttccacaggctgtaaatctcagtgcacctggacagattggctggacagtgacaaaccccaacctggccagtttggaggagacattgagacctactatcatattcaaaacaagacaggtatcgagatatgcaagaaacctgtggacattgagtgtgaggccatcctcttccccaacatgtccttccagcaactgggccaggaggtggtttgtaatgtggacttcggactcatctgtaggaatagcaagcaggtcgacaatgaaacttgtttcaactaccatatccgtgtcctctgctgtgaggaagatatcagctgtatcagcacaactgggtcactgtccaccacttccacaccagcaactggatttcccagcatagtccccatgtccacaagcaagtggtcatcagaggagccaaaatcctcaacttctttcacaactcaaaggagaccctctacccctaggacagagaagattgtccccaacaccacgactaggactactgggagtttctctgcctctagtctctctacacttccagcctctcccaccagccgtctccaaacctcaaaagagccacactcgggtaagccaagtacaagtttgtggacagcctcctccaatgttctgagcactgccacgctgaccacctctattggcaaaccggtctctggaacaaaaaccacattgtggaaagacctccattctagtacctcaaccatggccacatccacccatcccatttctaccacaatgacaacgaagaaccctcaaacactgaccaccaatgacatttccaaaagcaactctatgctgcctagtaggccccatatcaccacaacatcttcagccccagcaacaaataggagtctggccaccatctctacctccctgaccactcctggaccctccagaactcctcctgggagcactaccacaaacccagccacagctgcctccatgaccagagcggttactgagaccccgtcctcaaggccacataccgagaccacctcagagctccctggagtttcctcagccagctccacagtagggcccagcacacagactgggtccacttcaagccccagcacggtcatacagacagtcagcagccctgagacctcctccaccacctgccaacccaaatgtgagtggacaaagtggattgatgtagactatcctacctctagcattgatggaggagacatagagacatatgacaatatcagggccaatggagaaaaagtctgtgagaagcctaaggacatcaggtgtatggcccagaactaccctggacaggccttagacaacttgcaacagaaagtgaagtgtgatgtcagccttggtctggtgtgctacaaccgggaccagggaggcattttcccgatgtgctacaactacatgatcaaggtgctctgttgtagtgtcatccactgccagggatcttccaccactacagagtcggccctgacgacgggaactgccaccacggcagggtcagtcccagtgacgggatcagcaactactgccactcagaccctgagtcctaagcctcttcccaacactagtctgactgtggccagtacccacccagcctccaccacagtaggaacaagcgtctcaaaagctctaacaggctctagccacacagccactcttgttacatcccatggcacaaggcccccacatgtttcaactatcaaggaaaccagcagcccgggaagagcctcctcaatccatacaacacccaagaccttgcctgagacattacagtcgacatctggcttgacaacacaacagatctcgtcaactggaatctggacaagtgtacatacgggtacagctggcactgtctccccaaaatctctgtccaccaccctagaaacgactacaggcataaaagagccatccaccagtgtaccaatgacacataccctaccaccaaccgtgactaatgcaaccacctcccagggcacaacacactgccagcccaagtgtaagtggactgaatggtttgatgtggactcaccgacatcgggggtagtaaaaggggacatggagacctatgaaaacatcagggcctctggcaagaagatgtgccaggcaccagagaaaattgagtgtcgggcagagaactaccctgcagtgagtattgataaggttggtcaagtagtaagctgcaacctggagacggggctagtctgcagaaatgaggagcagacagatgattttaaaatgtgcttcaactacaatatacgtgtgctttgctgtgatgactatagccactgtcctgaaaccccttacagcaccatcaagccatccccgctctggtctacccctacgcccctggtccctttcacaacctcagtgtcctcgagcacggagtccacctttcagactaagcatccctccagctcttccgtatcaagcacccaagcctccacatggactatatctcctgactcgggctgtgaacctcgctgcaaatggacagagtggtttgacgccgacttccccaaccctggccccagaggcggggactttgaggtctacgcagtgcttcgtgaggttggctttatcttctgtgatcaacccaaggacatccaatgccgttcagagaaggagccagacaagcccctggaagctctacagcaggtggtcctgtgtgatgtgcgattcgggctgatatgcaaaaatatcaaccaatcgggacctttgcagtattgtgacaactaccacgtgcgcctcctctgctgtgacaactatagtcactgtaccacgtcacctctggccaccacatccactgtcccttcttcctctcgcctgtcctctacccacactgccccagctttgaataccacgacttctttccctggggtctctagttccagcgtgccccactcctcttccctggtatctactcacacctcggcagtgttgaccaccctgacttcaactatagccactggtcccattgtgatcccctcctcaacctcagggacccctcacacccctgaagtcttccccagcagtcaggcgaccttcagcgtgtctactgcttcttcctcctcggtgttcagtacctccaggcctactgtcatttccagccaagcatcttccccatcaccctgtttctgccgggcatttggacagctgttcgtacctggggatatcatctacaataagactgatggagctggctgccaattctatgccatctgcaaccagcactgtgatgttgaccgcttccagggtgcctgcccctcctcttcacctccaacgccctctacccctgcgcctttgtctcccctgcttcctggctgtgataatatcacccctccccggcaggtgaatgagtcttggaccctggagaactgcacggtggcccagtgccagggcaacaaccaaatcatcctcctagagccagagcctgtggacaacgtcacgtgtgtcaacaagcacttgcccatcaaagtgtgggaccaggagccttgccatttccactatgagtgtgaatgcttctgcagtggatgggggcactcccactacctgacattcgatggcacctcctatacttttgtggacaactgtacctcagtgctcatgagagagatccaccctcgccatggcaacctgagcatccttgcccacagctactactgtggggccaccacaaatgtcaccttctgtccccgcgccctcagtgtgtactacaactccatggagattgtcctcaccaccaccaccaccaacagtgggaaggaagagagcctgattatatgggaccagatgtggataaggtcgggcttcagtaagaatggcgtgaccgtatctttgagtggggccaccacaatgagtgtcaacatttccaccattggcgccagcatcacctttgatggaaacatcttccagatatggttgccctatagatacttcagcaacaacactgagggccagtgtggtacctgcacaaacagtcagacagacgactgccgccggcctgatggcaccatagcttccgactgccaggacatggccaaagactggctggtgccggggaacaacaacagcgactgcttagctcaacccagcccttcccccagcaccacttcccagcccccaatgtccagcacactgacctccaccacatgcccctctgcgcctctctgtgagctgatgttgagccaggtctttgccgagtgccacaagttcatccctccagacgccttcttcagaacctgtgtcagtgaccactgcaatggcaattttagtaaaacgctctgtcagagcctggaggtctacgcagcgctctgccggatccagggtgtatgtaccgactggcgcaatgccacaggagggctgtgtgacttctcctgtccaccctctaaggagtacaggccttgtggacccatgtatccagcttcctgcagccccaggacccaggaactttcagatgggaccctggcagagggctgcttctgccctgagggtcagctcctcttcaactcacgcacggacatctgtgtgtctgagtgtccctgcgtgggaccagatgggttacccaagcttcctggagaacactggatcagcaactgccaggactgtgtgtgtgaccttggctctgtgtcagtacaatgtgagccggtgaagtgtgagggccaggacaaacccccacagtgcacagaagctggctttgtgactgtgacctggcccagcactgacaatccatgctgccctgagacactgtgtgtttgcaattcaaccacttgcccgagtctgcccaaatgtgaaccagggtacgaactgctccagacccatgagaacggcagctgctgtcccatctccagctgtcgacctaagctgtgtacatacaatgacaccatctatggggtcggtgcaaccttcctagggggtccctgccagatatgcacctgcctctctgtggacaaccaagaacctagagtagagtgtagggagacccactgcaccacctcttgtccccagggctttgagtacacactggtgccagaccagtgctgcgggaagtgtgtacagaatgcctgcctcacaccagagggccaggtggtacagcccaatgaaacctgggtgaacagccctggggacaactgcactacatactattgtagtgctgagaatggagttcacgtactgaccccaatccccacgtcttgccctgatgtgtccaactgtacgggaatcctaaggaaaacgggctgctgttactcctgtgaaagagaggactcaagtacctgtcaagtgcacgtcaacccaaccgtcttgaggcacgagggctgtgagacagaggtcaacatcaccttctgcgagggttcctgctctggaaagtccaagtactccatggaggcccgggccatagagcatcagtgcagctgctgtcaggagaccaaggtccatgatgtagctgcaacattacagtgtcccgatggtacagtcatccagcacacctatacccacatcgacgagtgcaaatgtgccccggcctgcagctccctgcctatgacttccatgactatttcctagagcctcttgctggaaggcaattgcatccccaaccccttatgtccctccacctggagcagaatctgcacaactgaccatgaaaaccttaggcaggtatgctccatgaggcccacaagaaccctctgtggctctcactgcctctgctcctcccctctgcctgccacttggtgagaccagcatcaaagagggggacagggcaattaagattcacctgaggagggtgccaggcgagggtttggtcctgaggagcctgttggctcctttggtctcatcctccgtgagagcctgtggctgtagggctccccacagcaagcctgtgcgccctctgtcacataaagtgagctctgtgtcagtcacctcatgttcacaagggcagatggaactgtccacgcaagaccagctaccagggagctgtatcagacaaggtggctgcctgctggaggggctctggggtctgaggtggaagagggggtctgagctcactcatccctaagcggcaataaaccctggcaccgtg

SEQ ID NO: 900 - DNA, 19765 bp, Macaca mulatta
  source 1..19765: mol_type = genomic DNA
cccagttccctccctgcccgtccgtgccccccacctgtgccagtccccaggatgggtgccctgagcacgtgccggacgctggtgttggctctggcggccgtgctcctggtgcagcaggcagagacccagggccctgcggagccgagctggggcagtgcagggcacaccacagatggcggtgccccgatggcctcgcccacccggcgtgtgagctttgttccacccgtcactgtcttccccagcctgagccccctgaacccggcacacaacgggcgggtgtgcagcacctggggcgacttccactacaagaccttcgacggtgacgtcttccgcttccccggcctctgcaactacgtgttctccgagcactgcggcgccgcctatgaggacttcaacgtccagctacgcagaggcctggtgggctccaggcctgtggtcacccgtgttgtcatcaaggcccaggggctggtgctagaggcgtccaatggctctgtcctcgtcaacgggcagcgggaggagctgccttacagccgcactgggctcctggtggagcagagtggggactacgtcaaggtcagcatccggctggtcctgaccttcctgtggaacggagaggacagtgccctgctggagctggaccccaaatacgccaaccagacctgtggcctgtgcggggacttcaacggcctcccagccttcaacgagttctatgcccacaatgccagactgaccccgctccagtttgggaacctgcagaagttggatgggcccacggagcagtgcccggacccgctgcccttgccagccagcaactgcacagatgaggaaggcatttgccaccacaccctgctggggccggcctttgcggagtgccatgcactggtggacactgccccgtacctggctgcctgcgcccaggacctgtgccgctgccccacctgcccgtgcgccacctttgtggaatactcacgccagtgcgcccacgcggggggccagccgcagaactggaggcgccctgagctctgcccccggacctgccccgtcaacatgcagcaccgggagtgtggctcaccttgcgtggacacctgctccaacccccagcgcgcacagctctgcgaagaccactgcgtggacggctgcttctgccccccaggcacggtgctggatgatgtcacgcactctggctgcctgcccctcgggcagtgcccctgcacccacggcggccgcacctacagcccgggcgcctccgtcaacaccacctgcagctcctgcacctgctctggggggctgtggcagtgccaggacctgccgtgccctggcacctgctccgtgcagggcggggcccacatcaccacctacgacgagaaactttacgacctgcatggcgactgcagctacgttctgtccaagaaatgtgctgatggcagcttcaccgtgctggccgaactgcggaagtgtggactgacggacaacgagaactgcctgaaggccgtgacgctcagcctggacggcggggacacggccatccgggtccaggcagacggcagcgtgttcctcaactccatctacacgcagctgcccctgtcggcagccaacatcaccctgttcacaccctcgagcttcttcatcgtagtgcacacaggcctcgggctgcagctgctggtgcagctggtgccgctcatgcaggtgtttgtcaggctggaccccgcccaccagggccagatgtgcggcctgtgtgggaacttcaaccagaaccaggctgacgacttcgcagccctcagtggggtggtggaggccacaggcgcagccttcgccaacacctggaaggcccaggccacctgcaccagtgccaggaacagctttgaggacccctgctccctcagtgtggagaatgagaactacgcccggcactggtgctcacgcctgactgaccccaccggctccttctcgcgctgccactccgtcatcaaccccaagcccttccactcgaactgcctgtttgacacctgcaactgtgagcggagcgaggactgcctgtgcgccgcgctgtcctcctatgtgcacgcctgtgccgccaagggcgtgcagctcagcggctggagggacggcgtctgcaccaagtacatgcagaactgccccaagtcccagagctatgcctacgtggtggacgcctgccagccgacttgccgaggcctgagtgaggccgacgtcacctgcagcgtttcctttgtgcctgtggacggctgcacctgccccacgggcaccttcctcaatgacgcgggcgcctgtgtgcccgcccgggagtgcccctgctacgttcacggcaccgtgctggctcctggagaggtcgtgcacgacgaaggcgctgtgtgttcgtgtgagggtgggaagctgagctgcctgggagcctctctgcagaaaagcacagggtgtgtggcccccatggtgtacctgaactgcagcaacagcttggcgggcacccctggggccgagtgcctccgaagctgccacacgctggacgtgggctgtttcagcacacactgcgtgtccggctgtgtctgtcccccggggctggtgtcagatgggagtgggggctgcatcgccgaggaggactgcccctgcgtgcacaacgaggccacctacaagcctggagacaccatcagggtcgactgcaacacctgcacctgcagaaaccggaggtgggagtgcagccaccggctctgcctgggcacctgcgtggcctacggggatggccacttcatcacctttgatggcgagcgttacagctttgaaggcagttgcgagtacatcctggcccaggactactgtggggacgacgccacccacgggaccttccgcatcgtcaccgagaacatcccctgtgggaccaccggcaccacctgctccaaggccatcaagctcttcgtggagagctacgagctgatcctccaggagggtgcctttaaggcagtggcgagggggccgggcggggacccgccctacaagatccgctacatggggatcttcctggtcatcgagacccgcgggatggccgtgtcctgggaccggaagaccagtgtgttcatccgactgcaccaggactacaagggcagggtctgcggcctgtgcgggaacttcgacgaccatgccatcaatgactttgccacgcgtagccggtctgtggtgggggacgcactggagtttgggaacagttggaagctctccccgtcctgcccagacgccctggcgccgaaggacccctgcacggccaaccccttccgcaagtcctgggcccagaagcagtgcagcatcctccacggtcctaccttcgccgcctgccgctcccaggttgactccaccaagtactacgaggcctgcgtgaacgacgcgtgtgcctgtgactcgggtggtgactgcgagtgtttctgcacggctgtggctgcctacgcccaggcttgccacgacgcgggcctgtgtgtgtcctggcggactccggacacctgccctttgttctgtgacttctacaacccacacgggggctgtgagtggcactaccagccctgcggggcaccctgcctaaaaacctgccggaaccccagtgggcactgcctggtggacctgcctggcctggaaggctgctacccgacgtgcccacccagccagcccttcttcaatgaggaccagatgaagtgcgtggcccagtgtggctgctacgacagggatggaaactactatgacgttggcgcaagagtccccacagcggagaactgccagagctgtaactgcacgcccagtggcatccagtgcgctcacagccttgaggcctgcacctgcacctatgaggacaggacctacggctaccaggacgtcatctacaacaccaccgatgggcttggtgcctgtttgatcgccatctgtggaagcaacggcaccatcgtcaggaaggctgtggcatgtcctggaactccggccacaacgccattcaccttcaccactagctgggtcccccactccacgacaagcccggccctcccagtctccactgtgtgtgtccgcgaggtctgccgctggtccagctggtacaacgggcaccacccagagcctggtctgggaggcggagacttcgagacatttgaaaacctgaggcagagagggtaccaggtgtgccctgtgccagccgacatcgagtgccgggcagggcagcttcccgacatgccactgggagagctgggccagcaggtggactgtgaccgcgtgagggggctgatgtgcgccaacagccagcagagccccccgctctgtcacgactatgagctgcgggttctctgctgtgaatacgtgccctgtggcccctccctggccccaggcaccagcccccagccctccctcagtgccagcacggagcctgctgtgcctacccctacccagaccacagcaaccgaaaagaccaccctgtgggtgatcccaagcatccggtcaacagcagccctcacctcacagactgggtccagctcaggccccacgacggtcacctccctggccccaggtaccaccacctgccagccccggtgtcagtggacagagtggtttgatgaggactaccccaagtctgaacaacttggaggggacgttgagtcctacgataagatcagggctgcaggagggcacttatgtgagcagcctaaggacatagagtgccaggccgagagcttccccaactggcccctggctcaggtagggcagaaggtgcactgtgacgtccgcttcggcctggtgtgcaggaactgggagcaggagggcatattcaagatgtgctacaactacaggatccgggtcctgtgctgcagcgccgaccactgcaggggacgagccacaaccccaccaccggccacatcgctggagacggccaccaccaccacccaggtcctgttctcaacgctgcagtcaacgagtagcctgggggtgaccagcaccacagcagtccccaccctctcaaaaggactgacatcccccagatacacgggcacccttggtacagccaccacaggaggccccacggttcctgcaggctccacagaacccactgtcccaggggtggccacatccaaccttccaacacactcagtcctgccagggaccacggggagttcgggcacatggcatccctcacagccacccacgccagccccaacgacaatggcaacctccagagctcacctgacaggcacagccagctccagctccaaacagccgctgaccacgagcctggcgccgacactctcgagcgaactgttcacctctcaggccgagaccagcacccccaggacagagacgacactgagccgcttgactgagaccaccactagccagagcactacccgctgtcaaccgaagtgtgagtggacagagtggtttgacgtggacttcccaacctcaggggtcgcaggcggggacatggaaacttttgaaaacatcagggctgctgggggcaagatgtgctgggcaccaaagagcatagagtgccgggcggagaactaccccgaggtgagcatcgaccagatcgggcaggtgctgacctgtagcctggagacggggctgatctgcaagaatgaggaccagacaggcaggttcaacatgtgcttcaactacaatgtgcgtgtgctctgctgtgacgactacagccactgcccccacacagccgcccccacgcccacctcctccacacaggcacccagactcacctccatgggggccaccagccccacagtgactgcctccacagccattgcaacctggagcaccaagtcaccagcagtaacaggatcctcaactctggccaccactcaaactggccccagcttctccaagaccacagagagggtgtccctccccagtccctctgcccctttaccttccaccgccagcctcctccctaccagggagcagcagacctcccaggctccatccatgcccaccagtccaattgtgaccagcacccccacaacgtcccccgtggtgaccgcccgtgtgcacacaaccctgcggacttccagctctgggcccaccatcaggacgaccctgccctctggccccccgtctcccagcacgggctgtgtgcctcgctgcacctggacagactggtttgatgaggactaccccagctctgaccctgatggcggggactttgagacctttggggtcatccgctctgctggccataccttctgcgagcatccatgggacattgagtgccgctctgagaaggagcccaaccaacccctggaggccctggggcaggtggtgcagtgtgatgtgagcattgggctggtgtgtaggaaccgtgaccagtctgggcccctgtggtactgccacaactttcatgtgcggctgttgtgctgtgatgacagccactgtgccagcactcccacgagcaccggatccacggctaccactcccacaagcaccggatccacggctaccactcccacgagcactggatccacggctaccactcccatgagcaccagatccacggctaccactcccacgagcactggatccacagttaccgtacccatgagcaccggttccatggctaccactcccacgagcaccggatccacagttaccgtacccatgagcaccggatccacggctaccactcccacgagcaccggatccatggctaccactcccacgagcaccggatccacggctaccactcccacgagcaccggatccacggctaccactcccacgagcaccggatccacagttaccactcccacgagcaccggatccacagttaccgtacccatgagcaccggttccacggctgccacacccaggagcacaggcaccacagccaggcgctcctccaccccaggaacagctcacactgtgaaagtgctgaccaccacagccatcacaacccaggccaccagctccacagccaccccctcctccacctcaagcactgctcagagccccaaagggttgaccaccacagccaccacaactgtggctgccagctccacggtgacttcccaccccccagcaggaaccaccggtaccaccctgggtggtaccaccttgatcttcacagagccaaccactaaagccaccatgaccacgcccaccagctccatggccaccgcctcctccagccaaggaacagctcacaccccaaaagtgctgagcaccacaaccatcacaaccatggccaccacctccaaagccaccccctcccacaccccggcaactgctgccaccccaaatgtgctgaccaccatgaccacaacacccacagtcaccggctccaaagccattccctcctccagtccagggactgcacccacccttccagcactgacaagcacagccaccacacccacagctacaagctttacagccatcccctcttcctctctggggaccacctggaccctcacagcacagaccaccacacccacagccaccatgtccacaggcagaccctcctccactccagagactgcccatatttccacagtgcttaccaccacggccaccacaactggggccactggctccatggccaccccctcctccagcccaggaacagcttacactaccaaagtgctgactaccacaaccaggggcttcacagccactccctcctctagcccagggactgcacccacacttccagggcggatcggcacaaacaccacacccacaaccagcggctccatggtgaccccctcctccatcccagggaccacccacacccccacagtgctgaccaacaccaccacaaccgtggccactggctctatggtaacaccctcctctagcccacagaccactggtacacccccagcactggccaccacgggcacgacaatcacggccacaggctccaccaccaccccctcctccgctccagggacaactcccatctccccagtgctgaccaccacggccaccacacctgcagccaccagcaccacagtggctccctcctctgccctagggaccacccatacacccccagtgctgtccaccatggccaccacacatgggcgatcccagctccctgagagtccccgcatggtacccacagcctggacttccatggccacctcgggcgccacccacatcacagagccatccacggtgacttcccacaccccagtaggaaccaccggtaccaccccacactcgactccagccctgtccagccctcacactcacagcagaaccactgagtcacccctttctccagggaagaccaccccgggcctcaccacggccacctccaggaccacggccacggccacaaccagcgagacccgtgcctcgaccctgctgtccagcagccccacatcggcccccacgaccccggtggtgtccacaggctgtgagccccagtgtgcctggtcagactggctggactacagctaccccatgtcggggccctctggcggggacttggagacctactccaacatccgcgcggctggaggggccgtctgtgagcagcccctgggcctcgagtgccgcgcccaggcccagcctggtgtccccctgcgggagttgggccaggtcgtggaatgcagcctggacttcggcttggtctgcaggaaccgtcagcaggtggggaagttcaagatgtgcttcaactacgaaatccgtgtgttctgctgcaactacggccgctgccccagcaccctggccaccagctccaaggccacaccctcctccactctggagacaaccgggatcctcacagagccaaccactacagccatcacaacagtggccacgggctccacagccatgccctcctccactccagggaccaccgcgatcctcacagagccaaccactacagccatcacaacagtggtcacgggctccactgccatcccttcctccacctcagggactactcaaatcaccaaagtgtttcccaccacaactgcaacgactgaagccactggctccacggccaacccctcctccaccccagggaccaccggctccacagccacctcctcctccactcctgggaccacctggatcttcacagagccaaccacaacattgaccacgaatgtggccaccagctccacagtcaccccctcctccaccccagcaactgctgccacctcagaattgctgaccaccatggccacgaaacccacagccactggctccaaagccactgcctccaccagtccagggactgcacccacccttccagttgtgctgacaagcacagccaccacacccacagctaccagctttacagccatcccatcctcctccctgagaaccacttggaacctcacagcacagaccaccgcaccaacggccaccctgtccacagcccacgcctcctccactccaaggaccacccacacctccacagcgctaaccaccacggccaccacaatccaggccactggctccacggccaccctcctcacctcaggaacagctcacacctctaaagtgctgaccaccatggccatcaccacaagctccacagccaccccctcctccagcccagggactgcaagcacccttacagcacttatcaccacaaccaccacacccacaaccagcagctacacagtgaccccctcctccatcccagggaccacccacaccccgacagtgctgaccaacaccaccataactgtggccactggctctatggcaacaccctcctctagcccacagaccactggtacacccccagcactggccaccacgggcacgacaatcacggccacaggctccaccaccacccccgcctccactccagggacaactcccatctccccagcgctgaccaccacggccaccacacctgcagccaccagcaccacagtggctccctcctctgccctagggaccacccatacacccccagtgctgtccaccacggccaccacacatgggcgatcccagctccccgagagtccccgcacggtacccacagcccggacttctgtggccacctcgggcaccacccacatcacagagccatccacggtgacttcccacaccccagtaggaaccaccggtaccaccccacactcgacttcagccctgtccagtcctcacactcacagcagaaccactgagtcacccctttctccagggaagaccaccccgggcctcaccacggccacctccaggaccacggccacaaccagcaagacccacacctcgaccctgctgcccagcagccccacatcggcccccacaaccccagtggtgtccacgggctgtgagccccagtgtgcctggtcagactggctggactacagctaccccatgtcggggccctctggcggggacttggagacctactccaacatccgcgcggctggaggggccgtctgtgagcagcccctgggcctcgagtgccgcgcccaggcccagcctggtgtccccctgcgggagttgggccaggtcgtggaatgcagcctggacttcggcttggtctgcaggaaccgtcagcaggtggggaagttcaagatgtgcttcaactacgaaatccgtgtgttctgctgcaactacggccactgccccagcaccccggccaccagctccaaggccacaccctcctccactctggggtcaacctggattctcacagagccaaccactacagccatcacaacagtggccacgggctccacgaccatcccctcctccactccagggaccaccgcgatcctcacagagccaaccactacagccatcacaacagtggtcacgggctccacagccattccctcctccactacagggactactcgaatcactgaagtttttcccaccacaaccgcaatgactgcagccactggctccacggccaacccctcctccaccccaggaaccacctggatcttcacagagccaaccaccactgccaccataactgtggccactggctccaaggccacgccctcttccactccagcatcaacctggattctcacagagccgaccactacagccgtcacaacagtggccacgggctccacggccatgccttcctccactcaggggacgaccgggagcctcacagaaccaaccaacactgccaccataactgtgaccaccagctccacagccatgccctcctccactccagggatgacctcgatcctcacagagccgaccactacagccattacaacagtggccacgaggtccacggccacgccctcctccactccggagacggccaggatcgtcacagagccaaccaccactgccaccataactgtggccaccagctccacagccacgccctcctccactccagggacgaccttgatcctcacagagccgaccactacagccatcacaacagtggccccgggctccacagccacgcccacctccactctggggacgaccgggatcctcacagagccaaccactacaaccatcacaacagtggccacaaggtccacggccacgcattcctccactccggggacaaccgggatcctcacagagccgaccactacagccatcacaacagtggccccgggctccacagccacgccctcctccactccagggaccactgggatcctcacagagccaaccaccactgccaccataactgtggccactggctccacggccatcccctcctccactccagggatgacctcgatcctcacagagccaaccactacaaccatcacaacagtggccacaggctccacggccacgcccacctccactccggggacgaccgggatcctcacagagccaaccactacaaccatcacaacagtggccacgaggtccacggccacgccttcctccactccggggacaaccgggatcctcacagagccgatcactacagccatcacaacagtggccacgggctccacggccatcccctcctccactccagggatgacctcgatcctcacagagccaaccactacagccatcacaacagtggcccctggctccacagccacgccctcctccactccggggacgactgggatcctcacagagccaaccaccactgccaccataactgtggccactggctccacggccatcccctcctccactccagggatgacctcgatcctcacagagccaaccactacagccatcacaacagtggccacgggctccatggccacgcccacctccactccggggacgaccgggatcctcacagagccgaccaccactgccaccataactgtggccactggctccacggccatcccctcctccactccagggatgacctcgatcctcacagagccaaccactacaaccatcacaacagtggccacgaggtccacggccacgccttctactccggggacaaccgggatcctcacagagccgaccactacagccatcacaacagtggccacgggctccacggccatcccctcctccactccagggatgacctcgatcctcacagagccaaccactacagccatcacaacagtgaccacgggctccacggccacgccctcctccactccggggacgactgggatcctcacagagccaaccactacaaccgtcacgacagtggccacgaagtccacggccgtgccctcctccactccagggaagacctcagtcctcacagagctgaccactacagccatcacaaccacgggctccacggccacaccttccactccggggacgactgggatcctcacagagccgaccactacaaccatcacaacagtggccacaggctccacagccctgccctcctccactccggggacgactggattcctcacagagccaaccaccactgccaccataactgtggccactggctccacggccatcccctcctccactccagggatgacctcaatcctcacagcgccgaccactacagccatcacaacagtgaccacgggctccacggccacgccctcctccactccagggaagacctcaatcctcacagagctgaccactacagccatcacgacagtggccacgggctccacggccacgccttccactccggggacaaccaggatcctcacagagccgaccactacagccatcacaacagtggccccgggctccacagccatgccctcctccactccggggactactgggatcctcacagagccaaccactacaaccatcacaacagtggccacgaggtccatggccatgccttcctccactccggggacgaccgggatcctcacagagccaaccactacaaccatcacaacagtggccacaaggtccacggccacgcattcctccactctggggacaaccgggatcctcacagagccgaccactacagcgatcacaacagtggccacgggctccacggccatcccctcctccactccagggataacctcgatcctcacagagccaaccactacagccatcacaacagtggccccgggctccacagccgcgccctcctccactccggggacgactggaatcctcacagagccaaccaccactgccaccataactgtggccactggctccacggccatcccctcctccactccagggatgacctcgatcctcacagagccaaccactacagccatcacaacagtggccacgggctccaaggccaagcccacctccactccggggacgaccgggatcctcacagagccgaccaccactgccaccataactgtggccactggctccacggccatcccctcctccactccagggatgacctcgatcctcacagagccaaccactacagccatcacaacagtggccccgggctccacagccacgccctcctccactccggggacgactgggatcctcacagagccgaccaccactgccaccataactgtggccactggctccacggccatcccctcctccactccagggatgacctcgatcctcacagagccaaccactacaaccatcacaacagtgaccacgggctccacggccacgccctcctccactccagggaagacctcagtcctcacagagctgaccactacagccatcacgacagtggccacgggctccacagccacgccttccactccggggacaaccaggatcctcacagagccgaccactacagccatcacaacagtggccccgggctccacagccacgccctcctccactccggggacgaccgggatcctcacagagccaaccactacaaccatcacaacagtggccacaaagtccacggccacgccttcctccactccggggacgaccgggatcctcacagagccaaccactacaaccatcacaacagtggccacaaggtccacggccacgcattcctccactccggggacgactgggatcctcacagagccgaccaccactgccaccataactgtggccactggctccacagccatcccctcctccactccagggatgacctcgatcctcacagagccaaccaccacagccatcacaacagtggccacgggctccacggccacgcccacctccactccggggacgactgggatcctcacagggccgaccaccactgccaccataactgtggccactggctccacggccatcccctcctccactccagggatgacctcgatcctcacagagccaaccactacagccatcacaacagtggccacgggctccatggccacgccttctactccggggacgactgggatcctcacagagccaaccactacagccatcacaacagtgaccacgggctccacggccacgcccacctccactccagggacgaccgggatcctcacagagccaaccactacaaccatcacaacagtggtcacgaggtccacggccgtgccttcctccactccagggatgacctcaatcctcacagagccaaccactacagccatcacaacagtggccacgggctccacggccacgcccacctccactccagggacgactgggatcctcacagggccgaccaccactgccaccataactgtggccactggctccacggccatcccctcctccactccagggatgacctcgatcctcacagagccaaccactacagccatcacaacagtggccacgggctccacggccacgccttctactccggggacgactgggatcctcacagagccaaccactacagccatcacaacagtgaccacgggctccacggccacgcccacctccactccagggacgactgggatcctcacagagccaaccactacaaccatcacaacagtggccacgaggtccacggccgtgccttcctccactccagggatgacctcaatcctcacagagccaaccactacagccatcacaacagtggccacgggctccacggccacgccctcctccactcaggggacgaccgggatcctcacagagccaaccactactaccgtcacaacagtggccacgaagtccacggccgtgccctcctccactccagggaagacctcagtcctcacaaaactgaccactacagccatcacaaccacgggctccacagccacagcttccactccggggacgactggattcctcacagagccaaccaccactgccaccatcactgtggccactggctccatggccatcccctcctccactccagggacgacctcgatcctcacagcgccgaccactacagccatcacaacagtgaccacgggctccacggccacgccctcctccacttcagggaagacctcaatcctcacagagctgaccactacagccattacgacagtggccacgggctccacggccatgccttccactccggggacaaccaggatcctcacagagccgaccactacagccatcacaacagtggccacgggctccacagcctcaccctccttcactccagggacaaccgggatcctcacagagccgaccactacaaccattacaacagtggctatgaggtccacggccacgccctcctccactctggggacgaccgggatcctcacagagccaaccactacagccatcacaacagtggccacaggctccacggccataccttcctctactctgggaacgaccaggatccacacagaaccaaccaccactgccaccataagtgtggccaccagctccacagccacgccctcctccactccggcgtcaacttggttcctcacagagccgaccactacagccatcacaactatggcctcgggctccacagccaccctgacctccaccccgggaacaacgtactctcccaaagtgttgaccatcacagccaccacacccacagccaccagctccaaagcaaccccctcctccactctggggacgacctggatcctcacagagccgaccactctagccaccccgactgaggccactggttccacagccaccatacccacagcgcccagctcctcagcaacccctttctccagcccagggactgcaggcacccttccagtgcggaccactacagcaaccacgaccatggccactaggtctactgccatcccctcctccactgtgggaacagctggcacccccaaagtgctgaccaccacggccaccaggcccacagccactggctccacggttcccagctcgtccaccctggggaccacccacacccctgcagtgctccccagcagcctgccagccttcagcatgtccactgtgtcctcctcagtcctcaccaccctcagacccactcacttccccagctcccacttctctactccctgcttctgcagggcatttggacagttcttctcacctggggaagtaatctacaataggacagaccgagccggctgccaattctatgccgtgtgcaaccagcactgtgacctcgaccgcttccagggcacctgccccacctccccaccaccagcgtcctccaccctgctgccctcgccctcccctgcccctggctgtgacaatgccatccctccccggcaggtgaatgagacctggaccctggagaactgcacggtggccaggtgcgtgggtgacaaccatgtcgccctgctggacccaaagcccgtggccaatgtcacctgcgtgaacaagcacctgcccatcaaagtgtccgacccgagccagccctgtgacttccactatgagtgcgagtgcatctgcagtgtgtggggcagttcccactattccacctttgacggcacctcttacacctttgagggcaactgcacctatgtcctcatgagagagatccacgcacgcctcgggaatctcagcctctacttggacaaccactactgcgcggcctctgccgctgccgccagctgctcccgcgccctcaggctccactacaagtccatggatatcgtcctcaccgtcaccacggtgcatgggaaggaggaggacttgatcctgtttgaccaaattccggtgagcagcggtttcagcaagaacggcgtgcttgtgtctgtgacggggaccaccaccatgcgcgtggacatccctgccctgggtgtgagcgtcaccttcgatggccacatcttccaggcccggctgccctacagcctcttccacaacaacaccgagggccagtgcggcacctgcaccaacaaccagagggacgattgtctccagcgcgacggaaccactgccaccagctgtaaggacatggctaagacttggttggtccctgacagcagaaaggacggctgctgggccccgaccggcacgccccccacggccagtcccccggccccggtgtctagtgcacccacccccagcccgtgcccgccgcagccactctgtgatctgatgctgagccaggtctttgcccagtgccacgaccttgtgcccccgggcccattcttcaatgcctgcatcagcgacggctgccagggccaccccgaggtgccctgccagagcctggaggcctacgcagctctttgccgtgcccggggagtgtgcagtgactggcgaggtgcaaccggcggcctgtgcgatctcacctgcccacccaccaaagtgtacaagccgtgcggccccatacagcctgcctcctgcaactccaggaaccagaacccacaactggaggggctggcggagggctgcttctgccccggggaccagatcctcttcagcgcacacacgggcacctgcgtgcaggactgcccctgcgtgggacctgatgggcttcccaagtctcctgggcagcagtggatcagcaactgccagtcctgcgtgtgtgatgagggttcaatgtcggtgcaatgcaagcccctgccctgtgaggcccagggtccctcctcaccatgcagccaccccggtttcgtgaccgtgaccaggccccgggccaacaacccctgttgccccgagacggtgtgcgtatgcaacacaagcacctgccaccagagcccacccgtgtgcccgctagggcaggagttgatcagcacccagaaggagggcgactgctgtcccaccttccgctgcggacctcagctgtgttcctacaagggcatcttctatggggttggtgcaatcttcccaggggcccttccctgccacacgtgtacctgcctctctggggacacccaggacccaacggtgcaatgttgggaggatgcctgccacaatactacctgcccccagggctttgagtacaagagagcggccgggcagtgctgtggggagtgcgtgcagactgcctgcctcacgcccgatggtccgccagtccagctgaacgaaacctgggtcaatagccgtgtggacaactgcaccgtgtaccactgtgaggtcgagagcggagtctatttgctgaccccacagcctgcatcctgcccagaagtgtccagctgcagggggagcctcaggaaaaccggctgctgctactcctgtgaggaggactcctgtcaggtccgcgtcaacacaaccgtcctgtggcaccagggctgcaagactgaggtcaacatcaccttctgtgagggctcctgccccggagagtccaggtactcggcagaggcccaggccatgcagcaccagtgcacctgctgccaggagagacgggtccacgaggagacggtgcccttgcgctgtcccgacggctcgactgtcctgcacacctacaaccatgtggatgagtgtggctgcacgccattctgtgtccctgcgcccatggctcccatatacccccccggcttcctggcccaggaggccactgccgtctgaggatgttctgcctccatccccatgctctgtccacctggagccaggacgtgcattgcctgatcatgaaaaccttgggcctgctctgcggagccccctggcctctgtgtgtggcaccccgtgcctctgtgctcctgctgcccaccctgtgggtaaaaccggaccctggaagggtgaggggccagcaggacccctttcaggagggcaccactcaggagtcatgtcctgggagagcctgtggcccaccttggccttgcccctccttgatgtcactgggacgccctggaacaagctaagcgtgtgcgggcctgtgtgtccctgccatggccagagtccccaggcagcatggattctggctggccacatccggccactggggcacagacaggctggtccaggcaaggccggctgctgccaggaagctgcgctagacctgcctgctgcagggtacctcggggctgaggtcacaatggccaggtcagagagaggtcggcatcccaaagccccctctgctcaacccagcccagttttgcaaataaacgctgagcatcgagta

SEQ ID NO: 901 - DNA, 17773 bp, Macaca fascicularis
  source 1..17773: mol_type = genomic DNA
atgggtgccctgagcacgtgccggacgctggtgttggctctggcggccgtgctcctggtgcagcaagcagagacccagggccctgcggagccgagctggggcggtgcagggcacaccacagatggcggtgccccgatggcctcgcccacccggcgtgtgagctttgttccacccgtcactgtcttccccagcctgagccccctgaacccggcacacaacgggcgggtgtgcagcacctggggcgacttccactacaagaccttcgacggtgacgtcttccgcttccccggcctctgcaactacgtgttctccgagcactgcggcgccgcctatgaggacttcaacgtccagctacgcagaggcctggtgggctccaggcctgtggtcacccgtgttgtcatcaaggcccaggggctggtgctagaggcgtccaatggctctgtcctcgtcaacgggcagcgggaggagctgccttacagccgcactgggctcctggtggagcagagcggggactacgtcaaggtcagcatccggctggtcttgaccttcctgtggaacggagaggacagtgccctgctggagctggaccccaaatacgccaaccagacctgtggcctgtgcggggacttcaacggcctcccagccttcaacgagttctatgcccacaacgccagactgaccccgctccagtttgggaacctgcagaagttggatgggcccacggaacagtgcccggacccgctgcccttgccagccagcaactgcacagatgaggaaggcatttgccaccacactctgctggggtcggcctttgcggagtgccacgcactggtggacactgccccgtacctggctgcctgcgcccaggacctgtgccgctgccccacctgcccgtgcgccacctttgtggaatactcacgccagtgcgcccacgcggggggccagccgcagaactggaggcgccctgagctctgcccccggacctgccccgtcaacatgcagcaccgggagtgtggctcaccttgcgtggacacctgctccaacccccagcgcgcacagctctgcgaagaccactgcgtggacggctgcttctgccccccaggcacggtgctggatgatgtcacgcactctggctgcctgcccctcgggcagtgcccctgcacccacggcggccgcacctacagcccgggcgcctccgtcaacaccacctgcagctcctgcacctgctctggggggctgtggcagtgccaggacctgccgtgccctggcacctgctccgtgcagggcggggcccacatcaccacctacgacgagaaactttacgacctgcatggcgactgcacctacgttctgtccaagaaatgtgctgatggcagcttcaccgtgctggccgaactgcggaagtgtggactgacggacaacgagaactgcctgaaggccgtgacgctcagcctggacggcggggacacggccatccgggtccaggcagacggcagcgtgttcctcaactccatctacacgcagctgcccctgtcggcagccaacatcaccctgttcacaccctcgagcttcttcatcgtagtgcacacaggcctcgggctgcagctgctggtgcagctggtgccgctcatgcaggtgtttgtcaggctggaccccgcccaccagggccagatgtgcggcctgtgtgggaacttcaaccagaaccaggctgacgacttcgcagccctcagtggggtggtggaggccacaggcgcagccttcgccaacacctggaaggcccaggccgcctgcgccaatgccaggaacagctttgaggacccctgctccctcagtgtggagaatgagaactacgcccggcactggtgctcacgcctgactgaccccaccggctccttctcgcgctgccactccgtcatcaaccccaagcccttccactcgaactgcctgtttgacacctgcaactgtgagcggagcgaggactgcctgtgcgccgcgctgtcctcctatgtgcacgcctgtgccgccaagggcgtgcagctcagcggctggagggacggcgtctgcaccaagtacatgcagaactgccccaagtcccagagctatgcctacgtggtggacgcctgccagccgacttgccgaggcctgagtgaggccgacgtcacctgcagcgtttcctttgtgcctgtggacggctgcacctgccccacgggcaccttcctcaatgacgcgggcgcctgtgtgcccgcccgggagtgcccctgctacgttcacggcaccgtgctggctcctggagaggtcgtgcacgacgaaggcgctgtgtgttcgtgtgagggtgggaagctgagctgcctgggagcctctctgcagaaaagcacagggtgtgtggcccccatggtgtacctgaactgcagcatcagcttggcgggcacccctggggccgagtgcctccggagctgccacacgctggacgtgggctgtttcagcacacactgcgtgtccggctgtgtctgtcccccggggctggtgtcagatgggagtgggggctgcatcgccgaggaggactgcccctgcgtgcacaacgaggccacctacaagcctggagacaccatcagggtcgactgcaacacctgcacctgcagaaaccggaggtgggagtgcagccaccggctctgcctgggcacctgcgtggcctacggggatggccacttcatcacctttgatggcgagcgttacagctttgaaggcagttgcgagtacatcctggcccaggactactgtggggacgacgccacccacgggaccttccgcatcgtcaccgagaacatcccctgtgggaccaccggcaccacctgctccaaggccatcaagctcttcgtggagagctacgagctgatcctccaggagggcgcctttaaggcagtggtgagggggccgggcggggacccgccctacaagatccgctacatggggatcttcctggtcatcgagacccgcgggatggccgtgtcctgggaccggaagaccagtgtgttcatccgactgcaccaggactacaagggcagggtctgcggcctgtgcgggaacttcgacgaccatgccatcaatgactttgccacgcgtagccggtctgtggtgggggacgcactggagtttgggaacagttggaagctctccccgtcctgcccagacgccctggcgccgaaggacccctgcacggccaaccccttccgcaagtcctgggcccagaagcagtgcagcatcctccacggtcctaccttcgccgcctgccgctcccaggttgactccaccaagtactacgaggcctgcgtgaacgacgcgtgtgcctgtgactcgggtggtgactgcgagtgtttctgcacggctgtggctgcctacgcccaggcttgccacgacgcgggcctgtgtgtgtcctggcggactccggacacctgccctttgttctgtgacttctacaacccacacgggggctgtgagtggcactaccagccctgcggggcaccctgcctaaaaacctgccggaaccccagtgggcactgcctggtggacctgcctggcctggaaggctgctacccgacgtgcccacccagccagcccttcttcaatgaggaccagatgaagtgcgtggcccagtgtggctgctacgacagggatggaaactactatgacgttggcgcaagagtccccacagcggagaactgccagagctgtaactgcacgcccagtggcatccagtgcgctcacagccttgaggcctgcacctgcacctatgaggacaggacctacggctaccaggacgtcatctacaacaccaccgatgggcttggtgcctgtttgatcgccatctgtggaagcaacggcaccatcatcaggaaggctgtggcatgtcctggaactccggccacaacgccattcaccttcaccactagctgggtcccccactccacgacaagcccggccctcccagtctccactgtgtgtgtccgcgaggtctgccactggtccagctggtacaacgggcaccacccagagcctggtctgggaggcggagacttcgagacatttgaaaacctgaggcagagagggtaccaggtgtgccctgtgccagccgacatcgagtgccgggcagggcagcttcccgacatgccactgggagagctgggccagcaggtggactgtgaccgcgtgagggggctgatgtgcgccaacagccagcagagccccccgctctgtcacgactatgagctgcgggttctctgctgtgaatacgtgccctgtggcccctccctggccccaggcaccagcccccagccctccctcagtgccagcacggagcctgctgtgcctacccctacccagaccacagcaaccgaaaagaccaccctgtgggtgatcccaagcatccggtcaacagcagccctcacctcacagactgggtccagctcaggccccacgacggtcacctccctggccccaggtaccaccacctgccagccccggtgtcagtggacagagtggtttgatgaggactaccccaagtctgaacaacttggaggggacgttgagtcctacgataagatcagggctgcaggagggcacttatgtgagcagcctaaggacatagagtgccaggccgagagcttccccaactggcccctggctcaggtagggcagaaggtgcactgtgacgtccgcttcggcctggtgtgcaggaactgggagcaggagggcatattcaagatgtgctacaactacaggatccgggtcctgtgctgcagcgccgaccactgcaggggacgagccacgaccccaccaccggccacatcgctggagacggccaccaccaccaccaccacccaggtcctgttctcaacgctgcagtcaacgagtagcctgggggtgaccagcaccacagcagtccccaccctctcaaaaggactgacatcccccagatacacgggcacccttggtacagccaccacaggaggccccacggttcctgcaggctccacagaacccactgtcccaggggtggccacatccaaccttccaacacactcagtcctgccagggaccacggggagttcgggcacatggcatccctcacagccacccacgccagccccaacgacaatggcaacctccagagctcacctgacaggcacagccagctccagctccaaacagccgctgaccacgagcctggcgccgacactctcgagcgaactgttcacctctcaggccgagaccagcacccccaggacagagacgacactgagccgcttgactgagaccaccactagccagagcactacccgctgtcaaccgaagtgtgagtggacagagtggtttgacgtggacttcccaacctcaggggtcgcaggcggggacatggaaacttttgaaaacatcagggctgctgggggcaagatgtgctgggcaccaaagagcatagagtgccgggcggagaactaccccgaggtgagcatcgaccagatcgggcaggtgctgacctgtagcctggagacggggctgatctgcaagaatgaggaccagacaggcaggttcaacatgtgcttcaactacaatgtgcgtgtgctctgctgtgacgactacagccactgcccccacacagccgcccccacgcccacctcctccacacaggcacccagactcacctccatgggggccaccagccccacagtgactgcctccacagccattgcaacctggagcaccaagtcaccagcagtaacaggatcctcaactctggccaccactcaaactggccccagcttctccaagaccacagagagggtgtccctccccagtccctctgcccctttaccttccaccgccagcctcctccctaccagggagcagcagacctcccaggctccatccatgcccaccagtccaattgtgaccagcacccccacaacgtcccccgtggtgaccgcccgtgtgcacacaaccctgcggacttccagctctgggcccaccatcaggacgaccctgccctctggccccccgtctcccagcacgggctgtgtgcctcgctgcacctggacagactggtttgatgaggactaccccagctctgaccctgatggcggggactttgagacctttggggtcatccgctctgctggccataccttctgcgagcatccatgggacattgagtgccgctctgagaaggagcccaaccaacccctggaggccctggggcaggtggtgcagtgtgatgtgagcattgggctgccactgtgccagcactcccacgagcaccggatccatggctaccactcccacaagcaccggatccacggctaccactcccacgagcactggatccacggctaccactcccatgagcaccagatccacggctaccactcccacgagcactggatccacagttaccgtacccatgagcaccggttccatggctaccactcccacgagcaccggatccacagttaccgtacccatgagcaccggatccacggctaccactcccacgagcaccggatccatggctaccactcccacgagcaccggatccacggctaccactcccacgagcaccggatccacggctaccactcccacgagcaccggatccacagttaccactcccacgagcaccggatccacagttaccgaaccaccggtaccaccctgggtggtaccaccttgatcttcacagagccaaccactaaagccaccatgaccacgcccaccagctccatggccaccgcctcctccagccaaggaacagctcacaccccaaaagtgctgagcaccacaaccatcacaaccatggccaccacctccaaagccaccccctcccacaccccggcaactgctgccaccccaaatgtgctgaccaccatgaccacaacacccacagtcaccggctccaaagccattccctcctccagtccagggactgcacccacccttccagcactgacaagcacagccaccacacccacagctacaagctttacagccatcccctcttcctctctggggaccacctggaccctcacagcacagaccaccacacccacagccaccatgtccacagccagaccctcctccactccagagactgcccatatttccacagtgcttaccaccacggccaccacaactggggccactggctccatggccaccccctcctccagcccaggaacagcttacactaccaaagtgctgactaccacaaccaggggcttcacagccactccctcctctagcccagggactgcacccacacttccagggcggatcggcacaaacaccacacccacaaccagcggctccatggtgaccccctcctccatcccagggaccacccacacccccacagtgctgaccaacaccaccacaaccgtggccactggctctatggtaacaccctcctctagcccacagaccactggtacacccccagcactggccaccacgggcacgacaatcacggccacaggctccaccaccaccccctcctccactccagggacaactcccatctccccagtgctgaccaccacggccaccacacctgcagccaccagcaccacagtggctccctcctctgccctagggaccacccatacacccccagtgctgtccaccatggccaccacacatgggcgatcccagctccctgagagtccccgcacggtacccacagcccggacttccatggccacctcgggcgccacccacatcacagagccatccacggtgacttcccacaccccagtaggaaccaccggtaccaccccacactcgactccagccctgtccagccctcacactcacagcagaaccactgagtcacccctttctccagggaagaccaccccgggcctcaccacggccacctccaggaccacggccacggccacaaccagcgagacccgtgcctcgaccctgctgtccagcagccccacatcggcccccacgaccccggtggtgtccacaggctgtgagccccagtgtgcctggtcagactggctggactacagctaccccatgtcggggccctctggcggggacttggagacctactccaacatccgcgcggctggaggggccgtctgtgagcagcccctgggcctcgagtgccgcgcccaggcccagcctggtgtccccctgcgggagttgggccaggtcgtggaatgcagcctggacttcggcttggtctgcaggaaccgtcagcaggtggggaagttcaagatgtgcttcaactacgaaatccgtgtgttctgctgcaactacggccgctgccccagcaccctggccaccagctccaaggccacaccctcctccactctggagacaaccgggatcctcacagagccaaccactacagccatcacaacagtggccacgggctccacagccatgccctcctccactccagggaccaccgcgatcctcacagagccaaccactacagccatcacaacagtggtcacgggctccactgccatcccttcctccacctcagggactactcaaatcaccaaagtgtttcccaccacaactgcaacgactgaagccactggctccacggccaacccctcctccaccccaggaaccacctggatcttcacagagccaaccaccactgccaccataactgtggccactggctccaaggccacgccctcttccactccagcatcaacctggattctcacagagccgaccactacagccgtcacaacagtggccacgggctccacggccacgccttcctccactcaggggacgactgggagcctcacagaaccaaccaacactgccaccataactgtgaccaccagctccacagccatgccctcctccactccagggatgacctcgatcctcacagagccgaccactacagccattacaacagtggccacgaggtccacggccacgccctcctccactccggagacggccaggatcgtcacagagccaaccaccactgccaccataactgtggccaccagctccacagccacgccctcctccactccagggacgaccttgatcctcacagagccgaccactacagccatcacaacagtggccccgggctccacagccacgcccacctccactctggggacgaccgggatcctcacagagccaaccactacaaccatcacaacagtggccacaaggtccacggccacgcattcctccactccggggacaaccgggatcctcacagagctgaccactacagccatcacaacagtggccccgggctccacagccacgccctcctccactccagggacgactgggatcctcacagagccaaccaccactgccaccataactgtggccactggctccacggccatcccctcctccactccagggatgacctcaatcctcacagcgccgaccactacagccatcacaacagtgaccacaggctccacggccacgccctcctccactccagggaagacctcaatcctcacagagctgaccactacagccatcacgacagtggccacgggctccacggccacgccttccactctggggacaaccaggatcctcacagagccgaccactacagccatcacaacagtggccccgggctccacagccatgccctcctccactctggggactaccgggatcctcacagagccaaccactacaaccatcacaacagtggccacgaggtccacggccacgccttcctccactccggggacgaccgggatcctcacagagccaaccactacaaccatcacaacagtggccacaaggtccacggccacgcattcctccactccggggacaaccgggatcctcacagagccgaccactacagccatcacaacagtggccacgggctccacggccatcccctcctccactccagggatgacctcaatcctcacagagccaaccactacagccatcacaacagtggccccggcctccacagccacgccctcctccactccggggacgactggaatcctcacagagccaaccaccactgccaccataactgtggccactggctccacggccatcccctcctccactccagggatgacctcgatcctcacagagccaaccactacagccatcacaacagtggccacgggctccacggccacgcccacctccactccggggacgaccgggatcctcacagagccgaccaccactgccaccataactgtggccactggctccacggccatcccctcctccactccagggatgacctcgatcctcacagagccaaccactacagccatcacaacagtggccccgggctccacagccacgccctcctccactccggggacgactgggatcctcacagagccgaccaccactgccaccataactgtggccactggctccacggccatcccctcctccactccagggatgacctcgatcctcacagagccaaccactacagccatcacaacagtgaccacgggctccacggccacgccctcctccactccggggacgactgggatcctcacagagccaaccaccactgccaccataactgtggccactggctccacggccatcccctcctccactccagggatgacctcgatcctcacagagccaaccactacagccatcacaacagtggccacaggctccacggccacgcccacctccactccggggacgaccgggatcctcacagagccaaccactacaaccatcacaacagtggccacgaggtccacggccacgccttcctccactccggggacaaccgggatcctcacagagccgaccactacagccatcacaacagtggccacgggctccacggccatcccctcctccactccagggatgacctcgatcctcacagagccaaccactacagccatcacaacagtggccccaggctccacagccacgccctcctccactccagggacgactgggatcctcacagagccaaccaccactgccaccataactgtggccactggctccacggccatcccctcctccactccagggatgacctcgatcctcacagagccaaccactacagccatcacaacagtggccacgggctccacggccacgcccacctccactccggggacgaccgggatcctcacagagccaaccactacaaccatcacaacagtggccacgaggtccacggccatgccttcctccactccagggatgacctcaatcctcacagagccaaccactacagccatcacaacagtggccacgggctccacggccacgcccacctccactccggggacgactgggatcctcacagggccgaccaccactgccaccataactgtggccactggctccacggccatcccctcctccactccagggatgacctcgatcctcacagagccaaccactacagccatcacaacagtggccacgggctccacggccacgccttctactccggggacgactgggatcctcacagagccaaccactacagccatcacaacagtgaccacgggctccacggccatgccctcctccactccggggacgactgggatcctcacagagccaaccactacaaccatcacaacagtggccacgaggtccacggccacgccttcctccactccagggatgacctcaatcctcacagagccaaccactacagccatcacaacagtggccacgggctccacggccacgccctcctccactcaggggacgaccgggatcctcacagagccaaccactactaccgtcacaacagtggccacgaagtccacggccgtgccctcctccactccagggaagacctcagtcctcacagagctgaccactacagccatcacaaccacgggctccacggccacaccttccactccggggacgactgggatcctcacagagccgaccactacaaccatcacaacagtggccacaggctccacagccctgccttcctccactccggggactactggattcctcacagagccaaccaccactgccaccataactgtggccactggctccacggccatcccctcctccactccagggatgacctcgatcctcacagggccaaccactacagccatcacaacagtggccacgggctccacggccacgcccacctccactccggggacgactgggatcctcacagagccgaccaccactgccaccataactgtggccacgggctccacggccacgccttccactctggggacaaccaggatcctcacagagccgaccactacagccatcacaacagtggccccgggctccacagccacgccctcctccactccggggacgaccgggatcctcacagagccaaccactacagccatcacaacagtggccacgaggtccacggccacgccttcctccactccggggacgaccgggatcctcacagagccaaccactacaaccatcacaacagtggccacgggctccacagccacacccacctccactccggggacgaccgggatcctcacagagccaaccactacaaccatcacaacagtggccacgaggtccacggccacgccttcctccactccggggacgaccgggatcctcacagagccaaccactacaaccatcacaacagtggccacaaggtccacggccacgcattcctccactccggggacaaccgggatcctcacagagccgaccactacagccatcacaacagtggccacgggctccacggccatcccctcctccactccagggatgacctcgatcctcacagagccaaccactacagccatcacaacagtggccccgggctccacagccacgccctcctccactccggggacgactgggatcctcacagagccaaccaccgctgccaccataactgtggccactggctccacggccatcccctcctccactccagggatgacctcgatcctcacagagccaaccactacagccatcacaacagtggccacgggctccacggccacgccttctactccggggacgactgggatcctcacagagccaaccactacagccatcacaacagtggccacgggctccacggccacgcccacctccactccggggatgaccgggatcctcacagagctgaccactacagccatcacaacagtggccccgggctccacagccacgccctcctccactccggggacgactgggatcctcacagagccaaccaccactgccaccataactgtggccactggctccacggccatcccctcctccactccagggatgacctcgatcctcacagagccaaccactacagccatcacaacagtggccacgggctccacggccacgccctcctccactcaggggacgaccgggatcctcacagagccaaccactactaccgtcacaacagtggccacgaagtccacggccgtgccctcctccactccagggaagacctcagtcctcacaaagctgaccactacagccatcacaaccacgggctccacagccacaccttccactccggggacgactggattcctcacagagccaaccaccactgccaccataactgtggccactggctccatggccatcccctcctccactccagggacgacctcgatcctcacagcgccgaccactacagccatcacaacagtgaccacgggctccacggccacgccctcctccacttcagggaagacctcaatcctcacagagctgaccactacagccatcacgacagtggccacgggctccacggccacgccttccactccggggacaaccaggatcctcacagagccgaccactacagccatcacaacagtggccacgggctccacagcctcaccctccttcactccagggacaaccgggatcctcacagagccgaccactacaaccattacaacagtggctatgaggtccacggccacgccctcctccactctggggacgaccgggatcctcacagagccaaccactacagccatcacaacagtggccacaggctccacggccataccttcctctactctgggaacgaccaggatccacacagaaccaaccaccactgccaccataagtgtggccaccagctccacagccacgcccttctccactccggcgtcaacttggttcctcacagagccgaccactacagccatcacaactatggcctcaggctccacagccaccctgacctccaccccaggaacaacgtactctcccaaagtgttgaccatcacagccaccacacccacagccaccagctccaaagcaaccccctcctccactctggggacgacctggatcctcacagagccgaccactctagccaccccgactgaggccactggttccacagccaccatacccacagtgcccagctcctcagccacccctttctccagcccagggactgcaggcacccttccagtgcggaccactacagcaaccacgaccatggccactaggtctactgccatcccctcctccactgtgggaacagctggcacccccaaagtgctgaccaccacggccaccaggcccacagccactggctccacggttcccagctcgtccaccctggggaccacccacacccccgcagtgctccccagcagcctgccagccttcagcatgtccactgtgtcctcctcagtcctcaccaccctcagacccactcacttccccagctcccacttctctactccctgcttctgcagggcatttggacagttcttctcacctggggaagtaatctacaataggacagaccgagccggctgccaattctatgccgtgtgcaaccagcactgtgacctcgaccgcttccagggcacctgccccacctccccaccaccagcgtcctccaccctgctgccctcgccctcccctgcccctggctgtgacaatgccatccctccccggcaggtgaatgagacctggaccctggagaactgcacggtggccaggtgcgtgggtgacaaccgtgtcgccctgctggacccaaagcccgtggccaatgtcacctgcgtgaacaagcacctgcccatcaaagtgtccgacccgagccagccctgtgacttccactatgagtgcgagtgcatctgcagtgtgtggggcagttcccactattccacctttgacggcacctcttacacctttgagggcaactgcacctatgtcctcatgagagagatccacgcacgcctcgggaatctcagcctctacttggacaaccactactgcgcggcctctgccgctgccgccagctgctcccgcgccctcaggctccactacaagtccatggatatcgtcctcaccgtcaccacggtgcatgggaaggagaaggacttgatcctgtttgaccaaattctggtgagcagcggtttcagcaagaacggcgtgcttgtgtctgtgacggggaccaccaccatgcgcgtggacatccctgccctgggtgtgagcgtcaccttcgatggccacatcttccaggcccggctgccctacagcctcttccacaacaacaccgagggccagtgcggcacctgcaccaacaaccagagggacgactgtctccagcgggacggaaccactgccaccagctgtaaggacatggctaagacttggttggtccctgacagcagaaaggacggctgctgggccccgaccggcacgccccccacggccagtcccccggccccggtgtctagtgcacccacccccagcccgtgcccgccgcagccactctgtgatctgatgctgagccaggtctttgccgagtgccacgaccttgtgcccccgggcccattcttcaatgcctgcatcagcgacagctgccagggccgccccgaggtgccctgccagagcctggaggcctacgcagcgctctgccgcgcccggggagtgtgcagtgactggcgaggtgcaaccggcggcctgtgcgatctcacctgcccacccaccaaagtgtacaagccgtgcggccccatacagcctgcctcctgcaactccaggaaccagaacccacaactggaggggctggcggagggctgcttctgccccggggaccagatcctcttcagcacacacacgggcatctgcgtgcaggactgcccctgcgtgggacctgatgggcttcccaagtctcccgggcagcagtggatcagcaactgccagtcctgcgtgtgtgatgagggctcaatgtcggtgcaatgcaagcccctgccctgtgaggcccagggtccctcctcaccatgcagccaccccggcttcgtgaccgtgaccaggccccgggccgacaacccctgttgccctgagaccgtgtgtgtatgcaacacaagcacctgccaccagagcccacgcgtgtgcccgccagggcaggagttgatcagcacccagaaggagggcgactgctgtcccaccttcctctgcagacctcagctgtgttcctacaacggcatcttctatggggttggtgcaatcttcccaggggcccttccctgccacacgtgtacctgcctctctggggacacccaggacccaacggtgcaatgttgggaggacgcctgtcacaatactacctgcccccagggctttgagtacaagagagcggccgggcagtgctgtggggagtgcgtgcagactgcctgcctcacgcccaatggtccgccagtccagctgaacgaaacctgggtcaatagccgtgtggacaactgcaccgtgtaccactgtgaggttgagagcggagtctatttgctgaccccacagcctgcatcctgcccagaagtgtccagctgcagggggagcctcaggaaaaccggctgctgctactcctgtgaggaggactcctgtcaggtccgcgtcaacacaaccgtcctgtggcaccagggctgcaagactgaggtcaacatcaccttctgtgagggctcctgccccggagagtccaggtactcggcagaggcccaggccatgcagcaccagtgcacctgctgccaggagagacgggtccacgaggagacggtgcccttgcgctgtcccgacggctcgactgtcctgcacacctacaaccatgtggatgagtgtggctgcacgcccttctgtgtccctgcgcccatggctcccatatacccccccggcttcctggcccaggaggccactgccgtctgaggatgttctgcctccatccccatgctctgtccacctggagccaggacgtgcattgcccgatcatgaaaaccttgggcctgctctgcggagccccctggcctctgtgtgtggcaccccgtgcctctgtgctcctgctgcccaccctgtgggtaaaaccggaccctggaagggtgaggggccagcaggacccctttcaggagggcaccactcaggagtcatgtcctgggagagcctgtggcccaccttggccttgcccctccttgatgtcactgggacgccccggaacaagctaagcgtgtgcgggcctgtgtgtccctgccatggccagagtccccaggcagcatggattctggctggccacatctggccactggggcacagacaggctggtccaggcaaggccggctgctgccaggaagctgcgctagacctgcctgctgcagggtacctcggggctgaggtcacaatggccaggtcagagagaggtcggcatcccaaagccccctctgctcaacccagcccagttttgcaaataaacgctgagcatcgagta

SEQ ID NO: 902 - RNA, 19 nt, synthetic construct
  source 1..19: mol_type = other RNA
cctcaatgacgcgggcgcc

SEQ ID NO: 903 - RNA, 19 nt, synthetic construct
  source 1..19: mol_type = other RNA
gacgtgggctgtttcagca

SEQ ID NO: 904 - RNA, 19 nt, synthetic construct
  source 1..19: mol_type = other RNA
tgtccgcgaggtctgccgc

SEQ ID NO: 905 - RNA, 19 nt, synthetic construct
  source 1..19: mol_type = other RNA
gacgttgagtcctacgata

SEQ ID NO: 906 - RNA, 19 nt, synthetic construct
  source 1..19: mol_type = other RNA
actatgagtgcgagtgcat

SEQ ID NO: 907 - RNA, 19 nt, synthetic construct
  source 1..19: mol_type = other RNA
gctacgttctgtccaagaa

SEQ ID NO: 908 - RNA, 19 nt, synthetic construct
  source 1..19: mol_type = other RNA
tgaacaacttggaggggac

SEQ ID NO: 909 - RNA, 19 nt, synthetic construct
  source 1..19: mol_type = other RNA
tccactatgagtgcgagtg

SEQ ID NO: 910 - RNA, 19 nt, synthetic construct
  source 1..19: mol_type = other RNA
gcggtttcagcaagaacgg

SEQ ID NO: 911 - RNA, 19 nt, synthetic construct
  source 1..19: mol_type = other RNA
agaacggcgtgcttgtgtc

SEQ ID NO: 912 - RNA, 19 nt, synthetic construct
  source 1..19: mol_type = other RNA
ctgaccccgctccagtttg

SEQ ID NO: 913 - RNA, 19 nt, synthetic construct
  source 1..19: mol_type = other RNA
gtcacctgcgtgaacaagc

SEQ ID NO: 914 - RNA, 19 nt, synthetic construct
  source 1..19: mol_type = other RNA
cctttgtggaatactcacg

SEQ ID NO: 915 - RNA, 19 nt, synthetic construct
  source 1..19: mol_type = other RNA
ggcgcagccttcgccaaca

SEQ ID NO: 916 - RNA, 19 nt, synthetic construct
  source 1..19: mol_type = other RNA
ggacgttgagtcctacgat

SEQ ID NO: 917 - RNA, 19 nt, synthetic construct
  source 1..19: mol_type = other RNA
tcacggcaccgtgctggct

SEQ ID NO: 918 - RNA, 19 nt, synthetic construct
  source 1..19: mol_type = other RNA
gttgactccaccaagtact

SEQ ID NO: 919 - RNA, 19 nt, synthetic construct
  source 1..19: mol_type = other RNA
caagtccatggatatcgtc

SEQ ID NO: 920 - RNA, 19 nt, synthetic construct
  source 1..19: mol_type = other RNA
cagctacgttctgtccaag

SEQ ID NO: 921 - RNA, 19 nt, synthetic construct
  source 1..19: mol_type = other RNA
tttgacggcacctcttaca

SEQ ID NO: 922 - RNA, 19 nt, synthetic construct
  source 1..19: mol_type = other RNA
ctgtttgaccaaattccgg

SEQ ID NO: 923 - RNA, 19 nt, synthetic construct
  source 1..19: mol_type = other RNA
ccctcgagcttcttcatcg

SEQ ID NO: 924 - RNA, 19 nt, synthetic construct
  source 1..19: mol_type = other RNA
tattccacctttgacggca

SEQ ID NO: 925 - RNA, 19 nt, synthetic construct
  source 1..19: mol_type = other RNA
acggcgtctgcaccaagta

SEQ ID NO: 926 - RNA, 19 nt, synthetic construct
  source 1..19: mol_type = other RNA
gttcatccgactgcaccag

SEQ ID NO: 927 - RNA, 19 nt, synthetic construct
  source 1..19: mol_type = other RNA
actccaccaagtactacga

SEQ ID NO: 928 - RNA, 19 nt, synthetic construct
  source 1..19: mol_type = other RNA
gtgacttccactatgagtg

SEQ ID NO: 929 - RNA, 19 nt, synthetic construct
  source 1..19: mol_type = other RNA
cctccactccggggacgac

SEQ ID NO: 930 - RNA, 19 nt, synthetic construct
  source 1..19: mol_type = other RNA
cctccactccggggacgac

SEQ ID NO: 931 - RNA, 19 nt, synthetic construct
  source 1..19: mol_type = other RNA
cctccactccggggacgac

SEQ ID NO: 932 - RNA, 19 nt, synthetic construct
  source 1..19: mol_type = other RNA
ttgaccaaattccggtgag

SEQ ID NO: 933 - RNA, 19 nt, synthetic construct
  source 1..19: mol_type = other RNA
gccggaaccccagtgggca

SEQ ID NO: 934 - RNA, 19 nt, synthetic construct
  source 1..19: mol_type = other RNA
tgaaatccgtgtgttctgc

SEQ ID NO: 935 - RNA, 19 nt, synthetic construct
  source 1..19: mol_type = other RNA
tgaaatccgtgtgttctgc

SEQ ID NO: 936 - RNA, 19 nt, synthetic construct
  source 1..19: mol_type = other RNA
tgaaatccgtgtgttctgc

SEQ ID NO: 937 - RNA, 19 nt, synthetic construct
  source 1..19: mol_type = other RNA
cgaatacgtgccctgtggc

SEQ ID NO: 938 - RNA, 19 nt, synthetic construct
  source 1..19: mol_type = other RNA
actcacgccagtgcgccca

SEQ ID NO: 939 - RNA, 19 nt, synthetic construct
  source 1..19: mol_type = other RNA
cggcgtctgcaccaagtac

SEQ ID NO: 940 - RNA, 19 nt, synthetic construct
  source 1..19: mol_type = other RNA
cgctgaccacgagcctggc

SEQ ID NO: 941 - RNA, 19 nt, synthetic construct
  source 1..19: mol_type = other RNA
cactacaagtccatggata

SEQ ID NO: 942 - RNA, 19 nt, synthetic construct
  source 1..19: mol_type = other RNA
gtgttcatccgactgcacc

SEQ ID NO: 943 - RNA, 19 nt, synthetic construct
  source 1..19: mol_type = other RNA
agcggtttcagcaagaacg

SEQ ID NO: 944 - RNA, 19 nt, synthetic construct
  source 1..19: mol_type = other RNA
aacaacttggaggggacgt

SEQ ID NO: 945 - RNA, 19 nt, synthetic construct
  source 1..19: mol_type = other RNA
ccaaattccggtgagcagc

SEQ ID NO: 946 - RNA, 19 nt, synthetic construct
  source 1..19: mol_type = other RNA
gccaggtgcgtgggtgaca

SEQ ID NO: 947 - RNA, 19 nt, synthetic construct
  source 1..19: mol_type = other RNA
ttcctcaatgacgcgggcg

SEQ ID NO: 948 - RNA, 19 nt, synthetic construct
  source 1..19: mol_type = other RNA
ggacgtcatctacaacacc

SEQ ID NO: 949 - RNA, 19 nt, synthetic construct
  source 1..19: mol_type = other RNA
accccgctccagtttggga

SEQ ID NO: 950 - RNA, 19 nt, synthetic construct
  source 1..19: mol_type = other RNA
tcatccgactgcaccagga

SEQ ID NO: 951 - RNA, 19 nt, synthetic construct
  source 1..19: mol_type = other RNA
agaactgccagagctgtaa

SEQ ID NO: 952 - RNA, 19 nt, synthetic construct
  source 1..19: mol_type = other RNA
aactacaggatccgggtcc

SEQ ID NO: 953 - RNA, 19 nt, synthetic construct
  source 1..19: mol_type = other RNA
cctttgacggcacctctta

SEQ ID NO: 954 - RNA, 19 nt, synthetic construct
  source 1..19: mol_type = other RNA
cgggaccttccgcatcgtc

SEQ ID NO: 955 - RNA, 19 nt, synthetic construct
  source 1..19: mol_type = other RNA
acgttgagtcctacgataa

SEQ ID NO: 956 - RNA, 19 nt, synthetic construct
  source 1..19: mol_type = other RNA
ttgacggcacctcttacac

SEQ ID NO: 957 - RNA, 19 nt, synthetic construct
  source 1..19: mol_type = other RNA
caccctcgagcttcttcat

SEQ ID NO: 958 - RNA, 19 nt, synthetic construct
  source 1..19: mol_type = other RNA
agctgccttacagccgcac

SEQ ID NO: 959 - RNA, 19 nt, synthetic construct
  source 1..19: mol_type = other RNA
aagtccatggatatcgtcc

SEQ ID NO: 960 - RNA, 19 nt, synthetic construct
  source 1..19: mol_type = other RNA
tttgtggaatactcacgcc

SEQ ID NO: 961 - RNA, 19 nt, synthetic construct
  source 1..19: mol_type = other RNA
tgttctgctgcaactacgg

SEQ ID NO: 962 - RNA, 19 nt, synthetic construct
  source 1..19: mol_type = other RNA
tgttctgctgcaactacgg

SEQ ID NO: 963 - RNA, 19 nt, synthetic construct
  source 1..19: mol_type = other RNA
gatgaagtgcgtggcccag

SEQ ID NO: 964 - RNA, 19 nt, synthetic construct
  source 1..19: mol_type = other RNA
cacctttgacggcacctct

SEQ ID NO: 965 - RNA, 19 nt, synthetic construct
  source 1..19: mol_type = other RNA
agcaagaacggcgtgcttg

SEQ ID NO: 966 - RNA, 19 nt, synthetic construct
  source 1..19: mol_type = other RNA
gcctgagtgaggccgacgt

SEQ ID NO: 967 - RNA, 19 nt, synthetic construct
  source 1..19: mol_type = other RNA
ccagaaccaggctgacgac

SEQ ID NO: 968 - RNA, 19 nt, synthetic construct
  source 1..19: mol_type = other RNA
ctattccacctttgacggc

SEQ ID NO: 969 - RNA, 19 nt, synthetic construct
  source 1..19: mol_type = other RNA
acctttgacggcacctctt

SEQ ID NO: 970 - RNA, 19 nt, synthetic construct
  source 1..19: mol_type = other RNA
agcctcaggaaaaccggct

SEQ ID NO: 971 - RNA, 19 nt, synthetic construct
  source 1..19: mol_type = other RNA
gcacggtggccaggtgcgt

SEQ ID NO: 972 - RNA, 19 nt, synthetic construct
  source 1..19: mol_type = other RNA
gttgggccaggtcgtggaa

SEQ ID NO: 973 - RNA, 19 nt, synthetic construct
  source 1..19: mol_type = other RNA
gttgggccaggtcgtggaa

SEQ ID NO: 974 - RNA, 19 nt, synthetic construct
  source 1..19: mol_type = other RNA
gttgggccaggtcgtggaa

SEQ ID NO: 975 - RNA, 19 nt, synthetic construct
  source 1..19: mol_type = other RNA
gttgggccaggtcgtggaa

SEQ ID NO: 976 - RNA, 19 nt, synthetic construct
  source 1..19: mol_type = other RNA
ctcttccacaacaacaccg

SEQ ID NO: 977 - RNA, 19 nt, synthetic construct
  source 1..19: mol_type = other RNA
accaacaaccagagggacg

SEQ ID NO: 978 - RNA, 19 nt, synthetic construct
  source 1..19: mol_type = other RNA
gatgagtgtggctgcacgc

SEQ ID NO: 979 - RNA, 19 nt, synthetic construct
  source 1..19: mol_type = other RNA
tacaagtccatggatatcg

SEQ ID NO: 980 - RNA, 19 nt, synthetic construct
  source 1..19: mol_type = other RNA
gaatgagaactacgcccgg

SEQ ID NO: 981 - RNA, 19 nt, synthetic construct
  source 1..19: mol_type = other RNA
ccgagaacatcccctgtgg

SEQ ID NO: 982 - RNA, 19 nt, synthetic construct
  source 1..19: mol_type = other RNA
gaggactaccccaagtctg

SEQ ID NO: 983 - RNA, 19 nt, synthetic construct
  source 1..19: mol_type = other RNA
agtcctacgataagatcag

SEQ ID NO: 984 - RNA, 19 nt, synthetic construct
  source 1..19: mol_type = other RNA
tttcagcaagaacggcgtg

SEQ ID NO: 985 - RNA, 19 nt, synthetic construct
  source 1..19: mol_type = other RNA
cggggatggccacttcatc

SEQ ID NO: 986 - RNA, 19 nt, synthetic construct
  source 1..19: mol_type = other RNA
gtgagctttgttccacccg

SEQ ID NO: 987 - RNA, 19 nt, synthetic construct
  source 1..19: mol_type = other RNA
gactaccccaagtctgaac

SEQ ID NO: 988 - RNA, 19 nt, synthetic construct
  source 1..19: mol_type = other RNA
acctatgaggacaggacct

SEQ ID NO: 989 - RNA, 19 nt, synthetic construct
  source 1..19: mol_type = other RNA
accctcgagcttcttcatc

SEQ ID NO: 990 - RNA, 19 nt, synthetic construct
  source 1..19: mol_type = other RNA
gacttccactatgagtgcg

SEQ ID NO: 991 - RNA, 19 nt, synthetic construct
  source 1..19: mol_type = other RNA
gccaggtcgtggaatgcag

SEQ ID NO: 992 - RNA, 19 nt, synthetic construct
  source 1..19: mol_type = other RNA
gccaggtcgtggaatgcag

SEQ ID NO: 993 - RNA, 19 nt, synthetic construct
  source 1..19: mol_type = other RNA
gccaggtcgtggaatgcag

SEQ ID NO: 994 - RNA, 19 nt, synthetic construct
  source 1..19: mol_type = other RNA
gccaggtcgtggaatgcag

SEQ ID NO: 995 - RNA, 19 nt, synthetic construct
  source 1..19: mol_type = other RNA
gtggacagagtggtttgac

SEQ ID NO: 996 - RNA, 19 nt, synthetic construct
  source 1..19: mol_type = other RNA
agaatgagaactacgcccg

SEQ ID NO: 997 - RNA, 19 nt, synthetic construct
  source 1..19: mol_type = other RNA
gagaactgccagagctgta

SEQ ID NO: 998 - RNA, 19 nt, synthetic construct
  source 1..19: mol_type = other RNA
ttcaagatgtgctacaact

SEQ ID NO: 999 - RNA, 19 nt, synthetic construct
  source 1..19: mol_type = other RNA
ggggacgttgagtcctacg

SEQ ID NO: 1000 - RNA, 19 nt, synthetic construct
  source 1..19: mol_type = other RNA
aactgcacctatgtcctca

SEQ ID NO: 1001 - RNA, 19 nt, synthetic construct
  source 1..19: mol_type = other RNA
cagtgcgcccacgcggggg

SEQ ID NO: 1002 - RNA, 19 nt, synthetic construct
  source 1..19: mol_type = other RNA
gtggtttgatgaggactac

SEQ ID NO: 1003 - RNA, 19 nt, synthetic construct
  source 1..19: mol_type = other RNA
atgggcccacggagcagtg

SEQ ID NO: 1004 - RNA, 19 nt, synthetic construct
  source 1..19: mol_type = other RNA
tgcacaacgaggccaccta

SEQ ID NO: 1005 - RNA, 19 nt, synthetic construct
  source 1..19: mol_type = other RNA
acgacgcgggcctgtgtgt

SEQ ID NO: 1006 - RNA, 19 nt, synthetic construct
  source 1..19: mol_type = other RNA
gacgtcatctacaacacca

SEQ ID NO: 1007 - RNA, 19 nt, synthetic construct
  source 1..19: mol_type = other RNA
ggacttcaacgtccagcta

SEQ ID NO: 1008 - RNA, 19 nt, synthetic construct
  source 1..19: mol_type = other RNA
tgcacctatgaggacagga

SEQ ID NO: 1009 - RNA, 19 nt, synthetic construct
  source 1..19: mol_type = other RNA
aacttggaggggacgttga

SEQ ID NO: 1010 - RNA, 19 nt, synthetic construct
  source 1..19: mol_type = other RNA
accctgttcacaccctcga

SEQ ID NO: 1011 - RNA, 19 nt, synthetic construct
  source 1..19: mol_type = other RNA
ccctgttcacaccctcgag

SEQ ID NO: 1012 - RNA, 19 nt, synthetic construct
  source 1..19: mol_type = other RNA
cgcatcgtcaccgagaaca

SEQ ID NO: 1013 - RNA, 19 nt, synthetic construct
  source 1..19: mol_type = other RNA
cctggcggactccggacac

SEQ ID NO: 1014 - RNA, 19 nt, synthetic construct
  source 1..19: mol_type = other RNA
aactactatgacgtcggtg

SEQ ID NO: 1015 - RNA, 19 nt, synthetic construct
  source 1..19: mol_type = other RNA
cacgacccgctgtcaaccg

SEQ ID NO: 1016 - RNA, 19 nt, synthetic construct
  source 1..19: mol_type = other RNA
acggaaactactatgacgt

SEQ ID NO: 1017 - RNA, 19 nt, synthetic construct
  source 1..19: mol_type = other RNA
aataagaccgaccgagccg

SEQ ID NO: 1018 - RNA, 19 nt, synthetic construct
  source 1..19: mol_type = other RNA
acggccactacgatcacgg

SEQ ID NO: 1019 - RNA, 19 nt, synthetic construct
  source 1..19: mol_type = other RNA
acggccactacgatcacgg

SEQ ID NO: 1020 - RNA, 19 nt, synthetic construct
  source 1..19: mol_type = other RNA
acggccactacgatcacgg

SEQ ID NO: 1021 - RNA, 19 nt, synthetic construct
  source 1..19: mol_type = other RNA
acggccactacgatcacgg

SEQ ID NO: 1022 - RNA, 19 nt, synthetic construct
  source 1..19: mol_type = other RNA
cgacccgctgtcaaccgaa

SEQ ID NO: 1023 - RNA, 19 nt, synthetic construct
  source 1..19: mol_type = other RNA
acgaccactgcaggggacg

SEQ ID NO: 1024 - RNA, 19 nt, synthetic construct
  source 1..19: mol_type = other RNA
tgctcgcgcctgaccgatc

SEQ ID NO: 1025 - RNA, 19 nt, synthetic construct
  source 1..19: mol_type = other RNA
ctaccaaagtgccgactac

SEQ ID NO: 1026 - RNA, 19 nt, synthetic construct
  source 1..19: mol_type = other RNA
ctaccaaagtgccgactac

SEQ ID NO: 1027 - RNA, 19 nt, synthetic construct
  source 1..19: mol_type = other RNA
ctaccaaagtgccgactac

SEQ ID NO: 1028 - RNA, 19 nt, synthetic construct
  source 1..19: mol_type = other RNA
ctgcgaatacgtgccctgt

SEQ ID NO: 1029 - RNA, 19 nt, synthetic construct
  source 1..19: mol_type = other RNA
cactaccaaagtgccgact

SEQ ID NO: 1030 - RNA, 19 nt, synthetic construct
  source 1..19: mol_type = other RNA
actaccaaagtgccgacta

SEQ ID NO: 1031 - RNA, 19 nt, synthetic construct
  source 1..19: mol_type = other RNA
cactaccaaagtgccgact

SEQ ID NO: 1032 - RNA, 19 nt, synthetic construct
  source 1..19: mol_type = other RNA
actaccaaagtgccgacta

SEQ ID NO: 1033 - RNA, 19 nt, synthetic construct
  source 1..19: mol_type = other RNA
cactaccaaagtgccgact

SEQ ID NO: 1034 - RNA, 19 nt, synthetic construct
  source 1..19: mol_type = other RNA
actaccaaagtgccgacta

SEQ ID NO: 1035 - RNA, 19 nt, synthetic construct
  source 1..19: mol_type = other RNA
gacccgatgggtttcctaa

SEQ ID NO: 1036 - RNA, 19 nt, synthetic construct
  source 1..19: mol_type = other RNA
cacacccccagtgccgaac

SEQ ID NO: 1037 - RNA, 19 nt, synthetic construct
  source 1..19: mol_type = other RNA
cacacccccagtgccgaac

SEQ ID NO: 1038 - RNA, 19 nt, synthetic construct
  source 1..19: mol_type = other RNA
cacacccccagtgccgaac

SEQ ID NO: 1039 - RNA, 19 nt, synthetic construct
  source 1..19: mol_type = other RNA
cacacccccagtgccgaac

SEQ ID NO: 1040 - RNA, 19 nt, synthetic construct
  source 1..19: mol_type = other RNA
gtgctcgcgcctgaccgat

SEQ ID NO: 1041 - RNA, 19 nt, synthetic construct
  source 1..19: mol_type = other RNA
gatacgctacatggggatc

SEQ ID NO: 1042 - RNA, 19 nt, synthetic construct
  source 1..19: mol_type = other RNA
ggtgtccccctgcgggagt

SEQ ID NO: 1043 - RNA, 19 nt, synthetic construct
  source 1..19: mol_type = other RNA
cagtgcgctcacagccttg

SEQ ID NO: 1044 - RNA, 19 nt, synthetic construct
  source 1..19: mol_type = other RNA
gggacgttgagtcctacga

SEQ ID NO: 1045 - RNA, 19 nt, synthetic construct
  source 1..19: mol_type = other RNA
ggtgtccccctgcgggagt

SEQ ID NO: 1046 - RNA, 19 nt, synthetic construct
  source 1..19: mol_type = other RNA
ggtgtccccctgcgggagt

SEQ ID NO: 1047 - RNA, 19 nt, synthetic construct
  source 1..19: mol_type = other RNA
gccaacgtcacctgcgtga

SEQ ID NO: 1048 - RNA, 19 nt, synthetic construct
  source 1..19: mol_type = other RNA
ggacgcactggagtttggg

SEQ ID NO: 1049 - RNA, 19 nt, synthetic construct
  source 1..19: mol_type = other RNA
ctacgataagatcagggcc

SEQ ID NO: 1050 - RNA, 19 nt, synthetic construct
  source 1..19: mol_type = other RNA
caataagaccgaccgagcc

SEQ ID NO: 1051 - RNA, 19 nt, synthetic construct
  source 1..19: mol_type = other RNA
ctactatgacgtcggtgca

SEQ ID NO: 1052 - RNA, 19 nt, synthetic construct
  source 1..19: mol_type = other RNA
cagcctggtgtccccctgc

SEQ ID NO: 1053 - RNA, 19 nt, synthetic construct
  source 1..19: mol_type = other RNA
cagcctggtgtccccctgc

SEQ ID NO: 1054 - RNA, 19 nt, synthetic construct
  source 1..19: mol_type = other RNA
cagcctggtgtccccctgc

SEQ ID NO: 1055 - RNA, 19 nt, synthetic construct
  source 1..19: mol_type = other RNA
cagaaccaggctgacgact

SEQ ID NO: 1056 - RNA, 19 nt, synthetic construct
  source 1..19: mol_type = other RNA
atgtacgggtgggaagcta

SEQ ID NO: 1057 - RNA, 19 nt, synthetic construct
  source 1..19: mol_type = other RNA
tacgctacatggggatctt

SEQ ID NO: 1058 - RNA, 19 nt, synthetic construct
  source 1..19: mol_type = other RNA
gcgaatacgtgccctgtgg

SEQ ID NO: 1059 - RNA, 19 nt, synthetic construct
  source 1..19: mol_type = other RNA
gctacgcctacgtggtgga

SEQ ID NO: 1060 - RNA, 19 nt, synthetic construct
  source 1..19: mol_type = other RNA
gcacgacccgctgtcaacc

SEQ ID NO: 1061 - RNA, 19 nt, synthetic construct
  source 1..19: mol_type = other RNA
caccggtaccacccagcac

SEQ ID NO: 1062 - RNA, 19 nt, synthetic construct
  source 1..19: mol_type = other RNA
acggcacgcacgcttccag

SEQ ID NO: 1063 - RNA, 19 nt, synthetic construct
  source 1..19: mol_type = other RNA
caccggtaccacccagcac

SEQ ID NO: 1064 - RNA, 19 nt, synthetic construct
  source 1..19: mol_type = other RNA
caccggtaccacccagcac

SEQ ID NO: 1065 - RNA, 19 nt, synthetic construct
  source 1..19: mol_type = other RNA
caacgtccagctacgccga

SEQ ID NO: 1066 - RNA, 19 nt, synthetic construct
  source 1..19: mol_type = other RNA
tacgccgaggcctagtggg

SEQ ID NO: 1067 - RNA, 19 nt, synthetic construct
  source 1..19: mol_type = other RNA
tgccttacagccgcactgg

SEQ ID NO: 1068 - RNA, 19 nt, synthetic construct
  source 1..19: mol_type = other RNA
tctacgacctgcatggtga

SEQ ID NO: 1069 - RNA, 19 nt, synthetic construct
  source 1..19: mol_type = other RNA
gcggcgtgttcctcaactc

SEQ ID NO: 1070 - RNA, 19 nt, synthetic construct
  source 1..19: mol_type = other RNA
ccagcgctacgcctacgtg

SEQ ID NO: 1071 - RNA, 19 nt, synthetic construct
  source 1..19: mol_type = other RNA
ggcgatcgctacagctttg

SEQ ID NO: 1072 - RNA, 19 nt, synthetic construct
  source 1..19: mol_type = other RNA
cgatcgctacagctttgaa

SEQ ID NO: 1073 - RNA, 19 nt, synthetic construct
  source 1..19: mol_type = other RNA
gaccggaagaccagcgtgt

SEQ ID NO: 1074 - RNA, 19 nt, synthetic construct
  source 1..19: mol_type = other RNA
cacgactacgagctgcggg

SEQ ID NO: 1075 - RNA, 19 nt, synthetic construct
  source 1..19: mol_type = other RNA
acgacggggagcttgggca

SEQ ID NO: 1076 - RNA, 19 nt, synthetic construct
  source 1..19: mol_type = other RNA
cacgagcctggcgccaaca

SEQ ID NO: 1077 - RNA, 19 nt, synthetic construct
  source 1..19: mol_type = other RNA
gagacgacaatgagcccct

SEQ ID NO: 1078 - RNA, 19 nt, synthetic construct
  source 1..19: mol_type = other RNA
gacgacaatgagccccttg

SEQ ID NO: 1079 - RNA, 19 nt, synthetic construct
  source 1..19: mol_type = other RNA
ccagcgttacacccatccc

SEQ ID NO: 1080 - RNA, 19 nt, synthetic construct
  source 1..19: mol_type = other RNA
cagcgttacacccatcccc

SEQ ID NO: 1081 - RNA, 19 nt, synthetic construct
  source 1..19: mol_type = other RNA
ccagcgttacacccatccc

SEQ ID NO: 1082 - RNA, 19 nt, synthetic construct
  source 1..19: mol_type = other RNA
cagcgttacacccatcccc

SEQ ID NO: 1083 - RNA, 19 nt, synthetic construct
  source 1..19: mol_type = other RNA
gtgtcggacccgagccagc

SEQ ID NO: 1084 - RNA, 19 nt, synthetic construct
  source 1..19: mol_type = other RNA
cactactgcacggcctctg

SEQ ID NO: 1085 - RNA, 19 nt, synthetic construct
  source 1..19: mol_type = other RNA
ttacgcagagctctgccgc

SEQ ID NO: 1086 - RNA, 19 nt, synthetic construct
  source 1..19: mol_type = other RNA
ccgtcccggcttcgtaacc

SEQ ID NO: 1087 - RNA, 19 nt, synthetic construct
  source 1..19: mol_type = other RNA
cccggcttcgtaaccgtga

SEQ ID NO: 1088 - RNA, 19 nt, synthetic construct
  source 1..19: mol_type = other RNA
acggtgtgcgtgtgcaaca

SEQ ID NO: 1089 - RNA, 19 nt, synthetic construct
  source 1..19: mol_type = other RNA
tgtgcgggcctatgtgtcc

SEQ ID NO: 1090 - RNA, 19 nt, synthetic construct
  source 1..19: mol_type = other RNA
acggattccagctggccac

SEQ ID NO: 1091 - RNA, 19 nt, synthetic construct
  source 1..19: mol_type = other RNA
gagcctcaggaaaaccggc

SEQ ID NO: 1092 - RNA, 19 nt, synthetic construct
  source 1..19: mol_type = other RNA
gccagtgcgcccacgcggg

SEQ ID NO: 1093 - RNA, 19 nt, synthetic construct
  source 1..19: mol_type = other RNA
catcgagtgccgggcggcg

SEQ ID NO: 1094 - RNA, 19 nt, synthetic construct
  source 1..19: mol_type = other RNA
aaccgaaaagaccacccta

SEQ ID NO: 1095 - RNA, 19 nt, synthetic construct
  source 1..19: mol_type = other RNA
cttcaacgtccagctacgc

SEQ ID NO: 1096 - RNA, 19 nt, synthetic construct
  source 1..19: mol_type = other RNA
gcgtagccggtccgtggtg

SEQ ID NO: 1097 - RNA, 19 nt, synthetic construct
  source 1..19: mol_type = other RNA
cactaccaaagtgctgact

SEQ ID NO: 1098 - RNA, 19 nt, synthetic construct
  source 1..19: mol_type = other RNA
accgaaaagaccaccctat

SEQ ID NO: 1099 - RNA, 19 nt, synthetic construct
  source 1..19: mol_type = other RNA
gctacgccgaggcctagtg

SEQ ID NO: 1100 - RNA, 19 nt, synthetic construct
  source 1..19: mol_type = other RNA
cctcgagcttcttcatcgt

SEQ ID NO: 1101 - RNA, 19 nt, synthetic construct
  source 1..19: mol_type = other RNA
ccggagcgtccaagtactc

SEQ ID NO: 1102 - RNA, 19 nt, synthetic construct
  source 1..19: mol_type = other RNA
cccgctctgtcacgactac

SEQ ID NO: 1103 - RNA, 19 nt, synthetic construct
  source 1..19: mol_type = other RNA
gcgcgtgagctttgttcca

SEQ ID NO: 1104 - RNA, 19 nt, synthetic construct
  source 1..19: mol_type = other RNA
actactatgacgtcggtgc

SEQ ID NO: 1105 - RNA, 19 nt, synthetic construct
  source 1..19: mol_type = other RNA
tttgcggagtgccacgcac

SEQ ID NO: 1106 - RNA, 19 nt, synthetic construct
  source 1..19: mol_type = other RNA
tctacggggttggtgcaac

SEQ ID NO: 1107 - RNA, 19 nt, synthetic construct
  source 1..19: mol_type = other RNA
gctgtgttcgtacaatggc

SEQ ID NO: 1108 - RNA, 19 nt, synthetic construct
  source 1..19: mol_type = other RNA
gactacgagctgcgggttc

SEQ ID NO: 1109 - RNA, 19 nt, synthetic construct
  source 1..19: mol_type = other RNA
ccgagcatccggtcgacgg

SEQ ID NO: 1110 - RNA, 19 nt, synthetic construct
  source 1..19: mol_type = other RNA
acaagatacgctacatggg

SEQ ID NO: 1111 - RNA, 19 nt, synthetic construct
  source 1..19: mol_type = other RNA
ctgtcacgactacgagctg

SEQ ID NO: 1112 - RNA, 19 nt, synthetic construct
  source 1..19: mol_type = other RNA
gataagatcagggccgctg

SEQ ID NO: 1113 - RNA, 19 nt, synthetic construct
  source 1..19: mol_type = other RNA
acgcacgcttccagtgtgg

SEQ ID NO: 1114 - RNA, 19 nt, synthetic construct
  source 1..19: mol_type = other RNA
cagctaccagctttacacc

SEQ ID NO: 1115 - RNA, 19 nt, synthetic construct
  source 1..19: mol_type = other RNA
cagctaccagctttacacc

SEQ ID NO: 1116 - RNA, 19 nt, synthetic construct
  source 1..19: mol_type = other RNA
cgccgcagcctacgagtag

SEQ ID NO: 1117 - RNA, 19 nt, synthetic construct
  source 1..19: mol_type = other RNA
gactttgccacgcgtagcc

SEQ ID NO: 1118 - RNA, 19 nt, synthetic construct
  source 1..19: mol_type = other RNA
actttgccacgcgtagccg

SEQ ID NO: 1119 - RNA, 19 nt, synthetic construct
  source 1..19: mol_type = other RNA
caacgagttctatgcccac

SEQ ID NO: 1120 - RNA, 19 nt, synthetic construct
  source 1..19: mol_type = other RNA
aacggcgtgcttgtgtctg

SEQ ID NO: 1121 - RNA, 19 nt, synthetic construct
  source 1..19: mol_type = other RNA
agaactacgcccggcactg

SEQ ID NO: 1122 - RNA, 19 nt, synthetic construct
  source 1..19: mol_type = other RNA
gcgtctgcaccaagtacat

SEQ ID NO: 1123 - RNA, 19 nt, synthetic construct
  source 1..19: mol_type = other RNA
cactatgagtgcgagtgca

SEQ ID NO: 1124 - RNA, 19 nt, synthetic construct
  source 1..19: mol_type = other RNA
aaattccggtgagcagcgg

SEQ ID NO: 1125 - RNA, 19 nt, synthetic construct
  source 1..19: mol_type = other RNA
tccgcatcgtcaccgagaa

SEQ ID NO: 1126 - RNA, 19 nt, synthetic construct
  source 1..19: mol_type = other RNA
caacgaggccacctacaag

SEQ ID NO: 1127 - RNA, 19 nt, synthetic construct
  source 1..19: mol_type = other RNA
tgcgtgaacgacgcgtgtg

SEQ ID NO: 1128 - RNA, 19 nt, synthetic construct
  source 1..19: mol_type = other RNA
gcgtgaacgacgcgtgtgc

SEQ ID NO: 1129 - RNA, 19 nt, synthetic construct
  source 1..19: mol_type = other RNA
cgtgaacgacgcgtgtgcc

SEQ ID NO: 1130 - RNA, 19 nt, synthetic construct
  source 1..19: mol_type = other RNA
tcaacgagttctatgccca

SEQ ID NO: 1131 - RNA, 19 nt, synthetic construct
  source 1..19: mol_type = other RNA
tgacggacaacgagaactg

SEQ ID NO: 1132 - RNA, 19 nt, synthetic construct
  source 1..19: mol_type = other RNA
acgccaaccagacctgtgg

SEQ ID NO: 1133 - RNA, 19 nt, synthetic construct
  source 1..19: mol_type = other RNA
ggtccacgaggagacggtg

SEQ ID NO: 1134 - RNA, 19 nt, synthetic construct
  source 1..19: mol_type = other RNA
ctttgccacgcgtagccgg

SEQ ID NO: 1135 - RNA, 19 nt, synthetic construct
  source 1..19: mol_type = other RNA
tgagtcctacgataagatc

SEQ ID NO: 1136 - RNA, 19 nt, synthetic construct
  source 1..19: mol_type = other RNA
ccacgggaccttccgcatc

SEQ ID NO: 1137 - RNA, 19 nt, synthetic construct
  source 1..19: mol_type = other RNA
ttccggtgagcagcggttt

SEQ ID NO: 1138 - RNA, 19 nt, synthetic construct
  source 1..19: mol_type = other RNA
tcaaccgaagtgtgagtgg

SEQ ID NO: 1139 - RNA, 19 nt, synthetic construct
  source 1..19: mol_type = other RNA
gcatcgtcaccgagaacat

SEQ ID NO: 1140 - RNA, 19 nt, synthetic construct
  source 1..19: mol_type = other RNA
tttgaccaaattccggtga

SEQ ID NO: 1141 - RNA, 19 nt, synthetic construct
  source 1..19: mol_type = other RNA
aatacgccaaccagacctg

SEQ ID NO: 1142 - RNA, 19 nt, synthetic construct
  source 1..19: mol_type = other RNA
tatgagtgcgagtgcatct

SEQ ID NO: 1143 - RNA, 19 nt, synthetic construct
  source 1..19: mol_type = other RNA
aggtcgtggaatgcagcct

SEQ ID NO: 1144 - RNA, 19 nt, synthetic construct
  source 1..19: mol_type = other RNA
aggtcgtggaatgcagcct

SEQ ID NO: 1145 - RNA, 19 nt, synthetic construct
  source 1..19: mol_type = other RNA
aggtcgtggaatgcagcct

SEQ ID NO: 1146 - RNA, 19 nt, synthetic construct
  source 1..19: mol_type = other RNA
aggtcgtggaatgcagcct

SEQ ID NO: 1147 - RNA, 19 nt, synthetic construct
  source 1..19: mol_type = other RNA
gcgagtgtttctgcacggc

SEQ ID NO: 1148 - RNA, 19 nt, synthetic construct
  source 1..19: mol_type = other RNA
acgagttctatgcccacaa

SEQ ID NO: 1149 - RNA, 19 nt, synthetic construct
  source 1..19: mol_type = other RNA
cgtagccggtccgtggtgg

SEQ ID NO: 1150 - RNA, 19 nt, synthetic construct
  source 1..19: mol_type = other RNA
gggacgcactggagtttgg

SEQ ID NO: 1151 - RNA, 19 nt, synthetic construct
  source 1..19: mol_type = other RNA
cttgatcgccatctgcgga

SEQ ID NO: 1152 - RNA, 19 nt, synthetic construct
  source 1..19: mol_type = other RNA
cttacgcagagctctgccg

SEQ ID NO: 1153 - RNA, 19 nt, synthetic construct
  source 1..19: mol_type = other RNA
aacgtccagctacgccgag

SEQ ID NO: 1154 - RNA, 19 nt, synthetic construct
  source 1..19: mol_type = other RNA
tgatcgccatctgcggaag

SEQ ID NO: 1155 - RNA, 19 nt, synthetic construct
  source 1..19: mol_type = other RNA
cacttcggcctggtgtgca

SEQ ID NO: 1156 - RNA, 19 nt, synthetic construct
  source 1..19: mol_type = other RNA
gcactatagccaccgtgat

SEQ ID NO: 1157 - RNA, 19 nt, synthetic construct
  source 1..19: mol_type = other RNA
aagaccgaccgagccggct

SEQ ID NO: 1158 - RNA, 19 nt, synthetic construct
  source 1..19: mol_type = other RNA
tgtcacgactacgagctgc

SEQ ID NO: 1159 - RNA, 19 nt, synthetic construct
  source 1..19: mol_type = other RNA
catcgagacccacgggatg

SEQ ID NO: 1160 - RNA, 19 nt, synthetic construct
  source 1..19: mol_type = other RNA
ctacccgaagtgcccaccc

SEQ ID NO: 1161 - RNA, 19 nt, synthetic construct
  source 1..19: mol_type = other RNA
tgtacgggtgggaagctaa

SEQ ID NO: 1162 - RNA, 19 nt, synthetic construct
  source 1..19: mol_type = other RNA
gtgcttaccgccacggcca

SEQ ID NO: 1163 - RNA, 19 nt, synthetic construct
  source 1..19: mol_type = other RNA
gtgcttaccgccacggcca

SEQ ID NO: 1164 - RNA, 19 nt, synthetic construct
  source 1..19: mol_type = other RNA
tgtgacgagggttcagtgt

SEQ ID NO: 1165 - RNA, 19 nt, synthetic construct
  source 1..19: mol_type = other RNA
ccgcaaccactggatccac

SEQ ID NO: 1166 - RNA, 19 nt, synthetic construct
  source 1..19: mol_type = other RNA
cacaccgccacagtgctga

SEQ ID NO: 1167 - RNA, 19 nt, synthetic construct
  source 1..19: mol_type = other RNA
acacgggcgatccctgtcc

SEQ ID NO: 1168 - RNA, 19 nt, synthetic construct
  source 1..19: mol_type = other RNA
cacaccgccacagtgctga

SEQ ID NO: 1169 - RNA, 19 nt, synthetic construct
  source 1..19: mol_type = other RNA
acacgggcgatccctgtcc

SEQ ID NO: 1170 - RNA, 19 nt, synthetic construct
  source 1..19: mol_type = other RNA
gaacgacgcgtgtgcctgc

SEQ ID NO: 1171 - RNA, 19 nt, synthetic construct
  source 1..19: mol_type = other RNA
ccgacctccaccctgagaa

SEQ ID NO: 1172 - RNA, 19 nt, synthetic construct
  source 1..19: mol_type = other RNA
ctcgcgcctgaccgatccc

SEQ ID NO: 1173 - RNA, 19 nt, synthetic construct
  source 1..19: mol_type = other RNA
ggaccggaagaccagcgtg

SEQ ID NO: 1174 - RNA, 19 nt, synthetic construct
  source 1..19: mol_type = other RNA
gacgcgtgtgcctgcgact

SEQ ID NO: 1175 - RNA, 19 nt, synthetic construct
  source 1..19: mol_type = other RNA
ccgcatgcgggggctgatg

SEQ ID NO: 1176 - RNA, 19 nt, synthetic construct
  source 1..19: mol_type = other RNA
acggcgtgcttgtgtctgt

SEQ ID NO: 1177 - RNA, 19 nt, synthetic construct
  source 1..19: mol_type = other RNA
tgagcgtcaccttcaatgg

SEQ ID NO: 1178 - RNA, 19 nt, synthetic construct
  source 1..19: mol_type = other RNA
ccgagacggtgtgcgtgtg

SEQ ID NO: 1179 - RNA, 19 nt, synthetic construct
  source 1..19: mol_type = other RNA
accggtaccacccagcact

SEQ ID NO: 1180 - RNA, 19 nt, synthetic construct
  source 1..19: mol_type = other RNA
accggtaccacccagcact

SEQ ID NO: 1181 - RNA, 19 nt, synthetic construct
  source 1..19: mol_type = other RNA
accggtaccacccagcact

SEQ ID NO: 1182 - RNA, 19 nt, synthetic construct
  source 1..19: mol_type = other RNA
gacgagggttcagtgtcgg

SEQ ID NO: 1183 - RNA, 19 nt, synthetic construct
  source 1..19: mol_type = other RNA
agcactatagccaccgtga

SEQ ID NO: 1184 - RNA, 19 nt, synthetic construct
  source 1..19: mol_type = other RNA
gcgtcaccttcaatggcca

SEQ ID NO: 1185 - RNA, 19 nt, synthetic construct
  source 1..19: mol_type = other RNA
cttcaacgcacacatgggc

SEQ ID NO: 1186 - RNA, 19 nt, synthetic construct
  source 1..19: mol_type = other RNA
aatttcccggggagcggtg

SEQ ID NO: 1187 - RNA, 19 nt, synthetic construct
  source 1..19: mol_type = other RNA
ccggcgcacaatgggcggg

SEQ ID NO: 1188 - RNA, 19 nt, synthetic construct
  source 1..19: mol_type = other RNA
gcacgacgagggcgccgtg

SEQ ID NO: 1189 - RNA, 19 nt, synthetic construct
  source 1..19: mol_type = other RNA
atcgctacagctttgaagg

SEQ ID NO: 1190 - RNA, 19 nt, synthetic construct
  source 1..19: mol_type = other RNA
accgatcccaacagtgcct

SEQ ID NO: 1191 - RNA, 19 nt, synthetic construct
  source 1..19: mol_type = other RNA
tcgagacccacgggatggc

SEQ ID NO: 1192 - RNA, 19 nt, synthetic construct
  source 1..19: mol_type = other RNA
ctatgtgtccctgccacgg

SEQ ID NO: 1193 - RNA, 19 nt, synthetic construct
  source 1..19: mol_type = other RNA
cacgcctccagtgtggatc

SEQ ID NO: 1194 - RNA, 19 nt, synthetic construct
  source 1..19: mol_type = other RNA
cacgcctccagtgtggatc

SEQ ID NO: 1195 - RNA, 19 nt, synthetic construct
  source 1..19: mol_type = other RNA
cacgcctccagtgtggatc

SEQ ID NO: 1196 - RNA, 19 nt, synthetic construct
  source 1..19: mol_type = other RNA
cacgcctccagtgtggatc

SEQ ID NO: 1197 - RNA, 19 nt, synthetic construct
  source 1..19: mol_type = other RNA
ggacgtgccacaaccccgc

SEQ ID NO: 1198 - RNA, 19 nt, synthetic construct
  source 1..19: mol_type = other RNA
agagcggggactacatcaa

SEQ ID NO: 1199 - RNA, 19 nt, synthetic construct
  source 1..19: mol_type = other RNA
gttcgtacaatggcacctt

SEQ ID NO: 1200 - RNA, 19 nt, synthetic construct
  source 1..19: mol_type = other RNA
tgaacgacgcgtgtgcctg

SEQ ID NO: 1201 - RNA, 19 nt, synthetic construct
  source 1..19: mol_type = other RNA
acaatgggcgggtgtgcag

SEQ ID NO: 1202 - RNA, 19 nt, synthetic construct
  source 1..19: mol_type = other RNA
atatcgtcctcactgtcac

SEQ ID NO: 1203 - RNA, 19 nt, synthetic construct
  source 1..19: mol_type = other RNA
ccacctacaagcctggaga

SEQ ID NO: 1204 - RNA, 19 nt, synthetic construct
  source 1..19: mol_type = other RNA
gacgtcggtgcaagggtcc

SEQ ID NO: 1205 - RNA, 19 nt, synthetic construct
  source 1..19: mol_type = other RNA
gcgcagcttcccgacatgc

SEQ ID NO: 1206 - RNA, 19 nt, synthetic construct
  source 1..19: mol_type = other RNA
tcccgacatgccgctggag

SEQ ID NO: 1207 - RNA, 19 nt, synthetic construct
  source 1..19: mol_type = other RNA
tgcgagtgcatctgcagca

SEQ ID NO: 1208 - RNA, 19 nt, synthetic construct
  source 1..19: mol_type = other RNA
gtcgcaacggccaggtcag

SEQ ID NO: 1209 - RNA, 19 nt, synthetic construct
  source 1..19: mol_type = other RNA
gcgctacgcctacgtggtg

SEQ ID NO: 1210 - RNA, 19 nt, synthetic construct
  source 1..19: mol_type = other RNA
caactgcacggacgaggag

SEQ ID NO: 1211 - RNA, 19 nt, synthetic construct
  source 1..19: mol_type = other RNA
cgctacgcctacgtggtgg

SEQ ID NO: 1212 - RNA, 19 nt, synthetic construct
  source 1..19: mol_type = other RNA
atcgagacccacgggatgg

SEQ ID NO: 1213 - RNA, 19 nt, synthetic construct
  source 1..19: mol_type = other RNA
tacgaggacttcaacgtcc

SEQ ID NO: 1214 - RNA, 19 nt, synthetic construct
  source 1..19: mol_type = other RNA
tgtgcgggaacttcgacga

SEQ ID NO: 1215 - RNA, 19 nt, synthetic construct
  source 1..19: mol_type = other RNA
ccgacatgccgctggagga

SEQ ID NO: 1216 - RNA, 19 nt, synthetic construct
  source 1..19: mol_type = other RNA
cccgtgtgccacctttgtg

SEQ ID NO: 1217 - RNA, 19 nt, synthetic construct
  source 1..19: mol_type = other RNA
tcgctacagctttgaaggc

SEQ ID NO: 1218 - RNA, 19 nt, synthetic construct
  source 1..19: mol_type = other RNA
ctacgagtagcccggggct

SEQ ID NO: 1219 - RNA, 19 nt, synthetic construct
  source 1..19: mol_type = other RNA
ccccgacctccaccctgag

SEQ ID NO: 1220 - RNA, 19 nt, synthetic construct
  source 1..19: mol_type = other RNA
cttcggccacctcgggcat

SEQ ID NO: 1221 - RNA, 19 nt, synthetic construct
  source 1..19: mol_type = other RNA
cttcggccacctcgggcat

SEQ ID NO: 1222 - RNA, 19 nt, synthetic construct
  source 1..19: mol_type = other RNA
cacgaccatcctgtggcac

SEQ ID NO: 1223 - RNA, 19 nt, synthetic construct
  source 1..19: mol_type = other RNA
gtgcgccaacagccaacag

SEQ ID NO: 1224 - RNA, 19 nt, synthetic construct
  source 1..19: mol_type = other RNA
ctactccagagactgtcca

SEQ ID NO: 1225 - RNA, 19 nt, synthetic construct
  source 1..19: mol_type = other RNA
tctccggcaggtgaatgag

SEQ ID NO: 1226 - RNA, 19 nt, synthetic construct
  source 1..19: mol_type = other RNA
aaatccgtgtgttctgctg

SEQ ID NO: 1227 - RNA, 19 nt, synthetic construct
  source 1..19: mol_type = other RNA
aaatccgtgtgttctgctg

SEQ ID NO: 1228 - RNA, 19 nt, synthetic construct
  source 1..19: mol_type = other RNA
aaatccgtgtgttctgctg

SEQ ID NO: 1229 - RNA, 19 nt, synthetic construct
  source 1..19: mol_type = other RNA
aaatccgtgtgttctgctg

SEQ ID NO: 1230 - RNA, 19 nt, synthetic construct
  source 1..19: mol_type = other RNA
tggcctacggggatggcca

SEQ ID NO: 1231 - RNA, 19 nt, synthetic construct
  source 1..19: mol_type = other RNA
acgaggcctgcgtgaacga

SEQ ID NO: 1232 - RNA, 19 nt, synthetic construct
  source 1..19: mol_type = other RNA
ggcactaccagccctgcgg

SEQ ID NO: 1233 - RNA, 19 nt, synthetic construct
  source 1..19: mol_type = other RNA
gcttaccaccacggccacc

SEQ ID NO: 1234 - RNA, 19 nt, synthetic construct
  source 1..19: mol_type = other RNA
gcttaccaccacggccacc

SEQ ID NO: 1235 - RNA, 19 nt, synthetic construct
  source 1..19: mol_type = other RNA
agcgttacacccatcccct

SEQ ID NO: 1236 - RNA, 19 nt, synthetic construct
  source 1..19: mol_type = other RNA
agcgttacacccatcccct

SEQ ID NO: 1237 - RNA, 19 nt, synthetic construct
  source 1..19: mol_type = other RNA
acgctacatggggatcttc

SEQ ID NO: 1238 - RNA, 19 nt, synthetic construct
  source 1..19: mol_type = other RNA
tacgcagtgtgcaatcagc

SEQ ID NO: 1239 - RNA, 19 nt, synthetic construct
  source 1..19: mol_type = other RNA
gaccttcgacggcgacgtc

SEQ ID NO: 1240 - RNA, 19 nt, synthetic construct
  source 1..19: mol_type = other RNA
cgacggcgacgtcttccgc

SEQ ID NO: 1241 - RNA, 19 nt, synthetic construct
  source 1..19: mol_type = other RNA
cactcgaactgcatgtttg

SEQ ID NO: 1242 - RNA, 19 nt, synthetic construct
  source 1..19: mol_type = other RNA
tcgaactgcatgtttgaca

SEQ ID NO: 1243 - RNA, 19 nt, synthetic construct
  source 1..19: mol_type = other RNA
caccgtgtacctctgtgag

SEQ ID NO: 1244 - RNA, 19 nt, synthetic construct
  source 1..19: mol_type = other RNA
acaagaccttcgacggcga

SEQ ID NO: 1245 - RNA, 19 nt, synthetic construct
  source 1..19: mol_type = other RNA
cccccgccgtgcaaccgtc

SEQ ID NO: 1246 - RNA, 19 nt, synthetic construct
  source 1..19: mol_type = other RNA
ctacgacctgcatggtgac

SEQ ID NO: 1247 - RNA, 19 nt, synthetic construct
  source 1..19: mol_type = other RNA
ccctacaagatacgctaca

SEQ ID NO: 1248 - RNA, 19 nt, synthetic construct
  source 1..19: mol_type = other RNA
tgtcctaacggctcagcca

SEQ ID NO: 1249 - RNA, 19 nt, synthetic construct
  source 1..19: mol_type = other RNA
tgttcgtacaatggcacct

SEQ ID NO: 1250 - RNA, 19 nt, synthetic construct
  source 1..19: mol_type = other RNA
tgcaccgtgtacctctgtg

SEQ ID NO: 1251 - RNA, 19 nt, synthetic construct
  source 1..19: mol_type = other RNA
gacggcgacgtcttccgct

SEQ ID NO: 1252 - RNA, 19 nt, synthetic construct
  source 1..19: mol_type = other RNA
cttaccgccacggccacca

SEQ ID NO: 1253 - RNA, 19 nt, synthetic construct
  source 1..19: mol_type = other RNA
cttaccgccacggccacca

SEQ ID NO: 1254 - RNA, 19 nt, synthetic construct
  source 1..19: mol_type = other RNA
tgcgaatacgtgccctgtg

SEQ ID NO: 1255 - RNA, 19 nt, synthetic construct
  source 1..19: mol_type = other RNA
ccgatcccaacagtgcctt

SEQ ID NO: 1256 - RNA, 19 nt, synthetic construct
  source 1..19: mol_type = other RNA
ggacggaaactactatgac

SEQ ID NO: 1257 - RNA, 19 nt, synthetic construct
  source 1..19: mol_type = other RNA
aacatccgtgcggccggag

SEQ ID NO: 1258 - RNA, 19 nt, synthetic construct
  source 1..19: mol_type = other RNA
aacatccgtgcggccggag

SEQ ID NO: 1259 - RNA, 19 nt, synthetic construct
  source 1..19: mol_type = other RNA
aacatccgtgcggccggag

SEQ ID NO: 1260 - RNA, 19 nt, synthetic construct
  source 1..19: mol_type = other RNA
aacatccgtgcggccggag

SEQ ID NO: 1261 - RNA, 19 nt, synthetic construct
  source 1..19: mol_type = other RNA
ctgtgttcgtacaatggca

SEQ ID NO: 1262 - RNA, 19 nt, synthetic construct
  source 1..19: mol_type = other RNA
cccaacggtgcaatgtcag

SEQ ID NO: 1263 - RNA, 19 nt, synthetic construct
  source 1..19: mol_type = other RNA
cctaacggctcagccatcc

SEQ ID NO: 1264 - RNA, 19 nt, synthetic construct
  source 1..19: mol_type = other RNA
cagctaccagcgttacacc

SEQ ID NO: 1265 - RNA, 19 nt, synthetic construct
  source 1..19: mol_type = other RNA
cacatcggccccaataacc

SEQ ID NO: 1266 - RNA, 19 nt, synthetic construct
  source 1..19: mol_type = other RNA
cagctaccagcgttacacc

SEQ ID NO: 1267 - RNA, 19 nt, synthetic construct
  source 1..19: mol_type = other RNA
ccaacactcacgagcgagc

SEQ ID NO: 1268 - RNA, 19 nt, synthetic construct
  source 1..19: mol_type = other RNA
ctacgaggacttcaacgtc

SEQ ID NO: 1269 - RNA, 19 nt, synthetic construct
  source 1..19: mol_type = other RNA
ctacaataagaccgaccga

SEQ ID NO: 1270 - RNA, 19 nt, synthetic construct
  source 1..19: mol_type = other RNA
cacaccatggatggcggtg

SEQ ID NO: 1271 - RNA, 19 nt, synthetic construct
  source 1..19: mol_type = other RNA
cggccactacgatcacggc

SEQ ID NO: 1272 - RNA, 19 nt, synthetic construct
  source 1..19: mol_type = other RNA
cggccactacgatcacggc

SEQ ID NO: 1273 - RNA, 19 nt, synthetic construct
  source 1..19: mol_type = other RNA
cggccactacgatcacggc

SEQ ID NO: 1274 - RNA, 19 nt, synthetic construct
  source 1..19: mol_type = other RNA
cggccactacgatcacggc

SEQ ID NO: 1275 - RNA, 19 nt, synthetic construct
  source 1..19: mol_type = other RNA
acgactacgagctgcgggt

SEQ ID NO: 1276 - RNA, 19 nt, synthetic construct
  source 1..19: mol_type = other RNA
cagcgctacgcctacgtgg

SEQ ID NO: 1277 - RNA, 19 nt, synthetic construct
  source 1..19: mol_type = other RNA
ggtcgacggcggccctcac

SEQ ID NO: 1278 - RNA, 19 nt, synthetic construct
  source 1..19: mol_type = other RNA
cctacgagtagcccggggc

SEQ ID NO: 1279 - RNA, 19 nt, synthetic construct
  source 1..19: mol_type = other RNA
ggacggcacgcacgcttcc

SEQ ID NO: 1280 - RNA, 19 nt, synthetic construct
  source 1..19: mol_type = other RNA
gctcgcgcctgaccgatcc

SEQ ID NO: 1281 - RNA, 19 nt, synthetic construct
  source 1..19: mol_type = other RNA
agcgctacgcctacgtggt

SEQ ID NO: 1282 - RNA, 19 nt, synthetic construct
  source 1..19: mol_type = other RNA
ctgcgactcgggtggcgac

SEQ ID NO: 1283 - RNA, 19 nt, synthetic construct
  source 1..19: mol_type = other RNA
gctacccgaagtgcccacc

SEQ ID NO: 1284 - RNA, 19 nt, synthetic construct
  source 1..19: mol_type = other RNA
ccgtgacggtcaccccctc

SEQ ID NO: 1285 - RNA, 19 nt, synthetic construct
  source 1..19: mol_type = other RNA
cctggcgccaacactcacg

SEQ ID NO: 1286 - RNA, 19 nt, synthetic construct
  source 1..19: mol_type = other RNA
ctaccagcgttacacccat

SEQ ID NO: 1287 - RNA, 19 nt, synthetic construct
  source 1..19: mol_type = other RNA
ggacccgcctatcacagac

SEQ ID NO: 1288 - RNA, 19 nt, synthetic construct
  source 1..19: mol_type = other RNA
ggacggcactcacgcctcc

SEQ ID NO: 1289 - RNA, 19 nt, synthetic construct
  source 1..19: mol_type = other RNA
cactacgatcacggccacc

SEQ ID NO: 1290 - RNA, 19 nt, synthetic construct
  source 1..19: mol_type = other RNA
ggacccgcctatcacagac

SEQ ID NO: 1291 - RNA, 19 nt, synthetic construct
  source 1..19: mol_type = other RNA
cactacgatcacggccacc

SEQ ID NO: 1292 - RNA, 19 nt, synthetic construct
  source 1..19: mol_type = other RNA
cacctatccccccagtgct

SEQ ID NO: 1293 - RNA, 19 nt, synthetic construct
  source 1..19: mol_type = other RNA
ggacccgcctatcacagac

SEQ ID NO: 1294 - RNA, 19 nt, synthetic construct
  source 1..19: mol_type = other RNA
ggacggcactcacgcctcc

SEQ ID NO: 1295 - RNA, 19 nt, synthetic construct
  source 1..19: mol_type = other RNA
ggacccgcctatcacagac

SEQ ID NO: 1296 - RNA, 19 nt, synthetic construct
  source 1..19: mol_type = other RNA
cactacgatcacggccacc

SEQ ID NO: 1297 - RNA, 19 nt, synthetic construct
  source 1..19: mol_type = other RNA
cacctatccccccagtgct

SEQ ID NO: 1298 - RNA, 19 nt, synthetic construct
  source 1..19: mol_type = other RNA
ctaccagcgttacacccat

SEQ ID NO: 1299 - RNA, 19 nt, synthetic construct
  source 1..19: mol_type = other RNA
ggacccgcctatcacagac

SEQ ID NO: 1300 - RNA, 19 nt, synthetic construct
  source 1..19: mol_type = other RNA
ggacggcactcacgcctcc

SEQ ID NO: 1301 - RNA, 19 nt, synthetic construct
  source 1..19: mol_type = other RNA
cactacgatcacggccacc

SEQ ID NO: 1302 - RNA, 19 nt, synthetic construct
  source 1..19: mol_type = other RNA
cacgtggaccgtcccagca

SEQ ID NO: 1303 - RNA, 19 nt, synthetic construct
  source 1..19: mol_type = other RNA
gcttacgcagagctctgcc

SEQ ID NO: 1304 - RNA, 19 nt, synthetic construct
  source 1..19: mol_type = other RNA
gcgaggtgcaaccggtggc

SEQ ID NO: 1305 - RNA, 19 nt, synthetic construct
  source 1..19: mol_type = other RNA
gccccgagacggtgtgcgt

SEQ ID NO: 1306 - RNA, 19 nt, synthetic construct
  source 1..19: mol_type = other RNA
acggggttggtgcaacctt

SEQ ID NO: 1307 - RNA, 19 nt, synthetic construct
  source 1..19: mol_type = other RNA
caccgtgtgtgtccgcgag

SEQ ID NO: 1308 - RNA, 19 nt, synthetic construct
  source 1..19: mol_type = other RNA
ctaacggctcagccatcct

SEQ ID NO: 1309 - RNA, 19 nt, synthetic construct
  source 1..19: mol_type = other RNA
ggacggcacgcacgcctcc

SEQ ID NO: 1310 - RNA, 19 nt, synthetic construct
  source 1..19: mol_type = other RNA
tgactaccacaaccacggg

SEQ ID NO: 1311 - RNA, 19 nt, synthetic construct
  source 1..19: mol_type = other RNA
cgactaccacaaccacggg

SEQ ID NO: 1312 - RNA, 19 nt, synthetic construct
  source 1..19: mol_type = other RNA
cgactaccacaaccacggg

SEQ ID NO: 1313 - RNA, 19 nt, synthetic construct
  source 1..19: mol_type = other RNA
cgactaccacaaccacggg

SEQ ID NO: 1314 - RNA, 19 nt, synthetic construct
  source 1..19: mol_type = other RNA
cccgggcccattcttcaac

SEQ ID NO: 1315 - RNA, 19 nt, synthetic construct
  source 1..19: mol_type = other RNA
cccgatgggtttcctaaat

SEQ ID NO: 1316 - RNA, 19 nt, synthetic construct
  source 1..19: mol_type = other RNA
ccgagcactatagccaccg

SEQ ID NO: 1317 - RNA, 19 nt, synthetic construct
  source 1..19: mol_type = other RNA
cacgacgcctgcaggctcc

SEQ ID NO: 1318 - RNA, 19 nt, synthetic construct
  source 1..19: mol_type = other RNA
aagacccgcacctcgaccc

SEQ ID NO: 1319 - RNA, 19 nt, synthetic construct
  source 1..19: mol_type = other RNA
aagacccgcacctcgaccc

SEQ ID NO: 1320 - RNA, 19 nt, synthetic construct
  source 1..19: mol_type = other RNA
aagacccgcacctcgaccc

SEQ ID NO: 1321 - RNA, 19 nt, synthetic construct
  source 1..19: mol_type = other RNA
aagacccgcacctcgaccc

SEQ ID NO: 1322 - RNA, 19 nt, synthetic construct
  source 1..19: mol_type = other RNA
tacgggtgggaagctaagc

SEQ ID NO: 1323 - RNA, 19 nt, synthetic construct
  source 1..19: mol_type = other RNA
aaggacggaaactactatg

SEQ ID NO: 1324 - RNA, 19 nt, synthetic construct
  source 1..19: mol_type = other RNA
gccgctggagggcacttat

SEQ ID NO: 1325 - RNA, 19 nt, synthetic construct
  source 1..19: mol_type = other RNA
ccgctggagggcacttatg

SEQ ID NO: 1326 - RNA, 19 nt, synthetic construct
  source 1..19: mol_type = other RNA
cggagcgtccaagtactca

SEQ ID NO: 1327 - RNA, 19 nt, synthetic construct
  source 1..19: mol_type = other RNA
tttctcgcccggggaagtc

SEQ ID NO: 1328 - RNA, 19 nt, synthetic construct
  source 1..19: mol_type = other RNA
actcacgagcgagctgtcc

SEQ ID NO: 1329 - RNA, 19 nt, synthetic construct
  source 1..19: mol_type = other RNA
ctacgctcacggcaccgtg

SEQ ID NO: 1330 - RNA, 19 nt, synthetic construct
  source 1..19: mol_type = other RNA
cggcgtgttcctcaactcc

SEQ ID NO: 1331 - RNA, 19 nt, synthetic construct
  source 1..19: mol_type = other RNA
ccgtgtgccacctttgtgg

SEQ ID NO: 1332 - RNA, 19 nt, synthetic construct
  source 1..19: mol_type = other RNA
ctacgatcacggccaccgg

SEQ ID NO: 1333 - RNA, 19 nt, synthetic construct
  source 1..19: mol_type = other RNA
ctacgatcacggccaccgg

SEQ ID NO: 1334 - RNA, 19 nt, synthetic construct
  source 1..19: mol_type = other RNA
ctacgatcacggccaccgg

SEQ ID NO: 1335 - RNA, 19 nt, synthetic construct
  source 1..19: mol_type = other RNA
ctacgatcacggccaccgg

SEQ ID NO: 1336 - RNA, 19 nt, synthetic construct
  source 1..19: mol_type = other RNA
cagctgtgttcgtacaatg

SEQ ID NO: 1337 - RNA, 19 nt, synthetic construct
  source 1..19: mol_type = other RNA
catccgggtccaagcggac

SEQ ID NO: 1338 - RNA, 19 nt, synthetic construct
  source 1..19: mol_type = other RNA
tcccggcttcgtaaccgtg

SEQ ID NO: 1339 - RNA, 19 nt, synthetic construct
  source 1..19: mol_type = other RNA
tactatgacgtcggtgcaa

SEQ ID NO: 1340 - RNA, 19 nt, synthetic construct
  source 1..19: mol_type = other RNA
tgacgtcggtgcaagggtc

SEQ ID NO: 1341 - RNA, 19 nt, synthetic construct
  source 1..19: mol_type = other RNA
acgagctgatcctccaaga

SEQ ID NO: 1342 - RNA, 19 nt, synthetic construct
  source 1..19: mol_type = other RNA
catcggccccaataaccac

SEQ ID NO: 1343 - RNA, 19 nt, synthetic construct
  source 1..19: mol_type = other RNA
cccatacagcctgccacct

SEQ ID NO: 1344 - RNA, 19 nt, synthetic construct
  source 1..19: mol_type = other RNA
acacgaccatcctgtggca

SEQ ID NO: 1345 - RNA, 19 nt, synthetic construct
  source 1..19: mol_type = other RNA
ccggacctgccccctcaac

SEQ ID NO: 1346 - RNA, 19 nt, synthetic construct
  source 1..19: mol_type = other RNA
cacatcggcccccataacc

SEQ ID NO: 1347 - RNA, 19 nt, synthetic construct
  source 1..19: mol_type = other RNA
gcacgcttccagtgtggat

SEQ ID NO: 1348 - RNA, 19 nt, synthetic construct
  source 1..19: mol_type = other RNA
cacatcggcccccataacc

SEQ ID NO: 1349 - RNA, 19 nt, synthetic construct
  source 1..19: mol_type = other RNA
cacatcggcccccataacc

SEQ ID NO: 1350 - RNA, 19 nt, synthetic construct
  source 1..19: mol_type = other RNA
ccggcttcgtaaccgtgac

SEQ ID NO: 1351 - RNA, 19 nt, synthetic construct
  source 1..19: mol_type = other RNA
aagcatgtgcgggcctatg

SEQ ID NO: 1352 - RNA, 19 nt, synthetic construct
  source 1..19: mol_type = other RNA
tctcaacgccgcagcctac

SEQ ID NO: 1353 - RNA, 19 nt, synthetic construct
  source 1..19: mol_type = other RNA
gctacgctcacggcaccgt

SEQ ID NO: 1354 - RNA, 19 nt, synthetic construct
  source 1..19: mol_type = other RNA
gacgtgccacaaccccgcc

SEQ ID NO: 1355 - RNA, 19 nt, synthetic construct
  source 1..19: mol_type = other RNA
cgagttctatgcccacaac

SEQ ID NO: 1356 - RNA, 19 nt, synthetic construct
  source 1..19: mol_type = other RNA
cctttaaggcggtggcgag

SEQ ID NO: 1357 - RNA, 19 nt, synthetic construct
  source 1..19: mol_type = other RNA
cgctctgtcacgactacga

SEQ ID NO: 1358 - RNA, 19 nt, synthetic construct
  source 1..19: mol_type = other RNA
gtgcgtgggtgacaaccgt

SEQ ID NO: 1359 - RNA, 19 nt, synthetic construct
  source 1..19: mol_type = other RNA
ggccactacgatcacggcc

SEQ ID NO: 1360 - RNA, 19 nt, synthetic construct
  source 1..19: mol_type = other RNA
ggccactacgatcacggcc

SEQ ID NO: 1361 - RNA, 19 nt, synthetic construct
  source 1..19: mol_type = other RNA
ggccactacgatcacggcc

SEQ ID NO: 1362 - RNA, 19 nt, synthetic construct
  source 1..19: mol_type = other RNA
ggccactacgatcacggcc

SEQ ID NO: 1363 - RNA, 19 nt, synthetic construct
  source 1..19: mol_type = other RNA
gtgacgagggttcagtgtc

SEQ ID NO: 1364 - RNA, 19 nt, synthetic construct
  source 1..19: mol_type = other RNA
tcctgtcaagtccgcatca

SEQ ID NO: 1365 - RNA, 19 nt, synthetic construct
  source 1..19: mol_type = other RNA
gtccaagaaatgtgccgac

SEQ ID NO: 1366 - RNA, 19 nt, synthetic construct
  source 1..19: mol_type = other RNA
ctgtgacgtccacttcggc

SEQ ID NO: 1367 - RNA, 19 nt, synthetic construct
  source 1..19: mol_type = other RNA
ggtgcgtgggtgacaaccg

SEQ ID NO: 1368 - RNA, 19 nt, synthetic construct
  source 1..19: mol_type = other RNA
cagctacgccgaggcctag

SEQ ID NO: 1369 - RNA, 19 nt, synthetic construct
  source 1..19: mol_type = other RNA
aaactactatgacgtcggt

SEQ ID NO: 1370 - RNA, 19 nt, synthetic construct
  source 1..19: mol_type = other RNA
gggtgacaaccgtgtcgtc

SEQ ID NO: 1371 - RNA, 19 nt, synthetic construct
  source 1..19: mol_type = other RNA
gcccccgccgtgcaaccgt

SEQ ID NO: 1372 - RNA, 19 nt, synthetic construct
  source 1..19: mol_type = other RNA
gtacgggtgggaagctaag

SEQ ID NO: 1373 - RNA, 19 nt, synthetic construct
  source 1..19: mol_type = other RNA
ctgctacgacaaggacgga

SEQ ID NO: 1374 - RNA, 19 nt, synthetic construct
  source 1..19: mol_type = other RNA
cacactaccaaagtgccga

SEQ ID NO: 1375 - RNA, 19 nt, synthetic construct
  source 1..19: mol_type = other RNA
cacactaccaaagtgccga

SEQ ID NO: 1376 - RNA, 19 nt, synthetic construct
  source 1..19: mol_type = other RNA
cacactaccaaagtgccga

SEQ ID NO: 1377 - RNA, 19 nt, synthetic construct
  source 1..19: mol_type = other RNA
cgccaacactcacgagcga

SEQ ID NO: 1378 - RNA, 19 nt, synthetic construct
  source 1..19: mol_type = other RNA
gcaaccggtggcctgtgcg

SEQ ID NO: 1379 - RNA, 19 nt, synthetic construct
  source 1..19: mol_type = other RNA
ccccgagcatccggtcgac

SEQ ID NO: 1380 - RNA, 19 nt, synthetic construct
  source 1..19: mol_type = other RNA
acctttgatggcgatcgct

SEQ ID NO: 1381 - RNA, 19 nt, synthetic construct
  source 1..19: mol_type = other RNA
accccgagcatccggtcga

SEQ ID NO: 1382 - RNA, 19 nt, synthetic construct
  source 1..19: mol_type = other RNA
cccccgctctgtcacgact

SEQ ID NO: 1383 - RNA, 19 nt, synthetic construct
  source 1..19: mol_type = other RNA
gaggactcctgtcaagtcc

SEQ ID NO: 1384 - RNA, 19 nt, synthetic construct
  source 1..19: mol_type = other RNA
gcccttgcactgtcctaac

SEQ ID NO: 1385 - RNA, 19 nt, synthetic construct
  source 1..19: mol_type = other RNA
acgacccgctgtcaaccga

SEQ ID NO: 1386 - RNA, 19 nt, synthetic construct
  source 1..19: mol_type = other RNA
cccttgccggccggcaact

SEQ ID NO: 1387 - RNA, 19 nt, synthetic construct
  source 1..19: mol_type = other RNA
ggcaccttctacggggttg

SEQ ID NO: 1388 - RNA, 19 nt, synthetic construct
  source 1..19: mol_type = other RNA
aagtccgcatcaacacgac

SEQ ID NO: 1389 - RNA, 19 nt, synthetic construct
  source 1..19: mol_type = other RNA
ccatccgggtccaagcgga

SEQ ID NO: 1390 - RNA, 19 nt, synthetic construct
  source 1..19: mol_type = other RNA
gagaccatcagggtcgact

SEQ ID NO: 1391 - RNA, 19 nt, synthetic construct
  source 1..19: mol_type = other RNA
cctttgatggcgatcgcta

SEQ ID NO: 1392 - RNA, 19 nt, synthetic construct
  source 1..19: mol_type = other RNA
tcccccgctctgtcacgac

SEQ ID NO: 1393 - RNA, 19 nt, synthetic construct
  source 1..19: mol_type = other RNA
ccccgctctgtcacgacta

SEQ ID NO: 1394 - RNA, 19 nt, synthetic construct
  source 1..19: mol_type = other RNA
gacccgctgtcaaccgaag

SEQ ID NO: 1395 - RNA, 19 nt, synthetic construct
  source 1..19: mol_type = other RNA
acagctaccagcgttacac

SEQ ID NO: 1396 - RNA, 19 nt, synthetic construct
  source 1..19: mol_type = other RNA
acagctaccagcgttacac

SEQ ID NO: 1397 - RNA, 19 nt, synthetic construct
  source 1..19: mol_type = other RNA
ggacagtttttctcgcccg

SEQ ID NO: 1398 - RNA, 19 nt, synthetic construct
  source 1..19: mol_type = other RNA
gcaaccgtcccggcttcgt

SEQ ID NO: 1399 - RNA, 19 nt, synthetic construct
  source 1..19: mol_type = other RNA
aaccgtcccggcttcgtaa

SEQ ID NO: 1400 - RNA, 19 nt, synthetic construct
  source 1..19: mol_type = other RNA
gcttcgtaaccgtgaccag

SEQ ID NO: 1401 - RNA, 19 nt, synthetic construct
  source 1..19: mol_type = other RNA
acctcagctgtgttcgtac

SEQ ID NO: 1402 - RNA, 19 nt, synthetic construct
  source 1..19: mol_type = other RNA
ctcctgtcaagtccgcatc

SEQ ID NO: 1403 - RNA, 19 nt, synthetic construct
  source 1..19: mol_type = other RNA
ggctgaggtcgcaacggcc

SEQ ID NO: 1404 - RNA, 19 nt, synthetic construct
  source 1..19: mol_type = other RNA
cctaaatttcccggggagc

SEQ ID NO: 1405 - RNA, 19 nt, synthetic construct
  source 1..19: mol_type = other RNA
gctgctacgacaaggacgg

SEQ ID NO: 1406 - RNA, 19 nt, synthetic construct
  source 1..19: mol_type = other RNA
ttcctaaatttcccgggga

SEQ ID NO: 1407 - RNA, 19 nt, synthetic construct
  source 1..19: mol_type = other RNA
ccctagcagcaaccaccgg

SEQ ID NO: 1408 - RNA, 19 nt, synthetic construct
  source 1..19: mol_type = other RNA
agctacgccgaggcctagt

SEQ ID NO: 1409 - RNA, 19 nt, synthetic construct
  source 1..19: mol_type = other RNA
agcagccactacgaccgca

SEQ ID NO: 1410 - RNA, 19 nt, synthetic construct
  source 1..19: mol_type = other RNA
gtggggcggctcccactat

SEQ ID NO: 1411 - RNA, 19 nt, synthetic construct
  source 1..19: mol_type = other RNA
tgggtttcctaaatttccc

SEQ ID NO: 1412 - RNA, 19 nt, synthetic construct
  source 1..19: mol_type = other RNA
atctacaataagaccgacc

SEQ ID NO: 1413 - RNA, 19 nt, synthetic construct
  source 1..19: mol_type = other RNA
ccacggccactacgatcac

SEQ ID NO: 1414 - RNA, 19 nt, synthetic construct
  source 1..19: mol_type = other RNA
ccacggccactacgatcac

SEQ ID NO: 1415 - RNA, 19 nt, synthetic construct
  source 1..19: mol_type = other RNA
ccacggccactacgatcac

SEQ ID NO: 1416 - RNA, 19 nt, synthetic construct
  source 1..19: mol_type = other RNA
ccacggccactacgatcac

SEQ ID NO: 1417 - RNA, 19 nt, synthetic construct
  source 1..19: mol_type = other RNA
ccaacatccgtgcggccgg

SEQ ID NO: 1418 - RNA, 19 nt, synthetic construct
  source 1..19: mol_type = other RNA
ccaacatccgtgcggccgg

SEQ ID NO: 1419 - RNA, 19 nt, synthetic construct
  source 1..19: mol_type = other RNA
ccaacatccgtgcggccgg

SEQ ID NO: 1420 - RNA, 19 nt, synthetic construct
  source 1..19: mol_type = other RNA
ccaacatccgtgcggccgg

SEQ ID NO: 1421 - RNA, 19 nt, synthetic construct
  source 1..19: mol_type = other RNA
aggcgtccaacggctccgt

SEQ ID NO: 1422 - RNA, 19 nt, synthetic construct
  source 1..19: mol_type = other RNA
cttggcgcctgcttgatcg

SEQ ID NO: 1423 - RNA, 19 nt, synthetic construct
  source 1..19: mol_type = other RNA
cgtgggtgacaaccgtgtc

SEQ ID NO: 1424 - RNA, 19 nt, synthetic construct
  source 1..19: mol_type = other RNA
ccgcagccccggtgtctag

SEQ ID NO: 1425 - RNA, 19 nt, synthetic construct
  source 1..19: mol_type = other RNA
aacaaactaagcatgtgcg

SEQ ID NO: 1426 - RNA, 19 nt, synthetic construct
  source 1..19: mol_type = other RNA
acaataagaccgaccgagc

SEQ ID NO: 1427 - RNA, 19 nt, synthetic construct
  source 1..19: mol_type = other RNA
ccccgagacggtgtgcgtg

SEQ ID NO: 1428 - RNA, 19 nt, synthetic construct
  source 1..19: mol_type = other RNA
ccgagcgcgtgccggacgc

SEQ ID NO: 1429 - RNA, 19 nt, synthetic construct
  source 1..19: mol_type = other RNA
tacaagatacgctacatgg

SEQ ID NO: 1430 - RNA, 19 nt, synthetic construct
  source 1..19: mol_type = other RNA
cccaagtcccagcgctacg

SEQ ID NO: 1431 - RNA, 19 nt, synthetic construct
  source 1..19: mol_type = other RNA
agtcccccgctctgtcacg

SEQ ID NO: 1432 - RNA, 19 nt, synthetic construct
  source 1..19: mol_type = other RNA
taccaaagtgccaactacc

SEQ ID NO: 1433 - RNA, 19 nt, synthetic construct
  source 1..19: mol_type = other RNA
ggccaccacacacgggcga

SEQ ID NO: 1434 - RNA, 19 nt, synthetic construct
  source 1..19: mol_type = other RNA
gcccccataaccacggtgg

SEQ ID NO: 1435 - RNA, 19 nt, synthetic construct
  source 1..19: mol_type = other RNA
tactccaacatccgtgcgg

SEQ ID NO: 1436 - RNA, 19 nt, synthetic construct
  source 1..19: mol_type = other RNA
ggccaccacacacgggcga

SEQ ID NO: 1437 - RNA, 19 nt, synthetic construct
  source 1..19: mol_type = other RNA
gccccacatcggccccaat

SEQ ID NO: 1438 - RNA, 19 nt, synthetic construct
  source 1..19: mol_type = other RNA
tactccaacatccgtgcgg

SEQ ID NO: 1439 - RNA, 19 nt, synthetic construct
  source 1..19: mol_type = other RNA
taccaaagtgccgactacc

SEQ ID NO: 1440 - RNA, 19 nt, synthetic construct
  source 1..19: mol_type = other RNA
gcccccataaccacggtgg

SEQ ID NO: 1441 - RNA, 19 nt, synthetic construct
  source 1..19: mol_type = other RNA
tactccaacatccgtgcgg

SEQ ID NO: 1442 - RNA, 19 nt, synthetic construct
  source 1..19: mol_type = other RNA
taccaaagtgccgactacc

SEQ ID NO: 1443 - RNA, 19 nt, synthetic construct
  source 1..19: mol_type = other RNA
ggccaccacacacgggcga

SEQ ID NO: 1444 - RNA, 19 nt, synthetic construct
  source 1..19: mol_type = other RNA
gcccccataaccacggtgg

SEQ ID NO: 1445 - RNA, 19 nt, synthetic construct
  source 1..19: mol_type = other RNA
tactccaacatccgtgcgg

SEQ ID NO: 1446 - RNA, 19 nt, synthetic construct
  source 1..19: mol_type = other RNA
taccaaagtgccgactacc

SEQ ID NO: 1447 - RNA, 19 nt, synthetic construct
  source 1..19: mol_type = other RNA
tgtggaccacgtggaccgt

SEQ ID NO: 1448 - RNA, 19 nt, synthetic construct
  source 1..19: mol_type = other RNA
ctcttcaacgcacacatgg

SEQ ID NO: 1449 - RNA, 19 nt, synthetic construct
  source 1..19: mol_type = other RNA
tgtgtgtggcaccccgcgc

SEQ ID NO: 1450 - RNA, 19 nt, synthetic construct
  source 1..19: mol_type = other RNA
ccgggcccattcttcaacg

SEQ ID NO: 1451 - RNA, 19 nt, synthetic construct
  source 1..19: mol_type = other RNA
cgcagcctacgagtagccc

SEQ ID NO: 1452 - RNA, 19 nt, synthetic construct
  source 1..19: mol_type = other RNA
gcagcctacgagtagcccg

SEQ ID NO: 1453 - RNA, 19 nt, synthetic construct
  source 1..19: mol_type = other RNA
tctacaataagaccgaccg

SEQ ID NO: 1454 - RNA, 19 nt, synthetic construct
  source 1..19: mol_type = other RNA
gccaccacacacgggcggt

SEQ ID NO: 1455 - RNA, 19 nt, synthetic construct
  source 1..19: mol_type = other RNA
acaaactaagcatgtgcgg

SEQ ID NO: 1456 - RNA, 19 nt, synthetic construct
  source 1..19: mol_type = other RNA
agagaccatcagggtcgac

SEQ ID NO: 1457 - RNA, 19 nt, synthetic construct
  source 1..19: mol_type = other RNA
aggccctgttctcaacgcc

SEQ ID NO: 1458 - RNA, 19 nt, synthetic construct
  source 1..19: mol_type = other RNA
tccaagaaatgtgccgaca

SEQ ID NO: 1459 - RNA, 19 nt, synthetic construct
  source 1..19: mol_type = other RNA
tcggccccaataaccacgg

SEQ ID NO: 1460 - RNA, 19 nt, synthetic construct
  source 1..19: mol_type = other RNA
cccggcactggtgctcgcg

SEQ ID NO: 1461 - RNA, 19 nt, synthetic construct
  source 1..19: mol_type = other RNA
ggccgctggagggcactta

SEQ ID NO: 1462 - RNA, 19 nt, synthetic construct
  source 1..19: mol_type = other RNA
gtgctgtggggagtgcgtc

SEQ ID NO: 1463 - RNA, 19 nt, synthetic construct
  source 1..19: mol_type = other RNA
gggcgtgagcgtcaccttc

SEQ ID NO: 1464 - RNA, 19 nt, synthetic construct
  source 1..19: mol_type = other RNA
agatacgctacatggggat

SEQ ID NO: 1465 - RNA, 19 nt, synthetic construct
  source 1..19: mol_type = other RNA
cgcgtgagctttgttccac

SEQ ID NO: 1466 - RNA, 19 nt, synthetic construct
  source 1..19: mol_type = other RNA
caaccggtggcctgtgcga

SEQ ID NO: 1467 - RNA, 19 nt, synthetic construct
  source 1..19: mol_type = other RNA
acatcggccccaataacca

SEQ ID NO: 1468 - RNA, 19 nt, synthetic construct
  source 1..19: mol_type = other RNA
gctacaactacaggatccg

SEQ ID NO: 1469 - RNA, 19 nt, synthetic construct
  source 1..19: mol_type = other RNA
gtgccggacgctggtgttg

SEQ ID NO: 1470 - RNA, 19 nt, synthetic construct
  source 1..19: mol_type = other RNA
aagaacggcgtgcttgtgt

SEQ ID NO: 1471 - RNA, 19 nt, synthetic construct
  source 1..19: mol_type = other RNA
catcgtcaccgagaacatc

SEQ ID NO: 1472 - RNA, 19 nt, synthetic construct
  source 1..19: mol_type = other RNA
gtcaaccgaagtgtgagtg

SEQ ID NO: 1473 - RNA, 19 nt, synthetic construct
  source 1..19: mol_type = other RNA
agctacgttctgtccaaga

SEQ ID NO: 1474 - RNA, 19 nt, synthetic construct
  source 1..19: mol_type = other RNA
ggcgtctgcaccaagtaca

SEQ ID NO: 1475 - RNA, 19 nt, synthetic construct
  source 1..19: mol_type = other RNA
cacgacgcgggcctgtgtg

SEQ ID NO: 1476 - RNA, 19 nt, synthetic construct
  source 1..19: mol_type = other RNA
ccgctgtcaaccgaagtgt

SEQ ID NO: 1477 - RNA, 19 nt, synthetic construct
  source 1..19: mol_type = other RNA
cacggcaccgtgctggctc

SEQ ID NO: 1478 - RNA, 19 nt, synthetic construct
  source 1..19: mol_type = other RNA
aactacgcccggcactggt

SEQ ID NO: 1479 - RNA, 19 nt, synthetic construct
  source 1..19: mol_type = other RNA
cacaacgaggccacctaca

SEQ ID NO: 1480 - RNA, 19 nt, synthetic construct
  source 1..19: mol_type = other RNA
ccggaaccccagtgggcac

SEQ ID NO: 1481 - RNA, 19 nt, synthetic construct
  source 1..19: mol_type = other RNA
tccactacaagtccatgga

SEQ ID NO: 1482 - RNA, 19 nt, synthetic construct
  source 1..19: mol_type = other RNA
tactcacgccagtgcgccc

SEQ ID NO: 1483 - RNA, 19 nt, synthetic construct
  source 1..19: mol_type = other RNA
atactcacgccagtgcgcc

SEQ ID NO: 1484 - RNA, 19 nt, synthetic construct
  source 1..19: mol_type = other RNA
gaggggacgttgagtccta

SEQ ID NO: 1485 - RNA, 19 nt, synthetic construct
  source 1..19: mol_type = other RNA
caggacccaacggtgcaat

SEQ ID NO: 1486 - RNA, 19 nt, synthetic construct
  source 1..19: mol_type = other RNA
ctgtcaaccgaagtgtgag

SEQ ID NO: 1487 - RNA, 19 nt, synthetic construct
  source 1..19: mol_type = other RNA
caggtcgtggaatgcagcc

SEQ ID NO: 1488 - RNA, 19 nt, synthetic construct
  source 1..19: mol_type = other RNA
caggtcgtggaatgcagcc

SEQ ID NO: 1489 - RNA, 19 nt, synthetic construct
  source 1..19: mol_type = other RNA
caggtcgtggaatgcagcc

SEQ ID NO: 1490 - RNA, 19 nt, synthetic construct
  source 1..19: mol_type = other RNA
caggtcgtggaatgcagcc

SEQ ID NO: 1491 - RNA, 19 nt, synthetic construct
  source 1..19: mol_type = other RNA
aaccgaagtgtgagtggac

SEQ ID NO: 1492 - RNA, 19 nt, synthetic construct
  source 1..19: mol_type = other RNA
tcctcaatgacgcgggcgc

SEQ ID NO: 1493 - RNA, 19 nt, synthetic construct
  source 1..19: mol_type = other RNA
tggaggggacgttgagtcc

SEQ ID NO: 1494 - RNA, 19 nt, synthetic construct
  source 1..19: mol_type = other RNA
ctcaatgacgcgggcgcct

SEQ ID NO: 1495 - RNA, 19 nt, synthetic construct
  source 1..19: mol_type = other RNA
tgtggaatactcacgccag

SEQ ID NO: 1496 - RNA, 19 nt, synthetic construct
  source 1..19: mol_type = other RNA
ctacaacaccaccgatggg

SEQ ID NO: 1497 - RNA, 19 nt, synthetic construct
  source 1..19: mol_type = other RNA
ccgcgaggtctgccgctgg

SEQ ID NO: 1498 - RNA, 19 nt, synthetic construct
  source 1..19: mol_type = other RNA
actacgcccggcactggtg

SEQ ID NO: 1499 - RNA, 19 nt, synthetic construct
  source 1..19: mol_type = other RNA
caactacaggatccgggtc

SEQ ID NO: 1500 - RNA, 19 nt, synthetic construct
  source 1..19: mol_type = other RNA
tgtttgaccaaattccggt

SEQ ID NO: 1501 - RNA, 19 nt, synthetic construct
  source 1..19: mol_type = other RNA
tgtcaaccgaagtgtgagt

SEQ ID NO: 1502 - RNA, 19 nt, synthetic construct
  source 1..19: mol_type = other RNA
cacctgcgtggcctacggg

SEQ ID NO: 1503 - RNA, 19 nt, synthetic construct
  source 1..19: mol_type = other RNA
agtccatggatatcgtcct

SEQ ID NO: 1504 - RNA, 19 nt, synthetic construct
  source 1..19: mol_type = other RNA
caaattccggtgagcagcg

SEQ ID NO: 1505 - RNA, 19 nt, synthetic construct
  source 1..19: mol_type = other RNA
ccctgtcggcagccaacat

SEQ ID NO: 1506 - RNA, 19 nt, synthetic construct
  source 1..19: mol_type = other RNA
ggagctgccttacagccgc

SEQ ID NO: 1507 - RNA, 19 nt, synthetic construct
  source 1..19: mol_type = other RNA
atgagtgcgagtgcatctg

SEQ ID NO: 1508 - RNA, 19 nt, synthetic construct
  source 1..19: mol_type = other RNA
atcagggtcgactgcaaca

SEQ ID NO: 1509 - RNA, 19 nt, synthetic construct
  source 1..19: mol_type = other RNA
gcgtggcctacggggatgg

SEQ ID NO: 1510 - RNA, 19 nt, synthetic construct
  source 1..19: mol_type = other RNA
tctacaacaccaccgatgg

SEQ ID NO: 1511 - RNA, 19 nt, synthetic construct
  source 1..19: mol_type = other RNA
aggggacgttgagtcctac

SEQ ID NO: 1512 - RNA, 19 nt, synthetic construct
  source 1..19: mol_type = other RNA
cagaagttggatgggccca

SEQ ID NO: 1513 - RNA, 19 nt, synthetic construct
  source 1..19: mol_type = other RNA
gtgtcctggcggactccgg

SEQ ID NO: 1514 - RNA, 19 nt, synthetic construct
  source 1..19: mol_type = other RNA
acaccctcgagcttcttca

SEQ ID NO: 1515 - RNA, 19 nt, synthetic construct
  source 1..19: mol_type = other RNA
tgcgtggcctacggggatg

SEQ ID NO: 1516 - RNA, 19 nt, synthetic construct
  source 1..19: mol_type = other RNA
cctgagtgaggccgacgtc

SEQ ID NO: 1517 - RNA, 19 nt, synthetic construct
  source 1..19: mol_type = other RNA
ctgagtgaggccgacgtca

SEQ ID NO: 1518 - RNA, 19 nt, synthetic construct
  source 1..19: mol_type = other RNA
gctttgttccacccgtcac

SEQ ID NO: 1519 - RNA, 19 nt, synthetic construct
  source 1..19: mol_type = other RNA
acccgctgtcaaccgaagt

SEQ ID NO: 1520 - RNA, 19 nt, synthetic construct
  source 1..19: mol_type = other RNA
ttgtggaatactcacgcca

SEQ ID NO: 1521 - RNA, 19 nt, synthetic construct
  source 1..19: mol_type = other RNA
tacaacaccaccgatgggc

SEQ ID NO: 1522 - RNA, 19 nt, synthetic construct
  source 1..19: mol_type = other RNA
gtgactggcgaggtgcaac

SEQ ID NO: 1523 - RNA, 19 nt, synthetic construct
  source 1..19: mol_type = other RNA
tgactggcgaggtgcaacc

SEQ ID NO: 1524 - RNA, 19 nt, synthetic construct
  source 1..19: mol_type = other RNA
cggtggccaggtgcgtggg

SEQ ID NO: 1525 - RNA, 19 nt, synthetic construct
  source 1..19: mol_type = other RNA
cccgctgtcaaccgaagtg

SEQ ID NO: 1526 - RNA, 19 nt, synthetic construct
  source 1..19: mol_type = other RNA
agtgactggcgaggtgcaa

SEQ ID NO: 1527 - RNA, 19 nt, synthetic construct
  source 1..19: mol_type = other RNA
ggacggcgtctgcaccaag

SEQ ID NO: 1528 - RNA, 19 nt, synthetic construct
  source 1..19: mol_type = other RNA
ctttgtggaatactcacgc

SEQ ID NO: 1529 - RNA, 19 nt, synthetic construct
  source 1..19: mol_type = other RNA
gagtcctacgataagatca

SEQ ID NO: 1530 - RNA, 19 nt, synthetic construct
  source 1..19: mol_type = other RNA
ggacatagagtgccaggcc

SEQ ID NO: 1531 - RNA, 19 nt, synthetic construct
  source 1..19: mol_type = other RNA
gtctgcaccaagtacatgc

SEQ ID NO: 1532 - RNA, 19 nt, synthetic construct
  source 1..19: mol_type = other RNA
gtggaatactcacgccagt

SEQ ID NO: 1533 - RNA, 19 nt, synthetic construct
  source 1..19: mol_type = other RNA
ctatgagtgcgagtgcatc

SEQ ID NO: 1534 - RNA, 19 nt, synthetic construct
  source 1..19: mol_type = other RNA
accatcagggtcgactgca

SEQ ID NO: 1535 - RNA, 19 nt, synthetic construct
  source 1..19: mol_type = other RNA
gtgtcctgggaccggaaga

SEQ ID NO: 1536 - RNA, 19 nt, synthetic construct
  source 1..19: mol_type = other RNA
gcacaacgaggccacctac

SEQ ID NO: 1537 - RNA, 19 nt, synthetic construct
  source 1..19: mol_type = other RNA
ccgcatcgtcaccgagaac

SEQ ID NO: 1538 - RNA, 19 nt, synthetic construct
  source 1..19: mol_type = other RNA
tcagggtcgactgcaacac

SEQ ID NO: 1539 - RNA, 19 nt, synthetic construct
  source 1..19: mol_type = other RNA
acaagtccatggatatcgt

SEQ ID NO: 1540 - RNA, 19 nt, synthetic construct
  source 1..19: mol_type = other RNA
accaaattccggtgagcag

SEQ ID NO: 1541 - RNA, 19 nt, synthetic construct
  source 1..19: mol_type = other RNA
caagaacggcgtgcttgtg

SEQ ID NO: 1542 - RNA, 19 nt, synthetic construct
  source 1..19: mol_type = other RNA
actattccacctttgacgg

SEQ ID NO: 1543 - RNA, 19 nt, synthetic construct
  source 1..19: mol_type = other RNA
cacggtggccaggtgcgtg

SEQ ID NO: 1544 - RNA, 19 nt, synthetic construct
  source 1..19: mol_type = other RNA
tgcagctacgttctgtcca

SEQ ID NO: 1545 - RNA, 19 nt, synthetic construct
  source 1..19: mol_type = other RNA
catcagggtcgactgcaac

SEQ ID NO: 1546 - RNA, 19 nt, synthetic construct
  source 1..19: mol_type = other RNA
gcaactgcacctatgtcct

SEQ ID NO: 1547 - RNA, 19 nt, synthetic construct
  source 1..19: mol_type = other RNA
gagttgggccaggtcgtgg

SEQ ID NO: 1548 - RNA, 19 nt, synthetic construct
  source 1..19: mol_type = other RNA
ctgcagctacgttctgtcc

SEQ ID NO: 1549 - RNA, 19 nt, synthetic construct
  source 1..19: mol_type = other RNA
acggacaacgagaactgcc

SEQ ID NO: 1550 - RNA, 19 nt, synthetic construct
  source 1..19: mol_type = other RNA
cacaccctcgagcttcttc

SEQ ID NO: 1551 - RNA, 19 nt, synthetic construct
  source 1..19: mol_type = other RNA
agggtcgactgcaacacct

SEQ ID NO: 1552 - RNA, 19 nt, synthetic construct
  source 1..19: mol_type = other RNA
ccttccgcatcgtcaccga

SEQ ID NO: 1553 - RNA, 19 nt, synthetic construct
  source 1..19: mol_type = other RNA
gagttgggccaggtcgtgg

SEQ ID NO: 1554 - RNA, 19 nt, synthetic construct
  source 1..19: mol_type = other RNA
gacatagagtgccaggccg

SEQ ID NO: 1555 - RNA, 19 nt, synthetic construct
  source 1..19: mol_type = other RNA
ccacggtgacttcccacac

SEQ ID NO: 1556 - RNA, 19 nt, synthetic construct
  source 1..19: mol_type = other RNA
acagctaccagctttacag

SEQ ID NO: 1557 - RNA, 19 nt, synthetic construct
  source 1..19: mol_type = other RNA
ccacggtgacttcccacac

SEQ ID NO: 1558 - RNA, 19 nt, synthetic construct
  source 1..19: mol_type = other RNA
acagctaccagctttacag

SEQ ID NO: 1559 - RNA, 19 nt, synthetic construct
  source 1..19: mol_type = other RNA
acagctaccagctttacag

SEQ ID NO: 1560 - RNA, 19 nt, synthetic construct
  source 1..19: mol_type = other RNA
cacctgcgtgaacaagcac

SEQ ID NO: 1561 - RNA, 19 nt, synthetic construct
  source 1..19: mol_type = other RNA
tcagcaagaacggcgtgct

SEQ ID NO: 1562 - RNA, 19 nt, synthetic construct
  source 1..19: mol_type = other RNA
gaacggcgtgcttgtgtct

SEQ ID NO: 1563 - RNA, 19 nt, synthetic construct
  source 1..19: mol_type = other RNA
ctttgttccacccgtcact

SEQ ID NO: 1564 - RNA, 19 nt, synthetic construct
  source 1..19: mol_type = other RNA
ttgttccacccgtcactgt

SEQ ID NO: 1565 - RNA, 19 nt, synthetic construct
  source 1..19: mol_type = other RNA
tgttccacccgtcactgtc

SEQ ID NO: 1566 - RNA, 19 nt, synthetic construct
  source 1..19: mol_type = other RNA
gagttgggccaggtcgtgg

SEQ ID NO: 1567 - RNA, 19 nt, synthetic construct
  source 1..19: mol_type = other RNA
gagttgggccaggtcgtgg

SEQ ID NO: 1568 - RNA, 19 nt, synthetic construct
  source 1..19: mol_type = other RNA
gccacctttgtggaatact

SEQ ID NO: 1569 - RNA, 19 nt, synthetic construct
  source 1..19: mol_type = other RNA
aatactcacgccagtgcgc

SEQ ID NO: 1570 - RNA, 19 nt, synthetic construct
  source 1..19: mol_type = other RNA
agtgcgcccacgcgggggg

SEQ ID NO: 1571 - RNA, 19 nt, synthetic construct
  source 1..19: mol_type = other RNA
ggggacacggccatccggg

SEQ ID NO: 1572 - RNA, 19 nt, synthetic construct
  source 1..19: mol_type = other RNA
accttccgcatcgtcaccg

SEQ ID NO: 1573 - RNA, 19 nt, synthetic construct
  source 1..19: mol_type = other RNA
cttggaggggacgttgagt

SEQ ID NO: 1574 - RNA, 19 nt, synthetic construct
  source 1..19: mol_type = other RNA
cccaggacccaacggtgca

SEQ ID NO: 1575 - RNA, 19 nt, synthetic construct
  source 1..19: mol_type = other RNA
gagaatgagaactacgccc

SEQ ID NO: 1576 - RNA, 19 nt, synthetic construct
  source 1..19: mol_type = other RNA
gggggctgatgtgcgccaa

SEQ ID NO: 1577 - RNA, 19 nt, synthetic construct
  source 1..19: mol_type = other RNA
accttcctcaatgacgcgg

SEQ ID NO: 1578 - RNA, 19 nt, synthetic construct
  source 1..19: mol_type = other RNA
acaacttggaggggacgtt

SEQ ID NO: 1579 - RNA, 19 nt, synthetic construct
  source 1..19: mol_type = other RNA
atgagaactacgcccggca

SEQ ID NO: 1580 - RNA, 19 nt, synthetic construct
  source 1..19: mol_type = other RNA
gggctgtttcagcacacac

SEQ ID NO: 1581 - RNA, 19 nt, synthetic construct
  source 1..19: mol_type = other RNA
ttccactatgagtgcgagt

SEQ ID NO: 1582 - RNA, 19 nt, synthetic construct
  source 1..19: mol_type = other RNA
aatgagaactacgcccggc

SEQ ID NO: 1583 - RNA, 19 nt, synthetic construct
  source 1..19: mol_type = other RNA
aaaaccggctgctgctact

SEQ ID NO: 1584 - RNA, 19 nt, synthetic construct
  source 1..19: mol_type = other RNA
ggggccggcctttgcggag

SEQ ID NO: 1585 - RNA, 19 nt, synthetic construct
  source 1..19: mol_type = other RNA
ctgcgtggcctacggggat

SEQ ID NO: 1586 - RNA, 19 nt, synthetic construct
  source 1..19: mol_type = other RNA
gcagccaacatcaccctgt

SEQ ID NO: 1587 - RNA, 19 nt, synthetic construct
  source 1..19: mol_type = other RNA
agctgccacacgctggacg

SEQ ID NO: 1588 - RNA, 19 nt, synthetic construct
  source 1..19: mol_type = other RNA
ggcacctgcgtggcctacg

SEQ ID NO: 1589 - RNA, 19 nt, synthetic construct
  source 1..19: mol_type = other RNA
gaccttccgcatcgtcacc

SEQ ID NO: 1590 - RNA, 19 nt, synthetic construct
  source 1..19: mol_type = other RNA
catccgactgcaccaggac

SEQ ID NO: 1591 - RNA, 19 nt, synthetic construct
  source 1..19: mol_type = other RNA
actgacatcccccagatac

SEQ ID NO: 1592 - RNA, 19 nt, synthetic construct
  source 1..19: mol_type = other RNA
tgttctgctgcaactacgg

SEQ ID NO: 1593 - RNA, 19 nt, synthetic construct
  source 1..19: mol_type = other RNA
tcctggcggactccggaca

SEQ ID NO: 1594 - RNA, 19 nt, synthetic construct
  source 1..19: mol_type = other RNA
gcacctgcacctatgagga

SEQ ID NO: 1595 - RNA, 19 nt, synthetic construct
  source 1..19: mol_type = other RNA
taccaggacgtcatctaca

SEQ ID NO: 1596 - RNA, 19 nt, synthetic construct
  source 1..19: mol_type = other RNA
aggacgtcatctacaacac

SEQ ID NO: 1597 - RNA, 19 nt, synthetic construct
  source 1..19: mol_type = other RNA
tgttctgctgcaactacgg

SEQ ID NO: 1598 - RNA, 19 nt, synthetic construct
  source 1..19: mol_type = other RNA
gtgctacaactacaggatc

SEQ ID NO: 1599 - RNA, 19 nt, synthetic construct
  source 1..19: mol_type = other RNA
atctacaacaccaccgatg

SEQ ID NO: 1600 - RNA, 19 nt, synthetic construct
  source 1..19: mol_type = other RNA
ccactacaagtccatggat

SEQ ID NO: 1601 - RNA, 19 nt, synthetic construct
  source 1..19: mol_type = other RNA
gctgaccacgagcctggcg

SEQ ID NO: 1602 - RNA, 19 nt, synthetic construct
  source 1..19: mol_type = other RNA
gcgaggtctgccgctggtc

SEQ ID NO: 1603 - RNA, 19 nt, synthetic construct
  source 1..19: mol_type = other RNA
ctggcggactccggacacc

SEQ ID NO: 1604 - RNA, 19 nt, synthetic construct
  source 1..19: mol_type = other RNA
catctacaacaccaccgat

SEQ ID NO: 1605 - RNA, 19 nt, synthetic construct
  source 1..19: mol_type = other RNA
gctgatgtgcgccaacagc

SEQ ID NO: 1606 - RNA, 19 nt, synthetic construct
  source 1..19: mol_type = other RNA
acccacgggaccttccgca

SEQ ID NO: 1607 - RNA, 19 nt, synthetic construct
  source 1..19: mol_type = other RNA
agagtggtttgatgaggac

SEQ ID NO: 1608 - RNA, 19 nt, synthetic construct
  source 1..19: mol_type = other RNA
ccttcaacgagttctatgc

SEQ ID NO: 1609 - RNA, 19 nt, synthetic construct
  source 1..19: mol_type = other RNA
tggtttgatgaggactacc

SEQ ID NO: 1610 - RNA, 19 nt, synthetic construct
  source 1..19: mol_type = other RNA
ggtttgatgaggactaccc

SEQ ID NO: 1611 - RNA, 19 nt, synthetic construct
  source 1..19: mol_type = other RNA
aggactaccccaagtctga

SEQ ID NO: 1612 - RNA, 19 nt, synthetic construct
  source 1..19: mol_type = other RNA
caacttggaggggacgttg

SEQ ID NO: 1613 - RNA, 19 nt, synthetic construct
  source 1..19: mol_type = other RNA
acatagagtgccaggccga

SEQ ID NO: 1614 - RNA, 19 nt, synthetic construct
  source 1..19: mol_type = other RNA
catagagtgccaggccgag

SEQ ID NO: 1615 - RNA, 19 nt, synthetic construct
  source 1..19: mol_type = other RNA
ggccgagagcttccccaac

SEQ ID NO: 1616 - RNA, 19 nt, synthetic construct
  source 1..19: mol_type = other RNA
ccctgtgggaccaccggca

SEQ ID NO: 1617 - RNA, 19 nt, synthetic construct
  source 1..19: mol_type = other RNA
cttctgcagggcatttgga

SEQ ID NO: 1618 - RNA, 19 nt, synthetic construct
  source 1..19: mol_type = other RNA
tggacagagtggtttgacg

SEQ ID NO: 1619 - RNA, 19 nt, synthetic construct
  source 1..19: mol_type = other RNA
agaactgcacggtggccag

SEQ ID NO: 1620 - RNA, 19 nt, synthetic construct
  source 1..19: mol_type = other RNA
acggtggccaggtgcgtgg

SEQ ID NO: 1621 - RNA, 19 nt, synthetic construct
  source 1..19: mol_type = other RNA
aggttgactccaccaagta

SEQ ID NO: 1622 - RNA, 19 nt, synthetic construct
  source 1..19: mol_type = other RNA
acaactacaggatccgggt

SEQ ID NO: 1623 - RNA, 19 nt, synthetic construct
  source 1..19: mol_type = other RNA
gcaagaacggcgtgcttgt

SEQ ID NO: 1624 - RNA, 19 nt, synthetic construct
  source 1..19: mol_type = other RNA
tcttccacaacaacaccga

SEQ ID NO: 1625 - RNA, 19 nt, synthetic construct
  source 1..19: mol_type = other RNA
ttccacaacaacaccgagg

SEQ ID NO: 1626 - RNA, 19 nt, synthetic construct
  source 1..19: mol_type = other RNA
ttgtgcccccgggcccatt

SEQ ID NO: 1627 - RNA, 19 nt, synthetic construct
  source 1..19: mol_type = other RNA
agctttgttccacccgtca

SEQ ID NO: 1628 - RNA, 19 nt, synthetic construct
  source 1..19: mol_type = other RNA
gcccggggagtgtgcagtg

SEQ ID NO: 1629 - RNA, 19 nt, synthetic construct
  source 1..19: mol_type = other RNA
ctggggccggcctttgcgg

SEQ ID NO: 1630 - RNA, 19 nt, synthetic construct
  source 1..19: mol_type = other RNA
gccggcctttgcggagtgc

SEQ ID NO: 1631 - RNA, 19 nt, synthetic construct
  source 1..19: mol_type = other RNA
caactccatctacacgcag

SEQ ID NO: 1632 - RNA, 19 nt, synthetic construct
  source 1..19: mol_type = other RNA
cgaggtctgccgctggtcc

SEQ ID NO: 1633 - RNA, 19 nt, synthetic construct
  source 1..19: mol_type = other RNA
cctgttcacaccctcgagc

SEQ ID NO: 1634 - RNA, 19 nt, synthetic construct
  source 1..19: mol_type = other RNA
cttcaaccagaaccaggct

SEQ ID NO: 1635 - RNA, 19 nt, synthetic construct
  source 1..19: mol_type = other RNA
cgtctgcaccaagtacatg

SEQ ID NO: 1636 - RNA, 19 nt, synthetic construct
  source 1..19: mol_type = other RNA
cttcctcaatgacgcgggc

SEQ ID NO: 1637 - RNA, 19 nt, synthetic construct
  source 1..19: mol_type = other RNA
gacgcgggcgcctgtgtgc

SEQ ID NO: 1638 - RNA, 19 nt, synthetic construct
  source 1..19: mol_type = other RNA
tgagtgaggccgacgtcac

SEQ ID NO: 1639 - RNA, 19 nt, synthetic construct
  source 1..19: mol_type = other RNA
tacggggatggccacttca

SEQ ID NO: 1640 - RNA, 19 nt, synthetic construct
  source 1..19: mol_type = other RNA
tggacgtgggctgtttcag

SEQ ID NO: 1641 - RNA, 19 nt, synthetic construct
  source 1..19: mol_type = other RNA
tggtgtccccctgcgggag

SEQ ID NO: 1642 - RNA, 19 nt, synthetic construct
  source 1..19: mol_type = other RNA
cctgtgccgctgccccacc

SEQ ID NO: 1643 - RNA, 19 nt, synthetic construct
  source 1..19: mol_type = other RNA
ctcaactccatctacacgc

SEQ ID NO: 1644 - RNA, 19 nt, synthetic construct
  source 1..19: mol_type = other RNA
catgcagaactgccccaag

SEQ ID NO: 1645 - RNA, 19 nt, synthetic construct
  source 1..19: mol_type = other RNA
tcaagatgtgctacaacta

SEQ ID NO: 1646 - RNA, 19 nt, synthetic construct
  source 1..19: mol_type = other RNA
tggtgtccccctgcgggag

SEQ ID NO: 1647 - RNA, 19 nt, synthetic construct
  source 1..19: mol_type = other RNA
tggtgtccccctgcgggag

SEQ ID NO: 1648 - RNA, 19 nt, synthetic construct
  source 1..19: mol_type = other RNA
ctgcctaaaaacctgccgg

SEQ ID NO: 1649 - RNA, 19 nt, synthetic construct
  source 1..19: mol_type = other RNA
ccgaagtgtgagtggacag

SEQ ID NO: 1650 - RNA, 19 nt, synthetic construct
  source 1..19: mol_type = other RNA
acggggatggccacttcat

SEQ ID NO: 1651 - RNA, 19 nt, synthetic construct
  source 1..19: mol_type = other RNA
gccgctgaccacgagcctg

SEQ ID NO: 1652 - RNA, 19 nt, synthetic construct
  source 1..19: mol_type = other RNA
cgctgtcaaccgaagtgtg

SEQ ID NO: 1653 - RNA, 19 nt, synthetic construct
  source 1..19: mol_type = other RNA
gggtcgactgcaacacctg

SEQ ID NO: 1654 - RNA, 19 nt, synthetic construct
  source 1..19: mol_type = other RNA
cacactgcgtgtccggctg

SEQ ID NO: 1655 - RNA, 19 nt, synthetic construct
  source 1..19: mol_type = other RNA
tgttcatccgactgcacca

SEQ ID NO: 1656 - RNA, 19 nt, synthetic construct
  source 1..19: mol_type = other RNA
ggacagagtggtttgacgt

SEQ ID NO: 1657 - RNA, 19 nt, synthetic construct
  source 1..19: mol_type = other RNA
ttcagcacacactgcgtgt

SEQ ID NO: 1658 - RNA, 19 nt, synthetic construct
  source 1..19: mol_type = other RNA
atgaagtgcgtggcccagt

SEQ ID NO: 1659 - RNA, 19 nt, synthetic construct
  source 1..19: mol_type = other RNA
gtgcgctcacagccttgag

SEQ ID NO: 1660 - RNA, 19 nt, synthetic construct
  source 1..19: mol_type = other RNA
ctgcacctatgaggacagg

SEQ ID NO: 1661 - RNA, 19 nt, synthetic construct
  source 1..19: mol_type = other RNA
ttccacccgtcactgtctt

SEQ ID NO: 1662 - RNA, 19 nt, synthetic construct
  source 1..19: mol_type = other RNA
cggcacctgcaccaacaac

SEQ ID NO: 1663 - RNA, 19 nt, synthetic construct
  source 1..19: mol_type = other RNA
gcccccgggcccattcttc

SEQ ID NO: 1664 - RNA, 19 nt, synthetic construct
  source 1..19: mol_type = other RNA
cagcgggaggagctgcctt

SEQ ID NO: 1665 - RNA, 19 nt, synthetic construct
  source 1..19: mol_type = other RNA
gcccacggagcagtgcccg

SEQ ID NO: 1666 - RNA, 19 nt, synthetic construct
  source 1..19: mol_type = other RNA
cacggagcagtgcccggac

SEQ ID NO: 1667 - RNA, 19 nt, synthetic construct
  source 1..19: mol_type = other RNA
gtttgacgtggacttccca

SEQ ID NO: 1668 - RNA, 19 nt, synthetic construct
  source 1..19: mol_type = other RNA
ccacctttgacggcacctc

SEQ ID NO: 1669 - RNA, 19 nt, synthetic construct
  source 1..19: mol_type = other RNA
ctgctccaacccccagcgc

SEQ ID NO: 1670 - RNA, 19 nt, synthetic construct
  source 1..19: mol_type = other RNA
tccgcgaggtctgccgctg

SEQ ID NO: 1671 - RNA, 19 nt, synthetic construct
  source 1..19: mol_type = other RNA
cagtgccaggacctgccgt

SEQ ID NO: 1672 - RNA, 19 nt, synthetic construct
  source 1..19: mol_type = other RNA
tcctcaactccatctacac

SEQ ID NO: 1673 - RNA, 19 nt, synthetic construct
  source 1..19: mol_type = other RNA
cctcaactccatctacacg

SEQ ID NO: 1674 - RNA, 19 nt, synthetic construct
  source 1..19: mol_type = other RNA
gagctacgagctgatcctc

SEQ ID NO: 1675 - RNA, 19 nt, synthetic construct
  source 1..19: mol_type = other RNA
tgcctgtggacggctgcac

SEQ ID NO: 1676 - RNA, 19 nt, synthetic construct
  source 1..19: mol_type = other RNA
cagatgaagtgcgtggccc

SEQ ID NO: 1677 - RNA, 19 nt, synthetic construct
  source 1..19: mol_type = other RNA
ggagtgcagccaccggctc

SEQ ID NO: 1678 - RNA, 19 nt, synthetic construct
  source 1..19: mol_type = other RNA
atcccctgtgggaccaccg

SEQ ID NO: 1679 - RNA, 19 nt, synthetic construct
  source 1..19: mol_type = other RNA
tgactccaccaagtactac

SEQ ID NO: 1680 - RNA, 19 nt, synthetic construct
  source 1..19: mol_type = other RNA
ggtttcagcaagaacggcg

SEQ ID NO: 1681 - RNA, 19 nt, synthetic construct
  source 1..19: mol_type = other RNA
agtgtgcagtgactggcga

SEQ ID NO: 1682 - RNA, 19 nt, synthetic construct
  source 1..19: mol_type = other RNA
cgccagtgcgcccacgcgg

SEQ ID NO: 1683 - RNA, 19 nt, synthetic construct
  source 1..19: mol_type = other RNA
ggacacccaggacccaacg

SEQ ID NO: 1684 - RNA, 19 nt, synthetic construct
  source 1..19: mol_type = other RNA
aggacttcaacgtccagct

SEQ ID NO: 1685 - RNA, 19 nt, synthetic construct
  source 1..19: mol_type = other RNA
gacttcaacgtccagctac

SEQ ID NO: 1686 - RNA, 19 nt, synthetic construct
  source 1..19: mol_type = other RNA
gaggacttcaacgtccagc

SEQ ID NO: 1687 - RNA, 19 nt, synthetic construct
  source 1..19: mol_type = other RNA
cacacactgcgtgtccggc

SEQ ID NO: 1688 - RNA, 19 nt, synthetic construct
  source 1..19: mol_type = other RNA
gtgcacaacgaggccacct

SEQ ID NO: 1689 - RNA, 19 nt, synthetic construct
  source 1..19: mol_type = other RNA
ctgcgtgtccggctgtgtc

SEQ ID NO: 1690 - RNA, 19 nt, synthetic construct
  source 1..19: mol_type = other RNA
acgaggccacctacaagcc

SEQ ID NO: 1691 - RNA, 19 nt, synthetic construct
  source 1..19: mol_type = other RNA
gcacctgcgtggcctacgg

SEQ ID NO: 1692 - RNA, 19 nt, synthetic construct
  source 1..19: mol_type = other RNA
cgacgcgggcctgtgtgtg

SEQ ID NO: 1693 - RNA, 19 nt, synthetic construct
  source 1..19: mol_type = other RNA
tgtgtcctggcggactccg

SEQ ID NO: 1694 - RNA, 19 nt, synthetic construct
  source 1..19: mol_type = other RNA
ggcggactccggacacctg

SEQ ID NO: 1695 - RNA, 19 nt, synthetic construct
  source 1..19: mol_type = other RNA
ccctgcggggcaccctgcc

SEQ ID NO: 1696 - RNA, 19 nt, synthetic construct
  source 1..19: mol_type = other RNA
cgtcatctacaacaccacc

SEQ ID NO: 1697 - RNA, 19 nt, synthetic construct
  source 1..19: mol_type = other RNA
ccgctgaccacgagcctgg

SEQ ID NO: 1698 - RNA, 19 nt, synthetic construct
  source 1..19: mol_type = other RNA
cacctctcaggccgagacc

SEQ ID NO: 1699 - RNA, 19 nt, synthetic construct
  source 1..19: mol_type = other RNA
attccacctttgacggcac

SEQ ID NO: 1700 - RNA, 19 nt, synthetic construct
  source 1..19: mol_type = other RNA
tgaccaaattccggtgagc

SEQ ID NO: 1701 - RNA, 19 nt, synthetic construct
  source 1..19: mol_type = other RNA
acgggaccttccgcatcgt

SEQ ID NO: 1702 - RNA, 19 nt, synthetic construct
  source 1..19: mol_type = other RNA
gggaccttccgcatcgtca

SEQ ID NO: 1703 - RNA, 19 nt, synthetic construct
  source 1..19: mol_type = other RNA
gtgcagtgactggcgaggt

SEQ ID NO: 1704 - RNA, 19 nt, synthetic construct
  source 1..19: mol_type = other RNA
ggaccttccgcatcgtcac

SEQ ID NO: 1705 - RNA, 19 nt, synthetic construct
  source 1..19: mol_type = other RNA
gactccaccaagtactacg

SEQ ID NO: 1706 - RNA, 19 nt, synthetic construct
  source 1..19: mol_type = other RNA
gtcctggcggactccggac

SEQ ID NO: 1707 - RNA, 19 nt, synthetic construct
  source 1..19: mol_type = other RNA
gtcatctacaacaccaccg

SEQ ID NO: 1708 - RNA, 19 nt, synthetic construct
  source 1..19: mol_type = other RNA
gacgcgggcctgtgtgtgt

SEQ ID NO: 1709 - RNA, 19 nt, synthetic construct
  source 1..19: mol_type = other RNA
tcatctacaacaccaccga

SEQ ID NO: 1710 - RNA, 19 nt, synthetic construct
  source 1..19: mol_type = other RNA
acaacaccaccgatgggct

SEQ ID NO: 1711 - RNA, 19 nt, synthetic construct
  source 1..19: mol_type = other RNA
cgcgaggtctgccgctggt

SEQ ID NO: 1712 - RNA, 19 nt, synthetic construct
  source 1..19: mol_type = other RNA
ggggctgatgtgcgccaac

SEQ ID NO: 1713 - RNA, 19 nt, synthetic construct
  source 1..19: mol_type = other RNA
ggctgatgtgcgccaacag

SEQ ID NO: 1714 - RNA, 19 nt, synthetic construct
  source 1..19: mol_type = other RNA
acccaggacccaacggtgc

SEQ ID NO: 1715 - RNA, 19 nt, synthetic construct
  source 1..19: mol_type = other RNA
agtggacagagtggtttga

SEQ ID NO: 1716 - RNA, 19 nt, synthetic construct
  source 1..19: mol_type = other RNA
agcaaccgaaaagaccacc

SEQ ID NO: 1717 - RNA, 19 nt, synthetic construct
  source 1..19: mol_type = other RNA
agtggtttgatgaggacta

SEQ ID NO: 1718 - RNA, 19 nt, synthetic construct
  source 1..19: mol_type = other RNA
gccgagagcttccccaact

SEQ ID NO: 1719 - RNA, 19 nt, synthetic construct
  source 1..19: mol_type = other RNA
actacaagtccatggatat

SEQ ID NO: 1720 - RNA, 19 nt, synthetic construct
  source 1..19: mol_type = other RNA
tgtgctacaactacaggat

SEQ ID NO: 1721 - RNA, 19 nt, synthetic construct
  source 1..19: mol_type = other RNA
catccagtgcgctcacagc

SEQ ID NO: 1722 - RNA, 19 nt, synthetic construct
  source 1..19: mol_type = other RNA
gaccccgctccagtttggg

SEQ ID NO: 1723 - RNA, 19 nt, synthetic construct
  source 1..19: mol_type = other RNA
cacagctaccagctttaca

SEQ ID NO: 1724 - RNA, 19 nt, synthetic construct
  source 1..19: mol_type = other RNA
cacagctaccagctttaca

SEQ ID NO: 1725 - RNA, 19 nt, synthetic construct
  source 1..19: mol_type = other RNA
cacagctaccagctttaca

SEQ ID NO: 1726 - RNA, 19 nt, synthetic construct
  source 1..19: mol_type = other RNA
ctccacgacaagcccggcc

SEQ ID NO: 1727 - RNA, 19 nt, synthetic construct
  source 1..19: mol_type = other RNA
gcacctatgtcctcatgag

SEQ ID NO: 1728 - RNA, 19 nt, synthetic construct
  source 1..19: mol_type = other RNA
gcctgccgctcccaggttg

SEQ ID NO: 1729 - RNA, 19 nt, synthetic construct
  source 1..19: mol_type = other RNA
gttcacaccctcgagcttc

SEQ ID NO: 1730 - RNA, 19 nt, synthetic construct
  source 1..19: mol_type = other RNA
ttcacaccctcgagcttct

SEQ ID NO: 1731 - RNA, 19 nt, synthetic construct
  source 1..19: mol_type = other RNA
caagatgtgctacaactac

SEQ ID NO: 1732 - RNA, 19 nt, synthetic construct
  source 1..19: mol_type = other RNA
agccccggtgtcagtggac

SEQ ID NO: 1733 - RNA, 19 nt, synthetic construct
  source 1..19: mol_type = other RNA
tgccaggacctgccgtgcc

SEQ ID NO: 1734 - RNA, 19 nt, synthetic construct
  source 1..19: mol_type = other RNA
tgcctaaaaacctgccgga

SEQ ID NO: 1735 - RNA, 19 nt, synthetic construct
  source 1..19: mol_type = other RNA
aacatcccctgtgggacca

SEQ ID NO: 1736 - RNA, 19 nt, synthetic construct
  source 1..19: mol_type = other RNA
gcacctatgaggacaggac

SEQ ID NO: 1737 - RNA, 19 nt, synthetic construct
  source 1..19: mol_type = other RNA
tcaatgacgcgggcgcctg

SEQ ID NO: 1738 - RNA, 19 nt, synthetic construct
  source 1..19: mol_type = other RNA
tccctcagtgccagcacgg

SEQ ID NO: 1739 - RNA, 19 nt, synthetic construct
  source 1..19: mol_type = other RNA
cccctgtcggcagccaaca

SEQ ID NO: 1740 - RNA, 19 nt, synthetic construct
  source 1..19: mol_type = other RNA
cccacagctaccagcttta

SEQ ID NO: 1741 - RNA, 19 nt, synthetic construct
  source 1..19: mol_type = other RNA
cccacagctaccagcttta

SEQ ID NO: 1742 - RNA, 19 nt, synthetic construct
  source 1..19: mol_type = other RNA
ggagcagtgcccggacccg

SEQ ID NO: 1743 - RNA, 19 nt, synthetic construct
  source 1..19: mol_type = other RNA
cccacgcggggggccagcc

SEQ ID NO: 1744 - RNA, 19 nt, synthetic construct
  source 1..19: mol_type = other RNA
tgacgcgggcgcctgtgtg

SEQ ID NO: 1745 - RNA, 19 nt, synthetic construct
  source 1..19: mol_type = other RNA
agcacacactgcgtgtccg

SEQ ID NO: 1746 - RNA, 19 nt, synthetic construct
  source 1..19: mol_type = other RNA
cccacagctaccagcttta

SEQ ID NO: 1747 - RNA, 19 nt, synthetic construct
  source 1..19: mol_type = other RNA
tcccactattccacctttg

SEQ ID NO: 1748 - RNA, 19 nt, synthetic construct
  source 1..19: mol_type = other RNA
ttcttcaatgaggaccaga

SEQ ID NO: 1749 - RNA, 19 nt, synthetic construct
  source 1..19: mol_type = other RNA
tgtcctcatgagagagatc

SEQ ID NO: 1750 - RNA, 19 nt, synthetic construct
  source 1..19: mol_type = other RNA
ccacaacgccattcacctt

SEQ ID NO: 1751 - RNA, 19 nt, synthetic construct
  source 1..19: mol_type = other RNA
cacaacgccattcaccttc

SEQ ID NO: 1752 - RNA, 19 nt, synthetic construct
  source 1..19: mol_type = other RNA
gagtggtttgatgaggact

SEQ ID NO: 1753 - RNA, 19 nt, synthetic construct
  source 1..19: mol_type = other RNA
acggagcctgctgtgccta

SEQ ID NO: 1754 - RNA, 19 nt, synthetic construct
  source 1..19: mol_type = other RNA
gaccaaattccggtgagca

SEQ ID NO: 1755 - RNA, 19 nt, synthetic construct
  source 1..19: mol_type = other RNA
gtccatggatatcgtcctc

SEQ ID NO: 1756 - RNA, 19 nt, synthetic construct
  source 1..19: mol_type = other RNA
ccccaagcccttccactcg

SEQ ID NO: 1757 - RNA, 19 nt, synthetic construct
  source 1..19: mol_type = other RNA
ctgtgacttctacaaccca

SEQ ID NO: 1758 - RNA, 19 nt, synthetic construct
  source 1..19: mol_type = other RNA
aggacatagagtgccaggc

SEQ ID NO: 1759 - RNA, 19 nt, synthetic construct
  source 1..19: mol_type = other RNA
gcagcggtttcagcaagaa

SEQ ID NO: 1760 - RNA, 19 nt, synthetic construct
  source 1..19: mol_type = other RNA
tctatggcaacaccctcct

SEQ ID NO: 1761 - RNA, 19 nt, synthetic construct
  source 1..19: mol_type = other RNA
tctatggcaacaccctcct

SEQ ID NO: 1762 - RNA, 19 nt, synthetic construct
  source 1..19: mol_type = other RNA
tctatggcaacaccctcct

SEQ ID NO: 1763 - RNA, 19 nt, synthetic construct
  source 1..19: mol_type = other RNA
tctatggcaacaccctcct

SEQ ID NO: 1764 - RNA, 19 nt, synthetic construct
  source 1..19: mol_type = other RNA
tctatggcaacaccctcct

SEQ ID NO: 1765 - RNA, 19 nt, synthetic construct
  source 1..19: mol_type = other RNA
ttcagcaagaacggcgtgc

SEQ ID NO: 1766 - RNA, 19 nt, synthetic construct
  source 1..19: mol_type = other RNA
tgtgcccccgggcccattc

SEQ ID NO: 1767 - RNA, 19 nt, synthetic construct
  source 1..19: mol_type = other RNA
cacccaggacccaacggtg

SEQ ID NO: 1768 - RNA, 19 nt, synthetic construct
  source 1..19: mol_type = other RNA
gggctgtgagtggcactac

SEQ ID NO: 1769 - RNA, 19 nt, synthetic construct
  source 1..19: mol_type = other RNA
gtggccaggtgcgtgggtg

SEQ ID NO: 1770 - RNA, 19 nt, synthetic construct
  source 1..19: mol_type = other RNA
cagcaggtggactgtgacc

SEQ ID NO: 1771 - RNA, 19 nt, synthetic construct
  source 1..19: mol_type = other RNA
aggcccggctgccctacag

SEQ ID NO: 1772 - RNA, 19 nt, synthetic construct
  source 1..19: mol_type = other RNA
gactgacatcccccagata

SEQ ID NO: 1773 - RNA, 19 nt, synthetic construct
  source 1..19: mol_type = other RNA
cagaaggtgcactgtgacg

SEQ ID NO: 1774 - RNA, 19 nt, synthetic construct
  source 1..19: mol_type = other RNA
gtgccaggccgagagcttc

SEQ ID NO: 1775 - RNA, 19 nt, synthetic construct
  source 1..19: mol_type = other RNA
ccactattccacctttgac

SEQ ID NO: 1776 - RNA, 19 nt, synthetic construct
  source 1..19: mol_type = other RNA
gggacacggccatccgggt

SEQ ID NO: 1777 - RNA, 19 nt, synthetic construct
  source 1..19: mol_type = other RNA
ttgactccaccaagtacta

SEQ ID NO: 1778 - RNA, 19 nt, synthetic construct
  source 1..19: mol_type = other RNA
caggacctgtgccgctgcc

SEQ ID NO: 1779 - RNA, 19 nt, synthetic construct
  source 1..19: mol_type = other RNA
cagcccttcttcaatgagg

SEQ ID NO: 1780 - RNA, 19 nt, synthetic construct
  source 1..19: mol_type = other RNA
ccatcagggtcgactgcaa

SEQ ID NO: 1781 - RNA, 19 nt, synthetic construct
  source 1..19: mol_type = other RNA
gcccttcttcaatgaggac

SEQ ID NO: 1782 - RNA, 19 nt, synthetic construct
  source 1..19: mol_type = other RNA
tgaagtgcgtggcccagtg

SEQ ID NO: 1783 - RNA, 19 nt, synthetic construct
  source 1..19: mol_type = other RNA
catcccctgtgggaccacc

SEQ ID NO: 1784 - RNA, 19 nt, synthetic construct
  source 1..19: mol_type = other RNA
ccagatgaagtgcgtggcc

SEQ ID NO: 1785 - RNA, 19 nt, synthetic construct
  source 1..19: mol_type = other RNA
ggcagtgcccctgcaccca

SEQ ID NO: 1786 - RNA, 19 nt, synthetic construct
  source 1..19: mol_type = other RNA
cagaccacagcaaccgaaa

SEQ ID NO: 1787 - RNA, 19 nt, synthetic construct
  source 1..19: mol_type = other RNA
ttgtcaggctggaccccgc

SEQ ID NO: 1788 - RNA, 19 nt, synthetic construct
  source 1..19: mol_type = other RNA
tgtggaacggagaggacag

SEQ ID NO: 1789 - RNA, 19 nt, synthetic construct
  source 1..19: mol_type = other RNA
gcacacactgcgtgtccgg

SEQ ID NO: 1790 - RNA, 19 nt, synthetic construct
  source 1..19: mol_type = other RNA
ctgcggggcaccctgccta

SEQ ID NO: 1791 - RNA, 19 nt, synthetic construct
  source 1..19: mol_type = other RNA
accagatgaagtgcgtggc

SEQ ID NO: 1792 - RNA, 19 nt, synthetic construct
  source 1..19: mol_type = other RNA
cctcagtgccagcacggag

SEQ ID NO: 1793 - RNA, 19 nt, synthetic construct
  source 1..19: mol_type = other RNA
ttggaggggacgttgagtc

SEQ ID NO: 1794 - RNA, 19 nt, synthetic construct
  source 1..19: mol_type = other RNA
ggtggccaggtgcgtgggt

SEQ ID NO: 1795 - RNA, 19 nt, synthetic construct
  source 1..19: mol_type = other RNA
gggagttgggccaggtcgt

SEQ ID NO: 1796 - RNA, 19 nt, synthetic construct
  source 1..19: mol_type = other RNA
gggagttgggccaggtcgt

SEQ ID NO: 1797 - RNA, 19 nt, synthetic construct
  source 1..19: mol_type = other RNA
gggagttgggccaggtcgt

SEQ ID NO: 1798 - RNA, 19 nt, synthetic construct
  source 1..19: mol_type = other RNA
ccaccagggccagatgtgc

SEQ ID NO: 1799 - RNA, 19 nt, synthetic construct
  source 1..19: mol_type = other RNA
gggagttgggccaggtcgt

SEQ ID NO: 1800 - RNA, 19 nt, synthetic construct
  source 1..19: mol_type = other RNA
cagcgggacggaaccactg

SEQ ID NO: 1801 - RNA, 19 nt, synthetic construct
  source 1..19: mol_type = other RNA
ggacgactgtctccagcgg

SEQ ID NO: 1802 - RNA, 19 nt, synthetic construct
  source 1..19: mol_type = other RNA
tcaactatgaaatccgtgt

SEQ ID NO: 1803 - RNA, 19 nt, synthetic construct
  source 1..19: mol_type = other RNA
tcaactatgaaatccgtgt

SEQ ID NO: 1804 - RNA, 19 nt, synthetic construct
  source 1..19: mol_type = other RNA
tcaactatgaaatccgtgt

SEQ ID NO: 1805 - RNA, 19 nt, synthetic construct
  source 1..19: mol_type = other RNA
tcaactatgaaatccgtgt

SEQ ID NO: 1806 - RNA, 19 nt, synthetic construct
  source 1..19: mol_type = other RNA
agtgtcggacccgagccag

SEQ ID NO: 1807 - RNA, 19 nt, synthetic construct
  source 1..19: mol_type = other RNA
gagttctatgcccacaacg

SEQ ID NO: 1808 - RNA, 19 nt, synthetic construct
  source 1..19: mol_type = other RNA
actatgaaatccgtgtgtt

SEQ ID NO: 1809 - RNA, 19 nt, synthetic construct
  source 1..19: mol_type = other RNA
actatgaaatccgtgtgtt

SEQ ID NO: 1810 - RNA, 19 nt, synthetic construct
  source 1..19: mol_type = other RNA
actatgaaatccgtgtgtt

SEQ ID NO: 1811 - RNA, 19 nt, synthetic construct
  source 1..19: mol_type = other RNA
actatgaaatccgtgtgtt

SEQ ID NO: 1812 - RNA, 19 nt, synthetic construct
  source 1..19: mol_type = other RNA
gggacgactgtctccagcg

SEQ ID NO: 1813 - RNA, 19 nt, synthetic construct
  source 1..19: mol_type = other RNA
tgatgtcactgggacgccc

SEQ ID NO: 1814 - RNA, 19 nt, synthetic construct
  source 1..19: mol_type = other RNA
tgcttcaactatgaaatcc

SEQ ID NO: 1815 - RNA, 19 nt, synthetic construct
  source 1..19: mol_type = other RNA
tgcttcaactatgaaatcc

SEQ ID NO: 1816 - RNA, 19 nt, synthetic construct
  source 1..19: mol_type = other RNA
tgcttcaactatgaaatcc

SEQ ID NO: 1817 - RNA, 19 nt, synthetic construct
  source 1..19: mol_type = other RNA
tgcttcaactatgaaatcc

SEQ ID NO: 1818 - RNA, 19 nt, synthetic construct
  source 1..19: mol_type = other RNA
ctcctccactccggggacg

SEQ ID NO: 1819 - RNA, 19 nt, synthetic construct
  source 1..19: mol_type = other RNA
tccagcgggacggaaccac

SEQ ID NO: 1820 - RNA, 19 nt, synthetic construct
  source 1..19: mol_type = other RNA
ctcctccactccggggacg

SEQ ID NO: 1821 - RNA, 19 nt, synthetic construct
  source 1..19: mol_type = other RNA
ctacaagtccatggatatc

SEQ ID NO: 1822 - RNA, 19 nt, synthetic construct
  source 1..19: mol_type = other RNA
tcaccctgttcacaccctc

SEQ ID NO: 1823 - RNA, 19 nt, synthetic construct
  source 1..19: mol_type = other RNA
ccaacgtcacctgcgtgaa

SEQ ID NO: 1824 - RNA, 19 nt, synthetic construct
  source 1..19: mol_type = other RNA
agggacgactgtctccagc

SEQ ID NO: 1825 - RNA, 19 nt, synthetic construct
  source 1..19: mol_type = other RNA
ttcaactatgaaatccgtg

SEQ ID NO: 1826 - RNA, 19 nt, synthetic construct
  source 1..19: mol_type = other RNA
ttcaactatgaaatccgtg

SEQ ID NO: 1827 - RNA, 19 nt, synthetic construct
  source 1..19: mol_type = other RNA
ttcaactatgaaatccgtg

SEQ ID NO: 1828 - RNA, 19 nt, synthetic construct
  source 1..19: mol_type = other RNA
ttcaactatgaaatccgtg

SEQ ID NO: 1829 - RNA, 19 nt, synthetic construct
  source 1..19: mol_type = other RNA
gttctatgcccacaacgcc

SEQ ID NO: 1830 - RNA, 19 nt, synthetic construct
  source 1..19: mol_type = other RNA
cttcaactatgaaatccgt

SEQ ID NO: 1831 - RNA, 19 nt, synthetic construct
  source 1..19: mol_type = other RNA
cttcaactatgaaatccgt

SEQ ID NO: 1832 - RNA, 19 nt, synthetic construct
  source 1..19: mol_type = other RNA
tgaaatccgtgtgttctgc

SEQ ID NO: 1833 - RNA, 19 nt, synthetic construct
  source 1..19: mol_type = other RNA
tgtgcttcaactatgaaat

SEQ ID NO: 1834 - RNA, 19 nt, synthetic construct
  source 1..19: mol_type = other RNA
atgaaatccgtgtgttctg

SEQ ID NO: 1835 - RNA, 19 nt, synthetic construct
  source 1..19: mol_type = other RNA
tgtgcttcaactatgaaat

SEQ ID NO: 1836 - RNA, 19 nt, synthetic construct
  source 1..19: mol_type = other RNA
atgaaatccgtgtgttctg

SEQ ID NO: 1837 - RNA, 19 nt, synthetic construct
  source 1..19: mol_type = other RNA
tgtgcttcaactatgaaat

SEQ ID NO: 1838 - RNA, 19 nt, synthetic construct
  source 1..19: mol_type = other RNA
atgaaatccgtgtgttctg

SEQ ID NO: 1839 - RNA, 19 nt, synthetic construct
  source 1..19: mol_type = other RNA
tgtgcttcaactatgaaat

SEQ ID NO: 1840 - RNA, 19 nt, synthetic construct
  source 1..19: mol_type = other RNA
atgaaatccgtgtgttctg

SEQ ID NO: 1841 - RNA, 19 nt, synthetic construct
  source 1..19: mol_type = other RNA
cgtcacctgcgtgaacaag

SEQ ID NO: 1842 - RNA, 19 nt, synthetic construct
  source 1..19: mol_type = other RNA
ccagcgggacggaaccact

SEQ ID NO: 1843 - RNA, 19 nt, synthetic construct
  source 1..19: mol_type = other RNA
gccacgcgtagccggtccg

SEQ ID NO: 1844 - RNA, 19 nt, synthetic construct
  source 1..19: mol_type = other RNA
caggtggactgtgaccgca

SEQ ID NO: 1845 - RNA, 19 nt, synthetic construct
  source 1..19: mol_type = other RNA
gcttcaactatgaaatccg

SEQ ID NO: 1846 - RNA, 19 nt, synthetic construct
  source 1..19: mol_type = other RNA
gcttcaactatgaaatccg

SEQ ID NO: 1847 - RNA, 19 nt, synthetic construct
  source 1..19: mol_type = other RNA
gcttcaactatgaaatccg

SEQ ID NO: 1848 - RNA, 19 nt, synthetic construct
  source 1..19: mol_type = other RNA
gcttcaactatgaaatccg

SEQ ID NO: 1849 - RNA, 19 nt, synthetic construct
  source 1..19: mol_type = other RNA
acgtcacctgcgtgaacaa

SEQ ID NO: 1850 - RNA, 19 nt, synthetic construct
  source 1..19: mol_type = other RNA
cctgcccatcaaagtgtcg

SEQ ID NO: 1851 - RNA, 19 nt, synthetic construct
  source 1..19: mol_type = other RNA
caacaaccagagggacgac

SEQ ID NO: 1852 - RNA, 19 nt, synthetic construct
  source 1..19: mol_type = other RNA
cagagggacgactgtctcc

SEQ ID NO: 1853 - RNA, 19 nt, synthetic construct
  source 1..19: mol_type = other RNA
agagggacgactgtctcca

SEQ ID NO: 1854 - RNA, 19 nt, synthetic construct
  source 1..19: mol_type = other RNA
gacgactgtctccagcggg

SEQ ID NO: 1855 - RNA, 19 nt, synthetic construct
  source 1..19: mol_type = other RNA
cccacccaccaaagtgtac

SEQ ID NO: 1856 - RNA, 19 nt, synthetic construct
  source 1..19: mol_type = other RNA
ctgcacgcccttctgtgtc

SEQ ID NO: 1857 - RNA, 19 nt, synthetic construct
  source 1..19: mol_type = other RNA
aaccagagggacgactgtc

SEQ ID NO: 1858 - RNA, 19 nt, synthetic construct
  source 1..19: mol_type = other RNA
ggctgcacgcccttctgtg

SEQ ID NO: 1859 - RNA, 19 nt, synthetic construct
  source 1..19: mol_type = other RNA
cctccggagctgccacacg

SEQ ID NO: 1860 - RNA, 19 nt, synthetic construct
  source 1..19: mol_type = other RNA
ctccggagctgccacacgc

SEQ ID NO: 1861 - RNA, 19 nt, synthetic construct
  source 1..19: mol_type = other RNA
gggccgagtgcctccggag

SEQ ID NO: 1862 - RNA, 19 nt, synthetic construct
  source 1..19: mol_type = other RNA
cttcaactatgaaatccgt

SEQ ID NO: 1863 - RNA, 19 nt, synthetic construct
  source 1..19: mol_type = other RNA
acccaccaaagtgtacaag

SEQ ID NO: 1864 - RNA, 19 nt, synthetic construct
  source 1..19: mol_type = other RNA
cttcaactatgaaatccgt

SEQ ID NO: 1865 - RNA, 19 nt, synthetic construct
  source 1..19: mol_type = other RNA
ggccgagtgcctccggagc

SEQ ID NO: 1866 - RNA, 19 nt, synthetic construct
  source 1..19: mol_type = other RNA
ccgcgcccggggagtgtgc

SEQ ID NO: 1867 - RNA, 19 nt, synthetic construct
  source 1..19: mol_type = other RNA
ctccagcgggacggaacca

SEQ ID NO: 1868 - RNA, 19 nt, synthetic construct
  source 1..19: mol_type = other RNA
cctgcccacccaccaaagt

SEQ ID NO: 1869 - RNA, 19 nt, synthetic construct
  source 1..19: mol_type = other RNA
ctggtgttggctctggcgg

SEQ ID NO: 1870 - RNA, 19 nt, synthetic construct
  source 1..19: mol_type = other RNA
gtctccagcgggacggaac

SEQ ID NO: 1871 - RNA, 19 nt, synthetic construct
  source 1..19: mol_type = other RNA
tccggagctgccacacgct

SEQ ID NO: 1872 - RNA, 19 nt, synthetic construct
  source 1..19: mol_type = other RNA
tgtctccagcgggacggaa

SEQ ID NO: 1873 - RNA, 19 nt, synthetic construct
  source 1..19: mol_type = other RNA
gctgcacgcccttctgtgt

SEQ ID NO: 1874 - RNA, 19 nt, synthetic construct
  source 1..19: mol_type = other RNA
agggcgactgctgtcccac

SEQ ID NO: 1875 - RNA, 19 nt, synthetic construct
  source 1..19: mol_type = other RNA
gactgtctccagcgggacg

SEQ ID NO: 1876 - RNA, 19 nt, synthetic construct
  source 1..19: mol_type = other RNA
cacggttcccagctcgtcc

SEQ ID NO: 1877 - RNA, 19 nt, synthetic construct
  source 1..19: mol_type = other RNA
ctgccgcgcccggggagtg

SEQ ID NO: 1878 - RNA, 19 nt, synthetic construct
  source 1..19: mol_type = other RNA
gccgacgtcacctgcagcg

SEQ ID NO: 1879 - RNA, 19 nt, synthetic construct
  source 1..19: mol_type = other RNA
tggtcacccgtgttgtcat

SEQ ID NO: 1880 - RNA, 19 nt, synthetic construct
  source 1..19: mol_type = other RNA
gcggccgcacctacagccc

SEQ ID NO: 1881 - RNA, 19 nt, synthetic construct
  source 1..19: mol_type = other RNA
tgcaactacggccactgcc

SEQ ID NO: 1882 - RNA, 19 nt, synthetic construct
  source 1..19: mol_type = other RNA
tccacagtgcttaccacca

SEQ ID NO: 1883 - RNA, 19 nt, synthetic construct
  source 1..19: mol_type = other RNA
cagtgcttaccaccacggc

SEQ ID NO: 1884 - RNA, 19 nt, synthetic construct
  source 1..19: mol_type = other RNA
actaccaaagtgctgacta

SEQ ID NO: 1885 - RNA, 19 nt, synthetic construct
  source 1..19: mol_type = other RNA
aaagtgctgactaccacaa

SEQ ID NO: 1886 - RNA, 19 nt, synthetic construct
  source 1..19: mol_type = other RNA
aagtgctgactaccacaac

SEQ ID NO: 1887 - RNA, 19 nt, synthetic construct
  source 1..19: mol_type = other RNA
tgcaactacggccactgcc

SEQ ID NO: 1888 - RNA, 19 nt, synthetic construct
  source 1..19: mol_type = other RNA
tccacagtgcttaccacca

SEQ ID NO: 1889 - RNA, 19 nt, synthetic construct
  source 1..19: mol_type = other RNA
tgcaactacggccactgcc

SEQ ID NO: 1890 - RNA, 19 nt, synthetic construct
  source 1..19: mol_type = other RNA
tccacagtgcttaccacca

SEQ ID NO: 1891 - RNA, 19 nt, synthetic construct
  source 1..19: mol_type = other RNA
cagtgcttaccaccacggc

SEQ ID NO: 1892 - RNA, 19 nt, synthetic construct
  source 1..19: mol_type = other RNA
tgcaactacggccactgcc

SEQ ID NO: 1893 - RNA, 19 nt, synthetic construct
  source 1..19: mol_type = other RNA
tgtggacaactgcaccgtg

SEQ ID NO: 1894 - RNA, 19 nt, synthetic construct
  source 1..19: mol_type = other RNA
tggacaactgcaccgtgta

SEQ ID NO: 1895 - RNA, 19 nt, synthetic construct
  source 1..19: mol_type = other RNA
gagggcgactgctgtccca

SEQ ID NO: 1896 - RNA, 19 nt, synthetic construct
  source 1..19: mol_type = other RNA
cagcggagaactgccagag

SEQ ID NO: 1897 - RNA, 19 nt, synthetic construct
  source 1..19: mol_type = other RNA
gacgtcacctgcagcgttt

SEQ ID NO: 1898 - RNA, 19 nt, synthetic construct
  source 1..19: mol_type = other RNA
aaagtgtcggacccgagcc

SEQ ID NO: 1899 - RNA, 19 nt, synthetic construct
  source 1..19: mol_type = other RNA
tgggggacgcactggagtt

SEQ ID NO: 1900 - RNA, 19 nt, synthetic construct
  source 1..19: mol_type = other RNA
gggggacgcactggagttt

SEQ ID NO: 1901 - RNA, 19 nt, synthetic construct
  source 1..19: mol_type = other RNA
accaaagtgctgactacca

SEQ ID NO: 1902 - RNA, 19 nt, synthetic construct
  source 1..19: mol_type = other RNA
actgtctccagcgggacgg

SEQ ID NO: 1903 - RNA, 19 nt, synthetic construct
  source 1..19: mol_type = other RNA
ctgtctccagcgggacgga

SEQ ID NO: 1904 - RNA, 19 nt, synthetic construct
  source 1..19: mol_type = other RNA
cctgtggtcacccgtgttg

SEQ ID NO: 1905 - RNA, 19 nt, synthetic construct
  source 1..19: mol_type = other RNA
gcctgtggtcacccgtgtt

SEQ ID NO: 1906 - RNA, 19 nt, synthetic construct
  source 1..19: mol_type = other RNA
ccagaccacagcaaccgaa

SEQ ID NO: 1907 - RNA, 19 nt, synthetic construct
  source 1..19: mol_type = other RNA
ttctgctgcaactacggcc

SEQ ID NO: 1908 - RNA, 19 nt, synthetic construct
  source 1..19: mol_type = other RNA
ttctgctgcaactacggcc

SEQ ID NO: 1909 - RNA, 19 nt, synthetic construct
  source 1..19: mol_type = other RNA
ttctgctgcaactacggcc

SEQ ID NO: 1910 - RNA, 19 nt, synthetic construct
  source 1..19: mol_type = other RNA
ttctgctgcaactacggcc

SEQ ID NO: 1911 - RNA, 19 nt, synthetic construct
  source 1..19: mol_type = other RNA
gttctgctgcaactacggc

SEQ ID NO: 1912 - RNA, 19 nt, synthetic construct
  source 1..19: mol_type = other RNA
ctgctgcaactacggccac

SEQ ID NO: 1913 - RNA, 19 nt, synthetic construct
  source 1..19: mol_type = other RNA
gttctgctgcaactacggc

SEQ ID NO: 1914 - RNA, 19 nt, synthetic construct
  source 1..19: mol_type = other RNA
ccgacgtcacctgcagcgt

SEQ ID NO: 1915 - RNA, 19 nt, synthetic construct
  source 1..19: mol_type = other RNA
tgctgcaactacggccact

SEQ ID NO: 1916 - RNA, 19 nt, synthetic construct
  source 1..19: mol_type = other RNA
tgctgcaactacggccact

SEQ ID NO: 1917 - RNA, 19 nt, synthetic construct
  source 1..19: mol_type = other RNA
tgctgcaactacggccact

SEQ ID NO: 1918 - RNA, 19 nt, synthetic construct
  source 1..19: mol_type = other RNA
tgctgcaactacggccact

SEQ ID NO: 1919 - RNA, 19 nt, synthetic construct
  source 1..19: mol_type = other RNA
cggagaactgccagagctg

SEQ ID NO: 1920 - RNA, 19 nt, synthetic construct
  source 1..19: mol_type = other RNA
cccagaccacagcaaccga

SEQ ID NO: 1921 - RNA, 19 nt, synthetic construct
  source 1..19: mol_type = other RNA
ggtgggggacgcactggag

SEQ ID NO: 1922 - RNA, 19 nt, synthetic construct
  source 1..19: mol_type = other RNA
ctgctgcaactacggccac

SEQ ID NO: 1923 - RNA, 19 nt, synthetic construct
  source 1..19: mol_type = other RNA
cgtcacctgcagcgtttcc

SEQ ID NO: 1924 - RNA, 19 nt, synthetic construct
  source 1..19: mol_type = other RNA
gaaactactatgacgtcgg

SEQ ID NO: 1925 - RNA, 19 nt, synthetic construct
  source 1..19: mol_type = other RNA
tcctacgataagatcaggg

SEQ ID NO: 1926 - RNA, 19 nt, synthetic construct
  source 1..19: mol_type = other RNA
gttctgctgcaactacggc

SEQ ID NO: 1927 - RNA, 19 nt, synthetic construct
  source 1..19: mol_type = other RNA
ctgctgcaactacggccac

SEQ ID NO: 1928 - RNA, 19 nt, synthetic construct
  source 1..19: mol_type = other RNA
tggcgaggtgcaaccggtg

SEQ ID NO: 1929 - RNA, 19 nt, synthetic construct
  source 1..19: mol_type = other RNA
agtccgcatcaacacgacc

SEQ ID NO: 1930 - RNA, 19 nt, synthetic construct
  source 1..19: mol_type = other RNA
gttctgctgcaactacggc

SEQ ID NO: 1931 - RNA, 19 nt, synthetic construct
  source 1..19: mol_type = other RNA
ctgctgcaactacggccac

SEQ ID NO: 1932 - RNA, 19 nt, synthetic construct
  source 1..19: mol_type = other RNA
cgactacgagctgcgggtt

SEQ ID NO: 1933 - RNA, 19 nt, synthetic construct
  source 1..19: mol_type = other RNA
caccttctacggggttggt

SEQ ID NO: 1934 - RNA, 19 nt, synthetic construct
  source 1..19: mol_type = other RNA
ctacgagctgcgggttctc

SEQ ID NO: 1935 - RNA, 19 nt, synthetic construct
  source 1..19: mol_type = other RNA
tgacaaccgtgtcgtcctg

SEQ ID NO: 1936 - RNA, 19 nt, synthetic construct
  source 1..19: mol_type = other RNA
gtgggggacgcactggagt

SEQ ID NO: 1937 - RNA, 19 nt, synthetic construct
  source 1..19: mol_type = other RNA
taaatttcccggggagcgg

SEQ ID NO: 1938 - RNA, 19 nt, synthetic construct
  source 1..19: mol_type = other RNA
gacggaaactactatgacg

SEQ ID NO: 1939 - RNA, 19 nt, synthetic construct
  source 1..19: mol_type = other RNA
ccactacgaccgcaaccac

SEQ ID NO: 1940 - RNA, 19 nt, synthetic construct
  source 1..19: mol_type = other RNA
cggcgcgtgagctttgttc

SEQ ID NO: 1941 - RNA, 19 nt, synthetic construct
  source 1..19: mol_type = other RNA
tgggtgacaaccgtgtcgt

SEQ ID NO: 1942 - RNA, 19 nt, synthetic construct
  source 1..19: mol_type = other RNA
ctttcgggagggcgccact

SEQ ID NO: 1943 - RNA, 19 nt, synthetic construct
  source 1..19: mol_type = other RNA
tatgacgtcggtgcaaggg

SEQ ID NO: 1944 - RNA, 19 nt, synthetic construct
  source 1..19: mol_type = other RNA
ctcacgagcgagctgtcca

SEQ ID NO: 1945 - RNA, 19 nt, synthetic construct
  source 1..19: mol_type = other RNA
caccctacaagatacgcta

SEQ ID NO: 1946 - RNA, 19 nt, synthetic construct
  source 1..19: mol_type = other RNA
gtcccggcttcgtaaccgt

SEQ ID NO: 1947 - RNA, 19 nt, synthetic construct
  source 1..19: mol_type = other RNA
tacgataagatcagggccg

SEQ ID NO: 1948 - RNA, 19 nt, synthetic construct
  source 1..19: mol_type = other RNA
ccacccggcgcgtgagctt

SEQ ID NO: 1949 - RNA, 19 nt, synthetic construct
  source 1..19: mol_type = other RNA
cactacgaccgcaaccact

SEQ ID NO: 1950 - RNA, 19 nt, synthetic construct
  source 1..19: mol_type = other RNA
agcctacgagtagcccggg

SEQ ID NO: 1951 - RNA, 19 nt, synthetic construct
  source 1..19: mol_type = other RNA
ctctgtcacgactacgagc

SEQ ID NO: 1952 - RNA, 19 nt, synthetic construct
  source 1..19: mol_type = other RNA
gctgcgacaggcaaggcgg

SEQ ID NO: 1953 - RNA, 19 nt, synthetic construct
  source 1..19: mol_type = other RNA
aagatacgctacatgggga

SEQ ID NO: 1954 - RNA, 19 nt, synthetic construct
  source 1..19: mol_type = other RNA
actatgacgtcggtgcaag

SEQ ID NO: 1955 - RNA, 19 nt, synthetic construct
  source 1..19: mol_type = other RNA
cagcctacgagtagcccgg

SEQ ID NO: 1956 - RNA, 19 nt, synthetic construct
  source 1..19: mol_type = other RNA
gcctacgagtagcccgggg

SEQ ID NO: 1957 - RNA, 19 nt, synthetic construct
  source 1..19: mol_type = other RNA
cacccggcgcgtgagcttt

SEQ ID NO: 1958 - RNA, 19 nt, synthetic construct
  source 1..19: mol_type = other RNA
acgaccgcaaccactggat

SEQ ID NO: 1959 - RNA, 19 nt, synthetic construct
  source 1..19: mol_type = other RNA
cccggagcgtccaagtact

SEQ ID NO: 1960 - RNA, 19 nt, synthetic construct
  source 1..19: mol_type = other RNA
cttgccgcggcctgagtga

SEQ ID NO: 1961 - RNA, 19 nt, synthetic construct
  source 1..19: mol_type = other RNA
ctgaggtcgcaacggccag

SEQ ID NO: 1962 - RNA, 19 nt, synthetic construct
  source 1..19: mol_type = other RNA
cgaccgcaaccactggatc

SEQ ID NO: 1963 - RNA, 19 nt, synthetic construct
  source 1..19: mol_type = other RNA
gagggcgccgtgtgttcat

SEQ ID NO: 1964 - RNA, 19 nt, synthetic construct
  source 1..19: mol_type = other RNA
gcgactcgggtggcgactg

SEQ ID NO: 1965 - RNA, 19 nt, synthetic construct
  source 1..19: mol_type = other RNA
actacgaccgcaaccactg

SEQ ID NO: 1966 - RNA, 19 nt, synthetic construct
  source 1..19: mol_type = other RNA
tccaagcggacggcggcgt

SEQ ID NO: 1967 - RNA, 19 nt, synthetic construct
  source 1..19: mol_type = other RNA
gacggcggcgtgttcctca

SEQ ID NO: 1968 - RNA, 19 nt, synthetic construct
  source 1..19: mol_type = other RNA
agggcgccgtgtgttcatg

SEQ ID NO: 1969 - RNA, 19 nt, synthetic construct
  source 1..19: mol_type = other RNA
ctacgagctgatcctccaa

SEQ ID NO: 1970 - RNA, 19 nt, synthetic construct
  source 1..19: mol_type = other RNA
gccaacactcacgagcgag

SEQ ID NO: 1971 - RNA, 19 nt, synthetic construct
  source 1..19: mol_type = other RNA
gaggttccacggtgacccc

SEQ ID NO: 1972 - RNA, 19 nt, synthetic construct
  source 1..19: mol_type = other RNA
acaaccactactgcacggc

SEQ ID NO: 1973 - RNA, 19 nt, synthetic construct
  source 1..19: mol_type = other RNA
catggatatcgtcctcact

SEQ ID NO: 1974 - RNA, 19 nt, synthetic construct
  source 1..19: mol_type = other RNA
ggagcgtccaagtactcag

SEQ ID NO: 1975 - RNA, 19 nt, synthetic construct
  source 1..19: mol_type = other RNA
ctggatcccaaatacgcca

SEQ ID NO: 1976 - RNA, 19 nt, synthetic construct
  source 1..19: mol_type = other RNA
atgagaaactctacgacct

SEQ ID NO: 1977 - RNA, 19 nt, synthetic construct
  source 1..19: mol_type = other RNA
aagcggacggcggcgtgtt

SEQ ID NO: 1978 - RNA, 19 nt, synthetic construct
  source 1..19: mol_type = other RNA
tgccactcatgcaggtgtt

SEQ ID NO: 1979 - RNA, 19 nt, synthetic construct
  source 1..19: mol_type = other RNA
gaccgatcccaacagtgcc

SEQ ID NO: 1980 - RNA, 19 nt, synthetic construct
  source 1..19: mol_type = other RNA
ctacgcctacgtggtggat

SEQ ID NO: 1981 - RNA, 19 nt, synthetic construct
  source 1..19: mol_type = other RNA
ctacagctaccaggacgtc

SEQ ID NO: 1982 - RNA, 19 nt, synthetic construct
  source 1..19: mol_type = other RNA
agacgtttgaaaacctgag

SEQ ID NO: 1983 - RNA, 19 nt, synthetic construct
  source 1..19: mol_type = other RNA
ggagggcgtcttcaagatg

SEQ ID NO: 1984 - RNA, 19 nt, synthetic construct
  source 1..19: mol_type = other RNA
gggacgtgccacaaccccg

SEQ ID NO: 1985 - RNA, 19 nt, synthetic construct
  source 1..19: mol_type = other RNA
cttggtacagccaccacgg

SEQ ID NO: 1986 - RNA, 19 nt, synthetic construct
  source 1..19: mol_type = other RNA
ctggacccgcctatcacag

SEQ ID NO: 1987 - RNA, 19 nt, synthetic construct
  source 1..19: mol_type = other RNA
caacatccgtgcggccgga

SEQ ID NO: 1988 - RNA, 19 nt, synthetic construct
  source 1..19: mol_type = other RNA
ctggacccgcctatcacag

SEQ ID NO: 1989 - RNA, 19 nt, synthetic construct
  source 1..19: mol_type = other RNA
caacatccgtgcggccgga

SEQ ID NO: 1990 - RNA, 19 nt, synthetic construct
  source 1..19: mol_type = other RNA
agccactacgaccgcaacc

SEQ ID NO: 1991 - RNA, 19 nt, synthetic construct
  source 1..19: mol_type = other RNA
ctggacccgcctatcacag

SEQ ID NO: 1992 - RNA, 19 nt, synthetic construct
  source 1..19: mol_type = other RNA
caacatccgtgcggccgga

SEQ ID NO: 1993 - RNA, 19 nt, synthetic construct
  source 1..19: mol_type = other RNA
ctggacccgcctatcacag

SEQ ID NO: 1994 - RNA, 19 nt, synthetic construct
  source 1..19: mol_type = other RNA
ggcacgcacgcctccagtg

SEQ ID NO: 1995 - RNA, 19 nt, synthetic construct
  source 1..19: mol_type = other RNA
caacatccgtgcggccgga

SEQ ID NO: 1996 - RNA, 19 nt, synthetic construct
  source 1..19: mol_type = other RNA
ctggacccgcctatcacag

SEQ ID NO: 1997 - RNA, 19 nt, synthetic construct
  source 1..19: mol_type = other RNA
tgacaagggccaccaattc

SEQ ID NO: 1998 - RNA, 19 nt, synthetic construct
  source 1..19: mol_type = other RNA
caccggttccacggccacc

SEQ ID NO: 1999 - RNA, 19 nt, synthetic construct
  source 1..19: mol_type = other RNA
ttctacgcagtgtgcaatc

SEQ ID NO: 2000 - RNA, 19 nt, synthetic construct
  source 1..19: mol_type = other RNA
ccatgcacgctttgggaat

SEQ ID NO: 2001 - RNA, 19 nt, synthetic construct
  source 1..19: mol_type = other RNA
ccactactgcacggcctct

SEQ ID NO: 2002 - RNA, 19 nt, synthetic construct
  source 1..19: mol_type = other RNA
cagtgtcggtgcagtgcaa

SEQ ID NO: 2003 - RNA, 19 nt, synthetic construct
  source 1..19: mol_type = other RNA
agtgtcggtgcagtgcaag

SEQ ID NO: 2004 - RNA, 19 nt, synthetic construct
  source 1..19: mol_type = other RNA
tccgcatcaacacgaccat

SEQ ID NO: 2005 - RNA, 19 nt, synthetic construct
  source 1..19: mol_type = other RNA
tcaacgtccagctacgccg

SEQ ID NO: 2006 - RNA, 19 nt, synthetic construct
  source 1..19: mol_type = other RNA
tgctacgctcacggcaccg

SEQ ID NO: 2007 - RNA, 19 nt, synthetic construct
  source 1..19: mol_type = other RNA
ctcccggccttcaacgagt

SEQ ID NO: 2008 - RNA, 19 nt, synthetic construct
  source 1..19: mol_type = other RNA
ctgcgagtacatcttggcc

SEQ ID NO: 2009 - RNA, 19 nt, synthetic construct
  source 1..19: mol_type = other RNA
ccggttccacggccaccgc

SEQ ID NO: 2010 - RNA, 19 nt, synthetic construct
  source 1..19: mol_type = other RNA
catgcggccccatacagcc

SEQ ID NO: 2011 - RNA, 19 nt, synthetic construct
  source 1..19: mol_type = other RNA
agctaccagctttacaccc

SEQ ID NO: 2012 - RNA, 19 nt, synthetic construct
  source 1..19: mol_type = other RNA
agctaccagctttacaccc

SEQ ID NO: 2013 - RNA, 19 nt, synthetic construct
  source 1..19: mol_type = other RNA
cctgctacgctcacggcac

SEQ ID NO: 2014 - RNA, 19 nt, synthetic construct
  source 1..19: mol_type = other RNA
tcatgtacgggtgggaagc

SEQ ID NO: 2015 - RNA, 19 nt, synthetic construct
  source 1..19: mol_type = other RNA
accagcgttacacccatcc

SEQ ID NO: 2016 - RNA, 19 nt, synthetic construct
  source 1..19: mol_type = other RNA
accagcgttacacccatcc

SEQ ID NO: 2017 - RNA, 19 nt, synthetic construct
  source 1..19: mol_type = other RNA
cttcaacggcctcccggcc

SEQ ID NO: 2018 - RNA, 19 nt, synthetic construct
  source 1..19: mol_type = other RNA
cacgggcgatccctgtccc

SEQ ID NO: 2019 - RNA, 19 nt, synthetic construct
  source 1..19: mol_type = other RNA
cacgggcgatccctgtccc

SEQ ID NO: 2020 - RNA, 19 nt, synthetic construct
  source 1..19: mol_type = other RNA
gcatgtgcgggcctatgtg

SEQ ID NO: 2021 - RNA, 19 nt, synthetic construct
  source 1..19: mol_type = other RNA
ctatgcccacaacgccagg

SEQ ID NO: 2022 - RNA, 19 nt, synthetic construct
  source 1..19: mol_type = other RNA
cggggactttgacacctac

SEQ ID NO: 2023 - RNA, 19 nt, synthetic construct
  source 1..19: mol_type = other RNA
cggggactttgacacctac

SEQ ID NO: 2024 - RNA, 19 nt, synthetic construct
  source 1..19: mol_type = other RNA
cggggactttgacacctac

SEQ ID NO: 2025 - RNA, 19 nt, synthetic construct
  source 1..19: mol_type = other RNA
cggggactttgacacctac

SEQ ID NO: 2026 - RNA, 19 nt, synthetic construct
  source 1..19: mol_type = other RNA
cccggccttcaacgagttc

SEQ ID NO: 2027 - RNA, 19 nt, synthetic construct
  source 1..19: mol_type = other RNA
ggaccaccgagtcaccccc

SEQ ID NO: 2028 - RNA, 19 nt, synthetic construct
  source 1..19: mol_type = other RNA
ggaccaccgagtcaccccc

SEQ ID NO: 2029 - RNA, 19 nt, synthetic construct
  source 1..19: mol_type = other RNA
ggaccaccgagtcaccccc

SEQ ID NO: 2030 - RNA, 19 nt, synthetic construct
  source 1..19: mol_type = other RNA
tcacgactacgagctgcgg

SEQ ID NO: 2031 - RNA, 19 nt, synthetic construct
  source 1..19: mol_type = other RNA
gcaaccgaaaagaccaccc

SEQ ID NO: 2032 - RNA, 19 nt, synthetic construct
  source 1..19: mol_type = other RNA
cacacgggcgatccctgtc

SEQ ID NO: 2033 - RNA, 19 nt, synthetic construct
  source 1..19: mol_type = other RNA
cacacgggcgatccctgtc

SEQ ID NO: 2034 - RNA, 19 nt, synthetic construct
  source 1..19: mol_type = other RNA
ggacggaaccactgccgcc

SEQ ID NO: 2035 - RNA, 19 nt, synthetic construct
  source 1..19: mol_type = other RNA
gacggaaccactgccgcca

SEQ ID NO: 2036 - RNA, 19 nt, synthetic construct
  source 1..19: mol_type = other RNA
tgtgcgacctcacctgccc

SEQ ID NO: 2037 - RNA, 19 nt, synthetic construct
  source 1..19: mol_type = other RNA
gcgtacagctcagcgactg

SEQ ID NO: 2038 - RNA, 19 nt, synthetic construct
  source 1..19: mol_type = other RNA
gcgccgtgtgttcatgtac

SEQ ID NO: 2039 - RNA, 19 nt, synthetic construct
  source 1..19: mol_type = other RNA
gctacgacaaggacggaaa

SEQ ID NO: 2040 - RNA, 19 nt, synthetic construct
  source 1..19: mol_type = other RNA
ctgccccgagacggtgtgc

SEQ ID NO: 2041 - RNA, 19 nt, synthetic construct
  source 1..19: mol_type = other RNA
ccccgtgggtgaaaccggc

SEQ ID NO: 2042 - RNA, 19 nt, synthetic construct
  source 1..19: mol_type = other RNA
gcctacgaggacttcaacg

SEQ ID NO: 2043 - RNA, 19 nt, synthetic construct
  source 1..19: mol_type = other RNA
cctacgaggacttcaacgt

SEQ ID NO: 2044 - RNA, 19 nt, synthetic construct
  source 1..19: mol_type = other RNA
cgcctacgaggacttcaac

SEQ ID NO: 2045 - RNA, 19 nt, synthetic construct
  source 1..19: mol_type = other RNA
tgccatttctacgcagtgt

SEQ ID NO: 2046 - RNA, 19 nt, synthetic construct
  source 1..19: mol_type = other RNA
ggttcagtgtcggtgcagt

SEQ ID NO: 2047 - RNA, 19 nt, synthetic construct
  source 1..19: mol_type = other RNA
ctgcgacaggcaaggcggc

SEQ ID NO: 2048 - RNA, 19 nt, synthetic construct
  source 1..19: mol_type = other RNA
cccaccctacaagatacgc

SEQ ID NO: 2049 - RNA, 19 nt, synthetic construct
  source 1..19: mol_type = other RNA
ctgcgtgggacccgatggg

SEQ ID NO: 2050 - RNA, 19 nt, synthetic construct
  source 1..19: mol_type = other RNA
tgcgtgggtgacaaccgtg

SEQ ID NO: 2051 - RNA, 19 nt, synthetic construct
  source 1..19: mol_type = other RNA
cctttgcggagtgccacgc

SEQ ID NO: 2052 - RNA, 19 nt, synthetic construct
  source 1..19: mol_type = other RNA
aactaagcatgtgcgggcc

SEQ ID NO: 2053 - RNA, 19 nt, synthetic construct
  source 1..19: mol_type = other RNA
tggacagtttttctcgccc

SEQ ID NO: 2054 - RNA, 19 nt, synthetic construct
  source 1..19: mol_type = other RNA
gacagtttttctcgcccgg

SEQ ID NO: 2055 - RNA, 19 nt, synthetic construct
  source 1..19: mol_type = other RNA
ctggcgaggtgcaaccggt

SEQ ID NO: 2056 - RNA, 19 nt, synthetic construct
  source 1..19: mol_type = other RNA
caagtccgcatcaacacga

SEQ ID NO: 2057 - RNA, 19 nt, synthetic construct
  source 1..19: mol_type = other RNA
caaactaagcatgtgcggg

SEQ ID NO: 2058 - RNA, 19 nt, synthetic construct
  source 1..19: mol_type = other RNA
agctaccaggacgtcatct

SEQ ID NO: 2059 - RNA, 19 nt, synthetic construct
  source 1..19: mol_type = other RNA
catctacaataagaccgac

SEQ ID NO: 2060 - RNA, 19 nt, synthetic construct
  source 1..19: mol_type = other RNA
tggatccacggccatcccg

SEQ ID NO: 2061 - RNA, 19 nt, synthetic construct
  source 1..19: mol_type = other RNA
ctcaggccccgtgacggtc

SEQ ID NO: 2062 - RNA, 19 nt, synthetic construct
  source 1..19: mol_type = other RNA
gtccaagcggacggcggcg

SEQ ID NO: 2063 - RNA, 19 nt, synthetic construct
  source 1..19: mol_type = other RNA
gttctctgctgcgaatacg

SEQ ID NO: 2064 - RNA, 19 nt, synthetic construct
  source 1..19: mol_type = other RNA
agggctgaggtcgcaacgg

SEQ ID NO: 2065 - RNA, 19 nt, synthetic construct
  source 1..19: mol_type = other RNA
tggcgcctgcttgatcgcc

SEQ ID NO: 2066 - RNA, 19 nt, synthetic construct
  source 1..19: mol_type = other RNA
acatccacccttccaacac

SEQ ID NO: 2067 - RNA, 19 nt, synthetic construct
  source 1..19: mol_type = other RNA
cacagctaccagcgttaca

SEQ ID NO: 2068 - RNA, 19 nt, synthetic construct
  source 1..19: mol_type = other RNA
caccacggccactacgatc

SEQ ID NO: 2069 - RNA, 19 nt, synthetic construct
  source 1..19: mol_type = other RNA
caccacggccactacgatc

SEQ ID NO: 2070 - RNA, 19 nt, synthetic construct
  source 1..19: mol_type = other RNA
caccacggccactacgatc

SEQ ID NO: 2071 - RNA, 19 nt, synthetic construct
  source 1..19: mol_type = other RNA
cagggacggcacgcacgcc

SEQ ID NO: 2072 - RNA, 19 nt, synthetic construct
  source 1..19: mol_type = other RNA
caccacggccactacgatc

SEQ ID NO: 2073 - RNA, 19 nt, synthetic construct
  source 1..19: mol_type = other RNA
cacagctaccagcgttaca

SEQ ID NO: 2074 - RNA, 19 nt, synthetic construct
  source 1..19: mol_type = other RNA
caccacggccactacgatc

SEQ ID NO: 2075 - RNA, 19 nt, synthetic construct
  source 1..19: mol_type = other RNA
accagcgtgttcatccgac

SEQ ID NO: 2076 - RNA, 19 nt, synthetic construct
  source 1..19: mol_type = other RNA
gactgtgaccgcatgcggg

SEQ ID NO: 2077 - RNA, 19 nt, synthetic construct
  source 1..19: mol_type = other RNA
tcctctgctgcagtgacga

SEQ ID NO: 2078 - RNA, 19 nt, synthetic construct
  source 1..19: mol_type = other RNA
tggggcggctcccactatt

SEQ ID NO: 2079 - RNA, 19 nt, synthetic construct
  source 1..19: mol_type = other RNA
agagagatccatgcacgct

SEQ ID NO: 2080 - RNA, 19 nt, synthetic construct
  source 1..19: mol_type = other RNA
gctgcgaatacgtgccctg

SEQ ID NO: 2081 - RNA, 19 nt, synthetic construct
  source 1..19: mol_type = other RNA
ggcctttgcggagtgccac

SEQ ID NO: 2082 - RNA, 19 nt, synthetic construct
  source 1..19: mol_type = other RNA
acagagccgagcactatag

SEQ ID NO: 2083 - RNA, 19 nt, synthetic construct
  source 1..19: mol_type = other RNA
aggggacctttaaggcggt

SEQ ID NO: 2084 - RNA, 19 nt, synthetic construct
  source 1..19: mol_type = other RNA
cggccactacgatcacagc

SEQ ID NO: 2085 - RNA, 19 nt, synthetic construct
  source 1..19: mol_type = other RNA
accaggctgacgacttcac

SEQ ID NO: 2086 - RNA, 19 nt, synthetic construct
  source 1..19: mol_type = other RNA
atcacctttgatggcgatc

SEQ ID NO: 2087 - RNA, 19 nt, synthetic construct
  source 1..19: mol_type = other RNA
acctttaaggcggtggcga

SEQ ID NO: 2088 - RNA, 19 nt, synthetic construct
  source 1..19: mol_type = other RNA
gaccccgagcatccggtcg

SEQ ID NO: 2089 - RNA, 19 nt, synthetic construct
  source 1..19: mol_type = other RNA
ctctgctgcagtgacgacc

SEQ ID NO: 2090 - RNA, 19 nt, synthetic construct
  source 1..19: mol_type = other RNA
ctgcaggggacgtgccaca

SEQ ID NO: 2091 - RNA, 19 nt, synthetic construct
  source 1..19: mol_type = other RNA
ggggacgtgccacaacccc

SEQ ID NO: 2092 - RNA, 19 nt, synthetic construct
  source 1..19: mol_type = other RNA
acctggacccgcctatcac

SEQ ID NO: 2093 - RNA, 19 nt, synthetic construct
  source 1..19: mol_type = other RNA
gccaccacacacgggcgat

SEQ ID NO: 2094 - RNA, 19 nt, synthetic construct
  source 1..19: mol_type = other RNA
gtgacggtgcccaccggat

SEQ ID NO: 2095 - RNA, 19 nt, synthetic construct
  source 1..19: mol_type = other RNA
acctggacccgcctatcac

SEQ ID NO: 2096 - RNA, 19 nt, synthetic construct
  source 1..19: mol_type = other RNA
gccaccacacacgggcgat

SEQ ID NO: 2097 - RNA, 19 nt, synthetic construct
  source 1..19: mol_type = other RNA
ccccacatcggccccaata

SEQ ID NO: 2098 - RNA, 19 nt, synthetic construct
  source 1..19: mol_type = other RNA
gtgacggtgcccaccggat

SEQ ID NO: 2099 - RNA, 19 nt, synthetic construct
  source 1..19: mol_type = other RNA
gcctggacccgcctatcac

SEQ ID NO: 2100 - RNA, 19 nt, synthetic construct
  source 1..19: mol_type = other RNA
ggccaccacacacgggcgg

SEQ ID NO: 2101 - RNA, 19 nt, synthetic construct
  source 1..19: mol_type = other RNA
accggaagaccagcgtgtt

SEQ ID NO: 2102 - RNA, 19 nt, synthetic construct
  source 1..19: mol_type = other RNA
acctcttacaccttccggg

SEQ ID NO: 2103 - RNA, 19 nt, synthetic construct
  source 1..19: mol_type = other RNA
ggggagtgcgtccagaccg

SEQ ID NO: 2104 - RNA, 19 nt, synthetic construct
  source 1..19: mol_type = other RNA
aaactaagcatgtgcgggc

SEQ ID NO: 2105 - RNA, 19 nt, synthetic construct
  source 1..19: mol_type = other RNA
gccatgctcgtggtgccgc

SEQ ID NO: 2106 - RNA, 19 nt, synthetic construct
  source 1..19: mol_type = other RNA
ggcggcgtgttcctcaact

SEQ ID NO: 2107 - RNA, 19 nt, synthetic construct
  source 1..19: mol_type = other RNA
cccctgctacgctcacggc

SEQ ID NO: 2108 - RNA, 19 nt, synthetic construct
  source 1..19: mol_type = other RNA
ctggagaggtggtgcacga

SEQ ID NO: 2109 - RNA, 19 nt, synthetic construct
  source 1..19: mol_type = other RNA
cagcgtgttcatccgactg

SEQ ID NO: 2110 - RNA, 19 nt, synthetic construct
  source 1..19: mol_type = other RNA
atcgccatctgcggaagca

SEQ ID NO: 2111 - RNA, 19 nt, synthetic construct
  source 1..19: mol_type = other RNA
ctccaccgtgtgtgtccgc

SEQ ID NO: 2112 - RNA, 19 nt, synthetic construct
  source 1..19: mol_type = other RNA
cagcttcccgacatgccgc

SEQ ID NO: 2113 - RNA, 19 nt, synthetic construct
  source 1..19: mol_type = other RNA
cggcccccataaccacggt

SEQ ID NO: 2114 - RNA, 19 nt, synthetic construct
  source 1..19: mol_type = other RNA
ccagggacaacacctatcc

SEQ ID NO: 2115 - RNA, 19 nt, synthetic construct
  source 1..19: mol_type = other RNA
cggcccccataaccacggt

SEQ ID NO: 2116 - RNA, 19 nt, synthetic construct
  source 1..19: mol_type = other RNA
ccagggacaacacctatcc

SEQ ID NO: 2117 - RNA, 19 nt, synthetic construct
  source 1..19: mol_type = other RNA
cggcccccataaccacggt

SEQ ID NO: 2118 - RNA, 19 nt, synthetic construct
  source 1..19: mol_type = other RNA
tgacgagggttcagtgtcg

SEQ ID NO: 2119 - RNA, 19 nt, synthetic construct
  source 1..19: mol_type = other RNA
gtgacggtgcccaccggat

SEQ ID NO: 2120 - RNA, 19 nt, synthetic construct
  source 1..19: mol_type = other RNA
acctggacccgcctatcac

SEQ ID NO: 2121 - RNA, 19 nt, synthetic construct
  source 1..19: mol_type = other RNA
gccaccacacacgggcgat

SEQ ID NO: 2122 - RNA, 19 nt, synthetic construct
  source 1..19: mol_type = other RNA
gtgacggtgcccaccggat

SEQ ID NO: 2123 - RNA, 19 nt, synthetic construct
  source 1..19: mol_type = other RNA
cccaccccgtgggtgaaac

SEQ ID NO: 2124 - RNA, 19 nt, synthetic construct
  source 1..19: mol_type = other RNA
gacaaggacggaaactact

SEQ ID NO: 2125 - RNA, 19 nt, synthetic construct
  source 1..19: mol_type = other RNA
tccaacatccgtgcggccg

SEQ ID NO: 2126 - RNA, 19 nt, synthetic construct
  source 1..19: mol_type = other RNA
tccaacatccgtgcggccg

SEQ ID NO: 2127 - RNA, 19 nt, synthetic construct
  source 1..19: mol_type = other RNA
tccaacatccgtgcggccg

SEQ ID NO: 2128 - RNA, 19 nt, synthetic construct
  source 1..19: mol_type = other RNA
tccaacatccgtgcggccg

SEQ ID NO: 2129 - RNA, 19 nt, synthetic construct
  source 1..19: mol_type = other RNA
acctggacccgcctatcac

SEQ ID NO: 2130 - RNA, 19 nt, synthetic construct
  source 1..19: mol_type = other RNA
cacggccactacgatcacg

SEQ ID NO: 2131 - RNA, 19 nt, synthetic construct
  source 1..19: mol_type = other RNA
cacggccactacgatcacg

SEQ ID NO: 2132 - RNA, 19 nt, synthetic construct
  source 1..19: mol_type = other RNA
cacggccactacgatcacg

SEQ ID NO: 2133 - RNA, 19 nt, synthetic construct
  source 1..19: mol_type = other RNA
cacggccactacgatcacg

SEQ ID NO: 2134 - RNA, 19 nt, synthetic construct
  source 1..19: mol_type = other RNA
ctttaaggcggtggcgaga

SEQ ID NO: 2135 - RNA, 19 nt, synthetic construct
  source 1..19: mol_type = other RNA
aagtgtacaagccatgcgg

SEQ ID NO: 2136 - RNA, 19 nt, synthetic construct
  source 1..19: mol_type = other RNA
cgccgtgcaaccgtcccgg

SEQ ID NO: 2137 - RNA, 19 nt, synthetic construct
  source 1..19: mol_type = other RNA
gccgtgcaaccgtcccggc

SEQ ID NO: 2138 - RNA, 19 nt, synthetic construct
  source 1..19: mol_type = other RNA
cactcacgagcgagctgtc

SEQ ID NO: 2139 - RNA, 19 nt, synthetic construct
  source 1..19: mol_type = other RNA
tacgaccgcaaccactgga

SEQ ID NO: 2140 - RNA, 19 nt, synthetic construct
  source 1..19: mol_type = other RNA
gccgactaccacaaccacg

SEQ ID NO: 2141 - RNA, 19 nt, synthetic construct
  source 1..19: mol_type = other RNA
gccgactaccacaaccacg

SEQ ID NO: 2142 - RNA, 19 nt, synthetic construct
  source 1..19: mol_type = other RNA
acaaccacgggcttcacag

SEQ ID NO: 2143 - RNA, 19 nt, synthetic construct
  source 1..19: mol_type = other RNA
gccgactaccacaaccacg

SEQ ID NO: 2144 - RNA, 19 nt, synthetic construct
  source 1..19: mol_type = other RNA
tttaaggcggtggcgagag

SEQ ID NO: 2145 - RNA, 19 nt, synthetic construct
  source 1..19: mol_type = other RNA
ggacaacacctatcccccc

SEQ ID NO: 2146 - RNA, 19 nt, synthetic construct
  source 1..19: mol_type = other RNA
ggacaacacctatcccccc

SEQ ID NO: 2147 - RNA, 19 nt, synthetic construct
  source 1..19: mol_type = other RNA
tcccggccttcaacgagtt

SEQ ID NO: 2148 - RNA, 19 nt, synthetic construct
  source 1..19: mol_type = other RNA
ccaagcggacggcggcgtg

SEQ ID NO: 2149 - RNA, 19 nt, synthetic construct
  source 1..19: mol_type = other RNA
gcggaagcaacggcaccat

SEQ ID NO: 2150 - RNA, 19 nt, synthetic construct
  source 1..19: mol_type = other RNA
tgtgacgtccacttcggcc

SEQ ID NO: 2151 - RNA, 19 nt, synthetic construct
  source 1..19: mol_type = other RNA
gcaagacccgcacctcgac

SEQ ID NO: 2152 - RNA, 19 nt, synthetic construct
  source 1..19: mol_type = other RNA
gcaagacccgcacctcgac

SEQ ID NO: 2153 - RNA, 19 nt, synthetic construct
  source 1..19: mol_type = other RNA
gcaagacccgcacctcgac

SEQ ID NO: 2154 - RNA, 19 nt, synthetic construct
  source 1..19: mol_type = other RNA
gcaagacccgcacctcgac

SEQ ID NO: 2155 - RNA, 19 nt, synthetic construct
  source 1..19: mol_type = other RNA
agctgtgttcgtacaatgg

SEQ ID NO: 2156 - RNA, 19 nt, synthetic construct
  source 1..19: mol_type = other RNA
ctgctccggggggctatgg

SEQ ID NO: 2157 - RNA, 19 nt, synthetic construct
  source 1..19: mol_type = other RNA
cttcgacgacaatgccatc

SEQ ID NO: 2158 - RNA, 19 nt, synthetic construct
  source 1..19: mol_type = other RNA
acaaggacggaaactacta

SEQ ID NO: 2159 - RNA, 19 nt, synthetic construct
  source 1..19: mol_type = other RNA
gctaccagcgttacaccca

SEQ ID NO: 2160 - RNA, 19 nt, synthetic construct
  source 1..19: mol_type = other RNA
gcaacaccctcctctagca

SEQ ID NO: 2161 - RNA, 19 nt, synthetic construct
  source 1..19: mol_type = other RNA
ccacatcggcccccataac

SEQ ID NO: 2162 - RNA, 19 nt, synthetic construct
  source 1..19: mol_type = other RNA
ggactacagctaccccatg

SEQ ID NO: 2163 - RNA, 19 nt, synthetic construct
  source 1..19: mol_type = other RNA
ctggcggggactttgacac

SEQ ID NO: 2164 - RNA, 19 nt, synthetic construct
  source 1..19: mol_type = other RNA
gcaacaccctcctctagca

SEQ ID NO: 2165 - RNA, 19 nt, synthetic construct
  source 1..19: mol_type = other RNA
ggactacagctaccccatg

SEQ ID NO: 2166 - RNA, 19 nt, synthetic construct
  source 1..19: mol_type = other RNA
ctggcggggactttgacac

SEQ ID NO: 2167 - RNA, 19 nt, synthetic construct
  source 1..19: mol_type = other RNA
gaccgcaaccactggatcc

SEQ ID NO: 2168 - RNA, 19 nt, synthetic construct
  source 1..19: mol_type = other RNA
cagctaccagcgttacagc

SEQ ID NO: 2169 - RNA, 19 nt, synthetic construct
  source 1..19: mol_type = other RNA
gcaacaccctcctctagca

SEQ ID NO: 2170 - RNA, 19 nt, synthetic construct
  source 1..19: mol_type = other RNA
acacacgggcggtccctgc

SEQ ID NO: 2171 - RNA, 19 nt, synthetic construct
  source 1..19: mol_type = other RNA
ccacatcggcccccataac

SEQ ID NO: 2172 - RNA, 19 nt, synthetic construct
  source 1..19: mol_type = other RNA
ggactacagctaccccatg

SEQ ID NO: 2173 - RNA, 19 nt, synthetic construct
  source 1..19: mol_type = other RNA
ctggcggggactttgacac

SEQ ID NO: 2174 - RNA, 19 nt, synthetic construct
  source 1..19: mol_type = other RNA
gcaacaccctcctctagca

SEQ ID NO: 2175 - RNA, 19 nt, synthetic construct
  source 1..19: mol_type = other RNA
ccacatcggcccccataac

SEQ ID NO: 2176 - RNA, 19 nt, synthetic construct
  source 1..19: mol_type = other RNA
ggactacagctaccccatg

SEQ ID NO: 2177 - RNA, 19 nt, synthetic construct
  source 1..19: mol_type = other RNA
ctggcggggactttgacac

SEQ ID NO: 2178 - RNA, 19 nt, synthetic construct
  source 1..19: mol_type = other RNA
gctaccagcgttacaccca

SEQ ID NO: 2179 - RNA, 19 nt, synthetic construct
  source 1..19: mol_type = other RNA
gcaacaccctcctctagca

SEQ ID NO: 2180 - RNA, 19 nt, synthetic construct
  source 1..19: mol_type = other RNA
cactatagccaccgtgatg

SEQ ID NO: 2181 - RNA, 19 nt, synthetic construct
  source 1..19: mol_type = other RNA
acaaccttgtgcccccggg

SEQ ID NO: 2182 - RNA, 19 nt, synthetic construct
  source 1..19: mol_type = other RNA
gggcccattcttcaacgcc

SEQ ID NO: 2183 - RNA, 19 nt, synthetic construct
  source 1..19: mol_type = other RNA
gtcctgcgtgtgtgacgag

SEQ ID NO: 2184 - RNA, 19 nt, synthetic construct
  source 1..19: mol_type = other RNA
acaatggcaccttctacgg

SEQ ID NO: 2185 - RNA, 19 nt, synthetic construct
  source 1..19: mol_type = other RNA
gacaaccgtgtcgtcctgc

SEQ ID NO: 2186 - RNA, 19 nt, synthetic construct
  source 1..19: mol_type = other RNA
agggttcagtgtcggtgca

SEQ ID NO: 2187 - RNA, 19 nt, synthetic construct
  source 1..19: mol_type = other RNA
cacacgggcgatccctgcc

SEQ ID NO: 2188 - RNA, 19 nt, synthetic construct
  source 1..19: mol_type = other RNA
cagtttttctcgcccgggg

SEQ ID NO: 2189 - RNA, 19 nt, synthetic construct
  source 1..19: mol_type = other RNA
tgcgtgtgtgacgagggtt

SEQ ID NO: 2190 - RNA, 19 nt, synthetic construct
  source 1..19: mol_type = other RNA
ggtaccacccagcactcga

SEQ ID NO: 2191 - RNA, 19 nt, synthetic construct
  source 1..19: mol_type = other RNA
ggtaccacccagcactcga

SEQ ID NO: 2192 - RNA, 19 nt, synthetic construct
  source 1..19: mol_type = other RNA
agtaccacccagcactcga

SEQ ID NO: 2193 - RNA, 19 nt, synthetic construct
  source 1..19: mol_type = other RNA
ggtaccacccagcactcga

SEQ ID NO: 2194 - RNA, 19 nt, synthetic construct
  source 1..19: mol_type = other RNA
caacactcacgagcgagct

SEQ ID NO: 2195 - RNA, 19 nt, synthetic construct
  source 1..19: mol_type = other RNA
gaccagcgtgttcatccga

SEQ ID NO: 2196 - RNA, 19 nt, synthetic construct
  source 1..19: mol_type = other RNA
agggacggcacgcacgctt

SEQ ID NO: 2197 - RNA, 19 nt, synthetic construct
  source 1..19: mol_type = other RNA
tccgggtccaagcggacgg

SEQ ID NO: 2198 - RNA, 19 nt, synthetic construct
  source 1..19: mol_type = other RNA
gccccaataaccacggtgg

SEQ ID NO: 2199 - RNA, 19 nt, synthetic construct
  source 1..19: mol_type = other RNA
cctgaacccggcgcacaat

SEQ ID NO: 2200 - RNA, 19 nt, synthetic construct
  source 1..19: mol_type = other RNA
ctgcagcgtttccttcgtg

SEQ ID NO: 2201 - RNA, 19 nt, synthetic construct
  source 1..19: mol_type = other RNA
ttcaacggcctcccggcct

SEQ ID NO: 2202 - RNA, 19 nt, synthetic construct
  source 1..19: mol_type = other RNA
tgcaaccggtggcctgtgc

SEQ ID NO: 2203 - RNA, 19 nt, synthetic construct
  source 1..19: mol_type = other RNA
ctaaatttcccggggagcg

SEQ ID NO: 2204 - RNA, 19 nt, synthetic construct
  source 1..19: mol_type = other RNA
aagaccaccctatgggtga

SEQ ID NO: 2205 - RNA, 19 nt, synthetic construct
  source 1..19: mol_type = other RNA
aactccagggacaacacct

SEQ ID NO: 2206 - RNA, 19 nt, synthetic construct
  source 1..19: mol_type = other RNA
ccaccacacacgggcggtc

SEQ ID NO: 2207 - RNA, 19 nt, synthetic construct
  source 1..19: mol_type = other RNA
aactccagggacaacacct

SEQ ID NO: 2208 - RNA, 19 nt, synthetic construct
  source 1..19: mol_type = other RNA
aggtgcgtgggtgacaacc

SEQ ID NO: 2209 - RNA, 19 nt, synthetic construct
  source 1..19: mol_type = other RNA
tgctgccccgagacggtgt

SEQ ID NO: 2210 - RNA, 19 nt, synthetic construct
  source 1..19: mol_type = other RNA
actgctgtctgagaacgtt

SEQ ID NO: 2211 - RNA, 19 nt, synthetic construct
  source 1..19: mol_type = other RNA
ccatttctacgcagtgtgc

SEQ ID NO: 2212 - RNA, 19 nt, synthetic construct
  source 1..19: mol_type = other RNA
gcgtgggtgacaaccgtgt

SEQ ID NO: 2213 - RNA, 19 nt, synthetic construct
  source 1..19: mol_type = other RNA
ggcgccgtgtgttcatgta

SEQ ID NO: 2214 - RNA, 19 nt, synthetic construct
  source 1..19: mol_type = other RNA
tggactgtgaccgcatgcg

SEQ ID NO: 2215 - RNA, 19 nt, synthetic construct
  source 1..19: mol_type = other RNA
ctaagcatgtgcgggccta

SEQ ID NO: 2216 - RNA, 19 nt, synthetic construct
  source 1..19: mol_type = other RNA
caccacacacgggcggtcc

SEQ ID NO: 2217 - RNA, 19 nt, synthetic construct
  source 1..19: mol_type = other RNA
tgacggtgcccaccggatc

SEQ ID NO: 2218 - RNA, 19 nt, synthetic construct
  source 1..19: mol_type = other RNA
tgacggtgcccaccggatc

SEQ ID NO: 2219 - RNA, 19 nt, synthetic construct
  source 1..19: mol_type = other RNA
tgacggtgcccaccggatc

SEQ ID NO: 2220 - RNA, 19 nt, synthetic construct
  source 1..19: mol_type = other RNA
tgacggtgcccaccggatc

SEQ ID NO: 2221 - RNA, 19 nt, synthetic construct
  source 1..19: mol_type = other RNA
gctctgtcacgactacgag

SEQ ID NO: 2222 - RNA, 19 nt, synthetic construct
  source 1..19: mol_type = other RNA
cacccccagtgccgaacac

SEQ ID NO: 2223 - RNA, 19 nt, synthetic construct
  source 1..19: mol_type = other RNA
cacccccagtgccgaacac

SEQ ID NO: 2224 - RNA, 19 nt, synthetic construct
  source 1..19: mol_type = other RNA
gagacgtttgaaaacctga

SEQ ID NO: 2225 - RNA, 19 nt, synthetic construct
  source 1..19: mol_type = other RNA
ggacccgatgggtttccta

SEQ ID NO: 2226 - RNA, 19 nt, synthetic construct
  source 1..19: mol_type = other RNA
ctgccacgacgcgggcctg

SEQ ID NO: 2227 - RNA, 19 nt, synthetic construct
  source 1..19: mol_type = other RNA
gcaacggcaccatcatcag

SEQ ID NO: 2228 - RNA, 19 nt, synthetic construct
  source 1..19: mol_type = other RNA
acgtgccacaaccccgcca

SEQ ID NO: 2229 - RNA, 19 nt, synthetic construct
  source 1..19: mol_type = other RNA
cacaaccccgccaccgacc

SEQ ID NO: 2230 - RNA, 19 nt, synthetic construct
  source 1..19: mol_type = other RNA
gccccggagcgtccaagta

SEQ ID NO: 2231 - RNA, 19 nt, synthetic construct
  source 1..19: mol_type = other RNA
ctggaggcgtccaacggct

SEQ ID NO: 2232 - RNA, 19 nt, synthetic construct
  source 1..19: mol_type = other RNA
gacgtttgaaaacctgagg

SEQ ID NO: 2233 - RNA, 19 nt, synthetic construct
  source 1..19: mol_type = other RNA
acgtttgaaaacctgaggc

SEQ ID NO: 2234 - RNA, 19 nt, synthetic construct
  source 1..19: mol_type = other RNA
ccacgctggccccaacaac

SEQ ID NO: 2235 - RNA, 19 nt, synthetic construct
  source 1..19: mol_type = other RNA
accttctacggggttggtg

SEQ ID NO: 2236 - RNA, 19 nt, synthetic construct
  source 1..19: mol_type = other RNA
ccttgcactgtcctaacgg

SEQ ID NO: 2237 - RNA, 19 nt, synthetic construct
  source 1..19: mol_type = other RNA
gcgacaggcaaggcggccg

SEQ ID NO: 2238 - RNA, 19 nt, synthetic construct
  source 1..19: mol_type = other RNA
acgacaaggacggaaacta

SEQ ID NO: 2239 - RNA, 19 nt, synthetic construct
  source 1..19: mol_type = other RNA
atacgctacatggggatct

SEQ ID NO: 2240 - RNA, 19 nt, synthetic construct
  source 1..19: mol_type = other RNA
ggatcccaaatacgccaac

SEQ ID NO: 2241 - RNA, 19 nt, synthetic construct
  source 1..19: mol_type = other RNA
acacggccatccgggtcca

SEQ ID NO: 2242 - RNA, 19 nt, synthetic construct
  source 1..19: mol_type = other RNA
cacccccagtgccgaacac

SEQ ID NO: 2243 - RNA, 19 nt, synthetic construct
  source 1..19: mol_type = other RNA
cacccccagtgccgaacac

SEQ ID NO: 2244 - RNA, 19 nt, synthetic construct
  source 1..19: mol_type = other RNA
caagtcccagcgctacgcc

SEQ ID NO: 2245 - RNA, 19 nt, synthetic construct
  source 1..19: mol_type = other RNA
caggagtgcccctgctacg

SEQ ID NO: 2246 - RNA, 19 nt, synthetic construct
  source 1..19: mol_type = other RNA
accccgtgggtgaaaccgg

SEQ ID NO: 2247 - RNA, 19 nt, synthetic construct
  source 1..19: mol_type = other RNA
agctcaggccccgtgacgg

SEQ ID NO: 2248 - RNA, 19 nt, synthetic construct
  source 1..19: mol_type = other RNA
acaatgagccccttgacta

SEQ ID NO: 2249 - RNA, 19 nt, synthetic construct
  source 1..19: mol_type = other RNA
cagggacggcacgcacgct

SEQ ID NO: 2250 - RNA, 19 nt, synthetic construct
  source 1..19: mol_type = other RNA
gacggtgcccaccggatcc

SEQ ID NO: 2251 - RNA, 19 nt, synthetic construct
  source 1..19: mol_type = other RNA
gacggtgcccaccggatcc

SEQ ID NO: 2252 - RNA, 19 nt, synthetic construct
  source 1..19: mol_type = other RNA
gacggtgcccaccggatcc

SEQ ID NO: 2253 - RNA, 19 nt, synthetic construct
  source 1..19: mol_type = other RNA
gacggtgcccaccggatcc

SEQ ID NO: 2254 - RNA, 19 nt, synthetic construct
  source 1..19: mol_type = other RNA
ggttctctgctgcgaatac

SEQ ID NO: 2255 - RNA, 19 nt, synthetic construct
  source 1..19: mol_type = other RNA
gtaccacccagcactcgac

SEQ ID NO: 2256 - RNA, 19 nt, synthetic construct
  source 1..19: mol_type = other RNA
gtaccacccagcactcgac

SEQ ID NO: 2257 - RNA, 19 nt, synthetic construct
  source 1..19: mol_type = other RNA
gtaccacccagcactcgac

SEQ ID NO: 2258 - RNA, 19 nt, synthetic construct
  source 1..19: mol_type = other RNA
gtaccacccagcactcgac

SEQ ID NO: 2259 - RNA, 19 nt, synthetic construct
  source 1..19: mol_type = other RNA
gcgcccgcgcagcacggat

SEQ ID NO: 2260 - RNA, 19 nt, synthetic construct
  source 1..19: mol_type = other RNA
acaagccatgcggccccat

SEQ ID NO: 2261 - RNA, 19 nt, synthetic construct
  source 1..19: mol_type = other RNA
tgggacgccctggaacaaa

SEQ ID NO: 2262 - RNA, 19 nt, synthetic construct
  source 1..19: mol_type = other RNA
ttctctgctgcgaatacgt

SEQ ID NO: 2263 - RNA, 19 nt, synthetic construct
  source 1..19: mol_type = other RNA
agagggtaccaggtatgcc

SEQ ID NO: 2264 - RNA, 19 nt, synthetic construct
  source 1..19: mol_type = other RNA
gcaccttctacggggttgg

SEQ ID NO: 2265 - RNA, 19 nt, synthetic construct
  source 1..19: mol_type = other RNA
cccaacagtgccttctcgc

SEQ ID NO: 2266 - RNA, 19 nt, synthetic construct
  source 1..19: mol_type = other RNA
cgtgacggtcaccccctcg

SEQ ID NO: 2267 - RNA, 19 nt, synthetic construct
  source 1..19: mol_type = other RNA
cccagggacggcactcacg

SEQ ID NO: 2268 - RNA, 19 nt, synthetic construct
  source 1..19: mol_type = other RNA
ctccactccagggacgacc

SEQ ID NO: 2269 - RNA, 19 nt, synthetic construct
  source 1..19: mol_type = other RNA
cccagggacggcactcacg

SEQ ID NO: 2270 - RNA, 19 nt, synthetic construct
  source 1..19: mol_type = other RNA
cccagggacggcactcacg

SEQ ID NO: 2271 - RNA, 19 nt, synthetic construct
  source 1..19: mol_type = other RNA
catgcacgctttgggaatc

SEQ ID NO: 2272 - RNA, 19 nt, synthetic construct
  source 1..19: mol_type = other RNA
gtgacaaccgtgtcgtcct

SEQ ID NO: 2273 - RNA, 19 nt, synthetic construct
  source 1..19: mol_type = other RNA
caccacacacgggcgatcc

SEQ ID NO: 2274 - RNA, 19 nt, synthetic construct
  source 1..19: mol_type = other RNA
caccacacacgggcgatcc

SEQ ID NO: 2275 - RNA, 19 nt, synthetic construct
  source 1..19: mol_type = other RNA
caccacacacgggcgatcc

SEQ ID NO: 2276 - RNA, 19 nt, synthetic construct
  source 1..19: mol_type = other RNA
cgaccgagccggctgccat

SEQ ID NO: 2277 - RNA, 19 nt, synthetic construct
  source 1..19: mol_type = other RNA
atgatgagaaactctacga

SEQ ID NO: 2278 - RNA, 19 nt, synthetic construct
  source 1..19: mol_type = other RNA
tacagctaccaggacgtca

SEQ ID NO: 2279 - RNA, 19 nt, synthetic construct
  source 1..19: mol_type = other RNA
tccaccgtgtgtgtccgcg

SEQ ID NO: 2280 - RNA, 19 nt, synthetic construct
  source 1..19: mol_type = other RNA
cgcagcttcccgacatgcc

SEQ ID NO: 2281 - RNA, 19 nt, synthetic construct
  source 1..19: mol_type = other RNA
ctctgctgcgaatacgtgc

SEQ ID NO: 2282 - RNA, 19 nt, synthetic construct
  source 1..19: mol_type = other RNA
acagtttttctcgcccggg

SEQ ID NO: 2283 - RNA, 19 nt, synthetic construct
  source 1..19: mol_type = other RNA
tacaataagaccgaccgag

SEQ ID NO: 2284 - RNA, 19 nt, synthetic construct
  source 1..19: mol_type = other RNA
accggtggcctgtgcgacc

SEQ ID NO: 2285 - RNA, 19 nt, synthetic construct
  source 1..19: mol_type = other RNA
ggtgtgcgtgtgcaacaca

SEQ ID NO: 2286 - RNA, 19 nt, synthetic construct
  source 1..19: mol_type = other RNA
aacacgaccatcctgtggc

SEQ ID NO: 2287 - RNA, 19 nt, synthetic construct
  source 1..19: mol_type = other RNA
taccacccagcactcgact

SEQ ID NO: 2288 - RNA, 19 nt, synthetic construct
  source 1..19: mol_type = other RNA
taccacccagcactcgact

SEQ ID NO: 2289 - RNA, 19 nt, synthetic construct
  source 1..19: mol_type = other RNA
taccacccagcactcgact

SEQ ID NO: 2290 - RNA, 19 nt, synthetic construct
  source 1..19: mol_type = other RNA
taccacccagcactcgact

SEQ ID NO: 2291 - RNA, 19 nt, synthetic construct
  source 1..19: mol_type = other RNA
ccctttcgggagggcgcca

SEQ ID NO: 2292 - RNA, 19 nt, synthetic construct
  source 1..19: mol_type = other RNA
aggactcctgtcaagtccg

SEQ ID NO: 2293 - RNA, 19 nt, synthetic construct
  source 1..19: mol_type = other RNA
cccgagcatccggtcgacg

SEQ ID NO: 2294 - RNA, 19 nt, synthetic construct
  source 1..19: mol_type = other RNA
ctgaaagcggtgacgctca

SEQ ID NO: 2295 - RNA, 19 nt, synthetic construct
  source 1..19: mol_type = other RNA
cctgcgactcgggtggcga

SEQ ID NO: 2296 - RNA, 19 nt, synthetic construct
  source 1..19: mol_type = other RNA
ccgcctggacccgcctatc

SEQ ID NO: 2297 - RNA, 19 nt, synthetic construct
  source 1..19: mol_type = other RNA
gtcatcgagacccacggga

SEQ ID NO: 2298 - RNA, 19 nt, synthetic construct
  source 1..19: mol_type = other RNA
gcccttgccggccggcaac

SEQ ID NO: 2299 - RNA, 19 nt, synthetic construct
  source 1..19: mol_type = other RNA
tttgatggcgatcgctaca

SEQ ID NO: 2300 - RNA, 19 nt, synthetic construct
  source 1..19: mol_type = other RNA
tcccagcgctacgcctacg

SEQ ID NO: 2301 - RNA, 19 nt, synthetic construct
  source 1..19: mol_type = other RNA
tcacctttgatggcgatcg

SEQ ID NO: 2302 - RNA, 19 nt, synthetic construct
  source 1..19: mol_type = other RNA
ccaccctacaagatacgct

SEQ ID NO: 2303 - RNA, 19 nt, synthetic construct
  source 1..19: mol_type = other RNA
ggatgacatcacgcactct

SEQ ID NO: 2304 - RNA, 19 nt, synthetic construct
  source 1..19: mol_type = other RNA
agaccagcgtgttcatccg

SEQ ID NO: 2305 - RNA, 19 nt, synthetic construct
  source 1..19: mol_type = other RNA
ctggctgacatcgagtgcc

SEQ ID NO: 2306 - RNA, 19 nt, synthetic construct
  source 1..19: mol_type = other RNA
tcaggccccgtgacggtca

SEQ ID NO: 2307 - RNA, 19 nt, synthetic construct
  source 1..19: mol_type = other RNA
aacgccgcagcctacgagt

SEQ ID NO: 2308 - RNA, 19 nt, synthetic construct
  source 1..19: mol_type = other RNA
ccacctggacccgcctatc

SEQ ID NO: 2309 - RNA, 19 nt, synthetic construct
  source 1..19: mol_type = other RNA
cacagtgcttaccgccacg

SEQ ID NO: 2310 - RNA, 19 nt, synthetic construct
  source 1..19: mol_type = other RNA
ccacctggacccgcctatc

SEQ ID NO: 2311 - RNA, 19 nt, synthetic construct
  source 1..19: mol_type = other RNA
ccacctggacccgcctatc

SEQ ID NO: 2312 - RNA, 19 nt, synthetic construct
  source 1..19: mol_type = other RNA
ccacctggacccgcctatc

SEQ ID NO: 2313 - RNA, 19 nt, synthetic construct
  source 1..19: mol_type = other RNA
cacagtgcttaccgccacg

SEQ ID NO: 2314 - RNA, 19 nt, synthetic construct
  source 1..19: mol_type = other RNA
tcttacaccttccggggca

SEQ ID NO: 2315 - RNA, 19 nt, synthetic construct
  source 1..19: mol_type = other RNA
agcccccgccgtgcaaccg

SEQ ID NO: 2316 - RNA, 19 nt, synthetic construct
  source 1..19: mol_type = other RNA
accgtcccggcttcgtaac

SEQ ID NO: 2317 - RNA, 19 nt, synthetic construct
  source 1..19: mol_type = other RNA
gtccgcatcaacacgacca

SEQ ID NO: 2318 - RNA, 19 nt, synthetic construct
  source 1..19: mol_type = other RNA
tgctgtctgagaacgttct

SEQ ID NO: 2319 - RNA, 19 nt, synthetic construct
  source 1..19: mol_type = other RNA
agcaggacccctttcggga

SEQ ID NO: 2320 - RNA, 19 nt, synthetic construct
  source 1..19: mol_type = other RNA
atccgggtccaagcggacg

SEQ ID NO: 2321 - RNA, 19 nt, synthetic construct
  source 1..19: mol_type = other RNA
cacctggacccgcctatca

SEQ ID NO: 2322 - RNA, 19 nt, synthetic construct
  source 1..19: mol_type = other RNA
gacacctactccaacatcc

SEQ ID NO: 2323 - RNA, 19 nt, synthetic construct
  source 1..19: mol_type = other RNA
cacctggacccgcctatca

SEQ ID NO: 2324 - RNA, 19 nt, synthetic construct
  source 1..19: mol_type = other RNA
gacacctactccaacatcc

SEQ ID NO: 2325 - RNA, 19 nt, synthetic construct
  source 1..19: mol_type = other RNA
cgcctggacccgcctatca

SEQ ID NO: 2326 - RNA, 19 nt, synthetic construct
  source 1..19: mol_type = other RNA
cagtaccacccagcactcg

SEQ ID NO: 2327 - RNA, 19 nt, synthetic construct
  source 1..19: mol_type = other RNA
gacacctactccaacatcc

SEQ ID NO: 2328 - RNA, 19 nt, synthetic construct
  source 1..19: mol_type = other RNA
cacctggacccgcctatca

SEQ ID NO: 2329 - RNA, 19 nt, synthetic construct
  source 1..19: mol_type = other RNA
gacacctactccaacatcc

SEQ ID NO: 2330 - RNA, 19 nt, synthetic construct
  source 1..19: mol_type = other RNA
cacctggacccgcctatca

SEQ ID NO: 2331 - RNA, 19 nt, synthetic construct
  source 1..19: mol_type = other RNA
tgcactgtcctaacggctc

SEQ ID NO: 2332 - RNA, 19 nt, synthetic construct
  source 1..19: mol_type = other RNA
cagggctgaggtcgcaacg

SEQ ID NO: 2333 - RNA, 19 nt, synthetic construct
  source 1..19: mol_type = other RNA
tgtcaagtccgcatcaaca

SEQ ID NO: 2334 - RNA, 19 nt, synthetic construct
  source 1..19: mol_type = other RNA
tggatggcggtgccccgac

SEQ ID NO: 2335 - RNA, 19 nt, synthetic construct
  source 1..19: mol_type = other RNA
tgatgagaaactctacgac

SEQ ID NO: 2336 - RNA, 19 nt, synthetic construct
  source 1..19: mol_type = other RNA
tctgctgcgaatacgtgcc

SEQ ID NO: 2337 - RNA, 19 nt, synthetic construct
  source 1..19: mol_type = other RNA
tgatcaccacggccactac

SEQ ID NO: 2338 - RNA, 19 nt, synthetic construct
  source 1..19: mol_type = other RNA
cgagcactatagccaccgt

SEQ ID NO: 2339 - RNA, 19 nt, synthetic construct
  source 1..19: mol_type = other RNA
tttctacgcagtgtgcaat

SEQ ID NO: 2340 - RNA, 19 nt, synthetic construct
  source 1..19: mol_type = other RNA
ccctgcgtgggacccgatg

SEQ ID NO: 2341 - RNA, 19 nt, synthetic construct
  source 1..19: mol_type = other RNA
tgcctgaaagcggtgacgc

SEQ ID NO: 2342 - RNA, 19 nt, synthetic construct
  source 1..19: mol_type = other RNA
cctacgataagatcagggc

SEQ ID NO: 2343 - RNA, 19 nt, synthetic construct
  source 1..19: mol_type = other RNA
acgataagatcagggccgc

SEQ ID NO: 2344 - RNA, 19 nt, synthetic construct
  source 1..19: mol_type = other RNA
ccccgccgtgcaaccgtcc

SEQ ID NO: 2345 - RNA, 19 nt, synthetic construct
  source 1..19: mol_type = other RNA
tcgcccacccggcgcgtga

SEQ ID NO: 2346 - RNA, 19 nt, synthetic construct
  source 1..19: mol_type = other RNA
cccacccggcgcgtgagct

SEQ ID NO: 2347 - RNA, 19 nt, synthetic construct
  source 1..19: mol_type = other RNA
acccggcgcgtgagctttg

SEQ ID NO: 2348 - RNA, 19 nt, synthetic construct
  source 1..19: mol_type = other RNA
tggatgacatcacgcactc

SEQ ID NO: 2349 - RNA, 19 nt, synthetic construct
  source 1..19: mol_type = other RNA
cgggtccaagcggacggcg

SEQ ID NO: 2350 - RNA, 19 nt, synthetic construct
  source 1..19: mol_type = other RNA
tgtgttcatgtacgggtgg

SEQ ID NO: 2351 - RNA, 19 nt, synthetic construct
  source 1..19: mol_type = other RNA
acgggtgggaagctaagct

SEQ ID NO: 2352 - RNA, 19 nt, synthetic construct
  source 1..19: mol_type = other RNA
accctacaagatacgctac

SEQ ID NO: 2353 - RNA, 19 nt, synthetic construct
  source 1..19: mol_type = other RNA
acgccgcagcctacgagta

SEQ ID NO: 2354 - RNA, 19 nt, synthetic construct
  source 1..19: mol_type = other RNA
catcggcccccataaccac

SEQ ID NO: 2355 - RNA, 19 nt, synthetic construct
  source 1..19: mol_type = other RNA
gggacaacacctatccccc

SEQ ID NO: 2356 - RNA, 19 nt, synthetic construct
  source 1..19: mol_type = other RNA
acagctaccagcgttacag

SEQ ID NO: 2357 - RNA, 19 nt, synthetic construct
  source 1..19: mol_type = other RNA
ccacggccactacgatcac

SEQ ID NO: 2358 - RNA, 19 nt, synthetic construct
  source 1..19: mol_type = other RNA
catcggcccccataaccac

SEQ ID NO: 2359 - RNA, 19 nt, synthetic construct
  source 1..19: mol_type = other RNA
gggacaacacctatccccc

SEQ ID NO: 2360 - RNA, 19 nt, synthetic construct
  source 1..19: mol_type = other RNA
catcggcccccataaccac

SEQ ID NO: 2361 - RNA, 19 nt, synthetic construct
  source 1..19: mol_type = other RNA
gctgccatttctacgcagt

SEQ ID NO: 2362 - RNA, 19 nt, synthetic construct
  source 1..19: mol_type = other RNA
cctcttacaccttccgggg

SEQ ID NO: 2363 - RNA, 19 nt, synthetic construct
  source 1..19: mol_type = other RNA
gagagagatccatgcacgc

SEQ ID NO: 2364 - RNA, 19 nt, synthetic construct
  source 1..19: mol_type = other RNA
agagatccatgcacgcttt

SEQ ID NO: 2365 - RNA, 19 nt, synthetic construct
  source 1..19: mol_type = other RNA
tggacaaccactactgcac

SEQ ID NO: 2366 - RNA, 19 nt, synthetic construct
  source 1..19: mol_type = other RNA
cactgcaggggccgccttg

SEQ ID NO: 2367 - RNA, 19 nt, synthetic construct
  source 1..19: mol_type = other RNA
gagggttcagtgtcggtgc

SEQ ID NO: 2368 - RNA, 19 nt, synthetic construct
  source 1..19: mol_type = other RNA
gctgtctgagaacgttctg

SEQ ID NO: 2369 - RNA, 19 nt, synthetic construct
  source 1..19: mol_type = other RNA
actaagcatgtgcgggcct

SEQ ID NO: 2370 - RNA, 19 nt, synthetic construct
  source 1..19: mol_type = other RNA
tcagggctgaggtcgcaac

SEQ ID NO: 2371 - RNA, 19 nt, synthetic construct
  source 1..19: mol_type = other RNA
ccgctctgtcacgactacg

SEQ ID NO: 2372 - RNA, 19 nt, synthetic construct
  source 1..19: mol_type = other RNA
cgtgggacccgatgggttt

SEQ ID NO: 2373 - RNA, 19 nt, synthetic construct
  source 1..19: mol_type = other RNA
cacacacgggcgatccctg

SEQ ID NO: 2374 - RNA, 19 nt, synthetic construct
  source 1..19: mol_type = other RNA
ctggtgctcgcgcctgacc

SEQ ID NO: 2375 - RNA, 19 nt, synthetic construct
  source 1..19: mol_type = other RNA
gtcccagcgctacgcctac

SEQ ID NO: 2376 - RNA, 19 nt, synthetic construct
  source 1..19: mol_type = other RNA
ctgctacgctcacggcacc

SEQ ID NO: 2377 - RNA, 19 nt, synthetic construct
  source 1..19: mol_type = other RNA
cgacgacaatgccatcaat

SEQ ID NO: 2378 - RNA, 19 nt, synthetic construct
  source 1..19: mol_type = other RNA
ggtgaccccgagcatccgg

SEQ ID NO: 2379 - RNA, 19 nt, synthetic construct
  source 1..19: mol_type = other RNA
gtgaccccgagcatccggt

SEQ ID NO: 2380 - RNA, 19 nt, synthetic construct
  source 1..19: mol_type = other RNA
tttttctcgcccggggaag

SEQ ID NO: 2381 - RNA, 19 nt, synthetic construct
  source 1..19: mol_type = other RNA
gtgggtgacaaccgtgtcg

SEQ ID NO: 2382 - RNA, 19 nt, synthetic construct
  source 1..19: mol_type = other RNA
gcgtgggacccgatgggtt

SEQ ID NO: 2383 - RNA, 19 nt, synthetic construct
  source 1..19: mol_type = other RNA
gctgaccccgctccagttt

SEQ ID NO: 2384 - RNA, 19 nt, synthetic construct
  source 1..19: mol_type = other RNA
cggcctttgcggagtgcca

SEQ ID NO: 2385 - RNA, 19 nt, synthetic construct
  source 1..19: mol_type = other RNA
ggtgctcgcgcctgaccga

SEQ ID NO: 2386 - RNA, 19 nt, synthetic construct
  source 1..19: mol_type = other RNA
gggacctttaaggcggtgg

SEQ ID NO: 2387 - RNA, 19 nt, synthetic construct
  source 1..19: mol_type = other RNA
tgtgacttctacaacccac

SEQ ID NO: 2388 - RNA, 19 nt, synthetic construct
  source 1..19: mol_type = other RNA
ggcgcctgcttgatcgcca

SEQ ID NO: 2389 - RNA, 19 nt, synthetic construct
  source 1..19: mol_type = other RNA
cgccatctgcggaagcaac

SEQ ID NO: 2390 - RNA, 19 nt, synthetic construct
  source 1..19: mol_type = other RNA
ccaacagagtcccccgctc

SEQ ID NO: 2391 - RNA, 19 nt, synthetic construct
  source 1..19: mol_type = other RNA
ccgcagcctacgagtagcc

SEQ ID NO: 2392 - RNA, 19 nt, synthetic construct
  source 1..19: mol_type = other RNA
gaccagtggtactccccca

SEQ ID NO: 2393 - RNA, 19 nt, synthetic construct
  source 1..19: mol_type = other RNA
ccaccacacacgggcgatc

SEQ ID NO: 2394 - RNA, 19 nt, synthetic construct
  source 1..19: mol_type = other RNA
ggggactttgacacctact

SEQ ID NO: 2395 - RNA, 19 nt, synthetic construct
  source 1..19: mol_type = other RNA
acggtgcccaccggatcca

SEQ ID NO: 2396 - RNA, 19 nt, synthetic construct
  source 1..19: mol_type = other RNA
gaccagtggtactccccca

SEQ ID NO: 2397 - RNA, 19 nt, synthetic construct
  source 1..19: mol_type = other RNA
ccaccacacacgggcgatc

SEQ ID NO: 2398 - RNA, 19 nt, synthetic construct
  source 1..19: mol_type = other RNA
ggggactttgacacctact

SEQ ID NO: 2399 - RNA, 19 nt, synthetic construct
  source 1..19: mol_type = other RNA
acggtgcccaccggatcca

SEQ ID NO: 2400 - RNA, 19 nt, synthetic construct
  source 1..19: mol_type = other RNA
gaccagtggtactccccca

SEQ ID NO: 2401 - RNA, 19 nt, synthetic construct
  source 1..19: mol_type = other RNA
ggggactttgacacctact

SEQ ID NO: 2402 - RNA, 19 nt, synthetic construct
  source 1..19: mol_type = other RNA
acggtgcccaccggatcca

SEQ ID NO: 2403 - RNA, 19 nt, synthetic construct
  source 1..19: mol_type = other RNA
gaccagtggtactccccca

SEQ ID NO: 2404 - RNA, 19 nt, synthetic construct
  source 1..19: mol_type = other RNA
ccaccacacacgggcgatc

SEQ ID NO: 2405 - RNA, 19 nt, synthetic construct
  source 1..19: mol_type = other RNA
ggggactttgacacctact

SEQ ID NO: 2406 - RNA, 19 nt, synthetic construct
  source 1..19: mol_type = other RNA
acggtgcccaccggatcca

SEQ ID NO: 2407 - RNA, 19 nt, synthetic construct
  source 1..19: mol_type = other RNA
gaccagtggtactccccca

SEQ ID NO: 2408 - RNA, 19 nt, synthetic construct
  source 1..19: mol_type = other RNA
gccgagcactatagccacc

SEQ ID NO: 2409 - RNA, 19 nt, synthetic construct
  source 1..19: mol_type = other RNA
ggacaaccactactgcacg

SEQ ID NO: 2410 - RNA, 19 nt, synthetic construct
  source 1..19: mol_type = other RNA
gacaaccactactgcacgg

SEQ ID NO: 2411 - RNA, 19 nt, synthetic construct
  source 1..19: mol_type = other RNA
aaagtgtacaagccatgcg

SEQ ID NO: 2412 - RNA, 19 nt, synthetic construct
  source 1..19: mol_type = other RNA
cccgccgtgcaaccgtccc

SEQ ID NO: 2413 - RNA, 19 nt, synthetic construct
  source 1..19: mol_type = other RNA
cctgccacatgtgtacctg

SEQ ID NO: 2414 - RNA, 19 nt, synthetic construct
  source 1..19: mol_type = other RNA
ggctgcgagaccgaggtca

SEQ ID NO: 2415 - RNA, 19 nt, synthetic construct
  source 1..19: mol_type = other RNA
gtgtgtggcaccccgcgct

SEQ ID NO: 2416 - RNA, 19 nt, synthetic construct
  source 1..19: mol_type = other RNA
cccgcgcagcacggattcc

SEQ ID NO: 2417 - RNA, 19 nt, synthetic construct
  source 1..19: mol_type = other RNA
cggtgccccgacgtcctcg

SEQ ID NO: 2418 - RNA, 19 nt, synthetic construct
  source 1..19: mol_type = other RNA
cgcccacccggcgcgtgag

SEQ ID NO: 2419 - RNA, 19 nt, synthetic construct
  source 1..19: mol_type = other RNA
cgccgaggcctagtgggct

SEQ ID NO: 2420 - RNA, 19 nt, synthetic construct
  source 1..19: mol_type = other RNA
ggtcagcatccggctggtg

SEQ ID NO: 2421 - RNA, 19 nt, synthetic construct
  source 1..19: mol_type = other RNA
cggccttcaacgagttcta

SEQ ID NO: 2422 - RNA, 19 nt, synthetic construct
  source 1..19: mol_type = other RNA
gtggacagcactgcgtacc

SEQ ID NO: 2423 - RNA, 19 nt, synthetic construct
  source 1..19: mol_type = other RNA
ggacagcactgcgtacctg

SEQ ID NO: 2424 - RNA, 19 nt, synthetic construct
  source 1..19: mol_type = other RNA
gacagcactgcgtacctgg

SEQ ID NO: 2425 - RNA, 19 nt, synthetic construct
  source 1..19: mol_type = other RNA
tgtggctcaccctgcacgg

SEQ ID NO: 2426 - RNA, 19 nt, synthetic construct
  source 1..19: mol_type = other RNA
gaactgcctgaaagcggtg

SEQ ID NO: 2427 - RNA, 19 nt, synthetic construct
  source 1..19: mol_type = other RNA
gccactcatgcaggtgttt

SEQ ID NO: 2428 - RNA, 19 nt, synthetic construct
  source 1..19: mol_type = other RNA
acttcacggccctcagcgg

SEQ ID NO: 2429 - RNA, 19 nt, synthetic construct
  source 1..19: mol_type = other RNA
ccggcactggtgctcgcgc

SEQ ID NO: 2430 - RNA, 19 nt, synthetic construct
  source 1..19: mol_type = other RNA
actggtgctcgcgcctgac

SEQ ID NO: 2431 - RNA, 19 nt, synthetic construct
  source 1..19: mol_type = other RNA
ctgaccgatcccaacagtg

SEQ ID NO: 2432 - RNA, 19 nt, synthetic construct
  source 1..19: mol_type = other RNA
ccaagtcccagcgctacgc

SEQ ID NO: 2433 - RNA, 19 nt, synthetic construct
  source 1..19: mol_type = other RNA
gccagcccacttgccgcgg

SEQ ID NO: 2434 - RNA, 19 nt, synthetic construct
  source 1..19: mol_type = other RNA
cccacttgccgcggcctga

SEQ ID NO: 2435 - RNA, 19 nt, synthetic construct
  source 1..19: mol_type = other RNA
acgacgagggcgccgtgtg

SEQ ID NO: 2436 - RNA, 19 nt, synthetic construct
  source 1..19: mol_type = other RNA
cgacgagggcgccgtgtgt

SEQ ID NO: 2437 - RNA, 19 nt, synthetic construct
  source 1..19: mol_type = other RNA
ccggggctggtgtcggatg

SEQ ID NO: 2438 - RNA, 19 nt, synthetic construct
  source 1..19: mol_type = other RNA
ggggacctttaaggcggtg

SEQ ID NO: 2439 - RNA, 19 nt, synthetic construct
  source 1..19: mol_type = other RNA
ctacaagatacgctacatg

SEQ ID NO: 2440 - RNA, 19 nt, synthetic construct
  source 1..19: mol_type = other RNA
ccagcgtgttcatccgact

SEQ ID NO: 2441 - RNA, 19 nt, synthetic construct
  source 1..19: mol_type = other RNA
tacgacaaggacggaaact

SEQ ID NO: 2442 - RNA, 19 nt, synthetic construct
  source 1..19: mol_type = other RNA
gaactccagccacaacgcc

SEQ ID NO: 2443 - RNA, 19 nt, synthetic construct
  source 1..19: mol_type = other RNA
ccagccacaacgccattca

SEQ ID NO: 2444 - RNA, 19 nt, synthetic construct
  source 1..19: mol_type = other RNA
ccgtgtgtgtccgcgaggt

SEQ ID NO: 2445 - RNA, 19 nt, synthetic construct
  source 1..19: mol_type = other RNA
cgtgtgtgtccgcgaggtc

SEQ ID NO: 2446 - RNA, 19 nt, synthetic construct
  source 1..19: mol_type = other RNA
tggctgacatcgagtgccg

SEQ ID NO: 2447 - RNA, 19 nt, synthetic construct
  source 1..19: mol_type = other RNA
ggctgacatcgagtgccgg

SEQ ID NO: 2448 - RNA, 19 nt, synthetic construct
  source 1..19: mol_type = other RNA
ctgacatcgagtgccgggc

SEQ ID NO: 2449 - RNA, 19 nt, synthetic construct
  source 1..19: mol_type = other RNA
ggactgtgaccgcatgcgg

SEQ ID NO: 2450 - RNA, 19 nt, synthetic construct
  source 1..19: mol_type = other RNA
gccaacagagtcccccgct

SEQ ID NO: 2451 - RNA, 19 nt, synthetic construct
  source 1..19: mol_type = other RNA
tgaccccgagcatccggtc

SEQ ID NO: 2452 - RNA, 19 nt, synthetic construct
  source 1..19: mol_type = other RNA
gctcaggccccgtgacggt

SEQ ID NO: 2453 - RNA, 19 nt, synthetic construct
  source 1..19: mol_type = other RNA
gccctgttctcaacgccgc

SEQ ID NO: 2454 - RNA, 19 nt, synthetic construct
  source 1..19: mol_type = other RNA
ccctgttctcaacgccgca

SEQ ID NO: 2455 - RNA, 19 nt, synthetic construct
  source 1..19: mol_type = other RNA
cctgttctcaacgccgcag

SEQ ID NO: 2456 - RNA, 19 nt, synthetic construct
  source 1..19: mol_type = other RNA
ctgttctcaacgccgcagc

SEQ ID NO: 2457 - RNA, 19 nt, synthetic construct
  source 1..19: mol_type = other RNA
gccgcagcctacgagtagc

SEQ ID NO: 2458 - RNA, 19 nt, synthetic construct
  source 1..19: mol_type = other RNA
ttggtacagccaccacggg

SEQ ID NO: 2459 - RNA, 19 nt, synthetic construct
  source 1..19: mol_type = other RNA
accacgagcctggcgccaa

SEQ ID NO: 2460 - RNA, 19 nt, synthetic construct
  source 1..19: mol_type = other RNA
gacaatgagccccttgact

SEQ ID NO: 2461 - RNA, 19 nt, synthetic construct
  source 1..19: mol_type = other RNA
caatgagccccttgactaa

SEQ ID NO: 2462 - RNA, 19 nt, synthetic construct
  source 1..19: mol_type = other RNA
gagccccttgactaacacc

SEQ ID NO: 2463 - RNA, 19 nt, synthetic construct
  source 1..19: mol_type = other RNA
agctaccagcgttacaccc

SEQ ID NO: 2464 - RNA, 19 nt, synthetic construct
  source 1..19: mol_type = other RNA
ctccacagtgcttaccgcc

SEQ ID NO: 2465 - RNA, 19 nt, synthetic construct
  source 1..19: mol_type = other RNA
accaaagtgccaactacca

SEQ ID NO: 2466 - RNA, 19 nt, synthetic construct
  source 1..19: mol_type = other RNA
ccaaagtgccaactaccac

SEQ ID NO: 2467 - RNA, 19 nt, synthetic construct
  source 1..19: mol_type = other RNA
gcccagggacggcactcac

SEQ ID NO: 2468 - RNA, 19 nt, synthetic construct
  source 1..19: mol_type = other RNA
aacaccctcctctagcaca

SEQ ID NO: 2469 - RNA, 19 nt, synthetic construct
  source 1..19: mol_type = other RNA
ccaccacggccactacgat

SEQ ID NO: 2470 - RNA, 19 nt, synthetic construct
  source 1..19: mol_type = other RNA
ccccacacggtgcgcacag

SEQ ID NO: 2471 - RNA, 19 nt, synthetic construct
  source 1..19: mol_type = other RNA
cccacacggtgcgcacagc

SEQ ID NO: 2472 - RNA, 19 nt, synthetic construct
  source 1..19: mol_type = other RNA
cagcaaccaccggtaccac

SEQ ID NO: 2473 - RNA, 19 nt, synthetic construct
  source 1..19: mol_type = other RNA
accacccagcactcgactc

SEQ ID NO: 2474 - RNA, 19 nt, synthetic construct
  source 1..19: mol_type = other RNA
cccataaccacggtggtga

SEQ ID NO: 2475 - RNA, 19 nt, synthetic construct
  source 1..19: mol_type = other RNA
cagctaccccatgccgggg

SEQ ID NO: 2476 - RNA, 19 nt, synthetic construct
  source 1..19: mol_type = other RNA
gcctcgagtgccgtgccca

SEQ ID NO: 2477 - RNA, 19 nt, synthetic construct
  source 1..19: mol_type = other RNA
aacaccctcctctagcaca

SEQ ID NO: 2478 - RNA, 19 nt, synthetic construct
  source 1..19: mol_type = other RNA
ccaccacggccactacgat

SEQ ID NO: 2479 - RNA, 19 nt, synthetic construct
  source 1..19: mol_type = other RNA
ctccagggacaacacctat

SEQ ID NO: 2480 - RNA, 19 nt, synthetic construct
  source 1..19: mol_type = other RNA
cccagtgccgaacaccacg

SEQ ID NO: 2481 - RNA, 19 nt, synthetic construct
  source 1..19: mol_type = other RNA
ccccacacggtgcgcacag

SEQ ID NO: 2482 - RNA, 19 nt, synthetic construct
  source 1..19: mol_type = other RNA
cccacacggtgcgcacagc

SEQ ID NO: 2483 - RNA, 19 nt, synthetic construct
  source 1..19: mol_type = other RNA
cagcaaccaccggtaccac

SEQ ID NO: 2484 - RNA, 19 nt, synthetic construct
  source 1..19: mol_type = other RNA
accacccagcactcgactc

SEQ ID NO: 2485 - RNA, 19 nt, synthetic construct
  source 1..19: mol_type = other RNA
cagctaccccatgccgggg

SEQ ID NO: 2486 - RNA, 19 nt, synthetic construct
  source 1..19: mol_type = other RNA
gcctcgagtgccgtgccca

SEQ ID NO: 2487 - RNA, 19 nt, synthetic construct
  source 1..19: mol_type = other RNA
cactggatccacggccatc

SEQ ID NO: 2488 - RNA, 19 nt, synthetic construct
  source 1..19: mol_type = other RNA
caccgcctggacccgccta

SEQ ID NO: 2489 - RNA, 19 nt, synthetic construct
  source 1..19: mol_type = other RNA
accaaagtgccgactacca

SEQ ID NO: 2490 - RNA, 19 nt, synthetic construct
  source 1..19: mol_type = other RNA
gcccagggacggcactcac

SEQ ID NO: 2491 - RNA, 19 nt, synthetic construct
  source 1..19: mol_type = other RNA
aacaccctcctctagcaca

SEQ ID NO: 2492 - RNA, 19 nt, synthetic construct
  source 1..19: mol_type = other RNA
ccaccacggccactacgat

SEQ ID NO: 2493 - RNA, 19 nt, synthetic construct
  source 1..19: mol_type = other RNA
cccagtgccgaacaccacg

SEQ ID NO: 2494 - RNA, 19 nt, synthetic construct
  source 1..19: mol_type = other RNA
ccccacacggtgcgcacag

SEQ ID NO: 2495 - RNA, 19 nt, synthetic construct
  source 1..19: mol_type = other RNA
cccacacggtgcgcacagc

SEQ ID NO: 2496 - RNA, 19 nt, synthetic construct
  source 1..19: mol_type = other RNA
accacccagcactcgactc

SEQ ID NO: 2497 - RNA, 19 nt, synthetic construct
  source 1..19: mol_type = other RNA
cccataaccacggtggtga

SEQ ID NO: 2498 - RNA, 19 nt, synthetic construct
  source 1..19: mol_type = other RNA
cagctaccccatgccgggg

SEQ ID NO: 2499 - RNA, 19 nt, synthetic construct
  source 1..19: mol_type = other RNA
gcctcgagtgccgtgccca

SEQ ID NO: 2500 - RNA, 19 nt, synthetic construct
  source 1..19: mol_type = other RNA
accaaagtgccgactacca

SEQ ID NO: 2501 - RNA, 19 nt, synthetic construct
  source 1..19: mol_type = other RNA
aacaccctcctctagcaca

SEQ ID NO: 2502 - RNA, 19 nt, synthetic construct
  source 1..19: mol_type = other RNA
tcaccacggccactacgat

SEQ ID NO: 2503 - RNA, 19 nt, synthetic construct
  source 1..19: mol_type = other RNA
ctccagggacaacacctat

SEQ ID NO: 2504 - RNA, 19 nt, synthetic construct
  source 1..19: mol_type = other RNA
cccagtgccgaacaccacg

SEQ ID NO: 2505 - RNA, 19 nt, synthetic construct
  source 1..19: mol_type = other RNA
ccccacacggtgcgcacag

SEQ ID NO: 2506 - RNA, 19 nt, synthetic construct
  source 1..19: mol_type = other RNA
cccacacggtgcgcacagc

SEQ ID NO: 2507 - RNA, 19 nt, synthetic construct
  source 1..19: mol_type = other RNA
cagcaaccaccggtaccac

SEQ ID NO: 2508 - RNA, 19 nt, synthetic construct
  source 1..19: mol_type = other RNA
accacccagcactcgactc

SEQ ID NO: 2509 - RNA, 19 nt, synthetic construct
  source 1..19: mol_type = other RNA
cccataaccacggtggtga

SEQ ID NO: 2510 - RNA, 19 nt, synthetic construct
  source 1..19: mol_type = other RNA
cagctaccccatgccgggg

SEQ ID NO: 2511 - RNA, 19 nt, synthetic construct
  source 1..19: mol_type = other RNA
gcctcgagtgccgtgccca

SEQ ID NO: 2512 - RNA, 19 nt, synthetic construct
  source 1..19: mol_type = other RNA
agctaccagcgttacaccc

SEQ ID NO: 2513 - RNA, 19 nt, synthetic construct
  source 1..19: mol_type = other RNA
ctccacagtgcttaccgcc

SEQ ID NO: 2514 - RNA, 19 nt, synthetic construct
  source 1..19: mol_type = other RNA
accaaagtgccgactacca

SEQ ID NO: 2515 - RNA, 19 nt, synthetic construct
  source 1..19: mol_type = other RNA
gcccagggacggcactcac

SEQ ID NO: 2516 - RNA, 19 nt, synthetic construct
  source 1..19: mol_type = other RNA
aacaccctcctctagcaca

SEQ ID NO: 2517 - RNA, 19 nt, synthetic construct
  source 1..19: mol_type = other RNA
ccaccacggccactacgat

SEQ ID NO: 2518 - RNA, 19 nt, synthetic construct
  source 1..19: mol_type = other RNA
ggaccacgtggaccgtccc

SEQ ID NO: 2519 - RNA, 19 nt, synthetic construct
  source 1..19: mol_type = other RNA
gtgcccaccggttccacgg

SEQ ID NO: 2520 - RNA, 19 nt, synthetic construct
  source 1..19: mol_type = other RNA
gccaaccttcagcgtgtcc

SEQ ID NO: 2521 - RNA, 19 nt, synthetic construct
  source 1..19: mol_type = other RNA
cgcttccagggcgcctgtc

SEQ ID NO: 2522 - RNA, 19 nt, synthetic construct
  source 1..19: mol_type = other RNA
tccatggatatcgtcctca

SEQ ID NO: 2523 - RNA, 19 nt, synthetic construct
  source 1..19: mol_type = other RNA
caccaccatgcgtgtggac

SEQ ID NO: 2524 - RNA, 19 nt, synthetic construct
  source 1..19: mol_type = other RNA
atggccaagacgtggctgg

SEQ ID NO: 2525 - RNA, 19 nt, synthetic construct
  source 1..19: mol_type = other RNA
ctgggccccgactggcaca

SEQ ID NO: 2526 - RNA, 19 nt, synthetic construct
  source 1..19: mol_type = other RNA
cctgcatcagcgaccactg

SEQ ID NO: 2527 - RNA, 19 nt, synthetic construct
  source 1..19: mol_type = other RNA
gtgtacaagccatgcggcc

SEQ ID NO: 2528 - RNA, 19 nt, synthetic construct
  source 1..19: mol_type = other RNA
tcctcttcaacgcacacat

SEQ ID NO: 2529 - RNA, 19 nt, synthetic construct
  source 1..19: mol_type = other RNA
gatgggtttcctaaatttc

SEQ ID NO: 2530 - RNA, 19 nt, synthetic construct
  source 1..19: mol_type = other RNA
tcagctgtgttcgtacaat

SEQ ID NO: 2531 - RNA, 19 nt, synthetic construct
  source 1..19: mol_type = other RNA
agtgcgtccagaccgcctg

SEQ ID NO: 2532 - RNA, 19 nt, synthetic construct
  source 1..19: mol_type = other RNA
gtgcgtccagaccgcctgc

SEQ ID NO: 2533 - RNA, 19 nt, synthetic construct
  source 1..19: mol_type = other RNA
cctgcctcacgcccgatgg

SEQ ID NO: 2534 - RNA, 19 nt, synthetic construct
  source 1..19: mol_type = other RNA
ctgccccggagcgtccaag

SEQ ID NO: 2535 - RNA, 19 nt, synthetic construct
  source 1..19: mol_type = other RNA
ttgcactgtcctaacggct

SEQ ID NO: 2536 - RNA, 19 nt, synthetic construct
  source 1..19: mol_type = other RNA
cactgtcctaacggctcag

SEQ ID NO: 2537 - RNA, 19 nt, synthetic construct
  source 1..19: mol_type = other RNA
gacggtgtgcgtgtgcaac

SEQ ID NO: 2538 - RNA, 19 nt, synthetic construct
  source 1..19: mol_type = other RNA
gcggggactacatcaaggt

SEQ ID NO: 2539 - RNA, 19 nt, synthetic construct
  source 1..19: mol_type = other RNA
ctttgcggagtgccacgca

SEQ ID NO: 2540 - RNA, 19 nt, synthetic construct
  source 1..19: mol_type = other RNA
gaaagcggtgacgctcagc

SEQ ID NO: 2541 - RNA, 19 nt, synthetic construct
  source 1..19: mol_type = other RNA
cccagcgctacgcctacgt

SEQ ID NO: 2542 - RNA, 19 nt, synthetic construct
  source 1..19: mol_type = other RNA
catgtacgggtgggaagct

SEQ ID NO: 2543 - RNA, 19 nt, synthetic construct
  source 1..19: mol_type = other RNA
gggacccaccctacaagat

SEQ ID NO: 2544 - RNA, 19 nt, synthetic construct
  source 1..19: mol_type = other RNA
cagggacggcactcacgcc

SEQ ID NO: 2545 - RNA, 19 nt, synthetic construct
  source 1..19: mol_type = other RNA
gacggcacgcacgcttcca

SEQ ID NO: 2546 - RNA, 19 nt, synthetic construct
  source 1..19: mol_type = other RNA
cagggacggcactcacgcc

SEQ ID NO: 2547 - RNA, 19 nt, synthetic construct
  source 1..19: mol_type = other RNA
cagggacggcactcacgcc

SEQ ID NO: 2548 - RNA, 19 nt, synthetic construct
  source 1..19: mol_type = other RNA
acgacccggatcctcactg

SEQ ID NO: 2549 - RNA, 19 nt, synthetic construct
  source 1..19: mol_type = other RNA
caacgcctgcatcagcgac

SEQ ID NO: 2550 - RNA, 19 nt, synthetic construct
  source 1..19: mol_type = other RNA
ggacaactgcaccgtgtac

SEQ ID NO: 2551 - RNA, 19 nt, synthetic construct
  source 1..19: mol_type = other RNA
ccccggagcgtccaagtac

SEQ ID NO: 2552 - RNA, 19 nt, synthetic construct
  source 1..19: mol_type = other RNA
ccggcgcgtgagctttgtt

SEQ ID NO: 2553 - RNA, 19 nt, synthetic construct
  source 1..19: mol_type = other RNA
gagcactatagccaccgtg

SEQ ID NO: 2554 - RNA, 19 nt, synthetic construct
  source 1..19: mol_type = other RNA
gacatcgagtgccgggcgg

SEQ ID NO: 2555 - RNA, 19 nt, synthetic construct
  source 1..19: mol_type = other RNA
gacccgcctatcacagacc

SEQ ID NO: 2556 - RNA, 19 nt, synthetic construct
  source 1..19: mol_type = other RNA
agcaaccaccggtaccacc

SEQ ID NO: 2557 - RNA, 19 nt, synthetic construct
  source 1..19: mol_type = other RNA
gacccgcctatcacagacc

SEQ ID NO: 2558 - RNA, 19 nt, synthetic construct
  source 1..19: mol_type = other RNA
cacgcacgcttccagtgtg

SEQ ID NO: 2559 - RNA, 19 nt, synthetic construct
  source 1..19: mol_type = other RNA
agcaaccaccggtaccacc

SEQ ID NO: 2560 - RNA, 19 nt, synthetic construct
  source 1..19: mol_type = other RNA
gacccgcctatcacagacc

SEQ ID NO: 2561 - RNA, 19 nt, synthetic construct
  source 1..19: mol_type = other RNA
gacccgcctatcacagacc

SEQ ID NO: 2562 - RNA, 19 nt, synthetic construct
  source 1..19: mol_type = other RNA
agcaaccaccggtaccacc

SEQ ID NO: 2563 - RNA, 19 nt, synthetic construct
  source 1..19: mol_type = other RNA
gacccgcctatcacagacc

SEQ ID NO: 2564 - RNA, 19 nt, synthetic construct
  source 1..19: mol_type = other RNA
ctacacccacgtggatgag

SEQ ID NO: 2565 - RNA, 19 nt, synthetic construct
  source 1..19: mol_type = other RNA
ctgccttacagccgcactg

SEQ ID NO: 2566 - RNA, 19 nt, synthetic construct
  source 1..19: mol_type = other RNA
gcctttgcggagtgccacg

SEQ ID NO: 2567 - RNA, 19 nt, synthetic construct
  source 1..19: mol_type = other RNA
gcgggcaccttcctcaatg

SEQ ID NO: 2568 - RNA, 19 nt, synthetic construct
  source 1..19: mol_type = other RNA
ccaccggtaccacccagca

SEQ ID NO: 2569 - RNA, 19 nt, synthetic construct
  source 1..19: mol_type = other RNA
ctccaacatccgtgcggcc

SEQ ID NO: 2570 - RNA, 19 nt, synthetic construct
  source 1..19: mol_type = other RNA
ccgagcactacagccaccg

SEQ ID NO: 2571 - RNA, 19 nt, synthetic construct
  source 1..19: mol_type = other RNA
ccaccggtaccacccagca

SEQ ID NO: 2572 - RNA, 19 nt, synthetic construct
  source 1..19: mol_type = other RNA
ctccaacatccgtgcggcc

SEQ ID NO: 2573 - RNA, 19 nt, synthetic construct
  source 1..19: mol_type = other RNA
ctccaacatccgtgcggcc

SEQ ID NO: 2574 - RNA, 19 nt, synthetic construct
  source 1..19: mol_type = other RNA
ccgagcactacagccaccg

SEQ ID NO: 2575 - RNA, 19 nt, synthetic construct
  source 1..19: mol_type = other RNA
ccaccggtaccacccagca

SEQ ID NO: 2576 - RNA, 19 nt, synthetic construct
  source 1..19: mol_type = other RNA
ctccaacatccgtgcggcc

SEQ ID NO: 2577 - RNA, 19 nt, synthetic construct
  source 1..19: mol_type = other RNA
ccgagcactacagccaccg

SEQ ID NO: 2578 - RNA, 19 nt, synthetic construct
  source 1..19: mol_type = other RNA
cccacaccgccagagtgct

SEQ ID NO: 2579 - RNA, 19 nt, synthetic construct
  source 1..19: mol_type = other RNA
cgtggaccgtcccagcaca

SEQ ID NO: 2580 - RNA, 19 nt, synthetic construct
  source 1..19: mol_type = other RNA
gaccgaccgagccggctgc

SEQ ID NO: 2581 - RNA, 19 nt, synthetic construct
  source 1..19: mol_type = other RNA
gtgtgacgagggttcagtg

SEQ ID NO: 2582 - RNA, 19 nt, synthetic construct
  source 1..19: mol_type = other RNA
ctgcaccgtgtacctctgt

SEQ ID NO: 2583 - RNA, 19 nt, synthetic construct
  source 1..19: mol_type = other RNA
taagcatgtgcgggcctat

SEQ ID NO: 2584 - RNA, 19 nt, synthetic construct
  source 1..19: mol_type = other RNA
ggcgcgtgagctttgttcc

SEQ ID NO: 2585 - RNA, 19 nt, synthetic construct
  source 1..19: mol_type = other RNA
gtgccacgcactggtggac

SEQ ID NO: 2586 - RNA, 19 nt, synthetic construct
  source 1..19: mol_type = other RNA
agcggtgacgctcagcctg

SEQ ID NO: 2587 - RNA, 19 nt, synthetic construct
  source 1..19: mol_type = other RNA
ccacgggcgcagccttcgc

SEQ ID NO: 2588 - RNA, 19 nt, synthetic construct
  source 1..19: mol_type = other RNA
gggcgccgtgtgttcatgt

SEQ ID NO: 2589 - RNA, 19 nt, synthetic construct
  source 1..19: mol_type = other RNA
tccatttgctgaccccaca

SEQ ID NO: 2590 - RNA, 19 nt, synthetic construct
  source 1..19: mol_type = other RNA
gcggagactttgagacgtt

SEQ ID NO: 2591 - RNA, 19 nt, synthetic construct
  source 1..19: mol_type = other RNA
agctaccccatgccggggc

SEQ ID NO: 2592 - RNA, 19 nt, synthetic construct
  source 1..19: mol_type = other RNA
agctaccccatgccggggc

SEQ ID NO: 2593 - RNA, 19 nt, synthetic construct
  source 1..19: mol_type = other RNA
agctaccccatgccggggc

SEQ ID NO: 2594 - RNA, 19 nt, synthetic construct
  source 1..19: mol_type = other RNA
agctaccccatgccggggc

SEQ ID NO: 2595 - RNA, 19 nt, synthetic construct
  source 1..19: mol_type = other RNA
gggacccgatgggtttcct

SEQ ID NO: 2596 - RNA, 19 nt, synthetic construct
  source 1..19: mol_type = other RNA
ctgtcctaacggctcagcc

SEQ ID NO: 2597 - RNA, 19 nt, synthetic construct
  source 1..19: mol_type = other RNA
cgagcgcgtgccggacgct

SEQ ID NO: 2598 - RNA, 19 nt, synthetic construct
  source 1..19: mol_type = other RNA
agtgccacgcactggtgga

SEQ ID NO: 2599 - RNA, 19 nt, synthetic construct
  source 1..19: mol_type = other RNA
cactgcgtacctggccgcc

SEQ ID NO: 2600 - RNA, 19 nt, synthetic construct
  source 1..19: mol_type = other RNA
cggcggcgtgttcctcaac

SEQ ID NO: 2601 - RNA, 19 nt, synthetic construct
  source 1..19: mol_type = other RNA
tggtgctcgcgcctgaccg

SEQ ID NO: 2602 - RNA, 19 nt, synthetic construct
  source 1..19: mol_type = other RNA
ccaacagtgccttctcgcg

SEQ ID NO: 2603 - RNA, 19 nt, synthetic construct
  source 1..19: mol_type = other RNA
gtgcacgacgagggcgccg

SEQ ID NO: 2604 - RNA, 19 nt, synthetic construct
  source 1..19: mol_type = other RNA
ttgatggcgatcgctacag

SEQ ID NO: 2605 - RNA, 19 nt, synthetic construct
  source 1..19: mol_type = other RNA
tgatgtgcgccaacagcca

SEQ ID NO: 2606 - RNA, 19 nt, synthetic construct
  source 1..19: mol_type = other RNA
gagtcccccgctctgtcac

SEQ ID NO: 2607 - RNA, 19 nt, synthetic construct
  source 1..19: mol_type = other RNA
gctgcgggttctctgctgc

SEQ ID NO: 2608 - RNA, 19 nt, synthetic construct
  source 1..19: mol_type = other RNA
agaccaccctatgggtgac

SEQ ID NO: 2609 - RNA, 19 nt, synthetic construct
  source 1..19: mol_type = other RNA
gcatccggtcgacggcggc

SEQ ID NO: 2610 - RNA, 19 nt, synthetic construct
  source 1..19: mol_type = other RNA
gcgttacacccatcccctc

SEQ ID NO: 2611 - RNA, 19 nt, synthetic construct
  source 1..19: mol_type = other RNA
cagtgcttaccgccacggc

SEQ ID NO: 2612 - RNA, 19 nt, synthetic construct
  source 1..19: mol_type = other RNA
ccacaaccggggccaccgg

SEQ ID NO: 2613 - RNA, 19 nt, synthetic construct
  source 1..19: mol_type = other RNA
ccgactaccacaaccacgg

SEQ ID NO: 2614 - RNA, 19 nt, synthetic construct
  source 1..19: mol_type = other RNA
ccgactaccacaaccacgg

SEQ ID NO: 2615 - RNA, 19 nt, synthetic construct
  source 1..19: mol_type = other RNA
cagtgcttaccgccacggc

SEQ ID NO: 2616 - RNA, 19 nt, synthetic construct
  source 1..19: mol_type = other RNA
ccacaaccggggccaccgg

SEQ ID NO: 2617 - RNA, 19 nt, synthetic construct
  source 1..19: mol_type = other RNA
ccgactaccacaaccacgg

SEQ ID NO: 2618 - RNA, 19 nt, synthetic construct
  source 1..19: mol_type = other RNA
ccaccggttccacggccac

SEQ ID NO: 2619 - RNA, 19 nt, synthetic construct
  source 1..19: mol_type = other RNA
catttctacgcagtgtgca

SEQ ID NO: 2620 - RNA, 19 nt, synthetic construct
  source 1..19: mol_type = other RNA
cagcctctacctggacaac

SEQ ID NO: 2621 - RNA, 19 nt, synthetic construct
  source 1..19: mol_type = other RNA
aggcttacgcagagctctg

SEQ ID NO: 2622 - RNA, 19 nt, synthetic construct
  source 1..19: mol_type = other RNA
ggcttacgcagagctctgc

SEQ ID NO: 2623 - RNA, 19 nt, synthetic construct
  source 1..19: mol_type = other RNA
gtgggacccgatgggtttc

SEQ ID NO: 2624 - RNA, 19 nt, synthetic construct
  source 1..19: mol_type = other RNA
ggcttcgtaaccgtgacca

SEQ ID NO: 2625 - RNA, 19 nt, synthetic construct
  source 1..19: mol_type = other RNA
tcaagtccgcatcaacacg

SEQ ID NO: 2626 - RNA, 19 nt, synthetic construct
  source 1..19: mol_type = other RNA
tcaacacgaccatcctgtg

SEQ ID NO: 2627 - RNA, 19 nt, synthetic construct
  source 1..19: mol_type = other RNA
gcactgtcctaacggctca

SEQ ID NO: 2628 - RNA, 19 nt, synthetic construct
  source 1..19: mol_type = other RNA
gggtgccccgagcgcgtgc

SEQ ID NO: 2629 - RNA, 19 nt, synthetic construct
  source 1..19: mol_type = other RNA
gccgaggcctagtgggctc

SEQ ID NO: 2630 - RNA, 19 nt, synthetic construct
  source 1..19: mol_type = other RNA
gaggcgtccaacggctccg

SEQ ID NO: 2631 - RNA, 19 nt, synthetic construct
  source 1..19: mol_type = other RNA
gcgtccaacggctccgtcc

SEQ ID NO: 2632 - RNA, 19 nt, synthetic construct
  source 1..19: mol_type = other RNA
ccttacagccgcactggcc

SEQ ID NO: 2633 - RNA, 19 nt, synthetic construct
  source 1..19: mol_type = other RNA
gtggggacttcaacggcct

SEQ ID NO: 2634 - RNA, 19 nt, synthetic construct
  source 1..19: mol_type = other RNA
gcaactgcacggacgagga

SEQ ID NO: 2635 - RNA, 19 nt, synthetic construct
  source 1..19: mol_type = other RNA
aactgcacggacgaggagg

SEQ ID NO: 2636 - RNA, 19 nt, synthetic construct
  source 1..19: mol_type = other RNA
cgtgtgccacctttgtgga

SEQ ID NO: 2637 - RNA, 19 nt, synthetic construct
  source 1..19: mol_type = other RNA
tgacatcacgcactctggc

SEQ ID NO: 2638 - RNA, 19 nt, synthetic construct
  source 1..19: mol_type = other RNA
acctacagcccgggcacct

SEQ ID NO: 2639 - RNA, 19 nt, synthetic construct
  source 1..19: mol_type = other RNA
ctccacctatgatgagaaa

SEQ ID NO: 2640 - RNA, 19 nt, synthetic construct
  source 1..19: mol_type = other RNA
agcttcaccgtgctggctg

SEQ ID NO: 2641 - RNA, 19 nt, synthetic construct
  source 1..19: mol_type = other RNA
acggccatccgggtccaag

SEQ ID NO: 2642 - RNA, 19 nt, synthetic construct
  source 1..19: mol_type = other RNA
gggtccaagcggacggcgg

SEQ ID NO: 2643 - RNA, 19 nt, synthetic construct
  source 1..19: mol_type = other RNA
ggtgccactcatgcaggtg

SEQ ID NO: 2644 - RNA, 19 nt, synthetic construct
  source 1..19: mol_type = other RNA
gttcatgtacgggtgggaa

SEQ ID NO: 2645 - RNA, 19 nt, synthetic construct
  source 1..19: mol_type = other RNA
tgatggcgatcgctacagc

SEQ ID NO: 2646 - RNA, 19 nt, synthetic construct
  source 1..19: mol_type = other RNA
cgagtacatcttggcccag

SEQ ID NO: 2647 - RNA, 19 nt, synthetic construct
  source 1..19: mol_type = other RNA
ggaagaccagcgtgttcat

SEQ ID NO: 2648 - RNA, 19 nt, synthetic construct
  source 1..19: mol_type = other RNA
caaggacggaaactactat

SEQ ID NO: 2649 - RNA, 19 nt, synthetic construct
  source 1..19: mol_type = other RNA
ctatgacgtcggtgcaagg

SEQ ID NO: 2650 - RNA, 19 nt, synthetic construct
  source 1..19: mol_type = other RNA
gcgcctgcttgatcgccat

SEQ ID NO: 2651 - RNA, 19 nt, synthetic construct
  source 1..19: mol_type = other RNA
tgacatcgagtgccgggcg

SEQ ID NO: 2652 - RNA, 19 nt, synthetic construct
  source 1..19: mol_type = other RNA
ctgatgtgcgccaacagcc

SEQ ID NO: 2653 - RNA, 19 nt, synthetic construct
  source 1..19: mol_type = other RNA
catccggtcgacggcggcc

SEQ ID NO: 2654 - RNA, 19 nt, synthetic construct
  source 1..19: mol_type = other RNA
atccggtcgacggcggccc

SEQ ID NO: 2655 - RNA, 19 nt, synthetic construct
  source 1..19: mol_type = other RNA
cgataagatcagggccgct

SEQ ID NO: 2656 - RNA, 19 nt, synthetic construct
  source 1..19: mol_type = other RNA
tgttctcaacgccgcagcc

SEQ ID NO: 2657 - RNA, 19 nt, synthetic construct
  source 1..19: mol_type = other RNA
gcacatggcgcccctcaca

SEQ ID NO: 2658 - RNA, 19 nt, synthetic construct
  source 1..19: mol_type = other RNA
agctcgcccgacaggcaca

SEQ ID NO: 2659 - RNA, 19 nt, synthetic construct
  source 1..19: mol_type = other RNA
accgcttccaaagagccgc

SEQ ID NO: 2660 - RNA, 19 nt, synthetic construct
  source 1..19: mol_type = other RNA
ggactgcaaccgcccttcc

SEQ ID NO: 2661 - RNA, 19 nt, synthetic construct
  source 1..19: mol_type = other RNA
gcctatcacagaccaccac

SEQ ID NO: 2662 - RNA, 19 nt, synthetic construct
  source 1..19: mol_type = other RNA
ctaccaaagtgccaactac

SEQ ID NO: 2663 - RNA, 19 nt, synthetic construct
  source 1..19: mol_type = other RNA
cctagcagcaaccaccggt

SEQ ID NO: 2664 - RNA, 19 nt, synthetic construct
  source 1..19: mol_type = other RNA
ctagcagcaaccaccggta

SEQ ID NO: 2665 - RNA, 19 nt, synthetic construct
  source 1..19: mol_type = other RNA
agcaagacccgcacctcga

SEQ ID NO: 2666 - RNA, 19 nt, synthetic construct
  source 1..19: mol_type = other RNA
ggcctcgagtgccgtgccc

SEQ ID NO: 2667 - RNA, 19 nt, synthetic construct
  source 1..19: mol_type = other RNA
ggactgcaaccgcccttcc

SEQ ID NO: 2668 - RNA, 19 nt, synthetic construct
  source 1..19: mol_type = other RNA
gcctatcacagaccaccac

SEQ ID NO: 2669 - RNA, 19 nt, synthetic construct
  source 1..19: mol_type = other RNA
aggttccacggtgaccccc

SEQ ID NO: 2670 - RNA, 19 nt, synthetic construct
  source 1..19: mol_type = other RNA
agcaagacccgcacctcga

SEQ ID NO: 2671 - RNA, 19 nt, synthetic construct
  source 1..19: mol_type = other RNA
ggcctcgagtgccgtgccc

SEQ ID NO: 2672 - RNA, 19 nt, synthetic construct
  source 1..19: mol_type = other RNA
acagctaccagctttacac

SEQ ID NO: 2673 - RNA, 19 nt, synthetic construct
  source 1..19: mol_type = other RNA
ggactgcaaccgcccttcc

SEQ ID NO: 2674 - RNA, 19 nt, synthetic construct
  source 1..19: mol_type = other RNA
gcctatcacagaccaccac

SEQ ID NO: 2675 - RNA, 19 nt, synthetic construct
  source 1..19: mol_type = other RNA
acactaccaaagtgccgac

SEQ ID NO: 2676 - RNA, 19 nt, synthetic construct
  source 1..19: mol_type = other RNA
agcaagacccgcacctcga

SEQ ID NO: 2677 - RNA, 19 nt, synthetic construct
  source 1..19: mol_type = other RNA
cacggtggtgaccacgggc

SEQ ID NO: 2678 - RNA, 19 nt, synthetic construct
  source 1..19: mol_type = other RNA
ggcctcgagtgccgtgccc

SEQ ID NO: 2679 - RNA, 19 nt, synthetic construct
  source 1..19: mol_type = other RNA
ggactgcaaccgcccttcc

SEQ ID NO: 2680 - RNA, 19 nt, synthetic construct
  source 1..19: mol_type = other RNA
gcctatcacagaccaccac

SEQ ID NO: 2681 - RNA, 19 nt, synthetic construct
  source 1..19: mol_type = other RNA
acactaccaaagtgccgac

SEQ ID NO: 2682 - RNA, 19 nt, synthetic construct
  source 1..19: mol_type = other RNA
acggcacgcacgcctccag

SEQ ID NO: 2683 - RNA, 19 nt, synthetic construct
  source 1..19: mol_type = other RNA
agcaagacccgcacctcga

SEQ ID NO: 2684 - RNA, 19 nt, synthetic construct
  source 1..19: mol_type = other RNA
cacggtggtgaccacgggc

SEQ ID NO: 2685 - RNA, 19 nt, synthetic construct
  source 1..19: mol_type = other RNA
ggcctcgagtgccgtgccc

SEQ ID NO: 2686 - RNA, 19 nt, synthetic construct
  source 1..19: mol_type = other RNA
ccagttccacgtccacccc

SEQ ID NO: 2687 - RNA, 19 nt, synthetic construct
  source 1..19: mol_type = other RNA
gcctatcacagaccaccac

SEQ ID NO: 2688 - RNA, 19 nt, synthetic construct
  source 1..19: mol_type = other RNA
acactaccaaagtgccgac

SEQ ID NO: 2689 - RNA, 19 nt, synthetic construct
  source 1..19: mol_type = other RNA
acagctaccagctttacac

SEQ ID NO: 2690 - RNA, 19 nt, synthetic construct
  source 1..19: mol_type = other RNA
agtttttctcgcccgggga

SEQ ID NO: 2691 - RNA, 19 nt, synthetic construct
  source 1..19: mol_type = other RNA
ttttctcgcccggggaagt

SEQ ID NO: 2692 - RNA, 19 nt, synthetic construct
  source 1..19: mol_type = other RNA
gaccgagccggctgccatt

SEQ ID NO: 2693 - RNA, 19 nt, synthetic construct
  source 1..19: mol_type = other RNA
accgagccggctgccattt

SEQ ID NO: 2694 - RNA, 19 nt, synthetic construct
  source 1..19: mol_type = other RNA
cactgtgacattgaccgct

SEQ ID NO: 2695 - RNA, 19 nt, synthetic construct
  source 1..19: mol_type = other RNA
agtgtcctccgccccgctg

SEQ ID NO: 2696 - RNA, 19 nt, synthetic construct
  source 1..19: mol_type = other RNA
tccatgcacgctttgggaa

SEQ ID NO: 2697 - RNA, 19 nt, synthetic construct
  source 1..19: mol_type = other RNA
atggatatcgtcctcactg

SEQ ID NO: 2698 - RNA, 19 nt, synthetic construct
  source 1..19: mol_type = other RNA
gcgtgagcgtcaccttcaa

SEQ ID NO: 2699 - RNA, 19 nt, synthetic construct
  source 1..19: mol_type = other RNA
gtgagcgtcaccttcaatg

SEQ ID NO: 2700 - RNA, 19 nt, synthetic construct
  source 1..19: mol_type = other RNA
ctgccgccagttgcaagga

SEQ ID NO: 2701 - RNA, 19 nt, synthetic construct
  source 1..19: mol_type = other RNA
tgccgccagttgcaaggac

SEQ ID NO: 2702 - RNA, 19 nt, synthetic construct
  source 1..19: mol_type = other RNA
ccggtgtctagcacaccca

SEQ ID NO: 2703 - RNA, 19 nt, synthetic construct
  source 1..19: mol_type = other RNA
agtgccacaaccttgtgcc

SEQ ID NO: 2704 - RNA, 19 nt, synthetic construct
  source 1..19: mol_type = other RNA
ctgcatcagcgaccactgc

SEQ ID NO: 2705 - RNA, 19 nt, synthetic construct
  source 1..19: mol_type = other RNA
ggaggcttacgcagagctc

SEQ ID NO: 2706 - RNA, 19 nt, synthetic construct
  source 1..19: mol_type = other RNA
ctgcccctgcgtgggaccc

SEQ ID NO: 2707 - RNA, 19 nt, synthetic construct
  source 1..19: mol_type = other RNA
gcgtgtgtgacgagggttc

SEQ ID NO: 2708 - RNA, 19 nt, synthetic construct
  source 1..19: mol_type = other RNA
cttcgtaaccgtgaccagg

SEQ ID NO: 2709 - RNA, 19 nt, synthetic construct
  source 1..19: mol_type = other RNA
tcgtaaccgtgaccaggcc

SEQ ID NO: 2710 - RNA, 19 nt, synthetic construct
  source 1..19: mol_type = other RNA
catcaacacgaccatcctg

SEQ ID NO: 2711 - RNA, 19 nt, synthetic construct
  source 1..19: mol_type = other RNA
actgtcctaacggctcagc

SEQ ID NO: 2712 - RNA, 19 nt, synthetic construct
  source 1..19: mol_type = other RNA
aaccttgggcctcctctgc

SEQ ID NO: 2713 - RNA, 19 nt, synthetic construct
  source 1..19: mol_type = other RNA
gacccctttcgggagggcg

SEQ ID NO: 2714 - RNA, 19 nt, synthetic construct
  source 1..19: mol_type = other RNA
gtgcgggcctatgtgtccc

SEQ ID NO: 2715 - RNA, 19 nt, synthetic construct
  source 1..19: mol_type = other RNA
ggatgggtgccccgagcgc

SEQ ID NO: 2716 - RNA, 19 nt, synthetic construct
  source 1..19: mol_type = other RNA
gatgggtgccccgagcgcg

SEQ ID NO: 2717 - RNA, 19 nt, synthetic construct
  source 1..19: mol_type = other RNA
gccccgagcgcgtgccgga

SEQ ID NO: 2718 - RNA, 19 nt, synthetic construct
  source 1..19: mol_type = other RNA
tggtgttggctctggcggc

SEQ ID NO: 2719 - RNA, 19 nt, synthetic construct
  source 1..19: mol_type = other RNA
ggtgttggctctggcggcc

SEQ ID NO: 2720 - RNA, 19 nt, synthetic construct
  source 1..19: mol_type = other RNA
ctggcggccatgctcgtgg

SEQ ID NO: 2721 - RNA, 19 nt, synthetic construct
  source 1..19: mol_type = other RNA
tggcggccatgctcgtggt

SEQ ID NO: 2722 - RNA, 19 nt, synthetic construct
  source 1..19: mol_type = other RNA
gctcgtggtgccgcaggca

SEQ ID NO: 2723 - RNA, 19 nt, synthetic construct
  source 1..19: mol_type = other RNA
ctcgtggtgccgcaggcag

SEQ ID NO: 2724 - RNA, 19 nt, synthetic construct
  source 1..19: mol_type = other RNA
gcacaccatggatggcggt

SEQ ID NO: 2725 - RNA, 19 nt, synthetic construct
  source 1..19: mol_type = other RNA
ccatggatggcggtgcccc

SEQ ID NO: 2726 - RNA, 19 nt, synthetic construct
  source 1..19: mol_type = other RNA
ctcgcccacccggcgcgtg

SEQ ID NO: 2727 - RNA, 19 nt, synthetic construct
  source 1..19: mol_type = other RNA
tccctggcctttgcaacta

SEQ ID NO: 2728 - RNA, 19 nt, synthetic construct
  source 1..19: mol_type = other RNA
ccctggcctttgcaactac

SEQ ID NO: 2729 - RNA, 19 nt, synthetic construct
  source 1..19: mol_type = other RNA
acgccgaggcctagtgggc

SEQ ID NO: 2730 - RNA, 19 nt, synthetic construct
  source 1..19: mol_type = other RNA
tggaggcgtccaacggctc

SEQ ID NO: 2731 - RNA, 19 nt, synthetic construct
  source 1..19: mol_type = other RNA
ggaggcgtccaacggctcc

SEQ ID NO: 2732 - RNA, 19 nt, synthetic construct
  source 1..19: mol_type = other RNA
tccaacggctccgtcctca

SEQ ID NO: 2733 - RNA, 19 nt, synthetic construct
  source 1..19: mol_type = other RNA
gccttacagccgcactggc

SEQ ID NO: 2734 - RNA, 19 nt, synthetic construct
  source 1..19: mol_type = other RNA
atccggctggtgctgacat

SEQ ID NO: 2735 - RNA, 19 nt, synthetic construct
  source 1..19: mol_type = other RNA
gctggatcccaaatacgcc

SEQ ID NO: 2736 - RNA, 19 nt, synthetic construct
  source 1..19: mol_type = other RNA
tggatcccaaatacgccaa

SEQ ID NO: 2737 - RNA, 19 nt, synthetic construct
  source 1..19: mol_type = other RNA
gcctcccggccttcaacga

SEQ ID NO: 2738 - RNA, 19 nt, synthetic construct
  source 1..19: mol_type = other RNA
cctcccggccttcaacgag

SEQ ID NO: 2739 - RNA, 19 nt, synthetic construct
  source 1..19: mol_type = other RNA
ttctatgcccacaacgcca

SEQ ID NO: 2740 - RNA, 19 nt, synthetic construct
  source 1..19: mol_type = other RNA
ggctgaccccgctccagtt

SEQ ID NO: 2741 - RNA, 19 nt, synthetic construct
  source 1..19: mol_type = other RNA
tgcccttgccggccggcaa

SEQ ID NO: 2742 - RNA, 19 nt, synthetic construct
  source 1..19: mol_type = other RNA
ccttgccggccggcaactg

SEQ ID NO: 2743 - RNA, 19 nt, synthetic construct
  source 1..19: mol_type = other RNA
ttgccggccggcaactgca

SEQ ID NO: 2744 - RNA, 19 nt, synthetic construct
  source 1..19: mol_type = other RNA
gagtgccacgcactggtgg

SEQ ID NO: 2745 - RNA, 19 nt, synthetic construct
  source 1..19: mol_type = other RNA
tgccacgcactggtggaca

SEQ ID NO: 2746 - RNA, 19 nt, synthetic construct
  source 1..19: mol_type = other RNA
tggacagcactgcgtacct

SEQ ID NO: 2747 - RNA, 19 nt, synthetic construct
  source 1..19: mol_type = other RNA
acagcactgcgtacctggc

SEQ ID NO: 2748 - RNA, 19 nt, synthetic construct
  source 1..19: mol_type = other RNA
agcactgcgtacctggccg

SEQ ID NO: 2749 - RNA, 19 nt, synthetic construct
  source 1..19: mol_type = other RNA
cctgcccgtgtgccacctt

SEQ ID NO: 2750 - RNA, 19 nt, synthetic construct
  source 1..19: mol_type = other RNA
gtgtgccacctttgtggaa

SEQ ID NO: 2751 - RNA, 19 nt, synthetic construct
  source 1..19: mol_type = other RNA
tgtgccacctttgtggaat

SEQ ID NO: 2752 - RNA, 19 nt, synthetic construct
  source 1..19: mol_type = other RNA
ggggccagccgcggaactg

SEQ ID NO: 2753 - RNA, 19 nt, synthetic construct
  source 1..19: mol_type = other RNA
ggccagccgcggaactgga

SEQ ID NO: 2754 - RNA, 19 nt, synthetic construct
  source 1..19: mol_type = other RNA
cggacctgccccctcaaca

SEQ ID NO: 2755 - RNA, 19 nt, synthetic construct
  source 1..19: mol_type = other RNA
ggacctgccccctcaacat

SEQ ID NO: 2756 - RNA, 19 nt, synthetic construct
  source 1..19: mol_type = other RNA
ctgccccctcaacatgcag

SEQ ID NO: 2757 - RNA, 19 nt, synthetic construct
  source 1..19: mol_type = other RNA
ctcaccctgcacggacacc

SEQ ID NO: 2758 - RNA, 19 nt, synthetic construct
  source 1..19: mol_type = other RNA
cctgctccggggggctatg

SEQ ID NO: 2759 - RNA, 19 nt, synthetic construct
  source 1..19: mol_type = other RNA
ggggctatggcagtgccag

SEQ ID NO: 2760 - RNA, 19 nt, synthetic construct
  source 1..19: mol_type = other RNA
ggcccacatctccacctat

SEQ ID NO: 2761 - RNA, 19 nt, synthetic construct
  source 1..19: mol_type = other RNA
ccacatctccacctatgat

SEQ ID NO: 2762 - RNA, 19 nt, synthetic construct
  source 1..19: mol_type = other RNA
acatctccacctatgatga

SEQ ID NO: 2763 - RNA, 19 nt, synthetic construct
  source 1..19: mol_type = other RNA
gatgagaaactctacgacc

SEQ ID NO: 2764 - RNA, 19 nt, synthetic construct
  source 1..19: mol_type = other RNA
catggtgactgcagctacg

SEQ ID NO: 2765 - RNA, 19 nt, synthetic construct
  source 1..19: mol_type = other RNA
ctgcggaagtgcggcctga

SEQ ID NO: 2766 - RNA, 19 nt, synthetic construct
  source 1..19: mol_type = other RNA
tgcggcctgacggacaacg

SEQ ID NO: 2767 - RNA, 19 nt, synthetic construct
  source 1..19: mol_type = other RNA
gcggcctgacggacaacga

SEQ ID NO: 2768 - RNA, 19 nt, synthetic construct
  source 1..19: mol_type = other RNA
gcctgacggacaacgagaa

SEQ ID NO: 2769 - RNA, 19 nt, synthetic construct
  source 1..19: mol_type = other RNA
gagaactgcctgaaagcgg

SEQ ID NO: 2770 - RNA, 19 nt, synthetic construct
  source 1..19: mol_type = other RNA
aactgcctgaaagcggtga

SEQ ID NO: 2771 - RNA, 19 nt, synthetic construct
  source 1..19: mol_type = other RNA
tgaaagcggtgacgctcag

SEQ ID NO: 2772 - RNA, 19 nt, synthetic construct
  source 1..19: mol_type = other RNA
ggccatccgggtccaagcg

SEQ ID NO: 2773 - RNA, 19 nt, synthetic construct
  source 1..19: mol_type = other RNA
ccgggtccaagcggacggc

SEQ ID NO: 2774 - RNA, 19 nt, synthetic construct
  source 1..19: mol_type = other RNA
agcttcttcatcgtggtgc

SEQ ID NO: 2775 - RNA, 19 nt, synthetic construct
  source 1..19: mol_type = other RNA
gtgccactcatgcaggtgt

SEQ ID NO: 2776 - RNA, 19 nt, synthetic construct
  source 1..19: mol_type = other RNA
cgacttcacggccctcagc

SEQ ID NO: 2777 - RNA, 19 nt, synthetic construct
  source 1..19: mol_type = other RNA
cttcacggccctcagcggg

SEQ ID NO: 2778 - RNA, 19 nt, synthetic construct
  source 1..19: mol_type = other RNA
ggccacgggcgcagccttc

SEQ ID NO: 2779 - RNA, 19 nt, synthetic construct
  source 1..19: mol_type = other RNA
tcccaacagtgccttctcg

SEQ ID NO: 2780 - RNA, 19 nt, synthetic construct
  source 1..19: mol_type = other RNA
aacagtgccttctcgcgct

SEQ ID NO: 2781 - RNA, 19 nt, synthetic construct
  source 1..19: mol_type = other RNA
acttgccgcggcctgagtg

SEQ ID NO: 2782 - RNA, 19 nt, synthetic construct
  source 1..19: mol_type = other RNA
gagtgcccctgctacgctc

SEQ ID NO: 2783 - RNA, 19 nt, synthetic construct
  source 1..19: mol_type = other RNA
tgcccctgctacgctcacg

SEQ ID NO: 2784 - RNA, 19 nt, synthetic construct
  source 1..19: mol_type = other RNA
acgctcacggcaccgtgct

SEQ ID NO: 2785 - RNA, 19 nt, synthetic construct
  source 1..19: mol_type = other RNA
ctcacggcaccgtgctggc

SEQ ID NO: 2786 - RNA, 19 nt, synthetic construct
  source 1..19: mol_type = other RNA
ggagaggtggtgcacgacg

SEQ ID NO: 2787 - RNA, 19 nt, synthetic construct
  source 1..19: mol_type = other RNA
gagaggtggtgcacgacga

SEQ ID NO: 2788 - RNA, 19 nt, synthetic construct
  source 1..19: mol_type = other RNA
gacgagggcgccgtgtgtt

SEQ ID NO: 2789 - RNA, 19 nt, synthetic construct
  source 1..19: mol_type = other RNA
acgagggcgccgtgtgttc

SEQ ID NO: 2790 - RNA, 19 nt, synthetic construct
  source 1..19: mol_type = other RNA
cgagggcgccgtgtgttca

SEQ ID NO: 2791 - RNA, 19 nt, synthetic construct
  source 1..19: mol_type = other RNA
ttcatgtacgggtgggaag

SEQ ID NO: 2792 - RNA, 19 nt, synthetic construct
  source 1..19: mol_type = other RNA
gcagcccccatggtgtacc

SEQ ID NO: 2793 - RNA, 19 nt, synthetic construct
  source 1..19: mol_type = other RNA
cagcccccatggtgtacct

SEQ ID NO: 2794 - RNA, 19 nt, synthetic construct
  source 1..19: mol_type = other RNA
agcccccatggtgtacctg

SEQ ID NO: 2795 - RNA, 19 nt, synthetic construct
  source 1..19: mol_type = other RNA
gctgcattgccgaggagga

SEQ ID NO: 2796 - RNA, 19 nt, synthetic construct
  source 1..19: mol_type = other RNA
ctttgatggcgatcgctac

SEQ ID NO: 2797 - RNA, 19 nt, synthetic construct
  source 1..19: mol_type = other RNA
gatggcgatcgctacagct

SEQ ID NO: 2798 - RNA, 19 nt, synthetic construct
  source 1..19: mol_type = other RNA
atggcgatcgctacagctt

SEQ ID NO: 2799 - RNA, 19 nt, synthetic construct
  source 1..19: mol_type = other RNA
gcagctgcgagtacatctt

SEQ ID NO: 2800 - RNA, 19 nt, synthetic construct
  source 1..19: mol_type = other RNA
caagaggggacctttaagg

SEQ ID NO: 2801 - RNA, 19 nt, synthetic construct
  source 1..19: mol_type = other RNA
ggacctttaaggcggtggc

SEQ ID NO: 2802 - RNA, 19 nt, synthetic construct
  source 1..19: mol_type = other RNA
ccgggtggggacccaccct

SEQ ID NO: 2803 - RNA, 19 nt, synthetic construct
  source 1..19: mol_type = other RNA
ttcctggtcatcgagaccc

SEQ ID NO: 2804 - RNA, 19 nt, synthetic construct
  source 1..19: mol_type = other RNA
cgagacccacgggatggcc

SEQ ID NO: 2805 - RNA, 19 nt, synthetic construct
  source 1..19: mol_type = other RNA
agcgtgttcatccgactgc

SEQ ID NO: 2806 - RNA, 19 nt, synthetic construct
  source 1..19: mol_type = other RNA
tgcccggacgccctggcac

SEQ ID NO: 2807 - RNA, 19 nt, synthetic construct
  source 1..19: mol_type = other RNA
gtgcctgcgactcgggtgg

SEQ ID NO: 2808 - RNA, 19 nt, synthetic construct
  source 1..19: mol_type = other RNA
tgcgactcgggtggcgact

SEQ ID NO: 2809 - RNA, 19 nt, synthetic construct
  source 1..19: mol_type = other RNA
ccggacacctgccccttgt

SEQ ID NO: 2810 - RNA, 19 nt, synthetic construct
  source 1..19: mol_type = other RNA
tctacaacccacatggggg

SEQ ID NO: 2811 - RNA, 19 nt, synthetic construct
  source 1..19: mol_type = other RNA
ctacaacccacatgggggc

SEQ ID NO: 2812 - RNA, 19 nt, synthetic construct
  source 1..19: mol_type = other RNA
cgacaaggacggaaactac

SEQ ID NO: 2813 - RNA, 19 nt, synthetic construct
  source 1..19: mol_type = other RNA
tcggtgcaagggtccccac

SEQ ID NO: 2814 - RNA, 19 nt, synthetic construct
  source 1..19: mol_type = other RNA
agagctgtaactgcacacc

SEQ ID NO: 2815 - RNA, 19 nt, synthetic construct
  source 1..19: mol_type = other RNA
aggacaggacctacagcta

SEQ ID NO: 2816 - RNA, 19 nt, synthetic construct
  source 1..19: mol_type = other RNA
ccgatgggcttggcgcctg

SEQ ID NO: 2817 - RNA, 19 nt, synthetic construct
  source 1..19: mol_type = other RNA
tctgcggaagcaacggcac

SEQ ID NO: 2818 - RNA, 19 nt, synthetic construct
  source 1..19: mol_type = other RNA
cggaagcaacggcaccatc

SEQ ID NO: 2819 - RNA, 19 nt, synthetic construct
  source 1..19: mol_type = other RNA
ggaagcaacggcaccatca

SEQ ID NO: 2820 - RNA, 19 nt, synthetic construct
  source 1..19: mol_type = other RNA
agccacaacgccattcacc

SEQ ID NO: 2821 - RNA, 19 nt, synthetic construct
  source 1..19: mol_type = other RNA
gggaggcggagactttgag

SEQ ID NO: 2822 - RNA, 19 nt, synthetic construct
  source 1..19: mol_type = other RNA
ggaggcggagactttgaga

SEQ ID NO: 2823 - RNA, 19 nt, synthetic construct
  source 1..19: mol_type = other RNA
actgtgaccgcatgcgggg

SEQ ID NO: 2824 - RNA, 19 nt, synthetic construct
  source 1..19: mol_type = other RNA
gaccgcatgcgggggctga

SEQ ID NO: 2825 - RNA, 19 nt, synthetic construct
  source 1..19: mol_type = other RNA
atgcgggggctgatgtgcg

SEQ ID NO: 2826 - RNA, 19 nt, synthetic construct
  source 1..19: mol_type = other RNA
tgcgggggctgatgtgcgc

SEQ ID NO: 2827 - RNA, 19 nt, synthetic construct
  source 1..19: mol_type = other RNA
cgggggctgatgtgcgcca

SEQ ID NO: 2828 - RNA, 19 nt, synthetic construct
  source 1..19: mol_type = other RNA
cagagtcccccgctctgtc

SEQ ID NO: 2829 - RNA, 19 nt, synthetic construct
  source 1..19: mol_type = other RNA
gtcccccgctctgtcacga

SEQ ID NO: 2830 - RNA, 19 nt, synthetic construct
  source 1..19: mol_type = other RNA
tctctgctgcgaatacgtg

SEQ ID NO: 2831 - RNA, 19 nt, synthetic construct
  source 1..19: mol_type = other RNA
gagcctgctgtgcctaccc

SEQ ID NO: 2832 - RNA, 19 nt, synthetic construct
  source 1..19: mol_type = other RNA
cctcgcagactgggtccag

SEQ ID NO: 2833 - RNA, 19 nt, synthetic construct
  source 1..19: mol_type = other RNA
cccctcggccccaggtacc

SEQ ID NO: 2834 - RNA, 19 nt, synthetic construct
  source 1..19: mol_type = other RNA
ctggagggcacttatgcca

SEQ ID NO: 2835 - RNA, 19 nt, synthetic construct
  source 1..19: mol_type = other RNA
ggagggcacttatgccagc

SEQ ID NO: 2836 - RNA, 19 nt, synthetic construct
  source 1..19: mol_type = other RNA
tgcactgtgacgtccactt

SEQ ID NO: 2837 - RNA, 19 nt, synthetic construct
  source 1..19: mol_type = other RNA
gcactgtgacgtccacttc

SEQ ID NO: 2838 - RNA, 19 nt, synthetic construct
  source 1..19: mol_type = other RNA
ggccctgttctcaacgccg

SEQ ID NO: 2839 - RNA, 19 nt, synthetic construct
  source 1..19: mol_type = other RNA
ccctctcagaaggactgac

SEQ ID NO: 2840 - RNA, 19 nt, synthetic construct
  source 1..19: mol_type = other RNA
ctgacatcccccagataca

SEQ ID NO: 2841 - RNA, 19 nt, synthetic construct
  source 1..19: mol_type = other RNA
gccaccacgggaggcccca

SEQ ID NO: 2842 - RNA, 19 nt, synthetic construct
  source 1..19: mol_type = other RNA
acgggaggccccacgacgc

SEQ ID NO: 2843 - RNA, 19 nt, synthetic construct
  source 1..19: mol_type = other RNA
cccttccagggacgacggg

SEQ ID NO: 2844 - RNA, 19 nt, synthetic construct
  source 1..19: mol_type = other RNA
ggcacatggcgcccctcac

SEQ ID NO: 2845 - RNA, 19 nt, synthetic construct
  source 1..19: mol_type = other RNA
cacatggcgcccctcacag

SEQ ID NO: 2846 - RNA, 19 nt, synthetic construct
  source 1..19: mol_type = other RNA
acccacgctggccccaaca

SEQ ID NO: 2847 - RNA, 19 nt, synthetic construct
  source 1..19: mol_type = other RNA
cgctggccccaacaacaat

SEQ ID NO: 2848 - RNA, 19 nt, synthetic construct
  source 1..19: mol_type = other RNA
ggcaacctccagagctcgc

SEQ ID NO: 2849 - RNA, 19 nt, synthetic construct
  source 1..19: mol_type = other RNA
aacctccagagctcgcccg

SEQ ID NO: 2850 - RNA, 19 nt, synthetic construct
  source 1..19: mol_type = other RNA
cttccaaagagccgctgac

SEQ ID NO: 2851 - RNA, 19 nt, synthetic construct
  source 1..19: mol_type = other RNA
ttccaaagagccgctgacc

SEQ ID NO: 2852 - RNA, 19 nt, synthetic construct
  source 1..19: mol_type = other RNA
ccaaagagccgctgaccac

SEQ ID NO: 2853 - RNA, 19 nt, synthetic construct
  source 1..19: mol_type = other RNA
ctgaccacgagcctggcgc

SEQ ID NO: 2854 - RNA, 19 nt, synthetic construct
  source 1..19: mol_type = other RNA
gaccacgagcctggcgcca

SEQ ID NO: 2855 - RNA, 19 nt, synthetic construct
  source 1..19: mol_type = other RNA
acactcacgagcgagctgt

SEQ ID NO: 2856 - RNA, 19 nt, synthetic construct
  source 1..19: mol_type = other RNA
ccacctctcaggccgagac

SEQ ID NO: 2857 - RNA, 19 nt, synthetic construct
  source 1..19: mol_type = other RNA
tctcaggccgagaccagca

SEQ ID NO: 2858 - RNA, 19 nt, synthetic construct
  source 1..19: mol_type = other RNA
caggccgagaccagcacgc

SEQ ID NO: 2859 - RNA, 19 nt, synthetic construct
  source 1..19: mol_type = other RNA
agagacgacaatgagcccc

SEQ ID NO: 2860 - RNA, 19 nt, synthetic construct
  source 1..19: mol_type = other RNA
cacccacagctaccagcgt

SEQ ID NO: 2861 - RNA, 19 nt, synthetic construct
  source 1..19: mol_type = other RNA
tggacccgcctatcacaga

SEQ ID NO: 2862 - RNA, 19 nt, synthetic construct
  source 1..19: mol_type = other RNA
gaccaccacacccacggcc

SEQ ID NO: 2863 - RNA, 19 nt, synthetic construct
  source 1..19: mol_type = other RNA
ccacacctccacagtgctt

SEQ ID NO: 2864 - RNA, 19 nt, synthetic construct
  source 1..19: mol_type = other RNA
gccaactaccacaaccacg

SEQ ID NO: 2865 - RNA, 19 nt, synthetic construct
  source 1..19: mol_type = other RNA
actaccacaaccacgggct

SEQ ID NO: 2866 - RNA, 19 nt, synthetic construct
  source 1..19: mol_type = other RNA
ccacaaccacgggcttcac

SEQ ID NO: 2867 - RNA, 19 nt, synthetic construct
  source 1..19: mol_type = other RNA
ccagggacggcactcacgc

SEQ ID NO: 2868 - RNA, 19 nt, synthetic construct
  source 1..19: mol_type = other RNA
tcacgcctccagtgtggat

SEQ ID NO: 2869 - RNA, 19 nt, synthetic construct
  source 1..19: mol_type = other RNA
ccacaaccagaggctccac

SEQ ID NO: 2870 - RNA, 19 nt, synthetic construct
  source 1..19: mol_type = other RNA
tccatcccggggaccaccc

SEQ ID NO: 2871 - RNA, 19 nt, synthetic construct
  source 1..19: mol_type = other RNA
acaccgccacagtgctgac

SEQ ID NO: 2872 - RNA, 19 nt, synthetic construct
  source 1..19: mol_type = other RNA
caactgtggccactggttc

SEQ ID NO: 2873 - RNA, 19 nt, synthetic construct
  source 1..19: mol_type = other RNA
tcctctagcacacagacca

SEQ ID NO: 2874 - RNA, 19 nt, synthetic construct
  source 1..19: mol_type = other RNA
actcccccatcactgacca

SEQ ID NO: 2875 - RNA, 19 nt, synthetic construct
  source 1..19: mol_type = other RNA
ccactacgatcacggccac

SEQ ID NO: 2876 - RNA, 19 nt, synthetic construct
  source 1..19: mol_type = other RNA
acacacccccagtgccgaa

SEQ ID NO: 2877 - RNA, 19 nt, synthetic construct
  source 1..19: mol_type = other RNA
acacccccagtgccgaaca

SEQ ID NO: 2878 - RNA, 19 nt, synthetic construct
  source 1..19: mol_type = other RNA
atggccaccacacacgggc

SEQ ID NO: 2879 - RNA, 19 nt, synthetic construct
  source 1..19: mol_type = other RNA
acacacgggcgatccctgc

SEQ ID NO: 2880 - RNA, 19 nt, synthetic construct
  source 1..19: mol_type = other RNA
acacgggcgatccctgccc

SEQ ID NO: 2881 - RNA, 19 nt, synthetic construct
  source 1..19: mol_type = other RNA
cagtccccacacggtgcgc

SEQ ID NO: 2882 - RNA, 19 nt, synthetic construct
  source 1..19: mol_type = other RNA
agtccccacacggtgcgca

SEQ ID NO: 2883 - RNA, 19 nt, synthetic construct
  source 1..19: mol_type = other RNA
gacttcggccacctcgggc

SEQ ID NO: 2884 - RNA, 19 nt, synthetic construct
  source 1..19: mol_type = other RNA
cttgggcaccacccacatc

SEQ ID NO: 2885 - RNA, 19 nt, synthetic construct
  source 1..19: mol_type = other RNA
cacccagcactcgactcca

SEQ ID NO: 2886 - RNA, 19 nt, synthetic construct
  source 1..19: mol_type = other RNA
ctcaccctagcagcagaac

SEQ ID NO: 2887 - RNA, 19 nt, synthetic construct
  source 1..19: mol_type = other RNA
cagcagaaccaccgagtca

SEQ ID NO: 2888 - RNA, 19 nt, synthetic construct
  source 1..19: mol_type = other RNA
accaccgagtcaccccctt

SEQ ID NO: 2889 - RNA, 19 nt, synthetic construct
  source 1..19: mol_type = other RNA
agggacgaccaccccgggc

SEQ ID NO: 2890 - RNA, 19 nt, synthetic construct
  source 1..19: mol_type = other RNA
ccaccccgggccacaccac

SEQ ID NO: 2891 - RNA, 19 nt, synthetic construct
  source 1..19: mol_type = other RNA
acggccacacccagcaaga

SEQ ID NO: 2892 - RNA, 19 nt, synthetic construct
  source 1..19: mol_type = other RNA
cagccccacatcggccccc

SEQ ID NO: 2893 - RNA, 19 nt, synthetic construct
  source 1..19: mol_type = other RNA
cccacatcggcccccataa

SEQ ID NO: 2894 - RNA, 19 nt, synthetic construct
  source 1..19: mol_type = other RNA
ggcccccataaccacggtg

SEQ ID NO: 2895 - RNA, 19 nt, synthetic construct
  source 1..19: mol_type = other RNA
cccccataaccacggtggt

SEQ ID NO: 2896 - RNA, 19 nt, synthetic construct
  source 1..19: mol_type = other RNA
gagtggctggactacagct

SEQ ID NO: 2897 - RNA, 19 nt, synthetic construct
  source 1..19: mol_type = other RNA
actacagctaccccatgcc

SEQ ID NO: 2898 - RNA, 19 nt, synthetic construct
  source 1..19: mol_type = other RNA
cacctactccaacatccgt

SEQ ID NO: 2899 - RNA, 19 nt, synthetic construct
  source 1..19: mol_type = other RNA
cggaggggccgtctgtgag

SEQ ID NO: 2900 - RNA, 19 nt, synthetic construct
  source 1..19: mol_type = other RNA
cagctctacggccatgccc

SEQ ID NO: 2901 - RNA, 19 nt, synthetic construct
  source 1..19: mol_type = other RNA
acagagccgagcactacag

SEQ ID NO: 2902 - RNA, 19 nt, synthetic construct
  source 1..19: mol_type = other RNA
gagccgagcactacagcca

SEQ ID NO: 2903 - RNA, 19 nt, synthetic construct
  source 1..19: mol_type = other RNA
tacagccaccgtgacggtg

SEQ ID NO: 2904 - RNA, 19 nt, synthetic construct
  source 1..19: mol_type = other RNA
acagccaccgtgacggtgc

SEQ ID NO: 2905 - RNA, 19 nt, synthetic construct
  source 1..19: mol_type = other RNA
ccgtgacggtgcccaccgg

SEQ ID NO: 2906 - RNA, 19 nt, synthetic construct
  source 1..19: mol_type = other RNA
gtgcccaccggatccacgg

SEQ ID NO: 2907 - RNA, 19 nt, synthetic construct
  source 1..19: mol_type = other RNA
tgcccaccggatccacggc

SEQ ID NO: 2908 - RNA, 19 nt, synthetic construct
  source 1..19: mol_type = other RNA
ccaccggatccacggccac

SEQ ID NO: 2909 - RNA, 19 nt, synthetic construct
  source 1..19: mol_type = other RNA
caggcaactgctggcaccc

SEQ ID NO: 2910 - RNA, 19 nt, synthetic construct
  source 1..19: mol_type = other RNA
accagctttacagccatcc

SEQ ID NO: 2911 - RNA, 19 nt, synthetic construct
  source 1..19: mol_type = other RNA
tggacccgcctatcacaga

SEQ ID NO: 2912 - RNA, 19 nt, synthetic construct
  source 1..19: mol_type = other RNA
gaccaccacacccacggcc

SEQ ID NO: 2913 - RNA, 19 nt, synthetic construct
  source 1..19: mol_type = other RNA
agagactgtccacacctcc

SEQ ID NO: 2914 - RNA, 19 nt, synthetic construct
  source 1..19: mol_type = other RNA
ccacacctccacagtgctt

SEQ ID NO: 2915 - RNA, 19 nt, synthetic construct
  source 1..19: mol_type = other RNA
ctgactaccacaaccacgg

SEQ ID NO: 2916 - RNA, 19 nt, synthetic construct
  source 1..19: mol_type = other RNA
actaccacaaccacgggct

SEQ ID NO: 2917 - RNA, 19 nt, synthetic construct
  source 1..19: mol_type = other RNA
ccacaaccacgggcttcac

SEQ ID NO: 2918 - RNA, 19 nt, synthetic construct
  source 1..19: mol_type = other RNA
ggcacgcacgcttccagtg

SEQ ID NO: 2919 - RNA, 19 nt, synthetic construct
  source 1..19: mol_type = other RNA
gcacgcacgcttccagtgt

SEQ ID NO: 2920 - RNA, 19 nt, synthetic construct
  source 1..19: mol_type = other RNA
cagaggttccacggtgacc

SEQ ID NO: 2921 - RNA, 19 nt, synthetic construct
  source 1..19: mol_type = other RNA
agaggttccacggtgaccc

SEQ ID NO: 2922 - RNA, 19 nt, synthetic construct
  source 1..19: mol_type = other RNA
tccatcccggggaccaccc

SEQ ID NO: 2923 - RNA, 19 nt, synthetic construct
  source 1..19: mol_type = other RNA
caactgtggccactggttc

SEQ ID NO: 2924 - RNA, 19 nt, synthetic construct
  source 1..19: mol_type = other RNA
tcctctagcacacagacca

SEQ ID NO: 2925 - RNA, 19 nt, synthetic construct
  source 1..19: mol_type = other RNA
actcccccatcactgacca

SEQ ID NO: 2926 - RNA, 19 nt, synthetic construct
  source 1..19: mol_type = other RNA
ccactacgatcacggccac

SEQ ID NO: 2927 - RNA, 19 nt, synthetic construct
  source 1..19: mol_type = other RNA
cagggacaacacctatccc

SEQ ID NO: 2928 - RNA, 19 nt, synthetic construct
  source 1..19: mol_type = other RNA
aacacctatccccccagtg

SEQ ID NO: 2929 - RNA, 19 nt, synthetic construct
  source 1..19: mol_type = other RNA
acacacccccagtgccgaa

SEQ ID NO: 2930 - RNA, 19 nt, synthetic construct
  source 1..19: mol_type = other RNA
acacccccagtgccgaaca

SEQ ID NO: 2931 - RNA, 19 nt, synthetic construct
  source 1..19: mol_type = other RNA
cagtgccgaacaccacggc

SEQ ID NO: 2932 - RNA, 19 nt, synthetic construct
  source 1..19: mol_type = other RNA
cagtccccacacggtgcgc

SEQ ID NO: 2933 - RNA, 19 nt, synthetic construct
  source 1..19: mol_type = other RNA
agtccccacacggtgcgca

SEQ ID NO: 2934 - RNA, 19 nt, synthetic construct
  source 1..19: mol_type = other RNA
cttgggcaccacccacatc

SEQ ID NO: 2935 - RNA, 19 nt, synthetic construct
  source 1..19: mol_type = other RNA
cccagcagcaaccaccggt

SEQ ID NO: 2936 - RNA, 19 nt, synthetic construct
  source 1..19: mol_type = other RNA
cacccagcactcgactcca

SEQ ID NO: 2937 - RNA, 19 nt, synthetic construct
  source 1..19: mol_type = other RNA
accaccgagtcaccccctt

SEQ ID NO: 2938 - RNA, 19 nt, synthetic construct
  source 1..19: mol_type = other RNA
agggacgaccaccccgggc

SEQ ID NO: 2939 - RNA, 19 nt, synthetic construct
  source 1..19: mol_type = other RNA
acggccacacccagcaaga

SEQ ID NO: 2940 - RNA, 19 nt, synthetic construct
  source 1..19: mol_type = other RNA
ccacatcggccccaataac

SEQ ID NO: 2941 - RNA, 19 nt, synthetic construct
  source 1..19: mol_type = other RNA
ggccccaataaccacggtg

SEQ ID NO: 2942 - RNA, 19 nt, synthetic construct
  source 1..19: mol_type = other RNA
gagtggctggactacagct

SEQ ID NO: 2943 - RNA, 19 nt, synthetic construct
  source 1..19: mol_type = other RNA
actacagctaccccatgcc

SEQ ID NO: 2944 - RNA, 19 nt, synthetic construct
  source 1..19: mol_type = other RNA
cacctactccaacatccgt

SEQ ID NO: 2945 - RNA, 19 nt, synthetic construct
  source 1..19: mol_type = other RNA
cggaggggccgtctgtgag

SEQ ID NO: 2946 - RNA, 19 nt, synthetic construct
  source 1..19: mol_type = other RNA
cagccactacgaccgcaac

SEQ ID NO: 2947 - RNA, 19 nt, synthetic construct
  source 1..19: mol_type = other RNA
gccactacgaccgcaacca

SEQ ID NO: 2948 - RNA, 19 nt, synthetic construct
  source 1..19: mol_type = other RNA
actgcaaccacccttccag

SEQ ID NO: 2949 - RNA, 19 nt, synthetic construct
  source 1..19: mol_type = other RNA
ccagctttacacccatccc

SEQ ID NO: 2950 - RNA, 19 nt, synthetic construct
  source 1..19: mol_type = other RNA
cagctttacacccatcccc

SEQ ID NO: 2951 - RNA, 19 nt, synthetic construct
  source 1..19: mol_type = other RNA
gaccctcccagaacagacc

SEQ ID NO: 2952 - RNA, 19 nt, synthetic construct
  source 1..19: mol_type = other RNA
ctccactccggagaccacc

SEQ ID NO: 2953 - RNA, 19 nt, synthetic construct
  source 1..19: mol_type = other RNA
cacagtgctgaccacgaag

SEQ ID NO: 2954 - RNA, 19 nt, synthetic construct
  source 1..19: mol_type = other RNA
agtgctgaccacgaaggcc

SEQ ID NO: 2955 - RNA, 19 nt, synthetic construct
  source 1..19: mol_type = other RNA
ccacgacaagggccaccag

SEQ ID NO: 2956 - RNA, 19 nt, synthetic construct
  source 1..19: mol_type = other RNA
tacagccaccgtgacggtg

SEQ ID NO: 2957 - RNA, 19 nt, synthetic construct
  source 1..19: mol_type = other RNA
acagccaccgtgacggtgc

SEQ ID NO: 2958 - RNA, 19 nt, synthetic construct
  source 1..19: mol_type = other RNA
ccgtgacggtgcccaccgg

SEQ ID NO: 2959 - RNA, 19 nt, synthetic construct
  source 1..19: mol_type = other RNA
gtgcccaccggatccacgg

SEQ ID NO: 2960 - RNA, 19 nt, synthetic construct
  source 1..19: mol_type = other RNA
tgcccaccggatccacggc

SEQ ID NO: 2961 - RNA, 19 nt, synthetic construct
  source 1..19: mol_type = other RNA
ccaccggatccacggccac

SEQ ID NO: 2962 - RNA, 19 nt, synthetic construct
  source 1..19: mol_type = other RNA
cctccacccgggcaactgc

SEQ ID NO: 2963 - RNA, 19 nt, synthetic construct
  source 1..19: mol_type = other RNA
cacccacagctaccagcgt

SEQ ID NO: 2964 - RNA, 19 nt, synthetic construct
  source 1..19: mol_type = other RNA
tggacccgcctatcacaga

SEQ ID NO: 2965 - RNA, 19 nt, synthetic construct
  source 1..19: mol_type = other RNA
gaccaccacacccacggcc

SEQ ID NO: 2966 - RNA, 19 nt, synthetic construct
  source 1..19: mol_type = other RNA
ctctactccagagactgtc

SEQ ID NO: 2967 - RNA, 19 nt, synthetic construct
  source 1..19: mol_type = other RNA
agagactgtccacacctcc

SEQ ID NO: 2968 - RNA, 19 nt, synthetic construct
  source 1..19: mol_type = other RNA
ccacacctccacagtgctt

SEQ ID NO: 2969 - RNA, 19 nt, synthetic construct
  source 1..19: mol_type = other RNA
actaccacaaccacgggct

SEQ ID NO: 2970 - RNA, 19 nt, synthetic construct
  source 1..19: mol_type = other RNA
ccacaaccacgggcttcac

SEQ ID NO: 2971 - RNA, 19 nt, synthetic construct
  source 1..19: mol_type = other RNA
ccagggacggcactcacgc

SEQ ID NO: 2972 - RNA, 19 nt, synthetic construct
  source 1..19: mol_type = other RNA
tcacgcctccagtgtggat

SEQ ID NO: 2973 - RNA, 19 nt, synthetic construct
  source 1..19: mol_type = other RNA
ccacaaccagaggctccac

SEQ ID NO: 2974 - RNA, 19 nt, synthetic construct
  source 1..19: mol_type = other RNA
tccatcccggggaccaccc

SEQ ID NO: 2975 - RNA, 19 nt, synthetic construct
  source 1..19: mol_type = other RNA
acaccgccacagtgctgac

SEQ ID NO: 2976 - RNA, 19 nt, synthetic construct
  source 1..19: mol_type = other RNA
caactgtggccactggttc

SEQ ID NO: 2977 - RNA, 19 nt, synthetic construct
  source 1..19: mol_type = other RNA
tcctctagcacacagacca

SEQ ID NO: 2978 - RNA, 19 nt, synthetic construct
  source 1..19: mol_type = other RNA
actcccccatcactgacca

SEQ ID NO: 2979 - RNA, 19 nt, synthetic construct
  source 1..19: mol_type = other RNA
cactacgatcacagccacc

SEQ ID NO: 2980 - RNA, 19 nt, synthetic construct
  source 1..19: mol_type = other RNA
acacacccccagtgccgaa

SEQ ID NO: 2981 - RNA, 19 nt, synthetic construct
  source 1..19: mol_type = other RNA
acacccccagtgccgaaca

SEQ ID NO: 2982 - RNA, 19 nt, synthetic construct
  source 1..19: mol_type = other RNA
cagtgccgaacaccacggc

SEQ ID NO: 2983 - RNA, 19 nt, synthetic construct
  source 1..19: mol_type = other RNA
cagtccccacacggtgcgc

SEQ ID NO: 2984 - RNA, 19 nt, synthetic construct
  source 1..19: mol_type = other RNA
agtccccacacggtgcgca

SEQ ID NO: 2985 - RNA, 19 nt, synthetic construct
  source 1..19: mol_type = other RNA
gacttcggccacctcgggc

SEQ ID NO: 2986 - RNA, 19 nt, synthetic construct
  source 1..19: mol_type = other RNA
cttgggcaccacccacatc

SEQ ID NO: 2987 - RNA, 19 nt, synthetic construct
  source 1..19: mol_type = other RNA
caccagtaccacccagcac

SEQ ID NO: 2988 - RNA, 19 nt, synthetic construct
  source 1..19: mol_type = other RNA
cacccagcactcgactcca

SEQ ID NO: 2989 - RNA, 19 nt, synthetic construct
  source 1..19: mol_type = other RNA
accaccgagtcaccccctt

SEQ ID NO: 2990 - RNA, 19 nt, synthetic construct
  source 1..19: mol_type = other RNA
agggacgaccaccccgggc

SEQ ID NO: 2991 - RNA, 19 nt, synthetic construct
  source 1..19: mol_type = other RNA
cagccccacatcggccccc

SEQ ID NO: 2992 - RNA, 19 nt, synthetic construct
  source 1..19: mol_type = other RNA
cccacatcggcccccataa

SEQ ID NO: 2993 - RNA, 19 nt, synthetic construct
  source 1..19: mol_type = other RNA
ggcccccataaccacggtg

SEQ ID NO: 2994 - RNA, 19 nt, synthetic construct
  source 1..19: mol_type = other RNA
cccccataaccacggtggt

SEQ ID NO: 2995 - RNA, 19 nt, synthetic construct
  source 1..19: mol_type = other RNA
tgaccacgggctgtgagcc

SEQ ID NO: 2996 - RNA, 19 nt, synthetic construct
  source 1..19: mol_type = other RNA
gagtggctggactacagct

SEQ ID NO: 2997 - RNA, 19 nt, synthetic construct
  source 1..19: mol_type = other RNA
actacagctaccccatgcc

SEQ ID NO: 2998 - RNA, 19 nt, synthetic construct
  source 1..19: mol_type = other RNA
cacctactccaacatccgt

SEQ ID NO: 2999 - RNA, 19 nt, synthetic construct
  source 1..19: mol_type = other RNA
acagagccgagcactacag

SEQ ID NO: 3000 - RNA, 19 nt, synthetic construct
  source 1..19: mol_type = other RNA
gagccgagcactacagcca

SEQ ID NO: 3001 - RNA, 19 nt, synthetic construct
  source 1..19: mol_type = other RNA
tacagccaccgtgacggtg

SEQ ID NO: 3002 - RNA, 19 nt, synthetic construct
  source 1..19: mol_type = other RNA
acagccaccgtgacggtgc

SEQ ID NO: 3003 - RNA, 19 nt, synthetic construct
  source 1..19: mol_type = other RNA
ccgtgacggtgcccaccgg

SEQ ID NO: 3004 - RNA, 19 nt, synthetic construct
  source 1..19: mol_type = other RNA
gtgcccaccggatccacgg

SEQ ID NO: 3005 - RNA, 19 nt, synthetic construct
  source 1..19: mol_type = other RNA
tgcccaccggatccacggc

SEQ ID NO: 3006 - RNA, 19 nt, synthetic construct
  source 1..19: mol_type = other RNA
ccaccggatccacggccac

SEQ ID NO: 3007 - RNA, 19 nt, synthetic construct
  source 1..19: mol_type = other RNA
caggcaactgctggcaccc

SEQ ID NO: 3008 - RNA, 19 nt, synthetic construct
  source 1..19: mol_type = other RNA
accagctttacagccatcc

SEQ ID NO: 3009 - RNA, 19 nt, synthetic construct
  source 1..19: mol_type = other RNA
tggacccgcctatcacaga

SEQ ID NO: 3010 - RNA, 19 nt, synthetic construct
  source 1..19: mol_type = other RNA
gaccaccacacccacggcc

SEQ ID NO: 3011 - RNA, 19 nt, synthetic construct
  source 1..19: mol_type = other RNA
ccacacctccacagtgctt

SEQ ID NO: 3012 - RNA, 19 nt, synthetic construct
  source 1..19: mol_type = other RNA
actaccacaaccacgggct

SEQ ID NO: 3013 - RNA, 19 nt, synthetic construct
  source 1..19: mol_type = other RNA
ccacaaccacgggcttcac

SEQ ID NO: 3014 - RNA, 19 nt, synthetic construct
  source 1..19: mol_type = other RNA
ccacgggcttcacagtcac

SEQ ID NO: 3015 - RNA, 19 nt, synthetic construct
  source 1..19: mol_type = other RNA
cggcacgcacgcctccagt

SEQ ID NO: 3016 - RNA, 19 nt, synthetic construct
  source 1..19: mol_type = other RNA
gcacgcacgcctccagtgt

SEQ ID NO: 3017 - RNA, 19 nt, synthetic construct
  source 1..19: mol_type = other RNA
cgcacgcctccagtgtgga

SEQ ID NO: 3018 - RNA, 19 nt, synthetic construct
  source 1..19: mol_type = other RNA
gcacgcctccagtgtggat

SEQ ID NO: 3019 - RNA, 19 nt, synthetic construct
  source 1..19: mol_type = other RNA
cacacccacaaccagtggc

SEQ ID NO: 3020 - RNA, 19 nt, synthetic construct
  source 1..19: mol_type = other RNA
tccgtcccggggaccaccc

SEQ ID NO: 3021 - RNA, 19 nt, synthetic construct
  source 1..19: mol_type = other RNA
caactgtggccactggttc

SEQ ID NO: 3022 - RNA, 19 nt, synthetic construct
  source 1..19: mol_type = other RNA
tcctctagcacacagacca

SEQ ID NO: 3023 - RNA, 19 nt, synthetic construct
  source 1..19: mol_type = other RNA
ccactacgatcacggccac

SEQ ID NO: 3024 - RNA, 19 nt, synthetic construct
  source 1..19: mol_type = other RNA
cagggacaacacctatccc

SEQ ID NO: 3025 - RNA, 19 nt, synthetic construct
  source 1..19: mol_type = other RNA
aacacctatccccccagtg

SEQ ID NO: 3026 - RNA, 19 nt, synthetic construct
  source 1..19: mol_type = other RNA
acacacccccagtgccgaa

SEQ ID NO: 3027 - RNA, 19 nt, synthetic construct
  source 1..19: mol_type = other RNA
acacccccagtgccgaaca

SEQ ID NO: 3028 - RNA, 19 nt, synthetic construct
  source 1..19: mol_type = other RNA
cagtgccgaacaccacggc

SEQ ID NO: 3029 - RNA, 19 nt, synthetic construct
  source 1..19: mol_type = other RNA
cagtccccacacggtgcgc

SEQ ID NO: 3030 - RNA, 19 nt, synthetic construct
  source 1..19: mol_type = other RNA
agtccccacacggtgcgca

SEQ ID NO: 3031 - RNA, 19 nt, synthetic construct
  source 1..19: mol_type = other RNA
cttgggcaccacccacatc

SEQ ID NO: 3032 - RNA, 19 nt, synthetic construct
  source 1..19: mol_type = other RNA
cccagcagcaaccaccggt

SEQ ID NO: 3033 - RNA, 19 nt, synthetic construct
  source 1..19: mol_type = other RNA
cacccagcactcgactcca

SEQ ID NO: 3034 - RNA, 19 nt, synthetic construct
  source 1..19: mol_type = other RNA
accaccgagtcaccccctt

SEQ ID NO: 3035 - RNA, 19 nt, synthetic construct
  source 1..19: mol_type = other RNA
caccgagtcacccccttcc

SEQ ID NO: 3036 - RNA, 19 nt, synthetic construct
  source 1..19: mol_type = other RNA
agggacgaccaccccgggc

SEQ ID NO: 3037 - RNA, 19 nt, synthetic construct
  source 1..19: mol_type = other RNA
ccaccccgggccacaccac

SEQ ID NO: 3038 - RNA, 19 nt, synthetic construct
  source 1..19: mol_type = other RNA
acggccacacccagcaaga

SEQ ID NO: 3039 - RNA, 19 nt, synthetic construct
  source 1..19: mol_type = other RNA
cagccccacatcggccccc

SEQ ID NO: 3040 - RNA, 19 nt, synthetic construct
  source 1..19: mol_type = other RNA
cccacatcggcccccataa

SEQ ID NO: 3041 - RNA, 19 nt, synthetic construct
  source 1..19: mol_type = other RNA
ggcccccataaccacggtg

SEQ ID NO: 3042 - RNA, 19 nt, synthetic construct
  source 1..19: mol_type = other RNA
cccccataaccacggtggt

SEQ ID NO: 3043 - RNA, 19 nt, synthetic construct
  source 1..19: mol_type = other RNA
tgaccacgggctgtgagcc

SEQ ID NO: 3044 - RNA, 19 nt, synthetic construct
  source 1..19: mol_type = other RNA
gagtggctggactacagct

SEQ ID NO: 3045 - RNA, 19 nt, synthetic construct
  source 1..19: mol_type = other RNA
actacagctaccccatgcc

SEQ ID NO: 3046 - RNA, 19 nt, synthetic construct
  source 1..19: mol_type = other RNA
cacctactccaacatccgt

SEQ ID NO: 3047 - RNA, 19 nt, synthetic construct
  source 1..19: mol_type = other RNA
cggaggggccgtctgtgag

SEQ ID NO: 3048 - RNA, 19 nt, synthetic construct
  source 1..19: mol_type = other RNA
cagctctacggccatgccc

SEQ ID NO: 3049 - RNA, 19 nt, synthetic construct
  source 1..19: mol_type = other RNA
actgcaaccacccttccag

SEQ ID NO: 3050 - RNA, 19 nt, synthetic construct
  source 1..19: mol_type = other RNA
gaccctcccagaacagacc

SEQ ID NO: 3051 - RNA, 19 nt, synthetic construct
  source 1..19: mol_type = other RNA
ctccactccggagaccacc

SEQ ID NO: 3052 - RNA, 19 nt, synthetic construct
  source 1..19: mol_type = other RNA
cacagtgctgaccacgaag

SEQ ID NO: 3053 - RNA, 19 nt, synthetic construct
  source 1..19: mol_type = other RNA
agtgctgaccacgaaggcc

SEQ ID NO: 3054 - RNA, 19 nt, synthetic construct
  source 1..19: mol_type = other RNA
ccacgacaagggccaccag

SEQ ID NO: 3055 - RNA, 19 nt, synthetic construct
  source 1..19: mol_type = other RNA
cagttccacgtccaccccc

SEQ ID NO: 3056 - RNA, 19 nt, synthetic construct
  source 1..19: mol_type = other RNA
acagagccgagcactacag

SEQ ID NO: 3057 - RNA, 19 nt, synthetic construct
  source 1..19: mol_type = other RNA
gagccgagcactacagcca

SEQ ID NO: 3058 - RNA, 19 nt, synthetic construct
  source 1..19: mol_type = other RNA
tacagccaccgtgacggtg

SEQ ID NO: 3059 - RNA, 19 nt, synthetic construct
  source 1..19: mol_type = other RNA
acagccaccgtgacggtgc

SEQ ID NO: 3060 - RNA, 19 nt, synthetic construct
  source 1..19: mol_type = other RNA
ccgtgacggtgcccaccgg

SEQ ID NO: 3061 - RNA, 19 nt, synthetic construct
  source 1..19: mol_type = other RNA
gtgcccaccggatccacgg

SEQ ID NO: 3062 - RNA, 19 nt, synthetic construct
  source 1..19: mol_type = other RNA
tgcccaccggatccacggc

SEQ ID NO: 3063 - RNA, 19 nt, synthetic construct
  source 1..19: mol_type = other RNA
ccaccggatccacggccac

SEQ ID NO: 3064 - RNA, 19 nt, synthetic construct
  source 1..19: mol_type = other RNA
caggcaactgctggcaccc

SEQ ID NO: 3065 - RNA, 19 nt, synthetic construct
  source 1..19: mol_type = other RNA
accagctttacagccatcc

SEQ ID NO: 3066 - RNA, 19 nt, synthetic construct
  source 1..19: mol_type = other RNA
tggacccgcctatcacaga

SEQ ID NO: 3067 - RNA, 19 nt, synthetic construct
  source 1..19: mol_type = other RNA
gaccaccacacccacggcc

SEQ ID NO: 3068 - RNA, 19 nt, synthetic construct
  source 1..19: mol_type = other RNA
agagactgtccacacctcc

SEQ ID NO: 3069 - RNA, 19 nt, synthetic construct
  source 1..19: mol_type = other RNA
ccacacctccacagtgctt

SEQ ID NO: 3070 - RNA, 19 nt, synthetic construct
  source 1..19: mol_type = other RNA
actaccacaaccacgggct

SEQ ID NO: 3071 - RNA, 19 nt, synthetic construct
  source 1..19: mol_type = other RNA
ccacaaccacgggcttcac

SEQ ID NO: 3072 - RNA, 19 nt, synthetic construct
  source 1..19: mol_type = other RNA
ccagggacggcactcacgc

SEQ ID NO: 3073 - RNA, 19 nt, synthetic construct
  source 1..19: mol_type = other RNA
tcacgcctccagtgtggat

SEQ ID NO: 3074 - RNA, 19 nt, synthetic construct
  source 1..19: mol_type = other RNA
cacacccacaaccagtggc

SEQ ID NO: 3075 - RNA, 19 nt, synthetic construct
  source 1..19: mol_type = other RNA
tccatcccggggaccaccc

SEQ ID NO: 3076 - RNA, 19 nt, synthetic construct
  source 1..19: mol_type = other RNA
acaccgccagagtgctgac

SEQ ID NO: 3077 - RNA, 19 nt, synthetic construct
  source 1..19: mol_type = other RNA
caactgtggccactggttc

SEQ ID NO: 3078 - RNA, 19 nt, synthetic construct
  source 1..19: mol_type = other RNA
tcctctagcacacagacca

SEQ ID NO: 3079 - RNA, 19 nt, synthetic construct
  source 1..19: mol_type = other RNA
actcccccatcactgacca

SEQ ID NO: 3080 - RNA, 19 nt, synthetic construct
  source 1..19: mol_type = other RNA
ccactacgatcacggccac

SEQ ID NO: 3081 - RNA, 19 nt, synthetic construct
  source 1..19: mol_type = other RNA
actgcaaccacccttccag

SEQ ID NO: 3082 - RNA, 19 nt, synthetic construct
  source 1..19: mol_type = other RNA
ccagctttacacccatccc

SEQ ID NO: 3083 - RNA, 19 nt, synthetic construct
  source 1..19: mol_type = other RNA
cagctttacacccatcccc

SEQ ID NO: 3084 - RNA, 19 nt, synthetic construct
  source 1..19: mol_type = other RNA
tggaccgtcccagcacaga

SEQ ID NO: 3085 - RNA, 19 nt, synthetic construct
  source 1..19: mol_type = other RNA
tccacaatccacacctcct

SEQ ID NO: 3086 - RNA, 19 nt, synthetic construct
  source 1..19: mol_type = other RNA
cacaatccacacctcctct

SEQ ID NO: 3087 - RNA, 19 nt, synthetic construct
  source 1..19: mol_type = other RNA
tccacacctcctctactcc

SEQ ID NO: 3088 - RNA, 19 nt, synthetic construct
  source 1..19: mol_type = other RNA
cctctactccagagaccac

SEQ ID NO: 3089 - RNA, 19 nt, synthetic construct
  source 1..19: mol_type = other RNA
acaagggccaccaattcca

SEQ ID NO: 3090 - RNA, 19 nt, synthetic construct
  source 1..19: mol_type = other RNA
accaattccacggccacac

SEQ ID NO: 3091 - RNA, 19 nt, synthetic construct
  source 1..19: mol_type = other RNA
tccactctggggacgaccc

SEQ ID NO: 3092 - RNA, 19 nt, synthetic construct
  source 1..19: mol_type = other RNA
ctctggggacgacccggat

SEQ ID NO: 3093 - RNA, 19 nt, synthetic construct
  source 1..19: mol_type = other RNA
agccgagcactatagccac

SEQ ID NO: 3094 - RNA, 19 nt, synthetic construct
  source 1..19: mol_type = other RNA
gccaccgtgatggtgccca

SEQ ID NO: 3095 - RNA, 19 nt, synthetic construct
  source 1..19: mol_type = other RNA
caccgtgatggtgcccacc

SEQ ID NO: 3096 - RNA, 19 nt, synthetic construct
  source 1..19: mol_type = other RNA
agctcacacccccaaagtg

SEQ ID NO: 3097 - RNA, 19 nt, synthetic construct
  source 1..19: mol_type = other RNA
gcctgccaaccttcagcgt

SEQ ID NO: 3098 - RNA, 19 nt, synthetic construct
  source 1..19: mol_type = other RNA
cctgccaaccttcagcgtg

SEQ ID NO: 3099 - RNA, 19 nt, synthetic construct
  source 1..19: mol_type = other RNA
tttggacagtttttctcgc

SEQ ID NO: 3100 - RNA, 19 nt, synthetic construct
  source 1..19: mol_type = other RNA
ttggacagtttttctcgcc

SEQ ID NO: 3101 - RNA, 19 nt, synthetic construct
  source 1..19: mol_type = other RNA
cggggaagtcatctacaat

SEQ ID NO: 3102 - RNA, 19 nt, synthetic construct
  source 1..19: mol_type = other RNA
ctgccatttctacgcagtg

SEQ ID NO: 3103 - RNA, 19 nt, synthetic construct
  source 1..19: mol_type = other RNA
ctacgcagtgtgcaatcag

SEQ ID NO: 3104 - RNA, 19 nt, synthetic construct
  source 1..19: mol_type = other RNA
cagtgtgcaatcagcactg

SEQ ID NO: 3105 - RNA, 19 nt, synthetic construct
  source 1..19: mol_type = other RNA
gcaatcagcactgtgacat

SEQ ID NO: 3106 - RNA, 19 nt, synthetic construct
  source 1..19: mol_type = other RNA
agcactgtgacattgaccg

SEQ ID NO: 3107 - RNA, 19 nt, synthetic construct
  source 1..19: mol_type = other RNA
gcactgtgacattgaccgc

SEQ ID NO: 3108 - RNA, 19 nt, synthetic construct
  source 1..19: mol_type = other RNA
ctccggcaggtgaatgaga

SEQ ID NO: 3109 - RNA, 19 nt, synthetic construct
  source 1..19: mol_type = other RNA
ggggcggctcccactattc

SEQ ID NO: 3110 - RNA, 19 nt, synthetic construct
  source 1..19: mol_type = other RNA
cacctcttacaccttccgg

SEQ ID NO: 3111 - RNA, 19 nt, synthetic construct
  source 1..19: mol_type = other RNA
ctcttacaccttccggggc

SEQ ID NO: 3112 - RNA, 19 nt, synthetic construct
  source 1..19: mol_type = other RNA
tacaccttccggggcaact

SEQ ID NO: 3113 - RNA, 19 nt, synthetic construct
  source 1..19: mol_type = other RNA
tccggggcaactgcaccta

SEQ ID NO: 3114 - RNA, 19 nt, synthetic construct
  source 1..19: mol_type = other RNA
gagagatccatgcacgctt

SEQ ID NO: 3115 - RNA, 19 nt, synthetic construct
  source 1..19: mol_type = other RNA
atgcacgctttgggaatct

SEQ ID NO: 3116 - RNA, 19 nt, synthetic construct
  source 1..19: mol_type = other RNA
tgcacgctttgggaatctc

SEQ ID NO: 3117 - RNA, 19 nt, synthetic construct
  source 1..19: mol_type = other RNA
caaccactactgcacggcc

SEQ ID NO: 3118 - RNA, 19 nt, synthetic construct
  source 1..19: mol_type = other RNA
aaccactactgcacggcct

SEQ ID NO: 3119 - RNA, 19 nt, synthetic construct
  source 1..19: mol_type = other RNA
accactactgcacggcctc

SEQ ID NO: 3120 - RNA, 19 nt, synthetic construct
  source 1..19: mol_type = other RNA
cctcagcatccactacaag

SEQ ID NO: 3121 - RNA, 19 nt, synthetic construct
  source 1..19: mol_type = other RNA
gcatccactacaagtccat

SEQ ID NO: 3122 - RNA, 19 nt, synthetic construct
  source 1..19: mol_type = other RNA
catccactacaagtccatg

SEQ ID NO: 3123 - RNA, 19 nt, synthetic construct
  source 1..19: mol_type = other RNA
atccactacaagtccatgg

SEQ ID NO: 3124 - RNA, 19 nt, synthetic construct
  source 1..19: mol_type = other RNA
tggatatcgtcctcactgt

SEQ ID NO: 3125 - RNA, 19 nt, synthetic construct
  source 1..19: mol_type = other RNA
tgtcaccatggtgcatggg

SEQ ID NO: 3126 - RNA, 19 nt, synthetic construct
  source 1..19: mol_type = other RNA
accaccatgcgtgtggaca

SEQ ID NO: 3127 - RNA, 19 nt, synthetic construct
  source 1..19: mol_type = other RNA
atgcgtgtggacattcctg

SEQ ID NO: 3128 - RNA, 19 nt, synthetic construct
  source 1..19: mol_type = other RNA
tgggcgtgagcgtcacctt

SEQ ID NO: 3129 - RNA, 19 nt, synthetic construct
  source 1..19: mol_type = other RNA
acggaaccactgccgccag

SEQ ID NO: 3130 - RNA, 19 nt, synthetic construct
  source 1..19: mol_type = other RNA
cggaaccactgccgccagt

SEQ ID NO: 3131 - RNA, 19 nt, synthetic construct
  source 1..19: mol_type = other RNA
gaaccactgccgccagttg

SEQ ID NO: 3132 - RNA, 19 nt, synthetic construct
  source 1..19: mol_type = other RNA
aaccactgccgccagttgc

SEQ ID NO: 3133 - RNA, 19 nt, synthetic construct
  source 1..19: mol_type = other RNA
actgccgccagttgcaagg

SEQ ID NO: 3134 - RNA, 19 nt, synthetic construct
  source 1..19: mol_type = other RNA
ggacatggccaagacgtgg

SEQ ID NO: 3135 - RNA, 19 nt, synthetic construct
  source 1..19: mol_type = other RNA
gacatggccaagacgtggc

SEQ ID NO: 3136 - RNA, 19 nt, synthetic construct
  source 1..19: mol_type = other RNA
tggccaagacgtggctggt

SEQ ID NO: 3137 - RNA, 19 nt, synthetic construct
  source 1..19: mol_type = other RNA
ggccaagacgtggctggtc

SEQ ID NO: 3138 - RNA, 19 nt, synthetic construct
  source 1..19: mol_type = other RNA
ctggtccccgacagcagaa

SEQ ID NO: 3139 - RNA, 19 nt, synthetic construct
  source 1..19: mol_type = other RNA
ccccgacagcagaaaggat

SEQ ID NO: 3140 - RNA, 19 nt, synthetic construct
  source 1..19: mol_type = other RNA
gccccgactggcacacccc

SEQ ID NO: 3141 - RNA, 19 nt, synthetic construct
  source 1..19: mol_type = other RNA
cccggtgtctagcacaccc

SEQ ID NO: 3142 - RNA, 19 nt, synthetic construct
  source 1..19: mol_type = other RNA
gccgctctgtgatctgatg

SEQ ID NO: 3143 - RNA, 19 nt, synthetic construct
  source 1..19: mol_type = other RNA
cgggcccattcttcaacgc

SEQ ID NO: 3144 - RNA, 19 nt, synthetic construct
  source 1..19: mol_type = other RNA
ggcccattcttcaacgcct

SEQ ID NO: 3145 - RNA, 19 nt, synthetic construct
  source 1..19: mol_type = other RNA
gcctgcatcagcgaccact

SEQ ID NO: 3146 - RNA, 19 nt, synthetic construct
  source 1..19: mol_type = other RNA
gaccactgcaggggccgcc

SEQ ID NO: 3147 - RNA, 19 nt, synthetic construct
  source 1..19: mol_type = other RNA
cctggaggcttacgcagag

SEQ ID NO: 3148 - RNA, 19 nt, synthetic construct
  source 1..19: mol_type = other RNA
tacgcagagctctgccgcg

SEQ ID NO: 3149 - RNA, 19 nt, synthetic construct
  source 1..19: mol_type = other RNA
agtgtacaagccatgcggc

SEQ ID NO: 3150 - RNA, 19 nt, synthetic construct
  source 1..19: mol_type = other RNA
gccatgcggccccatacag

SEQ ID NO: 3151 - RNA, 19 nt, synthetic construct
  source 1..19: mol_type = other RNA
gcggccccatacagcctgc

SEQ ID NO: 3152 - RNA, 19 nt, synthetic construct
  source 1..19: mol_type = other RNA
cggccccatacagcctgcc

SEQ ID NO: 3153 - RNA, 19 nt, synthetic construct
  source 1..19: mol_type = other RNA
ctgcaactctaggaaccag

SEQ ID NO: 3154 - RNA, 19 nt, synthetic construct
  source 1..19: mol_type = other RNA
gggcatctgcgtgcaggcc

SEQ ID NO: 3155 - RNA, 19 nt, synthetic construct
  source 1..19: mol_type = other RNA
acccgatgggtttcctaaa

SEQ ID NO: 3156 - RNA, 19 nt, synthetic construct
  source 1..19: mol_type = other RNA
cgatgggtttcctaaattt

SEQ ID NO: 3157 - RNA, 19 nt, synthetic construct
  source 1..19: mol_type = other RNA
ggagcggtgggtcagcaac

SEQ ID NO: 3158 - RNA, 19 nt, synthetic construct
  source 1..19: mol_type = other RNA
gccagtcctgcgtgtgtga

SEQ ID NO: 3159 - RNA, 19 nt, synthetic construct
  source 1..19: mol_type = other RNA
cagtcctgcgtgtgtgacg

SEQ ID NO: 3160 - RNA, 19 nt, synthetic construct
  source 1..19: mol_type = other RNA
cgtgtgtgacgagggttca

SEQ ID NO: 3161 - RNA, 19 nt, synthetic construct
  source 1..19: mol_type = other RNA
tcagtgtcggtgcagtgca

SEQ ID NO: 3162 - RNA, 19 nt, synthetic construct
  source 1..19: mol_type = other RNA
ccctgtgacgcccagggtc

SEQ ID NO: 3163 - RNA, 19 nt, synthetic construct
  source 1..19: mol_type = other RNA
cgtcccggcttcgtaaccg

SEQ ID NO: 3164 - RNA, 19 nt, synthetic construct
  source 1..19: mol_type = other RNA
ttcgtaaccgtgaccaggc

SEQ ID NO: 3165 - RNA, 19 nt, synthetic construct
  source 1..19: mol_type = other RNA
gtaaccgtgaccaggcccc

SEQ ID NO: 3166 - RNA, 19 nt, synthetic construct
  source 1..19: mol_type = other RNA
gctgccccgagacggtgtg

SEQ ID NO: 3167 - RNA, 19 nt, synthetic construct
  source 1..19: mol_type = other RNA
gtgttcgtacaatggcacc

SEQ ID NO: 3168 - RNA, 19 nt, synthetic construct
  source 1..19: mol_type = other RNA
ccttctacggggttggtgc

SEQ ID NO: 3169 - RNA, 19 nt, synthetic construct
  source 1..19: mol_type = other RNA
gggttggtgcaaccttccc

SEQ ID NO: 3170 - RNA, 19 nt, synthetic construct
  source 1..19: mol_type = other RNA
ggttggtgcaaccttccca

SEQ ID NO: 3171 - RNA, 19 nt, synthetic construct
  source 1..19: mol_type = other RNA
gttggtgcaaccttcccag

SEQ ID NO: 3172 - RNA, 19 nt, synthetic construct
  source 1..19: mol_type = other RNA
atgcctgcaacaatactac

SEQ ID NO: 3173 - RNA, 19 nt, synthetic construct
  source 1..19: mol_type = other RNA
tgcaacaatactacctgtc

SEQ ID NO: 3174 - RNA, 19 nt, synthetic construct
  source 1..19: mol_type = other RNA
tttgagtacaagagagtgg

SEQ ID NO: 3175 - RNA, 19 nt, synthetic construct
  source 1..19: mol_type = other RNA
ctgtggggagtgcgtccag

SEQ ID NO: 3176 - RNA, 19 nt, synthetic construct
  source 1..19: mol_type = other RNA
ggagtgcgtccagaccgcc

SEQ ID NO: 3177 - RNA, 19 nt, synthetic construct
  source 1..19: mol_type = other RNA
ctgcctcacgcccgatggc

SEQ ID NO: 3178 - RNA, 19 nt, synthetic construct
  source 1..19: mol_type = other RNA
ctcacgcccgatggccagc

SEQ ID NO: 3179 - RNA, 19 nt, synthetic construct
  source 1..19: mol_type = other RNA
aatgaaacctgggtcaaca

SEQ ID NO: 3180 - RNA, 19 nt, synthetic construct
  source 1..19: mol_type = other RNA
gacaactgcaccgtgtacc

SEQ ID NO: 3181 - RNA, 19 nt, synthetic construct
  source 1..19: mol_type = other RNA
aactgcaccgtgtacctct

SEQ ID NO: 3182 - RNA, 19 nt, synthetic construct
  source 1..19: mol_type = other RNA
actgcaccgtgtacctctg

SEQ ID NO: 3183 - RNA, 19 nt, synthetic construct
  source 1..19: mol_type = other RNA
ctgagggtggagtccattt

SEQ ID NO: 3184 - RNA, 19 nt, synthetic construct
  source 1..19: mol_type = other RNA
tgagggtggagtccatttg

SEQ ID NO: 3185 - RNA, 19 nt, synthetic construct
  source 1..19: mol_type = other RNA
cctgtcaagtccgcatcaa

SEQ ID NO: 3186 - RNA, 19 nt, synthetic construct
  source 1..19: mol_type = other RNA
ctgtcaagtccgcatcaac

SEQ ID NO: 3187 - RNA, 19 nt, synthetic construct
  source 1..19: mol_type = other RNA
accagggctgcgagaccga

SEQ ID NO: 3188 - RNA, 19 nt, synthetic construct
  source 1..19: mol_type = other RNA
caacatcaccttctgcgag

SEQ ID NO: 3189 - RNA, 19 nt, synthetic construct
  source 1..19: mol_type = other RNA
ctcctgccccggagcgtcc

SEQ ID NO: 3190 - RNA, 19 nt, synthetic construct
  source 1..19: mol_type = other RNA
gcgtccaagtactcagcag

SEQ ID NO: 3191 - RNA, 19 nt, synthetic construct
  source 1..19: mol_type = other RNA
ccaagtactcagcagaggc

SEQ ID NO: 3192 - RNA, 19 nt, synthetic construct
  source 1..19: mol_type = other RNA
gtcctaacggctcagccat

SEQ ID NO: 3193 - RNA, 19 nt, synthetic construct
  source 1..19: mol_type = other RNA
taacggctcagccatcctg

SEQ ID NO: 3194 - RNA, 19 nt, synthetic construct
  source 1..19: mol_type = other RNA
acctacacccacgtggatg

SEQ ID NO: 3195 - RNA, 19 nt, synthetic construct
  source 1..19: mol_type = other RNA
cctacacccacgtggatga

SEQ ID NO: 3196 - RNA, 19 nt, synthetic construct
  source 1..19: mol_type = other RNA
tacacccacgtggatgagt

SEQ ID NO: 3197 - RNA, 19 nt, synthetic construct
  source 1..19: mol_type = other RNA
gcctgtgtgtggcaccccg

SEQ ID NO: 3198 - RNA, 19 nt, synthetic construct
  source 1..19: mol_type = other RNA
gcaggacccctttcgggag

SEQ ID NO: 3199 - RNA, 19 nt, synthetic construct
  source 1..19: mol_type = other RNA
cccctttcgggagggcgcc

SEQ ID NO: 3200 - RNA, 19 nt, synthetic construct
  source 1..19: mol_type = other RNA
cctttcgggagggcgccac

SEQ ID NO: 3201 - RNA, 19 nt, synthetic construct
  source 1..19: mol_type = other RNA
tttcgggagggcgccactc

SEQ ID NO: 3202 - RNA, 19 nt, synthetic construct
  source 1..19: mol_type = other RNA
ctcaggagtcctaccctgg

SEQ ID NO: 3203 - RNA, 19 nt, synthetic construct
  source 1..19: mol_type = other RNA
tatgtgtccctgccacggc

SEQ ID NO: 3204 - RNA, 19 nt, synthetic construct
  source 1..19: mol_type = other RNA
cggattccagctggccacg

SEQ ID NO: 3205 - RNA, 19 nt, synthetic construct
  source 1..19: mol_type = other RNA
ccagctggccacgtccggc

SEQ ID NO: 3206 - RNA, 19 nt, synthetic construct
  source 1..19: mol_type = other RNA
tgcgacaggcaaggcggcc

SEQ ID NO: 3207 - RNA, 19 nt, synthetic construct
  source 1..19: mol_type = other RNA
gacaggcaaggcggccgcc

SEQ ID NO: 3208 - RNA, 19 nt, synthetic construct
  source 1..19: mol_type = other RNA
agggtaactcagggctgag

SEQ ID NO: 3209 - RNA, 19 nt, synthetic construct
  source 1..19: mol_type = other RNA
ccacatgtgagcaccacgg

SEQ ID NO: 3210 - RNA, 19 nt, synthetic construct
  source 1..19: mol_type = other RNA
ccacatgtgagcaccacgg

SEQ ID NO: 3211 - RNA, 19 nt, synthetic construct
  source 1..19: mol_type = other RNA
ccacatgtgagcaccacgg

SEQ ID NO: 3212 - RNA, 19 nt, synthetic construct
  source 1..19: mol_type = other RNA
cctacaagatacgctacat

SEQ ID NO: 3213 - RNA, 19 nt, synthetic construct
  source 1..19: mol_type = other RNA
gtcacgactacgagctgcg

SEQ ID NO: 3214 - RNA, 19 nt, synthetic construct
  source 1..19: mol_type = other RNA
caaccgaaaagaccaccct

SEQ ID NO: 3215 - RNA, 19 nt, synthetic construct
  source 1..19: mol_type = other RNA
cacggccactacgatcaca

SEQ ID NO: 3216 - RNA, 19 nt, synthetic construct
  source 1..19: mol_type = other RNA
ctgtctgagaacgttctgc

SEQ ID NO: 3217 - RNA, 19 nt, synthetic construct
  source 1..19: mol_type = other RNA
tctgtcacgactacgagct

SEQ ID NO: 3218 - RNA, 19 nt, synthetic construct
  source 1..19: mol_type = other RNA
gctgacattcctgtggaac

SEQ ID NO: 3219 - RNA, 19 nt, synthetic construct
  source 1..19: mol_type = other RNA
caggacccctttcgggagg

SEQ ID NO: 3220 - RNA, 19 nt, synthetic construct
  source 1..19: mol_type = other RNA
gcccgcgcagcacggattc

SEQ ID NO: 3221 - RNA, 19 nt, synthetic construct
  source 1..19: mol_type = other RNA
ccgcgcagcacggattcca

SEQ ID NO: 3222 - RNA, 19 nt, synthetic construct
  source 1..19: mol_type = other RNA
gctgaggtcgcaacggcca

SEQ ID NO: 3223 - RNA, 19 nt, synthetic construct
  source 1..19: mol_type = other RNA
cgcccgcgcagcacggatt

SEQ ID NO: 3224 - RNA, 19 nt, synthetic construct
  source 1..19: mol_type = other RNA
cccctgcgtgggacccgat

SEQ ID NO: 3225 - RNA, 19 nt, synthetic construct
  source 1..19: mol_type = other RNA
accacacacgggcgatccc

SEQ ID NO: 3226 - RNA, 19 nt, synthetic construct
  source 1..19: mol_type = other RNA
accacacacgggcgatccc

SEQ ID NO: 3227 - RNA, 19 nt, synthetic construct
  source 1..19: mol_type = other RNA
accacacacgggcgatccc

SEQ ID NO: 3228 - RNA, 19 nt, synthetic construct
  source 1..19: mol_type = other RNA
tccagagctcgcccgacag

SEQ ID NO: 3229 - RNA, 19 nt, synthetic construct
  source 1..19: mol_type = other RNA
acccagcactcgactccag

SEQ ID NO: 3230 - RNA, 19 nt, synthetic construct
  source 1..19: mol_type = other RNA
cggtgcccaccggatccac

SEQ ID NO: 3231 - RNA, 19 nt, synthetic construct
  source 1..19: mol_type = other RNA
acacacgggcgatccctgt

SEQ ID NO: 3232 - RNA, 19 nt, synthetic construct
  source 1..19: mol_type = other RNA
acccagcactcgactccag

SEQ ID NO: 3233 - RNA, 19 nt, synthetic construct
  source 1..19: mol_type = other RNA
cggtgcccaccggatccac

SEQ ID NO: 3234 - RNA, 19 nt, synthetic construct
  source 1..19: mol_type = other RNA
cacacacgggcgatccctg

SEQ ID NO: 3235 - RNA, 19 nt, synthetic construct
  source 1..19: mol_type = other RNA
cacacacgggcgatccctg

SEQ ID NO: 3236 - RNA, 19 nt, synthetic construct
  source 1..19: mol_type = other RNA
cacttgccgcggcctgagt

SEQ ID NO: 3237 - RNA, 19 nt, synthetic construct
  source 1..19: mol_type = other RNA
acagagacgacaatgagcc

SEQ ID NO: 3238 - RNA, 19 nt, synthetic construct
  source 1..19: mol_type = other RNA
aactaccacaaccacgggc

SEQ ID NO: 3239 - RNA, 19 nt, synthetic construct
  source 1..19: mol_type = other RNA
gactaccacaaccacgggc

SEQ ID NO: 3240 - RNA, 19 nt, synthetic construct
  source 1..19: mol_type = other RNA
aaagtgccgactaccacaa

SEQ ID NO: 3241 - RNA, 19 nt, synthetic construct
  source 1..19: mol_type = other RNA
gactaccacaaccacgggc

SEQ ID NO: 3242 - RNA, 19 nt, synthetic construct
  source 1..19: mol_type = other RNA
aaagtgccgactaccacaa

SEQ ID NO: 3243 - RNA, 19 nt, synthetic construct
  source 1..19: mol_type = other RNA
gactaccacaaccacgggc

SEQ ID NO: 3244 - RNA, 19 nt, synthetic construct
  source 1..19: mol_type = other RNA
aaagtgccgactaccacaa

SEQ ID NO: 3245 - RNA, 19 nt, synthetic construct
  source 1..19: mol_type = other RNA
gactaccacaaccacgggc

SEQ ID NO: 3246 - RNA, 19 nt, synthetic construct
  source 1..19: mol_type = other RNA
tgtacaagccatgcggccc

SEQ ID NO: 3247 - RNA, 19 nt, synthetic construct
  source 1..19: mol_type = other RNA
ccagggctgcgagaccgag

SEQ ID NO: 3248 - RNA, 19 nt, synthetic construct
  source 1..19: mol_type = other RNA
agcacggattccagctggc

SEQ ID NO: 3249 - RNA, 19 nt, synthetic construct
  source 1..19: mol_type = other RNA
acggcctcccggccttcaa

SEQ ID NO: 3250 - RNA, 19 nt, synthetic construct
  source 1..19: mol_type = other RNA
caggacctacagctaccag

SEQ ID NO: 3251 - RNA, 19 nt, synthetic construct
  source 1..19: mol_type = other RNA
cttcaagatgtgctacaac

SEQ ID NO: 3252 - RNA, 19 nt, synthetic construct
  source 1..19: mol_type = other RNA
acgacaatgagccccttga

SEQ ID NO: 3253 - RNA, 19 nt, synthetic construct
  source 1..19: mol_type = other RNA
caactaccacaaccacggg

SEQ ID NO: 3254 - RNA, 19 nt, synthetic construct
  source 1..19: mol_type = other RNA
catccccccagtgctgacc

SEQ ID NO: 3255 - RNA, 19 nt, synthetic construct
  source 1..19: mol_type = other RNA
ccacacacgggcgatccct

SEQ ID NO: 3256 - RNA, 19 nt, synthetic construct
  source 1..19: mol_type = other RNA
acacggtgcgcacagcctg

SEQ ID NO: 3257 - RNA, 19 nt, synthetic construct
  source 1..19: mol_type = other RNA
tatccccccagtgctgacc

SEQ ID NO: 3258 - RNA, 19 nt, synthetic construct
  source 1..19: mol_type = other RNA
ccacacacgggcgatccct

SEQ ID NO: 3259 - RNA, 19 nt, synthetic construct
  source 1..19: mol_type = other RNA
acacggtgcgcacagcctg

SEQ ID NO: 3260 - RNA, 19 nt, synthetic construct
  source 1..19: mol_type = other RNA
ttccacggggacttcccac

SEQ ID NO: 3261 - RNA, 19 nt, synthetic construct
  source 1..19: mol_type = other RNA
cagtccaaggactgcaacc

SEQ ID NO: 3262 - RNA, 19 nt, synthetic construct
  source 1..19: mol_type = other RNA
ctttacacccatcccctcc

SEQ ID NO: 3263 - RNA, 19 nt, synthetic construct
  source 1..19: mol_type = other RNA
cacccttgggaccaccggg

SEQ ID NO: 3264 - RNA, 19 nt, synthetic construct
  source 1..19: mol_type = other RNA
catccccccagtgctgacc

SEQ ID NO: 3265 - RNA, 19 nt, synthetic construct
  source 1..19: mol_type = other RNA
accacacacgggcggtccc

SEQ ID NO: 3266 - RNA, 19 nt, synthetic construct
  source 1..19: mol_type = other RNA
acacggtgcgcacagcctg

SEQ ID NO: 3267 - RNA, 19 nt, synthetic construct
  source 1..19: mol_type = other RNA
tatccccccagtgctgacc

SEQ ID NO: 3268 - RNA, 19 nt, synthetic construct
  source 1..19: mol_type = other RNA
ccacacacgggcgatccct

SEQ ID NO: 3269 - RNA, 19 nt, synthetic construct
  source 1..19: mol_type = other RNA
acacggtgcgcacagcctg

SEQ ID NO: 3270 - RNA, 19 nt, synthetic construct
  source 1..19: mol_type = other RNA
ttccacggggacttcccac

SEQ ID NO: 3271 - RNA, 19 nt, synthetic construct
  source 1..19: mol_type = other RNA
cagtccaaggactgcaacc

SEQ ID NO: 3272 - RNA, 19 nt, synthetic construct
  source 1..19: mol_type = other RNA
cacccttgggaccaccggg

SEQ ID NO: 3273 - RNA, 19 nt, synthetic construct
  source 1..19: mol_type = other RNA
aactccagggacaacaccc

SEQ ID NO: 3274 - RNA, 19 nt, synthetic construct
  source 1..19: mol_type = other RNA
cagtccaaggactgcaacc

SEQ ID NO: 3275 - RNA, 19 nt, synthetic construct
  source 1..19: mol_type = other RNA
ctttacacccatcccctcc

SEQ ID NO: 3276 - RNA, 19 nt, synthetic construct
  source 1..19: mol_type = other RNA
ggagggcctgatcctgttt

SEQ ID NO: 3277 - RNA, 19 nt, synthetic construct
  source 1..19: mol_type = other RNA
cgcctgcatcagcgaccac

SEQ ID NO: 3278 - RNA, 19 nt, synthetic construct
  source 1..19: mol_type = other RNA
ctgcaggggccgccttgag

SEQ ID NO: 3279 - RNA, 19 nt, synthetic construct
  source 1..19: mol_type = other RNA
ccatgcggccccatacagc

SEQ ID NO: 3280 - RNA, 19 nt, synthetic construct
  source 1..19: mol_type = other RNA
tgccacctgcaactctagg

SEQ ID NO: 3281 - RNA, 19 nt, synthetic construct
  source 1..19: mol_type = other RNA
cacacatgggcatctgcgt

SEQ ID NO: 3282 - RNA, 19 nt, synthetic construct
  source 1..19: mol_type = other RNA
tcccggggagcggtgggtc

SEQ ID NO: 3283 - RNA, 19 nt, synthetic construct
  source 1..19: mol_type = other RNA
cggcttcgtaaccgtgacc

SEQ ID NO: 3284 - RNA, 19 nt, synthetic construct
  source 1..19: mol_type = other RNA
agggtggagtccatttgct

SEQ ID NO: 3285 - RNA, 19 nt, synthetic construct
  source 1..19: mol_type = other RNA
caccagggctgcgagaccg

SEQ ID NO: 3286 - RNA, 19 nt, synthetic construct
  source 1..19: mol_type = other RNA
cgcaacggccaggtcagag

SEQ ID NO: 3287 - RNA, 19 nt, synthetic construct
  source 1..19: mol_type = other RNA
acccagcactcgactccag

SEQ ID NO: 3288 - RNA, 19 nt, synthetic construct
  source 1..19: mol_type = other RNA
cggtgcccaccggatccac

SEQ ID NO: 3289 - RNA, 19 nt, synthetic construct
  source 1..19: mol_type = other RNA
acacacgggcgatccctgt

SEQ ID NO: 3290 - RNA, 19 nt, synthetic construct
  source 1..19: mol_type = other RNA
acccagcactcgactccag

SEQ ID NO: 3291 - RNA, 19 nt, synthetic construct
  source 1..19: mol_type = other RNA
ggacgccctggaacaaact

SEQ ID NO: 3292 - RNA, 19 nt, synthetic construct
  source 1..19: mol_type = other RNA
ctacgccgaggcctagtgg

SEQ ID NO: 3293 - RNA, 19 nt, synthetic construct
  source 1..19: mol_type = other RNA
tggtacaatgggcaccgcc

SEQ ID NO: 3294 - RNA, 19 nt, synthetic construct
  source 1..19: mol_type = other RNA
cggtgcccaccggatccac

SEQ ID NO: 3295 - RNA, 19 nt, synthetic construct
  source 1..19: mol_type = other RNA
tggaccacgtggaccgtcc

SEQ ID NO: 3296 - RNA, 19 nt, synthetic construct
  source 1..19: mol_type = other RNA
ccacgagcctggcgccaac

SEQ ID NO: 3297 - RNA, 19 nt, synthetic construct
  source 1..19: mol_type = other RNA
ggtgaaaccggccccagaa

SEQ ID NO: 3298 - RNA, 19 nt, synthetic construct
  source 1..19: mol_type = other RNA
ccgcctatcacagaccacc

SEQ ID NO: 3299 - RNA, 19 nt, synthetic construct
  source 1..19: mol_type = other RNA
ccgcctatcacagaccacc

SEQ ID NO: 3300 - RNA, 19 nt, synthetic construct
  source 1..19: mol_type = other RNA
ccgcctatcacagaccacc

SEQ ID NO: 3301 - RNA, 19 nt, synthetic construct
  source 1..19: mol_type = other RNA
ccgcctatcacagaccacc

SEQ ID NO: 3302 - RNA, 19 nt, synthetic construct
  source 1..19: mol_type = other RNA
ccgcctatcacagaccacc

SEQ ID NO: 3303 - RNA, 19 nt, synthetic construct
  source 1..19: mol_type = other RNA
ttccctgccacatgtgtac

SEQ ID NO: 3304 - RNA, 19 nt, synthetic construct
  source 1..19: mol_type = other RNA
tttcctaaatttcccgggg

SEQ ID NO: 3305 - RNA, 19 nt, synthetic construct
  source 1..19: mol_type = other RNA
ggcggggactttgacacct

SEQ ID NO: 3306 - RNA, 19 nt, synthetic construct
  source 1..19: mol_type = other RNA
ggcggggactttgacacct

SEQ ID NO: 3307 - RNA, 19 nt, synthetic construct
  source 1..19: mol_type = other RNA
ggcggggactttgacacct

SEQ ID NO: 3308 - RNA, 19 nt, synthetic construct
  source 1..19: mol_type = other RNA
ggcggggactttgacacct

SEQ ID NO: 3309 - RNA, 19 nt, synthetic construct
  source 1..19: mol_type = other RNA
cgaccactgcaggggacgt

SEQ ID NO: 3310 - RNA, 19 nt, synthetic construct
  source 1..19: mol_type = other RNA
cacctccacagtgcttacc

SEQ ID NO: 3311 - RNA, 19 nt, synthetic construct
  source 1..19: mol_type = other RNA
cacctccacagtgcttacc

SEQ ID NO: 3312 - RNA, 19 nt, synthetic construct
  source 1..19: mol_type = other RNA
aagagccgctgaccacgag

SEQ ID NO: 3313 - RNA, 19 nt, synthetic construct
  source 1..19: mol_type = other RNA
atgtgtccctgccacggcc

SEQ ID NO: 3314 - RNA, 19 nt, synthetic construct
  source 1..19: mol_type = other RNA
ctgcgagaccgaggtcaac

SEQ ID NO: 3315 - RNA, 19 nt, synthetic construct
  source 1..19: mol_type = other RNA
tcatcgagacccacgggat

SEQ ID NO: 3316 - RNA, 19 nt, synthetic construct
  source 1..19: mol_type = other RNA
tgtgctggctgacatcgag

SEQ ID NO: 3317 - RNA, 19 nt, synthetic construct
  source 1..19: mol_type = other RNA
cacccttccaacacgctca

SEQ ID NO: 3318 - RNA, 19 nt, synthetic construct
  source 1..19: mol_type = other RNA
acacctccacagtgcttac

SEQ ID NO: 3319 - RNA, 19 nt, synthetic construct
  source 1..19: mol_type = other RNA
ggccctctggcggggactt

SEQ ID NO: 3320 - RNA, 19 nt, synthetic construct
  source 1..19: mol_type = other RNA
acacctccacagtgcttac

SEQ ID NO: 3321 - RNA, 19 nt, synthetic construct
  source 1..19: mol_type = other RNA
ggccctctggcggggactt

SEQ ID NO: 3322 - RNA, 19 nt, synthetic construct
  source 1..19: mol_type = other RNA
acacctccacagtgcttac

SEQ ID NO: 3323 - RNA, 19 nt, synthetic construct
  source 1..19: mol_type = other RNA
ggccctctggcggggactt

SEQ ID NO: 3324 - RNA, 19 nt, synthetic construct
  source 1..19: mol_type = other RNA
ggacccaccctacaagata

SEQ ID NO: 3325 - RNA, 19 nt, synthetic construct
  source 1..19: mol_type = other RNA
gggactgcaaccgcccttc

SEQ ID NO: 3326 - RNA, 19 nt, synthetic construct
  source 1..19: mol_type = other RNA
cgggcgatccctgcccccc

SEQ ID NO: 3327 - RNA, 19 nt, synthetic construct
  source 1..19: mol_type = other RNA
ccaccgagtcacccccttc

SEQ ID NO: 3328 - RNA, 19 nt, synthetic construct
  source 1..19: mol_type = other RNA
gggactgcaaccgcccttc

SEQ ID NO: 3329 - RNA, 19 nt, synthetic construct
  source 1..19: mol_type = other RNA
aggaccaccgagtcacccc

SEQ ID NO: 3330 - RNA, 19 nt, synthetic construct
  source 1..19: mol_type = other RNA
ccaccgagtcacccccttc

SEQ ID NO: 3331 - RNA, 19 nt, synthetic construct
  source 1..19: mol_type = other RNA
gggactgcaaccgcccttc

SEQ ID NO: 3332 - RNA, 19 nt, synthetic construct
  source 1..19: mol_type = other RNA
aggaccaccgagtcacccc

SEQ ID NO: 3333 - RNA, 19 nt, synthetic construct
  source 1..19: mol_type = other RNA
ccaccgagtcacccccttc

SEQ ID NO: 3334 - RNA, 19 nt, synthetic construct
  source 1..19: mol_type = other RNA
gggactgcaaccgcccttc

SEQ ID NO: 3335 - RNA, 19 nt, synthetic construct
  source 1..19: mol_type = other RNA
aggaccaccgagtcacccc

SEQ ID NO: 3336 - RNA, 19 nt, synthetic construct
  source 1..19: mol_type = other RNA
cccaccggttccacggcca

SEQ ID NO: 3337 - RNA, 19 nt, synthetic construct
  source 1..19: mol_type = other RNA
gaagctgcgacaggcaagg

SEQ ID NO: 3338 - RNA, 19 nt, synthetic construct
  source 1..19: mol_type = other RNA
accatggatggcggtgccc

SEQ ID NO: 3339 - RNA, 19 nt, synthetic construct
  source 1..19: mol_type = other RNA
gcgggggctgatgtgcgcc

SEQ ID NO: 3340 - RNA, 19 nt, synthetic construct
  source 1..19: mol_type = other RNA
taccagcgttacacccatc

SEQ ID NO: 3341 - RNA, 19 nt, synthetic construct
  source 1..19: mol_type = other RNA
caggaccaccgagtcaccc

SEQ ID NO: 3342 - RNA, 19 nt, synthetic construct
  source 1..19: mol_type = other RNA
caggaccaccgagtcaccc

SEQ ID NO: 3343 - RNA, 19 nt, synthetic construct
  source 1..19: mol_type = other RNA
caggaccaccgagtcaccc

SEQ ID NO: 3344 - RNA, 19 nt, synthetic construct
  source 1..19: mol_type = other RNA
taccagcgttacacccatc

SEQ ID NO: 3345 - RNA, 19 nt, synthetic construct
  source 1..19: mol_type = other RNA
ccgcgccctcagcatccac

SEQ ID NO: 3346 - RNA, 19 nt, synthetic construct
  source 1..19: mol_type = other RNA
aggtgcaaccggtggcctg

SEQ ID NO: 3347 - RNA, 19 nt, synthetic construct
  source 1..19: mol_type = other RNA
agcgcgtgccggacgctgg

SEQ ID NO: 3348 - RNA, 19 nt, synthetic construct
  source 1..19: mol_type = other RNA
ggcaactgcacggacgagg

SEQ ID NO: 3349 - RNA, 19 nt, synthetic construct
  source 1..19: mol_type = other RNA
tccacctatgatgagaaac

SEQ ID NO: 3350 - RNA, 19 nt, synthetic construct
  source 1..19: mol_type = other RNA
ccacctatgatgagaaact

SEQ ID NO: 3351 - RNA, 19 nt, synthetic construct
  source 1..19: mol_type = other RNA
cagcttcaccgtgctggct

SEQ ID NO: 3352 - RNA, 19 nt, synthetic construct
  source 1..19: mol_type = other RNA
ccactcatgcaggtgtttg

SEQ ID NO: 3353 - RNA, 19 nt, synthetic construct
  source 1..19: mol_type = other RNA
ctgtgtgcccgcccaggag

SEQ ID NO: 3354 - RNA, 19 nt, synthetic construct
  source 1..19: mol_type = other RNA
tgggggctgcattgccgag

SEQ ID NO: 3355 - RNA, 19 nt, synthetic construct
  source 1..19: mol_type = other RNA
ggaaccggaggtgggagtg

SEQ ID NO: 3356 - RNA, 19 nt, synthetic construct
  source 1..19: mol_type = other RNA
tcctggtcatcgagaccca

SEQ ID NO: 3357 - RNA, 19 nt, synthetic construct
  source 1..19: mol_type = other RNA
ctcgggtggcgactgcgag

SEQ ID NO: 3358 - RNA, 19 nt, synthetic construct
  source 1..19: mol_type = other RNA
cacccagtggcatccagtg

SEQ ID NO: 3359 - RNA, 19 nt, synthetic construct
  source 1..19: mol_type = other RNA
cagctaccaggacgtcatc

SEQ ID NO: 3360 - RNA, 19 nt, synthetic construct
  source 1..19: mol_type = other RNA
gatgggcttggcgcctgct

SEQ ID NO: 3361 - RNA, 19 nt, synthetic construct
  source 1..19: mol_type = other RNA
tctcagaaggactgacatc

SEQ ID NO: 3362 - RNA, 19 nt, synthetic construct
  source 1..19: mol_type = other RNA
cagggacgacggggagctt

SEQ ID NO: 3363 - RNA, 19 nt, synthetic construct
  source 1..19: mol_type = other RNA
ccatcccggggaccaccca

SEQ ID NO: 3364 - RNA, 19 nt, synthetic construct
  source 1..19: mol_type = other RNA
cccacaccctagcagcaac

SEQ ID NO: 3365 - RNA, 19 nt, synthetic construct
  source 1..19: mol_type = other RNA
caccccgggccacaccacg

SEQ ID NO: 3366 - RNA, 19 nt, synthetic construct
  source 1..19: mol_type = other RNA
cacctccacagtgcttacc

SEQ ID NO: 3367 - RNA, 19 nt, synthetic construct
  source 1..19: mol_type = other RNA
ccatcccggggaccaccca

SEQ ID NO: 3368 - RNA, 19 nt, synthetic construct
  source 1..19: mol_type = other RNA
tccactccagggacgacct

SEQ ID NO: 3369 - RNA, 19 nt, synthetic construct
  source 1..19: mol_type = other RNA
accagctttacacccatcc

SEQ ID NO: 3370 - RNA, 19 nt, synthetic construct
  source 1..19: mol_type = other RNA
cacctccacagtgcttacc

SEQ ID NO: 3371 - RNA, 19 nt, synthetic construct
  source 1..19: mol_type = other RNA
ccatcccggggaccaccca

SEQ ID NO: 3372 - RNA, 19 nt, synthetic construct
  source 1..19: mol_type = other RNA
ccgtgcggccggaggggca

SEQ ID NO: 3373 - RNA, 19 nt, synthetic construct
  source 1..19: mol_type = other RNA
cacctccacagtgcttacc

SEQ ID NO: 3374 - RNA, 19 nt, synthetic construct
  source 1..19: mol_type = other RNA
caccccgggccacaccacg

SEQ ID NO: 3375 - RNA, 19 nt, synthetic construct
  source 1..19: mol_type = other RNA
ccatcccggggaccaccca

SEQ ID NO: 3376 - RNA, 19 nt, synthetic construct
  source 1..19: mol_type = other RNA
accagctttacacccatcc

SEQ ID NO: 3377 - RNA, 19 nt, synthetic construct
  source 1..19: mol_type = other RNA
aatccacacctcctctact

SEQ ID NO: 3378 - RNA, 19 nt, synthetic construct
  source 1..19: mol_type = other RNA
atccacacctcctctactc

SEQ ID NO: 3379 - RNA, 19 nt, synthetic construct
  source 1..19: mol_type = other RNA
caagggccaccaattccac

SEQ ID NO: 3380 - RNA, 19 nt, synthetic construct
  source 1..19: mol_type = other RNA
cactgccgccagttgcaag

SEQ ID NO: 3381 - RNA, 19 nt, synthetic construct
  source 1..19: mol_type = other RNA
gtgtctagcacacccaccc

SEQ ID NO: 3382 - RNA, 19 nt, synthetic construct
  source 1..19: mol_type = other RNA
cgaggtgcaaccggtggcc

SEQ ID NO: 3383 - RNA, 19 nt, synthetic construct
  source 1..19: mol_type = other RNA
atttcccggggagcggtgg

SEQ ID NO: 3384 - RNA, 19 nt, synthetic construct
  source 1..19: mol_type = other RNA
ggtcagcaactgccagtcc

SEQ ID NO: 3385 - RNA, 19 nt, synthetic construct
  source 1..19: mol_type = other RNA
agtcctgcgtgtgtgacga

SEQ ID NO: 3386 - RNA, 19 nt, synthetic construct
  source 1..19: mol_type = other RNA
ccttccgctgcagacctca

SEQ ID NO: 3387 - RNA, 19 nt, synthetic construct
  source 1..19: mol_type = other RNA
cagccagtccagctgaatg

SEQ ID NO: 3388 - RNA, 19 nt, synthetic construct
  source 1..19: mol_type = other RNA
acccctttcgggagggcgc

SEQ ID NO: 3389 - RNA, 19 nt, synthetic construct
  source 1..19: mol_type = other RNA
tgacattcctgtggaacgg

SEQ ID NO: 3390 - RNA, 19 nt, synthetic construct
  source 1..19: mol_type = other RNA
aaccggtggcctgtgcgac

SEQ ID NO: 3391 - RNA, 19 nt, synthetic construct
  source 1..19: mol_type = other RNA
acacctccacagtgcttac

SEQ ID NO: 3392 - RNA, 19 nt, synthetic construct
  source 1..19: mol_type = other RNA
ggccctctggcggggactt

SEQ ID NO: 3393 - RNA, 19 nt, synthetic construct
  source 1..19: mol_type = other RNA
acacctccacagtgcttac

SEQ ID NO: 3394 - RNA, 19 nt, synthetic construct
  source 1..19: mol_type = other RNA
ccacgtggaccgtcccagc

SEQ ID NO: 3395 - RNA, 19 nt, synthetic construct
  source 1..19: mol_type = other RNA
ggtttcctaaatttcccgg

SEQ ID NO: 3396 - RNA, 19 nt, synthetic construct
  source 1..19: mol_type = other RNA
acacagaccagtggtactc

SEQ ID NO: 3397 - RNA, 19 nt, synthetic construct
  source 1..19: mol_type = other RNA
acacagaccagtggtactc

SEQ ID NO: 3398 - RNA, 19 nt, synthetic construct
  source 1..19: mol_type = other RNA
acacagaccagtggtactc

SEQ ID NO: 3399 - RNA, 19 nt, synthetic construct
  source 1..19: mol_type = other RNA
acacagaccagtggtactc

SEQ ID NO: 3400 - RNA, 19 nt, synthetic construct
  source 1..19: mol_type = other RNA
acacagaccagtggtactc

SEQ ID NO: 3401 - RNA, 19 nt, synthetic construct
  source 1..19: mol_type = other RNA
cctgcgtgggacccgatgg

SEQ ID NO: 3402 - RNA, 19 nt, synthetic construct
  source 1..19: mol_type = other RNA
ggctccgtcctcatcaatg

SEQ ID NO: 3403 - RNA, 19 nt, synthetic construct
  source 1..19: mol_type = other RNA
cactgctgtctgagaacgt

SEQ ID NO: 3404 - RNA, 19 nt, synthetic construct
  source 1..19: mol_type = other RNA
cacggccatccgggtccaa

SEQ ID NO: 3405 - RNA, 19 nt, synthetic construct
  source 1..19: mol_type = other RNA
gcgggaacttcgacgacaa

SEQ ID NO: 3406 - RNA, 19 nt, synthetic construct
  source 1..19: mol_type = other RNA
cactgcaggggacgtgcca

SEQ ID NO: 3407 - RNA, 19 nt, synthetic construct
  source 1..19: mol_type = other RNA
tcggcccccataaccacgg

SEQ ID NO: 3408 - RNA, 19 nt, synthetic construct
  source 1..19: mol_type = other RNA
tcggcccccataaccacgg

SEQ ID NO: 3409 - RNA, 19 nt, synthetic construct
  source 1..19: mol_type = other RNA
tcggcccccataaccacgg

SEQ ID NO: 3410 - RNA, 19 nt, synthetic construct
  source 1..19: mol_type = other RNA
ggccggcaactgcacggac

SEQ ID NO: 3411 - RNA, 19 nt, synthetic construct
  source 1..19: mol_type = other RNA
gggaacttcgacgacaatg

SEQ ID NO: 3412 - RNA, 19 nt, synthetic construct
  source 1..19: mol_type = other RNA
aaccactggatccacggcc

SEQ ID NO: 3413 - RNA, 19 nt, synthetic construct
  source 1..19: mol_type = other RNA
gagctgtaactgcacaccc

SEQ ID NO: 3414 - RNA, 19 nt, synthetic construct
  source 1..19: mol_type = other RNA
gtccactggatccacggcc

SEQ ID NO: 3415 - RNA, 19 nt, synthetic construct
  source 1..19: mol_type = other RNA
cccctgggcctcgagtgcc

SEQ ID NO: 3416 - RNA, 19 nt, synthetic construct
  source 1..19: mol_type = other RNA
gtccactggatccacggcc

SEQ ID NO: 3417 - RNA, 19 nt, synthetic construct
  source 1..19: mol_type = other RNA
acaaccagaggttccacgg

SEQ ID NO: 3418 - RNA, 19 nt, synthetic construct
  source 1..19: mol_type = other RNA
cccaataaccacggtggtg

SEQ ID NO: 3419 - RNA, 19 nt, synthetic construct
  source 1..19: mol_type = other RNA
cccctgggcctcgagtgcc

SEQ ID NO: 3420 - RNA, 19 nt, synthetic construct
  source 1..19: mol_type = other RNA
cccctgggcctcgagtgcc

SEQ ID NO: 3421 - RNA, 19 nt, synthetic construct
  source 1..19: mol_type = other RNA
gtccactggatccacggcc

SEQ ID NO: 3422 - RNA, 19 nt, synthetic construct
  source 1..19: mol_type = other RNA
cgggaacttcgacgacaat

SEQ ID NO: 3423 - RNA, 19 nt, synthetic construct
  source 1..19: mol_type = other RNA
ccggccggcaactgcacgg

SEQ ID NO: 3424 - RNA, 19 nt, synthetic construct
  source 1..19: mol_type = other RNA
ttaaggcggtggcgagagg

SEQ ID NO: 3425 - RNA, 19 nt, synthetic construct
  source 1..19: mol_type = other RNA
gccccgtgacggtcacccc

SEQ ID NO: 3426 - RNA, 19 nt, synthetic construct
  source 1..19: mol_type = other RNA
tgtgttcgtacaatggcac

SEQ ID NO: 3427 - RNA, 19 nt, synthetic construct
  source 1..19: mol_type = other RNA
cacgcactggtggacagca

SEQ ID NO: 3428 - RNA, 19 nt, synthetic construct
  source 1..19: mol_type = other RNA
tcttcaacgcacacatggg

SEQ ID NO: 3429 - RNA, 19 nt, synthetic construct
  source 1..19: mol_type = other RNA
gcattgccgaggaggactg

SEQ ID NO: 3430 - RNA, 19 nt, synthetic construct
  source 1..19: mol_type = other RNA
acgggcgatccctgtcccc

SEQ ID NO: 3431 - RNA, 19 nt, synthetic construct
  source 1..19: mol_type = other RNA
acgggcgatccctgtcccc

SEQ ID NO: 3432 - RNA, 19 nt, synthetic construct
  source 1..19: mol_type = other RNA
gagtcctaccctgggagag

SEQ ID NO: 3433 - RNA, 19 nt, synthetic construct
  source 1..19: mol_type = other RNA
caccatggatggcggtgcc

SEQ ID NO: 3434 - RNA, 19 nt, synthetic construct
  source 1..19: mol_type = other RNA
gccccgacgtcctcgccca

SEQ ID NO: 3435 - RNA, 19 nt, synthetic construct
  source 1..19: mol_type = other RNA
gcactgcgtacctggccgc

SEQ ID NO: 3436 - RNA, 19 nt, synthetic construct
  source 1..19: mol_type = other RNA
gccagccgcggaactggag

SEQ ID NO: 3437 - RNA, 19 nt, synthetic construct
  source 1..19: mol_type = other RNA
caagcggacggcggcgtgt

SEQ ID NO: 3438 - RNA, 19 nt, synthetic construct
  source 1..19: mol_type = other RNA
acgacttcacggccctcag

SEQ ID NO: 3439 - RNA, 19 nt, synthetic construct
  source 1..19: mol_type = other RNA
tgaccgatcccaacagtgc

SEQ ID NO: 3440 - RNA, 19 nt, synthetic construct
  source 1..19: mol_type = other RNA
tgggaagctaagctgcctg

SEQ ID NO: 3441 - RNA, 19 nt, synthetic construct
  source 1..19: mol_type = other RNA
tgtgcacaacgaggccacc

SEQ ID NO: 3442 - RNA, 19 nt, synthetic construct
  source 1..19: mol_type = other RNA
ggacaggacctacagctac

SEQ ID NO: 3443 - RNA, 19 nt, synthetic construct
  source 1..19: mol_type = other RNA
cagccacaacgccattcac

SEQ ID NO: 3444 - RNA, 19 nt, synthetic construct
  source 1..19: mol_type = other RNA
ccacaccctagcagcaacc

SEQ ID NO: 3445 - RNA, 19 nt, synthetic construct
  source 1..19: mol_type = other RNA
ttgacacctactccaacat

SEQ ID NO: 3446 - RNA, 19 nt, synthetic construct
  source 1..19: mol_type = other RNA
ttgacacctactccaacat

SEQ ID NO: 3447 - RNA, 19 nt, synthetic construct
  source 1..19: mol_type = other RNA
ttgacacctactccaacat

SEQ ID NO: 3448 - RNA, 19 nt, synthetic construct
  source 1..19: mol_type = other RNA
ttgacacctactccaacat

SEQ ID NO: 3449 - RNA, 19 nt, synthetic construct
  source 1..19: mol_type = other RNA
ccccgactggcacaccccc

SEQ ID NO: 3450 - RNA, 19 nt, synthetic construct
  source 1..19: mol_type = other RNA
gaggcttacgcagagctct

SEQ ID NO: 3451 - RNA, 19 nt, synthetic construct
  source 1..19: mol_type = other RNA
cccgagacggtgtgcgtgt

SEQ ID NO: 3452 - RNA, 19 nt, synthetic construct
  source 1..19: mol_type = other RNA
cacccacgtggatgagtgt

SEQ ID NO: 3453 - RNA, 19 nt, synthetic construct
  source 1..19: mol_type = other RNA
cccgagcgcgtgccggacg

SEQ ID NO: 3454 - RNA, 19 nt, synthetic construct
  source 1..19: mol_type = other RNA
acaccatggatggcggtgc

SEQ ID NO: 3455 - RNA, 19 nt, synthetic construct
  source 1..19: mol_type = other RNA
gcacctggggtgacttcca

SEQ ID NO: 3456 - RNA, 19 nt, synthetic construct
  source 1..19: mol_type = other RNA
gtccaacggctccgtcctc

SEQ ID NO: 3457 - RNA, 19 nt, synthetic construct
  source 1..19: mol_type = other RNA
catccggctggtgctgaca

SEQ ID NO: 3458 - RNA, 19 nt, synthetic construct
  source 1..19: mol_type = other RNA
ccagccgcggaactggagg

SEQ ID NO: 3459 - RNA, 19 nt, synthetic construct
  source 1..19: mol_type = other RNA
agccgcggaactggaggtg

SEQ ID NO: 3460 - RNA, 19 nt, synthetic construct
  source 1..19: mol_type = other RNA
cctacagcccgggcacctc

SEQ ID NO: 3461 - RNA, 19 nt, synthetic construct
  source 1..19: mol_type = other RNA
cttcatcgtggtgcagaca

SEQ ID NO: 3462 - RNA, 19 nt, synthetic construct
  source 1..19: mol_type = other RNA
tgcctgtgccaatgccagg

SEQ ID NO: 3463 - RNA, 19 nt, synthetic construct
  source 1..19: mol_type = other RNA
gcctgtgccaatgccagga

SEQ ID NO: 3464 - RNA, 19 nt, synthetic construct
  source 1..19: mol_type = other RNA
gctacgagctgatcctcca

SEQ ID NO: 3465 - RNA, 19 nt, synthetic construct
  source 1..19: mol_type = other RNA
aagaccagcgtgttcatcc

SEQ ID NO: 3466 - RNA, 19 nt, synthetic construct
  source 1..19: mol_type = other RNA
gcgtgtgcctgcgactcgg

SEQ ID NO: 3467 - RNA, 19 nt, synthetic construct
  source 1..19: mol_type = other RNA
tggcgactgcgagtgtttc

SEQ ID NO: 3468 - RNA, 19 nt, synthetic construct
  source 1..19: mol_type = other RNA
acaccaccgatgggcttgg

SEQ ID NO: 3469 - RNA, 19 nt, synthetic construct
  source 1..19: mol_type = other RNA
accgatgggcttggcgcct

SEQ ID NO: 3470 - RNA, 19 nt, synthetic construct
  source 1..19: mol_type = other RNA
ccaccgtgtgtgtccgcga

SEQ ID NO: 3471 - RNA, 19 nt, synthetic construct
  source 1..19: mol_type = other RNA
cggtcgacggcggccctca

SEQ ID NO: 3472 - RNA, 19 nt, synthetic construct
  source 1..19: mol_type = other RNA
tcgacggcggccctcacct

SEQ ID NO: 3473 - RNA, 19 nt, synthetic construct
  source 1..19: mol_type = other RNA
gctcgcccgacaggcacag

SEQ ID NO: 3474 - RNA, 19 nt, synthetic construct
  source 1..19: mol_type = other RNA
aggccgagaccagcacgcc

SEQ ID NO: 3475 - RNA, 19 nt, synthetic construct
  source 1..19: mol_type = other RNA
atgagccccttgactaaca

SEQ ID NO: 3476 - RNA, 19 nt, synthetic construct
  source 1..19: mol_type = other RNA
gccccttgactaacaccac

SEQ ID NO: 3477 - RNA, 19 nt, synthetic construct
  source 1..19: mol_type = other RNA
gaacagctcacactaccaa

SEQ ID NO: 3478 - RNA, 19 nt, synthetic construct
  source 1..19: mol_type = other RNA
acagctcacactaccaaag

SEQ ID NO: 3479 - RNA, 19 nt, synthetic construct
  source 1..19: mol_type = other RNA
aggctccacggtgaccccc

SEQ ID NO: 3480 - RNA, 19 nt, synthetic construct
  source 1..19: mol_type = other RNA
ccatccccccagtgctgac

SEQ ID NO: 3481 - RNA, 19 nt, synthetic construct
  source 1..19: mol_type = other RNA
cacacccagcaagacccgc

SEQ ID NO: 3482 - RNA, 19 nt, synthetic construct
  source 1..19: mol_type = other RNA
ccagctctacggccatgcc

SEQ ID NO: 3483 - RNA, 19 nt, synthetic construct
  source 1..19: mol_type = other RNA
agagccgagcactacagcc

SEQ ID NO: 3484 - RNA, 19 nt, synthetic construct
  source 1..19: mol_type = other RNA
ctacagccaccgtgacggt

SEQ ID NO: 3485 - RNA, 19 nt, synthetic construct
  source 1..19: mol_type = other RNA
ctggcaccccacatgtgag

SEQ ID NO: 3486 - RNA, 19 nt, synthetic construct
  source 1..19: mol_type = other RNA
gcaccccacatgtgagcac

SEQ ID NO: 3487 - RNA, 19 nt, synthetic construct
  source 1..19: mol_type = other RNA
ccccacatgtgagcaccac

SEQ ID NO: 3488 - RNA, 19 nt, synthetic construct
  source 1..19: mol_type = other RNA
acatgtgagcaccacggcc

SEQ ID NO: 3489 - RNA, 19 nt, synthetic construct
  source 1..19: mol_type = other RNA
gaacagctcacactaccaa

SEQ ID NO: 3490 - RNA, 19 nt, synthetic construct
  source 1..19: mol_type = other RNA
acagctcacactaccaaag

SEQ ID NO: 3491 - RNA, 19 nt, synthetic construct
  source 1..19: mol_type = other RNA
tgctgactaccacaaccac

SEQ ID NO: 3492 - RNA, 19 nt, synthetic construct
  source 1..19: mol_type = other RNA
ctcaactccagggacaaca

SEQ ID NO: 3493 - RNA, 19 nt, synthetic construct
  source 1..19: mol_type = other RNA
ctatccccccagtgctgac

SEQ ID NO: 3494 - RNA, 19 nt, synthetic construct
  source 1..19: mol_type = other RNA
cacacccagcaagacccgc

SEQ ID NO: 3495 - RNA, 19 nt, synthetic construct
  source 1..19: mol_type = other RNA
tcacccttgggaccaccgg

SEQ ID NO: 3496 - RNA, 19 nt, synthetic construct
  source 1..19: mol_type = other RNA
ccgggaccctcccagaaca

SEQ ID NO: 3497 - RNA, 19 nt, synthetic construct
  source 1..19: mol_type = other RNA
tgtccacaatccacccctc

SEQ ID NO: 3498 - RNA, 19 nt, synthetic construct
  source 1..19: mol_type = other RNA
cagtgctgaccacgaaggc

SEQ ID NO: 3499 - RNA, 19 nt, synthetic construct
  source 1..19: mol_type = other RNA
ctacagccaccgtgacggt

SEQ ID NO: 3500 - RNA, 19 nt, synthetic construct
  source 1..19: mol_type = other RNA
ggcaactgctggcaccctc

SEQ ID NO: 3501 - RNA, 19 nt, synthetic construct
  source 1..19: mol_type = other RNA
gaacagctcacactaccaa

SEQ ID NO: 3502 - RNA, 19 nt, synthetic construct
  source 1..19: mol_type = other RNA
acagctcacactaccaaag

SEQ ID NO: 3503 - RNA, 19 nt, synthetic construct
  source 1..19: mol_type = other RNA
aggctccacggtgaccccc

SEQ ID NO: 3504 - RNA, 19 nt, synthetic construct
  source 1..19: mol_type = other RNA
ccatccccccagtgctgac

SEQ ID NO: 3505 - RNA, 19 nt, synthetic construct
  source 1..19: mol_type = other RNA
cacacccagcaagacccgc

SEQ ID NO: 3506 - RNA, 19 nt, synthetic construct
  source 1..19: mol_type = other RNA
ccacggtggtgaccacggg

SEQ ID NO: 3507 - RNA, 19 nt, synthetic construct
  source 1..19: mol_type = other RNA
agagccgagcactacagcc

SEQ ID NO: 3508 - RNA, 19 nt, synthetic construct
  source 1..19: mol_type = other RNA
ctacagccaccgtgacggt

SEQ ID NO: 3509 - RNA, 19 nt, synthetic construct
  source 1..19: mol_type = other RNA
ctggcaccccacatgtgag

SEQ ID NO: 3510 - RNA, 19 nt, synthetic construct
  source 1..19: mol_type = other RNA
gcaccccacatgtgagcac

SEQ ID NO: 3511 - RNA, 19 nt, synthetic construct
  source 1..19: mol_type = other RNA
ccccacatgtgagcaccac

SEQ ID NO: 3512 - RNA, 19 nt, synthetic construct
  source 1..19: mol_type = other RNA
acatgtgagcaccacggcc

SEQ ID NO: 3513 - RNA, 19 nt, synthetic construct
  source 1..19: mol_type = other RNA
gaacagctcacactaccaa

SEQ ID NO: 3514 - RNA, 19 nt, synthetic construct
  source 1..19: mol_type = other RNA
acagctcacactaccaaag

SEQ ID NO: 3515 - RNA, 19 nt, synthetic construct
  source 1..19: mol_type = other RNA
ccacacccacaaccagtgg

SEQ ID NO: 3516 - RNA, 19 nt, synthetic construct
  source 1..19: mol_type = other RNA
gtggctccacggtgacccc

SEQ ID NO: 3517 - RNA, 19 nt, synthetic construct
  source 1..19: mol_type = other RNA
tggctccacggtgaccccc

SEQ ID NO: 3518 - RNA, 19 nt, synthetic construct
  source 1..19: mol_type = other RNA
actcccccatcactgatca

SEQ ID NO: 3519 - RNA, 19 nt, synthetic construct
  source 1..19: mol_type = other RNA
ctcccccatcactgatcac

SEQ ID NO: 3520 - RNA, 19 nt, synthetic construct
  source 1..19: mol_type = other RNA
ctcaactccagggacaaca

SEQ ID NO: 3521 - RNA, 19 nt, synthetic construct
  source 1..19: mol_type = other RNA
ctatccccccagtgctgac

SEQ ID NO: 3522 - RNA, 19 nt, synthetic construct
  source 1..19: mol_type = other RNA
cacacccagcaagacccgc

SEQ ID NO: 3523 - RNA, 19 nt, synthetic construct
  source 1..19: mol_type = other RNA
ccacggtggtgaccacggg

SEQ ID NO: 3524 - RNA, 19 nt, synthetic construct
  source 1..19: mol_type = other RNA
ccagctctacggccatgcc

SEQ ID NO: 3525 - RNA, 19 nt, synthetic construct
  source 1..19: mol_type = other RNA
ccacccttgggaccaccgg

SEQ ID NO: 3526 - RNA, 19 nt, synthetic construct
  source 1..19: mol_type = other RNA
ccgggaccctcccagaaca

SEQ ID NO: 3527 - RNA, 19 nt, synthetic construct
  source 1..19: mol_type = other RNA
acagaccaccacacccgtg

SEQ ID NO: 3528 - RNA, 19 nt, synthetic construct
  source 1..19: mol_type = other RNA
tgtccacaatccacccctc

SEQ ID NO: 3529 - RNA, 19 nt, synthetic construct
  source 1..19: mol_type = other RNA
cagtgctgaccacgaaggc

SEQ ID NO: 3530 - RNA, 19 nt, synthetic construct
  source 1..19: mol_type = other RNA
agagccgagcactacagcc

SEQ ID NO: 3531 - RNA, 19 nt, synthetic construct
  source 1..19: mol_type = other RNA
ctacagccaccgtgacggt

SEQ ID NO: 3532 - RNA, 19 nt, synthetic construct
  source 1..19: mol_type = other RNA
ctggcaccccacatgtgag

SEQ ID NO: 3533 - RNA, 19 nt, synthetic construct
  source 1..19: mol_type = other RNA
gcaccccacatgtgagcac

SEQ ID NO: 3534 - RNA, 19 nt, synthetic construct
  source 1..19: mol_type = other RNA
ccccacatgtgagcaccac

SEQ ID NO: 3535 - RNA, 19 nt, synthetic construct
  source 1..19: mol_type = other RNA
acatgtgagcaccacggcc

SEQ ID NO: 3536 - RNA, 19 nt, synthetic construct
  source 1..19: mol_type = other RNA
gggactgcaactgcccttc

SEQ ID NO: 3537 - RNA, 19 nt, synthetic construct
  source 1..19: mol_type = other RNA
gaacagctcacactaccaa

SEQ ID NO: 3538 - RNA, 19 nt, synthetic construct
  source 1..19: mol_type = other RNA
acagctcacactaccaaag

SEQ ID NO: 3539 - RNA, 19 nt, synthetic construct
  source 1..19: mol_type = other RNA
ccacacccacaaccagtgg

SEQ ID NO: 3540 - RNA, 19 nt, synthetic construct
  source 1..19: mol_type = other RNA
gtggctccacggtgacccc

SEQ ID NO: 3541 - RNA, 19 nt, synthetic construct
  source 1..19: mol_type = other RNA
tggctccacggtgaccccc

SEQ ID NO: 3542 - RNA, 19 nt, synthetic construct
  source 1..19: mol_type = other RNA
ctcaactccagggacaaca

SEQ ID NO: 3543 - RNA, 19 nt, synthetic construct
  source 1..19: mol_type = other RNA
cagggacaacacccatcac

SEQ ID NO: 3544 - RNA, 19 nt, synthetic construct
  source 1..19: mol_type = other RNA
gtggaccgtcccagcacag

SEQ ID NO: 3545 - RNA, 19 nt, synthetic construct
  source 1..19: mol_type = other RNA
caccatgacaagggccacc

SEQ ID NO: 3546 - RNA, 19 nt, synthetic construct
  source 1..19: mol_type = other RNA
tctggggacgacccggatc

SEQ ID NO: 3547 - RNA, 19 nt, synthetic construct
  source 1..19: mol_type = other RNA
tgaccgcttccagggcgcc

SEQ ID NO: 3548 - RNA, 19 nt, synthetic construct
  source 1..19: mol_type = other RNA
gcttccagggcgcctgtcc

SEQ ID NO: 3549 - RNA, 19 nt, synthetic construct
  source 1..19: mol_type = other RNA
gcacgctttgggaatctca

SEQ ID NO: 3550 - RNA, 19 nt, synthetic construct
  source 1..19: mol_type = other RNA
gcagccccggtgtctagca

SEQ ID NO: 3551 - RNA, 19 nt, synthetic construct
  source 1..19: mol_type = other RNA
agccccggtgtctagcaca

SEQ ID NO: 3552 - RNA, 19 nt, synthetic construct
  source 1..19: mol_type = other RNA
tgagtgccacaaccttgtg

SEQ ID NO: 3553 - RNA, 19 nt, synthetic construct
  source 1..19: mol_type = other RNA
acgcctgcatcagcgacca

SEQ ID NO: 3554 - RNA, 19 nt, synthetic construct
  source 1..19: mol_type = other RNA
ccactgcaggggccgcctt

SEQ ID NO: 3555 - RNA, 19 nt, synthetic construct
  source 1..19: mol_type = other RNA
acgcagagctctgccgcgc

SEQ ID NO: 3556 - RNA, 19 nt, synthetic construct
  source 1..19: mol_type = other RNA
ccatacagcctgccacctg

SEQ ID NO: 3557 - RNA, 19 nt, synthetic construct
  source 1..19: mol_type = other RNA
ttcagtgtcggtgcagtgc

SEQ ID NO: 3558 - RNA, 19 nt, synthetic construct
  source 1..19: mol_type = other RNA
ctgtgacgcccagggtcag

SEQ ID NO: 3559 - RNA, 19 nt, synthetic construct
  source 1..19: mol_type = other RNA
gggtcagcccccgccgtgc

SEQ ID NO: 3560 - RNA, 19 nt, synthetic construct
  source 1..19: mol_type = other RNA
ccgccagggcaggagtcca

SEQ ID NO: 3561 - RNA, 19 nt, synthetic construct
  source 1..19: mol_type = other RNA
tccctgccacatgtgtacc

SEQ ID NO: 3562 - RNA, 19 nt, synthetic construct
  source 1..19: mol_type = other RNA
gctgaatgaaacctgggtc

SEQ ID NO: 3563 - RNA, 19 nt, synthetic construct
  source 1..19: mol_type = other RNA
atgtggacaactgcaccgt

SEQ ID NO: 3564 - RNA, 19 nt, synthetic construct
  source 1..19: mol_type = other RNA
gtccaagtactcagcagag

SEQ ID NO: 3565 - RNA, 19 nt, synthetic construct
  source 1..19: mol_type = other RNA
cccgtgggtgaaaccggcc

SEQ ID NO: 3566 - RNA, 19 nt, synthetic construct
  source 1..19: mol_type = other RNA
tccctgccacggccggagc

SEQ ID NO: 3567 - RNA, 19 nt, synthetic construct
  source 1..19: mol_type = other RNA
cgcgcagcacggattccag

SEQ ID NO: 3568 - RNA, 19 nt, synthetic construct
  source 1..19: mol_type = other RNA
acttcaacgtccagctacg

SEQ ID NO: 3569 - RNA, 19 nt, synthetic construct
  source 1..19: mol_type = other RNA
gacggcggccctcacctcg

SEQ ID NO: 3570 - RNA, 19 nt, synthetic construct
  source 1..19: mol_type = other RNA
cgaggacttcaacgtccag

SEQ ID NO: 3571 - RNA, 19 nt, synthetic construct
  source 1..19: mol_type = other RNA
cccctgggcctcgagtgcc

SEQ ID NO: 3572 - RNA, 19 nt, synthetic construct
  source 1..19: mol_type = other RNA
atccactggatccacggcc

SEQ ID NO: 3573 - RNA, 19 nt, synthetic construct
  source 1..19: mol_type = other RNA
gtccactggatccacggcc

SEQ ID NO: 3574 - RNA, 19 nt, synthetic construct
  source 1..19: mol_type = other RNA
gctgcgagaccgaggtcaa

SEQ ID NO: 3575 - RNA, 19 nt, synthetic construct
  source 1..19: mol_type = other RNA
gcctgcgactcgggtggcg

SEQ ID NO: 3576 - RNA, 19 nt, synthetic construct
  source 1..19: mol_type = other RNA
cctgtgtgtggcaccccgc

SEQ ID NO: 3577 - RNA, 19 nt, synthetic construct
  source 1..19: mol_type = other RNA
atggtgactgcagctacgt

SEQ ID NO: 3578 - RNA, 19 nt, synthetic construct
  source 1..19: mol_type = other RNA
gggcgtacagctcagcgac

SEQ ID NO: 3579 - RNA, 19 nt, synthetic construct
  source 1..19: mol_type = other RNA
tcctgccccggagcgtcca

SEQ ID NO: 3580 - RNA, 19 nt, synthetic construct
  source 1..19: mol_type = other RNA
tgccccggagcgtccaagt

SEQ ID NO: 3581 - RNA, 19 nt, synthetic construct
  source 1..19: mol_type = other RNA
gccgtgtgttcatgtacgg

SEQ ID NO: 3582 - RNA, 19 nt, synthetic construct
  source 1..19: mol_type = other RNA
agctggatcccaaatacgc

SEQ ID NO: 3583 - RNA, 19 nt, synthetic construct
  source 1..19: mol_type = other RNA
gccagggcacgacccgctg

SEQ ID NO: 3584 - RNA, 19 nt, synthetic construct
  source 1..19: mol_type = other RNA
gagccgagcactatagcca

SEQ ID NO: 3585 - RNA, 19 nt, synthetic construct
  source 1..19: mol_type = other RNA
ggattccagctggccacgt

SEQ ID NO: 3586 - RNA, 19 nt, synthetic construct
  source 1..19: mol_type = other RNA
tgccccgagacggtgtgcg

SEQ ID NO: 3587 - RNA, 19 nt, synthetic construct
  source 1..19: mol_type = other RNA
gacaacaccacccacggga

SEQ ID NO: 3588 - RNA, 19 nt, synthetic construct
  source 1..19: mol_type = other RNA
cagagcggggactacatca

SEQ ID NO: 3589 - RNA, 19 nt, synthetic construct
  source 1..19: mol_type = other RNA
ccaagaaatgtgccgacag

SEQ ID NO: 3590 - RNA, 19 nt, synthetic construct
  source 1..19: mol_type = other RNA
gagcgtcaccttcaatggc

SEQ ID NO: 3591 - RNA, 19 nt, synthetic construct
  source 1..19: mol_type = other RNA
agcgtccaagtactcagca

SEQ ID NO: 3592 - RNA, 19 nt, synthetic construct
  source 1..19: mol_type = other RNA
tgctgtggggagtgcgtcc

SEQ ID NO: 3593 - RNA, 19 nt, synthetic construct
  source 1..19: mol_type = other RNA
tccagggacaacacctatc

SEQ ID NO: 3594 - RNA, 19 nt, synthetic construct
  source 1..19: mol_type = other RNA
tccagggacaacacctatc

SEQ ID NO: 3595 - RNA, 19 nt, synthetic construct
  source 1..19: mol_type = other RNA
tctgtccaagaaatgtgcc

SEQ ID NO: 3596 - RNA, 19 nt, synthetic construct
  source 1..19: mol_type = other RNA
cgtgacggtgcccaccgga

SEQ ID NO: 3597 - RNA, 19 nt, synthetic construct
  source 1..19: mol_type = other RNA
cgtgacggtgcccaccgga

SEQ ID NO: 3598 - RNA, 19 nt, synthetic construct
  source 1..19: mol_type = other RNA
cgtgacggtgcccaccgga

SEQ ID NO: 3599 - RNA, 19 nt, synthetic construct
  source 1..19: mol_type = other RNA
cgtgacggtgcccaccgga

SEQ ID NO: 3600 - RNA, 19 nt, synthetic construct
  source 1..19: mol_type = other RNA
catgagagagatccatgca

SEQ ID NO: 3601 - RNA, 19 nt, synthetic construct
  source 1..19: mol_type = other RNA
accacccacaccgccagag

SEQ ID NO: 3602 - RNA, 19 nt, synthetic construct
  source 1..19: mol_type = other RNA
tgtggggcggctcccacta

SEQ ID NO: 3603 - RNA, 19 nt, synthetic construct
  source 1..19: mol_type = other RNA
gggcttggcgcctgcttga

SEQ ID NO: 3604 - RNA, 19 nt, synthetic construct
  source 1..19: mol_type = other RNA
gggagcttgggcacatggc

SEQ ID NO: 3605 - RNA, 19 nt, synthetic construct
  source 1..19: mol_type = other RNA
ggagcttgggcacatggcg

SEQ ID NO: 3606 - RNA, 19 nt, synthetic construct
  source 1..19: mol_type = other RNA
acagccagcaccgcttcca

SEQ ID NO: 3607 - RNA, 19 nt, synthetic construct
  source 1..19: mol_type = other RNA
caccacctggacccgccta

SEQ ID NO: 3608 - RNA, 19 nt, synthetic construct
  source 1..19: mol_type = other RNA
cacacctccacagtgctta

SEQ ID NO: 3609 - RNA, 19 nt, synthetic construct
  source 1..19: mol_type = other RNA
caccacctggacccgccta

SEQ ID NO: 3610 - RNA, 19 nt, synthetic construct
  source 1..19: mol_type = other RNA
cacacctccacagtgctta

SEQ ID NO: 3611 - RNA, 19 nt, synthetic construct
  source 1..19: mol_type = other RNA
agccccacatcggccccaa

SEQ ID NO: 3612 - RNA, 19 nt, synthetic construct
  source 1..19: mol_type = other RNA
cacacctccacagtgctta

SEQ ID NO: 3613 - RNA, 19 nt, synthetic construct
  source 1..19: mol_type = other RNA
gacccacgggatggccgtg

SEQ ID NO: 3614 - RNA, 19 nt, synthetic construct
  source 1..19: mol_type = other RNA
gtgacttctacaacccaca

SEQ ID NO: 3615 - RNA, 19 nt, synthetic construct
  source 1..19: mol_type = other RNA
tgacttctacaacccacat

SEQ ID NO: 3616 - RNA, 19 nt, synthetic construct
  source 1..19: mol_type = other RNA
ccagcaccgcttccaaaga

SEQ ID NO: 3617 - RNA, 19 nt, synthetic construct
  source 1..19: mol_type = other RNA
cggccacgacacccacagt

SEQ ID NO: 3618 - RNA, 19 nt, synthetic construct
  source 1..19: mol_type = other RNA
cggccacgacacccacagt

SEQ ID NO: 3619 - RNA, 19 nt, synthetic construct
  source 1..19: mol_type = other RNA
cggccacgacacccacagt

SEQ ID NO: 3620 - RNA, 19 nt, synthetic construct
  source 1..19: mol_type = other RNA
gcagagcggggactacatc

SEQ ID NO: 3621 - RNA, 19 nt, synthetic construct
  source 1..19: mol_type = other RNA
gccggccggcaactgcacg

SEQ ID NO: 3622 - RNA, 19 nt, synthetic construct
  source 1..19: mol_type = other RNA
ggacgaggagggcatctgc

SEQ ID NO: 3623 - RNA, 19 nt, synthetic construct
  source 1..19: mol_type = other RNA
tgctccggggggctatggc

SEQ ID NO: 3624 - RNA, 19 nt, synthetic construct
  source 1..19: mol_type = other RNA
gggcgcctgtgtgcccgcc

SEQ ID NO: 3625 - RNA, 19 nt, synthetic construct
  source 1..19: mol_type = other RNA
tacgctcacggcaccgtgc

SEQ ID NO: 3626 - RNA, 19 nt, synthetic construct
  source 1..19: mol_type = other RNA
cccggacgccctggcaccc

SEQ ID NO: 3627 - RNA, 19 nt, synthetic construct
  source 1..19: mol_type = other RNA
tgcggaagcaacggcacca

SEQ ID NO: 3628 - RNA, 19 nt, synthetic construct
  source 1..19: mol_type = other RNA
gtccacttcggcctggtgt

SEQ ID NO: 3629 - RNA, 19 nt, synthetic construct
  source 1..19: mol_type = other RNA
acccttccaacacgctcag

SEQ ID NO: 3630 - RNA, 19 nt, synthetic construct
  source 1..19: mol_type = other RNA
agcctggcgccaacactca

SEQ ID NO: 3631 - RNA, 19 nt, synthetic construct
  source 1..19: mol_type = other RNA
gagcgagctgtccacctct

SEQ ID NO: 3632 - RNA, 19 nt, synthetic construct
  source 1..19: mol_type = other RNA
ccacggccaccatgtccac

SEQ ID NO: 3633 - RNA, 19 nt, synthetic construct
  source 1..19: mol_type = other RNA
cactaccaaagtgccaact

SEQ ID NO: 3634 - RNA, 19 nt, synthetic construct
  source 1..19: mol_type = other RNA
cctcctctagcacacagac

SEQ ID NO: 3635 - RNA, 19 nt, synthetic construct
  source 1..19: mol_type = other RNA
ctcctctagcacacagacc

SEQ ID NO: 3636 - RNA, 19 nt, synthetic construct
  source 1..19: mol_type = other RNA
gaccaccccgggccacacc

SEQ ID NO: 3637 - RNA, 19 nt, synthetic construct
  source 1..19: mol_type = other RNA
tacagctaccccatgccgg

SEQ ID NO: 3638 - RNA, 19 nt, synthetic construct
  source 1..19: mol_type = other RNA
ccctctggcggggactttg

SEQ ID NO: 3639 - RNA, 19 nt, synthetic construct
  source 1..19: mol_type = other RNA
ccacggccaccatgtccac

SEQ ID NO: 3640 - RNA, 19 nt, synthetic construct
  source 1..19: mol_type = other RNA
cctcctctagcacacagac

SEQ ID NO: 3641 - RNA, 19 nt, synthetic construct
  source 1..19: mol_type = other RNA
ctcctctagcacacagacc

SEQ ID NO: 3642 - RNA, 19 nt, synthetic construct
  source 1..19: mol_type = other RNA
gaccaccccgggccacacc

SEQ ID NO: 3643 - RNA, 19 nt, synthetic construct
  source 1..19: mol_type = other RNA
tacagctaccccatgccgg

SEQ ID NO: 3644 - RNA, 19 nt, synthetic construct
  source 1..19: mol_type = other RNA
ccctctggcggggactttg

SEQ ID NO: 3645 - RNA, 19 nt, synthetic construct
  source 1..19: mol_type = other RNA
cacagctaccagctttaca

SEQ ID NO: 3646 - RNA, 19 nt, synthetic construct
  source 1..19: mol_type = other RNA
ccacggccaccatgtccac

SEQ ID NO: 3647 - RNA, 19 nt, synthetic construct
  source 1..19: mol_type = other RNA
tcacactaccaaagtgccg

SEQ ID NO: 3648 - RNA, 19 nt, synthetic construct
  source 1..19: mol_type = other RNA
cctcctctagcacacagac

SEQ ID NO: 3649 - RNA, 19 nt, synthetic construct
  source 1..19: mol_type = other RNA
ctcctctagcacacagacc

SEQ ID NO: 3650 - RNA, 19 nt, synthetic construct
  source 1..19: mol_type = other RNA
gaccaccccgggccacacc

SEQ ID NO: 3651 - RNA, 19 nt, synthetic construct
  source 1..19: mol_type = other RNA
tacagctaccccatgccgg

SEQ ID NO: 3652 - RNA, 19 nt, synthetic construct
  source 1..19: mol_type = other RNA
ccctctggcggggactttg

SEQ ID NO: 3653 - RNA, 19 nt, synthetic construct
  source 1..19: mol_type = other RNA
ccacggccaccatgtccac

SEQ ID NO: 3654 - RNA, 19 nt, synthetic construct
  source 1..19: mol_type = other RNA
tcacactaccaaagtgccg

SEQ ID NO: 3655 - RNA, 19 nt, synthetic construct
  source 1..19: mol_type = other RNA
cctcctctagcacacagac

SEQ ID NO: 3656 - RNA, 19 nt, synthetic construct
  source 1..19: mol_type = other RNA
ctcctctagcacacagacc

SEQ ID NO: 3657 - RNA, 19 nt, synthetic construct
  source 1..19: mol_type = other RNA
gaccaccccgggccacacc

SEQ ID NO: 3658 - RNA, 19 nt, synthetic construct
  source 1..19: mol_type = other RNA
tacagctaccccatgccgg

SEQ ID NO: 3659 - RNA, 19 nt, synthetic construct
  source 1..19: mol_type = other RNA
ccctctggcggggactttg

SEQ ID NO: 3660 - RNA, 19 nt, synthetic construct
  source 1..19: mol_type = other RNA
ccacggccaccatgtccac

SEQ ID NO: 3661 - RNA, 19 nt, synthetic construct
  source 1..19: mol_type = other RNA
tcacactaccaaagtgccg

SEQ ID NO: 3662 - RNA, 19 nt, synthetic construct
  source 1..19: mol_type = other RNA
cctcctctagcacacagac

SEQ ID NO: 3663 - RNA, 19 nt, synthetic construct
  source 1..19: mol_type = other RNA
ctcctctagcacacagacc

SEQ ID NO: 3664 - RNA, 19 nt, synthetic construct
  source 1..19: mol_type = other RNA
cacagctaccagctttaca

SEQ ID NO: 3665 - RNA, 19 nt, synthetic construct
  source 1..19: mol_type = other RNA
accgcttccagggcgcctg

SEQ ID NO: 3666 - RNA, 19 nt, synthetic construct
  source 1..19: mol_type = other RNA
tggtccccgacagcagaaa

SEQ ID NO: 3667 - RNA, 19 nt, synthetic construct
  source 1..19: mol_type = other RNA
gaccagatcctcttcaacg

SEQ ID NO: 3668 - RNA, 19 nt, synthetic construct
  source 1..19: mol_type = other RNA
cctcttcaacgcacacatg

SEQ ID NO: 3669 - RNA, 19 nt, synthetic construct
  source 1..19: mol_type = other RNA
gggtggagtccatttgctg

SEQ ID NO: 3670 - RNA, 19 nt, synthetic construct
  source 1..19: mol_type = other RNA
ggcaccccgcgctccgtgc

SEQ ID NO: 3671 - RNA, 19 nt, synthetic construct
  source 1..19: mol_type = other RNA
aggagtcctaccctgggag

SEQ ID NO: 3672 - RNA, 19 nt, synthetic construct
  source 1..19: mol_type = other RNA
gtcctaccctgggagagcc

SEQ ID NO: 3673 - RNA, 19 nt, synthetic construct
  source 1..19: mol_type = other RNA
cccctccctgatgtcactg

SEQ ID NO: 3674 - RNA, 19 nt, synthetic construct
  source 1..19: mol_type = other RNA
caccacctggacccgccta

SEQ ID NO: 3675 - RNA, 19 nt, synthetic construct
  source 1..19: mol_type = other RNA
cacacctccacagtgctta

SEQ ID NO: 3676 - RNA, 19 nt, synthetic construct
  source 1..19: mol_type = other RNA
caggggacgtgccacaacc

SEQ ID NO: 3677 - RNA, 19 nt, synthetic construct
  source 1..19: mol_type = other RNA
caccacctggacccgccta

SEQ ID NO: 3678 - RNA, 19 nt, synthetic construct
  source 1..19: mol_type = other RNA
ggcacaccatggatggcgg

SEQ ID NO: 3679 - RNA, 19 nt, synthetic construct
  source 1..19: mol_type = other RNA
ctaccagcgttacagccat

SEQ ID NO: 3680 - RNA, 19 nt, synthetic construct
  source 1..19: mol_type = other RNA
taccagcgttacagccatc

SEQ ID NO: 3681 - RNA, 19 nt, synthetic construct
  source 1..19: mol_type = other RNA
gccactcaggagtcctacc

SEQ ID NO: 3682 - RNA, 19 nt, synthetic construct
  source 1..19: mol_type = other RNA
cacacctccacagtgctta

SEQ ID NO: 3683 - RNA, 19 nt, synthetic construct
  source 1..19: mol_type = other RNA
ctctacctggacaaccact

SEQ ID NO: 3684 - RNA, 19 nt, synthetic construct
  source 1..19: mol_type = other RNA
tgctgcgaatacgtgccct

SEQ ID NO: 3685 - RNA, 19 nt, synthetic construct
  source 1..19: mol_type = other RNA
ccagaggttccacggtgac

SEQ ID NO: 3686 - RNA, 19 nt, synthetic construct
  source 1..19: mol_type = other RNA
gggctgaggtcgcaacggc

SEQ ID NO: 3687 - RNA, 19 nt, synthetic construct
  source 1..19: mol_type = other RNA
gccatccgggtccaagcgg

SEQ ID NO: 3688 - RNA, 19 nt, synthetic construct
  source 1..19: mol_type = other RNA
ccccagtgccgaacaccac

SEQ ID NO: 3689 - RNA, 19 nt, synthetic construct
  source 1..19: mol_type = other RNA
ccccagtgccgaacaccac

SEQ ID NO: 3690 - RNA, 19 nt, synthetic construct
  source 1..19: mol_type = other RNA
ccccagtgccgaacaccac

SEQ ID NO: 3691 - RNA, 19 nt, synthetic construct
  source 1..19: mol_type = other RNA
gctgcggaagtgcggcctg

SEQ ID NO: 3692 - RNA, 19 nt, synthetic construct
  source 1..19: mol_type = other RNA
tcccggtctccaccgtgtg

SEQ ID NO: 3693 - RNA, 19 nt, synthetic construct
  source 1..19: mol_type = other RNA
gttctcaacgccgcagcct

SEQ ID NO: 3694 - RNA, 19 nt, synthetic construct
  source 1..19: mol_type = other RNA
aagccatgcggccccatac

SEQ ID NO: 3695 - RNA, 19 nt, synthetic construct
  source 1..19: mol_type = other RNA
gtggctcaccctgcacgga

SEQ ID NO: 3696 - RNA, 19 nt, synthetic construct
  source 1..19: mol_type = other RNA
cacacccagtggcatccag

SEQ ID NO: 3697 - RNA, 19 nt, synthetic construct
  source 1..19: mol_type = other RNA
gacctacagctaccaggac

SEQ ID NO: 3698 - RNA, 19 nt, synthetic construct
  source 1..19: mol_type = other RNA
gcggaagtgcggcctgacg

SEQ ID NO: 3699 - RNA, 19 nt, synthetic construct
  source 1..19: mol_type = other RNA
cgcctacgtggtggatgcc

SEQ ID NO: 3700 - RNA, 19 nt, synthetic construct
  source 1..19: mol_type = other RNA
gccacgcactggtggacag

SEQ ID NO: 3701 - RNA, 19 nt, synthetic construct
  source 1..19: mol_type = other RNA
ccggggggctatggcagtg

SEQ ID NO: 3702 - RNA, 19 nt, synthetic construct
  source 1..19: mol_type = other RNA
caggatccgggtcctctgc

SEQ ID NO: 3703 - RNA, 19 nt, synthetic construct
  source 1..19: mol_type = other RNA
tgcaggggacgtgccacaa

SEQ ID NO: 3704 - RNA, 19 nt, synthetic construct
  source 1..19: mol_type = other RNA
tggatccacggccaccccg

SEQ ID NO: 3705 - RNA, 19 nt, synthetic construct
  source 1..19: mol_type = other RNA
tggatccacggccaccccg

SEQ ID NO: 3706 - RNA, 19 nt, synthetic construct
  source 1..19: mol_type = other RNA
tggatccacggccaccccg

SEQ ID NO: 3707 - RNA, 19 nt, synthetic construct
  source 1..19: mol_type = other RNA
tggatccacggccaccccg

SEQ ID NO: 3708 - RNA, 19 nt, synthetic construct
  source 1..19: mol_type = other RNA
tggatccacggccaccccg

SEQ ID NO: 3709 - RNA, 19 nt, synthetic construct
  source 1..19: mol_type = other RNA
ggccatgctcgtggtgccg

SEQ ID NO: 3710 - RNA, 19 nt, synthetic construct
  source 1..19: mol_type = other RNA
gcgtgagctttgttccacc

SEQ ID NO: 3711 - RNA, 19 nt, synthetic construct
  source 1..19: mol_type = other RNA
tgttctctgagcactgccg

SEQ ID NO: 3712 - RNA, 19 nt, synthetic construct
  source 1..19: mol_type = other RNA
cagcactgcgtacctggcc

SEQ ID NO: 3713 - RNA, 19 nt, synthetic construct
  source 1..19: mol_type = other RNA
tgagctgcggaagtgcggc

SEQ ID NO: 3714 - RNA, 19 nt, synthetic construct
  source 1..19: mol_type = other RNA
cggccatccgggtccaagc

SEQ ID NO: 3715 - RNA, 19 nt, synthetic construct
  source 1..19: mol_type = other RNA
cagctggtgccactcatgc

SEQ ID NO: 3716 - RNA, 19 nt, synthetic construct
  source 1..19: mol_type = other RNA
gccacgggcgcagccttcg

SEQ ID NO: 3717 - RNA, 19 nt, synthetic construct
  source 1..19: mol_type = other RNA
gcggcctgagtgaggccga

SEQ ID NO: 3718 - RNA, 19 nt, synthetic construct
  source 1..19: mol_type = other RNA
ccgcgggcaccttcctcaa

SEQ ID NO: 3719 - RNA, 19 nt, synthetic construct
  source 1..19: mol_type = other RNA
cccggggctggtgtcggat

SEQ ID NO: 3720 - RNA, 19 nt, synthetic construct
  source 1..19: mol_type = other RNA
aggggacgtgccacaaccc

SEQ ID NO: 3721 - RNA, 19 nt, synthetic construct
  source 1..19: mol_type = other RNA
atccacggccaccccgacc

SEQ ID NO: 3722 - RNA, 19 nt, synthetic construct
  source 1..19: mol_type = other RNA
acccccagtgccgaacacc

SEQ ID NO: 3723 - RNA, 19 nt, synthetic construct
  source 1..19: mol_type = other RNA
ccagcaagacccgcacctc

SEQ ID NO: 3724 - RNA, 19 nt, synthetic construct
  source 1..19: mol_type = other RNA
accatgggctgtgagcccc

SEQ ID NO: 3725 - RNA, 19 nt, synthetic construct
  source 1..19: mol_type = other RNA
ccccggccaccagctctac

SEQ ID NO: 3726 - RNA, 19 nt, synthetic construct
  source 1..19: mol_type = other RNA
cacactaccaaagtgctga

SEQ ID NO: 3727 - RNA, 19 nt, synthetic construct
  source 1..19: mol_type = other RNA
acccccagtgccgaacacc

SEQ ID NO: 3728 - RNA, 19 nt, synthetic construct
  source 1..19: mol_type = other RNA
ctcaccctagcagcaggac

SEQ ID NO: 3729 - RNA, 19 nt, synthetic construct
  source 1..19: mol_type = other RNA
ccagcaagacccgcacctc

SEQ ID NO: 3730 - RNA, 19 nt, synthetic construct
  source 1..19: mol_type = other RNA
accatgggctgtgagcccc

SEQ ID NO: 3731 - RNA, 19 nt, synthetic construct
  source 1..19: mol_type = other RNA
ccccggccaccagctctac

SEQ ID NO: 3732 - RNA, 19 nt, synthetic construct
  source 1..19: mol_type = other RNA
tccaccccgggaacagctc

SEQ ID NO: 3733 - RNA, 19 nt, synthetic construct
  source 1..19: mol_type = other RNA
ccaccccgggaacagctcc

SEQ ID NO: 3734 - RNA, 19 nt, synthetic construct
  source 1..19: mol_type = other RNA
ctcctccagtccaaggact

SEQ ID NO: 3735 - RNA, 19 nt, synthetic construct
  source 1..19: mol_type = other RNA
ctgcaaccacccttccagt

SEQ ID NO: 3736 - RNA, 19 nt, synthetic construct
  source 1..19: mol_type = other RNA
ctcacactaccaaagtgcc

SEQ ID NO: 3737 - RNA, 19 nt, synthetic construct
  source 1..19: mol_type = other RNA
acccccagtgccgaacacc

SEQ ID NO: 3738 - RNA, 19 nt, synthetic construct
  source 1..19: mol_type = other RNA
ctcaccctagcagcaggac

SEQ ID NO: 3739 - RNA, 19 nt, synthetic construct
  source 1..19: mol_type = other RNA
ccagcaagacccgcacctc

SEQ ID NO: 3740 - RNA, 19 nt, synthetic construct
  source 1..19: mol_type = other RNA
ccccggccaccagctctac

SEQ ID NO: 3741 - RNA, 19 nt, synthetic construct
  source 1..19: mol_type = other RNA
ctcacactaccaaagtgcc

SEQ ID NO: 3742 - RNA, 19 nt, synthetic construct
  source 1..19: mol_type = other RNA
cacccacaaccagtggctc

SEQ ID NO: 3743 - RNA, 19 nt, synthetic construct
  source 1..19: mol_type = other RNA
acccccagtgccgaacacc

SEQ ID NO: 3744 - RNA, 19 nt, synthetic construct
  source 1..19: mol_type = other RNA
ctcaccctagcagcaggac

SEQ ID NO: 3745 - RNA, 19 nt, synthetic construct
  source 1..19: mol_type = other RNA
ccagcaagacccgcacctc

SEQ ID NO: 3746 - RNA, 19 nt, synthetic construct
  source 1..19: mol_type = other RNA
ccccggccaccagctctac

SEQ ID NO: 3747 - RNA, 19 nt, synthetic construct
  source 1..19: mol_type = other RNA
tccaccccgggaacagctc

SEQ ID NO: 3748 - RNA, 19 nt, synthetic construct
  source 1..19: mol_type = other RNA
ccaccccgggaacagctcc

SEQ ID NO: 3749 - RNA, 19 nt, synthetic construct
  source 1..19: mol_type = other RNA
ctcctccagtccaaggact

SEQ ID NO: 3750 - RNA, 19 nt, synthetic construct
  source 1..19: mol_type = other RNA
ctgcaaccacccttccagt

SEQ ID NO: 3751 - RNA, 19 nt, synthetic construct
  source 1..19: mol_type = other RNA
ctcacactaccaaagtgcc

SEQ ID NO: 3752 - RNA, 19 nt, synthetic construct
  source 1..19: mol_type = other RNA
cacccacaaccagtggctc

SEQ ID NO: 3753 - RNA, 19 nt, synthetic construct
  source 1..19: mol_type = other RNA
ctcctccagtccaaggact

SEQ ID NO: 3754 - RNA, 19 nt, synthetic construct
  source 1..19: mol_type = other RNA
ctgcaaccacccttccagt

SEQ ID NO: 3755 - RNA, 19 nt, synthetic construct
  source 1..19: mol_type = other RNA
agccgctctgtgatctgat

SEQ ID NO: 3756 - RNA, 19 nt, synthetic construct
  source 1..19: mol_type = other RNA
cagggtcagcccccgccgt

SEQ ID NO: 3757 - RNA, 19 nt, synthetic construct
  source 1..19: mol_type = other RNA
caacacgaccatcctgtgg

SEQ ID NO: 3758 - RNA, 19 nt, synthetic construct
  source 1..19: mol_type = other RNA
gcaccagggctgcgagacc

SEQ ID NO: 3759 - RNA, 19 nt, synthetic construct
  source 1..19: mol_type = other RNA
ctgggacgccctggaacaa

SEQ ID NO: 3760 - RNA, 19 nt, synthetic construct
  source 1..19: mol_type = other RNA
accaccgatgggcttggcg

SEQ ID NO: 3761 - RNA, 19 nt, synthetic construct
  source 1..19: mol_type = other RNA
acttatgccagcagcctaa

SEQ ID NO: 3762 - RNA, 19 nt, synthetic construct
  source 1..19: mol_type = other RNA
acttcggccacctcgggca

SEQ ID NO: 3763 - RNA, 19 nt, synthetic construct
  source 1..19: mol_type = other RNA
acttcggccacctcgggca

SEQ ID NO: 3764 - RNA, 19 nt, synthetic construct
  source 1..19: mol_type = other RNA
acccagtggcatccagtgc

SEQ ID NO: 3765 - RNA, 19 nt, synthetic construct
  source 1..19: mol_type = other RNA
atcggcccccataaccacg

SEQ ID NO: 3766 - RNA, 19 nt, synthetic construct
  source 1..19: mol_type = other RNA
atcggcccccataaccacg

SEQ ID NO: 3767 - RNA, 19 nt, synthetic construct
  source 1..19: mol_type = other RNA
atcggcccccataaccacg

SEQ ID NO: 3768 - RNA, 19 nt, synthetic construct
  source 1..19: mol_type = other RNA
gaggcggagactttgagac

SEQ ID NO: 3769 - RNA, 19 nt, synthetic construct
  source 1..19: mol_type = other RNA
agcttcccgacatgccgct

SEQ ID NO: 3770 - RNA, 19 nt, synthetic construct
  source 1..19: mol_type = other RNA
tcttcaagatgtgctacaa

SEQ ID NO: 3771 - RNA, 19 nt, synthetic construct
  source 1..19: mol_type = other RNA
ggtgacttcccacacccta

SEQ ID NO: 3772 - RNA, 19 nt, synthetic construct
  source 1..19: mol_type = other RNA
gcccggcactggtgctcgc

SEQ ID NO: 3773 - RNA, 19 nt, synthetic construct
  source 1..19: mol_type = other RNA
tgcgtgggacccgatgggt

SEQ ID NO: 3774 - RNA, 19 nt, synthetic construct
  source 1..19: mol_type = other RNA
gcagcgtttccttcgtgcc

SEQ ID NO: 3775 - RNA, 19 nt, synthetic construct
  source 1..19: mol_type = other RNA
ctgctgtctgagaacgttc

SEQ ID NO: 3776 - RNA, 19 nt, synthetic construct
  source 1..19: mol_type = other RNA
atgtggggcggctcccact

SEQ ID NO: 3777 - RNA, 19 nt, synthetic construct
  source 1..19: mol_type = other RNA
gagtacaagagagtggccg

SEQ ID NO: 3778 - RNA, 19 nt, synthetic construct
  source 1..19: mol_type = other RNA
cacctacacccacgtggat

SEQ ID NO: 3779 - RNA, 19 nt, synthetic construct
  source 1..19: mol_type = other RNA
tgccaactaccacaaccac

SEQ ID NO: 3780 - RNA, 19 nt, synthetic construct
  source 1..19: mol_type = other RNA
acgagtagcccggggctga

SEQ ID NO: 3781 - RNA, 19 nt, synthetic construct
  source 1..19: mol_type = other RNA
ccaataaccacggtggtga

SEQ ID NO: 3782 - RNA, 19 nt, synthetic construct
  source 1..19: mol_type = other RNA
caataaccacggtggtgac

SEQ ID NO: 3783 - RNA, 19 nt, synthetic construct
  source 1..19: mol_type = other RNA
ccacccacaccgccagagt

SEQ ID NO: 3784 - RNA, 19 nt, synthetic construct
  source 1..19: mol_type = other RNA
tgtggccaacgtcacctgc

SEQ ID NO: 3785 - RNA, 19 nt, synthetic construct
  source 1..19: mol_type = other RNA
tgggcttggcgcctgcttg

SEQ ID NO: 3786 - RNA, 19 nt, synthetic construct
  source 1..19: mol_type = other RNA
tcgccatctgcggaagcaa

SEQ ID NO: 3787 - RNA, 19 nt, synthetic construct
  source 1..19: mol_type = other RNA
gcttcccgacatgccgctg

SEQ ID NO: 3788 - RNA, 19 nt, synthetic construct
  source 1..19: mol_type = other RNA
cgtccacttcggcctggtg

SEQ ID NO: 3789 - RNA, 19 nt, synthetic construct
  source 1..19: mol_type = other RNA
cacatgtgagcaccacggc

SEQ ID NO: 3790 - RNA, 19 nt, synthetic construct
  source 1..19: mol_type = other RNA
cacacccacaaccagaggt

SEQ ID NO: 3791 - RNA, 19 nt, synthetic construct
  source 1..19: mol_type = other RNA
acccttccagtgctgacaa

SEQ ID NO: 3792 - RNA, 19 nt, synthetic construct
  source 1..19: mol_type = other RNA
cgagcactacagccaccgt

SEQ ID NO: 3793 - RNA, 19 nt, synthetic construct
  source 1..19: mol_type = other RNA
cgagcactacagccaccgt

SEQ ID NO: 3794 - RNA, 19 nt, synthetic construct
  source 1..19: mol_type = other RNA
cgagcactacagccaccgt

SEQ ID NO: 3795 - RNA, 19 nt, synthetic construct
  source 1..19: mol_type = other RNA
tgggacccgatgggtttcc

SEQ ID NO: 3796 - RNA, 19 nt, synthetic construct
  source 1..19: mol_type = other RNA
ccgtgcaaccgtcccggct

SEQ ID NO: 3797 - RNA, 19 nt, synthetic construct
  source 1..19: mol_type = other RNA
tccactccggagaccaccc

SEQ ID NO: 3798 - RNA, 19 nt, synthetic construct
  source 1..19: mol_type = other RNA
caaccacgggcttcacagt

SEQ ID NO: 3799 - RNA, 19 nt, synthetic construct
  source 1..19: mol_type = other RNA
tccactccggagaccaccc

SEQ ID NO: 3800 - RNA, 19 nt, synthetic construct
  source 1..19: mol_type = other RNA
acacccacgtggatgagtg

SEQ ID NO: 3801 - RNA, 19 nt, synthetic construct
  source 1..19: mol_type = other RNA
tgccccgacgtcctcgccc

SEQ ID NO: 3802 - RNA, 19 nt, synthetic construct
  source 1..19: mol_type = other RNA
ggcagctgcgagtacatct

SEQ ID NO: 3803 - RNA, 19 nt, synthetic construct
  source 1..19: mol_type = other RNA
acccacgggatggccgtgt

SEQ ID NO: 3804 - RNA, 19 nt, synthetic construct
  source 1..19: mol_type = other RNA
cccacgggatggccgtgtc

SEQ ID NO: 3805 - RNA, 19 nt, synthetic construct
  source 1..19: mol_type = other RNA
cttcccgacatgccgctgg

SEQ ID NO: 3806 - RNA, 19 nt, synthetic construct
  source 1..19: mol_type = other RNA
ccagggcacgacccgctgt

SEQ ID NO: 3807 - RNA, 19 nt, synthetic construct
  source 1..19: mol_type = other RNA
agtgccgaacaccatggcc

SEQ ID NO: 3808 - RNA, 19 nt, synthetic construct
  source 1..19: mol_type = other RNA
ccccatgccggggccctct

SEQ ID NO: 3809 - RNA, 19 nt, synthetic construct
  source 1..19: mol_type = other RNA
gggcctcgagtgccgtgcc

SEQ ID NO: 3810 - RNA, 19 nt, synthetic construct
  source 1..19: mol_type = other RNA
ccccatgccggggccctct

SEQ ID NO: 3811 - RNA, 19 nt, synthetic construct
  source 1..19: mol_type = other RNA
gggcctcgagtgccgtgcc

SEQ ID NO: 3812 - RNA, 19 nt, synthetic construct
  source 1..19: mol_type = other RNA
accgcaaccactggatcca

SEQ ID NO: 3813 - RNA, 19 nt, synthetic construct
  source 1..19: mol_type = other RNA
ccccatgccggggccctct

SEQ ID NO: 3814 - RNA, 19 nt, synthetic construct
  source 1..19: mol_type = other RNA
gggcctcgagtgccgtgcc

SEQ ID NO: 3815 - RNA, 19 nt, synthetic construct
  source 1..19: mol_type = other RNA
ccccatgccggggccctct

SEQ ID NO: 3816 - RNA, 19 nt, synthetic construct
  source 1..19: mol_type = other RNA
gggcctcgagtgccgtgcc

SEQ ID NO: 3817 - RNA, 19 nt, synthetic construct
  source 1..19: mol_type = other RNA
cacccacaccgccagagtg

SEQ ID NO: 3818 - RNA, 19 nt, synthetic construct
  source 1..19: mol_type = other RNA
ccagtcctgcgtgtgtgac

SEQ ID NO: 3819 - RNA, 19 nt, synthetic construct
  source 1..19: mol_type = other RNA
ccccgagcgcgtgccggac

SEQ ID NO: 3820 - RNA, 19 nt, synthetic construct
  source 1..19: mol_type = other RNA
gtcctcgcccacccggcgc

SEQ ID NO: 3821 - RNA, 19 nt, synthetic construct
  source 1..19: mol_type = other RNA
ttctctgagcactgccgcg

SEQ ID NO: 3822 - RNA, 19 nt, synthetic construct
  source 1..19: mol_type = other RNA
tctctgagcactgccgcgc

SEQ ID NO: 3823 - RNA, 19 nt, synthetic construct
  source 1..19: mol_type = other RNA
ctctgagcactgccgcgcc

SEQ ID NO: 3824 - RNA, 19 nt, synthetic construct
  source 1..19: mol_type = other RNA
tcatcaatgggcagcggga

SEQ ID NO: 3825 - RNA, 19 nt, synthetic construct
  source 1..19: mol_type = other RNA
catcaatgggcagcgggag

SEQ ID NO: 3826 - RNA, 19 nt, synthetic construct
  source 1..19: mol_type = other RNA
gcatccggctggtgctgac

SEQ ID NO: 3827 - RNA, 19 nt, synthetic construct
  source 1..19: mol_type = other RNA
ggcctcccggccttcaacg

SEQ ID NO: 3828 - RNA, 19 nt, synthetic construct
  source 1..19: mol_type = other RNA
gtgccacctttgtggaata

SEQ ID NO: 3829 - RNA, 19 nt, synthetic construct
  source 1..19: mol_type = other RNA
gacctgccccctcaacatg

SEQ ID NO: 3830 - RNA, 19 nt, synthetic construct
  source 1..19: mol_type = other RNA
ggagtgtggctcaccctgc

SEQ ID NO: 3831 - RNA, 19 nt, synthetic construct
  source 1..19: mol_type = other RNA
atgacatcacgcactctgg

SEQ ID NO: 3832 - RNA, 19 nt, synthetic construct
  source 1..19: mol_type = other RNA
agctgcggaagtgcggcct

SEQ ID NO: 3833 - RNA, 19 nt, synthetic construct
  source 1..19: mol_type = other RNA
cggtgacgctcagcctgga

SEQ ID NO: 3834 - RNA, 19 nt, synthetic construct
  source 1..19: mol_type = other RNA
ctgacgacttcacggccct

SEQ ID NO: 3835 - RNA, 19 nt, synthetic construct
  source 1..19: mol_type = other RNA
tgacgacttcacggccctc

SEQ ID NO: 3836 - RNA, 19 nt, synthetic construct
  source 1..19: mol_type = other RNA
ttcacggccctcagcgggg

SEQ ID NO: 3837 - RNA, 19 nt, synthetic construct
  source 1..19: mol_type = other RNA
tgccaatgccaggaacagc

SEQ ID NO: 3838 - RNA, 19 nt, synthetic construct
  source 1..19: mol_type = other RNA
cctgaccgatcccaacagt

SEQ ID NO: 3839 - RNA, 19 nt, synthetic construct
  source 1..19: mol_type = other RNA
gcccttccactcgaactgc

SEQ ID NO: 3840 - RNA, 19 nt, synthetic construct
  source 1..19: mol_type = other RNA
gccccaagtcccagcgcta

SEQ ID NO: 3841 - RNA, 19 nt, synthetic construct
  source 1..19: mol_type = other RNA
ccagcccacttgccgcggc

SEQ ID NO: 3842 - RNA, 19 nt, synthetic construct
  source 1..19: mol_type = other RNA
cagcccacttgccgcggcc

SEQ ID NO: 3843 - RNA, 19 nt, synthetic construct
  source 1..19: mol_type = other RNA
tgcagcgtttccttcgtgc

SEQ ID NO: 3844 - RNA, 19 nt, synthetic construct
  source 1..19: mol_type = other RNA
tgcagcccccatggtgtac

SEQ ID NO: 3845 - RNA, 19 nt, synthetic construct
  source 1..19: mol_type = other RNA
cacgggatggccgtgtcct

SEQ ID NO: 3846 - RNA, 19 nt, synthetic construct
  source 1..19: mol_type = other RNA
cggtccgtggtgggggacg

SEQ ID NO: 3847 - RNA, 19 nt, synthetic construct
  source 1..19: mol_type = other RNA
tgcctgcgactcgggtggc

SEQ ID NO: 3848 - RNA, 19 nt, synthetic construct
  source 1..19: mol_type = other RNA
gcccaggcctgccacgacg

SEQ ID NO: 3849 - RNA, 19 nt, synthetic construct
  source 1..19: mol_type = other RNA
cccaggcctgccacgacgc

SEQ ID NO: 3850 - RNA, 19 nt, synthetic construct
  source 1..19: mol_type = other RNA
tatgaggacaggacctaca

SEQ ID NO: 3851 - RNA, 19 nt, synthetic construct
  source 1..19: mol_type = other RNA
caccgatgggcttggcgcc

SEQ ID NO: 3852 - RNA, 19 nt, synthetic construct
  source 1..19: mol_type = other RNA
ctgcggaagcaacggcacc

SEQ ID NO: 3853 - RNA, 19 nt, synthetic construct
  source 1..19: mol_type = other RNA
gtctccaccgtgtgtgtcc

SEQ ID NO: 3854 - RNA, 19 nt, synthetic construct
  source 1..19: mol_type = other RNA
ggccccgtgacggtcaccc

SEQ ID NO: 3855 - RNA, 19 nt, synthetic construct
  source 1..19: mol_type = other RNA
ctgaccagggctcccccgg

SEQ ID NO: 3856 - RNA, 19 nt, synthetic construct
  source 1..19: mol_type = other RNA
gaaggactgacatccccca

SEQ ID NO: 3857 - RNA, 19 nt, synthetic construct
  source 1..19: mol_type = other RNA
ccacgggaggccccacgac

SEQ ID NO: 3858 - RNA, 19 nt, synthetic construct
  source 1..19: mol_type = other RNA
acgctggccccaacaacaa

SEQ ID NO: 3859 - RNA, 19 nt, synthetic construct
  source 1..19: mol_type = other RNA
agagccgctgaccacgagc

SEQ ID NO: 3860 - RNA, 19 nt, synthetic construct
  source 1..19: mol_type = other RNA
tccacctctcaggccgaga

SEQ ID NO: 3861 - RNA, 19 nt, synthetic construct
  source 1..19: mol_type = other RNA
actaccaaagtgccaacta

SEQ ID NO: 3862 - RNA, 19 nt, synthetic construct
  source 1..19: mol_type = other RNA
ccaactaccacaaccacgg

SEQ ID NO: 3863 - RNA, 19 nt, synthetic construct
  source 1..19: mol_type = other RNA
cacacccacaaccagaggc

SEQ ID NO: 3864 - RNA, 19 nt, synthetic construct
  source 1..19: mol_type = other RNA
agaccagtggtactccccc

SEQ ID NO: 3865 - RNA, 19 nt, synthetic construct
  source 1..19: mol_type = other RNA
accaccacggccactacga

SEQ ID NO: 3866 - RNA, 19 nt, synthetic construct
  source 1..19: mol_type = other RNA
acgatcacggccaccggct

SEQ ID NO: 3867 - RNA, 19 nt, synthetic construct
  source 1..19: mol_type = other RNA
cccagtgctgaccaccacc

SEQ ID NO: 3868 - RNA, 19 nt, synthetic construct
  source 1..19: mol_type = other RNA
gtgccgaacaccatggcca

SEQ ID NO: 3869 - RNA, 19 nt, synthetic construct
  source 1..19: mol_type = other RNA
accaccggtaccacccagc

SEQ ID NO: 3870 - RNA, 19 nt, synthetic construct
  source 1..19: mol_type = other RNA
tgcggccggaggggccgtc

SEQ ID NO: 3871 - RNA, 19 nt, synthetic construct
  source 1..19: mol_type = other RNA
tcctcacagagccgagcac

SEQ ID NO: 3872 - RNA, 19 nt, synthetic construct
  source 1..19: mol_type = other RNA
gagactgtccacacctcca

SEQ ID NO: 3873 - RNA, 19 nt, synthetic construct
  source 1..19: mol_type = other RNA
gctgactaccacaaccacg

SEQ ID NO: 3874 - RNA, 19 nt, synthetic construct
  source 1..19: mol_type = other RNA
agaccagtggtactccccc

SEQ ID NO: 3875 - RNA, 19 nt, synthetic construct
  source 1..19: mol_type = other RNA
accaccacggccactacga

SEQ ID NO: 3876 - RNA, 19 nt, synthetic construct
  source 1..19: mol_type = other RNA
acgatcacggccaccggct

SEQ ID NO: 3877 - RNA, 19 nt, synthetic construct
  source 1..19: mol_type = other RNA
cccagtgctgaccaccacc

SEQ ID NO: 3878 - RNA, 19 nt, synthetic construct
  source 1..19: mol_type = other RNA
accaccggtaccacccagc

SEQ ID NO: 3879 - RNA, 19 nt, synthetic construct
  source 1..19: mol_type = other RNA
tgcggccggaggggccgtc

SEQ ID NO: 3880 - RNA, 19 nt, synthetic construct
  source 1..19: mol_type = other RNA
tgcaaccacccttccagtg

SEQ ID NO: 3881 - RNA, 19 nt, synthetic construct
  source 1..19: mol_type = other RNA
cacccttccagtgctgaca

SEQ ID NO: 3882 - RNA, 19 nt, synthetic construct
  source 1..19: mol_type = other RNA
cacacctccacagtgctga

SEQ ID NO: 3883 - RNA, 19 nt, synthetic construct
  source 1..19: mol_type = other RNA
tgaccacgaaggccaccac

SEQ ID NO: 3884 - RNA, 19 nt, synthetic construct
  source 1..19: mol_type = other RNA
accctcaaagtgctgacca

SEQ ID NO: 3885 - RNA, 19 nt, synthetic construct
  source 1..19: mol_type = other RNA
gagactgtccacacctcca

SEQ ID NO: 3886 - RNA, 19 nt, synthetic construct
  source 1..19: mol_type = other RNA
cacacccacaaccagaggc

SEQ ID NO: 3887 - RNA, 19 nt, synthetic construct
  source 1..19: mol_type = other RNA
agaccagtggtactccccc

SEQ ID NO: 3888 - RNA, 19 nt, synthetic construct
  source 1..19: mol_type = other RNA
accaccacggccactacga

SEQ ID NO: 3889 - RNA, 19 nt, synthetic construct
  source 1..19: mol_type = other RNA
ctacgatcacagccaccgg

SEQ ID NO: 3890 - RNA, 19 nt, synthetic construct
  source 1..19: mol_type = other RNA
cccagtgctgaccaccacc

SEQ ID NO: 3891 - RNA, 19 nt, synthetic construct
  source 1..19: mol_type = other RNA
acggtggtgaccacgggct

SEQ ID NO: 3892 - RNA, 19 nt, synthetic construct
  source 1..19: mol_type = other RNA
tcctcacagagccgagcac

SEQ ID NO: 3893 - RNA, 19 nt, synthetic construct
  source 1..19: mol_type = other RNA
aaccacgggcttcacagtc

SEQ ID NO: 3894 - RNA, 19 nt, synthetic construct
  source 1..19: mol_type = other RNA
agaccagtggtactccccc

SEQ ID NO: 3895 - RNA, 19 nt, synthetic construct
  source 1..19: mol_type = other RNA
acgatcacggccaccggct

SEQ ID NO: 3896 - RNA, 19 nt, synthetic construct
  source 1..19: mol_type = other RNA
cccagtgctgaccaccacc

SEQ ID NO: 3897 - RNA, 19 nt, synthetic construct
  source 1..19: mol_type = other RNA
accaccggtaccacccagc

SEQ ID NO: 3898 - RNA, 19 nt, synthetic construct
  source 1..19: mol_type = other RNA
acggtggtgaccacgggct

SEQ ID NO: 3899 - RNA, 19 nt, synthetic construct
  source 1..19: mol_type = other RNA
tgcggccggaggggccgtc

SEQ ID NO: 3900 - RNA, 19 nt, synthetic construct
  source 1..19: mol_type = other RNA
tgcaaccacccttccagtg

SEQ ID NO: 3901 - RNA, 19 nt, synthetic construct
  source 1..19: mol_type = other RNA
cacccttccagtgctgaca

SEQ ID NO: 3902 - RNA, 19 nt, synthetic construct
  source 1..19: mol_type = other RNA
cacacctccacagtgctga

SEQ ID NO: 3903 - RNA, 19 nt, synthetic construct
  source 1..19: mol_type = other RNA
tgaccacgaaggccaccac

SEQ ID NO: 3904 - RNA, 19 nt, synthetic construct
  source 1..19: mol_type = other RNA
accagttccacgtccaccc

SEQ ID NO: 3905 - RNA, 19 nt, synthetic construct
  source 1..19: mol_type = other RNA
tcctcacagagccgagcac

SEQ ID NO: 3906 - RNA, 19 nt, synthetic construct
  source 1..19: mol_type = other RNA
gagactgtccacacctcca

SEQ ID NO: 3907 - RNA, 19 nt, synthetic construct
  source 1..19: mol_type = other RNA
agaccagtggtactccccc

SEQ ID NO: 3908 - RNA, 19 nt, synthetic construct
  source 1..19: mol_type = other RNA
accaccacggccactacga

SEQ ID NO: 3909 - RNA, 19 nt, synthetic construct
  source 1..19: mol_type = other RNA
acgatcacggccaccggct

SEQ ID NO: 3910 - RNA, 19 nt, synthetic construct
  source 1..19: mol_type = other RNA
tgcaaccacccttccagtg

SEQ ID NO: 3911 - RNA, 19 nt, synthetic construct
  source 1..19: mol_type = other RNA
cacccttccagtgctgaca

SEQ ID NO: 3912 - RNA, 19 nt, synthetic construct
  source 1..19: mol_type = other RNA
cacacctccacagtgctga

SEQ ID NO: 3913 - RNA, 19 nt, synthetic construct
  source 1..19: mol_type = other RNA
cactctggggacgacccgg

SEQ ID NO: 3914 - RNA, 19 nt, synthetic construct
  source 1..19: mol_type = other RNA
tcctcacagagccgagcac

SEQ ID NO: 3915 - RNA, 19 nt, synthetic construct
  source 1..19: mol_type = other RNA
gtccaccgtggggaccacc

SEQ ID NO: 3916 - RNA, 19 nt, synthetic construct
  source 1..19: mol_type = other RNA
ctgccaaccttcagcgtgt

SEQ ID NO: 3917 - RNA, 19 nt, synthetic construct
  source 1..19: mol_type = other RNA
tcactgtcaccatggtgca

SEQ ID NO: 3918 - RNA, 19 nt, synthetic construct
  source 1..19: mol_type = other RNA
cgtgagcgtcaccttcaat

SEQ ID NO: 3919 - RNA, 19 nt, synthetic construct
  source 1..19: mol_type = other RNA
agaaaggatggctgctggg

SEQ ID NO: 3920 - RNA, 19 nt, synthetic construct
  source 1..19: mol_type = other RNA
cccccgggcccattcttca

SEQ ID NO: 3921 - RNA, 19 nt, synthetic construct
  source 1..19: mol_type = other RNA
ccggtggcctgtgcgacct

SEQ ID NO: 3922 - RNA, 19 nt, synthetic construct
  source 1..19: mol_type = other RNA
tgccagtcctgcgtgtgtg

SEQ ID NO: 3923 - RNA, 19 nt, synthetic construct
  source 1..19: mol_type = other RNA
tgtgcgtgtgcaacacaac

SEQ ID NO: 3924 - RNA, 19 nt, synthetic construct
  source 1..19: mol_type = other RNA
caccttccgctgcagacct

SEQ ID NO: 3925 - RNA, 19 nt, synthetic construct
  source 1..19: mol_type = other RNA
ggagtccatttgctgaccc

SEQ ID NO: 3926 - RNA, 19 nt, synthetic construct
  source 1..19: mol_type = other RNA
aagtactcagcagaggccc

SEQ ID NO: 3927 - RNA, 19 nt, synthetic construct
  source 1..19: mol_type = other RNA
acacctacacccacgtgga

SEQ ID NO: 3928 - RNA, 19 nt, synthetic construct
  source 1..19: mol_type = other RNA
atgtgcattgtctgatcat

SEQ ID NO: 3929 - RNA, 19 nt, synthetic construct
  source 1..19: mol_type = other RNA
tgtgcattgtctgatcatg

SEQ ID NO: 3930 - RNA, 19 nt, synthetic construct
  source 1..19: mol_type = other RNA
gaaaaccttgggcctcctc

SEQ ID NO: 3931 - RNA, 19 nt, synthetic construct
  source 1..19: mol_type = other RNA
gtgggtgaaaccggcccca

SEQ ID NO: 3932 - RNA, 19 nt, synthetic construct
  source 1..19: mol_type = other RNA
aaccggccccagaagggtg

SEQ ID NO: 3933 - RNA, 19 nt, synthetic construct
  source 1..19: mol_type = other RNA
ttcgggagggcgccactca

SEQ ID NO: 3934 - RNA, 19 nt, synthetic construct
  source 1..19: mol_type = other RNA
ggagtcctaccctgggaga

SEQ ID NO: 3935 - RNA, 19 nt, synthetic construct
  source 1..19: mol_type = other RNA
ccctggaacaaactaagca

SEQ ID NO: 3936 - RNA, 19 nt, synthetic construct
  source 1..19: mol_type = other RNA
caaggcggccgcctgtcca

SEQ ID NO: 3937 - RNA, 19 nt, synthetic construct
  source 1..19: mol_type = other RNA
gccccggtgtctagcacac

SEQ ID NO: 3938 - RNA, 19 nt, synthetic construct
  source 1..19: mol_type = other RNA
gcggggggccagccgcgga

SEQ ID NO: 3939 - RNA, 19 nt, synthetic construct
  source 1..19: mol_type = other RNA
aaagtgccaactaccacaa

SEQ ID NO: 3940 - RNA, 19 nt, synthetic construct
  source 1..19: mol_type = other RNA
actggttctatggcaacac

SEQ ID NO: 3941 - RNA, 19 nt, synthetic construct
  source 1..19: mol_type = other RNA
actggttctatggcaacac

SEQ ID NO: 3942 - RNA, 19 nt, synthetic construct
  source 1..19: mol_type = other RNA
actggttctatggcaacac

SEQ ID NO: 3943 - RNA, 19 nt, synthetic construct
  source 1..19: mol_type = other RNA
actggttctatggcaacac

SEQ ID NO: 3944 - RNA, 19 nt, synthetic construct
  source 1..19: mol_type = other RNA
actggttctatggcaacac

SEQ ID NO: 3945 - RNA, 19 nt, synthetic construct
  source 1..19: mol_type = other RNA
cctgccctgggcgtgagcg

SEQ ID NO: 3946 - RNA, 19 nt, synthetic construct
  source 1..19: mol_type = other RNA
ccccgggcccattcttcaa

SEQ ID NO: 3947 - RNA, 19 nt, synthetic construct
  source 1..19: mol_type = other RNA
ccgcttccagggcgcctgt

SEQ ID NO: 3948 - RNA, 19 nt, synthetic construct
  source 1..19: mol_type = other RNA
gcccggacgccctggcacc

SEQ ID NO: 3949 - RNA, 19 nt, synthetic construct
  source 1..19: mol_type = other RNA
acgaccaccacaaccaggg

SEQ ID NO: 3950 - RNA, 19 nt, synthetic construct
  source 1..19: mol_type = other RNA
cacatgtgagcaccacggc

SEQ ID NO: 3951 - RNA, 19 nt, synthetic construct
  source 1..19: mol_type = other RNA
acccttccagtgctgacaa

SEQ ID NO: 3952 - RNA, 19 nt, synthetic construct
  source 1..19: mol_type = other RNA
cacatgtgagcaccacggc

SEQ ID NO: 3953 - RNA, 19 nt, synthetic construct
  source 1..19: mol_type = other RNA
ccaccaaagtgtacaagcc

SEQ ID NO: 3954 - RNA, 19 nt, synthetic construct
  source 1..19: mol_type = other RNA
gggacttcaacggcctccc

SEQ ID NO: 3955 - RNA, 19 nt, synthetic construct
  source 1..19: mol_type = other RNA
cccggacctgccccctcaa

SEQ ID NO: 3956 - RNA, 19 nt, synthetic construct
  source 1..19: mol_type = other RNA
tggaggccacgggcgcagc

SEQ ID NO: 3957 - RNA, 19 nt, synthetic construct
  source 1..19: mol_type = other RNA
atgggcaccgcccagagcc

SEQ ID NO: 3958 - RNA, 19 nt, synthetic construct
  source 1..19: mol_type = other RNA
tggccacatccacccttcc

SEQ ID NO: 3959 - RNA, 19 nt, synthetic construct
  source 1..19: mol_type = other RNA
cccttctccagggacgacc

SEQ ID NO: 3960 - RNA, 19 nt, synthetic construct
  source 1..19: mol_type = other RNA
cccttctccagggacgacc

SEQ ID NO: 3961 - RNA, 19 nt, synthetic construct
  source 1..19: mol_type = other RNA
gggaccctcccagaacaga

SEQ ID NO: 3962 - RNA, 19 nt, synthetic construct
  source 1..19: mol_type = other RNA
cccttctccagggacgacc

SEQ ID NO: 3963 - RNA, 19 nt, synthetic construct
  source 1..19: mol_type = other RNA
tgcggccggaggggcagtc

SEQ ID NO: 3964 - RNA, 19 nt, synthetic construct
  source 1..19: mol_type = other RNA
gggaccctcccagaacaga

SEQ ID NO: 3965 - RNA, 19 nt, synthetic construct
  source 1..19: mol_type = other RNA
accaccacacccgtggcca

SEQ ID NO: 3966 - RNA, 19 nt, synthetic construct
  source 1..19: mol_type = other RNA
ggaggagggcgactgctgt

SEQ ID NO: 3967 - RNA, 19 nt, synthetic construct
  source 1..19: mol_type = other RNA
acccttccagtgctgacaa

SEQ ID NO: 3968 - RNA, 19 nt, synthetic construct
  source 1..19: mol_type = other RNA
tgccaaccttcagcgtgtc

SEQ ID NO: 3969 - RNA, 19 nt, synthetic construct
  source 1..19: mol_type = other RNA
ggctgctacgacaaggacg

SEQ ID NO: 3970 - RNA, 19 nt, synthetic construct
  source 1..19: mol_type = other RNA
gcccacccggcgcgtgagc

SEQ ID NO: 3971 - RNA, 19 nt, synthetic construct
  source 1..19: mol_type = other RNA
gagaatgcagggcacacca

SEQ ID NO: 3972 - RNA, 19 nt, synthetic construct
  source 1..19: mol_type = other RNA
catgtccacaatccacccc

SEQ ID NO: 3973 - RNA, 19 nt, synthetic construct
  source 1..19: mol_type = other RNA
catgtccacaatccacccc

SEQ ID NO: 3974 - RNA, 19 nt, synthetic construct
  source 1..19: mol_type = other RNA
tgcccgtgtgccacctttg

SEQ ID NO: 3975 - RNA, 19 nt, synthetic construct
  source 1..19: mol_type = other RNA
agggacggcactcacgcct

SEQ ID NO: 3976 - RNA, 19 nt, synthetic construct
  source 1..19: mol_type = other RNA
agggacggcactcacgcct

SEQ ID NO: 3977 - RNA, 19 nt, synthetic construct
  source 1..19: mol_type = other RNA
ctcgcagactgggtccagc

SEQ ID NO: 3978 - RNA, 19 nt, synthetic construct
  source 1..19: mol_type = other RNA
cataaccacggtggtgacc

SEQ ID NO: 3979 - RNA, 19 nt, synthetic construct
  source 1..19: mol_type = other RNA
aataaccacggtggtgacc

SEQ ID NO: 3980 - RNA, 19 nt, synthetic construct
  source 1..19: mol_type = other RNA
cataaccacggtggtgacc

SEQ ID NO: 3981 - RNA, 19 nt, synthetic construct
  source 1..19: mol_type = other RNA
cataaccacggtggtgacc

SEQ ID NO: 3982 - RNA, 19 nt, synthetic construct
  source 1..19: mol_type = other RNA
tcaacatgcagcaccagga

SEQ ID NO: 3983 - RNA, 19 nt, synthetic construct
  source 1..19: mol_type = other RNA
tcgagtgccgggcggcgca

SEQ ID NO: 3984 - RNA, 19 nt, synthetic construct
  source 1..19: mol_type = other RNA
acgcccaggacagagacga

SEQ ID NO: 3985 - RNA, 19 nt, synthetic construct
  source 1..19: mol_type = other RNA
ctcctgggacaactcccat

SEQ ID NO: 3986 - RNA, 19 nt, synthetic construct
  source 1..19: mol_type = other RNA
tccacggggacttcccaca

SEQ ID NO: 3987 - RNA, 19 nt, synthetic construct
  source 1..19: mol_type = other RNA
tccacaatccacccctcct

SEQ ID NO: 3988 - RNA, 19 nt, synthetic construct
  source 1..19: mol_type = other RNA
tccacggggacttcccaca

SEQ ID NO: 3989 - RNA, 19 nt, synthetic construct
  source 1..19: mol_type = other RNA
tccacaatccacccctcct

SEQ ID NO: 3990 - RNA, 19 nt, synthetic construct
  source 1..19: mol_type = other RNA
ctccagggacaacacccat

SEQ ID NO: 3991 - RNA, 19 nt, synthetic construct
  source 1..19: mol_type = other RNA
tgggaatctcagcctctac

SEQ ID NO: 3992 - RNA, 19 nt, synthetic construct
  source 1..19: mol_type = other RNA
accggccccagaagggtga

SEQ ID NO: 3993 - RNA, 19 nt, synthetic construct
  source 1..19: mol_type = other RNA
cagcacggattccagctgg

SEQ ID NO: 3994 - RNA, 19 nt, synthetic construct
  source 1..19: mol_type = other RNA
cgcccggcactggtgctcg

SEQ ID NO: 3995 - RNA, 19 nt, synthetic construct
  source 1..19: mol_type = other RNA
gcggggactttgacaccta

SEQ ID NO: 3996 - RNA, 19 nt, synthetic construct
  source 1..19: mol_type = other RNA
gcggggactttgacaccta

SEQ ID NO: 3997 - RNA, 19 nt, synthetic construct
  source 1..19: mol_type = other RNA
gcggggactttgacaccta

SEQ ID NO: 3998 - RNA, 19 nt, synthetic construct
  source 1..19: mol_type = other RNA
tccgtgcggccggaggggc

SEQ ID NO: 3999 - RNA, 19 nt, synthetic construct
  source 1..19: mol_type = other RNA
gcggggactttgacaccta

SEQ ID NO: 4000 - RNA, 19 nt, synthetic construct
  source 1..19: mol_type = other RNA
gggtcagcaactgccagtc

SEQ ID NO: 4001 - RNA, 19 nt, synthetic construct
  source 1..19: mol_type = other RNA
agggacggcactcacgcct

SEQ ID NO: 4002 - RNA, 19 nt, synthetic construct
  source 1..19: mol_type = other RNA
ctggggacgacccggatcc

SEQ ID NO: 4003 - RNA, 19 nt, synthetic construct
  source 1..19: mol_type = other RNA
ggccaccagttccacgtcc

SEQ ID NO: 4004 - RNA, 19 nt, synthetic construct
  source 1..19: mol_type = other RNA
acgatcacagccaccggct

SEQ ID NO: 4005 - RNA, 19 nt, synthetic construct
  source 1..19: mol_type = other RNA
catgtggggcggctcccac

SEQ ID NO: 4006 - RNA, 19 nt, synthetic construct
  source 1..19: mol_type = other RNA
gaactggaggtgccctgag

SEQ ID NO: 4007 - RNA, 19 nt, synthetic construct
  source 1..19: mol_type = other RNA
agcaacggcaccatcatca

SEQ ID NO: 4008 - RNA, 19 nt, synthetic construct
  source 1..19: mol_type = other RNA
cagccagcaccgcttccaa

SEQ ID NO: 4009 - RNA, 19 nt, synthetic construct
  source 1..19: mol_type = other RNA
ctcacactaccaaagtgcc

SEQ ID NO: 4010 - RNA, 19 nt, synthetic construct
  source 1..19: mol_type = other RNA
aaccttcagcgtgtccact

SEQ ID NO: 4011 - RNA, 19 nt, synthetic construct
  source 1..19: mol_type = other RNA
acctgggtcaacagccatg

SEQ ID NO: 4012 - RNA, 19 nt, synthetic construct
  source 1..19: mol_type = other RNA
gagtccatttgctgacccc

SEQ ID NO: 4013 - RNA, 19 nt, synthetic construct
  source 1..19: mol_type = other RNA
ggcggccgcctgtccatgc

SEQ ID NO: 4014 - RNA, 19 nt, synthetic construct
  source 1..19: mol_type = other RNA
tgcggaagtgcggcctgac

SEQ ID NO: 4015 - RNA, 19 nt, synthetic construct
  source 1..19: mol_type = other RNA
cctagggaccacccacaca

SEQ ID NO: 4016 - RNA, 19 nt, synthetic construct
  source 1..19: mol_type = other RNA
cctagggaccacccacaca

SEQ ID NO: 4017 - RNA, 19 nt, synthetic construct
  source 1..19: mol_type = other RNA
cctagggaccacccacaca

SEQ ID NO: 4018 - RNA, 19 nt, synthetic construct
  source 1..19: mol_type = other RNA
cctagggaccacccacaca

SEQ ID NO: 4019 - RNA, 19 nt, synthetic construct
  source 1..19: mol_type = other RNA
gcccaccggttccacggcc

SEQ ID NO: 4020 - RNA, 19 nt, synthetic construct
  source 1..19: mol_type = other RNA
ggaagctgcgacaggcaag

SEQ ID NO: 4021 - RNA, 19 nt, synthetic construct
  source 1..19: mol_type = other RNA
ggtacaatgggcaccgccc

SEQ ID NO: 4022 - RNA, 19 nt, synthetic construct
  source 1..19: mol_type = other RNA
agaaccaccgagtcacccc

SEQ ID NO: 4023 - RNA, 19 nt, synthetic construct
  source 1..19: mol_type = other RNA
cacccagcaagacccgcac

SEQ ID NO: 4024 - RNA, 19 nt, synthetic construct
  source 1..19: mol_type = other RNA
cacccagcaagacccgcac

SEQ ID NO: 4025 - RNA, 19 nt, synthetic construct
  source 1..19: mol_type = other RNA
ggactgcaaccacccttcc

SEQ ID NO: 4026 - RNA, 19 nt, synthetic construct
  source 1..19: mol_type = other RNA
cacccagcaagacccgcac

SEQ ID NO: 4027 - RNA, 19 nt, synthetic construct
  source 1..19: mol_type = other RNA
cacccagcaagacccgcac

SEQ ID NO: 4028 - RNA, 19 nt, synthetic construct
  source 1..19: mol_type = other RNA
ggactgcaaccacccttcc

SEQ ID NO: 4029 - RNA, 19 nt, synthetic construct
  source 1..19: mol_type = other RNA
ggactgcaaccacccttcc

SEQ ID NO: 4030 - RNA, 19 nt, synthetic construct
  source 1..19: mol_type = other RNA
agccagtccagctgaatga

SEQ ID NO: 4031 - RNA, 19 nt, synthetic construct
  source 1..19: mol_type = other RNA
ctccctgatgtcactggga

SEQ ID NO: 4032 - RNA, 19 nt, synthetic construct
  source 1..19: mol_type = other RNA
ggtggacagcactgcgtac

SEQ ID NO: 4033 - RNA, 19 nt, synthetic construct
  source 1..19: mol_type = other RNA
cagagactgtccacacctc

SEQ ID NO: 4034 - RNA, 19 nt, synthetic construct
  source 1..19: mol_type = other RNA
cagggacgaccaccccggg

SEQ ID NO: 4035 - RNA, 19 nt, synthetic construct
  source 1..19: mol_type = other RNA
cagggacgaccaccccggg

SEQ ID NO: 4036 - RNA, 19 nt, synthetic construct
  source 1..19: mol_type = other RNA
cagggacgaccaccccggg

SEQ ID NO: 4037 - RNA, 19 nt, synthetic construct
  source 1..19: mol_type = other RNA
cagggacgaccaccccggg

SEQ ID NO: 4038 - RNA, 19 nt, synthetic construct
  source 1..19: mol_type = other RNA
ctgcccgtgtgccaccttt

SEQ ID NO: 4039 - RNA, 19 nt, synthetic construct
  source 1..19: mol_type = other RNA
cgacccggatcctcactga

SEQ ID NO: 4040 - RNA, 19 nt, synthetic construct
  source 1..19: mol_type = other RNA
tggagtccatttgctgacc

SEQ ID NO: 4041 - RNA, 19 nt, synthetic construct
  source 1..19: mol_type = other RNA
tgggtgaaaccggccccag

SEQ ID NO: 4042 - RNA, 19 nt, synthetic construct
  source 1..19: mol_type = other RNA
cggccggcaactgcacgga

SEQ ID NO: 4043 - RNA, 19 nt, synthetic construct
  source 1..19: mol_type = other RNA
gacgacttcacggccctca

SEQ ID NO: 4044 - RNA, 19 nt, synthetic construct
  source 1..19: mol_type = other RNA
gagggccgggtggggaccc

SEQ ID NO: 4045 - RNA, 19 nt, synthetic construct
  source 1..19: mol_type = other RNA
tgctacgacaaggacggaa

SEQ ID NO: 4046 - RNA, 19 nt, synthetic construct
  source 1..19: mol_type = other RNA
gagctggagacggccacca

SEQ ID NO: 4047 - RNA, 19 nt, synthetic construct
  source 1..19: mol_type = other RNA
cagccaccacgggaggccc

SEQ ID NO: 4048 - RNA, 19 nt, synthetic construct
  source 1..19: mol_type = other RNA
gaggctccacggtgacccc

SEQ ID NO: 4049 - RNA, 19 nt, synthetic construct
  source 1..19: mol_type = other RNA
acccacaccgccacagtgc

SEQ ID NO: 4050 - RNA, 19 nt, synthetic construct
  source 1..19: mol_type = other RNA
caccacaactgtggccact

SEQ ID NO: 4051 - RNA, 19 nt, synthetic construct
  source 1..19: mol_type = other RNA
acaccctagcagcaaccac

SEQ ID NO: 4052 - RNA, 19 nt, synthetic construct
  source 1..19: mol_type = other RNA
caccctagcagcaaccacc

SEQ ID NO: 4053 - RNA, 19 nt, synthetic construct
  source 1..19: mol_type = other RNA
gccacaccacggccacctc

SEQ ID NO: 4054 - RNA, 19 nt, synthetic construct
  source 1..19: mol_type = other RNA
cgtgcggccggaggggccg

SEQ ID NO: 4055 - RNA, 19 nt, synthetic construct
  source 1..19: mol_type = other RNA
caccacaactgtggccact

SEQ ID NO: 4056 - RNA, 19 nt, synthetic construct
  source 1..19: mol_type = other RNA
gccgaacaccacggccacc

SEQ ID NO: 4057 - RNA, 19 nt, synthetic construct
  source 1..19: mol_type = other RNA
cgtgcggccggaggggccg

SEQ ID NO: 4058 - RNA, 19 nt, synthetic construct
  source 1..19: mol_type = other RNA
tccacagctaccagcttta

SEQ ID NO: 4059 - RNA, 19 nt, synthetic construct
  source 1..19: mol_type = other RNA
accacaaccagggccaccg

SEQ ID NO: 4060 - RNA, 19 nt, synthetic construct
  source 1..19: mol_type = other RNA
gaggctccacggtgacccc

SEQ ID NO: 4061 - RNA, 19 nt, synthetic construct
  source 1..19: mol_type = other RNA
acccacaccgccacagtgc

SEQ ID NO: 4062 - RNA, 19 nt, synthetic construct
  source 1..19: mol_type = other RNA
caccacaactgtggccact

SEQ ID NO: 4063 - RNA, 19 nt, synthetic construct
  source 1..19: mol_type = other RNA
ccagggacaactcccatcc

SEQ ID NO: 4064 - RNA, 19 nt, synthetic construct
  source 1..19: mol_type = other RNA
gccgaacaccacggccacc

SEQ ID NO: 4065 - RNA, 19 nt, synthetic construct
  source 1..19: mol_type = other RNA
accacaaccagggccaccg

SEQ ID NO: 4066 - RNA, 19 nt, synthetic construct
  source 1..19: mol_type = other RNA
ctgcgtgaacgacgcgtgt

SEQ ID NO: 4067 - RNA, 19 nt, synthetic construct
  source 1..19: mol_type = other RNA
ctacgttctgtccaagaaa

SEQ ID NO: 4068 - RNA, 19 nt, synthetic construct
  source 1..19: mol_type = other RNA
caaatacgccaaccagacc

SEQ ID NO: 4069 - RNA, 19 nt, synthetic construct
  source 1..19: mol_type = other RNA
tccggtgagcagcggtttc

SEQ ID NO: 4070 - RNA, 19 nt, synthetic construct
  source 1..19: mol_type = other RNA
cttcaacgagttctatgcc

SEQ ID NO: 4071 - RNA, 19 nt, synthetic construct
  source 1..19: mol_type = other RNA
gaactacgcccggcactgg

SEQ ID NO: 4072 - RNA, 19 nt, synthetic construct
  source 1..19: mol_type = other RNA
caccgagaacatcccctgt

SEQ ID NO: 4073 - RNA, 19 nt, synthetic construct
  source 1..19: mol_type = other RNA
tacgttctgtccaagaaat

SEQ ID NO: 4074 - RNA, 19 nt, synthetic construct
  source 1..19: mol_type = other RNA
ctacaactacaggatccgg

SEQ ID NO: 4075 - RNA, 19 nt, synthetic construct
  source 1..19: mol_type = other RNA
cttccgcatcgtcaccgag

SEQ ID NO: 4076 - RNA, 19 nt, synthetic construct
  source 1..19: mol_type = other RNA
ctgacggacaacgagaact

SEQ ID NO: 4077 - RNA, 19 nt, synthetic construct
  source 1..19: mol_type = other RNA
cagggtcgactgcaacacc

SEQ ID NO: 4078 - RNA, 19 nt, synthetic construct
  source 1..19: mol_type = other RNA
tcgccaacacctggaaggc

SEQ ID NO: 4079 - RNA, 19 nt, synthetic construct
  source 1..19: mol_type = other RNA
aacgaggccacctacaagc

SEQ ID NO: 4080 - RNA, 19 nt, synthetic construct
  source 1..19: mol_type = other RNA
ccatcaagctcttcgtgga

SEQ ID NO: 4081 - RNA, 19 nt, synthetic construct
  source 1..19: mol_type = other RNA
agtggtttgacgtggactt

SEQ ID NO: 4082 - RNA, 19 nt, synthetic construct
  source 1..19: mol_type = other RNA
tgcgagtgtttctgcacgg

SEQ ID NO: 4083 - RNA, 19 nt, synthetic construct
  source 1..19: mol_type = other RNA
gcctgtgcgggaacttcga

SEQ ID NO: 4084 - RNA, 19 nt, synthetic construct
  source 1..19: mol_type = other RNA
atgactttgccacgcgtag

SEQ ID NO: 4085 - RNA, 19 nt, synthetic construct
  source 1..19: mol_type = other RNA
aatgactttgccacgcgta

SEQ ID NO: 4086 - RNA, 19 nt, synthetic construct
  source 1..19: mol_type = other RNA
tcctgtttgaccaaattcc

SEQ ID NO: 4087 - RNA, 19 nt, synthetic construct
  source 1..19: mol_type = other RNA
tcacaccctcgagcttctt

SEQ ID NO: 4088 - RNA, 19 nt, synthetic construct
  source 1..19: mol_type = other RNA
ggagcctcaggaaaaccgg

SEQ ID NO: 4089 - RNA, 19 nt, synthetic construct
  source 1..19: mol_type = other RNA
tgactttgccacgcgtagc

SEQ ID NO: 4090 - RNA, 19 nt, synthetic construct
  source 1..19: mol_type = other RNA
taccccaagtctgaacaac

SEQ ID NO: 4091 - RNA, 19 nt, synthetic construct
  source 1..19: mol_type = other RNA
tgacggcacctcttacacc

SEQ ID NO: 4092 - RNA, 19 nt, synthetic construct
  source 1..19: mol_type = other RNA
gtgaggccgacgtcacctg

SEQ ID NO: 4093 - RNA, 19 nt, synthetic construct
  source 1..19: mol_type = other RNA
aatgacgcgggcgcctgtg

SEQ ID NO: 4094 - RNA, 19 nt, synthetic construct
  source 1..19: mol_type = other RNA
ggagagctacgagctgatc

SEQ ID NO: 4095 - RNA, 19 nt, synthetic construct
  source 1..19: mol_type = other RNA
tgcggggcaccctgcctaa

SEQ ID NO: 4096 - RNA, 19 nt, synthetic construct
  source 1..19: mol_type = other RNA
gacagagtggtttgacgtg

SEQ ID NO: 4097 - RNA, 19 nt, synthetic construct
  source 1..19: mol_type = other RNA
ctgtcggcagccaacatca

SEQ ID NO: 4098 - RNA, 19 nt, synthetic construct
  source 1..19: mol_type = other RNA
aaatacgccaaccagacct

SEQ ID NO: 4099 - RNA, 19 nt, synthetic construct
  source 1..19: mol_type = other RNA
cctgcgtgaacgacgcgtg

SEQ ID NO: 4100 - RNA, 19 nt, synthetic construct
  source 1..19: mol_type = other RNA
cttcgtggagagctacgag

SEQ ID NO: 4101 - RNA, 19 nt, synthetic construct
  source 1..19: mol_type = other RNA
gcggggcaccctgcctaaa

SEQ ID NO: 4102 - RNA, 19 nt, synthetic construct
  source 1..19: mol_type = other RNA
gtgtgtgtccgcgaggtct

SEQ ID NO: 4103 - RNA, 19 nt, synthetic construct
  source 1..19: mol_type = other RNA
ggatgggcccacggagcag

SEQ ID NO: 4104 - RNA, 19 nt, synthetic construct
  source 1..19: mol_type = other RNA
ggccggcctttgcggagtg

SEQ ID NO: 4105 - RNA, 19 nt, synthetic construct
  source 1..19: mol_type = other RNA
ccttcctcaatgacgcggg

SEQ ID NO: 4106 - RNA, 19 nt, synthetic construct
  source 1..19: mol_type = other RNA
cacgggaccttccgcatcg

SEQ ID NO: 4107 - RNA, 19 nt, synthetic construct
  source 1..19: mol_type = other RNA
gagagctacgagctgatcc

SEQ ID NO: 4108 - RNA, 19 nt, synthetic construct
  source 1..19: mol_type = other RNA
agagctacgagctgatcct

SEQ ID NO: 4109 - RNA, 19 nt, synthetic construct
  source 1..19: mol_type = other RNA
acctgccggaaccccagtg

SEQ ID NO: 4110 - RNA, 19 nt, synthetic construct
  source 1..19: mol_type = other RNA
ctgccggaaccccagtggg

SEQ ID NO: 4111 - RNA, 19 nt, synthetic construct
  source 1..19: mol_type = other RNA
ttcaatgaggaccagatga

SEQ ID NO: 4112 - RNA, 19 nt, synthetic construct
  source 1..19: mol_type = other RNA
gaccagatgaagtgcgtgg

SEQ ID NO: 4113 - RNA, 19 nt, synthetic construct
  source 1..19: mol_type = other RNA
ctaccccaagtctgaacaa

SEQ ID NO: 4114 - RNA, 19 nt, synthetic construct
  source 1..19: mol_type = other RNA
ttgagtcctacgataagat

SEQ ID NO: 4115 - RNA, 19 nt, synthetic construct
  source 1..19: mol_type = other RNA
cccaaagtgctgaccacca

SEQ ID NO: 4116 - RNA, 19 nt, synthetic construct
  source 1..19: mol_type = other RNA
ggcacctgcaccaacaacc

SEQ ID NO: 4117 - RNA, 19 nt, synthetic construct
  source 1..19: mol_type = other RNA
agggctttgagtacaagag

SEQ ID NO: 4118 - RNA, 19 nt, synthetic construct
  source 1..19: mol_type = other RNA
gaatacgtgccctgtggcc

SEQ ID NO: 4119 - RNA, 19 nt, synthetic construct
  source 1..19: mol_type = other RNA
ccactatgagtgcgagtgc

SEQ ID NO: 4120 - RNA, 19 nt, synthetic construct
  source 1..19: mol_type = other RNA
cgtgtcctgggaccggaag

SEQ ID NO: 4121 - RNA, 19 nt, synthetic construct
  source 1..19: mol_type = other RNA
cacggtgacttcccacacc

SEQ ID NO: 4122 - RNA, 19 nt, synthetic construct
  source 1..19: mol_type = other RNA
gcctaaaaacctgccggaa

SEQ ID NO: 4123 - RNA, 19 nt, synthetic construct
  source 1..19: mol_type = other RNA
ccgctccagtttgggaacc

SEQ ID NO: 4124 - RNA, 19 nt, synthetic construct
  source 1..19: mol_type = other RNA
tgcgtgtccggctgtgtct

SEQ ID NO: 4125 - RNA, 19 nt, synthetic construct
  source 1..19: mol_type = other RNA
cagccttgaggcctgcacc

SEQ ID NO: 4126 - RNA, 19 nt, synthetic construct
  source 1..19: mol_type = other RNA
atccgtgtgttctgctgca

SEQ ID NO: 4127 - RNA, 19 nt, synthetic construct
  source 1..19: mol_type = other RNA
atccgtgtgttctgctgca

SEQ ID NO: 4128 - RNA, 19 nt, synthetic construct
  source 1..19: mol_type = other RNA
atccgtgtgttctgctgca

SEQ ID NO: 4129 - RNA, 19 nt, synthetic construct
  source 1..19: mol_type = other RNA
atccgtgtgttctgctgca

SEQ ID NO: 4130 - RNA, 19 nt, synthetic construct
  source 1..19: mol_type = other RNA
ctggacggcggggacacgg

SEQ ID NO: 4131 - RNA, 19 nt, synthetic construct
  source 1..19: mol_type = other RNA
cgtggcctacggggatggc

SEQ ID NO: 4132 - RNA, 19 nt, synthetic construct
  source 1..19: mol_type = other RNA
cccacgggaccttccgcat

SEQ ID NO: 4133 - RNA, 19 nt, synthetic construct
  source 1..19: mol_type = other RNA
cccaggttgactccaccaa

SEQ ID NO: 4134 - RNA, 19 nt, synthetic construct
  source 1..19: mol_type = other RNA
ctgaacaacttggagggga

SEQ ID NO: 4135 - RNA, 19 nt, synthetic construct
  source 1..19: mol_type = other RNA
ggggccgtctgtgagcagc

SEQ ID NO: 4136 - RNA, 19 nt, synthetic construct
  source 1..19: mol_type = other RNA
ggggccgtctgtgagcagc

SEQ ID NO: 4137 - RNA, 19 nt, synthetic construct
  source 1..19: mol_type = other RNA
ggggccgtctgtgagcagc

SEQ ID NO: 4138 - RNA, 19 nt, synthetic construct
  source 1..19: mol_type = other RNA
ggtgaatgagacctggacc

SEQ ID NO: 4139 - RNA, 19 nt, synthetic construct
  source 1..19: mol_type = other RNA
ttcctgtggaacggagagg

SEQ ID NO: 4140 - RNA, 19 nt, synthetic construct
  source 1..19: mol_type = other RNA
gcagaagttggatgggccc

SEQ ID NO: 4141 - RNA, 19 nt, synthetic construct
  source 1..19: mol_type = other RNA
agaagttggatgggcccac

SEQ ID NO: 4142 - RNA, 19 nt, synthetic construct
  source 1..19: mol_type = other RNA
ttggatgggcccacggagc

SEQ ID NO: 4143 - RNA, 19 nt, synthetic construct
  source 1..19: mol_type = other RNA
cctgtcggcagccaacatc

SEQ ID NO: 4144 - RNA, 19 nt, synthetic construct
  source 1..19: mol_type = other RNA
ctgttcacaccctcgagct

SEQ ID NO: 4145 - RNA, 19 nt, synthetic construct
  source 1..19: mol_type = other RNA
ttcaaccagaaccaggctg

SEQ ID NO: 4146 - RNA, 19 nt, synthetic construct
  source 1..19: mol_type = other RNA
atgcagaactgccccaagt

SEQ ID NO: 4147 - RNA, 19 nt, synthetic construct
  source 1..19: mol_type = other RNA
gcctgtggacggctgcacc

SEQ ID NO: 4148 - RNA, 19 nt, synthetic construct
  source 1..19: mol_type = other RNA
atgacgcgggcgcctgtgt

SEQ ID NO: 4149 - RNA, 19 nt, synthetic construct
  source 1..19: mol_type = other RNA
ctctctgcagaaaagcaca

SEQ ID NO: 4150 - RNA, 19 nt, synthetic construct
  source 1..19: mol_type = other RNA
cgtggagagctacgagctg

SEQ ID NO: 4151 - RNA, 19 nt, synthetic construct
  source 1..19: mol_type = other RNA
atggccgtgtcctgggacc

SEQ ID NO: 4152 - RNA, 19 nt, synthetic construct
  source 1..19: mol_type = other RNA
catcaatgactttgccacg

SEQ ID NO: 4153 - RNA, 19 nt, synthetic construct
  source 1..19: mol_type = other RNA
ccaagtactacgaggcctg

SEQ ID NO: 4154 - RNA, 19 nt, synthetic construct
  source 1..19: mol_type = other RNA
tgccacgacgcgggcctgt

SEQ ID NO: 4155 - RNA, 19 nt, synthetic construct
  source 1..19: mol_type = other RNA
tgcacctgcacctatgagg

SEQ ID NO: 4156 - RNA, 19 nt, synthetic construct
  source 1..19: mol_type = other RNA
cacggagcctgctgtgcct

SEQ ID NO: 4157 - RNA, 19 nt, synthetic construct
  source 1..19: mol_type = other RNA
tttgatgaggactacccca

SEQ ID NO: 4158 - RNA, 19 nt, synthetic construct
  source 1..19: mol_type = other RNA
ccaggccgagagcttcccc

SEQ ID NO: 4159 - RNA, 19 nt, synthetic construct
  source 1..19: mol_type = other RNA
accgaagtgtgagtggaca

SEQ ID NO: 4160 - RNA, 19 nt, synthetic construct
  source 1..19: mol_type = other RNA
acagagtggtttgacgtgg

SEQ ID NO: 4161 - RNA, 19 nt, synthetic construct
  source 1..19: mol_type = other RNA
ggctggactacagctaccc

SEQ ID NO: 4162 - RNA, 19 nt, synthetic construct
  source 1..19: mol_type = other RNA
ggtcgtggaatgcagcctg

SEQ ID NO: 4163 - RNA, 19 nt, synthetic construct
  source 1..19: mol_type = other RNA
ggctggactacagctaccc

SEQ ID NO: 4164 - RNA, 19 nt, synthetic construct
  source 1..19: mol_type = other RNA
ggtcgtggaatgcagcctg

SEQ ID NO: 4165 - RNA, 19 nt, synthetic construct
  source 1..19: mol_type = other RNA
ggctggactacagctaccc

SEQ ID NO: 4166 - RNA, 19 nt, synthetic construct
  source 1..19: mol_type = other RNA
ggtcgtggaatgcagcctg

SEQ ID NO: 4167 - RNA, 19 nt, synthetic construct
  source 1..19: mol_type = other RNA
ggctggactacagctaccc

SEQ ID NO: 4168 - RNA, 19 nt, synthetic construct
  source 1..19: mol_type = other RNA
ggtcgtggaatgcagcctg

SEQ ID NO: 4169 - RNA, 19 nt, synthetic construct
  source 1..19: mol_type = other RNA
gaactgcacggtggccagg

SEQ ID NO: 4170 - RNA, 19 nt, synthetic construct
  source 1..19: mol_type = other RNA
ggccaggtgcgtgggtgac

SEQ ID NO: 4171 - RNA, 19 nt, synthetic construct
  source 1..19: mol_type = other RNA
tcacctgcgtgaacaagca

SEQ ID NO: 4172 - RNA, 19 nt, synthetic construct
  source 1..19: mol_type = other RNA
attccggtgagcagcggtt

SEQ ID NO: 4173 - RNA, 19 nt, synthetic construct
  source 1..19: mol_type = other RNA
ccggtgagcagcggtttca

SEQ ID NO: 4174 - RNA, 19 nt, synthetic construct
  source 1..19: mol_type = other RNA
gagtgaggccgacgtcacc

SEQ ID NO: 4175 - RNA, 19 nt, synthetic construct
  source 1..19: mol_type = other RNA
caactgcacctatgtcctc

SEQ ID NO: 4176 - RNA, 19 nt, synthetic construct
  source 1..19: mol_type = other RNA
tgaccccgctccagtttgg

SEQ ID NO: 4177 - RNA, 19 nt, synthetic construct
  source 1..19: mol_type = other RNA
tccaccaagtactacgagg

SEQ ID NO: 4178 - RNA, 19 nt, synthetic construct
  source 1..19: mol_type = other RNA
cctaaaaacctgccggaac

SEQ ID NO: 4179 - RNA, 19 nt, synthetic construct
  source 1..19: mol_type = other RNA
ccttcgccaacacctggaa

SEQ ID NO: 4180 - RNA, 19 nt, synthetic construct
  source 1..19: mol_type = other RNA
ccaccaagtactacgaggc

SEQ ID NO: 4181 - RNA, 19 nt, synthetic construct
  source 1..19: mol_type = other RNA
gaatgagacctggaccctg

SEQ ID NO: 4182 - RNA, 19 nt, synthetic construct
  source 1..19: mol_type = other RNA
agccaacatcaccctgttc

SEQ ID NO: 4183 - RNA, 19 nt, synthetic construct
  source 1..19: mol_type = other RNA
gcaccttcctcaatgacgc

SEQ ID NO: 4184 - RNA, 19 nt, synthetic construct
  source 1..19: mol_type = other RNA
caccttcctcaatgacgcg

SEQ ID NO: 4185 - RNA, 19 nt, synthetic construct
  source 1..19: mol_type = other RNA
tgtcggcagccaacatcac

SEQ ID NO: 4186 - RNA, 19 nt, synthetic construct
  source 1..19: mol_type = other RNA
gtgcgtggcccagtgtggc

SEQ ID NO: 4187 - RNA, 19 nt, synthetic construct
  source 1..19: mol_type = other RNA
aaaccggctgctgctactc

SEQ ID NO: 4188 - RNA, 19 nt, synthetic construct
  source 1..19: mol_type = other RNA
cccaaatacgccaaccaga

SEQ ID NO: 4189 - RNA, 19 nt, synthetic construct
  source 1..19: mol_type = other RNA
agctcttcgtggagagcta

SEQ ID NO: 4190 - RNA, 19 nt, synthetic construct
  source 1..19: mol_type = other RNA
gatgggcccacggagcagt

SEQ ID NO: 4191 - RNA, 19 nt, synthetic construct
  source 1..19: mol_type = other RNA
gtcaccgagaacatcccct

SEQ ID NO: 4192 - RNA, 19 nt, synthetic construct
  source 1..19: mol_type = other RNA
agtgaggccgacgtcacct

SEQ ID NO: 4193 - RNA, 19 nt, synthetic construct
  source 1..19: mol_type = other RNA
gaagttggatgggcccacg

SEQ ID NO: 4194 - RNA, 19 nt, synthetic construct
  source 1..19: mol_type = other RNA
tacatgcagaactgcccca

SEQ ID NO: 4195 - RNA, 19 nt, synthetic construct
  source 1..19: mol_type = other RNA
acacactgcgtgtccggct

SEQ ID NO: 4196 - RNA, 19 nt, synthetic construct
  source 1..19: mol_type = other RNA
ttcaacgagttctatgccc

SEQ ID NO: 4197 - RNA, 19 nt, synthetic construct
  source 1..19: mol_type = other RNA
ctgtgggaccaccggcacc

SEQ ID NO: 4198 - RNA, 19 nt, synthetic construct
  source 1..19: mol_type = other RNA
caatgactttgccacgcgt

SEQ ID NO: 4199 - RNA, 19 nt, synthetic construct
  source 1..19: mol_type = other RNA
ttctgcacggctgtggctg

SEQ ID NO: 4200 - RNA, 19 nt, synthetic construct
  source 1..19: mol_type = other RNA
aacctgccggaaccccagt

SEQ ID NO: 4201 - RNA, 19 nt, synthetic construct
  source 1..19: mol_type = other RNA
ctaccaggacgtcatctac

SEQ ID NO: 4202 - RNA, 19 nt, synthetic construct
  source 1..19: mol_type = other RNA
agcgggaggagctgcctta

SEQ ID NO: 4203 - RNA, 19 nt, synthetic construct
  source 1..19: mol_type = other RNA
gcgggaggagctgccttac

SEQ ID NO: 4204 - RNA, 19 nt, synthetic construct
  source 1..19: mol_type = other RNA
cgggaggagctgccttaca

SEQ ID NO: 4205 - RNA, 19 nt, synthetic construct
  source 1..19: mol_type = other RNA
ctgtggaacggagaggaca

SEQ ID NO: 4206 - RNA, 19 nt, synthetic construct
  source 1..19: mol_type = other RNA
cccacggagcagtgcccgg

SEQ ID NO: 4207 - RNA, 19 nt, synthetic construct
  source 1..19: mol_type = other RNA
ccacctttgtggaatactc

SEQ ID NO: 4208 - RNA, 19 nt, synthetic construct
  source 1..19: mol_type = other RNA
cacctttgtggaatactca

SEQ ID NO: 4209 - RNA, 19 nt, synthetic construct
  source 1..19: mol_type = other RNA
ctcacgccagtgcgcccac

SEQ ID NO: 4210 - RNA, 19 nt, synthetic construct
  source 1..19: mol_type = other RNA
cacgccagtgcgcccacgc

SEQ ID NO: 4211 - RNA, 19 nt, synthetic construct
  source 1..19: mol_type = other RNA
acgccagtgcgcccacgcg

SEQ ID NO: 4212 - RNA, 19 nt, synthetic construct
  source 1..19: mol_type = other RNA
gcctgcccctcgggcagtg

SEQ ID NO: 4213 - RNA, 19 nt, synthetic construct
  source 1..19: mol_type = other RNA
gacgctcagcctggacggc

SEQ ID NO: 4214 - RNA, 19 nt, synthetic construct
  source 1..19: mol_type = other RNA
gcggggacacggccatccg

SEQ ID NO: 4215 - RNA, 19 nt, synthetic construct
  source 1..19: mol_type = other RNA
cggggacacggccatccgg

SEQ ID NO: 4216 - RNA, 19 nt, synthetic construct
  source 1..19: mol_type = other RNA
gccgcgctgtcctcctatg

SEQ ID NO: 4217 - RNA, 19 nt, synthetic construct
  source 1..19: mol_type = other RNA
acacgctggacgtgggctg

SEQ ID NO: 4218 - RNA, 19 nt, synthetic construct
  source 1..19: mol_type = other RNA
acaacgaggccacctacaa

SEQ ID NO: 4219 - RNA, 19 nt, synthetic construct
  source 1..19: mol_type = other RNA
cttcatcacctttgatggc

SEQ ID NO: 4220 - RNA, 19 nt, synthetic construct
  source 1..19: mol_type = other RNA
ggggatcttcctggtcatc

SEQ ID NO: 4221 - RNA, 19 nt, synthetic construct
  source 1..19: mol_type = other RNA
caggttgactccaccaagt

SEQ ID NO: 4222 - RNA, 19 nt, synthetic construct
  source 1..19: mol_type = other RNA
tgtgtgtgtcctggcggac

SEQ ID NO: 4223 - RNA, 19 nt, synthetic construct
  source 1..19: mol_type = other RNA
gtgtgtgtcctggcggact

SEQ ID NO: 4224 - RNA, 19 nt, synthetic construct
  source 1..19: mol_type = other RNA
ggaccagatgaagtgcgtg

SEQ ID NO: 4225 - RNA, 19 nt, synthetic construct
  source 1..19: mol_type = other RNA
ccaggacgtcatctacaac

SEQ ID NO: 4226 - RNA, 19 nt, synthetic construct
  source 1..19: mol_type = other RNA
cggagcctgctgtgcctac

SEQ ID NO: 4227 - RNA, 19 nt, synthetic construct
  source 1..19: mol_type = other RNA
tgatgaggactaccccaag

SEQ ID NO: 4228 - RNA, 19 nt, synthetic construct
  source 1..19: mol_type = other RNA
accccaagtctgaacaact

SEQ ID NO: 4229 - RNA, 19 nt, synthetic construct
  source 1..19: mol_type = other RNA
gttgagtcctacgataaga

SEQ ID NO: 4230 - RNA, 19 nt, synthetic construct
  source 1..19: mol_type = other RNA
aagatgtgctacaactaca

SEQ ID NO: 4231 - RNA, 19 nt, synthetic construct
  source 1..19: mol_type = other RNA
agtggacagagtggtttga

SEQ ID NO: 4232 - RNA, 19 nt, synthetic construct
  source 1..19: mol_type = other RNA
ggcaggtgaatgagacctg

SEQ ID NO: 4233 - RNA, 19 nt, synthetic construct
  source 1..19: mol_type = other RNA
gtttgaccaaattccggtg

SEQ ID NO: 4234 - RNA, 19 nt, synthetic construct
  source 1..19: mol_type = other RNA
cttccacaacaacaccgag

SEQ ID NO: 4235 - RNA, 19 nt, synthetic construct
  source 1..19: mol_type = other RNA
tgctgtcccaccttccgct

SEQ ID NO: 4236 - RNA, 19 nt, synthetic construct
  source 1..19: mol_type = other RNA
gggaggagctgccttacag

SEQ ID NO: 4237 - RNA, 19 nt, synthetic construct
  source 1..19: mol_type = other RNA
cagtgcccggacccgctgc

SEQ ID NO: 4238 - RNA, 19 nt, synthetic construct
  source 1..19: mol_type = other RNA
gtacatgcagaactgcccc

SEQ ID NO: 4239 - RNA, 19 nt, synthetic construct
  source 1..19: mol_type = other RNA
caccaggactacaagggca

SEQ ID NO: 4240 - RNA, 19 nt, synthetic construct
  source 1..19: mol_type = other RNA
ctccaccaagtactacgag

SEQ ID NO: 4241 - RNA, 19 nt, synthetic construct
  source 1..19: mol_type = other RNA
actaccagccctgcggggc

SEQ ID NO: 4242 - RNA, 19 nt, synthetic construct
  source 1..19: mol_type = other RNA
gtgagtggacagagtggtt

SEQ ID NO: 4243 - RNA, 19 nt, synthetic construct
  source 1..19: mol_type = other RNA
tgcacctatgtcctcatga

SEQ ID NO: 4244 - RNA, 19 nt, synthetic construct
  source 1..19: mol_type = other RNA
gcgtgttcctcaactccat

SEQ ID NO: 4245 - RNA, 19 nt, synthetic construct
  source 1..19: mol_type = other RNA
atcgtcaccgagaacatcc

SEQ ID NO: 4246 - RNA, 19 nt, synthetic construct
  source 1..19: mol_type = other RNA
tcacgccagtgcgcccacg

SEQ ID NO: 4247 - RNA, 19 nt, synthetic construct
  source 1..19: mol_type = other RNA
cgcgggcgcctgtgtgccc

SEQ ID NO: 4248 - RNA, 19 nt, synthetic construct
  source 1..19: mol_type = other RNA
tgccacacgctggacgtgg

SEQ ID NO: 4249 - RNA, 19 nt, synthetic construct
  source 1..19: mol_type = other RNA
cacggctgtggctgcctac

SEQ ID NO: 4250 - RNA, 19 nt, synthetic construct
  source 1..19: mol_type = other RNA
acctctcaggccgagacca

SEQ ID NO: 4251 - RNA, 19 nt, synthetic construct
  source 1..19: mol_type = other RNA
aggccatgcagcaccagtg

SEQ ID NO: 4252 - RNA, 19 nt, synthetic construct
  source 1..19: mol_type = other RNA
tacaactacaggatccggg

SEQ ID NO: 4253 - RNA, 19 nt, synthetic construct
  source 1..19: mol_type = other RNA
ctctcaggccgagaccagc

SEQ ID NO: 4254 - RNA, 19 nt, synthetic construct
  source 1..19: mol_type = other RNA
cgtgttcctcaactccatc

SEQ ID NO: 4255 - RNA, 19 nt, synthetic construct
  source 1..19: mol_type = other RNA
tccatctacacgcagctgc

SEQ ID NO: 4256 - RNA, 19 nt, synthetic construct
  source 1..19: mol_type = other RNA
ctgcccctgtcggcagcca

SEQ ID NO: 4257 - RNA, 19 nt, synthetic construct
  source 1..19: mol_type = other RNA
tgtggacggctgcacctgc

SEQ ID NO: 4258 - RNA, 19 nt, synthetic construct
  source 1..19: mol_type = other RNA
gcgggcgcctgtgtgcccg

SEQ ID NO: 4259 - RNA, 19 nt, synthetic construct
  source 1..19: mol_type = other RNA
gctgccacacgctggacgt

SEQ ID NO: 4260 - RNA, 19 nt, synthetic construct
  source 1..19: mol_type = other RNA
ccacacgctggacgtgggc

SEQ ID NO: 4261 - RNA, 19 nt, synthetic construct
  source 1..19: mol_type = other RNA
cactgcgtgtccggctgtg

SEQ ID NO: 4262 - RNA, 19 nt, synthetic construct
  source 1..19: mol_type = other RNA
tcgtcaccgagaacatccc

SEQ ID NO: 4263 - RNA, 19 nt, synthetic construct
  source 1..19: mol_type = other RNA
cccctgtgggaccaccggc

SEQ ID NO: 4264 - RNA, 19 nt, synthetic construct
  source 1..19: mol_type = other RNA
cagccctgcggggcaccct

SEQ ID NO: 4265 - RNA, 19 nt, synthetic construct
  source 1..19: mol_type = other RNA
aaaacctgccggaacccca

SEQ ID NO: 4266 - RNA, 19 nt, synthetic construct
  source 1..19: mol_type = other RNA
cactccacgacaagcccgg

SEQ ID NO: 4267 - RNA, 19 nt, synthetic construct
  source 1..19: mol_type = other RNA
gactgggtccagctcaggc

SEQ ID NO: 4268 - RNA, 19 nt, synthetic construct
  source 1..19: mol_type = other RNA
cttcggcctggtgtgcagg

SEQ ID NO: 4269 - RNA, 19 nt, synthetic construct
  source 1..19: mol_type = other RNA
cacccttggtacagccacc

SEQ ID NO: 4270 - RNA, 19 nt, synthetic construct
  source 1..19: mol_type = other RNA
cagtgactggcgaggtgca

SEQ ID NO: 4271 - RNA, 19 nt, synthetic construct
  source 1..19: mol_type = other RNA
tgctactcctgtgaggagg

SEQ ID NO: 4272 - RNA, 19 nt, synthetic construct
  source 1..19: mol_type = other RNA
aatacgtgccctgtggccc

SEQ ID NO: 4273 - RNA, 19 nt, synthetic construct
  source 1..19: mol_type = other RNA
ccatctacacgcagctgcc

SEQ ID NO: 4274 - RNA, 19 nt, synthetic construct
  source 1..19: mol_type = other RNA
tggaacggagaggacagtg

SEQ ID NO: 4275 - RNA, 19 nt, synthetic construct
  source 1..19: mol_type = other RNA
ggtcgactgcaacacctgc

SEQ ID NO: 4276 - RNA, 19 nt, synthetic construct
  source 1..19: mol_type = other RNA
ctacatggggatcttcctg

SEQ ID NO: 4277 - RNA, 19 nt, synthetic construct
  source 1..19: mol_type = other RNA
atacgccaaccagacctgt

SEQ ID NO: 4278 - RNA, 19 nt, synthetic construct
  source 1..19: mol_type = other RNA
catctacacgcagctgccc

SEQ ID NO: 4279 - RNA, 19 nt, synthetic construct
  source 1..19: mol_type = other RNA
tcttcgtggagagctacga

SEQ ID NO: 4280 - RNA, 19 nt, synthetic construct
  source 1..19: mol_type = other RNA
aggggccgtctgtgagcag

SEQ ID NO: 4281 - RNA, 19 nt, synthetic construct
  source 1..19: mol_type = other RNA
aggggccgtctgtgagcag

SEQ ID NO: 4282 - RNA, 19 nt, synthetic construct
  source 1..19: mol_type = other RNA
aggggccgtctgtgagcag

SEQ ID NO: 4283 - RNA, 19 nt, synthetic construct
  source 1..19: mol_type = other RNA
gccttcgccaacacctgga

SEQ ID NO: 4284 - RNA, 19 nt, synthetic construct
  source 1..19: mol_type = other RNA
atcaagctcttcgtggaga

SEQ ID NO: 4285 - RNA, 19 nt, synthetic construct
  source 1..19: mol_type = other RNA
ctcttcgtggagagctacg

SEQ ID NO: 4286 - RNA, 19 nt, synthetic construct
  source 1..19: mol_type = other RNA
ccgctcccaggttgactcc

SEQ ID NO: 4287 - RNA, 19 nt, synthetic construct
  source 1..19: mol_type = other RNA
gcggactccggacacctgc

SEQ ID NO: 4288 - RNA, 19 nt, synthetic construct
  source 1..19: mol_type = other RNA
ggaaccccagtgggcactg

SEQ ID NO: 4289 - RNA, 19 nt, synthetic construct
  source 1..19: mol_type = other RNA
acgtcatctacaacaccac

SEQ ID NO: 4290 - RNA, 19 nt, synthetic construct
  source 1..19: mol_type = other RNA
cagcaaccgaaaagaccac

SEQ ID NO: 4291 - RNA, 19 nt, synthetic construct
  source 1..19: mol_type = other RNA
gtggtttgacgtggacttc

SEQ ID NO: 4292 - RNA, 19 nt, synthetic construct
  source 1..19: mol_type = other RNA
tggtttgacgtggacttcc

SEQ ID NO: 4293 - RNA, 19 nt, synthetic construct
  source 1..19: mol_type = other RNA
tggctggactacagctacc

SEQ ID NO: 4294 - RNA, 19 nt, synthetic construct
  source 1..19: mol_type = other RNA
tggctggactacagctacc

SEQ ID NO: 4295 - RNA, 19 nt, synthetic construct
  source 1..19: mol_type = other RNA
tggctggactacagctacc

SEQ ID NO: 4296 - RNA, 19 nt, synthetic construct
  source 1..19: mol_type = other RNA
tggctggactacagctacc

SEQ ID NO: 4297 - RNA, 19 nt, synthetic construct
  source 1..19: mol_type = other RNA
ctgcgtgaacaagcacctg

SEQ ID NO: 4298 - RNA, 19 nt, synthetic construct
  source 1..19: mol_type = other RNA
cagcaagaacggcgtgctt

SEQ ID NO: 4299 - RNA, 19 nt, synthetic construct
  source 1..19: mol_type = other RNA
gttccacccgtcactgtct

SEQ ID NO: 4300 - RNA, 19 nt, synthetic construct
  source 1..19: mol_type = other RNA
ctgtcttccccagcctgag

SEQ ID NO: 4301 - RNA, 19 nt, synthetic construct
  source 1..19: mol_type = other RNA
gccaaccagacctgtggcc

SEQ ID NO: 4302 - RNA, 19 nt, synthetic construct
  source 1..19: mol_type = other RNA
tggatgggcccacggagca

SEQ ID NO: 4303 - RNA, 19 nt, synthetic construct
  source 1..19: mol_type = other RNA
acggagcagtgcccggacc

SEQ ID NO: 4304 - RNA, 19 nt, synthetic construct
  source 1..19: mol_type = other RNA
cggagcagtgcccggaccc

SEQ ID NO: 4305 - RNA, 19 nt, synthetic construct
  source 1..19: mol_type = other RNA
gtgcccggacccgctgccc

SEQ ID NO: 4306 - RNA, 19 nt, synthetic construct
  source 1..19: mol_type = other RNA
aggacctgtgccgctgccc

SEQ ID NO: 4307 - RNA, 19 nt, synthetic construct
  source 1..19: mol_type = other RNA
tgtgccgctgccccacctg

SEQ ID NO: 4308 - RNA, 19 nt, synthetic construct
  source 1..19: mol_type = other RNA
cacgcactctggctgcctg

SEQ ID NO: 4309 - RNA, 19 nt, synthetic construct
  source 1..19: mol_type = other RNA
ggacctgccgtgccctggc

SEQ ID NO: 4310 - RNA, 19 nt, synthetic construct
  source 1..19: mol_type = other RNA
gtgacgctcagcctggacg

SEQ ID NO: 4311 - RNA, 19 nt, synthetic construct
  source 1..19: mol_type = other RNA
ctccatctacacgcagctg

SEQ ID NO: 4312 - RNA, 19 nt, synthetic construct
  source 1..19: mol_type = other RNA
agctgcccctgtcggcagc

SEQ ID NO: 4313 - RNA, 19 nt, synthetic construct
  source 1..19: mol_type = other RNA
tcatgcaggtgtttgtcag

SEQ ID NO: 4314 - RNA, 19 nt, synthetic construct
  source 1..19: mol_type = other RNA
cggcctgtgtgggaacttc

SEQ ID NO: 4315 - RNA, 19 nt, synthetic construct
  source 1..19: mol_type = other RNA
ggcctgtgtgggaacttca

SEQ ID NO: 4316 - RNA, 19 nt, synthetic construct
  source 1..19: mol_type = other RNA
gcctgtgtgggaacttcaa

SEQ ID NO: 4317 - RNA, 19 nt, synthetic construct
  source 1..19: mol_type = other RNA
ggaacttcaaccagaacca

SEQ ID NO: 4318 - RNA, 19 nt, synthetic construct
  source 1..19: mol_type = other RNA
gaacttcaaccagaaccag

SEQ ID NO: 4319 - RNA, 19 nt, synthetic construct
  source 1..19: mol_type = other RNA
agccttcgccaacacctgg

SEQ ID NO: 4320 - RNA, 19 nt, synthetic construct
  source 1..19: mol_type = other RNA
ccaacacctggaaggccca

SEQ ID NO: 4321 - RNA, 19 nt, synthetic construct
  source 1..19: mol_type = other RNA
caacacctggaaggcccag

SEQ ID NO: 4322 - RNA, 19 nt, synthetic construct
  source 1..19: mol_type = other RNA
tgtcctcctatgtgcacgc

SEQ ID NO: 4323 - RNA, 19 nt, synthetic construct
  source 1..19: mol_type = other RNA
gtcctcctatgtgcacgcc

SEQ ID NO: 4324 - RNA, 19 nt, synthetic construct
  source 1..19: mol_type = other RNA
tcctcctatgtgcacgcct

SEQ ID NO: 4325 - RNA, 19 nt, synthetic construct
  source 1..19: mol_type = other RNA
tcctatgtgcacgcctgtg

SEQ ID NO: 4326 - RNA, 19 nt, synthetic construct
  source 1..19: mol_type = other RNA
cctatgtgcacgcctgtgc

SEQ ID NO: 4327 - RNA, 19 nt, synthetic construct
  source 1..19: mol_type = other RNA
ctatgtgcacgcctgtgcc

SEQ ID NO: 4328 - RNA, 19 nt, synthetic construct
  source 1..19: mol_type = other RNA
gcaccaagtacatgcagaa

SEQ ID NO: 4329 - RNA, 19 nt, synthetic construct
  source 1..19: mol_type = other RNA
accaagtacatgcagaact

SEQ ID NO: 4330 - RNA, 19 nt, synthetic construct
  source 1..19: mol_type = other RNA
acgcgggcgcctgtgtgcc

SEQ ID NO: 4331 - RNA, 19 nt, synthetic construct
  source 1..19: mol_type = other RNA
ctgccacacgctggacgtg

SEQ ID NO: 4332 - RNA, 19 nt, synthetic construct
  source 1..19: mol_type = other RNA
gccacacgctggacgtggg

SEQ ID NO: 4333 - RNA, 19 nt, synthetic construct
  source 1..19: mol_type = other RNA
ctggacgtgggctgtttca

SEQ ID NO: 4334 - RNA, 19 nt, synthetic construct
  source 1..19: mol_type = other RNA
acactgcgtgtccggctgt

SEQ ID NO: 4335 - RNA, 19 nt, synthetic construct
  source 1..19: mol_type = other RNA
gaggccacctacaagcctg

SEQ ID NO: 4336 - RNA, 19 nt, synthetic construct
  source 1..19: mol_type = other RNA
ggccacctacaagcctgga

SEQ ID NO: 4337 - RNA, 19 nt, synthetic construct
  source 1..19: mol_type = other RNA
tctgcctgggcacctgcgt

SEQ ID NO: 4338 - RNA, 19 nt, synthetic construct
  source 1..19: mol_type = other RNA
tggccacttcatcaccttt

SEQ ID NO: 4339 - RNA, 19 nt, synthetic construct
  source 1..19: mol_type = other RNA
ccacccacgggaccttccg

SEQ ID NO: 4340 - RNA, 19 nt, synthetic construct
  source 1..19: mol_type = other RNA
ttccgcatcgtcaccgaga

SEQ ID NO: 4341 - RNA, 19 nt, synthetic construct
  source 1..19: mol_type = other RNA
gaacatcccctgtgggacc

SEQ ID NO: 4342 - RNA, 19 nt, synthetic construct
  source 1..19: mol_type = other RNA
gccatcaagctcttcgtgg

SEQ ID NO: 4343 - RNA, 19 nt, synthetic construct
  source 1..19: mol_type = other RNA
catcaagctcttcgtggag

SEQ ID NO: 4344 - RNA, 19 nt, synthetic construct
  source 1..19: mol_type = other RNA
gctcttcgtggagagctac

SEQ ID NO: 4345 - RNA, 19 nt, synthetic construct
  source 1..19: mol_type = other RNA
gtggagagctacgagctga

SEQ ID NO: 4346 - RNA, 19 nt, synthetic construct
  source 1..19: mol_type = other RNA
tcttcctggtcatcgagac

SEQ ID NO: 4347 - RNA, 19 nt, synthetic construct
  source 1..19: mol_type = other RNA
ccgactgcaccaggactac

SEQ ID NO: 4348 - RNA, 19 nt, synthetic construct
  source 1..19: mol_type = other RNA
gactacaagggcagggtct

SEQ ID NO: 4349 - RNA, 19 nt, synthetic construct
  source 1..19: mol_type = other RNA
atgccatcaatgactttgc

SEQ ID NO: 4350 - RNA, 19 nt, synthetic construct
  source 1..19: mol_type = other RNA
ggttgactccaccaagtac

SEQ ID NO: 4351 - RNA, 19 nt, synthetic construct
  source 1..19: mol_type = other RNA
ctgtggctgcctacgccca

SEQ ID NO: 4352 - RNA, 19 nt, synthetic construct
  source 1..19: mol_type = other RNA
tgtggctgcctacgcccag

SEQ ID NO: 4353 - RNA, 19 nt, synthetic construct
  source 1..19: mol_type = other RNA
ccacgacgcgggcctgtgt

SEQ ID NO: 4354 - RNA, 19 nt, synthetic construct
  source 1..19: mol_type = other RNA
ttgttctgtgacttctaca

SEQ ID NO: 4355 - RNA, 19 nt, synthetic construct
  source 1..19: mol_type = other RNA
gctgtgagtggcactacca

SEQ ID NO: 4356 - RNA, 19 nt, synthetic construct
  source 1..19: mol_type = other RNA
ctaaaaacctgccggaacc

SEQ ID NO: 4357 - RNA, 19 nt, synthetic construct
  source 1..19: mol_type = other RNA
taaaaacctgccggaaccc

SEQ ID NO: 4358 - RNA, 19 nt, synthetic construct
  source 1..19: mol_type = other RNA
agatgaagtgcgtggccca

SEQ ID NO: 4359 - RNA, 19 nt, synthetic construct
  source 1..19: mol_type = other RNA
cacctgcacctatgaggac

SEQ ID NO: 4360 - RNA, 19 nt, synthetic construct
  source 1..19: mol_type = other RNA
ggtaccaccacctgccagc

SEQ ID NO: 4361 - RNA, 19 nt, synthetic construct
  source 1..19: mol_type = other RNA
gccccggtgtcagtggaca

SEQ ID NO: 4362 - RNA, 19 nt, synthetic construct
  source 1..19: mol_type = other RNA
ggtgtcagtggacagagtg

SEQ ID NO: 4363 - RNA, 19 nt, synthetic construct
  source 1..19: mol_type = other RNA
gatgaggactaccccaagt

SEQ ID NO: 4364 - RNA, 19 nt, synthetic construct
  source 1..19: mol_type = other RNA
tctgaacaacttggagggg

SEQ ID NO: 4365 - RNA, 19 nt, synthetic construct
  source 1..19: mol_type = other RNA
cgttgagtcctacgataag

SEQ ID NO: 4366 - RNA, 19 nt, synthetic construct
  source 1..19: mol_type = other RNA
gcagcctaaggacatagag

SEQ ID NO: 4367 - RNA, 19 nt, synthetic construct
  source 1..19: mol_type = other RNA
cgaagtgtgagtggacaga

SEQ ID NO: 4368 - RNA, 19 nt, synthetic construct
  source 1..19: mol_type = other RNA
gaagtgtgagtggacagag

SEQ ID NO: 4369 - RNA, 19 nt, synthetic construct
  source 1..19: mol_type = other RNA
tccacggtgacttcccaca

SEQ ID NO: 4370 - RNA, 19 nt, synthetic construct
  source 1..19: mol_type = other RNA
ccagcctggtgtccccctg

SEQ ID NO: 4371 - RNA, 19 nt, synthetic construct
  source 1..19: mol_type = other RNA
ggagttgggccaggtcgtg

SEQ ID NO: 4372 - RNA, 19 nt, synthetic construct
  source 1..19: mol_type = other RNA
gggaagttcaagatgtgct

SEQ ID NO: 4373 - RNA, 19 nt, synthetic construct
  source 1..19: mol_type = other RNA
ccagcctggtgtccccctg

SEQ ID NO: 4374 - RNA, 19 nt, synthetic construct
  source 1..19: mol_type = other RNA
ggagttgggccaggtcgtg

SEQ ID NO: 4375 - RNA, 19 nt, synthetic construct
  source 1..19: mol_type = other RNA
gggaagttcaagatgtgct

SEQ ID NO: 4376 - RNA, 19 nt, synthetic construct
  source 1..19: mol_type = other RNA
tccacggtgacttcccaca

SEQ ID NO: 4377 - RNA, 19 nt, synthetic construct
  source 1..19: mol_type = other RNA
ccagcctggtgtccccctg

SEQ ID NO: 4378 - RNA, 19 nt, synthetic construct
  source 1..19: mol_type = other RNA
ggagttgggccaggtcgtg

SEQ ID NO: 4379 - RNA, 19 nt, synthetic construct
  source 1..19: mol_type = other RNA
gggaagttcaagatgtgct

SEQ ID NO: 4380 - RNA, 19 nt, synthetic construct
  source 1..19: mol_type = other RNA
ggagttgggccaggtcgtg

SEQ ID NO: 4381 - RNA, 19 nt, synthetic construct
  source 1..19: mol_type = other RNA
gggaagttcaagatgtgct

SEQ ID NO: 4382 - RNA, 19 nt, synthetic construct
  source 1..19: mol_type = other RNA
ccggcaggtgaatgagacc

SEQ ID NO: 4383 - RNA, 19 nt, synthetic construct
  source 1..19: mol_type = other RNA
aggtgaatgagacctggac

SEQ ID NO: 4384 - RNA, 19 nt, synthetic construct
  source 1..19: mol_type = other RNA
gtgaatgagacctggaccc

SEQ ID NO: 4385 - RNA, 19 nt, synthetic construct
  source 1..19: mol_type = other RNA
tgaatgagacctggaccct

SEQ ID NO: 4386 - RNA, 19 nt, synthetic construct
  source 1..19: mol_type = other RNA
cctgcgtgaacaagcacct

SEQ ID NO: 4387 - RNA, 19 nt, synthetic construct
  source 1..19: mol_type = other RNA
tgaacaagcacctgcccat

SEQ ID NO: 4388 - RNA, 19 nt, synthetic construct
  source 1..19: mol_type = other RNA
gggcaactgcacctatgtc

SEQ ID NO: 4389 - RNA, 19 nt, synthetic construct
  source 1..19: mol_type = other RNA
ggcaactgcacctatgtcc

SEQ ID NO: 4390 - RNA, 19 nt, synthetic construct
  source 1..19: mol_type = other RNA
acctatgtcctcatgagag

SEQ ID NO: 4391 - RNA, 19 nt, synthetic construct
  source 1..19: mol_type = other RNA
ggcccggctgccctacagc

SEQ ID NO: 4392 - RNA, 19 nt, synthetic construct
  source 1..19: mol_type = other RNA
gcccggctgccctacagcc

SEQ ID NO: 4393 - RNA, 19 nt, synthetic construct
  source 1..19: mol_type = other RNA
tccacaacaacaccgaggg

SEQ ID NO: 4394 - RNA, 19 nt, synthetic construct
  source 1..19: mol_type = other RNA
gcggcacctgcaccaacaa

SEQ ID NO: 4395 - RNA, 19 nt, synthetic construct
  source 1..19: mol_type = other RNA
cctgcaccaacaaccagag

SEQ ID NO: 4396 - RNA, 19 nt, synthetic construct
  source 1..19: mol_type = other RNA
cccggggagtgtgcagtga

SEQ ID NO: 4397 - RNA, 19 nt, synthetic construct
  source 1..19: mol_type = other RNA
aactgccagtcctgcgtgt

SEQ ID NO: 4398 - RNA, 19 nt, synthetic construct
  source 1..19: mol_type = other RNA
gcctcaggaaaaccggctg

SEQ ID NO: 4399 - RNA, 19 nt, synthetic construct
  source 1..19: mol_type = other RNA
catgcagcaccagtgcacc

SEQ ID NO: 4400 - RNA, 19 nt, synthetic construct
  source 1..19: mol_type = other RNA
tccacgaggagacggtgcc

SEQ ID NO: 4401 - RNA, 19 nt, synthetic construct
  source 1..19: mol_type = other RNA
ccgcgctgtcctcctatgt

SEQ ID NO: 4402 - RNA, 19 nt, synthetic construct
  source 1..19: mol_type = other RNA
tgacgctcagcctggacgg

SEQ ID NO: 4403 - RNA, 19 nt, synthetic construct
  source 1..19: mol_type = other RNA
cacctatgtcctcatgaga

SEQ ID NO: 4404 - RNA, 19 nt, synthetic construct
  source 1..19: mol_type = other RNA
ccgagggccagtgcggcac

SEQ ID NO: 4405 - RNA, 19 nt, synthetic construct
  source 1..19: mol_type = other RNA
ctgcggcctgtgcgggaac

SEQ ID NO: 4406 - RNA, 19 nt, synthetic construct
  source 1..19: mol_type = other RNA
cgagggccagtgcggcacc

SEQ ID NO: 4407 - RNA, 19 nt, synthetic construct
  source 1..19: mol_type = other RNA
gactgcgagtgtttctgca

SEQ ID NO: 4408 - RNA, 19 nt, synthetic construct
  source 1..19: mol_type = other RNA
gagggccagtgcggcacct

SEQ ID NO: 4409 - RNA, 19 nt, synthetic construct
  source 1..19: mol_type = other RNA
cctgtgcgggaacttcgac

SEQ ID NO: 4410 - RNA, 19 nt, synthetic construct
  source 1..19: mol_type = other RNA
gcggcctgtgcgggaactt

SEQ ID NO: 4411 - RNA, 19 nt, synthetic construct
  source 1..19: mol_type = other RNA
cagatgtgcggcctgtgtg

SEQ ID NO: 4412 - RNA, 19 nt, synthetic construct
  source 1..19: mol_type = other RNA
cggcctgtgcgggaacttc

SEQ ID NO: 4413 - RNA, 19 nt, synthetic construct
  source 1..19: mol_type = other RNA
ggcctgtgcgggaacttcg

SEQ ID NO: 4414 - RNA, 19 nt, synthetic construct
  source 1..19: mol_type = other RNA
cgagtgtttctgcacggct

SEQ ID NO: 4415 - RNA, 19 nt, synthetic construct
  source 1..19: mol_type = other RNA
gtgtttctgcacggctgtg

SEQ ID NO: 4416 - RNA, 19 nt, synthetic construct
  source 1..19: mol_type = other RNA
acggctgtggctgcctacg

SEQ ID NO: 4417 - RNA, 19 nt, synthetic construct
  source 1..19: mol_type = other RNA
acgcgggcctgtgtgtgtc

SEQ ID NO: 4418 - RNA, 19 nt, synthetic construct
  source 1..19: mol_type = other RNA
cactaccagccctgcgggg

SEQ ID NO: 4419 - RNA, 19 nt, synthetic construct
  source 1..19: mol_type = other RNA
agggccagtgcggcacctg

SEQ ID NO: 4420 - RNA, 19 nt, synthetic construct
  source 1..19: mol_type = other RNA
gggccagtgcggcacctgc

SEQ ID NO: 4421 - RNA, 19 nt, synthetic construct
  source 1..19: mol_type = other RNA
agtgcggcacctgcaccaa

SEQ ID NO: 4422 - RNA, 19 nt, synthetic construct
  source 1..19: mol_type = other RNA
tgcagtgactggcgaggtg

SEQ ID NO: 4423 - RNA, 19 nt, synthetic construct
  source 1..19: mol_type = other RNA
gcagtgactggcgaggtgc

SEQ ID NO: 4424 - RNA, 19 nt, synthetic construct
  source 1..19: mol_type = other RNA
cctgtttgaccaaattccg

SEQ ID NO: 4425 - RNA, 19 nt, synthetic construct
  source 1..19: mol_type = other RNA
cacgggctgtgagccccag

SEQ ID NO: 4426 - RNA, 19 nt, synthetic construct
  source 1..19: mol_type = other RNA
cacgggctgtgagccccag

SEQ ID NO: 4427 - RNA, 19 nt, synthetic construct
  source 1..19: mol_type = other RNA
agaccacagcaaccgaaaa

SEQ ID NO: 4428 - RNA, 19 nt, synthetic construct
  source 1..19: mol_type = other RNA
ggactgacatcccccagat

SEQ ID NO: 4429 - RNA, 19 nt, synthetic construct
  source 1..19: mol_type = other RNA
aaggctgtggcatgtcctg

SEQ ID NO: 4430 - RNA, 19 nt, synthetic construct
  source 1..19: mol_type = other RNA
agcagcctaaggacataga

SEQ ID NO: 4431 - RNA, 19 nt, synthetic construct
  source 1..19: mol_type = other RNA
aagttggatgggcccacgg

SEQ ID NO: 4432 - RNA, 19 nt, synthetic construct
  source 1..19: mol_type = other RNA
ctcatgcaggtgtttgtca

SEQ ID NO: 4433 - RNA, 19 nt, synthetic construct
  source 1..19: mol_type = other RNA
cgctcccaggttgactcca

SEQ ID NO: 4434 - RNA, 19 nt, synthetic construct
  source 1..19: mol_type = other RNA
accacagcaaccgaaaaga

SEQ ID NO: 4435 - RNA, 19 nt, synthetic construct
  source 1..19: mol_type = other RNA
tcagtggacagagtggttt

SEQ ID NO: 4436 - RNA, 19 nt, synthetic construct
  source 1..19: mol_type = other RNA
gctgtgagccccagtgtgc

SEQ ID NO: 4437 - RNA, 19 nt, synthetic construct
  source 1..19: mol_type = other RNA
gctgtgagccccagtgtgc

SEQ ID NO: 4438 - RNA, 19 nt, synthetic construct
  source 1..19: mol_type = other RNA
gctgtgagccccagtgtgc

SEQ ID NO: 4439 - RNA, 19 nt, synthetic construct
  source 1..19: mol_type = other RNA
gctgtgagccccagtgtgc

SEQ ID NO: 4440 - RNA, 19 nt, synthetic construct
  source 1..19: mol_type = other RNA
cacctgccagccccggtgt

SEQ ID NO: 4441 - RNA, 19 nt, synthetic construct
  source 1..19: mol_type = other RNA
agcccttcttcaatgagga

SEQ ID NO: 4442 - RNA, 19 nt, synthetic construct
  source 1..19: mol_type = other RNA
gagggacggcgtctgcacc

SEQ ID NO: 4443 - RNA, 19 nt, synthetic construct
  source 1..19: mol_type = other RNA
gcgggagttgggccaggtc

SEQ ID NO: 4444 - RNA, 19 nt, synthetic construct
  source 1..19: mol_type = other RNA
gcgggagttgggccaggtc

SEQ ID NO: 4445 - RNA, 19 nt, synthetic construct
  source 1..19: mol_type = other RNA
gcgggagttgggccaggtc

SEQ ID NO: 4446 - RNA, 19 nt, synthetic construct
  source 1..19: mol_type = other RNA
agggacggcgtctgcacca

SEQ ID NO: 4447 - RNA, 19 nt, synthetic construct
  source 1..19: mol_type = other RNA
cctgcacctatgaggacag

SEQ ID NO: 4448 - RNA, 19 nt, synthetic construct
  source 1..19: mol_type = other RNA
cacacccccacagtgctga

SEQ ID NO: 4449 - RNA, 19 nt, synthetic construct
  source 1..19: mol_type = other RNA
cacacccccacagtgctga

SEQ ID NO: 4450 - RNA, 19 nt, synthetic construct
  source 1..19: mol_type = other RNA
ccctcgggcagtgcccctg

SEQ ID NO: 4451 - RNA, 19 nt, synthetic construct
  source 1..19: mol_type = other RNA
ccaagtctgaacaacttgg

SEQ ID NO: 4452 - RNA, 19 nt, synthetic construct
  source 1..19: mol_type = other RNA
gagtgccaggccgagagct

SEQ ID NO: 4453 - RNA, 19 nt, synthetic construct
  source 1..19: mol_type = other RNA
agtgccaggccgagagctt

SEQ ID NO: 4454 - RNA, 19 nt, synthetic construct
  source 1..19: mol_type = other RNA
ctggactacagctacccca

SEQ ID NO: 4455 - RNA, 19 nt, synthetic construct
  source 1..19: mol_type = other RNA
ctggactacagctacccca

SEQ ID NO: 4456 - RNA, 19 nt, synthetic construct
  source 1..19: mol_type = other RNA
ctggactacagctacccca

SEQ ID NO: 4457 - RNA, 19 nt, synthetic construct
  source 1..19: mol_type = other RNA
ctggactacagctacccca

SEQ ID NO: 4458 - RNA, 19 nt, synthetic construct
  source 1..19: mol_type = other RNA
gtgttcctcaactccatct

SEQ ID NO: 4459 - RNA, 19 nt, synthetic construct
  source 1..19: mol_type = other RNA
tgttcacaccctcgagctt

SEQ ID NO: 4460 - RNA, 19 nt, synthetic construct
  source 1..19: mol_type = other RNA
ctaaggacatagagtgcca

SEQ ID NO: 4461 - RNA, 19 nt, synthetic construct
  source 1..19: mol_type = other RNA
ggctgtgagccccagtgtg

SEQ ID NO: 4462 - RNA, 19 nt, synthetic construct
  source 1..19: mol_type = other RNA
ggctgtgagccccagtgtg

SEQ ID NO: 4463 - RNA, 19 nt, synthetic construct
  source 1..19: mol_type = other RNA
ggctgtgagccccagtgtg

SEQ ID NO: 4464 - RNA, 19 nt, synthetic construct
  source 1..19: mol_type = other RNA
ggctgtgagccccagtgtg

SEQ ID NO: 4465 - RNA, 19 nt, synthetic construct
  source 1..19: mol_type = other RNA
cctgtggaacggagaggac

SEQ ID NO: 4466 - RNA, 19 nt, synthetic construct
  source 1..19: mol_type = other RNA
ggaggagctgccttacagc

SEQ ID NO: 4467 - RNA, 19 nt, synthetic construct
  source 1..19: mol_type = other RNA
tgtgtctgtcccccggggc

SEQ ID NO: 4468 - RNA, 19 nt, synthetic construct
  source 1..19: mol_type = other RNA
gtgtgtcctggcggactcc

SEQ ID NO: 4469 - RNA, 19 nt, synthetic construct
  source 1..19: mol_type = other RNA
atcaaccccaagcccttcc

SEQ ID NO: 4470 - RNA, 19 nt, synthetic construct
  source 1..19: mol_type = other RNA
gtttctgcacggctgtggc

SEQ ID NO: 4471 - RNA, 19 nt, synthetic construct
  source 1..19: mol_type = other RNA
ctgcctggtggacctgcct

SEQ ID NO: 4472 - RNA, 19 nt, synthetic construct
  source 1..19: mol_type = other RNA
cggcaggtgaatgagacct

SEQ ID NO: 4473 - RNA, 19 nt, synthetic construct
  source 1..19: mol_type = other RNA
accgtgaccaggccccggg

SEQ ID NO: 4474 - RNA, 19 nt, synthetic construct
  source 1..19: mol_type = other RNA
ctgctactcctgtgaggag

SEQ ID NO: 4475 - RNA, 19 nt, synthetic construct
  source 1..19: mol_type = other RNA
acggagaggacagtgccct

SEQ ID NO: 4476 - RNA, 19 nt, synthetic construct
  source 1..19: mol_type = other RNA
ctgcttctgccccccaggc

SEQ ID NO: 4477 - RNA, 19 nt, synthetic construct
  source 1..19: mol_type = other RNA
cctgcccctcgggcagtgc

SEQ ID NO: 4478 - RNA, 19 nt, synthetic construct
  source 1..19: mol_type = other RNA
gccgtgccctggcacctgc

SEQ ID NO: 4479 - RNA, 19 nt, synthetic construct
  source 1..19: mol_type = other RNA
cctcctatgtgcacgcctg

SEQ ID NO: 4480 - RNA, 19 nt, synthetic construct
  source 1..19: mol_type = other RNA
ctcctatgtgcacgcctgt

SEQ ID NO: 4481 - RNA, 19 nt, synthetic construct
  source 1..19: mol_type = other RNA
tgttctgtgacttctacaa

SEQ ID NO: 4482 - RNA, 19 nt, synthetic construct
  source 1..19: mol_type = other RNA
ggctgtgagtggcactacc

SEQ ID NO: 4483 - RNA, 19 nt, synthetic construct
  source 1..19: mol_type = other RNA
acgtgccctgtggcccctc

SEQ ID NO: 4484 - RNA, 19 nt, synthetic construct
  source 1..19: mol_type = other RNA
gtgagccccagtgtgcctg

SEQ ID NO: 4485 - RNA, 19 nt, synthetic construct
  source 1..19: mol_type = other RNA
ctggtgtccccctgcggga

SEQ ID NO: 4486 - RNA, 19 nt, synthetic construct
  source 1..19: mol_type = other RNA
gtgagccccagtgtgcctg

SEQ ID NO: 4487 - RNA, 19 nt, synthetic construct
  source 1..19: mol_type = other RNA
ctggtgtccccctgcggga

SEQ ID NO: 4488 - RNA, 19 nt, synthetic construct
  source 1..19: mol_type = other RNA
gtgagccccagtgtgcctg

SEQ ID NO: 4489 - RNA, 19 nt, synthetic construct
  source 1..19: mol_type = other RNA
ctggtgtccccctgcggga

SEQ ID NO: 4490 - RNA, 19 nt, synthetic construct
  source 1..19: mol_type = other RNA
gtgagccccagtgtgcctg

SEQ ID NO: 4491 - RNA, 19 nt, synthetic construct
  source 1..19: mol_type = other RNA
tggcggagggctgcttctg

SEQ ID NO: 4492 - RNA, 19 nt, synthetic construct
  source 1..19: mol_type = other RNA
aaccggctgctgctactcc

SEQ ID NO: 4493 - RNA, 19 nt, synthetic construct
  source 1..19: mol_type = other RNA
cgggtccacgaggagacgg

SEQ ID NO: 4494 - RNA, 19 nt, synthetic construct
  source 1..19: mol_type = other RNA
gggtccacgaggagacggt

SEQ ID NO: 4495 - RNA, 19 nt, synthetic construct
  source 1..19: mol_type = other RNA
taccagctttacagccatc

SEQ ID NO: 4496 - RNA, 19 nt, synthetic construct
  source 1..19: mol_type = other RNA
taccagctttacagccatc

SEQ ID NO: 4497 - RNA, 19 nt, synthetic construct
  source 1..19: mol_type = other RNA
taccagctttacagccatc

SEQ ID NO: 4498 - RNA, 19 nt, synthetic construct
  source 1..19: mol_type = other RNA
acggtgacttcccacaccc

SEQ ID NO: 4499 - RNA, 19 nt, synthetic construct
  source 1..19: mol_type = other RNA
cgttctgtccaagaaatgt

SEQ ID NO: 4500 - RNA, 19 nt, synthetic construct
  source 1..19: mol_type = other RNA
atctacacgcagctgcccc

SEQ ID NO: 4501 - RNA, 19 nt, synthetic construct
  source 1..19: mol_type = other RNA
ctgcaccaagtacatgcag

SEQ ID NO: 4502 - RNA, 19 nt, synthetic construct
  source 1..19: mol_type = other RNA
tccccctgcgggagttggg

SEQ ID NO: 4503 - RNA, 19 nt, synthetic construct
  source 1..19: mol_type = other RNA
tccccctgcgggagttggg

SEQ ID NO: 4504 - RNA, 19 nt, synthetic construct
  source 1..19: mol_type = other RNA
tccccctgcgggagttggg

SEQ ID NO: 4505 - RNA, 19 nt, synthetic construct
  source 1..19: mol_type = other RNA
ctcgggcagtgcccctgca

SEQ ID NO: 4506 - RNA, 19 nt, synthetic construct
  source 1..19: mol_type = other RNA
gttcctcaactccatctac

SEQ ID NO: 4507 - RNA, 19 nt, synthetic construct
  source 1..19: mol_type = other RNA
acctgcacctatgaggaca

SEQ ID NO: 4508 - RNA, 19 nt, synthetic construct
  source 1..19: mol_type = other RNA
ccgtcactgtcttccccag

SEQ ID NO: 4509 - RNA, 19 nt, synthetic construct
  source 1..19: mol_type = other RNA
gccgctcccaggttgactc

SEQ ID NO: 4510 - RNA, 19 nt, synthetic construct
  source 1..19: mol_type = other RNA
aagtgcgtggcccagtgtg

SEQ ID NO: 4511 - RNA, 19 nt, synthetic construct
  source 1..19: mol_type = other RNA
ctcccacttctctactccc

SEQ ID NO: 4512 - RNA, 19 nt, synthetic construct
  source 1..19: mol_type = other RNA
ggagggacggcgtctgcac

SEQ ID NO: 4513 - RNA, 19 nt, synthetic construct
  source 1..19: mol_type = other RNA
ccacacccccacagtgctg

SEQ ID NO: 4514 - RNA, 19 nt, synthetic construct
  source 1..19: mol_type = other RNA
ccacacccccacagtgctg

SEQ ID NO: 4515 - RNA, 19 nt, synthetic construct
  source 1..19: mol_type = other RNA
aactgcacggtggccaggt

SEQ ID NO: 4516 - RNA, 19 nt, synthetic construct
  source 1..19: mol_type = other RNA
acacccaggacccaacggt

SEQ ID NO: 4517 - RNA, 19 nt, synthetic construct
  source 1..19: mol_type = other RNA
acctttgtggaatactcac

SEQ ID NO: 4518 - RNA, 19 nt, synthetic construct
  source 1..19: mol_type = other RNA
agcagccccacatcggccc

SEQ ID NO: 4519 - RNA, 19 nt, synthetic construct
  source 1..19: mol_type = other RNA
agcagccccacatcggccc

SEQ ID NO: 4520 - RNA, 19 nt, synthetic construct
  source 1..19: mol_type = other RNA
agcagccccacatcggccc

SEQ ID NO: 4521 - RNA, 19 nt, synthetic construct
  source 1..19: mol_type = other RNA
actccacgacaagcccggc

SEQ ID NO: 4522 - RNA, 19 nt, synthetic construct
  source 1..19: mol_type = other RNA
atagagtgccaggccgaga

SEQ ID NO: 4523 - RNA, 19 nt, synthetic construct
  source 1..19: mol_type = other RNA
gctacatggggatcttcct

SEQ ID NO: 4524 - RNA, 19 nt, synthetic construct
  source 1..19: mol_type = other RNA
ccccggtgtcagtggacag

SEQ ID NO: 4525 - RNA, 19 nt, synthetic construct
  source 1..19: mol_type = other RNA
cgctccagtttgggaacct

SEQ ID NO: 4526 - RNA, 19 nt, synthetic construct
  source 1..19: mol_type = other RNA
ctgccgtgccctggcacct

SEQ ID NO: 4527 - RNA, 19 nt, synthetic construct
  source 1..19: mol_type = other RNA
acatgcagaactgccccaa

SEQ ID NO: 4528 - RNA, 19 nt, synthetic construct
  source 1..19: mol_type = other RNA
tgggagtgcagccaccggc

SEQ ID NO: 4529 - RNA, 19 nt, synthetic construct
  source 1..19: mol_type = other RNA
ctccctcctctgccctagg

SEQ ID NO: 4530 - RNA, 19 nt, synthetic construct
  source 1..19: mol_type = other RNA
ctccctcctctgccctagg

SEQ ID NO: 4531 - RNA, 19 nt, synthetic construct
  source 1..19: mol_type = other RNA
ctccctcctctgccctagg

SEQ ID NO: 4532 - RNA, 19 nt, synthetic construct
  source 1..19: mol_type = other RNA
ctccctcctctgccctagg

SEQ ID NO: 4533 - RNA, 19 nt, synthetic construct
  source 1..19: mol_type = other RNA
tcccacttctctactccct

SEQ ID NO: 4534 - RNA, 19 nt, synthetic construct
  source 1..19: mol_type = other RNA
cctgtgaggaggactcctg

SEQ ID NO: 4535 - RNA, 19 nt, synthetic construct
  source 1..19: mol_type = other RNA
cctcgggcagtgcccctgc

SEQ ID NO: 4536 - RNA, 19 nt, synthetic construct
  source 1..19: mol_type = other RNA
cgccaaccagacctgtggc

SEQ ID NO: 4537 - RNA, 19 nt, synthetic construct
  source 1..19: mol_type = other RNA
cccactgtcccaggggtgg

SEQ ID NO: 4538 - RNA, 19 nt, synthetic construct
  source 1..19: mol_type = other RNA
ccaagtacatgcagaactg

SEQ ID NO: 4539 - RNA, 19 nt, synthetic construct
  source 1..19: mol_type = other RNA
cacgctggacgtgggctgt

SEQ ID NO: 4540 - RNA, 19 nt, synthetic construct
  source 1..19: mol_type = other RNA
ggagcctgctgtgcctacc

SEQ ID NO: 4541 - RNA, 19 nt, synthetic construct
  source 1..19: mol_type = other RNA
cacccacacccccacagtg

SEQ ID NO: 4542 - RNA, 19 nt, synthetic construct
  source 1..19: mol_type = other RNA
cacccacacccccacagtg

SEQ ID NO: 4543 - RNA, 19 nt, synthetic construct
  source 1..19: mol_type = other RNA
agttgggccaggtcgtgga

SEQ ID NO: 4544 - RNA, 19 nt, synthetic construct
  source 1..19: mol_type = other RNA
agttgggccaggtcgtgga

SEQ ID NO: 4545 - RNA, 19 nt, synthetic construct
  source 1..19: mol_type = other RNA
agttgggccaggtcgtgga

SEQ ID NO: 4546 - RNA, 19 nt, synthetic construct
  source 1..19: mol_type = other RNA
agttgggccaggtcgtgga

SEQ ID NO: 4547 - RNA, 19 nt, synthetic construct
  source 1..19: mol_type = other RNA
tgagtgcgagtgcatctgc

SEQ ID NO: 4548 - RNA, 19 nt, synthetic construct
  source 1..19: mol_type = other RNA
caatgacgcgggcgcctgt

SEQ ID NO: 4549 - RNA, 19 nt, synthetic construct
  source 1..19: mol_type = other RNA
gtgcgcccacgcggggggc

SEQ ID NO: 4550 - RNA, 19 nt, synthetic construct
  source 1..19: mol_type = other RNA
aagcccttccactcgaact

SEQ ID NO: 4551 - RNA, 19 nt, synthetic construct
  source 1..19: mol_type = other RNA
cctgtggacggctgcacct

SEQ ID NO: 4552 - RNA, 19 nt, synthetic construct
  source 1..19: mol_type = other RNA
cccactattccacctttga

SEQ ID NO: 4553 - RNA, 19 nt, synthetic construct
  source 1..19: mol_type = other RNA
cagcctgagccccctgaac

SEQ ID NO: 4554 - RNA, 19 nt, synthetic construct
  source 1..19: mol_type = other RNA
ctgtggacggctgcacctg

SEQ ID NO: 4555 - RNA, 19 nt, synthetic construct
  source 1..19: mol_type = other RNA
acatcccctgtgggaccac

SEQ ID NO: 4556 - RNA, 19 nt, synthetic construct
  source 1..19: mol_type = other RNA
ctgcacctatgtcctcatg

SEQ ID NO: 4557 - RNA, 19 nt, synthetic construct
  source 1..19: mol_type = other RNA
tgagcagcggtttcagcaa

SEQ ID NO: 4558 - RNA, 19 nt, synthetic construct
  source 1..19: mol_type = other RNA
cggctgccctacagcctct

SEQ ID NO: 4559 - RNA, 19 nt, synthetic construct
  source 1..19: mol_type = other RNA
actgcacctatgtcctcat

SEQ ID NO: 4560 - RNA, 19 nt, synthetic construct
  source 1..19: mol_type = other RNA
gtggacggctgcttctgcc

SEQ ID NO: 4561 - RNA, 19 nt, synthetic construct
  source 1..19: mol_type = other RNA
ctgcctgcccctcgggcag

SEQ ID NO: 4562 - RNA, 19 nt, synthetic construct
  source 1..19: mol_type = other RNA
cccaccagggccagatgtg

SEQ ID NO: 4563 - RNA, 19 nt, synthetic construct
  source 1..19: mol_type = other RNA
acgctggacgtgggctgtt

SEQ ID NO: 4564 - RNA, 19 nt, synthetic construct
  source 1..19: mol_type = other RNA
atggccacttcatcacctt

SEQ ID NO: 4565 - RNA, 19 nt, synthetic construct
  source 1..19: mol_type = other RNA
ggaccaccggcaccacctg

SEQ ID NO: 4566 - RNA, 19 nt, synthetic construct
  source 1..19: mol_type = other RNA
ggacctgcctggcctggaa

SEQ ID NO: 4567 - RNA, 19 nt, synthetic construct
  source 1..19: mol_type = other RNA
tgcgctcacagccttgagg

SEQ ID NO: 4568 - RNA, 19 nt, synthetic construct
  source 1..19: mol_type = other RNA
acagccttgaggcctgcac

SEQ ID NO: 4569 - RNA, 19 nt, synthetic construct
  source 1..19: mol_type = other RNA
gtctgccgctggtccagct

SEQ ID NO: 4570 - RNA, 19 nt, synthetic construct
  source 1..19: mol_type = other RNA
cagcacggagcctgctgtg

SEQ ID NO: 4571 - RNA, 19 nt, synthetic construct
  source 1..19: mol_type = other RNA
tagagtgccaggccgagag

SEQ ID NO: 4572 - RNA, 19 nt, synthetic construct
  source 1..19: mol_type = other RNA
tcgaccctgctgcccagca

SEQ ID NO: 4573 - RNA, 19 nt, synthetic construct
  source 1..19: mol_type = other RNA
tgagccccagtgtgcctgg

SEQ ID NO: 4574 - RNA, 19 nt, synthetic construct
  source 1..19: mol_type = other RNA
catgccctcctccactccg

SEQ ID NO: 4575 - RNA, 19 nt, synthetic construct
  source 1..19: mol_type = other RNA
tcgaccctgctgcccagca

SEQ ID NO: 4576 - RNA, 19 nt, synthetic construct
  source 1..19: mol_type = other RNA
tgagccccagtgtgcctgg

SEQ ID NO: 4577 - RNA, 19 nt, synthetic construct
  source 1..19: mol_type = other RNA
tcgaccctgctgcccagca

SEQ ID NO: 4578 - RNA, 19 nt, synthetic construct
  source 1..19: mol_type = other RNA
tgagccccagtgtgcctgg

SEQ ID NO: 4579 - RNA, 19 nt, synthetic construct
  source 1..19: mol_type = other RNA
tcgaccctgctgcccagca

SEQ ID NO: 4580 - RNA, 19 nt, synthetic construct
  source 1..19: mol_type = other RNA
tgagccccagtgtgcctgg

SEQ ID NO: 4581 - RNA, 19 nt, synthetic construct
  source 1..19: mol_type = other RNA
catgccctcctccactccg

SEQ ID NO: 4582 - RNA, 19 nt, synthetic construct
  source 1..19: mol_type = other RNA
tgcttctgcagggcatttg

SEQ ID NO: 4583 - RNA, 19 nt, synthetic construct
  source 1..19: mol_type = other RNA
cggggagtgtgcagtgact

SEQ ID NO: 4584 - RNA, 19 nt, synthetic construct
  source 1..19: mol_type = other RNA
gaccccacagcctgcatcc

SEQ ID NO: 4585 - RNA, 19 nt, synthetic construct
  source 1..19: mol_type = other RNA
gcagggtctgcggcctgtg

SEQ ID NO: 4586 - RNA, 19 nt, synthetic construct
  source 1..19: mol_type = other RNA
tgcggcctgtgcgggaact

SEQ ID NO: 4587 - RNA, 19 nt, synthetic construct
  source 1..19: mol_type = other RNA
tgtccccctgcgggagttg

SEQ ID NO: 4588 - RNA, 19 nt, synthetic construct
  source 1..19: mol_type = other RNA
gtccccctgcgggagttgg

SEQ ID NO: 4589 - RNA, 19 nt, synthetic construct
  source 1..19: mol_type = other RNA
tgtccccctgcgggagttg

SEQ ID NO: 4590 - RNA, 19 nt, synthetic construct
  source 1..19: mol_type = other RNA
gtccccctgcgggagttgg

SEQ ID NO: 4591 - RNA, 19 nt, synthetic construct
  source 1..19: mol_type = other RNA
tgtccccctgcgggagttg

SEQ ID NO: 4592 - RNA, 19 nt, synthetic construct
  source 1..19: mol_type = other RNA
gtccccctgcgggagttgg

SEQ ID NO: 4593 - RNA, 19 nt, synthetic construct
  source 1..19: mol_type = other RNA
gccagtgcggcacctgcac

SEQ ID NO: 4594 - RNA, 19 nt, synthetic construct
  source 1..19: mol_type = other RNA
agatgtgcggcctgtgtgg

SEQ ID NO: 4595 - RNA, 19 nt, synthetic construct
  source 1..19: mol_type = other RNA
cagtgcggcacctgcacca

SEQ ID NO: 4596 - RNA, 19 nt, synthetic construct
  source 1..19: mol_type = other RNA
ggagcctctctgcagaaaa

SEQ ID NO: 4597 - RNA, 19 nt, synthetic construct
  source 1..19: mol_type = other RNA
gatctgatgctgagccagg

SEQ ID NO: 4598 - RNA, 19 nt, synthetic construct
  source 1..19: mol_type = other RNA
aagttcaagatgtgcttca

SEQ ID NO: 4599 - RNA, 19 nt, synthetic construct
  source 1..19: mol_type = other RNA
aagttcaagatgtgcttca

SEQ ID NO: 4600 - RNA, 19 nt, synthetic construct
  source 1..19: mol_type = other RNA
aagttcaagatgtgcttca

SEQ ID NO: 4601 - RNA, 19 nt, synthetic construct
  source 1..19: mol_type = other RNA
aagttcaagatgtgcttca

SEQ ID NO: 4602 - RNA, 19 nt, synthetic construct
  source 1..19: mol_type = other RNA
tttgccacgcgtagccggt

SEQ ID NO: 4603 - RNA, 19 nt, synthetic construct
  source 1..19: mol_type = other RNA
ggccaacgtcacctgcgtg

SEQ ID NO: 4604 - RNA, 19 nt, synthetic construct
  source 1..19: mol_type = other RNA
caacgtcacctgcgtgaac

SEQ ID NO: 4605 - RNA, 19 nt, synthetic construct
  source 1..19: mol_type = other RNA
gtagccggtccgtggtggg

SEQ ID NO: 4606 - RNA, 19 nt, synthetic construct
  source 1..19: mol_type = other RNA
ctatgaaatccgtgtgttc

SEQ ID NO: 4607 - RNA, 19 nt, synthetic construct
  source 1..19: mol_type = other RNA
ctatgaaatccgtgtgttc

SEQ ID NO: 4608 - RNA, 19 nt, synthetic construct
  source 1..19: mol_type = other RNA
ctatgaaatccgtgtgttc

SEQ ID NO: 4609 - RNA, 19 nt, synthetic construct
  source 1..19: mol_type = other RNA
ctatgaaatccgtgtgttc

SEQ ID NO: 4610 - RNA, 19 nt, synthetic construct
  source 1..19: mol_type = other RNA
caactatgaaatccgtgtg

SEQ ID NO: 4611 - RNA, 19 nt, synthetic construct
  source 1..19: mol_type = other RNA
caactatgaaatccgtgtg

SEQ ID NO: 4612 - RNA, 19 nt, synthetic construct
  source 1..19: mol_type = other RNA
caactatgaaatccgtgtg

SEQ ID NO: 4613 - RNA, 19 nt, synthetic construct
  source 1..19: mol_type = other RNA
caactatgaaatccgtgtg

SEQ ID NO: 4614 - RNA, 19 nt, synthetic construct
  source 1..19: mol_type = other RNA
cccatcaaagtgtcggacc

SEQ ID NO: 4615 - RNA, 19 nt, synthetic construct
  source 1..19: mol_type = other RNA
tgcggccccatacagcctg

SEQ ID NO: 4616 - RNA, 19 nt, synthetic construct
  source 1..19: mol_type = other RNA
tggccaacgtcacctgcgt

SEQ ID NO: 4617 - RNA, 19 nt, synthetic construct
  source 1..19: mol_type = other RNA
tgcccacccaccaaagtgt

SEQ ID NO: 4618 - RNA, 19 nt, synthetic construct
  source 1..19: mol_type = other RNA
gccgcgcccggggagtgtg

SEQ ID NO: 4619 - RNA, 19 nt, synthetic construct
  source 1..19: mol_type = other RNA
tgcacgcccttctgtgtcc

SEQ ID NO: 4620 - RNA, 19 nt, synthetic construct
  source 1..19: mol_type = other RNA
tagccggtccgtggtgggg

SEQ ID NO: 4621 - RNA, 19 nt, synthetic construct
  source 1..19: mol_type = other RNA
agccggtccgtggtggggg

SEQ ID NO: 4622 - RNA, 19 nt, synthetic construct
  source 1..19: mol_type = other RNA
ggagagcctgtggcccacc

SEQ ID NO: 4623 - RNA, 19 nt, synthetic construct
  source 1..19: mol_type = other RNA
tatgaaatccgtgtgttct

SEQ ID NO: 4624 - RNA, 19 nt, synthetic construct
  source 1..19: mol_type = other RNA
tatgaaatccgtgtgttct

SEQ ID NO: 4625 - RNA, 19 nt, synthetic construct
  source 1..19: mol_type = other RNA
tatgaaatccgtgtgttct

SEQ ID NO: 4626 - RNA, 19 nt, synthetic construct
  source 1..19: mol_type = other RNA
tatgaaatccgtgtgttct

SEQ ID NO: 4627 - RNA, 19 nt, synthetic construct
  source 1..19: mol_type = other RNA
cgcgcccggggagtgtgca

SEQ ID NO: 4628 - RNA, 19 nt, synthetic construct
  source 1..19: mol_type = other RNA
cacccaccaaagtgtacaa

SEQ ID NO: 4629 - RNA, 19 nt, synthetic construct
  source 1..19: mol_type = other RNA
aacgagttctatgcccaca

SEQ ID NO: 4630 - RNA, 19 nt, synthetic construct
  source 1..19: mol_type = other RNA
caggtgcgtgggtgacaac

SEQ ID NO: 4631 - RNA, 19 nt, synthetic construct
  source 1..19: mol_type = other RNA
acgctggtgttggctctgg

SEQ ID NO: 4632 - RNA, 19 nt, synthetic construct
  source 1..19: mol_type = other RNA
gtggccaacgtcacctgcg

SEQ ID NO: 4633 - RNA, 19 nt, synthetic construct
  source 1..19: mol_type = other RNA
ccggagctgccacacgctg

SEQ ID NO: 4634 - RNA, 19 nt, synthetic construct
  source 1..19: mol_type = other RNA
agcaggtggactgtgaccg

SEQ ID NO: 4635 - RNA, 19 nt, synthetic construct
  source 1..19: mol_type = other RNA
cgactgtctccagcgggac

SEQ ID NO: 4636 - RNA, 19 nt, synthetic construct
  source 1..19: mol_type = other RNA
tcggtgcagtgcaagcccc

SEQ ID NO: 4637 - RNA, 19 nt, synthetic construct
  source 1..19: mol_type = other RNA
cttctgtgtccctgcgccc

SEQ ID NO: 4638 - RNA, 19 nt, synthetic construct
  source 1..19: mol_type = other RNA
ccaacaaccagagggacga

SEQ ID NO: 4639 - RNA, 19 nt, synthetic construct
  source 1..19: mol_type = other RNA
ccgagtgcctccggagctg

SEQ ID NO: 4640 - RNA, 19 nt, synthetic construct
  source 1..19: mol_type = other RNA
cttcagcgtgtccactgtg

SEQ ID NO: 4641 - RNA, 19 nt, synthetic construct
  source 1..19: mol_type = other RNA
ccacgcgtagccggtccgt

SEQ ID NO: 4642 - RNA, 19 nt, synthetic construct
  source 1..19: mol_type = other RNA
ccggtccgtggtgggggac

SEQ ID NO: 4643 - RNA, 19 nt, synthetic construct
  source 1..19: mol_type = other RNA
cgagtgcctccggagctgc

SEQ ID NO: 4644 - RNA, 19 nt, synthetic construct
  source 1..19: mol_type = other RNA
gacgctggtgttggctctg

SEQ ID NO: 4645 - RNA, 19 nt, synthetic construct
  source 1..19: mol_type = other RNA
acctactccaacatccgtg

SEQ ID NO: 4646 - RNA, 19 nt, synthetic construct
  source 1..19: mol_type = other RNA
acctactccaacatccgtg

SEQ ID NO: 4647 - RNA, 19 nt, synthetic construct
  source 1..19: mol_type = other RNA
acctactccaacatccgtg

SEQ ID NO: 4648 - RNA, 19 nt, synthetic construct
  source 1..19: mol_type = other RNA
acctactccaacatccgtg

SEQ ID NO: 4649 - RNA, 19 nt, synthetic construct
  source 1..19: mol_type = other RNA
gcccatcaaagtgtcggac

SEQ ID NO: 4650 - RNA, 19 nt, synthetic construct
  source 1..19: mol_type = other RNA
accagagggacgactgtct

SEQ ID NO: 4651 - RNA, 19 nt, synthetic construct
  source 1..19: mol_type = other RNA
gcgcccggggagtgtgcag

SEQ ID NO: 4652 - RNA, 19 nt, synthetic construct
  source 1..19: mol_type = other RNA
ccacccaccaaagtgtaca

SEQ ID NO: 4653 - RNA, 19 nt, synthetic construct
  source 1..19: mol_type = other RNA
gaagggtgaggggccagca

SEQ ID NO: 4654 - RNA, 19 nt, synthetic construct
  source 1..19: mol_type = other RNA
cctctgctcaacccagccc

SEQ ID NO: 4655 - RNA, 19 nt, synthetic construct
  source 1..19: mol_type = other RNA
gcccacccaccaaagtgta

SEQ ID NO: 4656 - RNA, 19 nt, synthetic construct
  source 1..19: mol_type = other RNA
gccgagtgcctccggagct

SEQ ID NO: 4657 - RNA, 19 nt, synthetic construct
  source 1..19: mol_type = other RNA
acgactgtctccagcggga

SEQ ID NO: 4658 - RNA, 19 nt, synthetic construct
  source 1..19: mol_type = other RNA
atgtcactgggacgccctg

SEQ ID NO: 4659 - RNA, 19 nt, synthetic construct
  source 1..19: mol_type = other RNA
gccggtccgtggtggggga

SEQ ID NO: 4660 - RNA, 19 nt, synthetic construct
  source 1..19: mol_type = other RNA
gatgtcactgggacgccct

SEQ ID NO: 4661 - RNA, 19 nt, synthetic construct
  source 1..19: mol_type = other RNA
aactatgaaatccgtgtgt

SEQ ID NO: 4662 - RNA, 19 nt, synthetic construct
  source 1..19: mol_type = other RNA
aactatgaaatccgtgtgt

SEQ ID NO: 4663 - RNA, 19 nt, synthetic construct
  source 1..19: mol_type = other RNA
aactatgaaatccgtgtgt

SEQ ID NO: 4664 - RNA, 19 nt, synthetic construct
  source 1..19: mol_type = other RNA
aactatgaaatccgtgtgt

SEQ ID NO: 4665 - RNA, 19 nt, synthetic construct
  source 1..19: mol_type = other RNA
gcacgcccttctgtgtccc

SEQ ID NO: 4666 - RNA, 19 nt, synthetic construct
  source 1..19: mol_type = other RNA
acaggctggtccaggcaag

SEQ ID NO: 4667 - RNA, 19 nt, synthetic construct
  source 1..19: mol_type = other RNA
cggtgcagtgcaagcccct

SEQ ID NO: 4668 - RNA, 19 nt, synthetic construct
  source 1..19: mol_type = other RNA
agtgcctccggagctgcca

SEQ ID NO: 4669 - RNA, 19 nt, synthetic construct
  source 1..19: mol_type = other RNA
ccagggaccacctggatcc

SEQ ID NO: 4670 - RNA, 19 nt, synthetic construct
  source 1..19: mol_type = other RNA
cagggaccacctggatcct

SEQ ID NO: 4671 - RNA, 19 nt, synthetic construct
  source 1..19: mol_type = other RNA
ccagggaccacctggatcc

SEQ ID NO: 4672 - RNA, 19 nt, synthetic construct
  source 1..19: mol_type = other RNA
cagggaccacctggatcct

SEQ ID NO: 4673 - RNA, 19 nt, synthetic construct
  source 1..19: mol_type = other RNA
ccagggaccacctggatcc

SEQ ID NO: 4674 - RNA, 19 nt, synthetic construct
  source 1..19: mol_type = other RNA
cagggaccacctggatcct

SEQ ID NO: 4675 - RNA, 19 nt, synthetic construct
  source 1..19: mol_type = other RNA
ccagggaccacctggatcc

SEQ ID NO: 4676 - RNA, 19 nt, synthetic construct
  source 1..19: mol_type = other RNA
cagggaccacctggatcct

SEQ ID NO: 4677 - RNA, 19 nt, synthetic construct
  source 1..19: mol_type = other RNA
ccagggaccacctggatcc

SEQ ID NO: 4678 - RNA, 19 nt, synthetic construct
  source 1..19: mol_type = other RNA
cagggaccacctggatcct

SEQ ID NO: 4679 - RNA, 19 nt, synthetic construct
  source 1..19: mol_type = other RNA
ccagggaccacctggatcc

SEQ ID NO: 4680 - RNA, 19 nt, synthetic construct
  source 1..19: mol_type = other RNA
cagggaccacctggatcct

SEQ ID NO: 4681 - RNA, 19 nt, synthetic construct
  source 1..19: mol_type = other RNA
ggtgcagtgcaagcccctg

SEQ ID NO: 4682 - RNA, 19 nt, synthetic construct
  source 1..19: mol_type = other RNA
ccttctgtgtccctgcgcc

SEQ ID NO: 4683 - RNA, 19 nt, synthetic construct
  source 1..19: mol_type = other RNA
gagtgcctccggagctgcc

SEQ ID NO: 4684 - RNA, 19 nt, synthetic construct
  source 1..19: mol_type = other RNA
cggagctgccacacgctgg

SEQ ID NO: 4685 - RNA, 19 nt, synthetic construct
  source 1..19: mol_type = other RNA
tgcagtgcaagcccctgcc

SEQ ID NO: 4686 - RNA, 19 nt, synthetic construct
  source 1..19: mol_type = other RNA
agcctgtggcccaccttgg

SEQ ID NO: 4687 - RNA, 19 nt, synthetic construct
  source 1..19: mol_type = other RNA
tggcccaccttggccttgc

SEQ ID NO: 4688 - RNA, 19 nt, synthetic construct
  source 1..19: mol_type = other RNA
ctgatcctgtttgaccaaa

SEQ ID NO: 4689 - RNA, 19 nt, synthetic construct
  source 1..19: mol_type = other RNA
cctgggagagcctgtggcc

SEQ ID NO: 4690 - RNA, 19 nt, synthetic construct
  source 1..19: mol_type = other RNA
tcacccgtgttgtcatcaa

SEQ ID NO: 4691 - RNA, 19 nt, synthetic construct
  source 1..19: mol_type = other RNA
gcaactacggccactgccc

SEQ ID NO: 4692 - RNA, 19 nt, synthetic construct
  source 1..19: mol_type = other RNA
gcaactacggccactgccc

SEQ ID NO: 4693 - RNA, 19 nt, synthetic construct
  source 1..19: mol_type = other RNA
gcaactacggccactgccc

SEQ ID NO: 4694 - RNA, 19 nt, synthetic construct
  source 1..19: mol_type = other RNA
gcaactacggccactgccc

SEQ ID NO: 4695 - RNA, 19 nt, synthetic construct
  source 1..19: mol_type = other RNA
cacggccaccacaactggg

SEQ ID NO: 4696 - RNA, 19 nt, synthetic construct
  source 1..19: mol_type = other RNA
gtggacaactgcaccgtgt

SEQ ID NO: 4697 - RNA, 19 nt, synthetic construct
  source 1..19: mol_type = other RNA
tgagctctgcccccggacc

SEQ ID NO: 4698 - RNA, 19 nt, synthetic construct
  source 1..19: mol_type = other RNA
cgacgtcacctgcagcgtt

SEQ ID NO: 4699 - RNA, 19 nt, synthetic construct
  source 1..19: mol_type = other RNA
tgggagcctctctgcagaa

SEQ ID NO: 4700 - RNA, 19 nt, synthetic construct
  source 1..19: mol_type = other RNA
ccacggccaccacaactgg

SEQ ID NO: 4701 - RNA, 19 nt, synthetic construct
  source 1..19: mol_type = other RNA
ccaaagtgctgactaccac

SEQ ID NO: 4702 - RNA, 19 nt, synthetic construct
  source 1..19: mol_type = other RNA
acggttcccagctcgtcca

SEQ ID NO: 4703 - RNA, 19 nt, synthetic construct
  source 1..19: mol_type = other RNA
acgtcacctgcagcgtttc

SEQ ID NO: 4704 - RNA, 19 nt, synthetic construct
  source 1..19: mol_type = other RNA
ggggacgcactggagtttg

SEQ ID NO: 4705 - RNA, 19 nt, synthetic construct
  source 1..19: mol_type = other RNA
ggtcacccgtgttgtcatc

SEQ ID NO: 4706 - RNA, 19 nt, synthetic construct
  source 1..19: mol_type = other RNA
ctgagctctgcccccggac

SEQ ID NO: 4707 - RNA, 19 nt, synthetic construct
  source 1..19: mol_type = other RNA
cggcggccgcacctacagc

SEQ ID NO: 4708 - RNA, 19 nt, synthetic construct
  source 1..19: mol_type = other RNA
agtgcttaccaccacggcc

SEQ ID NO: 4709 - RNA, 19 nt, synthetic construct
  source 1..19: mol_type = other RNA
ctaccaaagtgctgactac

SEQ ID NO: 4710 - RNA, 19 nt, synthetic construct
  source 1..19: mol_type = other RNA
agtgcttaccaccacggcc

SEQ ID NO: 4711 - RNA, 19 nt, synthetic construct
  source 1..19: mol_type = other RNA
ctgctgtcccaccttccgc

SEQ ID NO: 4712 - RNA, 19 nt, synthetic construct
  source 1..19: mol_type = other RNA
tacggccactgccccagca

SEQ ID NO: 4713 - RNA, 19 nt, synthetic construct
  source 1..19: mol_type = other RNA
tacggccactgccccagca

SEQ ID NO: 4714 - RNA, 19 nt, synthetic construct
  source 1..19: mol_type = other RNA
tacggccactgccccagca

SEQ ID NO: 4715 - RNA, 19 nt, synthetic construct
  source 1..19: mol_type = other RNA
tacggccactgccccagca

SEQ ID NO: 4716 - RNA, 19 nt, synthetic construct
  source 1..19: mol_type = other RNA
ggcggccgcacctacagcc

SEQ ID NO: 4717 - RNA, 19 nt, synthetic construct
  source 1..19: mol_type = other RNA
acggccaccacaactgggg

SEQ ID NO: 4718 - RNA, 19 nt, synthetic construct
  source 1..19: mol_type = other RNA
gacgcactggagtttggga

SEQ ID NO: 4719 - RNA, 19 nt, synthetic construct
  source 1..19: mol_type = other RNA
caactacggccactgcccc

SEQ ID NO: 4720 - RNA, 19 nt, synthetic construct
  source 1..19: mol_type = other RNA
caactacggccactgcccc

SEQ ID NO: 4721 - RNA, 19 nt, synthetic construct
  source 1..19: mol_type = other RNA
caactacggccactgcccc

SEQ ID NO: 4722 - RNA, 19 nt, synthetic construct
  source 1..19: mol_type = other RNA
caactacggccactgcccc

SEQ ID NO: 4723 - RNA, 19 nt, synthetic construct
  source 1..19: mol_type = other RNA
aggagggcgactgctgtcc

SEQ ID NO: 4724 - RNA, 19 nt, synthetic construct
  source 1..19: mol_type = other RNA
caggcctgtggtcacccgt

SEQ ID NO: 4725 - RNA, 19 nt, synthetic construct
  source 1..19: mol_type = other RNA
ctgcacccacggcggccgc

SEQ ID NO: 4726 - RNA, 19 nt, synthetic construct
  source 1..19: mol_type = other RNA
ccacggcggccgcacctac

SEQ ID NO: 4727 - RNA, 19 nt, synthetic construct
  source 1..19: mol_type = other RNA
cacggcggccgcacctaca

SEQ ID NO: 4728 - RNA, 19 nt, synthetic construct
  source 1..19: mol_type = other RNA
agcggagaactgccagagc

SEQ ID NO: 4729 - RNA, 19 nt, synthetic construct
  source 1..19: mol_type = other RNA
gcggagaactgccagagct

SEQ ID NO: 4730 - RNA, 19 nt, synthetic construct
  source 1..19: mol_type = other RNA
ctccactccagagactgcc

SEQ ID NO: 4731 - RNA, 19 nt, synthetic construct
  source 1..19: mol_type = other RNA
ctccactccagagactgcc

SEQ ID NO: 4732 - RNA, 19 nt, synthetic construct
  source 1..19: mol_type = other RNA
ccgagccagccctgtgact

SEQ ID NO: 4733 - RNA, 19 nt, synthetic construct
  source 1..19: mol_type = other RNA
gagctctgcccccggacct

SEQ ID NO: 4734 - RNA, 19 nt, synthetic construct
  source 1..19: mol_type = other RNA
tccctcagtgtggagaatg

SEQ ID NO: 4735 - RNA, 19 nt, synthetic construct
  source 1..19: mol_type = other RNA
cctcagtgtggagaatgag

SEQ ID NO: 4736 - RNA, 19 nt, synthetic construct
  source 1..19: mol_type = other RNA
ggagggcgactgctgtccc

SEQ ID NO: 4737 - RNA, 19 nt, synthetic construct
  source 1..19: mol_type = other RNA
ctgtgacttccactatgag

SEQ ID NO: 4738 - RNA, 19 nt, synthetic construct
  source 1..19: mol_type = other RNA
agcccctgggcctcgagtg

SEQ ID NO: 4739 - RNA, 19 nt, synthetic construct
  source 1..19: mol_type = other RNA
agcccctgggcctcgagtg

SEQ ID NO: 4740 - RNA, 19 nt, synthetic construct
  source 1..19: mol_type = other RNA
agcccctgggcctcgagtg

SEQ ID NO: 4741 - RNA, 19 nt, synthetic construct
  source 1..19: mol_type = other RNA
agcccctgggcctcgagtg

SEQ ID NO: 4742 - RNA, 19 nt, synthetic construct
  source 1..19: mol_type = other RNA
cacccacggcggccgcacc

SEQ ID NO: 4743 - RNA, 19 nt, synthetic construct
  source 1..19: mol_type = other RNA
ggcctgtggtcacccgtgt

SEQ ID NO: 4744 - RNA, 19 nt, synthetic construct
  source 1..19: mol_type = other RNA
tggtgggggacgcactgga

SEQ ID NO: 4745 - RNA, 19 nt, synthetic construct
  source 1..19: mol_type = other RNA
agtgcccctgcacccacgg

SEQ ID NO: 4746 - RNA, 19 nt, synthetic construct
  source 1..19: mol_type = other RNA
cccacggcggccgcaccta

SEQ ID NO: 4747 - RNA, 19 nt, synthetic construct
  source 1..19: mol_type = other RNA
tgcttaccaccacggccac

SEQ ID NO: 4748 - RNA, 19 nt, synthetic construct
  source 1..19: mol_type = other RNA
tgcttaccaccacggccac

SEQ ID NO: 4749 - RNA, 19 nt, synthetic construct
  source 1..19: mol_type = other RNA
cccgagccagccctgtgac

SEQ ID NO: 4750 - RNA, 19 nt, synthetic construct
  source 1..19: mol_type = other RNA
gggaccacccacaccccca

SEQ ID NO: 4751 - RNA, 19 nt, synthetic construct
  source 1..19: mol_type = other RNA
gggaccacccacaccccca

SEQ ID NO: 4752 - RNA, 19 nt, synthetic construct
  source 1..19: mol_type = other RNA
aacccggcgcacaatgggc

SEQ ID NO: 4753 - RNA, 19 nt, synthetic construct
  source 1..19: mol_type = other RNA
tgtccaagaaatgtgccga

SEQ ID NO: 4754 - RNA, 19 nt, synthetic construct
  source 1..19: mol_type = other RNA
tgtgccgccaagggcgtac

SEQ ID NO: 4755 - RNA, 19 nt, synthetic construct
  source 1..19: mol_type = other RNA
cggaaactactatgacgtc

SEQ ID NO: 4756 - RNA, 19 nt, synthetic construct
  source 1..19: mol_type = other RNA
ggaaactactatgacgtcg

SEQ ID NO: 4757 - RNA, 19 nt, synthetic construct
  source 1..19: mol_type = other RNA
agagccgagcactatagcc

SEQ ID NO: 4758 - RNA, 19 nt, synthetic construct
  source 1..19: mol_type = other RNA
tgcaaccgtcccggcttcg

SEQ ID NO: 4759 - RNA, 19 nt, synthetic construct
  source 1..19: mol_type = other RNA
cagagccgagcactatagc

SEQ ID NO: 4760 - RNA, 19 nt, synthetic construct
  source 1..19: mol_type = other RNA
gtgccgccaagggcgtaca

SEQ ID NO: 4761 - RNA, 19 nt, synthetic construct
  source 1..19: mol_type = other RNA
tgaacccggcgcacaatgg

SEQ ID NO: 4762 - RNA, 19 nt, synthetic construct
  source 1..19: mol_type = other RNA
gtcggacccgagccagccc

SEQ ID NO: 4763 - RNA, 19 nt, synthetic construct
  source 1..19: mol_type = other RNA
gaacgttctgcctccatcc

SEQ ID NO: 4764 - RNA, 19 nt, synthetic construct
  source 1..19: mol_type = other RNA
ccgcatcaacacgaccatc

SEQ ID NO: 4765 - RNA, 19 nt, synthetic construct
  source 1..19: mol_type = other RNA
aataaaccctgagcattga

SEQ ID NO: 4766 - RNA, 19 nt, synthetic construct
  source 1..19: mol_type = other RNA
cagctcacactaccaaagt

SEQ ID NO: 4767 - RNA, 19 nt, synthetic construct
  source 1..19: mol_type = other RNA
cagctcacactaccaaagt

SEQ ID NO: 4768 - RNA, 19 nt, synthetic construct
  source 1..19: mol_type = other RNA
cagctcacactaccaaagt

SEQ ID NO: 4769 - RNA, 19 nt, synthetic construct
  source 1..19: mol_type = other RNA
cagctcacactaccaaagt

SEQ ID NO: 4770 - RNA, 19 nt, synthetic construct
  source 1..19: mol_type = other RNA
cagctcacactaccaaagt

SEQ ID NO: 4771 - RNA, 19 nt, synthetic construct
  source 1..19: mol_type = other RNA
tcgacgacaatgccatcaa

SEQ ID NO: 4772 - RNA, 19 nt, synthetic construct
  source 1..19: mol_type = other RNA
atggcggtgccccgacgtc

SEQ ID NO: 4773 - RNA, 19 nt, synthetic construct
  source 1..19: mol_type = other RNA
gcgatcgctacagctttga

SEQ ID NO: 4774 - RNA, 19 nt, synthetic construct
  source 1..19: mol_type = other RNA
ttcgacgacaatgccatca

SEQ ID NO: 4775 - RNA, 19 nt, synthetic construct
  source 1..19: mol_type = other RNA
accagcgttacagccatcc

SEQ ID NO: 4776 - RNA, 19 nt, synthetic construct
  source 1..19: mol_type = other RNA
tgtcggacccgagccagcc

SEQ ID NO: 4777 - RNA, 19 nt, synthetic construct
  source 1..19: mol_type = other RNA
agatacacaagcacccttg

SEQ ID NO: 4778 - RNA, 19 nt, synthetic construct
  source 1..19: mol_type = other RNA
tcgagtgccgtgcccaggc

SEQ ID NO: 4779 - RNA, 19 nt, synthetic construct
  source 1..19: mol_type = other RNA
gctctacggccatgccctc

SEQ ID NO: 4780 - RNA, 19 nt, synthetic construct
  source 1..19: mol_type = other RNA
tcgagtgccgtgcccaggc

SEQ ID NO: 4781 - RNA, 19 nt, synthetic construct
  source 1..19: mol_type = other RNA
tcgagtgccgtgcccaggc

SEQ ID NO: 4782 - RNA, 19 nt, synthetic construct
  source 1..19: mol_type = other RNA
tcgagtgccgtgcccaggc

SEQ ID NO: 4783 - RNA, 19 nt, synthetic construct
  source 1..19: mol_type = other RNA
gctctacggccatgccctc

SEQ ID NO: 4784 - RNA, 19 nt, synthetic construct
  source 1..19: mol_type = other RNA
gacgaccactgcaggggac

SEQ ID NO: 4785 - RNA, 19 nt, synthetic construct
  source 1..19: mol_type = other RNA
taagaccgaccgagccggc

SEQ ID NO: 4786 - RNA, 19 nt, synthetic construct
  source 1..19: mol_type = other RNA
ccgaaaagaccaccctatg

SEQ ID NO: 4787 - RNA, 19 nt, synthetic construct
  source 1..19: mol_type = other RNA
gagcatccggtcgacggcg

SEQ ID NO: 4788 - RNA, 19 nt, synthetic construct
  source 1..19: mol_type = other RNA
ctggcctttgcaactacgt

SEQ ID NO: 4789 - RNA, 19 nt, synthetic construct
  source 1..19: mol_type = other RNA
tgcgggcctatgtgtccct

SEQ ID NO: 4790 - RNA, 19 nt, synthetic construct
  source 1..19: mol_type = other RNA
ggcggagactttgagacgt

SEQ ID NO: 4791 - RNA, 19 nt, synthetic construct
  source 1..19: mol_type = other RNA
gtgtggggacttcaacggc

SEQ ID NO: 4792 - RNA, 19 nt, synthetic construct
  source 1..19: mol_type = other RNA
agtgcccctgctacgctca

SEQ ID NO: 4793 - RNA, 19 nt, synthetic construct
  source 1..19: mol_type = other RNA
gctgcgagtacatcttggc

SEQ ID NO: 4794 - RNA, 19 nt, synthetic construct
  source 1..19: mol_type = other RNA
agggccaccaattccacgg

SEQ ID NO: 4795 - RNA, 19 nt, synthetic construct
  source 1..19: mol_type = other RNA
agaccgaccgagccggctg

SEQ ID NO: 4796 - RNA, 19 nt, synthetic construct
  source 1..19: mol_type = other RNA
cacctatgatgagaaactc

SEQ ID NO: 4797 - RNA, 19 nt, synthetic construct
  source 1..19: mol_type = other RNA
cgcctgaccgatcccaaca

SEQ ID NO: 4798 - RNA, 19 nt, synthetic construct
  source 1..19: mol_type = other RNA
acggccactacgatcacag

SEQ ID NO: 4799 - RNA, 19 nt, synthetic construct
  source 1..19: mol_type = other RNA
ccgagccggctgccatttc

SEQ ID NO: 4800 - RNA, 19 nt, synthetic construct
  source 1..19: mol_type = other RNA
agaccgaggtcaacatcac

SEQ ID NO: 4801 - RNA, 19 nt, synthetic construct
  source 1..19: mol_type = other RNA
acgacctgcatggtgactg

SEQ ID NO: 4802 - RNA, 19 nt, synthetic construct
  source 1..19: mol_type = other RNA
ccgcttccaaagagccgct

SEQ ID NO: 4803 - RNA, 19 nt, synthetic construct
  source 1..19: mol_type = other RNA
ctcgtccaccgtggggacc

SEQ ID NO: 4804 - RNA, 19 nt, synthetic construct
  source 1..19: mol_type = other RNA
cagcgaccactgcaggggc

SEQ ID NO: 4805 - RNA, 19 nt, synthetic construct
  source 1..19: mol_type = other RNA
tgaggtcgcaacggccagg

SEQ ID NO: 4806 - RNA, 19 nt, synthetic construct
  source 1..19: mol_type = other RNA
cgacgcgtgtgcctgcgac

SEQ ID NO: 4807 - RNA, 19 nt, synthetic construct
  source 1..19: mol_type = other RNA
cacgctttgggaatctcag

SEQ ID NO: 4808 - RNA, 19 nt, synthetic construct
  source 1..19: mol_type = other RNA
gtacaagccatgcggcccc

SEQ ID NO: 4809 - RNA, 19 nt, synthetic construct
  source 1..19: mol_type = other RNA
ccgaggtcaacatcacctt

SEQ ID NO: 4810 - RNA, 19 nt, synthetic construct
  source 1..19: mol_type = other RNA
tcctaacggctcagccatc

SEQ ID NO: 4811 - RNA, 19 nt, synthetic construct
  source 1..19: mol_type = other RNA
aacggctcagccatcctgc

SEQ ID NO: 4812 - RNA, 19 nt, synthetic construct
  source 1..19: mol_type = other RNA
ccgcctacgaggacttcaa

SEQ ID NO: 4813 - RNA, 19 nt, synthetic construct
  source 1..19: mol_type = other RNA
cgccgcctacgaggacttc

SEQ ID NO: 4814 - RNA, 19 nt, synthetic construct
  source 1..19: mol_type = other RNA
gtgcgggaacttcgacgac

SEQ ID NO: 4815 - RNA, 19 nt, synthetic construct
  source 1..19: mol_type = other RNA
gcgactgcgagtgtttctg

SEQ ID NO: 4816 - RNA, 19 nt, synthetic construct
  source 1..19: mol_type = other RNA
actggcgaggtgcaaccgg

SEQ ID NO: 4817 - RNA, 19 nt, synthetic construct
  source 1..19: mol_type = other RNA
cctgtgccgccaagggcgt

SEQ ID NO: 4818 - RNA, 19 nt, synthetic construct
  source 1..19: mol_type = other RNA
tgccgccaagggcgtacag

SEQ ID NO: 4819 - RNA, 19 nt, synthetic construct
  source 1..19: mol_type = other RNA
ttgatcgccatctgcggaa

SEQ ID NO: 4820 - RNA, 19 nt, synthetic construct
  source 1..19: mol_type = other RNA
tggaactccagccacaacg

SEQ ID NO: 4821 - RNA, 19 nt, synthetic construct
  source 1..19: mol_type = other RNA
ccgtgatggtgcccaccgg

SEQ ID NO: 4822 - RNA, 19 nt, synthetic construct
  source 1..19: mol_type = other RNA
ccggctgccatttctacgc

SEQ ID NO: 4823 - RNA, 19 nt, synthetic construct
  source 1..19: mol_type = other RNA
gagcctggaggcttacgca

SEQ ID NO: 4824 - RNA, 19 nt, synthetic construct
  source 1..19: mol_type = other RNA
ctgatgtcactgggacgcc

SEQ ID NO: 4825 - RNA, 19 nt, synthetic construct
  source 1..19: mol_type = other RNA
ctgtgtgtggcaccccgcg

SEQ ID NO: 4826 - RNA, 19 nt, synthetic construct
  source 1..19: mol_type = other RNA
tgatggtgcccaccggttc

SEQ ID NO: 4827 - RNA, 19 nt, synthetic construct
  source 1..19: mol_type = other RNA
cagcactgtgacattgacc

SEQ ID NO: 4828 - RNA, 19 nt, synthetic construct
  source 1..19: mol_type = other RNA
tgcttgatcgccatctgcg

SEQ ID NO: 4829 - RNA, 19 nt, synthetic construct
  source 1..19: mol_type = other RNA
ggctgccatttctacgcag

SEQ ID NO: 4830 - RNA, 19 nt, synthetic construct
  source 1..19: mol_type = other RNA
ccactgccgccagttgcaa

SEQ ID NO: 4831 - RNA, 19 nt, synthetic construct
  source 1..19: mol_type = other RNA
ggtgccccgacgtcctcgc

SEQ ID NO: 4832 - RNA, 19 nt, synthetic construct
  source 1..19: mol_type = other RNA
cacctacagcccgggcacc

SEQ ID NO: 4833 - RNA, 19 nt, synthetic construct
  source 1..19: mol_type = other RNA
cctgatgtcactgggacgc

SEQ ID NO: 4834 - RNA, 19 nt, synthetic construct
  source 1..19: mol_type = other RNA
acaaccacgggcttcacag

SEQ ID NO: 4835 - RNA, 19 nt, synthetic construct
  source 1..19: mol_type = other RNA
acaaccacgggcttcacag

SEQ ID NO: 4836 - RNA, 19 nt, synthetic construct
  source 1..19: mol_type = other RNA
acaaccacgggcttcacag

SEQ ID NO: 4837 - RNA, 19 nt, synthetic construct
  source 1..19: mol_type = other RNA
acaaccacgggcttcacag

SEQ ID NO: 4838 - RNA, 19 nt, synthetic construct
  source 1..19: mol_type = other RNA
tacaggatccgggtcctct

SEQ ID NO: 4839 - RNA, 19 nt, synthetic construct
  source 1..19: mol_type = other RNA
gaacccggcgcacaatggg

SEQ ID NO: 4840 - RNA, 19 nt, synthetic construct
  source 1..19: mol_type = other RNA
gtacatcttggcccaggac

SEQ ID NO: 4841 - RNA, 19 nt, synthetic construct
  source 1..19: mol_type = other RNA
agctctacggccatgccct

SEQ ID NO: 4842 - RNA, 19 nt, synthetic construct
  source 1..19: mol_type = other RNA
agctctacggccatgccct

SEQ ID NO: 4843 - RNA, 19 nt, synthetic construct
  source 1..19: mol_type = other RNA
gtttttctcgcccggggaa

SEQ ID NO: 4844 - RNA, 19 nt, synthetic construct
  source 1..19: mol_type = other RNA
ccccatacagcctgccacc

SEQ ID NO: 4845 - RNA, 19 nt, synthetic construct
  source 1..19: mol_type = other RNA
ccagctacgccgaggccta

SEQ ID NO: 4846 - RNA, 19 nt, synthetic construct
  source 1..19: mol_type = other RNA
ccctgaacccggcgcacaa

SEQ ID NO: 4847 - RNA, 19 nt, synthetic construct
  source 1..19: mol_type = other RNA
gaccaccatggccactatg

SEQ ID NO: 4848 - RNA, 19 nt, synthetic construct
  source 1..19: mol_type = other RNA
acgagaactgcctgaaagc

SEQ ID NO: 4849 - RNA, 19 nt, synthetic construct
  source 1..19: mol_type = other RNA
tcccaaatacgccaaccag

SEQ ID NO: 4850 - RNA, 19 nt, synthetic construct
  source 1..19: mol_type = other RNA
cgactcgggtggcgactgc

SEQ ID NO: 4851 - RNA, 19 nt, synthetic construct
  source 1..19: mol_type = other RNA
ggaactccagccacaacgc

SEQ ID NO: 4852 - RNA, 19 nt, synthetic construct
  source 1..19: mol_type = other RNA
acccaacggtgcaatgtca

SEQ ID NO: 4853 - RNA, 19 nt, synthetic construct
  source 1..19: mol_type = other RNA
gcctgcctcacgcccgatg

SEQ ID NO: 4854 - RNA, 19 nt, synthetic construct
  source 1..19: mol_type = other RNA
caccaccgatgggcttggc

SEQ ID NO: 4855 - RNA, 19 nt, synthetic construct
  source 1..19: mol_type = other RNA
caacgccgcagcctacgag

SEQ ID NO: 4856 - RNA, 19 nt, synthetic construct
  source 1..19: mol_type = other RNA
catggccaccacacacggg

SEQ ID NO: 4857 - RNA, 19 nt, synthetic construct
  source 1..19: mol_type = other RNA
ggtcatcgagacccacggg

SEQ ID NO: 4858 - RNA, 19 nt, synthetic construct
  source 1..19: mol_type = other RNA
gcctatgtgtccctgccac

SEQ ID NO: 4859 - RNA, 19 nt, synthetic construct
  source 1..19: mol_type = other RNA
ctcaacgccgcagcctacg

SEQ ID NO: 4860 - RNA, 19 nt, synthetic construct
  source 1..19: mol_type = other RNA
aacggtgcaatgtcaggag

SEQ ID NO: 4861 - RNA, 19 nt, synthetic construct
  source 1..19: mol_type = other RNA
gccgccaagggcgtacagc

SEQ ID NO: 4862 - RNA, 19 nt, synthetic construct
  source 1..19: mol_type = other RNA
ataagatcagggccgctgg

SEQ ID NO: 4863 - RNA, 19 nt, synthetic construct
  source 1..19: mol_type = other RNA
cagtgcttaccaccacgac

SEQ ID NO: 4864 - RNA, 19 nt, synthetic construct
  source 1..19: mol_type = other RNA
cttctacggggttggtgca

SEQ ID NO: 4865 - RNA, 19 nt, synthetic construct
  source 1..19: mol_type = other RNA
acgcgtgtgcctgcgactc

SEQ ID NO: 4866 - RNA, 19 nt, synthetic construct
  source 1..19: mol_type = other RNA
ctgaacccggcgcacaatg

SEQ ID NO: 4867 - RNA, 19 nt, synthetic construct
  source 1..19: mol_type = other RNA
acgtccagctacgccgagg

SEQ ID NO: 4868 - RNA, 19 nt, synthetic construct
  source 1..19: mol_type = other RNA
gcttgatcgccatctgcgg

SEQ ID NO: 4869 - RNA, 19 nt, synthetic construct
  source 1..19: mol_type = other RNA
tgcgggttctctgctgcga

SEQ ID NO: 4870 - RNA, 19 nt, synthetic construct
  source 1..19: mol_type = other RNA
aaatttcccggggagcggt

SEQ ID NO: 4871 - RNA, 19 nt, synthetic construct
  source 1..19: mol_type = other RNA
tgtgtggcaccccgcgctc

SEQ ID NO: 4872 - RNA, 19 nt, synthetic construct
  source 1..19: mol_type = other RNA
gtgttggctctggcggcca

SEQ ID NO: 4873 - RNA, 19 nt, synthetic construct
  source 1..19: mol_type = other RNA
tctggcggccatgctcgtg

SEQ ID NO: 4874 - RNA, 19 nt, synthetic construct
  source 1..19: mol_type = other RNA
gtgccgcaggcagagaccc

SEQ ID NO: 4875 - RNA, 19 nt, synthetic construct
  source 1..19: mol_type = other RNA
gttctctgagcactgccgc

SEQ ID NO: 4876 - RNA, 19 nt, synthetic construct
  source 1..19: mol_type = other RNA
cattcctgtggaacggaga

SEQ ID NO: 4877 - RNA, 19 nt, synthetic construct
  source 1..19: mol_type = other RNA
atcccaaatacgccaacca

SEQ ID NO: 4878 - RNA, 19 nt, synthetic construct
  source 1..19: mol_type = other RNA
tctatgcccacaacgccag

SEQ ID NO: 4879 - RNA, 19 nt, synthetic construct
  source 1..19: mol_type = other RNA
tgccccctcaacatgcagc

SEQ ID NO: 4880 - RNA, 19 nt, synthetic construct
  source 1..19: mol_type = other RNA
tgtgccgacagcagcttca

SEQ ID NO: 4881 - RNA, 19 nt, synthetic construct
  source 1..19: mol_type = other RNA
ctcgagcttcttcatcgtg

SEQ ID NO: 4882 - RNA, 19 nt, synthetic construct
  source 1..19: mol_type = other RNA
aatgccaggaacagctttg

SEQ ID NO: 4883 - RNA, 19 nt, synthetic construct
  source 1..19: mol_type = other RNA
gcgctgccactccatcatc

SEQ ID NO: 4884 - RNA, 19 nt, synthetic construct
  source 1..19: mol_type = other RNA
ctgtgccgccaagggcgta

SEQ ID NO: 4885 - RNA, 19 nt, synthetic construct
  source 1..19: mol_type = other RNA
tactgtggggacaacacca

SEQ ID NO: 4886 - RNA, 19 nt, synthetic construct
  source 1..19: mol_type = other RNA
gggtggggacccaccctac

SEQ ID NO: 4887 - RNA, 19 nt, synthetic construct
  source 1..19: mol_type = other RNA
ggtggggacccaccctaca

SEQ ID NO: 4888 - RNA, 19 nt, synthetic construct
  source 1..19: mol_type = other RNA
aactccagccacaacgcca

SEQ ID NO: 4889 - RNA, 19 nt, synthetic construct
  source 1..19: mol_type = other RNA
gcagcttcccgacatgccg

SEQ ID NO: 4890 - RNA, 19 nt, synthetic construct
  source 1..19: mol_type = other RNA
ccccgtgacggtcaccccc

SEQ ID NO: 4891 - RNA, 19 nt, synthetic construct
  source 1..19: mol_type = other RNA
cctcggccccaggtaccac

SEQ ID NO: 4892 - RNA, 19 nt, synthetic construct
  source 1..19: mol_type = other RNA
cgtcttcaagatgtgctac

SEQ ID NO: 4893 - RNA, 19 nt, synthetic construct
  source 1..19: mol_type = other RNA
gagtagcccggggctgacc

SEQ ID NO: 4894 - RNA, 19 nt, synthetic construct
  source 1..19: mol_type = other RNA
cagaaggactgacatcccc

SEQ ID NO: 4895 - RNA, 19 nt, synthetic construct
  source 1..19: mol_type = other RNA
tacacaagcacccttggta

SEQ ID NO: 4896 - RNA, 19 nt, synthetic construct
  source 1..19: mol_type = other RNA
cacatccacccttccaaca

SEQ ID NO: 4897 - RNA, 19 nt, synthetic construct
  source 1..19: mol_type = other RNA
gagcttgggcacatggcgc

SEQ ID NO: 4898 - RNA, 19 nt, synthetic construct
  source 1..19: mol_type = other RNA
gcttgggcacatggcgccc

SEQ ID NO: 4899 - RNA, 19 nt, synthetic construct
  source 1..19: mol_type = other RNA
ggccccaacaacaatggca

SEQ ID NO: 4900 - RNA, 19 nt, synthetic construct
  source 1..19: mol_type = other RNA
gtccacctctcaggccgag

SEQ ID NO: 4901 - RNA, 19 nt, synthetic construct
  source 1..19: mol_type = other RNA
cacaaccacgggcttcaca

SEQ ID NO: 4902 - RNA, 19 nt, synthetic construct
  source 1..19: mol_type = other RNA
agtgtggatcagcacaacc

SEQ ID NO: 4903 - RNA, 19 nt, synthetic construct
  source 1..19: mol_type = other RNA
tggccactggttctatggc

SEQ ID NO: 4904 - RNA, 19 nt, synthetic construct
  source 1..19: mol_type = other RNA
ggccactggttctatggca

SEQ ID NO: 4905 - RNA, 19 nt, synthetic construct
  source 1..19: mol_type = other RNA
actcctgggacaactccca

SEQ ID NO: 4906 - RNA, 19 nt, synthetic construct
  source 1..19: mol_type = other RNA
cagtgctgaccaccaccgc

SEQ ID NO: 4907 - RNA, 19 nt, synthetic construct
  source 1..19: mol_type = other RNA
gtgcgcacagcctggactt

SEQ ID NO: 4908 - RNA, 19 nt, synthetic construct
  source 1..19: mol_type = other RNA
ccctagcagcagaaccacc

SEQ ID NO: 4909 - RNA, 19 nt, synthetic construct
  source 1..19: mol_type = other RNA
gccctctggcggggacttt

SEQ ID NO: 4910 - RNA, 19 nt, synthetic construct
  source 1..19: mol_type = other RNA
tgacacctactccaacatc

SEQ ID NO: 4911 - RNA, 19 nt, synthetic construct
  source 1..19: mol_type = other RNA
gctttacagccatcccctc

SEQ ID NO: 4912 - RNA, 19 nt, synthetic construct
  source 1..19: mol_type = other RNA
cacaaccacgggcttcaca

SEQ ID NO: 4913 - RNA, 19 nt, synthetic construct
  source 1..19: mol_type = other RNA
acgcttccagtgtggatca

SEQ ID NO: 4914 - RNA, 19 nt, synthetic construct
  source 1..19: mol_type = other RNA
agtgtggatcagcacaacc

SEQ ID NO: 4915 - RNA, 19 nt, synthetic construct
  source 1..19: mol_type = other RNA
tggccactggttctatggc

SEQ ID NO: 4916 - RNA, 19 nt, synthetic construct
  source 1..19: mol_type = other RNA
ggccactggttctatggca

SEQ ID NO: 4917 - RNA, 19 nt, synthetic construct
  source 1..19: mol_type = other RNA
cagtgctgaccaccaccgc

SEQ ID NO: 4918 - RNA, 19 nt, synthetic construct
  source 1..19: mol_type = other RNA
gtgcgcacagcctggactt

SEQ ID NO: 4919 - RNA, 19 nt, synthetic construct
  source 1..19: mol_type = other RNA
gagccttccacggggactt

SEQ ID NO: 4920 - RNA, 19 nt, synthetic construct
  source 1..19: mol_type = other RNA
ctagcagcaggaccaccga

SEQ ID NO: 4921 - RNA, 19 nt, synthetic construct
  source 1..19: mol_type = other RNA
gccctctggcggggacttt

SEQ ID NO: 4922 - RNA, 19 nt, synthetic construct
  source 1..19: mol_type = other RNA
tgacacctactccaacatc

SEQ ID NO: 4923 - RNA, 19 nt, synthetic construct
  source 1..19: mol_type = other RNA
acccttgggaccaccggga

SEQ ID NO: 4924 - RNA, 19 nt, synthetic construct
  source 1..19: mol_type = other RNA
cacgacaagggccaccagt

SEQ ID NO: 4925 - RNA, 19 nt, synthetic construct
  source 1..19: mol_type = other RNA
gggcaccgcctggacccgc

SEQ ID NO: 4926 - RNA, 19 nt, synthetic construct
  source 1..19: mol_type = other RNA
cacaaccacgggcttcaca

SEQ ID NO: 4927 - RNA, 19 nt, synthetic construct
  source 1..19: mol_type = other RNA
agtgtggatcagcacaacc

SEQ ID NO: 4928 - RNA, 19 nt, synthetic construct
  source 1..19: mol_type = other RNA
tggccactggttctatggc

SEQ ID NO: 4929 - RNA, 19 nt, synthetic construct
  source 1..19: mol_type = other RNA
ggccactggttctatggca

SEQ ID NO: 4930 - RNA, 19 nt, synthetic construct
  source 1..19: mol_type = other RNA
ctcaactccagggacaact

SEQ ID NO: 4931 - RNA, 19 nt, synthetic construct
  source 1..19: mol_type = other RNA
cagtgctgaccaccaccgc

SEQ ID NO: 4932 - RNA, 19 nt, synthetic construct
  source 1..19: mol_type = other RNA
gtgcgcacagcctggactt

SEQ ID NO: 4933 - RNA, 19 nt, synthetic construct
  source 1..19: mol_type = other RNA
ctagcagcaggaccaccga

SEQ ID NO: 4934 - RNA, 19 nt, synthetic construct
  source 1..19: mol_type = other RNA
gccctctggcggggacttt

SEQ ID NO: 4935 - RNA, 19 nt, synthetic construct
  source 1..19: mol_type = other RNA
tgacacctactccaacatc

SEQ ID NO: 4936 - RNA, 19 nt, synthetic construct
  source 1..19: mol_type = other RNA
gctttacagccatcccctc

SEQ ID NO: 4937 - RNA, 19 nt, synthetic construct
  source 1..19: mol_type = other RNA
cacaaccacgggcttcaca

SEQ ID NO: 4938 - RNA, 19 nt, synthetic construct
  source 1..19: mol_type = other RNA
agtgtggatcagcacaacc

SEQ ID NO: 4939 - RNA, 19 nt, synthetic construct
  source 1..19: mol_type = other RNA
tggccactggttctatggc

SEQ ID NO: 4940 - RNA, 19 nt, synthetic construct
  source 1..19: mol_type = other RNA
ggccactggttctatggca

SEQ ID NO: 4941 - RNA, 19 nt, synthetic construct
  source 1..19: mol_type = other RNA
cagtgctgaccaccaccgc

SEQ ID NO: 4942 - RNA, 19 nt, synthetic construct
  source 1..19: mol_type = other RNA
gtgcgcacagcctggactt

SEQ ID NO: 4943 - RNA, 19 nt, synthetic construct
  source 1..19: mol_type = other RNA
gagccttccacggggactt

SEQ ID NO: 4944 - RNA, 19 nt, synthetic construct
  source 1..19: mol_type = other RNA
ctagcagcaggaccaccga

SEQ ID NO: 4945 - RNA, 19 nt, synthetic construct
  source 1..19: mol_type = other RNA
gccctctggcggggacttt

SEQ ID NO: 4946 - RNA, 19 nt, synthetic construct
  source 1..19: mol_type = other RNA
tgacacctactccaacatc

SEQ ID NO: 4947 - RNA, 19 nt, synthetic construct
  source 1..19: mol_type = other RNA
acccttgggaccaccggga

SEQ ID NO: 4948 - RNA, 19 nt, synthetic construct
  source 1..19: mol_type = other RNA
cacgacaagggccaccagt

SEQ ID NO: 4949 - RNA, 19 nt, synthetic construct
  source 1..19: mol_type = other RNA
gctttacagccatcccctc

SEQ ID NO: 4950 - RNA, 19 nt, synthetic construct
  source 1..19: mol_type = other RNA
cacaaccacgggcttcaca

SEQ ID NO: 4951 - RNA, 19 nt, synthetic construct
  source 1..19: mol_type = other RNA
agtgtggatcagcacaacc

SEQ ID NO: 4952 - RNA, 19 nt, synthetic construct
  source 1..19: mol_type = other RNA
tggccactggttctatggc

SEQ ID NO: 4953 - RNA, 19 nt, synthetic construct
  source 1..19: mol_type = other RNA
ggccactggttctatggca

SEQ ID NO: 4954 - RNA, 19 nt, synthetic construct
  source 1..19: mol_type = other RNA
acaaaatccacagctacca

SEQ ID NO: 4955 - RNA, 19 nt, synthetic construct
  source 1..19: mol_type = other RNA
tgtccacaatccacacctc

SEQ ID NO: 4956 - RNA, 19 nt, synthetic construct
  source 1..19: mol_type = other RNA
gtccacaatccacacctcc

SEQ ID NO: 4957 - RNA, 19 nt, synthetic construct
  source 1..19: mol_type = other RNA
ctccactctggggacgacc

SEQ ID NO: 4958 - RNA, 19 nt, synthetic construct
  source 1..19: mol_type = other RNA
ggaacagctcacaccccca

SEQ ID NO: 4959 - RNA, 19 nt, synthetic construct
  source 1..19: mol_type = other RNA
tgcagggcatttggacagt

SEQ ID NO: 4960 - RNA, 19 nt, synthetic construct
  source 1..19: mol_type = other RNA
ccggggaagtcatctacaa

SEQ ID NO: 4961 - RNA, 19 nt, synthetic construct
  source 1..19: mol_type = other RNA
cggctgccatttctacgca

SEQ ID NO: 4962 - RNA, 19 nt, synthetic construct
  source 1..19: mol_type = other RNA
tgtcgtcctgctggaccca

SEQ ID NO: 4963 - RNA, 19 nt, synthetic construct
  source 1..19: mol_type = other RNA
aaagcctgtggccaacgtc

SEQ ID NO: 4964 - RNA, 19 nt, synthetic construct
  source 1..19: mol_type = other RNA
ctcatgagagagatccatg

SEQ ID NO: 4965 - RNA, 19 nt, synthetic construct
  source 1..19: mol_type = other RNA
atgagagagatccatgcac

SEQ ID NO: 4966 - RNA, 19 nt, synthetic construct
  source 1..19: mol_type = other RNA
gaggagggcctgatcctgt

SEQ ID NO: 4967 - RNA, 19 nt, synthetic construct
  source 1..19: mol_type = other RNA
aggagggcctgatcctgtt

SEQ ID NO: 4968 - RNA, 19 nt, synthetic construct
  source 1..19: mol_type = other RNA
ggggaccaccaccatgcgt

SEQ ID NO: 4969 - RNA, 19 nt, synthetic construct
  source 1..19: mol_type = other RNA
cgcagccccggtgtctagc

SEQ ID NO: 4970 - RNA, 19 nt, synthetic construct
  source 1..19: mol_type = other RNA
gcccattcttcaacgcctg

SEQ ID NO: 4971 - RNA, 19 nt, synthetic construct
  source 1..19: mol_type = other RNA
acgcacacatgggcatctg

SEQ ID NO: 4972 - RNA, 19 nt, synthetic construct
  source 1..19: mol_type = other RNA
cggggttggtgcaaccttc

SEQ ID NO: 4973 - RNA, 19 nt, synthetic construct
  source 1..19: mol_type = other RNA
cctcacgcccgatggccag

SEQ ID NO: 4974 - RNA, 19 nt, synthetic construct
  source 1..19: mol_type = other RNA
caccacgacaagggccacc

SEQ ID NO: 4975 - RNA, 19 nt, synthetic construct
  source 1..19: mol_type = other RNA
caccacgacaagggccacc

SEQ ID NO: 4976 - RNA, 19 nt, synthetic construct
  source 1..19: mol_type = other RNA
gtgacgtccacttcggcct

SEQ ID NO: 4977 - RNA, 19 nt, synthetic construct
  source 1..19: mol_type = other RNA
tgcgtgtggacattcctgc

SEQ ID NO: 4978 - RNA, 19 nt, synthetic construct
  source 1..19: mol_type = other RNA
ccgactggcacacccccca

SEQ ID NO: 4979 - RNA, 19 nt, synthetic construct
  source 1..19: mol_type = other RNA
ggccctgtggagccgagct

SEQ ID NO: 4980 - RNA, 19 nt, synthetic construct
  source 1..19: mol_type = other RNA
acccggcgcacaatgggcg

SEQ ID NO: 4981 - RNA, 19 nt, synthetic construct
  source 1..19: mol_type = other RNA
tgatcctccaagaggggac

SEQ ID NO: 4982 - RNA, 19 nt, synthetic construct
  source 1..19: mol_type = other RNA
tggggacccaccctacaag

SEQ ID NO: 4983 - RNA, 19 nt, synthetic construct
  source 1..19: mol_type = other RNA
caacagagtcccccgctct

SEQ ID NO: 4984 - RNA, 19 nt, synthetic construct
  source 1..19: mol_type = other RNA
cgtgccacaaccccgccac

SEQ ID NO: 4985 - RNA, 19 nt, synthetic construct
  source 1..19: mol_type = other RNA
agaaggactgacatccccc

SEQ ID NO: 4986 - RNA, 19 nt, synthetic construct
  source 1..19: mol_type = other RNA
cacagcctggacttcggcc

SEQ ID NO: 4987 - RNA, 19 nt, synthetic construct
  source 1..19: mol_type = other RNA
tggtctgcaggaaccgtga

SEQ ID NO: 4988 - RNA, 19 nt, synthetic construct
  source 1..19: mol_type = other RNA
cacagcctggacttcggcc

SEQ ID NO: 4989 - RNA, 19 nt, synthetic construct
  source 1..19: mol_type = other RNA
agccttccacggggacttc

SEQ ID NO: 4990 - RNA, 19 nt, synthetic construct
  source 1..19: mol_type = other RNA
tggtctgcaggaaccgtga

SEQ ID NO: 4991 - RNA, 19 nt, synthetic construct
  source 1..19: mol_type = other RNA
cacagcctggacttcggcc

SEQ ID NO: 4992 - RNA, 19 nt, synthetic construct
  source 1..19: mol_type = other RNA
tggtctgcaggaaccgtga

SEQ ID NO: 4993 - RNA, 19 nt, synthetic construct
  source 1..19: mol_type = other RNA
cacagcctggacttcggcc

SEQ ID NO: 4994 - RNA, 19 nt, synthetic construct
  source 1..19: mol_type = other RNA
agccttccacggggacttc

SEQ ID NO: 4995 - RNA, 19 nt, synthetic construct
  source 1..19: mol_type = other RNA
tggtctgcaggaaccgtga

SEQ ID NO: 4996 - RNA, 19 nt, synthetic construct
  source 1..19: mol_type = other RNA
ggggttggtgcaaccttcc

SEQ ID NO: 4997 - RNA, 19 nt, synthetic construct
  source 1..19: mol_type = other RNA
gaatgaaacctgggtcaac

SEQ ID NO: 4998 - RNA, 19 nt, synthetic construct
  source 1..19: mol_type = other RNA
aactcagggctgaggtcgc

SEQ ID NO: 4999 - RNA, 19 nt, synthetic construct
  source 1..19: mol_type = other RNA
aaataaaccctgagcattg

SEQ ID NO: 5000 - RNA, 19 nt, synthetic construct
  source 1..19: mol_type = other RNA
cacggtgacttcccacacc

SEQ ID NO: 5001 - RNA, 19 nt, synthetic construct
  source 1..19: mol_type = other RNA
ggaagtgcggcctgacgga

SEQ ID NO: 5002 - RNA, 19 nt, synthetic construct
  source 1..19: mol_type = other RNA
gtcacctgcagcgtttcct

SEQ ID NO: 5003 - RNA, 19 nt, synthetic construct
  source 1..19: mol_type = other RNA
ggggctggtgtcggatggg

SEQ ID NO: 5004 - RNA, 19 nt, synthetic construct
  source 1..19: mol_type = other RNA
gccacctacaagcctggag

SEQ ID NO: 5005 - RNA, 19 nt, synthetic construct
  source 1..19: mol_type = other RNA
acgagctgcgggttctctg

SEQ ID NO: 5006 - RNA, 19 nt, synthetic construct
  source 1..19: mol_type = other RNA
ctaccccatgccggggccc

SEQ ID NO: 5007 - RNA, 19 nt, synthetic construct
  source 1..19: mol_type = other RNA
ctaccccatgccggggccc

SEQ ID NO: 5008 - RNA, 19 nt, synthetic construct
  source 1..19: mol_type = other RNA
ctaccccatgccggggccc

SEQ ID NO: 5009 - RNA, 19 nt, synthetic construct
  source 1..19: mol_type = other RNA
ctaccccatgccggggccc

SEQ ID NO: 5010 - RNA, 19 nt, synthetic construct
  source 1..19: mol_type = other RNA
accgccagagtgctgacca

SEQ ID NO: 5011 - RNA, 19 nt, synthetic construct
  source 1..19: mol_type = other RNA
cccgactggcacacccccc

SEQ ID NO: 5012 - RNA, 19 nt, synthetic construct
  source 1..19: mol_type = other RNA
cccattcttcaacgcctgc

SEQ ID NO: 5013 - RNA, 19 nt, synthetic construct
  source 1..19: mol_type = other RNA
agcctggaggcttacgcag

SEQ ID NO: 5014 - RNA, 19 nt, synthetic construct
  source 1..19: mol_type = other RNA
ggtgggtcagcaactgcca

SEQ ID NO: 5015 - RNA, 19 nt, synthetic construct
  source 1..19: mol_type = other RNA
cttccctgccacatgtgta

SEQ ID NO: 5016 - RNA, 19 nt, synthetic construct
  source 1..19: mol_type = other RNA
cagggctgcgagaccgagg

SEQ ID NO: 5017 - RNA, 19 nt, synthetic construct
  source 1..19: mol_type = other RNA
cacgacgagggcgccgtgt

SEQ ID NO: 5018 - RNA, 19 nt, synthetic construct
  source 1..19: mol_type = other RNA
gctccggggggctatggca

SEQ ID NO: 5019 - RNA, 19 nt, synthetic construct
  source 1..19: mol_type = other RNA
aggtggtgcacgacgaggg

SEQ ID NO: 5020 - RNA, 19 nt, synthetic construct
  source 1..19: mol_type = other RNA
gtgttcatgtacgggtggg

SEQ ID NO: 5021 - RNA, 19 nt, synthetic construct
  source 1..19: mol_type = other RNA
cgagcatccggtcgacggc

SEQ ID NO: 5022 - RNA, 19 nt, synthetic construct
  source 1..19: mol_type = other RNA
agctcacactaccaaagtg

SEQ ID NO: 5023 - RNA, 19 nt, synthetic construct
  source 1..19: mol_type = other RNA
gactacagctaccccatgc

SEQ ID NO: 5024 - RNA, 19 nt, synthetic construct
  source 1..19: mol_type = other RNA
agctcacactaccaaagtg

SEQ ID NO: 5025 - RNA, 19 nt, synthetic construct
  source 1..19: mol_type = other RNA
gactacagctaccccatgc

SEQ ID NO: 5026 - RNA, 19 nt, synthetic construct
  source 1..19: mol_type = other RNA
agctcacactaccaaagtg

SEQ ID NO: 5027 - RNA, 19 nt, synthetic construct
  source 1..19: mol_type = other RNA
gactacagctaccccatgc

SEQ ID NO: 5028 - RNA, 19 nt, synthetic construct
  source 1..19: mol_type = other RNA
agctcacactaccaaagtg

SEQ ID NO: 5029 - RNA, 19 nt, synthetic construct
  source 1..19: mol_type = other RNA
gactacagctaccccatgc

SEQ ID NO: 5030 - RNA, 19 nt, synthetic construct
  source 1..19: mol_type = other RNA
agctcacactaccaaagtg

SEQ ID NO: 5031 - RNA, 19 nt, synthetic construct
  source 1..19: mol_type = other RNA
gaccacgtggaccgtccca

SEQ ID NO: 5032 - RNA, 19 nt, synthetic construct
  source 1..19: mol_type = other RNA
catgctcgtggtgccgcag

SEQ ID NO: 5033 - RNA, 19 nt, synthetic construct
  source 1..19: mol_type = other RNA
gggcacaccatggatggcg

SEQ ID NO: 5034 - RNA, 19 nt, synthetic construct
  source 1..19: mol_type = other RNA
aagaaatgtgccgacagca

SEQ ID NO: 5035 - RNA, 19 nt, synthetic construct
  source 1..19: mol_type = other RNA
ctgccagcccacttgccgc

SEQ ID NO: 5036 - RNA, 19 nt, synthetic construct
  source 1..19: mol_type = other RNA
agcgtttccttcgtgcctg

SEQ ID NO: 5037 - RNA, 19 nt, synthetic construct
  source 1..19: mol_type = other RNA
cctgtgtgcccgcccagga

SEQ ID NO: 5038 - RNA, 19 nt, synthetic construct
  source 1..19: mol_type = other RNA
ccaggagtgcccctgctac

SEQ ID NO: 5039 - RNA, 19 nt, synthetic construct
  source 1..19: mol_type = other RNA
ctccagccacaacgccatt

SEQ ID NO: 5040 - RNA, 19 nt, synthetic construct
  source 1..19: mol_type = other RNA
cagctcaggccccgtgacg

SEQ ID NO: 5041 - RNA, 19 nt, synthetic construct
  source 1..19: mol_type = other RNA
gacgtccacttcggcctgg

SEQ ID NO: 5042 - RNA, 19 nt, synthetic construct
  source 1..19: mol_type = other RNA
ctacaggatccgggtcctc

SEQ ID NO: 5043 - RNA, 19 nt, synthetic construct
  source 1..19: mol_type = other RNA
tgtccagccctcaccctag

SEQ ID NO: 5044 - RNA, 19 nt, synthetic construct
  source 1..19: mol_type = other RNA
ccacacctccacagtgctg

SEQ ID NO: 5045 - RNA, 19 nt, synthetic construct
  source 1..19: mol_type = other RNA
ctcaaagtgctgaccagca

SEQ ID NO: 5046 - RNA, 19 nt, synthetic construct
  source 1..19: mol_type = other RNA
cacacacgggcggtccctg

SEQ ID NO: 5047 - RNA, 19 nt, synthetic construct
  source 1..19: mol_type = other RNA
tgtccagccctcaccctag

SEQ ID NO: 5048 - RNA, 19 nt, synthetic construct
  source 1..19: mol_type = other RNA
tgtccagccctcaccctag

SEQ ID NO: 5049 - RNA, 19 nt, synthetic construct
  source 1..19: mol_type = other RNA
ccacacctccacagtgctg

SEQ ID NO: 5050 - RNA, 19 nt, synthetic construct
  source 1..19: mol_type = other RNA
ccacacctccacagtgctg

SEQ ID NO: 5051 - RNA, 19 nt, synthetic construct
  source 1..19: mol_type = other RNA
gccatttctacgcagtgtg

SEQ ID NO: 5052 - RNA, 19 nt, synthetic construct
  source 1..19: mol_type = other RNA
ccatggatatcgtcctcac

SEQ ID NO: 5053 - RNA, 19 nt, synthetic construct
  source 1..19: mol_type = other RNA
caccacagccgctctgtga

SEQ ID NO: 5054 - RNA, 19 nt, synthetic construct
  source 1..19: mol_type = other RNA
caaccttgtgcccccgggc

SEQ ID NO: 5055 - RNA, 19 nt, synthetic construct
  source 1..19: mol_type = other RNA
gcctggaggcttacgcaga

SEQ ID NO: 5056 - RNA, 19 nt, synthetic construct
  source 1..19: mol_type = other RNA
tggcctgtgcgacctcacc

SEQ ID NO: 5057 - RNA, 19 nt, synthetic construct
  source 1..19: mol_type = other RNA
ccgatgggtttcctaaatt

SEQ ID NO: 5058 - RNA, 19 nt, synthetic construct
  source 1..19: mol_type = other RNA
cgcctgcctcacgcccgat

SEQ ID NO: 5059 - RNA, 19 nt, synthetic construct
  source 1..19: mol_type = other RNA
cctgccccggagcgtccaa

SEQ ID NO: 5060 - RNA, 19 nt, synthetic construct
  source 1..19: mol_type = other RNA
acccacgtggatgagtgtg

SEQ ID NO: 5061 - RNA, 19 nt, synthetic construct
  source 1..19: mol_type = other RNA
atgaaaaccttgggcctcc

SEQ ID NO: 5062 - RNA, 19 nt, synthetic construct
  source 1..19: mol_type = other RNA
cagctggccacgtccggcc

SEQ ID NO: 5063 - RNA, 19 nt, synthetic construct
  source 1..19: mol_type = other RNA
cccgacctccaccctgaga

SEQ ID NO: 5064 - RNA, 19 nt, synthetic construct
  source 1..19: mol_type = other RNA
gagcgcgtgccggacgctg

SEQ ID NO: 5065 - RNA, 19 nt, synthetic construct
  source 1..19: mol_type = other RNA
gaagtgcggcctgacggac

SEQ ID NO: 5066 - RNA, 19 nt, synthetic construct
  source 1..19: mol_type = other RNA
ggggacccaccctacaaga

SEQ ID NO: 5067 - RNA, 19 nt, synthetic construct
  source 1..19: mol_type = other RNA
gtgacggtcaccccctcgg

SEQ ID NO: 5068 - RNA, 19 nt, synthetic construct
  source 1..19: mol_type = other RNA
cccacgacgcctgcaggct

SEQ ID NO: 5069 - RNA, 19 nt, synthetic construct
  source 1..19: mol_type = other RNA
agtgcttaccgccacggcc

SEQ ID NO: 5070 - RNA, 19 nt, synthetic construct
  source 1..19: mol_type = other RNA
agtgcttaccgccacggcc

SEQ ID NO: 5071 - RNA, 19 nt, synthetic construct
  source 1..19: mol_type = other RNA
acacctatccccccagtgc

SEQ ID NO: 5072 - RNA, 19 nt, synthetic construct
  source 1..19: mol_type = other RNA
acacctatccccccagtgc

SEQ ID NO: 5073 - RNA, 19 nt, synthetic construct
  source 1..19: mol_type = other RNA
gcgggacggaaccactgcc

SEQ ID NO: 5074 - RNA, 19 nt, synthetic construct
  source 1..19: mol_type = other RNA
gcgggttctctgctgcgaa

SEQ ID NO: 5075 - RNA, 19 nt, synthetic construct
  source 1..19: mol_type = other RNA
ccccacgacgcctgcaggc

SEQ ID NO: 5076 - RNA, 19 nt, synthetic construct
  source 1..19: mol_type = other RNA
gtcctcatgagagagatcc

SEQ ID NO: 5077 - RNA, 19 nt, synthetic construct
  source 1..19: mol_type = other RNA
ccgaggcctagtgggctcc

SEQ ID NO: 5078 - RNA, 19 nt, synthetic construct
  source 1..19: mol_type = other RNA
aaagcggtgacgctcagcc

SEQ ID NO: 5079 - RNA, 19 nt, synthetic construct
  source 1..19: mol_type = other RNA
caagggcgtacagctcagc

SEQ ID NO: 5080 - RNA, 19 nt, synthetic construct
  source 1..19: mol_type = other RNA
tgagacgtttgaaaacctg

SEQ ID NO: 5081 - RNA, 19 nt, synthetic construct
  source 1..19: mol_type = other RNA
tgacggtcaccccctcggc

SEQ ID NO: 5082 - RNA, 19 nt, synthetic construct
  source 1..19: mol_type = other RNA
gagggcgtcttcaagatgt

SEQ ID NO: 5083 - RNA, 19 nt, synthetic construct
  source 1..19: mol_type = other RNA
ccacgacgcctgcaggctc

SEQ ID NO: 5084 - RNA, 19 nt, synthetic construct
  source 1..19: mol_type = other RNA
cagggcacgacccgctgtc

SEQ ID NO: 5085 - RNA, 19 nt, synthetic construct
  source 1..19: mol_type = other RNA
agtgccaactaccacaacc

SEQ ID NO: 5086 - RNA, 19 nt, synthetic construct
  source 1..19: mol_type = other RNA
ccacaccgccacagtgctg

SEQ ID NO: 5087 - RNA, 19 nt, synthetic construct
  source 1..19: mol_type = other RNA
cacggccacgacacccaca

SEQ ID NO: 5088 - RNA, 19 nt, synthetic construct
  source 1..19: mol_type = other RNA
acggccacgacacccacag

SEQ ID NO: 5089 - RNA, 19 nt, synthetic construct
  source 1..19: mol_type = other RNA
ccacaccgccacagtgctg

SEQ ID NO: 5090 - RNA, 19 nt, synthetic construct
  source 1..19: mol_type = other RNA
cacggccacgacacccaca

SEQ ID NO: 5091 - RNA, 19 nt, synthetic construct
  source 1..19: mol_type = other RNA
acggccacgacacccacag

SEQ ID NO: 5092 - RNA, 19 nt, synthetic construct
  source 1..19: mol_type = other RNA
cacggccacgacacccaca

SEQ ID NO: 5093 - RNA, 19 nt, synthetic construct
  source 1..19: mol_type = other RNA
acggccacgacacccacag

SEQ ID NO: 5094 - RNA, 19 nt, synthetic construct
  source 1..19: mol_type = other RNA
ctatagccaccgtgatggt

SEQ ID NO: 5095 - RNA, 19 nt, synthetic construct
  source 1..19: mol_type = other RNA
caactgcaccgtgtacctc

SEQ ID NO: 5096 - RNA, 19 nt, synthetic construct
  source 1..19: mol_type = other RNA
ggaacaaactaagcatgtg

SEQ ID NO: 5097 - RNA, 19 nt, synthetic construct
  source 1..19: mol_type = other RNA
ccatgctcgtggtgccgca

SEQ ID NO: 5098 - RNA, 19 nt, synthetic construct
  source 1..19: mol_type = other RNA
gatggcggtgccccgacgt

SEQ ID NO: 5099 - RNA, 19 nt, synthetic construct
  source 1..19: mol_type = other RNA
tggcggtgccccgacgtcc

SEQ ID NO: 5100 - RNA, 19 nt, synthetic construct
  source 1..19: mol_type = other RNA
ctgagcactgccgcgccgc

SEQ ID NO: 5101 - RNA, 19 nt, synthetic construct
  source 1..19: mol_type = other RNA
cagcatccggctggtgctg

SEQ ID NO: 5102 - RNA, 19 nt, synthetic construct
  source 1..19: mol_type = other RNA
gacccgctgcccttgccgg

SEQ ID NO: 5103 - RNA, 19 nt, synthetic construct
  source 1..19: mol_type = other RNA
gcggagtgccacgcactgg

SEQ ID NO: 5104 - RNA, 19 nt, synthetic construct
  source 1..19: mol_type = other RNA
ggagtgccacgcactggtg

SEQ ID NO: 5105 - RNA, 19 nt, synthetic construct
  source 1..19: mol_type = other RNA
gtgctggatgacatcacgc

SEQ ID NO: 5106 - RNA, 19 nt, synthetic construct
  source 1..19: mol_type = other RNA
tgccttctcgcgctgccac

SEQ ID NO: 5107 - RNA, 19 nt, synthetic construct
  source 1..19: mol_type = other RNA
ccaagggcgtacagctcag

SEQ ID NO: 5108 - RNA, 19 nt, synthetic construct
  source 1..19: mol_type = other RNA
gcccacttgccgcggcctg

SEQ ID NO: 5109 - RNA, 19 nt, synthetic construct
  source 1..19: mol_type = other RNA
cggcctgagtgaggccgac

SEQ ID NO: 5110 - RNA, 19 nt, synthetic construct
  source 1..19: mol_type = other RNA
gcgtttccttcgtgcctgt

SEQ ID NO: 5111 - RNA, 19 nt, synthetic construct
  source 1..19: mol_type = other RNA
ccatggtgtacctggactg

SEQ ID NO: 5112 - RNA, 19 nt, synthetic construct
  source 1..19: mol_type = other RNA
gaccatcagggtcgactgc

SEQ ID NO: 5113 - RNA, 19 nt, synthetic construct
  source 1..19: mol_type = other RNA
tcctgggaccggaagacca

SEQ ID NO: 5114 - RNA, 19 nt, synthetic construct
  source 1..19: mol_type = other RNA
tgtgcctgcgactcgggtg

SEQ ID NO: 5115 - RNA, 19 nt, synthetic construct
  source 1..19: mol_type = other RNA
gactcgggtggcgactgcg

SEQ ID NO: 5116 - RNA, 19 nt, synthetic construct
  source 1..19: mol_type = other RNA
gccatctgcggaagcaacg

SEQ ID NO: 5117 - RNA, 19 nt, synthetic construct
  source 1..19: mol_type = other RNA
ccatctgcggaagcaacgg

SEQ ID NO: 5118 - RNA, 19 nt, synthetic construct
  source 1..19: mol_type = other RNA
atctgcggaagcaacggca

SEQ ID NO: 5119 - RNA, 19 nt, synthetic construct
  source 1..19: mol_type = other RNA
cggtctccaccgtgtgtgt

SEQ ID NO: 5120 - RNA, 19 nt, synthetic construct
  source 1..19: mol_type = other RNA
ggtctccaccgtgtgtgtc

SEQ ID NO: 5121 - RNA, 19 nt, synthetic construct
  source 1..19: mol_type = other RNA
tcaacgccgcagcctacga

SEQ ID NO: 5122 - RNA, 19 nt, synthetic construct
  source 1..19: mol_type = other RNA
ccaccacgggaggccccac

SEQ ID NO: 5123 - RNA, 19 nt, synthetic construct
  source 1..19: mol_type = other RNA
gccccacgacgcctgcagg

SEQ ID NO: 5124 - RNA, 19 nt, synthetic construct
  source 1..19: mol_type = other RNA
cccttccaacacgctcagc

SEQ ID NO: 5125 - RNA, 19 nt, synthetic construct
  source 1..19: mol_type = other RNA
gcaacctccagagctcgcc

SEQ ID NO: 5126 - RNA, 19 nt, synthetic construct
  source 1..19: mol_type = other RNA
ctccagagctcgcccgaca

SEQ ID NO: 5127 - RNA, 19 nt, synthetic construct
  source 1..19: mol_type = other RNA
gttacacccatcccctctt

SEQ ID NO: 5128 - RNA, 19 nt, synthetic construct
  source 1..19: mol_type = other RNA
acaactggggccaccggct

SEQ ID NO: 5129 - RNA, 19 nt, synthetic construct
  source 1..19: mol_type = other RNA
ctaccacaaccacgggctt

SEQ ID NO: 5130 - RNA, 19 nt, synthetic construct
  source 1..19: mol_type = other RNA
caaccagaggctccacggt

SEQ ID NO: 5131 - RNA, 19 nt, synthetic construct
  source 1..19: mol_type = other RNA
aactgtggccactggttct

SEQ ID NO: 5132 - RNA, 19 nt, synthetic construct
  source 1..19: mol_type = other RNA
ctgtggccactggttctat

SEQ ID NO: 5133 - RNA, 19 nt, synthetic construct
  source 1..19: mol_type = other RNA
tgtggccactggttctatg

SEQ ID NO: 5134 - RNA, 19 nt, synthetic construct
  source 1..19: mol_type = other RNA
tgacttcccacaccctagc

SEQ ID NO: 5135 - RNA, 19 nt, synthetic construct
  source 1..19: mol_type = other RNA
cgcacctcgaccctgctgc

SEQ ID NO: 5136 - RNA, 19 nt, synthetic construct
  source 1..19: mol_type = other RNA
cccggccaccagctctacg

SEQ ID NO: 5137 - RNA, 19 nt, synthetic construct
  source 1..19: mol_type = other RNA
ccggccaccagctctacgg

SEQ ID NO: 5138 - RNA, 19 nt, synthetic construct
  source 1..19: mol_type = other RNA
cacagagccgagcactaca

SEQ ID NO: 5139 - RNA, 19 nt, synthetic construct
  source 1..19: mol_type = other RNA
accgtgacggtgcccaccg

SEQ ID NO: 5140 - RNA, 19 nt, synthetic construct
  source 1..19: mol_type = other RNA
cggatccacggccaccgcc

SEQ ID NO: 5141 - RNA, 19 nt, synthetic construct
  source 1..19: mol_type = other RNA
ccaggcaactgctggcacc

SEQ ID NO: 5142 - RNA, 19 nt, synthetic construct
  source 1..19: mol_type = other RNA
aactgctggcaccccacat

SEQ ID NO: 5143 - RNA, 19 nt, synthetic construct
  source 1..19: mol_type = other RNA
acgacacccacagtcacca

SEQ ID NO: 5144 - RNA, 19 nt, synthetic construct
  source 1..19: mol_type = other RNA
ctaccacaaccacgggctt

SEQ ID NO: 5145 - RNA, 19 nt, synthetic construct
  source 1..19: mol_type = other RNA
aactgtggccactggttct

SEQ ID NO: 5146 - RNA, 19 nt, synthetic construct
  source 1..19: mol_type = other RNA
ctgtggccactggttctat

SEQ ID NO: 5147 - RNA, 19 nt, synthetic construct
  source 1..19: mol_type = other RNA
tgtggccactggttctatg

SEQ ID NO: 5148 - RNA, 19 nt, synthetic construct
  source 1..19: mol_type = other RNA
gacttcggccacctcaggc

SEQ ID NO: 5149 - RNA, 19 nt, synthetic construct
  source 1..19: mol_type = other RNA
ccctagcagcaggaccacc

SEQ ID NO: 5150 - RNA, 19 nt, synthetic construct
  source 1..19: mol_type = other RNA
cgcacctcgaccctgctgc

SEQ ID NO: 5151 - RNA, 19 nt, synthetic construct
  source 1..19: mol_type = other RNA
cccggccaccagctctacg

SEQ ID NO: 5152 - RNA, 19 nt, synthetic construct
  source 1..19: mol_type = other RNA
ccggccaccagctctacgg

SEQ ID NO: 5153 - RNA, 19 nt, synthetic construct
  source 1..19: mol_type = other RNA
accctcccagaacagacca

SEQ ID NO: 5154 - RNA, 19 nt, synthetic construct
  source 1..19: mol_type = other RNA
caccatgtccacaatccac

SEQ ID NO: 5155 - RNA, 19 nt, synthetic construct
  source 1..19: mol_type = other RNA
acgaaggccaccacgacaa

SEQ ID NO: 5156 - RNA, 19 nt, synthetic construct
  source 1..19: mol_type = other RNA
accgtgacggtgcccaccg

SEQ ID NO: 5157 - RNA, 19 nt, synthetic construct
  source 1..19: mol_type = other RNA
cggatccacggccaccgcc

SEQ ID NO: 5158 - RNA, 19 nt, synthetic construct
  source 1..19: mol_type = other RNA
ccgggcaactgctggcacc

SEQ ID NO: 5159 - RNA, 19 nt, synthetic construct
  source 1..19: mol_type = other RNA
ccagcgttacagccatccc

SEQ ID NO: 5160 - RNA, 19 nt, synthetic construct
  source 1..19: mol_type = other RNA
ccaaagtgccgactaccac

SEQ ID NO: 5161 - RNA, 19 nt, synthetic construct
  source 1..19: mol_type = other RNA
ctaccacaaccacgggctt

SEQ ID NO: 5162 - RNA, 19 nt, synthetic construct
  source 1..19: mol_type = other RNA
caaccagaggctccacggt

SEQ ID NO: 5163 - RNA, 19 nt, synthetic construct
  source 1..19: mol_type = other RNA
aactgtggccactggttct

SEQ ID NO: 5164 - RNA, 19 nt, synthetic construct
  source 1..19: mol_type = other RNA
ctgtggccactggttctat

SEQ ID NO: 5165 - RNA, 19 nt, synthetic construct
  source 1..19: mol_type = other RNA
tgtggccactggttctatg

SEQ ID NO: 5166 - RNA, 19 nt, synthetic construct
  source 1..19: mol_type = other RNA
ccctagcagcaggaccacc

SEQ ID NO: 5167 - RNA, 19 nt, synthetic construct
  source 1..19: mol_type = other RNA
cgcacctcgaccctgctgc

SEQ ID NO: 5168 - RNA, 19 nt, synthetic construct
  source 1..19: mol_type = other RNA
cccggccaccagctctacg

SEQ ID NO: 5169 - RNA, 19 nt, synthetic construct
  source 1..19: mol_type = other RNA
ccggccaccagctctacgg

SEQ ID NO: 5170 - RNA, 19 nt, synthetic construct
  source 1..19: mol_type = other RNA
cacagagccgagcactaca

SEQ ID NO: 5171 - RNA, 19 nt, synthetic construct
  source 1..19: mol_type = other RNA
accgtgacggtgcccaccg

SEQ ID NO: 5172 - RNA, 19 nt, synthetic construct
  source 1..19: mol_type = other RNA
cggatccacggccaccgcc

SEQ ID NO: 5173 - RNA, 19 nt, synthetic construct
  source 1..19: mol_type = other RNA
ccaggcaactgctggcacc

SEQ ID NO: 5174 - RNA, 19 nt, synthetic construct
  source 1..19: mol_type = other RNA
aactgctggcaccccacat

SEQ ID NO: 5175 - RNA, 19 nt, synthetic construct
  source 1..19: mol_type = other RNA
acgacacccacagtcacca

SEQ ID NO: 5176 - RNA, 19 nt, synthetic construct
  source 1..19: mol_type = other RNA
ccaaagtgccgactaccac

SEQ ID NO: 5177 - RNA, 19 nt, synthetic construct
  source 1..19: mol_type = other RNA
ctaccacaaccacgggctt

SEQ ID NO: 5178 - RNA, 19 nt, synthetic construct
  source 1..19: mol_type = other RNA
accacacccacaaccagtg

SEQ ID NO: 5179 - RNA, 19 nt, synthetic construct
  source 1..19: mol_type = other RNA
aactgtggccactggttct

SEQ ID NO: 5180 - RNA, 19 nt, synthetic construct
  source 1..19: mol_type = other RNA
ctgtggccactggttctat

SEQ ID NO: 5181 - RNA, 19 nt, synthetic construct
  source 1..19: mol_type = other RNA
tgtggccactggttctatg

SEQ ID NO: 5182 - RNA, 19 nt, synthetic construct
  source 1..19: mol_type = other RNA
gacttcggccacctcaggc

SEQ ID NO: 5183 - RNA, 19 nt, synthetic construct
  source 1..19: mol_type = other RNA
ccctagcagcaggaccacc

SEQ ID NO: 5184 - RNA, 19 nt, synthetic construct
  source 1..19: mol_type = other RNA
cgcacctcgaccctgctgc

SEQ ID NO: 5185 - RNA, 19 nt, synthetic construct
  source 1..19: mol_type = other RNA
cccggccaccagctctacg

SEQ ID NO: 5186 - RNA, 19 nt, synthetic construct
  source 1..19: mol_type = other RNA
ccggccaccagctctacgg

SEQ ID NO: 5187 - RNA, 19 nt, synthetic construct
  source 1..19: mol_type = other RNA
accctcccagaacagacca

SEQ ID NO: 5188 - RNA, 19 nt, synthetic construct
  source 1..19: mol_type = other RNA
caccatgtccacaatccac

SEQ ID NO: 5189 - RNA, 19 nt, synthetic construct
  source 1..19: mol_type = other RNA
acgaaggccaccacgacaa

SEQ ID NO: 5190 - RNA, 19 nt, synthetic construct
  source 1..19: mol_type = other RNA
cacagagccgagcactaca

SEQ ID NO: 5191 - RNA, 19 nt, synthetic construct
  source 1..19: mol_type = other RNA
accgtgacggtgcccaccg

SEQ ID NO: 5192 - RNA, 19 nt, synthetic construct
  source 1..19: mol_type = other RNA
cggatccacggccaccgcc

SEQ ID NO: 5193 - RNA, 19 nt, synthetic construct
  source 1..19: mol_type = other RNA
ccaggcaactgctggcacc

SEQ ID NO: 5194 - RNA, 19 nt, synthetic construct
  source 1..19: mol_type = other RNA
aactgctggcaccccacat

SEQ ID NO: 5195 - RNA, 19 nt, synthetic construct
  source 1..19: mol_type = other RNA
acgacacccacagtcacca

SEQ ID NO: 5196 - RNA, 19 nt, synthetic construct
  source 1..19: mol_type = other RNA
ccaaagtgccgactaccac

SEQ ID NO: 5197 - RNA, 19 nt, synthetic construct
  source 1..19: mol_type = other RNA
ctaccacaaccacgggctt

SEQ ID NO: 5198 - RNA, 19 nt, synthetic construct
  source 1..19: mol_type = other RNA
accacacccacaaccagtg

SEQ ID NO: 5199 - RNA, 19 nt, synthetic construct
  source 1..19: mol_type = other RNA
ccacaccgccagagtgctg

SEQ ID NO: 5200 - RNA, 19 nt, synthetic construct
  source 1..19: mol_type = other RNA
aactgtggccactggttct

SEQ ID NO: 5201 - RNA, 19 nt, synthetic construct
  source 1..19: mol_type = other RNA
ctgtggccactggttctat

SEQ ID NO: 5202 - RNA, 19 nt, synthetic construct
  source 1..19: mol_type = other RNA
tgtggccactggttctatg

SEQ ID NO: 5203 - RNA, 19 nt, synthetic construct
  source 1..19: mol_type = other RNA
gacaacacccatcacccca

SEQ ID NO: 5204 - RNA, 19 nt, synthetic construct
  source 1..19: mol_type = other RNA
tatagccaccgtgatggtg

SEQ ID NO: 5205 - RNA, 19 nt, synthetic construct
  source 1..19: mol_type = other RNA
atggtgcccaccggttcca

SEQ ID NO: 5206 - RNA, 19 nt, synthetic construct
  source 1..19: mol_type = other RNA
tggtgcccaccggttccac

SEQ ID NO: 5207 - RNA, 19 nt, synthetic construct
  source 1..19: mol_type = other RNA
ggtgcccaccggttccacg

SEQ ID NO: 5208 - RNA, 19 nt, synthetic construct
  source 1..19: mol_type = other RNA
cccaaagtggtgaccacca

SEQ ID NO: 5209 - RNA, 19 nt, synthetic construct
  source 1..19: mol_type = other RNA
tctcgcccggggaagtcat

SEQ ID NO: 5210 - RNA, 19 nt, synthetic construct
  source 1..19: mol_type = other RNA
ccaaagcctgtggccaacg

SEQ ID NO: 5211 - RNA, 19 nt, synthetic construct
  source 1..19: mol_type = other RNA
tcggacccgagccagccct

SEQ ID NO: 5212 - RNA, 19 nt, synthetic construct
  source 1..19: mol_type = other RNA
gcgagtgcatctgcagcat

SEQ ID NO: 5213 - RNA, 19 nt, synthetic construct
  source 1..19: mol_type = other RNA
acgtggctggtccccgaca

SEQ ID NO: 5214 - RNA, 19 nt, synthetic construct
  source 1..19: mol_type = other RNA
aaccttgtgcccccgggcc

SEQ ID NO: 5215 - RNA, 19 nt, synthetic construct
  source 1..19: mol_type = other RNA
ccttgaggtgccctgccag

SEQ ID NO: 5216 - RNA, 19 nt, synthetic construct
  source 1..19: mol_type = other RNA
cggtggcctgtgcgacctc

SEQ ID NO: 5217 - RNA, 19 nt, synthetic construct
  source 1..19: mol_type = other RNA
ggccccatacagcctgcca

SEQ ID NO: 5218 - RNA, 19 nt, synthetic construct
  source 1..19: mol_type = other RNA
ttggtgcaaccttcccagg

SEQ ID NO: 5219 - RNA, 19 nt, synthetic construct
  source 1..19: mol_type = other RNA
caacggtgcaatgtcagga

SEQ ID NO: 5220 - RNA, 19 nt, synthetic construct
  source 1..19: mol_type = other RNA
gagtgcgtccagaccgcct

SEQ ID NO: 5221 - RNA, 19 nt, synthetic construct
  source 1..19: mol_type = other RNA
caacagccatgtggacaac

SEQ ID NO: 5222 - RNA, 19 nt, synthetic construct
  source 1..19: mol_type = other RNA
gcccagatgtgtccagctg

SEQ ID NO: 5223 - RNA, 19 nt, synthetic construct
  source 1..19: mol_type = other RNA
aacatcaccttctgcgagg

SEQ ID NO: 5224 - RNA, 19 nt, synthetic construct
  source 1..19: mol_type = other RNA
aaaaccttgggcctcctct

SEQ ID NO: 5225 - RNA, 19 nt, synthetic construct
  source 1..19: mol_type = other RNA
gcccaccccgtgggtgaaa

SEQ ID NO: 5226 - RNA, 19 nt, synthetic construct
  source 1..19: mol_type = other RNA
gggtgaaaccggccccaga

SEQ ID NO: 5227 - RNA, 19 nt, synthetic construct
  source 1..19: mol_type = other RNA
tcgggagggcgccactcag

SEQ ID NO: 5228 - RNA, 19 nt, synthetic construct
  source 1..19: mol_type = other RNA
cgggagggcgccactcagg

SEQ ID NO: 5229 - RNA, 19 nt, synthetic construct
  source 1..19: mol_type = other RNA
ggccgcctgtccatgcctg

SEQ ID NO: 5230 - RNA, 19 nt, synthetic construct
  source 1..19: mol_type = other RNA
ctactccagagaccaccca

SEQ ID NO: 5231 - RNA, 19 nt, synthetic construct
  source 1..19: mol_type = other RNA
ggggaccacccacaccgcc

SEQ ID NO: 5232 - RNA, 19 nt, synthetic construct
  source 1..19: mol_type = other RNA
ggggaccacccacaccgcc

SEQ ID NO: 5233 - RNA, 19 nt, synthetic construct
  source 1..19: mol_type = other RNA
ggggaccacccacaccgcc

SEQ ID NO: 5234 - RNA, 19 nt, synthetic construct
  source 1..19: mol_type = other RNA
gacttcaacggcctcccgg

SEQ ID NO: 5235 - RNA, 19 nt, synthetic construct
  source 1..19: mol_type = other RNA
gccatgtggacaactgcac

SEQ ID NO: 5236 - RNA, 19 nt, synthetic construct
  source 1..19: mol_type = other RNA
catcacgcactctggctgc

SEQ ID NO: 5237 - RNA, 19 nt, synthetic construct
  source 1..19: mol_type = other RNA
acttcaacggcctcccggc

SEQ ID NO: 5238 - RNA, 19 nt, synthetic construct
  source 1..19: mol_type = other RNA
caacgagaactgcctgaaa

SEQ ID NO: 5239 - RNA, 19 nt, synthetic construct
  source 1..19: mol_type = other RNA
ttcatcgtggtgcagacag

SEQ ID NO: 5240 - RNA, 19 nt, synthetic construct
  source 1..19: mol_type = other RNA
gagcggggactacatcaag

SEQ ID NO: 5241 - RNA, 19 nt, synthetic construct
  source 1..19: mol_type = other RNA
caccaattccacggccaca

SEQ ID NO: 5242 - RNA, 19 nt, synthetic construct
  source 1..19: mol_type = other RNA
ttacaccttccggggcaac

SEQ ID NO: 5243 - RNA, 19 nt, synthetic construct
  source 1..19: mol_type = other RNA
gaggtcgcaacggccaggt

SEQ ID NO: 5244 - RNA, 19 nt, synthetic construct
  source 1..19: mol_type = other RNA
gtacctctgtgaggctgag

SEQ ID NO: 5245 - RNA, 19 nt, synthetic construct
  source 1..19: mol_type = other RNA
acgacgcgtgtgcctgcga

SEQ ID NO: 5246 - RNA, 19 nt, synthetic construct
  source 1..19: mol_type = other RNA
agtacatcttggcccagga

SEQ ID NO: 5247 - RNA, 19 nt, synthetic construct
  source 1..19: mol_type = other RNA
caatgggcgggtgtgcagc

SEQ ID NO: 5248 - RNA, 19 nt, synthetic construct
  source 1..19: mol_type = other RNA
cggcaactgcacggacgag

SEQ ID NO: 5249 - RNA, 19 nt, synthetic construct
  source 1..19: mol_type = other RNA
gacggtcaccccctcggcc

SEQ ID NO: 5250 - RNA, 19 nt, synthetic construct
  source 1..19: mol_type = other RNA
ccagagctcgcccgacagg

SEQ ID NO: 5251 - RNA, 19 nt, synthetic construct
  source 1..19: mol_type = other RNA
ggtgccccgagcgcgtgcc

SEQ ID NO: 5252 - RNA, 19 nt, synthetic construct
  source 1..19: mol_type = other RNA
ggtggatgcctgccagccc

SEQ ID NO: 5253 - RNA, 19 nt, synthetic construct
  source 1..19: mol_type = other RNA
gacctccaccctgagaaca

SEQ ID NO: 5254 - RNA, 19 nt, synthetic construct
  source 1..19: mol_type = other RNA
cttccacggggacttccca

SEQ ID NO: 5255 - RNA, 19 nt, synthetic construct
  source 1..19: mol_type = other RNA
agtgcttaccaccacgacc

SEQ ID NO: 5256 - RNA, 19 nt, synthetic construct
  source 1..19: mol_type = other RNA
gcggccggaggggcagtct

SEQ ID NO: 5257 - RNA, 19 nt, synthetic construct
  source 1..19: mol_type = other RNA
cttccacggggacttccca

SEQ ID NO: 5258 - RNA, 19 nt, synthetic construct
  source 1..19: mol_type = other RNA
agaccaccacacccatgtc

SEQ ID NO: 5259 - RNA, 19 nt, synthetic construct
  source 1..19: mol_type = other RNA
gcagccactggatccacgg

SEQ ID NO: 5260 - RNA, 19 nt, synthetic construct
  source 1..19: mol_type = other RNA
tatcgtcctcactgtcacc

SEQ ID NO: 5261 - RNA, 19 nt, synthetic construct
  source 1..19: mol_type = other RNA
ttcctgccctgggcgtgag

SEQ ID NO: 5262 - RNA, 19 nt, synthetic construct
  source 1..19: mol_type = other RNA
gttcagtgtcggtgcagtg

SEQ ID NO: 5263 - RNA, 19 nt, synthetic construct
  source 1..19: mol_type = other RNA
cagcaggacccctttcggg

SEQ ID NO: 5264 - RNA, 19 nt, synthetic construct
  source 1..19: mol_type = other RNA
cttgccggccggcaactgc

SEQ ID NO: 5265 - RNA, 19 nt, synthetic construct
  source 1..19: mol_type = other RNA
ccgtccccccacccgtgcc

SEQ ID NO: 5266 - RNA, 19 nt, synthetic construct
  source 1..19: mol_type = other RNA
gccgagaccagcacgccca

SEQ ID NO: 5267 - RNA, 19 nt, synthetic construct
  source 1..19: mol_type = other RNA
cccagcactcgactccagc

SEQ ID NO: 5268 - RNA, 19 nt, synthetic construct
  source 1..19: mol_type = other RNA
cccagcactcgactccagc

SEQ ID NO: 5269 - RNA, 19 nt, synthetic construct
  source 1..19: mol_type = other RNA
cccagcactcgactccagc

SEQ ID NO: 5270 - RNA, 19 nt, synthetic construct
  source 1..19: mol_type = other RNA
cccagcactcgactccagc

SEQ ID NO: 5271 - RNA, 19 nt, synthetic construct
  source 1..19: mol_type = other RNA
cctgtgccaatgccaggaa

SEQ ID NO: 5272 - RNA, 19 nt, synthetic construct
  source 1..19: mol_type = other RNA
gggactttgacacctactc

SEQ ID NO: 5273 - RNA, 19 nt, synthetic construct
  source 1..19: mol_type = other RNA
gggactttgacacctactc

SEQ ID NO: 5274 - RNA, 19 nt, synthetic construct
  source 1..19: mol_type = other RNA
gggactttgacacctactc

SEQ ID NO: 5275 - RNA, 19 nt, synthetic construct
  source 1..19: mol_type = other RNA
gggactttgacacctactc

SEQ ID NO: 5276 - RNA, 19 nt, synthetic construct
  source 1..19: mol_type = other RNA
ccaccacacccgtggccac

SEQ ID NO: 5277 - RNA, 19 nt, synthetic construct
  source 1..19: mol_type = other RNA
gatggtgcccaccggttcc

SEQ ID NO: 5278 - RNA, 19 nt, synthetic construct
  source 1..19: mol_type = other RNA
agccatgtggacaactgca

SEQ ID NO: 5279 - RNA, 19 nt, synthetic construct
  source 1..19: mol_type = other RNA
tgtccctgccacggccgga

SEQ ID NO: 5280 - RNA, 19 nt, synthetic construct
  source 1..19: mol_type = other RNA
ggtgcacgacgagggcgcc

SEQ ID NO: 5281 - RNA, 19 nt, synthetic construct
  source 1..19: mol_type = other RNA
ccaccgagtcacccccttc

SEQ ID NO: 5282 - RNA, 19 nt, synthetic construct
  source 1..19: mol_type = other RNA
catcagcgaccactgcagg

SEQ ID NO: 5283 - RNA, 19 nt, synthetic construct
  source 1..19: mol_type = other RNA
tgctgacattcctgtggaa

SEQ ID NO: 5284 - RNA, 19 nt, synthetic construct
  source 1..19: mol_type = other RNA
aagcggtgacgctcagcct

SEQ ID NO: 5285 - RNA, 19 nt, synthetic construct
  source 1..19: mol_type = other RNA
tgtgccaatgccaggaaca

SEQ ID NO: 5286 - RNA, 19 nt, synthetic construct
  source 1..19: mol_type = other RNA
caaccagaggttccacggt

SEQ ID NO: 5287 - RNA, 19 nt, synthetic construct
  source 1..19: mol_type = other RNA
cgcaaccactggatccacg

SEQ ID NO: 5288 - RNA, 19 nt, synthetic construct
  source 1..19: mol_type = other RNA
ggcctgtgcgacctcacct

SEQ ID NO: 5289 - RNA, 19 nt, synthetic construct
  source 1..19: mol_type = other RNA
ccccgtccccccacccgtg

SEQ ID NO: 5290 - RNA, 19 nt, synthetic construct
  source 1..19: mol_type = other RNA
acatcacgcactctggctg

SEQ ID NO: 5291 - RNA, 19 nt, synthetic construct
  source 1..19: mol_type = other RNA
aaatgtgccgacagcagct

SEQ ID NO: 5292 - RNA, 19 nt, synthetic construct
  source 1..19: mol_type = other RNA
ggcgtgttcctcaactcca

SEQ ID NO: 5293 - RNA, 19 nt, synthetic construct
  source 1..19: mol_type = other RNA
ggtggaggccacgggcgca

SEQ ID NO: 5294 - RNA, 19 nt, synthetic construct
  source 1..19: mol_type = other RNA
gtggactgtgaccgcatgc

SEQ ID NO: 5295 - RNA, 19 nt, synthetic construct
  source 1..19: mol_type = other RNA
acggtcaccccctcggccc

SEQ ID NO: 5296 - RNA, 19 nt, synthetic construct
  source 1..19: mol_type = other RNA
ggcaacaccctcctctagc

SEQ ID NO: 5297 - RNA, 19 nt, synthetic construct
  source 1..19: mol_type = other RNA
acaccctcctctagcacac

SEQ ID NO: 5298 - RNA, 19 nt, synthetic construct
  source 1..19: mol_type = other RNA
gctaccccatgccggggcc

SEQ ID NO: 5299 - RNA, 19 nt, synthetic construct
  source 1..19: mol_type = other RNA
ctggtctgcaggaaccgtg

SEQ ID NO: 5300 - RNA, 19 nt, synthetic construct
  source 1..19: mol_type = other RNA
ggcaacaccctcctctagc

SEQ ID NO: 5301 - RNA, 19 nt, synthetic construct
  source 1..19: mol_type = other RNA
acaccctcctctagcacac

SEQ ID NO: 5302 - RNA, 19 nt, synthetic construct
  source 1..19: mol_type = other RNA
gctaccccatgccggggcc

SEQ ID NO: 5303 - RNA, 19 nt, synthetic construct
  source 1..19: mol_type = other RNA
ctggtctgcaggaaccgtg

SEQ ID NO: 5304 - RNA, 19 nt, synthetic construct
  source 1..19: mol_type = other RNA
caagcacagccaccaaatc

SEQ ID NO: 5305 - RNA, 19 nt, synthetic construct
  source 1..19: mol_type = other RNA
ctccggagaccacccacac

SEQ ID NO: 5306 - RNA, 19 nt, synthetic construct
  source 1..19: mol_type = other RNA
cgttacagccatcccctct

SEQ ID NO: 5307 - RNA, 19 nt, synthetic construct
  source 1..19: mol_type = other RNA
ggcaacaccctcctctagc

SEQ ID NO: 5308 - RNA, 19 nt, synthetic construct
  source 1..19: mol_type = other RNA
acaccctcctctagcacac

SEQ ID NO: 5309 - RNA, 19 nt, synthetic construct
  source 1..19: mol_type = other RNA
gctaccccatgccggggcc

SEQ ID NO: 5310 - RNA, 19 nt, synthetic construct
  source 1..19: mol_type = other RNA
ctggtctgcaggaaccgtg

SEQ ID NO: 5311 - RNA, 19 nt, synthetic construct
  source 1..19: mol_type = other RNA
ggcaacaccctcctctagc

SEQ ID NO: 5312 - RNA, 19 nt, synthetic construct
  source 1..19: mol_type = other RNA
acaccctcctctagcacac

SEQ ID NO: 5313 - RNA, 19 nt, synthetic construct
  source 1..19: mol_type = other RNA
gctaccccatgccggggcc

SEQ ID NO: 5314 - RNA, 19 nt, synthetic construct
  source 1..19: mol_type = other RNA
ctggtctgcaggaaccgtg

SEQ ID NO: 5315 - RNA, 19 nt, synthetic construct
  source 1..19: mol_type = other RNA
caagcacagccaccaaatc

SEQ ID NO: 5316 - RNA, 19 nt, synthetic construct
  source 1..19: mol_type = other RNA
ctccggagaccacccacac

SEQ ID NO: 5317 - RNA, 19 nt, synthetic construct
  source 1..19: mol_type = other RNA
ggcaacaccctcctctagc

SEQ ID NO: 5318 - RNA, 19 nt, synthetic construct
  source 1..19: mol_type = other RNA
acaccctcctctagcacac

SEQ ID NO: 5319 - RNA, 19 nt, synthetic construct
  source 1..19: mol_type = other RNA
ggacaacacccatcacccc

SEQ ID NO: 5320 - RNA, 19 nt, synthetic construct
  source 1..19: mol_type = other RNA
cccgacagcagaaaggatg

SEQ ID NO: 5321 - RNA, 19 nt, synthetic construct
  source 1..19: mol_type = other RNA
atgtgtacctgcctctctg

SEQ ID NO: 5322 - RNA, 19 nt, synthetic construct
  source 1..19: mol_type = other RNA
agtcctaccctgggagagc

SEQ ID NO: 5323 - RNA, 19 nt, synthetic construct
  source 1..19: mol_type = other RNA
tggcctttgcaactacgtg

SEQ ID NO: 5324 - RNA, 19 nt, synthetic construct
  source 1..19: mol_type = other RNA
accacgtggaccgtcccag

SEQ ID NO: 5325 - RNA, 19 nt, synthetic construct
  source 1..19: mol_type = other RNA
cgcgcctgaccgatcccaa

SEQ ID NO: 5326 - RNA, 19 nt, synthetic construct
  source 1..19: mol_type = other RNA
ggagtgcccctgctacgct

SEQ ID NO: 5327 - RNA, 19 nt, synthetic construct
  source 1..19: mol_type = other RNA
gtgcttaccaccacgacca

SEQ ID NO: 5328 - RNA, 19 nt, synthetic construct
  source 1..19: mol_type = other RNA
ccgtggggaccacccgcac

SEQ ID NO: 5329 - RNA, 19 nt, synthetic construct
  source 1..19: mol_type = other RNA
ttatgccagcagcctaagg

SEQ ID NO: 5330 - RNA, 19 nt, synthetic construct
  source 1..19: mol_type = other RNA
cacctttgatggcgatcgc

SEQ ID NO: 5331 - RNA, 19 nt, synthetic construct
  source 1..19: mol_type = other RNA
tgcgagaccgaggtcaaca

SEQ ID NO: 5332 - RNA, 19 nt, synthetic construct
  source 1..19: mol_type = other RNA
gtgtcggatgggagtgggg

SEQ ID NO: 5333 - RNA, 19 nt, synthetic construct
  source 1..19: mol_type = other RNA
catctgcggaagcaacggc

SEQ ID NO: 5334 - RNA, 19 nt, synthetic construct
  source 1..19: mol_type = other RNA
agacggtgtgcgtgtgcaa

SEQ ID NO: 5335 - RNA, 19 nt, synthetic construct
  source 1..19: mol_type = other RNA
ccgagctgggagaatgcag

SEQ ID NO: 5336 - RNA, 19 nt, synthetic construct
  source 1..19: mol_type = other RNA
cacaatgggcgggtgtgca

SEQ ID NO: 5337 - RNA, 19 nt, synthetic construct
  source 1..19: mol_type = other RNA
cacctacaagcctggagag

SEQ ID NO: 5338 - RNA, 19 nt, synthetic construct
  source 1..19: mol_type = other RNA
cccgcctatcacagaccac

SEQ ID NO: 5339 - RNA, 19 nt, synthetic construct
  source 1..19: mol_type = other RNA
ctcgagtgccgtgcccagg

SEQ ID NO: 5340 - RNA, 19 nt, synthetic construct
  source 1..19: mol_type = other RNA
cccgcctatcacagaccac

SEQ ID NO: 5341 - RNA, 19 nt, synthetic construct
  source 1..19: mol_type = other RNA
ctcgagtgccgtgcccagg

SEQ ID NO: 5342 - RNA, 19 nt, synthetic construct
  source 1..19: mol_type = other RNA
cccgcctatcacagaccac

SEQ ID NO: 5343 - RNA, 19 nt, synthetic construct
  source 1..19: mol_type = other RNA
ctcgagtgccgtgcccagg

SEQ ID NO: 5344 - RNA, 19 nt, synthetic construct
  source 1..19: mol_type = other RNA
cccgcctatcacagaccac

SEQ ID NO: 5345 - RNA, 19 nt, synthetic construct
  source 1..19: mol_type = other RNA
ctcgagtgccgtgcccagg

SEQ ID NO: 5346 - RNA, 19 nt, synthetic construct
  source 1..19: mol_type = other RNA
cccgcctatcacagaccac

SEQ ID NO: 5347 - RNA, 19 nt, synthetic construct
  source 1..19: mol_type = other RNA
tgcgacctcacctgcccac

SEQ ID NO: 5348 - RNA, 19 nt, synthetic construct
  source 1..19: mol_type = other RNA
cgtgtgttcatgtacgggt

SEQ ID NO: 5349 - RNA, 19 nt, synthetic construct
  source 1..19: mol_type = other RNA
gacctcagctgtgttcgta

SEQ ID NO: 5350 - RNA, 19 nt, synthetic construct
  source 1..19: mol_type = other RNA
acgtcggtgcaagggtccc

SEQ ID NO: 5351 - RNA, 19 nt, synthetic construct
  source 1..19: mol_type = other RNA
acgggcgatccctgccccc

SEQ ID NO: 5352 - RNA, 19 nt, synthetic construct
  source 1..19: mol_type = other RNA
gaatgcagggcacaccatg

SEQ ID NO: 5353 - RNA, 19 nt, synthetic construct
  source 1..19: mol_type = other RNA
cgtgcctgtggacggctgc

SEQ ID NO: 5354 - RNA, 19 nt, synthetic construct
  source 1..19: mol_type = other RNA
agtgggggctgcattgccg

SEQ ID NO: 5355 - RNA, 19 nt, synthetic construct
  source 1..19: mol_type = other RNA
caacctccagagctcgccc

SEQ ID NO: 5356 - RNA, 19 nt, synthetic construct
  source 1..19: mol_type = other RNA
ctgctggcaccccacatgt

SEQ ID NO: 5357 - RNA, 19 nt, synthetic construct
  source 1..19: mol_type = other RNA
aaccacccttccagtgctg

SEQ ID NO: 5358 - RNA, 19 nt, synthetic construct
  source 1..19: mol_type = other RNA
tcctccacccgggcaactg

SEQ ID NO: 5359 - RNA, 19 nt, synthetic construct
  source 1..19: mol_type = other RNA
ctgctggcaccccacatgt

SEQ ID NO: 5360 - RNA, 19 nt, synthetic construct
  source 1..19: mol_type = other RNA
aaccacccttccagtgctg

SEQ ID NO: 5361 - RNA, 19 nt, synthetic construct
  source 1..19: mol_type = other RNA
ctgctggcaccccacatgt

SEQ ID NO: 5362 - RNA, 19 nt, synthetic construct
  source 1..19: mol_type = other RNA
aaccacccttccagtgctg

SEQ ID NO: 5363 - RNA, 19 nt, synthetic construct
  source 1..19: mol_type = other RNA
gggccccgactggcacacc

SEQ ID NO: 5364 - RNA, 19 nt, synthetic construct
  source 1..19: mol_type = other RNA
ggccccgactggcacaccc

SEQ ID NO: 5365 - RNA, 19 nt, synthetic construct
  source 1..19: mol_type = other RNA
aaaccggccccagaagggt

SEQ ID NO: 5366 - RNA, 19 nt, synthetic construct
  source 1..19: mol_type = other RNA
agacctcagctgtgttcgt

SEQ ID NO: 5367 - RNA, 19 nt, synthetic construct
  source 1..19: mol_type = other RNA
tgtggcaccccgcgctccg

SEQ ID NO: 5368 - RNA, 19 nt, synthetic construct
  source 1..19: mol_type = other RNA
cttacaccttccggggcaa

SEQ ID NO: 5369 - RNA, 19 nt, synthetic construct
  source 1..19: mol_type = other RNA
agccccttgactaacacca

SEQ ID NO: 5370 - RNA, 19 nt, synthetic construct
  source 1..19: mol_type = other RNA
ccccataaccacggtggtg

SEQ ID NO: 5371 - RNA, 19 nt, synthetic construct
  source 1..19: mol_type = other RNA
ccccataaccacggtggtg

SEQ ID NO: 5372 - RNA, 19 nt, synthetic construct
  source 1..19: mol_type = other RNA
ccccataaccacggtggtg

SEQ ID NO: 5373 - RNA, 19 nt, synthetic construct
  source 1..19: mol_type = other RNA
cctccagagctcgcccgac

SEQ ID NO: 5374 - RNA, 19 nt, synthetic construct
  source 1..19: mol_type = other RNA
ggtgacttcccacacccca

SEQ ID NO: 5375 - RNA, 19 nt, synthetic construct
  source 1..19: mol_type = other RNA
atgggtttcctaaatttcc

SEQ ID NO: 5376 - RNA, 19 nt, synthetic construct
  source 1..19: mol_type = other RNA
tgcgagtacatcttggccc

SEQ ID NO: 5377 - RNA, 19 nt, synthetic construct
  source 1..19: mol_type = other RNA
gtgtcgtcctgctggaccc

SEQ ID NO: 5378 - RNA, 19 nt, synthetic construct
  source 1..19: mol_type = other RNA
cctggcctttgcaactacg

SEQ ID NO: 5379 - RNA, 19 nt, synthetic construct
  source 1..19: mol_type = other RNA
ggcctttgcaactacgtgt

SEQ ID NO: 5380 - RNA, 19 nt, synthetic construct
  source 1..19: mol_type = other RNA
gcctttgcaactacgtgtt

SEQ ID NO: 5381 - RNA, 19 nt, synthetic construct
  source 1..19: mol_type = other RNA
cctttgcaactacgtgttc

SEQ ID NO: 5382 - RNA, 19 nt, synthetic construct
  source 1..19: mol_type = other RNA
tccgtcctcatcaatgggc

SEQ ID NO: 5383 - RNA, 19 nt, synthetic construct
  source 1..19: mol_type = other RNA
atcaatgggcagcgggagg

SEQ ID NO: 5384 - RNA, 19 nt, synthetic construct
  source 1..19: mol_type = other RNA
ctccaacccccagcgcgcg

SEQ ID NO: 5385 - RNA, 19 nt, synthetic construct
  source 1..19: mol_type = other RNA
ggtccccacagcggagaac

SEQ ID NO: 5386 - RNA, 19 nt, synthetic construct
  source 1..19: mol_type = other RNA
ggttctatggcaacaccct

SEQ ID NO: 5387 - RNA, 19 nt, synthetic construct
  source 1..19: mol_type = other RNA
tcagagtggctggactaca

SEQ ID NO: 5388 - RNA, 19 nt, synthetic construct
  source 1..19: mol_type = other RNA
caactgctggcaccccaca

SEQ ID NO: 5389 - RNA, 19 nt, synthetic construct
  source 1..19: mol_type = other RNA
ggttctatggcaacaccct

SEQ ID NO: 5390 - RNA, 19 nt, synthetic construct
  source 1..19: mol_type = other RNA
tcagagtggctggactaca

SEQ ID NO: 5391 - RNA, 19 nt, synthetic construct
  source 1..19: mol_type = other RNA
gtccaaggactgcaaccac

SEQ ID NO: 5392 - RNA, 19 nt, synthetic construct
  source 1..19: mol_type = other RNA
taccagctttacacccatc

SEQ ID NO: 5393 - RNA, 19 nt, synthetic construct
  source 1..19: mol_type = other RNA
ggttctatggcaacaccct

SEQ ID NO: 5394 - RNA, 19 nt, synthetic construct
  source 1..19: mol_type = other RNA
tcagagtggctggactaca

SEQ ID NO: 5395 - RNA, 19 nt, synthetic construct
  source 1..19: mol_type = other RNA
caactgctggcaccccaca

SEQ ID NO: 5396 - RNA, 19 nt, synthetic construct
  source 1..19: mol_type = other RNA
ggttctatggcaacaccct

SEQ ID NO: 5397 - RNA, 19 nt, synthetic construct
  source 1..19: mol_type = other RNA
tcagagtggctggactaca

SEQ ID NO: 5398 - RNA, 19 nt, synthetic construct
  source 1..19: mol_type = other RNA
gtccaaggactgcaaccac

SEQ ID NO: 5399 - RNA, 19 nt, synthetic construct
  source 1..19: mol_type = other RNA
caactgctggcaccccaca

SEQ ID NO: 5400 - RNA, 19 nt, synthetic construct
  source 1..19: mol_type = other RNA
ggttctatggcaacaccct

SEQ ID NO: 5401 - RNA, 19 nt, synthetic construct
  source 1..19: mol_type = other RNA
gtccaaggactgcaaccac

SEQ ID NO: 5402 - RNA, 19 nt, synthetic construct
  source 1..19: mol_type = other RNA
taccagctttacacccatc

SEQ ID NO: 5403 - RNA, 19 nt, synthetic construct
  source 1..19: mol_type = other RNA
actgtgacattgaccgctt

SEQ ID NO: 5404 - RNA, 19 nt, synthetic construct
  source 1..19: mol_type = other RNA
agagctctgccgcgcccgg

SEQ ID NO: 5405 - RNA, 19 nt, synthetic construct
  source 1..19: mol_type = other RNA
aactctaggaaccagagcc

SEQ ID NO: 5406 - RNA, 19 nt, synthetic construct
  source 1..19: mol_type = other RNA
gagaccgaggtcaacatca

SEQ ID NO: 5407 - RNA, 19 nt, synthetic construct
  source 1..19: mol_type = other RNA
gtgaacgacgcgtgtgcct

SEQ ID NO: 5408 - RNA, 19 nt, synthetic construct
  source 1..19: mol_type = other RNA
gacgacaatgccatcaatg

SEQ ID NO: 5409 - RNA, 19 nt, synthetic construct
  source 1..19: mol_type = other RNA
acggacgaggagggcatct

SEQ ID NO: 5410 - RNA, 19 nt, synthetic construct
  source 1..19: mol_type = other RNA
ggcacggtgctggatgaca

SEQ ID NO: 5411 - RNA, 19 nt, synthetic construct
  source 1..19: mol_type = other RNA
gcctgaaagcggtgacgct

SEQ ID NO: 5412 - RNA, 19 nt, synthetic construct
  source 1..19: mol_type = other RNA
cctgaaagcggtgacgctc

SEQ ID NO: 5413 - RNA, 19 nt, synthetic construct
  source 1..19: mol_type = other RNA
ctgcttgatcgccatctgc

SEQ ID NO: 5414 - RNA, 19 nt, synthetic construct
  source 1..19: mol_type = other RNA
tacgatcacggccaccggc

SEQ ID NO: 5415 - RNA, 19 nt, synthetic construct
  source 1..19: mol_type = other RNA
accgagtcacccccttctc

SEQ ID NO: 5416 - RNA, 19 nt, synthetic construct
  source 1..19: mol_type = other RNA
tacgatcacggccaccggc

SEQ ID NO: 5417 - RNA, 19 nt, synthetic construct
  source 1..19: mol_type = other RNA
accgagtcacccccttctc

SEQ ID NO: 5418 - RNA, 19 nt, synthetic construct
  source 1..19: mol_type = other RNA
gctaccagctttacaccca

SEQ ID NO: 5419 - RNA, 19 nt, synthetic construct
  source 1..19: mol_type = other RNA
accgagtcacccccttctc

SEQ ID NO: 5420 - RNA, 19 nt, synthetic construct
  source 1..19: mol_type = other RNA
ccccatcactgatcaccac

SEQ ID NO: 5421 - RNA, 19 nt, synthetic construct
  source 1..19: mol_type = other RNA
tacgatcacggccaccggc

SEQ ID NO: 5422 - RNA, 19 nt, synthetic construct
  source 1..19: mol_type = other RNA
ccaaagtgctgaccagccc

SEQ ID NO: 5423 - RNA, 19 nt, synthetic construct
  source 1..19: mol_type = other RNA
tacgatcacggccaccggc

SEQ ID NO: 5424 - RNA, 19 nt, synthetic construct
  source 1..19: mol_type = other RNA
gctaccagctttacaccca

SEQ ID NO: 5425 - RNA, 19 nt, synthetic construct
  source 1..19: mol_type = other RNA
gacccggatcctcactgag

SEQ ID NO: 5426 - RNA, 19 nt, synthetic construct
  source 1..19: mol_type = other RNA
gtgcaaccggtggcctgtg

SEQ ID NO: 5427 - RNA, 19 nt, synthetic construct
  source 1..19: mol_type = other RNA
cctcagctgtgttcgtaca

SEQ ID NO: 5428 - RNA, 19 nt, synthetic construct
  source 1..19: mol_type = other RNA
agcatgtgcgggcctatgt

SEQ ID NO: 5429 - RNA, 19 nt, synthetic construct
  source 1..19: mol_type = other RNA
tcgcaacggccaggtcaga

SEQ ID NO: 5430 - RNA, 19 nt, synthetic construct
  source 1..19: mol_type = other RNA
agcacctggggtgacttcc

SEQ ID NO: 5431 - RNA, 19 nt, synthetic construct
  source 1..19: mol_type = other RNA
gcgacgtcttccgcttccc

SEQ ID NO: 5432 - RNA, 19 nt, synthetic construct
  source 1..19: mol_type = other RNA
cgacgtcttccgcttccct

SEQ ID NO: 5433 - RNA, 19 nt, synthetic construct
  source 1..19: mol_type = other RNA
cactgccgcgccgcctacg

SEQ ID NO: 5434 - RNA, 19 nt, synthetic construct
  source 1..19: mol_type = other RNA
gctccgtcctcatcaatgg

SEQ ID NO: 5435 - RNA, 19 nt, synthetic construct
  source 1..19: mol_type = other RNA
ctgacattcctgtggaacg

SEQ ID NO: 5436 - RNA, 19 nt, synthetic construct
  source 1..19: mol_type = other RNA
gtggcctgtgtggggactt

SEQ ID NO: 5437 - RNA, 19 nt, synthetic construct
  source 1..19: mol_type = other RNA
tggcctgtgtggggacttc

SEQ ID NO: 5438 - RNA, 19 nt, synthetic construct
  source 1..19: mol_type = other RNA
tgtgtggggacttcaacgg

SEQ ID NO: 5439 - RNA, 19 nt, synthetic construct
  source 1..19: mol_type = other RNA
cacgcggggggccagccgc

SEQ ID NO: 5440 - RNA, 19 nt, synthetic construct
  source 1..19: mol_type = other RNA
atgcagcaccaggagtgtg

SEQ ID NO: 5441 - RNA, 19 nt, synthetic construct
  source 1..19: mol_type = other RNA
gctccaacccccagcgcgc

SEQ ID NO: 5442 - RNA, 19 nt, synthetic construct
  source 1..19: mol_type = other RNA
ctgtccaagaaatgtgccg

SEQ ID NO: 5443 - RNA, 19 nt, synthetic construct
  source 1..19: mol_type = other RNA
gagcttcttcatcgtggtg

SEQ ID NO: 5444 - RNA, 19 nt, synthetic construct
  source 1..19: mol_type = other RNA
cacggccctcagcggggtg

SEQ ID NO: 5445 - RNA, 19 nt, synthetic construct
  source 1..19: mol_type = other RNA
tacagctcagcgactggag

SEQ ID NO: 5446 - RNA, 19 nt, synthetic construct
  source 1..19: mol_type = other RNA
aactgccccaagtcccagc

SEQ ID NO: 5447 - RNA, 19 nt, synthetic construct
  source 1..19: mol_type = other RNA
cagcaacagctcggcgggc

SEQ ID NO: 5448 - RNA, 19 nt, synthetic construct
  source 1..19: mol_type = other RNA
caacagctcggcgggcacc

SEQ ID NO: 5449 - RNA, 19 nt, synthetic construct
  source 1..19: mol_type = other RNA
ttcatcacctttgatggcg

SEQ ID NO: 5450 - RNA, 19 nt, synthetic construct
  source 1..19: mol_type = other RNA
ggacaacaccacccacggg

SEQ ID NO: 5451 - RNA, 19 nt, synthetic construct
  source 1..19: mol_type = other RNA
tgcgggaacttcgacgaca

SEQ ID NO: 5452 - RNA, 19 nt, synthetic construct
  source 1..19: mol_type = other RNA
acgacaatgccatcaatga

SEQ ID NO: 5453 - RNA, 19 nt, synthetic construct
  source 1..19: mol_type = other RNA
acaatgccatcaatgactt

SEQ ID NO: 5454 - RNA, 19 nt, synthetic construct
  source 1..19: mol_type = other RNA
gtggcgactgcgagtgttt

SEQ ID NO: 5455 - RNA, 19 nt, synthetic construct
  source 1..19: mol_type = other RNA
caccgcctgggtcccccac

SEQ ID NO: 5456 - RNA, 19 nt, synthetic construct
  source 1..19: mol_type = other RNA
aaggtgcactgtgacgtcc

SEQ ID NO: 5457 - RNA, 19 nt, synthetic construct
  source 1..19: mol_type = other RNA
caggagggcgtcttcaaga

SEQ ID NO: 5458 - RNA, 19 nt, synthetic construct
  source 1..19: mol_type = other RNA
tctgctgcagtgacgacca

SEQ ID NO: 5459 - RNA, 19 nt, synthetic construct
  source 1..19: mol_type = other RNA
tgctgcagtgacgaccact

SEQ ID NO: 5460 - RNA, 19 nt, synthetic construct
  source 1..19: mol_type = other RNA
accacgggaggccccacga

SEQ ID NO: 5461 - RNA, 19 nt, synthetic construct
  source 1..19: mol_type = other RNA
gcccttccagggacgacgg

SEQ ID NO: 5462 - RNA, 19 nt, synthetic construct
  source 1..19: mol_type = other RNA
cacgctggccccaacaaca

SEQ ID NO: 5463 - RNA, 19 nt, synthetic construct
  source 1..19: mol_type = other RNA
gagctgtccacctctcagg

SEQ ID NO: 5464 - RNA, 19 nt, synthetic construct
  source 1..19: mol_type = other RNA
aatgagccccttgactaac

SEQ ID NO: 5465 - RNA, 19 nt, synthetic construct
  source 1..19: mol_type = other RNA
caccagccagggcacgacc

SEQ ID NO: 5466 - RNA, 19 nt, synthetic construct
  source 1..19: mol_type = other RNA
caccacaactggggccacc

SEQ ID NO: 5467 - RNA, 19 nt, synthetic construct
  source 1..19: mol_type = other RNA
aggaacagctcacactacc

SEQ ID NO: 5468 - RNA, 19 nt, synthetic construct
  source 1..19: mol_type = other RNA
acgcctccagtgtggatca

SEQ ID NO: 5469 - RNA, 19 nt, synthetic construct
  source 1..19: mol_type = other RNA
agcacaaccaccacaccca

SEQ ID NO: 5470 - RNA, 19 nt, synthetic construct
  source 1..19: mol_type = other RNA
gccactggttctatggcaa

SEQ ID NO: 5471 - RNA, 19 nt, synthetic construct
  source 1..19: mol_type = other RNA
aactcctgggacaactccc

SEQ ID NO: 5472 - RNA, 19 nt, synthetic construct
  source 1..19: mol_type = other RNA
ggccacctcgggcatcttg

SEQ ID NO: 5473 - RNA, 19 nt, synthetic construct
  source 1..19: mol_type = other RNA
gcagcaaccaccggtacca

SEQ ID NO: 5474 - RNA, 19 nt, synthetic construct
  source 1..19: mol_type = other RNA
actccaacatccgtgcggc

SEQ ID NO: 5475 - RNA, 19 nt, synthetic construct
  source 1..19: mol_type = other RNA
cggccaccagctctacggc

SEQ ID NO: 5476 - RNA, 19 nt, synthetic construct
  source 1..19: mol_type = other RNA
atccacggccaccccgtcc

SEQ ID NO: 5477 - RNA, 19 nt, synthetic construct
  source 1..19: mol_type = other RNA
accccacatgtgagcacca

SEQ ID NO: 5478 - RNA, 19 nt, synthetic construct
  source 1..19: mol_type = other RNA
ccactccagagactgtcca

SEQ ID NO: 5479 - RNA, 19 nt, synthetic construct
  source 1..19: mol_type = other RNA
cactccagagactgtccac

SEQ ID NO: 5480 - RNA, 19 nt, synthetic construct
  source 1..19: mol_type = other RNA
aggaacagctcacactacc

SEQ ID NO: 5481 - RNA, 19 nt, synthetic construct
  source 1..19: mol_type = other RNA
agcacaaccaccacaccca

SEQ ID NO: 5482 - RNA, 19 nt, synthetic construct
  source 1..19: mol_type = other RNA
gccactggttctatggcaa

SEQ ID NO: 5483 - RNA, 19 nt, synthetic construct
  source 1..19: mol_type = other RNA
gcagcaaccaccggtacca

SEQ ID NO: 5484 - RNA, 19 nt, synthetic construct
  source 1..19: mol_type = other RNA
actccaacatccgtgcggc

SEQ ID NO: 5485 - RNA, 19 nt, synthetic construct
  source 1..19: mol_type = other RNA
cggccaccagctctacggc

SEQ ID NO: 5486 - RNA, 19 nt, synthetic construct
  source 1..19: mol_type = other RNA
cacagagcagaccacagca

SEQ ID NO: 5487 - RNA, 19 nt, synthetic construct
  source 1..19: mol_type = other RNA
cctccagtccaaggactgc

SEQ ID NO: 5488 - RNA, 19 nt, synthetic construct
  source 1..19: mol_type = other RNA
ctcctccacccgggcaact

SEQ ID NO: 5489 - RNA, 19 nt, synthetic construct
  source 1..19: mol_type = other RNA
gcaactgctggcaccctca

SEQ ID NO: 5490 - RNA, 19 nt, synthetic construct
  source 1..19: mol_type = other RNA
aactgctggcaccctcaaa

SEQ ID NO: 5491 - RNA, 19 nt, synthetic construct
  source 1..19: mol_type = other RNA
cacagctaccagcgttaca

SEQ ID NO: 5492 - RNA, 19 nt, synthetic construct
  source 1..19: mol_type = other RNA
tactccagagactgtccac

SEQ ID NO: 5493 - RNA, 19 nt, synthetic construct
  source 1..19: mol_type = other RNA
aggaacagctcacactacc

SEQ ID NO: 5494 - RNA, 19 nt, synthetic construct
  source 1..19: mol_type = other RNA
acgcctccagtgtggatca

SEQ ID NO: 5495 - RNA, 19 nt, synthetic construct
  source 1..19: mol_type = other RNA
agcacaaccaccacaccca

SEQ ID NO: 5496 - RNA, 19 nt, synthetic construct
  source 1..19: mol_type = other RNA
gccactggttctatggcaa

SEQ ID NO: 5497 - RNA, 19 nt, synthetic construct
  source 1..19: mol_type = other RNA
ggccacctcgggcatcttg

SEQ ID NO: 5498 - RNA, 19 nt, synthetic construct
  source 1..19: mol_type = other RNA
actccaacatccgtgcggc

SEQ ID NO: 5499 - RNA, 19 nt, synthetic construct
  source 1..19: mol_type = other RNA
cggccaccagctctacggc

SEQ ID NO: 5500 - RNA, 19 nt, synthetic construct
  source 1..19: mol_type = other RNA
atccacggccaccccgtcc

SEQ ID NO: 5501 - RNA, 19 nt, synthetic construct
  source 1..19: mol_type = other RNA
accccacatgtgagcacca

SEQ ID NO: 5502 - RNA, 19 nt, synthetic construct
  source 1..19: mol_type = other RNA
aggaacagctcacactacc

SEQ ID NO: 5503 - RNA, 19 nt, synthetic construct
  source 1..19: mol_type = other RNA
acgcctccagtgtggatca

SEQ ID NO: 5504 - RNA, 19 nt, synthetic construct
  source 1..19: mol_type = other RNA
agcacaaccaccacaccca

SEQ ID NO: 5505 - RNA, 19 nt, synthetic construct
  source 1..19: mol_type = other RNA
gccactggttctatggcaa

SEQ ID NO: 5506 - RNA, 19 nt, synthetic construct
  source 1..19: mol_type = other RNA
actgatcaccacggccact

SEQ ID NO: 5507 - RNA, 19 nt, synthetic construct
  source 1..19: mol_type = other RNA
gcagcaaccaccggtacca

SEQ ID NO: 5508 - RNA, 19 nt, synthetic construct
  source 1..19: mol_type = other RNA
actccaacatccgtgcggc

SEQ ID NO: 5509 - RNA, 19 nt, synthetic construct
  source 1..19: mol_type = other RNA
cggccaccagctctacggc

SEQ ID NO: 5510 - RNA, 19 nt, synthetic construct
  source 1..19: mol_type = other RNA
atccacggccaccccgtcc

SEQ ID NO: 5511 - RNA, 19 nt, synthetic construct
  source 1..19: mol_type = other RNA
cctccagtccaaggactgc

SEQ ID NO: 5512 - RNA, 19 nt, synthetic construct
  source 1..19: mol_type = other RNA
agaccaccacacccgtggc

SEQ ID NO: 5513 - RNA, 19 nt, synthetic construct
  source 1..19: mol_type = other RNA
atccacggccaccccgtcc

SEQ ID NO: 5514 - RNA, 19 nt, synthetic construct
  source 1..19: mol_type = other RNA
accccacatgtgagcacca

SEQ ID NO: 5515 - RNA, 19 nt, synthetic construct
  source 1..19: mol_type = other RNA
ccactccagagactgtcca

SEQ ID NO: 5516 - RNA, 19 nt, synthetic construct
  source 1..19: mol_type = other RNA
cactccagagactgtccac

SEQ ID NO: 5517 - RNA, 19 nt, synthetic construct
  source 1..19: mol_type = other RNA
aggaacagctcacactacc

SEQ ID NO: 5518 - RNA, 19 nt, synthetic construct
  source 1..19: mol_type = other RNA
acgcctccagtgtggatca

SEQ ID NO: 5519 - RNA, 19 nt, synthetic construct
  source 1..19: mol_type = other RNA
agcacaaccaccacaccca

SEQ ID NO: 5520 - RNA, 19 nt, synthetic construct
  source 1..19: mol_type = other RNA
gccactggttctatggcaa

SEQ ID NO: 5521 - RNA, 19 nt, synthetic construct
  source 1..19: mol_type = other RNA
cctccagtccaaggactgc

SEQ ID NO: 5522 - RNA, 19 nt, synthetic construct
  source 1..19: mol_type = other RNA
ggccaccaattccacggcc

SEQ ID NO: 5523 - RNA, 19 nt, synthetic construct
  source 1..19: mol_type = other RNA
cactatgcccacagccact

SEQ ID NO: 5524 - RNA, 19 nt, synthetic construct
  source 1..19: mol_type = other RNA
gtggggaccacccgcaccc

SEQ ID NO: 5525 - RNA, 19 nt, synthetic construct
  source 1..19: mol_type = other RNA
cgcacccctgcagtgctcc

SEQ ID NO: 5526 - RNA, 19 nt, synthetic construct
  source 1..19: mol_type = other RNA
tgacattgaccgcttccag

SEQ ID NO: 5527 - RNA, 19 nt, synthetic construct
  source 1..19: mol_type = other RNA
ttgaccgcttccagggcgc

SEQ ID NO: 5528 - RNA, 19 nt, synthetic construct
  source 1..19: mol_type = other RNA
ggcggctcccactattcca

SEQ ID NO: 5529 - RNA, 19 nt, synthetic construct
  source 1..19: mol_type = other RNA
accttccggggcaactgca

SEQ ID NO: 5530 - RNA, 19 nt, synthetic construct
  source 1..19: mol_type = other RNA
ccttccggggcaactgcac

SEQ ID NO: 5531 - RNA, 19 nt, synthetic construct
  source 1..19: mol_type = other RNA
ctggacaaccactactgca

SEQ ID NO: 5532 - RNA, 19 nt, synthetic construct
  source 1..19: mol_type = other RNA
cccgcgccctcagcatcca

SEQ ID NO: 5533 - RNA, 19 nt, synthetic construct
  source 1..19: mol_type = other RNA
ggaccaccaccatgcgtgt

SEQ ID NO: 5534 - RNA, 19 nt, synthetic construct
  source 1..19: mol_type = other RNA
acatggccaagacgtggct

SEQ ID NO: 5535 - RNA, 19 nt, synthetic construct
  source 1..19: mol_type = other RNA
cacaaccttgtgcccccgg

SEQ ID NO: 5536 - RNA, 19 nt, synthetic construct
  source 1..19: mol_type = other RNA
gcagagctctgccgcgccc

SEQ ID NO: 5537 - RNA, 19 nt, synthetic construct
  source 1..19: mol_type = other RNA
cccaccaaagtgtacaagc

SEQ ID NO: 5538 - RNA, 19 nt, synthetic construct
  source 1..19: mol_type = other RNA
gccacctgcaactctagga

SEQ ID NO: 5539 - RNA, 19 nt, synthetic construct
  source 1..19: mol_type = other RNA
ccacctgcaactctaggaa

SEQ ID NO: 5540 - RNA, 19 nt, synthetic construct
  source 1..19: mol_type = other RNA
acctgcaactctaggaacc

SEQ ID NO: 5541 - RNA, 19 nt, synthetic construct
  source 1..19: mol_type = other RNA
ccctgaggaccagatcctc

SEQ ID NO: 5542 - RNA, 19 nt, synthetic construct
  source 1..19: mol_type = other RNA
gtttcctaaatttcccggg

SEQ ID NO: 5543 - RNA, 19 nt, synthetic construct
  source 1..19: mol_type = other RNA
tcctgcgtgtgtgacgagg

SEQ ID NO: 5544 - RNA, 19 nt, synthetic construct
  source 1..19: mol_type = other RNA
tgccacatgtgtacctgcc

SEQ ID NO: 5545 - RNA, 19 nt, synthetic construct
  source 1..19: mol_type = other RNA
cctgcaacaatactacctg

SEQ ID NO: 5546 - RNA, 19 nt, synthetic construct
  source 1..19: mol_type = other RNA
catcaccttctgcgagggc

SEQ ID NO: 5547 - RNA, 19 nt, synthetic construct
  source 1..19: mol_type = other RNA
tcaccttctgcgagggctc

SEQ ID NO: 5548 - RNA, 19 nt, synthetic construct
  source 1..19: mol_type = other RNA
gacggtgcccttgcactgt

SEQ ID NO: 5549 - RNA, 19 nt, synthetic construct
  source 1..19: mol_type = other RNA
cccacacacccgtggcttc

SEQ ID NO: 5550 - RNA, 19 nt, synthetic construct
  source 1..19: mol_type = other RNA
tggagccaggatgtgcatt

SEQ ID NO: 5551 - RNA, 19 nt, synthetic construct
  source 1..19: mol_type = other RNA
ggagccaggatgtgcattg

SEQ ID NO: 5552 - RNA, 19 nt, synthetic construct
  source 1..19: mol_type = other RNA
aaggcggccgcctgtccat

SEQ ID NO: 5553 - RNA, 19 nt, synthetic construct
  source 1..19: mol_type = other RNA
acggtgcccttgcactgtc

SEQ ID NO: 5554 - RNA, 19 nt, synthetic construct
  source 1..19: mol_type = other RNA
ccaacccccagcgcgcgca

SEQ ID NO: 5555 - RNA, 19 nt, synthetic construct
  source 1..19: mol_type = other RNA
cgcctgtgtgcccgcccag

SEQ ID NO: 5556 - RNA, 19 nt, synthetic construct
  source 1..19: mol_type = other RNA
aaggctgctacccgaagtg

SEQ ID NO: 5557 - RNA, 19 nt, synthetic construct
  source 1..19: mol_type = other RNA
tgtggctgctacgacaagg

SEQ ID NO: 5558 - RNA, 19 nt, synthetic construct
  source 1..19: mol_type = other RNA
cgagtgccgggcggcgcag

SEQ ID NO: 5559 - RNA, 19 nt, synthetic construct
  source 1..19: mol_type = other RNA
gcggccctcacctcgcaga

SEQ ID NO: 5560 - RNA, 19 nt, synthetic construct
  source 1..19: mol_type = other RNA
ctcggccccaggtaccacc

SEQ ID NO: 5561 - RNA, 19 nt, synthetic construct
  source 1..19: mol_type = other RNA
aggtgcactgtgacgtcca

SEQ ID NO: 5562 - RNA, 19 nt, synthetic construct
  source 1..19: mol_type = other RNA
ttccagggacgacggggag

SEQ ID NO: 5563 - RNA, 19 nt, synthetic construct
  source 1..19: mol_type = other RNA
acatcggcccccataacca

SEQ ID NO: 5564 - RNA, 19 nt, synthetic construct
  source 1..19: mol_type = other RNA
ccacggggacttcccacac

SEQ ID NO: 5565 - RNA, 19 nt, synthetic construct
  source 1..19: mol_type = other RNA
cagccccacatcggcccca

SEQ ID NO: 5566 - RNA, 19 nt, synthetic construct
  source 1..19: mol_type = other RNA
ccttgggaccaccgggacc

SEQ ID NO: 5567 - RNA, 19 nt, synthetic construct
  source 1..19: mol_type = other RNA
acatcggcccccataacca

SEQ ID NO: 5568 - RNA, 19 nt, synthetic construct
  source 1..19: mol_type = other RNA
ccacggggacttcccacac

SEQ ID NO: 5569 - RNA, 19 nt, synthetic construct
  source 1..19: mol_type = other RNA
acatcggcccccataacca

SEQ ID NO: 5570 - RNA, 19 nt, synthetic construct
  source 1..19: mol_type = other RNA
ccttgggaccaccgggacc

SEQ ID NO: 5571 - RNA, 19 nt, synthetic construct
  source 1..19: mol_type = other RNA
ccacacacccgtggcttcc

SEQ ID NO: 5572 - RNA, 19 nt, synthetic construct
  source 1..19: mol_type = other RNA
ccggccttcaacgagttct

SEQ ID NO: 5573 - RNA, 19 nt, synthetic construct
  source 1..19: mol_type = other RNA
gcgcctgaccgatcccaac

SEQ ID NO: 5574 - RNA, 19 nt, synthetic construct
  source 1..19: mol_type = other RNA
cacggccatcccgtcctcc

SEQ ID NO: 5575 - RNA, 19 nt, synthetic construct
  source 1..19: mol_type = other RNA
tttacacccatcccctcct

SEQ ID NO: 5576 - RNA, 19 nt, synthetic construct
  source 1..19: mol_type = other RNA
tgcccttgcactgtcctaa

SEQ ID NO: 5577 - RNA, 19 nt, synthetic construct
  source 1..19: mol_type = other RNA
gtgggggctgcattgccga

SEQ ID NO: 5578 - RNA, 19 nt, synthetic construct
  source 1..19: mol_type = other RNA
ggactgcccctgtgtgcac

SEQ ID NO: 5579 - RNA, 19 nt, synthetic construct
  source 1..19: mol_type = other RNA
aggctgctacccgaagtgc

SEQ ID NO: 5580 - RNA, 19 nt, synthetic construct
  source 1..19: mol_type = other RNA
gtggctgctacgacaagga

SEQ ID NO: 5581 - RNA, 19 nt, synthetic construct
  source 1..19: mol_type = other RNA
cgaaaagaccaccctatgg

SEQ ID NO: 5582 - RNA, 19 nt, synthetic construct
  source 1..19: mol_type = other RNA
cggccctcacctcgcagac

SEQ ID NO: 5583 - RNA, 19 nt, synthetic construct
  source 1..19: mol_type = other RNA
ctgctgcagtgacgaccac

SEQ ID NO: 5584 - RNA, 19 nt, synthetic construct
  source 1..19: mol_type = other RNA
cgcctccagtgtggatcag

SEQ ID NO: 5585 - RNA, 19 nt, synthetic construct
  source 1..19: mol_type = other RNA
caccctcctctagcacaca

SEQ ID NO: 5586 - RNA, 19 nt, synthetic construct
  source 1..19: mol_type = other RNA
tctgccctagggaccaccc

SEQ ID NO: 5587 - RNA, 19 nt, synthetic construct
  source 1..19: mol_type = other RNA
ttcggccacctcgggcatc

SEQ ID NO: 5588 - RNA, 19 nt, synthetic construct
  source 1..19: mol_type = other RNA
cagagtggctggactacag

SEQ ID NO: 5589 - RNA, 19 nt, synthetic construct
  source 1..19: mol_type = other RNA
caccctcctctagcacaca

SEQ ID NO: 5590 - RNA, 19 nt, synthetic construct
  source 1..19: mol_type = other RNA
tctgccctagggaccaccc

SEQ ID NO: 5591 - RNA, 19 nt, synthetic construct
  source 1..19: mol_type = other RNA
cagagtggctggactacag

SEQ ID NO: 5592 - RNA, 19 nt, synthetic construct
  source 1..19: mol_type = other RNA
gcaaccacccttccagtgc

SEQ ID NO: 5593 - RNA, 19 nt, synthetic construct
  source 1..19: mol_type = other RNA
accgcctggacccgcctat

SEQ ID NO: 5594 - RNA, 19 nt, synthetic construct
  source 1..19: mol_type = other RNA
cgcctccagtgtggatcag

SEQ ID NO: 5595 - RNA, 19 nt, synthetic construct
  source 1..19: mol_type = other RNA
caccctcctctagcacaca

SEQ ID NO: 5596 - RNA, 19 nt, synthetic construct
  source 1..19: mol_type = other RNA
gatcacagccaccggctcc

SEQ ID NO: 5597 - RNA, 19 nt, synthetic construct
  source 1..19: mol_type = other RNA
tctgccctagggaccaccc

SEQ ID NO: 5598 - RNA, 19 nt, synthetic construct
  source 1..19: mol_type = other RNA
ttcggccacctcgggcatc

SEQ ID NO: 5599 - RNA, 19 nt, synthetic construct
  source 1..19: mol_type = other RNA
cagagtggctggactacag

SEQ ID NO: 5600 - RNA, 19 nt, synthetic construct
  source 1..19: mol_type = other RNA
cgcctccagtgtggatcag

SEQ ID NO: 5601 - RNA, 19 nt, synthetic construct
  source 1..19: mol_type = other RNA
caccctcctctagcacaca

SEQ ID NO: 5602 - RNA, 19 nt, synthetic construct
  source 1..19: mol_type = other RNA
tctgccctagggaccaccc

SEQ ID NO: 5603 - RNA, 19 nt, synthetic construct
  source 1..19: mol_type = other RNA
cagagtggctggactacag

SEQ ID NO: 5604 - RNA, 19 nt, synthetic construct
  source 1..19: mol_type = other RNA
gcaaccacccttccagtgc

SEQ ID NO: 5605 - RNA, 19 nt, synthetic construct
  source 1..19: mol_type = other RNA
cgcctccagtgtggatcag

SEQ ID NO: 5606 - RNA, 19 nt, synthetic construct
  source 1..19: mol_type = other RNA
caccctcctctagcacaca

SEQ ID NO: 5607 - RNA, 19 nt, synthetic construct
  source 1..19: mol_type = other RNA
gcaaccacccttccagtgc

SEQ ID NO: 5608 - RNA, 19 nt, synthetic construct
  source 1..19: mol_type = other RNA
ctccagagaccacccacac

SEQ ID NO: 5609 - RNA, 19 nt, synthetic construct
  source 1..19: mol_type = other RNA
cagagaccacccacacctc

SEQ ID NO: 5610 - RNA, 19 nt, synthetic construct
  source 1..19: mol_type = other RNA
ggtggcctgtgcgacctca

SEQ ID NO: 5611 - RNA, 19 nt, synthetic construct
  source 1..19: mol_type = other RNA
ttgtctgatcatgaaaacc

SEQ ID NO: 5612 - RNA, 19 nt, synthetic construct
  source 1..19: mol_type = other RNA
gcaacagctcggcgggcac

SEQ ID NO: 5613 - RNA, 19 nt, synthetic construct
  source 1..19: mol_type = other RNA
catctccacctatgatgag

SEQ ID NO: 5614 - RNA, 19 nt, synthetic construct
  source 1..19: mol_type = other RNA
gcgagaccgaggtcaacat

SEQ ID NO: 5615 - RNA, 19 nt, synthetic construct
  source 1..19: mol_type = other RNA
ccacgcactggtggacagc

SEQ ID NO: 5616 - RNA, 19 nt, synthetic construct
  source 1..19: mol_type = other RNA
gctgctacccgaagtgccc

SEQ ID NO: 5617 - RNA, 19 nt, synthetic construct
  source 1..19: mol_type = other RNA
ggcgcagcttcccgacatg

SEQ ID NO: 5618 - RNA, 19 nt, synthetic construct
  source 1..19: mol_type = other RNA
catcactgaccaccacggc

SEQ ID NO: 5619 - RNA, 19 nt, synthetic construct
  source 1..19: mol_type = other RNA
ccccgggccacaccacggc

SEQ ID NO: 5620 - RNA, 19 nt, synthetic construct
  source 1..19: mol_type = other RNA
caagacccgcacctcgacc

SEQ ID NO: 5621 - RNA, 19 nt, synthetic construct
  source 1..19: mol_type = other RNA
catcactgaccaccacggc

SEQ ID NO: 5622 - RNA, 19 nt, synthetic construct
  source 1..19: mol_type = other RNA
caagacccgcacctcgacc

SEQ ID NO: 5623 - RNA, 19 nt, synthetic construct
  source 1..19: mol_type = other RNA
ccactccggagaccaccca

SEQ ID NO: 5624 - RNA, 19 nt, synthetic construct
  source 1..19: mol_type = other RNA
catcactgaccaccacggc

SEQ ID NO: 5625 - RNA, 19 nt, synthetic construct
  source 1..19: mol_type = other RNA
caagacccgcacctcgacc

SEQ ID NO: 5626 - RNA, 19 nt, synthetic construct
  source 1..19: mol_type = other RNA
ccccgggccacaccacggc

SEQ ID NO: 5627 - RNA, 19 nt, synthetic construct
  source 1..19: mol_type = other RNA
caagacccgcacctcgacc

SEQ ID NO: 5628 - RNA, 19 nt, synthetic construct
  source 1..19: mol_type = other RNA
gttacacccatcccctcct

SEQ ID NO: 5629 - RNA, 19 nt, synthetic construct
  source 1..19: mol_type = other RNA
ccactccggagaccaccca

SEQ ID NO: 5630 - RNA, 19 nt, synthetic construct
  source 1..19: mol_type = other RNA
catcactgaccaccacggc

SEQ ID NO: 5631 - RNA, 19 nt, synthetic construct
  source 1..19: mol_type = other RNA
tttacacccatcccctcct

SEQ ID NO: 5632 - RNA, 19 nt, synthetic construct
  source 1..19: mol_type = other RNA
tgtctgagaacgttctgcc

SEQ ID NO: 5633 - RNA, 19 nt, synthetic construct
  source 1..19: mol_type = other RNA
ccaacggctccgtcctcat

SEQ ID NO: 5634 - RNA, 19 nt, synthetic construct
  source 1..19: mol_type = other RNA
tcctcatcaatgggcagcg

SEQ ID NO: 5635 - RNA, 19 nt, synthetic construct
  source 1..19: mol_type = other RNA
tccggctggtgctgacatt

SEQ ID NO: 5636 - RNA, 19 nt, synthetic construct
  source 1..19: mol_type = other RNA
catgcagcaccaggagtgt

SEQ ID NO: 5637 - RNA, 19 nt, synthetic construct
  source 1..19: mol_type = other RNA
tgcgaggaccactgtgtgg

SEQ ID NO: 5638 - RNA, 19 nt, synthetic construct
  source 1..19: mol_type = other RNA
acggtgctggatgacatca

SEQ ID NO: 5639 - RNA, 19 nt, synthetic construct
  source 1..19: mol_type = other RNA
atctccacctatgatgaga

SEQ ID NO: 5640 - RNA, 19 nt, synthetic construct
  source 1..19: mol_type = other RNA
cctgacggacaacgagaac

SEQ ID NO: 5641 - RNA, 19 nt, synthetic construct
  source 1..19: mol_type = other RNA
ctgcctgaaagcggtgacg

SEQ ID NO: 5642 - RNA, 19 nt, synthetic construct
  source 1..19: mol_type = other RNA
ggtccaagcggacggcggc

SEQ ID NO: 5643 - RNA, 19 nt, synthetic construct
  source 1..19: mol_type = other RNA
catcgtggtgcagacaggc

SEQ ID NO: 5644 - RNA, 19 nt, synthetic construct
  source 1..19: mol_type = other RNA
gtacagctcagcgactgga

SEQ ID NO: 5645 - RNA, 19 nt, synthetic construct
  source 1..19: mol_type = other RNA
agaggtggtgcacgacgag

SEQ ID NO: 5646 - RNA, 19 nt, synthetic construct
  source 1..19: mol_type = other RNA
catcacctttgatggcgat

SEQ ID NO: 5647 - RNA, 19 nt, synthetic construct
  source 1..19: mol_type = other RNA
gcgagtacatcttggccca

SEQ ID NO: 5648 - RNA, 19 nt, synthetic construct
  source 1..19: mol_type = other RNA
caggcctgccacgacgcgg

SEQ ID NO: 5649 - RNA, 19 nt, synthetic construct
  source 1..19: mol_type = other RNA
tgaggacaggacctacagc

SEQ ID NO: 5650 - RNA, 19 nt, synthetic construct
  source 1..19: mol_type = other RNA
ggtggactgtgaccgcatg

SEQ ID NO: 5651 - RNA, 19 nt, synthetic construct
  source 1..19: mol_type = other RNA
tcggccccaggtaccacca

SEQ ID NO: 5652 - RNA, 19 nt, synthetic construct
  source 1..19: mol_type = other RNA
acgtccacttcggcctggt

SEQ ID NO: 5653 - RNA, 19 nt, synthetic construct
  source 1..19: mol_type = other RNA
cgagtagcccggggctgac

SEQ ID NO: 5654 - RNA, 19 nt, synthetic construct
  source 1..19: mol_type = other RNA
tgacatcccccagatacac

SEQ ID NO: 5655 - RNA, 19 nt, synthetic construct
  source 1..19: mol_type = other RNA
caacacgctcagcccttcc

SEQ ID NO: 5656 - RNA, 19 nt, synthetic construct
  source 1..19: mol_type = other RNA
tcggccacctcgggcatct

SEQ ID NO: 5657 - RNA, 19 nt, synthetic construct
  source 1..19: mol_type = other RNA
caccgagtcacccccttct

SEQ ID NO: 5658 - RNA, 19 nt, synthetic construct
  source 1..19: mol_type = other RNA
caccgagtcacccccttct

SEQ ID NO: 5659 - RNA, 19 nt, synthetic construct
  source 1..19: mol_type = other RNA
gagaccacccacacctcca

SEQ ID NO: 5660 - RNA, 19 nt, synthetic construct
  source 1..19: mol_type = other RNA
cctgggcaccgcctggacc

SEQ ID NO: 5661 - RNA, 19 nt, synthetic construct
  source 1..19: mol_type = other RNA
tcggccacctcgggcatct

SEQ ID NO: 5662 - RNA, 19 nt, synthetic construct
  source 1..19: mol_type = other RNA
caccgagtcacccccttct

SEQ ID NO: 5663 - RNA, 19 nt, synthetic construct
  source 1..19: mol_type = other RNA
tgtccccctgggggagttg

SEQ ID NO: 5664 - RNA, 19 nt, synthetic construct
  source 1..19: mol_type = other RNA
gagaccacccacacctcca

SEQ ID NO: 5665 - RNA, 19 nt, synthetic construct
  source 1..19: mol_type = other RNA
gagaccacccacacctcca

SEQ ID NO: 5666 - RNA, 19 nt, synthetic construct
  source 1..19: mol_type = other RNA
cggttccacggccaccgcc

SEQ ID NO: 5667 - RNA, 19 nt, synthetic construct
  source 1..19: mol_type = other RNA
gtgacattgaccgcttcca

SEQ ID NO: 5668 - RNA, 19 nt, synthetic construct
  source 1..19: mol_type = other RNA
cttccagggcgcctgtccc

SEQ ID NO: 5669 - RNA, 19 nt, synthetic construct
  source 1..19: mol_type = other RNA
cagtgtcctccgccccgct

SEQ ID NO: 5670 - RNA, 19 nt, synthetic construct
  source 1..19: mol_type = other RNA
cctgtggccaacgtcacct

SEQ ID NO: 5671 - RNA, 19 nt, synthetic construct
  source 1..19: mol_type = other RNA
agatccatgcacgctttgg

SEQ ID NO: 5672 - RNA, 19 nt, synthetic construct
  source 1..19: mol_type = other RNA
catggccaagacgtggctg

SEQ ID NO: 5673 - RNA, 19 nt, synthetic construct
  source 1..19: mol_type = other RNA
gtggcctgtgcgacctcac

SEQ ID NO: 5674 - RNA, 19 nt, synthetic construct
  source 1..19: mol_type = other RNA
cctgcaactctaggaacca

SEQ ID NO: 5675 - RNA, 19 nt, synthetic construct
  source 1..19: mol_type = other RNA
cctgctgccccgagacggt

SEQ ID NO: 5676 - RNA, 19 nt, synthetic construct
  source 1..19: mol_type = other RNA
gaggagggcgactgctgtc

SEQ ID NO: 5677 - RNA, 19 nt, synthetic construct
  source 1..19: mol_type = other RNA
cgtgtacctctgtgaggct

SEQ ID NO: 5678 - RNA, 19 nt, synthetic construct
  source 1..19: mol_type = other RNA
ctgcgcccatggctccccc

SEQ ID NO: 5679 - RNA, 19 nt, synthetic construct
  source 1..19: mol_type = other RNA
tgaaaccggccccagaagg

SEQ ID NO: 5680 - RNA, 19 nt, synthetic construct
  source 1..19: mol_type = other RNA
ctgccacggccggagcgcc

SEQ ID NO: 5681 - RNA, 19 nt, synthetic construct
  source 1..19: mol_type = other RNA
cggagcgcccgcgcagcac

SEQ ID NO: 5682 - RNA, 19 nt, synthetic construct
  source 1..19: mol_type = other RNA
gccgctggggcagacaggc

SEQ ID NO: 5683 - RNA, 19 nt, synthetic construct
  source 1..19: mol_type = other RNA
gccgcctgtccatgcctgc

SEQ ID NO: 5684 - RNA, 19 nt, synthetic construct
  source 1..19: mol_type = other RNA
cggcctgacggacaacgag

SEQ ID NO: 5685 - RNA, 19 nt, synthetic construct
  source 1..19: mol_type = other RNA
tggcgatcgctacagcttt

SEQ ID NO: 5686 - RNA, 19 nt, synthetic construct
  source 1..19: mol_type = other RNA
tacaatgggcaccgcccag

SEQ ID NO: 5687 - RNA, 19 nt, synthetic construct
  source 1..19: mol_type = other RNA
tggcggggactttgacacc

SEQ ID NO: 5688 - RNA, 19 nt, synthetic construct
  source 1..19: mol_type = other RNA
tggcggggactttgacacc

SEQ ID NO: 5689 - RNA, 19 nt, synthetic construct
  source 1..19: mol_type = other RNA
tggcggggactttgacacc

SEQ ID NO: 5690 - RNA, 19 nt, synthetic construct
  source 1..19: mol_type = other RNA
tggcggggactttgacacc

SEQ ID NO: 5691 - RNA, 19 nt, synthetic construct
  source 1..19: mol_type = other RNA
ggggactacatcaaggtca

SEQ ID NO: 5692 - RNA, 19 nt, synthetic construct
  source 1..19: mol_type = other RNA
gcgtacctggccgcctgcg

SEQ ID NO: 5693 - RNA, 19 nt, synthetic construct
  source 1..19: mol_type = other RNA
tcgcgcctgaccgatccca

SEQ ID NO: 5694 - RNA, 19 nt, synthetic construct
  source 1..19: mol_type = other RNA
aatactacctgtccccagg

SEQ ID NO: 5695 - RNA, 19 nt, synthetic construct
  source 1..19: mol_type = other RNA
gaccgaggtcaacatcacc

SEQ ID NO: 5696 - RNA, 19 nt, synthetic construct
  source 1..19: mol_type = other RNA
ggtcgcaacggccaggtca

SEQ ID NO: 5697 - RNA, 19 nt, synthetic construct
  source 1..19: mol_type = other RNA
ctggtgtcggatgggagtg

SEQ ID NO: 5698 - RNA, 19 nt, synthetic construct
  source 1..19: mol_type = other RNA
atgcggccccatacagcct

SEQ ID NO: 5699 - RNA, 19 nt, synthetic construct
  source 1..19: mol_type = other RNA
tgtggggacttcaacggcc

SEQ ID NO: 5700 - RNA, 19 nt, synthetic construct
  source 1..19: mol_type = other RNA
cacggacgaggagggcatc

SEQ ID NO: 5701 - RNA, 19 nt, synthetic construct
  source 1..19: mol_type = other RNA
agctctgcgaggaccactg

SEQ ID NO: 5702 - RNA, 19 nt, synthetic construct
  source 1..19: mol_type = other RNA
caacaccacccacgggacc

SEQ ID NO: 5703 - RNA, 19 nt, synthetic construct
  source 1..19: mol_type = other RNA
ctgctacccgaagtgccca

SEQ ID NO: 5704 - RNA, 19 nt, synthetic construct
  source 1..19: mol_type = other RNA
tgctacccgaagtgcccac

SEQ ID NO: 5705 - RNA, 19 nt, synthetic construct
  source 1..19: mol_type = other RNA
gatcgccatctgcggaagc

SEQ ID NO: 5706 - RNA, 19 nt, synthetic construct
  source 1..19: mol_type = other RNA
ctcgcccgacaggcacagc

SEQ ID NO: 5707 - RNA, 19 nt, synthetic construct
  source 1..19: mol_type = other RNA
ccgagtcacccccttctcc

SEQ ID NO: 5708 - RNA, 19 nt, synthetic construct
  source 1..19: mol_type = other RNA
catccgtgcggccggaggg

SEQ ID NO: 5709 - RNA, 19 nt, synthetic construct
  source 1..19: mol_type = other RNA
ccgagtcacccccttctcc

SEQ ID NO: 5710 - RNA, 19 nt, synthetic construct
  source 1..19: mol_type = other RNA
catccgtgcggccggaggg

SEQ ID NO: 5711 - RNA, 19 nt, synthetic construct
  source 1..19: mol_type = other RNA
ccgagtcacccccttctcc

SEQ ID NO: 5712 - RNA, 19 nt, synthetic construct
  source 1..19: mol_type = other RNA
catccgtgcggccggaggg

SEQ ID NO: 5713 - RNA, 19 nt, synthetic construct
  source 1..19: mol_type = other RNA
catccgtgcggccggaggg

SEQ ID NO: 5714 - RNA, 19 nt, synthetic construct
  source 1..19: mol_type = other RNA
gcgttacacccatcccctc

SEQ ID NO: 5715 - RNA, 19 nt, synthetic construct
  source 1..19: mol_type = other RNA
gtgtgcaacacaaccacct

SEQ ID NO: 5716 - RNA, 19 nt, synthetic construct
  source 1..19: mol_type = other RNA
cgcacaatgggcgggtgtg

SEQ ID NO: 5717 - RNA, 19 nt, synthetic construct
  source 1..19: mol_type = other RNA
gacgtcttccgcttccctg

SEQ ID NO: 5718 - RNA, 19 nt, synthetic construct
  source 1..19: mol_type = other RNA
cgtccagctacgccgaggc

SEQ ID NO: 5719 - RNA, 19 nt, synthetic construct
  source 1..19: mol_type = other RNA
cttacagccgcactggcct

SEQ ID NO: 5720 - RNA, 19 nt, synthetic construct
  source 1..19: mol_type = other RNA
agcggggactacatcaagg

SEQ ID NO: 5721 - RNA, 19 nt, synthetic construct
  source 1..19: mol_type = other RNA
ctgcgtacctggccgcctg

SEQ ID NO: 5722 - RNA, 19 nt, synthetic construct
  source 1..19: mol_type = other RNA
tgcgtacctggccgcctgc

SEQ ID NO: 5723 - RNA, 19 nt, synthetic construct
  source 1..19: mol_type = other RNA
ctacagcccgggcacctcc

SEQ ID NO: 5724 - RNA, 19 nt, synthetic construct
  source 1..19: mol_type = other RNA
atgtgccgacagcagcttc

SEQ ID NO: 5725 - RNA, 19 nt, synthetic construct
  source 1..19: mol_type = other RNA
cagctcagcgactggaggg

SEQ ID NO: 5726 - RNA, 19 nt, synthetic construct
  source 1..19: mol_type = other RNA
ctacgtggtggatgcctgc

SEQ ID NO: 5727 - RNA, 19 nt, synthetic construct
  source 1..19: mol_type = other RNA
acgtggtggatgcctgcca

SEQ ID NO: 5728 - RNA, 19 nt, synthetic construct
  source 1..19: mol_type = other RNA
ggaagctaagctgcctggg

SEQ ID NO: 5729 - RNA, 19 nt, synthetic construct
  source 1..19: mol_type = other RNA
tggtgtcggatgggagtgg

SEQ ID NO: 5730 - RNA, 19 nt, synthetic construct
  source 1..19: mol_type = other RNA
gtaactgcacacccagtgg

SEQ ID NO: 5731 - RNA, 19 nt, synthetic construct
  source 1..19: mol_type = other RNA
acgacaagcccggccctcc

SEQ ID NO: 5732 - RNA, 19 nt, synthetic construct
  source 1..19: mol_type = other RNA
ttgagacgtttgaaaacct

SEQ ID NO: 5733 - RNA, 19 nt, synthetic construct
  source 1..19: mol_type = other RNA
ctgtgaccgcatgcggggg

SEQ ID NO: 5734 - RNA, 19 nt, synthetic construct
  source 1..19: mol_type = other RNA
acaagcacccttggtacag

SEQ ID NO: 5735 - RNA, 19 nt, synthetic construct
  source 1..19: mol_type = other RNA
ccccttgactaacaccacc

SEQ ID NO: 5736 - RNA, 19 nt, synthetic construct
  source 1..19: mol_type = other RNA
caccccgacctccaccctg

SEQ ID NO: 5737 - RNA, 19 nt, synthetic construct
  source 1..19: mol_type = other RNA
cagcactcgactccagccc

SEQ ID NO: 5738 - RNA, 19 nt, synthetic construct
  source 1..19: mol_type = other RNA
acatccgtgcggccggagg

SEQ ID NO: 5739 - RNA, 19 nt, synthetic construct
  source 1..19: mol_type = other RNA
cagcactcgactccagccc

SEQ ID NO: 5740 - RNA, 19 nt, synthetic construct
  source 1..19: mol_type = other RNA
acatccgtgcggccggagg

SEQ ID NO: 5741 - RNA, 19 nt, synthetic construct
  source 1..19: mol_type = other RNA
cagcactcgactccagccc

SEQ ID NO: 5742 - RNA, 19 nt, synthetic construct
  source 1..19: mol_type = other RNA
acatccgtgcggccggagg

SEQ ID NO: 5743 - RNA, 19 nt, synthetic construct
  source 1..19: mol_type = other RNA
cactgatcaccacggccac

SEQ ID NO: 5744 - RNA, 19 nt, synthetic construct
  source 1..19: mol_type = other RNA
cagcactcgactccagccc

SEQ ID NO: 5745 - RNA, 19 nt, synthetic construct
  source 1..19: mol_type = other RNA
acatccgtgcggccggagg

SEQ ID NO: 5746 - RNA, 19 nt, synthetic construct
  source 1..19: mol_type = other RNA
cccccaaagtggtgaccac

SEQ ID NO: 5747 - RNA, 19 nt, synthetic construct
  source 1..19: mol_type = other RNA
ctgcctccacggttcccag

SEQ ID NO: 5748 - RNA, 19 nt, synthetic construct
  source 1..19: mol_type = other RNA
aagcctgtggccaacgtca

SEQ ID NO: 5749 - RNA, 19 nt, synthetic construct
  source 1..19: mol_type = other RNA
ttccggggcaactgcacct

SEQ ID NO: 5750 - RNA, 19 nt, synthetic construct
  source 1..19: mol_type = other RNA
agcgaccactgcaggggcc

SEQ ID NO: 5751 - RNA, 19 nt, synthetic construct
  source 1..19: mol_type = other RNA
ctggaggcttacgcagagc

SEQ ID NO: 5752 - RNA, 19 nt, synthetic construct
  source 1..19: mol_type = other RNA
tggaggcttacgcagagct

SEQ ID NO: 5753 - RNA, 19 nt, synthetic construct
  source 1..19: mol_type = other RNA
gagacggtgtgcgtgtgca

SEQ ID NO: 5754 - RNA, 19 nt, synthetic construct
  source 1..19: mol_type = other RNA
gcatcaacacgaccatcct

SEQ ID NO: 5755 - RNA, 19 nt, synthetic construct
  source 1..19: mol_type = other RNA
cgaggtcaacatcaccttc

SEQ ID NO: 5756 - RNA, 19 nt, synthetic construct
  source 1..19: mol_type = other RNA
cccgtccccccacccgtgc

SEQ ID NO: 5757 - RNA, 19 nt, synthetic construct
  source 1..19: mol_type = other RNA
cgtgccagcccccaggatg

SEQ ID NO: 5758 - RNA, 19 nt, synthetic construct
  source 1..19: mol_type = other RNA
ggcggccatgctcgtggtg

SEQ ID NO: 5759 - RNA, 19 nt, synthetic construct
  source 1..19: mol_type = other RNA
gccgagctgggagaatgca

SEQ ID NO: 5760 - RNA, 19 nt, synthetic construct
  source 1..19: mol_type = other RNA
agaatgcagggcacaccat

SEQ ID NO: 5761 - RNA, 19 nt, synthetic construct
  source 1..19: mol_type = other RNA
gtgccccgacgtcctcgcc

SEQ ID NO: 5762 - RNA, 19 nt, synthetic construct
  source 1..19: mol_type = other RNA
gagccccctgaacccggcg

SEQ ID NO: 5763 - RNA, 19 nt, synthetic construct
  source 1..19: mol_type = other RNA
gcgcacaatgggcgggtgt

SEQ ID NO: 5764 - RNA, 19 nt, synthetic construct
  source 1..19: mol_type = other RNA
gcacaatgggcgggtgtgc

SEQ ID NO: 5765 - RNA, 19 nt, synthetic construct
  source 1..19: mol_type = other RNA
acgtcttccgcttccctgg

SEQ ID NO: 5766 - RNA, 19 nt, synthetic construct
  source 1..19: mol_type = other RNA
cgtcttccgcttccctggc

SEQ ID NO: 5767 - RNA, 19 nt, synthetic construct
  source 1..19: mol_type = other RNA
acgtgttctctgagcactg

SEQ ID NO: 5768 - RNA, 19 nt, synthetic construct
  source 1..19: mol_type = other RNA
tgagcactgccgcgccgcc

SEQ ID NO: 5769 - RNA, 19 nt, synthetic construct
  source 1..19: mol_type = other RNA
gcactgccgcgccgcctac

SEQ ID NO: 5770 - RNA, 19 nt, synthetic construct
  source 1..19: mol_type = other RNA
aacggctccgtcctcatca

SEQ ID NO: 5771 - RNA, 19 nt, synthetic construct
  source 1..19: mol_type = other RNA
ctccgtcctcatcaatggg

SEQ ID NO: 5772 - RNA, 19 nt, synthetic construct
  source 1..19: mol_type = other RNA
ctcatcaatgggcagcggg

SEQ ID NO: 5773 - RNA, 19 nt, synthetic construct
  source 1..19: mol_type = other RNA
ggtgctgacattcctgtgg

SEQ ID NO: 5774 - RNA, 19 nt, synthetic construct
  source 1..19: mol_type = other RNA
attcctgtggaacggagag

SEQ ID NO: 5775 - RNA, 19 nt, synthetic construct
  source 1..19: mol_type = other RNA
ccggacccgctgcccttgc

SEQ ID NO: 5776 - RNA, 19 nt, synthetic construct
  source 1..19: mol_type = other RNA
catctgccaccgcaccctg

SEQ ID NO: 5777 - RNA, 19 nt, synthetic construct
  source 1..19: mol_type = other RNA
cctggccgcctgcgcccag

SEQ ID NO: 5778 - RNA, 19 nt, synthetic construct
  source 1..19: mol_type = other RNA
cagccgcggaactggaggt

SEQ ID NO: 5779 - RNA, 19 nt, synthetic construct
  source 1..19: mol_type = other RNA
cctgcacggacacctgctc

SEQ ID NO: 5780 - RNA, 19 nt, synthetic construct
  source 1..19: mol_type = other RNA
caacccccagcgcgcgcag

SEQ ID NO: 5781 - RNA, 19 nt, synthetic construct
  source 1..19: mol_type = other RNA
tgtgtggacggctgcttct

SEQ ID NO: 5782 - RNA, 19 nt, synthetic construct
  source 1..19: mol_type = other RNA
cacggtgctggatgacatc

SEQ ID NO: 5783 - RNA, 19 nt, synthetic construct
  source 1..19: mol_type = other RNA
ggtgctggatgacatcacg

SEQ ID NO: 5784 - RNA, 19 nt, synthetic construct
  source 1..19: mol_type = other RNA
ccgggcacctccttcaaca

SEQ ID NO: 5785 - RNA, 19 nt, synthetic construct
  source 1..19: mol_type = other RNA
ctgtgcagggcggggccca

SEQ ID NO: 5786 - RNA, 19 nt, synthetic construct
  source 1..19: mol_type = other RNA
cacatctccacctatgatg

SEQ ID NO: 5787 - RNA, 19 nt, synthetic construct
  source 1..19: mol_type = other RNA
cgacagcagcttcaccgtg

SEQ ID NO: 5788 - RNA, 19 nt, synthetic construct
  source 1..19: mol_type = other RNA
ggcctgacggacaacgaga

SEQ ID NO: 5789 - RNA, 19 nt, synthetic construct
  source 1..19: mol_type = other RNA
gacaacgagaactgcctga

SEQ ID NO: 5790 - RNA, 19 nt, synthetic construct
  source 1..19: mol_type = other RNA
tcgagcttcttcatcgtgg

SEQ ID NO: 5791 - RNA, 19 nt, synthetic construct
  source 1..19: mol_type = other RNA
ctggtgccactcatgcagg

SEQ ID NO: 5792 - RNA, 19 nt, synthetic construct
  source 1..19: mol_type = other RNA
ggccctcagcggggtggtg

SEQ ID NO: 5793 - RNA, 19 nt, synthetic construct
  source 1..19: mol_type = other RNA
cacgggcgcagccttcgcc

SEQ ID NO: 5794 - RNA, 19 nt, synthetic construct
  source 1..19: mol_type = other RNA
cagtgccttctcgcgctgc

SEQ ID NO: 5795 - RNA, 19 nt, synthetic construct
  source 1..19: mol_type = other RNA
agtgccttctcgcgctgcc

SEQ ID NO: 5796 - RNA, 19 nt, synthetic construct
  source 1..19: mol_type = other RNA
gccactccatcatcaaccc

SEQ ID NO: 5797 - RNA, 19 nt, synthetic construct
  source 1..19: mol_type = other RNA
ccactccatcatcaacccc

SEQ ID NO: 5798 - RNA, 19 nt, synthetic construct
  source 1..19: mol_type = other RNA
tacgtggtggatgcctgcc

SEQ ID NO: 5799 - RNA, 19 nt, synthetic construct
  source 1..19: mol_type = other RNA
cgtggtggatgcctgccag

SEQ ID NO: 5800 - RNA, 19 nt, synthetic construct
  source 1..19: mol_type = other RNA
gtggtggatgcctgccagc

SEQ ID NO: 5801 - RNA, 19 nt, synthetic construct
  source 1..19: mol_type = other RNA
gcacctgccccgcgggcac

SEQ ID NO: 5802 - RNA, 19 nt, synthetic construct
  source 1..19: mol_type = other RNA
cacctgccccgcgggcacc

SEQ ID NO: 5803 - RNA, 19 nt, synthetic construct
  source 1..19: mol_type = other RNA
cgcgggcaccttcctcaat

SEQ ID NO: 5804 - RNA, 19 nt, synthetic construct
  source 1..19: mol_type = other RNA
gggaagctaagctgcctgg

SEQ ID NO: 5805 - RNA, 19 nt, synthetic construct
  source 1..19: mol_type = other RNA
cccccatggtgtacctgga

SEQ ID NO: 5806 - RNA, 19 nt, synthetic construct
  source 1..19: mol_type = other RNA
cccatggtgtacctggact

SEQ ID NO: 5807 - RNA, 19 nt, synthetic construct
  source 1..19: mol_type = other RNA
catggtgtacctggactgc

SEQ ID NO: 5808 - RNA, 19 nt, synthetic construct
  source 1..19: mol_type = other RNA
aacagctcggcgggcaccc

SEQ ID NO: 5809 - RNA, 19 nt, synthetic construct
  source 1..19: mol_type = other RNA
cggcgggcacccctggggc

SEQ ID NO: 5810 - RNA, 19 nt, synthetic construct
  source 1..19: mol_type = other RNA
attgccgaggaggactgcc

SEQ ID NO: 5811 - RNA, 19 nt, synthetic construct
  source 1..19: mol_type = other RNA
tgccgaggaggactgcccc

SEQ ID NO: 5812 - RNA, 19 nt, synthetic construct
  source 1..19: mol_type = other RNA
acctacaagcctggagaga

SEQ ID NO: 5813 - RNA, 19 nt, synthetic construct
  source 1..19: mol_type = other RNA
tcatcacctttgatggcga

SEQ ID NO: 5814 - RNA, 19 nt, synthetic construct
  source 1..19: mol_type = other RNA
ttgaaggcagctgcgagta

SEQ ID NO: 5815 - RNA, 19 nt, synthetic construct
  source 1..19: mol_type = other RNA
gaaggcagctgcgagtaca

SEQ ID NO: 5816 - RNA, 19 nt, synthetic construct
  source 1..19: mol_type = other RNA
cccaggactactgtgggga

SEQ ID NO: 5817 - RNA, 19 nt, synthetic construct
  source 1..19: mol_type = other RNA
ctgtggggacaacaccacc

SEQ ID NO: 5818 - RNA, 19 nt, synthetic construct
  source 1..19: mol_type = other RNA
tgtggggacaacaccaccc

SEQ ID NO: 5819 - RNA, 19 nt, synthetic construct
  source 1..19: mol_type = other RNA
tggggacaacaccacccac

SEQ ID NO: 5820 - RNA, 19 nt, synthetic construct
  source 1..19: mol_type = other RNA
ggccgggtggggacccacc

SEQ ID NO: 5821 - RNA, 19 nt, synthetic construct
  source 1..19: mol_type = other RNA
agacccacgggatggccgt

SEQ ID NO: 5822 - RNA, 19 nt, synthetic construct
  source 1..19: mol_type = other RNA
gaagaccagcgtgttcatc

SEQ ID NO: 5823 - RNA, 19 nt, synthetic construct
  source 1..19: mol_type = other RNA
cgtggtgggggacgcactg

SEQ ID NO: 5824 - RNA, 19 nt, synthetic construct
  source 1..19: mol_type = other RNA
gccctggcacccaaggacc

SEQ ID NO: 5825 - RNA, 19 nt, synthetic construct
  source 1..19: mol_type = other RNA
aacgacgcgtgtgcctgcg

SEQ ID NO: 5826 - RNA, 19 nt, synthetic construct
  source 1..19: mol_type = other RNA
gtggctgcctacgcccagg

SEQ ID NO: 5827 - RNA, 19 nt, synthetic construct
  source 1..19: mol_type = other RNA
aggcctgccacgacgcggg

SEQ ID NO: 5828 - RNA, 19 nt, synthetic construct
  source 1..19: mol_type = other RNA
ggcctgccacgacgcgggc

SEQ ID NO: 5829 - RNA, 19 nt, synthetic construct
  source 1..19: mol_type = other RNA
gccccttgttctgtgactt

SEQ ID NO: 5830 - RNA, 19 nt, synthetic construct
  source 1..19: mol_type = other RNA
aactgcacacccagtggca

SEQ ID NO: 5831 - RNA, 19 nt, synthetic construct
  source 1..19: mol_type = other RNA
cctgcttgatcgccatctg

SEQ ID NO: 5832 - RNA, 19 nt, synthetic construct
  source 1..19: mol_type = other RNA
gaagcaacggcaccatcat

SEQ ID NO: 5833 - RNA, 19 nt, synthetic construct
  source 1..19: mol_type = other RNA
tggcatgtcctggaactcc

SEQ ID NO: 5834 - RNA, 19 nt, synthetic construct
  source 1..19: mol_type = other RNA
caccttcaccaccgcctgg

SEQ ID NO: 5835 - RNA, 19 nt, synthetic construct
  source 1..19: mol_type = other RNA
ccggtctccaccgtgtgtg

SEQ ID NO: 5836 - RNA, 19 nt, synthetic construct
  source 1..19: mol_type = other RNA
cgacatgccgctggaggag

SEQ ID NO: 5837 - RNA, 19 nt, synthetic construct
  source 1..19: mol_type = other RNA
gacatgccgctggaggagc

SEQ ID NO: 5838 - RNA, 19 nt, synthetic construct
  source 1..19: mol_type = other RNA
cgcatgcgggggctgatgt

SEQ ID NO: 5839 - RNA, 19 nt, synthetic construct
  source 1..19: mol_type = other RNA
tacgagctgcgggttctct

SEQ ID NO: 5840 - RNA, 19 nt, synthetic construct
  source 1..19: mol_type = other RNA
taccccaacccagaccaca

SEQ ID NO: 5841 - RNA, 19 nt, synthetic construct
  source 1..19: mol_type = other RNA
gtcgacggcggccctcacc

SEQ ID NO: 5842 - RNA, 19 nt, synthetic construct
  source 1..19: mol_type = other RNA
cggtcaccccctcggcccc

SEQ ID NO: 5843 - RNA, 19 nt, synthetic construct
  source 1..19: mol_type = other RNA
ggtcaccccctcggcccca

SEQ ID NO: 5844 - RNA, 19 nt, synthetic construct
  source 1..19: mol_type = other RNA
ccgagagcttccccaactg

SEQ ID NO: 5845 - RNA, 19 nt, synthetic construct
  source 1..19: mol_type = other RNA
agagcttccccaactggac

SEQ ID NO: 5846 - RNA, 19 nt, synthetic construct
  source 1..19: mol_type = other RNA
aactggaccctggcacagg

SEQ ID NO: 5847 - RNA, 19 nt, synthetic construct
  source 1..19: mol_type = other RNA
gcacaggtggggcagaagg

SEQ ID NO: 5848 - RNA, 19 nt, synthetic construct
  source 1..19: mol_type = other RNA
cacaggtggggcagaaggt

SEQ ID NO: 5849 - RNA, 19 nt, synthetic construct
  source 1..19: mol_type = other RNA
acttcggcctggtgtgcag

SEQ ID NO: 5850 - RNA, 19 nt, synthetic construct
  source 1..19: mol_type = other RNA
ggagcaggagggcgtcttc

SEQ ID NO: 5851 - RNA, 19 nt, synthetic construct
  source 1..19: mol_type = other RNA
agtagcccggggctgacca

SEQ ID NO: 5852 - RNA, 19 nt, synthetic construct
  source 1..19: mol_type = other RNA
cacaagcacccttggtaca

SEQ ID NO: 5853 - RNA, 19 nt, synthetic construct
  source 1..19: mol_type = other RNA
caagcacccttggtacagc

SEQ ID NO: 5854 - RNA, 19 nt, synthetic construct
  source 1..19: mol_type = other RNA
ggaggccccacgacgcctg

SEQ ID NO: 5855 - RNA, 19 nt, synthetic construct
  source 1..19: mol_type = other RNA
catggcgcccctcacagcc

SEQ ID NO: 5856 - RNA, 19 nt, synthetic construct
  source 1..19: mol_type = other RNA
tcacagccacccacgctgg

SEQ ID NO: 5857 - RNA, 19 nt, synthetic construct
  source 1..19: mol_type = other RNA
tggccccaacaacaatggc

SEQ ID NO: 5858 - RNA, 19 nt, synthetic construct
  source 1..19: mol_type = other RNA
acaacaatggcaacctcca

SEQ ID NO: 5859 - RNA, 19 nt, synthetic construct
  source 1..19: mol_type = other RNA
cgcttccaaagagccgctg

SEQ ID NO: 5860 - RNA, 19 nt, synthetic construct
  source 1..19: mol_type = other RNA
tgaccacgagcctggcgcc

SEQ ID NO: 5861 - RNA, 19 nt, synthetic construct
  source 1..19: mol_type = other RNA
cacgagcgagctgtccacc

SEQ ID NO: 5862 - RNA, 19 nt, synthetic construct
  source 1..19: mol_type = other RNA
cgagctgtccacctctcag

SEQ ID NO: 5863 - RNA, 19 nt, synthetic construct
  source 1..19: mol_type = other RNA
ccgagaccagcacgcccag

SEQ ID NO: 5864 - RNA, 19 nt, synthetic construct
  source 1..19: mol_type = other RNA
cagcacgcccaggacagag

SEQ ID NO: 5865 - RNA, 19 nt, synthetic construct
  source 1..19: mol_type = other RNA
agcacgcccaggacagaga

SEQ ID NO: 5866 - RNA, 19 nt, synthetic construct
  source 1..19: mol_type = other RNA
gcgtccactggatccacgg

SEQ ID NO: 5867 - RNA, 19 nt, synthetic construct
  source 1..19: mol_type = other RNA
acccacagctaccagcgtt

SEQ ID NO: 5868 - RNA, 19 nt, synthetic construct
  source 1..19: mol_type = other RNA
cccacagctaccagcgtta

SEQ ID NO: 5869 - RNA, 19 nt, synthetic construct
  source 1..19: mol_type = other RNA
ccaccacaactggggccac

SEQ ID NO: 5870 - RNA, 19 nt, synthetic construct
  source 1..19: mol_type = other RNA
gtgccaactaccacaacca

SEQ ID NO: 5871 - RNA, 19 nt, synthetic construct
  source 1..19: mol_type = other RNA
gggcttcacagccaccccc

SEQ ID NO: 5872 - RNA, 19 nt, synthetic construct
  source 1..19: mol_type = other RNA
gcactcacgcctccagtgt

SEQ ID NO: 5873 - RNA, 19 nt, synthetic construct
  source 1..19: mol_type = other RNA
cactcacgcctccagtgtg

SEQ ID NO: 5874 - RNA, 19 nt, synthetic construct
  source 1..19: mol_type = other RNA
cagtgctgaccaccaccac

SEQ ID NO: 5875 - RNA, 19 nt, synthetic construct
  source 1..19: mol_type = other RNA
tggttctatggcaacaccc

SEQ ID NO: 5876 - RNA, 19 nt, synthetic construct
  source 1..19: mol_type = other RNA
cgatcacggccaccggctc

SEQ ID NO: 5877 - RNA, 19 nt, synthetic construct
  source 1..19: mol_type = other RNA
agtgctgaccaccaccgcc

SEQ ID NO: 5878 - RNA, 19 nt, synthetic construct
  source 1..19: mol_type = other RNA
caacacagtgactccctcc

SEQ ID NO: 5879 - RNA, 19 nt, synthetic construct
  source 1..19: mol_type = other RNA
ggaccacccacacaccccc

SEQ ID NO: 5880 - RNA, 19 nt, synthetic construct
  source 1..19: mol_type = other RNA
cagtgccgaacaccatggc

SEQ ID NO: 5881 - RNA, 19 nt, synthetic construct
  source 1..19: mol_type = other RNA
cagcagtccccacacggtg

SEQ ID NO: 5882 - RNA, 19 nt, synthetic construct
  source 1..19: mol_type = other RNA
cacggtgcgcacagcctgg

SEQ ID NO: 5883 - RNA, 19 nt, synthetic construct
  source 1..19: mol_type = other RNA
gcacagcctggacttcggc

SEQ ID NO: 5884 - RNA, 19 nt, synthetic construct
  source 1..19: mol_type = other RNA
cggccacctcgggcatctt

SEQ ID NO: 5885 - RNA, 19 nt, synthetic construct
  source 1..19: mol_type = other RNA
catcttgggcaccacccac

SEQ ID NO: 5886 - RNA, 19 nt, synthetic construct
  source 1..19: mol_type = other RNA
tcttgggcaccacccacat

SEQ ID NO: 5887 - RNA, 19 nt, synthetic construct
  source 1..19: mol_type = other RNA
gagccttccacggtgactt

SEQ ID NO: 5888 - RNA, 19 nt, synthetic construct
  source 1..19: mol_type = other RNA
tcaccctagcagcagaacc

SEQ ID NO: 5889 - RNA, 19 nt, synthetic construct
  source 1..19: mol_type = other RNA
cgagtcacccccttctcca

SEQ ID NO: 5890 - RNA, 19 nt, synthetic construct
  source 1..19: mol_type = other RNA
ggactttgacacctactcc

SEQ ID NO: 5891 - RNA, 19 nt, synthetic construct
  source 1..19: mol_type = other RNA
gactttgacacctactcca

SEQ ID NO: 5892 - RNA, 19 nt, synthetic construct
  source 1..19: mol_type = other RNA
actttgacacctactccaa

SEQ ID NO: 5893 - RNA, 19 nt, synthetic construct
  source 1..19: mol_type = other RNA
tttgacacctactccaaca

SEQ ID NO: 5894 - RNA, 19 nt, synthetic construct
  source 1..19: mol_type = other RNA
ccgtgcggccggaggggcc

SEQ ID NO: 5895 - RNA, 19 nt, synthetic construct
  source 1..19: mol_type = other RNA
ctacggccatgccctcctc

SEQ ID NO: 5896 - RNA, 19 nt, synthetic construct
  source 1..19: mol_type = other RNA
gagtccactggatccacgg

SEQ ID NO: 5897 - RNA, 19 nt, synthetic construct
  source 1..19: mol_type = other RNA
cagccaccgtgacggtgcc

SEQ ID NO: 5898 - RNA, 19 nt, synthetic construct
  source 1..19: mol_type = other RNA
agccaccgtgacggtgccc

SEQ ID NO: 5899 - RNA, 19 nt, synthetic construct
  source 1..19: mol_type = other RNA
tccactccagagactgtcc

SEQ ID NO: 5900 - RNA, 19 nt, synthetic construct
  source 1..19: mol_type = other RNA
caaccggggccaccggctc

SEQ ID NO: 5901 - RNA, 19 nt, synthetic construct
  source 1..19: mol_type = other RNA
agtgctgactaccacaacc

SEQ ID NO: 5902 - RNA, 19 nt, synthetic construct
  source 1..19: mol_type = other RNA
gggcttcacagccaccccc

SEQ ID NO: 5903 - RNA, 19 nt, synthetic construct
  source 1..19: mol_type = other RNA
gttccacggtgaccccctc

SEQ ID NO: 5904 - RNA, 19 nt, synthetic construct
  source 1..19: mol_type = other RNA
cagtgctgaccaccaccac

SEQ ID NO: 5905 - RNA, 19 nt, synthetic construct
  source 1..19: mol_type = other RNA
tggttctatggcaacaccc

SEQ ID NO: 5906 - RNA, 19 nt, synthetic construct
  source 1..19: mol_type = other RNA
cgatcacggccaccggctc

SEQ ID NO: 5907 - RNA, 19 nt, synthetic construct
  source 1..19: mol_type = other RNA
agtgctgaccaccaccgcc

SEQ ID NO: 5908 - RNA, 19 nt, synthetic construct
  source 1..19: mol_type = other RNA
ggaccacccacacaccccc

SEQ ID NO: 5909 - RNA, 19 nt, synthetic construct
  source 1..19: mol_type = other RNA
cagcagtccccacacggtg

SEQ ID NO: 5910 - RNA, 19 nt, synthetic construct
  source 1..19: mol_type = other RNA
cacggtgcgcacagcctgg

SEQ ID NO: 5911 - RNA, 19 nt, synthetic construct
  source 1..19: mol_type = other RNA
gcacagcctggacttcggc

SEQ ID NO: 5912 - RNA, 19 nt, synthetic construct
  source 1..19: mol_type = other RNA
cttcggccacctcaggcac

SEQ ID NO: 5913 - RNA, 19 nt, synthetic construct
  source 1..19: mol_type = other RNA
ccttgggcaccacccacat

SEQ ID NO: 5914 - RNA, 19 nt, synthetic construct
  source 1..19: mol_type = other RNA
cgagtcacccccttctcca

SEQ ID NO: 5915 - RNA, 19 nt, synthetic construct
  source 1..19: mol_type = other RNA
ccaccccgggccacaccag

SEQ ID NO: 5916 - RNA, 19 nt, synthetic construct
  source 1..19: mol_type = other RNA
caccccgggccacaccagg

SEQ ID NO: 5917 - RNA, 19 nt, synthetic construct
  source 1..19: mol_type = other RNA
ggactttgacacctactcc

SEQ ID NO: 5918 - RNA, 19 nt, synthetic construct
  source 1..19: mol_type = other RNA
gactttgacacctactcca

SEQ ID NO: 5919 - RNA, 19 nt, synthetic construct
  source 1..19: mol_type = other RNA
actttgacacctactccaa

SEQ ID NO: 5920 - RNA, 19 nt, synthetic construct
  source 1..19: mol_type = other RNA
tttgacacctactccaaca

SEQ ID NO: 5921 - RNA, 19 nt, synthetic construct
  source 1..19: mol_type = other RNA
ccgtgcggccggaggggcc

SEQ ID NO: 5922 - RNA, 19 nt, synthetic construct
  source 1..19: mol_type = other RNA
ccactccagggacgacctg

SEQ ID NO: 5923 - RNA, 19 nt, synthetic construct
  source 1..19: mol_type = other RNA
gcaaccactggatccacgg

SEQ ID NO: 5924 - RNA, 19 nt, synthetic construct
  source 1..19: mol_type = other RNA
caaccactggatccacggc

SEQ ID NO: 5925 - RNA, 19 nt, synthetic construct
  source 1..19: mol_type = other RNA
accacccttccagtgctga

SEQ ID NO: 5926 - RNA, 19 nt, synthetic construct
  source 1..19: mol_type = other RNA
ttacacccatcccctcctt

SEQ ID NO: 5927 - RNA, 19 nt, synthetic construct
  source 1..19: mol_type = other RNA
gggaccaccgggaccctcc

SEQ ID NO: 5928 - RNA, 19 nt, synthetic construct
  source 1..19: mol_type = other RNA
gtccacaatccacccctcc

SEQ ID NO: 5929 - RNA, 19 nt, synthetic construct
  source 1..19: mol_type = other RNA
cactccggagaccacccac

SEQ ID NO: 5930 - RNA, 19 nt, synthetic construct
  source 1..19: mol_type = other RNA
ggagaccacccacacctcc

SEQ ID NO: 5931 - RNA, 19 nt, synthetic construct
  source 1..19: mol_type = other RNA
acgacaagggccaccagtt

SEQ ID NO: 5932 - RNA, 19 nt, synthetic construct
  source 1..19: mol_type = other RNA
cgacaagggccaccagttc

SEQ ID NO: 5933 - RNA, 19 nt, synthetic construct
  source 1..19: mol_type = other RNA
cagccactggccccacggc

SEQ ID NO: 5934 - RNA, 19 nt, synthetic construct
  source 1..19: mol_type = other RNA
tggatcctcacagagccca

SEQ ID NO: 5935 - RNA, 19 nt, synthetic construct
  source 1..19: mol_type = other RNA
agagcccagcactacagcc

SEQ ID NO: 5936 - RNA, 19 nt, synthetic construct
  source 1..19: mol_type = other RNA
cagccaccgtgacggtgcc

SEQ ID NO: 5937 - RNA, 19 nt, synthetic construct
  source 1..19: mol_type = other RNA
agccaccgtgacggtgccc

SEQ ID NO: 5938 - RNA, 19 nt, synthetic construct
  source 1..19: mol_type = other RNA
tccacccgggcaactgctg

SEQ ID NO: 5939 - RNA, 19 nt, synthetic construct
  source 1..19: mol_type = other RNA
tgctggcaccctcaaagtg

SEQ ID NO: 5940 - RNA, 19 nt, synthetic construct
  source 1..19: mol_type = other RNA
acccacagctaccagcgtt

SEQ ID NO: 5941 - RNA, 19 nt, synthetic construct
  source 1..19: mol_type = other RNA
cccacagctaccagcgtta

SEQ ID NO: 5942 - RNA, 19 nt, synthetic construct
  source 1..19: mol_type = other RNA
tctactccagagactgtcc

SEQ ID NO: 5943 - RNA, 19 nt, synthetic construct
  source 1..19: mol_type = other RNA
gcttaccaccacgaccacc

SEQ ID NO: 5944 - RNA, 19 nt, synthetic construct
  source 1..19: mol_type = other RNA
gtgccgactaccacaacca

SEQ ID NO: 5945 - RNA, 19 nt, synthetic construct
  source 1..19: mol_type = other RNA
gggcttcacagccaccccc

SEQ ID NO: 5946 - RNA, 19 nt, synthetic construct
  source 1..19: mol_type = other RNA
gcactcacgcctccagtgt

SEQ ID NO: 5947 - RNA, 19 nt, synthetic construct
  source 1..19: mol_type = other RNA
cactcacgcctccagtgtg

SEQ ID NO: 5948 - RNA, 19 nt, synthetic construct
  source 1..19: mol_type = other RNA
cagtgctgaccaccaccac

SEQ ID NO: 5949 - RNA, 19 nt, synthetic construct
  source 1..19: mol_type = other RNA
tggttctatggcaacaccc

SEQ ID NO: 5950 - RNA, 19 nt, synthetic construct
  source 1..19: mol_type = other RNA
agtgctgaccaccaccgcc

SEQ ID NO: 5951 - RNA, 19 nt, synthetic construct
  source 1..19: mol_type = other RNA
ggaccacccacacaccccc

SEQ ID NO: 5952 - RNA, 19 nt, synthetic construct
  source 1..19: mol_type = other RNA
cagcagtccccacacggtg

SEQ ID NO: 5953 - RNA, 19 nt, synthetic construct
  source 1..19: mol_type = other RNA
cacggtgcgcacagcctgg

SEQ ID NO: 5954 - RNA, 19 nt, synthetic construct
  source 1..19: mol_type = other RNA
gcacagcctggacttcggc

SEQ ID NO: 5955 - RNA, 19 nt, synthetic construct
  source 1..19: mol_type = other RNA
cggccacctcgggcatctt

SEQ ID NO: 5956 - RNA, 19 nt, synthetic construct
  source 1..19: mol_type = other RNA
catcttgggcaccacccac

SEQ ID NO: 5957 - RNA, 19 nt, synthetic construct
  source 1..19: mol_type = other RNA
tcttgggcaccacccacat

SEQ ID NO: 5958 - RNA, 19 nt, synthetic construct
  source 1..19: mol_type = other RNA
gagccttccacggtgactt

SEQ ID NO: 5959 - RNA, 19 nt, synthetic construct
  source 1..19: mol_type = other RNA
agcaaccaccagtaccacc

SEQ ID NO: 5960 - RNA, 19 nt, synthetic construct
  source 1..19: mol_type = other RNA
cgagtcacccccttctcca

SEQ ID NO: 5961 - RNA, 19 nt, synthetic construct
  source 1..19: mol_type = other RNA
ccaccccgggccacaccag

SEQ ID NO: 5962 - RNA, 19 nt, synthetic construct
  source 1..19: mol_type = other RNA
caccccgggccacaccagg

SEQ ID NO: 5963 - RNA, 19 nt, synthetic construct
  source 1..19: mol_type = other RNA
ggactttgacacctactcc

SEQ ID NO: 5964 - RNA, 19 nt, synthetic construct
  source 1..19: mol_type = other RNA
gactttgacacctactcca

SEQ ID NO: 5965 - RNA, 19 nt, synthetic construct
  source 1..19: mol_type = other RNA
actttgacacctactccaa

SEQ ID NO: 5966 - RNA, 19 nt, synthetic construct
  source 1..19: mol_type = other RNA
tttgacacctactccaaca

SEQ ID NO: 5967 - RNA, 19 nt, synthetic construct
  source 1..19: mol_type = other RNA
aggggcagtctgtgagcag

SEQ ID NO: 5968 - RNA, 19 nt, synthetic construct
  source 1..19: mol_type = other RNA
ggggcagtctgtgagcagc

SEQ ID NO: 5969 - RNA, 19 nt, synthetic construct
  source 1..19: mol_type = other RNA
gagtccactggatccacgg

SEQ ID NO: 5970 - RNA, 19 nt, synthetic construct
  source 1..19: mol_type = other RNA
cagccaccgtgacggtgcc

SEQ ID NO: 5971 - RNA, 19 nt, synthetic construct
  source 1..19: mol_type = other RNA
agccaccgtgacggtgccc

SEQ ID NO: 5972 - RNA, 19 nt, synthetic construct
  source 1..19: mol_type = other RNA
gtgccgactaccacaacca

SEQ ID NO: 5973 - RNA, 19 nt, synthetic construct
  source 1..19: mol_type = other RNA
cacgggcttcacagtcacc

SEQ ID NO: 5974 - RNA, 19 nt, synthetic construct
  source 1..19: mol_type = other RNA
cgggcttcacagtcacccc

SEQ ID NO: 5975 - RNA, 19 nt, synthetic construct
  source 1..19: mol_type = other RNA
cctcctccgtcccggggac

SEQ ID NO: 5976 - RNA, 19 nt, synthetic construct
  source 1..19: mol_type = other RNA
ctcctccgtcccggggacc

SEQ ID NO: 5977 - RNA, 19 nt, synthetic construct
  source 1..19: mol_type = other RNA
cctccgtcccggggaccac

SEQ ID NO: 5978 - RNA, 19 nt, synthetic construct
  source 1..19: mol_type = other RNA
cagtgctgaccaccaccac

SEQ ID NO: 5979 - RNA, 19 nt, synthetic construct
  source 1..19: mol_type = other RNA
tggttctatggcaacaccc

SEQ ID NO: 5980 - RNA, 19 nt, synthetic construct
  source 1..19: mol_type = other RNA
tcactgatcaccacggcca

SEQ ID NO: 5981 - RNA, 19 nt, synthetic construct
  source 1..19: mol_type = other RNA
cgatcacggccaccggctc

SEQ ID NO: 5982 - RNA, 19 nt, synthetic construct
  source 1..19: mol_type = other RNA
agtgctgaccaccaccgcc

SEQ ID NO: 5983 - RNA, 19 nt, synthetic construct
  source 1..19: mol_type = other RNA
ggaccacccacacaccccc

SEQ ID NO: 5984 - RNA, 19 nt, synthetic construct
  source 1..19: mol_type = other RNA
cagcagtccccacacggtg

SEQ ID NO: 5985 - RNA, 19 nt, synthetic construct
  source 1..19: mol_type = other RNA
cacggtgcgcacagcctgg

SEQ ID NO: 5986 - RNA, 19 nt, synthetic construct
  source 1..19: mol_type = other RNA
gcacagcctggacttcggc

SEQ ID NO: 5987 - RNA, 19 nt, synthetic construct
  source 1..19: mol_type = other RNA
cttcggccacctcaggcac

SEQ ID NO: 5988 - RNA, 19 nt, synthetic construct
  source 1..19: mol_type = other RNA
ccttgggcaccacccacat

SEQ ID NO: 5989 - RNA, 19 nt, synthetic construct
  source 1..19: mol_type = other RNA
accgagtcacccccttccc

SEQ ID NO: 5990 - RNA, 19 nt, synthetic construct
  source 1..19: mol_type = other RNA
ggactttgacacctactcc

SEQ ID NO: 5991 - RNA, 19 nt, synthetic construct
  source 1..19: mol_type = other RNA
gactttgacacctactcca

SEQ ID NO: 5992 - RNA, 19 nt, synthetic construct
  source 1..19: mol_type = other RNA
actttgacacctactccaa

SEQ ID NO: 5993 - RNA, 19 nt, synthetic construct
  source 1..19: mol_type = other RNA
tttgacacctactccaaca

SEQ ID NO: 5994 - RNA, 19 nt, synthetic construct
  source 1..19: mol_type = other RNA
ccgtgcggccggaggggcc

SEQ ID NO: 5995 - RNA, 19 nt, synthetic construct
  source 1..19: mol_type = other RNA
ccagcctggtgtccccctg

SEQ ID NO: 5996 - RNA, 19 nt, synthetic construct
  source 1..19: mol_type = other RNA
ctacggccatgccctcctc

SEQ ID NO: 5997 - RNA, 19 nt, synthetic construct
  source 1..19: mol_type = other RNA
accacccttccagtgctga

SEQ ID NO: 5998 - RNA, 19 nt, synthetic construct
  source 1..19: mol_type = other RNA
tccacagctaccagcgtta

SEQ ID NO: 5999 - RNA, 19 nt, synthetic construct
  source 1..19: mol_type = other RNA
ttacacccatcccctcctc

SEQ ID NO: 6000 - RNA, 19 nt, synthetic construct
  source 1..19: mol_type = other RNA
gggaccaccgggaccctcc

SEQ ID NO: 6001 - RNA, 19 nt, synthetic construct
  source 1..19: mol_type = other RNA
gtccacaatccacccctcc

SEQ ID NO: 6002 - RNA, 19 nt, synthetic construct
  source 1..19: mol_type = other RNA
cactccggagaccacccac

SEQ ID NO: 6003 - RNA, 19 nt, synthetic construct
  source 1..19: mol_type = other RNA
ggagaccacccacacctcc

SEQ ID NO: 6004 - RNA, 19 nt, synthetic construct
  source 1..19: mol_type = other RNA
acgacaagggccaccagtt

SEQ ID NO: 6005 - RNA, 19 nt, synthetic construct
  source 1..19: mol_type = other RNA
cgacaagggccaccagttc

SEQ ID NO: 6006 - RNA, 19 nt, synthetic construct
  source 1..19: mol_type = other RNA
cagccactggccccacggc

SEQ ID NO: 6007 - RNA, 19 nt, synthetic construct
  source 1..19: mol_type = other RNA
gcgtccactggatccacgg

SEQ ID NO: 6008 - RNA, 19 nt, synthetic construct
  source 1..19: mol_type = other RNA
cagccaccgtgacggtgcc

SEQ ID NO: 6009 - RNA, 19 nt, synthetic construct
  source 1..19: mol_type = other RNA
agccaccgtgacggtgccc

SEQ ID NO: 6010 - RNA, 19 nt, synthetic construct
  source 1..19: mol_type = other RNA
ggactgcaactgcccttcc

SEQ ID NO: 6011 - RNA, 19 nt, synthetic construct
  source 1..19: mol_type = other RNA
tccactccagagactgtcc

SEQ ID NO: 6012 - RNA, 19 nt, synthetic construct
  source 1..19: mol_type = other RNA
caaccggggccaccggctc

SEQ ID NO: 6013 - RNA, 19 nt, synthetic construct
  source 1..19: mol_type = other RNA
gtgccgactaccacaacca

SEQ ID NO: 6014 - RNA, 19 nt, synthetic construct
  source 1..19: mol_type = other RNA
gggcttcacagccaccccc

SEQ ID NO: 6015 - RNA, 19 nt, synthetic construct
  source 1..19: mol_type = other RNA
gcactcacgcctccagtgt

SEQ ID NO: 6016 - RNA, 19 nt, synthetic construct
  source 1..19: mol_type = other RNA
cactcacgcctccagtgtg

SEQ ID NO: 6017 - RNA, 19 nt, synthetic construct
  source 1..19: mol_type = other RNA
gagtgctgaccaccaccac

SEQ ID NO: 6018 - RNA, 19 nt, synthetic construct
  source 1..19: mol_type = other RNA
tggttctatggcaacaccc

SEQ ID NO: 6019 - RNA, 19 nt, synthetic construct
  source 1..19: mol_type = other RNA
cgatcacggccaccggctc

SEQ ID NO: 6020 - RNA, 19 nt, synthetic construct
  source 1..19: mol_type = other RNA
accacccttccagtgctga

SEQ ID NO: 6021 - RNA, 19 nt, synthetic construct
  source 1..19: mol_type = other RNA
ttacacccatcccctcctc

SEQ ID NO: 6022 - RNA, 19 nt, synthetic construct
  source 1..19: mol_type = other RNA
ccaccctgtggaccacgtg

SEQ ID NO: 6023 - RNA, 19 nt, synthetic construct
  source 1..19: mol_type = other RNA
cctgtggaccacgtggacc

SEQ ID NO: 6024 - RNA, 19 nt, synthetic construct
  source 1..19: mol_type = other RNA
cacacccatgtccaccatg

SEQ ID NO: 6025 - RNA, 19 nt, synthetic construct
  source 1..19: mol_type = other RNA
caccatgtccacaatccac

SEQ ID NO: 6026 - RNA, 19 nt, synthetic construct
  source 1..19: mol_type = other RNA
agagaccacccacacctcc

SEQ ID NO: 6027 - RNA, 19 nt, synthetic construct
  source 1..19: mol_type = other RNA
ccaccatgacaagggccac

SEQ ID NO: 6028 - RNA, 19 nt, synthetic construct
  source 1..19: mol_type = other RNA
cagccactggatccacggc

SEQ ID NO: 6029 - RNA, 19 nt, synthetic construct
  source 1..19: mol_type = other RNA
agccaccgtgatggtgccc

SEQ ID NO: 6030 - RNA, 19 nt, synthetic construct
  source 1..19: mol_type = other RNA
acacccccaaagtggtgac

SEQ ID NO: 6031 - RNA, 19 nt, synthetic construct
  source 1..19: mol_type = other RNA
cacccccaaagtggtgacc

SEQ ID NO: 6032 - RNA, 19 nt, synthetic construct
  source 1..19: mol_type = other RNA
ccccaaagtggtgaccacc

SEQ ID NO: 6033 - RNA, 19 nt, synthetic construct
  source 1..19: mol_type = other RNA
agtggtgaccaccatggcc

SEQ ID NO: 6034 - RNA, 19 nt, synthetic construct
  source 1..19: mol_type = other RNA
ccaccatggccactatgcc

SEQ ID NO: 6035 - RNA, 19 nt, synthetic construct
  source 1..19: mol_type = other RNA
caccatggccactatgccc

SEQ ID NO: 6036 - RNA, 19 nt, synthetic construct
  source 1..19: mol_type = other RNA
gctcgtccaccgtggggac

SEQ ID NO: 6037 - RNA, 19 nt, synthetic construct
  source 1..19: mol_type = other RNA
cgtggggaccacccgcacc

SEQ ID NO: 6038 - RNA, 19 nt, synthetic construct
  source 1..19: mol_type = other RNA
gcagggcatttggacagtt

SEQ ID NO: 6039 - RNA, 19 nt, synthetic construct
  source 1..19: mol_type = other RNA
atcagcactgtgacattga

SEQ ID NO: 6040 - RNA, 19 nt, synthetic construct
  source 1..19: mol_type = other RNA
ctgtgacattgaccgcttc

SEQ ID NO: 6041 - RNA, 19 nt, synthetic construct
  source 1..19: mol_type = other RNA
aatgccatccctctccggc

SEQ ID NO: 6042 - RNA, 19 nt, synthetic construct
  source 1..19: mol_type = other RNA
ctctccggcaggtgaatga

SEQ ID NO: 6043 - RNA, 19 nt, synthetic construct
  source 1..19: mol_type = other RNA
aaccgtgtcgtcctgctgg

SEQ ID NO: 6044 - RNA, 19 nt, synthetic construct
  source 1..19: mol_type = other RNA
ggacccaaagcctgtggcc

SEQ ID NO: 6045 - RNA, 19 nt, synthetic construct
  source 1..19: mol_type = other RNA
gcctgtggccaacgtcacc

SEQ ID NO: 6046 - RNA, 19 nt, synthetic construct
  source 1..19: mol_type = other RNA
ctgtggccaacgtcacctg

SEQ ID NO: 6047 - RNA, 19 nt, synthetic construct
  source 1..19: mol_type = other RNA
cgagtgcatctgcagcatg

SEQ ID NO: 6048 - RNA, 19 nt, synthetic construct
  source 1..19: mol_type = other RNA
gggcggctcccactattcc

SEQ ID NO: 6049 - RNA, 19 nt, synthetic construct
  source 1..19: mol_type = other RNA
gcggctcccactattccac

SEQ ID NO: 6050 - RNA, 19 nt, synthetic construct
  source 1..19: mol_type = other RNA
cttccggggcaactgcacc

SEQ ID NO: 6051 - RNA, 19 nt, synthetic construct
  source 1..19: mol_type = other RNA
ccggggcaactgcacctat

SEQ ID NO: 6052 - RNA, 19 nt, synthetic construct
  source 1..19: mol_type = other RNA
cggggcaactgcacctatg

SEQ ID NO: 6053 - RNA, 19 nt, synthetic construct
  source 1..19: mol_type = other RNA
ggggcaactgcacctatgt

SEQ ID NO: 6054 - RNA, 19 nt, synthetic construct
  source 1..19: mol_type = other RNA
acgctttgggaatctcagc

SEQ ID NO: 6055 - RNA, 19 nt, synthetic construct
  source 1..19: mol_type = other RNA
ctcagcctctacctggaca

SEQ ID NO: 6056 - RNA, 19 nt, synthetic construct
  source 1..19: mol_type = other RNA
agcctctacctggacaacc

SEQ ID NO: 6057 - RNA, 19 nt, synthetic construct
  source 1..19: mol_type = other RNA
actactgcacggcctctgc

SEQ ID NO: 6058 - RNA, 19 nt, synthetic construct
  source 1..19: mol_type = other RNA
ggcctgatcctgtttgacc

SEQ ID NO: 6059 - RNA, 19 nt, synthetic construct
  source 1..19: mol_type = other RNA
gggaccaccaccatgcgtg

SEQ ID NO: 6060 - RNA, 19 nt, synthetic construct
  source 1..19: mol_type = other RNA
cgtgtggacattcctgccc

SEQ ID NO: 6061 - RNA, 19 nt, synthetic construct
  source 1..19: mol_type = other RNA
gtgtggacattcctgccct

SEQ ID NO: 6062 - RNA, 19 nt, synthetic construct
  source 1..19: mol_type = other RNA
tgtggacattcctgccctg

SEQ ID NO: 6063 - RNA, 19 nt, synthetic construct
  source 1..19: mol_type = other RNA
agcgtcaccttcaatggcc

SEQ ID NO: 6064 - RNA, 19 nt, synthetic construct
  source 1..19: mol_type = other RNA
tgcaaggacatggccaaga

SEQ ID NO: 6065 - RNA, 19 nt, synthetic construct
  source 1..19: mol_type = other RNA
gtccccgacagcagaaagg

SEQ ID NO: 6066 - RNA, 19 nt, synthetic construct
  source 1..19: mol_type = other RNA
ggtctttgctgagtgccac

SEQ ID NO: 6067 - RNA, 19 nt, synthetic construct
  source 1..19: mol_type = other RNA
gctgagtgccacaaccttg

SEQ ID NO: 6068 - RNA, 19 nt, synthetic construct
  source 1..19: mol_type = other RNA
cattcttcaacgcctgcat

SEQ ID NO: 6069 - RNA, 19 nt, synthetic construct
  source 1..19: mol_type = other RNA
tcttcaacgcctgcatcag

SEQ ID NO: 6070 - RNA, 19 nt, synthetic construct
  source 1..19: mol_type = other RNA
cgaccactgcaggggccgc

SEQ ID NO: 6071 - RNA, 19 nt, synthetic construct
  source 1..19: mol_type = other RNA
gaggtgcaaccggtggcct

SEQ ID NO: 6072 - RNA, 19 nt, synthetic construct
  source 1..19: mol_type = other RNA
actctaggaaccagagccc

SEQ ID NO: 6073 - RNA, 19 nt, synthetic construct
  source 1..19: mol_type = other RNA
catctgcgtgcaggcctgc

SEQ ID NO: 6074 - RNA, 19 nt, synthetic construct
  source 1..19: mol_type = other RNA
atctgcgtgcaggcctgcc

SEQ ID NO: 6075 - RNA, 19 nt, synthetic construct
  source 1..19: mol_type = other RNA
gcgtgcaggcctgcccctg

SEQ ID NO: 6076 - RNA, 19 nt, synthetic construct
  source 1..19: mol_type = other RNA
cgtgcaggcctgcccctgc

SEQ ID NO: 6077 - RNA, 19 nt, synthetic construct
  source 1..19: mol_type = other RNA
cctgcccctgcgtgggacc

SEQ ID NO: 6078 - RNA, 19 nt, synthetic construct
  source 1..19: mol_type = other RNA
ggtcagcccccgccgtgca

SEQ ID NO: 6079 - RNA, 19 nt, synthetic construct
  source 1..19: mol_type = other RNA
ggccgagaacccctgctgc

SEQ ID NO: 6080 - RNA, 19 nt, synthetic construct
  source 1..19: mol_type = other RNA
ctgctgccccgagacggtg

SEQ ID NO: 6081 - RNA, 19 nt, synthetic construct
  source 1..19: mol_type = other RNA
cgtgtgcaacacaaccacc

SEQ ID NO: 6082 - RNA, 19 nt, synthetic construct
  source 1..19: mol_type = other RNA
caggagtccatctgcaccc

SEQ ID NO: 6083 - RNA, 19 nt, synthetic construct
  source 1..19: mol_type = other RNA
ggagtccatctgcacccag

SEQ ID NO: 6084 - RNA, 19 nt, synthetic construct
  source 1..19: mol_type = other RNA
catctgcacccaggaggag

SEQ ID NO: 6085 - RNA, 19 nt, synthetic construct
  source 1..19: mol_type = other RNA
caatggcaccttctacggg

SEQ ID NO: 6086 - RNA, 19 nt, synthetic construct
  source 1..19: mol_type = other RNA
aatgtcaggaggatgcctg

SEQ ID NO: 6087 - RNA, 19 nt, synthetic construct
  source 1..19: mol_type = other RNA
agaccgcctgcctcacgcc

SEQ ID NO: 6088 - RNA, 19 nt, synthetic construct
  source 1..19: mol_type = other RNA
acgcccgatggccagccag

SEQ ID NO: 6089 - RNA, 19 nt, synthetic construct
  source 1..19: mol_type = other RNA
agtccagctgaatgaaacc

SEQ ID NO: 6090 - RNA, 19 nt, synthetic construct
  source 1..19: mol_type = other RNA
ctgaatgaaacctgggtca

SEQ ID NO: 6091 - RNA, 19 nt, synthetic construct
  source 1..19: mol_type = other RNA
aacctgggtcaacagccat

SEQ ID NO: 6092 - RNA, 19 nt, synthetic construct
  source 1..19: mol_type = other RNA
tgtacctctgtgaggctga

SEQ ID NO: 6093 - RNA, 19 nt, synthetic construct
  source 1..19: mol_type = other RNA
cgcatcaacacgaccatcc

SEQ ID NO: 6094 - RNA, 19 nt, synthetic construct
  source 1..19: mol_type = other RNA
cgtccaagtactcagcaga

SEQ ID NO: 6095 - RNA, 19 nt, synthetic construct
  source 1..19: mol_type = other RNA
cacctgctgccaggagagg

SEQ ID NO: 6096 - RNA, 19 nt, synthetic construct
  source 1..19: mol_type = other RNA
ggagaggcgggtccacgag

SEQ ID NO: 6097 - RNA, 19 nt, synthetic construct
  source 1..19: mol_type = other RNA
gagaggcgggtccacgagg

SEQ ID NO: 6098 - RNA, 19 nt, synthetic construct
  source 1..19: mol_type = other RNA
cttgcactgtcctaacggc

SEQ ID NO: 6099 - RNA, 19 nt, synthetic construct
  source 1..19: mol_type = other RNA
agccatcctgcacacctac

SEQ ID NO: 6100 - RNA, 19 nt, synthetic construct
  source 1..19: mol_type = other RNA
gccatcctgcacacctaca

SEQ ID NO: 6101 - RNA, 19 nt, synthetic construct
  source 1..19: mol_type = other RNA
ctgagaacgttctgcctcc

SEQ ID NO: 6102 - RNA, 19 nt, synthetic construct
  source 1..19: mol_type = other RNA
gagccaggatgtgcattgt

SEQ ID NO: 6103 - RNA, 19 nt, synthetic construct
  source 1..19: mol_type = other RNA
tgcattgtctgatcatgaa

SEQ ID NO: 6104 - RNA, 19 nt, synthetic construct
  source 1..19: mol_type = other RNA
tgaaaaccttgggcctcct

SEQ ID NO: 6105 - RNA, 19 nt, synthetic construct
  source 1..19: mol_type = other RNA
cccggcctgtgtgtggcac

SEQ ID NO: 6106 - RNA, 19 nt, synthetic construct
  source 1..19: mol_type = other RNA
ccggcctgtgtgtggcacc

SEQ ID NO: 6107 - RNA, 19 nt, synthetic construct
  source 1..19: mol_type = other RNA
gtgtggcaccccgcgctcc

SEQ ID NO: 6108 - RNA, 19 nt, synthetic construct
  source 1..19: mol_type = other RNA
gccacggccggagcgcccg

SEQ ID NO: 6109 - RNA, 19 nt, synthetic construct
  source 1..19: mol_type = other RNA
ggcagacaggctggtccag

SEQ ID NO: 6110 - RNA, 19 nt, synthetic construct
  source 1..19: mol_type = other RNA
ctgtccatgcctgctgcag

SEQ ID NO: 6111 - RNA, 19 nt, synthetic construct
  source 1..19: mol_type = other RNA
tgtccatgcctgctgcagg

SEQ ID NO: 6112 - RNA, 19 nt, synthetic construct
  source 1..19: mol_type = other RNA
ctgcagggtaactcagggc

SEQ ID NO: 6113 - RNA, 19 nt, synthetic construct
  source 1..19: mol_type = other RNA
gcaactacgtgttctctga

SEQ ID NO: 6114 - RNA, 19 nt, synthetic construct
  source 1..19: mol_type = other RNA
ttcaacgtccagctacgcc

SEQ ID NO: 6115 - RNA, 19 nt, synthetic construct
  source 1..19: mol_type = other RNA
ggtgggaagctaagctgcc

SEQ ID NO: 6116 - RNA, 19 nt, synthetic construct
  source 1..19: mol_type = other RNA
gtgggaagctaagctgcct

SEQ ID NO: 6117 - RNA, 19 nt, synthetic construct
  source 1..19: mol_type = other RNA
ccaccagttccaaagccac

SEQ ID NO: 6118 - RNA, 19 nt, synthetic construct
  source 1..19: mol_type = other RNA
ccaccagttccaaagccac

SEQ ID NO: 6119 - RNA, 19 nt, synthetic construct
  source 1..19: mol_type = other RNA
gttgcaaggacatggccaa

SEQ ID NO: 6120 - RNA, 19 nt, synthetic construct
  source 1..19: mol_type = other RNA
caactacgtgttctctgag

SEQ ID NO: 6121 - RNA, 19 nt, synthetic construct
  source 1..19: mol_type = other RNA
gggtccccacagcggagaa

SEQ ID NO: 6122 - RNA, 19 nt, synthetic construct
  source 1..19: mol_type = other RNA
cgcgccgcctacgaggact

SEQ ID NO: 6123 - RNA, 19 nt, synthetic construct
  source 1..19: mol_type = other RNA
ccttgactaacaccaccac

SEQ ID NO: 6124 - RNA, 19 nt, synthetic construct
  source 1..19: mol_type = other RNA
cgcagagctctgccgcgcc

SEQ ID NO: 6125 - RNA, 19 nt, synthetic construct
  source 1..19: mol_type = other RNA
catgtggacaactgcaccg

SEQ ID NO: 6126 - RNA, 19 nt, synthetic construct
  source 1..19: mol_type = other RNA
ccgaccacagagctggaga

SEQ ID NO: 6127 - RNA, 19 nt, synthetic construct
  source 1..19: mol_type = other RNA
gccgcgccgcctacgagga

SEQ ID NO: 6128 - RNA, 19 nt, synthetic construct
  source 1..19: mol_type = other RNA
ctctgcgaggaccactgtg

SEQ ID NO: 6129 - RNA, 19 nt, synthetic construct
  source 1..19: mol_type = other RNA
gcgccgcctacgaggactt

SEQ ID NO: 6130 - RNA, 19 nt, synthetic construct
  source 1..19: mol_type = other RNA
ctgcgaggaccactgtgtg

SEQ ID NO: 6131 - RNA, 19 nt, synthetic construct
  source 1..19: mol_type = other RNA
agaactgccccaagtccca

SEQ ID NO: 6132 - RNA, 19 nt, synthetic construct
  source 1..19: mol_type = other RNA
ggcgactgcgagtgtttct

SEQ ID NO: 6133 - RNA, 19 nt, synthetic construct
  source 1..19: mol_type = other RNA
cagcctggactttggcctg

SEQ ID NO: 6134 - RNA, 19 nt, synthetic construct
  source 1..19: mol_type = other RNA
cagcctggactttggcctg

SEQ ID NO: 6135 - RNA, 19 nt, synthetic construct
  source 1..19: mol_type = other RNA
cactacaactgcagccact

SEQ ID NO: 6136 - RNA, 19 nt, synthetic construct
  source 1..19: mol_type = other RNA
cagcctggactttggcctg

SEQ ID NO: 6137 - RNA, 19 nt, synthetic construct
  source 1..19: mol_type = other RNA
cagcctggactttggcctg

SEQ ID NO: 6138 - RNA, 19 nt, synthetic construct
  source 1..19: mol_type = other RNA
cactacaactgcagccact

SEQ ID NO: 6139 - RNA, 19 nt, synthetic construct
  source 1..19: mol_type = other RNA
cactacaactgcagccact

SEQ ID NO: 6140 - RNA, 19 nt, synthetic construct
  source 1..19: mol_type = other RNA
cccgccagggcaggagtcc

SEQ ID NO: 6141 - RNA, 19 nt, synthetic construct
  source 1..19: mol_type = other RNA
cctgccacggccggagcgc

SEQ ID NO: 6142 - RNA, 19 nt, synthetic construct
  source 1..19: mol_type = other RNA
actcagggctgaggtcgca

SEQ ID NO: 6143 - RNA, 19 nt, synthetic construct
  source 1..19: mol_type = other RNA
cacggccaccacacacggg

SEQ ID NO: 6144 - RNA, 19 nt, synthetic construct
  source 1..19: mol_type = other RNA
cacggccaccacacacggg

SEQ ID NO: 6145 - RNA, 19 nt, synthetic construct
  source 1..19: mol_type = other RNA
cacggccaccacacacggg

SEQ ID NO: 6146 - RNA, 19 nt, synthetic construct
  source 1..19: mol_type = other RNA
ccgccaccgaccacagagc

SEQ ID NO: 6147 - RNA, 19 nt, synthetic construct
  source 1..19: mol_type = other RNA
gcccgtgtgccacctttgt

SEQ ID NO: 6148 - RNA, 19 nt, synthetic construct
  source 1..19: mol_type = other RNA
caacggcctcccggccttc

SEQ ID NO: 6149 - RNA, 19 nt, synthetic construct
  source 1..19: mol_type = other RNA
cctcaacatgcagcaccag

SEQ ID NO: 6150 - RNA, 19 nt, synthetic construct
  source 1..19: mol_type = other RNA
tccccacacggtgcgcaca

SEQ ID NO: 6151 - RNA, 19 nt, synthetic construct
  source 1..19: mol_type = other RNA
tccccacacggtgcgcaca

SEQ ID NO: 6152 - RNA, 19 nt, synthetic construct
  source 1..19: mol_type = other RNA
tccccacacggtgcgcaca

SEQ ID NO: 6153 - RNA, 19 nt, synthetic construct
  source 1..19: mol_type = other RNA
gggcttcacagtcaccccc

SEQ ID NO: 6154 - RNA, 19 nt, synthetic construct
  source 1..19: mol_type = other RNA
tccccacacggtgcgcaca

SEQ ID NO: 6155 - RNA, 19 nt, synthetic construct
  source 1..19: mol_type = other RNA
tccactctgggaacagctc

SEQ ID NO: 6156 - RNA, 19 nt, synthetic construct
  source 1..19: mol_type = other RNA
cctgtgcgacctcacctgc

SEQ ID NO: 6157 - RNA, 19 nt, synthetic construct
  source 1..19: mol_type = other RNA
agggtcagcccccgccgtg

SEQ ID NO: 6158 - RNA, 19 nt, synthetic construct
  source 1..19: mol_type = other RNA
agcacagccaccaaatcca

SEQ ID NO: 6159 - RNA, 19 nt, synthetic construct
  source 1..19: mol_type = other RNA
agcacagccaccaaatcca

SEQ ID NO: 6160 - RNA, 19 nt, synthetic construct
  source 1..19: mol_type = other RNA
cctgccctgtgacgcccag

SEQ ID NO: 6161 - RNA, 19 nt, synthetic construct
  source 1..19: mol_type = other RNA
gtgcaaccgtcccggcttc

SEQ ID NO: 6162 - RNA, 19 nt, synthetic construct
  source 1..19: mol_type = other RNA
caccccgcgctccgtgctc

SEQ ID NO: 6163 - RNA, 19 nt, synthetic construct
  source 1..19: mol_type = other RNA
gaggtggtgcacgacgagg

SEQ ID NO: 6164 - RNA, 19 nt, synthetic construct
  source 1..19: mol_type = other RNA
ttccctggcctttgcaact

SEQ ID NO: 6165 - RNA, 19 nt, synthetic construct
  source 1..19: mol_type = other RNA
aacggcctcccggccttca

SEQ ID NO: 6166 - RNA, 19 nt, synthetic construct
  source 1..19: mol_type = other RNA
atcgtggtgcagacaggcc

SEQ ID NO: 6167 - RNA, 19 nt, synthetic construct
  source 1..19: mol_type = other RNA
gtccagctacgccgaggcc

SEQ ID NO: 6168 - RNA, 19 nt, synthetic construct
  source 1..19: mol_type = other RNA
ccaccatgcgtgtggacat

SEQ ID NO: 6169 - RNA, 19 nt, synthetic construct
  source 1..19: mol_type = other RNA
tcgtggtgcagacaggcct

SEQ ID NO: 6170 - RNA, 19 nt, synthetic construct
  source 1..19: mol_type = other RNA
tgtgcgccaacagccaaca

SEQ ID NO: 6171 - RNA, 19 nt, synthetic construct
  source 1..19: mol_type = other RNA
ccactggttctatggcaac

SEQ ID NO: 6172 - RNA, 19 nt, synthetic construct
  source 1..19: mol_type = other RNA
gacttcccacaccctagca

SEQ ID NO: 6173 - RNA, 19 nt, synthetic construct
  source 1..19: mol_type = other RNA
ccactggttctatggcaac

SEQ ID NO: 6174 - RNA, 19 nt, synthetic construct
  source 1..19: mol_type = other RNA
ccactggttctatggcaac

SEQ ID NO: 6175 - RNA, 19 nt, synthetic construct
  source 1..19: mol_type = other RNA
ccactggttctatggcaac

SEQ ID NO: 6176 - RNA, 19 nt, synthetic construct
  source 1..19: mol_type = other RNA
ccactggttctatggcaac

SEQ ID NO: 6177 - RNA, 19 nt, synthetic construct
  source 1..19: mol_type = other RNA
cacctccccaccgccagtg

SEQ ID NO: 6178 - RNA, 19 nt, synthetic construct
  source 1..19: mol_type = other RNA
tcatgagagagatccatgc

SEQ ID NO: 6179 - RNA, 19 nt, synthetic construct
  source 1..19: mol_type = other RNA
gagaacccctgctgccccg

SEQ ID NO: 6180 - RNA, 19 nt, synthetic construct
  source 1..19: mol_type = other RNA
ggctcctgccccggagcgt

SEQ ID NO: 6181 - RNA, 19 nt, synthetic construct
  source 1..19: mol_type = other RNA
tggcaccccgcgctccgtg

SEQ ID NO: 6182 - RNA, 19 nt, synthetic construct
  source 1..19: mol_type = other RNA
gatcctcacagagccgagc

SEQ ID NO: 6183 - RNA, 19 nt, synthetic construct
  source 1..19: mol_type = other RNA
gatcctcacagagccgagc

SEQ ID NO: 6184 - RNA, 19 nt, synthetic construct
  source 1..19: mol_type = other RNA
gatcctcacagagccgagc

SEQ ID NO: 6185 - RNA, 19 nt, synthetic construct
  source 1..19: mol_type = other RNA
gatcctcacagagccgagc

SEQ ID NO: 6186 - RNA, 19 nt, synthetic construct
  source 1..19: mol_type = other RNA
ccggcctttgcggagtgcc

SEQ ID NO: 6187 - RNA, 19 nt, synthetic construct
  source 1..19: mol_type = other RNA
tcacactaccaaagtgctg

SEQ ID NO: 6188 - RNA, 19 nt, synthetic construct
  source 1..19: mol_type = other RNA
ccctagggaccacccacac

SEQ ID NO: 6189 - RNA, 19 nt, synthetic construct
  source 1..19: mol_type = other RNA
ccctagggaccacccacac

SEQ ID NO: 6190 - RNA, 19 nt, synthetic construct
  source 1..19: mol_type = other RNA
ccctagggaccacccacac

SEQ ID NO: 6191 - RNA, 19 nt, synthetic construct
  source 1..19: mol_type = other RNA
ccctagggaccacccacac

SEQ ID NO: 6192 - RNA, 19 nt, synthetic construct
  source 1..19: mol_type = other RNA
aagcaacggcaccatcatc

SEQ ID NO: 6193 - RNA, 19 nt, synthetic construct
  source 1..19: mol_type = other RNA
gggtgaccccgagcatccg

SEQ ID NO: 6194 - RNA, 19 nt, synthetic construct
  source 1..19: mol_type = other RNA
ggaggatgcctgcaacaat

SEQ ID NO: 6195 - RNA, 19 nt, synthetic construct
  source 1..19: mol_type = other RNA
ggcaaggcggccgcctgtc

SEQ ID NO: 6196 - RNA, 19 nt, synthetic construct
  source 1..19: mol_type = other RNA
tggggcagaaggtgcactg

SEQ ID NO: 6197 - RNA, 19 nt, synthetic construct
  source 1..19: mol_type = other RNA
cacacctcctctactccag

SEQ ID NO: 6198 - RNA, 19 nt, synthetic construct
  source 1..19: mol_type = other RNA
ctccagcccagggacggca

SEQ ID NO: 6199 - RNA, 19 nt, synthetic construct
  source 1..19: mol_type = other RNA
ctccagcccagggacggca

SEQ ID NO: 6200 - RNA, 19 nt, synthetic construct
  source 1..19: mol_type = other RNA
ctccagcccagggacggca

SEQ ID NO: 6201 - RNA, 19 nt, synthetic construct
  source 1..19: mol_type = other RNA
tacgatcacagccaccggc

SEQ ID NO: 6202 - RNA, 19 nt, synthetic construct
  source 1..19: mol_type = other RNA
ctccagcccagggacggca

SEQ ID NO: 6203 - RNA, 19 nt, synthetic construct
  source 1..19: mol_type = other RNA
ctccagcccagggacggca

SEQ ID NO: 6204 - RNA, 19 nt, synthetic construct
  source 1..19: mol_type = other RNA
ctcccggtctccaccgtgt

SEQ ID NO: 6205 - RNA, 19 nt, synthetic construct
  source 1..19: mol_type = other RNA
gcccacaacgccaggctga

SEQ ID NO: 6206 - RNA, 19 nt, synthetic construct
  source 1..19: mol_type = other RNA
ctccggggggctatggcag

SEQ ID NO: 6207 - RNA, 19 nt, synthetic construct
  source 1..19: mol_type = other RNA
ctcacactaccaaagtgct

SEQ ID NO: 6208 - RNA, 19 nt, synthetic construct
  source 1..19: mol_type = other RNA
ccagtccaaggactgcaac

SEQ ID NO: 6209 - RNA, 19 nt, synthetic construct
  source 1..19: mol_type = other RNA
cagggccaccggctctgtg

SEQ ID NO: 6210 - RNA, 19 nt, synthetic construct
  source 1..19: mol_type = other RNA
cagggccaccggctctgtg

SEQ ID NO: 6211 - RNA, 19 nt, synthetic construct
  source 1..19: mol_type = other RNA
ccagtccaaggactgcaac

SEQ ID NO: 6212 - RNA, 19 nt, synthetic construct
  source 1..19: mol_type = other RNA
ccagtccaaggactgcaac

SEQ ID NO: 6213 - RNA, 19 nt, synthetic construct
  source 1..19: mol_type = other RNA
ccgtcccagcacagaccac

SEQ ID NO: 6214 - RNA, 19 nt, synthetic construct
  source 1..19: mol_type = other RNA
caaccttcagcgtgtccac

SEQ ID NO: 6215 - RNA, 19 nt, synthetic construct
  source 1..19: mol_type = other RNA
gccctcagcatccactaca

SEQ ID NO: 6216 - RNA, 19 nt, synthetic construct
  source 1..19: mol_type = other RNA
ccgctctgtgatctgatgc

SEQ ID NO: 6217 - RNA, 19 nt, synthetic construct
  source 1..19: mol_type = other RNA
ctctaggaaccagagccca

SEQ ID NO: 6218 - RNA, 19 nt, synthetic construct
  source 1..19: mol_type = other RNA
cttgggcctcctctgcgga

SEQ ID NO: 6219 - RNA, 19 nt, synthetic construct
  source 1..19: mol_type = other RNA
gggtaactcagggctgagg

SEQ ID NO: 6220 - RNA, 19 nt, synthetic construct
  source 1..19: mol_type = other RNA
tgcacgacgagggcgccgt

SEQ ID NO: 6221 - RNA, 19 nt, synthetic construct
  source 1..19: mol_type = other RNA
acctatccccccagtgctg

SEQ ID NO: 6222 - RNA, 19 nt, synthetic construct
  source 1..19: mol_type = other RNA
acctatccccccagtgctg

SEQ ID NO: 6223 - RNA, 19 nt, synthetic construct
  source 1..19: mol_type = other RNA
ggtgctggaggcgtccaac

SEQ ID NO: 6224 - RNA, 19 nt, synthetic construct
  source 1..19: mol_type = other RNA
tggtcatcgagacccacgg

SEQ ID NO: 6225 - RNA, 19 nt, synthetic construct
  source 1..19: mol_type = other RNA
ctgggagcaggagggcgtc

SEQ ID NO: 6226 - RNA, 19 nt, synthetic construct
  source 1..19: mol_type = other RNA
gggcgtcttcaagatgtgc

SEQ ID NO: 6227 - RNA, 19 nt, synthetic construct
  source 1..19: mol_type = other RNA
cctctgctgcagtgacgac

SEQ ID NO: 6228 - RNA, 19 nt, synthetic construct
  source 1..19: mol_type = other RNA
agccaccacgggaggcccc

SEQ ID NO: 6229 - RNA, 19 nt, synthetic construct
  source 1..19: mol_type = other RNA
cacacccacagtcaccagc

SEQ ID NO: 6230 - RNA, 19 nt, synthetic construct
  source 1..19: mol_type = other RNA
ccagagactgcccacacct

SEQ ID NO: 6231 - RNA, 19 nt, synthetic construct
  source 1..19: mol_type = other RNA
ctcccccatcactgaccac

SEQ ID NO: 6232 - RNA, 19 nt, synthetic construct
  source 1..19: mol_type = other RNA
ccatggccaccacacacgg

SEQ ID NO: 6233 - RNA, 19 nt, synthetic construct
  source 1..19: mol_type = other RNA
gacacccacagtcaccagc

SEQ ID NO: 6234 - RNA, 19 nt, synthetic construct
  source 1..19: mol_type = other RNA
ctcccccatcactgaccac

SEQ ID NO: 6235 - RNA, 19 nt, synthetic construct
  source 1..19: mol_type = other RNA
ctcccccatcactgaccac

SEQ ID NO: 6236 - RNA, 19 nt, synthetic construct
  source 1..19: mol_type = other RNA
gacacccacagtcaccagc

SEQ ID NO: 6237 - RNA, 19 nt, synthetic construct
  source 1..19: mol_type = other RNA
ccagagactgcccacacct

SEQ ID NO: 6238 - RNA, 19 nt, synthetic construct
  source 1..19: mol_type = other RNA
gacacccacagtcaccagc

SEQ ID NO: 6239 - RNA, 19 nt, synthetic construct
  source 1..19: mol_type = other RNA
tccagggactgcaactgcc

SEQ ID NO: 6240 - RNA, 19 nt, synthetic construct
  source 1..19: mol_type = other RNA
ctcccccatcactgaccac

SEQ ID NO: 6241 - RNA, 19 nt, synthetic construct
  source 1..19: mol_type = other RNA
acatcaccttctgcgaggg

SEQ ID NO: 6242 - RNA, 19 nt, synthetic construct
  source 1..19: mol_type = other RNA
gtgtccctgccacggccgg

SEQ ID NO: 6243 - RNA, 19 nt, synthetic construct
  source 1..19: mol_type = other RNA
caggaagctgcgacaggca

SEQ ID NO: 6244 - RNA, 19 nt, synthetic construct
  source 1..19: mol_type = other RNA
tctgagcactgccgcgccg

SEQ ID NO: 6245 - RNA, 19 nt, synthetic construct
  source 1..19: mol_type = other RNA
tggtggacagcactgcgta

SEQ ID NO: 6246 - RNA, 19 nt, synthetic construct
  source 1..19: mol_type = other RNA
ctttacagccatcccctcc

SEQ ID NO: 6247 - RNA, 19 nt, synthetic construct
  source 1..19: mol_type = other RNA
ctttacagccatcccctcc

SEQ ID NO: 6248 - RNA, 19 nt, synthetic construct
  source 1..19: mol_type = other RNA
ctttacagccatcccctcc

SEQ ID NO: 6249 - RNA, 19 nt, synthetic construct
  source 1..19: mol_type = other RNA
ctcagctgtgttcgtacaa

SEQ ID NO: 6250 - RNA, 19 nt, synthetic construct
  source 1..19: mol_type = other RNA
gagccgctgaccacgagcc

SEQ ID NO: 6251 - RNA, 19 nt, synthetic construct
  source 1..19: mol_type = other RNA
cactgcctccacggttccc

SEQ ID NO: 6252 - RNA, 19 nt, synthetic construct
  source 1..19: mol_type = other RNA
tcaacgcctgcatcagcga

SEQ ID NO: 6253 - RNA, 19 nt, synthetic construct
  source 1..19: mol_type = other RNA
acacccacaaccagaggtt

SEQ ID NO: 6254 - RNA, 19 nt, synthetic construct
  source 1..19: mol_type = other RNA
agaaatgtgccgacagcag

SEQ ID NO: 6255 - RNA, 19 nt, synthetic construct
  source 1..19: mol_type = other RNA
ccggaagaccagcgtgttc

SEQ ID NO: 6256 - RNA, 19 nt, synthetic construct
  source 1..19: mol_type = other RNA
tgcacacccagtggcatcc

SEQ ID NO: 6257 - RNA, 19 nt, synthetic construct
  source 1..19: mol_type = other RNA
actccagccacaacgccat

SEQ ID NO: 6258 - RNA, 19 nt, synthetic construct
  source 1..19: mol_type = other RNA
ccgggcggcgcagcttccc

SEQ ID NO: 6259 - RNA, 19 nt, synthetic construct
  source 1..19: mol_type = other RNA
tttccagccctcaccctag

SEQ ID NO: 6260 - RNA, 19 nt, synthetic construct
  source 1..19: mol_type = other RNA
aagcacagccaccaaatcc

SEQ ID NO: 6261 - RNA, 19 nt, synthetic construct
  source 1..19: mol_type = other RNA
caccctcaaagtgctgacc

SEQ ID NO: 6262 - RNA, 19 nt, synthetic construct
  source 1..19: mol_type = other RNA
aagcacagccaccaaatcc

SEQ ID NO: 6263 - RNA, 19 nt, synthetic construct
  source 1..19: mol_type = other RNA
ctgcgtgcaggcctgcccc

SEQ ID NO: 6264 - RNA, 19 nt, synthetic construct
  source 1..19: mol_type = other RNA
ccgcctgcctcacgcccga

SEQ ID NO: 6265 - RNA, 19 nt, synthetic construct
  source 1..19: mol_type = other RNA
ttccgcttccctggccttt

SEQ ID NO: 6266 - RNA, 19 nt, synthetic construct
  source 1..19: mol_type = other RNA
ctcccagaacagaccacca

SEQ ID NO: 6267 - RNA, 19 nt, synthetic construct
  source 1..19: mol_type = other RNA
ctcccagaacagaccacca

SEQ ID NO: 6268 - RNA, 19 nt, synthetic construct
  source 1..19: mol_type = other RNA
cgtaaccgtgaccaggccc

SEQ ID NO: 6269 - RNA, 19 nt, synthetic construct
  source 1..19: mol_type = other RNA
cctatgtgtccctgccacg

SEQ ID NO: 6270 - RNA, 19 nt, synthetic construct
  source 1..19: mol_type = other RNA
cttccctggcctttgcaac

SEQ ID NO: 6271 - RNA, 19 nt, synthetic construct
  source 1..19: mol_type = other RNA
acggctccgtcctcatcaa

SEQ ID NO: 6272 - RNA, 19 nt, synthetic construct
  source 1..19: mol_type = other RNA
ccaggcacggtgctggatg

SEQ ID NO: 6273 - RNA, 19 nt, synthetic construct
  source 1..19: mol_type = other RNA
ctgtgccaatgccaggaac

SEQ ID NO: 6274 - RNA, 19 nt, synthetic construct
  source 1..19: mol_type = other RNA
gctggtgtcggatgggagt

SEQ ID NO: 6275 - RNA, 19 nt, synthetic construct
  source 1..19: mol_type = other RNA
gccgggtggggacccaccc

SEQ ID NO: 6276 - RNA, 19 nt, synthetic construct
  source 1..19: mol_type = other RNA
ccctcccggtctccaccgt

SEQ ID NO: 6277 - RNA, 19 nt, synthetic construct
  source 1..19: mol_type = other RNA
caccctctcagaaggactg

SEQ ID NO: 6278 - RNA, 19 nt, synthetic construct
  source 1..19: mol_type = other RNA
caccacgggaggccccacg

SEQ ID NO: 6279 - RNA, 19 nt, synthetic construct
  source 1..19: mol_type = other RNA
ctcagcccttccagggacg

SEQ ID NO: 6280 - RNA, 19 nt, synthetic construct
  source 1..19: mol_type = other RNA
agccagggcacgacccgct

SEQ ID NO: 6281 - RNA, 19 nt, synthetic construct
  source 1..19: mol_type = other RNA
agagactgcccacacctcc

SEQ ID NO: 6282 - RNA, 19 nt, synthetic construct
  source 1..19: mol_type = other RNA
taccccatgccggggccct

SEQ ID NO: 6283 - RNA, 19 nt, synthetic construct
  source 1..19: mol_type = other RNA
aaccgtgagcaggtgggga

SEQ ID NO: 6284 - RNA, 19 nt, synthetic construct
  source 1..19: mol_type = other RNA
caccccacatgtgagcacc

SEQ ID NO: 6285 - RNA, 19 nt, synthetic construct
  source 1..19: mol_type = other RNA
taccccatgccggggccct

SEQ ID NO: 6286 - RNA, 19 nt, synthetic construct
  source 1..19: mol_type = other RNA
aaccgtgagcaggtgggga

SEQ ID NO: 6287 - RNA, 19 nt, synthetic construct
  source 1..19: mol_type = other RNA
taccccatgccggggccct

SEQ ID NO: 6288 - RNA, 19 nt, synthetic construct
  source 1..19: mol_type = other RNA
aaccgtgagcaggtgggga

SEQ ID NO: 6289 - RNA, 19 nt, synthetic construct
  source 1..19: mol_type = other RNA
caccccacatgtgagcacc

SEQ ID NO: 6290 - RNA, 19 nt, synthetic construct
  source 1..19: mol_type = other RNA
agagactgcccacacctcc

SEQ ID NO: 6291 - RNA, 19 nt, synthetic construct
  source 1..19: mol_type = other RNA
taccccatgccggggccct

SEQ ID NO: 6292 - RNA, 19 nt, synthetic construct
  source 1..19: mol_type = other RNA
aaccgtgagcaggtgggga

SEQ ID NO: 6293 - RNA, 19 nt, synthetic construct
  source 1..19: mol_type = other RNA
caccccacatgtgagcacc

SEQ ID NO: 6294 - RNA, 19 nt, synthetic construct
  source 1..19: mol_type = other RNA
cgtcccagcacagaccacc

SEQ ID NO: 6295 - RNA, 19 nt, synthetic construct
  source 1..19: mol_type = other RNA
ctccactctgggaacagct

SEQ ID NO: 6296 - RNA, 19 nt, synthetic construct
  source 1..19: mol_type = other RNA
gcatcagcgaccactgcag

SEQ ID NO: 6297 - RNA, 19 nt, synthetic construct
  source 1..19: mol_type = other RNA
gcaggggccgccttgaggt

SEQ ID NO: 6298 - RNA, 19 nt, synthetic construct
  source 1..19: mol_type = other RNA
ggcgaggtgcaaccggtgg

SEQ ID NO: 6299 - RNA, 19 nt, synthetic construct
  source 1..19: mol_type = other RNA
gccccatacagcctgccac

SEQ ID NO: 6300 - RNA, 19 nt, synthetic construct
  source 1..19: mol_type = other RNA
cctgtgacgcccagggtca

SEQ ID NO: 6301 - RNA, 19 nt, synthetic construct
  source 1..19: mol_type = other RNA
ttcgtacaatggcaccttc

SEQ ID NO: 6302 - RNA, 19 nt, synthetic construct
  source 1..19: mol_type = other RNA
aacgttctgcctccatccc

SEQ ID NO: 6303 - RNA, 19 nt, synthetic construct
  source 1..19: mol_type = other RNA
tgcagggtaactcagggct

SEQ ID NO: 6304 - RNA, 19 nt, synthetic construct
  source 1..19: mol_type = other RNA
gcgccaacagccaacagag

SEQ ID NO: 6305 - RNA, 19 nt, synthetic construct
  source 1..19: mol_type = other RNA
ctggatccacggccatccc

SEQ ID NO: 6306 - RNA, 19 nt, synthetic construct
  source 1..19: mol_type = other RNA
cccctgccctgtgacgccc

SEQ ID NO: 6307 - RNA, 19 nt, synthetic construct
  source 1..19: mol_type = other RNA
ccctgccctgtgacgccca

SEQ ID NO: 6308 - RNA, 19 nt, synthetic construct
  source 1..19: mol_type = other RNA
gtgaccaggccccgggccg

SEQ ID NO: 6309 - RNA, 19 nt, synthetic construct
  source 1..19: mol_type = other RNA
ggaccgtcccagcacagac

SEQ ID NO: 6310 - RNA, 19 nt, synthetic construct
  source 1..19: mol_type = other RNA
cagctcacacccccaaagt

SEQ ID NO: 6311 - RNA, 19 nt, synthetic construct
  source 1..19: mol_type = other RNA
cgaggcctagtgggctcca

SEQ ID NO: 6312 - RNA, 19 nt, synthetic construct
  source 1..19: mol_type = other RNA
caccaccgcctgggtcccc

SEQ ID NO: 6313 - RNA, 19 nt, synthetic construct
  source 1..19: mol_type = other RNA
gggatggcggagggctgct

SEQ ID NO: 6314 - RNA, 19 nt, synthetic construct
  source 1..19: mol_type = other RNA
gggccctgtggagccgagc

SEQ ID NO: 6315 - RNA, 19 nt, synthetic construct
  source 1..19: mol_type = other RNA
tgtacctggactgcagcaa

SEQ ID NO: 6316 - RNA, 19 nt, synthetic construct
  source 1..19: mol_type = other RNA
cacggccaccatgtccaca

SEQ ID NO: 6317 - RNA, 19 nt, synthetic construct
  source 1..19: mol_type = other RNA
cacggccaccatgtccaca

SEQ ID NO: 6318 - RNA, 19 nt, synthetic construct
  source 1..19: mol_type = other RNA
cacggccaccatgtccaca

SEQ ID NO: 6319 - RNA, 19 nt, synthetic construct
  source 1..19: mol_type = other RNA
cacggccaccatgtccaca

SEQ ID NO: 6320 - RNA, 19 nt, synthetic construct
  source 1..19: mol_type = other RNA
cacggccaccatgtccaca

SEQ ID NO: 6321 - RNA, 19 nt, synthetic construct
  source 1..19: mol_type = other RNA
gaaacctgggtcaacagcc

SEQ ID NO: 6322 - RNA, 19 nt, synthetic construct
  source 1..19: mol_type = other RNA
ctgccgcgccgcctacgag

SEQ ID NO: 6323 - RNA, 19 nt, synthetic construct
  source 1..19: mol_type = other RNA
gcctgccacgacgcgggcc

SEQ ID NO: 6324 - RNA, 19 nt, synthetic construct
  source 1..19: mol_type = other RNA
actgccgcgccgcctacga

SEQ ID NO: 6325 - RNA, 19 nt, synthetic construct
  source 1..19: mol_type = other RNA
cctatgatgagaaactcta

SEQ ID NO: 6326 - RNA, 19 nt, synthetic construct
  source 1..19: mol_type = other RNA
ggcgcctgtgtgcccgccc

SEQ ID NO: 6327 - RNA, 19 nt, synthetic construct
  source 1..19: mol_type = other RNA
cactggttctatggcaaca

SEQ ID NO: 6328 - RNA, 19 nt, synthetic construct
  source 1..19: mol_type = other RNA
cactggttctatggcaaca

SEQ ID NO: 6329 - RNA, 19 nt, synthetic construct
  source 1..19: mol_type = other RNA
cactggttctatggcaaca

SEQ ID NO: 6330 - RNA, 19 nt, synthetic construct
  source 1..19: mol_type = other RNA
cactggttctatggcaaca

SEQ ID NO: 6331 - RNA, 19 nt, synthetic construct
  source 1..19: mol_type = other RNA
cactggttctatggcaaca

SEQ ID NO: 6332 - RNA, 19 nt, synthetic construct
  source 1..19: mol_type = other RNA
cccgcacccctgcagtgct

SEQ ID NO: 6333 - RNA, 19 nt, synthetic construct
  source 1..19: mol_type = other RNA
gggaagtcatctacaataa

SEQ ID NO: 6334 - RNA, 19 nt, synthetic construct
  source 1..19: mol_type = other RNA
ggaagtcatctacaataag

SEQ ID NO: 6335 - RNA, 19 nt, synthetic construct
  source 1..19: mol_type = other RNA
ctgaggaccagatcctctt

SEQ ID NO: 6336 - RNA, 19 nt, synthetic construct
  source 1..19: mol_type = other RNA
ggccccgggccgagaaccc

SEQ ID NO: 6337 - RNA, 19 nt, synthetic construct
  source 1..19: mol_type = other RNA
gaccactgtgtggacggct

SEQ ID NO: 6338 - RNA, 19 nt, synthetic construct
  source 1..19: mol_type = other RNA
atcatcaaccccaagccct

SEQ ID NO: 6339 - RNA, 19 nt, synthetic construct
  source 1..19: mol_type = other RNA
aggactgcccctgtgtgca

SEQ ID NO: 6340 - RNA, 19 nt, synthetic construct
  source 1..19: mol_type = other RNA
atgaggacaggacctacag

SEQ ID NO: 6341 - RNA, 19 nt, synthetic construct
  source 1..19: mol_type = other RNA
aaaggatggctgctgggcc

SEQ ID NO: 6342 - RNA, 19 nt, synthetic construct
  source 1..19: mol_type = other RNA
cagtccagctgaatgaaac

SEQ ID NO: 6343 - RNA, 19 nt, synthetic construct
  source 1..19: mol_type = other RNA
acggctcagccatcctgca

SEQ ID NO: 6344 - RNA, 19 nt, synthetic construct
  source 1..19: mol_type = other RNA
acattcctgtggaacggag

SEQ ID NO: 6345 - RNA, 19 nt, synthetic construct
  source 1..19: mol_type = other RNA
acctatgatgagaaactct

SEQ ID NO: 6346 - RNA, 19 nt, synthetic construct
  source 1..19: mol_type = other RNA
cgggtgggaagctaagctg

SEQ ID NO: 6347 - RNA, 19 nt, synthetic construct
  source 1..19: mol_type = other RNA
gaccaccacacccgtggcc

SEQ ID NO: 6348 - RNA, 19 nt, synthetic construct
  source 1..19: mol_type = other RNA
cactgtgtggacggctgct

SEQ ID NO: 6349 - RNA, 19 nt, synthetic construct
  source 1..19: mol_type = other RNA
gcatggtgactgcagctac

SEQ ID NO: 6350 - RNA, 19 nt, synthetic construct
  source 1..19: mol_type = other RNA
gggaccacccacacacccc

SEQ ID NO: 6351 - RNA, 19 nt, synthetic construct
  source 1..19: mol_type = other RNA
gggaccacccacacacccc

SEQ ID NO: 6352 - RNA, 19 nt, synthetic construct
  source 1..19: mol_type = other RNA
gtcctccaccccgggaaca

SEQ ID NO: 6353 - RNA, 19 nt, synthetic construct
  source 1..19: mol_type = other RNA
gaccaccgggaccctccca

SEQ ID NO: 6354 - RNA, 19 nt, synthetic construct
  source 1..19: mol_type = other RNA
gggaccacccacacacccc

SEQ ID NO: 6355 - RNA, 19 nt, synthetic construct
  source 1..19: mol_type = other RNA
gggaccacccacacacccc

SEQ ID NO: 6356 - RNA, 19 nt, synthetic construct
  source 1..19: mol_type = other RNA
gtcctccaccccgggaaca

SEQ ID NO: 6357 - RNA, 19 nt, synthetic construct
  source 1..19: mol_type = other RNA
gaccaccgggaccctccca

SEQ ID NO: 6358 - RNA, 19 nt, synthetic construct
  source 1..19: mol_type = other RNA
gggaccacccacaccgcca

SEQ ID NO: 6359 - RNA, 19 nt, synthetic construct
  source 1..19: mol_type = other RNA
ggtccccgacagcagaaag

SEQ ID NO: 6360 - RNA, 19 nt, synthetic construct
  source 1..19: mol_type = other RNA
aaaccttgggcctcctctg

SEQ ID NO: 6361 - RNA, 19 nt, synthetic construct
  source 1..19: mol_type = other RNA
tgtgaccgcatgcgggggc

SEQ ID NO: 6362 - RNA, 19 nt, synthetic construct
  source 1..19: mol_type = other RNA
cccgcgggcaccttcctca

SEQ ID NO: 6363 - RNA, 19 nt, synthetic construct
  source 1..19: mol_type = other RNA
tggctgctacgacaaggac

SEQ ID NO: 6364 - RNA, 19 nt, synthetic construct
  source 1..19: mol_type = other RNA
aacggcaccatcatcagga

SEQ ID NO: 6365 - RNA, 19 nt, synthetic construct
  source 1..19: mol_type = other RNA
cccgccaccgaccacagag

SEQ ID NO: 6366 - RNA, 19 nt, synthetic construct
  source 1..19: mol_type = other RNA
tggcctcctggtggagcag

SEQ ID NO: 6367 - RNA, 19 nt, synthetic construct
  source 1..19: mol_type = other RNA
accactgtgtggacggctg

SEQ ID NO: 6368 - RNA, 19 nt, synthetic construct
  source 1..19: mol_type = other RNA
ctgtgtggacggctgcttc

SEQ ID NO: 6369 - RNA, 19 nt, synthetic construct
  source 1..19: mol_type = other RNA
ccccgcgggcaccttcctc

SEQ ID NO: 6370 - RNA, 19 nt, synthetic construct
  source 1..19: mol_type = other RNA
agggtgtgcagcccccatg

SEQ ID NO: 6371 - RNA, 19 nt, synthetic construct
  source 1..19: mol_type = other RNA
ggaggactgcccctgtgtg

SEQ ID NO: 6372 - RNA, 19 nt, synthetic construct
  source 1..19: mol_type = other RNA
caggactactgtggggaca

SEQ ID NO: 6373 - RNA, 19 nt, synthetic construct
  source 1..19: mol_type = other RNA
ccctggcacccaaggaccc

SEQ ID NO: 6374 - RNA, 19 nt, synthetic construct
  source 1..19: mol_type = other RNA
aatgggcaccgcccagagc

SEQ ID NO: 6375 - RNA, 19 nt, synthetic construct
  source 1..19: mol_type = other RNA
gcttccccaactggaccct

SEQ ID NO: 6376 - RNA, 19 nt, synthetic construct
  source 1..19: mol_type = other RNA
ccgggtcctctgctgcagt

SEQ ID NO: 6377 - RNA, 19 nt, synthetic construct
  source 1..19: mol_type = other RNA
ccacggccaccccgacctc

SEQ ID NO: 6378 - RNA, 19 nt, synthetic construct
  source 1..19: mol_type = other RNA
acccacggccaccatgtcc

SEQ ID NO: 6379 - RNA, 19 nt, synthetic construct
  source 1..19: mol_type = other RNA
ccacaactggggccaccgg

SEQ ID NO: 6380 - RNA, 19 nt, synthetic construct
  source 1..19: mol_type = other RNA
ggaacagctcacactacca

SEQ ID NO: 6381 - RNA, 19 nt, synthetic construct
  source 1..19: mol_type = other RNA
aagtgccaactaccacaac

SEQ ID NO: 6382 - RNA, 19 nt, synthetic construct
  source 1..19: mol_type = other RNA
gggaccacccacaccgcca

SEQ ID NO: 6383 - RNA, 19 nt, synthetic construct
  source 1..19: mol_type = other RNA
tgctgaccaccaccgccac

SEQ ID NO: 6384 - RNA, 19 nt, synthetic construct
  source 1..19: mol_type = other RNA
caccctagcagcagaacca

SEQ ID NO: 6385 - RNA, 19 nt, synthetic construct
  source 1..19: mol_type = other RNA
accctagcagcagaaccac

SEQ ID NO: 6386 - RNA, 19 nt, synthetic construct
  source 1..19: mol_type = other RNA
ctagcagcagaaccaccga

SEQ ID NO: 6387 - RNA, 19 nt, synthetic construct
  source 1..19: mol_type = other RNA
agtggctggactacagcta

SEQ ID NO: 6388 - RNA, 19 nt, synthetic construct
  source 1..19: mol_type = other RNA
accccatgccggggccctc

SEQ ID NO: 6389 - RNA, 19 nt, synthetic construct
  source 1..19: mol_type = other RNA
acccacggccaccatgtcc

SEQ ID NO: 6390 - RNA, 19 nt, synthetic construct
  source 1..19: mol_type = other RNA
cctccactccagagactgt

SEQ ID NO: 6391 - RNA, 19 nt, synthetic construct
  source 1..19: mol_type = other RNA
ggaacagctcacactacca

SEQ ID NO: 6392 - RNA, 19 nt, synthetic construct
  source 1..19: mol_type = other RNA
cttccagtgtggatcagca

SEQ ID NO: 6393 - RNA, 19 nt, synthetic construct
  source 1..19: mol_type = other RNA
tgctgaccaccaccgccac

SEQ ID NO: 6394 - RNA, 19 nt, synthetic construct
  source 1..19: mol_type = other RNA
acaccccagcagcaaccac

SEQ ID NO: 6395 - RNA, 19 nt, synthetic construct
  source 1..19: mol_type = other RNA
agtggctggactacagcta

SEQ ID NO: 6396 - RNA, 19 nt, synthetic construct
  source 1..19: mol_type = other RNA
accccatgccggggccctc

SEQ ID NO: 6397 - RNA, 19 nt, synthetic construct
  source 1..19: mol_type = other RNA
cgtcctccaccccgggaac

SEQ ID NO: 6398 - RNA, 19 nt, synthetic construct
  source 1..19: mol_type = other RNA
acccacggccaccatgtcc

SEQ ID NO: 6399 - RNA, 19 nt, synthetic construct
  source 1..19: mol_type = other RNA
ggaacagctcacactacca

SEQ ID NO: 6400 - RNA, 19 nt, synthetic construct
  source 1..19: mol_type = other RNA
gggaccacccacaccgcca

SEQ ID NO: 6401 - RNA, 19 nt, synthetic construct
  source 1..19: mol_type = other RNA
cacagccaccggctccacc

SEQ ID NO: 6402 - RNA, 19 nt, synthetic construct
  source 1..19: mol_type = other RNA
tgctgaccaccaccgccac

SEQ ID NO: 6403 - RNA, 19 nt, synthetic construct
  source 1..19: mol_type = other RNA
acaccccagcagcaaccac

SEQ ID NO: 6404 - RNA, 19 nt, synthetic construct
  source 1..19: mol_type = other RNA
agtggctggactacagcta

SEQ ID NO: 6405 - RNA, 19 nt, synthetic construct
  source 1..19: mol_type = other RNA
accccatgccggggccctc

SEQ ID NO: 6406 - RNA, 19 nt, synthetic construct
  source 1..19: mol_type = other RNA
acccacggccaccatgtcc

SEQ ID NO: 6407 - RNA, 19 nt, synthetic construct
  source 1..19: mol_type = other RNA
ggaacagctcacactacca

SEQ ID NO: 6408 - RNA, 19 nt, synthetic construct
  source 1..19: mol_type = other RNA
tgctgaccaccaccgccac

SEQ ID NO: 6409 - RNA, 19 nt, synthetic construct
  source 1..19: mol_type = other RNA
acaccccagcagcaaccac

SEQ ID NO: 6410 - RNA, 19 nt, synthetic construct
  source 1..19: mol_type = other RNA
agtggctggactacagcta

SEQ ID NO: 6411 - RNA, 19 nt, synthetic construct
  source 1..19: mol_type = other RNA
accccatgccggggccctc

SEQ ID NO: 6412 - RNA, 19 nt, synthetic construct
  source 1..19: mol_type = other RNA
cgtcctccaccccgggaac

SEQ ID NO: 6413 - RNA, 19 nt, synthetic construct
  source 1..19: mol_type = other RNA
acccacggccaccatgtcc

SEQ ID NO: 6414 - RNA, 19 nt, synthetic construct
  source 1..19: mol_type = other RNA
cctccactccagagactgt

SEQ ID NO: 6415 - RNA, 19 nt, synthetic construct
  source 1..19: mol_type = other RNA
ggaacagctcacactacca

SEQ ID NO: 6416 - RNA, 19 nt, synthetic construct
  source 1..19: mol_type = other RNA
ggggaagtcatctacaata

SEQ ID NO: 6417 - RNA, 19 nt, synthetic construct
  source 1..19: mol_type = other RNA
gcctgcctgtgtgcccgcc

SEQ ID NO: 6418 - RNA, 19 nt, synthetic construct
  source 1..19: mol_type = other RNA
ctgtcccaccttccgctgc

SEQ ID NO: 6419 - RNA, 19 nt, synthetic construct
  source 1..19: mol_type = other RNA
tccggagaccacccacacc

SEQ ID NO: 6420 - RNA, 19 nt, synthetic construct
  source 1..19: mol_type = other RNA
tccggagaccacccacacc

SEQ ID NO: 6421 - RNA, 19 nt, synthetic construct
  source 1..19: mol_type = other RNA
tgcccacaacgccaggctg

SEQ ID NO: 6422 - RNA, 19 nt, synthetic construct
  source 1..19: mol_type = other RNA
cacaatccacccctcctcc

SEQ ID NO: 6423 - RNA, 19 nt, synthetic construct
  source 1..19: mol_type = other RNA
cacaatccacccctcctcc

SEQ ID NO: 6424 - RNA, 19 nt, synthetic construct
  source 1..19: mol_type = other RNA
gcctgtgcgacctcacctg

SEQ ID NO: 6425 - RNA, 19 nt, synthetic construct
  source 1..19: mol_type = other RNA
acgtccggccgctggggca

SEQ ID NO: 6426 - RNA, 19 nt, synthetic construct
  source 1..19: mol_type = other RNA
acgtcctcgcccacccggc

SEQ ID NO: 6427 - RNA, 19 nt, synthetic construct
  source 1..19: mol_type = other RNA
tcatcgtggtgcagacagg

SEQ ID NO: 6428 - RNA, 19 nt, synthetic construct
  source 1..19: mol_type = other RNA
ccactgcctccacggttcc

SEQ ID NO: 6429 - RNA, 19 nt, synthetic construct
  source 1..19: mol_type = other RNA
tggtgccgcaggcagagac

SEQ ID NO: 6430 - RNA, 19 nt, synthetic construct
  source 1..19: mol_type = other RNA
ccggccccagaagggtgag

SEQ ID NO: 6431 - RNA, 19 nt, synthetic construct
  source 1..19: mol_type = other RNA
gacatcacgcactctggct

SEQ ID NO: 6432 - RNA, 19 nt, synthetic construct
  source 1..19: mol_type = other RNA
cctggagaggtggtgcacg

SEQ ID NO: 6433 - RNA, 19 nt, synthetic construct
  source 1..19: mol_type = other RNA
taccacaaccacgggcttc

SEQ ID NO: 6434 - RNA, 19 nt, synthetic construct
  source 1..19: mol_type = other RNA
taccacaaccacgggcttc

SEQ ID NO: 6435 - RNA, 19 nt, synthetic construct
  source 1..19: mol_type = other RNA
taccacaaccacgggcttc

SEQ ID NO: 6436 - RNA, 19 nt, synthetic construct
  source 1..19: mol_type = other RNA
taccacaaccacgggcttc

SEQ ID NO: 6437 - RNA, 19 nt, synthetic construct
  source 1..19: mol_type = other RNA
taccacaaccacgggcttc

SEQ ID NO: 6438 - RNA, 19 nt, synthetic construct
  source 1..19: mol_type = other RNA
gccactgcctccacggttc

SEQ ID NO: 6439 - RNA, 19 nt, synthetic construct
  source 1..19: mol_type = other RNA
gtacaatgggcaccgccca

SEQ ID NO: 6440 - RNA, 19 nt, synthetic construct
  source 1..19: mol_type = other RNA
gggaccggaagaccagcgt

SEQ ID NO: 6441 - RNA, 19 nt, synthetic construct
  source 1..19: mol_type = other RNA
gctgaccagggctcccccg

SEQ ID NO: 6442 - RNA, 19 nt, synthetic construct
  source 1..19: mol_type = other RNA
tggacccaaagcctgtggc

SEQ ID NO: 6443 - RNA, 19 nt, synthetic construct
  source 1..19: mol_type = other RNA
ccctgtgctggctgacatc

SEQ ID NO: 6444 - RNA, 19 nt, synthetic construct
  source 1..19: mol_type = other RNA
accccaacccagaccacag

SEQ ID NO: 6445 - RNA, 19 nt, synthetic construct
  source 1..19: mol_type = other RNA
ggcggccctcacctcgcag

SEQ ID NO: 6446 - RNA, 19 nt, synthetic construct
  source 1..19: mol_type = other RNA
tccgggtcctctgctgcag

SEQ ID NO: 6447 - RNA, 19 nt, synthetic construct
  source 1..19: mol_type = other RNA
ttgggaccaccgggaccct

SEQ ID NO: 6448 - RNA, 19 nt, synthetic construct
  source 1..19: mol_type = other RNA
ttgggaccaccgggaccct

SEQ ID NO: 6449 - RNA, 19 nt, synthetic construct
  source 1..19: mol_type = other RNA
caagcccctgccctgtgac

SEQ ID NO: 6450 - RNA, 19 nt, synthetic construct
  source 1..19: mol_type = other RNA
gcaaggcggccgcctgtcc

SEQ ID NO: 6451 - RNA, 19 nt, synthetic construct
  source 1..19: mol_type = other RNA
agcagccccacatcggccc

SEQ ID NO: 6452 - RNA, 19 nt, synthetic construct
  source 1..19: mol_type = other RNA
ggaccaccgggaccctccc

SEQ ID NO: 6453 - RNA, 19 nt, synthetic construct
  source 1..19: mol_type = other RNA
ggaccaccgggaccctccc

SEQ ID NO: 6454 - RNA, 19 nt, synthetic construct
  source 1..19: mol_type = other RNA
ttcccgacatgccgctgga

SEQ ID NO: 6455 - RNA, 19 nt, synthetic construct
  source 1..19: mol_type = other RNA
acggtgacttcccacaccc

SEQ ID NO: 6456 - RNA, 19 nt, synthetic construct
  source 1..19: mol_type = other RNA
gatccacggccaccccgac

SEQ ID NO: 6457 - RNA, 19 nt, synthetic construct
  source 1..19: mol_type = other RNA
ccccagtgccgaacaccat

SEQ ID NO: 6458 - RNA, 19 nt, synthetic construct
  source 1..19: mol_type = other RNA
ttccacggtgacttcccac

SEQ ID NO: 6459 - RNA, 19 nt, synthetic construct
  source 1..19: mol_type = other RNA
cacggccacacccagcaag

SEQ ID NO: 6460 - RNA, 19 nt, synthetic construct
  source 1..19: mol_type = other RNA
cacggccacacccagcaag

SEQ ID NO: 6461 - RNA, 19 nt, synthetic construct
  source 1..19: mol_type = other RNA
ttccacggtgacttcccac

SEQ ID NO: 6462 - RNA, 19 nt, synthetic construct
  source 1..19: mol_type = other RNA
cacggccacacccagcaag

SEQ ID NO: 6463 - RNA, 19 nt, synthetic construct
  source 1..19: mol_type = other RNA
cacacccccaaagtggtga

SEQ ID NO: 6464 - RNA, 19 nt, synthetic construct
  source 1..19: mol_type = other RNA
ttgggcctcctctgcggag

SEQ ID NO: 6465 - RNA, 19 nt, synthetic construct
  source 1..19: mol_type = other RNA
gcacctcgaccctgctgcc

SEQ ID NO: 6466 - RNA, 19 nt, synthetic construct
  source 1..19: mol_type = other RNA
gcacctcgaccctgctgcc

SEQ ID NO: 6467 - RNA, 19 nt, synthetic construct
  source 1..19: mol_type = other RNA
gcacctcgaccctgctgcc

SEQ ID NO: 6468 - RNA, 19 nt, synthetic construct
  source 1..19: mol_type = other RNA
gcacctcgaccctgctgcc

SEQ ID NO: 6469 - RNA, 19 nt, synthetic construct
  source 1..19: mol_type = other RNA
ggtgtcggatgggagtggg

SEQ ID NO: 6470 - RNA, 19 nt, synthetic construct
  source 1..19: mol_type = other RNA
ccccctcaacatgcagcac

SEQ ID NO: 6471 - RNA, 19 nt, synthetic construct
  source 1..19: mol_type = other RNA
cggggggctatggcagtgc

SEQ ID NO: 6472 - RNA, 19 nt, synthetic construct
  source 1..19: mol_type = other RNA
acacccacaaccagtggct

SEQ ID NO: 6473 - RNA, 19 nt, synthetic construct
  source 1..19: mol_type = other RNA
acacccacaaccagtggct

SEQ ID NO: 6474 - RNA, 19 nt, synthetic construct
  source 1..19: mol_type = other RNA
ccgtccccgtccccccacc

SEQ ID NO: 6475 - RNA, 19 nt, synthetic construct
  source 1..19: mol_type = other RNA
accctgcacggacacctgc

SEQ ID NO: 6476 - RNA, 19 nt, synthetic construct
  source 1..19: mol_type = other RNA
acggacacctgctccaacc

SEQ ID NO: 6477 - RNA, 19 nt, synthetic construct
  source 1..19: mol_type = other RNA
cgacctgcatggtgactgc

SEQ ID NO: 6478 - RNA, 19 nt, synthetic construct
  source 1..19: mol_type = other RNA
aacgagaactgcctgaaag

SEQ ID NO: 6479 - RNA, 19 nt, synthetic construct
  source 1..19: mol_type = other RNA
tcagcggggtggtggaggc

SEQ ID NO: 6480 - RNA, 19 nt, synthetic construct
  source 1..19: mol_type = other RNA
tacaacccacatgggggct

SEQ ID NO: 6481 - RNA, 19 nt, synthetic construct
  source 1..19: mol_type = other RNA
ggcaccatcatcaggaagg

SEQ ID NO: 6482 - RNA, 19 nt, synthetic construct
  source 1..19: mol_type = other RNA
ctcagccctccctcagtgc

SEQ ID NO: 6483 - RNA, 19 nt, synthetic construct
  source 1..19: mol_type = other RNA
tgtgcctaccccaacccag

SEQ ID NO: 6484 - RNA, 19 nt, synthetic construct
  source 1..19: mol_type = other RNA
gccccaacaacaatggcaa

SEQ ID NO: 6485 - RNA, 19 nt, synthetic construct
  source 1..19: mol_type = other RNA
ccccaacaacaatggcaac

SEQ ID NO: 6486 - RNA, 19 nt, synthetic construct
  source 1..19: mol_type = other RNA
caacaatggcaacctccag

SEQ ID NO: 6487 - RNA, 19 nt, synthetic construct
  source 1..19: mol_type = other RNA
tccacggccaccccgacct

SEQ ID NO: 6488 - RNA, 19 nt, synthetic construct
  source 1..19: mol_type = other RNA
cagcacaaccaccacaccc

SEQ ID NO: 6489 - RNA, 19 nt, synthetic construct
  source 1..19: mol_type = other RNA
accaccacaactgtggcca

SEQ ID NO: 6490 - RNA, 19 nt, synthetic construct
  source 1..19: mol_type = other RNA
ctgggacaactcccatccc

SEQ ID NO: 6491 - RNA, 19 nt, synthetic construct
  source 1..19: mol_type = other RNA
cttccacggtgacttccca

SEQ ID NO: 6492 - RNA, 19 nt, synthetic construct
  source 1..19: mol_type = other RNA
tccgtgcggccggaggggc

SEQ ID NO: 6493 - RNA, 19 nt, synthetic construct
  source 1..19: mol_type = other RNA
cagcacaaccaccacaccc

SEQ ID NO: 6494 - RNA, 19 nt, synthetic construct
  source 1..19: mol_type = other RNA
accaccacaactgtggcca

SEQ ID NO: 6495 - RNA, 19 nt, synthetic construct
  source 1..19: mol_type = other RNA
tccgtgcggccggaggggc

SEQ ID NO: 6496 - RNA, 19 nt, synthetic construct
  source 1..19: mol_type = other RNA
ccgggaacagctccccctc

SEQ ID NO: 6497 - RNA, 19 nt, synthetic construct
  source 1..19: mol_type = other RNA
cagcacaaccaccacaccc

SEQ ID NO: 6498 - RNA, 19 nt, synthetic construct
  source 1..19: mol_type = other RNA
accaccacaactgtggcca

SEQ ID NO: 6499 - RNA, 19 nt, synthetic construct
  source 1..19: mol_type = other RNA
cttccacggtgacttccca

SEQ ID NO: 6500 - RNA, 19 nt, synthetic construct
  source 1..19: mol_type = other RNA
cagcacaaccaccacaccc

SEQ ID NO: 6501 - RNA, 19 nt, synthetic construct
  source 1..19: mol_type = other RNA
acccacaaccagtggctcc

SEQ ID NO: 6502 - RNA, 19 nt, synthetic construct
  source 1..19: mol_type = other RNA
accaccacaactgtggcca

SEQ ID NO: 6503 - RNA, 19 nt, synthetic construct
  source 1..19: mol_type = other RNA
tcccccatcactgatcacc

SEQ ID NO: 6504 - RNA, 19 nt, synthetic construct
  source 1..19: mol_type = other RNA
tccgtgcggccggaggggc

SEQ ID NO: 6505 - RNA, 19 nt, synthetic construct
  source 1..19: mol_type = other RNA
ccgggaacagctccccctc

SEQ ID NO: 6506 - RNA, 19 nt, synthetic construct
  source 1..19: mol_type = other RNA
gggccaccagttccacgtc

SEQ ID NO: 6507 - RNA, 19 nt, synthetic construct
  source 1..19: mol_type = other RNA
gactgcaactgcccttcca

SEQ ID NO: 6508 - RNA, 19 nt, synthetic construct
  source 1..19: mol_type = other RNA
cagcacaaccaccacaccc

SEQ ID NO: 6509 - RNA, 19 nt, synthetic construct
  source 1..19: mol_type = other RNA
acccacaaccagtggctcc

SEQ ID NO: 6510 - RNA, 19 nt, synthetic construct
  source 1..19: mol_type = other RNA
accaccacaactgtggcca

SEQ ID NO: 6511 - RNA, 19 nt, synthetic construct
  source 1..19: mol_type = other RNA
ggacccgagccagccctgt

SEQ ID NO: 6512 - RNA, 19 nt, synthetic construct
  source 1..19: mol_type = other RNA
cccccgcgccctcagcatc

SEQ ID NO: 6513 - RNA, 19 nt, synthetic construct
  source 1..19: mol_type = other RNA
aagacgtggctggtccccg

SEQ ID NO: 6514 - RNA, 19 nt, synthetic construct
  source 1..19: mol_type = other RNA
cagagctctgccgcgcccg

SEQ ID NO: 6515 - RNA, 19 nt, synthetic construct
  source 1..19: mol_type = other RNA
cccacagctggaggggatg

SEQ ID NO: 6516 - RNA, 19 nt, synthetic construct
  source 1..19: mol_type = other RNA
gcctgcccctgcgtgggac

SEQ ID NO: 6517 - RNA, 19 nt, synthetic construct
  source 1..19: mol_type = other RNA
aggagtccatctgcaccca

SEQ ID NO: 6518 - RNA, 19 nt, synthetic construct
  source 1..19: mol_type = other RNA
agaggcgggtccacgagga

SEQ ID NO: 6519 - RNA, 19 nt, synthetic construct
  source 1..19: mol_type = other RNA
ccgtgctcctgctgcccac

SEQ ID NO: 6520 - RNA, 19 nt, synthetic construct
  source 1..19: mol_type = other RNA
cgacaggcaaggcggccgc

SEQ ID NO: 6521 - RNA, 19 nt, synthetic construct
  source 1..19: mol_type = other RNA
caggcaaggcggccgcctg

SEQ ID NO: 6522 - RNA, 19 nt, synthetic construct
  source 1..19: mol_type = other RNA
aggcggccgcctgtccatg

SEQ ID NO: 6523 - RNA, 19 nt, synthetic construct
  source 1..19: mol_type = other RNA
ataaccacggtggtgacca

SEQ ID NO: 6524 - RNA, 19 nt, synthetic construct
  source 1..19: mol_type = other RNA
ataaccacggtggtgacca

SEQ ID NO: 6525 - RNA, 19 nt, synthetic construct
  source 1..19: mol_type = other RNA
ctggccgcctgcgcccagg

SEQ ID NO: 6526 - RNA, 19 nt, synthetic construct
  source 1..19: mol_type = other RNA
atcctcacagagccgagca

SEQ ID NO: 6527 - RNA, 19 nt, synthetic construct
  source 1..19: mol_type = other RNA
atcctcacagagccgagca

SEQ ID NO: 6528 - RNA, 19 nt, synthetic construct
  source 1..19: mol_type = other RNA
atcctcacagagccgagca

SEQ ID NO: 6529 - RNA, 19 nt, synthetic construct
  source 1..19: mol_type = other RNA
cacccatgtccaccatgtc

SEQ ID NO: 6530 - RNA, 19 nt, synthetic construct
  source 1..19: mol_type = other RNA
atcctcacagagccgagca

SEQ ID NO: 6531 - RNA, 19 nt, synthetic construct
  source 1..19: mol_type = other RNA
actgcctccacggttccca

SEQ ID NO: 6532 - RNA, 19 nt, synthetic construct
  source 1..19: mol_type = other RNA
ctcctccactccggagacc

SEQ ID NO: 6533 - RNA, 19 nt, synthetic construct
  source 1..19: mol_type = other RNA
cagcctggtgtccccctgg

SEQ ID NO: 6534 - RNA, 19 nt, synthetic construct
  source 1..19: mol_type = other RNA
ctcctccactccggagacc

SEQ ID NO: 6535 - RNA, 19 nt, synthetic construct
  source 1..19: mol_type = other RNA
caaccacgggcttcacagc

SEQ ID NO: 6536 - RNA, 19 nt, synthetic construct
  source 1..19: mol_type = other RNA
caaccacgggcttcacagc

SEQ ID NO: 6537 - RNA, 19 nt, synthetic construct
  source 1..19: mol_type = other RNA
caaccacgggcttcacagc

SEQ ID NO: 6538 - RNA, 19 nt, synthetic construct
  source 1..19: mol_type = other RNA
caaccacgggcttcacagc

SEQ ID NO: 6539 - RNA, 19 nt, synthetic construct
  source 1..19: mol_type = other RNA
ggaggccacgggcgcagcc

SEQ ID NO: 6540 - RNA, 19 nt, synthetic construct
  source 1..19: mol_type = other RNA
cagccaccagctccaaagc

SEQ ID NO: 6541 - RNA, 19 nt, synthetic construct
  source 1..19: mol_type = other RNA
ccacgggatggccgtgtcc

SEQ ID NO: 6542 - RNA, 19 nt, synthetic construct
  source 1..19: mol_type = other RNA
cctatccccccagtgctga

SEQ ID NO: 6543 - RNA, 19 nt, synthetic construct
  source 1..19: mol_type = other RNA
cctatccccccagtgctga

SEQ ID NO: 6544 - RNA, 19 nt, synthetic construct
  source 1..19: mol_type = other RNA
aaagagccgctgaccacga

SEQ ID NO: 6545 - RNA, 19 nt, synthetic construct
  source 1..19: mol_type = other RNA
aaccagaggctccacggtg

SEQ ID NO: 6546 - RNA, 19 nt, synthetic construct
  source 1..19: mol_type = other RNA
aaccagaggctccacggtg

SEQ ID NO: 6547 - RNA, 19 nt, synthetic construct
  source 1..19: mol_type = other RNA
cccctcctccgtcccgggg

SEQ ID NO: 6548 - RNA, 19 nt, synthetic construct
  source 1..19: mol_type = other RNA
tctactccagagaccaccc

SEQ ID NO: 6549 - RNA, 19 nt, synthetic construct
  source 1..19: mol_type = other RNA
cactctgggaacagctcac

SEQ ID NO: 6550 - RNA, 19 nt, synthetic construct
  source 1..19: mol_type = other RNA
ccctgagacccactggctt

SEQ ID NO: 6551 - RNA, 19 nt, synthetic construct
  source 1..19: mol_type = other RNA
cctcactgtcaccatggtg

SEQ ID NO: 6552 - RNA, 19 nt, synthetic construct
  source 1..19: mol_type = other RNA
tgaaacctgggtcaacagc

SEQ ID NO: 6553 - RNA, 19 nt, synthetic construct
  source 1..19: mol_type = other RNA
gacgccctggaacaaacta

SEQ ID NO: 6554 - RNA, 19 nt, synthetic construct
  source 1..19: mol_type = other RNA
ccgtgtacctctgtgaggc

SEQ ID NO: 6555 - RNA, 19 nt, synthetic construct
  source 1..19: mol_type = other RNA
ctaccagctttacacccat

SEQ ID NO: 6556 - RNA, 19 nt, synthetic construct
  source 1..19: mol_type = other RNA
ctaccagctttacacccat

SEQ ID NO: 6557 - RNA, 19 nt, synthetic construct
  source 1..19: mol_type = other RNA
gtgccccgagcgcgtgccg

SEQ ID NO: 6558 - RNA, 19 nt, synthetic construct
  source 1..19: mol_type = other RNA
cacaacgccaggctgaccc

SEQ ID NO: 6559 - RNA, 19 nt, synthetic construct
  source 1..19: mol_type = other RNA
acaacgccaggctgacccc

SEQ ID NO: 6560 - RNA, 19 nt, synthetic construct
  source 1..19: mol_type = other RNA
gccaatgccaggaacagct

SEQ ID NO: 6561 - RNA, 19 nt, synthetic construct
  source 1..19: mol_type = other RNA
gtgtgcagcccccatggtg

SEQ ID NO: 6562 - RNA, 19 nt, synthetic construct
  source 1..19: mol_type = other RNA
cgaggaggactgcccctgt

SEQ ID NO: 6563 - RNA, 19 nt, synthetic construct
  source 1..19: mol_type = other RNA
gaggaggactgcccctgtg

SEQ ID NO: 6564 - RNA, 19 nt, synthetic construct
  source 1..19: mol_type = other RNA
cccgaagtgcccacccagc

SEQ ID NO: 6565 - RNA, 19 nt, synthetic construct
  source 1..19: mol_type = other RNA
ctgcacacccagtggcatc

SEQ ID NO: 6566 - RNA, 19 nt, synthetic construct
  source 1..19: mol_type = other RNA
gtagcccggggctgaccag

SEQ ID NO: 6567 - RNA, 19 nt, synthetic construct
  source 1..19: mol_type = other RNA
gctcagcccttccagggac

SEQ ID NO: 6568 - RNA, 19 nt, synthetic construct
  source 1..19: mol_type = other RNA
cactgagaagcacagccac

SEQ ID NO: 6569 - RNA, 19 nt, synthetic construct
  source 1..19: mol_type = other RNA
ccatcactgaccaccacgg

SEQ ID NO: 6570 - RNA, 19 nt, synthetic construct
  source 1..19: mol_type = other RNA
atcactgaccaccacggcc

SEQ ID NO: 6571 - RNA, 19 nt, synthetic construct
  source 1..19: mol_type = other RNA
atcacggccaccggctcca

SEQ ID NO: 6572 - RNA, 19 nt, synthetic construct
  source 1..19: mol_type = other RNA
gtgagcaccacggccacga

SEQ ID NO: 6573 - RNA, 19 nt, synthetic construct
  source 1..19: mol_type = other RNA
cactgagaagcacagccac

SEQ ID NO: 6574 - RNA, 19 nt, synthetic construct
  source 1..19: mol_type = other RNA
ccatcactgaccaccacgg

SEQ ID NO: 6575 - RNA, 19 nt, synthetic construct
  source 1..19: mol_type = other RNA
atcactgaccaccacggcc

SEQ ID NO: 6576 - RNA, 19 nt, synthetic construct
  source 1..19: mol_type = other RNA
atcacggccaccggctcca

SEQ ID NO: 6577 - RNA, 19 nt, synthetic construct
  source 1..19: mol_type = other RNA
cactgagaagcacagccac

SEQ ID NO: 6578 - RNA, 19 nt, synthetic construct
  source 1..19: mol_type = other RNA
ccatcactgaccaccacgg

SEQ ID NO: 6579 - RNA, 19 nt, synthetic construct
  source 1..19: mol_type = other RNA
atcactgaccaccacggcc

SEQ ID NO: 6580 - RNA, 19 nt, synthetic construct
  source 1..19: mol_type = other RNA
gcaaccaccagtaccaccc

SEQ ID NO: 6581 - RNA, 19 nt, synthetic construct
  source 1..19: mol_type = other RNA
gtgagcaccacggccacga

SEQ ID NO: 6582 - RNA, 19 nt, synthetic construct
  source 1..19: mol_type = other RNA
cactgagaagcacagccac

SEQ ID NO: 6583 - RNA, 19 nt, synthetic construct
  source 1..19: mol_type = other RNA
atcacggccaccggctcca

SEQ ID NO: 6584 - RNA, 19 nt, synthetic construct
  source 1..19: mol_type = other RNA
gtgagcaccacggccacga

SEQ ID NO: 6585 - RNA, 19 nt, synthetic construct
  source 1..19: mol_type = other RNA
aactgcccttccagcactg

SEQ ID NO: 6586 - RNA, 19 nt, synthetic construct
  source 1..19: mol_type = other RNA
cactgagaagcacagccac

SEQ ID NO: 6587 - RNA, 19 nt, synthetic construct
  source 1..19: mol_type = other RNA
ccatcactgaccaccacgg

SEQ ID NO: 6588 - RNA, 19 nt, synthetic construct
  source 1..19: mol_type = other RNA
atcactgaccaccacggcc

SEQ ID NO: 6589 - RNA, 19 nt, synthetic construct
  source 1..19: mol_type = other RNA
atcacggccaccggctcca

SEQ ID NO: 6590 - RNA, 19 nt, synthetic construct
  source 1..19: mol_type = other RNA
agcacagccacaaaatcca

SEQ ID NO: 6591 - RNA, 19 nt, synthetic construct
  source 1..19: mol_type = other RNA
cagggcgcctgtcccacct

SEQ ID NO: 6592 - RNA, 19 nt, synthetic construct
  source 1..19: mol_type = other RNA
gcatgtggggcggctccca

SEQ ID NO: 6593 - RNA, 19 nt, synthetic construct
  source 1..19: mol_type = other RNA
ggatggcggagggctgctt

SEQ ID NO: 6594 - RNA, 19 nt, synthetic construct
  source 1..19: mol_type = other RNA
ccgtggcttcccggcccag

SEQ ID NO: 6595 - RNA, 19 nt, synthetic construct
  source 1..19: mol_type = other RNA
ggtgtacctggactgcagc

SEQ ID NO: 6596 - RNA, 19 nt, synthetic construct
  source 1..19: mol_type = other RNA
cgggtggcgactgcgagtg

SEQ ID NO: 6597 - RNA, 19 nt, synthetic construct
  source 1..19: mol_type = other RNA
gagactttgagacgtttga

SEQ ID NO: 6598 - RNA, 19 nt, synthetic construct
  source 1..19: mol_type = other RNA
ccagatacacaagcaccct

SEQ ID NO: 6599 - RNA, 19 nt, synthetic construct
  source 1..19: mol_type = other RNA
cacagagccttccacgggg

SEQ ID NO: 6600 - RNA, 19 nt, synthetic construct
  source 1..19: mol_type = other RNA
cacagagccttccacgggg

SEQ ID NO: 6601 - RNA, 19 nt, synthetic construct
  source 1..19: mol_type = other RNA
acatgggcatctgcgtgca

SEQ ID NO: 6602 - RNA, 19 nt, synthetic construct
  source 1..19: mol_type = other RNA
ggaccacccacaccgccag

SEQ ID NO: 6603 - RNA, 19 nt, synthetic construct
  source 1..19: mol_type = other RNA
ataaccacggtggtgacca

SEQ ID NO: 6604 - RNA, 19 nt, synthetic construct
  source 1..19: mol_type = other RNA
ataaccacggtggtgacca

SEQ ID NO: 6605 - RNA, 19 nt, synthetic construct
  source 1..19: mol_type = other RNA
acgcggggggccagccgcg

SEQ ID NO: 6606 - RNA, 19 nt, synthetic construct
  source 1..19: mol_type = other RNA
tgctgtgcctaccccaacc

SEQ ID NO: 6607 - RNA, 19 nt, synthetic construct
  source 1..19: mol_type = other RNA
gaccagggctcccccggcc

SEQ ID NO: 6608 - RNA, 19 nt, synthetic construct
  source 1..19: mol_type = other RNA
gtgacaatgccatccctct

SEQ ID NO: 6609 - RNA, 19 nt, synthetic construct
  source 1..19: mol_type = other RNA
caggggccgccttgaggtg

SEQ ID NO: 6610 - RNA, 19 nt, synthetic construct
  source 1..19: mol_type = other RNA
cacacctacacccacgtgg

SEQ ID NO: 6611 - RNA, 19 nt, synthetic construct
  source 1..19: mol_type = other RNA
caattccacggccacaccc

SEQ ID NO: 6612 - RNA, 19 nt, synthetic construct
  source 1..19: mol_type = other RNA
gggtgacttccactacaag

SEQ ID NO: 6613 - RNA, 19 nt, synthetic construct
  source 1..19: mol_type = other RNA
tgctggaggcgtccaacgg

SEQ ID NO: 6614 - RNA, 19 nt, synthetic construct
  source 1..19: mol_type = other RNA
tcaccctgcacggacacct

SEQ ID NO: 6615 - RNA, 19 nt, synthetic construct
  source 1..19: mol_type = other RNA
gggcacctccttcaacacc

SEQ ID NO: 6616 - RNA, 19 nt, synthetic construct
  source 1..19: mol_type = other RNA
ccgcccaggagtgcccctg

SEQ ID NO: 6617 - RNA, 19 nt, synthetic construct
  source 1..19: mol_type = other RNA
aggaggactgcccctgtgt

SEQ ID NO: 6618 - RNA, 19 nt, synthetic construct
  source 1..19: mol_type = other RNA
acaacccacatgggggctg

SEQ ID NO: 6619 - RNA, 19 nt, synthetic construct
  source 1..19: mol_type = other RNA
ggctgctacccgaagtgcc

SEQ ID NO: 6620 - RNA, 19 nt, synthetic construct
  source 1..19: mol_type = other RNA
acacccagtggcatccagt

SEQ ID NO: 6621 - RNA, 19 nt, synthetic construct
  source 1..19: mol_type = other RNA
caccaacccctcctcaact

SEQ ID NO: 6622 - RNA, 19 nt, synthetic construct
  source 1..19: mol_type = other RNA
tgccgaacaccatggccac

SEQ ID NO: 6623 - RNA, 19 nt, synthetic construct
  source 1..19: mol_type = other RNA
caccaacccctcctcaact

SEQ ID NO: 6624 - RNA, 19 nt, synthetic construct
  source 1..19: mol_type = other RNA
ggccccacggccaccccgt

SEQ ID NO: 6625 - RNA, 19 nt, synthetic construct
  source 1..19: mol_type = other RNA
caccaacccctcctcaact

SEQ ID NO: 6626 - RNA, 19 nt, synthetic construct
  source 1..19: mol_type = other RNA
accagtaccacccagcact

SEQ ID NO: 6627 - RNA, 19 nt, synthetic construct
  source 1..19: mol_type = other RNA
cggccaccacaaccagggc

SEQ ID NO: 6628 - RNA, 19 nt, synthetic construct
  source 1..19: mol_type = other RNA
ctgatcaccacggccacta

SEQ ID NO: 6629 - RNA, 19 nt, synthetic construct
  source 1..19: mol_type = other RNA
caccaacccctcctcaact

SEQ ID NO: 6630 - RNA, 19 nt, synthetic construct
  source 1..19: mol_type = other RNA
ggccccacggccaccccgt

SEQ ID NO: 6631 - RNA, 19 nt, synthetic construct
  source 1..19: mol_type = other RNA
caccaacccctcctcaact

SEQ ID NO: 6632 - RNA, 19 nt, synthetic construct
  source 1..19: mol_type = other RNA
tccgccccgctgtcctcgc

SEQ ID NO: 6633 - RNA, 19 nt, synthetic construct
  source 1..19: mol_type = other RNA
ccccgggccgagaacccct

SEQ ID NO: 6634 - RNA, 19 nt, synthetic construct
  source 1..19: mol_type = other RNA
cgtgggtgaaaccggcccc

SEQ ID NO: 6635 - RNA, 19 nt, synthetic construct
  source 1..19: mol_type = other RNA
ggtgacgctcagcctggac

SEQ ID NO: 6636 - RNA, 19 nt, synthetic construct
  source 1..19: mol_type = other RNA
ggaccacccacaccgccac

SEQ ID NO: 6637 - RNA, 19 nt, synthetic construct
  source 1..19: mol_type = other RNA
ggaccacccacaccgccac

SEQ ID NO: 6638 - RNA, 19 nt, synthetic construct
  source 1..19: mol_type = other RNA
tcctccgtcccggggacca

SEQ ID NO: 6639 - RNA, 19 nt, synthetic construct
  source 1..19: mol_type = other RNA
aggactactgtggggacaa

SEQ ID NO: 6640 - RNA, 19 nt, synthetic construct
  source 1..19: mol_type = other RNA
tacgagctgatcctccaag

SEQ ID NO: 6641 - RNA, 19 nt, synthetic construct
  source 1..19: mol_type = other RNA
catcccggggaccacccac

SEQ ID NO: 6642 - RNA, 19 nt, synthetic construct
  source 1..19: mol_type = other RNA
ccgccacagtgctgaccac

SEQ ID NO: 6643 - RNA, 19 nt, synthetic construct
  source 1..19: mol_type = other RNA
catcccggggaccacccac

SEQ ID NO: 6644 - RNA, 19 nt, synthetic construct
  source 1..19: mol_type = other RNA
agaccacccacacctccac

SEQ ID NO: 6645 - RNA, 19 nt, synthetic construct
  source 1..19: mol_type = other RNA
catcccggggaccacccac

SEQ ID NO: 6646 - RNA, 19 nt, synthetic construct
  source 1..19: mol_type = other RNA
ccgccacagtgctgaccac

SEQ ID NO: 6647 - RNA, 19 nt, synthetic construct
  source 1..19: mol_type = other RNA
agaccacccacacctccac

SEQ ID NO: 6648 - RNA, 19 nt, synthetic construct
  source 1..19: mol_type = other RNA
catcccggggaccacccac

SEQ ID NO: 6649 - RNA, 19 nt, synthetic construct
  source 1..19: mol_type = other RNA
agaccacccacacctccac

SEQ ID NO: 6650 - RNA, 19 nt, synthetic construct
  source 1..19: mol_type = other RNA
cccccacccgtgccagccc

SEQ ID NO: 6651 - RNA, 19 nt, synthetic construct
  source 1..19: mol_type = other RNA
ccaggatgggtgccccgag

SEQ ID NO: 6652 - RNA, 19 nt, synthetic construct
  source 1..19: mol_type = other RNA
ttggctctggcggccatgc

SEQ ID NO: 6653 - RNA, 19 nt, synthetic construct
  source 1..19: mol_type = other RNA
ccgcttccctggcctttgc

SEQ ID NO: 6654 - RNA, 19 nt, synthetic construct
  source 1..19: mol_type = other RNA
ccgtcctcatcaatgggca

SEQ ID NO: 6655 - RNA, 19 nt, synthetic construct
  source 1..19: mol_type = other RNA
cagacctgtggcctgtgtg

SEQ ID NO: 6656 - RNA, 19 nt, synthetic construct
  source 1..19: mol_type = other RNA
agacctgtggcctgtgtgg

SEQ ID NO: 6657 - RNA, 19 nt, synthetic construct
  source 1..19: mol_type = other RNA
cctgtgtggggacttcaac

SEQ ID NO: 6658 - RNA, 19 nt, synthetic construct
  source 1..19: mol_type = other RNA
cggacccgctgcccttgcc

SEQ ID NO: 6659 - RNA, 19 nt, synthetic construct
  source 1..19: mol_type = other RNA
ggagggcatctgccaccgc

SEQ ID NO: 6660 - RNA, 19 nt, synthetic construct
  source 1..19: mol_type = other RNA
gccccacctgcccgtgtgc

SEQ ID NO: 6661 - RNA, 19 nt, synthetic construct
  source 1..19: mol_type = other RNA
gcagcaccaggagtgtggc

SEQ ID NO: 6662 - RNA, 19 nt, synthetic construct
  source 1..19: mol_type = other RNA
gcgcgcgcagctctgcgag

SEQ ID NO: 6663 - RNA, 19 nt, synthetic construct
  source 1..19: mol_type = other RNA
gaggccacgggcgcagcct

SEQ ID NO: 6664 - RNA, 19 nt, synthetic construct
  source 1..19: mol_type = other RNA
cttccactcgaactgcatg

SEQ ID NO: 6665 - RNA, 19 nt, synthetic construct
  source 1..19: mol_type = other RNA
gctgcacctgccccgcggg

SEQ ID NO: 6666 - RNA, 19 nt, synthetic construct
  source 1..19: mol_type = other RNA
ctccccctcctgcccggac

SEQ ID NO: 6667 - RNA, 19 nt, synthetic construct
  source 1..19: mol_type = other RNA
tacccgaagtgcccaccca

SEQ ID NO: 6668 - RNA, 19 nt, synthetic construct
  source 1..19: mol_type = other RNA
ccgaagtgcccacccagcc

SEQ ID NO: 6669 - RNA, 19 nt, synthetic construct
  source 1..19: mol_type = other RNA
gtggcatgtcctggaactc

SEQ ID NO: 6670 - RNA, 19 nt, synthetic construct
  source 1..19: mol_type = other RNA
cttcaccaccgcctgggtc

SEQ ID NO: 6671 - RNA, 19 nt, synthetic construct
  source 1..19: mol_type = other RNA
caccgcccagagcccggcc

SEQ ID NO: 6672 - RNA, 19 nt, synthetic construct
  source 1..19: mol_type = other RNA
gcatgcgggggctgatgtg

SEQ ID NO: 6673 - RNA, 19 nt, synthetic construct
  source 1..19: mol_type = other RNA
tgcgccaacagccaacaga

SEQ ID NO: 6674 - RNA, 19 nt, synthetic construct
  source 1..19: mol_type = other RNA
agcctgctgtgcctacccc

SEQ ID NO: 6675 - RNA, 19 nt, synthetic construct
  source 1..19: mol_type = other RNA
gcaggagggcgtcttcaag

SEQ ID NO: 6676 - RNA, 19 nt, synthetic construct
  source 1..19: mol_type = other RNA
caccgaccacagagctgga

SEQ ID NO: 6677 - RNA, 19 nt, synthetic construct
  source 1..19: mol_type = other RNA
gaccacagagctggagacg

SEQ ID NO: 6678 - RNA, 19 nt, synthetic construct
  source 1..19: mol_type = other RNA
ccccaccctctcagaagga

SEQ ID NO: 6679 - RNA, 19 nt, synthetic construct
  source 1..19: mol_type = other RNA
gtggccacatccacccttc

SEQ ID NO: 6680 - RNA, 19 nt, synthetic construct
  source 1..19: mol_type = other RNA
ctccctcctccagtccagg

SEQ ID NO: 6681 - RNA, 19 nt, synthetic construct
  source 1..19: mol_type = other RNA
gagaagcacagccaccaca

SEQ ID NO: 6682 - RNA, 19 nt, synthetic construct
  source 1..19: mol_type = other RNA
gaagcacagccaccacacc

SEQ ID NO: 6683 - RNA, 19 nt, synthetic construct
  source 1..19: mol_type = other RNA
catgtccacagccacaccc

SEQ ID NO: 6684 - RNA, 19 nt, synthetic construct
  source 1..19: mol_type = other RNA
tccactccagagactgccc

SEQ ID NO: 6685 - RNA, 19 nt, synthetic construct
  source 1..19: mol_type = other RNA
gagactgcccacacctcca

SEQ ID NO: 6686 - RNA, 19 nt, synthetic construct
  source 1..19: mol_type = other RNA
caccgccacagtgctgacc

SEQ ID NO: 6687 - RNA, 19 nt, synthetic construct
  source 1..19: mol_type = other RNA
cgccacagtgctgaccacc

SEQ ID NO: 6688 - RNA, 19 nt, synthetic construct
  source 1..19: mol_type = other RNA
agtgctgaccaccaccacc

SEQ ID NO: 6689 - RNA, 19 nt, synthetic construct
  source 1..19: mol_type = other RNA
tgggacaactcccatcccc

SEQ ID NO: 6690 - RNA, 19 nt, synthetic construct
  source 1..19: mol_type = other RNA
gggacaactcccatccccc

SEQ ID NO: 6691 - RNA, 19 nt, synthetic construct
  source 1..19: mol_type = other RNA
ggcgatccctgccccccag

SEQ ID NO: 6692 - RNA, 19 nt, synthetic construct
  source 1..19: mol_type = other RNA
ccacccacatcacagagcc

SEQ ID NO: 6693 - RNA, 19 nt, synthetic construct
  source 1..19: mol_type = other RNA
tcgactccagccctttcca

SEQ ID NO: 6694 - RNA, 19 nt, synthetic construct
  source 1..19: mol_type = other RNA
acacccagcaagacccgca

SEQ ID NO: 6695 - RNA, 19 nt, synthetic construct
  source 1..19: mol_type = other RNA
ccacggtggtgaccatggg

SEQ ID NO: 6696 - RNA, 19 nt, synthetic construct
  source 1..19: mol_type = other RNA
ccatgggctgtgagcccca

SEQ ID NO: 6697 - RNA, 19 nt, synthetic construct
  source 1..19: mol_type = other RNA
tctggcggggactttgaca

SEQ ID NO: 6698 - RNA, 19 nt, synthetic construct
  source 1..19: mol_type = other RNA
ccaccgtgacggtgcccac

SEQ ID NO: 6699 - RNA, 19 nt, synthetic construct
  source 1..19: mol_type = other RNA
gagaagcacagccaccaca

SEQ ID NO: 6700 - RNA, 19 nt, synthetic construct
  source 1..19: mol_type = other RNA
gaagcacagccaccacacc

SEQ ID NO: 6701 - RNA, 19 nt, synthetic construct
  source 1..19: mol_type = other RNA
tttacagccatcccctcct

SEQ ID NO: 6702 - RNA, 19 nt, synthetic construct
  source 1..19: mol_type = other RNA
catgtccacagccacaccc

SEQ ID NO: 6703 - RNA, 19 nt, synthetic construct
  source 1..19: mol_type = other RNA
aaccggggccaccggctct

SEQ ID NO: 6704 - RNA, 19 nt, synthetic construct
  source 1..19: mol_type = other RNA
agtgctgaccaccaccacc

SEQ ID NO: 6705 - RNA, 19 nt, synthetic construct
  source 1..19: mol_type = other RNA
ccacccacatcacagagcc

SEQ ID NO: 6706 - RNA, 19 nt, synthetic construct
  source 1..19: mol_type = other RNA
cccacaccccagcagcaac

SEQ ID NO: 6707 - RNA, 19 nt, synthetic construct
  source 1..19: mol_type = other RNA
acacccagcaagacccgca

SEQ ID NO: 6708 - RNA, 19 nt, synthetic construct
  source 1..19: mol_type = other RNA
ccacggtggtgaccatggg

SEQ ID NO: 6709 - RNA, 19 nt, synthetic construct
  source 1..19: mol_type = other RNA
ccatgggctgtgagcccca

SEQ ID NO: 6710 - RNA, 19 nt, synthetic construct
  source 1..19: mol_type = other RNA
tctggcggggactttgaca

SEQ ID NO: 6711 - RNA, 19 nt, synthetic construct
  source 1..19: mol_type = other RNA
ccgtcctccaccccgggaa

SEQ ID NO: 6712 - RNA, 19 nt, synthetic construct
  source 1..19: mol_type = other RNA
cgggaacagctccccctcc

SEQ ID NO: 6713 - RNA, 19 nt, synthetic construct
  source 1..19: mol_type = other RNA
gaacagaccaccacaccca

SEQ ID NO: 6714 - RNA, 19 nt, synthetic construct
  source 1..19: mol_type = other RNA
cacccacacctccacagtg

SEQ ID NO: 6715 - RNA, 19 nt, synthetic construct
  source 1..19: mol_type = other RNA
ccactacaactgcagccac

SEQ ID NO: 6716 - RNA, 19 nt, synthetic construct
  source 1..19: mol_type = other RNA
gagcccagcactacagcca

SEQ ID NO: 6717 - RNA, 19 nt, synthetic construct
  source 1..19: mol_type = other RNA
ccaccgtgacggtgcccac

SEQ ID NO: 6718 - RNA, 19 nt, synthetic construct
  source 1..19: mol_type = other RNA
caccacacccacagtcatc

SEQ ID NO: 6719 - RNA, 19 nt, synthetic construct
  source 1..19: mol_type = other RNA
ctccctcctccagtccagg

SEQ ID NO: 6720 - RNA, 19 nt, synthetic construct
  source 1..19: mol_type = other RNA
gagaagcacagccaccaca

SEQ ID NO: 6721 - RNA, 19 nt, synthetic construct
  source 1..19: mol_type = other RNA
gaagcacagccaccacacc

SEQ ID NO: 6722 - RNA, 19 nt, synthetic construct
  source 1..19: mol_type = other RNA
catgtccacagccacaccc

SEQ ID NO: 6723 - RNA, 19 nt, synthetic construct
  source 1..19: mol_type = other RNA
acaccctcctctactccag

SEQ ID NO: 6724 - RNA, 19 nt, synthetic construct
  source 1..19: mol_type = other RNA
tgcttaccaccacgaccac

SEQ ID NO: 6725 - RNA, 19 nt, synthetic construct
  source 1..19: mol_type = other RNA
caccgccacagtgctgacc

SEQ ID NO: 6726 - RNA, 19 nt, synthetic construct
  source 1..19: mol_type = other RNA
cgccacagtgctgaccacc

SEQ ID NO: 6727 - RNA, 19 nt, synthetic construct
  source 1..19: mol_type = other RNA
agtgctgaccaccaccacc

SEQ ID NO: 6728 - RNA, 19 nt, synthetic construct
  source 1..19: mol_type = other RNA
cagggacaactcccatccc

SEQ ID NO: 6729 - RNA, 19 nt, synthetic construct
  source 1..19: mol_type = other RNA
agggacaactcccatcccc

SEQ ID NO: 6730 - RNA, 19 nt, synthetic construct
  source 1..19: mol_type = other RNA
gggacaactcccatccccc

SEQ ID NO: 6731 - RNA, 19 nt, synthetic construct
  source 1..19: mol_type = other RNA
ccacccacatcacagagcc

SEQ ID NO: 6732 - RNA, 19 nt, synthetic construct
  source 1..19: mol_type = other RNA
cccacaccccagcagcaac

SEQ ID NO: 6733 - RNA, 19 nt, synthetic construct
  source 1..19: mol_type = other RNA
cagcaaccaccagtaccac

SEQ ID NO: 6734 - RNA, 19 nt, synthetic construct
  source 1..19: mol_type = other RNA
acacccagcaagacccgca

SEQ ID NO: 6735 - RNA, 19 nt, synthetic construct
  source 1..19: mol_type = other RNA
tctggcggggactttgaca

SEQ ID NO: 6736 - RNA, 19 nt, synthetic construct
  source 1..19: mol_type = other RNA
ccaccgtgacggtgcccac

SEQ ID NO: 6737 - RNA, 19 nt, synthetic construct
  source 1..19: mol_type = other RNA
gagaagcacagccaccaca

SEQ ID NO: 6738 - RNA, 19 nt, synthetic construct
  source 1..19: mol_type = other RNA
gaagcacagccaccacacc

SEQ ID NO: 6739 - RNA, 19 nt, synthetic construct
  source 1..19: mol_type = other RNA
tttacagccatcccctcct

SEQ ID NO: 6740 - RNA, 19 nt, synthetic construct
  source 1..19: mol_type = other RNA
catgtccacagccacaccc

SEQ ID NO: 6741 - RNA, 19 nt, synthetic construct
  source 1..19: mol_type = other RNA
tccactccagagactgccc

SEQ ID NO: 6742 - RNA, 19 nt, synthetic construct
  source 1..19: mol_type = other RNA
gagactgcccacacctcca

SEQ ID NO: 6743 - RNA, 19 nt, synthetic construct
  source 1..19: mol_type = other RNA
gtgaccccctcctccgtcc

SEQ ID NO: 6744 - RNA, 19 nt, synthetic construct
  source 1..19: mol_type = other RNA
ccctcctccgtcccgggga

SEQ ID NO: 6745 - RNA, 19 nt, synthetic construct
  source 1..19: mol_type = other RNA
agtgctgaccaccaccacc

SEQ ID NO: 6746 - RNA, 19 nt, synthetic construct
  source 1..19: mol_type = other RNA
ccacccacatcacagagcc

SEQ ID NO: 6747 - RNA, 19 nt, synthetic construct
  source 1..19: mol_type = other RNA
cccacaccccagcagcaac

SEQ ID NO: 6748 - RNA, 19 nt, synthetic construct
  source 1..19: mol_type = other RNA
ccgagtcacccccttcccc

SEQ ID NO: 6749 - RNA, 19 nt, synthetic construct
  source 1..19: mol_type = other RNA
acacccagcaagacccgca

SEQ ID NO: 6750 - RNA, 19 nt, synthetic construct
  source 1..19: mol_type = other RNA
tctggcggggactttgaca

SEQ ID NO: 6751 - RNA, 19 nt, synthetic construct
  source 1..19: mol_type = other RNA
gcatccactggatccacgg

SEQ ID NO: 6752 - RNA, 19 nt, synthetic construct
  source 1..19: mol_type = other RNA
catccactggatccacggc

SEQ ID NO: 6753 - RNA, 19 nt, synthetic construct
  source 1..19: mol_type = other RNA
ccgtcctccaccccgggaa

SEQ ID NO: 6754 - RNA, 19 nt, synthetic construct
  source 1..19: mol_type = other RNA
cgggaacagctccccctcc

SEQ ID NO: 6755 - RNA, 19 nt, synthetic construct
  source 1..19: mol_type = other RNA
cacccacacctccacagtg

SEQ ID NO: 6756 - RNA, 19 nt, synthetic construct
  source 1..19: mol_type = other RNA
ccactacaactgcagccac

SEQ ID NO: 6757 - RNA, 19 nt, synthetic construct
  source 1..19: mol_type = other RNA
ccaccgtgacggtgcccac

SEQ ID NO: 6758 - RNA, 19 nt, synthetic construct
  source 1..19: mol_type = other RNA
ctccctcctccagtccagg

SEQ ID NO: 6759 - RNA, 19 nt, synthetic construct
  source 1..19: mol_type = other RNA
gagaagcacagccaccaca

SEQ ID NO: 6760 - RNA, 19 nt, synthetic construct
  source 1..19: mol_type = other RNA
gaagcacagccaccacacc

SEQ ID NO: 6761 - RNA, 19 nt, synthetic construct
  source 1..19: mol_type = other RNA
tttacagccatcccctcct

SEQ ID NO: 6762 - RNA, 19 nt, synthetic construct
  source 1..19: mol_type = other RNA
catgtccacagccacaccc

SEQ ID NO: 6763 - RNA, 19 nt, synthetic construct
  source 1..19: mol_type = other RNA
aaccggggccaccggctct

SEQ ID NO: 6764 - RNA, 19 nt, synthetic construct
  source 1..19: mol_type = other RNA
agtgctgaccaccaccacc

SEQ ID NO: 6765 - RNA, 19 nt, synthetic construct
  source 1..19: mol_type = other RNA
cacccacacctccacagtg

SEQ ID NO: 6766 - RNA, 19 nt, synthetic construct
  source 1..19: mol_type = other RNA
ccactacaactgcagccac

SEQ ID NO: 6767 - RNA, 19 nt, synthetic construct
  source 1..19: mol_type = other RNA
ctctgggaacagctcacac

SEQ ID NO: 6768 - RNA, 19 nt, synthetic construct
  source 1..19: mol_type = other RNA
cccagcagcctgccaacct

SEQ ID NO: 6769 - RNA, 19 nt, synthetic construct
  source 1..19: mol_type = other RNA
accgtgtcgtcctgctgga

SEQ ID NO: 6770 - RNA, 19 nt, synthetic construct
  source 1..19: mol_type = other RNA
ttgtgtctgtgctggggac

SEQ ID NO: 6771 - RNA, 19 nt, synthetic construct
  source 1..19: mol_type = other RNA
caccccccactgccagccc

SEQ ID NO: 6772 - RNA, 19 nt, synthetic construct
  source 1..19: mol_type = other RNA
gtctagcacacccaccccc

SEQ ID NO: 6773 - RNA, 19 nt, synthetic construct
  source 1..19: mol_type = other RNA
tgctgagtgccacaacctt

SEQ ID NO: 6774 - RNA, 19 nt, synthetic construct
  source 1..19: mol_type = other RNA
gcgaccactgcaggggccg

SEQ ID NO: 6775 - RNA, 19 nt, synthetic construct
  source 1..19: mol_type = other RNA
tacaagccatgcggcccca

SEQ ID NO: 6776 - RNA, 19 nt, synthetic construct
  source 1..19: mol_type = other RNA
cagcctgccacctgcaact

SEQ ID NO: 6777 - RNA, 19 nt, synthetic construct
  source 1..19: mol_type = other RNA
tgaggaccagatcctcttc

SEQ ID NO: 6778 - RNA, 19 nt, synthetic construct
  source 1..19: mol_type = other RNA
tgcgtgcaggcctgcccct

SEQ ID NO: 6779 - RNA, 19 nt, synthetic construct
  source 1..19: mol_type = other RNA
tgcccctgcgtgggacccg

SEQ ID NO: 6780 - RNA, 19 nt, synthetic construct
  source 1..19: mol_type = other RNA
cacccaggaggagggcgac

SEQ ID NO: 6781 - RNA, 19 nt, synthetic construct
  source 1..19: mol_type = other RNA
ttccgctgcagacctcagc

SEQ ID NO: 6782 - RNA, 19 nt, synthetic construct
  source 1..19: mol_type = other RNA
ccctgccacatgtgtacct

SEQ ID NO: 6783 - RNA, 19 nt, synthetic construct
  source 1..19: mol_type = other RNA
gaccgcctgcctcacgccc

SEQ ID NO: 6784 - RNA, 19 nt, synthetic construct
  source 1..19: mol_type = other RNA
ttctgcgagggctcctgcc

SEQ ID NO: 6785 - RNA, 19 nt, synthetic construct
  source 1..19: mol_type = other RNA
cgagggctcctgccccgga

SEQ ID NO: 6786 - RNA, 19 nt, synthetic construct
  source 1..19: mol_type = other RNA
agtactcagcagaggccca

SEQ ID NO: 6787 - RNA, 19 nt, synthetic construct
  source 1..19: mol_type = other RNA
gtactcagcagaggcccag

SEQ ID NO: 6788 - RNA, 19 nt, synthetic construct
  source 1..19: mol_type = other RNA
gcacctgctgccaggagag

SEQ ID NO: 6789 - RNA, 19 nt, synthetic construct
  source 1..19: mol_type = other RNA
cggcctgtgtgtggcaccc

SEQ ID NO: 6790 - RNA, 19 nt, synthetic construct
  source 1..19: mol_type = other RNA
ccgcgctccgtgctcctgc

SEQ ID NO: 6791 - RNA, 19 nt, synthetic construct
  source 1..19: mol_type = other RNA
tgcaactacgtgttctctg

SEQ ID NO: 6792 - RNA, 19 nt, synthetic construct
  source 1..19: mol_type = other RNA
tttgcaactacgtgttctc

SEQ ID NO: 6793 - RNA, 19 nt, synthetic construct
  source 1..19: mol_type = other RNA
aactacgtgttctctgagc

SEQ ID NO: 6794 - RNA, 19 nt, synthetic construct
  source 1..19: mol_type = other RNA
gggtgggaagctaagctgc

SEQ ID NO: 6795 - RNA, 19 nt, synthetic construct
  source 1..19: mol_type = other RNA
ttgcaactacgtgttctct

SEQ ID NO: 6796 - RNA, 19 nt, synthetic construct
  source 1..19: mol_type = other RNA
cgcgcagctctgcgaggac

SEQ ID NO: 6797 - RNA, 19 nt, synthetic construct
  source 1..19: mol_type = other RNA
caactggaccctggcacag

SEQ ID NO: 6798 - RNA, 19 nt, synthetic construct
  source 1..19: mol_type = other RNA
tacagccgcactggcctcc

SEQ ID NO: 6799 - RNA, 19 nt, synthetic construct
  source 1..19: mol_type = other RNA
catcaccccagtgctgacc

SEQ ID NO: 6800 - RNA, 19 nt, synthetic construct
  source 1..19: mol_type = other RNA
tgccccacctgcccgtgtg

SEQ ID NO: 6801 - RNA, 19 nt, synthetic construct
  source 1..19: mol_type = other RNA
gtgcaaccttcccaggcgc

SEQ ID NO: 6802 - RNA, 19 nt, synthetic construct
  source 1..19: mol_type = other RNA
ctcgactccagccctttcc

SEQ ID NO: 6803 - RNA, 19 nt, synthetic construct
  source 1..19: mol_type = other RNA
tcacagccaccggctccac

SEQ ID NO: 6804 - RNA, 19 nt, synthetic construct
  source 1..19: mol_type = other RNA
accgaccacagagctggag

SEQ ID NO: 6805 - RNA, 19 nt, synthetic construct
  source 1..19: mol_type = other RNA
gcgatccctgccccccagc

SEQ ID NO: 6806 - RNA, 19 nt, synthetic construct
  source 1..19: mol_type = other RNA
ccgaacaccacggccacca

SEQ ID NO: 6807 - RNA, 19 nt, synthetic construct
  source 1..19: mol_type = other RNA
cgatcacagccaccggctc

SEQ ID NO: 6808 - RNA, 19 nt, synthetic construct
  source 1..19: mol_type = other RNA
ccgaacaccacggccacca

SEQ ID NO: 6809 - RNA, 19 nt, synthetic construct
  source 1..19: mol_type = other RNA
ccgaacaccacggccacca

SEQ ID NO: 6810 - RNA, 19 nt, synthetic construct
  source 1..19: mol_type = other RNA
gatccacggccaccctgtc

SEQ ID NO: 6811 - RNA, 19 nt, synthetic construct
  source 1..19: mol_type = other RNA
catgggctgtgagccccag

SEQ ID NO: 6812 - RNA, 19 nt, synthetic construct
  source 1..19: mol_type = other RNA
catgggctgtgagccccag

SEQ ID NO: 6813 - RNA, 19 nt, synthetic construct
  source 1..19: mol_type = other RNA
cccccagtgccgaacacca

SEQ ID NO: 6814 - RNA, 19 nt, synthetic construct
  source 1..19: mol_type = other RNA
caaccttcccaggcgccct

SEQ ID NO: 6815 - RNA, 19 nt, synthetic construct
  source 1..19: mol_type = other RNA
agcagagcggggactacat

SEQ ID NO: 6816 - RNA, 19 nt, synthetic construct
  source 1..19: mol_type = other RNA
atggctgctgggccccgac

SEQ ID NO: 6817 - RNA, 19 nt, synthetic construct
  source 1..19: mol_type = other RNA
cagagcctgcctgtgtgcc

SEQ ID NO: 6818 - RNA, 19 nt, synthetic construct
  source 1..19: mol_type = other RNA
cctgtgtgcacaacgaggc

SEQ ID NO: 6819 - RNA, 19 nt, synthetic construct
  source 1..19: mol_type = other RNA
ctgtgtgcacaacgaggcc

SEQ ID NO: 6820 - RNA, 19 nt, synthetic construct
  source 1..19: mol_type = other RNA
cacatgggcatctgcgtgc

SEQ ID NO: 6821 - RNA, 19 nt, synthetic construct
  source 1..19: mol_type = other RNA
cacccacaccgccacagtg

SEQ ID NO: 6822 - RNA, 19 nt, synthetic construct
  source 1..19: mol_type = other RNA
cacccacaccgccacagtg

SEQ ID NO: 6823 - RNA, 19 nt, synthetic construct
  source 1..19: mol_type = other RNA
ccacccacaccgccacagt

SEQ ID NO: 6824 - RNA, 19 nt, synthetic construct
  source 1..19: mol_type = other RNA
caccaccaacccctcctca

SEQ ID NO: 6825 - RNA, 19 nt, synthetic construct
  source 1..19: mol_type = other RNA
caccaccaacccctcctca

SEQ ID NO: 6826 - RNA, 19 nt, synthetic construct
  source 1..19: mol_type = other RNA
ccacccacaccgccacagt

SEQ ID NO: 6827 - RNA, 19 nt, synthetic construct
  source 1..19: mol_type = other RNA
caccaccaacccctcctca

SEQ ID NO: 6828 - RNA, 19 nt, synthetic construct
  source 1..19: mol_type = other RNA
caccaccaacccctcctca

SEQ ID NO: 6829 - RNA, 19 nt, synthetic construct
  source 1..19: mol_type = other RNA
caccaccaacccctcctca

SEQ ID NO: 6830 - RNA, 19 nt, synthetic construct
  source 1..19: mol_type = other RNA
ggcctgcgtgaacgacgcg

SEQ ID NO: 6831 - RNA, 19 nt, synthetic construct
  source 1..19: mol_type = other RNA
actacgaggcctgcgtgaa

SEQ ID NO: 6832 - RNA, 19 nt, synthetic construct
  source 1..19: mol_type = other RNA
cagagactgtccacacctc

SEQ ID NO: 6833 - RNA, 19 nt, synthetic construct
  source 1..19: mol_type = other RNA
cagagactgtccacacctc

SEQ ID NO: 6834 - RNA, 19 nt, synthetic construct
  source 1..19: mol_type = other RNA
gcctgcgtgaacgacgcgt

SEQ ID NO: 6835 - RNA, 19 nt, synthetic construct
  source 1..19: mol_type = other RNA
aggcctgcgtgaacgacgc

SEQ ID NO: 6836 - RNA, 19 nt, synthetic construct
  source 1..19: mol_type = other RNA
gtggcctacggggatggcc

SEQ ID NO: 6837 - RNA, 19 nt, synthetic construct
  source 1..19: mol_type = other RNA
agttggatgggcccacgga

SEQ ID NO: 6838 - RNA, 19 nt, synthetic construct
  source 1..19: mol_type = other RNA
gggaacttcaaccagaacc

SEQ ID NO: 6839 - RNA, 19 nt, synthetic construct
  source 1..19: mol_type = other RNA
gcctgtgcgccgcgctgtc

SEQ ID NO: 6840 - RNA, 19 nt, synthetic construct
  source 1..19: mol_type = other RNA
caagtactacgaggcctgc

SEQ ID NO: 6841 - RNA, 19 nt, synthetic construct
  source 1..19: mol_type = other RNA
tactacgaggcctgcgtga

SEQ ID NO: 6842 - RNA, 19 nt, synthetic construct
  source 1..19: mol_type = other RNA
gtcgtggaatgcagcctgg

SEQ ID NO: 6843 - RNA, 19 nt, synthetic construct
  source 1..19: mol_type = other RNA
gtcgtggaatgcagcctgg

SEQ ID NO: 6844 - RNA, 19 nt, synthetic construct
  source 1..19: mol_type = other RNA
gtcgtggaatgcagcctgg

SEQ ID NO: 6845 - RNA, 19 nt, synthetic construct
  source 1..19: mol_type = other RNA
gtcgtggaatgcagcctgg

SEQ ID NO: 6846 - RNA, 19 nt, synthetic construct
  source 1..19: mol_type = other RNA
gttggatgggcccacggag

SEQ ID NO: 6847 - RNA, 19 nt, synthetic construct
  source 1..19: mol_type = other RNA
cggcagccaacatcaccct

SEQ ID NO: 6848 - RNA, 19 nt, synthetic construct
  source 1..19: mol_type = other RNA
tgcggcctgtgtgggaact

SEQ ID NO: 6849 - RNA, 19 nt, synthetic construct
  source 1..19: mol_type = other RNA
gcggcctgtgtgggaactt

SEQ ID NO: 6850 - RNA, 19 nt, synthetic construct
  source 1..19: mol_type = other RNA
gactgcctgtgcgccgcgc

SEQ ID NO: 6851 - RNA, 19 nt, synthetic construct
  source 1..19: mol_type = other RNA
actgcctgtgcgccgcgct

SEQ ID NO: 6852 - RNA, 19 nt, synthetic construct
  source 1..19: mol_type = other RNA
ctgcctgtgcgccgcgctg

SEQ ID NO: 6853 - RNA, 19 nt, synthetic construct
  source 1..19: mol_type = other RNA
cctgtgcgccgcgctgtcc

SEQ ID NO: 6854 - RNA, 19 nt, synthetic construct
  source 1..19: mol_type = other RNA
tgtgcgccgcgctgtcctc

SEQ ID NO: 6855 - RNA, 19 nt, synthetic construct
  source 1..19: mol_type = other RNA
tgtgcacgcctgtgccgcc

SEQ ID NO: 6856 - RNA, 19 nt, synthetic construct
  source 1..19: mol_type = other RNA
gtgcacgcctgtgccgcca

SEQ ID NO: 6857 - RNA, 19 nt, synthetic construct
  source 1..19: mol_type = other RNA
acgcctgtgccgccaaggg

SEQ ID NO: 6858 - RNA, 19 nt, synthetic construct
  source 1..19: mol_type = other RNA
aggccacctacaagcctgg

SEQ ID NO: 6859 - RNA, 19 nt, synthetic construct
  source 1..19: mol_type = other RNA
ctacgaggcctgcgtgaac

SEQ ID NO: 6860 - RNA, 19 nt, synthetic construct
  source 1..19: mol_type = other RNA
tacgaggcctgcgtgaacg

SEQ ID NO: 6861 - RNA, 19 nt, synthetic construct
  source 1..19: mol_type = other RNA
gaggcctgcgtgaacgacg

SEQ ID NO: 6862 - RNA, 19 nt, synthetic construct
  source 1..19: mol_type = other RNA
cagagtggtttgacgtgga

SEQ ID NO: 6863 - RNA, 19 nt, synthetic construct
  source 1..19: mol_type = other RNA
agagtggtttgacgtggac

SEQ ID NO: 6864 - RNA, 19 nt, synthetic construct
  source 1..19: mol_type = other RNA
gagtggtttgacgtggact

SEQ ID NO: 6865 - RNA, 19 nt, synthetic construct
  source 1..19: mol_type = other RNA
cggtgagcagcggtttcag

SEQ ID NO: 6866 - RNA, 19 nt, synthetic construct
  source 1..19: mol_type = other RNA
gagaactacgcccggcact

SEQ ID NO: 6867 - RNA, 19 nt, synthetic construct
  source 1..19: mol_type = other RNA
cacggccaaccccttccgc

SEQ ID NO: 6868 - RNA, 19 nt, synthetic construct
  source 1..19: mol_type = other RNA
ctacgcccggcactggtgc

SEQ ID NO: 6869 - RNA, 19 nt, synthetic construct
  source 1..19: mol_type = other RNA
tgtgagcggagcgaggact

SEQ ID NO: 6870 - RNA, 19 nt, synthetic construct
  source 1..19: mol_type = other RNA
gaggactgcctgtgcgccg

SEQ ID NO: 6871 - RNA, 19 nt, synthetic construct
  source 1..19: mol_type = other RNA
cagaagcagtgcagcatcc

SEQ ID NO: 6872 - RNA, 19 nt, synthetic construct
  source 1..19: mol_type = other RNA
gctgtcaaccgaagtgtga

SEQ ID NO: 6873 - RNA, 19 nt, synthetic construct
  source 1..19: mol_type = other RNA
cacctgcaggaaccggagg

SEQ ID NO: 6874 - RNA, 19 nt, synthetic construct
  source 1..19: mol_type = other RNA
gcctgaccgatcccaacag

SEQ ID NO: 6875 - RNA, 19 nt, synthetic construct
  source 1..19: mol_type = other RNA
gctgccttacagccgcact

SEQ ID NO: 6876 - RNA, 19 nt, synthetic construct
  source 1..19: mol_type = other RNA
gcctggacggcggggacac

SEQ ID NO: 6877 - RNA, 19 nt, synthetic construct
  source 1..19: mol_type = other RNA
agatgtgctacaactacag

SEQ ID NO: 6878 - RNA, 19 nt, synthetic construct
  source 1..19: mol_type = other RNA
acgtgggctgtttcagcac

SEQ ID NO: 6879 - RNA, 19 nt, synthetic construct
  source 1..19: mol_type = other RNA
ggtgagcagcggtttcagc

SEQ ID NO: 6880 - RNA, 19 nt, synthetic construct
  source 1..19: mol_type = other RNA
aactccatctacacgcagc

SEQ ID NO: 6881 - RNA, 19 nt, synthetic construct
  source 1..19: mol_type = other RNA
acctgcaccaacaaccaga

SEQ ID NO: 6882 - RNA, 19 nt, synthetic construct
  source 1..19: mol_type = other RNA
gcaccaggactacaagggc

SEQ ID NO: 6883 - RNA, 19 nt, synthetic construct
  source 1..19: mol_type = other RNA
cctctcaggccgagaccag

SEQ ID NO: 6884 - RNA, 19 nt, synthetic construct
  source 1..19: mol_type = other RNA
gaaatccgtgtgttctgct

SEQ ID NO: 6885 - RNA, 19 nt, synthetic construct
  source 1..19: mol_type = other RNA
gaaatccgtgtgttctgct

SEQ ID NO: 6886 - RNA, 19 nt, synthetic construct
  source 1..19: mol_type = other RNA
gaaatccgtgtgttctgct

SEQ ID NO: 6887 - RNA, 19 nt, synthetic construct
  source 1..19: mol_type = other RNA
gaaatccgtgtgttctgct

SEQ ID NO: 6888 - RNA, 19 nt, synthetic construct
  source 1..19: mol_type = other RNA
gtcctacgataagatcagg

SEQ ID NO: 6889 - RNA, 19 nt, synthetic construct
  source 1..19: mol_type = other RNA
tgtcttccccagcctgagc

SEQ ID NO: 6890 - RNA, 19 nt, synthetic construct
  source 1..19: mol_type = other RNA
ctgtgagtggcactaccag

SEQ ID NO: 6891 - RNA, 19 nt, synthetic construct
  source 1..19: mol_type = other RNA
cggaaccccagtgggcact

SEQ ID NO: 6892 - RNA, 19 nt, synthetic construct
  source 1..19: mol_type = other RNA
gctaccagctttacagcca

SEQ ID NO: 6893 - RNA, 19 nt, synthetic construct
  source 1..19: mol_type = other RNA
gctaccagctttacagcca

SEQ ID NO: 6894 - RNA, 19 nt, synthetic construct
  source 1..19: mol_type = other RNA
gctaccagctttacagcca

SEQ ID NO: 6895 - RNA, 19 nt, synthetic construct
  source 1..19: mol_type = other RNA
cacgcctgtgccgccaagg

SEQ ID NO: 6896 - RNA, 19 nt, synthetic construct
  source 1..19: mol_type = other RNA
caacaacaccgagggccag

SEQ ID NO: 6897 - RNA, 19 nt, synthetic construct
  source 1..19: mol_type = other RNA
aagtactacgaggcctgcg

SEQ ID NO: 6898 - RNA, 19 nt, synthetic construct
  source 1..19: mol_type = other RNA
acaacaacaccgagggcca

SEQ ID NO: 6899 - RNA, 19 nt, synthetic construct
  source 1..19: mol_type = other RNA
gtgcggcctgtgtgggaac

SEQ ID NO: 6900 - RNA, 19 nt, synthetic construct
  source 1..19: mol_type = other RNA
aactgtgagcggagcgagg

SEQ ID NO: 6901 - RNA, 19 nt, synthetic construct
  source 1..19: mol_type = other RNA
gcacgcctgtgccgccaag

SEQ ID NO: 6902 - RNA, 19 nt, synthetic construct
  source 1..19: mol_type = other RNA
aggccatcaagctcttcgt

SEQ ID NO: 6903 - RNA, 19 nt, synthetic construct
  source 1..19: mol_type = other RNA
tgagtggcactaccagccc

SEQ ID NO: 6904 - RNA, 19 nt, synthetic construct
  source 1..19: mol_type = other RNA
aacaacaccgagggccagt

SEQ ID NO: 6905 - RNA, 19 nt, synthetic construct
  source 1..19: mol_type = other RNA
tgtgcggcctgtgtgggaa

SEQ ID NO: 6906 - RNA, 19 nt, synthetic construct
  source 1..19: mol_type = other RNA
ttcgccaacacctggaagg

SEQ ID NO: 6907 - RNA, 19 nt, synthetic construct
  source 1..19: mol_type = other RNA
cctgcaactgtgagcggag

SEQ ID NO: 6908 - RNA, 19 nt, synthetic construct
  source 1..19: mol_type = other RNA
ctgcaactgtgagcggagc

SEQ ID NO: 6909 - RNA, 19 nt, synthetic construct
  source 1..19: mol_type = other RNA
tgcaactgtgagcggagcg

SEQ ID NO: 6910 - RNA, 19 nt, synthetic construct
  source 1..19: mol_type = other RNA
gcaactgtgagcggagcga

SEQ ID NO: 6911 - RNA, 19 nt, synthetic construct
  source 1..19: mol_type = other RNA
caactgtgagcggagcgag

SEQ ID NO: 6912 - RNA, 19 nt, synthetic construct
  source 1..19: mol_type = other RNA
ctgtgagcggagcgaggac

SEQ ID NO: 6913 - RNA, 19 nt, synthetic construct
  source 1..19: mol_type = other RNA
gtgagcggagcgaggactg

SEQ ID NO: 6914 - RNA, 19 nt, synthetic construct
  source 1..19: mol_type = other RNA
cgaggactgcctgtgcgcc

SEQ ID NO: 6915 - RNA, 19 nt, synthetic construct
  source 1..19: mol_type = other RNA
cgcctgtgccgccaagggc

SEQ ID NO: 6916 - RNA, 19 nt, synthetic construct
  source 1..19: mol_type = other RNA
ggccatcaagctcttcgtg

SEQ ID NO: 6917 - RNA, 19 nt, synthetic construct
  source 1..19: mol_type = other RNA
tgccatcaatgactttgcc

SEQ ID NO: 6918 - RNA, 19 nt, synthetic construct
  source 1..19: mol_type = other RNA
aggacccctgcacggccaa

SEQ ID NO: 6919 - RNA, 19 nt, synthetic construct
  source 1..19: mol_type = other RNA
gacccctgcacggccaacc

SEQ ID NO: 6920 - RNA, 19 nt, synthetic construct
  source 1..19: mol_type = other RNA
acggccaaccccttccgca

SEQ ID NO: 6921 - RNA, 19 nt, synthetic construct
  source 1..19: mol_type = other RNA
ggccaaccccttccgcaag

SEQ ID NO: 6922 - RNA, 19 nt, synthetic construct
  source 1..19: mol_type = other RNA
caaccccttccgcaagtcc

SEQ ID NO: 6923 - RNA, 19 nt, synthetic construct
  source 1..19: mol_type = other RNA
ccgcaagtcctgggcccag

SEQ ID NO: 6924 - RNA, 19 nt, synthetic construct
  source 1..19: mol_type = other RNA
tgtttctgcacggctgtgg

SEQ ID NO: 6925 - RNA, 19 nt, synthetic construct
  source 1..19: mol_type = other RNA
gagtggcactaccagccct

SEQ ID NO: 6926 - RNA, 19 nt, synthetic construct
  source 1..19: mol_type = other RNA
gcactaccagccctgcggg

SEQ ID NO: 6927 - RNA, 19 nt, synthetic construct
  source 1..19: mol_type = other RNA
ctggaccctggagaactgc

SEQ ID NO: 6928 - RNA, 19 nt, synthetic construct
  source 1..19: mol_type = other RNA
ccctggagaactgcacggt

SEQ ID NO: 6929 - RNA, 19 nt, synthetic construct
  source 1..19: mol_type = other RNA
ccacaacaacaccgagggc

SEQ ID NO: 6930 - RNA, 19 nt, synthetic construct
  source 1..19: mol_type = other RNA
cacaacaacaccgagggcc

SEQ ID NO: 6931 - RNA, 19 nt, synthetic construct
  source 1..19: mol_type = other RNA
acaacaccgagggccagtg

SEQ ID NO: 6932 - RNA, 19 nt, synthetic construct
  source 1..19: mol_type = other RNA
caacaccgagggccagtgc

SEQ ID NO: 6933 - RNA, 19 nt, synthetic construct
  source 1..19: mol_type = other RNA
aacaccgagggccagtgcg

SEQ ID NO: 6934 - RNA, 19 nt, synthetic construct
  source 1..19: mol_type = other RNA
accgagggccagtgcggca

SEQ ID NO: 6935 - RNA, 19 nt, synthetic construct
  source 1..19: mol_type = other RNA
gtgatctgatgctgagcca

SEQ ID NO: 6936 - RNA, 19 nt, synthetic construct
  source 1..19: mol_type = other RNA
cccagggctttgagtacaa

SEQ ID NO: 6937 - RNA, 19 nt, synthetic construct
  source 1..19: mol_type = other RNA
tcaaccagaaccaggctga

SEQ ID NO: 6938 - RNA, 19 nt, synthetic construct
  source 1..19: mol_type = other RNA
tcctgtggaacggagagga

SEQ ID NO: 6939 - RNA, 19 nt, synthetic construct
  source 1..19: mol_type = other RNA
ggactgcctgtgcgccgcg

SEQ ID NO: 6940 - RNA, 19 nt, synthetic construct
  source 1..19: mol_type = other RNA
ggggagtgtgcagtgactg

SEQ ID NO: 6941 - RNA, 19 nt, synthetic construct
  source 1..19: mol_type = other RNA
tggagggacggcgtctgca

SEQ ID NO: 6942 - RNA, 19 nt, synthetic construct
  source 1..19: mol_type = other RNA
cacagcctgcatcctgccc

SEQ ID NO: 6943 - RNA, 19 nt, synthetic construct
  source 1..19: mol_type = other RNA
tgcgccgcgctgtcctcct

SEQ ID NO: 6944 - RNA, 19 nt, synthetic construct
  source 1..19: mol_type = other RNA
tacatggggatcttcctgg

SEQ ID NO: 6945 - RNA, 19 nt, synthetic construct
  source 1..19: mol_type = other RNA
acatggggatcttcctggt

SEQ ID NO: 6946 - RNA, 19 nt, synthetic construct
  source 1..19: mol_type = other RNA
gcgtggcccagtgtggctg

SEQ ID NO: 6947 - RNA, 19 nt, synthetic construct
  source 1..19: mol_type = other RNA
ctcaggaaaaccggctgct

SEQ ID NO: 6948 - RNA, 19 nt, synthetic construct
  source 1..19: mol_type = other RNA
gctgccctacagcctcttc

SEQ ID NO: 6949 - RNA, 19 nt, synthetic construct
  source 1..19: mol_type = other RNA
ctgtgatctgatgctgagc

SEQ ID NO: 6950 - RNA, 19 nt, synthetic construct
  source 1..19: mol_type = other RNA
aggactacaagggcagggt

SEQ ID NO: 6951 - RNA, 19 nt, synthetic construct
  source 1..19: mol_type = other RNA
tccagtttgggaacctgca

SEQ ID NO: 6952 - RNA, 19 nt, synthetic construct
  source 1..19: mol_type = other RNA
acctgcaactgtgagcgga

SEQ ID NO: 6953 - RNA, 19 nt, synthetic construct
  source 1..19: mol_type = other RNA
gctgtggctgcctacgccc

SEQ ID NO: 6954 - RNA, 19 nt, synthetic construct
  source 1..19: mol_type = other RNA
ccggtgtcagtggacagag

SEQ ID NO: 6955 - RNA, 19 nt, synthetic construct
  source 1..19: mol_type = other RNA
acggcaccgtgctggctcc

SEQ ID NO: 6956 - RNA, 19 nt, synthetic construct
  source 1..19: mol_type = other RNA
gaggtctgccgctggtcca

SEQ ID NO: 6957 - RNA, 19 nt, synthetic construct
  source 1..19: mol_type = other RNA
cccctgcgggagttgggcc

SEQ ID NO: 6958 - RNA, 19 nt, synthetic construct
  source 1..19: mol_type = other RNA
cccctgcgggagttgggcc

SEQ ID NO: 6959 - RNA, 19 nt, synthetic construct
  source 1..19: mol_type = other RNA
cccctgcgggagttgggcc

SEQ ID NO: 6960 - RNA, 19 nt, synthetic construct
  source 1..19: mol_type = other RNA
gccacaacgccattcacct

SEQ ID NO: 6961 - RNA, 19 nt, synthetic construct
  source 1..19: mol_type = other RNA
tgccccccaggcacggtgc

SEQ ID NO: 6962 - RNA, 19 nt, synthetic construct
  source 1..19: mol_type = other RNA
agtactacgaggcctgcgt

SEQ ID NO: 6963 - RNA, 19 nt, synthetic construct
  source 1..19: mol_type = other RNA
cttccgcaagtcctgggcc

SEQ ID NO: 6964 - RNA, 19 nt, synthetic construct
  source 1..19: mol_type = other RNA
tgtgagtggcactaccagc

SEQ ID NO: 6965 - RNA, 19 nt, synthetic construct
  source 1..19: mol_type = other RNA
gtgagtggcactaccagcc

SEQ ID NO: 6966 - RNA, 19 nt, synthetic construct
  source 1..19: mol_type = other RNA
acaccgagggccagtgcgg

SEQ ID NO: 6967 - RNA, 19 nt, synthetic construct
  source 1..19: mol_type = other RNA
caccgagggccagtgcggc

SEQ ID NO: 6968 - RNA, 19 nt, synthetic construct
  source 1..19: mol_type = other RNA
ggcggagggctgcttctgc

SEQ ID NO: 6969 - RNA, 19 nt, synthetic construct
  source 1..19: mol_type = other RNA
ccccagggctttgagtaca

SEQ ID NO: 6970 - RNA, 19 nt, synthetic construct
  source 1..19: mol_type = other RNA
agctcccacttctctactc

SEQ ID NO: 6971 - RNA, 19 nt, synthetic construct
  source 1..19: mol_type = other RNA
cctgatcctgtttgaccaa

SEQ ID NO: 6972 - RNA, 19 nt, synthetic construct
  source 1..19: mol_type = other RNA
aagatgtgcttcaactatg

SEQ ID NO: 6973 - RNA, 19 nt, synthetic construct
  source 1..19: mol_type = other RNA
aagatgtgcttcaactatg

SEQ ID NO: 6974 - RNA, 19 nt, synthetic construct
  source 1..19: mol_type = other RNA
aagatgtgcttcaactatg

SEQ ID NO: 6975 - RNA, 19 nt, synthetic construct
  source 1..19: mol_type = other RNA
aagatgtgcttcaactatg

SEQ ID NO: 6976 - RNA, 19 nt, synthetic construct
  source 1..19: mol_type = other RNA
tggggccgagtgcctccgg

SEQ ID NO: 6977 - RNA, 19 nt, synthetic construct
  source 1..19: mol_type = other RNA
acacatgggcatctgcgtg

SEQ ID NO: 6978 - RNA, 19 nt, synthetic construct
  source 1..19: mol_type = other RNA
ccagagggacgactgtctc

SEQ ID NO: 6979 - RNA, 19 nt, synthetic construct
  source 1..19: mol_type = other RNA
gagagcctgtggcccacct

SEQ ID NO: 6980 - RNA, 19 nt, synthetic construct
  source 1..19: mol_type = other RNA
gtggtgggggacgcactgg

SEQ ID NO: 6981 - RNA, 19 nt, synthetic construct
  source 1..19: mol_type = other RNA
gacccgagccagccctgtg

SEQ ID NO: 6982 - RNA, 19 nt, synthetic construct
  source 1..19: mol_type = other RNA
ggcgactgctgtcccacct

SEQ ID NO: 6983 - RNA, 19 nt, synthetic construct
  source 1..19: mol_type = other RNA
ctgcaactacggccactgc

SEQ ID NO: 6984 - RNA, 19 nt, synthetic construct
  source 1..19: mol_type = other RNA
ctgcaactacggccactgc

SEQ ID NO: 6985 - RNA, 19 nt, synthetic construct
  source 1..19: mol_type = other RNA
ctgcaactacggccactgc

SEQ ID NO: 6986 - RNA, 19 nt, synthetic construct
  source 1..19: mol_type = other RNA
ctgcaactacggccactgc

SEQ ID NO: 6987 - RNA, 19 nt, synthetic construct
  source 1..19: mol_type = other RNA
ccctgtgacttccactatg

SEQ ID NO: 6988 - RNA, 19 nt, synthetic construct
  source 1..19: mol_type = other RNA
gacttccactacaagacct

SEQ ID NO: 6989 - RNA, 19 nt, synthetic construct
  source 1..19: mol_type = other RNA
cttccactacaagaccttc

SEQ ID NO: 6990 - RNA, 19 nt, synthetic construct
  source 1..19: mol_type = other RNA
ttccactacaagaccttcg

SEQ ID NO: 6991 - RNA, 19 nt, synthetic construct
  source 1..19: mol_type = other RNA
ccctcagtgtggagaatga

SEQ ID NO: 6992 - RNA, 19 nt, synthetic construct
  source 1..19: mol_type = other RNA
cctccactccagagactgc

SEQ ID NO: 6993 - RNA, 19 nt, synthetic construct
  source 1..19: mol_type = other RNA
cctccactccagagactgc

SEQ ID NO: 6994 - RNA, 19 nt, synthetic construct
  source 1..19: mol_type = other RNA
gtggtcacccgtgttgtca

SEQ ID NO: 6995 - RNA, 19 nt, synthetic construct
  source 1..19: mol_type = other RNA
tcgcccggggaagtcatct

SEQ ID NO: 6996 - RNA, 19 nt, synthetic construct
  source 1..19: mol_type = other RNA
tgcctgcaacaatactacc

SEQ ID NO: 6997 - RNA, 19 nt, synthetic construct
  source 1..19: mol_type = other RNA
cccggcgcgtgagctttgt

SEQ ID NO: 6998 - RNA, 19 nt, synthetic construct
  source 1..19: mol_type = other RNA
actacgagctgcgggttct

SEQ ID NO: 6999 - RNA, 19 nt, synthetic construct
  source 1..19: mol_type = other RNA
tacgcctacgtggtggatg

SEQ ID NO: 7000 - RNA, 19 nt, synthetic construct
  source 1..19: mol_type = other RNA
cacgcccgatggccagcca

SEQ ID NO: 7001 - RNA, 19 nt, synthetic construct
  source 1..19: mol_type = other RNA
caagaccttcgacggcgac

SEQ ID NO: 7002 - RNA, 19 nt, synthetic construct
  source 1..19: mol_type = other RNA
ctacaagaccttcgacggc

SEQ ID NO: 7003 - RNA, 19 nt, synthetic construct
  source 1..19: mol_type = other RNA
agaccttcgacggcgacgt

SEQ ID NO: 7004 - RNA, 19 nt, synthetic construct
  source 1..19: mol_type = other RNA
cggcgacgtcttccgcttc

SEQ ID NO: 7005 - RNA, 19 nt, synthetic construct
  source 1..19: mol_type = other RNA
caaagcctgtggccaacgt

SEQ ID NO: 7006 - RNA, 19 nt, synthetic construct
  source 1..19: mol_type = other RNA
ccgacagcagaaaggatgg

SEQ ID NO: 7007 - RNA, 19 nt, synthetic construct
  source 1..19: mol_type = other RNA
agttgcaaggacatggcca

SEQ ID NO: 7008 - RNA, 19 nt, synthetic construct
  source 1..19: mol_type = other RNA
ctcgcccggggaagtcatc

SEQ ID NO: 7009 - RNA, 19 nt, synthetic construct
  source 1..19: mol_type = other RNA
gccgagaacccctgctgcc

SEQ ID NO: 7010 - RNA, 19 nt, synthetic construct
  source 1..19: mol_type = other RNA
ccgagaacccctgctgccc

SEQ ID NO: 7011 - RNA, 19 nt, synthetic construct
  source 1..19: mol_type = other RNA
cgtacctggccgcctgcgc

SEQ ID NO: 7012 - RNA, 19 nt, synthetic construct
  source 1..19: mol_type = other RNA
ttgccgaggaggactgccc

SEQ ID NO: 7013 - RNA, 19 nt, synthetic construct
  source 1..19: mol_type = other RNA
ggggacaacaccacccacg

SEQ ID NO: 7014 - RNA, 19 nt, synthetic construct
  source 1..19: mol_type = other RNA
ccacggccccaccttcgcc

SEQ ID NO: 7015 - RNA, 19 nt, synthetic construct
  source 1..19: mol_type = other RNA
accgtgagcaggtggggaa

SEQ ID NO: 7016 - RNA, 19 nt, synthetic construct
  source 1..19: mol_type = other RNA
accgtgagcaggtggggaa

SEQ ID NO: 7017 - RNA, 19 nt, synthetic construct
  source 1..19: mol_type = other RNA
accgtgagcaggtggggaa

SEQ ID NO: 7018 - RNA, 19 nt, synthetic construct
  source 1..19: mol_type = other RNA
accgtgagcaggtggggaa

SEQ ID NO: 7019 - RNA, 19 nt, synthetic construct
  source 1..19: mol_type = other RNA
accctgtggaccacgtgga

SEQ ID NO: 7020 - RNA, 19 nt, synthetic construct
  source 1..19: mol_type = other RNA
tcacacccccaaagtggtg

SEQ ID NO: 7021 - RNA, 19 nt, synthetic construct
  source 1..19: mol_type = other RNA
tgaccaccatggccactat

SEQ ID NO: 7022 - RNA, 19 nt, synthetic construct
  source 1..19: mol_type = other RNA
ggaccacccgcacccctgc

SEQ ID NO: 7023 - RNA, 19 nt, synthetic construct
  source 1..19: mol_type = other RNA
cgcccggggaagtcatcta

SEQ ID NO: 7024 - RNA, 19 nt, synthetic construct
  source 1..19: mol_type = other RNA
gcccggggaagtcatctac

SEQ ID NO: 7025 - RNA, 19 nt, synthetic construct
  source 1..19: mol_type = other RNA
cccggggaagtcatctaca

SEQ ID NO: 7026 - RNA, 19 nt, synthetic construct
  source 1..19: mol_type = other RNA
catcctgcccagatgtgtc

SEQ ID NO: 7027 - RNA, 19 nt, synthetic construct
  source 1..19: mol_type = other RNA
tctgcgagggctcctgccc

SEQ ID NO: 7028 - RNA, 19 nt, synthetic construct
  source 1..19: mol_type = other RNA
actaccccaagtctgaaca

SEQ ID NO: 7029 - RNA, 19 nt, synthetic construct
  source 1..19: mol_type = other RNA
gacggacaacgagaactgc

SEQ ID NO: 7030 - RNA, 19 nt, synthetic construct
  source 1..19: mol_type = other RNA
gagcgtccaagtactcagc

SEQ ID NO: 7031 - RNA, 19 nt, synthetic construct
  source 1..19: mol_type = other RNA
aggtcgcaacggccaggtc

SEQ ID NO: 7032 - RNA, 19 nt, synthetic construct
  source 1..19: mol_type = other RNA
tgcccgcccaggagtgccc

SEQ ID NO: 7033 - RNA, 19 nt, synthetic construct
  source 1..19: mol_type = other RNA
tgcctacgcccaggcctgc

SEQ ID NO: 7034 - RNA, 19 nt, synthetic construct
  source 1..19: mol_type = other RNA
gatcgctacagctttgaag

SEQ ID NO: 7035 - RNA, 19 nt, synthetic construct
  source 1..19: mol_type = other RNA
cggggactacatcaaggtc

SEQ ID NO: 7036 - RNA, 19 nt, synthetic construct
  source 1..19: mol_type = other RNA
ccaggacccaacggtgcaa

SEQ ID NO: 7037 - RNA, 19 nt, synthetic construct
  source 1..19: mol_type = other RNA
cctcaggaaaaccggctgc

SEQ ID NO: 7038 - RNA, 19 nt, synthetic construct
  source 1..19: mol_type = other RNA
aagtgtcggacccgagcca

SEQ ID NO: 7039 - RNA, 19 nt, synthetic construct
  source 1..19: mol_type = other RNA
ctacgaccgcaaccactgg

SEQ ID NO: 7040 - RNA, 19 nt, synthetic construct
  source 1..19: mol_type = other RNA
accatgcgtgtggacattc

SEQ ID NO: 7041 - RNA, 19 nt, synthetic construct
  source 1..19: mol_type = other RNA
caacaccctcctctagcac

SEQ ID NO: 7042 - RNA, 19 nt, synthetic construct
  source 1..19: mol_type = other RNA
acgtggaccgtcccagcac

SEQ ID NO: 7043 - RNA, 19 nt, synthetic construct
  source 1..19: mol_type = other RNA
ccgaccgagccggctgcca

SEQ ID NO: 7044 - RNA, 19 nt, synthetic construct
  source 1..19: mol_type = other RNA
atcagcgaccactgcaggg

SEQ ID NO: 7045 - RNA, 19 nt, synthetic construct
  source 1..19: mol_type = other RNA
agtgacgaccactgcaggg

SEQ ID NO: 7046 - RNA, 19 nt, synthetic construct
  source 1..19: mol_type = other RNA
gacggcacctcttacacct

SEQ ID NO: 7047 - RNA, 19 nt, synthetic construct
  source 1..19: mol_type = other RNA
gaaatgtgccgacagcagc

SEQ ID NO: 7048 - RNA, 19 nt, synthetic construct
  source 1..19: mol_type = other RNA
ggtggtgcacgacgagggc

SEQ ID NO: 7049 - RNA, 19 nt, synthetic construct
  source 1..19: mol_type = other RNA
atgacgtcggtgcaagggt

SEQ ID NO: 7050 - RNA, 19 nt, synthetic construct
  source 1..19: mol_type = other RNA
gacagagacgacaatgagc

SEQ ID NO: 7051 - RNA, 19 nt, synthetic construct
  source 1..19: mol_type = other RNA
gtggaccacgtggaccgtc

SEQ ID NO: 7052 - RNA, 19 nt, synthetic construct
  source 1..19: mol_type = other RNA
tccccgacagcagaaagga

SEQ ID NO: 7053 - RNA, 19 nt, synthetic construct
  source 1..19: mol_type = other RNA
caccaaagtgtacaagcca

SEQ ID NO: 7054 - RNA, 19 nt, synthetic construct
  source 1..19: mol_type = other RNA
acaactgcaccgtgtacct

SEQ ID NO: 7055 - RNA, 19 nt, synthetic construct
  source 1..19: mol_type = other RNA
agccgagctgggagaatgc

SEQ ID NO: 7056 - RNA, 19 nt, synthetic construct
  source 1..19: mol_type = other RNA
ggcgtccaacggctccgtc

SEQ ID NO: 7057 - RNA, 19 nt, synthetic construct
  source 1..19: mol_type = other RNA
aacccccagcgcgcgcagc

SEQ ID NO: 7058 - RNA, 19 nt, synthetic construct
  source 1..19: mol_type = other RNA
cttcctggtcatcgagacc

SEQ ID NO: 7059 - RNA, 19 nt, synthetic construct
  source 1..19: mol_type = other RNA
tgggaggcggagactttga

SEQ ID NO: 7060 - RNA, 19 nt, synthetic construct
  source 1..19: mol_type = other RNA
agagtcccccgctctgtca

SEQ ID NO: 7061 - RNA, 19 nt, synthetic construct
  source 1..19: mol_type = other RNA
acctcgcagactgggtcca

SEQ ID NO: 7062 - RNA, 19 nt, synthetic construct
  source 1..19: mol_type = other RNA
cccgtgacggtcaccccct

SEQ ID NO: 7063 - RNA, 19 nt, synthetic construct
  source 1..19: mol_type = other RNA
aggatccgggtcctctgct

SEQ ID NO: 7064 - RNA, 19 nt, synthetic construct
  source 1..19: mol_type = other RNA
accctctcagaaggactga

SEQ ID NO: 7065 - RNA, 19 nt, synthetic construct
  source 1..19: mol_type = other RNA
gctggcaccccacatgtga

SEQ ID NO: 7066 - RNA, 19 nt, synthetic construct
  source 1..19: mol_type = other RNA
atgtccacaatccacccct

SEQ ID NO: 7067 - RNA, 19 nt, synthetic construct
  source 1..19: mol_type = other RNA
ggccaccacgacaagggcc

SEQ ID NO: 7068 - RNA, 19 nt, synthetic construct
  source 1..19: mol_type = other RNA
gctggcaccccacatgtga

SEQ ID NO: 7069 - RNA, 19 nt, synthetic construct
  source 1..19: mol_type = other RNA
atgtccacaatccacccct

SEQ ID NO: 7070 - RNA, 19 nt, synthetic construct
  source 1..19: mol_type = other RNA
ggccaccacgacaagggcc

SEQ ID NO: 7071 - RNA, 19 nt, synthetic construct
  source 1..19: mol_type = other RNA
gctggcaccccacatgtga

SEQ ID NO: 7072 - RNA, 19 nt, synthetic construct
  source 1..19: mol_type = other RNA
atgacaagggccaccaatt

SEQ ID NO: 7073 - RNA, 19 nt, synthetic construct
  source 1..19: mol_type = other RNA
gcagtgtgcaatcagcact

SEQ ID NO: 7074 - RNA, 19 nt, synthetic construct
  source 1..19: mol_type = other RNA
agtgtgcaatcagcactgt

SEQ ID NO: 7075 - RNA, 19 nt, synthetic construct
  source 1..19: mol_type = other RNA
agctttacagccatcccct

SEQ ID NO: 7076 - RNA, 19 nt, synthetic construct
  source 1..19: mol_type = other RNA
agctttacagccatcccct

SEQ ID NO: 7077 - RNA, 19 nt, synthetic construct
  source 1..19: mol_type = other RNA
agctttacagccatcccct

SEQ ID NO: 7078 - RNA, 19 nt, synthetic construct
  source 1..19: mol_type = other RNA
acaaccgtgtcgtcctgct

SEQ ID NO: 7079 - RNA, 19 nt, synthetic construct
  source 1..19: mol_type = other RNA
acaacgagaactgcctgaa

SEQ ID NO: 7080 - RNA, 19 nt, synthetic construct
  source 1..19: mol_type = other RNA
ccgtgtgttcatgtacggg

SEQ ID NO: 7081 - RNA, 19 nt, synthetic construct
  source 1..19: mol_type = other RNA
gtccccacacggtgcgcac

SEQ ID NO: 7082 - RNA, 19 nt, synthetic construct
  source 1..19: mol_type = other RNA
tgctggcaccccacatgtg

SEQ ID NO: 7083 - RNA, 19 nt, synthetic construct
  source 1..19: mol_type = other RNA
gtccccacacggtgcgcac

SEQ ID NO: 7084 - RNA, 19 nt, synthetic construct
  source 1..19: mol_type = other RNA
gtccccacacggtgcgcac

SEQ ID NO: 7085 - RNA, 19 nt, synthetic construct
  source 1..19: mol_type = other RNA
tgctggcaccccacatgtg

SEQ ID NO: 7086 - RNA, 19 nt, synthetic construct
  source 1..19: mol_type = other RNA
gtccccacacggtgcgcac

SEQ ID NO: 7087 - RNA, 19 nt, synthetic construct
  source 1..19: mol_type = other RNA
tgctggcaccccacatgtg

SEQ ID NO: 7088 - RNA, 19 nt, synthetic construct
  source 1..19: mol_type = other RNA
tgacaatgccatccctctc

SEQ ID NO: 7089 - RNA, 19 nt, synthetic construct
  source 1..19: mol_type = other RNA
tcgtcctgctggacccaaa

SEQ ID NO: 7090 - RNA, 19 nt, synthetic construct
  source 1..19: mol_type = other RNA
gtgcaatgtcaggaggatg

SEQ ID NO: 7091 - RNA, 19 nt, synthetic construct
  source 1..19: mol_type = other RNA
cccctgggggagttgggcc

SEQ ID NO: 7092 - RNA, 19 nt, synthetic construct
  source 1..19: mol_type = other RNA
ggctcccactattccacct

SEQ ID NO: 7093 - RNA, 19 nt, synthetic construct
  source 1..19: mol_type = other RNA
accccgcgctccgtgctcc

SEQ ID NO: 7094 - RNA, 19 nt, synthetic construct
  source 1..19: mol_type = other RNA
cgtgttctctgagcactgc

SEQ ID NO: 7095 - RNA, 19 nt, synthetic construct
  source 1..19: mol_type = other RNA
cgtacagctcagcgactgg

SEQ ID NO: 7096 - RNA, 19 nt, synthetic construct
  source 1..19: mol_type = other RNA
gggctggtgtcggatggga

SEQ ID NO: 7097 - RNA, 19 nt, synthetic construct
  source 1..19: mol_type = other RNA
cccgcacctcgaccctgct

SEQ ID NO: 7098 - RNA, 19 nt, synthetic construct
  source 1..19: mol_type = other RNA
ctgcaggaaccgtgagcag

SEQ ID NO: 7099 - RNA, 19 nt, synthetic construct
  source 1..19: mol_type = other RNA
cccgcacctcgaccctgct

SEQ ID NO: 7100 - RNA, 19 nt, synthetic construct
  source 1..19: mol_type = other RNA
ctgcaggaaccgtgagcag

SEQ ID NO: 7101 - RNA, 19 nt, synthetic construct
  source 1..19: mol_type = other RNA
cccgcacctcgaccctgct

SEQ ID NO: 7102 - RNA, 19 nt, synthetic construct
  source 1..19: mol_type = other RNA
ctgcaggaaccgtgagcag

SEQ ID NO: 7103 - RNA, 19 nt, synthetic construct
  source 1..19: mol_type = other RNA
cccgcacctcgaccctgct

SEQ ID NO: 7104 - RNA, 19 nt, synthetic construct
  source 1..19: mol_type = other RNA
ctgcaggaaccgtgagcag

SEQ ID NO: 7105 - RNA, 19 nt, synthetic construct
  source 1..19: mol_type = other RNA
gatccacggccatcccgtc

SEQ ID NO: 7106 - RNA, 19 nt, synthetic construct
  source 1..19: mol_type = other RNA
ctccacccgggcaactgct

SEQ ID NO: 7107 - RNA, 19 nt, synthetic construct
  source 1..19: mol_type = other RNA
agcgggacggaaccactgc

SEQ ID NO: 7108 - RNA, 19 nt, synthetic construct
  source 1..19: mol_type = other RNA
gcaccgtgtacctctgtga

SEQ ID NO: 7109 - RNA, 19 nt, synthetic construct
  source 1..19: mol_type = other RNA
tacgtgttctctgagcact

SEQ ID NO: 7110 - RNA, 19 nt, synthetic construct
  source 1..19: mol_type = other RNA
atgccaggaacagctttga

SEQ ID NO: 7111 - RNA, 19 nt, synthetic construct
  source 1..19: mol_type = other RNA
cgagagcttccccaactgg

SEQ ID NO: 7112 - RNA, 19 nt, synthetic construct
  source 1..19: mol_type = other RNA
cactccctcctccagtcca

SEQ ID NO: 7113 - RNA, 19 nt, synthetic construct
  source 1..19: mol_type = other RNA
ttacacccatcccctcttc

SEQ ID NO: 7114 - RNA, 19 nt, synthetic construct
  source 1..19: mol_type = other RNA
ccggaggggccgtctgtga

SEQ ID NO: 7115 - RNA, 19 nt, synthetic construct
  source 1..19: mol_type = other RNA
ggccaccacaaccggggcc

SEQ ID NO: 7116 - RNA, 19 nt, synthetic construct
  source 1..19: mol_type = other RNA
ccggaggggccgtctgtga

SEQ ID NO: 7117 - RNA, 19 nt, synthetic construct
  source 1..19: mol_type = other RNA
cactccctcctccagtcca

SEQ ID NO: 7118 - RNA, 19 nt, synthetic construct
  source 1..19: mol_type = other RNA
gtgaccacgggctgtgagc

SEQ ID NO: 7119 - RNA, 19 nt, synthetic construct
  source 1..19: mol_type = other RNA
gccggaggggcagtctgtg

SEQ ID NO: 7120 - RNA, 19 nt, synthetic construct
  source 1..19: mol_type = other RNA
gtgaccacgggctgtgagc

SEQ ID NO: 7121 - RNA, 19 nt, synthetic construct
  source 1..19: mol_type = other RNA
ccggaggggccgtctgtga

SEQ ID NO: 7122 - RNA, 19 nt, synthetic construct
  source 1..19: mol_type = other RNA
cactccctcctccagtcca

SEQ ID NO: 7123 - RNA, 19 nt, synthetic construct
  source 1..19: mol_type = other RNA
caactgcccttccagcact

SEQ ID NO: 7124 - RNA, 19 nt, synthetic construct
  source 1..19: mol_type = other RNA
ggccaccacaaccggggcc

SEQ ID NO: 7125 - RNA, 19 nt, synthetic construct
  source 1..19: mol_type = other RNA
cttgaggtgccctgccaga

SEQ ID NO: 7126 - RNA, 19 nt, synthetic construct
  source 1..19: mol_type = other RNA
caccttctgcgagggctcc

SEQ ID NO: 7127 - RNA, 19 nt, synthetic construct
  source 1..19: mol_type = other RNA
aactgcatgtttgacacct

SEQ ID NO: 7128 - RNA, 19 nt, synthetic construct
  source 1..19: mol_type = other RNA
actcgaactgcatgtttga

SEQ ID NO: 7129 - RNA, 19 nt, synthetic construct
  source 1..19: mol_type = other RNA
ctcgaactgcatgtttgac

SEQ ID NO: 7130 - RNA, 19 nt, synthetic construct
  source 1..19: mol_type = other RNA
acggcgacgtcttccgctt

SEQ ID NO: 7131 - RNA, 19 nt, synthetic construct
  source 1..19: mol_type = other RNA
ctttgcaactacgtgttct

SEQ ID NO: 7132 - RNA, 19 nt, synthetic construct
  source 1..19: mol_type = other RNA
cttcttcatcgtggtgcag

SEQ ID NO: 7133 - RNA, 19 nt, synthetic construct
  source 1..19: mol_type = other RNA
acaatgggcaccgcccaga

SEQ ID NO: 7134 - RNA, 19 nt, synthetic construct
  source 1..19: mol_type = other RNA
tgacttccactacaagacc

SEQ ID NO: 7135 - RNA, 19 nt, synthetic construct
  source 1..19: mol_type = other RNA
actacaagaccttcgacgg

SEQ ID NO: 7136 - RNA, 19 nt, synthetic construct
  source 1..19: mol_type = other RNA
tacaagaccttcgacggcg

SEQ ID NO: 7137 - RNA, 19 nt, synthetic construct
  source 1..19: mol_type = other RNA
aagaccttcgacggcgacg

SEQ ID NO: 7138 - RNA, 19 nt, synthetic construct
  source 1..19: mol_type = other RNA
gtacctggccgcctgcgcc

SEQ ID NO: 7139 - RNA, 19 nt, synthetic construct
  source 1..19: mol_type = other RNA
ggggggctatggcagtgcc

SEQ ID NO: 7140 - RNA, 19 nt, synthetic construct
  source 1..19: mol_type = other RNA
tccactcgaactgcatgtt

SEQ ID NO: 7141 - RNA, 19 nt, synthetic construct
  source 1..19: mol_type = other RNA
ccactcgaactgcatgttt

SEQ ID NO: 7142 - RNA, 19 nt, synthetic construct
  source 1..19: mol_type = other RNA
gaactgcatgtttgacacc

SEQ ID NO: 7143 - RNA, 19 nt, synthetic construct
  source 1..19: mol_type = other RNA
actgcatgtttgacacctg

SEQ ID NO: 7144 - RNA, 19 nt, synthetic construct
  source 1..19: mol_type = other RNA
ctgcatgtttgacacctgc

SEQ ID NO: 7145 - RNA, 19 nt, synthetic construct
  source 1..19: mol_type = other RNA
agtgcagcatcctccacgg

SEQ ID NO: 7146 - RNA, 19 nt, synthetic construct
  source 1..19: mol_type = other RNA
cattcaccttcaccaccgc

SEQ ID NO: 7147 - RNA, 19 nt, synthetic construct
  source 1..19: mol_type = other RNA
caatgggcaccgcccagag

SEQ ID NO: 7148 - RNA, 19 nt, synthetic construct
  source 1..19: mol_type = other RNA
ctaccccaacccagaccac

SEQ ID NO: 7149 - RNA, 19 nt, synthetic construct
  source 1..19: mol_type = other RNA
cggggctgaccagggctcc

SEQ ID NO: 7150 - RNA, 19 nt, synthetic construct
  source 1..19: mol_type = other RNA
cttctccagggacgaccac

SEQ ID NO: 7151 - RNA, 19 nt, synthetic construct
  source 1..19: mol_type = other RNA
cttctccagggacgaccac

SEQ ID NO: 7152 - RNA, 19 nt, synthetic construct
  source 1..19: mol_type = other RNA
cttctccagggacgaccac

SEQ ID NO: 7153 - RNA, 19 nt, synthetic construct
  source 1..19: mol_type = other RNA
agagtgctgaccaccacca

SEQ ID NO: 7154 - RNA, 19 nt, synthetic construct
  source 1..19: mol_type = other RNA
ggctgctgggccccgactg

SEQ ID NO: 7155 - RNA, 19 nt, synthetic construct
  source 1..19: mol_type = other RNA
tttgctgagtgccacaacc

SEQ ID NO: 7156 - RNA, 19 nt, synthetic construct
  source 1..19: mol_type = other RNA
agggcgtcttcaagatgtg

SEQ ID NO: 7157 - RNA, 19 nt, synthetic construct
  source 1..19: mol_type = other RNA
gggtcctctgctgcagtga

SEQ ID NO: 7158 - RNA, 19 nt, synthetic construct
  source 1..19: mol_type = other RNA
ggccagcaccacagcagtc

SEQ ID NO: 7159 - RNA, 19 nt, synthetic construct
  source 1..19: mol_type = other RNA
acgaccatcctgtggcacc

SEQ ID NO: 7160 - RNA, 19 nt, synthetic construct
  source 1..19: mol_type = other RNA
acggccccaccttcgccgc

SEQ ID NO: 7161 - RNA, 19 nt, synthetic construct
  source 1..19: mol_type = other RNA
tctaggaaccagagcccac

SEQ ID NO: 7162 - RNA, 19 nt, synthetic construct
  source 1..19: mol_type = other RNA
gcctgtgccgccaagggcg

SEQ ID NO: 7163 - RNA, 19 nt, synthetic construct
  source 1..19: mol_type = other RNA
ctgtgtggggacttcaacg

SEQ ID NO: 7164 - RNA, 19 nt, synthetic construct
  source 1..19: mol_type = other RNA
cacggccccaccttcgccg

SEQ ID NO: 7165 - RNA, 19 nt, synthetic construct
  source 1..19: mol_type = other RNA
gccccaccttcgccgcctg

SEQ ID NO: 7166 - RNA, 19 nt, synthetic construct
  source 1..19: mol_type = other RNA
cttaccaccacgaccacca

SEQ ID NO: 7167 - RNA, 19 nt, synthetic construct
  source 1..19: mol_type = other RNA
ggtcaacagccatgtggac

SEQ ID NO: 7168 - RNA, 19 nt, synthetic construct
  source 1..19: mol_type = other RNA
acgttctgcctccatcccc

SEQ ID NO: 7169 - RNA, 19 nt, synthetic construct
  source 1..19: mol_type = other RNA
caacaccctcctctagcac

SEQ ID NO: 7170 - RNA, 19 nt, synthetic construct
  source 1..19: mol_type = other RNA
tcacactaccaaagtgcca

SEQ ID NO: 7171 - RNA, 19 nt, synthetic construct
  source 1..19: mol_type = other RNA
cagccccggtgtctagcac

SEQ ID NO: 7172 - RNA, 19 nt, synthetic construct
  source 1..19: mol_type = other RNA
cctgtgtgcccgccagggc

SEQ ID NO: 7173 - RNA, 19 nt, synthetic construct
  source 1..19: mol_type = other RNA
ccggaggggcagtctgtga

SEQ ID NO: 7174 - RNA, 19 nt, synthetic construct
  source 1..19: mol_type = other RNA
cattgccgaggaggactgc

SEQ ID NO: 7175 - RNA, 19 nt, synthetic construct
  source 1..19: mol_type = other RNA
ccgcctgtccatgcctgct

SEQ ID NO: 7176 - RNA, 19 nt, synthetic construct
  source 1..19: mol_type = other RNA
cgggccgagaacccctgct

SEQ ID NO: 7177 - RNA, 19 nt, synthetic construct
  source 1..19: mol_type = other RNA
gggccgagaacccctgctg

SEQ ID NO: 7178 - RNA, 19 nt, synthetic construct
  source 1..19: mol_type = other RNA
aggcacggtgctggatgac

SEQ ID NO: 7179 - RNA, 19 nt, synthetic construct
  source 1..19: mol_type = other RNA
ccactgtgtggacggctgc

SEQ ID NO: 7180 - RNA, 19 nt, synthetic construct
  source 1..19: mol_type = other RNA
ccatcatcaaccccaagcc

SEQ ID NO: 7181 - RNA, 19 nt, synthetic construct
  source 1..19: mol_type = other RNA
catcatcaaccccaagccc

SEQ ID NO: 7182 - RNA, 19 nt, synthetic construct
  source 1..19: mol_type = other RNA
gtggctggactacagctac

SEQ ID NO: 7183 - RNA, 19 nt, synthetic construct
  source 1..19: mol_type = other RNA
gtggctggactacagctac

SEQ ID NO: 7184 - RNA, 19 nt, synthetic construct
  source 1..19: mol_type = other RNA
gtggctggactacagctac

SEQ ID NO: 7185 - RNA, 19 nt, synthetic construct
  source 1..19: mol_type = other RNA
gtggctggactacagctac

SEQ ID NO: 7186 - RNA, 19 nt, synthetic construct
  source 1..19: mol_type = other RNA
gctgctgggccccgactgg

SEQ ID NO: 7187 - RNA, 19 nt, synthetic construct
  source 1..19: mol_type = other RNA
ctgctgggccccgactggc

SEQ ID NO: 7188 - RNA, 19 nt, synthetic construct
  source 1..19: mol_type = other RNA
tgcagccactggatccacg

SEQ ID NO: 7189 - RNA, 19 nt, synthetic construct
  source 1..19: mol_type = other RNA
gcctacgcccaggcctgcc

SEQ ID NO: 7190 - RNA, 19 nt, synthetic construct
  source 1..19: mol_type = other RNA
cctgggaccggaagaccag

SEQ ID NO: 7191 - RNA, 19 nt, synthetic construct
  source 1..19: mol_type = other RNA
agctgcgggttctctgctg

SEQ ID NO: 7192 - RNA, 19 nt, synthetic construct
  source 1..19: mol_type = other RNA
ttccttcgtgcctgtggac

SEQ ID NO: 7193 - RNA, 19 nt, synthetic construct
  source 1..19: mol_type = other RNA
gagtcacccccttctccag

SEQ ID NO: 7194 - RNA, 19 nt, synthetic construct
  source 1..19: mol_type = other RNA
gagtcacccccttctccag

SEQ ID NO: 7195 - RNA, 19 nt, synthetic construct
  source 1..19: mol_type = other RNA
gagtcacccccttctccag

SEQ ID NO: 7196 - RNA, 19 nt, synthetic construct
  source 1..19: mol_type = other RNA
ccagggcgcctgtcccacc

SEQ ID NO: 7197 - RNA, 19 nt, synthetic construct
  source 1..19: mol_type = other RNA
ctgcctacgcccaggcctg

SEQ ID NO: 7198 - RNA, 19 nt, synthetic construct
  source 1..19: mol_type = other RNA
cctgcacctgcaggaaccg

SEQ ID NO: 7199 - RNA, 19 nt, synthetic construct
  source 1..19: mol_type = other RNA
aggccccacgacgcctgca

SEQ ID NO: 7200 - RNA, 19 nt, synthetic construct
  source 1..19: mol_type = other RNA
gcctccagtgtggatcagc

SEQ ID NO: 7201 - RNA, 19 nt, synthetic construct
  source 1..19: mol_type = other RNA
gggacgaccaccccgggcc

SEQ ID NO: 7202 - RNA, 19 nt, synthetic construct
  source 1..19: mol_type = other RNA
gggacgaccaccccgggcc

SEQ ID NO: 7203 - RNA, 19 nt, synthetic construct
  source 1..19: mol_type = other RNA
gcctccagtgtggatcagc

SEQ ID NO: 7204 - RNA, 19 nt, synthetic construct
  source 1..19: mol_type = other RNA
gggacgaccaccccgggcc

SEQ ID NO: 7205 - RNA, 19 nt, synthetic construct
  source 1..19: mol_type = other RNA
gcctccagtgtggatcagc

SEQ ID NO: 7206 - RNA, 19 nt, synthetic construct
  source 1..19: mol_type = other RNA
gggacgaccaccccgggcc

SEQ ID NO: 7207 - RNA, 19 nt, synthetic construct
  source 1..19: mol_type = other RNA
gcctccagtgtggatcagc

SEQ ID NO: 7208 - RNA, 19 nt, synthetic construct
  source 1..19: mol_type = other RNA
caggagtcctaccctggga

SEQ ID NO: 7209 - RNA, 19 nt, synthetic construct
  source 1..19: mol_type = other RNA
gccccacggccaccccgtc

SEQ ID NO: 7210 - RNA, 19 nt, synthetic construct
  source 1..19: mol_type = other RNA
gccccacggccaccccgtc

SEQ ID NO: 7211 - RNA, 19 nt, synthetic construct
  source 1..19: mol_type = other RNA
ttgggcacatggcgcccct

SEQ ID NO: 7212 - RNA, 19 nt, synthetic construct
  source 1..19: mol_type = other RNA
gggccagccgcggaactgg

SEQ ID NO: 7213 - RNA, 19 nt, synthetic construct
  source 1..19: mol_type = other RNA
cgcctgtccatgcctgctg

SEQ ID NO: 7214 - RNA, 19 nt, synthetic construct
  source 1..19: mol_type = other RNA
cgaagtgcccacccagcca

SEQ ID NO: 7215 - RNA, 19 nt, synthetic construct
  source 1..19: mol_type = other RNA
ggctccctccctgcccgtc

SEQ ID NO: 7216 - RNA, 19 nt, synthetic construct
  source 1..19: mol_type = other RNA
acctgcccgtgtgccacct

SEQ ID NO: 7217 - RNA, 19 nt, synthetic construct
  source 1..19: mol_type = other RNA
ggggcagaaggtgcactgt

SEQ ID NO: 7218 - RNA, 19 nt, synthetic construct
  source 1..19: mol_type = other RNA
agttccacgtccaccccct

SEQ ID NO: 7219 - RNA, 19 nt, synthetic construct
  source 1..19: mol_type = other RNA
tgcaactctaggaaccaga

SEQ ID NO: 7220 - RNA, 19 nt, synthetic construct
  source 1..19: mol_type = other RNA
cgcgctccgtgctcctgct

SEQ ID NO: 7221 - RNA, 19 nt, synthetic construct
  source 1..19: mol_type = other RNA
cccagaagggtgaggggcc

SEQ ID NO: 7222 - RNA, 19 nt, synthetic construct
  source 1..19: mol_type = other RNA
ggcgacgtcttccgcttcc

SEQ ID NO: 7223 - RNA, 19 nt, synthetic construct
  source 1..19: mol_type = other RNA
ccggctccaccaccaaccc

SEQ ID NO: 7224 - RNA, 19 nt, synthetic construct
  source 1..19: mol_type = other RNA
ccggctccaccaccaaccc

SEQ ID NO: 7225 - RNA, 19 nt, synthetic construct
  source 1..19: mol_type = other RNA
ccggctccaccaccaaccc

SEQ ID NO: 7226 - RNA, 19 nt, synthetic construct
  source 1..19: mol_type = other RNA
ccggctccaccaccaaccc

SEQ ID NO: 7227 - RNA, 19 nt, synthetic construct
  source 1..19: mol_type = other RNA
ccggctccaccaccaaccc

SEQ ID NO: 7228 - RNA, 19 nt, synthetic construct
  source 1..19: mol_type = other RNA
caccacaactgtggccact

SEQ ID NO: 7229 - RNA, 19 nt, synthetic construct
  source 1..19: mol_type = other RNA
gccgaacaccacggccacc

SEQ ID NO: 7230 - RNA, 19 nt, synthetic construct
  source 1..19: mol_type = other RNA
gccacaccacggccacctc

SEQ ID NO: 7231 - RNA, 19 nt, synthetic construct
  source 1..19: mol_type = other RNA
cgtgcggccggaggggccg

SEQ ID NO: 7232 - RNA, 19 nt, synthetic construct
  source 1..19: mol_type = other RNA
gaacagaccaccacacccg

SEQ ID NO: 7233 - RNA, 19 nt, synthetic construct
  source 1..19: mol_type = other RNA
caccacaactgtggccact

SEQ ID NO: 7234 - RNA, 19 nt, synthetic construct
  source 1..19: mol_type = other RNA
tccacagctaccagcttta

SEQ ID NO: 7235 - RNA, 19 nt, synthetic construct
  source 1..19: mol_type = other RNA
tgcccaccggttccacggc

SEQ ID NO: 7236 - RNA, 19 nt, synthetic construct
  source 1..19: mol_type = other RNA
ggaatctcagcctctacct

SEQ ID NO: 7237 - RNA, 19 nt, synthetic construct
  source 1..19: mol_type = other RNA
tcagcctctacctggacaa

SEQ ID NO: 7238 - RNA, 19 nt, synthetic construct
  source 1..19: mol_type = other RNA
gagtgccacaaccttgtgc

SEQ ID NO: 7239 - RNA, 19 nt, synthetic construct
  source 1..19: mol_type = other RNA
gaggggatggcggagggct

SEQ ID NO: 7240 - RNA, 19 nt, synthetic construct
  source 1..19: mol_type = other RNA
gcatctgcgtgcaggcctg

SEQ ID NO: 7241 - RNA, 19 nt, synthetic construct
  source 1..19: mol_type = other RNA
gcaggcctgcccctgcgtg

SEQ ID NO: 7242 - RNA, 19 nt, synthetic construct
  source 1..19: mol_type = other RNA
cgagacggtgtgcgtgtgc

SEQ ID NO: 7243 - RNA, 19 nt, synthetic construct
  source 1..19: mol_type = other RNA
acatgtgtacctgcctctc

SEQ ID NO: 7244 - RNA, 19 nt, synthetic construct
  source 1..19: mol_type = other RNA
ggtggagtccatttgctga

SEQ ID NO: 7245 - RNA, 19 nt, synthetic construct
  source 1..19: mol_type = other RNA
gtggagtccatttgctgac

SEQ ID NO: 7246 - RNA, 19 nt, synthetic construct
  source 1..19: mol_type = other RNA
cccccggcctgtgtgtggc

SEQ ID NO: 7247 - RNA, 19 nt, synthetic construct
  source 1..19: mol_type = other RNA
ccgtgggtgaaaccggccc

SEQ ID NO: 7248 - RNA, 19 nt, synthetic construct
  source 1..19: mol_type = other RNA
gccttgcccctccctgatg

SEQ ID NO: 7249 - RNA, 19 nt, synthetic construct
  source 1..19: mol_type = other RNA
tgccacggccggagcgccc

SEQ ID NO: 7250 - RNA, 19 nt, synthetic construct
  source 1..19: mol_type = other RNA
gcaacggccaggtcagaga

SEQ ID NO: 7251 - RNA, 19 nt, synthetic construct
  source 1..19: mol_type = other RNA
ccgcgccgcctacgaggac

SEQ ID NO: 7252 - RNA, 19 nt, synthetic construct
  source 1..19: mol_type = other RNA
aggactgcaaccacccttc

SEQ ID NO: 7253 - RNA, 19 nt, synthetic construct
  source 1..19: mol_type = other RNA
aggactgcaaccacccttc

SEQ ID NO: 7254 - RNA, 19 nt, synthetic construct
  source 1..19: mol_type = other RNA
aggactgcaaccacccttc

SEQ ID NO: 7255 - RNA, 19 nt, synthetic construct
  source 1..19: mol_type = other RNA
ggagcagagcggggactac

SEQ ID NO: 7256 - RNA, 19 nt, synthetic construct
  source 1..19: mol_type = other RNA
cccccatcactgatcacca

SEQ ID NO: 7257 - RNA, 19 nt, synthetic construct
  source 1..19: mol_type = other RNA
gcaggggacgtgccacaac

SEQ ID NO: 7258 - RNA, 19 nt, synthetic construct
  source 1..19: mol_type = other RNA
caacaccctcctctagcac

SEQ ID NO: 7259 - RNA, 19 nt, synthetic construct
  source 1..19: mol_type = other RNA
caacaccctcctctagcac

SEQ ID NO: 7260 - RNA, 19 nt, synthetic construct
  source 1..19: mol_type = other RNA
caacaccctcctctagcac

SEQ ID NO: 7261 - RNA, 19 nt, synthetic construct
  source 1..19: mol_type = other RNA
gggctgcgagaccgaggtc

SEQ ID NO: 7262 - RNA, 19 nt, synthetic construct
  source 1..19: mol_type = other RNA
ctgccccacctgcccgtgt

SEQ ID NO: 7263 - RNA, 19 nt, synthetic construct
  source 1..19: mol_type = other RNA
acgcgtagccggtccgtgg

SEQ ID NO: 7264 - RNA, 19 nt, synthetic construct
  source 1..19: mol_type = other RNA
cctactccaacatccgtgc

SEQ ID NO: 7265 - RNA, 19 nt, synthetic construct
  source 1..19: mol_type = other RNA
cctactccaacatccgtgc

SEQ ID NO: 7266 - RNA, 19 nt, synthetic construct
  source 1..19: mol_type = other RNA
cctactccaacatccgtgc

SEQ ID NO: 7267 - RNA, 19 nt, synthetic construct
  source 1..19: mol_type = other RNA
cctactccaacatccgtgc

SEQ ID NO: 7268 - RNA, 19 nt, synthetic construct
  source 1..19: mol_type = other RNA
ctactccaacatccgtgcg

SEQ ID NO: 7269 - RNA, 19 nt, synthetic construct
  source 1..19: mol_type = other RNA
ctactccaacatccgtgcg

SEQ ID NO: 7270 - RNA, 19 nt, synthetic construct
  source 1..19: mol_type = other RNA
ctactccaacatccgtgcg

SEQ ID NO: 7271 - RNA, 19 nt, synthetic construct
  source 1..19: mol_type = other RNA
ctactccaacatccgtgcg

SEQ ID NO: 7272 - RNA, 19 nt, synthetic construct
  source 1..19: mol_type = other RNA
ccggtaccacccagcactc

SEQ ID NO: 7273 - RNA, 19 nt, synthetic construct
  source 1..19: mol_type = other RNA
ccggtaccacccagcactc

SEQ ID NO: 7274 - RNA, 19 nt, synthetic construct
  source 1..19: mol_type = other RNA
ccggtaccacccagcactc

SEQ ID NO: 7275 - RNA, 19 nt, synthetic construct
  source 1..19: mol_type = other RNA
accagatcctcttcaacgc

SEQ ID NO: 7276 - RNA, 19 nt, synthetic construct
  source 1..19: mol_type = other RNA
cccacatcggccccaataa

SEQ ID NO: 7277 - RNA, 19 nt, synthetic construct
  source 1..19: mol_type = other RNA
cacagagccgagcactata

SEQ ID NO: 7278 - RNA, 19 nt, synthetic construct
  source 1..19: mol_type = other RNA
acccaccctacaagatacg

SEQ ID NO: 7279 - RNA, 19 nt, synthetic construct
  source 1..19: mol_type = other RNA
cgggttctctgctgcgaat

SEQ ID NO: 7280 - RNA, 19 nt, synthetic construct
  source 1..19: mol_type = other RNA
actgtgacgtccacttcgg

SEQ ID NO: 7281 - RNA, 19 nt, synthetic construct
  source 1..19: mol_type = other RNA
cccttgcactgtcctaacg

SEQ ID NO: 7282 - RNA, 19 nt, synthetic construct
  source 1..19: mol_type = other RNA
aggcggagactttgagacg

SEQ ID NO: 7283 - RNA, 19 nt, synthetic construct
  source 1..19: mol_type = other RNA
tggggagtgcgtccagacc

SEQ ID NO: 7284 - RNA, 19 nt, synthetic construct
  source 1..19: mol_type = other RNA
accacggccactacgatca

SEQ ID NO: 7285 - RNA, 19 nt, synthetic construct
  source 1..19: mol_type = other RNA
accacggccactacgatca

SEQ ID NO: 7286 - RNA, 19 nt, synthetic construct
  source 1..19: mol_type = other RNA
accacggccactacgatca

SEQ ID NO: 7287 - RNA, 19 nt, synthetic construct
  source 1..19: mol_type = other RNA
accacggccactacgatca

SEQ ID NO: 7288 - RNA, 19 nt, synthetic construct
  source 1..19: mol_type = other RNA
accacggccactacgatca

SEQ ID NO: 7289 - RNA, 19 nt, synthetic construct
  source 1..19: mol_type = other RNA
ccgccgtgcaaccgtcccg

SEQ ID NO: 7290 - RNA, 19 nt, synthetic construct
  source 1..19: mol_type = other RNA
aacactcacgagcgagctg

SEQ ID NO: 7291 - RNA, 19 nt, synthetic construct
  source 1..19: mol_type = other RNA
gatcccaaatacgccaacc

SEQ ID NO: 7292 - RNA, 19 nt, synthetic construct
  source 1..19: mol_type = other RNA
agagcctggaggcttacgc

SEQ ID NO: 7293 - RNA, 19 nt, synthetic construct
  source 1..19: mol_type = other RNA
ctgatcctccaagagggga

SEQ ID NO: 7294 - RNA, 19 nt, synthetic construct
  source 1..19: mol_type = other RNA
ccaggccctgttctcaacg

SEQ ID NO: 7295 - RNA, 19 nt, synthetic construct
  source 1..19: mol_type = other RNA
caggccctgttctcaacgc

SEQ ID NO: 7296 - RNA, 19 nt, synthetic construct
  source 1..19: mol_type = other RNA
ccagtaccacccagcactc

SEQ ID NO: 7297 - RNA, 19 nt, synthetic construct
  source 1..19: mol_type = other RNA
gatccatgcacgctttggg

SEQ ID NO: 7298 - RNA, 19 nt, synthetic construct
  source 1..19: mol_type = other RNA
agatcctcttcaacgcaca

SEQ ID NO: 7299 - RNA, 19 nt, synthetic construct
  source 1..19: mol_type = other RNA
caagccatgcggccccata

SEQ ID NO: 7300 - RNA, 19 nt, synthetic construct
  source 1..19: mol_type = other RNA
gtgcccctgctacgctcac

SEQ ID NO: 7301 - RNA, 19 nt, synthetic construct
  source 1..19: mol_type = other RNA
ctgcccctgtgtgcacaac

SEQ ID NO: 7302 - RNA, 19 nt, synthetic construct
  source 1..19: mol_type = other RNA
cctccactctggggacgac

SEQ ID NO: 7303 - RNA, 19 nt, synthetic construct
  source 1..19: mol_type = other RNA
tccacccttccaacacgct

SEQ ID NO: 7304 - RNA, 19 nt, synthetic construct
  source 1..19: mol_type = other RNA
gcgccaacactcacgagcg

SEQ ID NO: 7305 - RNA, 19 nt, synthetic construct
  source 1..19: mol_type = other RNA
ggcgccaacactcacgagc

SEQ ID NO: 7306 - RNA, 19 nt, synthetic construct
  source 1..19: mol_type = other RNA
gtgcggcctgacggacaac

SEQ ID NO: 7307 - RNA, 19 nt, synthetic construct
  source 1..19: mol_type = other RNA
ccccacatcggcccccata

SEQ ID NO: 7308 - RNA, 19 nt, synthetic construct
  source 1..19: mol_type = other RNA
ccccacatcggcccccata

SEQ ID NO: 7309 - RNA, 19 nt, synthetic construct
  source 1..19: mol_type = other RNA
ccccacatcggcccccata

SEQ ID NO: 7310 - RNA, 19 nt, synthetic construct
  source 1..19: mol_type = other RNA
ccacgaaggccaccacgac

SEQ ID NO: 7311 - RNA, 19 nt, synthetic construct
  source 1..19: mol_type = other RNA
ccacgaaggccaccacgac

SEQ ID NO: 7312 - RNA, 19 nt, synthetic construct
  source 1..19: mol_type = other RNA
gtgtgttcatgtacgggtg

SEQ ID NO: 7313 - RNA, 19 nt, synthetic construct
  source 1..19: mol_type = other RNA
cccaggccctgttctcaac

SEQ ID NO: 7314 - RNA, 19 nt, synthetic construct
  source 1..19: mol_type = other RNA
cggccccaataaccacggt

SEQ ID NO: 7315 - RNA, 19 nt, synthetic construct
  source 1..19: mol_type = other RNA
gccggctgccatttctacg

SEQ ID NO: 7316 - RNA, 19 nt, synthetic construct
  source 1..19: mol_type = other RNA
caaggacatggccaagacg

SEQ ID NO: 7317 - RNA, 19 nt, synthetic construct
  source 1..19: mol_type = other RNA
ccagggtcagcccccgccg

SEQ ID NO: 7318 - RNA, 19 nt, synthetic construct
  source 1..19: mol_type = other RNA
ccccaataaccacggtggt

SEQ ID NO: 7319 - RNA, 19 nt, synthetic construct
  source 1..19: mol_type = other RNA
tggtgactgcagctacgtt

SEQ ID NO: 7320 - RNA, 19 nt, synthetic construct
  source 1..19: mol_type = other RNA
tgagagagatccatgcacg

SEQ ID NO: 7321 - RNA, 19 nt, synthetic construct
  source 1..19: mol_type = other RNA
ccccaagtcccagcgctac

SEQ ID NO: 7322 - RNA, 19 nt, synthetic construct
  source 1..19: mol_type = other RNA
ccagtgtggctgctacgac

SEQ ID NO: 7323 - RNA, 19 nt, synthetic construct
  source 1..19: mol_type = other RNA
tgccccaagtcccagcgct

SEQ ID NO: 7324 - RNA, 19 nt, synthetic construct
  source 1..19: mol_type = other RNA
gtttgatgaggactacccc

SEQ ID NO: 7325 - RNA, 19 nt, synthetic construct
  source 1..19: mol_type = other RNA
tgcgtgaacaagcacctgc

SEQ ID NO: 7326 - RNA, 19 nt, synthetic construct
  source 1..19: mol_type = other RNA
ctcctccactccggggacg

SEQ ID NO: 7327 - RNA, 19 nt, synthetic construct
  source 1..19: mol_type = other RNA
tgaggactaccccaagtct

SEQ ID NO: 7328 - RNA, 19 nt, synthetic construct
  source 1..19: mol_type = other RNA
caaccgaagtgtgagtgga

SEQ ID NO: 7329 - RNA, 19 nt, synthetic construct
  source 1..19: mol_type = other RNA
caccccgtgggtgaaaccg

SEQ ID NO: 7330 - RNA, 19 nt, synthetic construct
  source 1..19: mol_type = other RNA
cccctgtgtgcacaacgag

SEQ ID NO: 7331 - RNA, 19 nt, synthetic construct
  source 1..19: mol_type = other RNA
acctgcagaagttggatgg

SEQ ID NO: 7332 - RNA, 19 nt, synthetic construct
  source 1..19: mol_type = other RNA
cccccagtgccgaacacca

SEQ ID NO: 7333 - RNA, 19 nt, synthetic construct
  source 1..19: mol_type = other RNA
agcagtgcccggacccgct

SEQ ID NO: 7334 - RNA, 19 nt, synthetic construct
  source 1..19: mol_type = other RNA
cccccagtgccgaacacca

SEQ ID NO: 7335 - RNA, 19 nt, synthetic construct
  source 1..19: mol_type = other RNA
ggacggcggggacacggcc

SEQ ID NO: 7336 - RNA, 19 nt, synthetic construct
  source 1..19: mol_type = other RNA
cccccagtgccgaacacca

SEQ ID NO: 7337 - RNA, 19 nt, synthetic construct
  source 1..19: mol_type = other RNA
cccagtggcatccagtgcg

SEQ ID NO: 7338 - RNA, 19 nt, synthetic construct
  source 1..19: mol_type = other RNA
ggagaatgagaactacgcc

SEQ ID NO: 7339 - RNA, 19 nt, synthetic construct
  source 1..19: mol_type = other RNA
cttgtgcccccgggcccat

SEQ ID NO: 7340 - RNA, 19 nt, synthetic construct
  source 1..19: mol_type = other RNA
gcagctacgttctgtccaa

SEQ ID NO: 7341 - RNA, 19 nt, synthetic construct
  source 1..19: mol_type = other RNA
ctaccagctttacagccat

SEQ ID NO: 7342 - RNA, 19 nt, synthetic construct
  source 1..19: mol_type = other RNA
ctaccagctttacagccat

SEQ ID NO: 7343 - RNA, 19 nt, synthetic construct
  source 1..19: mol_type = other RNA
ctaccagctttacagccat

SEQ ID NO: 7344 - RNA, 19 nt, synthetic construct
  source 1..19: mol_type = other RNA
ctgcagaagttggatgggc

SEQ ID NO: 7345 - RNA, 19 nt, synthetic construct
  source 1..19: mol_type = other RNA
gccaacatcaccctgttca

SEQ ID NO: 7346 - RNA, 19 nt, synthetic construct
  source 1..19: mol_type = other RNA
cctgccgtgccctggcacc

SEQ ID NO: 7347 - RNA, 19 nt, synthetic construct
  source 1..19: mol_type = other RNA
ctctggctgcctgcccctc

SEQ ID NO: 7348 - RNA, 19 nt, synthetic construct
  source 1..19: mol_type = other RNA
accagaaccaggctgacga

SEQ ID NO: 7349 - RNA, 19 nt, synthetic construct
  source 1..19: mol_type = other RNA
aaggactgacatcccccag

SEQ ID NO: 7350 - RNA, 19 nt, synthetic construct
  source 1..19: mol_type = other RNA
ggccgtctgtgagcagccc

SEQ ID NO: 7351 - RNA, 19 nt, synthetic construct
  source 1..19: mol_type = other RNA
ccaggtcgtggaatgcagc

SEQ ID NO: 7352 - RNA, 19 nt, synthetic construct
  source 1..19: mol_type = other RNA
cagccccggtgtcagtgga

SEQ ID NO: 7353 - RNA, 19 nt, synthetic construct
  source 1..19: mol_type = other RNA
ggccgtctgtgagcagccc

SEQ ID NO: 7354 - RNA, 19 nt, synthetic construct
  source 1..19: mol_type = other RNA
ccaggtcgtggaatgcagc

SEQ ID NO: 7355 - RNA, 19 nt, synthetic construct
  source 1..19: mol_type = other RNA
gcaccaacaaccagaggga

SEQ ID NO: 7356 - RNA, 19 nt, synthetic construct
  source 1..19: mol_type = other RNA
ccaggtcgtggaatgcagc

SEQ ID NO: 7357 - RNA, 19 nt, synthetic construct
  source 1..19: mol_type = other RNA
caacgccattcaccttcac

SEQ ID NO: 7358 - RNA, 19 nt, synthetic construct
  source 1..19: mol_type = other RNA
ggccgtctgtgagcagccc

SEQ ID NO: 7359 - RNA, 19 nt, synthetic construct
  source 1..19: mol_type = other RNA
ccaggtcgtggaatgcagc

SEQ ID NO: 7360 - RNA, 19 nt, synthetic construct
  source 1..19: mol_type = other RNA
ccgtgtgttctgctgcaac

SEQ ID NO: 7361 - RNA, 19 nt, synthetic construct
  source 1..19: mol_type = other RNA
ctgatgctgagccaggtct

SEQ ID NO: 7362 - RNA, 19 nt, synthetic construct
  source 1..19: mol_type = other RNA
accttgtgcccccgggccc

SEQ ID NO: 7363 - RNA, 19 nt, synthetic construct
  source 1..19: mol_type = other RNA
gagcagtgcccggacccgc

SEQ ID NO: 7364 - RNA, 19 nt, synthetic construct
  source 1..19: mol_type = other RNA
ggccaggtcgtggaatgca

SEQ ID NO: 7365 - RNA, 19 nt, synthetic construct
  source 1..19: mol_type = other RNA
ggccaggtcgtggaatgca

SEQ ID NO: 7366 - RNA, 19 nt, synthetic construct
  source 1..19: mol_type = other RNA
ggccaggtcgtggaatgca

SEQ ID NO: 7367 - RNA, 19 nt, synthetic construct
  source 1..19: mol_type = other RNA
ggccaggtcgtggaatgca

SEQ ID NO: 7368 - RNA, 19 nt, synthetic construct
  source 1..19: mol_type = other RNA
ccgtgtgttctgctgcaac

SEQ ID NO: 7369 - RNA, 19 nt, synthetic construct
  source 1..19: mol_type = other RNA
gagtgtgcagtgactggcg

SEQ ID NO: 7370 - RNA, 19 nt, synthetic construct
  source 1..19: mol_type = other RNA
ccccgctccagtttgggaa

SEQ ID NO: 7371 - RNA, 19 nt, synthetic construct
  source 1..19: mol_type = other RNA
tgcagaagttggatgggcc

SEQ ID NO: 7372 - RNA, 19 nt, synthetic construct
  source 1..19: mol_type = other RNA
ccaggacctgtgccgctgc

SEQ ID NO: 7373 - RNA, 19 nt, synthetic construct
  source 1..19: mol_type = other RNA
cggcggggacacggccatc

SEQ ID NO: 7374 - RNA, 19 nt, synthetic construct
  source 1..19: mol_type = other RNA
ccgtgtgttctgctgcaac

SEQ ID NO: 7375 - RNA, 19 nt, synthetic construct
  source 1..19: mol_type = other RNA
ccgtgtgttctgctgcaac

SEQ ID NO: 7376 - RNA, 19 nt, synthetic construct
  source 1..19: mol_type = other RNA
ctcctccactccggggacg

SEQ ID NO: 7377 - RNA, 19 nt, synthetic construct
  source 1..19: mol_type = other RNA
cctgggcacctgcgtggcc

SEQ ID NO: 7378 - RNA, 19 nt, synthetic construct
  source 1..19: mol_type = other RNA
ctacggggatggccacttc

SEQ ID NO: 7379 - RNA, 19 nt, synthetic construct
  source 1..19: mol_type = other RNA
cacccacgggaccttccgc

SEQ ID NO: 7380 - RNA, 19 nt, synthetic construct
  source 1..19: mol_type = other RNA
gctgtggcatgtcctggaa

SEQ ID NO: 7381 - RNA, 19 nt, synthetic construct
  source 1..19: mol_type = other RNA
ttcatccgactgcaccagg

SEQ ID NO: 7382 - RNA, 19 nt, synthetic construct
  source 1..19: mol_type = other RNA
ctgcacggtggccaggtgc

SEQ ID NO: 7383 - RNA, 19 nt, synthetic construct
  source 1..19: mol_type = other RNA
accctgcctaaaaacctgc

SEQ ID NO: 7384 - RNA, 19 nt, synthetic construct
  source 1..19: mol_type = other RNA
cagtggcatccagtgcgct

SEQ ID NO: 7385 - RNA, 19 nt, synthetic construct
  source 1..19: mol_type = other RNA
accaggacgtcatctacaa

SEQ ID NO: 7386 - RNA, 19 nt, synthetic construct
  source 1..19: mol_type = other RNA
ccacggagcagtgcccgga

SEQ ID NO: 7387 - RNA, 19 nt, synthetic construct
  source 1..19: mol_type = other RNA
ccctgcctaaaaacctgcc

SEQ ID NO: 7388 - RNA, 19 nt, synthetic construct
  source 1..19: mol_type = other RNA
gggctgatgtgcgccaaca

SEQ ID NO: 7389 - RNA, 19 nt, synthetic construct
  source 1..19: mol_type = other RNA
gggatggccacttcatcac

SEQ ID NO: 7390 - RNA, 19 nt, synthetic construct
  source 1..19: mol_type = other RNA
gccagccccggtgtcagtg

SEQ ID NO: 7391 - RNA, 19 nt, synthetic construct
  source 1..19: mol_type = other RNA
tggggaagttcaagatgtg

SEQ ID NO: 7392 - RNA, 19 nt, synthetic construct
  source 1..19: mol_type = other RNA
tggggaagttcaagatgtg

SEQ ID NO: 7393 - RNA, 19 nt, synthetic construct
  source 1..19: mol_type = other RNA
tggggaagttcaagatgtg

SEQ ID NO: 7394 - RNA, 19 nt, synthetic construct
  source 1..19: mol_type = other RNA
tggggaagttcaagatgtg

SEQ ID NO: 7395 - RNA, 19 nt, synthetic construct
  source 1..19: mol_type = other RNA
ttctgcagggcatttggac

SEQ ID NO: 7396 - RNA, 19 nt, synthetic construct
  source 1..19: mol_type = other RNA
caggcccggctgccctaca

SEQ ID NO: 7397 - RNA, 19 nt, synthetic construct
  source 1..19: mol_type = other RNA
tgccggaaccccagtgggc

SEQ ID NO: 7398 - RNA, 19 nt, synthetic construct
  source 1..19: mol_type = other RNA
gctactcctgtgaggagga

SEQ ID NO: 7399 - RNA, 19 nt, synthetic construct
  source 1..19: mol_type = other RNA
cgtgtccggctgtgtctgt

SEQ ID NO: 7400 - RNA, 19 nt, synthetic construct
  source 1..19: mol_type = other RNA
tggcccaggactactgtgg

SEQ ID NO: 7401 - RNA, 19 nt, synthetic construct
  source 1..19: mol_type = other RNA
cacgaggagacggtgccct

SEQ ID NO: 7402 - RNA, 19 nt, synthetic construct
  source 1..19: mol_type = other RNA
tgccaggccgagagcttcc

SEQ ID NO: 7403 - RNA, 19 nt, synthetic construct
  source 1..19: mol_type = other RNA
gtccgcgaggtctgccgct

SEQ ID NO: 7404 - RNA, 19 nt, synthetic construct
  source 1..19: mol_type = other RNA
acggcggggacacggccat

SEQ ID NO: 7405 - RNA, 19 nt, synthetic construct
  source 1..19: mol_type = other RNA
gcacggagcctgctgtgcc

SEQ ID NO: 7406 - RNA, 19 nt, synthetic construct
  source 1..19: mol_type = other RNA
tccagtgcgctcacagcct

SEQ ID NO: 7407 - RNA, 19 nt, synthetic construct
  source 1..19: mol_type = other RNA
acaacgccattcaccttca

SEQ ID NO: 7408 - RNA, 19 nt, synthetic construct
  source 1..19: mol_type = other RNA
gggcccacggagcagtgcc

SEQ ID NO: 7409 - RNA, 19 nt, synthetic construct
  source 1..19: mol_type = other RNA
ccacgggctgtgagcccca

SEQ ID NO: 7410 - RNA, 19 nt, synthetic construct
  source 1..19: mol_type = other RNA
ccacgggctgtgagcccca

SEQ ID NO: 7411 - RNA, 19 nt, synthetic construct
  source 1..19: mol_type = other RNA
gcacctgcaccaacaacca

SEQ ID NO: 7412 - RNA, 19 nt, synthetic construct
  source 1..19: mol_type = other RNA
acttggaggggacgttgag

SEQ ID NO: 7413 - RNA, 19 nt, synthetic construct
  source 1..19: mol_type = other RNA
tggcggactccggacacct

SEQ ID NO: 7414 - RNA, 19 nt, synthetic construct
  source 1..19: mol_type = other RNA
tgacttccactatgagtgc

SEQ ID NO: 7415 - RNA, 19 nt, synthetic construct
  source 1..19: mol_type = other RNA
tggagaactgcacggtggc

SEQ ID NO: 7416 - RNA, 19 nt, synthetic construct
  source 1..19: mol_type = other RNA
ctgtgtctgtcccccgggg

SEQ ID NO: 7417 - RNA, 19 nt, synthetic construct
  source 1..19: mol_type = other RNA
aaaaacctgccggaacccc

SEQ ID NO: 7418 - RNA, 19 nt, synthetic construct
  source 1..19: mol_type = other RNA
tgcaggctccacagaaccc

SEQ ID NO: 7419 - RNA, 19 nt, synthetic construct
  source 1..19: mol_type = other RNA
gaacaagcacctgcccatc

SEQ ID NO: 7420 - RNA, 19 nt, synthetic construct
  source 1..19: mol_type = other RNA
tgcaccaacaaccagaggg

SEQ ID NO: 7421 - RNA, 19 nt, synthetic construct
  source 1..19: mol_type = other RNA
gcccaggactactgtgggg

SEQ ID NO: 7422 - RNA, 19 nt, synthetic construct
  source 1..19: mol_type = other RNA
ctgtgtgggaacttcaacc

SEQ ID NO: 7423 - RNA, 19 nt, synthetic construct
  source 1..19: mol_type = other RNA
tcaactccatctacacgca

SEQ ID NO: 7424 - RNA, 19 nt, synthetic construct
  source 1..19: mol_type = other RNA
gtgggaccaccggcaccac

SEQ ID NO: 7425 - RNA, 19 nt, synthetic construct
  source 1..19: mol_type = other RNA
gtgtccgcgaggtctgccg

SEQ ID NO: 7426 - RNA, 19 nt, synthetic construct
  source 1..19: mol_type = other RNA
atacgtgccctgtggcccc

SEQ ID NO: 7427 - RNA, 19 nt, synthetic construct
  source 1..19: mol_type = other RNA
gcaggctccacagaaccca

SEQ ID NO: 7428 - RNA, 19 nt, synthetic construct
  source 1..19: mol_type = other RNA
gctccacagaacccactgt

SEQ ID NO: 7429 - RNA, 19 nt, synthetic construct
  source 1..19: mol_type = other RNA
cttcttcaatgaggaccag

SEQ ID NO: 7430 - RNA, 19 nt, synthetic construct
  source 1..19: mol_type = other RNA
cgggagttgggccaggtcg

SEQ ID NO: 7431 - RNA, 19 nt, synthetic construct
  source 1..19: mol_type = other RNA
gtggacagagtggtttgat

SEQ ID NO: 7432 - RNA, 19 nt, synthetic construct
  source 1..19: mol_type = other RNA
ggcggggacacggccatcc

SEQ ID NO: 7433 - RNA, 19 nt, synthetic construct
  source 1..19: mol_type = other RNA
cgggagttgggccaggtcg

SEQ ID NO: 7434 - RNA, 19 nt, synthetic construct
  source 1..19: mol_type = other RNA
cgggagttgggccaggtcg

SEQ ID NO: 7435 - RNA, 19 nt, synthetic construct
  source 1..19: mol_type = other RNA
tcctctgccctagggacca

SEQ ID NO: 7436 - RNA, 19 nt, synthetic construct
  source 1..19: mol_type = other RNA
gcagaaggtgcactgtgac

SEQ ID NO: 7437 - RNA, 19 nt, synthetic construct
  source 1..19: mol_type = other RNA
tgggcccacggagcagtgc

SEQ ID NO: 7438 - RNA, 19 nt, synthetic construct
  source 1..19: mol_type = other RNA
agtggcatccagtgcgctc

SEQ ID NO: 7439 - RNA, 19 nt, synthetic construct
  source 1..19: mol_type = other RNA
gtgtgcagtgactggcgag

SEQ ID NO: 7440 - RNA, 19 nt, synthetic construct
  source 1..19: mol_type = other RNA
gactgcagctacgttctgt

SEQ ID NO: 7441 - RNA, 19 nt, synthetic construct
  source 1..19: mol_type = other RNA
gtgcctgtggacggctgca

SEQ ID NO: 7442 - RNA, 19 nt, synthetic construct
  source 1..19: mol_type = other RNA
caggtaccaccacctgcca

SEQ ID NO: 7443 - RNA, 19 nt, synthetic construct
  source 1..19: mol_type = other RNA
cctgcggggcaccctgcct

SEQ ID NO: 7444 - RNA, 19 nt, synthetic construct
  source 1..19: mol_type = other RNA
tcctctgccctagggacca

SEQ ID NO: 7445 - RNA, 19 nt, synthetic construct
  source 1..19: mol_type = other RNA
tcctctgccctagggacca

SEQ ID NO: 7446 - RNA, 19 nt, synthetic construct
  source 1..19: mol_type = other RNA
tcctctgccctagggacca

SEQ ID NO: 7447 - RNA, 19 nt, synthetic construct
  source 1..19: mol_type = other RNA
ggaatactcacgccagtgc

SEQ ID NO: 7448 - RNA, 19 nt, synthetic construct
  source 1..19: mol_type = other RNA
cactattccacctttgacg

SEQ ID NO: 7449 - RNA, 19 nt, synthetic construct
  source 1..19: mol_type = other RNA
acctgcgtggcctacgggg

SEQ ID NO: 7450 - RNA, 19 nt, synthetic construct
  source 1..19: mol_type = other RNA
tctgtgacttctacaaccc

SEQ ID NO: 7451 - RNA, 19 nt, synthetic construct
  source 1..19: mol_type = other RNA
cggtgacttcccacacccc

SEQ ID NO: 7452 - RNA, 19 nt, synthetic construct
  source 1..19: mol_type = other RNA
ccaggtgcgtgggtgacaa

SEQ ID NO: 7453 - RNA, 19 nt, synthetic construct
  source 1..19: mol_type = other RNA
tgaggccgacgtcacctgc

SEQ ID NO: 7454 - RNA, 19 nt, synthetic construct
  source 1..19: mol_type = other RNA
acagcaaccgaaaagacca

SEQ ID NO: 7455 - RNA, 19 nt, synthetic construct
  source 1..19: mol_type = other RNA
ccagcccttcttcaatgag

SEQ ID NO: 7456 - RNA, 19 nt, synthetic construct
  source 1..19: mol_type = other RNA
ccaggcctgtggtcacccg

SEQ ID NO: 7457 - RNA, 19 nt, synthetic construct
  source 1..19: mol_type = other RNA
gaggtgggagtgcagccac

SEQ ID NO: 7458 - RNA, 19 nt, synthetic construct
  source 1..19: mol_type = other RNA
gcccagtgtggctgctacg

SEQ ID NO: 7459 - RNA, 19 nt, synthetic construct
  source 1..19: mol_type = other RNA
ggccgtgtcctgggaccgg

SEQ ID NO: 7460 - RNA, 19 nt, synthetic construct
  source 1..19: mol_type = other RNA
tgagctttgttccacccgt

SEQ ID NO: 7461 - RNA, 19 nt, synthetic construct
  source 1..19: mol_type = other RNA
tcctgtgaggaggactcct

SEQ ID NO: 7462 - RNA, 19 nt, synthetic construct
  source 1..19: mol_type = other RNA
gtgttctgctgcaactacg

SEQ ID NO: 7463 - RNA, 19 nt, synthetic construct
  source 1..19: mol_type = other RNA
gtgttctgctgcaactacg

SEQ ID NO: 7464 - RNA, 19 nt, synthetic construct
  source 1..19: mol_type = other RNA
gtgttctgctgcaactacg

SEQ ID NO: 7465 - RNA, 19 nt, synthetic construct
  source 1..19: mol_type = other RNA
gtgttctgctgcaactacg

SEQ ID NO: 7466 - RNA, 19 nt, synthetic construct
  source 1..19: mol_type = other RNA
ccttgtgcccccgggccca

SEQ ID NO: 7467 - RNA, 19 nt, synthetic construct
  source 1..19: mol_type = other RNA
tgtgtccctgcgcccatgg

SEQ ID NO: 7468 - RNA, 19 nt, synthetic construct
  source 1..19: mol_type = other RNA
gagctttgttccacccgtc

SEQ ID NO: 7469 - RNA, 19 nt, synthetic construct
  source 1..19: mol_type = other RNA
cttccactatgagtgcgag

SEQ ID NO: 7470 - RNA, 19 nt, synthetic construct
  source 1..19: mol_type = other RNA
tgcacggtggccaggtgcg

SEQ ID NO: 7471 - RNA, 19 nt, synthetic construct
  source 1..19: mol_type = other RNA
acctgccagccccggtgtc

SEQ ID NO: 7472 - RNA, 19 nt, synthetic construct
  source 1..19: mol_type = other RNA
tgggccaggtcgtggaatg

SEQ ID NO: 7473 - RNA, 19 nt, synthetic construct
  source 1..19: mol_type = other RNA
cggtttcagcaagaacggc

SEQ ID NO: 7474 - RNA, 19 nt, synthetic construct
  source 1..19: mol_type = other RNA
tgggccaggtcgtggaatg

SEQ ID NO: 7475 - RNA, 19 nt, synthetic construct
  source 1..19: mol_type = other RNA
gcgcccacgcggggggcca

SEQ ID NO: 7476 - RNA, 19 nt, synthetic construct
  source 1..19: mol_type = other RNA
ggacacggccatccgggtc

SEQ ID NO: 7477 - RNA, 19 nt, synthetic construct
  source 1..19: mol_type = other RNA
tgggccaggtcgtggaatg

SEQ ID NO: 7478 - RNA, 19 nt, synthetic construct
  source 1..19: mol_type = other RNA
actgcgtgtccggctgtgt

SEQ ID NO: 7479 - RNA, 19 nt, synthetic construct
  source 1..19: mol_type = other RNA
tgggccaggtcgtggaatg

SEQ ID NO: 7480 - RNA, 19 nt, synthetic construct
  source 1..19: mol_type = other RNA
caagcccttccactcgaac

SEQ ID NO: 7481 - RNA, 19 nt, synthetic construct
  source 1..19: mol_type = other RNA
gcccagcagccccacatcg

SEQ ID NO: 7482 - RNA, 19 nt, synthetic construct
  source 1..19: mol_type = other RNA
gcccagcagccccacatcg

SEQ ID NO: 7483 - RNA, 19 nt, synthetic construct
  source 1..19: mol_type = other RNA
gccaggacctgccgtgccc

SEQ ID NO: 7484 - RNA, 19 nt, synthetic construct
  source 1..19: mol_type = other RNA
gcccagcagccccacatcg

SEQ ID NO: 7485 - RNA, 19 nt, synthetic construct
  source 1..19: mol_type = other RNA
tgtgtgggaacttcaacca

SEQ ID NO: 7486 - RNA, 19 nt, synthetic construct
  source 1..19: mol_type = other RNA
accaggactacaagggcag

SEQ ID NO: 7487 - RNA, 19 nt, synthetic construct
  source 1..19: mol_type = other RNA
gcccagcagccccacatcg

SEQ ID NO: 7488 - RNA, 19 nt, synthetic construct
  source 1..19: mol_type = other RNA
ttcgtggagagctacgagc

SEQ ID NO: 7489 - RNA, 19 nt, synthetic construct
  source 1..19: mol_type = other RNA
ctcagtgccagcacggagc

SEQ ID NO: 7490 - RNA, 19 nt, synthetic construct
  source 1..19: mol_type = other RNA
cagtggacagagtggtttg

SEQ ID NO: 7491 - RNA, 19 nt, synthetic construct
  source 1..19: mol_type = other RNA
aggactgacatcccccaga

SEQ ID NO: 7492 - RNA, 19 nt, synthetic construct
  source 1..19: mol_type = other RNA
gagtggacagagtggtttg

SEQ ID NO: 7493 - RNA, 19 nt, synthetic construct
  source 1..19: mol_type = other RNA
gtgtgttctgctgcaacta

SEQ ID NO: 7494 - RNA, 19 nt, synthetic construct
  source 1..19: mol_type = other RNA
acccacagctaccagcttt

SEQ ID NO: 7495 - RNA, 19 nt, synthetic construct
  source 1..19: mol_type = other RNA
gtgtgttctgctgcaacta

SEQ ID NO: 7496 - RNA, 19 nt, synthetic construct
  source 1..19: mol_type = other RNA
gtgtgttctgctgcaacta

SEQ ID NO: 7497 - RNA, 19 nt, synthetic construct
  source 1..19: mol_type = other RNA
acccacagctaccagcttt

SEQ ID NO: 7498 - RNA, 19 nt, synthetic construct
  source 1..19: mol_type = other RNA
gtgtgttctgctgcaacta

SEQ ID NO: 7499 - RNA, 19 nt, synthetic construct
  source 1..19: mol_type = other RNA
acccacagctaccagcttt

SEQ ID NO: 7500 - RNA, 19 nt, synthetic construct
  source 1..19: mol_type = other RNA
ggggacacccaggacccaa

SEQ ID NO: 7501 - RNA, 19 nt, synthetic construct
  source 1..19: mol_type = other RNA
caacaccaccgatgggctt

SEQ ID NO: 7502 - RNA, 19 nt, synthetic construct
  source 1..19: mol_type = other RNA
cagccaacatcaccctgtt

SEQ ID NO: 7503 - RNA, 19 nt, synthetic construct
  source 1..19: mol_type = other RNA
gaggggccgtctgtgagca

SEQ ID NO: 7504 - RNA, 19 nt, synthetic construct
  source 1..19: mol_type = other RNA
ggcctgagtgaggccgacg

SEQ ID NO: 7505 - RNA, 19 nt, synthetic construct
  source 1..19: mol_type = other RNA
gaggggccgtctgtgagca

SEQ ID NO: 7506 - RNA, 19 nt, synthetic construct
  source 1..19: mol_type = other RNA
tttcagcacacactgcgtg

SEQ ID NO: 7507 - RNA, 19 nt, synthetic construct
  source 1..19: mol_type = other RNA
tgtcctgggaccggaagac

SEQ ID NO: 7508 - RNA, 19 nt, synthetic construct
  source 1..19: mol_type = other RNA
gaggggccgtctgtgagca

SEQ ID NO: 7509 - RNA, 19 nt, synthetic construct
  source 1..19: mol_type = other RNA
cctgtgtgggaacttcaac

SEQ ID NO: 7510 - RNA, 19 nt, synthetic construct
  source 1..19: mol_type = other RNA
taaggacatagagtgccag

SEQ ID NO: 7511 - RNA, 19 nt, synthetic construct
  source 1..19: mol_type = other RNA
tgtcctggcggactccgga

SEQ ID NO: 7512 - RNA, 19 nt, synthetic construct
  source 1..19: mol_type = other RNA
tgtgtccgcgaggtctgcc

SEQ ID NO: 7513 - RNA, 19 nt, synthetic construct
  source 1..19: mol_type = other RNA
tgggccagcaggtggactg

SEQ ID NO: 7514 - RNA, 19 nt, synthetic construct
  source 1..19: mol_type = other RNA
tgccagccccggtgtcagt

SEQ ID NO: 7515 - RNA, 19 nt, synthetic construct
  source 1..19: mol_type = other RNA
agcagcggtttcagcaaga

SEQ ID NO: 7516 - RNA, 19 nt, synthetic construct
  source 1..19: mol_type = other RNA
ggaaaaccggctgctgcta

SEQ ID NO: 7517 - RNA, 19 nt, synthetic construct
  source 1..19: mol_type = other RNA
caacatcaccctgttcaca

SEQ ID NO: 7518 - RNA, 19 nt, synthetic construct
  source 1..19: mol_type = other RNA
ctgccgctcccaggttgac

SEQ ID NO: 7519 - RNA, 19 nt, synthetic construct
  source 1..19: mol_type = other RNA
cagagtggtttgatgagga

SEQ ID NO: 7520 - RNA, 19 nt, synthetic construct
  source 1..19: mol_type = other RNA
tgtccactgtgtcctcctc

SEQ ID NO: 7521 - RNA, 19 nt, synthetic construct
  source 1..19: mol_type = other RNA
ccacttctctactccctgc

SEQ ID NO: 7522 - RNA, 19 nt, synthetic construct
  source 1..19: mol_type = other RNA
gagaactgcacggtggcca

SEQ ID NO: 7523 - RNA, 19 nt, synthetic construct
  source 1..19: mol_type = other RNA
gcacctgcccatcaaagtg

SEQ ID NO: 7524 - RNA, 19 nt, synthetic construct
  source 1..19: mol_type = other RNA
ctgcgcccaggacctgtgc

SEQ ID NO: 7525 - RNA, 19 nt, synthetic construct
  source 1..19: mol_type = other RNA
tgtgcagtgactggcgagg

SEQ ID NO: 7526 - RNA, 19 nt, synthetic construct
  source 1..19: mol_type = other RNA
gcccacgcggggggccagc

SEQ ID NO: 7527 - RNA, 19 nt, synthetic construct
  source 1..19: mol_type = other RNA
gaaaaccggctgctgctac

SEQ ID NO: 7528 - RNA, 19 nt, synthetic construct
  source 1..19: mol_type = other RNA
cgcagccttcgccaacacc

SEQ ID NO: 7529 - RNA, 19 nt, synthetic construct
  source 1..19: mol_type = other RNA
aacatcaccctgttcacac

SEQ ID NO: 7530 - RNA, 19 nt, synthetic construct
  source 1..19: mol_type = other RNA
caggtgtttgtcaggctgg

SEQ ID NO: 7531 - RNA, 19 nt, synthetic construct
  source 1..19: mol_type = other RNA
acttcaaccagaaccaggc

SEQ ID NO: 7532 - RNA, 19 nt, synthetic construct
  source 1..19: mol_type = other RNA
ccacagcaaccgaaaagac

SEQ ID NO: 7533 - RNA, 19 nt, synthetic construct
  source 1..19: mol_type = other RNA
ctggagaactgcacggtgg

SEQ ID NO: 7534 - RNA, 19 nt, synthetic construct
  source 1..19: mol_type = other RNA
gagaacatcccctgtggga

SEQ ID NO: 7535 - RNA, 19 nt, synthetic construct
  source 1..19: mol_type = other RNA
gccagcccttcttcaatga

SEQ ID NO: 7536 - RNA, 19 nt, synthetic construct
  source 1..19: mol_type = other RNA
tggaatactcacgccagtg

SEQ ID NO: 7537 - RNA, 19 nt, synthetic construct
  source 1..19: mol_type = other RNA
tccacgacaagcccggccc

SEQ ID NO: 7538 - RNA, 19 nt, synthetic construct
  source 1..19: mol_type = other RNA
cctgcacctgcacctatga

SEQ ID NO: 7539 - RNA, 19 nt, synthetic construct
  source 1..19: mol_type = other RNA
ccctcagtgccagcacgga

SEQ ID NO: 7540 - RNA, 19 nt, synthetic construct
  source 1..19: mol_type = other RNA
gtggggaagttcaagatgt

SEQ ID NO: 7541 - RNA, 19 nt, synthetic construct
  source 1..19: mol_type = other RNA
aaggacatagagtgccagg

SEQ ID NO: 7542 - RNA, 19 nt, synthetic construct
  source 1..19: mol_type = other RNA
gccaggccgagagcttccc

SEQ ID NO: 7543 - RNA, 19 nt, synthetic construct
  source 1..19: mol_type = other RNA
gtggggaagttcaagatgt

SEQ ID NO: 7544 - RNA, 19 nt, synthetic construct
  source 1..19: mol_type = other RNA
agccgctgaccacgagcct

SEQ ID NO: 7545 - RNA, 19 nt, synthetic construct
  source 1..19: mol_type = other RNA
gtggggaagttcaagatgt

SEQ ID NO: 7546 - RNA, 19 nt, synthetic construct
  source 1..19: mol_type = other RNA
gtggggaagttcaagatgt

SEQ ID NO: 7547 - RNA, 19 nt, synthetic construct
  source 1..19: mol_type = other RNA
acacccacagctaccagct

SEQ ID NO: 7548 - RNA, 19 nt, synthetic construct
  source 1..19: mol_type = other RNA
accacccacacccccacag

SEQ ID NO: 7549 - RNA, 19 nt, synthetic construct
  source 1..19: mol_type = other RNA
tgtgttctgctgcaactac

SEQ ID NO: 7550 - RNA, 19 nt, synthetic construct
  source 1..19: mol_type = other RNA
tgtgttctgctgcaactac

SEQ ID NO: 7551 - RNA, 19 nt, synthetic construct
  source 1..19: mol_type = other RNA
tgtgttctgctgcaactac

SEQ ID NO: 7552 - RNA, 19 nt, synthetic construct
  source 1..19: mol_type = other RNA
tgtgttctgctgcaactac

SEQ ID NO: 7553 - RNA, 19 nt, synthetic construct
  source 1..19: mol_type = other RNA
acacccacagctaccagct

SEQ ID NO: 7554 - RNA, 19 nt, synthetic construct
  source 1..19: mol_type = other RNA
accacccacacccccacag

SEQ ID NO: 7555 - RNA, 19 nt, synthetic construct
  source 1..19: mol_type = other RNA
cctgctggggccggccttt

SEQ ID NO: 7556 - RNA, 19 nt, synthetic construct
  source 1..19: mol_type = other RNA
gctggggccggcctttgcg

SEQ ID NO: 7557 - RNA, 19 nt, synthetic construct
  source 1..19: mol_type = other RNA
acacccacagctaccagct

SEQ ID NO: 7558 - RNA, 19 nt, synthetic construct
  source 1..19: mol_type = other RNA
cccagctcccacttctcta

SEQ ID NO: 7559 - RNA, 19 nt, synthetic construct
  source 1..19: mol_type = other RNA
acttccactatgagtgcga

SEQ ID NO: 7560 - RNA, 19 nt, synthetic construct
  source 1..19: mol_type = other RNA
gcctgcgcccaggacctgt

SEQ ID NO: 7561 - RNA, 19 nt, synthetic construct
  source 1..19: mol_type = other RNA
aggaaaaccggctgctgct

SEQ ID NO: 7562 - RNA, 19 nt, synthetic construct
  source 1..19: mol_type = other RNA
tctgccccccaggcacggt

SEQ ID NO: 7563 - RNA, 19 nt, synthetic construct
  source 1..19: mol_type = other RNA
acgcagctgcccctgtcgg

SEQ ID NO: 7564 - RNA, 19 nt, synthetic construct
  source 1..19: mol_type = other RNA
ggaggtgggagtgcagcca

SEQ ID NO: 7565 - RNA, 19 nt, synthetic construct
  source 1..19: mol_type = other RNA
gcgcagccttcgccaacac

SEQ ID NO: 7566 - RNA, 19 nt, synthetic construct
  source 1..19: mol_type = other RNA
cagctaccagctttacagc

SEQ ID NO: 7567 - RNA, 19 nt, synthetic construct
  source 1..19: mol_type = other RNA
cagctaccagctttacagc

SEQ ID NO: 7568 - RNA, 19 nt, synthetic construct
  source 1..19: mol_type = other RNA
cagctaccagctttacagc

SEQ ID NO: 7569 - RNA, 19 nt, synthetic construct
  source 1..19: mol_type = other RNA
cctgcgtggcctacgggga

SEQ ID NO: 7570 - RNA, 19 nt, synthetic construct
  source 1..19: mol_type = other RNA
ctgcaccaacaaccagagg

SEQ ID NO: 7571 - RNA, 19 nt, synthetic construct
  source 1..19: mol_type = other RNA
aactgccagagctgtaact

SEQ ID NO: 7572 - RNA, 19 nt, synthetic construct
  source 1..19: mol_type = other RNA
actgccagagctgtaactg

SEQ ID NO: 7573 - RNA, 19 nt, synthetic construct
  source 1..19: mol_type = other RNA
cctgaggcagagagggtac

SEQ ID NO: 7574 - RNA, 19 nt, synthetic construct
  source 1..19: mol_type = other RNA
acagagtggtttgatgagg

SEQ ID NO: 7575 - RNA, 19 nt, synthetic construct
  source 1..19: mol_type = other RNA
aacccactgtcccaggggt

SEQ ID NO: 7576 - RNA, 19 nt, synthetic construct
  source 1..19: mol_type = other RNA
cccagtgtggctgctacga

SEQ ID NO: 7577 - RNA, 19 nt, synthetic construct
  source 1..19: mol_type = other RNA
ccaacatcaccctgttcac

SEQ ID NO: 7578 - RNA, 19 nt, synthetic construct
  source 1..19: mol_type = other RNA
gagccccagtgtgcctggt

SEQ ID NO: 7579 - RNA, 19 nt, synthetic construct
  source 1..19: mol_type = other RNA
cgcctgccgctcccaggtt

SEQ ID NO: 7580 - RNA, 19 nt, synthetic construct
  source 1..19: mol_type = other RNA
atcaccctgttcacaccct

SEQ ID NO: 7581 - RNA, 19 nt, synthetic construct
  source 1..19: mol_type = other RNA
ggcagaaggtgcactgtga

SEQ ID NO: 7582 - RNA, 19 nt, synthetic construct
  source 1..19: mol_type = other RNA
ttgggccaggtcgtggaat

SEQ ID NO: 7583 - RNA, 19 nt, synthetic construct
  source 1..19: mol_type = other RNA
gctgtttcagcacacactg

SEQ ID NO: 7584 - RNA, 19 nt, synthetic construct
  source 1..19: mol_type = other RNA
gagccccagtgtgcctggt

SEQ ID NO: 7585 - RNA, 19 nt, synthetic construct
  source 1..19: mol_type = other RNA
ttgggccaggtcgtggaat

SEQ ID NO: 7586 - RNA, 19 nt, synthetic construct
  source 1..19: mol_type = other RNA
gagccccagtgtgcctggt

SEQ ID NO: 7587 - RNA, 19 nt, synthetic construct
  source 1..19: mol_type = other RNA
ttgggccaggtcgtggaat

SEQ ID NO: 7588 - RNA, 19 nt, synthetic construct
  source 1..19: mol_type = other RNA
gagccccagtgtgcctggt

SEQ ID NO: 7589 - RNA, 19 nt, synthetic construct
  source 1..19: mol_type = other RNA
ttgggccaggtcgtggaat

SEQ ID NO: 7590 - RNA, 19 nt, synthetic construct
  source 1..19: mol_type = other RNA
tgcccccgggcccattctt

SEQ ID NO: 7591 - RNA, 19 nt, synthetic construct
  source 1..19: mol_type = other RNA
cggaggtgggagtgcagcc

SEQ ID NO: 7592 - RNA, 19 nt, synthetic construct
  source 1..19: mol_type = other RNA
gcaactgccagtcctgcgt

SEQ ID NO: 7593 - RNA, 19 nt, synthetic construct
  source 1..19: mol_type = other RNA
ccaggccatgcagcaccag

SEQ ID NO: 7594 - RNA, 19 nt, synthetic construct
  source 1..19: mol_type = other RNA
ggatgagtgtggctgcacg

SEQ ID NO: 7595 - RNA, 19 nt, synthetic construct
  source 1..19: mol_type = other RNA
agaaggtgcactgtgacgt

SEQ ID NO: 7596 - RNA, 19 nt, synthetic construct
  source 1..19: mol_type = other RNA
aggagctgccttacagccg

SEQ ID NO: 7597 - RNA, 19 nt, synthetic construct
  source 1..19: mol_type = other RNA
tggcccagtgtggctgcta

SEQ ID NO: 7598 - RNA, 19 nt, synthetic construct
  source 1..19: mol_type = other RNA
cggacaacgagaactgcct

SEQ ID NO: 7599 - RNA, 19 nt, synthetic construct
  source 1..19: mol_type = other RNA
ctgggcacctgcgtggcct

SEQ ID NO: 7600 - RNA, 19 nt, synthetic construct
  source 1..19: mol_type = other RNA
tgcgggagttgggccaggt

SEQ ID NO: 7601 - RNA, 19 nt, synthetic construct
  source 1..19: mol_type = other RNA
tgcgggagttgggccaggt

SEQ ID NO: 7602 - RNA, 19 nt, synthetic construct
  source 1..19: mol_type = other RNA
tgcgggagttgggccaggt

SEQ ID NO: 7603 - RNA, 19 nt, synthetic construct
  source 1..19: mol_type = other RNA
ggggctgtgagtggcacta

SEQ ID NO: 7604 - RNA, 19 nt, synthetic construct
  source 1..19: mol_type = other RNA
cctgcgggagttgggccag

SEQ ID NO: 7605 - RNA, 19 nt, synthetic construct
  source 1..19: mol_type = other RNA
ctgcgggagttgggccagg

SEQ ID NO: 7606 - RNA, 19 nt, synthetic construct
  source 1..19: mol_type = other RNA
agtgcgctcacagccttga

SEQ ID NO: 7607 - RNA, 19 nt, synthetic construct
  source 1..19: mol_type = other RNA
cctgcgggagttgggccag

SEQ ID NO: 7608 - RNA, 19 nt, synthetic construct
  source 1..19: mol_type = other RNA
ctgcgggagttgggccagg

SEQ ID NO: 7609 - RNA, 19 nt, synthetic construct
  source 1..19: mol_type = other RNA
cctggtgtccccctgcggg

SEQ ID NO: 7610 - RNA, 19 nt, synthetic construct
  source 1..19: mol_type = other RNA
cctgcgggagttgggccag

SEQ ID NO: 7611 - RNA, 19 nt, synthetic construct
  source 1..19: mol_type = other RNA
ctgcgggagttgggccagg

SEQ ID NO: 7612 - RNA, 19 nt, synthetic construct
  source 1..19: mol_type = other RNA
cctggtgtccccctgcggg

SEQ ID NO: 7613 - RNA, 19 nt, synthetic construct
  source 1..19: mol_type = other RNA
cacgccctcctccactcca

SEQ ID NO: 7614 - RNA, 19 nt, synthetic construct
  source 1..19: mol_type = other RNA
cctggtgtccccctgcggg

SEQ ID NO: 7615 - RNA, 19 nt, synthetic construct
  source 1..19: mol_type = other RNA
gtgcccccgggcccattct

SEQ ID NO: 7616 - RNA, 19 nt, synthetic construct
  source 1..19: mol_type = other RNA
accagggccagatgtgcgg

SEQ ID NO: 7617 - RNA, 19 nt, synthetic construct
  source 1..19: mol_type = other RNA
actcctgtgaggaggactc

SEQ ID NO: 7618 - RNA, 19 nt, synthetic construct
  source 1..19: mol_type = other RNA
gcctacggggatggccact

SEQ ID NO: 7619 - RNA, 19 nt, synthetic construct
  source 1..19: mol_type = other RNA
ctgggtcccccactccacg

SEQ ID NO: 7620 - RNA, 19 nt, synthetic construct
  source 1..19: mol_type = other RNA
gctaccaggacgtcatcta

SEQ ID NO: 7621 - RNA, 19 nt, synthetic construct
  source 1..19: mol_type = other RNA
caccaacaaccagagggac

SEQ ID NO: 7622 - RNA, 19 nt, synthetic construct
  source 1..19: mol_type = other RNA
cctcctccactccggggac

SEQ ID NO: 7623 - RNA, 19 nt, synthetic construct
  source 1..19: mol_type = other RNA
gaagtgcgtggcccagtgt

SEQ ID NO: 7624 - RNA, 19 nt, synthetic construct
  source 1..19: mol_type = other RNA
cctcctccactccggggac

SEQ ID NO: 7625 - RNA, 19 nt, synthetic construct
  source 1..19: mol_type = other RNA
cagaacccactgtcccagg

SEQ ID NO: 7626 - RNA, 19 nt, synthetic construct
  source 1..19: mol_type = other RNA
cctcctccactccggggac

SEQ ID NO: 7627 - RNA, 19 nt, synthetic construct
  source 1..19: mol_type = other RNA
cctcctccactccggggac

SEQ ID NO: 7628 - RNA, 19 nt, synthetic construct
  source 1..19: mol_type = other RNA
gcttctgcagggcatttgg

SEQ ID NO: 7629 - RNA, 19 nt, synthetic construct
  source 1..19: mol_type = other RNA
gaggtgccctgccagagcc

SEQ ID NO: 7630 - RNA, 19 nt, synthetic construct
  source 1..19: mol_type = other RNA
tgggaccaccggcaccacc

SEQ ID NO: 7631 - RNA, 19 nt, synthetic construct
  source 1..19: mol_type = other RNA
ctgccgctggtccagctgg

SEQ ID NO: 7632 - RNA, 19 nt, synthetic construct
  source 1..19: mol_type = other RNA
cccaggacctgtgccgctg

SEQ ID NO: 7633 - RNA, 19 nt, synthetic construct
  source 1..19: mol_type = other RNA
cgcccacgcggggggccag

SEQ ID NO: 7634 - RNA, 19 nt, synthetic construct
  source 1..19: mol_type = other RNA
tgcccctcgggcagtgccc

SEQ ID NO: 7635 - RNA, 19 nt, synthetic construct
  source 1..19: mol_type = other RNA
acctgccgtgccctggcac

SEQ ID NO: 7636 - RNA, 19 nt, synthetic construct
  source 1..19: mol_type = other RNA
ggtgtttgtcaggctggac

SEQ ID NO: 7637 - RNA, 19 nt, synthetic construct
  source 1..19: mol_type = other RNA
tttgtcaggctggaccccg

SEQ ID NO: 7638 - RNA, 19 nt, synthetic construct
  source 1..19: mol_type = other RNA
caccagggccagatgtgcg

SEQ ID NO: 7639 - RNA, 19 nt, synthetic construct
  source 1..19: mol_type = other RNA
cccctggggccgagtgcct

SEQ ID NO: 7640 - RNA, 19 nt, synthetic construct
  source 1..19: mol_type = other RNA
ccggctgtgtctgtccccc

SEQ ID NO: 7641 - RNA, 19 nt, synthetic construct
  source 1..19: mol_type = other RNA
accaccggcaccacctgct

SEQ ID NO: 7642 - RNA, 19 nt, synthetic construct
  source 1..19: mol_type = other RNA
accagccctgcggggcacc

SEQ ID NO: 7643 - RNA, 19 nt, synthetic construct
  source 1..19: mol_type = other RNA
gggcaccctgcctaaaaac

SEQ ID NO: 7644 - RNA, 19 nt, synthetic construct
  source 1..19: mol_type = other RNA
caggaaggctgtggcatgt

SEQ ID NO: 7645 - RNA, 19 nt, synthetic construct
  source 1..19: mol_type = other RNA
tgccgctggtccagctggt

SEQ ID NO: 7646 - RNA, 19 nt, synthetic construct
  source 1..19: mol_type = other RNA
acctgaggcagagagggta

SEQ ID NO: 7647 - RNA, 19 nt, synthetic construct
  source 1..19: mol_type = other RNA
ctccacagaacccactgtc

SEQ ID NO: 7648 - RNA, 19 nt, synthetic construct
  source 1..19: mol_type = other RNA
ccacagctaccagctttac

SEQ ID NO: 7649 - RNA, 19 nt, synthetic construct
  source 1..19: mol_type = other RNA
cctccaggaccacggccac

SEQ ID NO: 7650 - RNA, 19 nt, synthetic construct
  source 1..19: mol_type = other RNA
ctccaggaccacggccacg

SEQ ID NO: 7651 - RNA, 19 nt, synthetic construct
  source 1..19: mol_type = other RNA
tccaggaccacggccacgg

SEQ ID NO: 7652 - RNA, 19 nt, synthetic construct
  source 1..19: mol_type = other RNA
ccaggaccacggccacggc

SEQ ID NO: 7653 - RNA, 19 nt, synthetic construct
  source 1..19: mol_type = other RNA
ccacagctaccagctttac

SEQ ID NO: 7654 - RNA, 19 nt, synthetic construct
  source 1..19: mol_type = other RNA
cctccaggaccacggccac

SEQ ID NO: 7655 - RNA, 19 nt, synthetic construct
  source 1..19: mol_type = other RNA
ctccaggaccacggccacg

SEQ ID NO: 7656 - RNA, 19 nt, synthetic construct
  source 1..19: mol_type = other RNA
tccaggaccacggccacgg

SEQ ID NO: 7657 - RNA, 19 nt, synthetic construct
  source 1..19: mol_type = other RNA
ccaggaccacggccacggc

SEQ ID NO: 7658 - RNA, 19 nt, synthetic construct
  source 1..19: mol_type = other RNA
ccacagctaccagctttac

SEQ ID NO: 7659 - RNA, 19 nt, synthetic construct
  source 1..19: mol_type = other RNA
aacaagcacctgcccatca

SEQ ID NO: 7660 - RNA, 19 nt, synthetic construct
  source 1..19: mol_type = other RNA
aggtgccctgccagagcct

SEQ ID NO: 7661 - RNA, 19 nt, synthetic construct
  source 1..19: mol_type = other RNA
tccagctgcagggggagcc

SEQ ID NO: 7662 - RNA, 19 nt, synthetic construct
  source 1..19: mol_type = other RNA
gccccaggtaccaccacct

SEQ ID NO: 7663 - RNA, 19 nt, synthetic construct
  source 1..19: mol_type = other RNA
ccggctctgcctgggcacc

SEQ ID NO: 7664 - RNA, 19 nt, synthetic construct
  source 1..19: mol_type = other RNA
ccctgcccctggctgtgac

SEQ ID NO: 7665 - RNA, 19 nt, synthetic construct
  source 1..19: mol_type = other RNA
gtccggctgtgtctgtccc

SEQ ID NO: 7666 - RNA, 19 nt, synthetic construct
  source 1..19: mol_type = other RNA
cagcacacactgcgtgtcc

SEQ ID NO: 7667 - RNA, 19 nt, synthetic construct
  source 1..19: mol_type = other RNA
gcccaggcccagcctggtg

SEQ ID NO: 7668 - RNA, 19 nt, synthetic construct
  source 1..19: mol_type = other RNA
gcccaggcccagcctggtg

SEQ ID NO: 7669 - RNA, 19 nt, synthetic construct
  source 1..19: mol_type = other RNA
gcccaggcccagcctggtg

SEQ ID NO: 7670 - RNA, 19 nt, synthetic construct
  source 1..19: mol_type = other RNA
gcccaggcccagcctggtg

SEQ ID NO: 7671 - RNA, 19 nt, synthetic construct
  source 1..19: mol_type = other RNA
caaccagagggacgactgt

SEQ ID NO: 7672 - RNA, 19 nt, synthetic construct
  source 1..19: mol_type = other RNA
tgccacgcgtagccggtcc

SEQ ID NO: 7673 - RNA, 19 nt, synthetic construct
  source 1..19: mol_type = other RNA
agttctatgcccacaacgc

SEQ ID NO: 7674 - RNA, 19 nt, synthetic construct
  source 1..19: mol_type = other RNA
tctccagcgggacggaacc

SEQ ID NO: 7675 - RNA, 19 nt, synthetic construct
  source 1..19: mol_type = other RNA
gtgtggctgcacgcccttc

SEQ ID NO: 7676 - RNA, 19 nt, synthetic construct
  source 1..19: mol_type = other RNA
gccggacgctggtgttggc

SEQ ID NO: 7677 - RNA, 19 nt, synthetic construct
  source 1..19: mol_type = other RNA
cgcgtagccggtccgtggt

SEQ ID NO: 7678 - RNA, 19 nt, synthetic construct
  source 1..19: mol_type = other RNA
aacaaccagagggacgact

SEQ ID NO: 7679 - RNA, 19 nt, synthetic construct
  source 1..19: mol_type = other RNA
cagcgtgtccactgtgtcc

SEQ ID NO: 7680 - RNA, 19 nt, synthetic construct
  source 1..19: mol_type = other RNA
caaagccccctctgctcaa

SEQ ID NO: 7681 - RNA, 19 nt, synthetic construct
  source 1..19: mol_type = other RNA
ttgccacgcgtagccggtc

SEQ ID NO: 7682 - RNA, 19 nt, synthetic construct
  source 1..19: mol_type = other RNA
gcaggtggactgtgaccgc

SEQ ID NO: 7683 - RNA, 19 nt, synthetic construct
  source 1..19: mol_type = other RNA
ctgcccatcaaagtgtcgg

SEQ ID NO: 7684 - RNA, 19 nt, synthetic construct
  source 1..19: mol_type = other RNA
tgcccatcaaagtgtcgga

SEQ ID NO: 7685 - RNA, 19 nt, synthetic construct
  source 1..19: mol_type = other RNA
gagtgtggctgcacgccct

SEQ ID NO: 7686 - RNA, 19 nt, synthetic construct
  source 1..19: mol_type = other RNA
cactgggacgccctggaac

SEQ ID NO: 7687 - RNA, 19 nt, synthetic construct
  source 1..19: mol_type = other RNA
ggaccacctggatcctcac

SEQ ID NO: 7688 - RNA, 19 nt, synthetic construct
  source 1..19: mol_type = other RNA
ggaccacctggatcctcac

SEQ ID NO: 7689 - RNA, 19 nt, synthetic construct
  source 1..19: mol_type = other RNA
ggaccacctggatcctcac

SEQ ID NO: 7690 - RNA, 19 nt, synthetic construct
  source 1..19: mol_type = other RNA
ggaccacctggatcctcac

SEQ ID NO: 7691 - RNA, 19 nt, synthetic construct
  source 1..19: mol_type = other RNA
ggaccacctggatcctcac

SEQ ID NO: 7692 - RNA, 19 nt, synthetic construct
  source 1..19: mol_type = other RNA
ggaccacctggatcctcac

SEQ ID NO: 7693 - RNA, 19 nt, synthetic construct
  source 1..19: mol_type = other RNA
cccatgctctgtccacctg

SEQ ID NO: 7694 - RNA, 19 nt, synthetic construct
  source 1..19: mol_type = other RNA
tcaaagtgtcggacccgag

SEQ ID NO: 7695 - RNA, 19 nt, synthetic construct
  source 1..19: mol_type = other RNA
catcaaagtgtcggacccg

SEQ ID NO: 7696 - RNA, 19 nt, synthetic construct
  source 1..19: mol_type = other RNA
tgtcactgggacgccctgg

SEQ ID NO: 7697 - RNA, 19 nt, synthetic construct
  source 1..19: mol_type = other RNA
catgctctgtccacctgga

SEQ ID NO: 7698 - RNA, 19 nt, synthetic construct
  source 1..19: mol_type = other RNA
gtgcttcaactatgaaatc

SEQ ID NO: 7699 - RNA, 19 nt, synthetic construct
  source 1..19: mol_type = other RNA
gtgcttcaactatgaaatc

SEQ ID NO: 7700 - RNA, 19 nt, synthetic construct
  source 1..19: mol_type = other RNA
gtgcttcaactatgaaatc

SEQ ID NO: 7701 - RNA, 19 nt, synthetic construct
  source 1..19: mol_type = other RNA
gtgcttcaactatgaaatc

SEQ ID NO: 7702 - RNA, 19 nt, synthetic construct
  source 1..19: mol_type = other RNA
cagacaggctggtccaggc

SEQ ID NO: 7703 - RNA, 19 nt, synthetic construct
  source 1..19: mol_type = other RNA
agtgtggctgcacgccctt

SEQ ID NO: 7704 - RNA, 19 nt, synthetic construct
  source 1..19: mol_type = other RNA
cgtgccggacgctggtgtt

SEQ ID NO: 7705 - RNA, 19 nt, synthetic construct
  source 1..19: mol_type = other RNA
tcctccactccagggacga

SEQ ID NO: 7706 - RNA, 19 nt, synthetic construct
  source 1..19: mol_type = other RNA
tgccgcgcccggggagtgt

SEQ ID NO: 7707 - RNA, 19 nt, synthetic construct
  source 1..19: mol_type = other RNA
tccccatgctctgtccacc

SEQ ID NO: 7708 - RNA, 19 nt, synthetic construct
  source 1..19: mol_type = other RNA
cgtgtccactgtgtcctcc

SEQ ID NO: 7709 - RNA, 19 nt, synthetic construct
  source 1..19: mol_type = other RNA
tgccggacgctggtgttgg

SEQ ID NO: 7710 - RNA, 19 nt, synthetic construct
  source 1..19: mol_type = other RNA
ccggacgctggtgttggct

SEQ ID NO: 7711 - RNA, 19 nt, synthetic construct
  source 1..19: mol_type = other RNA
cggacgctggtgttggctc

SEQ ID NO: 7712 - RNA, 19 nt, synthetic construct
  source 1..19: mol_type = other RNA
tgcctccggagctgccaca

SEQ ID NO: 7713 - RNA, 19 nt, synthetic construct
  source 1..19: mol_type = other RNA
cctccactccagggacgac

SEQ ID NO: 7714 - RNA, 19 nt, synthetic construct
  source 1..19: mol_type = other RNA
acctgcccacccaccaaag

SEQ ID NO: 7715 - RNA, 19 nt, synthetic construct
  source 1..19: mol_type = other RNA
tgctctgtccacctggagc

SEQ ID NO: 7716 - RNA, 19 nt, synthetic construct
  source 1..19: mol_type = other RNA
cccagggaccacctggatc

SEQ ID NO: 7717 - RNA, 19 nt, synthetic construct
  source 1..19: mol_type = other RNA
cccagggaccacctggatc

SEQ ID NO: 7718 - RNA, 19 nt, synthetic construct
  source 1..19: mol_type = other RNA
cccagggaccacctggatc

SEQ ID NO: 7719 - RNA, 19 nt, synthetic construct
  source 1..19: mol_type = other RNA
cccagggaccacctggatc

SEQ ID NO: 7720 - RNA, 19 nt, synthetic construct
  source 1..19: mol_type = other RNA
cccagggaccacctggatc

SEQ ID NO: 7721 - RNA, 19 nt, synthetic construct
  source 1..19: mol_type = other RNA
cccagggaccacctggatc

SEQ ID NO: 7722 - RNA, 19 nt, synthetic construct
  source 1..19: mol_type = other RNA
gcctccggagctgccacac

SEQ ID NO: 7723 - RNA, 19 nt, synthetic construct
  source 1..19: mol_type = other RNA
tcactgggacgccctggaa

SEQ ID NO: 7724 - RNA, 19 nt, synthetic construct
  source 1..19: mol_type = other RNA
gtgcctccggagctgccac

SEQ ID NO: 7725 - RNA, 19 nt, synthetic construct
  source 1..19: mol_type = other RNA
tggctgcacgcccttctgt

SEQ ID NO: 7726 - RNA, 19 nt, synthetic construct
  source 1..19: mol_type = other RNA
agatgtgcttcaactatga

SEQ ID NO: 7727 - RNA, 19 nt, synthetic construct
  source 1..19: mol_type = other RNA
agatgtgcttcaactatga

SEQ ID NO: 7728 - RNA, 19 nt, synthetic construct
  source 1..19: mol_type = other RNA
cccacagccaccagttcca

SEQ ID NO: 7729 - RNA, 19 nt, synthetic construct
  source 1..19: mol_type = other RNA
agatgtgcttcaactatga

SEQ ID NO: 7730 - RNA, 19 nt, synthetic construct
  source 1..19: mol_type = other RNA
agatgtgcttcaactatga

SEQ ID NO: 7731 - RNA, 19 nt, synthetic construct
  source 1..19: mol_type = other RNA
cccacagccaccagttcca

SEQ ID NO: 7732 - RNA, 19 nt, synthetic construct
  source 1..19: mol_type = other RNA
ctcctccactctggggacg

SEQ ID NO: 7733 - RNA, 19 nt, synthetic construct
  source 1..19: mol_type = other RNA
tctgcctccatccccatgc

SEQ ID NO: 7734 - RNA, 19 nt, synthetic construct
  source 1..19: mol_type = other RNA
aggggccagcaggacccct

SEQ ID NO: 7735 - RNA, 19 nt, synthetic construct
  source 1..19: mol_type = other RNA
gtgcttaccaccacggcca

SEQ ID NO: 7736 - RNA, 19 nt, synthetic construct
  source 1..19: mol_type = other RNA
gtgcttaccaccacggcca

SEQ ID NO: 7737 - RNA, 19 nt, synthetic construct
  source 1..19: mol_type = other RNA
cgtgttgtcatcaaggccc

SEQ ID NO: 7738 - RNA, 19 nt, synthetic construct
  source 1..19: mol_type = other RNA
tgtggagaatgagaactac

SEQ ID NO: 7739 - RNA, 19 nt, synthetic construct
  source 1..19: mol_type = other RNA
gtcacccgtgttgtcatca

SEQ ID NO: 7740 - RNA, 19 nt, synthetic construct
  source 1..19: mol_type = other RNA
cactcgactccagccctgt

SEQ ID NO: 7741 - RNA, 19 nt, synthetic construct
  source 1..19: mol_type = other RNA
cactcgactccagccctgt

SEQ ID NO: 7742 - RNA, 19 nt, synthetic construct
  source 1..19: mol_type = other RNA
cactcgactccagccctgt

SEQ ID NO: 7743 - RNA, 19 nt, synthetic construct
  source 1..19: mol_type = other RNA
ccacggttcccagctcgtc

SEQ ID NO: 7744 - RNA, 19 nt, synthetic construct
  source 1..19: mol_type = other RNA
tcagtgtggagaatgagaa

SEQ ID NO: 7745 - RNA, 19 nt, synthetic construct
  source 1..19: mol_type = other RNA
cacagtgcttaccaccacg

SEQ ID NO: 7746 - RNA, 19 nt, synthetic construct
  source 1..19: mol_type = other RNA
cacagtgcttaccaccacg

SEQ ID NO: 7747 - RNA, 19 nt, synthetic construct
  source 1..19: mol_type = other RNA
cctgtgacttccactatga

SEQ ID NO: 7748 - RNA, 19 nt, synthetic construct
  source 1..19: mol_type = other RNA
gtgcccctgcacccacggc

SEQ ID NO: 7749 - RNA, 19 nt, synthetic construct
  source 1..19: mol_type = other RNA
ctccacggttcccagctcg

SEQ ID NO: 7750 - RNA, 19 nt, synthetic construct
  source 1..19: mol_type = other RNA
tccacggttcccagctcgt

SEQ ID NO: 7751 - RNA, 19 nt, synthetic construct
  source 1..19: mol_type = other RNA
taccaaagtgctgactacc

SEQ ID NO: 7752 - RNA, 19 nt, synthetic construct
  source 1..19: mol_type = other RNA
acccagaccacagcaaccg

SEQ ID NO: 7753 - RNA, 19 nt, synthetic construct
  source 1..19: mol_type = other RNA
tgttgtcatcaaggcccag

SEQ ID NO: 7754 - RNA, 19 nt, synthetic construct
  source 1..19: mol_type = other RNA
tgcacccacggcggccgca

SEQ ID NO: 7755 - RNA, 19 nt, synthetic construct
  source 1..19: mol_type = other RNA
acccgagccagccctgtga

SEQ ID NO: 7756 - RNA, 19 nt, synthetic construct
  source 1..19: mol_type = other RNA
caccccaggaacagctcac

SEQ ID NO: 7757 - RNA, 19 nt, synthetic construct
  source 1..19: mol_type = other RNA
caccccaggaacagctcac

SEQ ID NO: 7758 - RNA, 19 nt, synthetic construct
  source 1..19: mol_type = other RNA
caccccaggaacagctcac

SEQ ID NO: 7759 - RNA, 19 nt, synthetic construct
  source 1..19: mol_type = other RNA
caccccaggaacagctcac

SEQ ID NO: 7760 - RNA, 19 nt, synthetic construct
  source 1..19: mol_type = other RNA
caccccaggaacagctcac

SEQ ID NO: 7761 - RNA, 19 nt, synthetic construct
  source 1..19: mol_type = other RNA
tctgctgcaactacggcca

SEQ ID NO: 7762 - RNA, 19 nt, synthetic construct
  source 1..19: mol_type = other RNA
tctgctgcaactacggcca

SEQ ID NO: 7763 - RNA, 19 nt, synthetic construct
  source 1..19: mol_type = other RNA
tctgctgcaactacggcca

SEQ ID NO: 7764 - RNA, 19 nt, synthetic construct
  source 1..19: mol_type = other RNA
tctgctgcaactacggcca

SEQ ID NO: 7765 - RNA, 19 nt, synthetic construct
  source 1..19: mol_type = other RNA
tcatctacaataagaccga

SEQ ID NO: 7766 - RNA, 19 nt, synthetic construct
  source 1..19: mol_type = other RNA
agtgcggcctgacggacaa

SEQ ID NO: 7767 - RNA, 19 nt, synthetic construct
  source 1..19: mol_type = other RNA
gccactacgatcacggcca

SEQ ID NO: 7768 - RNA, 19 nt, synthetic construct
  source 1..19: mol_type = other RNA
gccactacgatcacggcca

SEQ ID NO: 7769 - RNA, 19 nt, synthetic construct
  source 1..19: mol_type = other RNA
gccactacgatcacggcca

SEQ ID NO: 7770 - RNA, 19 nt, synthetic construct
  source 1..19: mol_type = other RNA
gccactacgatcacggcca

SEQ ID NO: 7771 - RNA, 19 nt, synthetic construct
  source 1..19: mol_type = other RNA
cgagggttcagtgtcggtg

SEQ ID NO: 7772 - RNA, 19 nt, synthetic construct
  source 1..19: mol_type = other RNA
aagtgcggcctgacggaca

SEQ ID NO: 7773 - RNA, 19 nt, synthetic construct
  source 1..19: mol_type = other RNA
agacgacaatgagcccctt

SEQ ID NO: 7774 - RNA, 19 nt, synthetic construct
  source 1..19: mol_type = other RNA
acgagcctggcgccaacac

SEQ ID NO: 7775 - RNA, 19 nt, synthetic construct
  source 1..19: mol_type = other RNA
tgcggagtgccacgcactg

SEQ ID NO: 7776 - RNA, 19 nt, synthetic construct
  source 1..19: mol_type = other RNA
accgcatgcgggggctgat

SEQ ID NO: 7777 - RNA, 19 nt, synthetic construct
  source 1..19: mol_type = other RNA
acgactgagtccactggat

SEQ ID NO: 7778 - RNA, 19 nt, synthetic construct
  source 1..19: mol_type = other RNA
acgactgagtccactggat

SEQ ID NO: 7779 - RNA, 19 nt, synthetic construct
  source 1..19: mol_type = other RNA
ccctatgggtgaccccgag

SEQ ID NO: 7780 - RNA, 19 nt, synthetic construct
  source 1..19: mol_type = other RNA
cactcgactccagcccttt

SEQ ID NO: 7781 - RNA, 19 nt, synthetic construct
  source 1..19: mol_type = other RNA
cacaaccggggccaccggc

SEQ ID NO: 7782 - RNA, 19 nt, synthetic construct
  source 1..19: mol_type = other RNA
cacgcttccagtgtggatc

SEQ ID NO: 7783 - RNA, 19 nt, synthetic construct
  source 1..19: mol_type = other RNA
cacaaccggggccaccggc

SEQ ID NO: 7784 - RNA, 19 nt, synthetic construct
  source 1..19: mol_type = other RNA
ccatgcgtgtggacattcc

SEQ ID NO: 7785 - RNA, 19 nt, synthetic construct
  source 1..19: mol_type = other RNA
ttctacaacccacatgggg

SEQ ID NO: 7786 - RNA, 19 nt, synthetic construct
  source 1..19: mol_type = other RNA
tctacggccatgccctcct

SEQ ID NO: 7787 - RNA, 19 nt, synthetic construct
  source 1..19: mol_type = other RNA
tctacggccatgccctcct

SEQ ID NO: 7788 - RNA, 19 nt, synthetic construct
  source 1..19: mol_type = other RNA
cactacgactgagtccact

SEQ ID NO: 7789 - RNA, 19 nt, synthetic construct
  source 1..19: mol_type = other RNA
cactacgactgagtccact

SEQ ID NO: 7790 - RNA, 19 nt, synthetic construct
  source 1..19: mol_type = other RNA
tggactacagctaccccat

SEQ ID NO: 7791 - RNA, 19 nt, synthetic construct
  source 1..19: mol_type = other RNA
tggactacagctaccccat

SEQ ID NO: 7792 - RNA, 19 nt, synthetic construct
  source 1..19: mol_type = other RNA
tggactacagctaccccat

SEQ ID NO: 7793 - RNA, 19 nt, synthetic construct
  source 1..19: mol_type = other RNA
tggactacagctaccccat

SEQ ID NO: 7794 - RNA, 19 nt, synthetic construct
  source 1..19: mol_type = other RNA
cgtccaacggctccgtcct

SEQ ID NO: 7795 - RNA, 19 nt, synthetic construct
  source 1..19: mol_type = other RNA
ccctgggcctcgagtgccg

SEQ ID NO: 7796 - RNA, 19 nt, synthetic construct
  source 1..19: mol_type = other RNA
ccctgggcctcgagtgccg

SEQ ID NO: 7797 - RNA, 19 nt, synthetic construct
  source 1..19: mol_type = other RNA
ccctgggcctcgagtgccg

SEQ ID NO: 7798 - RNA, 19 nt, synthetic construct
  source 1..19: mol_type = other RNA
ccctgggcctcgagtgccg

SEQ ID NO: 7799 - RNA, 19 nt, synthetic construct
  source 1..19: mol_type = other RNA
gacccaccctacaagatac

SEQ ID NO: 7800 - RNA, 19 nt, synthetic construct
  source 1..19: mol_type = other RNA
cactgtgacgtccacttcg

SEQ ID NO: 7801 - RNA, 19 nt, synthetic construct
  source 1..19: mol_type = other RNA
gcttggcgcctgcttgatc

SEQ ID NO: 7802 - RNA, 19 nt, synthetic construct
  source 1..19: mol_type = other RNA
atggatggcggtgccccga

SEQ ID NO: 7803 - RNA, 19 nt, synthetic construct
  source 1..19: mol_type = other RNA
gcccagggacggcacgcac

SEQ ID NO: 7804 - RNA, 19 nt, synthetic construct
  source 1..19: mol_type = other RNA
gcccagggacggcacgcac

SEQ ID NO: 7805 - RNA, 19 nt, synthetic construct
  source 1..19: mol_type = other RNA
agcgcccgcgcagcacgga

SEQ ID NO: 7806 - RNA, 19 nt, synthetic construct
  source 1..19: mol_type = other RNA
ggcttggcgcctgcttgat

SEQ ID NO: 7807 - RNA, 19 nt, synthetic construct
  source 1..19: mol_type = other RNA
actcctgtcaagtccgcat

SEQ ID NO: 7808 - RNA, 19 nt, synthetic construct
  source 1..19: mol_type = other RNA
gaggggacctttaaggcgg

SEQ ID NO: 7809 - RNA, 19 nt, synthetic construct
  source 1..19: mol_type = other RNA
gcaaggacatggccaagac

SEQ ID NO: 7810 - RNA, 19 nt, synthetic construct
  source 1..19: mol_type = other RNA
agggacgacggggagcttg

SEQ ID NO: 7811 - RNA, 19 nt, synthetic construct
  source 1..19: mol_type = other RNA
tcctccaagaggggacctt

SEQ ID NO: 7812 - RNA, 19 nt, synthetic construct
  source 1..19: mol_type = other RNA
ctccactccggggacgacc

SEQ ID NO: 7813 - RNA, 19 nt, synthetic construct
  source 1..19: mol_type = other RNA
ctccactccggggacgacc

SEQ ID NO: 7814 - RNA, 19 nt, synthetic construct
  source 1..19: mol_type = other RNA
ctccactccggggacgacc

SEQ ID NO: 7815 - RNA, 19 nt, synthetic construct
  source 1..19: mol_type = other RNA
ctccactccggggacgacc

SEQ ID NO: 7816 - RNA, 19 nt, synthetic construct
  source 1..19: mol_type = other RNA
accactgccgccagttgca

SEQ ID NO: 7817 - RNA, 19 nt, synthetic construct
  source 1..19: mol_type = other RNA
ggacccaacggtgcaatgt

SEQ ID NO: 7818 - RNA, 19 nt, synthetic construct
  source 1..19: mol_type = other RNA
cctatgaggacaggaccta

SEQ ID NO: 7819 - RNA, 19 nt, synthetic construct
  source 1..19: mol_type = other RNA
agcggacggcggcgtgttc

SEQ ID NO: 7820 - RNA, 19 nt, synthetic construct
  source 1..19: mol_type = other RNA
caccctatgggtgaccccg

SEQ ID NO: 7821 - RNA, 19 nt, synthetic construct
  source 1..19: mol_type = other RNA
cttcgtgcctgtggacggc

SEQ ID NO: 7822 - RNA, 19 nt, synthetic construct
  source 1..19: mol_type = other RNA
agcaccgcttccaaagagc

SEQ ID NO: 7823 - RNA, 19 nt, synthetic construct
  source 1..19: mol_type = other RNA
aaccgcccttccagcactg

SEQ ID NO: 7824 - RNA, 19 nt, synthetic construct
  source 1..19: mol_type = other RNA
aaccgcccttccagcactg

SEQ ID NO: 7825 - RNA, 19 nt, synthetic construct
  source 1..19: mol_type = other RNA
agctctacggccacgccct

SEQ ID NO: 7826 - RNA, 19 nt, synthetic construct
  source 1..19: mol_type = other RNA
aaccgcccttccagcactg

SEQ ID NO: 7827 - RNA, 19 nt, synthetic construct
  source 1..19: mol_type = other RNA
agctctacggccacgccct

SEQ ID NO: 7828 - RNA, 19 nt, synthetic construct
  source 1..19: mol_type = other RNA
aaccgcccttccagcactg

SEQ ID NO: 7829 - RNA, 19 nt, synthetic construct
  source 1..19: mol_type = other RNA
actatagccaccgtgatgg

SEQ ID NO: 7830 - RNA, 19 nt, synthetic construct
  source 1..19: mol_type = other RNA
caacgcacacatgggcatc

SEQ ID NO: 7831 - RNA, 19 nt, synthetic construct
  source 1..19: mol_type = other RNA
catcttggcccaggactac

SEQ ID NO: 7832 - RNA, 19 nt, synthetic construct
  source 1..19: mol_type = other RNA
accctatgggtgaccccga

SEQ ID NO: 7833 - RNA, 19 nt, synthetic construct
  source 1..19: mol_type = other RNA
ctatgggtgaccccgagca

SEQ ID NO: 7834 - RNA, 19 nt, synthetic construct
  source 1..19: mol_type = other RNA
cctcgagtgccgtgcccag

SEQ ID NO: 7835 - RNA, 19 nt, synthetic construct
  source 1..19: mol_type = other RNA
cctcgagtgccgtgcccag

SEQ ID NO: 7836 - RNA, 19 nt, synthetic construct
  source 1..19: mol_type = other RNA
cctcgagtgccgtgcccag

SEQ ID NO: 7837 - RNA, 19 nt, synthetic construct
  source 1..19: mol_type = other RNA
cctcgagtgccgtgcccag

SEQ ID NO: 7838 - RNA, 19 nt, synthetic construct
  source 1..19: mol_type = other RNA
tccggtcgacggcggccct

SEQ ID NO: 7839 - RNA, 19 nt, synthetic construct
  source 1..19: mol_type = other RNA
ctggatcctcacagagccg

SEQ ID NO: 7840 - RNA, 19 nt, synthetic construct
  source 1..19: mol_type = other RNA
ctggatcctcacagagccg

SEQ ID NO: 7841 - RNA, 19 nt, synthetic construct
  source 1..19: mol_type = other RNA
ctggatcctcacagagccg

SEQ ID NO: 7842 - RNA, 19 nt, synthetic construct
  source 1..19: mol_type = other RNA
ctggatcctcacagagccg

SEQ ID NO: 7843 - RNA, 19 nt, synthetic construct
  source 1..19: mol_type = other RNA
ctgctgcgaatacgtgccc

SEQ ID NO: 7844 - RNA, 19 nt, synthetic construct
  source 1..19: mol_type = other RNA
ccaccccgtgggtgaaacc

SEQ ID NO: 7845 - RNA, 19 nt, synthetic construct
  source 1..19: mol_type = other RNA
tcagcccttccagggacga

SEQ ID NO: 7846 - RNA, 19 nt, synthetic construct
  source 1..19: mol_type = other RNA
gcagccactacgaccgcaa

SEQ ID NO: 7847 - RNA, 19 nt, synthetic construct
  source 1..19: mol_type = other RNA
aggacccaacggtgcaatg

SEQ ID NO: 7848 - RNA, 19 nt, synthetic construct
  source 1..19: mol_type = other RNA
ctgggaccggaagaccagc

SEQ ID NO: 7849 - RNA, 19 nt, synthetic construct
  source 1..19: mol_type = other RNA
ctcacgcctccagtgtgga

SEQ ID NO: 7850 - RNA, 19 nt, synthetic construct
  source 1..19: mol_type = other RNA
ctcacgcctccagtgtgga

SEQ ID NO: 7851 - RNA, 19 nt, synthetic construct
  source 1..19: mol_type = other RNA
ctcacgcctccagtgtgga

SEQ ID NO: 7852 - RNA, 19 nt, synthetic construct
  source 1..19: mol_type = other RNA
cgtgtcgtcctgctggacc

SEQ ID NO: 7853 - RNA, 19 nt, synthetic construct
  source 1..19: mol_type = other RNA
tgacgaccactgcagggga

SEQ ID NO: 7854 - RNA, 19 nt, synthetic construct
  source 1..19: mol_type = other RNA
gggttcagtgtcggtgcag

SEQ ID NO: 7855 - RNA, 19 nt, synthetic construct
  source 1..19: mol_type = other RNA
gccactacgactgagtcca

SEQ ID NO: 7856 - RNA, 19 nt, synthetic construct
  source 1..19: mol_type = other RNA
gccactacgactgagtcca

SEQ ID NO: 7857 - RNA, 19 nt, synthetic construct
  source 1..19: mol_type = other RNA
cacctgcagcgtttccttc

SEQ ID NO: 7858 - RNA, 19 nt, synthetic construct
  source 1..19: mol_type = other RNA
atccacccttccaacacgc

SEQ ID NO: 7859 - RNA, 19 nt, synthetic construct
  source 1..19: mol_type = other RNA
cccagggacggcacgcacg

SEQ ID NO: 7860 - RNA, 19 nt, synthetic construct
  source 1..19: mol_type = other RNA
cccagggacggcacgcacg

SEQ ID NO: 7861 - RNA, 19 nt, synthetic construct
  source 1..19: mol_type = other RNA
aaccagaggttccacggtg

SEQ ID NO: 7862 - RNA, 19 nt, synthetic construct
  source 1..19: mol_type = other RNA
tgcaggggccgccttgagg

SEQ ID NO: 7863 - RNA, 19 nt, synthetic construct
  source 1..19: mol_type = other RNA
gatacacaagcacccttgg

SEQ ID NO: 7864 - RNA, 19 nt, synthetic construct
  source 1..19: mol_type = other RNA
tccctctccggcaggtgaa

SEQ ID NO: 7865 - RNA, 19 nt, synthetic construct
  source 1..19: mol_type = other RNA
ctggaacaaactaagcatg

SEQ ID NO: 7866 - RNA, 19 nt, synthetic construct
  source 1..19: mol_type = other RNA
ggagctggatcccaaatac

SEQ ID NO: 7867 - RNA, 19 nt, synthetic construct
  source 1..19: mol_type = other RNA
ccagggacggcacgcacgc

SEQ ID NO: 7868 - RNA, 19 nt, synthetic construct
  source 1..19: mol_type = other RNA
gccggcaactgcacggacg

SEQ ID NO: 7869 - RNA, 19 nt, synthetic construct
  source 1..19: mol_type = other RNA
ctacgacaaggacggaaac

SEQ ID NO: 7870 - RNA, 19 nt, synthetic construct
  source 1..19: mol_type = other RNA
ggtccgtggtgggggacgc

SEQ ID NO: 7871 - RNA, 19 nt, synthetic construct
  source 1..19: mol_type = other RNA
aagtcccagcgctacgcct

SEQ ID NO: 7872 - RNA, 19 nt, synthetic construct
  source 1..19: mol_type = other RNA
acagaccagtggtactccc

SEQ ID NO: 7873 - RNA, 19 nt, synthetic construct
  source 1..19: mol_type = other RNA
acagaccagtggtactccc

SEQ ID NO: 7874 - RNA, 19 nt, synthetic construct
  source 1..19: mol_type = other RNA
acagaccagtggtactccc

SEQ ID NO: 7875 - RNA, 19 nt, synthetic construct
  source 1..19: mol_type = other RNA
acagaccagtggtactccc

SEQ ID NO: 7876 - RNA, 19 nt, synthetic construct
  source 1..19: mol_type = other RNA
acagaccagtggtactccc

SEQ ID NO: 7877 - RNA, 19 nt, synthetic construct
  source 1..19: mol_type = other RNA
accgtgtgtgtccgcgagg

SEQ ID NO: 7878 - RNA, 19 nt, synthetic construct
  source 1..19: mol_type = other RNA
cagccaacagagtcccccg

SEQ ID NO: 7879 - RNA, 19 nt, synthetic construct
  source 1..19: mol_type = other RNA
cggtaccacccagcactcg

SEQ ID NO: 7880 - RNA, 19 nt, synthetic construct
  source 1..19: mol_type = other RNA
cggtaccacccagcactcg

SEQ ID NO: 7881 - RNA, 19 nt, synthetic construct
  source 1..19: mol_type = other RNA
cggtaccacccagcactcg

SEQ ID NO: 7882 - RNA, 19 nt, synthetic construct
  source 1..19: mol_type = other RNA
agtcatctacaataagacc

SEQ ID NO: 7883 - RNA, 19 nt, synthetic construct
  source 1..19: mol_type = other RNA
cggcactggtgctcgcgcc

SEQ ID NO: 7884 - RNA, 19 nt, synthetic construct
  source 1..19: mol_type = other RNA
acggcggcgtgttcctcaa

SEQ ID NO: 7885 - RNA, 19 nt, synthetic construct
  source 1..19: mol_type = other RNA
tgccagcccacttgccgcg

SEQ ID NO: 7886 - RNA, 19 nt, synthetic construct
  source 1..19: mol_type = other RNA
gggacgacggggagcttgg

SEQ ID NO: 7887 - RNA, 19 nt, synthetic construct
  source 1..19: mol_type = other RNA
atggcaccttctacggggt

SEQ ID NO: 7888 - RNA, 19 nt, synthetic construct
  source 1..19: mol_type = other RNA
ccagggactgcaaccgccc

SEQ ID NO: 7889 - RNA, 19 nt, synthetic construct
  source 1..19: mol_type = other RNA
aacagccactacgactgag

SEQ ID NO: 7890 - RNA, 19 nt, synthetic construct
  source 1..19: mol_type = other RNA
ccagggactgcaaccgccc

SEQ ID NO: 7891 - RNA, 19 nt, synthetic construct
  source 1..19: mol_type = other RNA
ccagggactgcaaccgccc

SEQ ID NO: 7892 - RNA, 19 nt, synthetic construct
  source 1..19: mol_type = other RNA
aacagccactacgactgag

SEQ ID NO: 7893 - RNA, 19 nt, synthetic construct
  source 1..19: mol_type = other RNA
ccagggactgcaaccgccc

SEQ ID NO: 7894 - RNA, 19 nt, synthetic construct
  source 1..19: mol_type = other RNA
aggacccctttcgggaggg

SEQ ID NO: 7895 - RNA, 19 nt, synthetic construct
  source 1..19: mol_type = other RNA
tcacctgcagcgtttcctt

SEQ ID NO: 7896 - RNA, 19 nt, synthetic construct
  source 1..19: mol_type = other RNA
cagagctcgcccgacaggc

SEQ ID NO: 7897 - RNA, 19 nt, synthetic construct
  source 1..19: mol_type = other RNA
cctccactccggggacgac

SEQ ID NO: 7898 - RNA, 19 nt, synthetic construct
  source 1..19: mol_type = other RNA
caagatacgctacatgggg

SEQ ID NO: 7899 - RNA, 19 nt, synthetic construct
  source 1..19: mol_type = other RNA
cgtgttcatccgactgcac

SEQ ID NO: 7900 - RNA, 19 nt, synthetic construct
  source 1..19: mol_type = other RNA
gacctttaaggcggtggcg

SEQ ID NO: 7901 - RNA, 19 nt, synthetic construct
  source 1..19: mol_type = other RNA
acaaccccgccaccgacca

SEQ ID NO: 7902 - RNA, 19 nt, synthetic construct
  source 1..19: mol_type = other RNA
gctggatgacatcacgcac

SEQ ID NO: 7903 - RNA, 19 nt, synthetic construct
  source 1..19: mol_type = other RNA
tgggaccggaagaccagcg

SEQ ID NO: 7904 - RNA, 19 nt, synthetic construct
  source 1..19: mol_type = other RNA
cccggggaccacccacacc

SEQ ID NO: 7905 - RNA, 19 nt, synthetic construct
  source 1..19: mol_type = other RNA
cccggggaccacccacacc

SEQ ID NO: 7906 - RNA, 19 nt, synthetic construct
  source 1..19: mol_type = other RNA
cccggggaccacccacacc

SEQ ID NO: 7907 - RNA, 19 nt, synthetic construct
  source 1..19: mol_type = other RNA
cctgggcgtgagcgtcacc

SEQ ID NO: 7908 - RNA, 19 nt, synthetic construct
  source 1..19: mol_type = other RNA
cagcccccgccgtgcaacc

SEQ ID NO: 7909 - RNA, 19 nt, synthetic construct
  source 1..19: mol_type = other RNA
ggactcctgtcaagtccgc

SEQ ID NO: 7910 - RNA, 19 nt, synthetic construct
  source 1..19: mol_type = other RNA
ccctgatgtcactgggacg

SEQ ID NO: 7911 - RNA, 19 nt, synthetic construct
  source 1..19: mol_type = other RNA
gctggaggcgtccaacggc

SEQ ID NO: 7912 - RNA, 19 nt, synthetic construct
  source 1..19: mol_type = other RNA
actgcctgaaagcggtgac

SEQ ID NO: 7913 - RNA, 19 nt, synthetic construct
  source 1..19: mol_type = other RNA
ggacggcggcgtgttcctc

SEQ ID NO: 7914 - RNA, 19 nt, synthetic construct
  source 1..19: mol_type = other RNA
gaaccaggctgacgacttc

SEQ ID NO: 7915 - RNA, 19 nt, synthetic construct
  source 1..19: mol_type = other RNA
gcactggtgctcgcgcctg

SEQ ID NO: 7916 - RNA, 19 nt, synthetic construct
  source 1..19: mol_type = other RNA
cgctcacggcaccgtgctg

SEQ ID NO: 7917 - RNA, 19 nt, synthetic construct
  source 1..19: mol_type = other RNA
cctccaagaggggaccttt

SEQ ID NO: 7918 - RNA, 19 nt, synthetic construct
  source 1..19: mol_type = other RNA
gtggggacccaccctacaa

SEQ ID NO: 7919 - RNA, 19 nt, synthetic construct
  source 1..19: mol_type = other RNA
ccaccctatgggtgacccc

SEQ ID NO: 7920 - RNA, 19 nt, synthetic construct
  source 1..19: mol_type = other RNA
catcccccagatacacaag

SEQ ID NO: 7921 - RNA, 19 nt, synthetic construct
  source 1..19: mol_type = other RNA
gaggccccacgacgcctgc

SEQ ID NO: 7922 - RNA, 19 nt, synthetic construct
  source 1..19: mol_type = other RNA
cttgggcacatggcgcccc

SEQ ID NO: 7923 - RNA, 19 nt, synthetic construct
  source 1..19: mol_type = other RNA
ccagtgtggatcagcacaa

SEQ ID NO: 7924 - RNA, 19 nt, synthetic construct
  source 1..19: mol_type = other RNA
cagtgtggatcagcacaac

SEQ ID NO: 7925 - RNA, 19 nt, synthetic construct
  source 1..19: mol_type = other RNA
ggtgcccaccggatccacg

SEQ ID NO: 7926 - RNA, 19 nt, synthetic construct
  source 1..19: mol_type = other RNA
ccagggacggcacgcacgc

SEQ ID NO: 7927 - RNA, 19 nt, synthetic construct
  source 1..19: mol_type = other RNA
ccagtgtggatcagcacaa

SEQ ID NO: 7928 - RNA, 19 nt, synthetic construct
  source 1..19: mol_type = other RNA
cagtgtggatcagcacaac

SEQ ID NO: 7929 - RNA, 19 nt, synthetic construct
  source 1..19: mol_type = other RNA
ggtgcccaccggatccacg

SEQ ID NO: 7930 - RNA, 19 nt, synthetic construct
  source 1..19: mol_type = other RNA
ccagtgtggatcagcacaa

SEQ ID NO: 7931 - RNA, 19 nt, synthetic construct
  source 1..19: mol_type = other RNA
cagtgtggatcagcacaac

SEQ ID NO: 7932 - RNA, 19 nt, synthetic construct
  source 1..19: mol_type = other RNA
ggtgcccaccggatccacg

SEQ ID NO: 7933 - RNA, 19 nt, synthetic construct
  source 1..19: mol_type = other RNA
ccagtgtggatcagcacaa

SEQ ID NO: 7934 - RNA, 19 nt, synthetic construct
  source 1..19: mol_type = other RNA
cagtgtggatcagcacaac

SEQ ID NO: 7935 - RNA, 19 nt, synthetic construct
  source 1..19: mol_type = other RNA
ctccacccttgggaccacc

SEQ ID NO: 7936 - RNA, 19 nt, synthetic construct
  source 1..19: mol_type = other RNA
ggtgcccaccggatccacg

SEQ ID NO: 7937 - RNA, 19 nt, synthetic construct
  source 1..19: mol_type = other RNA
ccagtgtggatcagcacaa

SEQ ID NO: 7938 - RNA, 19 nt, synthetic construct
  source 1..19: mol_type = other RNA
cagtgtggatcagcacaac

SEQ ID NO: 7939 - RNA, 19 nt, synthetic construct
  source 1..19: mol_type = other RNA
ggcggtgccccgacgtcct

SEQ ID NO: 7940 - RNA, 19 nt, synthetic construct
  source 1..19: mol_type = other RNA
tggggacttcaacggcctc

SEQ ID NO: 7941 - RNA, 19 nt, synthetic construct
  source 1..19: mol_type = other RNA
gacgaggagggcatctgcc

SEQ ID NO: 7942 - RNA, 19 nt, synthetic construct
  source 1..19: mol_type = other RNA
gggcgcagccttcgccaac

SEQ ID NO: 7943 - RNA, 19 nt, synthetic construct
  source 1..19: mol_type = other RNA
cgccaagggcgtacagctc

SEQ ID NO: 7944 - RNA, 19 nt, synthetic construct
  source 1..19: mol_type = other RNA
agggcgtacagctcagcga

SEQ ID NO: 7945 - RNA, 19 nt, synthetic construct
  source 1..19: mol_type = other RNA
ccttcgtgcctgtggacgg

SEQ ID NO: 7946 - RNA, 19 nt, synthetic construct
  source 1..19: mol_type = other RNA
ggcggtggcgagagggccg

SEQ ID NO: 7947 - RNA, 19 nt, synthetic construct
  source 1..19: mol_type = other RNA
cgtgtgcctgcgactcggg

SEQ ID NO: 7948 - RNA, 19 nt, synthetic construct
  source 1..19: mol_type = other RNA
ctggaactccagccacaac

SEQ ID NO: 7949 - RNA, 19 nt, synthetic construct
  source 1..19: mol_type = other RNA
agagagggtaccaggtatg

SEQ ID NO: 7950 - RNA, 19 nt, synthetic construct
  source 1..19: mol_type = other RNA
gagagggtaccaggtatgc

SEQ ID NO: 7951 - RNA, 19 nt, synthetic construct
  source 1..19: mol_type = other RNA
ccaggtatgccctgtgctg

SEQ ID NO: 7952 - RNA, 19 nt, synthetic construct
  source 1..19: mol_type = other RNA
caggtatgccctgtgctgg

SEQ ID NO: 7953 - RNA, 19 nt, synthetic construct
  source 1..19: mol_type = other RNA
ccctcggccccaggtacca

SEQ ID NO: 7954 - RNA, 19 nt, synthetic construct
  source 1..19: mol_type = other RNA
taagatcagggccgctgga

SEQ ID NO: 7955 - RNA, 19 nt, synthetic construct
  source 1..19: mol_type = other RNA
gagggcacttatgccagca

SEQ ID NO: 7956 - RNA, 19 nt, synthetic construct
  source 1..19: mol_type = other RNA
ggcgtcttcaagatgtgct

SEQ ID NO: 7957 - RNA, 19 nt, synthetic construct
  source 1..19: mol_type = other RNA
ggtacagccaccacgggag

SEQ ID NO: 7958 - RNA, 19 nt, synthetic construct
  source 1..19: mol_type = other RNA
acgacgcctgcaggctcca

SEQ ID NO: 7959 - RNA, 19 nt, synthetic construct
  source 1..19: mol_type = other RNA
ggacgacggggagcttggg

SEQ ID NO: 7960 - RNA, 19 nt, synthetic construct
  source 1..19: mol_type = other RNA
tcacgagcgagctgtccac

SEQ ID NO: 7961 - RNA, 19 nt, synthetic construct
  source 1..19: mol_type = other RNA
gcgagctgtccacctctca

SEQ ID NO: 7962 - RNA, 19 nt, synthetic construct
  source 1..19: mol_type = other RNA
acccgcctatcacagacca

SEQ ID NO: 7963 - RNA, 19 nt, synthetic construct
  source 1..19: mol_type = other RNA
accacaaccacgggcttca

SEQ ID NO: 7964 - RNA, 19 nt, synthetic construct
  source 1..19: mol_type = other RNA
gacggcactcacgcctcca

SEQ ID NO: 7965 - RNA, 19 nt, synthetic construct
  source 1..19: mol_type = other RNA
cggcactcacgcctccagt

SEQ ID NO: 7966 - RNA, 19 nt, synthetic construct
  source 1..19: mol_type = other RNA
ctccacggtgaccccctcc

SEQ ID NO: 7967 - RNA, 19 nt, synthetic construct
  source 1..19: mol_type = other RNA
ctctggcggggactttgac

SEQ ID NO: 7968 - RNA, 19 nt, synthetic construct
  source 1..19: mol_type = other RNA
cctgggcctcgagtgccgt

SEQ ID NO: 7969 - RNA, 19 nt, synthetic construct
  source 1..19: mol_type = other RNA
ctgggcctcgagtgccgtg

SEQ ID NO: 7970 - RNA, 19 nt, synthetic construct
  source 1..19: mol_type = other RNA
tgggcctcgagtgccgtgc

SEQ ID NO: 7971 - RNA, 19 nt, synthetic construct
  source 1..19: mol_type = other RNA
tccactccggggacgacct

SEQ ID NO: 7972 - RNA, 19 nt, synthetic construct
  source 1..19: mol_type = other RNA
agccgagcactacagccac

SEQ ID NO: 7973 - RNA, 19 nt, synthetic construct
  source 1..19: mol_type = other RNA
gccgagcactacagccacc

SEQ ID NO: 7974 - RNA, 19 nt, synthetic construct
  source 1..19: mol_type = other RNA
acccgcctatcacagacca

SEQ ID NO: 7975 - RNA, 19 nt, synthetic construct
  source 1..19: mol_type = other RNA
caccacaaccggggccacc

SEQ ID NO: 7976 - RNA, 19 nt, synthetic construct
  source 1..19: mol_type = other RNA
accacaaccggggccaccg

SEQ ID NO: 7977 - RNA, 19 nt, synthetic construct
  source 1..19: mol_type = other RNA
accacaaccacgggcttca

SEQ ID NO: 7978 - RNA, 19 nt, synthetic construct
  source 1..19: mol_type = other RNA
ttccacggtgaccccctcc

SEQ ID NO: 7979 - RNA, 19 nt, synthetic construct
  source 1..19: mol_type = other RNA
acggccaccacacacgggc

SEQ ID NO: 7980 - RNA, 19 nt, synthetic construct
  source 1..19: mol_type = other RNA
ctctggcggggactttgac

SEQ ID NO: 7981 - RNA, 19 nt, synthetic construct
  source 1..19: mol_type = other RNA
cctgggcctcgagtgccgt

SEQ ID NO: 7982 - RNA, 19 nt, synthetic construct
  source 1..19: mol_type = other RNA
ctgggcctcgagtgccgtg

SEQ ID NO: 7983 - RNA, 19 nt, synthetic construct
  source 1..19: mol_type = other RNA
tgggcctcgagtgccgtgc

SEQ ID NO: 7984 - RNA, 19 nt, synthetic construct
  source 1..19: mol_type = other RNA
cagctctacggccacgccc

SEQ ID NO: 7985 - RNA, 19 nt, synthetic construct
  source 1..19: mol_type = other RNA
ctctacggccacgccctcc

SEQ ID NO: 7986 - RNA, 19 nt, synthetic construct
  source 1..19: mol_type = other RNA
cacagcagccactacgacc

SEQ ID NO: 7987 - RNA, 19 nt, synthetic construct
  source 1..19: mol_type = other RNA
ggatccacggccatcccgt

SEQ ID NO: 7988 - RNA, 19 nt, synthetic construct
  source 1..19: mol_type = other RNA
tccactccggggacgacct

SEQ ID NO: 7989 - RNA, 19 nt, synthetic construct
  source 1..19: mol_type = other RNA
cacccgggcaactgctggc

SEQ ID NO: 7990 - RNA, 19 nt, synthetic construct
  source 1..19: mol_type = other RNA
acccgcctatcacagacca

SEQ ID NO: 7991 - RNA, 19 nt, synthetic construct
  source 1..19: mol_type = other RNA
cacaaccagggccaccggc

SEQ ID NO: 7992 - RNA, 19 nt, synthetic construct
  source 1..19: mol_type = other RNA
accacaaccacgggcttca

SEQ ID NO: 7993 - RNA, 19 nt, synthetic construct
  source 1..19: mol_type = other RNA
gacggcactcacgcctcca

SEQ ID NO: 7994 - RNA, 19 nt, synthetic construct
  source 1..19: mol_type = other RNA
cggcactcacgcctccagt

SEQ ID NO: 7995 - RNA, 19 nt, synthetic construct
  source 1..19: mol_type = other RNA
ctccacggtgaccccctcc

SEQ ID NO: 7996 - RNA, 19 nt, synthetic construct
  source 1..19: mol_type = other RNA
ggccactacgatcacagcc

SEQ ID NO: 7997 - RNA, 19 nt, synthetic construct
  source 1..19: mol_type = other RNA
acggccaccacacacgggc

SEQ ID NO: 7998 - RNA, 19 nt, synthetic construct
  source 1..19: mol_type = other RNA
ctctggcggggactttgac

SEQ ID NO: 7999 - RNA, 19 nt, synthetic construct
  source 1..19: mol_type = other RNA
cctgggcctcgagtgccgt

SEQ ID NO: 8000 - RNA, 19 nt, synthetic construct
  source 1..19: mol_type = other RNA
ctgggcctcgagtgccgtg

SEQ ID NO: 8001 - RNA, 19 nt, synthetic construct
  source 1..19: mol_type = other RNA
tgggcctcgagtgccgtgc

SEQ ID NO: 8002 - RNA, 19 nt, synthetic construct
  source 1..19: mol_type = other RNA
cagctctacggccacgccc

SEQ ID NO: 8003 - RNA, 19 nt, synthetic construct
  source 1..19: mol_type = other RNA
ctctacggccacgccctcc

SEQ ID NO: 8004 - RNA, 19 nt, synthetic construct
  source 1..19: mol_type = other RNA
agccgagcactacagccac

SEQ ID NO: 8005 - RNA, 19 nt, synthetic construct
  source 1..19: mol_type = other RNA
gccgagcactacagccacc

SEQ ID NO: 8006 - RNA, 19 nt, synthetic construct
  source 1..19: mol_type = other RNA
acccgcctatcacagacca

SEQ ID NO: 8007 - RNA, 19 nt, synthetic construct
  source 1..19: mol_type = other RNA
cacaaccagggccaccggc

SEQ ID NO: 8008 - RNA, 19 nt, synthetic construct
  source 1..19: mol_type = other RNA
accacaaccacgggcttca

SEQ ID NO: 8009 - RNA, 19 nt, synthetic construct
  source 1..19: mol_type = other RNA
ctccacggtgaccccctcc

SEQ ID NO: 8010 - RNA, 19 nt, synthetic construct
  source 1..19: mol_type = other RNA
acggccaccacacacgggc

SEQ ID NO: 8011 - RNA, 19 nt, synthetic construct
  source 1..19: mol_type = other RNA
ctctggcggggactttgac

SEQ ID NO: 8012 - RNA, 19 nt, synthetic construct
  source 1..19: mol_type = other RNA
cctgggcctcgagtgccgt

SEQ ID NO: 8013 - RNA, 19 nt, synthetic construct
  source 1..19: mol_type = other RNA
ctgggcctcgagtgccgtg

SEQ ID NO: 8014 - RNA, 19 nt, synthetic construct
  source 1..19: mol_type = other RNA
tgggcctcgagtgccgtgc

SEQ ID NO: 8015 - RNA, 19 nt, synthetic construct
  source 1..19: mol_type = other RNA
tccactccggggacgacct

SEQ ID NO: 8016 - RNA, 19 nt, synthetic construct
  source 1..19: mol_type = other RNA
tccactccggggacgacct

SEQ ID NO: 8017 - RNA, 19 nt, synthetic construct
  source 1..19: mol_type = other RNA
agccgagcactacagccac

SEQ ID NO: 8018 - RNA, 19 nt, synthetic construct
  source 1..19: mol_type = other RNA
gccgagcactacagccacc

SEQ ID NO: 8019 - RNA, 19 nt, synthetic construct
  source 1..19: mol_type = other RNA
acccgcctatcacagacca

SEQ ID NO: 8020 - RNA, 19 nt, synthetic construct
  source 1..19: mol_type = other RNA
caccacaaccggggccacc

SEQ ID NO: 8021 - RNA, 19 nt, synthetic construct
  source 1..19: mol_type = other RNA
accacaaccggggccaccg

SEQ ID NO: 8022 - RNA, 19 nt, synthetic construct
  source 1..19: mol_type = other RNA
accacaaccacgggcttca

SEQ ID NO: 8023 - RNA, 19 nt, synthetic construct
  source 1..19: mol_type = other RNA
gacggcactcacgcctcca

SEQ ID NO: 8024 - RNA, 19 nt, synthetic construct
  source 1..19: mol_type = other RNA
cggcactcacgcctccagt

SEQ ID NO: 8025 - RNA, 19 nt, synthetic construct
  source 1..19: mol_type = other RNA
ctccacggtgaccccctcc

SEQ ID NO: 8026 - RNA, 19 nt, synthetic construct
  source 1..19: mol_type = other RNA
acccacaccgccagagtgc

SEQ ID NO: 8027 - RNA, 19 nt, synthetic construct
  source 1..19: mol_type = other RNA
cacaccgccagagtgctga

SEQ ID NO: 8028 - RNA, 19 nt, synthetic construct
  source 1..19: mol_type = other RNA
ccaaccttcagcgtgtcca

SEQ ID NO: 8029 - RNA, 19 nt, synthetic construct
  source 1..19: mol_type = other RNA
ctgagacccactggcttcc

SEQ ID NO: 8030 - RNA, 19 nt, synthetic construct
  source 1..19: mol_type = other RNA
tcagcactgtgacattgac

SEQ ID NO: 8031 - RNA, 19 nt, synthetic construct
  source 1..19: mol_type = other RNA
gacaatgccatccctctcc

SEQ ID NO: 8032 - RNA, 19 nt, synthetic construct
  source 1..19: mol_type = other RNA
ccctctccggcaggtgaat

SEQ ID NO: 8033 - RNA, 19 nt, synthetic construct
  source 1..19: mol_type = other RNA
gagggcctgatcctgtttg

SEQ ID NO: 8034 - RNA, 19 nt, synthetic construct
  source 1..19: mol_type = other RNA
caccatgcgtgtggacatt

SEQ ID NO: 8035 - RNA, 19 nt, synthetic construct
  source 1..19: mol_type = other RNA
caggtctttgctgagtgcc

SEQ ID NO: 8036 - RNA, 19 nt, synthetic construct
  source 1..19: mol_type = other RNA
cttcaacgcctgcatcagc

SEQ ID NO: 8037 - RNA, 19 nt, synthetic construct
  source 1..19: mol_type = other RNA
ttcaacgcctgcatcagcg

SEQ ID NO: 8038 - RNA, 19 nt, synthetic construct
  source 1..19: mol_type = other RNA
gtgcgacctcacctgccca

SEQ ID NO: 8039 - RNA, 19 nt, synthetic construct
  source 1..19: mol_type = other RNA
ttcaacgcacacatgggca

SEQ ID NO: 8040 - RNA, 19 nt, synthetic construct
  source 1..19: mol_type = other RNA
tgggcatctgcgtgcaggc

SEQ ID NO: 8041 - RNA, 19 nt, synthetic construct
  source 1..19: mol_type = other RNA
cccgggccgagaacccctg

SEQ ID NO: 8042 - RNA, 19 nt, synthetic construct
  source 1..19: mol_type = other RNA
cagaccgcctgcctcacgc

SEQ ID NO: 8043 - RNA, 19 nt, synthetic construct
  source 1..19: mol_type = other RNA
ggtgcccttgcactgtcct

SEQ ID NO: 8044 - RNA, 19 nt, synthetic construct
  source 1..19: mol_type = other RNA
tctgagaacgttctgcctc

SEQ ID NO: 8045 - RNA, 19 nt, synthetic construct
  source 1..19: mol_type = other RNA
tggaacaaactaagcatgt

SEQ ID NO: 8046 - RNA, 19 nt, synthetic construct
  source 1..19: mol_type = other RNA
tgtgtccctgccacggccg

SEQ ID NO: 8047 - RNA, 19 nt, synthetic construct
  source 1..19: mol_type = other RNA
gcacggattccagctggcc

SEQ ID NO: 8048 - RNA, 19 nt, synthetic construct
  source 1..19: mol_type = other RNA
cacggattccagctggcca

SEQ ID NO: 8049 - RNA, 19 nt, synthetic construct
  source 1..19: mol_type = other RNA
caacggccaggtcagagag

SEQ ID NO: 8050 - RNA, 19 nt, synthetic construct
  source 1..19: mol_type = other RNA
cggctccgtcctcatcaat

SEQ ID NO: 8051 - RNA, 19 nt, synthetic construct
  source 1..19: mol_type = other RNA
tacgacctgcatggtgact

SEQ ID NO: 8052 - RNA, 19 nt, synthetic construct
  source 1..19: mol_type = other RNA
cggacgccctggcacccaa

SEQ ID NO: 8053 - RNA, 19 nt, synthetic construct
  source 1..19: mol_type = other RNA
ctatgaggacaggacctac

SEQ ID NO: 8054 - RNA, 19 nt, synthetic construct
  source 1..19: mol_type = other RNA
aacaccaccgatgggcttg

SEQ ID NO: 8055 - RNA, 19 nt, synthetic construct
  source 1..19: mol_type = other RNA
cgcctgcttgatcgccatc

SEQ ID NO: 8056 - RNA, 19 nt, synthetic construct
  source 1..19: mol_type = other RNA
ccacaaccccgccaccgac

SEQ ID NO: 8057 - RNA, 19 nt, synthetic construct
  source 1..19: mol_type = other RNA
aaccacgggcttcacagcc

SEQ ID NO: 8058 - RNA, 19 nt, synthetic construct
  source 1..19: mol_type = other RNA
acaactgtggccactggtt

SEQ ID NO: 8059 - RNA, 19 nt, synthetic construct
  source 1..19: mol_type = other RNA
caaccaccggtaccaccca

SEQ ID NO: 8060 - RNA, 19 nt, synthetic construct
  source 1..19: mol_type = other RNA
aaccaccggtaccacccag

SEQ ID NO: 8061 - RNA, 19 nt, synthetic construct
  source 1..19: mol_type = other RNA
aaccacgggcttcacagcc

SEQ ID NO: 8062 - RNA, 19 nt, synthetic construct
  source 1..19: mol_type = other RNA
acaactgtggccactggtt

SEQ ID NO: 8063 - RNA, 19 nt, synthetic construct
  source 1..19: mol_type = other RNA
agggacaacacctatcccc

SEQ ID NO: 8064 - RNA, 19 nt, synthetic construct
  source 1..19: mol_type = other RNA
caaccaccggtaccaccca

SEQ ID NO: 8065 - RNA, 19 nt, synthetic construct
  source 1..19: mol_type = other RNA
aaccaccggtaccacccag

SEQ ID NO: 8066 - RNA, 19 nt, synthetic construct
  source 1..19: mol_type = other RNA
aaccacgggcttcacagcc

SEQ ID NO: 8067 - RNA, 19 nt, synthetic construct
  source 1..19: mol_type = other RNA
acaactgtggccactggtt

SEQ ID NO: 8068 - RNA, 19 nt, synthetic construct
  source 1..19: mol_type = other RNA
acaactgtggccactggtt

SEQ ID NO: 8069 - RNA, 19 nt, synthetic construct
  source 1..19: mol_type = other RNA
agggacaacacctatcccc

SEQ ID NO: 8070 - RNA, 19 nt, synthetic construct
  source 1..19: mol_type = other RNA
caaccaccggtaccaccca

SEQ ID NO: 8071 - RNA, 19 nt, synthetic construct
  source 1..19: mol_type = other RNA
aaccaccggtaccacccag

SEQ ID NO: 8072 - RNA, 19 nt, synthetic construct
  source 1..19: mol_type = other RNA
aaccacgggcttcacagcc

SEQ ID NO: 8073 - RNA, 19 nt, synthetic construct
  source 1..19: mol_type = other RNA
acaactgtggccactggtt

SEQ ID NO: 8074 - RNA, 19 nt, synthetic construct
  source 1..19: mol_type = other RNA
gacgacccggatcctcact

SEQ ID NO: 8075 - RNA, 19 nt, synthetic construct
  source 1..19: mol_type = other RNA
ttctcgcccggggaagtca

SEQ ID NO: 8076 - RNA, 19 nt, synthetic construct
  source 1..19: mol_type = other RNA
cggtgtgcgtgtgcaacac

SEQ ID NO: 8077 - RNA, 19 nt, synthetic construct
  source 1..19: mol_type = other RNA
tgcgtgtgcaacacaacca

SEQ ID NO: 8078 - RNA, 19 nt, synthetic construct
  source 1..19: mol_type = other RNA
atgaaacctgggtcaacag

SEQ ID NO: 8079 - RNA, 19 nt, synthetic construct
  source 1..19: mol_type = other RNA
cactggtggacagcactgc

SEQ ID NO: 8080 - RNA, 19 nt, synthetic construct
  source 1..19: mol_type = other RNA
agcaacagctcggcgggca

SEQ ID NO: 8081 - RNA, 19 nt, synthetic construct
  source 1..19: mol_type = other RNA
ggctgcattgccgaggagg

SEQ ID NO: 8082 - RNA, 19 nt, synthetic construct
  source 1..19: mol_type = other RNA
acatcccccagatacacaa

SEQ ID NO: 8083 - RNA, 19 nt, synthetic construct
  source 1..19: mol_type = other RNA
gcaaccaccggtaccaccc

SEQ ID NO: 8084 - RNA, 19 nt, synthetic construct
  source 1..19: mol_type = other RNA
tacgactgagtccactgga

SEQ ID NO: 8085 - RNA, 19 nt, synthetic construct
  source 1..19: mol_type = other RNA
gcccaccggatccacggcc

SEQ ID NO: 8086 - RNA, 19 nt, synthetic construct
  source 1..19: mol_type = other RNA
gcaaccaccggtaccaccc

SEQ ID NO: 8087 - RNA, 19 nt, synthetic construct
  source 1..19: mol_type = other RNA
gccaccacgacaagggcca

SEQ ID NO: 8088 - RNA, 19 nt, synthetic construct
  source 1..19: mol_type = other RNA
gcccaccggatccacggcc

SEQ ID NO: 8089 - RNA, 19 nt, synthetic construct
  source 1..19: mol_type = other RNA
gcaccgcctggacccgcct

SEQ ID NO: 8090 - RNA, 19 nt, synthetic construct
  source 1..19: mol_type = other RNA
cacaaagctgaccacaaca

SEQ ID NO: 8091 - RNA, 19 nt, synthetic construct
  source 1..19: mol_type = other RNA
tacgactgagtccactgga

SEQ ID NO: 8092 - RNA, 19 nt, synthetic construct
  source 1..19: mol_type = other RNA
gcccaccggatccacggcc

SEQ ID NO: 8093 - RNA, 19 nt, synthetic construct
  source 1..19: mol_type = other RNA
gcaaccaccggtaccaccc

SEQ ID NO: 8094 - RNA, 19 nt, synthetic construct
  source 1..19: mol_type = other RNA
gccaccacgacaagggcca

SEQ ID NO: 8095 - RNA, 19 nt, synthetic construct
  source 1..19: mol_type = other RNA
gcccaccggatccacggcc

SEQ ID NO: 8096 - RNA, 19 nt, synthetic construct
  source 1..19: mol_type = other RNA
gcacctcttacaccttccg

SEQ ID NO: 8097 - RNA, 19 nt, synthetic construct
  source 1..19: mol_type = other RNA
ccaccaccatgcgtgtgga

SEQ ID NO: 8098 - RNA, 19 nt, synthetic construct
  source 1..19: mol_type = other RNA
gactcctgtcaagtccgca

SEQ ID NO: 8099 - RNA, 19 nt, synthetic construct
  source 1..19: mol_type = other RNA
gacttcacggccctcagcg

SEQ ID NO: 8100 - RNA, 19 nt, synthetic construct
  source 1..19: mol_type = other RNA
cactggtgctcgcgcctga

SEQ ID NO: 8101 - RNA, 19 nt, synthetic construct
  source 1..19: mol_type = other RNA
ggagagaccatcagggtcg

SEQ ID NO: 8102 - RNA, 19 nt, synthetic construct
  source 1..19: mol_type = other RNA
gagtacatcttggcccagg

SEQ ID NO: 8103 - RNA, 19 nt, synthetic construct
  source 1..19: mol_type = other RNA
ccaccctctcagaaggact

SEQ ID NO: 8104 - RNA, 19 nt, synthetic construct
  source 1..19: mol_type = other RNA
ggccccacgacgcctgcag

SEQ ID NO: 8105 - RNA, 19 nt, synthetic construct
  source 1..19: mol_type = other RNA
cagggactgcaaccgccct

SEQ ID NO: 8106 - RNA, 19 nt, synthetic construct
  source 1..19: mol_type = other RNA
agggactgcaaccgccctt

SEQ ID NO: 8107 - RNA, 19 nt, synthetic construct
  source 1..19: mol_type = other RNA
gactgcaaccgcccttcca

SEQ ID NO: 8108 - RNA, 19 nt, synthetic construct
  source 1..19: mol_type = other RNA
cagcccagggacggcactc

SEQ ID NO: 8109 - RNA, 19 nt, synthetic construct
  source 1..19: mol_type = other RNA
ccacacggtgcgcacagcc

SEQ ID NO: 8110 - RNA, 19 nt, synthetic construct
  source 1..19: mol_type = other RNA
cacacggtgcgcacagcct

SEQ ID NO: 8111 - RNA, 19 nt, synthetic construct
  source 1..19: mol_type = other RNA
ccctcaccctagcagcaga

SEQ ID NO: 8112 - RNA, 19 nt, synthetic construct
  source 1..19: mol_type = other RNA
ctccagggacgaccacccc

SEQ ID NO: 8113 - RNA, 19 nt, synthetic construct
  source 1..19: mol_type = other RNA
cggccggaggggccgtctg

SEQ ID NO: 8114 - RNA, 19 nt, synthetic construct
  source 1..19: mol_type = other RNA
ggccggaggggccgtctgt

SEQ ID NO: 8115 - RNA, 19 nt, synthetic construct
  source 1..19: mol_type = other RNA
actacgactgagtccactg

SEQ ID NO: 8116 - RNA, 19 nt, synthetic construct
  source 1..19: mol_type = other RNA
ggccacgacacccacagtc

SEQ ID NO: 8117 - RNA, 19 nt, synthetic construct
  source 1..19: mol_type = other RNA
cagggactgcaaccgccct

SEQ ID NO: 8118 - RNA, 19 nt, synthetic construct
  source 1..19: mol_type = other RNA
agggactgcaaccgccctt

SEQ ID NO: 8119 - RNA, 19 nt, synthetic construct
  source 1..19: mol_type = other RNA
gactgcaaccgcccttcca

SEQ ID NO: 8120 - RNA, 19 nt, synthetic construct
  source 1..19: mol_type = other RNA
ccacacggtgcgcacagcc

SEQ ID NO: 8121 - RNA, 19 nt, synthetic construct
  source 1..19: mol_type = other RNA
cacacggtgcgcacagcct

SEQ ID NO: 8122 - RNA, 19 nt, synthetic construct
  source 1..19: mol_type = other RNA
gccttccacggggacttcc

SEQ ID NO: 8123 - RNA, 19 nt, synthetic construct
  source 1..19: mol_type = other RNA
ccctcaccctagcagcagg

SEQ ID NO: 8124 - RNA, 19 nt, synthetic construct
  source 1..19: mol_type = other RNA
caccctagcagcaggacca

SEQ ID NO: 8125 - RNA, 19 nt, synthetic construct
  source 1..19: mol_type = other RNA
accctagcagcaggaccac

SEQ ID NO: 8126 - RNA, 19 nt, synthetic construct
  source 1..19: mol_type = other RNA
ctccagggacgaccacccc

SEQ ID NO: 8127 - RNA, 19 nt, synthetic construct
  source 1..19: mol_type = other RNA
cggccggaggggccgtctg

SEQ ID NO: 8128 - RNA, 19 nt, synthetic construct
  source 1..19: mol_type = other RNA
ggccggaggggccgtctgt

SEQ ID NO: 8129 - RNA, 19 nt, synthetic construct
  source 1..19: mol_type = other RNA
caccagctctacggccacg

SEQ ID NO: 8130 - RNA, 19 nt, synthetic construct
  source 1..19: mol_type = other RNA
accagttccatgtccaccc

SEQ ID NO: 8131 - RNA, 19 nt, synthetic construct
  source 1..19: mol_type = other RNA
cagttccatgtccaccccc

SEQ ID NO: 8132 - RNA, 19 nt, synthetic construct
  source 1..19: mol_type = other RNA
actgctggcaccctcaaag

SEQ ID NO: 8133 - RNA, 19 nt, synthetic construct
  source 1..19: mol_type = other RNA
cagggactgcaaccgccct

SEQ ID NO: 8134 - RNA, 19 nt, synthetic construct
  source 1..19: mol_type = other RNA
agggactgcaaccgccctt

SEQ ID NO: 8135 - RNA, 19 nt, synthetic construct
  source 1..19: mol_type = other RNA
gactgcaaccgcccttcca

SEQ ID NO: 8136 - RNA, 19 nt, synthetic construct
  source 1..19: mol_type = other RNA
cagcccagggacggcactc

SEQ ID NO: 8137 - RNA, 19 nt, synthetic construct
  source 1..19: mol_type = other RNA
ccacacggtgcgcacagcc

SEQ ID NO: 8138 - RNA, 19 nt, synthetic construct
  source 1..19: mol_type = other RNA
cacacggtgcgcacagcct

SEQ ID NO: 8139 - RNA, 19 nt, synthetic construct
  source 1..19: mol_type = other RNA
ccctcaccctagcagcagg

SEQ ID NO: 8140 - RNA, 19 nt, synthetic construct
  source 1..19: mol_type = other RNA
caccctagcagcaggacca

SEQ ID NO: 8141 - RNA, 19 nt, synthetic construct
  source 1..19: mol_type = other RNA
accctagcagcaggaccac

SEQ ID NO: 8142 - RNA, 19 nt, synthetic construct
  source 1..19: mol_type = other RNA
ctccagggacgaccacccc

SEQ ID NO: 8143 - RNA, 19 nt, synthetic construct
  source 1..19: mol_type = other RNA
caccagctctacggccacg

SEQ ID NO: 8144 - RNA, 19 nt, synthetic construct
  source 1..19: mol_type = other RNA
actacgactgagtccactg

SEQ ID NO: 8145 - RNA, 19 nt, synthetic construct
  source 1..19: mol_type = other RNA
ggccacgacacccacagtc

SEQ ID NO: 8146 - RNA, 19 nt, synthetic construct
  source 1..19: mol_type = other RNA
cagggactgcaaccgccct

SEQ ID NO: 8147 - RNA, 19 nt, synthetic construct
  source 1..19: mol_type = other RNA
agggactgcaaccgccctt

SEQ ID NO: 8148 - RNA, 19 nt, synthetic construct
  source 1..19: mol_type = other RNA
gactgcaaccgcccttcca

SEQ ID NO: 8149 - RNA, 19 nt, synthetic construct
  source 1..19: mol_type = other RNA
ccacacggtgcgcacagcc

SEQ ID NO: 8150 - RNA, 19 nt, synthetic construct
  source 1..19: mol_type = other RNA
cacacggtgcgcacagcct

SEQ ID NO: 8151 - RNA, 19 nt, synthetic construct
  source 1..19: mol_type = other RNA
gccttccacggggacttcc

SEQ ID NO: 8152 - RNA, 19 nt, synthetic construct
  source 1..19: mol_type = other RNA
ccctcaccctagcagcagg

SEQ ID NO: 8153 - RNA, 19 nt, synthetic construct
  source 1..19: mol_type = other RNA
caccctagcagcaggacca

SEQ ID NO: 8154 - RNA, 19 nt, synthetic construct
  source 1..19: mol_type = other RNA
accctagcagcaggaccac

SEQ ID NO: 8155 - RNA, 19 nt, synthetic construct
  source 1..19: mol_type = other RNA
cggccggaggggccgtctg

SEQ ID NO: 8156 - RNA, 19 nt, synthetic construct
  source 1..19: mol_type = other RNA
ggccggaggggccgtctgt

SEQ ID NO: 8157 - RNA, 19 nt, synthetic construct
  source 1..19: mol_type = other RNA
ggccacgacacccacagtc

SEQ ID NO: 8158 - RNA, 19 nt, synthetic construct
  source 1..19: mol_type = other RNA
cagcccagggacggcactc

SEQ ID NO: 8159 - RNA, 19 nt, synthetic construct
  source 1..19: mol_type = other RNA
gggacgacccggatcctca

SEQ ID NO: 8160 - RNA, 19 nt, synthetic construct
  source 1..19: mol_type = other RNA
gccaagacgtggctggtcc

SEQ ID NO: 8161 - RNA, 19 nt, synthetic construct
  source 1..19: mol_type = other RNA
ggctttgagtacaagagag

SEQ ID NO: 8162 - RNA, 19 nt, synthetic construct
  source 1..19: mol_type = other RNA
tcacgcccgatggccagcc

SEQ ID NO: 8163 - RNA, 19 nt, synthetic construct
  source 1..19: mol_type = other RNA
atcaccttctgcgagggct

SEQ ID NO: 8164 - RNA, 19 nt, synthetic construct
  source 1..19: mol_type = other RNA
ccacgtggatgagtgtggc

SEQ ID NO: 8165 - RNA, 19 nt, synthetic construct
  source 1..19: mol_type = other RNA
gccctggaacaaactaagc

SEQ ID NO: 8166 - RNA, 19 nt, synthetic construct
  source 1..19: mol_type = other RNA
cacgtccggccgctggggc

SEQ ID NO: 8167 - RNA, 19 nt, synthetic construct
  source 1..19: mol_type = other RNA
aggatgggtgccccgagcg

SEQ ID NO: 8168 - RNA, 19 nt, synthetic construct
  source 1..19: mol_type = other RNA
gagcactgccgcgccgcct

SEQ ID NO: 8169 - RNA, 19 nt, synthetic construct
  source 1..19: mol_type = other RNA
gtggagcagagcggggact

SEQ ID NO: 8170 - RNA, 19 nt, synthetic construct
  source 1..19: mol_type = other RNA
aggctgaccccgctccagt

SEQ ID NO: 8171 - RNA, 19 nt, synthetic construct
  source 1..19: mol_type = other RNA
ccccacctgcccgtgtgcc

SEQ ID NO: 8172 - RNA, 19 nt, synthetic construct
  source 1..19: mol_type = other RNA
tacagcccgggcacctcct

SEQ ID NO: 8173 - RNA, 19 nt, synthetic construct
  source 1..19: mol_type = other RNA
gagaaactctacgacctgc

SEQ ID NO: 8174 - RNA, 19 nt, synthetic construct
  source 1..19: mol_type = other RNA
ttctgtccaagaaatgtgc

SEQ ID NO: 8175 - RNA, 19 nt, synthetic construct
  source 1..19: mol_type = other RNA
actcatgcaggtgtttgtc

SEQ ID NO: 8176 - RNA, 19 nt, synthetic construct
  source 1..19: mol_type = other RNA
aaccaggctgacgacttca

SEQ ID NO: 8177 - RNA, 19 nt, synthetic construct
  source 1..19: mol_type = other RNA
cgggcgcagccttcgccaa

SEQ ID NO: 8178 - RNA, 19 nt, synthetic construct
  source 1..19: mol_type = other RNA
ggcactggtgctcgcgcct

SEQ ID NO: 8179 - RNA, 19 nt, synthetic construct
  source 1..19: mol_type = other RNA
gccaagggcgtacagctca

SEQ ID NO: 8180 - RNA, 19 nt, synthetic construct
  source 1..19: mol_type = other RNA
gccgcggcctgagtgaggc

SEQ ID NO: 8181 - RNA, 19 nt, synthetic construct
  source 1..19: mol_type = other RNA
ccgcggcctgagtgaggcc

SEQ ID NO: 8182 - RNA, 19 nt, synthetic construct
  source 1..19: mol_type = other RNA
gctcacggcaccgtgctgg

SEQ ID NO: 8183 - RNA, 19 nt, synthetic construct
  source 1..19: mol_type = other RNA
ctggtcatcgagacccacg

SEQ ID NO: 8184 - RNA, 19 nt, synthetic construct
  source 1..19: mol_type = other RNA
gtgtgcctgcgactcgggt

SEQ ID NO: 8185 - RNA, 19 nt, synthetic construct
  source 1..19: mol_type = other RNA
gtgcaagggtccccacagc

SEQ ID NO: 8186 - RNA, 19 nt, synthetic construct
  source 1..19: mol_type = other RNA
acaggacctacagctacca

SEQ ID NO: 8187 - RNA, 19 nt, synthetic construct
  source 1..19: mol_type = other RNA
cctacagctaccaggacgt

SEQ ID NO: 8188 - RNA, 19 nt, synthetic construct
  source 1..19: mol_type = other RNA
tccagccacaacgccattc

SEQ ID NO: 8189 - RNA, 19 nt, synthetic construct
  source 1..19: mol_type = other RNA
gctggtacaatgggcaccg

SEQ ID NO: 8190 - RNA, 19 nt, synthetic construct
  source 1..19: mol_type = other RNA
gggttctctgctgcgaata

SEQ ID NO: 8191 - RNA, 19 nt, synthetic construct
  source 1..19: mol_type = other RNA
cgctggagggcacttatgc

SEQ ID NO: 8192 - RNA, 19 nt, synthetic construct
  source 1..19: mol_type = other RNA
tggagggcacttatgccag

SEQ ID NO: 8193 - RNA, 19 nt, synthetic construct
  source 1..19: mol_type = other RNA
gagagcttccccaactgga

SEQ ID NO: 8194 - RNA, 19 nt, synthetic construct
  source 1..19: mol_type = other RNA
tccccaactggaccctggc

SEQ ID NO: 8195 - RNA, 19 nt, synthetic construct
  source 1..19: mol_type = other RNA
agcagtccccaccctctca

SEQ ID NO: 8196 - RNA, 19 nt, synthetic construct
  source 1..19: mol_type = other RNA
cacgggaggccccacgacg

SEQ ID NO: 8197 - RNA, 19 nt, synthetic construct
  source 1..19: mol_type = other RNA
cgggaggccccacgacgcc

SEQ ID NO: 8198 - RNA, 19 nt, synthetic construct
  source 1..19: mol_type = other RNA
cggggagcttgggcacatg

SEQ ID NO: 8199 - RNA, 19 nt, synthetic construct
  source 1..19: mol_type = other RNA
ctcaggccgagaccagcac

SEQ ID NO: 8200 - RNA, 19 nt, synthetic construct
  source 1..19: mol_type = other RNA
cacgcccaggacagagacg

SEQ ID NO: 8201 - RNA, 19 nt, synthetic construct
  source 1..19: mol_type = other RNA
cacaactggggccaccggc

SEQ ID NO: 8202 - RNA, 19 nt, synthetic construct
  source 1..19: mol_type = other RNA
caggaacagctcacactac

SEQ ID NO: 8203 - RNA, 19 nt, synthetic construct
  source 1..19: mol_type = other RNA
acggcactcacgcctccag

SEQ ID NO: 8204 - RNA, 19 nt, synthetic construct
  source 1..19: mol_type = other RNA
gtggtactcccccatcact

SEQ ID NO: 8205 - RNA, 19 nt, synthetic construct
  source 1..19: mol_type = other RNA
tactcccccatcactgacc

SEQ ID NO: 8206 - RNA, 19 nt, synthetic construct
  source 1..19: mol_type = other RNA
cacacacccccagtgccga

SEQ ID NO: 8207 - RNA, 19 nt, synthetic construct
  source 1..19: mol_type = other RNA
gtgacttcccacaccctag

SEQ ID NO: 8208 - RNA, 19 nt, synthetic construct
  source 1..19: mol_type = other RNA
cagcaagacccgcacctcg

SEQ ID NO: 8209 - RNA, 19 nt, synthetic construct
  source 1..19: mol_type = other RNA
gtcagagtggctggactac

SEQ ID NO: 8210 - RNA, 19 nt, synthetic construct
  source 1..19: mol_type = other RNA
agccactacgactgagtcc

SEQ ID NO: 8211 - RNA, 19 nt, synthetic construct
  source 1..19: mol_type = other RNA
ggatcctcacagagccgag

SEQ ID NO: 8212 - RNA, 19 nt, synthetic construct
  source 1..19: mol_type = other RNA
caccggatccacggccacc

SEQ ID NO: 8213 - RNA, 19 nt, synthetic construct
  source 1..19: mol_type = other RNA
accggatccacggccaccg

SEQ ID NO: 8214 - RNA, 19 nt, synthetic construct
  source 1..19: mol_type = other RNA
ggcaactgctggcacccca

SEQ ID NO: 8215 - RNA, 19 nt, synthetic construct
  source 1..19: mol_type = other RNA
ggcaccccacatgtgagca

SEQ ID NO: 8216 - RNA, 19 nt, synthetic construct
  source 1..19: mol_type = other RNA
caggaacagctcacactac

SEQ ID NO: 8217 - RNA, 19 nt, synthetic construct
  source 1..19: mol_type = other RNA
gtggtactcccccatcact

SEQ ID NO: 8218 - RNA, 19 nt, synthetic construct
  source 1..19: mol_type = other RNA
tactcccccatcactgacc

SEQ ID NO: 8219 - RNA, 19 nt, synthetic construct
  source 1..19: mol_type = other RNA
cacacacccccagtgccga

SEQ ID NO: 8220 - RNA, 19 nt, synthetic construct
  source 1..19: mol_type = other RNA
acttcggccacctcaggca

SEQ ID NO: 8221 - RNA, 19 nt, synthetic construct
  source 1..19: mol_type = other RNA
cagagccttccacggggac

SEQ ID NO: 8222 - RNA, 19 nt, synthetic construct
  source 1..19: mol_type = other RNA
cagcaagacccgcacctcg

SEQ ID NO: 8223 - RNA, 19 nt, synthetic construct
  source 1..19: mol_type = other RNA
gtcagagtggctggactac

SEQ ID NO: 8224 - RNA, 19 nt, synthetic construct
  source 1..19: mol_type = other RNA
accagctctacggccacgc

SEQ ID NO: 8225 - RNA, 19 nt, synthetic construct
  source 1..19: mol_type = other RNA
ccactggatccacggccat

SEQ ID NO: 8226 - RNA, 19 nt, synthetic construct
  source 1..19: mol_type = other RNA
gccatcccgtcctccaccc

SEQ ID NO: 8227 - RNA, 19 nt, synthetic construct
  source 1..19: mol_type = other RNA
ccatcccgtcctccacccc

SEQ ID NO: 8228 - RNA, 19 nt, synthetic construct
  source 1..19: mol_type = other RNA
caccggatccacggccacc

SEQ ID NO: 8229 - RNA, 19 nt, synthetic construct
  source 1..19: mol_type = other RNA
accggatccacggccaccg

SEQ ID NO: 8230 - RNA, 19 nt, synthetic construct
  source 1..19: mol_type = other RNA
caggaacagctcacactac

SEQ ID NO: 8231 - RNA, 19 nt, synthetic construct
  source 1..19: mol_type = other RNA
acggcactcacgcctccag

SEQ ID NO: 8232 - RNA, 19 nt, synthetic construct
  source 1..19: mol_type = other RNA
gtggtactcccccatcact

SEQ ID NO: 8233 - RNA, 19 nt, synthetic construct
  source 1..19: mol_type = other RNA
tactcccccatcactgacc

SEQ ID NO: 8234 - RNA, 19 nt, synthetic construct
  source 1..19: mol_type = other RNA
cacacacccccagtgccga

SEQ ID NO: 8235 - RNA, 19 nt, synthetic construct
  source 1..19: mol_type = other RNA
cagcaagacccgcacctcg

SEQ ID NO: 8236 - RNA, 19 nt, synthetic construct
  source 1..19: mol_type = other RNA
gtcagagtggctggactac

SEQ ID NO: 8237 - RNA, 19 nt, synthetic construct
  source 1..19: mol_type = other RNA
cggaggggcagtctgtgag

SEQ ID NO: 8238 - RNA, 19 nt, synthetic construct
  source 1..19: mol_type = other RNA
accagctctacggccacgc

SEQ ID NO: 8239 - RNA, 19 nt, synthetic construct
  source 1..19: mol_type = other RNA
agccactacgactgagtcc

SEQ ID NO: 8240 - RNA, 19 nt, synthetic construct
  source 1..19: mol_type = other RNA
ggatcctcacagagccgag

SEQ ID NO: 8241 - RNA, 19 nt, synthetic construct
  source 1..19: mol_type = other RNA
caccggatccacggccacc

SEQ ID NO: 8242 - RNA, 19 nt, synthetic construct
  source 1..19: mol_type = other RNA
accggatccacggccaccg

SEQ ID NO: 8243 - RNA, 19 nt, synthetic construct
  source 1..19: mol_type = other RNA
ggcaactgctggcacccca

SEQ ID NO: 8244 - RNA, 19 nt, synthetic construct
  source 1..19: mol_type = other RNA
ggcaccccacatgtgagca

SEQ ID NO: 8245 - RNA, 19 nt, synthetic construct
  source 1..19: mol_type = other RNA
caggaacagctcacactac

SEQ ID NO: 8246 - RNA, 19 nt, synthetic construct
  source 1..19: mol_type = other RNA
gtggtactcccccatcact

SEQ ID NO: 8247 - RNA, 19 nt, synthetic construct
  source 1..19: mol_type = other RNA
atcaccacggccactacga

SEQ ID NO: 8248 - RNA, 19 nt, synthetic construct
  source 1..19: mol_type = other RNA
cacacacccccagtgccga

SEQ ID NO: 8249 - RNA, 19 nt, synthetic construct
  source 1..19: mol_type = other RNA
acttcggccacctcaggca

SEQ ID NO: 8250 - RNA, 19 nt, synthetic construct
  source 1..19: mol_type = other RNA
cagagccttccacggggac

SEQ ID NO: 8251 - RNA, 19 nt, synthetic construct
  source 1..19: mol_type = other RNA
cagcaagacccgcacctcg

SEQ ID NO: 8252 - RNA, 19 nt, synthetic construct
  source 1..19: mol_type = other RNA
gtcagagtggctggactac

SEQ ID NO: 8253 - RNA, 19 nt, synthetic construct
  source 1..19: mol_type = other RNA
agggccaccagttccacgt

SEQ ID NO: 8254 - RNA, 19 nt, synthetic construct
  source 1..19: mol_type = other RNA
ggatcctcacagagccgag

SEQ ID NO: 8255 - RNA, 19 nt, synthetic construct
  source 1..19: mol_type = other RNA
caccggatccacggccacc

SEQ ID NO: 8256 - RNA, 19 nt, synthetic construct
  source 1..19: mol_type = other RNA
accggatccacggccaccg

SEQ ID NO: 8257 - RNA, 19 nt, synthetic construct
  source 1..19: mol_type = other RNA
ggcaactgctggcacccca

SEQ ID NO: 8258 - RNA, 19 nt, synthetic construct
  source 1..19: mol_type = other RNA
ggcaccccacatgtgagca

SEQ ID NO: 8259 - RNA, 19 nt, synthetic construct
  source 1..19: mol_type = other RNA
agggactgcaactgccctt

SEQ ID NO: 8260 - RNA, 19 nt, synthetic construct
  source 1..19: mol_type = other RNA
caggaacagctcacactac

SEQ ID NO: 8261 - RNA, 19 nt, synthetic construct
  source 1..19: mol_type = other RNA
acggcactcacgcctccag

SEQ ID NO: 8262 - RNA, 19 nt, synthetic construct
  source 1..19: mol_type = other RNA
caccgccagagtgctgacc

SEQ ID NO: 8263 - RNA, 19 nt, synthetic construct
  source 1..19: mol_type = other RNA
gtggtactcccccatcact

SEQ ID NO: 8264 - RNA, 19 nt, synthetic construct
  source 1..19: mol_type = other RNA
tactcccccatcactgacc

SEQ ID NO: 8265 - RNA, 19 nt, synthetic construct
  source 1..19: mol_type = other RNA
gaccgtcccagcacagacc

SEQ ID NO: 8266 - RNA, 19 nt, synthetic construct
  source 1..19: mol_type = other RNA
acaacagccactacaactg

SEQ ID NO: 8267 - RNA, 19 nt, synthetic construct
  source 1..19: mol_type = other RNA
ggatcctcacagagccgag

SEQ ID NO: 8268 - RNA, 19 nt, synthetic construct
  source 1..19: mol_type = other RNA
ttcccagctcgtccaccgt

SEQ ID NO: 8269 - RNA, 19 nt, synthetic construct
  source 1..19: mol_type = other RNA
cgcagtgtgcaatcagcac

SEQ ID NO: 8270 - RNA, 19 nt, synthetic construct
  source 1..19: mol_type = other RNA
ccagtgtcctccgccccgc

SEQ ID NO: 8271 - RNA, 19 nt, synthetic construct
  source 1..19: mol_type = other RNA
cggctcccactattccacc

SEQ ID NO: 8272 - RNA, 19 nt, synthetic construct
  source 1..19: mol_type = other RNA
acaccttccggggcaactg

SEQ ID NO: 8273 - RNA, 19 nt, synthetic construct
  source 1..19: mol_type = other RNA
atccatgcacgctttggga

SEQ ID NO: 8274 - RNA, 19 nt, synthetic construct
  source 1..19: mol_type = other RNA
ctgtcaccatggtgcatgg

SEQ ID NO: 8275 - RNA, 19 nt, synthetic construct
  source 1..19: mol_type = other RNA
gtcaccttcaatggccaag

SEQ ID NO: 8276 - RNA, 19 nt, synthetic construct
  source 1..19: mol_type = other RNA
gtgccacaaccttgtgccc

SEQ ID NO: 8277 - RNA, 19 nt, synthetic construct
  source 1..19: mol_type = other RNA
agccatgcggccccataca

SEQ ID NO: 8278 - RNA, 19 nt, synthetic construct
  source 1..19: mol_type = other RNA
atcctcttcaacgcacaca

SEQ ID NO: 8279 - RNA, 19 nt, synthetic construct
  source 1..19: mol_type = other RNA
ctgccacatgtgtacctgc

SEQ ID NO: 8280 - RNA, 19 nt, synthetic construct
  source 1..19: mol_type = other RNA
gacccaacggtgcaatgtc

SEQ ID NO: 8281 - RNA, 19 nt, synthetic construct
  source 1..19: mol_type = other RNA
ttgagtacaagagagtggc

SEQ ID NO: 8282 - RNA, 19 nt, synthetic construct
  source 1..19: mol_type = other RNA
agtacaagagagtggccgg

SEQ ID NO: 8283 - RNA, 19 nt, synthetic construct
  source 1..19: mol_type = other RNA
gagtggccgggcagtgctg

SEQ ID NO: 8284 - RNA, 19 nt, synthetic construct
  source 1..19: mol_type = other RNA
ccagtccagctgaatgaaa

SEQ ID NO: 8285 - RNA, 19 nt, synthetic construct
  source 1..19: mol_type = other RNA
attgtctgatcatgaaaac

SEQ ID NO: 8286 - RNA, 19 nt, synthetic construct
  source 1..19: mol_type = other RNA
cctggaacaaactaagcat

SEQ ID NO: 8287 - RNA, 19 nt, synthetic construct
  source 1..19: mol_type = other RNA
gattccagctggccacgtc

SEQ ID NO: 8288 - RNA, 19 nt, synthetic construct
  source 1..19: mol_type = other RNA
gcggccgcctgtccatgcc

SEQ ID NO: 8289 - RNA, 19 nt, synthetic construct
  source 1..19: mol_type = other RNA
catgcgtgtggacattcct

SEQ ID NO: 8290 - RNA, 19 nt, synthetic construct
  source 1..19: mol_type = other RNA
ccccggtgtctagcacacc

SEQ ID NO: 8291 - RNA, 19 nt, synthetic construct
  source 1..19: mol_type = other RNA
cagagccgagcactacagc

SEQ ID NO: 8292 - RNA, 19 nt, synthetic construct
  source 1..19: mol_type = other RNA
cagagccgagcactacagc

SEQ ID NO: 8293 - RNA, 19 nt, synthetic construct
  source 1..19: mol_type = other RNA
cagagccgagcactacagc

SEQ ID NO: 8294 - RNA, 19 nt, synthetic construct
  source 1..19: mol_type = other RNA
tggggacgacccggatcct

SEQ ID NO: 8295 - RNA, 19 nt, synthetic construct
  source 1..19: mol_type = other RNA
gcgtgttcatccgactgca

SEQ ID NO: 8296 - RNA, 19 nt, synthetic construct
  source 1..19: mol_type = other RNA
gctgcccaccccgtgggtg

SEQ ID NO: 8297 - RNA, 19 nt, synthetic construct
  source 1..19: mol_type = other RNA
aggacagagacgacaatga

SEQ ID NO: 8298 - RNA, 19 nt, synthetic construct
  source 1..19: mol_type = other RNA
caaccccgccaccgaccac

SEQ ID NO: 8299 - RNA, 19 nt, synthetic construct
  source 1..19: mol_type = other RNA
cacagaccagtggtactcc

SEQ ID NO: 8300 - RNA, 19 nt, synthetic construct
  source 1..19: mol_type = other RNA
cacagaccagtggtactcc

SEQ ID NO: 8301 - RNA, 19 nt, synthetic construct
  source 1..19: mol_type = other RNA
cacagaccagtggtactcc

SEQ ID NO: 8302 - RNA, 19 nt, synthetic construct
  source 1..19: mol_type = other RNA
cacagaccagtggtactcc

SEQ ID NO: 8303 - RNA, 19 nt, synthetic construct
  source 1..19: mol_type = other RNA
cacagaccagtggtactcc

SEQ ID NO: 8304 - RNA, 19 nt, synthetic construct
  source 1..19: mol_type = other RNA
acctgcatggtgactgcag

SEQ ID NO: 8305 - RNA, 19 nt, synthetic construct
  source 1..19: mol_type = other RNA
gctggtgccactcatgcag

SEQ ID NO: 8306 - RNA, 19 nt, synthetic construct
  source 1..19: mol_type = other RNA
cagtggtactcccccatca

SEQ ID NO: 8307 - RNA, 19 nt, synthetic construct
  source 1..19: mol_type = other RNA
cctggtctgcaggaaccgt

SEQ ID NO: 8308 - RNA, 19 nt, synthetic construct
  source 1..19: mol_type = other RNA
actccagagactgtccaca

SEQ ID NO: 8309 - RNA, 19 nt, synthetic construct
  source 1..19: mol_type = other RNA
cagtggtactcccccatca

SEQ ID NO: 8310 - RNA, 19 nt, synthetic construct
  source 1..19: mol_type = other RNA
cctggtctgcaggaaccgt

SEQ ID NO: 8311 - RNA, 19 nt, synthetic construct
  source 1..19: mol_type = other RNA
actccagagactgtccaca

SEQ ID NO: 8312 - RNA, 19 nt, synthetic construct
  source 1..19: mol_type = other RNA
cagtggtactcccccatca

SEQ ID NO: 8313 - RNA, 19 nt, synthetic construct
  source 1..19: mol_type = other RNA
cctggtctgcaggaaccgt

SEQ ID NO: 8314 - RNA, 19 nt, synthetic construct
  source 1..19: mol_type = other RNA
cagtggtactcccccatca

SEQ ID NO: 8315 - RNA, 19 nt, synthetic construct
  source 1..19: mol_type = other RNA
cctggtctgcaggaaccgt

SEQ ID NO: 8316 - RNA, 19 nt, synthetic construct
  source 1..19: mol_type = other RNA
actccagagactgtccaca

SEQ ID NO: 8317 - RNA, 19 nt, synthetic construct
  source 1..19: mol_type = other RNA
cagtggtactcccccatca

SEQ ID NO: 8318 - RNA, 19 nt, synthetic construct
  source 1..19: mol_type = other RNA
gaacttcgacgacaatgcc

SEQ ID NO: 8319 - RNA, 19 nt, synthetic construct
  source 1..19: mol_type = other RNA
tctccacctatgatgagaa

SEQ ID NO: 8320 - RNA, 19 nt, synthetic construct
  source 1..19: mol_type = other RNA
atcctccaagaggggacct

SEQ ID NO: 8321 - RNA, 19 nt, synthetic construct
  source 1..19: mol_type = other RNA
agagccttccacggggact

SEQ ID NO: 8322 - RNA, 19 nt, synthetic construct
  source 1..19: mol_type = other RNA
agagccttccacggggact

SEQ ID NO: 8323 - RNA, 19 nt, synthetic construct
  source 1..19: mol_type = other RNA
caatccacacctcctctac

SEQ ID NO: 8324 - RNA, 19 nt, synthetic construct
  source 1..19: mol_type = other RNA
gtgcatctgcagcatgtgg

SEQ ID NO: 8325 - RNA, 19 nt, synthetic construct
  source 1..19: mol_type = other RNA
gtacaagagagtggccggg

SEQ ID NO: 8326 - RNA, 19 nt, synthetic construct
  source 1..19: mol_type = other RNA
tgggtgccccgagcgcgtg

SEQ ID NO: 8327 - RNA, 19 nt, synthetic construct
  source 1..19: mol_type = other RNA
ggcacctccttcaacacca

SEQ ID NO: 8328 - RNA, 19 nt, synthetic construct
  source 1..19: mol_type = other RNA
gcggtgacgctcagcctgg

SEQ ID NO: 8329 - RNA, 19 nt, synthetic construct
  source 1..19: mol_type = other RNA
ccagagctgtaactgcaca

SEQ ID NO: 8330 - RNA, 19 nt, synthetic construct
  source 1..19: mol_type = other RNA
ccggtcgacggcggccctc

SEQ ID NO: 8331 - RNA, 19 nt, synthetic construct
  source 1..19: mol_type = other RNA
ccaacacgctcagcccttc

SEQ ID NO: 8332 - RNA, 19 nt, synthetic construct
  source 1..19: mol_type = other RNA
ctccaccctgagaacagct

SEQ ID NO: 8333 - RNA, 19 nt, synthetic construct
  source 1..19: mol_type = other RNA
ctccactccagagactgtc

SEQ ID NO: 8334 - RNA, 19 nt, synthetic construct
  source 1..19: mol_type = other RNA
aagtgctgaccagcacggc

SEQ ID NO: 8335 - RNA, 19 nt, synthetic construct
  source 1..19: mol_type = other RNA
cacagagcccagcactaca

SEQ ID NO: 8336 - RNA, 19 nt, synthetic construct
  source 1..19: mol_type = other RNA
aagtgctgaccagcacggc

SEQ ID NO: 8337 - RNA, 19 nt, synthetic construct
  source 1..19: mol_type = other RNA
tactcccccatcactgatc

SEQ ID NO: 8338 - RNA, 19 nt, synthetic construct
  source 1..19: mol_type = other RNA
ctccactccagagactgtc

SEQ ID NO: 8339 - RNA, 19 nt, synthetic construct
  source 1..19: mol_type = other RNA
cagtgctgaccagcacggc

SEQ ID NO: 8340 - RNA, 19 nt, synthetic construct
  source 1..19: mol_type = other RNA
tgcctccacggttcccagc

SEQ ID NO: 8341 - RNA, 19 nt, synthetic construct
  source 1..19: mol_type = other RNA
ttgggaatctcagcctcta

SEQ ID NO: 8342 - RNA, 19 nt, synthetic construct
  source 1..19: mol_type = other RNA
attcctgccctgggcgtga

SEQ ID NO: 8343 - RNA, 19 nt, synthetic construct
  source 1..19: mol_type = other RNA
ctgcaacaatactacctgt

SEQ ID NO: 8344 - RNA, 19 nt, synthetic construct
  source 1..19: mol_type = other RNA
gggctttgagtacaagaga

SEQ ID NO: 8345 - RNA, 19 nt, synthetic construct
  source 1..19: mol_type = other RNA
gagggtggagtccatttgc

SEQ ID NO: 8346 - RNA, 19 nt, synthetic construct
  source 1..19: mol_type = other RNA
ccactacgactgagtccac

SEQ ID NO: 8347 - RNA, 19 nt, synthetic construct
  source 1..19: mol_type = other RNA
ccactacgactgagtccac

SEQ ID NO: 8348 - RNA, 19 nt, synthetic construct
  source 1..19: mol_type = other RNA
cgggcaactgctggcaccc

SEQ ID NO: 8349 - RNA, 19 nt, synthetic construct
  source 1..19: mol_type = other RNA
cccgcagccccggtgtcta

SEQ ID NO: 8350 - RNA, 19 nt, synthetic construct
  source 1..19: mol_type = other RNA
cctggtcatcgagacccac

SEQ ID NO: 8351 - RNA, 19 nt, synthetic construct
  source 1..19: mol_type = other RNA
gatcctcttcaacgcacac

SEQ ID NO: 8352 - RNA, 19 nt, synthetic construct
  source 1..19: mol_type = other RNA
gcgcgtgccggacgctggt

SEQ ID NO: 8353 - RNA, 19 nt, synthetic construct
  source 1..19: mol_type = other RNA
tggtgccactcatgcaggt

SEQ ID NO: 8354 - RNA, 19 nt, synthetic construct
  source 1..19: mol_type = other RNA
cggccaccacaaccggggc

SEQ ID NO: 8355 - RNA, 19 nt, synthetic construct
  source 1..19: mol_type = other RNA
cggccaccacaaccggggc

SEQ ID NO: 8356 - RNA, 19 nt, synthetic construct
  source 1..19: mol_type = other RNA
agctgcgacaggcaaggcg

SEQ ID NO: 8357 - RNA, 19 nt, synthetic construct
  source 1..19: mol_type = other RNA
accagtggtactcccccat

SEQ ID NO: 8358 - RNA, 19 nt, synthetic construct
  source 1..19: mol_type = other RNA
accagtggtactcccccat

SEQ ID NO: 8359 - RNA, 19 nt, synthetic construct
  source 1..19: mol_type = other RNA
accagtggtactcccccat

SEQ ID NO: 8360 - RNA, 19 nt, synthetic construct
  source 1..19: mol_type = other RNA
accagtggtactcccccat

SEQ ID NO: 8361 - RNA, 19 nt, synthetic construct
  source 1..19: mol_type = other RNA
accagtggtactcccccat

SEQ ID NO: 8362 - RNA, 19 nt, synthetic construct
  source 1..19: mol_type = other RNA
ggacgacccggatcctcac

SEQ ID NO: 8363 - RNA, 19 nt, synthetic construct
  source 1..19: mol_type = other RNA
ccaccttccgctgcagacc

SEQ ID NO: 8364 - RNA, 19 nt, synthetic construct
  source 1..19: mol_type = other RNA
ggccttcaacgagttctat

SEQ ID NO: 8365 - RNA, 19 nt, synthetic construct
  source 1..19: mol_type = other RNA
tatgcccacaacgccaggc

SEQ ID NO: 8366 - RNA, 19 nt, synthetic construct
  source 1..19: mol_type = other RNA
gactgcaaccacccttcca

SEQ ID NO: 8367 - RNA, 19 nt, synthetic construct
  source 1..19: mol_type = other RNA
aactccagggacaactccc

SEQ ID NO: 8368 - RNA, 19 nt, synthetic construct
  source 1..19: mol_type = other RNA
gactgcaaccacccttcca

SEQ ID NO: 8369 - RNA, 19 nt, synthetic construct
  source 1..19: mol_type = other RNA
gactgcaaccacccttcca

SEQ ID NO: 8370 - RNA, 19 nt, synthetic construct
  source 1..19: mol_type = other RNA
gtgactgcagctacgttct

SEQ ID NO: 8371 - RNA, 19 nt, synthetic construct
  source 1..19: mol_type = other RNA
cactcatgcaggtgtttgt

SEQ ID NO: 8372 - RNA, 19 nt, synthetic construct
  source 1..19: mol_type = other RNA
cagaaaagcacagggtgtg

SEQ ID NO: 8373 - RNA, 19 nt, synthetic construct
  source 1..19: mol_type = other RNA
agaaaagcacagggtgtgc

SEQ ID NO: 8374 - RNA, 19 nt, synthetic construct
  source 1..19: mol_type = other RNA
gctcggcgggcacccctgg

SEQ ID NO: 8375 - RNA, 19 nt, synthetic construct
  source 1..19: mol_type = other RNA
tatgggtgaccccgagcat

SEQ ID NO: 8376 - RNA, 19 nt, synthetic construct
  source 1..19: mol_type = other RNA
cagaccaccacacccacgg

SEQ ID NO: 8377 - RNA, 19 nt, synthetic construct
  source 1..19: mol_type = other RNA
gggcgatccctgcccccca

SEQ ID NO: 8378 - RNA, 19 nt, synthetic construct
  source 1..19: mol_type = other RNA
cagaccaccacacccacgg

SEQ ID NO: 8379 - RNA, 19 nt, synthetic construct
  source 1..19: mol_type = other RNA
tcaactccagggacaacac

SEQ ID NO: 8380 - RNA, 19 nt, synthetic construct
  source 1..19: mol_type = other RNA
cctcctccagtccaaggac

SEQ ID NO: 8381 - RNA, 19 nt, synthetic construct
  source 1..19: mol_type = other RNA
cagaccaccacacccacgg

SEQ ID NO: 8382 - RNA, 19 nt, synthetic construct
  source 1..19: mol_type = other RNA
cagaccaccacacccacgg

SEQ ID NO: 8383 - RNA, 19 nt, synthetic construct
  source 1..19: mol_type = other RNA
tcaactccagggacaacac

SEQ ID NO: 8384 - RNA, 19 nt, synthetic construct
  source 1..19: mol_type = other RNA
cctcctccagtccaaggac

SEQ ID NO: 8385 - RNA, 19 nt, synthetic construct
  source 1..19: mol_type = other RNA
cagaccaccacacccacgg

SEQ ID NO: 8386 - RNA, 19 nt, synthetic construct
  source 1..19: mol_type = other RNA
tcaactccagggacaacac

SEQ ID NO: 8387 - RNA, 19 nt, synthetic construct
  source 1..19: mol_type = other RNA
cctcctccagtccaaggac

SEQ ID NO: 8388 - RNA, 19 nt, synthetic construct
  source 1..19: mol_type = other RNA
tggggaccacccgcacccc

SEQ ID NO: 8389 - RNA, 19 nt, synthetic construct
  source 1..19: mol_type = other RNA
tttcccggggagcggtggg

SEQ ID NO: 8390 - RNA, 19 nt, synthetic construct
  source 1..19: mol_type = other RNA
gtacaatggcaccttctac

SEQ ID NO: 8391 - RNA, 19 nt, synthetic construct
  source 1..19: mol_type = other RNA
tacaatggcaccttctacg

SEQ ID NO: 8392 - RNA, 19 nt, synthetic construct
  source 1..19: mol_type = other RNA
ctggccacgtccggccgct

SEQ ID NO: 8393 - RNA, 19 nt, synthetic construct
  source 1..19: mol_type = other RNA
ggaacttcgacgacaatgc

SEQ ID NO: 8394 - RNA, 19 nt, synthetic construct
  source 1..19: mol_type = other RNA
cacggccaccacaaccggg

SEQ ID NO: 8395 - RNA, 19 nt, synthetic construct
  source 1..19: mol_type = other RNA
cacggccaccacaaccggg

SEQ ID NO: 8396 - RNA, 19 nt, synthetic construct
  source 1..19: mol_type = other RNA
ctatgatgagaaactctac

SEQ ID NO: 8397 - RNA, 19 nt, synthetic construct
  source 1..19: mol_type = other RNA
caccacggccacgacaccc

SEQ ID NO: 8398 - RNA, 19 nt, synthetic construct
  source 1..19: mol_type = other RNA
caccacggccacgacaccc

SEQ ID NO: 8399 - RNA, 19 nt, synthetic construct
  source 1..19: mol_type = other RNA
caccacggccacgacaccc

SEQ ID NO: 8400 - RNA, 19 nt, synthetic construct
  source 1..19: mol_type = other RNA
tgccggccggcaactgcac

SEQ ID NO: 8401 - RNA, 19 nt, synthetic construct
  source 1..19: mol_type = other RNA
ccaaggactgcaaccaccc

SEQ ID NO: 8402 - RNA, 19 nt, synthetic construct
  source 1..19: mol_type = other RNA
ccaaggactgcaaccaccc

SEQ ID NO: 8403 - RNA, 19 nt, synthetic construct
  source 1..19: mol_type = other RNA
ccaaggactgcaaccaccc

SEQ ID NO: 8404 - RNA, 19 nt, synthetic construct
  source 1..19: mol_type = other RNA
agccactggatccacggcc

SEQ ID NO: 8405 - RNA, 19 nt, synthetic construct
  source 1..19: mol_type = other RNA
aggcagagagggtaccagg

SEQ ID NO: 8406 - RNA, 19 nt, synthetic construct
  source 1..19: mol_type = other RNA
acggccatcccgtcctcca

SEQ ID NO: 8407 - RNA, 19 nt, synthetic construct
  source 1..19: mol_type = other RNA
catggatggcggtgccccg

SEQ ID NO: 8408 - RNA, 19 nt, synthetic construct
  source 1..19: mol_type = other RNA
tgccacctttgtggaatac

SEQ ID NO: 8409 - RNA, 19 nt, synthetic construct
  source 1..19: mol_type = other RNA
gagacccacgggatggccg

SEQ ID NO: 8410 - RNA, 19 nt, synthetic construct
  source 1..19: mol_type = other RNA
atggcaacctccagagctc

SEQ ID NO: 8411 - RNA, 19 nt, synthetic construct
  source 1..19: mol_type = other RNA
tgcttaccgccacggccac

SEQ ID NO: 8412 - RNA, 19 nt, synthetic construct
  source 1..19: mol_type = other RNA
gttctatggcaacaccctc

SEQ ID NO: 8413 - RNA, 19 nt, synthetic construct
  source 1..19: mol_type = other RNA
ctcaactcctgggacaact

SEQ ID NO: 8414 - RNA, 19 nt, synthetic construct
  source 1..19: mol_type = other RNA
cctgggacaactcccatcc

SEQ ID NO: 8415 - RNA, 19 nt, synthetic construct
  source 1..19: mol_type = other RNA
gttctatggcaacaccctc

SEQ ID NO: 8416 - RNA, 19 nt, synthetic construct
  source 1..19: mol_type = other RNA
agcactcgactccagccct

SEQ ID NO: 8417 - RNA, 19 nt, synthetic construct
  source 1..19: mol_type = other RNA
gctctacggccacgccctc

SEQ ID NO: 8418 - RNA, 19 nt, synthetic construct
  source 1..19: mol_type = other RNA
caactgctggcaccctcaa

SEQ ID NO: 8419 - RNA, 19 nt, synthetic construct
  source 1..19: mol_type = other RNA
gttctatggcaacaccctc

SEQ ID NO: 8420 - RNA, 19 nt, synthetic construct
  source 1..19: mol_type = other RNA
agcactcgactccagccct

SEQ ID NO: 8421 - RNA, 19 nt, synthetic construct
  source 1..19: mol_type = other RNA
gctctacggccacgccctc

SEQ ID NO: 8422 - RNA, 19 nt, synthetic construct
  source 1..19: mol_type = other RNA
gttctatggcaacaccctc

SEQ ID NO: 8423 - RNA, 19 nt, synthetic construct
  source 1..19: mol_type = other RNA
agcactcgactccagccct

SEQ ID NO: 8424 - RNA, 19 nt, synthetic construct
  source 1..19: mol_type = other RNA
tgcttaccgccacggccac

SEQ ID NO: 8425 - RNA, 19 nt, synthetic construct
  source 1..19: mol_type = other RNA
gttctatggcaacaccctc

SEQ ID NO: 8426 - RNA, 19 nt, synthetic construct
  source 1..19: mol_type = other RNA
acccggatcctcactgagc

SEQ ID NO: 8427 - RNA, 19 nt, synthetic construct
  source 1..19: mol_type = other RNA
tcctccactctgggaacag

SEQ ID NO: 8428 - RNA, 19 nt, synthetic construct
  source 1..19: mol_type = other RNA
caactctaggaaccagagc

SEQ ID NO: 8429 - RNA, 19 nt, synthetic construct
  source 1..19: mol_type = other RNA
caagagagtggccgggcag

SEQ ID NO: 8430 - RNA, 19 nt, synthetic construct
  source 1..19: mol_type = other RNA
agagagtggccgggcagtg

SEQ ID NO: 8431 - RNA, 19 nt, synthetic construct
  source 1..19: mol_type = other RNA
tccagctgaatgaaacctg

SEQ ID NO: 8432 - RNA, 19 nt, synthetic construct
  source 1..19: mol_type = other RNA
gtgtacctctgtgaggctg

SEQ ID NO: 8433 - RNA, 19 nt, synthetic construct
  source 1..19: mol_type = other RNA
cggtgcccttgcactgtcc

SEQ ID NO: 8434 - RNA, 19 nt, synthetic construct
  source 1..19: mol_type = other RNA
cacacacccgtggcttccc

SEQ ID NO: 8435 - RNA, 19 nt, synthetic construct
  source 1..19: mol_type = other RNA
ccctgccacggccggagcg

SEQ ID NO: 8436 - RNA, 19 nt, synthetic construct
  source 1..19: mol_type = other RNA
ctgggagaatgcagggcac

SEQ ID NO: 8437 - RNA, 19 nt, synthetic construct
  source 1..19: mol_type = other RNA
tttgagacgtttgaaaacc

SEQ ID NO: 8438 - RNA, 19 nt, synthetic construct
  source 1..19: mol_type = other RNA
aggagggcgtcttcaagat

SEQ ID NO: 8439 - RNA, 19 nt, synthetic construct
  source 1..19: mol_type = other RNA
cgcacagcctggacttcgg

SEQ ID NO: 8440 - RNA, 19 nt, synthetic construct
  source 1..19: mol_type = other RNA
cgcacagcctggacttcgg

SEQ ID NO: 8441 - RNA, 19 nt, synthetic construct
  source 1..19: mol_type = other RNA
cgcacagcctggacttcgg

SEQ ID NO: 8442 - RNA, 19 nt, synthetic construct
  source 1..19: mol_type = other RNA
cgcacagcctggacttcgg

SEQ ID NO: 8443 - RNA, 19 nt, synthetic construct
  source 1..19: mol_type = other RNA
aagggccaccagttccacg

SEQ ID NO: 8444 - RNA, 19 nt, synthetic construct
  source 1..19: mol_type = other RNA
agggcacaccatggatggc

SEQ ID NO: 8445 - RNA, 19 nt, synthetic construct
  source 1..19: mol_type = other RNA
gccaccacaaccggggcca

SEQ ID NO: 8446 - RNA, 19 nt, synthetic construct
  source 1..19: mol_type = other RNA
gccaccacaaccggggcca

SEQ ID NO: 8447 - RNA, 19 nt, synthetic construct
  source 1..19: mol_type = other RNA
agctgaatgaaacctgggt

SEQ ID NO: 8448 - RNA, 19 nt, synthetic construct
  source 1..19: mol_type = other RNA
ctttgagacgtttgaaaac

SEQ ID NO: 8449 - RNA, 19 nt, synthetic construct
  source 1..19: mol_type = other RNA
cacgggcgatccctgcccc

SEQ ID NO: 8450 - RNA, 19 nt, synthetic construct
  source 1..19: mol_type = other RNA
accccgggccacaccacgg

SEQ ID NO: 8451 - RNA, 19 nt, synthetic construct
  source 1..19: mol_type = other RNA
accccgggccacaccacgg

SEQ ID NO: 8452 - RNA, 19 nt, synthetic construct
  source 1..19: mol_type = other RNA
cacctggggtgacttccac

SEQ ID NO: 8453 - RNA, 19 nt, synthetic construct
  source 1..19: mol_type = other RNA
tatgatgagaaactctacg

SEQ ID NO: 8454 - RNA, 19 nt, synthetic construct
  source 1..19: mol_type = other RNA
cgcggcctgagtgaggccg

SEQ ID NO: 8455 - RNA, 19 nt, synthetic construct
  source 1..19: mol_type = other RNA
aggaaccggaggtgggagt

SEQ ID NO: 8456 - RNA, 19 nt, synthetic construct
  source 1..19: mol_type = other RNA
cggactccggacacctgcc

SEQ ID NO: 8457 - RNA, 19 nt, synthetic construct
  source 1..19: mol_type = other RNA
gaggacaggacctacagct

SEQ ID NO: 8458 - RNA, 19 nt, synthetic construct
  source 1..19: mol_type = other RNA
cagagagggtaccaggtat

SEQ ID NO: 8459 - RNA, 19 nt, synthetic construct
  source 1..19: mol_type = other RNA
gtgctggctgacatcgagt

SEQ ID NO: 8460 - RNA, 19 nt, synthetic construct
  source 1..19: mol_type = other RNA
ggccctcacctcgcagact

SEQ ID NO: 8461 - RNA, 19 nt, synthetic construct
  source 1..19: mol_type = other RNA
aagatcagggccgctggag

SEQ ID NO: 8462 - RNA, 19 nt, synthetic construct
  source 1..19: mol_type = other RNA
ctgcagtgacgaccactgc

SEQ ID NO: 8463 - RNA, 19 nt, synthetic construct
  source 1..19: mol_type = other RNA
gaccactgcaggggacgtg

SEQ ID NO: 8464 - RNA, 19 nt, synthetic construct
  source 1..19: mol_type = other RNA
gcacagccagcaccgcttc

SEQ ID NO: 8465 - RNA, 19 nt, synthetic construct
  source 1..19: mol_type = other RNA
tgcgtccactggatccacg

SEQ ID NO: 8466 - RNA, 19 nt, synthetic construct
  source 1..19: mol_type = other RNA
ggcactcacgcctccagtg

SEQ ID NO: 8467 - RNA, 19 nt, synthetic construct
  source 1..19: mol_type = other RNA
gcatcttgggcaccaccca

SEQ ID NO: 8468 - RNA, 19 nt, synthetic construct
  source 1..19: mol_type = other RNA
ctacagctaccccatgccg

SEQ ID NO: 8469 - RNA, 19 nt, synthetic construct
  source 1..19: mol_type = other RNA
tggcaccccacatgtgagc

SEQ ID NO: 8470 - RNA, 19 nt, synthetic construct
  source 1..19: mol_type = other RNA
acggccaccacaaccgggg

SEQ ID NO: 8471 - RNA, 19 nt, synthetic construct
  source 1..19: mol_type = other RNA
caactccagggacaacacc

SEQ ID NO: 8472 - RNA, 19 nt, synthetic construct
  source 1..19: mol_type = other RNA
ctacagctaccccatgccg

SEQ ID NO: 8473 - RNA, 19 nt, synthetic construct
  source 1..19: mol_type = other RNA
aaggactgcaaccaccctt

SEQ ID NO: 8474 - RNA, 19 nt, synthetic construct
  source 1..19: mol_type = other RNA
gcacagccaccaaatccac

SEQ ID NO: 8475 - RNA, 19 nt, synthetic construct
  source 1..19: mol_type = other RNA
cgaaggccaccacgacaag

SEQ ID NO: 8476 - RNA, 19 nt, synthetic construct
  source 1..19: mol_type = other RNA
ggcactcacgcctccagtg

SEQ ID NO: 8477 - RNA, 19 nt, synthetic construct
  source 1..19: mol_type = other RNA
gcatcttgggcaccaccca

SEQ ID NO: 8478 - RNA, 19 nt, synthetic construct
  source 1..19: mol_type = other RNA
ctacagctaccccatgccg

SEQ ID NO: 8479 - RNA, 19 nt, synthetic construct
  source 1..19: mol_type = other RNA
tggcaccccacatgtgagc

SEQ ID NO: 8480 - RNA, 19 nt, synthetic construct
  source 1..19: mol_type = other RNA
caactccagggacaacacc

SEQ ID NO: 8481 - RNA, 19 nt, synthetic construct
  source 1..19: mol_type = other RNA
ctacagctaccccatgccg

SEQ ID NO: 8482 - RNA, 19 nt, synthetic construct
  source 1..19: mol_type = other RNA
aaggactgcaaccaccctt

SEQ ID NO: 8483 - RNA, 19 nt, synthetic construct
  source 1..19: mol_type = other RNA
gcacagccaccaaatccac

SEQ ID NO: 8484 - RNA, 19 nt, synthetic construct
  source 1..19: mol_type = other RNA
cgaaggccaccacgacaag

SEQ ID NO: 8485 - RNA, 19 nt, synthetic construct
  source 1..19: mol_type = other RNA
tgcgtccactggatccacg

SEQ ID NO: 8486 - RNA, 19 nt, synthetic construct
  source 1..19: mol_type = other RNA
tggcaccccacatgtgagc

SEQ ID NO: 8487 - RNA, 19 nt, synthetic construct
  source 1..19: mol_type = other RNA
acggccaccacaaccgggg

SEQ ID NO: 8488 - RNA, 19 nt, synthetic construct
  source 1..19: mol_type = other RNA
ggcactcacgcctccagtg

SEQ ID NO: 8489 - RNA, 19 nt, synthetic construct
  source 1..19: mol_type = other RNA
aaggactgcaaccaccctt

SEQ ID NO: 8490 - RNA, 19 nt, synthetic construct
  source 1..19: mol_type = other RNA
acggcacctcttacacctt

SEQ ID NO: 8491 - RNA, 19 nt, synthetic construct
  source 1..19: mol_type = other RNA
cagcatccactacaagtcc

SEQ ID NO: 8492 - RNA, 19 nt, synthetic construct
  source 1..19: mol_type = other RNA
gtcagcccccgccgtgcaa

SEQ ID NO: 8493 - RNA, 19 nt, synthetic construct
  source 1..19: mol_type = other RNA
tgcgtccagaccgcctgcc

SEQ ID NO: 8494 - RNA, 19 nt, synthetic construct
  source 1..19: mol_type = other RNA
tcagccatcctgcacacct

SEQ ID NO: 8495 - RNA, 19 nt, synthetic construct
  source 1..19: mol_type = other RNA
gaaaccggccccagaaggg

SEQ ID NO: 8496 - RNA, 19 nt, synthetic construct
  source 1..19: mol_type = other RNA
ctgccaggaagctgcgaca

SEQ ID NO: 8497 - RNA, 19 nt, synthetic construct
  source 1..19: mol_type = other RNA
ctcctccactctgggaaca

SEQ ID NO: 8498 - RNA, 19 nt, synthetic construct
  source 1..19: mol_type = other RNA
ttctacggggttggtgcaa

SEQ ID NO: 8499 - RNA, 19 nt, synthetic construct
  source 1..19: mol_type = other RNA
aagaggggacctttaaggc

SEQ ID NO: 8500 - RNA, 19 nt, synthetic construct
  source 1..19: mol_type = other RNA
gcggcgcagcttcccgaca

SEQ ID NO: 8501 - RNA, 19 nt, synthetic construct
  source 1..19: mol_type = other RNA
cacagtgcttaccaccacg

SEQ ID NO: 8502 - RNA, 19 nt, synthetic construct
  source 1..19: mol_type = other RNA
gccaccagctctacggcca

SEQ ID NO: 8503 - RNA, 19 nt, synthetic construct
  source 1..19: mol_type = other RNA
gccaccagctctacggcca

SEQ ID NO: 8504 - RNA, 19 nt, synthetic construct
  source 1..19: mol_type = other RNA
tggcaccttctacggggtt

SEQ ID NO: 8505 - RNA, 19 nt, synthetic construct
  source 1..19: mol_type = other RNA
gtcctctgctgcagtgacg

SEQ ID NO: 8506 - RNA, 19 nt, synthetic construct
  source 1..19: mol_type = other RNA
cacgaaggccaccacgaca

SEQ ID NO: 8507 - RNA, 19 nt, synthetic construct
  source 1..19: mol_type = other RNA
cacgaaggccaccacgaca

SEQ ID NO: 8508 - RNA, 19 nt, synthetic construct
  source 1..19: mol_type = other RNA
ggcacgacccgctgtcaac

SEQ ID NO: 8509 - RNA, 19 nt, synthetic construct
  source 1..19: mol_type = other RNA
ctggatgacatcacgcact

SEQ ID NO: 8510 - RNA, 19 nt, synthetic construct
  source 1..19: mol_type = other RNA
tgagcaccacggccacgac

SEQ ID NO: 8511 - RNA, 19 nt, synthetic construct
  source 1..19: mol_type = other RNA
tgagcaccacggccacgac

SEQ ID NO: 8512 - RNA, 19 nt, synthetic construct
  source 1..19: mol_type = other RNA
tgagcaccacggccacgac

SEQ ID NO: 8513 - RNA, 19 nt, synthetic construct
  source 1..19: mol_type = other RNA
gaccacgaaggccaccacg

SEQ ID NO: 8514 - RNA, 19 nt, synthetic construct
  source 1..19: mol_type = other RNA
gaccacgaaggccaccacg

SEQ ID NO: 8515 - RNA, 19 nt, synthetic construct
  source 1..19: mol_type = other RNA
cctccacggttcccagctc

SEQ ID NO: 8516 - RNA, 19 nt, synthetic construct
  source 1..19: mol_type = other RNA
tggggaccaccaccatgcg

SEQ ID NO: 8517 - RNA, 19 nt, synthetic construct
  source 1..19: mol_type = other RNA
ggatgcctgcaacaatact

SEQ ID NO: 8518 - RNA, 19 nt, synthetic construct
  source 1..19: mol_type = other RNA
gtgcgtgtgcaacacaacc

SEQ ID NO: 8519 - RNA, 19 nt, synthetic construct
  source 1..19: mol_type = other RNA
cggggaccacccacaccgc

SEQ ID NO: 8520 - RNA, 19 nt, synthetic construct
  source 1..19: mol_type = other RNA
cggggaccacccacaccgc

SEQ ID NO: 8521 - RNA, 19 nt, synthetic construct
  source 1..19: mol_type = other RNA
cggggaccacccacaccgc

SEQ ID NO: 8522 - RNA, 19 nt, synthetic construct
  source 1..19: mol_type = other RNA
cagagcctggaggcttacg

SEQ ID NO: 8523 - RNA, 19 nt, synthetic construct
  source 1..19: mol_type = other RNA
caggatgggtgccccgagc

SEQ ID NO: 8524 - RNA, 19 nt, synthetic construct
  source 1..19: mol_type = other RNA
caaggactgcaaccaccct

SEQ ID NO: 8525 - RNA, 19 nt, synthetic construct
  source 1..19: mol_type = other RNA
caaggactgcaaccaccct

SEQ ID NO: 8526 - RNA, 19 nt, synthetic construct
  source 1..19: mol_type = other RNA
caaggactgcaaccaccct

SEQ ID NO: 8527 - RNA, 19 nt, synthetic construct
  source 1..19: mol_type = other RNA
cagaaccaccgagtcaccc

SEQ ID NO: 8528 - RNA, 19 nt, synthetic construct
  source 1..19: mol_type = other RNA
tccgtggtgggggacgcac

SEQ ID NO: 8529 - RNA, 19 nt, synthetic construct
  source 1..19: mol_type = other RNA
ggggagcttgggcacatgg

SEQ ID NO: 8530 - RNA, 19 nt, synthetic construct
  source 1..19: mol_type = other RNA
ttcccacaccctagcagca

SEQ ID NO: 8531 - RNA, 19 nt, synthetic construct
  source 1..19: mol_type = other RNA
ccccttccccagggacgac

SEQ ID NO: 8532 - RNA, 19 nt, synthetic construct
  source 1..19: mol_type = other RNA
ctgcatggtgactgcagct

SEQ ID NO: 8533 - RNA, 19 nt, synthetic construct
  source 1..19: mol_type = other RNA
gacttctacaacccacatg

SEQ ID NO: 8534 - RNA, 19 nt, synthetic construct
  source 1..19: mol_type = other RNA
ctggttctatggcaacacc

SEQ ID NO: 8535 - RNA, 19 nt, synthetic construct
  source 1..19: mol_type = other RNA
ttctatggcaacaccctcc

SEQ ID NO: 8536 - RNA, 19 nt, synthetic construct
  source 1..19: mol_type = other RNA
agcaccacggccacgacac

SEQ ID NO: 8537 - RNA, 19 nt, synthetic construct
  source 1..19: mol_type = other RNA
ctggttctatggcaacacc

SEQ ID NO: 8538 - RNA, 19 nt, synthetic construct
  source 1..19: mol_type = other RNA
ttctatggcaacaccctcc

SEQ ID NO: 8539 - RNA, 19 nt, synthetic construct
  source 1..19: mol_type = other RNA
ctggttctatggcaacacc

SEQ ID NO: 8540 - RNA, 19 nt, synthetic construct
  source 1..19: mol_type = other RNA
ttctatggcaacaccctcc

SEQ ID NO: 8541 - RNA, 19 nt, synthetic construct
  source 1..19: mol_type = other RNA
agcaccacggccacgacac

SEQ ID NO: 8542 - RNA, 19 nt, synthetic construct
  source 1..19: mol_type = other RNA
ctggttctatggcaacacc

SEQ ID NO: 8543 - RNA, 19 nt, synthetic construct
  source 1..19: mol_type = other RNA
ttctatggcaacaccctcc

SEQ ID NO: 8544 - RNA, 19 nt, synthetic construct
  source 1..19: mol_type = other RNA
agcaccacggccacgacac

SEQ ID NO: 8545 - RNA, 19 nt, synthetic construct
  source 1..19: mol_type = other RNA
ctggttctatggcaacacc

SEQ ID NO: 8546 - RNA, 19 nt, synthetic construct
  source 1..19: mol_type = other RNA
ttctatggcaacaccctcc

SEQ ID NO: 8547 - RNA, 19 nt, synthetic construct
  source 1..19: mol_type = other RNA
gtccgtggtgggggacgca

SEQ ID NO: 8548 - RNA, 19 nt, synthetic construct
  source 1..19: mol_type = other RNA
atacacaagcacccttggt

SEQ ID NO: 8549 - RNA, 19 nt, synthetic construct
  source 1..19: mol_type = other RNA
acactaccaaagtgccaac

SEQ ID NO: 8550 - RNA, 19 nt, synthetic construct
  source 1..19: mol_type = other RNA
tgggcaccgcctggacccg

SEQ ID NO: 8551 - RNA, 19 nt, synthetic construct
  source 1..19: mol_type = other RNA
ccggacgccctggcaccca

SEQ ID NO: 8552 - RNA, 19 nt, synthetic construct
  source 1..19: mol_type = other RNA
agggacaacacccatcacc

SEQ ID NO: 8553 - RNA, 19 nt, synthetic construct
  source 1..19: mol_type = other RNA
aagtcatctacaataagac

SEQ ID NO: 8554 - RNA, 19 nt, synthetic construct
  source 1..19: mol_type = other RNA
ccttggtacagccaccacg

SEQ ID NO: 8555 - RNA, 19 nt, synthetic construct
  source 1..19: mol_type = other RNA
tcagcccccgccgtgcaac

SEQ ID NO: 8556 - RNA, 19 nt, synthetic construct
  source 1..19: mol_type = other RNA
ccggcaactgcacggacga

SEQ ID NO: 8557 - RNA, 19 nt, synthetic construct
  source 1..19: mol_type = other RNA
cacctgctccggggggcta

SEQ ID NO: 8558 - RNA, 19 nt, synthetic construct
  source 1..19: mol_type = other RNA
tgcatggtgactgcagcta

SEQ ID NO: 8559 - RNA, 19 nt, synthetic construct
  source 1..19: mol_type = other RNA
tgcagctggtgccactcat

SEQ ID NO: 8560 - RNA, 19 nt, synthetic construct
  source 1..19: mol_type = other RNA
cgatcccaacagtgccttc

SEQ ID NO: 8561 - RNA, 19 nt, synthetic construct
  source 1..19: mol_type = other RNA
gccttctcgcgctgccact

SEQ ID NO: 8562 - RNA, 19 nt, synthetic construct
  source 1..19: mol_type = other RNA
cagctcggcgggcacccct

SEQ ID NO: 8563 - RNA, 19 nt, synthetic construct
  source 1..19: mol_type = other RNA
ggggctgcattgccgagga

SEQ ID NO: 8564 - RNA, 19 nt, synthetic construct
  source 1..19: mol_type = other RNA
aggacctacagctaccagg

SEQ ID NO: 8565 - RNA, 19 nt, synthetic construct
  source 1..19: mol_type = other RNA
cctgggaggcggagacttt

SEQ ID NO: 8566 - RNA, 19 nt, synthetic construct
  source 1..19: mol_type = other RNA
gcacacagaccagtggtac

SEQ ID NO: 8567 - RNA, 19 nt, synthetic construct
  source 1..19: mol_type = other RNA
tcctgggacaactcccatc

SEQ ID NO: 8568 - RNA, 19 nt, synthetic construct
  source 1..19: mol_type = other RNA
agacccgcacctcgaccct

SEQ ID NO: 8569 - RNA, 19 nt, synthetic construct
  source 1..19: mol_type = other RNA
gcaactgctggcaccccac

SEQ ID NO: 8570 - RNA, 19 nt, synthetic construct
  source 1..19: mol_type = other RNA
ccacgacacccacagtcac

SEQ ID NO: 8571 - RNA, 19 nt, synthetic construct
  source 1..19: mol_type = other RNA
ctccacagtgcttaccacc

SEQ ID NO: 8572 - RNA, 19 nt, synthetic construct
  source 1..19: mol_type = other RNA
cggcacgcacgcttccagt

SEQ ID NO: 8573 - RNA, 19 nt, synthetic construct
  source 1..19: mol_type = other RNA
gcacacagaccagtggtac

SEQ ID NO: 8574 - RNA, 19 nt, synthetic construct
  source 1..19: mol_type = other RNA
agacccgcacctcgaccct

SEQ ID NO: 8575 - RNA, 19 nt, synthetic construct
  source 1..19: mol_type = other RNA
ggatcctcacagagcagac

SEQ ID NO: 8576 - RNA, 19 nt, synthetic construct
  source 1..19: mol_type = other RNA
ctccaccccgggaacagct

SEQ ID NO: 8577 - RNA, 19 nt, synthetic construct
  source 1..19: mol_type = other RNA
ctccacagtgcttaccacc

SEQ ID NO: 8578 - RNA, 19 nt, synthetic construct
  source 1..19: mol_type = other RNA
gcacacagaccagtggtac

SEQ ID NO: 8579 - RNA, 19 nt, synthetic construct
  source 1..19: mol_type = other RNA
actacgatcacagccaccg

SEQ ID NO: 8580 - RNA, 19 nt, synthetic construct
  source 1..19: mol_type = other RNA
agacccgcacctcgaccct

SEQ ID NO: 8581 - RNA, 19 nt, synthetic construct
  source 1..19: mol_type = other RNA
gcaactgctggcaccccac

SEQ ID NO: 8582 - RNA, 19 nt, synthetic construct
  source 1..19: mol_type = other RNA
ccacgacacccacagtcac

SEQ ID NO: 8583 - RNA, 19 nt, synthetic construct
  source 1..19: mol_type = other RNA
ctccacagtgcttaccacc

SEQ ID NO: 8584 - RNA, 19 nt, synthetic construct
  source 1..19: mol_type = other RNA
gcacacagaccagtggtac

SEQ ID NO: 8585 - RNA, 19 nt, synthetic construct
  source 1..19: mol_type = other RNA
agacccgcacctcgaccct

SEQ ID NO: 8586 - RNA, 19 nt, synthetic construct
  source 1..19: mol_type = other RNA
ctccaccccgggaacagct

SEQ ID NO: 8587 - RNA, 19 nt, synthetic construct
  source 1..19: mol_type = other RNA
tccacccttgggaccaccg

SEQ ID NO: 8588 - RNA, 19 nt, synthetic construct
  source 1..19: mol_type = other RNA
gcaactgctggcaccccac

SEQ ID NO: 8589 - RNA, 19 nt, synthetic construct
  source 1..19: mol_type = other RNA
ccacgacacccacagtcac

SEQ ID NO: 8590 - RNA, 19 nt, synthetic construct
  source 1..19: mol_type = other RNA
gcacacagaccagtggtac

SEQ ID NO: 8591 - RNA, 19 nt, synthetic construct
  source 1..19: mol_type = other RNA
gccaccatgacaagggcca

SEQ ID NO: 8592 - RNA, 19 nt, synthetic construct
  source 1..19: mol_type = other RNA
ctccccaccgccagtgtcc

SEQ ID NO: 8593 - RNA, 19 nt, synthetic construct
  source 1..19: mol_type = other RNA
ggcgggtccacgaggagac

SEQ ID NO: 8594 - RNA, 19 nt, synthetic construct
  source 1..19: mol_type = other RNA
ggcctatgtgtccctgcca

SEQ ID NO: 8595 - RNA, 19 nt, synthetic construct
  source 1..19: mol_type = other RNA
acagccactacgactgagt

SEQ ID NO: 8596 - RNA, 19 nt, synthetic construct
  source 1..19: mol_type = other RNA
acagccactacgactgagt

SEQ ID NO: 8597 - RNA, 19 nt, synthetic construct
  source 1..19: mol_type = other RNA
cctgccacctgcaactcta

SEQ ID NO: 8598 - RNA, 19 nt, synthetic construct
  source 1..19: mol_type = other RNA
cagcgtttccttcgtgcct

SEQ ID NO: 8599 - RNA, 19 nt, synthetic construct
  source 1..19: mol_type = other RNA
cagaccagtggtactcccc

SEQ ID NO: 8600 - RNA, 19 nt, synthetic construct
  source 1..19: mol_type = other RNA
cagaccagtggtactcccc

SEQ ID NO: 8601 - RNA, 19 nt, synthetic construct
  source 1..19: mol_type = other RNA
cagaccagtggtactcccc

SEQ ID NO: 8602 - RNA, 19 nt, synthetic construct
  source 1..19: mol_type = other RNA
cagaccagtggtactcccc

SEQ ID NO: 8603 - RNA, 19 nt, synthetic construct
  source 1..19: mol_type = other RNA
cagaccagtggtactcccc

SEQ ID NO: 8604 - RNA, 19 nt, synthetic construct
  source 1..19: mol_type = other RNA
agccccctgaacccggcgc

SEQ ID NO: 8605 - RNA, 19 nt, synthetic construct
  source 1..19: mol_type = other RNA
gggtaccaggtatgccctg

SEQ ID NO: 8606 - RNA, 19 nt, synthetic construct
  source 1..19: mol_type = other RNA
ggatggcggtgccccgacg

SEQ ID NO: 8607 - RNA, 19 nt, synthetic construct
  source 1..19: mol_type = other RNA
gaaggccaccacgacaagg

SEQ ID NO: 8608 - RNA, 19 nt, synthetic construct
  source 1..19: mol_type = other RNA
gaaggccaccacgacaagg

SEQ ID NO: 8609 - RNA, 19 nt, synthetic construct
  source 1..19: mol_type = other RNA
ggaaccactgccgccagtt

SEQ ID NO: 8610 - RNA, 19 nt, synthetic construct
  source 1..19: mol_type = other RNA
cgcacacatgggcatctgc

SEQ ID NO: 8611 - RNA, 19 nt, synthetic construct
  source 1..19: mol_type = other RNA
gccagcaggacccctttcg

SEQ ID NO: 8612 - RNA, 19 nt, synthetic construct
  source 1..19: mol_type = other RNA
atcgagtgccgggcggcgc

SEQ ID NO: 8613 - RNA, 19 nt, synthetic construct
  source 1..19: mol_type = other RNA
gctgtccacctctcaggcc

SEQ ID NO: 8614 - RNA, 19 nt, synthetic construct
  source 1..19: mol_type = other RNA
ttctcaacgccgcagccta

SEQ ID NO: 8615 - RNA, 19 nt, synthetic construct
  source 1..19: mol_type = other RNA
agggacggcacgcacgcct

SEQ ID NO: 8616 - RNA, 19 nt, synthetic construct
  source 1..19: mol_type = other RNA
tcccaccttccgctgcaga

SEQ ID NO: 8617 - RNA, 19 nt, synthetic construct
  source 1..19: mol_type = other RNA
cactccatcatcaacccca

SEQ ID NO: 8618 - RNA, 19 nt, synthetic construct
  source 1..19: mol_type = other RNA
gtgacgaccactgcagggg

SEQ ID NO: 8619 - RNA, 19 nt, synthetic construct
  source 1..19: mol_type = other RNA
ccagcacgcccaggacaga

SEQ ID NO: 8620 - RNA, 19 nt, synthetic construct
  source 1..19: mol_type = other RNA
cccacacctccacagtgct

SEQ ID NO: 8621 - RNA, 19 nt, synthetic construct
  source 1..19: mol_type = other RNA
gccacggccaccacaactg

SEQ ID NO: 8622 - RNA, 19 nt, synthetic construct
  source 1..19: mol_type = other RNA
tccacacctccacagtgct

SEQ ID NO: 8623 - RNA, 19 nt, synthetic construct
  source 1..19: mol_type = other RNA
tccacacctccacagtgct

SEQ ID NO: 8624 - RNA, 19 nt, synthetic construct
  source 1..19: mol_type = other RNA
cccacacctccacagtgct

SEQ ID NO: 8625 - RNA, 19 nt, synthetic construct
  source 1..19: mol_type = other RNA
tccacacctccacagtgct

SEQ ID NO: 8626 - RNA, 19 nt, synthetic construct
  source 1..19: mol_type = other RNA
agtgcgagtgcatctgcag

SEQ ID NO: 8627 - RNA, 19 nt, synthetic construct
  source 1..19: mol_type = other RNA
cgctctgtgatctgatgct

SEQ ID NO: 8628 - RNA, 19 nt, synthetic construct
  source 1..19: mol_type = other RNA
acacacccgtggcttcccg

SEQ ID NO: 8629 - RNA, 19 nt, synthetic construct
  source 1..19: mol_type = other RNA
cctcccggtctccaccgtg

SEQ ID NO: 8630 - RNA, 19 nt, synthetic construct
  source 1..19: mol_type = other RNA
tgcctaccccaacccagac

SEQ ID NO: 8631 - RNA, 19 nt, synthetic construct
  source 1..19: mol_type = other RNA
cggccaggtcagagagggg

SEQ ID NO: 8632 - RNA, 19 nt, synthetic construct
  source 1..19: mol_type = other RNA
cggaagtgcggcctgacgg

SEQ ID NO: 8633 - RNA, 19 nt, synthetic construct
  source 1..19: mol_type = other RNA
acacccacaaccagaggct

SEQ ID NO: 8634 - RNA, 19 nt, synthetic construct
  source 1..19: mol_type = other RNA
ctgagtccactggatccac

SEQ ID NO: 8635 - RNA, 19 nt, synthetic construct
  source 1..19: mol_type = other RNA
accaccgggaccctcccag

SEQ ID NO: 8636 - RNA, 19 nt, synthetic construct
  source 1..19: mol_type = other RNA
acacccacaaccagaggct

SEQ ID NO: 8637 - RNA, 19 nt, synthetic construct
  source 1..19: mol_type = other RNA
ctcacaaagctgaccacaa

SEQ ID NO: 8638 - RNA, 19 nt, synthetic construct
  source 1..19: mol_type = other RNA
ctgagtccactggatccac

SEQ ID NO: 8639 - RNA, 19 nt, synthetic construct
  source 1..19: mol_type = other RNA
accaccgggaccctcccag

SEQ ID NO: 8640 - RNA, 19 nt, synthetic construct
  source 1..19: mol_type = other RNA
ccactcaggagtcctaccc

SEQ ID NO: 8641 - RNA, 19 nt, synthetic construct
  source 1..19: mol_type = other RNA
cccacaacgccaggctgac

SEQ ID NO: 8642 - RNA, 19 nt, synthetic construct
  source 1..19: mol_type = other RNA
tgcacctgccccgcgggca

SEQ ID NO: 8643 - RNA, 19 nt, synthetic construct
  source 1..19: mol_type = other RNA
gggggctgcattgccgagg

SEQ ID NO: 8644 - RNA, 19 nt, synthetic construct
  source 1..19: mol_type = other RNA
cccacatgggggctgtgag

SEQ ID NO: 8645 - RNA, 19 nt, synthetic construct
  source 1..19: mol_type = other RNA
ctggtacaatgggcaccgc

SEQ ID NO: 8646 - RNA, 19 nt, synthetic construct
  source 1..19: mol_type = other RNA
gggaggccccacgacgcct

SEQ ID NO: 8647 - RNA, 19 nt, synthetic construct
  source 1..19: mol_type = other RNA
cacagccagcaccgcttcc

SEQ ID NO: 8648 - RNA, 19 nt, synthetic construct
  source 1..19: mol_type = other RNA
accagctctacggccatgc

SEQ ID NO: 8649 - RNA, 19 nt, synthetic construct
  source 1..19: mol_type = other RNA
tgggaccaccgggaccctc

SEQ ID NO: 8650 - RNA, 19 nt, synthetic construct
  source 1..19: mol_type = other RNA
accagctctacggccatgc

SEQ ID NO: 8651 - RNA, 19 nt, synthetic construct
  source 1..19: mol_type = other RNA
tgggaccaccgggaccctc

SEQ ID NO: 8652 - RNA, 19 nt, synthetic construct
  source 1..19: mol_type = other RNA
gacaagggccaccaattcc

SEQ ID NO: 8653 - RNA, 19 nt, synthetic construct
  source 1..19: mol_type = other RNA
ctcagtcctcaccaccctg

SEQ ID NO: 8654 - RNA, 19 nt, synthetic construct
  source 1..19: mol_type = other RNA
cagcatgtggggcggctcc

SEQ ID NO: 8655 - RNA, 19 nt, synthetic construct
  source 1..19: mol_type = other RNA
agtccatttgctgacccca

SEQ ID NO: 8656 - RNA, 19 nt, synthetic construct
  source 1..19: mol_type = other RNA
ccttgggcctcctctgcgg

SEQ ID NO: 8657 - RNA, 19 nt, synthetic construct
  source 1..19: mol_type = other RNA
cgctccgtgctcctgctgc

SEQ ID NO: 8658 - RNA, 19 nt, synthetic construct
  source 1..19: mol_type = other RNA
cagaagggtgaggggccag

SEQ ID NO: 8659 - RNA, 19 nt, synthetic construct
  source 1..19: mol_type = other RNA
gagaggggtcagcatccca

SEQ ID NO: 8660 - RNA, 19 nt, synthetic construct
  source 1..19: mol_type = other RNA
acctacagctaccaggacg

SEQ ID NO: 8661 - RNA, 19 nt, synthetic construct
  source 1..19: mol_type = other RNA
ttggcgcctgcttgatcgc

SEQ ID NO: 8662 - RNA, 19 nt, synthetic construct
  source 1..19: mol_type = other RNA
tggtgcaaccttcccaggc

SEQ ID NO: 8663 - RNA, 19 nt, synthetic construct
  source 1..19: mol_type = other RNA
tccagggactgcaaccgcc

SEQ ID NO: 8664 - RNA, 19 nt, synthetic construct
  source 1..19: mol_type = other RNA
tccagggactgcaaccgcc

SEQ ID NO: 8665 - RNA, 19 nt, synthetic construct
  source 1..19: mol_type = other RNA
tccagggactgcaaccgcc

SEQ ID NO: 8666 - RNA, 19 nt, synthetic construct
  source 1..19: mol_type = other RNA
tccagggactgcaaccgcc

SEQ ID NO: 8667 - RNA, 19 nt, synthetic construct
  source 1..19: mol_type = other RNA
cgccgtgtgttcatgtacg

SEQ ID NO: 8668 - RNA, 19 nt, synthetic construct
  source 1..19: mol_type = other RNA
tggcgccaacactcacgag

SEQ ID NO: 8669 - RNA, 19 nt, synthetic construct
  source 1..19: mol_type = other RNA
ttccagctggccacgtccg

SEQ ID NO: 8670 - RNA, 19 nt, synthetic construct
  source 1..19: mol_type = other RNA
tccagctggccacgtccgg

SEQ ID NO: 8671 - RNA, 19 nt, synthetic construct
  source 1..19: mol_type = other RNA
tgcctgctgcagggtaact

SEQ ID NO: 8672 - RNA, 19 nt, synthetic construct
  source 1..19: mol_type = other RNA
ccacccttccaacacgctc

SEQ ID NO: 8673 - RNA, 19 nt, synthetic construct
  source 1..19: mol_type = other RNA
cctccacagtgcttaccgc

SEQ ID NO: 8674 - RNA, 19 nt, synthetic construct
  source 1..19: mol_type = other RNA
cctccacagtgcttaccgc

SEQ ID NO: 8675 - RNA, 19 nt, synthetic construct
  source 1..19: mol_type = other RNA
tgtggggagtgcgtccaga

SEQ ID NO: 8676 - RNA, 19 nt, synthetic construct
  source 1..19: mol_type = other RNA
cccttccccagggacgacc

SEQ ID NO: 8677 - RNA, 19 nt, synthetic construct
  source 1..19: mol_type = other RNA
agccaacagagtcccccgc

SEQ ID NO: 8678 - RNA, 19 nt, synthetic construct
  source 1..19: mol_type = other RNA
ggttcccagctcgtccacc

SEQ ID NO: 8679 - RNA, 19 nt, synthetic construct
  source 1..19: mol_type = other RNA
gctttgaaggcagctgcga

SEQ ID NO: 8680 - RNA, 19 nt, synthetic construct
  source 1..19: mol_type = other RNA
accacctggacccgcctat

SEQ ID NO: 8681 - RNA, 19 nt, synthetic construct
  source 1..19: mol_type = other RNA
accacctggacccgcctat

SEQ ID NO: 8682 - RNA, 19 nt, synthetic construct
  source 1..19: mol_type = other RNA
accacctggacccgcctat

SEQ ID NO: 8683 - RNA, 19 nt, synthetic construct
  source 1..19: mol_type = other RNA
accacctggacccgcctat

SEQ ID NO: 8684 - RNA, 19 nt, synthetic construct
  source 1..19: mol_type = other RNA
cgccagtgtcctccgcccc

SEQ ID NO: 8685 - RNA, 19 nt, synthetic construct
  source 1..19: mol_type = other RNA
cggggctggtgtcggatgg

SEQ ID NO: 8686 - RNA, 19 nt, synthetic construct
  source 1..19: mol_type = other RNA
cagagctgtaactgcacac

SEQ ID NO: 8687 - RNA, 19 nt, synthetic construct
  source 1..19: mol_type = other RNA
gagggtaccaggtatgccc

SEQ ID NO: 8688 - RNA, 19 nt, synthetic construct
  source 1..19: mol_type = other RNA
gggccgctggagggcactt

SEQ ID NO: 8689 - RNA, 19 nt, synthetic construct
  source 1..19: mol_type = other RNA
actggatccacggccatcc

SEQ ID NO: 8690 - RNA, 19 nt, synthetic construct
  source 1..19: mol_type = other RNA
gttcccagctcgtccaccg

SEQ ID NO: 8691 - RNA, 19 nt, synthetic construct
  source 1..19: mol_type = other RNA
accactgcaggggccgcct

SEQ ID NO: 8692 - RNA, 19 nt, synthetic construct
  source 1..19: mol_type = other RNA
ggtcaacatcaccttctgc

SEQ ID NO: 8693 - RNA, 19 nt, synthetic construct
  source 1..19: mol_type = other RNA
tgccacaaccccgccaccg

SEQ ID NO: 8694 - RNA, 19 nt, synthetic construct
  source 1..19: mol_type = other RNA
gcctggcgccaacactcac

SEQ ID NO: 8695 - RNA, 19 nt, synthetic construct
  source 1..19: mol_type = other RNA
aaccaccgagtcaccccct

SEQ ID NO: 8696 - RNA, 19 nt, synthetic construct
  source 1..19: mol_type = other RNA
gaccaccgagtcaccccct

SEQ ID NO: 8697 - RNA, 19 nt, synthetic construct
  source 1..19: mol_type = other RNA
gaccaccgagtcaccccct

SEQ ID NO: 8698 - RNA, 19 nt, synthetic construct
  source 1..19: mol_type = other RNA
gaccaccgagtcaccccct

SEQ ID NO: 8699 - RNA, 19 nt, synthetic construct
  source 1..19: mol_type = other RNA
agcccagggacggcactca

SEQ ID NO: 8700 - RNA, 19 nt, synthetic construct
  source 1..19: mol_type = other RNA
agcccagggacggcactca

SEQ ID NO: 8701 - RNA, 19 nt, synthetic construct
  source 1..19: mol_type = other RNA
agcccagggacggcactca

SEQ ID NO: 8702 - RNA, 19 nt, synthetic construct
  source 1..19: mol_type = other RNA
gcggacggcggcgtgttcc

SEQ ID NO: 8703 - RNA, 19 nt, synthetic construct
  source 1..19: mol_type = other RNA
cgtcggtgcaagggtcccc

SEQ ID NO: 8704 - RNA, 19 nt, synthetic construct
  source 1..19: mol_type = other RNA
tgggtgaccccgagcatcc

SEQ ID NO: 8705 - RNA, 19 nt, synthetic construct
  source 1..19: mol_type = other RNA
ctggcgccaacactcacga

SEQ ID NO: 8706 - RNA, 19 nt, synthetic construct
  source 1..19: mol_type = other RNA
ccataaccacggtggtgac

SEQ ID NO: 8707 - RNA, 19 nt, synthetic construct
  source 1..19: mol_type = other RNA
ccataaccacggtggtgac

SEQ ID NO: 8708 - RNA, 19 nt, synthetic construct
  source 1..19: mol_type = other RNA
ccataaccacggtggtgac

SEQ ID NO: 8709 - RNA, 19 nt, synthetic construct
  source 1..19: mol_type = other RNA
gtggggagtgcgtccagac

SEQ ID NO: 8710 - RNA, 19 nt, synthetic construct
  source 1..19: mol_type = other RNA
tgctcgtggtgccgcaggc

SEQ ID NO: 8711 - RNA, 19 nt, synthetic construct
  source 1..19: mol_type = other RNA
gacacggccatccgggtcc

SEQ ID NO: 8712 - RNA, 19 nt, synthetic construct
  source 1..19: mol_type = other RNA
acctgcagcgtttccttcg

SEQ ID NO: 8713 - RNA, 19 nt, synthetic construct
  source 1..19: mol_type = other RNA
ctttgaaggcagctgcgag

SEQ ID NO: 8714 - RNA, 19 nt, synthetic construct
  source 1..19: mol_type = other RNA
tttgaaggcagctgcgagt

SEQ ID NO: 8715 - RNA, 19 nt, synthetic construct
  source 1..19: mol_type = other RNA
agtgtggctgctacgacaa

SEQ ID NO: 8716 - RNA, 19 nt, synthetic construct
  source 1..19: mol_type = other RNA
agagctcgcccgacaggca

SEQ ID NO: 8717 - RNA, 19 nt, synthetic construct
  source 1..19: mol_type = other RNA
gcagtccccacacggtgcg

SEQ ID NO: 8718 - RNA, 19 nt, synthetic construct
  source 1..19: mol_type = other RNA
ccaccagctctacggccat

SEQ ID NO: 8719 - RNA, 19 nt, synthetic construct
  source 1..19: mol_type = other RNA
caccagctctacggccatg

SEQ ID NO: 8720 - RNA, 19 nt, synthetic construct
  source 1..19: mol_type = other RNA
gcagtccccacacggtgcg

SEQ ID NO: 8721 - RNA, 19 nt, synthetic construct
  source 1..19: mol_type = other RNA
cttcacccttgggaccacc

SEQ ID NO: 8722 - RNA, 19 nt, synthetic construct
  source 1..19: mol_type = other RNA
gcagtccccacacggtgcg

SEQ ID NO: 8723 - RNA, 19 nt, synthetic construct
  source 1..19: mol_type = other RNA
gcagtccccacacggtgcg

SEQ ID NO: 8724 - RNA, 19 nt, synthetic construct
  source 1..19: mol_type = other RNA
ccaccagctctacggccat

SEQ ID NO: 8725 - RNA, 19 nt, synthetic construct
  source 1..19: mol_type = other RNA
caccagctctacggccatg

SEQ ID NO: 8726 - RNA, 19 nt, synthetic construct
  source 1..19: mol_type = other RNA
gccaccagttccacgtcca

SEQ ID NO: 8727 - RNA, 19 nt, synthetic construct
  source 1..19: mol_type = other RNA
tgccatccctctccggcag

SEQ ID NO: 8728 - RNA, 19 nt, synthetic construct
  source 1..19: mol_type = other RNA
aaggacatggccaagacgt

SEQ ID NO: 8729 - RNA, 19 nt, synthetic construct
  source 1..19: mol_type = other RNA
gggtttcctaaatttcccg

SEQ ID NO: 8730 - RNA, 19 nt, synthetic construct
  source 1..19: mol_type = other RNA
cagtgctgtggggagtgcg

SEQ ID NO: 8731 - RNA, 19 nt, synthetic construct
  source 1..19: mol_type = other RNA
ggatgtgcattgtctgatc

SEQ ID NO: 8732 - RNA, 19 nt, synthetic construct
  source 1..19: mol_type = other RNA
attccagctggccacgtcc

SEQ ID NO: 8733 - RNA, 19 nt, synthetic construct
  source 1..19: mol_type = other RNA
cagcgcgcgcagctctgcg

SEQ ID NO: 8734 - RNA, 19 nt, synthetic construct
  source 1..19: mol_type = other RNA
ctctacgacctgcatggtg

SEQ ID NO: 8735 - RNA, 19 nt, synthetic construct
  source 1..19: mol_type = other RNA
ggctgagctgcggaagtgc

SEQ ID NO: 8736 - RNA, 19 nt, synthetic construct
  source 1..19: mol_type = other RNA
aggccacgggcgcagcctt

SEQ ID NO: 8737 - RNA, 19 nt, synthetic construct
  source 1..19: mol_type = other RNA
ctcgcgctgccactccatc

SEQ ID NO: 8738 - RNA, 19 nt, synthetic construct
  source 1..19: mol_type = other RNA
aagggcgtacagctcagcg

SEQ ID NO: 8739 - RNA, 19 nt, synthetic construct
  source 1..19: mol_type = other RNA
gccccgcgggcaccttcct

SEQ ID NO: 8740 - RNA, 19 nt, synthetic construct
  source 1..19: mol_type = other RNA
gaaccggaggtgggagtgc

SEQ ID NO: 8741 - RNA, 19 nt, synthetic construct
  source 1..19: mol_type = other RNA
gactactgtggggacaaca

SEQ ID NO: 8742 - RNA, 19 nt, synthetic construct
  source 1..19: mol_type = other RNA
cctgcccggacgccctggc

SEQ ID NO: 8743 - RNA, 19 nt, synthetic construct
  source 1..19: mol_type = other RNA
agggtaccaggtatgccct

SEQ ID NO: 8744 - RNA, 19 nt, synthetic construct
  source 1..19: mol_type = other RNA
gccctgtgctggctgacat

SEQ ID NO: 8745 - RNA, 19 nt, synthetic construct
  source 1..19: mol_type = other RNA
ccccctcggccccaggtac

SEQ ID NO: 8746 - RNA, 19 nt, synthetic construct
  source 1..19: mol_type = other RNA
ccccaactggaccctggca

SEQ ID NO: 8747 - RNA, 19 nt, synthetic construct
  source 1..19: mol_type = other RNA
acccaggccctgttctcaa

SEQ ID NO: 8748 - RNA, 19 nt, synthetic construct
  source 1..19: mol_type = other RNA
tggtacagccaccacggga

SEQ ID NO: 8749 - RNA, 19 nt, synthetic construct
  source 1..19: mol_type = other RNA
gctggccccaacaacaatg

SEQ ID NO: 8750 - RNA, 19 nt, synthetic construct
  source 1..19: mol_type = other RNA
gcaaccgcccttccagcac

SEQ ID NO: 8751 - RNA, 19 nt, synthetic construct
  source 1..19: mol_type = other RNA
cgttacacccatcccctct

SEQ ID NO: 8752 - RNA, 19 nt, synthetic construct
  source 1..19: mol_type = other RNA
cgcctatcacagaccacca

SEQ ID NO: 8753 - RNA, 19 nt, synthetic construct
  source 1..19: mol_type = other RNA
accaccacacccacggcca

SEQ ID NO: 8754 - RNA, 19 nt, synthetic construct
  source 1..19: mol_type = other RNA
cagagactgcccacacctc

SEQ ID NO: 8755 - RNA, 19 nt, synthetic construct
  source 1..19: mol_type = other RNA
ccctcctctagcacacaga

SEQ ID NO: 8756 - RNA, 19 nt, synthetic construct
  source 1..19: mol_type = other RNA
actacgatcacggccaccg

SEQ ID NO: 8757 - RNA, 19 nt, synthetic construct
  source 1..19: mol_type = other RNA
caactcccatccccccagt

SEQ ID NO: 8758 - RNA, 19 nt, synthetic construct
  source 1..19: mol_type = other RNA
gccacctcgggcatcttgg

SEQ ID NO: 8759 - RNA, 19 nt, synthetic construct
  source 1..19: mol_type = other RNA
ggacgaccaccccgggcca

SEQ ID NO: 8760 - RNA, 19 nt, synthetic construct
  source 1..19: mol_type = other RNA
ggaaccgtgagcaggtggg

SEQ ID NO: 8761 - RNA, 19 nt, synthetic construct
  source 1..19: mol_type = other RNA
cactacagccaccgtgacg

SEQ ID NO: 8762 - RNA, 19 nt, synthetic construct
  source 1..19: mol_type = other RNA
gcaaccgcccttccagcac

SEQ ID NO: 8763 - RNA, 19 nt, synthetic construct
  source 1..19: mol_type = other RNA
cgcctatcacagaccacca

SEQ ID NO: 8764 - RNA, 19 nt, synthetic construct
  source 1..19: mol_type = other RNA
accaccacacccacggcca

SEQ ID NO: 8765 - RNA, 19 nt, synthetic construct
  source 1..19: mol_type = other RNA
cgcacgcttccagtgtgga

SEQ ID NO: 8766 - RNA, 19 nt, synthetic construct
  source 1..19: mol_type = other RNA
ccctcctctagcacacaga

SEQ ID NO: 8767 - RNA, 19 nt, synthetic construct
  source 1..19: mol_type = other RNA
actacgatcacggccaccg

SEQ ID NO: 8768 - RNA, 19 nt, synthetic construct
  source 1..19: mol_type = other RNA
gtgccgaacaccacggcca

SEQ ID NO: 8769 - RNA, 19 nt, synthetic construct
  source 1..19: mol_type = other RNA
ctggacttcggccacctca

SEQ ID NO: 8770 - RNA, 19 nt, synthetic construct
  source 1..19: mol_type = other RNA
ggacgaccaccccgggcca

SEQ ID NO: 8771 - RNA, 19 nt, synthetic construct
  source 1..19: mol_type = other RNA
ggaaccgtgagcaggtggg

SEQ ID NO: 8772 - RNA, 19 nt, synthetic construct
  source 1..19: mol_type = other RNA
tcccaaagtgctgaccagc

SEQ ID NO: 8773 - RNA, 19 nt, synthetic construct
  source 1..19: mol_type = other RNA
cttccagtgctgacaagca

SEQ ID NO: 8774 - RNA, 19 nt, synthetic construct
  source 1..19: mol_type = other RNA
cccagcactacagccaccg

SEQ ID NO: 8775 - RNA, 19 nt, synthetic construct
  source 1..19: mol_type = other RNA
cactacagccaccgtgacg

SEQ ID NO: 8776 - RNA, 19 nt, synthetic construct
  source 1..19: mol_type = other RNA
gcaaccgcccttccagcac

SEQ ID NO: 8777 - RNA, 19 nt, synthetic construct
  source 1..19: mol_type = other RNA
cgcctatcacagaccacca

SEQ ID NO: 8778 - RNA, 19 nt, synthetic construct
  source 1..19: mol_type = other RNA
accaccacacccacggcca

SEQ ID NO: 8779 - RNA, 19 nt, synthetic construct
  source 1..19: mol_type = other RNA
ccctcctctagcacacaga

SEQ ID NO: 8780 - RNA, 19 nt, synthetic construct
  source 1..19: mol_type = other RNA
caactcccatccccccagt

SEQ ID NO: 8781 - RNA, 19 nt, synthetic construct
  source 1..19: mol_type = other RNA
gtgccgaacaccacggcca

SEQ ID NO: 8782 - RNA, 19 nt, synthetic construct
  source 1..19: mol_type = other RNA
cacacgggcggtccctgcc

SEQ ID NO: 8783 - RNA, 19 nt, synthetic construct
  source 1..19: mol_type = other RNA
gccacctcgggcatcttgg

SEQ ID NO: 8784 - RNA, 19 nt, synthetic construct
  source 1..19: mol_type = other RNA
ggacgaccaccccgggcca

SEQ ID NO: 8785 - RNA, 19 nt, synthetic construct
  source 1..19: mol_type = other RNA
ggaaccgtgagcaggtggg

SEQ ID NO: 8786 - RNA, 19 nt, synthetic construct
  source 1..19: mol_type = other RNA
cactacagccaccgtgacg

SEQ ID NO: 8787 - RNA, 19 nt, synthetic construct
  source 1..19: mol_type = other RNA
gcaaccgcccttccagcac

SEQ ID NO: 8788 - RNA, 19 nt, synthetic construct
  source 1..19: mol_type = other RNA
cgcctatcacagaccacca

SEQ ID NO: 8789 - RNA, 19 nt, synthetic construct
  source 1..19: mol_type = other RNA
accaccacacccacggcca

SEQ ID NO: 8790 - RNA, 19 nt, synthetic construct
  source 1..19: mol_type = other RNA
cagagactgcccacacctc

SEQ ID NO: 8791 - RNA, 19 nt, synthetic construct
  source 1..19: mol_type = other RNA
accagtggctccacggtga

SEQ ID NO: 8792 - RNA, 19 nt, synthetic construct
  source 1..19: mol_type = other RNA
ccctcctctagcacacaga

SEQ ID NO: 8793 - RNA, 19 nt, synthetic construct
  source 1..19: mol_type = other RNA
actacgatcacggccaccg

SEQ ID NO: 8794 - RNA, 19 nt, synthetic construct
  source 1..19: mol_type = other RNA
gtgccgaacaccacggcca

SEQ ID NO: 8795 - RNA, 19 nt, synthetic construct
  source 1..19: mol_type = other RNA
ctggacttcggccacctca

SEQ ID NO: 8796 - RNA, 19 nt, synthetic construct
  source 1..19: mol_type = other RNA
ggacgaccaccccgggcca

SEQ ID NO: 8797 - RNA, 19 nt, synthetic construct
  source 1..19: mol_type = other RNA
ggaaccgtgagcaggtggg

SEQ ID NO: 8798 - RNA, 19 nt, synthetic construct
  source 1..19: mol_type = other RNA
cttccagtgctgacaagca

SEQ ID NO: 8799 - RNA, 19 nt, synthetic construct
  source 1..19: mol_type = other RNA
cactacagccaccgtgacg

SEQ ID NO: 8800 - RNA, 19 nt, synthetic construct
  source 1..19: mol_type = other RNA
cgcctatcacagaccacca

SEQ ID NO: 8801 - RNA, 19 nt, synthetic construct
  source 1..19: mol_type = other RNA
accaccacacccacggcca

SEQ ID NO: 8802 - RNA, 19 nt, synthetic construct
  source 1..19: mol_type = other RNA
accagtggctccacggtga

SEQ ID NO: 8803 - RNA, 19 nt, synthetic construct
  source 1..19: mol_type = other RNA
ccctcctctagcacacaga

SEQ ID NO: 8804 - RNA, 19 nt, synthetic construct
  source 1..19: mol_type = other RNA
actacgatcacggccaccg

SEQ ID NO: 8805 - RNA, 19 nt, synthetic construct
  source 1..19: mol_type = other RNA
cttccagtgctgacaagca

SEQ ID NO: 8806 - RNA, 19 nt, synthetic construct
  source 1..19: mol_type = other RNA
gacaagcacagccacaaaa

SEQ ID NO: 8807 - RNA, 19 nt, synthetic construct
  source 1..19: mol_type = other RNA
tcagtcctcaccaccctga

SEQ ID NO: 8808 - RNA, 19 nt, synthetic construct
  source 1..19: mol_type = other RNA
gtgcaatcagcactgtgac

SEQ ID NO: 8809 - RNA, 19 nt, synthetic construct
  source 1..19: mol_type = other RNA
attgaccgcttccagggcg

SEQ ID NO: 8810 - RNA, 19 nt, synthetic construct
  source 1..19: mol_type = other RNA
cgtcctcactgtcaccatg

SEQ ID NO: 8811 - RNA, 19 nt, synthetic construct
  source 1..19: mol_type = other RNA
tcaccatggtgcatgggaa

SEQ ID NO: 8812 - RNA, 19 nt, synthetic construct
  source 1..19: mol_type = other RNA
agggcctgatcctgtttga

SEQ ID NO: 8813 - RNA, 19 nt, synthetic construct
  source 1..19: mol_type = other RNA
tggacattcctgccctggg

SEQ ID NO: 8814 - RNA, 19 nt, synthetic construct
  source 1..19: mol_type = other RNA
ccagttgcaaggacatggc

SEQ ID NO: 8815 - RNA, 19 nt, synthetic construct
  source 1..19: mol_type = other RNA
acagccgctctgtgatctg

SEQ ID NO: 8816 - RNA, 19 nt, synthetic construct
  source 1..19: mol_type = other RNA
ttgaggtgccctgccagag

SEQ ID NO: 8817 - RNA, 19 nt, synthetic construct
  source 1..19: mol_type = other RNA
gggagcggtgggtcagcaa

SEQ ID NO: 8818 - RNA, 19 nt, synthetic construct
  source 1..19: mol_type = other RNA
ccaggcgcccttccctgcc

SEQ ID NO: 8819 - RNA, 19 nt, synthetic construct
  source 1..19: mol_type = other RNA
gccacatgtgtacctgcct

SEQ ID NO: 8820 - RNA, 19 nt, synthetic construct
  source 1..19: mol_type = other RNA
cacatgtgtacctgcctct

SEQ ID NO: 8821 - RNA, 19 nt, synthetic construct
  source 1..19: mol_type = other RNA
gtccagaccgcctgcctca

SEQ ID NO: 8822 - RNA, 19 nt, synthetic construct
  source 1..19: mol_type = other RNA
caagtactcagcagaggcc

SEQ ID NO: 8823 - RNA, 19 nt, synthetic construct
  source 1..19: mol_type = other RNA
cacacccgtggcttcccgg

SEQ ID NO: 8824 - RNA, 19 nt, synthetic construct
  source 1..19: mol_type = other RNA
gccactgctgtctgagaac

SEQ ID NO: 8825 - RNA, 19 nt, synthetic construct
  source 1..19: mol_type = other RNA
gagaacgttctgcctccat

SEQ ID NO: 8826 - RNA, 19 nt, synthetic construct
  source 1..19: mol_type = other RNA
gggacgccctggaacaaac

SEQ ID NO: 8827 - RNA, 19 nt, synthetic construct
  source 1..19: mol_type = other RNA
tccagctacgccgaggcct

SEQ ID NO: 8828 - RNA, 19 nt, synthetic construct
  source 1..19: mol_type = other RNA
actctacgacctgcatggt

SEQ ID NO: 8829 - RNA, 19 nt, synthetic construct
  source 1..19: mol_type = other RNA
gcttcaccgtgctggctga

SEQ ID NO: 8830 - RNA, 19 nt, synthetic construct
  source 1..19: mol_type = other RNA
acgggcgcagccttcgcca

SEQ ID NO: 8831 - RNA, 19 nt, synthetic construct
  source 1..19: mol_type = other RNA
gcgtcttcaagatgtgcta

SEQ ID NO: 8832 - RNA, 19 nt, synthetic construct
  source 1..19: mol_type = other RNA
cagagacgacaatgagccc

SEQ ID NO: 8833 - RNA, 19 nt, synthetic construct
  source 1..19: mol_type = other RNA
ccggggaccacccacaccg

SEQ ID NO: 8834 - RNA, 19 nt, synthetic construct
  source 1..19: mol_type = other RNA
ccccatcactgaccaccac

SEQ ID NO: 8835 - RNA, 19 nt, synthetic construct
  source 1..19: mol_type = other RNA
acttcccacaccctagcag

SEQ ID NO: 8836 - RNA, 19 nt, synthetic construct
  source 1..19: mol_type = other RNA
gcggccggaggggccgtct

SEQ ID NO: 8837 - RNA, 19 nt, synthetic construct
  source 1..19: mol_type = other RNA
ccccatcactgaccaccac

SEQ ID NO: 8838 - RNA, 19 nt, synthetic construct
  source 1..19: mol_type = other RNA
gcggccggaggggccgtct

SEQ ID NO: 8839 - RNA, 19 nt, synthetic construct
  source 1..19: mol_type = other RNA
ccagctctacggccacgcc

SEQ ID NO: 8840 - RNA, 19 nt, synthetic construct
  source 1..19: mol_type = other RNA
cagccaccaaatccacagc

SEQ ID NO: 8841 - RNA, 19 nt, synthetic construct
  source 1..19: mol_type = other RNA
ttcacccttgggaccaccg

SEQ ID NO: 8842 - RNA, 19 nt, synthetic construct
  source 1..19: mol_type = other RNA
ccggggaccacccacaccg

SEQ ID NO: 8843 - RNA, 19 nt, synthetic construct
  source 1..19: mol_type = other RNA
ccccatcactgaccaccac

SEQ ID NO: 8844 - RNA, 19 nt, synthetic construct
  source 1..19: mol_type = other RNA
ccagctctacggccacgcc

SEQ ID NO: 8845 - RNA, 19 nt, synthetic construct
  source 1..19: mol_type = other RNA
ccatcactgatcaccacgg

SEQ ID NO: 8846 - RNA, 19 nt, synthetic construct
  source 1..19: mol_type = other RNA
gcggccggaggggccgtct

SEQ ID NO: 8847 - RNA, 19 nt, synthetic construct
  source 1..19: mol_type = other RNA
ggggagttgggccaggtcg

SEQ ID NO: 8848 - RNA, 19 nt, synthetic construct
  source 1..19: mol_type = other RNA
cagccaccaaatccacagc

SEQ ID NO: 8849 - RNA, 19 nt, synthetic construct
  source 1..19: mol_type = other RNA
ccggggaccacccacaccg

SEQ ID NO: 8850 - RNA, 19 nt, synthetic construct
  source 1..19: mol_type = other RNA
ccccatcactgaccaccac

SEQ ID NO: 8851 - RNA, 19 nt, synthetic construct
  source 1..19: mol_type = other RNA
ggatatcgtcctcactgtc

SEQ ID NO: 8852 - RNA, 19 nt, synthetic construct
  source 1..19: mol_type = other RNA
gcaactctaggaaccagag

SEQ ID NO: 8853 - RNA, 19 nt, synthetic construct
  source 1..19: mol_type = other RNA
ccagaccgcctgcctcacg

SEQ ID NO: 8854 - RNA, 19 nt, synthetic construct
  source 1..19: mol_type = other RNA
gtccatttgctgaccccac

SEQ ID NO: 8855 - RNA, 19 nt, synthetic construct
  source 1..19: mol_type = other RNA
ctgcccaccccgtgggtga

SEQ ID NO: 8856 - RNA, 19 nt, synthetic construct
  source 1..19: mol_type = other RNA
cggcctcccggccttcaac

SEQ ID NO: 8857 - RNA, 19 nt, synthetic construct
  source 1..19: mol_type = other RNA
agcccttccactcgaactg

SEQ ID NO: 8858 - RNA, 19 nt, synthetic construct
  source 1..19: mol_type = other RNA
acgcctacgtggtggatgc

SEQ ID NO: 8859 - RNA, 19 nt, synthetic construct
  source 1..19: mol_type = other RNA
ccacttgccgcggcctgag

SEQ ID NO: 8860 - RNA, 19 nt, synthetic construct
  source 1..19: mol_type = other RNA
cccaggagtgcccctgcta

SEQ ID NO: 8861 - RNA, 19 nt, synthetic construct
  source 1..19: mol_type = other RNA
gtggtgcacgacgagggcg

SEQ ID NO: 8862 - RNA, 19 nt, synthetic construct
  source 1..19: mol_type = other RNA
gccagcaccgcttccaaag

SEQ ID NO: 8863 - RNA, 19 nt, synthetic construct
  source 1..19: mol_type = other RNA
cccaggcaactgctggcac

SEQ ID NO: 8864 - RNA, 19 nt, synthetic construct
  source 1..19: mol_type = other RNA
agtgccgaacaccacggcc

SEQ ID NO: 8865 - RNA, 19 nt, synthetic construct
  source 1..19: mol_type = other RNA
accaccccgggccacacca

SEQ ID NO: 8866 - RNA, 19 nt, synthetic construct
  source 1..19: mol_type = other RNA
ctgggcaccgcctggaccc

SEQ ID NO: 8867 - RNA, 19 nt, synthetic construct
  source 1..19: mol_type = other RNA
agtgccgaacaccacggcc

SEQ ID NO: 8868 - RNA, 19 nt, synthetic construct
  source 1..19: mol_type = other RNA
accaccccgggccacacca

SEQ ID NO: 8869 - RNA, 19 nt, synthetic construct
  source 1..19: mol_type = other RNA
cccaggcaactgctggcac

SEQ ID NO: 8870 - RNA, 19 nt, synthetic construct
  source 1..19: mol_type = other RNA
ccagtggctccacggtgac

SEQ ID NO: 8871 - RNA, 19 nt, synthetic construct
  source 1..19: mol_type = other RNA
agtgccgaacaccacggcc

SEQ ID NO: 8872 - RNA, 19 nt, synthetic construct
  source 1..19: mol_type = other RNA
cccaggcaactgctggcac

SEQ ID NO: 8873 - RNA, 19 nt, synthetic construct
  source 1..19: mol_type = other RNA
ccagtggctccacggtgac

SEQ ID NO: 8874 - RNA, 19 nt, synthetic construct
  source 1..19: mol_type = other RNA
tggccactatgcccacagc

SEQ ID NO: 8875 - RNA, 19 nt, synthetic construct
  source 1..19: mol_type = other RNA
cgccactcaggagtcctac

SEQ ID NO: 8876 - RNA, 19 nt, synthetic construct
  source 1..19: mol_type = other RNA
gcgtgccggacgctggtgt

SEQ ID NO: 8877 - RNA, 19 nt, synthetic construct
  source 1..19: mol_type = other RNA
cggccatgctcgtggtgcc

SEQ ID NO: 8878 - RNA, 19 nt, synthetic construct
  source 1..19: mol_type = other RNA
cgtgagctttgttccaccc

SEQ ID NO: 8879 - RNA, 19 nt, synthetic construct
  source 1..19: mol_type = other RNA
ccttcaacaccacctgcag

SEQ ID NO: 8880 - RNA, 19 nt, synthetic construct
  source 1..19: mol_type = other RNA
tggatgcctgccagcccac

SEQ ID NO: 8881 - RNA, 19 nt, synthetic construct
  source 1..19: mol_type = other RNA
cctgccacgacgcgggcct

SEQ ID NO: 8882 - RNA, 19 nt, synthetic construct
  source 1..19: mol_type = other RNA
gtcggtgcaagggtcccca

SEQ ID NO: 8883 - RNA, 19 nt, synthetic construct
  source 1..19: mol_type = other RNA
ccaccgatgggcttggcgc

SEQ ID NO: 8884 - RNA, 19 nt, synthetic construct
  source 1..19: mol_type = other RNA
cggcgcagcttcccgacat

SEQ ID NO: 8885 - RNA, 19 nt, synthetic construct
  source 1..19: mol_type = other RNA
aggccccgtgacggtcacc

SEQ ID NO: 8886 - RNA, 19 nt, synthetic construct
  source 1..19: mol_type = other RNA
accccgccaccgaccacag

SEQ ID NO: 8887 - RNA, 19 nt, synthetic construct
  source 1..19: mol_type = other RNA
agagctggagacggccacc

SEQ ID NO: 8888 - RNA, 19 nt, synthetic construct
  source 1..19: mol_type = other RNA
agggcacgacccgctgtca

SEQ ID NO: 8889 - RNA, 19 nt, synthetic construct
  source 1..19: mol_type = other RNA
cacacccacggccaccatg

SEQ ID NO: 8890 - RNA, 19 nt, synthetic construct
  source 1..19: mol_type = other RNA
tagggaccacccacacacc

SEQ ID NO: 8891 - RNA, 19 nt, synthetic construct
  source 1..19: mol_type = other RNA
tccagggacgaccaccccg

SEQ ID NO: 8892 - RNA, 19 nt, synthetic construct
  source 1..19: mol_type = other RNA
ccagggacgaccaccccgg

SEQ ID NO: 8893 - RNA, 19 nt, synthetic construct
  source 1..19: mol_type = other RNA
cacacccacggccaccatg

SEQ ID NO: 8894 - RNA, 19 nt, synthetic construct
  source 1..19: mol_type = other RNA
tagggaccacccacacacc

SEQ ID NO: 8895 - RNA, 19 nt, synthetic construct
  source 1..19: mol_type = other RNA
caccacggccaccacacac

SEQ ID NO: 8896 - RNA, 19 nt, synthetic construct
  source 1..19: mol_type = other RNA
cctcaccctagcagcagga

SEQ ID NO: 8897 - RNA, 19 nt, synthetic construct
  source 1..19: mol_type = other RNA
tccagggacgaccaccccg

SEQ ID NO: 8898 - RNA, 19 nt, synthetic construct
  source 1..19: mol_type = other RNA
ccagggacgaccaccccgg

SEQ ID NO: 8899 - RNA, 19 nt, synthetic construct
  source 1..19: mol_type = other RNA
aaggccaccacgacaaggg

SEQ ID NO: 8900 - RNA, 19 nt, synthetic construct
  source 1..19: mol_type = other RNA
aggccaccacgacaagggc

SEQ ID NO: 8901 - RNA, 19 nt, synthetic construct
  source 1..19: mol_type = other RNA
cacacccacggccaccatg

SEQ ID NO: 8902 - RNA, 19 nt, synthetic construct
  source 1..19: mol_type = other RNA
tagggaccacccacacacc

SEQ ID NO: 8903 - RNA, 19 nt, synthetic construct
  source 1..19: mol_type = other RNA
caccacggccaccacacac

SEQ ID NO: 8904 - RNA, 19 nt, synthetic construct
  source 1..19: mol_type = other RNA
cctcaccctagcagcagga

SEQ ID NO: 8905 - RNA, 19 nt, synthetic construct
  source 1..19: mol_type = other RNA
tccagggacgaccaccccg

SEQ ID NO: 8906 - RNA, 19 nt, synthetic construct
  source 1..19: mol_type = other RNA
ccagggacgaccaccccgg

SEQ ID NO: 8907 - RNA, 19 nt, synthetic construct
  source 1..19: mol_type = other RNA
accacggtggtgaccacgg

SEQ ID NO: 8908 - RNA, 19 nt, synthetic construct
  source 1..19: mol_type = other RNA
cacacccacggccaccatg

SEQ ID NO: 8909 - RNA, 19 nt, synthetic construct
  source 1..19: mol_type = other RNA
tagggaccacccacacacc

SEQ ID NO: 8910 - RNA, 19 nt, synthetic construct
  source 1..19: mol_type = other RNA
caccacggccaccacacac

SEQ ID NO: 8911 - RNA, 19 nt, synthetic construct
  source 1..19: mol_type = other RNA
cctcaccctagcagcagga

SEQ ID NO: 8912 - RNA, 19 nt, synthetic construct
  source 1..19: mol_type = other RNA
cccagggacgaccaccccg

SEQ ID NO: 8913 - RNA, 19 nt, synthetic construct
  source 1..19: mol_type = other RNA
ccagggacgaccaccccgg

SEQ ID NO: 8914 - RNA, 19 nt, synthetic construct
  source 1..19: mol_type = other RNA
accacggtggtgaccacgg

SEQ ID NO: 8915 - RNA, 19 nt, synthetic construct
  source 1..19: mol_type = other RNA
aaggccaccacgacaaggg

SEQ ID NO: 8916 - RNA, 19 nt, synthetic construct
  source 1..19: mol_type = other RNA
aggccaccacgacaagggc

SEQ ID NO: 8917 - RNA, 19 nt, synthetic construct
  source 1..19: mol_type = other RNA
cacacccacggccaccatg

SEQ ID NO: 8918 - RNA, 19 nt, synthetic construct
  source 1..19: mol_type = other RNA
ccagagtgctgaccaccac

SEQ ID NO: 8919 - RNA, 19 nt, synthetic construct
  source 1..19: mol_type = other RNA
ccatgtccacaatccacac

SEQ ID NO: 8920 - RNA, 19 nt, synthetic construct
  source 1..19: mol_type = other RNA
ccaccaattccacggccac

SEQ ID NO: 8921 - RNA, 19 nt, synthetic construct
  source 1..19: mol_type = other RNA
ccaattccacggccacacc

SEQ ID NO: 8922 - RNA, 19 nt, synthetic construct
  source 1..19: mol_type = other RNA
ggggacgacccggatcctc

SEQ ID NO: 8923 - RNA, 19 nt, synthetic construct
  source 1..19: mol_type = other RNA
gacattgaccgcttccagg

SEQ ID NO: 8924 - RNA, 19 nt, synthetic construct
  source 1..19: mol_type = other RNA
acaatgccatccctctccg

SEQ ID NO: 8925 - RNA, 19 nt, synthetic construct
  source 1..19: mol_type = other RNA
ggcgtgagcgtcaccttca

SEQ ID NO: 8926 - RNA, 19 nt, synthetic construct
  source 1..19: mol_type = other RNA
ttcttcaacgcctgcatca

SEQ ID NO: 8927 - RNA, 19 nt, synthetic construct
  source 1..19: mol_type = other RNA
gctgggagaatgcagggca

SEQ ID NO: 8928 - RNA, 19 nt, synthetic construct
  source 1..19: mol_type = other RNA
tcctcgcccacccggcgcg

SEQ ID NO: 8929 - RNA, 19 nt, synthetic construct
  source 1..19: mol_type = other RNA
cctcgcccacccggcgcgt

SEQ ID NO: 8930 - RNA, 19 nt, synthetic construct
  source 1..19: mol_type = other RNA
gccccctgaacccggcgca

SEQ ID NO: 8931 - RNA, 19 nt, synthetic construct
  source 1..19: mol_type = other RNA
tacatcaaggtcagcatcc

SEQ ID NO: 8932 - RNA, 19 nt, synthetic construct
  source 1..19: mol_type = other RNA
acatcaaggtcagcatccg

SEQ ID NO: 8933 - RNA, 19 nt, synthetic construct
  source 1..19: mol_type = other RNA
aaggtcagcatccggctgg

SEQ ID NO: 8934 - RNA, 19 nt, synthetic construct
  source 1..19: mol_type = other RNA
gccaccgcaccctgctggg

SEQ ID NO: 8935 - RNA, 19 nt, synthetic construct
  source 1..19: mol_type = other RNA
gcacctgctccggggggct

SEQ ID NO: 8936 - RNA, 19 nt, synthetic construct
  source 1..19: mol_type = other RNA
ctctgtgcagggcggggcc

SEQ ID NO: 8937 - RNA, 19 nt, synthetic construct
  source 1..19: mol_type = other RNA
cccacatctccacctatga

SEQ ID NO: 8938 - RNA, 19 nt, synthetic construct
  source 1..19: mol_type = other RNA
gcagcttcaccgtgctggc

SEQ ID NO: 8939 - RNA, 19 nt, synthetic construct
  source 1..19: mol_type = other RNA
tcttcatcgtggtgcagac

SEQ ID NO: 8940 - RNA, 19 nt, synthetic construct
  source 1..19: mol_type = other RNA
gcagctggtgccactcatg

SEQ ID NO: 8941 - RNA, 19 nt, synthetic construct
  source 1..19: mol_type = other RNA
gctgacgacttcacggccc

SEQ ID NO: 8942 - RNA, 19 nt, synthetic construct
  source 1..19: mol_type = other RNA
atcccaacagtgccttctc

SEQ ID NO: 8943 - RNA, 19 nt, synthetic construct
  source 1..19: mol_type = other RNA
agcccacttgccgcggcct

SEQ ID NO: 8944 - RNA, 19 nt, synthetic construct
  source 1..19: mol_type = other RNA
gcccaggagtgcccctgct

SEQ ID NO: 8945 - RNA, 19 nt, synthetic construct
  source 1..19: mol_type = other RNA
cccccggggctggtgtcgg

SEQ ID NO: 8946 - RNA, 19 nt, synthetic construct
  source 1..19: mol_type = other RNA
ccccggggctggtgtcgga

SEQ ID NO: 8947 - RNA, 19 nt, synthetic construct
  source 1..19: mol_type = other RNA
agaccatcagggtcgactg

SEQ ID NO: 8948 - RNA, 19 nt, synthetic construct
  source 1..19: mol_type = other RNA
agctttgaaggcagctgcg

SEQ ID NO: 8949 - RNA, 19 nt, synthetic construct
  source 1..19: mol_type = other RNA
actactgtggggacaacac

SEQ ID NO: 8950 - RNA, 19 nt, synthetic construct
  source 1..19: mol_type = other RNA
agctgatcctccaagaggg

SEQ ID NO: 8951 - RNA, 19 nt, synthetic construct
  source 1..19: mol_type = other RNA
gacaatgccatcaatgact

SEQ ID NO: 8952 - RNA, 19 nt, synthetic construct
  source 1..19: mol_type = other RNA
aatgccatcaatgactttg

SEQ ID NO: 8953 - RNA, 19 nt, synthetic construct
  source 1..19: mol_type = other RNA
acgcccaggcctgccacga

SEQ ID NO: 8954 - RNA, 19 nt, synthetic construct
  source 1..19: mol_type = other RNA
cgcccaggcctgccacgac

SEQ ID NO: 8955 - RNA, 19 nt, synthetic construct
  source 1..19: mol_type = other RNA
ctccggacacctgcccctt

SEQ ID NO: 8956 - RNA, 19 nt, synthetic construct
  source 1..19: mol_type = other RNA
gtgtggctgctacgacaag

SEQ ID NO: 8957 - RNA, 19 nt, synthetic construct
  source 1..19: mol_type = other RNA
cggtgcaagggtccccaca

SEQ ID NO: 8958 - RNA, 19 nt, synthetic construct
  source 1..19: mol_type = other RNA
gctgtaactgcacacccag

SEQ ID NO: 8959 - RNA, 19 nt, synthetic construct
  source 1..19: mol_type = other RNA
ccagctggtacaatgggca

SEQ ID NO: 8960 - RNA, 19 nt, synthetic construct
  source 1..19: mol_type = other RNA
ggcggcgcagcttcccgac

SEQ ID NO: 8961 - RNA, 19 nt, synthetic construct
  source 1..19: mol_type = other RNA
acagccaacagagtccccc

SEQ ID NO: 8962 - RNA, 19 nt, synthetic construct
  source 1..19: mol_type = other RNA
gctgtgcctaccccaaccc

SEQ ID NO: 8963 - RNA, 19 nt, synthetic construct
  source 1..19: mol_type = other RNA
cacctcgcagactgggtcc

SEQ ID NO: 8964 - RNA, 19 nt, synthetic construct
  source 1..19: mol_type = other RNA
agggcacttatgccagcag

SEQ ID NO: 8965 - RNA, 19 nt, synthetic construct
  source 1..19: mol_type = other RNA
cacttatgccagcagccta

SEQ ID NO: 8966 - RNA, 19 nt, synthetic construct
  source 1..19: mol_type = other RNA
gccagcagcctaaggacat

SEQ ID NO: 8967 - RNA, 19 nt, synthetic construct
  source 1..19: mol_type = other RNA
tgggagcaggagggcgtct

SEQ ID NO: 8968 - RNA, 19 nt, synthetic construct
  source 1..19: mol_type = other RNA
cccaccctctcagaaggac

SEQ ID NO: 8969 - RNA, 19 nt, synthetic construct
  source 1..19: mol_type = other RNA
ctctcagaaggactgacat

SEQ ID NO: 8970 - RNA, 19 nt, synthetic construct
  source 1..19: mol_type = other RNA
tcagaaggactgacatccc

SEQ ID NO: 8971 - RNA, 19 nt, synthetic construct
  source 1..19: mol_type = other RNA
acacaagcacccttggtac

SEQ ID NO: 8972 - RNA, 19 nt, synthetic construct
  source 1..19: mol_type = other RNA
cgacgcctgcaggctccac

SEQ ID NO: 8973 - RNA, 19 nt, synthetic construct
  source 1..19: mol_type = other RNA
ggtggccacatccaccctt

SEQ ID NO: 8974 - RNA, 19 nt, synthetic construct
  source 1..19: mol_type = other RNA
gccacatccacccttccaa

SEQ ID NO: 8975 - RNA, 19 nt, synthetic construct
  source 1..19: mol_type = other RNA
ccttccagggacgacgggg

SEQ ID NO: 8976 - RNA, 19 nt, synthetic construct
  source 1..19: mol_type = other RNA
cgacggggagcttgggcac

SEQ ID NO: 8977 - RNA, 19 nt, synthetic construct
  source 1..19: mol_type = other RNA
agcttgggcacatggcgcc

SEQ ID NO: 8978 - RNA, 19 nt, synthetic construct
  source 1..19: mol_type = other RNA
gagctcgcccgacaggcac

SEQ ID NO: 8979 - RNA, 19 nt, synthetic construct
  source 1..19: mol_type = other RNA
cgagcctggcgccaacact

SEQ ID NO: 8980 - RNA, 19 nt, synthetic construct
  source 1..19: mol_type = other RNA
gagcctggcgccaacactc

SEQ ID NO: 8981 - RNA, 19 nt, synthetic construct
  source 1..19: mol_type = other RNA
tgagccccttgactaacac

SEQ ID NO: 8982 - RNA, 19 nt, synthetic construct
  source 1..19: mol_type = other RNA
cagccagggcacgacccgc

SEQ ID NO: 8983 - RNA, 19 nt, synthetic construct
  source 1..19: mol_type = other RNA
ctcccaaagtgctgaccac

SEQ ID NO: 8984 - RNA, 19 nt, synthetic construct
  source 1..19: mol_type = other RNA
gtccagggactgcaaccgc

SEQ ID NO: 8985 - RNA, 19 nt, synthetic construct
  source 1..19: mol_type = other RNA
acctccacagtgcttaccg

SEQ ID NO: 8986 - RNA, 19 nt, synthetic construct
  source 1..19: mol_type = other RNA
ccaggaacagctcacacta

SEQ ID NO: 8987 - RNA, 19 nt, synthetic construct
  source 1..19: mol_type = other RNA
ccagcccagggacggcact

SEQ ID NO: 8988 - RNA, 19 nt, synthetic construct
  source 1..19: mol_type = other RNA
tccacggtgaccccctcct

SEQ ID NO: 8989 - RNA, 19 nt, synthetic construct
  source 1..19: mol_type = other RNA
tcccggggaccacccacac

SEQ ID NO: 8990 - RNA, 19 nt, synthetic construct
  source 1..19: mol_type = other RNA
cacggccaccggctccacc

SEQ ID NO: 8991 - RNA, 19 nt, synthetic construct
  source 1..19: mol_type = other RNA
cccctcctcaactcctggg

SEQ ID NO: 8992 - RNA, 19 nt, synthetic construct
  source 1..19: mol_type = other RNA
acaccatggccaccacaca

SEQ ID NO: 8993 - RNA, 19 nt, synthetic construct
  source 1..19: mol_type = other RNA
tggccaccacacacgggcg

SEQ ID NO: 8994 - RNA, 19 nt, synthetic construct
  source 1..19: mol_type = other RNA
cccagcagtccccacacgg

SEQ ID NO: 8995 - RNA, 19 nt, synthetic construct
  source 1..19: mol_type = other RNA
agcagtccccacacggtgc

SEQ ID NO: 8996 - RNA, 19 nt, synthetic construct
  source 1..19: mol_type = other RNA
tgcgcacagcctggacttc

SEQ ID NO: 8997 - RNA, 19 nt, synthetic construct
  source 1..19: mol_type = other RNA
tggacttcggccacctcgg

SEQ ID NO: 8998 - RNA, 19 nt, synthetic construct
  source 1..19: mol_type = other RNA
ggacttcggccacctcggg

SEQ ID NO: 8999 - RNA, 19 nt, synthetic construct
  source 1..19: mol_type = other RNA
acctcgggcatcttgggca

SEQ ID NO: 9000 - RNA, 19 nt, synthetic construct
  source 1..19: mol_type = other RNA
cacatcacagagccttcca

SEQ ID NO: 9001 - RNA, 19 nt, synthetic construct
  source 1..19: mol_type = other RNA
acatcacagagccttccac

SEQ ID NO: 9002 - RNA, 19 nt, synthetic construct
  source 1..19: mol_type = other RNA
cacaccctagcagcaacca

SEQ ID NO: 9003 - RNA, 19 nt, synthetic construct
  source 1..19: mol_type = other RNA
gtgcctggtcagagtggct

SEQ ID NO: 9004 - RNA, 19 nt, synthetic construct
  source 1..19: mol_type = other RNA
acagctaccccatgccggg

SEQ ID NO: 9005 - RNA, 19 nt, synthetic construct
  source 1..19: mol_type = other RNA
ccggggccctctggcgggg

SEQ ID NO: 9006 - RNA, 19 nt, synthetic construct
  source 1..19: mol_type = other RNA
acacctactccaacatccg

SEQ ID NO: 9007 - RNA, 19 nt, synthetic construct
  source 1..19: mol_type = other RNA
gcctggtctgcaggaaccg

SEQ ID NO: 9008 - RNA, 19 nt, synthetic construct
  source 1..19: mol_type = other RNA
gagcaggtggggaagttca

SEQ ID NO: 9009 - RNA, 19 nt, synthetic construct
  source 1..19: mol_type = other RNA
ctctacggccatgccctcc

SEQ ID NO: 9010 - RNA, 19 nt, synthetic construct
  source 1..19: mol_type = other RNA
tggatcctcacagagccga

SEQ ID NO: 9011 - RNA, 19 nt, synthetic construct
  source 1..19: mol_type = other RNA
caccgtgacggtgcccacc

SEQ ID NO: 9012 - RNA, 19 nt, synthetic construct
  source 1..19: mol_type = other RNA
acccaggcaactgctggca

SEQ ID NO: 9013 - RNA, 19 nt, synthetic construct
  source 1..19: mol_type = other RNA
gccacgacacccacagtca

SEQ ID NO: 9014 - RNA, 19 nt, synthetic construct
  source 1..19: mol_type = other RNA
gtccagggactgcaaccgc

SEQ ID NO: 9015 - RNA, 19 nt, synthetic construct
  source 1..19: mol_type = other RNA
ccaggaacagctcacacta

SEQ ID NO: 9016 - RNA, 19 nt, synthetic construct
  source 1..19: mol_type = other RNA
accagaggttccacggtga

SEQ ID NO: 9017 - RNA, 19 nt, synthetic construct
  source 1..19: mol_type = other RNA
tccacggtgaccccctcct

SEQ ID NO: 9018 - RNA, 19 nt, synthetic construct
  source 1..19: mol_type = other RNA
tcccggggaccacccacac

SEQ ID NO: 9019 - RNA, 19 nt, synthetic construct
  source 1..19: mol_type = other RNA
cacggccaccggctccacc

SEQ ID NO: 9020 - RNA, 19 nt, synthetic construct
  source 1..19: mol_type = other RNA
accagcagcacagtgactc

SEQ ID NO: 9021 - RNA, 19 nt, synthetic construct
  source 1..19: mol_type = other RNA
cggccaccacacacgggcg

SEQ ID NO: 9022 - RNA, 19 nt, synthetic construct
  source 1..19: mol_type = other RNA
cccagcagtccccacacgg

SEQ ID NO: 9023 - RNA, 19 nt, synthetic construct
  source 1..19: mol_type = other RNA
agcagtccccacacggtgc

SEQ ID NO: 9024 - RNA, 19 nt, synthetic construct
  source 1..19: mol_type = other RNA
tgcgcacagcctggacttc

SEQ ID NO: 9025 - RNA, 19 nt, synthetic construct
  source 1..19: mol_type = other RNA
tggacttcggccacctcag

SEQ ID NO: 9026 - RNA, 19 nt, synthetic construct
  source 1..19: mol_type = other RNA
ggacttcggccacctcagg

SEQ ID NO: 9027 - RNA, 19 nt, synthetic construct
  source 1..19: mol_type = other RNA
acctcaggcaccttgggca

SEQ ID NO: 9028 - RNA, 19 nt, synthetic construct
  source 1..19: mol_type = other RNA
caggcaccttgggcaccac

SEQ ID NO: 9029 - RNA, 19 nt, synthetic construct
  source 1..19: mol_type = other RNA
cacatcacagagccttcca

SEQ ID NO: 9030 - RNA, 19 nt, synthetic construct
  source 1..19: mol_type = other RNA
acatcacagagccttccac

SEQ ID NO: 9031 - RNA, 19 nt, synthetic construct
  source 1..19: mol_type = other RNA
gtgcctggtcagagtggct

SEQ ID NO: 9032 - RNA, 19 nt, synthetic construct
  source 1..19: mol_type = other RNA
acagctaccccatgccggg

SEQ ID NO: 9033 - RNA, 19 nt, synthetic construct
  source 1..19: mol_type = other RNA
ccggggccctctggcgggg

SEQ ID NO: 9034 - RNA, 19 nt, synthetic construct
  source 1..19: mol_type = other RNA
acacctactccaacatccg

SEQ ID NO: 9035 - RNA, 19 nt, synthetic construct
  source 1..19: mol_type = other RNA
gcctggtctgcaggaaccg

SEQ ID NO: 9036 - RNA, 19 nt, synthetic construct
  source 1..19: mol_type = other RNA
gagcaggtggggaagttca

SEQ ID NO: 9037 - RNA, 19 nt, synthetic construct
  source 1..19: mol_type = other RNA
tggatcctcacagagcaga

SEQ ID NO: 9038 - RNA, 19 nt, synthetic construct
  source 1..19: mol_type = other RNA
gaccacagcagccactacg

SEQ ID NO: 9039 - RNA, 19 nt, synthetic construct
  source 1..19: mol_type = other RNA
agccaccagttccaaagcc

SEQ ID NO: 9040 - RNA, 19 nt, synthetic construct
  source 1..19: mol_type = other RNA
caccaaatccacagctacc

SEQ ID NO: 9041 - RNA, 19 nt, synthetic construct
  source 1..19: mol_type = other RNA
atccacagctaccagcttt

SEQ ID NO: 9042 - RNA, 19 nt, synthetic construct
  source 1..19: mol_type = other RNA
ccttcacccttgggaccac

SEQ ID NO: 9043 - RNA, 19 nt, synthetic construct
  source 1..19: mol_type = other RNA
atggccaccatgtccacaa

SEQ ID NO: 9044 - RNA, 19 nt, synthetic construct
  source 1..19: mol_type = other RNA
tggccaccatgtccacaat

SEQ ID NO: 9045 - RNA, 19 nt, synthetic construct
  source 1..19: mol_type = other RNA
accatgtccacaatccacc

SEQ ID NO: 9046 - RNA, 19 nt, synthetic construct
  source 1..19: mol_type = other RNA
ccctcctccactccggaga

SEQ ID NO: 9047 - RNA, 19 nt, synthetic construct
  source 1..19: mol_type = other RNA
ctccacagtgctgaccacg

SEQ ID NO: 9048 - RNA, 19 nt, synthetic construct
  source 1..19: mol_type = other RNA
caagggccaccagttccat

SEQ ID NO: 9049 - RNA, 19 nt, synthetic construct
  source 1..19: mol_type = other RNA
acagagcccagcactacag

SEQ ID NO: 9050 - RNA, 19 nt, synthetic construct
  source 1..19: mol_type = other RNA
ccagcactacagccaccgt

SEQ ID NO: 9051 - RNA, 19 nt, synthetic construct
  source 1..19: mol_type = other RNA
caccgtgacggtgcccacc

SEQ ID NO: 9052 - RNA, 19 nt, synthetic construct
  source 1..19: mol_type = other RNA
gtccagggactgcaaccgc

SEQ ID NO: 9053 - RNA, 19 nt, synthetic construct
  source 1..19: mol_type = other RNA
ggcaccgcctggacccgcc

SEQ ID NO: 9054 - RNA, 19 nt, synthetic construct
  source 1..19: mol_type = other RNA
ccaggaacagctcacacta

SEQ ID NO: 9055 - RNA, 19 nt, synthetic construct
  source 1..19: mol_type = other RNA
ccagcccagggacggcact

SEQ ID NO: 9056 - RNA, 19 nt, synthetic construct
  source 1..19: mol_type = other RNA
tccacggtgaccccctcct

SEQ ID NO: 9057 - RNA, 19 nt, synthetic construct
  source 1..19: mol_type = other RNA
tcccggggaccacccacac

SEQ ID NO: 9058 - RNA, 19 nt, synthetic construct
  source 1..19: mol_type = other RNA
ccactacgatcacagccac

SEQ ID NO: 9059 - RNA, 19 nt, synthetic construct
  source 1..19: mol_type = other RNA
accagcagcacagtgactc

SEQ ID NO: 9060 - RNA, 19 nt, synthetic construct
  source 1..19: mol_type = other RNA
cccagcagtccccacacgg

SEQ ID NO: 9061 - RNA, 19 nt, synthetic construct
  source 1..19: mol_type = other RNA
agcagtccccacacggtgc

SEQ ID NO: 9062 - RNA, 19 nt, synthetic construct
  source 1..19: mol_type = other RNA
tgcgcacagcctggacttc

SEQ ID NO: 9063 - RNA, 19 nt, synthetic construct
  source 1..19: mol_type = other RNA
tggacttcggccacctcgg

SEQ ID NO: 9064 - RNA, 19 nt, synthetic construct
  source 1..19: mol_type = other RNA
ggacttcggccacctcggg

SEQ ID NO: 9065 - RNA, 19 nt, synthetic construct
  source 1..19: mol_type = other RNA
acctcgggcatcttgggca

SEQ ID NO: 9066 - RNA, 19 nt, synthetic construct
  source 1..19: mol_type = other RNA
cacatcacagagccttcca

SEQ ID NO: 9067 - RNA, 19 nt, synthetic construct
  source 1..19: mol_type = other RNA
acatcacagagccttccac

SEQ ID NO: 9068 - RNA, 19 nt, synthetic construct
  source 1..19: mol_type = other RNA
acagccacacccagcaaga

SEQ ID NO: 9069 - RNA, 19 nt, synthetic construct
  source 1..19: mol_type = other RNA
taaccacggtggtgaccac

SEQ ID NO: 9070 - RNA, 19 nt, synthetic construct
  source 1..19: mol_type = other RNA
cggtggtgaccacgggctg

SEQ ID NO: 9071 - RNA, 19 nt, synthetic construct
  source 1..19: mol_type = other RNA
accacgggctgtgagcccc

SEQ ID NO: 9072 - RNA, 19 nt, synthetic construct
  source 1..19: mol_type = other RNA
gtgcctggtcagagtggct

SEQ ID NO: 9073 - RNA, 19 nt, synthetic construct
  source 1..19: mol_type = other RNA
acagctaccccatgccggg

SEQ ID NO: 9074 - RNA, 19 nt, synthetic construct
  source 1..19: mol_type = other RNA
ccggggccctctggcgggg

SEQ ID NO: 9075 - RNA, 19 nt, synthetic construct
  source 1..19: mol_type = other RNA
acacctactccaacatccg

SEQ ID NO: 9076 - RNA, 19 nt, synthetic construct
  source 1..19: mol_type = other RNA
cggccggaggggcagtctg

SEQ ID NO: 9077 - RNA, 19 nt, synthetic construct
  source 1..19: mol_type = other RNA
ggccggaggggcagtctgt

SEQ ID NO: 9078 - RNA, 19 nt, synthetic construct
  source 1..19: mol_type = other RNA
gcctggtctgcaggaaccg

SEQ ID NO: 9079 - RNA, 19 nt, synthetic construct
  source 1..19: mol_type = other RNA
gagcaggtggggaagttca

SEQ ID NO: 9080 - RNA, 19 nt, synthetic construct
  source 1..19: mol_type = other RNA
tggatcctcacagagccga

SEQ ID NO: 9081 - RNA, 19 nt, synthetic construct
  source 1..19: mol_type = other RNA
caccgtgacggtgcccacc

SEQ ID NO: 9082 - RNA, 19 nt, synthetic construct
  source 1..19: mol_type = other RNA
acccaggcaactgctggca

SEQ ID NO: 9083 - RNA, 19 nt, synthetic construct
  source 1..19: mol_type = other RNA
gccacgacacccacagtca

SEQ ID NO: 9084 - RNA, 19 nt, synthetic construct
  source 1..19: mol_type = other RNA
gtccagggactgcaaccgc

SEQ ID NO: 9085 - RNA, 19 nt, synthetic construct
  source 1..19: mol_type = other RNA
ccctcttccaccccaggaa

SEQ ID NO: 9086 - RNA, 19 nt, synthetic construct
  source 1..19: mol_type = other RNA
ccaggaacagctcacacta

SEQ ID NO: 9087 - RNA, 19 nt, synthetic construct
  source 1..19: mol_type = other RNA
accacgggcttcacagtca

SEQ ID NO: 9088 - RNA, 19 nt, synthetic construct
  source 1..19: mol_type = other RNA
aaccagtggctccacggtg

SEQ ID NO: 9089 - RNA, 19 nt, synthetic construct
  source 1..19: mol_type = other RNA
tccacggtgaccccctcct

SEQ ID NO: 9090 - RNA, 19 nt, synthetic construct
  source 1..19: mol_type = other RNA
tcccggggaccacccacac

SEQ ID NO: 9091 - RNA, 19 nt, synthetic construct
  source 1..19: mol_type = other RNA
cacggccaccggctccacc

SEQ ID NO: 9092 - RNA, 19 nt, synthetic construct
  source 1..19: mol_type = other RNA
accagcagcacagtgactc

SEQ ID NO: 9093 - RNA, 19 nt, synthetic construct
  source 1..19: mol_type = other RNA
cggccaccacacacgggcg

SEQ ID NO: 9094 - RNA, 19 nt, synthetic construct
  source 1..19: mol_type = other RNA
cccagcagtccccacacgg

SEQ ID NO: 9095 - RNA, 19 nt, synthetic construct
  source 1..19: mol_type = other RNA
agcagtccccacacggtgc

SEQ ID NO: 9096 - RNA, 19 nt, synthetic construct
  source 1..19: mol_type = other RNA
tgcgcacagcctggacttc

SEQ ID NO: 9097 - RNA, 19 nt, synthetic construct
  source 1..19: mol_type = other RNA
tggacttcggccacctcag

SEQ ID NO: 9098 - RNA, 19 nt, synthetic construct
  source 1..19: mol_type = other RNA
ggacttcggccacctcagg

SEQ ID NO: 9099 - RNA, 19 nt, synthetic construct
  source 1..19: mol_type = other RNA
acctcaggcaccttgggca

SEQ ID NO: 9100 - RNA, 19 nt, synthetic construct
  source 1..19: mol_type = other RNA
caggcaccttgggcaccac

SEQ ID NO: 9101 - RNA, 19 nt, synthetic construct
  source 1..19: mol_type = other RNA
cacatcacagagccttcca

SEQ ID NO: 9102 - RNA, 19 nt, synthetic construct
  source 1..19: mol_type = other RNA
acatcacagagccttccac

SEQ ID NO: 9103 - RNA, 19 nt, synthetic construct
  source 1..19: mol_type = other RNA
ccttccccagggacgacca

SEQ ID NO: 9104 - RNA, 19 nt, synthetic construct
  source 1..19: mol_type = other RNA
ccccagggacgaccacccc

SEQ ID NO: 9105 - RNA, 19 nt, synthetic construct
  source 1..19: mol_type = other RNA
taaccacggtggtgaccac

SEQ ID NO: 9106 - RNA, 19 nt, synthetic construct
  source 1..19: mol_type = other RNA
cggtggtgaccacgggctg

SEQ ID NO: 9107 - RNA, 19 nt, synthetic construct
  source 1..19: mol_type = other RNA
accacgggctgtgagcccc

SEQ ID NO: 9108 - RNA, 19 nt, synthetic construct
  source 1..19: mol_type = other RNA
gtgcctggtcagagtggct

SEQ ID NO: 9109 - RNA, 19 nt, synthetic construct
  source 1..19: mol_type = other RNA
acagctaccccatgccggg

SEQ ID NO: 9110 - RNA, 19 nt, synthetic construct
  source 1..19: mol_type = other RNA
ccggggccctctggcgggg

SEQ ID NO: 9111 - RNA, 19 nt, synthetic construct
  source 1..19: mol_type = other RNA
acacctactccaacatccg

SEQ ID NO: 9112 - RNA, 19 nt, synthetic construct
  source 1..19: mol_type = other RNA
gcctggtctgcaggaaccg

SEQ ID NO: 9113 - RNA, 19 nt, synthetic construct
  source 1..19: mol_type = other RNA
gagcaggtggggaagttca

SEQ ID NO: 9114 - RNA, 19 nt, synthetic construct
  source 1..19: mol_type = other RNA
ctctacggccatgccctcc

SEQ ID NO: 9115 - RNA, 19 nt, synthetic construct
  source 1..19: mol_type = other RNA
agccaccagttccaaagcc

SEQ ID NO: 9116 - RNA, 19 nt, synthetic construct
  source 1..19: mol_type = other RNA
caccaaatccacagctacc

SEQ ID NO: 9117 - RNA, 19 nt, synthetic construct
  source 1..19: mol_type = other RNA
caaatccacagctaccagc

SEQ ID NO: 9118 - RNA, 19 nt, synthetic construct
  source 1..19: mol_type = other RNA
aatccacagctaccagcgt

SEQ ID NO: 9119 - RNA, 19 nt, synthetic construct
  source 1..19: mol_type = other RNA
gtggccaccatgtccacaa

SEQ ID NO: 9120 - RNA, 19 nt, synthetic construct
  source 1..19: mol_type = other RNA
tggccaccatgtccacaat

SEQ ID NO: 9121 - RNA, 19 nt, synthetic construct
  source 1..19: mol_type = other RNA
accatgtccacaatccacc

SEQ ID NO: 9122 - RNA, 19 nt, synthetic construct
  source 1..19: mol_type = other RNA
ccctcctccactccggaga

SEQ ID NO: 9123 - RNA, 19 nt, synthetic construct
  source 1..19: mol_type = other RNA
ctccacagtgctgaccacg

SEQ ID NO: 9124 - RNA, 19 nt, synthetic construct
  source 1..19: mol_type = other RNA
tggatcctcacagagccga

SEQ ID NO: 9125 - RNA, 19 nt, synthetic construct
  source 1..19: mol_type = other RNA
caccgtgacggtgcccacc

SEQ ID NO: 9126 - RNA, 19 nt, synthetic construct
  source 1..19: mol_type = other RNA
acccaggcaactgctggca

SEQ ID NO: 9127 - RNA, 19 nt, synthetic construct
  source 1..19: mol_type = other RNA
gccacgacacccacagtca

SEQ ID NO: 9128 - RNA, 19 nt, synthetic construct
  source 1..19: mol_type = other RNA
cagggactgcaactgccct

SEQ ID NO: 9129 - RNA, 19 nt, synthetic construct
  source 1..19: mol_type = other RNA
acctccacagtgcttaccg

SEQ ID NO: 9130 - RNA, 19 nt, synthetic construct
  source 1..19: mol_type = other RNA
ccaggaacagctcacacta

SEQ ID NO: 9131 - RNA, 19 nt, synthetic construct
  source 1..19: mol_type = other RNA
ccagcccagggacggcact

SEQ ID NO: 9132 - RNA, 19 nt, synthetic construct
  source 1..19: mol_type = other RNA
aaccagtggctccacggtg

SEQ ID NO: 9133 - RNA, 19 nt, synthetic construct
  source 1..19: mol_type = other RNA
tccacggtgaccccctcct

SEQ ID NO: 9134 - RNA, 19 nt, synthetic construct
  source 1..19: mol_type = other RNA
tcccggggaccacccacac

SEQ ID NO: 9135 - RNA, 19 nt, synthetic construct
  source 1..19: mol_type = other RNA
cacggccaccggctccacc

SEQ ID NO: 9136 - RNA, 19 nt, synthetic construct
  source 1..19: mol_type = other RNA
ccagggacaacacccatca

SEQ ID NO: 9137 - RNA, 19 nt, synthetic construct
  source 1..19: mol_type = other RNA
ctgacaagcacagccacaa

SEQ ID NO: 9138 - RNA, 19 nt, synthetic construct
  source 1..19: mol_type = other RNA
gccacaaaatccacagcta

SEQ ID NO: 9139 - RNA, 19 nt, synthetic construct
  source 1..19: mol_type = other RNA
atccacagctaccagcttt

SEQ ID NO: 9140 - RNA, 19 nt, synthetic construct
  source 1..19: mol_type = other RNA
accgtcccagcacagacca

SEQ ID NO: 9141 - RNA, 19 nt, synthetic construct
  source 1..19: mol_type = other RNA
tgtccaccatgtccacaat

SEQ ID NO: 9142 - RNA, 19 nt, synthetic construct
  source 1..19: mol_type = other RNA
accatgtccacaatccaca

SEQ ID NO: 9143 - RNA, 19 nt, synthetic construct
  source 1..19: mol_type = other RNA
atgtccacaatccacacct

SEQ ID NO: 9144 - RNA, 19 nt, synthetic construct
  source 1..19: mol_type = other RNA
ccacaatccacacctcctc

SEQ ID NO: 9145 - RNA, 19 nt, synthetic construct
  source 1..19: mol_type = other RNA
cacagccaccatgacaagg

SEQ ID NO: 9146 - RNA, 19 nt, synthetic construct
  source 1..19: mol_type = other RNA
tacaactgcagccactgga

SEQ ID NO: 9147 - RNA, 19 nt, synthetic construct
  source 1..19: mol_type = other RNA
tccacggccaccctgtcct

SEQ ID NO: 9148 - RNA, 19 nt, synthetic construct
  source 1..19: mol_type = other RNA
tggatcctcacagagccga

SEQ ID NO: 9149 - RNA, 19 nt, synthetic construct
  source 1..19: mol_type = other RNA
tcacagagccgagcactat

SEQ ID NO: 9150 - RNA, 19 nt, synthetic construct
  source 1..19: mol_type = other RNA
accgtgatggtgcccaccg

SEQ ID NO: 9151 - RNA, 19 nt, synthetic construct
  source 1..19: mol_type = other RNA
accaccatggccactatgc

SEQ ID NO: 9152 - RNA, 19 nt, synthetic construct
  source 1..19: mol_type = other RNA
catggccactatgcccaca

SEQ ID NO: 9153 - RNA, 19 nt, synthetic construct
  source 1..19: mol_type = other RNA
atggccactatgcccacag

SEQ ID NO: 9154 - RNA, 19 nt, synthetic construct
  source 1..19: mol_type = other RNA
cggttcccagctcgtccac

SEQ ID NO: 9155 - RNA, 19 nt, synthetic construct
  source 1..19: mol_type = other RNA
tcccagctcgtccaccgtg

SEQ ID NO: 9156 - RNA, 19 nt, synthetic construct
  source 1..19: mol_type = other RNA
ccagctcgtccaccgtggg

SEQ ID NO: 9157 - RNA, 19 nt, synthetic construct
  source 1..19: mol_type = other RNA
agctcgtccaccgtgggga

SEQ ID NO: 9158 - RNA, 19 nt, synthetic construct
  source 1..19: mol_type = other RNA
tccaccgtggggaccaccc

SEQ ID NO: 9159 - RNA, 19 nt, synthetic construct
  source 1..19: mol_type = other RNA
tcaccaccctgagacccac

SEQ ID NO: 9160 - RNA, 19 nt, synthetic construct
  source 1..19: mol_type = other RNA
catttggacagtttttctc

SEQ ID NO: 9161 - RNA, 19 nt, synthetic construct
  source 1..19: mol_type = other RNA
acctccccaccgccagtgt

SEQ ID NO: 9162 - RNA, 19 nt, synthetic construct
  source 1..19: mol_type = other RNA
gccatccctctccggcagg

SEQ ID NO: 9163 - RNA, 19 nt, synthetic construct
  source 1..19: mol_type = other RNA
cacggcctctgccactgcc

SEQ ID NO: 9164 - RNA, 19 nt, synthetic construct
  source 1..19: mol_type = other RNA
ctcactgtcaccatggtgc

SEQ ID NO: 9165 - RNA, 19 nt, synthetic construct
  source 1..19: mol_type = other RNA
gtcaccatggtgcatggga

SEQ ID NO: 9166 - RNA, 19 nt, synthetic construct
  source 1..19: mol_type = other RNA
ctggggaccaccaccatgc

SEQ ID NO: 9167 - RNA, 19 nt, synthetic construct
  source 1..19: mol_type = other RNA
accaccaccatgcgtgtgg

SEQ ID NO: 9168 - RNA, 19 nt, synthetic construct
  source 1..19: mol_type = other RNA
ttcaatggccaagtcttcc

SEQ ID NO: 9169 - RNA, 19 nt, synthetic construct
  source 1..19: mol_type = other RNA
ggccaagtcttccaggccc

SEQ ID NO: 9170 - RNA, 19 nt, synthetic construct
  source 1..19: mol_type = other RNA
aggacatggccaagacgtg

SEQ ID NO: 9171 - RNA, 19 nt, synthetic construct
  source 1..19: mol_type = other RNA
cagccgctctgtgatctga

SEQ ID NO: 9172 - RNA, 19 nt, synthetic construct
  source 1..19: mol_type = other RNA
accaaagtgtacaagccat

SEQ ID NO: 9173 - RNA, 19 nt, synthetic construct
  source 1..19: mol_type = other RNA
gcctgccacctgcaactct

SEQ ID NO: 9174 - RNA, 19 nt, synthetic construct
  source 1..19: mol_type = other RNA
cagctggaggggatggcgg

SEQ ID NO: 9175 - RNA, 19 nt, synthetic construct
  source 1..19: mol_type = other RNA
gagcggtgggtcagcaact

SEQ ID NO: 9176 - RNA, 19 nt, synthetic construct
  source 1..19: mol_type = other RNA
ccaggccccgggccgagaa

SEQ ID NO: 9177 - RNA, 19 nt, synthetic construct
  source 1..19: mol_type = other RNA
gcaatgtcaggaggatgcc

SEQ ID NO: 9178 - RNA, 19 nt, synthetic construct
  source 1..19: mol_type = other RNA
tgagtacaagagagtggcc

SEQ ID NO: 9179 - RNA, 19 nt, synthetic construct
  source 1..19: mol_type = other RNA
gtgaggctgagggtggagt

SEQ ID NO: 9180 - RNA, 19 nt, synthetic construct
  source 1..19: mol_type = other RNA
cccagatgtgtccagctgc

SEQ ID NO: 9181 - RNA, 19 nt, synthetic construct
  source 1..19: mol_type = other RNA
gctcctgccccggagcgtc

SEQ ID NO: 9182 - RNA, 19 nt, synthetic construct
  source 1..19: mol_type = other RNA
ccaggagaggcgggtccac

SEQ ID NO: 9183 - RNA, 19 nt, synthetic construct
  source 1..19: mol_type = other RNA
caggagaggcgggtccacg

SEQ ID NO: 9184 - RNA, 19 nt, synthetic construct
  source 1..19: mol_type = other RNA
aggcgggtccacgaggaga

SEQ ID NO: 9185 - RNA, 19 nt, synthetic construct
  source 1..19: mol_type = other RNA
cccccacacacccgtggct

SEQ ID NO: 9186 - RNA, 19 nt, synthetic construct
  source 1..19: mol_type = other RNA
ccccacacacccgtggctt

SEQ ID NO: 9187 - RNA, 19 nt, synthetic construct
  source 1..19: mol_type = other RNA
ccaggatgtgcattgtctg

SEQ ID NO: 9188 - RNA, 19 nt, synthetic construct
  source 1..19: mol_type = other RNA
caggatgtgcattgtctga

SEQ ID NO: 9189 - RNA, 19 nt, synthetic construct
  source 1..19: mol_type = other RNA
ctgatcatgaaaaccttgg

SEQ ID NO: 9190 - RNA, 19 nt, synthetic construct
  source 1..19: mol_type = other RNA
atcatgaaaaccttgggcc

SEQ ID NO: 9191 - RNA, 19 nt, synthetic construct
  source 1..19: mol_type = other RNA
tcaggagtcctaccctggg

SEQ ID NO: 9192 - RNA, 19 nt, synthetic construct
  source 1..19: mol_type = other RNA
gcgcagcacggattccagc

SEQ ID NO: 9193 - RNA, 19 nt, synthetic construct
  source 1..19: mol_type = other RNA
gctggccacgtccggccgc

SEQ ID NO: 9194 - RNA, 19 nt, synthetic construct
  source 1..19: mol_type = other RNA
gccacgtccggccgctggg

SEQ ID NO: 9195 - RNA, 19 nt, synthetic construct
  source 1..19: mol_type = other RNA
cagggtaactcagggctga

SEQ ID NO: 9196 - RNA, 19 nt, synthetic construct
  source 1..19: mol_type = other RNA
ggccaggtcagagaggggt

SEQ ID NO: 9197 - RNA, 19 nt, synthetic construct
  source 1..19: mol_type = other RNA
agagaggggtcagcatccc

SEQ ID NO: 9198 - RNA, 19 nt, synthetic construct
  source 1..19: mol_type = other RNA
tttgcaaataaaccctgag

SEQ ID NO: 9199 - RNA, 19 nt, synthetic construct
  source 1..19: mol_type = other RNA
tccagggacaactcccatc

SEQ ID NO: 9200 - RNA, 19 nt, synthetic construct
  source 1..19: mol_type = other RNA
gggacaacacccatcaccc

SEQ ID NO: 9201 - RNA, 19 nt, synthetic construct
  source 1..19: mol_type = other RNA
ccagcccccaggatgggtg

SEQ ID NO: 9202 - RNA, 19 nt, synthetic construct
  source 1..19: mol_type = other RNA
acttcgacgacaatgccat

SEQ ID NO: 9203 - RNA, 19 nt, synthetic construct
  source 1..19: mol_type = other RNA
ctgggaggcggagactttg

SEQ ID NO: 9204 - RNA, 19 nt, synthetic construct
  source 1..19: mol_type = other RNA
agcctgccacctgcaactc

SEQ ID NO: 9205 - RNA, 19 nt, synthetic construct
  source 1..19: mol_type = other RNA
atccctctccggcaggtga

SEQ ID NO: 9206 - RNA, 19 nt, synthetic construct
  source 1..19: mol_type = other RNA
acggccctcagcggggtgg

SEQ ID NO: 9207 - RNA, 19 nt, synthetic construct
  source 1..19: mol_type = other RNA
gaagtcatctacaataaga

SEQ ID NO: 9208 - RNA, 19 nt, synthetic construct
  source 1..19: mol_type = other RNA
gtccagctgaatgaaacct

SEQ ID NO: 9209 - RNA, 19 nt, synthetic construct
  source 1..19: mol_type = other RNA
tcctaccctgggagagcct

SEQ ID NO: 9210 - RNA, 19 nt, synthetic construct
  source 1..19: mol_type = other RNA
ggtgactgcagctacgttc

SEQ ID NO: 9211 - RNA, 19 nt, synthetic construct
  source 1..19: mol_type = other RNA
agggccctgtggagccgag

SEQ ID NO: 9212 - RNA, 19 nt, synthetic construct
  source 1..19: mol_type = other RNA
ccttccaacacgctcagcc

SEQ ID NO: 9213 - RNA, 19 nt, synthetic construct
  source 1..19: mol_type = other RNA
tccaacacgctcagccctt

SEQ ID NO: 9214 - RNA, 19 nt, synthetic construct
  source 1..19: mol_type = other RNA
accccgacctccaccctga

SEQ ID NO: 9215 - RNA, 19 nt, synthetic construct
  source 1..19: mol_type = other RNA
ccccgggccacaccagggc

SEQ ID NO: 9216 - RNA, 19 nt, synthetic construct
  source 1..19: mol_type = other RNA
tccaaggactgcaaccacc

SEQ ID NO: 9217 - RNA, 19 nt, synthetic construct
  source 1..19: mol_type = other RNA
gtgcggccggaggggcagt

SEQ ID NO: 9218 - RNA, 19 nt, synthetic construct
  source 1..19: mol_type = other RNA
tccaaggactgcaaccacc

SEQ ID NO: 9219 - RNA, 19 nt, synthetic construct
  source 1..19: mol_type = other RNA
tccaaggactgcaaccacc

SEQ ID NO: 9220 - RNA, 19 nt, synthetic construct
  source 1..19: mol_type = other RNA
aggccccgggccgagaacc

SEQ ID NO: 9221 - RNA, 19 nt, synthetic construct
  source 1..19: mol_type = other RNA
cctgcctgtgtgcccgcca

SEQ ID NO: 9222 - RNA, 19 nt, synthetic construct
  source 1..19: mol_type = other RNA
tgggagaatgcagggcaca

SEQ ID NO: 9223 - RNA, 19 nt, synthetic construct
  source 1..19: mol_type = other RNA
tgtctgatcatgaaaacct

SEQ ID NO: 9224 - RNA, 19 nt, synthetic construct
  source 1..19: mol_type = other RNA
tgccgcgccgcctacgagg

SEQ ID NO: 9225 - RNA, 19 nt, synthetic construct
  source 1..19: mol_type = other RNA
gagcagagcggggactaca

SEQ ID NO: 9226 - RNA, 19 nt, synthetic construct
  source 1..19: mol_type = other RNA
caggagtgtggctcaccct

SEQ ID NO: 9227 - RNA, 19 nt, synthetic construct
  source 1..19: mol_type = other RNA
agctcggcgggcacccctg

SEQ ID NO: 9228 - RNA, 19 nt, synthetic construct
  source 1..19: mol_type = other RNA
actgcccctgtgtgcacaa

SEQ ID NO: 9229 - RNA, 19 nt, synthetic construct
  source 1..19: mol_type = other RNA
ctgcccggacgccctggca

SEQ ID NO: 9230 - RNA, 19 nt, synthetic construct
  source 1..19: mol_type = other RNA
gtgccgggcggcgcagctt

SEQ ID NO: 9231 - RNA, 19 nt, synthetic construct
  source 1..19: mol_type = other RNA
cctgctgtgcctaccccaa

SEQ ID NO: 9232 - RNA, 19 nt, synthetic construct
  source 1..19: mol_type = other RNA
cccacacacccccagtgcc

SEQ ID NO: 9233 - RNA, 19 nt, synthetic construct
  source 1..19: mol_type = other RNA
cccacacacccccagtgcc

SEQ ID NO: 9234 - RNA, 19 nt, synthetic construct
  source 1..19: mol_type = other RNA
cccctcctccactccggag

SEQ ID NO: 9235 - RNA, 19 nt, synthetic construct
  source 1..19: mol_type = other RNA
cccacacacccccagtgcc

SEQ ID NO: 9236 - RNA, 19 nt, synthetic construct
  source 1..19: mol_type = other RNA
gggccacaccaggggcacc

SEQ ID NO: 9237 - RNA, 19 nt, synthetic construct
  source 1..19: mol_type = other RNA
cccacacacccccagtgcc

SEQ ID NO: 9238 - RNA, 19 nt, synthetic construct
  source 1..19: mol_type = other RNA
tccccctgggggagttggg

SEQ ID NO: 9239 - RNA, 19 nt, synthetic construct
  source 1..19: mol_type = other RNA
cccctcctccactccggag

SEQ ID NO: 9240 - RNA, 19 nt, synthetic construct
  source 1..19: mol_type = other RNA
accatggtgcatgggaagg

SEQ ID NO: 9241 - RNA, 19 nt, synthetic construct
  source 1..19: mol_type = other RNA
caggccccgggccgagaac

SEQ ID NO: 9242 - RNA, 19 nt, synthetic construct
  source 1..19: mol_type = other RNA
gagcctgcctgtgtgcccg

SEQ ID NO: 9243 - RNA, 19 nt, synthetic construct
  source 1..19: mol_type = other RNA
aagagagtggccgggcagt

SEQ ID NO: 9244 - RNA, 19 nt, synthetic construct
  source 1..19: mol_type = other RNA
cccagtgctgaccagcacg

SEQ ID NO: 9245 - RNA, 19 nt, synthetic construct
  source 1..19: mol_type = other RNA
ctccatcccggggaccacc

SEQ ID NO: 9246 - RNA, 19 nt, synthetic construct
  source 1..19: mol_type = other RNA
ctccatcccggggaccacc

SEQ ID NO: 9247 - RNA, 19 nt, synthetic construct
  source 1..19: mol_type = other RNA
ctccatcccggggaccacc

SEQ ID NO: 9248 - RNA, 19 nt, synthetic construct
  source 1..19: mol_type = other RNA
ctccatcccggggaccacc

SEQ ID NO: 9249 - RNA, 19 nt, synthetic construct
  source 1..19: mol_type = other RNA
cctccctgatgtcactggg

SEQ ID NO: 9250 - RNA, 19 nt, synthetic construct
  source 1..19: mol_type = other RNA
cggtggcgagagggccggg

SEQ ID NO: 9251 - RNA, 19 nt, synthetic construct
  source 1..19: mol_type = other RNA
tcacggccctcagcggggt

SEQ ID NO: 9252 - RNA, 19 nt, synthetic construct
  source 1..19: mol_type = other RNA
ccacaactgtggccactgg

SEQ ID NO: 9253 - RNA, 19 nt, synthetic construct
  source 1..19: mol_type = other RNA
ccacaactgtggccactgg

SEQ ID NO: 9254 - RNA, 19 nt, synthetic construct
  source 1..19: mol_type = other RNA
ccacaactgtggccactgg

SEQ ID NO: 9255 - RNA, 19 nt, synthetic construct
  source 1..19: mol_type = other RNA
ccacaactgtggccactgg

SEQ ID NO: 9256 - RNA, 19 nt, synthetic construct
  source 1..19: mol_type = other RNA
ccacaactgtggccactgg

SEQ ID NO: 9257 - RNA, 19 nt, synthetic construct
  source 1..19: mol_type = other RNA
acggcggccctcacctcgc

SEQ ID NO: 9258 - RNA, 19 nt, synthetic construct
  source 1..19: mol_type = other RNA
agtggtactcccccatcac

SEQ ID NO: 9259 - RNA, 19 nt, synthetic construct
  source 1..19: mol_type = other RNA
agtggtactcccccatcac

SEQ ID NO: 9260 - RNA, 19 nt, synthetic construct
  source 1..19: mol_type = other RNA
cagaacagaccaccacacc

SEQ ID NO: 9261 - RNA, 19 nt, synthetic construct
  source 1..19: mol_type = other RNA
ccggagaccacccacacct

SEQ ID NO: 9262 - RNA, 19 nt, synthetic construct
  source 1..19: mol_type = other RNA
agtggtactcccccatcac

SEQ ID NO: 9263 - RNA, 19 nt, synthetic construct
  source 1..19: mol_type = other RNA
agtggtactcccccatcac

SEQ ID NO: 9264 - RNA, 19 nt, synthetic construct
  source 1..19: mol_type = other RNA
cgttacacccatcccctcc

SEQ ID NO: 9265 - RNA, 19 nt, synthetic construct
  source 1..19: mol_type = other RNA
cagaacagaccaccacacc

SEQ ID NO: 9266 - RNA, 19 nt, synthetic construct
  source 1..19: mol_type = other RNA
ccggagaccacccacacct

SEQ ID NO: 9267 - RNA, 19 nt, synthetic construct
  source 1..19: mol_type = other RNA
agtggtactcccccatcac

SEQ ID NO: 9268 - RNA, 19 nt, synthetic construct
  source 1..19: mol_type = other RNA
tggctggtccccgacagca

SEQ ID NO: 9269 - RNA, 19 nt, synthetic construct
  source 1..19: mol_type = other RNA
gactggcacaccccccact

SEQ ID NO: 9270 - RNA, 19 nt, synthetic construct
  source 1..19: mol_type = other RNA
tctccaccgtgtgtgtccg

SEQ ID NO: 9271 - RNA, 19 nt, synthetic construct
  source 1..19: mol_type = other RNA
tcgcccgacaggcacagcc

SEQ ID NO: 9272 - RNA, 19 nt, synthetic construct
  source 1..19: mol_type = other RNA
gagcactacagccaccgtg

SEQ ID NO: 9273 - RNA, 19 nt, synthetic construct
  source 1..19: mol_type = other RNA
cagcactacagccaccgtg

SEQ ID NO: 9274 - RNA, 19 nt, synthetic construct
  source 1..19: mol_type = other RNA
gagcactacagccaccgtg

SEQ ID NO: 9275 - RNA, 19 nt, synthetic construct
  source 1..19: mol_type = other RNA
gagcactacagccaccgtg

SEQ ID NO: 9276 - RNA, 19 nt, synthetic construct
  source 1..19: mol_type = other RNA
gtggctggtccccgacagc

SEQ ID NO: 9277 - RNA, 19 nt, synthetic construct
  source 1..19: mol_type = other RNA
caggaaccggaggtgggag

SEQ ID NO: 9278 - RNA, 19 nt, synthetic construct
  source 1..19: mol_type = other RNA
cgcttccagtgtggatcag

SEQ ID NO: 9279 - RNA, 19 nt, synthetic construct
  source 1..19: mol_type = other RNA
cgtccaccgtggggaccac

SEQ ID NO: 9280 - RNA, 19 nt, synthetic construct
  source 1..19: mol_type = other RNA
accacccacaccgccacag

SEQ ID NO: 9281 - RNA, 19 nt, synthetic construct
  source 1..19: mol_type = other RNA
cagccctcaccctagcagc

SEQ ID NO: 9282 - RNA, 19 nt, synthetic construct
  source 1..19: mol_type = other RNA
cagccctcaccctagcagc

SEQ ID NO: 9283 - RNA, 19 nt, synthetic construct
  source 1..19: mol_type = other RNA
accacccacaccgccacag

SEQ ID NO: 9284 - RNA, 19 nt, synthetic construct
  source 1..19: mol_type = other RNA
cccagcagcaaccaccagt

SEQ ID NO: 9285 - RNA, 19 nt, synthetic construct
  source 1..19: mol_type = other RNA
cagccctcaccctagcagc

SEQ ID NO: 9286 - RNA, 19 nt, synthetic construct
  source 1..19: mol_type = other RNA
cagccctcaccctagcagc

SEQ ID NO: 9287 - RNA, 19 nt, synthetic construct
  source 1..19: mol_type = other RNA
catctgcagcatgtggggc

SEQ ID NO: 9288 - RNA, 19 nt, synthetic construct
  source 1..19: mol_type = other RNA
ccccgcgccctcagcatcc

SEQ ID NO: 9289 - RNA, 19 nt, synthetic construct
  source 1..19: mol_type = other RNA
gctggtccccgacagcaga

SEQ ID NO: 9290 - RNA, 19 nt, synthetic construct
  source 1..19: mol_type = other RNA
gccgcggaactggaggtgc

SEQ ID NO: 9291 - RNA, 19 nt, synthetic construct
  source 1..19: mol_type = other RNA
tgctctgtgcagggcgggg

SEQ ID NO: 9292 - RNA, 19 nt, synthetic construct
  source 1..19: mol_type = other RNA
ggtgcagctggtgccactc

SEQ ID NO: 9293 - RNA, 19 nt, synthetic construct
  source 1..19: mol_type = other RNA
cccaggctgcctgtgccaa

SEQ ID NO: 9294 - RNA, 19 nt, synthetic construct
  source 1..19: mol_type = other RNA
acagctcggcgggcacccc

SEQ ID NO: 9295 - RNA, 19 nt, synthetic construct
  source 1..19: mol_type = other RNA
tgccagagctgtaactgca

SEQ ID NO: 9296 - RNA, 19 nt, synthetic construct
  source 1..19: mol_type = other RNA
gagcttccccaactggacc

SEQ ID NO: 9297 - RNA, 19 nt, synthetic construct
  source 1..19: mol_type = other RNA
cccaggggtggccacatcc

SEQ ID NO: 9298 - RNA, 19 nt, synthetic construct
  source 1..19: mol_type = other RNA
cacagccacccacgctggc

SEQ ID NO: 9299 - RNA, 19 nt, synthetic construct
  source 1..19: mol_type = other RNA
acctccaccctgagaacag

SEQ ID NO: 9300 - RNA, 19 nt, synthetic construct
  source 1..19: mol_type = other RNA
ccagctccaaagccactcc

SEQ ID NO: 9301 - RNA, 19 nt, synthetic construct
  source 1..19: mol_type = other RNA
ccacacccacggccaccat

SEQ ID NO: 9302 - RNA, 19 nt, synthetic construct
  source 1..19: mol_type = other RNA
gcagccaccagcaacacag

SEQ ID NO: 9303 - RNA, 19 nt, synthetic construct
  source 1..19: mol_type = other RNA
agccctcaccctagcagca

SEQ ID NO: 9304 - RNA, 19 nt, synthetic construct
  source 1..19: mol_type = other RNA
cggccacacccagcaagac

SEQ ID NO: 9305 - RNA, 19 nt, synthetic construct
  source 1..19: mol_type = other RNA
gccggggccctctggcggg

SEQ ID NO: 9306 - RNA, 19 nt, synthetic construct
  source 1..19: mol_type = other RNA
ctggactttggcctggtct

SEQ ID NO: 9307 - RNA, 19 nt, synthetic construct
  source 1..19: mol_type = other RNA
ccagctccaaagccactcc

SEQ ID NO: 9308 - RNA, 19 nt, synthetic construct
  source 1..19: mol_type = other RNA
ccacacccacggccaccat

SEQ ID NO: 9309 - RNA, 19 nt, synthetic construct
  source 1..19: mol_type = other RNA
agccctcaccctagcagca

SEQ ID NO: 9310 - RNA, 19 nt, synthetic construct
  source 1..19: mol_type = other RNA
cggccacacccagcaagac

SEQ ID NO: 9311 - RNA, 19 nt, synthetic construct
  source 1..19: mol_type = other RNA
gccggggccctctggcggg

SEQ ID NO: 9312 - RNA, 19 nt, synthetic construct
  source 1..19: mol_type = other RNA
ctggactttggcctggtct

SEQ ID NO: 9313 - RNA, 19 nt, synthetic construct
  source 1..19: mol_type = other RNA
ctggatcctcacagagcag

SEQ ID NO: 9314 - RNA, 19 nt, synthetic construct
  source 1..19: mol_type = other RNA
accacgaaggccaccacga

SEQ ID NO: 9315 - RNA, 19 nt, synthetic construct
  source 1..19: mol_type = other RNA
ccacacccacggccaccat

SEQ ID NO: 9316 - RNA, 19 nt, synthetic construct
  source 1..19: mol_type = other RNA
agccctcaccctagcagca

SEQ ID NO: 9317 - RNA, 19 nt, synthetic construct
  source 1..19: mol_type = other RNA
cagccacacccagcaagac

SEQ ID NO: 9318 - RNA, 19 nt, synthetic construct
  source 1..19: mol_type = other RNA
aaccacggtggtgaccacg

SEQ ID NO: 9319 - RNA, 19 nt, synthetic construct
  source 1..19: mol_type = other RNA
gccggggccctctggcggg

SEQ ID NO: 9320 - RNA, 19 nt, synthetic construct
  source 1..19: mol_type = other RNA
ctggactttggcctggtct

SEQ ID NO: 9321 - RNA, 19 nt, synthetic construct
  source 1..19: mol_type = other RNA
ccagctccaaagccactcc

SEQ ID NO: 9322 - RNA, 19 nt, synthetic construct
  source 1..19: mol_type = other RNA
ccacacccacggccaccat

SEQ ID NO: 9323 - RNA, 19 nt, synthetic construct
  source 1..19: mol_type = other RNA
ccacggccaccacaaccag

SEQ ID NO: 9324 - RNA, 19 nt, synthetic construct
  source 1..19: mol_type = other RNA
agccctcaccctagcagca

SEQ ID NO: 9325 - RNA, 19 nt, synthetic construct
  source 1..19: mol_type = other RNA
cggccacacccagcaagac

SEQ ID NO: 9326 - RNA, 19 nt, synthetic construct
  source 1..19: mol_type = other RNA
aaccacggtggtgaccacg

SEQ ID NO: 9327 - RNA, 19 nt, synthetic construct
  source 1..19: mol_type = other RNA
gccggggccctctggcggg

SEQ ID NO: 9328 - RNA, 19 nt, synthetic construct
  source 1..19: mol_type = other RNA
ctggactttggcctggtct

SEQ ID NO: 9329 - RNA, 19 nt, synthetic construct
  source 1..19: mol_type = other RNA
accacgaaggccaccacga

SEQ ID NO: 9330 - RNA, 19 nt, synthetic construct
  source 1..19: mol_type = other RNA
ccagctccaaagccactcc

SEQ ID NO: 9331 - RNA, 19 nt, synthetic construct
  source 1..19: mol_type = other RNA
ccacacccacggccaccat

SEQ ID NO: 9332 - RNA, 19 nt, synthetic construct
  source 1..19: mol_type = other RNA
ccccagtgctgaccagcac

SEQ ID NO: 9333 - RNA, 19 nt, synthetic construct
  source 1..19: mol_type = other RNA
agcacggccaccacacccg

SEQ ID NO: 9334 - RNA, 19 nt, synthetic construct
  source 1..19: mol_type = other RNA
ccagagaccacccacacct

SEQ ID NO: 9335 - RNA, 19 nt, synthetic construct
  source 1..19: mol_type = other RNA
cctccactctgggaacagc

SEQ ID NO: 9336 - RNA, 19 nt, synthetic construct
  source 1..19: mol_type = other RNA
ggccactatgcccacagcc

SEQ ID NO: 9337 - RNA, 19 nt, synthetic construct
  source 1..19: mol_type = other RNA
gcctccacggttcccagct

SEQ ID NO: 9338 - RNA, 19 nt, synthetic construct
  source 1..19: mol_type = other RNA
cagcctgccaaccttcagc

SEQ ID NO: 9339 - RNA, 19 nt, synthetic construct
  source 1..19: mol_type = other RNA
tgccctgggcgtgagcgtc

SEQ ID NO: 9340 - RNA, 19 nt, synthetic construct
  source 1..19: mol_type = other RNA
actggcacaccccccactg

SEQ ID NO: 9341 - RNA, 19 nt, synthetic construct
  source 1..19: mol_type = other RNA
atgcccaccacagccgctc

SEQ ID NO: 9342 - RNA, 19 nt, synthetic construct
  source 1..19: mol_type = other RNA
gcacacatgggcatctgcg

SEQ ID NO: 9343 - RNA, 19 nt, synthetic construct
  source 1..19: mol_type = other RNA
cactcaggagtcctaccct

SEQ ID NO: 9344 - RNA, 19 nt, synthetic construct
  source 1..19: mol_type = other RNA
cgccctggaacaaactaag

SEQ ID NO: 9345 - RNA, 19 nt, synthetic construct
  source 1..19: mol_type = other RNA
ccggccgctggggcagaca

SEQ ID NO: 9346 - RNA, 19 nt, synthetic construct
  source 1..19: mol_type = other RNA
ggccgctggggcagacagg

SEQ ID NO: 9347 - RNA, 19 nt, synthetic construct
  source 1..19: mol_type = other RNA
gtcagcatcccaaagcccc

SEQ ID NO: 9348 - RNA, 19 nt, synthetic construct
  source 1..19: mol_type = other RNA
agcctggacttcggccacc

SEQ ID NO: 9349 - RNA, 19 nt, synthetic construct
  source 1..19: mol_type = other RNA
agcctggacttcggccacc

SEQ ID NO: 9350 - RNA, 19 nt, synthetic construct
  source 1..19: mol_type = other RNA
agcctggacttcggccacc

SEQ ID NO: 9351 - RNA, 19 nt, synthetic construct
  source 1..19: mol_type = other RNA
agcctggacttcggccacc

SEQ ID NO: 9352 - RNA, 19 nt, synthetic construct
  source 1..19: mol_type = other RNA
tgcttctgccctgaggacc

SEQ ID NO: 9353 - RNA, 19 nt, synthetic construct
  source 1..19: mol_type = other RNA
gcgccactcaggagtccta

SEQ ID NO: 9354 - RNA, 19 nt, synthetic construct
  source 1..19: mol_type = other RNA
tgggggagttgggccaggt

SEQ ID NO: 9355 - RNA, 19 nt, synthetic construct
  source 1..19: mol_type = other RNA
cccagggtcagcccccgcc

SEQ ID NO: 9356 - RNA, 19 nt, synthetic construct
  source 1..19: mol_type = other RNA
gccccagaagggtgagggg

SEQ ID NO: 9357 - RNA, 19 nt, synthetic construct
  source 1..19: mol_type = other RNA
tgcccctgtgtgcacaacg

SEQ ID NO: 9358 - RNA, 19 nt, synthetic construct
  source 1..19: mol_type = other RNA
ggacattcctgccctgggc

SEQ ID NO: 9359 - RNA, 19 nt, synthetic construct
  source 1..19: mol_type = other RNA
tgagtccactggatccacg

SEQ ID NO: 9360 - RNA, 19 nt, synthetic construct
  source 1..19: mol_type = other RNA
tgagtccactggatccacg

SEQ ID NO: 9361 - RNA, 19 nt, synthetic construct
  source 1..19: mol_type = other RNA
ctcccactattccaccttt

SEQ ID NO: 9362 - RNA, 19 nt, synthetic construct
  source 1..19: mol_type = other RNA
caagggtccccacagcgga

SEQ ID NO: 9363 - RNA, 19 nt, synthetic construct
  source 1..19: mol_type = other RNA
ccccaacccagaccacagc

SEQ ID NO: 9364 - RNA, 19 nt, synthetic construct
  source 1..19: mol_type = other RNA
tgggcacatggcgcccctc

SEQ ID NO: 9365 - RNA, 19 nt, synthetic construct
  source 1..19: mol_type = other RNA
gcccagggtcagcccccgc

SEQ ID NO: 9366 - RNA, 19 nt, synthetic construct
  source 1..19: mol_type = other RNA
gaggagacggtgcccttgc

SEQ ID NO: 9367 - RNA, 19 nt, synthetic construct
  source 1..19: mol_type = other RNA
aggatgtgcattgtctgat

SEQ ID NO: 9368 - RNA, 19 nt, synthetic construct
  source 1..19: mol_type = other RNA
gggccctctggcggggact

SEQ ID NO: 9369 - RNA, 19 nt, synthetic construct
  source 1..19: mol_type = other RNA
gggccctctggcggggact

SEQ ID NO: 9370 - RNA, 19 nt, synthetic construct
  source 1..19: mol_type = other RNA
gggccctctggcggggact

SEQ ID NO: 9371 - RNA, 19 nt, synthetic construct
  source 1..19: mol_type = other RNA
gggccctctggcggggact

SEQ ID NO: 9372 - RNA, 19 nt, synthetic construct
  source 1..19: mol_type = other RNA
atgggtgaccccgagcatc

SEQ ID NO: 9373 - RNA, 19 nt, synthetic construct
  source 1..19: mol_type = other RNA
tgactgcagctacgttctg

SEQ ID NO: 9374 - RNA, 19 nt, synthetic construct
  source 1..19: mol_type = other RNA
cttccagggacgacgggga

SEQ ID NO: 9375 - RNA, 19 nt, synthetic construct
  source 1..19: mol_type = other RNA
atgggtgccccgagcgcgt

SEQ ID NO: 9376 - RNA, 19 nt, synthetic construct
  source 1..19: mol_type = other RNA
caacggcaccatcatcagg

SEQ ID NO: 9377 - RNA, 19 nt, synthetic construct
  source 1..19: mol_type = other RNA
gggcacttatgccagcagc

SEQ ID NO: 9378 - RNA, 19 nt, synthetic construct
  source 1..19: mol_type = other RNA
cagcctggacttcggccac

SEQ ID NO: 9379 - RNA, 19 nt, synthetic construct
  source 1..19: mol_type = other RNA
cccagcaagacccgcacct

SEQ ID NO: 9380 - RNA, 19 nt, synthetic construct
  source 1..19: mol_type = other RNA
cagcctggacttcggccac

SEQ ID NO: 9381 - RNA, 19 nt, synthetic construct
  source 1..19: mol_type = other RNA
acggggacttcccacaccc

SEQ ID NO: 9382 - RNA, 19 nt, synthetic construct
  source 1..19: mol_type = other RNA
cagcaggaccaccgagtca

SEQ ID NO: 9383 - RNA, 19 nt, synthetic construct
  source 1..19: mol_type = other RNA
cccagcaagacccgcacct

SEQ ID NO: 9384 - RNA, 19 nt, synthetic construct
  source 1..19: mol_type = other RNA
cagcctggacttcggccac

SEQ ID NO: 9385 - RNA, 19 nt, synthetic construct
  source 1..19: mol_type = other RNA
cagcaggaccaccgagtca

SEQ ID NO: 9386 - RNA, 19 nt, synthetic construct
  source 1..19: mol_type = other RNA
cccgggccacaccaggggc

SEQ ID NO: 9387 - RNA, 19 nt, synthetic construct
  source 1..19: mol_type = other RNA
ccgggccacaccaggggca

SEQ ID NO: 9388 - RNA, 19 nt, synthetic construct
  source 1..19: mol_type = other RNA
cccagcaagacccgcacct

SEQ ID NO: 9389 - RNA, 19 nt, synthetic construct
  source 1..19: mol_type = other RNA
cagcctggacttcggccac

SEQ ID NO: 9390 - RNA, 19 nt, synthetic construct
  source 1..19: mol_type = other RNA
acggggacttcccacaccc

SEQ ID NO: 9391 - RNA, 19 nt, synthetic construct
  source 1..19: mol_type = other RNA
cagcaggaccaccgagtca

SEQ ID NO: 9392 - RNA, 19 nt, synthetic construct
  source 1..19: mol_type = other RNA
cccagcaagacccgcacct

SEQ ID NO: 9393 - RNA, 19 nt, synthetic construct
  source 1..19: mol_type = other RNA
ccctgggggagttgggcca

SEQ ID NO: 9394 - RNA, 19 nt, synthetic construct
  source 1..19: mol_type = other RNA
gccagtccagctgaatgaa

SEQ ID NO: 9395 - RNA, 19 nt, synthetic construct
  source 1..19: mol_type = other RNA
cccgcgctccgtgctcctg

SEQ ID NO: 9396 - RNA, 19 nt, synthetic construct
  source 1..19: mol_type = other RNA
actgcgtacctggccgcct

SEQ ID NO: 9397 - RNA, 19 nt, synthetic construct
  source 1..19: mol_type = other RNA
ccgtcccggggaccaccca

SEQ ID NO: 9398 - RNA, 19 nt, synthetic construct
  source 1..19: mol_type = other RNA
gggcgccactcaggagtcc

SEQ ID NO: 9399 - RNA, 19 nt, synthetic construct
  source 1..19: mol_type = other RNA
tgctggagctggatcccaa

SEQ ID NO: 9400 - RNA, 19 nt, synthetic construct
  source 1..19: mol_type = other RNA
gggcccacatctccaccta

SEQ ID NO: 9401 - RNA, 19 nt, synthetic construct
  source 1..19: mol_type = other RNA
tggctgagctgcggaagtg

SEQ ID NO: 9402 - RNA, 19 nt, synthetic construct
  source 1..19: mol_type = other RNA
agggtccccacagcggaga

SEQ ID NO: 9403 - RNA, 19 nt, synthetic construct
  source 1..19: mol_type = other RNA
ccagaggctccacggtgac

SEQ ID NO: 9404 - RNA, 19 nt, synthetic construct
  source 1..19: mol_type = other RNA
cgaacaccatggccaccac

SEQ ID NO: 9405 - RNA, 19 nt, synthetic construct
  source 1..19: mol_type = other RNA
tcacagagcagaccacagc

SEQ ID NO: 9406 - RNA, 19 nt, synthetic construct
  source 1..19: mol_type = other RNA
ccaccagttccatgtccac

SEQ ID NO: 9407 - RNA, 19 nt, synthetic construct
  source 1..19: mol_type = other RNA
ccagaggctccacggtgac

SEQ ID NO: 9408 - RNA, 19 nt, synthetic construct
  source 1..19: mol_type = other RNA
gaccacgggctgtgagccc

SEQ ID NO: 9409 - RNA, 19 nt, synthetic construct
  source 1..19: mol_type = other RNA
ttccccagggacgaccacc

SEQ ID NO: 9410 - RNA, 19 nt, synthetic construct
  source 1..19: mol_type = other RNA
gaccacgggctgtgagccc

SEQ ID NO: 9411 - RNA, 19 nt, synthetic construct
  source 1..19: mol_type = other RNA
caagggccaccagttccac

SEQ ID NO: 9412 - RNA, 19 nt, synthetic construct
  source 1..19: mol_type = other RNA
ccccgcagccccggtgtct

SEQ ID NO: 9413 - RNA, 19 nt, synthetic construct
  source 1..19: mol_type = other RNA
ctgtggcaccagggctgcg

SEQ ID NO: 9414 - RNA, 19 nt, synthetic construct
  source 1..19: mol_type = other RNA
tggccacgtccggccgctg

SEQ ID NO: 9415 - RNA, 19 nt, synthetic construct
  source 1..19: mol_type = other RNA
gctggggcagacaggctgg

SEQ ID NO: 9416 - RNA, 19 nt, synthetic construct
  source 1..19: mol_type = other RNA
gtcagagaggggtcagcat

SEQ ID NO: 9417 - RNA, 19 nt, synthetic construct
  source 1..19: mol_type = other RNA
cgacggcggccctcacctc

SEQ ID NO: 9418 - RNA, 19 nt, synthetic construct
  source 1..19: mol_type = other RNA
accactgcaggggacgtgc

SEQ ID NO: 9419 - RNA, 19 nt, synthetic construct
  source 1..19: mol_type = other RNA
ctccagagactgtccacac

SEQ ID NO: 9420 - RNA, 19 nt, synthetic construct
  source 1..19: mol_type = other RNA
ctccagagactgtccacac

SEQ ID NO: 9421 - RNA, 19 nt, synthetic construct
  source 1..19: mol_type = other RNA
ctccagagactgtccacac

SEQ ID NO: 9422 - RNA, 19 nt, synthetic construct
  source 1..19: mol_type = other RNA
acctgcacctgcaggaacc

SEQ ID NO: 9423 - RNA, 19 nt, synthetic construct
  source 1..19: mol_type = other RNA
aaagaccaccctatgggtg

SEQ ID NO: 9424 - RNA, 19 nt, synthetic construct
  source 1..19: mol_type = other RNA
tgccagcagcctaaggaca

SEQ ID NO: 9425 - RNA, 19 nt, synthetic construct
  source 1..19: mol_type = other RNA
ccacggccaccacaaccgg

SEQ ID NO: 9426 - RNA, 19 nt, synthetic construct
  source 1..19: mol_type = other RNA
ccacggccaccacaaccgg

SEQ ID NO: 9427 - RNA, 19 nt, synthetic construct
  source 1..19: mol_type = other RNA
tcctgccctgggcgtgagc

SEQ ID NO: 9428 - RNA, 19 nt, synthetic construct
  source 1..19: mol_type = other RNA
ctgagtgccacaaccttgt

SEQ ID NO: 9429 - RNA, 19 nt, synthetic construct
  source 1..19: mol_type = other RNA
gaggcctagtgggctccag

SEQ ID NO: 9430 - RNA, 19 nt, synthetic construct
  source 1..19: mol_type = other RNA
ggatgcctgccagcccact

SEQ ID NO: 9431 - RNA, 19 nt, synthetic construct
  source 1..19: mol_type = other RNA
tggtccagctggtacaatg

SEQ ID NO: 9432 - RNA, 19 nt, synthetic construct
  source 1..19: mol_type = other RNA
aggtatgccctgtgctggc

SEQ ID NO: 9433 - RNA, 19 nt, synthetic construct
  source 1..19: mol_type = other RNA
tccacttcggcctggtgtg

SEQ ID NO: 9434 - RNA, 19 nt, synthetic construct
  source 1..19: mol_type = other RNA
cacacccacagctaccagc

SEQ ID NO: 9435 - RNA, 19 nt, synthetic construct
  source 1..19: mol_type = other RNA
cccacaccgccacagtgct

SEQ ID NO: 9436 - RNA, 19 nt, synthetic construct
  source 1..19: mol_type = other RNA
gtactcccccatcactgac

SEQ ID NO: 9437 - RNA, 19 nt, synthetic construct
  source 1..19: mol_type = other RNA
atgtgagcaccacggccac

SEQ ID NO: 9438 - RNA, 19 nt, synthetic construct
  source 1..19: mol_type = other RNA
gtactcccccatcactgac

SEQ ID NO: 9439 - RNA, 19 nt, synthetic construct
  source 1..19: mol_type = other RNA
cccttccagtgctgacaag

SEQ ID NO: 9440 - RNA, 19 nt, synthetic construct
  source 1..19: mol_type = other RNA
cacacccacagctaccagc

SEQ ID NO: 9441 - RNA, 19 nt, synthetic construct
  source 1..19: mol_type = other RNA
ccacaaccagggccaccgg

SEQ ID NO: 9442 - RNA, 19 nt, synthetic construct
  source 1..19: mol_type = other RNA
cccacaccgccacagtgct

SEQ ID NO: 9443 - RNA, 19 nt, synthetic construct
  source 1..19: mol_type = other RNA
gtactcccccatcactgac

SEQ ID NO: 9444 - RNA, 19 nt, synthetic construct
  source 1..19: mol_type = other RNA
atgtgagcaccacggccac

SEQ ID NO: 9445 - RNA, 19 nt, synthetic construct
  source 1..19: mol_type = other RNA
ccacaaccagggccaccgg

SEQ ID NO: 9446 - RNA, 19 nt, synthetic construct
  source 1..19: mol_type = other RNA
acgggcttcacagtcaccc

SEQ ID NO: 9447 - RNA, 19 nt, synthetic construct
  source 1..19: mol_type = other RNA
agtgctgaccagcccggcc

SEQ ID NO: 9448 - RNA, 19 nt, synthetic construct
  source 1..19: mol_type = other RNA
cccttccagtgctgacaag

SEQ ID NO: 9449 - RNA, 19 nt, synthetic construct
  source 1..19: mol_type = other RNA
atgtgagcaccacggccac

SEQ ID NO: 9450 - RNA, 19 nt, synthetic construct
  source 1..19: mol_type = other RNA
gtactcccccatcactgac

SEQ ID NO: 9451 - RNA, 19 nt, synthetic construct
  source 1..19: mol_type = other RNA
cccttccagtgctgacaag

SEQ ID NO: 9452 - RNA, 19 nt, synthetic construct
  source 1..19: mol_type = other RNA
ccacaaaatccacagctac

SEQ ID NO: 9453 - RNA, 19 nt, synthetic construct
  source 1..19: mol_type = other RNA
tggatccacggccaccctg

SEQ ID NO: 9454 - RNA, 19 nt, synthetic construct
  source 1..19: mol_type = other RNA
ccaccgtgatggtgcccac

SEQ ID NO: 9455 - RNA, 19 nt, synthetic construct
  source 1..19: mol_type = other RNA
cgactggcacaccccccac

SEQ ID NO: 9456 - RNA, 19 nt, synthetic construct
  source 1..19: mol_type = other RNA
aggggccgccttgaggtgc

SEQ ID NO: 9457 - RNA, 19 nt, synthetic construct
  source 1..19: mol_type = other RNA
gagctctgccgcgcccggg

SEQ ID NO: 9458 - RNA, 19 nt, synthetic construct
  source 1..19: mol_type = other RNA
atacagcctgccacctgca

SEQ ID NO: 9459 - RNA, 19 nt, synthetic construct
  source 1..19: mol_type = other RNA
cccaccttccgctgcagac

SEQ ID NO: 9460 - RNA, 19 nt, synthetic construct
  source 1..19: mol_type = other RNA
gcctgcatcctgcccagat

SEQ ID NO: 9461 - RNA, 19 nt, synthetic construct
  source 1..19: mol_type = other RNA
tccctgcgcccatggctcc

SEQ ID NO: 9462 - RNA, 19 nt, synthetic construct
  source 1..19: mol_type = other RNA
ccctgcgcccatggctccc

SEQ ID NO: 9463 - RNA, 19 nt, synthetic construct
  source 1..19: mol_type = other RNA
gccgggcggcgcagcttcc

SEQ ID NO: 9464 - RNA, 19 nt, synthetic construct
  source 1..19: mol_type = other RNA
agctccaaagccactccct

SEQ ID NO: 9465 - RNA, 19 nt, synthetic construct
  source 1..19: mol_type = other RNA
actcgactccagccctttc

SEQ ID NO: 9466 - RNA, 19 nt, synthetic construct
  source 1..19: mol_type = other RNA
agctccaaagccactccct

SEQ ID NO: 9467 - RNA, 19 nt, synthetic construct
  source 1..19: mol_type = other RNA
accacccgcacccctgcag

SEQ ID NO: 9468 - RNA, 19 nt, synthetic construct
  source 1..19: mol_type = other RNA
ggggagcggtgggtcagca

SEQ ID NO: 9469 - RNA, 19 nt, synthetic construct
  source 1..19: mol_type = other RNA
gcacacctacacccacgtg

SEQ ID NO: 9470 - RNA, 19 nt, synthetic construct
  source 1..19: mol_type = other RNA
agaacgttctgcctccatc

SEQ ID NO: 9471 - RNA, 19 nt, synthetic construct
  source 1..19: mol_type = other RNA
gctgcccttgccggccggc

SEQ ID NO: 9472 - RNA, 19 nt, synthetic construct
  source 1..19: mol_type = other RNA
gaaccaccgagtcaccccc

SEQ ID NO: 9473 - RNA, 19 nt, synthetic construct
  source 1..19: mol_type = other RNA
cctcctctactccagagac

SEQ ID NO: 9474 - RNA, 19 nt, synthetic construct
  source 1..19: mol_type = other RNA
tagccaccgtgatggtgcc

SEQ ID NO: 9475 - RNA, 19 nt, synthetic construct
  source 1..19: mol_type = other RNA
tgtgtctgtgctggggacc

SEQ ID NO: 9476 - RNA, 19 nt, synthetic construct
  source 1..19: mol_type = other RNA
gaggaccagatcctcttca

SEQ ID NO: 9477 - RNA, 19 nt, synthetic construct
  source 1..19: mol_type = other RNA
gagagtggccgggcagtgc

SEQ ID NO: 9478 - RNA, 19 nt, synthetic construct
  source 1..19: mol_type = other RNA
gaggaggactcctgtcaag

SEQ ID NO: 9479 - RNA, 19 nt, synthetic construct
  source 1..19: mol_type = other RNA
cctggggtgacttccacta

SEQ ID NO: 9480 - RNA, 19 nt, synthetic construct
  source 1..19: mol_type = other RNA
ttgccgcggcctgagtgag

SEQ ID NO: 9481 - RNA, 19 nt, synthetic construct
  source 1..19: mol_type = other RNA
tgcattgccgaggaggact

SEQ ID NO: 9482 - RNA, 19 nt, synthetic construct
  source 1..19: mol_type = other RNA
gacaggacctacagctacc

SEQ ID NO: 9483 - RNA, 19 nt, synthetic construct
  source 1..19: mol_type = other RNA
atgggcttggcgcctgctt

SEQ ID NO: 9484 - RNA, 19 nt, synthetic construct
  source 1..19: mol_type = other RNA
gcagagagggtaccaggta

SEQ ID NO: 9485 - RNA, 19 nt, synthetic construct
  source 1..19: mol_type = other RNA
cggcggccctcacctcgca

SEQ ID NO: 9486 - RNA, 19 nt, synthetic construct
  source 1..19: mol_type = other RNA
agatcagggccgctggagg

SEQ ID NO: 9487 - RNA, 19 nt, synthetic construct
  source 1..19: mol_type = other RNA
tatgccagcagcctaagga

SEQ ID NO: 9488 - RNA, 19 nt, synthetic construct
  source 1..19: mol_type = other RNA
gccaccgaccacagagctg

SEQ ID NO: 9489 - RNA, 19 nt, synthetic construct
  source 1..19: mol_type = other RNA
ttccaacacgctcagccct

SEQ ID NO: 9490 - RNA, 19 nt, synthetic construct
  source 1..19: mol_type = other RNA
accacgggcttcacagcca

SEQ ID NO: 9491 - RNA, 19 nt, synthetic construct
  source 1..19: mol_type = other RNA
cccccatcactgaccacca

SEQ ID NO: 9492 - RNA, 19 nt, synthetic construct
  source 1..19: mol_type = other RNA
cccccagtgctgaccacca

SEQ ID NO: 9493 - RNA, 19 nt, synthetic construct
  source 1..19: mol_type = other RNA
ccgaacaccatggccacca

SEQ ID NO: 9494 - RNA, 19 nt, synthetic construct
  source 1..19: mol_type = other RNA
gcctggactttggcctggt

SEQ ID NO: 9495 - RNA, 19 nt, synthetic construct
  source 1..19: mol_type = other RNA
accacgggcttcacagcca

SEQ ID NO: 9496 - RNA, 19 nt, synthetic construct
  source 1..19: mol_type = other RNA
cccccatcactgaccacca

SEQ ID NO: 9497 - RNA, 19 nt, synthetic construct
  source 1..19: mol_type = other RNA
cccccagtgctgaccacca

SEQ ID NO: 9498 - RNA, 19 nt, synthetic construct
  source 1..19: mol_type = other RNA
gcctggactttggcctggt

SEQ ID NO: 9499 - RNA, 19 nt, synthetic construct
  source 1..19: mol_type = other RNA
accacgggcttcacagcca

SEQ ID NO: 9500 - RNA, 19 nt, synthetic construct
  source 1..19: mol_type = other RNA
cccccatcactgaccacca

SEQ ID NO: 9501 - RNA, 19 nt, synthetic construct
  source 1..19: mol_type = other RNA
cccccagtgctgaccacca

SEQ ID NO: 9502 - RNA, 19 nt, synthetic construct
  source 1..19: mol_type = other RNA
gcctggactttggcctggt

SEQ ID NO: 9503 - RNA, 19 nt, synthetic construct
  source 1..19: mol_type = other RNA
cccccagtgctgaccacca

SEQ ID NO: 9504 - RNA, 19 nt, synthetic construct
  source 1..19: mol_type = other RNA
cctggtgtccccctggggg

SEQ ID NO: 9505 - RNA, 19 nt, synthetic construct
  source 1..19: mol_type = other RNA
ggtgtccccctgggggagt

SEQ ID NO: 9506 - RNA, 19 nt, synthetic construct
  source 1..19: mol_type = other RNA
gcctggactttggcctggt

SEQ ID NO: 9507 - RNA, 19 nt, synthetic construct
  source 1..19: mol_type = other RNA
accacgggcttcacagcca

SEQ ID NO: 9508 - RNA, 19 nt, synthetic construct
  source 1..19: mol_type = other RNA
cccccatcactgaccacca

SEQ ID NO: 9509 - RNA, 19 nt, synthetic construct
  source 1..19: mol_type = other RNA
actccagggacaacaccca

SEQ ID NO: 9510 - RNA, 19 nt, synthetic construct
  source 1..19: mol_type = other RNA
atgccatccctctccggca

SEQ ID NO: 9511 - RNA, 19 nt, synthetic construct
  source 1..19: mol_type = other RNA
catccctctccggcaggtg

SEQ ID NO: 9512 - RNA, 19 nt, synthetic construct
  source 1..19: mol_type = other RNA
ccttgcccctccctgatgt

SEQ ID NO: 9513 - RNA, 19 nt, synthetic construct
  source 1..19: mol_type = other RNA
gccagcccccaggatgggt

SEQ ID NO: 9514 - RNA, 19 nt, synthetic construct
  source 1..19: mol_type = other RNA
ctctggcggccatgctcgt

SEQ ID NO: 9515 - RNA, 19 nt, synthetic construct
  source 1..19: mol_type = other RNA
acctggggtgacttccact

SEQ ID NO: 9516 - RNA, 19 nt, synthetic construct
  source 1..19: mol_type = other RNA
ctggggtgacttccactac

SEQ ID NO: 9517 - RNA, 19 nt, synthetic construct
  source 1..19: mol_type = other RNA
agcactgccgcgccgccta

SEQ ID NO: 9518 - RNA, 19 nt, synthetic construct
  source 1..19: mol_type = other RNA
cctcatcaatgggcagcgg

SEQ ID NO: 9519 - RNA, 19 nt, synthetic construct
  source 1..19: mol_type = other RNA
tggagcagagcggggacta

SEQ ID NO: 9520 - RNA, 19 nt, synthetic construct
  source 1..19: mol_type = other RNA
gctgccccacctgcccgtg

SEQ ID NO: 9521 - RNA, 19 nt, synthetic construct
  source 1..19: mol_type = other RNA
acctgccccctcaacatgc

SEQ ID NO: 9522 - RNA, 19 nt, synthetic construct
  source 1..19: mol_type = other RNA
cctgccccctcaacatgca

SEQ ID NO: 9523 - RNA, 19 nt, synthetic construct
  source 1..19: mol_type = other RNA
accaggagtgtggctcacc

SEQ ID NO: 9524 - RNA, 19 nt, synthetic construct
  source 1..19: mol_type = other RNA
ccaggagtgtggctcaccc

SEQ ID NO: 9525 - RNA, 19 nt, synthetic construct
  source 1..19: mol_type = other RNA
ggggcccacatctccacct

SEQ ID NO: 9526 - RNA, 19 nt, synthetic construct
  source 1..19: mol_type = other RNA
agcagcttcaccgtgctgg

SEQ ID NO: 9527 - RNA, 19 nt, synthetic construct
  source 1..19: mol_type = other RNA
atgggagtgggggctgcat

SEQ ID NO: 9528 - RNA, 19 nt, synthetic construct
  source 1..19: mol_type = other RNA
ctgcacctgcaggaaccgg

SEQ ID NO: 9529 - RNA, 19 nt, synthetic construct
  source 1..19: mol_type = other RNA
cgagagggccgggtgggga

SEQ ID NO: 9530 - RNA, 19 nt, synthetic construct
  source 1..19: mol_type = other RNA
actccggacacctgcccct

SEQ ID NO: 9531 - RNA, 19 nt, synthetic construct
  source 1..19: mol_type = other RNA
ccccttgttctgtgacttc

SEQ ID NO: 9532 - RNA, 19 nt, synthetic construct
  source 1..19: mol_type = other RNA
aagggtccccacagcggag

SEQ ID NO: 9533 - RNA, 19 nt, synthetic construct
  source 1..19: mol_type = other RNA
ccttcaccaccgcctgggt

SEQ ID NO: 9534 - RNA, 19 nt, synthetic construct
  source 1..19: mol_type = other RNA
ggtccagctggtacaatgg

SEQ ID NO: 9535 - RNA, 19 nt, synthetic construct
  source 1..19: mol_type = other RNA
tgccgggcggcgcagcttc

SEQ ID NO: 9536 - RNA, 19 nt, synthetic construct
  source 1..19: mol_type = other RNA
cccaacccagaccacagca

SEQ ID NO: 9537 - RNA, 19 nt, synthetic construct
  source 1..19: mol_type = other RNA
aactgggagcaggagggcg

SEQ ID NO: 9538 - RNA, 19 nt, synthetic construct
  source 1..19: mol_type = other RNA
gggagcaggagggcgtctt

SEQ ID NO: 9539 - RNA, 19 nt, synthetic construct
  source 1..19: mol_type = other RNA
acagccaccacgggaggcc

SEQ ID NO: 9540 - RNA, 19 nt, synthetic construct
  source 1..19: mol_type = other RNA
ccaggggtggccacatcca

SEQ ID NO: 9541 - RNA, 19 nt, synthetic construct
  source 1..19: mol_type = other RNA
caggggtggccacatccac

SEQ ID NO: 9542 - RNA, 19 nt, synthetic construct
  source 1..19: mol_type = other RNA
acctccagagctcgcccga

SEQ ID NO: 9543 - RNA, 19 nt, synthetic construct
  source 1..19: mol_type = other RNA
ggacagagacgacaatgag

SEQ ID NO: 9544 - RNA, 19 nt, synthetic construct
  source 1..19: mol_type = other RNA
ctgcgtccactggatccac

SEQ ID NO: 9545 - RNA, 19 nt, synthetic construct
  source 1..19: mol_type = other RNA
cctccagtccagggactgc

SEQ ID NO: 9546 - RNA, 19 nt, synthetic construct
  source 1..19: mol_type = other RNA
cccacggccaccatgtcca

SEQ ID NO: 9547 - RNA, 19 nt, synthetic construct
  source 1..19: mol_type = other RNA
cagaggctccacggtgacc

SEQ ID NO: 9548 - RNA, 19 nt, synthetic construct
  source 1..19: mol_type = other RNA
cctcgggcatcttgggcac

SEQ ID NO: 9549 - RNA, 19 nt, synthetic construct
  source 1..19: mol_type = other RNA
acccccttctccagggacg

SEQ ID NO: 9550 - RNA, 19 nt, synthetic construct
  source 1..19: mol_type = other RNA
ggccacaccacggccacct

SEQ ID NO: 9551 - RNA, 19 nt, synthetic construct
  source 1..19: mol_type = other RNA
ttggcctggtctgcaggaa

SEQ ID NO: 9552 - RNA, 19 nt, synthetic construct
  source 1..19: mol_type = other RNA
cgtgagcaggtggggaagt

SEQ ID NO: 9553 - RNA, 19 nt, synthetic construct
  source 1..19: mol_type = other RNA
cccaccggatccacggcca

SEQ ID NO: 9554 - RNA, 19 nt, synthetic construct
  source 1..19: mol_type = other RNA
tctccagtccagggactgc

SEQ ID NO: 9555 - RNA, 19 nt, synthetic construct
  source 1..19: mol_type = other RNA
cccacggccaccatgtcca

SEQ ID NO: 9556 - RNA, 19 nt, synthetic construct
  source 1..19: mol_type = other RNA
tccagagactgtccacacc

SEQ ID NO: 9557 - RNA, 19 nt, synthetic construct
  source 1..19: mol_type = other RNA
ccagagactgtccacacct

SEQ ID NO: 9558 - RNA, 19 nt, synthetic construct
  source 1..19: mol_type = other RNA
cgaacaccacggccaccac

SEQ ID NO: 9559 - RNA, 19 nt, synthetic construct
  source 1..19: mol_type = other RNA
aacaccacggccaccacac

SEQ ID NO: 9560 - RNA, 19 nt, synthetic construct
  source 1..19: mol_type = other RNA
acaccacggccaccacaca

SEQ ID NO: 9561 - RNA, 19 nt, synthetic construct
  source 1..19: mol_type = other RNA
acccccttctccagggacg

SEQ ID NO: 9562 - RNA, 19 nt, synthetic construct
  source 1..19: mol_type = other RNA
ttggcctggtctgcaggaa

SEQ ID NO: 9563 - RNA, 19 nt, synthetic construct
  source 1..19: mol_type = other RNA
cgtgagcaggtggggaagt

SEQ ID NO: 9564 - RNA, 19 nt, synthetic construct
  source 1..19: mol_type = other RNA
tcctccagtccaaggactg

SEQ ID NO: 9565 - RNA, 19 nt, synthetic construct
  source 1..19: mol_type = other RNA
caaatccacagctaccagc

SEQ ID NO: 9566 - RNA, 19 nt, synthetic construct
  source 1..19: mol_type = other RNA
ccacagctaccagctttac

SEQ ID NO: 9567 - RNA, 19 nt, synthetic construct
  source 1..19: mol_type = other RNA
tcctccactccggagacca

SEQ ID NO: 9568 - RNA, 19 nt, synthetic construct
  source 1..19: mol_type = other RNA
cctccactccggagaccac

SEQ ID NO: 9569 - RNA, 19 nt, synthetic construct
  source 1..19: mol_type = other RNA
ccacagcagccactacaac

SEQ ID NO: 9570 - RNA, 19 nt, synthetic construct
  source 1..19: mol_type = other RNA
cccaccggatccacggcca

SEQ ID NO: 9571 - RNA, 19 nt, synthetic construct
  source 1..19: mol_type = other RNA
ccaccacacccacagtcat

SEQ ID NO: 9572 - RNA, 19 nt, synthetic construct
  source 1..19: mol_type = other RNA
ctccagagccactccctcc

SEQ ID NO: 9573 - RNA, 19 nt, synthetic construct
  source 1..19: mol_type = other RNA
cctccagtccagggactgc

SEQ ID NO: 9574 - RNA, 19 nt, synthetic construct
  source 1..19: mol_type = other RNA
cccacggccaccatgtcca

SEQ ID NO: 9575 - RNA, 19 nt, synthetic construct
  source 1..19: mol_type = other RNA
tccagagactgtccacacc

SEQ ID NO: 9576 - RNA, 19 nt, synthetic construct
  source 1..19: mol_type = other RNA
ccagagactgtccacacct

SEQ ID NO: 9577 - RNA, 19 nt, synthetic construct
  source 1..19: mol_type = other RNA
cagaggctccacggtgacc

SEQ ID NO: 9578 - RNA, 19 nt, synthetic construct
  source 1..19: mol_type = other RNA
cgaacaccacggccaccac

SEQ ID NO: 9579 - RNA, 19 nt, synthetic construct
  source 1..19: mol_type = other RNA
aacaccacggccaccacac

SEQ ID NO: 9580 - RNA, 19 nt, synthetic construct
  source 1..19: mol_type = other RNA
acaccacggccaccacaca

SEQ ID NO: 9581 - RNA, 19 nt, synthetic construct
  source 1..19: mol_type = other RNA
cctcgggcatcttgggcac

SEQ ID NO: 9582 - RNA, 19 nt, synthetic construct
  source 1..19: mol_type = other RNA
acccccttctccagggacg

SEQ ID NO: 9583 - RNA, 19 nt, synthetic construct
  source 1..19: mol_type = other RNA
cgggccacaccaggggcac

SEQ ID NO: 9584 - RNA, 19 nt, synthetic construct
  source 1..19: mol_type = other RNA
ggcagtctgtgagcagccc

SEQ ID NO: 9585 - RNA, 19 nt, synthetic construct
  source 1..19: mol_type = other RNA
ttggcctggtctgcaggaa

SEQ ID NO: 9586 - RNA, 19 nt, synthetic construct
  source 1..19: mol_type = other RNA
cgtgagcaggtggggaagt

SEQ ID NO: 9587 - RNA, 19 nt, synthetic construct
  source 1..19: mol_type = other RNA
cccaccggatccacggcca

SEQ ID NO: 9588 - RNA, 19 nt, synthetic construct
  source 1..19: mol_type = other RNA
tctccagtccagggactgc

SEQ ID NO: 9589 - RNA, 19 nt, synthetic construct
  source 1..19: mol_type = other RNA
cccacggccaccatgtcca

SEQ ID NO: 9590 - RNA, 19 nt, synthetic construct
  source 1..19: mol_type = other RNA
ctctgtggccaccccctct

SEQ ID NO: 9591 - RNA, 19 nt, synthetic construct
  source 1..19: mol_type = other RNA
cgaacaccacggccaccac

SEQ ID NO: 9592 - RNA, 19 nt, synthetic construct
  source 1..19: mol_type = other RNA
aacaccacggccaccacac

SEQ ID NO: 9593 - RNA, 19 nt, synthetic construct
  source 1..19: mol_type = other RNA
acaccacggccaccacaca

SEQ ID NO: 9594 - RNA, 19 nt, synthetic construct
  source 1..19: mol_type = other RNA
ggccacaccacggccacct

SEQ ID NO: 9595 - RNA, 19 nt, synthetic construct
  source 1..19: mol_type = other RNA
ttggcctggtctgcaggaa

SEQ ID NO: 9596 - RNA, 19 nt, synthetic construct
  source 1..19: mol_type = other RNA
cgtgagcaggtggggaagt

SEQ ID NO: 9597 - RNA, 19 nt, synthetic construct
  source 1..19: mol_type = other RNA
tcctccagtccaaggactg

SEQ ID NO: 9598 - RNA, 19 nt, synthetic construct
  source 1..19: mol_type = other RNA
cagaccaccacacccgtgg

SEQ ID NO: 9599 - RNA, 19 nt, synthetic construct
  source 1..19: mol_type = other RNA
tcctccactccggagacca

SEQ ID NO: 9600 - RNA, 19 nt, synthetic construct
  source 1..19: mol_type = other RNA
cctccactccggagaccac

SEQ ID NO: 9601 - RNA, 19 nt, synthetic construct
  source 1..19: mol_type = other RNA
ccacagcagccactacaac

SEQ ID NO: 9602 - RNA, 19 nt, synthetic construct
  source 1..19: mol_type = other RNA
ctgcgtccactggatccac

SEQ ID NO: 9603 - RNA, 19 nt, synthetic construct
  source 1..19: mol_type = other RNA
cccaccggatccacggcca

SEQ ID NO: 9604 - RNA, 19 nt, synthetic construct
  source 1..19: mol_type = other RNA
cctccagtccagggactgc

SEQ ID NO: 9605 - RNA, 19 nt, synthetic construct
  source 1..19: mol_type = other RNA
cccacggccaccatgtcca

SEQ ID NO: 9606 - RNA, 19 nt, synthetic construct
  source 1..19: mol_type = other RNA
tccagagactgtccacacc

SEQ ID NO: 9607 - RNA, 19 nt, synthetic construct
  source 1..19: mol_type = other RNA
ccagagactgtccacacct

SEQ ID NO: 9608 - RNA, 19 nt, synthetic construct
  source 1..19: mol_type = other RNA
tcctccagtccaaggactg

SEQ ID NO: 9609 - RNA, 19 nt, synthetic construct
  source 1..19: mol_type = other RNA
aaaatccacagctaccagc

SEQ ID NO: 9610 - RNA, 19 nt, synthetic construct
  source 1..19: mol_type = other RNA
ccacagctaccagctttac

SEQ ID NO: 9611 - RNA, 19 nt, synthetic construct
  source 1..19: mol_type = other RNA
acagaccaccacacccatg

SEQ ID NO: 9612 - RNA, 19 nt, synthetic construct
  source 1..19: mol_type = other RNA
tcctctactccagagacca

SEQ ID NO: 9613 - RNA, 19 nt, synthetic construct
  source 1..19: mol_type = other RNA
tccagagaccacccacacc

SEQ ID NO: 9614 - RNA, 19 nt, synthetic construct
  source 1..19: mol_type = other RNA
acagccaccatgacaaggg

SEQ ID NO: 9615 - RNA, 19 nt, synthetic construct
  source 1..19: mol_type = other RNA
ccactctggggacgacccg

SEQ ID NO: 9616 - RNA, 19 nt, synthetic construct
  source 1..19: mol_type = other RNA
tcactgagctgaccacaac

SEQ ID NO: 9617 - RNA, 19 nt, synthetic construct
  source 1..19: mol_type = other RNA
gtggtgaccaccatggcca

SEQ ID NO: 9618 - RNA, 19 nt, synthetic construct
  source 1..19: mol_type = other RNA
gaccgcttccagggcgcct

SEQ ID NO: 9619 - RNA, 19 nt, synthetic construct
  source 1..19: mol_type = other RNA
ttccagggcgcctgtccca

SEQ ID NO: 9620 - RNA, 19 nt, synthetic construct
  source 1..19: mol_type = other RNA
ctccgccccgctgtcctcg

SEQ ID NO: 9621 - RNA, 19 nt, synthetic construct
  source 1..19: mol_type = other RNA
gcagcatgtggggcggctc

SEQ ID NO: 9622 - RNA, 19 nt, synthetic construct
  source 1..19: mol_type = other RNA
tgctggggaccaccaccat

SEQ ID NO: 9623 - RNA, 19 nt, synthetic construct
  source 1..19: mol_type = other RNA
ttcccggggagcggtgggt

SEQ ID NO: 9624 - RNA, 19 nt, synthetic construct
  source 1..19: mol_type = other RNA
cgcccagggtcagcccccg

SEQ ID NO: 9625 - RNA, 19 nt, synthetic construct
  source 1..19: mol_type = other RNA
cccctgctgccccgagacg

SEQ ID NO: 9626 - RNA, 19 nt, synthetic construct
  source 1..19: mol_type = other RNA
agcctgcctgtgtgcccgc

SEQ ID NO: 9627 - RNA, 19 nt, synthetic construct
  source 1..19: mol_type = other RNA
tgcctgtgtgcccgccagg

SEQ ID NO: 9628 - RNA, 19 nt, synthetic construct
  source 1..19: mol_type = other RNA
tgaggaggactcctgtcaa

SEQ ID NO: 9629 - RNA, 19 nt, synthetic construct
  source 1..19: mol_type = other RNA
tcctgtggcaccagggctg

SEQ ID NO: 9630 - RNA, 19 nt, synthetic construct
  source 1..19: mol_type = other RNA
tggctcccccacacacccg

SEQ ID NO: 9631 - RNA, 19 nt, synthetic construct
  source 1..19: mol_type = other RNA
gcctcctctgcggagcccc

SEQ ID NO: 9632 - RNA, 19 nt, synthetic construct
  source 1..19: mol_type = other RNA
acggccaggtcagagaggg

SEQ ID NO: 9633 - RNA, 19 nt, synthetic construct
  source 1..19: mol_type = other RNA
ggtcagagaggggtcagca

SEQ ID NO: 9634 - RNA, 19 nt, synthetic construct
  source 1..19: mol_type = other RNA
gtggtgccgcaggcagaga

SEQ ID NO: 9635 - RNA, 19 nt, synthetic construct
  source 1..19: mol_type = other RNA
gtcctgctggacccaaagc

SEQ ID NO: 9636 - RNA, 19 nt, synthetic construct
  source 1..19: mol_type = other RNA
ggcacttatgccagcagcc

SEQ ID NO: 9637 - RNA, 19 nt, synthetic construct
  source 1..19: mol_type = other RNA
tgcaaccttcccaggcgcc

SEQ ID NO: 9638 - RNA, 19 nt, synthetic construct
  source 1..19: mol_type = other RNA
tccagggacaacacccatc

SEQ ID NO: 9639 - RNA, 19 nt, synthetic construct
  source 1..19: mol_type = other RNA
ccccagcgcgcgcagctct

SEQ ID NO: 9640 - RNA, 19 nt, synthetic construct
  source 1..19: mol_type = other RNA
cctccaccccgggaacagc

SEQ ID NO: 9641 - RNA, 19 nt, synthetic construct
  source 1..19: mol_type = other RNA
cctccaccccgggaacagc

SEQ ID NO: 9642 - RNA, 19 nt, synthetic construct
  source 1..19: mol_type = other RNA
gcagggcacaccatggatg

SEQ ID NO: 9643 - RNA, 19 nt, synthetic construct
  source 1..19: mol_type = other RNA
ggctcagccatcctgcaca

SEQ ID NO: 9644 - RNA, 19 nt, synthetic construct
  source 1..19: mol_type = other RNA
cccttccactcgaactgca

SEQ ID NO: 9645 - RNA, 19 nt, synthetic construct
  source 1..19: mol_type = other RNA
ccttccactcgaactgcat

SEQ ID NO: 9646 - RNA, 19 nt, synthetic construct
  source 1..19: mol_type = other RNA
aggcagctgcgagtacatc

SEQ ID NO: 9647 - RNA, 19 nt, synthetic construct
  source 1..19: mol_type = other RNA
atcggccccaataaccacg

SEQ ID NO: 9648 - RNA, 19 nt, synthetic construct
  source 1..19: mol_type = other RNA
tccacagtgctgaccacga

SEQ ID NO: 9649 - RNA, 19 nt, synthetic construct
  source 1..19: mol_type = other RNA
tccacagtgctgaccacga

SEQ ID NO: 9650 - RNA, 19 nt, synthetic construct
  source 1..19: mol_type = other RNA
agcggtgggtcagcaactg

SEQ ID NO: 9651 - RNA, 19 nt, synthetic construct
  source 1..19: mol_type = other RNA
ccttccagcactgagaagc

SEQ ID NO: 9652 - RNA, 19 nt, synthetic construct
  source 1..19: mol_type = other RNA
ccttccagcactgagaagc

SEQ ID NO: 9653 - RNA, 19 nt, synthetic construct
  source 1..19: mol_type = other RNA
ccttccagcactgagaagc

SEQ ID NO: 9654 - RNA, 19 nt, synthetic construct
  source 1..19: mol_type = other RNA
ccttccagcactgagaagc

SEQ ID NO: 9655 - RNA, 19 nt, synthetic construct
  source 1..19: mol_type = other RNA
ccttccagcactgagaagc

SEQ ID NO: 9656 - RNA, 19 nt, synthetic construct
  source 1..19: mol_type = other RNA
acagggtgtgcagccccca

SEQ ID NO: 9657 - RNA, 19 nt, synthetic construct
  source 1..19: mol_type = other RNA
ggtggcgagagggccgggt

SEQ ID NO: 9658 - RNA, 19 nt, synthetic construct
  source 1..19: mol_type = other RNA
ctggctgagctgcggaagt

SEQ ID NO: 9659 - RNA, 19 nt, synthetic construct
  source 1..19: mol_type = other RNA
aacagaccaccacacccat

SEQ ID NO: 9660 - RNA, 19 nt, synthetic construct
  source 1..19: mol_type = other RNA
cacagaccaccacacccat

SEQ ID NO: 9661 - RNA, 19 nt, synthetic construct
  source 1..19: mol_type = other RNA
gacggcgtctgcaccaagt

SEQ ID NO: 9662 - RNA, 19 nt, synthetic construct
  source 1..19: mol_type = other RNA
cacctatgaggacaggacc

SEQ ID NO: 9663 - RNA, 19 nt, synthetic construct
  source 1..19: mol_type = other RNA
tacgccaaccagacctgtg

SEQ ID NO: 9664 - RNA, 19 nt, synthetic construct
  source 1..19: mol_type = other RNA
cgcgctgtcctcctatgtg

SEQ ID NO: 9665 - RNA, 19 nt, synthetic construct
  source 1..19: mol_type = other RNA
tatgtcctcatgagagaga

SEQ ID NO: 9666 - RNA, 19 nt, synthetic construct
  source 1..19: mol_type = other RNA
agcacctgcccatcaaagt

SEQ ID NO: 9667 - RNA, 19 nt, synthetic construct
  source 1..19: mol_type = other RNA
ggactaccccaagtctgaa

SEQ ID NO: 9668 - RNA, 19 nt, synthetic construct
  source 1..19: mol_type = other RNA
cgtgggctgtttcagcaca

SEQ ID NO: 9669 - RNA, 19 nt, synthetic construct
  source 1..19: mol_type = other RNA
ggactacaagggcagggtc

SEQ ID NO: 9670 - RNA, 19 nt, synthetic construct
  source 1..19: mol_type = other RNA
gaccacagcaaccgaaaag

SEQ ID NO: 9671 - RNA, 19 nt, synthetic construct
  source 1..19: mol_type = other RNA
aaagtgctgaccaccacgg

SEQ ID NO: 9672 - RNA, 19 nt, synthetic construct
  source 1..19: mol_type = other RNA
gtgggagtgcagccaccgg

SEQ ID NO: 9673 - RNA, 19 nt, synthetic construct
  source 1..19: mol_type = other RNA
ggggagcctcaggaaaacc

SEQ ID NO: 9674 - RNA, 19 nt, synthetic construct
  source 1..19: mol_type = other RNA
ctgccccccaggcacggtg

SEQ ID NO: 9675 - RNA, 19 nt, synthetic construct
  source 1..19: mol_type = other RNA
gctttgaggacccctgctc

SEQ ID NO: 9676 - RNA, 19 nt, synthetic construct
  source 1..19: mol_type = other RNA
gggcacctgcgtggcctac

SEQ ID NO: 9677 - RNA, 19 nt, synthetic construct
  source 1..19: mol_type = other RNA
gactgcaccaggactacaa

SEQ ID NO: 9678 - RNA, 19 nt, synthetic construct
  source 1..19: mol_type = other RNA
cccccactccacgacaagc

SEQ ID NO: 9679 - RNA, 19 nt, synthetic construct
  source 1..19: mol_type = other RNA
ccccactccacgacaagcc

SEQ ID NO: 9680 - RNA, 19 nt, synthetic construct
  source 1..19: mol_type = other RNA
cccagcagccccacatcgg

SEQ ID NO: 9681 - RNA, 19 nt, synthetic construct
  source 1..19: mol_type = other RNA
cccagcagccccacatcgg

SEQ ID NO: 9682 - RNA, 19 nt, synthetic construct
  source 1..19: mol_type = other RNA
cccagcagccccacatcgg

SEQ ID NO: 9683 - RNA, 19 nt, synthetic construct
  source 1..19: mol_type = other RNA
cccagcagccccacatcgg

SEQ ID NO: 9684 - RNA, 19 nt, synthetic construct
  source 1..19: mol_type = other RNA
atgtcctcatgagagagat

SEQ ID NO: 9685 - RNA, 19 nt, synthetic construct
  source 1..19: mol_type = other RNA
gtgtacctgcctctctggg

SEQ ID NO: 9686 - RNA, 19 nt, synthetic construct
  source 1..19: mol_type = other RNA
gggacacccaggacccaac

SEQ ID NO: 9687 - RNA, 19 nt, synthetic construct
  source 1..19: mol_type = other RNA
tgctggggccggcctttgc

SEQ ID NO: 9688 - RNA, 19 nt, synthetic construct
  source 1..19: mol_type = other RNA
cccactccacgacaagccc

SEQ ID NO: 9689 - RNA, 19 nt, synthetic construct
  source 1..19: mol_type = other RNA
tctgtgtccctgcgcccat

SEQ ID NO: 9690 - RNA, 19 nt, synthetic construct
  source 1..19: mol_type = other RNA
cacagccttgaggcctgca

SEQ ID NO: 9691 - RNA, 19 nt, synthetic construct
  source 1..19: mol_type = other RNA
gtcctgggaccggaagacc

SEQ ID NO: 9692 - RNA, 19 nt, synthetic construct
  source 1..19: mol_type = other RNA
acccgtcactgtcttcccc

SEQ ID NO: 9693 - RNA, 19 nt, synthetic construct
  source 1..19: mol_type = other RNA
aacctgcagaagttggatg

SEQ ID NO: 9694 - RNA, 19 nt, synthetic construct
  source 1..19: mol_type = other RNA
tcacgcactctggctgcct

SEQ ID NO: 9695 - RNA, 19 nt, synthetic construct
  source 1..19: mol_type = other RNA
aacttcaaccagaaccagg

SEQ ID NO: 9696 - RNA, 19 nt, synthetic construct
  source 1..19: mol_type = other RNA
gccacgacgcgggcctgtg

SEQ ID NO: 9697 - RNA, 19 nt, synthetic construct
  source 1..19: mol_type = other RNA
aacgccattcaccttcacc

SEQ ID NO: 9698 - RNA, 19 nt, synthetic construct
  source 1..19: mol_type = other RNA
aggccgagagcttccccaa

SEQ ID NO: 9699 - RNA, 19 nt, synthetic construct
  source 1..19: mol_type = other RNA
caccacccacatcacagag

SEQ ID NO: 9700 - RNA, 19 nt, synthetic construct
  source 1..19: mol_type = other RNA
caccacccacatcacagag

SEQ ID NO: 9701 - RNA, 19 nt, synthetic construct
  source 1..19: mol_type = other RNA
caccacccacatcacagag

SEQ ID NO: 9702 - RNA, 19 nt, synthetic construct
  source 1..19: mol_type = other RNA
caccacccacatcacagag

SEQ ID NO: 9703 - RNA, 19 nt, synthetic construct
  source 1..19: mol_type = other RNA
cctcttccacaacaacacc

SEQ ID NO: 9704 - RNA, 19 nt, synthetic construct
  source 1..19: mol_type = other RNA
ggaagttcaagatgtgctt

SEQ ID NO: 9705 - RNA, 19 nt, synthetic construct
  source 1..19: mol_type = other RNA
ggaagttcaagatgtgctt

SEQ ID NO: 9706 - RNA, 19 nt, synthetic construct
  source 1..19: mol_type = other RNA
ggaagttcaagatgtgctt

SEQ ID NO: 9707 - RNA, 19 nt, synthetic construct
  source 1..19: mol_type = other RNA
ggaagttcaagatgtgctt

SEQ ID NO: 9708 - RNA, 19 nt, synthetic construct
  source 1..19: mol_type = other RNA
caaccagaaccaggctgac

SEQ ID NO: 9709 - RNA, 19 nt, synthetic construct
  source 1..19: mol_type = other RNA
ggggcaccctgcctaaaaa

SEQ ID NO: 9710 - RNA, 19 nt, synthetic construct
  source 1..19: mol_type = other RNA
cctaaggacatagagtgcc

SEQ ID NO: 9711 - RNA, 19 nt, synthetic construct
  source 1..19: mol_type = other RNA
ccctcctctgccctaggga

SEQ ID NO: 9712 - RNA, 19 nt, synthetic construct
  source 1..19: mol_type = other RNA
gggccgtctgtgagcagcc

SEQ ID NO: 9713 - RNA, 19 nt, synthetic construct
  source 1..19: mol_type = other RNA
tgccctcctccactccggg

SEQ ID NO: 9714 - RNA, 19 nt, synthetic construct
  source 1..19: mol_type = other RNA
ccctcctctgccctaggga

SEQ ID NO: 9715 - RNA, 19 nt, synthetic construct
  source 1..19: mol_type = other RNA
caggaccacggccacggcc

SEQ ID NO: 9716 - RNA, 19 nt, synthetic construct
  source 1..19: mol_type = other RNA
gggccgtctgtgagcagcc

SEQ ID NO: 9717 - RNA, 19 nt, synthetic construct
  source 1..19: mol_type = other RNA
ccctcctctgccctaggga

SEQ ID NO: 9718 - RNA, 19 nt, synthetic construct
  source 1..19: mol_type = other RNA
ccctcctctgccctaggga

SEQ ID NO: 9719 - RNA, 19 nt, synthetic construct
  source 1..19: mol_type = other RNA
caggaccacggccacggcc

SEQ ID NO: 9720 - RNA, 19 nt, synthetic construct
  source 1..19: mol_type = other RNA
gggccgtctgtgagcagcc

SEQ ID NO: 9721 - RNA, 19 nt, synthetic construct
  source 1..19: mol_type = other RNA
tgccctcctccactccggg

SEQ ID NO: 9722 - RNA, 19 nt, synthetic construct
  source 1..19: mol_type = other RNA
caagcacctgcccatcaaa

SEQ ID NO: 9723 - RNA, 19 nt, synthetic construct
  source 1..19: mol_type = other RNA
gggggagcctcaggaaaac

SEQ ID NO: 9724 - RNA, 19 nt, synthetic construct
  source 1..19: mol_type = other RNA
cgactgcaccaggactaca

SEQ ID NO: 9725 - RNA, 19 nt, synthetic construct
  source 1..19: mol_type = other RNA
cccggacccgctgcccttg

SEQ ID NO: 9726 - RNA, 19 nt, synthetic construct
  source 1..19: mol_type = other RNA
tccacagaacccactgtcc

SEQ ID NO: 9727 - RNA, 19 nt, synthetic construct
  source 1..19: mol_type = other RNA
gtcccccactccacgacaa

SEQ ID NO: 9728 - RNA, 19 nt, synthetic construct
  source 1..19: mol_type = other RNA
gtgtgtccgcgaggtctgc

SEQ ID NO: 9729 - RNA, 19 nt, synthetic construct
  source 1..19: mol_type = other RNA
ggccccaggtaccaccacc

SEQ ID NO: 9730 - RNA, 19 nt, synthetic construct
  source 1..19: mol_type = other RNA
acgttctgtccaagaaatg

SEQ ID NO: 9731 - RNA, 19 nt, synthetic construct
  source 1..19: mol_type = other RNA
agtgcgtggcccagtgtgg

SEQ ID NO: 9732 - RNA, 19 nt, synthetic construct
  source 1..19: mol_type = other RNA
tggacagagtggtttgatg

SEQ ID NO: 9733 - RNA, 19 nt, synthetic construct
  source 1..19: mol_type = other RNA
ggacagagtggtttgatga

SEQ ID NO: 9734 - RNA, 19 nt, synthetic construct
  source 1..19: mol_type = other RNA
tgtgatctgatgctgagcc

SEQ ID NO: 9735 - RNA, 19 nt, synthetic construct
  source 1..19: mol_type = other RNA
cactgtcttccccagcctg

SEQ ID NO: 9736 - RNA, 19 nt, synthetic construct
  source 1..19: mol_type = other RNA
cctgccggaaccccagtgg

SEQ ID NO: 9737 - RNA, 19 nt, synthetic construct
  source 1..19: mol_type = other RNA
aatccgtgtgttctgctgc

SEQ ID NO: 9738 - RNA, 19 nt, synthetic construct
  source 1..19: mol_type = other RNA
aatccgtgtgttctgctgc

SEQ ID NO: 9739 - RNA, 19 nt, synthetic construct
  source 1..19: mol_type = other RNA
aatccgtgtgttctgctgc

SEQ ID NO: 9740 - RNA, 19 nt, synthetic construct
  source 1..19: mol_type = other RNA
aatccgtgtgttctgctgc

SEQ ID NO: 9741 - RNA, 19 nt, synthetic construct
  source 1..19: mol_type = other RNA
cgcagctgcccctgtcggc

SEQ ID NO: 9742 - RNA, 19 nt, synthetic construct
  source 1..19: mol_type = other RNA
gcagctgcccctgtcggca

SEQ ID NO: 9743 - RNA, 19 nt, synthetic construct
  source 1..19: mol_type = other RNA
cctctgccctagggaccac

SEQ ID NO: 9744 - RNA, 19 nt, synthetic construct
  source 1..19: mol_type = other RNA
cctctgccctagggaccac

SEQ ID NO: 9745 - RNA, 19 nt, synthetic construct
  source 1..19: mol_type = other RNA
cctctgccctagggaccac

SEQ ID NO: 9746 - RNA, 19 nt, synthetic construct
  source 1..19: mol_type = other RNA
cctctgccctagggaccac

SEQ ID NO: 9747 - RNA, 19 nt, synthetic construct
  source 1..19: mol_type = other RNA
cgaggccacctacaagcct

SEQ ID NO: 9748 - RNA, 19 nt, synthetic construct
  source 1..19: mol_type = other RNA
gccacttcatcacctttga

SEQ ID NO: 9749 - RNA, 19 nt, synthetic construct
  source 1..19: mol_type = other RNA
tggccgtgtcctgggaccg

SEQ ID NO: 9750 - RNA, 19 nt, synthetic construct
  source 1..19: mol_type = other RNA
cttcaatgaggaccagatg

SEQ ID NO: 9751 - RNA, 19 nt, synthetic construct
  source 1..19: mol_type = other RNA
ccttgaggcctgcacctgc

SEQ ID NO: 9752 - RNA, 19 nt, synthetic construct
  source 1..19: mol_type = other RNA
ctctgccctagggaccacc

SEQ ID NO: 9753 - RNA, 19 nt, synthetic construct
  source 1..19: mol_type = other RNA
ctctgccctagggaccacc

SEQ ID NO: 9754 - RNA, 19 nt, synthetic construct
  source 1..19: mol_type = other RNA
ctctgccctagggaccacc

SEQ ID NO: 9755 - RNA, 19 nt, synthetic construct
  source 1..19: mol_type = other RNA
ctctgccctagggaccacc

SEQ ID NO: 9756 - RNA, 19 nt, synthetic construct
  source 1..19: mol_type = other RNA
gtcctcctcagtcctcacc

SEQ ID NO: 9757 - RNA, 19 nt, synthetic construct
  source 1..19: mol_type = other RNA
cccacttctctactccctg

SEQ ID NO: 9758 - RNA, 19 nt, synthetic construct
  source 1..19: mol_type = other RNA
ccggggagtgtgcagtgac

SEQ ID NO: 9759 - RNA, 19 nt, synthetic construct
  source 1..19: mol_type = other RNA
cgccaacacctggaaggcc

SEQ ID NO: 9760 - RNA, 19 nt, synthetic construct
  source 1..19: mol_type = other RNA
tgcacggctgtggctgcct

SEQ ID NO: 9761 - RNA, 19 nt, synthetic construct
  source 1..19: mol_type = other RNA
caggacgtcatctacaaca

SEQ ID NO: 9762 - RNA, 19 nt, synthetic construct
  source 1..19: mol_type = other RNA
cagcctaaggacatagagt

SEQ ID NO: 9763 - RNA, 19 nt, synthetic construct
  source 1..19: mol_type = other RNA
cagggctttgagtacaaga

SEQ ID NO: 9764 - RNA, 19 nt, synthetic construct
  source 1..19: mol_type = other RNA
ccacgaggagacggtgccc

SEQ ID NO: 9765 - RNA, 19 nt, synthetic construct
  source 1..19: mol_type = other RNA
gtgtccctgcgcccatggc

SEQ ID NO: 9766 - RNA, 19 nt, synthetic construct
  source 1..19: mol_type = other RNA
cctatgtcctcatgagaga

SEQ ID NO: 9767 - RNA, 19 nt, synthetic construct
  source 1..19: mol_type = other RNA
aagctcttcgtggagagct

SEQ ID NO: 9768 - RNA, 19 nt, synthetic construct
  source 1..19: mol_type = other RNA
tgtggcatgtcctggaact

SEQ ID NO: 9769 - RNA, 19 nt, synthetic construct
  source 1..19: mol_type = other RNA
atgaggactaccccaagtc

SEQ ID NO: 9770 - RNA, 19 nt, synthetic construct
  source 1..19: mol_type = other RNA
ctgcaccaggactacaagg

SEQ ID NO: 9771 - RNA, 19 nt, synthetic construct
  source 1..19: mol_type = other RNA
cccttcttcaatgaggacc

SEQ ID NO: 9772 - RNA, 19 nt, synthetic construct
  source 1..19: mol_type = other RNA
cctccctcagtgccagcac

SEQ ID NO: 9773 - RNA, 19 nt, synthetic construct
  source 1..19: mol_type = other RNA
tgatcctgtttgaccaaat

SEQ ID NO: 9774 - RNA, 19 nt, synthetic construct
  source 1..19: mol_type = other RNA
cgccgcgctgtcctcctat

SEQ ID NO: 9775 - RNA, 19 nt, synthetic construct
  source 1..19: mol_type = other RNA
tgtgggaccaccggcacca

SEQ ID NO: 9776 - RNA, 19 nt, synthetic construct
  source 1..19: mol_type = other RNA
ctccaaggccatcaagctc

SEQ ID NO: 9777 - RNA, 19 nt, synthetic construct
  source 1..19: mol_type = other RNA
gccatcaatgactttgcca

SEQ ID NO: 9778 - RNA, 19 nt, synthetic construct
  source 1..19: mol_type = other RNA
cctgccgctcccaggttga

SEQ ID NO: 9779 - RNA, 19 nt, synthetic construct
  source 1..19: mol_type = other RNA
taccagccctgcggggcac

SEQ ID NO: 9780 - RNA, 19 nt, synthetic construct
  source 1..19: mol_type = other RNA
ggcctggtgtgcaggaact

SEQ ID NO: 9781 - RNA, 19 nt, synthetic construct
  source 1..19: mol_type = other RNA
cgtggaatgcagcctggac

SEQ ID NO: 9782 - RNA, 19 nt, synthetic construct
  source 1..19: mol_type = other RNA
cgtggaatgcagcctggac

SEQ ID NO: 9783 - RNA, 19 nt, synthetic construct
  source 1..19: mol_type = other RNA
cgtggaatgcagcctggac

SEQ ID NO: 9784 - RNA, 19 nt, synthetic construct
  source 1..19: mol_type = other RNA
cgtggaatgcagcctggac

SEQ ID NO: 9785 - RNA, 19 nt, synthetic construct
  source 1..19: mol_type = other RNA
ctgcagggcatttggacag

SEQ ID NO: 9786 - RNA, 19 nt, synthetic construct
  source 1..19: mol_type = other RNA
cctggagaactgcacggtg

SEQ ID NO: 9787 - RNA, 19 nt, synthetic construct
  source 1..19: mol_type = other RNA
gcgtgaacaagcacctgcc

SEQ ID NO: 9788 - RNA, 19 nt, synthetic construct
  source 1..19: mol_type = other RNA
cgtgaacaagcacctgccc

SEQ ID NO: 9789 - RNA, 19 nt, synthetic construct
  source 1..19: mol_type = other RNA
tccacctttgacggcacct

SEQ ID NO: 9790 - RNA, 19 nt, synthetic construct
  source 1..19: mol_type = other RNA
agcctggtgtccccctgcg

SEQ ID NO: 9791 - RNA, 19 nt, synthetic construct
  source 1..19: mol_type = other RNA
agcctggtgtccccctgcg

SEQ ID NO: 9792 - RNA, 19 nt, synthetic construct
  source 1..19: mol_type = other RNA
agcctggtgtccccctgcg

SEQ ID NO: 9793 - RNA, 19 nt, synthetic construct
  source 1..19: mol_type = other RNA
ggaacctgcagaagttgga

SEQ ID NO: 9794 - RNA, 19 nt, synthetic construct
  source 1..19: mol_type = other RNA
ccaggaacagctttgagga

SEQ ID NO: 9795 - RNA, 19 nt, synthetic construct
  source 1..19: mol_type = other RNA
ccccaagtctgaacaactt

SEQ ID NO: 9796 - RNA, 19 nt, synthetic construct
  source 1..19: mol_type = other RNA
ggacacctgctccaacccc

SEQ ID NO: 9797 - RNA, 19 nt, synthetic construct
  source 1..19: mol_type = other RNA
gggaacctgcagaagttgg

SEQ ID NO: 9798 - RNA, 19 nt, synthetic construct
  source 1..19: mol_type = other RNA
ggcagccaacatcaccctg

SEQ ID NO: 9799 - RNA, 19 nt, synthetic construct
  source 1..19: mol_type = other RNA
gcagccttcgccaacacct

SEQ ID NO: 9800 - RNA, 19 nt, synthetic construct
  source 1..19: mol_type = other RNA
caggtgaatgagacctgga

SEQ ID NO: 9801 - RNA, 19 nt, synthetic construct
  source 1..19: mol_type = other RNA
gctgtcctcctatgtgcac

SEQ ID NO: 9802 - RNA, 19 nt, synthetic construct
  source 1..19: mol_type = other RNA
tcccccactccacgacaag

SEQ ID NO: 9803 - RNA, 19 nt, synthetic construct
  source 1..19: mol_type = other RNA
ccactccacgacaagcccg

SEQ ID NO: 9804 - RNA, 19 nt, synthetic construct
  source 1..19: mol_type = other RNA
gccagcaggtggactgtga

SEQ ID NO: 9805 - RNA, 19 nt, synthetic construct
  source 1..19: mol_type = other RNA
gcctggtgtccccctgcgg

SEQ ID NO: 9806 - RNA, 19 nt, synthetic construct
  source 1..19: mol_type = other RNA
gcctggtgtccccctgcgg

SEQ ID NO: 9807 - RNA, 19 nt, synthetic construct
  source 1..19: mol_type = other RNA
gcctggtgtccccctgcgg

SEQ ID NO: 9808 - RNA, 19 nt, synthetic construct
  source 1..19: mol_type = other RNA
gtgtcctcctcagtcctca

SEQ ID NO: 9809 - RNA, 19 nt, synthetic construct
  source 1..19: mol_type = other RNA
tgtttgtcaggctggaccc

SEQ ID NO: 9810 - RNA, 19 nt, synthetic construct
  source 1..19: mol_type = other RNA
ctgtcctcctatgtgcacg

SEQ ID NO: 9811 - RNA, 19 nt, synthetic construct
  source 1..19: mol_type = other RNA
gatggccgtgtcctgggac

SEQ ID NO: 9812 - RNA, 19 nt, synthetic construct
  source 1..19: mol_type = other RNA
tggaccctggagaactgca

SEQ ID NO: 9813 - RNA, 19 nt, synthetic construct
  source 1..19: mol_type = other RNA
tgatgctgagccaggtctt

SEQ ID NO: 9814 - RNA, 19 nt, synthetic construct
  source 1..19: mol_type = other RNA
agtgctgaccaccacggcc

SEQ ID NO: 9815 - RNA, 19 nt, synthetic construct
  source 1..19: mol_type = other RNA
caggacctgccgtgccctg

SEQ ID NO: 9816 - RNA, 19 nt, synthetic construct
  source 1..19: mol_type = other RNA
caaccccaagcccttccac

SEQ ID NO: 9817 - RNA, 19 nt, synthetic construct
  source 1..19: mol_type = other RNA
atggcaacaccctcctcta

SEQ ID NO: 9818 - RNA, 19 nt, synthetic construct
  source 1..19: mol_type = other RNA
atggcaacaccctcctcta

SEQ ID NO: 9819 - RNA, 19 nt, synthetic construct
  source 1..19: mol_type = other RNA
atggcaacaccctcctcta

SEQ ID NO: 9820 - RNA, 19 nt, synthetic construct
  source 1..19: mol_type = other RNA
atggcaacaccctcctcta

SEQ ID NO: 9821 - RNA, 19 nt, synthetic construct
  source 1..19: mol_type = other RNA
atggcaacaccctcctcta

SEQ ID NO: 9822 - RNA, 19 nt, synthetic construct
  source 1..19: mol_type = other RNA
ctgccagtcctgcgtgtgt

SEQ ID NO: 9823 - RNA, 19 nt, synthetic construct
  source 1..19: mol_type = other RNA
gaggacagtgccctgctgg

SEQ ID NO: 9824 - RNA, 19 nt, synthetic construct
  source 1..19: mol_type = other RNA
agtgccaggacctgccgtg

SEQ ID NO: 9825 - RNA, 19 nt, synthetic construct
  source 1..19: mol_type = other RNA
ggccagatgtgcggcctgt

SEQ ID NO: 9826 - RNA, 19 nt, synthetic construct
  source 1..19: mol_type = other RNA
cgggcgcctgtgtgcccgc

SEQ ID NO: 9827 - RNA, 19 nt, synthetic construct
  source 1..19: mol_type = other RNA
ggcccaggactactgtggg

SEQ ID NO: 9828 - RNA, 19 nt, synthetic construct
  source 1..19: mol_type = other RNA
cgtcaccgagaacatcccc

SEQ ID NO: 9829 - RNA, 19 nt, synthetic construct
  source 1..19: mol_type = other RNA
tgcctggtggacctgcctg

SEQ ID NO: 9830 - RNA, 19 nt, synthetic construct
  source 1..19: mol_type = other RNA
gtggcatccagtgcgctca

SEQ ID NO: 9831 - RNA, 19 nt, synthetic construct
  source 1..19: mol_type = other RNA
caagtctgaacaacttgga

SEQ ID NO: 9832 - RNA, 19 nt, synthetic construct
  source 1..19: mol_type = other RNA
agcaggtggggaagttcaa

SEQ ID NO: 9833 - RNA, 19 nt, synthetic construct
  source 1..19: mol_type = other RNA
agctaccagctttacagcc

SEQ ID NO: 9834 - RNA, 19 nt, synthetic construct
  source 1..19: mol_type = other RNA
agcaggtggggaagttcaa

SEQ ID NO: 9835 - RNA, 19 nt, synthetic construct
  source 1..19: mol_type = other RNA
agcaggtggggaagttcaa

SEQ ID NO: 9836 - RNA, 19 nt, synthetic construct
  source 1..19: mol_type = other RNA
agctaccagctttacagcc

SEQ ID NO: 9837 - RNA, 19 nt, synthetic construct
  source 1..19: mol_type = other RNA
agcaggtggggaagttcaa

SEQ ID NO: 9838 - RNA, 19 nt, synthetic construct
  source 1..19: mol_type = other RNA
agctaccagctttacagcc

SEQ ID NO: 9839 - RNA, 19 nt, synthetic construct
  source 1..19: mol_type = other RNA
tgggaacctgcagaagttg

SEQ ID NO: 9840 - RNA, 19 nt, synthetic construct
  source 1..19: mol_type = other RNA
ctgtgccgctgccccacct

SEQ ID NO: 9841 - RNA, 19 nt, synthetic construct
  source 1..19: mol_type = other RNA
acgcactctggctgcctgc

SEQ ID NO: 9842 - RNA, 19 nt, synthetic construct
  source 1..19: mol_type = other RNA
cccctcgggcagtgcccct

SEQ ID NO: 9843 - RNA, 19 nt, synthetic construct
  source 1..19: mol_type = other RNA
acgctcagcctggacggcg

SEQ ID NO: 9844 - RNA, 19 nt, synthetic construct
  source 1..19: mol_type = other RNA
tgtgggaacttcaaccaga

SEQ ID NO: 9845 - RNA, 19 nt, synthetic construct
  source 1..19: mol_type = other RNA
gtgggaacttcaaccagaa

SEQ ID NO: 9846 - RNA, 19 nt, synthetic construct
  source 1..19: mol_type = other RNA
gaacagctttgaggacccc

SEQ ID NO: 9847 - RNA, 19 nt, synthetic construct
  source 1..19: mol_type = other RNA
caccaagtacatgcagaac

SEQ ID NO: 9848 - RNA, 19 nt, synthetic construct
  source 1..19: mol_type = other RNA
cacacgctggacgtgggct

SEQ ID NO: 9849 - RNA, 19 nt, synthetic construct
  source 1..19: mol_type = other RNA
agtgcagccaccggctctg

SEQ ID NO: 9850 - RNA, 19 nt, synthetic construct
  source 1..19: mol_type = other RNA
ggccacttcatcacctttg

SEQ ID NO: 9851 - RNA, 19 nt, synthetic construct
  source 1..19: mol_type = other RNA
tgctccaaggccatcaagc

SEQ ID NO: 9852 - RNA, 19 nt, synthetic construct
  source 1..19: mol_type = other RNA
aaccccagtgggcactgcc

SEQ ID NO: 9853 - RNA, 19 nt, synthetic construct
  source 1..19: mol_type = other RNA
tcaatgaggaccagatgaa

SEQ ID NO: 9854 - RNA, 19 nt, synthetic construct
  source 1..19: mol_type = other RNA
tgcgtggcccagtgtggct

SEQ ID NO: 9855 - RNA, 19 nt, synthetic construct
  source 1..19: mol_type = other RNA
gcgctcacagccttgaggc

SEQ ID NO: 9856 - RNA, 19 nt, synthetic construct
  source 1..19: mol_type = other RNA
tttgaaaacctgaggcaga

SEQ ID NO: 9857 - RNA, 19 nt, synthetic construct
  source 1..19: mol_type = other RNA
ttgaaaacctgaggcagag

SEQ ID NO: 9858 - RNA, 19 nt, synthetic construct
  source 1..19: mol_type = other RNA
gccctccctcagtgccagc

SEQ ID NO: 9859 - RNA, 19 nt, synthetic construct
  source 1..19: mol_type = other RNA
agtgccagcacggagcctg

SEQ ID NO: 9860 - RNA, 19 nt, synthetic construct
  source 1..19: mol_type = other RNA
aagtgtgagtggacagagt

SEQ ID NO: 9861 - RNA, 19 nt, synthetic construct
  source 1..19: mol_type = other RNA
tcgtggaatgcagcctgga

SEQ ID NO: 9862 - RNA, 19 nt, synthetic construct
  source 1..19: mol_type = other RNA
aggaccacggccacggcca

SEQ ID NO: 9863 - RNA, 19 nt, synthetic construct
  source 1..19: mol_type = other RNA
tcgtggaatgcagcctgga

SEQ ID NO: 9864 - RNA, 19 nt, synthetic construct
  source 1..19: mol_type = other RNA
tcgtggaatgcagcctgga

SEQ ID NO: 9865 - RNA, 19 nt, synthetic construct
  source 1..19: mol_type = other RNA
aggaccacggccacggcca

SEQ ID NO: 9866 - RNA, 19 nt, synthetic construct
  source 1..19: mol_type = other RNA
tcgtggaatgcagcctgga

SEQ ID NO: 9867 - RNA, 19 nt, synthetic construct
  source 1..19: mol_type = other RNA
tgcggcacctgcaccaaca

SEQ ID NO: 9868 - RNA, 19 nt, synthetic construct
  source 1..19: mol_type = other RNA
agaggcccaggccatgcag

SEQ ID NO: 9869 - RNA, 19 nt, synthetic construct
  source 1..19: mol_type = other RNA
tgtccctgcgcccatggct

SEQ ID NO: 9870 - RNA, 19 nt, synthetic construct
  source 1..19: mol_type = other RNA
accaagtactacgaggcct

SEQ ID NO: 9871 - RNA, 19 nt, synthetic construct
  source 1..19: mol_type = other RNA
cgcccaggacctgtgccgc

SEQ ID NO: 9872 - RNA, 19 nt, synthetic construct
  source 1..19: mol_type = other RNA
aggacctgccgtgccctgg

SEQ ID NO: 9873 - RNA, 19 nt, synthetic construct
  source 1..19: mol_type = other RNA
cagccttcgccaacacctg

SEQ ID NO: 9874 - RNA, 19 nt, synthetic construct
  source 1..19: mol_type = other RNA
ggaacagctttgaggaccc

SEQ ID NO: 9875 - RNA, 19 nt, synthetic construct
  source 1..19: mol_type = other RNA
caccaagtactacgaggcc

SEQ ID NO: 9876 - RNA, 19 nt, synthetic construct
  source 1..19: mol_type = other RNA
aggtctgccgctggtccag

SEQ ID NO: 9877 - RNA, 19 nt, synthetic construct
  source 1..19: mol_type = other RNA
gcctggtgtgcaggaactg

SEQ ID NO: 9878 - RNA, 19 nt, synthetic construct
  source 1..19: mol_type = other RNA
aggtgtttgtcaggctgga

SEQ ID NO: 9879 - RNA, 19 nt, synthetic construct
  source 1..19: mol_type = other RNA
gcagaactgccccaagtcc

SEQ ID NO: 9880 - RNA, 19 nt, synthetic construct
  source 1..19: mol_type = other RNA
cagaactgccccaagtccc

SEQ ID NO: 9881 - RNA, 19 nt, synthetic construct
  source 1..19: mol_type = other RNA
caagctcttcgtggagagc

SEQ ID NO: 9882 - RNA, 19 nt, synthetic construct
  source 1..19: mol_type = other RNA
gtctgaacaacttggaggg

SEQ ID NO: 9883 - RNA, 19 nt, synthetic construct
  source 1..19: mol_type = other RNA
cacctgcaccaacaaccag

SEQ ID NO: 9884 - RNA, 19 nt, synthetic construct
  source 1..19: mol_type = other RNA
cccgctccagtttgggaac

SEQ ID NO: 9885 - RNA, 19 nt, synthetic construct
  source 1..19: mol_type = other RNA
agtgcccggacccgctgcc

SEQ ID NO: 9886 - RNA, 19 nt, synthetic construct
  source 1..19: mol_type = other RNA
tggggccggcctttgcgga

SEQ ID NO: 9887 - RNA, 19 nt, synthetic construct
  source 1..19: mol_type = other RNA
ccccccaggcacggtgctg

SEQ ID NO: 9888 - RNA, 19 nt, synthetic construct
  source 1..19: mol_type = other RNA
gtgccaggacctgccgtgc

SEQ ID NO: 9889 - RNA, 19 nt, synthetic construct
  source 1..19: mol_type = other RNA
tcggcagccaacatcaccc

SEQ ID NO: 9890 - RNA, 19 nt, synthetic construct
  source 1..19: mol_type = other RNA
catgcaggtgtttgtcagg

SEQ ID NO: 9891 - RNA, 19 nt, synthetic construct
  source 1..19: mol_type = other RNA
caggctggaccccgcccac

SEQ ID NO: 9892 - RNA, 19 nt, synthetic construct
  source 1..19: mol_type = other RNA
ttgaggacccctgctccct

SEQ ID NO: 9893 - RNA, 19 nt, synthetic construct
  source 1..19: mol_type = other RNA
tggagaatgagaactacgc

SEQ ID NO: 9894 - RNA, 19 nt, synthetic construct
  source 1..19: mol_type = other RNA
aagtacatgcagaactgcc

SEQ ID NO: 9895 - RNA, 19 nt, synthetic construct
  source 1..19: mol_type = other RNA
agtacatgcagaactgccc

SEQ ID NO: 9896 - RNA, 19 nt, synthetic construct
  source 1..19: mol_type = other RNA
gtgtctgtcccccggggct

SEQ ID NO: 9897 - RNA, 19 nt, synthetic construct
  source 1..19: mol_type = other RNA
ccacttcatcacctttgat

SEQ ID NO: 9898 - RNA, 19 nt, synthetic construct
  source 1..19: mol_type = other RNA
accgagaacatcccctgtg

SEQ ID NO: 9899 - RNA, 19 nt, synthetic construct
  source 1..19: mol_type = other RNA
tcaagctcttcgtggagag

SEQ ID NO: 9900 - RNA, 19 nt, synthetic construct
  source 1..19: mol_type = other RNA
tcgtggagagctacgagct

SEQ ID NO: 9901 - RNA, 19 nt, synthetic construct
  source 1..19: mol_type = other RNA
actgcaccaggactacaag

SEQ ID NO: 9902 - RNA, 19 nt, synthetic construct
  source 1..19: mol_type = other RNA
ccatcaatgactttgccac

SEQ ID NO: 9903 - RNA, 19 nt, synthetic construct
  source 1..19: mol_type = other RNA
gccttgaggcctgcacctg

SEQ ID NO: 9904 - RNA, 19 nt, synthetic construct
  source 1..19: mol_type = other RNA
ggcctgcacctgcacctat

SEQ ID NO: 9905 - RNA, 19 nt, synthetic construct
  source 1..19: mol_type = other RNA
ctgcacctgcacctatgag

SEQ ID NO: 9906 - RNA, 19 nt, synthetic construct
  source 1..19: mol_type = other RNA
ccagcaccacagcagtccc

SEQ ID NO: 9907 - RNA, 19 nt, synthetic construct
  source 1..19: mol_type = other RNA
caggctccacagaacccac

SEQ ID NO: 9908 - RNA, 19 nt, synthetic construct
  source 1..19: mol_type = other RNA
agtgtgagtggacagagtg

SEQ ID NO: 9909 - RNA, 19 nt, synthetic construct
  source 1..19: mol_type = other RNA
ccaccacacccacagctac

SEQ ID NO: 9910 - RNA, 19 nt, synthetic construct
  source 1..19: mol_type = other RNA
caccacacccacagctacc

SEQ ID NO: 9911 - RNA, 19 nt, synthetic construct
  source 1..19: mol_type = other RNA
gccccagtgtgcctggtca

SEQ ID NO: 9912 - RNA, 19 nt, synthetic construct
  source 1..19: mol_type = other RNA
gcaggtggggaagttcaag

SEQ ID NO: 9913 - RNA, 19 nt, synthetic construct
  source 1..19: mol_type = other RNA
ccaccacacccacagctac

SEQ ID NO: 9914 - RNA, 19 nt, synthetic construct
  source 1..19: mol_type = other RNA
caccacacccacagctacc

SEQ ID NO: 9915 - RNA, 19 nt, synthetic construct
  source 1..19: mol_type = other RNA
gccccagtgtgcctggtca

SEQ ID NO: 9916 - RNA, 19 nt, synthetic construct
  source 1..19: mol_type = other RNA
gcaggtggggaagttcaag

SEQ ID NO: 9917 - RNA, 19 nt, synthetic construct
  source 1..19: mol_type = other RNA
ccaccacacccacagctac

SEQ ID NO: 9918 - RNA, 19 nt, synthetic construct
  source 1..19: mol_type = other RNA
caccacacccacagctacc

SEQ ID NO: 9919 - RNA, 19 nt, synthetic construct
  source 1..19: mol_type = other RNA
gccccagtgtgcctggtca

SEQ ID NO: 9920 - RNA, 19 nt, synthetic construct
  source 1..19: mol_type = other RNA
gcaggtggggaagttcaag

SEQ ID NO: 9921 - RNA, 19 nt, synthetic construct
  source 1..19: mol_type = other RNA
ccaccacacccacagctac

SEQ ID NO: 9922 - RNA, 19 nt, synthetic construct
  source 1..19: mol_type = other RNA
caccacacccacagctacc

SEQ ID NO: 9923 - RNA, 19 nt, synthetic construct
  source 1..19: mol_type = other RNA
gccccagtgtgcctggtca

SEQ ID NO: 9924 - RNA, 19 nt, synthetic construct
  source 1..19: mol_type = other RNA
gcaggtggggaagttcaag

SEQ ID NO: 9925 - RNA, 19 nt, synthetic construct
  source 1..19: mol_type = other RNA
ccaccacacccacagctac

SEQ ID NO: 9926 - RNA, 19 nt, synthetic construct
  source 1..19: mol_type = other RNA
caccacacccacagctacc

SEQ ID NO: 9927 - RNA, 19 nt, synthetic construct
  source 1..19: mol_type = other RNA
gcaggtgaatgagacctgg

SEQ ID NO: 9928 - RNA, 19 nt, synthetic construct
  source 1..19: mol_type = other RNA
acctggaccctggagaact

SEQ ID NO: 9929 - RNA, 19 nt, synthetic construct
  source 1..19: mol_type = other RNA
acctgcgtgaacaagcacc

SEQ ID NO: 9930 - RNA, 19 nt, synthetic construct
  source 1..19: mol_type = other RNA
ctatgtcctcatgagagag

SEQ ID NO: 9931 - RNA, 19 nt, synthetic construct
  source 1..19: mol_type = other RNA
gatcctgtttgaccaaatt

SEQ ID NO: 9932 - RNA, 19 nt, synthetic construct
  source 1..19: mol_type = other RNA
cccggctgccctacagcct

SEQ ID NO: 9933 - RNA, 19 nt, synthetic construct
  source 1..19: mol_type = other RNA
ccggctgccctacagcctc

SEQ ID NO: 9934 - RNA, 19 nt, synthetic construct
  source 1..19: mol_type = other RNA
ggtgccctgccagagcctg

SEQ ID NO: 9935 - RNA, 19 nt, synthetic construct
  source 1..19: mol_type = other RNA
actgccagtcctgcgtgtg

SEQ ID NO: 9936 - RNA, 19 nt, synthetic construct
  source 1..19: mol_type = other RNA
ccatgcagcaccagtgcac

SEQ ID NO: 9937 - RNA, 19 nt, synthetic construct
  source 1..19: mol_type = other RNA
tgctgaccccacagcctgc

SEQ ID NO: 9938 - RNA, 19 nt, synthetic construct
  source 1..19: mol_type = other RNA
aatgagacctggaccctgg

SEQ ID NO: 9939 - RNA, 19 nt, synthetic construct
  source 1..19: mol_type = other RNA
gcgctgtcctcctatgtgc

SEQ ID NO: 9940 - RNA, 19 nt, synthetic construct
  source 1..19: mol_type = other RNA
actgcgagtgtttctgcac

SEQ ID NO: 9941 - RNA, 19 nt, synthetic construct
  source 1..19: mol_type = other RNA
tctgcggcctgtgcgggaa

SEQ ID NO: 9942 - RNA, 19 nt, synthetic construct
  source 1..19: mol_type = other RNA
gcaccctgcctaaaaacct

SEQ ID NO: 9943 - RNA, 19 nt, synthetic construct
  source 1..19: mol_type = other RNA
ggctgtgtctgtcccccgg

SEQ ID NO: 9944 - RNA, 19 nt, synthetic construct
  source 1..19: mol_type = other RNA
ctgcgagtgtttctgcacg

SEQ ID NO: 9945 - RNA, 19 nt, synthetic construct
  source 1..19: mol_type = other RNA
gagtgtttctgcacggctg

SEQ ID NO: 9946 - RNA, 19 nt, synthetic construct
  source 1..19: mol_type = other RNA
cgcgggcctgtgtgtgtcc

SEQ ID NO: 9947 - RNA, 19 nt, synthetic construct
  source 1..19: mol_type = other RNA
tgtcaggctggaccccgcc

SEQ ID NO: 9948 - RNA, 19 nt, synthetic construct
  source 1..19: mol_type = other RNA
ccagatgtgcggcctgtgt

SEQ ID NO: 9949 - RNA, 19 nt, synthetic construct
  source 1..19: mol_type = other RNA
agtgtttctgcacggctgt

SEQ ID NO: 9950 - RNA, 19 nt, synthetic construct
  source 1..19: mol_type = other RNA
cggctgtggctgcctacgc

SEQ ID NO: 9951 - RNA, 19 nt, synthetic construct
  source 1..19: mol_type = other RNA
aacctgaggcagagagggt

SEQ ID NO: 9952 - RNA, 19 nt, synthetic construct
  source 1..19: mol_type = other RNA
ttccacctttgacggcacc

SEQ ID NO: 9953 - RNA, 19 nt, synthetic construct
  source 1..19: mol_type = other RNA
gaggcagagagggtaccag

SEQ ID NO: 9954 - RNA, 19 nt, synthetic construct
  source 1..19: mol_type = other RNA
ttctgtgtccctgcgccca

SEQ ID NO: 9955 - RNA, 19 nt, synthetic construct
  source 1..19: mol_type = other RNA
ggatggccacttcatcacc

SEQ ID NO: 9956 - RNA, 19 nt, synthetic construct
  source 1..19: mol_type = other RNA
ccacccgtcactgtcttcc

SEQ ID NO: 9957 - RNA, 19 nt, synthetic construct
  source 1..19: mol_type = other RNA
gccatgcagcaccagtgca

SEQ ID NO: 9958 - RNA, 19 nt, synthetic construct
  source 1..19: mol_type = other RNA
tttgaggacccctgctccc

SEQ ID NO: 9959 - RNA, 19 nt, synthetic construct
  source 1..19: mol_type = other RNA
tgtttcagcacacactgcg

SEQ ID NO: 9960 - RNA, 19 nt, synthetic construct
  source 1..19: mol_type = other RNA
cacagcaaccgaaaagacc

SEQ ID NO: 9961 - RNA, 19 nt, synthetic construct
  source 1..19: mol_type = other RNA
cagtgcccctgcacccacg

SEQ ID NO: 9962 - RNA, 19 nt, synthetic construct
  source 1..19: mol_type = other RNA
cggggcaccctgcctaaaa

SEQ ID NO: 9963 - RNA, 19 nt, synthetic construct
  source 1..19: mol_type = other RNA
tttgacgtggacttcccaa

SEQ ID NO: 9964 - RNA, 19 nt, synthetic construct
  source 1..19: mol_type = other RNA
tcaatgactttgccacgcg

SEQ ID NO: 9965 - RNA, 19 nt, synthetic construct
  source 1..19: mol_type = other RNA
ccccaggcacggtgctgga

SEQ ID NO: 9966 - RNA, 19 nt, synthetic construct
  source 1..19: mol_type = other RNA
gacacccaggacccaacgg

SEQ ID NO: 9967 - RNA, 19 nt, synthetic construct
  source 1..19: mol_type = other RNA
ctgtgaggaggactcctgt

SEQ ID NO: 9968 - RNA, 19 nt, synthetic construct
  source 1..19: mol_type = other RNA
ctgaggcagagagggtacc

SEQ ID NO: 9969 - RNA, 19 nt, synthetic construct
  source 1..19: mol_type = other RNA
gcagcgggaggagctgcct

SEQ ID NO: 9970 - RNA, 19 nt, synthetic construct
  source 1..19: mol_type = other RNA
gcttctgccccccaggcac

SEQ ID NO: 9971 - RNA, 19 nt, synthetic construct
  source 1..19: mol_type = other RNA
cttctgccccccaggcacg

SEQ ID NO: 9972 - RNA, 19 nt, synthetic construct
  source 1..19: mol_type = other RNA
gacggcggggacacggcca

SEQ ID NO: 9973 - RNA, 19 nt, synthetic construct
  source 1..19: mol_type = other RNA
gcaccacccacatcacaga

SEQ ID NO: 9974 - RNA, 19 nt, synthetic construct
  source 1..19: mol_type = other RNA
gcaccacccacatcacaga

SEQ ID NO: 9975 - RNA, 19 nt, synthetic construct
  source 1..19: mol_type = other RNA
gcaccacccacatcacaga

SEQ ID NO: 9976 - RNA, 19 nt, synthetic construct
  source 1..19: mol_type = other RNA
gcaccacccacatcacaga

SEQ ID NO: 9977 - RNA, 19 nt, synthetic construct
  source 1..19: mol_type = other RNA
ggggatggccacttcatca

SEQ ID NO: 9978 - RNA, 19 nt, synthetic construct
  source 1..19: mol_type = other RNA
gaacaacttggaggggacg

SEQ ID NO: 9979 - RNA, 19 nt, synthetic construct
  source 1..19: mol_type = other RNA
ccaaatacgccaaccagac

SEQ ID NO: 9980 - RNA, 19 nt, synthetic construct
  source 1..19: mol_type = other RNA
aaccagaaccaggctgacg

SEQ ID NO: 9981 - RNA, 19 nt, synthetic construct
  source 1..19: mol_type = other RNA
aggtgggagtgcagccacc

SEQ ID NO: 9982 - RNA, 19 nt, synthetic construct
  source 1..19: mol_type = other RNA
gggctccaggcctgtggtc

SEQ ID NO: 9983 - RNA, 19 nt, synthetic construct
  source 1..19: mol_type = other RNA
tccaggcctgtggtcaccc

SEQ ID NO: 9984 - RNA, 19 nt, synthetic construct
  source 1..19: mol_type = other RNA
tgcccggacccgctgccct

SEQ ID NO: 9985 - RNA, 19 nt, synthetic construct
  source 1..19: mol_type = other RNA
accctgctggggccggcct

SEQ ID NO: 9986 - RNA, 19 nt, synthetic construct
  source 1..19: mol_type = other RNA
gggccggcctttgcggagt

SEQ ID NO: 9987 - RNA, 19 nt, synthetic construct
  source 1..19: mol_type = other RNA
tcgggcagtgcccctgcac

SEQ ID NO: 9988 - RNA, 19 nt, synthetic construct
  source 1..19: mol_type = other RNA
tgcagccaccggctctgcc

SEQ ID NO: 9989 - RNA, 19 nt, synthetic construct
  source 1..19: mol_type = other RNA
tgtgtgtccgcgaggtctg

SEQ ID NO: 9990 - RNA, 19 nt, synthetic construct
  source 1..19: mol_type = other RNA
gacagagtggtttgatgag

SEQ ID NO: 9991 - RNA, 19 nt, synthetic construct
  source 1..19: mol_type = other RNA
cggggccctctggcgggga

SEQ ID NO: 9992 - RNA, 19 nt, synthetic construct
  source 1..19: mol_type = other RNA
cacccacagctaccagctt

SEQ ID NO: 9993 - RNA, 19 nt, synthetic construct
  source 1..19: mol_type = other RNA
cggggccctctggcgggga

SEQ ID NO: 9994 - RNA, 19 nt, synthetic construct
  source 1..19: mol_type = other RNA
cggggccctctggcgggga

SEQ ID NO: 9995 - RNA, 19 nt, synthetic construct
  source 1..19: mol_type = other RNA
cacccacagctaccagctt

SEQ ID NO: 9996 - RNA, 19 nt, synthetic construct
  source 1..19: mol_type = other RNA
cggggccctctggcgggga

SEQ ID NO: 9997 - RNA, 19 nt, synthetic construct
  source 1..19: mol_type = other RNA
cacccacagctaccagctt

SEQ ID NO: 9998 - RNA, 19 nt, synthetic construct
  source 1..19: mol_type = other RNA
cgggcagtgctgtggggag

SEQ ID NO: 9999 - RNA, 19 nt, synthetic construct
  source 1..19: mol_type = other RNA
agagtgccaggccgagagc

SEQ ID NO: 10000 - RNA, 19 nt, synthetic construct
  source 1..19: mol_type = other RNA
tccgtgtgttctgctgcaa

SEQ ID NO: 10001 - RNA, 19 nt, synthetic construct
  source 1..19: mol_type = other RNA
tccgtgtgttctgctgcaa

SEQ ID NO: 10002 - RNA, 19 nt, synthetic construct
  source 1..19: mol_type = other RNA
tccgtgtgttctgctgcaa

SEQ ID NO: 10003 - RNA, 19 nt, synthetic construct
  source 1..19: mol_type = other RNA
tccgtgtgttctgctgcaa

SEQ ID NO: 10004 - RNA, 19 nt, synthetic construct
  source 1..19: mol_type = other RNA
atccgactgcaccaggact

SEQ ID NO: 10005 - RNA, 19 nt, synthetic construct
  source 1..19: mol_type = other RNA
ggggccctctggcggggac

SEQ ID NO: 10006 - RNA, 19 nt, synthetic construct
  source 1..19: mol_type = other RNA
ggggccctctggcggggac

SEQ ID NO: 10007 - RNA, 19 nt, synthetic construct
  source 1..19: mol_type = other RNA
ggggccctctggcggggac

SEQ ID NO: 10008 - RNA, 19 nt, synthetic construct
  source 1..19: mol_type = other RNA
ggggccctctggcggggac

SEQ ID NO: 10009 - RNA, 19 nt, synthetic construct
  source 1..19: mol_type = other RNA
caggccatgcagcaccagt

SEQ ID NO: 10010 - RNA, 19 nt, synthetic construct
  source 1..19: mol_type = other RNA
gcatccagtgcgctcacag

SEQ ID NO: 10011 - RNA, 19 nt, synthetic construct
  source 1..19: mol_type = other RNA
tgggcacctgcgtggccta

SEQ ID NO: 10012 - RNA, 19 nt, synthetic construct
  source 1..19: mol_type = other RNA
cctgcctctctggggacac

SEQ ID NO: 10013 - RNA, 19 nt, synthetic construct
  source 1..19: mol_type = other RNA
tggatgagtgtggctgcac

SEQ ID NO: 10014 - RNA, 19 nt, synthetic construct
  source 1..19: mol_type = other RNA
aacggagaggacagtgccc

SEQ ID NO: 10015 - RNA, 19 nt, synthetic construct
  source 1..19: mol_type = other RNA
aggaaggctgtggcatgtc

SEQ ID NO: 10016 - RNA, 19 nt, synthetic construct
  source 1..19: mol_type = other RNA
agcctcttccacaacaaca

SEQ ID NO: 10017 - RNA, 19 nt, synthetic construct
  source 1..19: mol_type = other RNA
aggctgtggcatgtcctgg

SEQ ID NO: 10018 - RNA, 19 nt, synthetic construct
  source 1..19: mol_type = other RNA
gcacccttggtacagccac

SEQ ID NO: 10019 - RNA, 19 nt, synthetic construct
  source 1..19: mol_type = other RNA
ccaaagtgctgaccaccac

SEQ ID NO: 10020 - RNA, 19 nt, synthetic construct
  source 1..19: mol_type = other RNA
aggaacagctttgaggacc

SEQ ID NO: 10021 - RNA, 19 nt, synthetic construct
  source 1..19: mol_type = other RNA
gtgtgcaggaactgggagc

SEQ ID NO: 10022 - RNA, 19 nt, synthetic construct
  source 1..19: mol_type = other RNA
cgtgtgttctgctgcaact

SEQ ID NO: 10023 - RNA, 19 nt, synthetic construct
  source 1..19: mol_type = other RNA
cgtgtgttctgctgcaact

SEQ ID NO: 10024 - RNA, 19 nt, synthetic construct
  source 1..19: mol_type = other RNA
cgtgtgttctgctgcaact

SEQ ID NO: 10025 - RNA, 19 nt, synthetic construct
  source 1..19: mol_type = other RNA
cgtgtgttctgctgcaact

SEQ ID NO: 10026 - RNA, 19 nt, synthetic construct
  source 1..19: mol_type = other RNA
ccaccggcaccacctgctc

SEQ ID NO: 10027 - RNA, 19 nt, synthetic construct
  source 1..19: mol_type = other RNA
acaagcacctgcccatcaa

SEQ ID NO: 10028 - RNA, 19 nt, synthetic construct
  source 1..19: mol_type = other RNA
tcccaggttgactccacca

SEQ ID NO: 10029 - RNA, 19 nt, synthetic construct
  source 1..19: mol_type = other RNA
gccacaccctcctccactc

SEQ ID NO: 10030 - RNA, 19 nt, synthetic construct
  source 1..19: mol_type = other RNA
caatgaggaccagatgaag

SEQ ID NO: 10031 - RNA, 19 nt, synthetic construct
  source 1..19: mol_type = other RNA
ggccgggcagtgctgtggg

SEQ ID NO: 10032 - RNA, 19 nt, synthetic construct
  source 1..19: mol_type = other RNA
ggaacggagaggacagtgc

SEQ ID NO: 10033 - RNA, 19 nt, synthetic construct
  source 1..19: mol_type = other RNA
tcttcaatgaggaccagat

SEQ ID NO: 10034 - RNA, 19 nt, synthetic construct
  source 1..19: mol_type = other RNA
gtgtcagtggacagagtgg

SEQ ID NO: 10035 - RNA, 19 nt, synthetic construct
  source 1..19: mol_type = other RNA
cactgtcccaggggtggcc

SEQ ID NO: 10036 - RNA, 19 nt, synthetic construct
  source 1..19: mol_type = other RNA
tggccaggtgcgtgggtga

SEQ ID NO: 10037 - RNA, 19 nt, synthetic construct
  source 1..19: mol_type = other RNA
tgcttctgccccccaggca

SEQ ID NO: 10038 - RNA, 19 nt, synthetic construct
  source 1..19: mol_type = other RNA
cccaggcacggtgctggat

SEQ ID NO: 10039 - RNA, 19 nt, synthetic construct
  source 1..19: mol_type = other RNA
tgcaccaagtacatgcaga

SEQ ID NO: 10040 - RNA, 19 nt, synthetic construct
  source 1..19: mol_type = other RNA
cagccagcccttcttcaat

SEQ ID NO: 10041 - RNA, 19 nt, synthetic construct
  source 1..19: mol_type = other RNA
agccagcccttcttcaatg

SEQ ID NO: 10042 - RNA, 19 nt, synthetic construct
  source 1..19: mol_type = other RNA
tggcatccagtgcgctcac

SEQ ID NO: 10043 - RNA, 19 nt, synthetic construct
  source 1..19: mol_type = other RNA
ggtcccccactccacgaca

SEQ ID NO: 10044 - RNA, 19 nt, synthetic construct
  source 1..19: mol_type = other RNA
gaacccactgtcccagggg

SEQ ID NO: 10045 - RNA, 19 nt, synthetic construct
  source 1..19: mol_type = other RNA
ctgtcccaggggtggccac

SEQ ID NO: 10046 - RNA, 19 nt, synthetic construct
  source 1..19: mol_type = other RNA
tgagtggacagagtggttt

SEQ ID NO: 10047 - RNA, 19 nt, synthetic construct
  source 1..19: mol_type = other RNA
accacacccacagctacca

SEQ ID NO: 10048 - RNA, 19 nt, synthetic construct
  source 1..19: mol_type = other RNA
gggcaccacccacatcaca

SEQ ID NO: 10049 - RNA, 19 nt, synthetic construct
  source 1..19: mol_type = other RNA
gaagttcaagatgtgcttc

SEQ ID NO: 10050 - RNA, 19 nt, synthetic construct
  source 1..19: mol_type = other RNA
accacacccacagctacca

SEQ ID NO: 10051 - RNA, 19 nt, synthetic construct
  source 1..19: mol_type = other RNA
ccacccacacccccacagt

SEQ ID NO: 10052 - RNA, 19 nt, synthetic construct
  source 1..19: mol_type = other RNA
gggcaccacccacatcaca

SEQ ID NO: 10053 - RNA, 19 nt, synthetic construct
  source 1..19: mol_type = other RNA
gaagttcaagatgtgcttc

SEQ ID NO: 10054 - RNA, 19 nt, synthetic construct
  source 1..19: mol_type = other RNA
tgctgacaagcacagccac

SEQ ID NO: 10055 - RNA, 19 nt, synthetic construct
  source 1..19: mol_type = other RNA
accacacccacagctacca

SEQ ID NO: 10056 - RNA, 19 nt, synthetic construct
  source 1..19: mol_type = other RNA
gggcaccacccacatcaca

SEQ ID NO: 10057 - RNA, 19 nt, synthetic construct
  source 1..19: mol_type = other RNA
gaagttcaagatgtgcttc

SEQ ID NO: 10058 - RNA, 19 nt, synthetic construct
  source 1..19: mol_type = other RNA
accacacccacagctacca

SEQ ID NO: 10059 - RNA, 19 nt, synthetic construct
  source 1..19: mol_type = other RNA
ccacccacacccccacagt

SEQ ID NO: 10060 - RNA, 19 nt, synthetic construct
  source 1..19: mol_type = other RNA
gggcaccacccacatcaca

SEQ ID NO: 10061 - RNA, 19 nt, synthetic construct
  source 1..19: mol_type = other RNA
gaagttcaagatgtgcttc

SEQ ID NO: 10062 - RNA, 19 nt, synthetic construct
  source 1..19: mol_type = other RNA
tgctgacaagcacagccac

SEQ ID NO: 10063 - RNA, 19 nt, synthetic construct
  source 1..19: mol_type = other RNA
accacacccacagctacca

SEQ ID NO: 10064 - RNA, 19 nt, synthetic construct
  source 1..19: mol_type = other RNA
ccctggctgtgacaatgcc

SEQ ID NO: 10065 - RNA, 19 nt, synthetic construct
  source 1..19: mol_type = other RNA
ctggctgtgacaatgccat

SEQ ID NO: 10066 - RNA, 19 nt, synthetic construct
  source 1..19: mol_type = other RNA
tggctgtgacaatgccatc

SEQ ID NO: 10067 - RNA, 19 nt, synthetic construct
  source 1..19: mol_type = other RNA
gctgtgacaatgccatccc

SEQ ID NO: 10068 - RNA, 19 nt, synthetic construct
  source 1..19: mol_type = other RNA
ctttgacggcacctcttac

SEQ ID NO: 10069 - RNA, 19 nt, synthetic construct
  source 1..19: mol_type = other RNA
atctgatgctgagccaggt

SEQ ID NO: 10070 - RNA, 19 nt, synthetic construct
  source 1..19: mol_type = other RNA
tctgatgctgagccaggtc

SEQ ID NO: 10071 - RNA, 19 nt, synthetic construct
  source 1..19: mol_type = other RNA
gatgctgagccaggtcttt

SEQ ID NO: 10072 - RNA, 19 nt, synthetic construct
  source 1..19: mol_type = other RNA
tggggacacccaggaccca

SEQ ID NO: 10073 - RNA, 19 nt, synthetic construct
  source 1..19: mol_type = other RNA
gcagggggagcctcaggaa

SEQ ID NO: 10074 - RNA, 19 nt, synthetic construct
  source 1..19: mol_type = other RNA
tgccgctcccaggttgact

SEQ ID NO: 10075 - RNA, 19 nt, synthetic construct
  source 1..19: mol_type = other RNA
aggtaccaccacctgccag

SEQ ID NO: 10076 - RNA, 19 nt, synthetic construct
  source 1..19: mol_type = other RNA
tgtcctcctcagtcctcac

SEQ ID NO: 10077 - RNA, 19 nt, synthetic construct
  source 1..19: mol_type = other RNA
catcaaccccaagcccttc

SEQ ID NO: 10078 - RNA, 19 nt, synthetic construct
  source 1..19: mol_type = other RNA
acacccccacagtgctgac

SEQ ID NO: 10079 - RNA, 19 nt, synthetic construct
  source 1..19: mol_type = other RNA
acacccccacagtgctgac

SEQ ID NO: 10080 - RNA, 19 nt, synthetic construct
  source 1..19: mol_type = other RNA
tcaaccccaagcccttcca

SEQ ID NO: 10081 - RNA, 19 nt, synthetic construct
  source 1..19: mol_type = other RNA
tgtgtgtcctggcggactc

SEQ ID NO: 10082 - RNA, 19 nt, synthetic construct
  source 1..19: mol_type = other RNA
ttgggaacctgcagaagtt

SEQ ID NO: 10083 - RNA, 19 nt, synthetic construct
  source 1..19: mol_type = other RNA
cagggccagatgtgcggcc

SEQ ID NO: 10084 - RNA, 19 nt, synthetic construct
  source 1..19: mol_type = other RNA
tgcccctggctgtgacaat

SEQ ID NO: 10085 - RNA, 19 nt, synthetic construct
  source 1..19: mol_type = other RNA
ggacctgtgccgctgcccc

SEQ ID NO: 10086 - RNA, 19 nt, synthetic construct
  source 1..19: mol_type = other RNA
gcctgagccccctgaaccc

SEQ ID NO: 10087 - RNA, 19 nt, synthetic construct
  source 1..19: mol_type = other RNA
tgccgtgccctggcacctg

SEQ ID NO: 10088 - RNA, 19 nt, synthetic construct
  source 1..19: mol_type = other RNA
tcatcaaccccaagccctt

SEQ ID NO: 10089 - RNA, 19 nt, synthetic construct
  source 1..19: mol_type = other RNA
ctgtcccccggggctggtg

SEQ ID NO: 10090 - RNA, 19 nt, synthetic construct
  source 1..19: mol_type = other RNA
tttctgcacggctgtggct

SEQ ID NO: 10091 - RNA, 19 nt, synthetic construct
  source 1..19: mol_type = other RNA
tctgcacggctgtggctgc

SEQ ID NO: 10092 - RNA, 19 nt, synthetic construct
  source 1..19: mol_type = other RNA
aggaccagatgaagtgcgt

SEQ ID NO: 10093 - RNA, 19 nt, synthetic construct
  source 1..19: mol_type = other RNA
ctgtggcatgtcctggaac

SEQ ID NO: 10094 - RNA, 19 nt, synthetic construct
  source 1..19: mol_type = other RNA
cagcggtttcagcaagaac

SEQ ID NO: 10095 - RNA, 19 nt, synthetic construct
  source 1..19: mol_type = other RNA
cctggtgtgcaggaactgg

SEQ ID NO: 10096 - RNA, 19 nt, synthetic construct
  source 1..19: mol_type = other RNA
tacctgcctctctggggac

SEQ ID NO: 10097 - RNA, 19 nt, synthetic construct
  source 1..19: mol_type = other RNA
ggctgccctacagcctctt

SEQ ID NO: 10098 - RNA, 19 nt, synthetic construct
  source 1..19: mol_type = other RNA
ctggtgtgcaggaactggg

SEQ ID NO: 10099 - RNA, 19 nt, synthetic construct
  source 1..19: mol_type = other RNA
tcctcctcagtcctcacca

SEQ ID NO: 10100 - RNA, 19 nt, synthetic construct
  source 1..19: mol_type = other RNA
caccagtgcacctgctgcc

SEQ ID NO: 10101 - RNA, 19 nt, synthetic construct
  source 1..19: mol_type = other RNA
caaggcccaggggctggtg

SEQ ID NO: 10102 - RNA, 19 nt, synthetic construct
  source 1..19: mol_type = other RNA
gcaggtgtttgtcaggctg

SEQ ID NO: 10103 - RNA, 19 nt, synthetic construct
  source 1..19: mol_type = other RNA
ctgcctgggcacctgcgtg

SEQ ID NO: 10104 - RNA, 19 nt, synthetic construct
  source 1..19: mol_type = other RNA
gctccaaggccatcaagct

SEQ ID NO: 10105 - RNA, 19 nt, synthetic construct
  source 1..19: mol_type = other RNA
ctgcacggctgtggctgcc

SEQ ID NO: 10106 - RNA, 19 nt, synthetic construct
  source 1..19: mol_type = other RNA
caccacctgccagccccgg

SEQ ID NO: 10107 - RNA, 19 nt, synthetic construct
  source 1..19: mol_type = other RNA
ctgcaggctccacagaacc

SEQ ID NO: 10108 - RNA, 19 nt, synthetic construct
  source 1..19: mol_type = other RNA
tgtacctgcctctctgggg

SEQ ID NO: 10109 - RNA, 19 nt, synthetic construct
  source 1..19: mol_type = other RNA
gctgctactcctgtgagga

SEQ ID NO: 10110 - RNA, 19 nt, synthetic construct
  source 1..19: mol_type = other RNA
gtccacgaggagacggtgc

SEQ ID NO: 10111 - RNA, 19 nt, synthetic construct
  source 1..19: mol_type = other RNA
agccccagtgtgcctggtc

SEQ ID NO: 10112 - RNA, 19 nt, synthetic construct
  source 1..19: mol_type = other RNA
ggtggggaagttcaagatg

SEQ ID NO: 10113 - RNA, 19 nt, synthetic construct
  source 1..19: mol_type = other RNA
agccccagtgtgcctggtc

SEQ ID NO: 10114 - RNA, 19 nt, synthetic construct
  source 1..19: mol_type = other RNA
ggtggggaagttcaagatg

SEQ ID NO: 10115 - RNA, 19 nt, synthetic construct
  source 1..19: mol_type = other RNA
agccccagtgtgcctggtc

SEQ ID NO: 10116 - RNA, 19 nt, synthetic construct
  source 1..19: mol_type = other RNA
ggtggggaagttcaagatg

SEQ ID NO: 10117 - RNA, 19 nt, synthetic construct
  source 1..19: mol_type = other RNA
agccccagtgtgcctggtc

SEQ ID NO: 10118 - RNA, 19 nt, synthetic construct
  source 1..19: mol_type = other RNA
ggtggggaagttcaagatg

SEQ ID NO: 10119 - RNA, 19 nt, synthetic construct
  source 1..19: mol_type = other RNA
cgggcaccttcctcaatga

SEQ ID NO: 10120 - RNA, 19 nt, synthetic construct
  source 1..19: mol_type = other RNA
tgttcctcaactccatcta

SEQ ID NO: 10121 - RNA, 19 nt, synthetic construct
  source 1..19: mol_type = other RNA
caaccagacctgtggcctg

SEQ ID NO: 10122 - RNA, 19 nt, synthetic construct
  source 1..19: mol_type = other RNA
tgaggcagagagggtacca

SEQ ID NO: 10123 - RNA, 19 nt, synthetic construct
  source 1..19: mol_type = other RNA
gtcccaggggtggccacat

SEQ ID NO: 10124 - RNA, 19 nt, synthetic construct
  source 1..19: mol_type = other RNA
catcaccctgttcacaccc

SEQ ID NO: 10125 - RNA, 19 nt, synthetic construct
  source 1..19: mol_type = other RNA
acatcaccctgttcacacc

SEQ ID NO: 10126 - RNA, 19 nt, synthetic construct
  source 1..19: mol_type = other RNA
cccaagcccttccactcga

SEQ ID NO: 10127 - RNA, 19 nt, synthetic construct
  source 1..19: mol_type = other RNA
ccaagcccttccactcgaa

SEQ ID NO: 10128 - RNA, 19 nt, synthetic construct
  source 1..19: mol_type = other RNA
tcaggaaggctgtggcatg

SEQ ID NO: 10129 - RNA, 19 nt, synthetic construct
  source 1..19: mol_type = other RNA
ccacctgccagccccggtg

SEQ ID NO: 10130 - RNA, 19 nt, synthetic construct
  source 1..19: mol_type = other RNA
ctgccagagctgtaactgc

SEQ ID NO: 10131 - RNA, 19 nt, synthetic construct
  source 1..19: mol_type = other RNA
cagcctcttccacaacaac

SEQ ID NO: 10132 - RNA, 19 nt, synthetic construct
  source 1..19: mol_type = other RNA
cgctcacagccttgaggcc

SEQ ID NO: 10133 - RNA, 19 nt, synthetic construct
  source 1..19: mol_type = other RNA
cacacccacagctaccagc

SEQ ID NO: 10134 - RNA, 19 nt, synthetic construct
  source 1..19: mol_type = other RNA
cacacccacagctaccagc

SEQ ID NO: 10135 - RNA, 19 nt, synthetic construct
  source 1..19: mol_type = other RNA
cacacccacagctaccagc

SEQ ID NO: 10136 - RNA, 19 nt, synthetic construct
  source 1..19: mol_type = other RNA
cccagtgggcactgcctgg

SEQ ID NO: 10137 - RNA, 19 nt, synthetic construct
  source 1..19: mol_type = other RNA
acctgtgccgctgccccac

SEQ ID NO: 10138 - RNA, 19 nt, synthetic construct
  source 1..19: mol_type = other RNA
cagtgccagcacggagcct

SEQ ID NO: 10139 - RNA, 19 nt, synthetic construct
  source 1..19: mol_type = other RNA
actgtcttccccagcctga

SEQ ID NO: 10140 - RNA, 19 nt, synthetic construct
  source 1..19: mol_type = other RNA
cctgagccccctgaacccg

SEQ ID NO: 10141 - RNA, 19 nt, synthetic construct
  source 1..19: mol_type = other RNA
gctccaggcctgtggtcac

SEQ ID NO: 10142 - RNA, 19 nt, synthetic construct
  source 1..19: mol_type = other RNA
ctccaggcctgtggtcacc

SEQ ID NO: 10143 - RNA, 19 nt, synthetic construct
  source 1..19: mol_type = other RNA
gccccccaggcacggtgct

SEQ ID NO: 10144 - RNA, 19 nt, synthetic construct
  source 1..19: mol_type = other RNA
ccaggacctgccgtgccct

SEQ ID NO: 10145 - RNA, 19 nt, synthetic construct
  source 1..19: mol_type = other RNA
ggctgtttcagcacacact

SEQ ID NO: 10146 - RNA, 19 nt, synthetic construct
  source 1..19: mol_type = other RNA
agaacatcccctgtgggac

SEQ ID NO: 10147 - RNA, 19 nt, synthetic construct
  source 1..19: mol_type = other RNA
gccgcctgccgctcccagg

SEQ ID NO: 10148 - RNA, 19 nt, synthetic construct
  source 1..19: mol_type = other RNA
gtgggcactgcctggtgga

SEQ ID NO: 10149 - RNA, 19 nt, synthetic construct
  source 1..19: mol_type = other RNA
tgggcactgcctggtggac

SEQ ID NO: 10150 - RNA, 19 nt, synthetic construct
  source 1..19: mol_type = other RNA
ggctgtggcatgtcctgga

SEQ ID NO: 10151 - RNA, 19 nt, synthetic construct
  source 1..19: mol_type = other RNA
tgcaggaactgggagcagg

SEQ ID NO: 10152 - RNA, 19 nt, synthetic construct
  source 1..19: mol_type = other RNA
accacagcagtccccaccc

SEQ ID NO: 10153 - RNA, 19 nt, synthetic construct
  source 1..19: mol_type = other RNA
tgtcccaggggtggccaca

SEQ ID NO: 10154 - RNA, 19 nt, synthetic construct
  source 1..19: mol_type = other RNA
tccctcctctgccctaggg

SEQ ID NO: 10155 - RNA, 19 nt, synthetic construct
  source 1..19: mol_type = other RNA
tccctcctctgccctaggg

SEQ ID NO: 10156 - RNA, 19 nt, synthetic construct
  source 1..19: mol_type = other RNA
tccctcctctgccctaggg

SEQ ID NO: 10157 - RNA, 19 nt, synthetic construct
  source 1..19: mol_type = other RNA
tccctcctctgccctaggg

SEQ ID NO: 10158 - RNA, 19 nt, synthetic construct
  source 1..19: mol_type = other RNA
tccactgtgtcctcctcag

SEQ ID NO: 10159 - RNA, 19 nt, synthetic construct
  source 1..19: mol_type = other RNA
tgtgacttccactatgagt

SEQ ID NO: 10160 - RNA, 19 nt, synthetic construct
  source 1..19: mol_type = other RNA
tctgtgatctgatgctgag

SEQ ID NO: 10161 - RNA, 19 nt, synthetic construct
  source 1..19: mol_type = other RNA
gcacggctgtggctgccta

SEQ ID NO: 10162 - RNA, 19 nt, synthetic construct
  source 1..19: mol_type = other RNA
ctcctgtgaggaggactcc

SEQ ID NO: 10163 - RNA, 19 nt, synthetic construct
  source 1..19: mol_type = other RNA
cacttcatcacctttgatg

SEQ ID NO: 10164 - RNA, 19 nt, synthetic construct
  source 1..19: mol_type = other RNA
tactcctgtgaggaggact

SEQ ID NO: 10165 - RNA, 19 nt, synthetic construct
  source 1..19: mol_type = other RNA
ggcacccctggggccgagt

SEQ ID NO: 10166 - RNA, 19 nt, synthetic construct
  source 1..19: mol_type = other RNA
tcctccactccggggacga

SEQ ID NO: 10167 - RNA, 19 nt, synthetic construct
  source 1..19: mol_type = other RNA
tcctccactccggggacga

SEQ ID NO: 10168 - RNA, 19 nt, synthetic construct
  source 1..19: mol_type = other RNA
tcctccactccggggacga

SEQ ID NO: 10169 - RNA, 19 nt, synthetic construct
  source 1..19: mol_type = other RNA
tcctccactccggggacga

SEQ ID NO: 10170 - RNA, 19 nt, synthetic construct
  source 1..19: mol_type = other RNA
cctgtgggaccaccggcac

SEQ ID NO: 10171 - RNA, 19 nt, synthetic construct
  source 1..19: mol_type = other RNA
ggctggaccccgcccacca

SEQ ID NO: 10172 - RNA, 19 nt, synthetic construct
  source 1..19: mol_type = other RNA
gcgccgcgctgtcctccta

SEQ ID NO: 10173 - RNA, 19 nt, synthetic construct
  source 1..19: mol_type = other RNA
ggtgggagtgcagccaccg

SEQ ID NO: 10174 - RNA, 19 nt, synthetic construct
  source 1..19: mol_type = other RNA
gttctgtgacttctacaac

SEQ ID NO: 10175 - RNA, 19 nt, synthetic construct
  source 1..19: mol_type = other RNA
ttctgtgacttctacaacc

SEQ ID NO: 10176 - RNA, 19 nt, synthetic construct
  source 1..19: mol_type = other RNA
tgggctgtttcagcacaca

SEQ ID NO: 10177 - RNA, 19 nt, synthetic construct
  source 1..19: mol_type = other RNA
ctgtgtccctgcgcccatg

SEQ ID NO: 10178 - RNA, 19 nt, synthetic construct
  source 1..19: mol_type = other RNA
gcgcccaggacctgtgccg

SEQ ID NO: 10179 - RNA, 19 nt, synthetic construct
  source 1..19: mol_type = other RNA
tcaggctggaccccgccca

SEQ ID NO: 10180 - RNA, 19 nt, synthetic construct
  source 1..19: mol_type = other RNA
caggtggggaagttcaaga

SEQ ID NO: 10181 - RNA, 19 nt, synthetic construct
  source 1..19: mol_type = other RNA
caggtggggaagttcaaga

SEQ ID NO: 10182 - RNA, 19 nt, synthetic construct
  source 1..19: mol_type = other RNA
caggtggggaagttcaaga

SEQ ID NO: 10183 - RNA, 19 nt, synthetic construct
  source 1..19: mol_type = other RNA
caggtggggaagttcaaga

SEQ ID NO: 10184 - RNA, 19 nt, synthetic construct
  source 1..19: mol_type = other RNA
agaggacagtgccctgctg

SEQ ID NO: 10185 - RNA, 19 nt, synthetic construct
  source 1..19: mol_type = other RNA
gcccggacccgctgccctt

SEQ ID NO: 10186 - RNA, 19 nt, synthetic construct
  source 1..19: mol_type = other RNA
aggctggaccccgcccacc

SEQ ID NO: 10187 - RNA, 19 nt, synthetic construct
  source 1..19: mol_type = other RNA
agcctctctgcagaaaagc

SEQ ID NO: 10188 - RNA, 19 nt, synthetic construct
  source 1..19: mol_type = other RNA
gggcacccctggggccgag

SEQ ID NO: 10189 - RNA, 19 nt, synthetic construct
  source 1..19: mol_type = other RNA
aggctccacagaacccact

SEQ ID NO: 10190 - RNA, 19 nt, synthetic construct
  source 1..19: mol_type = other RNA
ttctctactccctgcttct

SEQ ID NO: 10191 - RNA, 19 nt, synthetic construct
  source 1..19: mol_type = other RNA
ccaggcccggctgccctac

SEQ ID NO: 10192 - RNA, 19 nt, synthetic construct
  source 1..19: mol_type = other RNA
ctactcctgtgaggaggac

SEQ ID NO: 10193 - RNA, 19 nt, synthetic construct
  source 1..19: mol_type = other RNA
gggtcccccactccacgac

SEQ ID NO: 10194 - RNA, 19 nt, synthetic construct
  source 1..19: mol_type = other RNA
aattccggtgagcagcggt

SEQ ID NO: 10195 - RNA, 19 nt, synthetic construct
  source 1..19: mol_type = other RNA
caccacggccacctccagg

SEQ ID NO: 10196 - RNA, 19 nt, synthetic construct
  source 1..19: mol_type = other RNA
caccacggccacctccagg

SEQ ID NO: 10197 - RNA, 19 nt, synthetic construct
  source 1..19: mol_type = other RNA
ccaggactacaagggcagg

SEQ ID NO: 10198 - RNA, 19 nt, synthetic construct
  source 1..19: mol_type = other RNA
tgggctccaggcctgtggt

SEQ ID NO: 10199 - RNA, 19 nt, synthetic construct
  source 1..19: mol_type = other RNA
cctgcctaaaaacctgccg

SEQ ID NO: 10200 - RNA, 19 nt, synthetic construct
  source 1..19: mol_type = other RNA
cctgcctggcctggaaggc

SEQ ID NO: 10201 - RNA, 19 nt, synthetic construct
  source 1..19: mol_type = other RNA
cccaagtctgaacaacttg

SEQ ID NO: 10202 - RNA, 19 nt, synthetic construct
  source 1..19: mol_type = other RNA
ggctccacagaacccactg

SEQ ID NO: 10203 - RNA, 19 nt, synthetic construct
  source 1..19: mol_type = other RNA
ccctgcgggagttgggcca

SEQ ID NO: 10204 - RNA, 19 nt, synthetic construct
  source 1..19: mol_type = other RNA
ccctgcgggagttgggcca

SEQ ID NO: 10205 - RNA, 19 nt, synthetic construct
  source 1..19: mol_type = other RNA
ccctgcgggagttgggcca

SEQ ID NO: 10206 - RNA, 19 nt, synthetic construct
  source 1..19: mol_type = other RNA
ctgcccctggctgtgacaa

SEQ ID NO: 10207 - RNA, 19 nt, synthetic construct
  source 1..19: mol_type = other RNA
tgctgctactcctgtgagg

SEQ ID NO: 10208 - RNA, 19 nt, synthetic construct
  source 1..19: mol_type = other RNA
cctgcccctggctgtgaca

SEQ ID NO: 10209 - RNA, 19 nt, synthetic construct
  source 1..19: mol_type = other RNA
tcaccgagaacatcccctg

SEQ ID NO: 10210 - RNA, 19 nt, synthetic construct
  source 1..19: mol_type = other RNA
ccaggcccagcctggtgtc

SEQ ID NO: 10211 - RNA, 19 nt, synthetic construct
  source 1..19: mol_type = other RNA
ccaggcccagcctggtgtc

SEQ ID NO: 10212 - RNA, 19 nt, synthetic construct
  source 1..19: mol_type = other RNA
ccaggcccagcctggtgtc

SEQ ID NO: 10213 - RNA, 19 nt, synthetic construct
  source 1..19: mol_type = other RNA
ccaggcccagcctggtgtc

SEQ ID NO: 10214 - RNA, 19 nt, synthetic construct
  source 1..19: mol_type = other RNA
ggcaccgtgctggctcctg

SEQ ID NO: 10215 - RNA, 19 nt, synthetic construct
  source 1..19: mol_type = other RNA
gcctgggcacctgcgtggc

SEQ ID NO: 10216 - RNA, 19 nt, synthetic construct
  source 1..19: mol_type = other RNA
gggggctgtgagtggcact

SEQ ID NO: 10217 - RNA, 19 nt, synthetic construct
  source 1..19: mol_type = other RNA
tgcctggcctggaaggctg

SEQ ID NO: 10218 - RNA, 19 nt, synthetic construct
  source 1..19: mol_type = other RNA
cgggctgtgagccccagtg

SEQ ID NO: 10219 - RNA, 19 nt, synthetic construct
  source 1..19: mol_type = other RNA
cgggctgtgagccccagtg

SEQ ID NO: 10220 - RNA, 19 nt, synthetic construct
  source 1..19: mol_type = other RNA
ggctgtgacaatgccatcc

SEQ ID NO: 10221 - RNA, 19 nt, synthetic construct
  source 1..19: mol_type = other RNA
tacagcctcttccacaaca

SEQ ID NO: 10222 - RNA, 19 nt, synthetic construct
  source 1..19: mol_type = other RNA
ctgcctctctggggacacc

SEQ ID NO: 10223 - RNA, 19 nt, synthetic construct
  source 1..19: mol_type = other RNA
cccacagcctgcatcctgc

SEQ ID NO: 10224 - RNA, 19 nt, synthetic construct
  source 1..19: mol_type = other RNA
agggggagcctcaggaaaa

SEQ ID NO: 10225 - RNA, 19 nt, synthetic construct
  source 1..19: mol_type = other RNA
agggccagatgtgcggcct

SEQ ID NO: 10226 - RNA, 19 nt, synthetic construct
  source 1..19: mol_type = other RNA
ggcctacggggatggccac

SEQ ID NO: 10227 - RNA, 19 nt, synthetic construct
  source 1..19: mol_type = other RNA
ggatcttcctggtcatcga

SEQ ID NO: 10228 - RNA, 19 nt, synthetic construct
  source 1..19: mol_type = other RNA
aagtgctgaccaccacggc

SEQ ID NO: 10229 - RNA, 19 nt, synthetic construct
  source 1..19: mol_type = other RNA
ctgctggggccggcctttg

SEQ ID NO: 10230 - RNA, 19 nt, synthetic construct
  source 1..19: mol_type = other RNA
gtgtccggctgtgtctgtc

SEQ ID NO: 10231 - RNA, 19 nt, synthetic construct
  source 1..19: mol_type = other RNA
catggggatcttcctggtc

SEQ ID NO: 10232 - RNA, 19 nt, synthetic construct
  source 1..19: mol_type = other RNA
ccccaggtaccaccacctg

SEQ ID NO: 10233 - RNA, 19 nt, synthetic construct
  source 1..19: mol_type = other RNA
ccagcctgagccccctgaa

SEQ ID NO: 10234 - RNA, 19 nt, synthetic construct
  source 1..19: mol_type = other RNA
ccaggttgactccaccaag

SEQ ID NO: 10235 - RNA, 19 nt, synthetic construct
  source 1..19: mol_type = other RNA
ccatgccctcctccactcc

SEQ ID NO: 10236 - RNA, 19 nt, synthetic construct
  source 1..19: mol_type = other RNA
acccacacccccacagtgc

SEQ ID NO: 10237 - RNA, 19 nt, synthetic construct
  source 1..19: mol_type = other RNA
acccacacccccacagtgc

SEQ ID NO: 10238 - RNA, 19 nt, synthetic construct
  source 1..19: mol_type = other RNA
ccatgccctcctccactcc

SEQ ID NO: 10239 - RNA, 19 nt, synthetic construct
  source 1..19: mol_type = other RNA
gccgtgtcctgggaccgga

SEQ ID NO: 10240 - RNA, 19 nt, synthetic construct
  source 1..19: mol_type = other RNA
gtgaacaagcacctgccca

SEQ ID NO: 10241 - RNA, 19 nt, synthetic construct
  source 1..19: mol_type = other RNA
gtcactgtcttccccagcc

SEQ ID NO: 10242 - RNA, 19 nt, synthetic construct
  source 1..19: mol_type = other RNA
agcctgagccccctgaacc

SEQ ID NO: 10243 - RNA, 19 nt, synthetic construct
  source 1..19: mol_type = other RNA
tcaaggtcagcatccggct

SEQ ID NO: 10244 - RNA, 19 nt, synthetic construct
  source 1..19: mol_type = other RNA
caaggtcagcatccggctg

SEQ ID NO: 10245 - RNA, 19 nt, synthetic construct
  source 1..19: mol_type = other RNA
cgggcagtgcccctgcacc

SEQ ID NO: 10246 - RNA, 19 nt, synthetic construct
  source 1..19: mol_type = other RNA
cagcctggacggcggggac

SEQ ID NO: 10247 - RNA, 19 nt, synthetic construct
  source 1..19: mol_type = other RNA
gtttgtcaggctggacccc

SEQ ID NO: 10248 - RNA, 19 nt, synthetic construct
  source 1..19: mol_type = other RNA
tgccaggaacagctttgag

SEQ ID NO: 10249 - RNA, 19 nt, synthetic construct
  source 1..19: mol_type = other RNA
gccaggaacagctttgagg

SEQ ID NO: 10250 - RNA, 19 nt, synthetic construct
  source 1..19: mol_type = other RNA
gggcaccttcctcaatgac

SEQ ID NO: 10251 - RNA, 19 nt, synthetic construct
  source 1..19: mol_type = other RNA
ggcaccttcctcaatgacg

SEQ ID NO: 10252 - RNA, 19 nt, synthetic construct
  source 1..19: mol_type = other RNA
ctgctccaaggccatcaag

SEQ ID NO: 10253 - RNA, 19 nt, synthetic construct
  source 1..19: mol_type = other RNA
tccaaggccatcaagctct

SEQ ID NO: 10254 - RNA, 19 nt, synthetic construct
  source 1..19: mol_type = other RNA
gcctggaaggctgctaccc

SEQ ID NO: 10255 - RNA, 19 nt, synthetic construct
  source 1..19: mol_type = other RNA
gaactgccagagctgtaac

SEQ ID NO: 10256 - RNA, 19 nt, synthetic construct
  source 1..19: mol_type = other RNA
agcacggagcctgctgtgc

SEQ ID NO: 10257 - RNA, 19 nt, synthetic construct
  source 1..19: mol_type = other RNA
actgggtccagctcaggcc

SEQ ID NO: 10258 - RNA, 19 nt, synthetic construct
  source 1..19: mol_type = other RNA
ccagccccggtgtcagtgg

SEQ ID NO: 10259 - RNA, 19 nt, synthetic construct
  source 1..19: mol_type = other RNA
agtctgaacaacttggagg

SEQ ID NO: 10260 - RNA, 19 nt, synthetic construct
  source 1..19: mol_type = other RNA
cggcctggtgtgcaggaac

SEQ ID NO: 10261 - RNA, 19 nt, synthetic construct
  source 1..19: mol_type = other RNA
acccactgtcccaggggtg

SEQ ID NO: 10262 - RNA, 19 nt, synthetic construct
  source 1..19: mol_type = other RNA
tcccaggggtggccacatc

SEQ ID NO: 10263 - RNA, 19 nt, synthetic construct
  source 1..19: mol_type = other RNA
acaatggcaacctccagag

SEQ ID NO: 10264 - RNA, 19 nt, synthetic construct
  source 1..19: mol_type = other RNA
cacggccacctccaggacc

SEQ ID NO: 10265 - RNA, 19 nt, synthetic construct
  source 1..19: mol_type = other RNA
ctgtgagccccagtgtgcc

SEQ ID NO: 10266 - RNA, 19 nt, synthetic construct
  source 1..19: mol_type = other RNA
gccctcctccactccgggg

SEQ ID NO: 10267 - RNA, 19 nt, synthetic construct
  source 1..19: mol_type = other RNA
ctgtgagccccagtgtgcc

SEQ ID NO: 10268 - RNA, 19 nt, synthetic construct
  source 1..19: mol_type = other RNA
ctgtgagccccagtgtgcc

SEQ ID NO: 10269 - RNA, 19 nt, synthetic construct
  source 1..19: mol_type = other RNA
cacggccacctccaggacc

SEQ ID NO: 10270 - RNA, 19 nt, synthetic construct
  source 1..19: mol_type = other RNA
ctgtgagccccagtgtgcc

SEQ ID NO: 10271 - RNA, 19 nt, synthetic construct
  source 1..19: mol_type = other RNA
gccctcctccactccgggg

SEQ ID NO: 10272 - RNA, 19 nt, synthetic construct
  source 1..19: mol_type = other RNA
cttccccagctcccacttc

SEQ ID NO: 10273 - RNA, 19 nt, synthetic construct
  source 1..19: mol_type = other RNA
ccccagctcccacttctct

SEQ ID NO: 10274 - RNA, 19 nt, synthetic construct
  source 1..19: mol_type = other RNA
cctgcttctgcagggcatt

SEQ ID NO: 10275 - RNA, 19 nt, synthetic construct
  source 1..19: mol_type = other RNA
ccctacagcctcttccaca

SEQ ID NO: 10276 - RNA, 19 nt, synthetic construct
  source 1..19: mol_type = other RNA
ggagtgtgcagtgactggc

SEQ ID NO: 10277 - RNA, 19 nt, synthetic construct
  source 1..19: mol_type = other RNA
ctggggacacccaggaccc

SEQ ID NO: 10278 - RNA, 19 nt, synthetic construct
  source 1..19: mol_type = other RNA
ctgctgctactcctgtgag

SEQ ID NO: 10279 - RNA, 19 nt, synthetic construct
  source 1..19: mol_type = other RNA
gcagaggcccaggccatgc

SEQ ID NO: 10280 - RNA, 19 nt, synthetic construct
  source 1..19: mol_type = other RNA
ctcagcctggacggcgggg

SEQ ID NO: 10281 - RNA, 19 nt, synthetic construct
  source 1..19: mol_type = other RNA
ctaccagccctgcggggca

SEQ ID NO: 10282 - RNA, 19 nt, synthetic construct
  source 1..19: mol_type = other RNA
agcctggacggcggggaca

SEQ ID NO: 10283 - RNA, 19 nt, synthetic construct
  source 1..19: mol_type = other RNA
cactgcctggtggacctgc

SEQ ID NO: 10284 - RNA, 19 nt, synthetic construct
  source 1..19: mol_type = other RNA
gtcagtggacagagtggtt

SEQ ID NO: 10285 - RNA, 19 nt, synthetic construct
  source 1..19: mol_type = other RNA
gttcaagatgtgcttcaac

SEQ ID NO: 10286 - RNA, 19 nt, synthetic construct
  source 1..19: mol_type = other RNA
gttcaagatgtgcttcaac

SEQ ID NO: 10287 - RNA, 19 nt, synthetic construct
  source 1..19: mol_type = other RNA
gttcaagatgtgcttcaac

SEQ ID NO: 10288 - RNA, 19 nt, synthetic construct
  source 1..19: mol_type = other RNA
gttcaagatgtgcttcaac

SEQ ID NO: 10289 - RNA, 19 nt, synthetic construct
  source 1..19: mol_type = other RNA
gacagtgccctgctggagc

SEQ ID NO: 10290 - RNA, 19 nt, synthetic construct
  source 1..19: mol_type = other RNA
gctccagtttgggaacctg

SEQ ID NO: 10291 - RNA, 19 nt, synthetic construct
  source 1..19: mol_type = other RNA
gcccaggacctgtgccgct

SEQ ID NO: 10292 - RNA, 19 nt, synthetic construct
  source 1..19: mol_type = other RNA
cgctgtcctcctatgtgca

SEQ ID NO: 10293 - RNA, 19 nt, synthetic construct
  source 1..19: mol_type = other RNA
tcagcacacactgcgtgtc

SEQ ID NO: 10294 - RNA, 19 nt, synthetic construct
  source 1..19: mol_type = other RNA
tcacagccttgaggcctgc

SEQ ID NO: 10295 - RNA, 19 nt, synthetic construct
  source 1..19: mol_type = other RNA
cccagcctggtgtccccct

SEQ ID NO: 10296 - RNA, 19 nt, synthetic construct
  source 1..19: mol_type = other RNA
cccagcctggtgtccccct

SEQ ID NO: 10297 - RNA, 19 nt, synthetic construct
  source 1..19: mol_type = other RNA
cccagcctggtgtccccct

SEQ ID NO: 10298 - RNA, 19 nt, synthetic construct
  source 1..19: mol_type = other RNA
acggccacctccaggacca

SEQ ID NO: 10299 - RNA, 19 nt, synthetic construct
  source 1..19: mol_type = other RNA
ccaaccagacctgtggcct

SEQ ID NO: 10300 - RNA, 19 nt, synthetic construct
  source 1..19: mol_type = other RNA
gccgctgccccacctgccc

SEQ ID NO: 10301 - RNA, 19 nt, synthetic construct
  source 1..19: mol_type = other RNA
tgctgaccaccacggccac

SEQ ID NO: 10302 - RNA, 19 nt, synthetic construct
  source 1..19: mol_type = other RNA
cgctcagcctggacggcgg

SEQ ID NO: 10303 - RNA, 19 nt, synthetic construct
  source 1..19: mol_type = other RNA
cacttctctactccctgct

SEQ ID NO: 10304 - RNA, 19 nt, synthetic construct
  source 1..19: mol_type = other RNA
gtttgggaacctgcagaag

SEQ ID NO: 10305 - RNA, 19 nt, synthetic construct
  source 1..19: mol_type = other RNA
cctgcgcccaggacctgtg

SEQ ID NO: 10306 - RNA, 19 nt, synthetic construct
  source 1..19: mol_type = other RNA
tcagcctggacggcgggga

SEQ ID NO: 10307 - RNA, 19 nt, synthetic construct
  source 1..19: mol_type = other RNA
caggaacagctttgaggac

SEQ ID NO: 10308 - RNA, 19 nt, synthetic construct
  source 1..19: mol_type = other RNA
gcctctctgcagaaaagca

SEQ ID NO: 10309 - RNA, 19 nt, synthetic construct
  source 1..19: mol_type = other RNA
ccggaggtgggagtgcagc

SEQ ID NO: 10310 - RNA, 19 nt, synthetic construct
  source 1..19: mol_type = other RNA
gaaggctgtggcatgtcct

SEQ ID NO: 10311 - RNA, 19 nt, synthetic construct
  source 1..19: mol_type = other RNA
ttgatgaggactaccccaa

SEQ ID NO: 10312 - RNA, 19 nt, synthetic construct
  source 1..19: mol_type = other RNA
caatggcaacctccagagc

SEQ ID NO: 10313 - RNA, 19 nt, synthetic construct
  source 1..19: mol_type = other RNA
ctatggcaacaccctcctc

SEQ ID NO: 10314 - RNA, 19 nt, synthetic construct
  source 1..19: mol_type = other RNA
ccacggccacctccaggac

SEQ ID NO: 10315 - RNA, 19 nt, synthetic construct
  source 1..19: mol_type = other RNA
ctatggcaacaccctcctc

SEQ ID NO: 10316 - RNA, 19 nt, synthetic construct
  source 1..19: mol_type = other RNA
ctatggcaacaccctcctc

SEQ ID NO: 10317 - RNA, 19 nt, synthetic construct
  source 1..19: mol_type = other RNA
ctatggcaacaccctcctc

SEQ ID NO: 10318 - RNA, 19 nt, synthetic construct
  source 1..19: mol_type = other RNA
ccacggccacctccaggac

SEQ ID NO: 10319 - RNA, 19 nt, synthetic construct
  source 1..19: mol_type = other RNA
ctatggcaacaccctcctc

SEQ ID NO: 10320 - RNA, 19 nt, synthetic construct
  source 1..19: mol_type = other RNA
ttcggcctggtgtgcagga

SEQ ID NO: 10321 - RNA, 19 nt, synthetic construct
  source 1..19: mol_type = other RNA
tgtgagtggacagagtggt

SEQ ID NO: 10322 - RNA, 19 nt, synthetic construct
  source 1..19: mol_type = other RNA
ccttcttcaatgaggacca

SEQ ID NO: 10323 - RNA, 19 nt, synthetic construct
  source 1..19: mol_type = other RNA
tgcccctgtcggcagccaa

SEQ ID NO: 10324 - RNA, 19 nt, synthetic construct
  source 1..19: mol_type = other RNA
gccagatgtgcggcctgtg

SEQ ID NO: 10325 - RNA, 19 nt, synthetic construct
  source 1..19: mol_type = other RNA
gtgagcagcggtttcagca

SEQ ID NO: 10326 - RNA, 19 nt, synthetic construct
  source 1..19: mol_type = other RNA
agcaactgccagtcctgcg

SEQ ID NO: 10327 - RNA, 19 nt, synthetic construct
  source 1..19: mol_type = other RNA
gtcttccccagcctgagcc

SEQ ID NO: 10328 - RNA, 19 nt, synthetic construct
  source 1..19: mol_type = other RNA
acctgcagctcctgcacct

SEQ ID NO: 10329 - RNA, 19 nt, synthetic construct
  source 1..19: mol_type = other RNA
gctcagcctggacggcggg

SEQ ID NO: 10330 - RNA, 19 nt, synthetic construct
  source 1..19: mol_type = other RNA
cacgcagctgcccctgtcg

SEQ ID NO: 10331 - RNA, 19 nt, synthetic construct
  source 1..19: mol_type = other RNA
gccaacacctggaaggccc

SEQ ID NO: 10332 - RNA, 19 nt, synthetic construct
  source 1..19: mol_type = other RNA
gtggagaatgagaactacg

SEQ ID NO: 10333 - RNA, 19 nt, synthetic construct
  source 1..19: mol_type = other RNA
tgcagaaaagcacagggtg

SEQ ID NO: 10334 - RNA, 19 nt, synthetic construct
  source 1..19: mol_type = other RNA
gtgcagccaccggctctgc

SEQ ID NO: 10335 - RNA, 19 nt, synthetic construct
  source 1..19: mol_type = other RNA
cgccgcctgccgctcccag

SEQ ID NO: 10336 - RNA, 19 nt, synthetic construct
  source 1..19: mol_type = other RNA
ggtgtgcaggaactgggag

SEQ ID NO: 10337 - RNA, 19 nt, synthetic construct
  source 1..19: mol_type = other RNA
cacagccaccccctcctcc

SEQ ID NO: 10338 - RNA, 19 nt, synthetic construct
  source 1..19: mol_type = other RNA
cacagccaccccctcctcc

SEQ ID NO: 10339 - RNA, 19 nt, synthetic construct
  source 1..19: mol_type = other RNA
ccacgccctcctccactcc

SEQ ID NO: 10340 - RNA, 19 nt, synthetic construct
  source 1..19: mol_type = other RNA
cgccctcctccactccagg

SEQ ID NO: 10341 - RNA, 19 nt, synthetic construct
  source 1..19: mol_type = other RNA
cacagccaccccctcctcc

SEQ ID NO: 10342 - RNA, 19 nt, synthetic construct
  source 1..19: mol_type = other RNA
actccagggacaactccca

SEQ ID NO: 10343 - RNA, 19 nt, synthetic construct
  source 1..19: mol_type = other RNA
cacagccaccccctcctcc

SEQ ID NO: 10344 - RNA, 19 nt, synthetic construct
  source 1..19: mol_type = other RNA
cacaccctcctccactctg

SEQ ID NO: 10345 - RNA, 19 nt, synthetic construct
  source 1..19: mol_type = other RNA
ctctactccctgcttctgc

SEQ ID NO: 10346 - RNA, 19 nt, synthetic construct
  source 1..19: mol_type = other RNA
ctacagcctcttccacaac

SEQ ID NO: 10347 - RNA, 19 nt, synthetic construct
  source 1..19: mol_type = other RNA
ggacggctgcttctgcccc

SEQ ID NO: 10348 - RNA, 19 nt, synthetic construct
  source 1..19: mol_type = other RNA
cactctggctgcctgcccc

SEQ ID NO: 10349 - RNA, 19 nt, synthetic construct
  source 1..19: mol_type = other RNA
ggacaacgagaactgcctg

SEQ ID NO: 10350 - RNA, 19 nt, synthetic construct
  source 1..19: mol_type = other RNA
ttcctcaactccatctaca

SEQ ID NO: 10351 - RNA, 19 nt, synthetic construct
  source 1..19: mol_type = other RNA
acacgcagctgcccctgtc

SEQ ID NO: 10352 - RNA, 19 nt, synthetic construct
  source 1..19: mol_type = other RNA
gctgcccctgtcggcagcc

SEQ ID NO: 10353 - RNA, 19 nt, synthetic construct
  source 1..19: mol_type = other RNA
gtcggcagccaacatcacc

SEQ ID NO: 10354 - RNA, 19 nt, synthetic construct
  source 1..19: mol_type = other RNA
cttcgccaacacctggaag

SEQ ID NO: 10355 - RNA, 19 nt, synthetic construct
  source 1..19: mol_type = other RNA
gtggacggctgcacctgcc

SEQ ID NO: 10356 - RNA, 19 nt, synthetic construct
  source 1..19: mol_type = other RNA
cggcaccgtgctggctcct

SEQ ID NO: 10357 - RNA, 19 nt, synthetic construct
  source 1..19: mol_type = other RNA
gcgggcacccctggggccg

SEQ ID NO: 10358 - RNA, 19 nt, synthetic construct
  source 1..19: mol_type = other RNA
tgtccggctgtgtctgtcc

SEQ ID NO: 10359 - RNA, 19 nt, synthetic construct
  source 1..19: mol_type = other RNA
gaccaccggcaccacctgc

SEQ ID NO: 10360 - RNA, 19 nt, synthetic construct
  source 1..19: mol_type = other RNA
atggggatcttcctggtca

SEQ ID NO: 10361 - RNA, 19 nt, synthetic construct
  source 1..19: mol_type = other RNA
agccctgcggggcaccctg

SEQ ID NO: 10362 - RNA, 19 nt, synthetic construct
  source 1..19: mol_type = other RNA
ccagtgggcactgcctggt

SEQ ID NO: 10363 - RNA, 19 nt, synthetic construct
  source 1..19: mol_type = other RNA
tggtggacctgcctggcct

SEQ ID NO: 10364 - RNA, 19 nt, synthetic construct
  source 1..19: mol_type = other RNA
gacctgcctggcctggaag

SEQ ID NO: 10365 - RNA, 19 nt, synthetic construct
  source 1..19: mol_type = other RNA
tgaggaccagatgaagtgc

SEQ ID NO: 10366 - RNA, 19 nt, synthetic construct
  source 1..19: mol_type = other RNA
caggccgagagcttcccca

SEQ ID NO: 10367 - RNA, 19 nt, synthetic construct
  source 1..19: mol_type = other RNA
agcaccacagcagtcccca

SEQ ID NO: 10368 - RNA, 19 nt, synthetic construct
  source 1..19: mol_type = other RNA
acagaacccactgtcccag

SEQ ID NO: 10369 - RNA, 19 nt, synthetic construct
  source 1..19: mol_type = other RNA
gctgaccaccacggccacc

SEQ ID NO: 10370 - RNA, 19 nt, synthetic construct
  source 1..19: mol_type = other RNA
aagcacagccaccacaccc

SEQ ID NO: 10371 - RNA, 19 nt, synthetic construct
  source 1..19: mol_type = other RNA
gccgtctgtgagcagcccc

SEQ ID NO: 10372 - RNA, 19 nt, synthetic construct
  source 1..19: mol_type = other RNA
ctgtgagcagcccctgggc

SEQ ID NO: 10373 - RNA, 19 nt, synthetic construct
  source 1..19: mol_type = other RNA
aggtggggaagttcaagat

SEQ ID NO: 10374 - RNA, 19 nt, synthetic construct
  source 1..19: mol_type = other RNA
aagcacagccaccacaccc

SEQ ID NO: 10375 - RNA, 19 nt, synthetic construct
  source 1..19: mol_type = other RNA
cacctccaggaccacggcc

SEQ ID NO: 10376 - RNA, 19 nt, synthetic construct
  source 1..19: mol_type = other RNA
gccgtctgtgagcagcccc

SEQ ID NO: 10377 - RNA, 19 nt, synthetic construct
  source 1..19: mol_type = other RNA
ctgtgagcagcccctgggc

SEQ ID NO: 10378 - RNA, 19 nt, synthetic construct
  source 1..19: mol_type = other RNA
aggtggggaagttcaagat

SEQ ID NO: 10379 - RNA, 19 nt, synthetic construct
  source 1..19: mol_type = other RNA
aagcacagccaccacaccc

SEQ ID NO: 10380 - RNA, 19 nt, synthetic construct
  source 1..19: mol_type = other RNA
ctgtgagcagcccctgggc

SEQ ID NO: 10381 - RNA, 19 nt, synthetic construct
  source 1..19: mol_type = other RNA
aggtggggaagttcaagat

SEQ ID NO: 10382 - RNA, 19 nt, synthetic construct
  source 1..19: mol_type = other RNA
aagcacagccaccacaccc

SEQ ID NO: 10383 - RNA, 19 nt, synthetic construct
  source 1..19: mol_type = other RNA
cacctccaggaccacggcc

SEQ ID NO: 10384 - RNA, 19 nt, synthetic construct
  source 1..19: mol_type = other RNA
gccgtctgtgagcagcccc

SEQ ID NO: 10385 - RNA, 19 nt, synthetic construct
  source 1..19: mol_type = other RNA
ctgtgagcagcccctgggc

SEQ ID NO: 10386 - RNA, 19 nt, synthetic construct
  source 1..19: mol_type = other RNA
aggtggggaagttcaagat

SEQ ID NO: 10387 - RNA, 19 nt, synthetic construct
  source 1..19: mol_type = other RNA
aagcacagccaccacaccc

SEQ ID NO: 10388 - RNA, 19 nt, synthetic construct
  source 1..19: mol_type = other RNA
acaccctcctccactctgg

SEQ ID NO: 10389 - RNA, 19 nt, synthetic construct
  source 1..19: mol_type = other RNA
ctactccctgcttctgcag

SEQ ID NO: 10390 - RNA, 19 nt, synthetic construct
  source 1..19: mol_type = other RNA
gccctacagcctcttccac

SEQ ID NO: 10391 - RNA, 19 nt, synthetic construct
  source 1..19: mol_type = other RNA
atgcagcaccagtgcacct

SEQ ID NO: 10392 - RNA, 19 nt, synthetic construct
  source 1..19: mol_type = other RNA
gtccctgcgcccatggctc

SEQ ID NO: 10393 - RNA, 19 nt, synthetic construct
  source 1..19: mol_type = other RNA
ggcccacggagcagtgccc

SEQ ID NO: 10394 - RNA, 19 nt, synthetic construct
  source 1..19: mol_type = other RNA
gacctgccgtgccctggca

SEQ ID NO: 10395 - RNA, 19 nt, synthetic construct
  source 1..19: mol_type = other RNA
gtgtgggaacttcaaccag

SEQ ID NO: 10396 - RNA, 19 nt, synthetic construct
  source 1..19: mol_type = other RNA
ggcgggcacccctggggcc

SEQ ID NO: 10397 - RNA, 19 nt, synthetic construct
  source 1..19: mol_type = other RNA
tcgactgcaacacctgcac

SEQ ID NO: 10398 - RNA, 19 nt, synthetic construct
  source 1..19: mol_type = other RNA
caccggcaccacctgctcc

SEQ ID NO: 10399 - RNA, 19 nt, synthetic construct
  source 1..19: mol_type = other RNA
cgggatggccgtgtcctgg

SEQ ID NO: 10400 - RNA, 19 nt, synthetic construct
  source 1..19: mol_type = other RNA
accccagtgggcactgcct

SEQ ID NO: 10401 - RNA, 19 nt, synthetic construct
  source 1..19: mol_type = other RNA
agttcaagatgtgcttcaa

SEQ ID NO: 10402 - RNA, 19 nt, synthetic construct
  source 1..19: mol_type = other RNA
cccacacccccacagtgct

SEQ ID NO: 10403 - RNA, 19 nt, synthetic construct
  source 1..19: mol_type = other RNA
agttcaagatgtgcttcaa

SEQ ID NO: 10404 - RNA, 19 nt, synthetic construct
  source 1..19: mol_type = other RNA
agttcaagatgtgcttcaa

SEQ ID NO: 10405 - RNA, 19 nt, synthetic construct
  source 1..19: mol_type = other RNA
cccacacccccacagtgct

SEQ ID NO: 10406 - RNA, 19 nt, synthetic construct
  source 1..19: mol_type = other RNA
agttcaagatgtgcttcaa

SEQ ID NO: 10407 - RNA, 19 nt, synthetic construct
  source 1..19: mol_type = other RNA
gcctcttccacaacaacac

SEQ ID NO: 10408 - RNA, 19 nt, synthetic construct
  source 1..19: mol_type = other RNA
ccccagcctgagccccctg

SEQ ID NO: 10409 - RNA, 19 nt, synthetic construct
  source 1..19: mol_type = other RNA
gtggaacggagaggacagt

SEQ ID NO: 10410 - RNA, 19 nt, synthetic construct
  source 1..19: mol_type = other RNA
gtcgactgcaacacctgca

SEQ ID NO: 10411 - RNA, 19 nt, synthetic construct
  source 1..19: mol_type = other RNA
gggaccaccggcaccacct

SEQ ID NO: 10412 - RNA, 19 nt, synthetic construct
  source 1..19: mol_type = other RNA
ctccctcagtgccagcacg

SEQ ID NO: 10413 - RNA, 19 nt, synthetic construct
  source 1..19: mol_type = other RNA
ggtttgacgtggacttccc

SEQ ID NO: 10414 - RNA, 19 nt, synthetic construct
  source 1..19: mol_type = other RNA
tgccctacagcctcttcca

SEQ ID NO: 10415 - RNA, 19 nt, synthetic construct
  source 1..19: mol_type = other RNA
gtacctgcctctctgggga

SEQ ID NO: 10416 - RNA, 19 nt, synthetic construct
  source 1..19: mol_type = other RNA
tgcgcccaggacctgtgcc

SEQ ID NO: 10417 - RNA, 19 nt, synthetic construct
  source 1..19: mol_type = other RNA
gacctgtgccgctgcccca

SEQ ID NO: 10418 - RNA, 19 nt, synthetic construct
  source 1..19: mol_type = other RNA
ggaccccgcccaccagggc

SEQ ID NO: 10419 - RNA, 19 nt, synthetic construct
  source 1..19: mol_type = other RNA
cgctggacgtgggctgttt

SEQ ID NO: 10420 - RNA, 19 nt, synthetic construct
  source 1..19: mol_type = other RNA
acttcatcacctttgatgg

SEQ ID NO: 10421 - RNA, 19 nt, synthetic construct
  source 1..19: mol_type = other RNA
caaggccatcaagctcttc

SEQ ID NO: 10422 - RNA, 19 nt, synthetic construct
  source 1..19: mol_type = other RNA
tgcaccaggactacaaggg

SEQ ID NO: 10423 - RNA, 19 nt, synthetic construct
  source 1..19: mol_type = other RNA
ggcactgcctggtggacct

SEQ ID NO: 10424 - RNA, 19 nt, synthetic construct
  source 1..19: mol_type = other RNA
gcctggtggacctgcctgg

SEQ ID NO: 10425 - RNA, 19 nt, synthetic construct
  source 1..19: mol_type = other RNA
ctggtggacctgcctggcc

SEQ ID NO: 10426 - RNA, 19 nt, synthetic construct
  source 1..19: mol_type = other RNA
ggtctgccgctggtccagc

SEQ ID NO: 10427 - RNA, 19 nt, synthetic construct
  source 1..19: mol_type = other RNA
tctgccgctggtccagctg

SEQ ID NO: 10428 - RNA, 19 nt, synthetic construct
  source 1..19: mol_type = other RNA
gccaccccctcctccagcc

SEQ ID NO: 10429 - RNA, 19 nt, synthetic construct
  source 1..19: mol_type = other RNA
ctcctctgccctagggacc

SEQ ID NO: 10430 - RNA, 19 nt, synthetic construct
  source 1..19: mol_type = other RNA
gccaccccctcctccagcc

SEQ ID NO: 10431 - RNA, 19 nt, synthetic construct
  source 1..19: mol_type = other RNA
ctcctctgccctagggacc

SEQ ID NO: 10432 - RNA, 19 nt, synthetic construct
  source 1..19: mol_type = other RNA
gccaccccctcctccagcc

SEQ ID NO: 10433 - RNA, 19 nt, synthetic construct
  source 1..19: mol_type = other RNA
ctcctctgccctagggacc

SEQ ID NO: 10434 - RNA, 19 nt, synthetic construct
  source 1..19: mol_type = other RNA
ctcctctgccctagggacc

SEQ ID NO: 10435 - RNA, 19 nt, synthetic construct
  source 1..19: mol_type = other RNA
gccaccccctcctccagcc

SEQ ID NO: 10436 - RNA, 19 nt, synthetic construct
  source 1..19: mol_type = other RNA
cttctctactccctgcttc

SEQ ID NO: 10437 - RNA, 19 nt, synthetic construct
  source 1..19: mol_type = other RNA
tctctactccctgcttctg

SEQ ID NO: 10438 - RNA, 19 nt, synthetic construct
  source 1..19: mol_type = other RNA
gagacctggaccctggaga

SEQ ID NO: 10439 - RNA, 19 nt, synthetic construct
  source 1..19: mol_type = other RNA
ggcccaggccatgcagcac

SEQ ID NO: 10440 - RNA, 19 nt, synthetic construct
  source 1..19: mol_type = other RNA
gcccaggccatgcagcacc

SEQ ID NO: 10441 - RNA, 19 nt, synthetic construct
  source 1..19: mol_type = other RNA
gcagcaccagtgcacctgc

SEQ ID NO: 10442 - RNA, 19 nt, synthetic construct
  source 1..19: mol_type = other RNA
cccgtcactgtcttcccca

SEQ ID NO: 10443 - RNA, 19 nt, synthetic construct
  source 1..19: mol_type = other RNA
cgtcactgtcttccccagc

SEQ ID NO: 10444 - RNA, 19 nt, synthetic construct
  source 1..19: mol_type = other RNA
tcactgtcttccccagcct

SEQ ID NO: 10445 - RNA, 19 nt, synthetic construct
  source 1..19: mol_type = other RNA
tcttccccagcctgagccc

SEQ ID NO: 10446 - RNA, 19 nt, synthetic construct
  source 1..19: mol_type = other RNA
cccagcctgagccccctga

SEQ ID NO: 10447 - RNA, 19 nt, synthetic construct
  source 1..19: mol_type = other RNA
gtgggctccaggcctgtgg

SEQ ID NO: 10448 - RNA, 19 nt, synthetic construct
  source 1..19: mol_type = other RNA
ggctccaggcctgtggtca

SEQ ID NO: 10449 - RNA, 19 nt, synthetic construct
  source 1..19: mol_type = other RNA
tgtcatcaaggcccagggg

SEQ ID NO: 10450 - RNA, 19 nt, synthetic construct
  source 1..19: mol_type = other RNA
gtcatcaaggcccaggggc

SEQ ID NO: 10451 - RNA, 19 nt, synthetic construct
  source 1..19: mol_type = other RNA
tcatcaaggcccaggggct

SEQ ID NO: 10452 - RNA, 19 nt, synthetic construct
  source 1..19: mol_type = other RNA
gggcagcgggaggagctgc

SEQ ID NO: 10453 - RNA, 19 nt, synthetic construct
  source 1..19: mol_type = other RNA
ggcagcgggaggagctgcc

SEQ ID NO: 10454 - RNA, 19 nt, synthetic construct
  source 1..19: mol_type = other RNA
aggacagtgccctgctgga

SEQ ID NO: 10455 - RNA, 19 nt, synthetic construct
  source 1..19: mol_type = other RNA
tgccgctgccccacctgcc

SEQ ID NO: 10456 - RNA, 19 nt, synthetic construct
  source 1..19: mol_type = other RNA
ccgctgccccacctgcccg

SEQ ID NO: 10457 - RNA, 19 nt, synthetic construct
  source 1..19: mol_type = other RNA
gacacctgctccaaccccc

SEQ ID NO: 10458 - RNA, 19 nt, synthetic construct
  source 1..19: mol_type = other RNA
acacctgctccaaccccca

SEQ ID NO: 10459 - RNA, 19 nt, synthetic construct
  source 1..19: mol_type = other RNA
cacctgctccaacccccag

SEQ ID NO: 10460 - RNA, 19 nt, synthetic construct
  source 1..19: mol_type = other RNA
cctgctccaacccccagcg

SEQ ID NO: 10461 - RNA, 19 nt, synthetic construct
  source 1..19: mol_type = other RNA
gctgcttctgccccccagg

SEQ ID NO: 10462 - RNA, 19 nt, synthetic construct
  source 1..19: mol_type = other RNA
cgcactctggctgcctgcc

SEQ ID NO: 10463 - RNA, 19 nt, synthetic construct
  source 1..19: mol_type = other RNA
gcactctggctgcctgccc

SEQ ID NO: 10464 - RNA, 19 nt, synthetic construct
  source 1..19: mol_type = other RNA
gctgcctgcccctcgggca

SEQ ID NO: 10465 - RNA, 19 nt, synthetic construct
  source 1..19: mol_type = other RNA
tgcctgcccctcgggcagt

SEQ ID NO: 10466 - RNA, 19 nt, synthetic construct
  source 1..19: mol_type = other RNA
ctgcccctcgggcagtgcc

SEQ ID NO: 10467 - RNA, 19 nt, synthetic construct
  source 1..19: mol_type = other RNA
gcccctcgggcagtgcccc

SEQ ID NO: 10468 - RNA, 19 nt, synthetic construct
  source 1..19: mol_type = other RNA
tcaacaccacctgcagctc

SEQ ID NO: 10469 - RNA, 19 nt, synthetic construct
  source 1..19: mol_type = other RNA
ccacctgcagctcctgcac

SEQ ID NO: 10470 - RNA, 19 nt, synthetic construct
  source 1..19: mol_type = other RNA
cacctgcagctcctgcacc

SEQ ID NO: 10471 - RNA, 19 nt, synthetic construct
  source 1..19: mol_type = other RNA
ggcagtgccaggacctgcc

SEQ ID NO: 10472 - RNA, 19 nt, synthetic construct
  source 1..19: mol_type = other RNA
gtgcagggcggggcccaca

SEQ ID NO: 10473 - RNA, 19 nt, synthetic construct
  source 1..19: mol_type = other RNA
tacacgcagctgcccctgt

SEQ ID NO: 10474 - RNA, 19 nt, synthetic construct
  source 1..19: mol_type = other RNA
gggctgcagctgctggtgc

SEQ ID NO: 10475 - RNA, 19 nt, synthetic construct
  source 1..19: mol_type = other RNA
agctgctggtgcagctggt

SEQ ID NO: 10476 - RNA, 19 nt, synthetic construct
  source 1..19: mol_type = other RNA
gtgtttgtcaggctggacc

SEQ ID NO: 10477 - RNA, 19 nt, synthetic construct
  source 1..19: mol_type = other RNA
gtcaggctggaccccgccc

SEQ ID NO: 10478 - RNA, 19 nt, synthetic construct
  source 1..19: mol_type = other RNA
tggaccccgcccaccaggg

SEQ ID NO: 10479 - RNA, 19 nt, synthetic construct
  source 1..19: mol_type = other RNA
ccccgcccaccagggccag

SEQ ID NO: 10480 - RNA, 19 nt, synthetic construct
  source 1..19: mol_type = other RNA
gcccaccagggccagatgt

SEQ ID NO: 10481 - RNA, 19 nt, synthetic construct
  source 1..19: mol_type = other RNA
gggccagatgtgcggcctg

SEQ ID NO: 10482 - RNA, 19 nt, synthetic construct
  source 1..19: mol_type = other RNA
ctttgaggacccctgctcc

SEQ ID NO: 10483 - RNA, 19 nt, synthetic construct
  source 1..19: mol_type = other RNA
tgaggacccctgctccctc

SEQ ID NO: 10484 - RNA, 19 nt, synthetic construct
  source 1..19: mol_type = other RNA
aaccccaagcccttccact

SEQ ID NO: 10485 - RNA, 19 nt, synthetic construct
  source 1..19: mol_type = other RNA
accccaagcccttccactc

SEQ ID NO: 10486 - RNA, 19 nt, synthetic construct
  source 1..19: mol_type = other RNA
tctgcaccaagtacatgca

SEQ ID NO: 10487 - RNA, 19 nt, synthetic construct
  source 1..19: mol_type = other RNA
tgcagaactgccccaagtc

SEQ ID NO: 10488 - RNA, 19 nt, synthetic construct
  source 1..19: mol_type = other RNA
accgtgctggctcctggag

SEQ ID NO: 10489 - RNA, 19 nt, synthetic construct
  source 1..19: mol_type = other RNA
ccgtgctggctcctggaga

SEQ ID NO: 10490 - RNA, 19 nt, synthetic construct
  source 1..19: mol_type = other RNA
cgtgctggctcctggagag

SEQ ID NO: 10491 - RNA, 19 nt, synthetic construct
  source 1..19: mol_type = other RNA
ctgcagaaaagcacagggt

SEQ ID NO: 10492 - RNA, 19 nt, synthetic construct
  source 1..19: mol_type = other RNA
ccctggggccgagtgcctc

SEQ ID NO: 10493 - RNA, 19 nt, synthetic construct
  source 1..19: mol_type = other RNA
tccggctgtgtctgtcccc

SEQ ID NO: 10494 - RNA, 19 nt, synthetic construct
  source 1..19: mol_type = other RNA
cggctgtgtctgtcccccg

SEQ ID NO: 10495 - RNA, 19 nt, synthetic construct
  source 1..19: mol_type = other RNA
accggaggtgggagtgcag

SEQ ID NO: 10496 - RNA, 19 nt, synthetic construct
  source 1..19: mol_type = other RNA
cagccaccggctctgcctg

SEQ ID NO: 10497 - RNA, 19 nt, synthetic construct
  source 1..19: mol_type = other RNA
agccaccggctctgcctgg

SEQ ID NO: 10498 - RNA, 19 nt, synthetic construct
  source 1..19: mol_type = other RNA
gccaccggctctgcctggg

SEQ ID NO: 10499 - RNA, 19 nt, synthetic construct
  source 1..19: mol_type = other RNA
cggctctgcctgggcacct

SEQ ID NO: 10500 - RNA, 19 nt, synthetic construct
  source 1..19: mol_type = other RNA
ggctctgcctgggcacctg

SEQ ID NO: 10501 - RNA, 19 nt, synthetic construct
  source 1..19: mol_type = other RNA
ctctgcctgggcacctgcg

SEQ ID NO: 10502 - RNA, 19 nt, synthetic construct
  source 1..19: mol_type = other RNA
tgcctgggcacctgcgtgg

SEQ ID NO: 10503 - RNA, 19 nt, synthetic construct
  source 1..19: mol_type = other RNA
ccaaggccatcaagctctt

SEQ ID NO: 10504 - RNA, 19 nt, synthetic construct
  source 1..19: mol_type = other RNA
gatcttcctggtcatcgag

SEQ ID NO: 10505 - RNA, 19 nt, synthetic construct
  source 1..19: mol_type = other RNA
atcttcctggtcatcgaga

SEQ ID NO: 10506 - RNA, 19 nt, synthetic construct
  source 1..19: mol_type = other RNA
gggatggccgtgtcctggg

SEQ ID NO: 10507 - RNA, 19 nt, synthetic construct
  source 1..19: mol_type = other RNA
ggatggccgtgtcctggga

SEQ ID NO: 10508 - RNA, 19 nt, synthetic construct
  source 1..19: mol_type = other RNA
tccgactgcaccaggacta

SEQ ID NO: 10509 - RNA, 19 nt, synthetic construct
  source 1..19: mol_type = other RNA
accttcgccgcctgccgct

SEQ ID NO: 10510 - RNA, 19 nt, synthetic construct
  source 1..19: mol_type = other RNA
tcgccgcctgccgctccca

SEQ ID NO: 10511 - RNA, 19 nt, synthetic construct
  source 1..19: mol_type = other RNA
ccagccctgcggggcaccc

SEQ ID NO: 10512 - RNA, 19 nt, synthetic construct
  source 1..19: mol_type = other RNA
ccccagtgggcactgcctg

SEQ ID NO: 10513 - RNA, 19 nt, synthetic construct
  source 1..19: mol_type = other RNA
gggcactgcctggtggacc

SEQ ID NO: 10514 - RNA, 19 nt, synthetic construct
  source 1..19: mol_type = other RNA
actgcctggtggacctgcc

SEQ ID NO: 10515 - RNA, 19 nt, synthetic construct
  source 1..19: mol_type = other RNA
cctggtggacctgcctggc

SEQ ID NO: 10516 - RNA, 19 nt, synthetic construct
  source 1..19: mol_type = other RNA
gtggacctgcctggcctgg

SEQ ID NO: 10517 - RNA, 19 nt, synthetic construct
  source 1..19: mol_type = other RNA
tggacctgcctggcctgga

SEQ ID NO: 10518 - RNA, 19 nt, synthetic construct
  source 1..19: mol_type = other RNA
acctgcctggcctggaagg

SEQ ID NO: 10519 - RNA, 19 nt, synthetic construct
  source 1..19: mol_type = other RNA
ctgcctggcctggaaggct

SEQ ID NO: 10520 - RNA, 19 nt, synthetic construct
  source 1..19: mol_type = other RNA
cacccagccagcccttctt

SEQ ID NO: 10521 - RNA, 19 nt, synthetic construct
  source 1..19: mol_type = other RNA
ccagccagcccttcttcaa

SEQ ID NO: 10522 - RNA, 19 nt, synthetic construct
  source 1..19: mol_type = other RNA
atgaggaccagatgaagtg

SEQ ID NO: 10523 - RNA, 19 nt, synthetic construct
  source 1..19: mol_type = other RNA
agccttgaggcctgcacct

SEQ ID NO: 10524 - RNA, 19 nt, synthetic construct
  source 1..19: mol_type = other RNA
cttgaggcctgcacctgca

SEQ ID NO: 10525 - RNA, 19 nt, synthetic construct
  source 1..19: mol_type = other RNA
ggaaggctgtggcatgtcc

SEQ ID NO: 10526 - RNA, 19 nt, synthetic construct
  source 1..19: mol_type = other RNA
ccacgacaagcccggccct

SEQ ID NO: 10527 - RNA, 19 nt, synthetic construct
  source 1..19: mol_type = other RNA
cacgacaagcccggccctc

SEQ ID NO: 10528 - RNA, 19 nt, synthetic construct
  source 1..19: mol_type = other RNA
gagctgggccagcaggtgg

SEQ ID NO: 10529 - RNA, 19 nt, synthetic construct
  source 1..19: mol_type = other RNA
agctgggccagcaggtgga

SEQ ID NO: 10530 - RNA, 19 nt, synthetic construct
  source 1..19: mol_type = other RNA
gctgggccagcaggtggac

SEQ ID NO: 10531 - RNA, 19 nt, synthetic construct
  source 1..19: mol_type = other RNA
ctgggccagcaggtggact

SEQ ID NO: 10532 - RNA, 19 nt, synthetic construct
  source 1..19: mol_type = other RNA
cagccctccctcagtgcca

SEQ ID NO: 10533 - RNA, 19 nt, synthetic construct
  source 1..19: mol_type = other RNA
ccctccctcagtgccagca

SEQ ID NO: 10534 - RNA, 19 nt, synthetic construct
  source 1..19: mol_type = other RNA
ccaggtaccaccacctgcc

SEQ ID NO: 10535 - RNA, 19 nt, synthetic construct
  source 1..19: mol_type = other RNA
accaccacctgccagcccc

SEQ ID NO: 10536 - RNA, 19 nt, synthetic construct
  source 1..19: mol_type = other RNA
accacctgccagccccggt

SEQ ID NO: 10537 - RNA, 19 nt, synthetic construct
  source 1..19: mol_type = other RNA
aagtctgaacaacttggag

SEQ ID NO: 10538 - RNA, 19 nt, synthetic construct
  source 1..19: mol_type = other RNA
tcggcctggtgtgcaggaa

SEQ ID NO: 10539 - RNA, 19 nt, synthetic construct
  source 1..19: mol_type = other RNA
tgtgcaggaactgggagca

SEQ ID NO: 10540 - RNA, 19 nt, synthetic construct
  source 1..19: mol_type = other RNA
gagacggccaccaccacca

SEQ ID NO: 10541 - RNA, 19 nt, synthetic construct
  source 1..19: mol_type = other RNA
ccacagcagtccccaccct

SEQ ID NO: 10542 - RNA, 19 nt, synthetic construct
  source 1..19: mol_type = other RNA
cacagcagtccccaccctc

SEQ ID NO: 10543 - RNA, 19 nt, synthetic construct
  source 1..19: mol_type = other RNA
cacagaacccactgtccca

SEQ ID NO: 10544 - RNA, 19 nt, synthetic construct
  source 1..19: mol_type = other RNA
ccactgtcccaggggtggc

SEQ ID NO: 10545 - RNA, 19 nt, synthetic construct
  source 1..19: mol_type = other RNA
agcacagccaccacaccca

SEQ ID NO: 10546 - RNA, 19 nt, synthetic construct
  source 1..19: mol_type = other RNA
gccaccacacccacagcta

SEQ ID NO: 10547 - RNA, 19 nt, synthetic construct
  source 1..19: mol_type = other RNA
acagccaccccctcctcca

SEQ ID NO: 10548 - RNA, 19 nt, synthetic construct
  source 1..19: mol_type = other RNA
cagccaccccctcctccag

SEQ ID NO: 10549 - RNA, 19 nt, synthetic construct
  source 1..19: mol_type = other RNA
agccaccccctcctccagc

SEQ ID NO: 10550 - RNA, 19 nt, synthetic construct
  source 1..19: mol_type = other RNA
ccaccccctcctccagccc

SEQ ID NO: 10551 - RNA, 19 nt, synthetic construct
  source 1..19: mol_type = other RNA
gccaccacacctgcagcca

SEQ ID NO: 10552 - RNA, 19 nt, synthetic construct
  source 1..19: mol_type = other RNA
ccaccacacctgcagccac

SEQ ID NO: 10553 - RNA, 19 nt, synthetic construct
  source 1..19: mol_type = other RNA
caccacacctgcagccacc

SEQ ID NO: 10554 - RNA, 19 nt, synthetic construct
  source 1..19: mol_type = other RNA
accacacctgcagccacca

SEQ ID NO: 10555 - RNA, 19 nt, synthetic construct
  source 1..19: mol_type = other RNA
cacctcgaccctgctgccc

SEQ ID NO: 10556 - RNA, 19 nt, synthetic construct
  source 1..19: mol_type = other RNA
acctcgaccctgctgccca

SEQ ID NO: 10557 - RNA, 19 nt, synthetic construct
  source 1..19: mol_type = other RNA
cctcgaccctgctgcccag

SEQ ID NO: 10558 - RNA, 19 nt, synthetic construct
  source 1..19: mol_type = other RNA
ctcgaccctgctgcccagc

SEQ ID NO: 10559 - RNA, 19 nt, synthetic construct
  source 1..19: mol_type = other RNA
ctgctgcccagcagcccca

SEQ ID NO: 10560 - RNA, 19 nt, synthetic construct
  source 1..19: mol_type = other RNA
gctgcccagcagccccaca

SEQ ID NO: 10561 - RNA, 19 nt, synthetic construct
  source 1..19: mol_type = other RNA
ctgcccagcagccccacat

SEQ ID NO: 10562 - RNA, 19 nt, synthetic construct
  source 1..19: mol_type = other RNA
gcagccccacatcggcccc

SEQ ID NO: 10563 - RNA, 19 nt, synthetic construct
  source 1..19: mol_type = other RNA
gggctgtgagccccagtgt

SEQ ID NO: 10564 - RNA, 19 nt, synthetic construct
  source 1..19: mol_type = other RNA
tgtgagccccagtgtgcct

SEQ ID NO: 10565 - RNA, 19 nt, synthetic construct
  source 1..19: mol_type = other RNA
tctgtgagcagcccctggg

SEQ ID NO: 10566 - RNA, 19 nt, synthetic construct
  source 1..19: mol_type = other RNA
cccaggcccagcctggtgt

SEQ ID NO: 10567 - RNA, 19 nt, synthetic construct
  source 1..19: mol_type = other RNA
caggcccagcctggtgtcc

SEQ ID NO: 10568 - RNA, 19 nt, synthetic construct
  source 1..19: mol_type = other RNA
ggggaagttcaagatgtgc

SEQ ID NO: 10569 - RNA, 19 nt, synthetic construct
  source 1..19: mol_type = other RNA
ctgccccagcaccccggcc

SEQ ID NO: 10570 - RNA, 19 nt, synthetic construct
  source 1..19: mol_type = other RNA
gccccagcaccccggccac

SEQ ID NO: 10571 - RNA, 19 nt, synthetic construct
  source 1..19: mol_type = other RNA
ccccagcaccccggccacc

SEQ ID NO: 10572 - RNA, 19 nt, synthetic construct
  source 1..19: mol_type = other RNA
ccctcctccactccgggga

SEQ ID NO: 10573 - RNA, 19 nt, synthetic construct
  source 1..19: mol_type = other RNA
agcacagccaccacaccca

SEQ ID NO: 10574 - RNA, 19 nt, synthetic construct
  source 1..19: mol_type = other RNA
gccaccacacccacagcta

SEQ ID NO: 10575 - RNA, 19 nt, synthetic construct
  source 1..19: mol_type = other RNA
acagccaccccctcctcca

SEQ ID NO: 10576 - RNA, 19 nt, synthetic construct
  source 1..19: mol_type = other RNA
cagccaccccctcctccag

SEQ ID NO: 10577 - RNA, 19 nt, synthetic construct
  source 1..19: mol_type = other RNA
agccaccccctcctccagc

SEQ ID NO: 10578 - RNA, 19 nt, synthetic construct
  source 1..19: mol_type = other RNA
ccaccccctcctccagccc

SEQ ID NO: 10579 - RNA, 19 nt, synthetic construct
  source 1..19: mol_type = other RNA
gccaccacacctgcagcca

SEQ ID NO: 10580 - RNA, 19 nt, synthetic construct
  source 1..19: mol_type = other RNA
ccaccacacctgcagccac

SEQ ID NO: 10581 - RNA, 19 nt, synthetic construct
  source 1..19: mol_type = other RNA
caccacacctgcagccacc

SEQ ID NO: 10582 - RNA, 19 nt, synthetic construct
  source 1..19: mol_type = other RNA
accacacctgcagccacca

SEQ ID NO: 10583 - RNA, 19 nt, synthetic construct
  source 1..19: mol_type = other RNA
gccacctccaggaccacgg

SEQ ID NO: 10584 - RNA, 19 nt, synthetic construct
  source 1..19: mol_type = other RNA
ccacctccaggaccacggc

SEQ ID NO: 10585 - RNA, 19 nt, synthetic construct
  source 1..19: mol_type = other RNA
cacctcgaccctgctgccc

SEQ ID NO: 10586 - RNA, 19 nt, synthetic construct
  source 1..19: mol_type = other RNA
acctcgaccctgctgccca

SEQ ID NO: 10587 - RNA, 19 nt, synthetic construct
  source 1..19: mol_type = other RNA
cctcgaccctgctgcccag

SEQ ID NO: 10588 - RNA, 19 nt, synthetic construct
  source 1..19: mol_type = other RNA
ctcgaccctgctgcccagc

SEQ ID NO: 10589 - RNA, 19 nt, synthetic construct
  source 1..19: mol_type = other RNA
ctgctgcccagcagcccca

SEQ ID NO: 10590 - RNA, 19 nt, synthetic construct
  source 1..19: mol_type = other RNA
gctgcccagcagccccaca

SEQ ID NO: 10591 - RNA, 19 nt, synthetic construct
  source 1..19: mol_type = other RNA
ctgcccagcagccccacat

SEQ ID NO: 10592 - RNA, 19 nt, synthetic construct
  source 1..19: mol_type = other RNA
gggctgtgagccccagtgt

SEQ ID NO: 10593 - RNA, 19 nt, synthetic construct
  source 1..19: mol_type = other RNA
tgtgagccccagtgtgcct

SEQ ID NO: 10594 - RNA, 19 nt, synthetic construct
  source 1..19: mol_type = other RNA
tctgtgagcagcccctggg

SEQ ID NO: 10595 - RNA, 19 nt, synthetic construct
  source 1..19: mol_type = other RNA
cccaggcccagcctggtgt

SEQ ID NO: 10596 - RNA, 19 nt, synthetic construct
  source 1..19: mol_type = other RNA
caggcccagcctggtgtcc

SEQ ID NO: 10597 - RNA, 19 nt, synthetic construct
  source 1..19: mol_type = other RNA
ggggaagttcaagatgtgc

SEQ ID NO: 10598 - RNA, 19 nt, synthetic construct
  source 1..19: mol_type = other RNA
ctgccccagcaccccggcc

SEQ ID NO: 10599 - RNA, 19 nt, synthetic construct
  source 1..19: mol_type = other RNA
gccccagcaccccggccac

SEQ ID NO: 10600 - RNA, 19 nt, synthetic construct
  source 1..19: mol_type = other RNA
ccccagcaccccggccacc

SEQ ID NO: 10601 - RNA, 19 nt, synthetic construct
  source 1..19: mol_type = other RNA
cggccacgccctcctccac

SEQ ID NO: 10602 - RNA, 19 nt, synthetic construct
  source 1..19: mol_type = other RNA
ggccacgccctcctccact

SEQ ID NO: 10603 - RNA, 19 nt, synthetic construct
  source 1..19: mol_type = other RNA
ccctcctccactccgggga

SEQ ID NO: 10604 - RNA, 19 nt, synthetic construct
  source 1..19: mol_type = other RNA
agcacagccaccacaccca

SEQ ID NO: 10605 - RNA, 19 nt, synthetic construct
  source 1..19: mol_type = other RNA
gccaccacacccacagcta

SEQ ID NO: 10606 - RNA, 19 nt, synthetic construct
  source 1..19: mol_type = other RNA
acagccaccccctcctcca

SEQ ID NO: 10607 - RNA, 19 nt, synthetic construct
  source 1..19: mol_type = other RNA
cagccaccccctcctccag

SEQ ID NO: 10608 - RNA, 19 nt, synthetic construct
  source 1..19: mol_type = other RNA
agccaccccctcctccagc

SEQ ID NO: 10609 - RNA, 19 nt, synthetic construct
  source 1..19: mol_type = other RNA
ccaccccctcctccagccc

SEQ ID NO: 10610 - RNA, 19 nt, synthetic construct
  source 1..19: mol_type = other RNA
gccaccacacctgcagcca

SEQ ID NO: 10611 - RNA, 19 nt, synthetic construct
  source 1..19: mol_type = other RNA
ccaccacacctgcagccac

SEQ ID NO: 10612 - RNA, 19 nt, synthetic construct
  source 1..19: mol_type = other RNA
caccacacctgcagccacc

SEQ ID NO: 10613 - RNA, 19 nt, synthetic construct
  source 1..19: mol_type = other RNA
accacacctgcagccacca

SEQ ID NO: 10614 - RNA, 19 nt, synthetic construct
  source 1..19: mol_type = other RNA
cacctcgaccctgctgccc

SEQ ID NO: 10615 - RNA, 19 nt, synthetic construct
  source 1..19: mol_type = other RNA
acctcgaccctgctgccca

SEQ ID NO: 10616 - RNA, 19 nt, synthetic construct
  source 1..19: mol_type = other RNA
cctcgaccctgctgcccag

SEQ ID NO: 10617 - RNA, 19 nt, synthetic construct
  source 1..19: mol_type = other RNA
ctcgaccctgctgcccagc

SEQ ID NO: 10618 - RNA, 19 nt, synthetic construct
  source 1..19: mol_type = other RNA
ctgctgcccagcagcccca

SEQ ID NO: 10619 - RNA, 19 nt, synthetic construct
  source 1..19: mol_type = other RNA
gctgcccagcagccccaca

SEQ ID NO: 10620 - RNA, 19 nt, synthetic construct
  source 1..19: mol_type = other RNA
ctgcccagcagccccacat

SEQ ID NO: 10621 - RNA, 19 nt, synthetic construct
  source 1..19: mol_type = other RNA
gcagccccacatcggcccc

SEQ ID NO: 10622 - RNA, 19 nt, synthetic construct
  source 1..19: mol_type = other RNA
gggctgtgagccccagtgt

SEQ ID NO: 10623 - RNA, 19 nt, synthetic construct
  source 1..19: mol_type = other RNA
tgtgagccccagtgtgcct

SEQ ID NO: 10624 - RNA, 19 nt, synthetic construct
  source 1..19: mol_type = other RNA
tctgtgagcagcccctggg

SEQ ID NO: 10625 - RNA, 19 nt, synthetic construct
  source 1..19: mol_type = other RNA
cccaggcccagcctggtgt

SEQ ID NO: 10626 - RNA, 19 nt, synthetic construct
  source 1..19: mol_type = other RNA
caggcccagcctggtgtcc

SEQ ID NO: 10627 - RNA, 19 nt, synthetic construct
  source 1..19: mol_type = other RNA
ggggaagttcaagatgtgc

SEQ ID NO: 10628 - RNA, 19 nt, synthetic construct
  source 1..19: mol_type = other RNA
ctgccccagcaccccggcc

SEQ ID NO: 10629 - RNA, 19 nt, synthetic construct
  source 1..19: mol_type = other RNA
gccccagcaccccggccac

SEQ ID NO: 10630 - RNA, 19 nt, synthetic construct
  source 1..19: mol_type = other RNA
ccccagcaccccggccacc

SEQ ID NO: 10631 - RNA, 19 nt, synthetic construct
  source 1..19: mol_type = other RNA
agcacagccaccacaccca

SEQ ID NO: 10632 - RNA, 19 nt, synthetic construct
  source 1..19: mol_type = other RNA
gccaccacacccacagcta

SEQ ID NO: 10633 - RNA, 19 nt, synthetic construct
  source 1..19: mol_type = other RNA
gccaccacacctgcagcca

SEQ ID NO: 10634 - RNA, 19 nt, synthetic construct
  source 1..19: mol_type = other RNA
ccaccacacctgcagccac

SEQ ID NO: 10635 - RNA, 19 nt, synthetic construct
  source 1..19: mol_type = other RNA
caccacacctgcagccacc

SEQ ID NO: 10636 - RNA, 19 nt, synthetic construct
  source 1..19: mol_type = other RNA
accacacctgcagccacca

SEQ ID NO: 10637 - RNA, 19 nt, synthetic construct
  source 1..19: mol_type = other RNA
cggccacctccaggaccac

SEQ ID NO: 10638 - RNA, 19 nt, synthetic construct
  source 1..19: mol_type = other RNA
gccacctccaggaccacgg

SEQ ID NO: 10639 - RNA, 19 nt, synthetic construct
  source 1..19: mol_type = other RNA
ccacctccaggaccacggc

SEQ ID NO: 10640 - RNA, 19 nt, synthetic construct
  source 1..19: mol_type = other RNA
cacctcgaccctgctgccc

SEQ ID NO: 10641 - RNA, 19 nt, synthetic construct
  source 1..19: mol_type = other RNA
acctcgaccctgctgccca

SEQ ID NO: 10642 - RNA, 19 nt, synthetic construct
  source 1..19: mol_type = other RNA
cctcgaccctgctgcccag

SEQ ID NO: 10643 - RNA, 19 nt, synthetic construct
  source 1..19: mol_type = other RNA
ctcgaccctgctgcccagc

SEQ ID NO: 10644 - RNA, 19 nt, synthetic construct
  source 1..19: mol_type = other RNA
ctgctgcccagcagcccca

SEQ ID NO: 10645 - RNA, 19 nt, synthetic construct
  source 1..19: mol_type = other RNA
gctgcccagcagccccaca

SEQ ID NO: 10646 - RNA, 19 nt, synthetic construct
  source 1..19: mol_type = other RNA
ctgcccagcagccccacat

SEQ ID NO: 10647 - RNA, 19 nt, synthetic construct
  source 1..19: mol_type = other RNA
gcagccccacatcggcccc

SEQ ID NO: 10648 - RNA, 19 nt, synthetic construct
  source 1..19: mol_type = other RNA
gggctgtgagccccagtgt

SEQ ID NO: 10649 - RNA, 19 nt, synthetic construct
  source 1..19: mol_type = other RNA
tgtgagccccagtgtgcct

SEQ ID NO: 10650 - RNA, 19 nt, synthetic construct
  source 1..19: mol_type = other RNA
tctgtgagcagcccctggg

SEQ ID NO: 10651 - RNA, 19 nt, synthetic construct
  source 1..19: mol_type = other RNA
cccaggcccagcctggtgt

SEQ ID NO: 10652 - RNA, 19 nt, synthetic construct
  source 1..19: mol_type = other RNA
caggcccagcctggtgtcc

SEQ ID NO: 10653 - RNA, 19 nt, synthetic construct
  source 1..19: mol_type = other RNA
ggggaagttcaagatgtgc

SEQ ID NO: 10654 - RNA, 19 nt, synthetic construct
  source 1..19: mol_type = other RNA
ctgccccagcaccccggcc

SEQ ID NO: 10655 - RNA, 19 nt, synthetic construct
  source 1..19: mol_type = other RNA
gccccagcaccccggccac

SEQ ID NO: 10656 - RNA, 19 nt, synthetic construct
  source 1..19: mol_type = other RNA
ccccagcaccccggccacc

SEQ ID NO: 10657 - RNA, 19 nt, synthetic construct
  source 1..19: mol_type = other RNA
ccctcctccactccgggga

SEQ ID NO: 10658 - RNA, 19 nt, synthetic construct
  source 1..19: mol_type = other RNA
ccctcctccactccgggga

SEQ ID NO: 10659 - RNA, 19 nt, synthetic construct
  source 1..19: mol_type = other RNA
agcacagccaccacaccca

SEQ ID NO: 10660 - RNA, 19 nt, synthetic construct
  source 1..19: mol_type = other RNA
gccaccacacccacagcta

SEQ ID NO: 10661 - RNA, 19 nt, synthetic construct
  source 1..19: mol_type = other RNA
acagccaccccctcctcca

SEQ ID NO: 10662 - RNA, 19 nt, synthetic construct
  source 1..19: mol_type = other RNA
cagccaccccctcctccag

SEQ ID NO: 10663 - RNA, 19 nt, synthetic construct
  source 1..19: mol_type = other RNA
agccaccccctcctccagc

SEQ ID NO: 10664 - RNA, 19 nt, synthetic construct
  source 1..19: mol_type = other RNA
ccaccccctcctccagccc

SEQ ID NO: 10665 - RNA, 19 nt, synthetic construct
  source 1..19: mol_type = other RNA
ggccacaccctcctccact

SEQ ID NO: 10666 - RNA, 19 nt, synthetic construct
  source 1..19: mol_type = other RNA
ccacaccctcctccactct

SEQ ID NO: 10667 - RNA, 19 nt, synthetic construct
  source 1..19: mol_type = other RNA
cagtgctccccagcagcct

SEQ ID NO: 10668 - RNA, 19 nt, synthetic construct
  source 1..19: mol_type = other RNA
gtgctccccagcagcctgc

SEQ ID NO: 10669 - RNA, 19 nt, synthetic construct
  source 1..19: mol_type = other RNA
gtccactgtgtcctcctca

SEQ ID NO: 10670 - RNA, 19 nt, synthetic construct
  source 1..19: mol_type = other RNA
ctgtgtcctcctcagtcct

SEQ ID NO: 10671 - RNA, 19 nt, synthetic construct
  source 1..19: mol_type = other RNA
tccccagctcccacttctc

SEQ ID NO: 10672 - RNA, 19 nt, synthetic construct
  source 1..19: mol_type = other RNA
acttctctactccctgctt

SEQ ID NO: 10673 - RNA, 19 nt, synthetic construct
  source 1..19: mol_type = other RNA
tactccctgcttctgcagg

SEQ ID NO: 10674 - RNA, 19 nt, synthetic construct
  source 1..19: mol_type = other RNA
actccctgcttctgcaggg

SEQ ID NO: 10675 - RNA, 19 nt, synthetic construct
  source 1..19: mol_type = other RNA
tccctgcttctgcagggca

SEQ ID NO: 10676 - RNA, 19 nt, synthetic construct
  source 1..19: mol_type = other RNA
ctgcttctgcagggcattt

SEQ ID NO: 10677 - RNA, 19 nt, synthetic construct
  source 1..19: mol_type = other RNA
ccctcccctgcccctggct

SEQ ID NO: 10678 - RNA, 19 nt, synthetic construct
  source 1..19: mol_type = other RNA
cctcccctgcccctggctg

SEQ ID NO: 10679 - RNA, 19 nt, synthetic construct
  source 1..19: mol_type = other RNA
ctcccctgcccctggctgt

SEQ ID NO: 10680 - RNA, 19 nt, synthetic construct
  source 1..19: mol_type = other RNA
cccctggctgtgacaatgc

SEQ ID NO: 10681 - RNA, 19 nt, synthetic construct
  source 1..19: mol_type = other RNA
gacctggaccctggagaac

SEQ ID NO: 10682 - RNA, 19 nt, synthetic construct
  source 1..19: mol_type = other RNA
actgcacggtggccaggtg

SEQ ID NO: 10683 - RNA, 19 nt, synthetic construct
  source 1..19: mol_type = other RNA
atcctgtttgaccaaattc

SEQ ID NO: 10684 - RNA, 19 nt, synthetic construct
  source 1..19: mol_type = other RNA
tccaggcccggctgcccta

SEQ ID NO: 10685 - RNA, 19 nt, synthetic construct
  source 1..19: mol_type = other RNA
ctctgtgatctgatgctga

SEQ ID NO: 10686 - RNA, 19 nt, synthetic construct
  source 1..19: mol_type = other RNA
tgatctgatgctgagccag

SEQ ID NO: 10687 - RNA, 19 nt, synthetic construct
  source 1..19: mol_type = other RNA
tgccctgccagagcctgga

SEQ ID NO: 10688 - RNA, 19 nt, synthetic construct
  source 1..19: mol_type = other RNA
gccctgccagagcctggag

SEQ ID NO: 10689 - RNA, 19 nt, synthetic construct
  source 1..19: mol_type = other RNA
caactgccagtcctgcgtg

SEQ ID NO: 10690 - RNA, 19 nt, synthetic construct
  source 1..19: mol_type = other RNA
cctctctggggacacccag

SEQ ID NO: 10691 - RNA, 19 nt, synthetic construct
  source 1..19: mol_type = other RNA
ctctctggggacacccagg

SEQ ID NO: 10692 - RNA, 19 nt, synthetic construct
  source 1..19: mol_type = other RNA
ccagggctttgagtacaag

SEQ ID NO: 10693 - RNA, 19 nt, synthetic construct
  source 1..19: mol_type = other RNA
ccgggcagtgctgtgggga

SEQ ID NO: 10694 - RNA, 19 nt, synthetic construct
  source 1..19: mol_type = other RNA
atttgctgaccccacagcc

SEQ ID NO: 10695 - RNA, 19 nt, synthetic construct
  source 1..19: mol_type = other RNA
gctgaccccacagcctgca

SEQ ID NO: 10696 - RNA, 19 nt, synthetic construct
  source 1..19: mol_type = other RNA
tgaccccacagcctgcatc

SEQ ID NO: 10697 - RNA, 19 nt, synthetic construct
  source 1..19: mol_type = other RNA
accccacagcctgcatcct

SEQ ID NO: 10698 - RNA, 19 nt, synthetic construct
  source 1..19: mol_type = other RNA
ccccacagcctgcatcctg

SEQ ID NO: 10699 - RNA, 19 nt, synthetic construct
  source 1..19: mol_type = other RNA
tgtccagctgcagggggag

SEQ ID NO: 10700 - RNA, 19 nt, synthetic construct
  source 1..19: mol_type = other RNA
ccagctgcagggggagcct

SEQ ID NO: 10701 - RNA, 19 nt, synthetic construct
  source 1..19: mol_type = other RNA
cagggggagcctcaggaaa

SEQ ID NO: 10702 - RNA, 19 nt, synthetic construct
  source 1..19: mol_type = other RNA
cagaggcccaggccatgca

SEQ ID NO: 10703 - RNA, 19 nt, synthetic construct
  source 1..19: mol_type = other RNA
gaggcccaggccatgcagc

SEQ ID NO: 10704 - RNA, 19 nt, synthetic construct
  source 1..19: mol_type = other RNA
aggcccaggccatgcagca

SEQ ID NO: 10705 - RNA, 19 nt, synthetic construct
  source 1..19: mol_type = other RNA
ggccatgcagcaccagtgc

SEQ ID NO: 10706 - RNA, 19 nt, synthetic construct
  source 1..19: mol_type = other RNA
gcaccagtgcacctgctgc

SEQ ID NO: 10707 - RNA, 19 nt, synthetic construct
  source 1..19: mol_type = other RNA
accagtgcacctgctgcca

SEQ ID NO: 10708 - RNA, 19 nt, synthetic construct
  source 1..19: mol_type = other RNA
gtgcacctgctgccaggag

SEQ ID NO: 10709 - RNA, 19 nt, synthetic construct
  source 1..19: mol_type = other RNA
gtctgtcccccggggctgg

SEQ ID NO: 10710 - RNA, 19 nt, synthetic construct
  source 1..19: mol_type = other RNA
ccagtttgggaacctgcag

SEQ ID NO: 10711 - RNA, 19 nt, synthetic construct
  source 1..19: mol_type = other RNA
gtgtccccctgcgggagtt

SEQ ID NO: 10712 - RNA, 19 nt, synthetic construct
  source 1..19: mol_type = other RNA
gtgtccccctgcgggagtt

SEQ ID NO: 10713 - RNA, 19 nt, synthetic construct
  source 1..19: mol_type = other RNA
gtgtccccctgcgggagtt

SEQ ID NO: 10714 - RNA, 19 nt, synthetic construct
  source 1..19: mol_type = other RNA
acagcctgcatcctgccca

SEQ ID NO: 10715 - RNA, 19 nt, synthetic construct
  source 1..19: mol_type = other RNA
agtgggcactgcctggtgg

SEQ ID NO: 10716 - RNA, 19 nt, synthetic construct
  source 1..19: mol_type = other RNA
cccctcctccagcccaggg

SEQ ID NO: 10717 - RNA, 19 nt, synthetic construct
  source 1..19: mol_type = other RNA
cccctcctccagcccaggg

SEQ ID NO: 10718 - RNA, 19 nt, synthetic construct
  source 1..19: mol_type = other RNA
cccctcctccagcccaggg

SEQ ID NO: 10719 - RNA, 19 nt, synthetic construct
  source 1..19: mol_type = other RNA
cccctcctccagcccaggg

SEQ ID NO: 10720 - RNA, 19 nt, synthetic construct
  source 1..19: mol_type = other RNA
cccctcctccagcccaggg

SEQ ID NO: 10721 - RNA, 19 nt, synthetic construct
  source 1..19: mol_type = other RNA
gtccagctgcagggggagc

SEQ ID NO: 10722 - RNA, 19 nt, synthetic construct
  source 1..19: mol_type = other RNA
tgagacctggaccctggag

SEQ ID NO: 10723 - RNA, 19 nt, synthetic construct
  source 1..19: mol_type = other RNA
ggctgtggctgcctacgcc

SEQ ID NO: 10724 - RNA, 19 nt, synthetic construct
  source 1..19: mol_type = other RNA
atgagacctggaccctgga

SEQ ID NO: 10725 - RNA, 19 nt, synthetic construct
  source 1..19: mol_type = other RNA
caccggctctgcctgggca

SEQ ID NO: 10726 - RNA, 19 nt, synthetic construct
  source 1..19: mol_type = other RNA
accggctctgcctgggcac

SEQ ID NO: 10727 - RNA, 19 nt, synthetic construct
  source 1..19: mol_type = other RNA
ctctggggacacccaggac

SEQ ID NO: 10728 - RNA, 19 nt, synthetic construct
  source 1..19: mol_type = other RNA
caccacctgcagctcctgc

SEQ ID NO: 10729 - RNA, 19 nt, synthetic construct
  source 1..19: mol_type = other RNA
accacctgcagctcctgca

SEQ ID NO: 10730 - RNA, 19 nt, synthetic construct
  source 1..19: mol_type = other RNA
tctggggacacccaggacc

SEQ ID NO: 10731 - RNA, 19 nt, synthetic construct
  source 1..19: mol_type = other RNA
agctgcagggggagcctca

SEQ ID NO: 10732 - RNA, 19 nt, synthetic construct
  source 1..19: mol_type = other RNA
gggatcttcctggtcatcg

SEQ ID NO: 10733 - RNA, 19 nt, synthetic construct
  source 1..19: mol_type = other RNA
ggcaccctgcctaaaaacc

SEQ ID NO: 10734 - RNA, 19 nt, synthetic construct
  source 1..19: mol_type = other RNA
tgtctgtcccccggggctg

SEQ ID NO: 10735 - RNA, 19 nt, synthetic construct
  source 1..19: mol_type = other RNA
gccgctggtccagctggta

SEQ ID NO: 10736 - RNA, 19 nt, synthetic construct
  source 1..19: mol_type = other RNA
gtgcggcacctgcaccaac

SEQ ID NO: 10737 - RNA, 19 nt, synthetic construct
  source 1..19: mol_type = other RNA
ccgctggtccagctggtac

SEQ ID NO: 10738 - RNA, 19 nt, synthetic construct
  source 1..19: mol_type = other RNA
ggccagtgcggcacctgca

SEQ ID NO: 10739 - RNA, 19 nt, synthetic construct
  source 1..19: mol_type = other RNA
gctgtgtctgtcccccggg

SEQ ID NO: 10740 - RNA, 19 nt, synthetic construct
  source 1..19: mol_type = other RNA
tctgtcccccggggctggt

SEQ ID NO: 10741 - RNA, 19 nt, synthetic construct
  source 1..19: mol_type = other RNA
gtctgcggcctgtgcggga

SEQ ID NO: 10742 - RNA, 19 nt, synthetic construct
  source 1..19: mol_type = other RNA
ttccccagcctgagccccc

SEQ ID NO: 10743 - RNA, 19 nt, synthetic construct
  source 1..19: mol_type = other RNA
cagtgccctgctggagctg

SEQ ID NO: 10744 - RNA, 19 nt, synthetic construct
  source 1..19: mol_type = other RNA
cagtttgggaacctgcaga

SEQ ID NO: 10745 - RNA, 19 nt, synthetic construct
  source 1..19: mol_type = other RNA
agtttgggaacctgcagaa

SEQ ID NO: 10746 - RNA, 19 nt, synthetic construct
  source 1..19: mol_type = other RNA
aacaccacctgcagctcct

SEQ ID NO: 10747 - RNA, 19 nt, synthetic construct
  source 1..19: mol_type = other RNA
ccagggccagatgtgcggc

SEQ ID NO: 10748 - RNA, 19 nt, synthetic construct
  source 1..19: mol_type = other RNA
gctctgcctgggcacctgc

SEQ ID NO: 10749 - RNA, 19 nt, synthetic construct
  source 1..19: mol_type = other RNA
cagggtctgcggcctgtgc

SEQ ID NO: 10750 - RNA, 19 nt, synthetic construct
  source 1..19: mol_type = other RNA
gggtctgcggcctgtgcgg

SEQ ID NO: 10751 - RNA, 19 nt, synthetic construct
  source 1..19: mol_type = other RNA
gccctgcggggcaccctgc

SEQ ID NO: 10752 - RNA, 19 nt, synthetic construct
  source 1..19: mol_type = other RNA
cctcgccctcccctgcccc

SEQ ID NO: 10753 - RNA, 19 nt, synthetic construct
  source 1..19: mol_type = other RNA
accggctgctgctactcct

SEQ ID NO: 10754 - RNA, 19 nt, synthetic construct
  source 1..19: mol_type = other RNA
ctacacgcagctgcccctg

SEQ ID NO: 10755 - RNA, 19 nt, synthetic construct
  source 1..19: mol_type = other RNA
gcctctctggggacaccca

SEQ ID NO: 10756 - RNA, 19 nt, synthetic construct
  source 1..19: mol_type = other RNA
acggccacgccctcctcca

SEQ ID NO: 10757 - RNA, 19 nt, synthetic construct
  source 1..19: mol_type = other RNA
gcagccaccggctctgcct

SEQ ID NO: 10758 - RNA, 19 nt, synthetic construct
  source 1..19: mol_type = other RNA
acccagccagcccttcttc

SEQ ID NO: 10759 - RNA, 19 nt, synthetic construct
  source 1..19: mol_type = other RNA
ggccacctccaggaccacg

SEQ ID NO: 10760 - RNA, 19 nt, synthetic construct
  source 1..19: mol_type = other RNA
ggccacctccaggaccacg

SEQ ID NO: 10761 - RNA, 19 nt, synthetic construct
  source 1..19: mol_type = other RNA
cctacagcctcttccacaa

SEQ ID NO: 10762 - RNA, 19 nt, synthetic construct
  source 1..19: mol_type = other RNA
cccagccagcccttcttca

SEQ ID NO: 10763 - RNA, 19 nt, synthetic construct
  source 1..19: mol_type = other RNA
gaggaccagatgaagtgcg

SEQ ID NO: 10764 - RNA, 19 nt, synthetic construct
  source 1..19: mol_type = other RNA
acgggctgtgagccccagt

SEQ ID NO: 10765 - RNA, 19 nt, synthetic construct
  source 1..19: mol_type = other RNA
acgggctgtgagccccagt

SEQ ID NO: 10766 - RNA, 19 nt, synthetic construct
  source 1..19: mol_type = other RNA
gccctcccctgcccctggc

SEQ ID NO: 10767 - RNA, 19 nt, synthetic construct
  source 1..19: mol_type = other RNA
tctacacgcagctgcccct

SEQ ID NO: 10768 - RNA, 19 nt, synthetic construct
  source 1..19: mol_type = other RNA
gagcctctctgcagaaaag

SEQ ID NO: 10769 - RNA, 19 nt, synthetic construct
  source 1..19: mol_type = other RNA
cccacccagccagcccttc

SEQ ID NO: 10770 - RNA, 19 nt, synthetic construct
  source 1..19: mol_type = other RNA
ccacccagccagcccttct

SEQ ID NO: 10771 - RNA, 19 nt, synthetic construct
  source 1..19: mol_type = other RNA
ccagctcccacttctctac

SEQ ID NO: 10772 - RNA, 19 nt, synthetic construct
  source 1..19: mol_type = other RNA
acagcctcttccacaacaa

SEQ ID NO: 10773 - RNA, 19 nt, synthetic construct
  source 1..19: mol_type = other RNA
tgcctctctggggacaccc

SEQ ID NO: 10774 - RNA, 19 nt, synthetic construct
  source 1..19: mol_type = other RNA
ccttcgccgcctgccgctc

SEQ ID NO: 10775 - RNA, 19 nt, synthetic construct
  source 1..19: mol_type = other RNA
gtggatgagtgtggctgca

SEQ ID NO: 10776 - RNA, 19 nt, synthetic construct
  source 1..19: mol_type = other RNA
tgcccagcagccccacatc

SEQ ID NO: 10777 - RNA, 19 nt, synthetic construct
  source 1..19: mol_type = other RNA
tgcccagcagccccacatc

SEQ ID NO: 10778 - RNA, 19 nt, synthetic construct
  source 1..19: mol_type = other RNA
tgcccagcagccccacatc

SEQ ID NO: 10779 - RNA, 19 nt, synthetic construct
  source 1..19: mol_type = other RNA
tgcccagcagccccacatc

SEQ ID NO: 10780 - RNA, 19 nt, synthetic construct
  source 1..19: mol_type = other RNA
cttcgccgcctgccgctcc

SEQ ID NO: 10781 - RNA, 19 nt, synthetic construct
  source 1..19: mol_type = other RNA
gcaggaactgggagcagga

SEQ ID NO: 10782 - RNA, 19 nt, synthetic construct
  source 1..19: mol_type = other RNA
aggaactgggagcaggagg

SEQ ID NO: 10783 - RNA, 19 nt, synthetic construct
  source 1..19: mol_type = other RNA
acaccacctgcagctcctg

SEQ ID NO: 10784 - RNA, 19 nt, synthetic construct
  source 1..19: mol_type = other RNA
ttcgccgcctgccgctccc

SEQ ID NO: 10785 - RNA, 19 nt, synthetic construct
  source 1..19: mol_type = other RNA
cccagcaccccggccacca

SEQ ID NO: 10786 - RNA, 19 nt, synthetic construct
  source 1..19: mol_type = other RNA
cccagcaccccggccacca

SEQ ID NO: 10787 - RNA, 19 nt, synthetic construct
  source 1..19: mol_type = other RNA
cccagcaccccggccacca

SEQ ID NO: 10788 - RNA, 19 nt, synthetic construct
  source 1..19: mol_type = other RNA
cccagcaccccggccacca

SEQ ID NO: 10789 - RNA, 19 nt, synthetic construct
  source 1..19: mol_type = other RNA
cgccctcccctgcccctgg

SEQ ID NO: 10790 - RNA, 19 nt, synthetic construct
  source 1..19: mol_type = other RNA
cccaggccatgcagcacca

SEQ ID NO: 10791 - RNA, 19 nt, synthetic construct
  source 1..19: mol_type = other RNA
ttgaggcctgcacctgcac

SEQ ID NO: 10792 - RNA, 19 nt, synthetic construct
  source 1..19: mol_type = other RNA
cacgcgtagccggtccgtg

SEQ ID NO: 10793 - RNA, 19 nt, synthetic construct
  source 1..19: mol_type = other RNA
accacctggatcctcacag

SEQ ID NO: 10794 - RNA, 19 nt, synthetic construct
  source 1..19: mol_type = other RNA
accacctggatcctcacag

SEQ ID NO: 10795 - RNA, 19 nt, synthetic construct
  source 1..19: mol_type = other RNA
accacctggatcctcacag

SEQ ID NO: 10796 - RNA, 19 nt, synthetic construct
  source 1..19: mol_type = other RNA
accacctggatcctcacag

SEQ ID NO: 10797 - RNA, 19 nt, synthetic construct
  source 1..19: mol_type = other RNA
accacctggatcctcacag

SEQ ID NO: 10798 - RNA, 19 nt, synthetic construct
  source 1..19: mol_type = other RNA
accacctggatcctcacag

SEQ ID NO: 10799 - RNA, 19 nt, synthetic construct
  source 1..19: mol_type = other RNA
ccagcccagttttgcaaat

SEQ ID NO: 10800 - RNA, 19 nt, synthetic construct
  source 1..19: mol_type = other RNA
aaagccccctctgctcaac

SEQ ID NO: 10801 - RNA, 19 nt, synthetic construct
  source 1..19: mol_type = other RNA
acctggatcctcacagagc

SEQ ID NO: 10802 - RNA, 19 nt, synthetic construct
  source 1..19: mol_type = other RNA
acctggatcctcacagagc

SEQ ID NO: 10803 - RNA, 19 nt, synthetic construct
  source 1..19: mol_type = other RNA
acctggatcctcacagagc

SEQ ID NO: 10804 - RNA, 19 nt, synthetic construct
  source 1..19: mol_type = other RNA
acctggatcctcacagagc

SEQ ID NO: 10805 - RNA, 19 nt, synthetic construct
  source 1..19: mol_type = other RNA
acctggatcctcacagagc

SEQ ID NO: 10806 - RNA, 19 nt, synthetic construct
  source 1..19: mol_type = other RNA
agagcctgtggcccacctt

SEQ ID NO: 10807 - RNA, 19 nt, synthetic construct
  source 1..19: mol_type = other RNA
gtggctgcacgcccttctg

SEQ ID NO: 10808 - RNA, 19 nt, synthetic construct
  source 1..19: mol_type = other RNA
ccctctgctcaacccagcc

SEQ ID NO: 10809 - RNA, 19 nt, synthetic construct
  source 1..19: mol_type = other RNA
ccacctggatcctcacaga

SEQ ID NO: 10810 - RNA, 19 nt, synthetic construct
  source 1..19: mol_type = other RNA
ccacctggatcctcacaga

SEQ ID NO: 10811 - RNA, 19 nt, synthetic construct
  source 1..19: mol_type = other RNA
ccacctggatcctcacaga

SEQ ID NO: 10812 - RNA, 19 nt, synthetic construct
  source 1..19: mol_type = other RNA
ccacctggatcctcacaga

SEQ ID NO: 10813 - RNA, 19 nt, synthetic construct
  source 1..19: mol_type = other RNA
ccacctggatcctcacaga

SEQ ID NO: 10814 - RNA, 19 nt, synthetic construct
  source 1..19: mol_type = other RNA
ccacctggatcctcacaga

SEQ ID NO: 10815 - RNA, 19 nt, synthetic construct
  source 1..19: mol_type = other RNA
gccccctctgctcaaccca

SEQ ID NO: 10816 - RNA, 19 nt, synthetic construct
  source 1..19: mol_type = other RNA
aacccagcccagttttgca

SEQ ID NO: 10817 - RNA, 19 nt, synthetic construct
  source 1..19: mol_type = other RNA
gaccacctggatcctcaca

SEQ ID NO: 10818 - RNA, 19 nt, synthetic construct
  source 1..19: mol_type = other RNA
gaccacctggatcctcaca

SEQ ID NO: 10819 - RNA, 19 nt, synthetic construct
  source 1..19: mol_type = other RNA
gaccacctggatcctcaca

SEQ ID NO: 10820 - RNA, 19 nt, synthetic construct
  source 1..19: mol_type = other RNA
gaccacctggatcctcaca

SEQ ID NO: 10821 - RNA, 19 nt, synthetic construct
  source 1..19: mol_type = other RNA
gaccacctggatcctcaca

SEQ ID NO: 10822 - RNA, 19 nt, synthetic construct
  source 1..19: mol_type = other RNA
gaccacctggatcctcaca

SEQ ID NO: 10823 - RNA, 19 nt, synthetic construct
  source 1..19: mol_type = other RNA
ttcaagatgtgcttcaact

SEQ ID NO: 10824 - RNA, 19 nt, synthetic construct
  source 1..19: mol_type = other RNA
ttcaagatgtgcttcaact

SEQ ID NO: 10825 - RNA, 19 nt, synthetic construct
  source 1..19: mol_type = other RNA
ttcaagatgtgcttcaact

SEQ ID NO: 10826 - RNA, 19 nt, synthetic construct
  source 1..19: mol_type = other RNA
ttcaagatgtgcttcaact

SEQ ID NO: 10827 - RNA, 19 nt, synthetic construct
  source 1..19: mol_type = other RNA
ttcagcgtgtccactgtgt

SEQ ID NO: 10828 - RNA, 19 nt, synthetic construct
  source 1..19: mol_type = other RNA
caagatgtgcttcaactat

SEQ ID NO: 10829 - RNA, 19 nt, synthetic construct
  source 1..19: mol_type = other RNA
caagatgtgcttcaactat

SEQ ID NO: 10830 - RNA, 19 nt, synthetic construct
  source 1..19: mol_type = other RNA
caagatgtgcttcaactat

SEQ ID NO: 10831 - RNA, 19 nt, synthetic construct
  source 1..19: mol_type = other RNA
caagatgtgcttcaactat

SEQ ID NO: 10832 - RNA, 19 nt, synthetic construct
  source 1..19: mol_type = other RNA
tgtggctgcacgcccttct

SEQ ID NO: 10833 - RNA, 19 nt, synthetic construct
  source 1..19: mol_type = other RNA
acctgcccatcaaagtgtc

SEQ ID NO: 10834 - RNA, 19 nt, synthetic construct
  source 1..19: mol_type = other RNA
agccccctctgctcaaccc

SEQ ID NO: 10835 - RNA, 19 nt, synthetic construct
  source 1..19: mol_type = other RNA
acccagcccagttttgcaa

SEQ ID NO: 10836 - RNA, 19 nt, synthetic construct
  source 1..19: mol_type = other RNA
ccatcaaagtgtcggaccc

SEQ ID NO: 10837 - RNA, 19 nt, synthetic construct
  source 1..19: mol_type = other RNA
cacctgcccatcaaagtgt

SEQ ID NO: 10838 - RNA, 19 nt, synthetic construct
  source 1..19: mol_type = other RNA
gctctgccgcgcccgggga

SEQ ID NO: 10839 - RNA, 19 nt, synthetic construct
  source 1..19: mol_type = other RNA
aagccccctctgctcaacc

SEQ ID NO: 10840 - RNA, 19 nt, synthetic construct
  source 1..19: mol_type = other RNA
atcaaagtgtcggacccga

SEQ ID NO: 10841 - RNA, 19 nt, synthetic construct
  source 1..19: mol_type = other RNA
ccatgctctgtccacctgg

SEQ ID NO: 10842 - RNA, 19 nt, synthetic construct
  source 1..19: mol_type = other RNA
atgagtgtggctgcacgcc

SEQ ID NO: 10843 - RNA, 19 nt, synthetic construct
  source 1..19: mol_type = other RNA
gcctccatccccatgctct

SEQ ID NO: 10844 - RNA, 19 nt, synthetic construct
  source 1..19: mol_type = other RNA
cccctctgctcaacccagc

SEQ ID NO: 10845 - RNA, 19 nt, synthetic construct
  source 1..19: mol_type = other RNA
tgagtgtggctgcacgccc

SEQ ID NO: 10846 - RNA, 19 nt, synthetic construct
  source 1..19: mol_type = other RNA
gcatcccaaagccccctct

SEQ ID NO: 10847 - RNA, 19 nt, synthetic construct
  source 1..19: mol_type = other RNA
gggaccacctggatcctca

SEQ ID NO: 10848 - RNA, 19 nt, synthetic construct
  source 1..19: mol_type = other RNA
gggaccacctggatcctca

SEQ ID NO: 10849 - RNA, 19 nt, synthetic construct
  source 1..19: mol_type = other RNA
gggaccacctggatcctca

SEQ ID NO: 10850 - RNA, 19 nt, synthetic construct
  source 1..19: mol_type = other RNA
gggaccacctggatcctca

SEQ ID NO: 10851 - RNA, 19 nt, synthetic construct
  source 1..19: mol_type = other RNA
gggaccacctggatcctca

SEQ ID NO: 10852 - RNA, 19 nt, synthetic construct
  source 1..19: mol_type = other RNA
gggaccacctggatcctca

SEQ ID NO: 10853 - RNA, 19 nt, synthetic construct
  source 1..19: mol_type = other RNA
tctgctcaacccagcccag

SEQ ID NO: 10854 - RNA, 19 nt, synthetic construct
  source 1..19: mol_type = other RNA
agacaggctggtccaggca

SEQ ID NO: 10855 - RNA, 19 nt, synthetic construct
  source 1..19: mol_type = other RNA
cgacctggatcctcacaga

SEQ ID NO: 10856 - RNA, 19 nt, synthetic construct
  source 1..19: mol_type = other RNA
agggaccacctggatcctc

SEQ ID NO: 10857 - RNA, 19 nt, synthetic construct
  source 1..19: mol_type = other RNA
cgacctggatcctcacaga

SEQ ID NO: 10858 - RNA, 19 nt, synthetic construct
  source 1..19: mol_type = other RNA
cgacctggatcctcacaga

SEQ ID NO: 10859 - RNA, 19 nt, synthetic construct
  source 1..19: mol_type = other RNA
agggaccacctggatcctc

SEQ ID NO: 10860 - RNA, 19 nt, synthetic construct
  source 1..19: mol_type = other RNA
agggaccacctggatcctc

SEQ ID NO: 10861 - RNA, 19 nt, synthetic construct
  source 1..19: mol_type = other RNA
cgacctggatcctcacaga

SEQ ID NO: 10862 - RNA, 19 nt, synthetic construct
  source 1..19: mol_type = other RNA
cgacctggatcctcacaga

SEQ ID NO: 10863 - RNA, 19 nt, synthetic construct
  source 1..19: mol_type = other RNA
agggaccacctggatcctc

SEQ ID NO: 10864 - RNA, 19 nt, synthetic construct
  source 1..19: mol_type = other RNA
agggaccacctggatcctc

SEQ ID NO: 10865 - RNA, 19 nt, synthetic construct
  source 1..19: mol_type = other RNA
agggaccacctggatcctc

SEQ ID NO: 10866 - RNA, 19 nt, synthetic construct
  source 1..19: mol_type = other RNA
ctgcccacccaccaaagtg

SEQ ID NO: 10867 - RNA, 19 nt, synthetic construct
  source 1..19: mol_type = other RNA
tgtcggtgcagtgcaagcc

SEQ ID NO: 10868 - RNA, 19 nt, synthetic construct
  source 1..19: mol_type = other RNA
ccccatgctctgtccacct

SEQ ID NO: 10869 - RNA, 19 nt, synthetic construct
  source 1..19: mol_type = other RNA
gctctgtccacctggagcc

SEQ ID NO: 10870 - RNA, 19 nt, synthetic construct
  source 1..19: mol_type = other RNA
gatcatgaaaaccttgggc

SEQ ID NO: 10871 - RNA, 19 nt, synthetic construct
  source 1..19: mol_type = other RNA
gacaggctggtccaggcaa

SEQ ID NO: 10872 - RNA, 19 nt, synthetic construct
  source 1..19: mol_type = other RNA
caggctggtccaggcaagg

SEQ ID NO: 10873 - RNA, 19 nt, synthetic construct
  source 1..19: mol_type = other RNA
ctcaacccagcccagtttt

SEQ ID NO: 10874 - RNA, 19 nt, synthetic construct
  source 1..19: mol_type = other RNA
agcgtgtccactgtgtcct

SEQ ID NO: 10875 - RNA, 19 nt, synthetic construct
  source 1..19: mol_type = other RNA
atgctctgtccacctggag

SEQ ID NO: 10876 - RNA, 19 nt, synthetic construct
  source 1..19: mol_type = other RNA
ggcccaccttggccttgcc

SEQ ID NO: 10877 - RNA, 19 nt, synthetic construct
  source 1..19: mol_type = other RNA
ccaaagccccctctgctca

SEQ ID NO: 10878 - RNA, 19 nt, synthetic construct
  source 1..19: mol_type = other RNA
gctggtgttggctctggcg

SEQ ID NO: 10879 - RNA, 19 nt, synthetic construct
  source 1..19: mol_type = other RNA
ctcctccactccagggacg

SEQ ID NO: 10880 - RNA, 19 nt, synthetic construct
  source 1..19: mol_type = other RNA
ctccatccccatgctctgt

SEQ ID NO: 10881 - RNA, 19 nt, synthetic construct
  source 1..19: mol_type = other RNA
tctgccgcgcccggggagt

SEQ ID NO: 10882 - RNA, 19 nt, synthetic construct
  source 1..19: mol_type = other RNA
accacacccacagccacca

SEQ ID NO: 10883 - RNA, 19 nt, synthetic construct
  source 1..19: mol_type = other RNA
cacacccacagccaccagt

SEQ ID NO: 10884 - RNA, 19 nt, synthetic construct
  source 1..19: mol_type = other RNA
accacacccacagccacca

SEQ ID NO: 10885 - RNA, 19 nt, synthetic construct
  source 1..19: mol_type = other RNA
cacacccacagccaccagt

SEQ ID NO: 10886 - RNA, 19 nt, synthetic construct
  source 1..19: mol_type = other RNA
cccaaagccccctctgctc

SEQ ID NO: 10887 - RNA, 19 nt, synthetic construct
  source 1..19: mol_type = other RNA
tgtggcccaccttggcctt

SEQ ID NO: 10888 - RNA, 19 nt, synthetic construct
  source 1..19: mol_type = other RNA
ggggccgagtgcctccgga

SEQ ID NO: 10889 - RNA, 19 nt, synthetic construct
  source 1..19: mol_type = other RNA
atccccatgctctgtccac

SEQ ID NO: 10890 - RNA, 19 nt, synthetic construct
  source 1..19: mol_type = other RNA
tctgtccacctggagccag

SEQ ID NO: 10891 - RNA, 19 nt, synthetic construct
  source 1..19: mol_type = other RNA
gtgtgcccgccagggcagg

SEQ ID NO: 10892 - RNA, 19 nt, synthetic construct
  source 1..19: mol_type = other RNA
cccttctgtgtccctgcgc

SEQ ID NO: 10893 - RNA, 19 nt, synthetic construct
  source 1..19: mol_type = other RNA
tccatccccatgctctgtc

SEQ ID NO: 10894 - RNA, 19 nt, synthetic construct
  source 1..19: mol_type = other RNA
gcccaccttggccttgccc

SEQ ID NO: 10895 - RNA, 19 nt, synthetic construct
  source 1..19: mol_type = other RNA
gttctgcctccatccccat

SEQ ID NO: 10896 - RNA, 19 nt, synthetic construct
  source 1..19: mol_type = other RNA
ttctgcctccatccccatg

SEQ ID NO: 10897 - RNA, 19 nt, synthetic construct
  source 1..19: mol_type = other RNA
ctgcctccatccccatgct

SEQ ID NO: 10898 - RNA, 19 nt, synthetic construct
  source 1..19: mol_type = other RNA
tcagcgtgtccactgtgtc

SEQ ID NO: 10899 - RNA, 19 nt, synthetic construct
  source 1..19: mol_type = other RNA
tcaagatgtgcttcaacta

SEQ ID NO: 10900 - RNA, 19 nt, synthetic construct
  source 1..19: mol_type = other RNA
tcaagatgtgcttcaacta

SEQ ID NO: 10901 - RNA, 19 nt, synthetic construct
  source 1..19: mol_type = other RNA
tcaagatgtgcttcaacta

SEQ ID NO: 10902 - RNA, 19 nt, synthetic construct
  source 1..19: mol_type = other RNA
tcaagatgtgcttcaacta

SEQ ID NO: 10903 - RNA, 19 nt, synthetic construct
  source 1..19: mol_type = other RNA
gaggggccagcaggacccc

SEQ ID NO: 10904 - RNA, 19 nt, synthetic construct
  source 1..19: mol_type = other RNA
ggagctgccacacgctgga

SEQ ID NO: 10905 - RNA, 19 nt, synthetic construct
  source 1..19: mol_type = other RNA
acggccacaccctcctcca

SEQ ID NO: 10906 - RNA, 19 nt, synthetic construct
  source 1..19: mol_type = other RNA
gagggacgactgtctccag

SEQ ID NO: 10907 - RNA, 19 nt, synthetic construct
  source 1..19: mol_type = other RNA
cacgcccttctgtgtccct

SEQ ID NO: 10908 - RNA, 19 nt, synthetic construct
  source 1..19: mol_type = other RNA
catccccatgctctgtcca

SEQ ID NO: 10909 - RNA, 19 nt, synthetic construct
  source 1..19: mol_type = other RNA
gtgaggggccagcaggacc

SEQ ID NO: 10910 - RNA, 19 nt, synthetic construct
  source 1..19: mol_type = other RNA
gcctgtggcccaccttggc

SEQ ID NO: 10911 - RNA, 19 nt, synthetic construct
  source 1..19: mol_type = other RNA
caacccagcccagttttgc

SEQ ID NO: 10912 - RNA, 19 nt, synthetic construct
  source 1..19: mol_type = other RNA
gagcctgtggcccaccttg

SEQ ID NO: 10913 - RNA, 19 nt, synthetic construct
  source 1..19: mol_type = other RNA
cacagccacaccctcctcc

SEQ ID NO: 10914 - RNA, 19 nt, synthetic construct
  source 1..19: mol_type = other RNA
acggccatgccctcctcca

SEQ ID NO: 10915 - RNA, 19 nt, synthetic construct
  source 1..19: mol_type = other RNA
cacagccacaccctcctcc

SEQ ID NO: 10916 - RNA, 19 nt, synthetic construct
  source 1..19: mol_type = other RNA
cacagccacaccctcctcc

SEQ ID NO: 10917 - RNA, 19 nt, synthetic construct
  source 1..19: mol_type = other RNA
acggccatgccctcctcca

SEQ ID NO: 10918 - RNA, 19 nt, synthetic construct
  source 1..19: mol_type = other RNA
cacagccacaccctcctcc

SEQ ID NO: 10919 - RNA, 19 nt, synthetic construct
  source 1..19: mol_type = other RNA
ctctgccgcgcccggggag

SEQ ID NO: 10920 - RNA, 19 nt, synthetic construct
  source 1..19: mol_type = other RNA
cgcccggggagtgtgcagt

SEQ ID NO: 10921 - RNA, 19 nt, synthetic construct
  source 1..19: mol_type = other RNA
ccgtgaccaggccccgggc

SEQ ID NO: 10922 - RNA, 19 nt, synthetic construct
  source 1..19: mol_type = other RNA
ggacgctggtgttggctct

SEQ ID NO: 10923 - RNA, 19 nt, synthetic construct
  source 1..19: mol_type = other RNA
caggcagagacccagggcc

SEQ ID NO: 10924 - RNA, 19 nt, synthetic construct
  source 1..19: mol_type = other RNA
acagccacaccctcctcca

SEQ ID NO: 10925 - RNA, 19 nt, synthetic construct
  source 1..19: mol_type = other RNA
cagccacaccctcctccac

SEQ ID NO: 10926 - RNA, 19 nt, synthetic construct
  source 1..19: mol_type = other RNA
agccacaccctcctccact

SEQ ID NO: 10927 - RNA, 19 nt, synthetic construct
  source 1..19: mol_type = other RNA
ccacaccctcctccactcc

SEQ ID NO: 10928 - RNA, 19 nt, synthetic construct
  source 1..19: mol_type = other RNA
tcctccaccccagggacca

SEQ ID NO: 10929 - RNA, 19 nt, synthetic construct
  source 1..19: mol_type = other RNA
accccagggaccacctgga

SEQ ID NO: 10930 - RNA, 19 nt, synthetic construct
  source 1..19: mol_type = other RNA
ccccagggaccacctggat

SEQ ID NO: 10931 - RNA, 19 nt, synthetic construct
  source 1..19: mol_type = other RNA
acagccacaccctcctcca

SEQ ID NO: 10932 - RNA, 19 nt, synthetic construct
  source 1..19: mol_type = other RNA
cagccacaccctcctccac

SEQ ID NO: 10933 - RNA, 19 nt, synthetic construct
  source 1..19: mol_type = other RNA
agccacaccctcctccact

SEQ ID NO: 10934 - RNA, 19 nt, synthetic construct
  source 1..19: mol_type = other RNA
ccacaccctcctccactcc

SEQ ID NO: 10935 - RNA, 19 nt, synthetic construct
  source 1..19: mol_type = other RNA
ccctcctccactccaggga

SEQ ID NO: 10936 - RNA, 19 nt, synthetic construct
  source 1..19: mol_type = other RNA
cctcctccactccagggac

SEQ ID NO: 10937 - RNA, 19 nt, synthetic construct
  source 1..19: mol_type = other RNA
ccacacccacagccaccag

SEQ ID NO: 10938 - RNA, 19 nt, synthetic construct
  source 1..19: mol_type = other RNA
tcctccaccccagggacca

SEQ ID NO: 10939 - RNA, 19 nt, synthetic construct
  source 1..19: mol_type = other RNA
accccagggaccacctgga

SEQ ID NO: 10940 - RNA, 19 nt, synthetic construct
  source 1..19: mol_type = other RNA
ccccagggaccacctggat

SEQ ID NO: 10941 - RNA, 19 nt, synthetic construct
  source 1..19: mol_type = other RNA
tcctccaccccagggacca

SEQ ID NO: 10942 - RNA, 19 nt, synthetic construct
  source 1..19: mol_type = other RNA
accccagggaccacctgga

SEQ ID NO: 10943 - RNA, 19 nt, synthetic construct
  source 1..19: mol_type = other RNA
ccccagggaccacctggat

SEQ ID NO: 10944 - RNA, 19 nt, synthetic construct
  source 1..19: mol_type = other RNA
acagccacaccctcctcca

SEQ ID NO: 10945 - RNA, 19 nt, synthetic construct
  source 1..19: mol_type = other RNA
cagccacaccctcctccac

SEQ ID NO: 10946 - RNA, 19 nt, synthetic construct
  source 1..19: mol_type = other RNA
agccacaccctcctccact

SEQ ID NO: 10947 - RNA, 19 nt, synthetic construct
  source 1..19: mol_type = other RNA
ccacaccctcctccactcc

SEQ ID NO: 10948 - RNA, 19 nt, synthetic construct
  source 1..19: mol_type = other RNA
ccacacccacagccaccag

SEQ ID NO: 10949 - RNA, 19 nt, synthetic construct
  source 1..19: mol_type = other RNA
tcctccaccccagggacca

SEQ ID NO: 10950 - RNA, 19 nt, synthetic construct
  source 1..19: mol_type = other RNA
accccagggaccacctgga

SEQ ID NO: 10951 - RNA, 19 nt, synthetic construct
  source 1..19: mol_type = other RNA
ccccagggaccacctggat

SEQ ID NO: 10952 - RNA, 19 nt, synthetic construct
  source 1..19: mol_type = other RNA
tcctccaccccagggacca

SEQ ID NO: 10953 - RNA, 19 nt, synthetic construct
  source 1..19: mol_type = other RNA
accccagggaccacctgga

SEQ ID NO: 10954 - RNA, 19 nt, synthetic construct
  source 1..19: mol_type = other RNA
ccccagggaccacctggat

SEQ ID NO: 10955 - RNA, 19 nt, synthetic construct
  source 1..19: mol_type = other RNA
acagccacaccctcctcca

SEQ ID NO: 10956 - RNA, 19 nt, synthetic construct
  source 1..19: mol_type = other RNA
cagccacaccctcctccac

SEQ ID NO: 10957 - RNA, 19 nt, synthetic construct
  source 1..19: mol_type = other RNA
agccacaccctcctccact

SEQ ID NO: 10958 - RNA, 19 nt, synthetic construct
  source 1..19: mol_type = other RNA
ccacaccctcctccactcc

SEQ ID NO: 10959 - RNA, 19 nt, synthetic construct
  source 1..19: mol_type = other RNA
ccacggccacaccctcctc

SEQ ID NO: 10960 - RNA, 19 nt, synthetic construct
  source 1..19: mol_type = other RNA
cacggccacaccctcctcc

SEQ ID NO: 10961 - RNA, 19 nt, synthetic construct
  source 1..19: mol_type = other RNA
cggccacaccctcctccac

SEQ ID NO: 10962 - RNA, 19 nt, synthetic construct
  source 1..19: mol_type = other RNA
caccctcctccactctggg

SEQ ID NO: 10963 - RNA, 19 nt, synthetic construct
  source 1..19: mol_type = other RNA
tcctccactctggggacga

SEQ ID NO: 10964 - RNA, 19 nt, synthetic construct
  source 1..19: mol_type = other RNA
tcctccaccccagggacca

SEQ ID NO: 10965 - RNA, 19 nt, synthetic construct
  source 1..19: mol_type = other RNA
accccagggaccacctgga

SEQ ID NO: 10966 - RNA, 19 nt, synthetic construct
  source 1..19: mol_type = other RNA
ccccagggaccacctggat

SEQ ID NO: 10967 - RNA, 19 nt, synthetic construct
  source 1..19: mol_type = other RNA
gtgtccactgtgtcctcct

SEQ ID NO: 10968 - RNA, 19 nt, synthetic construct
  source 1..19: mol_type = other RNA
ctcacctgcccacccacca

SEQ ID NO: 10969 - RNA, 19 nt, synthetic construct
  source 1..19: mol_type = other RNA
gtgcagtgcaagcccctgc

SEQ ID NO: 10970 - RNA, 19 nt, synthetic construct
  source 1..19: mol_type = other RNA
gtgcaagcccctgccctgt

SEQ ID NO: 10971 - RNA, 19 nt, synthetic construct
  source 1..19: mol_type = other RNA
tgtgcccgccagggcagga

SEQ ID NO: 10972 - RNA, 19 nt, synthetic construct
  source 1..19: mol_type = other RNA
cgcccttctgtgtccctgc

SEQ ID NO: 10973 - RNA, 19 nt, synthetic construct
  source 1..19: mol_type = other RNA
gcccttctgtgtccctgcg

SEQ ID NO: 10974 - RNA, 19 nt, synthetic construct
  source 1..19: mol_type = other RNA
tgcctccatccccatgctc

SEQ ID NO: 10975 - RNA, 19 nt, synthetic construct
  source 1..19: mol_type = other RNA
ccatccccatgctctgtcc

SEQ ID NO: 10976 - RNA, 19 nt, synthetic construct
  source 1..19: mol_type = other RNA
agggtgaggggccagcagg

SEQ ID NO: 10977 - RNA, 19 nt, synthetic construct
  source 1..19: mol_type = other RNA
ggtgaggggccagcaggac

SEQ ID NO: 10978 - RNA, 19 nt, synthetic construct
  source 1..19: mol_type = other RNA
ggggccagcaggacccctt

SEQ ID NO: 10979 - RNA, 19 nt, synthetic construct
  source 1..19: mol_type = other RNA
tgggagagcctgtggccca

SEQ ID NO: 10980 - RNA, 19 nt, synthetic construct
  source 1..19: mol_type = other RNA
cctgtggcccaccttggcc

SEQ ID NO: 10981 - RNA, 19 nt, synthetic construct
  source 1..19: mol_type = other RNA
ctgtggcccaccttggcct

SEQ ID NO: 10982 - RNA, 19 nt, synthetic construct
  source 1..19: mol_type = other RNA
atcccaaagccccctctgc

SEQ ID NO: 10983 - RNA, 19 nt, synthetic construct
  source 1..19: mol_type = other RNA
ccccctctgctcaacccag

SEQ ID NO: 10984 - RNA, 19 nt, synthetic construct
  source 1..19: mol_type = other RNA
tcccaaagccccctctgct

SEQ ID NO: 10985 - RNA, 19 nt, synthetic construct
  source 1..19: mol_type = other RNA
cacccacagccaccagttc

SEQ ID NO: 10986 - RNA, 19 nt, synthetic construct
  source 1..19: mol_type = other RNA
acccacagccaccagttcc

SEQ ID NO: 10987 - RNA, 19 nt, synthetic construct
  source 1..19: mol_type = other RNA
cacccacagccaccagttc

SEQ ID NO: 10988 - RNA, 19 nt, synthetic construct
  source 1..19: mol_type = other RNA
acccacagccaccagttcc

SEQ ID NO: 10989 - RNA, 19 nt, synthetic construct
  source 1..19: mol_type = other RNA
ccacagccacaccctcctc

SEQ ID NO: 10990 - RNA, 19 nt, synthetic construct
  source 1..19: mol_type = other RNA
cccctcctccaccccagga

SEQ ID NO: 10991 - RNA, 19 nt, synthetic construct
  source 1..19: mol_type = other RNA
ccacagccacaccctcctc

SEQ ID NO: 10992 - RNA, 19 nt, synthetic construct
  source 1..19: mol_type = other RNA
cccctcctccaccccagga

SEQ ID NO: 10993 - RNA, 19 nt, synthetic construct
  source 1..19: mol_type = other RNA
cccctcctccaccccagga

SEQ ID NO: 10994 - RNA, 19 nt, synthetic construct
  source 1..19: mol_type = other RNA
ccacagccacaccctcctc

SEQ ID NO: 10995 - RNA, 19 nt, synthetic construct
  source 1..19: mol_type = other RNA
ccacagccacaccctcctc

SEQ ID NO: 10996 - RNA, 19 nt, synthetic construct
  source 1..19: mol_type = other RNA
cccctcctccaccccagga

SEQ ID NO: 10997 - RNA, 19 nt, synthetic construct
  source 1..19: mol_type = other RNA
ctgggagagcctgtggccc

SEQ ID NO: 10998 - RNA, 19 nt, synthetic construct
  source 1..19: mol_type = other RNA
tccacagccacaccctcct

SEQ ID NO: 10999 - RNA, 19 nt, synthetic construct
  source 1..19: mol_type = other RNA
tccacagccacaccctcct

SEQ ID NO: 11000 - RNA, 19 nt, synthetic construct
  source 1..19: mol_type = other RNA
gccaccacacccacagcca

SEQ ID NO: 11001 - RNA, 19 nt, synthetic construct
  source 1..19: mol_type = other RNA
tccacagccacaccctcct

SEQ ID NO: 11002 - RNA, 19 nt, synthetic construct
  source 1..19: mol_type = other RNA
gccaccacacccacagcca

SEQ ID NO: 11003 - RNA, 19 nt, synthetic construct
  source 1..19: mol_type = other RNA
tccacagccacaccctcct

SEQ ID NO: 11004 - RNA, 19 nt, synthetic construct
  source 1..19: mol_type = other RNA
accctcctccactctgggg

SEQ ID NO: 11005 - RNA, 19 nt, synthetic construct
  source 1..19: mol_type = other RNA
acactaccaaagtgctgac

SEQ ID NO: 11006 - RNA, 19 nt, synthetic construct
  source 1..19: mol_type = other RNA
tgcccctgcacccacggcg

SEQ ID NO: 11007 - RNA, 19 nt, synthetic construct
  source 1..19: mol_type = other RNA
tccccacagcggagaactg

SEQ ID NO: 11008 - RNA, 19 nt, synthetic construct
  source 1..19: mol_type = other RNA
acccgtgttgtcatcaagg

SEQ ID NO: 11009 - RNA, 19 nt, synthetic construct
  source 1..19: mol_type = other RNA
ccgtgttgtcatcaaggcc

SEQ ID NO: 11010 - RNA, 19 nt, synthetic construct
  source 1..19: mol_type = other RNA
cgcactggagtttgggaac

SEQ ID NO: 11011 - RNA, 19 nt, synthetic construct
  source 1..19: mol_type = other RNA
ggccgacgtcacctgcagc

SEQ ID NO: 11012 - RNA, 19 nt, synthetic construct
  source 1..19: mol_type = other RNA
actcgactccagccctgtc

SEQ ID NO: 11013 - RNA, 19 nt, synthetic construct
  source 1..19: mol_type = other RNA
actcgactccagccctgtc

SEQ ID NO: 11014 - RNA, 19 nt, synthetic construct
  source 1..19: mol_type = other RNA
actcgactccagccctgtc

SEQ ID NO: 11015 - RNA, 19 nt, synthetic construct
  source 1..19: mol_type = other RNA
agtgtggagaatgagaact

SEQ ID NO: 11016 - RNA, 19 nt, synthetic construct
  source 1..19: mol_type = other RNA
gtccccacagcggagaact

SEQ ID NO: 11017 - RNA, 19 nt, synthetic construct
  source 1..19: mol_type = other RNA
gccctgtgacttccactat

SEQ ID NO: 11018 - RNA, 19 nt, synthetic construct
  source 1..19: mol_type = other RNA
accccaggaacagctcaca

SEQ ID NO: 11019 - RNA, 19 nt, synthetic construct
  source 1..19: mol_type = other RNA
accccaggaacagctcaca

SEQ ID NO: 11020 - RNA, 19 nt, synthetic construct
  source 1..19: mol_type = other RNA
accccaggaacagctcaca

SEQ ID NO: 11021 - RNA, 19 nt, synthetic construct
  source 1..19: mol_type = other RNA
accccaggaacagctcaca

SEQ ID NO: 11022 - RNA, 19 nt, synthetic construct
  source 1..19: mol_type = other RNA
accccaggaacagctcaca

SEQ ID NO: 11023 - RNA, 19 nt, synthetic construct
  source 1..19: mol_type = other RNA
actacggccactgccccag

SEQ ID NO: 11024 - RNA, 19 nt, synthetic construct
  source 1..19: mol_type = other RNA
actacggccactgccccag

SEQ ID NO: 11025 - RNA, 19 nt, synthetic construct
  source 1..19: mol_type = other RNA
actacggccactgccccag

SEQ ID NO: 11026 - RNA, 19 nt, synthetic construct
  source 1..19: mol_type = other RNA
actacggccactgccccag

SEQ ID NO: 11027 - RNA, 19 nt, synthetic construct
  source 1..19: mol_type = other RNA
aggacccctgctccctcag

SEQ ID NO: 11028 - RNA, 19 nt, synthetic construct
  source 1..19: mol_type = other RNA
acgcactggagtttgggaa

SEQ ID NO: 11029 - RNA, 19 nt, synthetic construct
  source 1..19: mol_type = other RNA
aactacggccactgcccca

SEQ ID NO: 11030 - RNA, 19 nt, synthetic construct
  source 1..19: mol_type = other RNA
ctacggccactgccccagc

SEQ ID NO: 11031 - RNA, 19 nt, synthetic construct
  source 1..19: mol_type = other RNA
aactacggccactgcccca

SEQ ID NO: 11032 - RNA, 19 nt, synthetic construct
  source 1..19: mol_type = other RNA
ctacggccactgccccagc

SEQ ID NO: 11033 - RNA, 19 nt, synthetic construct
  source 1..19: mol_type = other RNA
aactacggccactgcccca

SEQ ID NO: 11034 - RNA, 19 nt, synthetic construct
  source 1..19: mol_type = other RNA
ctacggccactgccccagc

SEQ ID NO: 11035 - RNA, 19 nt, synthetic construct
  source 1..19: mol_type = other RNA
aactacggccactgcccca

SEQ ID NO: 11036 - RNA, 19 nt, synthetic construct
  source 1..19: mol_type = other RNA
ctacggccactgccccagc

SEQ ID NO: 11037 - RNA, 19 nt, synthetic construct
  source 1..19: mol_type = other RNA
gcgactgctgtcccacctt

SEQ ID NO: 11038 - RNA, 19 nt, synthetic construct
  source 1..19: mol_type = other RNA
aggccgacgtcacctgcag

SEQ ID NO: 11039 - RNA, 19 nt, synthetic construct
  source 1..19: mol_type = other RNA
ccctgcacccacggcggcc

SEQ ID NO: 11040 - RNA, 19 nt, synthetic construct
  source 1..19: mol_type = other RNA
gctccctcagtgtggagaa

SEQ ID NO: 11041 - RNA, 19 nt, synthetic construct
  source 1..19: mol_type = other RNA
cccctgcacccacggcggc

SEQ ID NO: 11042 - RNA, 19 nt, synthetic construct
  source 1..19: mol_type = other RNA
acggcggccgcacctacag

SEQ ID NO: 11043 - RNA, 19 nt, synthetic construct
  source 1..19: mol_type = other RNA
ctgggagcctctctgcaga

SEQ ID NO: 11044 - RNA, 19 nt, synthetic construct
  source 1..19: mol_type = other RNA
tcctccactccagagactg

SEQ ID NO: 11045 - RNA, 19 nt, synthetic construct
  source 1..19: mol_type = other RNA
tcctccactccagagactg

SEQ ID NO: 11046 - RNA, 19 nt, synthetic construct
  source 1..19: mol_type = other RNA
ccacaaccaccacacccac

SEQ ID NO: 11047 - RNA, 19 nt, synthetic construct
  source 1..19: mol_type = other RNA
agccagccctgtgacttcc

SEQ ID NO: 11048 - RNA, 19 nt, synthetic construct
  source 1..19: mol_type = other RNA
gagccagccctgtgacttc

SEQ ID NO: 11049 - RNA, 19 nt, synthetic construct
  source 1..19: mol_type = other RNA
agccctgtgacttccacta

SEQ ID NO: 11050 - RNA, 19 nt, synthetic construct
  source 1..19: mol_type = other RNA
tgtggtcacccgtgttgtc

SEQ ID NO: 11051 - RNA, 19 nt, synthetic construct
  source 1..19: mol_type = other RNA
gggcgactgctgtcccacc

SEQ ID NO: 11052 - RNA, 19 nt, synthetic construct
  source 1..19: mol_type = other RNA
gggagcctctctgcagaaa

SEQ ID NO: 11053 - RNA, 19 nt, synthetic construct
  source 1..19: mol_type = other RNA
cagccctgtgacttccact

SEQ ID NO: 11054 - RNA, 19 nt, synthetic construct
  source 1..19: mol_type = other RNA
ctgtggtcacccgtgttgt

SEQ ID NO: 11055 - RNA, 19 nt, synthetic construct
  source 1..19: mol_type = other RNA
gcagcccctgggcctcgag

SEQ ID NO: 11056 - RNA, 19 nt, synthetic construct
  source 1..19: mol_type = other RNA
gccactgccccagcacccc

SEQ ID NO: 11057 - RNA, 19 nt, synthetic construct
  source 1..19: mol_type = other RNA
gcagcccctgggcctcgag

SEQ ID NO: 11058 - RNA, 19 nt, synthetic construct
  source 1..19: mol_type = other RNA
gccactgccccagcacccc

SEQ ID NO: 11059 - RNA, 19 nt, synthetic construct
  source 1..19: mol_type = other RNA
gcagcccctgggcctcgag

SEQ ID NO: 11060 - RNA, 19 nt, synthetic construct
  source 1..19: mol_type = other RNA
gccactgccccagcacccc

SEQ ID NO: 11061 - RNA, 19 nt, synthetic construct
  source 1..19: mol_type = other RNA
gcagcccctgggcctcgag

SEQ ID NO: 11062 - RNA, 19 nt, synthetic construct
  source 1..19: mol_type = other RNA
gccactgccccagcacccc

SEQ ID NO: 11063 - RNA, 19 nt, synthetic construct
  source 1..19: mol_type = other RNA
gttgtcatcaaggcccagg

SEQ ID NO: 11064 - RNA, 19 nt, synthetic construct
  source 1..19: mol_type = other RNA
cccgtgttgtcatcaaggc

SEQ ID NO: 11065 - RNA, 19 nt, synthetic construct
  source 1..19: mol_type = other RNA
gctgcaactacggccactg

SEQ ID NO: 11066 - RNA, 19 nt, synthetic construct
  source 1..19: mol_type = other RNA
gctgcaactacggccactg

SEQ ID NO: 11067 - RNA, 19 nt, synthetic construct
  source 1..19: mol_type = other RNA
gctgcaactacggccactg

SEQ ID NO: 11068 - RNA, 19 nt, synthetic construct
  source 1..19: mol_type = other RNA
gctgcaactacggccactg

SEQ ID NO: 11069 - RNA, 19 nt, synthetic construct
  source 1..19: mol_type = other RNA
cctcctccagtccagggac

SEQ ID NO: 11070 - RNA, 19 nt, synthetic construct
  source 1..19: mol_type = other RNA
ctcctccagtccagggact

SEQ ID NO: 11071 - RNA, 19 nt, synthetic construct
  source 1..19: mol_type = other RNA
tccaccccaggaacagctc

SEQ ID NO: 11072 - RNA, 19 nt, synthetic construct
  source 1..19: mol_type = other RNA
tccaccccaggaacagctc

SEQ ID NO: 11073 - RNA, 19 nt, synthetic construct
  source 1..19: mol_type = other RNA
cctcctccagtccagggac

SEQ ID NO: 11074 - RNA, 19 nt, synthetic construct
  source 1..19: mol_type = other RNA
ctcctccagtccagggact

SEQ ID NO: 11075 - RNA, 19 nt, synthetic construct
  source 1..19: mol_type = other RNA
tccaccccaggaacagctc

SEQ ID NO: 11076 - RNA, 19 nt, synthetic construct
  source 1..19: mol_type = other RNA
tccaccccaggaacagctc

SEQ ID NO: 11077 - RNA, 19 nt, synthetic construct
  source 1..19: mol_type = other RNA
cctcctccagtccagggac

SEQ ID NO: 11078 - RNA, 19 nt, synthetic construct
  source 1..19: mol_type = other RNA
ctcctccagtccagggact

SEQ ID NO: 11079 - RNA, 19 nt, synthetic construct
  source 1..19: mol_type = other RNA
tccaccccaggaacagctc

SEQ ID NO: 11080 - RNA, 19 nt, synthetic construct
  source 1..19: mol_type = other RNA
ccagccctgtgacttccac

SEQ ID NO: 11081 - RNA, 19 nt, synthetic construct
  source 1..19: mol_type = other RNA
cacccctgcagtgctcccc

SEQ ID NO: 11082 - RNA, 19 nt, synthetic construct
  source 1..19: mol_type = other RNA
ctcctccaccccaggaaca

SEQ ID NO: 11083 - RNA, 19 nt, synthetic construct
  source 1..19: mol_type = other RNA
ctcctccaccccaggaaca

SEQ ID NO: 11084 - RNA, 19 nt, synthetic construct
  source 1..19: mol_type = other RNA
ctcctccaccccaggaaca

SEQ ID NO: 11085 - RNA, 19 nt, synthetic construct
  source 1..19: mol_type = other RNA
ctcctccaccccaggaaca

SEQ ID NO: 11086 - RNA, 19 nt, synthetic construct
  source 1..19: mol_type = other RNA
ctctgcccccggacctgcc

SEQ ID NO: 11087 - RNA, 19 nt, synthetic construct
  source 1..19: mol_type = other RNA
cctgggagcctctctgcag

SEQ ID NO: 11088 - RNA, 19 nt, synthetic construct
  source 1..19: mol_type = other RNA
acggccactgccccagcac

SEQ ID NO: 11089 - RNA, 19 nt, synthetic construct
  source 1..19: mol_type = other RNA
acggccactgccccagcac

SEQ ID NO: 11090 - RNA, 19 nt, synthetic construct
  source 1..19: mol_type = other RNA
acggccactgccccagcac

SEQ ID NO: 11091 - RNA, 19 nt, synthetic construct
  source 1..19: mol_type = other RNA
acggccactgccccagcac

SEQ ID NO: 11092 - RNA, 19 nt, synthetic construct
  source 1..19: mol_type = other RNA
ctccaccccaggaacagct

SEQ ID NO: 11093 - RNA, 19 nt, synthetic construct
  source 1..19: mol_type = other RNA
ctccaccccaggaacagct

SEQ ID NO: 11094 - RNA, 19 nt, synthetic construct
  source 1..19: mol_type = other RNA
ctccaccccaggaacagct

SEQ ID NO: 11095 - RNA, 19 nt, synthetic construct
  source 1..19: mol_type = other RNA
ctccaccccaggaacagct

SEQ ID NO: 11096 - RNA, 19 nt, synthetic construct
  source 1..19: mol_type = other RNA
cccctgcagtgctccccag

SEQ ID NO: 11097 - RNA, 19 nt, synthetic construct
  source 1..19: mol_type = other RNA
ccctgcagtgctccccagc

SEQ ID NO: 11098 - RNA, 19 nt, synthetic construct
  source 1..19: mol_type = other RNA
tccctcctccagtccaggg

SEQ ID NO: 11099 - RNA, 19 nt, synthetic construct
  source 1..19: mol_type = other RNA
accctcctccactccagag

SEQ ID NO: 11100 - RNA, 19 nt, synthetic construct
  source 1..19: mol_type = other RNA
accctcctccactccagag

SEQ ID NO: 11101 - RNA, 19 nt, synthetic construct
  source 1..19: mol_type = other RNA
tccctcctccagtccaggg

SEQ ID NO: 11102 - RNA, 19 nt, synthetic construct
  source 1..19: mol_type = other RNA
accctcctccactccagag

SEQ ID NO: 11103 - RNA, 19 nt, synthetic construct
  source 1..19: mol_type = other RNA
tccctcctccagtccaggg

SEQ ID NO: 11104 - RNA, 19 nt, synthetic construct
  source 1..19: mol_type = other RNA
accctcctccactccagag

SEQ ID NO: 11105 - RNA, 19 nt, synthetic construct
  source 1..19: mol_type = other RNA
ggcagtgctgtggggagtg

SEQ ID NO: 11106 - RNA, 19 nt, synthetic construct
  source 1..19: mol_type = other RNA
ggtgaccccctcctccatc

SEQ ID NO: 11107 - RNA, 19 nt, synthetic construct
  source 1..19: mol_type = other RNA
ggtgaccccctcctccatc

SEQ ID NO: 11108 - RNA, 19 nt, synthetic construct
  source 1..19: mol_type = other RNA
ggtgaccccctcctccatc

SEQ ID NO: 11109 - RNA, 19 nt, synthetic construct
  source 1..19: mol_type = other RNA
ggtgaccccctcctccatc

SEQ ID NO: 11110 - RNA, 19 nt, synthetic construct
  source 1..19: mol_type = other RNA
gcacccacggcggccgcac

SEQ ID NO: 11111 - RNA, 19 nt, synthetic construct
  source 1..19: mol_type = other RNA
ctcgactccagccctgtcc

SEQ ID NO: 11112 - RNA, 19 nt, synthetic construct
  source 1..19: mol_type = other RNA
ctcgactccagccctgtcc

SEQ ID NO: 11113 - RNA, 19 nt, synthetic construct
  source 1..19: mol_type = other RNA
ctcgactccagccctgtcc

SEQ ID NO: 11114 - RNA, 19 nt, synthetic construct
  source 1..19: mol_type = other RNA
cggccgcacctacagcccg

SEQ ID NO: 11115 - RNA, 19 nt, synthetic construct
  source 1..19: mol_type = other RNA
gactgctgtcccaccttcc

SEQ ID NO: 11116 - RNA, 19 nt, synthetic construct
  source 1..19: mol_type = other RNA
ccctgagctctgcccccgg

SEQ ID NO: 11117 - RNA, 19 nt, synthetic construct
  source 1..19: mol_type = other RNA
cctgagctctgcccccgga

SEQ ID NO: 11118 - RNA, 19 nt, synthetic construct
  source 1..19: mol_type = other RNA
ggccgcacctacagcccgg

SEQ ID NO: 11119 - RNA, 19 nt, synthetic construct
  source 1..19: mol_type = other RNA
agctgcctgggagcctctc

SEQ ID NO: 11120 - RNA, 19 nt, synthetic construct
  source 1..19: mol_type = other RNA
gctgcctgggagcctctct

SEQ ID NO: 11121 - RNA, 19 nt, synthetic construct
  source 1..19: mol_type = other RNA
cagcccctgggcctcgagt

SEQ ID NO: 11122 - RNA, 19 nt, synthetic construct
  source 1..19: mol_type = other RNA
cagcccctgggcctcgagt

SEQ ID NO: 11123 - RNA, 19 nt, synthetic construct
  source 1..19: mol_type = other RNA
cagcccctgggcctcgagt

SEQ ID NO: 11124 - RNA, 19 nt, synthetic construct
  source 1..19: mol_type = other RNA
cagcccctgggcctcgagt

SEQ ID NO: 11125 - RNA, 19 nt, synthetic construct
  source 1..19: mol_type = other RNA
actgctgtcccaccttccg

SEQ ID NO: 11126 - RNA, 19 nt, synthetic construct
  source 1..19: mol_type = other RNA
cctgctccctcagtgtgga

SEQ ID NO: 11127 - RNA, 19 nt, synthetic construct
  source 1..19: mol_type = other RNA
cggccaccacaactggggc

SEQ ID NO: 11128 - RNA, 19 nt, synthetic construct
  source 1..19: mol_type = other RNA
acaaccaccacacccacaa

SEQ ID NO: 11129 - RNA, 19 nt, synthetic construct
  source 1..19: mol_type = other RNA
acaaccaccacacccacaa

SEQ ID NO: 11130 - RNA, 19 nt, synthetic construct
  source 1..19: mol_type = other RNA
acaaccaccacacccacaa

SEQ ID NO: 11131 - RNA, 19 nt, synthetic construct
  source 1..19: mol_type = other RNA
acaaccaccacacccacaa

SEQ ID NO: 11132 - RNA, 19 nt, synthetic construct
  source 1..19: mol_type = other RNA
acaaccaccacacccacaa

SEQ ID NO: 11133 - RNA, 19 nt, synthetic construct
  source 1..19: mol_type = other RNA
acaaccaccacacccacaa

SEQ ID NO: 11134 - RNA, 19 nt, synthetic construct
  source 1..19: mol_type = other RNA
cctgcacccacggcggccg

SEQ ID NO: 11135 - RNA, 19 nt, synthetic construct
  source 1..19: mol_type = other RNA
ctcagtgtggagaatgaga

SEQ ID NO: 11136 - RNA, 19 nt, synthetic construct
  source 1..19: mol_type = other RNA
gtgtggagaatgagaacta

SEQ ID NO: 11137 - RNA, 19 nt, synthetic construct
  source 1..19: mol_type = other RNA
ccaccccaggaacagctca

SEQ ID NO: 11138 - RNA, 19 nt, synthetic construct
  source 1..19: mol_type = other RNA
caaccaccacacccacaac

SEQ ID NO: 11139 - RNA, 19 nt, synthetic construct
  source 1..19: mol_type = other RNA
ccaccccaggaacagctca

SEQ ID NO: 11140 - RNA, 19 nt, synthetic construct
  source 1..19: mol_type = other RNA
caaccaccacacccacaac

SEQ ID NO: 11141 - RNA, 19 nt, synthetic construct
  source 1..19: mol_type = other RNA
ccaccccaggaacagctca

SEQ ID NO: 11142 - RNA, 19 nt, synthetic construct
  source 1..19: mol_type = other RNA
caaccaccacacccacaac

SEQ ID NO: 11143 - RNA, 19 nt, synthetic construct
  source 1..19: mol_type = other RNA
ccaccccaggaacagctca

SEQ ID NO: 11144 - RNA, 19 nt, synthetic construct
  source 1..19: mol_type = other RNA
caaccaccacacccacaac

SEQ ID NO: 11145 - RNA, 19 nt, synthetic construct
  source 1..19: mol_type = other RNA
ccaccccaggaacagctca

SEQ ID NO: 11146 - RNA, 19 nt, synthetic construct
  source 1..19: mol_type = other RNA
caaccaccacacccacaac

SEQ ID NO: 11147 - RNA, 19 nt, synthetic construct
  source 1..19: mol_type = other RNA
caaccaccacacccacaac

SEQ ID NO: 11148 - RNA, 19 nt, synthetic construct
  source 1..19: mol_type = other RNA
tgcagtgctccccagcagc

SEQ ID NO: 11149 - RNA, 19 nt, synthetic construct
  source 1..19: mol_type = other RNA
cgagccagccctgtgactt

SEQ ID NO: 11150 - RNA, 19 nt, synthetic construct
  source 1..19: mol_type = other RNA
ctgcagtgctccccagcag

SEQ ID NO: 11151 - RNA, 19 nt, synthetic construct
  source 1..19: mol_type = other RNA
tcctccaccccaggaacag

SEQ ID NO: 11152 - RNA, 19 nt, synthetic construct
  source 1..19: mol_type = other RNA
tcctccaccccaggaacag

SEQ ID NO: 11153 - RNA, 19 nt, synthetic construct
  source 1..19: mol_type = other RNA
tcctccaccccaggaacag

SEQ ID NO: 11154 - RNA, 19 nt, synthetic construct
  source 1..19: mol_type = other RNA
tcctccaccccaggaacag

SEQ ID NO: 11155 - RNA, 19 nt, synthetic construct
  source 1..19: mol_type = other RNA
gaggacccctgctccctca

SEQ ID NO: 11156 - RNA, 19 nt, synthetic construct
  source 1..19: mol_type = other RNA
gtgagcagcccctgggcct

SEQ ID NO: 11157 - RNA, 19 nt, synthetic construct
  source 1..19: mol_type = other RNA
gtgagcagcccctgggcct

SEQ ID NO: 11158 - RNA, 19 nt, synthetic construct
  source 1..19: mol_type = other RNA
gtgagcagcccctgggcct

SEQ ID NO: 11159 - RNA, 19 nt, synthetic construct
  source 1..19: mol_type = other RNA
gtgagcagcccctgggcct

SEQ ID NO: 11160 - RNA, 19 nt, synthetic construct
  source 1..19: mol_type = other RNA
aggcctgtggtcacccgtg

SEQ ID NO: 11161 - RNA, 19 nt, synthetic construct
  source 1..19: mol_type = other RNA
gtgttgtcatcaaggccca

SEQ ID NO: 11162 - RNA, 19 nt, synthetic construct
  source 1..19: mol_type = other RNA
agctctgcccccggacctg

SEQ ID NO: 11163 - RNA, 19 nt, synthetic construct
  source 1..19: mol_type = other RNA
acccacggcggccgcacct

SEQ ID NO: 11164 - RNA, 19 nt, synthetic construct
  source 1..19: mol_type = other RNA
ggacccctgctccctcagt

SEQ ID NO: 11165 - RNA, 19 nt, synthetic construct
  source 1..19: mol_type = other RNA
gacccctgctccctcagtg

SEQ ID NO: 11166 - RNA, 19 nt, synthetic construct
  source 1..19: mol_type = other RNA
tgctccctcagtgtggaga

SEQ ID NO: 11167 - RNA, 19 nt, synthetic construct
  source 1..19: mol_type = other RNA
ctccctcagtgtggagaat

SEQ ID NO: 11168 - RNA, 19 nt, synthetic construct
  source 1..19: mol_type = other RNA
cagtgtggagaatgagaac

SEQ ID NO: 11169 - RNA, 19 nt, synthetic construct
  source 1..19: mol_type = other RNA
ctgcctgggagcctctctg

SEQ ID NO: 11170 - RNA, 19 nt, synthetic construct
  source 1..19: mol_type = other RNA
tgcctgggagcctctctgc

SEQ ID NO: 11171 - RNA, 19 nt, synthetic construct
  source 1..19: mol_type = other RNA
cctccaccccaggaacagc

SEQ ID NO: 11172 - RNA, 19 nt, synthetic construct
  source 1..19: mol_type = other RNA
cacaaccaccacacccaca

SEQ ID NO: 11173 - RNA, 19 nt, synthetic construct
  source 1..19: mol_type = other RNA
aaccaccacacccacaacc

SEQ ID NO: 11174 - RNA, 19 nt, synthetic construct
  source 1..19: mol_type = other RNA
tgtgagcagcccctgggcc

SEQ ID NO: 11175 - RNA, 19 nt, synthetic construct
  source 1..19: mol_type = other RNA
tgagcagcccctgggcctc

SEQ ID NO: 11176 - RNA, 19 nt, synthetic construct
  source 1..19: mol_type = other RNA
agcagcccctgggcctcga

SEQ ID NO: 11177 - RNA, 19 nt, synthetic construct
  source 1..19: mol_type = other RNA
cggccactgccccagcacc

SEQ ID NO: 11178 - RNA, 19 nt, synthetic construct
  source 1..19: mol_type = other RNA
ggccactgccccagcaccc

SEQ ID NO: 11179 - RNA, 19 nt, synthetic construct
  source 1..19: mol_type = other RNA
ccactgccccagcaccccg

SEQ ID NO: 11180 - RNA, 19 nt, synthetic construct
  source 1..19: mol_type = other RNA
cctccaccccaggaacagc

SEQ ID NO: 11181 - RNA, 19 nt, synthetic construct
  source 1..19: mol_type = other RNA
cacaaccaccacacccaca

SEQ ID NO: 11182 - RNA, 19 nt, synthetic construct
  source 1..19: mol_type = other RNA
aaccaccacacccacaacc

SEQ ID NO: 11183 - RNA, 19 nt, synthetic construct
  source 1..19: mol_type = other RNA
gaccacccacacccccaca

SEQ ID NO: 11184 - RNA, 19 nt, synthetic construct
  source 1..19: mol_type = other RNA
tccagccctgtccagccct

SEQ ID NO: 11185 - RNA, 19 nt, synthetic construct
  source 1..19: mol_type = other RNA
ccagccctgtccagccctc

SEQ ID NO: 11186 - RNA, 19 nt, synthetic construct
  source 1..19: mol_type = other RNA
tgtgagcagcccctgggcc

SEQ ID NO: 11187 - RNA, 19 nt, synthetic construct
  source 1..19: mol_type = other RNA
tgagcagcccctgggcctc

SEQ ID NO: 11188 - RNA, 19 nt, synthetic construct
  source 1..19: mol_type = other RNA
agcagcccctgggcctcga

SEQ ID NO: 11189 - RNA, 19 nt, synthetic construct
  source 1..19: mol_type = other RNA
cggccactgccccagcacc

SEQ ID NO: 11190 - RNA, 19 nt, synthetic construct
  source 1..19: mol_type = other RNA
ggccactgccccagcaccc

SEQ ID NO: 11191 - RNA, 19 nt, synthetic construct
  source 1..19: mol_type = other RNA
ccactgccccagcaccccg

SEQ ID NO: 11192 - RNA, 19 nt, synthetic construct
  source 1..19: mol_type = other RNA
cctccaccccaggaacagc

SEQ ID NO: 11193 - RNA, 19 nt, synthetic construct
  source 1..19: mol_type = other RNA
cacaaccaccacacccaca

SEQ ID NO: 11194 - RNA, 19 nt, synthetic construct
  source 1..19: mol_type = other RNA
aaccaccacacccacaacc

SEQ ID NO: 11195 - RNA, 19 nt, synthetic construct
  source 1..19: mol_type = other RNA
tccagccctgtccagccct

SEQ ID NO: 11196 - RNA, 19 nt, synthetic construct
  source 1..19: mol_type = other RNA
ccagccctgtccagccctc

SEQ ID NO: 11197 - RNA, 19 nt, synthetic construct
  source 1..19: mol_type = other RNA
tgtgagcagcccctgggcc

SEQ ID NO: 11198 - RNA, 19 nt, synthetic construct
  source 1..19: mol_type = other RNA
tgagcagcccctgggcctc

SEQ ID NO: 11199 - RNA, 19 nt, synthetic construct
  source 1..19: mol_type = other RNA
agcagcccctgggcctcga

SEQ ID NO: 11200 - RNA, 19 nt, synthetic construct
  source 1..19: mol_type = other RNA
cggccactgccccagcacc

SEQ ID NO: 11201 - RNA, 19 nt, synthetic construct
  source 1..19: mol_type = other RNA
ggccactgccccagcaccc

SEQ ID NO: 11202 - RNA, 19 nt, synthetic construct
  source 1..19: mol_type = other RNA
ccactgccccagcaccccg

SEQ ID NO: 11203 - RNA, 19 nt, synthetic construct
  source 1..19: mol_type = other RNA
cacaaccaccacacccaca

SEQ ID NO: 11204 - RNA, 19 nt, synthetic construct
  source 1..19: mol_type = other RNA
aaccaccacacccacaacc

SEQ ID NO: 11205 - RNA, 19 nt, synthetic construct
  source 1..19: mol_type = other RNA
gaccacccacacccccaca

SEQ ID NO: 11206 - RNA, 19 nt, synthetic construct
  source 1..19: mol_type = other RNA
tccagccctgtccagccct

SEQ ID NO: 11207 - RNA, 19 nt, synthetic construct
  source 1..19: mol_type = other RNA
ccagccctgtccagccctc

SEQ ID NO: 11208 - RNA, 19 nt, synthetic construct
  source 1..19: mol_type = other RNA
tgtgagcagcccctgggcc

SEQ ID NO: 11209 - RNA, 19 nt, synthetic construct
  source 1..19: mol_type = other RNA
tgagcagcccctgggcctc

SEQ ID NO: 11210 - RNA, 19 nt, synthetic construct
  source 1..19: mol_type = other RNA
agcagcccctgggcctcga

SEQ ID NO: 11211 - RNA, 19 nt, synthetic construct
  source 1..19: mol_type = other RNA
cggccactgccccagcacc

SEQ ID NO: 11212 - RNA, 19 nt, synthetic construct
  source 1..19: mol_type = other RNA
ggccactgccccagcaccc

SEQ ID NO: 11213 - RNA, 19 nt, synthetic construct
  source 1..19: mol_type = other RNA
ccactgccccagcaccccg

SEQ ID NO: 11214 - RNA, 19 nt, synthetic construct
  source 1..19: mol_type = other RNA
cctccaccccaggaacagc

SEQ ID NO: 11215 - RNA, 19 nt, synthetic construct
  source 1..19: mol_type = other RNA
cacaaccaccacacccaca

SEQ ID NO: 11216 - RNA, 19 nt, synthetic construct
  source 1..19: mol_type = other RNA
cacaaccaccacacccaca

SEQ ID NO: 11217 - RNA, 19 nt, synthetic construct
  source 1..19: mol_type = other RNA
aaccaccacacccacaacc

SEQ ID NO: 11218 - RNA, 19 nt, synthetic construct
  source 1..19: mol_type = other RNA
gccagccctgtgacttcca

SEQ ID NO: 11219 - RNA, 19 nt, synthetic construct
  source 1..19: mol_type = other RNA
ctcctccactccagagact

SEQ ID NO: 11220 - RNA, 19 nt, synthetic construct
  source 1..19: mol_type = other RNA
ctcctccactccagagact

SEQ ID NO: 11221 - RNA, 19 nt, synthetic construct
  source 1..19: mol_type = other RNA
ggaccacccacacccccac

SEQ ID NO: 11222 - RNA, 19 nt, synthetic construct
  source 1..19: mol_type = other RNA
ggaccacccacacccccac

SEQ ID NO: 11223 - RNA, 19 nt, synthetic construct
  source 1..19: mol_type = other RNA
ccctcctccagtccaggga

SEQ ID NO: 11224 - RNA, 19 nt, synthetic construct
  source 1..19: mol_type = other RNA
ccctcctccagtccaggga

SEQ ID NO: 11225 - RNA, 19 nt, synthetic construct
  source 1..19: mol_type = other RNA
ccctcctccagtccaggga

SEQ ID NO: 11226 - RNA, 19 nt, synthetic construct
  source 1..19: mol_type = other RNA
cctcctccactccagagac

SEQ ID NO: 11227 - RNA, 19 nt, synthetic construct
  source 1..19: mol_type = other RNA
cctcctccactccagagac

SEQ ID NO: 11228 - RNA, 19 nt, synthetic construct
  source 1..19: mol_type = other RNA
cctcctccactccagagac

SEQ ID NO: 11229 - RNA, 19 nt, synthetic construct
  source 1..19: mol_type = other RNA
cctcctccactccagagac

SEQ ID NO: 11230 - RNA, 19 nt, synthetic construct
  source 1..19: mol_type = other RNA
ggtactcccccatcactga

SEQ ID NO: 11231 - RNA, 19 nt, synthetic construct
  source 1..19: mol_type = other RNA
gctgacatcgagtgccggg

SEQ ID NO: 11232 - RNA, 19 nt, synthetic construct
  source 1..19: mol_type = other RNA
gcaacaatactacctgtcc

SEQ ID NO: 11233 - RNA, 19 nt, synthetic construct
  source 1..19: mol_type = other RNA
gcgactggagggacggcgt

SEQ ID NO: 11234 - RNA, 19 nt, synthetic construct
  source 1..19: mol_type = other RNA
cccggtctccaccgtgtgt

SEQ ID NO: 11235 - RNA, 19 nt, synthetic construct
  source 1..19: mol_type = other RNA
tcaacgcacacatgggcat

SEQ ID NO: 11236 - RNA, 19 nt, synthetic construct
  source 1..19: mol_type = other RNA
cctacgtggtggatgcctg

SEQ ID NO: 11237 - RNA, 19 nt, synthetic construct
  source 1..19: mol_type = other RNA
gggcaactgctggcaccct

SEQ ID NO: 11238 - RNA, 19 nt, synthetic construct
  source 1..19: mol_type = other RNA
gtatgccctgtgctggctg

SEQ ID NO: 11239 - RNA, 19 nt, synthetic construct
  source 1..19: mol_type = other RNA
aggcaactgctggcacccc

SEQ ID NO: 11240 - RNA, 19 nt, synthetic construct
  source 1..19: mol_type = other RNA
aggcaactgctggcacccc

SEQ ID NO: 11241 - RNA, 19 nt, synthetic construct
  source 1..19: mol_type = other RNA
aggcaactgctggcacccc

SEQ ID NO: 11242 - RNA, 19 nt, synthetic construct
  source 1..19: mol_type = other RNA
tcgtacaatggcaccttct

SEQ ID NO: 11243 - RNA, 19 nt, synthetic construct
  source 1..19: mol_type = other RNA
agctaccagcgttacagcc

SEQ ID NO: 11244 - RNA, 19 nt, synthetic construct
  source 1..19: mol_type = other RNA
ccacttcggcctggtgtgc

SEQ ID NO: 11245 - RNA, 19 nt, synthetic construct
  source 1..19: mol_type = other RNA
agcccttccagggacgacg

SEQ ID NO: 11246 - RNA, 19 nt, synthetic construct
  source 1..19: mol_type = other RNA
cagccactacgactgagtc

SEQ ID NO: 11247 - RNA, 19 nt, synthetic construct
  source 1..19: mol_type = other RNA
ggccaccatgtccacaatc

SEQ ID NO: 11248 - RNA, 19 nt, synthetic construct
  source 1..19: mol_type = other RNA
cagccactacgactgagtc

SEQ ID NO: 11249 - RNA, 19 nt, synthetic construct
  source 1..19: mol_type = other RNA
ggccaccatgtccacaatc

SEQ ID NO: 11250 - RNA, 19 nt, synthetic construct
  source 1..19: mol_type = other RNA
acgagggttcagtgtcggt

SEQ ID NO: 11251 - RNA, 19 nt, synthetic construct
  source 1..19: mol_type = other RNA
gtgatggtgcccaccggtt

SEQ ID NO: 11252 - RNA, 19 nt, synthetic construct
  source 1..19: mol_type = other RNA
gcctgcaacaatactacct

SEQ ID NO: 11253 - RNA, 19 nt, synthetic construct
  source 1..19: mol_type = other RNA
cccggcgcacaatgggcgg

SEQ ID NO: 11254 - RNA, 19 nt, synthetic construct
  source 1..19: mol_type = other RNA
gcctacgtggtggatgcct

SEQ ID NO: 11255 - RNA, 19 nt, synthetic construct
  source 1..19: mol_type = other RNA
gaccaccctatgggtgacc

SEQ ID NO: 11256 - RNA, 19 nt, synthetic construct
  source 1..19: mol_type = other RNA
gacccgcacctcgaccctg

SEQ ID NO: 11257 - RNA, 19 nt, synthetic construct
  source 1..19: mol_type = other RNA
gacccgcacctcgaccctg

SEQ ID NO: 11258 - RNA, 19 nt, synthetic construct
  source 1..19: mol_type = other RNA
gacccgcacctcgaccctg

SEQ ID NO: 11259 - RNA, 19 nt, synthetic construct
  source 1..19: mol_type = other RNA
gacccgcacctcgaccctg

SEQ ID NO: 11260 - RNA, 19 nt, synthetic construct
  source 1..19: mol_type = other RNA
caccgcttccaaagagccg

SEQ ID NO: 11261 - RNA, 19 nt, synthetic construct
  source 1..19: mol_type = other RNA
ccagctttacagccatccc

SEQ ID NO: 11262 - RNA, 19 nt, synthetic construct
  source 1..19: mol_type = other RNA
ccagctttacagccatccc

SEQ ID NO: 11263 - RNA, 19 nt, synthetic construct
  source 1..19: mol_type = other RNA
ccagctttacagccatccc

SEQ ID NO: 11264 - RNA, 19 nt, synthetic construct
  source 1..19: mol_type = other RNA
gacgacggggagcttgggc

SEQ ID NO: 11265 - RNA, 19 nt, synthetic construct
  source 1..19: mol_type = other RNA
acaaccggggccaccggct

SEQ ID NO: 11266 - RNA, 19 nt, synthetic construct
  source 1..19: mol_type = other RNA
tcaccctagcagcaggacc

SEQ ID NO: 11267 - RNA, 19 nt, synthetic construct
  source 1..19: mol_type = other RNA
tcaccctagcagcaggacc

SEQ ID NO: 11268 - RNA, 19 nt, synthetic construct
  source 1..19: mol_type = other RNA
tcaccctagcagcaggacc

SEQ ID NO: 11269 - RNA, 19 nt, synthetic construct
  source 1..19: mol_type = other RNA
acaaccggggccaccggct

SEQ ID NO: 11270 - RNA, 19 nt, synthetic construct
  source 1..19: mol_type = other RNA
gcctcacgcccgatggcca

SEQ ID NO: 11271 - RNA, 19 nt, synthetic construct
  source 1..19: mol_type = other RNA
tgctggctgacatcgagtg

SEQ ID NO: 11272 - RNA, 19 nt, synthetic construct
  source 1..19: mol_type = other RNA
ggaatgcagcctggacttt

SEQ ID NO: 11273 - RNA, 19 nt, synthetic construct
  source 1..19: mol_type = other RNA
cccacatgtgagcaccacg

SEQ ID NO: 11274 - RNA, 19 nt, synthetic construct
  source 1..19: mol_type = other RNA
ggaatgcagcctggacttt

SEQ ID NO: 11275 - RNA, 19 nt, synthetic construct
  source 1..19: mol_type = other RNA
ggaatgcagcctggacttt

SEQ ID NO: 11276 - RNA, 19 nt, synthetic construct
  source 1..19: mol_type = other RNA
cccacatgtgagcaccacg

SEQ ID NO: 11277 - RNA, 19 nt, synthetic construct
  source 1..19: mol_type = other RNA
ggaatgcagcctggacttt

SEQ ID NO: 11278 - RNA, 19 nt, synthetic construct
  source 1..19: mol_type = other RNA
cccacatgtgagcaccacg

SEQ ID NO: 11279 - RNA, 19 nt, synthetic construct
  source 1..19: mol_type = other RNA
acggtgcaatgtcaggagg

SEQ ID NO: 11280 - RNA, 19 nt, synthetic construct
  source 1..19: mol_type = other RNA
cggtgcaatgtcaggagga

SEQ ID NO: 11281 - RNA, 19 nt, synthetic construct
  source 1..19: mol_type = other RNA
ggagggcgccactcaggag

SEQ ID NO: 11282 - RNA, 19 nt, synthetic construct
  source 1..19: mol_type = other RNA
accaggtatgccctgtgct

SEQ ID NO: 11283 - RNA, 19 nt, synthetic construct
  source 1..19: mol_type = other RNA
ccaccacgacaagggccac

SEQ ID NO: 11284 - RNA, 19 nt, synthetic construct
  source 1..19: mol_type = other RNA
ccaccacgacaagggccac

SEQ ID NO: 11285 - RNA, 19 nt, synthetic construct
  source 1..19: mol_type = other RNA
ggctctggcggccatgctc

SEQ ID NO: 11286 - RNA, 19 nt, synthetic construct
  source 1..19: mol_type = other RNA
cccgggcacctccttcaac

SEQ ID NO: 11287 - RNA, 19 nt, synthetic construct
  source 1..19: mol_type = other RNA
acaaccagaggctccacgg

SEQ ID NO: 11288 - RNA, 19 nt, synthetic construct
  source 1..19: mol_type = other RNA
tggtactcccccatcactg

SEQ ID NO: 11289 - RNA, 19 nt, synthetic construct
  source 1..19: mol_type = other RNA
tggtactcccccatcactg

SEQ ID NO: 11290 - RNA, 19 nt, synthetic construct
  source 1..19: mol_type = other RNA
acaaccagaggctccacgg

SEQ ID NO: 11291 - RNA, 19 nt, synthetic construct
  source 1..19: mol_type = other RNA
tggtactcccccatcactg

SEQ ID NO: 11292 - RNA, 19 nt, synthetic construct
  source 1..19: mol_type = other RNA
tggtactcccccatcactg

SEQ ID NO: 11293 - RNA, 19 nt, synthetic construct
  source 1..19: mol_type = other RNA
tggtactcccccatcactg

SEQ ID NO: 11294 - RNA, 19 nt, synthetic construct
  source 1..19: mol_type = other RNA
gtgtggctcaccctgcacg

SEQ ID NO: 11295 - RNA, 19 nt, synthetic construct
  source 1..19: mol_type = other RNA
tgccacaaccttgtgcccc

SEQ ID NO: 11296 - RNA, 19 nt, synthetic construct
  source 1..19: mol_type = other RNA
aacgcctgcatcagcgacc

SEQ ID NO: 11297 - RNA, 19 nt, synthetic construct
  source 1..19: mol_type = other RNA
ggggggccagccgcggaac

SEQ ID NO: 11298 - RNA, 19 nt, synthetic construct
  source 1..19: mol_type = other RNA
gttctgtccaagaaatgtg

SEQ ID NO: 11299 - RNA, 19 nt, synthetic construct
  source 1..19: mol_type = other RNA
tggtggaggccacgggcgc

SEQ ID NO: 11300 - RNA, 19 nt, synthetic construct
  source 1..19: mol_type = other RNA
aggctgcctgtgccaatgc

SEQ ID NO: 11301 - RNA, 19 nt, synthetic construct
  source 1..19: mol_type = other RNA
tggtgtacctggactgcag

SEQ ID NO: 11302 - RNA, 19 nt, synthetic construct
  source 1..19: mol_type = other RNA
agactttgagacgtttgaa

SEQ ID NO: 11303 - RNA, 19 nt, synthetic construct
  source 1..19: mol_type = other RNA
cagagctggagacggccac

SEQ ID NO: 11304 - RNA, 19 nt, synthetic construct
  source 1..19: mol_type = other RNA
gcttccaaagagccgctga

SEQ ID NO: 11305 - RNA, 19 nt, synthetic construct
  source 1..19: mol_type = other RNA
acctggatcctcacagagc

SEQ ID NO: 11306 - RNA, 19 nt, synthetic construct
  source 1..19: mol_type = other RNA
accacagcagccactacga

SEQ ID NO: 11307 - RNA, 19 nt, synthetic construct
  source 1..19: mol_type = other RNA
accactggatccacggcca

SEQ ID NO: 11308 - RNA, 19 nt, synthetic construct
  source 1..19: mol_type = other RNA
aaagtgctgaccagcacgg

SEQ ID NO: 11309 - RNA, 19 nt, synthetic construct
  source 1..19: mol_type = other RNA
aaagtgctgaccagcacgg

SEQ ID NO: 11310 - RNA, 19 nt, synthetic construct
  source 1..19: mol_type = other RNA
tcaactccagggacaactc

SEQ ID NO: 11311 - RNA, 19 nt, synthetic construct
  source 1..19: mol_type = other RNA
agtggctccacggtgaccc

SEQ ID NO: 11312 - RNA, 19 nt, synthetic construct
  source 1..19: mol_type = other RNA
agtggctccacggtgaccc

SEQ ID NO: 11313 - RNA, 19 nt, synthetic construct
  source 1..19: mol_type = other RNA
tactccagagaccacccac

SEQ ID NO: 11314 - RNA, 19 nt, synthetic construct
  source 1..19: mol_type = other RNA
cccaaagcctgtggccaac

SEQ ID NO: 11315 - RNA, 19 nt, synthetic construct
  source 1..19: mol_type = other RNA
gaaaggatggctgctgggc

SEQ ID NO: 11316 - RNA, 19 nt, synthetic construct
  source 1..19: mol_type = other RNA
ctgagccaggtctttgctg

SEQ ID NO: 11317 - RNA, 19 nt, synthetic construct
  source 1..19: mol_type = other RNA
gcccttccctgccacatgt

SEQ ID NO: 11318 - RNA, 19 nt, synthetic construct
  source 1..19: mol_type = other RNA
agtgctgtggggagtgcgt

SEQ ID NO: 11319 - RNA, 19 nt, synthetic construct
  source 1..19: mol_type = other RNA
tgaatgaaacctgggtcaa

SEQ ID NO: 11320 - RNA, 19 nt, synthetic construct
  source 1..19: mol_type = other RNA
gagggcgccactcaggagt

SEQ ID NO: 11321 - RNA, 19 nt, synthetic construct
  source 1..19: mol_type = other RNA
agaaccaggctgacgactt

SEQ ID NO: 11322 - RNA, 19 nt, synthetic construct
  source 1..19: mol_type = other RNA
ccgccaagggcgtacagct

SEQ ID NO: 11323 - RNA, 19 nt, synthetic construct
  source 1..19: mol_type = other RNA
gtgtgtgacgagggttcag

SEQ ID NO: 11324 - RNA, 19 nt, synthetic construct
  source 1..19: mol_type = other RNA
caggccccgtgacggtcac

SEQ ID NO: 11325 - RNA, 19 nt, synthetic construct
  source 1..19: mol_type = other RNA
cacaaccagaggctccacg

SEQ ID NO: 11326 - RNA, 19 nt, synthetic construct
  source 1..19: mol_type = other RNA
cacaaccagaggctccacg

SEQ ID NO: 11327 - RNA, 19 nt, synthetic construct
  source 1..19: mol_type = other RNA
ccacccagcactcgactcc

SEQ ID NO: 11328 - RNA, 19 nt, synthetic construct
  source 1..19: mol_type = other RNA
ccacccagcactcgactcc

SEQ ID NO: 11329 - RNA, 19 nt, synthetic construct
  source 1..19: mol_type = other RNA
ccacccagcactcgactcc

SEQ ID NO: 11330 - RNA, 19 nt, synthetic construct
  source 1..19: mol_type = other RNA
atcctcacaaagctgacca

SEQ ID NO: 11331 - RNA, 19 nt, synthetic construct
  source 1..19: mol_type = other RNA
ccacccagcactcgactcc

SEQ ID NO: 11332 - RNA, 19 nt, synthetic construct
  source 1..19: mol_type = other RNA
ccttccctgccacatgtgt

SEQ ID NO: 11333 - RNA, 19 nt, synthetic construct
  source 1..19: mol_type = other RNA
tgtgtgacgagggttcagt

SEQ ID NO: 11334 - RNA, 19 nt, synthetic construct
  source 1..19: mol_type = other RNA
ggcgccactcaggagtcct

SEQ ID NO: 11335 - RNA, 19 nt, synthetic construct
  source 1..19: mol_type = other RNA
tccagtccaaggactgcaa

SEQ ID NO: 11336 - RNA, 19 nt, synthetic construct
  source 1..19: mol_type = other RNA
tccagtccaaggactgcaa

SEQ ID NO: 11337 - RNA, 19 nt, synthetic construct
  source 1..19: mol_type = other RNA
tccagtccaaggactgcaa

SEQ ID NO: 11338 - RNA, 19 nt, synthetic construct
  source 1..19: mol_type = other RNA
caagaaatgtgccgacagc

SEQ ID NO: 11339 - RNA, 19 nt, synthetic construct
  source 1..19: mol_type = other RNA
gacaagggccaccagttcc

SEQ ID NO: 11340 - RNA, 19 nt, synthetic construct
  source 1..19: mol_type = other RNA
tcctcacaaagctgaccac

SEQ ID NO: 11341 - RNA, 19 nt, synthetic construct
  source 1..19: mol_type = other RNA
gacaagggccaccagttcc

SEQ ID NO: 11342 - RNA, 19 nt, synthetic construct
  source 1..19: mol_type = other RNA
gtacagccaccacgggagg

SEQ ID NO: 11343 - RNA, 19 nt, synthetic construct
  source 1..19: mol_type = other RNA
ggccacaccaggggcacct

SEQ ID NO: 11344 - RNA, 19 nt, synthetic construct
  source 1..19: mol_type = other RNA
gtgcactgtgacgtccact

SEQ ID NO: 11345 - RNA, 19 nt, synthetic construct
  source 1..19: mol_type = other RNA
ggccgcctgcgcccaggac

SEQ ID NO: 11346 - RNA, 19 nt, synthetic construct
  source 1..19: mol_type = other RNA
ggtgcactgtgacgtccac

SEQ ID NO: 11347 - RNA, 19 nt, synthetic construct
  source 1..19: mol_type = other RNA
gctggcaccctcaaagtgc

SEQ ID NO: 11348 - RNA, 19 nt, synthetic construct
  source 1..19: mol_type = other RNA
cggcgcacaatgggcgggt

SEQ ID NO: 11349 - RNA, 19 nt, synthetic construct
  source 1..19: mol_type = other RNA
gccctcacctcgcagactg

SEQ ID NO: 11350 - RNA, 19 nt, synthetic construct
  source 1..19: mol_type = other RNA
tgacgtccacttcggcctg

SEQ ID NO: 11351 - RNA, 19 nt, synthetic construct
  source 1..19: mol_type = other RNA
atcccccagatacacaagc

SEQ ID NO: 11352 - RNA, 19 nt, synthetic construct
  source 1..19: mol_type = other RNA
cctatcacagaccaccaca

SEQ ID NO: 11353 - RNA, 19 nt, synthetic construct
  source 1..19: mol_type = other RNA
tgtgcctggtcagagtggc

SEQ ID NO: 11354 - RNA, 19 nt, synthetic construct
  source 1..19: mol_type = other RNA
cctatcacagaccaccaca

SEQ ID NO: 11355 - RNA, 19 nt, synthetic construct
  source 1..19: mol_type = other RNA
tgtgcctggtcagagtggc

SEQ ID NO: 11356 - RNA, 19 nt, synthetic construct
  source 1..19: mol_type = other RNA
ctggatcctcacagagccc

SEQ ID NO: 11357 - RNA, 19 nt, synthetic construct
  source 1..19: mol_type = other RNA
cctatcacagaccaccaca

SEQ ID NO: 11358 - RNA, 19 nt, synthetic construct
  source 1..19: mol_type = other RNA
tgtgcctggtcagagtggc

SEQ ID NO: 11359 - RNA, 19 nt, synthetic construct
  source 1..19: mol_type = other RNA
cctatcacagaccaccaca

SEQ ID NO: 11360 - RNA, 19 nt, synthetic construct
  source 1..19: mol_type = other RNA
tgtgcctggtcagagtggc

SEQ ID NO: 11361 - RNA, 19 nt, synthetic construct
  source 1..19: mol_type = other RNA
cctatcacagaccaccaca

SEQ ID NO: 11362 - RNA, 19 nt, synthetic construct
  source 1..19: mol_type = other RNA
cacctcctctactccagag

SEQ ID NO: 11363 - RNA, 19 nt, synthetic construct
  source 1..19: mol_type = other RNA
tcagcatcccaaagccccc

SEQ ID NO: 11364 - RNA, 19 nt, synthetic construct
  source 1..19: mol_type = other RNA
ggagccgagctgggagaat

SEQ ID NO: 11365 - RNA, 19 nt, synthetic construct
  source 1..19: mol_type = other RNA
caggctgaccccgctccag

SEQ ID NO: 11366 - RNA, 19 nt, synthetic construct
  source 1..19: mol_type = other RNA
ctgcgggttctctgctgcg

SEQ ID NO: 11367 - RNA, 19 nt, synthetic construct
  source 1..19: mol_type = other RNA
ccgacaggcacagccagca

SEQ ID NO: 11368 - RNA, 19 nt, synthetic construct
  source 1..19: mol_type = other RNA
tggcaacaccctcctctag

SEQ ID NO: 11369 - RNA, 19 nt, synthetic construct
  source 1..19: mol_type = other RNA
agcactcgactccagccct

SEQ ID NO: 11370 - RNA, 19 nt, synthetic construct
  source 1..19: mol_type = other RNA
tgaccatgggctgtgagcc

SEQ ID NO: 11371 - RNA, 19 nt, synthetic construct
  source 1..19: mol_type = other RNA
ccagtgtgcctggtcagag

SEQ ID NO: 11372 - RNA, 19 nt, synthetic construct
  source 1..19: mol_type = other RNA
cgagtgccgtgcccaggcc

SEQ ID NO: 11373 - RNA, 19 nt, synthetic construct
  source 1..19: mol_type = other RNA
tggcaacaccctcctctag

SEQ ID NO: 11374 - RNA, 19 nt, synthetic construct
  source 1..19: mol_type = other RNA
tgaccatgggctgtgagcc

SEQ ID NO: 11375 - RNA, 19 nt, synthetic construct
  source 1..19: mol_type = other RNA
ccagtgtgcctggtcagag

SEQ ID NO: 11376 - RNA, 19 nt, synthetic construct
  source 1..19: mol_type = other RNA
cgagtgccgtgcccaggcc

SEQ ID NO: 11377 - RNA, 19 nt, synthetic construct
  source 1..19: mol_type = other RNA
tccagggacgacctggatc

SEQ ID NO: 11378 - RNA, 19 nt, synthetic construct
  source 1..19: mol_type = other RNA
accccgggaacagctcccc

SEQ ID NO: 11379 - RNA, 19 nt, synthetic construct
  source 1..19: mol_type = other RNA
ccctcccagaacagaccac

SEQ ID NO: 11380 - RNA, 19 nt, synthetic construct
  source 1..19: mol_type = other RNA
ctggcaccctcaaagtgct

SEQ ID NO: 11381 - RNA, 19 nt, synthetic construct
  source 1..19: mol_type = other RNA
tggcaacaccctcctctag

SEQ ID NO: 11382 - RNA, 19 nt, synthetic construct
  source 1..19: mol_type = other RNA
ccagtgtgcctggtcagag

SEQ ID NO: 11383 - RNA, 19 nt, synthetic construct
  source 1..19: mol_type = other RNA
cgagtgccgtgcccaggcc

SEQ ID NO: 11384 - RNA, 19 nt, synthetic construct
  source 1..19: mol_type = other RNA
gacggcacgcacgcctcca

SEQ ID NO: 11385 - RNA, 19 nt, synthetic construct
  source 1..19: mol_type = other RNA
tggcaacaccctcctctag

SEQ ID NO: 11386 - RNA, 19 nt, synthetic construct
  source 1..19: mol_type = other RNA
ccagtgtgcctggtcagag

SEQ ID NO: 11387 - RNA, 19 nt, synthetic construct
  source 1..19: mol_type = other RNA
cgagtgccgtgcccaggcc

SEQ ID NO: 11388 - RNA, 19 nt, synthetic construct
  source 1..19: mol_type = other RNA
accccgggaacagctcccc

SEQ ID NO: 11389 - RNA, 19 nt, synthetic construct
  source 1..19: mol_type = other RNA
ccctcccagaacagaccac

SEQ ID NO: 11390 - RNA, 19 nt, synthetic construct
  source 1..19: mol_type = other RNA
ccgtggccaccatgtccac

SEQ ID NO: 11391 - RNA, 19 nt, synthetic construct
  source 1..19: mol_type = other RNA
ccgccagagtgctgaccac

SEQ ID NO: 11392 - RNA, 19 nt, synthetic construct
  source 1..19: mol_type = other RNA
tggcaacaccctcctctag

SEQ ID NO: 11393 - RNA, 19 nt, synthetic construct
  source 1..19: mol_type = other RNA
ccggggagcggtgggtcag

SEQ ID NO: 11394 - RNA, 19 nt, synthetic construct
  source 1..19: mol_type = other RNA
gcctgtgtgcccgccaggg

SEQ ID NO: 11395 - RNA, 19 nt, synthetic construct
  source 1..19: mol_type = other RNA
ctttgagtacaagagagtg

SEQ ID NO: 11396 - RNA, 19 nt, synthetic construct
  source 1..19: mol_type = other RNA
ccctcaacatgcagcacca

SEQ ID NO: 11397 - RNA, 19 nt, synthetic construct
  source 1..19: mol_type = other RNA
tcccccagatacacaagca

SEQ ID NO: 11398 - RNA, 19 nt, synthetic construct
  source 1..19: mol_type = other RNA
cctctccggcaggtgaatg

SEQ ID NO: 11399 - RNA, 19 nt, synthetic construct
  source 1..19: mol_type = other RNA
cttctcgcgctgccactcc

SEQ ID NO: 11400 - RNA, 19 nt, synthetic construct
  source 1..19: mol_type = other RNA
ggtgaccacgggctgtgag

SEQ ID NO: 11401 - RNA, 19 nt, synthetic construct
  source 1..19: mol_type = other RNA
ggtgaccacgggctgtgag

SEQ ID NO: 11402 - RNA, 19 nt, synthetic construct
  source 1..19: mol_type = other RNA
gctgagggtggagtccatt

SEQ ID NO: 11403 - RNA, 19 nt, synthetic construct
  source 1..19: mol_type = other RNA
tgcccaccccgtgggtgaa

SEQ ID NO: 11404 - RNA, 19 nt, synthetic construct
  source 1..19: mol_type = other RNA
gccgcctgcgcccaggacc

SEQ ID NO: 11405 - RNA, 19 nt, synthetic construct
  source 1..19: mol_type = other RNA
acagctttgaaggcagctg

SEQ ID NO: 11406 - RNA, 19 nt, synthetic construct
  source 1..19: mol_type = other RNA
gacatcccccagatacaca

SEQ ID NO: 11407 - RNA, 19 nt, synthetic construct
  source 1..19: mol_type = other RNA
ctagggaccacccacacac

SEQ ID NO: 11408 - RNA, 19 nt, synthetic construct
  source 1..19: mol_type = other RNA
agccccacatcggccccca

SEQ ID NO: 11409 - RNA, 19 nt, synthetic construct
  source 1..19: mol_type = other RNA
gaccatgggctgtgagccc

SEQ ID NO: 11410 - RNA, 19 nt, synthetic construct
  source 1..19: mol_type = other RNA
ctagggaccacccacacac

SEQ ID NO: 11411 - RNA, 19 nt, synthetic construct
  source 1..19: mol_type = other RNA
gaccatgggctgtgagccc

SEQ ID NO: 11412 - RNA, 19 nt, synthetic construct
  source 1..19: mol_type = other RNA
ctagggaccacccacacac

SEQ ID NO: 11413 - RNA, 19 nt, synthetic construct
  source 1..19: mol_type = other RNA
agccccacatcggccccca

SEQ ID NO: 11414 - RNA, 19 nt, synthetic construct
  source 1..19: mol_type = other RNA
ctagggaccacccacacac

SEQ ID NO: 11415 - RNA, 19 nt, synthetic construct
  source 1..19: mol_type = other RNA
agccccacatcggccccca

SEQ ID NO: 11416 - RNA, 19 nt, synthetic construct
  source 1..19: mol_type = other RNA
tgggccccgactggcacac

SEQ ID NO: 11417 - RNA, 19 nt, synthetic construct
  source 1..19: mol_type = other RNA
ggtgtctagcacacccacc

SEQ ID NO: 11418 - RNA, 19 nt, synthetic construct
  source 1..19: mol_type = other RNA
atgctcgtggtgccgcagg

SEQ ID NO: 11419 - RNA, 19 nt, synthetic construct
  source 1..19: mol_type = other RNA
ggcgcacaatgggcgggtg

SEQ ID NO: 11420 - RNA, 19 nt, synthetic construct
  source 1..19: mol_type = other RNA
ctggtgctgacattcctgt

SEQ ID NO: 11421 - RNA, 19 nt, synthetic construct
  source 1..19: mol_type = other RNA
tggtgctgacattcctgtg

SEQ ID NO: 11422 - RNA, 19 nt, synthetic construct
  source 1..19: mol_type = other RNA
tgctggatgacatcacgca

SEQ ID NO: 11423 - RNA, 19 nt, synthetic construct
  source 1..19: mol_type = other RNA
cgcacctacagcccgggca

SEQ ID NO: 11424 - RNA, 19 nt, synthetic construct
  source 1..19: mol_type = other RNA
ggctgacgacttcacggcc

SEQ ID NO: 11425 - RNA, 19 nt, synthetic construct
  source 1..19: mol_type = other RNA
agcgactggagggacggcg

SEQ ID NO: 11426 - RNA, 19 nt, synthetic construct
  source 1..19: mol_type = other RNA
caccacccacgggaccttc

SEQ ID NO: 11427 - RNA, 19 nt, synthetic construct
  source 1..19: mol_type = other RNA
gagctgatcctccaagagg

SEQ ID NO: 11428 - RNA, 19 nt, synthetic construct
  source 1..19: mol_type = other RNA
tccggacacctgccccttg

SEQ ID NO: 11429 - RNA, 19 nt, synthetic construct
  source 1..19: mol_type = other RNA
cgagctgcgggttctctgc

SEQ ID NO: 11430 - RNA, 19 nt, synthetic construct
  source 1..19: mol_type = other RNA
cctatgggtgaccccgagc

SEQ ID NO: 11431 - RNA, 19 nt, synthetic construct
  source 1..19: mol_type = other RNA
cctctcagaaggactgaca

SEQ ID NO: 11432 - RNA, 19 nt, synthetic construct
  source 1..19: mol_type = other RNA
cccccagatacacaagcac

SEQ ID NO: 11433 - RNA, 19 nt, synthetic construct
  source 1..19: mol_type = other RNA
gccacccacgctggcccca

SEQ ID NO: 11434 - RNA, 19 nt, synthetic construct
  source 1..19: mol_type = other RNA
cacccacgctggccccaac

SEQ ID NO: 11435 - RNA, 19 nt, synthetic construct
  source 1..19: mol_type = other RNA
tccaaagagccgctgacca

SEQ ID NO: 11436 - RNA, 19 nt, synthetic construct
  source 1..19: mol_type = other RNA
cgagcgagctgtccacctc

SEQ ID NO: 11437 - RNA, 19 nt, synthetic construct
  source 1..19: mol_type = other RNA
ctgagaacagctccccctc

SEQ ID NO: 11438 - RNA, 19 nt, synthetic construct
  source 1..19: mol_type = other RNA
cccagtgccgaacaccatg

SEQ ID NO: 11439 - RNA, 19 nt, synthetic construct
  source 1..19: mol_type = other RNA
cacccacatcacagagcct

SEQ ID NO: 11440 - RNA, 19 nt, synthetic construct
  source 1..19: mol_type = other RNA
acccacatcacagagcctt

SEQ ID NO: 11441 - RNA, 19 nt, synthetic construct
  source 1..19: mol_type = other RNA
catcacagagccttccacg

SEQ ID NO: 11442 - RNA, 19 nt, synthetic construct
  source 1..19: mol_type = other RNA
agagccttccacggtgact

SEQ ID NO: 11443 - RNA, 19 nt, synthetic construct
  source 1..19: mol_type = other RNA
gccctcaccctagcagcag

SEQ ID NO: 11444 - RNA, 19 nt, synthetic construct
  source 1..19: mol_type = other RNA
gccccacatcggcccccat

SEQ ID NO: 11445 - RNA, 19 nt, synthetic construct
  source 1..19: mol_type = other RNA
gtctgcaggaaccgtgagc

SEQ ID NO: 11446 - RNA, 19 nt, synthetic construct
  source 1..19: mol_type = other RNA
ggccaccagctctacggcc

SEQ ID NO: 11447 - RNA, 19 nt, synthetic construct
  source 1..19: mol_type = other RNA
gccactcccttctccagtc

SEQ ID NO: 11448 - RNA, 19 nt, synthetic construct
  source 1..19: mol_type = other RNA
cacccacatcacagagcct

SEQ ID NO: 11449 - RNA, 19 nt, synthetic construct
  source 1..19: mol_type = other RNA
acccacatcacagagcctt

SEQ ID NO: 11450 - RNA, 19 nt, synthetic construct
  source 1..19: mol_type = other RNA
catcacagagccttccacg

SEQ ID NO: 11451 - RNA, 19 nt, synthetic construct
  source 1..19: mol_type = other RNA
gtctgcaggaaccgtgagc

SEQ ID NO: 11452 - RNA, 19 nt, synthetic construct
  source 1..19: mol_type = other RNA
ggccaccagctctacggcc

SEQ ID NO: 11453 - RNA, 19 nt, synthetic construct
  source 1..19: mol_type = other RNA
atcctcacagagcagacca

SEQ ID NO: 11454 - RNA, 19 nt, synthetic construct
  source 1..19: mol_type = other RNA
ggccatcccgtcctccacc

SEQ ID NO: 11455 - RNA, 19 nt, synthetic construct
  source 1..19: mol_type = other RNA
tcccagaacagaccaccac

SEQ ID NO: 11456 - RNA, 19 nt, synthetic construct
  source 1..19: mol_type = other RNA
cacccatggccaccatgtc

SEQ ID NO: 11457 - RNA, 19 nt, synthetic construct
  source 1..19: mol_type = other RNA
cacccacatcacagagcct

SEQ ID NO: 11458 - RNA, 19 nt, synthetic construct
  source 1..19: mol_type = other RNA
acccacatcacagagcctt

SEQ ID NO: 11459 - RNA, 19 nt, synthetic construct
  source 1..19: mol_type = other RNA
catcacagagccttccacg

SEQ ID NO: 11460 - RNA, 19 nt, synthetic construct
  source 1..19: mol_type = other RNA
agagccttccacggtgact

SEQ ID NO: 11461 - RNA, 19 nt, synthetic construct
  source 1..19: mol_type = other RNA
gccccacatcggcccccat

SEQ ID NO: 11462 - RNA, 19 nt, synthetic construct
  source 1..19: mol_type = other RNA
gtctgcaggaaccgtgagc

SEQ ID NO: 11463 - RNA, 19 nt, synthetic construct
  source 1..19: mol_type = other RNA
ggccaccagctctacggcc

SEQ ID NO: 11464 - RNA, 19 nt, synthetic construct
  source 1..19: mol_type = other RNA
gccactcccttctccagtc

SEQ ID NO: 11465 - RNA, 19 nt, synthetic construct
  source 1..19: mol_type = other RNA
catcactgatcaccacggc

SEQ ID NO: 11466 - RNA, 19 nt, synthetic construct
  source 1..19: mol_type = other RNA
cacccacatcacagagcct

SEQ ID NO: 11467 - RNA, 19 nt, synthetic construct
  source 1..19: mol_type = other RNA
acccacatcacagagcctt

SEQ ID NO: 11468 - RNA, 19 nt, synthetic construct
  source 1..19: mol_type = other RNA
catcacagagccttccacg

SEQ ID NO: 11469 - RNA, 19 nt, synthetic construct
  source 1..19: mol_type = other RNA
gccccacatcggcccccat

SEQ ID NO: 11470 - RNA, 19 nt, synthetic construct
  source 1..19: mol_type = other RNA
gtctgcaggaaccgtgagc

SEQ ID NO: 11471 - RNA, 19 nt, synthetic construct
  source 1..19: mol_type = other RNA
ggccaccagctctacggcc

SEQ ID NO: 11472 - RNA, 19 nt, synthetic construct
  source 1..19: mol_type = other RNA
tcccagaacagaccaccac

SEQ ID NO: 11473 - RNA, 19 nt, synthetic construct
  source 1..19: mol_type = other RNA
tccaccctgtggaccacgt

SEQ ID NO: 11474 - RNA, 19 nt, synthetic construct
  source 1..19: mol_type = other RNA
cacagtgctgaccaccaca

SEQ ID NO: 11475 - RNA, 19 nt, synthetic construct
  source 1..19: mol_type = other RNA
actggatccacggccaccc

SEQ ID NO: 11476 - RNA, 19 nt, synthetic construct
  source 1..19: mol_type = other RNA
gtcctcaccaccctgagac

SEQ ID NO: 11477 - RNA, 19 nt, synthetic construct
  source 1..19: mol_type = other RNA
cgctttgggaatctcagcc

SEQ ID NO: 11478 - RNA, 19 nt, synthetic construct
  source 1..19: mol_type = other RNA
ccaaagtgtacaagccatg

SEQ ID NO: 11479 - RNA, 19 nt, synthetic construct
  source 1..19: mol_type = other RNA
accttccgctgcagacctc

SEQ ID NO: 11480 - RNA, 19 nt, synthetic construct
  source 1..19: mol_type = other RNA
tgtgtacctgcctctctgg

SEQ ID NO: 11481 - RNA, 19 nt, synthetic construct
  source 1..19: mol_type = other RNA
gctttgagtacaagagagt

SEQ ID NO: 11482 - RNA, 19 nt, synthetic construct
  source 1..19: mol_type = other RNA
aggaggactcctgtcaagt

SEQ ID NO: 11483 - RNA, 19 nt, synthetic construct
  source 1..19: mol_type = other RNA
gaccatcctgtggcaccag

SEQ ID NO: 11484 - RNA, 19 nt, synthetic construct
  source 1..19: mol_type = other RNA
cgaggagacggtgcccttg

SEQ ID NO: 11485 - RNA, 19 nt, synthetic construct
  source 1..19: mol_type = other RNA
tgcgcccatggctccccca

SEQ ID NO: 11486 - RNA, 19 nt, synthetic construct
  source 1..19: mol_type = other RNA
ggagcgcccgcgcagcacg

SEQ ID NO: 11487 - RNA, 19 nt, synthetic construct
  source 1..19: mol_type = other RNA
gccaggaagctgcgacagg

SEQ ID NO: 11488 - RNA, 19 nt, synthetic construct
  source 1..19: mol_type = other RNA
cagatacacaagcaccctt

SEQ ID NO: 11489 - RNA, 19 nt, synthetic construct
  source 1..19: mol_type = other RNA
ggcgtacagctcagcgact

SEQ ID NO: 11490 - RNA, 19 nt, synthetic construct
  source 1..19: mol_type = other RNA
ccgacgtcctcgcccaccc

SEQ ID NO: 11491 - RNA, 19 nt, synthetic construct
  source 1..19: mol_type = other RNA
ccacaaccagaggttccac

SEQ ID NO: 11492 - RNA, 19 nt, synthetic construct
  source 1..19: mol_type = other RNA
acaacacctatccccccag

SEQ ID NO: 11493 - RNA, 19 nt, synthetic construct
  source 1..19: mol_type = other RNA
acaacacctatccccccag

SEQ ID NO: 11494 - RNA, 19 nt, synthetic construct
  source 1..19: mol_type = other RNA
gcgacctcacctgcccacc

SEQ ID NO: 11495 - RNA, 19 nt, synthetic construct
  source 1..19: mol_type = other RNA
cttccgctgcagacctcag

SEQ ID NO: 11496 - RNA, 19 nt, synthetic construct
  source 1..19: mol_type = other RNA
acttctacaacccacatgg

SEQ ID NO: 11497 - RNA, 19 nt, synthetic construct
  source 1..19: mol_type = other RNA
ggtctgcaggaaccgtgag

SEQ ID NO: 11498 - RNA, 19 nt, synthetic construct
  source 1..19: mol_type = other RNA
ggtctgcaggaaccgtgag

SEQ ID NO: 11499 - RNA, 19 nt, synthetic construct
  source 1..19: mol_type = other RNA
ggtctgcaggaaccgtgag

SEQ ID NO: 11500 - RNA, 19 nt, synthetic construct
  source 1..19: mol_type = other RNA
ggtctgcaggaaccgtgag

SEQ ID NO: 11501 - RNA, 19 nt, synthetic construct
  source 1..19: mol_type = other RNA
cagggcatttggacagttt

SEQ ID NO: 11502 - RNA, 19 nt, synthetic construct
  source 1..19: mol_type = other RNA
ggagaatgcagggcacacc

SEQ ID NO: 11503 - RNA, 19 nt, synthetic construct
  source 1..19: mol_type = other RNA
taccaggtatgccctgtgc

SEQ ID NO: 11504 - RNA, 19 nt, synthetic construct
  source 1..19: mol_type = other RNA
ctccagagactgcccacac

SEQ ID NO: 11505 - RNA, 19 nt, synthetic construct
  source 1..19: mol_type = other RNA
ttccagccctcaccctagc

SEQ ID NO: 11506 - RNA, 19 nt, synthetic construct
  source 1..19: mol_type = other RNA
gtccagccctcaccctagc

SEQ ID NO: 11507 - RNA, 19 nt, synthetic construct
  source 1..19: mol_type = other RNA
tcacagagcccagcactac

SEQ ID NO: 11508 - RNA, 19 nt, synthetic construct
  source 1..19: mol_type = other RNA
cctcctccacccgggcaac

SEQ ID NO: 11509 - RNA, 19 nt, synthetic construct
  source 1..19: mol_type = other RNA
gtccagccctcaccctagc

SEQ ID NO: 11510 - RNA, 19 nt, synthetic construct
  source 1..19: mol_type = other RNA
ctccagagactgcccacac

SEQ ID NO: 11511 - RNA, 19 nt, synthetic construct
  source 1..19: mol_type = other RNA
gtccagccctcaccctagc

SEQ ID NO: 11512 - RNA, 19 nt, synthetic construct
  source 1..19: mol_type = other RNA
caactccagggacaacacc

SEQ ID NO: 11513 - RNA, 19 nt, synthetic construct
  source 1..19: mol_type = other RNA
tgttggctctggcggccat

SEQ ID NO: 11514 - RNA, 19 nt, synthetic construct
  source 1..19: mol_type = other RNA
cttctacaacccacatggg

SEQ ID NO: 11515 - RNA, 19 nt, synthetic construct
  source 1..19: mol_type = other RNA
gcgggcctatgtgtccctg

SEQ ID NO: 11516 - RNA, 19 nt, synthetic construct
  source 1..19: mol_type = other RNA
ccatcccctccttcaccct

SEQ ID NO: 11517 - RNA, 19 nt, synthetic construct
  source 1..19: mol_type = other RNA
ccaacaacaatggcaacct

SEQ ID NO: 11518 - RNA, 19 nt, synthetic construct
  source 1..19: mol_type = other RNA
agaactgcctgaaagcggt

SEQ ID NO: 11519 - RNA, 19 nt, synthetic construct
  source 1..19: mol_type = other RNA
caacaacaatggcaacctc

SEQ ID NO: 11520 - RNA, 19 nt, synthetic construct
  source 1..19: mol_type = other RNA
ccatgtccacaatccaccc

SEQ ID NO: 11521 - RNA, 19 nt, synthetic construct
  source 1..19: mol_type = other RNA
ccatgtccacaatccaccc

SEQ ID NO: 11522 - RNA, 19 nt, synthetic construct
  source 1..19: mol_type = other RNA
ccacgtccggccgctgggg

SEQ ID NO: 11523 - RNA, 19 nt, synthetic construct
  source 1..19: mol_type = other RNA
aacaacaatggcaacctcc

SEQ ID NO: 11524 - RNA, 19 nt, synthetic construct
  source 1..19: mol_type = other RNA
cgcgtgtgcctgcgactcg

SEQ ID NO: 11525 - RNA, 19 nt, synthetic construct
  source 1..19: mol_type = other RNA
cctcacctgcccacccacc

SEQ ID NO: 11526 - RNA, 19 nt, synthetic construct
  source 1..19: mol_type = other RNA
ctgccacctgcaactctag

SEQ ID NO: 11527 - RNA, 19 nt, synthetic construct
  source 1..19: mol_type = other RNA
acccccaaagtggtgacca

SEQ ID NO: 11528 - RNA, 19 nt, synthetic construct
  source 1..19: mol_type = other RNA
gcagacctcagctgtgttc

SEQ ID NO: 11529 - RNA, 19 nt, synthetic construct
  source 1..19: mol_type = other RNA
ctcagcgactggagggacg

SEQ ID NO: 11530 - RNA, 19 nt, synthetic construct
  source 1..19: mol_type = other RNA
acaaagctgaccacaacag

SEQ ID NO: 11531 - RNA, 19 nt, synthetic construct
  source 1..19: mol_type = other RNA
cagcccgggcacctccttc

SEQ ID NO: 11532 - RNA, 19 nt, synthetic construct
  source 1..19: mol_type = other RNA
aaccccgccaccgaccaca

SEQ ID NO: 11533 - RNA, 19 nt, synthetic construct
  source 1..19: mol_type = other RNA
tcccaaagtgctgaccacc

SEQ ID NO: 11534 - RNA, 19 nt, synthetic construct
  source 1..19: mol_type = other RNA
actgagaagcacagccacc

SEQ ID NO: 11535 - RNA, 19 nt, synthetic construct
  source 1..19: mol_type = other RNA
ccatgccggggccctctgg

SEQ ID NO: 11536 - RNA, 19 nt, synthetic construct
  source 1..19: mol_type = other RNA
actgagaagcacagccacc

SEQ ID NO: 11537 - RNA, 19 nt, synthetic construct
  source 1..19: mol_type = other RNA
ggacttcccacaccccagc

SEQ ID NO: 11538 - RNA, 19 nt, synthetic construct
  source 1..19: mol_type = other RNA
ccatgccggggccctctgg

SEQ ID NO: 11539 - RNA, 19 nt, synthetic construct
  source 1..19: mol_type = other RNA
actgagaagcacagccacc

SEQ ID NO: 11540 - RNA, 19 nt, synthetic construct
  source 1..19: mol_type = other RNA
cacaccctcctctactcca

SEQ ID NO: 11541 - RNA, 19 nt, synthetic construct
  source 1..19: mol_type = other RNA
tgacttcccacaccccagc

SEQ ID NO: 11542 - RNA, 19 nt, synthetic construct
  source 1..19: mol_type = other RNA
ccatgccggggccctctgg

SEQ ID NO: 11543 - RNA, 19 nt, synthetic construct
  source 1..19: mol_type = other RNA
actgagaagcacagccacc

SEQ ID NO: 11544 - RNA, 19 nt, synthetic construct
  source 1..19: mol_type = other RNA
ggacttcccacaccccagc

SEQ ID NO: 11545 - RNA, 19 nt, synthetic construct
  source 1..19: mol_type = other RNA
ccatgccggggccctctgg

SEQ ID NO: 11546 - RNA, 19 nt, synthetic construct
  source 1..19: mol_type = other RNA
actgagaagcacagccacc

SEQ ID NO: 11547 - RNA, 19 nt, synthetic construct
  source 1..19: mol_type = other RNA
atggtgcatgggaaggagg

SEQ ID NO: 11548 - RNA, 19 nt, synthetic construct
  source 1..19: mol_type = other RNA
tgtctgtgctggggaccac

SEQ ID NO: 11549 - RNA, 19 nt, synthetic construct
  source 1..19: mol_type = other RNA
tgtgtgcccgccagggcag

SEQ ID NO: 11550 - RNA, 19 nt, synthetic construct
  source 1..19: mol_type = other RNA
ggcaccagggctgcgagac

SEQ ID NO: 11551 - RNA, 19 nt, synthetic construct
  source 1..19: mol_type = other RNA
ccagttttgcaaataaacc

SEQ ID NO: 11552 - RNA, 19 nt, synthetic construct
  source 1..19: mol_type = other RNA
aggtggactgtgaccgcat

SEQ ID NO: 11553 - RNA, 19 nt, synthetic construct
  source 1..19: mol_type = other RNA
cgtgcggccggaggggcag

SEQ ID NO: 11554 - RNA, 19 nt, synthetic construct
  source 1..19: mol_type = other RNA
gtcgtcctgctggacccaa

SEQ ID NO: 11555 - RNA, 19 nt, synthetic construct
  source 1..19: mol_type = other RNA
actatgcccacagccactg

SEQ ID NO: 11556 - RNA, 19 nt, synthetic construct
  source 1..19: mol_type = other RNA
cacgtggatgagtgtggct

SEQ ID NO: 11557 - RNA, 19 nt, synthetic construct
  source 1..19: mol_type = other RNA
atcctcactgagctgacca

SEQ ID NO: 11558 - RNA, 19 nt, synthetic construct
  source 1..19: mol_type = other RNA
gatcctcactgagctgacc

SEQ ID NO: 11559 - RNA, 19 nt, synthetic construct
  source 1..19: mol_type = other RNA
ctcggcgggcacccctggg

SEQ ID NO: 11560 - RNA, 19 nt, synthetic construct
  source 1..19: mol_type = other RNA
caactccagggacaactcc

SEQ ID NO: 11561 - RNA, 19 nt, synthetic construct
  source 1..19: mol_type = other RNA
cgtggccaccatgtccaca

SEQ ID NO: 11562 - RNA, 19 nt, synthetic construct
  source 1..19: mol_type = other RNA
ggccttgcccctccctgat

SEQ ID NO: 11563 - RNA, 19 nt, synthetic construct
  source 1..19: mol_type = other RNA
acgccaggctgaccccgct

SEQ ID NO: 11564 - RNA, 19 nt, synthetic construct
  source 1..19: mol_type = other RNA
ctgtaactgcacacccagt

SEQ ID NO: 11565 - RNA, 19 nt, synthetic construct
  source 1..19: mol_type = other RNA
gtttgaaaacctgaggcag

SEQ ID NO: 11566 - RNA, 19 nt, synthetic construct
  source 1..19: mol_type = other RNA
aacaccatggccaccacac

SEQ ID NO: 11567 - RNA, 19 nt, synthetic construct
  source 1..19: mol_type = other RNA
gctgagccaggtctttgct

SEQ ID NO: 11568 - RNA, 19 nt, synthetic construct
  source 1..19: mol_type = other RNA
tcggcgggcacccctgggg

SEQ ID NO: 11569 - RNA, 19 nt, synthetic construct
  source 1..19: mol_type = other RNA
cccgatggccagccagtcc

SEQ ID NO: 11570 - RNA, 19 nt, synthetic construct
  source 1..19: mol_type = other RNA
aggaaccgtgagcaggtgg

SEQ ID NO: 11571 - RNA, 19 nt, synthetic construct
  source 1..19: mol_type = other RNA
ccaccacaaccggggccac

SEQ ID NO: 11572 - RNA, 19 nt, synthetic construct
  source 1..19: mol_type = other RNA
aggaaccgtgagcaggtgg

SEQ ID NO: 11573 - RNA, 19 nt, synthetic construct
  source 1..19: mol_type = other RNA
aggaaccgtgagcaggtgg

SEQ ID NO: 11574 - RNA, 19 nt, synthetic construct
  source 1..19: mol_type = other RNA
aggaaccgtgagcaggtgg

SEQ ID NO: 11575 - RNA, 19 nt, synthetic construct
  source 1..19: mol_type = other RNA
ccaccacaaccggggccac

SEQ ID NO: 11576 - RNA, 19 nt, synthetic construct
  source 1..19: mol_type = other RNA
cagctctgcgaggaccact

SEQ ID NO: 11577 - RNA, 19 nt, synthetic construct
  source 1..19: mol_type = other RNA
tgccctagggaccacccac

SEQ ID NO: 11578 - RNA, 19 nt, synthetic construct
  source 1..19: mol_type = other RNA
tgccctagggaccacccac

SEQ ID NO: 11579 - RNA, 19 nt, synthetic construct
  source 1..19: mol_type = other RNA
tgccctagggaccacccac

SEQ ID NO: 11580 - RNA, 19 nt, synthetic construct
  source 1..19: mol_type = other RNA
tgccctagggaccacccac

SEQ ID NO: 11581 - RNA, 19 nt, synthetic construct
  source 1..19: mol_type = other RNA
cggccgcctgtccatgcct

SEQ ID NO: 11582 - RNA, 19 nt, synthetic construct
  source 1..19: mol_type = other RNA
tgccgcaggcagagaccca

SEQ ID NO: 11583 - RNA, 19 nt, synthetic construct
  source 1..19: mol_type = other RNA
ggctgaccagggctccccc

SEQ ID NO: 11584 - RNA, 19 nt, synthetic construct
  source 1..19: mol_type = other RNA
caactggggccaccggctc

SEQ ID NO: 11585 - RNA, 19 nt, synthetic construct
  source 1..19: mol_type = other RNA
gcaacacagtgactccctc

SEQ ID NO: 11586 - RNA, 19 nt, synthetic construct
  source 1..19: mol_type = other RNA
agcagaaccaccgagtcac

SEQ ID NO: 11587 - RNA, 19 nt, synthetic construct
  source 1..19: mol_type = other RNA
tcctctactccagagactg

SEQ ID NO: 11588 - RNA, 19 nt, synthetic construct
  source 1..19: mol_type = other RNA
ctctactccagagaccacc

SEQ ID NO: 11589 - RNA, 19 nt, synthetic construct
  source 1..19: mol_type = other RNA
cagtcctcaccaccctgag

SEQ ID NO: 11590 - RNA, 19 nt, synthetic construct
  source 1..19: mol_type = other RNA
tgtggcctgtgtggggact

SEQ ID NO: 11591 - RNA, 19 nt, synthetic construct
  source 1..19: mol_type = other RNA
aggagggcatctgccaccg

SEQ ID NO: 11592 - RNA, 19 nt, synthetic construct
  source 1..19: mol_type = other RNA
ggaccactgtgtggacggc

SEQ ID NO: 11593 - RNA, 19 nt, synthetic construct
  source 1..19: mol_type = other RNA
gtgcagctggtgccactca

SEQ ID NO: 11594 - RNA, 19 nt, synthetic construct
  source 1..19: mol_type = other RNA
ccaggctgacgacttcacg

SEQ ID NO: 11595 - RNA, 19 nt, synthetic construct
  source 1..19: mol_type = other RNA
cttatgccagcagcctaag

SEQ ID NO: 11596 - RNA, 19 nt, synthetic construct
  source 1..19: mol_type = other RNA
ccccagatacacaagcacc

SEQ ID NO: 11597 - RNA, 19 nt, synthetic construct
  source 1..19: mol_type = other RNA
aggggtggccacatccacc

SEQ ID NO: 11598 - RNA, 19 nt, synthetic construct
  source 1..19: mol_type = other RNA
catccacccttccaacacg

SEQ ID NO: 11599 - RNA, 19 nt, synthetic construct
  source 1..19: mol_type = other RNA
ttaccgccacggccaccac

SEQ ID NO: 11600 - RNA, 19 nt, synthetic construct
  source 1..19: mol_type = other RNA
cctcaactcctgggacaac

SEQ ID NO: 11601 - RNA, 19 nt, synthetic construct
  source 1..19: mol_type = other RNA
actacagccaccgtgacgg

SEQ ID NO: 11602 - RNA, 19 nt, synthetic construct
  source 1..19: mol_type = other RNA
agtccaaggactgcaacca

SEQ ID NO: 11603 - RNA, 19 nt, synthetic construct
  source 1..19: mol_type = other RNA
catcccctccttcaccctt

SEQ ID NO: 11604 - RNA, 19 nt, synthetic construct
  source 1..19: mol_type = other RNA
cccagaacagaccaccaca

SEQ ID NO: 11605 - RNA, 19 nt, synthetic construct
  source 1..19: mol_type = other RNA
actacagccaccgtgacgg

SEQ ID NO: 11606 - RNA, 19 nt, synthetic construct
  source 1..19: mol_type = other RNA
actacagccaccgtgacgg

SEQ ID NO: 11607 - RNA, 19 nt, synthetic construct
  source 1..19: mol_type = other RNA
agtccaaggactgcaacca

SEQ ID NO: 11608 - RNA, 19 nt, synthetic construct
  source 1..19: mol_type = other RNA
cccagaacagaccaccaca

SEQ ID NO: 11609 - RNA, 19 nt, synthetic construct
  source 1..19: mol_type = other RNA
actacagccaccgtgacgg

SEQ ID NO: 11610 - RNA, 19 nt, synthetic construct
  source 1..19: mol_type = other RNA
ttaccgccacggccaccac

SEQ ID NO: 11611 - RNA, 19 nt, synthetic construct
  source 1..19: mol_type = other RNA
agtccaaggactgcaacca

SEQ ID NO: 11612 - RNA, 19 nt, synthetic construct
  source 1..19: mol_type = other RNA
cacagccgctctgtgatct

SEQ ID NO: 11613 - RNA, 19 nt, synthetic construct
  source 1..19: mol_type = other RNA
ccgggccgagaacccctgc

SEQ ID NO: 11614 - RNA, 19 nt, synthetic construct
  source 1..19: mol_type = other RNA
cacggggacttcccacacc

SEQ ID NO: 11615 - RNA, 19 nt, synthetic construct
  source 1..19: mol_type = other RNA
tgccgactaccacaaccac

SEQ ID NO: 11616 - RNA, 19 nt, synthetic construct
  source 1..19: mol_type = other RNA
tgccgactaccacaaccac

SEQ ID NO: 11617 - RNA, 19 nt, synthetic construct
  source 1..19: mol_type = other RNA
cagtggctccacggtgacc

SEQ ID NO: 11618 - RNA, 19 nt, synthetic construct
  source 1..19: mol_type = other RNA
cacggggacttcccacacc

SEQ ID NO: 11619 - RNA, 19 nt, synthetic construct
  source 1..19: mol_type = other RNA
tgccgactaccacaaccac

SEQ ID NO: 11620 - RNA, 19 nt, synthetic construct
  source 1..19: mol_type = other RNA
cagtggctccacggtgacc

SEQ ID NO: 11621 - RNA, 19 nt, synthetic construct
  source 1..19: mol_type = other RNA
tcaacatcaccttctgcga

SEQ ID NO: 11622 - RNA, 19 nt, synthetic construct
  source 1..19: mol_type = other RNA
tgaccgcatgcgggggctg

SEQ ID NO: 11623 - RNA, 19 nt, synthetic construct
  source 1..19: mol_type = other RNA
cgacgtcctcgcccacccg

SEQ ID NO: 11624 - RNA, 19 nt, synthetic construct
  source 1..19: mol_type = other RNA
gaaactctacgacctgcat

SEQ ID NO: 11625 - RNA, 19 nt, synthetic construct
  source 1..19: mol_type = other RNA
gactttgagacgtttgaaa

SEQ ID NO: 11626 - RNA, 19 nt, synthetic construct
  source 1..19: mol_type = other RNA
ccagaacagaccaccacac

SEQ ID NO: 11627 - RNA, 19 nt, synthetic construct
  source 1..19: mol_type = other RNA
gtgtccccctgggggagtt

SEQ ID NO: 11628 - RNA, 19 nt, synthetic construct
  source 1..19: mol_type = other RNA
ccagaacagaccaccacac

SEQ ID NO: 11629 - RNA, 19 nt, synthetic construct
  source 1..19: mol_type = other RNA
atagccaccgtgatggtgc

SEQ ID NO: 11630 - RNA, 19 nt, synthetic construct
  source 1..19: mol_type = other RNA
tcgtccaccgtggggacca

SEQ ID NO: 11631 - RNA, 19 nt, synthetic construct
  source 1..19: mol_type = other RNA
cacctgcaactctaggaac

SEQ ID NO: 11632 - RNA, 19 nt, synthetic construct
  source 1..19: mol_type = other RNA
agacggtgcccttgcactg

SEQ ID NO: 11633 - RNA, 19 nt, synthetic construct
  source 1..19: mol_type = other RNA
tgccccgagcgcgtgccgg

SEQ ID NO: 11634 - RNA, 19 nt, synthetic construct
  source 1..19: mol_type = other RNA
tgagccccctgaacccggc

SEQ ID NO: 11635 - RNA, 19 nt, synthetic construct
  source 1..19: mol_type = other RNA
aggaccactgtgtggacgg

SEQ ID NO: 11636 - RNA, 19 nt, synthetic construct
  source 1..19: mol_type = other RNA
gccgcacctacagcccggg

SEQ ID NO: 11637 - RNA, 19 nt, synthetic construct
  source 1..19: mol_type = other RNA
ctgctctgtgcagggcggg

SEQ ID NO: 11638 - RNA, 19 nt, synthetic construct
  source 1..19: mol_type = other RNA
agaaactctacgacctgca

SEQ ID NO: 11639 - RNA, 19 nt, synthetic construct
  source 1..19: mol_type = other RNA
agctgcgagtacatcttgg

SEQ ID NO: 11640 - RNA, 19 nt, synthetic construct
  source 1..19: mol_type = other RNA
gaaggctgctacccgaagt

SEQ ID NO: 11641 - RNA, 19 nt, synthetic construct
  source 1..19: mol_type = other RNA
acagctaccaggacgtcat

SEQ ID NO: 11642 - RNA, 19 nt, synthetic construct
  source 1..19: mol_type = other RNA
tcaggccgagaccagcacg

SEQ ID NO: 11643 - RNA, 19 nt, synthetic construct
  source 1..19: mol_type = other RNA
accagccagggcacgaccc

SEQ ID NO: 11644 - RNA, 19 nt, synthetic construct
  source 1..19: mol_type = other RNA
tccactggatccacggcca

SEQ ID NO: 11645 - RNA, 19 nt, synthetic construct
  source 1..19: mol_type = other RNA
cacacagaccagtggtact

SEQ ID NO: 11646 - RNA, 19 nt, synthetic construct
  source 1..19: mol_type = other RNA
tcaactcctgggacaactc

SEQ ID NO: 11647 - RNA, 19 nt, synthetic construct
  source 1..19: mol_type = other RNA
tccactggatccacggcca

SEQ ID NO: 11648 - RNA, 19 nt, synthetic construct
  source 1..19: mol_type = other RNA
cacacagaccagtggtact

SEQ ID NO: 11649 - RNA, 19 nt, synthetic construct
  source 1..19: mol_type = other RNA
caacacctatccccccagt

SEQ ID NO: 11650 - RNA, 19 nt, synthetic construct
  source 1..19: mol_type = other RNA
cacacagaccagtggtact

SEQ ID NO: 11651 - RNA, 19 nt, synthetic construct
  source 1..19: mol_type = other RNA
tccactggatccacggcca

SEQ ID NO: 11652 - RNA, 19 nt, synthetic construct
  source 1..19: mol_type = other RNA
cacacagaccagtggtact

SEQ ID NO: 11653 - RNA, 19 nt, synthetic construct
  source 1..19: mol_type = other RNA
caacacctatccccccagt

SEQ ID NO: 11654 - RNA, 19 nt, synthetic construct
  source 1..19: mol_type = other RNA
tccactggatccacggcca

SEQ ID NO: 11655 - RNA, 19 nt, synthetic construct
  source 1..19: mol_type = other RNA
tccactggatccacggcca

SEQ ID NO: 11656 - RNA, 19 nt, synthetic construct
  source 1..19: mol_type = other RNA
ccagtccagggactgcaac

SEQ ID NO: 11657 - RNA, 19 nt, synthetic construct
  source 1..19: mol_type = other RNA
cacacagaccagtggtact

SEQ ID NO: 11658 - RNA, 19 nt, synthetic construct
  source 1..19: mol_type = other RNA
acggccaccacacccgcag

SEQ ID NO: 11659 - RNA, 19 nt, synthetic construct
  source 1..19: mol_type = other RNA
caacagccactacaactgc

SEQ ID NO: 11660 - RNA, 19 nt, synthetic construct
  source 1..19: mol_type = other RNA
gccactggatccacggcca

SEQ ID NO: 11661 - RNA, 19 nt, synthetic construct
  source 1..19: mol_type = other RNA
cctcagtcctcaccaccct

SEQ ID NO: 11662 - RNA, 19 nt, synthetic construct
  source 1..19: mol_type = other RNA
cgtcctgctggacccaaag

SEQ ID NO: 11663 - RNA, 19 nt, synthetic construct
  source 1..19: mol_type = other RNA
cattcctgccctgggcgtg

SEQ ID NO: 11664 - RNA, 19 nt, synthetic construct
  source 1..19: mol_type = other RNA
caccttcaatggccaagtc

SEQ ID NO: 11665 - RNA, 19 nt, synthetic construct
  source 1..19: mol_type = other RNA
tgagccaggtctttgctga

SEQ ID NO: 11666 - RNA, 19 nt, synthetic construct
  source 1..19: mol_type = other RNA
aacgcacacatgggcatct

SEQ ID NO: 11667 - RNA, 19 nt, synthetic construct
  source 1..19: mol_type = other RNA
gcgtccagaccgcctgcct

SEQ ID NO: 11668 - RNA, 19 nt, synthetic construct
  source 1..19: mol_type = other RNA
cgtccagaccgcctgcctc

SEQ ID NO: 11669 - RNA, 19 nt, synthetic construct
  source 1..19: mol_type = other RNA
cgaccatcctgtggcacca

SEQ ID NO: 11670 - RNA, 19 nt, synthetic construct
  source 1..19: mol_type = other RNA
gaggcgggtccacgaggag

SEQ ID NO: 11671 - RNA, 19 nt, synthetic construct
  source 1..19: mol_type = other RNA
cccacgtggatgagtgtgg

SEQ ID NO: 11672 - RNA, 19 nt, synthetic construct
  source 1..19: mol_type = other RNA
ctggagccaggatgtgcat

SEQ ID NO: 11673 - RNA, 19 nt, synthetic construct
  source 1..19: mol_type = other RNA
ccccggcctgtgtgtggca

SEQ ID NO: 11674 - RNA, 19 nt, synthetic construct
  source 1..19: mol_type = other RNA
catgcgggggctgatgtgc

SEQ ID NO: 11675 - RNA, 19 nt, synthetic construct
  source 1..19: mol_type = other RNA
agactgtccacacctccac

SEQ ID NO: 11676 - RNA, 19 nt, synthetic construct
  source 1..19: mol_type = other RNA
gcccagcactacagccacc

SEQ ID NO: 11677 - RNA, 19 nt, synthetic construct
  source 1..19: mol_type = other RNA
agactgtccacacctccac

SEQ ID NO: 11678 - RNA, 19 nt, synthetic construct
  source 1..19: mol_type = other RNA
caccccagcagcaaccacc

SEQ ID NO: 11679 - RNA, 19 nt, synthetic construct
  source 1..19: mol_type = other RNA
agactgtccacacctccac

SEQ ID NO: 11680 - RNA, 19 nt, synthetic construct
  source 1..19: mol_type = other RNA
actccagagaccacccaca

SEQ ID NO: 11681 - RNA, 19 nt, synthetic construct
  source 1..19: mol_type = other RNA
cctgcgtgtgtgacgaggg

SEQ ID NO: 11682 - RNA, 19 nt, synthetic construct
  source 1..19: mol_type = other RNA
ctgctgtgcctaccccaac

SEQ ID NO: 11683 - RNA, 19 nt, synthetic construct
  source 1..19: mol_type = other RNA
agagtggccgggcagtgct

SEQ ID NO: 11684 - RNA, 19 nt, synthetic construct
  source 1..19: mol_type = other RNA
cctgctgcagggtaactca

SEQ ID NO: 11685 - RNA, 19 nt, synthetic construct
  source 1..19: mol_type = other RNA
cggaactggaggtgccctg

SEQ ID NO: 11686 - RNA, 19 nt, synthetic construct
  source 1..19: mol_type = other RNA
gggtggcgactgcgagtgt

SEQ ID NO: 11687 - RNA, 19 nt, synthetic construct
  source 1..19: mol_type = other RNA
gcgcccctcacagccaccc

SEQ ID NO: 11688 - RNA, 19 nt, synthetic construct
  source 1..19: mol_type = other RNA
caccccgggaacagctccc

SEQ ID NO: 11689 - RNA, 19 nt, synthetic construct
  source 1..19: mol_type = other RNA
caccccgggaacagctccc

SEQ ID NO: 11690 - RNA, 19 nt, synthetic construct
  source 1..19: mol_type = other RNA
atgtcaggaggatgcctgc

SEQ ID NO: 11691 - RNA, 19 nt, synthetic construct
  source 1..19: mol_type = other RNA
acggccaccatgtccacag

SEQ ID NO: 11692 - RNA, 19 nt, synthetic construct
  source 1..19: mol_type = other RNA
acggccaccatgtccacag

SEQ ID NO: 11693 - RNA, 19 nt, synthetic construct
  source 1..19: mol_type = other RNA
acggccaccatgtccacag

SEQ ID NO: 11694 - RNA, 19 nt, synthetic construct
  source 1..19: mol_type = other RNA
acggccaccatgtccacag

SEQ ID NO: 11695 - RNA, 19 nt, synthetic construct
  source 1..19: mol_type = other RNA
acggccaccatgtccacag

SEQ ID NO: 11696 - RNA, 19 nt, synthetic construct
  source 1..19: mol_type = other RNA
acgcagtgtgcaatcagca

SEQ ID NO: 11697 - RNA, 19 nt, synthetic construct
  source 1..19: mol_type = other RNA
ctgctgcagggtaactcag

SEQ ID NO: 11698 - RNA, 19 nt, synthetic construct
  source 1..19: mol_type = other RNA
ctacgtgttctctgagcac

SEQ ID NO: 11699 - RNA, 19 nt, synthetic construct
  source 1..19: mol_type = other RNA
ctgcgtgtgtgacgagggt

SEQ ID NO: 11700 - RNA, 19 nt, synthetic construct
  source 1..19: mol_type = other RNA
ctggaaggcccaggctgcc

SEQ ID NO: 11701 - RNA, 19 nt, synthetic construct
  source 1..19: mol_type = other RNA
gctggagggcacttatgcc

SEQ ID NO: 11702 - RNA, 19 nt, synthetic construct
  source 1..19: mol_type = other RNA
aacccctcctcaactccag

SEQ ID NO: 11703 - RNA, 19 nt, synthetic construct
  source 1..19: mol_type = other RNA
acagagccttccacgggga

SEQ ID NO: 11704 - RNA, 19 nt, synthetic construct
  source 1..19: mol_type = other RNA
aacccctcctcaactccag

SEQ ID NO: 11705 - RNA, 19 nt, synthetic construct
  source 1..19: mol_type = other RNA
aacccctcctcaactccag

SEQ ID NO: 11706 - RNA, 19 nt, synthetic construct
  source 1..19: mol_type = other RNA
acagagccttccacgggga

SEQ ID NO: 11707 - RNA, 19 nt, synthetic construct
  source 1..19: mol_type = other RNA
aacccctcctcaactccag

SEQ ID NO: 11708 - RNA, 19 nt, synthetic construct
  source 1..19: mol_type = other RNA
gagatccatgcacgctttg

SEQ ID NO: 11709 - RNA, 19 nt, synthetic construct
  source 1..19: mol_type = other RNA
cccaggaggagggcgactg

SEQ ID NO: 11710 - RNA, 19 nt, synthetic construct
  source 1..19: mol_type = other RNA
gcggccatgctcgtggtgc

SEQ ID NO: 11711 - RNA, 19 nt, synthetic construct
  source 1..19: mol_type = other RNA
gctacagctttgaaggcag

SEQ ID NO: 11712 - RNA, 19 nt, synthetic construct
  source 1..19: mol_type = other RNA
ttctccagggacgaccacc

SEQ ID NO: 11713 - RNA, 19 nt, synthetic construct
  source 1..19: mol_type = other RNA
ttctccagggacgaccacc

SEQ ID NO: 11714 - RNA, 19 nt, synthetic construct
  source 1..19: mol_type = other RNA
caaccaccagtaccaccca

SEQ ID NO: 11715 - RNA, 19 nt, synthetic construct
  source 1..19: mol_type = other RNA
ttctccagggacgaccacc

SEQ ID NO: 11716 - RNA, 19 nt, synthetic construct
  source 1..19: mol_type = other RNA
atgggcatctgcgtgcagg

SEQ ID NO: 11717 - RNA, 19 nt, synthetic construct
  source 1..19: mol_type = other RNA
ccagggacgacggggagct

SEQ ID NO: 11718 - RNA, 19 nt, synthetic construct
  source 1..19: mol_type = other RNA
atctgccaccgcaccctgc

SEQ ID NO: 11719 - RNA, 19 nt, synthetic construct
  source 1..19: mol_type = other RNA
gactgcccctgtgtgcaca

SEQ ID NO: 11720 - RNA, 19 nt, synthetic construct
  source 1..19: mol_type = other RNA
gtgtggatcagcacaacca

SEQ ID NO: 11721 - RNA, 19 nt, synthetic construct
  source 1..19: mol_type = other RNA
tctccagggacgaccaccc

SEQ ID NO: 11722 - RNA, 19 nt, synthetic construct
  source 1..19: mol_type = other RNA
gtgtggatcagcacaacca

SEQ ID NO: 11723 - RNA, 19 nt, synthetic construct
  source 1..19: mol_type = other RNA
tctccagggacgaccaccc

SEQ ID NO: 11724 - RNA, 19 nt, synthetic construct
  source 1..19: mol_type = other RNA
gtgtggatcagcacaacca

SEQ ID NO: 11725 - RNA, 19 nt, synthetic construct
  source 1..19: mol_type = other RNA
tctccagggacgaccaccc

SEQ ID NO: 11726 - RNA, 19 nt, synthetic construct
  source 1..19: mol_type = other RNA
gtgtggatcagcacaacca

SEQ ID NO: 11727 - RNA, 19 nt, synthetic construct
  source 1..19: mol_type = other RNA
gtgtggatcagcacaacca

SEQ ID NO: 11728 - RNA, 19 nt, synthetic construct
  source 1..19: mol_type = other RNA
cccggggagcggtgggtca

SEQ ID NO: 11729 - RNA, 19 nt, synthetic construct
  source 1..19: mol_type = other RNA
gcgggtccacgaggagacg

SEQ ID NO: 11730 - RNA, 19 nt, synthetic construct
  source 1..19: mol_type = other RNA
cccaggatgggtgccccga

SEQ ID NO: 11731 - RNA, 19 nt, synthetic construct
  source 1..19: mol_type = other RNA
ctcctggtggagcagagcg

SEQ ID NO: 11732 - RNA, 19 nt, synthetic construct
  source 1..19: mol_type = other RNA
ggaactggaggtgccctga

SEQ ID NO: 11733 - RNA, 19 nt, synthetic construct
  source 1..19: mol_type = other RNA
gaggaccactgtgtggacg

SEQ ID NO: 11734 - RNA, 19 nt, synthetic construct
  source 1..19: mol_type = other RNA
gcctgtgtgcccgcccagg

SEQ ID NO: 11735 - RNA, 19 nt, synthetic construct
  source 1..19: mol_type = other RNA
tccaagaggggacctttaa

SEQ ID NO: 11736 - RNA, 19 nt, synthetic construct
  source 1..19: mol_type = other RNA
gtcttcaagatgtgctaca

SEQ ID NO: 11737 - RNA, 19 nt, synthetic construct
  source 1..19: mol_type = other RNA
gccacaaccccgccaccga

SEQ ID NO: 11738 - RNA, 19 nt, synthetic construct
  source 1..19: mol_type = other RNA
agtcaccagctccaaagcc

SEQ ID NO: 11739 - RNA, 19 nt, synthetic construct
  source 1..19: mol_type = other RNA
gtcaccagctccaaagcca

SEQ ID NO: 11740 - RNA, 19 nt, synthetic construct
  source 1..19: mol_type = other RNA
agaccaccacacccacggc

SEQ ID NO: 11741 - RNA, 19 nt, synthetic construct
  source 1..19: mol_type = other RNA
tgaccccctcctccatccc

SEQ ID NO: 11742 - RNA, 19 nt, synthetic construct
  source 1..19: mol_type = other RNA
caactcctgggacaactcc

SEQ ID NO: 11743 - RNA, 19 nt, synthetic construct
  source 1..19: mol_type = other RNA
agtcaccagctccaaagcc

SEQ ID NO: 11744 - RNA, 19 nt, synthetic construct
  source 1..19: mol_type = other RNA
gtcaccagctccaaagcca

SEQ ID NO: 11745 - RNA, 19 nt, synthetic construct
  source 1..19: mol_type = other RNA
agaccaccacacccacggc

SEQ ID NO: 11746 - RNA, 19 nt, synthetic construct
  source 1..19: mol_type = other RNA
tgaccccctcctccatccc

SEQ ID NO: 11747 - RNA, 19 nt, synthetic construct
  source 1..19: mol_type = other RNA
caatccacccctcctccac

SEQ ID NO: 11748 - RNA, 19 nt, synthetic construct
  source 1..19: mol_type = other RNA
gcaccctcaaagtgctgac

SEQ ID NO: 11749 - RNA, 19 nt, synthetic construct
  source 1..19: mol_type = other RNA
agaccaccacacccacggc

SEQ ID NO: 11750 - RNA, 19 nt, synthetic construct
  source 1..19: mol_type = other RNA
tgaccccctcctccatccc

SEQ ID NO: 11751 - RNA, 19 nt, synthetic construct
  source 1..19: mol_type = other RNA
agtcaccagctccaaagcc

SEQ ID NO: 11752 - RNA, 19 nt, synthetic construct
  source 1..19: mol_type = other RNA
gtcaccagctccaaagcca

SEQ ID NO: 11753 - RNA, 19 nt, synthetic construct
  source 1..19: mol_type = other RNA
agaccaccacacccacggc

SEQ ID NO: 11754 - RNA, 19 nt, synthetic construct
  source 1..19: mol_type = other RNA
gtccccctgggggagttgg

SEQ ID NO: 11755 - RNA, 19 nt, synthetic construct
  source 1..19: mol_type = other RNA
caatccacccctcctccac

SEQ ID NO: 11756 - RNA, 19 nt, synthetic construct
  source 1..19: mol_type = other RNA
agtcaccagctccaaagcc

SEQ ID NO: 11757 - RNA, 19 nt, synthetic construct
  source 1..19: mol_type = other RNA
gtcaccagctccaaagcca

SEQ ID NO: 11758 - RNA, 19 nt, synthetic construct
  source 1..19: mol_type = other RNA
gcaactgcccttccagcac

SEQ ID NO: 11759 - RNA, 19 nt, synthetic construct
  source 1..19: mol_type = other RNA
agaccaccacacccacggc

SEQ ID NO: 11760 - RNA, 19 nt, synthetic construct
  source 1..19: mol_type = other RNA
tgaccccctcctccatccc

SEQ ID NO: 11761 - RNA, 19 nt, synthetic construct
  source 1..19: mol_type = other RNA
accatggccactatgccca

SEQ ID NO: 11762 - RNA, 19 nt, synthetic construct
  source 1..19: mol_type = other RNA
agcagcctgccaaccttca

SEQ ID NO: 11763 - RNA, 19 nt, synthetic construct
  source 1..19: mol_type = other RNA
cgtacaatggcaccttcta

SEQ ID NO: 11764 - RNA, 19 nt, synthetic construct
  source 1..19: mol_type = other RNA
gagcgcccgcgcagcacgg

SEQ ID NO: 11765 - RNA, 19 nt, synthetic construct
  source 1..19: mol_type = other RNA
cgtccccccacccgtgcca

SEQ ID NO: 11766 - RNA, 19 nt, synthetic construct
  source 1..19: mol_type = other RNA
gacccagggccctgtggag

SEQ ID NO: 11767 - RNA, 19 nt, synthetic construct
  source 1..19: mol_type = other RNA
cgtcctcatcaatgggcag

SEQ ID NO: 11768 - RNA, 19 nt, synthetic construct
  source 1..19: mol_type = other RNA
tcagcatccggctggtgct

SEQ ID NO: 11769 - RNA, 19 nt, synthetic construct
  source 1..19: mol_type = other RNA
tggagctggatcccaaata

SEQ ID NO: 11770 - RNA, 19 nt, synthetic construct
  source 1..19: mol_type = other RNA
gcggaactggaggtgccct

SEQ ID NO: 11771 - RNA, 19 nt, synthetic construct
  source 1..19: mol_type = other RNA
ggctcaccctgcacggaca

SEQ ID NO: 11772 - RNA, 19 nt, synthetic construct
  source 1..19: mol_type = other RNA
gctcaccctgcacggacac

SEQ ID NO: 11773 - RNA, 19 nt, synthetic construct
  source 1..19: mol_type = other RNA
ctgcacggacacctgctcc

SEQ ID NO: 11774 - RNA, 19 nt, synthetic construct
  source 1..19: mol_type = other RNA
gcgcagctctgcgaggacc

SEQ ID NO: 11775 - RNA, 19 nt, synthetic construct
  source 1..19: mol_type = other RNA
ttcaccgtgctggctgagc

SEQ ID NO: 11776 - RNA, 19 nt, synthetic construct
  source 1..19: mol_type = other RNA
gtgccaatgccaggaacag

SEQ ID NO: 11777 - RNA, 19 nt, synthetic construct
  source 1..19: mol_type = other RNA
gctcagcgactggagggac

SEQ ID NO: 11778 - RNA, 19 nt, synthetic construct
  source 1..19: mol_type = other RNA
gaactgccccaagtcccag

SEQ ID NO: 11779 - RNA, 19 nt, synthetic construct
  source 1..19: mol_type = other RNA
tggtggatgcctgccagcc

SEQ ID NO: 11780 - RNA, 19 nt, synthetic construct
  source 1..19: mol_type = other RNA
gggtgtgcagcccccatgg

SEQ ID NO: 11781 - RNA, 19 nt, synthetic construct
  source 1..19: mol_type = other RNA
gggacaacaccacccacgg

SEQ ID NO: 11782 - RNA, 19 nt, synthetic construct
  source 1..19: mol_type = other RNA
caccttcgccgcctgccgc

SEQ ID NO: 11783 - RNA, 19 nt, synthetic construct
  source 1..19: mol_type = other RNA
ggcatgtcctggaactcca

SEQ ID NO: 11784 - RNA, 19 nt, synthetic construct
  source 1..19: mol_type = other RNA
ggtatgccctgtgctggct

SEQ ID NO: 11785 - RNA, 19 nt, synthetic construct
  source 1..19: mol_type = other RNA
acatcgagtgccgggcggc

SEQ ID NO: 11786 - RNA, 19 nt, synthetic construct
  source 1..19: mol_type = other RNA
ccaactggaccctggcaca

SEQ ID NO: 11787 - RNA, 19 nt, synthetic construct
  source 1..19: mol_type = other RNA
ctggaccctggcacaggtg

SEQ ID NO: 11788 - RNA, 19 nt, synthetic construct
  source 1..19: mol_type = other RNA
gagcaggagggcgtcttca

SEQ ID NO: 11789 - RNA, 19 nt, synthetic construct
  source 1..19: mol_type = other RNA
cagtgacgaccactgcagg

SEQ ID NO: 11790 - RNA, 19 nt, synthetic construct
  source 1..19: mol_type = other RNA
agctggagacggccaccac

SEQ ID NO: 11791 - RNA, 19 nt, synthetic construct
  source 1..19: mol_type = other RNA
tggcaacctccagagctcg

SEQ ID NO: 11792 - RNA, 19 nt, synthetic construct
  source 1..19: mol_type = other RNA
acggccaccccgacctcca

SEQ ID NO: 11793 - RNA, 19 nt, synthetic construct
  source 1..19: mol_type = other RNA
ctatcacagaccaccacac

SEQ ID NO: 11794 - RNA, 19 nt, synthetic construct
  source 1..19: mol_type = other RNA
tgcccacacctccacagtg

SEQ ID NO: 11795 - RNA, 19 nt, synthetic construct
  source 1..19: mol_type = other RNA
gcttaccgccacggccacc

SEQ ID NO: 11796 - RNA, 19 nt, synthetic construct
  source 1..19: mol_type = other RNA
cgggcttcacagccacccc

SEQ ID NO: 11797 - RNA, 19 nt, synthetic construct
  source 1..19: mol_type = other RNA
actcacgcctccagtgtgg

SEQ ID NO: 11798 - RNA, 19 nt, synthetic construct
  source 1..19: mol_type = other RNA
ctagcacacagaccagtgg

SEQ ID NO: 11799 - RNA, 19 nt, synthetic construct
  source 1..19: mol_type = other RNA
agccaccagcaacacagtg

SEQ ID NO: 11800 - RNA, 19 nt, synthetic construct
  source 1..19: mol_type = other RNA
acggtgcgcacagcctgga

SEQ ID NO: 11801 - RNA, 19 nt, synthetic construct
  source 1..19: mol_type = other RNA
cccgggccacaccacggcc

SEQ ID NO: 11802 - RNA, 19 nt, synthetic construct
  source 1..19: mol_type = other RNA
ccgggccacaccacggcca

SEQ ID NO: 11803 - RNA, 19 nt, synthetic construct
  source 1..19: mol_type = other RNA
gagtgccgtgcccaggccc

SEQ ID NO: 11804 - RNA, 19 nt, synthetic construct
  source 1..19: mol_type = other RNA
agtgccgtgcccaggccca

SEQ ID NO: 11805 - RNA, 19 nt, synthetic construct
  source 1..19: mol_type = other RNA
ccactccggggacgacctg

SEQ ID NO: 11806 - RNA, 19 nt, synthetic construct
  source 1..19: mol_type = other RNA
ccacggccaccccgtcctc

SEQ ID NO: 11807 - RNA, 19 nt, synthetic construct
  source 1..19: mol_type = other RNA
cacggccaccccgtcctcc

SEQ ID NO: 11808 - RNA, 19 nt, synthetic construct
  source 1..19: mol_type = other RNA
gccaccgtgacggtgccca

SEQ ID NO: 11809 - RNA, 19 nt, synthetic construct
  source 1..19: mol_type = other RNA
ctatcacagaccaccacac

SEQ ID NO: 11810 - RNA, 19 nt, synthetic construct
  source 1..19: mol_type = other RNA
cgggcttcacagccacccc

SEQ ID NO: 11811 - RNA, 19 nt, synthetic construct
  source 1..19: mol_type = other RNA
cacccccacagtgctgacc

SEQ ID NO: 11812 - RNA, 19 nt, synthetic construct
  source 1..19: mol_type = other RNA
ctagcacacagaccagtgg

SEQ ID NO: 11813 - RNA, 19 nt, synthetic construct
  source 1..19: mol_type = other RNA
gacaacacctatcccccca

SEQ ID NO: 11814 - RNA, 19 nt, synthetic construct
  source 1..19: mol_type = other RNA
cgggcgatccctgtccccc

SEQ ID NO: 11815 - RNA, 19 nt, synthetic construct
  source 1..19: mol_type = other RNA
acggtgcgcacagcctgga

SEQ ID NO: 11816 - RNA, 19 nt, synthetic construct
  source 1..19: mol_type = other RNA
caccccagcagcaaccacc

SEQ ID NO: 11817 - RNA, 19 nt, synthetic construct
  source 1..19: mol_type = other RNA
agcaggaccaccgagtcac

SEQ ID NO: 11818 - RNA, 19 nt, synthetic construct
  source 1..19: mol_type = other RNA
gagtgccgtgcccaggccc

SEQ ID NO: 11819 - RNA, 19 nt, synthetic construct
  source 1..19: mol_type = other RNA
agtgccgtgcccaggccca

SEQ ID NO: 11820 - RNA, 19 nt, synthetic construct
  source 1..19: mol_type = other RNA
cactccagggacgacctgg

SEQ ID NO: 11821 - RNA, 19 nt, synthetic construct
  source 1..19: mol_type = other RNA
cgggaccctcccagaacag

SEQ ID NO: 11822 - RNA, 19 nt, synthetic construct
  source 1..19: mol_type = other RNA
ccactccggggacgacctg

SEQ ID NO: 11823 - RNA, 19 nt, synthetic construct
  source 1..19: mol_type = other RNA
ccacggccaccccgtcctc

SEQ ID NO: 11824 - RNA, 19 nt, synthetic construct
  source 1..19: mol_type = other RNA
cacggccaccccgtcctcc

SEQ ID NO: 11825 - RNA, 19 nt, synthetic construct
  source 1..19: mol_type = other RNA
gccaccgtgacggtgccca

SEQ ID NO: 11826 - RNA, 19 nt, synthetic construct
  source 1..19: mol_type = other RNA
tggcaccctcaaagtgctg

SEQ ID NO: 11827 - RNA, 19 nt, synthetic construct
  source 1..19: mol_type = other RNA
catcagctccagagccact

SEQ ID NO: 11828 - RNA, 19 nt, synthetic construct
  source 1..19: mol_type = other RNA
ctatcacagaccaccacac

SEQ ID NO: 11829 - RNA, 19 nt, synthetic construct
  source 1..19: mol_type = other RNA
cgggcttcacagccacccc

SEQ ID NO: 11830 - RNA, 19 nt, synthetic construct
  source 1..19: mol_type = other RNA
actcacgcctccagtgtgg

SEQ ID NO: 11831 - RNA, 19 nt, synthetic construct
  source 1..19: mol_type = other RNA
ctagcacacagaccagtgg

SEQ ID NO: 11832 - RNA, 19 nt, synthetic construct
  source 1..19: mol_type = other RNA
acggtgcgcacagcctgga

SEQ ID NO: 11833 - RNA, 19 nt, synthetic construct
  source 1..19: mol_type = other RNA
agcaggaccaccgagtcac

SEQ ID NO: 11834 - RNA, 19 nt, synthetic construct
  source 1..19: mol_type = other RNA
gagtgccgtgcccaggccc

SEQ ID NO: 11835 - RNA, 19 nt, synthetic construct
  source 1..19: mol_type = other RNA
agtgccgtgcccaggccca

SEQ ID NO: 11836 - RNA, 19 nt, synthetic construct
  source 1..19: mol_type = other RNA
ccacggccaccccgtcctc

SEQ ID NO: 11837 - RNA, 19 nt, synthetic construct
  source 1..19: mol_type = other RNA
cacggccaccccgtcctcc

SEQ ID NO: 11838 - RNA, 19 nt, synthetic construct
  source 1..19: mol_type = other RNA
gccaccgtgacggtgccca

SEQ ID NO: 11839 - RNA, 19 nt, synthetic construct
  source 1..19: mol_type = other RNA
ctatcacagaccaccacac

SEQ ID NO: 11840 - RNA, 19 nt, synthetic construct
  source 1..19: mol_type = other RNA
tgcccacacctccacagtg

SEQ ID NO: 11841 - RNA, 19 nt, synthetic construct
  source 1..19: mol_type = other RNA
cagtcaccccctcctccag

SEQ ID NO: 11842 - RNA, 19 nt, synthetic construct
  source 1..19: mol_type = other RNA
cccacaaccagtggctcca

SEQ ID NO: 11843 - RNA, 19 nt, synthetic construct
  source 1..19: mol_type = other RNA
cacccccacagtgctgacc

SEQ ID NO: 11844 - RNA, 19 nt, synthetic construct
  source 1..19: mol_type = other RNA
ctagcacacagaccagtgg

SEQ ID NO: 11845 - RNA, 19 nt, synthetic construct
  source 1..19: mol_type = other RNA
gacaacacctatcccccca

SEQ ID NO: 11846 - RNA, 19 nt, synthetic construct
  source 1..19: mol_type = other RNA
cgggcgatccctgtccccc

SEQ ID NO: 11847 - RNA, 19 nt, synthetic construct
  source 1..19: mol_type = other RNA
acggtgcgcacagcctgga

SEQ ID NO: 11848 - RNA, 19 nt, synthetic construct
  source 1..19: mol_type = other RNA
caccccagcagcaaccacc

SEQ ID NO: 11849 - RNA, 19 nt, synthetic construct
  source 1..19: mol_type = other RNA
agcaggaccaccgagtcac

SEQ ID NO: 11850 - RNA, 19 nt, synthetic construct
  source 1..19: mol_type = other RNA
cccgggccacaccacggcc

SEQ ID NO: 11851 - RNA, 19 nt, synthetic construct
  source 1..19: mol_type = other RNA
ccgggccacaccacggcca

SEQ ID NO: 11852 - RNA, 19 nt, synthetic construct
  source 1..19: mol_type = other RNA
gagtgccgtgcccaggccc

SEQ ID NO: 11853 - RNA, 19 nt, synthetic construct
  source 1..19: mol_type = other RNA
agtgccgtgcccaggccca

SEQ ID NO: 11854 - RNA, 19 nt, synthetic construct
  source 1..19: mol_type = other RNA
ccactccggggacgacctg

SEQ ID NO: 11855 - RNA, 19 nt, synthetic construct
  source 1..19: mol_type = other RNA
ccacggccaccccgtcctc

SEQ ID NO: 11856 - RNA, 19 nt, synthetic construct
  source 1..19: mol_type = other RNA
cacggccaccccgtcctcc

SEQ ID NO: 11857 - RNA, 19 nt, synthetic construct
  source 1..19: mol_type = other RNA
cagcccggccaccacaccc

SEQ ID NO: 11858 - RNA, 19 nt, synthetic construct
  source 1..19: mol_type = other RNA
cgggaccctcccagaacag

SEQ ID NO: 11859 - RNA, 19 nt, synthetic construct
  source 1..19: mol_type = other RNA
ccactccggggacgacctg

SEQ ID NO: 11860 - RNA, 19 nt, synthetic construct
  source 1..19: mol_type = other RNA
ccacggccaccccgtcctc

SEQ ID NO: 11861 - RNA, 19 nt, synthetic construct
  source 1..19: mol_type = other RNA
cacggccaccccgtcctcc

SEQ ID NO: 11862 - RNA, 19 nt, synthetic construct
  source 1..19: mol_type = other RNA
ccacggccaccccgtcctc

SEQ ID NO: 11863 - RNA, 19 nt, synthetic construct
  source 1..19: mol_type = other RNA
cacggccaccccgtcctcc

SEQ ID NO: 11864 - RNA, 19 nt, synthetic construct
  source 1..19: mol_type = other RNA
gccaccgtgacggtgccca

SEQ ID NO: 11865 - RNA, 19 nt, synthetic construct
  source 1..19: mol_type = other RNA
ctatcacagaccaccacac

SEQ ID NO: 11866 - RNA, 19 nt, synthetic construct
  source 1..19: mol_type = other RNA
gcttaccgccacggccacc

SEQ ID NO: 11867 - RNA, 19 nt, synthetic construct
  source 1..19: mol_type = other RNA
cgggcttcacagccacccc

SEQ ID NO: 11868 - RNA, 19 nt, synthetic construct
  source 1..19: mol_type = other RNA
actcacgcctccagtgtgg

SEQ ID NO: 11869 - RNA, 19 nt, synthetic construct
  source 1..19: mol_type = other RNA
cccacaaccagtggctcca

SEQ ID NO: 11870 - RNA, 19 nt, synthetic construct
  source 1..19: mol_type = other RNA
ctagcacacagaccagtgg

SEQ ID NO: 11871 - RNA, 19 nt, synthetic construct
  source 1..19: mol_type = other RNA
ccatgacaagggccaccaa

SEQ ID NO: 11872 - RNA, 19 nt, synthetic construct
  source 1..19: mol_type = other RNA
aattccacggccacaccct

SEQ ID NO: 11873 - RNA, 19 nt, synthetic construct
  source 1..19: mol_type = other RNA
cccggatcctcactgagct

SEQ ID NO: 11874 - RNA, 19 nt, synthetic construct
  source 1..19: mol_type = other RNA
cacggccaccctgtcctcc

SEQ ID NO: 11875 - RNA, 19 nt, synthetic construct
  source 1..19: mol_type = other RNA
ctcacacccccaaagtggt

SEQ ID NO: 11876 - RNA, 19 nt, synthetic construct
  source 1..19: mol_type = other RNA
ccaaagtggtgaccaccat

SEQ ID NO: 11877 - RNA, 19 nt, synthetic construct
  source 1..19: mol_type = other RNA
aaagtggtgaccaccatgg

SEQ ID NO: 11878 - RNA, 19 nt, synthetic construct
  source 1..19: mol_type = other RNA
cacccgcacccctgcagtg

SEQ ID NO: 11879 - RNA, 19 nt, synthetic construct
  source 1..19: mol_type = other RNA
accgaccgagccggctgcc

SEQ ID NO: 11880 - RNA, 19 nt, synthetic construct
  source 1..19: mol_type = other RNA
ggcgcctgtcccacctccc

SEQ ID NO: 11881 - RNA, 19 nt, synthetic construct
  source 1..19: mol_type = other RNA
gtgtcctccgccccgctgt

SEQ ID NO: 11882 - RNA, 19 nt, synthetic construct
  source 1..19: mol_type = other RNA
gacccaaagcctgtggcca

SEQ ID NO: 11883 - RNA, 19 nt, synthetic construct
  source 1..19: mol_type = other RNA
agcatgtggggcggctccc

SEQ ID NO: 11884 - RNA, 19 nt, synthetic construct
  source 1..19: mol_type = other RNA
ctcagcatccactacaagt

SEQ ID NO: 11885 - RNA, 19 nt, synthetic construct
  source 1..19: mol_type = other RNA
caagacgtggctggtcccc

SEQ ID NO: 11886 - RNA, 19 nt, synthetic construct
  source 1..19: mol_type = other RNA
tgtctagcacacccacccc

SEQ ID NO: 11887 - RNA, 19 nt, synthetic construct
  source 1..19: mol_type = other RNA
tctagcacacccaccccca

SEQ ID NO: 11888 - RNA, 19 nt, synthetic construct
  source 1..19: mol_type = other RNA
aggtctttgctgagtgcca

SEQ ID NO: 11889 - RNA, 19 nt, synthetic construct
  source 1..19: mol_type = other RNA
gtctttgctgagtgccaca

SEQ ID NO: 11890 - RNA, 19 nt, synthetic construct
  source 1..19: mol_type = other RNA
catacagcctgccacctgc

SEQ ID NO: 11891 - RNA, 19 nt, synthetic construct
  source 1..19: mol_type = other RNA
gcgtgtgcaacacaaccac

SEQ ID NO: 11892 - RNA, 19 nt, synthetic construct
  source 1..19: mol_type = other RNA
gctgtcccaccttccgctg

SEQ ID NO: 11893 - RNA, 19 nt, synthetic construct
  source 1..19: mol_type = other RNA
gtcaggaggatgcctgcaa

SEQ ID NO: 11894 - RNA, 19 nt, synthetic construct
  source 1..19: mol_type = other RNA
atactacctgtccccaggg

SEQ ID NO: 11895 - RNA, 19 nt, synthetic construct
  source 1..19: mol_type = other RNA
tactacctgtccccagggc

SEQ ID NO: 11896 - RNA, 19 nt, synthetic construct
  source 1..19: mol_type = other RNA
gcccgatggccagccagtc

SEQ ID NO: 11897 - RNA, 19 nt, synthetic construct
  source 1..19: mol_type = other RNA
tgggtcaacagccatgtgg

SEQ ID NO: 11898 - RNA, 19 nt, synthetic construct
  source 1..19: mol_type = other RNA
cctgctgcccaccccgtgg

SEQ ID NO: 11899 - RNA, 19 nt, synthetic construct
  source 1..19: mol_type = other RNA
cctaccctgggagagcctg

SEQ ID NO: 11900 - RNA, 19 nt, synthetic construct
  source 1..19: mol_type = other RNA
gacaagcccggccctcccg

SEQ ID NO: 11901 - RNA, 19 nt, synthetic construct
  source 1..19: mol_type = other RNA
atcagcacaaccaccacac

SEQ ID NO: 11902 - RNA, 19 nt, synthetic construct
  source 1..19: mol_type = other RNA
gctccacggtgaccccctc

SEQ ID NO: 11903 - RNA, 19 nt, synthetic construct
  source 1..19: mol_type = other RNA
ccagtggtactcccccatc

SEQ ID NO: 11904 - RNA, 19 nt, synthetic construct
  source 1..19: mol_type = other RNA
ttgggcaccacccacatca

SEQ ID NO: 11905 - RNA, 19 nt, synthetic construct
  source 1..19: mol_type = other RNA
atcagcacaaccaccacac

SEQ ID NO: 11906 - RNA, 19 nt, synthetic construct
  source 1..19: mol_type = other RNA
ccagtggtactcccccatc

SEQ ID NO: 11907 - RNA, 19 nt, synthetic construct
  source 1..19: mol_type = other RNA
ttgggcaccacccacatca

SEQ ID NO: 11908 - RNA, 19 nt, synthetic construct
  source 1..19: mol_type = other RNA
ggcaccctcaaagtgctga

SEQ ID NO: 11909 - RNA, 19 nt, synthetic construct
  source 1..19: mol_type = other RNA
atcagcacaaccaccacac

SEQ ID NO: 11910 - RNA, 19 nt, synthetic construct
  source 1..19: mol_type = other RNA
gctccacggtgaccccctc

SEQ ID NO: 11911 - RNA, 19 nt, synthetic construct
  source 1..19: mol_type = other RNA
ccagtggtactcccccatc

SEQ ID NO: 11912 - RNA, 19 nt, synthetic construct
  source 1..19: mol_type = other RNA
ttgggcaccacccacatca

SEQ ID NO: 11913 - RNA, 19 nt, synthetic construct
  source 1..19: mol_type = other RNA
atcagcacaaccaccacac

SEQ ID NO: 11914 - RNA, 19 nt, synthetic construct
  source 1..19: mol_type = other RNA
gctccacggtgaccccctc

SEQ ID NO: 11915 - RNA, 19 nt, synthetic construct
  source 1..19: mol_type = other RNA
ccagtggtactcccccatc

SEQ ID NO: 11916 - RNA, 19 nt, synthetic construct
  source 1..19: mol_type = other RNA
ttgggcaccacccacatca

SEQ ID NO: 11917 - RNA, 19 nt, synthetic construct
  source 1..19: mol_type = other RNA
gttccacgtccaccccctc

SEQ ID NO: 11918 - RNA, 19 nt, synthetic construct
  source 1..19: mol_type = other RNA
atcagcacaaccaccacac

SEQ ID NO: 11919 - RNA, 19 nt, synthetic construct
  source 1..19: mol_type = other RNA
gctccacggtgaccccctc

SEQ ID NO: 11920 - RNA, 19 nt, synthetic construct
  source 1..19: mol_type = other RNA
ccagtggtactcccccatc

SEQ ID NO: 11921 - RNA, 19 nt, synthetic construct
  source 1..19: mol_type = other RNA
tcctcactgagctgaccac

SEQ ID NO: 11922 - RNA, 19 nt, synthetic construct
  source 1..19: mol_type = other RNA
gaacagctcacacccccaa

SEQ ID NO: 11923 - RNA, 19 nt, synthetic construct
  source 1..19: mol_type = other RNA
tccagggcgcctgtcccac

SEQ ID NO: 11924 - RNA, 19 nt, synthetic construct
  source 1..19: mol_type = other RNA
cggacccgagccagccctg

SEQ ID NO: 11925 - RNA, 19 nt, synthetic construct
  source 1..19: mol_type = other RNA
atggcggagggctgcttct

SEQ ID NO: 11926 - RNA, 19 nt, synthetic construct
  source 1..19: mol_type = other RNA
ctgcttctgccctgaggac

SEQ ID NO: 11927 - RNA, 19 nt, synthetic construct
  source 1..19: mol_type = other RNA
cctgaggaccagatcctct

SEQ ID NO: 11928 - RNA, 19 nt, synthetic construct
  source 1..19: mol_type = other RNA
ccgcctgcgcccaggacct

SEQ ID NO: 11929 - RNA, 19 nt, synthetic construct
  source 1..19: mol_type = other RNA
ctgcccccggacctgcccc

SEQ ID NO: 11930 - RNA, 19 nt, synthetic construct
  source 1..19: mol_type = other RNA
gcttcttcatcgtggtgca

SEQ ID NO: 11931 - RNA, 19 nt, synthetic construct
  source 1..19: mol_type = other RNA
aagctaagctgcctgggag

SEQ ID NO: 11932 - RNA, 19 nt, synthetic construct
  source 1..19: mol_type = other RNA
gtcctggaactccagccac

SEQ ID NO: 11933 - RNA, 19 nt, synthetic construct
  source 1..19: mol_type = other RNA
cgacaagcccggccctccc

SEQ ID NO: 11934 - RNA, 19 nt, synthetic construct
  source 1..19: mol_type = other RNA
cgacctccaccctgagaac

SEQ ID NO: 11935 - RNA, 19 nt, synthetic construct
  source 1..19: mol_type = other RNA
ctccctgggcaccacctgg

SEQ ID NO: 11936 - RNA, 19 nt, synthetic construct
  source 1..19: mol_type = other RNA
ctgcccacacctccacagt

SEQ ID NO: 11937 - RNA, 19 nt, synthetic construct
  source 1..19: mol_type = other RNA
caggaaccgtgagcaggtg

SEQ ID NO: 11938 - RNA, 19 nt, synthetic construct
  source 1..19: mol_type = other RNA
ctccctgggcaccacctgg

SEQ ID NO: 11939 - RNA, 19 nt, synthetic construct
  source 1..19: mol_type = other RNA
caggaaccgtgagcaggtg

SEQ ID NO: 11940 - RNA, 19 nt, synthetic construct
  source 1..19: mol_type = other RNA
caggaaccgtgagcaggtg

SEQ ID NO: 11941 - RNA, 19 nt, synthetic construct
  source 1..19: mol_type = other RNA
ctccctgggcaccacctgg

SEQ ID NO: 11942 - RNA, 19 nt, synthetic construct
  source 1..19: mol_type = other RNA
ctgcccacacctccacagt

SEQ ID NO: 11943 - RNA, 19 nt, synthetic construct
  source 1..19: mol_type = other RNA
caggaaccgtgagcaggtg

SEQ ID NO: 11944 - RNA, 19 nt, synthetic construct
  source 1..19: mol_type = other RNA
ctccctgggcaccacctgg

SEQ ID NO: 11945 - RNA, 19 nt, synthetic construct
  source 1..19: mol_type = other RNA
cctcactgagctgaccaca

SEQ ID NO: 11946 - RNA, 19 nt, synthetic construct
  source 1..19: mol_type = other RNA
accgtgtacctctgtgagg

SEQ ID NO: 11947 - RNA, 19 nt, synthetic construct
  source 1..19: mol_type = other RNA
gcactggtggacagcactg

SEQ ID NO: 11948 - RNA, 19 nt, synthetic construct
  source 1..19: mol_type = other RNA
cggggggccagccgcggaa

SEQ ID NO: 11949 - RNA, 19 nt, synthetic construct
  source 1..19: mol_type = other RNA
atgcctgccagcccacttg

SEQ ID NO: 11950 - RNA, 19 nt, synthetic construct
  source 1..19: mol_type = other RNA
gtgtgcccgcccaggagtg

SEQ ID NO: 11951 - RNA, 19 nt, synthetic construct
  source 1..19: mol_type = other RNA
gggctgcattgccgaggag

SEQ ID NO: 11952 - RNA, 19 nt, synthetic construct
  source 1..19: mol_type = other RNA
ctacaagcctggagagacc

SEQ ID NO: 11953 - RNA, 19 nt, synthetic construct
  source 1..19: mol_type = other RNA
gtggggacaacaccaccca

SEQ ID NO: 11954 - RNA, 19 nt, synthetic construct
  source 1..19: mol_type = other RNA
ctggatccacggccacccc

SEQ ID NO: 11955 - RNA, 19 nt, synthetic construct
  source 1..19: mol_type = other RNA
gtggatcagcacaaccacc

SEQ ID NO: 11956 - RNA, 19 nt, synthetic construct
  source 1..19: mol_type = other RNA
ccgtgagcaggtggggaag

SEQ ID NO: 11957 - RNA, 19 nt, synthetic construct
  source 1..19: mol_type = other RNA
ctggatccacggccacccc

SEQ ID NO: 11958 - RNA, 19 nt, synthetic construct
  source 1..19: mol_type = other RNA
catgtgagcaccacggcca

SEQ ID NO: 11959 - RNA, 19 nt, synthetic construct
  source 1..19: mol_type = other RNA
cagctttacagccatcccc

SEQ ID NO: 11960 - RNA, 19 nt, synthetic construct
  source 1..19: mol_type = other RNA
gtggatcagcacaaccacc

SEQ ID NO: 11961 - RNA, 19 nt, synthetic construct
  source 1..19: mol_type = other RNA
cccggggaccacccacacc

SEQ ID NO: 11962 - RNA, 19 nt, synthetic construct
  source 1..19: mol_type = other RNA
cacaccccagcagcaacca

SEQ ID NO: 11963 - RNA, 19 nt, synthetic construct
  source 1..19: mol_type = other RNA
accccgggccacaccaggg

SEQ ID NO: 11964 - RNA, 19 nt, synthetic construct
  source 1..19: mol_type = other RNA
ccgtgagcaggtggggaag

SEQ ID NO: 11965 - RNA, 19 nt, synthetic construct
  source 1..19: mol_type = other RNA
ggccaccagttccatgtcc

SEQ ID NO: 11966 - RNA, 19 nt, synthetic construct
  source 1..19: mol_type = other RNA
gtggatcagcacaaccacc

SEQ ID NO: 11967 - RNA, 19 nt, synthetic construct
  source 1..19: mol_type = other RNA
cacaccccagcagcaacca

SEQ ID NO: 11968 - RNA, 19 nt, synthetic construct
  source 1..19: mol_type = other RNA
ccgtgagcaggtggggaag

SEQ ID NO: 11969 - RNA, 19 nt, synthetic construct
  source 1..19: mol_type = other RNA
ctggatccacggccacccc

SEQ ID NO: 11970 - RNA, 19 nt, synthetic construct
  source 1..19: mol_type = other RNA
catgtgagcaccacggcca

SEQ ID NO: 11971 - RNA, 19 nt, synthetic construct
  source 1..19: mol_type = other RNA
cagctttacagccatcccc

SEQ ID NO: 11972 - RNA, 19 nt, synthetic construct
  source 1..19: mol_type = other RNA
gtggatcagcacaaccacc

SEQ ID NO: 11973 - RNA, 19 nt, synthetic construct
  source 1..19: mol_type = other RNA
cccggggaccacccacacc

SEQ ID NO: 11974 - RNA, 19 nt, synthetic construct
  source 1..19: mol_type = other RNA
cacaccccagcagcaacca

SEQ ID NO: 11975 - RNA, 19 nt, synthetic construct
  source 1..19: mol_type = other RNA
ccgtgagcaggtggggaag

SEQ ID NO: 11976 - RNA, 19 nt, synthetic construct
  source 1..19: mol_type = other RNA
ctggatccacggccacccc

SEQ ID NO: 11977 - RNA, 19 nt, synthetic construct
  source 1..19: mol_type = other RNA
ctggatccacggccacccc

SEQ ID NO: 11978 - RNA, 19 nt, synthetic construct
  source 1..19: mol_type = other RNA
catgtgagcaccacggcca

SEQ ID NO: 11979 - RNA, 19 nt, synthetic construct
  source 1..19: mol_type = other RNA
cagctttacagccatcccc

SEQ ID NO: 11980 - RNA, 19 nt, synthetic construct
  source 1..19: mol_type = other RNA
gtggatcagcacaaccacc

SEQ ID NO: 11981 - RNA, 19 nt, synthetic construct
  source 1..19: mol_type = other RNA
ggatcctcactgagctgac

SEQ ID NO: 11982 - RNA, 19 nt, synthetic construct
  source 1..19: mol_type = other RNA
ctggatccacggccaccct

SEQ ID NO: 11983 - RNA, 19 nt, synthetic construct
  source 1..19: mol_type = other RNA
gggaccacccgcacccctg

SEQ ID NO: 11984 - RNA, 19 nt, synthetic construct
  source 1..19: mol_type = other RNA
cggcacctcttacaccttc

SEQ ID NO: 11985 - RNA, 19 nt, synthetic construct
  source 1..19: mol_type = other RNA
ggcacctcttacaccttcc

SEQ ID NO: 11986 - RNA, 19 nt, synthetic construct
  source 1..19: mol_type = other RNA
attcttcaacgcctgcatc

SEQ ID NO: 11987 - RNA, 19 nt, synthetic construct
  source 1..19: mol_type = other RNA
agggcaggagtccatctgc

SEQ ID NO: 11988 - RNA, 19 nt, synthetic construct
  source 1..19: mol_type = other RNA
ggcaggagtccatctgcac

SEQ ID NO: 11989 - RNA, 19 nt, synthetic construct
  source 1..19: mol_type = other RNA
tggccgggcagtgctgtgg

SEQ ID NO: 11990 - RNA, 19 nt, synthetic construct
  source 1..19: mol_type = other RNA
gaggctgagggtggagtcc

SEQ ID NO: 11991 - RNA, 19 nt, synthetic construct
  source 1..19: mol_type = other RNA
cgcccatggctcccccaca

SEQ ID NO: 11992 - RNA, 19 nt, synthetic construct
  source 1..19: mol_type = other RNA
gtctgagaacgttctgcct

SEQ ID NO: 11993 - RNA, 19 nt, synthetic construct
  source 1..19: mol_type = other RNA
ggccggagcgcccgcgcag

SEQ ID NO: 11994 - RNA, 19 nt, synthetic construct
  source 1..19: mol_type = other RNA
gtgccagcccccaggatgg

SEQ ID NO: 11995 - RNA, 19 nt, synthetic construct
  source 1..19: mol_type = other RNA
gcttccctggcctttgcaa

SEQ ID NO: 11996 - RNA, 19 nt, synthetic construct
  source 1..19: mol_type = other RNA
gggactacatcaaggtcag

SEQ ID NO: 11997 - RNA, 19 nt, synthetic construct
  source 1..19: mol_type = other RNA
agggcatctgccaccgcac

SEQ ID NO: 11998 - RNA, 19 nt, synthetic construct
  source 1..19: mol_type = other RNA
ccacgcggggggccagccg

SEQ ID NO: 11999 - RNA, 19 nt, synthetic construct
  source 1..19: mol_type = other RNA
caacatgcagcaccaggag

SEQ ID NO: 12000 - RNA, 19 nt, synthetic construct
  source 1..19: mol_type = other RNA
cacggacacctgctccaac

SEQ ID NO: 12001 - RNA, 19 nt, synthetic construct
  source 1..19: mol_type = other RNA
tgtggacggctgcttctgc

SEQ ID NO: 12002 - RNA, 19 nt, synthetic construct
  source 1..19: mol_type = other RNA
ccgcacctacagcccgggc

SEQ ID NO: 12003 - RNA, 19 nt, synthetic construct
  source 1..19: mol_type = other RNA
ccgacagcagcttcaccgt

SEQ ID NO: 12004 - RNA, 19 nt, synthetic construct
  source 1..19: mol_type = other RNA
cacctggaaggcccaggct

SEQ ID NO: 12005 - RNA, 19 nt, synthetic construct
  source 1..19: mol_type = other RNA
cgtttccttcgtgcctgtg

SEQ ID NO: 12006 - RNA, 19 nt, synthetic construct
  source 1..19: mol_type = other RNA
ctgcacctgccccgcgggc

SEQ ID NO: 12007 - RNA, 19 nt, synthetic construct
  source 1..19: mol_type = other RNA
gtgcccgcccaggagtgcc

SEQ ID NO: 12008 - RNA, 19 nt, synthetic construct
  source 1..19: mol_type = other RNA
tgtcggatgggagtggggg

SEQ ID NO: 12009 - RNA, 19 nt, synthetic construct
  source 1..19: mol_type = other RNA
gccgaggaggactgcccct

SEQ ID NO: 12010 - RNA, 19 nt, synthetic construct
  source 1..19: mol_type = other RNA
gtgtgcacaacgaggccac

SEQ ID NO: 12011 - RNA, 19 nt, synthetic construct
  source 1..19: mol_type = other RNA
gagagaccatcagggtcga

SEQ ID NO: 12012 - RNA, 19 nt, synthetic construct
  source 1..19: mol_type = other RNA
tacagctttgaaggcagct

SEQ ID NO: 12013 - RNA, 19 nt, synthetic construct
  source 1..19: mol_type = other RNA
cgagctgatcctccaagag

SEQ ID NO: 12014 - RNA, 19 nt, synthetic construct
  source 1..19: mol_type = other RNA
tggcacccaaggacccctg

SEQ ID NO: 12015 - RNA, 19 nt, synthetic construct
  source 1..19: mol_type = other RNA
caacccacatgggggctgt

SEQ ID NO: 12016 - RNA, 19 nt, synthetic construct
  source 1..19: mol_type = other RNA
taactgcacacccagtggc

SEQ ID NO: 12017 - RNA, 19 nt, synthetic construct
  source 1..19: mol_type = other RNA
atgtcctggaactccagcc

SEQ ID NO: 12018 - RNA, 19 nt, synthetic construct
  source 1..19: mol_type = other RNA
tgtcctggaactccagcca

SEQ ID NO: 12019 - RNA, 19 nt, synthetic construct
  source 1..19: mol_type = other RNA
agtgccgggcggcgcagct

SEQ ID NO: 12020 - RNA, 19 nt, synthetic construct
  source 1..19: mol_type = other RNA
gcctaccccaacccagacc

SEQ ID NO: 12021 - RNA, 19 nt, synthetic construct
  source 1..19: mol_type = other RNA
cctaccccaacccagacca

SEQ ID NO: 12022 - RNA, 19 nt, synthetic construct
  source 1..19: mol_type = other RNA
ttccccaactggaccctgg

SEQ ID NO: 12023 - RNA, 19 nt, synthetic construct
  source 1..19: mol_type = other RNA
acaggtggggcagaaggtg

SEQ ID NO: 12024 - RNA, 19 nt, synthetic construct
  source 1..19: mol_type = other RNA
aggtggggcagaaggtgca

SEQ ID NO: 12025 - RNA, 19 nt, synthetic construct
  source 1..19: mol_type = other RNA
gcagtgacgaccactgcag

SEQ ID NO: 12026 - RNA, 19 nt, synthetic construct
  source 1..19: mol_type = other RNA
gggctcccccggccagcac

SEQ ID NO: 12027 - RNA, 19 nt, synthetic construct
  source 1..19: mol_type = other RNA
ccactggatccacggccac

SEQ ID NO: 12028 - RNA, 19 nt, synthetic construct
  source 1..19: mol_type = other RNA
cactggatccacggccacc

SEQ ID NO: 12029 - RNA, 19 nt, synthetic construct
  source 1..19: mol_type = other RNA
actggatccacggccaccc

SEQ ID NO: 12030 - RNA, 19 nt, synthetic construct
  source 1..19: mol_type = other RNA
ccacagctaccagcgttac

SEQ ID NO: 12031 - RNA, 19 nt, synthetic construct
  source 1..19: mol_type = other RNA
actccagagactgcccaca

SEQ ID NO: 12032 - RNA, 19 nt, synthetic construct
  source 1..19: mol_type = other RNA
gcccacacctccacagtgc

SEQ ID NO: 12033 - RNA, 19 nt, synthetic construct
  source 1..19: mol_type = other RNA
aactggggccaccggctct

SEQ ID NO: 12034 - RNA, 19 nt, synthetic construct
  source 1..19: mol_type = other RNA
gcacaaccaccacacccac

SEQ ID NO: 12035 - RNA, 19 nt, synthetic construct
  source 1..19: mol_type = other RNA
cctcctccatcccggggac

SEQ ID NO: 12036 - RNA, 19 nt, synthetic construct
  source 1..19: mol_type = other RNA
cacagtgctgaccaccacc

SEQ ID NO: 12037 - RNA, 19 nt, synthetic construct
  source 1..19: mol_type = other RNA
ccaccaccacaactgtggc

SEQ ID NO: 12038 - RNA, 19 nt, synthetic construct
  source 1..19: mol_type = other RNA
tctagcacacagaccagtg

SEQ ID NO: 12039 - RNA, 19 nt, synthetic construct
  source 1..19: mol_type = other RNA
gatcacggccaccggctcc

SEQ ID NO: 12040 - RNA, 19 nt, synthetic construct
  source 1..19: mol_type = other RNA
aacccctcctcaactcctg

SEQ ID NO: 12041 - RNA, 19 nt, synthetic construct
  source 1..19: mol_type = other RNA
cagcaacacagtgactccc

SEQ ID NO: 12042 - RNA, 19 nt, synthetic construct
  source 1..19: mol_type = other RNA
aacacagtgactccctcct

SEQ ID NO: 12043 - RNA, 19 nt, synthetic construct
  source 1..19: mol_type = other RNA
ccacatcacagagccttcc

SEQ ID NO: 12044 - RNA, 19 nt, synthetic construct
  source 1..19: mol_type = other RNA
ggaccacagccacggccac

SEQ ID NO: 12045 - RNA, 19 nt, synthetic construct
  source 1..19: mol_type = other RNA
ccacacccagcaagacccg

SEQ ID NO: 12046 - RNA, 19 nt, synthetic construct
  source 1..19: mol_type = other RNA
ccccagtgtgcctggtcag

SEQ ID NO: 12047 - RNA, 19 nt, synthetic construct
  source 1..19: mol_type = other RNA
catgccggggccctctggc

SEQ ID NO: 12048 - RNA, 19 nt, synthetic construct
  source 1..19: mol_type = other RNA
atgccggggccctctggcg

SEQ ID NO: 12049 - RNA, 19 nt, synthetic construct
  source 1..19: mol_type = other RNA
tgccggggccctctggcgg

SEQ ID NO: 12050 - RNA, 19 nt, synthetic construct
  source 1..19: mol_type = other RNA
gaatgcagcctggactttg

SEQ ID NO: 12051 - RNA, 19 nt, synthetic construct
  source 1..19: mol_type = other RNA
aatgcagcctggactttgg

SEQ ID NO: 12052 - RNA, 19 nt, synthetic construct
  source 1..19: mol_type = other RNA
ccactggatccacggccac

SEQ ID NO: 12053 - RNA, 19 nt, synthetic construct
  source 1..19: mol_type = other RNA
cactggatccacggccacc

SEQ ID NO: 12054 - RNA, 19 nt, synthetic construct
  source 1..19: mol_type = other RNA
actggatccacggccaccc

SEQ ID NO: 12055 - RNA, 19 nt, synthetic construct
  source 1..19: mol_type = other RNA
ccaccccgtcctccacccc

SEQ ID NO: 12056 - RNA, 19 nt, synthetic construct
  source 1..19: mol_type = other RNA
cctccacccaggcaactgc

SEQ ID NO: 12057 - RNA, 19 nt, synthetic construct
  source 1..19: mol_type = other RNA
ttacagccatcccctcctc

SEQ ID NO: 12058 - RNA, 19 nt, synthetic construct
  source 1..19: mol_type = other RNA
tcctccactccagagactg

SEQ ID NO: 12059 - RNA, 19 nt, synthetic construct
  source 1..19: mol_type = other RNA
gcacaaccaccacacccac

SEQ ID NO: 12060 - RNA, 19 nt, synthetic construct
  source 1..19: mol_type = other RNA
cctcctccatcccggggac

SEQ ID NO: 12061 - RNA, 19 nt, synthetic construct
  source 1..19: mol_type = other RNA
cacagtgctgaccaccacc

SEQ ID NO: 12062 - RNA, 19 nt, synthetic construct
  source 1..19: mol_type = other RNA
ccaccaccacaactgtggc

SEQ ID NO: 12063 - RNA, 19 nt, synthetic construct
  source 1..19: mol_type = other RNA
tctagcacacagaccagtg

SEQ ID NO: 12064 - RNA, 19 nt, synthetic construct
  source 1..19: mol_type = other RNA
gatcacggccaccggctcc

SEQ ID NO: 12065 - RNA, 19 nt, synthetic construct
  source 1..19: mol_type = other RNA
ccacatcacagagccttcc

SEQ ID NO: 12066 - RNA, 19 nt, synthetic construct
  source 1..19: mol_type = other RNA
agccctgtccagccctcac

SEQ ID NO: 12067 - RNA, 19 nt, synthetic construct
  source 1..19: mol_type = other RNA
ccacacccagcaagacccg

SEQ ID NO: 12068 - RNA, 19 nt, synthetic construct
  source 1..19: mol_type = other RNA
ccccagtgtgcctggtcag

SEQ ID NO: 12069 - RNA, 19 nt, synthetic construct
  source 1..19: mol_type = other RNA
catgccggggccctctggc

SEQ ID NO: 12070 - RNA, 19 nt, synthetic construct
  source 1..19: mol_type = other RNA
atgccggggccctctggcg

SEQ ID NO: 12071 - RNA, 19 nt, synthetic construct
  source 1..19: mol_type = other RNA
tgccggggccctctggcgg

SEQ ID NO: 12072 - RNA, 19 nt, synthetic construct
  source 1..19: mol_type = other RNA
gaatgcagcctggactttg

SEQ ID NO: 12073 - RNA, 19 nt, synthetic construct
  source 1..19: mol_type = other RNA
aatgcagcctggactttgg

SEQ ID NO: 12074 - RNA, 19 nt, synthetic construct
  source 1..19: mol_type = other RNA
catcccgtcctccaccccg

SEQ ID NO: 12075 - RNA, 19 nt, synthetic construct
  source 1..19: mol_type = other RNA
atcccgtcctccaccccgg

SEQ ID NO: 12076 - RNA, 19 nt, synthetic construct
  source 1..19: mol_type = other RNA
gctgaccagcacggccacc

SEQ ID NO: 12077 - RNA, 19 nt, synthetic construct
  source 1..19: mol_type = other RNA
cacagccaccaaatccaca

SEQ ID NO: 12078 - RNA, 19 nt, synthetic construct
  source 1..19: mol_type = other RNA
gctttacacccatcccctc

SEQ ID NO: 12079 - RNA, 19 nt, synthetic construct
  source 1..19: mol_type = other RNA
cacccatcccctccttcac

SEQ ID NO: 12080 - RNA, 19 nt, synthetic construct
  source 1..19: mol_type = other RNA
cttgggaccaccgggaccc

SEQ ID NO: 12081 - RNA, 19 nt, synthetic construct
  source 1..19: mol_type = other RNA
ccaccgggaccctcccaga

SEQ ID NO: 12082 - RNA, 19 nt, synthetic construct
  source 1..19: mol_type = other RNA
ccacaatccacccctcctc

SEQ ID NO: 12083 - RNA, 19 nt, synthetic construct
  source 1..19: mol_type = other RNA
aatccacccctcctccact

SEQ ID NO: 12084 - RNA, 19 nt, synthetic construct
  source 1..19: mol_type = other RNA
acccacacctccacagtgc

SEQ ID NO: 12085 - RNA, 19 nt, synthetic construct
  source 1..19: mol_type = other RNA
gcagccactggccccacgg

SEQ ID NO: 12086 - RNA, 19 nt, synthetic construct
  source 1..19: mol_type = other RNA
ccaccccgtcctccacccc

SEQ ID NO: 12087 - RNA, 19 nt, synthetic construct
  source 1..19: mol_type = other RNA
gctgaccagcacggccacc

SEQ ID NO: 12088 - RNA, 19 nt, synthetic construct
  source 1..19: mol_type = other RNA
agtcatcagctccagagcc

SEQ ID NO: 12089 - RNA, 19 nt, synthetic construct
  source 1..19: mol_type = other RNA
ccacagctaccagcgttac

SEQ ID NO: 12090 - RNA, 19 nt, synthetic construct
  source 1..19: mol_type = other RNA
acagccacaccctcctcta

SEQ ID NO: 12091 - RNA, 19 nt, synthetic construct
  source 1..19: mol_type = other RNA
gcacaaccaccacacccac

SEQ ID NO: 12092 - RNA, 19 nt, synthetic construct
  source 1..19: mol_type = other RNA
cctcctccatcccggggac

SEQ ID NO: 12093 - RNA, 19 nt, synthetic construct
  source 1..19: mol_type = other RNA
cacagtgctgaccaccacc

SEQ ID NO: 12094 - RNA, 19 nt, synthetic construct
  source 1..19: mol_type = other RNA
ccaccaccacaactgtggc

SEQ ID NO: 12095 - RNA, 19 nt, synthetic construct
  source 1..19: mol_type = other RNA
tctagcacacagaccagtg

SEQ ID NO: 12096 - RNA, 19 nt, synthetic construct
  source 1..19: mol_type = other RNA
ccacatcacagagccttcc

SEQ ID NO: 12097 - RNA, 19 nt, synthetic construct
  source 1..19: mol_type = other RNA
gtgacttcccacaccccag

SEQ ID NO: 12098 - RNA, 19 nt, synthetic construct
  source 1..19: mol_type = other RNA
accaccagtaccacccagc

SEQ ID NO: 12099 - RNA, 19 nt, synthetic construct
  source 1..19: mol_type = other RNA
ccaccagtaccacccagca

SEQ ID NO: 12100 - RNA, 19 nt, synthetic construct
  source 1..19: mol_type = other RNA
agccctgtccagccctcac

SEQ ID NO: 12101 - RNA, 19 nt, synthetic construct
  source 1..19: mol_type = other RNA
ccacacccagcaagacccg

SEQ ID NO: 12102 - RNA, 19 nt, synthetic construct
  source 1..19: mol_type = other RNA
ccccagtgtgcctggtcag

SEQ ID NO: 12103 - RNA, 19 nt, synthetic construct
  source 1..19: mol_type = other RNA
catgccggggccctctggc

SEQ ID NO: 12104 - RNA, 19 nt, synthetic construct
  source 1..19: mol_type = other RNA
atgccggggccctctggcg

SEQ ID NO: 12105 - RNA, 19 nt, synthetic construct
  source 1..19: mol_type = other RNA
tgccggggccctctggcgg

SEQ ID NO: 12106 - RNA, 19 nt, synthetic construct
  source 1..19: mol_type = other RNA
gaatgcagcctggactttg

SEQ ID NO: 12107 - RNA, 19 nt, synthetic construct
  source 1..19: mol_type = other RNA
aatgcagcctggactttgg

SEQ ID NO: 12108 - RNA, 19 nt, synthetic construct
  source 1..19: mol_type = other RNA
ctggatcctcacaaagctg

SEQ ID NO: 12109 - RNA, 19 nt, synthetic construct
  source 1..19: mol_type = other RNA
tggatcctcacaaagctga

SEQ ID NO: 12110 - RNA, 19 nt, synthetic construct
  source 1..19: mol_type = other RNA
ccactggatccacggccac

SEQ ID NO: 12111 - RNA, 19 nt, synthetic construct
  source 1..19: mol_type = other RNA
cactggatccacggccacc

SEQ ID NO: 12112 - RNA, 19 nt, synthetic construct
  source 1..19: mol_type = other RNA
actggatccacggccaccc

SEQ ID NO: 12113 - RNA, 19 nt, synthetic construct
  source 1..19: mol_type = other RNA
ccaccccgtcctccacccc

SEQ ID NO: 12114 - RNA, 19 nt, synthetic construct
  source 1..19: mol_type = other RNA
cctccacccaggcaactgc

SEQ ID NO: 12115 - RNA, 19 nt, synthetic construct
  source 1..19: mol_type = other RNA
ttacagccatcccctcctc

SEQ ID NO: 12116 - RNA, 19 nt, synthetic construct
  source 1..19: mol_type = other RNA
actccagagactgcccaca

SEQ ID NO: 12117 - RNA, 19 nt, synthetic construct
  source 1..19: mol_type = other RNA
gcccacacctccacagtgc

SEQ ID NO: 12118 - RNA, 19 nt, synthetic construct
  source 1..19: mol_type = other RNA
gcacaaccaccacacccac

SEQ ID NO: 12119 - RNA, 19 nt, synthetic construct
  source 1..19: mol_type = other RNA
cggtgaccccctcctccgt

SEQ ID NO: 12120 - RNA, 19 nt, synthetic construct
  source 1..19: mol_type = other RNA
cacagtgctgaccaccacc

SEQ ID NO: 12121 - RNA, 19 nt, synthetic construct
  source 1..19: mol_type = other RNA
ccaccaccacaactgtggc

SEQ ID NO: 12122 - RNA, 19 nt, synthetic construct
  source 1..19: mol_type = other RNA
tctagcacacagaccagtg

SEQ ID NO: 12123 - RNA, 19 nt, synthetic construct
  source 1..19: mol_type = other RNA
gatcacggccaccggctcc

SEQ ID NO: 12124 - RNA, 19 nt, synthetic construct
  source 1..19: mol_type = other RNA
ccacatcacagagccttcc

SEQ ID NO: 12125 - RNA, 19 nt, synthetic construct
  source 1..19: mol_type = other RNA
agccctgtccagccctcac

SEQ ID NO: 12126 - RNA, 19 nt, synthetic construct
  source 1..19: mol_type = other RNA
cttccccagggacgaccac

SEQ ID NO: 12127 - RNA, 19 nt, synthetic construct
  source 1..19: mol_type = other RNA
ccacacccagcaagacccg

SEQ ID NO: 12128 - RNA, 19 nt, synthetic construct
  source 1..19: mol_type = other RNA
ccccagtgtgcctggtcag

SEQ ID NO: 12129 - RNA, 19 nt, synthetic construct
  source 1..19: mol_type = other RNA
catgccggggccctctggc

SEQ ID NO: 12130 - RNA, 19 nt, synthetic construct
  source 1..19: mol_type = other RNA
atgccggggccctctggcg

SEQ ID NO: 12131 - RNA, 19 nt, synthetic construct
  source 1..19: mol_type = other RNA
tgccggggccctctggcgg

SEQ ID NO: 12132 - RNA, 19 nt, synthetic construct
  source 1..19: mol_type = other RNA
gaatgcagcctggactttg

SEQ ID NO: 12133 - RNA, 19 nt, synthetic construct
  source 1..19: mol_type = other RNA
aatgcagcctggactttgg

SEQ ID NO: 12134 - RNA, 19 nt, synthetic construct
  source 1..19: mol_type = other RNA
ctgcatccactggatccac

SEQ ID NO: 12135 - RNA, 19 nt, synthetic construct
  source 1..19: mol_type = other RNA
ccactggatccacggccac

SEQ ID NO: 12136 - RNA, 19 nt, synthetic construct
  source 1..19: mol_type = other RNA
cactggatccacggccacc

SEQ ID NO: 12137 - RNA, 19 nt, synthetic construct
  source 1..19: mol_type = other RNA
actggatccacggccaccc

SEQ ID NO: 12138 - RNA, 19 nt, synthetic construct
  source 1..19: mol_type = other RNA
ccaccccgtcctccacccc

SEQ ID NO: 12139 - RNA, 19 nt, synthetic construct
  source 1..19: mol_type = other RNA
cacagccaccaaatccaca

SEQ ID NO: 12140 - RNA, 19 nt, synthetic construct
  source 1..19: mol_type = other RNA
ccacagctaccagcgttac

SEQ ID NO: 12141 - RNA, 19 nt, synthetic construct
  source 1..19: mol_type = other RNA
ctcctccacccttgggacc

SEQ ID NO: 12142 - RNA, 19 nt, synthetic construct
  source 1..19: mol_type = other RNA
cttgggaccaccgggaccc

SEQ ID NO: 12143 - RNA, 19 nt, synthetic construct
  source 1..19: mol_type = other RNA
ccaccgggaccctcccaga

SEQ ID NO: 12144 - RNA, 19 nt, synthetic construct
  source 1..19: mol_type = other RNA
ccacaatccacccctcctc

SEQ ID NO: 12145 - RNA, 19 nt, synthetic construct
  source 1..19: mol_type = other RNA
aatccacccctcctccact

SEQ ID NO: 12146 - RNA, 19 nt, synthetic construct
  source 1..19: mol_type = other RNA
acccacacctccacagtgc

SEQ ID NO: 12147 - RNA, 19 nt, synthetic construct
  source 1..19: mol_type = other RNA
gcagccactggccccacgg

SEQ ID NO: 12148 - RNA, 19 nt, synthetic construct
  source 1..19: mol_type = other RNA
ccaccccgtcctccacccc

SEQ ID NO: 12149 - RNA, 19 nt, synthetic construct
  source 1..19: mol_type = other RNA
ccactggatccacggccac

SEQ ID NO: 12150 - RNA, 19 nt, synthetic construct
  source 1..19: mol_type = other RNA
cactggatccacggccacc

SEQ ID NO: 12151 - RNA, 19 nt, synthetic construct
  source 1..19: mol_type = other RNA
actggatccacggccaccc

SEQ ID NO: 12152 - RNA, 19 nt, synthetic construct
  source 1..19: mol_type = other RNA
ccaccccgtcctccacccc

SEQ ID NO: 12153 - RNA, 19 nt, synthetic construct
  source 1..19: mol_type = other RNA
cctccacccaggcaactgc

SEQ ID NO: 12154 - RNA, 19 nt, synthetic construct
  source 1..19: mol_type = other RNA
ttacagccatcccctcctc

SEQ ID NO: 12155 - RNA, 19 nt, synthetic construct
  source 1..19: mol_type = other RNA
tcctccactccagagactg

SEQ ID NO: 12156 - RNA, 19 nt, synthetic construct
  source 1..19: mol_type = other RNA
gcacaaccaccacacccac

SEQ ID NO: 12157 - RNA, 19 nt, synthetic construct
  source 1..19: mol_type = other RNA
cctcctccatcccggggac

SEQ ID NO: 12158 - RNA, 19 nt, synthetic construct
  source 1..19: mol_type = other RNA
ccaccaccacaactgtggc

SEQ ID NO: 12159 - RNA, 19 nt, synthetic construct
  source 1..19: mol_type = other RNA
tctagcacacagaccagtg

SEQ ID NO: 12160 - RNA, 19 nt, synthetic construct
  source 1..19: mol_type = other RNA
gatcacggccaccggctcc

SEQ ID NO: 12161 - RNA, 19 nt, synthetic construct
  source 1..19: mol_type = other RNA
gctgaccagcacggccacc

SEQ ID NO: 12162 - RNA, 19 nt, synthetic construct
  source 1..19: mol_type = other RNA
ccaccacacccgcagccac

SEQ ID NO: 12163 - RNA, 19 nt, synthetic construct
  source 1..19: mol_type = other RNA
acacccgcagccaccagct

SEQ ID NO: 12164 - RNA, 19 nt, synthetic construct
  source 1..19: mol_type = other RNA
gcacagccacaaaatccac

SEQ ID NO: 12165 - RNA, 19 nt, synthetic construct
  source 1..19: mol_type = other RNA
gctttacacccatcccctc

SEQ ID NO: 12166 - RNA, 19 nt, synthetic construct
  source 1..19: mol_type = other RNA
acccacacctccacagtgc

SEQ ID NO: 12167 - RNA, 19 nt, synthetic construct
  source 1..19: mol_type = other RNA
ccacaacagccactacaac

SEQ ID NO: 12168 - RNA, 19 nt, synthetic construct
  source 1..19: mol_type = other RNA
cacaacagccactacaact

SEQ ID NO: 12169 - RNA, 19 nt, synthetic construct
  source 1..19: mol_type = other RNA
ccactggatccacggccac

SEQ ID NO: 12170 - RNA, 19 nt, synthetic construct
  source 1..19: mol_type = other RNA
cactggatccacggccacc

SEQ ID NO: 12171 - RNA, 19 nt, synthetic construct
  source 1..19: mol_type = other RNA
aagtggtgaccaccatggc

SEQ ID NO: 12172 - RNA, 19 nt, synthetic construct
  source 1..19: mol_type = other RNA
ggggaccacccgcacccct

SEQ ID NO: 12173 - RNA, 19 nt, synthetic construct
  source 1..19: mol_type = other RNA
agcctgtggccaacgtcac

SEQ ID NO: 12174 - RNA, 19 nt, synthetic construct
  source 1..19: mol_type = other RNA
cggcctctgccactgccgc

SEQ ID NO: 12175 - RNA, 19 nt, synthetic construct
  source 1..19: mol_type = other RNA
gtgcatgggaaggaggagg

SEQ ID NO: 12176 - RNA, 19 nt, synthetic construct
  source 1..19: mol_type = other RNA
gtgtctgtgctggggacca

SEQ ID NO: 12177 - RNA, 19 nt, synthetic construct
  source 1..19: mol_type = other RNA
tcaccttcaatggccaagt

SEQ ID NO: 12178 - RNA, 19 nt, synthetic construct
  source 1..19: mol_type = other RNA
caatggccaagtcttccag

SEQ ID NO: 12179 - RNA, 19 nt, synthetic construct
  source 1..19: mol_type = other RNA
cgtggctggtccccgacag

SEQ ID NO: 12180 - RNA, 19 nt, synthetic construct
  source 1..19: mol_type = other RNA
gacagcagaaaggatggct

SEQ ID NO: 12181 - RNA, 19 nt, synthetic construct
  source 1..19: mol_type = other RNA
ccccatgcccaccacagcc

SEQ ID NO: 12182 - RNA, 19 nt, synthetic construct
  source 1..19: mol_type = other RNA
ccattcttcaacgcctgca

SEQ ID NO: 12183 - RNA, 19 nt, synthetic construct
  source 1..19: mol_type = other RNA
tgcaggcctgcccctgcgt

SEQ ID NO: 12184 - RNA, 19 nt, synthetic construct
  source 1..19: mol_type = other RNA
tgcaacacaaccacctgcc

SEQ ID NO: 12185 - RNA, 19 nt, synthetic construct
  source 1..19: mol_type = other RNA
gccagggcaggagtccatc

SEQ ID NO: 12186 - RNA, 19 nt, synthetic construct
  source 1..19: mol_type = other RNA
cagacctcagctgtgttcg

SEQ ID NO: 12187 - RNA, 19 nt, synthetic construct
  source 1..19: mol_type = other RNA
catgtgtacctgcctctct

SEQ ID NO: 12188 - RNA, 19 nt, synthetic construct
  source 1..19: mol_type = other RNA
aggaggatgcctgcaacaa

SEQ ID NO: 12189 - RNA, 19 nt, synthetic construct
  source 1..19: mol_type = other RNA
tacaagagagtggccgggc

SEQ ID NO: 12190 - RNA, 19 nt, synthetic construct
  source 1..19: mol_type = other RNA
gtggccgggcagtgctgtg

SEQ ID NO: 12191 - RNA, 19 nt, synthetic construct
  source 1..19: mol_type = other RNA
ccatttgctgaccccacag

SEQ ID NO: 12192 - RNA, 19 nt, synthetic construct
  source 1..19: mol_type = other RNA
cttcccggcccaggaggcc

SEQ ID NO: 12193 - RNA, 19 nt, synthetic construct
  source 1..19: mol_type = other RNA
ccactgctgtctgagaacg

SEQ ID NO: 12194 - RNA, 19 nt, synthetic construct
  source 1..19: mol_type = other RNA
ccggagcgcccgcgcagca

SEQ ID NO: 12195 - RNA, 19 nt, synthetic construct
  source 1..19: mol_type = other RNA
gtccaggcaaggccagctg

SEQ ID NO: 12196 - RNA, 19 nt, synthetic construct
  source 1..19: mol_type = other RNA
gcccagttttgcaaataaa

SEQ ID NO: 12197 - RNA, 19 nt, synthetic construct
  source 1..19: mol_type = other RNA
ttgcaaataaaccctgagc

SEQ ID NO: 12198 - RNA, 19 nt, synthetic construct
  source 1..19: mol_type = other RNA
tgcaaataaaccctgagca

SEQ ID NO: 12199 - RNA, 19 nt, synthetic construct
  source 1..19: mol_type = other RNA
cagccatgtggacaactgc

SEQ ID NO: 12200 - RNA, 19 nt, synthetic construct
  source 1..19: mol_type = other RNA
caccgcctcctccactctg

SEQ ID NO: 12201 - RNA, 19 nt, synthetic construct
  source 1..19: mol_type = other RNA
gggtcagcatcccaaagcc

SEQ ID NO: 12202 - RNA, 19 nt, synthetic construct
  source 1..19: mol_type = other RNA
ccggctctgtggccacccc

SEQ ID NO: 12203 - RNA, 19 nt, synthetic construct
  source 1..19: mol_type = other RNA
ccggctctgtggccacccc

SEQ ID NO: 12204 - RNA, 19 nt, synthetic construct
  source 1..19: mol_type = other RNA
ccggctctgtggccacccc

SEQ ID NO: 12205 - RNA, 19 nt, synthetic construct
  source 1..19: mol_type = other RNA
ccggctctgtggccacccc

SEQ ID NO: 12206 - RNA, 19 nt, synthetic construct
  source 1..19: mol_type = other RNA
ccggctctgtggccacccc

SEQ ID NO: 12207 - RNA, 19 nt, synthetic construct
  source 1..19: mol_type = other RNA
ctagcacacccacccccac

SEQ ID NO: 12208 - RNA, 19 nt, synthetic construct
  source 1..19: mol_type = other RNA
agctccccctcccaaagtg

SEQ ID NO: 12209 - RNA, 19 nt, synthetic construct
  source 1..19: mol_type = other RNA
cggctctgtggccaccccc

SEQ ID NO: 12210 - RNA, 19 nt, synthetic construct
  source 1..19: mol_type = other RNA
cggctctgtggccaccccc

SEQ ID NO: 12211 - RNA, 19 nt, synthetic construct
  source 1..19: mol_type = other RNA
agctccccctcccaaagtg

SEQ ID NO: 12212 - RNA, 19 nt, synthetic construct
  source 1..19: mol_type = other RNA
cggctctgtggccaccccc

SEQ ID NO: 12213 - RNA, 19 nt, synthetic construct
  source 1..19: mol_type = other RNA
cggctctgtggccaccccc

SEQ ID NO: 12214 - RNA, 19 nt, synthetic construct
  source 1..19: mol_type = other RNA
agctccccctcccaaagtg

SEQ ID NO: 12215 - RNA, 19 nt, synthetic construct
  source 1..19: mol_type = other RNA
cggctctgtggccaccccc

SEQ ID NO: 12216 - RNA, 19 nt, synthetic construct
  source 1..19: mol_type = other RNA
gccgcctacgaggacttca

SEQ ID NO: 12217 - RNA, 19 nt, synthetic construct
  source 1..19: mol_type = other RNA
cgactgcgagtgtttctgc

SEQ ID NO: 12218 - RNA, 19 nt, synthetic construct
  source 1..19: mol_type = other RNA
gaaaagcacagggtgtgca

SEQ ID NO: 12219 - RNA, 19 nt, synthetic construct
  source 1..19: mol_type = other RNA
aaaagcacagggtgtgcag

SEQ ID NO: 12220 - RNA, 19 nt, synthetic construct
  source 1..19: mol_type = other RNA
caccagttccaaagccact

SEQ ID NO: 12221 - RNA, 19 nt, synthetic construct
  source 1..19: mol_type = other RNA
caccagttccaaagccact

SEQ ID NO: 12222 - RNA, 19 nt, synthetic construct
  source 1..19: mol_type = other RNA
tgtgcccgcccaggagtgc

SEQ ID NO: 12223 - RNA, 19 nt, synthetic construct
  source 1..19: mol_type = other RNA
ccgggccacaccagggcca

SEQ ID NO: 12224 - RNA, 19 nt, synthetic construct
  source 1..19: mol_type = other RNA
tggggcagacaggctggtc

SEQ ID NO: 12225 - RNA, 19 nt, synthetic construct
  source 1..19: mol_type = other RNA
gccccgcagccccggtgtc

SEQ ID NO: 12226 - RNA, 19 nt, synthetic construct
  source 1..19: mol_type = other RNA
cccttgactaacaccacca

SEQ ID NO: 12227 - RNA, 19 nt, synthetic construct
  source 1..19: mol_type = other RNA
cagccctttccagccctca

SEQ ID NO: 12228 - RNA, 19 nt, synthetic construct
  source 1..19: mol_type = other RNA
ggagactttgagacgtttg

SEQ ID NO: 12229 - RNA, 19 nt, synthetic construct
  source 1..19: mol_type = other RNA
cccgacatgccgctggagg

SEQ ID NO: 12230 - RNA, 19 nt, synthetic construct
  source 1..19: mol_type = other RNA
cttgactaacaccaccacc

SEQ ID NO: 12231 - RNA, 19 nt, synthetic construct
  source 1..19: mol_type = other RNA
ggtgacttccactacaaga

SEQ ID NO: 12232 - RNA, 19 nt, synthetic construct
  source 1..19: mol_type = other RNA
tctgcgaggaccactgtgt

SEQ ID NO: 12233 - RNA, 19 nt, synthetic construct
  source 1..19: mol_type = other RNA
caggcacagccagcaccgc

SEQ ID NO: 12234 - RNA, 19 nt, synthetic construct
  source 1..19: mol_type = other RNA
taacaccaccaccagccag

SEQ ID NO: 12235 - RNA, 19 nt, synthetic construct
  source 1..19: mol_type = other RNA
cacgggcttcacagccacc

SEQ ID NO: 12236 - RNA, 19 nt, synthetic construct
  source 1..19: mol_type = other RNA
acgggcttcacagccaccc

SEQ ID NO: 12237 - RNA, 19 nt, synthetic construct
  source 1..19: mol_type = other RNA
agccctttccagccctcac

SEQ ID NO: 12238 - RNA, 19 nt, synthetic construct
  source 1..19: mol_type = other RNA
cacgggcttcacagccacc

SEQ ID NO: 12239 - RNA, 19 nt, synthetic construct
  source 1..19: mol_type = other RNA
acgggcttcacagccaccc

SEQ ID NO: 12240 - RNA, 19 nt, synthetic construct
  source 1..19: mol_type = other RNA
cacgggcttcacagccacc

SEQ ID NO: 12241 - RNA, 19 nt, synthetic construct
  source 1..19: mol_type = other RNA
acgggcttcacagccaccc

SEQ ID NO: 12242 - RNA, 19 nt, synthetic construct
  source 1..19: mol_type = other RNA
cacgggcttcacagccacc

SEQ ID NO: 12243 - RNA, 19 nt, synthetic construct
  source 1..19: mol_type = other RNA
acgggcttcacagccaccc

SEQ ID NO: 12244 - RNA, 19 nt, synthetic construct
  source 1..19: mol_type = other RNA
acattcctgccctgggcgt

SEQ ID NO: 12245 - RNA, 19 nt, synthetic construct
  source 1..19: mol_type = other RNA
ctaccctgggagagcctgt

SEQ ID NO: 12246 - RNA, 19 nt, synthetic construct
  source 1..19: mol_type = other RNA
ggtcctctgctgcagtgac

SEQ ID NO: 12247 - RNA, 19 nt, synthetic construct
  source 1..19: mol_type = other RNA
cccaggacagagacgacaa

SEQ ID NO: 12248 - RNA, 19 nt, synthetic construct
  source 1..19: mol_type = other RNA
tgaccaccacggccactac

SEQ ID NO: 12249 - RNA, 19 nt, synthetic construct
  source 1..19: mol_type = other RNA
tgaccaccacggccactac

SEQ ID NO: 12250 - RNA, 19 nt, synthetic construct
  source 1..19: mol_type = other RNA
tgaccaccacggccactac

SEQ ID NO: 12251 - RNA, 19 nt, synthetic construct
  source 1..19: mol_type = other RNA
tgaccaccacggccactac

SEQ ID NO: 12252 - RNA, 19 nt, synthetic construct
  source 1..19: mol_type = other RNA
gtccaccatgtccacaatc

SEQ ID NO: 12253 - RNA, 19 nt, synthetic construct
  source 1..19: mol_type = other RNA
cgtgatggtgcccaccggt

SEQ ID NO: 12254 - RNA, 19 nt, synthetic construct
  source 1..19: mol_type = other RNA
tctacgcagtgtgcaatca

SEQ ID NO: 12255 - RNA, 19 nt, synthetic construct
  source 1..19: mol_type = other RNA
gaggatgcctgcaacaata

SEQ ID NO: 12256 - RNA, 19 nt, synthetic construct
  source 1..19: mol_type = other RNA
tcctaaatttcccggggag

SEQ ID NO: 12257 - RNA, 19 nt, synthetic construct
  source 1..19: mol_type = other RNA
ccagagcctggaggcttac

SEQ ID NO: 12258 - RNA, 19 nt, synthetic construct
  source 1..19: mol_type = other RNA
ccacggccaccacacacgg

SEQ ID NO: 12259 - RNA, 19 nt, synthetic construct
  source 1..19: mol_type = other RNA
ccacggccaccacacacgg

SEQ ID NO: 12260 - RNA, 19 nt, synthetic construct
  source 1..19: mol_type = other RNA
ccacggccaccacacacgg

SEQ ID NO: 12261 - RNA, 19 nt, synthetic construct
  source 1..19: mol_type = other RNA
gggcctatgtgtccctgcc

SEQ ID NO: 12262 - RNA, 19 nt, synthetic construct
  source 1..19: mol_type = other RNA
ctgtgtgcccgccagggca

SEQ ID NO: 12263 - RNA, 19 nt, synthetic construct
  source 1..19: mol_type = other RNA
acatcttggcccaggacta

SEQ ID NO: 12264 - RNA, 19 nt, synthetic construct
  source 1..19: mol_type = other RNA
ggacctacagctaccagga

SEQ ID NO: 12265 - RNA, 19 nt, synthetic construct
  source 1..19: mol_type = other RNA
acccctcctcaactcctgg

SEQ ID NO: 12266 - RNA, 19 nt, synthetic construct
  source 1..19: mol_type = other RNA
gcaccccgcgctccgtgct

SEQ ID NO: 12267 - RNA, 19 nt, synthetic construct
  source 1..19: mol_type = other RNA
tcccccatcactgaccacc

SEQ ID NO: 12268 - RNA, 19 nt, synthetic construct
  source 1..19: mol_type = other RNA
tcccccatcactgaccacc

SEQ ID NO: 12269 - RNA, 19 nt, synthetic construct
  source 1..19: mol_type = other RNA
tcccccatcactgaccacc

SEQ ID NO: 12270 - RNA, 19 nt, synthetic construct
  source 1..19: mol_type = other RNA
tcccccatcactgaccacc

SEQ ID NO: 12271 - RNA, 19 nt, synthetic construct
  source 1..19: mol_type = other RNA
cccgacgtcctcgcccacc

SEQ ID NO: 12272 - RNA, 19 nt, synthetic construct
  source 1..19: mol_type = other RNA
ccaggcctgccacgacgcg

SEQ ID NO: 12273 - RNA, 19 nt, synthetic construct
  source 1..19: mol_type = other RNA
ggacacctgccccttgttc

SEQ ID NO: 12274 - RNA, 19 nt, synthetic construct
  source 1..19: mol_type = other RNA
cgggcggcgcagcttcccg

SEQ ID NO: 12275 - RNA, 19 nt, synthetic construct
  source 1..19: mol_type = other RNA
ctcctcaactcctgggaca

SEQ ID NO: 12276 - RNA, 19 nt, synthetic construct
  source 1..19: mol_type = other RNA
gttttgcaaataaaccctg

SEQ ID NO: 12277 - RNA, 19 nt, synthetic construct
  source 1..19: mol_type = other RNA
ccccgacgtcctcgcccac

SEQ ID NO: 12278 - RNA, 19 nt, synthetic construct
  source 1..19: mol_type = other RNA
ggctatggcagtgccagga

SEQ ID NO: 12279 - RNA, 19 nt, synthetic construct
  source 1..19: mol_type = other RNA
tacatcttggcccaggact

SEQ ID NO: 12280 - RNA, 19 nt, synthetic construct
  source 1..19: mol_type = other RNA
ccccgggccacaccagggg

SEQ ID NO: 12281 - RNA, 19 nt, synthetic construct
  source 1..19: mol_type = other RNA
caacaatactacctgtccc

SEQ ID NO: 12282 - RNA, 19 nt, synthetic construct
  source 1..19: mol_type = other RNA
cacactaccaaagtgccaa

SEQ ID NO: 12283 - RNA, 19 nt, synthetic construct
  source 1..19: mol_type = other RNA
gcacctccttcaacaccac

SEQ ID NO: 12284 - RNA, 19 nt, synthetic construct
  source 1..19: mol_type = other RNA
gtgtgcctggtcagagtgg

SEQ ID NO: 12285 - RNA, 19 nt, synthetic construct
  source 1..19: mol_type = other RNA
gtgtgcctggtcagagtgg

SEQ ID NO: 12286 - RNA, 19 nt, synthetic construct
  source 1..19: mol_type = other RNA
gccacaccaggggcacctc

SEQ ID NO: 12287 - RNA, 19 nt, synthetic construct
  source 1..19: mol_type = other RNA
gtgtgcctggtcagagtgg

SEQ ID NO: 12288 - RNA, 19 nt, synthetic construct
  source 1..19: mol_type = other RNA
gtgtgcctggtcagagtgg

SEQ ID NO: 12289 - RNA, 19 nt, synthetic construct
  source 1..19: mol_type = other RNA
tcctcatgagagagatcca

SEQ ID NO: 12290 - RNA, 19 nt, synthetic construct
  source 1..19: mol_type = other RNA
ctggtggacagcactgcgt

SEQ ID NO: 12291 - RNA, 19 nt, synthetic construct
  source 1..19: mol_type = other RNA
tgttcatgtacgggtggga

SEQ ID NO: 12292 - RNA, 19 nt, synthetic construct
  source 1..19: mol_type = other RNA
cagcgttacagccatcccc

SEQ ID NO: 12293 - RNA, 19 nt, synthetic construct
  source 1..19: mol_type = other RNA
ccgccagttgcaaggacat

SEQ ID NO: 12294 - RNA, 19 nt, synthetic construct
  source 1..19: mol_type = other RNA
gccccctcaacatgcagca

SEQ ID NO: 12295 - RNA, 19 nt, synthetic construct
  source 1..19: mol_type = other RNA
gtggaatgcagcctggact

SEQ ID NO: 12296 - RNA, 19 nt, synthetic construct
  source 1..19: mol_type = other RNA
gtggaatgcagcctggact

SEQ ID NO: 12297 - RNA, 19 nt, synthetic construct
  source 1..19: mol_type = other RNA
gtggaatgcagcctggact

SEQ ID NO: 12298 - RNA, 19 nt, synthetic construct
  source 1..19: mol_type = other RNA
gtggaatgcagcctggact

SEQ ID NO: 12299 - RNA, 19 nt, synthetic construct
  source 1..19: mol_type = other RNA
acagccaccagttccaaag

SEQ ID NO: 12300 - RNA, 19 nt, synthetic construct
  source 1..19: mol_type = other RNA
acagccaccagttccaaag

SEQ ID NO: 12301 - RNA, 19 nt, synthetic construct
  source 1..19: mol_type = other RNA
gggggccagccgcggaact

SEQ ID NO: 12302 - RNA, 19 nt, synthetic construct
  source 1..19: mol_type = other RNA
gcaagggtccccacagcgg

SEQ ID NO: 12303 - RNA, 19 nt, synthetic construct
  source 1..19: mol_type = other RNA
agaacagctccccctccca

SEQ ID NO: 12304 - RNA, 19 nt, synthetic construct
  source 1..19: mol_type = other RNA
gtgagcaggtggggaagtt

SEQ ID NO: 12305 - RNA, 19 nt, synthetic construct
  source 1..19: mol_type = other RNA
gtgagcaggtggggaagtt

SEQ ID NO: 12306 - RNA, 19 nt, synthetic construct
  source 1..19: mol_type = other RNA
ggaacagctccccctccca

SEQ ID NO: 12307 - RNA, 19 nt, synthetic construct
  source 1..19: mol_type = other RNA
gccacaccctcctctactc

SEQ ID NO: 12308 - RNA, 19 nt, synthetic construct
  source 1..19: mol_type = other RNA
gtgagcaggtggggaagtt

SEQ ID NO: 12309 - RNA, 19 nt, synthetic construct
  source 1..19: mol_type = other RNA
gatcctcacaaagctgacc

SEQ ID NO: 12310 - RNA, 19 nt, synthetic construct
  source 1..19: mol_type = other RNA
gtgagcaggtggggaagtt

SEQ ID NO: 12311 - RNA, 19 nt, synthetic construct
  source 1..19: mol_type = other RNA
ggaacagctccccctccca

SEQ ID NO: 12312 - RNA, 19 nt, synthetic construct
  source 1..19: mol_type = other RNA
gccgccagttgcaaggaca

SEQ ID NO: 12313 - RNA, 19 nt, synthetic construct
  source 1..19: mol_type = other RNA
cacaactgtggccactggt

SEQ ID NO: 12314 - RNA, 19 nt, synthetic construct
  source 1..19: mol_type = other RNA
cacaactgtggccactggt

SEQ ID NO: 12315 - RNA, 19 nt, synthetic construct
  source 1..19: mol_type = other RNA
cacaactgtggccactggt

SEQ ID NO: 12316 - RNA, 19 nt, synthetic construct
  source 1..19: mol_type = other RNA
cacaactgtggccactggt

SEQ ID NO: 12317 - RNA, 19 nt, synthetic construct
  source 1..19: mol_type = other RNA
cacaactgtggccactggt

SEQ ID NO: 12318 - RNA, 19 nt, synthetic construct
  source 1..19: mol_type = other RNA
cctcaactccagggacaac

SEQ ID NO: 12319 - RNA, 19 nt, synthetic construct
  source 1..19: mol_type = other RNA
cctcaactccagggacaac

SEQ ID NO: 12320 - RNA, 19 nt, synthetic construct
  source 1..19: mol_type = other RNA
cctcaactccagggacaac

SEQ ID NO: 12321 - RNA, 19 nt, synthetic construct
  source 1..19: mol_type = other RNA
cgccagttgcaaggacatg

SEQ ID NO: 12322 - RNA, 19 nt, synthetic construct
  source 1..19: mol_type = other RNA
cggtgacttcccacaccct

SEQ ID NO: 12323 - RNA, 19 nt, synthetic construct
  source 1..19: mol_type = other RNA
tctacggccacgccctcct

SEQ ID NO: 12324 - RNA, 19 nt, synthetic construct
  source 1..19: mol_type = other RNA
tctacggccacgccctcct

SEQ ID NO: 12325 - RNA, 19 nt, synthetic construct
  source 1..19: mol_type = other RNA
ctgcaggaaccggaggtgg

SEQ ID NO: 12326 - RNA, 19 nt, synthetic construct
  source 1..19: mol_type = other RNA
ggcatctgccaccgcaccc

SEQ ID NO: 12327 - RNA, 19 nt, synthetic construct
  source 1..19: mol_type = other RNA
ctgcccagatgtgtccagc

SEQ ID NO: 12328 - RNA, 19 nt, synthetic construct
  source 1..19: mol_type = other RNA
tgcaagggtccccacagcg

SEQ ID NO: 12329 - RNA, 19 nt, synthetic construct
  source 1..19: mol_type = other RNA
actccggagaccacccaca

SEQ ID NO: 12330 - RNA, 19 nt, synthetic construct
  source 1..19: mol_type = other RNA
actccggagaccacccaca

SEQ ID NO: 12331 - RNA, 19 nt, synthetic construct
  source 1..19: mol_type = other RNA
cacacccgtggccaccatg

SEQ ID NO: 12332 - RNA, 19 nt, synthetic construct
  source 1..19: mol_type = other RNA
gcagtccccaccctctcag

SEQ ID NO: 12333 - RNA, 19 nt, synthetic construct
  source 1..19: mol_type = other RNA
accagggccaccggctctg

SEQ ID NO: 12334 - RNA, 19 nt, synthetic construct
  source 1..19: mol_type = other RNA
accagggccaccggctctg

SEQ ID NO: 12335 - RNA, 19 nt, synthetic construct
  source 1..19: mol_type = other RNA
agtcctcaccaccctgaga

SEQ ID NO: 12336 - RNA, 19 nt, synthetic construct
  source 1..19: mol_type = other RNA
ctgtgacaatgccatccct

SEQ ID NO: 12337 - RNA, 19 nt, synthetic construct
  source 1..19: mol_type = other RNA
accttcccaggcgcccttc

SEQ ID NO: 12338 - RNA, 19 nt, synthetic construct
  source 1..19: mol_type = other RNA
ggctcctggagaggtggtg

SEQ ID NO: 12339 - RNA, 19 nt, synthetic construct
  source 1..19: mol_type = other RNA
ctgtccacctctcaggccg

SEQ ID NO: 12340 - RNA, 19 nt, synthetic construct
  source 1..19: mol_type = other RNA
accggggccaccggctctg

SEQ ID NO: 12341 - RNA, 19 nt, synthetic construct
  source 1..19: mol_type = other RNA
tccacggccatcccgtcct

SEQ ID NO: 12342 - RNA, 19 nt, synthetic construct
  source 1..19: mol_type = other RNA
ccacccgggcaactgctgg

SEQ ID NO: 12343 - RNA, 19 nt, synthetic construct
  source 1..19: mol_type = other RNA
ctccctgggcaccgcctgg

SEQ ID NO: 12344 - RNA, 19 nt, synthetic construct
  source 1..19: mol_type = other RNA
accggggccaccggctctg

SEQ ID NO: 12345 - RNA, 19 nt, synthetic construct
  source 1..19: mol_type = other RNA
aagggccaccaattccacg

SEQ ID NO: 12346 - RNA, 19 nt, synthetic construct
  source 1..19: mol_type = other RNA
gccacaaccttgtgccccc

SEQ ID NO: 12347 - RNA, 19 nt, synthetic construct
  source 1..19: mol_type = other RNA
tacggggttggtgcaacct

SEQ ID NO: 12348 - RNA, 19 nt, synthetic construct
  source 1..19: mol_type = other RNA
cgcccttccctgccacatg

SEQ ID NO: 12349 - RNA, 19 nt, synthetic construct
  source 1..19: mol_type = other RNA
aggcaaggcggccgcctgt

SEQ ID NO: 12350 - RNA, 19 nt, synthetic construct
  source 1..19: mol_type = other RNA
taactcagggctgaggtcg

SEQ ID NO: 12351 - RNA, 19 nt, synthetic construct
  source 1..19: mol_type = other RNA
actggtggacagcactgcg

SEQ ID NO: 12352 - RNA, 19 nt, synthetic construct
  source 1..19: mol_type = other RNA
cgggcacctccttcaacac

SEQ ID NO: 12353 - RNA, 19 nt, synthetic construct
  source 1..19: mol_type = other RNA
accaccgccaccacacctg

SEQ ID NO: 12354 - RNA, 19 nt, synthetic construct
  source 1..19: mol_type = other RNA
accaccgccaccacacctg

SEQ ID NO: 12355 - RNA, 19 nt, synthetic construct
  source 1..19: mol_type = other RNA
accaccgccaccacacctg

SEQ ID NO: 12356 - RNA, 19 nt, synthetic construct
  source 1..19: mol_type = other RNA
accaccgccaccacacctg

SEQ ID NO: 12357 - RNA, 19 nt, synthetic construct
  source 1..19: mol_type = other RNA
tgcaatgtcaggaggatgc

SEQ ID NO: 12358 - RNA, 19 nt, synthetic construct
  source 1..19: mol_type = other RNA
ctgagccccctgaacccgg

SEQ ID NO: 12359 - RNA, 19 nt, synthetic construct
  source 1..19: mol_type = other RNA
aactctacgacctgcatgg

SEQ ID NO: 12360 - RNA, 19 nt, synthetic construct
  source 1..19: mol_type = other RNA
caccccctcggccccaggt

SEQ ID NO: 12361 - RNA, 19 nt, synthetic construct
  source 1..19: mol_type = other RNA
gggggagttgggccaggtc

SEQ ID NO: 12362 - RNA, 19 nt, synthetic construct
  source 1..19: mol_type = other RNA
tccaagtactcagcagagg

SEQ ID NO: 12363 - RNA, 19 nt, synthetic construct
  source 1..19: mol_type = other RNA
acagctcagcgactggagg

SEQ ID NO: 12364 - RNA, 19 nt, synthetic construct
  source 1..19: mol_type = other RNA
accaccgcctgggtccccc

SEQ ID NO: 12365 - RNA, 19 nt, synthetic construct
  source 1..19: mol_type = other RNA
tccacggccaccccgtcct

SEQ ID NO: 12366 - RNA, 19 nt, synthetic construct
  source 1..19: mol_type = other RNA
cccacggccaccccgtcct

SEQ ID NO: 12367 - RNA, 19 nt, synthetic construct
  source 1..19: mol_type = other RNA
tccacggccaccccgtcct

SEQ ID NO: 12368 - RNA, 19 nt, synthetic construct
  source 1..19: mol_type = other RNA
tccacggccaccccgtcct

SEQ ID NO: 12369 - RNA, 19 nt, synthetic construct
  source 1..19: mol_type = other RNA
cccacggccaccccgtcct

SEQ ID NO: 12370 - RNA, 19 nt, synthetic construct
  source 1..19: mol_type = other RNA
tccacggccaccccgtcct

SEQ ID NO: 12371 - RNA, 19 nt, synthetic construct
  source 1..19: mol_type = other RNA
gccaagtcttccaggcccg

SEQ ID NO: 12372 - RNA, 19 nt, synthetic construct
  source 1..19: mol_type = other RNA
gggagaatgcagggcacac

SEQ ID NO: 12373 - RNA, 19 nt, synthetic construct
  source 1..19: mol_type = other RNA
tgcagggcacaccatggat

SEQ ID NO: 12374 - RNA, 19 nt, synthetic construct
  source 1..19: mol_type = other RNA
agtgtggctcaccctgcac

SEQ ID NO: 12375 - RNA, 19 nt, synthetic construct
  source 1..19: mol_type = other RNA
agcgcgcgcagctctgcga

SEQ ID NO: 12376 - RNA, 19 nt, synthetic construct
  source 1..19: mol_type = other RNA
gcccgggcacctccttcaa

SEQ ID NO: 12377 - RNA, 19 nt, synthetic construct
  source 1..19: mol_type = other RNA
agggcggggcccacatctc

SEQ ID NO: 12378 - RNA, 19 nt, synthetic construct
  source 1..19: mol_type = other RNA
cgctgccactccatcatca

SEQ ID NO: 12379 - RNA, 19 nt, synthetic construct
  source 1..19: mol_type = other RNA
taaggcggtggcgagaggg

SEQ ID NO: 12380 - RNA, 19 nt, synthetic construct
  source 1..19: mol_type = other RNA
agggccgggtggggaccca

SEQ ID NO: 12381 - RNA, 19 nt, synthetic construct
  source 1..19: mol_type = other RNA
tgggtccagctcaggcccc

SEQ ID NO: 12382 - RNA, 19 nt, synthetic construct
  source 1..19: mol_type = other RNA
gcctgcaggctccacagaa

SEQ ID NO: 12383 - RNA, 19 nt, synthetic construct
  source 1..19: mol_type = other RNA
accagcacgcccaggacag

SEQ ID NO: 12384 - RNA, 19 nt, synthetic construct
  source 1..19: mol_type = other RNA
ccaccctgagaacagctcc

SEQ ID NO: 12385 - RNA, 19 nt, synthetic construct
  source 1..19: mol_type = other RNA
actggggccaccggctctg

SEQ ID NO: 12386 - RNA, 19 nt, synthetic construct
  source 1..19: mol_type = other RNA
agaggctccacggtgaccc

SEQ ID NO: 12387 - RNA, 19 nt, synthetic construct
  source 1..19: mol_type = other RNA
gaccaccacggccactacg

SEQ ID NO: 12388 - RNA, 19 nt, synthetic construct
  source 1..19: mol_type = other RNA
gacaactcccatcccccca

SEQ ID NO: 12389 - RNA, 19 nt, synthetic construct
  source 1..19: mol_type = other RNA
gcgcacagcctggacttcg

SEQ ID NO: 12390 - RNA, 19 nt, synthetic construct
  source 1..19: mol_type = other RNA
tccagccctcaccctagca

SEQ ID NO: 12391 - RNA, 19 nt, synthetic construct
  source 1..19: mol_type = other RNA
actgctggcaccccacatg

SEQ ID NO: 12392 - RNA, 19 nt, synthetic construct
  source 1..19: mol_type = other RNA
gaccaccacggccactacg

SEQ ID NO: 12393 - RNA, 19 nt, synthetic construct
  source 1..19: mol_type = other RNA
caccagcagcacagtgact

SEQ ID NO: 12394 - RNA, 19 nt, synthetic construct
  source 1..19: mol_type = other RNA
gcgcacagcctggacttcg

SEQ ID NO: 12395 - RNA, 19 nt, synthetic construct
  source 1..19: mol_type = other RNA
cggccacctcaggcacctt

SEQ ID NO: 12396 - RNA, 19 nt, synthetic construct
  source 1..19: mol_type = other RNA
tccagccctcaccctagca

SEQ ID NO: 12397 - RNA, 19 nt, synthetic construct
  source 1..19: mol_type = other RNA
ccaccagctctacggccac

SEQ ID NO: 12398 - RNA, 19 nt, synthetic construct
  source 1..19: mol_type = other RNA
agaccacagcagccactac

SEQ ID NO: 12399 - RNA, 19 nt, synthetic construct
  source 1..19: mol_type = other RNA
accaaatccacagctacca

SEQ ID NO: 12400 - RNA, 19 nt, synthetic construct
  source 1..19: mol_type = other RNA
cgcctcctccacccgggca

SEQ ID NO: 12401 - RNA, 19 nt, synthetic construct
  source 1..19: mol_type = other RNA
acaaccagggccaccggct

SEQ ID NO: 12402 - RNA, 19 nt, synthetic construct
  source 1..19: mol_type = other RNA
agaggctccacggtgaccc

SEQ ID NO: 12403 - RNA, 19 nt, synthetic construct
  source 1..19: mol_type = other RNA
gaccaccacggccactacg

SEQ ID NO: 12404 - RNA, 19 nt, synthetic construct
  source 1..19: mol_type = other RNA
gacaactcccatcccccca

SEQ ID NO: 12405 - RNA, 19 nt, synthetic construct
  source 1..19: mol_type = other RNA
caccagcagcacagtgact

SEQ ID NO: 12406 - RNA, 19 nt, synthetic construct
  source 1..19: mol_type = other RNA
gcgcacagcctggacttcg

SEQ ID NO: 12407 - RNA, 19 nt, synthetic construct
  source 1..19: mol_type = other RNA
tccagccctcaccctagca

SEQ ID NO: 12408 - RNA, 19 nt, synthetic construct
  source 1..19: mol_type = other RNA
ccaccagctctacggccac

SEQ ID NO: 12409 - RNA, 19 nt, synthetic construct
  source 1..19: mol_type = other RNA
actgctggcaccccacatg

SEQ ID NO: 12410 - RNA, 19 nt, synthetic construct
  source 1..19: mol_type = other RNA
acaaccagggccaccggct

SEQ ID NO: 12411 - RNA, 19 nt, synthetic construct
  source 1..19: mol_type = other RNA
gatcaccacggccactacg

SEQ ID NO: 12412 - RNA, 19 nt, synthetic construct
  source 1..19: mol_type = other RNA
caccagcagcacagtgact

SEQ ID NO: 12413 - RNA, 19 nt, synthetic construct
  source 1..19: mol_type = other RNA
gcgcacagcctggacttcg

SEQ ID NO: 12414 - RNA, 19 nt, synthetic construct
  source 1..19: mol_type = other RNA
cggccacctcaggcacctt

SEQ ID NO: 12415 - RNA, 19 nt, synthetic construct
  source 1..19: mol_type = other RNA
tccagccctcaccctagca

SEQ ID NO: 12416 - RNA, 19 nt, synthetic construct
  source 1..19: mol_type = other RNA
acccccttccccagggacg

SEQ ID NO: 12417 - RNA, 19 nt, synthetic construct
  source 1..19: mol_type = other RNA
cccccttccccagggacga

SEQ ID NO: 12418 - RNA, 19 nt, synthetic construct
  source 1..19: mol_type = other RNA
accaaatccacagctacca

SEQ ID NO: 12419 - RNA, 19 nt, synthetic construct
  source 1..19: mol_type = other RNA
actgctggcaccccacatg

SEQ ID NO: 12420 - RNA, 19 nt, synthetic construct
  source 1..19: mol_type = other RNA
tgcaactgcccttccagca

SEQ ID NO: 12421 - RNA, 19 nt, synthetic construct
  source 1..19: mol_type = other RNA
gaccaccacggccactacg

SEQ ID NO: 12422 - RNA, 19 nt, synthetic construct
  source 1..19: mol_type = other RNA
ccctcctccaccctgtgga

SEQ ID NO: 12423 - RNA, 19 nt, synthetic construct
  source 1..19: mol_type = other RNA
cagaccaccacacccatgt

SEQ ID NO: 12424 - RNA, 19 nt, synthetic construct
  source 1..19: mol_type = other RNA
tccccaccgccagtgtcct

SEQ ID NO: 12425 - RNA, 19 nt, synthetic construct
  source 1..19: mol_type = other RNA
atctgcagcatgtggggcg

SEQ ID NO: 12426 - RNA, 19 nt, synthetic construct
  source 1..19: mol_type = other RNA
tttgggaatctcagcctct

SEQ ID NO: 12427 - RNA, 19 nt, synthetic construct
  source 1..19: mol_type = other RNA
ctacctggacaaccactac

SEQ ID NO: 12428 - RNA, 19 nt, synthetic construct
  source 1..19: mol_type = other RNA
ccaagtcttccaggcccgg

SEQ ID NO: 12429 - RNA, 19 nt, synthetic construct
  source 1..19: mol_type = other RNA
gccagttgcaaggacatgg

SEQ ID NO: 12430 - RNA, 19 nt, synthetic construct
  source 1..19: mol_type = other RNA
gctgggccccgactggcac

SEQ ID NO: 12431 - RNA, 19 nt, synthetic construct
  source 1..19: mol_type = other RNA
cccaccacagccgctctgt

SEQ ID NO: 12432 - RNA, 19 nt, synthetic construct
  source 1..19: mol_type = other RNA
accacagccgctctgtgat

SEQ ID NO: 12433 - RNA, 19 nt, synthetic construct
  source 1..19: mol_type = other RNA
gccttgaggtgccctgcca

SEQ ID NO: 12434 - RNA, 19 nt, synthetic construct
  source 1..19: mol_type = other RNA
ccagggcaggagtccatct

SEQ ID NO: 12435 - RNA, 19 nt, synthetic construct
  source 1..19: mol_type = other RNA
acctgtccccagggctttg

SEQ ID NO: 12436 - RNA, 19 nt, synthetic construct
  source 1..19: mol_type = other RNA
accgcctgcctcacgcccg

SEQ ID NO: 12437 - RNA, 19 nt, synthetic construct
  source 1..19: mol_type = other RNA
tgatcatgaaaaccttggg

SEQ ID NO: 12438 - RNA, 19 nt, synthetic construct
  source 1..19: mol_type = other RNA
actcaggagtcctaccctg

SEQ ID NO: 12439 - RNA, 19 nt, synthetic construct
  source 1..19: mol_type = other RNA
ctcagggctgaggtcgcaa

SEQ ID NO: 12440 - RNA, 19 nt, synthetic construct
  source 1..19: mol_type = other RNA
tccaacccccagcgcgcgc

SEQ ID NO: 12441 - RNA, 19 nt, synthetic construct
  source 1..19: mol_type = other RNA
gctgaccacgaaggccacc

SEQ ID NO: 12442 - RNA, 19 nt, synthetic construct
  source 1..19: mol_type = other RNA
gctgaccacgaaggccacc

SEQ ID NO: 12443 - RNA, 19 nt, synthetic construct
  source 1..19: mol_type = other RNA
cgccagagtgctgaccacc

SEQ ID NO: 12444 - RNA, 19 nt, synthetic construct
  source 1..19: mol_type = other RNA
agctccaaagccactccct

SEQ ID NO: 12445 - RNA, 19 nt, synthetic construct
  source 1..19: mol_type = other RNA
agctccaaagccactccct

SEQ ID NO: 12446 - RNA, 19 nt, synthetic construct
  source 1..19: mol_type = other RNA
actgtggggacaacaccac

SEQ ID NO: 12447 - RNA, 19 nt, synthetic construct
  source 1..19: mol_type = other RNA
caccccggccaccagctct

SEQ ID NO: 12448 - RNA, 19 nt, synthetic construct
  source 1..19: mol_type = other RNA
caccccggccaccagctct

SEQ ID NO: 12449 - RNA, 19 nt, synthetic construct
  source 1..19: mol_type = other RNA
caccccggccaccagctct

SEQ ID NO: 12450 - RNA, 19 nt, synthetic construct
  source 1..19: mol_type = other RNA
cacggtgaccccctcctcc

SEQ ID NO: 12451 - RNA, 19 nt, synthetic construct
  source 1..19: mol_type = other RNA
caccccggccaccagctct

SEQ ID NO: 12452 - RNA, 19 nt, synthetic construct
  source 1..19: mol_type = other RNA
gccagagtgctgaccacca

SEQ ID NO: 12453 - RNA, 19 nt, synthetic construct
  source 1..19: mol_type = other RNA
acagaccaccacacccacg

SEQ ID NO: 12454 - RNA, 19 nt, synthetic construct
  source 1..19: mol_type = other RNA
ccagccctcaccctagcag

SEQ ID NO: 12455 - RNA, 19 nt, synthetic construct
  source 1..19: mol_type = other RNA
acagaccaccacacccacg

SEQ ID NO: 12456 - RNA, 19 nt, synthetic construct
  source 1..19: mol_type = other RNA
ccagccctcaccctagcag

SEQ ID NO: 12457 - RNA, 19 nt, synthetic construct
  source 1..19: mol_type = other RNA
ccacagcagccactacgac

SEQ ID NO: 12458 - RNA, 19 nt, synthetic construct
  source 1..19: mol_type = other RNA
cagccaccagttccaaagc

SEQ ID NO: 12459 - RNA, 19 nt, synthetic construct
  source 1..19: mol_type = other RNA
acagaccaccacacccacg

SEQ ID NO: 12460 - RNA, 19 nt, synthetic construct
  source 1..19: mol_type = other RNA
cctctactccagagactgt

SEQ ID NO: 12461 - RNA, 19 nt, synthetic construct
  source 1..19: mol_type = other RNA
ccagccctcaccctagcag

SEQ ID NO: 12462 - RNA, 19 nt, synthetic construct
  source 1..19: mol_type = other RNA
acagaccaccacacccacg

SEQ ID NO: 12463 - RNA, 19 nt, synthetic construct
  source 1..19: mol_type = other RNA
ccagccctcaccctagcag

SEQ ID NO: 12464 - RNA, 19 nt, synthetic construct
  source 1..19: mol_type = other RNA
cagccaccagttccaaagc

SEQ ID NO: 12465 - RNA, 19 nt, synthetic construct
  source 1..19: mol_type = other RNA
acagaccaccacacccacg

SEQ ID NO: 12466 - RNA, 19 nt, synthetic construct
  source 1..19: mol_type = other RNA
gcagaaaggatggctgctg

SEQ ID NO: 12467 - RNA, 19 nt, synthetic construct
  source 1..19: mol_type = other RNA
cagggcaggagtccatctg

SEQ ID NO: 12468 - RNA, 19 nt, synthetic construct
  source 1..19: mol_type = other RNA
ccagctgaatgaaacctgg

SEQ ID NO: 12469 - RNA, 19 nt, synthetic construct
  source 1..19: mol_type = other RNA
aacgccaggctgaccccgc

SEQ ID NO: 12470 - RNA, 19 nt, synthetic construct
  source 1..19: mol_type = other RNA
gcctggtcagagtggctgg

SEQ ID NO: 12471 - RNA, 19 nt, synthetic construct
  source 1..19: mol_type = other RNA
gcctggtcagagtggctgg

SEQ ID NO: 12472 - RNA, 19 nt, synthetic construct
  source 1..19: mol_type = other RNA
gcctggtcagagtggctgg

SEQ ID NO: 12473 - RNA, 19 nt, synthetic construct
  source 1..19: mol_type = other RNA
gcctggtcagagtggctgg

SEQ ID NO: 12474 - RNA, 19 nt, synthetic construct
  source 1..19: mol_type = other RNA
tggaggggatggcggaggg

SEQ ID NO: 12475 - RNA, 19 nt, synthetic construct
  source 1..19: mol_type = other RNA
acctgcaggaaccggaggt

SEQ ID NO: 12476 - RNA, 19 nt, synthetic construct
  source 1..19: mol_type = other RNA
gacacctgccccttgttct

SEQ ID NO: 12477 - RNA, 19 nt, synthetic construct
  source 1..19: mol_type = other RNA
ggcctgggaggcggagact

SEQ ID NO: 12478 - RNA, 19 nt, synthetic construct
  source 1..19: mol_type = other RNA
ctccaaagccactcccttc

SEQ ID NO: 12479 - RNA, 19 nt, synthetic construct
  source 1..19: mol_type = other RNA
cccatggccaccatgtcca

SEQ ID NO: 12480 - RNA, 19 nt, synthetic construct
  source 1..19: mol_type = other RNA
ctccaaagccactcccttc

SEQ ID NO: 12481 - RNA, 19 nt, synthetic construct
  source 1..19: mol_type = other RNA
tcctcactgtcaccatggt

SEQ ID NO: 12482 - RNA, 19 nt, synthetic construct
  source 1..19: mol_type = other RNA
gtgaggaggactcctgtca

SEQ ID NO: 12483 - RNA, 19 nt, synthetic construct
  source 1..19: mol_type = other RNA
ctggtccaggcaaggccag

SEQ ID NO: 12484 - RNA, 19 nt, synthetic construct
  source 1..19: mol_type = other RNA
cttccgcttccctggcctt

SEQ ID NO: 12485 - RNA, 19 nt, synthetic construct
  source 1..19: mol_type = other RNA
cggccaccacacccacagt

SEQ ID NO: 12486 - RNA, 19 nt, synthetic construct
  source 1..19: mol_type = other RNA
cccacaaccagaggctcca

SEQ ID NO: 12487 - RNA, 19 nt, synthetic construct
  source 1..19: mol_type = other RNA
cagtgtgcctggtcagagt

SEQ ID NO: 12488 - RNA, 19 nt, synthetic construct
  source 1..19: mol_type = other RNA
cagcccagggacggcacgc

SEQ ID NO: 12489 - RNA, 19 nt, synthetic construct
  source 1..19: mol_type = other RNA
cagtgtgcctggtcagagt

SEQ ID NO: 12490 - RNA, 19 nt, synthetic construct
  source 1..19: mol_type = other RNA
cccaaagtgctgaccagca

SEQ ID NO: 12491 - RNA, 19 nt, synthetic construct
  source 1..19: mol_type = other RNA
ccaaagtgctgaccagcac

SEQ ID NO: 12492 - RNA, 19 nt, synthetic construct
  source 1..19: mol_type = other RNA
tcaaagtgctgaccagcac

SEQ ID NO: 12493 - RNA, 19 nt, synthetic construct
  source 1..19: mol_type = other RNA
cggccaccacacccacagt

SEQ ID NO: 12494 - RNA, 19 nt, synthetic construct
  source 1..19: mol_type = other RNA
cccacaaccagaggctcca

SEQ ID NO: 12495 - RNA, 19 nt, synthetic construct
  source 1..19: mol_type = other RNA
cagtgtgcctggtcagagt

SEQ ID NO: 12496 - RNA, 19 nt, synthetic construct
  source 1..19: mol_type = other RNA
cagcccagggacggcacgc

SEQ ID NO: 12497 - RNA, 19 nt, synthetic construct
  source 1..19: mol_type = other RNA
cagtgtgcctggtcagagt

SEQ ID NO: 12498 - RNA, 19 nt, synthetic construct
  source 1..19: mol_type = other RNA
agggcgcctgtcccacctc

SEQ ID NO: 12499 - RNA, 19 nt, synthetic construct
  source 1..19: mol_type = other RNA
caatgtcaggaggatgcct

SEQ ID NO: 12500 - RNA, 19 nt, synthetic construct
  source 1..19: mol_type = other RNA
atgcctgctgcagggtaac

SEQ ID NO: 12501 - RNA, 19 nt, synthetic construct
  source 1..19: mol_type = other RNA
acccttggtacagccacca

SEQ ID NO: 12502 - RNA, 19 nt, synthetic construct
  source 1..19: mol_type = other RNA
caccatggccaccacacac

SEQ ID NO: 12503 - RNA, 19 nt, synthetic construct
  source 1..19: mol_type = other RNA
gactgagtccactggatcc

SEQ ID NO: 12504 - RNA, 19 nt, synthetic construct
  source 1..19: mol_type = other RNA
gactgagtccactggatcc

SEQ ID NO: 12505 - RNA, 19 nt, synthetic construct
  source 1..19: mol_type = other RNA
ggccacgtccggccgctgg

SEQ ID NO: 12506 - RNA, 19 nt, synthetic construct
  source 1..19: mol_type = other RNA
ccctgtggagccgagctgg

SEQ ID NO: 12507 - RNA, 19 nt, synthetic construct
  source 1..19: mol_type = other RNA
gagctgggagaatgcaggg

SEQ ID NO: 12508 - RNA, 19 nt, synthetic construct
  source 1..19: mol_type = other RNA
cccccagcgcgcgcagctc

SEQ ID NO: 12509 - RNA, 19 nt, synthetic construct
  source 1..19: mol_type = other RNA
gactgcagcaacagctcgg

SEQ ID NO: 12510 - RNA, 19 nt, synthetic construct
  source 1..19: mol_type = other RNA
aacaccacccacgggacct

SEQ ID NO: 12511 - RNA, 19 nt, synthetic construct
  source 1..19: mol_type = other RNA
gcctgggaggcggagactt

SEQ ID NO: 12512 - RNA, 19 nt, synthetic construct
  source 1..19: mol_type = other RNA
actacaggatccgggtcct

SEQ ID NO: 12513 - RNA, 19 nt, synthetic construct
  source 1..19: mol_type = other RNA
acacccacagctaccagcg

SEQ ID NO: 12514 - RNA, 19 nt, synthetic construct
  source 1..19: mol_type = other RNA
accacacccacggccacca

SEQ ID NO: 12515 - RNA, 19 nt, synthetic construct
  source 1..19: mol_type = other RNA
tccacagtgcttaccgcca

SEQ ID NO: 12516 - RNA, 19 nt, synthetic construct
  source 1..19: mol_type = other RNA
caccagcaacacagtgact

SEQ ID NO: 12517 - RNA, 19 nt, synthetic construct
  source 1..19: mol_type = other RNA
accacccacatcacagagc

SEQ ID NO: 12518 - RNA, 19 nt, synthetic construct
  source 1..19: mol_type = other RNA
cccatgccggggccctctg

SEQ ID NO: 12519 - RNA, 19 nt, synthetic construct
  source 1..19: mol_type = other RNA
accacacccacggccacca

SEQ ID NO: 12520 - RNA, 19 nt, synthetic construct
  source 1..19: mol_type = other RNA
ccagcccagggacggcacg

SEQ ID NO: 12521 - RNA, 19 nt, synthetic construct
  source 1..19: mol_type = other RNA
ccacacccacaaccagagg

SEQ ID NO: 12522 - RNA, 19 nt, synthetic construct
  source 1..19: mol_type = other RNA
cacctcaggcaccttgggc

SEQ ID NO: 12523 - RNA, 19 nt, synthetic construct
  source 1..19: mol_type = other RNA
accacccacatcacagagc

SEQ ID NO: 12524 - RNA, 19 nt, synthetic construct
  source 1..19: mol_type = other RNA
cccatgccggggccctctg

SEQ ID NO: 12525 - RNA, 19 nt, synthetic construct
  source 1..19: mol_type = other RNA
ccccgggaacagctccccc

SEQ ID NO: 12526 - RNA, 19 nt, synthetic construct
  source 1..19: mol_type = other RNA
cacacccatggccaccatg

SEQ ID NO: 12527 - RNA, 19 nt, synthetic construct
  source 1..19: mol_type = other RNA
acaagggccaccagttcca

SEQ ID NO: 12528 - RNA, 19 nt, synthetic construct
  source 1..19: mol_type = other RNA
acacccacagctaccagcg

SEQ ID NO: 12529 - RNA, 19 nt, synthetic construct
  source 1..19: mol_type = other RNA
accacacccacggccacca

SEQ ID NO: 12530 - RNA, 19 nt, synthetic construct
  source 1..19: mol_type = other RNA
accctcctctactccagag

SEQ ID NO: 12531 - RNA, 19 nt, synthetic construct
  source 1..19: mol_type = other RNA
accacccacatcacagagc

SEQ ID NO: 12532 - RNA, 19 nt, synthetic construct
  source 1..19: mol_type = other RNA
cccatgccggggccctctg

SEQ ID NO: 12533 - RNA, 19 nt, synthetic construct
  source 1..19: mol_type = other RNA
accacacccacggccacca

SEQ ID NO: 12534 - RNA, 19 nt, synthetic construct
  source 1..19: mol_type = other RNA
ccagcccagggacggcacg

SEQ ID NO: 12535 - RNA, 19 nt, synthetic construct
  source 1..19: mol_type = other RNA
cacctcaggcaccttgggc

SEQ ID NO: 12536 - RNA, 19 nt, synthetic construct
  source 1..19: mol_type = other RNA
accacccacatcacagagc

SEQ ID NO: 12537 - RNA, 19 nt, synthetic construct
  source 1..19: mol_type = other RNA
cccatgccggggccctctg

SEQ ID NO: 12538 - RNA, 19 nt, synthetic construct
  source 1..19: mol_type = other RNA
ccccgggaacagctccccc

SEQ ID NO: 12539 - RNA, 19 nt, synthetic construct
  source 1..19: mol_type = other RNA
accacacccacggccacca

SEQ ID NO: 12540 - RNA, 19 nt, synthetic construct
  source 1..19: mol_type = other RNA
tccacagtgcttaccgcca

SEQ ID NO: 12541 - RNA, 19 nt, synthetic construct
  source 1..19: mol_type = other RNA
accacaacagccactacaa

SEQ ID NO: 12542 - RNA, 19 nt, synthetic construct
  source 1..19: mol_type = other RNA
caccaccctgagacccact

SEQ ID NO: 12543 - RNA, 19 nt, synthetic construct
  source 1..19: mol_type = other RNA
gccagtgtcctccgccccg

SEQ ID NO: 12544 - RNA, 19 nt, synthetic construct
  source 1..19: mol_type = other RNA
gacgtggctggtccccgac

SEQ ID NO: 12545 - RNA, 19 nt, synthetic construct
  source 1..19: mol_type = other RNA
aaccttcccaggcgccctt

SEQ ID NO: 12546 - RNA, 19 nt, synthetic construct
  source 1..19: mol_type = other RNA
tgcccagatgtgtccagct

SEQ ID NO: 12547 - RNA, 19 nt, synthetic construct
  source 1..19: mol_type = other RNA
gccaggtcagagaggggtc

SEQ ID NO: 12548 - RNA, 19 nt, synthetic construct
  source 1..19: mol_type = other RNA
ataaaccctgagcattgag

SEQ ID NO: 12549 - RNA, 19 nt, synthetic construct
  source 1..19: mol_type = other RNA
tcttccgcttccctggcct

SEQ ID NO: 12550 - RNA, 19 nt, synthetic construct
  source 1..19: mol_type = other RNA
ccgcaccctgctggggccg

SEQ ID NO: 12551 - RNA, 19 nt, synthetic construct
  source 1..19: mol_type = other RNA
atcacgcactctggctgcc

SEQ ID NO: 12552 - RNA, 19 nt, synthetic construct
  source 1..19: mol_type = other RNA
tgccgcggcctgagtgagg

SEQ ID NO: 12553 - RNA, 19 nt, synthetic construct
  source 1..19: mol_type = other RNA
gtcccccggggctggtgtc

SEQ ID NO: 12554 - RNA, 19 nt, synthetic construct
  source 1..19: mol_type = other RNA
gagtgggggctgcattgcc

SEQ ID NO: 12555 - RNA, 19 nt, synthetic construct
  source 1..19: mol_type = other RNA
cgacaatgccatcaatgac

SEQ ID NO: 12556 - RNA, 19 nt, synthetic construct
  source 1..19: mol_type = other RNA
cccttgttctgtgacttct

SEQ ID NO: 12557 - RNA, 19 nt, synthetic construct
  source 1..19: mol_type = other RNA
ctgggtccagctcaggccc

SEQ ID NO: 12558 - RNA, 19 nt, synthetic construct
  source 1..19: mol_type = other RNA
accccctcggccccaggta

SEQ ID NO: 12559 - RNA, 19 nt, synthetic construct
  source 1..19: mol_type = other RNA
cagggccgctggagggcac

SEQ ID NO: 12560 - RNA, 19 nt, synthetic construct
  source 1..19: mol_type = other RNA
cgggtcctctgctgcagtg

SEQ ID NO: 12561 - RNA, 19 nt, synthetic construct
  source 1..19: mol_type = other RNA
tacgagtagcccggggctg

SEQ ID NO: 12562 - RNA, 19 nt, synthetic construct
  source 1..19: mol_type = other RNA
cagcccttccagggacgac

SEQ ID NO: 12563 - RNA, 19 nt, synthetic construct
  source 1..19: mol_type = other RNA
cccacgctggccccaacaa

SEQ ID NO: 12564 - RNA, 19 nt, synthetic construct
  source 1..19: mol_type = other RNA
accacacccacagtcacca

SEQ ID NO: 12565 - RNA, 19 nt, synthetic construct
  source 1..19: mol_type = other RNA
actgcaaccgcccttccag

SEQ ID NO: 12566 - RNA, 19 nt, synthetic construct
  source 1..19: mol_type = other RNA
accgcccttccagcactga

SEQ ID NO: 12567 - RNA, 19 nt, synthetic construct
  source 1..19: mol_type = other RNA
accacacccacaaccagag

SEQ ID NO: 12568 - RNA, 19 nt, synthetic construct
  source 1..19: mol_type = other RNA
actgcaaccgcccttccag

SEQ ID NO: 12569 - RNA, 19 nt, synthetic construct
  source 1..19: mol_type = other RNA
accgcccttccagcactga

SEQ ID NO: 12570 - RNA, 19 nt, synthetic construct
  source 1..19: mol_type = other RNA
accacacccacaaccagag

SEQ ID NO: 12571 - RNA, 19 nt, synthetic construct
  source 1..19: mol_type = other RNA
atccacggccatcccgtcc

SEQ ID NO: 12572 - RNA, 19 nt, synthetic construct
  source 1..19: mol_type = other RNA
ccacggccatcccgtcctc

SEQ ID NO: 12573 - RNA, 19 nt, synthetic construct
  source 1..19: mol_type = other RNA
tgacaagcacagccaccaa

SEQ ID NO: 12574 - RNA, 19 nt, synthetic construct
  source 1..19: mol_type = other RNA
atcccctccttcacccttg

SEQ ID NO: 12575 - RNA, 19 nt, synthetic construct
  source 1..19: mol_type = other RNA
actgcaaccgcccttccag

SEQ ID NO: 12576 - RNA, 19 nt, synthetic construct
  source 1..19: mol_type = other RNA
accgcccttccagcactga

SEQ ID NO: 12577 - RNA, 19 nt, synthetic construct
  source 1..19: mol_type = other RNA
accacacccacaaccagag

SEQ ID NO: 12578 - RNA, 19 nt, synthetic construct
  source 1..19: mol_type = other RNA
actgcaaccgcccttccag

SEQ ID NO: 12579 - RNA, 19 nt, synthetic construct
  source 1..19: mol_type = other RNA
accgcccttccagcactga

SEQ ID NO: 12580 - RNA, 19 nt, synthetic construct
  source 1..19: mol_type = other RNA
gcccggccaccacacccac

SEQ ID NO: 12581 - RNA, 19 nt, synthetic construct
  source 1..19: mol_type = other RNA
tgacaagcacagccaccaa

SEQ ID NO: 12582 - RNA, 19 nt, synthetic construct
  source 1..19: mol_type = other RNA
tgacaagcacagccacaaa

SEQ ID NO: 12583 - RNA, 19 nt, synthetic construct
  source 1..19: mol_type = other RNA
acaactgcagccactggat

SEQ ID NO: 12584 - RNA, 19 nt, synthetic construct
  source 1..19: mol_type = other RNA
cgagccggctgccatttct

SEQ ID NO: 12585 - RNA, 19 nt, synthetic construct
  source 1..19: mol_type = other RNA
cctgtcccacctccccacc

SEQ ID NO: 12586 - RNA, 19 nt, synthetic construct
  source 1..19: mol_type = other RNA
gcccccgcgccctcagcat

SEQ ID NO: 12587 - RNA, 19 nt, synthetic construct
  source 1..19: mol_type = other RNA
cgccctcagcatccactac

SEQ ID NO: 12588 - RNA, 19 nt, synthetic construct
  source 1..19: mol_type = other RNA
gtcctcactgtcaccatgg

SEQ ID NO: 12589 - RNA, 19 nt, synthetic construct
  source 1..19: mol_type = other RNA
caccatggtgcatgggaag

SEQ ID NO: 12590 - RNA, 19 nt, synthetic construct
  source 1..19: mol_type = other RNA
aatggccaagtcttccagg

SEQ ID NO: 12591 - RNA, 19 nt, synthetic construct
  source 1..19: mol_type = other RNA
cgggacggaaccactgccg

SEQ ID NO: 12592 - RNA, 19 nt, synthetic construct
  source 1..19: mol_type = other RNA
ccaggtctttgctgagtgc

SEQ ID NO: 12593 - RNA, 19 nt, synthetic construct
  source 1..19: mol_type = other RNA
tgtgacgcccagggtcagc

SEQ ID NO: 12594 - RNA, 19 nt, synthetic construct
  source 1..19: mol_type = other RNA
aaccgtgaccaggccccgg

SEQ ID NO: 12595 - RNA, 19 nt, synthetic construct
  source 1..19: mol_type = other RNA
ctacggggttggtgcaacc

SEQ ID NO: 12596 - RNA, 19 nt, synthetic construct
  source 1..19: mol_type = other RNA
ggcgcccttccctgccaca

SEQ ID NO: 12597 - RNA, 19 nt, synthetic construct
  source 1..19: mol_type = other RNA
tgcctcacgcccgatggcc

SEQ ID NO: 12598 - RNA, 19 nt, synthetic construct
  source 1..19: mol_type = other RNA
tgtgaggaggactcctgtc

SEQ ID NO: 12599 - RNA, 19 nt, synthetic construct
  source 1..19: mol_type = other RNA
gccaggatgtgcattgtct

SEQ ID NO: 12600 - RNA, 19 nt, synthetic construct
  source 1..19: mol_type = other RNA
gtctgatcatgaaaacctt

SEQ ID NO: 12601 - RNA, 19 nt, synthetic construct
  source 1..19: mol_type = other RNA
gagccccccggcctgtgtg

SEQ ID NO: 12602 - RNA, 19 nt, synthetic construct
  source 1..19: mol_type = other RNA
ttctcgcgctgccactcca

SEQ ID NO: 12603 - RNA, 19 nt, synthetic construct
  source 1..19: mol_type = other RNA
acaggatccgggtcctctg

SEQ ID NO: 12604 - RNA, 19 nt, synthetic construct
  source 1..19: mol_type = other RNA
cacccaggccctgttctca

SEQ ID NO: 12605 - RNA, 19 nt, synthetic construct
  source 1..19: mol_type = other RNA
cttcccacaccctagcagc

SEQ ID NO: 12606 - RNA, 19 nt, synthetic construct
  source 1..19: mol_type = other RNA
acccgcacctcgaccctgc

SEQ ID NO: 12607 - RNA, 19 nt, synthetic construct
  source 1..19: mol_type = other RNA
acccgcacctcgaccctgc

SEQ ID NO: 12608 - RNA, 19 nt, synthetic construct
  source 1..19: mol_type = other RNA
acccgcacctcgaccctgc

SEQ ID NO: 12609 - RNA, 19 nt, synthetic construct
  source 1..19: mol_type = other RNA
acccgcacctcgaccctgc

SEQ ID NO: 12610 - RNA, 19 nt, synthetic construct
  source 1..19: mol_type = other RNA
atttggacagtttttctcg

SEQ ID NO: 12611 - RNA, 19 nt, synthetic construct
  source 1..19: mol_type = other RNA
ggcatctgcgtgcaggcct

SEQ ID NO: 12612 - RNA, 19 nt, synthetic construct
  source 1..19: mol_type = other RNA
accaccccgggccacacca

SEQ ID NO: 12613 - RNA, 19 nt, synthetic construct
  source 1..19: mol_type = other RNA
accaccccgggccacacca

SEQ ID NO: 12614 - RNA, 19 nt, synthetic construct
  source 1..19: mol_type = other RNA
tccagaccgcctgcctcac

SEQ ID NO: 12615 - RNA, 19 nt, synthetic construct
  source 1..19: mol_type = other RNA
cctgggtcaacagccatgt

SEQ ID NO: 12616 - RNA, 19 nt, synthetic construct
  source 1..19: mol_type = other RNA
ggaggactcctgtcaagtc

SEQ ID NO: 12617 - RNA, 19 nt, synthetic construct
  source 1..19: mol_type = other RNA
aaactctacgacctgcatg

SEQ ID NO: 12618 - RNA, 19 nt, synthetic construct
  source 1..19: mol_type = other RNA
cccaccttcgccgcctgcc

SEQ ID NO: 12619 - RNA, 19 nt, synthetic construct
  source 1..19: mol_type = other RNA
gccctcccggtctccaccg

SEQ ID NO: 12620 - RNA, 19 nt, synthetic construct
  source 1..19: mol_type = other RNA
aaaagaccaccctatgggt

SEQ ID NO: 12621 - RNA, 19 nt, synthetic construct
  source 1..19: mol_type = other RNA
caaagagccgctgaccacg

SEQ ID NO: 12622 - RNA, 19 nt, synthetic construct
  source 1..19: mol_type = other RNA
accagaggctccacggtga

SEQ ID NO: 12623 - RNA, 19 nt, synthetic construct
  source 1..19: mol_type = other RNA
cctctagcacacagaccag

SEQ ID NO: 12624 - RNA, 19 nt, synthetic construct
  source 1..19: mol_type = other RNA
tgcaggaaccgtgagcagg

SEQ ID NO: 12625 - RNA, 19 nt, synthetic construct
  source 1..19: mol_type = other RNA
cctctagcacacagaccag

SEQ ID NO: 12626 - RNA, 19 nt, synthetic construct
  source 1..19: mol_type = other RNA
tgcaggaaccgtgagcagg

SEQ ID NO: 12627 - RNA, 19 nt, synthetic construct
  source 1..19: mol_type = other RNA
ccatggccaccatgtccac

SEQ ID NO: 12628 - RNA, 19 nt, synthetic construct
  source 1..19: mol_type = other RNA
accagaggctccacggtga

SEQ ID NO: 12629 - RNA, 19 nt, synthetic construct
  source 1..19: mol_type = other RNA
cctctagcacacagaccag

SEQ ID NO: 12630 - RNA, 19 nt, synthetic construct
  source 1..19: mol_type = other RNA
cacaccaggggcacctcca

SEQ ID NO: 12631 - RNA, 19 nt, synthetic construct
  source 1..19: mol_type = other RNA
tgcaggaaccgtgagcagg

SEQ ID NO: 12632 - RNA, 19 nt, synthetic construct
  source 1..19: mol_type = other RNA
cctctagcacacagaccag

SEQ ID NO: 12633 - RNA, 19 nt, synthetic construct
  source 1..19: mol_type = other RNA
tgcaggaaccgtgagcagg

SEQ ID NO: 12634 - RNA, 19 nt, synthetic construct
  source 1..19: mol_type = other RNA
cctccacccttgggaccac

SEQ ID NO: 12635 - RNA, 19 nt, synthetic construct
  source 1..19: mol_type = other RNA
cctctagcacacagaccag

SEQ ID NO: 12636 - RNA, 19 nt, synthetic construct
  source 1..19: mol_type = other RNA
acattgaccgcttccaggg

SEQ ID NO: 12637 - RNA, 19 nt, synthetic construct
  source 1..19: mol_type = other RNA
cagttgcaaggacatggcc

SEQ ID NO: 12638 - RNA, 19 nt, synthetic construct
  source 1..19: mol_type = other RNA
gcccaccacagccgctctg

SEQ ID NO: 12639 - RNA, 19 nt, synthetic construct
  source 1..19: mol_type = other RNA
gccaggtctttgctgagtg

SEQ ID NO: 12640 - RNA, 19 nt, synthetic construct
  source 1..19: mol_type = other RNA
gcagcacggattccagctg

SEQ ID NO: 12641 - RNA, 19 nt, synthetic construct
  source 1..19: mol_type = other RNA
agctggccacgtccggccg

SEQ ID NO: 12642 - RNA, 19 nt, synthetic construct
  source 1..19: mol_type = other RNA
acccagggccctgtggagc

SEQ ID NO: 12643 - RNA, 19 nt, synthetic construct
  source 1..19: mol_type = other RNA
cgcttccctggcctttgca

SEQ ID NO: 12644 - RNA, 19 nt, synthetic construct
  source 1..19: mol_type = other RNA
cggctggtgctgacattcc

SEQ ID NO: 12645 - RNA, 19 nt, synthetic construct
  source 1..19: mol_type = other RNA
agcccgggcacctccttca

SEQ ID NO: 12646 - RNA, 19 nt, synthetic construct
  source 1..19: mol_type = other RNA
tccggggggctatggcagt

SEQ ID NO: 12647 - RNA, 19 nt, synthetic construct
  source 1..19: mol_type = other RNA
gggctatggcagtgccagg

SEQ ID NO: 12648 - RNA, 19 nt, synthetic construct
  source 1..19: mol_type = other RNA
gcccccatggtgtacctgg

SEQ ID NO: 12649 - RNA, 19 nt, synthetic construct
  source 1..19: mol_type = other RNA
cgggtggggacccacccta

SEQ ID NO: 12650 - RNA, 19 nt, synthetic construct
  source 1..19: mol_type = other RNA
ggtaccaggtatgccctgt

SEQ ID NO: 12651 - RNA, 19 nt, synthetic construct
  source 1..19: mol_type = other RNA
gggcggcgcagcttcccga

SEQ ID NO: 12652 - RNA, 19 nt, synthetic construct
  source 1..19: mol_type = other RNA
agggccgctggagggcact

SEQ ID NO: 12653 - RNA, 19 nt, synthetic construct
  source 1..19: mol_type = other RNA
agcccggggctgaccaggg

SEQ ID NO: 12654 - RNA, 19 nt, synthetic construct
  source 1..19: mol_type = other RNA
gggctgaccagggctcccc

SEQ ID NO: 12655 - RNA, 19 nt, synthetic construct
  source 1..19: mol_type = other RNA
gggtggccacatccaccct

SEQ ID NO: 12656 - RNA, 19 nt, synthetic construct
  source 1..19: mol_type = other RNA
ggccacatccacccttcca

SEQ ID NO: 12657 - RNA, 19 nt, synthetic construct
  source 1..19: mol_type = other RNA
acggggagcttgggcacat

SEQ ID NO: 12658 - RNA, 19 nt, synthetic construct
  source 1..19: mol_type = other RNA
gaccagcacgcccaggaca

SEQ ID NO: 12659 - RNA, 19 nt, synthetic construct
  source 1..19: mol_type = other RNA
gcccaggacagagacgaca

SEQ ID NO: 12660 - RNA, 19 nt, synthetic construct
  source 1..19: mol_type = other RNA
ccacggccaccacacccac

SEQ ID NO: 12661 - RNA, 19 nt, synthetic construct
  source 1..19: mol_type = other RNA
cacggccaccacacccaca

SEQ ID NO: 12662 - RNA, 19 nt, synthetic construct
  source 1..19: mol_type = other RNA
gctccaaagccactccctc

SEQ ID NO: 12663 - RNA, 19 nt, synthetic construct
  source 1..19: mol_type = other RNA
cccttccagcactgagaag

SEQ ID NO: 12664 - RNA, 19 nt, synthetic construct
  source 1..19: mol_type = other RNA
tccagagactgcccacacc

SEQ ID NO: 12665 - RNA, 19 nt, synthetic construct
  source 1..19: mol_type = other RNA
ctggggccaccggctctgt

SEQ ID NO: 12666 - RNA, 19 nt, synthetic construct
  source 1..19: mol_type = other RNA
tggggccaccggctctgtg

SEQ ID NO: 12667 - RNA, 19 nt, synthetic construct
  source 1..19: mol_type = other RNA
atcccggggaccacccaca

SEQ ID NO: 12668 - RNA, 19 nt, synthetic construct
  source 1..19: mol_type = other RNA
actgtggccactggttcta

SEQ ID NO: 12669 - RNA, 19 nt, synthetic construct
  source 1..19: mol_type = other RNA
ccaacccctcctcaactcc

SEQ ID NO: 12670 - RNA, 19 nt, synthetic construct
  source 1..19: mol_type = other RNA
cctcctcaactcctgggac

SEQ ID NO: 12671 - RNA, 19 nt, synthetic construct
  source 1..19: mol_type = other RNA
aactcccatccccccagtg

SEQ ID NO: 12672 - RNA, 19 nt, synthetic construct
  source 1..19: mol_type = other RNA
ccccagcagtccccacacg

SEQ ID NO: 12673 - RNA, 19 nt, synthetic construct
  source 1..19: mol_type = other RNA
ccagcactcgactccagcc

SEQ ID NO: 12674 - RNA, 19 nt, synthetic construct
  source 1..19: mol_type = other RNA
accacggtggtgaccatgg

SEQ ID NO: 12675 - RNA, 19 nt, synthetic construct
  source 1..19: mol_type = other RNA
cccagtgtgcctggtcaga

SEQ ID NO: 12676 - RNA, 19 nt, synthetic construct
  source 1..19: mol_type = other RNA
ctttggcctggtctgcagg

SEQ ID NO: 12677 - RNA, 19 nt, synthetic construct
  source 1..19: mol_type = other RNA
tcacagagccgagcactac

SEQ ID NO: 12678 - RNA, 19 nt, synthetic construct
  source 1..19: mol_type = other RNA
ccttctccagtccagggac

SEQ ID NO: 12679 - RNA, 19 nt, synthetic construct
  source 1..19: mol_type = other RNA
cttctccagtccagggact

SEQ ID NO: 12680 - RNA, 19 nt, synthetic construct
  source 1..19: mol_type = other RNA
cccttccagcactgagaag

SEQ ID NO: 12681 - RNA, 19 nt, synthetic construct
  source 1..19: mol_type = other RNA
cggggccaccggctctgtg

SEQ ID NO: 12682 - RNA, 19 nt, synthetic construct
  source 1..19: mol_type = other RNA
agcccagggacggcacgca

SEQ ID NO: 12683 - RNA, 19 nt, synthetic construct
  source 1..19: mol_type = other RNA
atcccggggaccacccaca

SEQ ID NO: 12684 - RNA, 19 nt, synthetic construct
  source 1..19: mol_type = other RNA
actgtggccactggttcta

SEQ ID NO: 12685 - RNA, 19 nt, synthetic construct
  source 1..19: mol_type = other RNA
actccagggacaacaccta

SEQ ID NO: 12686 - RNA, 19 nt, synthetic construct
  source 1..19: mol_type = other RNA
cagccaccagcagcacagt

SEQ ID NO: 12687 - RNA, 19 nt, synthetic construct
  source 1..19: mol_type = other RNA
ccaccagcagcacagtgac

SEQ ID NO: 12688 - RNA, 19 nt, synthetic construct
  source 1..19: mol_type = other RNA
ccccagcagtccccacacg

SEQ ID NO: 12689 - RNA, 19 nt, synthetic construct
  source 1..19: mol_type = other RNA
ctcaggcaccttgggcacc

SEQ ID NO: 12690 - RNA, 19 nt, synthetic construct
  source 1..19: mol_type = other RNA
ccttccacggggacttccc

SEQ ID NO: 12691 - RNA, 19 nt, synthetic construct
  source 1..19: mol_type = other RNA
ccagcactcgactccagcc

SEQ ID NO: 12692 - RNA, 19 nt, synthetic construct
  source 1..19: mol_type = other RNA
cctagcagcaggaccaccg

SEQ ID NO: 12693 - RNA, 19 nt, synthetic construct
  source 1..19: mol_type = other RNA
accacggtggtgaccatgg

SEQ ID NO: 12694 - RNA, 19 nt, synthetic construct
  source 1..19: mol_type = other RNA
cccagtgtgcctggtcaga

SEQ ID NO: 12695 - RNA, 19 nt, synthetic construct
  source 1..19: mol_type = other RNA
ctttggcctggtctgcagg

SEQ ID NO: 12696 - RNA, 19 nt, synthetic construct
  source 1..19: mol_type = other RNA
gcagaccacagcagccact

SEQ ID NO: 12697 - RNA, 19 nt, synthetic construct
  source 1..19: mol_type = other RNA
gcacggccaccacacccac

SEQ ID NO: 12698 - RNA, 19 nt, synthetic construct
  source 1..19: mol_type = other RNA
cacggccaccacacccaca

SEQ ID NO: 12699 - RNA, 19 nt, synthetic construct
  source 1..19: mol_type = other RNA
gccaccaaatccacagcta

SEQ ID NO: 12700 - RNA, 19 nt, synthetic construct
  source 1..19: mol_type = other RNA
ccaccaaatccacagctac

SEQ ID NO: 12701 - RNA, 19 nt, synthetic construct
  source 1..19: mol_type = other RNA
ccccctcctccactccggg

SEQ ID NO: 12702 - RNA, 19 nt, synthetic construct
  source 1..19: mol_type = other RNA
gcacggccaccacacccac

SEQ ID NO: 12703 - RNA, 19 nt, synthetic construct
  source 1..19: mol_type = other RNA
cacggccaccacacccaca

SEQ ID NO: 12704 - RNA, 19 nt, synthetic construct
  source 1..19: mol_type = other RNA
cagtcatcagctccagagc

SEQ ID NO: 12705 - RNA, 19 nt, synthetic construct
  source 1..19: mol_type = other RNA
gtcatcagctccagagcca

SEQ ID NO: 12706 - RNA, 19 nt, synthetic construct
  source 1..19: mol_type = other RNA
tcatcagctccagagccac

SEQ ID NO: 12707 - RNA, 19 nt, synthetic construct
  source 1..19: mol_type = other RNA
cccttccagcactgagaag

SEQ ID NO: 12708 - RNA, 19 nt, synthetic construct
  source 1..19: mol_type = other RNA
agccacaccctcctctact

SEQ ID NO: 12709 - RNA, 19 nt, synthetic construct
  source 1..19: mol_type = other RNA
ccagggccaccggctctgt

SEQ ID NO: 12710 - RNA, 19 nt, synthetic construct
  source 1..19: mol_type = other RNA
agtgccgactaccacaacc

SEQ ID NO: 12711 - RNA, 19 nt, synthetic construct
  source 1..19: mol_type = other RNA
atcccggggaccacccaca

SEQ ID NO: 12712 - RNA, 19 nt, synthetic construct
  source 1..19: mol_type = other RNA
actgtggccactggttcta

SEQ ID NO: 12713 - RNA, 19 nt, synthetic construct
  source 1..19: mol_type = other RNA
aactcccatccccccagtg

SEQ ID NO: 12714 - RNA, 19 nt, synthetic construct
  source 1..19: mol_type = other RNA
cagccaccagcagcacagt

SEQ ID NO: 12715 - RNA, 19 nt, synthetic construct
  source 1..19: mol_type = other RNA
ccaccagcagcacagtgac

SEQ ID NO: 12716 - RNA, 19 nt, synthetic construct
  source 1..19: mol_type = other RNA
ccccagcagtccccacacg

SEQ ID NO: 12717 - RNA, 19 nt, synthetic construct
  source 1..19: mol_type = other RNA
ccccagcagcaaccaccag

SEQ ID NO: 12718 - RNA, 19 nt, synthetic construct
  source 1..19: mol_type = other RNA
ccagcactcgactccagcc

SEQ ID NO: 12719 - RNA, 19 nt, synthetic construct
  source 1..19: mol_type = other RNA
cctagcagcaggaccaccg

SEQ ID NO: 12720 - RNA, 19 nt, synthetic construct
  source 1..19: mol_type = other RNA
cccagtgtgcctggtcaga

SEQ ID NO: 12721 - RNA, 19 nt, synthetic construct
  source 1..19: mol_type = other RNA
ctttggcctggtctgcagg

SEQ ID NO: 12722 - RNA, 19 nt, synthetic construct
  source 1..19: mol_type = other RNA
tcacagagccgagcactac

SEQ ID NO: 12723 - RNA, 19 nt, synthetic construct
  source 1..19: mol_type = other RNA
ccttctccagtccagggac

SEQ ID NO: 12724 - RNA, 19 nt, synthetic construct
  source 1..19: mol_type = other RNA
cttctccagtccagggact

SEQ ID NO: 12725 - RNA, 19 nt, synthetic construct
  source 1..19: mol_type = other RNA
cccttccagcactgagaag

SEQ ID NO: 12726 - RNA, 19 nt, synthetic construct
  source 1..19: mol_type = other RNA
tccagagactgcccacacc

SEQ ID NO: 12727 - RNA, 19 nt, synthetic construct
  source 1..19: mol_type = other RNA
ccagggccaccggctctgt

SEQ ID NO: 12728 - RNA, 19 nt, synthetic construct
  source 1..19: mol_type = other RNA
agtgccgactaccacaacc

SEQ ID NO: 12729 - RNA, 19 nt, synthetic construct
  source 1..19: mol_type = other RNA
agcccagggacggcacgca

SEQ ID NO: 12730 - RNA, 19 nt, synthetic construct
  source 1..19: mol_type = other RNA
gtcccggggaccacccaca

SEQ ID NO: 12731 - RNA, 19 nt, synthetic construct
  source 1..19: mol_type = other RNA
actgtggccactggttcta

SEQ ID NO: 12732 - RNA, 19 nt, synthetic construct
  source 1..19: mol_type = other RNA
atcactgatcaccacggcc

SEQ ID NO: 12733 - RNA, 19 nt, synthetic construct
  source 1..19: mol_type = other RNA
actccagggacaacaccta

SEQ ID NO: 12734 - RNA, 19 nt, synthetic construct
  source 1..19: mol_type = other RNA
cagccaccagcagcacagt

SEQ ID NO: 12735 - RNA, 19 nt, synthetic construct
  source 1..19: mol_type = other RNA
ccaccagcagcacagtgac

SEQ ID NO: 12736 - RNA, 19 nt, synthetic construct
  source 1..19: mol_type = other RNA
ccccagcagtccccacacg

SEQ ID NO: 12737 - RNA, 19 nt, synthetic construct
  source 1..19: mol_type = other RNA
ctcaggcaccttgggcacc

SEQ ID NO: 12738 - RNA, 19 nt, synthetic construct
  source 1..19: mol_type = other RNA
ccttccacggggacttccc

SEQ ID NO: 12739 - RNA, 19 nt, synthetic construct
  source 1..19: mol_type = other RNA
ccagcactcgactccagcc

SEQ ID NO: 12740 - RNA, 19 nt, synthetic construct
  source 1..19: mol_type = other RNA
cctagcagcaggaccaccg

SEQ ID NO: 12741 - RNA, 19 nt, synthetic construct
  source 1..19: mol_type = other RNA
cccagtgtgcctggtcaga

SEQ ID NO: 12742 - RNA, 19 nt, synthetic construct
  source 1..19: mol_type = other RNA
agcctggtgtccccctggg

SEQ ID NO: 12743 - RNA, 19 nt, synthetic construct
  source 1..19: mol_type = other RNA
cctgggggagttgggccag

SEQ ID NO: 12744 - RNA, 19 nt, synthetic construct
  source 1..19: mol_type = other RNA
ctttggcctggtctgcagg

SEQ ID NO: 12745 - RNA, 19 nt, synthetic construct
  source 1..19: mol_type = other RNA
tgctgaccagcccggccac

SEQ ID NO: 12746 - RNA, 19 nt, synthetic construct
  source 1..19: mol_type = other RNA
gaccagcccggccaccaca

SEQ ID NO: 12747 - RNA, 19 nt, synthetic construct
  source 1..19: mol_type = other RNA
cccggccaccacacccaca

SEQ ID NO: 12748 - RNA, 19 nt, synthetic construct
  source 1..19: mol_type = other RNA
gccaccaaatccacagcta

SEQ ID NO: 12749 - RNA, 19 nt, synthetic construct
  source 1..19: mol_type = other RNA
ccaccaaatccacagctac

SEQ ID NO: 12750 - RNA, 19 nt, synthetic construct
  source 1..19: mol_type = other RNA
ccccctcctccactccggg

SEQ ID NO: 12751 - RNA, 19 nt, synthetic construct
  source 1..19: mol_type = other RNA
tcacagagccgagcactac

SEQ ID NO: 12752 - RNA, 19 nt, synthetic construct
  source 1..19: mol_type = other RNA
gctccaaagccactccctc

SEQ ID NO: 12753 - RNA, 19 nt, synthetic construct
  source 1..19: mol_type = other RNA
actgcccttccagcactga

SEQ ID NO: 12754 - RNA, 19 nt, synthetic construct
  source 1..19: mol_type = other RNA
cccttccagcactgagaag

SEQ ID NO: 12755 - RNA, 19 nt, synthetic construct
  source 1..19: mol_type = other RNA
cggggccaccggctctgtg

SEQ ID NO: 12756 - RNA, 19 nt, synthetic construct
  source 1..19: mol_type = other RNA
agtgccgactaccacaacc

SEQ ID NO: 12757 - RNA, 19 nt, synthetic construct
  source 1..19: mol_type = other RNA
atcccggggaccacccaca

SEQ ID NO: 12758 - RNA, 19 nt, synthetic construct
  source 1..19: mol_type = other RNA
actgtggccactggttcta

SEQ ID NO: 12759 - RNA, 19 nt, synthetic construct
  source 1..19: mol_type = other RNA
acaagcacagccacaaaat

SEQ ID NO: 12760 - RNA, 19 nt, synthetic construct
  source 1..19: mol_type = other RNA
cccctcctccaccctgtgg

SEQ ID NO: 12761 - RNA, 19 nt, synthetic construct
  source 1..19: mol_type = other RNA
agccactgcctccacggtt

SEQ ID NO: 12762 - RNA, 19 nt, synthetic construct
  source 1..19: mol_type = other RNA
tgctggacccaaagcctgt

SEQ ID NO: 12763 - RNA, 19 nt, synthetic construct
  source 1..19: mol_type = other RNA
tactgcacggcctctgcca

SEQ ID NO: 12764 - RNA, 19 nt, synthetic construct
  source 1..19: mol_type = other RNA
actgcacggcctctgccac

SEQ ID NO: 12765 - RNA, 19 nt, synthetic construct
  source 1..19: mol_type = other RNA
tgcccccgcgccctcagca

SEQ ID NO: 12766 - RNA, 19 nt, synthetic construct
  source 1..19: mol_type = other RNA
ccctcagcatccactacaa

SEQ ID NO: 12767 - RNA, 19 nt, synthetic construct
  source 1..19: mol_type = other RNA
gtggacattcctgccctgg

SEQ ID NO: 12768 - RNA, 19 nt, synthetic construct
  source 1..19: mol_type = other RNA
ccttcaatggccaagtctt

SEQ ID NO: 12769 - RNA, 19 nt, synthetic construct
  source 1..19: mol_type = other RNA
atggccaagtcttccaggc

SEQ ID NO: 12770 - RNA, 19 nt, synthetic construct
  source 1..19: mol_type = other RNA
cggtgtctagcacacccac

SEQ ID NO: 12771 - RNA, 19 nt, synthetic construct
  source 1..19: mol_type = other RNA
ccccagagcctgcctgtgt

SEQ ID NO: 12772 - RNA, 19 nt, synthetic construct
  source 1..19: mol_type = other RNA
ccaacggtgcaatgtcagg

SEQ ID NO: 12773 - RNA, 19 nt, synthetic construct
  source 1..19: mol_type = other RNA
aggatgcctgcaacaatac

SEQ ID NO: 12774 - RNA, 19 nt, synthetic construct
  source 1..19: mol_type = other RNA
aggctgagggtggagtcca

SEQ ID NO: 12775 - RNA, 19 nt, synthetic construct
  source 1..19: mol_type = other RNA
ggctgagggtggagtccat

SEQ ID NO: 12776 - RNA, 19 nt, synthetic construct
  source 1..19: mol_type = other RNA
cccatggctcccccacaca

SEQ ID NO: 12777 - RNA, 19 nt, synthetic construct
  source 1..19: mol_type = other RNA
caggaggccactgctgtct

SEQ ID NO: 12778 - RNA, 19 nt, synthetic construct
  source 1..19: mol_type = other RNA
cctggagccaggatgtgca

SEQ ID NO: 12779 - RNA, 19 nt, synthetic construct
  source 1..19: mol_type = other RNA
tctgatcatgaaaaccttg

SEQ ID NO: 12780 - RNA, 19 nt, synthetic construct
  source 1..19: mol_type = other RNA
gcggagccccccggcctgt

SEQ ID NO: 12781 - RNA, 19 nt, synthetic construct
  source 1..19: mol_type = other RNA
ctccgtgctcctgctgccc

SEQ ID NO: 12782 - RNA, 19 nt, synthetic construct
  source 1..19: mol_type = other RNA
ggccccagaagggtgaggg

SEQ ID NO: 12783 - RNA, 19 nt, synthetic construct
  source 1..19: mol_type = other RNA
ggccagcaggacccctttc

SEQ ID NO: 12784 - RNA, 19 nt, synthetic construct
  source 1..19: mol_type = other RNA
gggagggcgccactcagga

SEQ ID NO: 12785 - RNA, 19 nt, synthetic construct
  source 1..19: mol_type = other RNA
cgggcctatgtgtccctgc

SEQ ID NO: 12786 - RNA, 19 nt, synthetic construct
  source 1..19: mol_type = other RNA
ccaggaagctgcgacaggc

SEQ ID NO: 12787 - RNA, 19 nt, synthetic construct
  source 1..19: mol_type = other RNA
cagttttgcaaataaaccc

SEQ ID NO: 12788 - RNA, 19 nt, synthetic construct
  source 1..19: mol_type = other RNA
ctacggccacgccctcctc

SEQ ID NO: 12789 - RNA, 19 nt, synthetic construct
  source 1..19: mol_type = other RNA
ctacggccacgccctcctc

SEQ ID NO: 12790 - RNA, 19 nt, synthetic construct
  source 1..19: mol_type = other RNA
gtgaaaccggccccagaag

SEQ ID NO: 12791 - RNA, 19 nt, synthetic construct
  source 1..19: mol_type = other RNA
tcagcgaccactgcagggg

SEQ ID NO: 12792 - RNA, 19 nt, synthetic construct
  source 1..19: mol_type = other RNA
tggagccgagctgggagaa

SEQ ID NO: 12793 - RNA, 19 nt, synthetic construct
  source 1..19: mol_type = other RNA
cttccccaactggaccctg

SEQ ID NO: 12794 - RNA, 19 nt, synthetic construct
  source 1..19: mol_type = other RNA
ccaccctgagacccactgg

SEQ ID NO: 12795 - RNA, 19 nt, synthetic construct
  source 1..19: mol_type = other RNA
cacccctcctccactccgg

SEQ ID NO: 12796 - RNA, 19 nt, synthetic construct
  source 1..19: mol_type = other RNA
cacccctcctccactccgg

SEQ ID NO: 12797 - RNA, 19 nt, synthetic construct
  source 1..19: mol_type = other RNA
agcccctgccctgtgacgc

SEQ ID NO: 12798 - RNA, 19 nt, synthetic construct
  source 1..19: mol_type = other RNA
gggcatttggacagttttt

SEQ ID NO: 12799 - RNA, 19 nt, synthetic construct
  source 1..19: mol_type = other RNA
cccgtgccagcccccagga

SEQ ID NO: 12800 - RNA, 19 nt, synthetic construct
  source 1..19: mol_type = other RNA
acagagtcccccgctctgt

SEQ ID NO: 12801 - RNA, 19 nt, synthetic construct
  source 1..19: mol_type = other RNA
tccatgcctgctgcagggt

SEQ ID NO: 12802 - RNA, 19 nt, synthetic construct
  source 1..19: mol_type = other RNA
gcaggaccaccgagtcacc

SEQ ID NO: 12803 - RNA, 19 nt, synthetic construct
  source 1..19: mol_type = other RNA
gcaggaccaccgagtcacc

SEQ ID NO: 12804 - RNA, 19 nt, synthetic construct
  source 1..19: mol_type = other RNA
gcaggaccaccgagtcacc

SEQ ID NO: 12805 - RNA, 19 nt, synthetic construct
  source 1..19: mol_type = other RNA
cgccttgaggtgccctgcc

SEQ ID NO: 12806 - RNA, 19 nt, synthetic construct
  source 1..19: mol_type = other RNA
tgtaactgcacacccagtg

SEQ ID NO: 12807 - RNA, 19 nt, synthetic construct
  source 1..19: mol_type = other RNA
ctacatcaaggtcagcatc

SEQ ID NO: 12808 - RNA, 19 nt, synthetic construct
  source 1..19: mol_type = other RNA
ccccacccgtgccagcccc

SEQ ID NO: 12809 - RNA, 19 nt, synthetic construct
  source 1..19: mol_type = other RNA
ctgccccttgttctgtgac

SEQ ID NO: 12810 - RNA, 19 nt, synthetic construct
  source 1..19: mol_type = other RNA
cctagcagcagaaccaccg

SEQ ID NO: 12811 - RNA, 19 nt, synthetic construct
  source 1..19: mol_type = other RNA
ccgccagtgtcctccgccc

SEQ ID NO: 12812 - RNA, 19 nt, synthetic construct
  source 1..19: mol_type = other RNA
aggggatggcggagggctg

SEQ ID NO: 12813 - RNA, 19 nt, synthetic construct
  source 1..19: mol_type = other RNA
tcctcaactcctgggacaa

SEQ ID NO: 12814 - RNA, 19 nt, synthetic construct
  source 1..19: mol_type = other RNA
ggatccacggccaccccgt

SEQ ID NO: 12815 - RNA, 19 nt, synthetic construct
  source 1..19: mol_type = other RNA
ggatccacggccaccccgt

SEQ ID NO: 12816 - RNA, 19 nt, synthetic construct
  source 1..19: mol_type = other RNA
ggatccacggccaccccgt

SEQ ID NO: 12817 - RNA, 19 nt, synthetic construct
  source 1..19: mol_type = other RNA
ggatccacggccaccccgt

SEQ ID NO: 12818 - RNA, 19 nt, synthetic construct
  source 1..19: mol_type = other RNA
ggcctgtgtgtggcacccc

SEQ ID NO: 12819 - RNA, 19 nt, synthetic construct
  source 1..19: mol_type = other RNA
gtcttccgcttccctggcc

SEQ ID NO: 12820 - RNA, 19 nt, synthetic construct
  source 1..19: mol_type = other RNA
ggcacagccagcaccgctt

SEQ ID NO: 12821 - RNA, 19 nt, synthetic construct
  source 1..19: mol_type = other RNA
cgacaatgagccccttgac

SEQ ID NO: 12822 - RNA, 19 nt, synthetic construct
  source 1..19: mol_type = other RNA
agcacacagaccagtggta

SEQ ID NO: 12823 - RNA, 19 nt, synthetic construct
  source 1..19: mol_type = other RNA
agcacacagaccagtggta

SEQ ID NO: 12824 - RNA, 19 nt, synthetic construct
  source 1..19: mol_type = other RNA
gggccaccagttccatgtc

SEQ ID NO: 12825 - RNA, 19 nt, synthetic construct
  source 1..19: mol_type = other RNA
ccccacggccaccccgtcc

SEQ ID NO: 12826 - RNA, 19 nt, synthetic construct
  source 1..19: mol_type = other RNA
agcacacagaccagtggta

SEQ ID NO: 12827 - RNA, 19 nt, synthetic construct
  source 1..19: mol_type = other RNA
agcacacagaccagtggta

SEQ ID NO: 12828 - RNA, 19 nt, synthetic construct
  source 1..19: mol_type = other RNA
ccccacggccaccccgtcc

SEQ ID NO: 12829 - RNA, 19 nt, synthetic construct
  source 1..19: mol_type = other RNA
agcacacagaccagtggta

SEQ ID NO: 12830 - RNA, 19 nt, synthetic construct
  source 1..19: mol_type = other RNA
gcagccaccagctccaaag

SEQ ID NO: 12831 - RNA, 19 nt, synthetic construct
  source 1..19: mol_type = other RNA
cggatcctcactgagctga

SEQ ID NO: 12832 - RNA, 19 nt, synthetic construct
  source 1..19: mol_type = other RNA
ccgcacccctgcagtgctc

SEQ ID NO: 12833 - RNA, 19 nt, synthetic construct
  source 1..19: mol_type = other RNA
gaccaccaccatgcgtgtg

SEQ ID NO: 12834 - RNA, 19 nt, synthetic construct
  source 1..19: mol_type = other RNA
gcttctgccctgaggacca

SEQ ID NO: 12835 - RNA, 19 nt, synthetic construct
  source 1..19: mol_type = other RNA
gcacctacagcccgggcac

SEQ ID NO: 12836 - RNA, 19 nt, synthetic construct
  source 1..19: mol_type = other RNA
gcgcctgtgtgcccgccca

SEQ ID NO: 12837 - RNA, 19 nt, synthetic construct
  source 1..19: mol_type = other RNA
caggtggggcagaaggtgc

SEQ ID NO: 12838 - RNA, 19 nt, synthetic construct
  source 1..19: mol_type = other RNA
cctcctccacccaggcaac

SEQ ID NO: 12839 - RNA, 19 nt, synthetic construct
  source 1..19: mol_type = other RNA
cctcctccacccaggcaac

SEQ ID NO: 12840 - RNA, 19 nt, synthetic construct
  source 1..19: mol_type = other RNA
caccacacccgtggccacc

SEQ ID NO: 12841 - RNA, 19 nt, synthetic construct
  source 1..19: mol_type = other RNA
cctcctccacccaggcaac

SEQ ID NO: 12842 - RNA, 19 nt, synthetic construct
  source 1..19: mol_type = other RNA
tgccaggaagctgcgacag

SEQ ID NO: 12843 - RNA, 19 nt, synthetic construct
  source 1..19: mol_type = other RNA
aggtcagcatccggctggt

SEQ ID NO: 12844 - RNA, 19 nt, synthetic construct
  source 1..19: mol_type = other RNA
cagcagtccccaccctctc

SEQ ID NO: 12845 - RNA, 19 nt, synthetic construct
  source 1..19: mol_type = other RNA
tcacggccaccggctccac

SEQ ID NO: 12846 - RNA, 19 nt, synthetic construct
  source 1..19: mol_type = other RNA
tcacggccaccggctccac

SEQ ID NO: 12847 - RNA, 19 nt, synthetic construct
  source 1..19: mol_type = other RNA
tcacggccaccggctccac

SEQ ID NO: 12848 - RNA, 19 nt, synthetic construct
  source 1..19: mol_type = other RNA
tcacggccaccggctccac

SEQ ID NO: 12849 - RNA, 19 nt, synthetic construct
  source 1..19: mol_type = other RNA
ccacagccaccatgacaag

SEQ ID NO: 12850 - RNA, 19 nt, synthetic construct
  source 1..19: mol_type = other RNA
gcgcccatggctcccccac

SEQ ID NO: 12851 - RNA, 19 nt, synthetic construct
  source 1..19: mol_type = other RNA
aacggccaggtcagagagg

SEQ ID NO: 12852 - RNA, 19 nt, synthetic construct
  source 1..19: mol_type = other RNA
cggccctcagcggggtggt

SEQ ID NO: 12853 - RNA, 19 nt, synthetic construct
  source 1..19: mol_type = other RNA
gtacctggactgcagcaac

SEQ ID NO: 12854 - RNA, 19 nt, synthetic construct
  source 1..19: mol_type = other RNA
gctatggcagtgccaggac

SEQ ID NO: 12855 - RNA, 19 nt, synthetic construct
  source 1..19: mol_type = other RNA
gcccctcacagccacccac

SEQ ID NO: 12856 - RNA, 19 nt, synthetic construct
  source 1..19: mol_type = other RNA
tcaccaccgcctgggtccc

SEQ ID NO: 12857 - RNA, 19 nt, synthetic construct
  source 1..19: mol_type = other RNA
ccccttctccagggacgac

SEQ ID NO: 12858 - RNA, 19 nt, synthetic construct
  source 1..19: mol_type = other RNA
ccccttctccagggacgac

SEQ ID NO: 12859 - RNA, 19 nt, synthetic construct
  source 1..19: mol_type = other RNA
ccccttctccagggacgac

SEQ ID NO: 12860 - RNA, 19 nt, synthetic construct
  source 1..19: mol_type = other RNA
ctgggggagttgggccagg

SEQ ID NO: 12861 - RNA, 19 nt, synthetic construct
  source 1..19: mol_type = other RNA
ccactctgggaacagctca

SEQ ID NO: 12862 - RNA, 19 nt, synthetic construct
  source 1..19: mol_type = other RNA
cctccccaccgccagtgtc

SEQ ID NO: 12863 - RNA, 19 nt, synthetic construct
  source 1..19: mol_type = other RNA
gcctctacctggacaacca

SEQ ID NO: 12864 - RNA, 19 nt, synthetic construct
  source 1..19: mol_type = other RNA
cctctacctggacaaccac

SEQ ID NO: 12865 - RNA, 19 nt, synthetic construct
  source 1..19: mol_type = other RNA
agctctgccgcgcccgggg

SEQ ID NO: 12866 - RNA, 19 nt, synthetic construct
  source 1..19: mol_type = other RNA
gtttccttcgtgcctgtgg

SEQ ID NO: 12867 - RNA, 19 nt, synthetic construct
  source 1..19: mol_type = other RNA
tacacccatcccctcttcc

SEQ ID NO: 12868 - RNA, 19 nt, synthetic construct
  source 1..19: mol_type = other RNA
ccaccacacccacggccac

SEQ ID NO: 12869 - RNA, 19 nt, synthetic construct
  source 1..19: mol_type = other RNA
ccagcaacacagtgactcc

SEQ ID NO: 12870 - RNA, 19 nt, synthetic construct
  source 1..19: mol_type = other RNA
ccaccacacccacggccac

SEQ ID NO: 12871 - RNA, 19 nt, synthetic construct
  source 1..19: mol_type = other RNA
cacccacagtcatcagctc

SEQ ID NO: 12872 - RNA, 19 nt, synthetic construct
  source 1..19: mol_type = other RNA
ccaccacacccacggccac

SEQ ID NO: 12873 - RNA, 19 nt, synthetic construct
  source 1..19: mol_type = other RNA
ccaccacacccacggccac

SEQ ID NO: 12874 - RNA, 19 nt, synthetic construct
  source 1..19: mol_type = other RNA
ccaccacacccacggccac

SEQ ID NO: 12875 - RNA, 19 nt, synthetic construct
  source 1..19: mol_type = other RNA
cacccacaaccaccacacc

SEQ ID NO: 12876 - RNA, 19 nt, synthetic construct
  source 1..19: mol_type = other RNA
acaacacccatcaccccag

SEQ ID NO: 12877 - RNA, 19 nt, synthetic construct
  source 1..19: mol_type = other RNA
ctaggaaccagagcccaca

SEQ ID NO: 12878 - RNA, 19 nt, synthetic construct
  source 1..19: mol_type = other RNA
catcctgcacacctacacc

SEQ ID NO: 12879 - RNA, 19 nt, synthetic construct
  source 1..19: mol_type = other RNA
ggatccacggccaccccga

SEQ ID NO: 12880 - RNA, 19 nt, synthetic construct
  source 1..19: mol_type = other RNA
caaagccactccctcctcc

SEQ ID NO: 12881 - RNA, 19 nt, synthetic construct
  source 1..19: mol_type = other RNA
caaagccactccctcctcc

SEQ ID NO: 12882 - RNA, 19 nt, synthetic construct
  source 1..19: mol_type = other RNA
aggaccagatcctcttcaa

SEQ ID NO: 12883 - RNA, 19 nt, synthetic construct
  source 1..19: mol_type = other RNA
ccaggactactgtggggac

SEQ ID NO: 12884 - RNA, 19 nt, synthetic construct
  source 1..19: mol_type = other RNA
ggacttcaacggcctcccg

SEQ ID NO: 12885 - RNA, 19 nt, synthetic construct
  source 1..19: mol_type = other RNA
tgccccttgttctgtgact

SEQ ID NO: 12886 - RNA, 19 nt, synthetic construct
  source 1..19: mol_type = other RNA
gccaccacaactggggcca

SEQ ID NO: 12887 - RNA, 19 nt, synthetic construct
  source 1..19: mol_type = other RNA
caccccagggaccacctgg

SEQ ID NO: 12888 - RNA, 19 nt, synthetic construct
  source 1..19: mol_type = other RNA
ccagttccatgtccacccc

SEQ ID NO: 12889 - RNA, 19 nt, synthetic construct
  source 1..19: mol_type = other RNA
caccccagggaccacctgg

SEQ ID NO: 12890 - RNA, 19 nt, synthetic construct
  source 1..19: mol_type = other RNA
ccctcctctactccagaga

SEQ ID NO: 12891 - RNA, 19 nt, synthetic construct
  source 1..19: mol_type = other RNA
caccccagggaccacctgg

SEQ ID NO: 12892 - RNA, 19 nt, synthetic construct
  source 1..19: mol_type = other RNA
caccccagggaccacctgg

SEQ ID NO: 12893 - RNA, 19 nt, synthetic construct
  source 1..19: mol_type = other RNA
caccccagggaccacctgg

SEQ ID NO: 12894 - RNA, 19 nt, synthetic construct
  source 1..19: mol_type = other RNA
acctcctctactccagaga

SEQ ID NO: 12895 - RNA, 19 nt, synthetic construct
  source 1..19: mol_type = other RNA
caccccagggaccacctgg

SEQ ID NO: 12896 - RNA, 19 nt, synthetic construct
  source 1..19: mol_type = other RNA
atctcagcctctacctgga

SEQ ID NO: 12897 - RNA, 19 nt, synthetic construct
  source 1..19: mol_type = other RNA
tctcagcctctacctggac

SEQ ID NO: 12898 - RNA, 19 nt, synthetic construct
  source 1..19: mol_type = other RNA
ctgcccccagagcctgcct

SEQ ID NO: 12899 - RNA, 19 nt, synthetic construct
  source 1..19: mol_type = other RNA
tccccccacccgtgccagc

SEQ ID NO: 12900 - RNA, 19 nt, synthetic construct
  source 1..19: mol_type = other RNA
cactggcctcctggtggag

SEQ ID NO: 12901 - RNA, 19 nt, synthetic construct
  source 1..19: mol_type = other RNA
ggggacttcaacggcctcc

SEQ ID NO: 12902 - RNA, 19 nt, synthetic construct
  source 1..19: mol_type = other RNA
gacgccctggcacccaagg

SEQ ID NO: 12903 - RNA, 19 nt, synthetic construct
  source 1..19: mol_type = other RNA
cgccctggcacccaaggac

SEQ ID NO: 12904 - RNA, 19 nt, synthetic construct
  source 1..19: mol_type = other RNA
ggcaccgcccagagcccgg

SEQ ID NO: 12905 - RNA, 19 nt, synthetic construct
  source 1..19: mol_type = other RNA
cgtttgaaaacctgaggca

SEQ ID NO: 12906 - RNA, 19 nt, synthetic construct
  source 1..19: mol_type = other RNA
ccacatccacccttccaac

SEQ ID NO: 12907 - RNA, 19 nt, synthetic construct
  source 1..19: mol_type = other RNA
acgctcagcccttccaggg

SEQ ID NO: 12908 - RNA, 19 nt, synthetic construct
  source 1..19: mol_type = other RNA
cctccagcccagggacggc

SEQ ID NO: 12909 - RNA, 19 nt, synthetic construct
  source 1..19: mol_type = other RNA
gaccacccacacaccccca

SEQ ID NO: 12910 - RNA, 19 nt, synthetic construct
  source 1..19: mol_type = other RNA
atcttgggcaccacccaca

SEQ ID NO: 12911 - RNA, 19 nt, synthetic construct
  source 1..19: mol_type = other RNA
agccttccacggtgacttc

SEQ ID NO: 12912 - RNA, 19 nt, synthetic construct
  source 1..19: mol_type = other RNA
gccttccacggtgacttcc

SEQ ID NO: 12913 - RNA, 19 nt, synthetic construct
  source 1..19: mol_type = other RNA
ccgtcctccaccccaggga

SEQ ID NO: 12914 - RNA, 19 nt, synthetic construct
  source 1..19: mol_type = other RNA
cctccagcccagggacggc

SEQ ID NO: 12915 - RNA, 19 nt, synthetic construct
  source 1..19: mol_type = other RNA
ggggaccacccacaccccc

SEQ ID NO: 12916 - RNA, 19 nt, synthetic construct
  source 1..19: mol_type = other RNA
gaccacccacacaccccca

SEQ ID NO: 12917 - RNA, 19 nt, synthetic construct
  source 1..19: mol_type = other RNA
tacacccatcccctccttc

SEQ ID NO: 12918 - RNA, 19 nt, synthetic construct
  source 1..19: mol_type = other RNA
ccgtcctccaccccaggga

SEQ ID NO: 12919 - RNA, 19 nt, synthetic construct
  source 1..19: mol_type = other RNA
cctccagcccagggacggc

SEQ ID NO: 12920 - RNA, 19 nt, synthetic construct
  source 1..19: mol_type = other RNA
gaccacccacacaccccca

SEQ ID NO: 12921 - RNA, 19 nt, synthetic construct
  source 1..19: mol_type = other RNA
atcttgggcaccacccaca

SEQ ID NO: 12922 - RNA, 19 nt, synthetic construct
  source 1..19: mol_type = other RNA
agccttccacggtgacttc

SEQ ID NO: 12923 - RNA, 19 nt, synthetic construct
  source 1..19: mol_type = other RNA
gccttccacggtgacttcc

SEQ ID NO: 12924 - RNA, 19 nt, synthetic construct
  source 1..19: mol_type = other RNA
ggatcctcacaaagctgac

SEQ ID NO: 12925 - RNA, 19 nt, synthetic construct
  source 1..19: mol_type = other RNA
ccgtcctccaccccaggga

SEQ ID NO: 12926 - RNA, 19 nt, synthetic construct
  source 1..19: mol_type = other RNA
cctccagcccagggacggc

SEQ ID NO: 12927 - RNA, 19 nt, synthetic construct
  source 1..19: mol_type = other RNA
ggggaccacccacaccccc

SEQ ID NO: 12928 - RNA, 19 nt, synthetic construct
  source 1..19: mol_type = other RNA
gaccacccacacaccccca

SEQ ID NO: 12929 - RNA, 19 nt, synthetic construct
  source 1..19: mol_type = other RNA
ccgtcctccaccccaggga

SEQ ID NO: 12930 - RNA, 19 nt, synthetic construct
  source 1..19: mol_type = other RNA
ccgtcctccaccccaggga

SEQ ID NO: 12931 - RNA, 19 nt, synthetic construct
  source 1..19: mol_type = other RNA
cctccagcccagggacggc

SEQ ID NO: 12932 - RNA, 19 nt, synthetic construct
  source 1..19: mol_type = other RNA
caacacccatcaccccagt

SEQ ID NO: 12933 - RNA, 19 nt, synthetic construct
  source 1..19: mol_type = other RNA
ccaccacacccatgtccac

SEQ ID NO: 12934 - RNA, 19 nt, synthetic construct
  source 1..19: mol_type = other RNA
caccacacccatgtccacc

SEQ ID NO: 12935 - RNA, 19 nt, synthetic construct
  source 1..19: mol_type = other RNA
gcgcctgtcccacctcccc

SEQ ID NO: 12936 - RNA, 19 nt, synthetic construct
  source 1..19: mol_type = other RNA
catggtgcatgggaaggag

SEQ ID NO: 12937 - RNA, 19 nt, synthetic construct
  source 1..19: mol_type = other RNA
acctcacctgcccacccac

SEQ ID NO: 12938 - RNA, 19 nt, synthetic construct
  source 1..19: mol_type = other RNA
ccacctgcccccagagcct

SEQ ID NO: 12939 - RNA, 19 nt, synthetic construct
  source 1..19: mol_type = other RNA
gtcccaccttccgctgcag

SEQ ID NO: 12940 - RNA, 19 nt, synthetic construct
  source 1..19: mol_type = other RNA
ccccagaagggtgaggggc

SEQ ID NO: 12941 - RNA, 19 nt, synthetic construct
  source 1..19: mol_type = other RNA
tcctggagaggtggtgcac

SEQ ID NO: 12942 - RNA, 19 nt, synthetic construct
  source 1..19: mol_type = other RNA
aagcccctgccctgtgacg

SEQ ID NO: 12943 - RNA, 19 nt, synthetic construct
  source 1..19: mol_type = other RNA
ccgcggaactggaggtgcc

SEQ ID NO: 12944 - RNA, 19 nt, synthetic construct
  source 1..19: mol_type = other RNA
agggcatttggacagtttt

SEQ ID NO: 12945 - RNA, 19 nt, synthetic construct
  source 1..19: mol_type = other RNA
ccctccctgatgtcactgg

SEQ ID NO: 12946 - RNA, 19 nt, synthetic construct
  source 1..19: mol_type = other RNA
cccaacaacaatggcaacc

SEQ ID NO: 12947 - RNA, 19 nt, synthetic construct
  source 1..19: mol_type = other RNA
cctggaactccagccacaa

SEQ ID NO: 12948 - RNA, 19 nt, synthetic construct
  source 1..19: mol_type = other RNA
tcctggaactccagccaca

SEQ ID NO: 12949 - RNA, 19 nt, synthetic construct
  source 1..19: mol_type = other RNA
ccaccagcaacacagtgac

SEQ ID NO: 12950 - RNA, 19 nt, synthetic construct
  source 1..19: mol_type = other RNA
cacagtgactccctcctct

SEQ ID NO: 12951 - RNA, 19 nt, synthetic construct
  source 1..19: mol_type = other RNA
cacagtgactccctcctct

SEQ ID NO: 12952 - RNA, 19 nt, synthetic construct
  source 1..19: mol_type = other RNA
cacagtgactccctcctct

SEQ ID NO: 12953 - RNA, 19 nt, synthetic construct
  source 1..19: mol_type = other RNA
ttccaccccaggaacagct

SEQ ID NO: 12954 - RNA, 19 nt, synthetic construct
  source 1..19: mol_type = other RNA
cacagtgactccctcctct

SEQ ID NO: 12955 - RNA, 19 nt, synthetic construct
  source 1..19: mol_type = other RNA
cccagctcgtccaccgtgg

SEQ ID NO: 12956 - RNA, 19 nt, synthetic construct
  source 1..19: mol_type = other RNA
accaccctgagacccactg

SEQ ID NO: 12957 - RNA, 19 nt, synthetic construct
  source 1..19: mol_type = other RNA
cgccagggcaggagtccat

SEQ ID NO: 12958 - RNA, 19 nt, synthetic construct
  source 1..19: mol_type = other RNA
gtgccgacagcagcttcac

SEQ ID NO: 12959 - RNA, 19 nt, synthetic construct
  source 1..19: mol_type = other RNA
ctcttccaccccaggaaca

SEQ ID NO: 12960 - RNA, 19 nt, synthetic construct
  source 1..19: mol_type = other RNA
gtactcccccatcactgat

SEQ ID NO: 12961 - RNA, 19 nt, synthetic construct
  source 1..19: mol_type = other RNA
tctacctggacaaccacta

SEQ ID NO: 12962 - RNA, 19 nt, synthetic construct
  source 1..19: mol_type = other RNA
atcctgtggcaccagggct

SEQ ID NO: 12963 - RNA, 19 nt, synthetic construct
  source 1..19: mol_type = other RNA
cgctgcccttgccggccgg

SEQ ID NO: 12964 - RNA, 19 nt, synthetic construct
  source 1..19: mol_type = other RNA
ccaggacagagacgacaat

SEQ ID NO: 12965 - RNA, 19 nt, synthetic construct
  source 1..19: mol_type = other RNA
cagtcaccagctccaaagc

SEQ ID NO: 12966 - RNA, 19 nt, synthetic construct
  source 1..19: mol_type = other RNA
cagtcaccagctccaaagc

SEQ ID NO: 12967 - RNA, 19 nt, synthetic construct
  source 1..19: mol_type = other RNA
cagtcaccagctccaaagc

SEQ ID NO: 12968 - RNA, 19 nt, synthetic construct
  source 1..19: mol_type = other RNA
cagtcaccagctccaaagc

SEQ ID NO: 12969 - RNA, 19 nt, synthetic construct
  source 1..19: mol_type = other RNA
acatgcagcaccaggagtg

SEQ ID NO: 12970 - RNA, 19 nt, synthetic construct
  source 1..19: mol_type = other RNA
gcggtggcgagagggccgg

SEQ ID NO: 12971 - RNA, 19 nt, synthetic construct
  source 1..19: mol_type = other RNA
cagtgtggctgctacgaca

SEQ ID NO: 12972 - RNA, 19 nt, synthetic construct
  source 1..19: mol_type = other RNA
cgcccaggacagagacgac

SEQ ID NO: 12973 - RNA, 19 nt, synthetic construct
  source 1..19: mol_type = other RNA
gaacagctccccctcccaa

SEQ ID NO: 12974 - RNA, 19 nt, synthetic construct
  source 1..19: mol_type = other RNA
acagtcaccagctccaaag

SEQ ID NO: 12975 - RNA, 19 nt, synthetic construct
  source 1..19: mol_type = other RNA
tgagaagcacagccaccac

SEQ ID NO: 12976 - RNA, 19 nt, synthetic construct
  source 1..19: mol_type = other RNA
gggcatcttgggcaccacc

SEQ ID NO: 12977 - RNA, 19 nt, synthetic construct
  source 1..19: mol_type = other RNA
acagtcaccagctccaaag

SEQ ID NO: 12978 - RNA, 19 nt, synthetic construct
  source 1..19: mol_type = other RNA
tgagaagcacagccaccac

SEQ ID NO: 12979 - RNA, 19 nt, synthetic construct
  source 1..19: mol_type = other RNA
tccagcccagggacggcac

SEQ ID NO: 12980 - RNA, 19 nt, synthetic construct
  source 1..19: mol_type = other RNA
gaacagctccccctcccaa

SEQ ID NO: 12981 - RNA, 19 nt, synthetic construct
  source 1..19: mol_type = other RNA
ccaccatgtccacaatcca

SEQ ID NO: 12982 - RNA, 19 nt, synthetic construct
  source 1..19: mol_type = other RNA
tgagaagcacagccaccac

SEQ ID NO: 12983 - RNA, 19 nt, synthetic construct
  source 1..19: mol_type = other RNA
gcgttacagccatcccctc

SEQ ID NO: 12984 - RNA, 19 nt, synthetic construct
  source 1..19: mol_type = other RNA
gggcatcttgggcaccacc

SEQ ID NO: 12985 - RNA, 19 nt, synthetic construct
  source 1..19: mol_type = other RNA
acagtcaccagctccaaag

SEQ ID NO: 12986 - RNA, 19 nt, synthetic construct
  source 1..19: mol_type = other RNA
tgagaagcacagccaccac

SEQ ID NO: 12987 - RNA, 19 nt, synthetic construct
  source 1..19: mol_type = other RNA
tccagcccagggacggcac

SEQ ID NO: 12988 - RNA, 19 nt, synthetic construct
  source 1..19: mol_type = other RNA
gaacagctccccctcccaa

SEQ ID NO: 12989 - RNA, 19 nt, synthetic construct
  source 1..19: mol_type = other RNA
ccaccatgtccacaatcca

SEQ ID NO: 12990 - RNA, 19 nt, synthetic construct
  source 1..19: mol_type = other RNA
ccaccagttccacgtccac

SEQ ID NO: 12991 - RNA, 19 nt, synthetic construct
  source 1..19: mol_type = other RNA
acagtcaccagctccaaag

SEQ ID NO: 12992 - RNA, 19 nt, synthetic construct
  source 1..19: mol_type = other RNA
tgagaagcacagccaccac

SEQ ID NO: 12993 - RNA, 19 nt, synthetic construct
  source 1..19: mol_type = other RNA
ccaccatgtccacaatcca

SEQ ID NO: 12994 - RNA, 19 nt, synthetic construct
  source 1..19: mol_type = other RNA
acagctcacacccccaaag

SEQ ID NO: 12995 - RNA, 19 nt, synthetic construct
  source 1..19: mol_type = other RNA
cgtcaccttcaatggccaa

SEQ ID NO: 12996 - RNA, 19 nt, synthetic construct
  source 1..19: mol_type = other RNA
catgcccaccacagccgct

SEQ ID NO: 12997 - RNA, 19 nt, synthetic construct
  source 1..19: mol_type = other RNA
cccttccctgccacatgtg

SEQ ID NO: 12998 - RNA, 19 nt, synthetic construct
  source 1..19: mol_type = other RNA
gtggcgagagggccgggtg

SEQ ID NO: 12999 - RNA, 19 nt, synthetic construct
  source 1..19: mol_type = other RNA
ggcagagagggtaccaggt

SEQ ID NO: 13000 - RNA, 19 nt, synthetic construct
  source 1..19: mol_type = other RNA
ccctccctgcccgtccccg

SEQ ID NO: 13001 - RNA, 19 nt, synthetic construct
  source 1..19: mol_type = other RNA
cggacacctgccccttgtt

SEQ ID NO: 13002 - RNA, 19 nt, synthetic construct
  source 1..19: mol_type = other RNA
gccacacccagcaagaccc

SEQ ID NO: 13003 - RNA, 19 nt, synthetic construct
  source 1..19: mol_type = other RNA
gccacacccagcaagaccc

SEQ ID NO: 13004 - RNA, 19 nt, synthetic construct
  source 1..19: mol_type = other RNA
gccacacccagcaagaccc

SEQ ID NO: 13005 - RNA, 19 nt, synthetic construct
  source 1..19: mol_type = other RNA
cacggccaccacaaccagg

SEQ ID NO: 13006 - RNA, 19 nt, synthetic construct
  source 1..19: mol_type = other RNA
gccacacccagcaagaccc

SEQ ID NO: 13007 - RNA, 19 nt, synthetic construct
  source 1..19: mol_type = other RNA
catcccctcctccaccctg

SEQ ID NO: 13008 - RNA, 19 nt, synthetic construct
  source 1..19: mol_type = other RNA
ccacggccacacccagcaa

SEQ ID NO: 13009 - RNA, 19 nt, synthetic construct
  source 1..19: mol_type = other RNA
ccacggccacacccagcaa

SEQ ID NO: 13010 - RNA, 19 nt, synthetic construct
  source 1..19: mol_type = other RNA
cagaccacagcagccacta

SEQ ID NO: 13011 - RNA, 19 nt, synthetic construct
  source 1..19: mol_type = other RNA
ccacggccacacccagcaa

SEQ ID NO: 13012 - RNA, 19 nt, synthetic construct
  source 1..19: mol_type = other RNA
cgctgtcctcgccctcccc

SEQ ID NO: 13013 - RNA, 19 nt, synthetic construct
  source 1..19: mol_type = other RNA
ctgaccacagcagccacta

SEQ ID NO: 13014 - RNA, 19 nt, synthetic construct
  source 1..19: mol_type = other RNA
tccagagccactccctcct

SEQ ID NO: 13015 - RNA, 19 nt, synthetic construct
  source 1..19: mol_type = other RNA
ccacacacgggcggtccct

SEQ ID NO: 13016 - RNA, 19 nt, synthetic construct
  source 1..19: mol_type = other RNA
ctgaccacagcagccacta

SEQ ID NO: 13017 - RNA, 19 nt, synthetic construct
  source 1..19: mol_type = other RNA
cccggggctgaccagggct

SEQ ID NO: 13018 - RNA, 19 nt, synthetic construct
  source 1..19: mol_type = other RNA
tgcctggtcagagtggctg

SEQ ID NO: 13019 - RNA, 19 nt, synthetic construct
  source 1..19: mol_type = other RNA
tgcctggtcagagtggctg

SEQ ID NO: 13020 - RNA, 19 nt, synthetic construct
  source 1..19: mol_type = other RNA
tgcctggtcagagtggctg

SEQ ID NO: 13021 - RNA, 19 nt, synthetic construct
  source 1..19: mol_type = other RNA
tgcctggtcagagtggctg

SEQ ID NO: 13022 - RNA, 19 nt, synthetic construct
  source 1..19: mol_type = other RNA
acccccagcgcgcgcagct

SEQ ID NO: 13023 - RNA, 19 nt, synthetic construct
  source 1..19: mol_type = other RNA
gcggggcccacatctccac

SEQ ID NO: 13024 - RNA, 19 nt, synthetic construct
  source 1..19: mol_type = other RNA
cgagcttcttcatcgtggt

SEQ ID NO: 13025 - RNA, 19 nt, synthetic construct
  source 1..19: mol_type = other RNA
gcccggggctgaccagggc

SEQ ID NO: 13026 - RNA, 19 nt, synthetic construct
  source 1..19: mol_type = other RNA
ccaccacacccacaaccag

SEQ ID NO: 13027 - RNA, 19 nt, synthetic construct
  source 1..19: mol_type = other RNA
accacaactgtggccactg

SEQ ID NO: 13028 - RNA, 19 nt, synthetic construct
  source 1..19: mol_type = other RNA
gggccacaccacggccacc

SEQ ID NO: 13029 - RNA, 19 nt, synthetic construct
  source 1..19: mol_type = other RNA
ccaccacacccacaaccag

SEQ ID NO: 13030 - RNA, 19 nt, synthetic construct
  source 1..19: mol_type = other RNA
accacaactgtggccactg

SEQ ID NO: 13031 - RNA, 19 nt, synthetic construct
  source 1..19: mol_type = other RNA
gcagcacagtgactccctc

SEQ ID NO: 13032 - RNA, 19 nt, synthetic construct
  source 1..19: mol_type = other RNA
gatcctcacagagcagacc

SEQ ID NO: 13033 - RNA, 19 nt, synthetic construct
  source 1..19: mol_type = other RNA
ccaccacacccacaaccag

SEQ ID NO: 13034 - RNA, 19 nt, synthetic construct
  source 1..19: mol_type = other RNA
accacaactgtggccactg

SEQ ID NO: 13035 - RNA, 19 nt, synthetic construct
  source 1..19: mol_type = other RNA
gcagcacagtgactccctc

SEQ ID NO: 13036 - RNA, 19 nt, synthetic construct
  source 1..19: mol_type = other RNA
accacaactgtggccactg

SEQ ID NO: 13037 - RNA, 19 nt, synthetic construct
  source 1..19: mol_type = other RNA
gcagcacagtgactccctc

SEQ ID NO: 13038 - RNA, 19 nt, synthetic construct
  source 1..19: mol_type = other RNA
gggccacaccacggccacc

SEQ ID NO: 13039 - RNA, 19 nt, synthetic construct
  source 1..19: mol_type = other RNA
accacaactgtggccactg

SEQ ID NO: 13040 - RNA, 19 nt, synthetic construct
  source 1..19: mol_type = other RNA
tgaggctgagggtggagtc

SEQ ID NO: 13041 - RNA, 19 nt, synthetic construct
  source 1..19: mol_type = other RNA
gctgccaggagaggcgggt

SEQ ID NO: 13042 - RNA, 19 nt, synthetic construct
  source 1..19: mol_type = other RNA
gcccaggaggccactgctg

SEQ ID NO: 13043 - RNA, 19 nt, synthetic construct
  source 1..19: mol_type = other RNA
ctgctgcccaccccgtggg

SEQ ID NO: 13044 - RNA, 19 nt, synthetic construct
  source 1..19: mol_type = other RNA
aggggtcagcatcccaaag

SEQ ID NO: 13045 - RNA, 19 nt, synthetic construct
  source 1..19: mol_type = other RNA
tcaatgggcagcgggagga

SEQ ID NO: 13046 - RNA, 19 nt, synthetic construct
  source 1..19: mol_type = other RNA
agccgcactggcctcctgg

SEQ ID NO: 13047 - RNA, 19 nt, synthetic construct
  source 1..19: mol_type = other RNA
gactacatcaaggtcagca

SEQ ID NO: 13048 - RNA, 19 nt, synthetic construct
  source 1..19: mol_type = other RNA
acccgaagtgcccacccag

SEQ ID NO: 13049 - RNA, 19 nt, synthetic construct
  source 1..19: mol_type = other RNA
tcgcagactgggtccagct

SEQ ID NO: 13050 - RNA, 19 nt, synthetic construct
  source 1..19: mol_type = other RNA
accatgtccacagccacac

SEQ ID NO: 13051 - RNA, 19 nt, synthetic construct
  source 1..19: mol_type = other RNA
tcagcacaaccaccacacc

SEQ ID NO: 13052 - RNA, 19 nt, synthetic construct
  source 1..19: mol_type = other RNA
aaccacggtggtgaccatg

SEQ ID NO: 13053 - RNA, 19 nt, synthetic construct
  source 1..19: mol_type = other RNA
tttggcctggtctgcagga

SEQ ID NO: 13054 - RNA, 19 nt, synthetic construct
  source 1..19: mol_type = other RNA
ctcctccacccaggcaact

SEQ ID NO: 13055 - RNA, 19 nt, synthetic construct
  source 1..19: mol_type = other RNA
accatgtccacagccacac

SEQ ID NO: 13056 - RNA, 19 nt, synthetic construct
  source 1..19: mol_type = other RNA
tcagcacaaccaccacacc

SEQ ID NO: 13057 - RNA, 19 nt, synthetic construct
  source 1..19: mol_type = other RNA
aaccacggtggtgaccatg

SEQ ID NO: 13058 - RNA, 19 nt, synthetic construct
  source 1..19: mol_type = other RNA
tttggcctggtctgcagga

SEQ ID NO: 13059 - RNA, 19 nt, synthetic construct
  source 1..19: mol_type = other RNA
accatgtccacagccacac

SEQ ID NO: 13060 - RNA, 19 nt, synthetic construct
  source 1..19: mol_type = other RNA
tcagcacaaccaccacacc

SEQ ID NO: 13061 - RNA, 19 nt, synthetic construct
  source 1..19: mol_type = other RNA
tttggcctggtctgcagga

SEQ ID NO: 13062 - RNA, 19 nt, synthetic construct
  source 1..19: mol_type = other RNA
ctcctccacccaggcaact

SEQ ID NO: 13063 - RNA, 19 nt, synthetic construct
  source 1..19: mol_type = other RNA
accatgtccacagccacac

SEQ ID NO: 13064 - RNA, 19 nt, synthetic construct
  source 1..19: mol_type = other RNA
tcagcacaaccaccacacc

SEQ ID NO: 13065 - RNA, 19 nt, synthetic construct
  source 1..19: mol_type = other RNA
tttggcctggtctgcagga

SEQ ID NO: 13066 - RNA, 19 nt, synthetic construct
  source 1..19: mol_type = other RNA
ctcctccacccaggcaact

SEQ ID NO: 13067 - RNA, 19 nt, synthetic construct
  source 1..19: mol_type = other RNA
accatgtccacagccacac

SEQ ID NO: 13068 - RNA, 19 nt, synthetic construct
  source 1..19: mol_type = other RNA
tcagcacaaccaccacacc

SEQ ID NO: 13069 - RNA, 19 nt, synthetic construct
  source 1..19: mol_type = other RNA
acaatccacacctcctcta

SEQ ID NO: 13070 - RNA, 19 nt, synthetic construct
  source 1..19: mol_type = other RNA
cagatgtgtccagctgcag

SEQ ID NO: 13071 - RNA, 19 nt, synthetic construct
  source 1..19: mol_type = other RNA
tggcacaccccccactgcc

SEQ ID NO: 13072 - RNA, 19 nt, synthetic construct
  source 1..19: mol_type = other RNA
ccatgcctgctgcagggta

SEQ ID NO: 13073 - RNA, 19 nt, synthetic construct
  source 1..19: mol_type = other RNA
gagccgagctgggagaatg

SEQ ID NO: 13074 - RNA, 19 nt, synthetic construct
  source 1..19: mol_type = other RNA
ccaccttcgccgcctgccg

SEQ ID NO: 13075 - RNA, 19 nt, synthetic construct
  source 1..19: mol_type = other RNA
ccaccaccgccaccacacc

SEQ ID NO: 13076 - RNA, 19 nt, synthetic construct
  source 1..19: mol_type = other RNA
ccttccacggtgacttccc

SEQ ID NO: 13077 - RNA, 19 nt, synthetic construct
  source 1..19: mol_type = other RNA
ccaccaccgccaccacacc

SEQ ID NO: 13078 - RNA, 19 nt, synthetic construct
  source 1..19: mol_type = other RNA
gacaagcacagccaccaaa

SEQ ID NO: 13079 - RNA, 19 nt, synthetic construct
  source 1..19: mol_type = other RNA
ccaccaccgccaccacacc

SEQ ID NO: 13080 - RNA, 19 nt, synthetic construct
  source 1..19: mol_type = other RNA
ccttccacggtgacttccc

SEQ ID NO: 13081 - RNA, 19 nt, synthetic construct
  source 1..19: mol_type = other RNA
ccaccaccgccaccacacc

SEQ ID NO: 13082 - RNA, 19 nt, synthetic construct
  source 1..19: mol_type = other RNA
gacaagcacagccaccaaa

SEQ ID NO: 13083 - RNA, 19 nt, synthetic construct
  source 1..19: mol_type = other RNA
gatggcggagggctgcttc

SEQ ID NO: 13084 - RNA, 19 nt, synthetic construct
  source 1..19: mol_type = other RNA
tgcaggaaccggaggtggg

SEQ ID NO: 13085 - RNA, 19 nt, synthetic construct
  source 1..19: mol_type = other RNA
ccccccagcagtccccaca

SEQ ID NO: 13086 - RNA, 19 nt, synthetic construct
  source 1..19: mol_type = other RNA
tcccccagcagtccccaca

SEQ ID NO: 13087 - RNA, 19 nt, synthetic construct
  source 1..19: mol_type = other RNA
ccccccagcagtccccaca

SEQ ID NO: 13088 - RNA, 19 nt, synthetic construct
  source 1..19: mol_type = other RNA
tcccccagcagtccccaca

SEQ ID NO: 13089 - RNA, 19 nt, synthetic construct
  source 1..19: mol_type = other RNA
cagcacggccaccacaccc

SEQ ID NO: 13090 - RNA, 19 nt, synthetic construct
  source 1..19: mol_type = other RNA
ctccaccctgtggaccacg

SEQ ID NO: 13091 - RNA, 19 nt, synthetic construct
  source 1..19: mol_type = other RNA
cccagagcctgcctgtgtg

SEQ ID NO: 13092 - RNA, 19 nt, synthetic construct
  source 1..19: mol_type = other RNA
tcaacggcctcccggcctt

SEQ ID NO: 13093 - RNA, 19 nt, synthetic construct
  source 1..19: mol_type = other RNA
cccagcgcgcgcagctctg

SEQ ID NO: 13094 - RNA, 19 nt, synthetic construct
  source 1..19: mol_type = other RNA
cctgctctgtgcagggcgg

SEQ ID NO: 13095 - RNA, 19 nt, synthetic construct
  source 1..19: mol_type = other RNA
gctaagctgcctgggagcc

SEQ ID NO: 13096 - RNA, 19 nt, synthetic construct
  source 1..19: mol_type = other RNA
acctggactgcagcaacag

SEQ ID NO: 13097 - RNA, 19 nt, synthetic construct
  source 1..19: mol_type = other RNA
gatcctccaagaggggacc

SEQ ID NO: 13098 - RNA, 19 nt, synthetic construct
  source 1..19: mol_type = other RNA
aacagagtcccccgctctg

SEQ ID NO: 13099 - RNA, 19 nt, synthetic construct
  source 1..19: mol_type = other RNA
cgcagactgggtccagctc

SEQ ID NO: 13100 - RNA, 19 nt, synthetic construct
  source 1..19: mol_type = other RNA
gacgcctgcaggctccaca

SEQ ID NO: 13101 - RNA, 19 nt, synthetic construct
  source 1..19: mol_type = other RNA
ccctcacagccacccacgc

SEQ ID NO: 13102 - RNA, 19 nt, synthetic construct
  source 1..19: mol_type = other RNA
tccaccctgagaacagctc

SEQ ID NO: 13103 - RNA, 19 nt, synthetic construct
  source 1..19: mol_type = other RNA
ccaccacggccaccacacc

SEQ ID NO: 13104 - RNA, 19 nt, synthetic construct
  source 1..19: mol_type = other RNA
ctgagaagcacagccacca

SEQ ID NO: 13105 - RNA, 19 nt, synthetic construct
  source 1..19: mol_type = other RNA
cctccctgggcaccacctg

SEQ ID NO: 13106 - RNA, 19 nt, synthetic construct
  source 1..19: mol_type = other RNA
atgtccacagccacaccct

SEQ ID NO: 13107 - RNA, 19 nt, synthetic construct
  source 1..19: mol_type = other RNA
acaccctcctccactccag

SEQ ID NO: 13108 - RNA, 19 nt, synthetic construct
  source 1..19: mol_type = other RNA
ggggccaccggctctgtgg

SEQ ID NO: 13109 - RNA, 19 nt, synthetic construct
  source 1..19: mol_type = other RNA
tccagtgtggatcagcaca

SEQ ID NO: 13110 - RNA, 19 nt, synthetic construct
  source 1..19: mol_type = other RNA
accaccacacccacaacca

SEQ ID NO: 13111 - RNA, 19 nt, synthetic construct
  source 1..19: mol_type = other RNA
tgcagccaccagcaacaca

SEQ ID NO: 13112 - RNA, 19 nt, synthetic construct
  source 1..19: mol_type = other RNA
agggaccacccacacaccc

SEQ ID NO: 13113 - RNA, 19 nt, synthetic construct
  source 1..19: mol_type = other RNA
cagagccttccacggtgac

SEQ ID NO: 13114 - RNA, 19 nt, synthetic construct
  source 1..19: mol_type = other RNA
tggactttggcctggtctg

SEQ ID NO: 13115 - RNA, 19 nt, synthetic construct
  source 1..19: mol_type = other RNA
ctgagaagcacagccacca

SEQ ID NO: 13116 - RNA, 19 nt, synthetic construct
  source 1..19: mol_type = other RNA
cctccctgggcaccacctg

SEQ ID NO: 13117 - RNA, 19 nt, synthetic construct
  source 1..19: mol_type = other RNA
atgtccacagccacaccct

SEQ ID NO: 13118 - RNA, 19 nt, synthetic construct
  source 1..19: mol_type = other RNA
acaccctcctccactccag

SEQ ID NO: 13119 - RNA, 19 nt, synthetic construct
  source 1..19: mol_type = other RNA
ggggccaccggctctgtgg

SEQ ID NO: 13120 - RNA, 19 nt, synthetic construct
  source 1..19: mol_type = other RNA
tccagtgtggatcagcaca

SEQ ID NO: 13121 - RNA, 19 nt, synthetic construct
  source 1..19: mol_type = other RNA
accaccacacccacaacca

SEQ ID NO: 13122 - RNA, 19 nt, synthetic construct
  source 1..19: mol_type = other RNA
agggaccacccacacaccc

SEQ ID NO: 13123 - RNA, 19 nt, synthetic construct
  source 1..19: mol_type = other RNA
tggactttggcctggtctg

SEQ ID NO: 13124 - RNA, 19 nt, synthetic construct
  source 1..19: mol_type = other RNA
cacttcctcctccagtcca

SEQ ID NO: 13125 - RNA, 19 nt, synthetic construct
  source 1..19: mol_type = other RNA
gctgacaagcacagccacc

SEQ ID NO: 13126 - RNA, 19 nt, synthetic construct
  source 1..19: mol_type = other RNA
cccatcccctccttcaccc

SEQ ID NO: 13127 - RNA, 19 nt, synthetic construct
  source 1..19: mol_type = other RNA
gccaccatgtccacaatcc

SEQ ID NO: 13128 - RNA, 19 nt, synthetic construct
  source 1..19: mol_type = other RNA
acacctccacagtgctgac

SEQ ID NO: 13129 - RNA, 19 nt, synthetic construct
  source 1..19: mol_type = other RNA
caactgcagccactggccc

SEQ ID NO: 13130 - RNA, 19 nt, synthetic construct
  source 1..19: mol_type = other RNA
gcctcctccacccgggcaa

SEQ ID NO: 13131 - RNA, 19 nt, synthetic construct
  source 1..19: mol_type = other RNA
ctgagaagcacagccacca

SEQ ID NO: 13132 - RNA, 19 nt, synthetic construct
  source 1..19: mol_type = other RNA
atgtccacagccacaccct

SEQ ID NO: 13133 - RNA, 19 nt, synthetic construct
  source 1..19: mol_type = other RNA
agggccaccggctctgtgg

SEQ ID NO: 13134 - RNA, 19 nt, synthetic construct
  source 1..19: mol_type = other RNA
tccagtgtggatcagcaca

SEQ ID NO: 13135 - RNA, 19 nt, synthetic construct
  source 1..19: mol_type = other RNA
accaccacacccacaacca

SEQ ID NO: 13136 - RNA, 19 nt, synthetic construct
  source 1..19: mol_type = other RNA
agggaccacccacacaccc

SEQ ID NO: 13137 - RNA, 19 nt, synthetic construct
  source 1..19: mol_type = other RNA
cagagccttccacggtgac

SEQ ID NO: 13138 - RNA, 19 nt, synthetic construct
  source 1..19: mol_type = other RNA
tggactttggcctggtctg

SEQ ID NO: 13139 - RNA, 19 nt, synthetic construct
  source 1..19: mol_type = other RNA
ctgagaagcacagccacca

SEQ ID NO: 13140 - RNA, 19 nt, synthetic construct
  source 1..19: mol_type = other RNA
cctccctgggcaccacctg

SEQ ID NO: 13141 - RNA, 19 nt, synthetic construct
  source 1..19: mol_type = other RNA
atgtccacagccacaccct

SEQ ID NO: 13142 - RNA, 19 nt, synthetic construct
  source 1..19: mol_type = other RNA
acaccctcctccactccag

SEQ ID NO: 13143 - RNA, 19 nt, synthetic construct
  source 1..19: mol_type = other RNA
agggccaccggctctgtgg

SEQ ID NO: 13144 - RNA, 19 nt, synthetic construct
  source 1..19: mol_type = other RNA
tccagtgtggatcagcaca

SEQ ID NO: 13145 - RNA, 19 nt, synthetic construct
  source 1..19: mol_type = other RNA
accaccacacccacaacca

SEQ ID NO: 13146 - RNA, 19 nt, synthetic construct
  source 1..19: mol_type = other RNA
agggaccacccacacaccc

SEQ ID NO: 13147 - RNA, 19 nt, synthetic construct
  source 1..19: mol_type = other RNA
tggactttggcctggtctg

SEQ ID NO: 13148 - RNA, 19 nt, synthetic construct
  source 1..19: mol_type = other RNA
accagcccggccaccacac

SEQ ID NO: 13149 - RNA, 19 nt, synthetic construct
  source 1..19: mol_type = other RNA
cacttcctcctccagtcca

SEQ ID NO: 13150 - RNA, 19 nt, synthetic construct
  source 1..19: mol_type = other RNA
gctgacaagcacagccacc

SEQ ID NO: 13151 - RNA, 19 nt, synthetic construct
  source 1..19: mol_type = other RNA
cccctcctccacccttggg

SEQ ID NO: 13152 - RNA, 19 nt, synthetic construct
  source 1..19: mol_type = other RNA
gccaccatgtccacaatcc

SEQ ID NO: 13153 - RNA, 19 nt, synthetic construct
  source 1..19: mol_type = other RNA
acacctccacagtgctgac

SEQ ID NO: 13154 - RNA, 19 nt, synthetic construct
  source 1..19: mol_type = other RNA
caactgcagccactggccc

SEQ ID NO: 13155 - RNA, 19 nt, synthetic construct
  source 1..19: mol_type = other RNA
ctgagaagcacagccacca

SEQ ID NO: 13156 - RNA, 19 nt, synthetic construct
  source 1..19: mol_type = other RNA
cctccctgggcaccacctg

SEQ ID NO: 13157 - RNA, 19 nt, synthetic construct
  source 1..19: mol_type = other RNA
atgtccacagccacaccct

SEQ ID NO: 13158 - RNA, 19 nt, synthetic construct
  source 1..19: mol_type = other RNA
acaccctcctccactccag

SEQ ID NO: 13159 - RNA, 19 nt, synthetic construct
  source 1..19: mol_type = other RNA
ggggccaccggctctgtgg

SEQ ID NO: 13160 - RNA, 19 nt, synthetic construct
  source 1..19: mol_type = other RNA
tccagtgtggatcagcaca

SEQ ID NO: 13161 - RNA, 19 nt, synthetic construct
  source 1..19: mol_type = other RNA
accaccacacccacaacca

SEQ ID NO: 13162 - RNA, 19 nt, synthetic construct
  source 1..19: mol_type = other RNA
cacttcctcctccagtcca

SEQ ID NO: 13163 - RNA, 19 nt, synthetic construct
  source 1..19: mol_type = other RNA
tcctccaccctgtggacca

SEQ ID NO: 13164 - RNA, 19 nt, synthetic construct
  source 1..19: mol_type = other RNA
cctccaccctgtggaccac

SEQ ID NO: 13165 - RNA, 19 nt, synthetic construct
  source 1..19: mol_type = other RNA
tccaccatgtccacaatcc

SEQ ID NO: 13166 - RNA, 19 nt, synthetic construct
  source 1..19: mol_type = other RNA
acacctccacagtgctgac

SEQ ID NO: 13167 - RNA, 19 nt, synthetic construct
  source 1..19: mol_type = other RNA
ggcatttggacagtttttc

SEQ ID NO: 13168 - RNA, 19 nt, synthetic construct
  source 1..19: mol_type = other RNA
ctggacccaaagcctgtgg

SEQ ID NO: 13169 - RNA, 19 nt, synthetic construct
  source 1..19: mol_type = other RNA
tgcatctgcagcatgtggg

SEQ ID NO: 13170 - RNA, 19 nt, synthetic construct
  source 1..19: mol_type = other RNA
atcgtcctcactgtcacca

SEQ ID NO: 13171 - RNA, 19 nt, synthetic construct
  source 1..19: mol_type = other RNA
acagcctgccacctgcaac

SEQ ID NO: 13172 - RNA, 19 nt, synthetic construct
  source 1..19: mol_type = other RNA
tgctgcccaccccgtgggt

SEQ ID NO: 13173 - RNA, 19 nt, synthetic construct
  source 1..19: mol_type = other RNA
ttggccttgcccctccctg

SEQ ID NO: 13174 - RNA, 19 nt, synthetic construct
  source 1..19: mol_type = other RNA
ccaggtcagagaggggtca

SEQ ID NO: 13175 - RNA, 19 nt, synthetic construct
  source 1..19: mol_type = other RNA
ggggtcagcatcccaaagc

SEQ ID NO: 13176 - RNA, 19 nt, synthetic construct
  source 1..19: mol_type = other RNA
cccagttttgcaaataaac

SEQ ID NO: 13177 - RNA, 19 nt, synthetic construct
  source 1..19: mol_type = other RNA
atgcagggcacaccatgga

SEQ ID NO: 13178 - RNA, 19 nt, synthetic construct
  source 1..19: mol_type = other RNA
tgggtcagcaactgccagt

SEQ ID NO: 13179 - RNA, 19 nt, synthetic construct
  source 1..19: mol_type = other RNA
ggggacttcccacacccca

SEQ ID NO: 13180 - RNA, 19 nt, synthetic construct
  source 1..19: mol_type = other RNA
ggggacttcccacacccca

SEQ ID NO: 13181 - RNA, 19 nt, synthetic construct
  source 1..19: mol_type = other RNA
cttcacagtcaccccctcc

SEQ ID NO: 13182 - RNA, 19 nt, synthetic construct
  source 1..19: mol_type = other RNA
cccatccccccagtgctga

SEQ ID NO: 13183 - RNA, 19 nt, synthetic construct
  source 1..19: mol_type = other RNA
cccatccccccagtgctga

SEQ ID NO: 13184 - RNA, 19 nt, synthetic construct
  source 1..19: mol_type = other RNA
ctggcacccaaggacccct

SEQ ID NO: 13185 - RNA, 19 nt, synthetic construct
  source 1..19: mol_type = other RNA
ggccaccggctctgtggcc

SEQ ID NO: 13186 - RNA, 19 nt, synthetic construct
  source 1..19: mol_type = other RNA
ggccaccggctctgtggcc

SEQ ID NO: 13187 - RNA, 19 nt, synthetic construct
  source 1..19: mol_type = other RNA
ggccaccggctctgtggcc

SEQ ID NO: 13188 - RNA, 19 nt, synthetic construct
  source 1..19: mol_type = other RNA
ggccaccggctctgtggcc

SEQ ID NO: 13189 - RNA, 19 nt, synthetic construct
  source 1..19: mol_type = other RNA
ggccaccggctctgtggcc

SEQ ID NO: 13190 - RNA, 19 nt, synthetic construct
  source 1..19: mol_type = other RNA
gtggcaccccgcgctccgt

SEQ ID NO: 13191 - RNA, 19 nt, synthetic construct
  source 1..19: mol_type = other RNA
cccctcaacatgcagcacc

SEQ ID NO: 13192 - RNA, 19 nt, synthetic construct
  source 1..19: mol_type = other RNA
actgagtccactggatcca

SEQ ID NO: 13193 - RNA, 19 nt, synthetic construct
  source 1..19: mol_type = other RNA
tcacaaagctgaccacaac

SEQ ID NO: 13194 - RNA, 19 nt, synthetic construct
  source 1..19: mol_type = other RNA
actgagtccactggatcca

SEQ ID NO: 13195 - RNA, 19 nt, synthetic construct
  source 1..19: mol_type = other RNA
cagggcacaccatggatgg

SEQ ID NO: 13196 - RNA, 19 nt, synthetic construct
  source 1..19: mol_type = other RNA
tgctccaacccccagcgcg

SEQ ID NO: 13197 - RNA, 19 nt, synthetic construct
  source 1..19: mol_type = other RNA
agcaacacagtgactccct

SEQ ID NO: 13198 - RNA, 19 nt, synthetic construct
  source 1..19: mol_type = other RNA
accacgacaagggccacca

SEQ ID NO: 13199 - RNA, 19 nt, synthetic construct
  source 1..19: mol_type = other RNA
accacgacaagggccacca

SEQ ID NO: 13200 - RNA, 19 nt, synthetic construct
  source 1..19: mol_type = other RNA
caagcacagccacaaaatc

SEQ ID NO: 13201 - RNA, 19 nt, synthetic construct
  source 1..19: mol_type = other RNA
actgtcaccatggtgcatg

SEQ ID NO: 13202 - RNA, 19 nt, synthetic construct
  source 1..19: mol_type = other RNA
ggctcccccacacacccgt

SEQ ID NO: 13203 - RNA, 19 nt, synthetic construct
  source 1..19: mol_type = other RNA
gccggagcgcccgcgcagc

SEQ ID NO: 13204 - RNA, 19 nt, synthetic construct
  source 1..19: mol_type = other RNA
ggtaactcagggctgaggt

SEQ ID NO: 13205 - RNA, 19 nt, synthetic construct
  source 1..19: mol_type = other RNA
ccacacctcctctactcca

SEQ ID NO: 13206 - RNA, 19 nt, synthetic construct
  source 1..19: mol_type = other RNA
aaccagacctgtggcctgt

SEQ ID NO: 13207 - RNA, 19 nt, synthetic construct
  source 1..19: mol_type = other RNA
acagcctggacttcggcca

SEQ ID NO: 13208 - RNA, 19 nt, synthetic construct
  source 1..19: mol_type = other RNA
ggcatcttgggcaccaccc

SEQ ID NO: 13209 - RNA, 19 nt, synthetic construct
  source 1..19: mol_type = other RNA
acagcctggacttcggcca

SEQ ID NO: 13210 - RNA, 19 nt, synthetic construct
  source 1..19: mol_type = other RNA
acagcctggacttcggcca

SEQ ID NO: 13211 - RNA, 19 nt, synthetic construct
  source 1..19: mol_type = other RNA
ggcatcttgggcaccaccc

SEQ ID NO: 13212 - RNA, 19 nt, synthetic construct
  source 1..19: mol_type = other RNA
acagcctggacttcggcca

SEQ ID NO: 13213 - RNA, 19 nt, synthetic construct
  source 1..19: mol_type = other RNA
tgcccctccctgatgtcac

SEQ ID NO: 13214 - RNA, 19 nt, synthetic construct
  source 1..19: mol_type = other RNA
gtgttctctgagcactgcc

SEQ ID NO: 13215 - RNA, 19 nt, synthetic construct
  source 1..19: mol_type = other RNA
cctgtgctggctgacatcg

SEQ ID NO: 13216 - RNA, 19 nt, synthetic construct
  source 1..19: mol_type = other RNA
cggccccaggtaccaccac

SEQ ID NO: 13217 - RNA, 19 nt, synthetic construct
  source 1..19: mol_type = other RNA
acaatccacccctcctcca

SEQ ID NO: 13218 - RNA, 19 nt, synthetic construct
  source 1..19: mol_type = other RNA
acaatccacccctcctcca

SEQ ID NO: 13219 - RNA, 19 nt, synthetic construct
  source 1..19: mol_type = other RNA
caccatgtccacagccaca

SEQ ID NO: 13220 - RNA, 19 nt, synthetic construct
  source 1..19: mol_type = other RNA
caccatgtccacagccaca

SEQ ID NO: 13221 - RNA, 19 nt, synthetic construct
  source 1..19: mol_type = other RNA
caccatgtccacagccaca

SEQ ID NO: 13222 - RNA, 19 nt, synthetic construct
  source 1..19: mol_type = other RNA
caccatgtccacagccaca

SEQ ID NO: 13223 - RNA, 19 nt, synthetic construct
  source 1..19: mol_type = other RNA
caccatgtccacagccaca

SEQ ID NO: 13224 - RNA, 19 nt, synthetic construct
  source 1..19: mol_type = other RNA
gttggctctggcggccatg

SEQ ID NO: 13225 - RNA, 19 nt, synthetic construct
  source 1..19: mol_type = other RNA
gtggatgcctgccagccca

SEQ ID NO: 13226 - RNA, 19 nt, synthetic construct
  source 1..19: mol_type = other RNA
ccagctcaggccccgtgac

SEQ ID NO: 13227 - RNA, 19 nt, synthetic construct
  source 1..19: mol_type = other RNA
tgtccacctctcaggccga

SEQ ID NO: 13228 - RNA, 19 nt, synthetic construct
  source 1..19: mol_type = other RNA
tgctgaccagcacggccac

SEQ ID NO: 13229 - RNA, 19 nt, synthetic construct
  source 1..19: mol_type = other RNA
tgctgaccagcacggccac

SEQ ID NO: 13230 - RNA, 19 nt, synthetic construct
  source 1..19: mol_type = other RNA
tgctgaccagcacggccac

SEQ ID NO: 13231 - RNA, 19 nt, synthetic construct
  source 1..19: mol_type = other RNA
cacagctggaggggatggc

SEQ ID NO: 13232 - RNA, 19 nt, synthetic construct
  source 1..19: mol_type = other RNA
gcccctccctgatgtcact

SEQ ID NO: 13233 - RNA, 19 nt, synthetic construct
  source 1..19: mol_type = other RNA
ggacccgctgcccttgccg

SEQ ID NO: 13234 - RNA, 19 nt, synthetic construct
  source 1..19: mol_type = other RNA
ctcagcggggtggtggagg

SEQ ID NO: 13235 - RNA, 19 nt, synthetic construct
  source 1..19: mol_type = other RNA
actgcacacccagtggcat

SEQ ID NO: 13236 - RNA, 19 nt, synthetic construct
  source 1..19: mol_type = other RNA
cggcaccatcatcaggaag

SEQ ID NO: 13237 - RNA, 19 nt, synthetic construct
  source 1..19: mol_type = other RNA
cccggcctgggaggcggag

SEQ ID NO: 13238 - RNA, 19 nt, synthetic construct
  source 1..19: mol_type = other RNA
gtcaccccctcggccccag

SEQ ID NO: 13239 - RNA, 19 nt, synthetic construct
  source 1..19: mol_type = other RNA
acagagcagaccacagcag

SEQ ID NO: 13240 - RNA, 19 nt, synthetic construct
  source 1..19: mol_type = other RNA
cccacacctccacagtgct

SEQ ID NO: 13241 - RNA, 19 nt, synthetic construct
  source 1..19: mol_type = other RNA
cctcaactccagggacaac

SEQ ID NO: 13242 - RNA, 19 nt, synthetic construct
  source 1..19: mol_type = other RNA
cccacacctccacagtgct

SEQ ID NO: 13243 - RNA, 19 nt, synthetic construct
  source 1..19: mol_type = other RNA
cccacacctccacagtgct

SEQ ID NO: 13244 - RNA, 19 nt, synthetic construct
  source 1..19: mol_type = other RNA
gtgcgagtgcatctgcagc

SEQ ID NO: 13245 - RNA, 19 nt, synthetic construct
  source 1..19: mol_type = other RNA
agtcttccaggcccggctg

SEQ ID NO: 13246 - RNA, 19 nt, synthetic construct
  source 1..19: mol_type = other RNA
gtgggtcagcaactgccag

SEQ ID NO: 13247 - RNA, 19 nt, synthetic construct
  source 1..19: mol_type = other RNA
cagccatcctgcacaccta

SEQ ID NO: 13248 - RNA, 19 nt, synthetic construct
  source 1..19: mol_type = other RNA
gcaccgcttccaaagagcc

SEQ ID NO: 13249 - RNA, 19 nt, synthetic construct
  source 1..19: mol_type = other RNA
gaggggcagtctgtgagca

SEQ ID NO: 13250 - RNA, 19 nt, synthetic construct
  source 1..19: mol_type = other RNA
cttgcccctccctgatgtc

SEQ ID NO: 13251 - RNA, 19 nt, synthetic construct
  source 1..19: mol_type = other RNA
gcacggacgaggagggcat

SEQ ID NO: 13252 - RNA, 19 nt, synthetic construct
  source 1..19: mol_type = other RNA
tgcctgccagcccacttgc

SEQ ID NO: 13253 - RNA, 19 nt, synthetic construct
  source 1..19: mol_type = other RNA
accccgtcctccaccccgg

SEQ ID NO: 13254 - RNA, 19 nt, synthetic construct
  source 1..19: mol_type = other RNA
ttccacgtccaccccctcc

SEQ ID NO: 13255 - RNA, 19 nt, synthetic construct
  source 1..19: mol_type = other RNA
ctgccactccatcatcaac

SEQ ID NO: 13256 - RNA, 19 nt, synthetic construct
  source 1..19: mol_type = other RNA
gcacacccagtggcatcca

SEQ ID NO: 13257 - RNA, 19 nt, synthetic construct
  source 1..19: mol_type = other RNA
tcccacaccctagcagcaa

SEQ ID NO: 13258 - RNA, 19 nt, synthetic construct
  source 1..19: mol_type = other RNA
acagccaccggctccacca

SEQ ID NO: 13259 - RNA, 19 nt, synthetic construct
  source 1..19: mol_type = other RNA
accacacccgcagccacca

SEQ ID NO: 13260 - RNA, 19 nt, synthetic construct
  source 1..19: mol_type = other RNA
acccgcacccctgcagtgc

SEQ ID NO: 13261 - RNA, 19 nt, synthetic construct
  source 1..19: mol_type = other RNA
ccccaccgccagtgtcctc

SEQ ID NO: 13262 - RNA, 19 nt, synthetic construct
  source 1..19: mol_type = other RNA
aggaggagggcgactgctg

SEQ ID NO: 13263 - RNA, 19 nt, synthetic construct
  source 1..19: mol_type = other RNA
cctgcccgtccccgtcccc

SEQ ID NO: 13264 - RNA, 19 nt, synthetic construct
  source 1..19: mol_type = other RNA
cccgtccccgtccccccac

SEQ ID NO: 13265 - RNA, 19 nt, synthetic construct
  source 1..19: mol_type = other RNA
gcactggcctcctggtgga

SEQ ID NO: 13266 - RNA, 19 nt, synthetic construct
  source 1..19: mol_type = other RNA
gcatctgccaccgcaccct

SEQ ID NO: 13267 - RNA, 19 nt, synthetic construct
  source 1..19: mol_type = other RNA
ggctgcacctgccccgcgg

SEQ ID NO: 13268 - RNA, 19 nt, synthetic construct
  source 1..19: mol_type = other RNA
ccccatggtgtacctggac

SEQ ID NO: 13269 - RNA, 19 nt, synthetic construct
  source 1..19: mol_type = other RNA
tgtgtgcacaacgaggcca

SEQ ID NO: 13270 - RNA, 19 nt, synthetic construct
  source 1..19: mol_type = other RNA
aacacctgcacctgcagga

SEQ ID NO: 13271 - RNA, 19 nt, synthetic construct
  source 1..19: mol_type = other RNA
accacccacgggaccttcc

SEQ ID NO: 13272 - RNA, 19 nt, synthetic construct
  source 1..19: mol_type = other RNA
cctggcacccaaggacccc

SEQ ID NO: 13273 - RNA, 19 nt, synthetic construct
  source 1..19: mol_type = other RNA
agcaggagggcgtcttcaa

SEQ ID NO: 13274 - RNA, 19 nt, synthetic construct
  source 1..19: mol_type = other RNA
cacgctcagcccttccagg

SEQ ID NO: 13275 - RNA, 19 nt, synthetic construct
  source 1..19: mol_type = other RNA
cgctcagcccttccaggga

SEQ ID NO: 13276 - RNA, 19 nt, synthetic construct
  source 1..19: mol_type = other RNA
agccacccacgctggcccc

SEQ ID NO: 13277 - RNA, 19 nt, synthetic construct
  source 1..19: mol_type = other RNA
cgtccactggatccacggc

SEQ ID NO: 13278 - RNA, 19 nt, synthetic construct
  source 1..19: mol_type = other RNA
caccagctccaaagccact

SEQ ID NO: 13279 - RNA, 19 nt, synthetic construct
  source 1..19: mol_type = other RNA
ttcctccctgggcaccacc

SEQ ID NO: 13280 - RNA, 19 nt, synthetic construct
  source 1..19: mol_type = other RNA
cccctcctccatcccgggg

SEQ ID NO: 13281 - RNA, 19 nt, synthetic construct
  source 1..19: mol_type = other RNA
cagtgactccctcctctgc

SEQ ID NO: 13282 - RNA, 19 nt, synthetic construct
  source 1..19: mol_type = other RNA
cccacatcacagagccttc

SEQ ID NO: 13283 - RNA, 19 nt, synthetic construct
  source 1..19: mol_type = other RNA
gactccagccctttccagc

SEQ ID NO: 13284 - RNA, 19 nt, synthetic construct
  source 1..19: mol_type = other RNA
atccgtgcggccggagggg

SEQ ID NO: 13285 - RNA, 19 nt, synthetic construct
  source 1..19: mol_type = other RNA
agtccactggatccacggc

SEQ ID NO: 13286 - RNA, 19 nt, synthetic construct
  source 1..19: mol_type = other RNA
caccagctccaaagccact

SEQ ID NO: 13287 - RNA, 19 nt, synthetic construct
  source 1..19: mol_type = other RNA
ccaaagccactcccttctc

SEQ ID NO: 13288 - RNA, 19 nt, synthetic construct
  source 1..19: mol_type = other RNA
ctcctccctgggcaccacc

SEQ ID NO: 13289 - RNA, 19 nt, synthetic construct
  source 1..19: mol_type = other RNA
cccctcctccatcccgggg

SEQ ID NO: 13290 - RNA, 19 nt, synthetic construct
  source 1..19: mol_type = other RNA
cagtgactccctcctctgc

SEQ ID NO: 13291 - RNA, 19 nt, synthetic construct
  source 1..19: mol_type = other RNA
cccacatcacagagccttc

SEQ ID NO: 13292 - RNA, 19 nt, synthetic construct
  source 1..19: mol_type = other RNA
cacaccagggccacctcca

SEQ ID NO: 13293 - RNA, 19 nt, synthetic construct
  source 1..19: mol_type = other RNA
atccgtgcggccggagggg

SEQ ID NO: 13294 - RNA, 19 nt, synthetic construct
  source 1..19: mol_type = other RNA
ccacgaccaccacaaccag

SEQ ID NO: 13295 - RNA, 19 nt, synthetic construct
  source 1..19: mol_type = other RNA
cccctcctccatcccgggg

SEQ ID NO: 13296 - RNA, 19 nt, synthetic construct
  source 1..19: mol_type = other RNA
cagtgactccctcctctgc

SEQ ID NO: 13297 - RNA, 19 nt, synthetic construct
  source 1..19: mol_type = other RNA
cccacatcacagagccttc

SEQ ID NO: 13298 - RNA, 19 nt, synthetic construct
  source 1..19: mol_type = other RNA
atccgtgcggccggagggg

SEQ ID NO: 13299 - RNA, 19 nt, synthetic construct
  source 1..19: mol_type = other RNA
agtccactggatccacggc

SEQ ID NO: 13300 - RNA, 19 nt, synthetic construct
  source 1..19: mol_type = other RNA
caccagctccaaagccact

SEQ ID NO: 13301 - RNA, 19 nt, synthetic construct
  source 1..19: mol_type = other RNA
ccaaagccactcccttctc

SEQ ID NO: 13302 - RNA, 19 nt, synthetic construct
  source 1..19: mol_type = other RNA
ctcctccctgggcaccacc

SEQ ID NO: 13303 - RNA, 19 nt, synthetic construct
  source 1..19: mol_type = other RNA
cttccaccccaggaacagc

SEQ ID NO: 13304 - RNA, 19 nt, synthetic construct
  source 1..19: mol_type = other RNA
cagtgactccctcctctgc

SEQ ID NO: 13305 - RNA, 19 nt, synthetic construct
  source 1..19: mol_type = other RNA
cccacatcacagagccttc

SEQ ID NO: 13306 - RNA, 19 nt, synthetic construct
  source 1..19: mol_type = other RNA
atccgtgcggccggagggg

SEQ ID NO: 13307 - RNA, 19 nt, synthetic construct
  source 1..19: mol_type = other RNA
cgtccactggatccacggc

SEQ ID NO: 13308 - RNA, 19 nt, synthetic construct
  source 1..19: mol_type = other RNA
caccagctccaaagccact

SEQ ID NO: 13309 - RNA, 19 nt, synthetic construct
  source 1..19: mol_type = other RNA
ctcctccctgggcaccacc

SEQ ID NO: 13310 - RNA, 19 nt, synthetic construct
  source 1..19: mol_type = other RNA
cccctcctccatcccgggg

SEQ ID NO: 13311 - RNA, 19 nt, synthetic construct
  source 1..19: mol_type = other RNA
caccagctccaaagccact

SEQ ID NO: 13312 - RNA, 19 nt, synthetic construct
  source 1..19: mol_type = other RNA
ctcactgagctgaccacaa

SEQ ID NO: 13313 - RNA, 19 nt, synthetic construct
  source 1..19: mol_type = other RNA
ctgagctgaccacaacagc

SEQ ID NO: 13314 - RNA, 19 nt, synthetic construct
  source 1..19: mol_type = other RNA
ggttccacggccaccgcct

SEQ ID NO: 13315 - RNA, 19 nt, synthetic construct
  source 1..19: mol_type = other RNA
gtgaccaccatggccacta

SEQ ID NO: 13316 - RNA, 19 nt, synthetic construct
  source 1..19: mol_type = other RNA
ccaccgtggggaccacccg

SEQ ID NO: 13317 - RNA, 19 nt, synthetic construct
  source 1..19: mol_type = other RNA
tccggcaggtgaatgagac

SEQ ID NO: 13318 - RNA, 19 nt, synthetic construct
  source 1..19: mol_type = other RNA
gctgcccccgcgccctcag

SEQ ID NO: 13319 - RNA, 19 nt, synthetic construct
  source 1..19: mol_type = other RNA
aaggaggagggcctgatcc

SEQ ID NO: 13320 - RNA, 19 nt, synthetic construct
  source 1..19: mol_type = other RNA
gtcttccaggcccggctgc

SEQ ID NO: 13321 - RNA, 19 nt, synthetic construct
  source 1..19: mol_type = other RNA
acaccccccactgccagcc

SEQ ID NO: 13322 - RNA, 19 nt, synthetic construct
  source 1..19: mol_type = other RNA
gctggaggggatggcggag

SEQ ID NO: 13323 - RNA, 19 nt, synthetic construct
  source 1..19: mol_type = other RNA
gtgcaggcctgcccctgcg

SEQ ID NO: 13324 - RNA, 19 nt, synthetic construct
  source 1..19: mol_type = other RNA
aggcctgcccctgcgtggg

SEQ ID NO: 13325 - RNA, 19 nt, synthetic construct
  source 1..19: mol_type = other RNA
tcaggaggatgcctgcaac

SEQ ID NO: 13326 - RNA, 19 nt, synthetic construct
  source 1..19: mol_type = other RNA
caggaggatgcctgcaaca

SEQ ID NO: 13327 - RNA, 19 nt, synthetic construct
  source 1..19: mol_type = other RNA
gcagaaccaccgagtcacc

SEQ ID NO: 13328 - RNA, 19 nt, synthetic construct
  source 1..19: mol_type = other RNA
cgcgtgccggacgctggtg

SEQ ID NO: 13329 - RNA, 19 nt, synthetic construct
  source 1..19: mol_type = other RNA
gagctggatcccaaatacg

SEQ ID NO: 13330 - RNA, 19 nt, synthetic construct
  source 1..19: mol_type = other RNA
aatgcagggcacaccatgg

SEQ ID NO: 13331 - RNA, 19 nt, synthetic construct
  source 1..19: mol_type = other RNA
cctacgcccaggcctgcca

SEQ ID NO: 13332 - RNA, 19 nt, synthetic construct
  source 1..19: mol_type = other RNA
gctctgtgatctgatgctg

SEQ ID NO: 13333 - RNA, 19 nt, synthetic construct
  source 1..19: mol_type = other RNA
ccaccgcctgggtccccca

SEQ ID NO: 13334 - RNA, 19 nt, synthetic construct
  source 1..19: mol_type = other RNA
agcgagctgtccacctctc

SEQ ID NO: 13335 - RNA, 19 nt, synthetic construct
  source 1..19: mol_type = other RNA
agggcgccactcaggagtc

SEQ ID NO: 13336 - RNA, 19 nt, synthetic construct
  source 1..19: mol_type = other RNA
gcccgtccccgtcccccca

SEQ ID NO: 13337 - RNA, 19 nt, synthetic construct
  source 1..19: mol_type = other RNA
cccgctgcccttgccggcc

SEQ ID NO: 13338 - RNA, 19 nt, synthetic construct
  source 1..19: mol_type = other RNA
ccgctgcccttgccggccg

SEQ ID NO: 13339 - RNA, 19 nt, synthetic construct
  source 1..19: mol_type = other RNA
ctgagctgcggaagtgcgg

SEQ ID NO: 13340 - RNA, 19 nt, synthetic construct
  source 1..19: mol_type = other RNA
actcgggtggcgactgcga

SEQ ID NO: 13341 - RNA, 19 nt, synthetic construct
  source 1..19: mol_type = other RNA
tcgggtggcgactgcgagt

SEQ ID NO: 13342 - RNA, 19 nt, synthetic construct
  source 1..19: mol_type = other RNA
gcaccacctggacccgcct

SEQ ID NO: 13343 - RNA, 19 nt, synthetic construct
  source 1..19: mol_type = other RNA
tccagcccagggacggcac

SEQ ID NO: 13344 - RNA, 19 nt, synthetic construct
  source 1..19: mol_type = other RNA
gactccctcctctgcccta

SEQ ID NO: 13345 - RNA, 19 nt, synthetic construct
  source 1..19: mol_type = other RNA
gacgaccaccccgggccac

SEQ ID NO: 13346 - RNA, 19 nt, synthetic construct
  source 1..19: mol_type = other RNA
gcaccacctggacccgcct

SEQ ID NO: 13347 - RNA, 19 nt, synthetic construct
  source 1..19: mol_type = other RNA
gactccctcctctgcccta

SEQ ID NO: 13348 - RNA, 19 nt, synthetic construct
  source 1..19: mol_type = other RNA
ccctgtcccccagcagtcc

SEQ ID NO: 13349 - RNA, 19 nt, synthetic construct
  source 1..19: mol_type = other RNA
gacgaccaccccgggccac

SEQ ID NO: 13350 - RNA, 19 nt, synthetic construct
  source 1..19: mol_type = other RNA
catggccaccatgtccaca

SEQ ID NO: 13351 - RNA, 19 nt, synthetic construct
  source 1..19: mol_type = other RNA
tccagcccagggacggcac

SEQ ID NO: 13352 - RNA, 19 nt, synthetic construct
  source 1..19: mol_type = other RNA
gactccctcctctgcccta

SEQ ID NO: 13353 - RNA, 19 nt, synthetic construct
  source 1..19: mol_type = other RNA
gacgaccaccccgggccac

SEQ ID NO: 13354 - RNA, 19 nt, synthetic construct
  source 1..19: mol_type = other RNA
gcaccacctggacccgcct

SEQ ID NO: 13355 - RNA, 19 nt, synthetic construct
  source 1..19: mol_type = other RNA
acggtgaccccctcctccg

SEQ ID NO: 13356 - RNA, 19 nt, synthetic construct
  source 1..19: mol_type = other RNA
cccatcactgatcaccacg

SEQ ID NO: 13357 - RNA, 19 nt, synthetic construct
  source 1..19: mol_type = other RNA
gactccctcctctgcccta

SEQ ID NO: 13358 - RNA, 19 nt, synthetic construct
  source 1..19: mol_type = other RNA
ccctgtcccccagcagtcc

SEQ ID NO: 13359 - RNA, 19 nt, synthetic construct
  source 1..19: mol_type = other RNA
gacgaccaccccgggccac

SEQ ID NO: 13360 - RNA, 19 nt, synthetic construct
  source 1..19: mol_type = other RNA
gcaccacctggacccgcct

SEQ ID NO: 13361 - RNA, 19 nt, synthetic construct
  source 1..19: mol_type = other RNA
tccagcccagggacggcac

SEQ ID NO: 13362 - RNA, 19 nt, synthetic construct
  source 1..19: mol_type = other RNA
cggagccccccggcctgtg

SEQ ID NO: 13363 - RNA, 19 nt, synthetic construct
  source 1..19: mol_type = other RNA
ctggggcagacaggctggt

SEQ ID NO: 13364 - RNA, 19 nt, synthetic construct
  source 1..19: mol_type = other RNA
acctccacagtgcttacca

SEQ ID NO: 13365 - RNA, 19 nt, synthetic construct
  source 1..19: mol_type = other RNA
acctccacagtgcttacca

SEQ ID NO: 13366 - RNA, 19 nt, synthetic construct
  source 1..19: mol_type = other RNA
acctccacagtgcttacca

SEQ ID NO: 13367 - RNA, 19 nt, synthetic construct
  source 1..19: mol_type = other RNA
gaggccactgctgtctgag

SEQ ID NO: 13368 - RNA, 19 nt, synthetic construct
  source 1..19: mol_type = other RNA
cgatgggcttggcgcctgc

SEQ ID NO: 13369 - RNA, 19 nt, synthetic construct
  source 1..19: mol_type = other RNA
cagaccaccacacccatgg

SEQ ID NO: 13370 - RNA, 19 nt, synthetic construct
  source 1..19: mol_type = other RNA
cagccccgcagccccggtg

SEQ ID NO: 13371 - RNA, 19 nt, synthetic construct
  source 1..19: mol_type = other RNA
tccagtgctgacaagcaca

SEQ ID NO: 13372 - RNA, 19 nt, synthetic construct
  source 1..19: mol_type = other RNA
tccagtgctgacaagcaca

SEQ ID NO: 13373 - RNA, 19 nt, synthetic construct
  source 1..19: mol_type = other RNA
tccagtgctgacaagcaca

SEQ ID NO: 13374 - RNA, 19 nt, synthetic construct
  source 1..19: mol_type = other RNA
atgcccacaacgccaggct

SEQ ID NO: 13375 - RNA, 19 nt, synthetic construct
  source 1..19: mol_type = other RNA
gccgaacaccatggccacc

SEQ ID NO: 13376 - RNA, 19 nt, synthetic construct
  source 1..19: mol_type = other RNA
ctacaactgcagccactgg

SEQ ID NO: 13377 - RNA, 19 nt, synthetic construct
  source 1..19: mol_type = other RNA
ctacaactgcagccactgg

SEQ ID NO: 13378 - RNA, 19 nt, synthetic construct
  source 1..19: mol_type = other RNA
cgagaccgaggtcaacatc

SEQ ID NO: 13379 - RNA, 19 nt, synthetic construct
  source 1..19: mol_type = other RNA
catgaaaaccttgggcctc

SEQ ID NO: 13380 - RNA, 19 nt, synthetic construct
  source 1..19: mol_type = other RNA
ggagtgggggctgcattgc

SEQ ID NO: 13381 - RNA, 19 nt, synthetic construct
  source 1..19: mol_type = other RNA
gccaccatgtccacagcca

SEQ ID NO: 13382 - RNA, 19 nt, synthetic construct
  source 1..19: mol_type = other RNA
gccaccatgtccacagcca

SEQ ID NO: 13383 - RNA, 19 nt, synthetic construct
  source 1..19: mol_type = other RNA
cggggaccacccacacccc

SEQ ID NO: 13384 - RNA, 19 nt, synthetic construct
  source 1..19: mol_type = other RNA
ctgcagccactggccccac

SEQ ID NO: 13385 - RNA, 19 nt, synthetic construct
  source 1..19: mol_type = other RNA
gccaccatgtccacagcca

SEQ ID NO: 13386 - RNA, 19 nt, synthetic construct
  source 1..19: mol_type = other RNA
acacgggcggtccctgccc

SEQ ID NO: 13387 - RNA, 19 nt, synthetic construct
  source 1..19: mol_type = other RNA
cacgggcggtccctgcccc

SEQ ID NO: 13388 - RNA, 19 nt, synthetic construct
  source 1..19: mol_type = other RNA
gccaccatgtccacagcca

SEQ ID NO: 13389 - RNA, 19 nt, synthetic construct
  source 1..19: mol_type = other RNA
cggggaccacccacacccc

SEQ ID NO: 13390 - RNA, 19 nt, synthetic construct
  source 1..19: mol_type = other RNA
ctgcagccactggccccac

SEQ ID NO: 13391 - RNA, 19 nt, synthetic construct
  source 1..19: mol_type = other RNA
gccaccatgtccacagcca

SEQ ID NO: 13392 - RNA, 19 nt, synthetic construct
  source 1..19: mol_type = other RNA
gccactatgcccacagcca

SEQ ID NO: 13393 - RNA, 19 nt, synthetic construct
  source 1..19: mol_type = other RNA
ccacccgcacccctgcagt

SEQ ID NO: 13394 - RNA, 19 nt, synthetic construct
  source 1..19: mol_type = other RNA
cttcaccgtgctggctgag

SEQ ID NO: 13395 - RNA, 19 nt, synthetic construct
  source 1..19: mol_type = other RNA
acccagcaagacccgcacc

SEQ ID NO: 13396 - RNA, 19 nt, synthetic construct
  source 1..19: mol_type = other RNA
acccagcaagacccgcacc

SEQ ID NO: 13397 - RNA, 19 nt, synthetic construct
  source 1..19: mol_type = other RNA
acccagcaagacccgcacc

SEQ ID NO: 13398 - RNA, 19 nt, synthetic construct
  source 1..19: mol_type = other RNA
acccagcaagacccgcacc

SEQ ID NO: 13399 - RNA, 19 nt, synthetic construct
  source 1..19: mol_type = other RNA
caatcagcactgtgacatt

SEQ ID NO: 13400 - RNA, 19 nt, synthetic construct
  source 1..19: mol_type = other RNA
cggcgtgcttgtgtctgtg

SEQ ID NO: 13401 - RNA, 19 nt, synthetic construct
  source 1..19: mol_type = other RNA
acccgctgcccttgccggc

SEQ ID NO: 13402 - RNA, 19 nt, synthetic construct
  source 1..19: mol_type = other RNA
catgggggctgtgagtggc

SEQ ID NO: 13403 - RNA, 19 nt, synthetic construct
  source 1..19: mol_type = other RNA
gcaggaaccgtgagcaggt

SEQ ID NO: 13404 - RNA, 19 nt, synthetic construct
  source 1..19: mol_type = other RNA
gcaggaaccgtgagcaggt

SEQ ID NO: 13405 - RNA, 19 nt, synthetic construct
  source 1..19: mol_type = other RNA
gcaggaaccgtgagcaggt

SEQ ID NO: 13406 - RNA, 19 nt, synthetic construct
  source 1..19: mol_type = other RNA
gcaggaaccgtgagcaggt

SEQ ID NO: 13407 - RNA, 19 nt, synthetic construct
  source 1..19: mol_type = other RNA
accacacccgtggccacca

SEQ ID NO: 13408 - RNA, 19 nt, synthetic construct
  source 1..19: mol_type = other RNA
actacatcaaggtcagcat

SEQ ID NO: 13409 - RNA, 19 nt, synthetic construct
  source 1..19: mol_type = other RNA
cggacacctgctccaaccc

SEQ ID NO: 13410 - RNA, 19 nt, synthetic construct
  source 1..19: mol_type = other RNA
actgccccaagtcccagcg

SEQ ID NO: 13411 - RNA, 19 nt, synthetic construct
  source 1..19: mol_type = other RNA
tcgtgcctgtggacggctg

SEQ ID NO: 13412 - RNA, 19 nt, synthetic construct
  source 1..19: mol_type = other RNA
tgggagtgggggctgcatt

SEQ ID NO: 13413 - RNA, 19 nt, synthetic construct
  source 1..19: mol_type = other RNA
tctccccctcctgcccgga

SEQ ID NO: 13414 - RNA, 19 nt, synthetic construct
  source 1..19: mol_type = other RNA
agcccggcctgggaggcgg

SEQ ID NO: 13415 - RNA, 19 nt, synthetic construct
  source 1..19: mol_type = other RNA
gggcacatggcgcccctca

SEQ ID NO: 13416 - RNA, 19 nt, synthetic construct
  source 1..19: mol_type = other RNA
ctccaaagccactccctcc

SEQ ID NO: 13417 - RNA, 19 nt, synthetic construct
  source 1..19: mol_type = other RNA
gggccaccggctctgtggc

SEQ ID NO: 13418 - RNA, 19 nt, synthetic construct
  source 1..19: mol_type = other RNA
ccacggtgaccccctcctc

SEQ ID NO: 13419 - RNA, 19 nt, synthetic construct
  source 1..19: mol_type = other RNA
accacccacacacccccag

SEQ ID NO: 13420 - RNA, 19 nt, synthetic construct
  source 1..19: mol_type = other RNA
tgggctgtgagccccagtg

SEQ ID NO: 13421 - RNA, 19 nt, synthetic construct
  source 1..19: mol_type = other RNA
gggccaccggctctgtggc

SEQ ID NO: 13422 - RNA, 19 nt, synthetic construct
  source 1..19: mol_type = other RNA
ccacggtgaccccctcctc

SEQ ID NO: 13423 - RNA, 19 nt, synthetic construct
  source 1..19: mol_type = other RNA
accacccacacacccccag

SEQ ID NO: 13424 - RNA, 19 nt, synthetic construct
  source 1..19: mol_type = other RNA
tgggctgtgagccccagtg

SEQ ID NO: 13425 - RNA, 19 nt, synthetic construct
  source 1..19: mol_type = other RNA
gccaccagttccaaagcca

SEQ ID NO: 13426 - RNA, 19 nt, synthetic construct
  source 1..19: mol_type = other RNA
gttccaaagccacttcctc

SEQ ID NO: 13427 - RNA, 19 nt, synthetic construct
  source 1..19: mol_type = other RNA
ccacccttccagtgctgac

SEQ ID NO: 13428 - RNA, 19 nt, synthetic construct
  source 1..19: mol_type = other RNA
tcacagagctgaccacagc

SEQ ID NO: 13429 - RNA, 19 nt, synthetic construct
  source 1..19: mol_type = other RNA
cacagagctgaccacagca

SEQ ID NO: 13430 - RNA, 19 nt, synthetic construct
  source 1..19: mol_type = other RNA
acagagctgaccacagcag

SEQ ID NO: 13431 - RNA, 19 nt, synthetic construct
  source 1..19: mol_type = other RNA
aactgcagccactggcccc

SEQ ID NO: 13432 - RNA, 19 nt, synthetic construct
  source 1..19: mol_type = other RNA
accacacccacagtcatca

SEQ ID NO: 13433 - RNA, 19 nt, synthetic construct
  source 1..19: mol_type = other RNA
gggccaccggctctgtggc

SEQ ID NO: 13434 - RNA, 19 nt, synthetic construct
  source 1..19: mol_type = other RNA
ccacggtgaccccctcctc

SEQ ID NO: 13435 - RNA, 19 nt, synthetic construct
  source 1..19: mol_type = other RNA
accacccacacacccccag

SEQ ID NO: 13436 - RNA, 19 nt, synthetic construct
  source 1..19: mol_type = other RNA
cacagccacacccagcaag

SEQ ID NO: 13437 - RNA, 19 nt, synthetic construct
  source 1..19: mol_type = other RNA
gggccaccggctctgtggc

SEQ ID NO: 13438 - RNA, 19 nt, synthetic construct
  source 1..19: mol_type = other RNA
caccacacccacaaccagt

SEQ ID NO: 13439 - RNA, 19 nt, synthetic construct
  source 1..19: mol_type = other RNA
ccacggtgaccccctcctc

SEQ ID NO: 13440 - RNA, 19 nt, synthetic construct
  source 1..19: mol_type = other RNA
accacccacacacccccag

SEQ ID NO: 13441 - RNA, 19 nt, synthetic construct
  source 1..19: mol_type = other RNA
gccaccagttccaaagcca

SEQ ID NO: 13442 - RNA, 19 nt, synthetic construct
  source 1..19: mol_type = other RNA
gttccaaagccacttcctc

SEQ ID NO: 13443 - RNA, 19 nt, synthetic construct
  source 1..19: mol_type = other RNA
ccacccttccagtgctgac

SEQ ID NO: 13444 - RNA, 19 nt, synthetic construct
  source 1..19: mol_type = other RNA
tcacagagctgaccacagc

SEQ ID NO: 13445 - RNA, 19 nt, synthetic construct
  source 1..19: mol_type = other RNA
cacagagctgaccacagca

SEQ ID NO: 13446 - RNA, 19 nt, synthetic construct
  source 1..19: mol_type = other RNA
acagagctgaccacagcag

SEQ ID NO: 13447 - RNA, 19 nt, synthetic construct
  source 1..19: mol_type = other RNA
aactgcagccactggcccc

SEQ ID NO: 13448 - RNA, 19 nt, synthetic construct
  source 1..19: mol_type = other RNA
ctccaaagccactccctcc

SEQ ID NO: 13449 - RNA, 19 nt, synthetic construct
  source 1..19: mol_type = other RNA
gggccaccggctctgtggc

SEQ ID NO: 13450 - RNA, 19 nt, synthetic construct
  source 1..19: mol_type = other RNA
caccacacccacaaccagt

SEQ ID NO: 13451 - RNA, 19 nt, synthetic construct
  source 1..19: mol_type = other RNA
ccacggtgaccccctcctc

SEQ ID NO: 13452 - RNA, 19 nt, synthetic construct
  source 1..19: mol_type = other RNA
ccagctccaaagccacttc

SEQ ID NO: 13453 - RNA, 19 nt, synthetic construct
  source 1..19: mol_type = other RNA
gctccaaagccacttcctc

SEQ ID NO: 13454 - RNA, 19 nt, synthetic construct
  source 1..19: mol_type = other RNA
ccacccttccagtgctgac

SEQ ID NO: 13455 - RNA, 19 nt, synthetic construct
  source 1..19: mol_type = other RNA
caactgcagccactggatc

SEQ ID NO: 13456 - RNA, 19 nt, synthetic construct
  source 1..19: mol_type = other RNA
cctcaccaccctgagaccc

SEQ ID NO: 13457 - RNA, 19 nt, synthetic construct
  source 1..19: mol_type = other RNA
aatcagcactgtgacattg

SEQ ID NO: 13458 - RNA, 19 nt, synthetic construct
  source 1..19: mol_type = other RNA
ggcacaccccccactgcca

SEQ ID NO: 13459 - RNA, 19 nt, synthetic construct
  source 1..19: mol_type = other RNA
tgctgagccaggtctttgc

SEQ ID NO: 13460 - RNA, 19 nt, synthetic construct
  source 1..19: mol_type = other RNA
aacccctgctgccccgaga

SEQ ID NO: 13461 - RNA, 19 nt, synthetic construct
  source 1..19: mol_type = other RNA
ctgcctgtgtgcccgccag

SEQ ID NO: 13462 - RNA, 19 nt, synthetic construct
  source 1..19: mol_type = other RNA
catttgctgaccccacagc

SEQ ID NO: 13463 - RNA, 19 nt, synthetic construct
  source 1..19: mol_type = other RNA
cctgctgccaggagaggcg

SEQ ID NO: 13464 - RNA, 19 nt, synthetic construct
  source 1..19: mol_type = other RNA
cgtggatgagtgtggctgc

SEQ ID NO: 13465 - RNA, 19 nt, synthetic construct
  source 1..19: mol_type = other RNA
gcccatggctcccccacac

SEQ ID NO: 13466 - RNA, 19 nt, synthetic construct
  source 1..19: mol_type = other RNA
aggaggccactgctgtctg

SEQ ID NO: 13467 - RNA, 19 nt, synthetic construct
  source 1..19: mol_type = other RNA
ggaggccactgctgtctga

SEQ ID NO: 13468 - RNA, 19 nt, synthetic construct
  source 1..19: mol_type = other RNA
acggccggagcgcccgcgc

SEQ ID NO: 13469 - RNA, 19 nt, synthetic construct
  source 1..19: mol_type = other RNA
gcagcacctggggtgactt

SEQ ID NO: 13470 - RNA, 19 nt, synthetic construct
  source 1..19: mol_type = other RNA
atcaaggtcagcatccggc

SEQ ID NO: 13471 - RNA, 19 nt, synthetic construct
  source 1..19: mol_type = other RNA
accgcaccctgctggggcc

SEQ ID NO: 13472 - RNA, 19 nt, synthetic construct
  source 1..19: mol_type = other RNA
ccccggacctgccccctca

SEQ ID NO: 13473 - RNA, 19 nt, synthetic construct
  source 1..19: mol_type = other RNA
gcacggtgctggatgacat

SEQ ID NO: 13474 - RNA, 19 nt, synthetic construct
  source 1..19: mol_type = other RNA
tctcgcgctgccactccat

SEQ ID NO: 13475 - RNA, 19 nt, synthetic construct
  source 1..19: mol_type = other RNA
gaggactgcccctgtgtgc

SEQ ID NO: 13476 - RNA, 19 nt, synthetic construct
  source 1..19: mol_type = other RNA
cctgggtcccccactccac

SEQ ID NO: 13477 - RNA, 19 nt, synthetic construct
  source 1..19: mol_type = other RNA
ccagccagggcacgacccg

SEQ ID NO: 13478 - RNA, 19 nt, synthetic construct
  source 1..19: mol_type = other RNA
gcactgagaagcacagcca

SEQ ID NO: 13479 - RNA, 19 nt, synthetic construct
  source 1..19: mol_type = other RNA
ccaccggctctgtggccac

SEQ ID NO: 13480 - RNA, 19 nt, synthetic construct
  source 1..19: mol_type = other RNA
ccccaggaacagctcacac

SEQ ID NO: 13481 - RNA, 19 nt, synthetic construct
  source 1..19: mol_type = other RNA
cacagagccttccacggtg

SEQ ID NO: 13482 - RNA, 19 nt, synthetic construct
  source 1..19: mol_type = other RNA
acggtggtgaccatgggct

SEQ ID NO: 13483 - RNA, 19 nt, synthetic construct
  source 1..19: mol_type = other RNA
agcactacagccaccgtga

SEQ ID NO: 13484 - RNA, 19 nt, synthetic construct
  source 1..19: mol_type = other RNA
gcactgagaagcacagcca

SEQ ID NO: 13485 - RNA, 19 nt, synthetic construct
  source 1..19: mol_type = other RNA
ccaccggctctgtggccac

SEQ ID NO: 13486 - RNA, 19 nt, synthetic construct
  source 1..19: mol_type = other RNA
ccccaggaacagctcacac

SEQ ID NO: 13487 - RNA, 19 nt, synthetic construct
  source 1..19: mol_type = other RNA
gcaccttgggcaccaccca

SEQ ID NO: 13488 - RNA, 19 nt, synthetic construct
  source 1..19: mol_type = other RNA
acggtggtgaccatgggct

SEQ ID NO: 13489 - RNA, 19 nt, synthetic construct
  source 1..19: mol_type = other RNA
caccgggaccctcccagaa

SEQ ID NO: 13490 - RNA, 19 nt, synthetic construct
  source 1..19: mol_type = other RNA
agcactacagccaccgtga

SEQ ID NO: 13491 - RNA, 19 nt, synthetic construct
  source 1..19: mol_type = other RNA
ccacacccacagtcatcag

SEQ ID NO: 13492 - RNA, 19 nt, synthetic construct
  source 1..19: mol_type = other RNA
cacacccacagtcatcagc

SEQ ID NO: 13493 - RNA, 19 nt, synthetic construct
  source 1..19: mol_type = other RNA
gcactgagaagcacagcca

SEQ ID NO: 13494 - RNA, 19 nt, synthetic construct
  source 1..19: mol_type = other RNA
ccaccggctctgtggccac

SEQ ID NO: 13495 - RNA, 19 nt, synthetic construct
  source 1..19: mol_type = other RNA
ccccaggaacagctcacac

SEQ ID NO: 13496 - RNA, 19 nt, synthetic construct
  source 1..19: mol_type = other RNA
cacagagccttccacggtg

SEQ ID NO: 13497 - RNA, 19 nt, synthetic construct
  source 1..19: mol_type = other RNA
agcactacagccaccgtga

SEQ ID NO: 13498 - RNA, 19 nt, synthetic construct
  source 1..19: mol_type = other RNA
gcactgagaagcacagcca

SEQ ID NO: 13499 - RNA, 19 nt, synthetic construct
  source 1..19: mol_type = other RNA
ccaccggctctgtggccac

SEQ ID NO: 13500 - RNA, 19 nt, synthetic construct
  source 1..19: mol_type = other RNA
cctcttccaccccaggaac

SEQ ID NO: 13501 - RNA, 19 nt, synthetic construct
  source 1..19: mol_type = other RNA
ccccaggaacagctcacac

SEQ ID NO: 13502 - RNA, 19 nt, synthetic construct
  source 1..19: mol_type = other RNA
ctccgtcccggggaccacc

SEQ ID NO: 13503 - RNA, 19 nt, synthetic construct
  source 1..19: mol_type = other RNA
gcaccttgggcaccaccca

SEQ ID NO: 13504 - RNA, 19 nt, synthetic construct
  source 1..19: mol_type = other RNA
cccaaagtgctgaccagcc

SEQ ID NO: 13505 - RNA, 19 nt, synthetic construct
  source 1..19: mol_type = other RNA
aagtgctgaccagcccggc

SEQ ID NO: 13506 - RNA, 19 nt, synthetic construct
  source 1..19: mol_type = other RNA
caccgggaccctcccagaa

SEQ ID NO: 13507 - RNA, 19 nt, synthetic construct
  source 1..19: mol_type = other RNA
agcactacagccaccgtga

SEQ ID NO: 13508 - RNA, 19 nt, synthetic construct
  source 1..19: mol_type = other RNA
gcactgagaagcacagcca

SEQ ID NO: 13509 - RNA, 19 nt, synthetic construct
  source 1..19: mol_type = other RNA
ccaccggctctgtggccac

SEQ ID NO: 13510 - RNA, 19 nt, synthetic construct
  source 1..19: mol_type = other RNA
ccccaggaacagctcacac

SEQ ID NO: 13511 - RNA, 19 nt, synthetic construct
  source 1..19: mol_type = other RNA
accatgacaagggccacca

SEQ ID NO: 13512 - RNA, 19 nt, synthetic construct
  source 1..19: mol_type = other RNA
ctgggaacagctcacaccc

SEQ ID NO: 13513 - RNA, 19 nt, synthetic construct
  source 1..19: mol_type = other RNA
cactgtcaccatggtgcat

SEQ ID NO: 13514 - RNA, 19 nt, synthetic construct
  source 1..19: mol_type = other RNA
gtgtcggtgcagtgcaagc

SEQ ID NO: 13515 - RNA, 19 nt, synthetic construct
  source 1..19: mol_type = other RNA
tgacgcccagggtcagccc

SEQ ID NO: 13516 - RNA, 19 nt, synthetic construct
  source 1..19: mol_type = other RNA
caggcgcccttccctgcca

SEQ ID NO: 13517 - RNA, 19 nt, synthetic construct
  source 1..19: mol_type = other RNA
ccatgtggacaactgcacc

SEQ ID NO: 13518 - RNA, 19 nt, synthetic construct
  source 1..19: mol_type = other RNA
tgctgccaggagaggcggg

SEQ ID NO: 13519 - RNA, 19 nt, synthetic construct
  source 1..19: mol_type = other RNA
ccatcctgcacacctacac

SEQ ID NO: 13520 - RNA, 19 nt, synthetic construct
  source 1..19: mol_type = other RNA
atggctcccccacacaccc

SEQ ID NO: 13521 - RNA, 19 nt, synthetic construct
  source 1..19: mol_type = other RNA
ccgtgccagcccccaggat

SEQ ID NO: 13522 - RNA, 19 nt, synthetic construct
  source 1..19: mol_type = other RNA
gcagggcggggcccacatc

SEQ ID NO: 13523 - RNA, 19 nt, synthetic construct
  source 1..19: mol_type = other RNA
tgtgtgcccgcccaggagt

SEQ ID NO: 13524 - RNA, 19 nt, synthetic construct
  source 1..19: mol_type = other RNA
agcactgagaagcacagcc

SEQ ID NO: 13525 - RNA, 19 nt, synthetic construct
  source 1..19: mol_type = other RNA
agcactgagaagcacagcc

SEQ ID NO: 13526 - RNA, 19 nt, synthetic construct
  source 1..19: mol_type = other RNA
cagggccacctccaggacc

SEQ ID NO: 13527 - RNA, 19 nt, synthetic construct
  source 1..19: mol_type = other RNA
agcactgagaagcacagcc

SEQ ID NO: 13528 - RNA, 19 nt, synthetic construct
  source 1..19: mol_type = other RNA
caccacaaccagggccacc

SEQ ID NO: 13529 - RNA, 19 nt, synthetic construct
  source 1..19: mol_type = other RNA
agcactgagaagcacagcc

SEQ ID NO: 13530 - RNA, 19 nt, synthetic construct
  source 1..19: mol_type = other RNA
caccacaaccagggccacc

SEQ ID NO: 13531 - RNA, 19 nt, synthetic construct
  source 1..19: mol_type = other RNA
agcactgagaagcacagcc

SEQ ID NO: 13532 - RNA, 19 nt, synthetic construct
  source 1..19: mol_type = other RNA
cctgagacccactggcttc

SEQ ID NO: 13533 - RNA, 19 nt, synthetic construct
  source 1..19: mol_type = other RNA
cccaggcgcccttccctgc

SEQ ID NO: 13534 - RNA, 19 nt, synthetic construct
  source 1..19: mol_type = other RNA
ctcagccatcctgcacacc

SEQ ID NO: 13535 - RNA, 19 nt, synthetic construct
  source 1..19: mol_type = other RNA
ttcccggcccaggaggcca

SEQ ID NO: 13536 - RNA, 19 nt, synthetic construct
  source 1..19: mol_type = other RNA
ccctgagaacagctccccc

SEQ ID NO: 13537 - RNA, 19 nt, synthetic construct
  source 1..19: mol_type = other RNA
tgtggatcagcacaaccac

SEQ ID NO: 13538 - RNA, 19 nt, synthetic construct
  source 1..19: mol_type = other RNA
ggccaccggctccaccacc

SEQ ID NO: 13539 - RNA, 19 nt, synthetic construct
  source 1..19: mol_type = other RNA
tgtggatcagcacaaccac

SEQ ID NO: 13540 - RNA, 19 nt, synthetic construct
  source 1..19: mol_type = other RNA
cacccacaaccagaggttc

SEQ ID NO: 13541 - RNA, 19 nt, synthetic construct
  source 1..19: mol_type = other RNA
ggccaccggctccaccacc

SEQ ID NO: 13542 - RNA, 19 nt, synthetic construct
  source 1..19: mol_type = other RNA
accaccacacccatggcca

SEQ ID NO: 13543 - RNA, 19 nt, synthetic construct
  source 1..19: mol_type = other RNA
tgctgaccacgaaggccac

SEQ ID NO: 13544 - RNA, 19 nt, synthetic construct
  source 1..19: mol_type = other RNA
tgtggatcagcacaaccac

SEQ ID NO: 13545 - RNA, 19 nt, synthetic construct
  source 1..19: mol_type = other RNA
agccaccggctccaccacc

SEQ ID NO: 13546 - RNA, 19 nt, synthetic construct
  source 1..19: mol_type = other RNA
tgtggatcagcacaaccac

SEQ ID NO: 13547 - RNA, 19 nt, synthetic construct
  source 1..19: mol_type = other RNA
ggccaccggctccaccacc

SEQ ID NO: 13548 - RNA, 19 nt, synthetic construct
  source 1..19: mol_type = other RNA
tgctgaccacgaaggccac

SEQ ID NO: 13549 - RNA, 19 nt, synthetic construct
  source 1..19: mol_type = other RNA
tgtggatcagcacaaccac

SEQ ID NO: 13550 - RNA, 19 nt, synthetic construct
  source 1..19: mol_type = other RNA
ggccaccggctccaccacc

SEQ ID NO: 13551 - RNA, 19 nt, synthetic construct
  source 1..19: mol_type = other RNA
ctactgcacggcctctgcc

SEQ ID NO: 13552 - RNA, 19 nt, synthetic construct
  source 1..19: mol_type = other RNA
gctcagccatcctgcacac

SEQ ID NO: 13553 - RNA, 19 nt, synthetic construct
  source 1..19: mol_type = other RNA
caaataaaccctgagcatt

SEQ ID NO: 13554 - RNA, 19 nt, synthetic construct
  source 1..19: mol_type = other RNA
cagcccccaggatgggtgc

SEQ ID NO: 13555 - RNA, 19 nt, synthetic construct
  source 1..19: mol_type = other RNA
caacggctccgtcctcatc

SEQ ID NO: 13556 - RNA, 19 nt, synthetic construct
  source 1..19: mol_type = other RNA
gaggagggcatctgccacc

SEQ ID NO: 13557 - RNA, 19 nt, synthetic construct
  source 1..19: mol_type = other RNA
tggaaggctgctacccgaa

SEQ ID NO: 13558 - RNA, 19 nt, synthetic construct
  source 1..19: mol_type = other RNA
ggaaggctgctacccgaag

SEQ ID NO: 13559 - RNA, 19 nt, synthetic construct
  source 1..19: mol_type = other RNA
ccactgcaggggacgtgcc

SEQ ID NO: 13560 - RNA, 19 nt, synthetic construct
  source 1..19: mol_type = other RNA
cccagatacacaagcaccc

SEQ ID NO: 13561 - RNA, 19 nt, synthetic construct
  source 1..19: mol_type = other RNA
gcacgcccaggacagagac

SEQ ID NO: 13562 - RNA, 19 nt, synthetic construct
  source 1..19: mol_type = other RNA
accacaactggggccaccg

SEQ ID NO: 13563 - RNA, 19 nt, synthetic construct
  source 1..19: mol_type = other RNA
ggactttggcctggtctgc

SEQ ID NO: 13564 - RNA, 19 nt, synthetic construct
  source 1..19: mol_type = other RNA
aagccactcccttctccag

SEQ ID NO: 13565 - RNA, 19 nt, synthetic construct
  source 1..19: mol_type = other RNA
caacccctcctcaactcca

SEQ ID NO: 13566 - RNA, 19 nt, synthetic construct
  source 1..19: mol_type = other RNA
ggactttggcctggtctgc

SEQ ID NO: 13567 - RNA, 19 nt, synthetic construct
  source 1..19: mol_type = other RNA
aaatccacagctaccagct

SEQ ID NO: 13568 - RNA, 19 nt, synthetic construct
  source 1..19: mol_type = other RNA
tccctgggcaccgcctgga

SEQ ID NO: 13569 - RNA, 19 nt, synthetic construct
  source 1..19: mol_type = other RNA
caacccctcctcaactcca

SEQ ID NO: 13570 - RNA, 19 nt, synthetic construct
  source 1..19: mol_type = other RNA
ggactttggcctggtctgc

SEQ ID NO: 13571 - RNA, 19 nt, synthetic construct
  source 1..19: mol_type = other RNA
aagccactcccttctccag

SEQ ID NO: 13572 - RNA, 19 nt, synthetic construct
  source 1..19: mol_type = other RNA
caacccctcctcaactcca

SEQ ID NO: 13573 - RNA, 19 nt, synthetic construct
  source 1..19: mol_type = other RNA
ggactttggcctggtctgc

SEQ ID NO: 13574 - RNA, 19 nt, synthetic construct
  source 1..19: mol_type = other RNA
cagtccagggactgcaact

SEQ ID NO: 13575 - RNA, 19 nt, synthetic construct
  source 1..19: mol_type = other RNA
caacccctcctcaactcca

SEQ ID NO: 13576 - RNA, 19 nt, synthetic construct
  source 1..19: mol_type = other RNA
aagcacagccacaaaatcc

SEQ ID NO: 13577 - RNA, 19 nt, synthetic construct
  source 1..19: mol_type = other RNA
aaatccacagctaccagct

SEQ ID NO: 13578 - RNA, 19 nt, synthetic construct
  source 1..19: mol_type = other RNA
ctgtggaccacgtggaccg

SEQ ID NO: 13579 - RNA, 19 nt, synthetic construct
  source 1..19: mol_type = other RNA
ccatgtccaccatgtccac

SEQ ID NO: 13580 - RNA, 19 nt, synthetic construct
  source 1..19: mol_type = other RNA
gccaccaattccacggcca

SEQ ID NO: 13581 - RNA, 19 nt, synthetic construct
  source 1..19: mol_type = other RNA
ctgcagcatgtggggcggc

SEQ ID NO: 13582 - RNA, 19 nt, synthetic construct
  source 1..19: mol_type = other RNA
tgcccgtccccgtcccccc

SEQ ID NO: 13583 - RNA, 19 nt, synthetic construct
  source 1..19: mol_type = other RNA
ggtgtgcagcacctggggt

SEQ ID NO: 13584 - RNA, 19 nt, synthetic construct
  source 1..19: mol_type = other RNA
ggggctggtgctggaggcg

SEQ ID NO: 13585 - RNA, 19 nt, synthetic construct
  source 1..19: mol_type = other RNA
tggtgctggaggcgtccaa

SEQ ID NO: 13586 - RNA, 19 nt, synthetic construct
  source 1..19: mol_type = other RNA
gccctgctggagctggatc

SEQ ID NO: 13587 - RNA, 19 nt, synthetic construct
  source 1..19: mol_type = other RNA
gccaggctgaccccgctcc

SEQ ID NO: 13588 - RNA, 19 nt, synthetic construct
  source 1..19: mol_type = other RNA
tgcacggacgaggagggca

SEQ ID NO: 13589 - RNA, 19 nt, synthetic construct
  source 1..19: mol_type = other RNA
cggacgaggagggcatctg

SEQ ID NO: 13590 - RNA, 19 nt, synthetic construct
  source 1..19: mol_type = other RNA
ctggaggtgccctgagctc

SEQ ID NO: 13591 - RNA, 19 nt, synthetic construct
  source 1..19: mol_type = other RNA
tgcacggacacctgctcca

SEQ ID NO: 13592 - RNA, 19 nt, synthetic construct
  source 1..19: mol_type = other RNA
cgcgcgcagctctgcgagg

SEQ ID NO: 13593 - RNA, 19 nt, synthetic construct
  source 1..19: mol_type = other RNA
gcagctctgcgaggaccac

SEQ ID NO: 13594 - RNA, 19 nt, synthetic construct
  source 1..19: mol_type = other RNA
ccaatgccaggaacagctt

SEQ ID NO: 13595 - RNA, 19 nt, synthetic construct
  source 1..19: mol_type = other RNA
cgcgctgccactccatcat

SEQ ID NO: 13596 - RNA, 19 nt, synthetic construct
  source 1..19: mol_type = other RNA
ctgccccaagtcccagcgc

SEQ ID NO: 13597 - RNA, 19 nt, synthetic construct
  source 1..19: mol_type = other RNA
gcctgccagcccacttgcc

SEQ ID NO: 13598 - RNA, 19 nt, synthetic construct
  source 1..19: mol_type = other RNA
tccttcgtgcctgtggacg

SEQ ID NO: 13599 - RNA, 19 nt, synthetic construct
  source 1..19: mol_type = other RNA
acggctgcacctgccccgc

SEQ ID NO: 13600 - RNA, 19 nt, synthetic construct
  source 1..19: mol_type = other RNA
cggctgcacctgccccgcg

SEQ ID NO: 13601 - RNA, 19 nt, synthetic construct
  source 1..19: mol_type = other RNA
gtgctggctcctggagagg

SEQ ID NO: 13602 - RNA, 19 nt, synthetic construct
  source 1..19: mol_type = other RNA
tgctggctcctggagaggt

SEQ ID NO: 13603 - RNA, 19 nt, synthetic construct
  source 1..19: mol_type = other RNA
gtgcagcccccatggtgta

SEQ ID NO: 13604 - RNA, 19 nt, synthetic construct
  source 1..19: mol_type = other RNA
acacctgcacctgcaggaa

SEQ ID NO: 13605 - RNA, 19 nt, synthetic construct
  source 1..19: mol_type = other RNA
tgcacctgcaggaaccgga

SEQ ID NO: 13606 - RNA, 19 nt, synthetic construct
  source 1..19: mol_type = other RNA
cagctttgaaggcagctgc

SEQ ID NO: 13607 - RNA, 19 nt, synthetic construct
  source 1..19: mol_type = other RNA
tgaaggcagctgcgagtac

SEQ ID NO: 13608 - RNA, 19 nt, synthetic construct
  source 1..19: mol_type = other RNA
gctgatcctccaagagggg

SEQ ID NO: 13609 - RNA, 19 nt, synthetic construct
  source 1..19: mol_type = other RNA
gggccgggtggggacccac

SEQ ID NO: 13610 - RNA, 19 nt, synthetic construct
  source 1..19: mol_type = other RNA
ccctcctgcccggacgccc

SEQ ID NO: 13611 - RNA, 19 nt, synthetic construct
  source 1..19: mol_type = other RNA
cctgccccttgttctgtga

SEQ ID NO: 13612 - RNA, 19 nt, synthetic construct
  source 1..19: mol_type = other RNA
tgggggctgtgagtggcac

SEQ ID NO: 13613 - RNA, 19 nt, synthetic construct
  source 1..19: mol_type = other RNA
cctggaaggctgctacccg

SEQ ID NO: 13614 - RNA, 19 nt, synthetic construct
  source 1..19: mol_type = other RNA
ctggaaggctgctacccga

SEQ ID NO: 13615 - RNA, 19 nt, synthetic construct
  source 1..19: mol_type = other RNA
gcaccatcatcaggaaggc

SEQ ID NO: 13616 - RNA, 19 nt, synthetic construct
  source 1..19: mol_type = other RNA
accatcatcaggaaggctg

SEQ ID NO: 13617 - RNA, 19 nt, synthetic construct
  source 1..19: mol_type = other RNA
catcaggaaggctgtggca

SEQ ID NO: 13618 - RNA, 19 nt, synthetic construct
  source 1..19: mol_type = other RNA
gccattcaccttcaccacc

SEQ ID NO: 13619 - RNA, 19 nt, synthetic construct
  source 1..19: mol_type = other RNA
cagagcccggcctgggagg

SEQ ID NO: 13620 - RNA, 19 nt, synthetic construct
  source 1..19: mol_type = other RNA
gtaccaggtatgccctgtg

SEQ ID NO: 13621 - RNA, 19 nt, synthetic construct
  source 1..19: mol_type = other RNA
tatgccctgtgctggctga

SEQ ID NO: 13622 - RNA, 19 nt, synthetic construct
  source 1..19: mol_type = other RNA
gtgaccgcatgcgggggct

SEQ ID NO: 13623 - RNA, 19 nt, synthetic construct
  source 1..19: mol_type = other RNA
cgccaacagccaacagagt

SEQ ID NO: 13624 - RNA, 19 nt, synthetic construct
  source 1..19: mol_type = other RNA
gggtccagctcaggccccg

SEQ ID NO: 13625 - RNA, 19 nt, synthetic construct
  source 1..19: mol_type = other RNA
tcagggccgctggagggca

SEQ ID NO: 13626 - RNA, 19 nt, synthetic construct
  source 1..19: mol_type = other RNA
atgccagcagcctaaggac

SEQ ID NO: 13627 - RNA, 19 nt, synthetic construct
  source 1..19: mol_type = other RNA
ctggcacaggtggggcaga

SEQ ID NO: 13628 - RNA, 19 nt, synthetic construct
  source 1..19: mol_type = other RNA
actgggagcaggagggcgt

SEQ ID NO: 13629 - RNA, 19 nt, synthetic construct
  source 1..19: mol_type = other RNA
ccccggccagcaccacagc

SEQ ID NO: 13630 - RNA, 19 nt, synthetic construct
  source 1..19: mol_type = other RNA
ggggtggccacatccaccc

SEQ ID NO: 13631 - RNA, 19 nt, synthetic construct
  source 1..19: mol_type = other RNA
aggcacagccagcaccgct

SEQ ID NO: 13632 - RNA, 19 nt, synthetic construct
  source 1..19: mol_type = other RNA
cgagaccagcacgcccagg

SEQ ID NO: 13633 - RNA, 19 nt, synthetic construct
  source 1..19: mol_type = other RNA
ccaccaccagccagggcac

SEQ ID NO: 13634 - RNA, 19 nt, synthetic construct
  source 1..19: mol_type = other RNA
cctccaccctgagaacagc

SEQ ID NO: 13635 - RNA, 19 nt, synthetic construct
  source 1..19: mol_type = other RNA
cagctccaaagccactccc

SEQ ID NO: 13636 - RNA, 19 nt, synthetic construct
  source 1..19: mol_type = other RNA
cttccagcactgagaagca

SEQ ID NO: 13637 - RNA, 19 nt, synthetic construct
  source 1..19: mol_type = other RNA
cgccacggccaccacaact

SEQ ID NO: 13638 - RNA, 19 nt, synthetic construct
  source 1..19: mol_type = other RNA
tagcacacagaccagtggt

SEQ ID NO: 13639 - RNA, 19 nt, synthetic construct
  source 1..19: mol_type = other RNA
cccatcactgaccaccacg

SEQ ID NO: 13640 - RNA, 19 nt, synthetic construct
  source 1..19: mol_type = other RNA
tgactccctcctctgccct

SEQ ID NO: 13641 - RNA, 19 nt, synthetic construct
  source 1..19: mol_type = other RNA
atccctgccccccagcagt

SEQ ID NO: 13642 - RNA, 19 nt, synthetic construct
  source 1..19: mol_type = other RNA
cggccacctccaggaccac

SEQ ID NO: 13643 - RNA, 19 nt, synthetic construct
  source 1..19: mol_type = other RNA
acctccaggaccacagcca

SEQ ID NO: 13644 - RNA, 19 nt, synthetic construct
  source 1..19: mol_type = other RNA
agtgtgcctggtcagagtg

SEQ ID NO: 13645 - RNA, 19 nt, synthetic construct
  source 1..19: mol_type = other RNA
accccgtcctccaccccag

SEQ ID NO: 13646 - RNA, 19 nt, synthetic construct
  source 1..19: mol_type = other RNA
cagctccaaagccactccc

SEQ ID NO: 13647 - RNA, 19 nt, synthetic construct
  source 1..19: mol_type = other RNA
tcccttctccagtccaggg

SEQ ID NO: 13648 - RNA, 19 nt, synthetic construct
  source 1..19: mol_type = other RNA
cttccagcactgagaagca

SEQ ID NO: 13649 - RNA, 19 nt, synthetic construct
  source 1..19: mol_type = other RNA
gactgtccacacctccaca

SEQ ID NO: 13650 - RNA, 19 nt, synthetic construct
  source 1..19: mol_type = other RNA
caccacggccaccacaacc

SEQ ID NO: 13651 - RNA, 19 nt, synthetic construct
  source 1..19: mol_type = other RNA
tagcacacagaccagtggt

SEQ ID NO: 13652 - RNA, 19 nt, synthetic construct
  source 1..19: mol_type = other RNA
cccatcactgaccaccacg

SEQ ID NO: 13653 - RNA, 19 nt, synthetic construct
  source 1..19: mol_type = other RNA
cctcctcaactccagggac

SEQ ID NO: 13654 - RNA, 19 nt, synthetic construct
  source 1..19: mol_type = other RNA
tgactccctcctctgccct

SEQ ID NO: 13655 - RNA, 19 nt, synthetic construct
  source 1..19: mol_type = other RNA
atccctgtcccccagcagt

SEQ ID NO: 13656 - RNA, 19 nt, synthetic construct
  source 1..19: mol_type = other RNA
ctgtcccccagcagtcccc

SEQ ID NO: 13657 - RNA, 19 nt, synthetic construct
  source 1..19: mol_type = other RNA
ccccagcagcaaccaccgg

SEQ ID NO: 13658 - RNA, 19 nt, synthetic construct
  source 1..19: mol_type = other RNA
agtgtgcctggtcagagtg

SEQ ID NO: 13659 - RNA, 19 nt, synthetic construct
  source 1..19: mol_type = other RNA
ccttccagtgctgacaagc

SEQ ID NO: 13660 - RNA, 19 nt, synthetic construct
  source 1..19: mol_type = other RNA
cctccacagtgctgaccac

SEQ ID NO: 13661 - RNA, 19 nt, synthetic construct
  source 1..19: mol_type = other RNA
cccctcctccactccgggg

SEQ ID NO: 13662 - RNA, 19 nt, synthetic construct
  source 1..19: mol_type = other RNA
accacagcagccactacaa

SEQ ID NO: 13663 - RNA, 19 nt, synthetic construct
  source 1..19: mol_type = other RNA
accccgtcctccaccccag

SEQ ID NO: 13664 - RNA, 19 nt, synthetic construct
  source 1..19: mol_type = other RNA
cttccagcactgagaagca

SEQ ID NO: 13665 - RNA, 19 nt, synthetic construct
  source 1..19: mol_type = other RNA
ccctgggcaccgcctggac

SEQ ID NO: 13666 - RNA, 19 nt, synthetic construct
  source 1..19: mol_type = other RNA
gactgtccacacctccaca

SEQ ID NO: 13667 - RNA, 19 nt, synthetic construct
  source 1..19: mol_type = other RNA
tagcacacagaccagtggt

SEQ ID NO: 13668 - RNA, 19 nt, synthetic construct
  source 1..19: mol_type = other RNA
cccatcactgaccaccacg

SEQ ID NO: 13669 - RNA, 19 nt, synthetic construct
  source 1..19: mol_type = other RNA
cctcctcaactccagggac

SEQ ID NO: 13670 - RNA, 19 nt, synthetic construct
  source 1..19: mol_type = other RNA
tgactccctcctctgccct

SEQ ID NO: 13671 - RNA, 19 nt, synthetic construct
  source 1..19: mol_type = other RNA
gtccctgccccccagcagt

SEQ ID NO: 13672 - RNA, 19 nt, synthetic construct
  source 1..19: mol_type = other RNA
acctccaggaccacagcca

SEQ ID NO: 13673 - RNA, 19 nt, synthetic construct
  source 1..19: mol_type = other RNA
agtgtgcctggtcagagtg

SEQ ID NO: 13674 - RNA, 19 nt, synthetic construct
  source 1..19: mol_type = other RNA
accccgtcctccaccccag

SEQ ID NO: 13675 - RNA, 19 nt, synthetic construct
  source 1..19: mol_type = other RNA
cagctccaaagccactccc

SEQ ID NO: 13676 - RNA, 19 nt, synthetic construct
  source 1..19: mol_type = other RNA
tcccttctccagtccaggg

SEQ ID NO: 13677 - RNA, 19 nt, synthetic construct
  source 1..19: mol_type = other RNA
cttccagcactgagaagca

SEQ ID NO: 13678 - RNA, 19 nt, synthetic construct
  source 1..19: mol_type = other RNA
accacggccaccacaacca

SEQ ID NO: 13679 - RNA, 19 nt, synthetic construct
  source 1..19: mol_type = other RNA
acagtcaccccctcctcca

SEQ ID NO: 13680 - RNA, 19 nt, synthetic construct
  source 1..19: mol_type = other RNA
ccccctcctccgtcccggg

SEQ ID NO: 13681 - RNA, 19 nt, synthetic construct
  source 1..19: mol_type = other RNA
tagcacacagaccagtggt

SEQ ID NO: 13682 - RNA, 19 nt, synthetic construct
  source 1..19: mol_type = other RNA
cctcctcaactccagggac

SEQ ID NO: 13683 - RNA, 19 nt, synthetic construct
  source 1..19: mol_type = other RNA
tgactccctcctctgccct

SEQ ID NO: 13684 - RNA, 19 nt, synthetic construct
  source 1..19: mol_type = other RNA
atccctgtcccccagcagt

SEQ ID NO: 13685 - RNA, 19 nt, synthetic construct
  source 1..19: mol_type = other RNA
ctgtcccccagcagtcccc

SEQ ID NO: 13686 - RNA, 19 nt, synthetic construct
  source 1..19: mol_type = other RNA
ccccagcagcaaccaccgg

SEQ ID NO: 13687 - RNA, 19 nt, synthetic construct
  source 1..19: mol_type = other RNA
agtgtgcctggtcagagtg

SEQ ID NO: 13688 - RNA, 19 nt, synthetic construct
  source 1..19: mol_type = other RNA
tgaccagcccggccaccac

SEQ ID NO: 13689 - RNA, 19 nt, synthetic construct
  source 1..19: mol_type = other RNA
ccttccagtgctgacaagc

SEQ ID NO: 13690 - RNA, 19 nt, synthetic construct
  source 1..19: mol_type = other RNA
cctccacagtgctgaccac

SEQ ID NO: 13691 - RNA, 19 nt, synthetic construct
  source 1..19: mol_type = other RNA
cccctcctccactccgggg

SEQ ID NO: 13692 - RNA, 19 nt, synthetic construct
  source 1..19: mol_type = other RNA
accacagcagccactacaa

SEQ ID NO: 13693 - RNA, 19 nt, synthetic construct
  source 1..19: mol_type = other RNA
accccgtcctccaccccag

SEQ ID NO: 13694 - RNA, 19 nt, synthetic construct
  source 1..19: mol_type = other RNA
accccgtcctccaccccag

SEQ ID NO: 13695 - RNA, 19 nt, synthetic construct
  source 1..19: mol_type = other RNA
cagctccaaagccactccc

SEQ ID NO: 13696 - RNA, 19 nt, synthetic construct
  source 1..19: mol_type = other RNA
cttccagcactgagaagca

SEQ ID NO: 13697 - RNA, 19 nt, synthetic construct
  source 1..19: mol_type = other RNA
gactgtccacacctccaca

SEQ ID NO: 13698 - RNA, 19 nt, synthetic construct
  source 1..19: mol_type = other RNA
cgccacggccaccacaacc

SEQ ID NO: 13699 - RNA, 19 nt, synthetic construct
  source 1..19: mol_type = other RNA
cccacaaccaccacaccca

SEQ ID NO: 13700 - RNA, 19 nt, synthetic construct
  source 1..19: mol_type = other RNA
tagcacacagaccagtggt

SEQ ID NO: 13701 - RNA, 19 nt, synthetic construct
  source 1..19: mol_type = other RNA
cccatcactgaccaccacg

SEQ ID NO: 13702 - RNA, 19 nt, synthetic construct
  source 1..19: mol_type = other RNA
cctcctcaactccagggac

SEQ ID NO: 13703 - RNA, 19 nt, synthetic construct
  source 1..19: mol_type = other RNA
accccagtgctgaccagca

SEQ ID NO: 13704 - RNA, 19 nt, synthetic construct
  source 1..19: mol_type = other RNA
gcacggccaccacacccgc

SEQ ID NO: 13705 - RNA, 19 nt, synthetic construct
  source 1..19: mol_type = other RNA
cacggccaccacacccgca

SEQ ID NO: 13706 - RNA, 19 nt, synthetic construct
  source 1..19: mol_type = other RNA
ccttccagtgctgacaagc

SEQ ID NO: 13707 - RNA, 19 nt, synthetic construct
  source 1..19: mol_type = other RNA
cacaaaatccacagctacc

SEQ ID NO: 13708 - RNA, 19 nt, synthetic construct
  source 1..19: mol_type = other RNA
gaccaccacacccatgtcc

SEQ ID NO: 13709 - RNA, 19 nt, synthetic construct
  source 1..19: mol_type = other RNA
acacccatgtccaccatgt

SEQ ID NO: 13710 - RNA, 19 nt, synthetic construct
  source 1..19: mol_type = other RNA
cccatgtccaccatgtcca

SEQ ID NO: 13711 - RNA, 19 nt, synthetic construct
  source 1..19: mol_type = other RNA
cagccaccatgacaagggc

SEQ ID NO: 13712 - RNA, 19 nt, synthetic construct
  source 1..19: mol_type = other RNA
gggccaccaattccacggc

SEQ ID NO: 13713 - RNA, 19 nt, synthetic construct
  source 1..19: mol_type = other RNA
ccacagccactgcctccac

SEQ ID NO: 13714 - RNA, 19 nt, synthetic construct
  source 1..19: mol_type = other RNA
agcctgccaaccttcagcg

SEQ ID NO: 13715 - RNA, 19 nt, synthetic construct
  source 1..19: mol_type = other RNA
agtgcatctgcagcatgtg

SEQ ID NO: 13716 - RNA, 19 nt, synthetic construct
  source 1..19: mol_type = other RNA
caccttccggggcaactgc

SEQ ID NO: 13717 - RNA, 19 nt, synthetic construct
  source 1..19: mol_type = other RNA
cgcgccctcagcatccact

SEQ ID NO: 13718 - RNA, 19 nt, synthetic construct
  source 1..19: mol_type = other RNA
aaggatggctgctgggccc

SEQ ID NO: 13719 - RNA, 19 nt, synthetic construct
  source 1..19: mol_type = other RNA
tgcccaccacagccgctct

SEQ ID NO: 13720 - RNA, 19 nt, synthetic construct
  source 1..19: mol_type = other RNA
ggaccagatcctcttcaac

SEQ ID NO: 13721 - RNA, 19 nt, synthetic construct
  source 1..19: mol_type = other RNA
gacgcccagggtcagcccc

SEQ ID NO: 13722 - RNA, 19 nt, synthetic construct
  source 1..19: mol_type = other RNA
gaccaggccccgggccgag

SEQ ID NO: 13723 - RNA, 19 nt, synthetic construct
  source 1..19: mol_type = other RNA
accaggccccgggccgaga

SEQ ID NO: 13724 - RNA, 19 nt, synthetic construct
  source 1..19: mol_type = other RNA
tgcccgccagggcaggagt

SEQ ID NO: 13725 - RNA, 19 nt, synthetic construct
  source 1..19: mol_type = other RNA
gcacccaggaggagggcga

SEQ ID NO: 13726 - RNA, 19 nt, synthetic construct
  source 1..19: mol_type = other RNA
tgtcaggaggatgcctgca

SEQ ID NO: 13727 - RNA, 19 nt, synthetic construct
  source 1..19: mol_type = other RNA
aacagccatgtggacaact

SEQ ID NO: 13728 - RNA, 19 nt, synthetic construct
  source 1..19: mol_type = other RNA
agcctgcatcctgcccaga

SEQ ID NO: 13729 - RNA, 19 nt, synthetic construct
  source 1..19: mol_type = other RNA
cctgtggcaccagggctgc

SEQ ID NO: 13730 - RNA, 19 nt, synthetic construct
  source 1..19: mol_type = other RNA
accttctgcgagggctcct

SEQ ID NO: 13731 - RNA, 19 nt, synthetic construct
  source 1..19: mol_type = other RNA
tcccccacacacccgtggc

SEQ ID NO: 13732 - RNA, 19 nt, synthetic construct
  source 1..19: mol_type = other RNA
tgcggagccccccggcctg

SEQ ID NO: 13733 - RNA, 19 nt, synthetic construct
  source 1..19: mol_type = other RNA
gctcctgctgcccaccccg

SEQ ID NO: 13734 - RNA, 19 nt, synthetic construct
  source 1..19: mol_type = other RNA
ctcctgctgcccaccccgt

SEQ ID NO: 13735 - RNA, 19 nt, synthetic construct
  source 1..19: mol_type = other RNA
cggccgctggggcagacag

SEQ ID NO: 13736 - RNA, 19 nt, synthetic construct
  source 1..19: mol_type = other RNA
tggtccaggcaaggccagc

SEQ ID NO: 13737 - RNA, 19 nt, synthetic construct
  source 1..19: mol_type = other RNA
tgctgccaggaagctgcga

SEQ ID NO: 13738 - RNA, 19 nt, synthetic construct
  source 1..19: mol_type = other RNA
gctgccaggaagctgcgac

SEQ ID NO: 13739 - RNA, 19 nt, synthetic construct
  source 1..19: mol_type = other RNA
gtaactcagggctgaggtc

SEQ ID NO: 13740 - RNA, 19 nt, synthetic construct
  source 1..19: mol_type = other RNA
gcctggacttcggccacct

SEQ ID NO: 13741 - RNA, 19 nt, synthetic construct
  source 1..19: mol_type = other RNA
tcgggcatcttgggcacca

SEQ ID NO: 13742 - RNA, 19 nt, synthetic construct
  source 1..19: mol_type = other RNA
tcctcaactccagggacaa

SEQ ID NO: 13743 - RNA, 19 nt, synthetic construct
  source 1..19: mol_type = other RNA
gcctggacttcggccacct

SEQ ID NO: 13744 - RNA, 19 nt, synthetic construct
  source 1..19: mol_type = other RNA
ctccagggacgacctggat

SEQ ID NO: 13745 - RNA, 19 nt, synthetic construct
  source 1..19: mol_type = other RNA
caccacacccatggccacc

SEQ ID NO: 13746 - RNA, 19 nt, synthetic construct
  source 1..19: mol_type = other RNA
tcctcaactccagggacaa

SEQ ID NO: 13747 - RNA, 19 nt, synthetic construct
  source 1..19: mol_type = other RNA
gcctggacttcggccacct

SEQ ID NO: 13748 - RNA, 19 nt, synthetic construct
  source 1..19: mol_type = other RNA
tcgggcatcttgggcacca

SEQ ID NO: 13749 - RNA, 19 nt, synthetic construct
  source 1..19: mol_type = other RNA
tcctcaactccagggacaa

SEQ ID NO: 13750 - RNA, 19 nt, synthetic construct
  source 1..19: mol_type = other RNA
gcctggacttcggccacct

SEQ ID NO: 13751 - RNA, 19 nt, synthetic construct
  source 1..19: mol_type = other RNA
tcctcaactccagggacaa

SEQ ID NO: 13752 - RNA, 19 nt, synthetic construct
  source 1..19: mol_type = other RNA
cggtgggtcagcaactgcc

SEQ ID NO: 13753 - RNA, 19 nt, synthetic construct
  source 1..19: mol_type = other RNA
ctgcaaccgcccttccagc

SEQ ID NO: 13754 - RNA, 19 nt, synthetic construct
  source 1..19: mol_type = other RNA
ctgcaaccgcccttccagc

SEQ ID NO: 13755 - RNA, 19 nt, synthetic construct
  source 1..19: mol_type = other RNA
agggccacctccaggacca

SEQ ID NO: 13756 - RNA, 19 nt, synthetic construct
  source 1..19: mol_type = other RNA
ctgcaaccgcccttccagc

SEQ ID NO: 13757 - RNA, 19 nt, synthetic construct
  source 1..19: mol_type = other RNA
ctgcaaccgcccttccagc

SEQ ID NO: 13758 - RNA, 19 nt, synthetic construct
  source 1..19: mol_type = other RNA
cctggaaggcccaggctgc

SEQ ID NO: 13759 - RNA, 19 nt, synthetic construct
  source 1..19: mol_type = other RNA
cagccctgtccagccctca

SEQ ID NO: 13760 - RNA, 19 nt, synthetic construct
  source 1..19: mol_type = other RNA
cagccctgtccagccctca

SEQ ID NO: 13761 - RNA, 19 nt, synthetic construct
  source 1..19: mol_type = other RNA
cagccctgtccagccctca

SEQ ID NO: 13762 - RNA, 19 nt, synthetic construct
  source 1..19: mol_type = other RNA
ctggaggggatggcggagg

SEQ ID NO: 13763 - RNA, 19 nt, synthetic construct
  source 1..19: mol_type = other RNA
tgtgaggctgagggtggag

SEQ ID NO: 13764 - RNA, 19 nt, synthetic construct
  source 1..19: mol_type = other RNA
actacgtgttctctgagca

SEQ ID NO: 13765 - RNA, 19 nt, synthetic construct
  source 1..19: mol_type = other RNA
caacgccaggctgaccccg

SEQ ID NO: 13766 - RNA, 19 nt, synthetic construct
  source 1..19: mol_type = other RNA
tgccctgagctctgccccc

SEQ ID NO: 13767 - RNA, 19 nt, synthetic construct
  source 1..19: mol_type = other RNA
caccatcatcaggaaggct

SEQ ID NO: 13768 - RNA, 19 nt, synthetic construct
  source 1..19: mol_type = other RNA
gcctgggtcccccactcca

SEQ ID NO: 13769 - RNA, 19 nt, synthetic construct
  source 1..19: mol_type = other RNA
ggccgagaccagcacgccc

SEQ ID NO: 13770 - RNA, 19 nt, synthetic construct
  source 1..19: mol_type = other RNA
ggcaccacctggacccgcc

SEQ ID NO: 13771 - RNA, 19 nt, synthetic construct
  source 1..19: mol_type = other RNA
acggccacctccaggacca

SEQ ID NO: 13772 - RNA, 19 nt, synthetic construct
  source 1..19: mol_type = other RNA
caggaccacagccacggcc

SEQ ID NO: 13773 - RNA, 19 nt, synthetic construct
  source 1..19: mol_type = other RNA
cggtggtgaccatgggctg

SEQ ID NO: 13774 - RNA, 19 nt, synthetic construct
  source 1..19: mol_type = other RNA
tgagcaggtggggaagttc

SEQ ID NO: 13775 - RNA, 19 nt, synthetic construct
  source 1..19: mol_type = other RNA
ggcaccacctggacccgcc

SEQ ID NO: 13776 - RNA, 19 nt, synthetic construct
  source 1..19: mol_type = other RNA
cggtggtgaccatgggctg

SEQ ID NO: 13777 - RNA, 19 nt, synthetic construct
  source 1..19: mol_type = other RNA
tgagcaggtggggaagttc

SEQ ID NO: 13778 - RNA, 19 nt, synthetic construct
  source 1..19: mol_type = other RNA
gaccaccacacccatggcc

SEQ ID NO: 13779 - RNA, 19 nt, synthetic construct
  source 1..19: mol_type = other RNA
caccgcctcctccacccgg

SEQ ID NO: 13780 - RNA, 19 nt, synthetic construct
  source 1..19: mol_type = other RNA
gctccagagccactccctc

SEQ ID NO: 13781 - RNA, 19 nt, synthetic construct
  source 1..19: mol_type = other RNA
tgagcaggtggggaagttc

SEQ ID NO: 13782 - RNA, 19 nt, synthetic construct
  source 1..19: mol_type = other RNA
ggcaccacctggacccgcc

SEQ ID NO: 13783 - RNA, 19 nt, synthetic construct
  source 1..19: mol_type = other RNA
ccacaaccagtggctccac

SEQ ID NO: 13784 - RNA, 19 nt, synthetic construct
  source 1..19: mol_type = other RNA
gaccccctcctccgtcccg

SEQ ID NO: 13785 - RNA, 19 nt, synthetic construct
  source 1..19: mol_type = other RNA
accccctcctccgtcccgg

SEQ ID NO: 13786 - RNA, 19 nt, synthetic construct
  source 1..19: mol_type = other RNA
cccagcctggtgtccccct

SEQ ID NO: 13787 - RNA, 19 nt, synthetic construct
  source 1..19: mol_type = other RNA
tgagcaggtggggaagttc

SEQ ID NO: 13788 - RNA, 19 nt, synthetic construct
  source 1..19: mol_type = other RNA
ggcaccacctggacccgcc

SEQ ID NO: 13789 - RNA, 19 nt, synthetic construct
  source 1..19: mol_type = other RNA
ccacaaccagtggctccac

SEQ ID NO: 13790 - RNA, 19 nt, synthetic construct
  source 1..19: mol_type = other RNA
cggccaccacacccgcagc

SEQ ID NO: 13791 - RNA, 19 nt, synthetic construct
  source 1..19: mol_type = other RNA
atcccctcctccaccctgt

SEQ ID NO: 13792 - RNA, 19 nt, synthetic construct
  source 1..19: mol_type = other RNA
accacagccaccatgacaa

SEQ ID NO: 13793 - RNA, 19 nt, synthetic construct
  source 1..19: mol_type = other RNA
gcctcctccactctgggaa

SEQ ID NO: 13794 - RNA, 19 nt, synthetic construct
  source 1..19: mol_type = other RNA
gggaaggaggagggcctga

SEQ ID NO: 13795 - RNA, 19 nt, synthetic construct
  source 1..19: mol_type = other RNA
gtgctggggaccaccacca

SEQ ID NO: 13796 - RNA, 19 nt, synthetic construct
  source 1..19: mol_type = other RNA
ccacagctggaggggatgg

SEQ ID NO: 13797 - RNA, 19 nt, synthetic construct
  source 1..19: mol_type = other RNA
gggggctatggcagtgcca

SEQ ID NO: 13798 - RNA, 19 nt, synthetic construct
  source 1..19: mol_type = other RNA
agtcccagcgctacgccta

SEQ ID NO: 13799 - RNA, 19 nt, synthetic construct
  source 1..19: mol_type = other RNA
gtgtacctggactgcagca

SEQ ID NO: 13800 - RNA, 19 nt, synthetic construct
  source 1..19: mol_type = other RNA
tgcaaccgcccttccagca

SEQ ID NO: 13801 - RNA, 19 nt, synthetic construct
  source 1..19: mol_type = other RNA
actgaccaccacggccact

SEQ ID NO: 13802 - RNA, 19 nt, synthetic construct
  source 1..19: mol_type = other RNA
ccaccaacccctcctcaac

SEQ ID NO: 13803 - RNA, 19 nt, synthetic construct
  source 1..19: mol_type = other RNA
accctagcagcaaccaccg

SEQ ID NO: 13804 - RNA, 19 nt, synthetic construct
  source 1..19: mol_type = other RNA
tgcaaccgcccttccagca

SEQ ID NO: 13805 - RNA, 19 nt, synthetic construct
  source 1..19: mol_type = other RNA
actgaccaccacggccact

SEQ ID NO: 13806 - RNA, 19 nt, synthetic construct
  source 1..19: mol_type = other RNA
ccaccaacccctcctcaac

SEQ ID NO: 13807 - RNA, 19 nt, synthetic construct
  source 1..19: mol_type = other RNA
tgccgaacaccacggccac

SEQ ID NO: 13808 - RNA, 19 nt, synthetic construct
  source 1..19: mol_type = other RNA
tccctgtcccccagcagtc

SEQ ID NO: 13809 - RNA, 19 nt, synthetic construct
  source 1..19: mol_type = other RNA
cggggacttcccacacccc

SEQ ID NO: 13810 - RNA, 19 nt, synthetic construct
  source 1..19: mol_type = other RNA
ggatcctcacagagcccag

SEQ ID NO: 13811 - RNA, 19 nt, synthetic construct
  source 1..19: mol_type = other RNA
tgcaaccgcccttccagca

SEQ ID NO: 13812 - RNA, 19 nt, synthetic construct
  source 1..19: mol_type = other RNA
actgaccaccacggccact

SEQ ID NO: 13813 - RNA, 19 nt, synthetic construct
  source 1..19: mol_type = other RNA
ccaccaacccctcctcaac

SEQ ID NO: 13814 - RNA, 19 nt, synthetic construct
  source 1..19: mol_type = other RNA
tgccgaacaccacggccac

SEQ ID NO: 13815 - RNA, 19 nt, synthetic construct
  source 1..19: mol_type = other RNA
tgcaaccgcccttccagca

SEQ ID NO: 13816 - RNA, 19 nt, synthetic construct
  source 1..19: mol_type = other RNA
ccaccaacccctcctcaac

SEQ ID NO: 13817 - RNA, 19 nt, synthetic construct
  source 1..19: mol_type = other RNA
tgccgaacaccacggccac

SEQ ID NO: 13818 - RNA, 19 nt, synthetic construct
  source 1..19: mol_type = other RNA
tccctgtcccccagcagtc

SEQ ID NO: 13819 - RNA, 19 nt, synthetic construct
  source 1..19: mol_type = other RNA
cggggacttcccacacccc

SEQ ID NO: 13820 - RNA, 19 nt, synthetic construct
  source 1..19: mol_type = other RNA
actgaccaccacggccact

SEQ ID NO: 13821 - RNA, 19 nt, synthetic construct
  source 1..19: mol_type = other RNA
ccaccaacccctcctcaac

SEQ ID NO: 13822 - RNA, 19 nt, synthetic construct
  source 1..19: mol_type = other RNA
agacgtggctggtccccga

SEQ ID NO: 13823 - RNA, 19 nt, synthetic construct
  source 1..19: mol_type = other RNA
tcctgcccggacgccctgg

SEQ ID NO: 13824 - RNA, 19 nt, synthetic construct
  source 1..19: mol_type = other RNA
catgggcatctgcgtgcag

SEQ ID NO: 13825 - RNA, 19 nt, synthetic construct
  source 1..19: mol_type = other RNA
tacctggccgcctgcgccc

SEQ ID NO: 13826 - RNA, 19 nt, synthetic construct
  source 1..19: mol_type = other RNA
cctcctgcccggacgccct

SEQ ID NO: 13827 - RNA, 19 nt, synthetic construct
  source 1..19: mol_type = other RNA
catgtcctggaactccagc

SEQ ID NO: 13828 - RNA, 19 nt, synthetic construct
  source 1..19: mol_type = other RNA
tccagggacgacggggagc

SEQ ID NO: 13829 - RNA, 19 nt, synthetic construct
  source 1..19: mol_type = other RNA
gaccacccacaccgccaca

SEQ ID NO: 13830 - RNA, 19 nt, synthetic construct
  source 1..19: mol_type = other RNA
gaccacccacaccgccaca

SEQ ID NO: 13831 - RNA, 19 nt, synthetic construct
  source 1..19: mol_type = other RNA
aaatccacagctaccagcg

SEQ ID NO: 13832 - RNA, 19 nt, synthetic construct
  source 1..19: mol_type = other RNA
ccccgcgctccgtgctcct

SEQ ID NO: 13833 - RNA, 19 nt, synthetic construct
  source 1..19: mol_type = other RNA
gccctgtggagccgagctg

SEQ ID NO: 13834 - RNA, 19 nt, synthetic construct
  source 1..19: mol_type = other RNA
cgaggagggcatctgccac

SEQ ID NO: 13835 - RNA, 19 nt, synthetic construct
  source 1..19: mol_type = other RNA
acctggccgcctgcgccca

SEQ ID NO: 13836 - RNA, 19 nt, synthetic construct
  source 1..19: mol_type = other RNA
cgaggaccactgtgtggac

SEQ ID NO: 13837 - RNA, 19 nt, synthetic construct
  source 1..19: mol_type = other RNA
ctggtgcagctggtgccac

SEQ ID NO: 13838 - RNA, 19 nt, synthetic construct
  source 1..19: mol_type = other RNA
agctacgagctgatcctcc

SEQ ID NO: 13839 - RNA, 19 nt, synthetic construct
  source 1..19: mol_type = other RNA
ctggtccagctggtacaat

SEQ ID NO: 13840 - RNA, 19 nt, synthetic construct
  source 1..19: mol_type = other RNA
tgggcaccgcccagagccc

SEQ ID NO: 13841 - RNA, 19 nt, synthetic construct
  source 1..19: mol_type = other RNA
agcacccttggtacagcca

SEQ ID NO: 13842 - RNA, 19 nt, synthetic construct
  source 1..19: mol_type = other RNA
tcccatccccccagtgctg

SEQ ID NO: 13843 - RNA, 19 nt, synthetic construct
  source 1..19: mol_type = other RNA
cccttctccagtccaggga

SEQ ID NO: 13844 - RNA, 19 nt, synthetic construct
  source 1..19: mol_type = other RNA
gcagccccacatcggcccc

SEQ ID NO: 13845 - RNA, 19 nt, synthetic construct
  source 1..19: mol_type = other RNA
gccaccagttccatgtcca

SEQ ID NO: 13846 - RNA, 19 nt, synthetic construct
  source 1..19: mol_type = other RNA
acccgggcaactgctggca

SEQ ID NO: 13847 - RNA, 19 nt, synthetic construct
  source 1..19: mol_type = other RNA
tcccatccccccagtgctg

SEQ ID NO: 13848 - RNA, 19 nt, synthetic construct
  source 1..19: mol_type = other RNA
cccttctccagtccaggga

SEQ ID NO: 13849 - RNA, 19 nt, synthetic construct
  source 1..19: mol_type = other RNA
acggccaccacaaccaggg

SEQ ID NO: 13850 - RNA, 19 nt, synthetic construct
  source 1..19: mol_type = other RNA
ggccaccacacccgcagcc

SEQ ID NO: 13851 - RNA, 19 nt, synthetic construct
  source 1..19: mol_type = other RNA
tgctgacaagcacagccac

SEQ ID NO: 13852 - RNA, 19 nt, synthetic construct
  source 1..19: mol_type = other RNA
gctgacaagcacagccaca

SEQ ID NO: 13853 - RNA, 19 nt, synthetic construct
  source 1..19: mol_type = other RNA
gccaccctgtcctccaccc

SEQ ID NO: 13854 - RNA, 19 nt, synthetic construct
  source 1..19: mol_type = other RNA
ccatccctctccggcaggt

SEQ ID NO: 13855 - RNA, 19 nt, synthetic construct
  source 1..19: mol_type = other RNA
tctgtgctggggaccacca

SEQ ID NO: 13856 - RNA, 19 nt, synthetic construct
  source 1..19: mol_type = other RNA
cggggcccacatctccacc

SEQ ID NO: 13857 - RNA, 19 nt, synthetic construct
  source 1..19: mol_type = other RNA
ccgtgctggctgagctgcg

SEQ ID NO: 13858 - RNA, 19 nt, synthetic construct
  source 1..19: mol_type = other RNA
cccccggccagcaccacag

SEQ ID NO: 13859 - RNA, 19 nt, synthetic construct
  source 1..19: mol_type = other RNA
acgagcgagctgtccacct

SEQ ID NO: 13860 - RNA, 19 nt, synthetic construct
  source 1..19: mol_type = other RNA
ggatcagcacaaccaccac

SEQ ID NO: 13861 - RNA, 19 nt, synthetic construct
  source 1..19: mol_type = other RNA
ctccaccaccaacccctcc

SEQ ID NO: 13862 - RNA, 19 nt, synthetic construct
  source 1..19: mol_type = other RNA
tgtgagcaccacggccacg

SEQ ID NO: 13863 - RNA, 19 nt, synthetic construct
  source 1..19: mol_type = other RNA
gcaccacggccacgacacc

SEQ ID NO: 13864 - RNA, 19 nt, synthetic construct
  source 1..19: mol_type = other RNA
ggatcagcacaaccaccac

SEQ ID NO: 13865 - RNA, 19 nt, synthetic construct
  source 1..19: mol_type = other RNA
ctccaccaccaacccctcc

SEQ ID NO: 13866 - RNA, 19 nt, synthetic construct
  source 1..19: mol_type = other RNA
caaccacccttccagtgct

SEQ ID NO: 13867 - RNA, 19 nt, synthetic construct
  source 1..19: mol_type = other RNA
ccaccacacccatggccac

SEQ ID NO: 13868 - RNA, 19 nt, synthetic construct
  source 1..19: mol_type = other RNA
cagagcccagcactacagc

SEQ ID NO: 13869 - RNA, 19 nt, synthetic construct
  source 1..19: mol_type = other RNA
cgaccaccacaaccagggc

SEQ ID NO: 13870 - RNA, 19 nt, synthetic construct
  source 1..19: mol_type = other RNA
ggatcagcacaaccaccac

SEQ ID NO: 13871 - RNA, 19 nt, synthetic construct
  source 1..19: mol_type = other RNA
ctccaccaccaacccctcc

SEQ ID NO: 13872 - RNA, 19 nt, synthetic construct
  source 1..19: mol_type = other RNA
tgtgagcaccacggccacg

SEQ ID NO: 13873 - RNA, 19 nt, synthetic construct
  source 1..19: mol_type = other RNA
gcaccacggccacgacacc

SEQ ID NO: 13874 - RNA, 19 nt, synthetic construct
  source 1..19: mol_type = other RNA
ggatcagcacaaccaccac

SEQ ID NO: 13875 - RNA, 19 nt, synthetic construct
  source 1..19: mol_type = other RNA
ctccaccaccaacccctcc

SEQ ID NO: 13876 - RNA, 19 nt, synthetic construct
  source 1..19: mol_type = other RNA
caaccacccttccagtgct

SEQ ID NO: 13877 - RNA, 19 nt, synthetic construct
  source 1..19: mol_type = other RNA
tgtgagcaccacggccacg

SEQ ID NO: 13878 - RNA, 19 nt, synthetic construct
  source 1..19: mol_type = other RNA
gcaccacggccacgacacc

SEQ ID NO: 13879 - RNA, 19 nt, synthetic construct
  source 1..19: mol_type = other RNA
ccagggactgcaactgccc

SEQ ID NO: 13880 - RNA, 19 nt, synthetic construct
  source 1..19: mol_type = other RNA
ggatcagcacaaccaccac

SEQ ID NO: 13881 - RNA, 19 nt, synthetic construct
  source 1..19: mol_type = other RNA
ctccaccaccaacccctcc

SEQ ID NO: 13882 - RNA, 19 nt, synthetic construct
  source 1..19: mol_type = other RNA
caaccacccttccagtgct

SEQ ID NO: 13883 - RNA, 19 nt, synthetic construct
  source 1..19: mol_type = other RNA
gtctgtgctggggaccacc

SEQ ID NO: 13884 - RNA, 19 nt, synthetic construct
  source 1..19: mol_type = other RNA
tctgcgtgcaggcctgccc

SEQ ID NO: 13885 - RNA, 19 nt, synthetic construct
  source 1..19: mol_type = other RNA
aggcgcccttccctgccac

SEQ ID NO: 13886 - RNA, 19 nt, synthetic construct
  source 1..19: mol_type = other RNA
tgggcctcctctgcggagc

SEQ ID NO: 13887 - RNA, 19 nt, synthetic construct
  source 1..19: mol_type = other RNA
ggcctcctctgcggagccc

SEQ ID NO: 13888 - RNA, 19 nt, synthetic construct
  source 1..19: mol_type = other RNA
acccacaaccagaggctcc

SEQ ID NO: 13889 - RNA, 19 nt, synthetic construct
  source 1..19: mol_type = other RNA
acccacaaccagaggctcc

SEQ ID NO: 13890 - RNA, 19 nt, synthetic construct
  source 1..19: mol_type = other RNA
gtccccccacccgtgccag

SEQ ID NO: 13891 - RNA, 19 nt, synthetic construct
  source 1..19: mol_type = other RNA
gggcacgacccgctgtcaa

SEQ ID NO: 13892 - RNA, 19 nt, synthetic construct
  source 1..19: mol_type = other RNA
acggccaccccgtcctcca

SEQ ID NO: 13893 - RNA, 19 nt, synthetic construct
  source 1..19: mol_type = other RNA
acggccaccccgtcctcca

SEQ ID NO: 13894 - RNA, 19 nt, synthetic construct
  source 1..19: mol_type = other RNA
acggccaccccgtcctcca

SEQ ID NO: 13895 - RNA, 19 nt, synthetic construct
  source 1..19: mol_type = other RNA
acggccaccccgtcctcca

SEQ ID NO: 13896 - RNA, 19 nt, synthetic construct
  source 1..19: mol_type = other RNA
acggccaccccgtcctcca

SEQ ID NO: 13897 - RNA, 19 nt, synthetic construct
  source 1..19: mol_type = other RNA
acggccaccccgtcctcca

SEQ ID NO: 13898 - RNA, 19 nt, synthetic construct
  source 1..19: mol_type = other RNA
ggccaccctgtcctccacc

SEQ ID NO: 13899 - RNA, 19 nt, synthetic construct
  source 1..19: mol_type = other RNA
caatgggcagcgggaggag

SEQ ID NO: 13900 - RNA, 19 nt, synthetic construct
  source 1..19: mol_type = other RNA
ggcacctgctctgtgcagg

SEQ ID NO: 13901 - RNA, 19 nt, synthetic construct
  source 1..19: mol_type = other RNA
ctcctgcccggacgccctg

SEQ ID NO: 13902 - RNA, 19 nt, synthetic construct
  source 1..19: mol_type = other RNA
ggcacaggtggggcagaag

SEQ ID NO: 13903 - RNA, 19 nt, synthetic construct
  source 1..19: mol_type = other RNA
cagtccagggactgcaacc

SEQ ID NO: 13904 - RNA, 19 nt, synthetic construct
  source 1..19: mol_type = other RNA
gatcagcacaaccaccaca

SEQ ID NO: 13905 - RNA, 19 nt, synthetic construct
  source 1..19: mol_type = other RNA
cagtccagggactgcaacc

SEQ ID NO: 13906 - RNA, 19 nt, synthetic construct
  source 1..19: mol_type = other RNA
gatcagcacaaccaccaca

SEQ ID NO: 13907 - RNA, 19 nt, synthetic construct
  source 1..19: mol_type = other RNA
cagcacggccaccacaccc

SEQ ID NO: 13908 - RNA, 19 nt, synthetic construct
  source 1..19: mol_type = other RNA
ctgctggcaccctcaaagt

SEQ ID NO: 13909 - RNA, 19 nt, synthetic construct
  source 1..19: mol_type = other RNA
cagcacggccaccacaccc

SEQ ID NO: 13910 - RNA, 19 nt, synthetic construct
  source 1..19: mol_type = other RNA
cagtccagggactgcaacc

SEQ ID NO: 13911 - RNA, 19 nt, synthetic construct
  source 1..19: mol_type = other RNA
gatcagcacaaccaccaca

SEQ ID NO: 13912 - RNA, 19 nt, synthetic construct
  source 1..19: mol_type = other RNA
cagtccagggactgcaacc

SEQ ID NO: 13913 - RNA, 19 nt, synthetic construct
  source 1..19: mol_type = other RNA
cacagtcaccccctcctcc

SEQ ID NO: 13914 - RNA, 19 nt, synthetic construct
  source 1..19: mol_type = other RNA
gatcagcacaaccaccaca

SEQ ID NO: 13915 - RNA, 19 nt, synthetic construct
  source 1..19: mol_type = other RNA
gatcagcacaaccaccaca

SEQ ID NO: 13916 - RNA, 19 nt, synthetic construct
  source 1..19: mol_type = other RNA
tctgggaacagctcacacc

SEQ ID NO: 13917 - RNA, 19 nt, synthetic construct
  source 1..19: mol_type = other RNA
gctgtcctcgccctcccct

SEQ ID NO: 13918 - RNA, 19 nt, synthetic construct
  source 1..19: mol_type = other RNA
ccaagacgtggctggtccc

SEQ ID NO: 13919 - RNA, 19 nt, synthetic construct
  source 1..19: mol_type = other RNA
cagaaaggatggctgctgg

SEQ ID NO: 13920 - RNA, 19 nt, synthetic construct
  source 1..19: mol_type = other RNA
gccccgggccgagaacccc

SEQ ID NO: 13921 - RNA, 19 nt, synthetic construct
  source 1..19: mol_type = other RNA
gtgcaacacaaccacctgc

SEQ ID NO: 13922 - RNA, 19 nt, synthetic construct
  source 1..19: mol_type = other RNA
ggagccccccggcctgtgt

SEQ ID NO: 13923 - RNA, 19 nt, synthetic construct
  source 1..19: mol_type = other RNA
tggccttgcccctccctga

SEQ ID NO: 13924 - RNA, 19 nt, synthetic construct
  source 1..19: mol_type = other RNA
gtccctgccacggccggag

SEQ ID NO: 13925 - RNA, 19 nt, synthetic construct
  source 1..19: mol_type = other RNA
tgccagcccccaggatggg

SEQ ID NO: 13926 - RNA, 19 nt, synthetic construct
  source 1..19: mol_type = other RNA
ccccaggatgggtgccccg

SEQ ID NO: 13927 - RNA, 19 nt, synthetic construct
  source 1..19: mol_type = other RNA
ccagggccctgtggagccg

SEQ ID NO: 13928 - RNA, 19 nt, synthetic construct
  source 1..19: mol_type = other RNA
cctgtggagccgagctggg

SEQ ID NO: 13929 - RNA, 19 nt, synthetic construct
  source 1..19: mol_type = other RNA
tggggtgacttccactaca

SEQ ID NO: 13930 - RNA, 19 nt, synthetic construct
  source 1..19: mol_type = other RNA
gggctggtgctggaggcgt

SEQ ID NO: 13931 - RNA, 19 nt, synthetic construct
  source 1..19: mol_type = other RNA
gtcctcatcaatgggcagc

SEQ ID NO: 13932 - RNA, 19 nt, synthetic construct
  source 1..19: mol_type = other RNA
cgccaggctgaccccgctc

SEQ ID NO: 13933 - RNA, 19 nt, synthetic construct
  source 1..19: mol_type = other RNA
tggccgcctgcgcccagga

SEQ ID NO: 13934 - RNA, 19 nt, synthetic construct
  source 1..19: mol_type = other RNA
cccacctgcccgtgtgcca

SEQ ID NO: 13935 - RNA, 19 nt, synthetic construct
  source 1..19: mol_type = other RNA
gctcctgcacctgctccgg

SEQ ID NO: 13936 - RNA, 19 nt, synthetic construct
  source 1..19: mol_type = other RNA
tctgtgcagggcggggccc

SEQ ID NO: 13937 - RNA, 19 nt, synthetic construct
  source 1..19: mol_type = other RNA
tggtgcagacaggcctggg

SEQ ID NO: 13938 - RNA, 19 nt, synthetic construct
  source 1..19: mol_type = other RNA
acctggaaggcccaggctg

SEQ ID NO: 13939 - RNA, 19 nt, synthetic construct
  source 1..19: mol_type = other RNA
tacgcccggcactggtgct

SEQ ID NO: 13940 - RNA, 19 nt, synthetic construct
  source 1..19: mol_type = other RNA
gtgccttctcgcgctgcca

SEQ ID NO: 13941 - RNA, 19 nt, synthetic construct
  source 1..19: mol_type = other RNA
cctgccagcccacttgccg

SEQ ID NO: 13942 - RNA, 19 nt, synthetic construct
  source 1..19: mol_type = other RNA
ggactgcagcaacagctcg

SEQ ID NO: 13943 - RNA, 19 nt, synthetic construct
  source 1..19: mol_type = other RNA
gcacctgcaggaaccggag

SEQ ID NO: 13944 - RNA, 19 nt, synthetic construct
  source 1..19: mol_type = other RNA
acgggatggccgtgtcctg

SEQ ID NO: 13945 - RNA, 19 nt, synthetic construct
  source 1..19: mol_type = other RNA
ggtggcgactgcgagtgtt

SEQ ID NO: 13946 - RNA, 19 nt, synthetic construct
  source 1..19: mol_type = other RNA
agctgtaactgcacaccca

SEQ ID NO: 13947 - RNA, 19 nt, synthetic construct
  source 1..19: mol_type = other RNA
gcccagagcccggcctggg

SEQ ID NO: 13948 - RNA, 19 nt, synthetic construct
  source 1..19: mol_type = other RNA
cagccctcagccctccctc

SEQ ID NO: 13949 - RNA, 19 nt, synthetic construct
  source 1..19: mol_type = other RNA
gaaaagaccaccctatggg

SEQ ID NO: 13950 - RNA, 19 nt, synthetic construct
  source 1..19: mol_type = other RNA
agggctcccccggccagca

SEQ ID NO: 13951 - RNA, 19 nt, synthetic construct
  source 1..19: mol_type = other RNA
caccacggccaccacaccc

SEQ ID NO: 13952 - RNA, 19 nt, synthetic construct
  source 1..19: mol_type = other RNA
gccaccggctctgtggcca

SEQ ID NO: 13953 - RNA, 19 nt, synthetic construct
  source 1..19: mol_type = other RNA
cctcctccaccccaggaac

SEQ ID NO: 13954 - RNA, 19 nt, synthetic construct
  source 1..19: mol_type = other RNA
cccaggaacagctcacact

SEQ ID NO: 13955 - RNA, 19 nt, synthetic construct
  source 1..19: mol_type = other RNA
ccacacccacaaccagagg

SEQ ID NO: 13956 - RNA, 19 nt, synthetic construct
  source 1..19: mol_type = other RNA
accctcctctagcacacag

SEQ ID NO: 13957 - RNA, 19 nt, synthetic construct
  source 1..19: mol_type = other RNA
ctgaccaccacggccacta

SEQ ID NO: 13958 - RNA, 19 nt, synthetic construct
  source 1..19: mol_type = other RNA
accagcaacacagtgactc

SEQ ID NO: 13959 - RNA, 19 nt, synthetic construct
  source 1..19: mol_type = other RNA
ctgccccccagcagtcccc

SEQ ID NO: 13960 - RNA, 19 nt, synthetic construct
  source 1..19: mol_type = other RNA
tgggcaccacccacatcac

SEQ ID NO: 13961 - RNA, 19 nt, synthetic construct
  source 1..19: mol_type = other RNA
taaccacggtggtgaccat

SEQ ID NO: 13962 - RNA, 19 nt, synthetic construct
  source 1..19: mol_type = other RNA
ggtggtgaccatgggctgt

SEQ ID NO: 13963 - RNA, 19 nt, synthetic construct
  source 1..19: mol_type = other RNA
agagtggctggactacagc

SEQ ID NO: 13964 - RNA, 19 nt, synthetic construct
  source 1..19: mol_type = other RNA
gcagcctggactttggcct

SEQ ID NO: 13965 - RNA, 19 nt, synthetic construct
  source 1..19: mol_type = other RNA
gccaccggctctgtggcca

SEQ ID NO: 13966 - RNA, 19 nt, synthetic construct
  source 1..19: mol_type = other RNA
cctcctccaccccaggaac

SEQ ID NO: 13967 - RNA, 19 nt, synthetic construct
  source 1..19: mol_type = other RNA
cccaggaacagctcacact

SEQ ID NO: 13968 - RNA, 19 nt, synthetic construct
  source 1..19: mol_type = other RNA
accctcctctagcacacag

SEQ ID NO: 13969 - RNA, 19 nt, synthetic construct
  source 1..19: mol_type = other RNA
ctgaccaccacggccacta

SEQ ID NO: 13970 - RNA, 19 nt, synthetic construct
  source 1..19: mol_type = other RNA
tcaggcaccttgggcacca

SEQ ID NO: 13971 - RNA, 19 nt, synthetic construct
  source 1..19: mol_type = other RNA
tgggcaccacccacatcac

SEQ ID NO: 13972 - RNA, 19 nt, synthetic construct
  source 1..19: mol_type = other RNA
ccacaccccagcagcaacc

SEQ ID NO: 13973 - RNA, 19 nt, synthetic construct
  source 1..19: mol_type = other RNA
taaccacggtggtgaccat

SEQ ID NO: 13974 - RNA, 19 nt, synthetic construct
  source 1..19: mol_type = other RNA
ggtggtgaccatgggctgt

SEQ ID NO: 13975 - RNA, 19 nt, synthetic construct
  source 1..19: mol_type = other RNA
agagtggctggactacagc

SEQ ID NO: 13976 - RNA, 19 nt, synthetic construct
  source 1..19: mol_type = other RNA
gcagcctggactttggcct

SEQ ID NO: 13977 - RNA, 19 nt, synthetic construct
  source 1..19: mol_type = other RNA
tcctccaccccgggaacag

SEQ ID NO: 13978 - RNA, 19 nt, synthetic construct
  source 1..19: mol_type = other RNA
agaccaccacacccatggc

SEQ ID NO: 13979 - RNA, 19 nt, synthetic construct
  source 1..19: mol_type = other RNA
cctcctccactccggagac

SEQ ID NO: 13980 - RNA, 19 nt, synthetic construct
  source 1..19: mol_type = other RNA
aagggccaccagttccatg

SEQ ID NO: 13981 - RNA, 19 nt, synthetic construct
  source 1..19: mol_type = other RNA
caccagttccatgtccacc

SEQ ID NO: 13982 - RNA, 19 nt, synthetic construct
  source 1..19: mol_type = other RNA
tgaccacagcagccactac

SEQ ID NO: 13983 - RNA, 19 nt, synthetic construct
  source 1..19: mol_type = other RNA
gaccacagcagccactaca

SEQ ID NO: 13984 - RNA, 19 nt, synthetic construct
  source 1..19: mol_type = other RNA
cacagcagccactacaact

SEQ ID NO: 13985 - RNA, 19 nt, synthetic construct
  source 1..19: mol_type = other RNA
cccgggcaactgctggcac

SEQ ID NO: 13986 - RNA, 19 nt, synthetic construct
  source 1..19: mol_type = other RNA
ttcctccctgggcaccgcc

SEQ ID NO: 13987 - RNA, 19 nt, synthetic construct
  source 1..19: mol_type = other RNA
tcctccctgggcaccgcct

SEQ ID NO: 13988 - RNA, 19 nt, synthetic construct
  source 1..19: mol_type = other RNA
cacgaccaccacaaccagg

SEQ ID NO: 13989 - RNA, 19 nt, synthetic construct
  source 1..19: mol_type = other RNA
gccaccggctctgtggcca

SEQ ID NO: 13990 - RNA, 19 nt, synthetic construct
  source 1..19: mol_type = other RNA
cctcctccaccccaggaac

SEQ ID NO: 13991 - RNA, 19 nt, synthetic construct
  source 1..19: mol_type = other RNA
cccaggaacagctcacact

SEQ ID NO: 13992 - RNA, 19 nt, synthetic construct
  source 1..19: mol_type = other RNA
ccacacccacaaccagagg

SEQ ID NO: 13993 - RNA, 19 nt, synthetic construct
  source 1..19: mol_type = other RNA
accctcctctagcacacag

SEQ ID NO: 13994 - RNA, 19 nt, synthetic construct
  source 1..19: mol_type = other RNA
ctgaccaccacggccacta

SEQ ID NO: 13995 - RNA, 19 nt, synthetic construct
  source 1..19: mol_type = other RNA
ctgccccccagcagtcccc

SEQ ID NO: 13996 - RNA, 19 nt, synthetic construct
  source 1..19: mol_type = other RNA
tgggcaccacccacatcac

SEQ ID NO: 13997 - RNA, 19 nt, synthetic construct
  source 1..19: mol_type = other RNA
ccacaccccagcagcaacc

SEQ ID NO: 13998 - RNA, 19 nt, synthetic construct
  source 1..19: mol_type = other RNA
agagtggctggactacagc

SEQ ID NO: 13999 - RNA, 19 nt, synthetic construct
  source 1..19: mol_type = other RNA
gcagcctggactttggcct

SEQ ID NO: 14000 - RNA, 19 nt, synthetic construct
  source 1..19: mol_type = other RNA
gccaccggctctgtggcca

SEQ ID NO: 14001 - RNA, 19 nt, synthetic construct
  source 1..19: mol_type = other RNA
cccaggaacagctcacact

SEQ ID NO: 14002 - RNA, 19 nt, synthetic construct
  source 1..19: mol_type = other RNA
accctcctctagcacacag

SEQ ID NO: 14003 - RNA, 19 nt, synthetic construct
  source 1..19: mol_type = other RNA
tcaggcaccttgggcacca

SEQ ID NO: 14004 - RNA, 19 nt, synthetic construct
  source 1..19: mol_type = other RNA
tgggcaccacccacatcac

SEQ ID NO: 14005 - RNA, 19 nt, synthetic construct
  source 1..19: mol_type = other RNA
ccacaccccagcagcaacc

SEQ ID NO: 14006 - RNA, 19 nt, synthetic construct
  source 1..19: mol_type = other RNA
tccccagggacgaccaccc

SEQ ID NO: 14007 - RNA, 19 nt, synthetic construct
  source 1..19: mol_type = other RNA
agagtggctggactacagc

SEQ ID NO: 14008 - RNA, 19 nt, synthetic construct
  source 1..19: mol_type = other RNA
gcagcctggactttggcct

SEQ ID NO: 14009 - RNA, 19 nt, synthetic construct
  source 1..19: mol_type = other RNA
tcctccaccccgggaacag

SEQ ID NO: 14010 - RNA, 19 nt, synthetic construct
  source 1..19: mol_type = other RNA
ctgaccagcccggccacca

SEQ ID NO: 14011 - RNA, 19 nt, synthetic construct
  source 1..19: mol_type = other RNA
cctcctccactccggagac

SEQ ID NO: 14012 - RNA, 19 nt, synthetic construct
  source 1..19: mol_type = other RNA
acaagggccaccagttcca

SEQ ID NO: 14013 - RNA, 19 nt, synthetic construct
  source 1..19: mol_type = other RNA
caccagttccacgtccacc

SEQ ID NO: 14014 - RNA, 19 nt, synthetic construct
  source 1..19: mol_type = other RNA
tgaccacagcagccactac

SEQ ID NO: 14015 - RNA, 19 nt, synthetic construct
  source 1..19: mol_type = other RNA
gaccacagcagccactaca

SEQ ID NO: 14016 - RNA, 19 nt, synthetic construct
  source 1..19: mol_type = other RNA
cacagcagccactacaact

SEQ ID NO: 14017 - RNA, 19 nt, synthetic construct
  source 1..19: mol_type = other RNA
agtccagggactgcaactg

SEQ ID NO: 14018 - RNA, 19 nt, synthetic construct
  source 1..19: mol_type = other RNA
gccaccggctctgtggcca

SEQ ID NO: 14019 - RNA, 19 nt, synthetic construct
  source 1..19: mol_type = other RNA
cctcctccaccccaggaac

SEQ ID NO: 14020 - RNA, 19 nt, synthetic construct
  source 1..19: mol_type = other RNA
cccaggaacagctcacact

SEQ ID NO: 14021 - RNA, 19 nt, synthetic construct
  source 1..19: mol_type = other RNA
accctcctctagcacacag

SEQ ID NO: 14022 - RNA, 19 nt, synthetic construct
  source 1..19: mol_type = other RNA
ctgaccaccacggccacta

SEQ ID NO: 14023 - RNA, 19 nt, synthetic construct
  source 1..19: mol_type = other RNA
acccatcaccccagtgctg

SEQ ID NO: 14024 - RNA, 19 nt, synthetic construct
  source 1..19: mol_type = other RNA
agccaccagctccaaagcc

SEQ ID NO: 14025 - RNA, 19 nt, synthetic construct
  source 1..19: mol_type = other RNA
gccaccagctccaaagcca

SEQ ID NO: 14026 - RNA, 19 nt, synthetic construct
  source 1..19: mol_type = other RNA
catgtccaccatgtccaca

SEQ ID NO: 14027 - RNA, 19 nt, synthetic construct
  source 1..19: mol_type = other RNA
catgtccacaatccacacc

SEQ ID NO: 14028 - RNA, 19 nt, synthetic construct
  source 1..19: mol_type = other RNA
gcagcctgccaaccttcag

SEQ ID NO: 14029 - RNA, 19 nt, synthetic construct
  source 1..19: mol_type = other RNA
cccgctgtcctcgccctcc

SEQ ID NO: 14030 - RNA, 19 nt, synthetic construct
  source 1..19: mol_type = other RNA
gcatctgcagcatgtgggg

SEQ ID NO: 14031 - RNA, 19 nt, synthetic construct
  source 1..19: mol_type = other RNA
tgggaaggaggagggcctg

SEQ ID NO: 14032 - RNA, 19 nt, synthetic construct
  source 1..19: mol_type = other RNA
ggaaggaggagggcctgat

SEQ ID NO: 14033 - RNA, 19 nt, synthetic construct
  source 1..19: mol_type = other RNA
gaaggaggagggcctgatc

SEQ ID NO: 14034 - RNA, 19 nt, synthetic construct
  source 1..19: mol_type = other RNA
ccctgggcgtgagcgtcac

SEQ ID NO: 14035 - RNA, 19 nt, synthetic construct
  source 1..19: mol_type = other RNA
ttctgccctgaggaccaga

SEQ ID NO: 14036 - RNA, 19 nt, synthetic construct
  source 1..19: mol_type = other RNA
gggcaggagtccatctgca

SEQ ID NO: 14037 - RNA, 19 nt, synthetic construct
  source 1..19: mol_type = other RNA
tccatctgcacccaggagg

SEQ ID NO: 14038 - RNA, 19 nt, synthetic construct
  source 1..19: mol_type = other RNA
cgatggccagccagtccag

SEQ ID NO: 14039 - RNA, 19 nt, synthetic construct
  source 1..19: mol_type = other RNA
tggccagccagtccagctg

SEQ ID NO: 14040 - RNA, 19 nt, synthetic construct
  source 1..19: mol_type = other RNA
tacctctgtgaggctgagg

SEQ ID NO: 14041 - RNA, 19 nt, synthetic construct
  source 1..19: mol_type = other RNA
tgtggcaccagggctgcga

SEQ ID NO: 14042 - RNA, 19 nt, synthetic construct
  source 1..19: mol_type = other RNA
ctgccaggagaggcgggtc

SEQ ID NO: 14043 - RNA, 19 nt, synthetic construct
  source 1..19: mol_type = other RNA
tcatgaaaaccttgggcct

SEQ ID NO: 14044 - RNA, 19 nt, synthetic construct
  source 1..19: mol_type = other RNA
cggccggagcgcccgcgca

SEQ ID NO: 14045 - RNA, 19 nt, synthetic construct
  source 1..19: mol_type = other RNA
tccctgcccgtccccgtcc

SEQ ID NO: 14046 - RNA, 19 nt, synthetic construct
  source 1..19: mol_type = other RNA
aggcctagtgggctccagg

SEQ ID NO: 14047 - RNA, 19 nt, synthetic construct
  source 1..19: mol_type = other RNA
ggcctagtgggctccaggc

SEQ ID NO: 14048 - RNA, 19 nt, synthetic construct
  source 1..19: mol_type = other RNA
gcctagtgggctccaggcc

SEQ ID NO: 14049 - RNA, 19 nt, synthetic construct
  source 1..19: mol_type = other RNA
cctagtgggctccaggcct

SEQ ID NO: 14050 - RNA, 19 nt, synthetic construct
  source 1..19: mol_type = other RNA
gccgcactggcctcctggt

SEQ ID NO: 14051 - RNA, 19 nt, synthetic construct
  source 1..19: mol_type = other RNA
ccgcactggcctcctggtg

SEQ ID NO: 14052 - RNA, 19 nt, synthetic construct
  source 1..19: mol_type = other RNA
ggtggagcagagcggggac

SEQ ID NO: 14053 - RNA, 19 nt, synthetic construct
  source 1..19: mol_type = other RNA
catcaaggtcagcatccgg

SEQ ID NO: 14054 - RNA, 19 nt, synthetic construct
  source 1..19: mol_type = other RNA
ggcctgtgtggggacttca

SEQ ID NO: 14055 - RNA, 19 nt, synthetic construct
  source 1..19: mol_type = other RNA
gcctgtgtggggacttcaa

SEQ ID NO: 14056 - RNA, 19 nt, synthetic construct
  source 1..19: mol_type = other RNA
ggaggtgccctgagctctg

SEQ ID NO: 14057 - RNA, 19 nt, synthetic construct
  source 1..19: mol_type = other RNA
gtgtggacggctgcttctg

SEQ ID NO: 14058 - RNA, 19 nt, synthetic construct
  source 1..19: mol_type = other RNA
ctgcctgtgccaatgccag

SEQ ID NO: 14059 - RNA, 19 nt, synthetic construct
  source 1..19: mol_type = other RNA
tcgcgctgccactccatca

SEQ ID NO: 14060 - RNA, 19 nt, synthetic construct
  source 1..19: mol_type = other RNA
tgccactccatcatcaacc

SEQ ID NO: 14061 - RNA, 19 nt, synthetic construct
  source 1..19: mol_type = other RNA
gacggctgcacctgccccg

SEQ ID NO: 14062 - RNA, 19 nt, synthetic construct
  source 1..19: mol_type = other RNA
tgccccgcgggcaccttcc

SEQ ID NO: 14063 - RNA, 19 nt, synthetic construct
  source 1..19: mol_type = other RNA
cccgcccaggagtgcccct

SEQ ID NO: 14064 - RNA, 19 nt, synthetic construct
  source 1..19: mol_type = other RNA
tggtgcacgacgagggcgc

SEQ ID NO: 14065 - RNA, 19 nt, synthetic construct
  source 1..19: mol_type = other RNA
ctggactgcagcaacagct

SEQ ID NO: 14066 - RNA, 19 nt, synthetic construct
  source 1..19: mol_type = other RNA
aaggcagctgcgagtacat

SEQ ID NO: 14067 - RNA, 19 nt, synthetic construct
  source 1..19: mol_type = other RNA
ggactactgtggggacaac

SEQ ID NO: 14068 - RNA, 19 nt, synthetic construct
  source 1..19: mol_type = other RNA
acaacaccacccacgggac

SEQ ID NO: 14069 - RNA, 19 nt, synthetic construct
  source 1..19: mol_type = other RNA
agctctccccctcctgccc

SEQ ID NO: 14070 - RNA, 19 nt, synthetic construct
  source 1..19: mol_type = other RNA
ctctccccctcctgcccgg

SEQ ID NO: 14071 - RNA, 19 nt, synthetic construct
  source 1..19: mol_type = other RNA
tggctgcctacgcccaggc

SEQ ID NO: 14072 - RNA, 19 nt, synthetic construct
  source 1..19: mol_type = other RNA
ggctgcctacgcccaggcc

SEQ ID NO: 14073 - RNA, 19 nt, synthetic construct
  source 1..19: mol_type = other RNA
ctacgcccaggcctgccac

SEQ ID NO: 14074 - RNA, 19 nt, synthetic construct
  source 1..19: mol_type = other RNA
gactccggacacctgcccc

SEQ ID NO: 14075 - RNA, 19 nt, synthetic construct
  source 1..19: mol_type = other RNA
acggcaccatcatcaggaa

SEQ ID NO: 14076 - RNA, 19 nt, synthetic construct
  source 1..19: mol_type = other RNA
accgcctgggtcccccact

SEQ ID NO: 14077 - RNA, 19 nt, synthetic construct
  source 1..19: mol_type = other RNA
gtccagctggtacaatggg

SEQ ID NO: 14078 - RNA, 19 nt, synthetic construct
  source 1..19: mol_type = other RNA
gcaccgcccagagcccggc

SEQ ID NO: 14079 - RNA, 19 nt, synthetic construct
  source 1..19: mol_type = other RNA
tgccctgtgctggctgaca

SEQ ID NO: 14080 - RNA, 19 nt, synthetic construct
  source 1..19: mol_type = other RNA
ctccccggccccaggcacc

SEQ ID NO: 14081 - RNA, 19 nt, synthetic construct
  source 1..19: mol_type = other RNA
cccaggcaccagccctcag

SEQ ID NO: 14082 - RNA, 19 nt, synthetic construct
  source 1..19: mol_type = other RNA
gtgcctaccccaacccaga

SEQ ID NO: 14083 - RNA, 19 nt, synthetic construct
  source 1..19: mol_type = other RNA
cccaactggaccctggcac

SEQ ID NO: 14084 - RNA, 19 nt, synthetic construct
  source 1..19: mol_type = other RNA
tggaccctggcacaggtgg

SEQ ID NO: 14085 - RNA, 19 nt, synthetic construct
  source 1..19: mol_type = other RNA
ccggccagcaccacagcag

SEQ ID NO: 14086 - RNA, 19 nt, synthetic construct
  source 1..19: mol_type = other RNA
atggcgcccctcacagcca

SEQ ID NO: 14087 - RNA, 19 nt, synthetic construct
  source 1..19: mol_type = other RNA
agaccagcacgcccaggac

SEQ ID NO: 14088 - RNA, 19 nt, synthetic construct
  source 1..19: mol_type = other RNA
gactaacaccaccaccagc

SEQ ID NO: 14089 - RNA, 19 nt, synthetic construct
  source 1..19: mol_type = other RNA
actaacaccaccaccagcc

SEQ ID NO: 14090 - RNA, 19 nt, synthetic construct
  source 1..19: mol_type = other RNA
caccaccagccagggcacg

SEQ ID NO: 14091 - RNA, 19 nt, synthetic construct
  source 1..19: mol_type = other RNA
ccactccctcctccagtcc

SEQ ID NO: 14092 - RNA, 19 nt, synthetic construct
  source 1..19: mol_type = other RNA
agaagcacagccaccacac

SEQ ID NO: 14093 - RNA, 19 nt, synthetic construct
  source 1..19: mol_type = other RNA
ccctgggcaccacctggac

SEQ ID NO: 14094 - RNA, 19 nt, synthetic construct
  source 1..19: mol_type = other RNA
caccacacccacggccacc

SEQ ID NO: 14095 - RNA, 19 nt, synthetic construct
  source 1..19: mol_type = other RNA
cacccacggccaccatgtc

SEQ ID NO: 14096 - RNA, 19 nt, synthetic construct
  source 1..19: mol_type = other RNA
ccgccacggccaccacaac

SEQ ID NO: 14097 - RNA, 19 nt, synthetic construct
  source 1..19: mol_type = other RNA
caccggctctgtggccacc

SEQ ID NO: 14098 - RNA, 19 nt, synthetic construct
  source 1..19: mol_type = other RNA
accggctctgtggccaccc

SEQ ID NO: 14099 - RNA, 19 nt, synthetic construct
  source 1..19: mol_type = other RNA
ctcctccatcccggggacc

SEQ ID NO: 14100 - RNA, 19 nt, synthetic construct
  source 1..19: mol_type = other RNA
tcctccatcccggggacca

SEQ ID NO: 14101 - RNA, 19 nt, synthetic construct
  source 1..19: mol_type = other RNA
accgccacagtgctgacca

SEQ ID NO: 14102 - RNA, 19 nt, synthetic construct
  source 1..19: mol_type = other RNA
caccaccacaactgtggcc

SEQ ID NO: 14103 - RNA, 19 nt, synthetic construct
  source 1..19: mol_type = other RNA
ctctagcacacagaccagt

SEQ ID NO: 14104 - RNA, 19 nt, synthetic construct
  source 1..19: mol_type = other RNA
tcactgaccaccacggcca

SEQ ID NO: 14105 - RNA, 19 nt, synthetic construct
  source 1..19: mol_type = other RNA
caccggctccaccaccaac

SEQ ID NO: 14106 - RNA, 19 nt, synthetic construct
  source 1..19: mol_type = other RNA
atccccccagtgctgacca

SEQ ID NO: 14107 - RNA, 19 nt, synthetic construct
  source 1..19: mol_type = other RNA
tccccccagtgctgaccac

SEQ ID NO: 14108 - RNA, 19 nt, synthetic construct
  source 1..19: mol_type = other RNA
agtgactccctcctctgcc

SEQ ID NO: 14109 - RNA, 19 nt, synthetic construct
  source 1..19: mol_type = other RNA
cgatccctgccccccagca

SEQ ID NO: 14110 - RNA, 19 nt, synthetic construct
  source 1..19: mol_type = other RNA
ctggacttcggccacctcg

SEQ ID NO: 14111 - RNA, 19 nt, synthetic construct
  source 1..19: mol_type = other RNA
cgactccagccctttccag

SEQ ID NO: 14112 - RNA, 19 nt, synthetic construct
  source 1..19: mol_type = other RNA
ctttccagccctcacccta

SEQ ID NO: 14113 - RNA, 19 nt, synthetic construct
  source 1..19: mol_type = other RNA
cacctccaggaccacagcc

SEQ ID NO: 14114 - RNA, 19 nt, synthetic construct
  source 1..19: mol_type = other RNA
cacggtggtgaccatgggc

SEQ ID NO: 14115 - RNA, 19 nt, synthetic construct
  source 1..19: mol_type = other RNA
gtgccgtgcccaggcccag

SEQ ID NO: 14116 - RNA, 19 nt, synthetic construct
  source 1..19: mol_type = other RNA
gccgtgcccaggcccagcc

SEQ ID NO: 14117 - RNA, 19 nt, synthetic construct
  source 1..19: mol_type = other RNA
gcactacagccaccgtgac

SEQ ID NO: 14118 - RNA, 19 nt, synthetic construct
  source 1..19: mol_type = other RNA
gatccacggccaccgcctc

SEQ ID NO: 14119 - RNA, 19 nt, synthetic construct
  source 1..19: mol_type = other RNA
cacgacacccacagtcacc

SEQ ID NO: 14120 - RNA, 19 nt, synthetic construct
  source 1..19: mol_type = other RNA
ttctccagtccagggactg

SEQ ID NO: 14121 - RNA, 19 nt, synthetic construct
  source 1..19: mol_type = other RNA
agaagcacagccaccacac

SEQ ID NO: 14122 - RNA, 19 nt, synthetic construct
  source 1..19: mol_type = other RNA
ccctgggcaccacctggac

SEQ ID NO: 14123 - RNA, 19 nt, synthetic construct
  source 1..19: mol_type = other RNA
caccacacccacggccacc

SEQ ID NO: 14124 - RNA, 19 nt, synthetic construct
  source 1..19: mol_type = other RNA
cacccacggccaccatgtc

SEQ ID NO: 14125 - RNA, 19 nt, synthetic construct
  source 1..19: mol_type = other RNA
caccggctctgtggccacc

SEQ ID NO: 14126 - RNA, 19 nt, synthetic construct
  source 1..19: mol_type = other RNA
accggctctgtggccaccc

SEQ ID NO: 14127 - RNA, 19 nt, synthetic construct
  source 1..19: mol_type = other RNA
cacaaccagaggttccacg

SEQ ID NO: 14128 - RNA, 19 nt, synthetic construct
  source 1..19: mol_type = other RNA
ctcctccatcccggggacc

SEQ ID NO: 14129 - RNA, 19 nt, synthetic construct
  source 1..19: mol_type = other RNA
tcctccatcccggggacca

SEQ ID NO: 14130 - RNA, 19 nt, synthetic construct
  source 1..19: mol_type = other RNA
caccaccacaactgtggcc

SEQ ID NO: 14131 - RNA, 19 nt, synthetic construct
  source 1..19: mol_type = other RNA
ctctagcacacagaccagt

SEQ ID NO: 14132 - RNA, 19 nt, synthetic construct
  source 1..19: mol_type = other RNA
tcactgaccaccacggcca

SEQ ID NO: 14133 - RNA, 19 nt, synthetic construct
  source 1..19: mol_type = other RNA
caccggctccaccaccaac

SEQ ID NO: 14134 - RNA, 19 nt, synthetic construct
  source 1..19: mol_type = other RNA
atccccccagtgctgacca

SEQ ID NO: 14135 - RNA, 19 nt, synthetic construct
  source 1..19: mol_type = other RNA
tccccccagtgctgaccac

SEQ ID NO: 14136 - RNA, 19 nt, synthetic construct
  source 1..19: mol_type = other RNA
agtgactccctcctctgcc

SEQ ID NO: 14137 - RNA, 19 nt, synthetic construct
  source 1..19: mol_type = other RNA
gggcgatccctgtccccca

SEQ ID NO: 14138 - RNA, 19 nt, synthetic construct
  source 1..19: mol_type = other RNA
cacggtggtgaccatgggc

SEQ ID NO: 14139 - RNA, 19 nt, synthetic construct
  source 1..19: mol_type = other RNA
gtgccgtgcccaggcccag

SEQ ID NO: 14140 - RNA, 19 nt, synthetic construct
  source 1..19: mol_type = other RNA
gccgtgcccaggcccagcc

SEQ ID NO: 14141 - RNA, 19 nt, synthetic construct
  source 1..19: mol_type = other RNA
ccagggacgacctggatcc

SEQ ID NO: 14142 - RNA, 19 nt, synthetic construct
  source 1..19: mol_type = other RNA
cagagcagaccacagcagc

SEQ ID NO: 14143 - RNA, 19 nt, synthetic construct
  source 1..19: mol_type = other RNA
agtgctgaccagcacggcc

SEQ ID NO: 14144 - RNA, 19 nt, synthetic construct
  source 1..19: mol_type = other RNA
cggccaccacacccacagc

SEQ ID NO: 14145 - RNA, 19 nt, synthetic construct
  source 1..19: mol_type = other RNA
acaagcacagccaccaaat

SEQ ID NO: 14146 - RNA, 19 nt, synthetic construct
  source 1..19: mol_type = other RNA
acagccaccaaatccacag

SEQ ID NO: 14147 - RNA, 19 nt, synthetic construct
  source 1..19: mol_type = other RNA
gaccacccacacctccaca

SEQ ID NO: 14148 - RNA, 19 nt, synthetic construct
  source 1..19: mol_type = other RNA
ccacccacacctccacagt

SEQ ID NO: 14149 - RNA, 19 nt, synthetic construct
  source 1..19: mol_type = other RNA
cacctccacagtgctgacc

SEQ ID NO: 14150 - RNA, 19 nt, synthetic construct
  source 1..19: mol_type = other RNA
gttccatgtccaccccctc

SEQ ID NO: 14151 - RNA, 19 nt, synthetic construct
  source 1..19: mol_type = other RNA
actacaactgcagccactg

SEQ ID NO: 14152 - RNA, 19 nt, synthetic construct
  source 1..19: mol_type = other RNA
cactggccccacggccacc

SEQ ID NO: 14153 - RNA, 19 nt, synthetic construct
  source 1..19: mol_type = other RNA
tcctcacagagcccagcac

SEQ ID NO: 14154 - RNA, 19 nt, synthetic construct
  source 1..19: mol_type = other RNA
gcactacagccaccgtgac

SEQ ID NO: 14155 - RNA, 19 nt, synthetic construct
  source 1..19: mol_type = other RNA
gatccacggccaccgcctc

SEQ ID NO: 14156 - RNA, 19 nt, synthetic construct
  source 1..19: mol_type = other RNA
agtgctgaccagcacggcc

SEQ ID NO: 14157 - RNA, 19 nt, synthetic construct
  source 1..19: mol_type = other RNA
ccactccctcctccagtcc

SEQ ID NO: 14158 - RNA, 19 nt, synthetic construct
  source 1..19: mol_type = other RNA
agaagcacagccaccacac

SEQ ID NO: 14159 - RNA, 19 nt, synthetic construct
  source 1..19: mol_type = other RNA
caccacacccacggccacc

SEQ ID NO: 14160 - RNA, 19 nt, synthetic construct
  source 1..19: mol_type = other RNA
cacccacggccaccatgtc

SEQ ID NO: 14161 - RNA, 19 nt, synthetic construct
  source 1..19: mol_type = other RNA
caccggctctgtggccacc

SEQ ID NO: 14162 - RNA, 19 nt, synthetic construct
  source 1..19: mol_type = other RNA
accggctctgtggccaccc

SEQ ID NO: 14163 - RNA, 19 nt, synthetic construct
  source 1..19: mol_type = other RNA
ctcctccatcccggggacc

SEQ ID NO: 14164 - RNA, 19 nt, synthetic construct
  source 1..19: mol_type = other RNA
tcctccatcccggggacca

SEQ ID NO: 14165 - RNA, 19 nt, synthetic construct
  source 1..19: mol_type = other RNA
accgccacagtgctgacca

SEQ ID NO: 14166 - RNA, 19 nt, synthetic construct
  source 1..19: mol_type = other RNA
caccaccacaactgtggcc

SEQ ID NO: 14167 - RNA, 19 nt, synthetic construct
  source 1..19: mol_type = other RNA
ctctagcacacagaccagt

SEQ ID NO: 14168 - RNA, 19 nt, synthetic construct
  source 1..19: mol_type = other RNA
tcactgaccaccacggcca

SEQ ID NO: 14169 - RNA, 19 nt, synthetic construct
  source 1..19: mol_type = other RNA
caccggctccaccaccaac

SEQ ID NO: 14170 - RNA, 19 nt, synthetic construct
  source 1..19: mol_type = other RNA
atccccccagtgctgacca

SEQ ID NO: 14171 - RNA, 19 nt, synthetic construct
  source 1..19: mol_type = other RNA
tccccccagtgctgaccac

SEQ ID NO: 14172 - RNA, 19 nt, synthetic construct
  source 1..19: mol_type = other RNA
agtgactccctcctctgcc

SEQ ID NO: 14173 - RNA, 19 nt, synthetic construct
  source 1..19: mol_type = other RNA
ctggacttcggccacctcg

SEQ ID NO: 14174 - RNA, 19 nt, synthetic construct
  source 1..19: mol_type = other RNA
cacctccaggaccacagcc

SEQ ID NO: 14175 - RNA, 19 nt, synthetic construct
  source 1..19: mol_type = other RNA
gtgccgtgcccaggcccag

SEQ ID NO: 14176 - RNA, 19 nt, synthetic construct
  source 1..19: mol_type = other RNA
gccgtgcccaggcccagcc

SEQ ID NO: 14177 - RNA, 19 nt, synthetic construct
  source 1..19: mol_type = other RNA
gcactacagccaccgtgac

SEQ ID NO: 14178 - RNA, 19 nt, synthetic construct
  source 1..19: mol_type = other RNA
gatccacggccaccgcctc

SEQ ID NO: 14179 - RNA, 19 nt, synthetic construct
  source 1..19: mol_type = other RNA
cacgacacccacagtcacc

SEQ ID NO: 14180 - RNA, 19 nt, synthetic construct
  source 1..19: mol_type = other RNA
ttctccagtccagggactg

SEQ ID NO: 14181 - RNA, 19 nt, synthetic construct
  source 1..19: mol_type = other RNA
agaagcacagccaccacac

SEQ ID NO: 14182 - RNA, 19 nt, synthetic construct
  source 1..19: mol_type = other RNA
ccctgggcaccacctggac

SEQ ID NO: 14183 - RNA, 19 nt, synthetic construct
  source 1..19: mol_type = other RNA
caccacacccacggccacc

SEQ ID NO: 14184 - RNA, 19 nt, synthetic construct
  source 1..19: mol_type = other RNA
cacccacggccaccatgtc

SEQ ID NO: 14185 - RNA, 19 nt, synthetic construct
  source 1..19: mol_type = other RNA
caccggctctgtggccacc

SEQ ID NO: 14186 - RNA, 19 nt, synthetic construct
  source 1..19: mol_type = other RNA
accggctctgtggccaccc

SEQ ID NO: 14187 - RNA, 19 nt, synthetic construct
  source 1..19: mol_type = other RNA
tgtggccaccccctcttcc

SEQ ID NO: 14188 - RNA, 19 nt, synthetic construct
  source 1..19: mol_type = other RNA
accccctcttccaccccag

SEQ ID NO: 14189 - RNA, 19 nt, synthetic construct
  source 1..19: mol_type = other RNA
acgcacgcctccagtgtgg

SEQ ID NO: 14190 - RNA, 19 nt, synthetic construct
  source 1..19: mol_type = other RNA
tgaccccctcctccgtccc

SEQ ID NO: 14191 - RNA, 19 nt, synthetic construct
  source 1..19: mol_type = other RNA
caccaccacaactgtggcc

SEQ ID NO: 14192 - RNA, 19 nt, synthetic construct
  source 1..19: mol_type = other RNA
ctctagcacacagaccagt

SEQ ID NO: 14193 - RNA, 19 nt, synthetic construct
  source 1..19: mol_type = other RNA
caccggctccaccaccaac

SEQ ID NO: 14194 - RNA, 19 nt, synthetic construct
  source 1..19: mol_type = other RNA
atccccccagtgctgacca

SEQ ID NO: 14195 - RNA, 19 nt, synthetic construct
  source 1..19: mol_type = other RNA
tccccccagtgctgaccac

SEQ ID NO: 14196 - RNA, 19 nt, synthetic construct
  source 1..19: mol_type = other RNA
agtgactccctcctctgcc

SEQ ID NO: 14197 - RNA, 19 nt, synthetic construct
  source 1..19: mol_type = other RNA
gggcgatccctgtccccca

SEQ ID NO: 14198 - RNA, 19 nt, synthetic construct
  source 1..19: mol_type = other RNA
gtgccgtgcccaggcccag

SEQ ID NO: 14199 - RNA, 19 nt, synthetic construct
  source 1..19: mol_type = other RNA
gccgtgcccaggcccagcc

SEQ ID NO: 14200 - RNA, 19 nt, synthetic construct
  source 1..19: mol_type = other RNA
tggtgtccccctgggggag

SEQ ID NO: 14201 - RNA, 19 nt, synthetic construct
  source 1..19: mol_type = other RNA
tcccaaagtgctgaccagc

SEQ ID NO: 14202 - RNA, 19 nt, synthetic construct
  source 1..19: mol_type = other RNA
cggccaccacacccacagc

SEQ ID NO: 14203 - RNA, 19 nt, synthetic construct
  source 1..19: mol_type = other RNA
acaagcacagccaccaaat

SEQ ID NO: 14204 - RNA, 19 nt, synthetic construct
  source 1..19: mol_type = other RNA
acagccaccaaatccacag

SEQ ID NO: 14205 - RNA, 19 nt, synthetic construct
  source 1..19: mol_type = other RNA
aacagaccaccacacccgt

SEQ ID NO: 14206 - RNA, 19 nt, synthetic construct
  source 1..19: mol_type = other RNA
gaccacccacacctccaca

SEQ ID NO: 14207 - RNA, 19 nt, synthetic construct
  source 1..19: mol_type = other RNA
ccacccacacctccacagt

SEQ ID NO: 14208 - RNA, 19 nt, synthetic construct
  source 1..19: mol_type = other RNA
cacctccacagtgctgacc

SEQ ID NO: 14209 - RNA, 19 nt, synthetic construct
  source 1..19: mol_type = other RNA
actacaactgcagccactg

SEQ ID NO: 14210 - RNA, 19 nt, synthetic construct
  source 1..19: mol_type = other RNA
cactggccccacggccacc

SEQ ID NO: 14211 - RNA, 19 nt, synthetic construct
  source 1..19: mol_type = other RNA
gcactacagccaccgtgac

SEQ ID NO: 14212 - RNA, 19 nt, synthetic construct
  source 1..19: mol_type = other RNA
gatccacggccaccgcctc

SEQ ID NO: 14213 - RNA, 19 nt, synthetic construct
  source 1..19: mol_type = other RNA
cacgacacccacagtcacc

SEQ ID NO: 14214 - RNA, 19 nt, synthetic construct
  source 1..19: mol_type = other RNA
ccactccctcctccagtcc

SEQ ID NO: 14215 - RNA, 19 nt, synthetic construct
  source 1..19: mol_type = other RNA
agaagcacagccaccacac

SEQ ID NO: 14216 - RNA, 19 nt, synthetic construct
  source 1..19: mol_type = other RNA
ccctgggcaccacctggac

SEQ ID NO: 14217 - RNA, 19 nt, synthetic construct
  source 1..19: mol_type = other RNA
caccacacccacggccacc

SEQ ID NO: 14218 - RNA, 19 nt, synthetic construct
  source 1..19: mol_type = other RNA
cacccacggccaccatgtc

SEQ ID NO: 14219 - RNA, 19 nt, synthetic construct
  source 1..19: mol_type = other RNA
ccgccacggccaccacaac

SEQ ID NO: 14220 - RNA, 19 nt, synthetic construct
  source 1..19: mol_type = other RNA
caccggctctgtggccacc

SEQ ID NO: 14221 - RNA, 19 nt, synthetic construct
  source 1..19: mol_type = other RNA
accggctctgtggccaccc

SEQ ID NO: 14222 - RNA, 19 nt, synthetic construct
  source 1..19: mol_type = other RNA
ctcctccatcccggggacc

SEQ ID NO: 14223 - RNA, 19 nt, synthetic construct
  source 1..19: mol_type = other RNA
tcctccatcccggggacca

SEQ ID NO: 14224 - RNA, 19 nt, synthetic construct
  source 1..19: mol_type = other RNA
caccaccacaactgtggcc

SEQ ID NO: 14225 - RNA, 19 nt, synthetic construct
  source 1..19: mol_type = other RNA
ctctagcacacagaccagt

SEQ ID NO: 14226 - RNA, 19 nt, synthetic construct
  source 1..19: mol_type = other RNA
tcactgaccaccacggcca

SEQ ID NO: 14227 - RNA, 19 nt, synthetic construct
  source 1..19: mol_type = other RNA
caccggctccaccaccaac

SEQ ID NO: 14228 - RNA, 19 nt, synthetic construct
  source 1..19: mol_type = other RNA
agtgctgaccagcacggcc

SEQ ID NO: 14229 - RNA, 19 nt, synthetic construct
  source 1..19: mol_type = other RNA
caccacacccgcagccacc

SEQ ID NO: 14230 - RNA, 19 nt, synthetic construct
  source 1..19: mol_type = other RNA
cacccgcagccaccagctc

SEQ ID NO: 14231 - RNA, 19 nt, synthetic construct
  source 1..19: mol_type = other RNA
agctccaaagccacttcct

SEQ ID NO: 14232 - RNA, 19 nt, synthetic construct
  source 1..19: mol_type = other RNA
ccagcacagaccaccacac

SEQ ID NO: 14233 - RNA, 19 nt, synthetic construct
  source 1..19: mol_type = other RNA
accaccacacccatgtcca

SEQ ID NO: 14234 - RNA, 19 nt, synthetic construct
  source 1..19: mol_type = other RNA
gaccacccacacctccaca

SEQ ID NO: 14235 - RNA, 19 nt, synthetic construct
  source 1..19: mol_type = other RNA
ccacccacacctccacagt

SEQ ID NO: 14236 - RNA, 19 nt, synthetic construct
  source 1..19: mol_type = other RNA
cacctccacagtgctgacc

SEQ ID NO: 14237 - RNA, 19 nt, synthetic construct
  source 1..19: mol_type = other RNA
attccacggccacaccctc

SEQ ID NO: 14238 - RNA, 19 nt, synthetic construct
  source 1..19: mol_type = other RNA
actacaactgcagccactg

SEQ ID NO: 14239 - RNA, 19 nt, synthetic construct
  source 1..19: mol_type = other RNA
ccacggccaccctgtcctc

SEQ ID NO: 14240 - RNA, 19 nt, synthetic construct
  source 1..19: mol_type = other RNA
tatgcccacagccactgcc

SEQ ID NO: 14241 - RNA, 19 nt, synthetic construct
  source 1..19: mol_type = other RNA
tccccagcagcctgccaac

SEQ ID NO: 14242 - RNA, 19 nt, synthetic construct
  source 1..19: mol_type = other RNA
gacccactggcttccccag

SEQ ID NO: 14243 - RNA, 19 nt, synthetic construct
  source 1..19: mol_type = other RNA
gggcgcctgtcccacctcc

SEQ ID NO: 14244 - RNA, 19 nt, synthetic construct
  source 1..19: mol_type = other RNA
ctgtcccacctccccaccg

SEQ ID NO: 14245 - RNA, 19 nt, synthetic construct
  source 1..19: mol_type = other RNA
cccacctccccaccgccag

SEQ ID NO: 14246 - RNA, 19 nt, synthetic construct
  source 1..19: mol_type = other RNA
accgccagtgtcctccgcc

SEQ ID NO: 14247 - RNA, 19 nt, synthetic construct
  source 1..19: mol_type = other RNA
gccccgctgtcctcgccct

SEQ ID NO: 14248 - RNA, 19 nt, synthetic construct
  source 1..19: mol_type = other RNA
ccccgctgtcctcgccctc

SEQ ID NO: 14249 - RNA, 19 nt, synthetic construct
  source 1..19: mol_type = other RNA
tgtcctcgccctcccctgc

SEQ ID NO: 14250 - RNA, 19 nt, synthetic construct
  source 1..19: mol_type = other RNA
tgcacggcctctgccactg

SEQ ID NO: 14251 - RNA, 19 nt, synthetic construct
  source 1..19: mol_type = other RNA
tcgtcctcactgtcaccat

SEQ ID NO: 14252 - RNA, 19 nt, synthetic construct
  source 1..19: mol_type = other RNA
gcgtgcttgtgtctgtgct

SEQ ID NO: 14253 - RNA, 19 nt, synthetic construct
  source 1..19: mol_type = other RNA
gtgcttgtgtctgtgctgg

SEQ ID NO: 14254 - RNA, 19 nt, synthetic construct
  source 1..19: mol_type = other RNA
tgcttgtgtctgtgctggg

SEQ ID NO: 14255 - RNA, 19 nt, synthetic construct
  source 1..19: mol_type = other RNA
ggatggctgctgggccccg

SEQ ID NO: 14256 - RNA, 19 nt, synthetic construct
  source 1..19: mol_type = other RNA
ccacaaccttgtgcccccg

SEQ ID NO: 14257 - RNA, 19 nt, synthetic construct
  source 1..19: mol_type = other RNA
ggagggctgcttctgccct

SEQ ID NO: 14258 - RNA, 19 nt, synthetic construct
  source 1..19: mol_type = other RNA
gtgacgcccagggtcagcc

SEQ ID NO: 14259 - RNA, 19 nt, synthetic construct
  source 1..19: mol_type = other RNA
agaacccctgctgccccga

SEQ ID NO: 14260 - RNA, 19 nt, synthetic construct
  source 1..19: mol_type = other RNA
gcaacacaaccacctgccc

SEQ ID NO: 14261 - RNA, 19 nt, synthetic construct
  source 1..19: mol_type = other RNA
aacacaaccacctgccccc

SEQ ID NO: 14262 - RNA, 19 nt, synthetic construct
  source 1..19: mol_type = other RNA
ctgcagacctcagctgtgt

SEQ ID NO: 14263 - RNA, 19 nt, synthetic construct
  source 1..19: mol_type = other RNA
ccacatgtgtacctgcctc

SEQ ID NO: 14264 - RNA, 19 nt, synthetic construct
  source 1..19: mol_type = other RNA
actacctgtccccagggct

SEQ ID NO: 14265 - RNA, 19 nt, synthetic construct
  source 1..19: mol_type = other RNA
cgcccgatggccagccagt

SEQ ID NO: 14266 - RNA, 19 nt, synthetic construct
  source 1..19: mol_type = other RNA
ccagccagtccagctgaat

SEQ ID NO: 14267 - RNA, 19 nt, synthetic construct
  source 1..19: mol_type = other RNA
gggtcaacagccatgtgga

SEQ ID NO: 14268 - RNA, 19 nt, synthetic construct
  source 1..19: mol_type = other RNA
cagcctgcatcctgcccag

SEQ ID NO: 14269 - RNA, 19 nt, synthetic construct
  source 1..19: mol_type = other RNA
gaggtcaacatcaccttct

SEQ ID NO: 14270 - RNA, 19 nt, synthetic construct
  source 1..19: mol_type = other RNA
aggtcaacatcaccttctg

SEQ ID NO: 14271 - RNA, 19 nt, synthetic construct
  source 1..19: mol_type = other RNA
ccttctgcgagggctcctg

SEQ ID NO: 14272 - RNA, 19 nt, synthetic construct
  source 1..19: mol_type = other RNA
cttctgcgagggctcctgc

SEQ ID NO: 14273 - RNA, 19 nt, synthetic construct
  source 1..19: mol_type = other RNA
acgtggatgagtgtggctg

SEQ ID NO: 14274 - RNA, 19 nt, synthetic construct
  source 1..19: mol_type = other RNA
cctgcgcccatggctcccc

SEQ ID NO: 14275 - RNA, 19 nt, synthetic construct
  source 1..19: mol_type = other RNA
cccggcccaggaggccact

SEQ ID NO: 14276 - RNA, 19 nt, synthetic construct
  source 1..19: mol_type = other RNA
ccggcccaggaggccactg

SEQ ID NO: 14277 - RNA, 19 nt, synthetic construct
  source 1..19: mol_type = other RNA
agccaggatgtgcattgtc

SEQ ID NO: 14278 - RNA, 19 nt, synthetic construct
  source 1..19: mol_type = other RNA
gctccgtgctcctgctgcc

SEQ ID NO: 14279 - RNA, 19 nt, synthetic construct
  source 1..19: mol_type = other RNA
cgtgctcctgctgcccacc

SEQ ID NO: 14280 - RNA, 19 nt, synthetic construct
  source 1..19: mol_type = other RNA
gtgctcctgctgcccaccc

SEQ ID NO: 14281 - RNA, 19 nt, synthetic construct
  source 1..19: mol_type = other RNA
cgtccggccgctggggcag

SEQ ID NO: 14282 - RNA, 19 nt, synthetic construct
  source 1..19: mol_type = other RNA
ccgctggggcagacaggct

SEQ ID NO: 14283 - RNA, 19 nt, synthetic construct
  source 1..19: mol_type = other RNA
ccctgcccgtccccgtccc

SEQ ID NO: 14284 - RNA, 19 nt, synthetic construct
  source 1..19: mol_type = other RNA
cgagctgggagaatgcagg

SEQ ID NO: 14285 - RNA, 19 nt, synthetic construct
  source 1..19: mol_type = other RNA
caggcacggtgctggatga

SEQ ID NO: 14286 - RNA, 19 nt, synthetic construct
  source 1..19: mol_type = other RNA
cggtgctggatgacatcac

SEQ ID NO: 14287 - RNA, 19 nt, synthetic construct
  source 1..19: mol_type = other RNA
ctgccccgcgggcaccttc

SEQ ID NO: 14288 - RNA, 19 nt, synthetic construct
  source 1..19: mol_type = other RNA
ccttgttctgtgacttcta

SEQ ID NO: 14289 - RNA, 19 nt, synthetic construct
  source 1..19: mol_type = other RNA
tggcacaggtggggcagaa

SEQ ID NO: 14290 - RNA, 19 nt, synthetic construct
  source 1..19: mol_type = other RNA
gctcccccggccagcacca

SEQ ID NO: 14291 - RNA, 19 nt, synthetic construct
  source 1..19: mol_type = other RNA
cttccaacacgctcagccc

SEQ ID NO: 14292 - RNA, 19 nt, synthetic construct
  source 1..19: mol_type = other RNA
acacccacggccaccatgt

SEQ ID NO: 14293 - RNA, 19 nt, synthetic construct
  source 1..19: mol_type = other RNA
caccaccgccaccacacct

SEQ ID NO: 14294 - RNA, 19 nt, synthetic construct
  source 1..19: mol_type = other RNA
actccctcctctgccctag

SEQ ID NO: 14295 - RNA, 19 nt, synthetic construct
  source 1..19: mol_type = other RNA
ctcgggcatcttgggcacc

SEQ ID NO: 14296 - RNA, 19 nt, synthetic construct
  source 1..19: mol_type = other RNA
tgccgtgcccaggcccagc

SEQ ID NO: 14297 - RNA, 19 nt, synthetic construct
  source 1..19: mol_type = other RNA
gcaccccggccaccagctc

SEQ ID NO: 14298 - RNA, 19 nt, synthetic construct
  source 1..19: mol_type = other RNA
ccactcccttctccagtcc

SEQ ID NO: 14299 - RNA, 19 nt, synthetic construct
  source 1..19: mol_type = other RNA
acacccacggccaccatgt

SEQ ID NO: 14300 - RNA, 19 nt, synthetic construct
  source 1..19: mol_type = other RNA
ccggggaccacccacaccc

SEQ ID NO: 14301 - RNA, 19 nt, synthetic construct
  source 1..19: mol_type = other RNA
caccaccgccaccacacct

SEQ ID NO: 14302 - RNA, 19 nt, synthetic construct
  source 1..19: mol_type = other RNA
actccctcctctgccctag

SEQ ID NO: 14303 - RNA, 19 nt, synthetic construct
  source 1..19: mol_type = other RNA
tgccgtgcccaggcccagc

SEQ ID NO: 14304 - RNA, 19 nt, synthetic construct
  source 1..19: mol_type = other RNA
gcaccccggccaccagctc

SEQ ID NO: 14305 - RNA, 19 nt, synthetic construct
  source 1..19: mol_type = other RNA
ctgacaagcacagccacca

SEQ ID NO: 14306 - RNA, 19 nt, synthetic construct
  source 1..19: mol_type = other RNA
acacccatggccaccatgt

SEQ ID NO: 14307 - RNA, 19 nt, synthetic construct
  source 1..19: mol_type = other RNA
acacccacggccaccatgt

SEQ ID NO: 14308 - RNA, 19 nt, synthetic construct
  source 1..19: mol_type = other RNA
caccaccgccaccacacct

SEQ ID NO: 14309 - RNA, 19 nt, synthetic construct
  source 1..19: mol_type = other RNA
actccctcctctgccctag

SEQ ID NO: 14310 - RNA, 19 nt, synthetic construct
  source 1..19: mol_type = other RNA
ctcgggcatcttgggcacc

SEQ ID NO: 14311 - RNA, 19 nt, synthetic construct
  source 1..19: mol_type = other RNA
tgccgtgcccaggcccagc

SEQ ID NO: 14312 - RNA, 19 nt, synthetic construct
  source 1..19: mol_type = other RNA
gcaccccggccaccagctc

SEQ ID NO: 14313 - RNA, 19 nt, synthetic construct
  source 1..19: mol_type = other RNA
ccactcccttctccagtcc

SEQ ID NO: 14314 - RNA, 19 nt, synthetic construct
  source 1..19: mol_type = other RNA
acacccacggccaccatgt

SEQ ID NO: 14315 - RNA, 19 nt, synthetic construct
  source 1..19: mol_type = other RNA
tctgtggccaccccctctt

SEQ ID NO: 14316 - RNA, 19 nt, synthetic construct
  source 1..19: mol_type = other RNA
cacgcacgcctccagtgtg

SEQ ID NO: 14317 - RNA, 19 nt, synthetic construct
  source 1..19: mol_type = other RNA
ccggggaccacccacaccc

SEQ ID NO: 14318 - RNA, 19 nt, synthetic construct
  source 1..19: mol_type = other RNA
caccaccgccaccacacct

SEQ ID NO: 14319 - RNA, 19 nt, synthetic construct
  source 1..19: mol_type = other RNA
actccctcctctgccctag

SEQ ID NO: 14320 - RNA, 19 nt, synthetic construct
  source 1..19: mol_type = other RNA
tgccgtgcccaggcccagc

SEQ ID NO: 14321 - RNA, 19 nt, synthetic construct
  source 1..19: mol_type = other RNA
gcaccccggccaccagctc

SEQ ID NO: 14322 - RNA, 19 nt, synthetic construct
  source 1..19: mol_type = other RNA
ctgacaagcacagccacca

SEQ ID NO: 14323 - RNA, 19 nt, synthetic construct
  source 1..19: mol_type = other RNA
tacacccatcccctcctcc

SEQ ID NO: 14324 - RNA, 19 nt, synthetic construct
  source 1..19: mol_type = other RNA
acacccacggccaccatgt

SEQ ID NO: 14325 - RNA, 19 nt, synthetic construct
  source 1..19: mol_type = other RNA
cacacccgcagccaccagc

SEQ ID NO: 14326 - RNA, 19 nt, synthetic construct
  source 1..19: mol_type = other RNA
tacacccatcccctcctcc

SEQ ID NO: 14327 - RNA, 19 nt, synthetic construct
  source 1..19: mol_type = other RNA
aactgcagccactggatcc

SEQ ID NO: 14328 - RNA, 19 nt, synthetic construct
  source 1..19: mol_type = other RNA
accgtggggaccacccgca

SEQ ID NO: 14329 - RNA, 19 nt, synthetic construct
  source 1..19: mol_type = other RNA
gggcctgatcctgtttgac

SEQ ID NO: 14330 - RNA, 19 nt, synthetic construct
  source 1..19: mol_type = other RNA
cgtgcttgtgtctgtgctg

SEQ ID NO: 14331 - RNA, 19 nt, synthetic construct
  source 1..19: mol_type = other RNA
cttgtgtctgtgctgggga

SEQ ID NO: 14332 - RNA, 19 nt, synthetic construct
  source 1..19: mol_type = other RNA
ccacagccgctctgtgatc

SEQ ID NO: 14333 - RNA, 19 nt, synthetic construct
  source 1..19: mol_type = other RNA
cgacctcacctgcccaccc

SEQ ID NO: 14334 - RNA, 19 nt, synthetic construct
  source 1..19: mol_type = other RNA
atctgcacccaggaggagg

SEQ ID NO: 14335 - RNA, 19 nt, synthetic construct
  source 1..19: mol_type = other RNA
ctgggtcaacagccatgtg

SEQ ID NO: 14336 - RNA, 19 nt, synthetic construct
  source 1..19: mol_type = other RNA
tgtgtccagctgcaggggg

SEQ ID NO: 14337 - RNA, 19 nt, synthetic construct
  source 1..19: mol_type = other RNA
acaggcaaggcggccgcct

SEQ ID NO: 14338 - RNA, 19 nt, synthetic construct
  source 1..19: mol_type = other RNA
tggtggagcagagcgggga

SEQ ID NO: 14339 - RNA, 19 nt, synthetic construct
  source 1..19: mol_type = other RNA
caccgcaccctgctggggc

SEQ ID NO: 14340 - RNA, 19 nt, synthetic construct
  source 1..19: mol_type = other RNA
ctccttcaacaccacctgc

SEQ ID NO: 14341 - RNA, 19 nt, synthetic construct
  source 1..19: mol_type = other RNA
cctacaagcctggagagac

SEQ ID NO: 14342 - RNA, 19 nt, synthetic construct
  source 1..19: mol_type = other RNA
ccgcccagagcccggcctg

SEQ ID NO: 14343 - RNA, 19 nt, synthetic construct
  source 1..19: mol_type = other RNA
ctgtgcctaccccaaccca

SEQ ID NO: 14344 - RNA, 19 nt, synthetic construct
  source 1..19: mol_type = other RNA
caacccagaccacagcaac

SEQ ID NO: 14345 - RNA, 19 nt, synthetic construct
  source 1..19: mol_type = other RNA
gtgccacaaccccgccacc

SEQ ID NO: 14346 - RNA, 19 nt, synthetic construct
  source 1..19: mol_type = other RNA
ggggctgaccagggctccc

SEQ ID NO: 14347 - RNA, 19 nt, synthetic construct
  source 1..19: mol_type = other RNA
ggctcccccggccagcacc

SEQ ID NO: 14348 - RNA, 19 nt, synthetic construct
  source 1..19: mol_type = other RNA
caggacagagacgacaatg

SEQ ID NO: 14349 - RNA, 19 nt, synthetic construct
  source 1..19: mol_type = other RNA
tggatcagcacaaccacca

SEQ ID NO: 14350 - RNA, 19 nt, synthetic construct
  source 1..19: mol_type = other RNA
cggctccaccaccaacccc

SEQ ID NO: 14351 - RNA, 19 nt, synthetic construct
  source 1..19: mol_type = other RNA
cctgccccccagcagtccc

SEQ ID NO: 14352 - RNA, 19 nt, synthetic construct
  source 1..19: mol_type = other RNA
agcaccccggccaccagct

SEQ ID NO: 14353 - RNA, 19 nt, synthetic construct
  source 1..19: mol_type = other RNA
gtccacacctccacagtgc

SEQ ID NO: 14354 - RNA, 19 nt, synthetic construct
  source 1..19: mol_type = other RNA
tggatcagcacaaccacca

SEQ ID NO: 14355 - RNA, 19 nt, synthetic construct
  source 1..19: mol_type = other RNA
cggctccaccaccaacccc

SEQ ID NO: 14356 - RNA, 19 nt, synthetic construct
  source 1..19: mol_type = other RNA
ggcgatccctgtcccccag

SEQ ID NO: 14357 - RNA, 19 nt, synthetic construct
  source 1..19: mol_type = other RNA
aggcaccttgggcaccacc

SEQ ID NO: 14358 - RNA, 19 nt, synthetic construct
  source 1..19: mol_type = other RNA
gacttcccacaccccagca

SEQ ID NO: 14359 - RNA, 19 nt, synthetic construct
  source 1..19: mol_type = other RNA
agcaccccggccaccagct

SEQ ID NO: 14360 - RNA, 19 nt, synthetic construct
  source 1..19: mol_type = other RNA
tcctcctccagtccaagga

SEQ ID NO: 14361 - RNA, 19 nt, synthetic construct
  source 1..19: mol_type = other RNA
tgtccaccccctcctccac

SEQ ID NO: 14362 - RNA, 19 nt, synthetic construct
  source 1..19: mol_type = other RNA
gtccacacctccacagtgc

SEQ ID NO: 14363 - RNA, 19 nt, synthetic construct
  source 1..19: mol_type = other RNA
tggatcagcacaaccacca

SEQ ID NO: 14364 - RNA, 19 nt, synthetic construct
  source 1..19: mol_type = other RNA
cggctccaccaccaacccc

SEQ ID NO: 14365 - RNA, 19 nt, synthetic construct
  source 1..19: mol_type = other RNA
cctgccccccagcagtccc

SEQ ID NO: 14366 - RNA, 19 nt, synthetic construct
  source 1..19: mol_type = other RNA
gacttcccacaccccagca

SEQ ID NO: 14367 - RNA, 19 nt, synthetic construct
  source 1..19: mol_type = other RNA
agcaccccggccaccagct

SEQ ID NO: 14368 - RNA, 19 nt, synthetic construct
  source 1..19: mol_type = other RNA
aaagctgaccacaacagcc

SEQ ID NO: 14369 - RNA, 19 nt, synthetic construct
  source 1..19: mol_type = other RNA
tggatcagcacaaccacca

SEQ ID NO: 14370 - RNA, 19 nt, synthetic construct
  source 1..19: mol_type = other RNA
cggctccaccaccaacccc

SEQ ID NO: 14371 - RNA, 19 nt, synthetic construct
  source 1..19: mol_type = other RNA
ggcgatccctgtcccccag

SEQ ID NO: 14372 - RNA, 19 nt, synthetic construct
  source 1..19: mol_type = other RNA
aggcaccttgggcaccacc

SEQ ID NO: 14373 - RNA, 19 nt, synthetic construct
  source 1..19: mol_type = other RNA
gacttcccacaccccagca

SEQ ID NO: 14374 - RNA, 19 nt, synthetic construct
  source 1..19: mol_type = other RNA
agcaccccggccaccagct

SEQ ID NO: 14375 - RNA, 19 nt, synthetic construct
  source 1..19: mol_type = other RNA
tcctcctccagtccaagga

SEQ ID NO: 14376 - RNA, 19 nt, synthetic construct
  source 1..19: mol_type = other RNA
cctcctccacccttgggac

SEQ ID NO: 14377 - RNA, 19 nt, synthetic construct
  source 1..19: mol_type = other RNA
cgtccaccccctcctccac

SEQ ID NO: 14378 - RNA, 19 nt, synthetic construct
  source 1..19: mol_type = other RNA
gtccacacctccacagtgc

SEQ ID NO: 14379 - RNA, 19 nt, synthetic construct
  source 1..19: mol_type = other RNA
tggatcagcacaaccacca

SEQ ID NO: 14380 - RNA, 19 nt, synthetic construct
  source 1..19: mol_type = other RNA
cggctccaccaccaacccc

SEQ ID NO: 14381 - RNA, 19 nt, synthetic construct
  source 1..19: mol_type = other RNA
tcctcctccagtccaagga

SEQ ID NO: 14382 - RNA, 19 nt, synthetic construct
  source 1..19: mol_type = other RNA
cctcctctactccagagac

SEQ ID NO: 14383 - RNA, 19 nt, synthetic construct
  source 1..19: mol_type = other RNA
tgggaacagctcacacccc

SEQ ID NO: 14384 - RNA, 19 nt, synthetic construct
  source 1..19: mol_type = other RNA
ccaccgccagtgtcctccg

SEQ ID NO: 14385 - RNA, 19 nt, synthetic construct
  source 1..19: mol_type = other RNA
ctgtcctcgccctcccctg

SEQ ID NO: 14386 - RNA, 19 nt, synthetic construct
  source 1..19: mol_type = other RNA
gcttgtgtctgtgctgggg

SEQ ID NO: 14387 - RNA, 19 nt, synthetic construct
  source 1..19: mol_type = other RNA
tgcagacctcagctgtgtt

SEQ ID NO: 14388 - RNA, 19 nt, synthetic construct
  source 1..19: mol_type = other RNA
tcccaggcgcccttccctg

SEQ ID NO: 14389 - RNA, 19 nt, synthetic construct
  source 1..19: mol_type = other RNA
cagctgaatgaaacctggg

SEQ ID NO: 14390 - RNA, 19 nt, synthetic construct
  source 1..19: mol_type = other RNA
caccttggccttgcccctc

SEQ ID NO: 14391 - RNA, 19 nt, synthetic construct
  source 1..19: mol_type = other RNA
gcagacaggctggtccagg

SEQ ID NO: 14392 - RNA, 19 nt, synthetic construct
  source 1..19: mol_type = other RNA
gcctgtccatgcctgctgc

SEQ ID NO: 14393 - RNA, 19 nt, synthetic construct
  source 1..19: mol_type = other RNA
tggctctggcggccatgct

SEQ ID NO: 14394 - RNA, 19 nt, synthetic construct
  source 1..19: mol_type = other RNA
tccgcttccctggcctttg

SEQ ID NO: 14395 - RNA, 19 nt, synthetic construct
  source 1..19: mol_type = other RNA
gctggagctggatcccaaa

SEQ ID NO: 14396 - RNA, 19 nt, synthetic construct
  source 1..19: mol_type = other RNA
gacctgtggcctgtgtggg

SEQ ID NO: 14397 - RNA, 19 nt, synthetic construct
  source 1..19: mol_type = other RNA
ccacaacgccaggctgacc

SEQ ID NO: 14398 - RNA, 19 nt, synthetic construct
  source 1..19: mol_type = other RNA
actgcacggacgaggaggg

SEQ ID NO: 14399 - RNA, 19 nt, synthetic construct
  source 1..19: mol_type = other RNA
cacctgcccgtgtgccacc

SEQ ID NO: 14400 - RNA, 19 nt, synthetic construct
  source 1..19: mol_type = other RNA
tctgcccccggacctgccc

SEQ ID NO: 14401 - RNA, 19 nt, synthetic construct
  source 1..19: mol_type = other RNA
aacatgcagcaccaggagt

SEQ ID NO: 14402 - RNA, 19 nt, synthetic construct
  source 1..19: mol_type = other RNA
ccctgcacggacacctgct

SEQ ID NO: 14403 - RNA, 19 nt, synthetic construct
  source 1..19: mol_type = other RNA
actgtgtggacggctgctt

SEQ ID NO: 14404 - RNA, 19 nt, synthetic construct
  source 1..19: mol_type = other RNA
ctatggcagtgccaggacc

SEQ ID NO: 14405 - RNA, 19 nt, synthetic construct
  source 1..19: mol_type = other RNA
gtgcagacaggcctggggc

SEQ ID NO: 14406 - RNA, 19 nt, synthetic construct
  source 1..19: mol_type = other RNA
cctcagcggggtggtggag

SEQ ID NO: 14407 - RNA, 19 nt, synthetic construct
  source 1..19: mol_type = other RNA
aggcccaggctgcctgtgc

SEQ ID NO: 14408 - RNA, 19 nt, synthetic construct
  source 1..19: mol_type = other RNA
acgcccggcactggtgctc

SEQ ID NO: 14409 - RNA, 19 nt, synthetic construct
  source 1..19: mol_type = other RNA
agctcagcgactggaggga

SEQ ID NO: 14410 - RNA, 19 nt, synthetic construct
  source 1..19: mol_type = other RNA
aggcggtggcgagagggcc

SEQ ID NO: 14411 - RNA, 19 nt, synthetic construct
  source 1..19: mol_type = other RNA
cacctgccccttgttctgt

SEQ ID NO: 14412 - RNA, 19 nt, synthetic construct
  source 1..19: mol_type = other RNA
ccacatgggggctgtgagt

SEQ ID NO: 14413 - RNA, 19 nt, synthetic construct
  source 1..19: mol_type = other RNA
ccatcatcaggaaggctgt

SEQ ID NO: 14414 - RNA, 19 nt, synthetic construct
  source 1..19: mol_type = other RNA
ttcaccaccgcctgggtcc

SEQ ID NO: 14415 - RNA, 19 nt, synthetic construct
  source 1..19: mol_type = other RNA
ccagagcccggcctgggag

SEQ ID NO: 14416 - RNA, 19 nt, synthetic construct
  source 1..19: mol_type = other RNA
caggcaccagccctcagcc

SEQ ID NO: 14417 - RNA, 19 nt, synthetic construct
  source 1..19: mol_type = other RNA
cctcagccctccctcagtg

SEQ ID NO: 14418 - RNA, 19 nt, synthetic construct
  source 1..19: mol_type = other RNA
agcttccccaactggaccc

SEQ ID NO: 14419 - RNA, 19 nt, synthetic construct
  source 1..19: mol_type = other RNA
ccccgccaccgaccacaga

SEQ ID NO: 14420 - RNA, 19 nt, synthetic construct
  source 1..19: mol_type = other RNA
cgccaccgaccacagagct

SEQ ID NO: 14421 - RNA, 19 nt, synthetic construct
  source 1..19: mol_type = other RNA
cgaccacagagctggagac

SEQ ID NO: 14422 - RNA, 19 nt, synthetic construct
  source 1..19: mol_type = other RNA
cccctcacagccacccacg

SEQ ID NO: 14423 - RNA, 19 nt, synthetic construct
  source 1..19: mol_type = other RNA
cagccacccacgctggccc

SEQ ID NO: 14424 - RNA, 19 nt, synthetic construct
  source 1..19: mol_type = other RNA
gagaccagcacgcccagga

SEQ ID NO: 14425 - RNA, 19 nt, synthetic construct
  source 1..19: mol_type = other RNA
gccaccccgacctccaccc

SEQ ID NO: 14426 - RNA, 19 nt, synthetic construct
  source 1..19: mol_type = other RNA
cacccacagtcaccagctc

SEQ ID NO: 14427 - RNA, 19 nt, synthetic construct
  source 1..19: mol_type = other RNA
aaagccactccctcctcca

SEQ ID NO: 14428 - RNA, 19 nt, synthetic construct
  source 1..19: mol_type = other RNA
aagccactccctcctccag

SEQ ID NO: 14429 - RNA, 19 nt, synthetic construct
  source 1..19: mol_type = other RNA
cacggtgaccccctcctcc

SEQ ID NO: 14430 - RNA, 19 nt, synthetic construct
  source 1..19: mol_type = other RNA
tccaccaccaacccctcct

SEQ ID NO: 14431 - RNA, 19 nt, synthetic construct
  source 1..19: mol_type = other RNA
caacccctcctcaactcct

SEQ ID NO: 14432 - RNA, 19 nt, synthetic construct
  source 1..19: mol_type = other RNA
cacacctgcagccaccagc

SEQ ID NO: 14433 - RNA, 19 nt, synthetic construct
  source 1..19: mol_type = other RNA
cctcaccctagcagcagaa

SEQ ID NO: 14434 - RNA, 19 nt, synthetic construct
  source 1..19: mol_type = other RNA
acgaccaccccgggccaca

SEQ ID NO: 14435 - RNA, 19 nt, synthetic construct
  source 1..19: mol_type = other RNA
gccacctccaggaccacag

SEQ ID NO: 14436 - RNA, 19 nt, synthetic construct
  source 1..19: mol_type = other RNA
ggatccacggccaccgcct

SEQ ID NO: 14437 - RNA, 19 nt, synthetic construct
  source 1..19: mol_type = other RNA
cacccacagtcaccagctc

SEQ ID NO: 14438 - RNA, 19 nt, synthetic construct
  source 1..19: mol_type = other RNA
ctgtccacacctccacagt

SEQ ID NO: 14439 - RNA, 19 nt, synthetic construct
  source 1..19: mol_type = other RNA
tgtccacacctccacagtg

SEQ ID NO: 14440 - RNA, 19 nt, synthetic construct
  source 1..19: mol_type = other RNA
cacggtgaccccctcctcc

SEQ ID NO: 14441 - RNA, 19 nt, synthetic construct
  source 1..19: mol_type = other RNA
tccaccaccaacccctcct

SEQ ID NO: 14442 - RNA, 19 nt, synthetic construct
  source 1..19: mol_type = other RNA
cacacctgcagccaccagc

SEQ ID NO: 14443 - RNA, 19 nt, synthetic construct
  source 1..19: mol_type = other RNA
caccttgggcaccacccac

SEQ ID NO: 14444 - RNA, 19 nt, synthetic construct
  source 1..19: mol_type = other RNA
acgaccaccccgggccaca

SEQ ID NO: 14445 - RNA, 19 nt, synthetic construct
  source 1..19: mol_type = other RNA
agccactacaactgcagcc

SEQ ID NO: 14446 - RNA, 19 nt, synthetic construct
  source 1..19: mol_type = other RNA
gccactacaactgcagcca

SEQ ID NO: 14447 - RNA, 19 nt, synthetic construct
  source 1..19: mol_type = other RNA
ggatccacggccaccgcct

SEQ ID NO: 14448 - RNA, 19 nt, synthetic construct
  source 1..19: mol_type = other RNA
gagccactccctcctccag

SEQ ID NO: 14449 - RNA, 19 nt, synthetic construct
  source 1..19: mol_type = other RNA
cacagccacaccctcctct

SEQ ID NO: 14450 - RNA, 19 nt, synthetic construct
  source 1..19: mol_type = other RNA
ctgtccacacctccacagt

SEQ ID NO: 14451 - RNA, 19 nt, synthetic construct
  source 1..19: mol_type = other RNA
tgtccacacctccacagtg

SEQ ID NO: 14452 - RNA, 19 nt, synthetic construct
  source 1..19: mol_type = other RNA
ccaccacaaccagggccac

SEQ ID NO: 14453 - RNA, 19 nt, synthetic construct
  source 1..19: mol_type = other RNA
cacggtgaccccctcctcc

SEQ ID NO: 14454 - RNA, 19 nt, synthetic construct
  source 1..19: mol_type = other RNA
tccaccaccaacccctcct

SEQ ID NO: 14455 - RNA, 19 nt, synthetic construct
  source 1..19: mol_type = other RNA
cacacctgcagccaccagc

SEQ ID NO: 14456 - RNA, 19 nt, synthetic construct
  source 1..19: mol_type = other RNA
acgaccaccccgggccaca

SEQ ID NO: 14457 - RNA, 19 nt, synthetic construct
  source 1..19: mol_type = other RNA
ccaggaccacagccacagc

SEQ ID NO: 14458 - RNA, 19 nt, synthetic construct
  source 1..19: mol_type = other RNA
ggatccacggccaccgcct

SEQ ID NO: 14459 - RNA, 19 nt, synthetic construct
  source 1..19: mol_type = other RNA
cacccacagtcaccagctc

SEQ ID NO: 14460 - RNA, 19 nt, synthetic construct
  source 1..19: mol_type = other RNA
ccaccacaaccagggccac

SEQ ID NO: 14461 - RNA, 19 nt, synthetic construct
  source 1..19: mol_type = other RNA
tcttccaccccaggaacag

SEQ ID NO: 14462 - RNA, 19 nt, synthetic construct
  source 1..19: mol_type = other RNA
tccaccaccaacccctcct

SEQ ID NO: 14463 - RNA, 19 nt, synthetic construct
  source 1..19: mol_type = other RNA
cacacctgcagccaccagc

SEQ ID NO: 14464 - RNA, 19 nt, synthetic construct
  source 1..19: mol_type = other RNA
caccttgggcaccacccac

SEQ ID NO: 14465 - RNA, 19 nt, synthetic construct
  source 1..19: mol_type = other RNA
acgaccaccccgggccaca

SEQ ID NO: 14466 - RNA, 19 nt, synthetic construct
  source 1..19: mol_type = other RNA
gcctggtgtccccctgggg

SEQ ID NO: 14467 - RNA, 19 nt, synthetic construct
  source 1..19: mol_type = other RNA
atccacagctaccagcgtt

SEQ ID NO: 14468 - RNA, 19 nt, synthetic construct
  source 1..19: mol_type = other RNA
ccacacccgtggccaccat

SEQ ID NO: 14469 - RNA, 19 nt, synthetic construct
  source 1..19: mol_type = other RNA
agccactacaactgcagcc

SEQ ID NO: 14470 - RNA, 19 nt, synthetic construct
  source 1..19: mol_type = other RNA
gccactacaactgcagcca

SEQ ID NO: 14471 - RNA, 19 nt, synthetic construct
  source 1..19: mol_type = other RNA
ggatccacggccaccgcct

SEQ ID NO: 14472 - RNA, 19 nt, synthetic construct
  source 1..19: mol_type = other RNA
cacccacagtcaccagctc

SEQ ID NO: 14473 - RNA, 19 nt, synthetic construct
  source 1..19: mol_type = other RNA
aaagccactccctcctcca

SEQ ID NO: 14474 - RNA, 19 nt, synthetic construct
  source 1..19: mol_type = other RNA
aagccactccctcctccag

SEQ ID NO: 14475 - RNA, 19 nt, synthetic construct
  source 1..19: mol_type = other RNA
ctgtccacacctccacagt

SEQ ID NO: 14476 - RNA, 19 nt, synthetic construct
  source 1..19: mol_type = other RNA
tgtccacacctccacagtg

SEQ ID NO: 14477 - RNA, 19 nt, synthetic construct
  source 1..19: mol_type = other RNA
acacccacaaccaccacac

SEQ ID NO: 14478 - RNA, 19 nt, synthetic construct
  source 1..19: mol_type = other RNA
cacggtgaccccctcctcc

SEQ ID NO: 14479 - RNA, 19 nt, synthetic construct
  source 1..19: mol_type = other RNA
tccaccaccaacccctcct

SEQ ID NO: 14480 - RNA, 19 nt, synthetic construct
  source 1..19: mol_type = other RNA
gccaccacacccgcagcca

SEQ ID NO: 14481 - RNA, 19 nt, synthetic construct
  source 1..19: mol_type = other RNA
acccgcagccaccagctcc

SEQ ID NO: 14482 - RNA, 19 nt, synthetic construct
  source 1..19: mol_type = other RNA
agtgctgaccaccacagcc

SEQ ID NO: 14483 - RNA, 19 nt, synthetic construct
  source 1..19: mol_type = other RNA
tgctgaccaccacagccac

SEQ ID NO: 14484 - RNA, 19 nt, synthetic construct
  source 1..19: mol_type = other RNA
gctgaccaccacagccacc

SEQ ID NO: 14485 - RNA, 19 nt, synthetic construct
  source 1..19: mol_type = other RNA
agccactacaactgcagcc

SEQ ID NO: 14486 - RNA, 19 nt, synthetic construct
  source 1..19: mol_type = other RNA
gccactacaactgcagcca

SEQ ID NO: 14487 - RNA, 19 nt, synthetic construct
  source 1..19: mol_type = other RNA
tgagacccactggcttccc

SEQ ID NO: 14488 - RNA, 19 nt, synthetic construct
  source 1..19: mol_type = other RNA
cgccccgctgtcctcgccc

SEQ ID NO: 14489 - RNA, 19 nt, synthetic construct
  source 1..19: mol_type = other RNA
aggaggagggcctgatcct

SEQ ID NO: 14490 - RNA, 19 nt, synthetic construct
  source 1..19: mol_type = other RNA
tggctgctgggccccgact

SEQ ID NO: 14491 - RNA, 19 nt, synthetic construct
  source 1..19: mol_type = other RNA
cacaccccccactgccagc

SEQ ID NO: 14492 - RNA, 19 nt, synthetic construct
  source 1..19: mol_type = other RNA
agcccacagctggagggga

SEQ ID NO: 14493 - RNA, 19 nt, synthetic construct
  source 1..19: mol_type = other RNA
gcaggagtccatctgcacc

SEQ ID NO: 14494 - RNA, 19 nt, synthetic construct
  source 1..19: mol_type = other RNA
gagtccatctgcacccagg

SEQ ID NO: 14495 - RNA, 19 nt, synthetic construct
  source 1..19: mol_type = other RNA
ccaggaggagggcgactgc

SEQ ID NO: 14496 - RNA, 19 nt, synthetic construct
  source 1..19: mol_type = other RNA
ttcccaggcgcccttccct

SEQ ID NO: 14497 - RNA, 19 nt, synthetic construct
  source 1..19: mol_type = other RNA
acaatactacctgtcccca

SEQ ID NO: 14498 - RNA, 19 nt, synthetic construct
  source 1..19: mol_type = other RNA
ggccagccagtccagctga

SEQ ID NO: 14499 - RNA, 19 nt, synthetic construct
  source 1..19: mol_type = other RNA
cctctgtgaggctgagggt

SEQ ID NO: 14500 - RNA, 19 nt, synthetic construct
  source 1..19: mol_type = other RNA
gtggcttcccggcccagga

SEQ ID NO: 14501 - RNA, 19 nt, synthetic construct
  source 1..19: mol_type = other RNA
tggcttcccggcccaggag

SEQ ID NO: 14502 - RNA, 19 nt, synthetic construct
  source 1..19: mol_type = other RNA
ccagaagggtgaggggcca

SEQ ID NO: 14503 - RNA, 19 nt, synthetic construct
  source 1..19: mol_type = other RNA
caaggccagctgctgccag

SEQ ID NO: 14504 - RNA, 19 nt, synthetic construct
  source 1..19: mol_type = other RNA
ttttgcaaataaaccctga

SEQ ID NO: 14505 - RNA, 19 nt, synthetic construct
  source 1..19: mol_type = other RNA
cccggcccggctccctccc

SEQ ID NO: 14506 - RNA, 19 nt, synthetic construct
  source 1..19: mol_type = other RNA
cggcccggctccctccctg

SEQ ID NO: 14507 - RNA, 19 nt, synthetic construct
  source 1..19: mol_type = other RNA
ggcccggctccctccctgc

SEQ ID NO: 14508 - RNA, 19 nt, synthetic construct
  source 1..19: mol_type = other RNA
gcccggctccctccctgcc

SEQ ID NO: 14509 - RNA, 19 nt, synthetic construct
  source 1..19: mol_type = other RNA
cccggctccctccctgccc

SEQ ID NO: 14510 - RNA, 19 nt, synthetic construct
  source 1..19: mol_type = other RNA
ccggctccctccctgcccg

SEQ ID NO: 14511 - RNA, 19 nt, synthetic construct
  source 1..19: mol_type = other RNA
gctccctccctgcccgtcc

SEQ ID NO: 14512 - RNA, 19 nt, synthetic construct
  source 1..19: mol_type = other RNA
ctccctccctgcccgtccc

SEQ ID NO: 14513 - RNA, 19 nt, synthetic construct
  source 1..19: mol_type = other RNA
tccctccctgcccgtcccc

SEQ ID NO: 14514 - RNA, 19 nt, synthetic construct
  source 1..19: mol_type = other RNA
cctccctgcccgtccccgt

SEQ ID NO: 14515 - RNA, 19 nt, synthetic construct
  source 1..19: mol_type = other RNA
cgtccccgtccccccaccc

SEQ ID NO: 14516 - RNA, 19 nt, synthetic construct
  source 1..19: mol_type = other RNA
tccccgtccccccacccgt

SEQ ID NO: 14517 - RNA, 19 nt, synthetic construct
  source 1..19: mol_type = other RNA
ccccccacccgtgccagcc

SEQ ID NO: 14518 - RNA, 19 nt, synthetic construct
  source 1..19: mol_type = other RNA
cccacccgtgccagccccc

SEQ ID NO: 14519 - RNA, 19 nt, synthetic construct
  source 1..19: mol_type = other RNA
ccacccgtgccagccccca

SEQ ID NO: 14520 - RNA, 19 nt, synthetic construct
  source 1..19: mol_type = other RNA
acccgtgccagcccccagg

SEQ ID NO: 14521 - RNA, 19 nt, synthetic construct
  source 1..19: mol_type = other RNA
gcccccaggatgggtgccc

SEQ ID NO: 14522 - RNA, 19 nt, synthetic construct
  source 1..19: mol_type = other RNA
tcgtggtgccgcaggcaga

SEQ ID NO: 14523 - RNA, 19 nt, synthetic construct
  source 1..19: mol_type = other RNA
cgtggtgccgcaggcagag

SEQ ID NO: 14524 - RNA, 19 nt, synthetic construct
  source 1..19: mol_type = other RNA
ggcagagacccagggccct

SEQ ID NO: 14525 - RNA, 19 nt, synthetic construct
  source 1..19: mol_type = other RNA
gcagagacccagggccctg

SEQ ID NO: 14526 - RNA, 19 nt, synthetic construct
  source 1..19: mol_type = other RNA
agagacccagggccctgtg

SEQ ID NO: 14527 - RNA, 19 nt, synthetic construct
  source 1..19: mol_type = other RNA
agacccagggccctgtgga

SEQ ID NO: 14528 - RNA, 19 nt, synthetic construct
  source 1..19: mol_type = other RNA
cccagggccctgtggagcc

SEQ ID NO: 14529 - RNA, 19 nt, synthetic construct
  source 1..19: mol_type = other RNA
cagggccctgtggagccga

SEQ ID NO: 14530 - RNA, 19 nt, synthetic construct
  source 1..19: mol_type = other RNA
tgtggagccgagctgggag

SEQ ID NO: 14531 - RNA, 19 nt, synthetic construct
  source 1..19: mol_type = other RNA
cgtcctcgcccacccggcg

SEQ ID NO: 14532 - RNA, 19 nt, synthetic construct
  source 1..19: mol_type = other RNA
gggtgtgcagcacctgggg

SEQ ID NO: 14533 - RNA, 19 nt, synthetic construct
  source 1..19: mol_type = other RNA
gtgtgcagcacctggggtg

SEQ ID NO: 14534 - RNA, 19 nt, synthetic construct
  source 1..19: mol_type = other RNA
tagtgggctccaggcctgt

SEQ ID NO: 14535 - RNA, 19 nt, synthetic construct
  source 1..19: mol_type = other RNA
agtgggctccaggcctgtg

SEQ ID NO: 14536 - RNA, 19 nt, synthetic construct
  source 1..19: mol_type = other RNA
aatgggcagcgggaggagc

SEQ ID NO: 14537 - RNA, 19 nt, synthetic construct
  source 1..19: mol_type = other RNA
cgcactggcctcctggtgg

SEQ ID NO: 14538 - RNA, 19 nt, synthetic construct
  source 1..19: mol_type = other RNA
ggcctcctggtggagcaga

SEQ ID NO: 14539 - RNA, 19 nt, synthetic construct
  source 1..19: mol_type = other RNA
gcctcctggtggagcagag

SEQ ID NO: 14540 - RNA, 19 nt, synthetic construct
  source 1..19: mol_type = other RNA
cctcctggtggagcagagc

SEQ ID NO: 14541 - RNA, 19 nt, synthetic construct
  source 1..19: mol_type = other RNA
tcctggtggagcagagcgg

SEQ ID NO: 14542 - RNA, 19 nt, synthetic construct
  source 1..19: mol_type = other RNA
cctggtggagcagagcggg

SEQ ID NO: 14543 - RNA, 19 nt, synthetic construct
  source 1..19: mol_type = other RNA
ctggtggagcagagcgggg

SEQ ID NO: 14544 - RNA, 19 nt, synthetic construct
  source 1..19: mol_type = other RNA
tgccctgctggagctggat

SEQ ID NO: 14545 - RNA, 19 nt, synthetic construct
  source 1..19: mol_type = other RNA
ctgctggagctggatccca

SEQ ID NO: 14546 - RNA, 19 nt, synthetic construct
  source 1..19: mol_type = other RNA
ctggagctggatcccaaat

SEQ ID NO: 14547 - RNA, 19 nt, synthetic construct
  source 1..19: mol_type = other RNA
accagacctgtggcctgtg

SEQ ID NO: 14548 - RNA, 19 nt, synthetic construct
  source 1..19: mol_type = other RNA
ccagacctgtggcctgtgt

SEQ ID NO: 14549 - RNA, 19 nt, synthetic construct
  source 1..19: mol_type = other RNA
ctgtggcctgtgtggggac

SEQ ID NO: 14550 - RNA, 19 nt, synthetic construct
  source 1..19: mol_type = other RNA
ccaggctgaccccgctcca

SEQ ID NO: 14551 - RNA, 19 nt, synthetic construct
  source 1..19: mol_type = other RNA
gggcatctgccaccgcacc

SEQ ID NO: 14552 - RNA, 19 nt, synthetic construct
  source 1..19: mol_type = other RNA
ctgccaccgcaccctgctg

SEQ ID NO: 14553 - RNA, 19 nt, synthetic construct
  source 1..19: mol_type = other RNA
ccaccgcaccctgctgggg

SEQ ID NO: 14554 - RNA, 19 nt, synthetic construct
  source 1..19: mol_type = other RNA
cgcaccctgctggggccgg

SEQ ID NO: 14555 - RNA, 19 nt, synthetic construct
  source 1..19: mol_type = other RNA
gcaccctgctggggccggc

SEQ ID NO: 14556 - RNA, 19 nt, synthetic construct
  source 1..19: mol_type = other RNA
acgcactggtggacagcac

SEQ ID NO: 14557 - RNA, 19 nt, synthetic construct
  source 1..19: mol_type = other RNA
ccacctgcccgtgtgccac

SEQ ID NO: 14558 - RNA, 19 nt, synthetic construct
  source 1..19: mol_type = other RNA
cgcggggggccagccgcgg

SEQ ID NO: 14559 - RNA, 19 nt, synthetic construct
  source 1..19: mol_type = other RNA
cgcggaactggaggtgccc

SEQ ID NO: 14560 - RNA, 19 nt, synthetic construct
  source 1..19: mol_type = other RNA
aactggaggtgccctgagc

SEQ ID NO: 14561 - RNA, 19 nt, synthetic construct
  source 1..19: mol_type = other RNA
tggaggtgccctgagctct

SEQ ID NO: 14562 - RNA, 19 nt, synthetic construct
  source 1..19: mol_type = other RNA
ggtgccctgagctctgccc

SEQ ID NO: 14563 - RNA, 19 nt, synthetic construct
  source 1..19: mol_type = other RNA
tgcccccggacctgccccc

SEQ ID NO: 14564 - RNA, 19 nt, synthetic construct
  source 1..19: mol_type = other RNA
agcaccaggagtgtggctc

SEQ ID NO: 14565 - RNA, 19 nt, synthetic construct
  source 1..19: mol_type = other RNA
gcaccaggagtgtggctca

SEQ ID NO: 14566 - RNA, 19 nt, synthetic construct
  source 1..19: mol_type = other RNA
caccaggagtgtggctcac

SEQ ID NO: 14567 - RNA, 19 nt, synthetic construct
  source 1..19: mol_type = other RNA
gcacggacacctgctccaa

SEQ ID NO: 14568 - RNA, 19 nt, synthetic construct
  source 1..19: mol_type = other RNA
ccagcgcgcgcagctctgc

SEQ ID NO: 14569 - RNA, 19 nt, synthetic construct
  source 1..19: mol_type = other RNA
cgcagctctgcgaggacca

SEQ ID NO: 14570 - RNA, 19 nt, synthetic construct
  source 1..19: mol_type = other RNA
acagcccgggcacctcctt

SEQ ID NO: 14571 - RNA, 19 nt, synthetic construct
  source 1..19: mol_type = other RNA
cctccttcaacaccacctg

SEQ ID NO: 14572 - RNA, 19 nt, synthetic construct
  source 1..19: mol_type = other RNA
ctcctgcacctgctccggg

SEQ ID NO: 14573 - RNA, 19 nt, synthetic construct
  source 1..19: mol_type = other RNA
ccgtgccctggcacctgct

SEQ ID NO: 14574 - RNA, 19 nt, synthetic construct
  source 1..19: mol_type = other RNA
cgtgccctggcacctgctc

SEQ ID NO: 14575 - RNA, 19 nt, synthetic construct
  source 1..19: mol_type = other RNA
tgccctggcacctgctctg

SEQ ID NO: 14576 - RNA, 19 nt, synthetic construct
  source 1..19: mol_type = other RNA
ccctggcacctgctctgtg

SEQ ID NO: 14577 - RNA, 19 nt, synthetic construct
  source 1..19: mol_type = other RNA
cctggcacctgctctgtgc

SEQ ID NO: 14578 - RNA, 19 nt, synthetic construct
  source 1..19: mol_type = other RNA
gcacctgctctgtgcaggg

SEQ ID NO: 14579 - RNA, 19 nt, synthetic construct
  source 1..19: mol_type = other RNA
gctctgtgcagggcggggc

SEQ ID NO: 14580 - RNA, 19 nt, synthetic construct
  source 1..19: mol_type = other RNA
tgtgcagggcggggcccac

SEQ ID NO: 14581 - RNA, 19 nt, synthetic construct
  source 1..19: mol_type = other RNA
gacagcagcttcaccgtgc

SEQ ID NO: 14582 - RNA, 19 nt, synthetic construct
  source 1..19: mol_type = other RNA
accgtgctggctgagctgc

SEQ ID NO: 14583 - RNA, 19 nt, synthetic construct
  source 1..19: mol_type = other RNA
cgtgctggctgagctgcgg

SEQ ID NO: 14584 - RNA, 19 nt, synthetic construct
  source 1..19: mol_type = other RNA
gtgctggctgagctgcgga

SEQ ID NO: 14585 - RNA, 19 nt, synthetic construct
  source 1..19: mol_type = other RNA
tgctggctgagctgcggaa

SEQ ID NO: 14586 - RNA, 19 nt, synthetic construct
  source 1..19: mol_type = other RNA
ttcttcatcgtggtgcaga

SEQ ID NO: 14587 - RNA, 19 nt, synthetic construct
  source 1..19: mol_type = other RNA
cgtggtgcagacaggcctg

SEQ ID NO: 14588 - RNA, 19 nt, synthetic construct
  source 1..19: mol_type = other RNA
gtggtgcagacaggcctgg

SEQ ID NO: 14589 - RNA, 19 nt, synthetic construct
  source 1..19: mol_type = other RNA
ggtgcagacaggcctgggg

SEQ ID NO: 14590 - RNA, 19 nt, synthetic construct
  source 1..19: mol_type = other RNA
tgcagacaggcctggggct

SEQ ID NO: 14591 - RNA, 19 nt, synthetic construct
  source 1..19: mol_type = other RNA
cagacaggcctggggctgc

SEQ ID NO: 14592 - RNA, 19 nt, synthetic construct
  source 1..19: mol_type = other RNA
tggggctgcagctgctggt

SEQ ID NO: 14593 - RNA, 19 nt, synthetic construct
  source 1..19: mol_type = other RNA
gccctcagcggggtggtgg

SEQ ID NO: 14594 - RNA, 19 nt, synthetic construct
  source 1..19: mol_type = other RNA
ccctcagcggggtggtgga

SEQ ID NO: 14595 - RNA, 19 nt, synthetic construct
  source 1..19: mol_type = other RNA
cagcggggtggtggaggcc

SEQ ID NO: 14596 - RNA, 19 nt, synthetic construct
  source 1..19: mol_type = other RNA
gtggtggaggccacgggcg

SEQ ID NO: 14597 - RNA, 19 nt, synthetic construct
  source 1..19: mol_type = other RNA
aacacctggaaggcccagg

SEQ ID NO: 14598 - RNA, 19 nt, synthetic construct
  source 1..19: mol_type = other RNA
acacctggaaggcccaggc

SEQ ID NO: 14599 - RNA, 19 nt, synthetic construct
  source 1..19: mol_type = other RNA
tggaaggcccaggctgcct

SEQ ID NO: 14600 - RNA, 19 nt, synthetic construct
  source 1..19: mol_type = other RNA
ggaaggcccaggctgcctg

SEQ ID NO: 14601 - RNA, 19 nt, synthetic construct
  source 1..19: mol_type = other RNA
aaggcccaggctgcctgtg

SEQ ID NO: 14602 - RNA, 19 nt, synthetic construct
  source 1..19: mol_type = other RNA
caggctgcctgtgccaatg

SEQ ID NO: 14603 - RNA, 19 nt, synthetic construct
  source 1..19: mol_type = other RNA
gatcccaacagtgccttct

SEQ ID NO: 14604 - RNA, 19 nt, synthetic construct
  source 1..19: mol_type = other RNA
gctgccactccatcatcaa

SEQ ID NO: 14605 - RNA, 19 nt, synthetic construct
  source 1..19: mol_type = other RNA
ctccatcatcaaccccaag

SEQ ID NO: 14606 - RNA, 19 nt, synthetic construct
  source 1..19: mol_type = other RNA
tccatcatcaaccccaagc

SEQ ID NO: 14607 - RNA, 19 nt, synthetic construct
  source 1..19: mol_type = other RNA
ttccactcgaactgcatgt

SEQ ID NO: 14608 - RNA, 19 nt, synthetic construct
  source 1..19: mol_type = other RNA
ttcgtgcctgtggacggct

SEQ ID NO: 14609 - RNA, 19 nt, synthetic construct
  source 1..19: mol_type = other RNA
ggacggctgcacctgcccc

SEQ ID NO: 14610 - RNA, 19 nt, synthetic construct
  source 1..19: mol_type = other RNA
cgcccaggagtgcccctgc

SEQ ID NO: 14611 - RNA, 19 nt, synthetic construct
  source 1..19: mol_type = other RNA
tggctcctggagaggtggt

SEQ ID NO: 14612 - RNA, 19 nt, synthetic construct
  source 1..19: mol_type = other RNA
ctaagctgcctgggagcct

SEQ ID NO: 14613 - RNA, 19 nt, synthetic construct
  source 1..19: mol_type = other RNA
gcagaaaagcacagggtgt

SEQ ID NO: 14614 - RNA, 19 nt, synthetic construct
  source 1..19: mol_type = other RNA
tacctggactgcagcaaca

SEQ ID NO: 14615 - RNA, 19 nt, synthetic construct
  source 1..19: mol_type = other RNA
tcggatgggagtgggggct

SEQ ID NO: 14616 - RNA, 19 nt, synthetic construct
  source 1..19: mol_type = other RNA
gatgggagtgggggctgca

SEQ ID NO: 14617 - RNA, 19 nt, synthetic construct
  source 1..19: mol_type = other RNA
gcaacacctgcacctgcag

SEQ ID NO: 14618 - RNA, 19 nt, synthetic construct
  source 1..19: mol_type = other RNA
caacacctgcacctgcagg

SEQ ID NO: 14619 - RNA, 19 nt, synthetic construct
  source 1..19: mol_type = other RNA
ctactgtggggacaacacc

SEQ ID NO: 14620 - RNA, 19 nt, synthetic construct
  source 1..19: mol_type = other RNA
aaggcggtggcgagagggc

SEQ ID NO: 14621 - RNA, 19 nt, synthetic construct
  source 1..19: mol_type = other RNA
gagagggccgggtggggac

SEQ ID NO: 14622 - RNA, 19 nt, synthetic construct
  source 1..19: mol_type = other RNA
gctctccccctcctgcccg

SEQ ID NO: 14623 - RNA, 19 nt, synthetic construct
  source 1..19: mol_type = other RNA
ggcacccaaggacccctgc

SEQ ID NO: 14624 - RNA, 19 nt, synthetic construct
  source 1..19: mol_type = other RNA
ggactccggacacctgccc

SEQ ID NO: 14625 - RNA, 19 nt, synthetic construct
  source 1..19: mol_type = other RNA
acacctgccccttgttctg

SEQ ID NO: 14626 - RNA, 19 nt, synthetic construct
  source 1..19: mol_type = other RNA
acatgggggctgtgagtgg

SEQ ID NO: 14627 - RNA, 19 nt, synthetic construct
  source 1..19: mol_type = other RNA
atgggggctgtgagtggca

SEQ ID NO: 14628 - RNA, 19 nt, synthetic construct
  source 1..19: mol_type = other RNA
aagtgcccacccagccagc

SEQ ID NO: 14629 - RNA, 19 nt, synthetic construct
  source 1..19: mol_type = other RNA
agtgcccacccagccagcc

SEQ ID NO: 14630 - RNA, 19 nt, synthetic construct
  source 1..19: mol_type = other RNA
tcatcaggaaggctgtggc

SEQ ID NO: 14631 - RNA, 19 nt, synthetic construct
  source 1..19: mol_type = other RNA
atcaggaaggctgtggcat

SEQ ID NO: 14632 - RNA, 19 nt, synthetic construct
  source 1..19: mol_type = other RNA
gcatgtcctggaactccag

SEQ ID NO: 14633 - RNA, 19 nt, synthetic construct
  source 1..19: mol_type = other RNA
ccattcaccttcaccaccg

SEQ ID NO: 14634 - RNA, 19 nt, synthetic construct
  source 1..19: mol_type = other RNA
ttcaccttcaccaccgcct

SEQ ID NO: 14635 - RNA, 19 nt, synthetic construct
  source 1..19: mol_type = other RNA
tcaccttcaccaccgcctg

SEQ ID NO: 14636 - RNA, 19 nt, synthetic construct
  source 1..19: mol_type = other RNA
cgcctgggtcccccactcc

SEQ ID NO: 14637 - RNA, 19 nt, synthetic construct
  source 1..19: mol_type = other RNA
cggccctcccggtctccac

SEQ ID NO: 14638 - RNA, 19 nt, synthetic construct
  source 1..19: mol_type = other RNA
ggccctcccggtctccacc

SEQ ID NO: 14639 - RNA, 19 nt, synthetic construct
  source 1..19: mol_type = other RNA
tccagctggtacaatgggc

SEQ ID NO: 14640 - RNA, 19 nt, synthetic construct
  source 1..19: mol_type = other RNA
cagctggtacaatgggcac

SEQ ID NO: 14641 - RNA, 19 nt, synthetic construct
  source 1..19: mol_type = other RNA
cgcccagagcccggcctgg

SEQ ID NO: 14642 - RNA, 19 nt, synthetic construct
  source 1..19: mol_type = other RNA
agagcccggcctgggaggc

SEQ ID NO: 14643 - RNA, 19 nt, synthetic construct
  source 1..19: mol_type = other RNA
gagcccggcctgggaggcg

SEQ ID NO: 14644 - RNA, 19 nt, synthetic construct
  source 1..19: mol_type = other RNA
gcccggcctgggaggcgga

SEQ ID NO: 14645 - RNA, 19 nt, synthetic construct
  source 1..19: mol_type = other RNA
cgctggaggagctgggcca

SEQ ID NO: 14646 - RNA, 19 nt, synthetic construct
  source 1..19: mol_type = other RNA
aggagctgggccagcaggt

SEQ ID NO: 14647 - RNA, 19 nt, synthetic construct
  source 1..19: mol_type = other RNA
cgtgccctgtggcccctcc

SEQ ID NO: 14648 - RNA, 19 nt, synthetic construct
  source 1..19: mol_type = other RNA
tgccctgtggcccctcccc

SEQ ID NO: 14649 - RNA, 19 nt, synthetic construct
  source 1..19: mol_type = other RNA
gccctgtggcccctccccg

SEQ ID NO: 14650 - RNA, 19 nt, synthetic construct
  source 1..19: mol_type = other RNA
ccctgtggcccctccccgg

SEQ ID NO: 14651 - RNA, 19 nt, synthetic construct
  source 1..19: mol_type = other RNA
cctgtggcccctccccggc

SEQ ID NO: 14652 - RNA, 19 nt, synthetic construct
  source 1..19: mol_type = other RNA
cccctccccggccccaggc

SEQ ID NO: 14653 - RNA, 19 nt, synthetic construct
  source 1..19: mol_type = other RNA
ggccccaggcaccagccct

SEQ ID NO: 14654 - RNA, 19 nt, synthetic construct
  source 1..19: mol_type = other RNA
gccccaggcaccagccctc

SEQ ID NO: 14655 - RNA, 19 nt, synthetic construct
  source 1..19: mol_type = other RNA
ccccaggcaccagccctca

SEQ ID NO: 14656 - RNA, 19 nt, synthetic construct
  source 1..19: mol_type = other RNA
ccaggcaccagccctcagc

SEQ ID NO: 14657 - RNA, 19 nt, synthetic construct
  source 1..19: mol_type = other RNA
accagccctcagccctccc

SEQ ID NO: 14658 - RNA, 19 nt, synthetic construct
  source 1..19: mol_type = other RNA
gccctcagccctccctcag

SEQ ID NO: 14659 - RNA, 19 nt, synthetic construct
  source 1..19: mol_type = other RNA
tcagccctccctcagtgcc

SEQ ID NO: 14660 - RNA, 19 nt, synthetic construct
  source 1..19: mol_type = other RNA
ccaacccagaccacagcaa

SEQ ID NO: 14661 - RNA, 19 nt, synthetic construct
  source 1..19: mol_type = other RNA
gtccagctcaggccccgtg

SEQ ID NO: 14662 - RNA, 19 nt, synthetic construct
  source 1..19: mol_type = other RNA
tcaccccctcggccccagg

SEQ ID NO: 14663 - RNA, 19 nt, synthetic construct
  source 1..19: mol_type = other RNA
gatcagggccgctggaggg

SEQ ID NO: 14664 - RNA, 19 nt, synthetic construct
  source 1..19: mol_type = other RNA
gatccgggtcctctgctgc

SEQ ID NO: 14665 - RNA, 19 nt, synthetic construct
  source 1..19: mol_type = other RNA
ccaccgaccacagagctgg

SEQ ID NO: 14666 - RNA, 19 nt, synthetic construct
  source 1..19: mol_type = other RNA
accacagagctggagacgg

SEQ ID NO: 14667 - RNA, 19 nt, synthetic construct
  source 1..19: mol_type = other RNA
ccacagagctggagacggc

SEQ ID NO: 14668 - RNA, 19 nt, synthetic construct
  source 1..19: mol_type = other RNA
accaccaccaccacccagg

SEQ ID NO: 14669 - RNA, 19 nt, synthetic construct
  source 1..19: mol_type = other RNA
ccaccaccaccacccaggc

SEQ ID NO: 14670 - RNA, 19 nt, synthetic construct
  source 1..19: mol_type = other RNA
accaccaccacccaggccc

SEQ ID NO: 14671 - RNA, 19 nt, synthetic construct
  source 1..19: mol_type = other RNA
ccaccacccaggccctgtt

SEQ ID NO: 14672 - RNA, 19 nt, synthetic construct
  source 1..19: mol_type = other RNA
caccacccaggccctgttc

SEQ ID NO: 14673 - RNA, 19 nt, synthetic construct
  source 1..19: mol_type = other RNA
ccacccaggccctgttctc

SEQ ID NO: 14674 - RNA, 19 nt, synthetic construct
  source 1..19: mol_type = other RNA
tagcccggggctgaccagg

SEQ ID NO: 14675 - RNA, 19 nt, synthetic construct
  source 1..19: mol_type = other RNA
ccggggctgaccagggctc

SEQ ID NO: 14676 - RNA, 19 nt, synthetic construct
  source 1..19: mol_type = other RNA
tgaccagggctcccccggc

SEQ ID NO: 14677 - RNA, 19 nt, synthetic construct
  source 1..19: mol_type = other RNA
accagggctcccccggcca

SEQ ID NO: 14678 - RNA, 19 nt, synthetic construct
  source 1..19: mol_type = other RNA
cagggctcccccggccagc

SEQ ID NO: 14679 - RNA, 19 nt, synthetic construct
  source 1..19: mol_type = other RNA
ctcagaaggactgacatcc

SEQ ID NO: 14680 - RNA, 19 nt, synthetic construct
  source 1..19: mol_type = other RNA
cgcctgcaggctccacaga

SEQ ID NO: 14681 - RNA, 19 nt, synthetic construct
  source 1..19: mol_type = other RNA
aacacgctcagcccttcca

SEQ ID NO: 14682 - RNA, 19 nt, synthetic construct
  source 1..19: mol_type = other RNA
acacgctcagcccttccag

SEQ ID NO: 14683 - RNA, 19 nt, synthetic construct
  source 1..19: mol_type = other RNA
acatggcgcccctcacagc

SEQ ID NO: 14684 - RNA, 19 nt, synthetic construct
  source 1..19: mol_type = other RNA
tggcgcccctcacagccac

SEQ ID NO: 14685 - RNA, 19 nt, synthetic construct
  source 1..19: mol_type = other RNA
cgcccctcacagccaccca

SEQ ID NO: 14686 - RNA, 19 nt, synthetic construct
  source 1..19: mol_type = other RNA
gcccgacaggcacagccag

SEQ ID NO: 14687 - RNA, 19 nt, synthetic construct
  source 1..19: mol_type = other RNA
cccgacaggcacagccagc

SEQ ID NO: 14688 - RNA, 19 nt, synthetic construct
  source 1..19: mol_type = other RNA
cgacaggcacagccagcac

SEQ ID NO: 14689 - RNA, 19 nt, synthetic construct
  source 1..19: mol_type = other RNA
gacaggcacagccagcacc

SEQ ID NO: 14690 - RNA, 19 nt, synthetic construct
  source 1..19: mol_type = other RNA
agctgtccacctctcaggc

SEQ ID NO: 14691 - RNA, 19 nt, synthetic construct
  source 1..19: mol_type = other RNA
ttgactaacaccaccacca

SEQ ID NO: 14692 - RNA, 19 nt, synthetic construct
  source 1..19: mol_type = other RNA
acaccaccaccagccaggg

SEQ ID NO: 14693 - RNA, 19 nt, synthetic construct
  source 1..19: mol_type = other RNA
accaccaccagccagggca

SEQ ID NO: 14694 - RNA, 19 nt, synthetic construct
  source 1..19: mol_type = other RNA
ccaccagccagggcacgac

SEQ ID NO: 14695 - RNA, 19 nt, synthetic construct
  source 1..19: mol_type = other RNA
cggccaccccgacctccac

SEQ ID NO: 14696 - RNA, 19 nt, synthetic construct
  source 1..19: mol_type = other RNA
ggccaccccgacctccacc

SEQ ID NO: 14697 - RNA, 19 nt, synthetic construct
  source 1..19: mol_type = other RNA
ccaccccgacctccaccct

SEQ ID NO: 14698 - RNA, 19 nt, synthetic construct
  source 1..19: mol_type = other RNA
gagaacagctccccctccc

SEQ ID NO: 14699 - RNA, 19 nt, synthetic construct
  source 1..19: mol_type = other RNA
accacggccaccacaccca

SEQ ID NO: 14700 - RNA, 19 nt, synthetic construct
  source 1..19: mol_type = other RNA
acggccaccacacccacag

SEQ ID NO: 14701 - RNA, 19 nt, synthetic construct
  source 1..19: mol_type = other RNA
ggccaccacacccacagtc

SEQ ID NO: 14702 - RNA, 19 nt, synthetic construct
  source 1..19: mol_type = other RNA
ccaccacacccacagtcac

SEQ ID NO: 14703 - RNA, 19 nt, synthetic construct
  source 1..19: mol_type = other RNA
acacccacagtcaccagct

SEQ ID NO: 14704 - RNA, 19 nt, synthetic construct
  source 1..19: mol_type = other RNA
acccacagtcaccagctcc

SEQ ID NO: 14705 - RNA, 19 nt, synthetic construct
  source 1..19: mol_type = other RNA
cccacagtcaccagctcca

SEQ ID NO: 14706 - RNA, 19 nt, synthetic construct
  source 1..19: mol_type = other RNA
tcaccagctccaaagccac

SEQ ID NO: 14707 - RNA, 19 nt, synthetic construct
  source 1..19: mol_type = other RNA
tccaaagccactccctcct

SEQ ID NO: 14708 - RNA, 19 nt, synthetic construct
  source 1..19: mol_type = other RNA
ccaaagccactccctcctc

SEQ ID NO: 14709 - RNA, 19 nt, synthetic construct
  source 1..19: mol_type = other RNA
agccactccctcctccagt

SEQ ID NO: 14710 - RNA, 19 nt, synthetic construct
  source 1..19: mol_type = other RNA
actccctcctccagtccag

SEQ ID NO: 14711 - RNA, 19 nt, synthetic construct
  source 1..19: mol_type = other RNA
acccatcccctcttcctcc

SEQ ID NO: 14712 - RNA, 19 nt, synthetic construct
  source 1..19: mol_type = other RNA
tcccctcttcctccctggg

SEQ ID NO: 14713 - RNA, 19 nt, synthetic construct
  source 1..19: mol_type = other RNA
ccctcttcctccctgggca

SEQ ID NO: 14714 - RNA, 19 nt, synthetic construct
  source 1..19: mol_type = other RNA
cctcttcctccctgggcac

SEQ ID NO: 14715 - RNA, 19 nt, synthetic construct
  source 1..19: mol_type = other RNA
ctcttcctccctgggcacc

SEQ ID NO: 14716 - RNA, 19 nt, synthetic construct
  source 1..19: mol_type = other RNA
tcttcctccctgggcacca

SEQ ID NO: 14717 - RNA, 19 nt, synthetic construct
  source 1..19: mol_type = other RNA
tcctccctgggcaccacct

SEQ ID NO: 14718 - RNA, 19 nt, synthetic construct
  source 1..19: mol_type = other RNA
tccctgggcaccacctgga

SEQ ID NO: 14719 - RNA, 19 nt, synthetic construct
  source 1..19: mol_type = other RNA
cctgggcaccacctggacc

SEQ ID NO: 14720 - RNA, 19 nt, synthetic construct
  source 1..19: mol_type = other RNA
ctgggcaccacctggaccc

SEQ ID NO: 14721 - RNA, 19 nt, synthetic construct
  source 1..19: mol_type = other RNA
tgggcaccacctggacccg

SEQ ID NO: 14722 - RNA, 19 nt, synthetic construct
  source 1..19: mol_type = other RNA
gggcaccacctggacccgc

SEQ ID NO: 14723 - RNA, 19 nt, synthetic construct
  source 1..19: mol_type = other RNA
tatcacagaccaccacacc

SEQ ID NO: 14724 - RNA, 19 nt, synthetic construct
  source 1..19: mol_type = other RNA
cggccaccatgtccacagc

SEQ ID NO: 14725 - RNA, 19 nt, synthetic construct
  source 1..19: mol_type = other RNA
ccaccatgtccacagccac

SEQ ID NO: 14726 - RNA, 19 nt, synthetic construct
  source 1..19: mol_type = other RNA
ccatgtccacagccacacc

SEQ ID NO: 14727 - RNA, 19 nt, synthetic construct
  source 1..19: mol_type = other RNA
cacaccctcctccactcca

SEQ ID NO: 14728 - RNA, 19 nt, synthetic construct
  source 1..19: mol_type = other RNA
actgcccacacctccacag

SEQ ID NO: 14729 - RNA, 19 nt, synthetic construct
  source 1..19: mol_type = other RNA
taccgccacggccaccaca

SEQ ID NO: 14730 - RNA, 19 nt, synthetic construct
  source 1..19: mol_type = other RNA
gctctgtggccaccccctc

SEQ ID NO: 14731 - RNA, 19 nt, synthetic construct
  source 1..19: mol_type = other RNA
ctctgtggccaccccctcc

SEQ ID NO: 14732 - RNA, 19 nt, synthetic construct
  source 1..19: mol_type = other RNA
tctgtggccaccccctcct

SEQ ID NO: 14733 - RNA, 19 nt, synthetic construct
  source 1..19: mol_type = other RNA
ctgtggccaccccctcctc

SEQ ID NO: 14734 - RNA, 19 nt, synthetic construct
  source 1..19: mol_type = other RNA
tgtggccaccccctcctcc

SEQ ID NO: 14735 - RNA, 19 nt, synthetic construct
  source 1..19: mol_type = other RNA
accccctcctccaccccag

SEQ ID NO: 14736 - RNA, 19 nt, synthetic construct
  source 1..19: mol_type = other RNA
ccctcctccaccccaggaa

SEQ ID NO: 14737 - RNA, 19 nt, synthetic construct
  source 1..19: mol_type = other RNA
ccacgggcttcacagccac

SEQ ID NO: 14738 - RNA, 19 nt, synthetic construct
  source 1..19: mol_type = other RNA
gcttcacagccaccccctc

SEQ ID NO: 14739 - RNA, 19 nt, synthetic construct
  source 1..19: mol_type = other RNA
tcacagccaccccctcctc

SEQ ID NO: 14740 - RNA, 19 nt, synthetic construct
  source 1..19: mol_type = other RNA
ctcctccagcccagggacg

SEQ ID NO: 14741 - RNA, 19 nt, synthetic construct
  source 1..19: mol_type = other RNA
tcctccagcccagggacgg

SEQ ID NO: 14742 - RNA, 19 nt, synthetic construct
  source 1..19: mol_type = other RNA
cctccagtgtggatcagca

SEQ ID NO: 14743 - RNA, 19 nt, synthetic construct
  source 1..19: mol_type = other RNA
acggtgaccccctcctcca

SEQ ID NO: 14744 - RNA, 19 nt, synthetic construct
  source 1..19: mol_type = other RNA
gtgaccccctcctccatcc

SEQ ID NO: 14745 - RNA, 19 nt, synthetic construct
  source 1..19: mol_type = other RNA
gaccccctcctccatcccg

SEQ ID NO: 14746 - RNA, 19 nt, synthetic construct
  source 1..19: mol_type = other RNA
ccccctcctccatcccggg

SEQ ID NO: 14747 - RNA, 19 nt, synthetic construct
  source 1..19: mol_type = other RNA
ccctcctccatcccgggga

SEQ ID NO: 14748 - RNA, 19 nt, synthetic construct
  source 1..19: mol_type = other RNA
gccacagtgctgaccacca

SEQ ID NO: 14749 - RNA, 19 nt, synthetic construct
  source 1..19: mol_type = other RNA
tgctgaccaccaccaccac

SEQ ID NO: 14750 - RNA, 19 nt, synthetic construct
  source 1..19: mol_type = other RNA
gctgaccaccaccaccaca

SEQ ID NO: 14751 - RNA, 19 nt, synthetic construct
  source 1..19: mol_type = other RNA
accaccaccaccacaactg

SEQ ID NO: 14752 - RNA, 19 nt, synthetic construct
  source 1..19: mol_type = other RNA
ccaccacaactgtggccac

SEQ ID NO: 14753 - RNA, 19 nt, synthetic construct
  source 1..19: mol_type = other RNA
gtggccactggttctatgg

SEQ ID NO: 14754 - RNA, 19 nt, synthetic construct
  source 1..19: mol_type = other RNA
cactgaccaccacggccac

SEQ ID NO: 14755 - RNA, 19 nt, synthetic construct
  source 1..19: mol_type = other RNA
acggccaccggctccacca

SEQ ID NO: 14756 - RNA, 19 nt, synthetic construct
  source 1..19: mol_type = other RNA
ccaccggctccaccaccaa

SEQ ID NO: 14757 - RNA, 19 nt, synthetic construct
  source 1..19: mol_type = other RNA
ccaccaccaacccctcctc

SEQ ID NO: 14758 - RNA, 19 nt, synthetic construct
  source 1..19: mol_type = other RNA
accaccaacccctcctcaa

SEQ ID NO: 14759 - RNA, 19 nt, synthetic construct
  source 1..19: mol_type = other RNA
accaacccctcctcaactc

SEQ ID NO: 14760 - RNA, 19 nt, synthetic construct
  source 1..19: mol_type = other RNA
ggacaactcccatcccccc

SEQ ID NO: 14761 - RNA, 19 nt, synthetic construct
  source 1..19: mol_type = other RNA
acaactcccatccccccag

SEQ ID NO: 14762 - RNA, 19 nt, synthetic construct
  source 1..19: mol_type = other RNA
ctcccatccccccagtgct

SEQ ID NO: 14763 - RNA, 19 nt, synthetic construct
  source 1..19: mol_type = other RNA
ccccccagtgctgaccacc

SEQ ID NO: 14764 - RNA, 19 nt, synthetic construct
  source 1..19: mol_type = other RNA
ccccagtgctgaccaccac

SEQ ID NO: 14765 - RNA, 19 nt, synthetic construct
  source 1..19: mol_type = other RNA
gctgaccaccaccgccacc

SEQ ID NO: 14766 - RNA, 19 nt, synthetic construct
  source 1..19: mol_type = other RNA
accaccaccgccaccacac

SEQ ID NO: 14767 - RNA, 19 nt, synthetic construct
  source 1..19: mol_type = other RNA
ccaccgccaccacacctgc

SEQ ID NO: 14768 - RNA, 19 nt, synthetic construct
  source 1..19: mol_type = other RNA
accgccaccacacctgcag

SEQ ID NO: 14769 - RNA, 19 nt, synthetic construct
  source 1..19: mol_type = other RNA
ccgccaccacacctgcagc

SEQ ID NO: 14770 - RNA, 19 nt, synthetic construct
  source 1..19: mol_type = other RNA
acacctgcagccaccagca

SEQ ID NO: 14771 - RNA, 19 nt, synthetic construct
  source 1..19: mol_type = other RNA
acctgcagccaccagcaac

SEQ ID NO: 14772 - RNA, 19 nt, synthetic construct
  source 1..19: mol_type = other RNA
ctgcagccaccagcaacac

SEQ ID NO: 14773 - RNA, 19 nt, synthetic construct
  source 1..19: mol_type = other RNA
cagccaccagcaacacagt

SEQ ID NO: 14774 - RNA, 19 nt, synthetic construct
  source 1..19: mol_type = other RNA
gccaccagcaacacagtga

SEQ ID NO: 14775 - RNA, 19 nt, synthetic construct
  source 1..19: mol_type = other RNA
gtgactccctcctctgccc

SEQ ID NO: 14776 - RNA, 19 nt, synthetic construct
  source 1..19: mol_type = other RNA
acccacacacccccagtgc

SEQ ID NO: 14777 - RNA, 19 nt, synthetic construct
  source 1..19: mol_type = other RNA
ccacacacccccagtgccg

SEQ ID NO: 14778 - RNA, 19 nt, synthetic construct
  source 1..19: mol_type = other RNA
gaacaccatggccaccaca

SEQ ID NO: 14779 - RNA, 19 nt, synthetic construct
  source 1..19: mol_type = other RNA
gatccctgccccccagcag

SEQ ID NO: 14780 - RNA, 19 nt, synthetic construct
  source 1..19: mol_type = other RNA
tccctgccccccagcagtc

SEQ ID NO: 14781 - RNA, 19 nt, synthetic construct
  source 1..19: mol_type = other RNA
ccctgccccccagcagtcc

SEQ ID NO: 14782 - RNA, 19 nt, synthetic construct
  source 1..19: mol_type = other RNA
tgccccccagcagtcccca

SEQ ID NO: 14783 - RNA, 19 nt, synthetic construct
  source 1..19: mol_type = other RNA
actccagccctttccagcc

SEQ ID NO: 14784 - RNA, 19 nt, synthetic construct
  source 1..19: mol_type = other RNA
ctccagccctttccagccc

SEQ ID NO: 14785 - RNA, 19 nt, synthetic construct
  source 1..19: mol_type = other RNA
agtcacccccttctccagg

SEQ ID NO: 14786 - RNA, 19 nt, synthetic construct
  source 1..19: mol_type = other RNA
gtcacccccttctccaggg

SEQ ID NO: 14787 - RNA, 19 nt, synthetic construct
  source 1..19: mol_type = other RNA
tcacccccttctccaggga

SEQ ID NO: 14788 - RNA, 19 nt, synthetic construct
  source 1..19: mol_type = other RNA
cacccccttctccagggac

SEQ ID NO: 14789 - RNA, 19 nt, synthetic construct
  source 1..19: mol_type = other RNA
cccccttctccagggacga

SEQ ID NO: 14790 - RNA, 19 nt, synthetic construct
  source 1..19: mol_type = other RNA
ccttctccagggacgacca

SEQ ID NO: 14791 - RNA, 19 nt, synthetic construct
  source 1..19: mol_type = other RNA
cgaccaccccgggccacac

SEQ ID NO: 14792 - RNA, 19 nt, synthetic construct
  source 1..19: mol_type = other RNA
cgggccacaccacggccac

SEQ ID NO: 14793 - RNA, 19 nt, synthetic construct
  source 1..19: mol_type = other RNA
cacaccacggccacctcca

SEQ ID NO: 14794 - RNA, 19 nt, synthetic construct
  source 1..19: mol_type = other RNA
ccacctccaggaccacagc

SEQ ID NO: 14795 - RNA, 19 nt, synthetic construct
  source 1..19: mol_type = other RNA
cctccaggaccacagccac

SEQ ID NO: 14796 - RNA, 19 nt, synthetic construct
  source 1..19: mol_type = other RNA
aggaccacagccacggcca

SEQ ID NO: 14797 - RNA, 19 nt, synthetic construct
  source 1..19: mol_type = other RNA
gaccacagccacggccaca

SEQ ID NO: 14798 - RNA, 19 nt, synthetic construct
  source 1..19: mol_type = other RNA
accacagccacggccacac

SEQ ID NO: 14799 - RNA, 19 nt, synthetic construct
  source 1..19: mol_type = other RNA
cacagccacggccacaccc

SEQ ID NO: 14800 - RNA, 19 nt, synthetic construct
  source 1..19: mol_type = other RNA
acagccacggccacaccca

SEQ ID NO: 14801 - RNA, 19 nt, synthetic construct
  source 1..19: mol_type = other RNA
cagccacggccacacccag

SEQ ID NO: 14802 - RNA, 19 nt, synthetic construct
  source 1..19: mol_type = other RNA
agccacggccacacccagc

SEQ ID NO: 14803 - RNA, 19 nt, synthetic construct
  source 1..19: mol_type = other RNA
gccacggccacacccagca

SEQ ID NO: 14804 - RNA, 19 nt, synthetic construct
  source 1..19: mol_type = other RNA
atgggctgtgagccccagt

SEQ ID NO: 14805 - RNA, 19 nt, synthetic construct
  source 1..19: mol_type = other RNA
tggtcagagtggctggact

SEQ ID NO: 14806 - RNA, 19 nt, synthetic construct
  source 1..19: mol_type = other RNA
gtgcggccggaggggccgt

SEQ ID NO: 14807 - RNA, 19 nt, synthetic construct
  source 1..19: mol_type = other RNA
ccgtgcccaggcccagcct

SEQ ID NO: 14808 - RNA, 19 nt, synthetic construct
  source 1..19: mol_type = other RNA
atgcagcctggactttggc

SEQ ID NO: 14809 - RNA, 19 nt, synthetic construct
  source 1..19: mol_type = other RNA
tgcagcctggactttggcc

SEQ ID NO: 14810 - RNA, 19 nt, synthetic construct
  source 1..19: mol_type = other RNA
agcctggactttggcctgg

SEQ ID NO: 14811 - RNA, 19 nt, synthetic construct
  source 1..19: mol_type = other RNA
ggcctggtctgcaggaacc

SEQ ID NO: 14812 - RNA, 19 nt, synthetic construct
  source 1..19: mol_type = other RNA
tacggccatgccctcctcc

SEQ ID NO: 14813 - RNA, 19 nt, synthetic construct
  source 1..19: mol_type = other RNA
ggccatgccctcctccact

SEQ ID NO: 14814 - RNA, 19 nt, synthetic construct
  source 1..19: mol_type = other RNA
cgactgagtccactggatc

SEQ ID NO: 14815 - RNA, 19 nt, synthetic construct
  source 1..19: mol_type = other RNA
ccccgtcctccaccccagg

SEQ ID NO: 14816 - RNA, 19 nt, synthetic construct
  source 1..19: mol_type = other RNA
cccgtcctccaccccaggg

SEQ ID NO: 14817 - RNA, 19 nt, synthetic construct
  source 1..19: mol_type = other RNA
cgtcctccaccccagggac

SEQ ID NO: 14818 - RNA, 19 nt, synthetic construct
  source 1..19: mol_type = other RNA
gtcctccaccccagggacc

SEQ ID NO: 14819 - RNA, 19 nt, synthetic construct
  source 1..19: mol_type = other RNA
cctccaccccagggaccac

SEQ ID NO: 14820 - RNA, 19 nt, synthetic construct
  source 1..19: mol_type = other RNA
ctccaccccagggaccacc

SEQ ID NO: 14821 - RNA, 19 nt, synthetic construct
  source 1..19: mol_type = other RNA
tccaccccagggaccacct

SEQ ID NO: 14822 - RNA, 19 nt, synthetic construct
  source 1..19: mol_type = other RNA
ccaccccagggaccacctg

SEQ ID NO: 14823 - RNA, 19 nt, synthetic construct
  source 1..19: mol_type = other RNA
ccaccgcctcctccaccca

SEQ ID NO: 14824 - RNA, 19 nt, synthetic construct
  source 1..19: mol_type = other RNA
tcctccacccaggcaactg

SEQ ID NO: 14825 - RNA, 19 nt, synthetic construct
  source 1..19: mol_type = other RNA
acacccacagtcaccagct

SEQ ID NO: 14826 - RNA, 19 nt, synthetic construct
  source 1..19: mol_type = other RNA
acccacagtcaccagctcc

SEQ ID NO: 14827 - RNA, 19 nt, synthetic construct
  source 1..19: mol_type = other RNA
cccacagtcaccagctcca

SEQ ID NO: 14828 - RNA, 19 nt, synthetic construct
  source 1..19: mol_type = other RNA
tcaccagctccaaagccac

SEQ ID NO: 14829 - RNA, 19 nt, synthetic construct
  source 1..19: mol_type = other RNA
gctccaaagccactccctt

SEQ ID NO: 14830 - RNA, 19 nt, synthetic construct
  source 1..19: mol_type = other RNA
tccaaagccactcccttct

SEQ ID NO: 14831 - RNA, 19 nt, synthetic construct
  source 1..19: mol_type = other RNA
tacagccatcccctcctcc

SEQ ID NO: 14832 - RNA, 19 nt, synthetic construct
  source 1..19: mol_type = other RNA
acagccatcccctcctcct

SEQ ID NO: 14833 - RNA, 19 nt, synthetic construct
  source 1..19: mol_type = other RNA
cctcctcctccctgggcac

SEQ ID NO: 14834 - RNA, 19 nt, synthetic construct
  source 1..19: mol_type = other RNA
tcctccctgggcaccacct

SEQ ID NO: 14835 - RNA, 19 nt, synthetic construct
  source 1..19: mol_type = other RNA
tccctgggcaccacctgga

SEQ ID NO: 14836 - RNA, 19 nt, synthetic construct
  source 1..19: mol_type = other RNA
cctgggcaccacctggacc

SEQ ID NO: 14837 - RNA, 19 nt, synthetic construct
  source 1..19: mol_type = other RNA
ctgggcaccacctggaccc

SEQ ID NO: 14838 - RNA, 19 nt, synthetic construct
  source 1..19: mol_type = other RNA
tgggcaccacctggacccg

SEQ ID NO: 14839 - RNA, 19 nt, synthetic construct
  source 1..19: mol_type = other RNA
gggcaccacctggacccgc

SEQ ID NO: 14840 - RNA, 19 nt, synthetic construct
  source 1..19: mol_type = other RNA
tatcacagaccaccacacc

SEQ ID NO: 14841 - RNA, 19 nt, synthetic construct
  source 1..19: mol_type = other RNA
cggccaccatgtccacagc

SEQ ID NO: 14842 - RNA, 19 nt, synthetic construct
  source 1..19: mol_type = other RNA
ccaccatgtccacagccac

SEQ ID NO: 14843 - RNA, 19 nt, synthetic construct
  source 1..19: mol_type = other RNA
ccatgtccacagccacacc

SEQ ID NO: 14844 - RNA, 19 nt, synthetic construct
  source 1..19: mol_type = other RNA
cacaccctcctccactcca

SEQ ID NO: 14845 - RNA, 19 nt, synthetic construct
  source 1..19: mol_type = other RNA
gctctgtggccaccccctc

SEQ ID NO: 14846 - RNA, 19 nt, synthetic construct
  source 1..19: mol_type = other RNA
ctctgtggccaccccctcc

SEQ ID NO: 14847 - RNA, 19 nt, synthetic construct
  source 1..19: mol_type = other RNA
tctgtggccaccccctcct

SEQ ID NO: 14848 - RNA, 19 nt, synthetic construct
  source 1..19: mol_type = other RNA
ctgtggccaccccctcctc

SEQ ID NO: 14849 - RNA, 19 nt, synthetic construct
  source 1..19: mol_type = other RNA
tgtggccaccccctcctcc

SEQ ID NO: 14850 - RNA, 19 nt, synthetic construct
  source 1..19: mol_type = other RNA
accccctcctccaccccag

SEQ ID NO: 14851 - RNA, 19 nt, synthetic construct
  source 1..19: mol_type = other RNA
ccctcctccaccccaggaa

SEQ ID NO: 14852 - RNA, 19 nt, synthetic construct
  source 1..19: mol_type = other RNA
ccacgggcttcacagccac

SEQ ID NO: 14853 - RNA, 19 nt, synthetic construct
  source 1..19: mol_type = other RNA
gcttcacagccaccccctc

SEQ ID NO: 14854 - RNA, 19 nt, synthetic construct
  source 1..19: mol_type = other RNA
tcacagccaccccctcctc

SEQ ID NO: 14855 - RNA, 19 nt, synthetic construct
  source 1..19: mol_type = other RNA
ctcctccagcccagggacg

SEQ ID NO: 14856 - RNA, 19 nt, synthetic construct
  source 1..19: mol_type = other RNA
tcctccagcccagggacgg

SEQ ID NO: 14857 - RNA, 19 nt, synthetic construct
  source 1..19: mol_type = other RNA
acccacaaccagaggttcc

SEQ ID NO: 14858 - RNA, 19 nt, synthetic construct
  source 1..19: mol_type = other RNA
cccacaaccagaggttcca

SEQ ID NO: 14859 - RNA, 19 nt, synthetic construct
  source 1..19: mol_type = other RNA
acggtgaccccctcctcca

SEQ ID NO: 14860 - RNA, 19 nt, synthetic construct
  source 1..19: mol_type = other RNA
gtgaccccctcctccatcc

SEQ ID NO: 14861 - RNA, 19 nt, synthetic construct
  source 1..19: mol_type = other RNA
gaccccctcctccatcccg

SEQ ID NO: 14862 - RNA, 19 nt, synthetic construct
  source 1..19: mol_type = other RNA
ccccctcctccatcccggg

SEQ ID NO: 14863 - RNA, 19 nt, synthetic construct
  source 1..19: mol_type = other RNA
ccctcctccatcccgggga

SEQ ID NO: 14864 - RNA, 19 nt, synthetic construct
  source 1..19: mol_type = other RNA
cccccacagtgctgaccac

SEQ ID NO: 14865 - RNA, 19 nt, synthetic construct
  source 1..19: mol_type = other RNA
ccccacagtgctgaccacc

SEQ ID NO: 14866 - RNA, 19 nt, synthetic construct
  source 1..19: mol_type = other RNA
cccacagtgctgaccacca

SEQ ID NO: 14867 - RNA, 19 nt, synthetic construct
  source 1..19: mol_type = other RNA
tgctgaccaccaccaccac

SEQ ID NO: 14868 - RNA, 19 nt, synthetic construct
  source 1..19: mol_type = other RNA
gctgaccaccaccaccaca

SEQ ID NO: 14869 - RNA, 19 nt, synthetic construct
  source 1..19: mol_type = other RNA
accaccaccaccacaactg

SEQ ID NO: 14870 - RNA, 19 nt, synthetic construct
  source 1..19: mol_type = other RNA
ccaccacaactgtggccac

SEQ ID NO: 14871 - RNA, 19 nt, synthetic construct
  source 1..19: mol_type = other RNA
gtggccactggttctatgg

SEQ ID NO: 14872 - RNA, 19 nt, synthetic construct
  source 1..19: mol_type = other RNA
cactgaccaccacggccac

SEQ ID NO: 14873 - RNA, 19 nt, synthetic construct
  source 1..19: mol_type = other RNA
acggccaccggctccacca

SEQ ID NO: 14874 - RNA, 19 nt, synthetic construct
  source 1..19: mol_type = other RNA
ccaccggctccaccaccaa

SEQ ID NO: 14875 - RNA, 19 nt, synthetic construct
  source 1..19: mol_type = other RNA
ccaccaccaacccctcctc

SEQ ID NO: 14876 - RNA, 19 nt, synthetic construct
  source 1..19: mol_type = other RNA
accaccaacccctcctcaa

SEQ ID NO: 14877 - RNA, 19 nt, synthetic construct
  source 1..19: mol_type = other RNA
accaacccctcctcaactc

SEQ ID NO: 14878 - RNA, 19 nt, synthetic construct
  source 1..19: mol_type = other RNA
ccaacccctcctcaactcc

SEQ ID NO: 14879 - RNA, 19 nt, synthetic construct
  source 1..19: mol_type = other RNA
acccctcctcaactccagg

SEQ ID NO: 14880 - RNA, 19 nt, synthetic construct
  source 1..19: mol_type = other RNA
ccctcctcaactccaggga

SEQ ID NO: 14881 - RNA, 19 nt, synthetic construct
  source 1..19: mol_type = other RNA
ctcctcaactccagggaca

SEQ ID NO: 14882 - RNA, 19 nt, synthetic construct
  source 1..19: mol_type = other RNA
ccccccagtgctgaccacc

SEQ ID NO: 14883 - RNA, 19 nt, synthetic construct
  source 1..19: mol_type = other RNA
ccccagtgctgaccaccac

SEQ ID NO: 14884 - RNA, 19 nt, synthetic construct
  source 1..19: mol_type = other RNA
gctgaccaccaccgccacc

SEQ ID NO: 14885 - RNA, 19 nt, synthetic construct
  source 1..19: mol_type = other RNA
accaccaccgccaccacac

SEQ ID NO: 14886 - RNA, 19 nt, synthetic construct
  source 1..19: mol_type = other RNA
ccaccgccaccacacctgc

SEQ ID NO: 14887 - RNA, 19 nt, synthetic construct
  source 1..19: mol_type = other RNA
accgccaccacacctgcag

SEQ ID NO: 14888 - RNA, 19 nt, synthetic construct
  source 1..19: mol_type = other RNA
ccgccaccacacctgcagc

SEQ ID NO: 14889 - RNA, 19 nt, synthetic construct
  source 1..19: mol_type = other RNA
acacctgcagccaccagca

SEQ ID NO: 14890 - RNA, 19 nt, synthetic construct
  source 1..19: mol_type = other RNA
tgcagccaccagcagcaca

SEQ ID NO: 14891 - RNA, 19 nt, synthetic construct
  source 1..19: mol_type = other RNA
agccaccagcagcacagtg

SEQ ID NO: 14892 - RNA, 19 nt, synthetic construct
  source 1..19: mol_type = other RNA
cagcacagtgactccctcc

SEQ ID NO: 14893 - RNA, 19 nt, synthetic construct
  source 1..19: mol_type = other RNA
agcacagtgactccctcct

SEQ ID NO: 14894 - RNA, 19 nt, synthetic construct
  source 1..19: mol_type = other RNA
gtgactccctcctctgccc

SEQ ID NO: 14895 - RNA, 19 nt, synthetic construct
  source 1..19: mol_type = other RNA
acccacacacccccagtgc

SEQ ID NO: 14896 - RNA, 19 nt, synthetic construct
  source 1..19: mol_type = other RNA
ccacacacccccagtgccg

SEQ ID NO: 14897 - RNA, 19 nt, synthetic construct
  source 1..19: mol_type = other RNA
gaacaccacggccaccaca

SEQ ID NO: 14898 - RNA, 19 nt, synthetic construct
  source 1..19: mol_type = other RNA
tgtcccccagcagtcccca

SEQ ID NO: 14899 - RNA, 19 nt, synthetic construct
  source 1..19: mol_type = other RNA
ttcggccacctcaggcacc

SEQ ID NO: 14900 - RNA, 19 nt, synthetic construct
  source 1..19: mol_type = other RNA
ggccacctcaggcaccttg

SEQ ID NO: 14901 - RNA, 19 nt, synthetic construct
  source 1..19: mol_type = other RNA
cctcaggcaccttgggcac

SEQ ID NO: 14902 - RNA, 19 nt, synthetic construct
  source 1..19: mol_type = other RNA
ggcaccttgggcaccaccc

SEQ ID NO: 14903 - RNA, 19 nt, synthetic construct
  source 1..19: mol_type = other RNA
gggacttcccacaccccag

SEQ ID NO: 14904 - RNA, 19 nt, synthetic construct
  source 1..19: mol_type = other RNA
ttcccacaccccagcagca

SEQ ID NO: 14905 - RNA, 19 nt, synthetic construct
  source 1..19: mol_type = other RNA
ctgtccagccctcacccta

SEQ ID NO: 14906 - RNA, 19 nt, synthetic construct
  source 1..19: mol_type = other RNA
agtcacccccttctccagg

SEQ ID NO: 14907 - RNA, 19 nt, synthetic construct
  source 1..19: mol_type = other RNA
gtcacccccttctccaggg

SEQ ID NO: 14908 - RNA, 19 nt, synthetic construct
  source 1..19: mol_type = other RNA
tcacccccttctccaggga

SEQ ID NO: 14909 - RNA, 19 nt, synthetic construct
  source 1..19: mol_type = other RNA
cacccccttctccagggac

SEQ ID NO: 14910 - RNA, 19 nt, synthetic construct
  source 1..19: mol_type = other RNA
cccccttctccagggacga

SEQ ID NO: 14911 - RNA, 19 nt, synthetic construct
  source 1..19: mol_type = other RNA
ccttctccagggacgacca

SEQ ID NO: 14912 - RNA, 19 nt, synthetic construct
  source 1..19: mol_type = other RNA
cgaccaccccgggccacac

SEQ ID NO: 14913 - RNA, 19 nt, synthetic construct
  source 1..19: mol_type = other RNA
ggccacaccagggccacct

SEQ ID NO: 14914 - RNA, 19 nt, synthetic construct
  source 1..19: mol_type = other RNA
gccacaccagggccacctc

SEQ ID NO: 14915 - RNA, 19 nt, synthetic construct
  source 1..19: mol_type = other RNA
ccacaccagggccacctcc

SEQ ID NO: 14916 - RNA, 19 nt, synthetic construct
  source 1..19: mol_type = other RNA
acaccagggccacctccag

SEQ ID NO: 14917 - RNA, 19 nt, synthetic construct
  source 1..19: mol_type = other RNA
caccagggccacctccagg

SEQ ID NO: 14918 - RNA, 19 nt, synthetic construct
  source 1..19: mol_type = other RNA
accagggccacctccagga

SEQ ID NO: 14919 - RNA, 19 nt, synthetic construct
  source 1..19: mol_type = other RNA
ccagggccacctccaggac

SEQ ID NO: 14920 - RNA, 19 nt, synthetic construct
  source 1..19: mol_type = other RNA
gggccacctccaggaccac

SEQ ID NO: 14921 - RNA, 19 nt, synthetic construct
  source 1..19: mol_type = other RNA
ccacggccacggccacacc

SEQ ID NO: 14922 - RNA, 19 nt, synthetic construct
  source 1..19: mol_type = other RNA
cacggccacggccacaccc

SEQ ID NO: 14923 - RNA, 19 nt, synthetic construct
  source 1..19: mol_type = other RNA
acggccacggccacaccca

SEQ ID NO: 14924 - RNA, 19 nt, synthetic construct
  source 1..19: mol_type = other RNA
ggccacggccacacccagc

SEQ ID NO: 14925 - RNA, 19 nt, synthetic construct
  source 1..19: mol_type = other RNA
gccacggccacacccagca

SEQ ID NO: 14926 - RNA, 19 nt, synthetic construct
  source 1..19: mol_type = other RNA
atgggctgtgagccccagt

SEQ ID NO: 14927 - RNA, 19 nt, synthetic construct
  source 1..19: mol_type = other RNA
tggtcagagtggctggact

SEQ ID NO: 14928 - RNA, 19 nt, synthetic construct
  source 1..19: mol_type = other RNA
gtgcggccggaggggccgt

SEQ ID NO: 14929 - RNA, 19 nt, synthetic construct
  source 1..19: mol_type = other RNA
ccgtgcccaggcccagcct

SEQ ID NO: 14930 - RNA, 19 nt, synthetic construct
  source 1..19: mol_type = other RNA
atgcagcctggactttggc

SEQ ID NO: 14931 - RNA, 19 nt, synthetic construct
  source 1..19: mol_type = other RNA
tgcagcctggactttggcc

SEQ ID NO: 14932 - RNA, 19 nt, synthetic construct
  source 1..19: mol_type = other RNA
agcctggactttggcctgg

SEQ ID NO: 14933 - RNA, 19 nt, synthetic construct
  source 1..19: mol_type = other RNA
ggcctggtctgcaggaacc

SEQ ID NO: 14934 - RNA, 19 nt, synthetic construct
  source 1..19: mol_type = other RNA
gccaccagctctacggcca

SEQ ID NO: 14935 - RNA, 19 nt, synthetic construct
  source 1..19: mol_type = other RNA
actccagggacgacctgga

SEQ ID NO: 14936 - RNA, 19 nt, synthetic construct
  source 1..19: mol_type = other RNA
agagcagaccacagcagcc

SEQ ID NO: 14937 - RNA, 19 nt, synthetic construct
  source 1..19: mol_type = other RNA
agcagaccacagcagccac

SEQ ID NO: 14938 - RNA, 19 nt, synthetic construct
  source 1..19: mol_type = other RNA
gggaacagctccccctccc

SEQ ID NO: 14939 - RNA, 19 nt, synthetic construct
  source 1..19: mol_type = other RNA
ctgaccagcacggccacca

SEQ ID NO: 14940 - RNA, 19 nt, synthetic construct
  source 1..19: mol_type = other RNA
ccagcacggccaccacacc

SEQ ID NO: 14941 - RNA, 19 nt, synthetic construct
  source 1..19: mol_type = other RNA
agcacggccaccacaccca

SEQ ID NO: 14942 - RNA, 19 nt, synthetic construct
  source 1..19: mol_type = other RNA
ttccaaagccacttcctcc

SEQ ID NO: 14943 - RNA, 19 nt, synthetic construct
  source 1..19: mol_type = other RNA
aaagccacttcctcctcca

SEQ ID NO: 14944 - RNA, 19 nt, synthetic construct
  source 1..19: mol_type = other RNA
agccacttcctcctccagt

SEQ ID NO: 14945 - RNA, 19 nt, synthetic construct
  source 1..19: mol_type = other RNA
gccacttcctcctccagtc

SEQ ID NO: 14946 - RNA, 19 nt, synthetic construct
  source 1..19: mol_type = other RNA
ccacttcctcctccagtcc

SEQ ID NO: 14947 - RNA, 19 nt, synthetic construct
  source 1..19: mol_type = other RNA
acttcctcctccagtccaa

SEQ ID NO: 14948 - RNA, 19 nt, synthetic construct
  source 1..19: mol_type = other RNA
ttcctcctccagtccaagg

SEQ ID NO: 14949 - RNA, 19 nt, synthetic construct
  source 1..19: mol_type = other RNA
acccatcccctccttcacc

SEQ ID NO: 14950 - RNA, 19 nt, synthetic construct
  source 1..19: mol_type = other RNA
ccctccttcacccttggga

SEQ ID NO: 14951 - RNA, 19 nt, synthetic construct
  source 1..19: mol_type = other RNA
ctccttcacccttgggacc

SEQ ID NO: 14952 - RNA, 19 nt, synthetic construct
  source 1..19: mol_type = other RNA
accgggaccctcccagaac

SEQ ID NO: 14953 - RNA, 19 nt, synthetic construct
  source 1..19: mol_type = other RNA
acagaccaccacacccatg

SEQ ID NO: 14954 - RNA, 19 nt, synthetic construct
  source 1..19: mol_type = other RNA
acccatggccaccatgtcc

SEQ ID NO: 14955 - RNA, 19 nt, synthetic construct
  source 1..19: mol_type = other RNA
acccctcctccactccgga

SEQ ID NO: 14956 - RNA, 19 nt, synthetic construct
  source 1..19: mol_type = other RNA
accacccacacctccacag

SEQ ID NO: 14957 - RNA, 19 nt, synthetic construct
  source 1..19: mol_type = other RNA
ctgaccacgaaggccacca

SEQ ID NO: 14958 - RNA, 19 nt, synthetic construct
  source 1..19: mol_type = other RNA
agggccaccagttccatgt

SEQ ID NO: 14959 - RNA, 19 nt, synthetic construct
  source 1..19: mol_type = other RNA
tccatgtccaccccctcct

SEQ ID NO: 14960 - RNA, 19 nt, synthetic construct
  source 1..19: mol_type = other RNA
ccatgtccaccccctcctc

SEQ ID NO: 14961 - RNA, 19 nt, synthetic construct
  source 1..19: mol_type = other RNA
catgtccaccccctcctcc

SEQ ID NO: 14962 - RNA, 19 nt, synthetic construct
  source 1..19: mol_type = other RNA
ccaccccctcctccactcc

SEQ ID NO: 14963 - RNA, 19 nt, synthetic construct
  source 1..19: mol_type = other RNA
gcagccactacaactgcag

SEQ ID NO: 14964 - RNA, 19 nt, synthetic construct
  source 1..19: mol_type = other RNA
cagccactacaactgcagc

SEQ ID NO: 14965 - RNA, 19 nt, synthetic construct
  source 1..19: mol_type = other RNA
tacaactgcagccactggc

SEQ ID NO: 14966 - RNA, 19 nt, synthetic construct
  source 1..19: mol_type = other RNA
acaactgcagccactggcc

SEQ ID NO: 14967 - RNA, 19 nt, synthetic construct
  source 1..19: mol_type = other RNA
tgcagccactggccccacg

SEQ ID NO: 14968 - RNA, 19 nt, synthetic construct
  source 1..19: mol_type = other RNA
gccactggccccacggcca

SEQ ID NO: 14969 - RNA, 19 nt, synthetic construct
  source 1..19: mol_type = other RNA
tggccccacggccaccccg

SEQ ID NO: 14970 - RNA, 19 nt, synthetic construct
  source 1..19: mol_type = other RNA
ccccgtcctccaccccagg

SEQ ID NO: 14971 - RNA, 19 nt, synthetic construct
  source 1..19: mol_type = other RNA
cccgtcctccaccccaggg

SEQ ID NO: 14972 - RNA, 19 nt, synthetic construct
  source 1..19: mol_type = other RNA
cgtcctccaccccagggac

SEQ ID NO: 14973 - RNA, 19 nt, synthetic construct
  source 1..19: mol_type = other RNA
gtcctccaccccagggacc

SEQ ID NO: 14974 - RNA, 19 nt, synthetic construct
  source 1..19: mol_type = other RNA
cctccaccccagggaccac

SEQ ID NO: 14975 - RNA, 19 nt, synthetic construct
  source 1..19: mol_type = other RNA
ctccaccccagggaccacc

SEQ ID NO: 14976 - RNA, 19 nt, synthetic construct
  source 1..19: mol_type = other RNA
tccaccccagggaccacct

SEQ ID NO: 14977 - RNA, 19 nt, synthetic construct
  source 1..19: mol_type = other RNA
ccaccccagggaccacctg

SEQ ID NO: 14978 - RNA, 19 nt, synthetic construct
  source 1..19: mol_type = other RNA
agcccagcactacagccac

SEQ ID NO: 14979 - RNA, 19 nt, synthetic construct
  source 1..19: mol_type = other RNA
ccaccgcctcctccacccg

SEQ ID NO: 14980 - RNA, 19 nt, synthetic construct
  source 1..19: mol_type = other RNA
accgcctcctccacccggg

SEQ ID NO: 14981 - RNA, 19 nt, synthetic construct
  source 1..19: mol_type = other RNA
ccgcctcctccacccgggc

SEQ ID NO: 14982 - RNA, 19 nt, synthetic construct
  source 1..19: mol_type = other RNA
ctgaccagcacggccacca

SEQ ID NO: 14983 - RNA, 19 nt, synthetic construct
  source 1..19: mol_type = other RNA
ccagcacggccaccacacc

SEQ ID NO: 14984 - RNA, 19 nt, synthetic construct
  source 1..19: mol_type = other RNA
agcacggccaccacaccca

SEQ ID NO: 14985 - RNA, 19 nt, synthetic construct
  source 1..19: mol_type = other RNA
acggccaccacacccacag

SEQ ID NO: 14986 - RNA, 19 nt, synthetic construct
  source 1..19: mol_type = other RNA
ggccaccacacccacagtc

SEQ ID NO: 14987 - RNA, 19 nt, synthetic construct
  source 1..19: mol_type = other RNA
acacccacagtcatcagct

SEQ ID NO: 14988 - RNA, 19 nt, synthetic construct
  source 1..19: mol_type = other RNA
acccacagtcatcagctcc

SEQ ID NO: 14989 - RNA, 19 nt, synthetic construct
  source 1..19: mol_type = other RNA
cccacagtcatcagctcca

SEQ ID NO: 14990 - RNA, 19 nt, synthetic construct
  source 1..19: mol_type = other RNA
acagtcatcagctccagag

SEQ ID NO: 14991 - RNA, 19 nt, synthetic construct
  source 1..19: mol_type = other RNA
cagctccagagccactccc

SEQ ID NO: 14992 - RNA, 19 nt, synthetic construct
  source 1..19: mol_type = other RNA
ccagagccactccctcctc

SEQ ID NO: 14993 - RNA, 19 nt, synthetic construct
  source 1..19: mol_type = other RNA
cagagccactccctcctcc

SEQ ID NO: 14994 - RNA, 19 nt, synthetic construct
  source 1..19: mol_type = other RNA
agccactccctcctccagt

SEQ ID NO: 14995 - RNA, 19 nt, synthetic construct
  source 1..19: mol_type = other RNA
actccctcctccagtccag

SEQ ID NO: 14996 - RNA, 19 nt, synthetic construct
  source 1..19: mol_type = other RNA
gttacagccatcccctctt

SEQ ID NO: 14997 - RNA, 19 nt, synthetic construct
  source 1..19: mol_type = other RNA
tcccctcttcctccctggg

SEQ ID NO: 14998 - RNA, 19 nt, synthetic construct
  source 1..19: mol_type = other RNA
ccctcttcctccctgggca

SEQ ID NO: 14999 - RNA, 19 nt, synthetic construct
  source 1..19: mol_type = other RNA
cctcttcctccctgggcac

SEQ ID NO: 15000 - RNA, 19 nt, synthetic construct
  source 1..19: mol_type = other RNA
ctcttcctccctgggcacc

SEQ ID NO: 15001 - RNA, 19 nt, synthetic construct
  source 1..19: mol_type = other RNA
tcttcctccctgggcaccg

SEQ ID NO: 15002 - RNA, 19 nt, synthetic construct
  source 1..19: mol_type = other RNA
cttcctccctgggcaccgc

SEQ ID NO: 15003 - RNA, 19 nt, synthetic construct
  source 1..19: mol_type = other RNA
cctccctgggcaccgcctg

SEQ ID NO: 15004 - RNA, 19 nt, synthetic construct
  source 1..19: mol_type = other RNA
tatcacagaccaccacacc

SEQ ID NO: 15005 - RNA, 19 nt, synthetic construct
  source 1..19: mol_type = other RNA
cggccaccatgtccacagc

SEQ ID NO: 15006 - RNA, 19 nt, synthetic construct
  source 1..19: mol_type = other RNA
ccaccatgtccacagccac

SEQ ID NO: 15007 - RNA, 19 nt, synthetic construct
  source 1..19: mol_type = other RNA
ccatgtccacagccacacc

SEQ ID NO: 15008 - RNA, 19 nt, synthetic construct
  source 1..19: mol_type = other RNA
ccacagccacaccctcctc

SEQ ID NO: 15009 - RNA, 19 nt, synthetic construct
  source 1..19: mol_type = other RNA
cagccacaccctcctctac

SEQ ID NO: 15010 - RNA, 19 nt, synthetic construct
  source 1..19: mol_type = other RNA
ccacaccctcctctactcc

SEQ ID NO: 15011 - RNA, 19 nt, synthetic construct
  source 1..19: mol_type = other RNA
taccaccacgaccaccaca

SEQ ID NO: 15012 - RNA, 19 nt, synthetic construct
  source 1..19: mol_type = other RNA
accaccacgaccaccacaa

SEQ ID NO: 15013 - RNA, 19 nt, synthetic construct
  source 1..19: mol_type = other RNA
ccaccacgaccaccacaac

SEQ ID NO: 15014 - RNA, 19 nt, synthetic construct
  source 1..19: mol_type = other RNA
caccacgaccaccacaacc

SEQ ID NO: 15015 - RNA, 19 nt, synthetic construct
  source 1..19: mol_type = other RNA
accacgaccaccacaacca

SEQ ID NO: 15016 - RNA, 19 nt, synthetic construct
  source 1..19: mol_type = other RNA
accaccacaaccagggcca

SEQ ID NO: 15017 - RNA, 19 nt, synthetic construct
  source 1..19: mol_type = other RNA
caaccagggccaccggctc

SEQ ID NO: 15018 - RNA, 19 nt, synthetic construct
  source 1..19: mol_type = other RNA
aaccagggccaccggctct

SEQ ID NO: 15019 - RNA, 19 nt, synthetic construct
  source 1..19: mol_type = other RNA
gctctgtggccaccccctc

SEQ ID NO: 15020 - RNA, 19 nt, synthetic construct
  source 1..19: mol_type = other RNA
ctctgtggccaccccctcc

SEQ ID NO: 15021 - RNA, 19 nt, synthetic construct
  source 1..19: mol_type = other RNA
tctgtggccaccccctcct

SEQ ID NO: 15022 - RNA, 19 nt, synthetic construct
  source 1..19: mol_type = other RNA
ctgtggccaccccctcctc

SEQ ID NO: 15023 - RNA, 19 nt, synthetic construct
  source 1..19: mol_type = other RNA
tgtggccaccccctcctcc

SEQ ID NO: 15024 - RNA, 19 nt, synthetic construct
  source 1..19: mol_type = other RNA
accccctcctccaccccag

SEQ ID NO: 15025 - RNA, 19 nt, synthetic construct
  source 1..19: mol_type = other RNA
ccctcctccaccccaggaa

SEQ ID NO: 15026 - RNA, 19 nt, synthetic construct
  source 1..19: mol_type = other RNA
aagtgccgactaccacaac

SEQ ID NO: 15027 - RNA, 19 nt, synthetic construct
  source 1..19: mol_type = other RNA
ccacgggcttcacagccac

SEQ ID NO: 15028 - RNA, 19 nt, synthetic construct
  source 1..19: mol_type = other RNA
gcttcacagccaccccctc

SEQ ID NO: 15029 - RNA, 19 nt, synthetic construct
  source 1..19: mol_type = other RNA
tcacagccaccccctcctc

SEQ ID NO: 15030 - RNA, 19 nt, synthetic construct
  source 1..19: mol_type = other RNA
ctcctccagcccagggacg

SEQ ID NO: 15031 - RNA, 19 nt, synthetic construct
  source 1..19: mol_type = other RNA
tcctccagcccagggacgg

SEQ ID NO: 15032 - RNA, 19 nt, synthetic construct
  source 1..19: mol_type = other RNA
cctccagtgtggatcagca

SEQ ID NO: 15033 - RNA, 19 nt, synthetic construct
  source 1..19: mol_type = other RNA
acggtgaccccctcctcca

SEQ ID NO: 15034 - RNA, 19 nt, synthetic construct
  source 1..19: mol_type = other RNA
gtgaccccctcctccatcc

SEQ ID NO: 15035 - RNA, 19 nt, synthetic construct
  source 1..19: mol_type = other RNA
gaccccctcctccatcccg

SEQ ID NO: 15036 - RNA, 19 nt, synthetic construct
  source 1..19: mol_type = other RNA
ccccctcctccatcccggg

SEQ ID NO: 15037 - RNA, 19 nt, synthetic construct
  source 1..19: mol_type = other RNA
ccctcctccatcccgggga

SEQ ID NO: 15038 - RNA, 19 nt, synthetic construct
  source 1..19: mol_type = other RNA
gccacagtgctgaccacca

SEQ ID NO: 15039 - RNA, 19 nt, synthetic construct
  source 1..19: mol_type = other RNA
tgctgaccaccaccaccac

SEQ ID NO: 15040 - RNA, 19 nt, synthetic construct
  source 1..19: mol_type = other RNA
gctgaccaccaccaccaca

SEQ ID NO: 15041 - RNA, 19 nt, synthetic construct
  source 1..19: mol_type = other RNA
accaccaccaccacaactg

SEQ ID NO: 15042 - RNA, 19 nt, synthetic construct
  source 1..19: mol_type = other RNA
ccaccacaactgtggccac

SEQ ID NO: 15043 - RNA, 19 nt, synthetic construct
  source 1..19: mol_type = other RNA
gtggccactggttctatgg

SEQ ID NO: 15044 - RNA, 19 nt, synthetic construct
  source 1..19: mol_type = other RNA
cactgaccaccacggccac

SEQ ID NO: 15045 - RNA, 19 nt, synthetic construct
  source 1..19: mol_type = other RNA
ccaccggctccaccaccaa

SEQ ID NO: 15046 - RNA, 19 nt, synthetic construct
  source 1..19: mol_type = other RNA
ccaccaccaacccctcctc

SEQ ID NO: 15047 - RNA, 19 nt, synthetic construct
  source 1..19: mol_type = other RNA
accaccaacccctcctcaa

SEQ ID NO: 15048 - RNA, 19 nt, synthetic construct
  source 1..19: mol_type = other RNA
accaacccctcctcaactc

SEQ ID NO: 15049 - RNA, 19 nt, synthetic construct
  source 1..19: mol_type = other RNA
ccaacccctcctcaactcc

SEQ ID NO: 15050 - RNA, 19 nt, synthetic construct
  source 1..19: mol_type = other RNA
acccctcctcaactccagg

SEQ ID NO: 15051 - RNA, 19 nt, synthetic construct
  source 1..19: mol_type = other RNA
ccctcctcaactccaggga

SEQ ID NO: 15052 - RNA, 19 nt, synthetic construct
  source 1..19: mol_type = other RNA
ctcctcaactccagggaca

SEQ ID NO: 15053 - RNA, 19 nt, synthetic construct
  source 1..19: mol_type = other RNA
ggacaactcccatcccccc

SEQ ID NO: 15054 - RNA, 19 nt, synthetic construct
  source 1..19: mol_type = other RNA
acaactcccatccccccag

SEQ ID NO: 15055 - RNA, 19 nt, synthetic construct
  source 1..19: mol_type = other RNA
ctcccatccccccagtgct

SEQ ID NO: 15056 - RNA, 19 nt, synthetic construct
  source 1..19: mol_type = other RNA
ccccccagtgctgaccacc

SEQ ID NO: 15057 - RNA, 19 nt, synthetic construct
  source 1..19: mol_type = other RNA
ccccagtgctgaccaccac

SEQ ID NO: 15058 - RNA, 19 nt, synthetic construct
  source 1..19: mol_type = other RNA
gctgaccaccaccgccacc

SEQ ID NO: 15059 - RNA, 19 nt, synthetic construct
  source 1..19: mol_type = other RNA
accaccaccgccaccacac

SEQ ID NO: 15060 - RNA, 19 nt, synthetic construct
  source 1..19: mol_type = other RNA
ccaccgccaccacacctgc

SEQ ID NO: 15061 - RNA, 19 nt, synthetic construct
  source 1..19: mol_type = other RNA
accgccaccacacctgcag

SEQ ID NO: 15062 - RNA, 19 nt, synthetic construct
  source 1..19: mol_type = other RNA
ccgccaccacacctgcagc

SEQ ID NO: 15063 - RNA, 19 nt, synthetic construct
  source 1..19: mol_type = other RNA
acacctgcagccaccagca

SEQ ID NO: 15064 - RNA, 19 nt, synthetic construct
  source 1..19: mol_type = other RNA
tgcagccaccagcagcaca

SEQ ID NO: 15065 - RNA, 19 nt, synthetic construct
  source 1..19: mol_type = other RNA
agccaccagcagcacagtg

SEQ ID NO: 15066 - RNA, 19 nt, synthetic construct
  source 1..19: mol_type = other RNA
cagcacagtgactccctcc

SEQ ID NO: 15067 - RNA, 19 nt, synthetic construct
  source 1..19: mol_type = other RNA
agcacagtgactccctcct

SEQ ID NO: 15068 - RNA, 19 nt, synthetic construct
  source 1..19: mol_type = other RNA
gtgactccctcctctgccc

SEQ ID NO: 15069 - RNA, 19 nt, synthetic construct
  source 1..19: mol_type = other RNA
acccacacacccccagtgc

SEQ ID NO: 15070 - RNA, 19 nt, synthetic construct
  source 1..19: mol_type = other RNA
ccacacacccccagtgccg

SEQ ID NO: 15071 - RNA, 19 nt, synthetic construct
  source 1..19: mol_type = other RNA
gaacaccacggccaccaca

SEQ ID NO: 15072 - RNA, 19 nt, synthetic construct
  source 1..19: mol_type = other RNA
cggccaccacacacgggcg

SEQ ID NO: 15073 - RNA, 19 nt, synthetic construct
  source 1..19: mol_type = other RNA
cggtccctgccccccagca

SEQ ID NO: 15074 - RNA, 19 nt, synthetic construct
  source 1..19: mol_type = other RNA
ggtccctgccccccagcag

SEQ ID NO: 15075 - RNA, 19 nt, synthetic construct
  source 1..19: mol_type = other RNA
tccctgccccccagcagtc

SEQ ID NO: 15076 - RNA, 19 nt, synthetic construct
  source 1..19: mol_type = other RNA
ccctgccccccagcagtcc

SEQ ID NO: 15077 - RNA, 19 nt, synthetic construct
  source 1..19: mol_type = other RNA
tgccccccagcagtcccca

SEQ ID NO: 15078 - RNA, 19 nt, synthetic construct
  source 1..19: mol_type = other RNA
ttcccacaccccagcagca

SEQ ID NO: 15079 - RNA, 19 nt, synthetic construct
  source 1..19: mol_type = other RNA
accccagcagcaaccacca

SEQ ID NO: 15080 - RNA, 19 nt, synthetic construct
  source 1..19: mol_type = other RNA
gcagcaaccaccagtacca

SEQ ID NO: 15081 - RNA, 19 nt, synthetic construct
  source 1..19: mol_type = other RNA
ctgtccagccctcacccta

SEQ ID NO: 15082 - RNA, 19 nt, synthetic construct
  source 1..19: mol_type = other RNA
agtcacccccttctccagg

SEQ ID NO: 15083 - RNA, 19 nt, synthetic construct
  source 1..19: mol_type = other RNA
gtcacccccttctccaggg

SEQ ID NO: 15084 - RNA, 19 nt, synthetic construct
  source 1..19: mol_type = other RNA
tcacccccttctccaggga

SEQ ID NO: 15085 - RNA, 19 nt, synthetic construct
  source 1..19: mol_type = other RNA
cacccccttctccagggac

SEQ ID NO: 15086 - RNA, 19 nt, synthetic construct
  source 1..19: mol_type = other RNA
cccccttctccagggacga

SEQ ID NO: 15087 - RNA, 19 nt, synthetic construct
  source 1..19: mol_type = other RNA
ccttctccagggacgacca

SEQ ID NO: 15088 - RNA, 19 nt, synthetic construct
  source 1..19: mol_type = other RNA
cgaccaccccgggccacac

SEQ ID NO: 15089 - RNA, 19 nt, synthetic construct
  source 1..19: mol_type = other RNA
acaccaggggcacctccag

SEQ ID NO: 15090 - RNA, 19 nt, synthetic construct
  source 1..19: mol_type = other RNA
caccaggggcacctccagg

SEQ ID NO: 15091 - RNA, 19 nt, synthetic construct
  source 1..19: mol_type = other RNA
aggggcacctccaggacca

SEQ ID NO: 15092 - RNA, 19 nt, synthetic construct
  source 1..19: mol_type = other RNA
gggcacctccaggaccaca

SEQ ID NO: 15093 - RNA, 19 nt, synthetic construct
  source 1..19: mol_type = other RNA
ggcacctccaggaccacag

SEQ ID NO: 15094 - RNA, 19 nt, synthetic construct
  source 1..19: mol_type = other RNA
gcacctccaggaccacagc

SEQ ID NO: 15095 - RNA, 19 nt, synthetic construct
  source 1..19: mol_type = other RNA
cctccaggaccacagccac

SEQ ID NO: 15096 - RNA, 19 nt, synthetic construct
  source 1..19: mol_type = other RNA
caggaccacagccacagcc

SEQ ID NO: 15097 - RNA, 19 nt, synthetic construct
  source 1..19: mol_type = other RNA
ggtggtgaccacgggctgt

SEQ ID NO: 15098 - RNA, 19 nt, synthetic construct
  source 1..19: mol_type = other RNA
tggtcagagtggctggact

SEQ ID NO: 15099 - RNA, 19 nt, synthetic construct
  source 1..19: mol_type = other RNA
gcagtctgtgagcagcccc

SEQ ID NO: 15100 - RNA, 19 nt, synthetic construct
  source 1..19: mol_type = other RNA
ccgtgcccaggcccagcct

SEQ ID NO: 15101 - RNA, 19 nt, synthetic construct
  source 1..19: mol_type = other RNA
atgcagcctggactttggc

SEQ ID NO: 15102 - RNA, 19 nt, synthetic construct
  source 1..19: mol_type = other RNA
tgcagcctggactttggcc

SEQ ID NO: 15103 - RNA, 19 nt, synthetic construct
  source 1..19: mol_type = other RNA
agcctggactttggcctgg

SEQ ID NO: 15104 - RNA, 19 nt, synthetic construct
  source 1..19: mol_type = other RNA
ggcctggtctgcaggaacc

SEQ ID NO: 15105 - RNA, 19 nt, synthetic construct
  source 1..19: mol_type = other RNA
gccaccagctctacggcca

SEQ ID NO: 15106 - RNA, 19 nt, synthetic construct
  source 1..19: mol_type = other RNA
caaagctgaccacaacagc

SEQ ID NO: 15107 - RNA, 19 nt, synthetic construct
  source 1..19: mol_type = other RNA
cgactgagtccactggatc

SEQ ID NO: 15108 - RNA, 19 nt, synthetic construct
  source 1..19: mol_type = other RNA
ccccgtcctccaccccagg

SEQ ID NO: 15109 - RNA, 19 nt, synthetic construct
  source 1..19: mol_type = other RNA
cccgtcctccaccccaggg

SEQ ID NO: 15110 - RNA, 19 nt, synthetic construct
  source 1..19: mol_type = other RNA
cgtcctccaccccagggac

SEQ ID NO: 15111 - RNA, 19 nt, synthetic construct
  source 1..19: mol_type = other RNA
gtcctccaccccagggacc

SEQ ID NO: 15112 - RNA, 19 nt, synthetic construct
  source 1..19: mol_type = other RNA
cctccaccccagggaccac

SEQ ID NO: 15113 - RNA, 19 nt, synthetic construct
  source 1..19: mol_type = other RNA
ctccaccccagggaccacc

SEQ ID NO: 15114 - RNA, 19 nt, synthetic construct
  source 1..19: mol_type = other RNA
tccaccccagggaccacct

SEQ ID NO: 15115 - RNA, 19 nt, synthetic construct
  source 1..19: mol_type = other RNA
ccaccccagggaccacctg

SEQ ID NO: 15116 - RNA, 19 nt, synthetic construct
  source 1..19: mol_type = other RNA
ccaccgcctcctccaccca

SEQ ID NO: 15117 - RNA, 19 nt, synthetic construct
  source 1..19: mol_type = other RNA
tcctccacccaggcaactg

SEQ ID NO: 15118 - RNA, 19 nt, synthetic construct
  source 1..19: mol_type = other RNA
acacccacagtcaccagct

SEQ ID NO: 15119 - RNA, 19 nt, synthetic construct
  source 1..19: mol_type = other RNA
acccacagtcaccagctcc

SEQ ID NO: 15120 - RNA, 19 nt, synthetic construct
  source 1..19: mol_type = other RNA
cccacagtcaccagctcca

SEQ ID NO: 15121 - RNA, 19 nt, synthetic construct
  source 1..19: mol_type = other RNA
tcaccagctccaaagccac

SEQ ID NO: 15122 - RNA, 19 nt, synthetic construct
  source 1..19: mol_type = other RNA
gctccaaagccactccctt

SEQ ID NO: 15123 - RNA, 19 nt, synthetic construct
  source 1..19: mol_type = other RNA
tccaaagccactcccttct

SEQ ID NO: 15124 - RNA, 19 nt, synthetic construct
  source 1..19: mol_type = other RNA
tacagccatcccctcctcc

SEQ ID NO: 15125 - RNA, 19 nt, synthetic construct
  source 1..19: mol_type = other RNA
acagccatcccctcctcct

SEQ ID NO: 15126 - RNA, 19 nt, synthetic construct
  source 1..19: mol_type = other RNA
cctcctcctccctgggcac

SEQ ID NO: 15127 - RNA, 19 nt, synthetic construct
  source 1..19: mol_type = other RNA
tcctccctgggcaccacct

SEQ ID NO: 15128 - RNA, 19 nt, synthetic construct
  source 1..19: mol_type = other RNA
tccctgggcaccacctgga

SEQ ID NO: 15129 - RNA, 19 nt, synthetic construct
  source 1..19: mol_type = other RNA
cctgggcaccacctggacc

SEQ ID NO: 15130 - RNA, 19 nt, synthetic construct
  source 1..19: mol_type = other RNA
ctgggcaccacctggaccc

SEQ ID NO: 15131 - RNA, 19 nt, synthetic construct
  source 1..19: mol_type = other RNA
tgggcaccacctggacccg

SEQ ID NO: 15132 - RNA, 19 nt, synthetic construct
  source 1..19: mol_type = other RNA
gggcaccacctggacccgc

SEQ ID NO: 15133 - RNA, 19 nt, synthetic construct
  source 1..19: mol_type = other RNA
tatcacagaccaccacacc

SEQ ID NO: 15134 - RNA, 19 nt, synthetic construct
  source 1..19: mol_type = other RNA
cggccaccatgtccacagc

SEQ ID NO: 15135 - RNA, 19 nt, synthetic construct
  source 1..19: mol_type = other RNA
ccaccatgtccacagccac

SEQ ID NO: 15136 - RNA, 19 nt, synthetic construct
  source 1..19: mol_type = other RNA
ccatgtccacagccacacc

SEQ ID NO: 15137 - RNA, 19 nt, synthetic construct
  source 1..19: mol_type = other RNA
cacaccctcctccactcca

SEQ ID NO: 15138 - RNA, 19 nt, synthetic construct
  source 1..19: mol_type = other RNA
actgcccacacctccacag

SEQ ID NO: 15139 - RNA, 19 nt, synthetic construct
  source 1..19: mol_type = other RNA
caccacggccaccacaacc

SEQ ID NO: 15140 - RNA, 19 nt, synthetic construct
  source 1..19: mol_type = other RNA
gccaccacaaccagggcca

SEQ ID NO: 15141 - RNA, 19 nt, synthetic construct
  source 1..19: mol_type = other RNA
caaccagggccaccggctc

SEQ ID NO: 15142 - RNA, 19 nt, synthetic construct
  source 1..19: mol_type = other RNA
aaccagggccaccggctct

SEQ ID NO: 15143 - RNA, 19 nt, synthetic construct
  source 1..19: mol_type = other RNA
gtggccaccccctcttcca

SEQ ID NO: 15144 - RNA, 19 nt, synthetic construct
  source 1..19: mol_type = other RNA
tggccaccccctcttccac

SEQ ID NO: 15145 - RNA, 19 nt, synthetic construct
  source 1..19: mol_type = other RNA
ggccaccccctcttccacc

SEQ ID NO: 15146 - RNA, 19 nt, synthetic construct
  source 1..19: mol_type = other RNA
aagtgccgactaccacaac

SEQ ID NO: 15147 - RNA, 19 nt, synthetic construct
  source 1..19: mol_type = other RNA
gcttcacagtcaccccctc

SEQ ID NO: 15148 - RNA, 19 nt, synthetic construct
  source 1..19: mol_type = other RNA
tcaccccctcctccagccc

SEQ ID NO: 15149 - RNA, 19 nt, synthetic construct
  source 1..19: mol_type = other RNA
ctcctccagcccagggacg

SEQ ID NO: 15150 - RNA, 19 nt, synthetic construct
  source 1..19: mol_type = other RNA
tcctccagcccagggacgg

SEQ ID NO: 15151 - RNA, 19 nt, synthetic construct
  source 1..19: mol_type = other RNA
cctccagtgtggatcagca

SEQ ID NO: 15152 - RNA, 19 nt, synthetic construct
  source 1..19: mol_type = other RNA
ccaccacacccacaaccag

SEQ ID NO: 15153 - RNA, 19 nt, synthetic construct
  source 1..19: mol_type = other RNA
caaccagtggctccacggt

SEQ ID NO: 15154 - RNA, 19 nt, synthetic construct
  source 1..19: mol_type = other RNA
cgtcccggggaccacccac

SEQ ID NO: 15155 - RNA, 19 nt, synthetic construct
  source 1..19: mol_type = other RNA
cccccacagtgctgaccac

SEQ ID NO: 15156 - RNA, 19 nt, synthetic construct
  source 1..19: mol_type = other RNA
ccccacagtgctgaccacc

SEQ ID NO: 15157 - RNA, 19 nt, synthetic construct
  source 1..19: mol_type = other RNA
cccacagtgctgaccacca

SEQ ID NO: 15158 - RNA, 19 nt, synthetic construct
  source 1..19: mol_type = other RNA
tgctgaccaccaccaccac

SEQ ID NO: 15159 - RNA, 19 nt, synthetic construct
  source 1..19: mol_type = other RNA
gctgaccaccaccaccaca

SEQ ID NO: 15160 - RNA, 19 nt, synthetic construct
  source 1..19: mol_type = other RNA
accaccaccaccacaactg

SEQ ID NO: 15161 - RNA, 19 nt, synthetic construct
  source 1..19: mol_type = other RNA
ccaccacaactgtggccac

SEQ ID NO: 15162 - RNA, 19 nt, synthetic construct
  source 1..19: mol_type = other RNA
gtggccactggttctatgg

SEQ ID NO: 15163 - RNA, 19 nt, synthetic construct
  source 1..19: mol_type = other RNA
acggccaccggctccacca

SEQ ID NO: 15164 - RNA, 19 nt, synthetic construct
  source 1..19: mol_type = other RNA
ccaccggctccaccaccaa

SEQ ID NO: 15165 - RNA, 19 nt, synthetic construct
  source 1..19: mol_type = other RNA
ccaccaccaacccctcctc

SEQ ID NO: 15166 - RNA, 19 nt, synthetic construct
  source 1..19: mol_type = other RNA
accaccaacccctcctcaa

SEQ ID NO: 15167 - RNA, 19 nt, synthetic construct
  source 1..19: mol_type = other RNA
accaacccctcctcaactc

SEQ ID NO: 15168 - RNA, 19 nt, synthetic construct
  source 1..19: mol_type = other RNA
ccaacccctcctcaactcc

SEQ ID NO: 15169 - RNA, 19 nt, synthetic construct
  source 1..19: mol_type = other RNA
acccctcctcaactccagg

SEQ ID NO: 15170 - RNA, 19 nt, synthetic construct
  source 1..19: mol_type = other RNA
ccctcctcaactccaggga

SEQ ID NO: 15171 - RNA, 19 nt, synthetic construct
  source 1..19: mol_type = other RNA
ctcctcaactccagggaca

SEQ ID NO: 15172 - RNA, 19 nt, synthetic construct
  source 1..19: mol_type = other RNA
ccccccagtgctgaccacc

SEQ ID NO: 15173 - RNA, 19 nt, synthetic construct
  source 1..19: mol_type = other RNA
ccccagtgctgaccaccac

SEQ ID NO: 15174 - RNA, 19 nt, synthetic construct
  source 1..19: mol_type = other RNA
gctgaccaccaccgccacc

SEQ ID NO: 15175 - RNA, 19 nt, synthetic construct
  source 1..19: mol_type = other RNA
accaccaccgccaccacac

SEQ ID NO: 15176 - RNA, 19 nt, synthetic construct
  source 1..19: mol_type = other RNA
ccaccgccaccacacctgc

SEQ ID NO: 15177 - RNA, 19 nt, synthetic construct
  source 1..19: mol_type = other RNA
accgccaccacacctgcag

SEQ ID NO: 15178 - RNA, 19 nt, synthetic construct
  source 1..19: mol_type = other RNA
ccgccaccacacctgcagc

SEQ ID NO: 15179 - RNA, 19 nt, synthetic construct
  source 1..19: mol_type = other RNA
acacctgcagccaccagca

SEQ ID NO: 15180 - RNA, 19 nt, synthetic construct
  source 1..19: mol_type = other RNA
tgcagccaccagcagcaca

SEQ ID NO: 15181 - RNA, 19 nt, synthetic construct
  source 1..19: mol_type = other RNA
agccaccagcagcacagtg

SEQ ID NO: 15182 - RNA, 19 nt, synthetic construct
  source 1..19: mol_type = other RNA
cagcacagtgactccctcc

SEQ ID NO: 15183 - RNA, 19 nt, synthetic construct
  source 1..19: mol_type = other RNA
agcacagtgactccctcct

SEQ ID NO: 15184 - RNA, 19 nt, synthetic construct
  source 1..19: mol_type = other RNA
gtgactccctcctctgccc

SEQ ID NO: 15185 - RNA, 19 nt, synthetic construct
  source 1..19: mol_type = other RNA
acccacacacccccagtgc

SEQ ID NO: 15186 - RNA, 19 nt, synthetic construct
  source 1..19: mol_type = other RNA
ccacacacccccagtgccg

SEQ ID NO: 15187 - RNA, 19 nt, synthetic construct
  source 1..19: mol_type = other RNA
gaacaccacggccaccaca

SEQ ID NO: 15188 - RNA, 19 nt, synthetic construct
  source 1..19: mol_type = other RNA
tgtcccccagcagtcccca

SEQ ID NO: 15189 - RNA, 19 nt, synthetic construct
  source 1..19: mol_type = other RNA
ttcggccacctcaggcacc

SEQ ID NO: 15190 - RNA, 19 nt, synthetic construct
  source 1..19: mol_type = other RNA
ggccacctcaggcaccttg

SEQ ID NO: 15191 - RNA, 19 nt, synthetic construct
  source 1..19: mol_type = other RNA
cctcaggcaccttgggcac

SEQ ID NO: 15192 - RNA, 19 nt, synthetic construct
  source 1..19: mol_type = other RNA
ggcaccttgggcaccaccc

SEQ ID NO: 15193 - RNA, 19 nt, synthetic construct
  source 1..19: mol_type = other RNA
gggacttcccacaccccag

SEQ ID NO: 15194 - RNA, 19 nt, synthetic construct
  source 1..19: mol_type = other RNA
ttcccacaccccagcagca

SEQ ID NO: 15195 - RNA, 19 nt, synthetic construct
  source 1..19: mol_type = other RNA
ctgtccagccctcacccta

SEQ ID NO: 15196 - RNA, 19 nt, synthetic construct
  source 1..19: mol_type = other RNA
cgaccaccccgggccacac

SEQ ID NO: 15197 - RNA, 19 nt, synthetic construct
  source 1..19: mol_type = other RNA
cgggccacaccacggccac

SEQ ID NO: 15198 - RNA, 19 nt, synthetic construct
  source 1..19: mol_type = other RNA
cacaccacggccacctcca

SEQ ID NO: 15199 - RNA, 19 nt, synthetic construct
  source 1..19: mol_type = other RNA
ccacggccacggccacacc

SEQ ID NO: 15200 - RNA, 19 nt, synthetic construct
  source 1..19: mol_type = other RNA
cacggccacggccacaccc

SEQ ID NO: 15201 - RNA, 19 nt, synthetic construct
  source 1..19: mol_type = other RNA
acggccacggccacaccca

SEQ ID NO: 15202 - RNA, 19 nt, synthetic construct
  source 1..19: mol_type = other RNA
ggccacggccacacccagc

SEQ ID NO: 15203 - RNA, 19 nt, synthetic construct
  source 1..19: mol_type = other RNA
gccacggccacacccagca

SEQ ID NO: 15204 - RNA, 19 nt, synthetic construct
  source 1..19: mol_type = other RNA
ggtggtgaccacgggctgt

SEQ ID NO: 15205 - RNA, 19 nt, synthetic construct
  source 1..19: mol_type = other RNA
tggtcagagtggctggact

SEQ ID NO: 15206 - RNA, 19 nt, synthetic construct
  source 1..19: mol_type = other RNA
gtgcggccggaggggccgt

SEQ ID NO: 15207 - RNA, 19 nt, synthetic construct
  source 1..19: mol_type = other RNA
ccgtgcccaggcccagcct

SEQ ID NO: 15208 - RNA, 19 nt, synthetic construct
  source 1..19: mol_type = other RNA
ctggtgtccccctggggga

SEQ ID NO: 15209 - RNA, 19 nt, synthetic construct
  source 1..19: mol_type = other RNA
atgcagcctggactttggc

SEQ ID NO: 15210 - RNA, 19 nt, synthetic construct
  source 1..19: mol_type = other RNA
tgcagcctggactttggcc

SEQ ID NO: 15211 - RNA, 19 nt, synthetic construct
  source 1..19: mol_type = other RNA
agcctggactttggcctgg

SEQ ID NO: 15212 - RNA, 19 nt, synthetic construct
  source 1..19: mol_type = other RNA
ggcctggtctgcaggaacc

SEQ ID NO: 15213 - RNA, 19 nt, synthetic construct
  source 1..19: mol_type = other RNA
tacggccatgccctcctcc

SEQ ID NO: 15214 - RNA, 19 nt, synthetic construct
  source 1..19: mol_type = other RNA
ggccatgccctcctccact

SEQ ID NO: 15215 - RNA, 19 nt, synthetic construct
  source 1..19: mol_type = other RNA
caccccgtcctccaccccg

SEQ ID NO: 15216 - RNA, 19 nt, synthetic construct
  source 1..19: mol_type = other RNA
gggaacagctccccctccc

SEQ ID NO: 15217 - RNA, 19 nt, synthetic construct
  source 1..19: mol_type = other RNA
agcccggccaccacaccca

SEQ ID NO: 15218 - RNA, 19 nt, synthetic construct
  source 1..19: mol_type = other RNA
ttccaaagccacttcctcc

SEQ ID NO: 15219 - RNA, 19 nt, synthetic construct
  source 1..19: mol_type = other RNA
aaagccacttcctcctcca

SEQ ID NO: 15220 - RNA, 19 nt, synthetic construct
  source 1..19: mol_type = other RNA
agccacttcctcctccagt

SEQ ID NO: 15221 - RNA, 19 nt, synthetic construct
  source 1..19: mol_type = other RNA
gccacttcctcctccagtc

SEQ ID NO: 15222 - RNA, 19 nt, synthetic construct
  source 1..19: mol_type = other RNA
ccacttcctcctccagtcc

SEQ ID NO: 15223 - RNA, 19 nt, synthetic construct
  source 1..19: mol_type = other RNA
acttcctcctccagtccaa

SEQ ID NO: 15224 - RNA, 19 nt, synthetic construct
  source 1..19: mol_type = other RNA
ttcctcctccagtccaagg

SEQ ID NO: 15225 - RNA, 19 nt, synthetic construct
  source 1..19: mol_type = other RNA
acacccatcccctcctcca

SEQ ID NO: 15226 - RNA, 19 nt, synthetic construct
  source 1..19: mol_type = other RNA
tcccctcctccacccttgg

SEQ ID NO: 15227 - RNA, 19 nt, synthetic construct
  source 1..19: mol_type = other RNA
tcctccacccttgggacca

SEQ ID NO: 15228 - RNA, 19 nt, synthetic construct
  source 1..19: mol_type = other RNA
accgggaccctcccagaac

SEQ ID NO: 15229 - RNA, 19 nt, synthetic construct
  source 1..19: mol_type = other RNA
cccgtggccaccatgtcca

SEQ ID NO: 15230 - RNA, 19 nt, synthetic construct
  source 1..19: mol_type = other RNA
acccctcctccactccgga

SEQ ID NO: 15231 - RNA, 19 nt, synthetic construct
  source 1..19: mol_type = other RNA
accacccacacctccacag

SEQ ID NO: 15232 - RNA, 19 nt, synthetic construct
  source 1..19: mol_type = other RNA
ctgaccacgaaggccacca

SEQ ID NO: 15233 - RNA, 19 nt, synthetic construct
  source 1..19: mol_type = other RNA
tccacgtccaccccctcct

SEQ ID NO: 15234 - RNA, 19 nt, synthetic construct
  source 1..19: mol_type = other RNA
ccacgtccaccccctcctc

SEQ ID NO: 15235 - RNA, 19 nt, synthetic construct
  source 1..19: mol_type = other RNA
cacgtccaccccctcctcc

SEQ ID NO: 15236 - RNA, 19 nt, synthetic construct
  source 1..19: mol_type = other RNA
ccaccccctcctccactcc

SEQ ID NO: 15237 - RNA, 19 nt, synthetic construct
  source 1..19: mol_type = other RNA
gcagccactacaactgcag

SEQ ID NO: 15238 - RNA, 19 nt, synthetic construct
  source 1..19: mol_type = other RNA
cagccactacaactgcagc

SEQ ID NO: 15239 - RNA, 19 nt, synthetic construct
  source 1..19: mol_type = other RNA
tacaactgcagccactggc

SEQ ID NO: 15240 - RNA, 19 nt, synthetic construct
  source 1..19: mol_type = other RNA
acaactgcagccactggcc

SEQ ID NO: 15241 - RNA, 19 nt, synthetic construct
  source 1..19: mol_type = other RNA
tgcagccactggccccacg

SEQ ID NO: 15242 - RNA, 19 nt, synthetic construct
  source 1..19: mol_type = other RNA
gccactggccccacggcca

SEQ ID NO: 15243 - RNA, 19 nt, synthetic construct
  source 1..19: mol_type = other RNA
tggccccacggccaccccg

SEQ ID NO: 15244 - RNA, 19 nt, synthetic construct
  source 1..19: mol_type = other RNA
ccccgtcctccaccccagg

SEQ ID NO: 15245 - RNA, 19 nt, synthetic construct
  source 1..19: mol_type = other RNA
cccgtcctccaccccaggg

SEQ ID NO: 15246 - RNA, 19 nt, synthetic construct
  source 1..19: mol_type = other RNA
cgtcctccaccccagggac

SEQ ID NO: 15247 - RNA, 19 nt, synthetic construct
  source 1..19: mol_type = other RNA
gtcctccaccccagggacc

SEQ ID NO: 15248 - RNA, 19 nt, synthetic construct
  source 1..19: mol_type = other RNA
cctccaccccagggaccac

SEQ ID NO: 15249 - RNA, 19 nt, synthetic construct
  source 1..19: mol_type = other RNA
ctccaccccagggaccacc

SEQ ID NO: 15250 - RNA, 19 nt, synthetic construct
  source 1..19: mol_type = other RNA
tccaccccagggaccacct

SEQ ID NO: 15251 - RNA, 19 nt, synthetic construct
  source 1..19: mol_type = other RNA
ccaccccagggaccacctg

SEQ ID NO: 15252 - RNA, 19 nt, synthetic construct
  source 1..19: mol_type = other RNA
ccccgtcctccaccccagg

SEQ ID NO: 15253 - RNA, 19 nt, synthetic construct
  source 1..19: mol_type = other RNA
cccgtcctccaccccaggg

SEQ ID NO: 15254 - RNA, 19 nt, synthetic construct
  source 1..19: mol_type = other RNA
cgtcctccaccccagggac

SEQ ID NO: 15255 - RNA, 19 nt, synthetic construct
  source 1..19: mol_type = other RNA
gtcctccaccccagggacc

SEQ ID NO: 15256 - RNA, 19 nt, synthetic construct
  source 1..19: mol_type = other RNA
cctccaccccagggaccac

SEQ ID NO: 15257 - RNA, 19 nt, synthetic construct
  source 1..19: mol_type = other RNA
ctccaccccagggaccacc

SEQ ID NO: 15258 - RNA, 19 nt, synthetic construct
  source 1..19: mol_type = other RNA
tccaccccagggaccacct

SEQ ID NO: 15259 - RNA, 19 nt, synthetic construct
  source 1..19: mol_type = other RNA
ccaccccagggaccacctg

SEQ ID NO: 15260 - RNA, 19 nt, synthetic construct
  source 1..19: mol_type = other RNA
ccaccgcctcctccaccca

SEQ ID NO: 15261 - RNA, 19 nt, synthetic construct
  source 1..19: mol_type = other RNA
tcctccacccaggcaactg

SEQ ID NO: 15262 - RNA, 19 nt, synthetic construct
  source 1..19: mol_type = other RNA
acacccacagtcaccagct

SEQ ID NO: 15263 - RNA, 19 nt, synthetic construct
  source 1..19: mol_type = other RNA
acccacagtcaccagctcc

SEQ ID NO: 15264 - RNA, 19 nt, synthetic construct
  source 1..19: mol_type = other RNA
cccacagtcaccagctcca

SEQ ID NO: 15265 - RNA, 19 nt, synthetic construct
  source 1..19: mol_type = other RNA
tcaccagctccaaagccac

SEQ ID NO: 15266 - RNA, 19 nt, synthetic construct
  source 1..19: mol_type = other RNA
tccaaagccactccctcct

SEQ ID NO: 15267 - RNA, 19 nt, synthetic construct
  source 1..19: mol_type = other RNA
ccaaagccactccctcctc

SEQ ID NO: 15268 - RNA, 19 nt, synthetic construct
  source 1..19: mol_type = other RNA
agccactccctcctccagt

SEQ ID NO: 15269 - RNA, 19 nt, synthetic construct
  source 1..19: mol_type = other RNA
actccctcctccagtccag

SEQ ID NO: 15270 - RNA, 19 nt, synthetic construct
  source 1..19: mol_type = other RNA
tacagccatcccctcctcc

SEQ ID NO: 15271 - RNA, 19 nt, synthetic construct
  source 1..19: mol_type = other RNA
acagccatcccctcctcct

SEQ ID NO: 15272 - RNA, 19 nt, synthetic construct
  source 1..19: mol_type = other RNA
cctcctcctccctgggcac

SEQ ID NO: 15273 - RNA, 19 nt, synthetic construct
  source 1..19: mol_type = other RNA
tcctccctgggcaccacct

SEQ ID NO: 15274 - RNA, 19 nt, synthetic construct
  source 1..19: mol_type = other RNA
tccctgggcaccacctgga

SEQ ID NO: 15275 - RNA, 19 nt, synthetic construct
  source 1..19: mol_type = other RNA
cctgggcaccacctggacc

SEQ ID NO: 15276 - RNA, 19 nt, synthetic construct
  source 1..19: mol_type = other RNA
ctgggcaccacctggaccc

SEQ ID NO: 15277 - RNA, 19 nt, synthetic construct
  source 1..19: mol_type = other RNA
tgggcaccacctggacccg

SEQ ID NO: 15278 - RNA, 19 nt, synthetic construct
  source 1..19: mol_type = other RNA
gggcaccacctggacccgc

SEQ ID NO: 15279 - RNA, 19 nt, synthetic construct
  source 1..19: mol_type = other RNA
tatcacagaccaccacacc

SEQ ID NO: 15280 - RNA, 19 nt, synthetic construct
  source 1..19: mol_type = other RNA
cggccaccatgtccacagc

SEQ ID NO: 15281 - RNA, 19 nt, synthetic construct
  source 1..19: mol_type = other RNA
ccaccatgtccacagccac

SEQ ID NO: 15282 - RNA, 19 nt, synthetic construct
  source 1..19: mol_type = other RNA
ccatgtccacagccacacc

SEQ ID NO: 15283 - RNA, 19 nt, synthetic construct
  source 1..19: mol_type = other RNA
cacaccctcctccactcca

SEQ ID NO: 15284 - RNA, 19 nt, synthetic construct
  source 1..19: mol_type = other RNA
taccgccacggccaccaca

SEQ ID NO: 15285 - RNA, 19 nt, synthetic construct
  source 1..19: mol_type = other RNA
gctctgtggccaccccctc

SEQ ID NO: 15286 - RNA, 19 nt, synthetic construct
  source 1..19: mol_type = other RNA
ctctgtggccaccccctcc

SEQ ID NO: 15287 - RNA, 19 nt, synthetic construct
  source 1..19: mol_type = other RNA
tctgtggccaccccctcct

SEQ ID NO: 15288 - RNA, 19 nt, synthetic construct
  source 1..19: mol_type = other RNA
ctgtggccaccccctcctc

SEQ ID NO: 15289 - RNA, 19 nt, synthetic construct
  source 1..19: mol_type = other RNA
tgtggccaccccctcctcc

SEQ ID NO: 15290 - RNA, 19 nt, synthetic construct
  source 1..19: mol_type = other RNA
accccctcctccaccccag

SEQ ID NO: 15291 - RNA, 19 nt, synthetic construct
  source 1..19: mol_type = other RNA
ccctcctccaccccaggaa

SEQ ID NO: 15292 - RNA, 19 nt, synthetic construct
  source 1..19: mol_type = other RNA
aagtgccgactaccacaac

SEQ ID NO: 15293 - RNA, 19 nt, synthetic construct
  source 1..19: mol_type = other RNA
ccacgggcttcacagccac

SEQ ID NO: 15294 - RNA, 19 nt, synthetic construct
  source 1..19: mol_type = other RNA
gcttcacagccaccccctc

SEQ ID NO: 15295 - RNA, 19 nt, synthetic construct
  source 1..19: mol_type = other RNA
tcacagccaccccctcctc

SEQ ID NO: 15296 - RNA, 19 nt, synthetic construct
  source 1..19: mol_type = other RNA
ctcctccagcccagggacg

SEQ ID NO: 15297 - RNA, 19 nt, synthetic construct
  source 1..19: mol_type = other RNA
tcctccagcccagggacgg

SEQ ID NO: 15298 - RNA, 19 nt, synthetic construct
  source 1..19: mol_type = other RNA
cctccagtgtggatcagca

SEQ ID NO: 15299 - RNA, 19 nt, synthetic construct
  source 1..19: mol_type = other RNA
aaccaccacacccacaacc

SEQ ID NO: 15300 - RNA, 19 nt, synthetic construct
  source 1..19: mol_type = other RNA
accaccacacccacaacca

SEQ ID NO: 15301 - RNA, 19 nt, synthetic construct
  source 1..19: mol_type = other RNA
ccaccacacccacaaccac

SEQ ID NO: 15302 - RNA, 19 nt, synthetic construct
  source 1..19: mol_type = other RNA
caccacacccacaaccacc

SEQ ID NO: 15303 - RNA, 19 nt, synthetic construct
  source 1..19: mol_type = other RNA
accacacccacaaccacca

SEQ ID NO: 15304 - RNA, 19 nt, synthetic construct
  source 1..19: mol_type = other RNA
ccacacccacaaccaccac

SEQ ID NO: 15305 - RNA, 19 nt, synthetic construct
  source 1..19: mol_type = other RNA
cacacccacaaccaccaca

SEQ ID NO: 15306 - RNA, 19 nt, synthetic construct
  source 1..19: mol_type = other RNA
acccacaaccaccacaccc

SEQ ID NO: 15307 - RNA, 19 nt, synthetic construct
  source 1..19: mol_type = other RNA
ccaccacacccacaaccag

SEQ ID NO: 15308 - RNA, 19 nt, synthetic construct
  source 1..19: mol_type = other RNA
caaccagtggctccacggt

SEQ ID NO: 15309 - RNA, 19 nt, synthetic construct
  source 1..19: mol_type = other RNA
acggtgaccccctcctcca

SEQ ID NO: 15310 - RNA, 19 nt, synthetic construct
  source 1..19: mol_type = other RNA
gtgaccccctcctccatcc

SEQ ID NO: 15311 - RNA, 19 nt, synthetic construct
  source 1..19: mol_type = other RNA
gaccccctcctccatcccg

SEQ ID NO: 15312 - RNA, 19 nt, synthetic construct
  source 1..19: mol_type = other RNA
ccccctcctccatcccggg

SEQ ID NO: 15313 - RNA, 19 nt, synthetic construct
  source 1..19: mol_type = other RNA
ccctcctccatcccgggga

SEQ ID NO: 15314 - RNA, 19 nt, synthetic construct
  source 1..19: mol_type = other RNA
cagagtgctgaccaccacc

SEQ ID NO: 15315 - RNA, 19 nt, synthetic construct
  source 1..19: mol_type = other RNA
tgctgaccaccaccaccac

SEQ ID NO: 15316 - RNA, 19 nt, synthetic construct
  source 1..19: mol_type = other RNA
gctgaccaccaccaccaca

SEQ ID NO: 15317 - RNA, 19 nt, synthetic construct
  source 1..19: mol_type = other RNA
accaccaccaccacaactg

SEQ ID NO: 15318 - RNA, 19 nt, synthetic construct
  source 1..19: mol_type = other RNA
ccaccacaactgtggccac

SEQ ID NO: 15319 - RNA, 19 nt, synthetic construct
  source 1..19: mol_type = other RNA
gtggccactggttctatgg

SEQ ID NO: 15320 - RNA, 19 nt, synthetic construct
  source 1..19: mol_type = other RNA
cactgaccaccacggccac

SEQ ID NO: 15321 - RNA, 19 nt, synthetic construct
  source 1..19: mol_type = other RNA
acggccaccggctccacca

SEQ ID NO: 15322 - RNA, 19 nt, synthetic construct
  source 1..19: mol_type = other RNA
ccaccggctccaccaccaa

SEQ ID NO: 15323 - RNA, 19 nt, synthetic construct
  source 1..19: mol_type = other RNA
ccaccaccaacccctcctc

SEQ ID NO: 15324 - RNA, 19 nt, synthetic construct
  source 1..19: mol_type = other RNA
accaccaacccctcctcaa

SEQ ID NO: 15325 - RNA, 19 nt, synthetic construct
  source 1..19: mol_type = other RNA
accaacccctcctcaactc

SEQ ID NO: 15326 - RNA, 19 nt, synthetic construct
  source 1..19: mol_type = other RNA
ccaacccctcctcaactcc

SEQ ID NO: 15327 - RNA, 19 nt, synthetic construct
  source 1..19: mol_type = other RNA
acccctcctcaactccagg

SEQ ID NO: 15328 - RNA, 19 nt, synthetic construct
  source 1..19: mol_type = other RNA
ccctcctcaactccaggga

SEQ ID NO: 15329 - RNA, 19 nt, synthetic construct
  source 1..19: mol_type = other RNA
ctcctcaactccagggaca

SEQ ID NO: 15330 - RNA, 19 nt, synthetic construct
  source 1..19: mol_type = other RNA
aacacccatcaccccagtg

SEQ ID NO: 15331 - RNA, 19 nt, synthetic construct
  source 1..19: mol_type = other RNA
cccatcaccccagtgctga

SEQ ID NO: 15332 - RNA, 19 nt, synthetic construct
  source 1..19: mol_type = other RNA
ccatcaccccagtgctgac

SEQ ID NO: 15333 - RNA, 19 nt, synthetic construct
  source 1..19: mol_type = other RNA
ctgaccagcacggccacca

SEQ ID NO: 15334 - RNA, 19 nt, synthetic construct
  source 1..19: mol_type = other RNA
ccagcacggccaccacacc

SEQ ID NO: 15335 - RNA, 19 nt, synthetic construct
  source 1..19: mol_type = other RNA
ccgcagccaccagctccaa

SEQ ID NO: 15336 - RNA, 19 nt, synthetic construct
  source 1..19: mol_type = other RNA
ccaccagctccaaagccac

SEQ ID NO: 15337 - RNA, 19 nt, synthetic construct
  source 1..19: mol_type = other RNA
cagctccaaagccacttcc

SEQ ID NO: 15338 - RNA, 19 nt, synthetic construct
  source 1..19: mol_type = other RNA
ctccaaagccacttcctcc

SEQ ID NO: 15339 - RNA, 19 nt, synthetic construct
  source 1..19: mol_type = other RNA
aaagccacttcctcctcca

SEQ ID NO: 15340 - RNA, 19 nt, synthetic construct
  source 1..19: mol_type = other RNA
agccacttcctcctccagt

SEQ ID NO: 15341 - RNA, 19 nt, synthetic construct
  source 1..19: mol_type = other RNA
gccacttcctcctccagtc

SEQ ID NO: 15342 - RNA, 19 nt, synthetic construct
  source 1..19: mol_type = other RNA
ccacttcctcctccagtcc

SEQ ID NO: 15343 - RNA, 19 nt, synthetic construct
  source 1..19: mol_type = other RNA
acttcctcctccagtccaa

SEQ ID NO: 15344 - RNA, 19 nt, synthetic construct
  source 1..19: mol_type = other RNA
ttcctcctccagtccaagg

SEQ ID NO: 15345 - RNA, 19 nt, synthetic construct
  source 1..19: mol_type = other RNA
acacccatcccctcctcca

SEQ ID NO: 15346 - RNA, 19 nt, synthetic construct
  source 1..19: mol_type = other RNA
tcccctcctccaccctgtg

SEQ ID NO: 15347 - RNA, 19 nt, synthetic construct
  source 1..19: mol_type = other RNA
ctcctccaccctgtggacc

SEQ ID NO: 15348 - RNA, 19 nt, synthetic construct
  source 1..19: mol_type = other RNA
tcccagcacagaccaccac

SEQ ID NO: 15349 - RNA, 19 nt, synthetic construct
  source 1..19: mol_type = other RNA
cccagcacagaccaccaca

SEQ ID NO: 15350 - RNA, 19 nt, synthetic construct
  source 1..19: mol_type = other RNA
accacacccatgtccacca

SEQ ID NO: 15351 - RNA, 19 nt, synthetic construct
  source 1..19: mol_type = other RNA
ccacacccatgtccaccat

SEQ ID NO: 15352 - RNA, 19 nt, synthetic construct
  source 1..19: mol_type = other RNA
acccatgtccaccatgtcc

SEQ ID NO: 15353 - RNA, 19 nt, synthetic construct
  source 1..19: mol_type = other RNA
accacccacacctccacag

SEQ ID NO: 15354 - RNA, 19 nt, synthetic construct
  source 1..19: mol_type = other RNA
cctccacagtgctgaccac

SEQ ID NO: 15355 - RNA, 19 nt, synthetic construct
  source 1..19: mol_type = other RNA
ctccacagtgctgaccacc

SEQ ID NO: 15356 - RNA, 19 nt, synthetic construct
  source 1..19: mol_type = other RNA
tccacagtgctgaccacca

SEQ ID NO: 15357 - RNA, 19 nt, synthetic construct
  source 1..19: mol_type = other RNA
cagtgctgaccaccacagc

SEQ ID NO: 15358 - RNA, 19 nt, synthetic construct
  source 1..19: mol_type = other RNA
cactgagctgaccacaaca

SEQ ID NO: 15359 - RNA, 19 nt, synthetic construct
  source 1..19: mol_type = other RNA
acagccactacaactgcag

SEQ ID NO: 15360 - RNA, 19 nt, synthetic construct
  source 1..19: mol_type = other RNA
cagccactacaactgcagc

SEQ ID NO: 15361 - RNA, 19 nt, synthetic construct
  source 1..19: mol_type = other RNA
atccacggccaccctgtcc

SEQ ID NO: 15362 - RNA, 19 nt, synthetic construct
  source 1..19: mol_type = other RNA
acggccaccctgtcctcca

SEQ ID NO: 15363 - RNA, 19 nt, synthetic construct
  source 1..19: mol_type = other RNA
cggccaccctgtcctccac

SEQ ID NO: 15364 - RNA, 19 nt, synthetic construct
  source 1..19: mol_type = other RNA
ccaccctgtcctccacccc

SEQ ID NO: 15365 - RNA, 19 nt, synthetic construct
  source 1..19: mol_type = other RNA
accctgtcctccaccccag

SEQ ID NO: 15366 - RNA, 19 nt, synthetic construct
  source 1..19: mol_type = other RNA
ccctgtcctccaccccagg

SEQ ID NO: 15367 - RNA, 19 nt, synthetic construct
  source 1..19: mol_type = other RNA
tgtcctccaccccagggac

SEQ ID NO: 15368 - RNA, 19 nt, synthetic construct
  source 1..19: mol_type = other RNA
gtcctccaccccagggacc

SEQ ID NO: 15369 - RNA, 19 nt, synthetic construct
  source 1..19: mol_type = other RNA
cctccaccccagggaccac

SEQ ID NO: 15370 - RNA, 19 nt, synthetic construct
  source 1..19: mol_type = other RNA
ctccaccccagggaccacc

SEQ ID NO: 15371 - RNA, 19 nt, synthetic construct
  source 1..19: mol_type = other RNA
tccaccccagggaccacct

SEQ ID NO: 15372 - RNA, 19 nt, synthetic construct
  source 1..19: mol_type = other RNA
ccaccccagggaccacctg

SEQ ID NO: 15373 - RNA, 19 nt, synthetic construct
  source 1..19: mol_type = other RNA
gttccacggccaccgcctc

SEQ ID NO: 15374 - RNA, 19 nt, synthetic construct
  source 1..19: mol_type = other RNA
cggccaccgcctcctccac

SEQ ID NO: 15375 - RNA, 19 nt, synthetic construct
  source 1..19: mol_type = other RNA
ccaccgcctcctccactct

SEQ ID NO: 15376 - RNA, 19 nt, synthetic construct
  source 1..19: mol_type = other RNA
accgcctcctccactctgg

SEQ ID NO: 15377 - RNA, 19 nt, synthetic construct
  source 1..19: mol_type = other RNA
ccgcctcctccactctggg

SEQ ID NO: 15378 - RNA, 19 nt, synthetic construct
  source 1..19: mol_type = other RNA
ggtgaccaccatggccact

SEQ ID NO: 15379 - RNA, 19 nt, synthetic construct
  source 1..19: mol_type = other RNA
ccatggccactatgcccac

SEQ ID NO: 15380 - RNA, 19 nt, synthetic construct
  source 1..19: mol_type = other RNA
ccactatgcccacagccac

SEQ ID NO: 15381 - RNA, 19 nt, synthetic construct
  source 1..19: mol_type = other RNA
atgcccacagccactgcct

SEQ ID NO: 15382 - RNA, 19 nt, synthetic construct
  source 1..19: mol_type = other RNA
tgcccacagccactgcctc

SEQ ID NO: 15383 - RNA, 19 nt, synthetic construct
  source 1..19: mol_type = other RNA
gcccacagccactgcctcc

SEQ ID NO: 15384 - RNA, 19 nt, synthetic construct
  source 1..19: mol_type = other RNA
cacagccactgcctccacg

SEQ ID NO: 15385 - RNA, 19 nt, synthetic construct
  source 1..19: mol_type = other RNA
acagccactgcctccacgg

SEQ ID NO: 15386 - RNA, 19 nt, synthetic construct
  source 1..19: mol_type = other RNA
gcacccctgcagtgctccc

SEQ ID NO: 15387 - RNA, 19 nt, synthetic construct
  source 1..19: mol_type = other RNA
ctccccagcagcctgccaa

SEQ ID NO: 15388 - RNA, 19 nt, synthetic construct
  source 1..19: mol_type = other RNA
ctcaccaccctgagaccca

SEQ ID NO: 15389 - RNA, 19 nt, synthetic construct
  source 1..19: mol_type = other RNA
cactggcttccccagctcc

SEQ ID NO: 15390 - RNA, 19 nt, synthetic construct
  source 1..19: mol_type = other RNA
ctggcttccccagctccca

SEQ ID NO: 15391 - RNA, 19 nt, synthetic construct
  source 1..19: mol_type = other RNA
tggcttccccagctcccac

SEQ ID NO: 15392 - RNA, 19 nt, synthetic construct
  source 1..19: mol_type = other RNA
ggcttccccagctcccact

SEQ ID NO: 15393 - RNA, 19 nt, synthetic construct
  source 1..19: mol_type = other RNA
gcttccccagctcccactt

SEQ ID NO: 15394 - RNA, 19 nt, synthetic construct
  source 1..19: mol_type = other RNA
tgcaatcagcactgtgaca

SEQ ID NO: 15395 - RNA, 19 nt, synthetic construct
  source 1..19: mol_type = other RNA
cgcctgtcccacctcccca

SEQ ID NO: 15396 - RNA, 19 nt, synthetic construct
  source 1..19: mol_type = other RNA
gcctgtcccacctccccac

SEQ ID NO: 15397 - RNA, 19 nt, synthetic construct
  source 1..19: mol_type = other RNA
tgtcccacctccccaccgc

SEQ ID NO: 15398 - RNA, 19 nt, synthetic construct
  source 1..19: mol_type = other RNA
gtcccacctccccaccgcc

SEQ ID NO: 15399 - RNA, 19 nt, synthetic construct
  source 1..19: mol_type = other RNA
tcccacctccccaccgcca

SEQ ID NO: 15400 - RNA, 19 nt, synthetic construct
  source 1..19: mol_type = other RNA
ccacctccccaccgccagt

SEQ ID NO: 15401 - RNA, 19 nt, synthetic construct
  source 1..19: mol_type = other RNA
tgtcctccgccccgctgtc

SEQ ID NO: 15402 - RNA, 19 nt, synthetic construct
  source 1..19: mol_type = other RNA
ccgccccgctgtcctcgcc

SEQ ID NO: 15403 - RNA, 19 nt, synthetic construct
  source 1..19: mol_type = other RNA
ccgctgtcctcgccctccc

SEQ ID NO: 15404 - RNA, 19 nt, synthetic construct
  source 1..19: mol_type = other RNA
gtcctcgccctcccctgcc

SEQ ID NO: 15405 - RNA, 19 nt, synthetic construct
  source 1..19: mol_type = other RNA
tcctcgccctcccctgccc

SEQ ID NO: 15406 - RNA, 19 nt, synthetic construct
  source 1..19: mol_type = other RNA
aatctcagcctctacctgg

SEQ ID NO: 15407 - RNA, 19 nt, synthetic construct
  source 1..19: mol_type = other RNA
acctggacaaccactactg

SEQ ID NO: 15408 - RNA, 19 nt, synthetic construct
  source 1..19: mol_type = other RNA
acggcctctgccactgccg

SEQ ID NO: 15409 - RNA, 19 nt, synthetic construct
  source 1..19: mol_type = other RNA
ggcctctgccactgccgct

SEQ ID NO: 15410 - RNA, 19 nt, synthetic construct
  source 1..19: mol_type = other RNA
gcctctgccactgccgctg

SEQ ID NO: 15411 - RNA, 19 nt, synthetic construct
  source 1..19: mol_type = other RNA
ctgccgctgccgcccgctg

SEQ ID NO: 15412 - RNA, 19 nt, synthetic construct
  source 1..19: mol_type = other RNA
ccgctgccgcccgctgccc

SEQ ID NO: 15413 - RNA, 19 nt, synthetic construct
  source 1..19: mol_type = other RNA
gcccgctgcccccgcgccc

SEQ ID NO: 15414 - RNA, 19 nt, synthetic construct
  source 1..19: mol_type = other RNA
ccgctgcccccgcgccctc

SEQ ID NO: 15415 - RNA, 19 nt, synthetic construct
  source 1..19: mol_type = other RNA
tgcatgggaaggaggaggg

SEQ ID NO: 15416 - RNA, 19 nt, synthetic construct
  source 1..19: mol_type = other RNA
gcatgggaaggaggagggc

SEQ ID NO: 15417 - RNA, 19 nt, synthetic construct
  source 1..19: mol_type = other RNA
catgggaaggaggagggcc

SEQ ID NO: 15418 - RNA, 19 nt, synthetic construct
  source 1..19: mol_type = other RNA
atgggaaggaggagggcct

SEQ ID NO: 15419 - RNA, 19 nt, synthetic construct
  source 1..19: mol_type = other RNA
ggcgtgcttgtgtctgtgc

SEQ ID NO: 15420 - RNA, 19 nt, synthetic construct
  source 1..19: mol_type = other RNA
gctggggaccaccaccatg

SEQ ID NO: 15421 - RNA, 19 nt, synthetic construct
  source 1..19: mol_type = other RNA
gcgtgtggacattcctgcc

SEQ ID NO: 15422 - RNA, 19 nt, synthetic construct
  source 1..19: mol_type = other RNA
tggccaagtcttccaggcc

SEQ ID NO: 15423 - RNA, 19 nt, synthetic construct
  source 1..19: mol_type = other RNA
caagtcttccaggcccggc

SEQ ID NO: 15424 - RNA, 19 nt, synthetic construct
  source 1..19: mol_type = other RNA
tgctgggccccgactggca

SEQ ID NO: 15425 - RNA, 19 nt, synthetic construct
  source 1..19: mol_type = other RNA
gcacaccccccactgccag

SEQ ID NO: 15426 - RNA, 19 nt, synthetic construct
  source 1..19: mol_type = other RNA
accccccactgccagcccc

SEQ ID NO: 15427 - RNA, 19 nt, synthetic construct
  source 1..19: mol_type = other RNA
cccccactgccagccccgc

SEQ ID NO: 15428 - RNA, 19 nt, synthetic construct
  source 1..19: mol_type = other RNA
cacccacccccaccccatg

SEQ ID NO: 15429 - RNA, 19 nt, synthetic construct
  source 1..19: mol_type = other RNA
cccacccccaccccatgcc

SEQ ID NO: 15430 - RNA, 19 nt, synthetic construct
  source 1..19: mol_type = other RNA
ccaccccatgcccaccaca

SEQ ID NO: 15431 - RNA, 19 nt, synthetic construct
  source 1..19: mol_type = other RNA
cccatgcccaccacagccg

SEQ ID NO: 15432 - RNA, 19 nt, synthetic construct
  source 1..19: mol_type = other RNA
ccatgcccaccacagccgc

SEQ ID NO: 15433 - RNA, 19 nt, synthetic construct
  source 1..19: mol_type = other RNA
gagccaggtctttgctgag

SEQ ID NO: 15434 - RNA, 19 nt, synthetic construct
  source 1..19: mol_type = other RNA
agccaggtctttgctgagt

SEQ ID NO: 15435 - RNA, 19 nt, synthetic construct
  source 1..19: mol_type = other RNA
ccctgccagagcctggagg

SEQ ID NO: 15436 - RNA, 19 nt, synthetic construct
  source 1..19: mol_type = other RNA
ggaaccagagcccacagct

SEQ ID NO: 15437 - RNA, 19 nt, synthetic construct
  source 1..19: mol_type = other RNA
gaaccagagcccacagctg

SEQ ID NO: 15438 - RNA, 19 nt, synthetic construct
  source 1..19: mol_type = other RNA
aaccagagcccacagctgg

SEQ ID NO: 15439 - RNA, 19 nt, synthetic construct
  source 1..19: mol_type = other RNA
accagagcccacagctgga

SEQ ID NO: 15440 - RNA, 19 nt, synthetic construct
  source 1..19: mol_type = other RNA
acagctggaggggatggcg

SEQ ID NO: 15441 - RNA, 19 nt, synthetic construct
  source 1..19: mol_type = other RNA
agctggaggggatggcgga

SEQ ID NO: 15442 - RNA, 19 nt, synthetic construct
  source 1..19: mol_type = other RNA
gctgcttctgccctgagga

SEQ ID NO: 15443 - RNA, 19 nt, synthetic construct
  source 1..19: mol_type = other RNA
cttctgccctgaggaccag

SEQ ID NO: 15444 - RNA, 19 nt, synthetic construct
  source 1..19: mol_type = other RNA
tctgccctgaggaccagat

SEQ ID NO: 15445 - RNA, 19 nt, synthetic construct
  source 1..19: mol_type = other RNA
caggcctgcccctgcgtgg

SEQ ID NO: 15446 - RNA, 19 nt, synthetic construct
  source 1..19: mol_type = other RNA
ggcctgcccctgcgtggga

SEQ ID NO: 15447 - RNA, 19 nt, synthetic construct
  source 1..19: mol_type = other RNA
gtcagcaactgccagtcct

SEQ ID NO: 15448 - RNA, 19 nt, synthetic construct
  source 1..19: mol_type = other RNA
acgcccagggtcagccccc

SEQ ID NO: 15449 - RNA, 19 nt, synthetic construct
  source 1..19: mol_type = other RNA
tgaccaggccccgggccga

SEQ ID NO: 15450 - RNA, 19 nt, synthetic construct
  source 1..19: mol_type = other RNA
caacacaaccacctgcccc

SEQ ID NO: 15451 - RNA, 19 nt, synthetic construct
  source 1..19: mol_type = other RNA
caaccacctgcccccagag

SEQ ID NO: 15452 - RNA, 19 nt, synthetic construct
  source 1..19: mol_type = other RNA
aaccacctgcccccagagc

SEQ ID NO: 15453 - RNA, 19 nt, synthetic construct
  source 1..19: mol_type = other RNA
cacctgcccccagagcctg

SEQ ID NO: 15454 - RNA, 19 nt, synthetic construct
  source 1..19: mol_type = other RNA
cctgcccccagagcctgcc

SEQ ID NO: 15455 - RNA, 19 nt, synthetic construct
  source 1..19: mol_type = other RNA
tgcccccagagcctgcctg

SEQ ID NO: 15456 - RNA, 19 nt, synthetic construct
  source 1..19: mol_type = other RNA
gtgcccgccagggcaggag

SEQ ID NO: 15457 - RNA, 19 nt, synthetic construct
  source 1..19: mol_type = other RNA
gcccgccagggcaggagtc

SEQ ID NO: 15458 - RNA, 19 nt, synthetic construct
  source 1..19: mol_type = other RNA
agtccatctgcacccagga

SEQ ID NO: 15459 - RNA, 19 nt, synthetic construct
  source 1..19: mol_type = other RNA
gtccatctgcacccaggag

SEQ ID NO: 15460 - RNA, 19 nt, synthetic construct
  source 1..19: mol_type = other RNA
ccatctgcacccaggagga

SEQ ID NO: 15461 - RNA, 19 nt, synthetic construct
  source 1..19: mol_type = other RNA
tctgcacccaggaggaggg

SEQ ID NO: 15462 - RNA, 19 nt, synthetic construct
  source 1..19: mol_type = other RNA
tgcacccaggaggagggcg

SEQ ID NO: 15463 - RNA, 19 nt, synthetic construct
  source 1..19: mol_type = other RNA
ccgctgcagacctcagctg

SEQ ID NO: 15464 - RNA, 19 nt, synthetic construct
  source 1..19: mol_type = other RNA
cgctgcagacctcagctgt

SEQ ID NO: 15465 - RNA, 19 nt, synthetic construct
  source 1..19: mol_type = other RNA
ccttcccaggcgcccttcc

SEQ ID NO: 15466 - RNA, 19 nt, synthetic construct
  source 1..19: mol_type = other RNA
ctacctgtccccagggctt

SEQ ID NO: 15467 - RNA, 19 nt, synthetic construct
  source 1..19: mol_type = other RNA
ctgtccccagggctttgag

SEQ ID NO: 15468 - RNA, 19 nt, synthetic construct
  source 1..19: mol_type = other RNA
atggccagccagtccagct

SEQ ID NO: 15469 - RNA, 19 nt, synthetic construct
  source 1..19: mol_type = other RNA
tcaacagccatgtggacaa

SEQ ID NO: 15470 - RNA, 19 nt, synthetic construct
  source 1..19: mol_type = other RNA
acctctgtgaggctgaggg

SEQ ID NO: 15471 - RNA, 19 nt, synthetic construct
  source 1..19: mol_type = other RNA
ctctgtgaggctgagggtg

SEQ ID NO: 15472 - RNA, 19 nt, synthetic construct
  source 1..19: mol_type = other RNA
tctgtgaggctgagggtgg

SEQ ID NO: 15473 - RNA, 19 nt, synthetic construct
  source 1..19: mol_type = other RNA
ctgtgaggctgagggtgga

SEQ ID NO: 15474 - RNA, 19 nt, synthetic construct
  source 1..19: mol_type = other RNA
cctgcatcctgcccagatg

SEQ ID NO: 15475 - RNA, 19 nt, synthetic construct
  source 1..19: mol_type = other RNA
atgtgtccagctgcagggg

SEQ ID NO: 15476 - RNA, 19 nt, synthetic construct
  source 1..19: mol_type = other RNA
agggctgcgagaccgaggt

SEQ ID NO: 15477 - RNA, 19 nt, synthetic construct
  source 1..19: mol_type = other RNA
tgcgagggctcctgccccg

SEQ ID NO: 15478 - RNA, 19 nt, synthetic construct
  source 1..19: mol_type = other RNA
gcgagggctcctgccccgg

SEQ ID NO: 15479 - RNA, 19 nt, synthetic construct
  source 1..19: mol_type = other RNA
tactcagcagaggcccagg

SEQ ID NO: 15480 - RNA, 19 nt, synthetic construct
  source 1..19: mol_type = other RNA
tgcacctgctgccaggaga

SEQ ID NO: 15481 - RNA, 19 nt, synthetic construct
  source 1..19: mol_type = other RNA
ctgctgccaggagaggcgg

SEQ ID NO: 15482 - RNA, 19 nt, synthetic construct
  source 1..19: mol_type = other RNA
acacccgtggcttcccggc

SEQ ID NO: 15483 - RNA, 19 nt, synthetic construct
  source 1..19: mol_type = other RNA
cgtggcttcccggcccagg

SEQ ID NO: 15484 - RNA, 19 nt, synthetic construct
  source 1..19: mol_type = other RNA
ggcttcccggcccaggagg

SEQ ID NO: 15485 - RNA, 19 nt, synthetic construct
  source 1..19: mol_type = other RNA
gcttcccggcccaggaggc

SEQ ID NO: 15486 - RNA, 19 nt, synthetic construct
  source 1..19: mol_type = other RNA
cggcccaggaggccactgc

SEQ ID NO: 15487 - RNA, 19 nt, synthetic construct
  source 1..19: mol_type = other RNA
ccaggaggccactgctgtc

SEQ ID NO: 15488 - RNA, 19 nt, synthetic construct
  source 1..19: mol_type = other RNA
cgttctgcctccatcccca

SEQ ID NO: 15489 - RNA, 19 nt, synthetic construct
  source 1..19: mol_type = other RNA
gtccacctggagccaggat

SEQ ID NO: 15490 - RNA, 19 nt, synthetic construct
  source 1..19: mol_type = other RNA
gcattgtctgatcatgaaa

SEQ ID NO: 15491 - RNA, 19 nt, synthetic construct
  source 1..19: mol_type = other RNA
cattgtctgatcatgaaaa

SEQ ID NO: 15492 - RNA, 19 nt, synthetic construct
  source 1..19: mol_type = other RNA
gggcctcctctgcggagcc

SEQ ID NO: 15493 - RNA, 19 nt, synthetic construct
  source 1..19: mol_type = other RNA
cctcctctgcggagccccc

SEQ ID NO: 15494 - RNA, 19 nt, synthetic construct
  source 1..19: mol_type = other RNA
ctctgcggagccccccggc

SEQ ID NO: 15495 - RNA, 19 nt, synthetic construct
  source 1..19: mol_type = other RNA
tctgcggagccccccggcc

SEQ ID NO: 15496 - RNA, 19 nt, synthetic construct
  source 1..19: mol_type = other RNA
ccccccggcctgtgtgtgg

SEQ ID NO: 15497 - RNA, 19 nt, synthetic construct
  source 1..19: mol_type = other RNA
cggccccagaagggtgagg

SEQ ID NO: 15498 - RNA, 19 nt, synthetic construct
  source 1..19: mol_type = other RNA
agaagggtgaggggccagc

SEQ ID NO: 15499 - RNA, 19 nt, synthetic construct
  source 1..19: mol_type = other RNA
gggccagcaggaccccttt

SEQ ID NO: 15500 - RNA, 19 nt, synthetic construct
  source 1..19: mol_type = other RNA
ccttggccttgcccctccc

SEQ ID NO: 15501 - RNA, 19 nt, synthetic construct
  source 1..19: mol_type = other RNA
cttggccttgcccctccct

SEQ ID NO: 15502 - RNA, 19 nt, synthetic construct
  source 1..19: mol_type = other RNA
cacggccggagcgcccgcg

SEQ ID NO: 15503 - RNA, 19 nt, synthetic construct
  source 1..19: mol_type = other RNA
aggctggtccaggcaaggc

SEQ ID NO: 15504 - RNA, 19 nt, synthetic construct
  source 1..19: mol_type = other RNA
ggtccaggcaaggccagct

SEQ ID NO: 15505 - RNA, 19 nt, synthetic construct
  source 1..19: mol_type = other RNA
ggcaaggccagctgctgcc

SEQ ID NO: 15506 - RNA, 19 nt, synthetic construct
  source 1..19: mol_type = other RNA
gcaaggccagctgctgcca

SEQ ID NO: 15507 - RNA, 19 nt, synthetic construct
  source 1..19: mol_type = other RNA
aaggccagctgctgccagg

SEQ ID NO: 15508 - RNA, 19 nt, synthetic construct
  source 1..19: mol_type = other RNA
gccagctgctgccaggaag

SEQ ID NO: 15509 - RNA, 19 nt, synthetic construct
  source 1..19: mol_type = other RNA
agctgctgccaggaagctg

SEQ ID NO: 15510 - RNA, 19 nt, synthetic construct
  source 1..19: mol_type = other RNA
ctgctgccaggaagctgcg

SEQ ID NO: 15511 - RNA, 19 nt, synthetic construct
  source 1..19: mol_type = other RNA
aggaagctgcgacaggcaa

SEQ ID NO: 15512 - RNA, 19 nt, synthetic construct
  source 1..19: mol_type = other RNA
caggtcagagaggggtcag

SEQ ID NO: 15513 - RNA, 19 nt, synthetic construct
  source 1..19: mol_type = other RNA
cagagaggggtcagcatcc

SEQ ID NO: 15514 - RNA, 19 nt, synthetic construct
  source 1..19: mol_type = other RNA
gcaaataaaccctgagcat

SEQ ID NO: 15515 - RNA, 19 nt, synthetic construct
  source 1..19: mol_type = other RNA
acagccatgtggacaactg

SEQ ID NO: 15516 - RNA, 19 nt, synthetic construct
  source 1..19: mol_type = other RNA
gtggaggccacgggcgcag

SEQ ID NO: 15517 - RNA, 19 nt, synthetic construct
  source 1..19: mol_type = other RNA
cagctccccctcccaaagt

SEQ ID NO: 15518 - RNA, 19 nt, synthetic construct
  source 1..19: mol_type = other RNA
cagctccccctcccaaagt

SEQ ID NO: 15519 - RNA, 19 nt, synthetic construct
  source 1..19: mol_type = other RNA
cagctccccctcccaaagt

SEQ ID NO: 15520 - RNA, 19 nt, synthetic construct
  source 1..19: mol_type = other RNA
actttgagacgtttgaaaa

SEQ ID NO: 15521 - RNA, 19 nt, synthetic construct
  source 1..19: mol_type = other RNA
ccatggtgcatgggaagga

SEQ ID NO: 15522 - RNA, 19 nt, synthetic construct
  source 1..19: mol_type = other RNA
gacgtcctcgcccacccgg

SEQ ID NO: 15523 - RNA, 19 nt, synthetic construct
  source 1..19: mol_type = other RNA
gccagagctgtaactgcac

SEQ ID NO: 15524 - RNA, 19 nt, synthetic construct
  source 1..19: mol_type = other RNA
ctccagggacaactcccat

SEQ ID NO: 15525 - RNA, 19 nt, synthetic construct
  source 1..19: mol_type = other RNA
taagctgcctgggagcctc

SEQ ID NO: 15526 - RNA, 19 nt, synthetic construct
  source 1..19: mol_type = other RNA
atcaccccagtgctgacca

SEQ ID NO: 15527 - RNA, 19 nt, synthetic construct
  source 1..19: mol_type = other RNA
acagccgcactggcctcct

SEQ ID NO: 15528 - RNA, 19 nt, synthetic construct
  source 1..19: mol_type = other RNA
ggtcagcatcccaaagccc

SEQ ID NO: 15529 - RNA, 19 nt, synthetic construct
  source 1..19: mol_type = other RNA
tcccccggccagcaccaca

SEQ ID NO: 15530 - RNA, 19 nt, synthetic construct
  source 1..19: mol_type = other RNA
gctctgtggccaccccctc

SEQ ID NO: 15531 - RNA, 19 nt, synthetic construct
  source 1..19: mol_type = other RNA
caccccagtgctgaccagc

SEQ ID NO: 15532 - RNA, 19 nt, synthetic construct
  source 1..19: mol_type = other RNA
ttacagccgcactggcctc

SEQ ID NO: 15533 - RNA, 19 nt, synthetic construct
  source 1..19: mol_type = other RNA
acagccacccacgctggcc

SEQ ID NO: 15534 - RNA, 19 nt, synthetic construct
  source 1..19: mol_type = other RNA
ctgcggagccccccggcct

SEQ ID NO: 15535 - RNA, 19 nt, synthetic construct
  source 1..19: mol_type = other RNA
cagccgcactggcctcctg

SEQ ID NO: 15536 - RNA, 19 nt, synthetic construct
  source 1..19: mol_type = other RNA
cgctgccccacctgcccgt

SEQ ID NO: 15537 - RNA, 19 nt, synthetic construct
  source 1..19: mol_type = other RNA
ggcccaggctgcctgtgcc

SEQ ID NO: 15538 - RNA, 19 nt, synthetic construct
  source 1..19: mol_type = other RNA
ggagctgggccagcaggtg

SEQ ID NO: 15539 - RNA, 19 nt, synthetic construct
  source 1..19: mol_type = other RNA
cccggccccaggcaccagc

SEQ ID NO: 15540 - RNA, 19 nt, synthetic construct
  source 1..19: mol_type = other RNA
ccaccaccacccaggccct

SEQ ID NO: 15541 - RNA, 19 nt, synthetic construct
  source 1..19: mol_type = other RNA
tcagctccagagccactcc

SEQ ID NO: 15542 - RNA, 19 nt, synthetic construct
  source 1..19: mol_type = other RNA
aggaccacagccacagcca

SEQ ID NO: 15543 - RNA, 19 nt, synthetic construct
  source 1..19: mol_type = other RNA
cggagggctgcttctgccc

SEQ ID NO: 15544 - RNA, 19 nt, synthetic construct
  source 1..19: mol_type = other RNA
ggcaccagccctcagccct

SEQ ID NO: 15545 - RNA, 19 nt, synthetic construct
  source 1..19: mol_type = other RNA
cttcccaggcgcccttccc

SEQ ID NO: 15546 - RNA, 19 nt, synthetic construct
  source 1..19: mol_type = other RNA
acgggcggtccctgccccc

SEQ ID NO: 15547 - RNA, 19 nt, synthetic construct
  source 1..19: mol_type = other RNA
cgggcggtccctgcccccc

SEQ ID NO: 15548 - RNA, 19 nt, synthetic construct
  source 1..19: mol_type = other RNA
tcagagaggggtcagcatc

SEQ ID NO: 15549 - RNA, 19 nt, synthetic construct
  source 1..19: mol_type = other RNA
gctcccccacacacccgtg

SEQ ID NO: 15550 - RNA, 19 nt, synthetic construct
  source 1..19: mol_type = other RNA
ctcccccacacacccgtgg

SEQ ID NO: 15551 - RNA, 19 nt, synthetic construct
  source 1..19: mol_type = other RNA
agacccactggcttcccca

SEQ ID NO: 15552 - RNA, 19 nt, synthetic construct
  source 1..19: mol_type = other RNA
ggggcagacaggctggtcc

SEQ ID NO: 15553 - RNA, 19 nt, synthetic construct
  source 1..19: mol_type = other RNA
tgaccaccaccgccaccac

SEQ ID NO: 15554 - RNA, 19 nt, synthetic construct
  source 1..19: mol_type = other RNA
tgaccaccaccgccaccac

SEQ ID NO: 15555 - RNA, 19 nt, synthetic construct
  source 1..19: mol_type = other RNA
tgaccaccaccgccaccac

SEQ ID NO: 15556 - RNA, 19 nt, synthetic construct
  source 1..19: mol_type = other RNA
tgaccaccaccgccaccac

SEQ ID NO: 15557 - RNA, 19 nt, synthetic construct
  source 1..19: mol_type = other RNA
gggcggtccctgcccccca

SEQ ID NO: 15558 - RNA, 19 nt, synthetic construct
  source 1..19: mol_type = other RNA
gagtcacccccttccccag

SEQ ID NO: 15559 - RNA, 19 nt, synthetic construct
  source 1..19: mol_type = other RNA
gtcacccccttccccaggg

SEQ ID NO: 15560 - RNA, 19 nt, synthetic construct
  source 1..19: mol_type = other RNA
aggcaccagccctcagccc

SEQ ID NO: 15561 - RNA, 19 nt, synthetic construct
  source 1..19: mol_type = other RNA
cgagtcacccccttcccca

SEQ ID NO: 15562 - RNA, 19 nt, synthetic construct
  source 1..19: mol_type = other RNA
acccggcccggctccctcc

SEQ ID NO: 15563 - RNA, 19 nt, synthetic construct
  source 1..19: mol_type = other RNA
cttcacagccaccccctcc

SEQ ID NO: 15564 - RNA, 19 nt, synthetic construct
  source 1..19: mol_type = other RNA
cttcacagccaccccctcc

SEQ ID NO: 15565 - RNA, 19 nt, synthetic construct
  source 1..19: mol_type = other RNA
cttcacagccaccccctcc

SEQ ID NO: 15566 - RNA, 19 nt, synthetic construct
  source 1..19: mol_type = other RNA
cttcacagccaccccctcc

SEQ ID NO: 15567 - RNA, 19 nt, synthetic construct
  source 1..19: mol_type = other RNA
gagacccactggcttcccc

SEQ ID NO: 15568 - RNA, 19 nt, synthetic construct
  source 1..19: mol_type = other RNA
tgccgctgccgcccgctgc

SEQ ID NO: 15569 - RNA, 19 nt, synthetic construct
  source 1..19: mol_type = other RNA
ttgcaaggacatggccaag

SEQ ID NO: 15570 - RNA, 19 nt, synthetic construct
  source 1..19: mol_type = other RNA
ctgccagccccgcagcccc

SEQ ID NO: 15571 - RNA, 19 nt, synthetic construct
  source 1..19: mol_type = other RNA
agccccgcagccccggtgt

SEQ ID NO: 15572 - RNA, 19 nt, synthetic construct
  source 1..19: mol_type = other RNA
tccagctcaggccccgtga

SEQ ID NO: 15573 - RNA, 19 nt, synthetic construct
  source 1..19: mol_type = other RNA
accccagcagcaaccaccg

SEQ ID NO: 15574 - RNA, 19 nt, synthetic construct
  source 1..19: mol_type = other RNA
accccagcagcaaccaccg

SEQ ID NO: 15575 - RNA, 19 nt, synthetic construct
  source 1..19: mol_type = other RNA
ccccagcagcctgccaacc

SEQ ID NO: 15576 - RNA, 19 nt, synthetic construct
  source 1..19: mol_type = other RNA
ccctttccagccctcaccc

SEQ ID NO: 15577 - RNA, 19 nt, synthetic construct
  source 1..19: mol_type = other RNA
cccactgccagccccgcag

SEQ ID NO: 15578 - RNA, 19 nt, synthetic construct
  source 1..19: mol_type = other RNA
gagacccagggccctgtgg

SEQ ID NO: 15579 - RNA, 19 nt, synthetic construct
  source 1..19: mol_type = other RNA
ctcccccggccagcaccac

SEQ ID NO: 15580 - RNA, 19 nt, synthetic construct
  source 1..19: mol_type = other RNA
gctccaccaccaacccctc

SEQ ID NO: 15581 - RNA, 19 nt, synthetic construct
  source 1..19: mol_type = other RNA
gctccaccaccaacccctc

SEQ ID NO: 15582 - RNA, 19 nt, synthetic construct
  source 1..19: mol_type = other RNA
gctccaccaccaacccctc

SEQ ID NO: 15583 - RNA, 19 nt, synthetic construct
  source 1..19: mol_type = other RNA
gctccaccaccaacccctc

SEQ ID NO: 15584 - RNA, 19 nt, synthetic construct
  source 1..19: mol_type = other RNA
gctccaccaccaacccctc

SEQ ID NO: 15585 - RNA, 19 nt, synthetic construct
  source 1..19: mol_type = other RNA
ctgcgagggctcctgcccc

SEQ ID NO: 15586 - RNA, 19 nt, synthetic construct
  source 1..19: mol_type = other RNA
ggatccacggccaccctgt

SEQ ID NO: 15587 - RNA, 19 nt, synthetic construct
  source 1..19: mol_type = other RNA
ccagagcccacagctggag

SEQ ID NO: 15588 - RNA, 19 nt, synthetic construct
  source 1..19: mol_type = other RNA
aggatggctgctgggcccc

SEQ ID NO: 15589 - RNA, 19 nt, synthetic construct
  source 1..19: mol_type = other RNA
acctgtggcctgtgtgggg

SEQ ID NO: 15590 - RNA, 19 nt, synthetic construct
  source 1..19: mol_type = other RNA
gcgcgcagctctgcgagga

SEQ ID NO: 15591 - RNA, 19 nt, synthetic construct
  source 1..19: mol_type = other RNA
cacctgcacctgcaggaac

SEQ ID NO: 15592 - RNA, 19 nt, synthetic construct
  source 1..19: mol_type = other RNA
gcaccagccctcagccctc

SEQ ID NO: 15593 - RNA, 19 nt, synthetic construct
  source 1..19: mol_type = other RNA
cccggccagcaccacagca

SEQ ID NO: 15594 - RNA, 19 nt, synthetic construct
  source 1..19: mol_type = other RNA
aacaccaccaccagccagg

SEQ ID NO: 15595 - RNA, 19 nt, synthetic construct
  source 1..19: mol_type = other RNA
agactgcccacacctccac

SEQ ID NO: 15596 - RNA, 19 nt, synthetic construct
  source 1..19: mol_type = other RNA
gactgcccacacctccaca

SEQ ID NO: 15597 - RNA, 19 nt, synthetic construct
  source 1..19: mol_type = other RNA
ccccctcctccaccccagg

SEQ ID NO: 15598 - RNA, 19 nt, synthetic construct
  source 1..19: mol_type = other RNA
cctttccagccctcaccct

SEQ ID NO: 15599 - RNA, 19 nt, synthetic construct
  source 1..19: mol_type = other RNA
ccacaccacggccacctcc

SEQ ID NO: 15600 - RNA, 19 nt, synthetic construct
  source 1..19: mol_type = other RNA
ccaggaccacagccacggc

SEQ ID NO: 15601 - RNA, 19 nt, synthetic construct
  source 1..19: mol_type = other RNA
agccatcccctcctcctcc

SEQ ID NO: 15602 - RNA, 19 nt, synthetic construct
  source 1..19: mol_type = other RNA
gccatcccctcctcctccc

SEQ ID NO: 15603 - RNA, 19 nt, synthetic construct
  source 1..19: mol_type = other RNA
ctcctccactccagagact

SEQ ID NO: 15604 - RNA, 19 nt, synthetic construct
  source 1..19: mol_type = other RNA
ccccctcctccaccccagg

SEQ ID NO: 15605 - RNA, 19 nt, synthetic construct
  source 1..19: mol_type = other RNA
gatccctgtcccccagcag

SEQ ID NO: 15606 - RNA, 19 nt, synthetic construct
  source 1..19: mol_type = other RNA
ccactggccccacggccac

SEQ ID NO: 15607 - RNA, 19 nt, synthetic construct
  source 1..19: mol_type = other RNA
ccccctcctccaccccagg

SEQ ID NO: 15608 - RNA, 19 nt, synthetic construct
  source 1..19: mol_type = other RNA
agccatcccctcctcctcc

SEQ ID NO: 15609 - RNA, 19 nt, synthetic construct
  source 1..19: mol_type = other RNA
gccatcccctcctcctccc

SEQ ID NO: 15610 - RNA, 19 nt, synthetic construct
  source 1..19: mol_type = other RNA
agactgcccacacctccac

SEQ ID NO: 15611 - RNA, 19 nt, synthetic construct
  source 1..19: mol_type = other RNA
gactgcccacacctccaca

SEQ ID NO: 15612 - RNA, 19 nt, synthetic construct
  source 1..19: mol_type = other RNA
gatccctgtcccccagcag

SEQ ID NO: 15613 - RNA, 19 nt, synthetic construct
  source 1..19: mol_type = other RNA
ccacaccacggccacctcc

SEQ ID NO: 15614 - RNA, 19 nt, synthetic construct
  source 1..19: mol_type = other RNA
catcccctcctccaccctt

SEQ ID NO: 15615 - RNA, 19 nt, synthetic construct
  source 1..19: mol_type = other RNA
ccactggccccacggccac

SEQ ID NO: 15616 - RNA, 19 nt, synthetic construct
  source 1..19: mol_type = other RNA
agccatcccctcctcctcc

SEQ ID NO: 15617 - RNA, 19 nt, synthetic construct
  source 1..19: mol_type = other RNA
gccatcccctcctcctccc

SEQ ID NO: 15618 - RNA, 19 nt, synthetic construct
  source 1..19: mol_type = other RNA
ctcctccactccagagact

SEQ ID NO: 15619 - RNA, 19 nt, synthetic construct
  source 1..19: mol_type = other RNA
ccccctcctccaccccagg

SEQ ID NO: 15620 - RNA, 19 nt, synthetic construct
  source 1..19: mol_type = other RNA
gccgctgccgcccgctgcc

SEQ ID NO: 15621 - RNA, 19 nt, synthetic construct
  source 1..19: mol_type = other RNA
ccccactgccagccccgca

SEQ ID NO: 15622 - RNA, 19 nt, synthetic construct
  source 1..19: mol_type = other RNA
ccactgccagccccgcagc

SEQ ID NO: 15623 - RNA, 19 nt, synthetic construct
  source 1..19: mol_type = other RNA
cactgccagccccgcagcc

SEQ ID NO: 15624 - RNA, 19 nt, synthetic construct
  source 1..19: mol_type = other RNA
cagagcccacagctggagg

SEQ ID NO: 15625 - RNA, 19 nt, synthetic construct
  source 1..19: mol_type = other RNA
agagcccacagctggaggg

SEQ ID NO: 15626 - RNA, 19 nt, synthetic construct
  source 1..19: mol_type = other RNA
acctgcccccagagcctgc

SEQ ID NO: 15627 - RNA, 19 nt, synthetic construct
  source 1..19: mol_type = other RNA
gagtgtggctcaccctgca

SEQ ID NO: 15628 - RNA, 19 nt, synthetic construct
  source 1..19: mol_type = other RNA
gccaccacacccacagtca

SEQ ID NO: 15629 - RNA, 19 nt, synthetic construct
  source 1..19: mol_type = other RNA
aacagccaacagagtcccc

SEQ ID NO: 15630 - RNA, 19 nt, synthetic construct
  source 1..19: mol_type = other RNA
aggccactgctgtctgaga

SEQ ID NO: 15631 - RNA, 19 nt, synthetic construct
  source 1..19: mol_type = other RNA
cagtccccaccctctcaga

SEQ ID NO: 15632 - RNA, 19 nt, synthetic construct
  source 1..19: mol_type = other RNA
accatggccaccacacacg

SEQ ID NO: 15633 - RNA, 19 nt, synthetic construct
  source 1..19: mol_type = other RNA
gcagggtaactcagggctg

SEQ ID NO: 15634 - RNA, 19 nt, synthetic construct
  source 1..19: mol_type = other RNA
ctgctggacccaaagcctg

SEQ ID NO: 15635 - RNA, 19 nt, synthetic construct
  source 1..19: mol_type = other RNA
caccacacccacagtcacc

SEQ ID NO: 15636 - RNA, 19 nt, synthetic construct
  source 1..19: mol_type = other RNA
gcagccaccagcagcacag

SEQ ID NO: 15637 - RNA, 19 nt, synthetic construct
  source 1..19: mol_type = other RNA
cctgtcccccagcagtccc

SEQ ID NO: 15638 - RNA, 19 nt, synthetic construct
  source 1..19: mol_type = other RNA
gcagccaccagcagcacag

SEQ ID NO: 15639 - RNA, 19 nt, synthetic construct
  source 1..19: mol_type = other RNA
gcagccaccagcagcacag

SEQ ID NO: 15640 - RNA, 19 nt, synthetic construct
  source 1..19: mol_type = other RNA
cctgtcccccagcagtccc

SEQ ID NO: 15641 - RNA, 19 nt, synthetic construct
  source 1..19: mol_type = other RNA
ccagagcctgcctgtgtgc

SEQ ID NO: 15642 - RNA, 19 nt, synthetic construct
  source 1..19: mol_type = other RNA
gggcggggcccacatctcc

SEQ ID NO: 15643 - RNA, 19 nt, synthetic construct
  source 1..19: mol_type = other RNA
caccgccagtgtcctccgc

SEQ ID NO: 15644 - RNA, 19 nt, synthetic construct
  source 1..19: mol_type = other RNA
agggctcctgccccggagc

SEQ ID NO: 15645 - RNA, 19 nt, synthetic construct
  source 1..19: mol_type = other RNA
gggcaccgcccagagcccg

SEQ ID NO: 15646 - RNA, 19 nt, synthetic construct
  source 1..19: mol_type = other RNA
ggcggggcccacatctcca

SEQ ID NO: 15647 - RNA, 19 nt, synthetic construct
  source 1..19: mol_type = other RNA
tccccctcctgcccggacg

SEQ ID NO: 15648 - RNA, 19 nt, synthetic construct
  source 1..19: mol_type = other RNA
ccctgggagagcctgtggc

SEQ ID NO: 15649 - RNA, 19 nt, synthetic construct
  source 1..19: mol_type = other RNA
gtcccagcacagaccacca

SEQ ID NO: 15650 - RNA, 19 nt, synthetic construct
  source 1..19: mol_type = other RNA
ccctcctccacccttggga

SEQ ID NO: 15651 - RNA, 19 nt, synthetic construct
  source 1..19: mol_type = other RNA
gccaccacacccacagtca

SEQ ID NO: 15652 - RNA, 19 nt, synthetic construct
  source 1..19: mol_type = other RNA
gggctcctgccccggagcg

SEQ ID NO: 15653 - RNA, 19 nt, synthetic construct
  source 1..19: mol_type = other RNA
gccaccagcagcacagtga

SEQ ID NO: 15654 - RNA, 19 nt, synthetic construct
  source 1..19: mol_type = other RNA
accccctcctccactccgg

SEQ ID NO: 15655 - RNA, 19 nt, synthetic construct
  source 1..19: mol_type = other RNA
gccaccagcagcacagtga

SEQ ID NO: 15656 - RNA, 19 nt, synthetic construct
  source 1..19: mol_type = other RNA
gccaccagcagcacagtga

SEQ ID NO: 15657 - RNA, 19 nt, synthetic construct
  source 1..19: mol_type = other RNA
accccctcctccactccgg

SEQ ID NO: 15658 - RNA, 19 nt, synthetic construct
  source 1..19: mol_type = other RNA
agaacagaccaccacaccc

SEQ ID NO: 15659 - RNA, 19 nt, synthetic construct
  source 1..19: mol_type = other RNA
agaacagaccaccacaccc

SEQ ID NO: 15660 - RNA, 19 nt, synthetic construct
  source 1..19: mol_type = other RNA
agagcctgcctgtgtgccc

SEQ ID NO: 15661 - RNA, 19 nt, synthetic construct
  source 1..19: mol_type = other RNA
cagggtgtgcagcccccat

SEQ ID NO: 15662 - RNA, 19 nt, synthetic construct
  source 1..19: mol_type = other RNA
ctgtccacctggagccagg

SEQ ID NO: 15663 - RNA, 19 nt, synthetic construct
  source 1..19: mol_type = other RNA
agctcctgcacctgctccg

SEQ ID NO: 15664 - RNA, 19 nt, synthetic construct
  source 1..19: mol_type = other RNA
gcagacaggcctggggctg

SEQ ID NO: 15665 - RNA, 19 nt, synthetic construct
  source 1..19: mol_type = other RNA
caccaccaccaccacccag

SEQ ID NO: 15666 - RNA, 19 nt, synthetic construct
  source 1..19: mol_type = other RNA
accccctcctccatcccgg

SEQ ID NO: 15667 - RNA, 19 nt, synthetic construct
  source 1..19: mol_type = other RNA
ggccacctccaggaccaca

SEQ ID NO: 15668 - RNA, 19 nt, synthetic construct
  source 1..19: mol_type = other RNA
ccacagccacggccacacc

SEQ ID NO: 15669 - RNA, 19 nt, synthetic construct
  source 1..19: mol_type = other RNA
accccctcctccatcccgg

SEQ ID NO: 15670 - RNA, 19 nt, synthetic construct
  source 1..19: mol_type = other RNA
gtccaccccctcctccact

SEQ ID NO: 15671 - RNA, 19 nt, synthetic construct
  source 1..19: mol_type = other RNA
accccctcctccatcccgg

SEQ ID NO: 15672 - RNA, 19 nt, synthetic construct
  source 1..19: mol_type = other RNA
gtccaccccctcctccact

SEQ ID NO: 15673 - RNA, 19 nt, synthetic construct
  source 1..19: mol_type = other RNA
accccctcctccatcccgg

SEQ ID NO: 15674 - RNA, 19 nt, synthetic construct
  source 1..19: mol_type = other RNA
cgctggggcagacaggctg

SEQ ID NO: 15675 - RNA, 19 nt, synthetic construct
  source 1..19: mol_type = other RNA
accccggccaccagctcta

SEQ ID NO: 15676 - RNA, 19 nt, synthetic construct
  source 1..19: mol_type = other RNA
accccggccaccagctcta

SEQ ID NO: 15677 - RNA, 19 nt, synthetic construct
  source 1..19: mol_type = other RNA
accccggccaccagctcta

SEQ ID NO: 15678 - RNA, 19 nt, synthetic construct
  source 1..19: mol_type = other RNA
accccggccaccagctcta

SEQ ID NO: 15679 - RNA, 19 nt, synthetic construct
  source 1..19: mol_type = other RNA
ccctcagccctccctcagt

SEQ ID NO: 15680 - RNA, 19 nt, synthetic construct
  source 1..19: mol_type = other RNA
cacagaccaccacacccac

SEQ ID NO: 15681 - RNA, 19 nt, synthetic construct
  source 1..19: mol_type = other RNA
cacagaccaccacacccac

SEQ ID NO: 15682 - RNA, 19 nt, synthetic construct
  source 1..19: mol_type = other RNA
cacagaccaccacacccac

SEQ ID NO: 15683 - RNA, 19 nt, synthetic construct
  source 1..19: mol_type = other RNA
cacagaccaccacacccac

SEQ ID NO: 15684 - RNA, 19 nt, synthetic construct
  source 1..19: mol_type = other RNA
cacagaccaccacacccac

SEQ ID NO: 15685 - RNA, 19 nt, synthetic construct
  source 1..19: mol_type = other RNA
cggatgggagtgggggctg

SEQ ID NO: 15686 - RNA, 19 nt, synthetic construct
  source 1..19: mol_type = other RNA
cgcctcctccacccaggca

SEQ ID NO: 15687 - RNA, 19 nt, synthetic construct
  source 1..19: mol_type = other RNA
cgcctcctccacccaggca

SEQ ID NO: 15688 - RNA, 19 nt, synthetic construct
  source 1..19: mol_type = other RNA
cgcctcctccacccaggca

SEQ ID NO: 15689 - RNA, 19 nt, synthetic construct
  source 1..19: mol_type = other RNA
tacagcctgccacctgcaa

SEQ ID NO: 15690 - RNA, 19 nt, synthetic construct
  source 1..19: mol_type = other RNA
gctggtccaggcaaggcca

SEQ ID NO: 15691 - RNA, 19 nt, synthetic construct
  source 1..19: mol_type = other RNA
ccctgtgtgcacaacgagg

SEQ ID NO: 15692 - RNA, 19 nt, synthetic construct
  source 1..19: mol_type = other RNA
cacccacaaccagaggctc

SEQ ID NO: 15693 - RNA, 19 nt, synthetic construct
  source 1..19: mol_type = other RNA
cacccacaaccagaggctc

SEQ ID NO: 15694 - RNA, 19 nt, synthetic construct
  source 1..19: mol_type = other RNA
ctgcacggcctctgccact

SEQ ID NO: 15695 - RNA, 19 nt, synthetic construct
  source 1..19: mol_type = other RNA
ttccatgtccaccccctcc

SEQ ID NO: 15696 - RNA, 19 nt, synthetic construct
  source 1..19: mol_type = other RNA
cctccttcacccttgggac

SEQ ID NO: 15697 - RNA, 19 nt, synthetic construct
  source 1..19: mol_type = other RNA
ccctcctcctccctgggca

SEQ ID NO: 15698 - RNA, 19 nt, synthetic construct
  source 1..19: mol_type = other RNA
ccctcctcctccctgggca

SEQ ID NO: 15699 - RNA, 19 nt, synthetic construct
  source 1..19: mol_type = other RNA
ccctcctcctccctgggca

SEQ ID NO: 15700 - RNA, 19 nt, synthetic construct
  source 1..19: mol_type = other RNA
gcccacagctggaggggat

SEQ ID NO: 15701 - RNA, 19 nt, synthetic construct
  source 1..19: mol_type = other RNA
actgtccacacctccacag

SEQ ID NO: 15702 - RNA, 19 nt, synthetic construct
  source 1..19: mol_type = other RNA
actgtccacacctccacag

SEQ ID NO: 15703 - RNA, 19 nt, synthetic construct
  source 1..19: mol_type = other RNA
actgtccacacctccacag

SEQ ID NO: 15704 - RNA, 19 nt, synthetic construct
  source 1..19: mol_type = other RNA
ggccactgctgtctgagaa

SEQ ID NO: 15705 - RNA, 19 nt, synthetic construct
  source 1..19: mol_type = other RNA
agtccccaccctctcagaa

SEQ ID NO: 15706 - RNA, 19 nt, synthetic construct
  source 1..19: mol_type = other RNA
aggggctggtgctggaggc

SEQ ID NO: 15707 - RNA, 19 nt, synthetic construct
  source 1..19: mol_type = other RNA
tccccggccccaggcacca

SEQ ID NO: 15708 - RNA, 19 nt, synthetic construct
  source 1..19: mol_type = other RNA
gtccccaccctctcagaag

SEQ ID NO: 15709 - RNA, 19 nt, synthetic construct
  source 1..19: mol_type = other RNA
tccccaccctctcagaagg

SEQ ID NO: 15710 - RNA, 19 nt, synthetic construct
  source 1..19: mol_type = other RNA
gccaccggctccaccacca

SEQ ID NO: 15711 - RNA, 19 nt, synthetic construct
  source 1..19: mol_type = other RNA
gccaccggctccaccacca

SEQ ID NO: 15712 - RNA, 19 nt, synthetic construct
  source 1..19: mol_type = other RNA
gatcctcacagagcccagc

SEQ ID NO: 15713 - RNA, 19 nt, synthetic construct
  source 1..19: mol_type = other RNA
agagccactccctcctcca

SEQ ID NO: 15714 - RNA, 19 nt, synthetic construct
  source 1..19: mol_type = other RNA
agccatcccctcttcctcc

SEQ ID NO: 15715 - RNA, 19 nt, synthetic construct
  source 1..19: mol_type = other RNA
gccaccggctccaccacca

SEQ ID NO: 15716 - RNA, 19 nt, synthetic construct
  source 1..19: mol_type = other RNA
gccaccggctccaccacca

SEQ ID NO: 15717 - RNA, 19 nt, synthetic construct
  source 1..19: mol_type = other RNA
atcccctcctccacccttg

SEQ ID NO: 15718 - RNA, 19 nt, synthetic construct
  source 1..19: mol_type = other RNA
gccaccggctccaccacca

SEQ ID NO: 15719 - RNA, 19 nt, synthetic construct
  source 1..19: mol_type = other RNA
ccgcccgctgcccccgcgc

SEQ ID NO: 15720 - RNA, 19 nt, synthetic construct
  source 1..19: mol_type = other RNA
aagtcttccaggcccggct

SEQ ID NO: 15721 - RNA, 19 nt, synthetic construct
  source 1..19: mol_type = other RNA
gcccccagagcctgcctgt

SEQ ID NO: 15722 - RNA, 19 nt, synthetic construct
  source 1..19: mol_type = other RNA
tgcacacctacacccacgt

SEQ ID NO: 15723 - RNA, 19 nt, synthetic construct
  source 1..19: mol_type = other RNA
cagtgctgacaagcacagc

SEQ ID NO: 15724 - RNA, 19 nt, synthetic construct
  source 1..19: mol_type = other RNA
cagtgctgacaagcacagc

SEQ ID NO: 15725 - RNA, 19 nt, synthetic construct
  source 1..19: mol_type = other RNA
cagtgctgacaagcacagc

SEQ ID NO: 15726 - RNA, 19 nt, synthetic construct
  source 1..19: mol_type = other RNA
ccctcctcaactcctggga

SEQ ID NO: 15727 - RNA, 19 nt, synthetic construct
  source 1..19: mol_type = other RNA
gcaaccttcccaggcgccc

SEQ ID NO: 15728 - RNA, 19 nt, synthetic construct
  source 1..19: mol_type = other RNA
tcacagagccttccacggt

SEQ ID NO: 15729 - RNA, 19 nt, synthetic construct
  source 1..19: mol_type = other RNA
tcacagagccttccacggt

SEQ ID NO: 15730 - RNA, 19 nt, synthetic construct
  source 1..19: mol_type = other RNA
tgtgcagcccccatggtgt

SEQ ID NO: 15731 - RNA, 19 nt, synthetic construct
  source 1..19: mol_type = other RNA
agctccagagccactccct

SEQ ID NO: 15732 - RNA, 19 nt, synthetic construct
  source 1..19: mol_type = other RNA
tccggccgctggggcagac

SEQ ID NO: 15733 - RNA, 19 nt, synthetic construct
  source 1..19: mol_type = other RNA
aacccagaccacagcaacc

SEQ ID NO: 15734 - RNA, 19 nt, synthetic construct
  source 1..19: mol_type = other RNA
gaagtgcccacccagccag

SEQ ID NO: 15735 - RNA, 19 nt, synthetic construct
  source 1..19: mol_type = other RNA
gtgctggaggcgtccaacg

SEQ ID NO: 15736 - RNA, 19 nt, synthetic construct
  source 1..19: mol_type = other RNA
ggaactgggagcaggaggg

SEQ ID NO: 15737 - RNA, 19 nt, synthetic construct
  source 1..19: mol_type = other RNA
tcccggcccaggaggccac

SEQ ID NO: 15738 - RNA, 19 nt, synthetic construct
  source 1..19: mol_type = other RNA
tcacagagccttccacggg

SEQ ID NO: 15739 - RNA, 19 nt, synthetic construct
  source 1..19: mol_type = other RNA
tcacagagccttccacggg

SEQ ID NO: 15740 - RNA, 19 nt, synthetic construct
  source 1..19: mol_type = other RNA
ggggtgacttccactacaa

SEQ ID NO: 15741 - RNA, 19 nt, synthetic construct
  source 1..19: mol_type = other RNA
cagctcctgcacctgctcc

SEQ ID NO: 15742 - RNA, 19 nt, synthetic construct
  source 1..19: mol_type = other RNA
ctgctggtgcagctggtgc

SEQ ID NO: 15743 - RNA, 19 nt, synthetic construct
  source 1..19: mol_type = other RNA
gaccaccaccgccaccaca

SEQ ID NO: 15744 - RNA, 19 nt, synthetic construct
  source 1..19: mol_type = other RNA
ccgcctcctccacccaggc

SEQ ID NO: 15745 - RNA, 19 nt, synthetic construct
  source 1..19: mol_type = other RNA
gaccaccaccgccaccaca

SEQ ID NO: 15746 - RNA, 19 nt, synthetic construct
  source 1..19: mol_type = other RNA
gaccaccaccgccaccaca

SEQ ID NO: 15747 - RNA, 19 nt, synthetic construct
  source 1..19: mol_type = other RNA
ccgcctcctccacccaggc

SEQ ID NO: 15748 - RNA, 19 nt, synthetic construct
  source 1..19: mol_type = other RNA
gaccaccaccgccaccaca

SEQ ID NO: 15749 - RNA, 19 nt, synthetic construct
  source 1..19: mol_type = other RNA
ccgcctcctccacccaggc

SEQ ID NO: 15750 - RNA, 19 nt, synthetic construct
  source 1..19: mol_type = other RNA
agagggccgggtggggacc

SEQ ID NO: 15751 - RNA, 19 nt, synthetic construct
  source 1..19: mol_type = other RNA
cagggacgacctggatcct

SEQ ID NO: 15752 - RNA, 19 nt, synthetic construct
  source 1..19: mol_type = other RNA
agcagaggcccaggccatg

SEQ ID NO: 15753 - RNA, 19 nt, synthetic construct
  source 1..19: mol_type = other RNA
acttcccacaccccagcag

SEQ ID NO: 15754 - RNA, 19 nt, synthetic construct
  source 1..19: mol_type = other RNA
acttcccacaccccagcag

SEQ ID NO: 15755 - RNA, 19 nt, synthetic construct
  source 1..19: mol_type = other RNA
acttcccacaccccagcag

SEQ ID NO: 15756 - RNA, 19 nt, synthetic construct
  source 1..19: mol_type = other RNA
cggctccctccctgcccgt

SEQ ID NO: 15757 - RNA, 19 nt, synthetic construct
  source 1..19: mol_type = other RNA
agcccccaggatgggtgcc

SEQ ID NO: 15758 - RNA, 19 nt, synthetic construct
  source 1..19: mol_type = other RNA
cctgctggagctggatccc

SEQ ID NO: 15759 - RNA, 19 nt, synthetic construct
  source 1..19: mol_type = other RNA
ctggggctgcagctgctgg

SEQ ID NO: 15760 - RNA, 19 nt, synthetic construct
  source 1..19: mol_type = other RNA
ggatgggagtgggggctgc

SEQ ID NO: 15761 - RNA, 19 nt, synthetic construct
  source 1..19: mol_type = other RNA
ccatcccctcttcctccct

SEQ ID NO: 15762 - RNA, 19 nt, synthetic construct
  source 1..19: mol_type = other RNA
tcacagaccaccacaccca

SEQ ID NO: 15763 - RNA, 19 nt, synthetic construct
  source 1..19: mol_type = other RNA
ggccaccatgtccacagcc

SEQ ID NO: 15764 - RNA, 19 nt, synthetic construct
  source 1..19: mol_type = other RNA
tgtccacagccacaccctc

SEQ ID NO: 15765 - RNA, 19 nt, synthetic construct
  source 1..19: mol_type = other RNA
gtccacagccacaccctcc

SEQ ID NO: 15766 - RNA, 19 nt, synthetic construct
  source 1..19: mol_type = other RNA
cgtgcccaggcccagcctg

SEQ ID NO: 15767 - RNA, 19 nt, synthetic construct
  source 1..19: mol_type = other RNA
caccgcctcctccacccag

SEQ ID NO: 15768 - RNA, 19 nt, synthetic construct
  source 1..19: mol_type = other RNA
tcacagaccaccacaccca

SEQ ID NO: 15769 - RNA, 19 nt, synthetic construct
  source 1..19: mol_type = other RNA
ggccaccatgtccacagcc

SEQ ID NO: 15770 - RNA, 19 nt, synthetic construct
  source 1..19: mol_type = other RNA
tgtccacagccacaccctc

SEQ ID NO: 15771 - RNA, 19 nt, synthetic construct
  source 1..19: mol_type = other RNA
gtccacagccacaccctcc

SEQ ID NO: 15772 - RNA, 19 nt, synthetic construct
  source 1..19: mol_type = other RNA
cttcccacaccccagcagc

SEQ ID NO: 15773 - RNA, 19 nt, synthetic construct
  source 1..19: mol_type = other RNA
cgtgcccaggcccagcctg

SEQ ID NO: 15774 - RNA, 19 nt, synthetic construct
  source 1..19: mol_type = other RNA
ccatcccctcttcctccct

SEQ ID NO: 15775 - RNA, 19 nt, synthetic construct
  source 1..19: mol_type = other RNA
tcacagaccaccacaccca

SEQ ID NO: 15776 - RNA, 19 nt, synthetic construct
  source 1..19: mol_type = other RNA
ggccaccatgtccacagcc

SEQ ID NO: 15777 - RNA, 19 nt, synthetic construct
  source 1..19: mol_type = other RNA
tgtccacagccacaccctc

SEQ ID NO: 15778 - RNA, 19 nt, synthetic construct
  source 1..19: mol_type = other RNA
gtccacagccacaccctcc

SEQ ID NO: 15779 - RNA, 19 nt, synthetic construct
  source 1..19: mol_type = other RNA
tccacagccacaccctcct

SEQ ID NO: 15780 - RNA, 19 nt, synthetic construct
  source 1..19: mol_type = other RNA
cttcccacaccccagcagc

SEQ ID NO: 15781 - RNA, 19 nt, synthetic construct
  source 1..19: mol_type = other RNA
cgtgcccaggcccagcctg

SEQ ID NO: 15782 - RNA, 19 nt, synthetic construct
  source 1..19: mol_type = other RNA
caccgcctcctccacccag

SEQ ID NO: 15783 - RNA, 19 nt, synthetic construct
  source 1..19: mol_type = other RNA
tcacagaccaccacaccca

SEQ ID NO: 15784 - RNA, 19 nt, synthetic construct
  source 1..19: mol_type = other RNA
ggccaccatgtccacagcc

SEQ ID NO: 15785 - RNA, 19 nt, synthetic construct
  source 1..19: mol_type = other RNA
tgtccacagccacaccctc

SEQ ID NO: 15786 - RNA, 19 nt, synthetic construct
  source 1..19: mol_type = other RNA
gtccacagccacaccctcc

SEQ ID NO: 15787 - RNA, 19 nt, synthetic construct
  source 1..19: mol_type = other RNA
cccctcttccaccccagga

SEQ ID NO: 15788 - RNA, 19 nt, synthetic construct
  source 1..19: mol_type = other RNA
cttcccacaccccagcagc

SEQ ID NO: 15789 - RNA, 19 nt, synthetic construct
  source 1..19: mol_type = other RNA
cgtgcccaggcccagcctg

SEQ ID NO: 15790 - RNA, 19 nt, synthetic construct
  source 1..19: mol_type = other RNA
caccgcctcctccacccag

SEQ ID NO: 15791 - RNA, 19 nt, synthetic construct
  source 1..19: mol_type = other RNA
tcacagaccaccacaccca

SEQ ID NO: 15792 - RNA, 19 nt, synthetic construct
  source 1..19: mol_type = other RNA
ggccaccatgtccacagcc

SEQ ID NO: 15793 - RNA, 19 nt, synthetic construct
  source 1..19: mol_type = other RNA
tgtccacagccacaccctc

SEQ ID NO: 15794 - RNA, 19 nt, synthetic construct
  source 1..19: mol_type = other RNA
gtccacagccacaccctcc

SEQ ID NO: 15795 - RNA, 19 nt, synthetic construct
  source 1..19: mol_type = other RNA
gcacagaccaccacaccca

SEQ ID NO: 15796 - RNA, 19 nt, synthetic construct
  source 1..19: mol_type = other RNA
ccactggcttccccagctc

SEQ ID NO: 15797 - RNA, 19 nt, synthetic construct
  source 1..19: mol_type = other RNA
cctgctggacccaaagcct

SEQ ID NO: 15798 - RNA, 19 nt, synthetic construct
  source 1..19: mol_type = other RNA
tgtgctggggaccaccacc

SEQ ID NO: 15799 - RNA, 19 nt, synthetic construct
  source 1..19: mol_type = other RNA
actgccagccccgcagccc

SEQ ID NO: 15800 - RNA, 19 nt, synthetic construct
  source 1..19: mol_type = other RNA
ctcagcagaggcccaggcc

SEQ ID NO: 15801 - RNA, 19 nt, synthetic construct
  source 1..19: mol_type = other RNA
agccctcagccctccctca

SEQ ID NO: 15802 - RNA, 19 nt, synthetic construct
  source 1..19: mol_type = other RNA
cagcagaggcccaggccat

SEQ ID NO: 15803 - RNA, 19 nt, synthetic construct
  source 1..19: mol_type = other RNA
accgcctcctccacccagg

SEQ ID NO: 15804 - RNA, 19 nt, synthetic construct
  source 1..19: mol_type = other RNA
accgcctcctccacccagg

SEQ ID NO: 15805 - RNA, 19 nt, synthetic construct
  source 1..19: mol_type = other RNA
agtcacccccttccccagg

SEQ ID NO: 15806 - RNA, 19 nt, synthetic construct
  source 1..19: mol_type = other RNA
accgcctcctccacccagg

SEQ ID NO: 15807 - RNA, 19 nt, synthetic construct
  source 1..19: mol_type = other RNA
cgatccctgtcccccagca

SEQ ID NO: 15808 - RNA, 19 nt, synthetic construct
  source 1..19: mol_type = other RNA
acagccacagccacaccca

SEQ ID NO: 15809 - RNA, 19 nt, synthetic construct
  source 1..19: mol_type = other RNA
cagccacagccacacccag

SEQ ID NO: 15810 - RNA, 19 nt, synthetic construct
  source 1..19: mol_type = other RNA
cgatccctgtcccccagca

SEQ ID NO: 15811 - RNA, 19 nt, synthetic construct
  source 1..19: mol_type = other RNA
actacaagggcagggtctg

SEQ ID NO: 15812 - RNA, 19 nt, synthetic construct
  source 1..19: mol_type = other RNA
gtgtgagtggacagagtgg

SEQ ID NO: 15813 - RNA, 19 nt, synthetic construct
  source 1..19: mol_type = other RNA
ctacaagggcagggtctgc

SEQ ID NO: 15814 - RNA, 19 nt, synthetic construct
  source 1..19: mol_type = other RNA
gtaccaccacctgccagcc

SEQ ID NO: 15815 - RNA, 19 nt, synthetic construct
  source 1..19: mol_type = other RNA
ccgtctgtgagcagcccct

SEQ ID NO: 15816 - RNA, 19 nt, synthetic construct
  source 1..19: mol_type = other RNA
ccgtctgtgagcagcccct

SEQ ID NO: 15817 - RNA, 19 nt, synthetic construct
  source 1..19: mol_type = other RNA
ccgtctgtgagcagcccct

SEQ ID NO: 15818 - RNA, 19 nt, synthetic construct
  source 1..19: mol_type = other RNA
gtactacgaggcctgcgtg

SEQ ID NO: 15819 - RNA, 19 nt, synthetic construct
  source 1..19: mol_type = other RNA
tcaaggcccaggggctggt

SEQ ID NO: 15820 - RNA, 19 nt, synthetic construct
  source 1..19: mol_type = other RNA
ctggagggacggcgtctgc

SEQ ID NO: 15821 - RNA, 19 nt, synthetic construct
  source 1..19: mol_type = other RNA
gtctgtgagcagcccctgg

SEQ ID NO: 15822 - RNA, 19 nt, synthetic construct
  source 1..19: mol_type = other RNA
gtctgtgagcagcccctgg

SEQ ID NO: 15823 - RNA, 19 nt, synthetic construct
  source 1..19: mol_type = other RNA
gtctgtgagcagcccctgg

SEQ ID NO: 15824 - RNA, 19 nt, synthetic construct
  source 1..19: mol_type = other RNA
gtctgtgagcagcccctgg

SEQ ID NO: 15825 - RNA, 19 nt, synthetic construct
  source 1..19: mol_type = other RNA
gacggctgcttctgccccc

SEQ ID NO: 15826 - RNA, 19 nt, synthetic construct
  source 1..19: mol_type = other RNA
ccagaagcagtgcagcatc

SEQ ID NO: 15827 - RNA, 19 nt, synthetic construct
  source 1..19: mol_type = other RNA
ggacgtgggctgtttcagc

SEQ ID NO: 15828 - RNA, 19 nt, synthetic construct
  source 1..19: mol_type = other RNA
caagtacatgcagaactgc

SEQ ID NO: 15829 - RNA, 19 nt, synthetic construct
  source 1..19: mol_type = other RNA
caggaaaaccggctgctgc

SEQ ID NO: 15830 - RNA, 19 nt, synthetic construct
  source 1..19: mol_type = other RNA
tccacccgtcactgtcttc

SEQ ID NO: 15831 - RNA, 19 nt, synthetic construct
  source 1..19: mol_type = other RNA
gggagcctcaggaaaaccg

SEQ ID NO: 15832 - RNA, 19 nt, synthetic construct
  source 1..19: mol_type = other RNA
gcgggcctgtgtgtgtcct

SEQ ID NO: 15833 - RNA, 19 nt, synthetic construct
  source 1..19: mol_type = other RNA
gggcctgtgtgtgtcctgg

SEQ ID NO: 15834 - RNA, 19 nt, synthetic construct
  source 1..19: mol_type = other RNA
cgtctgtgagcagcccctg

SEQ ID NO: 15835 - RNA, 19 nt, synthetic construct
  source 1..19: mol_type = other RNA
cgtctgtgagcagcccctg

SEQ ID NO: 15836 - RNA, 19 nt, synthetic construct
  source 1..19: mol_type = other RNA
cgtctgtgagcagcccctg

SEQ ID NO: 15837 - RNA, 19 nt, synthetic construct
  source 1..19: mol_type = other RNA
gcggagcgaggactgcctg

SEQ ID NO: 15838 - RNA, 19 nt, synthetic construct
  source 1..19: mol_type = other RNA
ggacccctgcacggccaac

SEQ ID NO: 15839 - RNA, 19 nt, synthetic construct
  source 1..19: mol_type = other RNA
ccaaccccttccgcaagtc

SEQ ID NO: 15840 - RNA, 19 nt, synthetic construct
  source 1..19: mol_type = other RNA
cggagcgaggactgcctgt

SEQ ID NO: 15841 - RNA, 19 nt, synthetic construct
  source 1..19: mol_type = other RNA
actgcaacacctgcacctg

SEQ ID NO: 15842 - RNA, 19 nt, synthetic construct
  source 1..19: mol_type = other RNA
aaggccatcaagctcttcg

SEQ ID NO: 15843 - RNA, 19 nt, synthetic construct
  source 1..19: mol_type = other RNA
tgcacggccaaccccttcc

SEQ ID NO: 15844 - RNA, 19 nt, synthetic construct
  source 1..19: mol_type = other RNA
ttccgcaagtcctgggccc

SEQ ID NO: 15845 - RNA, 19 nt, synthetic construct
  source 1..19: mol_type = other RNA
tccgcaagtcctgggccca

SEQ ID NO: 15846 - RNA, 19 nt, synthetic construct
  source 1..19: mol_type = other RNA
cgggcctgtgtgtgtcctg

SEQ ID NO: 15847 - RNA, 19 nt, synthetic construct
  source 1..19: mol_type = other RNA
cctcctcagtcctcaccac

SEQ ID NO: 15848 - RNA, 19 nt, synthetic construct
  source 1..19: mol_type = other RNA
ctcctcagtcctcaccacc

SEQ ID NO: 15849 - RNA, 19 nt, synthetic construct
  source 1..19: mol_type = other RNA
accccgcccaccagggcca

SEQ ID NO: 15850 - RNA, 19 nt, synthetic construct
  source 1..19: mol_type = other RNA
ggcaccacccacatcacag

SEQ ID NO: 15851 - RNA, 19 nt, synthetic construct
  source 1..19: mol_type = other RNA
ggcaccacccacatcacag

SEQ ID NO: 15852 - RNA, 19 nt, synthetic construct
  source 1..19: mol_type = other RNA
ggcaccacccacatcacag

SEQ ID NO: 15853 - RNA, 19 nt, synthetic construct
  source 1..19: mol_type = other RNA
ggcaccacccacatcacag

SEQ ID NO: 15854 - RNA, 19 nt, synthetic construct
  source 1..19: mol_type = other RNA
atcaatgactttgccacgc

SEQ ID NO: 15855 - RNA, 19 nt, synthetic construct
  source 1..19: mol_type = other RNA
gccagcacggagcctgctg

SEQ ID NO: 15856 - RNA, 19 nt, synthetic construct
  source 1..19: mol_type = other RNA
actgtcccaggggtggcca

SEQ ID NO: 15857 - RNA, 19 nt, synthetic construct
  source 1..19: mol_type = other RNA
cagactgggtccagctcag

SEQ ID NO: 15858 - RNA, 19 nt, synthetic construct
  source 1..19: mol_type = other RNA
agactgggtccagctcagg

SEQ ID NO: 15859 - RNA, 19 nt, synthetic construct
  source 1..19: mol_type = other RNA
tgtgtcctcctcagtcctc

SEQ ID NO: 15860 - RNA, 19 nt, synthetic construct
  source 1..19: mol_type = other RNA
gccgggcagtgctgtgggg

SEQ ID NO: 15861 - RNA, 19 nt, synthetic construct
  source 1..19: mol_type = other RNA
tctctgcagaaaagcacag

SEQ ID NO: 15862 - RNA, 19 nt, synthetic construct
  source 1..19: mol_type = other RNA
ctcccaggttgactccacc

SEQ ID NO: 15863 - RNA, 19 nt, synthetic construct
  source 1..19: mol_type = other RNA
tcagcaactgccagtcctg

SEQ ID NO: 15864 - RNA, 19 nt, synthetic construct
  source 1..19: mol_type = other RNA
cagctcccacttctctact

SEQ ID NO: 15865 - RNA, 19 nt, synthetic construct
  source 1..19: mol_type = other RNA
ggagaggacagtgccctgc

SEQ ID NO: 15866 - RNA, 19 nt, synthetic construct
  source 1..19: mol_type = other RNA
acaagggcagggtctgcgg

SEQ ID NO: 15867 - RNA, 19 nt, synthetic construct
  source 1..19: mol_type = other RNA
cacagccaccacacccaca

SEQ ID NO: 15868 - RNA, 19 nt, synthetic construct
  source 1..19: mol_type = other RNA
cacagccaccacacccaca

SEQ ID NO: 15869 - RNA, 19 nt, synthetic construct
  source 1..19: mol_type = other RNA
cacagccaccacacccaca

SEQ ID NO: 15870 - RNA, 19 nt, synthetic construct
  source 1..19: mol_type = other RNA
cacagccaccacacccaca

SEQ ID NO: 15871 - RNA, 19 nt, synthetic construct
  source 1..19: mol_type = other RNA
cacagccaccacacccaca

SEQ ID NO: 15872 - RNA, 19 nt, synthetic construct
  source 1..19: mol_type = other RNA
catcaaggcccaggggctg

SEQ ID NO: 15873 - RNA, 19 nt, synthetic construct
  source 1..19: mol_type = other RNA
tgcctgtgcgccgcgctgt

SEQ ID NO: 15874 - RNA, 19 nt, synthetic construct
  source 1..19: mol_type = other RNA
tgcacgcctgtgccgccaa

SEQ ID NO: 15875 - RNA, 19 nt, synthetic construct
  source 1..19: mol_type = other RNA
cgactgcaacacctgcacc

SEQ ID NO: 15876 - RNA, 19 nt, synthetic construct
  source 1..19: mol_type = other RNA
gactgcaacacctgcacct

SEQ ID NO: 15877 - RNA, 19 nt, synthetic construct
  source 1..19: mol_type = other RNA
cctcctctgccctagggac

SEQ ID NO: 15878 - RNA, 19 nt, synthetic construct
  source 1..19: mol_type = other RNA
cctcctctgccctagggac

SEQ ID NO: 15879 - RNA, 19 nt, synthetic construct
  source 1..19: mol_type = other RNA
cctcctctgccctagggac

SEQ ID NO: 15880 - RNA, 19 nt, synthetic construct
  source 1..19: mol_type = other RNA
cctcctctgccctagggac

SEQ ID NO: 15881 - RNA, 19 nt, synthetic construct
  source 1..19: mol_type = other RNA
acctgcctctctggggaca

SEQ ID NO: 15882 - RNA, 19 nt, synthetic construct
  source 1..19: mol_type = other RNA
atgtgcacgcctgtgccgc

SEQ ID NO: 15883 - RNA, 19 nt, synthetic construct
  source 1..19: mol_type = other RNA
tggggatcttcctggtcat

SEQ ID NO: 15884 - RNA, 19 nt, synthetic construct
  source 1..19: mol_type = other RNA
tgggaacttcaaccagaac

SEQ ID NO: 15885 - RNA, 19 nt, synthetic construct
  source 1..19: mol_type = other RNA
aggactgcctgtgcgccgc

SEQ ID NO: 15886 - RNA, 19 nt, synthetic construct
  source 1..19: mol_type = other RNA
ctctgcagaaaagcacagg

SEQ ID NO: 15887 - RNA, 19 nt, synthetic construct
  source 1..19: mol_type = other RNA
caagggcagggtctgcggc

SEQ ID NO: 15888 - RNA, 19 nt, synthetic construct
  source 1..19: mol_type = other RNA
aagggcagggtctgcggcc

SEQ ID NO: 15889 - RNA, 19 nt, synthetic construct
  source 1..19: mol_type = other RNA
cgaggcctgcgtgaacgac

SEQ ID NO: 15890 - RNA, 19 nt, synthetic construct
  source 1..19: mol_type = other RNA
cagtgggcactgcctggtg

SEQ ID NO: 15891 - RNA, 19 nt, synthetic construct
  source 1..19: mol_type = other RNA
ccagcacggagcctgctgt

SEQ ID NO: 15892 - RNA, 19 nt, synthetic construct
  source 1..19: mol_type = other RNA
gcacagccaccacacccac

SEQ ID NO: 15893 - RNA, 19 nt, synthetic construct
  source 1..19: mol_type = other RNA
accctgctgcccagcagcc

SEQ ID NO: 15894 - RNA, 19 nt, synthetic construct
  source 1..19: mol_type = other RNA
tgccccagcaccccggcca

SEQ ID NO: 15895 - RNA, 19 nt, synthetic construct
  source 1..19: mol_type = other RNA
gcacagccaccacacccac

SEQ ID NO: 15896 - RNA, 19 nt, synthetic construct
  source 1..19: mol_type = other RNA
accctgctgcccagcagcc

SEQ ID NO: 15897 - RNA, 19 nt, synthetic construct
  source 1..19: mol_type = other RNA
tgccccagcaccccggcca

SEQ ID NO: 15898 - RNA, 19 nt, synthetic construct
  source 1..19: mol_type = other RNA
ccaccacacccacagccac

SEQ ID NO: 15899 - RNA, 19 nt, synthetic construct
  source 1..19: mol_type = other RNA
gcacagccaccacacccac

SEQ ID NO: 15900 - RNA, 19 nt, synthetic construct
  source 1..19: mol_type = other RNA
accctgctgcccagcagcc

SEQ ID NO: 15901 - RNA, 19 nt, synthetic construct
  source 1..19: mol_type = other RNA
tgccccagcaccccggcca

SEQ ID NO: 15902 - RNA, 19 nt, synthetic construct
  source 1..19: mol_type = other RNA
gcacagccaccacacccac

SEQ ID NO: 15903 - RNA, 19 nt, synthetic construct
  source 1..19: mol_type = other RNA
accctgctgcccagcagcc

SEQ ID NO: 15904 - RNA, 19 nt, synthetic construct
  source 1..19: mol_type = other RNA
tgccccagcaccccggcca

SEQ ID NO: 15905 - RNA, 19 nt, synthetic construct
  source 1..19: mol_type = other RNA
ccaccacacccacagccac

SEQ ID NO: 15906 - RNA, 19 nt, synthetic construct
  source 1..19: mol_type = other RNA
gcacagccaccacacccac

SEQ ID NO: 15907 - RNA, 19 nt, synthetic construct
  source 1..19: mol_type = other RNA
ttccaggcccggctgccct

SEQ ID NO: 15908 - RNA, 19 nt, synthetic construct
  source 1..19: mol_type = other RNA
cagcaactgccagtcctgc

SEQ ID NO: 15909 - RNA, 19 nt, synthetic construct
  source 1..19: mol_type = other RNA
ccacagcctgcatcctgcc

SEQ ID NO: 15910 - RNA, 19 nt, synthetic construct
  source 1..19: mol_type = other RNA
gtgtccagctgcaggggga

SEQ ID NO: 15911 - RNA, 19 nt, synthetic construct
  source 1..19: mol_type = other RNA
caagtcctgggcccagaag

SEQ ID NO: 15912 - RNA, 19 nt, synthetic construct
  source 1..19: mol_type = other RNA
gatggccacttcatcacct

SEQ ID NO: 15913 - RNA, 19 nt, synthetic construct
  source 1..19: mol_type = other RNA
ggagcgaggactgcctgtg

SEQ ID NO: 15914 - RNA, 19 nt, synthetic construct
  source 1..19: mol_type = other RNA
accctggagaactgcacgg

SEQ ID NO: 15915 - RNA, 19 nt, synthetic construct
  source 1..19: mol_type = other RNA
gagcggagcgaggactgcc

SEQ ID NO: 15916 - RNA, 19 nt, synthetic construct
  source 1..19: mol_type = other RNA
agcggagcgaggactgcct

SEQ ID NO: 15917 - RNA, 19 nt, synthetic construct
  source 1..19: mol_type = other RNA
gcacggccaaccccttccg

SEQ ID NO: 15918 - RNA, 19 nt, synthetic construct
  source 1..19: mol_type = other RNA
gccaaccccttccgcaagt

SEQ ID NO: 15919 - RNA, 19 nt, synthetic construct
  source 1..19: mol_type = other RNA
gagcgaggactgcctgtgc

SEQ ID NO: 15920 - RNA, 19 nt, synthetic construct
  source 1..19: mol_type = other RNA
agcgaggactgcctgtgcg

SEQ ID NO: 15921 - RNA, 19 nt, synthetic construct
  source 1..19: mol_type = other RNA
ctgcacggccaaccccttc

SEQ ID NO: 15922 - RNA, 19 nt, synthetic construct
  source 1..19: mol_type = other RNA
atcaaggcccaggggctgg

SEQ ID NO: 15923 - RNA, 19 nt, synthetic construct
  source 1..19: mol_type = other RNA
ccacacccacagctaccag

SEQ ID NO: 15924 - RNA, 19 nt, synthetic construct
  source 1..19: mol_type = other RNA
ccacacccacagctaccag

SEQ ID NO: 15925 - RNA, 19 nt, synthetic construct
  source 1..19: mol_type = other RNA
ccacacccacagctaccag

SEQ ID NO: 15926 - RNA, 19 nt, synthetic construct
  source 1..19: mol_type = other RNA
gagaggacagtgccctgct

SEQ ID NO: 15927 - RNA, 19 nt, synthetic construct
  source 1..19: mol_type = other RNA
tgtttgacacctgcaactg

SEQ ID NO: 15928 - RNA, 19 nt, synthetic construct
  source 1..19: mol_type = other RNA
acacctgcaactgtgagcg

SEQ ID NO: 15929 - RNA, 19 nt, synthetic construct
  source 1..19: mol_type = other RNA
gtgcgccgcgctgtcctcc

SEQ ID NO: 15930 - RNA, 19 nt, synthetic construct
  source 1..19: mol_type = other RNA
cccggtgtcagtggacaga

SEQ ID NO: 15931 - RNA, 19 nt, synthetic construct
  source 1..19: mol_type = other RNA
cggtgtcagtggacagagt

SEQ ID NO: 15932 - RNA, 19 nt, synthetic construct
  source 1..19: mol_type = other RNA
gtggcactaccagccctgc

SEQ ID NO: 15933 - RNA, 19 nt, synthetic construct
  source 1..19: mol_type = other RNA
agtggcactaccagccctg

SEQ ID NO: 15934 - RNA, 19 nt, synthetic construct
  source 1..19: mol_type = other RNA
gacacctgcaactgtgagc

SEQ ID NO: 15935 - RNA, 19 nt, synthetic construct
  source 1..19: mol_type = other RNA
cacctgcaactgtgagcgg

SEQ ID NO: 15936 - RNA, 19 nt, synthetic construct
  source 1..19: mol_type = other RNA
gcaagtcctgggcccagaa

SEQ ID NO: 15937 - RNA, 19 nt, synthetic construct
  source 1..19: mol_type = other RNA
agaagcagtgcagcatcct

SEQ ID NO: 15938 - RNA, 19 nt, synthetic construct
  source 1..19: mol_type = other RNA
cgcaagtcctgggcccaga

SEQ ID NO: 15939 - RNA, 19 nt, synthetic construct
  source 1..19: mol_type = other RNA
aagtcctgggcccagaagc

SEQ ID NO: 15940 - RNA, 19 nt, synthetic construct
  source 1..19: mol_type = other RNA
agtcctgggcccagaagca

SEQ ID NO: 15941 - RNA, 19 nt, synthetic construct
  source 1..19: mol_type = other RNA
ctgggcccagaagcagtgc

SEQ ID NO: 15942 - RNA, 19 nt, synthetic construct
  source 1..19: mol_type = other RNA
gggcccagaagcagtgcag

SEQ ID NO: 15943 - RNA, 19 nt, synthetic construct
  source 1..19: mol_type = other RNA
cccagaagcagtgcagcat

SEQ ID NO: 15944 - RNA, 19 nt, synthetic construct
  source 1..19: mol_type = other RNA
tgcgcccacgcggggggcc

SEQ ID NO: 15945 - RNA, 19 nt, synthetic construct
  source 1..19: mol_type = other RNA
agaacccactgtcccaggg

SEQ ID NO: 15946 - RNA, 19 nt, synthetic construct
  source 1..19: mol_type = other RNA
tcaggaaaaccggctgctg

SEQ ID NO: 15947 - RNA, 19 nt, synthetic construct
  source 1..19: mol_type = other RNA
tacgtgccctgtggcccct

SEQ ID NO: 15948 - RNA, 19 nt, synthetic construct
  source 1..19: mol_type = other RNA
ggccagcaggtggactgtg

SEQ ID NO: 15949 - RNA, 19 nt, synthetic construct
  source 1..19: mol_type = other RNA
cgtggcccagtgtggctgc

SEQ ID NO: 15950 - RNA, 19 nt, synthetic construct
  source 1..19: mol_type = other RNA
tggtgtgcaggaactggga

SEQ ID NO: 15951 - RNA, 19 nt, synthetic construct
  source 1..19: mol_type = other RNA
gggccaggtcgtggaatgc

SEQ ID NO: 15952 - RNA, 19 nt, synthetic construct
  source 1..19: mol_type = other RNA
gggccaggtcgtggaatgc

SEQ ID NO: 15953 - RNA, 19 nt, synthetic construct
  source 1..19: mol_type = other RNA
gggccaggtcgtggaatgc

SEQ ID NO: 15954 - RNA, 19 nt, synthetic construct
  source 1..19: mol_type = other RNA
gggccaggtcgtggaatgc

SEQ ID NO: 15955 - RNA, 19 nt, synthetic construct
  source 1..19: mol_type = other RNA
gggcagaaggtgcactgtg

SEQ ID NO: 15956 - RNA, 19 nt, synthetic construct
  source 1..19: mol_type = other RNA
gaccccgcccaccagggcc

SEQ ID NO: 15957 - RNA, 19 nt, synthetic construct
  source 1..19: mol_type = other RNA
caggactacaagggcaggg

SEQ ID NO: 15958 - RNA, 19 nt, synthetic construct
  source 1..19: mol_type = other RNA
ctccctgcttctgcagggc

SEQ ID NO: 15959 - RNA, 19 nt, synthetic construct
  source 1..19: mol_type = other RNA
cctctctgcagaaaagcac

SEQ ID NO: 15960 - RNA, 19 nt, synthetic construct
  source 1..19: mol_type = other RNA
ccgcctgccgctcccaggt

SEQ ID NO: 15961 - RNA, 19 nt, synthetic construct
  source 1..19: mol_type = other RNA
gtgcaggaactgggagcag

SEQ ID NO: 15962 - RNA, 19 nt, synthetic construct
  source 1..19: mol_type = other RNA
gccatgccctcctccactc

SEQ ID NO: 15963 - RNA, 19 nt, synthetic construct
  source 1..19: mol_type = other RNA
gccatgccctcctccactc

SEQ ID NO: 15964 - RNA, 19 nt, synthetic construct
  source 1..19: mol_type = other RNA
caacaccacctgcagctcc

SEQ ID NO: 15965 - RNA, 19 nt, synthetic construct
  source 1..19: mol_type = other RNA
cggcaccacctgctccaag

SEQ ID NO: 15966 - RNA, 19 nt, synthetic construct
  source 1..19: mol_type = other RNA
gaaccccagtgggcactgc

SEQ ID NO: 15967 - RNA, 19 nt, synthetic construct
  source 1..19: mol_type = other RNA
gcctggcctggaaggctgc

SEQ ID NO: 15968 - RNA, 19 nt, synthetic construct
  source 1..19: mol_type = other RNA
gcctgcacctgcacctatg

SEQ ID NO: 15969 - RNA, 19 nt, synthetic construct
  source 1..19: mol_type = other RNA
gggccagcaggtggactgt

SEQ ID NO: 15970 - RNA, 19 nt, synthetic construct
  source 1..19: mol_type = other RNA
tgccagcacggagcctgct

SEQ ID NO: 15971 - RNA, 19 nt, synthetic construct
  source 1..19: mol_type = other RNA
ccacacctgcagccaccag

SEQ ID NO: 15972 - RNA, 19 nt, synthetic construct
  source 1..19: mol_type = other RNA
ccagcaccccggccaccag

SEQ ID NO: 15973 - RNA, 19 nt, synthetic construct
  source 1..19: mol_type = other RNA
ccacacctgcagccaccag

SEQ ID NO: 15974 - RNA, 19 nt, synthetic construct
  source 1..19: mol_type = other RNA
ccagcaccccggccaccag

SEQ ID NO: 15975 - RNA, 19 nt, synthetic construct
  source 1..19: mol_type = other RNA
gccacgccctcctccactc

SEQ ID NO: 15976 - RNA, 19 nt, synthetic construct
  source 1..19: mol_type = other RNA
ccacacctgcagccaccag

SEQ ID NO: 15977 - RNA, 19 nt, synthetic construct
  source 1..19: mol_type = other RNA
ccagcaccccggccaccag

SEQ ID NO: 15978 - RNA, 19 nt, synthetic construct
  source 1..19: mol_type = other RNA
ccacacctgcagccaccag

SEQ ID NO: 15979 - RNA, 19 nt, synthetic construct
  source 1..19: mol_type = other RNA
ccagcaccccggccaccag

SEQ ID NO: 15980 - RNA, 19 nt, synthetic construct
  source 1..19: mol_type = other RNA
tctactccctgcttctgca

SEQ ID NO: 15981 - RNA, 19 nt, synthetic construct
  source 1..19: mol_type = other RNA
agcaccagtgcacctgctg

SEQ ID NO: 15982 - RNA, 19 nt, synthetic construct
  source 1..19: mol_type = other RNA
aaccccttccgcaagtcct

SEQ ID NO: 15983 - RNA, 19 nt, synthetic construct
  source 1..19: mol_type = other RNA
agccctccctcagtgccag

SEQ ID NO: 15984 - RNA, 19 nt, synthetic construct
  source 1..19: mol_type = other RNA
ccggctgctgctactcctg

SEQ ID NO: 15985 - RNA, 19 nt, synthetic construct
  source 1..19: mol_type = other RNA
agtgcacctgctgccagga

SEQ ID NO: 15986 - RNA, 19 nt, synthetic construct
  source 1..19: mol_type = other RNA
gcgggtgtgcagcacctgg

SEQ ID NO: 15987 - RNA, 19 nt, synthetic construct
  source 1..19: mol_type = other RNA
gtgccgctgccccacctgc

SEQ ID NO: 15988 - RNA, 19 nt, synthetic construct
  source 1..19: mol_type = other RNA
cggccaaccccttccgcaa

SEQ ID NO: 15989 - RNA, 19 nt, synthetic construct
  source 1..19: mol_type = other RNA
tggcactaccagccctgcg

SEQ ID NO: 15990 - RNA, 19 nt, synthetic construct
  source 1..19: mol_type = other RNA
gggcagggtctgcggcctg

SEQ ID NO: 15991 - RNA, 19 nt, synthetic construct
  source 1..19: mol_type = other RNA
ccctgcacggccaacccct

SEQ ID NO: 15992 - RNA, 19 nt, synthetic construct
  source 1..19: mol_type = other RNA
gaagcagtgcagcatcctc

SEQ ID NO: 15993 - RNA, 19 nt, synthetic construct
  source 1..19: mol_type = other RNA
gggcgggtgtgcagcacct

SEQ ID NO: 15994 - RNA, 19 nt, synthetic construct
  source 1..19: mol_type = other RNA
caccacctgctccaaggcc

SEQ ID NO: 15995 - RNA, 19 nt, synthetic construct
  source 1..19: mol_type = other RNA
cccctgcacggccaacccc

SEQ ID NO: 15996 - RNA, 19 nt, synthetic construct
  source 1..19: mol_type = other RNA
ggcctgtgtgtgtcctggc

SEQ ID NO: 15997 - RNA, 19 nt, synthetic construct
  source 1..19: mol_type = other RNA
tggcctggaaggctgctac

SEQ ID NO: 15998 - RNA, 19 nt, synthetic construct
  source 1..19: mol_type = other RNA
tccccagcctgagccccct

SEQ ID NO: 15999 - RNA, 19 nt, synthetic construct
  source 1..19: mol_type = other RNA
ggcgggtgtgcagcacctg

SEQ ID NO: 16000 - RNA, 19 nt, synthetic construct
  source 1..19: mol_type = other RNA
ccactacaagaccttcgac

SEQ ID NO: 16001 - RNA, 19 nt, synthetic construct
  source 1..19: mol_type = other RNA
ggacagtgccctgctggag

SEQ ID NO: 16002 - RNA, 19 nt, synthetic construct
  source 1..19: mol_type = other RNA
acggctgcttctgcccccc

SEQ ID NO: 16003 - RNA, 19 nt, synthetic construct
  source 1..19: mol_type = other RNA
cggctgcttctgcccccca

SEQ ID NO: 16004 - RNA, 19 nt, synthetic construct
  source 1..19: mol_type = other RNA
ggctgcagctgctggtgca

SEQ ID NO: 16005 - RNA, 19 nt, synthetic construct
  source 1..19: mol_type = other RNA
gctgctggtgcagctggtg

SEQ ID NO: 16006 - RNA, 19 nt, synthetic construct
  source 1..19: mol_type = other RNA
tttgacacctgcaactgtg

SEQ ID NO: 16007 - RNA, 19 nt, synthetic construct
  source 1..19: mol_type = other RNA
ttgacacctgcaactgtga

SEQ ID NO: 16008 - RNA, 19 nt, synthetic construct
  source 1..19: mol_type = other RNA
tgacacctgcaactgtgag

SEQ ID NO: 16009 - RNA, 19 nt, synthetic construct
  source 1..19: mol_type = other RNA
actgtgagcggagcgagga

SEQ ID NO: 16010 - RNA, 19 nt, synthetic construct
  source 1..19: mol_type = other RNA
tgagcggagcgaggactgc

SEQ ID NO: 16011 - RNA, 19 nt, synthetic construct
  source 1..19: mol_type = other RNA
ctgcaacacctgcacctgc

SEQ ID NO: 16012 - RNA, 19 nt, synthetic construct
  source 1..19: mol_type = other RNA
ccaccggctctgcctgggc

SEQ ID NO: 16013 - RNA, 19 nt, synthetic construct
  source 1..19: mol_type = other RNA
ccggcaccacctgctccaa

SEQ ID NO: 16014 - RNA, 19 nt, synthetic construct
  source 1..19: mol_type = other RNA
ggcaccacctgctccaagg

SEQ ID NO: 16015 - RNA, 19 nt, synthetic construct
  source 1..19: mol_type = other RNA
gcaccacctgctccaaggc

SEQ ID NO: 16016 - RNA, 19 nt, synthetic construct
  source 1..19: mol_type = other RNA
accacctgctccaaggcca

SEQ ID NO: 16017 - RNA, 19 nt, synthetic construct
  source 1..19: mol_type = other RNA
ccacctgctccaaggccat

SEQ ID NO: 16018 - RNA, 19 nt, synthetic construct
  source 1..19: mol_type = other RNA
cacctgctccaaggccatc

SEQ ID NO: 16019 - RNA, 19 nt, synthetic construct
  source 1..19: mol_type = other RNA
cctgctccaaggccatcaa

SEQ ID NO: 16020 - RNA, 19 nt, synthetic construct
  source 1..19: mol_type = other RNA
agggcagggtctgcggcct

SEQ ID NO: 16021 - RNA, 19 nt, synthetic construct
  source 1..19: mol_type = other RNA
ggcagggtctgcggcctgt

SEQ ID NO: 16022 - RNA, 19 nt, synthetic construct
  source 1..19: mol_type = other RNA
ggtctgcggcctgtgcggg

SEQ ID NO: 16023 - RNA, 19 nt, synthetic construct
  source 1..19: mol_type = other RNA
aaggacccctgcacggcca

SEQ ID NO: 16024 - RNA, 19 nt, synthetic construct
  source 1..19: mol_type = other RNA
cctgcacggccaacccctt

SEQ ID NO: 16025 - RNA, 19 nt, synthetic construct
  source 1..19: mol_type = other RNA
accccttccgcaagtcctg

SEQ ID NO: 16026 - RNA, 19 nt, synthetic construct
  source 1..19: mol_type = other RNA
ccccttccgcaagtcctgg

SEQ ID NO: 16027 - RNA, 19 nt, synthetic construct
  source 1..19: mol_type = other RNA
cccttccgcaagtcctggg

SEQ ID NO: 16028 - RNA, 19 nt, synthetic construct
  source 1..19: mol_type = other RNA
ccttccgcaagtcctgggc

SEQ ID NO: 16029 - RNA, 19 nt, synthetic construct
  source 1..19: mol_type = other RNA
cctgggcccagaagcagtg

SEQ ID NO: 16030 - RNA, 19 nt, synthetic construct
  source 1..19: mol_type = other RNA
aagcagtgcagcatcctcc

SEQ ID NO: 16031 - RNA, 19 nt, synthetic construct
  source 1..19: mol_type = other RNA
gcctgtgtgtgtcctggcg

SEQ ID NO: 16032 - RNA, 19 nt, synthetic construct
  source 1..19: mol_type = other RNA
cctgtgtgtgtcctggcgg

SEQ ID NO: 16033 - RNA, 19 nt, synthetic construct
  source 1..19: mol_type = other RNA
ctgtgtgtgtcctggcgga

SEQ ID NO: 16034 - RNA, 19 nt, synthetic construct
  source 1..19: mol_type = other RNA
gcactgcctggtggacctg

SEQ ID NO: 16035 - RNA, 19 nt, synthetic construct
  source 1..19: mol_type = other RNA
cctggcctggaaggctgct

SEQ ID NO: 16036 - RNA, 19 nt, synthetic construct
  source 1..19: mol_type = other RNA
ctggcctggaaggctgcta

SEQ ID NO: 16037 - RNA, 19 nt, synthetic construct
  source 1..19: mol_type = other RNA
ggcctggaaggctgctacc

SEQ ID NO: 16038 - RNA, 19 nt, synthetic construct
  source 1..19: mol_type = other RNA
tgcccacccagccagccct

SEQ ID NO: 16039 - RNA, 19 nt, synthetic construct
  source 1..19: mol_type = other RNA
ccccctcctccagcccagg

SEQ ID NO: 16040 - RNA, 19 nt, synthetic construct
  source 1..19: mol_type = other RNA
ccccctcctccagcccagg

SEQ ID NO: 16041 - RNA, 19 nt, synthetic construct
  source 1..19: mol_type = other RNA
ccccctcctccagcccagg

SEQ ID NO: 16042 - RNA, 19 nt, synthetic construct
  source 1..19: mol_type = other RNA
ccccctcctccagcccagg

SEQ ID NO: 16043 - RNA, 19 nt, synthetic construct
  source 1..19: mol_type = other RNA
ccccctcctccagcccagg

SEQ ID NO: 16044 - RNA, 19 nt, synthetic construct
  source 1..19: mol_type = other RNA
ctcgccctcccctgcccct

SEQ ID NO: 16045 - RNA, 19 nt, synthetic construct
  source 1..19: mol_type = other RNA
agacctggaccctggagaa

SEQ ID NO: 16046 - RNA, 19 nt, synthetic construct
  source 1..19: mol_type = other RNA
cttccaggcccggctgccc

SEQ ID NO: 16047 - RNA, 19 nt, synthetic construct
  source 1..19: mol_type = other RNA
cggctgctgctactcctgt

SEQ ID NO: 16048 - RNA, 19 nt, synthetic construct
  source 1..19: mol_type = other RNA
gcagctgctggtgcagctg

SEQ ID NO: 16049 - RNA, 19 nt, synthetic construct
  source 1..19: mol_type = other RNA
gtgcccacccagccagccc

SEQ ID NO: 16050 - RNA, 19 nt, synthetic construct
  source 1..19: mol_type = other RNA
caggaactgggagcaggag

SEQ ID NO: 16051 - RNA, 19 nt, synthetic construct
  source 1..19: mol_type = other RNA
gcccacccagccagccctt

SEQ ID NO: 16052 - RNA, 19 nt, synthetic construct
  source 1..19: mol_type = other RNA
ctctgctcaacccagccca

SEQ ID NO: 16053 - RNA, 19 nt, synthetic construct
  source 1..19: mol_type = other RNA
cacctggatcctcacagag

SEQ ID NO: 16054 - RNA, 19 nt, synthetic construct
  source 1..19: mol_type = other RNA
cacctggatcctcacagag

SEQ ID NO: 16055 - RNA, 19 nt, synthetic construct
  source 1..19: mol_type = other RNA
cacctggatcctcacagag

SEQ ID NO: 16056 - RNA, 19 nt, synthetic construct
  source 1..19: mol_type = other RNA
cacctggatcctcacagag

SEQ ID NO: 16057 - RNA, 19 nt, synthetic construct
  source 1..19: mol_type = other RNA
cacctggatcctcacagag

SEQ ID NO: 16058 - RNA, 19 nt, synthetic construct
  source 1..19: mol_type = other RNA
aacgtcacctgcgtgaaca

SEQ ID NO: 16059 - RNA, 19 nt, synthetic construct
  source 1..19: mol_type = other RNA
cccagcccagttttgcaaa

SEQ ID NO: 16060 - RNA, 19 nt, synthetic construct
  source 1..19: mol_type = other RNA
tcaacccagcccagttttg

SEQ ID NO: 16061 - RNA, 19 nt, synthetic construct
  source 1..19: mol_type = other RNA
cgtgaccaggccccgggcc

SEQ ID NO: 16062 - RNA, 19 nt, synthetic construct
  source 1..19: mol_type = other RNA
caccacacccacagccacc

SEQ ID NO: 16063 - RNA, 19 nt, synthetic construct
  source 1..19: mol_type = other RNA
caccacacccacagccacc

SEQ ID NO: 16064 - RNA, 19 nt, synthetic construct
  source 1..19: mol_type = other RNA
gtcggtgcagtgcaagccc

SEQ ID NO: 16065 - RNA, 19 nt, synthetic construct
  source 1..19: mol_type = other RNA
ccttcagcgtgtccactgt

SEQ ID NO: 16066 - RNA, 19 nt, synthetic construct
  source 1..19: mol_type = other RNA
acacccacagccaccagtt

SEQ ID NO: 16067 - RNA, 19 nt, synthetic construct
  source 1..19: mol_type = other RNA
acacccacagccaccagtt

SEQ ID NO: 16068 - RNA, 19 nt, synthetic construct
  source 1..19: mol_type = other RNA
cacagccaccagttccaaa

SEQ ID NO: 16069 - RNA, 19 nt, synthetic construct
  source 1..19: mol_type = other RNA
cacagccaccagttccaaa

SEQ ID NO: 16070 - RNA, 19 nt, synthetic construct
  source 1..19: mol_type = other RNA
aagggtgaggggccagcag

SEQ ID NO: 16071 - RNA, 19 nt, synthetic construct
  source 1..19: mol_type = other RNA
gccacaccctcctccactc

SEQ ID NO: 16072 - RNA, 19 nt, synthetic construct
  source 1..19: mol_type = other RNA
gccacaccctcctccactc

SEQ ID NO: 16073 - RNA, 19 nt, synthetic construct
  source 1..19: mol_type = other RNA
gccacaccctcctccactc

SEQ ID NO: 16074 - RNA, 19 nt, synthetic construct
  source 1..19: mol_type = other RNA
gccacaccctcctccactc

SEQ ID NO: 16075 - RNA, 19 nt, synthetic construct
  source 1..19: mol_type = other RNA
ctctgtccacctggagcca

SEQ ID NO: 16076 - RNA, 19 nt, synthetic construct
  source 1..19: mol_type = other RNA
cacctgcccacccaccaaa

SEQ ID NO: 16077 - RNA, 19 nt, synthetic construct
  source 1..19: mol_type = other RNA
cctggggccgagtgcctcc

SEQ ID NO: 16078 - RNA, 19 nt, synthetic construct
  source 1..19: mol_type = other RNA
ctggggccgagtgcctccg

SEQ ID NO: 16079 - RNA, 19 nt, synthetic construct
  source 1..19: mol_type = other RNA
gacggccaccaccaccacc

SEQ ID NO: 16080 - RNA, 19 nt, synthetic construct
  source 1..19: mol_type = other RNA
acggccaccaccaccacca

SEQ ID NO: 16081 - RNA, 19 nt, synthetic construct
  source 1..19: mol_type = other RNA
cccacagcggagaactgcc

SEQ ID NO: 16082 - RNA, 19 nt, synthetic construct
  source 1..19: mol_type = other RNA
tccactacaagaccttcga

SEQ ID NO: 16083 - RNA, 19 nt, synthetic construct
  source 1..19: mol_type = other RNA
gaggccgacgtcacctgca

SEQ ID NO: 16084 - RNA, 19 nt, synthetic construct
  source 1..19: mol_type = other RNA
ttgtcatcaaggcccaggg

SEQ ID NO: 16085 - RNA, 19 nt, synthetic construct
  source 1..19: mol_type = other RNA
ggccaccacaactggggcc

SEQ ID NO: 16086 - RNA, 19 nt, synthetic construct
  source 1..19: mol_type = other RNA
gcctgggagcctctctgca

SEQ ID NO: 16087 - RNA, 19 nt, synthetic construct
  source 1..19: mol_type = other RNA
acagcggagaactgccaga

SEQ ID NO: 16088 - RNA, 19 nt, synthetic construct
  source 1..19: mol_type = other RNA
cgactgctgtcccaccttc

SEQ ID NO: 16089 - RNA, 19 nt, synthetic construct
  source 1..19: mol_type = other RNA
cttaccaccacggccacca

SEQ ID NO: 16090 - RNA, 19 nt, synthetic construct
  source 1..19: mol_type = other RNA
cttaccaccacggccacca

SEQ ID NO: 16091 - RNA, 19 nt, synthetic construct
  source 1..19: mol_type = other RNA
cgactccagccctgtccag

SEQ ID NO: 16092 - RNA, 19 nt, synthetic construct
  source 1..19: mol_type = other RNA
gactccagccctgtccagc

SEQ ID NO: 16093 - RNA, 19 nt, synthetic construct
  source 1..19: mol_type = other RNA
cgactccagccctgtccag

SEQ ID NO: 16094 - RNA, 19 nt, synthetic construct
  source 1..19: mol_type = other RNA
gactccagccctgtccagc

SEQ ID NO: 16095 - RNA, 19 nt, synthetic construct
  source 1..19: mol_type = other RNA
cgactccagccctgtccag

SEQ ID NO: 16096 - RNA, 19 nt, synthetic construct
  source 1..19: mol_type = other RNA
gactccagccctgtccagc

SEQ ID NO: 16097 - RNA, 19 nt, synthetic construct
  source 1..19: mol_type = other RNA
agcagtgcagcatcctcca

SEQ ID NO: 16098 - RNA, 19 nt, synthetic construct
  source 1..19: mol_type = other RNA
ctccagccctgtccagccc

SEQ ID NO: 16099 - RNA, 19 nt, synthetic construct
  source 1..19: mol_type = other RNA
ctccagccctgtccagccc

SEQ ID NO: 16100 - RNA, 19 nt, synthetic construct
  source 1..19: mol_type = other RNA
ctccagccctgtccagccc

SEQ ID NO: 16101 - RNA, 19 nt, synthetic construct
  source 1..19: mol_type = other RNA
actccagccctgtccagcc

SEQ ID NO: 16102 - RNA, 19 nt, synthetic construct
  source 1..19: mol_type = other RNA
actccagccctgtccagcc

SEQ ID NO: 16103 - RNA, 19 nt, synthetic construct
  source 1..19: mol_type = other RNA
actccagccctgtccagcc

SEQ ID NO: 16104 - RNA, 19 nt, synthetic construct
  source 1..19: mol_type = other RNA
tcgactccagccctgtcca

SEQ ID NO: 16105 - RNA, 19 nt, synthetic construct
  source 1..19: mol_type = other RNA
ttacagccatcccctcttc

SEQ ID NO: 16106 - RNA, 19 nt, synthetic construct
  source 1..19: mol_type = other RNA
tcgactccagccctgtcca

SEQ ID NO: 16107 - RNA, 19 nt, synthetic construct
  source 1..19: mol_type = other RNA
tcgactccagccctgtcca

SEQ ID NO: 16108 - RNA, 19 nt, synthetic construct
  source 1..19: mol_type = other RNA
acttccactacaagacctt

SEQ ID NO: 16109 - RNA, 19 nt, synthetic construct
  source 1..19: mol_type = other RNA
ccccacagcggagaactgc

SEQ ID NO: 16110 - RNA, 19 nt, synthetic construct
  source 1..19: mol_type = other RNA
gctctgcccccggacctgc

SEQ ID NO: 16111 - RNA, 19 nt, synthetic construct
  source 1..19: mol_type = other RNA
ggtactcccccatcactga

SEQ ID NO: 16112 - RNA, 19 nt, synthetic construct
  source 1..19: mol_type = other RNA
ggtactcccccatcactga

SEQ ID NO: 16113 - RNA, 19 nt, synthetic construct
  source 1..19: mol_type = other RNA
ggtactcccccatcactga

SEQ ID NO: 16114 - RNA, 19 nt, synthetic construct
  source 1..19: mol_type = other RNA
ggtactcccccatcactga

SEQ ID NO: 16115 - RNA, 19 nt, synthetic construct
  source 1..19: mol_type = other RNA
ggactacatcaaggtcagc

SEQ ID NO: 16116 - RNA, 19 nt, synthetic construct
  source 1..19: mol_type = other RNA
gctaccagcgttacagcca

SEQ ID NO: 16117 - RNA, 19 nt, synthetic construct
  source 1..19: mol_type = other RNA
accgaggtcaacatcacct

SEQ ID NO: 16118 - RNA, 19 nt, synthetic construct
  source 1..19: mol_type = other RNA
cttcgacggcgacgtcttc

SEQ ID NO: 16119 - RNA, 19 nt, synthetic construct
  source 1..19: mol_type = other RNA
agttttgcaaataaaccct

SEQ ID NO: 16120 - RNA, 19 nt, synthetic construct
  source 1..19: mol_type = other RNA
aacaatactacctgtcccc

SEQ ID NO: 16121 - RNA, 19 nt, synthetic construct
  source 1..19: mol_type = other RNA
tccacctggagccaggatg

SEQ ID NO: 16122 - RNA, 19 nt, synthetic construct
  source 1..19: mol_type = other RNA
gcagactgggtccagctca

SEQ ID NO: 16123 - RNA, 19 nt, synthetic construct
  source 1..19: mol_type = other RNA
gccctagggaccacccaca

SEQ ID NO: 16124 - RNA, 19 nt, synthetic construct
  source 1..19: mol_type = other RNA
gccctagggaccacccaca

SEQ ID NO: 16125 - RNA, 19 nt, synthetic construct
  source 1..19: mol_type = other RNA
gccctagggaccacccaca

SEQ ID NO: 16126 - RNA, 19 nt, synthetic construct
  source 1..19: mol_type = other RNA
gccctagggaccacccaca

SEQ ID NO: 16127 - RNA, 19 nt, synthetic construct
  source 1..19: mol_type = other RNA
acgccattcaccttcacca

SEQ ID NO: 16128 - RNA, 19 nt, synthetic construct
  source 1..19: mol_type = other RNA
aaagccactcccttctcca

SEQ ID NO: 16129 - RNA, 19 nt, synthetic construct
  source 1..19: mol_type = other RNA
aaagccactcccttctcca

SEQ ID NO: 16130 - RNA, 19 nt, synthetic construct
  source 1..19: mol_type = other RNA
caccgtgctggctgagctg

SEQ ID NO: 16131 - RNA, 19 nt, synthetic construct
  source 1..19: mol_type = other RNA
cgcccttccagcactgaga

SEQ ID NO: 16132 - RNA, 19 nt, synthetic construct
  source 1..19: mol_type = other RNA
cgcccttccagcactgaga

SEQ ID NO: 16133 - RNA, 19 nt, synthetic construct
  source 1..19: mol_type = other RNA
cgcccttccagcactgaga

SEQ ID NO: 16134 - RNA, 19 nt, synthetic construct
  source 1..19: mol_type = other RNA
cgcccttccagcactgaga

SEQ ID NO: 16135 - RNA, 19 nt, synthetic construct
  source 1..19: mol_type = other RNA
aaagtgctgaccagcccgg

SEQ ID NO: 16136 - RNA, 19 nt, synthetic construct
  source 1..19: mol_type = other RNA
tgcccttccagcactgaga

SEQ ID NO: 16137 - RNA, 19 nt, synthetic construct
  source 1..19: mol_type = other RNA
gagggcatctgccaccgca

SEQ ID NO: 16138 - RNA, 19 nt, synthetic construct
  source 1..19: mol_type = other RNA
agcctggagagaccatcag

SEQ ID NO: 16139 - RNA, 19 nt, synthetic construct
  source 1..19: mol_type = other RNA
ccgccttgaggtgccctgc

SEQ ID NO: 16140 - RNA, 19 nt, synthetic construct
  source 1..19: mol_type = other RNA
tccacggccccaccttcgc

SEQ ID NO: 16141 - RNA, 19 nt, synthetic construct
  source 1..19: mol_type = other RNA
acaagcccggccctcccgg

SEQ ID NO: 16142 - RNA, 19 nt, synthetic construct
  source 1..19: mol_type = other RNA
gagggctgcttctgccctg

SEQ ID NO: 16143 - RNA, 19 nt, synthetic construct
  source 1..19: mol_type = other RNA
ccgcaggcagagacccagg

SEQ ID NO: 16144 - RNA, 19 nt, synthetic construct
  source 1..19: mol_type = other RNA
tcaccgtgctggctgagct

SEQ ID NO: 16145 - RNA, 19 nt, synthetic construct
  source 1..19: mol_type = other RNA
cgactggagggacggcgtc

SEQ ID NO: 16146 - RNA, 19 nt, synthetic construct
  source 1..19: mol_type = other RNA
actggagggacggcgtctg

SEQ ID NO: 16147 - RNA, 19 nt, synthetic construct
  source 1..19: mol_type = other RNA
ggtgtgcagcccccatggt

SEQ ID NO: 16148 - RNA, 19 nt, synthetic construct
  source 1..19: mol_type = other RNA
cactggagtttgggaacag

SEQ ID NO: 16149 - RNA, 19 nt, synthetic construct
  source 1..19: mol_type = other RNA
ccagtccagggactgcaac

SEQ ID NO: 16150 - RNA, 19 nt, synthetic construct
  source 1..19: mol_type = other RNA
tccagcactgagaagcaca

SEQ ID NO: 16151 - RNA, 19 nt, synthetic construct
  source 1..19: mol_type = other RNA
cttcctccctgggcaccac

SEQ ID NO: 16152 - RNA, 19 nt, synthetic construct
  source 1..19: mol_type = other RNA
ggtgcgcacagcctggact

SEQ ID NO: 16153 - RNA, 19 nt, synthetic construct
  source 1..19: mol_type = other RNA
gacctggatcctcacagag

SEQ ID NO: 16154 - RNA, 19 nt, synthetic construct
  source 1..19: mol_type = other RNA
acctggatcctcacagagc

SEQ ID NO: 16155 - RNA, 19 nt, synthetic construct
  source 1..19: mol_type = other RNA
ccagtccagggactgcaac

SEQ ID NO: 16156 - RNA, 19 nt, synthetic construct
  source 1..19: mol_type = other RNA
tccagcactgagaagcaca

SEQ ID NO: 16157 - RNA, 19 nt, synthetic construct
  source 1..19: mol_type = other RNA
ggtgcgcacagcctggact

SEQ ID NO: 16158 - RNA, 19 nt, synthetic construct
  source 1..19: mol_type = other RNA
gacctggatcctcacagag

SEQ ID NO: 16159 - RNA, 19 nt, synthetic construct
  source 1..19: mol_type = other RNA
gacctggatcctcacagag

SEQ ID NO: 16160 - RNA, 19 nt, synthetic construct
  source 1..19: mol_type = other RNA
acctggatcctcacagagc

SEQ ID NO: 16161 - RNA, 19 nt, synthetic construct
  source 1..19: mol_type = other RNA
ccagtccagggactgcaac

SEQ ID NO: 16162 - RNA, 19 nt, synthetic construct
  source 1..19: mol_type = other RNA
tccagcactgagaagcaca

SEQ ID NO: 16163 - RNA, 19 nt, synthetic construct
  source 1..19: mol_type = other RNA
ggtgcgcacagcctggact

SEQ ID NO: 16164 - RNA, 19 nt, synthetic construct
  source 1..19: mol_type = other RNA
ccagtccagggactgcaac

SEQ ID NO: 16165 - RNA, 19 nt, synthetic construct
  source 1..19: mol_type = other RNA
tccagcactgagaagcaca

SEQ ID NO: 16166 - RNA, 19 nt, synthetic construct
  source 1..19: mol_type = other RNA
ggtgcgcacagcctggact

SEQ ID NO: 16167 - RNA, 19 nt, synthetic construct
  source 1..19: mol_type = other RNA
gacctggatcctcacagag

SEQ ID NO: 16168 - RNA, 19 nt, synthetic construct
  source 1..19: mol_type = other RNA
acctggatcctcacagagc

SEQ ID NO: 16169 - RNA, 19 nt, synthetic construct
  source 1..19: mol_type = other RNA
gacctggatcctcacagag

SEQ ID NO: 16170 - RNA, 19 nt, synthetic construct
  source 1..19: mol_type = other RNA
acctggatcctcacagagc

SEQ ID NO: 16171 - RNA, 19 nt, synthetic construct
  source 1..19: mol_type = other RNA
cacctggatcctcacagag

SEQ ID NO: 16172 - RNA, 19 nt, synthetic construct
  source 1..19: mol_type = other RNA
acctggatcctcacagagc

SEQ ID NO: 16173 - RNA, 19 nt, synthetic construct
  source 1..19: mol_type = other RNA
tccagcactgagaagcaca

SEQ ID NO: 16174 - RNA, 19 nt, synthetic construct
  source 1..19: mol_type = other RNA
cctcatgagagagatccat

SEQ ID NO: 16175 - RNA, 19 nt, synthetic construct
  source 1..19: mol_type = other RNA
caaccgcccttccagcact

SEQ ID NO: 16176 - RNA, 19 nt, synthetic construct
  source 1..19: mol_type = other RNA
caaccgcccttccagcact

SEQ ID NO: 16177 - RNA, 19 nt, synthetic construct
  source 1..19: mol_type = other RNA
caaccgcccttccagcact

SEQ ID NO: 16178 - RNA, 19 nt, synthetic construct
  source 1..19: mol_type = other RNA
caaccgcccttccagcact

SEQ ID NO: 16179 - RNA, 19 nt, synthetic construct
  source 1..19: mol_type = other RNA
atttctacgcagtgtgcaa

SEQ ID NO: 16180 - RNA, 19 nt, synthetic construct
  source 1..19: mol_type = other RNA
agctttacacccatcccct

SEQ ID NO: 16181 - RNA, 19 nt, synthetic construct
  source 1..19: mol_type = other RNA
agctttacacccatcccct

SEQ ID NO: 16182 - RNA, 19 nt, synthetic construct
  source 1..19: mol_type = other RNA
ctatgcccacagccactgc

SEQ ID NO: 16183 - RNA, 19 nt, synthetic construct
  source 1..19: mol_type = other RNA
gcccgcccaggagtgcccc

SEQ ID NO: 16184 - RNA, 19 nt, synthetic construct
  source 1..19: mol_type = other RNA
gcggtgccccgacgtcctc

SEQ ID NO: 16185 - RNA, 19 nt, synthetic construct
  source 1..19: mol_type = other RNA
ctgggcgtgagcgtcacct

SEQ ID NO: 16186 - RNA, 19 nt, synthetic construct
  source 1..19: mol_type = other RNA
ctggagagaccatcagggt

SEQ ID NO: 16187 - RNA, 19 nt, synthetic construct
  source 1..19: mol_type = other RNA
cagatcctcttcaacgcac

SEQ ID NO: 16188 - RNA, 19 nt, synthetic construct
  source 1..19: mol_type = other RNA
actgggacgccctggaaca

SEQ ID NO: 16189 - RNA, 19 nt, synthetic construct
  source 1..19: mol_type = other RNA
ttgcggagtgccacgcact

SEQ ID NO: 16190 - RNA, 19 nt, synthetic construct
  source 1..19: mol_type = other RNA
acccacatgggggctgtga

SEQ ID NO: 16191 - RNA, 19 nt, synthetic construct
  source 1..19: mol_type = other RNA
gtgtgcaatcagcactgtg

SEQ ID NO: 16192 - RNA, 19 nt, synthetic construct
  source 1..19: mol_type = other RNA
gcttccagtgtggatcagc

SEQ ID NO: 16193 - RNA, 19 nt, synthetic construct
  source 1..19: mol_type = other RNA
ccgcacctcgaccctgctg

SEQ ID NO: 16194 - RNA, 19 nt, synthetic construct
  source 1..19: mol_type = other RNA
ctacgactgagtccactgg

SEQ ID NO: 16195 - RNA, 19 nt, synthetic construct
  source 1..19: mol_type = other RNA
ccgcacctcgaccctgctg

SEQ ID NO: 16196 - RNA, 19 nt, synthetic construct
  source 1..19: mol_type = other RNA
ccgcacctcgaccctgctg

SEQ ID NO: 16197 - RNA, 19 nt, synthetic construct
  source 1..19: mol_type = other RNA
ctacgactgagtccactgg

SEQ ID NO: 16198 - RNA, 19 nt, synthetic construct
  source 1..19: mol_type = other RNA
ccgcacctcgaccctgctg

SEQ ID NO: 16199 - RNA, 19 nt, synthetic construct
  source 1..19: mol_type = other RNA
gccctgtgacgcccagggt

SEQ ID NO: 16200 - RNA, 19 nt, synthetic construct
  source 1..19: mol_type = other RNA
gccctcaccctagcagcag

SEQ ID NO: 16201 - RNA, 19 nt, synthetic construct
  source 1..19: mol_type = other RNA
gccctcaccctagcagcag

SEQ ID NO: 16202 - RNA, 19 nt, synthetic construct
  source 1..19: mol_type = other RNA
gtggtgaccacgggctgtg

SEQ ID NO: 16203 - RNA, 19 nt, synthetic construct
  source 1..19: mol_type = other RNA
gccctcaccctagcagcag

SEQ ID NO: 16204 - RNA, 19 nt, synthetic construct
  source 1..19: mol_type = other RNA
gtggtgaccacgggctgtg

SEQ ID NO: 16205 - RNA, 19 nt, synthetic construct
  source 1..19: mol_type = other RNA
ggagacggtgcccttgcac

SEQ ID NO: 16206 - RNA, 19 nt, synthetic construct
  source 1..19: mol_type = other RNA
gagacggtgcccttgcact

SEQ ID NO: 16207 - RNA, 19 nt, synthetic construct
  source 1..19: mol_type = other RNA
ctgcacggacgaggagggc

SEQ ID NO: 16208 - RNA, 19 nt, synthetic construct
  source 1..19: mol_type = other RNA
atcttggcccaggactact

SEQ ID NO: 16209 - RNA, 19 nt, synthetic construct
  source 1..19: mol_type = other RNA
gatccacggccaccccgtc

SEQ ID NO: 16210 - RNA, 19 nt, synthetic construct
  source 1..19: mol_type = other RNA
gatccacggccaccccgtc

SEQ ID NO: 16211 - RNA, 19 nt, synthetic construct
  source 1..19: mol_type = other RNA
gatccacggccaccccgtc

SEQ ID NO: 16212 - RNA, 19 nt, synthetic construct
  source 1..19: mol_type = other RNA
gatccacggccaccccgtc

SEQ ID NO: 16213 - RNA, 19 nt, synthetic construct
  source 1..19: mol_type = other RNA
cctggagagaccatcaggg

SEQ ID NO: 16214 - RNA, 19 nt, synthetic construct
  source 1..19: mol_type = other RNA
accccgggccacaccaggg

SEQ ID NO: 16215 - RNA, 19 nt, synthetic construct
  source 1..19: mol_type = other RNA
aacagctcacactaccaaa

SEQ ID NO: 16216 - RNA, 19 nt, synthetic construct
  source 1..19: mol_type = other RNA
aacagctcacactaccaaa

SEQ ID NO: 16217 - RNA, 19 nt, synthetic construct
  source 1..19: mol_type = other RNA
aacagctcacactaccaaa

SEQ ID NO: 16218 - RNA, 19 nt, synthetic construct
  source 1..19: mol_type = other RNA
aacagctcacactaccaaa

SEQ ID NO: 16219 - RNA, 19 nt, synthetic construct
  source 1..19: mol_type = other RNA
aacagctcacactaccaaa

SEQ ID NO: 16220 - RNA, 19 nt, synthetic construct
  source 1..19: mol_type = other RNA
ccaccacagccgctctgtg

SEQ ID NO: 16221 - RNA, 19 nt, synthetic construct
  source 1..19: mol_type = other RNA
tcctcaccaccctgagacc

SEQ ID NO: 16222 - RNA, 19 nt, synthetic construct
  source 1..19: mol_type = other RNA
cggggagcggtgggtcagc

SEQ ID NO: 16223 - RNA, 19 nt, synthetic construct
  source 1..19: mol_type = other RNA
gccggaggggccgtctgtg

SEQ ID NO: 16224 - RNA, 19 nt, synthetic construct
  source 1..19: mol_type = other RNA
gccggaggggccgtctgtg

SEQ ID NO: 16225 - RNA, 19 nt, synthetic construct
  source 1..19: mol_type = other RNA
gccggaggggccgtctgtg

SEQ ID NO: 16226 - RNA, 19 nt, synthetic construct
  source 1..19: mol_type = other RNA
gcgctccgtgctcctgctg

SEQ ID NO: 16227 - RNA, 19 nt, synthetic construct
  source 1..19: mol_type = other RNA
gctctgcgaggaccactgt

SEQ ID NO: 16228 - RNA, 19 nt, synthetic construct
  source 1..19: mol_type = other RNA
cttcaacaccacctgcagc

SEQ ID NO: 16229 - RNA, 19 nt, synthetic construct
  source 1..19: mol_type = other RNA
gtggtgaccatgggctgtg

SEQ ID NO: 16230 - RNA, 19 nt, synthetic construct
  source 1..19: mol_type = other RNA
gtggtgaccatgggctgtg

SEQ ID NO: 16231 - RNA, 19 nt, synthetic construct
  source 1..19: mol_type = other RNA
cagcatcccaaagccccct

SEQ ID NO: 16232 - RNA, 19 nt, synthetic construct
  source 1..19: mol_type = other RNA
cttggcccaggactactgt

SEQ ID NO: 16233 - RNA, 19 nt, synthetic construct
  source 1..19: mol_type = other RNA
ccgtggtgggggacgcact

SEQ ID NO: 16234 - RNA, 19 nt, synthetic construct
  source 1..19: mol_type = other RNA
ggatccgggtcctctgctg

SEQ ID NO: 16235 - RNA, 19 nt, synthetic construct
  source 1..19: mol_type = other RNA
tgcagtgacgaccactgca

SEQ ID NO: 16236 - RNA, 19 nt, synthetic construct
  source 1..19: mol_type = other RNA
gggaatctcagcctctacc

SEQ ID NO: 16237 - RNA, 19 nt, synthetic construct
  source 1..19: mol_type = other RNA
ctgcccccgcgccctcagc

SEQ ID NO: 16238 - RNA, 19 nt, synthetic construct
  source 1..19: mol_type = other RNA
tcgacggcgacgtcttccg

SEQ ID NO: 16239 - RNA, 19 nt, synthetic construct
  source 1..19: mol_type = other RNA
ccgcctgggtcccccactc

SEQ ID NO: 16240 - RNA, 19 nt, synthetic construct
  source 1..19: mol_type = other RNA
ctccacccaggcaactgct

SEQ ID NO: 16241 - RNA, 19 nt, synthetic construct
  source 1..19: mol_type = other RNA
agtctgtgagcagcccctg

SEQ ID NO: 16242 - RNA, 19 nt, synthetic construct
  source 1..19: mol_type = other RNA
ctccacccaggcaactgct

SEQ ID NO: 16243 - RNA, 19 nt, synthetic construct
  source 1..19: mol_type = other RNA
ctccacccaggcaactgct

SEQ ID NO: 16244 - RNA, 19 nt, synthetic construct
  source 1..19: mol_type = other RNA
ccgatggccagccagtcca

SEQ ID NO: 16245 - RNA, 19 nt, synthetic construct
  source 1..19: mol_type = other RNA
aatgggcgggtgtgcagca

SEQ ID NO: 16246 - RNA, 19 nt, synthetic construct
  source 1..19: mol_type = other RNA
ttcgacggcgacgtcttcc

SEQ ID NO: 16247 - RNA, 19 nt, synthetic construct
  source 1..19: mol_type = other RNA
accttcgacggcgacgtct

SEQ ID NO: 16248 - RNA, 19 nt, synthetic construct
  source 1..19: mol_type = other RNA
ccttcgacggcgacgtctt

SEQ ID NO: 16249 - RNA, 19 nt, synthetic construct
  source 1..19: mol_type = other RNA
caccgtggggaccacccgc

SEQ ID NO: 16250 - RNA, 19 nt, synthetic construct
  source 1..19: mol_type = other RNA
tgcatgtttgacacctgca

SEQ ID NO: 16251 - RNA, 19 nt, synthetic construct
  source 1..19: mol_type = other RNA
gcatgtttgacacctgcaa

SEQ ID NO: 16252 - RNA, 19 nt, synthetic construct
  source 1..19: mol_type = other RNA
tttccttcgtgcctgtgga

SEQ ID NO: 16253 - RNA, 19 nt, synthetic construct
  source 1..19: mol_type = other RNA
gcctggagagaccatcagg

SEQ ID NO: 16254 - RNA, 19 nt, synthetic construct
  source 1..19: mol_type = other RNA
tttgggaacagctggaagc

SEQ ID NO: 16255 - RNA, 19 nt, synthetic construct
  source 1..19: mol_type = other RNA
acccaaggacccctgcacg

SEQ ID NO: 16256 - RNA, 19 nt, synthetic construct
  source 1..19: mol_type = other RNA
cccaaggacccctgcacgg

SEQ ID NO: 16257 - RNA, 19 nt, synthetic construct
  source 1..19: mol_type = other RNA
gtgaccatgggctgtgagc

SEQ ID NO: 16258 - RNA, 19 nt, synthetic construct
  source 1..19: mol_type = other RNA
ctttgacacctactccaac

SEQ ID NO: 16259 - RNA, 19 nt, synthetic construct
  source 1..19: mol_type = other RNA
tccacccaggcaactgctg

SEQ ID NO: 16260 - RNA, 19 nt, synthetic construct
  source 1..19: mol_type = other RNA
gtgaccatgggctgtgagc

SEQ ID NO: 16261 - RNA, 19 nt, synthetic construct
  source 1..19: mol_type = other RNA
ctttgacacctactccaac

SEQ ID NO: 16262 - RNA, 19 nt, synthetic construct
  source 1..19: mol_type = other RNA
ctttgacacctactccaac

SEQ ID NO: 16263 - RNA, 19 nt, synthetic construct
  source 1..19: mol_type = other RNA
tccacccaggcaactgctg

SEQ ID NO: 16264 - RNA, 19 nt, synthetic construct
  source 1..19: mol_type = other RNA
ctttgacacctactccaac

SEQ ID NO: 16265 - RNA, 19 nt, synthetic construct
  source 1..19: mol_type = other RNA
tccacccaggcaactgctg

SEQ ID NO: 16266 - RNA, 19 nt, synthetic construct
  source 1..19: mol_type = other RNA
tcctcagtcctcaccaccc

SEQ ID NO: 16267 - RNA, 19 nt, synthetic construct
  source 1..19: mol_type = other RNA
gcctgatcctgtttgacca

SEQ ID NO: 16268 - RNA, 19 nt, synthetic construct
  source 1..19: mol_type = other RNA
ctttgctgagtgccacaac

SEQ ID NO: 16269 - RNA, 19 nt, synthetic construct
  source 1..19: mol_type = other RNA
gatgtgtccagctgcaggg

SEQ ID NO: 16270 - RNA, 19 nt, synthetic construct
  source 1..19: mol_type = other RNA
ctcctctgcggagcccccc

SEQ ID NO: 16271 - RNA, 19 nt, synthetic construct
  source 1..19: mol_type = other RNA
ccacggccggagcgcccgc

SEQ ID NO: 16272 - RNA, 19 nt, synthetic construct
  source 1..19: mol_type = other RNA
tcccctccttcacccttgg

SEQ ID NO: 16273 - RNA, 19 nt, synthetic construct
  source 1..19: mol_type = other RNA
catcctgtggcaccagggc

SEQ ID NO: 16274 - RNA, 19 nt, synthetic construct
  source 1..19: mol_type = other RNA
cccctccttcacccttggg

SEQ ID NO: 16275 - RNA, 19 nt, synthetic construct
  source 1..19: mol_type = other RNA
ccagcccggccaccacacc

SEQ ID NO: 16276 - RNA, 19 nt, synthetic construct
  source 1..19: mol_type = other RNA
gggaacagctcacaccccc

SEQ ID NO: 16277 - RNA, 19 nt, synthetic construct
  source 1..19: mol_type = other RNA
accatcctgtggcaccagg

SEQ ID NO: 16278 - RNA, 19 nt, synthetic construct
  source 1..19: mol_type = other RNA
ccacctggagccaggatgt

SEQ ID NO: 16279 - RNA, 19 nt, synthetic construct
  source 1..19: mol_type = other RNA
gcacccaaggacccctgca

SEQ ID NO: 16280 - RNA, 19 nt, synthetic construct
  source 1..19: mol_type = other RNA
gactggagggacggcgtct

SEQ ID NO: 16281 - RNA, 19 nt, synthetic construct
  source 1..19: mol_type = other RNA
acagctccccctcccaaag

SEQ ID NO: 16282 - RNA, 19 nt, synthetic construct
  source 1..19: mol_type = other RNA
caccaccaccacaactgtg

SEQ ID NO: 16283 - RNA, 19 nt, synthetic construct
  source 1..19: mol_type = other RNA
caccaccaccacaactgtg

SEQ ID NO: 16284 - RNA, 19 nt, synthetic construct
  source 1..19: mol_type = other RNA
acagctccccctcccaaag

SEQ ID NO: 16285 - RNA, 19 nt, synthetic construct
  source 1..19: mol_type = other RNA
caccaccaccacaactgtg

SEQ ID NO: 16286 - RNA, 19 nt, synthetic construct
  source 1..19: mol_type = other RNA
ccacaccaggggcacctcc

SEQ ID NO: 16287 - RNA, 19 nt, synthetic construct
  source 1..19: mol_type = other RNA
caccaccaccacaactgtg

SEQ ID NO: 16288 - RNA, 19 nt, synthetic construct
  source 1..19: mol_type = other RNA
acagctccccctcccaaag

SEQ ID NO: 16289 - RNA, 19 nt, synthetic construct
  source 1..19: mol_type = other RNA
caccaccaccacaactgtg

SEQ ID NO: 16290 - RNA, 19 nt, synthetic construct
  source 1..19: mol_type = other RNA
tcctctgcggagccccccg

SEQ ID NO: 16291 - RNA, 19 nt, synthetic construct
  source 1..19: mol_type = other RNA
acgcctgcaggctccacag

SEQ ID NO: 16292 - RNA, 19 nt, synthetic construct
  source 1..19: mol_type = other RNA
gtcctccgccccgctgtcc

SEQ ID NO: 16293 - RNA, 19 nt, synthetic construct
  source 1..19: mol_type = other RNA
acctggagccaggatgtgc

SEQ ID NO: 16294 - RNA, 19 nt, synthetic construct
  source 1..19: mol_type = other RNA
gcatcctgcccagatgtgt

SEQ ID NO: 16295 - RNA, 19 nt, synthetic construct
  source 1..19: mol_type = other RNA
tgtgcagcacctggggtga

SEQ ID NO: 16296 - RNA, 19 nt, synthetic construct
  source 1..19: mol_type = other RNA
acaggcacagccagcaccg

SEQ ID NO: 16297 - RNA, 19 nt, synthetic construct
  source 1..19: mol_type = other RNA
acagtgactccctcctctg

SEQ ID NO: 16298 - RNA, 19 nt, synthetic construct
  source 1..19: mol_type = other RNA
caaagccactcccttctcc

SEQ ID NO: 16299 - RNA, 19 nt, synthetic construct
  source 1..19: mol_type = other RNA
acagtgactccctcctctg

SEQ ID NO: 16300 - RNA, 19 nt, synthetic construct
  source 1..19: mol_type = other RNA
agagctgaccacagcagcc

SEQ ID NO: 16301 - RNA, 19 nt, synthetic construct
  source 1..19: mol_type = other RNA
acagtgactccctcctctg

SEQ ID NO: 16302 - RNA, 19 nt, synthetic construct
  source 1..19: mol_type = other RNA
caaagccactcccttctcc

SEQ ID NO: 16303 - RNA, 19 nt, synthetic construct
  source 1..19: mol_type = other RNA
acagtgactccctcctctg

SEQ ID NO: 16304 - RNA, 19 nt, synthetic construct
  source 1..19: mol_type = other RNA
agagctgaccacagcagcc

SEQ ID NO: 16305 - RNA, 19 nt, synthetic construct
  source 1..19: mol_type = other RNA
acccaggaggagggcgact

SEQ ID NO: 16306 - RNA, 19 nt, synthetic construct
  source 1..19: mol_type = other RNA
ctgcatcctgcccagatgt

SEQ ID NO: 16307 - RNA, 19 nt, synthetic construct
  source 1..19: mol_type = other RNA
tcctcacagagcagaccac

SEQ ID NO: 16308 - RNA, 19 nt, synthetic construct
  source 1..19: mol_type = other RNA
tcctccgccccgctgtcct

SEQ ID NO: 16309 - RNA, 19 nt, synthetic construct
  source 1..19: mol_type = other RNA
cacctggagccaggatgtg

SEQ ID NO: 16310 - RNA, 19 nt, synthetic construct
  source 1..19: mol_type = other RNA
gaaggcccaggctgcctgt

SEQ ID NO: 16311 - RNA, 19 nt, synthetic construct
  source 1..19: mol_type = other RNA
acacccatcccctcttcct

SEQ ID NO: 16312 - RNA, 19 nt, synthetic construct
  source 1..19: mol_type = other RNA
cccatcccctcctccaccc

SEQ ID NO: 16313 - RNA, 19 nt, synthetic construct
  source 1..19: mol_type = other RNA
cccatcccctcctccaccc

SEQ ID NO: 16314 - RNA, 19 nt, synthetic construct
  source 1..19: mol_type = other RNA
actgagctgaccacaacag

SEQ ID NO: 16315 - RNA, 19 nt, synthetic construct
  source 1..19: mol_type = other RNA
gggctgcttctgccctgag

SEQ ID NO: 16316 - RNA, 19 nt, synthetic construct
  source 1..19: mol_type = other RNA
cctctgcggagccccccgg

SEQ ID NO: 16317 - RNA, 19 nt, synthetic construct
  source 1..19: mol_type = other RNA
gtggagccgagctgggaga

SEQ ID NO: 16318 - RNA, 19 nt, synthetic construct
  source 1..19: mol_type = other RNA
gccactccctcctccagtc

SEQ ID NO: 16319 - RNA, 19 nt, synthetic construct
  source 1..19: mol_type = other RNA
gccactccctcctccagtc

SEQ ID NO: 16320 - RNA, 19 nt, synthetic construct
  source 1..19: mol_type = other RNA
gccactccctcctccagtc

SEQ ID NO: 16321 - RNA, 19 nt, synthetic construct
  source 1..19: mol_type = other RNA
cgacagcagaaaggatggc

SEQ ID NO: 16322 - RNA, 19 nt, synthetic construct
  source 1..19: mol_type = other RNA
ctggcacctgctctgtgca

SEQ ID NO: 16323 - RNA, 19 nt, synthetic construct
  source 1..19: mol_type = other RNA
tgcagggcggggcccacat

SEQ ID NO: 16324 - RNA, 19 nt, synthetic construct
  source 1..19: mol_type = other RNA
gtcggatgggagtgggggc

SEQ ID NO: 16325 - RNA, 19 nt, synthetic construct
  source 1..19: mol_type = other RNA
ctggagtttgggaacagct

SEQ ID NO: 16326 - RNA, 19 nt, synthetic construct
  source 1..19: mol_type = other RNA
ggagtttgggaacagctgg

SEQ ID NO: 16327 - RNA, 19 nt, synthetic construct
  source 1..19: mol_type = other RNA
agtttgggaacagctggaa

SEQ ID NO: 16328 - RNA, 19 nt, synthetic construct
  source 1..19: mol_type = other RNA
ggaagctctccccctcctg

SEQ ID NO: 16329 - RNA, 19 nt, synthetic construct
  source 1..19: mol_type = other RNA
aagctctccccctcctgcc

SEQ ID NO: 16330 - RNA, 19 nt, synthetic construct
  source 1..19: mol_type = other RNA
ccccaccttcgccgcctgc

SEQ ID NO: 16331 - RNA, 19 nt, synthetic construct
  source 1..19: mol_type = other RNA
catcatcaggaaggctgtg

SEQ ID NO: 16332 - RNA, 19 nt, synthetic construct
  source 1..19: mol_type = other RNA
cagtctgtgagcagcccct

SEQ ID NO: 16333 - RNA, 19 nt, synthetic construct
  source 1..19: mol_type = other RNA
acacccgtggccaccatgt

SEQ ID NO: 16334 - RNA, 19 nt, synthetic construct
  source 1..19: mol_type = other RNA
cccccaggatgggtgcccc

SEQ ID NO: 16335 - RNA, 19 nt, synthetic construct
  source 1..19: mol_type = other RNA
gtgcagcacctggggtgac

SEQ ID NO: 16336 - RNA, 19 nt, synthetic construct
  source 1..19: mol_type = other RNA
gctggtgctggaggcgtcc

SEQ ID NO: 16337 - RNA, 19 nt, synthetic construct
  source 1..19: mol_type = other RNA
ctggtgctggaggcgtcca

SEQ ID NO: 16338 - RNA, 19 nt, synthetic construct
  source 1..19: mol_type = other RNA
gcagctcctgcacctgctc

SEQ ID NO: 16339 - RNA, 19 nt, synthetic construct
  source 1..19: mol_type = other RNA
gccctggcacctgctctgt

SEQ ID NO: 16340 - RNA, 19 nt, synthetic construct
  source 1..19: mol_type = other RNA
tggcacctgctctgtgcag

SEQ ID NO: 16341 - RNA, 19 nt, synthetic construct
  source 1..19: mol_type = other RNA
ggggctgcagctgctggtg

SEQ ID NO: 16342 - RNA, 19 nt, synthetic construct
  source 1..19: mol_type = other RNA
agctaagctgcctgggagc

SEQ ID NO: 16343 - RNA, 19 nt, synthetic construct
  source 1..19: mol_type = other RNA
tgtcccccggggctggtgt

SEQ ID NO: 16344 - RNA, 19 nt, synthetic construct
  source 1..19: mol_type = other RNA
gcactggagtttgggaaca

SEQ ID NO: 16345 - RNA, 19 nt, synthetic construct
  source 1..19: mol_type = other RNA
actggagtttgggaacagc

SEQ ID NO: 16346 - RNA, 19 nt, synthetic construct
  source 1..19: mol_type = other RNA
tggagtttgggaacagctg

SEQ ID NO: 16347 - RNA, 19 nt, synthetic construct
  source 1..19: mol_type = other RNA
gagtttgggaacagctgga

SEQ ID NO: 16348 - RNA, 19 nt, synthetic construct
  source 1..19: mol_type = other RNA
gtttgggaacagctggaag

SEQ ID NO: 16349 - RNA, 19 nt, synthetic construct
  source 1..19: mol_type = other RNA
acagctggaagctctcccc

SEQ ID NO: 16350 - RNA, 19 nt, synthetic construct
  source 1..19: mol_type = other RNA
cagctggaagctctccccc

SEQ ID NO: 16351 - RNA, 19 nt, synthetic construct
  source 1..19: mol_type = other RNA
gctggaagctctccccctc

SEQ ID NO: 16352 - RNA, 19 nt, synthetic construct
  source 1..19: mol_type = other RNA
gaagctctccccctcctgc

SEQ ID NO: 16353 - RNA, 19 nt, synthetic construct
  source 1..19: mol_type = other RNA
cctccacggccccaccttc

SEQ ID NO: 16354 - RNA, 19 nt, synthetic construct
  source 1..19: mol_type = other RNA
ctccacggccccaccttcg

SEQ ID NO: 16355 - RNA, 19 nt, synthetic construct
  source 1..19: mol_type = other RNA
cggccccaccttcgccgcc

SEQ ID NO: 16356 - RNA, 19 nt, synthetic construct
  source 1..19: mol_type = other RNA
ggccccaccttcgccgcct

SEQ ID NO: 16357 - RNA, 19 nt, synthetic construct
  source 1..19: mol_type = other RNA
cacatgggggctgtgagtg

SEQ ID NO: 16358 - RNA, 19 nt, synthetic construct
  source 1..19: mol_type = other RNA
cgccattcaccttcaccac

SEQ ID NO: 16359 - RNA, 19 nt, synthetic construct
  source 1..19: mol_type = other RNA
attcaccttcaccaccgcc

SEQ ID NO: 16360 - RNA, 19 nt, synthetic construct
  source 1..19: mol_type = other RNA
accgcccagagcccggcct

SEQ ID NO: 16361 - RNA, 19 nt, synthetic construct
  source 1..19: mol_type = other RNA
cggcctgggaggcggagac

SEQ ID NO: 16362 - RNA, 19 nt, synthetic construct
  source 1..19: mol_type = other RNA
caccagccctcagccctcc

SEQ ID NO: 16363 - RNA, 19 nt, synthetic construct
  source 1..19: mol_type = other RNA
ccagccctcagccctccct

SEQ ID NO: 16364 - RNA, 19 nt, synthetic construct
  source 1..19: mol_type = other RNA
cctggcacaggtggggcag

SEQ ID NO: 16365 - RNA, 19 nt, synthetic construct
  source 1..19: mol_type = other RNA
cacagagctggagacggcc

SEQ ID NO: 16366 - RNA, 19 nt, synthetic construct
  source 1..19: mol_type = other RNA
acagagctggagacggcca

SEQ ID NO: 16367 - RNA, 19 nt, synthetic construct
  source 1..19: mol_type = other RNA
caccaccaccacccaggcc

SEQ ID NO: 16368 - RNA, 19 nt, synthetic construct
  source 1..19: mol_type = other RNA
gccagcaccacagcagtcc

SEQ ID NO: 16369 - RNA, 19 nt, synthetic construct
  source 1..19: mol_type = other RNA
ccagcactgagaagcacag

SEQ ID NO: 16370 - RNA, 19 nt, synthetic construct
  source 1..19: mol_type = other RNA
cagcactgagaagcacagc

SEQ ID NO: 16371 - RNA, 19 nt, synthetic construct
  source 1..19: mol_type = other RNA
cacccatcccctcttcctc

SEQ ID NO: 16372 - RNA, 19 nt, synthetic construct
  source 1..19: mol_type = other RNA
atcccctcttcctccctgg

SEQ ID NO: 16373 - RNA, 19 nt, synthetic construct
  source 1..19: mol_type = other RNA
cccctcttcctccctgggc

SEQ ID NO: 16374 - RNA, 19 nt, synthetic construct
  source 1..19: mol_type = other RNA
accaccaccacaactgtgg

SEQ ID NO: 16375 - RNA, 19 nt, synthetic construct
  source 1..19: mol_type = other RNA
gccccccagcagtccccac

SEQ ID NO: 16376 - RNA, 19 nt, synthetic construct
  source 1..19: mol_type = other RNA
acaccacggccacctccag

SEQ ID NO: 16377 - RNA, 19 nt, synthetic construct
  source 1..19: mol_type = other RNA
cggccaccgcctcctccac

SEQ ID NO: 16378 - RNA, 19 nt, synthetic construct
  source 1..19: mol_type = other RNA
ccagcactgagaagcacag

SEQ ID NO: 16379 - RNA, 19 nt, synthetic construct
  source 1..19: mol_type = other RNA
cagcactgagaagcacagc

SEQ ID NO: 16380 - RNA, 19 nt, synthetic construct
  source 1..19: mol_type = other RNA
tcccctcctcctccctggg

SEQ ID NO: 16381 - RNA, 19 nt, synthetic construct
  source 1..19: mol_type = other RNA
cctcctccctgggcaccac

SEQ ID NO: 16382 - RNA, 19 nt, synthetic construct
  source 1..19: mol_type = other RNA
accaccaccacaactgtgg

SEQ ID NO: 16383 - RNA, 19 nt, synthetic construct
  source 1..19: mol_type = other RNA
gtcccccagcagtccccac

SEQ ID NO: 16384 - RNA, 19 nt, synthetic construct
  source 1..19: mol_type = other RNA
ggaccacggccacggccac

SEQ ID NO: 16385 - RNA, 19 nt, synthetic construct
  source 1..19: mol_type = other RNA
acggccaccacacccacag

SEQ ID NO: 16386 - RNA, 19 nt, synthetic construct
  source 1..19: mol_type = other RNA
caaagccacttcctcctcc

SEQ ID NO: 16387 - RNA, 19 nt, synthetic construct
  source 1..19: mol_type = other RNA
tccacccctcctccactcc

SEQ ID NO: 16388 - RNA, 19 nt, synthetic construct
  source 1..19: mol_type = other RNA
cagagctgaccacagcagc

SEQ ID NO: 16389 - RNA, 19 nt, synthetic construct
  source 1..19: mol_type = other RNA
gagctgaccacagcagcca

SEQ ID NO: 16390 - RNA, 19 nt, synthetic construct
  source 1..19: mol_type = other RNA
agccactggccccacggcc

SEQ ID NO: 16391 - RNA, 19 nt, synthetic construct
  source 1..19: mol_type = other RNA
cggccaccgcctcctccac

SEQ ID NO: 16392 - RNA, 19 nt, synthetic construct
  source 1..19: mol_type = other RNA
ccagcactgagaagcacag

SEQ ID NO: 16393 - RNA, 19 nt, synthetic construct
  source 1..19: mol_type = other RNA
cagcactgagaagcacagc

SEQ ID NO: 16394 - RNA, 19 nt, synthetic construct
  source 1..19: mol_type = other RNA
atcccctcttcctccctgg

SEQ ID NO: 16395 - RNA, 19 nt, synthetic construct
  source 1..19: mol_type = other RNA
cccctcttcctccctgggc

SEQ ID NO: 16396 - RNA, 19 nt, synthetic construct
  source 1..19: mol_type = other RNA
ttaccaccacgaccaccac

SEQ ID NO: 16397 - RNA, 19 nt, synthetic construct
  source 1..19: mol_type = other RNA
accaccaccacaactgtgg

SEQ ID NO: 16398 - RNA, 19 nt, synthetic construct
  source 1..19: mol_type = other RNA
ggcggtccctgccccccag

SEQ ID NO: 16399 - RNA, 19 nt, synthetic construct
  source 1..19: mol_type = other RNA
gcggtccctgccccccagc

SEQ ID NO: 16400 - RNA, 19 nt, synthetic construct
  source 1..19: mol_type = other RNA
gccccccagcagtccccac

SEQ ID NO: 16401 - RNA, 19 nt, synthetic construct
  source 1..19: mol_type = other RNA
tccaggaccacagccacag

SEQ ID NO: 16402 - RNA, 19 nt, synthetic construct
  source 1..19: mol_type = other RNA
cggccaccgcctcctccac

SEQ ID NO: 16403 - RNA, 19 nt, synthetic construct
  source 1..19: mol_type = other RNA
ccagcactgagaagcacag

SEQ ID NO: 16404 - RNA, 19 nt, synthetic construct
  source 1..19: mol_type = other RNA
cagcactgagaagcacagc

SEQ ID NO: 16405 - RNA, 19 nt, synthetic construct
  source 1..19: mol_type = other RNA
tcccctcctcctccctggg

SEQ ID NO: 16406 - RNA, 19 nt, synthetic construct
  source 1..19: mol_type = other RNA
cctcctccctgggcaccac

SEQ ID NO: 16407 - RNA, 19 nt, synthetic construct
  source 1..19: mol_type = other RNA
caccccctcttccacccca

SEQ ID NO: 16408 - RNA, 19 nt, synthetic construct
  source 1..19: mol_type = other RNA
accaccaccacaactgtgg

SEQ ID NO: 16409 - RNA, 19 nt, synthetic construct
  source 1..19: mol_type = other RNA
gtcccccagcagtccccac

SEQ ID NO: 16410 - RNA, 19 nt, synthetic construct
  source 1..19: mol_type = other RNA
acaccacggccacctccag

SEQ ID NO: 16411 - RNA, 19 nt, synthetic construct
  source 1..19: mol_type = other RNA
ggaccacggccacggccac

SEQ ID NO: 16412 - RNA, 19 nt, synthetic construct
  source 1..19: mol_type = other RNA
gctgaccagcccggccacc

SEQ ID NO: 16413 - RNA, 19 nt, synthetic construct
  source 1..19: mol_type = other RNA
ccggccaccacacccacag

SEQ ID NO: 16414 - RNA, 19 nt, synthetic construct
  source 1..19: mol_type = other RNA
caaagccacttcctcctcc

SEQ ID NO: 16415 - RNA, 19 nt, synthetic construct
  source 1..19: mol_type = other RNA
acccatcccctcctccacc

SEQ ID NO: 16416 - RNA, 19 nt, synthetic construct
  source 1..19: mol_type = other RNA
tccacccctcctccactcc

SEQ ID NO: 16417 - RNA, 19 nt, synthetic construct
  source 1..19: mol_type = other RNA
cagagctgaccacagcagc

SEQ ID NO: 16418 - RNA, 19 nt, synthetic construct
  source 1..19: mol_type = other RNA
gagctgaccacagcagcca

SEQ ID NO: 16419 - RNA, 19 nt, synthetic construct
  source 1..19: mol_type = other RNA
agccactggccccacggcc

SEQ ID NO: 16420 - RNA, 19 nt, synthetic construct
  source 1..19: mol_type = other RNA
cggccaccgcctcctccac

SEQ ID NO: 16421 - RNA, 19 nt, synthetic construct
  source 1..19: mol_type = other RNA
actgcaactgcccttccag

SEQ ID NO: 16422 - RNA, 19 nt, synthetic construct
  source 1..19: mol_type = other RNA
ccagcactgagaagcacag

SEQ ID NO: 16423 - RNA, 19 nt, synthetic construct
  source 1..19: mol_type = other RNA
cagcactgagaagcacagc

SEQ ID NO: 16424 - RNA, 19 nt, synthetic construct
  source 1..19: mol_type = other RNA
tcccctcctcctccctggg

SEQ ID NO: 16425 - RNA, 19 nt, synthetic construct
  source 1..19: mol_type = other RNA
cctcctccctgggcaccac

SEQ ID NO: 16426 - RNA, 19 nt, synthetic construct
  source 1..19: mol_type = other RNA
accaccaccacaactgtgg

SEQ ID NO: 16427 - RNA, 19 nt, synthetic construct
  source 1..19: mol_type = other RNA
cacccatcaccccagtgct

SEQ ID NO: 16428 - RNA, 19 nt, synthetic construct
  source 1..19: mol_type = other RNA
caaagccacttcctcctcc

SEQ ID NO: 16429 - RNA, 19 nt, synthetic construct
  source 1..19: mol_type = other RNA
cacagccacaaaatccaca

SEQ ID NO: 16430 - RNA, 19 nt, synthetic construct
  source 1..19: mol_type = other RNA
acagccacaaaatccacag

SEQ ID NO: 16431 - RNA, 19 nt, synthetic construct
  source 1..19: mol_type = other RNA
acccatcccctcctccacc

SEQ ID NO: 16432 - RNA, 19 nt, synthetic construct
  source 1..19: mol_type = other RNA
ccctgtggaccacgtggac

SEQ ID NO: 16433 - RNA, 19 nt, synthetic construct
  source 1..19: mol_type = other RNA
tgaccaccacagccaccat

SEQ ID NO: 16434 - RNA, 19 nt, synthetic construct
  source 1..19: mol_type = other RNA
gaccaccacagccaccatg

SEQ ID NO: 16435 - RNA, 19 nt, synthetic construct
  source 1..19: mol_type = other RNA
cccacagccactgcctcca

SEQ ID NO: 16436 - RNA, 19 nt, synthetic construct
  source 1..19: mol_type = other RNA
ggtgcatgggaaggaggag

SEQ ID NO: 16437 - RNA, 19 nt, synthetic construct
  source 1..19: mol_type = other RNA
ggaggagggcctgatcctg

SEQ ID NO: 16438 - RNA, 19 nt, synthetic construct
  source 1..19: mol_type = other RNA
gccgccttgaggtgccctg

SEQ ID NO: 16439 - RNA, 19 nt, synthetic construct
  source 1..19: mol_type = other RNA
cccccagagcctgcctgtg

SEQ ID NO: 16440 - RNA, 19 nt, synthetic construct
  source 1..19: mol_type = other RNA
atcctgcccagatgtgtcc

SEQ ID NO: 16441 - RNA, 19 nt, synthetic construct
  source 1..19: mol_type = other RNA
ccatcctgtggcaccaggg

SEQ ID NO: 16442 - RNA, 19 nt, synthetic construct
  source 1..19: mol_type = other RNA
ccatggctcccccacacac

SEQ ID NO: 16443 - RNA, 19 nt, synthetic construct
  source 1..19: mol_type = other RNA
tccgtgctcctgctgccca

SEQ ID NO: 16444 - RNA, 19 nt, synthetic construct
  source 1..19: mol_type = other RNA
aggccagctgctgccagga

SEQ ID NO: 16445 - RNA, 19 nt, synthetic construct
  source 1..19: mol_type = other RNA
ggccagctgctgccaggaa

SEQ ID NO: 16446 - RNA, 19 nt, synthetic construct
  source 1..19: mol_type = other RNA
gccgcaggcagagacccag

SEQ ID NO: 16447 - RNA, 19 nt, synthetic construct
  source 1..19: mol_type = other RNA
ggtggggcagaaggtgcac

SEQ ID NO: 16448 - RNA, 19 nt, synthetic construct
  source 1..19: mol_type = other RNA
ggcttcacagtcaccccct

SEQ ID NO: 16449 - RNA, 19 nt, synthetic construct
  source 1..19: mol_type = other RNA
aacttcgacgacaatgcca

SEQ ID NO: 16450 - RNA, 19 nt, synthetic construct
  source 1..19: mol_type = other RNA
tgctgcagggtaactcagg

SEQ ID NO: 16451 - RNA, 19 nt, synthetic construct
  source 1..19: mol_type = other RNA
aacagccactacaactgca

SEQ ID NO: 16452 - RNA, 19 nt, synthetic construct
  source 1..19: mol_type = other RNA
cctgcatggtgactgcagc

SEQ ID NO: 16453 - RNA, 19 nt, synthetic construct
  source 1..19: mol_type = other RNA
tgccctgtgacgcccaggg

SEQ ID NO: 16454 - RNA, 19 nt, synthetic construct
  source 1..19: mol_type = other RNA
tgcaagcccctgccctgtg

SEQ ID NO: 16455 - RNA, 19 nt, synthetic construct
  source 1..19: mol_type = other RNA
gaccacccgcacccctgca

SEQ ID NO: 16456 - RNA, 19 nt, synthetic construct
  source 1..19: mol_type = other RNA
ggctctgtggccaccccct

SEQ ID NO: 16457 - RNA, 19 nt, synthetic construct
  source 1..19: mol_type = other RNA
ggctctgtggccaccccct

SEQ ID NO: 16458 - RNA, 19 nt, synthetic construct
  source 1..19: mol_type = other RNA
cccgggccacaccagggcc

SEQ ID NO: 16459 - RNA, 19 nt, synthetic construct
  source 1..19: mol_type = other RNA
ggctctgtggccaccccct

SEQ ID NO: 16460 - RNA, 19 nt, synthetic construct
  source 1..19: mol_type = other RNA
ggctctgtggccaccccct

SEQ ID NO: 16461 - RNA, 19 nt, synthetic construct
  source 1..19: mol_type = other RNA
ggctctgtggccaccccct

SEQ ID NO: 16462 - RNA, 19 nt, synthetic construct
  source 1..19: mol_type = other RNA
cctgtccatgcctgctgca

SEQ ID NO: 16463 - RNA, 19 nt, synthetic construct
  source 1..19: mol_type = other RNA
aagcctggagagaccatca

SEQ ID NO: 16464 - RNA, 19 nt, synthetic construct
  source 1..19: mol_type = other RNA
cactccagagactgcccac

SEQ ID NO: 16465 - RNA, 19 nt, synthetic construct
  source 1..19: mol_type = other RNA
cactccagagactgcccac

SEQ ID NO: 16466 - RNA, 19 nt, synthetic construct
  source 1..19: mol_type = other RNA
cacccaaggacccctgcac

SEQ ID NO: 16467 - RNA, 19 nt, synthetic construct
  source 1..19: mol_type = other RNA
ccccctcctgcccggacgc

SEQ ID NO: 16468 - RNA, 19 nt, synthetic construct
  source 1..19: mol_type = other RNA
gcaagcccctgccctgtga

SEQ ID NO: 16469 - RNA, 19 nt, synthetic construct
  source 1..19: mol_type = other RNA
ctgcagccactggatccac

SEQ ID NO: 16470 - RNA, 19 nt, synthetic construct
  source 1..19: mol_type = other RNA
atgggcagcgggaggagct

SEQ ID NO: 16471 - RNA, 19 nt, synthetic construct
  source 1..19: mol_type = other RNA
agcacacccacccccaccc

SEQ ID NO: 16472 - RNA, 19 nt, synthetic construct
  source 1..19: mol_type = other RNA
aggcccaggggctggtgct

SEQ ID NO: 16473 - RNA, 19 nt, synthetic construct
  source 1..19: mol_type = other RNA
tgggcagcgggaggagctg

SEQ ID NO: 16474 - RNA, 19 nt, synthetic construct
  source 1..19: mol_type = other RNA
gccgctggaggagctgggc

SEQ ID NO: 16475 - RNA, 19 nt, synthetic construct
  source 1..19: mol_type = other RNA
tagcacacccacccccacc

SEQ ID NO: 16476 - RNA, 19 nt, synthetic construct
  source 1..19: mol_type = other RNA
acacccacccccaccccat

SEQ ID NO: 16477 - RNA, 19 nt, synthetic construct
  source 1..19: mol_type = other RNA
ggacgccctggcacccaag

SEQ ID NO: 16478 - RNA, 19 nt, synthetic construct
  source 1..19: mol_type = other RNA
cacagtcatcagctccaga

SEQ ID NO: 16479 - RNA, 19 nt, synthetic construct
  source 1..19: mol_type = other RNA
ggccacacccagcaagacc

SEQ ID NO: 16480 - RNA, 19 nt, synthetic construct
  source 1..19: mol_type = other RNA
ggccacacccagcaagacc

SEQ ID NO: 16481 - RNA, 19 nt, synthetic construct
  source 1..19: mol_type = other RNA
agccacacccagcaagacc

SEQ ID NO: 16482 - RNA, 19 nt, synthetic construct
  source 1..19: mol_type = other RNA
ggccacacccagcaagacc

SEQ ID NO: 16483 - RNA, 19 nt, synthetic construct
  source 1..19: mol_type = other RNA
acacctcctctactccaga

SEQ ID NO: 16484 - RNA, 19 nt, synthetic construct
  source 1..19: mol_type = other RNA
ggtgaccccctcctccgtc

SEQ ID NO: 16485 - RNA, 19 nt, synthetic construct
  source 1..19: mol_type = other RNA
ccacacccgcagccaccag

SEQ ID NO: 16486 - RNA, 19 nt, synthetic construct
  source 1..19: mol_type = other RNA
ccacacccacagctaccag

SEQ ID NO: 16487 - RNA, 19 nt, synthetic construct
  source 1..19: mol_type = other RNA
ccacacccacagctaccag

SEQ ID NO: 16488 - RNA, 19 nt, synthetic construct
  source 1..19: mol_type = other RNA
aacagctccccctcccaaa

SEQ ID NO: 16489 - RNA, 19 nt, synthetic construct
  source 1..19: mol_type = other RNA
aacagctccccctcccaaa

SEQ ID NO: 16490 - RNA, 19 nt, synthetic construct
  source 1..19: mol_type = other RNA
aacagctccccctcccaaa

SEQ ID NO: 16491 - RNA, 19 nt, synthetic construct
  source 1..19: mol_type = other RNA
atgtttgacacctgcaact

SEQ ID NO: 16492 - RNA, 19 nt, synthetic construct
  source 1..19: mol_type = other RNA
cagcatcctccacggcccc

SEQ ID NO: 16493 - RNA, 19 nt, synthetic construct
  source 1..19: mol_type = other RNA
cacagtcaccagctccaaa

SEQ ID NO: 16494 - RNA, 19 nt, synthetic construct
  source 1..19: mol_type = other RNA
cacagtcaccagctccaaa

SEQ ID NO: 16495 - RNA, 19 nt, synthetic construct
  source 1..19: mol_type = other RNA
cacagtcaccagctccaaa

SEQ ID NO: 16496 - RNA, 19 nt, synthetic construct
  source 1..19: mol_type = other RNA
cacagtcaccagctccaaa

SEQ ID NO: 16497 - RNA, 19 nt, synthetic construct
  source 1..19: mol_type = other RNA
gagcccacagctggagggg

SEQ ID NO: 16498 - RNA, 19 nt, synthetic construct
  source 1..19: mol_type = other RNA
cccaccgccagtgtcctcc

SEQ ID NO: 16499 - RNA, 19 nt, synthetic construct
  source 1..19: mol_type = other RNA
ctagtgggctccaggcctg

SEQ ID NO: 16500 - RNA, 19 nt, synthetic construct
  source 1..19: mol_type = other RNA
gctgcctacgcccaggcct

SEQ ID NO: 16501 - RNA, 19 nt, synthetic construct
  source 1..19: mol_type = other RNA
cacccatcccctcctccac

SEQ ID NO: 16502 - RNA, 19 nt, synthetic construct
  source 1..19: mol_type = other RNA
cacccatcccctcctccac

SEQ ID NO: 16503 - RNA, 19 nt, synthetic construct
  source 1..19: mol_type = other RNA
gagggctcctgccccggag

SEQ ID NO: 16504 - RNA, 19 nt, synthetic construct
  source 1..19: mol_type = other RNA
caccccgtcctccacccca

SEQ ID NO: 16505 - RNA, 19 nt, synthetic construct
  source 1..19: mol_type = other RNA
caccccgtcctccacccca

SEQ ID NO: 16506 - RNA, 19 nt, synthetic construct
  source 1..19: mol_type = other RNA
caccccgtcctccacccca

SEQ ID NO: 16507 - RNA, 19 nt, synthetic construct
  source 1..19: mol_type = other RNA
caccccgtcctccacccca

SEQ ID NO: 16508 - RNA, 19 nt, synthetic construct
  source 1..19: mol_type = other RNA
caccccgtcctccacccca

SEQ ID NO: 16509 - RNA, 19 nt, synthetic construct
  source 1..19: mol_type = other RNA
agggctgcttctgccctga

SEQ ID NO: 16510 - RNA, 19 nt, synthetic construct
  source 1..19: mol_type = other RNA
gactggcgaggtgcaaccg

SEQ ID NO: 16511 - RNA, 19 nt, synthetic construct
  source 1..19: mol_type = other RNA
ggctccacggtgaccccct

SEQ ID NO: 16512 - RNA, 19 nt, synthetic construct
  source 1..19: mol_type = other RNA
ggttccacggtgaccccct

SEQ ID NO: 16513 - RNA, 19 nt, synthetic construct
  source 1..19: mol_type = other RNA
ggctccacggtgaccccct

SEQ ID NO: 16514 - RNA, 19 nt, synthetic construct
  source 1..19: mol_type = other RNA
ggctccacggtgaccccct

SEQ ID NO: 16515 - RNA, 19 nt, synthetic construct
  source 1..19: mol_type = other RNA
ggctccacggtgaccccct

SEQ ID NO: 16516 - RNA, 19 nt, synthetic construct
  source 1..19: mol_type = other RNA
gatatcgtcctcactgtca

SEQ ID NO: 16517 - RNA, 19 nt, synthetic construct
  source 1..19: mol_type = other RNA
gagtgccgggcggcgcagc

SEQ ID NO: 16518 - RNA, 19 nt, synthetic construct
  source 1..19: mol_type = other RNA
agctgggagaatgcagggc

SEQ ID NO: 16519 - RNA, 19 nt, synthetic construct
  source 1..19: mol_type = other RNA
gtcagcatccggctggtgc

SEQ ID NO: 16520 - RNA, 19 nt, synthetic construct
  source 1..19: mol_type = other RNA
gacctgcatggtgactgca

SEQ ID NO: 16521 - RNA, 19 nt, synthetic construct
  source 1..19: mol_type = other RNA
ccttctcgcgctgccactc

SEQ ID NO: 16522 - RNA, 19 nt, synthetic construct
  source 1..19: mol_type = other RNA
atcagggccgctggagggc

SEQ ID NO: 16523 - RNA, 19 nt, synthetic construct
  source 1..19: mol_type = other RNA
gtggggcagaaggtgcact

SEQ ID NO: 16524 - RNA, 19 nt, synthetic construct
  source 1..19: mol_type = other RNA
gacggggagcttgggcaca

SEQ ID NO: 16525 - RNA, 19 nt, synthetic construct
  source 1..19: mol_type = other RNA
cgcccgacaggcacagcca

SEQ ID NO: 16526 - RNA, 19 nt, synthetic construct
  source 1..19: mol_type = other RNA
cctgagaacagctccccct

SEQ ID NO: 16527 - RNA, 19 nt, synthetic construct
  source 1..19: mol_type = other RNA
accacggccaccacaaccg

SEQ ID NO: 16528 - RNA, 19 nt, synthetic construct
  source 1..19: mol_type = other RNA
ctcccaaagtgctgaccag

SEQ ID NO: 16529 - RNA, 19 nt, synthetic construct
  source 1..19: mol_type = other RNA
ccctcaaagtgctgaccag

SEQ ID NO: 16530 - RNA, 19 nt, synthetic construct
  source 1..19: mol_type = other RNA
ctcccaaagtgctgaccag

SEQ ID NO: 16531 - RNA, 19 nt, synthetic construct
  source 1..19: mol_type = other RNA
gccacggccaccacaaccg

SEQ ID NO: 16532 - RNA, 19 nt, synthetic construct
  source 1..19: mol_type = other RNA
cttcaatggccaagtcttc

SEQ ID NO: 16533 - RNA, 19 nt, synthetic construct
  source 1..19: mol_type = other RNA
agcagaaaggatggctgct

SEQ ID NO: 16534 - RNA, 19 nt, synthetic construct
  source 1..19: mol_type = other RNA
ggggatggcggagggctgc

SEQ ID NO: 16535 - RNA, 19 nt, synthetic construct
  source 1..19: mol_type = other RNA
gggcagacaggctggtcca

SEQ ID NO: 16536 - RNA, 19 nt, synthetic construct
  source 1..19: mol_type = other RNA
aggtcagagaggggtcagc

SEQ ID NO: 16537 - RNA, 19 nt, synthetic construct
  source 1..19: mol_type = other RNA
ccggctggtgctgacattc

SEQ ID NO: 16538 - RNA, 19 nt, synthetic construct
  source 1..19: mol_type = other RNA
cagggcggggcccacatct

SEQ ID NO: 16539 - RNA, 19 nt, synthetic construct
  source 1..19: mol_type = other RNA
gcccacatctccacctatg

SEQ ID NO: 16540 - RNA, 19 nt, synthetic construct
  source 1..19: mol_type = other RNA
atggtgtacctggactgca

SEQ ID NO: 16541 - RNA, 19 nt, synthetic construct
  source 1..19: mol_type = other RNA
agcgttacagccatcccct

SEQ ID NO: 16542 - RNA, 19 nt, synthetic construct
  source 1..19: mol_type = other RNA
cattgaccgcttccagggc

SEQ ID NO: 16543 - RNA, 19 nt, synthetic construct
  source 1..19: mol_type = other RNA
agccaccatgacaagggcc

SEQ ID NO: 16544 - RNA, 19 nt, synthetic construct
  source 1..19: mol_type = other RNA
cctccgccccgctgtcctc

SEQ ID NO: 16545 - RNA, 19 nt, synthetic construct
  source 1..19: mol_type = other RNA
tacctggacaaccactact

SEQ ID NO: 16546 - RNA, 19 nt, synthetic construct
  source 1..19: mol_type = other RNA
cagcagaaaggatggctgc

SEQ ID NO: 16547 - RNA, 19 nt, synthetic construct
  source 1..19: mol_type = other RNA
ccaccttggccttgcccct

SEQ ID NO: 16548 - RNA, 19 nt, synthetic construct
  source 1..19: mol_type = other RNA
gtccatgcctgctgcaggg

SEQ ID NO: 16549 - RNA, 19 nt, synthetic construct
  source 1..19: mol_type = other RNA
ccaaatccacagctaccag

SEQ ID NO: 16550 - RNA, 19 nt, synthetic construct
  source 1..19: mol_type = other RNA
agcagccactacaactgca

SEQ ID NO: 16551 - RNA, 19 nt, synthetic construct
  source 1..19: mol_type = other RNA
ccaaatccacagctaccag

SEQ ID NO: 16552 - RNA, 19 nt, synthetic construct
  source 1..19: mol_type = other RNA
agcagccactacaactgca

SEQ ID NO: 16553 - RNA, 19 nt, synthetic construct
  source 1..19: mol_type = other RNA
caaaatccacagctaccag

SEQ ID NO: 16554 - RNA, 19 nt, synthetic construct
  source 1..19: mol_type = other RNA
gctgtggggagtgcgtcca

SEQ ID NO: 16555 - RNA, 19 nt, synthetic construct
  source 1..19: mol_type = other RNA
gaggggtcagcatcccaaa

SEQ ID NO: 16556 - RNA, 19 nt, synthetic construct
  source 1..19: mol_type = other RNA
ctccctgcccgtccccgtc

SEQ ID NO: 16557 - RNA, 19 nt, synthetic construct
  source 1..19: mol_type = other RNA
ggtgccgcaggcagagacc

SEQ ID NO: 16558 - RNA, 19 nt, synthetic construct
  source 1..19: mol_type = other RNA
gagtgcgagtgcatctgca

SEQ ID NO: 16559 - RNA, 19 nt, synthetic construct
  source 1..19: mol_type = other RNA
tgtcccaccttccgctgca

SEQ ID NO: 16560 - RNA, 19 nt, synthetic construct
  source 1..19: mol_type = other RNA
ctggcacaccccccactgc

SEQ ID NO: 16561 - RNA, 19 nt, synthetic construct
  source 1..19: mol_type = other RNA
gaactgggagcaggagggc

SEQ ID NO: 16562 - RNA, 19 nt, synthetic construct
  source 1..19: mol_type = other RNA
agccagcaccgcttccaaa

SEQ ID NO: 16563 - RNA, 19 nt, synthetic construct
  source 1..19: mol_type = other RNA
caccacacccacaaccaga

SEQ ID NO: 16564 - RNA, 19 nt, synthetic construct
  source 1..19: mol_type = other RNA
caccacacccacaaccaga

SEQ ID NO: 16565 - RNA, 19 nt, synthetic construct
  source 1..19: mol_type = other RNA
caccctcctctactccaga

SEQ ID NO: 16566 - RNA, 19 nt, synthetic construct
  source 1..19: mol_type = other RNA
caccacacccacaaccaga

SEQ ID NO: 16567 - RNA, 19 nt, synthetic construct
  source 1..19: mol_type = other RNA
gaccacccacaccgccaga

SEQ ID NO: 16568 - RNA, 19 nt, synthetic construct
  source 1..19: mol_type = other RNA
ggacccctttcgggagggc

SEQ ID NO: 16569 - RNA, 19 nt, synthetic construct
  source 1..19: mol_type = other RNA
gcccccggacctgccccct

SEQ ID NO: 16570 - RNA, 19 nt, synthetic construct
  source 1..19: mol_type = other RNA
aacccacatgggggctgtg

SEQ ID NO: 16571 - RNA, 19 nt, synthetic construct
  source 1..19: mol_type = other RNA
aacaatggcaacctccaga

SEQ ID NO: 16572 - RNA, 19 nt, synthetic construct
  source 1..19: mol_type = other RNA
tgactaacaccaccaccag

SEQ ID NO: 16573 - RNA, 19 nt, synthetic construct
  source 1..19: mol_type = other RNA
ctaacaccaccaccagcca

SEQ ID NO: 16574 - RNA, 19 nt, synthetic construct
  source 1..19: mol_type = other RNA
caccaccaccagccagggc

SEQ ID NO: 16575 - RNA, 19 nt, synthetic construct
  source 1..19: mol_type = other RNA
caccgccaccacacctgca

SEQ ID NO: 16576 - RNA, 19 nt, synthetic construct
  source 1..19: mol_type = other RNA
cactcccttctccagtcca

SEQ ID NO: 16577 - RNA, 19 nt, synthetic construct
  source 1..19: mol_type = other RNA
caccgccaccacacctgca

SEQ ID NO: 16578 - RNA, 19 nt, synthetic construct
  source 1..19: mol_type = other RNA
agttccatgtccaccccct

SEQ ID NO: 16579 - RNA, 19 nt, synthetic construct
  source 1..19: mol_type = other RNA
caccgccaccacacctgca

SEQ ID NO: 16580 - RNA, 19 nt, synthetic construct
  source 1..19: mol_type = other RNA
cactcccttctccagtcca

SEQ ID NO: 16581 - RNA, 19 nt, synthetic construct
  source 1..19: mol_type = other RNA
caccgccaccacacctgca

SEQ ID NO: 16582 - RNA, 19 nt, synthetic construct
  source 1..19: mol_type = other RNA
ggctccaccaccaacccct

SEQ ID NO: 16583 - RNA, 19 nt, synthetic construct
  source 1..19: mol_type = other RNA
ggctccaccaccaacccct

SEQ ID NO: 16584 - RNA, 19 nt, synthetic construct
  source 1..19: mol_type = other RNA
ggctccaccaccaacccct

SEQ ID NO: 16585 - RNA, 19 nt, synthetic construct
  source 1..19: mol_type = other RNA
ggctccaccaccaacccct

SEQ ID NO: 16586 - RNA, 19 nt, synthetic construct
  source 1..19: mol_type = other RNA
ggctccaccaccaacccct

SEQ ID NO: 16587 - RNA, 19 nt, synthetic construct
  source 1..19: mol_type = other RNA
gcaggaaccggaggtggga

SEQ ID NO: 16588 - RNA, 19 nt, synthetic construct
  source 1..19: mol_type = other RNA
ccagatgtgtccagctgca

SEQ ID NO: 16589 - RNA, 19 nt, synthetic construct
  source 1..19: mol_type = other RNA
ctgtggagccgagctggga

SEQ ID NO: 16590 - RNA, 19 nt, synthetic construct
  source 1..19: mol_type = other RNA
cgcactggtggacagcact

SEQ ID NO: 16591 - RNA, 19 nt, synthetic construct
  source 1..19: mol_type = other RNA
ggcttcacagccaccccct

SEQ ID NO: 16592 - RNA, 19 nt, synthetic construct
  source 1..19: mol_type = other RNA
ggcttcacagccaccccct

SEQ ID NO: 16593 - RNA, 19 nt, synthetic construct
  source 1..19: mol_type = other RNA
gaccaccacaaccagggcc

SEQ ID NO: 16594 - RNA, 19 nt, synthetic construct
  source 1..19: mol_type = other RNA
ggcttcacagccaccccct

SEQ ID NO: 16595 - RNA, 19 nt, synthetic construct
  source 1..19: mol_type = other RNA
tggtgaccacgggctgtga

SEQ ID NO: 16596 - RNA, 19 nt, synthetic construct
  source 1..19: mol_type = other RNA
ctgtggccaccccctcttc

SEQ ID NO: 16597 - RNA, 19 nt, synthetic construct
  source 1..19: mol_type = other RNA
tggtgaccacgggctgtga

SEQ ID NO: 16598 - RNA, 19 nt, synthetic construct
  source 1..19: mol_type = other RNA
ggcttcacagccaccccct

SEQ ID NO: 16599 - RNA, 19 nt, synthetic construct
  source 1..19: mol_type = other RNA
ctacaactgcagccactgg

SEQ ID NO: 16600 - RNA, 19 nt, synthetic construct
  source 1..19: mol_type = other RNA
tgcatcagcgaccactgca

SEQ ID NO: 16601 - RNA, 19 nt, synthetic construct
  source 1..19: mol_type = other RNA
aaggcccaggggctggtgc

SEQ ID NO: 16602 - RNA, 19 nt, synthetic construct
  source 1..19: mol_type = other RNA
tctgccaccgcaccctgct

SEQ ID NO: 16603 - RNA, 19 nt, synthetic construct
  source 1..19: mol_type = other RNA
cacctgctctgtgcagggc

SEQ ID NO: 16604 - RNA, 19 nt, synthetic construct
  source 1..19: mol_type = other RNA
gcccaggctgcctgtgcca

SEQ ID NO: 16605 - RNA, 19 nt, synthetic construct
  source 1..19: mol_type = other RNA
acctgccccgcgggcacct

SEQ ID NO: 16606 - RNA, 19 nt, synthetic construct
  source 1..19: mol_type = other RNA
gaagctaagctgcctggga

SEQ ID NO: 16607 - RNA, 19 nt, synthetic construct
  source 1..19: mol_type = other RNA
tgcaacacctgcacctgca

SEQ ID NO: 16608 - RNA, 19 nt, synthetic construct
  source 1..19: mol_type = other RNA
ctacagctttgaaggcagc

SEQ ID NO: 16609 - RNA, 19 nt, synthetic construct
  source 1..19: mol_type = other RNA
tcttggcccaggactactg

SEQ ID NO: 16610 - RNA, 19 nt, synthetic construct
  source 1..19: mol_type = other RNA
ccccggccccaggcaccag

SEQ ID NO: 16611 - RNA, 19 nt, synthetic construct
  source 1..19: mol_type = other RNA
atccgggtcctctgctgca

SEQ ID NO: 16612 - RNA, 19 nt, synthetic construct
  source 1..19: mol_type = other RNA
accacccaggccctgttct

SEQ ID NO: 16613 - RNA, 19 nt, synthetic construct
  source 1..19: mol_type = other RNA
ttccagcactgagaagcac

SEQ ID NO: 16614 - RNA, 19 nt, synthetic construct
  source 1..19: mol_type = other RNA
ttccagcactgagaagcac

SEQ ID NO: 16615 - RNA, 19 nt, synthetic construct
  source 1..19: mol_type = other RNA
ctgcagccaccagcagcac

SEQ ID NO: 16616 - RNA, 19 nt, synthetic construct
  source 1..19: mol_type = other RNA
tcggccacctcaggcacct

SEQ ID NO: 16617 - RNA, 19 nt, synthetic construct
  source 1..19: mol_type = other RNA
cccgggaacagctccccct

SEQ ID NO: 16618 - RNA, 19 nt, synthetic construct
  source 1..19: mol_type = other RNA
cttcctcctccagtccaag

SEQ ID NO: 16619 - RNA, 19 nt, synthetic construct
  source 1..19: mol_type = other RNA
tccaccccctcctccactc

SEQ ID NO: 16620 - RNA, 19 nt, synthetic construct
  source 1..19: mol_type = other RNA
atcagctccagagccactc

SEQ ID NO: 16621 - RNA, 19 nt, synthetic construct
  source 1..19: mol_type = other RNA
ttccagcactgagaagcac

SEQ ID NO: 16622 - RNA, 19 nt, synthetic construct
  source 1..19: mol_type = other RNA
ctgcagccaccagcagcac

SEQ ID NO: 16623 - RNA, 19 nt, synthetic construct
  source 1..19: mol_type = other RNA
ttccagcactgagaagcac

SEQ ID NO: 16624 - RNA, 19 nt, synthetic construct
  source 1..19: mol_type = other RNA
ggccaccacaaccagggcc

SEQ ID NO: 16625 - RNA, 19 nt, synthetic construct
  source 1..19: mol_type = other RNA
ctgcagccaccagcagcac

SEQ ID NO: 16626 - RNA, 19 nt, synthetic construct
  source 1..19: mol_type = other RNA
tcggccacctcaggcacct

SEQ ID NO: 16627 - RNA, 19 nt, synthetic construct
  source 1..19: mol_type = other RNA
cccgggaacagctccccct

SEQ ID NO: 16628 - RNA, 19 nt, synthetic construct
  source 1..19: mol_type = other RNA
cttcctcctccagtccaag

SEQ ID NO: 16629 - RNA, 19 nt, synthetic construct
  source 1..19: mol_type = other RNA
tccaccccctcctccactc

SEQ ID NO: 16630 - RNA, 19 nt, synthetic construct
  source 1..19: mol_type = other RNA
gtccagggactgcaactgc

SEQ ID NO: 16631 - RNA, 19 nt, synthetic construct
  source 1..19: mol_type = other RNA
ttccagcactgagaagcac

SEQ ID NO: 16632 - RNA, 19 nt, synthetic construct
  source 1..19: mol_type = other RNA
tcaccccagtgctgaccag

SEQ ID NO: 16633 - RNA, 19 nt, synthetic construct
  source 1..19: mol_type = other RNA
cgcagccaccagctccaaa

SEQ ID NO: 16634 - RNA, 19 nt, synthetic construct
  source 1..19: mol_type = other RNA
cttcctcctccagtccaag

SEQ ID NO: 16635 - RNA, 19 nt, synthetic construct
  source 1..19: mol_type = other RNA
aacagctcacacccccaaa

SEQ ID NO: 16636 - RNA, 19 nt, synthetic construct
  source 1..19: mol_type = other RNA
cagccactgcctccacggt

SEQ ID NO: 16637 - RNA, 19 nt, synthetic construct
  source 1..19: mol_type = other RNA
gcatttggacagtttttct

SEQ ID NO: 16638 - RNA, 19 nt, synthetic construct
  source 1..19: mol_type = other RNA
gcacggcctctgccactgc

SEQ ID NO: 16639 - RNA, 19 nt, synthetic construct
  source 1..19: mol_type = other RNA
acaaccacctgcccccaga

SEQ ID NO: 16640 - RNA, 19 nt, synthetic construct
  source 1..19: mol_type = other RNA
ctgcacccaggaggagggc

SEQ ID NO: 16641 - RNA, 19 nt, synthetic construct
  source 1..19: mol_type = other RNA
caggaggagggcgactgct

SEQ ID NO: 16642 - RNA, 19 nt, synthetic construct
  source 1..19: mol_type = other RNA
cctgtccccagggctttga

SEQ ID NO: 16643 - RNA, 19 nt, synthetic construct
  source 1..19: mol_type = other RNA
tccaggcaaggccagctgc

SEQ ID NO: 16644 - RNA, 19 nt, synthetic construct
  source 1..19: mol_type = other RNA
ccaggcaaggccagctgct

SEQ ID NO: 16645 - RNA, 19 nt, synthetic construct
  source 1..19: mol_type = other RNA
caggcaaggccagctgctg

SEQ ID NO: 16646 - RNA, 19 nt, synthetic construct
  source 1..19: mol_type = other RNA
tgggcgggtgtgcagcacc

SEQ ID NO: 16647 - RNA, 19 nt, synthetic construct
  source 1..19: mol_type = other RNA
cccccggacctgccccctc

SEQ ID NO: 16648 - RNA, 19 nt, synthetic construct
  source 1..19: mol_type = other RNA
tacaagcctggagagacca

SEQ ID NO: 16649 - RNA, 19 nt, synthetic construct
  source 1..19: mol_type = other RNA
aacagctggaagctctccc

SEQ ID NO: 16650 - RNA, 19 nt, synthetic construct
  source 1..19: mol_type = other RNA
aagcccggccctcccggtc

SEQ ID NO: 16651 - RNA, 19 nt, synthetic construct
  source 1..19: mol_type = other RNA
acatgccgctggaggagct

SEQ ID NO: 16652 - RNA, 19 nt, synthetic construct
  source 1..19: mol_type = other RNA
catgccgctggaggagctg

SEQ ID NO: 16653 - RNA, 19 nt, synthetic construct
  source 1..19: mol_type = other RNA
atccacccctcctccactc

SEQ ID NO: 16654 - RNA, 19 nt, synthetic construct
  source 1..19: mol_type = other RNA
atccacccctcctccactc

SEQ ID NO: 16655 - RNA, 19 nt, synthetic construct
  source 1..19: mol_type = other RNA
gtccccagggctttgagta

SEQ ID NO: 16656 - RNA, 19 nt, synthetic construct
  source 1..19: mol_type = other RNA
caaggacccctgcacggcc

SEQ ID NO: 16657 - RNA, 19 nt, synthetic construct
  source 1..19: mol_type = other RNA
cctccccggccccaggcac

SEQ ID NO: 16658 - RNA, 19 nt, synthetic construct
  source 1..19: mol_type = other RNA
gcgatccctgtcccccagc

SEQ ID NO: 16659 - RNA, 19 nt, synthetic construct
  source 1..19: mol_type = other RNA
tcccgtcctccaccccggg

SEQ ID NO: 16660 - RNA, 19 nt, synthetic construct
  source 1..19: mol_type = other RNA
gcgatccctgtcccccagc

SEQ ID NO: 16661 - RNA, 19 nt, synthetic construct
  source 1..19: mol_type = other RNA
ccccgtcctccaccccggg

SEQ ID NO: 16662 - RNA, 19 nt, synthetic construct
  source 1..19: mol_type = other RNA
catgtttgacacctgcaac

SEQ ID NO: 16663 - RNA, 19 nt, synthetic construct
  source 1..19: mol_type = other RNA
ggaacagctggaagctctc

SEQ ID NO: 16664 - RNA, 19 nt, synthetic construct
  source 1..19: mol_type = other RNA
cagccaccggctccaccac

SEQ ID NO: 16665 - RNA, 19 nt, synthetic construct
  source 1..19: mol_type = other RNA
gaacagctggaagctctcc

SEQ ID NO: 16666 - RNA, 19 nt, synthetic construct
  source 1..19: mol_type = other RNA
catcctccacggccccacc

SEQ ID NO: 16667 - RNA, 19 nt, synthetic construct
  source 1..19: mol_type = other RNA
ccactccagagactgccca

SEQ ID NO: 16668 - RNA, 19 nt, synthetic construct
  source 1..19: mol_type = other RNA
cggccaccggctccaccac

SEQ ID NO: 16669 - RNA, 19 nt, synthetic construct
  source 1..19: mol_type = other RNA
tggtgaccatgggctgtga

SEQ ID NO: 16670 - RNA, 19 nt, synthetic construct
  source 1..19: mol_type = other RNA
cagccatcccctcctcctc

SEQ ID NO: 16671 - RNA, 19 nt, synthetic construct
  source 1..19: mol_type = other RNA
cggccaccggctccaccac

SEQ ID NO: 16672 - RNA, 19 nt, synthetic construct
  source 1..19: mol_type = other RNA
tggtgaccatgggctgtga

SEQ ID NO: 16673 - RNA, 19 nt, synthetic construct
  source 1..19: mol_type = other RNA
cagccatcccctcctcctc

SEQ ID NO: 16674 - RNA, 19 nt, synthetic construct
  source 1..19: mol_type = other RNA
ccactccagagactgccca

SEQ ID NO: 16675 - RNA, 19 nt, synthetic construct
  source 1..19: mol_type = other RNA
cggccaccggctccaccac

SEQ ID NO: 16676 - RNA, 19 nt, synthetic construct
  source 1..19: mol_type = other RNA
cagccatcccctcctcctc

SEQ ID NO: 16677 - RNA, 19 nt, synthetic construct
  source 1..19: mol_type = other RNA
cggccaccggctccaccac

SEQ ID NO: 16678 - RNA, 19 nt, synthetic construct
  source 1..19: mol_type = other RNA
tctttgctgagtgccacaa

SEQ ID NO: 16679 - RNA, 19 nt, synthetic construct
  source 1..19: mol_type = other RNA
tcctgcccagatgtgtcca

SEQ ID NO: 16680 - RNA, 19 nt, synthetic construct
  source 1..19: mol_type = other RNA
acccgtggcttcccggccc

SEQ ID NO: 16681 - RNA, 19 nt, synthetic construct
  source 1..19: mol_type = other RNA
atgggcgggtgtgcagcac

SEQ ID NO: 16682 - RNA, 19 nt, synthetic construct
  source 1..19: mol_type = other RNA
cgggtgtgcagcacctggg

SEQ ID NO: 16683 - RNA, 19 nt, synthetic construct
  source 1..19: mol_type = other RNA
gtgacttccactacaagac

SEQ ID NO: 16684 - RNA, 19 nt, synthetic construct
  source 1..19: mol_type = other RNA
cactacaagaccttcgacg

SEQ ID NO: 16685 - RNA, 19 nt, synthetic construct
  source 1..19: mol_type = other RNA
ggcccaggggctggtgctg

SEQ ID NO: 16686 - RNA, 19 nt, synthetic construct
  source 1..19: mol_type = other RNA
actggcctcctggtggagc

SEQ ID NO: 16687 - RNA, 19 nt, synthetic construct
  source 1..19: mol_type = other RNA
ctggcctcctggtggagca

SEQ ID NO: 16688 - RNA, 19 nt, synthetic construct
  source 1..19: mol_type = other RNA
agtgccctgctggagctgg

SEQ ID NO: 16689 - RNA, 19 nt, synthetic construct
  source 1..19: mol_type = other RNA
tcctgcacctgctccgggg

SEQ ID NO: 16690 - RNA, 19 nt, synthetic construct
  source 1..19: mol_type = other RNA
cctgcacctgctccggggg

SEQ ID NO: 16691 - RNA, 19 nt, synthetic construct
  source 1..19: mol_type = other RNA
ggcctggggctgcagctgc

SEQ ID NO: 16692 - RNA, 19 nt, synthetic construct
  source 1..19: mol_type = other RNA
gcctggggctgcagctgct

SEQ ID NO: 16693 - RNA, 19 nt, synthetic construct
  source 1..19: mol_type = other RNA
agcggggtggtggaggcca

SEQ ID NO: 16694 - RNA, 19 nt, synthetic construct
  source 1..19: mol_type = other RNA
gctgcctgtgccaatgcca

SEQ ID NO: 16695 - RNA, 19 nt, synthetic construct
  source 1..19: mol_type = other RNA
cgaactgcatgtttgacac

SEQ ID NO: 16696 - RNA, 19 nt, synthetic construct
  source 1..19: mol_type = other RNA
cctgccccgcgggcacctt

SEQ ID NO: 16697 - RNA, 19 nt, synthetic construct
  source 1..19: mol_type = other RNA
gcagcaacagctcggcggg

SEQ ID NO: 16698 - RNA, 19 nt, synthetic construct
  source 1..19: mol_type = other RNA
caagcctggagagaccatc

SEQ ID NO: 16699 - RNA, 19 nt, synthetic construct
  source 1..19: mol_type = other RNA
ttgggaacagctggaagct

SEQ ID NO: 16700 - RNA, 19 nt, synthetic construct
  source 1..19: mol_type = other RNA
tgggaacagctggaagctc

SEQ ID NO: 16701 - RNA, 19 nt, synthetic construct
  source 1..19: mol_type = other RNA
gggaacagctggaagctct

SEQ ID NO: 16702 - RNA, 19 nt, synthetic construct
  source 1..19: mol_type = other RNA
agctggaagctctccccct

SEQ ID NO: 16703 - RNA, 19 nt, synthetic construct
  source 1..19: mol_type = other RNA
cccctcctgcccggacgcc

SEQ ID NO: 16704 - RNA, 19 nt, synthetic construct
  source 1..19: mol_type = other RNA
ccaaggacccctgcacggc

SEQ ID NO: 16705 - RNA, 19 nt, synthetic construct
  source 1..19: mol_type = other RNA
gtgcagcatcctccacggc

SEQ ID NO: 16706 - RNA, 19 nt, synthetic construct
  source 1..19: mol_type = other RNA
gcagcatcctccacggccc

SEQ ID NO: 16707 - RNA, 19 nt, synthetic construct
  source 1..19: mol_type = other RNA
gcatcctccacggccccac

SEQ ID NO: 16708 - RNA, 19 nt, synthetic construct
  source 1..19: mol_type = other RNA
atcctccacggccccacct

SEQ ID NO: 16709 - RNA, 19 nt, synthetic construct
  source 1..19: mol_type = other RNA
acctgccccttgttctgtg

SEQ ID NO: 16710 - RNA, 19 nt, synthetic construct
  source 1..19: mol_type = other RNA
caagcccggccctcccggt

SEQ ID NO: 16711 - RNA, 19 nt, synthetic construct
  source 1..19: mol_type = other RNA
ccgctggaggagctgggcc

SEQ ID NO: 16712 - RNA, 19 nt, synthetic construct
  source 1..19: mol_type = other RNA
ctggaggagctgggccagc

SEQ ID NO: 16713 - RNA, 19 nt, synthetic construct
  source 1..19: mol_type = other RNA
ggaggagctgggccagcag

SEQ ID NO: 16714 - RNA, 19 nt, synthetic construct
  source 1..19: mol_type = other RNA
ccctccccggccccaggca

SEQ ID NO: 16715 - RNA, 19 nt, synthetic construct
  source 1..19: mol_type = other RNA
ccggccccaggcaccagcc

SEQ ID NO: 16716 - RNA, 19 nt, synthetic construct
  source 1..19: mol_type = other RNA
cggccccaggcaccagccc

SEQ ID NO: 16717 - RNA, 19 nt, synthetic construct
  source 1..19: mol_type = other RNA
ccagggctcccccggccag

SEQ ID NO: 16718 - RNA, 19 nt, synthetic construct
  source 1..19: mol_type = other RNA
ggcgcccctcacagccacc

SEQ ID NO: 16719 - RNA, 19 nt, synthetic construct
  source 1..19: mol_type = other RNA
cacggccaccccgacctcc

SEQ ID NO: 16720 - RNA, 19 nt, synthetic construct
  source 1..19: mol_type = other RNA
ccacacccacagtcaccag

SEQ ID NO: 16721 - RNA, 19 nt, synthetic construct
  source 1..19: mol_type = other RNA
tggccaccccctcctccac

SEQ ID NO: 16722 - RNA, 19 nt, synthetic construct
  source 1..19: mol_type = other RNA
ggccaccccctcctccacc

SEQ ID NO: 16723 - RNA, 19 nt, synthetic construct
  source 1..19: mol_type = other RNA
gccaccccctcctccaccc

SEQ ID NO: 16724 - RNA, 19 nt, synthetic construct
  source 1..19: mol_type = other RNA
ctgaccaccaccaccacaa

SEQ ID NO: 16725 - RNA, 19 nt, synthetic construct
  source 1..19: mol_type = other RNA
tgaccaccaccaccacaac

SEQ ID NO: 16726 - RNA, 19 nt, synthetic construct
  source 1..19: mol_type = other RNA
ccaccaccaccacaactgt

SEQ ID NO: 16727 - RNA, 19 nt, synthetic construct
  source 1..19: mol_type = other RNA
ctgaccaccaccgccacca

SEQ ID NO: 16728 - RNA, 19 nt, synthetic construct
  source 1..19: mol_type = other RNA
cgacacccacagtcaccag

SEQ ID NO: 16729 - RNA, 19 nt, synthetic construct
  source 1..19: mol_type = other RNA
catcccctcctcctccctg

SEQ ID NO: 16730 - RNA, 19 nt, synthetic construct
  source 1..19: mol_type = other RNA
tggccaccccctcctccac

SEQ ID NO: 16731 - RNA, 19 nt, synthetic construct
  source 1..19: mol_type = other RNA
ggccaccccctcctccacc

SEQ ID NO: 16732 - RNA, 19 nt, synthetic construct
  source 1..19: mol_type = other RNA
gccaccccctcctccaccc

SEQ ID NO: 16733 - RNA, 19 nt, synthetic construct
  source 1..19: mol_type = other RNA
ctgaccaccaccaccacaa

SEQ ID NO: 16734 - RNA, 19 nt, synthetic construct
  source 1..19: mol_type = other RNA
tgaccaccaccaccacaac

SEQ ID NO: 16735 - RNA, 19 nt, synthetic construct
  source 1..19: mol_type = other RNA
ccaccaccaccacaactgt

SEQ ID NO: 16736 - RNA, 19 nt, synthetic construct
  source 1..19: mol_type = other RNA
ctgaccaccaccgccacca

SEQ ID NO: 16737 - RNA, 19 nt, synthetic construct
  source 1..19: mol_type = other RNA
tcccacaccccagcagcaa

SEQ ID NO: 16738 - RNA, 19 nt, synthetic construct
  source 1..19: mol_type = other RNA
cccgtcctccaccccggga

SEQ ID NO: 16739 - RNA, 19 nt, synthetic construct
  source 1..19: mol_type = other RNA
atgtccaccccctcctcca

SEQ ID NO: 16740 - RNA, 19 nt, synthetic construct
  source 1..19: mol_type = other RNA
tggccaccccctcctccac

SEQ ID NO: 16741 - RNA, 19 nt, synthetic construct
  source 1..19: mol_type = other RNA
ggccaccccctcctccacc

SEQ ID NO: 16742 - RNA, 19 nt, synthetic construct
  source 1..19: mol_type = other RNA
gccaccccctcctccaccc

SEQ ID NO: 16743 - RNA, 19 nt, synthetic construct
  source 1..19: mol_type = other RNA
ctgaccaccaccaccacaa

SEQ ID NO: 16744 - RNA, 19 nt, synthetic construct
  source 1..19: mol_type = other RNA
tgaccaccaccaccacaac

SEQ ID NO: 16745 - RNA, 19 nt, synthetic construct
  source 1..19: mol_type = other RNA
ccaccaccaccacaactgt

SEQ ID NO: 16746 - RNA, 19 nt, synthetic construct
  source 1..19: mol_type = other RNA
ctgaccaccaccgccacca

SEQ ID NO: 16747 - RNA, 19 nt, synthetic construct
  source 1..19: mol_type = other RNA
tcccacaccccagcagcaa

SEQ ID NO: 16748 - RNA, 19 nt, synthetic construct
  source 1..19: mol_type = other RNA
ggaccacagccacagccac

SEQ ID NO: 16749 - RNA, 19 nt, synthetic construct
  source 1..19: mol_type = other RNA
gaccacagccacagccaca

SEQ ID NO: 16750 - RNA, 19 nt, synthetic construct
  source 1..19: mol_type = other RNA
cgacacccacagtcaccag

SEQ ID NO: 16751 - RNA, 19 nt, synthetic construct
  source 1..19: mol_type = other RNA
catcccctcctcctccctg

SEQ ID NO: 16752 - RNA, 19 nt, synthetic construct
  source 1..19: mol_type = other RNA
ctgaccaccaccaccacaa

SEQ ID NO: 16753 - RNA, 19 nt, synthetic construct
  source 1..19: mol_type = other RNA
tgaccaccaccaccacaac

SEQ ID NO: 16754 - RNA, 19 nt, synthetic construct
  source 1..19: mol_type = other RNA
ccaccaccaccacaactgt

SEQ ID NO: 16755 - RNA, 19 nt, synthetic construct
  source 1..19: mol_type = other RNA
ctgaccaccaccgccacca

SEQ ID NO: 16756 - RNA, 19 nt, synthetic construct
  source 1..19: mol_type = other RNA
tcccacaccccagcagcaa

SEQ ID NO: 16757 - RNA, 19 nt, synthetic construct
  source 1..19: mol_type = other RNA
cccgtcctccaccccggga

SEQ ID NO: 16758 - RNA, 19 nt, synthetic construct
  source 1..19: mol_type = other RNA
acccgtggccaccatgtcc

SEQ ID NO: 16759 - RNA, 19 nt, synthetic construct
  source 1..19: mol_type = other RNA
acgtccaccccctcctcca

SEQ ID NO: 16760 - RNA, 19 nt, synthetic construct
  source 1..19: mol_type = other RNA
cgacacccacagtcaccag

SEQ ID NO: 16761 - RNA, 19 nt, synthetic construct
  source 1..19: mol_type = other RNA
catcccctcctcctccctg

SEQ ID NO: 16762 - RNA, 19 nt, synthetic construct
  source 1..19: mol_type = other RNA
tggccaccccctcctccac

SEQ ID NO: 16763 - RNA, 19 nt, synthetic construct
  source 1..19: mol_type = other RNA
ggccaccccctcctccacc

SEQ ID NO: 16764 - RNA, 19 nt, synthetic construct
  source 1..19: mol_type = other RNA
gccaccccctcctccaccc

SEQ ID NO: 16765 - RNA, 19 nt, synthetic construct
  source 1..19: mol_type = other RNA
ctgaccaccaccaccacaa

SEQ ID NO: 16766 - RNA, 19 nt, synthetic construct
  source 1..19: mol_type = other RNA
tgaccaccaccaccacaac

SEQ ID NO: 16767 - RNA, 19 nt, synthetic construct
  source 1..19: mol_type = other RNA
ccaccaccaccacaactgt

SEQ ID NO: 16768 - RNA, 19 nt, synthetic construct
  source 1..19: mol_type = other RNA
ctgaccaccacagccacca

SEQ ID NO: 16769 - RNA, 19 nt, synthetic construct
  source 1..19: mol_type = other RNA
cctctgccactgccgctgc

SEQ ID NO: 16770 - RNA, 19 nt, synthetic construct
  source 1..19: mol_type = other RNA
ctctgccactgccgctgcc

SEQ ID NO: 16771 - RNA, 19 nt, synthetic construct
  source 1..19: mol_type = other RNA
cgcccgctgcccccgcgcc

SEQ ID NO: 16772 - RNA, 19 nt, synthetic construct
  source 1..19: mol_type = other RNA
gcggagggctgcttctgcc

SEQ ID NO: 16773 - RNA, 19 nt, synthetic construct
  source 1..19: mol_type = other RNA
tgccctgaggaccagatcc

SEQ ID NO: 16774 - RNA, 19 nt, synthetic construct
  source 1..19: mol_type = other RNA
tccgctgcagacctcagct

SEQ ID NO: 16775 - RNA, 19 nt, synthetic construct
  source 1..19: mol_type = other RNA
tgtccccagggctttgagt

SEQ ID NO: 16776 - RNA, 19 nt, synthetic construct
  source 1..19: mol_type = other RNA
tccccagggctttgagtac

SEQ ID NO: 16777 - RNA, 19 nt, synthetic construct
  source 1..19: mol_type = other RNA
gccagccagtccagctgaa

SEQ ID NO: 16778 - RNA, 19 nt, synthetic construct
  source 1..19: mol_type = other RNA
cccgtggcttcccggccca

SEQ ID NO: 16779 - RNA, 19 nt, synthetic construct
  source 1..19: mol_type = other RNA
ttgcccctccctgatgtca

SEQ ID NO: 16780 - RNA, 19 nt, synthetic construct
  source 1..19: mol_type = other RNA
cggccagcaccacagcagt

SEQ ID NO: 16781 - RNA, 19 nt, synthetic construct
  source 1..19: mol_type = other RNA
caccccctcctccactccg

SEQ ID NO: 16782 - RNA, 19 nt, synthetic construct
  source 1..19: mol_type = other RNA
caccccctcctccactccg

SEQ ID NO: 16783 - RNA, 19 nt, synthetic construct
  source 1..19: mol_type = other RNA
ctgcccgtccccgtccccc

SEQ ID NO: 16784 - RNA, 19 nt, synthetic construct
  source 1..19: mol_type = other RNA
ctggaagctctccccctcc

SEQ ID NO: 16785 - RNA, 19 nt, synthetic construct
  source 1..19: mol_type = other RNA
catcccctcttcctccctg

SEQ ID NO: 16786 - RNA, 19 nt, synthetic construct
  source 1..19: mol_type = other RNA
cagccatcccctcttcctc

SEQ ID NO: 16787 - RNA, 19 nt, synthetic construct
  source 1..19: mol_type = other RNA
catcccctcttcctccctg

SEQ ID NO: 16788 - RNA, 19 nt, synthetic construct
  source 1..19: mol_type = other RNA
tggaagctctccccctcct

SEQ ID NO: 16789 - RNA, 19 nt, synthetic construct
  source 1..19: mol_type = other RNA
gacaggcctggggctgcag

SEQ ID NO: 16790 - RNA, 19 nt, synthetic construct
  source 1..19: mol_type = other RNA
ctggctcctggagaggtgg

SEQ ID NO: 16791 - RNA, 19 nt, synthetic construct
  source 1..19: mol_type = other RNA
tcctccacggccccacctt

SEQ ID NO: 16792 - RNA, 19 nt, synthetic construct
  source 1..19: mol_type = other RNA
caccccctcctccacccca

SEQ ID NO: 16793 - RNA, 19 nt, synthetic construct
  source 1..19: mol_type = other RNA
caccccctcctccacccca

SEQ ID NO: 16794 - RNA, 19 nt, synthetic construct
  source 1..19: mol_type = other RNA
caccccctcctccacccca

SEQ ID NO: 16795 - RNA, 19 nt, synthetic construct
  source 1..19: mol_type = other RNA
caccccctcctccacccca

SEQ ID NO: 16796 - RNA, 19 nt, synthetic construct
  source 1..19: mol_type = other RNA
gcacacccacccccacccc

SEQ ID NO: 16797 - RNA, 19 nt, synthetic construct
  source 1..19: mol_type = other RNA
ggcccaggaggccactgct

SEQ ID NO: 16798 - RNA, 19 nt, synthetic construct
  source 1..19: mol_type = other RNA
accgccacggccaccacaa

SEQ ID NO: 16799 - RNA, 19 nt, synthetic construct
  source 1..19: mol_type = other RNA
accgccacggccaccacaa

SEQ ID NO: 16800 - RNA, 19 nt, synthetic construct
  source 1..19: mol_type = other RNA
atcctcacagagcccagca

SEQ ID NO: 16801 - RNA, 19 nt, synthetic construct
  source 1..19: mol_type = other RNA
accggctccaccaccaacc

SEQ ID NO: 16802 - RNA, 19 nt, synthetic construct
  source 1..19: mol_type = other RNA
accggctccaccaccaacc

SEQ ID NO: 16803 - RNA, 19 nt, synthetic construct
  source 1..19: mol_type = other RNA
accggctccaccaccaacc

SEQ ID NO: 16804 - RNA, 19 nt, synthetic construct
  source 1..19: mol_type = other RNA
accggctccaccaccaacc

SEQ ID NO: 16805 - RNA, 19 nt, synthetic construct
  source 1..19: mol_type = other RNA
accggctccaccaccaacc

SEQ ID NO: 16806 - RNA, 19 nt, synthetic construct
  source 1..19: mol_type = other RNA
gcggtgggtcagcaactgc

SEQ ID NO: 16807 - RNA, 19 nt, synthetic construct
  source 1..19: mol_type = other RNA
agacaggcctggggctgca

SEQ ID NO: 16808 - RNA, 19 nt, synthetic construct
  source 1..19: mol_type = other RNA
cccagagcccggcctggga

SEQ ID NO: 16809 - RNA, 19 nt, synthetic construct
  source 1..19: mol_type = other RNA
cctggggctgcagctgctg

SEQ ID NO: 16810 - RNA, 19 nt, synthetic construct
  source 1..19: mol_type = other RNA
ccatcccctcctcctccct

SEQ ID NO: 16811 - RNA, 19 nt, synthetic construct
  source 1..19: mol_type = other RNA
ccatcccctcctcctccct

SEQ ID NO: 16812 - RNA, 19 nt, synthetic construct
  source 1..19: mol_type = other RNA
ccatcccctcctcctccct

SEQ ID NO: 16813 - RNA, 19 nt, synthetic construct
  source 1..19: mol_type = other RNA
ccaaagagcatagagtgcc

SEQ ID NO: 16814 - RNA, 19 nt, synthetic construct
  source 1..19: mol_type = other RNA
agagcatagagtgccgggc

SEQ ID NO: 16815 - RNA, 19 nt, synthetic construct
  source 1..19: mol_type = other RNA
gaatactcacgccagtgcg

SEQ ID NO: 16816 - RNA, 19 nt, synthetic construct
  source 1..19: mol_type = other RNA
agaactaccccgaggtaag

SEQ ID NO: 16817 - RNA, 19 nt, synthetic construct
  source 1..19: mol_type = other RNA
gagaactaccccgaggtaa

SEQ ID NO: 16818 - RNA, 19 nt, synthetic construct
  source 1..19: mol_type = other RNA
ccagatcctcttcaacgca

SEQ ID NO: 16819 - RNA, 19 nt, synthetic construct
  source 1..19: mol_type = other RNA
cctggatcctcacaaagcc

SEQ ID NO: 16820 - RNA, 19 nt, synthetic construct
  source 1..19: mol_type = other RNA
gtcaagtccgcatcaacac

SEQ ID NO: 16821 - RNA, 19 nt, synthetic construct
  source 1..19: mol_type = other RNA
gcccctgcgtgggacccga

SEQ ID NO: 16822 - RNA, 19 nt, synthetic construct
  source 1..19: mol_type = other RNA
caaccgtcccggcttcgta

SEQ ID NO: 16823 - RNA, 19 nt, synthetic construct
  source 1..19: mol_type = other RNA
caaagtgtacaagccatgc

SEQ ID NO: 16824 - RNA, 19 nt, synthetic construct
  source 1..19: mol_type = other RNA
ataagaccgaccgagccgg

SEQ ID NO: 16825 - RNA, 19 nt, synthetic construct
  source 1..19: mol_type = other RNA
actctggggacgacccgga

SEQ ID NO: 16826 - RNA, 19 nt, synthetic construct
  source 1..19: mol_type = other RNA
cgagaactgcctgaaagcg

SEQ ID NO: 16827 - RNA, 19 nt, synthetic construct
  source 1..19: mol_type = other RNA
ggcggagaactaccccgag

SEQ ID NO: 16828 - RNA, 19 nt, synthetic construct
  source 1..19: mol_type = other RNA
cctacggggatggccactt

SEQ ID NO: 16829 - RNA, 19 nt, synthetic construct
  source 1..19: mol_type = other RNA
ccgggcggagaactacccc

SEQ ID NO: 16830 - RNA, 19 nt, synthetic construct
  source 1..19: mol_type = other RNA
agagtgccgggcggagaac

SEQ ID NO: 16831 - RNA, 19 nt, synthetic construct
  source 1..19: mol_type = other RNA
aaagagcatagagtgccgg

SEQ ID NO: 16832 - RNA, 19 nt, synthetic construct
  source 1..19: mol_type = other RNA
gtgccgggcggagaactac

SEQ ID NO: 16833 - RNA, 19 nt, synthetic construct
  source 1..19: mol_type = other RNA
tgccgggcggagaactacc

SEQ ID NO: 16834 - RNA, 19 nt, synthetic construct
  source 1..19: mol_type = other RNA
caaagagcatagagtgccg

SEQ ID NO: 16835 - RNA, 19 nt, synthetic construct
  source 1..19: mol_type = other RNA
gccgggcggagaactaccc

SEQ ID NO: 16836 - RNA, 19 nt, synthetic construct
  source 1..19: mol_type = other RNA
agcatagagtgccgggcgg

SEQ ID NO: 16837 - RNA, 19 nt, synthetic construct
  source 1..19: mol_type = other RNA
cgggcggagaactaccccg

SEQ ID NO: 16838 - RNA, 19 nt, synthetic construct
  source 1..19: mol_type = other RNA
tcaacatgtgcttcaacta

SEQ ID NO: 16839 - RNA, 19 nt, synthetic construct
  source 1..19: mol_type = other RNA
ccagtggcatccagtgcgc

SEQ ID NO: 16840 - RNA, 19 nt, synthetic construct
  source 1..19: mol_type = other RNA
aggcggggacatggaaact

SEQ ID NO: 16841 - RNA, 19 nt, synthetic construct
  source 1..19: mol_type = other RNA
gcaccaaagagcatagagt

SEQ ID NO: 16842 - RNA, 19 nt, synthetic construct
  source 1..19: mol_type = other RNA
aagagcatagagtgccggg

SEQ ID NO: 16843 - RNA, 19 nt, synthetic construct
  source 1..19: mol_type = other RNA
gagcatagagtgccgggcg

SEQ ID NO: 16844 - RNA, 19 nt, synthetic construct
  source 1..19: mol_type = other RNA
gagtgccgggcggagaact

SEQ ID NO: 16845 - RNA, 19 nt, synthetic construct
  source 1..19: mol_type = other RNA
agtgccgggcggagaacta

SEQ ID NO: 16846 - RNA, 19 nt, synthetic construct
  source 1..19: mol_type = other RNA
accagacaggcaggttcaa

SEQ ID NO: 16847 - RNA, 19 nt, synthetic construct
  source 1..19: mol_type = other RNA
aggcaggttcaacatgtgc

SEQ ID NO: 16848 - RNA, 19 nt, synthetic construct
  source 1..19: mol_type = other RNA
caacatgtgcttcaactac

SEQ ID NO: 16849 - RNA, 19 nt, synthetic construct
  source 1..19: mol_type = other RNA
tgctgtgacgactacagcc

SEQ ID NO: 16850 - RNA, 19 nt, synthetic construct
  source 1..19: mol_type = other RNA
ctgtgacgactacagccac

SEQ ID NO: 16851 - RNA, 19 nt, synthetic construct
  source 1..19: mol_type = other RNA
gacgactacagccactgcc

SEQ ID NO: 16852 - RNA, 19 nt, synthetic construct
  source 1..19: mol_type = other RNA
tgggcaccaaagagcatag

SEQ ID NO: 16853 - RNA, 19 nt, synthetic construct
  source 1..19: mol_type = other RNA
ggcaagatgtgctgggcac

SEQ ID NO: 16854 - RNA, 19 nt, synthetic construct
  source 1..19: mol_type = other RNA
gggcaccaaagagcataga

SEQ ID NO: 16855 - RNA, 19 nt, synthetic construct
  source 1..19: mol_type = other RNA
cctgccagccccggtgtca

SEQ ID NO: 16856 - RNA, 19 nt, synthetic construct
  source 1..19: mol_type = other RNA
gaccagacaggcaggttca

SEQ ID NO: 16857 - RNA, 19 nt, synthetic construct
  source 1..19: mol_type = other RNA
tgctgggggcaagatgtgc

SEQ ID NO: 16858 - RNA, 19 nt, synthetic construct
  source 1..19: mol_type = other RNA
gggcaagatgtgctgggca

SEQ ID NO: 16859 - RNA, 19 nt, synthetic construct
  source 1..19: mol_type = other RNA
gctgctgggggcaagatgt

SEQ ID NO: 16860 - RNA, 19 nt, synthetic construct
  source 1..19: mol_type = other RNA
ctgctgggggcaagatgtg

SEQ ID NO: 16861 - RNA, 19 nt, synthetic construct
  source 1..19: mol_type = other RNA
gctgtgacgactacagcca

SEQ ID NO: 16862 - RNA, 19 nt, synthetic construct
  source 1..19: mol_type = other RNA
tgtgacgactacagccact

SEQ ID NO: 16863 - RNA, 19 nt, synthetic construct
  source 1..19: mol_type = other RNA
ctgtttcagcacacactgc

SEQ ID NO: 16864 - RNA, 19 nt, synthetic construct
  source 1..19: mol_type = other RNA
ggcccagtgtggctgctac

SEQ ID NO: 16865 - RNA, 19 nt, synthetic construct
  source 1..19: mol_type = other RNA
caggcggggacatggaaac

SEQ ID NO: 16866 - RNA, 19 nt, synthetic construct
  source 1..19: mol_type = other RNA
cagacaggcaggttcaaca

SEQ ID NO: 16867 - RNA, 19 nt, synthetic construct
  source 1..19: mol_type = other RNA
gacaggcaggttcaacatg

SEQ ID NO: 16868 - RNA, 19 nt, synthetic construct
  source 1..19: mol_type = other RNA
caggcaggttcaacatgtg

SEQ ID NO: 16869 - RNA, 19 nt, synthetic construct
  source 1..19: mol_type = other RNA
aggttcaacatgtgcttca

SEQ ID NO: 16870 - RNA, 19 nt, synthetic construct
  source 1..19: mol_type = other RNA
gttcaacatgtgcttcaac

SEQ ID NO: 16871 - RNA, 19 nt, synthetic construct
  source 1..19: mol_type = other RNA
accaaagagcatagagtgc

SEQ ID NO: 16872 - RNA, 19 nt, synthetic construct
  source 1..19: mol_type = other RNA
gaaaacatcagggctgctg

SEQ ID NO: 16873 - RNA, 19 nt, synthetic construct
  source 1..19: mol_type = other RNA
ctgccagccccggtgtcag

SEQ ID NO: 16874 - RNA, 19 nt, synthetic construct
  source 1..19: mol_type = other RNA
tgtgctgggcaccaaagag

SEQ ID NO: 16875 - RNA, 19 nt, synthetic construct
  source 1..19: mol_type = other RNA
acaggcaggttcaacatgt

SEQ ID NO: 16876 - RNA, 19 nt, synthetic construct
  source 1..19: mol_type = other RNA
ggttcaacatgtgcttcaa

SEQ ID NO: 16877 - RNA, 19 nt, synthetic construct
  source 1..19: mol_type = other RNA
gagctgccttacagccgca

SEQ ID NO: 16878 - RNA, 19 nt, synthetic construct
  source 1..19: mol_type = other RNA
actgcagctacgttctgtc

SEQ ID NO: 16879 - RNA, 19 nt, synthetic construct
  source 1..19: mol_type = other RNA
ggaggggacgttgagtcct

SEQ ID NO: 16880 - RNA, 19 nt, synthetic construct
  source 1..19: mol_type = other RNA
tgagaactacgcccggcac

SEQ ID NO: 16881 - RNA, 19 nt, synthetic construct
  source 1..19: mol_type = other RNA
caccctgttcacaccctcg

SEQ ID NO: 16882 - RNA, 19 nt, synthetic construct
  source 1..19: mol_type = other RNA
gtttcagcaagaacggcgt

SEQ ID NO: 16883 - RNA, 19 nt, synthetic construct
  source 1..19: mol_type = other RNA
atccagtgcgctcacagcc

SEQ ID NO: 16884 - RNA, 19 nt, synthetic construct
  source 1..19: mol_type = other RNA
tttgttccacccgtcactg

SEQ ID NO: 16885 - RNA, 19 nt, synthetic construct
  source 1..19: mol_type = other RNA
gcagtgcccctgcacccac

SEQ ID NO: 16886 - RNA, 19 nt, synthetic construct
  source 1..19: mol_type = other RNA
gcccctgtcggcagccaac

SEQ ID NO: 16887 - RNA, 19 nt, synthetic construct
  source 1..19: mol_type = other RNA
ggaggggccgtctgtgagc

SEQ ID NO: 16888 - RNA, 19 nt, synthetic construct
  source 1..19: mol_type = other RNA
ggaggggccgtctgtgagc

SEQ ID NO: 16889 - RNA, 19 nt, synthetic construct
  source 1..19: mol_type = other RNA
ggaggggccgtctgtgagc

SEQ ID NO: 16890 - RNA, 19 nt, synthetic construct
  source 1..19: mol_type = other RNA
gaacctgcagaagttggat

SEQ ID NO: 16891 - RNA, 19 nt, synthetic construct
  source 1..19: mol_type = other RNA
gcagtgcccggacccgctg

SEQ ID NO: 16892 - RNA, 19 nt, synthetic construct
  source 1..19: mol_type = other RNA
gatgtgctacaactacagg

SEQ ID NO: 16893 - RNA, 19 nt, synthetic construct
  source 1..19: mol_type = other RNA
gaggagctgccttacagcc

SEQ ID NO: 16894 - RNA, 19 nt, synthetic construct
  source 1..19: mol_type = other RNA
ggagaactgccagagctgt

SEQ ID NO: 16895 - RNA, 19 nt, synthetic construct
  source 1..19: mol_type = other RNA
ttctgccccccaggcacgg

SEQ ID NO: 16896 - RNA, 19 nt, synthetic construct
  source 1..19: mol_type = other RNA
ttcaacatgtgcttcaact

SEQ ID NO: 16897 - RNA, 19 nt, synthetic construct
  source 1..19: mol_type = other RNA
cgagaacatcccctgtggg

SEQ ID NO: 16898 - RNA, 19 nt, synthetic construct
  source 1..19: mol_type = other RNA
gtggcccagtgtggctgct

SEQ ID NO: 16899 - RNA, 19 nt, synthetic construct
  source 1..19: mol_type = other RNA
gctggaccccgcccaccag

SEQ ID NO: 16900 - RNA, 19 nt, synthetic construct
  source 1..19: mol_type = other RNA
ccctgctggggccggcctt

SEQ ID NO: 16901 - RNA, 19 nt, synthetic construct
  source 1..19: mol_type = other RNA
gccttcaacgagttctatg

SEQ ID NO: 16902 - RNA, 19 nt, synthetic construct
  source 1..19: mol_type = other RNA
gtttcagcacacactgcgt

SEQ ID NO: 16903 - RNA, 19 nt, synthetic construct
  source 1..19: mol_type = other RNA
ccagtgcgcccacgcgggg

SEQ ID NO: 16904 - RNA, 19 nt, synthetic construct
  source 1..19: mol_type = other RNA
tctgcagggcatttggaca

SEQ ID NO: 16905 - RNA, 19 nt, synthetic construct
  source 1..19: mol_type = other RNA
tgtcagtggacagagtggt

SEQ ID NO: 16906 - RNA, 19 nt, synthetic construct
  source 1..19: mol_type = other RNA
tgggtcccccactccacga

SEQ ID NO: 16907 - RNA, 19 nt, synthetic construct
  source 1..19: mol_type = other RNA
ccccgaggtaagcatcgac

SEQ ID NO: 16908 - RNA, 19 nt, synthetic construct
  source 1..19: mol_type = other RNA
actaccccgaggtaagcat

SEQ ID NO: 16909 - RNA, 19 nt, synthetic construct
  source 1..19: mol_type = other RNA
ctaccccgaggtaagcatc

SEQ ID NO: 16910 - RNA, 19 nt, synthetic construct
  source 1..19: mol_type = other RNA
accccgaggtaagcatcga

SEQ ID NO: 16911 - RNA, 19 nt, synthetic construct
  source 1..19: mol_type = other RNA
acaaccagagggacgactg

SEQ ID NO: 16912 - RNA, 19 nt, synthetic construct
  source 1..19: mol_type = other RNA
aactaccccgaggtaagca

SEQ ID NO: 16913 - RNA, 19 nt, synthetic construct
  source 1..19: mol_type = other RNA
gcggagaactaccccgagg

SEQ ID NO: 16914 - RNA, 19 nt, synthetic construct
  source 1..19: mol_type = other RNA
cggagaactaccccgaggt

SEQ ID NO: 16915 - RNA, 19 nt, synthetic construct
  source 1..19: mol_type = other RNA
gaactaccccgaggtaagc

SEQ ID NO: 16916 - RNA, 19 nt, synthetic construct
  source 1..19: mol_type = other RNA
acctgcagcctggagacgg

SEQ ID NO: 16917 - RNA, 19 nt, synthetic construct
  source 1..19: mol_type = other RNA
cccgaggtaagcatcgacc

SEQ ID NO: 16918 - RNA, 19 nt, synthetic construct
  source 1..19: mol_type = other RNA
gggacgacctggatcctca

SEQ ID NO: 16919 - RNA, 19 nt, synthetic construct
  source 1..19: mol_type = other RNA
gggacgacctggatcctca

SEQ ID NO: 16920 - RNA, 19 nt, synthetic construct
  source 1..19: mol_type = other RNA
gggacgacctggatcctca

SEQ ID NO: 16921 - RNA, 19 nt, synthetic construct
  source 1..19: mol_type = other RNA
gggacgacctggatcctca

SEQ ID NO: 16922 - RNA, 19 nt, synthetic construct
  source 1..19: mol_type = other RNA
gggacgacctggatcctca

SEQ ID NO: 16923 - RNA, 19 nt, synthetic construct
  source 1..19: mol_type = other RNA
gggacgacctggatcctca

SEQ ID NO: 16924 - RNA, 19 nt, synthetic construct
  source 1..19: mol_type = other RNA
gggacgacctggatcctca

SEQ ID NO: 16925 - RNA, 19 nt, synthetic construct
  source 1..19: mol_type = other RNA
tgctcaacccagcccagtt

SEQ ID NO: 16926 - RNA, 19 nt, synthetic construct
  source 1..19: mol_type = other RNA
taccccgaggtaagcatcg

SEQ ID NO: 16927 - RNA, 19 nt, synthetic construct
  source 1..19: mol_type = other RNA
ccacagccaccagttccaa

SEQ ID NO: 16928 - RNA, 19 nt, synthetic construct
  source 1..19: mol_type = other RNA
ccacagccaccagttccaa

SEQ ID NO: 16929 - RNA, 19 nt, synthetic construct
  source 1..19: mol_type = other RNA
gtcactgggacgccctgga

SEQ ID NO: 16930 - RNA, 19 nt, synthetic construct
  source 1..19: mol_type = other RNA
ggagaactaccccgaggta

SEQ ID NO: 16931 - RNA, 19 nt, synthetic construct
  source 1..19: mol_type = other RNA
caaagtgtcggacccgagc

SEQ ID NO: 16932 - RNA, 19 nt, synthetic construct
  source 1..19: mol_type = other RNA
ggggacgacctggatcctc

SEQ ID NO: 16933 - RNA, 19 nt, synthetic construct
  source 1..19: mol_type = other RNA
ggggacgacctggatcctc

SEQ ID NO: 16934 - RNA, 19 nt, synthetic construct
  source 1..19: mol_type = other RNA
ggggacgacctggatcctc

SEQ ID NO: 16935 - RNA, 19 nt, synthetic construct
  source 1..19: mol_type = other RNA
ggggacgacctggatcctc

SEQ ID NO: 16936 - RNA, 19 nt, synthetic construct
  source 1..19: mol_type = other RNA
ggggacgacctggatcctc

SEQ ID NO: 16937 - RNA, 19 nt, synthetic construct
  source 1..19: mol_type = other RNA
ggggacgacctggatcctc

SEQ ID NO: 16938 - RNA, 19 nt, synthetic construct
  source 1..19: mol_type = other RNA
gatgtgcttcaactatgaa

SEQ ID NO: 16939 - RNA, 19 nt, synthetic construct
  source 1..19: mol_type = other RNA
gatgtgcttcaactatgaa

SEQ ID NO: 16940 - RNA, 19 nt, synthetic construct
  source 1..19: mol_type = other RNA
gatgtgcttcaactatgaa

SEQ ID NO: 16941 - RNA, 19 nt, synthetic construct
  source 1..19: mol_type = other RNA
gatgtgcttcaactatgaa

SEQ ID NO: 16942 - RNA, 19 nt, synthetic construct
  source 1..19: mol_type = other RNA
ccctcctccactctgggga

SEQ ID NO: 16943 - RNA, 19 nt, synthetic construct
  source 1..19: mol_type = other RNA
cctcctccactctggggac

SEQ ID NO: 16944 - RNA, 19 nt, synthetic construct
  source 1..19: mol_type = other RNA
cacccgtgttgtcatcaag

SEQ ID NO: 16945 - RNA, 19 nt, synthetic construct
  source 1..19: mol_type = other RNA
caaagtgctgactaccaca

SEQ ID NO: 16946 - RNA, 19 nt, synthetic construct
  source 1..19: mol_type = other RNA
ccacagtgcttaccaccac

SEQ ID NO: 16947 - RNA, 19 nt, synthetic construct
  source 1..19: mol_type = other RNA
ccacagtgcttaccaccac

SEQ ID NO: 16948 - RNA, 19 nt, synthetic construct
  source 1..19: mol_type = other RNA
agccactacgactgcatcc

SEQ ID NO: 16949 - RNA, 19 nt, synthetic construct
  source 1..19: mol_type = other RNA
ggctgacctgcaagaacga

SEQ ID NO: 16950 - RNA, 19 nt, synthetic construct
  source 1..19: mol_type = other RNA
ccactacgactgcgtccac

SEQ ID NO: 16951 - RNA, 19 nt, synthetic construct
  source 1..19: mol_type = other RNA
ccactacgactgcgtccac

SEQ ID NO: 16952 - RNA, 19 nt, synthetic construct
  source 1..19: mol_type = other RNA
catcgaccaggtcgggcag

SEQ ID NO: 16953 - RNA, 19 nt, synthetic construct
  source 1..19: mol_type = other RNA
taagcatcgaccaggtcgg

SEQ ID NO: 16954 - RNA, 19 nt, synthetic construct
  source 1..19: mol_type = other RNA
gaacgaagaccagacaggc

SEQ ID NO: 16955 - RNA, 19 nt, synthetic construct
  source 1..19: mol_type = other RNA
ctacaacgtgcgtgtgctt

SEQ ID NO: 16956 - RNA, 19 nt, synthetic construct
  source 1..19: mol_type = other RNA
gctgacctgcaagaacgaa

SEQ ID NO: 16957 - RNA, 19 nt, synthetic construct
  source 1..19: mol_type = other RNA
actacaacgtgcgtgtgct

SEQ ID NO: 16958 - RNA, 19 nt, synthetic construct
  source 1..19: mol_type = other RNA
gtgctttgctgtgacgact

SEQ ID NO: 16959 - RNA, 19 nt, synthetic construct
  source 1..19: mol_type = other RNA
acaacagccactacgactg

SEQ ID NO: 16960 - RNA, 19 nt, synthetic construct
  source 1..19: mol_type = other RNA
acaacagccactacgactg

SEQ ID NO: 16961 - RNA, 19 nt, synthetic construct
  source 1..19: mol_type = other RNA
caactacaacgtgcgtgtg

SEQ ID NO: 16962 - RNA, 19 nt, synthetic construct
  source 1..19: mol_type = other RNA
aactacaacgtgcgtgtgc

SEQ ID NO: 16963 - RNA, 19 nt, synthetic construct
  source 1..19: mol_type = other RNA
cctcaactccggggacgac

SEQ ID NO: 16964 - RNA, 19 nt, synthetic construct
  source 1..19: mol_type = other RNA
cctcaactccggggacgac

SEQ ID NO: 16965 - RNA, 19 nt, synthetic construct
  source 1..19: mol_type = other RNA
aggtaagcatcgaccaggt

SEQ ID NO: 16966 - RNA, 19 nt, synthetic construct
  source 1..19: mol_type = other RNA
gcactcgactccagccctg

SEQ ID NO: 16967 - RNA, 19 nt, synthetic construct
  source 1..19: mol_type = other RNA
gcactcgactccagccctg

SEQ ID NO: 16968 - RNA, 19 nt, synthetic construct
  source 1..19: mol_type = other RNA
gcactcgactccagccctg

SEQ ID NO: 16969 - RNA, 19 nt, synthetic construct
  source 1..19: mol_type = other RNA
agccactacgactgcgtcc

SEQ ID NO: 16970 - RNA, 19 nt, synthetic construct
  source 1..19: mol_type = other RNA
agccactacgactgcgtcc

SEQ ID NO: 16971 - RNA, 19 nt, synthetic construct
  source 1..19: mol_type = other RNA
cacaaagccgaccacaaca

SEQ ID NO: 16972 - RNA, 19 nt, synthetic construct
  source 1..19: mol_type = other RNA
tacgactgcgtccactgga

SEQ ID NO: 16973 - RNA, 19 nt, synthetic construct
  source 1..19: mol_type = other RNA
tacgactgcgtccactgga

SEQ ID NO: 16974 - RNA, 19 nt, synthetic construct
  source 1..19: mol_type = other RNA
ggatcctcacaaagccgac

SEQ ID NO: 16975 - RNA, 19 nt, synthetic construct
  source 1..19: mol_type = other RNA
aagaacgaagaccagacag

SEQ ID NO: 16976 - RNA, 19 nt, synthetic construct
  source 1..19: mol_type = other RNA
tcaactccggggacgacct

SEQ ID NO: 16977 - RNA, 19 nt, synthetic construct
  source 1..19: mol_type = other RNA
tcaactccggggacgacct

SEQ ID NO: 16978 - RNA, 19 nt, synthetic construct
  source 1..19: mol_type = other RNA
gaggtaagcatcgaccagg

SEQ ID NO: 16979 - RNA, 19 nt, synthetic construct
  source 1..19: mol_type = other RNA
cacaacagccactacgact

SEQ ID NO: 16980 - RNA, 19 nt, synthetic construct
  source 1..19: mol_type = other RNA
cacaacagccactacgact

SEQ ID NO: 16981 - RNA, 19 nt, synthetic construct
  source 1..19: mol_type = other RNA
caacagccactacgactga

SEQ ID NO: 16982 - RNA, 19 nt, synthetic construct
  source 1..19: mol_type = other RNA
cacaacagccactacgact

SEQ ID NO: 16983 - RNA, 19 nt, synthetic construct
  source 1..19: mol_type = other RNA
caacagccactacgactga

SEQ ID NO: 16984 - RNA, 19 nt, synthetic construct
  source 1..19: mol_type = other RNA
cacaacagccactacgact

SEQ ID NO: 16985 - RNA, 19 nt, synthetic construct
  source 1..19: mol_type = other RNA
cacaacagccactacgact

SEQ ID NO: 16986 - RNA, 19 nt, synthetic construct
  source 1..19: mol_type = other RNA
gccactacgactgcgtcca

SEQ ID NO: 16987 - RNA, 19 nt, synthetic construct
  source 1..19: mol_type = other RNA
gccactacgactgcgtcca

SEQ ID NO: 16988 - RNA, 19 nt, synthetic construct
  source 1..19: mol_type = other RNA
gtaagcatcgaccaggtcg

SEQ ID NO: 16989 - RNA, 19 nt, synthetic construct
  source 1..19: mol_type = other RNA
ttcaactacaacgtgcgtg

SEQ ID NO: 16990 - RNA, 19 nt, synthetic construct
  source 1..19: mol_type = other RNA
tcaactacaacgtgcgtgt

SEQ ID NO: 16991 - RNA, 19 nt, synthetic construct
  source 1..19: mol_type = other RNA
ttgctgtgacgactacagc

SEQ ID NO: 16992 - RNA, 19 nt, synthetic construct
  source 1..19: mol_type = other RNA
ctcctcaactccggggacg

SEQ ID NO: 16993 - RNA, 19 nt, synthetic construct
  source 1..19: mol_type = other RNA
ctcaactccggggacgacc

SEQ ID NO: 16994 - RNA, 19 nt, synthetic construct
  source 1..19: mol_type = other RNA
aacagccactacgactgcg

SEQ ID NO: 16995 - RNA, 19 nt, synthetic construct
  source 1..19: mol_type = other RNA
actacgactgcgtccactg

SEQ ID NO: 16996 - RNA, 19 nt, synthetic construct
  source 1..19: mol_type = other RNA
ctcctcaactccggggacg

SEQ ID NO: 16997 - RNA, 19 nt, synthetic construct
  source 1..19: mol_type = other RNA
ctcaactccggggacgacc

SEQ ID NO: 16998 - RNA, 19 nt, synthetic construct
  source 1..19: mol_type = other RNA
aacagccactacgactgca

SEQ ID NO: 16999 - RNA, 19 nt, synthetic construct
  source 1..19: mol_type = other RNA
acagccactacgactgcat

SEQ ID NO: 17000 - RNA, 19 nt, synthetic construct
  source 1..19: mol_type = other RNA
aacagccactacgactgcg

SEQ ID NO: 17001 - RNA, 19 nt, synthetic construct
  source 1..19: mol_type = other RNA
actacgactgcgtccactg

SEQ ID NO: 17002 - RNA, 19 nt, synthetic construct
  source 1..19: mol_type = other RNA
ctccaagaggggaccttta

SEQ ID NO: 17003 - RNA, 19 nt, synthetic construct
  source 1..19: mol_type = other RNA
ttcccaacctcaggggttg

SEQ ID NO: 17004 - RNA, 19 nt, synthetic construct
  source 1..19: mol_type = other RNA
aagcatcgaccaggtcggg

SEQ ID NO: 17005 - RNA, 19 nt, synthetic construct
  source 1..19: mol_type = other RNA
agcatcgaccaggtcgggc

SEQ ID NO: 17006 - RNA, 19 nt, synthetic construct
  source 1..19: mol_type = other RNA
gagacggggctgacctgca

SEQ ID NO: 17007 - RNA, 19 nt, synthetic construct
  source 1..19: mol_type = other RNA
gacggggctgacctgcaag

SEQ ID NO: 17008 - RNA, 19 nt, synthetic construct
  source 1..19: mol_type = other RNA
ggggctgacctgcaagaac

SEQ ID NO: 17009 - RNA, 19 nt, synthetic construct
  source 1..19: mol_type = other RNA
gggctgacctgcaagaacg

SEQ ID NO: 17010 - RNA, 19 nt, synthetic construct
  source 1..19: mol_type = other RNA
caagaacgaagaccagaca

SEQ ID NO: 17011 - RNA, 19 nt, synthetic construct
  source 1..19: mol_type = other RNA
aacatgtgcttcaactaca

SEQ ID NO: 17012 - RNA, 19 nt, synthetic construct
  source 1..19: mol_type = other RNA
gcttcaactacaacgtgcg

SEQ ID NO: 17013 - RNA, 19 nt, synthetic construct
  source 1..19: mol_type = other RNA
tgtgctttgctgtgacgac

SEQ ID NO: 17014 - RNA, 19 nt, synthetic construct
  source 1..19: mol_type = other RNA
tcctcaactccggggacga

SEQ ID NO: 17015 - RNA, 19 nt, synthetic construct
  source 1..19: mol_type = other RNA
cgacctggatcctcacaaa

SEQ ID NO: 17016 - RNA, 19 nt, synthetic construct
  source 1..19: mol_type = other RNA
tggatcctcacaaagccga

SEQ ID NO: 17017 - RNA, 19 nt, synthetic construct
  source 1..19: mol_type = other RNA
ctcacaaagccgaccacaa

SEQ ID NO: 17018 - RNA, 19 nt, synthetic construct
  source 1..19: mol_type = other RNA
tcacaaagccgaccacaac

SEQ ID NO: 17019 - RNA, 19 nt, synthetic construct
  source 1..19: mol_type = other RNA
caacagccactacgactgc

SEQ ID NO: 17020 - RNA, 19 nt, synthetic construct
  source 1..19: mol_type = other RNA
acagccactacgactgcgt

SEQ ID NO: 17021 - RNA, 19 nt, synthetic construct
  source 1..19: mol_type = other RNA
cagccactacgactgcgtc

SEQ ID NO: 17022 - RNA, 19 nt, synthetic construct
  source 1..19: mol_type = other RNA
gactgcgtccactggatcc

SEQ ID NO: 17023 - RNA, 19 nt, synthetic construct
  source 1..19: mol_type = other RNA
tcctcaactccggggacga

SEQ ID NO: 17024 - RNA, 19 nt, synthetic construct
  source 1..19: mol_type = other RNA
cgacctggatcctcacaaa

SEQ ID NO: 17025 - RNA, 19 nt, synthetic construct
  source 1..19: mol_type = other RNA
caacagccactacgactgc

SEQ ID NO: 17026 - RNA, 19 nt, synthetic construct
  source 1..19: mol_type = other RNA
cagccactacgactgcatc

SEQ ID NO: 17027 - RNA, 19 nt, synthetic construct
  source 1..19: mol_type = other RNA
gccactacgactgcatcca

SEQ ID NO: 17028 - RNA, 19 nt, synthetic construct
  source 1..19: mol_type = other RNA
caacagccactacgactgc

SEQ ID NO: 17029 - RNA, 19 nt, synthetic construct
  source 1..19: mol_type = other RNA
acagccactacgactgcgt

SEQ ID NO: 17030 - RNA, 19 nt, synthetic construct
  source 1..19: mol_type = other RNA
cagccactacgactgcgtc

SEQ ID NO: 17031 - RNA, 19 nt, synthetic construct
  source 1..19: mol_type = other RNA
gactgcgtccactggatcc

SEQ ID NO: 17032 - RNA, 19 nt, synthetic construct
  source 1..19: mol_type = other RNA
gtcatctacaataagaccg

SEQ ID NO: 17033 - RNA, 19 nt, synthetic construct
  source 1..19: mol_type = other RNA
agaccagacaggcaggttc

SEQ ID NO: 17034 - RNA, 19 nt, synthetic construct
  source 1..19: mol_type = other RNA
acaaagccgaccacaacag

SEQ ID NO: 17035 - RNA, 19 nt, synthetic construct
  source 1..19: mol_type = other RNA
tgcttcaactacaacgtgc

SEQ ID NO: 17036 - RNA, 19 nt, synthetic construct
  source 1..19: mol_type = other RNA
cgaccacaacagccactac

SEQ ID NO: 17037 - RNA, 19 nt, synthetic construct
  source 1..19: mol_type = other RNA
tgaccacaacagccactac

SEQ ID NO: 17038 - RNA, 19 nt, synthetic construct
  source 1..19: mol_type = other RNA
tgaccacaacagccactac

SEQ ID NO: 17039 - RNA, 19 nt, synthetic construct
  source 1..19: mol_type = other RNA
tgaccacaacagccactac

SEQ ID NO: 17040 - RNA, 19 nt, synthetic construct
  source 1..19: mol_type = other RNA
tgaccacaacagccactac

SEQ ID NO: 17041 - RNA, 19 nt, synthetic construct
  source 1..19: mol_type = other RNA
ggagacggggctgacctgc

SEQ ID NO: 17042 - RNA, 19 nt, synthetic construct
  source 1..19: mol_type = other RNA
agacggggctgacctgcaa

SEQ ID NO: 17043 - RNA, 19 nt, synthetic construct
  source 1..19: mol_type = other RNA
tgacctgcaagaacgaaga

SEQ ID NO: 17044 - RNA, 19 nt, synthetic construct
  source 1..19: mol_type = other RNA
gcaagaacgaagaccagac

SEQ ID NO: 17045 - RNA, 19 nt, synthetic construct
  source 1..19: mol_type = other RNA
ccacgccctcctcaactcc

SEQ ID NO: 17046 - RNA, 19 nt, synthetic construct
  source 1..19: mol_type = other RNA
caaagccgaccacaacagc

SEQ ID NO: 17047 - RNA, 19 nt, synthetic construct
  source 1..19: mol_type = other RNA
aaagccgaccacaacagcc

SEQ ID NO: 17048 - RNA, 19 nt, synthetic construct
  source 1..19: mol_type = other RNA
ccacgccctcctcaactcc

SEQ ID NO: 17049 - RNA, 19 nt, synthetic construct
  source 1..19: mol_type = other RNA
ctggatcctcacaaagccg

SEQ ID NO: 17050 - RNA, 19 nt, synthetic construct
  source 1..19: mol_type = other RNA
cttcccaacctcaggggtt

SEQ ID NO: 17051 - RNA, 19 nt, synthetic construct
  source 1..19: mol_type = other RNA
tgcaggcggggacatggaa

SEQ ID NO: 17052 - RNA, 19 nt, synthetic construct
  source 1..19: mol_type = other RNA
cgtgtgctttgctgtgacg

SEQ ID NO: 17053 - RNA, 19 nt, synthetic construct
  source 1..19: mol_type = other RNA
gccctcctcaactccgggg

SEQ ID NO: 17054 - RNA, 19 nt, synthetic construct
  source 1..19: mol_type = other RNA
gccctcctcaactccgggg

SEQ ID NO: 17055 - RNA, 19 nt, synthetic construct
  source 1..19: mol_type = other RNA
agaacgaagaccagacagg

SEQ ID NO: 17056 - RNA, 19 nt, synthetic construct
  source 1..19: mol_type = other RNA
gaccacaacagccactacg

SEQ ID NO: 17057 - RNA, 19 nt, synthetic construct
  source 1..19: mol_type = other RNA
gaccacaacagccactacg

SEQ ID NO: 17058 - RNA, 19 nt, synthetic construct
  source 1..19: mol_type = other RNA
gaccacaacagccactacg

SEQ ID NO: 17059 - RNA, 19 nt, synthetic construct
  source 1..19: mol_type = other RNA
gaccacaacagccactacg

SEQ ID NO: 17060 - RNA, 19 nt, synthetic construct
  source 1..19: mol_type = other RNA
gaccacaacagccactacg

SEQ ID NO: 17061 - RNA, 19 nt, synthetic construct
  source 1..19: mol_type = other RNA
tacaacgtgcgtgtgcttt

SEQ ID NO: 17062 - RNA, 19 nt, synthetic construct
  source 1..19: mol_type = other RNA
cgactgcatccactggatc

SEQ ID NO: 17063 - RNA, 19 nt, synthetic construct
  source 1..19: mol_type = other RNA
gaccacaacagccactaca

SEQ ID NO: 17064 - RNA, 19 nt, synthetic construct
  source 1..19: mol_type = other RNA
cactacgactgcgtccact

SEQ ID NO: 17065 - RNA, 19 nt, synthetic construct
  source 1..19: mol_type = other RNA
cactacgactgcgtccact

SEQ ID NO: 17066 - RNA, 19 nt, synthetic construct
  source 1..19: mol_type = other RNA
gtccccgtccccccacccg

SEQ ID NO: 17067 - RNA, 19 nt, synthetic construct
  source 1..19: mol_type = other RNA
cgcctgcgcccaggacctg

SEQ ID NO: 17068 - RNA, 19 nt, synthetic construct
  source 1..19: mol_type = other RNA
gccgacagcagcttcaccg

SEQ ID NO: 17069 - RNA, 19 nt, synthetic construct
  source 1..19: mol_type = other RNA
acaccacccacgggacctt

SEQ ID NO: 17070 - RNA, 19 nt, synthetic construct
  source 1..19: mol_type = other RNA
ctcacctcgcagactgggt

SEQ ID NO: 17071 - RNA, 19 nt, synthetic construct
  source 1..19: mol_type = other RNA
tcccaacctcaggggttgc

SEQ ID NO: 17072 - RNA, 19 nt, synthetic construct
  source 1..19: mol_type = other RNA
gcatcgaccaggtcgggca

SEQ ID NO: 17073 - RNA, 19 nt, synthetic construct
  source 1..19: mol_type = other RNA
tcgaccaggtcgggcaggt

SEQ ID NO: 17074 - RNA, 19 nt, synthetic construct
  source 1..19: mol_type = other RNA
cgaccaggtcgggcaggtg

SEQ ID NO: 17075 - RNA, 19 nt, synthetic construct
  source 1..19: mol_type = other RNA
accaggtcgggcaggtgct

SEQ ID NO: 17076 - RNA, 19 nt, synthetic construct
  source 1..19: mol_type = other RNA
caggtcgggcaggtgctga

SEQ ID NO: 17077 - RNA, 19 nt, synthetic construct
  source 1..19: mol_type = other RNA
acgaagaccagacaggcag

SEQ ID NO: 17078 - RNA, 19 nt, synthetic construct
  source 1..19: mol_type = other RNA
accagctccacggccacgc

SEQ ID NO: 17079 - RNA, 19 nt, synthetic construct
  source 1..19: mol_type = other RNA
actccggggacgacctgga

SEQ ID NO: 17080 - RNA, 19 nt, synthetic construct
  source 1..19: mol_type = other RNA
ctccggggacgacctggat

SEQ ID NO: 17081 - RNA, 19 nt, synthetic construct
  source 1..19: mol_type = other RNA
agccgaccacaacagccac

SEQ ID NO: 17082 - RNA, 19 nt, synthetic construct
  source 1..19: mol_type = other RNA
acagagccttccacggtga

SEQ ID NO: 17083 - RNA, 19 nt, synthetic construct
  source 1..19: mol_type = other RNA
actccggggacgacctgga

SEQ ID NO: 17084 - RNA, 19 nt, synthetic construct
  source 1..19: mol_type = other RNA
ctccggggacgacctggat

SEQ ID NO: 17085 - RNA, 19 nt, synthetic construct
  source 1..19: mol_type = other RNA
agctgaccacaacagccac

SEQ ID NO: 17086 - RNA, 19 nt, synthetic construct
  source 1..19: mol_type = other RNA
accacggccaccacacacg

SEQ ID NO: 17087 - RNA, 19 nt, synthetic construct
  source 1..19: mol_type = other RNA
accagcacggccaccacac

SEQ ID NO: 17088 - RNA, 19 nt, synthetic construct
  source 1..19: mol_type = other RNA
actccggggacgacctgga

SEQ ID NO: 17089 - RNA, 19 nt, synthetic construct
  source 1..19: mol_type = other RNA
ctccggggacgacctggat

SEQ ID NO: 17090 - RNA, 19 nt, synthetic construct
  source 1..19: mol_type = other RNA
accagcacggccaccacac

SEQ ID NO: 17091 - RNA, 19 nt, synthetic construct
  source 1..19: mol_type = other RNA
accacggccaccacacacg

SEQ ID NO: 17092 - RNA, 19 nt, synthetic construct
  source 1..19: mol_type = other RNA
acagagccttccacggtga

SEQ ID NO: 17093 - RNA, 19 nt, synthetic construct
  source 1..19: mol_type = other RNA
actccggggacgacctgga

SEQ ID NO: 17094 - RNA, 19 nt, synthetic construct
  source 1..19: mol_type = other RNA
ctccggggacgacctggat

SEQ ID NO: 17095 - RNA, 19 nt, synthetic construct
  source 1..19: mol_type = other RNA
agctgaccacaacagccac

SEQ ID NO: 17096 - RNA, 19 nt, synthetic construct
  source 1..19: mol_type = other RNA
accacggccaccacacacg

SEQ ID NO: 17097 - RNA, 19 nt, synthetic construct
  source 1..19: mol_type = other RNA
actccggggacgacctgga

SEQ ID NO: 17098 - RNA, 19 nt, synthetic construct
  source 1..19: mol_type = other RNA
ctccggggacgacctggat

SEQ ID NO: 17099 - RNA, 19 nt, synthetic construct
  source 1..19: mol_type = other RNA
agctgaccacaacagccac

SEQ ID NO: 17100 - RNA, 19 nt, synthetic construct
  source 1..19: mol_type = other RNA
acgactgcatccactggat

SEQ ID NO: 17101 - RNA, 19 nt, synthetic construct
  source 1..19: mol_type = other RNA
actccggggacgacctgga

SEQ ID NO: 17102 - RNA, 19 nt, synthetic construct
  source 1..19: mol_type = other RNA
ctccggggacgacctggat

SEQ ID NO: 17103 - RNA, 19 nt, synthetic construct
  source 1..19: mol_type = other RNA
agctgaccacaacagccac

SEQ ID NO: 17104 - RNA, 19 nt, synthetic construct
  source 1..19: mol_type = other RNA
accagcacggccaccacac

SEQ ID NO: 17105 - RNA, 19 nt, synthetic construct
  source 1..19: mol_type = other RNA
agctgaccacaacagccac

SEQ ID NO: 17106 - RNA, 19 nt, synthetic construct
  source 1..19: mol_type = other RNA
acccaaagcctgtggccaa

SEQ ID NO: 17107 - RNA, 19 nt, synthetic construct
  source 1..19: mol_type = other RNA
cgctgcccccgcgccctca

SEQ ID NO: 17108 - RNA, 19 nt, synthetic construct
  source 1..19: mol_type = other RNA
acggccacgccctcctcaa

SEQ ID NO: 17109 - RNA, 19 nt, synthetic construct
  source 1..19: mol_type = other RNA
acggccacgccctcctcaa

SEQ ID NO: 17110 - RNA, 19 nt, synthetic construct
  source 1..19: mol_type = other RNA
acgacctggatcctcacaa

SEQ ID NO: 17111 - RNA, 19 nt, synthetic construct
  source 1..19: mol_type = other RNA
tcacagagctgaccacaac

SEQ ID NO: 17112 - RNA, 19 nt, synthetic construct
  source 1..19: mol_type = other RNA
acgacctggatcctcacaa

SEQ ID NO: 17113 - RNA, 19 nt, synthetic construct
  source 1..19: mol_type = other RNA
tcacagagctgaccacaac

SEQ ID NO: 17114 - RNA, 19 nt, synthetic construct
  source 1..19: mol_type = other RNA
tacgactgcatccactgga

SEQ ID NO: 17115 - RNA, 19 nt, synthetic construct
  source 1..19: mol_type = other RNA
tcacagagctgaccacaac

SEQ ID NO: 17116 - RNA, 19 nt, synthetic construct
  source 1..19: mol_type = other RNA
tcacctcgcagactgggtc

SEQ ID NO: 17117 - RNA, 19 nt, synthetic construct
  source 1..19: mol_type = other RNA
acctccttcaacaccacct

SEQ ID NO: 17118 - RNA, 19 nt, synthetic construct
  source 1..19: mol_type = other RNA
ggtccagctcaggccccgt

SEQ ID NO: 17119 - RNA, 19 nt, synthetic construct
  source 1..19: mol_type = other RNA
accaccacccaggccctgt

SEQ ID NO: 17120 - RNA, 19 nt, synthetic construct
  source 1..19: mol_type = other RNA
tcaggggttgcaggcgggg

SEQ ID NO: 17121 - RNA, 19 nt, synthetic construct
  source 1..19: mol_type = other RNA
ttgcaggcggggacatgga

SEQ ID NO: 17122 - RNA, 19 nt, synthetic construct
  source 1..19: mol_type = other RNA
ccctcctcaactccgggga

SEQ ID NO: 17123 - RNA, 19 nt, synthetic construct
  source 1..19: mol_type = other RNA
accacggccacgacaccca

SEQ ID NO: 17124 - RNA, 19 nt, synthetic construct
  source 1..19: mol_type = other RNA
ccacggccacgacacccac

SEQ ID NO: 17125 - RNA, 19 nt, synthetic construct
  source 1..19: mol_type = other RNA
ccctgtccagccctcaccc

SEQ ID NO: 17126 - RNA, 19 nt, synthetic construct
  source 1..19: mol_type = other RNA
ctcctctactccagagact

SEQ ID NO: 17127 - RNA, 19 nt, synthetic construct
  source 1..19: mol_type = other RNA
ccctgtccagccctcaccc

SEQ ID NO: 17128 - RNA, 19 nt, synthetic construct
  source 1..19: mol_type = other RNA
ccctcctcaactccgggga

SEQ ID NO: 17129 - RNA, 19 nt, synthetic construct
  source 1..19: mol_type = other RNA
accacggccacgacaccca

SEQ ID NO: 17130 - RNA, 19 nt, synthetic construct
  source 1..19: mol_type = other RNA
ccacggccacgacacccac

SEQ ID NO: 17131 - RNA, 19 nt, synthetic construct
  source 1..19: mol_type = other RNA
ccctgtccagccctcaccc

SEQ ID NO: 17132 - RNA, 19 nt, synthetic construct
  source 1..19: mol_type = other RNA
accacggccacgacaccca

SEQ ID NO: 17133 - RNA, 19 nt, synthetic construct
  source 1..19: mol_type = other RNA
ccacggccacgacacccac

SEQ ID NO: 17134 - RNA, 19 nt, synthetic construct
  source 1..19: mol_type = other RNA
ctcctctactccagagacc

SEQ ID NO: 17135 - RNA, 19 nt, synthetic construct
  source 1..19: mol_type = other RNA
actgcaggggacgtgccac

SEQ ID NO: 17136 - RNA, 19 nt, synthetic construct
  source 1..19: mol_type = other RNA
ccagtgccgaacaccacgg

SEQ ID NO: 17137 - RNA, 19 nt, synthetic construct
  source 1..19: mol_type = other RNA
ccagtgccgaacaccacgg

SEQ ID NO: 17138 - RNA, 19 nt, synthetic construct
  source 1..19: mol_type = other RNA
ccagtgccgaacaccacgg

SEQ ID NO: 17139 - RNA, 19 nt, synthetic construct
  source 1..19: mol_type = other RNA
acagtgcttaccgccacgg

SEQ ID NO: 17140 - RNA, 19 nt, synthetic construct
  source 1..19: mol_type = other RNA
acagtgcttaccgccacgg

SEQ ID NO: 17141 - RNA, 19 nt, synthetic construct
  source 1..19: mol_type = other RNA
cagcagcctaaggacatag

SEQ ID NO: 17142 - RNA, 19 nt, synthetic construct
  source 1..19: mol_type = other RNA
acagtgcttaccaccacga

SEQ ID NO: 17143 - RNA, 19 nt, synthetic construct
  source 1..19: mol_type = other RNA
tgagaacgttctgcctcca

SEQ ID NO: 17144 - RNA, 19 nt, synthetic construct
  source 1..19: mol_type = other RNA
ctgcccttgccggccggca

SEQ ID NO: 17145 - RNA, 19 nt, synthetic construct
  source 1..19: mol_type = other RNA
cccttggtacagccaccac

SEQ ID NO: 17146 - RNA, 19 nt, synthetic construct
  source 1..19: mol_type = other RNA
cacggccacgccctcctca

SEQ ID NO: 17147 - RNA, 19 nt, synthetic construct
  source 1..19: mol_type = other RNA
tacggccacgccctcctca

SEQ ID NO: 17148 - RNA, 19 nt, synthetic construct
  source 1..19: mol_type = other RNA
catgacaagggccaccaat

SEQ ID NO: 17149 - RNA, 19 nt, synthetic construct
  source 1..19: mol_type = other RNA
atcacagagccttccacgg

SEQ ID NO: 17150 - RNA, 19 nt, synthetic construct
  source 1..19: mol_type = other RNA
atcacagagccttccacgg

SEQ ID NO: 17151 - RNA, 19 nt, synthetic construct
  source 1..19: mol_type = other RNA
cctgcagcgtttccttcgt

SEQ ID NO: 17152 - RNA, 19 nt, synthetic construct
  source 1..19: mol_type = other RNA
cagcagccactacgaccgc

SEQ ID NO: 17153 - RNA, 19 nt, synthetic construct
  source 1..19: mol_type = other RNA
gggacggcactcacgcctc

SEQ ID NO: 17154 - RNA, 19 nt, synthetic construct
  source 1..19: mol_type = other RNA
gggacggcactcacgcctc

SEQ ID NO: 17155 - RNA, 19 nt, synthetic construct
  source 1..19: mol_type = other RNA
gggacggcactcacgcctc

SEQ ID NO: 17156 - RNA, 19 nt, synthetic construct
  source 1..19: mol_type = other RNA
acagtgctgaccacgaagg

SEQ ID NO: 17157 - RNA, 19 nt, synthetic construct
  source 1..19: mol_type = other RNA
acagtgctgaccacgaagg

SEQ ID NO: 17158 - RNA, 19 nt, synthetic construct
  source 1..19: mol_type = other RNA
gtgtgctttgctgtgacga

SEQ ID NO: 17159 - RNA, 19 nt, synthetic construct
  source 1..19: mol_type = other RNA
agaggggacctttaaggcg

SEQ ID NO: 17160 - RNA, 19 nt, synthetic construct
  source 1..19: mol_type = other RNA
agccggctgccatttctac

SEQ ID NO: 17161 - RNA, 19 nt, synthetic construct
  source 1..19: mol_type = other RNA
ccctgctacgctcacggca

SEQ ID NO: 17162 - RNA, 19 nt, synthetic construct
  source 1..19: mol_type = other RNA
gctcacactaccaaagtgc

SEQ ID NO: 17163 - RNA, 19 nt, synthetic construct
  source 1..19: mol_type = other RNA
gctcacactaccaaagtgc

SEQ ID NO: 17164 - RNA, 19 nt, synthetic construct
  source 1..19: mol_type = other RNA
gctcacactaccaaagtgc

SEQ ID NO: 17165 - RNA, 19 nt, synthetic construct
  source 1..19: mol_type = other RNA
gctcacactaccaaagtgc

SEQ ID NO: 17166 - RNA, 19 nt, synthetic construct
  source 1..19: mol_type = other RNA
ccagcaggacccctttcgg

SEQ ID NO: 17167 - RNA, 19 nt, synthetic construct
  source 1..19: mol_type = other RNA
gtgctgaccacgaaggcca

SEQ ID NO: 17168 - RNA, 19 nt, synthetic construct
  source 1..19: mol_type = other RNA
gtgctgaccacgaaggcca

SEQ ID NO: 17169 - RNA, 19 nt, synthetic construct
  source 1..19: mol_type = other RNA
tggagagaccatcagggtc

SEQ ID NO: 17170 - RNA, 19 nt, synthetic construct
  source 1..19: mol_type = other RNA
actgcaggggccgccttga

SEQ ID NO: 17171 - RNA, 19 nt, synthetic construct
  source 1..19: mol_type = other RNA
catgtgcttcaactacaac

SEQ ID NO: 17172 - RNA, 19 nt, synthetic construct
  source 1..19: mol_type = other RNA
ccacctcgggcatcttggg

SEQ ID NO: 17173 - RNA, 19 nt, synthetic construct
  source 1..19: mol_type = other RNA
ccacctcgggcatcttggg

SEQ ID NO: 17174 - RNA, 19 nt, synthetic construct
  source 1..19: mol_type = other RNA
gggacggcacgcacgcttc

SEQ ID NO: 17175 - RNA, 19 nt, synthetic construct
  source 1..19: mol_type = other RNA
gggacggaaccactgccgc

SEQ ID NO: 17176 - RNA, 19 nt, synthetic construct
  source 1..19: mol_type = other RNA
ccgtgtcgtcctgctggac

SEQ ID NO: 17177 - RNA, 19 nt, synthetic construct
  source 1..19: mol_type = other RNA
cctggacccgcctatcaca

SEQ ID NO: 17178 - RNA, 19 nt, synthetic construct
  source 1..19: mol_type = other RNA
cctctggcggggactttga

SEQ ID NO: 17179 - RNA, 19 nt, synthetic construct
  source 1..19: mol_type = other RNA
cctggacccgcctatcaca

SEQ ID NO: 17180 - RNA, 19 nt, synthetic construct
  source 1..19: mol_type = other RNA
cctctggcggggactttga

SEQ ID NO: 17181 - RNA, 19 nt, synthetic construct
  source 1..19: mol_type = other RNA
cctggacccgcctatcaca

SEQ ID NO: 17182 - RNA, 19 nt, synthetic construct
  source 1..19: mol_type = other RNA
cctctggcggggactttga

SEQ ID NO: 17183 - RNA, 19 nt, synthetic construct
  source 1..19: mol_type = other RNA
cctggacccgcctatcaca

SEQ ID NO: 17184 - RNA, 19 nt, synthetic construct
  source 1..19: mol_type = other RNA
cctctggcggggactttga

SEQ ID NO: 17185 - RNA, 19 nt, synthetic construct
  source 1..19: mol_type = other RNA
cctggacccgcctatcaca

SEQ ID NO: 17186 - RNA, 19 nt, synthetic construct
  source 1..19: mol_type = other RNA
ggtgcaaccggtggcctgt

SEQ ID NO: 17187 - RNA, 19 nt, synthetic construct
  source 1..19: mol_type = other RNA
gggagtgcgtccagaccgc

SEQ ID NO: 17188 - RNA, 19 nt, synthetic construct
  source 1..19: mol_type = other RNA
cagcaccgcttccaaagag

SEQ ID NO: 17189 - RNA, 19 nt, synthetic construct
  source 1..19: mol_type = other RNA
ggtgacaaccgtgtcgtcc

SEQ ID NO: 17190 - RNA, 19 nt, synthetic construct
  source 1..19: mol_type = other RNA
aagctgcgacaggcaaggc

SEQ ID NO: 17191 - RNA, 19 nt, synthetic construct
  source 1..19: mol_type = other RNA
tggctcaccctgcacggac

SEQ ID NO: 17192 - RNA, 19 nt, synthetic construct
  source 1..19: mol_type = other RNA
gatgacatcacgcactctg

SEQ ID NO: 17193 - RNA, 19 nt, synthetic construct
  source 1..19: mol_type = other RNA
acctgctccggggggctat

SEQ ID NO: 17194 - RNA, 19 nt, synthetic construct
  source 1..19: mol_type = other RNA
tgagaaactctacgacctg

SEQ ID NO: 17195 - RNA, 19 nt, synthetic construct
  source 1..19: mol_type = other RNA
gagctgcggaagtgcggcc

SEQ ID NO: 17196 - RNA, 19 nt, synthetic construct
  source 1..19: mol_type = other RNA
caatgccaggaacagcttt

SEQ ID NO: 17197 - RNA, 19 nt, synthetic construct
  source 1..19: mol_type = other RNA
aggagtgcccctgctacgc

SEQ ID NO: 17198 - RNA, 19 nt, synthetic construct
  source 1..19: mol_type = other RNA
tggagaggtggtgcacgac

SEQ ID NO: 17199 - RNA, 19 nt, synthetic construct
  source 1..19: mol_type = other RNA
gggagtgggggctgcattg

SEQ ID NO: 17200 - RNA, 19 nt, synthetic construct
  source 1..19: mol_type = other RNA
agcagcagaaccaccgagt

SEQ ID NO: 17201 - RNA, 19 nt, synthetic construct
  source 1..19: mol_type = other RNA
atcacagagccttccacgg

SEQ ID NO: 17202 - RNA, 19 nt, synthetic construct
  source 1..19: mol_type = other RNA
ccagcagcaaccaccggta

SEQ ID NO: 17203 - RNA, 19 nt, synthetic construct
  source 1..19: mol_type = other RNA
cccttgggaccaccgggac

SEQ ID NO: 17204 - RNA, 19 nt, synthetic construct
  source 1..19: mol_type = other RNA
caaagtgccgactaccaca

SEQ ID NO: 17205 - RNA, 19 nt, synthetic construct
  source 1..19: mol_type = other RNA
caaagtgccgactaccaca

SEQ ID NO: 17206 - RNA, 19 nt, synthetic construct
  source 1..19: mol_type = other RNA
atcacagagccttccacgg

SEQ ID NO: 17207 - RNA, 19 nt, synthetic construct
  source 1..19: mol_type = other RNA
ccagcagcaaccaccggta

SEQ ID NO: 17208 - RNA, 19 nt, synthetic construct
  source 1..19: mol_type = other RNA
cccttgggaccaccgggac

SEQ ID NO: 17209 - RNA, 19 nt, synthetic construct
  source 1..19: mol_type = other RNA
caaagtgccgactaccaca

SEQ ID NO: 17210 - RNA, 19 nt, synthetic construct
  source 1..19: mol_type = other RNA
accggttccacggccaccg

SEQ ID NO: 17211 - RNA, 19 nt, synthetic construct
  source 1..19: mol_type = other RNA
gctggacccaaagcctgtg

SEQ ID NO: 17212 - RNA, 19 nt, synthetic construct
  source 1..19: mol_type = other RNA
ccctgctgccccgagacgg

SEQ ID NO: 17213 - RNA, 19 nt, synthetic construct
  source 1..19: mol_type = other RNA
aatggcaccttctacgggg

SEQ ID NO: 17214 - RNA, 19 nt, synthetic construct
  source 1..19: mol_type = other RNA
gatgcctgcaacaatacta

SEQ ID NO: 17215 - RNA, 19 nt, synthetic construct
  source 1..19: mol_type = other RNA
atcaacacgaccatcctgt

SEQ ID NO: 17216 - RNA, 19 nt, synthetic construct
  source 1..19: mol_type = other RNA
gatgtgcattgtctgatca

SEQ ID NO: 17217 - RNA, 19 nt, synthetic construct
  source 1..19: mol_type = other RNA
catgcctgctgcagggtaa

SEQ ID NO: 17218 - RNA, 19 nt, synthetic construct
  source 1..19: mol_type = other RNA
agaggggtcagcatcccaa

SEQ ID NO: 17219 - RNA, 19 nt, synthetic construct
  source 1..19: mol_type = other RNA
acgaggagggcatctgcca

SEQ ID NO: 17220 - RNA, 19 nt, synthetic construct
  source 1..19: mol_type = other RNA
agctggtgccactcatgca

SEQ ID NO: 17221 - RNA, 19 nt, synthetic construct
  source 1..19: mol_type = other RNA
atgtgcgccaacagccaac

SEQ ID NO: 17222 - RNA, 19 nt, synthetic construct
  source 1..19: mol_type = other RNA
cctggacttcggccacctc

SEQ ID NO: 17223 - RNA, 19 nt, synthetic construct
  source 1..19: mol_type = other RNA
cctcaaagtgctgaccagc

SEQ ID NO: 17224 - RNA, 19 nt, synthetic construct
  source 1..19: mol_type = other RNA
cctggacttcggccacctc

SEQ ID NO: 17225 - RNA, 19 nt, synthetic construct
  source 1..19: mol_type = other RNA
gatgtgcgccaacagccaa

SEQ ID NO: 17226 - RNA, 19 nt, synthetic construct
  source 1..19: mol_type = other RNA
tagcagcaggaccaccgag

SEQ ID NO: 17227 - RNA, 19 nt, synthetic construct
  source 1..19: mol_type = other RNA
tagcagcaggaccaccgag

SEQ ID NO: 17228 - RNA, 19 nt, synthetic construct
  source 1..19: mol_type = other RNA
tagcagcaggaccaccgag

SEQ ID NO: 17229 - RNA, 19 nt, synthetic construct
  source 1..19: mol_type = other RNA
agcatccactacaagtcca

SEQ ID NO: 17230 - RNA, 19 nt, synthetic construct
  source 1..19: mol_type = other RNA
accttcaatggccaagtct

SEQ ID NO: 17231 - RNA, 19 nt, synthetic construct
  source 1..19: mol_type = other RNA
cggacggcggcgtgttcct

SEQ ID NO: 17232 - RNA, 19 nt, synthetic construct
  source 1..19: mol_type = other RNA
accttcaccaccgcctggg

SEQ ID NO: 17233 - RNA, 19 nt, synthetic construct
  source 1..19: mol_type = other RNA
agctggtacaatgggcacc

SEQ ID NO: 17234 - RNA, 19 nt, synthetic construct
  source 1..19: mol_type = other RNA
cctggactttggcctggtc

SEQ ID NO: 17235 - RNA, 19 nt, synthetic construct
  source 1..19: mol_type = other RNA
cctggactttggcctggtc

SEQ ID NO: 17236 - RNA, 19 nt, synthetic construct
  source 1..19: mol_type = other RNA
acagcagccactacaactg

SEQ ID NO: 17237 - RNA, 19 nt, synthetic construct
  source 1..19: mol_type = other RNA
ccacagtgcttaccaccac

SEQ ID NO: 17238 - RNA, 19 nt, synthetic construct
  source 1..19: mol_type = other RNA
cctggactttggcctggtc

SEQ ID NO: 17239 - RNA, 19 nt, synthetic construct
  source 1..19: mol_type = other RNA
cctggactttggcctggtc

SEQ ID NO: 17240 - RNA, 19 nt, synthetic construct
  source 1..19: mol_type = other RNA
acagcagccactacaactg

SEQ ID NO: 17241 - RNA, 19 nt, synthetic construct
  source 1..19: mol_type = other RNA
ggaggggatggcggagggc

SEQ ID NO: 17242 - RNA, 19 nt, synthetic construct
  source 1..19: mol_type = other RNA
ctgccctgtgacgcccagg

SEQ ID NO: 17243 - RNA, 19 nt, synthetic construct
  source 1..19: mol_type = other RNA
tccctgatgtcactgggac

SEQ ID NO: 17244 - RNA, 19 nt, synthetic construct
  source 1..19: mol_type = other RNA
gccaacagccaacagagtc

SEQ ID NO: 17245 - RNA, 19 nt, synthetic construct
  source 1..19: mol_type = other RNA
caacagccaacagagtccc

SEQ ID NO: 17246 - RNA, 19 nt, synthetic construct
  source 1..19: mol_type = other RNA
cgaggtaagcatcgaccag

SEQ ID NO: 17247 - RNA, 19 nt, synthetic construct
  source 1..19: mol_type = other RNA
atgtgcttcaactacaacg

SEQ ID NO: 17248 - RNA, 19 nt, synthetic construct
  source 1..19: mol_type = other RNA
acgccctcctcaactccgg

SEQ ID NO: 17249 - RNA, 19 nt, synthetic construct
  source 1..19: mol_type = other RNA
cctggtcagagtggctgga

SEQ ID NO: 17250 - RNA, 19 nt, synthetic construct
  source 1..19: mol_type = other RNA
ctcacagagctgaccacaa

SEQ ID NO: 17251 - RNA, 19 nt, synthetic construct
  source 1..19: mol_type = other RNA
cctggtcagagtggctgga

SEQ ID NO: 17252 - RNA, 19 nt, synthetic construct
  source 1..19: mol_type = other RNA
agggacgacctggatcctc

SEQ ID NO: 17253 - RNA, 19 nt, synthetic construct
  source 1..19: mol_type = other RNA
acctccacagtgctgacca

SEQ ID NO: 17254 - RNA, 19 nt, synthetic construct
  source 1..19: mol_type = other RNA
cctggtcagagtggctgga

SEQ ID NO: 17255 - RNA, 19 nt, synthetic construct
  source 1..19: mol_type = other RNA
acgccctcctcaactccgg

SEQ ID NO: 17256 - RNA, 19 nt, synthetic construct
  source 1..19: mol_type = other RNA
cctggtcagagtggctgga

SEQ ID NO: 17257 - RNA, 19 nt, synthetic construct
  source 1..19: mol_type = other RNA
ctcacagagctgaccacaa

SEQ ID NO: 17258 - RNA, 19 nt, synthetic construct
  source 1..19: mol_type = other RNA
acctccacagtgctgacca

SEQ ID NO: 17259 - RNA, 19 nt, synthetic construct
  source 1..19: mol_type = other RNA
ctcacagagctgaccacaa

SEQ ID NO: 17260 - RNA, 19 nt, synthetic construct
  source 1..19: mol_type = other RNA
acctccacagtgctgacca

SEQ ID NO: 17261 - RNA, 19 nt, synthetic construct
  source 1..19: mol_type = other RNA
cagctcgtccaccgtgggg

SEQ ID NO: 17262 - RNA, 19 nt, synthetic construct
  source 1..19: mol_type = other RNA
tgcagcatgtggggcggct

SEQ ID NO: 17263 - RNA, 19 nt, synthetic construct
  source 1..19: mol_type = other RNA
tgaggtgccctgccagagc

SEQ ID NO: 17264 - RNA, 19 nt, synthetic construct
  source 1..19: mol_type = other RNA
accaggggcacctccagga

SEQ ID NO: 17265 - RNA, 19 nt, synthetic construct
  source 1..19: mol_type = other RNA
caaagtgctgaccagcacg

SEQ ID NO: 17266 - RNA, 19 nt, synthetic construct
  source 1..19: mol_type = other RNA
caaagtgctgaccagcacg

SEQ ID NO: 17267 - RNA, 19 nt, synthetic construct
  source 1..19: mol_type = other RNA
gggacggcacgcacgcctc

SEQ ID NO: 17268 - RNA, 19 nt, synthetic construct
  source 1..19: mol_type = other RNA
ggctggtccccgacagcag

SEQ ID NO: 17269 - RNA, 19 nt, synthetic construct
  source 1..19: mol_type = other RNA
aggagaggcgggtccacga

SEQ ID NO: 17270 - RNA, 19 nt, synthetic construct
  source 1..19: mol_type = other RNA
accaccacggccaccacac

SEQ ID NO: 17271 - RNA, 19 nt, synthetic construct
  source 1..19: mol_type = other RNA
cgggcatcttgggcaccac

SEQ ID NO: 17272 - RNA, 19 nt, synthetic construct
  source 1..19: mol_type = other RNA
cgggcatcttgggcaccac

SEQ ID NO: 17273 - RNA, 19 nt, synthetic construct
  source 1..19: mol_type = other RNA
ggtgcaaccttcccaggcg

SEQ ID NO: 17274 - RNA, 19 nt, synthetic construct
  source 1..19: mol_type = other RNA
gcagcagaaccaccgagtc

SEQ ID NO: 17275 - RNA, 19 nt, synthetic construct
  source 1..19: mol_type = other RNA
ggaccctcccagaacagac

SEQ ID NO: 17276 - RNA, 19 nt, synthetic construct
  source 1..19: mol_type = other RNA
ggaccctcccagaacagac

SEQ ID NO: 17277 - RNA, 19 nt, synthetic construct
  source 1..19: mol_type = other RNA
ctcacagagcagaccacag

SEQ ID NO: 17278 - RNA, 19 nt, synthetic construct
  source 1..19: mol_type = other RNA
gcacttatgccagcagcct

SEQ ID NO: 17279 - RNA, 19 nt, synthetic construct
  source 1..19: mol_type = other RNA
gctctggcggccatgctcg

SEQ ID NO: 17280 - RNA, 19 nt, synthetic construct
  source 1..19: mol_type = other RNA
gcctgctgtgcctacccca

SEQ ID NO: 17281 - RNA, 19 nt, synthetic construct
  source 1..19: mol_type = other RNA
caacagtgccttctcgcgc

SEQ ID NO: 17282 - RNA, 19 nt, synthetic construct
  source 1..19: mol_type = other RNA
ctgcattgccgaggaggac

SEQ ID NO: 17283 - RNA, 19 nt, synthetic construct
  source 1..19: mol_type = other RNA
gctgcagtgacgaccactg

SEQ ID NO: 17284 - RNA, 19 nt, synthetic construct
  source 1..19: mol_type = other RNA
gcgccctcagcatccacta

SEQ ID NO: 17285 - RNA, 19 nt, synthetic construct
  source 1..19: mol_type = other RNA
gcagcaggaccaccgagtc

SEQ ID NO: 17286 - RNA, 19 nt, synthetic construct
  source 1..19: mol_type = other RNA
gcagcaggaccaccgagtc

SEQ ID NO: 17287 - RNA, 19 nt, synthetic construct
  source 1..19: mol_type = other RNA
gcagcaggaccaccgagtc

SEQ ID NO: 17288 - RNA, 19 nt, synthetic construct
  source 1..19: mol_type = other RNA
agcagcaggaccaccgagt

SEQ ID NO: 17289 - RNA, 19 nt, synthetic construct
  source 1..19: mol_type = other RNA
agcagcaggaccaccgagt

SEQ ID NO: 17290 - RNA, 19 nt, synthetic construct
  source 1..19: mol_type = other RNA
agcagcaggaccaccgagt

SEQ ID NO: 17291 - RNA, 19 nt, synthetic construct
  source 1..19: mol_type = other RNA
ccagcagcctgccaacctt

SEQ ID NO: 17292 - RNA, 19 nt, synthetic construct
  source 1..19: mol_type = other RNA
cctcccaaagtgctgacca

SEQ ID NO: 17293 - RNA, 19 nt, synthetic construct
  source 1..19: mol_type = other RNA
cctcccaaagtgctgacca

SEQ ID NO: 17294 - RNA, 19 nt, synthetic construct
  source 1..19: mol_type = other RNA
acctgctgccaggagaggc

SEQ ID NO: 17295 - RNA, 19 nt, synthetic construct
  source 1..19: mol_type = other RNA
ccaggctgcctgtgccaat

SEQ ID NO: 17296 - RNA, 19 nt, synthetic construct
  source 1..19: mol_type = other RNA
ctgacctgcaagaacgaag

SEQ ID NO: 17297 - RNA, 19 nt, synthetic construct
  source 1..19: mol_type = other RNA
ctgccctgggcgtgagcgt

SEQ ID NO: 17298 - RNA, 19 nt, synthetic construct
  source 1..19: mol_type = other RNA
gaaggtgcactgtgacgtc

SEQ ID NO: 17299 - RNA, 19 nt, synthetic construct
  source 1..19: mol_type = other RNA
gtgctgactaccacaacca

SEQ ID NO: 17300 - RNA, 19 nt, synthetic construct
  source 1..19: mol_type = other RNA
gtgggctgtttcagcacac

SEQ ID NO: 17301 - RNA, 19 nt, synthetic construct
  source 1..19: mol_type = other RNA
gtgccagcacggagcctgc

SEQ ID NO: 17302 - RNA, 19 nt, synthetic construct
  source 1..19: mol_type = other RNA
ggctgctgggggcaagatg

SEQ ID NO: 17303 - RNA, 19 nt, synthetic construct
  source 1..19: mol_type = other RNA
caccaaagagcatagagtg

SEQ ID NO: 17304 - RNA, 19 nt, synthetic construct
  source 1..19: mol_type = other RNA
gggcggagaactaccccga

SEQ ID NO: 17305 - RNA, 19 nt, synthetic construct
  source 1..19: mol_type = other RNA
aacagctttgaggacccct

SEQ ID NO: 17306 - RNA, 19 nt, synthetic construct
  source 1..19: mol_type = other RNA
tgctgggcaccaaagagca

SEQ ID NO: 17307 - RNA, 19 nt, synthetic construct
  source 1..19: mol_type = other RNA
atagagtgccgggcggaga

SEQ ID NO: 17308 - RNA, 19 nt, synthetic construct
  source 1..19: mol_type = other RNA
catagagtgccgggcggag

SEQ ID NO: 17309 - RNA, 19 nt, synthetic construct
  source 1..19: mol_type = other RNA
ctgggcaccaaagagcata

SEQ ID NO: 17310 - RNA, 19 nt, synthetic construct
  source 1..19: mol_type = other RNA
aaaacatcagggctgctgg

SEQ ID NO: 17311 - RNA, 19 nt, synthetic construct
  source 1..19: mol_type = other RNA
agctttgaggacccctgct

SEQ ID NO: 17312 - RNA, 19 nt, synthetic construct
  source 1..19: mol_type = other RNA
gcacccctggggccgagtg

SEQ ID NO: 17313 - RNA, 19 nt, synthetic construct
  source 1..19: mol_type = other RNA
agcctaaggacatagagtg

SEQ ID NO: 17314 - RNA, 19 nt, synthetic construct
  source 1..19: mol_type = other RNA
gcctaaggacatagagtgc

SEQ ID NO: 17315 - RNA, 19 nt, synthetic construct
  source 1..19: mol_type = other RNA
ggcaccaaagagcatagag

SEQ ID NO: 17316 - RNA, 19 nt, synthetic construct
  source 1..19: mol_type = other RNA
gcatagagtgccgggcgga

SEQ ID NO: 17317 - RNA, 19 nt, synthetic construct
  source 1..19: mol_type = other RNA
ccagacaggcaggttcaac

SEQ ID NO: 17318 - RNA, 19 nt, synthetic construct
  source 1..19: mol_type = other RNA
tagagtgccgggcggagaa

SEQ ID NO: 17319 - RNA, 19 nt, synthetic construct
  source 1..19: mol_type = other RNA
tgcaggtgtttgtcaggct

SEQ ID NO: 17320 - RNA, 19 nt, synthetic construct
  source 1..19: mol_type = other RNA
cagctttgaggacccctgc

SEQ ID NO: 17321 - RNA, 19 nt, synthetic construct
  source 1..19: mol_type = other RNA
aaaacctgaggcagagagg

SEQ ID NO: 17322 - RNA, 19 nt, synthetic construct
  source 1..19: mol_type = other RNA
tgacgtggacttcccaacc

SEQ ID NO: 17323 - RNA, 19 nt, synthetic construct
  source 1..19: mol_type = other RNA
gacgtggacttcccaacct

SEQ ID NO: 17324 - RNA, 19 nt, synthetic construct
  source 1..19: mol_type = other RNA
ttttgaaaacatcagggct

SEQ ID NO: 17325 - RNA, 19 nt, synthetic construct
  source 1..19: mol_type = other RNA
tttgaaaacatcagggctg

SEQ ID NO: 17326 - RNA, 19 nt, synthetic construct
  source 1..19: mol_type = other RNA
gcaagatgtgctgggcacc

SEQ ID NO: 17327 - RNA, 19 nt, synthetic construct
  source 1..19: mol_type = other RNA
gaaaacctgaggcagagag

SEQ ID NO: 17328 - RNA, 19 nt, synthetic construct
  source 1..19: mol_type = other RNA
gcaggcggggacatggaaa

SEQ ID NO: 17329 - RNA, 19 nt, synthetic construct
  source 1..19: mol_type = other RNA
gctgggggcaagatgtgct

SEQ ID NO: 17330 - RNA, 19 nt, synthetic construct
  source 1..19: mol_type = other RNA
gggctgctgggggcaagat

SEQ ID NO: 17331 - RNA, 19 nt, synthetic construct
  source 1..19: mol_type = other RNA
ttgacgtggacttcccaac

SEQ ID NO: 17332 - RNA, 19 nt, synthetic construct
  source 1..19: mol_type = other RNA
gctgggcaccaaagagcat

SEQ ID NO: 17333 - RNA, 19 nt, synthetic construct
  source 1..19: mol_type = other RNA
caggttcaacatgtgcttc

SEQ ID NO: 17334 - RNA, 19 nt, synthetic construct
  source 1..19: mol_type = other RNA
gggggcaagatgtgctggg

SEQ ID NO: 17335 - RNA, 19 nt, synthetic construct
  source 1..19: mol_type = other RNA
cgcccaccagggccagatg

SEQ ID NO: 17336 - RNA, 19 nt, synthetic construct
  source 1..19: mol_type = other RNA
acagctttgaggacccctg

SEQ ID NO: 17337 - RNA, 19 nt, synthetic construct
  source 1..19: mol_type = other RNA
ctggagacggccaccacca

SEQ ID NO: 17338 - RNA, 19 nt, synthetic construct
  source 1..19: mol_type = other RNA
cgtggacttcccaacctca

SEQ ID NO: 17339 - RNA, 19 nt, synthetic construct
  source 1..19: mol_type = other RNA
aaacatcagggctgctggg

SEQ ID NO: 17340 - RNA, 19 nt, synthetic construct
  source 1..19: mol_type = other RNA
caagatgtgctgggcacca

SEQ ID NO: 17341 - RNA, 19 nt, synthetic construct
  source 1..19: mol_type = other RNA
agacaggcaggttcaacat

SEQ ID NO: 17342 - RNA, 19 nt, synthetic construct
  source 1..19: mol_type = other RNA
ggcaggttcaacatgtgct

SEQ ID NO: 17343 - RNA, 19 nt, synthetic construct
  source 1..19: mol_type = other RNA
caccgtgctggctcctgga

SEQ ID NO: 17344 - RNA, 19 nt, synthetic construct
  source 1..19: mol_type = other RNA
ggcggggacatggaaactt

SEQ ID NO: 17345 - RNA, 19 nt, synthetic construct
  source 1..19: mol_type = other RNA
ggcccagcctggtgtcccc

SEQ ID NO: 17346 - RNA, 19 nt, synthetic construct
  source 1..19: mol_type = other RNA
ggcccagcctggtgtcccc

SEQ ID NO: 17347 - RNA, 19 nt, synthetic construct
  source 1..19: mol_type = other RNA
ggcccagcctggtgtcccc

SEQ ID NO: 17348 - RNA, 19 nt, synthetic construct
  source 1..19: mol_type = other RNA
ggcccagcctggtgtcccc

SEQ ID NO: 17349 - RNA, 19 nt, synthetic construct
  source 1..19: mol_type = other RNA
tgaaaacctgaggcagaga

SEQ ID NO: 17350 - RNA, 19 nt, synthetic construct
  source 1..19: mol_type = other RNA
catggaaacttttgaaaac

SEQ ID NO: 17351 - RNA, 19 nt, synthetic construct
  source 1..19: mol_type = other RNA
cttttgaaaacatcagggc

SEQ ID NO: 17352 - RNA, 19 nt, synthetic construct
  source 1..19: mol_type = other RNA
agggctgctgggggcaaga

SEQ ID NO: 17353 - RNA, 19 nt, synthetic construct
  source 1..19: mol_type = other RNA
caccacagcagtccccacc

SEQ ID NO: 17354 - RNA, 19 nt, synthetic construct
  source 1..19: mol_type = other RNA
tgggggcaagatgtgctgg

SEQ ID NO: 17355 - RNA, 19 nt, synthetic construct
  source 1..19: mol_type = other RNA
ttccccagctcccacttct

SEQ ID NO: 17356 - RNA, 19 nt, synthetic construct
  source 1..19: mol_type = other RNA
gcggggacatggaaacttt

SEQ ID NO: 17357 - RNA, 19 nt, synthetic construct
  source 1..19: mol_type = other RNA
acgtggacttcccaacctc

SEQ ID NO: 17358 - RNA, 19 nt, synthetic construct
  source 1..19: mol_type = other RNA
ctggaccccgcccaccagg

SEQ ID NO: 17359 - RNA, 19 nt, synthetic construct
  source 1..19: mol_type = other RNA
gtggacttcccaacctcag

SEQ ID NO: 17360 - RNA, 19 nt, synthetic construct
  source 1..19: mol_type = other RNA
gcaccgtgctggctcctgg

SEQ ID NO: 17361 - RNA, 19 nt, synthetic construct
  source 1..19: mol_type = other RNA
ctccacggccacgccctcc

SEQ ID NO: 17362 - RNA, 19 nt, synthetic construct
  source 1..19: mol_type = other RNA
cacccctggggccgagtgc

SEQ ID NO: 17363 - RNA, 19 nt, synthetic construct
  source 1..19: mol_type = other RNA
gaggcctgcacctgcacct

SEQ ID NO: 17364 - RNA, 19 nt, synthetic construct
  source 1..19: mol_type = other RNA
ccacagaacccactgtccc

SEQ ID NO: 17365 - RNA, 19 nt, synthetic construct
  source 1..19: mol_type = other RNA
cccctgcccctggctgtga

SEQ ID NO: 17366 - RNA, 19 nt, synthetic construct
  source 1..19: mol_type = other RNA
aggcctgcacctgcaccta

SEQ ID NO: 17367 - RNA, 19 nt, synthetic construct
  source 1..19: mol_type = other RNA
ggacatggaaacttttgaa

SEQ ID NO: 17368 - RNA, 19 nt, synthetic construct
  source 1..19: mol_type = other RNA
gtgctgggcaccaaagagc

SEQ ID NO: 17369 - RNA, 19 nt, synthetic construct
  source 1..19: mol_type = other RNA
cttccccagcctgagcccc

SEQ ID NO: 17370 - RNA, 19 nt, synthetic construct
  source 1..19: mol_type = other RNA
tttgggaacctgcagaagt

SEQ ID NO: 17371 - RNA, 19 nt, synthetic construct
  source 1..19: mol_type = other RNA
atgcaggtgtttgtcaggc

SEQ ID NO: 17372 - RNA, 19 nt, synthetic construct
  source 1..19: mol_type = other RNA
ggtggacctgcctggcctg

SEQ ID NO: 17373 - RNA, 19 nt, synthetic construct
  source 1..19: mol_type = other RNA
taccaccacctgccagccc

SEQ ID NO: 17374 - RNA, 19 nt, synthetic construct
  source 1..19: mol_type = other RNA
ccaccacctgccagccccg

SEQ ID NO: 17375 - RNA, 19 nt, synthetic construct
  source 1..19: mol_type = other RNA
gctggagacggccaccacc

SEQ ID NO: 17376 - RNA, 19 nt, synthetic construct
  source 1..19: mol_type = other RNA
gcaccacagcagtccccac

SEQ ID NO: 17377 - RNA, 19 nt, synthetic construct
  source 1..19: mol_type = other RNA
cggggacatggaaactttt

SEQ ID NO: 17378 - RNA, 19 nt, synthetic construct
  source 1..19: mol_type = other RNA
ggggacatggaaacttttg

SEQ ID NO: 17379 - RNA, 19 nt, synthetic construct
  source 1..19: mol_type = other RNA
gacatggaaacttttgaaa

SEQ ID NO: 17380 - RNA, 19 nt, synthetic construct
  source 1..19: mol_type = other RNA
acatggaaacttttgaaaa

SEQ ID NO: 17381 - RNA, 19 nt, synthetic construct
  source 1..19: mol_type = other RNA
gaaacttttgaaaacatca

SEQ ID NO: 17382 - RNA, 19 nt, synthetic construct
  source 1..19: mol_type = other RNA
acttttgaaaacatcaggg

SEQ ID NO: 17383 - RNA, 19 nt, synthetic construct
  source 1..19: mol_type = other RNA
aacatcagggctgctgggg

SEQ ID NO: 17384 - RNA, 19 nt, synthetic construct
  source 1..19: mol_type = other RNA
tcagggctgctgggggcaa

SEQ ID NO: 17385 - RNA, 19 nt, synthetic construct
  source 1..19: mol_type = other RNA
ctgggggcaagatgtgctg

SEQ ID NO: 17386 - RNA, 19 nt, synthetic construct
  source 1..19: mol_type = other RNA
ggggcaagatgtgctgggc

SEQ ID NO: 17387 - RNA, 19 nt, synthetic construct
  source 1..19: mol_type = other RNA
aagatgtgctgggcaccaa

SEQ ID NO: 17388 - RNA, 19 nt, synthetic construct
  source 1..19: mol_type = other RNA
gcaggttcaacatgtgctt

SEQ ID NO: 17389 - RNA, 19 nt, synthetic construct
  source 1..19: mol_type = other RNA
gtgacgactacagccactg

SEQ ID NO: 17390 - RNA, 19 nt, synthetic construct
  source 1..19: mol_type = other RNA
gctccacggccacgccctc

SEQ ID NO: 17391 - RNA, 19 nt, synthetic construct
  source 1..19: mol_type = other RNA
accccctcctccagcccag

SEQ ID NO: 17392 - RNA, 19 nt, synthetic construct
  source 1..19: mol_type = other RNA
tgctgcccagcagccccac

SEQ ID NO: 17393 - RNA, 19 nt, synthetic construct
  source 1..19: mol_type = other RNA
aggcccagcctggtgtccc

SEQ ID NO: 17394 - RNA, 19 nt, synthetic construct
  source 1..19: mol_type = other RNA
gcccagcctggtgtccccc

SEQ ID NO: 17395 - RNA, 19 nt, synthetic construct
  source 1..19: mol_type = other RNA
accccctcctccagcccag

SEQ ID NO: 17396 - RNA, 19 nt, synthetic construct
  source 1..19: mol_type = other RNA
tgctgcccagcagccccac

SEQ ID NO: 17397 - RNA, 19 nt, synthetic construct
  source 1..19: mol_type = other RNA
aggcccagcctggtgtccc

SEQ ID NO: 17398 - RNA, 19 nt, synthetic construct
  source 1..19: mol_type = other RNA
gcccagcctggtgtccccc

SEQ ID NO: 17399 - RNA, 19 nt, synthetic construct
  source 1..19: mol_type = other RNA
gccctcctccactccaggg

SEQ ID NO: 17400 - RNA, 19 nt, synthetic construct
  source 1..19: mol_type = other RNA
accccctcctccagcccag

SEQ ID NO: 17401 - RNA, 19 nt, synthetic construct
  source 1..19: mol_type = other RNA
tgctgcccagcagccccac

SEQ ID NO: 17402 - RNA, 19 nt, synthetic construct
  source 1..19: mol_type = other RNA
aggcccagcctggtgtccc

SEQ ID NO: 17403 - RNA, 19 nt, synthetic construct
  source 1..19: mol_type = other RNA
gcccagcctggtgtccccc

SEQ ID NO: 17404 - RNA, 19 nt, synthetic construct
  source 1..19: mol_type = other RNA
accccctcctccagcccag

SEQ ID NO: 17405 - RNA, 19 nt, synthetic construct
  source 1..19: mol_type = other RNA
tgctgcccagcagccccac

SEQ ID NO: 17406 - RNA, 19 nt, synthetic construct
  source 1..19: mol_type = other RNA
aggcccagcctggtgtccc

SEQ ID NO: 17407 - RNA, 19 nt, synthetic construct
  source 1..19: mol_type = other RNA
gcccagcctggtgtccccc

SEQ ID NO: 17408 - RNA, 19 nt, synthetic construct
  source 1..19: mol_type = other RNA
accccctcctccagcccag

SEQ ID NO: 17409 - RNA, 19 nt, synthetic construct
  source 1..19: mol_type = other RNA
agtgctccccagcagcctg

SEQ ID NO: 17410 - RNA, 19 nt, synthetic construct
  source 1..19: mol_type = other RNA
aaacttttgaaaacatcag

SEQ ID NO: 17411 - RNA, 19 nt, synthetic construct
  source 1..19: mol_type = other RNA
atgtgctacaactacagga

SEQ ID NO: 17412 - RNA, 19 nt, synthetic construct
  source 1..19: mol_type = other RNA
cctgcaggctccacagaac

SEQ ID NO: 17413 - RNA, 19 nt, synthetic construct
  source 1..19: mol_type = other RNA
ccagcagccccacatcggc

SEQ ID NO: 17414 - RNA, 19 nt, synthetic construct
  source 1..19: mol_type = other RNA
ccagcagccccacatcggc

SEQ ID NO: 17415 - RNA, 19 nt, synthetic construct
  source 1..19: mol_type = other RNA
ccagcagccccacatcggc

SEQ ID NO: 17416 - RNA, 19 nt, synthetic construct
  source 1..19: mol_type = other RNA
ccagcagccccacatcggc

SEQ ID NO: 17417 - RNA, 19 nt, synthetic construct
  source 1..19: mol_type = other RNA
gctggactacagctacccc

SEQ ID NO: 17418 - RNA, 19 nt, synthetic construct
  source 1..19: mol_type = other RNA
gctggactacagctacccc

SEQ ID NO: 17419 - RNA, 19 nt, synthetic construct
  source 1..19: mol_type = other RNA
gctggactacagctacccc

SEQ ID NO: 17420 - RNA, 19 nt, synthetic construct
  source 1..19: mol_type = other RNA
gctggactacagctacccc

SEQ ID NO: 17421 - RNA, 19 nt, synthetic construct
  source 1..19: mol_type = other RNA
caaagtgctgaccaccacg

SEQ ID NO: 17422 - RNA, 19 nt, synthetic construct
  source 1..19: mol_type = other RNA
ggagaactgcacggtggcc

SEQ ID NO: 17423 - RNA, 19 nt, synthetic construct
  source 1..19: mol_type = other RNA
tggagagctacgagctgat

SEQ ID NO: 17424 - RNA, 19 nt, synthetic construct
  source 1..19: mol_type = other RNA
cgctacatggggatcttcc

SEQ ID NO: 17425 - RNA, 19 nt, synthetic construct
  source 1..19: mol_type = other RNA
cacccgtcactgtcttccc

SEQ ID NO: 17426 - RNA, 19 nt, synthetic construct
  source 1..19: mol_type = other RNA
aagcacctgcccatcaaag

SEQ ID NO: 17427 - RNA, 19 nt, synthetic construct
  source 1..19: mol_type = other RNA
tggacggcggggacacggc

SEQ ID NO: 17428 - RNA, 19 nt, synthetic construct
  source 1..19: mol_type = other RNA
ggcatccagtgcgctcaca

SEQ ID NO: 17429 - RNA, 19 nt, synthetic construct
  source 1..19: mol_type = other RNA
tggctgcctgcccctcggg

SEQ ID NO: 17430 - RNA, 19 nt, synthetic construct
  source 1..19: mol_type = other RNA
gatgtgctgggcaccaaag

SEQ ID NO: 17431 - RNA, 19 nt, synthetic construct
  source 1..19: mol_type = other RNA
tcagtgccagcacggagcc

SEQ ID NO: 17432 - RNA, 19 nt, synthetic construct
  source 1..19: mol_type = other RNA
gcgtgtccggctgtgtctg

SEQ ID NO: 17433 - RNA, 19 nt, synthetic construct
  source 1..19: mol_type = other RNA
gcagtgccaggacctgccg

SEQ ID NO: 17434 - RNA, 19 nt, synthetic construct
  source 1..19: mol_type = other RNA
gctcccaggttgactccac

SEQ ID NO: 17435 - RNA, 19 nt, synthetic construct
  source 1..19: mol_type = other RNA
gctcacagccttgaggcct

SEQ ID NO: 17436 - RNA, 19 nt, synthetic construct
  source 1..19: mol_type = other RNA
ccgcccaccagggccagat

SEQ ID NO: 17437 - RNA, 19 nt, synthetic construct
  source 1..19: mol_type = other RNA
ggctgcctgcccctcgggc

SEQ ID NO: 17438 - RNA, 19 nt, synthetic construct
  source 1..19: mol_type = other RNA
ctggctgcctgcccctcgg

SEQ ID NO: 17439 - RNA, 19 nt, synthetic construct
  source 1..19: mol_type = other RNA
cgggcacccctggggccga

SEQ ID NO: 17440 - RNA, 19 nt, synthetic construct
  source 1..19: mol_type = other RNA
gctcccacttctctactcc

SEQ ID NO: 17441 - RNA, 19 nt, synthetic construct
  source 1..19: mol_type = other RNA
acgaggagacggtgccctt

SEQ ID NO: 17442 - RNA, 19 nt, synthetic construct
  source 1..19: mol_type = other RNA
ctgccctacagcctcttcc

SEQ ID NO: 17443 - RNA, 19 nt, synthetic construct
  source 1..19: mol_type = other RNA
ccagtgcgctcacagcctt

SEQ ID NO: 17444 - RNA, 19 nt, synthetic construct
  source 1..19: mol_type = other RNA
caccctgctggggccggcc

SEQ ID NO: 17445 - RNA, 19 nt, synthetic construct
  source 1..19: mol_type = other RNA
tcccctgtgggaccaccgg

SEQ ID NO: 17446 - RNA, 19 nt, synthetic construct
  source 1..19: mol_type = other RNA
aaacctgccggaaccccag

SEQ ID NO: 17447 - RNA, 19 nt, synthetic construct
  source 1..19: mol_type = other RNA
gcccctggctgtgacaatg

SEQ ID NO: 17448 - RNA, 19 nt, synthetic construct
  source 1..19: mol_type = other RNA
cctgcagaagttggatggg

SEQ ID NO: 17449 - RNA, 19 nt, synthetic construct
  source 1..19: mol_type = other RNA
actccatctacacgcagct

SEQ ID NO: 17450 - RNA, 19 nt, synthetic construct
  source 1..19: mol_type = other RNA
gctggacgtgggctgtttc

SEQ ID NO: 17451 - RNA, 19 nt, synthetic construct
  source 1..19: mol_type = other RNA
atgtgctgggcaccaaaga

SEQ ID NO: 17452 - RNA, 19 nt, synthetic construct
  source 1..19: mol_type = other RNA
acctccaggaccacggcca

SEQ ID NO: 17453 - RNA, 19 nt, synthetic construct
  source 1..19: mol_type = other RNA
acctccaggaccacggcca

SEQ ID NO: 17454 - RNA, 19 nt, synthetic construct
  source 1..19: mol_type = other RNA
ctgaccccacagcctgcat

SEQ ID NO: 17455 - RNA, 19 nt, synthetic construct
  source 1..19: mol_type = other RNA
cagcagccccacatcggcc

SEQ ID NO: 17456 - RNA, 19 nt, synthetic construct
  source 1..19: mol_type = other RNA
ccccctgcgggagttgggc

SEQ ID NO: 17457 - RNA, 19 nt, synthetic construct
  source 1..19: mol_type = other RNA
cagcagccccacatcggcc

SEQ ID NO: 17458 - RNA, 19 nt, synthetic construct
  source 1..19: mol_type = other RNA
ccccctgcgggagttgggc

SEQ ID NO: 17459 - RNA, 19 nt, synthetic construct
  source 1..19: mol_type = other RNA
cagcagccccacatcggcc

SEQ ID NO: 17460 - RNA, 19 nt, synthetic construct
  source 1..19: mol_type = other RNA
ccccctgcgggagttgggc

SEQ ID NO: 17461 - RNA, 19 nt, synthetic construct
  source 1..19: mol_type = other RNA
cagcagccccacatcggcc

SEQ ID NO: 17462 - RNA, 19 nt, synthetic construct
  source 1..19: mol_type = other RNA
acccctggggccgagtgcc

SEQ ID NO: 17463 - RNA, 19 nt, synthetic construct
  source 1..19: mol_type = other RNA
gtgctgacaagcacagcca

SEQ ID NO: 17464 - RNA, 19 nt, synthetic construct
  source 1..19: mol_type = other RNA
gtgctgacaagcacagcca

SEQ ID NO: 17465 - RNA, 19 nt, synthetic construct
  source 1..19: mol_type = other RNA
caccctgcctaaaaacctg

SEQ ID NO: 17466 - RNA, 19 nt, synthetic construct
  source 1..19: mol_type = other RNA
ctcacagccttgaggcctg

SEQ ID NO: 17467 - RNA, 19 nt, synthetic construct
  source 1..19: mol_type = other RNA
atgccctcctccactccgg

SEQ ID NO: 17468 - RNA, 19 nt, synthetic construct
  source 1..19: mol_type = other RNA
atgccctcctccactccgg

SEQ ID NO: 17469 - RNA, 19 nt, synthetic construct
  source 1..19: mol_type = other RNA
tatggcaacaccctcctct

SEQ ID NO: 17470 - RNA, 19 nt, synthetic construct
  source 1..19: mol_type = other RNA
tatggcaacaccctcctct

SEQ ID NO: 17471 - RNA, 19 nt, synthetic construct
  source 1..19: mol_type = other RNA
tatggcaacaccctcctct

SEQ ID NO: 17472 - RNA, 19 nt, synthetic construct
  source 1..19: mol_type = other RNA
tatggcaacaccctcctct

SEQ ID NO: 17473 - RNA, 19 nt, synthetic construct
  source 1..19: mol_type = other RNA
tatggcaacaccctcctct

SEQ ID NO: 17474 - RNA, 19 nt, synthetic construct
  source 1..19: mol_type = other RNA
ccagcaggtggactgtgac

SEQ ID NO: 17475 - RNA, 19 nt, synthetic construct
  source 1..19: mol_type = other RNA
ctccagtttgggaacctgc

SEQ ID NO: 17476 - RNA, 19 nt, synthetic construct
  source 1..19: mol_type = other RNA
tctggctgcctgcccctcg

SEQ ID NO: 17477 - RNA, 19 nt, synthetic construct
  source 1..19: mol_type = other RNA
tctctggggacacccagga

SEQ ID NO: 17478 - RNA, 19 nt, synthetic construct
  source 1..19: mol_type = other RNA
tgaccaccacggccaccac

SEQ ID NO: 17479 - RNA, 19 nt, synthetic construct
  source 1..19: mol_type = other RNA
cctggacggcggggacacg

SEQ ID NO: 17480 - RNA, 19 nt, synthetic construct
  source 1..19: mol_type = other RNA
gggacggcgtctgcaccaa

SEQ ID NO: 17481 - RNA, 19 nt, synthetic construct
  source 1..19: mol_type = other RNA
gggcagtgcccctgcaccc

SEQ ID NO: 17482 - RNA, 19 nt, synthetic construct
  source 1..19: mol_type = other RNA
cagctgcccctgtcggcag

SEQ ID NO: 17483 - RNA, 19 nt, synthetic construct
  source 1..19: mol_type = other RNA
gggagtgcagccaccggct

SEQ ID NO: 17484 - RNA, 19 nt, synthetic construct
  source 1..19: mol_type = other RNA
ccgtgtcctgggaccggaa

SEQ ID NO: 17485 - RNA, 19 nt, synthetic construct
  source 1..19: mol_type = other RNA
gtgctgaccaccacggcca

SEQ ID NO: 17486 - RNA, 19 nt, synthetic construct
  source 1..19: mol_type = other RNA
gagcagcggtttcagcaag

SEQ ID NO: 17487 - RNA, 19 nt, synthetic construct
  source 1..19: mol_type = other RNA
gaacggagaggacagtgcc

SEQ ID NO: 17488 - RNA, 19 nt, synthetic construct
  source 1..19: mol_type = other RNA
cagcaccccggccaccagc

SEQ ID NO: 17489 - RNA, 19 nt, synthetic construct
  source 1..19: mol_type = other RNA
cagcaccccggccaccagc

SEQ ID NO: 17490 - RNA, 19 nt, synthetic construct
  source 1..19: mol_type = other RNA
cagcaccccggccaccagc

SEQ ID NO: 17491 - RNA, 19 nt, synthetic construct
  source 1..19: mol_type = other RNA
cagcaccccggccaccagc

SEQ ID NO: 17492 - RNA, 19 nt, synthetic construct
  source 1..19: mol_type = other RNA
cagctgcagggggagcctc

SEQ ID NO: 17493 - RNA, 19 nt, synthetic construct
  source 1..19: mol_type = other RNA
acagcagtccccaccctct

SEQ ID NO: 17494 - RNA, 19 nt, synthetic construct
  source 1..19: mol_type = other RNA
cctggaccctggagaactg

SEQ ID NO: 17495 - RNA, 19 nt, synthetic construct
  source 1..19: mol_type = other RNA
cggagaggacagtgccctg

SEQ ID NO: 17496 - RNA, 19 nt, synthetic construct
  source 1..19: mol_type = other RNA
acctgctccaacccccagc

SEQ ID NO: 17497 - RNA, 19 nt, synthetic construct
  source 1..19: mol_type = other RNA
tggacggctgcttctgccc

SEQ ID NO: 17498 - RNA, 19 nt, synthetic construct
  source 1..19: mol_type = other RNA
tggcagtgccaggacctgc

SEQ ID NO: 17499 - RNA, 19 nt, synthetic construct
  source 1..19: mol_type = other RNA
cagctgctggtgcagctgg

SEQ ID NO: 17500 - RNA, 19 nt, synthetic construct
  source 1..19: mol_type = other RNA
gagtgcagccaccggctct

SEQ ID NO: 17501 - RNA, 19 nt, synthetic construct
  source 1..19: mol_type = other RNA
aaacctgaggcagagaggg

SEQ ID NO: 17502 - RNA, 19 nt, synthetic construct
  source 1..19: mol_type = other RNA
tggagacggccaccaccac

SEQ ID NO: 17503 - RNA, 19 nt, synthetic construct
  source 1..19: mol_type = other RNA
cagcaccacagcagtcccc

SEQ ID NO: 17504 - RNA, 19 nt, synthetic construct
  source 1..19: mol_type = other RNA
acgccctcctccactccag

SEQ ID NO: 17505 - RNA, 19 nt, synthetic construct
  source 1..19: mol_type = other RNA
gcagtgctccccagcagcc

SEQ ID NO: 17506 - RNA, 19 nt, synthetic construct
  source 1..19: mol_type = other RNA
ggaccctggagaactgcac

SEQ ID NO: 17507 - RNA, 19 nt, synthetic construct
  source 1..19: mol_type = other RNA
gtgccctgccagagcctgg

SEQ ID NO: 17508 - RNA, 19 nt, synthetic construct
  source 1..19: mol_type = other RNA
ttgctgaccccacagcctg

SEQ ID NO: 17509 - RNA, 19 nt, synthetic construct
  source 1..19: mol_type = other RNA
ccagtgcacctgctgccag

SEQ ID NO: 17510 - RNA, 19 nt, synthetic construct
  source 1..19: mol_type = other RNA
cctgcagctcctgcacctg

SEQ ID NO: 17511 - RNA, 19 nt, synthetic construct
  source 1..19: mol_type = other RNA
tgcagctgctggtgcagct

SEQ ID NO: 17512 - RNA, 19 nt, synthetic construct
  source 1..19: mol_type = other RNA
cccgcccaccagggccaga

SEQ ID NO: 17513 - RNA, 19 nt, synthetic construct
  source 1..19: mol_type = other RNA
aaccggaggtgggagtgca

SEQ ID NO: 17514 - RNA, 19 nt, synthetic construct
  source 1..19: mol_type = other RNA
aatgaggaccagatgaagt

SEQ ID NO: 17515 - RNA, 19 nt, synthetic construct
  source 1..19: mol_type = other RNA
tgaggcctgcacctgcacc

SEQ ID NO: 17516 - RNA, 19 nt, synthetic construct
  source 1..19: mol_type = other RNA
cccaggtaccaccacctgc

SEQ ID NO: 17517 - RNA, 19 nt, synthetic construct
  source 1..19: mol_type = other RNA
gaccaccacggccaccaca

SEQ ID NO: 17518 - RNA, 19 nt, synthetic construct
  source 1..19: mol_type = other RNA
accacggccacctccagga

SEQ ID NO: 17519 - RNA, 19 nt, synthetic construct
  source 1..19: mol_type = other RNA
accacggccacctccagga

SEQ ID NO: 17520 - RNA, 19 nt, synthetic construct
  source 1..19: mol_type = other RNA
actgtgtcctcctcagtcc

SEQ ID NO: 17521 - RNA, 19 nt, synthetic construct
  source 1..19: mol_type = other RNA
tttgctgaccccacagcct

SEQ ID NO: 17522 - RNA, 19 nt, synthetic construct
  source 1..19: mol_type = other RNA
gctgcagggggagcctcag

SEQ ID NO: 17523 - RNA, 19 nt, synthetic construct
  source 1..19: mol_type = other RNA
ctgcagggggagcctcagg

SEQ ID NO: 17524 - RNA, 19 nt, synthetic construct
  source 1..19: mol_type = other RNA
ctgcagctcctgcacctgc

SEQ ID NO: 17525 - RNA, 19 nt, synthetic construct
  source 1..19: mol_type = other RNA
agggtctgcggcctgtgcg

SEQ ID NO: 17526 - RNA, 19 nt, synthetic construct
  source 1..19: mol_type = other RNA
gatgtgcggcctgtgtggg

SEQ ID NO: 17527 - RNA, 19 nt, synthetic construct
  source 1..19: mol_type = other RNA
ccagtgcggcacctgcacc

SEQ ID NO: 17528 - RNA, 19 nt, synthetic construct
  source 1..19: mol_type = other RNA
ctgtgcgggaacttcgacg

SEQ ID NO: 17529 - RNA, 19 nt, synthetic construct
  source 1..19: mol_type = other RNA
acagtgccctgctggagct

SEQ ID NO: 17530 - RNA, 19 nt, synthetic construct
  source 1..19: mol_type = other RNA
gacgacctggatcctcaca

SEQ ID NO: 17531 - RNA, 19 nt, synthetic construct
  source 1..19: mol_type = other RNA
gacgacctggatcctcaca

SEQ ID NO: 17532 - RNA, 19 nt, synthetic construct
  source 1..19: mol_type = other RNA
gacgacctggatcctcaca

SEQ ID NO: 17533 - RNA, 19 nt, synthetic construct
  source 1..19: mol_type = other RNA
gacgacctggatcctcaca

SEQ ID NO: 17534 - RNA, 19 nt, synthetic construct
  source 1..19: mol_type = other RNA
gacgacctggatcctcaca

SEQ ID NO: 17535 - RNA, 19 nt, synthetic construct
  source 1..19: mol_type = other RNA
ggacgacctggatcctcac

SEQ ID NO: 17536 - RNA, 19 nt, synthetic construct
  source 1..19: mol_type = other RNA
ggacgacctggatcctcac

SEQ ID NO: 17537 - RNA, 19 nt, synthetic construct
  source 1..19: mol_type = other RNA
ggacgacctggatcctcac

SEQ ID NO: 17538 - RNA, 19 nt, synthetic construct
  source 1..19: mol_type = other RNA
ggacgacctggatcctcac

SEQ ID NO: 17539 - RNA, 19 nt, synthetic construct
  source 1..19: mol_type = other RNA
ggacgacctggatcctcac

SEQ ID NO: 17540 - RNA, 19 nt, synthetic construct
  source 1..19: mol_type = other RNA
caggtgctgacctgcagcc

SEQ ID NO: 17541 - RNA, 19 nt, synthetic construct
  source 1..19: mol_type = other RNA
acgacctggatcctcacag

SEQ ID NO: 17542 - RNA, 19 nt, synthetic construct
  source 1..19: mol_type = other RNA
acgacctggatcctcacag

SEQ ID NO: 17543 - RNA, 19 nt, synthetic construct
  source 1..19: mol_type = other RNA
acgacctggatcctcacag

SEQ ID NO: 17544 - RNA, 19 nt, synthetic construct
  source 1..19: mol_type = other RNA
acgacctggatcctcacag

SEQ ID NO: 17545 - RNA, 19 nt, synthetic construct
  source 1..19: mol_type = other RNA
acgacctggatcctcacag

SEQ ID NO: 17546 - RNA, 19 nt, synthetic construct
  source 1..19: mol_type = other RNA
cctggatcctcacagagcc

SEQ ID NO: 17547 - RNA, 19 nt, synthetic construct
  source 1..19: mol_type = other RNA
cctggatcctcacagagcc

SEQ ID NO: 17548 - RNA, 19 nt, synthetic construct
  source 1..19: mol_type = other RNA
cctggatcctcacagagcc

SEQ ID NO: 17549 - RNA, 19 nt, synthetic construct
  source 1..19: mol_type = other RNA
cctggatcctcacagagcc

SEQ ID NO: 17550 - RNA, 19 nt, synthetic construct
  source 1..19: mol_type = other RNA
cagcccagttttgcaaata

SEQ ID NO: 17551 - RNA, 19 nt, synthetic construct
  source 1..19: mol_type = other RNA
tgacctgcagcctggagac

SEQ ID NO: 17552 - RNA, 19 nt, synthetic construct
  source 1..19: mol_type = other RNA
catcccaaagccccctctg

SEQ ID NO: 17553 - RNA, 19 nt, synthetic construct
  source 1..19: mol_type = other RNA
tgcagcctggagacggggc

SEQ ID NO: 17554 - RNA, 19 nt, synthetic construct
  source 1..19: mol_type = other RNA
cctggatcctcacagagcc

SEQ ID NO: 17555 - RNA, 19 nt, synthetic construct
  source 1..19: mol_type = other RNA
aggcagagacccagggccc

SEQ ID NO: 17556 - RNA, 19 nt, synthetic construct
  source 1..19: mol_type = other RNA
ggcaggtgctgacctgcag

SEQ ID NO: 17557 - RNA, 19 nt, synthetic construct
  source 1..19: mol_type = other RNA
ggtgctgacctgcagcctg

SEQ ID NO: 17558 - RNA, 19 nt, synthetic construct
  source 1..19: mol_type = other RNA
tgctgacctgcagcctgga

SEQ ID NO: 17559 - RNA, 19 nt, synthetic construct
  source 1..19: mol_type = other RNA
gacctgcagcctggagacg

SEQ ID NO: 17560 - RNA, 19 nt, synthetic construct
  source 1..19: mol_type = other RNA
gcagcctggagacggggct

SEQ ID NO: 17561 - RNA, 19 nt, synthetic construct
  source 1..19: mol_type = other RNA
gatcctcacagagctgacc

SEQ ID NO: 17562 - RNA, 19 nt, synthetic construct
  source 1..19: mol_type = other RNA
gatcctcacagagctgacc

SEQ ID NO: 17563 - RNA, 19 nt, synthetic construct
  source 1..19: mol_type = other RNA
gatcctcacagagctgacc

SEQ ID NO: 17564 - RNA, 19 nt, synthetic construct
  source 1..19: mol_type = other RNA
gatcctcacagagctgacc

SEQ ID NO: 17565 - RNA, 19 nt, synthetic construct
  source 1..19: mol_type = other RNA
gatcctcacagagctgacc

SEQ ID NO: 17566 - RNA, 19 nt, synthetic construct
  source 1..19: mol_type = other RNA
tccacggccacaccctcct

SEQ ID NO: 17567 - RNA, 19 nt, synthetic construct
  source 1..19: mol_type = other RNA
tcacctgcccacccaccaa

SEQ ID NO: 17568 - RNA, 19 nt, synthetic construct
  source 1..19: mol_type = other RNA
gctcaacccagcccagttt

SEQ ID NO: 17569 - RNA, 19 nt, synthetic construct
  source 1..19: mol_type = other RNA
agcccagttttgcaaataa

SEQ ID NO: 17570 - RNA, 19 nt, synthetic construct
  source 1..19: mol_type = other RNA
gcaggtgctgacctgcagc

SEQ ID NO: 17571 - RNA, 19 nt, synthetic construct
  source 1..19: mol_type = other RNA
gctgacctgcagcctggag

SEQ ID NO: 17572 - RNA, 19 nt, synthetic construct
  source 1..19: mol_type = other RNA
cctccatccccatgctctg

SEQ ID NO: 17573 - RNA, 19 nt, synthetic construct
  source 1..19: mol_type = other RNA
cgctggtgttggctctggc

SEQ ID NO: 17574 - RNA, 19 nt, synthetic construct
  source 1..19: mol_type = other RNA
gcgtgtccactgtgtcctc

SEQ ID NO: 17575 - RNA, 19 nt, synthetic construct
  source 1..19: mol_type = other RNA
cctgcagcctggagacggg

SEQ ID NO: 17576 - RNA, 19 nt, synthetic construct
  source 1..19: mol_type = other RNA
gagctgccacacgctggac

SEQ ID NO: 17577 - RNA, 19 nt, synthetic construct
  source 1..19: mol_type = other RNA
gggagagcctgtggcccac

SEQ ID NO: 17578 - RNA, 19 nt, synthetic construct
  source 1..19: mol_type = other RNA
ctgctcaacccagcccagt

SEQ ID NO: 17579 - RNA, 19 nt, synthetic construct
  source 1..19: mol_type = other RNA
tcgggcaggtgctgacctg

SEQ ID NO: 17580 - RNA, 19 nt, synthetic construct
  source 1..19: mol_type = other RNA
gcagtgcaagcccctgccc

SEQ ID NO: 17581 - RNA, 19 nt, synthetic construct
  source 1..19: mol_type = other RNA
gggtgaggggccagcagga

SEQ ID NO: 17582 - RNA, 19 nt, synthetic construct
  source 1..19: mol_type = other RNA
atgtgcttcaactatgaaa

SEQ ID NO: 17583 - RNA, 19 nt, synthetic construct
  source 1..19: mol_type = other RNA
atgtgcttcaactatgaaa

SEQ ID NO: 17584 - RNA, 19 nt, synthetic construct
  source 1..19: mol_type = other RNA
atgtgcttcaactatgaaa

SEQ ID NO: 17585 - RNA, 19 nt, synthetic construct
  source 1..19: mol_type = other RNA
atgtgcttcaactatgaaa

SEQ ID NO: 17586 - RNA, 19 nt, synthetic construct
  source 1..19: mol_type = other RNA
cagtgcaagcccctgccct

SEQ ID NO: 17587 - RNA, 19 nt, synthetic construct
  source 1..19: mol_type = other RNA
tgaggggccagcaggaccc

SEQ ID NO: 17588 - RNA, 19 nt, synthetic construct
  source 1..19: mol_type = other RNA
gtggcccaccttggccttg

SEQ ID NO: 17589 - RNA, 19 nt, synthetic construct
  source 1..19: mol_type = other RNA
cgggcaggtgctgacctgc

SEQ ID NO: 17590 - RNA, 19 nt, synthetic construct
  source 1..19: mol_type = other RNA
gtgctgacctgcagcctgg

SEQ ID NO: 17591 - RNA, 19 nt, synthetic construct
  source 1..19: mol_type = other RNA
cggccatgccctcctccac

SEQ ID NO: 17592 - RNA, 19 nt, synthetic construct
  source 1..19: mol_type = other RNA
cggccatgccctcctccac

SEQ ID NO: 17593 - RNA, 19 nt, synthetic construct
  source 1..19: mol_type = other RNA
ctgacctgcagcctggaga

SEQ ID NO: 17594 - RNA, 19 nt, synthetic construct
  source 1..19: mol_type = other RNA
ccacagcggagaactgcca

SEQ ID NO: 17595 - RNA, 19 nt, synthetic construct
  source 1..19: mol_type = other RNA
cacagcggagaactgccag

SEQ ID NO: 17596 - RNA, 19 nt, synthetic construct
  source 1..19: mol_type = other RNA
cactgccccagcaccccgg

SEQ ID NO: 17597 - RNA, 19 nt, synthetic construct
  source 1..19: mol_type = other RNA
cactgccccagcaccccgg

SEQ ID NO: 17598 - RNA, 19 nt, synthetic construct
  source 1..19: mol_type = other RNA
cactgccccagcaccccgg

SEQ ID NO: 17599 - RNA, 19 nt, synthetic construct
  source 1..19: mol_type = other RNA
cactgccccagcaccccgg

SEQ ID NO: 17600 - RNA, 19 nt, synthetic construct
  source 1..19: mol_type = other RNA
ctgctccctcagtgtggag

SEQ ID NO: 17601 - RNA, 19 nt, synthetic construct
  source 1..19: mol_type = other RNA
ttaccaccacggccaccac

SEQ ID NO: 17602 - RNA, 19 nt, synthetic construct
  source 1..19: mol_type = other RNA
ttaccaccacggccaccac

SEQ ID NO: 17603 - RNA, 19 nt, synthetic construct
  source 1..19: mol_type = other RNA
ccctcctccactccagaga

SEQ ID NO: 17604 - RNA, 19 nt, synthetic construct
  source 1..19: mol_type = other RNA
ccctcctccactccagaga

SEQ ID NO: 17605 - RNA, 19 nt, synthetic construct
  source 1..19: mol_type = other RNA
ccctcctccactccagaga

SEQ ID NO: 17606 - RNA, 19 nt, synthetic construct
  source 1..19: mol_type = other RNA
ccctcctccactccagaga

SEQ ID NO: 17607 - RNA, 19 nt, synthetic construct
  source 1..19: mol_type = other RNA
tacagccatcccctcttcc

SEQ ID NO: 17608 - RNA, 19 nt, synthetic construct
  source 1..19: mol_type = other RNA
acagtgcttaccaccacgg

SEQ ID NO: 17609 - RNA, 19 nt, synthetic construct
  source 1..19: mol_type = other RNA
acagtgcttaccaccacgg

SEQ ID NO: 17610 - RNA, 19 nt, synthetic construct
  source 1..19: mol_type = other RNA
gcccctgcacccacggcgg

SEQ ID NO: 17611 - RNA, 19 nt, synthetic construct
  source 1..19: mol_type = other RNA
gcagtgctgtggggagtgc

SEQ ID NO: 17612 - RNA, 19 nt, synthetic construct
  source 1..19: mol_type = other RNA
cccctgctccctcagtgtg

SEQ ID NO: 17613 - RNA, 19 nt, synthetic construct
  source 1..19: mol_type = other RNA
gcccctgggcctcgagtgc

SEQ ID NO: 17614 - RNA, 19 nt, synthetic construct
  source 1..19: mol_type = other RNA
gcccctgggcctcgagtgc

SEQ ID NO: 17615 - RNA, 19 nt, synthetic construct
  source 1..19: mol_type = other RNA
gcccctgggcctcgagtgc

SEQ ID NO: 17616 - RNA, 19 nt, synthetic construct
  source 1..19: mol_type = other RNA
gcccctgggcctcgagtgc

SEQ ID NO: 17617 - RNA, 19 nt, synthetic construct
  source 1..19: mol_type = other RNA
ccctgctccctcagtgtgg

SEQ ID NO: 17618 - RNA, 19 nt, synthetic construct
  source 1..19: mol_type = other RNA
gccctgagctctgcccccg

SEQ ID NO: 17619 - RNA, 19 nt, synthetic construct
  source 1..19: mol_type = other RNA
acccctgctccctcagtgt

SEQ ID NO: 17620 - RNA, 19 nt, synthetic construct
  source 1..19: mol_type = other RNA
gagcagcccctgggcctcg

SEQ ID NO: 17621 - RNA, 19 nt, synthetic construct
  source 1..19: mol_type = other RNA
gagcagcccctgggcctcg

SEQ ID NO: 17622 - RNA, 19 nt, synthetic construct
  source 1..19: mol_type = other RNA
gagcagcccctgggcctcg

SEQ ID NO: 17623 - RNA, 19 nt, synthetic construct
  source 1..19: mol_type = other RNA
gagcagcccctgggcctcg

SEQ ID NO: 17624 - RNA, 19 nt, synthetic construct
  source 1..19: mol_type = other RNA
acccctgcagtgctcccca

SEQ ID NO: 17625 - RNA, 19 nt, synthetic construct
  source 1..19: mol_type = other RNA
cctgcagtgctccccagca

SEQ ID NO: 17626 - RNA, 19 nt, synthetic construct
  source 1..19: mol_type = other RNA
gggcagtgctgtggggagt

SEQ ID NO: 17627 - RNA, 19 nt, synthetic construct
  source 1..19: mol_type = other RNA
tcctccagtccagggactg

SEQ ID NO: 17628 - RNA, 19 nt, synthetic construct
  source 1..19: mol_type = other RNA
taccaccacggccaccaca

SEQ ID NO: 17629 - RNA, 19 nt, synthetic construct
  source 1..19: mol_type = other RNA
tcctccagtccagggactg

SEQ ID NO: 17630 - RNA, 19 nt, synthetic construct
  source 1..19: mol_type = other RNA
taccaccacggccaccaca

SEQ ID NO: 17631 - RNA, 19 nt, synthetic construct
  source 1..19: mol_type = other RNA
tcctccagtccagggactg

SEQ ID NO: 17632 - RNA, 19 nt, synthetic construct
  source 1..19: mol_type = other RNA
cagcacagaccaccacacc

SEQ ID NO: 17633 - RNA, 19 nt, synthetic construct
  source 1..19: mol_type = other RNA
ccgaggtaagcatcgacca

SEQ ID NO: 17634 - RNA, 19 nt, synthetic construct
  source 1..19: mol_type = other RNA
atcgaccaggtcgggcagg

SEQ ID NO: 17635 - RNA, 19 nt, synthetic construct
  source 1..19: mol_type = other RNA
cactacgactgcatccact

SEQ ID NO: 17636 - RNA, 19 nt, synthetic construct
  source 1..19: mol_type = other RNA
acaacagccactacgactg

SEQ ID NO: 17637 - RNA, 19 nt, synthetic construct
  source 1..19: mol_type = other RNA
acaacagccactacgactg

SEQ ID NO: 17638 - RNA, 19 nt, synthetic construct
  source 1..19: mol_type = other RNA
acaacagccactacgactg

SEQ ID NO: 17639 - RNA, 19 nt, synthetic construct
  source 1..19: mol_type = other RNA
tgcaagaacgaagaccaga

SEQ ID NO: 17640 - RNA, 19 nt, synthetic construct
  source 1..19: mol_type = other RNA
ggggttgcaggcggggaca

SEQ ID NO: 17641 - RNA, 19 nt, synthetic construct
  source 1..19: mol_type = other RNA
ggccacgccctcctcaact

SEQ ID NO: 17642 - RNA, 19 nt, synthetic construct
  source 1..19: mol_type = other RNA
gatcctcacaaagccgacc

SEQ ID NO: 17643 - RNA, 19 nt, synthetic construct
  source 1..19: mol_type = other RNA
ggccacgccctcctcaact

SEQ ID NO: 17644 - RNA, 19 nt, synthetic construct
  source 1..19: mol_type = other RNA
cggccacgccctcctcaac

SEQ ID NO: 17645 - RNA, 19 nt, synthetic construct
  source 1..19: mol_type = other RNA
atcctcacaaagccgacca

SEQ ID NO: 17646 - RNA, 19 nt, synthetic construct
  source 1..19: mol_type = other RNA
cggccacgccctcctcaac

SEQ ID NO: 17647 - RNA, 19 nt, synthetic construct
  source 1..19: mol_type = other RNA
accaccctatgggtgaccc

SEQ ID NO: 17648 - RNA, 19 nt, synthetic construct
  source 1..19: mol_type = other RNA
ccctcacctcgcagactgg

SEQ ID NO: 17649 - RNA, 19 nt, synthetic construct
  source 1..19: mol_type = other RNA
gggttgcaggcggggacat

SEQ ID NO: 17650 - RNA, 19 nt, synthetic construct
  source 1..19: mol_type = other RNA
gcgtgtgctttgctgtgac

SEQ ID NO: 17651 - RNA, 19 nt, synthetic construct
  source 1..19: mol_type = other RNA
gacttcccaacctcagggg

SEQ ID NO: 17652 - RNA, 19 nt, synthetic construct
  source 1..19: mol_type = other RNA
ggttgcaggcggggacatg

SEQ ID NO: 17653 - RNA, 19 nt, synthetic construct
  source 1..19: mol_type = other RNA
ctgcaagaacgaagaccag

SEQ ID NO: 17654 - RNA, 19 nt, synthetic construct
  source 1..19: mol_type = other RNA
aagaccagacaggcaggtt

SEQ ID NO: 17655 - RNA, 19 nt, synthetic construct
  source 1..19: mol_type = other RNA
acatgtgcttcaactacaa

SEQ ID NO: 17656 - RNA, 19 nt, synthetic construct
  source 1..19: mol_type = other RNA
tgtgcttcaactacaacgt

SEQ ID NO: 17657 - RNA, 19 nt, synthetic construct
  source 1..19: mol_type = other RNA
gctttgctgtgacgactac

SEQ ID NO: 17658 - RNA, 19 nt, synthetic construct
  source 1..19: mol_type = other RNA
tttgctgtgacgactacag

SEQ ID NO: 17659 - RNA, 19 nt, synthetic construct
  source 1..19: mol_type = other RNA
aactccggggacgacctgg

SEQ ID NO: 17660 - RNA, 19 nt, synthetic construct
  source 1..19: mol_type = other RNA
gacctggatcctcacaaag

SEQ ID NO: 17661 - RNA, 19 nt, synthetic construct
  source 1..19: mol_type = other RNA
acgactgcgtccactggat

SEQ ID NO: 17662 - RNA, 19 nt, synthetic construct
  source 1..19: mol_type = other RNA
cactccggggacgacctgg

SEQ ID NO: 17663 - RNA, 19 nt, synthetic construct
  source 1..19: mol_type = other RNA
cactccggggacgacctgg

SEQ ID NO: 17664 - RNA, 19 nt, synthetic construct
  source 1..19: mol_type = other RNA
gccactacgatcacagcca

SEQ ID NO: 17665 - RNA, 19 nt, synthetic construct
  source 1..19: mol_type = other RNA
aactccggggacgacctgg

SEQ ID NO: 17666 - RNA, 19 nt, synthetic construct
  source 1..19: mol_type = other RNA
gacctggatcctcacaaag

SEQ ID NO: 17667 - RNA, 19 nt, synthetic construct
  source 1..19: mol_type = other RNA
cactccggggacgacctgg

SEQ ID NO: 17668 - RNA, 19 nt, synthetic construct
  source 1..19: mol_type = other RNA
ccactacgactgcatccac

SEQ ID NO: 17669 - RNA, 19 nt, synthetic construct
  source 1..19: mol_type = other RNA
actacgactgcatccactg

SEQ ID NO: 17670 - RNA, 19 nt, synthetic construct
  source 1..19: mol_type = other RNA
cactccggggacgacctgg

SEQ ID NO: 17671 - RNA, 19 nt, synthetic construct
  source 1..19: mol_type = other RNA
acgactgcgtccactggat

SEQ ID NO: 17672 - RNA, 19 nt, synthetic construct
  source 1..19: mol_type = other RNA
gcactcgactccagccctt

SEQ ID NO: 17673 - RNA, 19 nt, synthetic construct
  source 1..19: mol_type = other RNA
cagtaccccagccaccagc

SEQ ID NO: 17674 - RNA, 19 nt, synthetic construct
  source 1..19: mol_type = other RNA
cccaacctcaggggttgca

SEQ ID NO: 17675 - RNA, 19 nt, synthetic construct
  source 1..19: mol_type = other RNA
aacgaagaccagacaggca

SEQ ID NO: 17676 - RNA, 19 nt, synthetic construct
  source 1..19: mol_type = other RNA
tccggggacgacctggatc

SEQ ID NO: 17677 - RNA, 19 nt, synthetic construct
  source 1..19: mol_type = other RNA
tccggggacgacctggatc

SEQ ID NO: 17678 - RNA, 19 nt, synthetic construct
  source 1..19: mol_type = other RNA
ctggatcctcacagagctg

SEQ ID NO: 17679 - RNA, 19 nt, synthetic construct
  source 1..19: mol_type = other RNA
cacagagctgaccacaaca

SEQ ID NO: 17680 - RNA, 19 nt, synthetic construct
  source 1..19: mol_type = other RNA
tccggggacgacctggatc

SEQ ID NO: 17681 - RNA, 19 nt, synthetic construct
  source 1..19: mol_type = other RNA
ctggatcctcacagagctg

SEQ ID NO: 17682 - RNA, 19 nt, synthetic construct
  source 1..19: mol_type = other RNA
tccggggacgacctggatc

SEQ ID NO: 17683 - RNA, 19 nt, synthetic construct
  source 1..19: mol_type = other RNA
tccggggacgacctggatc

SEQ ID NO: 17684 - RNA, 19 nt, synthetic construct
  source 1..19: mol_type = other RNA
ctggatcctcacagagctg

SEQ ID NO: 17685 - RNA, 19 nt, synthetic construct
  source 1..19: mol_type = other RNA
cacagagctgaccacaaca

SEQ ID NO: 17686 - RNA, 19 nt, synthetic construct
  source 1..19: mol_type = other RNA
tccggggacgacctggatc

SEQ ID NO: 17687 - RNA, 19 nt, synthetic construct
  source 1..19: mol_type = other RNA
ctggatcctcacagagctg

SEQ ID NO: 17688 - RNA, 19 nt, synthetic construct
  source 1..19: mol_type = other RNA
ctggatcctcacagagctg

SEQ ID NO: 17689 - RNA, 19 nt, synthetic construct
  source 1..19: mol_type = other RNA
cacagagctgaccacaaca

SEQ ID NO: 17690 - RNA, 19 nt, synthetic construct
  source 1..19: mol_type = other RNA
tgaccacaacagccactac

SEQ ID NO: 17691 - RNA, 19 nt, synthetic construct
  source 1..19: mol_type = other RNA
tcagcgactggagggacgg

SEQ ID NO: 17692 - RNA, 19 nt, synthetic construct
  source 1..19: mol_type = other RNA
ggtaagcatcgaccaggtc

SEQ ID NO: 17693 - RNA, 19 nt, synthetic construct
  source 1..19: mol_type = other RNA
cctgcaagaacgaagacca

SEQ ID NO: 17694 - RNA, 19 nt, synthetic construct
  source 1..19: mol_type = other RNA
tgcgtgtgctttgctgtga

SEQ ID NO: 17695 - RNA, 19 nt, synthetic construct
  source 1..19: mol_type = other RNA
cctcctcaactccggggac

SEQ ID NO: 17696 - RNA, 19 nt, synthetic construct
  source 1..19: mol_type = other RNA
cctcctcaactccggggac

SEQ ID NO: 17697 - RNA, 19 nt, synthetic construct
  source 1..19: mol_type = other RNA
gaacccctgctgccccgag

SEQ ID NO: 17698 - RNA, 19 nt, synthetic construct
  source 1..19: mol_type = other RNA
ctggagacggggctgacct

SEQ ID NO: 17699 - RNA, 19 nt, synthetic construct
  source 1..19: mol_type = other RNA
tgctttgctgtgacgacta

SEQ ID NO: 17700 - RNA, 19 nt, synthetic construct
  source 1..19: mol_type = other RNA
gccacgccctcctcaactc

SEQ ID NO: 17701 - RNA, 19 nt, synthetic construct
  source 1..19: mol_type = other RNA
cacgccctcctcaactccg

SEQ ID NO: 17702 - RNA, 19 nt, synthetic construct
  source 1..19: mol_type = other RNA
gccacgccctcctcaactc

SEQ ID NO: 17703 - RNA, 19 nt, synthetic construct
  source 1..19: mol_type = other RNA
cacgccctcctcaactccg

SEQ ID NO: 17704 - RNA, 19 nt, synthetic construct
  source 1..19: mol_type = other RNA
tcagcatccactacaagtc

SEQ ID NO: 17705 - RNA, 19 nt, synthetic construct
  source 1..19: mol_type = other RNA
cctcacctcgcagactggg

SEQ ID NO: 17706 - RNA, 19 nt, synthetic construct
  source 1..19: mol_type = other RNA
gacctgcaagaacgaagac

SEQ ID NO: 17707 - RNA, 19 nt, synthetic construct
  source 1..19: mol_type = other RNA
cgtgcgtgtgctttgctgt

SEQ ID NO: 17708 - RNA, 19 nt, synthetic construct
  source 1..19: mol_type = other RNA
accacaacagccactacga

SEQ ID NO: 17709 - RNA, 19 nt, synthetic construct
  source 1..19: mol_type = other RNA
accacaacagccactacga

SEQ ID NO: 17710 - RNA, 19 nt, synthetic construct
  source 1..19: mol_type = other RNA
accacaacagccactacga

SEQ ID NO: 17711 - RNA, 19 nt, synthetic construct
  source 1..19: mol_type = other RNA
accacaacagccactacga

SEQ ID NO: 17712 - RNA, 19 nt, synthetic construct
  source 1..19: mol_type = other RNA
accacaacagccactacga

SEQ ID NO: 17713 - RNA, 19 nt, synthetic construct
  source 1..19: mol_type = other RNA
aacctcaggggttgcaggc

SEQ ID NO: 17714 - RNA, 19 nt, synthetic construct
  source 1..19: mol_type = other RNA
cagccactgccccagtacc

SEQ ID NO: 17715 - RNA, 19 nt, synthetic construct
  source 1..19: mol_type = other RNA
gccactgccccagtacccc

SEQ ID NO: 17716 - RNA, 19 nt, synthetic construct
  source 1..19: mol_type = other RNA
ccacaacagccactacgac

SEQ ID NO: 17717 - RNA, 19 nt, synthetic construct
  source 1..19: mol_type = other RNA
ccacaacagccactacgac

SEQ ID NO: 17718 - RNA, 19 nt, synthetic construct
  source 1..19: mol_type = other RNA
cggccatcccgtcctccac

SEQ ID NO: 17719 - RNA, 19 nt, synthetic construct
  source 1..19: mol_type = other RNA
ccacaacagccactacgac

SEQ ID NO: 17720 - RNA, 19 nt, synthetic construct
  source 1..19: mol_type = other RNA
ccacaacagccactacgac

SEQ ID NO: 17721 - RNA, 19 nt, synthetic construct
  source 1..19: mol_type = other RNA
ccacaacagccactacgac

SEQ ID NO: 17722 - RNA, 19 nt, synthetic construct
  source 1..19: mol_type = other RNA
ggctgcctgtgccaatgcc

SEQ ID NO: 17723 - RNA, 19 nt, synthetic construct
  source 1..19: mol_type = other RNA
cagcgactggagggacggc

SEQ ID NO: 17724 - RNA, 19 nt, synthetic construct
  source 1..19: mol_type = other RNA
cctcaggggttgcaggcgg

SEQ ID NO: 17725 - RNA, 19 nt, synthetic construct
  source 1..19: mol_type = other RNA
aggtcgggcaggtgctgac

SEQ ID NO: 17726 - RNA, 19 nt, synthetic construct
  source 1..19: mol_type = other RNA
gcctggagacggggctgac

SEQ ID NO: 17727 - RNA, 19 nt, synthetic construct
  source 1..19: mol_type = other RNA
cctggagacggggctgacc

SEQ ID NO: 17728 - RNA, 19 nt, synthetic construct
  source 1..19: mol_type = other RNA
acctgcaagaacgaagacc

SEQ ID NO: 17729 - RNA, 19 nt, synthetic construct
  source 1..19: mol_type = other RNA
gtgcttcaactacaacgtg

SEQ ID NO: 17730 - RNA, 19 nt, synthetic construct
  source 1..19: mol_type = other RNA
cttcaactacaacgtgcgt

SEQ ID NO: 17731 - RNA, 19 nt, synthetic construct
  source 1..19: mol_type = other RNA
ctttgctgtgacgactaca

SEQ ID NO: 17732 - RNA, 19 nt, synthetic construct
  source 1..19: mol_type = other RNA
ctacagccactgccccagt

SEQ ID NO: 17733 - RNA, 19 nt, synthetic construct
  source 1..19: mol_type = other RNA
agccactgccccagtaccc

SEQ ID NO: 17734 - RNA, 19 nt, synthetic construct
  source 1..19: mol_type = other RNA
cactgccccagtaccccag

SEQ ID NO: 17735 - RNA, 19 nt, synthetic construct
  source 1..19: mol_type = other RNA
ctgccccagtaccccagcc

SEQ ID NO: 17736 - RNA, 19 nt, synthetic construct
  source 1..19: mol_type = other RNA
cccagtaccccagccacca

SEQ ID NO: 17737 - RNA, 19 nt, synthetic construct
  source 1..19: mol_type = other RNA
gtaccccagccaccagctc

SEQ ID NO: 17738 - RNA, 19 nt, synthetic construct
  source 1..19: mol_type = other RNA
cgccctcctcaactccggg

SEQ ID NO: 17739 - RNA, 19 nt, synthetic construct
  source 1..19: mol_type = other RNA
caactccggggacgacctg

SEQ ID NO: 17740 - RNA, 19 nt, synthetic construct
  source 1..19: mol_type = other RNA
ccggggacgacctggatcc

SEQ ID NO: 17741 - RNA, 19 nt, synthetic construct
  source 1..19: mol_type = other RNA
ggacgacctggatcctcac

SEQ ID NO: 17742 - RNA, 19 nt, synthetic construct
  source 1..19: mol_type = other RNA
gccgaccacaacagccact

SEQ ID NO: 17743 - RNA, 19 nt, synthetic construct
  source 1..19: mol_type = other RNA
ccgaccacaacagccacta

SEQ ID NO: 17744 - RNA, 19 nt, synthetic construct
  source 1..19: mol_type = other RNA
actgcgtccactggatcca

SEQ ID NO: 17745 - RNA, 19 nt, synthetic construct
  source 1..19: mol_type = other RNA
ggtcagagtggctggacta

SEQ ID NO: 17746 - RNA, 19 nt, synthetic construct
  source 1..19: mol_type = other RNA
ccggggacgacctggatcc

SEQ ID NO: 17747 - RNA, 19 nt, synthetic construct
  source 1..19: mol_type = other RNA
ctgaccacaacagccacta

SEQ ID NO: 17748 - RNA, 19 nt, synthetic construct
  source 1..19: mol_type = other RNA
gggccacaccagggccacc

SEQ ID NO: 17749 - RNA, 19 nt, synthetic construct
  source 1..19: mol_type = other RNA
ggtcagagtggctggacta

SEQ ID NO: 17750 - RNA, 19 nt, synthetic construct
  source 1..19: mol_type = other RNA
ccggggacgacctggatcc

SEQ ID NO: 17751 - RNA, 19 nt, synthetic construct
  source 1..19: mol_type = other RNA
ggtcagagtggctggacta

SEQ ID NO: 17752 - RNA, 19 nt, synthetic construct
  source 1..19: mol_type = other RNA
cgccctcctcaactccggg

SEQ ID NO: 17753 - RNA, 19 nt, synthetic construct
  source 1..19: mol_type = other RNA
caactccggggacgacctg

SEQ ID NO: 17754 - RNA, 19 nt, synthetic construct
  source 1..19: mol_type = other RNA
ccggggacgacctggatcc

SEQ ID NO: 17755 - RNA, 19 nt, synthetic construct
  source 1..19: mol_type = other RNA
ggacgacctggatcctcac

SEQ ID NO: 17756 - RNA, 19 nt, synthetic construct
  source 1..19: mol_type = other RNA
ctgaccacaacagccacta

SEQ ID NO: 17757 - RNA, 19 nt, synthetic construct
  source 1..19: mol_type = other RNA
ggtcagagtggctggacta

SEQ ID NO: 17758 - RNA, 19 nt, synthetic construct
  source 1..19: mol_type = other RNA
ccggggacgacctggatcc

SEQ ID NO: 17759 - RNA, 19 nt, synthetic construct
  source 1..19: mol_type = other RNA
ctgaccacaacagccacta

SEQ ID NO: 17760 - RNA, 19 nt, synthetic construct
  source 1..19: mol_type = other RNA
ccggggacgacctggatcc

SEQ ID NO: 17761 - RNA, 19 nt, synthetic construct
  source 1..19: mol_type = other RNA
ctgaccacaacagccacta

SEQ ID NO: 17762 - RNA, 19 nt, synthetic construct
  source 1..19: mol_type = other RNA
actgcgtccactggatcca

SEQ ID NO: 17763 - RNA, 19 nt, synthetic construct
  source 1..19: mol_type = other RNA
ctgaccacaacagccacta

SEQ ID NO: 17764 - RNA, 19 nt, synthetic construct
  source 1..19: mol_type = other RNA
caccccatgcccaccacag

SEQ ID NO: 17765 - RNA, 19 nt, synthetic construct
  source 1..19: mol_type = other RNA
caacctcaggggttgcagg

SEQ ID NO: 17766 - RNA, 19 nt, synthetic construct
  source 1..19: mol_type = other RNA
cctggatcctcacaaagct

SEQ ID NO: 17767 - RNA, 19 nt, synthetic construct
  source 1..19: mol_type = other RNA
tcctcacaaagccgaccac

SEQ ID NO: 17768 - RNA, 19 nt, synthetic construct
  source 1..19: mol_type = other RNA
tacagccaccacgggaggc

SEQ ID NO: 17769 - RNA, 19 nt, synthetic construct
  source 1..19: mol_type = other RNA
acctggatcctcacaaagc

SEQ ID NO: 17770 - RNA, 19 nt, synthetic construct
  source 1..19: mol_type = other RNA
gactgcatccactggatcc

SEQ ID NO: 17771 - RNA, 19 nt, synthetic construct
  source 1..19: mol_type = other RNA
caggggttgcaggcgggga

SEQ ID NO: 17772 - RNA, 19 nt, synthetic construct
  source 1..19: mol_type = other RNA
acaacgtgcgtgtgctttg

SEQ ID NO: 17773 - RNA, 19 nt, synthetic construct
  source 1..19: mol_type = other RNA
caacgtgcgtgtgctttgc

SEQ ID NO: 17774 - RNA, 19 nt, synthetic construct
  source 1..19: mol_type = other RNA
ctcctggagaggtggtgca

SEQ ID NO: 17775 - RNA, 19 nt, synthetic construct
  source 1..19: mol_type = other RNA
cccccagcagtccccacac

SEQ ID NO: 17776 - RNA, 19 nt, synthetic construct
  source 1..19: mol_type = other RNA
cccccagcagtccccacac

SEQ ID NO: 17777 - RNA, 19 nt, synthetic construct
  source 1..19: mol_type = other RNA
cccccagcagtccccacac

SEQ ID NO: 17778 - RNA, 19 nt, synthetic construct
  source 1..19: mol_type = other RNA
cccccagcagtccccacac

SEQ ID NO: 17779 - RNA, 19 nt, synthetic construct
  source 1..19: mol_type = other RNA
gtggcaccagggctgcgag

SEQ ID NO: 17780 - RNA, 19 nt, synthetic construct
  source 1..19: mol_type = other RNA
caggctgacgacttcacgg

SEQ ID NO: 17781 - RNA, 19 nt, synthetic construct
  source 1..19: mol_type = other RNA
agccactcccttctccagt

SEQ ID NO: 17782 - RNA, 19 nt, synthetic construct
  source 1..19: mol_type = other RNA
agccaccaaatccacagct

SEQ ID NO: 17783 - RNA, 19 nt, synthetic construct
  source 1..19: mol_type = other RNA
agccactcccttctccagt

SEQ ID NO: 17784 - RNA, 19 nt, synthetic construct
  source 1..19: mol_type = other RNA
agccaccaaatccacagct

SEQ ID NO: 17785 - RNA, 19 nt, synthetic construct
  source 1..19: mol_type = other RNA
aggggttgcaggcggggac

SEQ ID NO: 17786 - RNA, 19 nt, synthetic construct
  source 1..19: mol_type = other RNA
cagctccacggccacgccc

SEQ ID NO: 17787 - RNA, 19 nt, synthetic construct
  source 1..19: mol_type = other RNA
ctccaggaccacagccacg

SEQ ID NO: 17788 - RNA, 19 nt, synthetic construct
  source 1..19: mol_type = other RNA
gagctgaccacaacagcca

SEQ ID NO: 17789 - RNA, 19 nt, synthetic construct
  source 1..19: mol_type = other RNA
accacacccatggccacca

SEQ ID NO: 17790 - RNA, 19 nt, synthetic construct
  source 1..19: mol_type = other RNA
ccaggggcacctccaggac

SEQ ID NO: 17791 - RNA, 19 nt, synthetic construct
  source 1..19: mol_type = other RNA
aagctgaccacaacagcca

SEQ ID NO: 17792 - RNA, 19 nt, synthetic construct
  source 1..19: mol_type = other RNA
gagctgaccacaacagcca

SEQ ID NO: 17793 - RNA, 19 nt, synthetic construct
  source 1..19: mol_type = other RNA
gagctgaccacaacagcca

SEQ ID NO: 17794 - RNA, 19 nt, synthetic construct
  source 1..19: mol_type = other RNA
caccacagccaccatgaca

SEQ ID NO: 17795 - RNA, 19 nt, synthetic construct
  source 1..19: mol_type = other RNA
gagctgaccacaacagcca

SEQ ID NO: 17796 - RNA, 19 nt, synthetic construct
  source 1..19: mol_type = other RNA
tggcaccagggctgcgaga

SEQ ID NO: 17797 - RNA, 19 nt, synthetic construct
  source 1..19: mol_type = other RNA
acttcccaacctcaggggt

SEQ ID NO: 17798 - RNA, 19 nt, synthetic construct
  source 1..19: mol_type = other RNA
cctccacagtgcttaccac

SEQ ID NO: 17799 - RNA, 19 nt, synthetic construct
  source 1..19: mol_type = other RNA
cctccacagtgcttaccac

SEQ ID NO: 17800 - RNA, 19 nt, synthetic construct
  source 1..19: mol_type = other RNA
cctccacagtgcttaccac

SEQ ID NO: 17801 - RNA, 19 nt, synthetic construct
  source 1..19: mol_type = other RNA
gccctgtccagccctcacc

SEQ ID NO: 17802 - RNA, 19 nt, synthetic construct
  source 1..19: mol_type = other RNA
gccctgtccagccctcacc

SEQ ID NO: 17803 - RNA, 19 nt, synthetic construct
  source 1..19: mol_type = other RNA
gccctgtccagccctcacc

SEQ ID NO: 17804 - RNA, 19 nt, synthetic construct
  source 1..19: mol_type = other RNA
tcctgcacacctacaccca

SEQ ID NO: 17805 - RNA, 19 nt, synthetic construct
  source 1..19: mol_type = other RNA
ctgtggcccctccccggcc

SEQ ID NO: 17806 - RNA, 19 nt, synthetic construct
  source 1..19: mol_type = other RNA
acgtgcgtgtgctttgctg

SEQ ID NO: 17807 - RNA, 19 nt, synthetic construct
  source 1..19: mol_type = other RNA
agtccagggactgcaaccg

SEQ ID NO: 17808 - RNA, 19 nt, synthetic construct
  source 1..19: mol_type = other RNA
gcccttccagcactgagaa

SEQ ID NO: 17809 - RNA, 19 nt, synthetic construct
  source 1..19: mol_type = other RNA
atcctcacagagctgacca

SEQ ID NO: 17810 - RNA, 19 nt, synthetic construct
  source 1..19: mol_type = other RNA
agagctgaccacaacagcc

SEQ ID NO: 17811 - RNA, 19 nt, synthetic construct
  source 1..19: mol_type = other RNA
agtccagggactgcaaccg

SEQ ID NO: 17812 - RNA, 19 nt, synthetic construct
  source 1..19: mol_type = other RNA
gcccttccagcactgagaa

SEQ ID NO: 17813 - RNA, 19 nt, synthetic construct
  source 1..19: mol_type = other RNA
atcctcacagagctgacca

SEQ ID NO: 17814 - RNA, 19 nt, synthetic construct
  source 1..19: mol_type = other RNA
agtccagggactgcaaccg

SEQ ID NO: 17815 - RNA, 19 nt, synthetic construct
  source 1..19: mol_type = other RNA
gcccttccagcactgagaa

SEQ ID NO: 17816 - RNA, 19 nt, synthetic construct
  source 1..19: mol_type = other RNA
agtccagggactgcaaccg

SEQ ID NO: 17817 - RNA, 19 nt, synthetic construct
  source 1..19: mol_type = other RNA
gcccttccagcactgagaa

SEQ ID NO: 17818 - RNA, 19 nt, synthetic construct
  source 1..19: mol_type = other RNA
atcctcacagagctgacca

SEQ ID NO: 17819 - RNA, 19 nt, synthetic construct
  source 1..19: mol_type = other RNA
agagctgaccacaacagcc

SEQ ID NO: 17820 - RNA, 19 nt, synthetic construct
  source 1..19: mol_type = other RNA
atcctcacagagctgacca

SEQ ID NO: 17821 - RNA, 19 nt, synthetic construct
  source 1..19: mol_type = other RNA
atcctcacagagctgacca

SEQ ID NO: 17822 - RNA, 19 nt, synthetic construct
  source 1..19: mol_type = other RNA
agagctgaccacaacagcc

SEQ ID NO: 17823 - RNA, 19 nt, synthetic construct
  source 1..19: mol_type = other RNA
gcccttccagcactgagaa

SEQ ID NO: 17824 - RNA, 19 nt, synthetic construct
  source 1..19: mol_type = other RNA
tgagctgaccacaacagcc

SEQ ID NO: 17825 - RNA, 19 nt, synthetic construct
  source 1..19: mol_type = other RNA
accctgggagagcctgtgg

SEQ ID NO: 17826 - RNA, 19 nt, synthetic construct
  source 1..19: mol_type = other RNA
agtggccgggcagtgctgt

SEQ ID NO: 17827 - RNA, 19 nt, synthetic construct
  source 1..19: mol_type = other RNA
cacccaggcaactgctggc

SEQ ID NO: 17828 - RNA, 19 nt, synthetic construct
  source 1..19: mol_type = other RNA
cctggatcctcacagagca

SEQ ID NO: 17829 - RNA, 19 nt, synthetic construct
  source 1..19: mol_type = other RNA
cacccaggcaactgctggc

SEQ ID NO: 17830 - RNA, 19 nt, synthetic construct
  source 1..19: mol_type = other RNA
cacccaggcaactgctggc

SEQ ID NO: 17831 - RNA, 19 nt, synthetic construct
  source 1..19: mol_type = other RNA
tcctcacagagctgaccac

SEQ ID NO: 17832 - RNA, 19 nt, synthetic construct
  source 1..19: mol_type = other RNA
tcctcacagagctgaccac

SEQ ID NO: 17833 - RNA, 19 nt, synthetic construct
  source 1..19: mol_type = other RNA
tcctcacagagctgaccac

SEQ ID NO: 17834 - RNA, 19 nt, synthetic construct
  source 1..19: mol_type = other RNA
tcctcacagagctgaccac

SEQ ID NO: 17835 - RNA, 19 nt, synthetic construct
  source 1..19: mol_type = other RNA
tcctcacagagctgaccac

SEQ ID NO: 17836 - RNA, 19 nt, synthetic construct
  source 1..19: mol_type = other RNA
acggggctgacctgcaaga

SEQ ID NO: 17837 - RNA, 19 nt, synthetic construct
  source 1..19: mol_type = other RNA
gctggtgctgacattcctg

SEQ ID NO: 17838 - RNA, 19 nt, synthetic construct
  source 1..19: mol_type = other RNA
cggggctgacctgcaagaa

SEQ ID NO: 17839 - RNA, 19 nt, synthetic construct
  source 1..19: mol_type = other RNA
gcctcctccacccaggcaa

SEQ ID NO: 17840 - RNA, 19 nt, synthetic construct
  source 1..19: mol_type = other RNA
gcctcctccacccaggcaa

SEQ ID NO: 17841 - RNA, 19 nt, synthetic construct
  source 1..19: mol_type = other RNA
gcctcctccacccaggcaa

SEQ ID NO: 17842 - RNA, 19 nt, synthetic construct
  source 1..19: mol_type = other RNA
ccggccctcccggtctcca

SEQ ID NO: 17843 - RNA, 19 nt, synthetic construct
  source 1..19: mol_type = other RNA
ctcaggggttgcaggcggg

SEQ ID NO: 17844 - RNA, 19 nt, synthetic construct
  source 1..19: mol_type = other RNA
gcacagggtgtgcagcccc

SEQ ID NO: 17845 - RNA, 19 nt, synthetic construct
  source 1..19: mol_type = other RNA
gccccagtaccccagccac

SEQ ID NO: 17846 - RNA, 19 nt, synthetic construct
  source 1..19: mol_type = other RNA
ccagccaccagctccacgg

SEQ ID NO: 17847 - RNA, 19 nt, synthetic construct
  source 1..19: mol_type = other RNA
cagccaccagctccacggc

SEQ ID NO: 17848 - RNA, 19 nt, synthetic construct
  source 1..19: mol_type = other RNA
ggatcctcacagagctgac

SEQ ID NO: 17849 - RNA, 19 nt, synthetic construct
  source 1..19: mol_type = other RNA
ggatcctcacagagctgac

SEQ ID NO: 17850 - RNA, 19 nt, synthetic construct
  source 1..19: mol_type = other RNA
ggatcctcacagagctgac

SEQ ID NO: 17851 - RNA, 19 nt, synthetic construct
  source 1..19: mol_type = other RNA
ggatcctcacagagctgac

SEQ ID NO: 17852 - RNA, 19 nt, synthetic construct
  source 1..19: mol_type = other RNA
ggatcctcacagagctgac

SEQ ID NO: 17853 - RNA, 19 nt, synthetic construct
  source 1..19: mol_type = other RNA
aggaaccagagcccacagc

SEQ ID NO: 17854 - RNA, 19 nt, synthetic construct
  source 1..19: mol_type = other RNA
ctgcaactgcccttccagc

SEQ ID NO: 17855 - RNA, 19 nt, synthetic construct
  source 1..19: mol_type = other RNA
cacaaccacctgcccccag

SEQ ID NO: 17856 - RNA, 19 nt, synthetic construct
  source 1..19: mol_type = other RNA
gctcctggagaggtggtgc

SEQ ID NO: 17857 - RNA, 19 nt, synthetic construct
  source 1..19: mol_type = other RNA
caccaccacccaggccctg

SEQ ID NO: 17858 - RNA, 19 nt, synthetic construct
  source 1..19: mol_type = other RNA
cgaagaccagacaggcagg

SEQ ID NO: 17859 - RNA, 19 nt, synthetic construct
  source 1..19: mol_type = other RNA
cgactacagccactgcccc

SEQ ID NO: 17860 - RNA, 19 nt, synthetic construct
  source 1..19: mol_type = other RNA
tccaggaccacagccacgg

SEQ ID NO: 17861 - RNA, 19 nt, synthetic construct
  source 1..19: mol_type = other RNA
tggatcctcacagagctga

SEQ ID NO: 17862 - RNA, 19 nt, synthetic construct
  source 1..19: mol_type = other RNA
tggatcctcacagagctga

SEQ ID NO: 17863 - RNA, 19 nt, synthetic construct
  source 1..19: mol_type = other RNA
acaaccagtggctccacgg

SEQ ID NO: 17864 - RNA, 19 nt, synthetic construct
  source 1..19: mol_type = other RNA
cacccccttccccagggac

SEQ ID NO: 17865 - RNA, 19 nt, synthetic construct
  source 1..19: mol_type = other RNA
tggatcctcacagagctga

SEQ ID NO: 17866 - RNA, 19 nt, synthetic construct
  source 1..19: mol_type = other RNA
tggatcctcacagagctga

SEQ ID NO: 17867 - RNA, 19 nt, synthetic construct
  source 1..19: mol_type = other RNA
tggatcctcacagagctga

SEQ ID NO: 17868 - RNA, 19 nt, synthetic construct
  source 1..19: mol_type = other RNA
acaaccagtggctccacgg

SEQ ID NO: 17869 - RNA, 19 nt, synthetic construct
  source 1..19: mol_type = other RNA
gatggccagccagtccagc

SEQ ID NO: 17870 - RNA, 19 nt, synthetic construct
  source 1..19: mol_type = other RNA
gctgctgccaggaagctgc

SEQ ID NO: 17871 - RNA, 19 nt, synthetic construct
  source 1..19: mol_type = other RNA
ccactgccccagtacccca

SEQ ID NO: 17872 - RNA, 19 nt, synthetic construct
  source 1..19: mol_type = other RNA
cctcctccagcccagggac

SEQ ID NO: 17873 - RNA, 19 nt, synthetic construct
  source 1..19: mol_type = other RNA
ccacccacacacccccagt

SEQ ID NO: 17874 - RNA, 19 nt, synthetic construct
  source 1..19: mol_type = other RNA
cctcctccagcccagggac

SEQ ID NO: 17875 - RNA, 19 nt, synthetic construct
  source 1..19: mol_type = other RNA
ccacccacacacccccagt

SEQ ID NO: 17876 - RNA, 19 nt, synthetic construct
  source 1..19: mol_type = other RNA
cctcctccagcccagggac

SEQ ID NO: 17877 - RNA, 19 nt, synthetic construct
  source 1..19: mol_type = other RNA
ccacccacacacccccagt

SEQ ID NO: 17878 - RNA, 19 nt, synthetic construct
  source 1..19: mol_type = other RNA
cctcctccagcccagggac

SEQ ID NO: 17879 - RNA, 19 nt, synthetic construct
  source 1..19: mol_type = other RNA
ccacccacacacccccagt

SEQ ID NO: 17880 - RNA, 19 nt, synthetic construct
  source 1..19: mol_type = other RNA
cctcctccagcccagggac

SEQ ID NO: 17881 - RNA, 19 nt, synthetic construct
  source 1..19: mol_type = other RNA
tgctccccagcagcctgcc

SEQ ID NO: 17882 - RNA, 19 nt, synthetic construct
  source 1..19: mol_type = other RNA
acgactacagccactgccc

SEQ ID NO: 17883 - RNA, 19 nt, synthetic construct
  source 1..19: mol_type = other RNA
aagccgaccacaacagcca

SEQ ID NO: 17884 - RNA, 19 nt, synthetic construct
  source 1..19: mol_type = other RNA
acccccacagtgctgacca

SEQ ID NO: 17885 - RNA, 19 nt, synthetic construct
  source 1..19: mol_type = other RNA
cacaaccagtggctccacg

SEQ ID NO: 17886 - RNA, 19 nt, synthetic construct
  source 1..19: mol_type = other RNA
acccccacagtgctgacca

SEQ ID NO: 17887 - RNA, 19 nt, synthetic construct
  source 1..19: mol_type = other RNA
cacaaccagtggctccacg

SEQ ID NO: 17888 - RNA, 19 nt, synthetic construct
  source 1..19: mol_type = other RNA
cacagggtgtgcagccccc

SEQ ID NO: 17889 - RNA, 19 nt, synthetic construct
  source 1..19: mol_type = other RNA
acctcaggggttgcaggcg

SEQ ID NO: 17890 - RNA, 19 nt, synthetic construct
  source 1..19: mol_type = other RNA
cagcctggagacggggctg

SEQ ID NO: 17891 - RNA, 19 nt, synthetic construct
  source 1..19: mol_type = other RNA
cgccaccacacctgcagcc

SEQ ID NO: 17892 - RNA, 19 nt, synthetic construct
  source 1..19: mol_type = other RNA
cgccaccacacctgcagcc

SEQ ID NO: 17893 - RNA, 19 nt, synthetic construct
  source 1..19: mol_type = other RNA
cgccaccacacctgcagcc

SEQ ID NO: 17894 - RNA, 19 nt, synthetic construct
  source 1..19: mol_type = other RNA
caggggcacctccaggacc

SEQ ID NO: 17895 - RNA, 19 nt, synthetic construct
  source 1..19: mol_type = other RNA
cgccaccacacctgcagcc

SEQ ID NO: 17896 - RNA, 19 nt, synthetic construct
  source 1..19: mol_type = other RNA
cccgcagccaccagctcca

SEQ ID NO: 17897 - RNA, 19 nt, synthetic construct
  source 1..19: mol_type = other RNA
atgtccaccatgtccacaa

SEQ ID NO: 17898 - RNA, 19 nt, synthetic construct
  source 1..19: mol_type = other RNA
accacctgcccccagagcc

SEQ ID NO: 17899 - RNA, 19 nt, synthetic construct
  source 1..19: mol_type = other RNA
cctgcacacctacacccac

SEQ ID NO: 17900 - RNA, 19 nt, synthetic construct
  source 1..19: mol_type = other RNA
ccggcccggctccctccct

SEQ ID NO: 17901 - RNA, 19 nt, synthetic construct
  source 1..19: mol_type = other RNA
cagagacccagggccctgt

SEQ ID NO: 17902 - RNA, 19 nt, synthetic construct
  source 1..19: mol_type = other RNA
actggaggtgccctgagct

SEQ ID NO: 17903 - RNA, 19 nt, synthetic construct
  source 1..19: mol_type = other RNA
gaggtgccctgagctctgc

SEQ ID NO: 17904 - RNA, 19 nt, synthetic construct
  source 1..19: mol_type = other RNA
aggtgccctgagctctgcc

SEQ ID NO: 17905 - RNA, 19 nt, synthetic construct
  source 1..19: mol_type = other RNA
cacctccttcaacaccacc

SEQ ID NO: 17906 - RNA, 19 nt, synthetic construct
  source 1..19: mol_type = other RNA
aggctgacgacttcacggc

SEQ ID NO: 17907 - RNA, 19 nt, synthetic construct
  source 1..19: mol_type = other RNA
ggggtggtggaggccacgg

SEQ ID NO: 17908 - RNA, 19 nt, synthetic construct
  source 1..19: mol_type = other RNA
gggtggtggaggccacggg

SEQ ID NO: 17909 - RNA, 19 nt, synthetic construct
  source 1..19: mol_type = other RNA
ggtggtggaggccacgggc

SEQ ID NO: 17910 - RNA, 19 nt, synthetic construct
  source 1..19: mol_type = other RNA
tcccccggggctggtgtcg

SEQ ID NO: 17911 - RNA, 19 nt, synthetic construct
  source 1..19: mol_type = other RNA
ccggcctgggaggcggaga

SEQ ID NO: 17912 - RNA, 19 nt, synthetic construct
  source 1..19: mol_type = other RNA
ggcccctccccggccccag

SEQ ID NO: 17913 - RNA, 19 nt, synthetic construct
  source 1..19: mol_type = other RNA
gcccctccccggccccagg

SEQ ID NO: 17914 - RNA, 19 nt, synthetic construct
  source 1..19: mol_type = other RNA
gttgcaggcggggacatgg

SEQ ID NO: 17915 - RNA, 19 nt, synthetic construct
  source 1..19: mol_type = other RNA
ccaggtcgggcaggtgctg

SEQ ID NO: 17916 - RNA, 19 nt, synthetic construct
  source 1..19: mol_type = other RNA
ggtcgggcaggtgctgacc

SEQ ID NO: 17917 - RNA, 19 nt, synthetic construct
  source 1..19: mol_type = other RNA
gtcgggcaggtgctgacct

SEQ ID NO: 17918 - RNA, 19 nt, synthetic construct
  source 1..19: mol_type = other RNA
agcctggagacggggctga

SEQ ID NO: 17919 - RNA, 19 nt, synthetic construct
  source 1..19: mol_type = other RNA
gactacagccactgcccca

SEQ ID NO: 17920 - RNA, 19 nt, synthetic construct
  source 1..19: mol_type = other RNA
actacagccactgccccag

SEQ ID NO: 17921 - RNA, 19 nt, synthetic construct
  source 1..19: mol_type = other RNA
tacagccactgccccagta

SEQ ID NO: 17922 - RNA, 19 nt, synthetic construct
  source 1..19: mol_type = other RNA
acagccactgccccagtac

SEQ ID NO: 17923 - RNA, 19 nt, synthetic construct
  source 1..19: mol_type = other RNA
tgccccagtaccccagcca

SEQ ID NO: 17924 - RNA, 19 nt, synthetic construct
  source 1..19: mol_type = other RNA
ccccagtaccccagccacc

SEQ ID NO: 17925 - RNA, 19 nt, synthetic construct
  source 1..19: mol_type = other RNA
agtaccccagccaccagct

SEQ ID NO: 17926 - RNA, 19 nt, synthetic construct
  source 1..19: mol_type = other RNA
taccccagccaccagctcc

SEQ ID NO: 17927 - RNA, 19 nt, synthetic construct
  source 1..19: mol_type = other RNA
cccagccaccagctccacg

SEQ ID NO: 17928 - RNA, 19 nt, synthetic construct
  source 1..19: mol_type = other RNA
agccaccagctccacggcc

SEQ ID NO: 17929 - RNA, 19 nt, synthetic construct
  source 1..19: mol_type = other RNA
gccaccagctccacggcca

SEQ ID NO: 17930 - RNA, 19 nt, synthetic construct
  source 1..19: mol_type = other RNA
ccaccagctccacggccac

SEQ ID NO: 17931 - RNA, 19 nt, synthetic construct
  source 1..19: mol_type = other RNA
caccagctccacggccacg

SEQ ID NO: 17932 - RNA, 19 nt, synthetic construct
  source 1..19: mol_type = other RNA
ccagctccacggccacgcc

SEQ ID NO: 17933 - RNA, 19 nt, synthetic construct
  source 1..19: mol_type = other RNA
agctccacggccacgccct

SEQ ID NO: 17934 - RNA, 19 nt, synthetic construct
  source 1..19: mol_type = other RNA
ccacggccacgccctcctc

SEQ ID NO: 17935 - RNA, 19 nt, synthetic construct
  source 1..19: mol_type = other RNA
cggggacgacctggatcct

SEQ ID NO: 17936 - RNA, 19 nt, synthetic construct
  source 1..19: mol_type = other RNA
cgactgcgtccactggatc

SEQ ID NO: 17937 - RNA, 19 nt, synthetic construct
  source 1..19: mol_type = other RNA
ctccccctcccaaagtgct

SEQ ID NO: 17938 - RNA, 19 nt, synthetic construct
  source 1..19: mol_type = other RNA
tccagtccagggactgcaa

SEQ ID NO: 17939 - RNA, 19 nt, synthetic construct
  source 1..19: mol_type = other RNA
cccatcccctcttcctccc

SEQ ID NO: 17940 - RNA, 19 nt, synthetic construct
  source 1..19: mol_type = other RNA
gtggccaccccctcctcca

SEQ ID NO: 17941 - RNA, 19 nt, synthetic construct
  source 1..19: mol_type = other RNA
cggtgaccccctcctccat

SEQ ID NO: 17942 - RNA, 19 nt, synthetic construct
  source 1..19: mol_type = other RNA
cacctgcagccaccagcaa

SEQ ID NO: 17943 - RNA, 19 nt, synthetic construct
  source 1..19: mol_type = other RNA
cacccacacacccccagtg

SEQ ID NO: 17944 - RNA, 19 nt, synthetic construct
  source 1..19: mol_type = other RNA
cggtgcgcacagcctggac

SEQ ID NO: 17945 - RNA, 19 nt, synthetic construct
  source 1..19: mol_type = other RNA
tgcccaggcccagcctggt

SEQ ID NO: 17946 - RNA, 19 nt, synthetic construct
  source 1..19: mol_type = other RNA
cggggacgacctggatcct

SEQ ID NO: 17947 - RNA, 19 nt, synthetic construct
  source 1..19: mol_type = other RNA
cagagctgaccacaacagc

SEQ ID NO: 17948 - RNA, 19 nt, synthetic construct
  source 1..19: mol_type = other RNA
gctgaccacaacagccact

SEQ ID NO: 17949 - RNA, 19 nt, synthetic construct
  source 1..19: mol_type = other RNA
ggccaccccgtcctccacc

SEQ ID NO: 17950 - RNA, 19 nt, synthetic construct
  source 1..19: mol_type = other RNA
gccaccccgtcctccaccc

SEQ ID NO: 17951 - RNA, 19 nt, synthetic construct
  source 1..19: mol_type = other RNA
tccacggccaccgcctcct

SEQ ID NO: 17952 - RNA, 19 nt, synthetic construct
  source 1..19: mol_type = other RNA
ccacggccaccgcctcctc

SEQ ID NO: 17953 - RNA, 19 nt, synthetic construct
  source 1..19: mol_type = other RNA
ccacccaggcaactgctgg

SEQ ID NO: 17954 - RNA, 19 nt, synthetic construct
  source 1..19: mol_type = other RNA
tccagtccagggactgcaa

SEQ ID NO: 17955 - RNA, 19 nt, synthetic construct
  source 1..19: mol_type = other RNA
gtggccaccccctcctcca

SEQ ID NO: 17956 - RNA, 19 nt, synthetic construct
  source 1..19: mol_type = other RNA
cggtgaccccctcctccat

SEQ ID NO: 17957 - RNA, 19 nt, synthetic construct
  source 1..19: mol_type = other RNA
cacctgcagccaccagcag

SEQ ID NO: 17958 - RNA, 19 nt, synthetic construct
  source 1..19: mol_type = other RNA
acctgcagccaccagcagc

SEQ ID NO: 17959 - RNA, 19 nt, synthetic construct
  source 1..19: mol_type = other RNA
cacccacacacccccagtg

SEQ ID NO: 17960 - RNA, 19 nt, synthetic construct
  source 1..19: mol_type = other RNA
cggtgcgcacagcctggac

SEQ ID NO: 17961 - RNA, 19 nt, synthetic construct
  source 1..19: mol_type = other RNA
cgggccacaccagggccac

SEQ ID NO: 17962 - RNA, 19 nt, synthetic construct
  source 1..19: mol_type = other RNA
gaccacggccacggccaca

SEQ ID NO: 17963 - RNA, 19 nt, synthetic construct
  source 1..19: mol_type = other RNA
tgcccaggcccagcctggt

SEQ ID NO: 17964 - RNA, 19 nt, synthetic construct
  source 1..19: mol_type = other RNA
gagcagaccacagcagcca

SEQ ID NO: 17965 - RNA, 19 nt, synthetic construct
  source 1..19: mol_type = other RNA
ctccccctcccaaagtgct

SEQ ID NO: 17966 - RNA, 19 nt, synthetic construct
  source 1..19: mol_type = other RNA
ggccaccacacccacagcc

SEQ ID NO: 17967 - RNA, 19 nt, synthetic construct
  source 1..19: mol_type = other RNA
ccaaagccacttcctcctc

SEQ ID NO: 17968 - RNA, 19 nt, synthetic construct
  source 1..19: mol_type = other RNA
acacccatcccctccttca

SEQ ID NO: 17969 - RNA, 19 nt, synthetic construct
  source 1..19: mol_type = other RNA
cggggacgacctggatcct

SEQ ID NO: 17970 - RNA, 19 nt, synthetic construct
  source 1..19: mol_type = other RNA
actggccccacggccaccc

SEQ ID NO: 17971 - RNA, 19 nt, synthetic construct
  source 1..19: mol_type = other RNA
ggccaccccgtcctccacc

SEQ ID NO: 17972 - RNA, 19 nt, synthetic construct
  source 1..19: mol_type = other RNA
gccaccccgtcctccaccc

SEQ ID NO: 17973 - RNA, 19 nt, synthetic construct
  source 1..19: mol_type = other RNA
tccacggccaccgcctcct

SEQ ID NO: 17974 - RNA, 19 nt, synthetic construct
  source 1..19: mol_type = other RNA
ccacggccaccgcctcctc

SEQ ID NO: 17975 - RNA, 19 nt, synthetic construct
  source 1..19: mol_type = other RNA
tccagtccagggactgcaa

SEQ ID NO: 17976 - RNA, 19 nt, synthetic construct
  source 1..19: mol_type = other RNA
acagccatcccctcttcct

SEQ ID NO: 17977 - RNA, 19 nt, synthetic construct
  source 1..19: mol_type = other RNA
gccatcccctcttcctccc

SEQ ID NO: 17978 - RNA, 19 nt, synthetic construct
  source 1..19: mol_type = other RNA
gtggccaccccctcctcca

SEQ ID NO: 17979 - RNA, 19 nt, synthetic construct
  source 1..19: mol_type = other RNA
cggtgaccccctcctccat

SEQ ID NO: 17980 - RNA, 19 nt, synthetic construct
  source 1..19: mol_type = other RNA
cacctgcagccaccagcag

SEQ ID NO: 17981 - RNA, 19 nt, synthetic construct
  source 1..19: mol_type = other RNA
acctgcagccaccagcagc

SEQ ID NO: 17982 - RNA, 19 nt, synthetic construct
  source 1..19: mol_type = other RNA
cacccacacacccccagtg

SEQ ID NO: 17983 - RNA, 19 nt, synthetic construct
  source 1..19: mol_type = other RNA
cggtgcgcacagcctggac

SEQ ID NO: 17984 - RNA, 19 nt, synthetic construct
  source 1..19: mol_type = other RNA
aaccaccagtaccacccag

SEQ ID NO: 17985 - RNA, 19 nt, synthetic construct
  source 1..19: mol_type = other RNA
ctccaggaccacagccaca

SEQ ID NO: 17986 - RNA, 19 nt, synthetic construct
  source 1..19: mol_type = other RNA
ccacagccacacccagcaa

SEQ ID NO: 17987 - RNA, 19 nt, synthetic construct
  source 1..19: mol_type = other RNA
tgcccaggcccagcctggt

SEQ ID NO: 17988 - RNA, 19 nt, synthetic construct
  source 1..19: mol_type = other RNA
cggggacgacctggatcct

SEQ ID NO: 17989 - RNA, 19 nt, synthetic construct
  source 1..19: mol_type = other RNA
gctgaccacaacagccact

SEQ ID NO: 17990 - RNA, 19 nt, synthetic construct
  source 1..19: mol_type = other RNA
ggccaccccgtcctccacc

SEQ ID NO: 17991 - RNA, 19 nt, synthetic construct
  source 1..19: mol_type = other RNA
gccaccccgtcctccaccc

SEQ ID NO: 17992 - RNA, 19 nt, synthetic construct
  source 1..19: mol_type = other RNA
tccacggccaccgcctcct

SEQ ID NO: 17993 - RNA, 19 nt, synthetic construct
  source 1..19: mol_type = other RNA
ccacggccaccgcctcctc

SEQ ID NO: 17994 - RNA, 19 nt, synthetic construct
  source 1..19: mol_type = other RNA
ccacccaggcaactgctgg

SEQ ID NO: 17995 - RNA, 19 nt, synthetic construct
  source 1..19: mol_type = other RNA
tccagtccagggactgcaa

SEQ ID NO: 17996 - RNA, 19 nt, synthetic construct
  source 1..19: mol_type = other RNA
gccaccccctcttccaccc

SEQ ID NO: 17997 - RNA, 19 nt, synthetic construct
  source 1..19: mol_type = other RNA
ccaccccctcttccacccc

SEQ ID NO: 17998 - RNA, 19 nt, synthetic construct
  source 1..19: mol_type = other RNA
ccccctcttccaccccagg

SEQ ID NO: 17999 - RNA, 19 nt, synthetic construct
  source 1..19: mol_type = other RNA
agtcaccccctcctccagc

SEQ ID NO: 18000 - RNA, 19 nt, synthetic construct
  source 1..19: mol_type = other RNA
cacctgcagccaccagcag

SEQ ID NO: 18001 - RNA, 19 nt, synthetic construct
  source 1..19: mol_type = other RNA
acctgcagccaccagcagc

SEQ ID NO: 18002 - RNA, 19 nt, synthetic construct
  source 1..19: mol_type = other RNA
cacccacacacccccagtg

SEQ ID NO: 18003 - RNA, 19 nt, synthetic construct
  source 1..19: mol_type = other RNA
cggtgcgcacagcctggac

SEQ ID NO: 18004 - RNA, 19 nt, synthetic construct
  source 1..19: mol_type = other RNA
gaccacggccacggccaca

SEQ ID NO: 18005 - RNA, 19 nt, synthetic construct
  source 1..19: mol_type = other RNA
tgcccaggcccagcctggt

SEQ ID NO: 18006 - RNA, 19 nt, synthetic construct
  source 1..19: mol_type = other RNA
cggggacgacctggatcct

SEQ ID NO: 18007 - RNA, 19 nt, synthetic construct
  source 1..19: mol_type = other RNA
cagagctgaccacaacagc

SEQ ID NO: 18008 - RNA, 19 nt, synthetic construct
  source 1..19: mol_type = other RNA
gctgaccacaacagccact

SEQ ID NO: 18009 - RNA, 19 nt, synthetic construct
  source 1..19: mol_type = other RNA
actgcatccactggatcca

SEQ ID NO: 18010 - RNA, 19 nt, synthetic construct
  source 1..19: mol_type = other RNA
ggccaccccgtcctccacc

SEQ ID NO: 18011 - RNA, 19 nt, synthetic construct
  source 1..19: mol_type = other RNA
gccaccccgtcctccaccc

SEQ ID NO: 18012 - RNA, 19 nt, synthetic construct
  source 1..19: mol_type = other RNA
ctccccctcccaaagtgct

SEQ ID NO: 18013 - RNA, 19 nt, synthetic construct
  source 1..19: mol_type = other RNA
ggccaccacacccacagcc

SEQ ID NO: 18014 - RNA, 19 nt, synthetic construct
  source 1..19: mol_type = other RNA
ccaaagccacttcctcctc

SEQ ID NO: 18015 - RNA, 19 nt, synthetic construct
  source 1..19: mol_type = other RNA
cggggacgacctggatcct

SEQ ID NO: 18016 - RNA, 19 nt, synthetic construct
  source 1..19: mol_type = other RNA
actggccccacggccaccc

SEQ ID NO: 18017 - RNA, 19 nt, synthetic construct
  source 1..19: mol_type = other RNA
ggccaccccgtcctccacc

SEQ ID NO: 18018 - RNA, 19 nt, synthetic construct
  source 1..19: mol_type = other RNA
gccaccccgtcctccaccc

SEQ ID NO: 18019 - RNA, 19 nt, synthetic construct
  source 1..19: mol_type = other RNA
cagagctgaccacaacagc

SEQ ID NO: 18020 - RNA, 19 nt, synthetic construct
  source 1..19: mol_type = other RNA
gctgaccacaacagccact

SEQ ID NO: 18021 - RNA, 19 nt, synthetic construct
  source 1..19: mol_type = other RNA
cgactgcgtccactggatc

SEQ ID NO: 18022 - RNA, 19 nt, synthetic construct
  source 1..19: mol_type = other RNA
ggccaccccgtcctccacc

SEQ ID NO: 18023 - RNA, 19 nt, synthetic construct
  source 1..19: mol_type = other RNA
gccaccccgtcctccaccc

SEQ ID NO: 18024 - RNA, 19 nt, synthetic construct
  source 1..19: mol_type = other RNA
tccacggccaccgcctcct

SEQ ID NO: 18025 - RNA, 19 nt, synthetic construct
  source 1..19: mol_type = other RNA
ccacggccaccgcctcctc

SEQ ID NO: 18026 - RNA, 19 nt, synthetic construct
  source 1..19: mol_type = other RNA
ccacccaggcaactgctgg

SEQ ID NO: 18027 - RNA, 19 nt, synthetic construct
  source 1..19: mol_type = other RNA
tccagtccagggactgcaa

SEQ ID NO: 18028 - RNA, 19 nt, synthetic construct
  source 1..19: mol_type = other RNA
gtggccaccccctcctcca

SEQ ID NO: 18029 - RNA, 19 nt, synthetic construct
  source 1..19: mol_type = other RNA
cggtgaccccctcctccat

SEQ ID NO: 18030 - RNA, 19 nt, synthetic construct
  source 1..19: mol_type = other RNA
accagctccaaagccactt

SEQ ID NO: 18031 - RNA, 19 nt, synthetic construct
  source 1..19: mol_type = other RNA
ccaaagccacttcctcctc

SEQ ID NO: 18032 - RNA, 19 nt, synthetic construct
  source 1..19: mol_type = other RNA
ccatcccctcctccaccct

SEQ ID NO: 18033 - RNA, 19 nt, synthetic construct
  source 1..19: mol_type = other RNA
accaccacagccaccatga

SEQ ID NO: 18034 - RNA, 19 nt, synthetic construct
  source 1..19: mol_type = other RNA
ccaccacagccaccatgac

SEQ ID NO: 18035 - RNA, 19 nt, synthetic construct
  source 1..19: mol_type = other RNA
ttccacggccacaccctcc

SEQ ID NO: 18036 - RNA, 19 nt, synthetic construct
  source 1..19: mol_type = other RNA
gctgaccacaacagccact

SEQ ID NO: 18037 - RNA, 19 nt, synthetic construct
  source 1..19: mol_type = other RNA
cctgtcctccaccccaggg

SEQ ID NO: 18038 - RNA, 19 nt, synthetic construct
  source 1..19: mol_type = other RNA
ctgtcctccaccccaggga

SEQ ID NO: 18039 - RNA, 19 nt, synthetic construct
  source 1..19: mol_type = other RNA
tccacggccaccgcctcct

SEQ ID NO: 18040 - RNA, 19 nt, synthetic construct
  source 1..19: mol_type = other RNA
ccacggccaccgcctcctc

SEQ ID NO: 18041 - RNA, 19 nt, synthetic construct
  source 1..19: mol_type = other RNA
acccactggcttccccagc

SEQ ID NO: 18042 - RNA, 19 nt, synthetic construct
  source 1..19: mol_type = other RNA
cccactggcttccccagct

SEQ ID NO: 18043 - RNA, 19 nt, synthetic construct
  source 1..19: mol_type = other RNA
gccactgccgctgccgccc

SEQ ID NO: 18044 - RNA, 19 nt, synthetic construct
  source 1..19: mol_type = other RNA
cccgctgcccccgcgccct

SEQ ID NO: 18045 - RNA, 19 nt, synthetic construct
  source 1..19: mol_type = other RNA
tcaatggccaagtcttcca

SEQ ID NO: 18046 - RNA, 19 nt, synthetic construct
  source 1..19: mol_type = other RNA
acccacccccaccccatgc

SEQ ID NO: 18047 - RNA, 19 nt, synthetic construct
  source 1..19: mol_type = other RNA
ccacccccaccccatgccc

SEQ ID NO: 18048 - RNA, 19 nt, synthetic construct
  source 1..19: mol_type = other RNA
gacctcacctgcccaccca

SEQ ID NO: 18049 - RNA, 19 nt, synthetic construct
  source 1..19: mol_type = other RNA
taggaaccagagcccacag

SEQ ID NO: 18050 - RNA, 19 nt, synthetic construct
  source 1..19: mol_type = other RNA
tacctgtccccagggcttt

SEQ ID NO: 18051 - RNA, 19 nt, synthetic construct
  source 1..19: mol_type = other RNA
gctccccctcccaaagtgc

SEQ ID NO: 18052 - RNA, 19 nt, synthetic construct
  source 1..19: mol_type = other RNA
gctccccctcccaaagtgc

SEQ ID NO: 18053 - RNA, 19 nt, synthetic construct
  source 1..19: mol_type = other RNA
gctccccctcccaaagtgc

SEQ ID NO: 18054 - RNA, 19 nt, synthetic construct
  source 1..19: mol_type = other RNA
ccatcccctcctccaccct

SEQ ID NO: 18055 - RNA, 19 nt, synthetic construct
  source 1..19: mol_type = other RNA
gccaccgcctcctccactc

SEQ ID NO: 18056 - RNA, 19 nt, synthetic construct
  source 1..19: mol_type = other RNA
cctcctccactctgggaac

SEQ ID NO: 18057 - RNA, 19 nt, synthetic construct
  source 1..19: mol_type = other RNA
tggtgcatgggaaggagga

SEQ ID NO: 18058 - RNA, 19 nt, synthetic construct
  source 1..19: mol_type = other RNA
gtgcccaggcccagcctgg

SEQ ID NO: 18059 - RNA, 19 nt, synthetic construct
  source 1..19: mol_type = other RNA
gtgcccaggcccagcctgg

SEQ ID NO: 18060 - RNA, 19 nt, synthetic construct
  source 1..19: mol_type = other RNA
gtgcccaggcccagcctgg

SEQ ID NO: 18061 - RNA, 19 nt, synthetic construct
  source 1..19: mol_type = other RNA
gtgcccaggcccagcctgg

SEQ ID NO: 18062 - RNA, 19 nt, synthetic construct
  source 1..19: mol_type = other RNA
accagttccaaagccactt

SEQ ID NO: 18063 - RNA, 19 nt, synthetic construct
  source 1..19: mol_type = other RNA
accagttccaaagccactt

SEQ ID NO: 18064 - RNA, 19 nt, synthetic construct
  source 1..19: mol_type = other RNA
aagcacagggtgtgcagcc

SEQ ID NO: 18065 - RNA, 19 nt, synthetic construct
  source 1..19: mol_type = other RNA
agcacagggtgtgcagccc

SEQ ID NO: 18066 - RNA, 19 nt, synthetic construct
  source 1..19: mol_type = other RNA
cacggccaccgcctcctcc

SEQ ID NO: 18067 - RNA, 19 nt, synthetic construct
  source 1..19: mol_type = other RNA
ccagttccaaagccacttc

SEQ ID NO: 18068 - RNA, 19 nt, synthetic construct
  source 1..19: mol_type = other RNA
cacggccaccgcctcctcc

SEQ ID NO: 18069 - RNA, 19 nt, synthetic construct
  source 1..19: mol_type = other RNA
cacggccaccgcctcctcc

SEQ ID NO: 18070 - RNA, 19 nt, synthetic construct
  source 1..19: mol_type = other RNA
ccagttccaaagccacttc

SEQ ID NO: 18071 - RNA, 19 nt, synthetic construct
  source 1..19: mol_type = other RNA
cacggccaccgcctcctcc

SEQ ID NO: 18072 - RNA, 19 nt, synthetic construct
  source 1..19: mol_type = other RNA
cacggccaccgcctcctcc

SEQ ID NO: 18073 - RNA, 19 nt, synthetic construct
  source 1..19: mol_type = other RNA
aaagcacagggtgtgcagc

SEQ ID NO: 18074 - RNA, 19 nt, synthetic construct
  source 1..19: mol_type = other RNA
cggccaccccgtcctccac

SEQ ID NO: 18075 - RNA, 19 nt, synthetic construct
  source 1..19: mol_type = other RNA
cggccaccccgtcctccac

SEQ ID NO: 18076 - RNA, 19 nt, synthetic construct
  source 1..19: mol_type = other RNA
cggccaccccgtcctccac

SEQ ID NO: 18077 - RNA, 19 nt, synthetic construct
  source 1..19: mol_type = other RNA
cggccaccccgtcctccac

SEQ ID NO: 18078 - RNA, 19 nt, synthetic construct
  source 1..19: mol_type = other RNA
cggccaccccgtcctccac

SEQ ID NO: 18079 - RNA, 19 nt, synthetic construct
  source 1..19: mol_type = other RNA
cggccaccccgtcctccac

SEQ ID NO: 18080 - RNA, 19 nt, synthetic construct
  source 1..19: mol_type = other RNA
gcggggtggtggaggccac

SEQ ID NO: 18081 - RNA, 19 nt, synthetic construct
  source 1..19: mol_type = other RNA
tgccgctggaggagctggg

SEQ ID NO: 18082 - RNA, 19 nt, synthetic construct
  source 1..19: mol_type = other RNA
actgccccagtaccccagc

SEQ ID NO: 18083 - RNA, 19 nt, synthetic construct
  source 1..19: mol_type = other RNA
gccctttccagccctcacc

SEQ ID NO: 18084 - RNA, 19 nt, synthetic construct
  source 1..19: mol_type = other RNA
agccacagccacacccagc

SEQ ID NO: 18085 - RNA, 19 nt, synthetic construct
  source 1..19: mol_type = other RNA
gccacagccacacccagca

SEQ ID NO: 18086 - RNA, 19 nt, synthetic construct
  source 1..19: mol_type = other RNA
accccatgcccaccacagc

SEQ ID NO: 18087 - RNA, 19 nt, synthetic construct
  source 1..19: mol_type = other RNA
ctcacagagccgagcacta

SEQ ID NO: 18088 - RNA, 19 nt, synthetic construct
  source 1..19: mol_type = other RNA
gaacaaactaagcatgtgc

SEQ ID NO: 18089 - RNA, 19 nt, synthetic construct
  source 1..19: mol_type = other RNA
ccacagtgcttaccgccac

SEQ ID NO: 18090 - RNA, 19 nt, synthetic construct
  source 1..19: mol_type = other RNA
ccacagtgcttaccgccac

SEQ ID NO: 18091 - RNA, 19 nt, synthetic construct
  source 1..19: mol_type = other RNA
gccagagcctggaggctta

SEQ ID NO: 18092 - RNA, 19 nt, synthetic construct
  source 1..19: mol_type = other RNA
ccacacccatggccaccat

SEQ ID NO: 18093 - RNA, 19 nt, synthetic construct
  source 1..19: mol_type = other RNA
cctcacagagccgagcact

SEQ ID NO: 18094 - RNA, 19 nt, synthetic construct
  source 1..19: mol_type = other RNA
cctcacagagccgagcact

SEQ ID NO: 18095 - RNA, 19 nt, synthetic construct
  source 1..19: mol_type = other RNA
cctcacagagccgagcact

SEQ ID NO: 18096 - RNA, 19 nt, synthetic construct
  source 1..19: mol_type = other RNA
cctcacagagccgagcact

SEQ ID NO: 18097 - RNA, 19 nt, synthetic construct
  source 1..19: mol_type = other RNA
tccacggccacgccctcct

SEQ ID NO: 18098 - RNA, 19 nt, synthetic construct
  source 1..19: mol_type = other RNA
gctggctgacatcgagtgc

SEQ ID NO: 18099 - RNA, 19 nt, synthetic construct
  source 1..19: mol_type = other RNA
gacattcctgtggaacgga

SEQ ID NO: 18100 - RNA, 19 nt, synthetic construct
  source 1..19: mol_type = other RNA
agcagcaaccaccagtacc

SEQ ID NO: 18101 - RNA, 19 nt, synthetic construct
  source 1..19: mol_type = other RNA
accttcagcgtgtccactg

SEQ ID NO: 18102 - RNA, 19 nt, synthetic construct
  source 1..19: mol_type = other RNA
gagtgcatctgcagcatgt

SEQ ID NO: 18103 - RNA, 19 nt, synthetic construct
  source 1..19: mol_type = other RNA
atgccctgtgctggctgac

SEQ ID NO: 18104 - RNA, 19 nt, synthetic construct
  source 1..19: mol_type = other RNA
agcatcccaaagccccctc

SEQ ID NO: 18105 - RNA, 19 nt, synthetic construct
  source 1..19: mol_type = other RNA
tctgcaggaaccgtgagca

SEQ ID NO: 18106 - RNA, 19 nt, synthetic construct
  source 1..19: mol_type = other RNA
tctgcaggaaccgtgagca

SEQ ID NO: 18107 - RNA, 19 nt, synthetic construct
  source 1..19: mol_type = other RNA
cctcacagagcagaccaca

SEQ ID NO: 18108 - RNA, 19 nt, synthetic construct
  source 1..19: mol_type = other RNA
gtgctgaccagcacggcca

SEQ ID NO: 18109 - RNA, 19 nt, synthetic construct
  source 1..19: mol_type = other RNA
gtgctgaccagcacggcca

SEQ ID NO: 18110 - RNA, 19 nt, synthetic construct
  source 1..19: mol_type = other RNA
tctgcaggaaccgtgagca

SEQ ID NO: 18111 - RNA, 19 nt, synthetic construct
  source 1..19: mol_type = other RNA
tctgcaggaaccgtgagca

SEQ ID NO: 18112 - RNA, 19 nt, synthetic construct
  source 1..19: mol_type = other RNA
ccagtgctgaccagcacgg

SEQ ID NO: 18113 - RNA, 19 nt, synthetic construct
  source 1..19: mol_type = other RNA
gtgctgaccagcacggcca

SEQ ID NO: 18114 - RNA, 19 nt, synthetic construct
  source 1..19: mol_type = other RNA
acagcagaaaggatggctg

SEQ ID NO: 18115 - RNA, 19 nt, synthetic construct
  source 1..19: mol_type = other RNA
ggctggtccaggcaaggcc

SEQ ID NO: 18116 - RNA, 19 nt, synthetic construct
  source 1..19: mol_type = other RNA
aatccacagctaccagctt

SEQ ID NO: 18117 - RNA, 19 nt, synthetic construct
  source 1..19: mol_type = other RNA
agccacaaaatccacagct

SEQ ID NO: 18118 - RNA, 19 nt, synthetic construct
  source 1..19: mol_type = other RNA
aatccacagctaccagctt

SEQ ID NO: 18119 - RNA, 19 nt, synthetic construct
  source 1..19: mol_type = other RNA
tgtccacctggagccagga

SEQ ID NO: 18120 - RNA, 19 nt, synthetic construct
  source 1..19: mol_type = other RNA
gcctgctgcagggtaactc

SEQ ID NO: 18121 - RNA, 19 nt, synthetic construct
  source 1..19: mol_type = other RNA
tgtgacaatgccatccctc

SEQ ID NO: 18122 - RNA, 19 nt, synthetic construct
  source 1..19: mol_type = other RNA
cacctcgggcatcttgggc

SEQ ID NO: 18123 - RNA, 19 nt, synthetic construct
  source 1..19: mol_type = other RNA
ccacctcaggcaccttggg

SEQ ID NO: 18124 - RNA, 19 nt, synthetic construct
  source 1..19: mol_type = other RNA
cacctcgggcatcttgggc

SEQ ID NO: 18125 - RNA, 19 nt, synthetic construct
  source 1..19: mol_type = other RNA
ccacctcaggcaccttggg

SEQ ID NO: 18126 - RNA, 19 nt, synthetic construct
  source 1..19: mol_type = other RNA
agcatccggtcgacggcgg

SEQ ID NO: 18127 - RNA, 19 nt, synthetic construct
  source 1..19: mol_type = other RNA
agcagcacagtgactccct

SEQ ID NO: 18128 - RNA, 19 nt, synthetic construct
  source 1..19: mol_type = other RNA
agcagcacagtgactccct

SEQ ID NO: 18129 - RNA, 19 nt, synthetic construct
  source 1..19: mol_type = other RNA
agcagcacagtgactccct

SEQ ID NO: 18130 - RNA, 19 nt, synthetic construct
  source 1..19: mol_type = other RNA
cggaagaccagcgtgttca

SEQ ID NO: 18131 - RNA, 19 nt, synthetic construct
  source 1..19: mol_type = other RNA
accacggccacggccacac

SEQ ID NO: 18132 - RNA, 19 nt, synthetic construct
  source 1..19: mol_type = other RNA
accacggccacggccacac

SEQ ID NO: 18133 - RNA, 19 nt, synthetic construct
  source 1..19: mol_type = other RNA
cccctgaacccggcgcaca

SEQ ID NO: 18134 - RNA, 19 nt, synthetic construct
  source 1..19: mol_type = other RNA
ccagcagcctaaggacata

SEQ ID NO: 18135 - RNA, 19 nt, synthetic construct
  source 1..19: mol_type = other RNA
caaagtgccaactaccaca

SEQ ID NO: 18136 - RNA, 19 nt, synthetic construct
  source 1..19: mol_type = other RNA
ctcacagagccgagcacta

SEQ ID NO: 18137 - RNA, 19 nt, synthetic construct
  source 1..19: mol_type = other RNA
ctcacagagccgagcacta

SEQ ID NO: 18138 - RNA, 19 nt, synthetic construct
  source 1..19: mol_type = other RNA
ctcacagagccgagcacta

SEQ ID NO: 18139 - RNA, 19 nt, synthetic construct
  source 1..19: mol_type = other RNA
ccacagtgctgaccacgaa

SEQ ID NO: 18140 - RNA, 19 nt, synthetic construct
  source 1..19: mol_type = other RNA
ccacagtgctgaccacgaa

SEQ ID NO: 18141 - RNA, 19 nt, synthetic construct
  source 1..19: mol_type = other RNA
cctcacaaagctgaccaca

SEQ ID NO: 18142 - RNA, 19 nt, synthetic construct
  source 1..19: mol_type = other RNA
cgtgcaaccgtcccggctt

SEQ ID NO: 18143 - RNA, 19 nt, synthetic construct
  source 1..19: mol_type = other RNA
taaccgtgaccaggccccg

SEQ ID NO: 18144 - RNA, 19 nt, synthetic construct
  source 1..19: mol_type = other RNA
gcccctgctacgctcacgg

SEQ ID NO: 18145 - RNA, 19 nt, synthetic construct
  source 1..19: mol_type = other RNA
gctcacactaccaaagtgc

SEQ ID NO: 18146 - RNA, 19 nt, synthetic construct
  source 1..19: mol_type = other RNA
ggctggtgtcggatgggag

SEQ ID NO: 18147 - RNA, 19 nt, synthetic construct
  source 1..19: mol_type = other RNA
ccagtgccgaacaccatgg

SEQ ID NO: 18148 - RNA, 19 nt, synthetic construct
  source 1..19: mol_type = other RNA
tagcagcagaaccaccgag

SEQ ID NO: 18149 - RNA, 19 nt, synthetic construct
  source 1..19: mol_type = other RNA
gtgctgaccagcccggcca

SEQ ID NO: 18150 - RNA, 19 nt, synthetic construct
  source 1..19: mol_type = other RNA
cctcccagaacagaccacc

SEQ ID NO: 18151 - RNA, 19 nt, synthetic construct
  source 1..19: mol_type = other RNA
cctcccagaacagaccacc

SEQ ID NO: 18152 - RNA, 19 nt, synthetic construct
  source 1..19: mol_type = other RNA
agcatccggctggtgctga

SEQ ID NO: 18153 - RNA, 19 nt, synthetic construct
  source 1..19: mol_type = other RNA
cctcccaaagtgctgacca

SEQ ID NO: 18154 - RNA, 19 nt, synthetic construct
  source 1..19: mol_type = other RNA
gagcaccacggccacgaca

SEQ ID NO: 18155 - RNA, 19 nt, synthetic construct
  source 1..19: mol_type = other RNA
ccagcagcacagtgactcc

SEQ ID NO: 18156 - RNA, 19 nt, synthetic construct
  source 1..19: mol_type = other RNA
ccagcagcacagtgactcc

SEQ ID NO: 18157 - RNA, 19 nt, synthetic construct
  source 1..19: mol_type = other RNA
gagcaccacggccacgaca

SEQ ID NO: 18158 - RNA, 19 nt, synthetic construct
  source 1..19: mol_type = other RNA
ccagcagcacagtgactcc

SEQ ID NO: 18159 - RNA, 19 nt, synthetic construct
  source 1..19: mol_type = other RNA
gagcaccacggccacgaca

SEQ ID NO: 18160 - RNA, 19 nt, synthetic construct
  source 1..19: mol_type = other RNA
acagtgctgaccaccacag

SEQ ID NO: 18161 - RNA, 19 nt, synthetic construct
  source 1..19: mol_type = other RNA
gctcacacccccaaagtgg

SEQ ID NO: 18162 - RNA, 19 nt, synthetic construct
  source 1..19: mol_type = other RNA
caaagtggtgaccaccatg

SEQ ID NO: 18163 - RNA, 19 nt, synthetic construct
  source 1..19: mol_type = other RNA
acccctgctgccccgagac

SEQ ID NO: 18164 - RNA, 19 nt, synthetic construct
  source 1..19: mol_type = other RNA
accttgggcctcctctgcg

SEQ ID NO: 18165 - RNA, 19 nt, synthetic construct
  source 1..19: mol_type = other RNA
tgccaccgcaccctgctgg

SEQ ID NO: 18166 - RNA, 19 nt, synthetic construct
  source 1..19: mol_type = other RNA
cctcacaaagccgaccaca

SEQ ID NO: 18167 - RNA, 19 nt, synthetic construct
  source 1..19: mol_type = other RNA
actttggcctggtctgcag

SEQ ID NO: 18168 - RNA, 19 nt, synthetic construct
  source 1..19: mol_type = other RNA
ccggggccaccggctctgt

SEQ ID NO: 18169 - RNA, 19 nt, synthetic construct
  source 1..19: mol_type = other RNA
gccacctcaggcaccttgg

SEQ ID NO: 18170 - RNA, 19 nt, synthetic construct
  source 1..19: mol_type = other RNA
actttggcctggtctgcag

SEQ ID NO: 18171 - RNA, 19 nt, synthetic construct
  source 1..19: mol_type = other RNA
cctcacagagctgaccaca

SEQ ID NO: 18172 - RNA, 19 nt, synthetic construct
  source 1..19: mol_type = other RNA
ctcacagagctgaccacag

SEQ ID NO: 18173 - RNA, 19 nt, synthetic construct
  source 1..19: mol_type = other RNA
gctgaccacagcagccact

SEQ ID NO: 18174 - RNA, 19 nt, synthetic construct
  source 1..19: mol_type = other RNA
actttggcctggtctgcag

SEQ ID NO: 18175 - RNA, 19 nt, synthetic construct
  source 1..19: mol_type = other RNA
gccacctcaggcaccttgg

SEQ ID NO: 18176 - RNA, 19 nt, synthetic construct
  source 1..19: mol_type = other RNA
actttggcctggtctgcag

SEQ ID NO: 18177 - RNA, 19 nt, synthetic construct
  source 1..19: mol_type = other RNA
cctcacagagctgaccaca

SEQ ID NO: 18178 - RNA, 19 nt, synthetic construct
  source 1..19: mol_type = other RNA
ctcacagagctgaccacag

SEQ ID NO: 18179 - RNA, 19 nt, synthetic construct
  source 1..19: mol_type = other RNA
gctgaccacagcagccact

SEQ ID NO: 18180 - RNA, 19 nt, synthetic construct
  source 1..19: mol_type = other RNA
ccggggccaccggctctgt

SEQ ID NO: 18181 - RNA, 19 nt, synthetic construct
  source 1..19: mol_type = other RNA
gagccggctgccatttcta

SEQ ID NO: 18182 - RNA, 19 nt, synthetic construct
  source 1..19: mol_type = other RNA
gggccgccttgaggtgccc

SEQ ID NO: 18183 - RNA, 19 nt, synthetic construct
  source 1..19: mol_type = other RNA
gccaggagaggcgggtcca

SEQ ID NO: 18184 - RNA, 19 nt, synthetic construct
  source 1..19: mol_type = other RNA
gtccggccgctggggcaga

SEQ ID NO: 18185 - RNA, 19 nt, synthetic construct
  source 1..19: mol_type = other RNA
atcctgcacacctacaccc

SEQ ID NO: 18186 - RNA, 19 nt, synthetic construct
  source 1..19: mol_type = other RNA
tacggccacgccctcctcc

SEQ ID NO: 18187 - RNA, 19 nt, synthetic construct
  source 1..19: mol_type = other RNA
cccctcccaaagtgctgac

SEQ ID NO: 18188 - RNA, 19 nt, synthetic construct
  source 1..19: mol_type = other RNA
cccctcccaaagtgctgac

SEQ ID NO: 18189 - RNA, 19 nt, synthetic construct
  source 1..19: mol_type = other RNA
cccctcccaaagtgctgac

SEQ ID NO: 18190 - RNA, 19 nt, synthetic construct
  source 1..19: mol_type = other RNA
cccctcctcaactccaggg

SEQ ID NO: 18191 - RNA, 19 nt, synthetic construct
  source 1..19: mol_type = other RNA
cccctcctcaactccaggg

SEQ ID NO: 18192 - RNA, 19 nt, synthetic construct
  source 1..19: mol_type = other RNA
cccctcctcaactccaggg

SEQ ID NO: 18193 - RNA, 19 nt, synthetic construct
  source 1..19: mol_type = other RNA
cccctcctcaactccaggg

SEQ ID NO: 18194 - RNA, 19 nt, synthetic construct
  source 1..19: mol_type = other RNA
tggtgaccaccatggccac

SEQ ID NO: 18195 - RNA, 19 nt, synthetic construct
  source 1..19: mol_type = other RNA
cccggccctcccggtctcc

SEQ ID NO: 18196 - RNA, 19 nt, synthetic construct
  source 1..19: mol_type = other RNA
tggaatgcagcctggactt

SEQ ID NO: 18197 - RNA, 19 nt, synthetic construct
  source 1..19: mol_type = other RNA
tggaatgcagcctggactt

SEQ ID NO: 18198 - RNA, 19 nt, synthetic construct
  source 1..19: mol_type = other RNA
tggaatgcagcctggactt

SEQ ID NO: 18199 - RNA, 19 nt, synthetic construct
  source 1..19: mol_type = other RNA
tggaatgcagcctggactt

SEQ ID NO: 18200 - RNA, 19 nt, synthetic construct
  source 1..19: mol_type = other RNA
ttggcccaggactactgtg

SEQ ID NO: 18201 - RNA, 19 nt, synthetic construct
  source 1..19: mol_type = other RNA
ctcaacatgcagcaccagg

SEQ ID NO: 18202 - RNA, 19 nt, synthetic construct
  source 1..19: mol_type = other RNA
ttcaacaccacctgcagct

SEQ ID NO: 18203 - RNA, 19 nt, synthetic construct
  source 1..19: mol_type = other RNA
ctcacagccacccacgctg

SEQ ID NO: 18204 - RNA, 19 nt, synthetic construct
  source 1..19: mol_type = other RNA
ggtgcaagggtccccacag

SEQ ID NO: 18205 - RNA, 19 nt, synthetic construct
  source 1..19: mol_type = other RNA
cctcacagagctgaccaca

SEQ ID NO: 18206 - RNA, 19 nt, synthetic construct
  source 1..19: mol_type = other RNA
cctcacagagctgaccaca

SEQ ID NO: 18207 - RNA, 19 nt, synthetic construct
  source 1..19: mol_type = other RNA
cctcacagagctgaccaca

SEQ ID NO: 18208 - RNA, 19 nt, synthetic construct
  source 1..19: mol_type = other RNA
ggctggtgctgacattcct

SEQ ID NO: 18209 - RNA, 19 nt, synthetic construct
  source 1..19: mol_type = other RNA
gatgcctgccagcccactt

SEQ ID NO: 18210 - RNA, 19 nt, synthetic construct
  source 1..19: mol_type = other RNA
cctcacagagcccagcact

SEQ ID NO: 18211 - RNA, 19 nt, synthetic construct
  source 1..19: mol_type = other RNA
ctcacagagcccagcacta

SEQ ID NO: 18212 - RNA, 19 nt, synthetic construct
  source 1..19: mol_type = other RNA
actgcagccactggatcca

SEQ ID NO: 18213 - RNA, 19 nt, synthetic construct
  source 1..19: mol_type = other RNA
tcagcagaggcccaggcca

SEQ ID NO: 18214 - RNA, 19 nt, synthetic construct
  source 1..19: mol_type = other RNA
gctggtccagctggtacaa

SEQ ID NO: 18215 - RNA, 19 nt, synthetic construct
  source 1..19: mol_type = other RNA
ctggtcagagtggctggac

SEQ ID NO: 18216 - RNA, 19 nt, synthetic construct
  source 1..19: mol_type = other RNA
ctggtcagagtggctggac

SEQ ID NO: 18217 - RNA, 19 nt, synthetic construct
  source 1..19: mol_type = other RNA
ctggtcagagtggctggac

SEQ ID NO: 18218 - RNA, 19 nt, synthetic construct
  source 1..19: mol_type = other RNA
ctggtcagagtggctggac

SEQ ID NO: 18219 - RNA, 19 nt, synthetic construct
  source 1..19: mol_type = other RNA
ggctgcttctgccctgagg

SEQ ID NO: 18220 - RNA, 19 nt, synthetic construct
  source 1..19: mol_type = other RNA
cactgccgctgccgcccgc

SEQ ID NO: 18221 - RNA, 19 nt, synthetic construct
  source 1..19: mol_type = other RNA
tacgcccaggcctgccacg

SEQ ID NO: 18222 - RNA, 19 nt, synthetic construct
  source 1..19: mol_type = other RNA
cccctcctcctccctgggc

SEQ ID NO: 18223 - RNA, 19 nt, synthetic construct
  source 1..19: mol_type = other RNA
cccctcctcctccctgggc

SEQ ID NO: 18224 - RNA, 19 nt, synthetic construct
  source 1..19: mol_type = other RNA
cccctcctcctccctgggc

SEQ ID NO: 18225 - RNA, 19 nt, synthetic construct
  source 1..19: mol_type = other RNA
ccactgccgctgccgcccg

SEQ ID NO: 18226 - RNA, 19 nt, synthetic construct
  source 1..19: mol_type = other RNA
gccagccccgcagccccgg

SEQ ID NO: 18227 - RNA, 19 nt, synthetic construct
  source 1..19: mol_type = other RNA
acgccctggaacaaactaa

SEQ ID NO: 18228 - RNA, 19 nt, synthetic construct
  source 1..19: mol_type = other RNA
ctgccctagggaccaccca

SEQ ID NO: 18229 - RNA, 19 nt, synthetic construct
  source 1..19: mol_type = other RNA
ctgccctagggaccaccca

SEQ ID NO: 18230 - RNA, 19 nt, synthetic construct
  source 1..19: mol_type = other RNA
ctgccctagggaccaccca

SEQ ID NO: 18231 - RNA, 19 nt, synthetic construct
  source 1..19: mol_type = other RNA
ctgccctagggaccaccca

SEQ ID NO: 18232 - RNA, 19 nt, synthetic construct
  source 1..19: mol_type = other RNA
ggtgcaatgtcaggaggat

SEQ ID NO: 18233 - RNA, 19 nt, synthetic construct
  source 1..19: mol_type = other RNA
gctgagctgcggaagtgcg

SEQ ID NO: 18234 - RNA, 19 nt, synthetic construct
  source 1..19: mol_type = other RNA
atgctgagccaggtctttg

SEQ ID NO: 18235 - RNA, 19 nt, synthetic construct
  source 1..19: mol_type = other RNA
ggaggggcagtctgtgagc

SEQ ID NO: 18236 - RNA, 19 nt, synthetic construct
  source 1..19: mol_type = other RNA
caaagtgctgaccagcccg

SEQ ID NO: 18237 - RNA, 19 nt, synthetic construct
  source 1..19: mol_type = other RNA
ccacagtgctgaccaccac

SEQ ID NO: 18238 - RNA, 19 nt, synthetic construct
  source 1..19: mol_type = other RNA
catggctcccccacacacc

SEQ ID NO: 18239 - RNA, 19 nt, synthetic construct
  source 1..19: mol_type = other RNA
agccccccggcctgtgtgt

SEQ ID NO: 18240 - RNA, 19 nt, synthetic construct
  source 1..19: mol_type = other RNA
gccccccggcctgtgtgtg

SEQ ID NO: 18241 - RNA, 19 nt, synthetic construct
  source 1..19: mol_type = other RNA
aggacggaaactactatga

SEQ ID NO: 18242 - RNA, 19 nt, synthetic construct
  source 1..19: mol_type = other RNA
cagctgcgagtacatcttg

SEQ ID NO: 18243 - RNA, 19 nt, synthetic construct
  source 1..19: mol_type = other RNA
ccagtgctgaccaccaccg

SEQ ID NO: 18244 - RNA, 19 nt, synthetic construct
  source 1..19: mol_type = other RNA
gtgctgaccaccaccgcca

SEQ ID NO: 18245 - RNA, 19 nt, synthetic construct
  source 1..19: mol_type = other RNA
tagcagcaaccaccggtac

SEQ ID NO: 18246 - RNA, 19 nt, synthetic construct
  source 1..19: mol_type = other RNA
agcagcaaccaccggtacc

SEQ ID NO: 18247 - RNA, 19 nt, synthetic construct
  source 1..19: mol_type = other RNA
ccagtgctgaccaccaccg

SEQ ID NO: 18248 - RNA, 19 nt, synthetic construct
  source 1..19: mol_type = other RNA
gtgctgaccaccaccgcca

SEQ ID NO: 18249 - RNA, 19 nt, synthetic construct
  source 1..19: mol_type = other RNA
cagcagcaaccaccggtac

SEQ ID NO: 18250 - RNA, 19 nt, synthetic construct
  source 1..19: mol_type = other RNA
agcagcaaccaccggtacc

SEQ ID NO: 18251 - RNA, 19 nt, synthetic construct
  source 1..19: mol_type = other RNA
ccagtgctgaccaccaccg

SEQ ID NO: 18252 - RNA, 19 nt, synthetic construct
  source 1..19: mol_type = other RNA
gtgctgaccaccaccgcca

SEQ ID NO: 18253 - RNA, 19 nt, synthetic construct
  source 1..19: mol_type = other RNA
cagcagcaaccaccagtac

SEQ ID NO: 18254 - RNA, 19 nt, synthetic construct
  source 1..19: mol_type = other RNA
ccagtgctgaccaccaccg

SEQ ID NO: 18255 - RNA, 19 nt, synthetic construct
  source 1..19: mol_type = other RNA
gtgctgaccaccaccgcca

SEQ ID NO: 18256 - RNA, 19 nt, synthetic construct
  source 1..19: mol_type = other RNA
cagcagcaaccaccggtac

SEQ ID NO: 18257 - RNA, 19 nt, synthetic construct
  source 1..19: mol_type = other RNA
agcagcaaccaccggtacc

SEQ ID NO: 18258 - RNA, 19 nt, synthetic construct
  source 1..19: mol_type = other RNA
ccccctgggggagttgggc

SEQ ID NO: 18259 - RNA, 19 nt, synthetic construct
  source 1..19: mol_type = other RNA
gtgtgcgtgtgcaacacaa

SEQ ID NO: 18260 - RNA, 19 nt, synthetic construct
  source 1..19: mol_type = other RNA
caatactacctgtccccag

SEQ ID NO: 18261 - RNA, 19 nt, synthetic construct
  source 1..19: mol_type = other RNA
gcgaggaccactgtgtgga

SEQ ID NO: 18262 - RNA, 19 nt, synthetic construct
  source 1..19: mol_type = other RNA
cagcagcacagtgactccc

SEQ ID NO: 18263 - RNA, 19 nt, synthetic construct
  source 1..19: mol_type = other RNA
cctggacttcggccacctc

SEQ ID NO: 18264 - RNA, 19 nt, synthetic construct
  source 1..19: mol_type = other RNA
cagcagcacagtgactccc

SEQ ID NO: 18265 - RNA, 19 nt, synthetic construct
  source 1..19: mol_type = other RNA
cagcagcacagtgactccc

SEQ ID NO: 18266 - RNA, 19 nt, synthetic construct
  source 1..19: mol_type = other RNA
cctggacttcggccacctc

SEQ ID NO: 18267 - RNA, 19 nt, synthetic construct
  source 1..19: mol_type = other RNA
gatggctgctgggccccga

SEQ ID NO: 18268 - RNA, 19 nt, synthetic construct
  source 1..19: mol_type = other RNA
cggctcagccatcctgcac

SEQ ID NO: 18269 - RNA, 19 nt, synthetic construct
  source 1..19: mol_type = other RNA
atgtgcgggcctatgtgtc

SEQ ID NO: 18270 - RNA, 19 nt, synthetic construct
  source 1..19: mol_type = other RNA
gcccctgtgtgcacaacga

SEQ ID NO: 18271 - RNA, 19 nt, synthetic construct
  source 1..19: mol_type = other RNA
aatggcaacctccagagct

SEQ ID NO: 18272 - RNA, 19 nt, synthetic construct
  source 1..19: mol_type = other RNA
gtcaacatcaccttctgcg

SEQ ID NO: 18273 - RNA, 19 nt, synthetic construct
  source 1..19: mol_type = other RNA
gctgcagggtaactcaggg

SEQ ID NO: 18274 - RNA, 19 nt, synthetic construct
  source 1..19: mol_type = other RNA
cagcacctggggtgacttc

SEQ ID NO: 18275 - RNA, 19 nt, synthetic construct
  source 1..19: mol_type = other RNA
ccagcagcaaccaccagta

SEQ ID NO: 18276 - RNA, 19 nt, synthetic construct
  source 1..19: mol_type = other RNA
gctggctgagctgcggaag

SEQ ID NO: 18277 - RNA, 19 nt, synthetic construct
  source 1..19: mol_type = other RNA
cggagactttgagacgttt

SEQ ID NO: 18278 - RNA, 19 nt, synthetic construct
  source 1..19: mol_type = other RNA
accctgagaacagctcccc

SEQ ID NO: 18279 - RNA, 19 nt, synthetic construct
  source 1..19: mol_type = other RNA
cagcagccactacaactgc

SEQ ID NO: 18280 - RNA, 19 nt, synthetic construct
  source 1..19: mol_type = other RNA
cagcagccactacaactgc

SEQ ID NO: 18281 - RNA, 19 nt, synthetic construct
  source 1..19: mol_type = other RNA
gaatctcagcctctacctg

SEQ ID NO: 18282 - RNA, 19 nt, synthetic construct
  source 1..19: mol_type = other RNA
cctggacaaccactactgc

SEQ ID NO: 18283 - RNA, 19 nt, synthetic construct
  source 1..19: mol_type = other RNA
tcctgctgcccaccccgtg

SEQ ID NO: 18284 - RNA, 19 nt, synthetic construct
  source 1..19: mol_type = other RNA
cgcagcacggattccagct

SEQ ID NO: 18285 - RNA, 19 nt, synthetic construct
  source 1..19: mol_type = other RNA
tgccgacagcagcttcacc

SEQ ID NO: 18286 - RNA, 19 nt, synthetic construct
  source 1..19: mol_type = other RNA
ccaacagccaacagagtcc

SEQ ID NO: 18287 - RNA, 19 nt, synthetic construct
  source 1..19: mol_type = other RNA
ccctcccaaagtgctgacc

SEQ ID NO: 18288 - RNA, 19 nt, synthetic construct
  source 1..19: mol_type = other RNA
cctgtccagccctcaccct

SEQ ID NO: 18289 - RNA, 19 nt, synthetic construct
  source 1..19: mol_type = other RNA
ccctcccaaagtgctgacc

SEQ ID NO: 18290 - RNA, 19 nt, synthetic construct
  source 1..19: mol_type = other RNA
cctgtccagccctcaccct

SEQ ID NO: 18291 - RNA, 19 nt, synthetic construct
  source 1..19: mol_type = other RNA
cctgtccagccctcaccct

SEQ ID NO: 18292 - RNA, 19 nt, synthetic construct
  source 1..19: mol_type = other RNA
ccctcccaaagtgctgacc

SEQ ID NO: 18293 - RNA, 19 nt, synthetic construct
  source 1..19: mol_type = other RNA
cagccacaaaatccacagc

SEQ ID NO: 18294 - RNA, 19 nt, synthetic construct
  source 1..19: mol_type = other RNA
ctgcacacctacacccacg

SEQ ID NO: 18295 - RNA, 19 nt, synthetic construct
  source 1..19: mol_type = other RNA
aagcacccttggtacagcc

SEQ ID NO: 18296 - RNA, 19 nt, synthetic construct
  source 1..19: mol_type = other RNA
gtgcccttgcactgtccta

SEQ ID NO: 18297 - RNA, 19 nt, synthetic construct
  source 1..19: mol_type = other RNA
caatgccatcaatgacttt

SEQ ID NO: 18298 - RNA, 19 nt, synthetic construct
  source 1..19: mol_type = other RNA
gtgctgacaagcacagcca

SEQ ID NO: 18299 - RNA, 19 nt, synthetic construct
  source 1..19: mol_type = other RNA
gctggtgcagctggtgcca

SEQ ID NO: 18300 - RNA, 19 nt, synthetic construct
  source 1..19: mol_type = other RNA
cagcagcttcaccgtgctg

SEQ ID NO: 18301 - RNA, 19 nt, synthetic construct
  source 1..19: mol_type = other RNA
ccggatccacggccaccgc

SEQ ID NO: 18302 - RNA, 19 nt, synthetic construct
  source 1..19: mol_type = other RNA
ccggatccacggccaccgc

SEQ ID NO: 18303 - RNA, 19 nt, synthetic construct
  source 1..19: mol_type = other RNA
ccggatccacggccaccgc

SEQ ID NO: 18304 - RNA, 19 nt, synthetic construct
  source 1..19: mol_type = other RNA
ccggatccacggccaccgc

SEQ ID NO: 18305 - RNA, 19 nt, synthetic construct
  source 1..19: mol_type = other RNA
gctcccactattccacctt

SEQ ID NO: 18306 - RNA, 19 nt, synthetic construct
  source 1..19: mol_type = other RNA
gtgcattgtctgatcatga

SEQ ID NO: 18307 - RNA, 19 nt, synthetic construct
  source 1..19: mol_type = other RNA
aggagtgtggctcaccctg

SEQ ID NO: 18308 - RNA, 19 nt, synthetic construct
  source 1..19: mol_type = other RNA
cggagaccacccacacctc

SEQ ID NO: 18309 - RNA, 19 nt, synthetic construct
  source 1..19: mol_type = other RNA
ccacagtcatcagctccag

SEQ ID NO: 18310 - RNA, 19 nt, synthetic construct
  source 1..19: mol_type = other RNA
cggagaccacccacacctc

SEQ ID NO: 18311 - RNA, 19 nt, synthetic construct
  source 1..19: mol_type = other RNA
cagcagcctgccaaccttc

SEQ ID NO: 18312 - RNA, 19 nt, synthetic construct
  source 1..19: mol_type = other RNA
tggactgcagcaacagctc

SEQ ID NO: 18313 - RNA, 19 nt, synthetic construct
  source 1..19: mol_type = other RNA
tggcgagagggccgggtgg

SEQ ID NO: 18314 - RNA, 19 nt, synthetic construct
  source 1..19: mol_type = other RNA
gccctgggcgtgagcgtca

SEQ ID NO: 18315 - RNA, 19 nt, synthetic construct
  source 1..19: mol_type = other RNA
ctgccagagcctggaggct

SEQ ID NO: 18316 - RNA, 19 nt, synthetic construct
  source 1..19: mol_type = other RNA
caaccgtgtcgtcctgctg

SEQ ID NO: 18317 - RNA, 19 nt, synthetic construct
  source 1..19: mol_type = other RNA
cctcacagccacccacgct

SEQ ID NO: 18318 - RNA, 19 nt, synthetic construct
  source 1..19: mol_type = other RNA
actctgggaacagctcaca

SEQ ID NO: 18319 - RNA, 19 nt, synthetic construct
  source 1..19: mol_type = other RNA
tgtgcaatcagcactgtga

SEQ ID NO: 18320 - RNA, 19 nt, synthetic construct
  source 1..19: mol_type = other RNA
tgtgcaacacaaccacctg

SEQ ID NO: 18321 - RNA, 19 nt, synthetic construct
  source 1..19: mol_type = other RNA
acaagagagtggccgggca

SEQ ID NO: 18322 - RNA, 19 nt, synthetic construct
  source 1..19: mol_type = other RNA
atcacagccaccggctcca

SEQ ID NO: 18323 - RNA, 19 nt, synthetic construct
  source 1..19: mol_type = other RNA
cctgcaggaaccggaggtg

SEQ ID NO: 18324 - RNA, 19 nt, synthetic construct
  source 1..19: mol_type = other RNA
cgctacagctttgaaggca

SEQ ID NO: 18325 - RNA, 19 nt, synthetic construct
  source 1..19: mol_type = other RNA
ctgtgctggctgacatcga

SEQ ID NO: 18326 - RNA, 19 nt, synthetic construct
  source 1..19: mol_type = other RNA
gaggagctgggccagcagg

SEQ ID NO: 18327 - RNA, 19 nt, synthetic construct
  source 1..19: mol_type = other RNA
tccttcacccttgggacca

SEQ ID NO: 18328 - RNA, 19 nt, synthetic construct
  source 1..19: mol_type = other RNA
ctgtgctggggaccaccac

SEQ ID NO: 18329 - RNA, 19 nt, synthetic construct
  source 1..19: mol_type = other RNA
gacattcctgccctgggcg

SEQ ID NO: 18330 - RNA, 19 nt, synthetic construct
  source 1..19: mol_type = other RNA
tgaccagcacggccaccac

SEQ ID NO: 18331 - RNA, 19 nt, synthetic construct
  source 1..19: mol_type = other RNA
tgaccagcacggccaccac

SEQ ID NO: 18332 - RNA, 19 nt, synthetic construct
  source 1..19: mol_type = other RNA
tgaccagcacggccaccac

SEQ ID NO: 18333 - RNA, 19 nt, synthetic construct
  source 1..19: mol_type = other RNA
ccggatcctcactgagctg

SEQ ID NO: 18334 - RNA, 19 nt, synthetic construct
  source 1..19: mol_type = other RNA
tgtgacattgaccgcttcc

SEQ ID NO: 18335 - RNA, 19 nt, synthetic construct
  source 1..19: mol_type = other RNA
caccctgcacggacacctg

SEQ ID NO: 18336 - RNA, 19 nt, synthetic construct
  source 1..19: mol_type = other RNA
ctgtgcgacctcacctgcc

SEQ ID NO: 18337 - RNA, 19 nt, synthetic construct
  source 1..19: mol_type = other RNA
catgtgcgggcctatgtgt

SEQ ID NO: 18338 - RNA, 19 nt, synthetic construct
  source 1..19: mol_type = other RNA
gtgctgacattcctgtgga

SEQ ID NO: 18339 - RNA, 19 nt, synthetic construct
  source 1..19: mol_type = other RNA
aatgtgccgacagcagctt

SEQ ID NO: 18340 - RNA, 19 nt, synthetic construct
  source 1..19: mol_type = other RNA
ccaagaggggacctttaag

SEQ ID NO: 18341 - RNA, 19 nt, synthetic construct
  source 1..19: mol_type = other RNA
acgccctggcacccaagga

SEQ ID NO: 18342 - RNA, 19 nt, synthetic construct
  source 1..19: mol_type = other RNA
gcctgcttgatcgccatct

SEQ ID NO: 18343 - RNA, 19 nt, synthetic construct
  source 1..19: mol_type = other RNA
actggaccctggcacaggt

SEQ ID NO: 18344 - RNA, 19 nt, synthetic construct
  source 1..19: mol_type = other RNA
ccgcccttccagcactgag

SEQ ID NO: 18345 - RNA, 19 nt, synthetic construct
  source 1..19: mol_type = other RNA
gaaccgtgagcaggtgggg

SEQ ID NO: 18346 - RNA, 19 nt, synthetic construct
  source 1..19: mol_type = other RNA
ccgcccttccagcactgag

SEQ ID NO: 18347 - RNA, 19 nt, synthetic construct
  source 1..19: mol_type = other RNA
gaaccgtgagcaggtgggg

SEQ ID NO: 18348 - RNA, 19 nt, synthetic construct
  source 1..19: mol_type = other RNA
ccgcccttccagcactgag

SEQ ID NO: 18349 - RNA, 19 nt, synthetic construct
  source 1..19: mol_type = other RNA
gaaccgtgagcaggtgggg

SEQ ID NO: 18350 - RNA, 19 nt, synthetic construct
  source 1..19: mol_type = other RNA
ccgcccttccagcactgag

SEQ ID NO: 18351 - RNA, 19 nt, synthetic construct
  source 1..19: mol_type = other RNA
gaaccgtgagcaggtgggg

SEQ ID NO: 18352 - RNA, 19 nt, synthetic construct
  source 1..19: mol_type = other RNA
ctgcccttccagcactgag

SEQ ID NO: 18353 - RNA, 19 nt, synthetic construct
  source 1..19: mol_type = other RNA
caccctgtggaccacgtgg

SEQ ID NO: 18354 - RNA, 19 nt, synthetic construct
  source 1..19: mol_type = other RNA
tctgcagcatgtggggcgg

SEQ ID NO: 18355 - RNA, 19 nt, synthetic construct
  source 1..19: mol_type = other RNA
cgagaacccctgctgcccc

SEQ ID NO: 18356 - RNA, 19 nt, synthetic construct
  source 1..19: mol_type = other RNA
gcgcccttccctgccacat

SEQ ID NO: 18357 - RNA, 19 nt, synthetic construct
  source 1..19: mol_type = other RNA
gtcaacagccatgtggaca

SEQ ID NO: 18358 - RNA, 19 nt, synthetic construct
  source 1..19: mol_type = other RNA
tgcagcaccaggagtgtgg

SEQ ID NO: 18359 - RNA, 19 nt, synthetic construct
  source 1..19: mol_type = other RNA
cagcaccaggagtgtggct

SEQ ID NO: 18360 - RNA, 19 nt, synthetic construct
  source 1..19: mol_type = other RNA
ggaccctggcacaggtggg

SEQ ID NO: 18361 - RNA, 19 nt, synthetic construct
  source 1..19: mol_type = other RNA
tgagaacagctccccctcc

SEQ ID NO: 18362 - RNA, 19 nt, synthetic construct
  source 1..19: mol_type = other RNA
ccagtgctgacaagcacag

SEQ ID NO: 18363 - RNA, 19 nt, synthetic construct
  source 1..19: mol_type = other RNA
ccagtgctgacaagcacag

SEQ ID NO: 18364 - RNA, 19 nt, synthetic construct
  source 1..19: mol_type = other RNA
ccagtgctgacaagcacag

SEQ ID NO: 18365 - RNA, 19 nt, synthetic construct
  source 1..19: mol_type = other RNA
caccctgagacccactggc

SEQ ID NO: 18366 - RNA, 19 nt, synthetic construct
  source 1..19: mol_type = other RNA
taccctgggagagcctgtg

SEQ ID NO: 18367 - RNA, 19 nt, synthetic construct
  source 1..19: mol_type = other RNA
atcacagaccaccacaccc

SEQ ID NO: 18368 - RNA, 19 nt, synthetic construct
  source 1..19: mol_type = other RNA
actcccatccccccagtgc

SEQ ID NO: 18369 - RNA, 19 nt, synthetic construct
  source 1..19: mol_type = other RNA
atcacagaccaccacaccc

SEQ ID NO: 18370 - RNA, 19 nt, synthetic construct
  source 1..19: mol_type = other RNA
accttgggcaccacccaca

SEQ ID NO: 18371 - RNA, 19 nt, synthetic construct
  source 1..19: mol_type = other RNA
atcacagaccaccacaccc

SEQ ID NO: 18372 - RNA, 19 nt, synthetic construct
  source 1..19: mol_type = other RNA
actcccatccccccagtgc

SEQ ID NO: 18373 - RNA, 19 nt, synthetic construct
  source 1..19: mol_type = other RNA
atcacagaccaccacaccc

SEQ ID NO: 18374 - RNA, 19 nt, synthetic construct
  source 1..19: mol_type = other RNA
ttcacagtcaccccctcct

SEQ ID NO: 18375 - RNA, 19 nt, synthetic construct
  source 1..19: mol_type = other RNA
accttgggcaccacccaca

SEQ ID NO: 18376 - RNA, 19 nt, synthetic construct
  source 1..19: mol_type = other RNA
atcacagaccaccacaccc

SEQ ID NO: 18377 - RNA, 19 nt, synthetic construct
  source 1..19: mol_type = other RNA
ctccagtccaaggactgca

SEQ ID NO: 18378 - RNA, 19 nt, synthetic construct
  source 1..19: mol_type = other RNA
ctccagtccaaggactgca

SEQ ID NO: 18379 - RNA, 19 nt, synthetic construct
  source 1..19: mol_type = other RNA
ctccagtccaaggactgca

SEQ ID NO: 18380 - RNA, 19 nt, synthetic construct
  source 1..19: mol_type = other RNA
cacccgtggcttcccggcc

SEQ ID NO: 18381 - RNA, 19 nt, synthetic construct
  source 1..19: mol_type = other RNA
cacccgtgccagcccccag

SEQ ID NO: 18382 - RNA, 19 nt, synthetic construct
  source 1..19: mol_type = other RNA
ggctggtgctggaggcgtc

SEQ ID NO: 18383 - RNA, 19 nt, synthetic construct
  source 1..19: mol_type = other RNA
ccctgctggagctggatcc

SEQ ID NO: 18384 - RNA, 19 nt, synthetic construct
  source 1..19: mol_type = other RNA
gtgccctgagctctgcccc

SEQ ID NO: 18385 - RNA, 19 nt, synthetic construct
  source 1..19: mol_type = other RNA
gtgccctggcacctgctct

SEQ ID NO: 18386 - RNA, 19 nt, synthetic construct
  source 1..19: mol_type = other RNA
acagcagcttcaccgtgct

SEQ ID NO: 18387 - RNA, 19 nt, synthetic construct
  source 1..19: mol_type = other RNA
acagtgccttctcgcgctg

SEQ ID NO: 18388 - RNA, 19 nt, synthetic construct
  source 1..19: mol_type = other RNA
actccatcatcaaccccaa

SEQ ID NO: 18389 - RNA, 19 nt, synthetic construct
  source 1..19: mol_type = other RNA
tggacggctgcacctgccc

SEQ ID NO: 18390 - RNA, 19 nt, synthetic construct
  source 1..19: mol_type = other RNA
gctggctcctggagaggtg

SEQ ID NO: 18391 - RNA, 19 nt, synthetic construct
  source 1..19: mol_type = other RNA
cctggactgcagcaacagc

SEQ ID NO: 18392 - RNA, 19 nt, synthetic construct
  source 1..19: mol_type = other RNA
actgcagcaacagctcggc

SEQ ID NO: 18393 - RNA, 19 nt, synthetic construct
  source 1..19: mol_type = other RNA
ccgaggaggactgcccctg

SEQ ID NO: 18394 - RNA, 19 nt, synthetic construct
  source 1..19: mol_type = other RNA
cttgttctgtgacttctac

SEQ ID NO: 18395 - RNA, 19 nt, synthetic construct
  source 1..19: mol_type = other RNA
gtgccctgtggcccctccc

SEQ ID NO: 18396 - RNA, 19 nt, synthetic construct
  source 1..19: mol_type = other RNA
ctggccccaacaacaatgg

SEQ ID NO: 18397 - RNA, 19 nt, synthetic construct
  source 1..19: mol_type = other RNA
caccctgagaacagctccc

SEQ ID NO: 18398 - RNA, 19 nt, synthetic construct
  source 1..19: mol_type = other RNA
ctccagtccagggactgca

SEQ ID NO: 18399 - RNA, 19 nt, synthetic construct
  source 1..19: mol_type = other RNA
ttcacagccaccccctcct

SEQ ID NO: 18400 - RNA, 19 nt, synthetic construct
  source 1..19: mol_type = other RNA
cctccatcccggggaccac

SEQ ID NO: 18401 - RNA, 19 nt, synthetic construct
  source 1..19: mol_type = other RNA
ccacagtgctgaccaccac

SEQ ID NO: 18402 - RNA, 19 nt, synthetic construct
  source 1..19: mol_type = other RNA
cctgcagccaccagcaaca

SEQ ID NO: 18403 - RNA, 19 nt, synthetic construct
  source 1..19: mol_type = other RNA
acacagtgactccctcctc

SEQ ID NO: 18404 - RNA, 19 nt, synthetic construct
  source 1..19: mol_type = other RNA
ccagcagtccccacacggt

SEQ ID NO: 18405 - RNA, 19 nt, synthetic construct
  source 1..19: mol_type = other RNA
ctccagtccagggactgca

SEQ ID NO: 18406 - RNA, 19 nt, synthetic construct
  source 1..19: mol_type = other RNA
ttcacagccaccccctcct

SEQ ID NO: 18407 - RNA, 19 nt, synthetic construct
  source 1..19: mol_type = other RNA
cctccatcccggggaccac

SEQ ID NO: 18408 - RNA, 19 nt, synthetic construct
  source 1..19: mol_type = other RNA
ccacagtgctgaccaccac

SEQ ID NO: 18409 - RNA, 19 nt, synthetic construct
  source 1..19: mol_type = other RNA
gcacagtgactccctcctc

SEQ ID NO: 18410 - RNA, 19 nt, synthetic construct
  source 1..19: mol_type = other RNA
ccagcagtccccacacggt

SEQ ID NO: 18411 - RNA, 19 nt, synthetic construct
  source 1..19: mol_type = other RNA
acagcagccactacgaccg

SEQ ID NO: 18412 - RNA, 19 nt, synthetic construct
  source 1..19: mol_type = other RNA
actgcagccactggcccca

SEQ ID NO: 18413 - RNA, 19 nt, synthetic construct
  source 1..19: mol_type = other RNA
ctccagtccagggactgca

SEQ ID NO: 18414 - RNA, 19 nt, synthetic construct
  source 1..19: mol_type = other RNA
ttcacagccaccccctcct

SEQ ID NO: 18415 - RNA, 19 nt, synthetic construct
  source 1..19: mol_type = other RNA
cctccatcccggggaccac

SEQ ID NO: 18416 - RNA, 19 nt, synthetic construct
  source 1..19: mol_type = other RNA
ccacagtgctgaccaccac

SEQ ID NO: 18417 - RNA, 19 nt, synthetic construct
  source 1..19: mol_type = other RNA
gcacagtgactccctcctc

SEQ ID NO: 18418 - RNA, 19 nt, synthetic construct
  source 1..19: mol_type = other RNA
ccagcagtccccacacggt

SEQ ID NO: 18419 - RNA, 19 nt, synthetic construct
  source 1..19: mol_type = other RNA
gggcagtctgtgagcagcc

SEQ ID NO: 18420 - RNA, 19 nt, synthetic construct
  source 1..19: mol_type = other RNA
ctccagtccagggactgca

SEQ ID NO: 18421 - RNA, 19 nt, synthetic construct
  source 1..19: mol_type = other RNA
tcacagtcaccccctcctc

SEQ ID NO: 18422 - RNA, 19 nt, synthetic construct
  source 1..19: mol_type = other RNA
ccacagtgctgaccaccac

SEQ ID NO: 18423 - RNA, 19 nt, synthetic construct
  source 1..19: mol_type = other RNA
gcacagtgactccctcctc

SEQ ID NO: 18424 - RNA, 19 nt, synthetic construct
  source 1..19: mol_type = other RNA
ccagcagtccccacacggt

SEQ ID NO: 18425 - RNA, 19 nt, synthetic construct
  source 1..19: mol_type = other RNA
tgcatccactggatccacg

SEQ ID NO: 18426 - RNA, 19 nt, synthetic construct
  source 1..19: mol_type = other RNA
actgcagccactggcccca

SEQ ID NO: 18427 - RNA, 19 nt, synthetic construct
  source 1..19: mol_type = other RNA
ctccagtccagggactgca

SEQ ID NO: 18428 - RNA, 19 nt, synthetic construct
  source 1..19: mol_type = other RNA
ttcacagccaccccctcct

SEQ ID NO: 18429 - RNA, 19 nt, synthetic construct
  source 1..19: mol_type = other RNA
cctccatcccggggaccac

SEQ ID NO: 18430 - RNA, 19 nt, synthetic construct
  source 1..19: mol_type = other RNA
gtgctgaccaccacagcca

SEQ ID NO: 18431 - RNA, 19 nt, synthetic construct
  source 1..19: mol_type = other RNA
accctgagacccactggct

SEQ ID NO: 18432 - RNA, 19 nt, synthetic construct
  source 1..19: mol_type = other RNA
actggcttccccagctccc

SEQ ID NO: 18433 - RNA, 19 nt, synthetic construct
  source 1..19: mol_type = other RNA
caatgccatccctctccgg

SEQ ID NO: 18434 - RNA, 19 nt, synthetic construct
  source 1..19: mol_type = other RNA
tcctgctggacccaaagcc

SEQ ID NO: 18435 - RNA, 19 nt, synthetic construct
  source 1..19: mol_type = other RNA
gccctgaggaccagatcct

SEQ ID NO: 18436 - RNA, 19 nt, synthetic construct
  source 1..19: mol_type = other RNA
gctgcagacctcagctgtg

SEQ ID NO: 18437 - RNA, 19 nt, synthetic construct
  source 1..19: mol_type = other RNA
accttggccttgcccctcc

SEQ ID NO: 18438 - RNA, 19 nt, synthetic construct
  source 1..19: mol_type = other RNA
cagctgctgccaggaagct

SEQ ID NO: 18439 - RNA, 19 nt, synthetic construct
  source 1..19: mol_type = other RNA
gcccaggggctggtgctgg

SEQ ID NO: 18440 - RNA, 19 nt, synthetic construct
  source 1..19: mol_type = other RNA
cccaggggctggtgctgga

SEQ ID NO: 18441 - RNA, 19 nt, synthetic construct
  source 1..19: mol_type = other RNA
ccaggggctggtgctggag

SEQ ID NO: 18442 - RNA, 19 nt, synthetic construct
  source 1..19: mol_type = other RNA
caggggctggtgctggagg

SEQ ID NO: 18443 - RNA, 19 nt, synthetic construct
  source 1..19: mol_type = other RNA
gtgccctgctggagctgga

SEQ ID NO: 18444 - RNA, 19 nt, synthetic construct
  source 1..19: mol_type = other RNA
ctgcacctgctccgggggg

SEQ ID NO: 18445 - RNA, 19 nt, synthetic construct
  source 1..19: mol_type = other RNA
tgcacctgctccggggggc

SEQ ID NO: 18446 - RNA, 19 nt, synthetic construct
  source 1..19: mol_type = other RNA
acctgctctgtgcagggcg

SEQ ID NO: 18447 - RNA, 19 nt, synthetic construct
  source 1..19: mol_type = other RNA
tgctggtgcagctggtgcc

SEQ ID NO: 18448 - RNA, 19 nt, synthetic construct
  source 1..19: mol_type = other RNA
tggtgcagctggtgccact

SEQ ID NO: 18449 - RNA, 19 nt, synthetic construct
  source 1..19: mol_type = other RNA
atcatcaggaaggctgtgg

SEQ ID NO: 18450 - RNA, 19 nt, synthetic construct
  source 1..19: mol_type = other RNA
cgctggtccagctggtaca

SEQ ID NO: 18451 - RNA, 19 nt, synthetic construct
  source 1..19: mol_type = other RNA
atgccgctggaggagctgg

SEQ ID NO: 18452 - RNA, 19 nt, synthetic construct
  source 1..19: mol_type = other RNA
accaccagccagggcacga

SEQ ID NO: 18453 - RNA, 19 nt, synthetic construct
  source 1..19: mol_type = other RNA
ccctcctccagcccaggga

SEQ ID NO: 18454 - RNA, 19 nt, synthetic construct
  source 1..19: mol_type = other RNA
gaccaccaccaccacaact

SEQ ID NO: 18455 - RNA, 19 nt, synthetic construct
  source 1..19: mol_type = other RNA
tggcctggtctgcaggaac

SEQ ID NO: 18456 - RNA, 19 nt, synthetic construct
  source 1..19: mol_type = other RNA
atccacggccaccgcctcc

SEQ ID NO: 18457 - RNA, 19 nt, synthetic construct
  source 1..19: mol_type = other RNA
acggccaccgcctcctcca

SEQ ID NO: 18458 - RNA, 19 nt, synthetic construct
  source 1..19: mol_type = other RNA
gccaccgcctcctccaccc

SEQ ID NO: 18459 - RNA, 19 nt, synthetic construct
  source 1..19: mol_type = other RNA
actcccttctccagtccag

SEQ ID NO: 18460 - RNA, 19 nt, synthetic construct
  source 1..19: mol_type = other RNA
tcctcctccctgggcacca

SEQ ID NO: 18461 - RNA, 19 nt, synthetic construct
  source 1..19: mol_type = other RNA
accaccacggccaccacaa

SEQ ID NO: 18462 - RNA, 19 nt, synthetic construct
  source 1..19: mol_type = other RNA
ccaccacggccaccacaac

SEQ ID NO: 18463 - RNA, 19 nt, synthetic construct
  source 1..19: mol_type = other RNA
ccctcctccagcccaggga

SEQ ID NO: 18464 - RNA, 19 nt, synthetic construct
  source 1..19: mol_type = other RNA
gaccaccaccaccacaact

SEQ ID NO: 18465 - RNA, 19 nt, synthetic construct
  source 1..19: mol_type = other RNA
cctgcagccaccagcagca

SEQ ID NO: 18466 - RNA, 19 nt, synthetic construct
  source 1..19: mol_type = other RNA
cggccacggccacacccag

SEQ ID NO: 18467 - RNA, 19 nt, synthetic construct
  source 1..19: mol_type = other RNA
tggcctggtctgcaggaac

SEQ ID NO: 18468 - RNA, 19 nt, synthetic construct
  source 1..19: mol_type = other RNA
gaccagcacggccaccaca

SEQ ID NO: 18469 - RNA, 19 nt, synthetic construct
  source 1..19: mol_type = other RNA
agttccaaagccacttcct

SEQ ID NO: 18470 - RNA, 19 nt, synthetic construct
  source 1..19: mol_type = other RNA
tccaaagccacttcctcct

SEQ ID NO: 18471 - RNA, 19 nt, synthetic construct
  source 1..19: mol_type = other RNA
agtgctgacaagcacagcc

SEQ ID NO: 18472 - RNA, 19 nt, synthetic construct
  source 1..19: mol_type = other RNA
agctgaccacagcagccac

SEQ ID NO: 18473 - RNA, 19 nt, synthetic construct
  source 1..19: mol_type = other RNA
atccacggccaccgcctcc

SEQ ID NO: 18474 - RNA, 19 nt, synthetic construct
  source 1..19: mol_type = other RNA
acggccaccgcctcctcca

SEQ ID NO: 18475 - RNA, 19 nt, synthetic construct
  source 1..19: mol_type = other RNA
gccaccgcctcctccaccc

SEQ ID NO: 18476 - RNA, 19 nt, synthetic construct
  source 1..19: mol_type = other RNA
gaccagcacggccaccaca

SEQ ID NO: 18477 - RNA, 19 nt, synthetic construct
  source 1..19: mol_type = other RNA
ccctcctccagcccaggga

SEQ ID NO: 18478 - RNA, 19 nt, synthetic construct
  source 1..19: mol_type = other RNA
gaccaccaccaccacaact

SEQ ID NO: 18479 - RNA, 19 nt, synthetic construct
  source 1..19: mol_type = other RNA
cctgcagccaccagcagca

SEQ ID NO: 18480 - RNA, 19 nt, synthetic construct
  source 1..19: mol_type = other RNA
ggggcacctccaggaccac

SEQ ID NO: 18481 - RNA, 19 nt, synthetic construct
  source 1..19: mol_type = other RNA
tggcctggtctgcaggaac

SEQ ID NO: 18482 - RNA, 19 nt, synthetic construct
  source 1..19: mol_type = other RNA
atccacggccaccgcctcc

SEQ ID NO: 18483 - RNA, 19 nt, synthetic construct
  source 1..19: mol_type = other RNA
acggccaccgcctcctcca

SEQ ID NO: 18484 - RNA, 19 nt, synthetic construct
  source 1..19: mol_type = other RNA
gccaccgcctcctccaccc

SEQ ID NO: 18485 - RNA, 19 nt, synthetic construct
  source 1..19: mol_type = other RNA
actcccttctccagtccag

SEQ ID NO: 18486 - RNA, 19 nt, synthetic construct
  source 1..19: mol_type = other RNA
tcctcctccctgggcacca

SEQ ID NO: 18487 - RNA, 19 nt, synthetic construct
  source 1..19: mol_type = other RNA
accaccacggccaccacaa

SEQ ID NO: 18488 - RNA, 19 nt, synthetic construct
  source 1..19: mol_type = other RNA
ccaccacggccaccacaac

SEQ ID NO: 18489 - RNA, 19 nt, synthetic construct
  source 1..19: mol_type = other RNA
gtcaccccctcctccagcc

SEQ ID NO: 18490 - RNA, 19 nt, synthetic construct
  source 1..19: mol_type = other RNA
ccctcctccagcccaggga

SEQ ID NO: 18491 - RNA, 19 nt, synthetic construct
  source 1..19: mol_type = other RNA
gaccaccaccaccacaact

SEQ ID NO: 18492 - RNA, 19 nt, synthetic construct
  source 1..19: mol_type = other RNA
cctgcagccaccagcagca

SEQ ID NO: 18493 - RNA, 19 nt, synthetic construct
  source 1..19: mol_type = other RNA
tcacccccttccccaggga

SEQ ID NO: 18494 - RNA, 19 nt, synthetic construct
  source 1..19: mol_type = other RNA
cggccacggccacacccag

SEQ ID NO: 18495 - RNA, 19 nt, synthetic construct
  source 1..19: mol_type = other RNA
tggcctggtctgcaggaac

SEQ ID NO: 18496 - RNA, 19 nt, synthetic construct
  source 1..19: mol_type = other RNA
agttccaaagccacttcct

SEQ ID NO: 18497 - RNA, 19 nt, synthetic construct
  source 1..19: mol_type = other RNA
tccaaagccacttcctcct

SEQ ID NO: 18498 - RNA, 19 nt, synthetic construct
  source 1..19: mol_type = other RNA
agtgctgacaagcacagcc

SEQ ID NO: 18499 - RNA, 19 nt, synthetic construct
  source 1..19: mol_type = other RNA
agctgaccacagcagccac

SEQ ID NO: 18500 - RNA, 19 nt, synthetic construct
  source 1..19: mol_type = other RNA
atccacggccaccgcctcc

SEQ ID NO: 18501 - RNA, 19 nt, synthetic construct
  source 1..19: mol_type = other RNA
acggccaccgcctcctcca

SEQ ID NO: 18502 - RNA, 19 nt, synthetic construct
  source 1..19: mol_type = other RNA
gccaccgcctcctccaccc

SEQ ID NO: 18503 - RNA, 19 nt, synthetic construct
  source 1..19: mol_type = other RNA
tcctcctccctgggcacca

SEQ ID NO: 18504 - RNA, 19 nt, synthetic construct
  source 1..19: mol_type = other RNA
ccctcctccagcccaggga

SEQ ID NO: 18505 - RNA, 19 nt, synthetic construct
  source 1..19: mol_type = other RNA
gaccaccaccaccacaact

SEQ ID NO: 18506 - RNA, 19 nt, synthetic construct
  source 1..19: mol_type = other RNA
acacccatcaccccagtgc

SEQ ID NO: 18507 - RNA, 19 nt, synthetic construct
  source 1..19: mol_type = other RNA
gaccagcacggccaccaca

SEQ ID NO: 18508 - RNA, 19 nt, synthetic construct
  source 1..19: mol_type = other RNA
tccaaagccacttcctcct

SEQ ID NO: 18509 - RNA, 19 nt, synthetic construct
  source 1..19: mol_type = other RNA
agtgctgacaagcacagcc

SEQ ID NO: 18510 - RNA, 19 nt, synthetic construct
  source 1..19: mol_type = other RNA
cctcctccaccctgtggac

SEQ ID NO: 18511 - RNA, 19 nt, synthetic construct
  source 1..19: mol_type = other RNA
agcacagaccaccacaccc

SEQ ID NO: 18512 - RNA, 19 nt, synthetic construct
  source 1..19: mol_type = other RNA
caccctgtcctccacccca

SEQ ID NO: 18513 - RNA, 19 nt, synthetic construct
  source 1..19: mol_type = other RNA
ttccacggccaccgcctcc

SEQ ID NO: 18514 - RNA, 19 nt, synthetic construct
  source 1..19: mol_type = other RNA
acggccaccgcctcctcca

SEQ ID NO: 18515 - RNA, 19 nt, synthetic construct
  source 1..19: mol_type = other RNA
ctttgggaatctcagcctc

SEQ ID NO: 18516 - RNA, 19 nt, synthetic construct
  source 1..19: mol_type = other RNA
tgccactgccgctgccgcc

SEQ ID NO: 18517 - RNA, 19 nt, synthetic construct
  source 1..19: mol_type = other RNA
actgccgctgccgcccgct

SEQ ID NO: 18518 - RNA, 19 nt, synthetic construct
  source 1..19: mol_type = other RNA
gccgcccgctgcccccgcg

SEQ ID NO: 18519 - RNA, 19 nt, synthetic construct
  source 1..19: mol_type = other RNA
ccagccccgcagccccggt

SEQ ID NO: 18520 - RNA, 19 nt, synthetic construct
  source 1..19: mol_type = other RNA
cccccaccccatgcccacc

SEQ ID NO: 18521 - RNA, 19 nt, synthetic construct
  source 1..19: mol_type = other RNA
cccaccccatgcccaccac

SEQ ID NO: 18522 - RNA, 19 nt, synthetic construct
  source 1..19: mol_type = other RNA
ggggccgccttgaggtgcc

SEQ ID NO: 18523 - RNA, 19 nt, synthetic construct
  source 1..19: mol_type = other RNA
ggccgccttgaggtgccct

SEQ ID NO: 18524 - RNA, 19 nt, synthetic construct
  source 1..19: mol_type = other RNA
cctgccagagcctggaggc

SEQ ID NO: 18525 - RNA, 19 nt, synthetic construct
  source 1..19: mol_type = other RNA
tgccagagcctggaggctt

SEQ ID NO: 18526 - RNA, 19 nt, synthetic construct
  source 1..19: mol_type = other RNA
acacaaccacctgccccca

SEQ ID NO: 18527 - RNA, 19 nt, synthetic construct
  source 1..19: mol_type = other RNA
actcagcagaggcccaggc

SEQ ID NO: 18528 - RNA, 19 nt, synthetic construct
  source 1..19: mol_type = other RNA
tgccaggagaggcgggtcc

SEQ ID NO: 18529 - RNA, 19 nt, synthetic construct
  source 1..19: mol_type = other RNA
cccaggaggccactgctgt

SEQ ID NO: 18530 - RNA, 19 nt, synthetic construct
  source 1..19: mol_type = other RNA
cccaccttggccttgcccc

SEQ ID NO: 18531 - RNA, 19 nt, synthetic construct
  source 1..19: mol_type = other RNA
aggcaaggccagctgctgc

SEQ ID NO: 18532 - RNA, 19 nt, synthetic construct
  source 1..19: mol_type = other RNA
ccagctgctgccaggaagc

SEQ ID NO: 18533 - RNA, 19 nt, synthetic construct
  source 1..19: mol_type = other RNA
aagctgcctgggagcctct

SEQ ID NO: 18534 - RNA, 19 nt, synthetic construct
  source 1..19: mol_type = other RNA
tatggcagtgccaggacct

SEQ ID NO: 18535 - RNA, 19 nt, synthetic construct
  source 1..19: mol_type = other RNA
cacacccacccccacccca

SEQ ID NO: 18536 - RNA, 19 nt, synthetic construct
  source 1..19: mol_type = other RNA
ttgctgagtgccacaacct

SEQ ID NO: 18537 - RNA, 19 nt, synthetic construct
  source 1..19: mol_type = other RNA
cacagccacagccacaccc

SEQ ID NO: 18538 - RNA, 19 nt, synthetic construct
  source 1..19: mol_type = other RNA
gcgagagggccgggtgggg

SEQ ID NO: 18539 - RNA, 19 nt, synthetic construct
  source 1..19: mol_type = other RNA
gtgctgaccaccaccacca

SEQ ID NO: 18540 - RNA, 19 nt, synthetic construct
  source 1..19: mol_type = other RNA
gtgctgaccaccaccacca

SEQ ID NO: 18541 - RNA, 19 nt, synthetic construct
  source 1..19: mol_type = other RNA
gtgctgaccaccaccacca

SEQ ID NO: 18542 - RNA, 19 nt, synthetic construct
  source 1..19: mol_type = other RNA
gtgctgaccaccaccacca

SEQ ID NO: 18543 - RNA, 19 nt, synthetic construct
  source 1..19: mol_type = other RNA
gtgctgaccaccaccacca

SEQ ID NO: 18544 - RNA, 19 nt, synthetic construct
  source 1..19: mol_type = other RNA
ctggccccacggccacccc

SEQ ID NO: 18545 - RNA, 19 nt, synthetic construct
  source 1..19: mol_type = other RNA
ctggccccacggccacccc

SEQ ID NO: 18546 - RNA, 19 nt, synthetic construct
  source 1..19: mol_type = other RNA
cctgtggcctgtgtgggga

SEQ ID NO: 18547 - RNA, 19 nt, synthetic construct
  source 1..19: mol_type = other RNA
ggcgagagggccgggtggg

SEQ ID NO: 18548 - RNA, 19 nt, synthetic construct
  source 1..19: mol_type = other RNA
tggagacggggctgacctg

SEQ ID NO: 18549 - RNA, 19 nt, synthetic construct
  source 1..19: mol_type = other RNA
tgggcccagaagcagtgca

SEQ ID NO: 18550 - RNA, 19 nt, synthetic construct
  source 1..19: mol_type = other RNA
tggacttcccaacctcagg

SEQ ID NO: 18551 - RNA, 19 nt, synthetic construct
  source 1..19: mol_type = other RNA
tgaaaacatcagggctgct

SEQ ID NO: 18552 - RNA, 19 nt, synthetic construct
  source 1..19: mol_type = other RNA
agatgtgctgggcaccaaa

SEQ ID NO: 18553 - RNA, 19 nt, synthetic construct
  source 1..19: mol_type = other RNA
gggacatggaaacttttga

SEQ ID NO: 18554 - RNA, 19 nt, synthetic construct
  source 1..19: mol_type = other RNA
cagccaccacacccacagc

SEQ ID NO: 18555 - RNA, 19 nt, synthetic construct
  source 1..19: mol_type = other RNA
cagccaccacacccacagc

SEQ ID NO: 18556 - RNA, 19 nt, synthetic construct
  source 1..19: mol_type = other RNA
cagccaccacacccacagc

SEQ ID NO: 18557 - RNA, 19 nt, synthetic construct
  source 1..19: mol_type = other RNA
cagccaccacacccacagc

SEQ ID NO: 18558 - RNA, 19 nt, synthetic construct
  source 1..19: mol_type = other RNA
cagccaccacacccacagc

SEQ ID NO: 18559 - RNA, 19 nt, synthetic construct
  source 1..19: mol_type = other RNA
cccccaggcacggtgctgg

SEQ ID NO: 18560 - RNA, 19 nt, synthetic construct
  source 1..19: mol_type = other RNA
tacaagggcagggtctgcg

SEQ ID NO: 18561 - RNA, 19 nt, synthetic construct
  source 1..19: mol_type = other RNA
acatcagggctgctggggg

SEQ ID NO: 18562 - RNA, 19 nt, synthetic construct
  source 1..19: mol_type = other RNA
atcagggctgctgggggca

SEQ ID NO: 18563 - RNA, 19 nt, synthetic construct
  source 1..19: mol_type = other RNA
ctgaccaccacggccacca

SEQ ID NO: 18564 - RNA, 19 nt, synthetic construct
  source 1..19: mol_type = other RNA
acagccaccacacccacag

SEQ ID NO: 18565 - RNA, 19 nt, synthetic construct
  source 1..19: mol_type = other RNA
agccaccacacccacagct

SEQ ID NO: 18566 - RNA, 19 nt, synthetic construct
  source 1..19: mol_type = other RNA
acagccaccacacccacag

SEQ ID NO: 18567 - RNA, 19 nt, synthetic construct
  source 1..19: mol_type = other RNA
agccaccacacccacagct

SEQ ID NO: 18568 - RNA, 19 nt, synthetic construct
  source 1..19: mol_type = other RNA
acagccaccacacccacag

SEQ ID NO: 18569 - RNA, 19 nt, synthetic construct
  source 1..19: mol_type = other RNA
agccaccacacccacagct

SEQ ID NO: 18570 - RNA, 19 nt, synthetic construct
  source 1..19: mol_type = other RNA
acagccaccacacccacag

SEQ ID NO: 18571 - RNA, 19 nt, synthetic construct
  source 1..19: mol_type = other RNA
agccaccacacccacagct

SEQ ID NO: 18572 - RNA, 19 nt, synthetic construct
  source 1..19: mol_type = other RNA
acagccaccacacccacag

SEQ ID NO: 18573 - RNA, 19 nt, synthetic construct
  source 1..19: mol_type = other RNA
agccaccacacccacagct

SEQ ID NO: 18574 - RNA, 19 nt, synthetic construct
  source 1..19: mol_type = other RNA
aacttttgaaaacatcagg

SEQ ID NO: 18575 - RNA, 19 nt, synthetic construct
  source 1..19: mol_type = other RNA
cagggctgctgggggcaag

SEQ ID NO: 18576 - RNA, 19 nt, synthetic construct
  source 1..19: mol_type = other RNA
ggacttcccaacctcaggg

SEQ ID NO: 18577 - RNA, 19 nt, synthetic construct
  source 1..19: mol_type = other RNA
ttgaaaacatcagggctgc

SEQ ID NO: 18578 - RNA, 19 nt, synthetic construct
  source 1..19: mol_type = other RNA
tgacgactacagccactgc

SEQ ID NO: 18579 - RNA, 19 nt, synthetic construct
  source 1..19: mol_type = other RNA
ggctgcttctgccccccag

SEQ ID NO: 18580 - RNA, 19 nt, synthetic construct
  source 1..19: mol_type = other RNA
gtttgacacctgcaactgt

SEQ ID NO: 18581 - RNA, 19 nt, synthetic construct
  source 1..19: mol_type = other RNA
accggcaccacctgctcca

SEQ ID NO: 18582 - RNA, 19 nt, synthetic construct
  source 1..19: mol_type = other RNA
atggaaacttttgaaaaca

SEQ ID NO: 18583 - RNA, 19 nt, synthetic construct
  source 1..19: mol_type = other RNA
tggaaacttttgaaaacat

SEQ ID NO: 18584 - RNA, 19 nt, synthetic construct
  source 1..19: mol_type = other RNA
ggaaacttttgaaaacatc

SEQ ID NO: 18585 - RNA, 19 nt, synthetic construct
  source 1..19: mol_type = other RNA
caccccctcctccagccca

SEQ ID NO: 18586 - RNA, 19 nt, synthetic construct
  source 1..19: mol_type = other RNA
caccccctcctccagccca

SEQ ID NO: 18587 - RNA, 19 nt, synthetic construct
  source 1..19: mol_type = other RNA
caccccctcctccagccca

SEQ ID NO: 18588 - RNA, 19 nt, synthetic construct
  source 1..19: mol_type = other RNA
caccccctcctccagccca

SEQ ID NO: 18589 - RNA, 19 nt, synthetic construct
  source 1..19: mol_type = other RNA
caccccctcctccagccca

SEQ ID NO: 18590 - RNA, 19 nt, synthetic construct
  source 1..19: mol_type = other RNA
tcttccaggcccggctgcc

SEQ ID NO: 18591 - RNA, 19 nt, synthetic construct
  source 1..19: mol_type = other RNA
ggctgctgctactcctgtg

SEQ ID NO: 18592 - RNA, 19 nt, synthetic construct
  source 1..19: mol_type = other RNA
gctgctgctactcctgtga

SEQ ID NO: 18593 - RNA, 19 nt, synthetic construct
  source 1..19: mol_type = other RNA
cctgctgcccagcagcccc

SEQ ID NO: 18594 - RNA, 19 nt, synthetic construct
  source 1..19: mol_type = other RNA
cctgctgcccagcagcccc

SEQ ID NO: 18595 - RNA, 19 nt, synthetic construct
  source 1..19: mol_type = other RNA
cctgctgcccagcagcccc

SEQ ID NO: 18596 - RNA, 19 nt, synthetic construct
  source 1..19: mol_type = other RNA
cctgctgcccagcagcccc

SEQ ID NO: 18597 - RNA, 19 nt, synthetic construct
  source 1..19: mol_type = other RNA
ctgtgcgccgcgctgtcct

SEQ ID NO: 18598 - RNA, 19 nt, synthetic construct
  source 1..19: mol_type = other RNA
cgaccctgctgcccagcag

SEQ ID NO: 18599 - RNA, 19 nt, synthetic construct
  source 1..19: mol_type = other RNA
cgaccctgctgcccagcag

SEQ ID NO: 18600 - RNA, 19 nt, synthetic construct
  source 1..19: mol_type = other RNA
cgaccctgctgcccagcag

SEQ ID NO: 18601 - RNA, 19 nt, synthetic construct
  source 1..19: mol_type = other RNA
cgaccctgctgcccagcag

SEQ ID NO: 18602 - RNA, 19 nt, synthetic construct
  source 1..19: mol_type = other RNA
tatgtgcacgcctgtgccg

SEQ ID NO: 18603 - RNA, 19 nt, synthetic construct
  source 1..19: mol_type = other RNA
gggagtgtgcagtgactgg

SEQ ID NO: 18604 - RNA, 19 nt, synthetic construct
  source 1..19: mol_type = other RNA
ggagacggccaccaccacc

SEQ ID NO: 18605 - RNA, 19 nt, synthetic construct
  source 1..19: mol_type = other RNA
ccctgctgcccagcagccc

SEQ ID NO: 18606 - RNA, 19 nt, synthetic construct
  source 1..19: mol_type = other RNA
ccctgctgcccagcagccc

SEQ ID NO: 18607 - RNA, 19 nt, synthetic construct
  source 1..19: mol_type = other RNA
ccctgctgcccagcagccc

SEQ ID NO: 18608 - RNA, 19 nt, synthetic construct
  source 1..19: mol_type = other RNA
ccctgctgcccagcagccc

SEQ ID NO: 18609 - RNA, 19 nt, synthetic construct
  source 1..19: mol_type = other RNA
ccactgtgtcctcctcagt

SEQ ID NO: 18610 - RNA, 19 nt, synthetic construct
  source 1..19: mol_type = other RNA
cactgtgtcctcctcagtc

SEQ ID NO: 18611 - RNA, 19 nt, synthetic construct
  source 1..19: mol_type = other RNA
tgcagggggagcctcagga

SEQ ID NO: 18612 - RNA, 19 nt, synthetic construct
  source 1..19: mol_type = other RNA
gtcctgggcccagaagcag

SEQ ID NO: 18613 - RNA, 19 nt, synthetic construct
  source 1..19: mol_type = other RNA
tcctgggcccagaagcagt

SEQ ID NO: 18614 - RNA, 19 nt, synthetic construct
  source 1..19: mol_type = other RNA
ggcccagaagcagtgcagc

SEQ ID NO: 18615 - RNA, 19 nt, synthetic construct
  source 1..19: mol_type = other RNA
gcccagaagcagtgcagca

SEQ ID NO: 18616 - RNA, 19 nt, synthetic construct
  source 1..19: mol_type = other RNA
tgctacaactacaggatcc

SEQ ID NO: 18617 - RNA, 19 nt, synthetic construct
  source 1..19: mol_type = other RNA
tctgcagaaaagcacaggg

SEQ ID NO: 18618 - RNA, 19 nt, synthetic construct
  source 1..19: mol_type = other RNA
tcccctgcccctggctgtg

SEQ ID NO: 18619 - RNA, 19 nt, synthetic construct
  source 1..19: mol_type = other RNA
ccctgcttctgcagggcat

SEQ ID NO: 18620 - RNA, 19 nt, synthetic construct
  source 1..19: mol_type = other RNA
cagcaccagtgcacctgct

SEQ ID NO: 18621 - RNA, 19 nt, synthetic construct
  source 1..19: mol_type = other RNA
cctggctgtgacaatgcca

SEQ ID NO: 18622 - RNA, 19 nt, synthetic construct
  source 1..19: mol_type = other RNA
actctggctgcctgcccct

SEQ ID NO: 18623 - RNA, 19 nt, synthetic construct
  source 1..19: mol_type = other RNA
ctgcagctgctggtgcagc

SEQ ID NO: 18624 - RNA, 19 nt, synthetic construct
  source 1..19: mol_type = other RNA
atgtgcggcctgtgtggga

SEQ ID NO: 18625 - RNA, 19 nt, synthetic construct
  source 1..19: mol_type = other RNA
gcgaggactgcctgtgcgc

SEQ ID NO: 18626 - RNA, 19 nt, synthetic construct
  source 1..19: mol_type = other RNA
acctgctccaaggccatca

SEQ ID NO: 18627 - RNA, 19 nt, synthetic construct
  source 1..19: mol_type = other RNA
gaccctggagaactgcacg

SEQ ID NO: 18628 - RNA, 19 nt, synthetic construct
  source 1..19: mol_type = other RNA
acccctgcacggccaaccc

SEQ ID NO: 18629 - RNA, 19 nt, synthetic construct
  source 1..19: mol_type = other RNA
gaccctgctgcccagcagc

SEQ ID NO: 18630 - RNA, 19 nt, synthetic construct
  source 1..19: mol_type = other RNA
gaccctgctgcccagcagc

SEQ ID NO: 18631 - RNA, 19 nt, synthetic construct
  source 1..19: mol_type = other RNA
gaccctgctgcccagcagc

SEQ ID NO: 18632 - RNA, 19 nt, synthetic construct
  source 1..19: mol_type = other RNA
gaccctgctgcccagcagc

SEQ ID NO: 18633 - RNA, 19 nt, synthetic construct
  source 1..19: mol_type = other RNA
tcgccctcccctgcccctg

SEQ ID NO: 18634 - RNA, 19 nt, synthetic construct
  source 1..19: mol_type = other RNA
tgcagcaccagtgcacctg

SEQ ID NO: 18635 - RNA, 19 nt, synthetic construct
  source 1..19: mol_type = other RNA
cagtgcacctgctgccagg

SEQ ID NO: 18636 - RNA, 19 nt, synthetic construct
  source 1..19: mol_type = other RNA
gctgcagctgctggtgcag

SEQ ID NO: 18637 - RNA, 19 nt, synthetic construct
  source 1..19: mol_type = other RNA
catcagggctgctgggggc

SEQ ID NO: 18638 - RNA, 19 nt, synthetic construct
  source 1..19: mol_type = other RNA
gcaggcagagacccagggc

SEQ ID NO: 18639 - RNA, 19 nt, synthetic construct
  source 1..19: mol_type = other RNA
ctgcagcctggagacgggg

SEQ ID NO: 18640 - RNA, 19 nt, synthetic construct
  source 1..19: mol_type = other RNA
agacggccaccaccaccac

SEQ ID NO: 18641 - RNA, 19 nt, synthetic construct
  source 1..19: mol_type = other RNA
aggtgctgacctgcagcct

SEQ ID NO: 18642 - RNA, 19 nt, synthetic construct
  source 1..19: mol_type = other RNA
acgcccttctgtgtccctg

SEQ ID NO: 18643 - RNA, 19 nt, synthetic construct
  source 1..19: mol_type = other RNA
agtgcaagcccctgccctg

SEQ ID NO: 18644 - RNA, 19 nt, synthetic construct
  source 1..19: mol_type = other RNA
gggcaggtgctgacctgca

SEQ ID NO: 18645 - RNA, 19 nt, synthetic construct
  source 1..19: mol_type = other RNA
ccaccaccaccaccaccca

SEQ ID NO: 18646 - RNA, 19 nt, synthetic construct
  source 1..19: mol_type = other RNA
actgccccagcaccccggc

SEQ ID NO: 18647 - RNA, 19 nt, synthetic construct
  source 1..19: mol_type = other RNA
actgccccagcaccccggc

SEQ ID NO: 18648 - RNA, 19 nt, synthetic construct
  source 1..19: mol_type = other RNA
actgccccagcaccccggc

SEQ ID NO: 18649 - RNA, 19 nt, synthetic construct
  source 1..19: mol_type = other RNA
actgccccagcaccccggc

SEQ ID NO: 18650 - RNA, 19 nt, synthetic construct
  source 1..19: mol_type = other RNA
gcagtgcagcatcctccac

SEQ ID NO: 18651 - RNA, 19 nt, synthetic construct
  source 1..19: mol_type = other RNA
ctacgactgcgtccactgg

SEQ ID NO: 18652 - RNA, 19 nt, synthetic construct
  source 1..19: mol_type = other RNA
ctacgactgcgtccactgg

SEQ ID NO: 18653 - RNA, 19 nt, synthetic construct
  source 1..19: mol_type = other RNA
gacgacctggatcctcaca

SEQ ID NO: 18654 - RNA, 19 nt, synthetic construct
  source 1..19: mol_type = other RNA
gacgacctggatcctcaca

SEQ ID NO: 18655 - RNA, 19 nt, synthetic construct
  source 1..19: mol_type = other RNA
ggtgaccatgggctgtgag

SEQ ID NO: 18656 - RNA, 19 nt, synthetic construct
  source 1..19: mol_type = other RNA
ggtgaccatgggctgtgag

SEQ ID NO: 18657 - RNA, 19 nt, synthetic construct
  source 1..19: mol_type = other RNA
ccacccacgctggccccaa

SEQ ID NO: 18658 - RNA, 19 nt, synthetic construct
  source 1..19: mol_type = other RNA
gtgcgtgtgctttgctgtg

SEQ ID NO: 18659 - RNA, 19 nt, synthetic construct
  source 1..19: mol_type = other RNA
ccagtaccccagccaccag

SEQ ID NO: 18660 - RNA, 19 nt, synthetic construct
  source 1..19: mol_type = other RNA
ccagccctttccagccctc

SEQ ID NO: 18661 - RNA, 19 nt, synthetic construct
  source 1..19: mol_type = other RNA
acctggatcctcacaaagc

SEQ ID NO: 18662 - RNA, 19 nt, synthetic construct
  source 1..19: mol_type = other RNA
ccaacctcaggggttgcag

SEQ ID NO: 18663 - RNA, 19 nt, synthetic construct
  source 1..19: mol_type = other RNA
acagagctgaccacaacag

SEQ ID NO: 18664 - RNA, 19 nt, synthetic construct
  source 1..19: mol_type = other RNA
acagagctgaccacaacag

SEQ ID NO: 18665 - RNA, 19 nt, synthetic construct
  source 1..19: mol_type = other RNA
acagagctgaccacaacag

SEQ ID NO: 18666 - RNA, 19 nt, synthetic construct
  source 1..19: mol_type = other RNA
cgcaggcagagacccaggg

SEQ ID NO: 18667 - RNA, 19 nt, synthetic construct
  source 1..19: mol_type = other RNA
tgtggcccctccccggccc

SEQ ID NO: 18668 - RNA, 19 nt, synthetic construct
  source 1..19: mol_type = other RNA
tggcccctccccggcccca

SEQ ID NO: 18669 - RNA, 19 nt, synthetic construct
  source 1..19: mol_type = other RNA
accctggcacaggtggggc

SEQ ID NO: 18670 - RNA, 19 nt, synthetic construct
  source 1..19: mol_type = other RNA
ccctggcacaggtggggca

SEQ ID NO: 18671 - RNA, 19 nt, synthetic construct
  source 1..19: mol_type = other RNA
aacgtgcgtgtgctttgct

SEQ ID NO: 18672 - RNA, 19 nt, synthetic construct
  source 1..19: mol_type = other RNA
ccccagccaccagctccac

SEQ ID NO: 18673 - RNA, 19 nt, synthetic construct
  source 1..19: mol_type = other RNA
tccagccctttccagccct

SEQ ID NO: 18674 - RNA, 19 nt, synthetic construct
  source 1..19: mol_type = other RNA
cctggatcctcacagagct

SEQ ID NO: 18675 - RNA, 19 nt, synthetic construct
  source 1..19: mol_type = other RNA
ggccaccgcctcctccacc

SEQ ID NO: 18676 - RNA, 19 nt, synthetic construct
  source 1..19: mol_type = other RNA
ccacccctcctccactccg

SEQ ID NO: 18677 - RNA, 19 nt, synthetic construct
  source 1..19: mol_type = other RNA
cctggatcctcacagagct

SEQ ID NO: 18678 - RNA, 19 nt, synthetic construct
  source 1..19: mol_type = other RNA
ggccaccgcctcctccacc

SEQ ID NO: 18679 - RNA, 19 nt, synthetic construct
  source 1..19: mol_type = other RNA
ggccaccgcctcctccacc

SEQ ID NO: 18680 - RNA, 19 nt, synthetic construct
  source 1..19: mol_type = other RNA
cctggatcctcacagagct

SEQ ID NO: 18681 - RNA, 19 nt, synthetic construct
  source 1..19: mol_type = other RNA
ccacccctcctccactccg

SEQ ID NO: 18682 - RNA, 19 nt, synthetic construct
  source 1..19: mol_type = other RNA
cctggatcctcacagagct

SEQ ID NO: 18683 - RNA, 19 nt, synthetic construct
  source 1..19: mol_type = other RNA
cctggatcctcacagagct

SEQ ID NO: 18684 - RNA, 19 nt, synthetic construct
  source 1..19: mol_type = other RNA
ggccaccgcctcctccacc

SEQ ID NO: 18685 - RNA, 19 nt, synthetic construct
  source 1..19: mol_type = other RNA
ccccccactgccagccccg

SEQ ID NO: 18686 - RNA, 19 nt, synthetic construct
  source 1..19: mol_type = other RNA
cacccccaccccatgccca

SEQ ID NO: 18687 - RNA, 19 nt, synthetic construct
  source 1..19: mol_type = other RNA
cctgcccagatgtgtccag

SEQ ID NO: 18688 - RNA, 19 nt, synthetic construct
  source 1..19: mol_type = other RNA
agatgtgtccagctgcagg

SEQ ID NO: 18689 - RNA, 19 nt, synthetic construct
  source 1..19: mol_type = other RNA
ggccaccgcctcctccact

SEQ ID NO: 18690 - RNA, 19 nt, synthetic construct
  source 1..19: mol_type = other RNA
atggcagtgccaggacctg

SEQ ID NO: 18691 - RNA, 19 nt, synthetic construct
  source 1..19: mol_type = other RNA
gaccaggtcgggcaggtgc

SEQ ID NO: 18692 - RNA, 19 nt, synthetic construct
  source 1..19: mol_type = other RNA
ctacgactgcatccactgg

SEQ ID NO: 18693 - RNA, 19 nt, synthetic construct
  source 1..19: mol_type = other RNA
gctccccagcagcctgcca

SEQ ID NO: 18694 - RNA, 19 nt, synthetic construct
  source 1..19: mol_type = other RNA
gaagaccagacaggcaggt

SEQ ID NO: 18695 - RNA, 19 nt, synthetic construct
  source 1..19: mol_type = other RNA
accagctccaaagccactc

SEQ ID NO: 18696 - RNA, 19 nt, synthetic construct
  source 1..19: mol_type = other RNA
caccctcctccactccaga

SEQ ID NO: 18697 - RNA, 19 nt, synthetic construct
  source 1..19: mol_type = other RNA
accagctccaaagccactc

SEQ ID NO: 18698 - RNA, 19 nt, synthetic construct
  source 1..19: mol_type = other RNA
caccctcctccactccaga

SEQ ID NO: 18699 - RNA, 19 nt, synthetic construct
  source 1..19: mol_type = other RNA
accagctccaaagccactc

SEQ ID NO: 18700 - RNA, 19 nt, synthetic construct
  source 1..19: mol_type = other RNA
caccctcctccactccaga

SEQ ID NO: 18701 - RNA, 19 nt, synthetic construct
  source 1..19: mol_type = other RNA
accagctccaaagccactc

SEQ ID NO: 18702 - RNA, 19 nt, synthetic construct
  source 1..19: mol_type = other RNA
caccctcctccactccaga

SEQ ID NO: 18703 - RNA, 19 nt, synthetic construct
  source 1..19: mol_type = other RNA
cggggtggtggaggccacg

SEQ ID NO: 18704 - RNA, 19 nt, synthetic construct
  source 1..19: mol_type = other RNA
ctgcagcaacagctcggcg

SEQ ID NO: 18705 - RNA, 19 nt, synthetic construct
  source 1..19: mol_type = other RNA
gctggaggagctgggccag

SEQ ID NO: 18706 - RNA, 19 nt, synthetic construct
  source 1..19: mol_type = other RNA
accccagccaccagctcca

SEQ ID NO: 18707 - RNA, 19 nt, synthetic construct
  source 1..19: mol_type = other RNA
ccaccccctcctccacccc

SEQ ID NO: 18708 - RNA, 19 nt, synthetic construct
  source 1..19: mol_type = other RNA
ccaccccctcctccacccc

SEQ ID NO: 18709 - RNA, 19 nt, synthetic construct
  source 1..19: mol_type = other RNA
ccaccccctcctccacccc

SEQ ID NO: 18710 - RNA, 19 nt, synthetic construct
  source 1..19: mol_type = other RNA
ccaccccctcctccacccc

SEQ ID NO: 18711 - RNA, 19 nt, synthetic construct
  source 1..19: mol_type = other RNA
tgccgcccgctgcccccgc

SEQ ID NO: 18712 - RNA, 19 nt, synthetic construct
  source 1..19: mol_type = other RNA
cggagtgccacgcactggt

SEQ ID NO: 18713 - RNA, 19 nt, synthetic construct
  source 1..19: mol_type = other RNA
gctttgggaatctcagcct

SEQ ID NO: 18714 - RNA, 19 nt, synthetic construct
  source 1..19: mol_type = other RNA
accacagccacagccacac

SEQ ID NO: 18715 - RNA, 19 nt, synthetic construct
  source 1..19: mol_type = other RNA
cgctgccgcccgctgcccc

SEQ ID NO: 18716 - RNA, 19 nt, synthetic construct
  source 1..19: mol_type = other RNA
ctgccgcccgctgcccccg

SEQ ID NO: 18717 - RNA, 19 nt, synthetic construct
  source 1..19: mol_type = other RNA
cacccgtggccaccatgtc

SEQ ID NO: 18718 - RNA, 19 nt, synthetic construct
  source 1..19: mol_type = other RNA
gaccctggcacaggtgggg

SEQ ID NO: 18719 - RNA, 19 nt, synthetic construct
  source 1..19: mol_type = other RNA
tgcatcctgcccagatgtg

SEQ ID NO: 18720 - RNA, 19 nt, synthetic construct
  source 1..19: mol_type = other RNA
tgcagcacctggggtgact

SEQ ID NO: 18721 - RNA, 19 nt, synthetic construct
  source 1..19: mol_type = other RNA
gtggcccctccccggcccc

SEQ ID NO: 18722 - RNA, 19 nt, synthetic construct
  source 1..19: mol_type = other RNA
ccacagtcaccagctccaa

SEQ ID NO: 18723 - RNA, 19 nt, synthetic construct
  source 1..19: mol_type = other RNA
ccacagtcaccagctccaa

SEQ ID NO: 18724 - RNA, 19 nt, synthetic construct
  source 1..19: mol_type = other RNA
ctcccttctccagtccagg

SEQ ID NO: 18725 - RNA, 19 nt, synthetic construct
  source 1..19: mol_type = other RNA
ccacagtcaccagctccaa

SEQ ID NO: 18726 - RNA, 19 nt, synthetic construct
  source 1..19: mol_type = other RNA
ctcccttctccagtccagg

SEQ ID NO: 18727 - RNA, 19 nt, synthetic construct
  source 1..19: mol_type = other RNA
ccacagtcaccagctccaa

SEQ ID NO: 18728 - RNA, 19 nt, synthetic construct
  source 1..19: mol_type = other RNA
gcccctgccctgtgacgcc

SEQ ID NO: 18729 - RNA, 19 nt, synthetic construct
  source 1..19: mol_type = other RNA
atcccctcctcctccctgg

SEQ ID NO: 18730 - RNA, 19 nt, synthetic construct
  source 1..19: mol_type = other RNA
aagccacttcctcctccag

SEQ ID NO: 18731 - RNA, 19 nt, synthetic construct
  source 1..19: mol_type = other RNA
atcccctcctcctccctgg

SEQ ID NO: 18732 - RNA, 19 nt, synthetic construct
  source 1..19: mol_type = other RNA
aagccacttcctcctccag

SEQ ID NO: 18733 - RNA, 19 nt, synthetic construct
  source 1..19: mol_type = other RNA
atcccctcctcctccctgg

SEQ ID NO: 18734 - RNA, 19 nt, synthetic construct
  source 1..19: mol_type = other RNA
aagccacttcctcctccag

SEQ ID NO: 18735 - RNA, 19 nt, synthetic construct
  source 1..19: mol_type = other RNA
ctgccactgccgctgccgc

SEQ ID NO: 18736 - RNA, 19 nt, synthetic construct
  source 1..19: mol_type = other RNA
acccccaccccatgcccac

SEQ ID NO: 18737 - RNA, 19 nt, synthetic construct
  source 1..19: mol_type = other RNA
tgctcctgctgcccacccc

SEQ ID NO: 18738 - RNA, 19 nt, synthetic construct
  source 1..19: mol_type = other RNA
tccccctcccaaagtgctg

SEQ ID NO: 18739 - RNA, 19 nt, synthetic construct
  source 1..19: mol_type = other RNA
ccccctcccaaagtgctga

SEQ ID NO: 18740 - RNA, 19 nt, synthetic construct
  source 1..19: mol_type = other RNA
tccccctcccaaagtgctg

SEQ ID NO: 18741 - RNA, 19 nt, synthetic construct
  source 1..19: mol_type = other RNA
ccccctcccaaagtgctga

SEQ ID NO: 18742 - RNA, 19 nt, synthetic construct
  source 1..19: mol_type = other RNA
tccccctcccaaagtgctg

SEQ ID NO: 18743 - RNA, 19 nt, synthetic construct
  source 1..19: mol_type = other RNA
ccccctcccaaagtgctga

SEQ ID NO: 18744 - RNA, 19 nt, synthetic construct
  source 1..19: mol_type = other RNA
tgcagctcctgcacctgct

SEQ ID NO: 18745 - RNA, 19 nt, synthetic construct
  source 1..19: mol_type = other RNA
cgcctcctccactctggga

SEQ ID NO: 18746 - RNA, 19 nt, synthetic construct
  source 1..19: mol_type = other RNA
gctgccgcccgctgccccc

SEQ ID NO: 18747 - RNA, 19 nt, synthetic construct
  source 1..19: mol_type = other RNA
gcccggccctcccggtctc

SEQ ID NO: 18748 - RNA, 19 nt, synthetic construct
  source 1..19: mol_type = other RNA
agcccggccctcccggtct

SEQ ID NO: 18749 - RNA, 19 nt, synthetic construct
  source 1..19: mol_type = other RNA
ccccctgaacccggcgcac

SEQ ID NO: 18750 - RNA, 19 nt, synthetic construct
  source 1..19: mol_type = other RNA
aggagacggtgcccttgca

SEQ ID NO: 18751 - RNA, 19 nt, synthetic construct
  source 1..19: mol_type = other RNA
gagctgcgggttctctgct

SEQ ID NO: 18752 - RNA, 19 nt, synthetic construct
  source 1..19: mol_type = other RNA
acgaggacttcaacgtcca

SEQ ID NO: 18753 - RNA, 19 nt, synthetic construct
  source 1..19: mol_type = other RNA
tccttcaacaccacctgca

SEQ ID NO: 18754 - RNA, 19 nt, synthetic construct
  source 1..19: mol_type = other RNA
ctccagtgtggatcagcac

SEQ ID NO: 18755 - RNA, 19 nt, synthetic construct
  source 1..19: mol_type = other RNA
ttccagtgtggatcagcac

SEQ ID NO: 18756 - RNA, 19 nt, synthetic construct
  source 1..19: mol_type = other RNA
ttccagtgctgacaagcac

SEQ ID NO: 18757 - RNA, 19 nt, synthetic construct
  source 1..19: mol_type = other RNA
ctccagtgtggatcagcac

SEQ ID NO: 18758 - RNA, 19 nt, synthetic construct
  source 1..19: mol_type = other RNA
ctccagtgtggatcagcac

SEQ ID NO: 18759 - RNA, 19 nt, synthetic construct
  source 1..19: mol_type = other RNA
ttccagtgctgacaagcac

SEQ ID NO: 18760 - RNA, 19 nt, synthetic construct
  source 1..19: mol_type = other RNA
ctccagtgtggatcagcac

SEQ ID NO: 18761 - RNA, 19 nt, synthetic construct
  source 1..19: mol_type = other RNA
ttccagtgctgacaagcac

SEQ ID NO: 18762 - RNA, 19 nt, synthetic construct
  source 1..19: mol_type = other RNA
aaacctgggtcaacagcca

SEQ ID NO: 18763 - RNA, 19 nt, synthetic construct
  source 1..19: mol_type = other RNA
gactttggcctggtctgca

SEQ ID NO: 18764 - RNA, 19 nt, synthetic construct
  source 1..19: mol_type = other RNA
gactttggcctggtctgca

SEQ ID NO: 18765 - RNA, 19 nt, synthetic construct
  source 1..19: mol_type = other RNA
gactttggcctggtctgca

SEQ ID NO: 18766 - RNA, 19 nt, synthetic construct
  source 1..19: mol_type = other RNA
gactttggcctggtctgca

SEQ ID NO: 18767 - RNA, 19 nt, synthetic construct
  source 1..19: mol_type = other RNA
cagtgcagcatcctccacg

SEQ ID NO: 18768 - RNA, 19 nt, synthetic construct
  source 1..19: mol_type = other RNA
acagtgctgaccaccacca

SEQ ID NO: 18769 - RNA, 19 nt, synthetic construct
  source 1..19: mol_type = other RNA
acagtgctgaccaccacca

SEQ ID NO: 18770 - RNA, 19 nt, synthetic construct
  source 1..19: mol_type = other RNA
acagtgctgaccaccacca

SEQ ID NO: 18771 - RNA, 19 nt, synthetic construct
  source 1..19: mol_type = other RNA
acagtgctgaccaccacca

SEQ ID NO: 18772 - RNA, 19 nt, synthetic construct
  source 1..19: mol_type = other RNA
tgcagcaacagctcggcgg

SEQ ID NO: 18773 - RNA, 19 nt, synthetic construct
  source 1..19: mol_type = other RNA
tgcagcatcctccacggcc

SEQ ID NO: 18774 - RNA, 19 nt, synthetic construct
  source 1..19: mol_type = other RNA
agcatcctccacggcccca

SEQ ID NO: 18775 - RNA, 19 nt, synthetic construct
  source 1..19: mol_type = other RNA
ctgccctgaggaccagatc

SEQ ID NO: 18776 - RNA, 19 nt, synthetic construct
  source 1..19: mol_type = other RNA
acaggcctggggctgcagc

SEQ ID NO: 18777 - RNA, 19 nt, synthetic construct
  source 1..19: mol_type = other RNA
caggcctggggctgcagct

SEQ ID NO: 18778 - RNA, 19 nt, synthetic construct
  source 1..19: mol_type = other RNA
aggcctggggctgcagctg

SEQ ID NO: 18779 - RNA, 19 nt, synthetic construct
  source 1..19: mol_type = other RNA
acaagcctggagagaccat

SEQ ID NO: 18780 - RNA, 19 nt, synthetic construct
  source 1..19: mol_type = other RNA
tggaggagctgggccagca

SEQ ID NO: 18781 - RNA, 19 nt, synthetic construct
  source 1..19: mol_type = other RNA
cggccaccaccaccaccac

SEQ ID NO: 18782 - RNA, 19 nt, synthetic construct
  source 1..19: mol_type = other RNA
ggccaccaccaccaccacc

SEQ ID NO: 18783 - RNA, 19 nt, synthetic construct
  source 1..19: mol_type = other RNA
gccaccaccaccaccaccc

SEQ ID NO: 18784 - RNA, 19 nt, synthetic construct
  source 1..19: mol_type = other RNA
ctcctcctccctgggcacc

SEQ ID NO: 18785 - RNA, 19 nt, synthetic construct
  source 1..19: mol_type = other RNA
cagttccaaagccacttcc

SEQ ID NO: 18786 - RNA, 19 nt, synthetic construct
  source 1..19: mol_type = other RNA
ccacagccacagccacacc

SEQ ID NO: 18787 - RNA, 19 nt, synthetic construct
  source 1..19: mol_type = other RNA
ctcctcctccctgggcacc

SEQ ID NO: 18788 - RNA, 19 nt, synthetic construct
  source 1..19: mol_type = other RNA
cagttccaaagccacttcc

SEQ ID NO: 18789 - RNA, 19 nt, synthetic construct
  source 1..19: mol_type = other RNA
ctcctcctccctgggcacc

SEQ ID NO: 18790 - RNA, 19 nt, synthetic construct
  source 1..19: mol_type = other RNA
tctgccactgccgctgccg

SEQ ID NO: 18791 - RNA, 19 nt, synthetic construct
  source 1..19: mol_type = other RNA
tgccagccccgcagccccg

SEQ ID NO: 18792 - RNA, 19 nt, synthetic construct
  source 1..19: mol_type = other RNA
ccccaccccatgcccacca

SEQ ID NO: 18793 - RNA, 19 nt, synthetic construct
  source 1..19: mol_type = other RNA
caggcgcccgcgtcattga

SEQ ID NO: 18794 - RNA, 19 nt, synthetic construct
  source 1..19: mol_type = other RNA
tgtgctgaaacagcccacg

SEQ ID NO: 18795 - RNA, 19 nt, synthetic construct
  source 1..19: mol_type = other RNA
cagcggcagacctcgcgga

SEQ ID NO: 18796 - RNA, 19 nt, synthetic construct
  source 1..19: mol_type = other RNA
cttatcgtaggactcaacg

SEQ ID NO: 18797 - RNA, 19 nt, synthetic construct
  source 1..19: mol_type = other RNA
agatgcactcgcactcata

SEQ ID NO: 18798 - RNA, 19 nt, synthetic construct
  source 1..19: mol_type = other RNA
atttcttggacagaacgta

SEQ ID NO: 18799 - RNA, 19 nt, synthetic construct
  source 1..19: mol_type = other RNA
acgtcccctccaagttgtt

SEQ ID NO: 18800 - RNA, 19 nt, synthetic construct
  source 1..19: mol_type = other RNA
tgcactcgcactcatagtg

SEQ ID NO: 18801 - RNA, 19 nt, synthetic construct
  source 1..19: mol_type = other RNA
cgccgttcttgctgaaacc

SEQ ID NO: 18802 - RNA, 19 nt, synthetic construct
  source 1..19: mol_type = other RNA
cagacacaagcacgccgtt

SEQ ID NO: 18803 - RNA, 19 nt, synthetic construct
  source 1..19: mol_type = other RNA
cccaaactggagcggggtc

SEQ ID NO: 18804 - RNA, 19 nt, synthetic construct
  source 1..19: mol_type = other RNA
gtgcttgttcacgcaggtg

SEQ ID NO: 18805 - RNA, 19 nt, synthetic construct
  source 1..19: mol_type = other RNA
ggcgtgagtattccacaaa

SEQ ID NO: 18806 - RNA, 19 nt, synthetic construct
  source 1..19: mol_type = other RNA
ggtgttggcgaaggctgcg

SEQ ID NO: 18807 - RNA, 19 nt, synthetic construct
  source 1..19: mol_type = other RNA
ttatcgtaggactcaacgt

SEQ ID NO: 18808 - RNA, 19 nt, synthetic construct
  source 1..19: mol_type = other RNA
ggagccagcacggtgccgt

SEQ ID NO: 18809 - RNA, 19 nt, synthetic construct
  source 1..19: mol_type = other RNA
gtagtacttggtggagtca

SEQ ID NO: 18810 - RNA, 19 nt, synthetic construct
  source 1..19: mol_type = other RNA
aggacgatatccatggact

SEQ ID NO: 18811 - RNA, 19 nt, synthetic construct
  source 1..19: mol_type = other RNA
ttcttggacagaacgtagc

SEQ ID NO: 18812 - RNA, 19 nt, synthetic construct
  source 1..19: mol_type = other RNA
ggtgtaagaggtgccgtca

SEQ ID NO: 18813 - RNA, 19 nt, synthetic construct
  source 1..19: mol_type = other RNA
caccggaatttggtcaaac

SEQ ID NO: 18814 - RNA, 19 nt, synthetic construct
  source 1..19: mol_type = other RNA
cacgatgaagaagctcgag

SEQ ID NO: 18815 - RNA, 19 nt, synthetic construct
  source 1..19: mol_type = other RNA
ggtgccgtcaaaggtggaa

SEQ ID NO: 18816 - RNA, 19 nt, synthetic construct
  source 1..19: mol_type = other RNA
tgtacttggtgcagacgcc

SEQ ID NO: 18817 - RNA, 19 nt, synthetic construct
  source 1..19: mol_type = other RNA
tcctggtgcagtcggatga

SEQ ID NO: 18818 - RNA, 19 nt, synthetic construct
  source 1..19: mol_type = other RNA
cctcgtagtacttggtgga

SEQ ID NO: 18819 - RNA, 19 nt, synthetic construct
  source 1..19: mol_type = other RNA
cgcactcatagtggaagtc

SEQ ID NO: 18820 - RNA, 19 nt, synthetic construct
  source 1..19: mol_type = other RNA
aggtcgtccccggagtgga

SEQ ID NO: 18821 - RNA, 19 nt, synthetic construct
  source 1..19: mol_type = other RNA
aggtcgtccccggagtgga

SEQ ID NO: 18822 - RNA, 19 nt, synthetic construct
  source 1..19: mol_type = other RNA
aggtcgtccccggagtgga

SEQ ID NO: 18823 - RNA, 19 nt, synthetic construct
  source 1..19: mol_type = other RNA
tgctcaccggaatttggtc

SEQ ID NO: 18824 - RNA, 19 nt, synthetic construct
  source 1..19: mol_type = other RNA
agtgcccactggggttccg

SEQ ID NO: 18825 - RNA, 19 nt, synthetic construct
  source 1..19: mol_type = other RNA
cagcagaacacacggattt

SEQ ID NO: 18826 - RNA, 19 nt, synthetic construct
  source 1..19: mol_type = other RNA
cagcagaacacacggattt

SEQ ID NO: 18827 - RNA, 19 nt, synthetic construct
  source 1..19: mol_type = other RNA
cagcagaacacacggattt

SEQ ID NO: 18828 - RNA, 19 nt, synthetic construct
  source 1..19: mol_type = other RNA
gggccacagggcacgtatt

SEQ ID NO: 18829 - RNA, 19 nt, synthetic construct
  source 1..19: mol_type = other RNA
cgtgggcgcactggcgtga

SEQ ID NO: 18830 - RNA, 19 nt, synthetic construct
  source 1..19: mol_type = other RNA
atgtacttggtgcagacgc

SEQ ID NO: 18831 - RNA, 19 nt, synthetic construct
  source 1..19: mol_type = other RNA
gcgccaggctcgtggtcag

SEQ ID NO: 18832 - RNA, 19 nt, synthetic construct
  source 1..19: mol_type = other RNA
gatatccatggacttgtag

SEQ ID NO: 18833 - RNA, 19 nt, synthetic construct
  source 1..19: mol_type = other RNA
ctggtgcagtcggatgaac

SEQ ID NO: 18834 - RNA, 19 nt, synthetic construct
  source 1..19: mol_type = other RNA
gccgttcttgctgaaaccg

SEQ ID NO: 18835 - RNA, 19 nt, synthetic construct
  source 1..19: mol_type = other RNA
caacgtcccctccaagttg

SEQ ID NO: 18836 - RNA, 19 nt, synthetic construct
  source 1..19: mol_type = other RNA
ccgctgctcaccggaattt

SEQ ID NO: 18837 - RNA, 19 nt, synthetic construct
  source 1..19: mol_type = other RNA
gttgtcacccacgcacctg

SEQ ID NO: 18838 - RNA, 19 nt, synthetic construct
  source 1..19: mol_type = other RNA
ggcgcccgcgtcattgagg

SEQ ID NO: 18839 - RNA, 19 nt, synthetic construct
  source 1..19: mol_type = other RNA
gtggtgttgtagatgacgt

SEQ ID NO: 18840 - RNA, 19 nt, synthetic construct
  source 1..19: mol_type = other RNA
gttcccaaactggagcggg

SEQ ID NO: 18841 - RNA, 19 nt, synthetic construct
  source 1..19: mol_type = other RNA
agtcctggtgcagtcggat

SEQ ID NO: 18842 - RNA, 19 nt, synthetic construct
  source 1..19: mol_type = other RNA
agttacagctctggcagtt

SEQ ID NO: 18843 - RNA, 19 nt, synthetic construct
  source 1..19: mol_type = other RNA
gaggacccggatcctgtag

SEQ ID NO: 18844 - RNA, 19 nt, synthetic construct
  source 1..19: mol_type = other RNA
tgtaagaggtgccgtcaaa

SEQ ID NO: 18845 - RNA, 19 nt, synthetic construct
  source 1..19: mol_type = other RNA
gtgacgatgcggaaggtcc

SEQ ID NO: 18846 - RNA, 19 nt, synthetic construct
  source 1..19: mol_type = other RNA
tcttatcgtaggactcaac

SEQ ID NO: 18847 - RNA, 19 nt, synthetic construct
  source 1..19: mol_type = other RNA
aggtgtaagaggtgccgtc

SEQ ID NO: 18848 - RNA, 19 nt, synthetic construct
  source 1..19: mol_type = other RNA
cgatgaagaagctcgaggg

SEQ ID NO: 18849 - RNA, 19 nt, synthetic construct
  source 1..19: mol_type = other RNA
cagtgcggctgtaaggcag

SEQ ID NO: 18850 - RNA, 19 nt, synthetic construct
  source 1..19: mol_type = other RNA
gaggacgatatccatggac

SEQ ID NO: 18851 - RNA, 19 nt, synthetic construct
  source 1..19: mol_type = other RNA
ctggcgtgagtattccaca

SEQ ID NO: 18852 - RNA, 19 nt, synthetic construct
  source 1..19: mol_type = other RNA
ggccgtagttgcagcagaa

SEQ ID NO: 18853 - RNA, 19 nt, synthetic construct
  source 1..19: mol_type = other RNA
ggccgtagttgcagcagaa

SEQ ID NO: 18854 - RNA, 19 nt, synthetic construct
  source 1..19: mol_type = other RNA
cactgggccacgcacttca

SEQ ID NO: 18855 - RNA, 19 nt, synthetic construct
  source 1..19: mol_type = other RNA
taagaggtgccgtcaaagg

SEQ ID NO: 18856 - RNA, 19 nt, synthetic construct
  source 1..19: mol_type = other RNA
cacaagcacgccgttcttg

SEQ ID NO: 18857 - RNA, 19 nt, synthetic construct
  source 1..19: mol_type = other RNA
tgacgtcggcctcactcag

SEQ ID NO: 18858 - RNA, 19 nt, synthetic construct
  source 1..19: mol_type = other RNA
aagtcgtcagcctggttct

SEQ ID NO: 18859 - RNA, 19 nt, synthetic construct
  source 1..19: mol_type = other RNA
gtgccgtcaaaggtggaat

SEQ ID NO: 18860 - RNA, 19 nt, synthetic construct
  source 1..19: mol_type = other RNA
gtaagaggtgccgtcaaag

SEQ ID NO: 18861 - RNA, 19 nt, synthetic construct
  source 1..19: mol_type = other RNA
gcagccggttttcctgagg

SEQ ID NO: 18862 - RNA, 19 nt, synthetic construct
  source 1..19: mol_type = other RNA
ccacgcacctggccaccgt

SEQ ID NO: 18863 - RNA, 19 nt, synthetic construct
  source 1..19: mol_type = other RNA
cattccacgacctggccca

SEQ ID NO: 18864 - RNA, 19 nt, synthetic construct
  source 1..19: mol_type = other RNA
cattccacgacctggccca

SEQ ID NO: 18865 - RNA, 19 nt, synthetic construct
  source 1..19: mol_type = other RNA
cattccacgacctggccca

SEQ ID NO: 18866 - RNA, 19 nt, synthetic construct
  source 1..19: mol_type = other RNA
cattccacgacctggccca

SEQ ID NO: 18867 - RNA, 19 nt, synthetic construct
  source 1..19: mol_type = other RNA
ctcggtgttgttgtggaag

SEQ ID NO: 18868 - RNA, 19 nt, synthetic construct
  source 1..19: mol_type = other RNA
gtcgtccctctggttgttg

SEQ ID NO: 18869 - RNA, 19 nt, synthetic construct
  source 1..19: mol_type = other RNA
gggcgtgcagccacactca

SEQ ID NO: 18870 - RNA, 19 nt, synthetic construct
  source 1..19: mol_type = other RNA
gacgatatccatggacttg

SEQ ID NO: 18871 - RNA, 19 nt, synthetic construct
  source 1..19: mol_type = other RNA
tgccgggcgtagttctcat

SEQ ID NO: 18872 - RNA, 19 nt, synthetic construct
  source 1..19: mol_type = other RNA
tcccacaggggatgttctc

SEQ ID NO: 18873 - RNA, 19 nt, synthetic construct
  source 1..19: mol_type = other RNA
ttcagacttggggtagtcc

SEQ ID NO: 18874 - RNA, 19 nt, synthetic construct
  source 1..19: mol_type = other RNA
ccctgatcttatcgtagga

SEQ ID NO: 18875 - RNA, 19 nt, synthetic construct
  source 1..19: mol_type = other RNA
agcacgccgttcttgctga

SEQ ID NO: 18876 - RNA, 19 nt, synthetic construct
  source 1..19: mol_type = other RNA
gtgatgaagtggccatccc

SEQ ID NO: 18877 - RNA, 19 nt, synthetic construct
  source 1..19: mol_type = other RNA
gacgggtggaacaaagctc

SEQ ID NO: 18878 - RNA, 19 nt, synthetic construct
  source 1..19: mol_type = other RNA
ttgttcagacttggggtag

SEQ ID NO: 18879 - RNA, 19 nt, synthetic construct
  source 1..19: mol_type = other RNA
gtaggtcctgtcctcatag

SEQ ID NO: 18880 - RNA, 19 nt, synthetic construct
  source 1..19: mol_type = other RNA
acgatgaagaagctcgagg

SEQ ID NO: 18881 - RNA, 19 nt, synthetic construct
  source 1..19: mol_type = other RNA
ctcgcactcatagtggaag

SEQ ID NO: 18882 - RNA, 19 nt, synthetic construct
  source 1..19: mol_type = other RNA
ggctgcattccacgacctg

SEQ ID NO: 18883 - RNA, 19 nt, synthetic construct
  source 1..19: mol_type = other RNA
ggctgcattccacgacctg

SEQ ID NO: 18884 - RNA, 19 nt, synthetic construct
  source 1..19: mol_type = other RNA
ggctgcattccacgacctg

SEQ ID NO: 18885 - RNA, 19 nt, synthetic construct
  source 1..19: mol_type = other RNA
ggctgcattccacgacctg

SEQ ID NO: 18886 - RNA, 19 nt, synthetic construct
  source 1..19: mol_type = other RNA
acgtcaaaccactctgtcc

SEQ ID NO: 18887 - RNA, 19 nt, synthetic construct
  source 1..19: mol_type = other RNA
gccgggcgtagttctcatt

SEQ ID NO: 18888 - RNA, 19 nt, synthetic construct
  source 1..19: mol_type = other RNA
gttacagctctggcagttc

SEQ ID NO: 18889 - RNA, 19 nt, synthetic construct
  source 1..19: mol_type = other RNA
gtagttgtagcacatcttg

SEQ ID NO: 18890 - RNA, 19 nt, synthetic construct
  source 1..19: mol_type = other RNA
atcgtaggactcaacgtcc

SEQ ID NO: 18891 - RNA, 19 nt, synthetic construct
  source 1..19: mol_type = other RNA
catgaggacataggtgcag

SEQ ID NO: 18892 - RNA, 19 nt, synthetic construct
  source 1..19: mol_type = other RNA
gccccccgcgtgggcgcac

SEQ ID NO: 18893 - RNA, 19 nt, synthetic construct
  source 1..19: mol_type = other RNA
gggtagtcctcatcaaacc

SEQ ID NO: 18894 - RNA, 19 nt, synthetic construct
  source 1..19: mol_type = other RNA
ggcactgctccgtgggccc

SEQ ID NO: 18895 - RNA, 19 nt, synthetic construct
  source 1..19: mol_type = other RNA
tgtaggtggcctcgttgtg

SEQ ID NO: 18896 - RNA, 19 nt, synthetic construct
  source 1..19: mol_type = other RNA
acacacacaggcccgcgtc

SEQ ID NO: 18897 - RNA, 19 nt, synthetic construct
  source 1..19: mol_type = other RNA
ggtggtgttgtagatgacg

SEQ ID NO: 18898 - RNA, 19 nt, synthetic construct
  source 1..19: mol_type = other RNA
cgtagctggacgttgaagt

SEQ ID NO: 18899 - RNA, 19 nt, synthetic construct
  source 1..19: mol_type = other RNA
ggtcctgtcctcataggtg

SEQ ID NO: 18900 - RNA, 19 nt, synthetic construct
  source 1..19: mol_type = other RNA
actcaacgtcccctccaag

SEQ ID NO: 18901 - RNA, 19 nt, synthetic construct
  source 1..19: mol_type = other RNA
gctcgagggtgtgaacagg

SEQ ID NO: 18902 - RNA, 19 nt, synthetic construct
  source 1..19: mol_type = other RNA
agctcgagggtgtgaacag

SEQ ID NO: 18903 - RNA, 19 nt, synthetic construct
  source 1..19: mol_type = other RNA
gatgttctcggtgacgatg

SEQ ID NO: 18904 - RNA, 19 nt, synthetic construct
  source 1..19: mol_type = other RNA
aggtgtccggagtccgcca

SEQ ID NO: 18905 - RNA, 19 nt, synthetic construct
  source 1..19: mol_type = other RNA
tgcaccgacgtcatagtag

SEQ ID NO: 18906 - RNA, 19 nt, synthetic construct
  source 1..19: mol_type = other RNA
ttcggttgacagcgggtcg

SEQ ID NO: 18907 - RNA, 19 nt, synthetic construct
  source 1..19: mol_type = other RNA
cgacgtcatagtagtttcc

SEQ ID NO: 18908 - RNA, 19 nt, synthetic construct
  source 1..19: mol_type = other RNA
gccggctcggtcggtctta

SEQ ID NO: 18909 - RNA, 19 nt, synthetic construct
  source 1..19: mol_type = other RNA
ggccgtgatcgtagtggcc

SEQ ID NO: 18910 - RNA, 19 nt, synthetic construct
  source 1..19: mol_type = other RNA
ggccgtgatcgtagtggcc

SEQ ID NO: 18911 - RNA, 19 nt, synthetic construct
  source 1..19: mol_type = other RNA
ggccgtgatcgtagtggcc

SEQ ID NO: 18912 - RNA, 19 nt, synthetic construct
  source 1..19: mol_type = other RNA
ggccgtgatcgtagtggcc

SEQ ID NO: 18913 - RNA, 19 nt, synthetic construct
  source 1..19: mol_type = other RNA
acttcggttgacagcgggt

SEQ ID NO: 18914 - RNA, 19 nt, synthetic construct
  source 1..19: mol_type = other RNA
cacgtcccctgcagtggtc

SEQ ID NO: 18915 - RNA, 19 nt, synthetic construct
  source 1..19: mol_type = other RNA
gggatcggtcaggcgcgag

SEQ ID NO: 18916 - RNA, 19 nt, synthetic construct
  source 1..19: mol_type = other RNA
tggtagtcggcactttggt

SEQ ID NO: 18917 - RNA, 19 nt, synthetic construct
  source 1..19: mol_type = other RNA
tggtagtcggcactttggt

SEQ ID NO: 18918 - RNA, 19 nt, synthetic construct
  source 1..19: mol_type = other RNA
tggtagtcggcactttggt

SEQ ID NO: 18919 - RNA, 19 nt, synthetic construct
  source 1..19: mol_type = other RNA
ccacagggcacgtattcgc

SEQ ID NO: 18920 - RNA, 19 nt, synthetic construct
  source 1..19: mol_type = other RNA
gtagtcggcactttggtag

SEQ ID NO: 18921 - RNA, 19 nt, synthetic construct
  source 1..19: mol_type = other RNA
ggtagtcggcactttggta

SEQ ID NO: 18922 - RNA, 19 nt, synthetic construct
  source 1..19: mol_type = other RNA
gtagtcggcactttggtag

SEQ ID NO: 18923 - RNA, 19 nt, synthetic construct
  source 1..19: mol_type = other RNA
ggtagtcggcactttggta

SEQ ID NO: 18924 - RNA, 19 nt, synthetic construct
  source 1..19: mol_type = other RNA
gtagtcggcactttggtag

SEQ ID NO: 18925 - RNA, 19 nt, synthetic construct
  source 1..19: mol_type = other RNA
ggtagtcggcactttggta

SEQ ID NO: 18926 - RNA, 19 nt, synthetic construct
  source 1..19: mol_type = other RNA
atttaggaaacccatcggg

SEQ ID NO: 18927 - RNA, 19 nt, synthetic construct
  source 1..19: mol_type = other RNA
gtgttcggcactgggggtg

SEQ ID NO: 18928 - RNA, 19 nt, synthetic construct
  source 1..19: mol_type = other RNA
gtgttcggcactgggggtg

SEQ ID NO: 18929 - RNA, 19 nt, synthetic construct
  source 1..19: mol_type = other RNA
gtgttcggcactgggggtg

SEQ ID NO: 18930 - RNA, 19 nt, synthetic construct
  source 1..19: mol_type = other RNA
gtgttcggcactgggggtg

SEQ ID NO: 18931 - RNA, 19 nt, synthetic construct
  source 1..19: mol_type = other RNA
ggatcggtcaggcgcgagc

SEQ ID NO: 18932 - RNA, 19 nt, synthetic construct
  source 1..19: mol_type = other RNA
aagatccccatgtagcgta

SEQ ID NO: 18933 - RNA, 19 nt, synthetic construct
  source 1..19: mol_type = other RNA
caactcccgcagggggaca

SEQ ID NO: 18934 - RNA, 19 nt, synthetic construct
  source 1..19: mol_type = other RNA
ctcaaggctgtgagcgcac

SEQ ID NO: 18935 - RNA, 19 nt, synthetic construct
  source 1..19: mol_type = other RNA
tatcgtaggactcaacgtc

SEQ ID NO: 18936 - RNA, 19 nt, synthetic construct
  source 1..19: mol_type = other RNA
caactcccgcagggggaca

SEQ ID NO: 18937 - RNA, 19 nt, synthetic construct
  source 1..19: mol_type = other RNA
caactcccgcagggggaca

SEQ ID NO: 18938 - RNA, 19 nt, synthetic construct
  source 1..19: mol_type = other RNA
gttcacgcaggtgacgttg

SEQ ID NO: 18939 - RNA, 19 nt, synthetic construct
  source 1..19: mol_type = other RNA
ttcccaaactccagtgcgt

SEQ ID NO: 18940 - RNA, 19 nt, synthetic construct
  source 1..19: mol_type = other RNA
gcggccctgatcttatcgt

SEQ ID NO: 18941 - RNA, 19 nt, synthetic construct
  source 1..19: mol_type = other RNA
ccggctcggtcggtcttat

SEQ ID NO: 18942 - RNA, 19 nt, synthetic construct
  source 1..19: mol_type = other RNA
cttgcaccgacgtcatagt

SEQ ID NO: 18943 - RNA, 19 nt, synthetic construct
  source 1..19: mol_type = other RNA
ccgcagggggacaccaggc

SEQ ID NO: 18944 - RNA, 19 nt, synthetic construct
  source 1..19: mol_type = other RNA
ccgcagggggacaccaggc

SEQ ID NO: 18945 - RNA, 19 nt, synthetic construct
  source 1..19: mol_type = other RNA
ccgcagggggacaccaggc

SEQ ID NO: 18946 - RNA, 19 nt, synthetic construct
  source 1..19: mol_type = other RNA
gaagtcgtcagcctggttc

SEQ ID NO: 18947 - RNA, 19 nt, synthetic construct
  source 1..19: mol_type = other RNA
cttagcttcccacccgtac

SEQ ID NO: 18948 - RNA, 19 nt, synthetic construct
  source 1..19: mol_type = other RNA
ggaagatccccatgtagcg

SEQ ID NO: 18949 - RNA, 19 nt, synthetic construct
  source 1..19: mol_type = other RNA
ggccacagggcacgtattc

SEQ ID NO: 18950 - RNA, 19 nt, synthetic construct
  source 1..19: mol_type = other RNA
catccaccacgtaggcgta

SEQ ID NO: 18951 - RNA, 19 nt, synthetic construct
  source 1..19: mol_type = other RNA
tcggttgacagcgggtcgt

SEQ ID NO: 18952 - RNA, 19 nt, synthetic construct
  source 1..19: mol_type = other RNA
gagtgctgggtggtaccgg

SEQ ID NO: 18953 - RNA, 19 nt, synthetic construct
  source 1..19: mol_type = other RNA
cactggaagcgtgcgtgcc

SEQ ID NO: 18954 - RNA, 19 nt, synthetic construct
  source 1..19: mol_type = other RNA
gagtgctgggtggtaccgg

SEQ ID NO: 18955 - RNA, 19 nt, synthetic construct
  source 1..19: mol_type = other RNA
gagtgctgggtggtaccgg

SEQ ID NO: 18956 - RNA, 19 nt, synthetic construct
  source 1..19: mol_type = other RNA
cctcggcgtagctggacgt

SEQ ID NO: 18957 - RNA, 19 nt, synthetic construct
  source 1..19: mol_type = other RNA
agcccactaggcctcggcg

SEQ ID NO: 18958 - RNA, 19 nt, synthetic construct
  source 1..19: mol_type = other RNA
ggccagtgcggctgtaagg

SEQ ID NO: 18959 - RNA, 19 nt, synthetic construct
  source 1..19: mol_type = other RNA
agtcaccatgcaggtcgta

SEQ ID NO: 18960 - RNA, 19 nt, synthetic construct
  source 1..19: mol_type = other RNA
tggagttgaggaacacgcc

SEQ ID NO: 18961 - RNA, 19 nt, synthetic construct
  source 1..19: mol_type = other RNA
accacgtaggcgtagcgct

SEQ ID NO: 18962 - RNA, 19 nt, synthetic construct
  source 1..19: mol_type = other RNA
ttcaaagctgtagcgatcg

SEQ ID NO: 18963 - RNA, 19 nt, synthetic construct
  source 1..19: mol_type = other RNA
ccttcaaagctgtagcgat

SEQ ID NO: 18964 - RNA, 19 nt, synthetic construct
  source 1..19: mol_type = other RNA
gaacacgctggtcttccgg

SEQ ID NO: 18965 - RNA, 19 nt, synthetic construct
  source 1..19: mol_type = other RNA
aacccgcagctcgtagtcg

SEQ ID NO: 18966 - RNA, 19 nt, synthetic construct
  source 1..19: mol_type = other RNA
tgtgcccaagctccccgtc

SEQ ID NO: 18967 - RNA, 19 nt, synthetic construct
  source 1..19: mol_type = other RNA
agtgttggcgccaggctcg

SEQ ID NO: 18968 - RNA, 19 nt, synthetic construct
  source 1..19: mol_type = other RNA
caaggggctcattgtcgtc

SEQ ID NO: 18969 - RNA, 19 nt, synthetic construct
  source 1..19: mol_type = other RNA
gtcaaggggctcattgtcg

SEQ ID NO: 18970 - RNA, 19 nt, synthetic construct
  source 1..19: mol_type = other RNA
aggggatgggtgtaacgct

SEQ ID NO: 18971 - RNA, 19 nt, synthetic construct
  source 1..19: mol_type = other RNA
gaggggatgggtgtaacgc

SEQ ID NO: 18972 - RNA, 19 nt, synthetic construct
  source 1..19: mol_type = other RNA
aggggatgggtgtaacgct

SEQ ID NO: 18973 - RNA, 19 nt, synthetic construct
  source 1..19: mol_type = other RNA
gaggggatgggtgtaacgc

SEQ ID NO: 18974 - RNA, 19 nt, synthetic construct
  source 1..19: mol_type = other RNA
gggctggctcgggtccgac

SEQ ID NO: 18975 - RNA, 19 nt, synthetic construct
  source 1..19: mol_type = other RNA
ggcagaggccgtgcagtag

SEQ ID NO: 18976 - RNA, 19 nt, synthetic construct
  source 1..19: mol_type = other RNA
gcgcggcagagctctgcgt

SEQ ID NO: 18977 - RNA, 19 nt, synthetic construct
  source 1..19: mol_type = other RNA
acggttacgaagccgggac

SEQ ID NO: 18978 - RNA, 19 nt, synthetic construct
  source 1..19: mol_type = other RNA
ggtcacggttacgaagccg

SEQ ID NO: 18979 - RNA, 19 nt, synthetic construct
  source 1..19: mol_type = other RNA
tgtgttgcacacgcacacc

SEQ ID NO: 18980 - RNA, 19 nt, synthetic construct
  source 1..19: mol_type = other RNA
agggacacataggcccgca

SEQ ID NO: 18981 - RNA, 19 nt, synthetic construct
  source 1..19: mol_type = other RNA
acgtggccagctggaatcc

SEQ ID NO: 18982 - RNA, 19 nt, synthetic construct
  source 1..19: mol_type = other RNA
cagccggttttcctgaggc

SEQ ID NO: 18983 - RNA, 19 nt, synthetic construct
  source 1..19: mol_type = other RNA
cccccgcgtgggcgcactg

SEQ ID NO: 18984 - RNA, 19 nt, synthetic construct
  source 1..19: mol_type = other RNA
tgcgccgcccggcactcga

SEQ ID NO: 18985 - RNA, 19 nt, synthetic construct
  source 1..19: mol_type = other RNA
catagggtggtcttttcgg

SEQ ID NO: 18986 - RNA, 19 nt, synthetic construct
  source 1..19: mol_type = other RNA
cggcgtagctggacgttga

SEQ ID NO: 18987 - RNA, 19 nt, synthetic construct
  source 1..19: mol_type = other RNA
cccaccacggaccggctac

SEQ ID NO: 18988 - RNA, 19 nt, synthetic construct
  source 1..19: mol_type = other RNA
gtagtcagcactttggtag

SEQ ID NO: 18989 - RNA, 19 nt, synthetic construct
  source 1..19: mol_type = other RNA
ccatagggtggtcttttcg

SEQ ID NO: 18990 - RNA, 19 nt, synthetic construct
  source 1..19: mol_type = other RNA
cccactaggcctcggcgta

SEQ ID NO: 18991 - RNA, 19 nt, synthetic construct
  source 1..19: mol_type = other RNA
ccacgatgaagaagctcga

SEQ ID NO: 18992 - RNA, 19 nt, synthetic construct
  source 1..19: mol_type = other RNA
ctgagtacttggacgctcc

SEQ ID NO: 18993 - RNA, 19 nt, synthetic construct
  source 1..19: mol_type = other RNA
tcgtagtcgtgacagagcg

SEQ ID NO: 18994 - RNA, 19 nt, synthetic construct
  source 1..19: mol_type = other RNA
ggtggaacaaagctcacgc

SEQ ID NO: 18995 - RNA, 19 nt, synthetic construct
  source 1..19: mol_type = other RNA
ttgcaccgacgtcatagta

SEQ ID NO: 18996 - RNA, 19 nt, synthetic construct
  source 1..19: mol_type = other RNA
cagtgcgtggcactccgca

SEQ ID NO: 18997 - RNA, 19 nt, synthetic construct
  source 1..19: mol_type = other RNA
aggttgcaccaaccccgta

SEQ ID NO: 18998 - RNA, 19 nt, synthetic construct
  source 1..19: mol_type = other RNA
gtgccattgtacgaacaca

SEQ ID NO: 18999 - RNA, 19 nt, synthetic construct
  source 1..19: mol_type = other RNA
gagaacccgcagctcgtag

SEQ ID NO: 19000 - RNA, 19 nt, synthetic construct
  source 1..19: mol_type = other RNA
cgccgtcgaccggatgctc

SEQ ID NO: 19001 - RNA, 19 nt, synthetic construct
  source 1..19: mol_type = other RNA
tccccatgtagcgtatctt

SEQ ID NO: 19002 - RNA, 19 nt, synthetic construct
  source 1..19: mol_type = other RNA
cgcagctcgtagtcgtgac

SEQ ID NO: 19003 - RNA, 19 nt, synthetic construct
  source 1..19: mol_type = other RNA
tccagcggccctgatctta

SEQ ID NO: 19004 - RNA, 19 nt, synthetic construct
  source 1..19: mol_type = other RNA
atccacactggaagcgtgc

SEQ ID NO: 19005 - RNA, 19 nt, synthetic construct
  source 1..19: mol_type = other RNA
tgggtgtaaagctggtagc

SEQ ID NO: 19006 - RNA, 19 nt, synthetic construct
  source 1..19: mol_type = other RNA
tgggtgtaaagctggtagc

SEQ ID NO: 19007 - RNA, 19 nt, synthetic construct
  source 1..19: mol_type = other RNA
ggctactcgtaggctgcgg

SEQ ID NO: 19008 - RNA, 19 nt, synthetic construct
  source 1..19: mol_type = other RNA
ccggctacgcgtggcaaag

SEQ ID NO: 19009 - RNA, 19 nt, synthetic construct
  source 1..19: mol_type = other RNA
accggctacgcgtggcaaa

SEQ ID NO: 19010 - RNA, 19 nt, synthetic construct
  source 1..19: mol_type = other RNA
ttgtgggcatagaactcgt

SEQ ID NO: 19011 - RNA, 19 nt, synthetic construct
  source 1..19: mol_type = other RNA
cacagacacaagcacgccg

SEQ ID NO: 19012 - RNA, 19 nt, synthetic construct
  source 1..19: mol_type = other RNA
accagtgccgggcgtagtt

SEQ ID NO: 19013 - RNA, 19 nt, synthetic construct
  source 1..19: mol_type = other RNA
gcatgtacttggtgcagac

SEQ ID NO: 19014 - RNA, 19 nt, synthetic construct
  source 1..19: mol_type = other RNA
gatgcactcgcactcatag

SEQ ID NO: 19015 - RNA, 19 nt, synthetic construct
  source 1..19: mol_type = other RNA
aaccgctgctcaccggaat

SEQ ID NO: 19016 - RNA, 19 nt, synthetic construct
  source 1..19: mol_type = other RNA
tgttctcggtgacgatgcg

SEQ ID NO: 19017 - RNA, 19 nt, synthetic construct
  source 1..19: mol_type = other RNA
ggcttgtaggtggcctcgt

SEQ ID NO: 19018 - RNA, 19 nt, synthetic construct
  source 1..19: mol_type = other RNA
ggcacacgcgtcgttcacg

SEQ ID NO: 19019 - RNA, 19 nt, synthetic construct
  source 1..19: mol_type = other RNA
aggcacacgcgtcgttcac

SEQ ID NO: 19020 - RNA, 19 nt, synthetic construct
  source 1..19: mol_type = other RNA
caggcacacgcgtcgttca

SEQ ID NO: 19021 - RNA, 19 nt, synthetic construct
  source 1..19: mol_type = other RNA
tgtgggcatagaactcgtt

SEQ ID NO: 19022 - RNA, 19 nt, synthetic construct
  source 1..19: mol_type = other RNA
ggcagttctcgttgtccgt

SEQ ID NO: 19023 - RNA, 19 nt, synthetic construct
  source 1..19: mol_type = other RNA
ggccacaggtctggttggc

SEQ ID NO: 19024 - RNA, 19 nt, synthetic construct
  source 1..19: mol_type = other RNA
ggcaccgtctcctcgtgga

SEQ ID NO: 19025 - RNA, 19 nt, synthetic construct
  source 1..19: mol_type = other RNA
gaccggctacgcgtggcaa

SEQ ID NO: 19026 - RNA, 19 nt, synthetic construct
  source 1..19: mol_type = other RNA
ctgatcttatcgtaggact

SEQ ID NO: 19027 - RNA, 19 nt, synthetic construct
  source 1..19: mol_type = other RNA
acgatgcggaaggtcccgt

SEQ ID NO: 19028 - RNA, 19 nt, synthetic construct
  source 1..19: mol_type = other RNA
tgaaaccgctgctcaccgg

SEQ ID NO: 19029 - RNA, 19 nt, synthetic construct
  source 1..19: mol_type = other RNA
gtccactcacacttcggtt

SEQ ID NO: 19030 - RNA, 19 nt, synthetic construct
  source 1..19: mol_type = other RNA
ggatgttctcggtgacgat

SEQ ID NO: 19031 - RNA, 19 nt, synthetic construct
  source 1..19: mol_type = other RNA
gctcaccggaatttggtca

SEQ ID NO: 19032 - RNA, 19 nt, synthetic construct
  source 1..19: mol_type = other RNA
cacaggtctggttggcgta

SEQ ID NO: 19033 - RNA, 19 nt, synthetic construct
  source 1..19: mol_type = other RNA
gcagatgcactcgcactca

SEQ ID NO: 19034 - RNA, 19 nt, synthetic construct
  source 1..19: mol_type = other RNA
ccaggctgcattccacgac

SEQ ID NO: 19035 - RNA, 19 nt, synthetic construct
  source 1..19: mol_type = other RNA
ccaggctgcattccacgac

SEQ ID NO: 19036 - RNA, 19 nt, synthetic construct
  source 1..19: mol_type = other RNA
ccaggctgcattccacgac

SEQ ID NO: 19037 - RNA, 19 nt, synthetic construct
  source 1..19: mol_type = other RNA
ccaggctgcattccacgac

SEQ ID NO: 19038 - RNA, 19 nt, synthetic construct
  source 1..19: mol_type = other RNA
cagccgtgcagaaacactc

SEQ ID NO: 19039 - RNA, 19 nt, synthetic construct
  source 1..19: mol_type = other RNA
cgttgtgggcatagaactc

SEQ ID NO: 19040 - RNA, 19 nt, synthetic construct
  source 1..19: mol_type = other RNA
ccccaccacggaccggcta

SEQ ID NO: 19041 - RNA, 19 nt, synthetic construct
  source 1..19: mol_type = other RNA
tcccaaactccagtgcgtc

SEQ ID NO: 19042 - RNA, 19 nt, synthetic construct
  source 1..19: mol_type = other RNA
cttccgcagatggcgatca

SEQ ID NO: 19043 - RNA, 19 nt, synthetic construct
  source 1..19: mol_type = other RNA
cgcggcagagctctgcgta

SEQ ID NO: 19044 - RNA, 19 nt, synthetic construct
  source 1..19: mol_type = other RNA
gcctcggcgtagctggacg

SEQ ID NO: 19045 - RNA, 19 nt, synthetic construct
  source 1..19: mol_type = other RNA
tgcttccgcagatggcgat

SEQ ID NO: 19046 - RNA, 19 nt, synthetic construct
  source 1..19: mol_type = other RNA
cctgcacaccaggccgaag

SEQ ID NO: 19047 - RNA, 19 nt, synthetic construct
  source 1..19: mol_type = other RNA
ccatcacggtggctatagt

SEQ ID NO: 19048 - RNA, 19 nt, synthetic construct
  source 1..19: mol_type = other RNA
gcagccggctcggtcggtc

SEQ ID NO: 19049 - RNA, 19 nt, synthetic construct
  source 1..19: mol_type = other RNA
ccgcagctcgtagtcgtga

SEQ ID NO: 19050 - RNA, 19 nt, synthetic construct
  source 1..19: mol_type = other RNA
gccatcccgtgggtctcga

SEQ ID NO: 19051 - RNA, 19 nt, synthetic construct
  source 1..19: mol_type = other RNA
ctgggtgggcacttcgggt

SEQ ID NO: 19052 - RNA, 19 nt, synthetic construct
  source 1..19: mol_type = other RNA
gcttagcttcccacccgta

SEQ ID NO: 19053 - RNA, 19 nt, synthetic construct
  source 1..19: mol_type = other RNA
ggtggccgtggcggtaagc

SEQ ID NO: 19054 - RNA, 19 nt, synthetic construct
  source 1..19: mol_type = other RNA
ggtggccgtggcggtaagc

SEQ ID NO: 19055 - RNA, 19 nt, synthetic construct
  source 1..19: mol_type = other RNA
cgacactgaaccctcgtca

SEQ ID NO: 19056 - RNA, 19 nt, synthetic construct
  source 1..19: mol_type = other RNA
ccgtggatccagtggttgc

SEQ ID NO: 19057 - RNA, 19 nt, synthetic construct
  source 1..19: mol_type = other RNA
ggtcagcactgtggcggtg

SEQ ID NO: 19058 - RNA, 19 nt, synthetic construct
  source 1..19: mol_type = other RNA
ggggacagggatcgcccgt

SEQ ID NO: 19059 - RNA, 19 nt, synthetic construct
  source 1..19: mol_type = other RNA
ggtcagcactgtggcggtg

SEQ ID NO: 19060 - RNA, 19 nt, synthetic construct
  source 1..19: mol_type = other RNA
ggggacagggatcgcccgt

SEQ ID NO: 19061 - RNA, 19 nt, synthetic construct
  source 1..19: mol_type = other RNA
tcgcaggcacacgcgtcgt

SEQ ID NO: 19062 - RNA, 19 nt, synthetic construct
  source 1..19: mol_type = other RNA
tgttctcagggtggaggtc

SEQ ID NO: 19063 - RNA, 19 nt, synthetic construct
  source 1..19: mol_type = other RNA
ttgggatcggtcaggcgcg

SEQ ID NO: 19064 - RNA, 19 nt, synthetic construct
  source 1..19: mol_type = other RNA
aacacgctggtcttccggt

SEQ ID NO: 19065 - RNA, 19 nt, synthetic construct
  source 1..19: mol_type = other RNA
cgagtcgcaggcacacgcg

SEQ ID NO: 19066 - RNA, 19 nt, synthetic construct
  source 1..19: mol_type = other RNA
cacatcagcccccgcatgc

SEQ ID NO: 19067 - RNA, 19 nt, synthetic construct
  source 1..19: mol_type = other RNA
gcacagacacaagcacgcc

SEQ ID NO: 19068 - RNA, 19 nt, synthetic construct
  source 1..19: mol_type = other RNA
ggccattgaaggtgacgct

SEQ ID NO: 19069 - RNA, 19 nt, synthetic construct
  source 1..19: mol_type = other RNA
tgcacacgcacaccgtctc

SEQ ID NO: 19070 - RNA, 19 nt, synthetic construct
  source 1..19: mol_type = other RNA
cgagtgctgggtggtaccg

SEQ ID NO: 19071 - RNA, 19 nt, synthetic construct
  source 1..19: mol_type = other RNA
cgagtgctgggtggtaccg

SEQ ID NO: 19072 - RNA, 19 nt, synthetic construct
  source 1..19: mol_type = other RNA
cgagtgctgggtggtaccg

SEQ ID NO: 19073 - RNA, 19 nt, synthetic construct
  source 1..19: mol_type = other RNA
caccgacactgaaccctcg

SEQ ID NO: 19074 - RNA, 19 nt, synthetic construct
  source 1..19: mol_type = other RNA
catcacggtggctatagtg

SEQ ID NO: 19075 - RNA, 19 nt, synthetic construct
  source 1..19: mol_type = other RNA
cttggccattgaaggtgac

SEQ ID NO: 19076 - RNA, 19 nt, synthetic construct
  source 1..19: mol_type = other RNA
atgcccatgtgtgcgttga

SEQ ID NO: 19077 - RNA, 19 nt, synthetic construct
  source 1..19: mol_type = other RNA
cccaccgctccccgggaaa

SEQ ID NO: 19078 - RNA, 19 nt, synthetic construct
  source 1..19: mol_type = other RNA
cacccgcccattgtgcgcc

SEQ ID NO: 19079 - RNA, 19 nt, synthetic construct
  source 1..19: mol_type = other RNA
cacacggcgccctcgtcgt

SEQ ID NO: 19080 - RNA, 19 nt, synthetic construct
  source 1..19: mol_type = other RNA
tgccttcaaagctgtagcg

SEQ ID NO: 19081 - RNA, 19 nt, synthetic construct
  source 1..19: mol_type = other RNA
gaaggcactgttgggatcg

SEQ ID NO: 19082 - RNA, 19 nt, synthetic construct
  source 1..19: mol_type = other RNA
cggccatcccgtgggtctc

SEQ ID NO: 19083 - RNA, 19 nt, synthetic construct
  source 1..19: mol_type = other RNA
ggccgtggcagggacacat

SEQ ID NO: 19084 - RNA, 19 nt, synthetic construct
  source 1..19: mol_type = other RNA
ctgatccacactggaggcg

SEQ ID NO: 19085 - RNA, 19 nt, synthetic construct
  source 1..19: mol_type = other RNA
ctgatccacactggaggcg

SEQ ID NO: 19086 - RNA, 19 nt, synthetic construct
  source 1..19: mol_type = other RNA
ctgatccacactggaggcg

SEQ ID NO: 19087 - RNA, 19 nt, synthetic construct
  source 1..19: mol_type = other RNA
ctgatccacactggaggcg

SEQ ID NO: 19088 - RNA, 19 nt, synthetic construct
  source 1..19: mol_type = other RNA
tggcggggttgtggcacgt

SEQ ID NO: 19089 - RNA, 19 nt, synthetic construct
  source 1..19: mol_type = other RNA
ccttgatgtagtccccgct

SEQ ID NO: 19090 - RNA, 19 nt, synthetic construct
  source 1..19: mol_type = other RNA
agaaggtgccattgtacga

SEQ ID NO: 19091 - RNA, 19 nt, synthetic construct
  source 1..19: mol_type = other RNA
cgcaggcacacgcgtcgtt

SEQ ID NO: 19092 - RNA, 19 nt, synthetic construct
  source 1..19: mol_type = other RNA
tgctgcacacccgcccatt

SEQ ID NO: 19093 - RNA, 19 nt, synthetic construct
  source 1..19: mol_type = other RNA
tggtgacagtgaggacgat

SEQ ID NO: 19094 - RNA, 19 nt, synthetic construct
  source 1..19: mol_type = other RNA
tctctccaggcttgtaggt

SEQ ID NO: 19095 - RNA, 19 nt, synthetic construct
  source 1..19: mol_type = other RNA
ggggacccttgcaccgacg

SEQ ID NO: 19096 - RNA, 19 nt, synthetic construct
  source 1..19: mol_type = other RNA
cggcatgtcgggaagctgc

SEQ ID NO: 19097 - RNA, 19 nt, synthetic construct
  source 1..19: mol_type = other RNA
tcctccagcggcatgtcgg

SEQ ID NO: 19098 - RNA, 19 nt, synthetic construct
  source 1..19: mol_type = other RNA
catgctgcagatgcactcg

SEQ ID NO: 19099 - RNA, 19 nt, synthetic construct
  source 1..19: mol_type = other RNA
ctctgacctggccgttgcg

SEQ ID NO: 19100 - RNA, 19 nt, synthetic construct
  source 1..19: mol_type = other RNA
tccaccacgtaggcgtagc

SEQ ID NO: 19101 - RNA, 19 nt, synthetic construct
  source 1..19: mol_type = other RNA
ccctcctcgtccgtgcagt

SEQ ID NO: 19102 - RNA, 19 nt, synthetic construct
  source 1..19: mol_type = other RNA
atccaccacgtaggcgtag

SEQ ID NO: 19103 - RNA, 19 nt, synthetic construct
  source 1..19: mol_type = other RNA
ggccatcccgtgggtctcg

SEQ ID NO: 19104 - RNA, 19 nt, synthetic construct
  source 1..19: mol_type = other RNA
ctggacgttgaagtcctcg

SEQ ID NO: 19105 - RNA, 19 nt, synthetic construct
  source 1..19: mol_type = other RNA
tgtcgtcgaagttcccgca

SEQ ID NO: 19106 - RNA, 19 nt, synthetic construct
  source 1..19: mol_type = other RNA
gctcctccagcggcatgtc

SEQ ID NO: 19107 - RNA, 19 nt, synthetic construct
  source 1..19: mol_type = other RNA
tccacaaaggtggcacacg

SEQ ID NO: 19108 - RNA, 19 nt, synthetic construct
  source 1..19: mol_type = other RNA
ctgccttcaaagctgtagc

SEQ ID NO: 19109 - RNA, 19 nt, synthetic construct
  source 1..19: mol_type = other RNA
tcagccccgggctactcgt

SEQ ID NO: 19110 - RNA, 19 nt, synthetic construct
  source 1..19: mol_type = other RNA
ttctcagggtggaggtcgg

SEQ ID NO: 19111 - RNA, 19 nt, synthetic construct
  source 1..19: mol_type = other RNA
agatgcccgaggtggccga

SEQ ID NO: 19112 - RNA, 19 nt, synthetic construct
  source 1..19: mol_type = other RNA
agatgcccgaggtggccga

SEQ ID NO: 19113 - RNA, 19 nt, synthetic construct
  source 1..19: mol_type = other RNA
tggtgccacaggatggtcg

SEQ ID NO: 19114 - RNA, 19 nt, synthetic construct
  source 1..19: mol_type = other RNA
ctctgttggctgttggcgc

SEQ ID NO: 19115 - RNA, 19 nt, synthetic construct
  source 1..19: mol_type = other RNA
tgtggacagtctctggagt

SEQ ID NO: 19116 - RNA, 19 nt, synthetic construct
  source 1..19: mol_type = other RNA
gtctcattcacctgccgga

SEQ ID NO: 19117 - RNA, 19 nt, synthetic construct
  source 1..19: mol_type = other RNA
tgcagcagaacacacggat

SEQ ID NO: 19118 - RNA, 19 nt, synthetic construct
  source 1..19: mol_type = other RNA
tgcagcagaacacacggat

SEQ ID NO: 19119 - RNA, 19 nt, synthetic construct
  source 1..19: mol_type = other RNA
tgcagcagaacacacggat

SEQ ID NO: 19120 - RNA, 19 nt, synthetic construct
  source 1..19: mol_type = other RNA
tgcagcagaacacacggat

SEQ ID NO: 19121 - RNA, 19 nt, synthetic construct
  source 1..19: mol_type = other RNA
agtggccatccccgtaggc

SEQ ID NO: 19122 - RNA, 19 nt, synthetic construct
  source 1..19: mol_type = other RNA
cgtcgttcacgcaggcctc

SEQ ID NO: 19123 - RNA, 19 nt, synthetic construct
  source 1..19: mol_type = other RNA
ccccgcagggctggtagtg

SEQ ID NO: 19124 - RNA, 19 nt, synthetic construct
  source 1..19: mol_type = other RNA
gtggtggccgtggtggtaa

SEQ ID NO: 19125 - RNA, 19 nt, synthetic construct
  source 1..19: mol_type = other RNA
gtggtggccgtggtggtaa

SEQ ID NO: 19126 - RNA, 19 nt, synthetic construct
  source 1..19: mol_type = other RNA
agaggggatgggtgtaacg

SEQ ID NO: 19127 - RNA, 19 nt, synthetic construct
  source 1..19: mol_type = other RNA
ggaggggatgggtgtaacg

SEQ ID NO: 19128 - RNA, 19 nt, synthetic construct
  source 1..19: mol_type = other RNA
aggaagatccccatgtagc

SEQ ID NO: 19129 - RNA, 19 nt, synthetic construct
  source 1..19: mol_type = other RNA
gtgctgattgcacactgcg

SEQ ID NO: 19130 - RNA, 19 nt, synthetic construct
  source 1..19: mol_type = other RNA
aagacgtcgccgtcgaagg

SEQ ID NO: 19131 - RNA, 19 nt, synthetic construct
  source 1..19: mol_type = other RNA
aagcggaagacgtcgccgt

SEQ ID NO: 19132 - RNA, 19 nt, synthetic construct
  source 1..19: mol_type = other RNA
gtcaaacatgcagttcgag

SEQ ID NO: 19133 - RNA, 19 nt, synthetic construct
  source 1..19: mol_type = other RNA
ggtgtcaaacatgcagttc

SEQ ID NO: 19134 - RNA, 19 nt, synthetic construct
  source 1..19: mol_type = other RNA
gcctcacagaggtacacgg

SEQ ID NO: 19135 - RNA, 19 nt, synthetic construct
  source 1..19: mol_type = other RNA
cgtcgccgtcgaaggtctt

SEQ ID NO: 19136 - RNA, 19 nt, synthetic construct
  source 1..19: mol_type = other RNA
gggacggttgcacggcggg

SEQ ID NO: 19137 - RNA, 19 nt, synthetic construct
  source 1..19: mol_type = other RNA
cagtcaccatgcaggtcgt

SEQ ID NO: 19138 - RNA, 19 nt, synthetic construct
  source 1..19: mol_type = other RNA
catgtagcgtatcttgtag

SEQ ID NO: 19139 - RNA, 19 nt, synthetic construct
  source 1..19: mol_type = other RNA
gatggctgagccgttagga

SEQ ID NO: 19140 - RNA, 19 nt, synthetic construct
  source 1..19: mol_type = other RNA
gaaggtgccattgtacgaa

SEQ ID NO: 19141 - RNA, 19 nt, synthetic construct
  source 1..19: mol_type = other RNA
ctcacagaggtacacggtg

SEQ ID NO: 19142 - RNA, 19 nt, synthetic construct
  source 1..19: mol_type = other RNA
gaagcggaagacgtcgccg

SEQ ID NO: 19143 - RNA, 19 nt, synthetic construct
  source 1..19: mol_type = other RNA
tgtggtggccgtggcggta

SEQ ID NO: 19144 - RNA, 19 nt, synthetic construct
  source 1..19: mol_type = other RNA
tgtggtggccgtggcggta

SEQ ID NO: 19145 - RNA, 19 nt, synthetic construct
  source 1..19: mol_type = other RNA
gccacagggcacgtattcg

SEQ ID NO: 19146 - RNA, 19 nt, synthetic construct
  source 1..19: mol_type = other RNA
agaaggcactgttgggatc

SEQ ID NO: 19147 - RNA, 19 nt, synthetic construct
  source 1..19: mol_type = other RNA
acgtcatagtagtttccgt

SEQ ID NO: 19148 - RNA, 19 nt, synthetic construct
  source 1..19: mol_type = other RNA
ccctccggccgcacggatg

SEQ ID NO: 19149 - RNA, 19 nt, synthetic construct
  source 1..19: mol_type = other RNA
ccctccggccgcacggatg

SEQ ID NO: 19150 - RNA, 19 nt, synthetic construct
  source 1..19: mol_type = other RNA
ccctccggccgcacggatg

SEQ ID NO: 19151 - RNA, 19 nt, synthetic construct
  source 1..19: mol_type = other RNA
ccctccggccgcacggatg

SEQ ID NO: 19152 - RNA, 19 nt, synthetic construct
  source 1..19: mol_type = other RNA
ggtgccattgtacgaacac

SEQ ID NO: 19153 - RNA, 19 nt, synthetic construct
  source 1..19: mol_type = other RNA
tcctgacattgcaccgttg

SEQ ID NO: 19154 - RNA, 19 nt, synthetic construct
  source 1..19: mol_type = other RNA
caggatggctgagccgtta

SEQ ID NO: 19155 - RNA, 19 nt, synthetic construct
  source 1..19: mol_type = other RNA
tgggtgtaacgctggtagc

SEQ ID NO: 19156 - RNA, 19 nt, synthetic construct
  source 1..19: mol_type = other RNA
gtggttattggggccgatg

SEQ ID NO: 19157 - RNA, 19 nt, synthetic construct
  source 1..19: mol_type = other RNA
tgggtgtaacgctggtagc

SEQ ID NO: 19158 - RNA, 19 nt, synthetic construct
  source 1..19: mol_type = other RNA
cagctcgctcgtgagtgtt

SEQ ID NO: 19159 - RNA, 19 nt, synthetic construct
  source 1..19: mol_type = other RNA
tggacgttgaagtcctcgt

SEQ ID NO: 19160 - RNA, 19 nt, synthetic construct
  source 1..19: mol_type = other RNA
gctcggtcggtcttattgt

SEQ ID NO: 19161 - RNA, 19 nt, synthetic construct
  source 1..19: mol_type = other RNA
ggcaccgccatccatggtg

SEQ ID NO: 19162 - RNA, 19 nt, synthetic construct
  source 1..19: mol_type = other RNA
tggccgtgatcgtagtggc

SEQ ID NO: 19163 - RNA, 19 nt, synthetic construct
  source 1..19: mol_type = other RNA
tggccgtgatcgtagtggc

SEQ ID NO: 19164 - RNA, 19 nt, synthetic construct
  source 1..19: mol_type = other RNA
tggccgtgatcgtagtggc

SEQ ID NO: 19165 - RNA, 19 nt, synthetic construct
  source 1..19: mol_type = other RNA
tggccgtgatcgtagtggc

SEQ ID NO: 19166 - RNA, 19 nt, synthetic construct
  source 1..19: mol_type = other RNA
gaacccgcagctcgtagtc

SEQ ID NO: 19167 - RNA, 19 nt, synthetic construct
  source 1..19: mol_type = other RNA
caccacgtaggcgtagcgc

SEQ ID NO: 19168 - RNA, 19 nt, synthetic construct
  source 1..19: mol_type = other RNA
aggtgagggccgccgtcga

SEQ ID NO: 19169 - RNA, 19 nt, synthetic construct
  source 1..19: mol_type = other RNA
cagccccgggctactcgta

SEQ ID NO: 19170 - RNA, 19 nt, synthetic construct
  source 1..19: mol_type = other RNA
ctggaagcgtgcgtgccgt

SEQ ID NO: 19171 - RNA, 19 nt, synthetic construct
  source 1..19: mol_type = other RNA
tgggatcggtcaggcgcga

SEQ ID NO: 19172 - RNA, 19 nt, synthetic construct
  source 1..19: mol_type = other RNA
ccaccacgtaggcgtagcg

SEQ ID NO: 19173 - RNA, 19 nt, synthetic construct
  source 1..19: mol_type = other RNA
cagtcgccacccgagtcgc

SEQ ID NO: 19174 - RNA, 19 nt, synthetic construct
  source 1..19: mol_type = other RNA
tgggtgggcacttcgggta

SEQ ID NO: 19175 - RNA, 19 nt, synthetic construct
  source 1..19: mol_type = other RNA
ccgagggggtgaccgtcac

SEQ ID NO: 19176 - RNA, 19 nt, synthetic construct
  source 1..19: mol_type = other RNA
ctcgtgagtgttggcgcca

SEQ ID NO: 19177 - RNA, 19 nt, synthetic construct
  source 1..19: mol_type = other RNA
ggatgggtgtaacgctggt

SEQ ID NO: 19178 - RNA, 19 nt, synthetic construct
  source 1..19: mol_type = other RNA
tggtctgtgataggcgggt

SEQ ID NO: 19179 - RNA, 19 nt, synthetic construct
  source 1..19: mol_type = other RNA
ctggaggcgtgagtgccgt

SEQ ID NO: 19180 - RNA, 19 nt, synthetic construct
  source 1..19: mol_type = other RNA
ccggtggccgtgatcgtag

SEQ ID NO: 19181 - RNA, 19 nt, synthetic construct
  source 1..19: mol_type = other RNA
tggtctgtgataggcgggt

SEQ ID NO: 19182 - RNA, 19 nt, synthetic construct
  source 1..19: mol_type = other RNA
ccggtggccgtgatcgtag

SEQ ID NO: 19183 - RNA, 19 nt, synthetic construct
  source 1..19: mol_type = other RNA
tcagcactggggggatagg

SEQ ID NO: 19184 - RNA, 19 nt, synthetic construct
  source 1..19: mol_type = other RNA
tggtctgtgataggcgggt

SEQ ID NO: 19185 - RNA, 19 nt, synthetic construct
  source 1..19: mol_type = other RNA
ctggaggcgtgagtgccgt

SEQ ID NO: 19186 - RNA, 19 nt, synthetic construct
  source 1..19: mol_type = other RNA
tggtctgtgataggcgggt

SEQ ID NO: 19187 - RNA, 19 nt, synthetic construct
  source 1..19: mol_type = other RNA
ccggtggccgtgatcgtag

SEQ ID NO: 19188 - RNA, 19 nt, synthetic construct
  source 1..19: mol_type = other RNA
tcagcactggggggatagg

SEQ ID NO: 19189 - RNA, 19 nt, synthetic construct
  source 1..19: mol_type = other RNA
ggatgggtgtaacgctggt

SEQ ID NO: 19190 - RNA, 19 nt, synthetic construct
  source 1..19: mol_type = other RNA
tggtctgtgataggcgggt

SEQ ID NO: 19191 - RNA, 19 nt, synthetic construct
  source 1..19: mol_type = other RNA
ctggaggcgtgagtgccgt

SEQ ID NO: 19192 - RNA, 19 nt, synthetic construct
  source 1..19: mol_type = other RNA
ccggtggccgtgatcgtag

SEQ ID NO: 19193 - RNA, 19 nt, synthetic construct
  source 1..19: mol_type = other RNA
tgtgctgggacggtccacg

SEQ ID NO: 19194 - RNA, 19 nt, synthetic construct
  source 1..19: mol_type = other RNA
gcggcagagctctgcgtaa

SEQ ID NO: 19195 - RNA, 19 nt, synthetic construct
  source 1..19: mol_type = other RNA
aggccaccggttgcacctc

SEQ ID NO: 19196 - RNA, 19 nt, synthetic construct
  source 1..19: mol_type = other RNA
acacgcacaccgtctcggg

SEQ ID NO: 19197 - RNA, 19 nt, synthetic construct
  source 1..19: mol_type = other RNA
ggaaggttgcaccaacccc

SEQ ID NO: 19198 - RNA, 19 nt, synthetic construct
  source 1..19: mol_type = other RNA
acctcgcggacacacacgg

SEQ ID NO: 19199 - RNA, 19 nt, synthetic construct
  source 1..19: mol_type = other RNA
gcaggatggctgagccgtt

SEQ ID NO: 19200 - RNA, 19 nt, synthetic construct
  source 1..19: mol_type = other RNA
ctggaggcgtgcgtgccgt

SEQ ID NO: 19201 - RNA, 19 nt, synthetic construct
  source 1..19: mol_type = other RNA
agcccgtggttgtggtagt

SEQ ID NO: 19202 - RNA, 19 nt, synthetic construct
  source 1..19: mol_type = other RNA
agcccgtggttgtggtagt

SEQ ID NO: 19203 - RNA, 19 nt, synthetic construct
  source 1..19: mol_type = other RNA
agcccgtggttgtggtagt

SEQ ID NO: 19204 - RNA, 19 nt, synthetic construct
  source 1..19: mol_type = other RNA
agcccgtggttgtggtagt

SEQ ID NO: 19205 - RNA, 19 nt, synthetic construct
  source 1..19: mol_type = other RNA
gcgttgaagaatgggcccg

SEQ ID NO: 19206 - RNA, 19 nt, synthetic construct
  source 1..19: mol_type = other RNA
aaatttaggaaacccatcg

SEQ ID NO: 19207 - RNA, 19 nt, synthetic construct
  source 1..19: mol_type = other RNA
cacggtggctatagtgctc

SEQ ID NO: 19208 - RNA, 19 nt, synthetic construct
  source 1..19: mol_type = other RNA
gtggagcctgcaggcgtcg

SEQ ID NO: 19209 - RNA, 19 nt, synthetic construct
  source 1..19: mol_type = other RNA
cagggtcgaggtgcgggtc

SEQ ID NO: 19210 - RNA, 19 nt, synthetic construct
  source 1..19: mol_type = other RNA
cagggtcgaggtgcgggtc

SEQ ID NO: 19211 - RNA, 19 nt, synthetic construct
  source 1..19: mol_type = other RNA
cagggtcgaggtgcgggtc

SEQ ID NO: 19212 - RNA, 19 nt, synthetic construct
  source 1..19: mol_type = other RNA
cagggtcgaggtgcgggtc

SEQ ID NO: 19213 - RNA, 19 nt, synthetic construct
  source 1..19: mol_type = other RNA
cagcttagcttcccacccg

SEQ ID NO: 19214 - RNA, 19 nt, synthetic construct
  source 1..19: mol_type = other RNA
gtcatagtagtttccgtcc

SEQ ID NO: 19215 - RNA, 19 nt, synthetic construct
  source 1..19: mol_type = other RNA
gcataagtgccctccagcg

SEQ ID NO: 19216 - RNA, 19 nt, synthetic construct
  source 1..19: mol_type = other RNA
ggcataagtgccctccagc

SEQ ID NO: 19217 - RNA, 19 nt, synthetic construct
  source 1..19: mol_type = other RNA
gctgagtacttggacgctc

SEQ ID NO: 19218 - RNA, 19 nt, synthetic construct
  source 1..19: mol_type = other RNA
atgacttccccgggcgaga

SEQ ID NO: 19219 - RNA, 19 nt, synthetic construct
  source 1..19: mol_type = other RNA
gtggacagctcgctcgtga

SEQ ID NO: 19220 - RNA, 19 nt, synthetic construct
  source 1..19: mol_type = other RNA
agcacggtgccgtgagcgt

SEQ ID NO: 19221 - RNA, 19 nt, synthetic construct
  source 1..19: mol_type = other RNA
atggagttgaggaacacgc

SEQ ID NO: 19222 - RNA, 19 nt, synthetic construct
  source 1..19: mol_type = other RNA
ttccacaaaggtggcacac

SEQ ID NO: 19223 - RNA, 19 nt, synthetic construct
  source 1..19: mol_type = other RNA
agccggtggccgtgatcgt

SEQ ID NO: 19224 - RNA, 19 nt, synthetic construct
  source 1..19: mol_type = other RNA
agccggtggccgtgatcgt

SEQ ID NO: 19225 - RNA, 19 nt, synthetic construct
  source 1..19: mol_type = other RNA
agccggtggccgtgatcgt

SEQ ID NO: 19226 - RNA, 19 nt, synthetic construct
  source 1..19: mol_type = other RNA
agccggtggccgtgatcgt

SEQ ID NO: 19227 - RNA, 19 nt, synthetic construct
  source 1..19: mol_type = other RNA
gccattgtacgaacacagc

SEQ ID NO: 19228 - RNA, 19 nt, synthetic construct
  source 1..19: mol_type = other RNA
ccgtccgcttggacccgga

SEQ ID NO: 19229 - RNA, 19 nt, synthetic construct
  source 1..19: mol_type = other RNA
gtcacggttacgaagccgg

SEQ ID NO: 19230 - RNA, 19 nt, synthetic construct
  source 1..19: mol_type = other RNA
ccttgcaccgacgtcatag

SEQ ID NO: 19231 - RNA, 19 nt, synthetic construct
  source 1..19: mol_type = other RNA
gggacccttgcaccgacgt

SEQ ID NO: 19232 - RNA, 19 nt, synthetic construct
  source 1..19: mol_type = other RNA
cctcttggaggatcagctc

SEQ ID NO: 19233 - RNA, 19 nt, synthetic construct
  source 1..19: mol_type = other RNA
ccgtggttattggggccga

SEQ ID NO: 19234 - RNA, 19 nt, synthetic construct
  source 1..19: mol_type = other RNA
gcaggtggcaggctgtatg

SEQ ID NO: 19235 - RNA, 19 nt, synthetic construct
  source 1..19: mol_type = other RNA
ggtgccacaggatggtcgt

SEQ ID NO: 19236 - RNA, 19 nt, synthetic construct
  source 1..19: mol_type = other RNA
atgttgagggggcaggtcc

SEQ ID NO: 19237 - RNA, 19 nt, synthetic construct
  source 1..19: mol_type = other RNA
gtggttatgggggccgatg

SEQ ID NO: 19238 - RNA, 19 nt, synthetic construct
  source 1..19: mol_type = other RNA
tgatccacactggaagcgt

SEQ ID NO: 19239 - RNA, 19 nt, synthetic construct
  source 1..19: mol_type = other RNA
gtggttatgggggccgatg

SEQ ID NO: 19240 - RNA, 19 nt, synthetic construct
  source 1..19: mol_type = other RNA
gtggttatgggggccgatg

SEQ ID NO: 19241 - RNA, 19 nt, synthetic construct
  source 1..19: mol_type = other RNA
tggtcacggttacgaagcc

SEQ ID NO: 19242 - RNA, 19 nt, synthetic construct
  source 1..19: mol_type = other RNA
cacataggcccgcacatgc

SEQ ID NO: 19243 - RNA, 19 nt, synthetic construct
  source 1..19: mol_type = other RNA
tcgtaggctgcggcgttga

SEQ ID NO: 19244 - RNA, 19 nt, synthetic construct
  source 1..19: mol_type = other RNA
gcacggtgccgtgagcgta

SEQ ID NO: 19245 - RNA, 19 nt, synthetic construct
  source 1..19: mol_type = other RNA
gtggcggggttgtggcacg

SEQ ID NO: 19246 - RNA, 19 nt, synthetic construct
  source 1..19: mol_type = other RNA
gcgttgtgggcatagaact

SEQ ID NO: 19247 - RNA, 19 nt, synthetic construct
  source 1..19: mol_type = other RNA
ctctcgccaccgccttaaa

SEQ ID NO: 19248 - RNA, 19 nt, synthetic construct
  source 1..19: mol_type = other RNA
gctcgtagtcgtgacagag

SEQ ID NO: 19249 - RNA, 19 nt, synthetic construct
  source 1..19: mol_type = other RNA
acacggttgtcacccacgc

SEQ ID NO: 19250 - RNA, 19 nt, synthetic construct
  source 1..19: mol_type = other RNA
gtggccgtgatcgtagtgg

SEQ ID NO: 19251 - RNA, 19 nt, synthetic construct
  source 1..19: mol_type = other RNA
gtggccgtgatcgtagtgg

SEQ ID NO: 19252 - RNA, 19 nt, synthetic construct
  source 1..19: mol_type = other RNA
gtggccgtgatcgtagtgg

SEQ ID NO: 19253 - RNA, 19 nt, synthetic construct
  source 1..19: mol_type = other RNA
gtggccgtgatcgtagtgg

SEQ ID NO: 19254 - RNA, 19 nt, synthetic construct
  source 1..19: mol_type = other RNA
ccgacactgaaccctcgtc

SEQ ID NO: 19255 - RNA, 19 nt, synthetic construct
  source 1..19: mol_type = other RNA
gttgatgcggacttgacag

SEQ ID NO: 19256 - RNA, 19 nt, synthetic construct
  source 1..19: mol_type = other RNA
ctgtcggcacatttcttgg

SEQ ID NO: 19257 - RNA, 19 nt, synthetic construct
  source 1..19: mol_type = other RNA
aggccgaagtggacgtcac

SEQ ID NO: 19258 - RNA, 19 nt, synthetic construct
  source 1..19: mol_type = other RNA
cacggttgtcacccacgca

SEQ ID NO: 19259 - RNA, 19 nt, synthetic construct
  source 1..19: mol_type = other RNA
cactaggcctcggcgtagc

SEQ ID NO: 19260 - RNA, 19 nt, synthetic construct
  source 1..19: mol_type = other RNA
gcaccgacgtcatagtagt

SEQ ID NO: 19261 - RNA, 19 nt, synthetic construct
  source 1..19: mol_type = other RNA
aggacgacacggttgtcac

SEQ ID NO: 19262 - RNA, 19 nt, synthetic construct
  source 1..19: mol_type = other RNA
ggacggttgcacggcgggg

SEQ ID NO: 19263 - RNA, 19 nt, synthetic construct
  source 1..19: mol_type = other RNA
agcttagcttcccacccgt

SEQ ID NO: 19264 - RNA, 19 nt, synthetic construct
  source 1..19: mol_type = other RNA
tttccgtccttgtcgtagc

SEQ ID NO: 19265 - RNA, 19 nt, synthetic construct
  source 1..19: mol_type = other RNA
agtcggcactttggtagtg

SEQ ID NO: 19266 - RNA, 19 nt, synthetic construct
  source 1..19: mol_type = other RNA
agtcggcactttggtagtg

SEQ ID NO: 19267 - RNA, 19 nt, synthetic construct
  source 1..19: mol_type = other RNA
agtcggcactttggtagtg

SEQ ID NO: 19268 - RNA, 19 nt, synthetic construct
  source 1..19: mol_type = other RNA
gctcgctcgtgagtgttgg

SEQ ID NO: 19269 - RNA, 19 nt, synthetic construct
  source 1..19: mol_type = other RNA
gtcgcacaggccaccggtt

SEQ ID NO: 19270 - RNA, 19 nt, synthetic construct
  source 1..19: mol_type = other RNA
ccgtcgaccggatgctcgg

SEQ ID NO: 19271 - RNA, 19 nt, synthetic construct
  source 1..19: mol_type = other RNA
gtagcgatcgccatcaaag

SEQ ID NO: 19272 - RNA, 19 nt, synthetic construct
  source 1..19: mol_type = other RNA
cgtcgaccggatgctcggg

SEQ ID NO: 19273 - RNA, 19 nt, synthetic construct
  source 1..19: mol_type = other RNA
gtagtcgtgacagagcggg

SEQ ID NO: 19274 - RNA, 19 nt, synthetic construct
  source 1..19: mol_type = other RNA
gcggacttgacaggagtcc

SEQ ID NO: 19275 - RNA, 19 nt, synthetic construct
  source 1..19: mol_type = other RNA
ccgttaggacagtgcaagg

SEQ ID NO: 19276 - RNA, 19 nt, synthetic construct
  source 1..19: mol_type = other RNA
cttcggttgacagcgggtc

SEQ ID NO: 19277 - RNA, 19 nt, synthetic construct
  source 1..19: mol_type = other RNA
gcagttgccggccggcaag

SEQ ID NO: 19278 - RNA, 19 nt, synthetic construct
  source 1..19: mol_type = other RNA
accaaccccgtagaaggtg

SEQ ID NO: 19279 - RNA, 19 nt, synthetic construct
  source 1..19: mol_type = other RNA
tggtcgtgttgatgcggac

SEQ ID NO: 19280 - RNA, 19 nt, synthetic construct
  source 1..19: mol_type = other RNA
cgtccgcttggacccggat

SEQ ID NO: 19281 - RNA, 19 nt, synthetic construct
  source 1..19: mol_type = other RNA
gcagtcgaccctgatggtc

SEQ ID NO: 19282 - RNA, 19 nt, synthetic construct
  source 1..19: mol_type = other RNA
tgtagcgatcgccatcaaa

SEQ ID NO: 19283 - RNA, 19 nt, synthetic construct
  source 1..19: mol_type = other RNA
tagtcgtgacagagcgggg

SEQ ID NO: 19284 - RNA, 19 nt, synthetic construct
  source 1..19: mol_type = other RNA
cgtagtcgtgacagagcgg

SEQ ID NO: 19285 - RNA, 19 nt, synthetic construct
  source 1..19: mol_type = other RNA
cacttcggttgacagcggg

SEQ ID NO: 19286 - RNA, 19 nt, synthetic construct
  source 1..19: mol_type = other RNA
gggtgtaacgctggtagct

SEQ ID NO: 19287 - RNA, 19 nt, synthetic construct
  source 1..19: mol_type = other RNA
gggtgtaacgctggtagct

SEQ ID NO: 19288 - RNA, 19 nt, synthetic construct
  source 1..19: mol_type = other RNA
cccgggcgagaaaaactgt

SEQ ID NO: 19289 - RNA, 19 nt, synthetic construct
  source 1..19: mol_type = other RNA
ttacgaagccgggacggtt

SEQ ID NO: 19290 - RNA, 19 nt, synthetic construct
  source 1..19: mol_type = other RNA
ggttacgaagccgggacgg

SEQ ID NO: 19291 - RNA, 19 nt, synthetic construct
  source 1..19: mol_type = other RNA
gcctggtcacggttacgaa

SEQ ID NO: 19292 - RNA, 19 nt, synthetic construct
  source 1..19: mol_type = other RNA
ttgtacgaacacagctgag

SEQ ID NO: 19293 - RNA, 19 nt, synthetic construct
  source 1..19: mol_type = other RNA
ttgatgcggacttgacagg

SEQ ID NO: 19294 - RNA, 19 nt, synthetic construct
  source 1..19: mol_type = other RNA
ctggccgttgcgacctcag

SEQ ID NO: 19295 - RNA, 19 nt, synthetic construct
  source 1..19: mol_type = other RNA
ccgctccccgggaaattta

SEQ ID NO: 19296 - RNA, 19 nt, synthetic construct
  source 1..19: mol_type = other RNA
ttccgtccttgtcgtagca

SEQ ID NO: 19297 - RNA, 19 nt, synthetic construct
  source 1..19: mol_type = other RNA
gctccccgggaaatttagg

SEQ ID NO: 19298 - RNA, 19 nt, synthetic construct
  source 1..19: mol_type = other RNA
taccggtggttgctgctag

SEQ ID NO: 19299 - RNA, 19 nt, synthetic construct
  source 1..19: mol_type = other RNA
ccactaggcctcggcgtag

SEQ ID NO: 19300 - RNA, 19 nt, synthetic construct
  source 1..19: mol_type = other RNA
gttgcggtcgtagtggctg

SEQ ID NO: 19301 - RNA, 19 nt, synthetic construct
  source 1..19: mol_type = other RNA
gaatagtgggagccgcccc

SEQ ID NO: 19302 - RNA, 19 nt, synthetic construct
  source 1..19: mol_type = other RNA
ccgggaaatttaggaaacc

SEQ ID NO: 19303 - RNA, 19 nt, synthetic construct
  source 1..19: mol_type = other RNA
tcggtcggtcttattgtag

SEQ ID NO: 19304 - RNA, 19 nt, synthetic construct
  source 1..19: mol_type = other RNA
ccgtgatcgtagtggccgt

SEQ ID NO: 19305 - RNA, 19 nt, synthetic construct
  source 1..19: mol_type = other RNA
ccgtgatcgtagtggccgt

SEQ ID NO: 19306 - RNA, 19 nt, synthetic construct
  source 1..19: mol_type = other RNA
ccgtgatcgtagtggccgt

SEQ ID NO: 19307 - RNA, 19 nt, synthetic construct
  source 1..19: mol_type = other RNA
ccgtgatcgtagtggccgt

SEQ ID NO: 19308 - RNA, 19 nt, synthetic construct
  source 1..19: mol_type = other RNA
ctccggccgcacggatgtt

SEQ ID NO: 19309 - RNA, 19 nt, synthetic construct
  source 1..19: mol_type = other RNA
ctccggccgcacggatgtt

SEQ ID NO: 19310 - RNA, 19 nt, synthetic construct
  source 1..19: mol_type = other RNA
ctccggccgcacggatgtt

SEQ ID NO: 19311 - RNA, 19 nt, synthetic construct
  source 1..19: mol_type = other RNA
ctccggccgcacggatgtt

SEQ ID NO: 19312 - RNA, 19 nt, synthetic construct
  source 1..19: mol_type = other RNA
ggacggagccgttggacgc

SEQ ID NO: 19313 - RNA, 19 nt, synthetic construct
  source 1..19: mol_type = other RNA
ggcgatcaagcaggcgcca

SEQ ID NO: 19314 - RNA, 19 nt, synthetic construct
  source 1..19: mol_type = other RNA
acgacacggttgtcaccca

SEQ ID NO: 19315 - RNA, 19 nt, synthetic construct
  source 1..19: mol_type = other RNA
tgctagacaccggggctgc

SEQ ID NO: 19316 - RNA, 19 nt, synthetic construct
  source 1..19: mol_type = other RNA
cccgcacatgcttagtttg

SEQ ID NO: 19317 - RNA, 19 nt, synthetic construct
  source 1..19: mol_type = other RNA
cggctcggtcggtcttatt

SEQ ID NO: 19318 - RNA, 19 nt, synthetic construct
  source 1..19: mol_type = other RNA
cacacgcacaccgtctcgg

SEQ ID NO: 19319 - RNA, 19 nt, synthetic construct
  source 1..19: mol_type = other RNA
cagcgtccggcacgcgctc

SEQ ID NO: 19320 - RNA, 19 nt, synthetic construct
  source 1..19: mol_type = other RNA
ccccatgtagcgtatcttg

SEQ ID NO: 19321 - RNA, 19 nt, synthetic construct
  source 1..19: mol_type = other RNA
ggcgtagcgctgggacttg

SEQ ID NO: 19322 - RNA, 19 nt, synthetic construct
  source 1..19: mol_type = other RNA
gtcgtgacagagcggggga

SEQ ID NO: 19323 - RNA, 19 nt, synthetic construct
  source 1..19: mol_type = other RNA
gtggtagttggcactttgg

SEQ ID NO: 19324 - RNA, 19 nt, synthetic construct
  source 1..19: mol_type = other RNA
gatcgcccgtgtgtggtgg

SEQ ID NO: 19325 - RNA, 19 nt, synthetic construct
  source 1..19: mol_type = other RNA
caccaccgtggttatgggg

SEQ ID NO: 19326 - RNA, 19 nt, synthetic construct
  source 1..19: mol_type = other RNA
ggccgcacggatgttggag

SEQ ID NO: 19327 - RNA, 19 nt, synthetic construct
  source 1..19: mol_type = other RNA
gatcgcccgtgtgtggtgg

SEQ ID NO: 19328 - RNA, 19 nt, synthetic construct
  source 1..19: mol_type = other RNA
ttattggggccgatgtggg

SEQ ID NO: 19329 - RNA, 19 nt, synthetic construct
  source 1..19: mol_type = other RNA
ggccgcacggatgttggag

SEQ ID NO: 19330 - RNA, 19 nt, synthetic construct
  source 1..19: mol_type = other RNA
gtggtagtcggcactttgg

SEQ ID NO: 19331 - RNA, 19 nt, synthetic construct
  source 1..19: mol_type = other RNA
caccaccgtggttatgggg

SEQ ID NO: 19332 - RNA, 19 nt, synthetic construct
  source 1..19: mol_type = other RNA
ggccgcacggatgttggag

SEQ ID NO: 19333 - RNA, 19 nt, synthetic construct
  source 1..19: mol_type = other RNA
gtggtagtcggcactttgg

SEQ ID NO: 19334 - RNA, 19 nt, synthetic construct
  source 1..19: mol_type = other RNA
gatcgcccgtgtgtggtgg

SEQ ID NO: 19335 - RNA, 19 nt, synthetic construct
  source 1..19: mol_type = other RNA
caccaccgtggttatgggg

SEQ ID NO: 19336 - RNA, 19 nt, synthetic construct
  source 1..19: mol_type = other RNA
ggccgcacggatgttggag

SEQ ID NO: 19337 - RNA, 19 nt, synthetic construct
  source 1..19: mol_type = other RNA
gtggtagtcggcactttgg

SEQ ID NO: 19338 - RNA, 19 nt, synthetic construct
  source 1..19: mol_type = other RNA
ggacggtccacgtggtcca

SEQ ID NO: 19339 - RNA, 19 nt, synthetic construct
  source 1..19: mol_type = other RNA
gcccatgtgtgcgttgaag

SEQ ID NO: 19340 - RNA, 19 nt, synthetic construct
  source 1..19: mol_type = other RNA
gagcgcggggtgccacaca

SEQ ID NO: 19341 - RNA, 19 nt, synthetic construct
  source 1..19: mol_type = other RNA
ggcgttgaagaatgggccc

SEQ ID NO: 19342 - RNA, 19 nt, synthetic construct
  source 1..19: mol_type = other RNA
ccgggctactcgtaggctg

SEQ ID NO: 19343 - RNA, 19 nt, synthetic construct
  source 1..19: mol_type = other RNA
cccgggctactcgtaggct

SEQ ID NO: 19344 - RNA, 19 nt, synthetic construct
  source 1..19: mol_type = other RNA
ctcggtcggtcttattgta

SEQ ID NO: 19345 - RNA, 19 nt, synthetic construct
  source 1..19: mol_type = other RNA
ggaccgcccgtgtgtggtg

SEQ ID NO: 19346 - RNA, 19 nt, synthetic construct
  source 1..19: mol_type = other RNA
gcccgcacatgcttagttt

SEQ ID NO: 19347 - RNA, 19 nt, synthetic construct
  source 1..19: mol_type = other RNA
cagtcgaccctgatggtct

SEQ ID NO: 19348 - RNA, 19 nt, synthetic construct
  source 1..19: mol_type = other RNA
gcggcgttgagaacagggc

SEQ ID NO: 19349 - RNA, 19 nt, synthetic construct
  source 1..19: mol_type = other RNA
gctgtcggcacatttcttg

SEQ ID NO: 19350 - RNA, 19 nt, synthetic construct
  source 1..19: mol_type = other RNA
caccgtggttattggggcc

SEQ ID NO: 19351 - RNA, 19 nt, synthetic construct
  source 1..19: mol_type = other RNA
ggcgcgagcaccagtgccg

SEQ ID NO: 19352 - RNA, 19 nt, synthetic construct
  source 1..19: mol_type = other RNA
cataagtgccctccagcgg

SEQ ID NO: 19353 - RNA, 19 nt, synthetic construct
  source 1..19: mol_type = other RNA
tggacgcactccccacagc

SEQ ID NO: 19354 - RNA, 19 nt, synthetic construct
  source 1..19: mol_type = other RNA
ttgaaggtgacgctcacgc

SEQ ID NO: 19355 - RNA, 19 nt, synthetic construct
  source 1..19: mol_type = other RNA
agatccccatgtagcgtat

SEQ ID NO: 19356 - RNA, 19 nt, synthetic construct
  source 1..19: mol_type = other RNA
gggtggaacaaagctcacg

SEQ ID NO: 19357 - RNA, 19 nt, synthetic construct
  source 1..19: mol_type = other RNA
ggtcgcacaggccaccggt

SEQ ID NO: 19358 - RNA, 19 nt, synthetic construct
  source 1..19: mol_type = other RNA
cgtggttattggggccgat

SEQ ID NO: 19359 - RNA, 19 nt, synthetic construct
  source 1..19: mol_type = other RNA
cccggatcctgtagttgta

SEQ ID NO: 19360 - RNA, 19 nt, synthetic construct
  source 1..19: mol_type = other RNA
gccaacaccagcgtccggc

SEQ ID NO: 19361 - RNA, 19 nt, synthetic construct
  source 1..19: mol_type = other RNA
agacacaagcacgccgttc

SEQ ID NO: 19362 - RNA, 19 nt, synthetic construct
  source 1..19: mol_type = other RNA
gggatgttctcggtgacga

SEQ ID NO: 19363 - RNA, 19 nt, synthetic construct
  source 1..19: mol_type = other RNA
tccactcacacttcggttg

SEQ ID NO: 19364 - RNA, 19 nt, synthetic construct
  source 1..19: mol_type = other RNA
tttcttggacagaacgtag

SEQ ID NO: 19365 - RNA, 19 nt, synthetic construct
  source 1..19: mol_type = other RNA
catgtacttggtgcagacg

SEQ ID NO: 19366 - RNA, 19 nt, synthetic construct
  source 1..19: mol_type = other RNA
cacacacaggcccgcgtcg

SEQ ID NO: 19367 - RNA, 19 nt, synthetic construct
  source 1..19: mol_type = other RNA
tcacacttcggttgacagc

SEQ ID NO: 19368 - RNA, 19 nt, synthetic construct
  source 1..19: mol_type = other RNA
aggagccagcacggtgccg

SEQ ID NO: 19369 - RNA, 19 nt, synthetic construct
  source 1..19: mol_type = other RNA
gcaccagtgccgggcgtag

SEQ ID NO: 19370 - RNA, 19 nt, synthetic construct
  source 1..19: mol_type = other RNA
cttgtaggtggcctcgttg

SEQ ID NO: 19371 - RNA, 19 nt, synthetic construct
  source 1..19: mol_type = other RNA
cagtgcccactggggttcc

SEQ ID NO: 19372 - RNA, 19 nt, synthetic construct
  source 1..19: mol_type = other RNA
tatccatggacttgtagtg

SEQ ID NO: 19373 - RNA, 19 nt, synthetic construct
  source 1..19: mol_type = other RNA
gtgggcgcactggcgtgag

SEQ ID NO: 19374 - RNA, 19 nt, synthetic construct
  source 1..19: mol_type = other RNA
tgggcgcactggcgtgagt

SEQ ID NO: 19375 - RNA, 19 nt, synthetic construct
  source 1..19: mol_type = other RNA
cgtaggactcaacgtcccc

SEQ ID NO: 19376 - RNA, 19 nt, synthetic construct
  source 1..19: mol_type = other RNA
acattgcaccgttgggtcc

SEQ ID NO: 19377 - RNA, 19 nt, synthetic construct
  source 1..19: mol_type = other RNA
cactcacacttcggttgac

SEQ ID NO: 19378 - RNA, 19 nt, synthetic construct
  source 1..19: mol_type = other RNA
caggctgcattccacgacc

SEQ ID NO: 19379 - RNA, 19 nt, synthetic construct
  source 1..19: mol_type = other RNA
caggctgcattccacgacc

SEQ ID NO: 19380 - RNA, 19 nt, synthetic construct
  source 1..19: mol_type = other RNA
caggctgcattccacgacc

SEQ ID NO: 19381 - RNA, 19 nt, synthetic construct
  source 1..19: mol_type = other RNA
caggctgcattccacgacc

SEQ ID NO: 19382 - RNA, 19 nt, synthetic construct
  source 1..19: mol_type = other RNA
ctgtccactcacacttcgg

SEQ ID NO: 19383 - RNA, 19 nt, synthetic construct
  source 1..19: mol_type = other RNA
aggcgcccgcgtcattgag

SEQ ID NO: 19384 - RNA, 19 nt, synthetic construct
  source 1..19: mol_type = other RNA
taggactcaacgtcccctc

SEQ ID NO: 19385 - RNA, 19 nt, synthetic construct
  source 1..19: mol_type = other RNA
acaggcgcccgcgtcattg

SEQ ID NO: 19386 - RNA, 19 nt, synthetic construct
  source 1..19: mol_type = other RNA
cactggcgtgagtattcca

SEQ ID NO: 19387 - RNA, 19 nt, synthetic construct
  source 1..19: mol_type = other RNA
agcccatcggtggtgttgt

SEQ ID NO: 19388 - RNA, 19 nt, synthetic construct
  source 1..19: mol_type = other RNA
gaccagcggcagacctcgc

SEQ ID NO: 19389 - RNA, 19 nt, synthetic construct
  source 1..19: mol_type = other RNA
agcaccagtgccgggcgta

SEQ ID NO: 19390 - RNA, 19 nt, synthetic construct
  source 1..19: mol_type = other RNA
aggacccggatcctgtagt

SEQ ID NO: 19391 - RNA, 19 nt, synthetic construct
  source 1..19: mol_type = other RNA
tcaccggaatttggtcaaa

SEQ ID NO: 19392 - RNA, 19 nt, synthetic construct
  source 1..19: mol_type = other RNA
ccactcacacttcggttga

SEQ ID NO: 19393 - RNA, 19 nt, synthetic construct
  source 1..19: mol_type = other RNA
tccccgtaggccacgcagg

SEQ ID NO: 19394 - RNA, 19 nt, synthetic construct
  source 1..19: mol_type = other RNA
tgaggacgatatccatgga

SEQ ID NO: 19395 - RNA, 19 nt, synthetic construct
  source 1..19: mol_type = other RNA
accgctgctcaccggaatt

SEQ ID NO: 19396 - RNA, 19 nt, synthetic construct
  source 1..19: mol_type = other RNA
tgatgttggctgccgacag

SEQ ID NO: 19397 - RNA, 19 nt, synthetic construct
  source 1..19: mol_type = other RNA
gtgcggctgtaaggcagct

SEQ ID NO: 19398 - RNA, 19 nt, synthetic construct
  source 1..19: mol_type = other RNA
tgcagatgcactcgcactc

SEQ ID NO: 19399 - RNA, 19 nt, synthetic construct
  source 1..19: mol_type = other RNA
ggtgttgcagtcgaccctg

SEQ ID NO: 19400 - RNA, 19 nt, synthetic construct
  source 1..19: mol_type = other RNA
ggccatccccgtaggccac

SEQ ID NO: 19401 - RNA, 19 nt, synthetic construct
  source 1..19: mol_type = other RNA
gcccatcggtggtgttgta

SEQ ID NO: 19402 - RNA, 19 nt, synthetic construct
  source 1..19: mol_type = other RNA
tcgtaggactcaacgtccc

SEQ ID NO: 19403 - RNA, 19 nt, synthetic construct
  source 1..19: mol_type = other RNA
cgtgggcccatccaacttc

SEQ ID NO: 19404 - RNA, 19 nt, synthetic construct
  source 1..19: mol_type = other RNA
gtccggagtccgccaggac

SEQ ID NO: 19405 - RNA, 19 nt, synthetic construct
  source 1..19: mol_type = other RNA
gatgaagaagctcgagggt

SEQ ID NO: 19406 - RNA, 19 nt, synthetic construct
  source 1..19: mol_type = other RNA
gccatccccgtaggccacg

SEQ ID NO: 19407 - RNA, 19 nt, synthetic construct
  source 1..19: mol_type = other RNA
gtgacgtcggcctcactca

SEQ ID NO: 19408 - RNA, 19 nt, synthetic construct
  source 1..19: mol_type = other RNA
ggtgacgtcggcctcactc

SEQ ID NO: 19409 - RNA, 19 nt, synthetic construct
  source 1..19: mol_type = other RNA
cagtgacgggtggaacaaa

SEQ ID NO: 19410 - RNA, 19 nt, synthetic construct
  source 1..19: mol_type = other RNA
acacttcggttgacagcgg

SEQ ID NO: 19411 - RNA, 19 nt, synthetic construct
  source 1..19: mol_type = other RNA
actggcgtgagtattccac

SEQ ID NO: 19412 - RNA, 19 nt, synthetic construct
  source 1..19: mol_type = other RNA
aagcccatcggtggtgttg

SEQ ID NO: 19413 - RNA, 19 nt, synthetic construct
  source 1..19: mol_type = other RNA
cggttgcacctcgccagtc

SEQ ID NO: 19414 - RNA, 19 nt, synthetic construct
  source 1..19: mol_type = other RNA
ccggttgcacctcgccagt

SEQ ID NO: 19415 - RNA, 19 nt, synthetic construct
  source 1..19: mol_type = other RNA
cacccacgcacctggccac

SEQ ID NO: 19416 - RNA, 19 nt, synthetic construct
  source 1..19: mol_type = other RNA
cacacttcggttgacagcg

SEQ ID NO: 19417 - RNA, 19 nt, synthetic construct
  source 1..19: mol_type = other RNA
ggttgcacctcgccagtca

SEQ ID NO: 19418 - RNA, 19 nt, synthetic construct
  source 1..19: mol_type = other RNA
tacttggtgcagacgccgt

SEQ ID NO: 19419 - RNA, 19 nt, synthetic construct
  source 1..19: mol_type = other RNA
tggcgtgagtattccacaa

SEQ ID NO: 19420 - RNA, 19 nt, synthetic construct
  source 1..19: mol_type = other RNA
cctgatcttatcgtaggac

SEQ ID NO: 19421 - RNA, 19 nt, synthetic construct
  source 1..19: mol_type = other RNA
tcggcctggcactctatgt

SEQ ID NO: 19422 - RNA, 19 nt, synthetic construct
  source 1..19: mol_type = other RNA
ctgcatgtacttggtgcag

SEQ ID NO: 19423 - RNA, 19 nt, synthetic construct
  source 1..19: mol_type = other RNA
gcactggcgtgagtattcc

SEQ ID NO: 19424 - RNA, 19 nt, synthetic construct
  source 1..19: mol_type = other RNA
cagatgcactcgcactcat

SEQ ID NO: 19425 - RNA, 19 nt, synthetic construct
  source 1..19: mol_type = other RNA
gttgcagtcgaccctgatg

SEQ ID NO: 19426 - RNA, 19 nt, synthetic construct
  source 1..19: mol_type = other RNA
ggtcttccggtcccaggac

SEQ ID NO: 19427 - RNA, 19 nt, synthetic construct
  source 1..19: mol_type = other RNA
ttgtaggtggcctcgttgt

SEQ ID NO: 19428 - RNA, 19 nt, synthetic construct
  source 1..19: mol_type = other RNA
atgttctcggtgacgatgc

SEQ ID NO: 19429 - RNA, 19 nt, synthetic construct
  source 1..19: mol_type = other RNA
aggtgttgcagtcgaccct

SEQ ID NO: 19430 - RNA, 19 nt, synthetic construct
  source 1..19: mol_type = other RNA
ggacgatatccatggactt

SEQ ID NO: 19431 - RNA, 19 nt, synthetic construct
  source 1..19: mol_type = other RNA
cgctgctcaccggaatttg

SEQ ID NO: 19432 - RNA, 19 nt, synthetic construct
  source 1..19: mol_type = other RNA
gacacaagcacgccgttct

SEQ ID NO: 19433 - RNA, 19 nt, synthetic construct
  source 1..19: mol_type = other RNA
tgccgtcaaaggtggaata

SEQ ID NO: 19434 - RNA, 19 nt, synthetic construct
  source 1..19: mol_type = other RNA
cccacgcacctggccaccg

SEQ ID NO: 19435 - RNA, 19 nt, synthetic construct
  source 1..19: mol_type = other RNA
cttggacagaacgtagctg

SEQ ID NO: 19436 - RNA, 19 nt, synthetic construct
  source 1..19: mol_type = other RNA
gtgttgcagtcgaccctga

SEQ ID NO: 19437 - RNA, 19 nt, synthetic construct
  source 1..19: mol_type = other RNA
tgaggacataggtgcagtt

SEQ ID NO: 19438 - RNA, 19 nt, synthetic construct
  source 1..19: mol_type = other RNA
ttccacgacctggcccaac

SEQ ID NO: 19439 - RNA, 19 nt, synthetic construct
  source 1..19: mol_type = other RNA
ttggacagaacgtagctgc

SEQ ID NO: 19440 - RNA, 19 nt, synthetic construct
  source 1..19: mol_type = other RNA
caggcagttctcgttgtcc

SEQ ID NO: 19441 - RNA, 19 nt, synthetic construct
  source 1..19: mol_type = other RNA
atgaagaagctcgagggtg

SEQ ID NO: 19442 - RNA, 19 nt, synthetic construct
  source 1..19: mol_type = other RNA
gcaggtgttgcagtcgacc

SEQ ID NO: 19443 - RNA, 19 nt, synthetic construct
  source 1..19: mol_type = other RNA
tctcggtgacgatgcggaa

SEQ ID NO: 19444 - RNA, 19 nt, synthetic construct
  source 1..19: mol_type = other RNA
ttccacgacctggcccaac

SEQ ID NO: 19445 - RNA, 19 nt, synthetic construct
  source 1..19: mol_type = other RNA
ctcggcctggcactctatg

SEQ ID NO: 19446 - RNA, 19 nt, synthetic construct
  source 1..19: mol_type = other RNA
gggtgtgggaagtcaccgt

SEQ ID NO: 19447 - RNA, 19 nt, synthetic construct
  source 1..19: mol_type = other RNA
ggctgtaaagctggtagct

SEQ ID NO: 19448 - RNA, 19 nt, synthetic construct
  source 1..19: mol_type = other RNA
gggtgtgggaagtcaccgt

SEQ ID NO: 19449 - RNA, 19 nt, synthetic construct
  source 1..19: mol_type = other RNA
ggctgtaaagctggtagct

SEQ ID NO: 19450 - RNA, 19 nt, synthetic construct
  source 1..19: mol_type = other RNA
ggctgtaaagctggtagct

SEQ ID NO: 19451 - RNA, 19 nt, synthetic construct
  source 1..19: mol_type = other RNA
aggtgcttgttcacgcagg

SEQ ID NO: 19452 - RNA, 19 nt, synthetic construct
  source 1..19: mol_type = other RNA
caagcacgccgttcttgct

SEQ ID NO: 19453 - RNA, 19 nt, synthetic construct
  source 1..19: mol_type = other RNA
acagacacaagcacgccgt

SEQ ID NO: 19454 - RNA, 19 nt, synthetic construct
  source 1..19: mol_type = other RNA
acagtgacgggtggaacaa

SEQ ID NO: 19455 - RNA, 19 nt, synthetic construct
  source 1..19: mol_type = other RNA
agacagtgacgggtggaac

SEQ ID NO: 19456 - RNA, 19 nt, synthetic construct
  source 1..19: mol_type = other RNA
aagacagtgacgggtggaa

SEQ ID NO: 19457 - RNA, 19 nt, synthetic construct
  source 1..19: mol_type = other RNA
ttccacgacctggcccaac

SEQ ID NO: 19458 - RNA, 19 nt, synthetic construct
  source 1..19: mol_type = other RNA
ttccacgacctggcccaac

SEQ ID NO: 19459 - RNA, 19 nt, synthetic construct
  source 1..19: mol_type = other RNA
tgagtattccacaaaggtg

SEQ ID NO: 19460 - RNA, 19 nt, synthetic construct
  source 1..19: mol_type = other RNA
gggcgcactggcgtgagta

SEQ ID NO: 19461 - RNA, 19 nt, synthetic construct
  source 1..19: mol_type = other RNA
ggccccccgcgtgggcgca

SEQ ID NO: 19462 - RNA, 19 nt, synthetic construct
  source 1..19: mol_type = other RNA
gacccggatggccgtgtcc

SEQ ID NO: 19463 - RNA, 19 nt, synthetic construct
  source 1..19: mol_type = other RNA
ctcggtgacgatgcggaag

SEQ ID NO: 19464 - RNA, 19 nt, synthetic construct
  source 1..19: mol_type = other RNA
ggactcaacgtcccctcca

SEQ ID NO: 19465 - RNA, 19 nt, synthetic construct
  source 1..19: mol_type = other RNA
attgcaccgttgggtcctg

SEQ ID NO: 19466 - RNA, 19 nt, synthetic construct
  source 1..19: mol_type = other RNA
ccgggcgtagttctcattc

SEQ ID NO: 19467 - RNA, 19 nt, synthetic construct
  source 1..19: mol_type = other RNA
tgttggcgcacatcagccc

SEQ ID NO: 19468 - RNA, 19 nt, synthetic construct
  source 1..19: mol_type = other RNA
gcccgcgtcattgaggaag

SEQ ID NO: 19469 - RNA, 19 nt, synthetic construct
  source 1..19: mol_type = other RNA
tcaacgtcccctccaagtt

SEQ ID NO: 19470 - RNA, 19 nt, synthetic construct
  source 1..19: mol_type = other RNA
agtgccgggcgtagttctc

SEQ ID NO: 19471 - RNA, 19 nt, synthetic construct
  source 1..19: mol_type = other RNA
cagtgtgtgctgaaacagc

SEQ ID NO: 19472 - RNA, 19 nt, synthetic construct
  source 1..19: mol_type = other RNA
gcactcgcactcatagtgg

SEQ ID NO: 19473 - RNA, 19 nt, synthetic construct
  source 1..19: mol_type = other RNA
gtgccgggcgtagttctca

SEQ ID NO: 19474 - RNA, 19 nt, synthetic construct
  source 1..19: mol_type = other RNA
ggagtagcagcagccggtt

SEQ ID NO: 19475 - RNA, 19 nt, synthetic construct
  source 1..19: mol_type = other RNA
cactccgcaaaggccggcc

SEQ ID NO: 19476 - RNA, 19 nt, synthetic construct
  source 1..19: mol_type = other RNA
ccatccccgtaggccacgc

SEQ ID NO: 19477 - RNA, 19 nt, synthetic construct
  source 1..19: mol_type = other RNA
gaacagggtgatgttggct

SEQ ID NO: 19478 - RNA, 19 nt, synthetic construct
  source 1..19: mol_type = other RNA
cacgtccagcgtgtggcag

SEQ ID NO: 19479 - RNA, 19 nt, synthetic construct
  source 1..19: mol_type = other RNA
cccgtaggccacgcaggtg

SEQ ID NO: 19480 - RNA, 19 nt, synthetic construct
  source 1..19: mol_type = other RNA
tcggtgacgatgcggaagg

SEQ ID NO: 19481 - RNA, 19 nt, synthetic construct
  source 1..19: mol_type = other RNA
tagtcctggtgcagtcgga

SEQ ID NO: 19482 - RNA, 19 nt, synthetic construct
  source 1..19: mol_type = other RNA
gtgtatctgggggatgtca

SEQ ID NO: 19483 - RNA, 19 nt, synthetic construct
  source 1..19: mol_type = other RNA
ggccgtagttgcagcagaa

SEQ ID NO: 19484 - RNA, 19 nt, synthetic construct
  source 1..19: mol_type = other RNA
ggtgtccggagtccgccag

SEQ ID NO: 19485 - RNA, 19 nt, synthetic construct
  source 1..19: mol_type = other RNA
tgtcctcataggtgcaggt

SEQ ID NO: 19486 - RNA, 19 nt, synthetic construct
  source 1..19: mol_type = other RNA
gttgtagatgacgtcctgg

SEQ ID NO: 19487 - RNA, 19 nt, synthetic construct
  source 1..19: mol_type = other RNA
tggtgttgtagatgacgtc

SEQ ID NO: 19488 - RNA, 19 nt, synthetic construct
  source 1..19: mol_type = other RNA
ggccgtagttgcagcagaa

SEQ ID NO: 19489 - RNA, 19 nt, synthetic construct
  source 1..19: mol_type = other RNA
cggatcctgtagttgtagc

SEQ ID NO: 19490 - RNA, 19 nt, synthetic construct
  source 1..19: mol_type = other RNA
cccatcggtggtgttgtag

SEQ ID NO: 19491 - RNA, 19 nt, synthetic construct
  source 1..19: mol_type = other RNA
atatccatggacttgtagt

SEQ ID NO: 19492 - RNA, 19 nt, synthetic construct
  source 1..19: mol_type = other RNA
ggcgccaggctcgtggtca

SEQ ID NO: 19493 - RNA, 19 nt, synthetic construct
  source 1..19: mol_type = other RNA
tggaccagcggcagacctc

SEQ ID NO: 19494 - RNA, 19 nt, synthetic construct
  source 1..19: mol_type = other RNA
caggtgtccggagtccgcc

SEQ ID NO: 19495 - RNA, 19 nt, synthetic construct
  source 1..19: mol_type = other RNA
ccatcggtggtgttgtaga

SEQ ID NO: 19496 - RNA, 19 nt, synthetic construct
  source 1..19: mol_type = other RNA
tggctgttggcgcacatca

SEQ ID NO: 19497 - RNA, 19 nt, synthetic construct
  source 1..19: mol_type = other RNA
gatgcggaaggtcccgtgg

SEQ ID NO: 19498 - RNA, 19 nt, synthetic construct
  source 1..19: mol_type = other RNA
tagtcctcatcaaaccact

SEQ ID NO: 19499 - RNA, 19 nt, synthetic construct
  source 1..19: mol_type = other RNA
gggcatagaactcgttgaa

SEQ ID NO: 19500 - RNA, 19 nt, synthetic construct
  source 1..19: mol_type = other RNA
ggggtagtcctcatcaaac

SEQ ID NO: 19501 - RNA, 19 nt, synthetic construct
  source 1..19: mol_type = other RNA
tggggtagtcctcatcaaa

SEQ ID NO: 19502 - RNA, 19 nt, synthetic construct
  source 1..19: mol_type = other RNA
gttcagacttggggtagtc

SEQ ID NO: 19503 - RNA, 19 nt, synthetic construct
  source 1..19: mol_type = other RNA
ctcaacgtcccctccaagt

SEQ ID NO: 19504 - RNA, 19 nt, synthetic construct
  source 1..19: mol_type = other RNA
tctcggcctggcactctat

SEQ ID NO: 19505 - RNA, 19 nt, synthetic construct
  source 1..19: mol_type = other RNA
ctctcggcctggcactcta

SEQ ID NO: 19506 - RNA, 19 nt, synthetic construct
  source 1..19: mol_type = other RNA
cagttggggaagctctcgg

SEQ ID NO: 19507 - RNA, 19 nt, synthetic construct
  source 1..19: mol_type = other RNA
ggtgccggtggtcccacag

SEQ ID NO: 19508 - RNA, 19 nt, synthetic construct
  source 1..19: mol_type = other RNA
tgtccaaatgccctgcaga

SEQ ID NO: 19509 - RNA, 19 nt, synthetic construct
  source 1..19: mol_type = other RNA
cacgtcaaaccactctgtc

SEQ ID NO: 19510 - RNA, 19 nt, synthetic construct
  source 1..19: mol_type = other RNA
acctggccaccgtgcagtt

SEQ ID NO: 19511 - RNA, 19 nt, synthetic construct
  source 1..19: mol_type = other RNA
acccacgcacctggccacc

SEQ ID NO: 19512 - RNA, 19 nt, synthetic construct
  source 1..19: mol_type = other RNA
agtacttggtggagtcaac

SEQ ID NO: 19513 - RNA, 19 nt, synthetic construct
  source 1..19: mol_type = other RNA
ggacccggatcctgtagtt

SEQ ID NO: 19514 - RNA, 19 nt, synthetic construct
  source 1..19: mol_type = other RNA
acacaagcacgccgttctt

SEQ ID NO: 19515 - RNA, 19 nt, synthetic construct
  source 1..19: mol_type = other RNA
cctcggtgttgttgtggaa

SEQ ID NO: 19516 - RNA, 19 nt, synthetic construct
  source 1..19: mol_type = other RNA
gccctcggtgttgttgtgg

SEQ ID NO: 19517 - RNA, 19 nt, synthetic construct
  source 1..19: mol_type = other RNA
agaatgggcccgggggcac

SEQ ID NO: 19518 - RNA, 19 nt, synthetic construct
  source 1..19: mol_type = other RNA
agtgacgggtggaacaaag

SEQ ID NO: 19519 - RNA, 19 nt, synthetic construct
  source 1..19: mol_type = other RNA
gtcactgcacactccccgg

SEQ ID NO: 19520 - RNA, 19 nt, synthetic construct
  source 1..19: mol_type = other RNA
ctccgcaaaggccggcccc

SEQ ID NO: 19521 - RNA, 19 nt, synthetic construct
  source 1..19: mol_type = other RNA
tggcactccgcaaaggccg

SEQ ID NO: 19522 - RNA, 19 nt, synthetic construct
  source 1..19: mol_type = other RNA
agctgcgtgtagatggagt

SEQ ID NO: 19523 - RNA, 19 nt, synthetic construct
  source 1..19: mol_type = other RNA
ctggaccagcggcagacct

SEQ ID NO: 19524 - RNA, 19 nt, synthetic construct
  source 1..19: mol_type = other RNA
aagctcgagggtgtgaaca

SEQ ID NO: 19525 - RNA, 19 nt, synthetic construct
  source 1..19: mol_type = other RNA
tcagcctggttctggttga

SEQ ID NO: 19526 - RNA, 19 nt, synthetic construct
  source 1..19: mol_type = other RNA
tgcatgtacttggtgcaga

SEQ ID NO: 19527 - RNA, 19 nt, synthetic construct
  source 1..19: mol_type = other RNA
gcgcccgcgtcattgagga

SEQ ID NO: 19528 - RNA, 19 nt, synthetic construct
  source 1..19: mol_type = other RNA
gggcacacaggcgcccgcg

SEQ ID NO: 19529 - RNA, 19 nt, synthetic construct
  source 1..19: mol_type = other RNA
aggtgacgtcggcctcact

SEQ ID NO: 19530 - RNA, 19 nt, synthetic construct
  source 1..19: mol_type = other RNA
gatgaagtggccatccccg

SEQ ID NO: 19531 - RNA, 19 nt, synthetic construct
  source 1..19: mol_type = other RNA
tgctgaaacagcccacgtc

SEQ ID NO: 19532 - RNA, 19 nt, synthetic construct
  source 1..19: mol_type = other RNA
aactcccgcagggggacac

SEQ ID NO: 19533 - RNA, 19 nt, synthetic construct
  source 1..19: mol_type = other RNA
caggtggggcagcggcaca

SEQ ID NO: 19534 - RNA, 19 nt, synthetic construct
  source 1..19: mol_type = other RNA
ctgcgtgtagatggagttg

SEQ ID NO: 19535 - RNA, 19 nt, synthetic construct
  source 1..19: mol_type = other RNA
gacttggggcagttctgca

SEQ ID NO: 19536 - RNA, 19 nt, synthetic construct
  source 1..19: mol_type = other RNA
tgtagttgtagcacatctt

SEQ ID NO: 19537 - RNA, 19 nt, synthetic construct
  source 1..19: mol_type = other RNA
aactcccgcagggggacac

SEQ ID NO: 19538 - RNA, 19 nt, synthetic construct
  source 1..19: mol_type = other RNA
aactcccgcagggggacac

SEQ ID NO: 19539 - RNA, 19 nt, synthetic construct
  source 1..19: mol_type = other RNA
ttccggcaggtttttaggc

SEQ ID NO: 19540 - RNA, 19 nt, synthetic construct
  source 1..19: mol_type = other RNA
ctctgtccactcacacttc

SEQ ID NO: 19541 - RNA, 19 nt, synthetic construct
  source 1..19: mol_type = other RNA
tgatgaagtggccatcccc

SEQ ID NO: 19542 - RNA, 19 nt, synthetic construct
  source 1..19: mol_type = other RNA
gccaggctcgtggtcagcg

SEQ ID NO: 19543 - RNA, 19 nt, synthetic construct
  source 1..19: mol_type = other RNA
ctcacacttcggttgacag

SEQ ID NO: 19544 - RNA, 19 nt, synthetic construct
  source 1..19: mol_type = other RNA
tgcaggtgttgcagtcgac

SEQ ID NO: 19545 - RNA, 19 nt, synthetic construct
  source 1..19: mol_type = other RNA
cacagccggacacgcagtg

SEQ ID NO: 19546 - RNA, 19 nt, synthetic construct
  source 1..19: mol_type = other RNA
cctggtgcagtcggatgaa

SEQ ID NO: 19547 - RNA, 19 nt, synthetic construct
  source 1..19: mol_type = other RNA
ccacgtcaaaccactctgt

SEQ ID NO: 19548 - RNA, 19 nt, synthetic construct
  source 1..19: mol_type = other RNA
ggacacgcagtgtgtgctg

SEQ ID NO: 19549 - RNA, 19 nt, synthetic construct
  source 1..19: mol_type = other RNA
acactgggccacgcacttc

SEQ ID NO: 19550 - RNA, 19 nt, synthetic construct
  source 1..19: mol_type = other RNA
gcctcaaggctgtgagcgc

SEQ ID NO: 19551 - RNA, 19 nt, synthetic construct
  source 1..19: mol_type = other RNA
gtcctgtcctcataggtgc

SEQ ID NO: 19552 - RNA, 19 nt, synthetic construct
  source 1..19: mol_type = other RNA
ggaagacagtgacgggtgg

SEQ ID NO: 19553 - RNA, 19 nt, synthetic construct
  source 1..19: mol_type = other RNA
tggttgttggtgcaggtgc

SEQ ID NO: 19554 - RNA, 19 nt, synthetic construct
  source 1..19: mol_type = other RNA
ttgaagaatgggcccgggg

SEQ ID NO: 19555 - RNA, 19 nt, synthetic construct
  source 1..19: mol_type = other RNA
gtaaggcagctcctcccgc

SEQ ID NO: 19556 - RNA, 19 nt, synthetic construct
  source 1..19: mol_type = other RNA
tccgggcactgctccgtgg

SEQ ID NO: 19557 - RNA, 19 nt, synthetic construct
  source 1..19: mol_type = other RNA
gggtccgggcactgctccg

SEQ ID NO: 19558 - RNA, 19 nt, synthetic construct
  source 1..19: mol_type = other RNA
gttgggaagtccacgtcaa

SEQ ID NO: 19559 - RNA, 19 nt, synthetic construct
  source 1..19: mol_type = other RNA
aagaggtgccgtcaaaggt

SEQ ID NO: 19560 - RNA, 19 nt, synthetic construct
  source 1..19: mol_type = other RNA
gcgcgctgggggttggagc

SEQ ID NO: 19561 - RNA, 19 nt, synthetic construct
  source 1..19: mol_type = other RNA
accagcggcagacctcgcg

SEQ ID NO: 19562 - RNA, 19 nt, synthetic construct
  source 1..19: mol_type = other RNA
gcacggcaggtcctggcac

SEQ ID NO: 19563 - RNA, 19 nt, synthetic construct
  source 1..19: mol_type = other RNA
gcgtgtagatggagttgag

SEQ ID NO: 19564 - RNA, 19 nt, synthetic construct
  source 1..19: mol_type = other RNA
tgcgtgtagatggagttga

SEQ ID NO: 19565 - RNA, 19 nt, synthetic construct
  source 1..19: mol_type = other RNA
tggaggatcagctcgtagc

SEQ ID NO: 19566 - RNA, 19 nt, synthetic construct
  source 1..19: mol_type = other RNA
aggtgcagccgtccacagg

SEQ ID NO: 19567 - RNA, 19 nt, synthetic construct
  source 1..19: mol_type = other RNA
ctgggccacgcacttcatc

SEQ ID NO: 19568 - RNA, 19 nt, synthetic construct
  source 1..19: mol_type = other RNA
cagagccggtggctgcact

SEQ ID NO: 19569 - RNA, 19 nt, synthetic construct
  source 1..19: mol_type = other RNA
gccggtggtcccacagggg

SEQ ID NO: 19570 - RNA, 19 nt, synthetic construct
  source 1..19: mol_type = other RNA
tcgtagtacttggtggagt

SEQ ID NO: 19571 - RNA, 19 nt, synthetic construct
  source 1..19: mol_type = other RNA
cacgccgttcttgctgaaa

SEQ ID NO: 19572 - RNA, 19 nt, synthetic construct
  source 1..19: mol_type = other RNA
cctcgccagtcactgcaca

SEQ ID NO: 19573 - RNA, 19 nt, synthetic construct
  source 1..19: mol_type = other RNA
ccccgcgtgggcgcactgg

SEQ ID NO: 19574 - RNA, 19 nt, synthetic construct
  source 1..19: mol_type = other RNA
accgttgggtcctgggtgt

SEQ ID NO: 19575 - RNA, 19 nt, synthetic construct
  source 1..19: mol_type = other RNA
gtagctggacgttgaagtc

SEQ ID NO: 19576 - RNA, 19 nt, synthetic construct
  source 1..19: mol_type = other RNA
gcgtagctggacgttgaag

SEQ ID NO: 19577 - RNA, 19 nt, synthetic construct
  source 1..19: mol_type = other RNA
tagctggacgttgaagtcc

SEQ ID NO: 19578 - RNA, 19 nt, synthetic construct
  source 1..19: mol_type = other RNA
cagccggacacgcagtgtg

SEQ ID NO: 19579 - RNA, 19 nt, synthetic construct
  source 1..19: mol_type = other RNA
gtaggtggcctcgttgtgc

SEQ ID NO: 19580 - RNA, 19 nt, synthetic construct
  source 1..19: mol_type = other RNA
cagacacagccggacacgc

SEQ ID NO: 19581 - RNA, 19 nt, synthetic construct
  source 1..19: mol_type = other RNA
caggcttgtaggtggcctc

SEQ ID NO: 19582 - RNA, 19 nt, synthetic construct
  source 1..19: mol_type = other RNA
ccccgtaggccacgcaggt

SEQ ID NO: 19583 - RNA, 19 nt, synthetic construct
  source 1..19: mol_type = other RNA
gacacacacaggcccgcgt

SEQ ID NO: 19584 - RNA, 19 nt, synthetic construct
  source 1..19: mol_type = other RNA
tccggagtccgccaggaca

SEQ ID NO: 19585 - RNA, 19 nt, synthetic construct
  source 1..19: mol_type = other RNA
ggcaggtgtccggagtccg

SEQ ID NO: 19586 - RNA, 19 nt, synthetic construct
  source 1..19: mol_type = other RNA
taggcagggtgccccgcag

SEQ ID NO: 19587 - RNA, 19 nt, synthetic construct
  source 1..19: mol_type = other RNA
tcggtggtgttgtagatga

SEQ ID NO: 19588 - RNA, 19 nt, synthetic construct
  source 1..19: mol_type = other RNA
cgccaggctcgtggtcagc

SEQ ID NO: 19589 - RNA, 19 nt, synthetic construct
  source 1..19: mol_type = other RNA
ctggtctcggcctgagagg

SEQ ID NO: 19590 - RNA, 19 nt, synthetic construct
  source 1..19: mol_type = other RNA
aggtgccgtcaaaggtgga

SEQ ID NO: 19591 - RNA, 19 nt, synthetic construct
  source 1..19: mol_type = other RNA
ctgctcaccggaatttggt

SEQ ID NO: 19592 - RNA, 19 nt, synthetic construct
  source 1..19: mol_type = other RNA
tgacgatgcggaaggtccc

SEQ ID NO: 19593 - RNA, 19 nt, synthetic construct
  source 1..19: mol_type = other RNA
ggtgacgatgcggaaggtc

SEQ ID NO: 19594 - RNA, 19 nt, synthetic construct
  source 1..19: mol_type = other RNA
gcacctcgccagtcactgc

SEQ ID NO: 19595 - RNA, 19 nt, synthetic construct
  source 1..19: mol_type = other RNA
cggtgacgatgcggaaggt

SEQ ID NO: 19596 - RNA, 19 nt, synthetic construct
  source 1..19: mol_type = other RNA
ctcgtagtacttggtggag

SEQ ID NO: 19597 - RNA, 19 nt, synthetic construct
  source 1..19: mol_type = other RNA
gtgtccggagtccgccagg

SEQ ID NO: 19598 - RNA, 19 nt, synthetic construct
  source 1..19: mol_type = other RNA
atcggtggtgttgtagatg

SEQ ID NO: 19599 - RNA, 19 nt, synthetic construct
  source 1..19: mol_type = other RNA
ggacacacacaggcccgcg

SEQ ID NO: 19600 - RNA, 19 nt, synthetic construct
  source 1..19: mol_type = other RNA
catcggtggtgttgtagat

SEQ ID NO: 19601 - RNA, 19 nt, synthetic construct
  source 1..19: mol_type = other RNA
caagcccatcggtggtgtt

SEQ ID NO: 19602 - RNA, 19 nt, synthetic construct
  source 1..19: mol_type = other RNA
ggaccagcggcagacctcg

SEQ ID NO: 19603 - RNA, 19 nt, synthetic construct
  source 1..19: mol_type = other RNA
ctgttggcgcacatcagcc

SEQ ID NO: 19604 - RNA, 19 nt, synthetic construct
  source 1..19: mol_type = other RNA
ggctgttggcgcacatcag

SEQ ID NO: 19605 - RNA, 19 nt, synthetic construct
  source 1..19: mol_type = other RNA
ttgcaccgttgggtcctgg

SEQ ID NO: 19606 - RNA, 19 nt, synthetic construct
  source 1..19: mol_type = other RNA
catcaaaccactctgtcca

SEQ ID NO: 19607 - RNA, 19 nt, synthetic construct
  source 1..19: mol_type = other RNA
agggtggtcttttcggttg

SEQ ID NO: 19608 - RNA, 19 nt, synthetic construct
  source 1..19: mol_type = other RNA
ggtagtcctcatcaaacca

SEQ ID NO: 19609 - RNA, 19 nt, synthetic construct
  source 1..19: mol_type = other RNA
ccagttggggaagctctcg

SEQ ID NO: 19610 - RNA, 19 nt, synthetic construct
  source 1..19: mol_type = other RNA
cgatatccatggacttgta

SEQ ID NO: 19611 - RNA, 19 nt, synthetic construct
  source 1..19: mol_type = other RNA
ggatcctgtagttgtagca

SEQ ID NO: 19612 - RNA, 19 nt, synthetic construct
  source 1..19: mol_type = other RNA
aggctgtgagcgcactgga

SEQ ID NO: 19613 - RNA, 19 nt, synthetic construct
  source 1..19: mol_type = other RNA
ttcccaaactggagcgggg

SEQ ID NO: 19614 - RNA, 19 nt, synthetic construct
  source 1..19: mol_type = other RNA
gctgtaaagctggtagctg

SEQ ID NO: 19615 - RNA, 19 nt, synthetic construct
  source 1..19: mol_type = other RNA
gctgtaaagctggtagctg

SEQ ID NO: 19616 - RNA, 19 nt, synthetic construct
  source 1..19: mol_type = other RNA
gctgtaaagctggtagctg

SEQ ID NO: 19617 - RNA, 19 nt, synthetic construct
  source 1..19: mol_type = other RNA
agggccgggcttgtcgtgg

SEQ ID NO: 19618 - RNA, 19 nt, synthetic construct
  source 1..19: mol_type = other RNA
ctctcatgaggacataggt

SEQ ID NO: 19619 - RNA, 19 nt, synthetic construct
  source 1..19: mol_type = other RNA
gtcaacctgggagcggcag

SEQ ID NO: 19620 - RNA, 19 nt, synthetic construct
  source 1..19: mol_type = other RNA
aagaagctcgagggtgtga

SEQ ID NO: 19621 - RNA, 19 nt, synthetic construct
  source 1..19: mol_type = other RNA
gaagaagctcgagggtgtg

SEQ ID NO: 19622 - RNA, 19 nt, synthetic construct
  source 1..19: mol_type = other RNA
ctgtagttgtagcacatct

SEQ ID NO: 19623 - RNA, 19 nt, synthetic construct
  source 1..19: mol_type = other RNA
ctgtccactgacaccgggg

SEQ ID NO: 19624 - RNA, 19 nt, synthetic construct
  source 1..19: mol_type = other RNA
agggcacggcaggtcctgg

SEQ ID NO: 19625 - RNA, 19 nt, synthetic construct
  source 1..19: mol_type = other RNA
gttccggcaggtttttagg

SEQ ID NO: 19626 - RNA, 19 nt, synthetic construct
  source 1..19: mol_type = other RNA
ggtggtcccacaggggatg

SEQ ID NO: 19627 - RNA, 19 nt, synthetic construct
  source 1..19: mol_type = other RNA
aggtcctgtcctcataggt

SEQ ID NO: 19628 - RNA, 19 nt, synthetic construct
  source 1..19: mol_type = other RNA
cacaggcgcccgcgtcatt

SEQ ID NO: 19629 - RNA, 19 nt, synthetic construct
  source 1..19: mol_type = other RNA
ctccgtgctggcactgagg

SEQ ID NO: 19630 - RNA, 19 nt, synthetic construct
  source 1..19: mol_type = other RNA
gatgttggctgccgacagg

SEQ ID NO: 19631 - RNA, 19 nt, synthetic construct
  source 1..19: mol_type = other RNA
tgtaaagctggtagctgtg

SEQ ID NO: 19632 - RNA, 19 nt, synthetic construct
  source 1..19: mol_type = other RNA
tgtaaagctggtagctgtg

SEQ ID NO: 19633 - RNA, 19 nt, synthetic construct
  source 1..19: mol_type = other RNA
agcgggtccgggcactgct

SEQ ID NO: 19634 - RNA, 19 nt, synthetic construct
  source 1..19: mol_type = other RNA
gcggctggccccccgcgtg

SEQ ID NO: 19635 - RNA, 19 nt, synthetic construct
  source 1..19: mol_type = other RNA
ggcacacaggcgcccgcgt

SEQ ID NO: 19636 - RNA, 19 nt, synthetic construct
  source 1..19: mol_type = other RNA
gccggacacgcagtgtgtg

SEQ ID NO: 19637 - RNA, 19 nt, synthetic construct
  source 1..19: mol_type = other RNA
tgtaaagctggtagctgtg

SEQ ID NO: 19638 - RNA, 19 nt, synthetic construct
  source 1..19: mol_type = other RNA
gtcaaaggtggaatagtgg

SEQ ID NO: 19639 - RNA, 19 nt, synthetic construct
  source 1..19: mol_type = other RNA
catctggtcctcattgaag

SEQ ID NO: 19640 - RNA, 19 nt, synthetic construct
  source 1..19: mol_type = other RNA
tggatctctctcatgagga

SEQ ID NO: 19641 - RNA, 19 nt, synthetic construct
  source 1..19: mol_type = other RNA
tgaaggtgaatggcgttgt

SEQ ID NO: 19642 - RNA, 19 nt, synthetic construct
  source 1..19: mol_type = other RNA
gtgaaggtgaatggcgttg

SEQ ID NO: 19643 - RNA, 19 nt, synthetic construct
  source 1..19: mol_type = other RNA
gtagtcctcatcaaaccac

SEQ ID NO: 19644 - RNA, 19 nt, synthetic construct
  source 1..19: mol_type = other RNA
ggtaggcacagcaggctcc

SEQ ID NO: 19645 - RNA, 19 nt, synthetic construct
  source 1..19: mol_type = other RNA
gctgctcaccggaatttgg

SEQ ID NO: 19646 - RNA, 19 nt, synthetic construct
  source 1..19: mol_type = other RNA
gtgaggacgatatccatgg

SEQ ID NO: 19647 - RNA, 19 nt, synthetic construct
  source 1..19: mol_type = other RNA
ttcgagtggaagggcttgg

SEQ ID NO: 19648 - RNA, 19 nt, synthetic construct
  source 1..19: mol_type = other RNA
tgtgggttgtagaagtcac

SEQ ID NO: 19649 - RNA, 19 nt, synthetic construct
  source 1..19: mol_type = other RNA
cggcctggcactctatgtc

SEQ ID NO: 19650 - RNA, 19 nt, synthetic construct
  source 1..19: mol_type = other RNA
cgttcttgctgaaaccgct

SEQ ID NO: 19651 - RNA, 19 nt, synthetic construct
  source 1..19: mol_type = other RNA
agaggagggtgttgccata

SEQ ID NO: 19652 - RNA, 19 nt, synthetic construct
  source 1..19: mol_type = other RNA
agaggagggtgttgccata

SEQ ID NO: 19653 - RNA, 19 nt, synthetic construct
  source 1..19: mol_type = other RNA
agaggagggtgttgccata

SEQ ID NO: 19654 - RNA, 19 nt, synthetic construct
  source 1..19: mol_type = other RNA
agaggagggtgttgccata

SEQ ID NO: 19655 - RNA, 19 nt, synthetic construct
  source 1..19: mol_type = other RNA
agaggagggtgttgccata

SEQ ID NO: 19656 - RNA, 19 nt, synthetic construct
  source 1..19: mol_type = other RNA
aagcacgccgttcttgctg

SEQ ID NO: 19657 - RNA, 19 nt, synthetic construct
  source 1..19: mol_type = other RNA
aagaatgggcccgggggca

SEQ ID NO: 19658 - RNA, 19 nt, synthetic construct
  source 1..19: mol_type = other RNA
tgcaccgttgggtcctggg

SEQ ID NO: 19659 - RNA, 19 nt, synthetic construct
  source 1..19: mol_type = other RNA
tggtagtgccactcacagc

SEQ ID NO: 19660 - RNA, 19 nt, synthetic construct
  source 1..19: mol_type = other RNA
gtcacccacgcacctggcc

SEQ ID NO: 19661 - RNA, 19 nt, synthetic construct
  source 1..19: mol_type = other RNA
gcggtcacagtccacctgc

SEQ ID NO: 19662 - RNA, 19 nt, synthetic construct
  source 1..19: mol_type = other RNA
ggctgtagggcagccgggc

SEQ ID NO: 19663 - RNA, 19 nt, synthetic construct
  source 1..19: mol_type = other RNA
tgtatctgggggatgtcag

SEQ ID NO: 19664 - RNA, 19 nt, synthetic construct
  source 1..19: mol_type = other RNA
gacgtcacagtgcaccttc

SEQ ID NO: 19665 - RNA, 19 nt, synthetic construct
  source 1..19: mol_type = other RNA
gggaagctctcggcctggc

SEQ ID NO: 19666 - RNA, 19 nt, synthetic construct
  source 1..19: mol_type = other RNA
ccgtcaaaggtggaatagt

SEQ ID NO: 19667 - RNA, 19 nt, synthetic construct
  source 1..19: mol_type = other RNA
ggacccggatggccgtgtc

SEQ ID NO: 19668 - RNA, 19 nt, synthetic construct
  source 1..19: mol_type = other RNA
cgtagtacttggtggagtc

SEQ ID NO: 19669 - RNA, 19 nt, synthetic construct
  source 1..19: mol_type = other RNA
ggggcagcggcacaggtcc

SEQ ID NO: 19670 - RNA, 19 nt, synthetic construct
  source 1..19: mol_type = other RNA
gtcctcattgaagaagggc

SEQ ID NO: 19671 - RNA, 19 nt, synthetic construct
  source 1..19: mol_type = other RNA
tgttgcagtcgaccctgat

SEQ ID NO: 19672 - RNA, 19 nt, synthetic construct
  source 1..19: mol_type = other RNA
tggtcctcattgaagaagg

SEQ ID NO: 19673 - RNA, 19 nt, synthetic construct
  source 1..19: mol_type = other RNA
cacactgggccacgcactt

SEQ ID NO: 19674 - RNA, 19 nt, synthetic construct
  source 1..19: mol_type = other RNA
ccggtggtcccacagggga

SEQ ID NO: 19675 - RNA, 19 nt, synthetic construct
  source 1..19: mol_type = other RNA
tgggccacgcacttcatct

SEQ ID NO: 19676 - RNA, 19 nt, synthetic construct
  source 1..19: mol_type = other RNA
cgtgggtgcaggggcactg

SEQ ID NO: 19677 - RNA, 19 nt, synthetic construct
  source 1..19: mol_type = other RNA
cttttcggttgctgtggtc

SEQ ID NO: 19678 - RNA, 19 nt, synthetic construct
  source 1..19: mol_type = other RNA
gggcggggtccagcctgac

SEQ ID NO: 19679 - RNA, 19 nt, synthetic construct
  source 1..19: mol_type = other RNA
cactgtcctctccgttcca

SEQ ID NO: 19680 - RNA, 19 nt, synthetic construct
  source 1..19: mol_type = other RNA
agccggacacgcagtgtgt

SEQ ID NO: 19681 - RNA, 19 nt, synthetic construct
  source 1..19: mol_type = other RNA
tttaggcagggtgccccgc

SEQ ID NO: 19682 - RNA, 19 nt, synthetic construct
  source 1..19: mol_type = other RNA
gggccacgcacttcatctg

SEQ ID NO: 19683 - RNA, 19 nt, synthetic construct
  source 1..19: mol_type = other RNA
ggctccgtgctggcactga

SEQ ID NO: 19684 - RNA, 19 nt, synthetic construct
  source 1..19: mol_type = other RNA
aggactcaacgtcccctcc

SEQ ID NO: 19685 - RNA, 19 nt, synthetic construct
  source 1..19: mol_type = other RNA
tcacccacgcacctggcca

SEQ ID NO: 19686 - RNA, 19 nt, synthetic construct
  source 1..19: mol_type = other RNA
ccacgacctggcccaactc

SEQ ID NO: 19687 - RNA, 19 nt, synthetic construct
  source 1..19: mol_type = other RNA
ccacgacctggcccaactc

SEQ ID NO: 19688 - RNA, 19 nt, synthetic construct
  source 1..19: mol_type = other RNA
ccacgacctggcccaactc

SEQ ID NO: 19689 - RNA, 19 nt, synthetic construct
  source 1..19: mol_type = other RNA
ccgcacatctggccctggt

SEQ ID NO: 19690 - RNA, 19 nt, synthetic construct
  source 1..19: mol_type = other RNA
ccacgacctggcccaactc

SEQ ID NO: 19691 - RNA, 19 nt, synthetic construct
  source 1..19: mol_type = other RNA
ggcagtggttccgtcccgc

SEQ ID NO: 19692 - RNA, 19 nt, synthetic construct
  source 1..19: mol_type = other RNA
tcccgctggagacagtcgt

SEQ ID NO: 19693 - RNA, 19 nt, synthetic construct
  source 1..19: mol_type = other RNA
acacacggatttcatagtt

SEQ ID NO: 19694 - RNA, 19 nt, synthetic construct
  source 1..19: mol_type = other RNA
acacacggatttcatagtt

SEQ ID NO: 19695 - RNA, 19 nt, synthetic construct
  source 1..19: mol_type = other RNA
acacacggatttcatagtt

SEQ ID NO: 19696 - RNA, 19 nt, synthetic construct
  source 1..19: mol_type = other RNA
acacacggatttcatagtt

SEQ ID NO: 19697 - RNA, 19 nt, synthetic construct
  source 1..19: mol_type = other RNA
ggctggctcgggtccgaca

SEQ ID NO: 19698 - RNA, 19 nt, synthetic construct
  source 1..19: mol_type = other RNA
ggcgttgtgggcatagaac

SEQ ID NO: 19699 - RNA, 19 nt, synthetic construct
  source 1..19: mol_type = other RNA
agaacacacggatttcata

SEQ ID NO: 19700 - RNA, 19 nt, synthetic construct
  source 1..19: mol_type = other RNA
agaacacacggatttcata

SEQ ID NO: 19701 - RNA, 19 nt, synthetic construct
  source 1..19: mol_type = other RNA
agaacacacggatttcata

SEQ ID NO: 19702 - RNA, 19 nt, synthetic construct
  source 1..19: mol_type = other RNA
agaacacacggatttcata

SEQ ID NO: 19703 - RNA, 19 nt, synthetic construct
  source 1..19: mol_type = other RNA
cccgctggagacagtcgtc

SEQ ID NO: 19704 - RNA, 19 nt, synthetic construct
  source 1..19: mol_type = other RNA
cagggcgtcccagtgacat

SEQ ID NO: 19705 - RNA, 19 nt, synthetic construct
  source 1..19: mol_type = other RNA
acggatttcatagttgaag

SEQ ID NO: 19706 - RNA, 19 nt, synthetic construct
  source 1..19: mol_type = other RNA
acggatttcatagttgaag

SEQ ID NO: 19707 - RNA, 19 nt, synthetic construct
  source 1..19: mol_type = other RNA
acggatttcatagttgaag

SEQ ID NO: 19708 - RNA, 19 nt, synthetic construct
  source 1..19: mol_type = other RNA
acggatttcatagttgaag

SEQ ID NO: 19709 - RNA, 19 nt, synthetic construct
  source 1..19: mol_type = other RNA
gtcgtccccggagtggagg

SEQ ID NO: 19710 - RNA, 19 nt, synthetic construct
  source 1..19: mol_type = other RNA
cagtggttccgtcccgctg

SEQ ID NO: 19711 - RNA, 19 nt, synthetic construct
  source 1..19: mol_type = other RNA
gtcgtccccggagtggagg

SEQ ID NO: 19712 - RNA, 19 nt, synthetic construct
  source 1..19: mol_type = other RNA
acgatatccatggacttgt

SEQ ID NO: 19713 - RNA, 19 nt, synthetic construct
  source 1..19: mol_type = other RNA
tcgagggtgtgaacagggt

SEQ ID NO: 19714 - RNA, 19 nt, synthetic construct
  source 1..19: mol_type = other RNA
tgttcacgcaggtgacgtt

SEQ ID NO: 19715 - RNA, 19 nt, synthetic construct
  source 1..19: mol_type = other RNA
ccgctggagacagtcgtcc

SEQ ID NO: 19716 - RNA, 19 nt, synthetic construct
  source 1..19: mol_type = other RNA
cacacggatttcatagttg

SEQ ID NO: 19717 - RNA, 19 nt, synthetic construct
  source 1..19: mol_type = other RNA
cacacggatttcatagttg

SEQ ID NO: 19718 - RNA, 19 nt, synthetic construct
  source 1..19: mol_type = other RNA
cacacggatttcatagttg

SEQ ID NO: 19719 - RNA, 19 nt, synthetic construct
  source 1..19: mol_type = other RNA
cacacggatttcatagttg

SEQ ID NO: 19720 - RNA, 19 nt, synthetic construct
  source 1..19: mol_type = other RNA
ctggcgttgtgggcataga

SEQ ID NO: 19721 - RNA, 19 nt, synthetic construct
  source 1..19: mol_type = other RNA
acacggatttcatagttga

SEQ ID NO: 19722 - RNA, 19 nt, synthetic construct
  source 1..19: mol_type = other RNA
acacggatttcatagttga

SEQ ID NO: 19723 - RNA, 19 nt, synthetic construct
  source 1..19: mol_type = other RNA
cagcagaacacacggattt

SEQ ID NO: 19724 - RNA, 19 nt, synthetic construct
  source 1..19: mol_type = other RNA
ggatttcatagttgaagca

SEQ ID NO: 19725 - RNA, 19 nt, synthetic construct
  source 1..19: mol_type = other RNA
agcagaacacacggatttc

SEQ ID NO: 19726 - RNA, 19 nt, synthetic construct
  source 1..19: mol_type = other RNA
ggatttcatagttgaagca

SEQ ID NO: 19727 - RNA, 19 nt, synthetic construct
  source 1..19: mol_type = other RNA
agcagaacacacggatttc

SEQ ID NO: 19728 - RNA, 19 nt, synthetic construct
  source 1..19: mol_type = other RNA
ggatttcatagttgaagca

SEQ ID NO: 19729 - RNA, 19 nt, synthetic construct
  source 1..19: mol_type = other RNA
agcagaacacacggatttc

SEQ ID NO: 19730 - RNA, 19 nt, synthetic construct
  source 1..19: mol_type = other RNA
ggatttcatagttgaagca

SEQ ID NO: 19731 - RNA, 19 nt, synthetic construct
  source 1..19: mol_type = other RNA
agcagaacacacggatttc

SEQ ID NO: 19732 - RNA, 19 nt, synthetic construct
  source 1..19: mol_type = other RNA
tgcttgttcacgcaggtga

SEQ ID NO: 19733 - RNA, 19 nt, synthetic construct
  source 1..19: mol_type = other RNA
gcagtggttccgtcccgct

SEQ ID NO: 19734 - RNA, 19 nt, synthetic construct
  source 1..19: mol_type = other RNA
cacggaccggctacgcgtg

SEQ ID NO: 19735 - RNA, 19 nt, synthetic construct
  source 1..19: mol_type = other RNA
catgcggtcacagtccacc

SEQ ID NO: 19736 - RNA, 19 nt, synthetic construct
  source 1..19: mol_type = other RNA
cacggatttcatagttgaa

SEQ ID NO: 19737 - RNA, 19 nt, synthetic construct
  source 1..19: mol_type = other RNA
cacggatttcatagttgaa

SEQ ID NO: 19738 - RNA, 19 nt, synthetic construct
  source 1..19: mol_type = other RNA
cacggatttcatagttgaa

SEQ ID NO: 19739 - RNA, 19 nt, synthetic construct
  source 1..19: mol_type = other RNA
cacggatttcatagttgaa

SEQ ID NO: 19740 - RNA, 19 nt, synthetic construct
  source 1..19: mol_type = other RNA
gcttgttcacgcaggtgac

SEQ ID NO: 19741 - RNA, 19 nt, synthetic construct
  source 1..19: mol_type = other RNA
tccgacactttgatgggca

SEQ ID NO: 19742 - RNA, 19 nt, synthetic construct
  source 1..19: mol_type = other RNA
cagtcgtccctctggttgt

SEQ ID NO: 19743 - RNA, 19 nt, synthetic construct
  source 1..19: mol_type = other RNA
ctggagacagtcgtccctc

SEQ ID NO: 19744 - RNA, 19 nt, synthetic construct
  source 1..19: mol_type = other RNA
gctggagacagtcgtccct

SEQ ID NO: 19745 - RNA, 19 nt, synthetic construct
  source 1..19: mol_type = other RNA
gtcccgctggagacagtcg

SEQ ID NO: 19746 - RNA, 19 nt, synthetic construct
  source 1..19: mol_type = other RNA
ttgtacactttggtgggtg

SEQ ID NO: 19747 - RNA, 19 nt, synthetic construct
  source 1..19: mol_type = other RNA
gggacacagaagggcgtgc

SEQ ID NO: 19748 - RNA, 19 nt, synthetic construct
  source 1..19: mol_type = other RNA
gagacagtcgtccctctgg

SEQ ID NO: 19749 - RNA, 19 nt, synthetic construct
  source 1..19: mol_type = other RNA
gacacagaagggcgtgcag

SEQ ID NO: 19750 - RNA, 19 nt, synthetic construct
  source 1..19: mol_type = other RNA
agcgtgtggcagctccgga

SEQ ID NO: 19751 - RNA, 19 nt, synthetic construct
  source 1..19: mol_type = other RNA
cagcgtgtggcagctccgg

SEQ ID NO: 19752 - RNA, 19 nt, synthetic construct
  source 1..19: mol_type = other RNA
agctccggaggcactcggc

SEQ ID NO: 19753 - RNA, 19 nt, synthetic construct
  source 1..19: mol_type = other RNA
acacggatttcatagttga

SEQ ID NO: 19754 - RNA, 19 nt, synthetic construct
  source 1..19: mol_type = other RNA
ggcttgtacactttggtgg

SEQ ID NO: 19755 - RNA, 19 nt, synthetic construct
  source 1..19: mol_type = other RNA
acacggatttcatagttga

SEQ ID NO: 19756 - RNA, 19 nt, synthetic construct
  source 1..19: mol_type = other RNA
cagctccggaggcactcgg

SEQ ID NO: 19757 - RNA, 19 nt, synthetic construct
  source 1..19: mol_type = other RNA
ctgcacactccccgggcgc

SEQ ID NO: 19758 - RNA, 19 nt, synthetic construct
  source 1..19: mol_type = other RNA
agtggttccgtcccgctgg

SEQ ID NO: 19759 - RNA, 19 nt, synthetic construct
  source 1..19: mol_type = other RNA
acactttggtgggtgggca

SEQ ID NO: 19760 - RNA, 19 nt, synthetic construct
  source 1..19: mol_type = other RNA
ggccgccagagccaacacc

SEQ ID NO: 19761 - RNA, 19 nt, synthetic construct
  source 1..19: mol_type = other RNA
tggttccgtcccgctggag

SEQ ID NO: 19762 - RNA, 19 nt, synthetic construct
  source 1..19: mol_type = other RNA
ccagcgtgtggcagctccg

SEQ ID NO: 19763 - RNA, 19 nt, synthetic construct
  source 1..19: mol_type = other RNA
ggttccgtcccgctggaga

SEQ ID NO: 19764 - RNA, 19 nt, synthetic construct
  source 1..19: mol_type = other RNA
ggacacagaagggcgtgca

SEQ ID NO: 19765 - RNA, 19 nt, synthetic construct
  source 1..19: mol_type = other RNA
aggtgggacagcagtcgcc

SEQ ID NO: 19766 - RNA, 19 nt, synthetic construct
  source 1..19: mol_type = other RNA
tccgtcccgctggagacag

SEQ ID NO: 19767 - RNA, 19 nt, synthetic construct
  source 1..19: mol_type = other RNA
gtggacgagctgggaaccg

SEQ ID NO: 19768 - RNA, 19 nt, synthetic construct
  source 1..19: mol_type = other RNA
cacactccccgggcgcggc

SEQ ID NO: 19769 - RNA, 19 nt, synthetic construct
  source 1..19: mol_type = other RNA
aacgctgcaggtgacgtcg

SEQ ID NO: 19770 - RNA, 19 nt, synthetic construct
  source 1..19: mol_type = other RNA
tgatgacaacacgggtgac

SEQ ID NO: 19771 - RNA, 19 nt, synthetic construct
  source 1..19: mol_type = other RNA
ccgggctgtaggtgcggcc

SEQ ID NO: 19772 - RNA, 19 nt, synthetic construct
  source 1..19: mol_type = other RNA
ggggcagtggccgtagttg

SEQ ID NO: 19773 - RNA, 19 nt, synthetic construct
  source 1..19: mol_type = other RNA
cgtggtggtaagcactgtg

SEQ ID NO: 19774 - RNA, 19 nt, synthetic construct
  source 1..19: mol_type = other RNA
tggccgtggtggtaagcac

SEQ ID NO: 19775 - RNA, 19 nt, synthetic construct
  source 1..19: mol_type = other RNA
ggtagtcagcactttggta

SEQ ID NO: 19776 - RNA, 19 nt, synthetic construct
  source 1..19: mol_type = other RNA
ggttgtggtagtcagcact

SEQ ID NO: 19777 - RNA, 19 nt, synthetic construct
  source 1..19: mol_type = other RNA
tggttgtggtagtcagcac

SEQ ID NO: 19778 - RNA, 19 nt, synthetic construct
  source 1..19: mol_type = other RNA
ggggcagtggccgtagttg

SEQ ID NO: 19779 - RNA, 19 nt, synthetic construct
  source 1..19: mol_type = other RNA
cgtggtggtaagcactgtg

SEQ ID NO: 19780 - RNA, 19 nt, synthetic construct
  source 1..19: mol_type = other RNA
ggggcagtggccgtagttg

SEQ ID NO: 19781 - RNA, 19 nt, synthetic construct
  source 1..19: mol_type = other RNA
cgtggtggtaagcactgtg

SEQ ID NO: 19782 - RNA, 19 nt, synthetic construct
  source 1..19: mol_type = other RNA
tggccgtggtggtaagcac

SEQ ID NO: 19783 - RNA, 19 nt, synthetic construct
  source 1..19: mol_type = other RNA
ggggcagtggccgtagttg

SEQ ID NO: 19784 - RNA, 19 nt, synthetic construct
  source 1..19: mol_type = other RNA
tacacggtgcagttgtcca

SEQ ID NO: 19785 - RNA, 19 nt, synthetic construct
  source 1..19: mol_type = other RNA
ggtacacggtgcagttgtc

SEQ ID NO: 19786 - RNA, 19 nt, synthetic construct
  source 1..19: mol_type = other RNA
ggtgggacagcagtcgccc

SEQ ID NO: 19787 - RNA, 19 nt, synthetic construct
  source 1..19: mol_type = other RNA
agctctggcagttctccgc

SEQ ID NO: 19788 - RNA, 19 nt, synthetic construct
  source 1..19: mol_type = other RNA
ggaaacgctgcaggtgacg

SEQ ID NO: 19789 - RNA, 19 nt, synthetic construct
  source 1..19: mol_type = other RNA
ctggctcgggtccgacact

SEQ ID NO: 19790 - RNA, 19 nt, synthetic construct
  source 1..19: mol_type = other RNA
caaactccagtgcgtcccc

SEQ ID NO: 19791 - RNA, 19 nt, synthetic construct
  source 1..19: mol_type = other RNA
ccaaactccagtgcgtccc

SEQ ID NO: 19792 - RNA, 19 nt, synthetic construct
  source 1..19: mol_type = other RNA
tgtggtagtcagcactttg

SEQ ID NO: 19793 - RNA, 19 nt, synthetic construct
  source 1..19: mol_type = other RNA
ttccgtcccgctggagaca

SEQ ID NO: 19794 - RNA, 19 nt, synthetic construct
  source 1..19: mol_type = other RNA
gttccgtcccgctggagac

SEQ ID NO: 19795 - RNA, 19 nt, synthetic construct
  source 1..19: mol_type = other RNA
gacaacacgggtgaccaca

SEQ ID NO: 19796 - RNA, 19 nt, synthetic construct
  source 1..19: mol_type = other RNA
acaacacgggtgaccacag

SEQ ID NO: 19797 - RNA, 19 nt, synthetic construct
  source 1..19: mol_type = other RNA
ttttcggttgctgtggtct

SEQ ID NO: 19798 - RNA, 19 nt, synthetic construct
  source 1..19: mol_type = other RNA
gtggccgtagttgcagcag

SEQ ID NO: 19799 - RNA, 19 nt, synthetic construct
  source 1..19: mol_type = other RNA
gtggccgtagttgcagcag

SEQ ID NO: 19800 - RNA, 19 nt, synthetic construct
  source 1..19: mol_type = other RNA
gtggccgtagttgcagcag

SEQ ID NO: 19801 - RNA, 19 nt, synthetic construct
  source 1..19: mol_type = other RNA
gtggccgtagttgcagcag

SEQ ID NO: 19802 - RNA, 19 nt, synthetic construct
  source 1..19: mol_type = other RNA
tggccgtagttgcagcaga

SEQ ID NO: 19803 - RNA, 19 nt, synthetic construct
  source 1..19: mol_type = other RNA
cagtggccgtagttgcagc

SEQ ID NO: 19804 - RNA, 19 nt, synthetic construct
  source 1..19: mol_type = other RNA
tggccgtagttgcagcaga

SEQ ID NO: 19805 - RNA, 19 nt, synthetic construct
  source 1..19: mol_type = other RNA
aaacgctgcaggtgacgtc

SEQ ID NO: 19806 - RNA, 19 nt, synthetic construct
  source 1..19: mol_type = other RNA
gcagtggccgtagttgcag

SEQ ID NO: 19807 - RNA, 19 nt, synthetic construct
  source 1..19: mol_type = other RNA
gcagtggccgtagttgcag

SEQ ID NO: 19808 - RNA, 19 nt, synthetic construct
  source 1..19: mol_type = other RNA
gcagtggccgtagttgcag

SEQ ID NO: 19809 - RNA, 19 nt, synthetic construct
  source 1..19: mol_type = other RNA
gcagtggccgtagttgcag

SEQ ID NO: 19810 - RNA, 19 nt, synthetic construct
  source 1..19: mol_type = other RNA
tacagctctggcagttctc

SEQ ID NO: 19811 - RNA, 19 nt, synthetic construct
  source 1..19: mol_type = other RNA
tttcggttgctgtggtctg

SEQ ID NO: 19812 - RNA, 19 nt, synthetic construct
  source 1..19: mol_type = other RNA
aactccagtgcgtccccca

SEQ ID NO: 19813 - RNA, 19 nt, synthetic construct
  source 1..19: mol_type = other RNA
cagtggccgtagttgcagc

SEQ ID NO: 19814 - RNA, 19 nt, synthetic construct
  source 1..19: mol_type = other RNA
aaggaaacgctgcaggtga

SEQ ID NO: 19815 - RNA, 19 nt, synthetic construct
  source 1..19: mol_type = other RNA
caccgacgtcatagtagtt

SEQ ID NO: 19816 - RNA, 19 nt, synthetic construct
  source 1..19: mol_type = other RNA
ggccctgatcttatcgtag

SEQ ID NO: 19817 - RNA, 19 nt, synthetic construct
  source 1..19: mol_type = other RNA
tggccgtagttgcagcaga

SEQ ID NO: 19818 - RNA, 19 nt, synthetic construct
  source 1..19: mol_type = other RNA
cagtggccgtagttgcagc

SEQ ID NO: 19819 - RNA, 19 nt, synthetic construct
  source 1..19: mol_type = other RNA
gccaccggttgcacctcgc

SEQ ID NO: 19820 - RNA, 19 nt, synthetic construct
  source 1..19: mol_type = other RNA
atggtcgtgttgatgcgga

SEQ ID NO: 19821 - RNA, 19 nt, synthetic construct
  source 1..19: mol_type = other RNA
tggccgtagttgcagcaga

SEQ ID NO: 19822 - RNA, 19 nt, synthetic construct
  source 1..19: mol_type = other RNA
cagtggccgtagttgcagc

SEQ ID NO: 19823 - RNA, 19 nt, synthetic construct
  source 1..19: mol_type = other RNA
agaacccgcagctcgtagt

SEQ ID NO: 19824 - RNA, 19 nt, synthetic construct
  source 1..19: mol_type = other RNA
gcaccaaccccgtagaagg

SEQ ID NO: 19825 - RNA, 19 nt, synthetic construct
  source 1..19: mol_type = other RNA
cagagaacccgcagctcgt

SEQ ID NO: 19826 - RNA, 19 nt, synthetic construct
  source 1..19: mol_type = other RNA
agcaggacgacacggttgt

SEQ ID NO: 19827 - RNA, 19 nt, synthetic construct
  source 1..19: mol_type = other RNA
aaactccagtgcgtccccc

SEQ ID NO: 19828 - RNA, 19 nt, synthetic construct
  source 1..19: mol_type = other RNA
caccgctccccgggaaatt

SEQ ID NO: 19829 - RNA, 19 nt, synthetic construct
  source 1..19: mol_type = other RNA
gacgtcatagtagtttccg

SEQ ID NO: 19830 - RNA, 19 nt, synthetic construct
  source 1..19: mol_type = other RNA
cagtggttgcggtcgtagt

SEQ ID NO: 19831 - RNA, 19 nt, synthetic construct
  source 1..19: mol_type = other RNA
tggaacaaagctcacgcgc

SEQ ID NO: 19832 - RNA, 19 nt, synthetic construct
  source 1..19: mol_type = other RNA
ggacgacacggttgtcacc

SEQ ID NO: 19833 - RNA, 19 nt, synthetic construct
  source 1..19: mol_type = other RNA
tgagtggcgccctcccgaa

SEQ ID NO: 19834 - RNA, 19 nt, synthetic construct
  source 1..19: mol_type = other RNA
gacccttgcaccgacgtca

SEQ ID NO: 19835 - RNA, 19 nt, synthetic construct
  source 1..19: mol_type = other RNA
ggtggacagctcgctcgtg

SEQ ID NO: 19836 - RNA, 19 nt, synthetic construct
  source 1..19: mol_type = other RNA
tgtagcgtatcttgtaggg

SEQ ID NO: 19837 - RNA, 19 nt, synthetic construct
  source 1..19: mol_type = other RNA
tcacggttacgaagccggg

SEQ ID NO: 19838 - RNA, 19 nt, synthetic construct
  source 1..19: mol_type = other RNA
agcggccctgatcttatcg

SEQ ID NO: 19839 - RNA, 19 nt, synthetic construct
  source 1..19: mol_type = other RNA
caaagctcacgcgccgggt

SEQ ID NO: 19840 - RNA, 19 nt, synthetic construct
  source 1..19: mol_type = other RNA
ccagtggttgcggtcgtag

SEQ ID NO: 19841 - RNA, 19 nt, synthetic construct
  source 1..19: mol_type = other RNA
gccccgggctactcgtagg

SEQ ID NO: 19842 - RNA, 19 nt, synthetic construct
  source 1..19: mol_type = other RNA
cagctcgtagtcgtgacag

SEQ ID NO: 19843 - RNA, 19 nt, synthetic construct
  source 1..19: mol_type = other RNA
ggccgccttgcctgtcgca

SEQ ID NO: 19844 - RNA, 19 nt, synthetic construct
  source 1..19: mol_type = other RNA
gatccccatgtagcgtatc

SEQ ID NO: 19845 - RNA, 19 nt, synthetic construct
  source 1..19: mol_type = other RNA
cccttgcaccgacgtcata

SEQ ID NO: 19846 - RNA, 19 nt, synthetic construct
  source 1..19: mol_type = other RNA
ccccgggctactcgtaggc

SEQ ID NO: 19847 - RNA, 19 nt, synthetic construct
  source 1..19: mol_type = other RNA
agccccgggctactcgtag

SEQ ID NO: 19848 - RNA, 19 nt, synthetic construct
  source 1..19: mol_type = other RNA
acaaagctcacgcgccggg

SEQ ID NO: 19849 - RNA, 19 nt, synthetic construct
  source 1..19: mol_type = other RNA
ggatccagtggttgcggtc

SEQ ID NO: 19850 - RNA, 19 nt, synthetic construct
  source 1..19: mol_type = other RNA
tgagtacttggacgctccg

SEQ ID NO: 19851 - RNA, 19 nt, synthetic construct
  source 1..19: mol_type = other RNA
cctcactcaggccgcggca

SEQ ID NO: 19852 - RNA, 19 nt, synthetic construct
  source 1..19: mol_type = other RNA
acctggccgttgcgacctc

SEQ ID NO: 19853 - RNA, 19 nt, synthetic construct
  source 1..19: mol_type = other RNA
tggatccagtggttgcggt

SEQ ID NO: 19854 - RNA, 19 nt, synthetic construct
  source 1..19: mol_type = other RNA
acatgaacacacggcgccc

SEQ ID NO: 19855 - RNA, 19 nt, synthetic construct
  source 1..19: mol_type = other RNA
cgcagtcgccacccgagtc

SEQ ID NO: 19856 - RNA, 19 nt, synthetic construct
  source 1..19: mol_type = other RNA
tccagtggttgcggtcgta

SEQ ID NO: 19857 - RNA, 19 nt, synthetic construct
  source 1..19: mol_type = other RNA
acacgccgccgtccgcttg

SEQ ID NO: 19858 - RNA, 19 nt, synthetic construct
  source 1..19: mol_type = other RNA
gttgaggaacacgccgccg

SEQ ID NO: 19859 - RNA, 19 nt, synthetic construct
  source 1..19: mol_type = other RNA
tacatgaacacacggcgcc

SEQ ID NO: 19860 - RNA, 19 nt, synthetic construct
  source 1..19: mol_type = other RNA
tcttggaggatcagctcgt

SEQ ID NO: 19861 - RNA, 19 nt, synthetic construct
  source 1..19: mol_type = other RNA
agctcgctcgtgagtgttg

SEQ ID NO: 19862 - RNA, 19 nt, synthetic construct
  source 1..19: mol_type = other RNA
agggggtcaccgtggaacc

SEQ ID NO: 19863 - RNA, 19 nt, synthetic construct
  source 1..19: mol_type = other RNA
aggccgtgcagtagtggtt

SEQ ID NO: 19864 - RNA, 19 nt, synthetic construct
  source 1..19: mol_type = other RNA
acagtgaggacgatatcca

SEQ ID NO: 19865 - RNA, 19 nt, synthetic construct
  source 1..19: mol_type = other RNA
tgctgagtacttggacgct

SEQ ID NO: 19866 - RNA, 19 nt, synthetic construct
  source 1..19: mol_type = other RNA
gttggcgtatttgggatcc

SEQ ID NO: 19867 - RNA, 19 nt, synthetic construct
  source 1..19: mol_type = other RNA
gcaggtcgtagagtttctc

SEQ ID NO: 19868 - RNA, 19 nt, synthetic construct
  source 1..19: mol_type = other RNA
ggaacacgccgccgtccgc

SEQ ID NO: 19869 - RNA, 19 nt, synthetic construct
  source 1..19: mol_type = other RNA
caaacacctgcatgagtgg

SEQ ID NO: 19870 - RNA, 19 nt, synthetic construct
  source 1..19: mol_type = other RNA
aaggcactgttgggatcgg

SEQ ID NO: 19871 - RNA, 19 nt, synthetic construct
  source 1..19: mol_type = other RNA
gcatccaccacgtaggcgt

SEQ ID NO: 19872 - RNA, 19 nt, synthetic construct
  source 1..19: mol_type = other RNA
atgacgtcctggtagctgt

SEQ ID NO: 19873 - RNA, 19 nt, synthetic construct
  source 1..19: mol_type = other RNA
gcctcaggttttcaaacgt

SEQ ID NO: 19874 - RNA, 19 nt, synthetic construct
  source 1..19: mol_type = other RNA
cacatcttgaagacgccct

SEQ ID NO: 19875 - RNA, 19 nt, synthetic construct
  source 1..19: mol_type = other RNA
ggcggggttgtggcacgtc

SEQ ID NO: 19876 - RNA, 19 nt, synthetic construct
  source 1..19: mol_type = other RNA
tcccgtggtggctgtacca

SEQ ID NO: 19877 - RNA, 19 nt, synthetic construct
  source 1..19: mol_type = other RNA
gtctgtgataggcgggtcc

SEQ ID NO: 19878 - RNA, 19 nt, synthetic construct
  source 1..19: mol_type = other RNA
cctccggccgcacggatgt

SEQ ID NO: 19879 - RNA, 19 nt, synthetic construct
  source 1..19: mol_type = other RNA
gtctgtgataggcgggtcc

SEQ ID NO: 19880 - RNA, 19 nt, synthetic construct
  source 1..19: mol_type = other RNA
cctccggccgcacggatgt

SEQ ID NO: 19881 - RNA, 19 nt, synthetic construct
  source 1..19: mol_type = other RNA
gtggttgcggtcgtagtgg

SEQ ID NO: 19882 - RNA, 19 nt, synthetic construct
  source 1..19: mol_type = other RNA
gtctgtgataggcgggtcc

SEQ ID NO: 19883 - RNA, 19 nt, synthetic construct
  source 1..19: mol_type = other RNA
cctccggccgcacggatgt

SEQ ID NO: 19884 - RNA, 19 nt, synthetic construct
  source 1..19: mol_type = other RNA
gtctgtgataggcgggtcc

SEQ ID NO: 19885 - RNA, 19 nt, synthetic construct
  source 1..19: mol_type = other RNA
cacactggaggcgtgcgtg

SEQ ID NO: 19886 - RNA, 19 nt, synthetic construct
  source 1..19: mol_type = other RNA
cctccggccgcacggatgt

SEQ ID NO: 19887 - RNA, 19 nt, synthetic construct
  source 1..19: mol_type = other RNA
gtctgtgataggcgggtcc

SEQ ID NO: 19888 - RNA, 19 nt, synthetic construct
  source 1..19: mol_type = other RNA
tggaattggtggcccttgt

SEQ ID NO: 19889 - RNA, 19 nt, synthetic construct
  source 1..19: mol_type = other RNA
gcggtggccgtggaaccgg

SEQ ID NO: 19890 - RNA, 19 nt, synthetic construct
  source 1..19: mol_type = other RNA
ctgattgcacactgcgtag

SEQ ID NO: 19891 - RNA, 19 nt, synthetic construct
  source 1..19: mol_type = other RNA
agattcccaaagcgtgcat

SEQ ID NO: 19892 - RNA, 19 nt, synthetic construct
  source 1..19: mol_type = other RNA
gcagaggccgtgcagtagt

SEQ ID NO: 19893 - RNA, 19 nt, synthetic construct
  source 1..19: mol_type = other RNA
gcttgcactgcaccgacac

SEQ ID NO: 19894 - RNA, 19 nt, synthetic construct
  source 1..19: mol_type = other RNA
ggcttgcactgcaccgaca

SEQ ID NO: 19895 - RNA, 19 nt, synthetic construct
  source 1..19: mol_type = other RNA
ggatggtcgtgttgatgcg

SEQ ID NO: 19896 - RNA, 19 nt, synthetic construct
  source 1..19: mol_type = other RNA
ctcggcgtagctggacgtt

SEQ ID NO: 19897 - RNA, 19 nt, synthetic construct
  source 1..19: mol_type = other RNA
cacggtgccgtgagcgtag

SEQ ID NO: 19898 - RNA, 19 nt, synthetic construct
  source 1..19: mol_type = other RNA
gaactcgttgaaggccggg

SEQ ID NO: 19899 - RNA, 19 nt, synthetic construct
  source 1..19: mol_type = other RNA
tgggccaagatgtactcgc

SEQ ID NO: 19900 - RNA, 19 nt, synthetic construct
  source 1..19: mol_type = other RNA
aggcggtggccgtggaacc

SEQ ID NO: 19901 - RNA, 19 nt, synthetic construct
  source 1..19: mol_type = other RNA
caggctgtatggggccgca

SEQ ID NO: 19902 - RNA, 19 nt, synthetic construct
  source 1..19: mol_type = other RNA
atgggtgtaaagctggtag

SEQ ID NO: 19903 - RNA, 19 nt, synthetic construct
  source 1..19: mol_type = other RNA
atgggtgtaaagctggtag

SEQ ID NO: 19904 - RNA, 19 nt, synthetic construct
  source 1..19: mol_type = other RNA
cggtgccgtgagcgtagca

SEQ ID NO: 19905 - RNA, 19 nt, synthetic construct
  source 1..19: mol_type = other RNA
tagcttcccacccgtacat

SEQ ID NO: 19906 - RNA, 19 nt, synthetic construct
  source 1..19: mol_type = other RNA
ggggatgggtgtaacgctg

SEQ ID NO: 19907 - RNA, 19 nt, synthetic construct
  source 1..19: mol_type = other RNA
ggggatgggtgtaacgctg

SEQ ID NO: 19908 - RNA, 19 nt, synthetic construct
  source 1..19: mol_type = other RNA
aaggccgggaggccgttga

SEQ ID NO: 19909 - RNA, 19 nt, synthetic construct
  source 1..19: mol_type = other RNA
gggggacagggatcgcccg

SEQ ID NO: 19910 - RNA, 19 nt, synthetic construct
  source 1..19: mol_type = other RNA
gggggacagggatcgcccg

SEQ ID NO: 19911 - RNA, 19 nt, synthetic construct
  source 1..19: mol_type = other RNA
gacacataggcccgcacat

SEQ ID NO: 19912 - RNA, 19 nt, synthetic construct
  source 1..19: mol_type = other RNA
agcctggcgttgtgggcat

SEQ ID NO: 19913 - RNA, 19 nt, synthetic construct
  source 1..19: mol_type = other RNA
gagtaggtgtcaaagtccc

SEQ ID NO: 19914 - RNA, 19 nt, synthetic construct
  source 1..19: mol_type = other RNA
gagtaggtgtcaaagtccc

SEQ ID NO: 19915 - RNA, 19 nt, synthetic construct
  source 1..19: mol_type = other RNA
gagtaggtgtcaaagtccc

SEQ ID NO: 19916 - RNA, 19 nt, synthetic construct
  source 1..19: mol_type = other RNA
gagtaggtgtcaaagtccc

SEQ ID NO: 19917 - RNA, 19 nt, synthetic construct
  source 1..19: mol_type = other RNA
tagaactcgttgaaggccg

SEQ ID NO: 19918 - RNA, 19 nt, synthetic construct
  source 1..19: mol_type = other RNA
aagggggtgactcggtggt

SEQ ID NO: 19919 - RNA, 19 nt, synthetic construct
  source 1..19: mol_type = other RNA
aagggggtgactcggtggt

SEQ ID NO: 19920 - RNA, 19 nt, synthetic construct
  source 1..19: mol_type = other RNA
aagggggtgactcggtggt

SEQ ID NO: 19921 - RNA, 19 nt, synthetic construct
  source 1..19: mol_type = other RNA
acccgcagctcgtagtcgt

SEQ ID NO: 19922 - RNA, 19 nt, synthetic construct
  source 1..19: mol_type = other RNA
tagggtggtcttttcggtt

SEQ ID NO: 19923 - RNA, 19 nt, synthetic construct
  source 1..19: mol_type = other RNA
gggacagggatcgcccgtg

SEQ ID NO: 19924 - RNA, 19 nt, synthetic construct
  source 1..19: mol_type = other RNA
gggacagggatcgcccgtg

SEQ ID NO: 19925 - RNA, 19 nt, synthetic construct
  source 1..19: mol_type = other RNA
ctggcggcagtggttccgt

SEQ ID NO: 19926 - RNA, 19 nt, synthetic construct
  source 1..19: mol_type = other RNA
actggcggcagtggttccg

SEQ ID NO: 19927 - RNA, 19 nt, synthetic construct
  source 1..19: mol_type = other RNA
gtgggcaggtgaggtcgca

SEQ ID NO: 19928 - RNA, 19 nt, synthetic construct
  source 1..19: mol_type = other RNA
tccagtcgctgagctgtac

SEQ ID NO: 19929 - RNA, 19 nt, synthetic construct
  source 1..19: mol_type = other RNA
ccgtacatgaacacacggc

SEQ ID NO: 19930 - RNA, 19 nt, synthetic construct
  source 1..19: mol_type = other RNA
agtttccgtccttgtcgta

SEQ ID NO: 19931 - RNA, 19 nt, synthetic construct
  source 1..19: mol_type = other RNA
acgcacaccgtctcggggc

SEQ ID NO: 19932 - RNA, 19 nt, synthetic construct
  source 1..19: mol_type = other RNA
gggccggtttcacccacgg

SEQ ID NO: 19933 - RNA, 19 nt, synthetic construct
  source 1..19: mol_type = other RNA
gacgttgaagtcctcgtag

SEQ ID NO: 19934 - RNA, 19 nt, synthetic construct
  source 1..19: mol_type = other RNA
ggacgttgaagtcctcgta

SEQ ID NO: 19935 - RNA, 19 nt, synthetic construct
  source 1..19: mol_type = other RNA
acgttgaagtcctcgtagg

SEQ ID NO: 19936 - RNA, 19 nt, synthetic construct
  source 1..19: mol_type = other RNA
gcacactgcgtagaaatgg

SEQ ID NO: 19937 - RNA, 19 nt, synthetic construct
  source 1..19: mol_type = other RNA
gcactgcaccgacactgaa

SEQ ID NO: 19938 - RNA, 19 nt, synthetic construct
  source 1..19: mol_type = other RNA
cggccgccttgcctgtcgc

SEQ ID NO: 19939 - RNA, 19 nt, synthetic construct
  source 1..19: mol_type = other RNA
tagcgtatcttgtagggtg

SEQ ID NO: 19940 - RNA, 19 nt, synthetic construct
  source 1..19: mol_type = other RNA
aacccatcgggtcccacgc

SEQ ID NO: 19941 - RNA, 19 nt, synthetic construct
  source 1..19: mol_type = other RNA
gacacggttgtcacccacg

SEQ ID NO: 19942 - RNA, 19 nt, synthetic construct
  source 1..19: mol_type = other RNA
gtgcgtggcactccgcaaa

SEQ ID NO: 19943 - RNA, 19 nt, synthetic construct
  source 1..19: mol_type = other RNA
taggcccgcacatgcttag

SEQ ID NO: 19944 - RNA, 19 nt, synthetic construct
  source 1..19: mol_type = other RNA
ccgggcgagaaaaactgtc

SEQ ID NO: 19945 - RNA, 19 nt, synthetic construct
  source 1..19: mol_type = other RNA
ccccgggcgagaaaaactg

SEQ ID NO: 19946 - RNA, 19 nt, synthetic construct
  source 1..19: mol_type = other RNA
ccaccggttgcacctcgcc

SEQ ID NO: 19947 - RNA, 19 nt, synthetic construct
  source 1..19: mol_type = other RNA
ggtcgtgttgatgcggact

SEQ ID NO: 19948 - RNA, 19 nt, synthetic construct
  source 1..19: mol_type = other RNA
ggcccgcacatgcttagtt

SEQ ID NO: 19949 - RNA, 19 nt, synthetic construct
  source 1..19: mol_type = other RNA
gtagatgacgtcctggtag

SEQ ID NO: 19950 - RNA, 19 nt, synthetic construct
  source 1..19: mol_type = other RNA
cggtcggtcttattgtaga

SEQ ID NO: 19951 - RNA, 19 nt, synthetic construct
  source 1..19: mol_type = other RNA
gacgggatggccgtggatc

SEQ ID NO: 19952 - RNA, 19 nt, synthetic construct
  source 1..19: mol_type = other RNA
gtgaccgtcacggggcctg

SEQ ID NO: 19953 - RNA, 19 nt, synthetic construct
  source 1..19: mol_type = other RNA
cacgccgccgtccgcttgg

SEQ ID NO: 19954 - RNA, 19 nt, synthetic construct
  source 1..19: mol_type = other RNA
cacgtattcgcagcagaga

SEQ ID NO: 19955 - RNA, 19 nt, synthetic construct
  source 1..19: mol_type = other RNA
ggccgttgcgacctcagcc

SEQ ID NO: 19956 - RNA, 19 nt, synthetic construct
  source 1..19: mol_type = other RNA
atggcgatcaagcaggcgc

SEQ ID NO: 19957 - RNA, 19 nt, synthetic construct
  source 1..19: mol_type = other RNA
gcgtgttggaagggtggat

SEQ ID NO: 19958 - RNA, 19 nt, synthetic construct
  source 1..19: mol_type = other RNA
ggtgtaacgctggtagctg

SEQ ID NO: 19959 - RNA, 19 nt, synthetic construct
  source 1..19: mol_type = other RNA
gtgatcgtagtggccgtgg

SEQ ID NO: 19960 - RNA, 19 nt, synthetic construct
  source 1..19: mol_type = other RNA
gtgatcgtagtggccgtgg

SEQ ID NO: 19961 - RNA, 19 nt, synthetic construct
  source 1..19: mol_type = other RNA
gtgatcgtagtggccgtgg

SEQ ID NO: 19962 - RNA, 19 nt, synthetic construct
  source 1..19: mol_type = other RNA
gaggcgtgcgtgccgtccc

SEQ ID NO: 19963 - RNA, 19 nt, synthetic construct
  source 1..19: mol_type = other RNA
gtgatcgtagtggccgtgg

SEQ ID NO: 19964 - RNA, 19 nt, synthetic construct
  source 1..19: mol_type = other RNA
ggtgtaacgctggtagctg

SEQ ID NO: 19965 - RNA, 19 nt, synthetic construct
  source 1..19: mol_type = other RNA
gtgatcgtagtggccgtgg

SEQ ID NO: 19966 - RNA, 19 nt, synthetic construct
  source 1..19: mol_type = other RNA
cagtcggatgaacacgctg

SEQ ID NO: 19967 - RNA, 19 nt, synthetic construct
  source 1..19: mol_type = other RNA
cccccgcatgcggtcacag

SEQ ID NO: 19968 - RNA, 19 nt, synthetic construct
  source 1..19: mol_type = other RNA
ggtcgtcactgcagcagag

SEQ ID NO: 19969 - RNA, 19 nt, synthetic construct
  source 1..19: mol_type = other RNA
ggaatagtgggagccgccc

SEQ ID NO: 19970 - RNA, 19 nt, synthetic construct
  source 1..19: mol_type = other RNA
aaagcgtgcatggatctct

SEQ ID NO: 19971 - RNA, 19 nt, synthetic construct
  source 1..19: mol_type = other RNA
cacagggcacgtattcgca

SEQ ID NO: 19972 - RNA, 19 nt, synthetic construct
  source 1..19: mol_type = other RNA
gcgtggcactccgcaaagg

SEQ ID NO: 19973 - RNA, 19 nt, synthetic construct
  source 1..19: mol_type = other RNA
ggctatagtgctcggctct

SEQ ID NO: 19974 - RNA, 19 nt, synthetic construct
  source 1..19: mol_type = other RNA
ccaccgccttaaaggtccc

SEQ ID NO: 19975 - RNA, 19 nt, synthetic construct
  source 1..19: mol_type = other RNA
tggctgtgatcgtagtggc

SEQ ID NO: 19976 - RNA, 19 nt, synthetic construct
  source 1..19: mol_type = other RNA
ccgtgaagtcgtcagcctg

SEQ ID NO: 19977 - RNA, 19 nt, synthetic construct
  source 1..19: mol_type = other RNA
gcgatcgccatcaaaggtg

SEQ ID NO: 19978 - RNA, 19 nt, synthetic construct
  source 1..19: mol_type = other RNA
tctcgccaccgccttaaag

SEQ ID NO: 19979 - RNA, 19 nt, synthetic construct
  source 1..19: mol_type = other RNA
gtcgaccggatgctcgggg

SEQ ID NO: 19980 - RNA, 19 nt, synthetic construct
  source 1..19: mol_type = other RNA
gtggtcgtcactgcagcag

SEQ ID NO: 19981 - RNA, 19 nt, synthetic construct
  source 1..19: mol_type = other RNA
gttgtggcacgtcccctgc

SEQ ID NO: 19982 - RNA, 19 nt, synthetic construct
  source 1..19: mol_type = other RNA
gcggggttgtggcacgtcc

SEQ ID NO: 19983 - RNA, 19 nt, synthetic construct
  source 1..19: mol_type = other RNA
ctgtgataggcgggtccag

SEQ ID NO: 19984 - RNA, 19 nt, synthetic construct
  source 1..19: mol_type = other RNA
ggatcgcccgtgtgtggtg

SEQ ID NO: 19985 - RNA, 19 nt, synthetic construct
  source 1..19: mol_type = other RNA
ggatccggtgggcaccgtc

SEQ ID NO: 19986 - RNA, 19 nt, synthetic construct
  source 1..19: mol_type = other RNA
ctgtgataggcgggtccag

SEQ ID NO: 19987 - RNA, 19 nt, synthetic construct
  source 1..19: mol_type = other RNA
ggatcgcccgtgtgtggtg

SEQ ID NO: 19988 - RNA, 19 nt, synthetic construct
  source 1..19: mol_type = other RNA
gttattggggccgatgtgg

SEQ ID NO: 19989 - RNA, 19 nt, synthetic construct
  source 1..19: mol_type = other RNA
ggatccggtgggcaccgtc

SEQ ID NO: 19990 - RNA, 19 nt, synthetic construct
  source 1..19: mol_type = other RNA
ctgtgataggcgggtccag

SEQ ID NO: 19991 - RNA, 19 nt, synthetic construct
  source 1..19: mol_type = other RNA
gaccgcccgtgtgtggtgg

SEQ ID NO: 19992 - RNA, 19 nt, synthetic construct
  source 1..19: mol_type = other RNA
tgaacacgctggtcttccg

SEQ ID NO: 19993 - RNA, 19 nt, synthetic construct
  source 1..19: mol_type = other RNA
gccccggaaggtgtaagag

SEQ ID NO: 19994 - RNA, 19 nt, synthetic construct
  source 1..19: mol_type = other RNA
ggcggtctggacgcactcc

SEQ ID NO: 19995 - RNA, 19 nt, synthetic construct
  source 1..19: mol_type = other RNA
aggcccgcacatgcttagt

SEQ ID NO: 19996 - RNA, 19 nt, synthetic construct
  source 1..19: mol_type = other RNA
ctgcggcaccacgagcatg

SEQ ID NO: 19997 - RNA, 19 nt, synthetic construct
  source 1..19: mol_type = other RNA
ggagttgaggaacacgccg

SEQ ID NO: 19998 - RNA, 19 nt, synthetic construct
  source 1..19: mol_type = other RNA
gtgccgtgagcgtagcagg

SEQ ID NO: 19999 - RNA, 19 nt, synthetic construct
  source 1..19: mol_type = other RNA
cgtcgtgcaccacctctcc

SEQ ID NO: 20000 - RNA, 19 nt, synthetic construct
  source 1..19: mol_type = other RNA
tgcagtcggatgaacacgc

SEQ ID NO: 20001 - RNA, 19 nt, synthetic construct
  source 1..19: mol_type = other RNA
gttgcttccgcagatggcg

SEQ ID NO: 20002 - RNA, 19 nt, synthetic construct
  source 1..19: mol_type = other RNA
tcgcggacacacacggtgg

SEQ ID NO: 20003 - RNA, 19 nt, synthetic construct
  source 1..19: mol_type = other RNA
cagcggcatgtcgggaagc

SEQ ID NO: 20004 - RNA, 19 nt, synthetic construct
  source 1..19: mol_type = other RNA
ccaccgtggttatgggggc

SEQ ID NO: 20005 - RNA, 19 nt, synthetic construct
  source 1..19: mol_type = other RNA
ggggataggtgttgtccct

SEQ ID NO: 20006 - RNA, 19 nt, synthetic construct
  source 1..19: mol_type = other RNA
ccaccgtggttatgggggc

SEQ ID NO: 20007 - RNA, 19 nt, synthetic construct
  source 1..19: mol_type = other RNA
ggggataggtgttgtccct

SEQ ID NO: 20008 - RNA, 19 nt, synthetic construct
  source 1..19: mol_type = other RNA
ccaccgtggttatgggggc

SEQ ID NO: 20009 - RNA, 19 nt, synthetic construct
  source 1..19: mol_type = other RNA
accgacactgaaccctcgt

SEQ ID NO: 20010 - RNA, 19 nt, synthetic construct
  source 1..19: mol_type = other RNA
ggatccggtgggcaccgtc

SEQ ID NO: 20011 - RNA, 19 nt, synthetic construct
  source 1..19: mol_type = other RNA
ctgtgataggcgggtccag

SEQ ID NO: 20012 - RNA, 19 nt, synthetic construct
  source 1..19: mol_type = other RNA
ggatcgcccgtgtgtggtg

SEQ ID NO: 20013 - RNA, 19 nt, synthetic construct
  source 1..19: mol_type = other RNA
ggatccggtgggcaccgtc

SEQ ID NO: 20014 - RNA, 19 nt, synthetic construct
  source 1..19: mol_type = other RNA
cggtttcacccacggggtg

SEQ ID NO: 20015 - RNA, 19 nt, synthetic construct
  source 1..19: mol_type = other RNA
atagtagtttccgtccttg

SEQ ID NO: 20016 - RNA, 19 nt, synthetic construct
  source 1..19: mol_type = other RNA
tccggccgcacggatgttg

SEQ ID NO: 20017 - RNA, 19 nt, synthetic construct
  source 1..19: mol_type = other RNA
tccggccgcacggatgttg

SEQ ID NO: 20018 - RNA, 19 nt, synthetic construct
  source 1..19: mol_type = other RNA
tccggccgcacggatgttg

SEQ ID NO: 20019 - RNA, 19 nt, synthetic construct
  source 1..19: mol_type = other RNA
tccggccgcacggatgttg

SEQ ID NO: 20020 - RNA, 19 nt, synthetic construct
  source 1..19: mol_type = other RNA
ctgtgataggcgggtccag

SEQ ID NO: 20021 - RNA, 19 nt, synthetic construct
  source 1..19: mol_type = other RNA
gccgtgatcgtagtggccg

SEQ ID NO: 20022 - RNA, 19 nt, synthetic construct
  source 1..19: mol_type = other RNA
gccgtgatcgtagtggccg

SEQ ID NO: 20023 - RNA, 19 nt, synthetic construct
  source 1..19: mol_type = other RNA
gccgtgatcgtagtggccg

SEQ ID NO: 20024 - RNA, 19 nt, synthetic construct
  source 1..19: mol_type = other RNA
gccgtgatcgtagtggccg

SEQ ID NO: 20025 - RNA, 19 nt, synthetic construct
  source 1..19: mol_type = other RNA
cctctcgccaccgccttaa

SEQ ID NO: 20026 - RNA, 19 nt, synthetic construct
  source 1..19: mol_type = other RNA
ggccgcatggcttgtacac

SEQ ID NO: 20027 - RNA, 19 nt, synthetic construct
  source 1..19: mol_type = other RNA
agccgggacggttgcacgg

SEQ ID NO: 20028 - RNA, 19 nt, synthetic construct
  source 1..19: mol_type = other RNA
aagccgggacggttgcacg

SEQ ID NO: 20029 - RNA, 19 nt, synthetic construct
  source 1..19: mol_type = other RNA
tggacagctcgctcgtgag

SEQ ID NO: 20030 - RNA, 19 nt, synthetic construct
  source 1..19: mol_type = other RNA
gatccagtggttgcggtcg

SEQ ID NO: 20031 - RNA, 19 nt, synthetic construct
  source 1..19: mol_type = other RNA
cccgtggttgtggtagtcg

SEQ ID NO: 20032 - RNA, 19 nt, synthetic construct
  source 1..19: mol_type = other RNA
cccgtggttgtggtagtcg

SEQ ID NO: 20033 - RNA, 19 nt, synthetic construct
  source 1..19: mol_type = other RNA
gactgtgaagcccgtggtt

SEQ ID NO: 20034 - RNA, 19 nt, synthetic construct
  source 1..19: mol_type = other RNA
cccgtggttgtggtagtcg

SEQ ID NO: 20035 - RNA, 19 nt, synthetic construct
  source 1..19: mol_type = other RNA
ccctctcgccaccgcctta

SEQ ID NO: 20036 - RNA, 19 nt, synthetic construct
  source 1..19: mol_type = other RNA
ctggggggataggtgttgt

SEQ ID NO: 20037 - RNA, 19 nt, synthetic construct
  source 1..19: mol_type = other RNA
ctggggggataggtgttgt

SEQ ID NO: 20038 - RNA, 19 nt, synthetic construct
  source 1..19: mol_type = other RNA
agaactcgttgaaggccgg

SEQ ID NO: 20039 - RNA, 19 nt, synthetic construct
  source 1..19: mol_type = other RNA
aacacgccgccgtccgctt

SEQ ID NO: 20040 - RNA, 19 nt, synthetic construct
  source 1..19: mol_type = other RNA
tgatggtgccgttgcttcc

SEQ ID NO: 20041 - RNA, 19 nt, synthetic construct
  source 1..19: mol_type = other RNA
caggccgaagtggacgtca

SEQ ID NO: 20042 - RNA, 19 nt, synthetic construct
  source 1..19: mol_type = other RNA
gggtcgaggtgcgggtctt

SEQ ID NO: 20043 - RNA, 19 nt, synthetic construct
  source 1..19: mol_type = other RNA
gggtcgaggtgcgggtctt

SEQ ID NO: 20044 - RNA, 19 nt, synthetic construct
  source 1..19: mol_type = other RNA
gggtcgaggtgcgggtctt

SEQ ID NO: 20045 - RNA, 19 nt, synthetic construct
  source 1..19: mol_type = other RNA
gggtcgaggtgcgggtctt

SEQ ID NO: 20046 - RNA, 19 nt, synthetic construct
  source 1..19: mol_type = other RNA
tgccattgtacgaacacag

SEQ ID NO: 20047 - RNA, 19 nt, synthetic construct
  source 1..19: mol_type = other RNA
tgccatagccccccggagc

SEQ ID NO: 20048 - RNA, 19 nt, synthetic construct
  source 1..19: mol_type = other RNA
ttgatggcattgtcgtcga

SEQ ID NO: 20049 - RNA, 19 nt, synthetic construct
  source 1..19: mol_type = other RNA
catagtagtttccgtcctt

SEQ ID NO: 20050 - RNA, 19 nt, synthetic construct
  source 1..19: mol_type = other RNA
gatgggtgtaacgctggta

SEQ ID NO: 20051 - RNA, 19 nt, synthetic construct
  source 1..19: mol_type = other RNA
tgtgctagaggagggtgtt

SEQ ID NO: 20052 - RNA, 19 nt, synthetic construct
  source 1..19: mol_type = other RNA
tggttatgggggccgatgt

SEQ ID NO: 20053 - RNA, 19 nt, synthetic construct
  source 1..19: mol_type = other RNA
ggcatggggtagctgtagt

SEQ ID NO: 20054 - RNA, 19 nt, synthetic construct
  source 1..19: mol_type = other RNA
aggtgtcaaagtccccgcc

SEQ ID NO: 20055 - RNA, 19 nt, synthetic construct
  source 1..19: mol_type = other RNA
tgtgctagaggagggtgtt

SEQ ID NO: 20056 - RNA, 19 nt, synthetic construct
  source 1..19: mol_type = other RNA
ggcatggggtagctgtagt

SEQ ID NO: 20057 - RNA, 19 nt, synthetic construct
  source 1..19: mol_type = other RNA
aggtgtcaaagtccccgcc

SEQ ID NO: 20058 - RNA, 19 nt, synthetic construct
  source 1..19: mol_type = other RNA
gtggatccagtggttgcgg

SEQ ID NO: 20059 - RNA, 19 nt, synthetic construct
  source 1..19: mol_type = other RNA
tggctgtaacgctggtagc

SEQ ID NO: 20060 - RNA, 19 nt, synthetic construct
  source 1..19: mol_type = other RNA
tgtgctagaggagggtgtt

SEQ ID NO: 20061 - RNA, 19 nt, synthetic construct
  source 1..19: mol_type = other RNA
gggcagggaccgcccgtgt

SEQ ID NO: 20062 - RNA, 19 nt, synthetic construct
  source 1..19: mol_type = other RNA
tggttatgggggccgatgt

SEQ ID NO: 20063 - RNA, 19 nt, synthetic construct
  source 1..19: mol_type = other RNA
ggcatggggtagctgtagt

SEQ ID NO: 20064 - RNA, 19 nt, synthetic construct
  source 1..19: mol_type = other RNA
aggtgtcaaagtccccgcc

SEQ ID NO: 20065 - RNA, 19 nt, synthetic construct
  source 1..19: mol_type = other RNA
tgtgctagaggagggtgtt

SEQ ID NO: 20066 - RNA, 19 nt, synthetic construct
  source 1..19: mol_type = other RNA
tggttatgggggccgatgt

SEQ ID NO: 20067 - RNA, 19 nt, synthetic construct
  source 1..19: mol_type = other RNA
ggcatggggtagctgtagt

SEQ ID NO: 20068 - RNA, 19 nt, synthetic construct
  source 1..19: mol_type = other RNA
aggtgtcaaagtccccgcc

SEQ ID NO: 20069 - RNA, 19 nt, synthetic construct
  source 1..19: mol_type = other RNA
gatgggtgtaacgctggta

SEQ ID NO: 20070 - RNA, 19 nt, synthetic construct
  source 1..19: mol_type = other RNA
tgtgctagaggagggtgtt

SEQ ID NO: 20071 - RNA, 19 nt, synthetic construct
  source 1..19: mol_type = other RNA
accatcacggtggctatag

SEQ ID NO: 20072 - RNA, 19 nt, synthetic construct
  source 1..19: mol_type = other RNA
ggcccgggggcacaaggtt

SEQ ID NO: 20073 - RNA, 19 nt, synthetic construct
  source 1..19: mol_type = other RNA
caggcgttgaagaatgggc

SEQ ID NO: 20074 - RNA, 19 nt, synthetic construct
  source 1..19: mol_type = other RNA
ccctcgtcacacacgcagg

SEQ ID NO: 20075 - RNA, 19 nt, synthetic construct
  source 1..19: mol_type = other RNA
ccccgtagaaggtgccatt

SEQ ID NO: 20076 - RNA, 19 nt, synthetic construct
  source 1..19: mol_type = other RNA
cagcaggacgacacggttg

SEQ ID NO: 20077 - RNA, 19 nt, synthetic construct
  source 1..19: mol_type = other RNA
actgcaccgacactgaacc

SEQ ID NO: 20078 - RNA, 19 nt, synthetic construct
  source 1..19: mol_type = other RNA
ggggcagggatcgcccgtg

SEQ ID NO: 20079 - RNA, 19 nt, synthetic construct
  source 1..19: mol_type = other RNA
ttccccgggcgagaaaaac

SEQ ID NO: 20080 - RNA, 19 nt, synthetic construct
  source 1..19: mol_type = other RNA
tgaaccctcgtcacacacg

SEQ ID NO: 20081 - RNA, 19 nt, synthetic construct
  source 1..19: mol_type = other RNA
agtcgagtgctgggtggta

SEQ ID NO: 20082 - RNA, 19 nt, synthetic construct
  source 1..19: mol_type = other RNA
agtcgagtgctgggtggta

SEQ ID NO: 20083 - RNA, 19 nt, synthetic construct
  source 1..19: mol_type = other RNA
agtcgagtgctgggtggta

SEQ ID NO: 20084 - RNA, 19 nt, synthetic construct
  source 1..19: mol_type = other RNA
agtcgagtgctgggtggta

SEQ ID NO: 20085 - RNA, 19 nt, synthetic construct
  source 1..19: mol_type = other RNA
acagctcgctcgtgagtgt

SEQ ID NO: 20086 - RNA, 19 nt, synthetic construct
  source 1..19: mol_type = other RNA
agtcggatgaacacgctgg

SEQ ID NO: 20087 - RNA, 19 nt, synthetic construct
  source 1..19: mol_type = other RNA
ggaagcgtgcgtgccgtcc

SEQ ID NO: 20088 - RNA, 19 nt, synthetic construct
  source 1..19: mol_type = other RNA
cgccgtccgcttggacccg

SEQ ID NO: 20089 - RNA, 19 nt, synthetic construct
  source 1..19: mol_type = other RNA
caccaccgtggttattggg

SEQ ID NO: 20090 - RNA, 19 nt, synthetic construct
  source 1..19: mol_type = other RNA
ccattgtgcgccgggttca

SEQ ID NO: 20091 - RNA, 19 nt, synthetic construct
  source 1..19: mol_type = other RNA
ggcacgaaggaaacgctgc

SEQ ID NO: 20092 - RNA, 19 nt, synthetic construct
  source 1..19: mol_type = other RNA
gaaggccgggaggccgttg

SEQ ID NO: 20093 - RNA, 19 nt, synthetic construct
  source 1..19: mol_type = other RNA
tcgcacaggccaccggttg

SEQ ID NO: 20094 - RNA, 19 nt, synthetic construct
  source 1..19: mol_type = other RNA
accgctccccgggaaattt

SEQ ID NO: 20095 - RNA, 19 nt, synthetic construct
  source 1..19: mol_type = other RNA
ggtcacccatagggtggtc

SEQ ID NO: 20096 - RNA, 19 nt, synthetic construct
  source 1..19: mol_type = other RNA
ataggtgttgtccctggag

SEQ ID NO: 20097 - RNA, 19 nt, synthetic construct
  source 1..19: mol_type = other RNA
gggaccgcccgtgtgtggt

SEQ ID NO: 20098 - RNA, 19 nt, synthetic construct
  source 1..19: mol_type = other RNA
ataggtgttgtccctggag

SEQ ID NO: 20099 - RNA, 19 nt, synthetic construct
  source 1..19: mol_type = other RNA
acggttgtcacccacgcac

SEQ ID NO: 20100 - RNA, 19 nt, synthetic construct
  source 1..19: mol_type = other RNA
gcacaccgtctcggggcag

SEQ ID NO: 20101 - RNA, 19 nt, synthetic construct
  source 1..19: mol_type = other RNA
agaacgttctcagacagca

SEQ ID NO: 20102 - RNA, 19 nt, synthetic construct
  source 1..19: mol_type = other RNA
ttgcacactgcgtagaaat

SEQ ID NO: 20103 - RNA, 19 nt, synthetic construct
  source 1..19: mol_type = other RNA
cgacacggttgtcacccac

SEQ ID NO: 20104 - RNA, 19 nt, synthetic construct
  source 1..19: mol_type = other RNA
cgtacatgaacacacggcg

SEQ ID NO: 20105 - RNA, 19 nt, synthetic construct
  source 1..19: mol_type = other RNA
cccgcatgcggtcacagtc

SEQ ID NO: 20106 - RNA, 19 nt, synthetic construct
  source 1..19: mol_type = other RNA
cataggcccgcacatgctt

SEQ ID NO: 20107 - RNA, 19 nt, synthetic construct
  source 1..19: mol_type = other RNA
agggaccgcccgtgtgtgg

SEQ ID NO: 20108 - RNA, 19 nt, synthetic construct
  source 1..19: mol_type = other RNA
tggatccggtgggcaccgt

SEQ ID NO: 20109 - RNA, 19 nt, synthetic construct
  source 1..19: mol_type = other RNA
tggatccggtgggcaccgt

SEQ ID NO: 20110 - RNA, 19 nt, synthetic construct
  source 1..19: mol_type = other RNA
tggatccggtgggcaccgt

SEQ ID NO: 20111 - RNA, 19 nt, synthetic construct
  source 1..19: mol_type = other RNA
tggatccggtgggcaccgt

SEQ ID NO: 20112 - RNA, 19 nt, synthetic construct
  source 1..19: mol_type = other RNA
agctcgtagtcgtgacaga

SEQ ID NO: 20113 - RNA, 19 nt, synthetic construct
  source 1..19: mol_type = other RNA
tggtgttcggcactggggg

SEQ ID NO: 20114 - RNA, 19 nt, synthetic construct
  source 1..19: mol_type = other RNA
tggtgttcggcactggggg

SEQ ID NO: 20115 - RNA, 19 nt, synthetic construct
  source 1..19: mol_type = other RNA
cctcaggttttcaaacgtc

SEQ ID NO: 20116 - RNA, 19 nt, synthetic construct
  source 1..19: mol_type = other RNA
tttaggaaacccatcgggt

SEQ ID NO: 20117 - RNA, 19 nt, synthetic construct
  source 1..19: mol_type = other RNA
cacaggcccgcgtcgtggc

SEQ ID NO: 20118 - RNA, 19 nt, synthetic construct
  source 1..19: mol_type = other RNA
tcctgatgatggtgccgtt

SEQ ID NO: 20119 - RNA, 19 nt, synthetic construct
  source 1..19: mol_type = other RNA
ggtggcggggttgtggcac

SEQ ID NO: 20120 - RNA, 19 nt, synthetic construct
  source 1..19: mol_type = other RNA
gtggtcggtggcggggttg

SEQ ID NO: 20121 - RNA, 19 nt, synthetic construct
  source 1..19: mol_type = other RNA
agtacttggacgctccggg

SEQ ID NO: 20122 - RNA, 19 nt, synthetic construct
  source 1..19: mol_type = other RNA
ggagccgttggacgcctcc

SEQ ID NO: 20123 - RNA, 19 nt, synthetic construct
  source 1..19: mol_type = other RNA
tgcctcaggttttcaaacg

SEQ ID NO: 20124 - RNA, 19 nt, synthetic construct
  source 1..19: mol_type = other RNA
ctgcctcaggttttcaaac

SEQ ID NO: 20125 - RNA, 19 nt, synthetic construct
  source 1..19: mol_type = other RNA
ttgttgttggggccagcgt

SEQ ID NO: 20126 - RNA, 19 nt, synthetic construct
  source 1..19: mol_type = other RNA
tgcaccaaccccgtagaag

SEQ ID NO: 20127 - RNA, 19 nt, synthetic construct
  source 1..19: mol_type = other RNA
agccgttaggacagtgcaa

SEQ ID NO: 20128 - RNA, 19 nt, synthetic construct
  source 1..19: mol_type = other RNA
ggcggccgccttgcctgtc

SEQ ID NO: 20129 - RNA, 19 nt, synthetic construct
  source 1..19: mol_type = other RNA
agtagtttccgtccttgtc

SEQ ID NO: 20130 - RNA, 19 nt, synthetic construct
  source 1..19: mol_type = other RNA
gaagatccccatgtagcgt

SEQ ID NO: 20131 - RNA, 19 nt, synthetic construct
  source 1..19: mol_type = other RNA
tggttggcgtatttgggat

SEQ ID NO: 20132 - RNA, 19 nt, synthetic construct
  source 1..19: mol_type = other RNA
cttggacccggatggccgt

SEQ ID NO: 20133 - RNA, 19 nt, synthetic construct
  source 1..19: mol_type = other RNA
tggtgttcggcactggggg

SEQ ID NO: 20134 - RNA, 19 nt, synthetic construct
  source 1..19: mol_type = other RNA
tggtgttcggcactggggg

SEQ ID NO: 20135 - RNA, 19 nt, synthetic construct
  source 1..19: mol_type = other RNA
taggcgtagcgctgggact

SEQ ID NO: 20136 - RNA, 19 nt, synthetic construct
  source 1..19: mol_type = other RNA
agcgtagcaggggcactcc

SEQ ID NO: 20137 - RNA, 19 nt, synthetic construct
  source 1..19: mol_type = other RNA
ggccggtttcacccacggg

SEQ ID NO: 20138 - RNA, 19 nt, synthetic construct
  source 1..19: mol_type = other RNA
gaccgtcacggggcctgag

SEQ ID NO: 20139 - RNA, 19 nt, synthetic construct
  source 1..19: mol_type = other RNA
gttagtcaaggggctcatt

SEQ ID NO: 20140 - RNA, 19 nt, synthetic construct
  source 1..19: mol_type = other RNA
gaagcgtgcgtgccgtccc

SEQ ID NO: 20141 - RNA, 19 nt, synthetic construct
  source 1..19: mol_type = other RNA
gtggatccggtgggcaccg

SEQ ID NO: 20142 - RNA, 19 nt, synthetic construct
  source 1..19: mol_type = other RNA
gtggatccggtgggcaccg

SEQ ID NO: 20143 - RNA, 19 nt, synthetic construct
  source 1..19: mol_type = other RNA
gtggatccggtgggcaccg

SEQ ID NO: 20144 - RNA, 19 nt, synthetic construct
  source 1..19: mol_type = other RNA
gtggatccggtgggcaccg

SEQ ID NO: 20145 - RNA, 19 nt, synthetic construct
  source 1..19: mol_type = other RNA
acgtattcgcagcagagaa

SEQ ID NO: 20146 - RNA, 19 nt, synthetic construct
  source 1..19: mol_type = other RNA
gagtcgagtgctgggtggt

SEQ ID NO: 20147 - RNA, 19 nt, synthetic construct
  source 1..19: mol_type = other RNA
gagtcgagtgctgggtggt

SEQ ID NO: 20148 - RNA, 19 nt, synthetic construct
  source 1..19: mol_type = other RNA
gagtcgagtgctgggtggt

SEQ ID NO: 20149 - RNA, 19 nt, synthetic construct
  source 1..19: mol_type = other RNA
gagtcgagtgctgggtggt

SEQ ID NO: 20150 - RNA, 19 nt, synthetic construct
  source 1..19: mol_type = other RNA
gaatccgtgctgcgcgggc

SEQ ID NO: 20151 - RNA, 19 nt, synthetic construct
  source 1..19: mol_type = other RNA
gtatggggccgcatggctt

SEQ ID NO: 20152 - RNA, 19 nt, synthetic construct
  source 1..19: mol_type = other RNA
agtttgttccagggcgtcc

SEQ ID NO: 20153 - RNA, 19 nt, synthetic construct
  source 1..19: mol_type = other RNA
gcacgtattcgcagcagag

SEQ ID NO: 20154 - RNA, 19 nt, synthetic construct
  source 1..19: mol_type = other RNA
agggcatacctggtaccct

SEQ ID NO: 20155 - RNA, 19 nt, synthetic construct
  source 1..19: mol_type = other RNA
caccaaccccgtagaaggt

SEQ ID NO: 20156 - RNA, 19 nt, synthetic construct
  source 1..19: mol_type = other RNA
gcgcgagaaggcactgttg

SEQ ID NO: 20157 - RNA, 19 nt, synthetic construct
  source 1..19: mol_type = other RNA
gccgagggggtgaccgtca

SEQ ID NO: 20158 - RNA, 19 nt, synthetic construct
  source 1..19: mol_type = other RNA
ggcgtgagtgccgtccctg

SEQ ID NO: 20159 - RNA, 19 nt, synthetic construct
  source 1..19: mol_type = other RNA
caggtcgtccctggagtgg

SEQ ID NO: 20160 - RNA, 19 nt, synthetic construct
  source 1..19: mol_type = other RNA
ggcgtgagtgccgtccctg

SEQ ID NO: 20161 - RNA, 19 nt, synthetic construct
  source 1..19: mol_type = other RNA
ggcgtgagtgccgtccctg

SEQ ID NO: 20162 - RNA, 19 nt, synthetic construct
  source 1..19: mol_type = other RNA
gagattcccaaagcgtgca

SEQ ID NO: 20163 - RNA, 19 nt, synthetic construct
  source 1..19: mol_type = other RNA
gcaggacgacacggttgtc

SEQ ID NO: 20164 - RNA, 19 nt, synthetic construct
  source 1..19: mol_type = other RNA
agggatcgcccgtgtgtgg

SEQ ID NO: 20165 - RNA, 19 nt, synthetic construct
  source 1..19: mol_type = other RNA
agggatcgcccgtgtgtgg

SEQ ID NO: 20166 - RNA, 19 nt, synthetic construct
  source 1..19: mol_type = other RNA
agggatcgcccgtgtgtgg

SEQ ID NO: 20167 - RNA, 19 nt, synthetic construct
  source 1..19: mol_type = other RNA
aaatggcagccggctcggt

SEQ ID NO: 20168 - RNA, 19 nt, synthetic construct
  source 1..19: mol_type = other RNA
ggtcgtagagtttctcatc

SEQ ID NO: 20169 - RNA, 19 nt, synthetic construct
  source 1..19: mol_type = other RNA
gatgacgtcctggtagctg

SEQ ID NO: 20170 - RNA, 19 nt, synthetic construct
  source 1..19: mol_type = other RNA
ctcgcggacacacacggtg

SEQ ID NO: 20171 - RNA, 19 nt, synthetic construct
  source 1..19: mol_type = other RNA
gcggcatgtcgggaagctg

SEQ ID NO: 20172 - RNA, 19 nt, synthetic construct
  source 1..19: mol_type = other RNA
gggcacgtattcgcagcag

SEQ ID NO: 20173 - RNA, 19 nt, synthetic construct
  source 1..19: mol_type = other RNA
tccccgggcgagaaaaact

SEQ ID NO: 20174 - RNA, 19 nt, synthetic construct
  source 1..19: mol_type = other RNA
ggctcggtcggtcttattg

SEQ ID NO: 20175 - RNA, 19 nt, synthetic construct
  source 1..19: mol_type = other RNA
gaggtcgcacaggccaccg

SEQ ID NO: 20176 - RNA, 19 nt, synthetic construct
  source 1..19: mol_type = other RNA
gttgtgttgcacacgcaca

SEQ ID NO: 20177 - RNA, 19 nt, synthetic construct
  source 1..19: mol_type = other RNA
gtgccacaggatggtcgtg

SEQ ID NO: 20178 - RNA, 19 nt, synthetic construct
  source 1..19: mol_type = other RNA
ggagtcgagtgctgggtgg

SEQ ID NO: 20179 - RNA, 19 nt, synthetic construct
  source 1..19: mol_type = other RNA
ggagtcgagtgctgggtgg

SEQ ID NO: 20180 - RNA, 19 nt, synthetic construct
  source 1..19: mol_type = other RNA
ggagtcgagtgctgggtgg

SEQ ID NO: 20181 - RNA, 19 nt, synthetic construct
  source 1..19: mol_type = other RNA
ggagtcgagtgctgggtgg

SEQ ID NO: 20182 - RNA, 19 nt, synthetic construct
  source 1..19: mol_type = other RNA
agtggcgccctcccgaaag

SEQ ID NO: 20183 - RNA, 19 nt, synthetic construct
  source 1..19: mol_type = other RNA
tgcggacttgacaggagtc

SEQ ID NO: 20184 - RNA, 19 nt, synthetic construct
  source 1..19: mol_type = other RNA
gccgtcgaccggatgctcg

SEQ ID NO: 20185 - RNA, 19 nt, synthetic construct
  source 1..19: mol_type = other RNA
gctgagcgtcaccgctttc

SEQ ID NO: 20186 - RNA, 19 nt, synthetic construct
  source 1..19: mol_type = other RNA
agtcgccacccgagtcgca

SEQ ID NO: 20187 - RNA, 19 nt, synthetic construct
  source 1..19: mol_type = other RNA
gtgataggcgggtccaggc

SEQ ID NO: 20188 - RNA, 19 nt, synthetic construct
  source 1..19: mol_type = other RNA
catcccgtgggtctcgatg

SEQ ID NO: 20189 - RNA, 19 nt, synthetic construct
  source 1..19: mol_type = other RNA
cagttgccggccggcaagg

SEQ ID NO: 20190 - RNA, 19 nt, synthetic construct
  source 1..19: mol_type = other RNA
gctgtagcgatcgccatca

SEQ ID NO: 20191 - RNA, 19 nt, synthetic construct
  source 1..19: mol_type = other RNA
cacgtaggcgtagcgctgg

SEQ ID NO: 20192 - RNA, 19 nt, synthetic construct
  source 1..19: mol_type = other RNA
agcgatcgccatcaaaggt

SEQ ID NO: 20193 - RNA, 19 nt, synthetic construct
  source 1..19: mol_type = other RNA
gtagcgtatcttgtagggt

SEQ ID NO: 20194 - RNA, 19 nt, synthetic construct
  source 1..19: mol_type = other RNA
ccagagtgcgtgatgtcat

SEQ ID NO: 20195 - RNA, 19 nt, synthetic construct
  source 1..19: mol_type = other RNA
gtcggatgaacacgctggt

SEQ ID NO: 20196 - RNA, 19 nt, synthetic construct
  source 1..19: mol_type = other RNA
ccggcactcgatgtcagcc

SEQ ID NO: 20197 - RNA, 19 nt, synthetic construct
  source 1..19: mol_type = other RNA
ggtgaccgtcacggggcct

SEQ ID NO: 20198 - RNA, 19 nt, synthetic construct
  source 1..19: mol_type = other RNA
ctactcgtaggctgcggcg

SEQ ID NO: 20199 - RNA, 19 nt, synthetic construct
  source 1..19: mol_type = other RNA
gtgataggcgggtccaggt

SEQ ID NO: 20200 - RNA, 19 nt, synthetic construct
  source 1..19: mol_type = other RNA
gccgtggcggtaagcactg

SEQ ID NO: 20201 - RNA, 19 nt, synthetic construct
  source 1..19: mol_type = other RNA
gtgataggcgggtccaggt

SEQ ID NO: 20202 - RNA, 19 nt, synthetic construct
  source 1..19: mol_type = other RNA
gtgataggcgggtccaggt

SEQ ID NO: 20203 - RNA, 19 nt, synthetic construct
  source 1..19: mol_type = other RNA
gtgataggcgggtccaggt

SEQ ID NO: 20204 - RNA, 19 nt, synthetic construct
  source 1..19: mol_type = other RNA
gccgtggcggtaagcactg

SEQ ID NO: 20205 - RNA, 19 nt, synthetic construct
  source 1..19: mol_type = other RNA
gttgccccggaaggtgtaa

SEQ ID NO: 20206 - RNA, 19 nt, synthetic construct
  source 1..19: mol_type = other RNA
gacggttgcacggcggggg

SEQ ID NO: 20207 - RNA, 19 nt, synthetic construct
  source 1..19: mol_type = other RNA
cggttacgaagccgggacg

SEQ ID NO: 20208 - RNA, 19 nt, synthetic construct
  source 1..19: mol_type = other RNA
gatggtcgtgttgatgcgg

SEQ ID NO: 20209 - RNA, 19 nt, synthetic construct
  source 1..19: mol_type = other RNA
gcagaacgttctcagacag

SEQ ID NO: 20210 - RNA, 19 nt, synthetic construct
  source 1..19: mol_type = other RNA
cctcccgaaaggggtcctg

SEQ ID NO: 20211 - RNA, 19 nt, synthetic construct
  source 1..19: mol_type = other RNA
gccgtccgcttggacccgg

SEQ ID NO: 20212 - RNA, 19 nt, synthetic construct
  source 1..19: mol_type = other RNA
tgtgataggcgggtccagg

SEQ ID NO: 20213 - RNA, 19 nt, synthetic construct
  source 1..19: mol_type = other RNA
acggatgttggagtaggtg

SEQ ID NO: 20214 - RNA, 19 nt, synthetic construct
  source 1..19: mol_type = other RNA
tgtgataggcgggtccagg

SEQ ID NO: 20215 - RNA, 19 nt, synthetic construct
  source 1..19: mol_type = other RNA
acggatgttggagtaggtg

SEQ ID NO: 20216 - RNA, 19 nt, synthetic construct
  source 1..19: mol_type = other RNA
tgtgataggcgggtccagg

SEQ ID NO: 20217 - RNA, 19 nt, synthetic construct
  source 1..19: mol_type = other RNA
gtcgagtgctgggtggtac

SEQ ID NO: 20218 - RNA, 19 nt, synthetic construct
  source 1..19: mol_type = other RNA
acggatgttggagtaggtg

SEQ ID NO: 20219 - RNA, 19 nt, synthetic construct
  source 1..19: mol_type = other RNA
tgtgataggcgggtccagg

SEQ ID NO: 20220 - RNA, 19 nt, synthetic construct
  source 1..19: mol_type = other RNA
acggatgttggagtaggtg

SEQ ID NO: 20221 - RNA, 19 nt, synthetic construct
  source 1..19: mol_type = other RNA
tgtgataggcgggtccagg

SEQ ID NO: 20222 - RNA, 19 nt, synthetic construct
  source 1..19: mol_type = other RNA
ctgagccgttaggacagtg

SEQ ID NO: 20223 - RNA, 19 nt, synthetic construct
  source 1..19: mol_type = other RNA
gccgttgcgacctcagccc

SEQ ID NO: 20224 - RNA, 19 nt, synthetic construct
  source 1..19: mol_type = other RNA
cgtgttgatgcggacttga

SEQ ID NO: 20225 - RNA, 19 nt, synthetic construct
  source 1..19: mol_type = other RNA
acgtcggggcaccgccatc

SEQ ID NO: 20226 - RNA, 19 nt, synthetic construct
  source 1..19: mol_type = other RNA
aggtcgtagagtttctcat

SEQ ID NO: 20227 - RNA, 19 nt, synthetic construct
  source 1..19: mol_type = other RNA
agggcacgtattcgcagca

SEQ ID NO: 20228 - RNA, 19 nt, synthetic construct
  source 1..19: mol_type = other RNA
tcgtagtggccgtggtgat

SEQ ID NO: 20229 - RNA, 19 nt, synthetic construct
  source 1..19: mol_type = other RNA
tcacggtggctatagtgct

SEQ ID NO: 20230 - RNA, 19 nt, synthetic construct
  source 1..19: mol_type = other RNA
tgattgcacactgcgtaga

SEQ ID NO: 20231 - RNA, 19 nt, synthetic construct
  source 1..19: mol_type = other RNA
cccatcgggtcccacgcag

SEQ ID NO: 20232 - RNA, 19 nt, synthetic construct
  source 1..19: mol_type = other RNA
gagcgtcaccgctttcagg

SEQ ID NO: 20233 - RNA, 19 nt, synthetic construct
  source 1..19: mol_type = other RNA
cggccctgatcttatcgta

SEQ ID NO: 20234 - RNA, 19 nt, synthetic construct
  source 1..19: mol_type = other RNA
cagcggccctgatcttatc

SEQ ID NO: 20235 - RNA, 19 nt, synthetic construct
  source 1..19: mol_type = other RNA
cgggacggttgcacggcgg

SEQ ID NO: 20236 - RNA, 19 nt, synthetic construct
  source 1..19: mol_type = other RNA
gctcacgcgccgggtgggc

SEQ ID NO: 20237 - RNA, 19 nt, synthetic construct
  source 1..19: mol_type = other RNA
aaagctcacgcgccgggtg

SEQ ID NO: 20238 - RNA, 19 nt, synthetic construct
  source 1..19: mol_type = other RNA
aacaaagctcacgcgccgg

SEQ ID NO: 20239 - RNA, 19 nt, synthetic construct
  source 1..19: mol_type = other RNA
cagagtgcgtgatgtcatc

SEQ ID NO: 20240 - RNA, 19 nt, synthetic construct
  source 1..19: mol_type = other RNA
gccgccgtccgcttggacc

SEQ ID NO: 20241 - RNA, 19 nt, synthetic construct
  source 1..19: mol_type = other RNA
tcccacccgtacatgaaca

SEQ ID NO: 20242 - RNA, 19 nt, synthetic construct
  source 1..19: mol_type = other RNA
gcagcttagcttcccaccc

SEQ ID NO: 20243 - RNA, 19 nt, synthetic construct
  source 1..19: mol_type = other RNA
atgtagcgtatcttgtagg

SEQ ID NO: 20244 - RNA, 19 nt, synthetic construct
  source 1..19: mol_type = other RNA
gctactcgtaggctgcggc

SEQ ID NO: 20245 - RNA, 19 nt, synthetic construct
  source 1..19: mol_type = other RNA
ccgtggttatgggggccga

SEQ ID NO: 20246 - RNA, 19 nt, synthetic construct
  source 1..19: mol_type = other RNA
tggggggataggtgttgtc

SEQ ID NO: 20247 - RNA, 19 nt, synthetic construct
  source 1..19: mol_type = other RNA
ggctgtaacgctggtagct

SEQ ID NO: 20248 - RNA, 19 nt, synthetic construct
  source 1..19: mol_type = other RNA
ctgtgatcgtagtggccgt

SEQ ID NO: 20249 - RNA, 19 nt, synthetic construct
  source 1..19: mol_type = other RNA
ccgtggttatgggggccga

SEQ ID NO: 20250 - RNA, 19 nt, synthetic construct
  source 1..19: mol_type = other RNA
tggggggataggtgttgtc

SEQ ID NO: 20251 - RNA, 19 nt, synthetic construct
  source 1..19: mol_type = other RNA
ccgtggttatgggggccga

SEQ ID NO: 20252 - RNA, 19 nt, synthetic construct
  source 1..19: mol_type = other RNA
acactgcgtagaaatggca

SEQ ID NO: 20253 - RNA, 19 nt, synthetic construct
  source 1..19: mol_type = other RNA
tgccccggaaggtgtaaga

SEQ ID NO: 20254 - RNA, 19 nt, synthetic construct
  source 1..19: mol_type = other RNA
aagcgtgcatggatctctc

SEQ ID NO: 20255 - RNA, 19 nt, synthetic construct
  source 1..19: mol_type = other RNA
ccaaagcgtgcatggatct

SEQ ID NO: 20256 - RNA, 19 nt, synthetic construct
  source 1..19: mol_type = other RNA
ccgtgcagtagtggttgtc

SEQ ID NO: 20257 - RNA, 19 nt, synthetic construct
  source 1..19: mol_type = other RNA
ctcaaggcggcccctgcag

SEQ ID NO: 20258 - RNA, 19 nt, synthetic construct
  source 1..19: mol_type = other RNA
ctgcaccgacactgaaccc

SEQ ID NO: 20259 - RNA, 19 nt, synthetic construct
  source 1..19: mol_type = other RNA
ggcagaacgttctcagaca

SEQ ID NO: 20260 - RNA, 19 nt, synthetic construct
  source 1..19: mol_type = other RNA
ataggcccgcacatgctta

SEQ ID NO: 20261 - RNA, 19 nt, synthetic construct
  source 1..19: mol_type = other RNA
ccgttgcgacctcagccct

SEQ ID NO: 20262 - RNA, 19 nt, synthetic construct
  source 1..19: mol_type = other RNA
ctcgtagtcgtgacagagc

SEQ ID NO: 20263 - RNA, 19 nt, synthetic construct
  source 1..19: mol_type = other RNA
ggaaacccatcgggtccca

SEQ ID NO: 20264 - RNA, 19 nt, synthetic construct
  source 1..19: mol_type = other RNA
ggcagggatcgcccgtgtg

SEQ ID NO: 20265 - RNA, 19 nt, synthetic construct
  source 1..19: mol_type = other RNA
tcggtcaggcgcgagcacc

SEQ ID NO: 20266 - RNA, 19 nt, synthetic construct
  source 1..19: mol_type = other RNA
acgtaggcgtagcgctggg

SEQ ID NO: 20267 - RNA, 19 nt, synthetic construct
  source 1..19: mol_type = other RNA
acggtgccgtgagcgtagc

SEQ ID NO: 20268 - RNA, 19 nt, synthetic construct
  source 1..19: mol_type = other RNA
tcattgatggcattgtcgt

SEQ ID NO: 20269 - RNA, 19 nt, synthetic construct
  source 1..19: mol_type = other RNA
gaccggatgctcggggtca

SEQ ID NO: 20270 - RNA, 19 nt, synthetic construct
  source 1..19: mol_type = other RNA
cgaccggatgctcggggtc

SEQ ID NO: 20271 - RNA, 19 nt, synthetic construct
  source 1..19: mol_type = other RNA
gacttccccgggcgagaaa

SEQ ID NO: 20272 - RNA, 19 nt, synthetic construct
  source 1..19: mol_type = other RNA
gacgacacggttgtcaccc

SEQ ID NO: 20273 - RNA, 19 nt, synthetic construct
  source 1..19: mol_type = other RNA
gaaacccatcgggtcccac

SEQ ID NO: 20274 - RNA, 19 nt, synthetic construct
  source 1..19: mol_type = other RNA
ccaaactggagcggggtca

SEQ ID NO: 20275 - RNA, 19 nt, synthetic construct
  source 1..19: mol_type = other RNA
cgtggcactccgcaaaggc

SEQ ID NO: 20276 - RNA, 19 nt, synthetic construct
  source 1..19: mol_type = other RNA
gatcggtcaggcgcgagca

SEQ ID NO: 20277 - RNA, 19 nt, synthetic construct
  source 1..19: mol_type = other RNA
cgccaccgccttaaaggtc

SEQ ID NO: 20278 - RNA, 19 nt, synthetic construct
  source 1..19: mol_type = other RNA
atgtgggttgtagaagtca

SEQ ID NO: 20279 - RNA, 19 nt, synthetic construct
  source 1..19: mol_type = other RNA
gatggcgatcaagcaggcg

SEQ ID NO: 20280 - RNA, 19 nt, synthetic construct
  source 1..19: mol_type = other RNA
ccgttgcttccgcagatgg

SEQ ID NO: 20281 - RNA, 19 nt, synthetic construct
  source 1..19: mol_type = other RNA
cagagcgggggactctgtt

SEQ ID NO: 20282 - RNA, 19 nt, synthetic construct
  source 1..19: mol_type = other RNA
cgggctactcgtaggctgc

SEQ ID NO: 20283 - RNA, 19 nt, synthetic construct
  source 1..19: mol_type = other RNA
gatgggggagtaccactgg

SEQ ID NO: 20284 - RNA, 19 nt, synthetic construct
  source 1..19: mol_type = other RNA
gggatcgcccgtgtgtggt

SEQ ID NO: 20285 - RNA, 19 nt, synthetic construct
  source 1..19: mol_type = other RNA
ggagtaggtgtcaaagtcc

SEQ ID NO: 20286 - RNA, 19 nt, synthetic construct
  source 1..19: mol_type = other RNA
cgtggatccggtgggcacc

SEQ ID NO: 20287 - RNA, 19 nt, synthetic construct
  source 1..19: mol_type = other RNA
gatgggggagtaccactgg

SEQ ID NO: 20288 - RNA, 19 nt, synthetic construct
  source 1..19: mol_type = other RNA
gggatcgcccgtgtgtggt

SEQ ID NO: 20289 - RNA, 19 nt, synthetic construct
  source 1..19: mol_type = other RNA
ggagtaggtgtcaaagtcc

SEQ ID NO: 20290 - RNA, 19 nt, synthetic construct
  source 1..19: mol_type = other RNA
cgtggatccggtgggcacc

SEQ ID NO: 20291 - RNA, 19 nt, synthetic construct
  source 1..19: mol_type = other RNA
gatgggggagtaccactgg

SEQ ID NO: 20292 - RNA, 19 nt, synthetic construct
  source 1..19: mol_type = other RNA
ggagtaggtgtcaaagtcc

SEQ ID NO: 20293 - RNA, 19 nt, synthetic construct
  source 1..19: mol_type = other RNA
cgtggatccggtgggcacc

SEQ ID NO: 20294 - RNA, 19 nt, synthetic construct
  source 1..19: mol_type = other RNA
gatgggggagtaccactgg

SEQ ID NO: 20295 - RNA, 19 nt, synthetic construct
  source 1..19: mol_type = other RNA
gggatcgcccgtgtgtggt

SEQ ID NO: 20296 - RNA, 19 nt, synthetic construct
  source 1..19: mol_type = other RNA
ggagtaggtgtcaaagtcc

SEQ ID NO: 20297 - RNA, 19 nt, synthetic construct
  source 1..19: mol_type = other RNA
cgtggatccggtgggcacc

SEQ ID NO: 20298 - RNA, 19 nt, synthetic construct
  source 1..19: mol_type = other RNA
gatgggggagtaccactgg

SEQ ID NO: 20299 - RNA, 19 nt, synthetic construct
  source 1..19: mol_type = other RNA
acggtggctatagtgctcg

SEQ ID NO: 20300 - RNA, 19 nt, synthetic construct
  source 1..19: mol_type = other RNA
gccgtgcagtagtggttgt

SEQ ID NO: 20301 - RNA, 19 nt, synthetic construct
  source 1..19: mol_type = other RNA
ggccgtgcagtagtggttg

SEQ ID NO: 20302 - RNA, 19 nt, synthetic construct
  source 1..19: mol_type = other RNA
gccgcatggcttgtacact

SEQ ID NO: 20303 - RNA, 19 nt, synthetic construct
  source 1..19: mol_type = other RNA
ccgggacggttgcacggcg

SEQ ID NO: 20304 - RNA, 19 nt, synthetic construct
  source 1..19: mol_type = other RNA
ggcaggtacacatgtggca

SEQ ID NO: 20305 - RNA, 19 nt, synthetic construct
  source 1..19: mol_type = other RNA
gttgacctcggtctcgcag

SEQ ID NO: 20306 - RNA, 19 nt, synthetic construct
  source 1..19: mol_type = other RNA
ggagcgcggggtgccacac

SEQ ID NO: 20307 - RNA, 19 nt, synthetic construct
  source 1..19: mol_type = other RNA
ctggaatccgtgctgcgcg

SEQ ID NO: 20308 - RNA, 19 nt, synthetic construct
  source 1..19: mol_type = other RNA
ggcgaggacgtcggggcac

SEQ ID NO: 20309 - RNA, 19 nt, synthetic construct
  source 1..19: mol_type = other RNA
agctcacgcgccgggtggg

SEQ ID NO: 20310 - RNA, 19 nt, synthetic construct
  source 1..19: mol_type = other RNA
ggagcccactaggcctcgg

SEQ ID NO: 20311 - RNA, 19 nt, synthetic construct
  source 1..19: mol_type = other RNA
agcaccagccggatgctga

SEQ ID NO: 20312 - RNA, 19 nt, synthetic construct
  source 1..19: mol_type = other RNA
catagaactcgttgaaggc

SEQ ID NO: 20313 - RNA, 19 nt, synthetic construct
  source 1..19: mol_type = other RNA
caggtacgcagtgctgtcc

SEQ ID NO: 20314 - RNA, 19 nt, synthetic construct
  source 1..19: mol_type = other RNA
gccaggtacgcagtgctgt

SEQ ID NO: 20315 - RNA, 19 nt, synthetic construct
  source 1..19: mol_type = other RNA
ggccaggtacgcagtgctg

SEQ ID NO: 20316 - RNA, 19 nt, synthetic construct
  source 1..19: mol_type = other RNA
gtccgtgcagggtgagcca

SEQ ID NO: 20317 - RNA, 19 nt, synthetic construct
  source 1..19: mol_type = other RNA
gtcaccgctttcaggcagt

SEQ ID NO: 20318 - RNA, 19 nt, synthetic construct
  source 1..19: mol_type = other RNA
acaaacacctgcatgagtg

SEQ ID NO: 20319 - RNA, 19 nt, synthetic construct
  source 1..19: mol_type = other RNA
ccccgctgagggccgtgaa

SEQ ID NO: 20320 - RNA, 19 nt, synthetic construct
  source 1..19: mol_type = other RNA
aggcgcgagcaccagtgcc

SEQ ID NO: 20321 - RNA, 19 nt, synthetic construct
  source 1..19: mol_type = other RNA
cggtcaggcgcgagcacca

SEQ ID NO: 20322 - RNA, 19 nt, synthetic construct
  source 1..19: mol_type = other RNA
ggcactgttgggatcggtc

SEQ ID NO: 20323 - RNA, 19 nt, synthetic construct
  source 1..19: mol_type = other RNA
aggcgtagcgctgggactt

SEQ ID NO: 20324 - RNA, 19 nt, synthetic construct
  source 1..19: mol_type = other RNA
ggccgcggcaagtgggctg

SEQ ID NO: 20325 - RNA, 19 nt, synthetic construct
  source 1..19: mol_type = other RNA
actcaggccgcggcaagtg

SEQ ID NO: 20326 - RNA, 19 nt, synthetic construct
  source 1..19: mol_type = other RNA
aacacacggcgccctcgtc

SEQ ID NO: 20327 - RNA, 19 nt, synthetic construct
  source 1..19: mol_type = other RNA
gaacacacggcgccctcgt

SEQ ID NO: 20328 - RNA, 19 nt, synthetic construct
  source 1..19: mol_type = other RNA
cccatccgacaccagcccc

SEQ ID NO: 20329 - RNA, 19 nt, synthetic construct
  source 1..19: mol_type = other RNA
gccaccgccttaaaggtcc

SEQ ID NO: 20330 - RNA, 19 nt, synthetic construct
  source 1..19: mol_type = other RNA
cccatgtagcgtatcttgt

SEQ ID NO: 20331 - RNA, 19 nt, synthetic construct
  source 1..19: mol_type = other RNA
gcagtcggatgaacacgct

SEQ ID NO: 20332 - RNA, 19 nt, synthetic construct
  source 1..19: mol_type = other RNA
gtagtttccgtccttgtcg

SEQ ID NO: 20333 - RNA, 19 nt, synthetic construct
  source 1..19: mol_type = other RNA
atggcgttgtggctggagt

SEQ ID NO: 20334 - RNA, 19 nt, synthetic construct
  source 1..19: mol_type = other RNA
ggtgaatggcgttgtggct

SEQ ID NO: 20335 - RNA, 19 nt, synthetic construct
  source 1..19: mol_type = other RNA
agacctcgcggacacacac

SEQ ID NO: 20336 - RNA, 19 nt, synthetic construct
  source 1..19: mol_type = other RNA
cagacctcgcggacacaca

SEQ ID NO: 20337 - RNA, 19 nt, synthetic construct
  source 1..19: mol_type = other RNA
cccggcactcgatgtcagc

SEQ ID NO: 20338 - RNA, 19 nt, synthetic construct
  source 1..19: mol_type = other RNA
gcccggcactcgatgtcag

SEQ ID NO: 20339 - RNA, 19 nt, synthetic construct
  source 1..19: mol_type = other RNA
ccgcccggcactcgatgtc

SEQ ID NO: 20340 - RNA, 19 nt, synthetic construct
  source 1..19: mol_type = other RNA
ccccgcatgcggtcacagt

SEQ ID NO: 20341 - RNA, 19 nt, synthetic construct
  source 1..19: mol_type = other RNA
agagcgggggactctgttg

SEQ ID NO: 20342 - RNA, 19 nt, synthetic construct
  source 1..19: mol_type = other RNA
tcgaccggatgctcggggt

SEQ ID NO: 20343 - RNA, 19 nt, synthetic construct
  source 1..19: mol_type = other RNA
tgaccgtcacggggcctga

SEQ ID NO: 20344 - RNA, 19 nt, synthetic construct
  source 1..19: mol_type = other RNA
ctgcggcgttgagaacagg

SEQ ID NO: 20345 - RNA, 19 nt, synthetic construct
  source 1..19: mol_type = other RNA
gctgcggcgttgagaacag

SEQ ID NO: 20346 - RNA, 19 nt, synthetic construct
  source 1..19: mol_type = other RNA
ggctgcggcgttgagaaca

SEQ ID NO: 20347 - RNA, 19 nt, synthetic construct
  source 1..19: mol_type = other RNA
aggctgcggcgttgagaac

SEQ ID NO: 20348 - RNA, 19 nt, synthetic construct
  source 1..19: mol_type = other RNA
gggctactcgtaggctgcg

SEQ ID NO: 20349 - RNA, 19 nt, synthetic construct
  source 1..19: mol_type = other RNA
ctcccgtggtggctgtacc

SEQ ID NO: 20350 - RNA, 19 nt, synthetic construct
  source 1..19: mol_type = other RNA
tgttggcgccaggctcgtg

SEQ ID NO: 20351 - RNA, 19 nt, synthetic construct
  source 1..19: mol_type = other RNA
ttagtcaaggggctcattg

SEQ ID NO: 20352 - RNA, 19 nt, synthetic construct
  source 1..19: mol_type = other RNA
tgttagtcaaggggctcat

SEQ ID NO: 20353 - RNA, 19 nt, synthetic construct
  source 1..19: mol_type = other RNA
gtggtgttagtcaaggggc

SEQ ID NO: 20354 - RNA, 19 nt, synthetic construct
  source 1..19: mol_type = other RNA
atgggtgtaacgctggtag

SEQ ID NO: 20355 - RNA, 19 nt, synthetic construct
  source 1..19: mol_type = other RNA
gtggcggtaagcactgtgg

SEQ ID NO: 20356 - RNA, 19 nt, synthetic construct
  source 1..19: mol_type = other RNA
tgtggtagttggcactttg

SEQ ID NO: 20357 - RNA, 19 nt, synthetic construct
  source 1..19: mol_type = other RNA
ttgtggtagttggcacttt

SEQ ID NO: 20358 - RNA, 19 nt, synthetic construct
  source 1..19: mol_type = other RNA
gcgtgagtgccgtccctgg

SEQ ID NO: 20359 - RNA, 19 nt, synthetic construct
  source 1..19: mol_type = other RNA
tgtgtgctagaggagggtg

SEQ ID NO: 20360 - RNA, 19 nt, synthetic construct
  source 1..19: mol_type = other RNA
tgatcgtagtggccgtggt

SEQ ID NO: 20361 - RNA, 19 nt, synthetic construct
  source 1..19: mol_type = other RNA
ggctgtgcgcaccgtgtgg

SEQ ID NO: 20362 - RNA, 19 nt, synthetic construct
  source 1..19: mol_type = other RNA
aggctgtgcgcaccgtgtg

SEQ ID NO: 20363 - RNA, 19 nt, synthetic construct
  source 1..19: mol_type = other RNA
gggtggtaccggtggttgc

SEQ ID NO: 20364 - RNA, 19 nt, synthetic construct
  source 1..19: mol_type = other RNA
tggagtcgagtgctgggtg

SEQ ID NO: 20365 - RNA, 19 nt, synthetic construct
  source 1..19: mol_type = other RNA
ggtcaccaccgtggttatg

SEQ ID NO: 20366 - RNA, 19 nt, synthetic construct
  source 1..19: mol_type = other RNA
ggccccggcatggggtagc

SEQ ID NO: 20367 - RNA, 19 nt, synthetic construct
  source 1..19: mol_type = other RNA
cctgggcacggcactcgag

SEQ ID NO: 20368 - RNA, 19 nt, synthetic construct
  source 1..19: mol_type = other RNA
tgtgtgctagaggagggtg

SEQ ID NO: 20369 - RNA, 19 nt, synthetic construct
  source 1..19: mol_type = other RNA
tgatcgtagtggccgtggt

SEQ ID NO: 20370 - RNA, 19 nt, synthetic construct
  source 1..19: mol_type = other RNA
ggataggtgttgtccctgg

SEQ ID NO: 20371 - RNA, 19 nt, synthetic construct
  source 1..19: mol_type = other RNA
gccgtggtgttcggcactg

SEQ ID NO: 20372 - RNA, 19 nt, synthetic construct
  source 1..19: mol_type = other RNA
ggctgtgcgcaccgtgtgg

SEQ ID NO: 20373 - RNA, 19 nt, synthetic construct
  source 1..19: mol_type = other RNA
aggctgtgcgcaccgtgtg

SEQ ID NO: 20374 - RNA, 19 nt, synthetic construct
  source 1..19: mol_type = other RNA
gggtggtaccggtggttgc

SEQ ID NO: 20375 - RNA, 19 nt, synthetic construct
  source 1..19: mol_type = other RNA
tggagtcgagtgctgggtg

SEQ ID NO: 20376 - RNA, 19 nt, synthetic construct
  source 1..19: mol_type = other RNA
ggccccggcatggggtagc

SEQ ID NO: 20377 - RNA, 19 nt, synthetic construct
  source 1..19: mol_type = other RNA
cctgggcacggcactcgag

SEQ ID NO: 20378 - RNA, 19 nt, synthetic construct
  source 1..19: mol_type = other RNA
gggatggccgtggatccag

SEQ ID NO: 20379 - RNA, 19 nt, synthetic construct
  source 1..19: mol_type = other RNA
gataggcgggtccaggcgg

SEQ ID NO: 20380 - RNA, 19 nt, synthetic construct
  source 1..19: mol_type = other RNA
tgtggtagtcggcactttg

SEQ ID NO: 20381 - RNA, 19 nt, synthetic construct
  source 1..19: mol_type = other RNA
gcgtgagtgccgtccctgg

SEQ ID NO: 20382 - RNA, 19 nt, synthetic construct
  source 1..19: mol_type = other RNA
tgtgtgctagaggagggtg

SEQ ID NO: 20383 - RNA, 19 nt, synthetic construct
  source 1..19: mol_type = other RNA
tgatcgtagtggccgtggt

SEQ ID NO: 20384 - RNA, 19 nt, synthetic construct
  source 1..19: mol_type = other RNA
gccgtggtgttcggcactg

SEQ ID NO: 20385 - RNA, 19 nt, synthetic construct
  source 1..19: mol_type = other RNA
ggctgtgcgcaccgtgtgg

SEQ ID NO: 20386 - RNA, 19 nt, synthetic construct
  source 1..19: mol_type = other RNA
aggctgtgcgcaccgtgtg

SEQ ID NO: 20387 - RNA, 19 nt, synthetic construct
  source 1..19: mol_type = other RNA
tggagtcgagtgctgggtg

SEQ ID NO: 20388 - RNA, 19 nt, synthetic construct
  source 1..19: mol_type = other RNA
ggtcaccaccgtggttatg

SEQ ID NO: 20389 - RNA, 19 nt, synthetic construct
  source 1..19: mol_type = other RNA
ggccccggcatggggtagc

SEQ ID NO: 20390 - RNA, 19 nt, synthetic construct
  source 1..19: mol_type = other RNA
cctgggcacggcactcgag

SEQ ID NO: 20391 - RNA, 19 nt, synthetic construct
  source 1..19: mol_type = other RNA
tgtggtagtcggcactttg

SEQ ID NO: 20392 - RNA, 19 nt, synthetic construct
  source 1..19: mol_type = other RNA
tgtgtgctagaggagggtg

SEQ ID NO: 20393 - RNA, 19 nt, synthetic construct
  source 1..19: mol_type = other RNA
tgatcgtagtggccgtggt

SEQ ID NO: 20394 - RNA, 19 nt, synthetic construct
  source 1..19: mol_type = other RNA
ggataggtgttgtccctgg

SEQ ID NO: 20395 - RNA, 19 nt, synthetic construct
  source 1..19: mol_type = other RNA
gccgtggtgttcggcactg

SEQ ID NO: 20396 - RNA, 19 nt, synthetic construct
  source 1..19: mol_type = other RNA
ggctgtgcgcaccgtgtgg

SEQ ID NO: 20397 - RNA, 19 nt, synthetic construct
  source 1..19: mol_type = other RNA
aggctgtgcgcaccgtgtg

SEQ ID NO: 20398 - RNA, 19 nt, synthetic construct
  source 1..19: mol_type = other RNA
gggtggtaccggtggttgc

SEQ ID NO: 20399 - RNA, 19 nt, synthetic construct
  source 1..19: mol_type = other RNA
tggagtcgagtgctgggtg

SEQ ID NO: 20400 - RNA, 19 nt, synthetic construct
  source 1..19: mol_type = other RNA
ggtcaccaccgtggttatg

SEQ ID NO: 20401 - RNA, 19 nt, synthetic construct
  source 1..19: mol_type = other RNA
ggccccggcatggggtagc

SEQ ID NO: 20402 - RNA, 19 nt, synthetic construct
  source 1..19: mol_type = other RNA
cctgggcacggcactcgag

SEQ ID NO: 20403 - RNA, 19 nt, synthetic construct
  source 1..19: mol_type = other RNA
atgggtgtaacgctggtag

SEQ ID NO: 20404 - RNA, 19 nt, synthetic construct
  source 1..19: mol_type = other RNA
gtggcggtaagcactgtgg

SEQ ID NO: 20405 - RNA, 19 nt, synthetic construct
  source 1..19: mol_type = other RNA
tgtggtagtcggcactttg

SEQ ID NO: 20406 - RNA, 19 nt, synthetic construct
  source 1..19: mol_type = other RNA
gcgtgagtgccgtccctgg

SEQ ID NO: 20407 - RNA, 19 nt, synthetic construct
  source 1..19: mol_type = other RNA
tgtgtgctagaggagggtg

SEQ ID NO: 20408 - RNA, 19 nt, synthetic construct
  source 1..19: mol_type = other RNA
tgatcgtagtggccgtggt

SEQ ID NO: 20409 - RNA, 19 nt, synthetic construct
  source 1..19: mol_type = other RNA
ctgggacggtccacgtggt

SEQ ID NO: 20410 - RNA, 19 nt, synthetic construct
  source 1..19: mol_type = other RNA
ggccgtggaaccggtgggc

SEQ ID NO: 20411 - RNA, 19 nt, synthetic construct
  source 1..19: mol_type = other RNA
gtggacacgctgaaggttg

SEQ ID NO: 20412 - RNA, 19 nt, synthetic construct
  source 1..19: mol_type = other RNA
gggacaggcgccctggaag

SEQ ID NO: 20413 - RNA, 19 nt, synthetic construct
  source 1..19: mol_type = other RNA
agtgaggacgatatccatg

SEQ ID NO: 20414 - RNA, 19 nt, synthetic construct
  source 1..19: mol_type = other RNA
atgtccacacgcatggtgg

SEQ ID NO: 20415 - RNA, 19 nt, synthetic construct
  source 1..19: mol_type = other RNA
gaccagccacgtcttggcc

SEQ ID NO: 20416 - RNA, 19 nt, synthetic construct
  source 1..19: mol_type = other RNA
ggtgtgccagtcggggccc

SEQ ID NO: 20417 - RNA, 19 nt, synthetic construct
  source 1..19: mol_type = other RNA
tgcagtggtcgctgatgca

SEQ ID NO: 20418 - RNA, 19 nt, synthetic construct
  source 1..19: mol_type = other RNA
ggggccgcatggcttgtac

SEQ ID NO: 20419 - RNA, 19 nt, synthetic construct
  source 1..19: mol_type = other RNA
ccatgtgtgcgttgaagag

SEQ ID NO: 20420 - RNA, 19 nt, synthetic construct
  source 1..19: mol_type = other RNA
gggaaatttaggaaaccca

SEQ ID NO: 20421 - RNA, 19 nt, synthetic construct
  source 1..19: mol_type = other RNA
ccattgtacgaacacagct

SEQ ID NO: 20422 - RNA, 19 nt, synthetic construct
  source 1..19: mol_type = other RNA
ggcaggcggtctggacgca

SEQ ID NO: 20423 - RNA, 19 nt, synthetic construct
  source 1..19: mol_type = other RNA
aggcaggcggtctggacgc

SEQ ID NO: 20424 - RNA, 19 nt, synthetic construct
  source 1..19: mol_type = other RNA
ggccatcgggcgtgaggca

SEQ ID NO: 20425 - RNA, 19 nt, synthetic construct
  source 1..19: mol_type = other RNA
tacttggacgctccggggc

SEQ ID NO: 20426 - RNA, 19 nt, synthetic construct
  source 1..19: mol_type = other RNA
tgagccgttaggacagtgc

SEQ ID NO: 20427 - RNA, 19 nt, synthetic construct
  source 1..19: mol_type = other RNA
ggctgagccgttaggacag

SEQ ID NO: 20428 - RNA, 19 nt, synthetic construct
  source 1..19: mol_type = other RNA
gtgttgcacacgcacaccg

SEQ ID NO: 20429 - RNA, 19 nt, synthetic construct
  source 1..19: mol_type = other RNA
tgaccttgatgtagtcccc

SEQ ID NO: 20430 - RNA, 19 nt, synthetic construct
  source 1..19: mol_type = other RNA
agtgcgtggcactccgcaa

SEQ ID NO: 20431 - RNA, 19 nt, synthetic construct
  source 1..19: mol_type = other RNA
aggctgagcgtcaccgctt

SEQ ID NO: 20432 - RNA, 19 nt, synthetic construct
  source 1..19: mol_type = other RNA
ccacgtaggcgtagcgctg

SEQ ID NO: 20433 - RNA, 19 nt, synthetic construct
  source 1..19: mol_type = other RNA
ttagcttcccacccgtaca

SEQ ID NO: 20434 - RNA, 19 nt, synthetic construct
  source 1..19: mol_type = other RNA
gtatcttgtagggtgggtc

SEQ ID NO: 20435 - RNA, 19 nt, synthetic construct
  source 1..19: mol_type = other RNA
gaggcgtgagtgccgtccc

SEQ ID NO: 20436 - RNA, 19 nt, synthetic construct
  source 1..19: mol_type = other RNA
actggaagcgtgcgtgccg

SEQ ID NO: 20437 - RNA, 19 nt, synthetic construct
  source 1..19: mol_type = other RNA
gaggcgtgagtgccgtccc

SEQ ID NO: 20438 - RNA, 19 nt, synthetic construct
  source 1..19: mol_type = other RNA
gaggcgtgagtgccgtccc

SEQ ID NO: 20439 - RNA, 19 nt, synthetic construct
  source 1..19: mol_type = other RNA
ctcagtgaggatccgggtc

SEQ ID NO: 20440 - RNA, 19 nt, synthetic construct
  source 1..19: mol_type = other RNA
tggtcgctgatgcaggcgt

SEQ ID NO: 20441 - RNA, 19 nt, synthetic construct
  source 1..19: mol_type = other RNA
aggtacacggtgcagttgt

SEQ ID NO: 20442 - RNA, 19 nt, synthetic construct
  source 1..19: mol_type = other RNA
gagtacttggacgctccgg

SEQ ID NO: 20443 - RNA, 19 nt, synthetic construct
  source 1..19: mol_type = other RNA
ggaacaaagctcacgcgcc

SEQ ID NO: 20444 - RNA, 19 nt, synthetic construct
  source 1..19: mol_type = other RNA
atcacggtggctatagtgc

SEQ ID NO: 20445 - RNA, 19 nt, synthetic construct
  source 1..19: mol_type = other RNA
cgccgcccggcactcgatg

SEQ ID NO: 20446 - RNA, 19 nt, synthetic construct
  source 1..19: mol_type = other RNA
gtggtctgtgataggcggg

SEQ ID NO: 20447 - RNA, 19 nt, synthetic construct
  source 1..19: mol_type = other RNA
tgggtggtaccggtggttg

SEQ ID NO: 20448 - RNA, 19 nt, synthetic construct
  source 1..19: mol_type = other RNA
gtggtctgtgataggcggg

SEQ ID NO: 20449 - RNA, 19 nt, synthetic construct
  source 1..19: mol_type = other RNA
tccacactggaagcgtgcg

SEQ ID NO: 20450 - RNA, 19 nt, synthetic construct
  source 1..19: mol_type = other RNA
tgggtggtaccggtggttg

SEQ ID NO: 20451 - RNA, 19 nt, synthetic construct
  source 1..19: mol_type = other RNA
gtggtctgtgataggcggg

SEQ ID NO: 20452 - RNA, 19 nt, synthetic construct
  source 1..19: mol_type = other RNA
gtggtctgtgataggcggg

SEQ ID NO: 20453 - RNA, 19 nt, synthetic construct
  source 1..19: mol_type = other RNA
tgggtggtaccggtggttg

SEQ ID NO: 20454 - RNA, 19 nt, synthetic construct
  source 1..19: mol_type = other RNA
gtggtctgtgataggcggg

SEQ ID NO: 20455 - RNA, 19 nt, synthetic construct
  source 1..19: mol_type = other RNA
cactcatccacgtgggtgt

SEQ ID NO: 20456 - RNA, 19 nt, synthetic construct
  source 1..19: mol_type = other RNA
gccagtgcggctgtaaggc

SEQ ID NO: 20457 - RNA, 19 nt, synthetic construct
  source 1..19: mol_type = other RNA
tgcgtggcactccgcaaag

SEQ ID NO: 20458 - RNA, 19 nt, synthetic construct
  source 1..19: mol_type = other RNA
gtcattgaggaaggtgccc

SEQ ID NO: 20459 - RNA, 19 nt, synthetic construct
  source 1..19: mol_type = other RNA
agtgctgggtggtaccggt

SEQ ID NO: 20460 - RNA, 19 nt, synthetic construct
  source 1..19: mol_type = other RNA
ccggccgcacggatgttgg

SEQ ID NO: 20461 - RNA, 19 nt, synthetic construct
  source 1..19: mol_type = other RNA
cacggtggctgtagtgctc

SEQ ID NO: 20462 - RNA, 19 nt, synthetic construct
  source 1..19: mol_type = other RNA
agtgctgggtggtaccggt

SEQ ID NO: 20463 - RNA, 19 nt, synthetic construct
  source 1..19: mol_type = other RNA
ccggccgcacggatgttgg

SEQ ID NO: 20464 - RNA, 19 nt, synthetic construct
  source 1..19: mol_type = other RNA
ccggccgcacggatgttgg

SEQ ID NO: 20465 - RNA, 19 nt, synthetic construct
  source 1..19: mol_type = other RNA
cacggtggctgtagtgctc

SEQ ID NO: 20466 - RNA, 19 nt, synthetic construct
  source 1..19: mol_type = other RNA
agtgctgggtggtaccggt

SEQ ID NO: 20467 - RNA, 19 nt, synthetic construct
  source 1..19: mol_type = other RNA
ccggccgcacggatgttgg

SEQ ID NO: 20468 - RNA, 19 nt, synthetic construct
  source 1..19: mol_type = other RNA
cacggtggctgtagtgctc

SEQ ID NO: 20469 - RNA, 19 nt, synthetic construct
  source 1..19: mol_type = other RNA
tcagcactctggcggtgtg

SEQ ID NO: 20470 - RNA, 19 nt, synthetic construct
  source 1..19: mol_type = other RNA
tctgtgctgggacggtcca

SEQ ID NO: 20471 - RNA, 19 nt, synthetic construct
  source 1..19: mol_type = other RNA
tggcagccggctcggtcgg

SEQ ID NO: 20472 - RNA, 19 nt, synthetic construct
  source 1..19: mol_type = other RNA
gacactgaaccctcgtcac

SEQ ID NO: 20473 - RNA, 19 nt, synthetic construct
  source 1..19: mol_type = other RNA
tcacagaggtacacggtgc

SEQ ID NO: 20474 - RNA, 19 nt, synthetic construct
  source 1..19: mol_type = other RNA
acataggcccgcacatgct

SEQ ID NO: 20475 - RNA, 19 nt, synthetic construct
  source 1..19: mol_type = other RNA
gtggaacaaagctcacgcg

SEQ ID NO: 20476 - RNA, 19 nt, synthetic construct
  source 1..19: mol_type = other RNA
ctgtccaccagtgcgtggc

SEQ ID NO: 20477 - RNA, 19 nt, synthetic construct
  source 1..19: mol_type = other RNA
tccaggctgagcgtcaccg

SEQ ID NO: 20478 - RNA, 19 nt, synthetic construct
  source 1..19: mol_type = other RNA
tggcgaaggctgcgcccgt

SEQ ID NO: 20479 - RNA, 19 nt, synthetic construct
  source 1..19: mol_type = other RNA
gtacatgaacacacggcgc

SEQ ID NO: 20480 - RNA, 19 nt, synthetic construct
  source 1..19: mol_type = other RNA
gctgtggggtcagcaaatg

SEQ ID NO: 20481 - RNA, 19 nt, synthetic construct
  source 1..19: mol_type = other RNA
caaacgtctcaaagtctcc

SEQ ID NO: 20482 - RNA, 19 nt, synthetic construct
  source 1..19: mol_type = other RNA
gggccccggcatggggtag

SEQ ID NO: 20483 - RNA, 19 nt, synthetic construct
  source 1..19: mol_type = other RNA
gggccccggcatggggtag

SEQ ID NO: 20484 - RNA, 19 nt, synthetic construct
  source 1..19: mol_type = other RNA
gggccccggcatggggtag

SEQ ID NO: 20485 - RNA, 19 nt, synthetic construct
  source 1..19: mol_type = other RNA
gggccccggcatggggtag

SEQ ID NO: 20486 - RNA, 19 nt, synthetic construct
  source 1..19: mol_type = other RNA
ttaggaaacccatcgggtc

SEQ ID NO: 20487 - RNA, 19 nt, synthetic construct
  source 1..19: mol_type = other RNA
atggctgagccgttaggac

SEQ ID NO: 20488 - RNA, 19 nt, synthetic construct
  source 1..19: mol_type = other RNA
ccagcgtccggcacgcgct

SEQ ID NO: 20489 - RNA, 19 nt, synthetic construct
  source 1..19: mol_type = other RNA
tgtccaccagtgcgtggca

SEQ ID NO: 20490 - RNA, 19 nt, synthetic construct
  source 1..19: mol_type = other RNA
caggcggccaggtacgcag

SEQ ID NO: 20491 - RNA, 19 nt, synthetic construct
  source 1..19: mol_type = other RNA
gagttgaggaacacgccgc

SEQ ID NO: 20492 - RNA, 19 nt, synthetic construct
  source 1..19: mol_type = other RNA
atcggtcaggcgcgagcac

SEQ ID NO: 20493 - RNA, 19 nt, synthetic construct
  source 1..19: mol_type = other RNA
agcgcgagaaggcactgtt

SEQ ID NO: 20494 - RNA, 19 nt, synthetic construct
  source 1..19: mol_type = other RNA
cacggcgccctcgtcgtgc

SEQ ID NO: 20495 - RNA, 19 nt, synthetic construct
  source 1..19: mol_type = other RNA
agctgtagcgatcgccatc

SEQ ID NO: 20496 - RNA, 19 nt, synthetic construct
  source 1..19: mol_type = other RNA
gttggctgttggcgcacat

SEQ ID NO: 20497 - RNA, 19 nt, synthetic construct
  source 1..19: mol_type = other RNA
tcgtgacagagcgggggac

SEQ ID NO: 20498 - RNA, 19 nt, synthetic construct
  source 1..19: mol_type = other RNA
tcgcagcagagaacccgca

SEQ ID NO: 20499 - RNA, 19 nt, synthetic construct
  source 1..19: mol_type = other RNA
gggtcacccatagggtggt

SEQ ID NO: 20500 - RNA, 19 nt, synthetic construct
  source 1..19: mol_type = other RNA
gggccgccgtcgaccggat

SEQ ID NO: 20501 - RNA, 19 nt, synthetic construct
  source 1..19: mol_type = other RNA
aagaggggatgggtgtaac

SEQ ID NO: 20502 - RNA, 19 nt, synthetic construct
  source 1..19: mol_type = other RNA
tggccgtggcggtaagcac

SEQ ID NO: 20503 - RNA, 19 nt, synthetic construct
  source 1..19: mol_type = other RNA
agccggtggccccggttgt

SEQ ID NO: 20504 - RNA, 19 nt, synthetic construct
  source 1..19: mol_type = other RNA
gcccgtggttgtggtagtc

SEQ ID NO: 20505 - RNA, 19 nt, synthetic construct
  source 1..19: mol_type = other RNA
gcccgtggttgtggtagtc

SEQ ID NO: 20506 - RNA, 19 nt, synthetic construct
  source 1..19: mol_type = other RNA
tggccgtggcggtaagcac

SEQ ID NO: 20507 - RNA, 19 nt, synthetic construct
  source 1..19: mol_type = other RNA
agccggtggccccggttgt

SEQ ID NO: 20508 - RNA, 19 nt, synthetic construct
  source 1..19: mol_type = other RNA
gcccgtggttgtggtagtc

SEQ ID NO: 20509 - RNA, 19 nt, synthetic construct
  source 1..19: mol_type = other RNA
cggtggccgtggaaccggt

SEQ ID NO: 20510 - RNA, 19 nt, synthetic construct
  source 1..19: mol_type = other RNA
attgcacactgcgtagaaa

SEQ ID NO: 20511 - RNA, 19 nt, synthetic construct
  source 1..19: mol_type = other RNA
tggttgtccaggtagaggc

SEQ ID NO: 20512 - RNA, 19 nt, synthetic construct
  source 1..19: mol_type = other RNA
ggcagagctctgcgtaagc

SEQ ID NO: 20513 - RNA, 19 nt, synthetic construct
  source 1..19: mol_type = other RNA
cggcagagctctgcgtaag

SEQ ID NO: 20514 - RNA, 19 nt, synthetic construct
  source 1..19: mol_type = other RNA
aggaaacccatcgggtccc

SEQ ID NO: 20515 - RNA, 19 nt, synthetic construct
  source 1..19: mol_type = other RNA
cctggtcacggttacgaag

SEQ ID NO: 20516 - RNA, 19 nt, synthetic construct
  source 1..19: mol_type = other RNA
gtcgtgttgatgcggactt

SEQ ID NO: 20517 - RNA, 19 nt, synthetic construct
  source 1..19: mol_type = other RNA
gccacaggatggtcgtgtt

SEQ ID NO: 20518 - RNA, 19 nt, synthetic construct
  source 1..19: mol_type = other RNA
gctgagccgttaggacagt

SEQ ID NO: 20519 - RNA, 19 nt, synthetic construct
  source 1..19: mol_type = other RNA
cggcacgcgctcggggcac

SEQ ID NO: 20520 - RNA, 19 nt, synthetic construct
  source 1..19: mol_type = other RNA
tggagcccactaggcctcg

SEQ ID NO: 20521 - RNA, 19 nt, synthetic construct
  source 1..19: mol_type = other RNA
gacggagccgttggacgcc

SEQ ID NO: 20522 - RNA, 19 nt, synthetic construct
  source 1..19: mol_type = other RNA
gaggacggagccgttggac

SEQ ID NO: 20523 - RNA, 19 nt, synthetic construct
  source 1..19: mol_type = other RNA
gaggccagtgcggctgtaa

SEQ ID NO: 20524 - RNA, 19 nt, synthetic construct
  source 1..19: mol_type = other RNA
ggaggccgttgaagtcccc

SEQ ID NO: 20525 - RNA, 19 nt, synthetic construct
  source 1..19: mol_type = other RNA
cctcctcgtccgtgcagtt

SEQ ID NO: 20526 - RNA, 19 nt, synthetic construct
  source 1..19: mol_type = other RNA
gccctcctcgtccgtgcag

SEQ ID NO: 20527 - RNA, 19 nt, synthetic construct
  source 1..19: mol_type = other RNA
attccacaaaggtggcaca

SEQ ID NO: 20528 - RNA, 19 nt, synthetic construct
  source 1..19: mol_type = other RNA
cagccagagtgcgtgatgt

SEQ ID NO: 20529 - RNA, 19 nt, synthetic construct
  source 1..19: mol_type = other RNA
ggaggtgcccgggctgtag

SEQ ID NO: 20530 - RNA, 19 nt, synthetic construct
  source 1..19: mol_type = other RNA
agtttctcatcataggtgg

SEQ ID NO: 20531 - RNA, 19 nt, synthetic construct
  source 1..19: mol_type = other RNA
ctcagccagcacggtgaag

SEQ ID NO: 20532 - RNA, 19 nt, synthetic construct
  source 1..19: mol_type = other RNA
cgcttggacccggatggcc

SEQ ID NO: 20533 - RNA, 19 nt, synthetic construct
  source 1..19: mol_type = other RNA
cgccgccgtccgcttggac

SEQ ID NO: 20534 - RNA, 19 nt, synthetic construct
  source 1..19: mol_type = other RNA
aacacctgcatgagtggca

SEQ ID NO: 20535 - RNA, 19 nt, synthetic construct
  source 1..19: mol_type = other RNA
gcttcccacccgtacatga

SEQ ID NO: 20536 - RNA, 19 nt, synthetic construct
  source 1..19: mol_type = other RNA
aagctgtagcgatcgccat

SEQ ID NO: 20537 - RNA, 19 nt, synthetic construct
  source 1..19: mol_type = other RNA
tcctgggccaagatgtact

SEQ ID NO: 20538 - RNA, 19 nt, synthetic construct
  source 1..19: mol_type = other RNA
ggatgaacacgctggtctt

SEQ ID NO: 20539 - RNA, 19 nt, synthetic construct
  source 1..19: mol_type = other RNA
tcatagtagtttccgtcct

SEQ ID NO: 20540 - RNA, 19 nt, synthetic construct
  source 1..19: mol_type = other RNA
acccttgcaccgacgtcat

SEQ ID NO: 20541 - RNA, 19 nt, synthetic construct
  source 1..19: mol_type = other RNA
agatggcgatcaagcaggc

SEQ ID NO: 20542 - RNA, 19 nt, synthetic construct
  source 1..19: mol_type = other RNA
gccgcccggcactcgatgt

SEQ ID NO: 20543 - RNA, 19 nt, synthetic construct
  source 1..19: mol_type = other RNA
ttggctgttggcgcacatc

SEQ ID NO: 20544 - RNA, 19 nt, synthetic construct
  source 1..19: mol_type = other RNA
agggccgccgtcgaccgga

SEQ ID NO: 20545 - RNA, 19 nt, synthetic construct
  source 1..19: mol_type = other RNA
gagggccgccgtcgaccgg

SEQ ID NO: 20546 - RNA, 19 nt, synthetic construct
  source 1..19: mol_type = other RNA
ccagcggccctgatcttat

SEQ ID NO: 20547 - RNA, 19 nt, synthetic construct
  source 1..19: mol_type = other RNA
taggctgcggcgttgagaa

SEQ ID NO: 20548 - RNA, 19 nt, synthetic construct
  source 1..19: mol_type = other RNA
gctgtgaggggcgccatgt

SEQ ID NO: 20549 - RNA, 19 nt, synthetic construct
  source 1..19: mol_type = other RNA
gctgtgcctgtcgggcgag

SEQ ID NO: 20550 - RNA, 19 nt, synthetic construct
  source 1..19: mol_type = other RNA
cagcggctctttggaagcg

SEQ ID NO: 20551 - RNA, 19 nt, synthetic construct
  source 1..19: mol_type = other RNA
ctggaagggcggttgcagt

SEQ ID NO: 20552 - RNA, 19 nt, synthetic construct
  source 1..19: mol_type = other RNA
gtgtggtggtctgtgatag

SEQ ID NO: 20553 - RNA, 19 nt, synthetic construct
  source 1..19: mol_type = other RNA
tggtagttggcactttggt

SEQ ID NO: 20554 - RNA, 19 nt, synthetic construct
  source 1..19: mol_type = other RNA
gtaccggtggttgctgcta

SEQ ID NO: 20555 - RNA, 19 nt, synthetic construct
  source 1..19: mol_type = other RNA
ggtaccggtggttgctgct

SEQ ID NO: 20556 - RNA, 19 nt, synthetic construct
  source 1..19: mol_type = other RNA
ggtcgaggtgcgggtcttg

SEQ ID NO: 20557 - RNA, 19 nt, synthetic construct
  source 1..19: mol_type = other RNA
ctgggcacggcactcgagg

SEQ ID NO: 20558 - RNA, 19 nt, synthetic construct
  source 1..19: mol_type = other RNA
ctggaagggcggttgcagt

SEQ ID NO: 20559 - RNA, 19 nt, synthetic construct
  source 1..19: mol_type = other RNA
gtgtggtggtctgtgatag

SEQ ID NO: 20560 - RNA, 19 nt, synthetic construct
  source 1..19: mol_type = other RNA
gagggggtcaccgtggaac

SEQ ID NO: 20561 - RNA, 19 nt, synthetic construct
  source 1..19: mol_type = other RNA
ggtcgaggtgcgggtcttg

SEQ ID NO: 20562 - RNA, 19 nt, synthetic construct
  source 1..19: mol_type = other RNA
ctgggcacggcactcgagg

SEQ ID NO: 20563 - RNA, 19 nt, synthetic construct
  source 1..19: mol_type = other RNA
gggtgtaaagctggtagct

SEQ ID NO: 20564 - RNA, 19 nt, synthetic construct
  source 1..19: mol_type = other RNA
ctggaagggcggttgcagt

SEQ ID NO: 20565 - RNA, 19 nt, synthetic construct
  source 1..19: mol_type = other RNA
gtgtggtggtctgtgatag

SEQ ID NO: 20566 - RNA, 19 nt, synthetic construct
  source 1..19: mol_type = other RNA
tagtcggcactttggtagt

SEQ ID NO: 20567 - RNA, 19 nt, synthetic construct
  source 1..19: mol_type = other RNA
ggtcgaggtgcgggtcttg

SEQ ID NO: 20568 - RNA, 19 nt, synthetic construct
  source 1..19: mol_type = other RNA
cagcccgtggtcaccaccg

SEQ ID NO: 20569 - RNA, 19 nt, synthetic construct
  source 1..19: mol_type = other RNA
ctgggcacggcactcgagg

SEQ ID NO: 20570 - RNA, 19 nt, synthetic construct
  source 1..19: mol_type = other RNA
ctggaagggcggttgcagt

SEQ ID NO: 20571 - RNA, 19 nt, synthetic construct
  source 1..19: mol_type = other RNA
gtgtggtggtctgtgatag

SEQ ID NO: 20572 - RNA, 19 nt, synthetic construct
  source 1..19: mol_type = other RNA
tagtcggcactttggtagt

SEQ ID NO: 20573 - RNA, 19 nt, synthetic construct
  source 1..19: mol_type = other RNA
cactggaggcgtgcgtgcc

SEQ ID NO: 20574 - RNA, 19 nt, synthetic construct
  source 1..19: mol_type = other RNA
ggtcgaggtgcgggtcttg

SEQ ID NO: 20575 - RNA, 19 nt, synthetic construct
  source 1..19: mol_type = other RNA
cagcccgtggtcaccaccg

SEQ ID NO: 20576 - RNA, 19 nt, synthetic construct
  source 1..19: mol_type = other RNA
ctgggcacggcactcgagg

SEQ ID NO: 20577 - RNA, 19 nt, synthetic construct
  source 1..19: mol_type = other RNA
agggggtggacgtggaact

SEQ ID NO: 20578 - RNA, 19 nt, synthetic construct
  source 1..19: mol_type = other RNA
gtgtggtggtctgtgatag

SEQ ID NO: 20579 - RNA, 19 nt, synthetic construct
  source 1..19: mol_type = other RNA
tagtcggcactttggtagt

SEQ ID NO: 20580 - RNA, 19 nt, synthetic construct
  source 1..19: mol_type = other RNA
gggtgtaaagctggtagct

SEQ ID NO: 20581 - RNA, 19 nt, synthetic construct
  source 1..19: mol_type = other RNA
cttccccgggcgagaaaaa

SEQ ID NO: 20582 - RNA, 19 nt, synthetic construct
  source 1..19: mol_type = other RNA
tgacttccccgggcgagaa

SEQ ID NO: 20583 - RNA, 19 nt, synthetic construct
  source 1..19: mol_type = other RNA
gaaatggcagccggctcgg

SEQ ID NO: 20584 - RNA, 19 nt, synthetic construct
  source 1..19: mol_type = other RNA
agaaatggcagccggctcg

SEQ ID NO: 20585 - RNA, 19 nt, synthetic construct
  source 1..19: mol_type = other RNA
gaagcggtcaatgtcacag

SEQ ID NO: 20586 - RNA, 19 nt, synthetic construct
  source 1..19: mol_type = other RNA
gacagcggggcggaggaca

SEQ ID NO: 20587 - RNA, 19 nt, synthetic construct
  source 1..19: mol_type = other RNA
gattcccaaagcgtgcatg

SEQ ID NO: 20588 - RNA, 19 nt, synthetic construct
  source 1..19: mol_type = other RNA
gacagtgaggacgatatcc

SEQ ID NO: 20589 - RNA, 19 nt, synthetic construct
  source 1..19: mol_type = other RNA
cattgaaggtgacgctcac

SEQ ID NO: 20590 - RNA, 19 nt, synthetic construct
  source 1..19: mol_type = other RNA
gccattgaaggtgacgctc

SEQ ID NO: 20591 - RNA, 19 nt, synthetic construct
  source 1..19: mol_type = other RNA
tgtccttgcaactggcggc

SEQ ID NO: 20592 - RNA, 19 nt, synthetic construct
  source 1..19: mol_type = other RNA
atgtccttgcaactggcgg

SEQ ID NO: 20593 - RNA, 19 nt, synthetic construct
  source 1..19: mol_type = other RNA
ggtgggtgtgctagacacc

SEQ ID NO: 20594 - RNA, 19 nt, synthetic construct
  source 1..19: mol_type = other RNA
ggggcacaaggttgtggca

SEQ ID NO: 20595 - RNA, 19 nt, synthetic construct
  source 1..19: mol_type = other RNA
ctgcagtggtcgctgatgc

SEQ ID NO: 20596 - RNA, 19 nt, synthetic construct
  source 1..19: mol_type = other RNA
cagagctctgcgtaagcct

SEQ ID NO: 20597 - RNA, 19 nt, synthetic construct
  source 1..19: mol_type = other RNA
tcgggtcccacgcaggggc

SEQ ID NO: 20598 - RNA, 19 nt, synthetic construct
  source 1..19: mol_type = other RNA
ctgaaccctcgtcacacac

SEQ ID NO: 20599 - RNA, 19 nt, synthetic construct
  source 1..19: mol_type = other RNA
ggcctggtcacggttacga

SEQ ID NO: 20600 - RNA, 19 nt, synthetic construct
  source 1..19: mol_type = other RNA
ggggcctggtcacggttac

SEQ ID NO: 20601 - RNA, 19 nt, synthetic construct
  source 1..19: mol_type = other RNA
cacaggatggtcgtgttga

SEQ ID NO: 20602 - RNA, 19 nt, synthetic construct
  source 1..19: mol_type = other RNA
tggctgagccgttaggaca

SEQ ID NO: 20603 - RNA, 19 nt, synthetic construct
  source 1..19: mol_type = other RNA
ccgcagaggaggcccaagg

SEQ ID NO: 20604 - RNA, 19 nt, synthetic construct
  source 1..19: mol_type = other RNA
ggcgccctcccgaaagggg

SEQ ID NO: 20605 - RNA, 19 nt, synthetic construct
  source 1..19: mol_type = other RNA
cagggacacataggcccgc

SEQ ID NO: 20606 - RNA, 19 nt, synthetic construct
  source 1..19: mol_type = other RNA
acgcgctcggggcacccat

SEQ ID NO: 20607 - RNA, 19 nt, synthetic construct
  source 1..19: mol_type = other RNA
cacgcgctcggggcaccca

SEQ ID NO: 20608 - RNA, 19 nt, synthetic construct
  source 1..19: mol_type = other RNA
cgtccggcacgcgctcggg

SEQ ID NO: 20609 - RNA, 19 nt, synthetic construct
  source 1..19: mol_type = other RNA
tggccgccagagccaacac

SEQ ID NO: 20610 - RNA, 19 nt, synthetic construct
  source 1..19: mol_type = other RNA
atggccgccagagccaaca

SEQ ID NO: 20611 - RNA, 19 nt, synthetic construct
  source 1..19: mol_type = other RNA
caccacgagcatggccgcc

SEQ ID NO: 20612 - RNA, 19 nt, synthetic construct
  source 1..19: mol_type = other RNA
gcaccacgagcatggccgc

SEQ ID NO: 20613 - RNA, 19 nt, synthetic construct
  source 1..19: mol_type = other RNA
tctgcctgcggcaccacga

SEQ ID NO: 20614 - RNA, 19 nt, synthetic construct
  source 1..19: mol_type = other RNA
ctctgcctgcggcaccacg

SEQ ID NO: 20615 - RNA, 19 nt, synthetic construct
  source 1..19: mol_type = other RNA
gcaccgccatccatggtgt

SEQ ID NO: 20616 - RNA, 19 nt, synthetic construct
  source 1..19: mol_type = other RNA
tcggggcaccgccatccat

SEQ ID NO: 20617 - RNA, 19 nt, synthetic construct
  source 1..19: mol_type = other RNA
ctcacgcgccgggtgggcg

SEQ ID NO: 20618 - RNA, 19 nt, synthetic construct
  source 1..19: mol_type = other RNA
cgtagttgcaaaggccagg

SEQ ID NO: 20619 - RNA, 19 nt, synthetic construct
  source 1..19: mol_type = other RNA
acgtagttgcaaaggccag

SEQ ID NO: 20620 - RNA, 19 nt, synthetic construct
  source 1..19: mol_type = other RNA
gagcccactaggcctcggc

SEQ ID NO: 20621 - RNA, 19 nt, synthetic construct
  source 1..19: mol_type = other RNA
cggagccgttggacgcctc

SEQ ID NO: 20622 - RNA, 19 nt, synthetic construct
  source 1..19: mol_type = other RNA
acggagccgttggacgcct

SEQ ID NO: 20623 - RNA, 19 nt, synthetic construct
  source 1..19: mol_type = other RNA
gatgaggacggagccgttg

SEQ ID NO: 20624 - RNA, 19 nt, synthetic construct
  source 1..19: mol_type = other RNA
aggccagtgcggctgtaag

SEQ ID NO: 20625 - RNA, 19 nt, synthetic construct
  source 1..19: mol_type = other RNA
gaatgtcagcaccagccgg

SEQ ID NO: 20626 - RNA, 19 nt, synthetic construct
  source 1..19: mol_type = other RNA
ttggcgtatttgggatcca

SEQ ID NO: 20627 - RNA, 19 nt, synthetic construct
  source 1..19: mol_type = other RNA
ggttggcgtatttgggatc

SEQ ID NO: 20628 - RNA, 19 nt, synthetic construct
  source 1..19: mol_type = other RNA
actcgttgaaggccgggag

SEQ ID NO: 20629 - RNA, 19 nt, synthetic construct
  source 1..19: mol_type = other RNA
aactcgttgaaggccggga

SEQ ID NO: 20630 - RNA, 19 nt, synthetic construct
  source 1..19: mol_type = other RNA
cctggcgttgtgggcatag

SEQ ID NO: 20631 - RNA, 19 nt, synthetic construct
  source 1..19: mol_type = other RNA
caaactggagcggggtcag

SEQ ID NO: 20632 - RNA, 19 nt, synthetic construct
  source 1..19: mol_type = other RNA
agttgccggccggcaaggg

SEQ ID NO: 20633 - RNA, 19 nt, synthetic construct
  source 1..19: mol_type = other RNA
tgcagttgccggccggcaa

SEQ ID NO: 20634 - RNA, 19 nt, synthetic construct
  source 1..19: mol_type = other RNA
cgtgcagttgccggccggc

SEQ ID NO: 20635 - RNA, 19 nt, synthetic construct
  source 1..19: mol_type = other RNA
gtccaccagtgcgtggcac

SEQ ID NO: 20636 - RNA, 19 nt, synthetic construct
  source 1..19: mol_type = other RNA
gctgtccaccagtgcgtgg

SEQ ID NO: 20637 - RNA, 19 nt, synthetic construct
  source 1..19: mol_type = other RNA
ccaggtacgcagtgctgtc

SEQ ID NO: 20638 - RNA, 19 nt, synthetic construct
  source 1..19: mol_type = other RNA
cggccaggtacgcagtgct

SEQ ID NO: 20639 - RNA, 19 nt, synthetic construct
  source 1..19: mol_type = other RNA
ggcggccaggtacgcagtg

SEQ ID NO: 20640 - RNA, 19 nt, synthetic construct
  source 1..19: mol_type = other RNA
caaaggtggcacacgggca

SEQ ID NO: 20641 - RNA, 19 nt, synthetic construct
  source 1..19: mol_type = other RNA
tattccacaaaggtggcac

SEQ ID NO: 20642 - RNA, 19 nt, synthetic construct
  source 1..19: mol_type = other RNA
gtattccacaaaggtggca

SEQ ID NO: 20643 - RNA, 19 nt, synthetic construct
  source 1..19: mol_type = other RNA
tccagttccgcggctggcc

SEQ ID NO: 20644 - RNA, 19 nt, synthetic construct
  source 1..19: mol_type = other RNA
cctccagttccgcggctgg

SEQ ID NO: 20645 - RNA, 19 nt, synthetic construct
  source 1..19: mol_type = other RNA
catgttgagggggcaggtc

SEQ ID NO: 20646 - RNA, 19 nt, synthetic construct
  source 1..19: mol_type = other RNA
gcatgttgagggggcaggt

SEQ ID NO: 20647 - RNA, 19 nt, synthetic construct
  source 1..19: mol_type = other RNA
tgctgcatgttgagggggc

SEQ ID NO: 20648 - RNA, 19 nt, synthetic construct
  source 1..19: mol_type = other RNA
caggtgtccgtgcagggtg

SEQ ID NO: 20649 - RNA, 19 nt, synthetic construct
  source 1..19: mol_type = other RNA
gccatagccccccggagca

SEQ ID NO: 20650 - RNA, 19 nt, synthetic construct
  source 1..19: mol_type = other RNA
tcctggcactgccatagcc

SEQ ID NO: 20651 - RNA, 19 nt, synthetic construct
  source 1..19: mol_type = other RNA
tcataggtggagatgtggg

SEQ ID NO: 20652 - RNA, 19 nt, synthetic construct
  source 1..19: mol_type = other RNA
tcatcataggtggagatgt

SEQ ID NO: 20653 - RNA, 19 nt, synthetic construct
  source 1..19: mol_type = other RNA
tctcatcataggtggagat

SEQ ID NO: 20654 - RNA, 19 nt, synthetic construct
  source 1..19: mol_type = other RNA
caggtcgtagagtttctca

SEQ ID NO: 20655 - RNA, 19 nt, synthetic construct
  source 1..19: mol_type = other RNA
aacgtagctgcagtcacca

SEQ ID NO: 20656 - RNA, 19 nt, synthetic construct
  source 1..19: mol_type = other RNA
cgtcaggccgcacttccgc

SEQ ID NO: 20657 - RNA, 19 nt, synthetic construct
  source 1..19: mol_type = other RNA
ctcgttgtccgtcaggccg

SEQ ID NO: 20658 - RNA, 19 nt, synthetic construct
  source 1..19: mol_type = other RNA
tctcgttgtccgtcaggcc

SEQ ID NO: 20659 - RNA, 19 nt, synthetic construct
  source 1..19: mol_type = other RNA
agttctcgttgtccgtcag

SEQ ID NO: 20660 - RNA, 19 nt, synthetic construct
  source 1..19: mol_type = other RNA
caccgctttcaggcagttc

SEQ ID NO: 20661 - RNA, 19 nt, synthetic construct
  source 1..19: mol_type = other RNA
cgtcaccgctttcaggcag

SEQ ID NO: 20662 - RNA, 19 nt, synthetic construct
  source 1..19: mol_type = other RNA
ggctgagcgtcaccgcttt

SEQ ID NO: 20663 - RNA, 19 nt, synthetic construct
  source 1..19: mol_type = other RNA
tccgcttggacccggatgg

SEQ ID NO: 20664 - RNA, 19 nt, synthetic construct
  source 1..19: mol_type = other RNA
ccgccgtccgcttggaccc

SEQ ID NO: 20665 - RNA, 19 nt, synthetic construct
  source 1..19: mol_type = other RNA
ctgcaccacgatgaagaag

SEQ ID NO: 20666 - RNA, 19 nt, synthetic construct
  source 1..19: mol_type = other RNA
aaacacctgcatgagtggc

SEQ ID NO: 20667 - RNA, 19 nt, synthetic construct
  source 1..19: mol_type = other RNA
ccgctgagggccgtgaagt

SEQ ID NO: 20668 - RNA, 19 nt, synthetic construct
  source 1..19: mol_type = other RNA
accccgctgagggccgtga

SEQ ID NO: 20669 - RNA, 19 nt, synthetic construct
  source 1..19: mol_type = other RNA
gcgaaggctgcgcccgtgg

SEQ ID NO: 20670 - RNA, 19 nt, synthetic construct
  source 1..19: mol_type = other RNA
cgcgagaaggcactgttgg

SEQ ID NO: 20671 - RNA, 19 nt, synthetic construct
  source 1..19: mol_type = other RNA
gcagcgcgagaaggcactg

SEQ ID NO: 20672 - RNA, 19 nt, synthetic construct
  source 1..19: mol_type = other RNA
ctcactcaggccgcggcaa

SEQ ID NO: 20673 - RNA, 19 nt, synthetic construct
  source 1..19: mol_type = other RNA
gtgagcgtagcaggggcac

SEQ ID NO: 20674 - RNA, 19 nt, synthetic construct
  source 1..19: mol_type = other RNA
gccgtgagcgtagcagggg

SEQ ID NO: 20675 - RNA, 19 nt, synthetic construct
  source 1..19: mol_type = other RNA
ccagcacggtgccgtgagc

SEQ ID NO: 20676 - RNA, 19 nt, synthetic construct
  source 1..19: mol_type = other RNA
gagccagcacggtgccgtg

SEQ ID NO: 20677 - RNA, 19 nt, synthetic construct
  source 1..19: mol_type = other RNA
ctcgtcgtgcaccacctct

SEQ ID NO: 20678 - RNA, 19 nt, synthetic construct
  source 1..19: mol_type = other RNA
cctcgtcgtgcaccacctc

SEQ ID NO: 20679 - RNA, 19 nt, synthetic construct
  source 1..19: mol_type = other RNA
tgaacacacggcgccctcg

SEQ ID NO: 20680 - RNA, 19 nt, synthetic construct
  source 1..19: mol_type = other RNA
atgaacacacggcgccctc

SEQ ID NO: 20681 - RNA, 19 nt, synthetic construct
  source 1..19: mol_type = other RNA
catgaacacacggcgccct

SEQ ID NO: 20682 - RNA, 19 nt, synthetic construct
  source 1..19: mol_type = other RNA
agcttcccacccgtacatg

SEQ ID NO: 20683 - RNA, 19 nt, synthetic construct
  source 1..19: mol_type = other RNA
caggtacaccatgggggct

SEQ ID NO: 20684 - RNA, 19 nt, synthetic construct
  source 1..19: mol_type = other RNA
ccaggtacaccatgggggc

SEQ ID NO: 20685 - RNA, 19 nt, synthetic construct
  source 1..19: mol_type = other RNA
tccaggtacaccatggggg

SEQ ID NO: 20686 - RNA, 19 nt, synthetic construct
  source 1..19: mol_type = other RNA
agtcctcctcggcaatgca

SEQ ID NO: 20687 - RNA, 19 nt, synthetic construct
  source 1..19: mol_type = other RNA
ctgtagcgatcgccatcaa

SEQ ID NO: 20688 - RNA, 19 nt, synthetic construct
  source 1..19: mol_type = other RNA
aaagctgtagcgatcgcca

SEQ ID NO: 20689 - RNA, 19 nt, synthetic construct
  source 1..19: mol_type = other RNA
caaagctgtagcgatcgcc

SEQ ID NO: 20690 - RNA, 19 nt, synthetic construct
  source 1..19: mol_type = other RNA
ccaagatgtactcgcagct

SEQ ID NO: 20691 - RNA, 19 nt, synthetic construct
  source 1..19: mol_type = other RNA
cgccttaaaggtcccctct

SEQ ID NO: 20692 - RNA, 19 nt, synthetic construct
  source 1..19: mol_type = other RNA
tcgccaccgccttaaaggt

SEQ ID NO: 20693 - RNA, 19 nt, synthetic construct
  source 1..19: mol_type = other RNA
gtagggtgggtccccaccc

SEQ ID NO: 20694 - RNA, 19 nt, synthetic construct
  source 1..19: mol_type = other RNA
gtgggtctcgatgaccagg

SEQ ID NO: 20695 - RNA, 19 nt, synthetic construct
  source 1..19: mol_type = other RNA
acggccatcccgtgggtct

SEQ ID NO: 20696 - RNA, 19 nt, synthetic construct
  source 1..19: mol_type = other RNA
gtgcagtcggatgaacacg

SEQ ID NO: 20697 - RNA, 19 nt, synthetic construct
  source 1..19: mol_type = other RNA
gggtgccagggcgtccggg

SEQ ID NO: 20698 - RNA, 19 nt, synthetic construct
  source 1..19: mol_type = other RNA
cgccacccgagtcgcaggc

SEQ ID NO: 20699 - RNA, 19 nt, synthetic construct
  source 1..19: mol_type = other RNA
gcagtcgccacccgagtcg

SEQ ID NO: 20700 - RNA, 19 nt, synthetic construct
  source 1..19: mol_type = other RNA
gaacaaggggcaggtgtcc

SEQ ID NO: 20701 - RNA, 19 nt, synthetic construct
  source 1..19: mol_type = other RNA
agcccccatgtgggttgta

SEQ ID NO: 20702 - RNA, 19 nt, synthetic construct
  source 1..19: mol_type = other RNA
cagcccccatgtgggttgt

SEQ ID NO: 20703 - RNA, 19 nt, synthetic construct
  source 1..19: mol_type = other RNA
tagtagtttccgtccttgt

SEQ ID NO: 20704 - RNA, 19 nt, synthetic construct
  source 1..19: mol_type = other RNA
ctgtggggacccttgcacc

SEQ ID NO: 20705 - RNA, 19 nt, synthetic construct
  source 1..19: mol_type = other RNA
tgggtgtgcagttacagct

SEQ ID NO: 20706 - RNA, 19 nt, synthetic construct
  source 1..19: mol_type = other RNA
ggtagctgtaggtcctgtc

SEQ ID NO: 20707 - RNA, 19 nt, synthetic construct
  source 1..19: mol_type = other RNA
agcaggcgccaagcccatc

SEQ ID NO: 20708 - RNA, 19 nt, synthetic construct
  source 1..19: mol_type = other RNA
tggtgccgttgcttccgca

SEQ ID NO: 20709 - RNA, 19 nt, synthetic construct
  source 1..19: mol_type = other RNA
atgatggtgccgttgcttc

SEQ ID NO: 20710 - RNA, 19 nt, synthetic construct
  source 1..19: mol_type = other RNA
gatgatggtgccgttgctt

SEQ ID NO: 20711 - RNA, 19 nt, synthetic construct
  source 1..19: mol_type = other RNA
aaggtgaatggcgttgtgg

SEQ ID NO: 20712 - RNA, 19 nt, synthetic construct
  source 1..19: mol_type = other RNA
gtctcaaagtctccgcctc

SEQ ID NO: 20713 - RNA, 19 nt, synthetic construct
  source 1..19: mol_type = other RNA
cgtctcaaagtctccgcct

SEQ ID NO: 20714 - RNA, 19 nt, synthetic construct
  source 1..19: mol_type = other RNA
gcccccgcatgcggtcaca

SEQ ID NO: 20715 - RNA, 19 nt, synthetic construct
  source 1..19: mol_type = other RNA
catcagcccccgcatgcgg

SEQ ID NO: 20716 - RNA, 19 nt, synthetic construct
  source 1..19: mol_type = other RNA
ggcgcacatcagcccccgc

SEQ ID NO: 20717 - RNA, 19 nt, synthetic construct
  source 1..19: mol_type = other RNA
tggcgcacatcagcccccg

SEQ ID NO: 20718 - RNA, 19 nt, synthetic construct
  source 1..19: mol_type = other RNA
gttggcgcacatcagcccc

SEQ ID NO: 20719 - RNA, 19 nt, synthetic construct
  source 1..19: mol_type = other RNA
gtgacagagcgggggactc

SEQ ID NO: 20720 - RNA, 19 nt, synthetic construct
  source 1..19: mol_type = other RNA
agtcgtgacagagcggggg

SEQ ID NO: 20721 - RNA, 19 nt, synthetic construct
  source 1..19: mol_type = other RNA
ggcacgtattcgcagcaga

SEQ ID NO: 20722 - RNA, 19 nt, synthetic construct
  source 1..19: mol_type = other RNA
tggggtaggcacagcaggc

SEQ ID NO: 20723 - RNA, 19 nt, synthetic construct
  source 1..19: mol_type = other RNA
agctggacccagtctgcga

SEQ ID NO: 20724 - RNA, 19 nt, synthetic construct
  source 1..19: mol_type = other RNA
gtggtacctggggccgagg

SEQ ID NO: 20725 - RNA, 19 nt, synthetic construct
  source 1..19: mol_type = other RNA
gctggcataagtgccctcc

SEQ ID NO: 20726 - RNA, 19 nt, synthetic construct
  source 1..19: mol_type = other RNA
ctgctggcataagtgccct

SEQ ID NO: 20727 - RNA, 19 nt, synthetic construct
  source 1..19: mol_type = other RNA
cgaagtggacgtcacagtg

SEQ ID NO: 20728 - RNA, 19 nt, synthetic construct
  source 1..19: mol_type = other RNA
ccgaagtggacgtcacagt

SEQ ID NO: 20729 - RNA, 19 nt, synthetic construct
  source 1..19: mol_type = other RNA
tgcggcgttgagaacaggg

SEQ ID NO: 20730 - RNA, 19 nt, synthetic construct
  source 1..19: mol_type = other RNA
atgtcagtccttctgagag

SEQ ID NO: 20731 - RNA, 19 nt, synthetic construct
  source 1..19: mol_type = other RNA
tgtgtatctgggggatgtc

SEQ ID NO: 20732 - RNA, 19 nt, synthetic construct
  source 1..19: mol_type = other RNA
cgtggggcctcccgtggtg

SEQ ID NO: 20733 - RNA, 19 nt, synthetic construct
  source 1..19: mol_type = other RNA
aggcgtcgtggggcctccc

SEQ ID NO: 20734 - RNA, 19 nt, synthetic construct
  source 1..19: mol_type = other RNA
tccccgtcgtccctggaag

SEQ ID NO: 20735 - RNA, 19 nt, synthetic construct
  source 1..19: mol_type = other RNA
ctgtgaggggcgccatgtg

SEQ ID NO: 20736 - RNA, 19 nt, synthetic construct
  source 1..19: mol_type = other RNA
ggctgtgaggggcgccatg

SEQ ID NO: 20737 - RNA, 19 nt, synthetic construct
  source 1..19: mol_type = other RNA
gttgttggggccagcgtgg

SEQ ID NO: 20738 - RNA, 19 nt, synthetic construct
  source 1..19: mol_type = other RNA
ccattgttgttggggccag

SEQ ID NO: 20739 - RNA, 19 nt, synthetic construct
  source 1..19: mol_type = other RNA
gggcgagctctggaggttg

SEQ ID NO: 20740 - RNA, 19 nt, synthetic construct
  source 1..19: mol_type = other RNA
gtcgggcgagctctggagg

SEQ ID NO: 20741 - RNA, 19 nt, synthetic construct
  source 1..19: mol_type = other RNA
tggtcagcggctctttgga

SEQ ID NO: 20742 - RNA, 19 nt, synthetic construct
  source 1..19: mol_type = other RNA
gtggtcagcggctctttgg

SEQ ID NO: 20743 - RNA, 19 nt, synthetic construct
  source 1..19: mol_type = other RNA
tcgtggtcagcggctcttt

SEQ ID NO: 20744 - RNA, 19 nt, synthetic construct
  source 1..19: mol_type = other RNA
tggcgccaggctcgtggtc

SEQ ID NO: 20745 - RNA, 19 nt, synthetic construct
  source 1..19: mol_type = other RNA
gttggcgccaggctcgtgg

SEQ ID NO: 20746 - RNA, 19 nt, synthetic construct
  source 1..19: mol_type = other RNA
ggacagctcgctcgtgagt

SEQ ID NO: 20747 - RNA, 19 nt, synthetic construct
  source 1..19: mol_type = other RNA
tggtctcggcctgagaggt

SEQ ID NO: 20748 - RNA, 19 nt, synthetic construct
  source 1..19: mol_type = other RNA
cgtgctggtctcggcctga

SEQ ID NO: 20749 - RNA, 19 nt, synthetic construct
  source 1..19: mol_type = other RNA
gggcgtgctggtctcggcc

SEQ ID NO: 20750 - RNA, 19 nt, synthetic construct
  source 1..19: mol_type = other RNA
aaggggctcattgtcgtct

SEQ ID NO: 20751 - RNA, 19 nt, synthetic construct
  source 1..19: mol_type = other RNA
taacgctggtagctgtggg

SEQ ID NO: 20752 - RNA, 19 nt, synthetic construct
  source 1..19: mol_type = other RNA
ggtctgtgataggcgggtc

SEQ ID NO: 20753 - RNA, 19 nt, synthetic construct
  source 1..19: mol_type = other RNA
gtggccgtgggtgtggtgg

SEQ ID NO: 20754 - RNA, 19 nt, synthetic construct
  source 1..19: mol_type = other RNA
gtaagcactgtggaggtgt

SEQ ID NO: 20755 - RNA, 19 nt, synthetic construct
  source 1..19: mol_type = other RNA
cccgtggttgtggtagttg

SEQ ID NO: 20756 - RNA, 19 nt, synthetic construct
  source 1..19: mol_type = other RNA
gaagcccgtggttgtggta

SEQ ID NO: 20757 - RNA, 19 nt, synthetic construct
  source 1..19: mol_type = other RNA
ctgtgaagcccgtggttgt

SEQ ID NO: 20758 - RNA, 19 nt, synthetic construct
  source 1..19: mol_type = other RNA
aggcgtgagtgccgtccct

SEQ ID NO: 20759 - RNA, 19 nt, synthetic construct
  source 1..19: mol_type = other RNA
tgatccacactggaggcgt

SEQ ID NO: 20760 - RNA, 19 nt, synthetic construct
  source 1..19: mol_type = other RNA
ccgtggagcctctggttgt

SEQ ID NO: 20761 - RNA, 19 nt, synthetic construct
  source 1..19: mol_type = other RNA
gtgggtggtccccgggatg

SEQ ID NO: 20762 - RNA, 19 nt, synthetic construct
  source 1..19: mol_type = other RNA
tggtcagcactgtggcggt

SEQ ID NO: 20763 - RNA, 19 nt, synthetic construct
  source 1..19: mol_type = other RNA
tagaaccagtggccacagt

SEQ ID NO: 20764 - RNA, 19 nt, synthetic construct
  source 1..19: mol_type = other RNA
actggtctgtgtgctagag

SEQ ID NO: 20765 - RNA, 19 nt, synthetic construct
  source 1..19: mol_type = other RNA
ggtggtcagtgatggggga

SEQ ID NO: 20766 - RNA, 19 nt, synthetic construct
  source 1..19: mol_type = other RNA
cggtggccgtgatcgtagt

SEQ ID NO: 20767 - RNA, 19 nt, synthetic construct
  source 1..19: mol_type = other RNA
tgttcggcactgggggtgt

SEQ ID NO: 20768 - RNA, 19 nt, synthetic construct
  source 1..19: mol_type = other RNA
ggtgttcggcactgggggt

SEQ ID NO: 20769 - RNA, 19 nt, synthetic construct
  source 1..19: mol_type = other RNA
tcgcccgtgtgtggtggcc

SEQ ID NO: 20770 - RNA, 19 nt, synthetic construct
  source 1..19: mol_type = other RNA
gggcagggatcgcccgtgt

SEQ ID NO: 20771 - RNA, 19 nt, synthetic construct
  source 1..19: mol_type = other RNA
gggggcagggatcgcccgt

SEQ ID NO: 20772 - RNA, 19 nt, synthetic construct
  source 1..19: mol_type = other RNA
gtgcgcaccgtgtggggac

SEQ ID NO: 20773 - RNA, 19 nt, synthetic construct
  source 1..19: mol_type = other RNA
tgtgcgcaccgtgtgggga

SEQ ID NO: 20774 - RNA, 19 nt, synthetic construct
  source 1..19: mol_type = other RNA
atgcccgaggtggccgaag

SEQ ID NO: 20775 - RNA, 19 nt, synthetic construct
  source 1..19: mol_type = other RNA
gtgatgtgggtggtgccca

SEQ ID NO: 20776 - RNA, 19 nt, synthetic construct
  source 1..19: mol_type = other RNA
gctggagtcgagtgctggg

SEQ ID NO: 20777 - RNA, 19 nt, synthetic construct
  source 1..19: mol_type = other RNA
tggttctgctgctagggtg

SEQ ID NO: 20778 - RNA, 19 nt, synthetic construct
  source 1..19: mol_type = other RNA
ggtgactcggtggttctgc

SEQ ID NO: 20779 - RNA, 19 nt, synthetic construct
  source 1..19: mol_type = other RNA
agaagggggtgactcggtg

SEQ ID NO: 20780 - RNA, 19 nt, synthetic construct
  source 1..19: mol_type = other RNA
tggcccggggtggtcgtcc

SEQ ID NO: 20781 - RNA, 19 nt, synthetic construct
  source 1..19: mol_type = other RNA
ccgtggtgtggcccggggt

SEQ ID NO: 20782 - RNA, 19 nt, synthetic construct
  source 1..19: mol_type = other RNA
ggtcttgctgggtgtggcc

SEQ ID NO: 20783 - RNA, 19 nt, synthetic construct
  source 1..19: mol_type = other RNA
atgggggccgatgtggggc

SEQ ID NO: 20784 - RNA, 19 nt, synthetic construct
  source 1..19: mol_type = other RNA
ggttatgggggccgatgtg

SEQ ID NO: 20785 - RNA, 19 nt, synthetic construct
  source 1..19: mol_type = other RNA
accaccgtggttatggggg

SEQ ID NO: 20786 - RNA, 19 nt, synthetic construct
  source 1..19: mol_type = other RNA
tcaccaccgtggttatggg

SEQ ID NO: 20787 - RNA, 19 nt, synthetic construct
  source 1..19: mol_type = other RNA
gtagctgtagtccagccac

SEQ ID NO: 20788 - RNA, 19 nt, synthetic construct
  source 1..19: mol_type = other RNA
ccggcatggggtagctgta

SEQ ID NO: 20789 - RNA, 19 nt, synthetic construct
  source 1..19: mol_type = other RNA
gcacggatgttggagtagg

SEQ ID NO: 20790 - RNA, 19 nt, synthetic construct
  source 1..19: mol_type = other RNA
tgctcacagacggcccctc

SEQ ID NO: 20791 - RNA, 19 nt, synthetic construct
  source 1..19: mol_type = other RNA
gagggcatggccgtagagc

SEQ ID NO: 20792 - RNA, 19 nt, synthetic construct
  source 1..19: mol_type = other RNA
ggctgtagtgctcggctct

SEQ ID NO: 20793 - RNA, 19 nt, synthetic construct
  source 1..19: mol_type = other RNA
ggtggctgtagtgctcggc

SEQ ID NO: 20794 - RNA, 19 nt, synthetic construct
  source 1..19: mol_type = other RNA
ggcaccgtcacggtggctg

SEQ ID NO: 20795 - RNA, 19 nt, synthetic construct
  source 1..19: mol_type = other RNA
gggcaccgtcacggtggct

SEQ ID NO: 20796 - RNA, 19 nt, synthetic construct
  source 1..19: mol_type = other RNA
atccggtgggcaccgtcac

SEQ ID NO: 20797 - RNA, 19 nt, synthetic construct
  source 1..19: mol_type = other RNA
ggccgtggatccggtgggc

SEQ ID NO: 20798 - RNA, 19 nt, synthetic construct
  source 1..19: mol_type = other RNA
tggccgtggatccggtggg

SEQ ID NO: 20799 - RNA, 19 nt, synthetic construct
  source 1..19: mol_type = other RNA
cggtggccgtggatccggt

SEQ ID NO: 20800 - RNA, 19 nt, synthetic construct
  source 1..19: mol_type = other RNA
tggggtgccagcagttgcc

SEQ ID NO: 20801 - RNA, 19 nt, synthetic construct
  source 1..19: mol_type = other RNA
ggggatggctgtaaagctg

SEQ ID NO: 20802 - RNA, 19 nt, synthetic construct
  source 1..19: mol_type = other RNA
ggtctgtgataggcgggtc

SEQ ID NO: 20803 - RNA, 19 nt, synthetic construct
  source 1..19: mol_type = other RNA
gtggccgtgggtgtggtgg

SEQ ID NO: 20804 - RNA, 19 nt, synthetic construct
  source 1..19: mol_type = other RNA
gtggaggtgtggacagtct

SEQ ID NO: 20805 - RNA, 19 nt, synthetic construct
  source 1..19: mol_type = other RNA
gtaagcactgtggaggtgt

SEQ ID NO: 20806 - RNA, 19 nt, synthetic construct
  source 1..19: mol_type = other RNA
gcccgtggttgtggtagtc

SEQ ID NO: 20807 - RNA, 19 nt, synthetic construct
  source 1..19: mol_type = other RNA
gaagcccgtggttgtggta

SEQ ID NO: 20808 - RNA, 19 nt, synthetic construct
  source 1..19: mol_type = other RNA
ctgtgaagcccgtggttgt

SEQ ID NO: 20809 - RNA, 19 nt, synthetic construct
  source 1..19: mol_type = other RNA
cacactggaagcgtgcgtg

SEQ ID NO: 20810 - RNA, 19 nt, synthetic construct
  source 1..19: mol_type = other RNA
ccacactggaagcgtgcgt

SEQ ID NO: 20811 - RNA, 19 nt, synthetic construct
  source 1..19: mol_type = other RNA
ggggtcaccgtggaacctc

SEQ ID NO: 20812 - RNA, 19 nt, synthetic construct
  source 1..19: mol_type = other RNA
gggggtcaccgtggaacct

SEQ ID NO: 20813 - RNA, 19 nt, synthetic construct
  source 1..19: mol_type = other RNA
gtgggtggtccccgggatg

SEQ ID NO: 20814 - RNA, 19 nt, synthetic construct
  source 1..19: mol_type = other RNA
tagaaccagtggccacagt

SEQ ID NO: 20815 - RNA, 19 nt, synthetic construct
  source 1..19: mol_type = other RNA
actggtctgtgtgctagag

SEQ ID NO: 20816 - RNA, 19 nt, synthetic construct
  source 1..19: mol_type = other RNA
ggtggtcagtgatggggga

SEQ ID NO: 20817 - RNA, 19 nt, synthetic construct
  source 1..19: mol_type = other RNA
cggtggccgtgatcgtagt

SEQ ID NO: 20818 - RNA, 19 nt, synthetic construct
  source 1..19: mol_type = other RNA
gggggataggtgttgtccc

SEQ ID NO: 20819 - RNA, 19 nt, synthetic construct
  source 1..19: mol_type = other RNA
agcactggggggataggtg

SEQ ID NO: 20820 - RNA, 19 nt, synthetic construct
  source 1..19: mol_type = other RNA
tgttcggcactgggggtgt

SEQ ID NO: 20821 - RNA, 19 nt, synthetic construct
  source 1..19: mol_type = other RNA
ggtgttcggcactgggggt

SEQ ID NO: 20822 - RNA, 19 nt, synthetic construct
  source 1..19: mol_type = other RNA
tggccgtggtgttcggcac

SEQ ID NO: 20823 - RNA, 19 nt, synthetic construct
  source 1..19: mol_type = other RNA
gtgcgcaccgtgtggggac

SEQ ID NO: 20824 - RNA, 19 nt, synthetic construct
  source 1..19: mol_type = other RNA
tgtgcgcaccgtgtgggga

SEQ ID NO: 20825 - RNA, 19 nt, synthetic construct
  source 1..19: mol_type = other RNA
gtgatgtgggtggtgccca

SEQ ID NO: 20826 - RNA, 19 nt, synthetic construct
  source 1..19: mol_type = other RNA
gtaccggtggttgctgctg

SEQ ID NO: 20827 - RNA, 19 nt, synthetic construct
  source 1..19: mol_type = other RNA
gctggagtcgagtgctggg

SEQ ID NO: 20828 - RNA, 19 nt, synthetic construct
  source 1..19: mol_type = other RNA
agaagggggtgactcggtg

SEQ ID NO: 20829 - RNA, 19 nt, synthetic construct
  source 1..19: mol_type = other RNA
tggcccggggtggtcgtcc

SEQ ID NO: 20830 - RNA, 19 nt, synthetic construct
  source 1..19: mol_type = other RNA
ggtcttgctgggtgtggcc

SEQ ID NO: 20831 - RNA, 19 nt, synthetic construct
  source 1..19: mol_type = other RNA
tggttattggggccgatgt

SEQ ID NO: 20832 - RNA, 19 nt, synthetic construct
  source 1..19: mol_type = other RNA
accaccgtggttattgggg

SEQ ID NO: 20833 - RNA, 19 nt, synthetic construct
  source 1..19: mol_type = other RNA
gtagctgtagtccagccac

SEQ ID NO: 20834 - RNA, 19 nt, synthetic construct
  source 1..19: mol_type = other RNA
ccggcatggggtagctgta

SEQ ID NO: 20835 - RNA, 19 nt, synthetic construct
  source 1..19: mol_type = other RNA
gcacggatgttggagtagg

SEQ ID NO: 20836 - RNA, 19 nt, synthetic construct
  source 1..19: mol_type = other RNA
tgctcacagacggcccctc

SEQ ID NO: 20837 - RNA, 19 nt, synthetic construct
  source 1..19: mol_type = other RNA
tggttgcggtcgtagtggc

SEQ ID NO: 20838 - RNA, 19 nt, synthetic construct
  source 1..19: mol_type = other RNA
agtggttgcggtcgtagtg

SEQ ID NO: 20839 - RNA, 19 nt, synthetic construct
  source 1..19: mol_type = other RNA
cactggaagggtggttgca

SEQ ID NO: 20840 - RNA, 19 nt, synthetic construct
  source 1..19: mol_type = other RNA
aggggatgggtgtaaagct

SEQ ID NO: 20841 - RNA, 19 nt, synthetic construct
  source 1..19: mol_type = other RNA
gaggggatgggtgtaaagc

SEQ ID NO: 20842 - RNA, 19 nt, synthetic construct
  source 1..19: mol_type = other RNA
gtggtctgttctgggaggg

SEQ ID NO: 20843 - RNA, 19 nt, synthetic construct
  source 1..19: mol_type = other RNA
tgggtggtctccggagtgg

SEQ ID NO: 20844 - RNA, 19 nt, synthetic construct
  source 1..19: mol_type = other RNA
gccttcgtggtcagcactg

SEQ ID NO: 20845 - RNA, 19 nt, synthetic construct
  source 1..19: mol_type = other RNA
gtggccttcgtggtcagca

SEQ ID NO: 20846 - RNA, 19 nt, synthetic construct
  source 1..19: mol_type = other RNA
aactggtggcccttgtcgt

SEQ ID NO: 20847 - RNA, 19 nt, synthetic construct
  source 1..19: mol_type = other RNA
ggcaccgtcacggtggctg

SEQ ID NO: 20848 - RNA, 19 nt, synthetic construct
  source 1..19: mol_type = other RNA
gggcaccgtcacggtggct

SEQ ID NO: 20849 - RNA, 19 nt, synthetic construct
  source 1..19: mol_type = other RNA
atccggtgggcaccgtcac

SEQ ID NO: 20850 - RNA, 19 nt, synthetic construct
  source 1..19: mol_type = other RNA
ggccgtggatccggtgggc

SEQ ID NO: 20851 - RNA, 19 nt, synthetic construct
  source 1..19: mol_type = other RNA
tggccgtggatccggtggg

SEQ ID NO: 20852 - RNA, 19 nt, synthetic construct
  source 1..19: mol_type = other RNA
cggtggccgtggatccggt

SEQ ID NO: 20853 - RNA, 19 nt, synthetic construct
  source 1..19: mol_type = other RNA
cagcagttgcccgggtgga

SEQ ID NO: 20854 - RNA, 19 nt, synthetic construct
  source 1..19: mol_type = other RNA
taacgctggtagctgtggg

SEQ ID NO: 20855 - RNA, 19 nt, synthetic construct
  source 1..19: mol_type = other RNA
ggtctgtgataggcgggtc

SEQ ID NO: 20856 - RNA, 19 nt, synthetic construct
  source 1..19: mol_type = other RNA
gtggccgtgggtgtggtgg

SEQ ID NO: 20857 - RNA, 19 nt, synthetic construct
  source 1..19: mol_type = other RNA
tggacagtctctggagtag

SEQ ID NO: 20858 - RNA, 19 nt, synthetic construct
  source 1..19: mol_type = other RNA
gtggaggtgtggacagtct

SEQ ID NO: 20859 - RNA, 19 nt, synthetic construct
  source 1..19: mol_type = other RNA
gtaagcactgtggaggtgt

SEQ ID NO: 20860 - RNA, 19 nt, synthetic construct
  source 1..19: mol_type = other RNA
gaagcccgtggttgtggta

SEQ ID NO: 20861 - RNA, 19 nt, synthetic construct
  source 1..19: mol_type = other RNA
ctgtgaagcccgtggttgt

SEQ ID NO: 20862 - RNA, 19 nt, synthetic construct
  source 1..19: mol_type = other RNA
aggcgtgagtgccgtccct

SEQ ID NO: 20863 - RNA, 19 nt, synthetic construct
  source 1..19: mol_type = other RNA
tgatccacactggaggcgt

SEQ ID NO: 20864 - RNA, 19 nt, synthetic construct
  source 1..19: mol_type = other RNA
ccgtggagcctctggttgt

SEQ ID NO: 20865 - RNA, 19 nt, synthetic construct
  source 1..19: mol_type = other RNA
gtgggtggtccccgggatg

SEQ ID NO: 20866 - RNA, 19 nt, synthetic construct
  source 1..19: mol_type = other RNA
tggtcagcactgtggcggt

SEQ ID NO: 20867 - RNA, 19 nt, synthetic construct
  source 1..19: mol_type = other RNA
tagaaccagtggccacagt

SEQ ID NO: 20868 - RNA, 19 nt, synthetic construct
  source 1..19: mol_type = other RNA
actggtctgtgtgctagag

SEQ ID NO: 20869 - RNA, 19 nt, synthetic construct
  source 1..19: mol_type = other RNA
ggtggtcagtgatggggga

SEQ ID NO: 20870 - RNA, 19 nt, synthetic construct
  source 1..19: mol_type = other RNA
ccggtggctgtgatcgtag

SEQ ID NO: 20871 - RNA, 19 nt, synthetic construct
  source 1..19: mol_type = other RNA
tgttcggcactgggggtgt

SEQ ID NO: 20872 - RNA, 19 nt, synthetic construct
  source 1..19: mol_type = other RNA
ggtgttcggcactgggggt

SEQ ID NO: 20873 - RNA, 19 nt, synthetic construct
  source 1..19: mol_type = other RNA
tggccgtggtgttcggcac

SEQ ID NO: 20874 - RNA, 19 nt, synthetic construct
  source 1..19: mol_type = other RNA
gtgcgcaccgtgtggggac

SEQ ID NO: 20875 - RNA, 19 nt, synthetic construct
  source 1..19: mol_type = other RNA
tgtgcgcaccgtgtgggga

SEQ ID NO: 20876 - RNA, 19 nt, synthetic construct
  source 1..19: mol_type = other RNA
atgcccgaggtggccgaag

SEQ ID NO: 20877 - RNA, 19 nt, synthetic construct
  source 1..19: mol_type = other RNA
gtgatgtgggtggtgccca

SEQ ID NO: 20878 - RNA, 19 nt, synthetic construct
  source 1..19: mol_type = other RNA
gagtgctgggtggtactgg

SEQ ID NO: 20879 - RNA, 19 nt, synthetic construct
  source 1..19: mol_type = other RNA
gctggagtcgagtgctggg

SEQ ID NO: 20880 - RNA, 19 nt, synthetic construct
  source 1..19: mol_type = other RNA
agaagggggtgactcggtg

SEQ ID NO: 20881 - RNA, 19 nt, synthetic construct
  source 1..19: mol_type = other RNA
tggcccggggtggtcgtcc

SEQ ID NO: 20882 - RNA, 19 nt, synthetic construct
  source 1..19: mol_type = other RNA
atgggggccgatgtggggc

SEQ ID NO: 20883 - RNA, 19 nt, synthetic construct
  source 1..19: mol_type = other RNA
ggttatgggggccgatgtg

SEQ ID NO: 20884 - RNA, 19 nt, synthetic construct
  source 1..19: mol_type = other RNA
accaccgtggttatggggg

SEQ ID NO: 20885 - RNA, 19 nt, synthetic construct
  source 1..19: mol_type = other RNA
tcaccaccgtggttatggg

SEQ ID NO: 20886 - RNA, 19 nt, synthetic construct
  source 1..19: mol_type = other RNA
ggggctcacagcccgtggt

SEQ ID NO: 20887 - RNA, 19 nt, synthetic construct
  source 1..19: mol_type = other RNA
gtagctgtagtccagccac

SEQ ID NO: 20888 - RNA, 19 nt, synthetic construct
  source 1..19: mol_type = other RNA
ccggcatggggtagctgta

SEQ ID NO: 20889 - RNA, 19 nt, synthetic construct
  source 1..19: mol_type = other RNA
gcacggatgttggagtagg

SEQ ID NO: 20890 - RNA, 19 nt, synthetic construct
  source 1..19: mol_type = other RNA
ggctgtagtgctcggctct

SEQ ID NO: 20891 - RNA, 19 nt, synthetic construct
  source 1..19: mol_type = other RNA
ggtggctgtagtgctcggc

SEQ ID NO: 20892 - RNA, 19 nt, synthetic construct
  source 1..19: mol_type = other RNA
ggcaccgtcacggtggctg

SEQ ID NO: 20893 - RNA, 19 nt, synthetic construct
  source 1..19: mol_type = other RNA
gggcaccgtcacggtggct

SEQ ID NO: 20894 - RNA, 19 nt, synthetic construct
  source 1..19: mol_type = other RNA
atccggtgggcaccgtcac

SEQ ID NO: 20895 - RNA, 19 nt, synthetic construct
  source 1..19: mol_type = other RNA
ggccgtggatccggtgggc

SEQ ID NO: 20896 - RNA, 19 nt, synthetic construct
  source 1..19: mol_type = other RNA
tggccgtggatccggtggg

SEQ ID NO: 20897 - RNA, 19 nt, synthetic construct
  source 1..19: mol_type = other RNA
cggtggccgtggatccggt

SEQ ID NO: 20898 - RNA, 19 nt, synthetic construct
  source 1..19: mol_type = other RNA
tggggtgccagcagttgcc

SEQ ID NO: 20899 - RNA, 19 nt, synthetic construct
  source 1..19: mol_type = other RNA
ggggatggctgtaaagctg

SEQ ID NO: 20900 - RNA, 19 nt, synthetic construct
  source 1..19: mol_type = other RNA
ggtctgtgataggcgggtc

SEQ ID NO: 20901 - RNA, 19 nt, synthetic construct
  source 1..19: mol_type = other RNA
gtggccgtgggtgtggtgg

SEQ ID NO: 20902 - RNA, 19 nt, synthetic construct
  source 1..19: mol_type = other RNA
gtaagcactgtggaggtgt

SEQ ID NO: 20903 - RNA, 19 nt, synthetic construct
  source 1..19: mol_type = other RNA
gaagcccgtggttgtggta

SEQ ID NO: 20904 - RNA, 19 nt, synthetic construct
  source 1..19: mol_type = other RNA
ctgtgaagcccgtggttgt

SEQ ID NO: 20905 - RNA, 19 nt, synthetic construct
  source 1..19: mol_type = other RNA
gggtgactgtgaagcccgt

SEQ ID NO: 20906 - RNA, 19 nt, synthetic construct
  source 1..19: mol_type = other RNA
acactggaggcgtgcgtgc

SEQ ID NO: 20907 - RNA, 19 nt, synthetic construct
  source 1..19: mol_type = other RNA
ccacactggaggcgtgcgt

SEQ ID NO: 20908 - RNA, 19 nt, synthetic construct
  source 1..19: mol_type = other RNA
gatccacactggaggcgtg

SEQ ID NO: 20909 - RNA, 19 nt, synthetic construct
  source 1..19: mol_type = other RNA
tgatccacactggaggcgt

SEQ ID NO: 20910 - RNA, 19 nt, synthetic construct
  source 1..19: mol_type = other RNA
gagccactggttgtgggtg

SEQ ID NO: 20911 - RNA, 19 nt, synthetic construct
  source 1..19: mol_type = other RNA
gtgggtggtccccgggacg

SEQ ID NO: 20912 - RNA, 19 nt, synthetic construct
  source 1..19: mol_type = other RNA
tagaaccagtggccacagt

SEQ ID NO: 20913 - RNA, 19 nt, synthetic construct
  source 1..19: mol_type = other RNA
actggtctgtgtgctagag

SEQ ID NO: 20914 - RNA, 19 nt, synthetic construct
  source 1..19: mol_type = other RNA
cggtggccgtgatcgtagt

SEQ ID NO: 20915 - RNA, 19 nt, synthetic construct
  source 1..19: mol_type = other RNA
gggggataggtgttgtccc

SEQ ID NO: 20916 - RNA, 19 nt, synthetic construct
  source 1..19: mol_type = other RNA
agcactggggggataggtg

SEQ ID NO: 20917 - RNA, 19 nt, synthetic construct
  source 1..19: mol_type = other RNA
tgttcggcactgggggtgt

SEQ ID NO: 20918 - RNA, 19 nt, synthetic construct
  source 1..19: mol_type = other RNA
ggtgttcggcactgggggt

SEQ ID NO: 20919 - RNA, 19 nt, synthetic construct
  source 1..19: mol_type = other RNA
tggccgtggtgttcggcac

SEQ ID NO: 20920 - RNA, 19 nt, synthetic construct
  source 1..19: mol_type = other RNA
gtgcgcaccgtgtggggac

SEQ ID NO: 20921 - RNA, 19 nt, synthetic construct
  source 1..19: mol_type = other RNA
tgtgcgcaccgtgtgggga

SEQ ID NO: 20922 - RNA, 19 nt, synthetic construct
  source 1..19: mol_type = other RNA
gtgatgtgggtggtgccca

SEQ ID NO: 20923 - RNA, 19 nt, synthetic construct
  source 1..19: mol_type = other RNA
gtaccggtggttgctgctg

SEQ ID NO: 20924 - RNA, 19 nt, synthetic construct
  source 1..19: mol_type = other RNA
gctggagtcgagtgctggg

SEQ ID NO: 20925 - RNA, 19 nt, synthetic construct
  source 1..19: mol_type = other RNA
ggaagggggtgactcggtg

SEQ ID NO: 20926 - RNA, 19 nt, synthetic construct
  source 1..19: mol_type = other RNA
ggggaagggggtgactcgg

SEQ ID NO: 20927 - RNA, 19 nt, synthetic construct
  source 1..19: mol_type = other RNA
tggcccggggtggtcgtcc

SEQ ID NO: 20928 - RNA, 19 nt, synthetic construct
  source 1..19: mol_type = other RNA
ccgtggtgtggcccggggt

SEQ ID NO: 20929 - RNA, 19 nt, synthetic construct
  source 1..19: mol_type = other RNA
ggtcttgctgggtgtggcc

SEQ ID NO: 20930 - RNA, 19 nt, synthetic construct
  source 1..19: mol_type = other RNA
atgggggccgatgtggggc

SEQ ID NO: 20931 - RNA, 19 nt, synthetic construct
  source 1..19: mol_type = other RNA
ggttatgggggccgatgtg

SEQ ID NO: 20932 - RNA, 19 nt, synthetic construct
  source 1..19: mol_type = other RNA
accaccgtggttatggggg

SEQ ID NO: 20933 - RNA, 19 nt, synthetic construct
  source 1..19: mol_type = other RNA
tcaccaccgtggttatggg

SEQ ID NO: 20934 - RNA, 19 nt, synthetic construct
  source 1..19: mol_type = other RNA
ggggctcacagcccgtggt

SEQ ID NO: 20935 - RNA, 19 nt, synthetic construct
  source 1..19: mol_type = other RNA
gtagctgtagtccagccac

SEQ ID NO: 20936 - RNA, 19 nt, synthetic construct
  source 1..19: mol_type = other RNA
ccggcatggggtagctgta

SEQ ID NO: 20937 - RNA, 19 nt, synthetic construct
  source 1..19: mol_type = other RNA
gcacggatgttggagtagg

SEQ ID NO: 20938 - RNA, 19 nt, synthetic construct
  source 1..19: mol_type = other RNA
tgctcacagacggcccctc

SEQ ID NO: 20939 - RNA, 19 nt, synthetic construct
  source 1..19: mol_type = other RNA
gagggcatggccgtagagc

SEQ ID NO: 20940 - RNA, 19 nt, synthetic construct
  source 1..19: mol_type = other RNA
cactggaagggtggttgca

SEQ ID NO: 20941 - RNA, 19 nt, synthetic construct
  source 1..19: mol_type = other RNA
gtggtctgttctgggaggg

SEQ ID NO: 20942 - RNA, 19 nt, synthetic construct
  source 1..19: mol_type = other RNA
tgggtggtctccggagtgg

SEQ ID NO: 20943 - RNA, 19 nt, synthetic construct
  source 1..19: mol_type = other RNA
gccttcgtggtcagcactg

SEQ ID NO: 20944 - RNA, 19 nt, synthetic construct
  source 1..19: mol_type = other RNA
gtggccttcgtggtcagca

SEQ ID NO: 20945 - RNA, 19 nt, synthetic construct
  source 1..19: mol_type = other RNA
aactggtggcccttgtcgt

SEQ ID NO: 20946 - RNA, 19 nt, synthetic construct
  source 1..19: mol_type = other RNA
gagggggtggacgtggaac

SEQ ID NO: 20947 - RNA, 19 nt, synthetic construct
  source 1..19: mol_type = other RNA
ggctgtagtgctcggctct

SEQ ID NO: 20948 - RNA, 19 nt, synthetic construct
  source 1..19: mol_type = other RNA
ggtggctgtagtgctcggc

SEQ ID NO: 20949 - RNA, 19 nt, synthetic construct
  source 1..19: mol_type = other RNA
ggcaccgtcacggtggctg

SEQ ID NO: 20950 - RNA, 19 nt, synthetic construct
  source 1..19: mol_type = other RNA
gggcaccgtcacggtggct

SEQ ID NO: 20951 - RNA, 19 nt, synthetic construct
  source 1..19: mol_type = other RNA
atccggtgggcaccgtcac

SEQ ID NO: 20952 - RNA, 19 nt, synthetic construct
  source 1..19: mol_type = other RNA
ggccgtggatccggtgggc

SEQ ID NO: 20953 - RNA, 19 nt, synthetic construct
  source 1..19: mol_type = other RNA
tggccgtggatccggtggg

SEQ ID NO: 20954 - RNA, 19 nt, synthetic construct
  source 1..19: mol_type = other RNA
cggtggccgtggatccggt

SEQ ID NO: 20955 - RNA, 19 nt, synthetic construct
  source 1..19: mol_type = other RNA
tggggtgccagcagttgcc

SEQ ID NO: 20956 - RNA, 19 nt, synthetic construct
  source 1..19: mol_type = other RNA
ggggatggctgtaaagctg

SEQ ID NO: 20957 - RNA, 19 nt, synthetic construct
  source 1..19: mol_type = other RNA
ggtctgtgataggcgggtc

SEQ ID NO: 20958 - RNA, 19 nt, synthetic construct
  source 1..19: mol_type = other RNA
gtggccgtgggtgtggtgg

SEQ ID NO: 20959 - RNA, 19 nt, synthetic construct
  source 1..19: mol_type = other RNA
gtggaggtgtggacagtct

SEQ ID NO: 20960 - RNA, 19 nt, synthetic construct
  source 1..19: mol_type = other RNA
gtaagcactgtggaggtgt

SEQ ID NO: 20961 - RNA, 19 nt, synthetic construct
  source 1..19: mol_type = other RNA
gaagcccgtggttgtggta

SEQ ID NO: 20962 - RNA, 19 nt, synthetic construct
  source 1..19: mol_type = other RNA
ctgtgaagcccgtggttgt

SEQ ID NO: 20963 - RNA, 19 nt, synthetic construct
  source 1..19: mol_type = other RNA
aggcgtgagtgccgtccct

SEQ ID NO: 20964 - RNA, 19 nt, synthetic construct
  source 1..19: mol_type = other RNA
tgatccacactggaggcgt

SEQ ID NO: 20965 - RNA, 19 nt, synthetic construct
  source 1..19: mol_type = other RNA
gagccactggttgtgggtg

SEQ ID NO: 20966 - RNA, 19 nt, synthetic construct
  source 1..19: mol_type = other RNA
gtgggtggtccccgggatg

SEQ ID NO: 20967 - RNA, 19 nt, synthetic construct
  source 1..19: mol_type = other RNA
tggtcagcactctggcggt

SEQ ID NO: 20968 - RNA, 19 nt, synthetic construct
  source 1..19: mol_type = other RNA
tagaaccagtggccacagt

SEQ ID NO: 20969 - RNA, 19 nt, synthetic construct
  source 1..19: mol_type = other RNA
actggtctgtgtgctagag

SEQ ID NO: 20970 - RNA, 19 nt, synthetic construct
  source 1..19: mol_type = other RNA
ggtggtcagtgatggggga

SEQ ID NO: 20971 - RNA, 19 nt, synthetic construct
  source 1..19: mol_type = other RNA
cggtggccgtgatcgtagt

SEQ ID NO: 20972 - RNA, 19 nt, synthetic construct
  source 1..19: mol_type = other RNA
cactggaagggtggttgca

SEQ ID NO: 20973 - RNA, 19 nt, synthetic construct
  source 1..19: mol_type = other RNA
aggggatgggtgtaaagct

SEQ ID NO: 20974 - RNA, 19 nt, synthetic construct
  source 1..19: mol_type = other RNA
gaggggatgggtgtaaagc

SEQ ID NO: 20975 - RNA, 19 nt, synthetic construct
  source 1..19: mol_type = other RNA
ggtctgtgctgggacggtc

SEQ ID NO: 20976 - RNA, 19 nt, synthetic construct
  source 1..19: mol_type = other RNA
agaggaggtgtggattgtg

SEQ ID NO: 20977 - RNA, 19 nt, synthetic construct
  source 1..19: mol_type = other RNA
gtagaggaggtgtggattg

SEQ ID NO: 20978 - RNA, 19 nt, synthetic construct
  source 1..19: mol_type = other RNA
ctggagtagaggaggtgtg

SEQ ID NO: 20979 - RNA, 19 nt, synthetic construct
  source 1..19: mol_type = other RNA
gggtggtctctggagtaga

SEQ ID NO: 20980 - RNA, 19 nt, synthetic construct
  source 1..19: mol_type = other RNA
cgtggaattggtggccctt

SEQ ID NO: 20981 - RNA, 19 nt, synthetic construct
  source 1..19: mol_type = other RNA
gggtgtggccgtggaattg

SEQ ID NO: 20982 - RNA, 19 nt, synthetic construct
  source 1..19: mol_type = other RNA
ccgggtcgtccccagagtg

SEQ ID NO: 20983 - RNA, 19 nt, synthetic construct
  source 1..19: mol_type = other RNA
ggatccgggtcgtccccag

SEQ ID NO: 20984 - RNA, 19 nt, synthetic construct
  source 1..19: mol_type = other RNA
cggtggctatagtgctcgg

SEQ ID NO: 20985 - RNA, 19 nt, synthetic construct
  source 1..19: mol_type = other RNA
ggtgggcaccatcacggtg

SEQ ID NO: 20986 - RNA, 19 nt, synthetic construct
  source 1..19: mol_type = other RNA
ccggtgggcaccatcacgg

SEQ ID NO: 20987 - RNA, 19 nt, synthetic construct
  source 1..19: mol_type = other RNA
accactttgggggtgtgag

SEQ ID NO: 20988 - RNA, 19 nt, synthetic construct
  source 1..19: mol_type = other RNA
acacgctgaaggttggcag

SEQ ID NO: 20989 - RNA, 19 nt, synthetic construct
  source 1..19: mol_type = other RNA
gacacgctgaaggttggca

SEQ ID NO: 20990 - RNA, 19 nt, synthetic construct
  source 1..19: mol_type = other RNA
gggcgagaaaaactgtcca

SEQ ID NO: 20991 - RNA, 19 nt, synthetic construct
  source 1..19: mol_type = other RNA
cgggcgagaaaaactgtcc

SEQ ID NO: 20992 - RNA, 19 nt, synthetic construct
  source 1..19: mol_type = other RNA
ttattgtagatgacttccc

SEQ ID NO: 20993 - RNA, 19 nt, synthetic construct
  source 1..19: mol_type = other RNA
cacactgcgtagaaatggc

SEQ ID NO: 20994 - RNA, 19 nt, synthetic construct
  source 1..19: mol_type = other RNA
tgctgattgcacactgcgt

SEQ ID NO: 20995 - RNA, 19 nt, synthetic construct
  source 1..19: mol_type = other RNA
cacagtgctgattgcacac

SEQ ID NO: 20996 - RNA, 19 nt, synthetic construct
  source 1..19: mol_type = other RNA
caatgtcacagtgctgatt

SEQ ID NO: 20997 - RNA, 19 nt, synthetic construct
  source 1..19: mol_type = other RNA
agcggtcaatgtcacagtg

SEQ ID NO: 20998 - RNA, 19 nt, synthetic construct
  source 1..19: mol_type = other RNA
aagcggtcaatgtcacagt

SEQ ID NO: 20999 - RNA, 19 nt, synthetic construct
  source 1..19: mol_type = other RNA
ggtctcattcacctgccgg

SEQ ID NO: 21000 - RNA, 19 nt, synthetic construct
  source 1..19: mol_type = other RNA
tggaatagtgggagccgcc

SEQ ID NO: 21001 - RNA, 19 nt, synthetic construct
  source 1..19: mol_type = other RNA
ccccggaaggtgtaagagg

SEQ ID NO: 21002 - RNA, 19 nt, synthetic construct
  source 1..19: mol_type = other RNA
ttgccccggaaggtgtaag

SEQ ID NO: 21003 - RNA, 19 nt, synthetic construct
  source 1..19: mol_type = other RNA
gcagttgccccggaaggtg

SEQ ID NO: 21004 - RNA, 19 nt, synthetic construct
  source 1..19: mol_type = other RNA
cataggtgcagttgccccg

SEQ ID NO: 21005 - RNA, 19 nt, synthetic construct
  source 1..19: mol_type = other RNA
caaagcgtgcatggatctc

SEQ ID NO: 21006 - RNA, 19 nt, synthetic construct
  source 1..19: mol_type = other RNA
tgagattcccaaagcgtgc

SEQ ID NO: 21007 - RNA, 19 nt, synthetic construct
  source 1..19: mol_type = other RNA
ctgagattcccaaagcgtg

SEQ ID NO: 21008 - RNA, 19 nt, synthetic construct
  source 1..19: mol_type = other RNA
gaggccgtgcagtagtggt

SEQ ID NO: 21009 - RNA, 19 nt, synthetic construct
  source 1..19: mol_type = other RNA
agaggccgtgcagtagtgg

SEQ ID NO: 21010 - RNA, 19 nt, synthetic construct
  source 1..19: mol_type = other RNA
cagaggccgtgcagtagtg

SEQ ID NO: 21011 - RNA, 19 nt, synthetic construct
  source 1..19: mol_type = other RNA
gacttgtagtggatgctga

SEQ ID NO: 21012 - RNA, 19 nt, synthetic construct
  source 1..19: mol_type = other RNA
ccatggacttgtagtggat

SEQ ID NO: 21013 - RNA, 19 nt, synthetic construct
  source 1..19: mol_type = other RNA
tccatggacttgtagtgga

SEQ ID NO: 21014 - RNA, 19 nt, synthetic construct
  source 1..19: mol_type = other RNA
atccatggacttgtagtgg

SEQ ID NO: 21015 - RNA, 19 nt, synthetic construct
  source 1..19: mol_type = other RNA
tgacagtgaggacgatatc

SEQ ID NO: 21016 - RNA, 19 nt, synthetic construct
  source 1..19: mol_type = other RNA
ttcccatgcaccatggtga

SEQ ID NO: 21017 - RNA, 19 nt, synthetic construct
  source 1..19: mol_type = other RNA
aatgtccacacgcatggtg

SEQ ID NO: 21018 - RNA, 19 nt, synthetic construct
  source 1..19: mol_type = other RNA
ggcaggaatgtccacacgc

SEQ ID NO: 21019 - RNA, 19 nt, synthetic construct
  source 1..19: mol_type = other RNA
tgaaggtgacgctcacgcc

SEQ ID NO: 21020 - RNA, 19 nt, synthetic construct
  source 1..19: mol_type = other RNA
aactggcggcagtggttcc

SEQ ID NO: 21021 - RNA, 19 nt, synthetic construct
  source 1..19: mol_type = other RNA
caactggcggcagtggttc

SEQ ID NO: 21022 - RNA, 19 nt, synthetic construct
  source 1..19: mol_type = other RNA
tgcaactggcggcagtggt

SEQ ID NO: 21023 - RNA, 19 nt, synthetic construct
  source 1..19: mol_type = other RNA
ttgcaactggcggcagtgg

SEQ ID NO: 21024 - RNA, 19 nt, synthetic construct
  source 1..19: mol_type = other RNA
gtccttgcaactggcggca

SEQ ID NO: 21025 - RNA, 19 nt, synthetic construct
  source 1..19: mol_type = other RNA
agccacgtcttggccatgt

SEQ ID NO: 21026 - RNA, 19 nt, synthetic construct
  source 1..19: mol_type = other RNA
cagccacgtcttggccatg

SEQ ID NO: 21027 - RNA, 19 nt, synthetic construct
  source 1..19: mol_type = other RNA
ggaccagccacgtcttggc

SEQ ID NO: 21028 - RNA, 19 nt, synthetic construct
  source 1..19: mol_type = other RNA
gggaccagccacgtcttgg

SEQ ID NO: 21029 - RNA, 19 nt, synthetic construct
  source 1..19: mol_type = other RNA
ctttctgctgtcggggacc

SEQ ID NO: 21030 - RNA, 19 nt, synthetic construct
  source 1..19: mol_type = other RNA
ccatcctttctgctgtcgg

SEQ ID NO: 21031 - RNA, 19 nt, synthetic construct
  source 1..19: mol_type = other RNA
ggggggtgtgccagtcggg

SEQ ID NO: 21032 - RNA, 19 nt, synthetic construct
  source 1..19: mol_type = other RNA
gtgggtgtgctagacaccg

SEQ ID NO: 21033 - RNA, 19 nt, synthetic construct
  source 1..19: mol_type = other RNA
agcatcagatcacagagcg

SEQ ID NO: 21034 - RNA, 19 nt, synthetic construct
  source 1..19: mol_type = other RNA
aggcgttgaagaatgggcc

SEQ ID NO: 21035 - RNA, 19 nt, synthetic construct
  source 1..19: mol_type = other RNA
gcaggcgttgaagaatggg

SEQ ID NO: 21036 - RNA, 19 nt, synthetic construct
  source 1..19: mol_type = other RNA
gcagtggtcgctgatgcag

SEQ ID NO: 21037 - RNA, 19 nt, synthetic construct
  source 1..19: mol_type = other RNA
aaggcggcccctgcagtgg

SEQ ID NO: 21038 - RNA, 19 nt, synthetic construct
  source 1..19: mol_type = other RNA
agctctgcgtaagcctcca

SEQ ID NO: 21039 - RNA, 19 nt, synthetic construct
  source 1..19: mol_type = other RNA
ggcgcggcagagctctgcg

SEQ ID NO: 21040 - RNA, 19 nt, synthetic construct
  source 1..19: mol_type = other RNA
gggccgcatggcttgtaca

SEQ ID NO: 21041 - RNA, 19 nt, synthetic construct
  source 1..19: mol_type = other RNA
ggctgtatggggccgcatg

SEQ ID NO: 21042 - RNA, 19 nt, synthetic construct
  source 1..19: mol_type = other RNA
tggcaggctgtatggggcc

SEQ ID NO: 21043 - RNA, 19 nt, synthetic construct
  source 1..19: mol_type = other RNA
gtggcaggctgtatggggc

SEQ ID NO: 21044 - RNA, 19 nt, synthetic construct
  source 1..19: mol_type = other RNA
ctctggttcctagagttgc

SEQ ID NO: 21045 - RNA, 19 nt, synthetic construct
  source 1..19: mol_type = other RNA
caggcctgcacgcagatgc

SEQ ID NO: 21046 - RNA, 19 nt, synthetic construct
  source 1..19: mol_type = other RNA
aatttaggaaacccatcgg

SEQ ID NO: 21047 - RNA, 19 nt, synthetic construct
  source 1..19: mol_type = other RNA
ggaaatttaggaaacccat

SEQ ID NO: 21048 - RNA, 19 nt, synthetic construct
  source 1..19: mol_type = other RNA
cagttgctgacccaccgct

SEQ ID NO: 21049 - RNA, 19 nt, synthetic construct
  source 1..19: mol_type = other RNA
cgtcacacacgcaggactg

SEQ ID NO: 21050 - RNA, 19 nt, synthetic construct
  source 1..19: mol_type = other RNA
ctcgtcacacacgcaggac

SEQ ID NO: 21051 - RNA, 19 nt, synthetic construct
  source 1..19: mol_type = other RNA
actgaaccctcgtcacaca

SEQ ID NO: 21052 - RNA, 19 nt, synthetic construct
  source 1..19: mol_type = other RNA
cttgcactgcaccgacact

SEQ ID NO: 21053 - RNA, 19 nt, synthetic construct
  source 1..19: mol_type = other RNA
ctgaccctgggcgtcacag

SEQ ID NO: 21054 - RNA, 19 nt, synthetic construct
  source 1..19: mol_type = other RNA
cacggttacgaagccggga

SEQ ID NO: 21055 - RNA, 19 nt, synthetic construct
  source 1..19: mol_type = other RNA
gggcctggtcacggttacg

SEQ ID NO: 21056 - RNA, 19 nt, synthetic construct
  source 1..19: mol_type = other RNA
ccggggcctggtcacggtt

SEQ ID NO: 21057 - RNA, 19 nt, synthetic construct
  source 1..19: mol_type = other RNA
cgcacaccgtctcggggca

SEQ ID NO: 21058 - RNA, 19 nt, synthetic construct
  source 1..19: mol_type = other RNA
aaggtgccattgtacgaac

SEQ ID NO: 21059 - RNA, 19 nt, synthetic construct
  source 1..19: mol_type = other RNA
ttgcaccaaccccgtagaa

SEQ ID NO: 21060 - RNA, 19 nt, synthetic construct
  source 1..19: mol_type = other RNA
ctgggaaggttgcaccaac

SEQ ID NO: 21061 - RNA, 19 nt, synthetic construct
  source 1..19: mol_type = other RNA
cctgggaaggttgcaccaa

SEQ ID NO: 21062 - RNA, 19 nt, synthetic construct
  source 1..19: mol_type = other RNA
gcctgggaaggttgcacca

SEQ ID NO: 21063 - RNA, 19 nt, synthetic construct
  source 1..19: mol_type = other RNA
aggtagtattgttgcaggc

SEQ ID NO: 21064 - RNA, 19 nt, synthetic construct
  source 1..19: mol_type = other RNA
gggacaggtagtattgttg

SEQ ID NO: 21065 - RNA, 19 nt, synthetic construct
  source 1..19: mol_type = other RNA
ggccactctcttgtactca

SEQ ID NO: 21066 - RNA, 19 nt, synthetic construct
  source 1..19: mol_type = other RNA
gtctggacgcactccccac

SEQ ID NO: 21067 - RNA, 19 nt, synthetic construct
  source 1..19: mol_type = other RNA
caggcggtctggacgcact

SEQ ID NO: 21068 - RNA, 19 nt, synthetic construct
  source 1..19: mol_type = other RNA
tggccatcgggcgtgaggc

SEQ ID NO: 21069 - RNA, 19 nt, synthetic construct
  source 1..19: mol_type = other RNA
tggctggccatcgggcgtg

SEQ ID NO: 21070 - RNA, 19 nt, synthetic construct
  source 1..19: mol_type = other RNA
gctgttgacccaggtttca

SEQ ID NO: 21071 - RNA, 19 nt, synthetic construct
  source 1..19: mol_type = other RNA
gaggtacacggtgcagttg

SEQ ID NO: 21072 - RNA, 19 nt, synthetic construct
  source 1..19: mol_type = other RNA
acagaggtacacggtgcag

SEQ ID NO: 21073 - RNA, 19 nt, synthetic construct
  source 1..19: mol_type = other RNA
cacagaggtacacggtgca

SEQ ID NO: 21074 - RNA, 19 nt, synthetic construct
  source 1..19: mol_type = other RNA
gcaaatggactccaccctc

SEQ ID NO: 21075 - RNA, 19 nt, synthetic construct
  source 1..19: mol_type = other RNA
agcaaatggactccaccct

SEQ ID NO: 21076 - RNA, 19 nt, synthetic construct
  source 1..19: mol_type = other RNA
tgttgatgcggacttgaca

SEQ ID NO: 21077 - RNA, 19 nt, synthetic construct
  source 1..19: mol_type = other RNA
gtgttgatgcggacttgac

SEQ ID NO: 21078 - RNA, 19 nt, synthetic construct
  source 1..19: mol_type = other RNA
cctcggtctcgcagccctg

SEQ ID NO: 21079 - RNA, 19 nt, synthetic construct
  source 1..19: mol_type = other RNA
ccctcgcagaaggtgatgt

SEQ ID NO: 21080 - RNA, 19 nt, synthetic construct
  source 1..19: mol_type = other RNA
ttggacgctccggggcagg

SEQ ID NO: 21081 - RNA, 19 nt, synthetic construct
  source 1..19: mol_type = other RNA
ctctgctgagtacttggac

SEQ ID NO: 21082 - RNA, 19 nt, synthetic construct
  source 1..19: mol_type = other RNA
gggcctctgctgagtactt

SEQ ID NO: 21083 - RNA, 19 nt, synthetic construct
  source 1..19: mol_type = other RNA
ggatggctgagccgttagg

SEQ ID NO: 21084 - RNA, 19 nt, synthetic construct
  source 1..19: mol_type = other RNA
tgcaggatggctgagccgt

SEQ ID NO: 21085 - RNA, 19 nt, synthetic construct
  source 1..19: mol_type = other RNA
ctcatccacgtgggtgtag

SEQ ID NO: 21086 - RNA, 19 nt, synthetic construct
  source 1..19: mol_type = other RNA
actcatccacgtgggtgta

SEQ ID NO: 21087 - RNA, 19 nt, synthetic construct
  source 1..19: mol_type = other RNA
acactcatccacgtgggtg

SEQ ID NO: 21088 - RNA, 19 nt, synthetic construct
  source 1..19: mol_type = other RNA
cgcggggtgccacacacag

SEQ ID NO: 21089 - RNA, 19 nt, synthetic construct
  source 1..19: mol_type = other RNA
ccctcccgaaaggggtcct

SEQ ID NO: 21090 - RNA, 19 nt, synthetic construct
  source 1..19: mol_type = other RNA
gtggcgccctcccgaaagg

SEQ ID NO: 21091 - RNA, 19 nt, synthetic construct
  source 1..19: mol_type = other RNA
gagtggcgccctcccgaaa

SEQ ID NO: 21092 - RNA, 19 nt, synthetic construct
  source 1..19: mol_type = other RNA
ctgagtggcgccctcccga

SEQ ID NO: 21093 - RNA, 19 nt, synthetic construct
  source 1..19: mol_type = other RNA
tcccagggtaggactcctg

SEQ ID NO: 21094 - RNA, 19 nt, synthetic construct
  source 1..19: mol_type = other RNA
cggccgtggcagggacaca

SEQ ID NO: 21095 - RNA, 19 nt, synthetic construct
  source 1..19: mol_type = other RNA
gacgtggccagctggaatc

SEQ ID NO: 21096 - RNA, 19 nt, synthetic construct
  source 1..19: mol_type = other RNA
cggccggacgtggccagct

SEQ ID NO: 21097 - RNA, 19 nt, synthetic construct
  source 1..19: mol_type = other RNA
gcggccgccttgcctgtcg

SEQ ID NO: 21098 - RNA, 19 nt, synthetic construct
  source 1..19: mol_type = other RNA
caggcggccgccttgcctg

SEQ ID NO: 21099 - RNA, 19 nt, synthetic construct
  source 1..19: mol_type = other RNA
acctcagccctgagttacc

SEQ ID NO: 21100 - RNA, 19 nt, synthetic construct
  source 1..19: mol_type = other RNA
ggccgtggtgctcacatgt

SEQ ID NO: 21101 - RNA, 19 nt, synthetic construct
  source 1..19: mol_type = other RNA
ggccgtggtgctcacatgt

SEQ ID NO: 21102 - RNA, 19 nt, synthetic construct
  source 1..19: mol_type = other RNA
ggccgtggtgctcacatgt

SEQ ID NO: 21103 - RNA, 19 nt, synthetic construct
  source 1..19: mol_type = other RNA
ccatgtagcgtatcttgta

SEQ ID NO: 21104 - RNA, 19 nt, synthetic construct
  source 1..19: mol_type = other RNA
cccgcagctcgtagtcgtg

SEQ ID NO: 21105 - RNA, 19 nt, synthetic construct
  source 1..19: mol_type = other RNA
atagggtggtcttttcggt

SEQ ID NO: 21106 - RNA, 19 nt, synthetic construct
  source 1..19: mol_type = other RNA
gctgtgatcgtagtggccg

SEQ ID NO: 21107 - RNA, 19 nt, synthetic construct
  source 1..19: mol_type = other RNA
aggcagaacgttctcagac

SEQ ID NO: 21108 - RNA, 19 nt, synthetic construct
  source 1..19: mol_type = other RNA
gcagctcgtagtcgtgaca

SEQ ID NO: 21109 - RNA, 19 nt, synthetic construct
  source 1..19: mol_type = other RNA
ccgttccacaggaatgtca

SEQ ID NO: 21110 - RNA, 19 nt, synthetic construct
  source 1..19: mol_type = other RNA
gccctcccgaaaggggtcc

SEQ ID NO: 21111 - RNA, 19 nt, synthetic construct
  source 1..19: mol_type = other RNA
tggaatccgtgctgcgcgg

SEQ ID NO: 21112 - RNA, 19 nt, synthetic construct
  source 1..19: mol_type = other RNA
gctggaatccgtgctgcgc

SEQ ID NO: 21113 - RNA, 19 nt, synthetic construct
  source 1..19: mol_type = other RNA
cctggccgttgcgacctca

SEQ ID NO: 21114 - RNA, 19 nt, synthetic construct
  source 1..19: mol_type = other RNA
ggaatccgtgctgcgcggg

SEQ ID NO: 21115 - RNA, 19 nt, synthetic construct
  source 1..19: mol_type = other RNA
ccatcgggtcccacgcagg

SEQ ID NO: 21116 - RNA, 19 nt, synthetic construct
  source 1..19: mol_type = other RNA
cagggatcgcccgtgtgtg

SEQ ID NO: 21117 - RNA, 19 nt, synthetic construct
  source 1..19: mol_type = other RNA
cagggatcgcccgtgtgtg

SEQ ID NO: 21118 - RNA, 19 nt, synthetic construct
  source 1..19: mol_type = other RNA
cagggatcgcccgtgtgtg

SEQ ID NO: 21119 - RNA, 19 nt, synthetic construct
  source 1..19: mol_type = other RNA
gcctgtcgggcgagctctg

SEQ ID NO: 21120 - RNA, 19 nt, synthetic construct
  source 1..19: mol_type = other RNA
ggctggagtcgagtgctgg

SEQ ID NO: 21121 - RNA, 19 nt, synthetic construct
  source 1..19: mol_type = other RNA
ccgtggatccggtgggcac

SEQ ID NO: 21122 - RNA, 19 nt, synthetic construct
  source 1..19: mol_type = other RNA
ggacagggatcgcccgtgt

SEQ ID NO: 21123 - RNA, 19 nt, synthetic construct
  source 1..19: mol_type = other RNA
ggctggagtcgagtgctgg

SEQ ID NO: 21124 - RNA, 19 nt, synthetic construct
  source 1..19: mol_type = other RNA
ccgtggatccggtgggcac

SEQ ID NO: 21125 - RNA, 19 nt, synthetic construct
  source 1..19: mol_type = other RNA
gacagggatcgcccgtgtg

SEQ ID NO: 21126 - RNA, 19 nt, synthetic construct
  source 1..19: mol_type = other RNA
gacagggatcgcccgtgtg

SEQ ID NO: 21127 - RNA, 19 nt, synthetic construct
  source 1..19: mol_type = other RNA
tcactcaggccgcggcaag

SEQ ID NO: 21128 - RNA, 19 nt, synthetic construct
  source 1..19: mol_type = other RNA
ggggctcattgtcgtctct

SEQ ID NO: 21129 - RNA, 19 nt, synthetic construct
  source 1..19: mol_type = other RNA
aagcccgtggttgtggtag

SEQ ID NO: 21130 - RNA, 19 nt, synthetic construct
  source 1..19: mol_type = other RNA
aagcccgtggttgtggtag

SEQ ID NO: 21131 - RNA, 19 nt, synthetic construct
  source 1..19: mol_type = other RNA
ggttgtggtagtcggcact

SEQ ID NO: 21132 - RNA, 19 nt, synthetic construct
  source 1..19: mol_type = other RNA
aagcccgtggttgtggtag

SEQ ID NO: 21133 - RNA, 19 nt, synthetic construct
  source 1..19: mol_type = other RNA
ggttgtggtagtcggcact

SEQ ID NO: 21134 - RNA, 19 nt, synthetic construct
  source 1..19: mol_type = other RNA
aagcccgtggttgtggtag

SEQ ID NO: 21135 - RNA, 19 nt, synthetic construct
  source 1..19: mol_type = other RNA
ggttgtggtagtcggcact

SEQ ID NO: 21136 - RNA, 19 nt, synthetic construct
  source 1..19: mol_type = other RNA
aagcccgtggttgtggtag

SEQ ID NO: 21137 - RNA, 19 nt, synthetic construct
  source 1..19: mol_type = other RNA
tggggccgcatggcttgta

SEQ ID NO: 21138 - RNA, 19 nt, synthetic construct
  source 1..19: mol_type = other RNA
acctcggtctcgcagccct

SEQ ID NO: 21139 - RNA, 19 nt, synthetic construct
  source 1..19: mol_type = other RNA
tggccagctggaatccgtg

SEQ ID NO: 21140 - RNA, 19 nt, synthetic construct
  source 1..19: mol_type = other RNA
cgttgaaggccgggaggcc

SEQ ID NO: 21141 - RNA, 19 nt, synthetic construct
  source 1..19: mol_type = other RNA
tcctggtagctgtaggtcc

SEQ ID NO: 21142 - RNA, 19 nt, synthetic construct
  source 1..19: mol_type = other RNA
tagttgtagcacatcttga

SEQ ID NO: 21143 - RNA, 19 nt, synthetic construct
  source 1..19: mol_type = other RNA
agtcaaggggctcattgtc

SEQ ID NO: 21144 - RNA, 19 nt, synthetic construct
  source 1..19: mol_type = other RNA
agcccgtggttgtggtagt

SEQ ID NO: 21145 - RNA, 19 nt, synthetic construct
  source 1..19: mol_type = other RNA
gtggtcagcactgggggga

SEQ ID NO: 21146 - RNA, 19 nt, synthetic construct
  source 1..19: mol_type = other RNA
gcagggatcgcccgtgtgt

SEQ ID NO: 21147 - RNA, 19 nt, synthetic construct
  source 1..19: mol_type = other RNA
tccaggctgtgcgcaccgt

SEQ ID NO: 21148 - RNA, 19 nt, synthetic construct
  source 1..19: mol_type = other RNA
gtggtcagcactgggggga

SEQ ID NO: 21149 - RNA, 19 nt, synthetic construct
  source 1..19: mol_type = other RNA
acagggatcgcccgtgtgt

SEQ ID NO: 21150 - RNA, 19 nt, synthetic construct
  source 1..19: mol_type = other RNA
tccaggctgtgcgcaccgt

SEQ ID NO: 21151 - RNA, 19 nt, synthetic construct
  source 1..19: mol_type = other RNA
gtgtgggaagtccccgtgg

SEQ ID NO: 21152 - RNA, 19 nt, synthetic construct
  source 1..19: mol_type = other RNA
gtggttgcagtccttggac

SEQ ID NO: 21153 - RNA, 19 nt, synthetic construct
  source 1..19: mol_type = other RNA
aaggaggggatgggtgtaa

SEQ ID NO: 21154 - RNA, 19 nt, synthetic construct
  source 1..19: mol_type = other RNA
gtcccggtggtcccaaggg

SEQ ID NO: 21155 - RNA, 19 nt, synthetic construct
  source 1..19: mol_type = other RNA
gtggtcagcactgggggga

SEQ ID NO: 21156 - RNA, 19 nt, synthetic construct
  source 1..19: mol_type = other RNA
cagggaccgcccgtgtgtg

SEQ ID NO: 21157 - RNA, 19 nt, synthetic construct
  source 1..19: mol_type = other RNA
tccaggctgtgcgcaccgt

SEQ ID NO: 21158 - RNA, 19 nt, synthetic construct
  source 1..19: mol_type = other RNA
gtggtcagcactgggggga

SEQ ID NO: 21159 - RNA, 19 nt, synthetic construct
  source 1..19: mol_type = other RNA
acagggatcgcccgtgtgt

SEQ ID NO: 21160 - RNA, 19 nt, synthetic construct
  source 1..19: mol_type = other RNA
tccaggctgtgcgcaccgt

SEQ ID NO: 21161 - RNA, 19 nt, synthetic construct
  source 1..19: mol_type = other RNA
gtgtgggaagtccccgtgg

SEQ ID NO: 21162 - RNA, 19 nt, synthetic construct
  source 1..19: mol_type = other RNA
gtggttgcagtccttggac

SEQ ID NO: 21163 - RNA, 19 nt, synthetic construct
  source 1..19: mol_type = other RNA
gtcccggtggtcccaaggg

SEQ ID NO: 21164 - RNA, 19 nt, synthetic construct
  source 1..19: mol_type = other RNA
atgggtgttgtccctggag

SEQ ID NO: 21165 - RNA, 19 nt, synthetic construct
  source 1..19: mol_type = other RNA
gtggttgcagtccttggac

SEQ ID NO: 21166 - RNA, 19 nt, synthetic construct
  source 1..19: mol_type = other RNA
gaggaggggatgggtgtaa

SEQ ID NO: 21167 - RNA, 19 nt, synthetic construct
  source 1..19: mol_type = other RNA
tcaaacaggatcaggccct

SEQ ID NO: 21168 - RNA, 19 nt, synthetic construct
  source 1..19: mol_type = other RNA
cagtggtcgctgatgcagg

SEQ ID NO: 21169 - RNA, 19 nt, synthetic construct
  source 1..19: mol_type = other RNA
acctcaaggcggcccctgc

SEQ ID NO: 21170 - RNA, 19 nt, synthetic construct
  source 1..19: mol_type = other RNA
aggctgtatggggccgcat

SEQ ID NO: 21171 - RNA, 19 nt, synthetic construct
  source 1..19: mol_type = other RNA
ttcctagagttgcaggtgg

SEQ ID NO: 21172 - RNA, 19 nt, synthetic construct
  source 1..19: mol_type = other RNA
gcacgcagatgcccatgtg

SEQ ID NO: 21173 - RNA, 19 nt, synthetic construct
  source 1..19: mol_type = other RNA
ctgacccaccgctccccgg

SEQ ID NO: 21174 - RNA, 19 nt, synthetic construct
  source 1..19: mol_type = other RNA
ctggtcacggttacgaagc

SEQ ID NO: 21175 - RNA, 19 nt, synthetic construct
  source 1..19: mol_type = other RNA
tcagcaaatggactccacc

SEQ ID NO: 21176 - RNA, 19 nt, synthetic construct
  source 1..19: mol_type = other RNA
ctcggtctcgcagccctgg

SEQ ID NO: 21177 - RNA, 19 nt, synthetic construct
  source 1..19: mol_type = other RNA
ctctctgacctggccgttg

SEQ ID NO: 21178 - RNA, 19 nt, synthetic construct
  source 1..19: mol_type = other RNA
ggctggagtcgagtgctgg

SEQ ID NO: 21179 - RNA, 19 nt, synthetic construct
  source 1..19: mol_type = other RNA
ccgtggatccggtgggcac

SEQ ID NO: 21180 - RNA, 19 nt, synthetic construct
  source 1..19: mol_type = other RNA
ggacagggatcgcccgtgt

SEQ ID NO: 21181 - RNA, 19 nt, synthetic construct
  source 1..19: mol_type = other RNA
ggctggagtcgagtgctgg

SEQ ID NO: 21182 - RNA, 19 nt, synthetic construct
  source 1..19: mol_type = other RNA
ttagtttgttccagggcgt

SEQ ID NO: 21183 - RNA, 19 nt, synthetic construct
  source 1..19: mol_type = other RNA
gcccactaggcctcggcgt

SEQ ID NO: 21184 - RNA, 19 nt, synthetic construct
  source 1..19: mol_type = other RNA
tgggcggtgcccattgtac

SEQ ID NO: 21185 - RNA, 19 nt, synthetic construct
  source 1..19: mol_type = other RNA
ccgtggatccggtgggcac

SEQ ID NO: 21186 - RNA, 19 nt, synthetic construct
  source 1..19: mol_type = other RNA
tgggacggtccacgtggtc

SEQ ID NO: 21187 - RNA, 19 nt, synthetic construct
  source 1..19: mol_type = other RNA
gtgttggcgccaggctcgt

SEQ ID NO: 21188 - RNA, 19 nt, synthetic construct
  source 1..19: mol_type = other RNA
ccttctggggccggtttca

SEQ ID NO: 21189 - RNA, 19 nt, synthetic construct
  source 1..19: mol_type = other RNA
gtggtggtctgtgataggc

SEQ ID NO: 21190 - RNA, 19 nt, synthetic construct
  source 1..19: mol_type = other RNA
gtggtggtctgtgataggc

SEQ ID NO: 21191 - RNA, 19 nt, synthetic construct
  source 1..19: mol_type = other RNA
gtggtggtctgtgataggc

SEQ ID NO: 21192 - RNA, 19 nt, synthetic construct
  source 1..19: mol_type = other RNA
gtggtggtctgtgataggc

SEQ ID NO: 21193 - RNA, 19 nt, synthetic construct
  source 1..19: mol_type = other RNA
gtggtggtctgtgataggc

SEQ ID NO: 21194 - RNA, 19 nt, synthetic construct
  source 1..19: mol_type = other RNA
aggtacacatgtggcaggg

SEQ ID NO: 21195 - RNA, 19 nt, synthetic construct
  source 1..19: mol_type = other RNA
ctccccgggaaatttagga

SEQ ID NO: 21196 - RNA, 19 nt, synthetic construct
  source 1..19: mol_type = other RNA
gtaggtgtcaaagtccccg

SEQ ID NO: 21197 - RNA, 19 nt, synthetic construct
  source 1..19: mol_type = other RNA
gtaggtgtcaaagtccccg

SEQ ID NO: 21198 - RNA, 19 nt, synthetic construct
  source 1..19: mol_type = other RNA
gtaggtgtcaaagtccccg

SEQ ID NO: 21199 - RNA, 19 nt, synthetic construct
  source 1..19: mol_type = other RNA
gtaggtgtcaaagtccccg

SEQ ID NO: 21200 - RNA, 19 nt, synthetic construct
  source 1..19: mol_type = other RNA
gcacgtcccctgcagtggt

SEQ ID NO: 21201 - RNA, 19 nt, synthetic construct
  source 1..19: mol_type = other RNA
gcggtaagcactgtggagg

SEQ ID NO: 21202 - RNA, 19 nt, synthetic construct
  source 1..19: mol_type = other RNA
gcggtaagcactgtggagg

SEQ ID NO: 21203 - RNA, 19 nt, synthetic construct
  source 1..19: mol_type = other RNA
ggctcgtggtcagcggctc

SEQ ID NO: 21204 - RNA, 19 nt, synthetic construct
  source 1..19: mol_type = other RNA
ccggccgtggcagggacac

SEQ ID NO: 21205 - RNA, 19 nt, synthetic construct
  source 1..19: mol_type = other RNA
atgttgacctcggtctcgc

SEQ ID NO: 21206 - RNA, 19 nt, synthetic construct
  source 1..19: mol_type = other RNA
ccatcccgtgggtctcgat

SEQ ID NO: 21207 - RNA, 19 nt, synthetic construct
  source 1..19: mol_type = other RNA
cactcgatgtcagccagca

SEQ ID NO: 21208 - RNA, 19 nt, synthetic construct
  source 1..19: mol_type = other RNA
gctgagcgtgttggaaggg

SEQ ID NO: 21209 - RNA, 19 nt, synthetic construct
  source 1..19: mol_type = other RNA
cggtaagcactgtggaggt

SEQ ID NO: 21210 - RNA, 19 nt, synthetic construct
  source 1..19: mol_type = other RNA
caaagtccccgccagaggg

SEQ ID NO: 21211 - RNA, 19 nt, synthetic construct
  source 1..19: mol_type = other RNA
tggtaagcactgtggaggt

SEQ ID NO: 21212 - RNA, 19 nt, synthetic construct
  source 1..19: mol_type = other RNA
caaagtccccgccagaggg

SEQ ID NO: 21213 - RNA, 19 nt, synthetic construct
  source 1..19: mol_type = other RNA
tggtaagcactgtggaggt

SEQ ID NO: 21214 - RNA, 19 nt, synthetic construct
  source 1..19: mol_type = other RNA
caaagtccccgccagaggg

SEQ ID NO: 21215 - RNA, 19 nt, synthetic construct
  source 1..19: mol_type = other RNA
cgtatcttgtagggtgggt

SEQ ID NO: 21216 - RNA, 19 nt, synthetic construct
  source 1..19: mol_type = other RNA
tggaagggcggttgcagtc

SEQ ID NO: 21217 - RNA, 19 nt, synthetic construct
  source 1..19: mol_type = other RNA
ctggggggcagggatcgcc

SEQ ID NO: 21218 - RNA, 19 nt, synthetic construct
  source 1..19: mol_type = other RNA
gagaagggggtgactcggt

SEQ ID NO: 21219 - RNA, 19 nt, synthetic construct
  source 1..19: mol_type = other RNA
tggaagggcggttgcagtc

SEQ ID NO: 21220 - RNA, 19 nt, synthetic construct
  source 1..19: mol_type = other RNA
agggggtgactcggtggtc

SEQ ID NO: 21221 - RNA, 19 nt, synthetic construct
  source 1..19: mol_type = other RNA
gagaagggggtgactcggt

SEQ ID NO: 21222 - RNA, 19 nt, synthetic construct
  source 1..19: mol_type = other RNA
tggaagggcggttgcagtc

SEQ ID NO: 21223 - RNA, 19 nt, synthetic construct
  source 1..19: mol_type = other RNA
agggggtgactcggtggtc

SEQ ID NO: 21224 - RNA, 19 nt, synthetic construct
  source 1..19: mol_type = other RNA
gagaagggggtgactcggt

SEQ ID NO: 21225 - RNA, 19 nt, synthetic construct
  source 1..19: mol_type = other RNA
tggaagggcggttgcagtc

SEQ ID NO: 21226 - RNA, 19 nt, synthetic construct
  source 1..19: mol_type = other RNA
agggggtgactcggtggtc

SEQ ID NO: 21227 - RNA, 19 nt, synthetic construct
  source 1..19: mol_type = other RNA
ggtggccgtggaaccggtg

SEQ ID NO: 21228 - RNA, 19 nt, synthetic construct
  source 1..19: mol_type = other RNA
cgccttgcctgtcgcagct

SEQ ID NO: 21229 - RNA, 19 nt, synthetic construct
  source 1..19: mol_type = other RNA
cggggcaccgccatccatg

SEQ ID NO: 21230 - RNA, 19 nt, synthetic construct
  source 1..19: mol_type = other RNA
ttggcgcacatcagccccc

SEQ ID NO: 21231 - RNA, 19 nt, synthetic construct
  source 1..19: mol_type = other RNA
gggatgggtgtaacgctgg

SEQ ID NO: 21232 - RNA, 19 nt, synthetic construct
  source 1..19: mol_type = other RNA
gggggtgactcggtggtcc

SEQ ID NO: 21233 - RNA, 19 nt, synthetic construct
  source 1..19: mol_type = other RNA
gggggtgactcggtggtcc

SEQ ID NO: 21234 - RNA, 19 nt, synthetic construct
  source 1..19: mol_type = other RNA
gggggtgactcggtggtcc

SEQ ID NO: 21235 - RNA, 19 nt, synthetic construct
  source 1..19: mol_type = other RNA
gggatgggtgtaacgctgg

SEQ ID NO: 21236 - RNA, 19 nt, synthetic construct
  source 1..19: mol_type = other RNA
tagtggatgctgagggcgc

SEQ ID NO: 21237 - RNA, 19 nt, synthetic construct
  source 1..19: mol_type = other RNA
cacaggccaccggttgcac

SEQ ID NO: 21238 - RNA, 19 nt, synthetic construct
  source 1..19: mol_type = other RNA
caccagcgtccggcacgcg

SEQ ID NO: 21239 - RNA, 19 nt, synthetic construct
  source 1..19: mol_type = other RNA
ctcctcgtccgtgcagttg

SEQ ID NO: 21240 - RNA, 19 nt, synthetic construct
  source 1..19: mol_type = other RNA
gagtttctcatcataggtg

SEQ ID NO: 21241 - RNA, 19 nt, synthetic construct
  source 1..19: mol_type = other RNA
agagtttctcatcataggt

SEQ ID NO: 21242 - RNA, 19 nt, synthetic construct
  source 1..19: mol_type = other RNA
tcagccagcacggtgaagc

SEQ ID NO: 21243 - RNA, 19 nt, synthetic construct
  source 1..19: mol_type = other RNA
gacaaacacctgcatgagt

SEQ ID NO: 21244 - RNA, 19 nt, synthetic construct
  source 1..19: mol_type = other RNA
cactcctgggcgggcacac

SEQ ID NO: 21245 - RNA, 19 nt, synthetic construct
  source 1..19: mol_type = other RNA
tcctcggcaatgcagcccc

SEQ ID NO: 21246 - RNA, 19 nt, synthetic construct
  source 1..19: mol_type = other RNA
tgcactcccacctccggtt

SEQ ID NO: 21247 - RNA, 19 nt, synthetic construct
  source 1..19: mol_type = other RNA
cgtgggtctcgatgaccag

SEQ ID NO: 21248 - RNA, 19 nt, synthetic construct
  source 1..19: mol_type = other RNA
cactcgcagtcgccacccg

SEQ ID NO: 21249 - RNA, 19 nt, synthetic construct
  source 1..19: mol_type = other RNA
cgcactggatgccactggg

SEQ ID NO: 21250 - RNA, 19 nt, synthetic construct
  source 1..19: mol_type = other RNA
tagatgacgtcctggtagc

SEQ ID NO: 21251 - RNA, 19 nt, synthetic construct
  source 1..19: mol_type = other RNA
caagcaggcgccaagccca

SEQ ID NO: 21252 - RNA, 19 nt, synthetic construct
  source 1..19: mol_type = other RNA
gggatgtcagtccttctga

SEQ ID NO: 21253 - RNA, 19 nt, synthetic construct
  source 1..19: mol_type = other RNA
ccaagctccccgtcgtccc

SEQ ID NO: 21254 - RNA, 19 nt, synthetic construct
  source 1..19: mol_type = other RNA
tgtgggtggtccccgggat

SEQ ID NO: 21255 - RNA, 19 nt, synthetic construct
  source 1..19: mol_type = other RNA
tggttgctgctagggtgtg

SEQ ID NO: 21256 - RNA, 19 nt, synthetic construct
  source 1..19: mol_type = other RNA
gccgtggtgtggcccgggg

SEQ ID NO: 21257 - RNA, 19 nt, synthetic construct
  source 1..19: mol_type = other RNA
gtggtaagcactgtggagg

SEQ ID NO: 21258 - RNA, 19 nt, synthetic construct
  source 1..19: mol_type = other RNA
tgtgggtggtccccgggat

SEQ ID NO: 21259 - RNA, 19 nt, synthetic construct
  source 1..19: mol_type = other RNA
ccaggtcgtccctggagtg

SEQ ID NO: 21260 - RNA, 19 nt, synthetic construct
  source 1..19: mol_type = other RNA
ggggatgggtgtaaagctg

SEQ ID NO: 21261 - RNA, 19 nt, synthetic construct
  source 1..19: mol_type = other RNA
gtggtaagcactgtggagg

SEQ ID NO: 21262 - RNA, 19 nt, synthetic construct
  source 1..19: mol_type = other RNA
tgtgggtggtccccgggat

SEQ ID NO: 21263 - RNA, 19 nt, synthetic construct
  source 1..19: mol_type = other RNA
actgcccctccggccgcac

SEQ ID NO: 21264 - RNA, 19 nt, synthetic construct
  source 1..19: mol_type = other RNA
gtggtaagcactgtggagg

SEQ ID NO: 21265 - RNA, 19 nt, synthetic construct
  source 1..19: mol_type = other RNA
gccgtggtgtggcccgggg

SEQ ID NO: 21266 - RNA, 19 nt, synthetic construct
  source 1..19: mol_type = other RNA
tgtgggtggtccccgggat

SEQ ID NO: 21267 - RNA, 19 nt, synthetic construct
  source 1..19: mol_type = other RNA
ggggatgggtgtaaagctg

SEQ ID NO: 21268 - RNA, 19 nt, synthetic construct
  source 1..19: mol_type = other RNA
ggagtagaggaggtgtgga

SEQ ID NO: 21269 - RNA, 19 nt, synthetic construct
  source 1..19: mol_type = other RNA
tggagtagaggaggtgtgg

SEQ ID NO: 21270 - RNA, 19 nt, synthetic construct
  source 1..19: mol_type = other RNA
ccgtggaattggtggccct

SEQ ID NO: 21271 - RNA, 19 nt, synthetic construct
  source 1..19: mol_type = other RNA
tccttgcaactggcggcag

SEQ ID NO: 21272 - RNA, 19 nt, synthetic construct
  source 1..19: mol_type = other RNA
gggggtgggtgtgctagac

SEQ ID NO: 21273 - RNA, 19 nt, synthetic construct
  source 1..19: mol_type = other RNA
caggccaccggttgcacct

SEQ ID NO: 21274 - RNA, 19 nt, synthetic construct
  source 1..19: mol_type = other RNA
acccaccgctccccgggaa

SEQ ID NO: 21275 - RNA, 19 nt, synthetic construct
  source 1..19: mol_type = other RNA
caggactggcagttgctga

SEQ ID NO: 21276 - RNA, 19 nt, synthetic construct
  source 1..19: mol_type = other RNA
cctcgtcacacacgcagga

SEQ ID NO: 21277 - RNA, 19 nt, synthetic construct
  source 1..19: mol_type = other RNA
gctgaggtctgcagcggaa

SEQ ID NO: 21278 - RNA, 19 nt, synthetic construct
  source 1..19: mol_type = other RNA
ttcattcagctggactggc

SEQ ID NO: 21279 - RNA, 19 nt, synthetic construct
  source 1..19: mol_type = other RNA
tggcgccctcccgaaaggg

SEQ ID NO: 21280 - RNA, 19 nt, synthetic construct
  source 1..19: mol_type = other RNA
ctccgttccacaggaatgt

SEQ ID NO: 21281 - RNA, 19 nt, synthetic construct
  source 1..19: mol_type = other RNA
aggtcgcacaggccaccgg

SEQ ID NO: 21282 - RNA, 19 nt, synthetic construct
  source 1..19: mol_type = other RNA
tggtaagcactgtggaggt

SEQ ID NO: 21283 - RNA, 19 nt, synthetic construct
  source 1..19: mol_type = other RNA
caaagtccccgccagaggg

SEQ ID NO: 21284 - RNA, 19 nt, synthetic construct
  source 1..19: mol_type = other RNA
cggtaagcactgtggaggt

SEQ ID NO: 21285 - RNA, 19 nt, synthetic construct
  source 1..19: mol_type = other RNA
gtgctgggacggtccacgt

SEQ ID NO: 21286 - RNA, 19 nt, synthetic construct
  source 1..19: mol_type = other RNA
ccccgggaaatttaggaaa

SEQ ID NO: 21287 - RNA, 19 nt, synthetic construct
  source 1..19: mol_type = other RNA
gggagtaccactggtctgt

SEQ ID NO: 21288 - RNA, 19 nt, synthetic construct
  source 1..19: mol_type = other RNA
gggagtaccactggtctgt

SEQ ID NO: 21289 - RNA, 19 nt, synthetic construct
  source 1..19: mol_type = other RNA
gggagtaccactggtctgt

SEQ ID NO: 21290 - RNA, 19 nt, synthetic construct
  source 1..19: mol_type = other RNA
gggagtaccactggtctgt

SEQ ID NO: 21291 - RNA, 19 nt, synthetic construct
  source 1..19: mol_type = other RNA
gggagtaccactggtctgt

SEQ ID NO: 21292 - RNA, 19 nt, synthetic construct
  source 1..19: mol_type = other RNA
acccatcgggtcccacgca

SEQ ID NO: 21293 - RNA, 19 nt, synthetic construct
  source 1..19: mol_type = other RNA
cccattgatgaggacggag

SEQ ID NO: 21294 - RNA, 19 nt, synthetic construct
  source 1..19: mol_type = other RNA
gaacgttctcagacagcag

SEQ ID NO: 21295 - RNA, 19 nt, synthetic construct
  source 1..19: mol_type = other RNA
gcttggacccggatggccg

SEQ ID NO: 21296 - RNA, 19 nt, synthetic construct
  source 1..19: mol_type = other RNA
cattgtcgtcgaagttccc

SEQ ID NO: 21297 - RNA, 19 nt, synthetic construct
  source 1..19: mol_type = other RNA
tgtggcacgtcccctgcag

SEQ ID NO: 21298 - RNA, 19 nt, synthetic construct
  source 1..19: mol_type = other RNA
caccgtggttatgggggcc

SEQ ID NO: 21299 - RNA, 19 nt, synthetic construct
  source 1..19: mol_type = other RNA
caccgtggttatgggggcc

SEQ ID NO: 21300 - RNA, 19 nt, synthetic construct
  source 1..19: mol_type = other RNA
caccgtggttatgggggcc

SEQ ID NO: 21301 - RNA, 19 nt, synthetic construct
  source 1..19: mol_type = other RNA
tcgtccgtgcagttgccgg

SEQ ID NO: 21302 - RNA, 19 nt, synthetic construct
  source 1..19: mol_type = other RNA
ggcattgtcgtcgaagttc

SEQ ID NO: 21303 - RNA, 19 nt, synthetic construct
  source 1..19: mol_type = other RNA
atggccgtggatccagtgg

SEQ ID NO: 21304 - RNA, 19 nt, synthetic construct
  source 1..19: mol_type = other RNA
ctgggtgtgcagttacagc

SEQ ID NO: 21305 - RNA, 19 nt, synthetic construct
  source 1..19: mol_type = other RNA
gtggccgtggatccagtgg

SEQ ID NO: 21306 - RNA, 19 nt, synthetic construct
  source 1..19: mol_type = other RNA
acggcactcgaggcccagg

SEQ ID NO: 21307 - RNA, 19 nt, synthetic construct
  source 1..19: mol_type = other RNA
gtggccgtggatccagtgg

SEQ ID NO: 21308 - RNA, 19 nt, synthetic construct
  source 1..19: mol_type = other RNA
caccgtggaacctctggtt

SEQ ID NO: 21309 - RNA, 19 nt, synthetic construct
  source 1..19: mol_type = other RNA
gtcaccaccgtggttattg

SEQ ID NO: 21310 - RNA, 19 nt, synthetic construct
  source 1..19: mol_type = other RNA
acggcactcgaggcccagg

SEQ ID NO: 21311 - RNA, 19 nt, synthetic construct
  source 1..19: mol_type = other RNA
acggcactcgaggcccagg

SEQ ID NO: 21312 - RNA, 19 nt, synthetic construct
  source 1..19: mol_type = other RNA
gtggccgtggatccagtgg

SEQ ID NO: 21313 - RNA, 19 nt, synthetic construct
  source 1..19: mol_type = other RNA
gcattgtcgtcgaagttcc

SEQ ID NO: 21314 - RNA, 19 nt, synthetic construct
  source 1..19: mol_type = other RNA
gtccgtgcagttgccggcc

SEQ ID NO: 21315 - RNA, 19 nt, synthetic construct
  source 1..19: mol_type = other RNA
gccctctcgccaccgcctt

SEQ ID NO: 21316 - RNA, 19 nt, synthetic construct
  source 1..19: mol_type = other RNA
agggggtgaccgtcacggg

SEQ ID NO: 21317 - RNA, 19 nt, synthetic construct
  source 1..19: mol_type = other RNA
aggtgccattgtacgaaca

SEQ ID NO: 21318 - RNA, 19 nt, synthetic construct
  source 1..19: mol_type = other RNA
agtgctgtccaccagtgcg

SEQ ID NO: 21319 - RNA, 19 nt, synthetic construct
  source 1..19: mol_type = other RNA
tgcccatgtgtgcgttgaa

SEQ ID NO: 21320 - RNA, 19 nt, synthetic construct
  source 1..19: mol_type = other RNA
ggcagtcctcctcggcaat

SEQ ID NO: 21321 - RNA, 19 nt, synthetic construct
  source 1..19: mol_type = other RNA
tgggggacagggatcgccc

SEQ ID NO: 21322 - RNA, 19 nt, synthetic construct
  source 1..19: mol_type = other RNA
tgggggacagggatcgccc

SEQ ID NO: 21323 - RNA, 19 nt, synthetic construct
  source 1..19: mol_type = other RNA
ggctctcccagggtaggac

SEQ ID NO: 21324 - RNA, 19 nt, synthetic construct
  source 1..19: mol_type = other RNA
ggggcaccgccatccatgg

SEQ ID NO: 21325 - RNA, 19 nt, synthetic construct
  source 1..19: mol_type = other RNA
ggtgggcgaggacgtcggg

SEQ ID NO: 21326 - RNA, 19 nt, synthetic construct
  source 1..19: mol_type = other RNA
aggcggccaggtacgcagt

SEQ ID NO: 21327 - RNA, 19 nt, synthetic construct
  source 1..19: mol_type = other RNA
acctccagttccgcggctg

SEQ ID NO: 21328 - RNA, 19 nt, synthetic construct
  source 1..19: mol_type = other RNA
gaacacgccgccgtccgct

SEQ ID NO: 21329 - RNA, 19 nt, synthetic construct
  source 1..19: mol_type = other RNA
cgctgagggccgtgaagtc

SEQ ID NO: 21330 - RNA, 19 nt, synthetic construct
  source 1..19: mol_type = other RNA
aggcactgttgggatcggt

SEQ ID NO: 21331 - RNA, 19 nt, synthetic construct
  source 1..19: mol_type = other RNA
cccaggcagcttagcttcc

SEQ ID NO: 21332 - RNA, 19 nt, synthetic construct
  source 1..19: mol_type = other RNA
taggtggcctcgttgtgca

SEQ ID NO: 21333 - RNA, 19 nt, synthetic construct
  source 1..19: mol_type = other RNA
tggtagctgtaggtcctgt

SEQ ID NO: 21334 - RNA, 19 nt, synthetic construct
  source 1..19: mol_type = other RNA
aggtgaatggcgttgtggc

SEQ ID NO: 21335 - RNA, 19 nt, synthetic construct
  source 1..19: mol_type = other RNA
gtggttgctgctagggtgt

SEQ ID NO: 21336 - RNA, 19 nt, synthetic construct
  source 1..19: mol_type = other RNA
ggatgttggagtaggtgtc

SEQ ID NO: 21337 - RNA, 19 nt, synthetic construct
  source 1..19: mol_type = other RNA
ggatgttggagtaggtgtc

SEQ ID NO: 21338 - RNA, 19 nt, synthetic construct
  source 1..19: mol_type = other RNA
ggatgttggagtaggtgtc

SEQ ID NO: 21339 - RNA, 19 nt, synthetic construct
  source 1..19: mol_type = other RNA
ggatgttggagtaggtgtc

SEQ ID NO: 21340 - RNA, 19 nt, synthetic construct
  source 1..19: mol_type = other RNA
tggggggtgtgccagtcgg

SEQ ID NO: 21341 - RNA, 19 nt, synthetic construct
  source 1..19: mol_type = other RNA
gcagagctctgcgtaagcc

SEQ ID NO: 21342 - RNA, 19 nt, synthetic construct
  source 1..19: mol_type = other RNA
gcacacgcacaccgtctcg

SEQ ID NO: 21343 - RNA, 19 nt, synthetic construct
  source 1..19: mol_type = other RNA
ccacactcatccacgtggg

SEQ ID NO: 21344 - RNA, 19 nt, synthetic construct
  source 1..19: mol_type = other RNA
agcgtccggcacgcgctcg

SEQ ID NO: 21345 - RNA, 19 nt, synthetic construct
  source 1..19: mol_type = other RNA
gggcaccgccatccatggt

SEQ ID NO: 21346 - RNA, 19 nt, synthetic construct
  source 1..19: mol_type = other RNA
agtggaagtcaccccaggt

SEQ ID NO: 21347 - RNA, 19 nt, synthetic construct
  source 1..19: mol_type = other RNA
atgaggacggagccgttgg

SEQ ID NO: 21348 - RNA, 19 nt, synthetic construct
  source 1..19: mol_type = other RNA
aatgtcagcaccagccgga

SEQ ID NO: 21349 - RNA, 19 nt, synthetic construct
  source 1..19: mol_type = other RNA
cacctccagttccgcggct

SEQ ID NO: 21350 - RNA, 19 nt, synthetic construct
  source 1..19: mol_type = other RNA
ggcacctccagttccgcgg

SEQ ID NO: 21351 - RNA, 19 nt, synthetic construct
  source 1..19: mol_type = other RNA
aggaggtgcccgggctgta

SEQ ID NO: 21352 - RNA, 19 nt, synthetic construct
  source 1..19: mol_type = other RNA
cctgtctgcaccacgatga

SEQ ID NO: 21353 - RNA, 19 nt, synthetic construct
  source 1..19: mol_type = other RNA
ttcctggcattggcacagg

SEQ ID NO: 21354 - RNA, 19 nt, synthetic construct
  source 1..19: mol_type = other RNA
gttcctggcattggcacag

SEQ ID NO: 21355 - RNA, 19 nt, synthetic construct
  source 1..19: mol_type = other RNA
cttggaggatcagctcgta

SEQ ID NO: 21356 - RNA, 19 nt, synthetic construct
  source 1..19: mol_type = other RNA
tcggatgaacacgctggtc

SEQ ID NO: 21357 - RNA, 19 nt, synthetic construct
  source 1..19: mol_type = other RNA
acccgagtcgcaggcacac

SEQ ID NO: 21358 - RNA, 19 nt, synthetic construct
  source 1..19: mol_type = other RNA
cagaaacactcgcagtcgc

SEQ ID NO: 21359 - RNA, 19 nt, synthetic construct
  source 1..19: mol_type = other RNA
cgccaagcccatcggtggt

SEQ ID NO: 21360 - RNA, 19 nt, synthetic construct
  source 1..19: mol_type = other RNA
gcaggcgccaagcccatcg

SEQ ID NO: 21361 - RNA, 19 nt, synthetic construct
  source 1..19: mol_type = other RNA
cctcgcggacacacacggt

SEQ ID NO: 21362 - RNA, 19 nt, synthetic construct
  source 1..19: mol_type = other RNA
ggtgagggccgccgtcgac

SEQ ID NO: 21363 - RNA, 19 nt, synthetic construct
  source 1..19: mol_type = other RNA
cgaggtgagggccgccgtc

SEQ ID NO: 21364 - RNA, 19 nt, synthetic construct
  source 1..19: mol_type = other RNA
ggctgtgcctgtcgggcga

SEQ ID NO: 21365 - RNA, 19 nt, synthetic construct
  source 1..19: mol_type = other RNA
tgggcgtgctggtctcggc

SEQ ID NO: 21366 - RNA, 19 nt, synthetic construct
  source 1..19: mol_type = other RNA
ggtgttagtcaaggggctc

SEQ ID NO: 21367 - RNA, 19 nt, synthetic construct
  source 1..19: mol_type = other RNA
tggtggtgttagtcaaggg

SEQ ID NO: 21368 - RNA, 19 nt, synthetic construct
  source 1..19: mol_type = other RNA
ctttggtagtgtgagctgt

SEQ ID NO: 21369 - RNA, 19 nt, synthetic construct
  source 1..19: mol_type = other RNA
cactttggtagtgtgagct

SEQ ID NO: 21370 - RNA, 19 nt, synthetic construct
  source 1..19: mol_type = other RNA
gagggggtcaccgtggagc

SEQ ID NO: 21371 - RNA, 19 nt, synthetic construct
  source 1..19: mol_type = other RNA
tggtcagcactggggggat

SEQ ID NO: 21372 - RNA, 19 nt, synthetic construct
  source 1..19: mol_type = other RNA
gtgcgggtcttgctgggtg

SEQ ID NO: 21373 - RNA, 19 nt, synthetic construct
  source 1..19: mol_type = other RNA
agggcatggccgtagagct

SEQ ID NO: 21374 - RNA, 19 nt, synthetic construct
  source 1..19: mol_type = other RNA
gtggctgtagtgctcggct

SEQ ID NO: 21375 - RNA, 19 nt, synthetic construct
  source 1..19: mol_type = other RNA
gcaccgtcacggtggctgt

SEQ ID NO: 21376 - RNA, 19 nt, synthetic construct
  source 1..19: mol_type = other RNA
tgctcacatgtggggtgcc

SEQ ID NO: 21377 - RNA, 19 nt, synthetic construct
  source 1..19: mol_type = other RNA
tggtgctcacatgtggggt

SEQ ID NO: 21378 - RNA, 19 nt, synthetic construct
  source 1..19: mol_type = other RNA
ccgtggtgctcacatgtgg

SEQ ID NO: 21379 - RNA, 19 nt, synthetic construct
  source 1..19: mol_type = other RNA
gtggccgtggtgctcacat

SEQ ID NO: 21380 - RNA, 19 nt, synthetic construct
  source 1..19: mol_type = other RNA
ctttggtagtgtgagctgt

SEQ ID NO: 21381 - RNA, 19 nt, synthetic construct
  source 1..19: mol_type = other RNA
cactttggtagtgtgagct

SEQ ID NO: 21382 - RNA, 19 nt, synthetic construct
  source 1..19: mol_type = other RNA
ccgtggttgtggtagtcag

SEQ ID NO: 21383 - RNA, 19 nt, synthetic construct
  source 1..19: mol_type = other RNA
ggtgttgtccctggagttg

SEQ ID NO: 21384 - RNA, 19 nt, synthetic construct
  source 1..19: mol_type = other RNA
tggtcagcactggggggat

SEQ ID NO: 21385 - RNA, 19 nt, synthetic construct
  source 1..19: mol_type = other RNA
gtgcgggtcttgctgggtg

SEQ ID NO: 21386 - RNA, 19 nt, synthetic construct
  source 1..19: mol_type = other RNA
tcccggtggtcccaagggt

SEQ ID NO: 21387 - RNA, 19 nt, synthetic construct
  source 1..19: mol_type = other RNA
tctgttctgggagggtccc

SEQ ID NO: 21388 - RNA, 19 nt, synthetic construct
  source 1..19: mol_type = other RNA
aggaggggtggattgtgga

SEQ ID NO: 21389 - RNA, 19 nt, synthetic construct
  source 1..19: mol_type = other RNA
tggccttcgtggtcagcac

SEQ ID NO: 21390 - RNA, 19 nt, synthetic construct
  source 1..19: mol_type = other RNA
gcaccgtcacggtggctgt

SEQ ID NO: 21391 - RNA, 19 nt, synthetic construct
  source 1..19: mol_type = other RNA
ttgagggtgccagcagttg

SEQ ID NO: 21392 - RNA, 19 nt, synthetic construct
  source 1..19: mol_type = other RNA
ctttggtagtgtgagctgt

SEQ ID NO: 21393 - RNA, 19 nt, synthetic construct
  source 1..19: mol_type = other RNA
cactttggtagtgtgagct

SEQ ID NO: 21394 - RNA, 19 nt, synthetic construct
  source 1..19: mol_type = other RNA
gagggggtcaccgtggagc

SEQ ID NO: 21395 - RNA, 19 nt, synthetic construct
  source 1..19: mol_type = other RNA
tggtcagcactggggggat

SEQ ID NO: 21396 - RNA, 19 nt, synthetic construct
  source 1..19: mol_type = other RNA
gtgcgggtcttgctgggtg

SEQ ID NO: 21397 - RNA, 19 nt, synthetic construct
  source 1..19: mol_type = other RNA
agcccgtggtcaccaccgt

SEQ ID NO: 21398 - RNA, 19 nt, synthetic construct
  source 1..19: mol_type = other RNA
gtggctgtagtgctcggct

SEQ ID NO: 21399 - RNA, 19 nt, synthetic construct
  source 1..19: mol_type = other RNA
gcaccgtcacggtggctgt

SEQ ID NO: 21400 - RNA, 19 nt, synthetic construct
  source 1..19: mol_type = other RNA
tgctcacatgtggggtgcc

SEQ ID NO: 21401 - RNA, 19 nt, synthetic construct
  source 1..19: mol_type = other RNA
tggtgctcacatgtggggt

SEQ ID NO: 21402 - RNA, 19 nt, synthetic construct
  source 1..19: mol_type = other RNA
ccgtggtgctcacatgtgg

SEQ ID NO: 21403 - RNA, 19 nt, synthetic construct
  source 1..19: mol_type = other RNA
gtggccgtggtgctcacat

SEQ ID NO: 21404 - RNA, 19 nt, synthetic construct
  source 1..19: mol_type = other RNA
ctttggtagtgtgagctgt

SEQ ID NO: 21405 - RNA, 19 nt, synthetic construct
  source 1..19: mol_type = other RNA
cactttggtagtgtgagct

SEQ ID NO: 21406 - RNA, 19 nt, synthetic construct
  source 1..19: mol_type = other RNA
agccactggttgtgggtgt

SEQ ID NO: 21407 - RNA, 19 nt, synthetic construct
  source 1..19: mol_type = other RNA
agggggtcaccgtggagcc

SEQ ID NO: 21408 - RNA, 19 nt, synthetic construct
  source 1..19: mol_type = other RNA
gagggggtcaccgtggagc

SEQ ID NO: 21409 - RNA, 19 nt, synthetic construct
  source 1..19: mol_type = other RNA
ggtgatcagtgatggggga

SEQ ID NO: 21410 - RNA, 19 nt, synthetic construct
  source 1..19: mol_type = other RNA
tggtgatcagtgatggggg

SEQ ID NO: 21411 - RNA, 19 nt, synthetic construct
  source 1..19: mol_type = other RNA
ggtgttgtccctggagttg

SEQ ID NO: 21412 - RNA, 19 nt, synthetic construct
  source 1..19: mol_type = other RNA
tggtcagcactggggggat

SEQ ID NO: 21413 - RNA, 19 nt, synthetic construct
  source 1..19: mol_type = other RNA
gtgcgggtcttgctgggtg

SEQ ID NO: 21414 - RNA, 19 nt, synthetic construct
  source 1..19: mol_type = other RNA
agcccgtggtcaccaccgt

SEQ ID NO: 21415 - RNA, 19 nt, synthetic construct
  source 1..19: mol_type = other RNA
agggcatggccgtagagct

SEQ ID NO: 21416 - RNA, 19 nt, synthetic construct
  source 1..19: mol_type = other RNA
tcccggtggtcccaagggt

SEQ ID NO: 21417 - RNA, 19 nt, synthetic construct
  source 1..19: mol_type = other RNA
tctgttctgggagggtccc

SEQ ID NO: 21418 - RNA, 19 nt, synthetic construct
  source 1..19: mol_type = other RNA
gccacgggtgtggtggtct

SEQ ID NO: 21419 - RNA, 19 nt, synthetic construct
  source 1..19: mol_type = other RNA
aggaggggtggattgtgga

SEQ ID NO: 21420 - RNA, 19 nt, synthetic construct
  source 1..19: mol_type = other RNA
tggccttcgtggtcagcac

SEQ ID NO: 21421 - RNA, 19 nt, synthetic construct
  source 1..19: mol_type = other RNA
gtggctgtagtgctcggct

SEQ ID NO: 21422 - RNA, 19 nt, synthetic construct
  source 1..19: mol_type = other RNA
gcaccgtcacggtggctgt

SEQ ID NO: 21423 - RNA, 19 nt, synthetic construct
  source 1..19: mol_type = other RNA
tgctcacatgtggggtgcc

SEQ ID NO: 21424 - RNA, 19 nt, synthetic construct
  source 1..19: mol_type = other RNA
tggtgctcacatgtggggt

SEQ ID NO: 21425 - RNA, 19 nt, synthetic construct
  source 1..19: mol_type = other RNA
ccgtggtgctcacatgtgg

SEQ ID NO: 21426 - RNA, 19 nt, synthetic construct
  source 1..19: mol_type = other RNA
gtggccgtggtgctcacat

SEQ ID NO: 21427 - RNA, 19 nt, synthetic construct
  source 1..19: mol_type = other RNA
tggaagggcagttgcagtc

SEQ ID NO: 21428 - RNA, 19 nt, synthetic construct
  source 1..19: mol_type = other RNA
ctttggtagtgtgagctgt

SEQ ID NO: 21429 - RNA, 19 nt, synthetic construct
  source 1..19: mol_type = other RNA
cactttggtagtgtgagct

SEQ ID NO: 21430 - RNA, 19 nt, synthetic construct
  source 1..19: mol_type = other RNA
agccactggttgtgggtgt

SEQ ID NO: 21431 - RNA, 19 nt, synthetic construct
  source 1..19: mol_type = other RNA
agggggtcaccgtggagcc

SEQ ID NO: 21432 - RNA, 19 nt, synthetic construct
  source 1..19: mol_type = other RNA
gagggggtcaccgtggagc

SEQ ID NO: 21433 - RNA, 19 nt, synthetic construct
  source 1..19: mol_type = other RNA
ggtgttgtccctggagttg

SEQ ID NO: 21434 - RNA, 19 nt, synthetic construct
  source 1..19: mol_type = other RNA
gggtgatgggtgttgtccc

SEQ ID NO: 21435 - RNA, 19 nt, synthetic construct
  source 1..19: mol_type = other RNA
gtctgtgctgggacggtcc

SEQ ID NO: 21436 - RNA, 19 nt, synthetic construct
  source 1..19: mol_type = other RNA
ttggtggcccttgtcatgg

SEQ ID NO: 21437 - RNA, 19 nt, synthetic construct
  source 1..19: mol_type = other RNA
aggatccgggtcgtcccca

SEQ ID NO: 21438 - RNA, 19 nt, synthetic construct
  source 1..19: mol_type = other RNA
caggcgccctggaagcggt

SEQ ID NO: 21439 - RNA, 19 nt, synthetic construct
  source 1..19: mol_type = other RNA
tgggacaggcgccctggaa

SEQ ID NO: 21440 - RNA, 19 nt, synthetic construct
  source 1..19: mol_type = other RNA
gctgagattcccaaagcgt

SEQ ID NO: 21441 - RNA, 19 nt, synthetic construct
  source 1..19: mol_type = other RNA
tgtgctagacaccggggct

SEQ ID NO: 21442 - RNA, 19 nt, synthetic construct
  source 1..19: mol_type = other RNA
ggtgtgctagacaccgggg

SEQ ID NO: 21443 - RNA, 19 nt, synthetic construct
  source 1..19: mol_type = other RNA
ggcacaaggttgtggcact

SEQ ID NO: 21444 - RNA, 19 nt, synthetic construct
  source 1..19: mol_type = other RNA
agtggtcgctgatgcaggc

SEQ ID NO: 21445 - RNA, 19 nt, synthetic construct
  source 1..19: mol_type = other RNA
tcaaggcggcccctgcagt

SEQ ID NO: 21446 - RNA, 19 nt, synthetic construct
  source 1..19: mol_type = other RNA
gggcgcggcagagctctgc

SEQ ID NO: 21447 - RNA, 19 nt, synthetic construct
  source 1..19: mol_type = other RNA
tgcaggtggcaggctgtat

SEQ ID NO: 21448 - RNA, 19 nt, synthetic construct
  source 1..19: mol_type = other RNA
ttgcactgcaccgacactg

SEQ ID NO: 21449 - RNA, 19 nt, synthetic construct
  source 1..19: mol_type = other RNA
ggctgaccctgggcgtcac

SEQ ID NO: 21450 - RNA, 19 nt, synthetic construct
  source 1..19: mol_type = other RNA
ttgcacggcgggggctgac

SEQ ID NO: 21451 - RNA, 19 nt, synthetic construct
  source 1..19: mol_type = other RNA
gatggactcctgccctggc

SEQ ID NO: 21452 - RNA, 19 nt, synthetic construct
  source 1..19: mol_type = other RNA
caggtacacatgtggcagg

SEQ ID NO: 21453 - RNA, 19 nt, synthetic construct
  source 1..19: mol_type = other RNA
ttgacccaggtttcattca

SEQ ID NO: 21454 - RNA, 19 nt, synthetic construct
  source 1..19: mol_type = other RNA
acacggtgcagttgtccac

SEQ ID NO: 21455 - RNA, 19 nt, synthetic construct
  source 1..19: mol_type = other RNA
gcctctgctgagtacttgg

SEQ ID NO: 21456 - RNA, 19 nt, synthetic construct
  source 1..19: mol_type = other RNA
ggggccggtttcacccacg

SEQ ID NO: 21457 - RNA, 19 nt, synthetic construct
  source 1..19: mol_type = other RNA
gcgctccggccgtggcagg

SEQ ID NO: 21458 - RNA, 19 nt, synthetic construct
  source 1..19: mol_type = other RNA
agctggaatccgtgctgcg

SEQ ID NO: 21459 - RNA, 19 nt, synthetic construct
  source 1..19: mol_type = other RNA
ggcgtagctggacgttgaa

SEQ ID NO: 21460 - RNA, 19 nt, synthetic construct
  source 1..19: mol_type = other RNA
tgcgaggtgagggccgccg

SEQ ID NO: 21461 - RNA, 19 nt, synthetic construct
  source 1..19: mol_type = other RNA
agctggacgttgaagtcct

SEQ ID NO: 21462 - RNA, 19 nt, synthetic construct
  source 1..19: mol_type = other RNA
acggcactcgaggcccagg

SEQ ID NO: 21463 - RNA, 19 nt, synthetic construct
  source 1..19: mol_type = other RNA
gtggccgtggatccagtgg

SEQ ID NO: 21464 - RNA, 19 nt, synthetic construct
  source 1..19: mol_type = other RNA
gtggccgtggatccagtgg

SEQ ID NO: 21465 - RNA, 19 nt, synthetic construct
  source 1..19: mol_type = other RNA
tgttgacctcggtctcgca

SEQ ID NO: 21466 - RNA, 19 nt, synthetic construct
  source 1..19: mol_type = other RNA
gtcgccacccgagtcgcag

SEQ ID NO: 21467 - RNA, 19 nt, synthetic construct
  source 1..19: mol_type = other RNA
gcgcggggtgccacacaca

SEQ ID NO: 21468 - RNA, 19 nt, synthetic construct
  source 1..19: mol_type = other RNA
gaacgtagctgcagtcacc

SEQ ID NO: 21469 - RNA, 19 nt, synthetic construct
  source 1..19: mol_type = other RNA
cagtcgctgagctgtacgc

SEQ ID NO: 21470 - RNA, 19 nt, synthetic construct
  source 1..19: mol_type = other RNA
cttggacgctccggggcag

SEQ ID NO: 21471 - RNA, 19 nt, synthetic construct
  source 1..19: mol_type = other RNA
gtacttggacgctccgggg

SEQ ID NO: 21472 - RNA, 19 nt, synthetic construct
  source 1..19: mol_type = other RNA
acccgtacatgaacacacg

SEQ ID NO: 21473 - RNA, 19 nt, synthetic construct
  source 1..19: mol_type = other RNA
tggcgtatttgggatccag

SEQ ID NO: 21474 - RNA, 19 nt, synthetic construct
  source 1..19: mol_type = other RNA
gacagcgggtcgtgccctg

SEQ ID NO: 21475 - RNA, 19 nt, synthetic construct
  source 1..19: mol_type = other RNA
ggtggctatagtgctcggc

SEQ ID NO: 21476 - RNA, 19 nt, synthetic construct
  source 1..19: mol_type = other RNA
ggacgtggccagctggaat

SEQ ID NO: 21477 - RNA, 19 nt, synthetic construct
  source 1..19: mol_type = other RNA
cacgcacaccgtctcgggg

SEQ ID NO: 21478 - RNA, 19 nt, synthetic construct
  source 1..19: mol_type = other RNA
ggtcccgtgggtggtgttg

SEQ ID NO: 21479 - RNA, 19 nt, synthetic construct
  source 1..19: mol_type = other RNA
cttgatgtagtccccgctc

SEQ ID NO: 21480 - RNA, 19 nt, synthetic construct
  source 1..19: mol_type = other RNA
tgctgtcggcacatttctt

SEQ ID NO: 21481 - RNA, 19 nt, synthetic construct
  source 1..19: mol_type = other RNA
tggccattgaaggtgacgc

SEQ ID NO: 21482 - RNA, 19 nt, synthetic construct
  source 1..19: mol_type = other RNA
tctgctgagtacttggacg

SEQ ID NO: 21483 - RNA, 19 nt, synthetic construct
  source 1..19: mol_type = other RNA
ctggacgcactccccacag

SEQ ID NO: 21484 - RNA, 19 nt, synthetic construct
  source 1..19: mol_type = other RNA
gggataggtgttgtccctg

SEQ ID NO: 21485 - RNA, 19 nt, synthetic construct
  source 1..19: mol_type = other RNA
gggataggtgttgtccctg

SEQ ID NO: 21486 - RNA, 19 nt, synthetic construct
  source 1..19: mol_type = other RNA
tcggcacatttcttggaca

SEQ ID NO: 21487 - RNA, 19 nt, synthetic construct
  source 1..19: mol_type = other RNA
gatccggtgggcaccgtca

SEQ ID NO: 21488 - RNA, 19 nt, synthetic construct
  source 1..19: mol_type = other RNA
gatccggtgggcaccgtca

SEQ ID NO: 21489 - RNA, 19 nt, synthetic construct
  source 1..19: mol_type = other RNA
gatccggtgggcaccgtca

SEQ ID NO: 21490 - RNA, 19 nt, synthetic construct
  source 1..19: mol_type = other RNA
gatccggtgggcaccgtca

SEQ ID NO: 21491 - RNA, 19 nt, synthetic construct
  source 1..19: mol_type = other RNA
cgtgcatggatctctctca

SEQ ID NO: 21492 - RNA, 19 nt, synthetic construct
  source 1..19: mol_type = other RNA
cactctggcggtgtgggtg

SEQ ID NO: 21493 - RNA, 19 nt, synthetic construct
  source 1..19: mol_type = other RNA
aatagtgggagccgcccca

SEQ ID NO: 21494 - RNA, 19 nt, synthetic construct
  source 1..19: mol_type = other RNA
gatcaagcaggcgccaagc

SEQ ID NO: 21495 - RNA, 19 nt, synthetic construct
  source 1..19: mol_type = other RNA
gcgccatgtgcccaagctc

SEQ ID NO: 21496 - RNA, 19 nt, synthetic construct
  source 1..19: mol_type = other RNA
ggcgccatgtgcccaagct

SEQ ID NO: 21497 - RNA, 19 nt, synthetic construct
  source 1..19: mol_type = other RNA
tttggaagcggtgctggct

SEQ ID NO: 21498 - RNA, 19 nt, synthetic construct
  source 1..19: mol_type = other RNA
gataggcgggtccaggtgg

SEQ ID NO: 21499 - RNA, 19 nt, synthetic construct
  source 1..19: mol_type = other RNA
ggtaagcactgtggaggtg

SEQ ID NO: 21500 - RNA, 19 nt, synthetic construct
  source 1..19: mol_type = other RNA
gataggcgggtccaggtgg

SEQ ID NO: 21501 - RNA, 19 nt, synthetic construct
  source 1..19: mol_type = other RNA
ggtaagcactgtggaggtg

SEQ ID NO: 21502 - RNA, 19 nt, synthetic construct
  source 1..19: mol_type = other RNA
tattggggccgatgtgggg

SEQ ID NO: 21503 - RNA, 19 nt, synthetic construct
  source 1..19: mol_type = other RNA
ggtaagcactgtggaggtg

SEQ ID NO: 21504 - RNA, 19 nt, synthetic construct
  source 1..19: mol_type = other RNA
gacacggccatcccgtggg

SEQ ID NO: 21505 - RNA, 19 nt, synthetic construct
  source 1..19: mol_type = other RNA
catgtgggttgtagaagtc

SEQ ID NO: 21506 - RNA, 19 nt, synthetic construct
  source 1..19: mol_type = other RNA
ccatgtgggttgtagaagt

SEQ ID NO: 21507 - RNA, 19 nt, synthetic construct
  source 1..19: mol_type = other RNA
gctctttggaagcggtgct

SEQ ID NO: 21508 - RNA, 19 nt, synthetic construct
  source 1..19: mol_type = other RNA
tgactgtgggtgtcgtggc

SEQ ID NO: 21509 - RNA, 19 nt, synthetic construct
  source 1..19: mol_type = other RNA
tgactgtgggtgtcgtggc

SEQ ID NO: 21510 - RNA, 19 nt, synthetic construct
  source 1..19: mol_type = other RNA
tgactgtgggtgtcgtggc

SEQ ID NO: 21511 - RNA, 19 nt, synthetic construct
  source 1..19: mol_type = other RNA
ttgatgtagtccccgctct

SEQ ID NO: 21512 - RNA, 19 nt, synthetic construct
  source 1..19: mol_type = other RNA
tccgtgcagttgccggccg

SEQ ID NO: 21513 - RNA, 19 nt, synthetic construct
  source 1..19: mol_type = other RNA
tggcagatgccctcctcgt

SEQ ID NO: 21514 - RNA, 19 nt, synthetic construct
  source 1..19: mol_type = other RNA
ctgccatagccccccggag

SEQ ID NO: 21515 - RNA, 19 nt, synthetic construct
  source 1..19: mol_type = other RNA
tgggcgggcacacaggcgc

SEQ ID NO: 21516 - RNA, 19 nt, synthetic construct
  source 1..19: mol_type = other RNA
cagcacggtgccgtgagcg

SEQ ID NO: 21517 - RNA, 19 nt, synthetic construct
  source 1..19: mol_type = other RNA
ttgggtgccagggcgtccg

SEQ ID NO: 21518 - RNA, 19 nt, synthetic construct
  source 1..19: mol_type = other RNA
gatggtgccgttgcttccg

SEQ ID NO: 21519 - RNA, 19 nt, synthetic construct
  source 1..19: mol_type = other RNA
gcacaccaggccgaagtgg

SEQ ID NO: 21520 - RNA, 19 nt, synthetic construct
  source 1..19: mol_type = other RNA
ggctgagcgtgttggaagg

SEQ ID NO: 21521 - RNA, 19 nt, synthetic construct
  source 1..19: mol_type = other RNA
cgtgagtgttggcgccagg

SEQ ID NO: 21522 - RNA, 19 nt, synthetic construct
  source 1..19: mol_type = other RNA
tgagaggtggacagctcgc

SEQ ID NO: 21523 - RNA, 19 nt, synthetic construct
  source 1..19: mol_type = other RNA
ctgtggacatggtggccgt

SEQ ID NO: 21524 - RNA, 19 nt, synthetic construct
  source 1..19: mol_type = other RNA
gtagttggcactttggtag

SEQ ID NO: 21525 - RNA, 19 nt, synthetic construct
  source 1..19: mol_type = other RNA
tggtctgtgtgctagagga

SEQ ID NO: 21526 - RNA, 19 nt, synthetic construct
  source 1..19: mol_type = other RNA
ctggtctgtgtgctagagg

SEQ ID NO: 21527 - RNA, 19 nt, synthetic construct
  source 1..19: mol_type = other RNA
gtggtgtggcccggggtgg

SEQ ID NO: 21528 - RNA, 19 nt, synthetic construct
  source 1..19: mol_type = other RNA
ccccggcatggggtagctg

SEQ ID NO: 21529 - RNA, 19 nt, synthetic construct
  source 1..19: mol_type = other RNA
gtcaaagtccccgccagag

SEQ ID NO: 21530 - RNA, 19 nt, synthetic construct
  source 1..19: mol_type = other RNA
ctgtggacatggtggccgt

SEQ ID NO: 21531 - RNA, 19 nt, synthetic construct
  source 1..19: mol_type = other RNA
tggtctgtgtgctagagga

SEQ ID NO: 21532 - RNA, 19 nt, synthetic construct
  source 1..19: mol_type = other RNA
ctggtctgtgtgctagagg

SEQ ID NO: 21533 - RNA, 19 nt, synthetic construct
  source 1..19: mol_type = other RNA
ctggtgtggcccggggtgg

SEQ ID NO: 21534 - RNA, 19 nt, synthetic construct
  source 1..19: mol_type = other RNA
ccccggcatggggtagctg

SEQ ID NO: 21535 - RNA, 19 nt, synthetic construct
  source 1..19: mol_type = other RNA
gtcaaagtccccgccagag

SEQ ID NO: 21536 - RNA, 19 nt, synthetic construct
  source 1..19: mol_type = other RNA
ggtgtaaagctggtagctg

SEQ ID NO: 21537 - RNA, 19 nt, synthetic construct
  source 1..19: mol_type = other RNA
ctgtggacatggtggccgt

SEQ ID NO: 21538 - RNA, 19 nt, synthetic construct
  source 1..19: mol_type = other RNA
gtcggcactttggtagtgt

SEQ ID NO: 21539 - RNA, 19 nt, synthetic construct
  source 1..19: mol_type = other RNA
tggtctgtgtgctagagga

SEQ ID NO: 21540 - RNA, 19 nt, synthetic construct
  source 1..19: mol_type = other RNA
ctggtctgtgtgctagagg

SEQ ID NO: 21541 - RNA, 19 nt, synthetic construct
  source 1..19: mol_type = other RNA
ctggtgtggcccggggtgg

SEQ ID NO: 21542 - RNA, 19 nt, synthetic construct
  source 1..19: mol_type = other RNA
ccccggcatggggtagctg

SEQ ID NO: 21543 - RNA, 19 nt, synthetic construct
  source 1..19: mol_type = other RNA
gtcaaagtccccgccagag

SEQ ID NO: 21544 - RNA, 19 nt, synthetic construct
  source 1..19: mol_type = other RNA
ctgtggacatggtggccgt

SEQ ID NO: 21545 - RNA, 19 nt, synthetic construct
  source 1..19: mol_type = other RNA
gtcggcactttggtagtgt

SEQ ID NO: 21546 - RNA, 19 nt, synthetic construct
  source 1..19: mol_type = other RNA
tggtctgtgtgctagagga

SEQ ID NO: 21547 - RNA, 19 nt, synthetic construct
  source 1..19: mol_type = other RNA
ctggtctgtgtgctagagg

SEQ ID NO: 21548 - RNA, 19 nt, synthetic construct
  source 1..19: mol_type = other RNA
gtggtgtggcccggggtgg

SEQ ID NO: 21549 - RNA, 19 nt, synthetic construct
  source 1..19: mol_type = other RNA
ccccggcatggggtagctg

SEQ ID NO: 21550 - RNA, 19 nt, synthetic construct
  source 1..19: mol_type = other RNA
gtcaaagtccccgccagag

SEQ ID NO: 21551 - RNA, 19 nt, synthetic construct
  source 1..19: mol_type = other RNA
ctgtggacatggtggccgt

SEQ ID NO: 21552 - RNA, 19 nt, synthetic construct
  source 1..19: mol_type = other RNA
gtcggcactttggtagtgt

SEQ ID NO: 21553 - RNA, 19 nt, synthetic construct
  source 1..19: mol_type = other RNA
tggtctgtgtgctagagga

SEQ ID NO: 21554 - RNA, 19 nt, synthetic construct
  source 1..19: mol_type = other RNA
ctggtctgtgtgctagagg

SEQ ID NO: 21555 - RNA, 19 nt, synthetic construct
  source 1..19: mol_type = other RNA
ggtgtaaagctggtagctg

SEQ ID NO: 21556 - RNA, 19 nt, synthetic construct
  source 1..19: mol_type = other RNA
gacaggcgccctggaagcg

SEQ ID NO: 21557 - RNA, 19 nt, synthetic construct
  source 1..19: mol_type = other RNA
cctttctgctgtcggggac

SEQ ID NO: 21558 - RNA, 19 nt, synthetic construct
  source 1..19: mol_type = other RNA
tgcgttgaagaggatctgg

SEQ ID NO: 21559 - RNA, 19 nt, synthetic construct
  source 1..19: mol_type = other RNA
cccatgtgtgcgttgaaga

SEQ ID NO: 21560 - RNA, 19 nt, synthetic construct
  source 1..19: mol_type = other RNA
gtcagcaaatggactccac

SEQ ID NO: 21561 - RNA, 19 nt, synthetic construct
  source 1..19: mol_type = other RNA
gagcacggagcgcggggtg

SEQ ID NO: 21562 - RNA, 19 nt, synthetic construct
  source 1..19: mol_type = other RNA
ctctcccagggtaggactc

SEQ ID NO: 21563 - RNA, 19 nt, synthetic construct
  source 1..19: mol_type = other RNA
caggctctcccagggtagg

SEQ ID NO: 21564 - RNA, 19 nt, synthetic construct
  source 1..19: mol_type = other RNA
cccagtgacatcagggagg

SEQ ID NO: 21565 - RNA, 19 nt, synthetic construct
  source 1..19: mol_type = other RNA
gataggcgggtccaggtgg

SEQ ID NO: 21566 - RNA, 19 nt, synthetic construct
  source 1..19: mol_type = other RNA
ggtaagcactgtggaggtg

SEQ ID NO: 21567 - RNA, 19 nt, synthetic construct
  source 1..19: mol_type = other RNA
ggggttgtggcacgtcccc

SEQ ID NO: 21568 - RNA, 19 nt, synthetic construct
  source 1..19: mol_type = other RNA
gataggcgggtccaggtgg

SEQ ID NO: 21569 - RNA, 19 nt, synthetic construct
  source 1..19: mol_type = other RNA
caccgccatccatggtgtg

SEQ ID NO: 21570 - RNA, 19 nt, synthetic construct
  source 1..19: mol_type = other RNA
ggatggctgtaacgctggt

SEQ ID NO: 21571 - RNA, 19 nt, synthetic construct
  source 1..19: mol_type = other RNA
gggatggctgtaacgctgg

SEQ ID NO: 21572 - RNA, 19 nt, synthetic construct
  source 1..19: mol_type = other RNA
agggtaggactcctgagtg

SEQ ID NO: 21573 - RNA, 19 nt, synthetic construct
  source 1..19: mol_type = other RNA
ggtaagcactgtggaggtg

SEQ ID NO: 21574 - RNA, 19 nt, synthetic construct
  source 1..19: mol_type = other RNA
gtagtggttgtccaggtag

SEQ ID NO: 21575 - RNA, 19 nt, synthetic construct
  source 1..19: mol_type = other RNA
acagggcacgtattcgcag

SEQ ID NO: 21576 - RNA, 19 nt, synthetic construct
  source 1..19: mol_type = other RNA
gggtcaccgtggaacctct

SEQ ID NO: 21577 - RNA, 19 nt, synthetic construct
  source 1..19: mol_type = other RNA
tggccgttgcgacctcagc

SEQ ID NO: 21578 - RNA, 19 nt, synthetic construct
  source 1..19: mol_type = other RNA
gtccgcttggacccggatg

SEQ ID NO: 21579 - RNA, 19 nt, synthetic construct
  source 1..19: mol_type = other RNA
ccgtggtgttcggcactgg

SEQ ID NO: 21580 - RNA, 19 nt, synthetic construct
  source 1..19: mol_type = other RNA
ccgtggtgttcggcactgg

SEQ ID NO: 21581 - RNA, 19 nt, synthetic construct
  source 1..19: mol_type = other RNA
ccgtggtgttcggcactgg

SEQ ID NO: 21582 - RNA, 19 nt, synthetic construct
  source 1..19: mol_type = other RNA
gtcaggccgcacttccgca

SEQ ID NO: 21583 - RNA, 19 nt, synthetic construct
  source 1..19: mol_type = other RNA
cacacacggtggagaccgg

SEQ ID NO: 21584 - RNA, 19 nt, synthetic construct
  source 1..19: mol_type = other RNA
gtaggctgcggcgttgaga

SEQ ID NO: 21585 - RNA, 19 nt, synthetic construct
  source 1..19: mol_type = other RNA
ctgtatggggccgcatggc

SEQ ID NO: 21586 - RNA, 19 nt, synthetic construct
  source 1..19: mol_type = other RNA
tgtccgtgcagggtgagcc

SEQ ID NO: 21587 - RNA, 19 nt, synthetic construct
  source 1..19: mol_type = other RNA
cactggatgccactgggtg

SEQ ID NO: 21588 - RNA, 19 nt, synthetic construct
  source 1..19: mol_type = other RNA
acgtcctggtagctgtagg

SEQ ID NO: 21589 - RNA, 19 nt, synthetic construct
  source 1..19: mol_type = other RNA
tccgtcaggccgcacttcc

SEQ ID NO: 21590 - RNA, 19 nt, synthetic construct
  source 1..19: mol_type = other RNA
caggcatccaccacgtagg

SEQ ID NO: 21591 - RNA, 19 nt, synthetic construct
  source 1..19: mol_type = other RNA
tgctgtccaccagtgcgtg

SEQ ID NO: 21592 - RNA, 19 nt, synthetic construct
  source 1..19: mol_type = other RNA
ggcactgccatagcccccc

SEQ ID NO: 21593 - RNA, 19 nt, synthetic construct
  source 1..19: mol_type = other RNA
cagcagaggacccggatcc

SEQ ID NO: 21594 - RNA, 19 nt, synthetic construct
  source 1..19: mol_type = other RNA
ggttgtggcacgtcccctg

SEQ ID NO: 21595 - RNA, 19 nt, synthetic construct
  source 1..19: mol_type = other RNA
gtcggggtggccgtggatc

SEQ ID NO: 21596 - RNA, 19 nt, synthetic construct
  source 1..19: mol_type = other RNA
gacggggtggccgtggatc

SEQ ID NO: 21597 - RNA, 19 nt, synthetic construct
  source 1..19: mol_type = other RNA
gacggggtggccgtggatc

SEQ ID NO: 21598 - RNA, 19 nt, synthetic construct
  source 1..19: mol_type = other RNA
gacggggtggccgtggatc

SEQ ID NO: 21599 - RNA, 19 nt, synthetic construct
  source 1..19: mol_type = other RNA
gacggggtggccgtggatc

SEQ ID NO: 21600 - RNA, 19 nt, synthetic construct
  source 1..19: mol_type = other RNA
tgcggcaccacgagcatgg

SEQ ID NO: 21601 - RNA, 19 nt, synthetic construct
  source 1..19: mol_type = other RNA
cgggtggaacaaagctcac

SEQ ID NO: 21602 - RNA, 19 nt, synthetic construct
  source 1..19: mol_type = other RNA
cgcggcagtgctcagagaa

SEQ ID NO: 21603 - RNA, 19 nt, synthetic construct
  source 1..19: mol_type = other RNA
gcggccaggtacgcagtgc

SEQ ID NO: 21604 - RNA, 19 nt, synthetic construct
  source 1..19: mol_type = other RNA
aggccgcacttccgcagct

SEQ ID NO: 21605 - RNA, 19 nt, synthetic construct
  source 1..19: mol_type = other RNA
ccgcttggacccggatggc

SEQ ID NO: 21606 - RNA, 19 nt, synthetic construct
  source 1..19: mol_type = other RNA
ctgcatgagtggcaccagc

SEQ ID NO: 21607 - RNA, 19 nt, synthetic construct
  source 1..19: mol_type = other RNA
ggcgaaggctgcgcccgtg

SEQ ID NO: 21608 - RNA, 19 nt, synthetic construct
  source 1..19: mol_type = other RNA
cgtcggcctcactcaggcc

SEQ ID NO: 21609 - RNA, 19 nt, synthetic construct
  source 1..19: mol_type = other RNA
cattgaggaaggtgcccgc

SEQ ID NO: 21610 - RNA, 19 nt, synthetic construct
  source 1..19: mol_type = other RNA
ccatccgacaccagccccg

SEQ ID NO: 21611 - RNA, 19 nt, synthetic construct
  source 1..19: mol_type = other RNA
cggggttgtggcacgtccc

SEQ ID NO: 21612 - RNA, 19 nt, synthetic construct
  source 1..19: mol_type = other RNA
gaggtcggggtggccgtgg

SEQ ID NO: 21613 - RNA, 19 nt, synthetic construct
  source 1..19: mol_type = other RNA
atggtgttcggcactgggg

SEQ ID NO: 21614 - RNA, 19 nt, synthetic construct
  source 1..19: mol_type = other RNA
tcgaggtgcgggtcttgct

SEQ ID NO: 21615 - RNA, 19 nt, synthetic construct
  source 1..19: mol_type = other RNA
ctggggctcacagcccatg

SEQ ID NO: 21616 - RNA, 19 nt, synthetic construct
  source 1..19: mol_type = other RNA
ccgtagagctggtggccgg

SEQ ID NO: 21617 - RNA, 19 nt, synthetic construct
  source 1..19: mol_type = other RNA
agtcagcactttggtagtg

SEQ ID NO: 21618 - RNA, 19 nt, synthetic construct
  source 1..19: mol_type = other RNA
gtggtgttcggcactgggg

SEQ ID NO: 21619 - RNA, 19 nt, synthetic construct
  source 1..19: mol_type = other RNA
tggtcctgctgctagggtg

SEQ ID NO: 21620 - RNA, 19 nt, synthetic construct
  source 1..19: mol_type = other RNA
tcgaggtgcgggtcttgct

SEQ ID NO: 21621 - RNA, 19 nt, synthetic construct
  source 1..19: mol_type = other RNA
ctggggctcacagcccatg

SEQ ID NO: 21622 - RNA, 19 nt, synthetic construct
  source 1..19: mol_type = other RNA
ccgtagagctggtggccgg

SEQ ID NO: 21623 - RNA, 19 nt, synthetic construct
  source 1..19: mol_type = other RNA
gggagctgttcccggggtg

SEQ ID NO: 21624 - RNA, 19 nt, synthetic construct
  source 1..19: mol_type = other RNA
ggggagctgttcccggggt

SEQ ID NO: 21625 - RNA, 19 nt, synthetic construct
  source 1..19: mol_type = other RNA
gcagtccttggactggagg

SEQ ID NO: 21626 - RNA, 19 nt, synthetic construct
  source 1..19: mol_type = other RNA
gcactggaagggtggttgc

SEQ ID NO: 21627 - RNA, 19 nt, synthetic construct
  source 1..19: mol_type = other RNA
tcggcactttggtagtgtg

SEQ ID NO: 21628 - RNA, 19 nt, synthetic construct
  source 1..19: mol_type = other RNA
gtggtgttcggcactgggg

SEQ ID NO: 21629 - RNA, 19 nt, synthetic construct
  source 1..19: mol_type = other RNA
tggtcctgctgctagggtg

SEQ ID NO: 21630 - RNA, 19 nt, synthetic construct
  source 1..19: mol_type = other RNA
tcgaggtgcgggtcttgct

SEQ ID NO: 21631 - RNA, 19 nt, synthetic construct
  source 1..19: mol_type = other RNA
ccgtagagctggtggccgg

SEQ ID NO: 21632 - RNA, 19 nt, synthetic construct
  source 1..19: mol_type = other RNA
tcggcactttggtagtgtg

SEQ ID NO: 21633 - RNA, 19 nt, synthetic construct
  source 1..19: mol_type = other RNA
tggagccactggttgtggg

SEQ ID NO: 21634 - RNA, 19 nt, synthetic construct
  source 1..19: mol_type = other RNA
gtggtgttcggcactgggg

SEQ ID NO: 21635 - RNA, 19 nt, synthetic construct
  source 1..19: mol_type = other RNA
tggtcctgctgctagggtg

SEQ ID NO: 21636 - RNA, 19 nt, synthetic construct
  source 1..19: mol_type = other RNA
tcgaggtgcgggtcttgct

SEQ ID NO: 21637 - RNA, 19 nt, synthetic construct
  source 1..19: mol_type = other RNA
ccgtagagctggtggccgg

SEQ ID NO: 21638 - RNA, 19 nt, synthetic construct
  source 1..19: mol_type = other RNA
gggagctgttcccggggtg

SEQ ID NO: 21639 - RNA, 19 nt, synthetic construct
  source 1..19: mol_type = other RNA
ggggagctgttcccggggt

SEQ ID NO: 21640 - RNA, 19 nt, synthetic construct
  source 1..19: mol_type = other RNA
gcagtccttggactggagg

SEQ ID NO: 21641 - RNA, 19 nt, synthetic construct
  source 1..19: mol_type = other RNA
gcactggaagggtggttgc

SEQ ID NO: 21642 - RNA, 19 nt, synthetic construct
  source 1..19: mol_type = other RNA
tcggcactttggtagtgtg

SEQ ID NO: 21643 - RNA, 19 nt, synthetic construct
  source 1..19: mol_type = other RNA
tggagccactggttgtggg

SEQ ID NO: 21644 - RNA, 19 nt, synthetic construct
  source 1..19: mol_type = other RNA
gcagtccttggactggagg

SEQ ID NO: 21645 - RNA, 19 nt, synthetic construct
  source 1..19: mol_type = other RNA
gcactggaagggtggttgc

SEQ ID NO: 21646 - RNA, 19 nt, synthetic construct
  source 1..19: mol_type = other RNA
gcatcagatcacagagcgg

SEQ ID NO: 21647 - RNA, 19 nt, synthetic construct
  source 1..19: mol_type = other RNA
gcacggcgggggctgaccc

SEQ ID NO: 21648 - RNA, 19 nt, synthetic construct
  source 1..19: mol_type = other RNA
tgccacaggatggtcgtgt

SEQ ID NO: 21649 - RNA, 19 nt, synthetic construct
  source 1..19: mol_type = other RNA
tcggtctcgcagccctggt

SEQ ID NO: 21650 - RNA, 19 nt, synthetic construct
  source 1..19: mol_type = other RNA
gtttgttccagggcgtccc

SEQ ID NO: 21651 - RNA, 19 nt, synthetic construct
  source 1..19: mol_type = other RNA
ggcgccaagcccatcggtg

SEQ ID NO: 21652 - RNA, 19 nt, synthetic construct
  source 1..19: mol_type = other RNA
ccttaggctgctggcataa

SEQ ID NO: 21653 - RNA, 19 nt, synthetic construct
  source 1..19: mol_type = other RNA
gatgcccgaggtggccgaa

SEQ ID NO: 21654 - RNA, 19 nt, synthetic construct
  source 1..19: mol_type = other RNA
gatgcccgaggtggccgaa

SEQ ID NO: 21655 - RNA, 19 nt, synthetic construct
  source 1..19: mol_type = other RNA
gcgcactggatgccactgg

SEQ ID NO: 21656 - RNA, 19 nt, synthetic construct
  source 1..19: mol_type = other RNA
accgtggttatgggggccg

SEQ ID NO: 21657 - RNA, 19 nt, synthetic construct
  source 1..19: mol_type = other RNA
accgtggttatgggggccg

SEQ ID NO: 21658 - RNA, 19 nt, synthetic construct
  source 1..19: mol_type = other RNA
accgtggttatgggggccg

SEQ ID NO: 21659 - RNA, 19 nt, synthetic construct
  source 1..19: mol_type = other RNA
acgtctcaaagtctccgcc

SEQ ID NO: 21660 - RNA, 19 nt, synthetic construct
  source 1..19: mol_type = other RNA
ccagcggcatgtcgggaag

SEQ ID NO: 21661 - RNA, 19 nt, synthetic construct
  source 1..19: mol_type = other RNA
agttgtagcacatcttgaa

SEQ ID NO: 21662 - RNA, 19 nt, synthetic construct
  source 1..19: mol_type = other RNA
gctagggtgtgggaagtca

SEQ ID NO: 21663 - RNA, 19 nt, synthetic construct
  source 1..19: mol_type = other RNA
gcgcgagcaccagtgccgg

SEQ ID NO: 21664 - RNA, 19 nt, synthetic construct
  source 1..19: mol_type = other RNA
aaacccatcgggtcccacg

SEQ ID NO: 21665 - RNA, 19 nt, synthetic construct
  source 1..19: mol_type = other RNA
caggcacgaaggaaacgct

SEQ ID NO: 21666 - RNA, 19 nt, synthetic construct
  source 1..19: mol_type = other RNA
cagaacgttctcagacagc

SEQ ID NO: 21667 - RNA, 19 nt, synthetic construct
  source 1..19: mol_type = other RNA
atagtgggagccgccccac

SEQ ID NO: 21668 - RNA, 19 nt, synthetic construct
  source 1..19: mol_type = other RNA
cccggccactctcttgtac

SEQ ID NO: 21669 - RNA, 19 nt, synthetic construct
  source 1..19: mol_type = other RNA
tcatccacgtgggtgtagg

SEQ ID NO: 21670 - RNA, 19 nt, synthetic construct
  source 1..19: mol_type = other RNA
ccgtggttgtggtagttgg

SEQ ID NO: 21671 - RNA, 19 nt, synthetic construct
  source 1..19: mol_type = other RNA
ggtcagccccgggctactc

SEQ ID NO: 21672 - RNA, 19 nt, synthetic construct
  source 1..19: mol_type = other RNA
ggtcaccaccgtggttatt

SEQ ID NO: 21673 - RNA, 19 nt, synthetic construct
  source 1..19: mol_type = other RNA
tggtcaccaccgtggttat

SEQ ID NO: 21674 - RNA, 19 nt, synthetic construct
  source 1..19: mol_type = other RNA
gcactctggcggtgtgggt

SEQ ID NO: 21675 - RNA, 19 nt, synthetic construct
  source 1..19: mol_type = other RNA
acgcaggtgacgttggcca

SEQ ID NO: 21676 - RNA, 19 nt, synthetic construct
  source 1..19: mol_type = other RNA
atcaagcaggcgccaagcc

SEQ ID NO: 21677 - RNA, 19 nt, synthetic construct
  source 1..19: mol_type = other RNA
cgttgcttccgcagatggc

SEQ ID NO: 21678 - RNA, 19 nt, synthetic construct
  source 1..19: mol_type = other RNA
tccagcggcatgtcgggaa

SEQ ID NO: 21679 - RNA, 19 nt, synthetic construct
  source 1..19: mol_type = other RNA
cacaccaggccgaagtgga

SEQ ID NO: 21680 - RNA, 19 nt, synthetic construct
  source 1..19: mol_type = other RNA
tggccgtggtgctcacatg

SEQ ID NO: 21681 - RNA, 19 nt, synthetic construct
  source 1..19: mol_type = other RNA
gaacctctggttgtgggtg

SEQ ID NO: 21682 - RNA, 19 nt, synthetic construct
  source 1..19: mol_type = other RNA
gcttgtcagcactggaagg

SEQ ID NO: 21683 - RNA, 19 nt, synthetic construct
  source 1..19: mol_type = other RNA
tcacggtggctgtagtgct

SEQ ID NO: 21684 - RNA, 19 nt, synthetic construct
  source 1..19: mol_type = other RNA
tcacggtggctgtagtgct

SEQ ID NO: 21685 - RNA, 19 nt, synthetic construct
  source 1..19: mol_type = other RNA
tcacggtggctgtagtgct

SEQ ID NO: 21686 - RNA, 19 nt, synthetic construct
  source 1..19: mol_type = other RNA
taggaaacccatcgggtcc

SEQ ID NO: 21687 - RNA, 19 nt, synthetic construct
  source 1..19: mol_type = other RNA
gaagccgggacggttgcac

SEQ ID NO: 21688 - RNA, 19 nt, synthetic construct
  source 1..19: mol_type = other RNA
gtgggtggtctccggagtg

SEQ ID NO: 21689 - RNA, 19 nt, synthetic construct
  source 1..19: mol_type = other RNA
tgactgtgaagcccgtggt

SEQ ID NO: 21690 - RNA, 19 nt, synthetic construct
  source 1..19: mol_type = other RNA
gtgggtggtctccggagtg

SEQ ID NO: 21691 - RNA, 19 nt, synthetic construct
  source 1..19: mol_type = other RNA
cacactcatccacgtgggt

SEQ ID NO: 21692 - RNA, 19 nt, synthetic construct
  source 1..19: mol_type = other RNA
gtgggcgaggacgtcgggg

SEQ ID NO: 21693 - RNA, 19 nt, synthetic construct
  source 1..19: mol_type = other RNA
caagatgtactcgcagctg

SEQ ID NO: 21694 - RNA, 19 nt, synthetic construct
  source 1..19: mol_type = other RNA
ggacacggccatcccgtgg

SEQ ID NO: 21695 - RNA, 19 nt, synthetic construct
  source 1..19: mol_type = other RNA
aggacacggccatcccgtg

SEQ ID NO: 21696 - RNA, 19 nt, synthetic construct
  source 1..19: mol_type = other RNA
ctccagcggcatgtcggga

SEQ ID NO: 21697 - RNA, 19 nt, synthetic construct
  source 1..19: mol_type = other RNA
tgacagcgggtcgtgccct

SEQ ID NO: 21698 - RNA, 19 nt, synthetic construct
  source 1..19: mol_type = other RNA
gtggccatggtgttcggca

SEQ ID NO: 21699 - RNA, 19 nt, synthetic construct
  source 1..19: mol_type = other RNA
ccagagggccccggcatgg

SEQ ID NO: 21700 - RNA, 19 nt, synthetic construct
  source 1..19: mol_type = other RNA
tgggcacggcactcgaggc

SEQ ID NO: 21701 - RNA, 19 nt, synthetic construct
  source 1..19: mol_type = other RNA
ccagagggccccggcatgg

SEQ ID NO: 21702 - RNA, 19 nt, synthetic construct
  source 1..19: mol_type = other RNA
tgggcacggcactcgaggc

SEQ ID NO: 21703 - RNA, 19 nt, synthetic construct
  source 1..19: mol_type = other RNA
cgtggatccagtggttgcg

SEQ ID NO: 21704 - RNA, 19 nt, synthetic construct
  source 1..19: mol_type = other RNA
ccagagggccccggcatgg

SEQ ID NO: 21705 - RNA, 19 nt, synthetic construct
  source 1..19: mol_type = other RNA
tgggcacggcactcgaggc

SEQ ID NO: 21706 - RNA, 19 nt, synthetic construct
  source 1..19: mol_type = other RNA
ccagagggccccggcatgg

SEQ ID NO: 21707 - RNA, 19 nt, synthetic construct
  source 1..19: mol_type = other RNA
tgggcacggcactcgaggc

SEQ ID NO: 21708 - RNA, 19 nt, synthetic construct
  source 1..19: mol_type = other RNA
agcactctggcggtgtggg

SEQ ID NO: 21709 - RNA, 19 nt, synthetic construct
  source 1..19: mol_type = other RNA
tcgtcacacacgcaggact

SEQ ID NO: 21710 - RNA, 19 nt, synthetic construct
  source 1..19: mol_type = other RNA
gcgtccggcacgcgctcgg

SEQ ID NO: 21711 - RNA, 19 nt, synthetic construct
  source 1..19: mol_type = other RNA
acgcgccgggtgggcgagg

SEQ ID NO: 21712 - RNA, 19 nt, synthetic construct
  source 1..19: mol_type = other RNA
ggcgcggcagtgctcagag

SEQ ID NO: 21713 - RNA, 19 nt, synthetic construct
  source 1..19: mol_type = other RNA
cggcgcggcagtgctcaga

SEQ ID NO: 21714 - RNA, 19 nt, synthetic construct
  source 1..19: mol_type = other RNA
gcggcgcggcagtgctcag

SEQ ID NO: 21715 - RNA, 19 nt, synthetic construct
  source 1..19: mol_type = other RNA
cctcccgctgcccattgat

SEQ ID NO: 21716 - RNA, 19 nt, synthetic construct
  source 1..19: mol_type = other RNA
tcctcccgctgcccattga

SEQ ID NO: 21717 - RNA, 19 nt, synthetic construct
  source 1..19: mol_type = other RNA
atgtcagcaccagccggat

SEQ ID NO: 21718 - RNA, 19 nt, synthetic construct
  source 1..19: mol_type = other RNA
ctcgttgaaggccgggagg

SEQ ID NO: 21719 - RNA, 19 nt, synthetic construct
  source 1..19: mol_type = other RNA
agtattccacaaaggtggc

SEQ ID NO: 21720 - RNA, 19 nt, synthetic construct
  source 1..19: mol_type = other RNA
tgcatgttgagggggcagg

SEQ ID NO: 21721 - RNA, 19 nt, synthetic construct
  source 1..19: mol_type = other RNA
gtgcagggtgagccacact

SEQ ID NO: 21722 - RNA, 19 nt, synthetic construct
  source 1..19: mol_type = other RNA
agccagagtgcgtgatgtc

SEQ ID NO: 21723 - RNA, 19 nt, synthetic construct
  source 1..19: mol_type = other RNA
tcaggccgcacttccgcag

SEQ ID NO: 21724 - RNA, 19 nt, synthetic construct
  source 1..19: mol_type = other RNA
cgtccaggctgagcgtcac

SEQ ID NO: 21725 - RNA, 19 nt, synthetic construct
  source 1..19: mol_type = other RNA
tgagggccgtgaagtcgtc

SEQ ID NO: 21726 - RNA, 19 nt, synthetic construct
  source 1..19: mol_type = other RNA
ctgagggccgtgaagtcgt

SEQ ID NO: 21727 - RNA, 19 nt, synthetic construct
  source 1..19: mol_type = other RNA
caccccgctgagggccgtg

SEQ ID NO: 21728 - RNA, 19 nt, synthetic construct
  source 1..19: mol_type = other RNA
aagctgttcctggcattgg

SEQ ID NO: 21729 - RNA, 19 nt, synthetic construct
  source 1..19: mol_type = other RNA
gcactgttgggatcggtca

SEQ ID NO: 21730 - RNA, 19 nt, synthetic construct
  source 1..19: mol_type = other RNA
atgcagttcgagtggaagg

SEQ ID NO: 21731 - RNA, 19 nt, synthetic construct
  source 1..19: mol_type = other RNA
cgtagcgctgggacttggg

SEQ ID NO: 21732 - RNA, 19 nt, synthetic construct
  source 1..19: mol_type = other RNA
aggccgcggcaagtgggct

SEQ ID NO: 21733 - RNA, 19 nt, synthetic construct
  source 1..19: mol_type = other RNA
caggccgcggcaagtgggc

SEQ ID NO: 21734 - RNA, 19 nt, synthetic construct
  source 1..19: mol_type = other RNA
aggcacgaaggaaacgctg

SEQ ID NO: 21735 - RNA, 19 nt, synthetic construct
  source 1..19: mol_type = other RNA
aggtacaccatgggggctg

SEQ ID NO: 21736 - RNA, 19 nt, synthetic construct
  source 1..19: mol_type = other RNA
ccaggacacggccatcccg

SEQ ID NO: 21737 - RNA, 19 nt, synthetic construct
  source 1..19: mol_type = other RNA
tgcgtcccccaccacggac

SEQ ID NO: 21738 - RNA, 19 nt, synthetic construct
  source 1..19: mol_type = other RNA
tcgccacccgagtcgcagg

SEQ ID NO: 21739 - RNA, 19 nt, synthetic construct
  source 1..19: mol_type = other RNA
cgcgtcgtggcaggcctgg

SEQ ID NO: 21740 - RNA, 19 nt, synthetic construct
  source 1..19: mol_type = other RNA
ccgcgtcgtggcaggcctg

SEQ ID NO: 21741 - RNA, 19 nt, synthetic construct
  source 1..19: mol_type = other RNA
gctgtaggtcctgtcctca

SEQ ID NO: 21742 - RNA, 19 nt, synthetic construct
  source 1..19: mol_type = other RNA
caggcgccaagcccatcgg

SEQ ID NO: 21743 - RNA, 19 nt, synthetic construct
  source 1..19: mol_type = other RNA
atggtgccgttgcttccgc

SEQ ID NO: 21744 - RNA, 19 nt, synthetic construct
  source 1..19: mol_type = other RNA
gcggacacacacggtggag

SEQ ID NO: 21745 - RNA, 19 nt, synthetic construct
  source 1..19: mol_type = other RNA
gggggtgaccgtcacgggg

SEQ ID NO: 21746 - RNA, 19 nt, synthetic construct
  source 1..19: mol_type = other RNA
ggccgggggagccctggtc

SEQ ID NO: 21747 - RNA, 19 nt, synthetic construct
  source 1..19: mol_type = other RNA
tctgggggatgtcagtcct

SEQ ID NO: 21748 - RNA, 19 nt, synthetic construct
  source 1..19: mol_type = other RNA
gcgtcgtggggcctcccgt

SEQ ID NO: 21749 - RNA, 19 nt, synthetic construct
  source 1..19: mol_type = other RNA
cattgttgttggggccagc

SEQ ID NO: 21750 - RNA, 19 nt, synthetic construct
  source 1..19: mol_type = other RNA
aggctcgtggtcagcggct

SEQ ID NO: 21751 - RNA, 19 nt, synthetic construct
  source 1..19: mol_type = other RNA
ggtctcggcctgagaggtg

SEQ ID NO: 21752 - RNA, 19 nt, synthetic construct
  source 1..19: mol_type = other RNA
ggtagttggcactttggta

SEQ ID NO: 21753 - RNA, 19 nt, synthetic construct
  source 1..19: mol_type = other RNA
gcccgtggttgtggtagtt

SEQ ID NO: 21754 - RNA, 19 nt, synthetic construct
  source 1..19: mol_type = other RNA
gagcctctggttgtgggtg

SEQ ID NO: 21755 - RNA, 19 nt, synthetic construct
  source 1..19: mol_type = other RNA
atgggggagtaccactggt

SEQ ID NO: 21756 - RNA, 19 nt, synthetic construct
  source 1..19: mol_type = other RNA
gatcgtagtggccgtggtg

SEQ ID NO: 21757 - RNA, 19 nt, synthetic construct
  source 1..19: mol_type = other RNA
ggagccggtggccgtgatc

SEQ ID NO: 21758 - RNA, 19 nt, synthetic construct
  source 1..19: mol_type = other RNA
gcggtggtggtcagcactg

SEQ ID NO: 21759 - RNA, 19 nt, synthetic construct
  source 1..19: mol_type = other RNA
ggtggccatggtgttcggc

SEQ ID NO: 21760 - RNA, 19 nt, synthetic construct
  source 1..19: mol_type = other RNA
gtgctgggtggtaccggtg

SEQ ID NO: 21761 - RNA, 19 nt, synthetic construct
  source 1..19: mol_type = other RNA
cagacggcccctccggccg

SEQ ID NO: 21762 - RNA, 19 nt, synthetic construct
  source 1..19: mol_type = other RNA
tagtgctcggctctgtgag

SEQ ID NO: 21763 - RNA, 19 nt, synthetic construct
  source 1..19: mol_type = other RNA
tgtggaggtgtggacagtc

SEQ ID NO: 21764 - RNA, 19 nt, synthetic construct
  source 1..19: mol_type = other RNA
cccgtggttgtggtagtca

SEQ ID NO: 21765 - RNA, 19 nt, synthetic construct
  source 1..19: mol_type = other RNA
atgggggagtaccactggt

SEQ ID NO: 21766 - RNA, 19 nt, synthetic construct
  source 1..19: mol_type = other RNA
gatcgtagtggccgtggtg

SEQ ID NO: 21767 - RNA, 19 nt, synthetic construct
  source 1..19: mol_type = other RNA
ggagccggtggccgtgatc

SEQ ID NO: 21768 - RNA, 19 nt, synthetic construct
  source 1..19: mol_type = other RNA
gcggtggtggtcagcactg

SEQ ID NO: 21769 - RNA, 19 nt, synthetic construct
  source 1..19: mol_type = other RNA
gtgctgggtggtaccggtg

SEQ ID NO: 21770 - RNA, 19 nt, synthetic construct
  source 1..19: mol_type = other RNA
cagacggcccctccggccg

SEQ ID NO: 21771 - RNA, 19 nt, synthetic construct
  source 1..19: mol_type = other RNA
agcactggaagggtggttg

SEQ ID NO: 21772 - RNA, 19 nt, synthetic construct
  source 1..19: mol_type = other RNA
cttgtcagcactggaaggg

SEQ ID NO: 21773 - RNA, 19 nt, synthetic construct
  source 1..19: mol_type = other RNA
ggtcagcactgtggaggtg

SEQ ID NO: 21774 - RNA, 19 nt, synthetic construct
  source 1..19: mol_type = other RNA
tcgtggtggccttcgtggt

SEQ ID NO: 21775 - RNA, 19 nt, synthetic construct
  source 1..19: mol_type = other RNA
gctggtcagcactttgagg

SEQ ID NO: 21776 - RNA, 19 nt, synthetic construct
  source 1..19: mol_type = other RNA
tgtggaggtgtggacagtc

SEQ ID NO: 21777 - RNA, 19 nt, synthetic construct
  source 1..19: mol_type = other RNA
gagcctctggttgtgggtg

SEQ ID NO: 21778 - RNA, 19 nt, synthetic construct
  source 1..19: mol_type = other RNA
atgggggagtaccactggt

SEQ ID NO: 21779 - RNA, 19 nt, synthetic construct
  source 1..19: mol_type = other RNA
gatcgtagtggccgtggtg

SEQ ID NO: 21780 - RNA, 19 nt, synthetic construct
  source 1..19: mol_type = other RNA
agccggtggctgtgatcgt

SEQ ID NO: 21781 - RNA, 19 nt, synthetic construct
  source 1..19: mol_type = other RNA
gcggtggtggtcagcactg

SEQ ID NO: 21782 - RNA, 19 nt, synthetic construct
  source 1..19: mol_type = other RNA
acagcccgtggtcaccacc

SEQ ID NO: 21783 - RNA, 19 nt, synthetic construct
  source 1..19: mol_type = other RNA
tagtgctcggctctgtgag

SEQ ID NO: 21784 - RNA, 19 nt, synthetic construct
  source 1..19: mol_type = other RNA
gtgactgtgaagcccgtgg

SEQ ID NO: 21785 - RNA, 19 nt, synthetic construct
  source 1..19: mol_type = other RNA
atgggggagtaccactggt

SEQ ID NO: 21786 - RNA, 19 nt, synthetic construct
  source 1..19: mol_type = other RNA
ggagccggtggccgtgatc

SEQ ID NO: 21787 - RNA, 19 nt, synthetic construct
  source 1..19: mol_type = other RNA
gcggtggtggtcagcactg

SEQ ID NO: 21788 - RNA, 19 nt, synthetic construct
  source 1..19: mol_type = other RNA
gtgctgggtggtaccggtg

SEQ ID NO: 21789 - RNA, 19 nt, synthetic construct
  source 1..19: mol_type = other RNA
acagcccgtggtcaccacc

SEQ ID NO: 21790 - RNA, 19 nt, synthetic construct
  source 1..19: mol_type = other RNA
cagacggcccctccggccg

SEQ ID NO: 21791 - RNA, 19 nt, synthetic construct
  source 1..19: mol_type = other RNA
agcactggaagggtggttg

SEQ ID NO: 21792 - RNA, 19 nt, synthetic construct
  source 1..19: mol_type = other RNA
cttgtcagcactggaaggg

SEQ ID NO: 21793 - RNA, 19 nt, synthetic construct
  source 1..19: mol_type = other RNA
ggtcagcactgtggaggtg

SEQ ID NO: 21794 - RNA, 19 nt, synthetic construct
  source 1..19: mol_type = other RNA
tcgtggtggccttcgtggt

SEQ ID NO: 21795 - RNA, 19 nt, synthetic construct
  source 1..19: mol_type = other RNA
gggggtggacgtggaactg

SEQ ID NO: 21796 - RNA, 19 nt, synthetic construct
  source 1..19: mol_type = other RNA
tagtgctcggctctgtgag

SEQ ID NO: 21797 - RNA, 19 nt, synthetic construct
  source 1..19: mol_type = other RNA
tgtggaggtgtggacagtc

SEQ ID NO: 21798 - RNA, 19 nt, synthetic construct
  source 1..19: mol_type = other RNA
atgggggagtaccactggt

SEQ ID NO: 21799 - RNA, 19 nt, synthetic construct
  source 1..19: mol_type = other RNA
gatcgtagtggccgtggtg

SEQ ID NO: 21800 - RNA, 19 nt, synthetic construct
  source 1..19: mol_type = other RNA
ggagccggtggccgtgatc

SEQ ID NO: 21801 - RNA, 19 nt, synthetic construct
  source 1..19: mol_type = other RNA
agcactggaagggtggttg

SEQ ID NO: 21802 - RNA, 19 nt, synthetic construct
  source 1..19: mol_type = other RNA
cttgtcagcactggaaggg

SEQ ID NO: 21803 - RNA, 19 nt, synthetic construct
  source 1..19: mol_type = other RNA
ggtcagcactgtggaggtg

SEQ ID NO: 21804 - RNA, 19 nt, synthetic construct
  source 1..19: mol_type = other RNA
atccgggtcgtccccagag

SEQ ID NO: 21805 - RNA, 19 nt, synthetic construct
  source 1..19: mol_type = other RNA
tagtgctcggctctgtgag

SEQ ID NO: 21806 - RNA, 19 nt, synthetic construct
  source 1..19: mol_type = other RNA
cgggtggtccccacggtgg

SEQ ID NO: 21807 - RNA, 19 nt, synthetic construct
  source 1..19: mol_type = other RNA
ggacacgctgaaggttggc

SEQ ID NO: 21808 - RNA, 19 nt, synthetic construct
  source 1..19: mol_type = other RNA
catgcaccatggtgacagt

SEQ ID NO: 21809 - RNA, 19 nt, synthetic construct
  source 1..19: mol_type = other RNA
ccattgaaggtgacgctca

SEQ ID NO: 21810 - RNA, 19 nt, synthetic construct
  source 1..19: mol_type = other RNA
ggcccagcagccatccttt

SEQ ID NO: 21811 - RNA, 19 nt, synthetic construct
  source 1..19: mol_type = other RNA
gttgaagaatgggcccggg

SEQ ID NO: 21812 - RNA, 19 nt, synthetic construct
  source 1..19: mol_type = other RNA
tgaggtcgcacaggccacc

SEQ ID NO: 21813 - RNA, 19 nt, synthetic construct
  source 1..19: mol_type = other RNA
gtcacacacgcaggactgg

SEQ ID NO: 21814 - RNA, 19 nt, synthetic construct
  source 1..19: mol_type = other RNA
tggttgtgttgcacacgca

SEQ ID NO: 21815 - RNA, 19 nt, synthetic construct
  source 1..19: mol_type = other RNA
tgaggtctgcagcggaagg

SEQ ID NO: 21816 - RNA, 19 nt, synthetic construct
  source 1..19: mol_type = other RNA
tggggtcagcaaatggact

SEQ ID NO: 21817 - RNA, 19 nt, synthetic construct
  source 1..19: mol_type = other RNA
ctgggcctctgctgagtac

SEQ ID NO: 21818 - RNA, 19 nt, synthetic construct
  source 1..19: mol_type = other RNA
catccacgtgggtgtaggt

SEQ ID NO: 21819 - RNA, 19 nt, synthetic construct
  source 1..19: mol_type = other RNA
tcatgatcagacaatgcac

SEQ ID NO: 21820 - RNA, 19 nt, synthetic construct
  source 1..19: mol_type = other RNA
ttcatgatcagacaatgca

SEQ ID NO: 21821 - RNA, 19 nt, synthetic construct
  source 1..19: mol_type = other RNA
cagaggaggcccaaggttt

SEQ ID NO: 21822 - RNA, 19 nt, synthetic construct
  source 1..19: mol_type = other RNA
tctggggccggtttcaccc

SEQ ID NO: 21823 - RNA, 19 nt, synthetic construct
  source 1..19: mol_type = other RNA
ctcacccttctggggccgg

SEQ ID NO: 21824 - RNA, 19 nt, synthetic construct
  source 1..19: mol_type = other RNA
cctgagtggcgccctcccg

SEQ ID NO: 21825 - RNA, 19 nt, synthetic construct
  source 1..19: mol_type = other RNA
gctctcccagggtaggact

SEQ ID NO: 21826 - RNA, 19 nt, synthetic construct
  source 1..19: mol_type = other RNA
catgcttagtttgttccag

SEQ ID NO: 21827 - RNA, 19 nt, synthetic construct
  source 1..19: mol_type = other RNA
catggacaggcggccgcct

SEQ ID NO: 21828 - RNA, 19 nt, synthetic construct
  source 1..19: mol_type = other RNA
gggtgtgctagacaccggg

SEQ ID NO: 21829 - RNA, 19 nt, synthetic construct
  source 1..19: mol_type = other RNA
gttccgcggctggcccccc

SEQ ID NO: 21830 - RNA, 19 nt, synthetic construct
  source 1..19: mol_type = other RNA
ggttgtggtagttggcact

SEQ ID NO: 21831 - RNA, 19 nt, synthetic construct
  source 1..19: mol_type = other RNA
gggtgttgccatagaacca

SEQ ID NO: 21832 - RNA, 19 nt, synthetic construct
  source 1..19: mol_type = other RNA
gggtgttgccatagaacca

SEQ ID NO: 21833 - RNA, 19 nt, synthetic construct
  source 1..19: mol_type = other RNA
gggtgttgccatagaacca

SEQ ID NO: 21834 - RNA, 19 nt, synthetic construct
  source 1..19: mol_type = other RNA
gggtgttgccatagaacca

SEQ ID NO: 21835 - RNA, 19 nt, synthetic construct
  source 1..19: mol_type = other RNA
gggtgttgccatagaacca

SEQ ID NO: 21836 - RNA, 19 nt, synthetic construct
  source 1..19: mol_type = other RNA
gacgctcacgcccagggca

SEQ ID NO: 21837 - RNA, 19 nt, synthetic construct
  source 1..19: mol_type = other RNA
cgttgaagaatgggcccgg

SEQ ID NO: 21838 - RNA, 19 nt, synthetic construct
  source 1..19: mol_type = other RNA
ggacaggcgccctggaagc

SEQ ID NO: 21839 - RNA, 19 nt, synthetic construct
  source 1..19: mol_type = other RNA
tgggtgccagggcgtccgg

SEQ ID NO: 21840 - RNA, 19 nt, synthetic construct
  source 1..19: mol_type = other RNA
ggccctggttgtggtggtc

SEQ ID NO: 21841 - RNA, 19 nt, synthetic construct
  source 1..19: mol_type = other RNA
tggccgtggtgctcacatg

SEQ ID NO: 21842 - RNA, 19 nt, synthetic construct
  source 1..19: mol_type = other RNA
gcttgtcagcactggaagg

SEQ ID NO: 21843 - RNA, 19 nt, synthetic construct
  source 1..19: mol_type = other RNA
tggccgtggtgctcacatg

SEQ ID NO: 21844 - RNA, 19 nt, synthetic construct
  source 1..19: mol_type = other RNA
atggcttgtacactttggt

SEQ ID NO: 21845 - RNA, 19 nt, synthetic construct
  source 1..19: mol_type = other RNA
ccgggaggccgttgaagtc

SEQ ID NO: 21846 - RNA, 19 nt, synthetic construct
  source 1..19: mol_type = other RNA
tgttgagggggcaggtccg

SEQ ID NO: 21847 - RNA, 19 nt, synthetic construct
  source 1..19: mol_type = other RNA
aggctgcgcccgtggcctc

SEQ ID NO: 21848 - RNA, 19 nt, synthetic construct
  source 1..19: mol_type = other RNA
cgggctctgggcggtgccc

SEQ ID NO: 21849 - RNA, 19 nt, synthetic construct
  source 1..19: mol_type = other RNA
ttggaagggtggatgtggc

SEQ ID NO: 21850 - RNA, 19 nt, synthetic construct
  source 1..19: mol_type = other RNA
gtggtcgtccctggagaag

SEQ ID NO: 21851 - RNA, 19 nt, synthetic construct
  source 1..19: mol_type = other RNA
gtggtcgtccctggagaag

SEQ ID NO: 21852 - RNA, 19 nt, synthetic construct
  source 1..19: mol_type = other RNA
ggtctgttctgggagggtc

SEQ ID NO: 21853 - RNA, 19 nt, synthetic construct
  source 1..19: mol_type = other RNA
gtggtcgtccctggagaag

SEQ ID NO: 21854 - RNA, 19 nt, synthetic construct
  source 1..19: mol_type = other RNA
cagactgcccctccggccg

SEQ ID NO: 21855 - RNA, 19 nt, synthetic construct
  source 1..19: mol_type = other RNA
ggtctgttctgggagggtc

SEQ ID NO: 21856 - RNA, 19 nt, synthetic construct
  source 1..19: mol_type = other RNA
ggtggccacgggtgtggtg

SEQ ID NO: 21857 - RNA, 19 nt, synthetic construct
  source 1..19: mol_type = other RNA
ggacagcagtcgccctcct

SEQ ID NO: 21858 - RNA, 19 nt, synthetic construct
  source 1..19: mol_type = other RNA
gcttgtcagcactggaagg

SEQ ID NO: 21859 - RNA, 19 nt, synthetic construct
  source 1..19: mol_type = other RNA
tggacacgctgaaggttgg

SEQ ID NO: 21860 - RNA, 19 nt, synthetic construct
  source 1..19: mol_type = other RNA
tccgtccttgtcgtagcag

SEQ ID NO: 21861 - RNA, 19 nt, synthetic construct
  source 1..19: mol_type = other RNA
aagctcacgcgccgggtgg

SEQ ID NO: 21862 - RNA, 19 nt, synthetic construct
  source 1..19: mol_type = other RNA
catggtgtgccctgcattc

SEQ ID NO: 21863 - RNA, 19 nt, synthetic construct
  source 1..19: mol_type = other RNA
gaggggtggattgtggaca

SEQ ID NO: 21864 - RNA, 19 nt, synthetic construct
  source 1..19: mol_type = other RNA
gaggggtggattgtggaca

SEQ ID NO: 21865 - RNA, 19 nt, synthetic construct
  source 1..19: mol_type = other RNA
cacaaaggtggcacacggg

SEQ ID NO: 21866 - RNA, 19 nt, synthetic construct
  source 1..19: mol_type = other RNA
ggaggcgtgagtgccgtcc

SEQ ID NO: 21867 - RNA, 19 nt, synthetic construct
  source 1..19: mol_type = other RNA
ggaggcgtgagtgccgtcc

SEQ ID NO: 21868 - RNA, 19 nt, synthetic construct
  source 1..19: mol_type = other RNA
gagctggacccagtctgcg

SEQ ID NO: 21869 - RNA, 19 nt, synthetic construct
  source 1..19: mol_type = other RNA
atggtcaccaccgtggtta

SEQ ID NO: 21870 - RNA, 19 nt, synthetic construct
  source 1..19: mol_type = other RNA
atggtcaccaccgtggtta

SEQ ID NO: 21871 - RNA, 19 nt, synthetic construct
  source 1..19: mol_type = other RNA
gtggtcaccaccgtggtta

SEQ ID NO: 21872 - RNA, 19 nt, synthetic construct
  source 1..19: mol_type = other RNA
gtggtcaccaccgtggtta

SEQ ID NO: 21873 - RNA, 19 nt, synthetic construct
  source 1..19: mol_type = other RNA
actcctggtgctgcatgtt

SEQ ID NO: 21874 - RNA, 19 nt, synthetic construct
  source 1..19: mol_type = other RNA
gctgcgccgcccggcactc

SEQ ID NO: 21875 - RNA, 19 nt, synthetic construct
  source 1..19: mol_type = other RNA
tgtcgtctctgtcctgggc

SEQ ID NO: 21876 - RNA, 19 nt, synthetic construct
  source 1..19: mol_type = other RNA
ggatgggagttgtcccagg

SEQ ID NO: 21877 - RNA, 19 nt, synthetic construct
  source 1..19: mol_type = other RNA
ggtgtgggaagtccccgtg

SEQ ID NO: 21878 - RNA, 19 nt, synthetic construct
  source 1..19: mol_type = other RNA
ggaggaggggtggattgtg

SEQ ID NO: 21879 - RNA, 19 nt, synthetic construct
  source 1..19: mol_type = other RNA
ggtgtgggaagtccccgtg

SEQ ID NO: 21880 - RNA, 19 nt, synthetic construct
  source 1..19: mol_type = other RNA
ggaggaggggtggattgtg

SEQ ID NO: 21881 - RNA, 19 nt, synthetic construct
  source 1..19: mol_type = other RNA
tgatgggtgttgtccctgg

SEQ ID NO: 21882 - RNA, 19 nt, synthetic construct
  source 1..19: mol_type = other RNA
aggtagaggctgagattcc

SEQ ID NO: 21883 - RNA, 19 nt, synthetic construct
  source 1..19: mol_type = other RNA
cctcacccttctggggccg

SEQ ID NO: 21884 - RNA, 19 nt, synthetic construct
  source 1..19: mol_type = other RNA
ggccagctggaatccgtgc

SEQ ID NO: 21885 - RNA, 19 nt, synthetic construct
  source 1..19: mol_type = other RNA
cgcgagcaccagtgccggg

SEQ ID NO: 21886 - RNA, 19 nt, synthetic construct
  source 1..19: mol_type = other RNA
agtaggtgtcaaagtcccc

SEQ ID NO: 21887 - RNA, 19 nt, synthetic construct
  source 1..19: mol_type = other RNA
agtaggtgtcaaagtcccc

SEQ ID NO: 21888 - RNA, 19 nt, synthetic construct
  source 1..19: mol_type = other RNA
agtaggtgtcaaagtcccc

SEQ ID NO: 21889 - RNA, 19 nt, synthetic construct
  source 1..19: mol_type = other RNA
ctgcccctccggccgcacg

SEQ ID NO: 21890 - RNA, 19 nt, synthetic construct
  source 1..19: mol_type = other RNA
agtaggtgtcaaagtcccc

SEQ ID NO: 21891 - RNA, 19 nt, synthetic construct
  source 1..19: mol_type = other RNA
aggactggcagttgctgac

SEQ ID NO: 21892 - RNA, 19 nt, synthetic construct
  source 1..19: mol_type = other RNA
ggaggcgtgagtgccgtcc

SEQ ID NO: 21893 - RNA, 19 nt, synthetic construct
  source 1..19: mol_type = other RNA
gaggatccgggtcgtcccc

SEQ ID NO: 21894 - RNA, 19 nt, synthetic construct
  source 1..19: mol_type = other RNA
gtggacgtggaactggtgg

SEQ ID NO: 21895 - RNA, 19 nt, synthetic construct
  source 1..19: mol_type = other RNA
ggagccggtggctgtgatc

SEQ ID NO: 21896 - RNA, 19 nt, synthetic construct
  source 1..19: mol_type = other RNA
tagtgggagccgccccaca

SEQ ID NO: 21897 - RNA, 19 nt, synthetic construct
  source 1..19: mol_type = other RNA
agctcagggcacctccagt

SEQ ID NO: 21898 - RNA, 19 nt, synthetic construct
  source 1..19: mol_type = other RNA
cctgatgatggtgccgttg

SEQ ID NO: 21899 - RNA, 19 nt, synthetic construct
  source 1..19: mol_type = other RNA
ctttggaagcggtgctggc

SEQ ID NO: 21900 - RNA, 19 nt, synthetic construct
  source 1..19: mol_type = other RNA
ttggcactttggtagtgtg

SEQ ID NO: 21901 - RNA, 19 nt, synthetic construct
  source 1..19: mol_type = other RNA
acagtggacacgctgaagg

SEQ ID NO: 21902 - RNA, 19 nt, synthetic construct
  source 1..19: mol_type = other RNA
cacatggctgttgacccag

SEQ ID NO: 21903 - RNA, 19 nt, synthetic construct
  source 1..19: mol_type = other RNA
gtggggtcagcaaatggac

SEQ ID NO: 21904 - RNA, 19 nt, synthetic construct
  source 1..19: mol_type = other RNA
aggcatggacaggcggccg

SEQ ID NO: 21905 - RNA, 19 nt, synthetic construct
  source 1..19: mol_type = other RNA
ccgtcaggccgcacttccg

SEQ ID NO: 21906 - RNA, 19 nt, synthetic construct
  source 1..19: mol_type = other RNA
ggtgtgtgggtggtcccta

SEQ ID NO: 21907 - RNA, 19 nt, synthetic construct
  source 1..19: mol_type = other RNA
ggtgtgtgggtggtcccta

SEQ ID NO: 21908 - RNA, 19 nt, synthetic construct
  source 1..19: mol_type = other RNA
ggtgtgtgggtggtcccta

SEQ ID NO: 21909 - RNA, 19 nt, synthetic construct
  source 1..19: mol_type = other RNA
ggtgtgtgggtggtcccta

SEQ ID NO: 21910 - RNA, 19 nt, synthetic construct
  source 1..19: mol_type = other RNA
gtggccgtggaaccggtgg

SEQ ID NO: 21911 - RNA, 19 nt, synthetic construct
  source 1..19: mol_type = other RNA
gccttgcctgtcgcagctt

SEQ ID NO: 21912 - RNA, 19 nt, synthetic construct
  source 1..19: mol_type = other RNA
ctgggcggtgcccattgta

SEQ ID NO: 21913 - RNA, 19 nt, synthetic construct
  source 1..19: mol_type = other RNA
agggggtgactcggtggtt

SEQ ID NO: 21914 - RNA, 19 nt, synthetic construct
  source 1..19: mol_type = other RNA
aggtgcgggtcttgctggg

SEQ ID NO: 21915 - RNA, 19 nt, synthetic construct
  source 1..19: mol_type = other RNA
aggtgcgggtcttgctggg

SEQ ID NO: 21916 - RNA, 19 nt, synthetic construct
  source 1..19: mol_type = other RNA
ctggaagggtggttgcagt

SEQ ID NO: 21917 - RNA, 19 nt, synthetic construct
  source 1..19: mol_type = other RNA
aggtgcgggtcttgctggg

SEQ ID NO: 21918 - RNA, 19 nt, synthetic construct
  source 1..19: mol_type = other RNA
aggtgcgggtcttgctggg

SEQ ID NO: 21919 - RNA, 19 nt, synthetic construct
  source 1..19: mol_type = other RNA
ctggaagggtggttgcagt

SEQ ID NO: 21920 - RNA, 19 nt, synthetic construct
  source 1..19: mol_type = other RNA
ctggaagggtggttgcagt

SEQ ID NO: 21921 - RNA, 19 nt, synthetic construct
  source 1..19: mol_type = other RNA
tttcattcagctggactgg

SEQ ID NO: 21922 - RNA, 19 nt, synthetic construct
  source 1..19: mol_type = other RNA
cgtcccagtgacatcaggg

SEQ ID NO: 21923 - RNA, 19 nt, synthetic construct
  source 1..19: mol_type = other RNA
aggtacgcagtgctgtcca

SEQ ID NO: 21924 - RNA, 19 nt, synthetic construct
  source 1..19: mol_type = other RNA
tggaggtgtggacagtctc

SEQ ID NO: 21925 - RNA, 19 nt, synthetic construct
  source 1..19: mol_type = other RNA
ggcccggggtggtcgtccc

SEQ ID NO: 21926 - RNA, 19 nt, synthetic construct
  source 1..19: mol_type = other RNA
ggcccggggtggtcgtccc

SEQ ID NO: 21927 - RNA, 19 nt, synthetic construct
  source 1..19: mol_type = other RNA
ggcccggggtggtcgtccc

SEQ ID NO: 21928 - RNA, 19 nt, synthetic construct
  source 1..19: mol_type = other RNA
ggcccggggtggtcgtccc

SEQ ID NO: 21929 - RNA, 19 nt, synthetic construct
  source 1..19: mol_type = other RNA
acaaaggtggcacacgggc

SEQ ID NO: 21930 - RNA, 19 nt, synthetic construct
  source 1..19: mol_type = other RNA
gctcagtgaggatccgggt

SEQ ID NO: 21931 - RNA, 19 nt, synthetic construct
  source 1..19: mol_type = other RNA
ggggtcagcaaatggactc

SEQ ID NO: 21932 - RNA, 19 nt, synthetic construct
  source 1..19: mol_type = other RNA
ttctggggccggtttcacc

SEQ ID NO: 21933 - RNA, 19 nt, synthetic construct
  source 1..19: mol_type = other RNA
cgtccgtgcagttgccggc

SEQ ID NO: 21934 - RNA, 19 nt, synthetic construct
  source 1..19: mol_type = other RNA
gctgagggccgtgaagtcg

SEQ ID NO: 21935 - RNA, 19 nt, synthetic construct
  source 1..19: mol_type = other RNA
gtgggtccccacccggccc

SEQ ID NO: 21936 - RNA, 19 nt, synthetic construct
  source 1..19: mol_type = other RNA
gtttccgtccttgtcgtag

SEQ ID NO: 21937 - RNA, 19 nt, synthetic construct
  source 1..19: mol_type = other RNA
ggtggtggccgtctccagc

SEQ ID NO: 21938 - RNA, 19 nt, synthetic construct
  source 1..19: mol_type = other RNA
tggggcctcccgtggtggc

SEQ ID NO: 21939 - RNA, 19 nt, synthetic construct
  source 1..19: mol_type = other RNA
agggggtcaccgtggagcc

SEQ ID NO: 21940 - RNA, 19 nt, synthetic construct
  source 1..19: mol_type = other RNA
cagcactgtggcggtgtgg

SEQ ID NO: 21941 - RNA, 19 nt, synthetic construct
  source 1..19: mol_type = other RNA
ccagtggccacagttgtgg

SEQ ID NO: 21942 - RNA, 19 nt, synthetic construct
  source 1..19: mol_type = other RNA
cggtggttgctgctagggt

SEQ ID NO: 21943 - RNA, 19 nt, synthetic construct
  source 1..19: mol_type = other RNA
ccggtggttgctgctaggg

SEQ ID NO: 21944 - RNA, 19 nt, synthetic construct
  source 1..19: mol_type = other RNA
tggaggtggccgtggtgtg

SEQ ID NO: 21945 - RNA, 19 nt, synthetic construct
  source 1..19: mol_type = other RNA
gacggcccctccggccgca

SEQ ID NO: 21946 - RNA, 19 nt, synthetic construct
  source 1..19: mol_type = other RNA
ccagtggccacagttgtgg

SEQ ID NO: 21947 - RNA, 19 nt, synthetic construct
  source 1..19: mol_type = other RNA
gtggtggccgtggtgttcg

SEQ ID NO: 21948 - RNA, 19 nt, synthetic construct
  source 1..19: mol_type = other RNA
gacggcccctccggccgca

SEQ ID NO: 21949 - RNA, 19 nt, synthetic construct
  source 1..19: mol_type = other RNA
tgtaaagctggtagctgtg

SEQ ID NO: 21950 - RNA, 19 nt, synthetic construct
  source 1..19: mol_type = other RNA
gccggtggccctggttgtg

SEQ ID NO: 21951 - RNA, 19 nt, synthetic construct
  source 1..19: mol_type = other RNA
agggggtcaccgtggagcc

SEQ ID NO: 21952 - RNA, 19 nt, synthetic construct
  source 1..19: mol_type = other RNA
cagcactgtggcggtgtgg

SEQ ID NO: 21953 - RNA, 19 nt, synthetic construct
  source 1..19: mol_type = other RNA
ccagtggccacagttgtgg

SEQ ID NO: 21954 - RNA, 19 nt, synthetic construct
  source 1..19: mol_type = other RNA
ggggatgggagttgtccct

SEQ ID NO: 21955 - RNA, 19 nt, synthetic construct
  source 1..19: mol_type = other RNA
gtggtggccgtggtgttcg

SEQ ID NO: 21956 - RNA, 19 nt, synthetic construct
  source 1..19: mol_type = other RNA
gccggtggccctggttgtg

SEQ ID NO: 21957 - RNA, 19 nt, synthetic construct
  source 1..19: mol_type = other RNA
gcacacgcgtcgttcacgc

SEQ ID NO: 21958 - RNA, 19 nt, synthetic construct
  source 1..19: mol_type = other RNA
catttcttggacagaacgt

SEQ ID NO: 21959 - RNA, 19 nt, synthetic construct
  source 1..19: mol_type = other RNA
caggtctggttggcgtatt

SEQ ID NO: 21960 - RNA, 19 nt, synthetic construct
  source 1..19: mol_type = other RNA
ctgaaaccgctgctcaccg

SEQ ID NO: 21961 - RNA, 19 nt, synthetic construct
  source 1..19: mol_type = other RNA
tgggcatagaactcgttga

SEQ ID NO: 21962 - RNA, 19 nt, synthetic construct
  source 1..19: mol_type = other RNA
caccagtgccgggcgtagt

SEQ ID NO: 21963 - RNA, 19 nt, synthetic construct
  source 1..19: mol_type = other RNA
ccacaggggatgttctcgg

SEQ ID NO: 21964 - RNA, 19 nt, synthetic construct
  source 1..19: mol_type = other RNA
acatttcttggacagaacg

SEQ ID NO: 21965 - RNA, 19 nt, synthetic construct
  source 1..19: mol_type = other RNA
acccggatcctgtagttgt

SEQ ID NO: 21966 - RNA, 19 nt, synthetic construct
  source 1..19: mol_type = other RNA
ttctcggtgacgatgcgga

SEQ ID NO: 21967 - RNA, 19 nt, synthetic construct
  source 1..19: mol_type = other RNA
gcagttctcgttgtccgtc

SEQ ID NO: 21968 - RNA, 19 nt, synthetic construct
  source 1..19: mol_type = other RNA
caggtgttgcagtcgaccc

SEQ ID NO: 21969 - RNA, 19 nt, synthetic construct
  source 1..19: mol_type = other RNA
gggccttccaggtgttggc

SEQ ID NO: 21970 - RNA, 19 nt, synthetic construct
  source 1..19: mol_type = other RNA
aggcttgtaggtggcctcg

SEQ ID NO: 21971 - RNA, 19 nt, synthetic construct
  source 1..19: mol_type = other RNA
tctccacgaagagcttgat

SEQ ID NO: 21972 - RNA, 19 nt, synthetic construct
  source 1..19: mol_type = other RNA
ggaagtccacgtcaaacca

SEQ ID NO: 21973 - RNA, 19 nt, synthetic construct
  source 1..19: mol_type = other RNA
agccgtgcagaaacactcg

SEQ ID NO: 21974 - RNA, 19 nt, synthetic construct
  source 1..19: mol_type = other RNA
cgtcgaagttcccgcacag

SEQ ID NO: 21975 - RNA, 19 nt, synthetic construct
  source 1..19: mol_type = other RNA
ggctacgcgtggcaaagtc

SEQ ID NO: 21976 - RNA, 19 nt, synthetic construct
  source 1..19: mol_type = other RNA
gctacgcgtggcaaagtca

SEQ ID NO: 21977 - RNA, 19 nt, synthetic construct
  source 1..19: mol_type = other RNA
ccggaatttggtcaaacag

SEQ ID NO: 21978 - RNA, 19 nt, synthetic construct
  source 1..19: mol_type = other RNA
tgaagaagctcgagggtgt

SEQ ID NO: 21979 - RNA, 19 nt, synthetic construct
  source 1..19: mol_type = other RNA
agccggttttcctgaggct

SEQ ID NO: 21980 - RNA, 19 nt, synthetic construct
  source 1..19: mol_type = other RNA
cggctacgcgtggcaaagt

SEQ ID NO: 21981 - RNA, 19 nt, synthetic construct
  source 1..19: mol_type = other RNA
aagttgttcagacttgggg

SEQ ID NO: 21982 - RNA, 19 nt, synthetic construct
  source 1..19: mol_type = other RNA
aaggtgtaagaggtgccgt

SEQ ID NO: 21983 - RNA, 19 nt, synthetic construct
  source 1..19: mol_type = other RNA
tgcaggtgacgtcggcctc

SEQ ID NO: 21984 - RNA, 19 nt, synthetic construct
  source 1..19: mol_type = other RNA
cacacaggcgcccgcgtca

SEQ ID NO: 21985 - RNA, 19 nt, synthetic construct
  source 1..19: mol_type = other RNA
aggatcagctcgtagctct

SEQ ID NO: 21986 - RNA, 19 nt, synthetic construct
  source 1..19: mol_type = other RNA
ttttaggcagggtgccccg

SEQ ID NO: 21987 - RNA, 19 nt, synthetic construct
  source 1..19: mol_type = other RNA
tccacgtcaaaccactctg

SEQ ID NO: 21988 - RNA, 19 nt, synthetic construct
  source 1..19: mol_type = other RNA
ggtgatgttggctgccgac

SEQ ID NO: 21989 - RNA, 19 nt, synthetic construct
  source 1..19: mol_type = other RNA
acaggtctggttggcgtat

SEQ ID NO: 21990 - RNA, 19 nt, synthetic construct
  source 1..19: mol_type = other RNA
cacacgcgtcgttcacgca

SEQ ID NO: 21991 - RNA, 19 nt, synthetic construct
  source 1..19: mol_type = other RNA
agctcgtagctctccacga

SEQ ID NO: 21992 - RNA, 19 nt, synthetic construct
  source 1..19: mol_type = other RNA
tttttaggcagggtgcccc

SEQ ID NO: 21993 - RNA, 19 nt, synthetic construct
  source 1..19: mol_type = other RNA
gcagacctcgcggacacac

SEQ ID NO: 21994 - RNA, 19 nt, synthetic construct
  source 1..19: mol_type = other RNA
cactgctccgtgggcccat

SEQ ID NO: 21995 - RNA, 19 nt, synthetic construct
  source 1..19: mol_type = other RNA
ggcactccgcaaaggccgg

SEQ ID NO: 21996 - RNA, 19 nt, synthetic construct
  source 1..19: mol_type = other RNA
cgcccgcgtcattgaggaa

SEQ ID NO: 21997 - RNA, 19 nt, synthetic construct
  source 1..19: mol_type = other RNA
gacgatgcggaaggtcccg

SEQ ID NO: 21998 - RNA, 19 nt, synthetic construct
  source 1..19: mol_type = other RNA
gaggatcagctcgtagctc

SEQ ID NO: 21999 - RNA, 19 nt, synthetic construct
  source 1..19: mol_type = other RNA
ggaggatcagctcgtagct

SEQ ID NO: 22000 - RNA, 19 nt, synthetic construct
  source 1..19: mol_type = other RNA
cccactggggttccggcag

SEQ ID NO: 22001 - RNA, 19 nt, synthetic construct
  source 1..19: mol_type = other RNA
tgcccactggggttccggc

SEQ ID NO: 22002 - RNA, 19 nt, synthetic construct
  source 1..19: mol_type = other RNA
cttcatctggtcctcattg

SEQ ID NO: 22003 - RNA, 19 nt, synthetic construct
  source 1..19: mol_type = other RNA
ggccacgcacttcatctgg

SEQ ID NO: 22004 - RNA, 19 nt, synthetic construct
  source 1..19: mol_type = other RNA
agttgttcagacttggggt

SEQ ID NO: 22005 - RNA, 19 nt, synthetic construct
  source 1..19: mol_type = other RNA
tgatcttatcgtaggactc

SEQ ID NO: 22006 - RNA, 19 nt, synthetic construct
  source 1..19: mol_type = other RNA
cgtggtggtcagcactttg

SEQ ID NO: 22007 - RNA, 19 nt, synthetic construct
  source 1..19: mol_type = other RNA
ctggttgttggtgcaggtg

SEQ ID NO: 22008 - RNA, 19 nt, synthetic construct
  source 1..19: mol_type = other RNA
ctctcttgtactcaaagcc

SEQ ID NO: 22009 - RNA, 19 nt, synthetic construct
  source 1..19: mol_type = other RNA
ggggccacagggcacgtat

SEQ ID NO: 22010 - RNA, 19 nt, synthetic construct
  source 1..19: mol_type = other RNA
atgcactcgcactcatagt

SEQ ID NO: 22011 - RNA, 19 nt, synthetic construct
  source 1..19: mol_type = other RNA
gtcttccggtcccaggaca

SEQ ID NO: 22012 - RNA, 19 nt, synthetic construct
  source 1..19: mol_type = other RNA
ggggtgtgggaagtcaccg

SEQ ID NO: 22013 - RNA, 19 nt, synthetic construct
  source 1..19: mol_type = other RNA
ggttccggcaggtttttag

SEQ ID NO: 22014 - RNA, 19 nt, synthetic construct
  source 1..19: mol_type = other RNA
caggttcccaaactggagc

SEQ ID NO: 22015 - RNA, 19 nt, synthetic construct
  source 1..19: mol_type = other RNA
acagacacagccggacacg

SEQ ID NO: 22016 - RNA, 19 nt, synthetic construct
  source 1..19: mol_type = other RNA
caggtgcaggcctcaaggc

SEQ ID NO: 22017 - RNA, 19 nt, synthetic construct
  source 1..19: mol_type = other RNA
gttgcagcagaacacacgg

SEQ ID NO: 22018 - RNA, 19 nt, synthetic construct
  source 1..19: mol_type = other RNA
gttgcagcagaacacacgg

SEQ ID NO: 22019 - RNA, 19 nt, synthetic construct
  source 1..19: mol_type = other RNA
gttgcagcagaacacacgg

SEQ ID NO: 22020 - RNA, 19 nt, synthetic construct
  source 1..19: mol_type = other RNA
gttgcagcagaacacacgg

SEQ ID NO: 22021 - RNA, 19 nt, synthetic construct
  source 1..19: mol_type = other RNA
ggccgtgtccccgccgtcc

SEQ ID NO: 22022 - RNA, 19 nt, synthetic construct
  source 1..19: mol_type = other RNA
tggccatccccgtaggcca

SEQ ID NO: 22023 - RNA, 19 nt, synthetic construct
  source 1..19: mol_type = other RNA
cgatgcggaaggtcccgtg

SEQ ID NO: 22024 - RNA, 19 nt, synthetic construct
  source 1..19: mol_type = other RNA
acttggtggagtcaacctg

SEQ ID NO: 22025 - RNA, 19 nt, synthetic construct
  source 1..19: mol_type = other RNA
cgtcccctccaagttgttc

SEQ ID NO: 22026 - RNA, 19 nt, synthetic construct
  source 1..19: mol_type = other RNA
gggctgctcacagacggcc

SEQ ID NO: 22027 - RNA, 19 nt, synthetic construct
  source 1..19: mol_type = other RNA
gggctgctcacagacggcc

SEQ ID NO: 22028 - RNA, 19 nt, synthetic construct
  source 1..19: mol_type = other RNA
gggctgctcacagacggcc

SEQ ID NO: 22029 - RNA, 19 nt, synthetic construct
  source 1..19: mol_type = other RNA
agggtccaggtctcattca

SEQ ID NO: 22030 - RNA, 19 nt, synthetic construct
  source 1..19: mol_type = other RNA
gtcctctccgttccacagg

SEQ ID NO: 22031 - RNA, 19 nt, synthetic construct
  source 1..19: mol_type = other RNA
gtgggcccatccaacttct

SEQ ID NO: 22032 - RNA, 19 nt, synthetic construct
  source 1..19: mol_type = other RNA
ccgtgggcccatccaactt

SEQ ID NO: 22033 - RNA, 19 nt, synthetic construct
  source 1..19: mol_type = other RNA
ctgctccgtgggcccatcc

SEQ ID NO: 22034 - RNA, 19 nt, synthetic construct
  source 1..19: mol_type = other RNA
gtgatgttggctgccgaca

SEQ ID NO: 22035 - RNA, 19 nt, synthetic construct
  source 1..19: mol_type = other RNA
gaagctcgagggtgtgaac

SEQ ID NO: 22036 - RNA, 19 nt, synthetic construct
  source 1..19: mol_type = other RNA
gtcagcctggttctggttg

SEQ ID NO: 22037 - RNA, 19 nt, synthetic construct
  source 1..19: mol_type = other RNA
ggacttggggcagttctgc

SEQ ID NO: 22038 - RNA, 19 nt, synthetic construct
  source 1..19: mol_type = other RNA
caggtgcagccgtccacag

SEQ ID NO: 22039 - RNA, 19 nt, synthetic construct
  source 1..19: mol_type = other RNA
gcacacaggcgcccgcgtc

SEQ ID NO: 22040 - RNA, 19 nt, synthetic construct
  source 1..19: mol_type = other RNA
cctgtgcttttctgcagag

SEQ ID NO: 22041 - RNA, 19 nt, synthetic construct
  source 1..19: mol_type = other RNA
atcagctcgtagctctcca

SEQ ID NO: 22042 - RNA, 19 nt, synthetic construct
  source 1..19: mol_type = other RNA
ccggtcccaggacacggcc

SEQ ID NO: 22043 - RNA, 19 nt, synthetic construct
  source 1..19: mol_type = other RNA
cgcgtggcaaagtcattga

SEQ ID NO: 22044 - RNA, 19 nt, synthetic construct
  source 1..19: mol_type = other RNA
cgcaggcctcgtagtactt

SEQ ID NO: 22045 - RNA, 19 nt, synthetic construct
  source 1..19: mol_type = other RNA
acacaggcccgcgtcgtgg

SEQ ID NO: 22046 - RNA, 19 nt, synthetic construct
  source 1..19: mol_type = other RNA
gtcctcataggtgcaggtg

SEQ ID NO: 22047 - RNA, 19 nt, synthetic construct
  source 1..19: mol_type = other RNA
gtaggcacagcaggctccg

SEQ ID NO: 22048 - RNA, 19 nt, synthetic construct
  source 1..19: mol_type = other RNA
cttggggtagtcctcatca

SEQ ID NO: 22049 - RNA, 19 nt, synthetic construct
  source 1..19: mol_type = other RNA
ttggggaagctctcggcct

SEQ ID NO: 22050 - RNA, 19 nt, synthetic construct
  source 1..19: mol_type = other RNA
tctgtccactcacacttcg

SEQ ID NO: 22051 - RNA, 19 nt, synthetic construct
  source 1..19: mol_type = other RNA
gtccacgtcaaaccactct

SEQ ID NO: 22052 - RNA, 19 nt, synthetic construct
  source 1..19: mol_type = other RNA
tggggtagctgtagtccag

SEQ ID NO: 22053 - RNA, 19 nt, synthetic construct
  source 1..19: mol_type = other RNA
tccaggctgcattccacga

SEQ ID NO: 22054 - RNA, 19 nt, synthetic construct
  source 1..19: mol_type = other RNA
tggggtagctgtagtccag

SEQ ID NO: 22055 - RNA, 19 nt, synthetic construct
  source 1..19: mol_type = other RNA
tccaggctgcattccacga

SEQ ID NO: 22056 - RNA, 19 nt, synthetic construct
  source 1..19: mol_type = other RNA
tggggtagctgtagtccag

SEQ ID NO: 22057 - RNA, 19 nt, synthetic construct
  source 1..19: mol_type = other RNA
tccaggctgcattccacga

SEQ ID NO: 22058 - RNA, 19 nt, synthetic construct
  source 1..19: mol_type = other RNA
tggggtagctgtagtccag

SEQ ID NO: 22059 - RNA, 19 nt, synthetic construct
  source 1..19: mol_type = other RNA
tccaggctgcattccacga

SEQ ID NO: 22060 - RNA, 19 nt, synthetic construct
  source 1..19: mol_type = other RNA
cacctggccaccgtgcagt

SEQ ID NO: 22061 - RNA, 19 nt, synthetic construct
  source 1..19: mol_type = other RNA
ttgtcacccacgcacctgg

SEQ ID NO: 22062 - RNA, 19 nt, synthetic construct
  source 1..19: mol_type = other RNA
ggtgcttgttcacgcaggt

SEQ ID NO: 22063 - RNA, 19 nt, synthetic construct
  source 1..19: mol_type = other RNA
gaaaccgctgctcaccgga

SEQ ID NO: 22064 - RNA, 19 nt, synthetic construct
  source 1..19: mol_type = other RNA
gctgaaaccgctgctcacc

SEQ ID NO: 22065 - RNA, 19 nt, synthetic construct
  source 1..19: mol_type = other RNA
caggtgacgtcggcctcac

SEQ ID NO: 22066 - RNA, 19 nt, synthetic construct
  source 1..19: mol_type = other RNA
atgaggacataggtgcagt

SEQ ID NO: 22067 - RNA, 19 nt, synthetic construct
  source 1..19: mol_type = other RNA
tcccaaactggagcggggt

SEQ ID NO: 22068 - RNA, 19 nt, synthetic construct
  source 1..19: mol_type = other RNA
ggcctcgtagtacttggtg

SEQ ID NO: 22069 - RNA, 19 nt, synthetic construct
  source 1..19: mol_type = other RNA
gggttccggcaggttttta

SEQ ID NO: 22070 - RNA, 19 nt, synthetic construct
  source 1..19: mol_type = other RNA
ccttccaggtgttggcgaa

SEQ ID NO: 22071 - RNA, 19 nt, synthetic construct
  source 1..19: mol_type = other RNA
aggcctcgtagtacttggt

SEQ ID NO: 22072 - RNA, 19 nt, synthetic construct
  source 1..19: mol_type = other RNA
tccagggtccaggtctcat

SEQ ID NO: 22073 - RNA, 19 nt, synthetic construct
  source 1..19: mol_type = other RNA
gtgaacagggtgatgttgg

SEQ ID NO: 22074 - RNA, 19 nt, synthetic construct
  source 1..19: mol_type = other RNA
ccgcgtcattgaggaaggt

SEQ ID NO: 22075 - RNA, 19 nt, synthetic construct
  source 1..19: mol_type = other RNA
cccgcgtcattgaggaagg

SEQ ID NO: 22076 - RNA, 19 nt, synthetic construct
  source 1..19: mol_type = other RNA
gggtgatgttggctgccga

SEQ ID NO: 22077 - RNA, 19 nt, synthetic construct
  source 1..19: mol_type = other RNA
cagccacactgggccacgc

SEQ ID NO: 22078 - RNA, 19 nt, synthetic construct
  source 1..19: mol_type = other RNA
aggagtagcagcagccggt

SEQ ID NO: 22079 - RNA, 19 nt, synthetic construct
  source 1..19: mol_type = other RNA
ggtctggttggcgtatttg

SEQ ID NO: 22080 - RNA, 19 nt, synthetic construct
  source 1..19: mol_type = other RNA
cgtagctctccacgaagag

SEQ ID NO: 22081 - RNA, 19 nt, synthetic construct
  source 1..19: mol_type = other RNA
gcactgctccgtgggccca

SEQ ID NO: 22082 - RNA, 19 nt, synthetic construct
  source 1..19: mol_type = other RNA
acaggggatgttctcggtg

SEQ ID NO: 22083 - RNA, 19 nt, synthetic construct
  source 1..19: mol_type = other RNA
gcaggtgacgtcggcctca

SEQ ID NO: 22084 - RNA, 19 nt, synthetic construct
  source 1..19: mol_type = other RNA
tccgtgggcccatccaact

SEQ ID NO: 22085 - RNA, 19 nt, synthetic construct
  source 1..19: mol_type = other RNA
cttggggcagttctgcatg

SEQ ID NO: 22086 - RNA, 19 nt, synthetic construct
  source 1..19: mol_type = other RNA
acagccggacacgcagtgt

SEQ ID NO: 22087 - RNA, 19 nt, synthetic construct
  source 1..19: mol_type = other RNA
gtgggcatagaactcgttg

SEQ ID NO: 22088 - RNA, 19 nt, synthetic construct
  source 1..19: mol_type = other RNA
gtggtgccggtggtcccac

SEQ ID NO: 22089 - RNA, 19 nt, synthetic construct
  source 1..19: mol_type = other RNA
ctacgcgtggcaaagtcat

SEQ ID NO: 22090 - RNA, 19 nt, synthetic construct
  source 1..19: mol_type = other RNA
ggcagccacagccgtgcag

SEQ ID NO: 22091 - RNA, 19 nt, synthetic construct
  source 1..19: mol_type = other RNA
ccactggggttccggcagg

SEQ ID NO: 22092 - RNA, 19 nt, synthetic construct
  source 1..19: mol_type = other RNA
ttgtagatgacgtcctggt

SEQ ID NO: 22093 - RNA, 19 nt, synthetic construct
  source 1..19: mol_type = other RNA
tgtaaggcagctcctcccg

SEQ ID NO: 22094 - RNA, 19 nt, synthetic construct
  source 1..19: mol_type = other RNA
ctgtaaggcagctcctccc

SEQ ID NO: 22095 - RNA, 19 nt, synthetic construct
  source 1..19: mol_type = other RNA
gctgtaaggcagctcctcc

SEQ ID NO: 22096 - RNA, 19 nt, synthetic construct
  source 1..19: mol_type = other RNA
actgtcctctccgttccac

SEQ ID NO: 22097 - RNA, 19 nt, synthetic construct
  source 1..19: mol_type = other RNA
gtccgggcactgctccgtg

SEQ ID NO: 22098 - RNA, 19 nt, synthetic construct
  source 1..19: mol_type = other RNA
gtgagtattccacaaaggt

SEQ ID NO: 22099 - RNA, 19 nt, synthetic construct
  source 1..19: mol_type = other RNA
cgtgagtattccacaaagg

SEQ ID NO: 22100 - RNA, 19 nt, synthetic construct
  source 1..19: mol_type = other RNA
gcgtgggcgcactggcgtg

SEQ ID NO: 22101 - RNA, 19 nt, synthetic construct
  source 1..19: mol_type = other RNA
ccgcgtgggcgcactggcg

SEQ ID NO: 22102 - RNA, 19 nt, synthetic construct
  source 1..19: mol_type = other RNA
cccgcgtgggcgcactggc

SEQ ID NO: 22103 - RNA, 19 nt, synthetic construct
  source 1..19: mol_type = other RNA
ggcactgcccgaggggcag

SEQ ID NO: 22104 - RNA, 19 nt, synthetic construct
  source 1..19: mol_type = other RNA
ccgccgtccaggctgagcg

SEQ ID NO: 22105 - RNA, 19 nt, synthetic construct
  source 1..19: mol_type = other RNA
cccggatggccgtgtcccc

SEQ ID NO: 22106 - RNA, 19 nt, synthetic construct
  source 1..19: mol_type = other RNA
acccggatggccgtgtccc

SEQ ID NO: 22107 - RNA, 19 nt, synthetic construct
  source 1..19: mol_type = other RNA
cacataggaggacagcgcg

SEQ ID NO: 22108 - RNA, 19 nt, synthetic construct
  source 1..19: mol_type = other RNA
aacagcccacgtccagcgt

SEQ ID NO: 22109 - RNA, 19 nt, synthetic construct
  source 1..19: mol_type = other RNA
gcttgtaggtggcctcgtt

SEQ ID NO: 22110 - RNA, 19 nt, synthetic construct
  source 1..19: mol_type = other RNA
tcgccatcaaaggtgatga

SEQ ID NO: 22111 - RNA, 19 nt, synthetic construct
  source 1..19: mol_type = other RNA
tcgatgaccaggaagatcc

SEQ ID NO: 22112 - RNA, 19 nt, synthetic construct
  source 1..19: mol_type = other RNA
gtacttggtggagtcaacc

SEQ ID NO: 22113 - RNA, 19 nt, synthetic construct
  source 1..19: mol_type = other RNA
gagtccgccaggacacaca

SEQ ID NO: 22114 - RNA, 19 nt, synthetic construct
  source 1..19: mol_type = other RNA
ggagtccgccaggacacac

SEQ ID NO: 22115 - RNA, 19 nt, synthetic construct
  source 1..19: mol_type = other RNA
gccacgcacttcatctggt

SEQ ID NO: 22116 - RNA, 19 nt, synthetic construct
  source 1..19: mol_type = other RNA
gtgttgtagatgacgtcct

SEQ ID NO: 22117 - RNA, 19 nt, synthetic construct
  source 1..19: mol_type = other RNA
gggtaggcacagcaggctc

SEQ ID NO: 22118 - RNA, 19 nt, synthetic construct
  source 1..19: mol_type = other RNA
gacttggggtagtcctcat

SEQ ID NO: 22119 - RNA, 19 nt, synthetic construct
  source 1..19: mol_type = other RNA
caagttgttcagacttggg

SEQ ID NO: 22120 - RNA, 19 nt, synthetic construct
  source 1..19: mol_type = other RNA
gatcttatcgtaggactca

SEQ ID NO: 22121 - RNA, 19 nt, synthetic construct
  source 1..19: mol_type = other RNA
cctgtagttgtagcacatc

SEQ ID NO: 22122 - RNA, 19 nt, synthetic construct
  source 1..19: mol_type = other RNA
cgtcaaaccactctgtcca

SEQ ID NO: 22123 - RNA, 19 nt, synthetic construct
  source 1..19: mol_type = other RNA
tccaggtctcattcacctg

SEQ ID NO: 22124 - RNA, 19 nt, synthetic construct
  source 1..19: mol_type = other RNA
ctcaccggaatttggtcaa

SEQ ID NO: 22125 - RNA, 19 nt, synthetic construct
  source 1..19: mol_type = other RNA
ccctcggtgttgttgtgga

SEQ ID NO: 22126 - RNA, 19 nt, synthetic construct
  source 1..19: mol_type = other RNA
gcagcggaaggtgggacag

SEQ ID NO: 22127 - RNA, 19 nt, synthetic construct
  source 1..19: mol_type = other RNA
ggctgtaaggcagctcctc

SEQ ID NO: 22128 - RNA, 19 nt, synthetic construct
  source 1..19: mol_type = other RNA
gggcagcgggtccgggcac

SEQ ID NO: 22129 - RNA, 19 nt, synthetic construct
  source 1..19: mol_type = other RNA
ttggggcagttctgcatgt

SEQ ID NO: 22130 - RNA, 19 nt, synthetic construct
  source 1..19: mol_type = other RNA
cctgcccttgtagtcctgg

SEQ ID NO: 22131 - RNA, 19 nt, synthetic construct
  source 1..19: mol_type = other RNA
gcctcgtagtacttggtgg

SEQ ID NO: 22132 - RNA, 19 nt, synthetic construct
  source 1..19: mol_type = other RNA
gtgccccgcagggctggta

SEQ ID NO: 22133 - RNA, 19 nt, synthetic construct
  source 1..19: mol_type = other RNA
caaaccactctgtccactc

SEQ ID NO: 22134 - RNA, 19 nt, synthetic construct
  source 1..19: mol_type = other RNA
tctcatgaggacataggtg

SEQ ID NO: 22135 - RNA, 19 nt, synthetic construct
  source 1..19: mol_type = other RNA
agatggagttgaggaacac

SEQ ID NO: 22136 - RNA, 19 nt, synthetic construct
  source 1..19: mol_type = other RNA
ggggatgttctcggtgacg

SEQ ID NO: 22137 - RNA, 19 nt, synthetic construct
  source 1..19: mol_type = other RNA
cgcgtgggcgcactggcgt

SEQ ID NO: 22138 - RNA, 19 nt, synthetic construct
  source 1..19: mol_type = other RNA
gcgggcacacaggcgcccg

SEQ ID NO: 22139 - RNA, 19 nt, synthetic construct
  source 1..19: mol_type = other RNA
gcccacgtccagcgtgtgg

SEQ ID NO: 22140 - RNA, 19 nt, synthetic construct
  source 1..19: mol_type = other RNA
gcgtaggcagccacagccg

SEQ ID NO: 22141 - RNA, 19 nt, synthetic construct
  source 1..19: mol_type = other RNA
gctggtctcggcctgagag

SEQ ID NO: 22142 - RNA, 19 nt, synthetic construct
  source 1..19: mol_type = other RNA
tgcactggtgctgcatggc

SEQ ID NO: 22143 - RNA, 19 nt, synthetic construct
  source 1..19: mol_type = other RNA
gacccggatcctgtagttg

SEQ ID NO: 22144 - RNA, 19 nt, synthetic construct
  source 1..19: mol_type = other RNA
gtgctggtctcggcctgag

SEQ ID NO: 22145 - RNA, 19 nt, synthetic construct
  source 1..19: mol_type = other RNA
tagatggagttgaggaaca

SEQ ID NO: 22146 - RNA, 19 nt, synthetic construct
  source 1..19: mol_type = other RNA
gggcagctgcgtgtagatg

SEQ ID NO: 22147 - RNA, 19 nt, synthetic construct
  source 1..19: mol_type = other RNA
gttggctgccgacaggggc

SEQ ID NO: 22148 - RNA, 19 nt, synthetic construct
  source 1..19: mol_type = other RNA
gggcaggtgcagccgtcca

SEQ ID NO: 22149 - RNA, 19 nt, synthetic construct
  source 1..19: mol_type = other RNA
ggcgggcacacaggcgccc

SEQ ID NO: 22150 - RNA, 19 nt, synthetic construct
  source 1..19: mol_type = other RNA
ccacgtccagcgtgtggca

SEQ ID NO: 22151 - RNA, 19 nt, synthetic construct
  source 1..19: mol_type = other RNA
cagcccacgtccagcgtgt

SEQ ID NO: 22152 - RNA, 19 nt, synthetic construct
  source 1..19: mol_type = other RNA
gacacagccggacacgcag

SEQ ID NO: 22153 - RNA, 19 nt, synthetic construct
  source 1..19: mol_type = other RNA
aggggatgttctcggtgac

SEQ ID NO: 22154 - RNA, 19 nt, synthetic construct
  source 1..19: mol_type = other RNA
gtgccggtggtcccacagg

SEQ ID NO: 22155 - RNA, 19 nt, synthetic construct
  source 1..19: mol_type = other RNA
gcagggtgccccgcagggc

SEQ ID NO: 22156 - RNA, 19 nt, synthetic construct
  source 1..19: mol_type = other RNA
actggggttccggcaggtt

SEQ ID NO: 22157 - RNA, 19 nt, synthetic construct
  source 1..19: mol_type = other RNA
ggccgggcttgtcgtggag

SEQ ID NO: 22158 - RNA, 19 nt, synthetic construct
  source 1..19: mol_type = other RNA
gggcctgagctggacccag

SEQ ID NO: 22159 - RNA, 19 nt, synthetic construct
  source 1..19: mol_type = other RNA
ttcctgcacaccaggccga

SEQ ID NO: 22160 - RNA, 19 nt, synthetic construct
  source 1..19: mol_type = other RNA
gtggtggctgtaccaaggg

SEQ ID NO: 22161 - RNA, 19 nt, synthetic construct
  source 1..19: mol_type = other RNA
gttgcacctcgccagtcac

SEQ ID NO: 22162 - RNA, 19 nt, synthetic construct
  source 1..19: mol_type = other RNA
gtcctcctcacaggagtag

SEQ ID NO: 22163 - RNA, 19 nt, synthetic construct
  source 1..19: mol_type = other RNA
aggggccacagggcacgta

SEQ ID NO: 22164 - RNA, 19 nt, synthetic construct
  source 1..19: mol_type = other RNA
ggggcagctgcgtgtagat

SEQ ID NO: 22165 - RNA, 19 nt, synthetic construct
  source 1..19: mol_type = other RNA
ggcactgtcctctccgttc

SEQ ID NO: 22166 - RNA, 19 nt, synthetic construct
  source 1..19: mol_type = other RNA
gtgcaggtgttgcagtcga

SEQ ID NO: 22167 - RNA, 19 nt, synthetic construct
  source 1..19: mol_type = other RNA
accaggaagatccccatgt

SEQ ID NO: 22168 - RNA, 19 nt, synthetic construct
  source 1..19: mol_type = other RNA
ccacaggtctggttggcgt

SEQ ID NO: 22169 - RNA, 19 nt, synthetic construct
  source 1..19: mol_type = other RNA
aggggcagctgcgtgtaga

SEQ ID NO: 22170 - RNA, 19 nt, synthetic construct
  source 1..19: mol_type = other RNA
gctcgtagctctccacgaa

SEQ ID NO: 22171 - RNA, 19 nt, synthetic construct
  source 1..19: mol_type = other RNA
ggctgctcacagacggccc

SEQ ID NO: 22172 - RNA, 19 nt, synthetic construct
  source 1..19: mol_type = other RNA
ggctgctcacagacggccc

SEQ ID NO: 22173 - RNA, 19 nt, synthetic construct
  source 1..19: mol_type = other RNA
ggctgctcacagacggccc

SEQ ID NO: 22174 - RNA, 19 nt, synthetic construct
  source 1..19: mol_type = other RNA
cttccaggtgttggcgaag

SEQ ID NO: 22175 - RNA, 19 nt, synthetic construct
  source 1..19: mol_type = other RNA
gctctccacgaagagcttg

SEQ ID NO: 22176 - RNA, 19 nt, synthetic construct
  source 1..19: mol_type = other RNA
ctcgtagctctccacgaag

SEQ ID NO: 22177 - RNA, 19 nt, synthetic construct
  source 1..19: mol_type = other RNA
gtggagtcaacctgggagc

SEQ ID NO: 22178 - RNA, 19 nt, synthetic construct
  source 1..19: mol_type = other RNA
gggcaggtgtccggagtcc

SEQ ID NO: 22179 - RNA, 19 nt, synthetic construct
  source 1..19: mol_type = other RNA
ggcagtgcccactggggtt

SEQ ID NO: 22180 - RNA, 19 nt, synthetic construct
  source 1..19: mol_type = other RNA
cggtggtgttgtagatgac

SEQ ID NO: 22181 - RNA, 19 nt, synthetic construct
  source 1..19: mol_type = other RNA
gggtggtcttttcggttgc

SEQ ID NO: 22182 - RNA, 19 nt, synthetic construct
  source 1..19: mol_type = other RNA
gggaagtccacgtcaaacc

SEQ ID NO: 22183 - RNA, 19 nt, synthetic construct
  source 1..19: mol_type = other RNA
tgggaagtccacgtcaaac

SEQ ID NO: 22184 - RNA, 19 nt, synthetic construct
  source 1..19: mol_type = other RNA
ggggtagctgtagtccagc

SEQ ID NO: 22185 - RNA, 19 nt, synthetic construct
  source 1..19: mol_type = other RNA
ggggtagctgtagtccagc

SEQ ID NO: 22186 - RNA, 19 nt, synthetic construct
  source 1..19: mol_type = other RNA
ggggtagctgtagtccagc

SEQ ID NO: 22187 - RNA, 19 nt, synthetic construct
  source 1..19: mol_type = other RNA
ggggtagctgtagtccagc

SEQ ID NO: 22188 - RNA, 19 nt, synthetic construct
  source 1..19: mol_type = other RNA
ggcaggtgcttgttcacgc

SEQ ID NO: 22189 - RNA, 19 nt, synthetic construct
  source 1..19: mol_type = other RNA
acaagcacgccgttcttgc

SEQ ID NO: 22190 - RNA, 19 nt, synthetic construct
  source 1..19: mol_type = other RNA
gaagacagtgacgggtgga

SEQ ID NO: 22191 - RNA, 19 nt, synthetic construct
  source 1..19: mol_type = other RNA
ggctcaggctggggaagac

SEQ ID NO: 22192 - RNA, 19 nt, synthetic construct
  source 1..19: mol_type = other RNA
caggccacaggtctggttg

SEQ ID NO: 22193 - RNA, 19 nt, synthetic construct
  source 1..19: mol_type = other RNA
actgctccgtgggcccatc

SEQ ID NO: 22194 - RNA, 19 nt, synthetic construct
  source 1..19: mol_type = other RNA
cgggtccgggcactgctcc

SEQ ID NO: 22195 - RNA, 19 nt, synthetic construct
  source 1..19: mol_type = other RNA
gcgggtccgggcactgctc

SEQ ID NO: 22196 - RNA, 19 nt, synthetic construct
  source 1..19: mol_type = other RNA
aagggcagcgggtccgggc

SEQ ID NO: 22197 - RNA, 19 nt, synthetic construct
  source 1..19: mol_type = other RNA
tggggcagcggcacaggtc

SEQ ID NO: 22198 - RNA, 19 nt, synthetic construct
  source 1..19: mol_type = other RNA
ggcaggtggggcagcggca

SEQ ID NO: 22199 - RNA, 19 nt, synthetic construct
  source 1..19: mol_type = other RNA
ggcaggcagccagagtgcg

SEQ ID NO: 22200 - RNA, 19 nt, synthetic construct
  source 1..19: mol_type = other RNA
gtgccagggcacggcaggt

SEQ ID NO: 22201 - RNA, 19 nt, synthetic construct
  source 1..19: mol_type = other RNA
gccgtccaggctgagcgtc

SEQ ID NO: 22202 - RNA, 19 nt, synthetic construct
  source 1..19: mol_type = other RNA
ggcagctgcgtgtagatgg

SEQ ID NO: 22203 - RNA, 19 nt, synthetic construct
  source 1..19: mol_type = other RNA
tggctgccgacaggggcag

SEQ ID NO: 22204 - RNA, 19 nt, synthetic construct
  source 1..19: mol_type = other RNA
gcctgacaaacacctgcat

SEQ ID NO: 22205 - RNA, 19 nt, synthetic construct
  source 1..19: mol_type = other RNA
ttgaagttcccacacaggc

SEQ ID NO: 22206 - RNA, 19 nt, synthetic construct
  source 1..19: mol_type = other RNA
gttgaagttcccacacagg

SEQ ID NO: 22207 - RNA, 19 nt, synthetic construct
  source 1..19: mol_type = other RNA
ggttgaagttcccacacag

SEQ ID NO: 22208 - RNA, 19 nt, synthetic construct
  source 1..19: mol_type = other RNA
cctggttctggttgaagtt

SEQ ID NO: 22209 - RNA, 19 nt, synthetic construct
  source 1..19: mol_type = other RNA
gcctggttctggttgaagt

SEQ ID NO: 22210 - RNA, 19 nt, synthetic construct
  source 1..19: mol_type = other RNA
ttccaggtgttggcgaagg

SEQ ID NO: 22211 - RNA, 19 nt, synthetic construct
  source 1..19: mol_type = other RNA
cctgggccttccaggtgtt

SEQ ID NO: 22212 - RNA, 19 nt, synthetic construct
  source 1..19: mol_type = other RNA
gcctgggccttccaggtgt

SEQ ID NO: 22213 - RNA, 19 nt, synthetic construct
  source 1..19: mol_type = other RNA
aggcgtgcacataggagga

SEQ ID NO: 22214 - RNA, 19 nt, synthetic construct
  source 1..19: mol_type = other RNA
caggcgtgcacataggagg

SEQ ID NO: 22215 - RNA, 19 nt, synthetic construct
  source 1..19: mol_type = other RNA
acaggcgtgcacataggag

SEQ ID NO: 22216 - RNA, 19 nt, synthetic construct
  source 1..19: mol_type = other RNA
ggcacaggcgtgcacatag

SEQ ID NO: 22217 - RNA, 19 nt, synthetic construct
  source 1..19: mol_type = other RNA
cggcacaggcgtgcacata

SEQ ID NO: 22218 - RNA, 19 nt, synthetic construct
  source 1..19: mol_type = other RNA
gcggcacaggcgtgcacat

SEQ ID NO: 22219 - RNA, 19 nt, synthetic construct
  source 1..19: mol_type = other RNA
agttctgcatgtacttggt

SEQ ID NO: 22220 - RNA, 19 nt, synthetic construct
  source 1..19: mol_type = other RNA
gcagttctgcatgtacttg

SEQ ID NO: 22221 - RNA, 19 nt, synthetic construct
  source 1..19: mol_type = other RNA
cgggcacacaggcgcccgc

SEQ ID NO: 22222 - RNA, 19 nt, synthetic construct
  source 1..19: mol_type = other RNA
cccacgtccagcgtgtggc

SEQ ID NO: 22223 - RNA, 19 nt, synthetic construct
  source 1..19: mol_type = other RNA
agcccacgtccagcgtgtg

SEQ ID NO: 22224 - RNA, 19 nt, synthetic construct
  source 1..19: mol_type = other RNA
gctgaaacagcccacgtcc

SEQ ID NO: 22225 - RNA, 19 nt, synthetic construct
  source 1..19: mol_type = other RNA
acacagccggacacgcagt

SEQ ID NO: 22226 - RNA, 19 nt, synthetic construct
  source 1..19: mol_type = other RNA
tccaggcttgtaggtggcc

SEQ ID NO: 22227 - RNA, 19 nt, synthetic construct
  source 1..19: mol_type = other RNA
tctccaggcttgtaggtgg

SEQ ID NO: 22228 - RNA, 19 nt, synthetic construct
  source 1..19: mol_type = other RNA
ccacgcaggtgcccaggca

SEQ ID NO: 22229 - RNA, 19 nt, synthetic construct
  source 1..19: mol_type = other RNA
tcaaaggtgatgaagtggc

SEQ ID NO: 22230 - RNA, 19 nt, synthetic construct
  source 1..19: mol_type = other RNA
tgcggaaggtcccgtgggt

SEQ ID NO: 22231 - RNA, 19 nt, synthetic construct
  source 1..19: mol_type = other RNA
gttctcggtgacgatgcgg

SEQ ID NO: 22232 - RNA, 19 nt, synthetic construct
  source 1..19: mol_type = other RNA
gtggtcccacaggggatgt

SEQ ID NO: 22233 - RNA, 19 nt, synthetic construct
  source 1..19: mol_type = other RNA
ctccacgaagagcttgatg

SEQ ID NO: 22234 - RNA, 19 nt, synthetic construct
  source 1..19: mol_type = other RNA
ctctccacgaagagcttga

SEQ ID NO: 22235 - RNA, 19 nt, synthetic construct
  source 1..19: mol_type = other RNA
tcgtagctctccacgaaga

SEQ ID NO: 22236 - RNA, 19 nt, synthetic construct
  source 1..19: mol_type = other RNA
gatcagctcgtagctctcc

SEQ ID NO: 22237 - RNA, 19 nt, synthetic construct
  source 1..19: mol_type = other RNA
gggtctcgatgaccaggaa

SEQ ID NO: 22238 - RNA, 19 nt, synthetic construct
  source 1..19: mol_type = other RNA
ttgtagtcctggtgcagtc

SEQ ID NO: 22239 - RNA, 19 nt, synthetic construct
  source 1..19: mol_type = other RNA
gcagaccctgcccttgtag

SEQ ID NO: 22240 - RNA, 19 nt, synthetic construct
  source 1..19: mol_type = other RNA
tggcaaagtcattgatggc

SEQ ID NO: 22241 - RNA, 19 nt, synthetic construct
  source 1..19: mol_type = other RNA
tagtacttggtggagtcaa

SEQ ID NO: 22242 - RNA, 19 nt, synthetic construct
  source 1..19: mol_type = other RNA
cctgggcgtaggcagccac

SEQ ID NO: 22243 - RNA, 19 nt, synthetic construct
  source 1..19: mol_type = other RNA
gcctgggcgtaggcagcca

SEQ ID NO: 22244 - RNA, 19 nt, synthetic construct
  source 1..19: mol_type = other RNA
acacacaggcccgcgtcgt

SEQ ID NO: 22245 - RNA, 19 nt, synthetic construct
  source 1..19: mol_type = other RNA
gttgtagaagtcacagaac

SEQ ID NO: 22246 - RNA, 19 nt, synthetic construct
  source 1..19: mol_type = other RNA
gctggtagtgccactcaca

SEQ ID NO: 22247 - RNA, 19 nt, synthetic construct
  source 1..19: mol_type = other RNA
ggggttccggcaggttttt

SEQ ID NO: 22248 - RNA, 19 nt, synthetic construct
  source 1..19: mol_type = other RNA
tggggttccggcaggtttt

SEQ ID NO: 22249 - RNA, 19 nt, synthetic construct
  source 1..19: mol_type = other RNA
actgggccacgcacttcat

SEQ ID NO: 22250 - RNA, 19 nt, synthetic construct
  source 1..19: mol_type = other RNA
ctgtcctcataggtgcagg

SEQ ID NO: 22251 - RNA, 19 nt, synthetic construct
  source 1..19: mol_type = other RNA
gggctggcaggtggtggta

SEQ ID NO: 22252 - RNA, 19 nt, synthetic construct
  source 1..19: mol_type = other RNA
tctgtccactgacaccggg

SEQ ID NO: 22253 - RNA, 19 nt, synthetic construct
  source 1..19: mol_type = other RNA
accactctgtccactgaca

SEQ ID NO: 22254 - RNA, 19 nt, synthetic construct
  source 1..19: mol_type = other RNA
agacttggggtagtcctca

SEQ ID NO: 22255 - RNA, 19 nt, synthetic construct
  source 1..19: mol_type = other RNA
gtcccctccaagttgttca

SEQ ID NO: 22256 - RNA, 19 nt, synthetic construct
  source 1..19: mol_type = other RNA
atcttatcgtaggactcaa

SEQ ID NO: 22257 - RNA, 19 nt, synthetic construct
  source 1..19: mol_type = other RNA
cactctatgtccttaggct

SEQ ID NO: 22258 - RNA, 19 nt, synthetic construct
  source 1..19: mol_type = other RNA
actctgtccactcacactt

SEQ ID NO: 22259 - RNA, 19 nt, synthetic construct
  source 1..19: mol_type = other RNA
cactctgtccactcacact

SEQ ID NO: 22260 - RNA, 19 nt, synthetic construct
  source 1..19: mol_type = other RNA
ggtgtgggaagtcaccgtg

SEQ ID NO: 22261 - RNA, 19 nt, synthetic construct
  source 1..19: mol_type = other RNA
cgcagggggacaccaggct

SEQ ID NO: 22262 - RNA, 19 nt, synthetic construct
  source 1..19: mol_type = other RNA
tccacgacctggcccaact

SEQ ID NO: 22263 - RNA, 19 nt, synthetic construct
  source 1..19: mol_type = other RNA
gaagcacatcttgaacttc

SEQ ID NO: 22264 - RNA, 19 nt, synthetic construct
  source 1..19: mol_type = other RNA
cgcagggggacaccaggct

SEQ ID NO: 22265 - RNA, 19 nt, synthetic construct
  source 1..19: mol_type = other RNA
tccacgacctggcccaact

SEQ ID NO: 22266 - RNA, 19 nt, synthetic construct
  source 1..19: mol_type = other RNA
gaagcacatcttgaacttc

SEQ ID NO: 22267 - RNA, 19 nt, synthetic construct
  source 1..19: mol_type = other RNA
ggtgtgggaagtcaccgtg

SEQ ID NO: 22268 - RNA, 19 nt, synthetic construct
  source 1..19: mol_type = other RNA
cgcagggggacaccaggct

SEQ ID NO: 22269 - RNA, 19 nt, synthetic construct
  source 1..19: mol_type = other RNA
tccacgacctggcccaact

SEQ ID NO: 22270 - RNA, 19 nt, synthetic construct
  source 1..19: mol_type = other RNA
gaagcacatcttgaacttc

SEQ ID NO: 22271 - RNA, 19 nt, synthetic construct
  source 1..19: mol_type = other RNA
tccacgacctggcccaact

SEQ ID NO: 22272 - RNA, 19 nt, synthetic construct
  source 1..19: mol_type = other RNA
gaagcacatcttgaacttc

SEQ ID NO: 22273 - RNA, 19 nt, synthetic construct
  source 1..19: mol_type = other RNA
caggtctcattcacctgcc

SEQ ID NO: 22274 - RNA, 19 nt, synthetic construct
  source 1..19: mol_type = other RNA
gggtccaggtctcattcac

SEQ ID NO: 22275 - RNA, 19 nt, synthetic construct
  source 1..19: mol_type = other RNA
cagggtccaggtctcattc

SEQ ID NO: 22276 - RNA, 19 nt, synthetic construct
  source 1..19: mol_type = other RNA
ccagggtccaggtctcatt

SEQ ID NO: 22277 - RNA, 19 nt, synthetic construct
  source 1..19: mol_type = other RNA
gcaggtgcttgttcacgca

SEQ ID NO: 22278 - RNA, 19 nt, synthetic construct
  source 1..19: mol_type = other RNA
tgatgggcaggtgcttgtt

SEQ ID NO: 22279 - RNA, 19 nt, synthetic construct
  source 1..19: mol_type = other RNA
aggacataggtgcagttgc

SEQ ID NO: 22280 - RNA, 19 nt, synthetic construct
  source 1..19: mol_type = other RNA
gaggacataggtgcagttg

SEQ ID NO: 22281 - RNA, 19 nt, synthetic construct
  source 1..19: mol_type = other RNA
ctctctcatgaggacatag

SEQ ID NO: 22282 - RNA, 19 nt, synthetic construct
  source 1..19: mol_type = other RNA
aggctgtagggcagccggg

SEQ ID NO: 22283 - RNA, 19 nt, synthetic construct
  source 1..19: mol_type = other RNA
gaggctgtagggcagccgg

SEQ ID NO: 22284 - RNA, 19 nt, synthetic construct
  source 1..19: mol_type = other RNA
ggccctcggtgttgttgtg

SEQ ID NO: 22285 - RNA, 19 nt, synthetic construct
  source 1..19: mol_type = other RNA
ggttgttggtgcaggtgcc

SEQ ID NO: 22286 - RNA, 19 nt, synthetic construct
  source 1..19: mol_type = other RNA
ccctctggttgttggtgca

SEQ ID NO: 22287 - RNA, 19 nt, synthetic construct
  source 1..19: mol_type = other RNA
agtcactgcacactccccg

SEQ ID NO: 22288 - RNA, 19 nt, synthetic construct
  source 1..19: mol_type = other RNA
acacacgcaggactggcag

SEQ ID NO: 22289 - RNA, 19 nt, synthetic construct
  source 1..19: mol_type = other RNA
agcagccggttttcctgag

SEQ ID NO: 22290 - RNA, 19 nt, synthetic construct
  source 1..19: mol_type = other RNA
caggtgcactggtgctgca

SEQ ID NO: 22291 - RNA, 19 nt, synthetic construct
  source 1..19: mol_type = other RNA
agggcaccgtctcctcgtg

SEQ ID NO: 22292 - RNA, 19 nt, synthetic construct
  source 1..19: mol_type = other RNA
gcacataggaggacagcgc

SEQ ID NO: 22293 - RNA, 19 nt, synthetic construct
  source 1..19: mol_type = other RNA
cgccgtccaggctgagcgt

SEQ ID NO: 22294 - RNA, 19 nt, synthetic construct
  source 1..19: mol_type = other RNA
tctctcatgaggacatagg

SEQ ID NO: 22295 - RNA, 19 nt, synthetic construct
  source 1..19: mol_type = other RNA
aggtgccgcactggccctc

SEQ ID NO: 22296 - RNA, 19 nt, synthetic construct
  source 1..19: mol_type = other RNA
aagttcccgcacaggccgc

SEQ ID NO: 22297 - RNA, 19 nt, synthetic construct
  source 1..19: mol_type = other RNA
caggtgccgcactggccct

SEQ ID NO: 22298 - RNA, 19 nt, synthetic construct
  source 1..19: mol_type = other RNA
cgtgcagaaacactcgcag

SEQ ID NO: 22299 - RNA, 19 nt, synthetic construct
  source 1..19: mol_type = other RNA
gcaggtgccgcactggccc

SEQ ID NO: 22300 - RNA, 19 nt, synthetic construct
  source 1..19: mol_type = other RNA
tcgtcgaagttcccgcaca

SEQ ID NO: 22301 - RNA, 19 nt, synthetic construct
  source 1..19: mol_type = other RNA
cgaagttcccgcacaggcc

SEQ ID NO: 22302 - RNA, 19 nt, synthetic construct
  source 1..19: mol_type = other RNA
cccacacaggccgcacatc

SEQ ID NO: 22303 - RNA, 19 nt, synthetic construct
  source 1..19: mol_type = other RNA
tcgaagttcccgcacaggc

SEQ ID NO: 22304 - RNA, 19 nt, synthetic construct
  source 1..19: mol_type = other RNA
gtcgaagttcccgcacagg

SEQ ID NO: 22305 - RNA, 19 nt, synthetic construct
  source 1..19: mol_type = other RNA
acagccgtgcagaaacact

SEQ ID NO: 22306 - RNA, 19 nt, synthetic construct
  source 1..19: mol_type = other RNA
gccacagccgtgcagaaac

SEQ ID NO: 22307 - RNA, 19 nt, synthetic construct
  source 1..19: mol_type = other RNA
ggcgtaggcagccacagcc

SEQ ID NO: 22308 - RNA, 19 nt, synthetic construct
  source 1..19: mol_type = other RNA
aggacacacacaggcccgc

SEQ ID NO: 22309 - RNA, 19 nt, synthetic construct
  source 1..19: mol_type = other RNA
tgccccgcagggctggtag

SEQ ID NO: 22310 - RNA, 19 nt, synthetic construct
  source 1..19: mol_type = other RNA
tgcaggtgccgcactggcc

SEQ ID NO: 22311 - RNA, 19 nt, synthetic construct
  source 1..19: mol_type = other RNA
gtgcaggtgccgcactggc

SEQ ID NO: 22312 - RNA, 19 nt, synthetic construct
  source 1..19: mol_type = other RNA
tgttggtgcaggtgccgca

SEQ ID NO: 22313 - RNA, 19 nt, synthetic construct
  source 1..19: mol_type = other RNA
tgcacctcgccagtcactg

SEQ ID NO: 22314 - RNA, 19 nt, synthetic construct
  source 1..19: mol_type = other RNA
ttgcacctcgccagtcact

SEQ ID NO: 22315 - RNA, 19 nt, synthetic construct
  source 1..19: mol_type = other RNA
accggaatttggtcaaaca

SEQ ID NO: 22316 - RNA, 19 nt, synthetic construct
  source 1..19: mol_type = other RNA
cactggggctcacagcccg

SEQ ID NO: 22317 - RNA, 19 nt, synthetic construct
  source 1..19: mol_type = other RNA
cactggggctcacagcccg

SEQ ID NO: 22318 - RNA, 19 nt, synthetic construct
  source 1..19: mol_type = other RNA
tcttttcggttgctgtggt

SEQ ID NO: 22319 - RNA, 19 nt, synthetic construct
  source 1..19: mol_type = other RNA
gtatctgggggatgtcagt

SEQ ID NO: 22320 - RNA, 19 nt, synthetic construct
  source 1..19: mol_type = other RNA
tccaggacatgccacagcc

SEQ ID NO: 22321 - RNA, 19 nt, synthetic construct
  source 1..19: mol_type = other RNA
actctatgtccttaggctg

SEQ ID NO: 22322 - RNA, 19 nt, synthetic construct
  source 1..19: mol_type = other RNA
ctccgtgggcccatccaac

SEQ ID NO: 22323 - RNA, 19 nt, synthetic construct
  source 1..19: mol_type = other RNA
cctgacaaacacctgcatg

SEQ ID NO: 22324 - RNA, 19 nt, synthetic construct
  source 1..19: mol_type = other RNA
ggtggagtcaacctgggag

SEQ ID NO: 22325 - RNA, 19 nt, synthetic construct
  source 1..19: mol_type = other RNA
ggtcttttcggttgctgtg

SEQ ID NO: 22326 - RNA, 19 nt, synthetic construct
  source 1..19: mol_type = other RNA
tcaaaccactctgtccact

SEQ ID NO: 22327 - RNA, 19 nt, synthetic construct
  source 1..19: mol_type = other RNA
aggcacactggggctcaca

SEQ ID NO: 22328 - RNA, 19 nt, synthetic construct
  source 1..19: mol_type = other RNA
aggcacactggggctcaca

SEQ ID NO: 22329 - RNA, 19 nt, synthetic construct
  source 1..19: mol_type = other RNA
aggcacactggggctcaca

SEQ ID NO: 22330 - RNA, 19 nt, synthetic construct
  source 1..19: mol_type = other RNA
aggcacactggggctcaca

SEQ ID NO: 22331 - RNA, 19 nt, synthetic construct
  source 1..19: mol_type = other RNA
tgacaccggggctggcagg

SEQ ID NO: 22332 - RNA, 19 nt, synthetic construct
  source 1..19: mol_type = other RNA
ggtcctcattgaagaaggg

SEQ ID NO: 22333 - RNA, 19 nt, synthetic construct
  source 1..19: mol_type = other RNA
ttggtgcagacgccgtccc

SEQ ID NO: 22334 - RNA, 19 nt, synthetic construct
  source 1..19: mol_type = other RNA
acgacctggcccaactccc

SEQ ID NO: 22335 - RNA, 19 nt, synthetic construct
  source 1..19: mol_type = other RNA
acgacctggcccaactccc

SEQ ID NO: 22336 - RNA, 19 nt, synthetic construct
  source 1..19: mol_type = other RNA
acgacctggcccaactccc

SEQ ID NO: 22337 - RNA, 19 nt, synthetic construct
  source 1..19: mol_type = other RNA
cttggtgcagacgccgtcc

SEQ ID NO: 22338 - RNA, 19 nt, synthetic construct
  source 1..19: mol_type = other RNA
tcctgtcctcataggtgca

SEQ ID NO: 22339 - RNA, 19 nt, synthetic construct
  source 1..19: mol_type = other RNA
ggtcagcactgtgggggtg

SEQ ID NO: 22340 - RNA, 19 nt, synthetic construct
  source 1..19: mol_type = other RNA
ggtcagcactgtgggggtg

SEQ ID NO: 22341 - RNA, 19 nt, synthetic construct
  source 1..19: mol_type = other RNA
tgcaggggcactgcccgag

SEQ ID NO: 22342 - RNA, 19 nt, synthetic construct
  source 1..19: mol_type = other RNA
ctccaagttgttcagactt

SEQ ID NO: 22343 - RNA, 19 nt, synthetic construct
  source 1..19: mol_type = other RNA
gaagctctcggcctggcac

SEQ ID NO: 22344 - RNA, 19 nt, synthetic construct
  source 1..19: mol_type = other RNA
ggaagctctcggcctggca

SEQ ID NO: 22345 - RNA, 19 nt, synthetic construct
  source 1..19: mol_type = other RNA
catggggtagctgtagtcc

SEQ ID NO: 22346 - RNA, 19 nt, synthetic construct
  source 1..19: mol_type = other RNA
catggggtagctgtagtcc

SEQ ID NO: 22347 - RNA, 19 nt, synthetic construct
  source 1..19: mol_type = other RNA
catggggtagctgtagtcc

SEQ ID NO: 22348 - RNA, 19 nt, synthetic construct
  source 1..19: mol_type = other RNA
catggggtagctgtagtcc

SEQ ID NO: 22349 - RNA, 19 nt, synthetic construct
  source 1..19: mol_type = other RNA
gtagatggagttgaggaac

SEQ ID NO: 22350 - RNA, 19 nt, synthetic construct
  source 1..19: mol_type = other RNA
agaagctcgagggtgtgaa

SEQ ID NO: 22351 - RNA, 19 nt, synthetic construct
  source 1..19: mol_type = other RNA
cctggcactctatgtcctt

SEQ ID NO: 22352 - RNA, 19 nt, synthetic construct
  source 1..19: mol_type = other RNA
ggcacactggggctcacag

SEQ ID NO: 22353 - RNA, 19 nt, synthetic construct
  source 1..19: mol_type = other RNA
ggcacactggggctcacag

SEQ ID NO: 22354 - RNA, 19 nt, synthetic construct
  source 1..19: mol_type = other RNA
ggcacactggggctcacag

SEQ ID NO: 22355 - RNA, 19 nt, synthetic construct
  source 1..19: mol_type = other RNA
ggcacactggggctcacag

SEQ ID NO: 22356 - RNA, 19 nt, synthetic construct
  source 1..19: mol_type = other RNA
ctgtcctctccgttccaca

SEQ ID NO: 22357 - RNA, 19 nt, synthetic construct
  source 1..19: mol_type = other RNA
cggctgtaaggcagctcct

SEQ ID NO: 22358 - RNA, 19 nt, synthetic construct
  source 1..19: mol_type = other RNA
cagccccgggggacagaca

SEQ ID NO: 22359 - RNA, 19 nt, synthetic construct
  source 1..19: mol_type = other RNA
ccggagtccgccaggacac

SEQ ID NO: 22360 - RNA, 19 nt, synthetic construct
  source 1..19: mol_type = other RNA
gtggaagggcttggggttg

SEQ ID NO: 22361 - RNA, 19 nt, synthetic construct
  source 1..19: mol_type = other RNA
cagccacagccgtgcagaa

SEQ ID NO: 22362 - RNA, 19 nt, synthetic construct
  source 1..19: mol_type = other RNA
ccaggcaggtccaccaggc

(The sequence listing continues in the following parts.)
